United States Patent Application Publication US 2025/0333808 A1 - sequence listing, part 9

SEQ ID NO: 142688 - DNA, 80 bp, synthetic construct
  source 1..80: mol_type = other DNA
tctcctggaagagttggggccagtcaatgatctggagtgtcccggaggccccccgacggtttctggtgggcacagaggga

SEQ ID NO: 142689 - DNA, 80 bp, synthetic construct
  source 1..80: mol_type = other DNA
caagagctgggagtggttatgatgaccacttctaaaggaaaggggggcggtccccctaggcgcaagcttaaagtgaccgc

SEQ ID NO: 142690 - DNA, 80 bp, synthetic construct
  source 1..80: mol_type = other DNA
ttcgcatggttggcacgactggcagcaggttcccttttgctccaatcattttcaggagattgtgatgaaagatggaagga

SEQ ID NO: 142691 - DNA, 80 bp, synthetic construct
  source 1..80: mol_type = other DNA
caatcatggacacagaagtggaagttccagagagagcctggagctcaggctttgactgggtgacggatcattctgggaaa

SEQ ID NO: 142692 - DNA, 80 bp, synthetic construct
  source 1..80: mol_type = other DNA
gcagcagaccgggaagtagccgcatcctgtggcggtgctgtcctcgtttgccttatgatcctcactttgtcaccacacta

SEQ ID NO: 142693 - DNA, 80 bp, synthetic construct
  source 1..80: mol_type = other DNA
cctgcatgtctgctgacctggaagtcatcatgagcacttgggtcatagcgggcgggatacttgccgcattggcagcatac

SEQ ID NO: 142694 - DNA, 80 bp, synthetic construct
  source 1..80: mol_type = other DNA
gggagtgaagagggtagtaatgagcttgttggacggcagagggccagtacgatttgtgctggctcttatcacgttcttca

SEQ ID NO: 142695 - DNA, 80 bp, synthetic construct
  source 1..80: mol_type = other DNA
actgcaagcaaaagctactagagaagctcaaaaaaggacagcagccggaataatgaaaaacccaactgtcgacgggatcg

SEQ ID NO: 142696 - DNA, 80 bp, synthetic construct
  source 1..80: mol_type = other DNA
cgctgatggcatttacagcggccgtcacgagccccctcaccacgcagcagaccctactatttaacatcttaggggagtgg

SEQ ID NO: 142697 - DNA, 80 bp, synthetic construct
  source 1..80: mol_type = other DNA
ggcctccacgtcggcggcccagcgctcgtggctactgcgggcgcgctgggccgccatcttctctctgaggtcggcgttgg

SEQ ID NO: 142698 - DNA, 80 bp, synthetic construct
  source 1..80: mol_type = other DNA
ggaactgaatctggctctagcggaaggggatgcaaatctcacagtggtggtagacaaaaacgaccccactgactaccgag

SEQ ID NO: 142699 - DNA, 80 bp, synthetic construct
  source 1..80: mol_type = other DNA
ttaaggctacttgcactacacaaggtcaccatccagacgcagacctcatagaggctaatctgctatggagacagtgcatg

SEQ ID NO: 142700 - DNA, 80 bp, synthetic construct
  source 1..80: mol_type = other DNA
aagttgactggtatgaaggaaaaaatggtgaccttgtaaaactctgcgatggaaagtctggtttaaaggtttcatgcaat

SEQ ID NO: 142701 - DNA, 80 bp, synthetic construct
  source 1..80: mol_type = other DNA
gcagcagcccgtgagagcgcagcaggggacgctccgggtcgtgcacggcggttctggccgcctcccggtcctcacgcccc

SEQ ID NO: 142702 - DNA, 80 bp, synthetic construct
  source 1..80: mol_type = other DNA
tgtggtggccccatgaacaactctcggggccaatcgtgcgggtatcgtaggtgccgagccagcggggtcctaaccaccag

SEQ ID NO: 142703 - DNA, 80 bp, synthetic construct
  source 1..80: mol_type = other DNA
gcacgcgagacggtgtcgtcatataacaacagttctacaagtttgcgggcataatcgttaataaattgacagttgttttt

SEQ ID NO: 142704 - DNA, 80 bp, synthetic construct
  source 1..80: mol_type = other DNA
ggcgaatcgcggccagcatagccaggtcaagccgctcgccggggcgctggcgtttggccaggcggtcgatgtgtctgtcc

SEQ ID NO: 142705 - DNA, 80 bp, synthetic construct
  source 1..80: mol_type = other DNA
tctcggccccgcgcgaccccgaaaggcggccgtgcgacaaccagatcgcgcgcatcatccgacaggcccaggtacacgtc

SEQ ID NO: 142706 - DNA, 80 bp, synthetic construct
  source 1..80: mol_type = other DNA
tgaggaagttctagagatgcaagacttgtggctgctgcggaggtcagagaaagtgaccaactggttgcagagcaacggat

SEQ ID NO: 142707 - DNA, 80 bp, synthetic construct
  source 1..80: mol_type = other DNA
taacgcactgaatggttcgttggttatgggggagtgtggttcccgagggagtgggtcgagcgcctcggcctcggaatccg

SEQ ID NO: 142708 - DNA, 80 bp, synthetic construct
  source 1..80: mol_type = other DNA
ccgttgggcagcgatagggcgctgacgatgcatcttatcaattgcggtgtaggggacgtgagcgcgtcgagatcgaccgg

SEQ ID NO: 142709 - DNA, 80 bp, synthetic construct
  source 1..80: mol_type = other DNA
atctgtgactacgccccattctaacatagaggaagtcgccttgccaacgacgggagaaatacccttctatggcaaggcaa

SEQ ID NO: 142710 - DNA, 80 bp, synthetic construct
  source 1..80: mol_type = other DNA
ccttgttcgacataatagccggggcccattggggtatcttggcaggcttggcctactattccatgcagggcaattgggcc

SEQ ID NO: 142711 - DNA, 80 bp, synthetic construct
  source 1..80: mol_type = other DNA
gaacaaacagggggagacggctgtactgagccggtagtgaaaaatgaacctgtattagaccgtcctgatcaacctggtca

SEQ ID NO: 142712 - DNA, 80 bp, synthetic construct
  source 1..80: mol_type = other DNA
aggccccatgtacaactcccggggccaattctgtgggactcgcaggtgccgcgcaagcggggtgcttaccactagcttag

SEQ ID NO: 142713 - DNA, 80 bp, synthetic construct
  source 1..80: mol_type = other DNA
gtatcggcaccgtcctagaccaagcggaaacagctggagtccgtctcacggtcctagctaccgcaactccccccggctca

SEQ ID NO: 142714 - DNA, 80 bp, synthetic construct
  source 1..80: mol_type = other DNA
ggaggggcggcatcgggccccgcccacggtccgccacgccccgcgcgtcattggcaggtggcgtggccgcccttctaaaa

SEQ ID NO: 142715 - DNA, 80 bp, synthetic construct
  source 1..80: mol_type = other DNA
caagaagcaagataataagtaatgtatacttaaagggtcttatatatcaaccagtaattataattgccagttttaatcag

SEQ ID NO: 142716 - DNA, 80 bp, synthetic construct
  source 1..80: mol_type = other DNA
cacgggcaccacacaccagcgggtcttttgtgttggccctaataaaaaaaaactcaggggatttttgctgtctgttggga

SEQ ID NO: 142717 - DNA, 80 bp, synthetic construct
  source 1..80: mol_type = other DNA
tttcatttctgatataccccctatttgattttggctggaatgctcccaatgcacatgatcatccacaagacccagaggaa

SEQ ID NO: 142718 - DNA, 80 bp, synthetic construct
  source 1..80: mol_type = other DNA
aacggcgggagctgggttaacgtttagtttagcattcgctctcgcctttccgcccgccccccgaccgttgtgcctttttt

SEQ ID NO: 142719 - DNA, 80 bp, synthetic construct
  source 1..80: mol_type = other DNA
caaccggaggagccgcagcccgcgctgccagcggctttgccggcctgttcacctctggggcgcaacagaacatccagctt

SEQ ID NO: 142720 - DNA, 80 bp, synthetic construct
  source 1..80: mol_type = other DNA
gttggccttctgggtttgataactgcaaatgaactcggatggctggaaaggacaaaaagtgatatagctcatctaatggg

SEQ ID NO: 142721 - DNA, 80 bp, synthetic construct
  source 1..80: mol_type = other DNA
acatgtacggggtcacctacagcatcactccacttgacctacctcagatcatccagcgccttcatggcgtggctgccttt

SEQ ID NO: 142722 - DNA, 80 bp, synthetic construct
  source 1..80: mol_type = other DNA
cagagaccctaccactccaatcacccgagctgcttgggaaacagtaagacactcccctgtcaattcttggggctgtcccg

SEQ ID NO: 142723 - DNA, 80 bp, synthetic construct
  source 1..80: mol_type = other DNA
aagacaccgagaaagagattccagaacgctcatggaatacggggtttgaatggattacggactatcaaggaaagacagtg

SEQ ID NO: 142724 - DNA, 80 bp, synthetic construct
  source 1..80: mol_type = other DNA
gcaaactgcccctggcagtcatgggcgagtcttacgggttccagtattcacctaaggcacgggtggatcacctcctcaag

SEQ ID NO: 142725 - DNA, 80 bp, synthetic construct
  source 1..80: mol_type = other DNA
gaaacagcgttcccagacagacaaccagctcgcggtgttccttatttgcgttctgacgctagtagggactgttgccgcca

SEQ ID NO: 142726 - DNA, 80 bp, synthetic construct
  source 1..80: mol_type = other DNA
cgaagtaatggtagaggaaaagttaccgcctctggaaacggtgcccggatcagttccgtccaaaggagaaaagcggccgc

SEQ ID NO: 142727 - DNA, 80 bp, synthetic construct
  source 1..80: mol_type = other DNA
gctcgaccccgtcttttactccttggcctactcctactcaccgtaggggtaggcatctttttgctccccgctcggtagac

SEQ ID NO: 142728 - DNA, 80 bp, synthetic construct
  source 1..80: mol_type = other DNA
tcgtggtagggatgaattcttacgcgataggatcccaactcccttgtgagcccgaaccggacgtttctgcgctgacctcg

SEQ ID NO: 142729 - DNA, 80 bp, synthetic construct
  source 1..80: mol_type = other DNA
ttcataacattacgcaaaaatgcaattgctccatctatacaggccacgtcaccggccacaggatggcttgggatatgatg

SEQ ID NO: 142730 - DNA, 80 bp, synthetic construct
  source 1..80: mol_type = other DNA
catgtccaccagggtttggctgaaagtcagagaacacaacactactgactgcgacagctcaataattgggacggctgtta

SEQ ID NO: 142731 - DNA, 80 bp, synthetic construct
  source 1..80: mol_type = other DNA
tgctgctgctattcgccggcgtcggcgcggaaacccacgtcaccgggggacaagccggtcacactgtgcatcggttcacc

SEQ ID NO: 142732 - DNA, 80 bp, synthetic construct
  source 1..80: mol_type = other DNA
gtctctggttaatgctgctcataaccaacgttgaagcagcagtggaaaggcttgtcgtcctcaatgcggctagcgccgcc

SEQ ID NO: 142733 - DNA, 80 bp, synthetic construct
  source 1..80: mol_type = other DNA
gccgggggactccggtggccggtccgcgcggtgcagagagtgggcactctttggggcccgggtgtcggacgcgagcgcgt

SEQ ID NO: 142734 - DNA, 80 bp, synthetic construct
  source 1..80: mol_type = other DNA
gttgggcccggaacccccgaaattcacacccacgccctgacgcccaaatcatgggtggatgtggttcgcgagccgcacat

SEQ ID NO: 142735 - DNA, 80 bp, synthetic construct
  source 1..80: mol_type = other DNA
aactcctagatgcttggtacactacccctatcggctgtggcactacccatgtacagtcaactacaccatctttaaagtaa

SEQ ID NO: 142736 - DNA, 80 bp, synthetic construct
  source 1..80: mol_type = other DNA
ggtataaaggttggggtagagtaaaaaaaagggaagttacaaaatgagtggcttcacggaaggaaacgctgtgagttttg

SEQ ID NO: 142737 - DNA, 80 bp, synthetic construct
  source 1..80: mol_type = other DNA
cggccgccgccatgaccgcaccacgctcgcgggcccccactacgcgtgcgcggtgggacacggaagcgctgtgctccccc

SEQ ID NO: 142738 - DNA, 80 bp, synthetic construct
  source 1..80: mol_type = other DNA
gaaaaacaacccttataagcataagacggactacggccatgccggcgtgaccgtaaaaaaactggtcaccgtgattaaaa

SEQ ID NO: 142739 - DNA, 80 bp, synthetic construct
  source 1..80: mol_type = other DNA
ccccgctgtcactcgttgttcgttgacccgggcgtccgccaaataaagccactgaaacccgaaacgcgagtgttgtaacg

SEQ ID NO: 142740 - DNA, 80 bp, synthetic construct
  source 1..80: mol_type = other DNA
caaatactggaagaaaacgtggaagtggaaatctggacaaaagaaggggaaaggaagaaattaaaacccagatggttgga

SEQ ID NO: 142741 - DNA, 80 bp, synthetic construct
  source 1..80: mol_type = other DNA
tggcacattaagggccgagtattccccttggccacttattcgtgtctcggtctgtgggcttttagcctcctgcttttggc

SEQ ID NO: 142742 - DNA, 80 bp, synthetic construct
  source 1..80: mol_type = other DNA
gacagcgccgcctccaggatgatgtcagcgttggggttggtgctggatgagtgcgtgcgcaaacagcgcccccacgcggg

SEQ ID NO: 142743 - DNA, 80 bp, synthetic construct
  source 1..80: mol_type = other DNA
gcgagcgtaccttaatacccccggcctccctgtctgtcaagaccacctcgaattttgggaggtggtatttacaggcctga

SEQ ID NO: 142744 - DNA, 80 bp, synthetic construct
  source 1..80: mol_type = other DNA
gcatggtcctcatgacccactttttcagcatcctccaaacgcaggagacattggataagctgcttgacttcgatttatac

SEQ ID NO: 142745 - DNA, 80 bp, synthetic construct
  source 1..80: mol_type = other DNA
gagttcctgcgctgctactcaacagaaacctcttccttttggctgtactccattatttttattttgattttctttgccac

SEQ ID NO: 142746 - DNA, 80 bp, synthetic construct
  source 1..80: mol_type = other DNA
agacgtggaaaaagccggactacgaaccacctgtggtccatggttgcccacttccgtctccacagtcccctcctgtgcct

SEQ ID NO: 142747 - DNA, 80 bp, synthetic construct
  source 1..80: mol_type = other DNA
gtgcagatggtgctcatcaagatcggagcgtgggcagggacgtatgtatatgaccatctgacaccactacacacctgggc

SEQ ID NO: 142748 - DNA, 80 bp, synthetic construct
  source 1..80: mol_type = other DNA
atgggagactgcgcggcatactccagtcaactcctggttggggaacatcattatgtatgctcctgcaatttgggtgcgca

SEQ ID NO: 142749 - DNA, 80 bp, synthetic construct
  source 1..80: mol_type = other DNA
ccccctccactttcataatcaggcagaccttcatattagaaacagatcctgctgctccaccacctgcagcgtgttcaaaa

SEQ ID NO: 142750 - DNA, 80 bp, synthetic construct
  source 1..80: mol_type = other DNA
ggccggtgccgccatcggtagcatcggtctgggcaaagtcatcgttgacatcatcagtggttatggtgctggtgtggcag

SEQ ID NO: 142751 - DNA, 80 bp, synthetic construct
  source 1..80: mol_type = other DNA
gttgattgtctgcacgcacgtgctctttccggagccagcgttgccggtgataagatacaccgcgaacggaaactccctga

SEQ ID NO: 142752 - DNA, 80 bp, synthetic construct
  source 1..80: mol_type = other DNA
agaaatcaccatgctaattgtagttggaatacttatcctagctattattttctattttacactatgccgccaaataccta

SEQ ID NO: 142753 - DNA, 80 bp, synthetic construct
  source 1..80: mol_type = other DNA
gctgcctccggactcacgtccatgttctcaattggtccgtctcagaaactccaacttgtaaacaccaatggcaggtggca

SEQ ID NO: 142754 - DNA, 80 bp, synthetic construct
  source 1..80: mol_type = other DNA
tgtggtggatccagtacttcatcgcccggaccgaagccatactacaccagtgggtgccctccttgcatgtccgaggaggc

SEQ ID NO: 142755 - DNA, 80 bp, synthetic construct
  source 1..80: mol_type = other DNA
caagagcctctttcatagaagttaaaacatgtatctggccaaagtcccacactctatggagcaatggagttctggaaagt

SEQ ID NO: 142756 - DNA, 80 bp, synthetic construct
  source 1..80: mol_type = other DNA
aggcctggggaaaaccaggtcgcccctggcccctatatgggaatgagggactcggctgggcaggatggctcctgtccccc

SEQ ID NO: 142757 - DNA, 80 bp, synthetic construct
  source 1..80: mol_type = other DNA
gcatgcgtataaataacaacttgctaattctagatgtggactacccatttgatgctcaaacaaaactacgtcttaaactg

SEQ ID NO: 142758 - DNA, 80 bp, synthetic construct
  source 1..80: mol_type = other DNA
ccatcaacgcctacaccacgggcccctgcaccccccttcctgcgccgaactacacgttcgcgctgtggagggtgtctgcg

SEQ ID NO: 142759 - DNA, 80 bp, synthetic construct
  source 1..80: mol_type = other DNA
tctcttctcacaaggcgccaagcaggacgtccagctgatcaacaccaacggcagtttgcacatcaatagcacggccttga

SEQ ID NO: 142760 - DNA, 80 bp, synthetic construct
  source 1..80: mol_type = other DNA
cggtcggtgtcccgcttggagcatcagatgtgggactccgtcaaagatgaactcaacactctgtttagagagaatgggat

SEQ ID NO: 142761 - DNA, 80 bp, synthetic construct
  source 1..80: mol_type = other DNA
ccaaagtcaactacgagaagaacgccaacgaccaccgtcttagctacaagcttccttccaagcgtcaaaaactggtgctc

SEQ ID NO: 142762 - DNA, 80 bp, synthetic construct
  source 1..80: mol_type = other DNA
gccatggagaggcggtatatcatgccggcgcggggcttcgtgtcgacgtcgcttccaatctacaccgccctcgcccaacg

SEQ ID NO: 142763 - DNA, 80 bp, synthetic construct
  source 1..80: mol_type = other DNA
cgccgttgatgtgcgaataaaagcctctttagactctgacacacctggtcctgtatatttttagaatggaagacatcaat

SEQ ID NO: 142764 - DNA, 80 bp, synthetic construct
  source 1..80: mol_type = other DNA
agagccaaggcaatgaggaggacgagcgaaacctgagagctttcacggaagctatgaccaggtattccgcccctcccggt

SEQ ID NO: 142765 - DNA, 80 bp, synthetic construct
  source 1..80: mol_type = other DNA
cccgccccaaccggaatacgacctggagtgcataacatcatgctcctccaacgtatcagtcgcccacgatgcatctggga

SEQ ID NO: 142766 - DNA, 80 bp, synthetic construct
  source 1..80: mol_type = other DNA
ccgccgttgctattattaaaaagtgtagctaaaaaatttcccgttgtatacgcctcctatgttaccgccagagacgcgtg

SEQ ID NO: 142767 - DNA, 80 bp, synthetic construct
  source 1..80: mol_type = other DNA
catctacatctttggtgcgatatgctaccggtcacatggaacttgccgaatggtttttattttcacgtacacatagttta

SEQ ID NO: 142768 - DNA, 80 bp, synthetic construct
  source 1..80: mol_type = other DNA
cactcctccatcgctatctcgggcgcgcatcaccacctgtgccaggtttaattctactagtcgtgcaaacacgccgtagt

SEQ ID NO: 142769 - DNA, 80 bp, synthetic construct
  source 1..80: mol_type = other DNA
ttccagtgtcacgcagtgcgttacggcgtaacgcactcaaagcttttcgaaggcatacgcattccggcctcattataccc

SEQ ID NO: 142770 - DNA, 80 bp, synthetic construct
  source 1..80: mol_type = other DNA
tggactttacaaaaagagaatctaaccactaccaccctccttccccttactacttatactttttcccaaaaaaaaaatta

SEQ ID NO: 142771 - DNA, 80 bp, synthetic construct
  source 1..80: mol_type = other DNA
atacgtcacggtgttgggtgccagtctcgccaaacatggctgtgcggcagcccggtgccctcacgcagggtctgcggacg

SEQ ID NO: 142772 - DNA, 80 bp, synthetic construct
  source 1..80: mol_type = other DNA
acgagatacacagcgcgtcccttaaggaaaaacttcaggagtggcggccctggctggtggttttcatgttcgcctgcgta

SEQ ID NO: 142773 - DNA, 80 bp, synthetic construct
  source 1..80: mol_type = other DNA
ggaccttaaccttcaaagtctttttcttcgggctctttccctgagcgggccgttgagttttctggagaactactccgtcc

SEQ ID NO: 142774 - DNA, 80 bp, synthetic construct
  source 1..80: mol_type = other DNA
ctagagcacatgaaggtggatcctagcgtacagccagatataaaagtacgtccgataaaaaaggtagctccaggcttagg

SEQ ID NO: 142775 - DNA, 80 bp, synthetic construct
  source 1..80: mol_type = other DNA
acgggccttgatcgctgaacaatcccctaggcgttttcgggtcgcgaccgcaagtacggcacccattcaacggcttttag

SEQ ID NO: 142776 - DNA, 80 bp, synthetic construct
  source 1..80: mol_type = other DNA
gtaagccaggcggaggcggcattggaaaacctcgtggtcctcaacgctgcttcggccgctgccaaccatggctgggagtg

SEQ ID NO: 142777 - DNA, 80 bp, synthetic construct
  source 1..80: mol_type = other DNA
ccgccggccctggcgtacgcgctatataagcccatgcggtattggatgagttcccgcgcgccccggaactcctccaccgc

SEQ ID NO: 142778 - DNA, 80 bp, synthetic construct
  source 1..80: mol_type = other DNA
cagttaggctgagggcatatcttaacacaccaggactccctgtctgtcaagaccaccttgaattctgggaaagcgtcttt

SEQ ID NO: 142779 - DNA, 80 bp, synthetic construct
  source 1..80: mol_type = other DNA
ggcagcgcaatgaacggaactgctggggacaacgctgtgctttttgatggaggggttttcagcccttatttgacgtcaag

SEQ ID NO: 142780 - DNA, 80 bp, synthetic construct
  source 1..80: mol_type = other DNA
tcttttggcgttgccccaacgggcgtacgccatggatcaggagttggccgcgtcgtgtggaggcctggtcttcatctgcc

SEQ ID NO: 142781 - DNA, 80 bp, synthetic construct
  source 1..80: mol_type = other DNA
ttgggagacaactcgacacactccagttaattcctggttgggtaatatcatactttacgcgcctaccatctgggcgcgca

SEQ ID NO: 142782 - DNA, 80 bp, synthetic construct
  source 1..80: mol_type = other DNA
cgcgaggaaggggaagtcctgggacaccctccacccccacccctcaccccacacagggcggattcaggcgtgcccggcag

SEQ ID NO: 142783 - DNA, 80 bp, synthetic construct
  source 1..80: mol_type = other DNA
tgggcctactcccttgctgtataggctcggggcggtgcaaaatgagatcactacgacacacccgatcacaaagtacatca

SEQ ID NO: 142784 - DNA, 80 bp, synthetic construct
  source 1..80: mol_type = other DNA
ttacctccatgcaaaccaccacctatacccccgcctaggaggaggaagatcgtccaactggacgaggcgtcagcgctgga

SEQ ID NO: 142785 - DNA, 80 bp, synthetic construct
  source 1..80: mol_type = other DNA
acattaacctatgcaactattggaccctcgcctttggataccgccgccgccgctgcagcttccgcggccgcttctacggc

SEQ ID NO: 142786 - DNA, 80 bp, synthetic construct
  source 1..80: mol_type = other DNA
ttgacgccaccccgcgagtgggcagcgtcgctggagcaggcgccagcagtctttccagtctcttctcacctggcccgcgg

SEQ ID NO: 142787 - DNA, 80 bp, synthetic construct
  source 1..80: mol_type = other DNA
acctcaagcgcgcccccaaggtgtactgcggtggggacgagcgcgacgtcctccgcgtcgggtcgtgcggcttctggccg

SEQ ID NO: 142788 - DNA, 80 bp, synthetic construct
  source 1..80: mol_type = other DNA
ctttctctatcttccttttggcactactctcgtgcctcacaacgccagcttcggctcttacctacggtaactccagtggg

SEQ ID NO: 142789 - DNA, 80 bp, synthetic construct
  source 1..80: mol_type = other DNA
agggggggagaggaggtatataaaccaacgaaaagcgcgggaacgtggatacggtgcttgtgtggcacgacgttgtggtt

SEQ ID NO: 142790 - DNA, 80 bp, synthetic construct
  source 1..80: mol_type = other DNA
tctggctcaaagccaaacttctgcctctcatgccaggcattccctttgtctcttgccaaaagggttataggggagtgtgg

SEQ ID NO: 142791 - DNA, 80 bp, synthetic construct
  source 1..80: mol_type = other DNA
ccacgaggcgtgccttttaccgacctagacttgactgttggcctcgtcttccttggctgttggggtcaagtcaccctcac

SEQ ID NO: 142792 - DNA, 80 bp, synthetic construct
  source 1..80: mol_type = other DNA
ttagtttttgtattaacgactcgccaaatatacgttccctccgtggtagcatccatagataaaattgttacagaaaaatc

SEQ ID NO: 142793 - DNA, 80 bp, synthetic construct
  source 1..80: mol_type = other DNA
cgttggttggcactcacggtgcggcgaatggcctgtcgtaagttttgtcgcgtttacgggggacagggcaggaggaagga

SEQ ID NO: 142794 - DNA, 80 bp, synthetic construct
  source 1..80: mol_type = other DNA
ctgccagcaacatcagcggcccgtctagcgataggccttactgctggcattacgcgcctcgaccgtgtgggatagttccc

SEQ ID NO: 142795 - DNA, 80 bp, synthetic construct
  source 1..80: mol_type = other DNA
aactaaactttatgagggagtttactatggtactaatgacggaggcaatggcaaaagatacagagtaaaagtaaacacta

SEQ ID NO: 142796 - DNA, 80 bp, synthetic construct
  source 1..80: mol_type = other DNA
caactgcaatgacagcttaaatacgggtttcttcgctgctctgttttacgcccacaagtttaacagctctggctgtcccg

SEQ ID NO: 142797 - DNA, 80 bp, synthetic construct
  source 1..80: mol_type = other DNA
gaatcgcggcttgtcggcgtggacaaagggtgcggggctagggagcttgcggaaacagaagacgcgtgggataaaagaat

SEQ ID NO: 142798 - DNA, 80 bp, synthetic construct
  source 1..80: mol_type = other DNA
tctgggtcctgctgacgacatgcgagacaagggatggaagctccttgctcccatcactgcctacgcccagcagacccgcg

SEQ ID NO: 142799 - DNA, 80 bp, synthetic construct
  source 1..80: mol_type = other DNA
tacttacagagtccagtgtctctgatgccctggctgagctcgctgctaagaccttcagcgactcggacacctctggcgtc

SEQ ID NO: 142800 - DNA, 80 bp, synthetic construct
  source 1..80: mol_type = other DNA
tggggttgcgaactattactacgcctttttgttctttgccttccatgttttgagcagcggcctttaaaatgcgcacctgc

SEQ ID NO: 142801 - DNA, 80 bp, synthetic construct
  source 1..80: mol_type = other DNA
aatcgatatctcgagacccggtcgatttcacccatcgactggtcggtttgaaaggcatcgacgtccggggttttcgtctg

SEQ ID NO: 142802 - DNA, 80 bp, synthetic construct
  source 1..80: mol_type = other DNA
gcagtcttagtttagctgacaaggtggctgcggttaattactccatgttaagtcttggaaagttttacgcccgcaagatt

SEQ ID NO: 142803 - DNA, 80 bp, synthetic construct
  source 1..80: mol_type = other DNA
gaggaggtattcctcgcggtctttccagtactcttcggcgggaaatcctttttcgtccgctcggtaagaacctaacatgt

SEQ ID NO: 142804 - DNA, 80 bp, synthetic construct
  source 1..80: mol_type = other DNA
gatctactctgacccactggcgctaaaagagttcaaagaatttgcagccggaagaaagtctctgaccctgaacctaatca

SEQ ID NO: 142805 - DNA, 80 bp, synthetic construct
  source 1..80: mol_type = other DNA
tcccacaagccatcctggatatgatttccggatcccactggggtgtcctagcgggtctggcttattattccatggtggtg

SEQ ID NO: 142806 - DNA, 80 bp, synthetic construct
  source 1..80: mol_type = other DNA
tggcgtttgacaaagatggaaatttggtagcatgggataatgaaaacgacaggcgcactctatggacaactccagacaca

SEQ ID NO: 142807 - DNA, 80 bp, synthetic construct
  source 1..80: mol_type = other DNA
tctgatgacgggcttgcaaagacgtggaaagaagaggtcaacaacagattggatgggttggctgcttgtcgctgttttgc

SEQ ID NO: 142808 - DNA, 80 bp, synthetic construct
  source 1..80: mol_type = other DNA
aaggccctgtacttcctgaatgacatggcaaaaacccgtaaggatgtgggcgagtgggagccctcagtggggttcacaga

SEQ ID NO: 142809 - DNA, 80 bp, synthetic construct
  source 1..80: mol_type = other DNA
cgccaggaggggaaaactgctccttctcgggcctgccgatgacgtcaaggacaaagggtggtcactacttgctcccatca

SEQ ID NO: 142810 - DNA, 80 bp, synthetic construct
  source 1..80: mol_type = other DNA
gggcttggcttgcggcaaatacctccaggccgccatgctcaaggttggagccctgactggtacctatgtatacaatcacc

SEQ ID NO: 142811 - DNA, 80 bp, synthetic construct
  source 1..80: mol_type = other DNA
gcccagcagaccagaggcctagtaggcacaattgtcaccagccttaccggccgcgacaagaatgaagtggaaggtgagat

SEQ ID NO: 142812 - DNA, 80 bp, synthetic construct
  source 1..80: mol_type = other DNA
ggcaagagatgggaggcaacatcaccagggtagagtctgagaacaaggtggtagttttagactcctttgagccactcgtg

SEQ ID NO: 142813 - DNA, 80 bp, synthetic construct
  source 1..80: mol_type = other DNA
ccccctcgagggggggcctggagatccggacctggagtctgatcaggtagagcttcaaactccccgccagtgtggggggg

SEQ ID NO: 142814 - DNA, 80 bp, synthetic construct
  source 1..80: mol_type = other DNA
gagtctctgttgcgagctcagacgcgcagaccccctctgatgaggttgaccaggcatcggatgctgggtcctatagctcc

SEQ ID NO: 142815 - DNA, 80 bp, synthetic construct
  source 1..80: mol_type = other DNA
aacgcctctggctgtcaggagcgcatgagctcgtgcaggcctatcacgttttttgacaaggggtgtggccagatctcgta

SEQ ID NO: 142816 - DNA, 80 bp, synthetic construct
  source 1..80: mol_type = other DNA
aggctccccctccctgttgggatgttatgtggaagtgcctgagccggctaaagcctatacttgtggggcctactccacta

SEQ ID NO: 142817 - DNA, 80 bp, synthetic construct
  source 1..80: mol_type = other DNA
accctcaagggagaggtggtagatctcggatgtggaaggggtggctggtcctactatgcggcttctcggccggcagtcat

SEQ ID NO: 142818 - DNA, 80 bp, synthetic construct
  source 1..80: mol_type = other DNA
ctcagtgacggttcctcacccgaacatcacagaggtcgcactgccgacaacaggcgaaatcccattttacgggaagggaa

SEQ ID NO: 142819 - DNA, 80 bp, synthetic construct
  source 1..80: mol_type = other DNA
atcataaacgatttataggaacggcatatgaaagagttttacaaacaatggtagaccgcgatctaaaggaggccaacgca

SEQ ID NO: 142820 - DNA, 80 bp, synthetic construct
  source 1..80: mol_type = other DNA
taaggactaagctcaaactcactccattgcctggcgcagccaacctcgacttgacggggtggttcgtggctggcttcagc

SEQ ID NO: 142821 - DNA, 80 bp, synthetic construct
  source 1..80: mol_type = other DNA
ccctcacgggtcaccttcaggtaggcgtggagcttggccatgtacgcgctcacctctttgtgggaggagaacaaccgcgt

SEQ ID NO: 142822 - DNA, 80 bp, synthetic construct
  source 1..80: mol_type = other DNA
gcccgatctgcgaattttcgtccagcacgtgctggatgaggggccggtgtgcggccacgtccgccaggctcatgcgcgtg

SEQ ID NO: 142823 - DNA, 80 bp, synthetic construct
  source 1..80: mol_type = other DNA
tacaacctaataagcaatgacagcaccttcacccagtaccgcagctggtaccttgcatacaactacggcgaccctcagac

SEQ ID NO: 142824 - DNA, 80 bp, synthetic construct
  source 1..80: mol_type = other DNA
ggtagcctggagattcggacctggagtcttatcaggtagagcttcaacctcccccccagggggggggggtagctcccggt

SEQ ID NO: 142825 - DNA, 80 bp, synthetic construct
  source 1..80: mol_type = other DNA
cccagacctggagcccgagcaggtagagcgccatgcccctccacaagagggggaggctgctcccgattcggactccaggt

SEQ ID NO: 142826 - DNA, 80 bp, synthetic construct
  source 1..80: mol_type = other DNA
ttgctgacaaaatattccagcctgagcctcaggtcggagaggaaaactggcaagaaacttttaatttctacggaggcaga

SEQ ID NO: 142827 - DNA, 80 bp, synthetic construct
  source 1..80: mol_type = other DNA
aagtgggccgccttggcggccataaaggcgccaacaaacctaggatcttgtgtactcacgccctcccggtgtagctgcag

SEQ ID NO: 142828 - DNA, 80 bp, synthetic construct
  source 1..80: mol_type = other DNA
ctcatacgcaatcgggtcccaacttccatgcgagcccgagccggacgtcatggtactcacgtccatgctcaccgatccag

SEQ ID NO: 142829 - DNA, 80 bp, synthetic construct
  source 1..80: mol_type = other DNA
gtggcatggcacattccccatcaacgccagcactaccggaccttctgtcccagcacccgcgcccaattacaagcgggccc

SEQ ID NO: 142830 - DNA, 80 bp, synthetic construct
  source 1..80: mol_type = other DNA
ctacagtggcctcttcttcttcaatctcctcttccataagggcctccccttcttcttcttctggcggcggtgtgagaggg

SEQ ID NO: 142831 - DNA, 80 bp, synthetic construct
  source 1..80: mol_type = other DNA
atggtagggtgggcgttgagatgggagtttgtcatcctcgtctttctcctcctagcagacgcacgtgtgtgcgttgcttt

SEQ ID NO: 142832 - DNA, 80 bp, synthetic construct
  source 1..80: mol_type = other DNA
tatttttcaataaaaggcattagtcccgaagaccgccggtgtgtgatgatttcgccataacacccaaaccccggatgggg

SEQ ID NO: 142833 - DNA, 80 bp, synthetic construct
  source 1..80: mol_type = other DNA
tttacagaacaactagcaacaacatgaccggttgctcacagaggactgctgcgtgccgcgacatggcatcatttgaccag

SEQ ID NO: 142834 - DNA, 80 bp, synthetic construct
  source 1..80: mol_type = other DNA
ataaggaggtcttataccagcagtacgatgagatggaagagtgctcggctgcatcaccatacatcgagcaagcccagatc

SEQ ID NO: 142835 - DNA, 80 bp, synthetic construct
  source 1..80: mol_type = other DNA
ctttatgtcaggtctgctggtaggggctctagtgtggttcctaaagcgcaagcccaggtatggaaatgaggaaaaggaaa

SEQ ID NO: 142836 - DNA, 80 bp, synthetic construct
  source 1..80: mol_type = other DNA
atataacatgatgggcaaacgtgagaaaaaacccggagaatttggaaaggccaagggaagcagagccatctggttcatgt

SEQ ID NO: 142837 - DNA, 80 bp, synthetic construct
  source 1..80: mol_type = other DNA
agtcatcactaccggagcagacaccgccgcgtgcggcgacatcatccaaggattgcccgtctccgcccgaagggtgaggg

SEQ ID NO: 142838 - DNA, 80 bp, synthetic construct
  source 1..80: mol_type = other DNA
ggtcaccttcttgtaccaccgcccggccgttggcgtcatcgtgggctgcgagctgctgctccgcttcgtggccctcggtc

SEQ ID NO: 142839 - DNA, 80 bp, synthetic construct
  source 1..80: mol_type = other DNA
caatacatctgtgatacagactgttgacttcagcttggaccccaccttctccatagagattacaaccgttccccaggacg

SEQ ID NO: 142840 - DNA, 80 bp, synthetic construct
  source 1..80: mol_type = other DNA
acttctatccgtagaagaagcctgtaagctgacgcccccacattcggccagatccaaatttggctatggggcaaaggacg

SEQ ID NO: 142841 - DNA, 80 bp, synthetic construct
  source 1..80: mol_type = other DNA
gctcgtgcgggtctgcggacctgtaccttgtcacaaggcacgctgatgttgtccctgtccgccggcggggcgacactaga

SEQ ID NO: 142842 - DNA, 80 bp, synthetic construct
  source 1..80: mol_type = other DNA
caaataacgggtcatcgtatggcatgggatatgatgatgaactggtcacctactgcagccctggtagtgtcgcagctgct

SEQ ID NO: 142843 - DNA, 80 bp, synthetic construct
  source 1..80: mol_type = other DNA
ttggccagatcttcaccttctctcccaggcaccattggacgacgcaagactgcaattgctccatctacccaggccatgtg

SEQ ID NO: 142844 - DNA, 80 bp, synthetic construct
  source 1..80: mol_type = other DNA
gccccgcaggcaagcgccgtcgccgcaccagcacccgccgccgtctggcccccgcccgcgtgcgccgcgtaactacgcgc

SEQ ID NO: 142845 - DNA, 80 bp, synthetic construct
  source 1..80: mol_type = other DNA
gcaggcctctccggattcgtaacatatttgacatccgagacatatattatgggttttaaacgtttgattgtgcaacttga

SEQ ID NO: 142846 - DNA, 80 bp, synthetic construct
  source 1..80: mol_type = other DNA
gttcgtctgcaaacactccatggtagacagaggatggggaaatggatgtggattatttggaaagggaggcattgtgacct

SEQ ID NO: 142847 - DNA, 80 bp, synthetic construct
  source 1..80: mol_type = other DNA
gcttagcctccctcctagggcattcgcctttgacagggagacagaagcatcactcggagtcggggtgctcctcgccattc

SEQ ID NO: 142848 - DNA, 80 bp, synthetic construct
  source 1..80: mol_type = other DNA
tgcatataccacgtattccccccgtattgatatgatttaaatgattatccttggttggttttggtctaacataagatata

SEQ ID NO: 142849 - DNA, 80 bp, synthetic construct
  source 1..80: mol_type = other DNA
tgcatggctgctgaccttgaggtcattaccagctcctgggtcattgccggtggcgtgcttgctgcattggctgcatactg

SEQ ID NO: 142850 - DNA, 80 bp, synthetic construct
  source 1..80: mol_type = other DNA
cttggagagttcggagtggctaaaggaagccgggccatatggtacatgtggcttgggagccgctttctggagttcgaagc

SEQ ID NO: 142851 - DNA, 80 bp, synthetic construct
  source 1..80: mol_type = other DNA
gacccatgccagtgacccactctagtgcagcgcaaagaagggggagaataggaagaaatccaaaaaatgaaaatgaccag

SEQ ID NO: 142852 - DNA, 80 bp, synthetic construct
  source 1..80: mol_type = other DNA
taaccatcaagcttgagactgtatatagaattaagtttctccataataaacgcccaatcaaaattaacaatgttataacc

SEQ ID NO: 142853 - DNA, 80 bp, synthetic construct
  source 1..80: mol_type = other DNA
ttaactcctcgggttgtcctcaacgaatgtcctcctgccgctccatcgaggagtttaggataggatggggcaacctagag

SEQ ID NO: 142854 - DNA, 80 bp, synthetic construct
  source 1..80: mol_type = other DNA
ctgcctggcaaccctgccatcgcgtcgcttatgtccttcactgctgccgtcaccagccccttaaccacccagcaaaccct

SEQ ID NO: 142855 - DNA, 80 bp, synthetic construct
  source 1..80: mol_type = other DNA
tgttcacaccatttccatgagctaatcatgaaggatggtcgtgtacttgttgttccatgtagaaaccaagatgaactgat

SEQ ID NO: 142856 - DNA, 80 bp, synthetic construct
  source 1..80: mol_type = other DNA
cgggctcgagcagtacgcgccaggctcatagcccagggtggtagcgcggccatatgtggccactacctctttaactgggc

SEQ ID NO: 142857 - DNA, 80 bp, synthetic construct
  source 1..80: mol_type = other DNA
cacatcgatgtcatcgtgatgtctgctacgctctgttctgccctctatgtgggggatgtgtgtggcgcgttgatgatagc

SEQ ID NO: 142858 - DNA, 80 bp, synthetic construct
  source 1..80: mol_type = other DNA
gccaaccaggacatttggtggcttgtgtgcttcatcagctgggcatggtatgtgcgagggcgattggtcccaatcgtcac

SEQ ID NO: 142859 - DNA, 80 bp, synthetic construct
  source 1..80: mol_type = other DNA
agccctagtttatagtcgcagaagaactccgtcgcgacgcagacgtcgacgcagagccaatttagctccagcatcagtac

SEQ ID NO: 142860 - DNA, 80 bp, synthetic construct
  source 1..80: mol_type = other DNA
cccctctccagcgtggaagctgcctctaggggagagagcccctttcccagtctgtcttccgccagcagtggtcgtgtcac

SEQ ID NO: 142861 - DNA, 80 bp, synthetic construct
  source 1..80: mol_type = other DNA
cggcactgttgctatataacataaccggtaaatctggcatgcgtattaacgcattgcccagttgacggtgcggatctata

SEQ ID NO: 142862 - DNA, 80 bp, synthetic construct
  source 1..80: mol_type = other DNA
gtggcggccagatcgttggcggagtttacttgttgccgcgcaggggccccagagtgggtgtgcgcgcgacgaggaagact

SEQ ID NO: 142863 - DNA, 80 bp, synthetic construct
  source 1..80: mol_type = other DNA
tcccgaattaccgaggaagatcccgccgcaggagaggcatggcaggcagcggcctgaaccgccgccggcggcgtgccatg

SEQ ID NO: 142864 - DNA, 80 bp, synthetic construct
  source 1..80: mol_type = other DNA
ttgggctaaggtcgctatcatcatggttatgttttcaggggtcgatgccacaacacataccatcggtggcagtgcagcta

SEQ ID NO: 142865 - DNA, 80 bp, synthetic construct
  source 1..80: mol_type = other DNA
tcgacgccaccacccggttcatcctggacaaccccgggttcgtcaccttcggctggtaccgtctcaaaccgggccggaac

SEQ ID NO: 142866 - DNA, 80 bp, synthetic construct
  source 1..80: mol_type = other DNA
catactattgtggaggactaaagaatgtaagagaagtcaaaggcctgacaaaaggaggaccaggacacgaagaacccatc

SEQ ID NO: 142867 - DNA, 80 bp, synthetic construct
  source 1..80: mol_type = other DNA
taccgggcaatccggctgtagcatcattgatgtctttctctgcagccttgaccagcccgctacccacttcaaccaccctc

SEQ ID NO: 142868 - DNA, 80 bp, synthetic construct
  source 1..80: mol_type = other DNA
tcaaccccaggaggactgggtgaacaaagccgcgaagtgatccatgtaagccctcagaaccgtctcggaaggaggacccc

SEQ ID NO: 142869 - DNA, 80 bp, synthetic construct
  source 1..80: mol_type = other DNA
accaagcttattacgtggggggcggacaccgccgcatgcggcgacatcatcgacggcttgcccgtctccgcccgcagagg

SEQ ID NO: 142870 - DNA, 80 bp, synthetic construct
  source 1..80: mol_type = other DNA
caagggcaacgtctttgccatggagatcaacctccaggccaacctgtggaagagttttctgtactcgaacgtggccctgt

SEQ ID NO: 142871 - DNA, 80 bp, synthetic construct
  source 1..80: mol_type = other DNA
catgagaataacaggacccaagacctgcatgaacacctggcaggggaccttccccataaacagctatacggagggtccat

SEQ ID NO: 142872 - DNA, 80 bp, synthetic construct
  source 1..80: mol_type = other DNA
accgagctaccacaaagctctgtggagggtgagtgctgaggagtacgttgaggtcgtcagggtaggagacagccactata

SEQ ID NO: 142873 - DNA, 80 bp, synthetic construct
  source 1..80: mol_type = other DNA
tacagaatggatattctacaagagccctttttcaacaagctcgtttgtgtgatttacccgcgacacccaaagggtccggt

SEQ ID NO: 142874 - DNA, 80 bp, synthetic construct
  source 1..80: mol_type = other DNA
agggcagggctggcgatcactcggggtcagcaatgcgccaactcccgacacgaggccctattgctgggattacccgcccc

SEQ ID NO: 142875 - DNA, 80 bp, synthetic construct
  source 1..80: mol_type = other DNA
aagagctttggccagcccccggactctggagattctggtcattccaccggcaaagacgccatggacgacagtgccaaacc

SEQ ID NO: 142876 - DNA, 80 bp, synthetic construct
  source 1..80: mol_type = other DNA
aatgccccacggactgcttccggaagaacccagaggcgacctatgccaagtgtggatcgggcccctggctcacgccgagg

SEQ ID NO: 142877 - DNA, 80 bp, synthetic construct
  source 1..80: mol_type = other DNA
agcaaccccccccggcagcatcactgtgccacatcccaacattgaggaagtggccctcaccaacgacggagaaatcccct

SEQ ID NO: 142878 - DNA, 80 bp, synthetic construct
  source 1..80: mol_type = other DNA
tgtggatgtcatggtgggcgctgccgcattctgctcagctatgtatgtgggggacctgtgcggaagcctcttccttgttg

SEQ ID NO: 142879 - DNA, 80 bp, synthetic construct
  source 1..80: mol_type = other DNA
gcagatgttttcgtatacccgaacccaggggatctcctcgtagacgcgccccccatcctcgcccaccgactcgtaaatgg

SEQ ID NO: 142880 - DNA, 80 bp, synthetic construct
  source 1..80: mol_type = other DNA
gcagggggtaagtacgtgcaggctgctctcctgagggttggagccttgaccgggacttacatcttcgaccacctggcccc

SEQ ID NO: 142881 - DNA, 80 bp, synthetic construct
  source 1..80: mol_type = other DNA
cagcagcggccccgcgagaaggcgggcaccatcacgtagtagtaaatcttgtggtgcacggtccagtccgccccccggtg

SEQ ID NO: 142882 - DNA, 80 bp, synthetic construct
  source 1..80: mol_type = other DNA
tcgtgcttccactgtgacggccaagctcctcaccactgaggaggtctgcgacctcacgcccccgcactcggcccgttcaa

SEQ ID NO: 142883 - DNA, 80 bp, synthetic construct
  source 1..80: mol_type = other DNA
tggaagttgaagattatggatttggagtcttttccacaaacatatggatgcgcttcagagaaggggtgtcagaaacatgt

SEQ ID NO: 142884 - DNA, 80 bp, synthetic construct
  source 1..80: mol_type = other DNA
cgccaaggcgctggacttcgtgcccgtcgagaacatggagacgacgatgcggtccccctccttcaccgacaattcagcac

SEQ ID NO: 142885 - DNA, 80 bp, synthetic construct
  source 1..80: mol_type = other DNA
gctgccttttcactccacggttactctccaggtgaactcaatagggttggagcctgtctcaggaaacttggggcacctcc

SEQ ID NO: 142886 - DNA, 80 bp, synthetic construct
  source 1..80: mol_type = other DNA
ataccctaacttgcggcttcgccgacctcatgggatacatcccgctcgtgggcgcccccgtaggaggcgtcgccagggcc

SEQ ID NO: 142887 - DNA, 80 bp, synthetic construct
  source 1..80: mol_type = other DNA
caggatccgtgtggcctttttcaagaagcatatccaccactatgctcaagcgatgcggccatgttacgaacggctcacgc

SEQ ID NO: 142888 - DNA, 80 bp, synthetic construct
  source 1..80: mol_type = other DNA
cgggctcttcatcactttcttccgcatcgctgtggacgacagccagctgttcgggtgagtatgcgcgttgaaaggcgggc

SEQ ID NO: 142889 - DNA, 80 bp, synthetic construct
  source 1..80: mol_type = other DNA
tggattatttggaaaaggaagtattgacacatgtgccaggttcgcctgttcaacgaaggctacggggaggactatcttga

SEQ ID NO: 142890 - DNA, 80 bp, synthetic construct
  source 1..80: mol_type = other DNA
cccagaagcaatcataacagaagaccaggatacaaaacccagaaccaaggtccttgggacgaggggcgtgttgaaattga

SEQ ID NO: 142891 - DNA, 80 bp, synthetic construct
  source 1..80: mol_type = other DNA
ggcatgtttgacaccgtcgtactctgcgaagcctatgacacgggatgcgcatggtacgagctaactccttctgagacgac

SEQ ID NO: 142892 - DNA, 80 bp, synthetic construct
  source 1..80: mol_type = other DNA
gggcttccctcatcagccgaggggggagcgcggccacatgtggccgctacctcttcaactgggctgtgaggacgaagctc

SEQ ID NO: 142893 - DNA, 80 bp, synthetic construct
  source 1..80: mol_type = other DNA
ctctgactatgatccccacagccttcagcatcagtctcctggtgcgtcgggcacagcaccgcatcctgatctctgccatg

SEQ ID NO: 142894 - DNA, 80 bp, synthetic construct
  source 1..80: mol_type = other DNA
atgttccaaaggacacgccgtaggcatattccgtgccgcggtgtgcacgcggggcgtagcgaaggcggtcgacttcgtgc

SEQ ID NO: 142895 - DNA, 80 bp, synthetic construct
  source 1..80: mol_type = other DNA
gcagaggcgatgttgcaagtttggataccatccttgcatgtccgcggaggccgagatgctgtcattctcctcacctgcct

SEQ ID NO: 142896 - DNA, 80 bp, synthetic construct
  source 1..80: mol_type = other DNA
gggtcatggtgggacgggaacatgagatcgtttcaattccctccgtatcgggacttcaaccagaacccagaacggaagat

SEQ ID NO: 142897 - DNA, 80 bp, synthetic construct
  source 1..80: mol_type = other DNA
cggcgggctgtcctgcctgttggcggccctggccaaccggctgtgcgggccggacacggccgcctgggcgtgcaactgga

SEQ ID NO: 142898 - DNA, 80 bp, synthetic construct
  source 1..80: mol_type = other DNA
tccggggagctggccaccagcgccaccagcacgtcgttctcgttaaaggaaacgcggtgcctagtggagctctggggccc

SEQ ID NO: 142899 - DNA, 80 bp, synthetic construct
  source 1..80: mol_type = other DNA
cagccggacgctgacgtcgactctgggacagggcttacacttccttctgaaacttccacgcccgacccccctatagcgga

SEQ ID NO: 142900 - DNA, 80 bp, synthetic construct
  source 1..80: mol_type = other DNA
cccggcgtgctgtgagaccgcgtcgaccccgcgagcgagggcgtcgagggcctcgcgcatctggcgatcctccgcctcca

SEQ ID NO: 142901 - DNA, 80 bp, synthetic construct
  source 1..80: mol_type = other DNA
attccaagttgctacaatgaaaaaagcgatctttccgaagcctggttatatgcaatcatctctgttatggtgttctgcag

SEQ ID NO: 142902 - DNA, 80 bp, synthetic construct
  source 1..80: mol_type = other DNA
tcgcaaggcctggccagtgtttgagcataacatactgacccgctgttccttgcatttgggtaacaggagtggggtgttcc

SEQ ID NO: 142903 - DNA, 80 bp, synthetic construct
  source 1..80: mol_type = other DNA
tgtggacccaaacatcaggacaggagtgcggaccatcacaacgggaggtcccatcacctactccacctatggaaaattct

SEQ ID NO: 142904 - DNA, 80 bp, synthetic construct
  source 1..80: mol_type = other DNA
gcatggaaaacaacggctatggtactatctatcgtatctctctttcctttatgcctgtctacgacctcccaaaaaacaac

SEQ ID NO: 142905 - DNA, 80 bp, synthetic construct
  source 1..80: mol_type = other DNA
gatgaatatgacgggctacgttaagacctgcggagcccccccgtgcgttacccgaccgaacggtaacaacacattggtgt

SEQ ID NO: 142906 - DNA, 80 bp, synthetic construct
  source 1..80: mol_type = other DNA
tgggcatcggatggcgtgggatatgatgatgaactggtccccgaccaccaccctgctgttatcgtatgctatgcggacgc

SEQ ID NO: 142907 - DNA, 80 bp, synthetic construct
  source 1..80: mol_type = other DNA
tcgcgggcggccagcgctcgctcgtaggggttgaggcgcggaccccagggcatgggatgtgtgagtgcggaggcgtacat

SEQ ID NO: 142908 - DNA, 80 bp, synthetic construct
  source 1..80: mol_type = other DNA
tggtacggaatggaaatcagaccactgaaacatgatgaaaaaacgctcgtccaatctagagtcaccgcgtacaatgctga

SEQ ID NO: 142909 - DNA, 80 bp, synthetic construct
  source 1..80: mol_type = other DNA
ccaacctaatctggtggcttcagtacttcatagcccgggcggaggcgatgttgcaagtttggataccatcatggcacgtc

SEQ ID NO: 142910 - DNA, 80 bp, synthetic construct
  source 1..80: mol_type = other DNA
gtgagataagaaaatgtgcatgtggagtcaggccagcaaaagctgccaccggatactgagtagacggtgctgcctgcgtc

SEQ ID NO: 142911 - DNA, 80 bp, synthetic construct
  source 1..80: mol_type = other DNA
gtgacgggatttgccacacaacatgcccttgcggcgcagccatcacgggtcacgtcaggaacgggaccatgagggtggta

SEQ ID NO: 142912 - DNA, 80 bp, synthetic construct
  source 1..80: mol_type = other DNA
agggcggcgtccggcccgccggggcgcgagtcgaagagcgtcaggcacagttccagttccgactcgcgggagaaggccgt

SEQ ID NO: 142913 - DNA, 80 bp, synthetic construct
  source 1..80: mol_type = other DNA
gggggatgtcgtgatctgcgccactgacgccctcatgacggggttcaccggagacttcgactctgttatagactgcaacg

SEQ ID NO: 142914 - DNA, 80 bp, synthetic construct
  source 1..80: mol_type = other DNA
ggggcagccgttctctgctccgctatgtacgtgggggatctctgcggatctgttttcctcgtctcccagctatttacttt

SEQ ID NO: 142915 - DNA, 80 bp, synthetic construct
  source 1..80: mol_type = other DNA
aacgtgtgtgcggggcattgtgtctccagcaggcccgccgcgggctccccgaagaagcccacctcgccgtatacgcgcga

SEQ ID NO: 142916 - DNA, 80 bp, synthetic construct
  source 1..80: mol_type = other DNA
ctacactcaccggcccaacacctctgctttatcgcctaggcccagtcaccaatgaggtcactctcacgcaccccataact

SEQ ID NO: 142917 - DNA, 80 bp, synthetic construct
  source 1..80: mol_type = other DNA
tgtggcagcagtactgcttttcagggagttaaagtaacgaatccggctaccagtacgaataacacacaatggggtgttaa

SEQ ID NO: 142918 - DNA, 80 bp, synthetic construct
  source 1..80: mol_type = other DNA
cgcgagggtaacgcctcgaaatgttgggtggcggtggctcccacagtcgccaccagagacggcaaactccccacaacgca

SEQ ID NO: 142919 - DNA, 80 bp, synthetic construct
  source 1..80: mol_type = other DNA
gggcgatggtatcaataacaccacatgcccttgtggggcgtacattgcaggccacgtgaggaatgggaccatgaagatca

SEQ ID NO: 142920 - DNA, 80 bp, synthetic construct
  source 1..80: mol_type = other DNA
actccacttccttaataacatgtcaaaaatcaggaaggacattcaagaatggaaaccttcaacgggctggcacaattggc

SEQ ID NO: 142921 - DNA, 80 bp, synthetic construct
  source 1..80: mol_type = other DNA
tggtgctgcgcgcgtaggttgctggcgaacgcgacgacgcggcggttgatctcctgaatctggcgcctctgcgtgaagac

SEQ ID NO: 142922 - DNA, 80 bp, synthetic construct
  source 1..80: mol_type = other DNA
gcggcccaagcagtcatcttttcgccggaacaccatatttttgtccaggactgcaattgctccatttacccgggtcacat

SEQ ID NO: 142923 - DNA, 80 bp, synthetic construct
  source 1..80: mol_type = other DNA
actcatttcttctccatccttatagcacaggagacactccacacggctcttgattgcgaaatctacggagcctgctactc

SEQ ID NO: 142924 - DNA, 80 bp, synthetic construct
  source 1..80: mol_type = other DNA
ttttgtgcccgtggagaatatggaaaccaccatgaggtcacctgttttcactgacaactccacaccacctgccgtgcccc

SEQ ID NO: 142925 - DNA, 80 bp, synthetic construct
  source 1..80: mol_type = other DNA
accttcgcagtgggatcacagttgccctgcgagccagagccagacgtggtggctctcacctccatgctgacagacccctc

SEQ ID NO: 142926 - DNA, 80 bp, synthetic construct
  source 1..80: mol_type = other DNA
cgatgaattcgagctcggtacagcttggctgtggaatgtgtgtcagttagggtgtggaaagtccccaggctccccagcag

SEQ ID NO: 142927 - DNA, 80 bp, synthetic construct
  source 1..80: mol_type = other DNA
gtgccagtagattgggtgcccacaggcaggacatcctggtcaatacactcgaaaggagagtggatgaccacggaagacat

SEQ ID NO: 142928 - DNA, 80 bp, synthetic construct
  source 1..80: mol_type = other DNA
gcgcacccatactgttgggggttctgccgcgcagaccaccgggcgcctcaccagcttatttgacatgggccccaggcaga

SEQ ID NO: 142929 - DNA, 80 bp, synthetic construct
  source 1..80: mol_type = other DNA
ggggggcggtggcgaagcgccgtccgcgttcatgtcggcaaacagctcgtcgaccaagaggtccattgggtgtggttgat

SEQ ID NO: 142930 - DNA, 80 bp, synthetic construct
  source 1..80: mol_type = other DNA
ttcaaaggctttcaagtttcttgggactcccgcagacacaggtcacggcactgtggtgttggaattgcagtacactggca

SEQ ID NO: 142931 - DNA, 80 bp, synthetic construct
  source 1..80: mol_type = other DNA
gtatcatctctaacggaacggctctacgtaggcggccccatggcaaactccaagggacaatcatgtggctaccgtagatg

SEQ ID NO: 142932 - DNA, 80 bp, synthetic construct
  source 1..80: mol_type = other DNA
cccatgagggactgggctgctgagggtctcaaagacctggcagtagccacagagcccgtcatcttcagtcctatggagat

SEQ ID NO: 142933 - DNA, 80 bp, synthetic construct
  source 1..80: mol_type = other DNA
tctcaactacctgggatggcatttgaagaagctgtcgctgctggagggaggtcttttctacgcggacgacacagcgggat

SEQ ID NO: 142934 - DNA, 80 bp, synthetic construct
  source 1..80: mol_type = other DNA
gtctcggtcgttgagggaagaagatgccctgtctgtggtgctgacccgcctggaggagctgtctcagcaattgcaagatt

SEQ ID NO: 142935 - DNA, 80 bp, synthetic construct
  source 1..80: mol_type = other DNA
aatgtatagcgaggacgtaaacttagaggctcctgacacacacattgtttacaaaccagctgtaactgcggacactatca

SEQ ID NO: 142936 - DNA, 80 bp, synthetic construct
  source 1..80: mol_type = other DNA
ggcacattaacagcactgccttgaattgcaacgattccctaaacactggctttatagcgggcctcttctactatcacaaa

SEQ ID NO: 142937 - DNA, 80 bp, synthetic construct
  source 1..80: mol_type = other DNA
gcgaggtgacggaatctgccacaccacatgcccttgcggggcggacatcaccggccatgtaagaaacggaaccatgaaag

SEQ ID NO: 142938 - DNA, 80 bp, synthetic construct
  source 1..80: mol_type = other DNA
gaaaagactcgattccagctccggattatgtggtcttttgggggccagaatctcttattgatttgccgtacatcgactcc

SEQ ID NO: 142939 - DNA, 80 bp, synthetic construct
  source 1..80: mol_type = other DNA
ttgtttcactcctagtcctgtggtagtgggaacgaccgacaagttgggcgcgcctacctacaactggggtgaaaatgata

SEQ ID NO: 142940 - DNA, 80 bp, synthetic construct
  source 1..80: mol_type = other DNA
gaagcattacaacccaggaatctgagagcaacattctggacatagatctacgtcctgcatcagcatggacgctgtatgcc

SEQ ID NO: 142941 - DNA, 80 bp, synthetic construct
  source 1..80: mol_type = other DNA
gtatctggagatctttcatccatgacaggcaccgttgcaagtgttagtatattccttagatttgaccaaaacggtgttct

SEQ ID NO: 142942 - DNA, 80 bp, synthetic construct
  source 1..80: mol_type = other DNA
gcccttaagggccgcgtgcggtcgcgcaccaccgtcgacgacgtgatcgaccaggtggtggccgacgctcgcaactacac

SEQ ID NO: 142943 - DNA, 80 bp, synthetic construct
  source 1..80: mol_type = other DNA
cgcgacgaggaaaacttccgaacggtcccagccccgaggtaggcgtcagcccattccaaaggcgcgccgccagacgggcc

SEQ ID NO: 142944 - DNA, 80 bp, synthetic construct
  source 1..80: mol_type = other DNA
ccgcctcaaccagaatacgacttggagcttataacatcttgctcctccaatgtgtcagtcgcgcacgacggcgatggcaa

SEQ ID NO: 142945 - DNA, 80 bp, synthetic construct
  source 1..80: mol_type = other DNA
tctgaacggtcccagcccagaggtaggcgccagcccataccaaaggcgcgtcaccaaacgggccgcacctgggcacagcc

SEQ ID NO: 142946 - DNA, 80 bp, synthetic construct
  source 1..80: mol_type = other DNA
atgtaaagataaatataaactaagggttgaatgtaatgaacaaaacttaacactgatcaatgttaacaaaacatatgaaa

SEQ ID NO: 142947 - DNA, 80 bp, synthetic construct
  source 1..80: mol_type = other DNA
gcgttgtggcgggtggcagctgaggaatacgtcgaaatcacgcgggtgggtgacttccattatgtaaccggcatgactac

SEQ ID NO: 142948 - DNA, 80 bp, synthetic construct
  source 1..80: mol_type = other DNA
tcatggcgaccttcaagatacaaccagtgtttatggtggcatcgtttctcaaagcgagatggaccaaccaggagaacatt

SEQ ID NO: 142949 - DNA, 80 bp, synthetic construct
  source 1..80: mol_type = other DNA
gattcccttctatggcaaagccatccccatcgaggccattaaggggggaaggcatctcattttttgccattccaagaaga

SEQ ID NO: 142950 - DNA, 80 bp, synthetic construct
  source 1..80: mol_type = other DNA
atacggcaatggataagttctccacaacatcggtacactcgctcatcttgtcgcgtcaccgccttaagttttgagacgat

SEQ ID NO: 142951 - DNA, 80 bp, synthetic construct
  source 1..80: mol_type = other DNA
gcttttagcttaatgaccagacaccgtcctgagtgtattacttttcaacagatcaaggataattgcgctaatgagcttga

SEQ ID NO: 142952 - DNA, 80 bp, synthetic construct
  source 1..80: mol_type = other DNA
tccttatgaaaatgctgttggatttatgccaaacttagtggcatatcctaaaccatcaagtgcagatgcaaagaactatt

SEQ ID NO: 142953 - DNA, 80 bp, synthetic construct
  source 1..80: mol_type = other DNA
gcggcaaatacattcaggccgctcttctgaagctgggggcatggaccgggacctacatctatgatcatctagcacccctt

SEQ ID NO: 142954 - DNA, 80 bp, synthetic construct
  source 1..80: mol_type = other DNA
atgtgaatggccgctgacacacacgattggaacatcagttgaagagagtgacatgttcatgccgaggtcaattgggggtc

SEQ ID NO: 142955 - DNA, 80 bp, synthetic construct
  source 1..80: mol_type = other DNA
gatgaagagcgctctagacacctgaaaggccaatgtcgacattgtgtgtacaacatgatgggaaagagagagaagaagct

SEQ ID NO: 142956 - DNA, 80 bp, synthetic construct
  source 1..80: mol_type = other DNA
agacaaccatagagcaaaagcaccctttcgctaagggcactctatccggaggtgatgtgtgactcggaacaacacccgct

SEQ ID NO: 142957 - DNA, 80 bp, synthetic construct
  source 1..80: mol_type = other DNA
aggaagaacagggatggacatcagccagtgaagctgtgaatgacagccgattttgggaactggttgacaaggaaagggct

SEQ ID NO: 142958 - DNA, 80 bp, synthetic construct
  source 1..80: mol_type = other DNA
gtgtccagattccatggaatacaactgccccaatctcagttcaagagaagagcctgatgacatagactgttggtgctatg

SEQ ID NO: 142959 - DNA, 80 bp, synthetic construct
  source 1..80: mol_type = other DNA
tgtttcaccccctccccagtggtggtgggcacgaccgacaaacgaggcgtccccacgtacaactgggaggacaatgagac

SEQ ID NO: 142960 - DNA, 80 bp, synthetic construct
  source 1..80: mol_type = other DNA
ggtagtacctgtccgcgatcgtggcgcgcagcatttctcccaggtcgcgatcgcgtccgcgcatgtgcgcctggcggtgc

SEQ ID NO: 142961 - DNA, 80 bp, synthetic construct
  source 1..80: mol_type = other DNA
ggccgaacagcttggttcgtgccatcgatagccaagggaggcgctatcgcgcggacactaagacagaaagggaaaagtgt

SEQ ID NO: 142962 - DNA, 80 bp, synthetic construct
  source 1..80: mol_type = other DNA
tctcaaatcgctacccccacggcttctacggcttttgtcgtcagcggtcccaaaccaaggctgcggttggcagtgttggt

SEQ ID NO: 142963 - DNA, 80 bp, synthetic construct
  source 1..80: mol_type = other DNA
tgcaggcctgcgccagaaaaaagtcacctttgatcggatgcaggttctagatgaccactacaaggctgtacttaaggagg

SEQ ID NO: 142964 - DNA, 80 bp, synthetic construct
  source 1..80: mol_type = other DNA
agtacctctttaactgggcggtaaaaacaaagctcaaactcactccattgcctgacgcgggccggctggacttgtccagt

SEQ ID NO: 142965 - DNA, 80 bp, synthetic construct
  source 1..80: mol_type = other DNA
aatcgggtggccggaagcctcaggaaactcggggtacccccggcgtggagacatcgggcccgagcagtccgcgcgcttga

SEQ ID NO: 142966 - DNA, 80 bp, synthetic construct
  source 1..80: mol_type = other DNA
ggcgattgcccgaccacggaagacatggtcaatctgctacccgcgctgttgtcgccaggggctctcgtggtgggtgtcgt

SEQ ID NO: 142967 - DNA, 80 bp, synthetic construct
  source 1..80: mol_type = other DNA
gttgggggtcctcttaccaattcaagggaggaaaactgcggctatcgcaggtgccgtgcaagcggcgtactgacaaccag

SEQ ID NO: 142968 - DNA, 80 bp, synthetic construct
  source 1..80: mol_type = other DNA
gtcatggccgtctccacgtgcgtgcccgtcgccccggacaacgtgatcgtgcagaactcgatgcgcgtcagctcgcggcc

SEQ ID NO: 142969 - DNA, 80 bp, synthetic construct
  source 1..80: mol_type = other DNA
gtggcgctccaagaaaactcctatggggttctcctatgacacccggtgttttgactcaacagtcaccgagcgcgacatcc

SEQ ID NO: 142970 - DNA, 80 bp, synthetic construct
  source 1..80: mol_type = other DNA
ggcaattgggccaaggtctttatcaccttgctgctgttttcaggtgtggacgcggacacgtataccaccggtggagcggc

SEQ ID NO: 142971 - DNA, 80 bp, synthetic construct
  source 1..80: mol_type = other DNA
ctgttcaacgtgctaggggggtggctggcaacacagcttgccccccccagctcatccactgccttcgtggtgagtggtct

SEQ ID NO: 142972 - DNA, 80 bp, synthetic construct
  source 1..80: mol_type = other DNA
accgccgccgggatcactctcggcatggacgagctgtacaagggcacgcgttcagagacaggttccgcctcctctatgcc

SEQ ID NO: 142973 - DNA, 80 bp, synthetic construct
  source 1..80: mol_type = other DNA
acggtgaagggaaggtggtcttaagtgaaccctcagccatcacagcagcaagtgcagcccagcggcgtggccgcattggg

SEQ ID NO: 142974 - DNA, 80 bp, synthetic construct
  source 1..80: mol_type = other DNA
cacacacgccggcaacccagaccccagtgggttggttgcgcggtcccgtctcctggctagttctttcccccaccaccaaa

SEQ ID NO: 142975 - DNA, 80 bp, synthetic construct
  source 1..80: mol_type = other DNA
cttcgcatatgctactatccccgcagtcccggtggctttgttcagtttgtaacttcgacccgcaacgcgctggggctgcc

SEQ ID NO: 142976 - DNA, 80 bp, synthetic construct
  source 1..80: mol_type = other DNA
tatgaagataggttagaacacacgccggtacaattaccccgcgacggtacaccccgagacgtatgttctgtgggacagct

SEQ ID NO: 142977 - DNA, 80 bp, synthetic construct
  source 1..80: mol_type = other DNA
ggcgcgggcgcactggtaggggcaagccggtggtgtaccggtacgtctcgcagggtgaacggccatcaggcatgtttgat

SEQ ID NO: 142978 - DNA, 80 bp, synthetic construct
  source 1..80: mol_type = other DNA
ggctgccgcagctgcaggcttacgtagcgccgatttcctggtgtgcggagatgacttggtagtcatctgcgagagcaagg

SEQ ID NO: 142979 - DNA, 80 bp, synthetic construct
  source 1..80: mol_type = other DNA
ctgtagaggaagcttgcgacctgacgccccctcattccgccaaatccaagtttggctacggggcaaaggacgttcggagt

SEQ ID NO: 142980 - DNA, 80 bp, synthetic construct
  source 1..80: mol_type = other DNA
ttctgaggtgacaggactaggccctgacatcatacaagctaattctgtgtactctttctatggtgatgattacattgtca

SEQ ID NO: 142981 - DNA, 80 bp, synthetic construct
  source 1..80: mol_type = other DNA
tttgtgcacagtgcgagctatagatgttggcttcctgtgtgatgataccatcacatatgaatgtccagtgcttgccgcag

SEQ ID NO: 142982 - DNA, 80 bp, synthetic construct
  source 1..80: mol_type = other DNA
cagttatccctcctaaaccaaccactcggaaacctttacctccaccacactatgtcaacgcaactatgggtcaaaactta

SEQ ID NO: 142983 - DNA, 80 bp, synthetic construct
  source 1..80: mol_type = other DNA
agcttataagcacttgctcgttcagctgctatggtggaaccagtaccttatgacacgagcagaggcactattgcaggtgt

SEQ ID NO: 142984 - DNA, 80 bp, synthetic construct
  source 1..80: mol_type = other DNA
ttggagcggtttaaacgggggtaaaaatgtatgcccgctatttacatttgatcgcactcgccgttttataatagcatgtc

SEQ ID NO: 142985 - DNA, 80 bp, synthetic construct
  source 1..80: mol_type = other DNA
gtgctgtgatactgttgcagagagatggctctcacttgccgcctgcgcatccccgtcccgaattaccgaggaagatcccg

SEQ ID NO: 142986 - DNA, 80 bp, synthetic construct
  source 1..80: mol_type = other DNA
cccggagggctctttaaatattgtccggaaatgaaaaaccaaaacaactaacccacatgaccagagctcggactggagag

SEQ ID NO: 142987 - DNA, 80 bp, synthetic construct
  source 1..80: mol_type = other DNA
agccgtgtgctgggtcctggttgagggatgtatgggactgggtgtgtgtagtactatctgacttcaagacctggcttaag

SEQ ID NO: 142988 - DNA, 80 bp, synthetic construct
  source 1..80: mol_type = other DNA
cgtcctcaacaccgcttccgccgcaagctctcaggggtgggtctggggattggttttcatctgttttgcctggtacatcc

SEQ ID NO: 142989 - DNA, 80 bp, synthetic construct
  source 1..80: mol_type = other DNA
agctgcgtactgtttatcagtgggcagcgtagtgattgtcgggagggtcgtcctatcgggccaacctgctgttatcccca

SEQ ID NO: 142990 - DNA, 80 bp, synthetic construct
  source 1..80: mol_type = other DNA
caagtcaaacaaaagttaatgacaggcgaaaagcagcgcagaaaagaccatcaaagctaaaaccagcaactattgagaca

SEQ ID NO: 142991 - DNA, 80 bp, synthetic construct
  source 1..80: mol_type = other DNA
gaaaggaatcggccttttgagatcaaggatggagcctaccgcatctacagtcctggtttgctgtggggacatcgccagat

SEQ ID NO: 142992 - DNA, 80 bp, synthetic construct
  source 1..80: mol_type = other DNA
gatcatccggaggacccgtgctctgccctaggggacacgccgtgggcttgttcagagcggccgtgtgcgccaggtgtgtg

SEQ ID NO: 142993 - DNA, 80 bp, synthetic construct
  source 1..80: mol_type = other DNA
ccaactctaagggacaaaactgcggctatcggcgatgccgcgcgagcggcgtgctgaccactagctgcggtaacaccata

SEQ ID NO: 142994 - DNA, 80 bp, synthetic construct
  source 1..80: mol_type = other DNA
ctgggagaggtaggcttggcatataccggtacgtcagcctcggggagcgtccttcgggcatgttcgactccgtagtgctc

SEQ ID NO: 142995 - DNA, 80 bp, synthetic construct
  source 1..80: mol_type = other DNA
cagcctgagaaggggggtcgcaagccagctcgtctcatcgtgttccccgacctgggtgtacgcgtgtgcgagaagatggc

SEQ ID NO: 142996 - DNA, 80 bp, synthetic construct
  source 1..80: mol_type = other DNA
ctgggtaacacgatcacctgctatctcaaggcacaggcagcctgccgggcggccaatctcaaggactatgacatgttggt

SEQ ID NO: 142997 - DNA, 80 bp, synthetic construct
  source 1..80: mol_type = other DNA
tatcgtccataccgaccacaccgacgaatcccctaagggggaggggccattttacgaggaggagtggtataacaaagtct

SEQ ID NO: 142998 - DNA, 80 bp, synthetic construct
  source 1..80: mol_type = other DNA
gctccgctggctcgtggaaaaaggatttgtctcgccaataggaaaagtcatagatctgggatgcgggcgcggaggctgga

SEQ ID NO: 142999 - DNA, 80 bp, synthetic construct
  source 1..80: mol_type = other DNA
aaaggagtaaagtcttggaccttgttaacaaccacggatgtgacctgtgggtcgcagcaggtgtactggtcccttcccga

SEQ ID NO: 143000 - DNA, 80 bp, synthetic construct
  source 1..80: mol_type = other DNA
actgcacccatcactagtttttgagaagactaagatactgctggcccttctaggccccctgtacctgctccaagcctgcc

SEQ ID NO: 143001 - DNA, 80 bp, synthetic construct
  source 1..80: mol_type = other DNA
tggcagccacggtctgctcggccttgtatgtgggagacatatgcggggccgtgatgatcgtgtcgcaggctttcatagta

SEQ ID NO: 143002 - DNA, 80 bp, synthetic construct
  source 1..80: mol_type = other DNA
aggttgctccttgagggcgcgctggccattctcgctgccaacatctacctccacaacttgctccttctgtatcatttctc

SEQ ID NO: 143003 - DNA, 80 bp, synthetic construct
  source 1..80: mol_type = other DNA
acaacaggtcataccactcaggggaaatgttaaacttgctgaaaacttcaaccgaatccagttgcgaagagacggtggtg

SEQ ID NO: 143004 - DNA, 80 bp, synthetic construct
  source 1..80: mol_type = other DNA
atgttagcgaaaacggaaacaaaaaacttccaaatttttatgaaacacacatcactgttaatggtacccacaaaagcttt

SEQ ID NO: 143005 - DNA, 80 bp, synthetic construct
  source 1..80: mol_type = other DNA
cggaggcggccgcgaggaggttagcaaggggatcgcccccttctatggccagctcctcagccagccagctgtccgctcca

SEQ ID NO: 143006 - DNA, 80 bp, synthetic construct
  source 1..80: mol_type = other DNA
cagccatagtcagagaagccataaaacgtggcttgagaacattaattctggctcccactagagtcgtggcagctgaaatg

SEQ ID NO: 143007 - DNA, 80 bp, synthetic construct
  source 1..80: mol_type = other DNA
ccaataacaacactctgggaaggatcacctgggaagttttggaataccacgatagctgtttccatggcgaacatttttag

SEQ ID NO: 143008 - DNA, 80 bp, synthetic construct
  source 1..80: mol_type = other DNA
atgctcatcttgttgggccaggccgaagcagcattggagaagttggtcgtcttgcacgctgcgagtgcggctaactgcca

SEQ ID NO: 143009 - DNA, 80 bp, synthetic construct
  source 1..80: mol_type = other DNA
agcgggtaggtcaagaaggtccagaagggccattgacttacccacacatgaaaatcatggcttaaagacccggcaagaaa

SEQ ID NO: 143010 - DNA, 80 bp, synthetic construct
  source 1..80: mol_type = other DNA
tttaccacggccagtggatgttggtatggaatggagataagacctatgaagcatgatgagtccactctagttaaatcaag

SEQ ID NO: 143011 - DNA, 80 bp, synthetic construct
  source 1..80: mol_type = other DNA
atcatctcacccctcttcgggactgggcgcataacagcctgcgagatctggctgtggctgtagaaccagtcgtcttctcc

SEQ ID NO: 143012 - DNA, 80 bp, synthetic construct
  source 1..80: mol_type = other DNA
gagagccgggggatcccgatctcagcgacgggtcttggtctaccgtggacgaggagaccagtgaggacgtggtctgctgc

SEQ ID NO: 143013 - DNA, 80 bp, synthetic construct
  source 1..80: mol_type = other DNA
ggaaacgcacgcacatctgtcttaggaggactgggagcttgttttacagctattatcgaaattgtgccgatacctacgga

SEQ ID NO: 143014 - DNA, 80 bp, synthetic construct
  source 1..80: mol_type = other DNA
catttcaataccttcccgaaattgggcagcatttagaggctggagcttcactcgcctaaagactaaagaaactccttccc

SEQ ID NO: 143015 - DNA, 80 bp, synthetic construct
  source 1..80: mol_type = other DNA
ccggctcagaacatccagcttataaacaccaacggcagctggcatatcaataggaccgctctgaactgcaatgagtccca

SEQ ID NO: 143016 - DNA, 80 bp, synthetic construct
  source 1..80: mol_type = other DNA
tgttatggttctgagaaatgtatatataatgcttattaatacaattatatttcttaaaactaacaactggcacgcgggct

SEQ ID NO: 143017 - DNA, 80 bp, synthetic construct
  source 1..80: mol_type = other DNA
tctgccgcgattgccgggagtccccttcctctcatgccaacgtgggtacaagggagtttggcggggagacggcattatgc

SEQ ID NO: 143018 - DNA, 80 bp, synthetic construct
  source 1..80: mol_type = other DNA
accaatgggagctggcacatcaacaggacagctcttaattgcaatgacagcttgcaaacagggttcatcgccggcctgat

SEQ ID NO: 143019 - DNA, 80 bp, synthetic construct
  source 1..80: mol_type = other DNA
aggaggaagaacatccaactgattttcatctggggggtcggcatctatagtaaaaatgccaggacaaagatttttgtcaa

SEQ ID NO: 143020 - DNA, 80 bp, synthetic construct
  source 1..80: mol_type = other DNA
gcctggtcgattacccgtataggctgtggcactacccctgtactgtcaatttcaccttacacaaggtgcggatgtatctc

SEQ ID NO: 143021 - DNA, 80 bp, synthetic construct
  source 1..80: mol_type = other DNA
tcatcataacaatcctggttttcccccatctgacttttgacatcacaaagtacctcctggccatcttgggccccctctac

SEQ ID NO: 143022 - DNA, 80 bp, synthetic construct
  source 1..80: mol_type = other DNA
ccacctggtccgctcatgggtgacggctggagagatccatgcaatcccctttgggttggtgagcatgatgatagccatgg

SEQ ID NO: 143023 - DNA, 80 bp, synthetic construct
  source 1..80: mol_type = other DNA
ggggtcctcacccaggaagatatgaaggatcccaaggccgtcagagctaaggttctcaaatggttaaatcaacatggaag

SEQ ID NO: 143024 - DNA, 80 bp, synthetic construct
  source 1..80: mol_type = other DNA
ctaggtcttaactttacacccgccatggaaccggtactccgggtcgagggtgtgtacactcacgcatttacctggtgtac

SEQ ID NO: 143025 - DNA, 80 bp, synthetic construct
  source 1..80: mol_type = other DNA
ccccaccccaacatcgaggaggtggccctgccttcggaggtggaaatccccttctacggcagagctatcccccttgctct

SEQ ID NO: 143026 - DNA, 80 bp, synthetic construct
  source 1..80: mol_type = other DNA
tatgcacgcccctgggtgcgtgccatgtgtcaacaatgggaacaagtcgcaatgctgggtgccagtagctcccaccctcg

SEQ ID NO: 143027 - DNA, 80 bp, synthetic construct
  source 1..80: mol_type = other DNA
cggaagcttgcttaacacagttctaacagtttgttttaaatagagagcagatctctggaaaaatgaaccaacgaaaaaag

SEQ ID NO: 143028 - DNA, 80 bp, synthetic construct
  source 1..80: mol_type = other DNA
gggacccctctacttgttacaacatagtctgttaaaagtgccatactttgtgcgtgcgcacgcacttttacgcttgtgca

SEQ ID NO: 143029 - DNA, 80 bp, synthetic construct
  source 1..80: mol_type = other DNA
agcagtcagcttggactacccacggggaacatccggctcacccatcctagattccaatggagacatcataggcctgtatg

SEQ ID NO: 143030 - DNA, 80 bp, synthetic construct
  source 1..80: mol_type = other DNA
ccatcccggagagggtcaggcagttgtcggccacggtctggtccagacagaagggcagcgacacgggagtggtcttcacc

SEQ ID NO: 143031 - DNA, 80 bp, synthetic construct
  source 1..80: mol_type = other DNA
gtgagctgggtgcagaccgactacgccaccccctgcgctggtgattggctctgggccatatatgactgggtcctacaagt

SEQ ID NO: 143032 - DNA, 80 bp, synthetic construct
  source 1..80: mol_type = other DNA
cgaaggagtttttcacacaatgtggcacgcaactgaaggagcagtcctacgaaatggagaaggaagactagatccgtatg

SEQ ID NO: 143033 - DNA, 80 bp, synthetic construct
  source 1..80: mol_type = other DNA
agtgaatccaacaactctaacagcatcactagtgatgctggtgtgccattatgccataattggacctgggctacaagcca

SEQ ID NO: 143034 - DNA, 80 bp, synthetic construct
  source 1..80: mol_type = other DNA
ctaggccaggcagaggcagctctggaaaagcttatcgtcctccatgccgccagtgcttccagctgccagggtctcccttg

SEQ ID NO: 143035 - DNA, 80 bp, synthetic construct
  source 1..80: mol_type = other DNA
cccctacggaatcgccggaaccatcgacaccaacgcccccgaggtcctggccggggatccgtataccacgaccgtcgaca

SEQ ID NO: 143036 - DNA, 80 bp, synthetic construct
  source 1..80: mol_type = other DNA
gatgttgctctatcttggcaggtggaccggtacatacatctacgaccacctttcccccatgtcggactgggccgctagcg

SEQ ID NO: 143037 - DNA, 80 bp, synthetic construct
  source 1..80: mol_type = other DNA
acgcctcacagggctacaaagtgcttgtgctcaatccatcggtggccgctacccttgggtttggcagctacatgagcaaa

SEQ ID NO: 143038 - DNA, 80 bp, synthetic construct
  source 1..80: mol_type = other DNA
cgccggaacgccacaacttcactcaagagtgcaactgttccatctaccaaggtcacatcaccggccaccgcatggcatgg

SEQ ID NO: 143039 - DNA, 80 bp, synthetic construct
  source 1..80: mol_type = other DNA
gatgctgctcgtgggtcaggctgaggcggcgctagagaacctaatagtcctcaacgccgcttcggccgcagccactcgtg

SEQ ID NO: 143040 - DNA, 80 bp, synthetic construct
  source 1..80: mol_type = other DNA
aattacactaagcctctcgctctgcaaaataacgcgctcactctttcttacaacgcgccctttaacgtagtaaataataa

SEQ ID NO: 143041 - DNA, 80 bp, synthetic construct
  source 1..80: mol_type = other DNA
tccacggtatgtggccccgtatactgctttacccctagcccggtggtggtcgggaccactgatcaccgcggccatcctac

SEQ ID NO: 143042 - DNA, 80 bp, synthetic construct
  source 1..80: mol_type = other DNA
tccttggcaatgggaacattgattctacaggcgtgcagtcaagagggcagagcccgagtgggctatctcctggcagctat

SEQ ID NO: 143043 - DNA, 80 bp, synthetic construct
  source 1..80: mol_type = other DNA
aggaaaggctctccaccaagtttttggagcaatctatggggctgcttttagtggggtctcatggactatgaaaatcctca

SEQ ID NO: 143044 - DNA, 80 bp, synthetic construct
  source 1..80: mol_type = other DNA
gagcggcggccccggagccgccgcgtcacccccccattccagctgggcccagcgacacccaaactcgcgcgtgagagtgg

SEQ ID NO: 143045 - DNA, 80 bp, synthetic construct
  source 1..80: mol_type = other DNA
ctgctactattcgccagcgtcgacgcgagaacctacaccactgggggagccaccgcccgcagcacggctggtttggttaa

SEQ ID NO: 143046 - DNA, 80 bp, synthetic construct
  source 1..80: mol_type = other DNA
tgaaaagcgtggctgtgattaagcataacatggtgtgtggcaactgcgaggacagggcctctcagatgctgacctgctcg

SEQ ID NO: 143047 - DNA, 80 bp, synthetic construct
  source 1..80: mol_type = other DNA
gcagcctgtggagtggcattaaaaactttgggtcctccattaagtcatttggtaacaaggcctggaacagtaacacaggt

SEQ ID NO: 143048 - DNA, 80 bp, synthetic construct
  source 1..80: mol_type = other DNA
gcctatggaaaagaaggttatcacgtgggtggcggacactgcagcctgcggggacattctcgcgggcctccctgtttccg

SEQ ID NO: 143049 - DNA, 80 bp, synthetic construct
  source 1..80: mol_type = other DNA
cctgagcgcacggttttactggtttatcccgtttggagtactggggttttttctgctaggaaagcattcaaaacgtggtg

SEQ ID NO: 143050 - DNA, 80 bp, synthetic construct
  source 1..80: mol_type = other DNA
cagtgtgccagtcttcgagtatgaggaaaacagactggcttccaatgacagtggcagctatgggagttccacctctacca

SEQ ID NO: 143051 - DNA, 80 bp, synthetic construct
  source 1..80: mol_type = other DNA
tttgcaccctatctgcgttttgttccccgacctccaagcctcaaagacatatatcatgcagattcactcgtatatggaat

SEQ ID NO: 143052 - DNA, 80 bp, synthetic construct
  source 1..80: mol_type = other DNA
gtaaccttgcgggaggtaagtacatgcaagccttttgcctcaggctaggggcgcttggaggtacctatatttatgaccat

SEQ ID NO: 143053 - DNA, 80 bp, synthetic construct
  source 1..80: mol_type = other DNA
gcgggggggacatttatcacagcgtgtcctatgcccgaccccgcttcttactccttggcctactcctactcacggtagtg

SEQ ID NO: 143054 - DNA, 80 bp, synthetic construct
  source 1..80: mol_type = other DNA
gtacgtaggatgcgagccaatccttgaaggaccgttggcgtgcaccttgggggctgaggttagctgccacatgaccagca

SEQ ID NO: 143055 - DNA, 80 bp, synthetic construct
  source 1..80: mol_type = other DNA
gaccctagccacatcaccgccgaggcggcagctcgccgcttggcccgagggtctccgccatcccttgctagttcgtcggc

SEQ ID NO: 143056 - DNA, 80 bp, synthetic construct
  source 1..80: mol_type = other DNA
acctcctatggaggcaagaagtaggggggaacatcacgagggtggagtccgagaacaaaataatagttctggactccttt

SEQ ID NO: 143057 - DNA, 80 bp, synthetic construct
  source 1..80: mol_type = other DNA
acctacaattggggagaaaatgctacagatgtactcattctgaactcaaccagacccccgggaggagcgtggttcggatg

SEQ ID NO: 143058 - DNA, 80 bp, synthetic construct
  source 1..80: mol_type = other DNA
ccaaaaagctcatcgcctgggcggggctggtttttgttcgacgatccgtcaggtcaagaatcccatcgcccgtgatatac

SEQ ID NO: 143059 - DNA, 80 bp, synthetic construct
  source 1..80: mol_type = other DNA
cgtcttccagatgtacacccgcatcgccggctttttggcctgccgggccacgcgcggcatgcgccacatcgccctggggc

SEQ ID NO: 143060 - DNA, 80 bp, synthetic construct
  source 1..80: mol_type = other DNA
gttcgcactcgtcgtccccaatgggacgcccggcccccagaggatcccccgactccgcgccccccacgaaaggcatgacc

SEQ ID NO: 143061 - DNA, 80 bp, synthetic construct
  source 1..80: mol_type = other DNA
cgtgacagaaatcaagcggggcgtcaagagggaaaacaaagacgaattgcagcccaccatgcaactcatggtgccaaagc

SEQ ID NO: 143062 - DNA, 80 bp, synthetic construct
  source 1..80: mol_type = other DNA
cggttcgcacgggcccctttgcgccatcattttcttttgctttgcgtggtacatcaaaggcagagctcccgcggctgctg

SEQ ID NO: 143063 - DNA, 80 bp, synthetic construct
  source 1..80: mol_type = other DNA
aatgccttcgggcttgccagttttctctcctctggccccaagcagaacctccagcttgtgaacacaaatgggagctggca

SEQ ID NO: 143064 - DNA, 80 bp, synthetic construct
  source 1..80: mol_type = other DNA
caggaggactgggtgaacaaagctgcgaagtgatccatgtaagccctcagaaccgtctcggaaagaggaccccacatgtt

SEQ ID NO: 143065 - DNA, 80 bp, synthetic construct
  source 1..80: mol_type = other DNA
gttgtttttttccgttagctgaaatgaggcgtgcggtggaactccagccagtggcttttgctgaggcgccacctccctct

SEQ ID NO: 143066 - DNA, 80 bp, synthetic construct
  source 1..80: mol_type = other DNA
gcactgcagggagcccggggataaacagtggcaatgcaggatccagcgctcgtacccgcttaccatctgggctcttacca

SEQ ID NO: 143067 - DNA, 80 bp, synthetic construct
  source 1..80: mol_type = other DNA
atcaaatgggagtatgtggtacttgccttcctgctgttggctgacgcgcgcgtctgcgcatgcctgtggatgatgctact

SEQ ID NO: 143068 - DNA, 80 bp, synthetic construct
  source 1..80: mol_type = other DNA
agcatcattgatggcgttcacagccgctgtcaccagccctctaaccacccagcaaaccctcctgtttaacatcctagggg

SEQ ID NO: 143069 - DNA, 80 bp, synthetic construct
  source 1..80: mol_type = other DNA
cgccccgtctctcaaagccacatgcgccgcccatgactctcctggcactgacctcattgaagccaaccttctatgggggt

SEQ ID NO: 143070 - DNA, 80 bp, synthetic construct
  source 1..80: mol_type = other DNA
gcggaatatgctattaaaactgttctccggaaaaaatgtacaattggcatgctcattatcgctaagtttggtctagttgc

SEQ ID NO: 143071 - DNA, 80 bp, synthetic construct
  source 1..80: mol_type = other DNA
aattcaaacagaaggtcatgggcctcctgcaggtcacagccaaacaggcggaggagttgaagccggcagttcactccgcc

SEQ ID NO: 143072 - DNA, 80 bp, synthetic construct
  source 1..80: mol_type = other DNA
cgcagcagacccggggcctgttaggcaccatcgtgaccagtctcacagggagagacaccaatgagatctgcggtgagatc

SEQ ID NO: 143073 - DNA, 80 bp, synthetic construct
  source 1..80: mol_type = other DNA
cccgcagtaatccctgtctccggggttccaccaagctcctcatgagtgacctaacggtgaagcttcccaacactttcacc

SEQ ID NO: 143074 - DNA, 80 bp, synthetic construct
  source 1..80: mol_type = other DNA
catatcccaagcggaggcggctttggagaacctcgtaatactcaatgcagcatccctggccgggacgcacggtcttgtgt

SEQ ID NO: 143075 - DNA, 80 bp, synthetic construct
  source 1..80: mol_type = other DNA
tccatgagaatcacgggacccaggacatgcatgaacacctggcagggggctttccccatcaactcctacacggaaggcca

SEQ ID NO: 143076 - DNA, 80 bp, synthetic construct
  source 1..80: mol_type = other DNA
gccctcactcccaccgtggcggcgccttacatcggcgctccgcttgaatccctccggagtcatgtggatctgatggtagg

SEQ ID NO: 143077 - DNA, 80 bp, synthetic construct
  source 1..80: mol_type = other DNA
ggccagaccccgaaaacgggccccccccaaaacacaccccccggtggtcgcgcgcggccctttaaagcggcgacggcgcg

SEQ ID NO: 143078 - DNA, 80 bp, synthetic construct
  source 1..80: mol_type = other DNA
acatgctggtatgcggagatgatctggtggtcatttgtgagagcgccggcgtacaggaggatgtcgtagcactgagagcg

SEQ ID NO: 143079 - DNA, 80 bp, synthetic construct
  source 1..80: mol_type = other DNA
ctgccgcgatgaggctggtccccgagatgtacggtgttttctgcagcgagacggtccggaactcagatgagctgcttaat

SEQ ID NO: 143080 - DNA, 80 bp, synthetic construct
  source 1..80: mol_type = other DNA
ggtgacgagggtggtgcggttaacgccgcctgggatctgcgcaggtgcgggcggttcagtttggccgccgtaccgggcgc

SEQ ID NO: 143081 - DNA, 80 bp, synthetic construct
  source 1..80: mol_type = other DNA
ccatcatacaaatgtacaccaatgtggaccaggacctcgtcggctggccagcacctcagggagcacggtccctgacacca

SEQ ID NO: 143082 - DNA, 80 bp, synthetic construct
  source 1..80: mol_type = other DNA
cgtgtgcgcacgggcgaaagccccccccccatcatgggataccatgtggaagtgtcttatacggctcaagcctatgctca

SEQ ID NO: 143083 - DNA, 80 bp, synthetic construct
  source 1..80: mol_type = other DNA
tgtcgcaggctctcatgatatcgccagagcgccacaacttcacccaagagtgcaactgttctatctacctaggccacatc

SEQ ID NO: 143084 - DNA, 80 bp, synthetic construct
  source 1..80: mol_type = other DNA
tggcaagtttctcgcggatggaggctgctcagccggcgcctatgatatcatcatctgcgacgagtgccattcagtggacg

SEQ ID NO: 143085 - DNA, 80 bp, synthetic construct
  source 1..80: mol_type = other DNA
tggcctaagctggaacaattctggcagaagcacttgtggaactttgtcagcggaatacaatacttagctggcctgtccac

SEQ ID NO: 143086 - DNA, 80 bp, synthetic construct
  source 1..80: mol_type = other DNA
cgtagctgttgaacagtacgttgacttcagcctggaccccaccttttccatcgaaacccgcacagctccccaggatgcgg

SEQ ID NO: 143087 - DNA, 80 bp, synthetic construct
  source 1..80: mol_type = other DNA
tagaaacaaacccctcgcccacacagtcacttaggtaactttccccatccagtaccaggtccatgttgacttcctacaga

SEQ ID NO: 143088 - DNA, 80 bp, synthetic construct
  source 1..80: mol_type = other DNA
gctacaagctcaacgccgtggccgaagccgtcctgaaggacaagaagaaggacctgagctatcgcgacatccccgcctac

SEQ ID NO: 143089 - DNA, 80 bp, synthetic construct
  source 1..80: mol_type = other DNA
agcagacattgttatgtgcactgaaaatgttaatcttgaaaccccggacacccacgtggtgtataaaccaggcaaagatg

SEQ ID NO: 143090 - DNA, 80 bp, synthetic construct
  source 1..80: mol_type = other DNA
gcgaaggaagttcgctctctcgacaagaaagcccttaagcacatcgagagcgtgtggcaagacttactggatgattctga

SEQ ID NO: 143091 - DNA, 80 bp, synthetic construct
  source 1..80: mol_type = other DNA
tagtggggtttggtattatcggatggatgttatgtggaaattcccgccttcgagaatataataaaatacctctgacataa

SEQ ID NO: 143092 - DNA, 80 bp, synthetic construct
  source 1..80: mol_type = other DNA
cggcggaatccaccacggggacggaaacggatacggcggtgtcggacgaccccgacgacacgtccgactggtcttatgac

SEQ ID NO: 143093 - DNA, 80 bp, synthetic construct
  source 1..80: mol_type = other DNA
gcagccgcaatcttcatgacagcaacaccccctggaacagctgatgcctttcctcagagcaacgctccaattcaagatga

SEQ ID NO: 143094 - DNA, 80 bp, synthetic construct
  source 1..80: mol_type = other DNA
ccagtcgcaagaacaattggagaaagcactcgactttgacatatacggagtgacctattccgtctctccacttgatctcc

SEQ ID NO: 143095 - DNA, 80 bp, synthetic construct
  source 1..80: mol_type = other DNA
accagttcgttcaggactgcaattgctccatatacccaggtcacatctcggggcatcggatggcgtgggatatgatgatg

SEQ ID NO: 143096 - DNA, 80 bp, synthetic construct
  source 1..80: mol_type = other DNA
cccgataacgccgcgtgcgcctgccgcgttcggcggctccccgggcacgcccgcgacgagcgcgacgaacaacagcacca

SEQ ID NO: 143097 - DNA, 80 bp, synthetic construct
  source 1..80: mol_type = other DNA
gaacaccccaagataaccaattaacttatgttgtcatagccatccttacagtggtggccgcaaccatggcaaacgagatg

SEQ ID NO: 143098 - DNA, 80 bp, synthetic construct
  source 1..80: mol_type = other DNA
ctccaaccgagtcttctgagccggaccctataattgtggacgacagatctgacgacggatctttctcgtcgatgcctcca

SEQ ID NO: 143099 - DNA, 80 bp, synthetic construct
  source 1..80: mol_type = other DNA
agtgacacaggacaatctgaagtgtccctgtcaggtaccatctccagagttcttcacggagctggacggcgtgaggattc

SEQ ID NO: 143100 - DNA, 80 bp, synthetic construct
  source 1..80: mol_type = other DNA
tctttcggcagtacgatgagatggaggagtgctcccagcgcattccttatcttgccgaaggccaacaaattgccgagcag

SEQ ID NO: 143101 - DNA, 80 bp, synthetic construct
  source 1..80: mol_type = other DNA
tgatcatcctagcgatcctggtccgtccacacatggtgtttaccatcacaaaatgtctcctggccatcatagggcccatt

SEQ ID NO: 143102 - DNA, 80 bp, synthetic construct
  source 1..80: mol_type = other DNA
gcccttgccaggtgccggcccccgagtttttcactgaggtggacggcgtcaggctgcacaggtacgcgccgacatgtcgg

SEQ ID NO: 143103 - DNA, 80 bp, synthetic construct
  source 1..80: mol_type = other DNA
ctggcagacggaggctgcgcaggaggggcatatgacatcatcatctgtgacgaatgccacgccacggactccacgaccat

SEQ ID NO: 143104 - DNA, 80 bp, synthetic construct
  source 1..80: mol_type = other DNA
ccctgaatgacctcacacctgttggaagactggtgaccgtgaatccatttgtgtctgtggccacagccaactcgaaggtc

SEQ ID NO: 143105 - DNA, 80 bp, synthetic construct
  source 1..80: mol_type = other DNA
agcaacttacgtcgctcggcttgaacgccgtcgcatactacagaggtgtggatgtggctgttatacccactgctggcgac

SEQ ID NO: 143106 - DNA, 80 bp, synthetic construct
  source 1..80: mol_type = other DNA
cttcagatgacagttcagaaatcaatttggttcaacagtccatgccaaatagacccaactacattggcttcagggacaac

SEQ ID NO: 143107 - DNA, 80 bp, synthetic construct
  source 1..80: mol_type = other DNA
catcttaccactgaaactcccttagttgtaaattctagcggtgccctatctgttgctactgcagaccccataagtgttcg

SEQ ID NO: 143108 - DNA, 80 bp, synthetic construct
  source 1..80: mol_type = other DNA
agtgggaccgattgctggtacgctatggaaatcagaccagtccaccaacagggtggtctggtgaggtcgatggtgctggc

SEQ ID NO: 143109 - DNA, 80 bp, synthetic construct
  source 1..80: mol_type = other DNA
cctggtttttgagatcaccaagcacttgctcgctctgctgggtcctatttatgtacttcaggcctcattgctgcgtatcc

SEQ ID NO: 143110 - DNA, 80 bp, synthetic construct
  source 1..80: mol_type = other DNA
cgtgggcattggttcgggtgtacctggatgaactctacggggttcgtcaaaacgtgcggtgcgccgccgtgctacacccg

SEQ ID NO: 143111 - DNA, 80 bp, synthetic construct
  source 1..80: mol_type = other DNA
cattctagcaaggccgttaaccacatcaactccgtgtggaaggacttgctagacgaccaagttacccccattccaacgac

SEQ ID NO: 143112 - DNA, 80 bp, synthetic construct
  source 1..80: mol_type = other DNA
gtccgtagtcaactgggccatcaagtgggaatacgtcgttctcatgtttctggtgctggcggacgcaaagatctgcgtag

SEQ ID NO: 143113 - DNA, 80 bp, synthetic construct
  source 1..80: mol_type = other DNA
tattccagccagagcctcagataggagaggagaattggcatgaaacatttgtttattatggcggcagagctcttaagaaa

SEQ ID NO: 143114 - DNA, 80 bp, synthetic construct
  source 1..80: mol_type = other DNA
ctcagttgcacatgacgcggcaggcaagagggtctactacatgacccgcgaccctgaaactcccctcgccagagccgcgt

SEQ ID NO: 143115 - DNA, 80 bp, synthetic construct
  source 1..80: mol_type = other DNA
ggaattcattggaaaagtcaacagtaatgccgccctaggagcgatgtttgaagaacagaaccaatggaagaacgcccggg

SEQ ID NO: 143116 - DNA, 80 bp, synthetic construct
  source 1..80: mol_type = other DNA
gacagcgtggtggccgacgcgcgcgactatgccagacgcaagagccggcggcgacggattgccaggcgccaccggagcac

SEQ ID NO: 143117 - DNA, 80 bp, synthetic construct
  source 1..80: mol_type = other DNA
gggtttggcaaccctgggtgtcatctggtgtttcgtcgtccggacttcaatcagtcgtatgatgctgggcacgctggtcc

SEQ ID NO: 143118 - DNA, 80 bp, synthetic construct
  source 1..80: mol_type = other DNA
tttccgcataccttacaacatcataacaagggataccagacatgtgaatttcatttacatatgtttaaataacaaccaat

SEQ ID NO: 143119 - DNA, 80 bp, synthetic construct
  source 1..80: mol_type = other DNA
aggtgccggccgcatatgcggcccaagggtacaaggtgctcgtcctgaacccatccgttgccgccaccttggggtttgga

SEQ ID NO: 143120 - DNA, 80 bp, synthetic construct
  source 1..80: mol_type = other DNA
aacaaaaacaaaatgaacataaacagagtgggcataaacagggaggggaaaaagaaacaagtcaaaagaaagctaatgac

SEQ ID NO: 143121 - DNA, 80 bp, synthetic construct
  source 1..80: mol_type = other DNA
gcgcgcccaggggctcatccggttgtgcatgctggtgcgcaaagtttatggaggccactacatgcagatggccttcatga

SEQ ID NO: 143122 - DNA, 80 bp, synthetic construct
  source 1..80: mol_type = other DNA
tggaccggcgcggggcggggggccggatacccacacggtcggggggggggtgtcgcgtgccgtctgctggacctcgccca

SEQ ID NO: 143123 - DNA, 80 bp, synthetic construct
  source 1..80: mol_type = other DNA
cgtctctgcatgttggtgcgctcagtggcgggggggaaatacatccagatggctctgctcactgttggacgctggttcaa

SEQ ID NO: 143124 - DNA, 80 bp, synthetic construct
  source 1..80: mol_type = other DNA
gagagcaacatcctagacatagatctacgccctgcatcagcatggacgttgtatgccgtggctacaacatttgtcacacc

SEQ ID NO: 143125 - DNA, 80 bp, synthetic construct
  source 1..80: mol_type = other DNA
gtgatatgccgggtcacgatagatcgcgccaggttttcgtcacggatgtcctggtagataggcaggcgtttcagaagagt

SEQ ID NO: 143126 - DNA, 80 bp, synthetic construct
  source 1..80: mol_type = other DNA
gcaatgggcattatgattttaaaattattgactgactttcaatcacatcagttgtgggctaccttgctgtccttgacatt

SEQ ID NO: 143127 - DNA, 80 bp, synthetic construct
  source 1..80: mol_type = other DNA
tggaaaagtcctctaaatagttgactaaaacaccaggtaccacaatgtggtagctgacaccgtggcgctcaagcatggtt

SEQ ID NO: 143128 - DNA, 80 bp, synthetic construct
  source 1..80: mol_type = other DNA
gaagtcaggccacgtagtgccacagcttgagcaaactgtgctgcctgtagctccgcctaacaaacggggggcgtaaaaaa

SEQ ID NO: 143129 - DNA, 80 bp, synthetic construct
  source 1..80: mol_type = other DNA
ctgcactctactacggagtgggctatactgccatgtactttttcagacctgccagcactctccacggggttggtacatct

SEQ ID NO: 143130 - DNA, 80 bp, synthetic construct
  source 1..80: mol_type = other DNA
gagtcacgttgttggctccctgtctcgcccaccttagccgtccctaactcatcagtgccagtccacgggtttcgtcgaca

SEQ ID NO: 143131 - DNA, 80 bp, synthetic construct
  source 1..80: mol_type = other DNA
cgtcatgctcactgtggcaagtgggatggtgagacacacatcccaggaggctctgtgcgctcttgtggctggggcctttc

SEQ ID NO: 143132 - DNA, 80 bp, synthetic construct
  source 1..80: mol_type = other DNA
tcagctgcggaaccatcaaggacgtctccggtgcatcccccgcgggggaatacacgataaacggtatcgtgtaccactgt

SEQ ID NO: 143133 - DNA, 80 bp, synthetic construct
  source 1..80: mol_type = other DNA
gacccgtcccacattacggccgaggcggcggcgagacgcctggcccggggctcacccccctctgcggctagttcttcggc

SEQ ID NO: 143134 - DNA, 80 bp, synthetic construct
  source 1..80: mol_type = other DNA
ctgcgagccttcacggaggccatgaccagatattctgctccccctggagacgccccacagcccacctacgacttggagct

SEQ ID NO: 143135 - DNA, 80 bp, synthetic construct
  source 1..80: mol_type = other DNA
tggtgccctcgtcgctttcaaaatcatgagcggcgagatgccatccgcagaagacatggtcaacttgctgccagctattc

SEQ ID NO: 143136 - DNA, 80 bp, synthetic construct
  source 1..80: mol_type = other DNA
agacttatgcgggtctgtcttccttgtcggtcaactgttcactttctcccccaggcgtcactggacaacgcaagactgca

SEQ ID NO: 143137 - DNA, 80 bp, synthetic construct
  source 1..80: mol_type = other DNA
caaaccgccgaacgacgccgcgtggtcatcctcgtcgccgaaatccccaaagttaaacacctccccggcggcgccgagct

SEQ ID NO: 143138 - DNA, 80 bp, synthetic construct
  source 1..80: mol_type = other DNA
cagcgagccagctctccgccccgtccttgaaggctacctgtaccacccataagatggcatatgattgtgacatggtggat

SEQ ID NO: 143139 - DNA, 80 bp, synthetic construct
  source 1..80: mol_type = other DNA
ccaatgggccgctgtggttcttcatcttctttgcagcggcctggtacttaaagggtaaggtggtccccgcggccacatac

SEQ ID NO: 143140 - DNA, 80 bp, synthetic construct
  source 1..80: mol_type = other DNA
gggggcgcgcctggatcgtttttccgagtgtctgcgcgccatggttcacacgcacgtcttcccccacgaggtcatgcggt

SEQ ID NO: 143141 - DNA, 80 bp, synthetic construct
  source 1..80: mol_type = other DNA
gcacatggccagaaacacacacactctggggtgaaagtgtcctagagagtgagctcatcattcccatcaccttggccgga

SEQ ID NO: 143142 - DNA, 80 bp, synthetic construct
  source 1..80: mol_type = other DNA
ctgttagtaacgggaaatgtgtcctaccgtgacttgggcagagtgatactgatggtaggctcaactatggcagacgaaat

SEQ ID NO: 143143 - DNA, 80 bp, synthetic construct
  source 1..80: mol_type = other DNA
gggcggagaagacattacagaaaatgggcttcaaattggcattgatgaaactaaagaagacaataacaagatatttgcca

SEQ ID NO: 143144 - DNA, 80 bp, synthetic construct
  source 1..80: mol_type = other DNA
cctgatcctgtgcttatgcgcaggagcagatgctcacactactgtcggacatgctatcggccgcagtgtgagtagcttta

SEQ ID NO: 143145 - DNA, 80 bp, synthetic construct
  source 1..80: mol_type = other DNA
cctgcgcgagtccccgggcgcgtcgttccgcggcatctccgcggaccacttcgaggcggaggtggtggagcgcaccgacg

SEQ ID NO: 143146 - DNA, 80 bp, synthetic construct
  source 1..80: mol_type = other DNA
agaaacacaacatggaacaatagttatcagagtacaatatgaaggggacggttctccgtgcaagatcccttttgaaataa

SEQ ID NO: 143147 - DNA, 80 bp, synthetic construct
  source 1..80: mol_type = other DNA
gaaattccaaccatgagatgtactgggtcagtggagctgctggcaacattgtccacgcagtgaacatgacgagtcaagtg

SEQ ID NO: 143148 - DNA, 80 bp, synthetic construct
  source 1..80: mol_type = other DNA
ctcatatgacacccgctgctttgactctactgtgactgagaaagatgtcagggtcgaggaggaggtctaccagtgttgcg

SEQ ID NO: 143149 - DNA, 80 bp, synthetic construct
  source 1..80: mol_type = other DNA
attcttggccgatggcggttgctcaggtggggcgtatgacatcatcatctgtgacgagtgccattctgtggacccgacaa

SEQ ID NO: 143150 - DNA, 80 bp, synthetic construct
  source 1..80: mol_type = other DNA
cttgtaccagcagttcgatgagatggaggaatgctcccagcacatcccctttctggccgagggtcaacatctcgccgaac

SEQ ID NO: 143151 - DNA, 80 bp, synthetic construct
  source 1..80: mol_type = other DNA
gctatgaccaggtactccgcgccgcccggggatcctcctatcccggcctacgacttggaactaataacatcttgttcatc

SEQ ID NO: 143152 - DNA, 80 bp, synthetic construct
  source 1..80: mol_type = other DNA
gccctgtggagggtcgctgcagaggagtatgtggaggtacggcaagttggggatttccattacatcacgggaatgacctc

SEQ ID NO: 143153 - DNA, 80 bp, synthetic construct
  source 1..80: mol_type = other DNA
acggaggacatggtcaatctgctacccgcgctgttgtcgccaggggtggctctcgtggtggtcgtgtgtgctgccatctt

SEQ ID NO: 143154 - DNA, 80 bp, synthetic construct
  source 1..80: mol_type = other DNA
agcccaggtggaggcggcgcttgagaatctcatcgtcctcaatgctgcctctgccgccagcagtcatggctggatctggt

SEQ ID NO: 143155 - DNA, 80 bp, synthetic construct
  source 1..80: mol_type = other DNA
gggttgctagacgacggtgttgagtttgtgcggtcctttgccccccggcggcgggtgcagtggcgtggacgtaaagtcca

SEQ ID NO: 143156 - DNA, 80 bp, synthetic construct
  source 1..80: mol_type = other DNA
cgatataaatccgtatctcggagcgggccttcgatgcgtgtacgctccagaacgccatgccgccgtcaaaccattcgagg

SEQ ID NO: 143157 - DNA, 80 bp, synthetic construct
  source 1..80: mol_type = other DNA
tctcccgtcgaagcgcgggccccggttggtggacaggaggccggcggccccagcgcagccacccagggtgaggccgccgg

SEQ ID NO: 143158 - DNA, 80 bp, synthetic construct
  source 1..80: mol_type = other DNA
ccggcgacgtcatccctgcacggagacggggcgataaccgcgccgggctcatcagcccgcggccattggctacacttaag

SEQ ID NO: 143159 - DNA, 80 bp, synthetic construct
  source 1..80: mol_type = other DNA
aaatacatagcaacctgtatggcggctgacctcgaggtcgcaaccagcgcctgggtgttgcttggtggtgtgatggcggc

SEQ ID NO: 143160 - DNA, 80 bp, synthetic construct
  source 1..80: mol_type = other DNA
taaacagcattgtgggactgggagtaaagtctctcaaacgccgacgctgctactaacattaaaagacgagtgttaattcc

SEQ ID NO: 143161 - DNA, 80 bp, synthetic construct
  source 1..80: mol_type = other DNA
tgttcaagctacttggcccaagttagaacaattctgggccaaacatatgtggaacttcatcagcggcatccagtacctgg

SEQ ID NO: 143162 - DNA, 80 bp, synthetic construct
  source 1..80: mol_type = other DNA
atacgcggtgggatctcagcttccatgcgagccagagccagatgtgagtgtgctaacatccatgctaacagatccatctc

SEQ ID NO: 143163 - DNA, 80 bp, synthetic construct
  source 1..80: mol_type = other DNA
tggcatgtcaaaggccgcgccgtgcccctggccacttactcctgtcttggcatatggtcctttgtcatcctacttttggt

SEQ ID NO: 143164 - DNA, 80 bp, synthetic construct
  source 1..80: mol_type = other DNA
gtgcgtgctgatggtgaacatcatgatcgacagcacgctacaacccacgccccagtgcacccgcggcaacgacaacctgc

SEQ ID NO: 143165 - DNA, 80 bp, synthetic construct
  source 1..80: mol_type = other DNA
cgtggtgttgacccgcttggaggagctgtctcagcagttgcaagatctgtctgccaaaatggctctgcttaaccctcccg

SEQ ID NO: 143166 - DNA, 80 bp, synthetic construct
  source 1..80: mol_type = other DNA
acggccgtgcgaagtggtatcagcctcaaccgtctgtggaccagtgtattgcttcactcccagccccgtggtccttggga

SEQ ID NO: 143167 - DNA, 80 bp, synthetic construct
  source 1..80: mol_type = other DNA
ccaaagctgcatgcccgaccatgggagaagctcacaacgacaaacgtgctgacccagcttttgtgtgcagacaaggagtg

SEQ ID NO: 143168 - DNA, 80 bp, synthetic construct
  source 1..80: mol_type = other DNA
actctatgcccggccatttgggcgtgcccccgcaagactgctagccgagtagcgttgggttgcgaaaggccttgtggtac

SEQ ID NO: 143169 - DNA, 80 bp, synthetic construct
  source 1..80: mol_type = other DNA
ggtctttatggtaatggtgttgtcacaaggagtggagcatatgtgagtgctatagcccaaactgaaaaaagcattgaaga

SEQ ID NO: 143170 - DNA, 80 bp, synthetic construct
  source 1..80: mol_type = other DNA
acgcgttttcgatcgggttgagatcggtgtggaggaggccgacggcccacgtctcgatgtcggacgacacgacgtcgcgc

SEQ ID NO: 143171 - DNA, 80 bp, synthetic construct
  source 1..80: mol_type = other DNA
ctactcaccgtaggggtaggcattttcctcctacccgctcgataagctggtaggttaacactccaatcctgttttttttc

SEQ ID NO: 143172 - DNA, 80 bp, synthetic construct
  source 1..80: mol_type = other DNA
agaggttagaggagaccccgtggaaacaacaatatgcggcccaagccccctcgaagctgtagaggaggtggaaggactag

SEQ ID NO: 143173 - DNA, 80 bp, synthetic construct
  source 1..80: mol_type = other DNA
cgtcgcctgcacaggaaggaccccggggacggggcccggttggcggcgacgcttcgtggcctcttcttctccgtgtacgc

SEQ ID NO: 143174 - DNA, 80 bp, synthetic construct
  source 1..80: mol_type = other DNA
gtcatgcaacttatgtcaacagacgcttactcccacaggggaggcagaactgggaggtggcaatcatggatgaggcccat

SEQ ID NO: 143175 - DNA, 80 bp, synthetic construct
  source 1..80: mol_type = other DNA
ccgccggtggccgtcagctgctcctccggggagatggggtggtcggacgccccgacgatggtcgggtctgcggtcgctcc

SEQ ID NO: 143176 - DNA, 80 bp, synthetic construct
  source 1..80: mol_type = other DNA
gccgcatggcgatattggggcagtcagcctcgactatcccgttggcacatcggggtctccgataatagatgccaacggtg

SEQ ID NO: 143177 - DNA, 80 bp, synthetic construct
  source 1..80: mol_type = other DNA
tatacctggggtggaaataagacagacgtgttcctgctgaagtccttgcggcctcccaacggtcagtggtttgggtgcac

SEQ ID NO: 143178 - DNA, 80 bp, synthetic construct
  source 1..80: mol_type = other DNA
cctgggtacccttggcccctttatggcaacgagggttgcggatgggcagggtggttactctccccccgcggctctcggcc

SEQ ID NO: 143179 - DNA, 80 bp, synthetic construct
  source 1..80: mol_type = other DNA
ctcggatttgcacgtgtctctggttaatgctgctcataagtaccgttgaagcagcagtggagaggcttgtcgtcctcaac

SEQ ID NO: 143180 - DNA, 80 bp, synthetic construct
  source 1..80: mol_type = other DNA
agactctggtgacacaaatcgacgagcctccctcgtacgaggaggcgctaaagcaaggcctgcccaccacccgtcccatc

SEQ ID NO: 143181 - DNA, 80 bp, synthetic construct
  source 1..80: mol_type = other DNA
tcgatctgcttgtcgggagtgccaccctttgctcggccctctatgtgggggacttgtgcgggtctgtctttcttgtcggt

SEQ ID NO: 143182 - DNA, 80 bp, synthetic construct
  source 1..80: mol_type = other DNA
cgccaggaggtcggaggtaacatcacgcgggtcgagtcagagaacaaggtaataatcctcgactcgtttgaccccctggt

SEQ ID NO: 143183 - DNA, 80 bp, synthetic construct
  source 1..80: mol_type = other DNA
aaggagcactctggtaagtcatgaaataaaggaaaatagaagatcaaacatagtgagaagtcaggccagattaagccata

SEQ ID NO: 143184 - DNA, 80 bp, synthetic construct
  source 1..80: mol_type = other DNA
tacgaaatcagccgtatttgtgaaatatgggaggtgcacaaggacacgaaactcaaggcgcagtcgccgatcgctcaacg

SEQ ID NO: 143185 - DNA, 80 bp, synthetic construct
  source 1..80: mol_type = other DNA
gccttcacggaggctatgaccaggtattcagctcctcctggagacgaacctcagccaatctatgatttggagcttatcac

SEQ ID NO: 143186 - DNA, 80 bp, synthetic construct
  source 1..80: mol_type = other DNA
gtcctcttatgtgtccatcaggtcacgtagtgggtctcttccgagccgccgtgtgtacgcgcggcgtggcgaaggctttg

SEQ ID NO: 143187 - DNA, 80 bp, synthetic construct
  source 1..80: mol_type = other DNA
tgtgattgacagccggaagagtgtgaaacccacgattatcactgacggtgaaaaccgagtggttctaggagagccatcag

SEQ ID NO: 143188 - DNA, 80 bp, synthetic construct
  source 1..80: mol_type = other DNA
attacggttcggaaggcgcagcaccactgcgctacccgtagaagggatgcctgcgcggccttccgaagcgaggtgtgggt

SEQ ID NO: 143189 - DNA, 80 bp, synthetic construct
  source 1..80: mol_type = other DNA
tgagggtgccatacttcgtgcgcgcccaggctctgctgggcgcatgcgcgatggttcggaggatcgcgggcggtcattac

SEQ ID NO: 143190 - DNA, 80 bp, synthetic construct
  source 1..80: mol_type = other DNA
gtgccggcacggcctgggtaaccaggtattttgtccacataaccgtgcgcaaaatgttgtggataagcaggacacagcag

SEQ ID NO: 143191 - DNA, 80 bp, synthetic construct
  source 1..80: mol_type = other DNA
ctgtagtcgtgctggagctgtagtgtgctgtccgattagtgtcgtatcgaattacggaagcggaagagttttacttcttg

SEQ ID NO: 143192 - DNA, 80 bp, synthetic construct
  source 1..80: mol_type = other DNA
gaatataaaggcgaagatgcgccgtgcaaaattccgtttagcaccgaagatggccagggcaaagcgcataacggccgcct

SEQ ID NO: 143193 - DNA, 80 bp, synthetic construct
  source 1..80: mol_type = other DNA
gctaactttggagcgcacagagtcatcgacagccgcaagtgtgtgaaaccagtcatcttggaagatgatgatcgagtcat

SEQ ID NO: 143194 - DNA, 80 bp, synthetic construct
  source 1..80: mol_type = other DNA
ctcttacaatttgattaaaatcaacattaatagtggcacagcaaacacaaacacgcatgtaaattttgcacacatgcttt

SEQ ID NO: 143195 - DNA, 80 bp, synthetic construct
  source 1..80: mol_type = other DNA
acacatggtatcggttggtatctggcagctttttgcgcggcgtggtatgtgcggggtaaacttgtcccgctggtgaccta

SEQ ID NO: 143196 - DNA, 80 bp, synthetic construct
  source 1..80: mol_type = other DNA
ggggcgcggacggcgtggtgggtctggtgtgtgcaggtggcgacgtttgtggtctctgcggtctgcgtcacggagcttct

SEQ ID NO: 143197 - DNA, 80 bp, synthetic construct
  source 1..80: mol_type = other DNA
cgtctattgacgacggccgcccaacccgagcgaccttcccctcccactttttcccccccccccccctccacgcaactccg

SEQ ID NO: 143198 - DNA, 80 bp, synthetic construct
  source 1..80: mol_type = other DNA
tcacgtggtcattgggcttgtgcgtgggtgtataaaagggggcgtgtccgggctcttcatcactttcttccgcatcgctg

SEQ ID NO: 143199 - DNA, 80 bp, synthetic construct
  source 1..80: mol_type = other DNA
tgcagtacactggcacggatggaccttgcaaagttcccatctcgtcagtggcttcattgaacgacctaacgccagtgggc

SEQ ID NO: 143200 - DNA, 80 bp, synthetic construct
  source 1..80: mol_type = other DNA
gagcgcgacatccgcactgaggagtcgatttaccaatgctgccagctggactctgtggcccgtaaggctatttcatcgct

SEQ ID NO: 143201 - DNA, 80 bp, synthetic construct
  source 1..80: mol_type = other DNA
gaaagccagaatttgcggcatatacctctttaattgggcggtgaaaaccaagctcaaactcactccattgcccgccgcag

SEQ ID NO: 143202 - DNA, 80 bp, synthetic construct
  source 1..80: mol_type = other DNA
caatgtctagaggagcgtaacctccgcgagcttgaaaaactgctggttcgaaatcgccgcgagctttggacagcttttag

SEQ ID NO: 143203 - DNA, 80 bp, synthetic construct
  source 1..80: mol_type = other DNA
aaagagcatcctattcgcaccagaattggccaacaacacttttgtggttgatggtccggagaccaaggaatgcccaactc

SEQ ID NO: 143204 - DNA, 80 bp, synthetic construct
  source 1..80: mol_type = other DNA
cggctaagcgtaggctggccagggggtctcccccctccctggctagctcttcagctagccagttatctgcgccttctttg

SEQ ID NO: 143205 - DNA, 80 bp, synthetic construct
  source 1..80: mol_type = other DNA
gccgcagtggtcttacatgcatatcgccggtcaggatgcctcggaatacctgagtcccgggctggtgcaattcgcccgtg

SEQ ID NO: 143206 - DNA, 80 bp, synthetic construct
  source 1..80: mol_type = other DNA
cattatggccgccgtactgtattacagcatggttgccaactgggccaaagtgttccttgtgctcctcttgttctcgggga

SEQ ID NO: 143207 - DNA, 80 bp, synthetic construct
  source 1..80: mol_type = other DNA
acattgatgctcatttcctgtctcagacaaagcaggggggggagaacttcgcataccttgtagcctaccaggccacggtg

SEQ ID NO: 143208 - DNA, 80 bp, synthetic construct
  source 1..80: mol_type = other DNA
ctccccccccccacccaacccgcaccacgagcacgggttggaggtagcagaggatcaaagggaggcaaggccggcagggc

SEQ ID NO: 143209 - DNA, 80 bp, synthetic construct
  source 1..80: mol_type = other DNA
atcataggatctcagctcccgtgcgaaccggagcctgacgttgcagtgctgacgtccatgctcacagatccagcccacat

SEQ ID NO: 143210 - DNA, 80 bp, synthetic construct
  source 1..80: mol_type = other DNA
actaaccacggttccacggtgcacttttccaatgcgcctgcttaaaatcggcggcgcggacgagctcccggaggaagcgg

SEQ ID NO: 143211 - DNA, 80 bp, synthetic construct
  source 1..80: mol_type = other DNA
aggcccataagcaccttgaaaggctcctcgggaggccccattatgtgtccctcggggcacgttgtgggactcttccgagc

SEQ ID NO: 143212 - DNA, 80 bp, synthetic construct
  source 1..80: mol_type = other DNA
ctttccggcgtcaacgtccgccacgactggttcggactcaggcctccctgccgctagtgatagccctgatcctcccagca

SEQ ID NO: 143213 - DNA, 80 bp, synthetic construct
  source 1..80: mol_type = other DNA
ctaagtcctcttaccgactgggctgccaacggcttgcgcgatctggctgtggcagttgaacctatcgtgttttcccccat

SEQ ID NO: 143214 - DNA, 80 bp, synthetic construct
  source 1..80: mol_type = other DNA
ggccgtgatgctgtcatcttgctcacttgcttgctgcatccctctctcgggtttgatgttaccaaaatcctcttagccat

SEQ ID NO: 143215 - DNA, 80 bp, synthetic construct
  source 1..80: mol_type = other DNA
accgtcgtcctctgcgaggcgtacgatacggggtgcgcgtggtatgagctgacaccagcagagaccactgtccgactgcg

SEQ ID NO: 143216 - DNA, 80 bp, synthetic construct
  source 1..80: mol_type = other DNA
tcacaaggtggtagctggtgacgattgtagggagccagtctgcagcgataccgtctgtcgcgttgcatcgtagaccaggg

SEQ ID NO: 143217 - DNA, 80 bp, synthetic construct
  source 1..80: mol_type = other DNA
ggaggtgttgtaccaacaatacgatgagatggaggagtgctctcggcatattccatacctagccgaaggccagcaaattg

SEQ ID NO: 143218 - DNA, 80 bp, synthetic construct
  source 1..80: mol_type = other DNA
gaaagaccaggaggatactcccccagatcatcaaagatgccatccagcgccgccttcgtacagctgtgctggctccaacc

SEQ ID NO: 143219 - DNA, 80 bp, synthetic construct
  source 1..80: mol_type = other DNA
atcacaaatggtaatgatggcgctgaagaaagtgagtgggaaaaagacgatgctatatctagacaaaaccaaatctgcaa

SEQ ID NO: 143220 - DNA, 80 bp, synthetic construct
  source 1..80: mol_type = other DNA
agcctcttcaccgtgggccctaagcagaagatacagcttatcaataccaacggcagctggcacatcaacaggacggcctt

SEQ ID NO: 143221 - DNA, 80 bp, synthetic construct
  source 1..80: mol_type = other DNA
aggaactcaacccgtccacactctccgtcgaagcagcccccccgagacatgccgcccaagggaaccgccaagcagctgat

SEQ ID NO: 143222 - DNA, 80 bp, synthetic construct
  source 1..80: mol_type = other DNA
gcacataaaccggactgccctcaattgcaatgacagcttacagacgggtttcatggcttccctgttttacacccacaggt

SEQ ID NO: 143223 - DNA, 80 bp, synthetic construct
  source 1..80: mol_type = other DNA
gaggaggagggaggtggagggaggaatagggcgtgcgggggggcgaggaaagagcgggcgcgaaaagggctggccgggga

SEQ ID NO: 143224 - DNA, 80 bp, synthetic construct
  source 1..80: mol_type = other DNA
aagcagataggttgataccggtacttaacgttgaactaagaatcacgttattactgtcaatggacacttcagccactggt

SEQ ID NO: 143225 - DNA, 80 bp, synthetic construct
  source 1..80: mol_type = other DNA
gcggttttggcagtacatcaatgggcgtggatagcggtttgactcacggggatttccaagtctccaccccattgacgtca

SEQ ID NO: 143226 - DNA, 80 bp, synthetic construct
  source 1..80: mol_type = other DNA
aagagcagtccttgatgatggcatttatagaattctccaaagaggattgttgggcaggtctcaagtaggagtaggagttt

SEQ ID NO: 143227 - DNA, 80 bp, synthetic construct
  source 1..80: mol_type = other DNA
ttgggacatgatgatgaattggtcacccactggcgctctggtggtggcgcagctactccggatcccacaagctgtcgtgg

SEQ ID NO: 143228 - DNA, 80 bp, synthetic construct
  source 1..80: mol_type = other DNA
tcctgaattcctccaactccggccaaaacggccgtcaccctgccaaacatgacgagccggaacgaggaagcgccagctga

SEQ ID NO: 143229 - DNA, 80 bp, synthetic construct
  source 1..80: mol_type = other DNA
taagtcttttacccgctcgcccaacagtccccaagaatactattcttgaacataaagcgcattttgctacatgggatgcc

SEQ ID NO: 143230 - DNA, 80 bp, synthetic construct
  source 1..80: mol_type = other DNA
agcgcaagttcaaagaagagctgctggaggcccttgtgcccgaaatctatggccctgcggcggacgtcaagcccgacatt

SEQ ID NO: 143231 - DNA, 80 bp, synthetic construct
  source 1..80: mol_type = other DNA
agcccgacacactcccgttaactcatggctgggcaacatcataatgtacgcaccaaccatttgggtacgtatggtgttaa

SEQ ID NO: 143232 - DNA, 80 bp, synthetic construct
  source 1..80: mol_type = other DNA
aggtcaactcttcacattccgccctcgcgtacaccaaactgtgcagggctgcaattgttctatctacactggtcacgtca

SEQ ID NO: 143233 - DNA, 80 bp, synthetic construct
  source 1..80: mol_type = other DNA
tagagccaaggcccctcctccttcgtgggacactatgtggaagtgtcttattagactcaaacccactctgaccgggccca

SEQ ID NO: 143234 - DNA, 80 bp, synthetic construct
  source 1..80: mol_type = other DNA
ggttagattccaaacctttgaccgggtggtttttaactgtgcaatgcagagtttaggtcctggggtgattggtatgagcg

SEQ ID NO: 143235 - DNA, 80 bp, synthetic construct
  source 1..80: mol_type = other DNA
cgagcgcgtgagtcaaacagcgtgagacacagctccagctccgactcgcgggaaaaggccgtggtgttgcggagcgccac

SEQ ID NO: 143236 - DNA, 80 bp, synthetic construct
  source 1..80: mol_type = other DNA
tgcctaaccttctagcctatccaaaaacccaaagtcaaactgctaaaaataacattgtcagtcaagtttacttgcatggt

SEQ ID NO: 143237 - DNA, 80 bp, synthetic construct
  source 1..80: mol_type = other DNA
cgctcacacacctcgccgtcaccggaagaagccggtgaaacaagcccaaccggcgacgtccctgcagagtacggtggagg

SEQ ID NO: 143238 - DNA, 80 bp, synthetic construct
  source 1..80: mol_type = other DNA
atcgggaggaagccacccagaatgcaaacagagttgctgcaaatggaggtggtgaaattaggggagatacttttcttacc

SEQ ID NO: 143239 - DNA, 80 bp, synthetic construct
  source 1..80: mol_type = other DNA
tcaaagaagaagtgcgatgagctggccgggaaactgaagtcactcggcttaaacgccgtcgcgttctacagaggtgtcga

SEQ ID NO: 143240 - DNA, 80 bp, synthetic construct
  source 1..80: mol_type = other DNA
ggtatcggctggtacctggtagcttttgttgcggcgtggtacgtgcggggcaagcttgtcccgttggtgacctacagcct

SEQ ID NO: 143241 - DNA, 80 bp, synthetic construct
  source 1..80: mol_type = other DNA
atggtcccgtaataaacagccaacgcacgccgcgtatgatgagttgcttgccaatgtttattgctgtggttgcgaaccct

SEQ ID NO: 143242 - DNA, 80 bp, synthetic construct
  source 1..80: mol_type = other DNA
tggtgctttagtggcctttaagatcatgagtggagaggcaccggcaatcgaagacatggttaacctcttgcccgcccttt

SEQ ID NO: 143243 - DNA, 80 bp, synthetic construct
  source 1..80: mol_type = other DNA
cgactggggcagagcgtgctgcactgcaccttgcaaggcgaggcgcggcgggactacgtgcgagactgcatctacctctt

SEQ ID NO: 143244 - DNA, 80 bp, synthetic construct
  source 1..80: mol_type = other DNA
tcgagtttctcctaaatgcctggaggaacaaacgagaacccatgggtttctcatatgacactcgctgttttgactctact

SEQ ID NO: 143245 - DNA, 80 bp, synthetic construct
  source 1..80: mol_type = other DNA
gtacgtggtccttgcctttctagtgctggcagacgcacgcgtctgtgcctgtctctggcttatgctgttgataggccagg

SEQ ID NO: 143246 - DNA, 80 bp, synthetic construct
  source 1..80: mol_type = other DNA
ggggagattcaggttttgtccactgttacacaatctttccttggaacatcaatctcaggggttctgtggaccgtcttcca

SEQ ID NO: 143247 - DNA, 80 bp, synthetic construct
  source 1..80: mol_type = other DNA
ggggtgcccaatggcatgctacaatcgccacaggtactgcccaccctccggcgcaaccaggagaagctctaccgcttcct

SEQ ID NO: 143248 - DNA, 80 bp, synthetic construct
  source 1..80: mol_type = other DNA
agcaagtacaggccatagctcaacaattcaaagagaaggtcctcggcctactccagcgagcaggtcaacagcaagcagag

SEQ ID NO: 143249 - DNA, 80 bp, synthetic construct
  source 1..80: mol_type = other DNA
ccaaagaacagataatggcatttgtaagatgttgcacaatggcttccaaaaggcaaacggccctcacgtccaagtggacg

SEQ ID NO: 143250 - DNA, 80 bp, synthetic construct
  source 1..80: mol_type = other DNA
cactgtggtggctgtcctacatgctggtcttggccgaggcccagattcaacaatgggttccccccctggaggccagggtg

SEQ ID NO: 143251 - DNA, 80 bp, synthetic construct
  source 1..80: mol_type = other DNA
tacgtgccgcgggtggtggcgttaccatccctacatggacccagttgtcgtataatttccccccccttctccgcgtgggt

SEQ ID NO: 143252 - DNA, 80 bp, synthetic construct
  source 1..80: mol_type = other DNA
tgcatgcctcgggtcttctcttctccctcctcctcctccttcctcccacccgtccccggtggcagagggcgtgcatgcgt

SEQ ID NO: 143253 - DNA, 80 bp, synthetic construct
  source 1..80: mol_type = other DNA
cccgttgatggccgaaacagacgacaaggaaatatcagtggctgcggagtgtcacaggccgcccaggcccaagttcccac

SEQ ID NO: 143254 - DNA, 80 bp, synthetic construct
  source 1..80: mol_type = other DNA
gaagtcccatacttagggaaaagagaagaccaatggtgcggctcattgattgggctaacaagcagggccacctgggcaaa

SEQ ID NO: 143255 - DNA, 80 bp, synthetic construct
  source 1..80: mol_type = other DNA
ccatatcagagtaatttttgccatactaaagttttaatggaaactgatgctttttcgcgggtgtggtggagcggggtgtt

SEQ ID NO: 143256 - DNA, 80 bp, synthetic construct
  source 1..80: mol_type = other DNA
aatgtctccactacacctttcggcatggttatgtgcgccaagcctgcaaaatttccaatgtggagctaagcaaccttatc

SEQ ID NO: 143257 - DNA, 80 bp, synthetic construct
  source 1..80: mol_type = other DNA
cattcccgccaggcgcaggggggatagccgagctgctctcctcagtccgcggcctataagcactcttaaagggtcctcag

SEQ ID NO: 143258 - DNA, 80 bp, synthetic construct
  source 1..80: mol_type = other DNA
gtgtgagaactgggaaccggtcacgatgctgggtagctttgacccccacgttggccgcgccatacgctggcgctccactt

SEQ ID NO: 143259 - DNA, 80 bp, synthetic construct
  source 1..80: mol_type = other DNA
ttccaaccaccatcatggcaaagaacgaggtcttttgcgtggagccgtcgaaaggcggccgcaaaccagcgcgcctgatc

SEQ ID NO: 143260 - DNA, 80 bp, synthetic construct
  source 1..80: mol_type = other DNA
cgcccgggacaactcggggaaaagagtctactacctcactagagaccctaccaacccactatccagggcagcttgggaga

SEQ ID NO: 143261 - DNA, 80 bp, synthetic construct
  source 1..80: mol_type = other DNA
cgagggaagcatggtatttacagatatgtgtcacccggggagcggccgtctggcatgtttgactccgtggtcctctgtga

SEQ ID NO: 143262 - DNA, 80 bp, synthetic construct
  source 1..80: mol_type = other DNA
accggcctgatccacctccaccaaaacatagtggacgtgcagtatctgtacggcgtgggctcagcagtcgtggtgtgggc

SEQ ID NO: 143263 - DNA, 80 bp, synthetic construct
  source 1..80: mol_type = other DNA
cgaaggagttttccacacactgtggcataccacgaagggggcagccctgatgagtggtgagggacgtctcgatccgtact

SEQ ID NO: 143264 - DNA, 80 bp, synthetic construct
  source 1..80: mol_type = other DNA
acacgtcgatgtgatcgtaatggcagctacggtctgctcggctctgtacgtgggagatgtgtgtggggccgtgatgatcg

SEQ ID NO: 143265 - DNA, 80 bp, synthetic construct
  source 1..80: mol_type = other DNA
ctctgttgaggatgtgcgccttggtaaagaaccttatgggaggtcggtacgttcagatggccatcattacccttggcaga

SEQ ID NO: 143266 - DNA, 80 bp, synthetic construct
  source 1..80: mol_type = other DNA
tgctcgttggcggcgttctggctgctttggccgcgtattgcctatccacaggctgcgtggtcataataggcaggattgtc

SEQ ID NO: 143267 - DNA, 80 bp, synthetic construct
  source 1..80: mol_type = other DNA
ggaccagatccgcgtacgcccacgtatccggcgactcctccggctcgcggtccccggcgaccgtctcgaattccccgttg

SEQ ID NO: 143268 - DNA, 80 bp, synthetic construct
  source 1..80: mol_type = other DNA
aagcccacttcacagacccagcaagtatagcagctagaggatacatttcaactcgagtagagatgggtgaagcagccggg

SEQ ID NO: 143269 - DNA, 80 bp, synthetic construct
  source 1..80: mol_type = other DNA
cacgggcccctgcaccccctcctgcgcccaactatacgttcgcgctgtggaggtgtctgcggaggaatacgtggaaataa

SEQ ID NO: 143270 - DNA, 80 bp, synthetic construct
  source 1..80: mol_type = other DNA
agctacacctccctcacccacgtcttcaaccgcttccccgacaaccagatcctgtgtcgcccgcccgcgcccaccatcac

SEQ ID NO: 143271 - DNA, 80 bp, synthetic construct
  source 1..80: mol_type = other DNA
taccagccttgttgtcacctggtgccctcgtagtcggtgtggtctgcgcggctatcctgcgtagacacgtcggtcagtca

SEQ ID NO: 143272 - DNA, 80 bp, synthetic construct
  source 1..80: mol_type = other DNA
gggccttaactcttatgcagtagggtcccagctcccttgtgagccggagcccgatgtggcagttctcacgtccatgctga

SEQ ID NO: 143273 - DNA, 80 bp, synthetic construct
  source 1..80: mol_type = other DNA
cgccgagacctcagttagactgcgggcttacctaaatacaccagggttgcccgtttgccaggaccatctggagttctggg

SEQ ID NO: 143274 - DNA, 80 bp, synthetic construct
  source 1..80: mol_type = other DNA
ggttcccccttcgatgctcccctggacccgccgttcgtgcctccgcggtacctgcggcctaccgggaggagaaacagcat

SEQ ID NO: 143275 - DNA, 80 bp, synthetic construct
  source 1..80: mol_type = other DNA
aacgtcgtcagttctgtcaacacggtatcgaaaatgctgttgaatagattcaccatgacatacaggaagccaacttatga

SEQ ID NO: 143276 - DNA, 80 bp, synthetic construct
  source 1..80: mol_type = other DNA
tcgcaccgcgcgcccccgatcccatcgcgcccgccctcctcgccgggcggctccccgcgcgggcccgcgtctcccgccgc

SEQ ID NO: 143277 - DNA, 80 bp, synthetic construct
  source 1..80: mol_type = other DNA
gagcccgcgcggtcagagctaagcttattgcccaaggtggaggcgctgcaatttgcggcaagtacctcttcaactgggca

SEQ ID NO: 143278 - DNA, 80 bp, synthetic construct
  source 1..80: mol_type = other DNA
atctggcggggaaagaagacccccatggggttttcttatgacaccagatgctttgattcgactgtgactgagcgcgacat

SEQ ID NO: 143279 - DNA, 80 bp, synthetic construct
  source 1..80: mol_type = other DNA
tctggttggccaggcggaggctgcattagagaacttaatcgttctcaatgcagcctccgcggctggtaaccatggcctgg

SEQ ID NO: 143280 - DNA, 80 bp, synthetic construct
  source 1..80: mol_type = other DNA
tgccccactgattgcttccgaaaacacccggaggcgacctacgcaaaatgtggatcaggaccctggctcacccccagatg

SEQ ID NO: 143281 - DNA, 80 bp, synthetic construct
  source 1..80: mol_type = other DNA
tgtgactgtgccatagggcgccattttcccgtgcccaatatggctaaagtccgcttttttatacgtcatcggccccgcga

SEQ ID NO: 143282 - DNA, 80 bp, synthetic construct
  source 1..80: mol_type = other DNA
ctggtctggacggcggaggtcggtgtggcaaggcccggagaaggcggcactgccgccgctgcggcggaaaccgcggccgc

SEQ ID NO: 143283 - DNA, 80 bp, synthetic construct
  source 1..80: mol_type = other DNA
ctcgcaggggctgctgtgggaagcattggcttaggacgggtgatcgtggacgtcttagccggatacggtgctggcgtgtc

SEQ ID NO: 143284 - DNA, 80 bp, synthetic construct
  source 1..80: mol_type = other DNA
acggccacgcagaccttcctggggactgcgataagtggcgtcatgtggactgtgtaccatggagccggcagcaagactat

SEQ ID NO: 143285 - DNA, 80 bp, synthetic construct
  source 1..80: mol_type = other DNA
tcagatctttcgatcagggctggggtcctatccagtatgccaacatatccggtccttccgaggataagccgtactgctgg

SEQ ID NO: 143286 - DNA, 80 bp, synthetic construct
  source 1..80: mol_type = other DNA
ttagtgcgttatgtcgtggcagtcgggatcacatttcatcttgagctggggccagagattgtggctctgacactgttaca

SEQ ID NO: 143287 - DNA, 80 bp, synthetic construct
  source 1..80: mol_type = other DNA
acatgaaactgacgaaaacagagcaaaagtcgaggtcacacccaattcaccaagagcagaagcaaccttgggaggttttg

SEQ ID NO: 143288 - DNA, 80 bp, synthetic construct
  source 1..80: mol_type = other DNA
gggcagcaacctaaagattatgacatagatttggctttctttgacacacctggaggcaccatcacaggaggcacaggcga

SEQ ID NO: 143289 - DNA, 80 bp, synthetic construct
  source 1..80: mol_type = other DNA
ctcgacgggcgacgtggttgtagtggccaccgacgctcttatgacggggtacacggtggacttcgactccgtgattgact

SEQ ID NO: 143290 - DNA, 80 bp, synthetic construct
  source 1..80: mol_type = other DNA
gcgccgggcggtaggagcggctcgggacccggaggcagtggtggcagaggcacgtcggcgccgcgcgcgggcaggttctg

SEQ ID NO: 143291 - DNA, 80 bp, synthetic construct
  source 1..80: mol_type = other DNA
cgaaaacccgggcatggcgtactcgccgaccaccacatgcacgtttttttcgccccggagaccgcacaggaagtccacca

SEQ ID NO: 143292 - DNA, 80 bp, synthetic construct
  source 1..80: mol_type = other DNA
tgtcctcaccgccgaactgagcagacacccgcgcgcgtacaccaacaagcgcctggcccacctgacggtgtattacaagc

SEQ ID NO: 143293 - DNA, 80 bp, synthetic construct
  source 1..80: mol_type = other DNA
gggaatgagaattatttagattacatgacatcaatgaagagattcaagaatgagagtgatcccgaaggagcactctggta

SEQ ID NO: 143294 - DNA, 80 bp, synthetic construct
  source 1..80: mol_type = other DNA
tatgcgaacttcatcggactgttggcattgccgttgacctgcttccccagcacgtccgtcctttggttcctgaccgtcct

SEQ ID NO: 143295 - DNA, 80 bp, synthetic construct
  source 1..80: mol_type = other DNA
agaagccagctcgcctcatcgtatacccagacctgggtgtgcgggtttgcgagaaaatggccttgtatgacgtagtgaag

SEQ ID NO: 143296 - DNA, 80 bp, synthetic construct
  source 1..80: mol_type = other DNA
tggggacgtcgtggtttgcgccacggacgccctcatgactggtttcactggcgactttgactccgtgatagactgcaaca

SEQ ID NO: 143297 - DNA, 80 bp, synthetic construct
  source 1..80: mol_type = other DNA
aaaaagcgggctacaaataggatcagacaatgcagaaacacaagctaaacctgtatacgcagatccttcctatcaaccag

SEQ ID NO: 143298 - DNA, 80 bp, synthetic construct
  source 1..80: mol_type = other DNA
atatgtgtacgatgtcaacaaaatcacatatgtggtgaaggtggaacctcacacgggtgactatctagcggccaacgagt

SEQ ID NO: 143299 - DNA, 80 bp, synthetic construct
  source 1..80: mol_type = other DNA
cacagctgagcgaggaggtcgggcccatagatcggctcttgaagaactgcctgatgctcttcaaaccatcatcctgataa

SEQ ID NO: 143300 - DNA, 80 bp, synthetic construct
  source 1..80: mol_type = other DNA
gcacattttttagatccggctagcatagcagccagaggctgggcggcacatagagccagagcaaatgaaagtgcaacaat

SEQ ID NO: 143301 - DNA, 80 bp, synthetic construct
  source 1..80: mol_type = other DNA
gtggaccacgccccggcggggttcaaccccaccgtcaccgtctttcacgtgtacgacatcctggagaacgtggagcacgc

SEQ ID NO: 143302 - DNA, 80 bp, synthetic construct
  source 1..80: mol_type = other DNA
aggtacgaggagcctaccccggaagaagattcagtgttgtgaagctaacacacacacaccccatgtacatactccgcaaa

SEQ ID NO: 143303 - DNA, 80 bp, synthetic construct
  source 1..80: mol_type = other DNA
acttacctcaagtgtggctctgggccttggctaacgccaaagtgcctggttgactacccttacaggctctggcattaccc

SEQ ID NO: 143304 - DNA, 80 bp, synthetic construct
  source 1..80: mol_type = other DNA
aaccaccatgaggtccccggtgtttactgacaattccactccacctgctgtgcctcagaccttccaagtggctcatctgc

SEQ ID NO: 143305 - DNA, 80 bp, synthetic construct
  source 1..80: mol_type = other DNA
cggcagctccacgtcggccacccccacgaagaagtcgaacgcggggtgcagctcaagagccaggttggcgttgtcgggct

SEQ ID NO: 143306 - DNA, 80 bp, synthetic construct
  source 1..80: mol_type = other DNA
actacctggaaatcccgcagtggcttcccttatggctttctcagccgctctgaccagcccgctgtccacttcaacaaccc

SEQ ID NO: 143307 - DNA, 80 bp, synthetic construct
  source 1..80: mol_type = other DNA
ctgggatcttggtcctcttcggcttctttaccttatcaccttggtataagcactggatcggccgtctcatgtggtggaat

SEQ ID NO: 143308 - DNA, 80 bp, synthetic construct
  source 1..80: mol_type = other DNA
cctcccccgctcctcccccgctcctcccccgctcctccccgtctgtgggtgtggctcctccccgtctgtggtgtgctcct

SEQ ID NO: 143309 - DNA, 80 bp, synthetic construct
  source 1..80: mol_type = other DNA
ggccattttggaagccgtggtaccctctcgtactaacccaacccacgagaaggtgctggctatcgtgaacgccctaacag

SEQ ID NO: 143310 - DNA, 80 bp, synthetic construct
  source 1..80: mol_type = other DNA
gctctaccaacagttcgacgaaatggaagagtgttccaaacaccttccactagtcgagcatgggttacaactggctgagc

SEQ ID NO: 143311 - DNA, 80 bp, synthetic construct
  source 1..80: mol_type = other DNA
ggggcccggcccgcgccccggccccgcggacgcgcgccgtgtgccccagtcgcactcgtccctggctcaggccgcgaacc

SEQ ID NO: 143312 - DNA, 80 bp, synthetic construct
  source 1..80: mol_type = other DNA
aggagtgctctgcaaccaccacctacttgcagcagggagcacagattgccgagcagttcaaacagaaggtgcttggtctc

SEQ ID NO: 143313 - DNA, 80 bp, synthetic construct
  source 1..80: mol_type = other DNA
gaaacccttaccttcaattacacagagccccttacacttatgaacagcaaccttgcgcttaacgtaaactcctctaaagg

SEQ ID NO: 143314 - DNA, 80 bp, synthetic construct
  source 1..80: mol_type = other DNA
gagtacagtattggaggacgaactacatccatctccatttgagctgggacctacacttcaggacctttatgatttggagg

SEQ ID NO: 143315 - DNA, 80 bp, synthetic construct
  source 1..80: mol_type = other DNA
ggcgatgtcgtcatttgcgcgacggacgccctcatgaccggctacactggtgactttgactctgtcattgactgcaatgt

SEQ ID NO: 143316 - DNA, 80 bp, synthetic construct
  source 1..80: mol_type = other DNA
cgaacaaacttatcaagaaataaccagtgttagtcgcgcactgggccaggaggacactggcagtttagaggccacactta

SEQ ID NO: 143317 - DNA, 80 bp, synthetic construct
  source 1..80: mol_type = other DNA
gccgggcccttgttcccggcgtcgcgcgcgccccgctggggcttaccctggctggcctcgaaggccgtgaacgtaatgtc

SEQ ID NO: 143318 - DNA, 80 bp, synthetic construct
  source 1..80: mol_type = other DNA
agaccacggtcagactacgagcctatatgaatactccgggtttgcctgtttgccaagaccatctggagttctgggagggc

SEQ ID NO: 143319 - DNA, 80 bp, synthetic construct
  source 1..80: mol_type = other DNA
ttgattaattcccacagatactggacgatcacggtagtcctgccccccggtccggggttgctgtgcagattcaatcgagc

SEQ ID NO: 143320 - DNA, 80 bp, synthetic construct
  source 1..80: mol_type = other DNA
cgtctcactaacggacccgcgcgggggacagccgcttagggcgtcggcgacgcgcttgacggcttcctccgagagcagaa

SEQ ID NO: 143321 - DNA, 80 bp, synthetic construct
  source 1..80: mol_type = other DNA
ctccagcctacagcttcaactgccttggaatgagcaacagagacttcttggagggagtatctggagcaacatgggtggat

SEQ ID NO: 143322 - DNA, 80 bp, synthetic construct
  source 1..80: mol_type = other DNA
gccccctcttgtgcccctcggggcatgctgtagggctctttcgtgcagcggtgtgcactagaggtgttgccaaagcgatc

SEQ ID NO: 143323 - DNA, 80 bp, synthetic construct
  source 1..80: mol_type = other DNA
atgtgcggcagctttttaagctcctcgtaggtaaggtcctcagggcattgcaggccgtgctgctccagtgcccactcctg

SEQ ID NO: 143324 - DNA, 80 bp, synthetic construct
  source 1..80: mol_type = other DNA
cggctgccgtgtactggggcggcgggaaaccgggcctccgggcgtaacaccgccctccagcgtcaagtatgtggttggcg

SEQ ID NO: 143325 - DNA, 80 bp, synthetic construct
  source 1..80: mol_type = other DNA
gcgacgaaatgcttgcgcgctggctcggaaaccgcgacccccagtccctggagcagcggcgtaagctcatgctggccgtg

SEQ ID NO: 143326 - DNA, 80 bp, synthetic construct
  source 1..80: mol_type = other DNA
cgaataaaatgatttgaattaaattcatggatctttattgatttttacaccagcacgggtagtcagtctcccaccaccag

SEQ ID NO: 143327 - DNA, 80 bp, synthetic construct
  source 1..80: mol_type = other DNA
tcaaacgccagcattatctatgaagctggagacgtgatgctgcatatgcccgggtgcgtaccttgcgtcaggaagggcaa

SEQ ID NO: 143328 - DNA, 80 bp, synthetic construct
  source 1..80: mol_type = other DNA
tacacctggggtgagaatgagaaagatgtgttcctgctgaagtcccagcggcctcccagtggtcggtggtttgggtgctc

SEQ ID NO: 143329 - DNA, 80 bp, synthetic construct
  source 1..80: mol_type = other DNA
cctatctaaatatataccttatactggactagagccaatattaaaatgaagtgggtgtggcgatgtactttgattgggtg

SEQ ID NO: 143330 - DNA, 80 bp, synthetic construct
  source 1..80: mol_type = other DNA
tcctcaactcccagcattccctatgtagctccgcccttcgtttcttccgacgggttacaggaaaaccccccgggagtttt

SEQ ID NO: 143331 - DNA, 80 bp, synthetic construct
  source 1..80: mol_type = other DNA
cgaacgtctcggctagtatatgggagggcagcgcgttggggatcaccgacgccgaccacatagagtcaaggtccgtggag

SEQ ID NO: 143332 - DNA, 80 bp, synthetic construct
  source 1..80: mol_type = other DNA
cctggtggtcgtcggttggtttctgtatctagcgttcgtcgcccttcaccaacgacgatgcatgttcggcgtcgtgagtc

SEQ ID NO: 143333 - DNA, 80 bp, synthetic construct
  source 1..80: mol_type = other DNA
accatctgtcgcgttgcatcataaattaaaagctcgcgcacagcttcgtacttctgttttaagaaacgaacacgctgcca

SEQ ID NO: 143334 - DNA, 80 bp, synthetic construct
  source 1..80: mol_type = other DNA
ttctggagcaggtgtaaccagctgggcagaaagcaaattacgcaacaactgagacttcccacagccagtgggtccataaa

SEQ ID NO: 143335 - DNA, 80 bp, synthetic construct
  source 1..80: mol_type = other DNA
agcgttgcagggtgcgcactccccccagggaggttgccgccagtgccgccgccgaggcggaaaaggcttgtgaagctcga

SEQ ID NO: 143336 - DNA, 80 bp, synthetic construct
  source 1..80: mol_type = other DNA
tgcacaagagagcaacaggagtgttcacagtggcagaatttggggttggcctacgcacaaaggtgtttttagacctgcgt

SEQ ID NO: 143337 - DNA, 80 bp, synthetic construct
  source 1..80: mol_type = other DNA
cgggtggtaaactccatcatttcctcgctcaggtactcgtcctccagcagcgccagccagtcctcgatctgcagctgctg

SEQ ID NO: 143338 - DNA, 80 bp, synthetic construct
  source 1..80: mol_type = other DNA
cttggcctcgtcaaacccgcccccctccgcgccttcctccccctccccgcccacgcccccggggtcggaagtcttgagtt

SEQ ID NO: 143339 - DNA, 80 bp, synthetic construct
  source 1..80: mol_type = other DNA
cgttttgactcaacagtcaccgagagagacataagaaccgaaggggacatatacctggcctgttcactgcccgatgaagc

SEQ ID NO: 143340 - DNA, 80 bp, synthetic construct
  source 1..80: mol_type = other DNA
cactcagttccacatttccatataaaggccaaggcatttattctcaggataattgtttcagcatcgcaaccgcatcagac

SEQ ID NO: 143341 - DNA, 80 bp, synthetic construct
  source 1..80: mol_type = other DNA
ttctatcttcctcttggcacttctttcgtgcctgactgtccccgcttcggccgttaactatcgcaatgtctcaggcatct

SEQ ID NO: 143342 - DNA, 80 bp, synthetic construct
  source 1..80: mol_type = other DNA
ccagggctacaaggtgcttgtcctgaatccgtctgtcgcggcaaccctttcttttggttcctacatgagtaaagcctacg

SEQ ID NO: 143343 - DNA, 80 bp, synthetic construct
  source 1..80: mol_type = other DNA
ttgtaggagatgctaacggaattttgacccaaggaaaaaaaatgattaggccacaacccatggagcacaaatactcatgg

SEQ ID NO: 143344 - DNA, 80 bp, synthetic construct
  source 1..80: mol_type = other DNA
tccccaggggtcgtaggcgtcgctgcggagggtggtggtgtgcttcagaaaatcgcggcgcttttttgcgtgccggtggc

SEQ ID NO: 143345 - DNA, 80 bp, synthetic construct
  source 1..80: mol_type = other DNA
ttcagtgtcctcatagccagggatcagcttgaacaggctcttgattgcgaaatctacggagcctgctactccatagaacc

SEQ ID NO: 143346 - DNA, 80 bp, synthetic construct
  source 1..80: mol_type = other DNA
gacccgcgaggccgccgcaggtactacctgactagagaccccaccactccactcgccagggctgcctgggagacagcaag

SEQ ID NO: 143347 - DNA, 80 bp, synthetic construct
  source 1..80: mol_type = other DNA
tcgccagaacgccacaactttacccaagagtgcaactgttccatctaccaaggccatgtcactggccatcgcatggcgtg

SEQ ID NO: 143348 - DNA, 80 bp, synthetic construct
  source 1..80: mol_type = other DNA
ccctggagccatgcacgtgtggagctgtcgacctgtacctcgtcacccggaacgctgatgtcattccagctcggagacag

SEQ ID NO: 143349 - DNA, 80 bp, synthetic construct
  source 1..80: mol_type = other DNA
gtcacgcccgccccgcggggtcttaccctggctggcttcgaaggccgtgaacgtaatgtcggcggtgagagcggcgccct

SEQ ID NO: 143350 - DNA, 80 bp, synthetic construct
  source 1..80: mol_type = other DNA
tggtggatgcagtatttcatcgccagagccgaagcccttctccacgtgtacgttccatcctttgaaccgcgtggactgcg

SEQ ID NO: 143351 - DNA, 80 bp, synthetic construct
  source 1..80: mol_type = other DNA
gagaggtgacggtatctgccgcaccacatgcccatgcggtgccgacatagttggccacgtcaagaatgggtccatgagga

SEQ ID NO: 143352 - DNA, 80 bp, synthetic construct
  source 1..80: mol_type = other DNA
gtcgcagaaggccgcgtcggcgccgacctactgctgctgtgcgtgcggctagagcgttagtgcgacgcgctagacgcgtc

SEQ ID NO: 143353 - DNA, 80 bp, synthetic construct
  source 1..80: mol_type = other DNA
cgcgggtgggtgatttccactatgtgaccggcatgaccactgacaatctcaaatgcccatgccaagtcccatctccagaa

SEQ ID NO: 143354 - DNA, 80 bp, synthetic construct
  source 1..80: mol_type = other DNA
ccatgtcaggttccagctcctgagtttttcacggaggtggatggggtgcggttgcacaggtacgccccggtgtgcaaacc

SEQ ID NO: 143355 - DNA, 80 bp, synthetic construct
  source 1..80: mol_type = other DNA
tactttaagcgctgctgcggccagtccagttatcgcggcttcgcggtggcggtcctgacggccaacgaggaccacgtgca

SEQ ID NO: 143356 - DNA, 80 bp, synthetic construct
  source 1..80: mol_type = other DNA
tgcctgatagggtgcttgcgagtgccccgggaggtctcgtagaccgtgcatcatgagcacaaatcctaaacctcaaagaa

SEQ ID NO: 143357 - DNA, 80 bp, synthetic construct
  source 1..80: mol_type = other DNA
cggggcgcacctcggcggccaagccccggcccgcccggtggtccccgaggcagaggcggaccctcggaggcgcggaagaa

SEQ ID NO: 143358 - DNA, 80 bp, synthetic construct
  source 1..80: mol_type = other DNA
caaaaaatcaaaagctattaatgttttgagagggtttaggaaagagattggaaggatgctgaacatcttgaacaggagac

SEQ ID NO: 143359 - DNA, 80 bp, synthetic construct
  source 1..80: mol_type = other DNA
cctgtgtattgcttcacaccatcgccggtggtcgtaggcactactgatagaaggggcgtcccaacctacacctggggtgc

SEQ ID NO: 143360 - DNA, 80 bp, synthetic construct
  source 1..80: mol_type = other DNA
ataattccaaatgctgggttgcagccacacccacgcttgccattccgaactcatcgactccggtcagtgggttccggcgt

SEQ ID NO: 143361 - DNA, 80 bp, synthetic construct
  source 1..80: mol_type = other DNA
acacgacgacacaggcaagagatactactacctcacaagggacccaaccataccaattgcacgagctgcctgggagacag

SEQ ID NO: 143362 - DNA, 80 bp, synthetic construct
  source 1..80: mol_type = other DNA
cgccgagatgcatggtcgactatccctataggctgtggcattacccctgcactgtgaactacaccatacacaaggtccgc

SEQ ID NO: 143363 - DNA, 80 bp, synthetic construct
  source 1..80: mol_type = other DNA
accaccagtggtgcacggctgtcctctcccccctccaaagcaacctccggtaccaccgccccggaggaaaaagacaatag

SEQ ID NO: 143364 - DNA, 80 bp, synthetic construct
  source 1..80: mol_type = other DNA
gaatgtttgacagtgtagtgctttgtgagtgctacgacgcaggggctgcgtggtacgatctcacaccagcggagaccacc

SEQ ID NO: 143365 - DNA, 80 bp, synthetic construct
  source 1..80: mol_type = other DNA
ggagtcggcgggccgcaccacctccaggcttgtgggcatcttcaaccctggtccgtctcagaaactccagctcgtgaata

SEQ ID NO: 143366 - DNA, 80 bp, synthetic construct
  source 1..80: mol_type = other DNA
ccatgtaacatccagccgttgtccaagagtaacaacaccttactatgccccactgactgcttccgaaaacatccgggtgc

SEQ ID NO: 143367 - DNA, 80 bp, synthetic construct
  source 1..80: mol_type = other DNA
gtgttgattcctgagccggaaaaacaacgctcacagacagacaatcagttggccatcttcctgatctgcatcctggcatt

SEQ ID NO: 143368 - DNA, 80 bp, synthetic construct
  source 1..80: mol_type = other DNA
ccgggcagtaccacgccgtactggtattcgtaccggctgagcagggtctccagggagtggttggtggccgcgtggaacgg

SEQ ID NO: 143369 - DNA, 80 bp, synthetic construct
  source 1..80: mol_type = other DNA
gacaacatcgtctgcacaagctgcgcgctgtaagcaacagcgctccgatcggggtcaggcgtcgctctcggtcccgcata

SEQ ID NO: 143370 - DNA, 80 bp, synthetic construct
  source 1..80: mol_type = other DNA
cctgaggccgatactgtcgtcgtcccctcaaactggcagatgcacggttacgatgcgcccatctacaccaacgtgaccta

SEQ ID NO: 143371 - DNA, 80 bp, synthetic construct
  source 1..80: mol_type = other DNA
cgcggccgcgtggaggagagcccagagggcctcccccgtggccatggcttcgcctacatgcggaacgggagacgctacgc

SEQ ID NO: 143372 - DNA, 80 bp, synthetic construct
  source 1..80: mol_type = other DNA
gatgcggggtggctaaatggcgattcatttcgggtgaccttttgtttattggtgacggaagtgggcgtgacccaccaccc

SEQ ID NO: 143373 - DNA, 80 bp, synthetic construct
  source 1..80: mol_type = other DNA
caaacggtgaacctgactcaggcctttaaaaatttgcaaggcatgtggggcgtcaaggccccggtgggcgatcgcgccac

SEQ ID NO: 143374 - DNA, 80 bp, synthetic construct
  source 1..80: mol_type = other DNA
gctttcgcctgggccacgccagcatctatcccttatcaacagcaacgggagctggcacatcaacaggacatccctcaatt

SEQ ID NO: 143375 - DNA, 80 bp, synthetic construct
  source 1..80: mol_type = other DNA
acaggattaggccccgacatcatacaagctaattccacggactccttctatggtgatgatgagattgtgaacactgatag

SEQ ID NO: 143376 - DNA, 80 bp, synthetic construct
  source 1..80: mol_type = other DNA
ctaggctacattttaagagacgtgagcaagaaggaagggggagcaatgtacgccgatgatacagcaggatgggacacaag

SEQ ID NO: 143377 - DNA, 80 bp, synthetic construct
  source 1..80: mol_type = other DNA
caccaccgcccccatgtccttccacccagacgcgcgcccctctaccgacggagcccgcgttcccccccgccgccaccgga

SEQ ID NO: 143378 - DNA, 80 bp, synthetic construct
  source 1..80: mol_type = other DNA
ttaggttttacgctttggtacaagatctgtctaaagatggcgtgggagttggaggaaattgtgggcctttgaaaaacgtt

SEQ ID NO: 143379 - DNA, 80 bp, synthetic construct
  source 1..80: mol_type = other DNA
taagcagaacgtccagctcatcaacaccaatggtagctggcacattaacaggaccgctctcaactgcaatgatagcatta

SEQ ID NO: 143380 - DNA, 80 bp, synthetic construct
  source 1..80: mol_type = other DNA
ggcgctgtttgatcggggctgtggtgactagcaccccgtcgaccggccgcccgcgcgtgtcggcatgcgtcagacggggc

SEQ ID NO: 143381 - DNA, 80 bp, synthetic construct
  source 1..80: mol_type = other DNA
gcacgacgggctgtcggatcgacgaaaagtagttggcccccagagccgggtggaccagggggacctgccgcgacaggtcg

SEQ ID NO: 143382 - DNA, 80 bp, synthetic construct
  source 1..80: mol_type = other DNA
cgggatcttcattacagataacgtgcacacatggacagaacaatataagttccaaccagaatccccttcaaaactagctt

SEQ ID NO: 143383 - DNA, 80 bp, synthetic construct
  source 1..80: mol_type = other DNA
gcagcctgaatggcgaatggcgctttgcctggtttccggcaccagaagcggtgccggaaagctggctggagtgcgatctt

SEQ ID NO: 143384 - DNA, 80 bp, synthetic construct
  source 1..80: mol_type = other DNA
aaattgtcttcatcagcaagggcagtatctttgcattgaattaacaacagtgcgtattcattgggaggcgccgacttaac

SEQ ID NO: 143385 - DNA, 80 bp, synthetic construct
  source 1..80: mol_type = other DNA
caagcattttttgttgctccagttattgacaaacgccctgctccgacaacagctgctgtcactgagcacatcaccgaggc

SEQ ID NO: 143386 - DNA, 80 bp, synthetic construct
  source 1..80: mol_type = other DNA
caaattttccgtgttcaccacgagtacctgcgtcacctttgctgcccgcgaggagggcgtgtcgtccagcaccagcaccc

SEQ ID NO: 143387 - DNA, 80 bp, synthetic construct
  source 1..80: mol_type = other DNA
aatgggggattcctatggcttccaatactctcccaagcagcgggtcgagtaccttctaaagtcctggaactcgaaacgag

SEQ ID NO: 143388 - DNA, 80 bp, synthetic construct
  source 1..80: mol_type = other DNA
ccggcaatactatcacccggagcccttgtcgttggagtggtctgcgcggccatactacgacgccatgtagggcccggcga

SEQ ID NO: 143389 - DNA, 80 bp, synthetic construct
  source 1..80: mol_type = other DNA
agacaatgtaacaccaatagatactaccatcatggctaagaacgaggttttctgcgttcagcctgagaaggggggtcgta

SEQ ID NO: 143390 - DNA, 80 bp, synthetic construct
  source 1..80: mol_type = other DNA
tgcccctatccgtgtagcgacacgtttccccggccgtgagtccagtcgccccgacccctttgtatgtcaccaaaataaaa

SEQ ID NO: 143391 - DNA, 80 bp, synthetic construct
  source 1..80: mol_type = other DNA
atgggagtttgttttggcaccaaaatcaacgggactttccaaaatgtcgtaacaactccgccccattgacgcaaatgggc

SEQ ID NO: 143392 - DNA, 80 bp, synthetic construct
  source 1..80: mol_type = other DNA
tattttaagacacacttgtgatgggcaaaatattacacttattaatgttaatgctacatttgaggctgattactatggct

SEQ ID NO: 143393 - DNA, 80 bp, synthetic construct
  source 1..80: mol_type = other DNA
acctattagtgggcgcagccacgatgtgttctgcgctctatgttggtgatatgtgtggggccgtctttctcgtgggacaa

SEQ ID NO: 143394 - DNA, 80 bp, synthetic construct
  source 1..80: mol_type = other DNA
ccggctctaagacccttgctggtcccaaaggacctatatgccagatgtacaccaatgtggaccaggacattgtgggctgg

SEQ ID NO: 143395 - DNA, 80 bp, synthetic construct
  source 1..80: mol_type = other DNA
aacacacctactttgcccaacagactgcttccgaaaacatccggaagccacttacggcaaatgcgggtcagggccctggc

SEQ ID NO: 143396 - DNA, 80 bp, synthetic construct
  source 1..80: mol_type = other DNA
tcttactttctcaaacctattttctaacttggtggctccatcttagccctagtcacggctagctgtgaaaggtccgtgag

SEQ ID NO: 143397 - DNA, 80 bp, synthetic construct
  source 1..80: mol_type = other DNA
ccgcggtgcacactgggacggggggacggactgatcggcggtgggcgaaagagagtctggggcaaggagggtcgcggggc

SEQ ID NO: 143398 - DNA, 80 bp, synthetic construct
  source 1..80: mol_type = other DNA
gtccttgcggcctcagcccactgagctgaagtattcatggaaaacatggggcaaagcgaaaatgctctccacagagcctc

SEQ ID NO: 143399 - DNA, 80 bp, synthetic construct
  source 1..80: mol_type = other DNA
ggccagcacgcgcgagtgggccaaaaagcccagcaggtcggagaggcgaatcgcgtcgtggacgtgggccgcgttgacga

SEQ ID NO: 143400 - DNA, 80 bp, synthetic construct
  source 1..80: mol_type = other DNA
ttgtccagtagaggtggagccccgcggcccaggtaaaagttttggggaaggttgcccatgtcggtgacggggttgcggac

SEQ ID NO: 143401 - DNA, 80 bp, synthetic construct
  source 1..80: mol_type = other DNA
atacatcgccacctgcatgcaagccgaccttgaggtcatgaccagcacatgggtcttggcaggtggagtcttggcggccg

SEQ ID NO: 143402 - DNA, 80 bp, synthetic construct
  source 1..80: mol_type = other DNA
tgagggtaccatatttcgtgcgcgcccaggccctgctgggtgcgtgcgcgctggttcggaggatcgcgggtggccactac

SEQ ID NO: 143403 - DNA, 80 bp, synthetic construct
  source 1..80: mol_type = other DNA
gatgaggacatgaggccgtactgctggcattaccccccgaagccttgcggtacagtcccggctaggacggtttgcgggcc

SEQ ID NO: 143404 - DNA, 80 bp, synthetic construct
  source 1..80: mol_type = other DNA
gtgcggggaaaaccaggaaaatattgcctcaaatcataagagaagccatcaatagaagactgagaaccgccatactggcg

SEQ ID NO: 143405 - DNA, 80 bp, synthetic construct
  source 1..80: mol_type = other DNA
ttggaaatcccgcctctgccggaacccactattgccgagccagtgctttcgacaccaccagttgcaacagtgacgcgtcc

SEQ ID NO: 143406 - DNA, 80 bp, synthetic construct
  source 1..80: mol_type = other DNA
acttgggtggtagctggagggatccttgctgcgctagcggcatactgcctaacagtgggcagtgtcgttatctgcggcag

SEQ ID NO: 143407 - DNA, 80 bp, synthetic construct
  source 1..80: mol_type = other DNA
gagctatcacccctgctccttaccactacagcgtggcagatcctcccctgctctttcaccactttacctgccctctccac

SEQ ID NO: 143408 - DNA, 80 bp, synthetic construct
  source 1..80: mol_type = other DNA
ggtgcctcttccaaaggttgacttgcaattcttctcaaatactacctctttgaacgaccggcaaggcaatgctactaaac

SEQ ID NO: 143409 - DNA, 80 bp, synthetic construct
  source 1..80: mol_type = other DNA
tgttcagccactcctgcagtccacttaacagctcctcagcccgtggagatatgctgacatcataccttattatgtcccca

SEQ ID NO: 143410 - DNA, 80 bp, synthetic construct
  source 1..80: mol_type = other DNA
tatatctgagatgggagcaaactttaaggcaagcagggtgattgacagccggaagagtgtgaaaccgactatcatcacgg

SEQ ID NO: 143411 - DNA, 80 bp, synthetic construct
  source 1..80: mol_type = other DNA
tagccggcgtcgagcatcggttcgacgctgcgtgcaactggacccgtggagaacggtgcgagttagatgatagggatagg

SEQ ID NO: 143412 - DNA, 80 bp, synthetic construct
  source 1..80: mol_type = other DNA
agtggttgactttagccttgatcctacattctctattgagacaactaccgtcccccaggatgccgtcgcgcgaagccagc

SEQ ID NO: 143413 - DNA, 80 bp, synthetic construct
  source 1..80: mol_type = other DNA
tcggcggtggcggcctcaagttcgtcggcgcggcgtcgcgtggcgccgatgacctttcccagctcctgcagggcgcgccc

SEQ ID NO: 143414 - DNA, 80 bp, synthetic construct
  source 1..80: mol_type = other DNA
ggttcacaaaaacttgcggggccccgccatgccgggtgcaggctaatcaaagctggaactgccccaccgattgcttcagg

SEQ ID NO: 143415 - DNA, 80 bp, synthetic construct
  source 1..80: mol_type = other DNA
gcagacctggaagtcatcactagtacttgggtgcttgttggaggtgtactggcagccgtggcagcctactgtttgacggt

SEQ ID NO: 143416 - DNA, 80 bp, synthetic construct
  source 1..80: mol_type = other DNA
aagtggatgatattttaaggtatggagttcggaaacgcgatcgaacaggaatcggaacgttatctttatttggaatgcaa

SEQ ID NO: 143417 - DNA, 80 bp, synthetic construct
  source 1..80: mol_type = other DNA
gcttggggccgcgtccggcacgtatttgtacaaccatctcactccgctgtcggactgggctgccgatggtctcaaggacc

SEQ ID NO: 143418 - DNA, 80 bp, synthetic construct
  source 1..80: mol_type = other DNA
atagtgggaggaagacggcatccttcacagtttcttcagagaaaaccattctgactatgggtgagtatggagatgtgtcc

SEQ ID NO: 143419 - DNA, 80 bp, synthetic construct
  source 1..80: mol_type = other DNA
ttcactgtaggcctcaattcctttgtggtcggctcccagctcccttgcgatcctgagccggacaccgaggtattggcctc

SEQ ID NO: 143420 - DNA, 80 bp, synthetic construct
  source 1..80: mol_type = other DNA
ttcagtatttcatcgcacgtgcggaagccatcatgcatgaatgggtgcctccactgcaagtccgcggcggccgcgacgcg

SEQ ID NO: 143421 - DNA, 80 bp, synthetic construct
  source 1..80: mol_type = other DNA
ctaattacagtgctcgctttggtctgtaccctactctatattaaatacaaaagcagacgcagctttattgaggaaaagaa

SEQ ID NO: 143422 - DNA, 80 bp, synthetic construct
  source 1..80: mol_type = other DNA
ggagctgcttacggcttccaatactcgcctaaagacagggtagagcgtttgctgaagatgtggcgttcaaagaagtcgcc

SEQ ID NO: 143423 - DNA, 80 bp, synthetic construct
  source 1..80: mol_type = other DNA
tgtgtgccgtgtgtcaggacaggaaatgagtccaagtgttggatggccgcgacaaccacgcttgccatcccaaacgcctc

SEQ ID NO: 143424 - DNA, 80 bp, synthetic construct
  source 1..80: mol_type = other DNA
aaggactctaagctaactttggtccttacaaagtgtggaagtcaaatattagccaatgtgtcattaattgttgtagctgg

SEQ ID NO: 143425 - DNA, 80 bp, synthetic construct
  source 1..80: mol_type = other DNA
accggacctcagaagccagtgataccctgctttgtgacattggggagtcatcgtcaagtgcagaagttgaggaacatagg

SEQ ID NO: 143426 - DNA, 80 bp, synthetic construct
  source 1..80: mol_type = other DNA
gttgaattcctcctgcaagcgtggaaggaaaagaaaacccctatgggtttttcttatgacacccgctgttttgactccac

SEQ ID NO: 143427 - DNA, 80 bp, synthetic construct
  source 1..80: mol_type = other DNA
cgagatgagcccgctcttgttctccaccacccaactggccattttgccctgctccttcacaaccatgcctgctttatcaa

SEQ ID NO: 143428 - DNA, 80 bp, synthetic construct
  source 1..80: mol_type = other DNA
gctgagcaccggcgaggccccgttgaggtggtaggccccgttatagagcaggtccccgtacgaaaatcgctgcgacgccc

SEQ ID NO: 143429 - DNA, 80 bp, synthetic construct
  source 1..80: mol_type = other DNA
agcgtacatgaacaccccggggcttcccgtgtgccaggaccatcttgaattttgggatggcgtctttacgggcctcactc

SEQ ID NO: 143430 - DNA, 80 bp, synthetic construct
  source 1..80: mol_type = other DNA
gtccatggcgcccaccagggggtagggaacgttggtggcggcgtagatgcgcttctccagggcctccagaaagaccagct

SEQ ID NO: 143431 - DNA, 80 bp, synthetic construct
  source 1..80: mol_type = other DNA
ttccgcgtttgtggtaagcggcttggctggcgccgctgtgggaggcataggcattggcagggtgttgcttgacgtgcttg

SEQ ID NO: 143432 - DNA, 80 bp, synthetic construct
  source 1..80: mol_type = other DNA
cggctgtacgcgtgttcccgcatgaccgcctcggagggcgaggtcgtgaagctggaatacgagtccaacttcgcccgaat

SEQ ID NO: 143433 - DNA, 80 bp, synthetic construct
  source 1..80: mol_type = other DNA
tgtcgggtctcggactcaatgctgtagcgtattaccgaggccttgatgtgtccgtcataccgaccagcggagacgtcgtt

SEQ ID NO: 143434 - DNA, 80 bp, synthetic construct
  source 1..80: mol_type = other DNA
cgggaaagacaactatgccgcagaggcggcgattaaaccccaggcagaggtaggcgtagctttccccgggcaggtattgc

SEQ ID NO: 143435 - DNA, 80 bp, synthetic construct
  source 1..80: mol_type = other DNA
aaagtcggcgaggacggcccgccggagcgagacggcgtccgaccgcagcatgacgaggatgttggcgcacttgatatcca

SEQ ID NO: 143436 - DNA, 80 bp, synthetic construct
  source 1..80: mol_type = other DNA
ccaaacacgccttttatgaatgtaatacttttatttgttggttaacaccgccccaccatcatctgatttgcaaacatatc

SEQ ID NO: 143437 - DNA, 80 bp, synthetic construct
  source 1..80: mol_type = other DNA
ggtgcgcgggtggcgcaggggtccctcgagcgcgggaaagcgacgcagcagcgccgtctgggccgcggtggacagctggt

SEQ ID NO: 143438 - DNA, 80 bp, synthetic construct
  source 1..80: mol_type = other DNA
tacaaattaattgtggttgatcccactacacctccacccaccacaactaccacagacacacaagaacccactccagaggc

SEQ ID NO: 143439 - DNA, 80 bp, synthetic construct
  source 1..80: mol_type = other DNA
ggtttggcaggcgccacagtcggcagtattggccttgggagagtcctagtggacataattgccggctatggagcgggtgt

SEQ ID NO: 143440 - DNA, 80 bp, synthetic construct
  source 1..80: mol_type = other DNA
cagtaactcggccacgttggccgtcgcgtgccgcctccgcagctcgtccgcaaaggcaaacacccgtgcgtacgtgtatc

SEQ ID NO: 143441 - DNA, 80 bp, synthetic construct
  source 1..80: mol_type = other DNA
ccccgctcagggagctgtggtgggtgttctacgccggcgaccgggcgctggaggagccccacgccgagtcgggattgacg

SEQ ID NO: 143442 - DNA, 80 bp, synthetic construct
  source 1..80: mol_type = other DNA
accgctgcgttggtaaaaaattacagccaagtcaaaaaagatgcgattttccaaattaccaatcaccgcttccactaagg

SEQ ID NO: 143443 - DNA, 80 bp, synthetic construct
  source 1..80: mol_type = other DNA
ctgacaagcttgcgtccaccgcaaggtgggtggttcggctgcacctggatgaactctacgggcttcgtcaaaacgtgcgg

SEQ ID NO: 143444 - DNA, 80 bp, synthetic construct
  source 1..80: mol_type = other DNA
tcaccgttctctggtgtgtaataccgaactgcttagtgaaagccaggttattggtacgtttgaaatgcaaggaccgcact

SEQ ID NO: 143445 - DNA, 80 bp, synthetic construct
  source 1..80: mol_type = other DNA
ctttgttgcttaacatcttaggtgggtgggtagcttctcagcttgcaaacccaaccgcctccactagttttgtggtaagc

SEQ ID NO: 143446 - DNA, 80 bp, synthetic construct
  source 1..80: mol_type = other DNA
gcagcctgtcgagccgccgggctccaggactgctcaatgctcgtctgcggcgatgacctagtcgttatttgtgagagcca

SEQ ID NO: 143447 - DNA, 80 bp, synthetic construct
  source 1..80: mol_type = other DNA
catacaaaatgcgacaccagaatccgatgtgatgttggaggccgccattgcacaactagcaacgattcgcgaagaatccc

SEQ ID NO: 143448 - DNA, 80 bp, synthetic construct
  source 1..80: mol_type = other DNA
tggcgggcctgtcaacgttgcccggcaatcccgctattgcatcattgatggcttttacagctgccgtcaccagcccacta

SEQ ID NO: 143449 - DNA, 80 bp, synthetic construct
  source 1..80: mol_type = other DNA
tctacaggccagtaatcggggatcctcagccactccaagtggaaggaggtctaaggaatcttctcttctctttttcagta

SEQ ID NO: 143450 - DNA, 80 bp, synthetic construct
  source 1..80: mol_type = other DNA
agcccaatggagaggaaagtcatcgtgtggggggcggagacgacggcttgtggtgacatcatacacgggcttcccgtctc

SEQ ID NO: 143451 - DNA, 80 bp, synthetic construct
  source 1..80: mol_type = other DNA
cctattaccaagtacatcatggcttgcatgtcagctgacttggaagtcaccacgagcgcctgggtgctggttggtggtgt

SEQ ID NO: 143452 - DNA, 80 bp, synthetic construct
  source 1..80: mol_type = other DNA
aagccgttggatgacaggttcgctacctccctccacttcttgaatgcaatgtcaaaggtccggaaggatatccaggaatg

SEQ ID NO: 143453 - DNA, 80 bp, synthetic construct
  source 1..80: mol_type = other DNA
gggcgtgatgggatcatttgggtggctgtcatcctacacccacgccttgtgtttgagatcacaaaatggttgttggcagt

SEQ ID NO: 143454 - DNA, 80 bp, synthetic construct
  source 1..80: mol_type = other DNA
tatgacatcataatatgcgacgagtgccatgcagtggatgctacgactatcctcggtatcggaacggttctcgaccaggc

SEQ ID NO: 143455 - DNA, 80 bp, synthetic construct
  source 1..80: mol_type = other DNA
gggaattacccaatgtctaaaaaaccaggaaaacccggtaaaaatcgggttgtcaatatgctaaaacgcggtgtatcccg

SEQ ID NO: 143456 - DNA, 80 bp, synthetic construct
  source 1..80: mol_type = other DNA
tctgtaccaccatccgagggggggcttggagacccaaacccgacatcagactcctggtccactgttagcgagtcggagga

SEQ ID NO: 143457 - DNA, 80 bp, synthetic construct
  source 1..80: mol_type = other DNA
caggagcagcgggagtgggaggagagccagtcccgccctttggccggcccttttagccgttggcgccggcgagaagacga

SEQ ID NO: 143458 - DNA, 80 bp, synthetic construct
  source 1..80: mol_type = other DNA
ttcacaaaaaaggtcagaaccaacgcagccatgggcgccgttttcacagaggagaaccaatgggacagcgcgaaagccgc

SEQ ID NO: 143459 - DNA, 80 bp, synthetic construct
  source 1..80: mol_type = other DNA
gctggtgacaccatcaatggccatgcgatgcgtgggaataggcaacagagacttcgttgaaggactgtcaggagcaacgt

SEQ ID NO: 143460 - DNA, 80 bp, synthetic construct
  source 1..80: mol_type = other DNA
gaccgacaggaagggcgcgcccacctacacctggggcgcaaatgatacggacgttttcgtccttaataacaccaggccac

SEQ ID NO: 143461 - DNA, 80 bp, synthetic construct
  source 1..80: mol_type = other DNA
cagaggccaacagtctcccttgttgcactccaccacggaatgggccattctaccctgctctttctcggacctgcccgctt

SEQ ID NO: 143462 - DNA, 80 bp, synthetic construct
  source 1..80: mol_type = other DNA
cttgcatgtcagctgatctagaagtcatcactagcacctgggtgcttgccggcggcattcttgctgccttggcggcctat

SEQ ID NO: 143463 - DNA, 80 bp, synthetic construct
  source 1..80: mol_type = other DNA
atggccaaagagcatggaacatttgggaagttgaggactatgggtttggagttttcacgacaaacatatggctgaaattg

SEQ ID NO: 143464 - DNA, 80 bp, synthetic construct
  source 1..80: mol_type = other DNA
atgtgctcaatgaaaccaccaactggttgtgggcgttcctggcacgagaaaagcgtcccagaatgtgctcgcgagaggaa

SEQ ID NO: 143465 - DNA, 80 bp, synthetic construct
  source 1..80: mol_type = other DNA
agcaatattactattgaaggattggttattggaactaaggaggaagaaggcaatgccactgaagaaatattcgcagataa

SEQ ID NO: 143466 - DNA, 80 bp, synthetic construct
  source 1..80: mol_type = other DNA
actcgcgttggtgggtgattagggcctctaaaacaccggccagacatgacccgggtgtatattcttgtaacacttgaacg

SEQ ID NO: 143467 - DNA, 80 bp, synthetic construct
  source 1..80: mol_type = other DNA
tcgtcccaatatatatatattattagggcgaagtgcgagcactggcgccgtgcccgactccgcgccggccccgggtgcgg

SEQ ID NO: 143468 - DNA, 80 bp, synthetic construct
  source 1..80: mol_type = other DNA
gggggaggacgccctcatcaagcatctggcccggcaggccatcatcgtcaaggacgcgctgcttgaccgcaccgaggtgc

SEQ ID NO: 143469 - DNA, 80 bp, synthetic construct
  source 1..80: mol_type = other DNA
cgacaggagggtcgatggcccacactaccagtgggcttacgagactcttcgccactgggccagctcagcgcatccaactt

SEQ ID NO: 143470 - DNA, 80 bp, synthetic construct
  source 1..80: mol_type = other DNA
aacgaacacggaggacaatccaaggatgacaacatagaacttaagttctttgattcagctgacaatccaacaaacaatcc

SEQ ID NO: 143471 - DNA, 80 bp, synthetic construct
  source 1..80: mol_type = other DNA
ctatgccacagaggcggcgattaaaccccaggcagaggtaggcgtagctttccccgggcaggtattgctcgcagaccctg

SEQ ID NO: 143472 - DNA, 80 bp, synthetic construct
  source 1..80: mol_type = other DNA
actcctcgcggtgctgggtggcgctaacccccactgtggcggcgccttatctcaacgctccgcttgattccctccggaat

SEQ ID NO: 143473 - DNA, 80 bp, synthetic construct
  source 1..80: mol_type = other DNA
acgcacgagaccgatcaattgctttggccttcttagccacaggaggtgtgctcgtgttcttagcgaccaatgtgcatgct

SEQ ID NO: 143474 - DNA, 80 bp, synthetic construct
  source 1..80: mol_type = other DNA
taaggcatacggtgtcgaccccaacatcagaactggggtgaggaccatcaccacgggtgcccccattacgtattccacct

SEQ ID NO: 143475 - DNA, 80 bp, synthetic construct
  source 1..80: mol_type = other DNA
atccgtgtagcgacacgtttctccggccgtgagtccggtcgccccgacccctttgtatgtcaccaaaataaaagaccaaa

SEQ ID NO: 143476 - DNA, 80 bp, synthetic construct
  source 1..80: mol_type = other DNA
cagaatcatgtatgaggatctagaagggggcaacatccccgctctcctggataccaaaaaatatctggatagcaagaaag

SEQ ID NO: 143477 - DNA, 80 bp, synthetic construct
  source 1..80: mol_type = other DNA
cgatggaaacctgcaccaacacctttgtgctgaaaaaagaagtgagcgaaacccagcatggcaccattctgattaaagtg

SEQ ID NO: 143478 - DNA, 80 bp, synthetic construct
  source 1..80: mol_type = other DNA
tgacaacgccccactccaatatagaggaggtcgctttgccgacgacgggagagatacccttctatggcaaggcaatcccc

SEQ ID NO: 143479 - DNA, 80 bp, synthetic construct
  source 1..80: mol_type = other DNA
gcagggttgcgctataggtccatgttactgggcaacggtagatttgttccgtttcacattcaggtacctcagaaattttt

SEQ ID NO: 143480 - DNA, 80 bp, synthetic construct
  source 1..80: mol_type = other DNA
tcatgtcattcactgctgctgtcactagtcccctaaccacccagcaaaccctcctcttcaacatcctaggaggatgggtc

SEQ ID NO: 143481 - DNA, 80 bp, synthetic construct
  source 1..80: mol_type = other DNA
ttcactgtctgtgtcactagtattagtgggagtcgtgacattgtacttgggagttatggtgcaggccgatagtggttgcg

SEQ ID NO: 143482 - DNA, 80 bp, synthetic construct
  source 1..80: mol_type = other DNA
gcttggtagactacccgtaccggctgtggcattacccgtgcaccatcaactttaccatccacaaagttcgggtgtttttg

SEQ ID NO: 143483 - DNA, 80 bp, synthetic construct
  source 1..80: mol_type = other DNA
cacttactctgtcactcccttagacctaccagccatcatccaacggctgcatggtatggccgccttttcgcttcatggct

SEQ ID NO: 143484 - DNA, 80 bp, synthetic construct
  source 1..80: mol_type = other DNA
acagccagcccactgtgggaacggaccccggctacccagtccccctagaactcacgcccgagaacgcggaggcggtggcg

SEQ ID NO: 143485 - DNA, 80 bp, synthetic construct
  source 1..80: mol_type = other DNA
agtcgtgctcgtccatgcccccccttgagggggagccgggcgacccagacttgagttgtgactcctggtccaccgtcagc

SEQ ID NO: 143486 - DNA, 80 bp, synthetic construct
  source 1..80: mol_type = other DNA
agcaattctggcagaaacatatgtggaattttgtcagtggcattcagtacctggcagggttgtctaccctgcccgggaac

SEQ ID NO: 143487 - DNA, 80 bp, synthetic construct
  source 1..80: mol_type = other DNA
tggaatgtgaaagagacagcctgcttgagcaaatcctatgctcagatgtggttgcttatgtacttccacaggcgggacct

SEQ ID NO: 143488 - DNA, 80 bp, synthetic construct
  source 1..80: mol_type = other DNA
gtgcaattgttccatctaccccggtgccatcactggacatcgtatggcatgggacatgatgatgaactggtcgcccacgg

SEQ ID NO: 143489 - DNA, 80 bp, synthetic construct
  source 1..80: mol_type = other DNA
ggtctggtccctgtacacctcggcccggaggtgcgtctcggccaaacgtcggcgcagggccgcgtggctggcgtctcggc

SEQ ID NO: 143490 - DNA, 80 bp, synthetic construct
  source 1..80: mol_type = other DNA
cctccaaggaattgatgatgaccaccataggaattgtacttctctcccagagcaccataccagagactatacttgaactg

SEQ ID NO: 143491 - DNA, 80 bp, synthetic construct
  source 1..80: mol_type = other DNA
gcgagcggtgcgagctacatgacagaaacaggattgaaatgagcccgctgcttttctcaactacgcagctttccatactc

SEQ ID NO: 143492 - DNA, 80 bp, synthetic construct
  source 1..80: mol_type = other DNA
agtccgagtccaaggtgatcatgttggactccctcgactcaatgaccgagggggaggacgagcgcgagccttccgttcca

SEQ ID NO: 143493 - DNA, 80 bp, synthetic construct
  source 1..80: mol_type = other DNA
ctgcatgcaagctgacctcgaggttctcaccagctcctgggtaatcgcgggaggagtcatcgccgctgttgcggcctact

SEQ ID NO: 143494 - DNA, 80 bp, synthetic construct
  source 1..80: mol_type = other DNA
ggctccacacccaaacgcaccaaacagatgcaggcagtgggtcgagtacagccccgcgtacgaacacgtcgatgcgtgtg

SEQ ID NO: 143495 - DNA, 80 bp, synthetic construct
  source 1..80: mol_type = other DNA
tggccgctcctgctcctcgtcttagcgttgccccaacgggcgctcgcattagaacggggggaggcagcctcaattggagt

SEQ ID NO: 143496 - DNA, 80 bp, synthetic construct
  source 1..80: mol_type = other DNA
actccttcgatccgctcgtggcggaggaggatgagcgggaggtctccgtgcccgcagaaatcctgcggaagtcccggaga

SEQ ID NO: 143497 - DNA, 80 bp, synthetic construct
  source 1..80: mol_type = other DNA
accatatgggttcgcatggtcctaatgacacacttcttctccattctcatggtccaagacaccctggaccagaacctcaa

SEQ ID NO: 143498 - DNA, 80 bp, synthetic construct
  source 1..80: mol_type = other DNA
ggtggccactgggaggtggtgttcggcctagcctatttctccatgcaaggagcgtgggcaaaggtcgtcgtcatcctcct

SEQ ID NO: 143499 - DNA, 80 bp, synthetic construct
  source 1..80: mol_type = other DNA
cccacattgacgcccacttcttgtctcagacaaagcaggcaggggagaacttttcatatctcgttgcctatcaggcgacc

SEQ ID NO: 143500 - DNA, 80 bp, synthetic construct
  source 1..80: mol_type = other DNA
caggatgtatgtgggtggcatagagcatcggttaaacgtggcatgcaattggactcgtggggagcgttgtgatctctctg

SEQ ID NO: 143501 - DNA, 80 bp, synthetic construct
  source 1..80: mol_type = other DNA
ctagccgcatactgtatgtcaactggttgcgtggtcatctgcggcagggtcattaccactgggaggcctgctgtcgttcc

SEQ ID NO: 143502 - DNA, 80 bp, synthetic construct
  source 1..80: mol_type = other DNA
agagaggctttccagctgcagccgcctcgaaagtttcgatcaaggttggggcaagcttggggttgccaacatcacgggct

SEQ ID NO: 143503 - DNA, 80 bp, synthetic construct
  source 1..80: mol_type = other DNA
tcgcctcgtgcaagaggttgagtgactttgatcaaggctgggggagtcttagcggctccaacatctctggtccgtctaaa

SEQ ID NO: 143504 - DNA, 80 bp, synthetic construct
  source 1..80: mol_type = other DNA
cgaatgtcgatttgggtgcgttcggggacgtacgcgtccccccattccaccacatcgctgggcagcgttgataggaattt

SEQ ID NO: 143505 - DNA, 80 bp, synthetic construct
  source 1..80: mol_type = other DNA
gctgatgtgcagagtcgctagtggcgtcgatctggcacaaaccgttgtgctcgagctcgacaagacagcagaacacctcc

SEQ ID NO: 143506 - DNA, 80 bp, synthetic construct
  source 1..80: mol_type = other DNA
ctcgctctaagttcgggtacggggccaaggaagtacggagccttgccagtaaggccattaaccacatcaactccgtgtgg

SEQ ID NO: 143507 - DNA, 80 bp, synthetic construct
  source 1..80: mol_type = other DNA
ccagggttgcccgtgtgccaagaccatctggaattctgggaggcggtttttactggcctcacccacattgatgcccattt

SEQ ID NO: 143508 - DNA, 80 bp, synthetic construct
  source 1..80: mol_type = other DNA
gatgcttggtggactacccatatcggctgtggcattacccttgcactgtgaattacaccatacacaaggtgaggatgtac

SEQ ID NO: 143509 - DNA, 80 bp, synthetic construct
  source 1..80: mol_type = other DNA
ctgccgtgcctgggcgggcccgtttggttgcggaaaccggtgacgtggggggggcggtttttggggttggagtgggaaac

SEQ ID NO: 143510 - DNA, 80 bp, synthetic construct
  source 1..80: mol_type = other DNA
aataaagacggttaatggttaaacctctggtctcatacgggtcggtgatgtcgggcgtcgggggagagggagttccctct

SEQ ID NO: 143511 - DNA, 80 bp, synthetic construct
  source 1..80: mol_type = other DNA
gccagggccctggcacatggtgtcagggctttggaggacgggatcaattatgcaacagggaatctccccggttgctcctt

SEQ ID NO: 143512 - DNA, 80 bp, synthetic construct
  source 1..80: mol_type = other DNA
gagggtgagaggaccttaagagttctggacacagttgaaaagtggttggcttgtggagtggataacttttgcatcaaagt

SEQ ID NO: 143513 - DNA, 80 bp, synthetic construct
  source 1..80: mol_type = other DNA
cacgctcctggtatgtggtgacgaccttgtggccatctgcgagagccaggggacacacgaagatgaagcgagcctgagag

SEQ ID NO: 143514 - DNA, 80 bp, synthetic construct
  source 1..80: mol_type = other DNA
tctgggctgcttcttttttggagggctgtccactggaaccacgtcctcctcggaagacccggagcccacccgctgatact

SEQ ID NO: 143515 - DNA, 80 bp, synthetic construct
  source 1..80: mol_type = other DNA
tacctaatttccaggggctggttggtggcggcgtcgatggcttgcaagaggccgcatccccgcggcgcgactacggtacc

SEQ ID NO: 143516 - DNA, 80 bp, synthetic construct
  source 1..80: mol_type = other DNA
aggggtataaggtgctcgtgttgaatccatcagtggccgccactctagggtttggcgcctacatgagcaaggcttatgga

SEQ ID NO: 143517 - DNA, 80 bp, synthetic construct
  source 1..80: mol_type = other DNA
gcacttaactgcagaggctgctgctcgccgccttgcgcgtgggtcccccccgtcctgtgctagctcattagcaagccagc

SEQ ID NO: 143518 - DNA, 80 bp, synthetic construct
  source 1..80: mol_type = other DNA
tgccgtgctagtggggtgctacccaccagcttcgggaacacaatcacctgttacatcaaagcaaaggcagctaccaaagc

SEQ ID NO: 143519 - DNA, 80 bp, synthetic construct
  source 1..80: mol_type = other DNA
cgccgctgcgcgccgacagtaacgccagaagctcgatgccttcggacggacacgcgcgagcgtacacgtatcccaggggc

SEQ ID NO: 143520 - DNA, 80 bp, synthetic construct
  source 1..80: mol_type = other DNA
ggcctttcagagtacatagtggggtcacagctcccttgcgagccggagcctgatgttactgttgtaacatcaatgctcac

SEQ ID NO: 143521 - DNA, 80 bp, synthetic construct
  source 1..80: mol_type = other DNA
gtcgcgagttggcgaggtgctgcccccacgcgggccaatttgccccatgatttttcgcctttctggccttgcccccaccc

SEQ ID NO: 143522 - DNA, 80 bp, synthetic construct
  source 1..80: mol_type = other DNA
gagttgaaggccattttgaaagatgattcagacagaagctacaatgtgatcgagggaaccacagacaccctgtaccgcag

SEQ ID NO: 143523 - DNA, 80 bp, synthetic construct
  source 1..80: mol_type = other DNA
tggagaccccgtgccgcaaaacaccacaacaacacagcatattgacacctgggatagactaggagatcttctgctctgca

SEQ ID NO: 143524 - DNA, 80 bp, synthetic construct
  source 1..80: mol_type = other DNA
aaatttagcttgtatcgacgatggcttggtaaataatacacattccacggataatttacataaacccgctaaaaaggttc

SEQ ID NO: 143525 - DNA, 80 bp, synthetic construct
  source 1..80: mol_type = other DNA
gacctgcatggcagctgatctcgaggtaatcaccagcacctgggtggttgctggcggagtcctcgcagccctagctgctt

SEQ ID NO: 143526 - DNA, 80 bp, synthetic construct
  source 1..80: mol_type = other DNA
tgcagtatggttggaagacttggggtaagaaccttgtgttctccccagggaggaagaatggaagcttcatcatagatgga

SEQ ID NO: 143527 - DNA, 80 bp, synthetic construct
  source 1..80: mol_type = other DNA
gagaagatatagaccctaacaaggactttgacatagacatggctttctttgatctaaagcaagctgacacaggaggtaat

SEQ ID NO: 143528 - DNA, 80 bp, synthetic construct
  source 1..80: mol_type = other DNA
ggcgatagaagccgttatttttccatgtggaattctgccgtcgacagctacgatccagacgtgcgaattattgaaaatca

SEQ ID NO: 143529 - DNA, 80 bp, synthetic construct
  source 1..80: mol_type = other DNA
acagccacatgaccctgcacggatgcagtttcttcggcttcaacaatatgtgtgccgaggtgtggggcgctgctaagatc

SEQ ID NO: 143530 - DNA, 80 bp, synthetic construct
  source 1..80: mol_type = other DNA
gcgtggatttcacgcaaagtcgtctgaacaacttgctaggaatacgcaagcgaatgccctttcaaaaaggtttccaaatc

SEQ ID NO: 143531 - DNA, 80 bp, synthetic construct
  source 1..80: mol_type = other DNA
cgtactaaacccctccgtggctgccactttgggattcggcgcatacatgtcgaaggcccacggtatcaaccctaacatca

SEQ ID NO: 143532 - DNA, 80 bp, synthetic construct
  source 1..80: mol_type = other DNA
cgggcgtcaaccgtggaagcaaggctcctcagcgtcgaggaagcctgcgacctaacaccgccgcactcagcccgttcgag

SEQ ID NO: 143533 - DNA, 80 bp, synthetic construct
  source 1..80: mol_type = other DNA
tctagtgcgtctgcaaagtggagttgacgtcttctttaccccgccagaaaagtgtgatacattgttgtgtgacatagggg

SEQ ID NO: 143534 - DNA, 80 bp, synthetic construct
  source 1..80: mol_type = other DNA
tcagacagcaccagaaagcacaggccatcaacaggtcgtgcatgtgtcggtgggtttggacgcgggaggccatggtggtg

SEQ ID NO: 143535 - DNA, 80 bp, synthetic construct
  source 1..80: mol_type = other DNA
tcttgggtataggcaccgtgttggatcaggcggagacggccggcgtcagactcacagtgctcgcaacggccactccccct

SEQ ID NO: 143536 - DNA, 80 bp, synthetic construct
  source 1..80: mol_type = other DNA
ctgacgtcatccctgctcggcgtaggggagactccactgcgagcttgctcagccctaggcctctcgcctgtcttaagggt

SEQ ID NO: 143537 - DNA, 80 bp, synthetic construct
  source 1..80: mol_type = other DNA
cgaaactgacgcatcaaaaaaggtgacgcaaatattaagttcattgaccattaccagcctgcttcgcaggcttcatcagt

SEQ ID NO: 143538 - DNA, 80 bp, synthetic construct
  source 1..80: mol_type = other DNA
cacatgaccctgcatggctgcagtttcttcggcttcaacaatatgtgcgcagaggtctggggcgcttccaagatcaggtg

SEQ ID NO: 143539 - DNA, 80 bp, synthetic construct
  source 1..80: mol_type = other DNA
aagggaaagctcacaatggcagactgatcacagccaacccagtggtgactaagaaggaggagcctgtcaacattgaggct

SEQ ID NO: 143540 - DNA, 80 bp, synthetic construct
  source 1..80: mol_type = other DNA
cggtttctagggggtcggcgaaattaagatggttggttgaacggcagtttgtgaaaccagttggaaaagttgtcgactta

SEQ ID NO: 143541 - DNA, 80 bp, synthetic construct
  source 1..80: mol_type = other DNA
ggaggctatgaccaggaattccgcccatggtcatggctgttaacaaccagaatacgacttggagctcataacatcatgct

SEQ ID NO: 143542 - DNA, 80 bp, synthetic construct
  source 1..80: mol_type = other DNA
gcataacatactgacccgctgttccttgcatttgggtaacaggaggggggtgttcctaccttaccaatgcaatttgagtc

SEQ ID NO: 143543 - DNA, 80 bp, synthetic construct
  source 1..80: mol_type = other DNA
aacgcctcgaggtgttgggtctcccttagtcccaccgtagccgccagggattcgcgcgtccccgtcagtgaggttcggcg

SEQ ID NO: 143544 - DNA, 80 bp, synthetic construct
  source 1..80: mol_type = other DNA
atggtgatacatcaccaacatgttcaagattgtgatgaatcagttctgaccaggctggaggcatggctcactgagcacgg

SEQ ID NO: 143545 - DNA, 80 bp, synthetic construct
  source 1..80: mol_type = other DNA
aataacatcgtgctcctcaaacgtctccgtagcacatgacaactcggggaagaggtattactacctcacccgagacccag

SEQ ID NO: 143546 - DNA, 80 bp, synthetic construct
  source 1..80: mol_type = other DNA
tggagggtgaggttcagattgtgtcaactgctgcccagaccttcctggcaacctgtatcaacggggtgtgctggactgtc

SEQ ID NO: 143547 - DNA, 80 bp, synthetic construct
  source 1..80: mol_type = other DNA
gacaccatcaccctgtgcgaggcgtatgacacaggttgcgcgtggtatgagctaacaccagccgagaccacggtccgact

SEQ ID NO: 143548 - DNA, 80 bp, synthetic construct
  source 1..80: mol_type = other DNA
gtaaggatcttcgcttcgacaacaacaccgtttctgtcgctcttagtgctgctttgcctttacaatacactgatcagctt

SEQ ID NO: 143549 - DNA, 80 bp, synthetic construct
  source 1..80: mol_type = other DNA
tgtacagcaatcggtaagcttgtatcttatgcgagagggcgccacgcccagcactgctttagatatgactgcgcgaaata

SEQ ID NO: 143550 - DNA, 80 bp, synthetic construct
  source 1..80: mol_type = other DNA
gggctcgtaggcgcgactaacgcccgacccaacggcacacaccccaccccgcgcgtaaccccatttctttcatagtcccg

SEQ ID NO: 143551 - DNA, 80 bp, synthetic construct
  source 1..80: mol_type = other DNA
gtagagtgaagatggaaaaattgcagttgaagggaacaacctacggcgtctgttcaaaggctttcaagtttcttgggact

SEQ ID NO: 143552 - DNA, 80 bp, synthetic construct
  source 1..80: mol_type = other DNA
tcgggaatgaatgttgtacaggtggctgaactgtttccagaactgagacgcattttaaccattaacgaggatgggcagag

SEQ ID NO: 143553 - DNA, 80 bp, synthetic construct
  source 1..80: mol_type = other DNA
agaagtcaggccggattaagccatagcacggtaagagctatgctgcctgtgagccccgtccaaggacgtaaaatgaagtc

SEQ ID NO: 143554 - DNA, 80 bp, synthetic construct
  source 1..80: mol_type = other DNA
catgatggaaggagagggagtcatcggaccagcagactcacaggatccccgtctgaaaagggtagaagcttggctgaagg

SEQ ID NO: 143555 - DNA, 80 bp, synthetic construct
  source 1..80: mol_type = other DNA
ctctagctgcaggcgggccgtgggatccaagactgacacattaaaaaacacagaatccgcggcacagcccgcggccccgc

SEQ ID NO: 143556 - DNA, 80 bp, synthetic construct
  source 1..80: mol_type = other DNA
gcccccaggaccccattatcgggacggccgcggctgtgctggataacctcgccacgcgcctgcggccctttctccagtgc

SEQ ID NO: 143557 - DNA, 80 bp, synthetic construct
  source 1..80: mol_type = other DNA
acaaaactcccttagaaccaaagttgcaggagctattggttatgattcatcaaacaacatggaaattaaaacgggcggtg

SEQ ID NO: 143558 - DNA, 80 bp, synthetic construct
  source 1..80: mol_type = other DNA
acttgaacacacccggacttcccgtgtgccaggaccatctggagttctgggaggcggtttttactggacttacacatata

SEQ ID NO: 143559 - DNA, 80 bp, synthetic construct
  source 1..80: mol_type = other DNA
acaccacaatttcgtccaggactgcaactgttccatctacccgggccatgtatctggacaccgcatggcatgggacatga

SEQ ID NO: 143560 - DNA, 80 bp, synthetic construct
  source 1..80: mol_type = other DNA
gggagtagtgatcgtcatcatcactgtgttcaccctcactccggcatacaagcaccttcttgtcaactctgtctggtgga

SEQ ID NO: 143561 - DNA, 80 bp, synthetic construct
  source 1..80: mol_type = other DNA
ctaagaatgaagtcttctgcgtggatccatcgaagggcggacgcaaaccagctcgcctaatagtcttcccagacttgagc

SEQ ID NO: 143562 - DNA, 80 bp, synthetic construct
  source 1..80: mol_type = other DNA
acaaggaggcgcccaagcgcccggccgtgcctcgggtggaaggagagcggccggtggacgggaacgggaacgaggataag

SEQ ID NO: 143563 - DNA, 80 bp, synthetic construct
  source 1..80: mol_type = other DNA
ctccccgcgcccgcccccccccccgaagactcccgccgtcacggcgacagtcgcaccaccgctcgcccccgcgcggcttt

SEQ ID NO: 143564 - DNA, 80 bp, synthetic construct
  source 1..80: mol_type = other DNA
gcgcctcacctcgcgctaccgctcccgcgcggccgggaacaatcgcccgccgtacacccgaccggcctggacccgctact

SEQ ID NO: 143565 - DNA, 80 bp, synthetic construct
  source 1..80: mol_type = other DNA
cctgcgggcctcccacctgtcccgcctccacggaggaagaggaaaccggtggtgctatctgactccaacgtgtcccaagt

SEQ ID NO: 143566 - DNA, 80 bp, synthetic construct
  source 1..80: mol_type = other DNA
acaacttgccgcggcgccagtctgccagccgcatgccgaacatgaggccccgggtcggagggcctccggccgaaaacgct

SEQ ID NO: 143567 - DNA, 80 bp, synthetic construct
  source 1..80: mol_type = other DNA
ccgaggaggaggccatcatggacctggaagagggcgagtggctggcccgcttggaggcgccatcccccgagcgccatccc

SEQ ID NO: 143568 - DNA, 80 bp, synthetic construct
  source 1..80: mol_type = other DNA
atgtccaaagcatcgtctgtacgcgacctcaaatccataatttactacttaaaatgtttactatagaaaaagtaatcata

SEQ ID NO: 143569 - DNA, 80 bp, synthetic construct
  source 1..80: mol_type = other DNA
aattctgatccaggactaggacctggcgcgggggagcccgcggaccatgacgcagagggagaaacatcagatgtggactc

SEQ ID NO: 143570 - DNA, 80 bp, synthetic construct
  source 1..80: mol_type = other DNA
ttcgcggctaggtctcgcgcggcagtcactagaggctcatctccgccgaacttcatgaccagcatgaagggcacgagctg

SEQ ID NO: 143571 - DNA, 80 bp, synthetic construct
  source 1..80: mol_type = other DNA
tctgagatgggggccaacttcggagcgagcagagtgattgattgtaggaaaagtgtgaaacccaccattttggaggagtg

SEQ ID NO: 143572 - DNA, 80 bp, synthetic construct
  source 1..80: mol_type = other DNA
ggagaagaaagtcatcacttggggtgctgacactgctgcatgtggagacatcataaacggtctccctgtctcggctagga

SEQ ID NO: 143573 - DNA, 80 bp, synthetic construct
  source 1..80: mol_type = other DNA
tggcgggggctgcagtcggcagcgtggggttgggaaaaatcctggtcgacattctcgcaggctacggtgctggtgtagcc

SEQ ID NO: 143574 - DNA, 80 bp, synthetic construct
  source 1..80: mol_type = other DNA
agagcttccccaccgactcggacacgccacctacctgcccagaccccggtcgtggtaccactgatacagcaccatgtcct

SEQ ID NO: 143575 - DNA, 80 bp, synthetic construct
  source 1..80: mol_type = other DNA
accccataaccaaatacatcatggcatgcatgtcagctgacttggaggtcgtcaccagcacctgggtgttggtgtgcgga

SEQ ID NO: 143576 - DNA, 80 bp, synthetic construct
  source 1..80: mol_type = other DNA
gatgtggaactcaaagaagacacctttgggtttctcttatgacacccgctgcttcgactccactgtcactgaacaggaca

SEQ ID NO: 143577 - DNA, 80 bp, synthetic construct
  source 1..80: mol_type = other DNA
tgctttgatagcaccgtgaccgaacgtgatattcgtaccgaagaaagcatttatcaggcgtgcagcctgccggaagaagc

SEQ ID NO: 143578 - DNA, 80 bp, synthetic construct
  source 1..80: mol_type = other DNA
ccgacctgctgtccgtagaggaagcgtgcgacctgacgcccccccactcagccagatccaagtttggctatggggcaaag

SEQ ID NO: 143579 - DNA, 80 bp, synthetic construct
  source 1..80: mol_type = other DNA
cttggattcgacgttactaaaatgcttctggcaatcgtagggcctctctacctcctacaggctagccttttgcacgtacc

SEQ ID NO: 143580 - DNA, 80 bp, synthetic construct
  source 1..80: mol_type = other DNA
ttcatactcggaaaacaggatgggtctgtgcctctccatcagcgccctcaacagtctctgccgccggggctcggtgcggc

SEQ ID NO: 143581 - DNA, 80 bp, synthetic construct
  source 1..80: mol_type = other DNA
gagaacaacatcaagctgaccgtggtggtgggcgacatcatcggcgtgctggagcagggcaagagaaccctgacccccca

SEQ ID NO: 143582 - DNA, 80 bp, synthetic construct
  source 1..80: mol_type = other DNA
ggctcaacccgggtacccttggcccctctatggtaatgagggctgcgggtgcgcagggtggctcctgtctccacgcggct

SEQ ID NO: 143583 - DNA, 80 bp, synthetic construct
  source 1..80: mol_type = other DNA
gacccaagcaccgcagccggagaggctgagcggggagtgggcggccgggcgcgaggatggcggagagagagagagtggtg

SEQ ID NO: 143584 - DNA, 80 bp, synthetic construct
  source 1..80: mol_type = other DNA
ggactgaaaaaagtcacagaagtgcgaggatacacaaaaggcggtccaggacacgaagaaccagtacctatgtctacata

SEQ ID NO: 143585 - DNA, 80 bp, synthetic construct
  source 1..80: mol_type = other DNA
tttagtgtttgatcgacagggacgattagtcacaacaacgcccactgccttagttccccaggcttcctggggatataaac

SEQ ID NO: 143586 - DNA, 80 bp, synthetic construct
  source 1..80: mol_type = other DNA
tgccattgtgggaggtctagccgagttggacatcgaatctatgtcaatacccttcatgctggcagggcttatggcagtgt

SEQ ID NO: 143587 - DNA, 80 bp, synthetic construct
  source 1..80: mol_type = other DNA
gttacagggcatcgtatggcctgggatatgatgatgaattggtctccagcagttggtctggtggtggcgcacctactacg

SEQ ID NO: 143588 - DNA, 80 bp, synthetic construct
  source 1..80: mol_type = other DNA
ctacgctacaggtatgggtcccctctcttcaggttcggggcggccgagatgcggttattctctttacatgcttgctccat

SEQ ID NO: 143589 - DNA, 80 bp, synthetic construct
  source 1..80: mol_type = other DNA
gggaggtcccaagtaggagtgggagtcttccaagacggcgtgtttcacacaatgtggcacgttaccaggtggactgtcct

SEQ ID NO: 143590 - DNA, 80 bp, synthetic construct
  source 1..80: mol_type = other DNA
cgactgccgtgcctcaatcgtaccaggtgagttaccttcatgcccccacgggtagtggaaagagcacaaaagtgcccgca

SEQ ID NO: 143591 - DNA, 80 bp, synthetic construct
  source 1..80: mol_type = other DNA
tatcgcccccgccaaggcgcgcttccagctccccaaagaacgtggccccccgggcgtccggagaggcgtccggagacggg

SEQ ID NO: 143592 - DNA, 80 bp, synthetic construct
  source 1..80: mol_type = other DNA
cgggccagggcggtcagagctaagctcatagcccaggggtggaaaaccgctatatgcggccgatacctattcaactggtc

SEQ ID NO: 143593 - DNA, 80 bp, synthetic construct
  source 1..80: mol_type = other DNA
ggggctggggggcccgggtgcggcgtttctgtacctggtattcacttaccgccagcgccgggaccaggagctgtgttgtg

SEQ ID NO: 143594 - DNA, 80 bp, synthetic construct
  source 1..80: mol_type = other DNA
gcatatgcgcagcagactcgaggcttggtgagtacgatcgtcacaagcctcaccggtagagacaccaatgaaaattgtgg

SEQ ID NO: 143595 - DNA, 80 bp, synthetic construct
  source 1..80: mol_type = other DNA
atgtgatcacaaggagagaccagaggggatcaggacaggttgtgacatacgccctcaacaccatcacaaacatgaaagtc

SEQ ID NO: 143596 - DNA, 80 bp, synthetic construct
  source 1..80: mol_type = other DNA
gggataagaatgtggtgaccggtgaagtgcaggtgctttctacagctacccagaccttcttaggtacaacagtaggggtg

SEQ ID NO: 143597 - DNA, 80 bp, synthetic construct
  source 1..80: mol_type = other DNA
tgttcaatccaatgatacttgcagctgggctgatggcttgcgaccccaaccgcaagcggggctggcctgccacagaagtg

SEQ ID NO: 143598 - DNA, 80 bp, synthetic construct
  source 1..80: mol_type = other DNA
gtcgatgcccccacttgagggagagcccggggatcctgacttgacttcagactcgtggtccacggttagtggaacagagg

SEQ ID NO: 143599 - DNA, 80 bp, synthetic construct
  source 1..80: mol_type = other DNA
ggtcggtttgaaaggcatcgacgtccggggtttttgtcggtgggggcttttgggtatttccgatgaataaagacggttaa

SEQ ID NO: 143600 - DNA, 80 bp, synthetic construct
  source 1..80: mol_type = other DNA
ttgtgattggatggatgttgggaagtaacaacatgcagcgtgttgtgttcgtcgtgcttcttcttttggttgcaccagca

SEQ ID NO: 143601 - DNA, 80 bp, synthetic construct
  source 1..80: mol_type = other DNA
cataggggacacccatgacaccctgtaccgcagctggtacctgtcctatacctacggggaccccgagagggtggtacagt

SEQ ID NO: 143602 - DNA, 80 bp, synthetic construct
  source 1..80: mol_type = other DNA
gtccgtgtgtggcccggtgtactgtttcacccccagcccagtggtagtgggtactaccgaccgacttggagtgcccacct

SEQ ID NO: 143603 - DNA, 80 bp, synthetic construct
  source 1..80: mol_type = other DNA
tggacgacagccagctgttcgggtgagtatgcgcgttgaaaggtgggcataacttcagcacttagagtgtcagtttccac

SEQ ID NO: 143604 - DNA, 80 bp, synthetic construct
  source 1..80: mol_type = other DNA
cccgcgggcaaatgcgagaacgggacccgcgcgcctgcctttatacgcggaccccagcaccacgagccgttctgtgacgc

SEQ ID NO: 143605 - DNA, 80 bp, synthetic construct
  source 1..80: mol_type = other DNA
aaaccagcagtacattctgcttggcccaagctcgagcagttctggcaaaagcacatgtggaacttcgttagcggtataca

SEQ ID NO: 143606 - DNA, 80 bp, synthetic construct
  source 1..80: mol_type = other DNA
gtaccaagccaccgtgtgcgctagagctcaagcccctcccccatcgtgggaccagatgtggaagtgcttgatccgtctca

SEQ ID NO: 143607 - DNA, 80 bp, synthetic construct
  source 1..80: mol_type = other DNA
acgtttgcagcgcacatgcgagacacctcgaccacggttcgaaagaaggcccggtggtccgcgggcaacatcaccaggtg

SEQ ID NO: 143608 - DNA, 80 bp, synthetic construct
  source 1..80: mol_type = other DNA
tcatcgacaccctaacgtgtggctttgccgacctcatggggtacatccccgtcgtaggcgccccgcttagtggcgccgcc

SEQ ID NO: 143609 - DNA, 80 bp, synthetic construct
  source 1..80: mol_type = other DNA
gccggtgctgatgtccaacacgatatcgcagcccatcagcaggagatcggtatccgtggtatgcacgtacgcgaccgtgt

SEQ ID NO: 143610 - DNA, 80 bp, synthetic construct
  source 1..80: mol_type = other DNA
acattgcgaaatgtaagcagacaggacgaaggaacttattttgggtctaacgaacagtcaaagcattacagagttactgt

SEQ ID NO: 143611 - DNA, 80 bp, synthetic construct
  source 1..80: mol_type = other DNA
ggacttgtgcgtggggcgttgtatggtaagtatgtccaaatggttctgctcaggcttgccgccctcactggcacttatgt

SEQ ID NO: 143612 - DNA, 80 bp, synthetic construct
  source 1..80: mol_type = other DNA
cccctatgtcagattgggcctctgacggccttaaagacctggcagttgcccttgaacccgtcatattcactcccatggag

SEQ ID NO: 143613 - DNA, 80 bp, synthetic construct
  source 1..80: mol_type = other DNA
actttaaaaccaaaaggggcccctggcgccgcccgctggtaccggagttatacagctaaccctatacccattgacctttt

SEQ ID NO: 143614 - DNA, 80 bp, synthetic construct
  source 1..80: mol_type = other DNA
ttgatttctcctagtatgcttgatgttggcgactatgtcgtccatgtcaatgaggggctaccctctggtgtcccctgcac

SEQ ID NO: 143615 - DNA, 80 bp, synthetic construct
  source 1..80: mol_type = other DNA
tagatctttgccaccactctgtttttcaggaaagagtggtcagatctttagatttttcatcttctggccgaacggttgct

SEQ ID NO: 143616 - DNA, 80 bp, synthetic construct
  source 1..80: mol_type = other DNA
tcggctacctcgcggaccgccacaaactcccgagctccccgcccccctaaagacgacagtcgcaccaccgctcgccctcg

SEQ ID NO: 143617 - DNA, 80 bp, synthetic construct
  source 1..80: mol_type = other DNA
ggtgctataccaacaatttgatgaaatggaggagtgctctaggcacatcccttatctcccagaggcccaagctatcgccg

SEQ ID NO: 143618 - DNA, 80 bp, synthetic construct
  source 1..80: mol_type = other DNA
gccggttcttggcttagagatgtctgggactggatatgcgaggtgctgagcgacttcaagagttggctgaaagccaaact

SEQ ID NO: 143619 - DNA, 80 bp, synthetic construct
  source 1..80: mol_type = other DNA
cccgaacagcagcattgtgtacgaggctgagcaactcatcctgcatctccccggctgcataccgtgtgtcaaaacaggga

SEQ ID NO: 143620 - DNA, 80 bp, synthetic construct
  source 1..80: mol_type = other DNA
ttaaaatcaacattaatagtggcacagcaaacacaaacacgcatgtaaattttgcacacatgcttttcccatttagacaa

SEQ ID NO: 143621 - DNA, 80 bp, synthetic construct
  source 1..80: mol_type = other DNA
cattttgtcttaaccacgattcccgatagcgcctcgctgaggtttgataccgggggtgccgcatagtcccacgcctcata

SEQ ID NO: 143622 - DNA, 80 bp, synthetic construct
  source 1..80: mol_type = other DNA
tgagtaaactatgctgcctgtagctccacctgagaaggtgtaaaaaatctgggaggccacgaaccatggaagctgtacgc

SEQ ID NO: 143623 - DNA, 80 bp, synthetic construct
  source 1..80: mol_type = other DNA
cggacctccgcacacattcgctcccatcacacgcgtttcgtgagcgcccaataaacacacccaggtatgctacgcacgac

SEQ ID NO: 143624 - DNA, 80 bp, synthetic construct
  source 1..80: mol_type = other DNA
taagtttttgccccatctggagctctcggccgtcgcgcgcttggcgggtattaacatcacccgcaccatctacgacggcc

SEQ ID NO: 143625 - DNA, 80 bp, synthetic construct
  source 1..80: mol_type = other DNA
ctgggagaccgcccgacacactccggtgaattcctggttgggtaacatcatcatgtacgctcccactatatgggtacgca

SEQ ID NO: 143626 - DNA, 80 bp, synthetic construct
  source 1..80: mol_type = other DNA
accagctccatctcctaactgtagactaaatgcagagaaagatgctaaactcactttggtcttaacaaaatgtggcagtc

SEQ ID NO: 143627 - DNA, 80 bp, synthetic construct
  source 1..80: mol_type = other DNA
attctgttctgatcgtacctttcttacaacgggcacaatacctacacaggctatccagtccacgtatttggcaaaaccga

SEQ ID NO: 143628 - DNA, 80 bp, synthetic construct
  source 1..80: mol_type = other DNA
cgggcggacgccgcccccgcccgggccaccccccctctccgaggccgcgcccaagccccgggcgtcggcgaggaccaccg

SEQ ID NO: 143629 - DNA, 80 bp, synthetic construct
  source 1..80: mol_type = other DNA
cagatgcttctcgtgctgtgaccaacatactcagttcccttacagtgaccagccttcttcgcaaactccacgagtggatt

SEQ ID NO: 143630 - DNA, 80 bp, synthetic construct
  source 1..80: mol_type = other DNA
cgtgcgggcgagcgtcctactccgcgcttgtatgaccttccggagtattgtgggtgggaagtacgttcaagtcttcctat

SEQ ID NO: 143631 - DNA, 80 bp, synthetic construct
  source 1..80: mol_type = other DNA
aagaacagaatcaatggaggagcgccagagaagcagttgaagatccaaaattttgggagatggtagatgaggagcgcgag

SEQ ID NO: 143632 - DNA, 80 bp, synthetic construct
  source 1..80: mol_type = other DNA
atacctggcaggtttgtcaacgctgccgggtaatccagctgtagcagcactcatggctttttctgcttcgctgaccagcc

SEQ ID NO: 143633 - DNA, 80 bp, synthetic construct
  source 1..80: mol_type = other DNA
aggaaaaatcactttctccagcagcaggatgcccactgggtggccctctcggacatacaaaaatcggtccgtgtggttaa

SEQ ID NO: 143634 - DNA, 80 bp, synthetic construct
  source 1..80: mol_type = other DNA
ggctctcagctcccttgcgaccctgagccggataccgaggtattggcctccatgttgacagacccgtcccacattaccgc

SEQ ID NO: 143635 - DNA, 80 bp, synthetic construct
  source 1..80: mol_type = other DNA
gggcctctaccatgtcaccaacgactgccctaactcgagtattgtgtacgagacggccgataccatcctacactctccgg

SEQ ID NO: 143636 - DNA, 80 bp, synthetic construct
  source 1..80: mol_type = other DNA
tgatggcgtctaaggacgccccaccaagcgcagatggcgcgaatggcgccggtcagcttgtgccggaggttaataatgct

SEQ ID NO: 143637 - DNA, 80 bp, synthetic construct
  source 1..80: mol_type = other DNA
aaatgaaccgctggaagacgtacgcgcacgatccccgggcgctgggggatagccggggcagcgctacccgtaaacgccag

SEQ ID NO: 143638 - DNA, 80 bp, synthetic construct
  source 1..80: mol_type = other DNA
gttgtaagcgacgagcagctaattaagtggctgggaacagacaaccccgccaaactacagcagcggcgtaaacaaatgat

SEQ ID NO: 143639 - DNA, 80 bp, synthetic construct
  source 1..80: mol_type = other DNA
agcatgcagggcaactgggctaaagtcatcttggtcctattcctctttgctggagtggaggccgacaccgtggtgactgg

SEQ ID NO: 143640 - DNA, 80 bp, synthetic construct
  source 1..80: mol_type = other DNA
gtctggcttaaaaccaaactcgtgccagcgctacccggcgtgcccttcctctcctgccaacgggggttccgcggtgtgtg

SEQ ID NO: 143641 - DNA, 80 bp, synthetic construct
  source 1..80: mol_type = other DNA
agtgggacacctccatgcgcctaccgggagcgggaagagcacgaaggtacccgctgcttacgcggcccaagggtacaagg

SEQ ID NO: 143642 - DNA, 80 bp, synthetic construct
  source 1..80: mol_type = other DNA
tgggggactgtcactacatcgtggggacaactactgatgggttggaatgtccatgccaggtgccaacggccgagttcttc

SEQ ID NO: 143643 - DNA, 80 bp, synthetic construct
  source 1..80: mol_type = other DNA
aacccgctcgccttatcgtgtaccccgacctgggggtgcgcgtgtgcgagaagatggccctctatgacataacgcaaaaa

SEQ ID NO: 143644 - DNA, 80 bp, synthetic construct
  source 1..80: mol_type = other DNA
tacctatctgggcgaggcccgattacaacccgcctctcttggaggcttggaagtctccggactacgatcccccagtggtc

SEQ ID NO: 143645 - DNA, 80 bp, synthetic construct
  source 1..80: mol_type = other DNA
aggtctcgtagaccgtgcaccatgagcacgaatcctaaacctcaaagaaaaaccaaagggcgcgccatggaagacgccaa

SEQ ID NO: 143646 - DNA, 80 bp, synthetic construct
  source 1..80: mol_type = other DNA
cgtggggggcggggccgcgggagcgagtggaggagcgggaggaggagcggggggaggagcggggggaggagcgtgaggag

SEQ ID NO: 143647 - DNA, 80 bp, synthetic construct
  source 1..80: mol_type = other DNA
tcagggtatcgtcgtgtccccagaagcgcacgcgtatgcagtttagggtcagcagcatgtgaaggatgttaaggctgtcc

SEQ ID NO: 143648 - DNA, 80 bp, synthetic construct
  source 1..80: mol_type = other DNA
cgcgctcgccctctccgcaagagggggcaacgacgcttgatgacgactctaagtcttggacctcgtgttccgacgcaagc

SEQ ID NO: 143649 - DNA, 80 bp, synthetic construct
  source 1..80: mol_type = other DNA
cactgcgttgcccgacagactgctttaggaagcatcctgaggcaacttacgggcggtgcggatcagggccgtggcttacg

SEQ ID NO: 143650 - DNA, 80 bp, synthetic construct
  source 1..80: mol_type = other DNA
aaatttaaccttttacttggatactgatggggttccacttcgatatagagtgtgttataaatcagttggggttaaacttg

SEQ ID NO: 143651 - DNA, 80 bp, synthetic construct
  source 1..80: mol_type = other DNA
aacctgcagcgtgttcaaaacaacaagattcaatgagtttctgccctctgccctgagctcacgtcttaatgtgagctgca

SEQ ID NO: 143652 - DNA, 80 bp, synthetic construct
  source 1..80: mol_type = other DNA
cgtcagacaacgggggagcgctccttttggcttccttccaggcgcggcggctgctgcgctagcttttttggccactggcc

SEQ ID NO: 143653 - DNA, 80 bp, synthetic construct
  source 1..80: mol_type = other DNA
cggcctcgacggggtcgtggttcacgcccccgacggccgcgtcgatgttcatgagcgaaggatgacacacggtcccgacc

SEQ ID NO: 143654 - DNA, 80 bp, synthetic construct
  source 1..80: mol_type = other DNA
ttttaaaaatcatagaatacctctgtcttgccgagccaaccgcagtcgcgcagataagctccttacccttagcggtggtg

SEQ ID NO: 143655 - DNA, 80 bp, synthetic construct
  source 1..80: mol_type = other DNA
taagtcgtttctagtccatcgcgaatggtttaatgatttggcgcttccatggctgtctccatctagcacaaactggagaa

SEQ ID NO: 143656 - DNA, 80 bp, synthetic construct
  source 1..80: mol_type = other DNA
catgggcttctcctatgacaccagatgtttcgactccacggtgactgaacgcgacattaaaactgaagcatcaatctacc

SEQ ID NO: 143657 - DNA, 80 bp, synthetic construct
  source 1..80: mol_type = other DNA
gtgaggaggaatacatggactacatgccctcaatgaaaaggttcagaagtgaagaggaggaatcaggagtcctgtggtaa

SEQ ID NO: 143658 - DNA, 80 bp, synthetic construct
  source 1..80: mol_type = other DNA
gtggtgtgcgcagcaatactacgccgacacgtggggcccggggagggggccgtgcagtggatgaataggcttattgcctt

SEQ ID NO: 143659 - DNA, 80 bp, synthetic construct
  source 1..80: mol_type = other DNA
atagctggggggagaatgagacagacgtgatgctcctcaacaacacgcgtccgccacaaggcaactggttcggctgtaca

SEQ ID NO: 143660 - DNA, 80 bp, synthetic construct
  source 1..80: mol_type = other DNA
gggccttcccgtcgacggcgcacgggcggctcgtcgcccgccatctcctccagagcctctagctcgctgtcgtcatcccc

SEQ ID NO: 143661 - DNA, 80 bp, synthetic construct
  source 1..80: mol_type = other DNA
agaaagctacacttgcaaggaaagtgtgagacgtgtgtctacaacatgatggggaaaagagaaaagaaactaggagagtt

SEQ ID NO: 143662 - DNA, 80 bp, synthetic construct
  source 1..80: mol_type = other DNA
ttaacgagatggtcctgctgcagatggagagcaaagtttggctagtccatagacagtggtttctggacttacctctacca

SEQ ID NO: 143663 - DNA, 80 bp, synthetic construct
  source 1..80: mol_type = other DNA
gggtctagctgttggctgccggccacgctcaccatcgcggtgccgaatgcttccatacccgtccgtgggttccgcagaca

SEQ ID NO: 143664 - DNA, 80 bp, synthetic construct
  source 1..80: mol_type = other DNA
ttgccgttcaccacgcgccaggtggcctggatctcccccgggccggccgggggaacgtccccccccggcagctccacgtc

SEQ ID NO: 143665 - DNA, 80 bp, synthetic construct
  source 1..80: mol_type = other DNA
cccattattgtgcttaacccaaacaatgatggaatacatagattggacgggctgaacacttgttctttttcttttgcagt

SEQ ID NO: 143666 - DNA, 80 bp, synthetic construct
  source 1..80: mol_type = other DNA
gtcctgtctacagcaacccagaccttcttgggtactgggataaatggtgttatgtggactgtgtaccatggggctggcag

SEQ ID NO: 143667 - DNA, 80 bp, synthetic construct
  source 1..80: mol_type = other DNA
tctgggtgacagaaccagatactttagcatgtggaactctgcggtggatagctatgatccagatgtcaggatcattgaaa

SEQ ID NO: 143668 - DNA, 80 bp, synthetic construct
  source 1..80: mol_type = other DNA
gggccagtgtactgcttcacgcccagtcctgttgtgttgggcaccaccgacaagagaggtgttcccacttacacctttgg

SEQ ID NO: 143669 - DNA, 80 bp, synthetic construct
  source 1..80: mol_type = other DNA
gcgtgattaccgcggggaagcgcctgcggtacgccagcaacaaccccaacgtgtcgggactaactcctccggagacgaac

SEQ ID NO: 143670 - DNA, 80 bp, synthetic construct
  source 1..80: mol_type = other DNA
ggagatggtgtgatgcacaccacgtgcccttgcggagcacaactggcgggccacatcaagaacggctcaatgagaatcac

SEQ ID NO: 143671 - DNA, 80 bp, synthetic construct
  source 1..80: mol_type = other DNA
cggcgtgggcggacagggcgcgggaagccggaggtgtataggtacgtctcgcaaggtgagcggccgtctggcacgtttga

SEQ ID NO: 143672 - DNA, 80 bp, synthetic construct
  source 1..80: mol_type = other DNA
ggttgctcatcgggcgcttatgatgtcataatatgcgatgaatgccactcagtggactctactaccatcctcggtattgg

SEQ ID NO: 143673 - DNA, 80 bp, synthetic construct
  source 1..80: mol_type = other DNA
cttggaacaggaaagagcttcttgtaacattcaaaaatgcacatgcaaaaaagcaagaagtagttgtccttggatcgcaa

SEQ ID NO: 143674 - DNA, 80 bp, synthetic construct
  source 1..80: mol_type = other DNA
atcactaatgattgccctaactctagcatagtctttgagtcagaccatcatatcttgcatctcccgggatgcgtcccttg

SEQ ID NO: 143675 - DNA, 80 bp, synthetic construct
  source 1..80: mol_type = other DNA
cttcgtcctggagttctccgtgtcctgcgcgctccaccgtggctgcaaggtcattagagatgcgcctcatgagctgggag

SEQ ID NO: 143676 - DNA, 80 bp, synthetic construct
  source 1..80: mol_type = other DNA
acctgcccctaataggggcgacactccgccatgaatcactcccctgtgaggaactactgtcttcacgcagaaagcgccta

SEQ ID NO: 143677 - DNA, 80 bp, synthetic construct
  source 1..80: mol_type = other DNA
cctatatatgcgatgatcacatgccgagggtggtgacgcacacaaacgccacggcctgttcttgttatatcctcaacaag

SEQ ID NO: 143678 - DNA, 80 bp, synthetic construct
  source 1..80: mol_type = other DNA
gcccgagaagccgacccccgtccccccccctaggaggaagcggacggtcgtgctttctgagtcgacggtttccagcgcgc

SEQ ID NO: 143679 - DNA, 80 bp, synthetic construct
  source 1..80: mol_type = other DNA
ggtgtccgggttctggaggacggcgtgaactatgcaacagggaacttgcccggttgctctttctctatcttcctcttggc

SEQ ID NO: 143680 - DNA, 80 bp, synthetic construct
  source 1..80: mol_type = other DNA
ctgctgctattcgccggcgtcgacgcggaaacctacaccactgggggagccgccggccgcgccgcgtctggttttgccag

SEQ ID NO: 143681 - DNA, 80 bp, synthetic construct
  source 1..80: mol_type = other DNA
ttggcggaacagtgatcaggaaccctctctccaggaattccactcatgaaatgtactacgtgtctggagcccgcagcaat

SEQ ID NO: 143682 - DNA, 80 bp, synthetic construct
  source 1..80: mol_type = other DNA
ttgaaaggtggaggaagaacaggtttcccccaacccctgctctcttctctcttccgcccgccccccccctctcccgccgc

SEQ ID NO: 143683 - DNA, 80 bp, synthetic construct
  source 1..80: mol_type = other DNA
gtcatctcagaaagcaagggggtagaggaggaccagcgagacctacgagtcttcacggaggctatgactaggtactcggc

SEQ ID NO: 143684 - DNA, 80 bp, synthetic construct
  source 1..80: mol_type = other DNA
ccctgagagcgttcacggacgctatgatcaggtattcagcccctcctggtgacgttccaaaaccggagtatgatctggag

SEQ ID NO: 143685 - DNA, 80 bp, synthetic construct
  source 1..80: mol_type = other DNA
agtgggaacaaaccgaagatagcggccgggcagttgccgaggatgaagaagaggaagatgaagatgaagaagaggaagaa

SEQ ID NO: 143686 - DNA, 80 bp, synthetic construct
  source 1..80: mol_type = other DNA
acgccgccttgcatgcccgagccggagaggggaggaagtaggtgaggcccctgaggcagcgacagggcgctaactgtgca

SEQ ID NO: 143687 - DNA, 80 bp, synthetic construct
  source 1..80: mol_type = other DNA
ggtaggcgtgtacggtgggaggtctatataagcagagctggtttagtgaaccgtcagatccgctagcgctaccggtcgcc

SEQ ID NO: 143688 - DNA, 80 bp, synthetic construct
  source 1..80: mol_type = other DNA
ggaggcaaggcccgcatatgcggcctgtacctctttaattgggctgtcaggaccaaaataaaactcactccacttgcagg

SEQ ID NO: 143689 - DNA, 80 bp, synthetic construct
  source 1..80: mol_type = other DNA
ggaaagaggacaatcaatccccccagtagtgacctaaaatattcatggaaatcttggggaaaagcaaaaatctttacccc

SEQ ID NO: 143690 - DNA, 80 bp, synthetic construct
  source 1..80: mol_type = other DNA
ccacgactggagaagcccacaacacaagacgagccgatagcagttatgtttgcaagcaaggctatacagaccgtggatgg

SEQ ID NO: 143691 - DNA, 80 bp, synthetic construct
  source 1..80: mol_type = other DNA
tccagcgagacgtaggggtgactcccgcgccggcctgcttagcccaaggcccctgagcacgctcaagggctcctcaggtg

SEQ ID NO: 143692 - DNA, 80 bp, synthetic construct
  source 1..80: mol_type = other DNA
ctgtgacgtaacgcctcttccgttggaagaggcggacccagtcgcccatgcaaattaaatacacgacccgcctcgggcct

SEQ ID NO: 143693 - DNA, 80 bp, synthetic construct
  source 1..80: mol_type = other DNA
acaaccatcctggggataggtactgtccttgaccaggcagagaccgctggcgtacgcttgacggtgctcgccacagctac

SEQ ID NO: 143694 - DNA, 80 bp, synthetic construct
  source 1..80: mol_type = other DNA
gtggcggccgaagcgtagtgccggatgtactcgtagtgcgggtcgctggcgagcccgtccacgatcaaactctcgggaac

SEQ ID NO: 143695 - DNA, 80 bp, synthetic construct
  source 1..80: mol_type = other DNA
cgaccggcgcggccatcacatactccacgtatggcaaattcctcgccgatgggggctgctcaggcggcgcctatgacatc

SEQ ID NO: 143696 - DNA, 80 bp, synthetic construct
  source 1..80: mol_type = other DNA
ggtctggggtcggaggggagtgtctggggtcagagtcagagaagcggggtctcagggacgtggctgggggtcggagggga

SEQ ID NO: 143697 - DNA, 80 bp, synthetic construct
  source 1..80: mol_type = other DNA
tccgcttctctgtccatcagggcatgcagtagggctgtttcgagcagctgtctgcacccggggtgtcgctaaagcccttg

SEQ ID NO: 143698 - DNA, 80 bp, synthetic construct
  source 1..80: mol_type = other DNA
aaatgaagaggaagaacatacactgaccatactaatcagaacgggattgctggtgatctcaggagtctttccattatcga

SEQ ID NO: 143699 - DNA, 80 bp, synthetic construct
  source 1..80: mol_type = other DNA
tggagtagaaggagaaggactgcacaagctaggctacatattaagggacatttccaagatacccggaggagccatgtatg

SEQ ID NO: 143700 - DNA, 80 bp, synthetic construct
  source 1..80: mol_type = other DNA
gtcagctttctgcgccatccttaaaggcaacatgcaccattgccgcggaccaccctgacgctgagctgattgaggccaac

SEQ ID NO: 143701 - DNA, 80 bp, synthetic construct
  source 1..80: mol_type = other DNA
agattgctagctttttgggagctggccatccatggaaggagacggtcattcagtgaaccactgactgttgtgggagtcat

SEQ ID NO: 143702 - DNA, 80 bp, synthetic construct
  source 1..80: mol_type = other DNA
gccgctctccacggtcaggcccacgaccaggggcgccacggcgacgtcggcatcgccgctgcgcgccgacagtaacgcca

SEQ ID NO: 143703 - DNA, 80 bp, synthetic construct
  source 1..80: mol_type = other DNA
tgagatgagtccactcttgttctcgacgactgagcttgcgatcctgccctgctcattcaccaccatgccagccttgtcaa

SEQ ID NO: 143704 - DNA, 80 bp, synthetic construct
  source 1..80: mol_type = other DNA
acatgggtaaaaaaattaccgtctggtatctcattcggggacaatcgttttgaagacagggatacggagggtaagtaatt

SEQ ID NO: 143705 - DNA, 80 bp, synthetic construct
  source 1..80: mol_type = other DNA
gctgagttcactggatacgggagggccacactggagtgccaggtgcagaccgcagtggacttcagtaacagttacattgc

SEQ ID NO: 143706 - DNA, 80 bp, synthetic construct
  source 1..80: mol_type = other DNA
ggacccccacatgtaaagccctcagaaccgtctcggaagaggaccccacatgtaagccctcagaaccgtctcggaaggag

SEQ ID NO: 143707 - DNA, 80 bp, synthetic construct
  source 1..80: mol_type = other DNA
gaccgggattagtcccgcgcgcgcacacgtggcggccgccgacctggtaaccgcgtacgagcagacggtgaaccaggaga

SEQ ID NO: 143708 - DNA, 80 bp, synthetic construct
  source 1..80: mol_type = other DNA
atgactggcagcaggtccccttttgctccaaccacttcacggaactgatcatgaaagatggccggaccctggtggtcccc

SEQ ID NO: 143709 - DNA, 80 bp, synthetic construct
  source 1..80: mol_type = other DNA
ggacgggagtcccgaggacgcctatgtgacgtcggaggattactttaagcgctgctgcggccagtccagttatcgcggct

SEQ ID NO: 143710 - DNA, 80 bp, synthetic construct
  source 1..80: mol_type = other DNA
tcaacgactccatggcttgagcgcgtttacactccatggatactctccgggcgaactcaatcgggtggctgcaaccctca

SEQ ID NO: 143711 - DNA, 80 bp, synthetic construct
  source 1..80: mol_type = other DNA
ggcgcattattgtactactgcatggttgccaattgggccaaggtactctgtgtgctcctcctgtttgcgggagttgatgc

SEQ ID NO: 143712 - DNA, 80 bp, synthetic construct
  source 1..80: mol_type = other DNA
cctggacctcgagatggacggccaggcctccgagcagcgcatcctgcaactgcgcgtccgtcagcagcaggagcgggccg

SEQ ID NO: 143713 - DNA, 80 bp, synthetic construct
  source 1..80: mol_type = other DNA
tgtgatgagctagcctccaagctcagggctgtagggctaaacgcggtggcgttttacagaggccttgacgtatccgtgat

SEQ ID NO: 143714 - DNA, 80 bp, synthetic construct
  source 1..80: mol_type = other DNA
cagggttacaaggtgttggtgcttaatccatctgtagcagccaccctagcctttggctcttacatgagtaaagcctatgg

SEQ ID NO: 143715 - DNA, 80 bp, synthetic construct
  source 1..80: mol_type = other DNA
actttttatgactagggagggaaaactgctgatcattgctgaactttggggctttgacgtggcggtttccctacgtggca

SEQ ID NO: 143716 - DNA, 80 bp, synthetic construct
  source 1..80: mol_type = other DNA
aagaaggtgataacctggggtgcggagaccgtggcctgtggtgacatcctacacggtttaccggtctccgctaggttggg

SEQ ID NO: 143717 - DNA, 80 bp, synthetic construct
  source 1..80: mol_type = other DNA
ccgtccccccgtcgcgggtgtttgtgtttgtttattccgacattggtttatttaaataaacacagccgttctgcgtgtct

SEQ ID NO: 143718 - DNA, 80 bp, synthetic construct
  source 1..80: mol_type = other DNA
cggccgccgtgtggtatttttgggaggcaagaaagcagcgagccggagttttgtgggatgttccaagtcccccaccaaca

SEQ ID NO: 143719 - DNA, 80 bp, synthetic construct
  source 1..80: mol_type = other DNA
tcgcaaaccagcgcgactcatcgtattcccagacttatcagtaagggtgtgcgagaagagagcgctctacgacatcacac

SEQ ID NO: 143720 - DNA, 80 bp, synthetic construct
  source 1..80: mol_type = other DNA
ccaaatccatcgatttcatccccgttgagacactcgacgttgttacaaggtctcccactttcagtgacaacagcacgcca

SEQ ID NO: 143721 - DNA, 80 bp, synthetic construct
  source 1..80: mol_type = other DNA
tttccccagggggcacaacacagcttccacccttgaagccatggtgagcaacgataccaatgatcagtcatttagggact

SEQ ID NO: 143722 - DNA, 80 bp, synthetic construct
  source 1..80: mol_type = other DNA
aaagtactactcaacagacagatgctaccttaagtgcctttagcagcactgcaaatttaacttcgcttgcttggactaat

SEQ ID NO: 143723 - DNA, 80 bp, synthetic construct
  source 1..80: mol_type = other DNA
cgaaatgagccctctcctgcactccacgaccgaactcgcaatccttccctgtaccttcaccactatgccggccctttcca

SEQ ID NO: 143724 - DNA, 80 bp, synthetic construct
  source 1..80: mol_type = other DNA
cccgctgcgtttgtcaagaggccactcttgagtgccagcgagaagagttttctctgcgagctgacatacggcgccattat

SEQ ID NO: 143725 - DNA, 80 bp, synthetic construct
  source 1..80: mol_type = other DNA
aggccattttaacaaagcggggaagaagggttcctgactgggggattatggtaccttccggaccggtggcatagttaccc

SEQ ID NO: 143726 - DNA, 80 bp, synthetic construct
  source 1..80: mol_type = other DNA
aggccgaagcggcgcttgagaagcttatcatcttgcactctgctagcgctgctagtgctaacgggccaatgtggttcttc

SEQ ID NO: 143727 - DNA, 80 bp, synthetic construct
  source 1..80: mol_type = other DNA
cgcctccgacgcaactagccacgtctgcatcgcaagccaccctgggtcgggagcaggatatccgacccgtctagcggccg

SEQ ID NO: 143728 - DNA, 80 bp, synthetic construct
  source 1..80: mol_type = other DNA
ctgctcatggagcagtggaaaaatcggaaccccactgcggcttgtgtcttcaaagtgctggctccatacagaccggaggt

SEQ ID NO: 143729 - DNA, 80 bp, synthetic construct
  source 1..80: mol_type = other DNA
cgtaaggagccatgccagtaaggccgtcaaccacatcaactccgtgtggaaggacttgctggaggacaaaaccacaccaa

SEQ ID NO: 143730 - DNA, 80 bp, synthetic construct
  source 1..80: mol_type = other DNA
tacccacgtgacgggagtggcggtcgcccactcgacccggagcctcactggtctcttctcccctggggcaaaacagaaca

SEQ ID NO: 143731 - DNA, 80 bp, synthetic construct
  source 1..80: mol_type = other DNA
ggtgatagtgggccgcgtgtccatcaatacccacaaagtgctttcgcccaacaaagaggtcctttatcagcagtttgatg

SEQ ID NO: 143732 - DNA, 80 bp, synthetic construct
  source 1..80: mol_type = other DNA
aggatagtgcgactcttggagctgggctcctattactctttgggttctttaccttgtcaccatggtataagcactggatt

SEQ ID NO: 143733 - DNA, 80 bp, synthetic construct
  source 1..80: mol_type = other DNA
ttgacccccaaatgcctggtgcattacccttacaggctgtggcattatccatgcacagtcaactattccatctttaagat

SEQ ID NO: 143734 - DNA, 80 bp, synthetic construct
  source 1..80: mol_type = other DNA
caggtgtaagggttagaacgtcgttcaggatgtcctcgcccccgggcccgtggggcgctggagccacaaagcggcccccg

SEQ ID NO: 143735 - DNA, 80 bp, synthetic construct
  source 1..80: mol_type = other DNA
gtggaaattatgaaacacacaaaatacttttatttaatctaacaataattgaaccgccaactactaaggcacccactacc

SEQ ID NO: 143736 - DNA, 80 bp, synthetic construct
  source 1..80: mol_type = other DNA
gctcctcccccatcctgggacgtcatgtggaaatgcctgaataggctcaaacccacacttgtaggccctacacccctact

SEQ ID NO: 143737 - DNA, 80 bp, synthetic construct
  source 1..80: mol_type = other DNA
cagctataatccagagactccatggcttgagcgctttcacgctgcacggatactctccacacgaactcaatcgggtggca

SEQ ID NO: 143738 - DNA, 80 bp, synthetic construct
  source 1..80: mol_type = other DNA
tgtttgagacggacccggtcaccttcttgtaccaccgccccgccatcggggtcatcgtaggctgcgagttgatgctacgc

SEQ ID NO: 143739 - DNA, 80 bp, synthetic construct
  source 1..80: mol_type = other DNA
cctgccccgtgggcttccgttcacagaactggatctcaccgttattctggtttttttagggtgctggggccaggtttcgc

SEQ ID NO: 143740 - DNA, 80 bp, synthetic construct
  source 1..80: mol_type = other DNA
taggaggccgccacgcgcccgagttttgcgttcgtcgctggtcgtcgggcgccaaagccccggacggctgttcggtcgaa

SEQ ID NO: 143741 - DNA, 80 bp, synthetic construct
  source 1..80: mol_type = other DNA
gcaatgattcattgaatacgggcttcattgcggcgttgttctatacccacaaattcaattcctcgggttgtcctcaacgg

SEQ ID NO: 143742 - DNA, 80 bp, synthetic construct
  source 1..80: mol_type = other DNA
ggggccccactgacccccggcatagatcacgcaacttgggcaaagtcatcgacaccattacgtgtggttttgccgacctc

SEQ ID NO: 143743 - DNA, 80 bp, synthetic construct
  source 1..80: mol_type = other DNA
gctccatgtcatacacctggacaggggcgctgatcacaccctgcgccgcagaggagaacaagctacccatcaatgcgctg

SEQ ID NO: 143744 - DNA, 80 bp, synthetic construct
  source 1..80: mol_type = other DNA
gctttcaaaggtgaaatggttgacccttttcagctgggccttctggtgatgtttctggccacccaggaagtccttcgcaa

SEQ ID NO: 143745 - DNA, 80 bp, synthetic construct
  source 1..80: mol_type = other DNA
tccattgctctgccccttgagtcatgcagtcggcatattccgtgcggccgtatgtacccggggtgtggcgaaggcagtgg

SEQ ID NO: 143746 - DNA, 80 bp, synthetic construct
  source 1..80: mol_type = other DNA
gatttacgggggggtaggtcagggagtgggtcgtcaaactgccgctccttaaaaccccggtgcccgtcgttcggtgtgct

SEQ ID NO: 143747 - DNA, 80 bp, synthetic construct
  source 1..80: mol_type = other DNA
caattcatggttgggaaacatcatccagtacgctccaacactatgggtccgcatggtcctgttcacacactttttctcca

SEQ ID NO: 143748 - DNA, 80 bp, synthetic construct
  source 1..80: mol_type = other DNA
aagatggacataggagttccacttctcgccttagggtgctattcccaggtgaacccattgacactgacagcggcggtgtt

SEQ ID NO: 143749 - DNA, 80 bp, synthetic construct
  source 1..80: mol_type = other DNA
acgctgactcccacagcttggatcagaggccttactgctggcactatgcgcccaaaccgtgtggcatcgtacccgcgtcg

SEQ ID NO: 143750 - DNA, 80 bp, synthetic construct
  source 1..80: mol_type = other DNA
acgcagttattattggatgataccgcccatgtcttcccggtgcgattgagctcacttcgaacgtaactggcaacagatct

SEQ ID NO: 143751 - DNA, 80 bp, synthetic construct
  source 1..80: mol_type = other DNA
cgttgcaaaagccctgcagttcataccagtggaaactctgagcacgcaggtcaggtctccatctttcagtgacaattcca

SEQ ID NO: 143752 - DNA, 80 bp, synthetic construct
  source 1..80: mol_type = other DNA
agctacatgccaagcagcggtagcagcccatccgttcccagttccatcatcgccgaggagaaactgctggccctgctggc

SEQ ID NO: 143753 - DNA, 80 bp, synthetic construct
  source 1..80: mol_type = other DNA
caggacaaaaggttcatctgcaaacactccatggtagacagaggatggggaaatggatgtggattatttggaaaaggagg

SEQ ID NO: 143754 - DNA, 80 bp, synthetic construct
  source 1..80: mol_type = other DNA
tcggcgctaccagggttgagacgggcactaaagtgatgatacttgactccttcgagccgcttgtggccgaaccagatgac

SEQ ID NO: 143755 - DNA, 80 bp, synthetic construct
  source 1..80: mol_type = other DNA
agtccggggaagcaaaaccgcgccgtccagacgggcccgacggccgcgggcgggtctaacagttggatgattttagtggc

SEQ ID NO: 143756 - DNA, 80 bp, synthetic construct
  source 1..80: mol_type = other DNA
attttgtgcccattcattttagagaatgtccccctcctctgtggagtcactgctacttgttcaaacttgccaattactta

SEQ ID NO: 143757 - DNA, 80 bp, synthetic construct
  source 1..80: mol_type = other DNA
aaggatgtgagggaaatagtggtgccatgccgcaaccaagatgaacttgtgggcagggctagagtatcgcaaggcgccgg

SEQ ID NO: 143758 - DNA, 80 bp, synthetic construct
  source 1..80: mol_type = other DNA
ggaagcagttttgcctgaggagcaggaccagaactacgtgtgtaagcatacatacgtagacagaggctgggggaacggtt

SEQ ID NO: 143759 - DNA, 80 bp, synthetic construct
  source 1..80: mol_type = other DNA
ggaagcattgacacctgtgcaaagttcacttgctcttacaaagcaactggactgaccatccagcgtgaaaatgtgaaata

SEQ ID NO: 143760 - DNA, 80 bp, synthetic construct
  source 1..80: mol_type = other DNA
cggcgggggggacatatatcacagcgtgtcctgggcccgaccccgcttattactcctgtgcctgctcctacttaccgtag

SEQ ID NO: 143761 - DNA, 80 bp, synthetic construct
  source 1..80: mol_type = other DNA
ccgccagtgcatcccagacgcccgcgagccgcacatcccctccgctcccgcctccggcccgattcttacggcgcgaccca

SEQ ID NO: 143762 - DNA, 80 bp, synthetic construct
  source 1..80: mol_type = other DNA
tcgtggaggcctacgtgcagaacccggccagcaaacctctgacggcccagctgttcctgatcgtgcagcacagccgcgac

SEQ ID NO: 143763 - DNA, 80 bp, synthetic construct
  source 1..80: mol_type = other DNA
ccccaaaggcgcgtgcccagccacagccgtgggtgtggcgcccgtccccttcctctaccgcgtgggcgcgtgcgcgggtg

SEQ ID NO: 143764 - DNA, 80 bp, synthetic construct
  source 1..80: mol_type = other DNA
cacatttgtacttggtctggtatttcatacaaatgtcatcaaaatggaagcatttcaatttttgcttataacattacatc

SEQ ID NO: 143765 - DNA, 80 bp, synthetic construct
  source 1..80: mol_type = other DNA
atggatcatcagtctacgagtgcgtctggcgcagcagcgcatctgaatctcactgagattccggcaagaatcgcacacca

SEQ ID NO: 143766 - DNA, 80 bp, synthetic construct
  source 1..80: mol_type = other DNA
agcgaagtcgtacgcacaaatgtggcagctgttgtacttccacagaagagatctgagactgatggcgaatgccatctgct

SEQ ID NO: 143767 - DNA, 80 bp, synthetic construct
  source 1..80: mol_type = other DNA
agcacgctgggcaaagccttttcaacgactttgaagggagctcaaagactggtagcgttgggcgacacagcctgggactt

SEQ ID NO: 143768 - DNA, 80 bp, synthetic construct
  source 1..80: mol_type = other DNA
ttcagctgcttgagaaaattctcgacatcgtgcaggaagcacagctccatgcggacgtccccgccgtacgtctccagccg

SEQ ID NO: 143769 - DNA, 80 bp, synthetic construct
  source 1..80: mol_type = other DNA
ttgatgtttgccatcgtaggtggtttggccgagttggatattgaatccatgtcaatacccttcatgctggcaggtctcat

SEQ ID NO: 143770 - DNA, 80 bp, synthetic construct
  source 1..80: mol_type = other DNA
cgtaggcatataacggtccaggactgcaattgttccatctactcaggccacgtcacaggacaccgaatggcgtgggacat

SEQ ID NO: 143771 - DNA, 80 bp, synthetic construct
  source 1..80: mol_type = other DNA
gccgcttgcctcaggaaacttggggtgccgcccttgcgaacctggagacaccgagcccgagctgttcgcgccaagctact

SEQ ID NO: 143772 - DNA, 80 bp, synthetic construct
  source 1..80: mol_type = other DNA
ctggatgaactccacgggatttgtgaagacttgcggagccccgccctgcaatttagggccgacgggcaataacagtctta

SEQ ID NO: 143773 - DNA, 80 bp, synthetic construct
  source 1..80: mol_type = other DNA
tgaccggatgcaagtgaaaattgctgattttcgcgcgaaaactgaatgaggaagtgtttttctgaataatgtggtattta

SEQ ID NO: 143774 - DNA, 80 bp, synthetic construct
  source 1..80: mol_type = other DNA
cagcggtcttaccctagacaaggccggaaacctcacctcccaaaatgtaaccactgttactcagccacttaaaaaaacaa

SEQ ID NO: 143775 - DNA, 80 bp, synthetic construct
  source 1..80: mol_type = other DNA
gcttaaccggcgtagatgctcatttcctgtcccagacaaaacaagcgggagataattatccttacctggttgcttatcag

SEQ ID NO: 143776 - DNA, 80 bp, synthetic construct
  source 1..80: mol_type = other DNA
cccgaagctgcgggccccggggatctccagggtcgtgtagcggagagcggggttgacggcgaatacggtgatgcatagct

SEQ ID NO: 143777 - DNA, 80 bp, synthetic construct
  source 1..80: mol_type = other DNA
taaataaattacttaccggaaatctgaaaacacatcatggtctccgtgtactcttataaaatttccctcttcccaactgt

SEQ ID NO: 143778 - DNA, 80 bp, synthetic construct
  source 1..80: mol_type = other DNA
aaccggggcaacgtcgagcgtgtaaatttaaataaaaaacagtacgcttttatccggtgtatgttttaaatttatttttt

SEQ ID NO: 143779 - DNA, 80 bp, synthetic construct
  source 1..80: mol_type = other DNA
agcagcagtcctctgcctaccacccccagtgagcaaattcccagatccatgattggcattatcgctgctgtggtggtgtg

SEQ ID NO: 143780 - DNA, 80 bp, synthetic construct
  source 1..80: mol_type = other DNA
ccaatactccccagcgcagcgagtcgagttcctcttgaaagcatgggcatcaaagaaggttcccatgggtttctcctatg

SEQ ID NO: 143781 - DNA, 80 bp, synthetic construct
  source 1..80: mol_type = other DNA
tacagcttcaattgcctcggaatgagcaatagggacttcttagaaggagtgacaggggcgacctggctcgacttagtgct

SEQ ID NO: 143782 - DNA, 80 bp, synthetic construct
  source 1..80: mol_type = other DNA
aagaagagatctaccagtgttgtgatctggatccagaggctcgtaaggtgatatccgccctcacggagagactctacaag

SEQ ID NO: 143783 - DNA, 80 bp, synthetic construct
  source 1..80: mol_type = other DNA
aagaccaaggaagatttttttggaaagagagacatcacaacaccaagtggggcaatctcatggagttggcctgacctgga

SEQ ID NO: 143784 - DNA, 80 bp, synthetic construct
  source 1..80: mol_type = other DNA
tgcgaggcgacagacgatcaatccctctgctggataccggtcacaccgaacatcgctgtgaagcatagaggagcactcac

SEQ ID NO: 143785 - DNA, 80 bp, synthetic construct
  source 1..80: mol_type = other DNA
tgcacaattgctcaggataaggactctaaactaactcttgttcttacaaagtgcggaagtcaaatattggcaaatgtgtc

SEQ ID NO: 143786 - DNA, 80 bp, synthetic construct
  source 1..80: mol_type = other DNA
aaaggggcaaaatggttggttgcccatctgtacatggggcgatcccatctatgtgtgccatggaaatagcagtactatct

SEQ ID NO: 143787 - DNA, 80 bp, synthetic construct
  source 1..80: mol_type = other DNA
gcatgacagggcgtgacaagacagaacaggccggggaaatccaagtcttgtccacagtcacccagtccttccttggaacg

SEQ ID NO: 143788 - DNA, 80 bp, synthetic construct
  source 1..80: mol_type = other DNA
tgatgaactggtcaccaaccatcgccctgattgcagcttatgccgcccgcgtcccggaggtggtccttgagatcatcttc

SEQ ID NO: 143789 - DNA, 80 bp, synthetic construct
  source 1..80: mol_type = other DNA
ccagccctatcaacaggcctcatacacctccaccaaaacatagtggacgttcaatatctatatggggtcagctcaggtct

SEQ ID NO: 143790 - DNA, 80 bp, synthetic construct
  source 1..80: mol_type = other DNA
cccactagggttgtagctgcagagatggcagatgccctgcgtgggcttccgatacgataccaaacttcggccgttaacag

SEQ ID NO: 143791 - DNA, 80 bp, synthetic construct
  source 1..80: mol_type = other DNA
ttcaactcatcgggatgtcctcaacgaatgtcctcctgccgccctatcgaggggtttaggatagggtgtggcagtctaga

SEQ ID NO: 143792 - DNA, 80 bp, synthetic construct
  source 1..80: mol_type = other DNA
gtatctctgaaggccacatgcaccacgcaccccaatcaccctgatgcagagctcctggaggcgaacctcctgtggaggca

SEQ ID NO: 143793 - DNA, 80 bp, synthetic construct
  source 1..80: mol_type = other DNA
ggagtggaaggctcaggcatacagaagctagggtacatcctgcgagacatctcaatgaaagctggaggaaaaatgtatgc

SEQ ID NO: 143794 - DNA, 80 bp, synthetic construct
  source 1..80: mol_type = other DNA
ccagagctaccaggtggcgcatctgcacgctcccactggaagtggtaagagcacgaaggtgccggccgcctatgcggctc

SEQ ID NO: 143795 - DNA, 80 bp, synthetic construct
  source 1..80: mol_type = other DNA
gctaatgtacagtgggatgaaatggcagacataacaggctcaagtccaatcatagaagtgaagcaagatgaggatggctc

SEQ ID NO: 143796 - DNA, 80 bp, synthetic construct
  source 1..80: mol_type = other DNA
gggactttggctctattggaggggtcttcaactccataggaagagccgttcaccaagtgtttggtggtgccttcagaaca

SEQ ID NO: 143797 - DNA, 80 bp, synthetic construct
  source 1..80: mol_type = other DNA
tggaaacatcgggcaaggcaagttcgcgctcgtctcatcacccagggaggcaaggctgctgtttgcggcatatacctctt

SEQ ID NO: 143798 - DNA, 80 bp, synthetic construct
  source 1..80: mol_type = other DNA
attgcctcggctacagtttcgcgcacctcttgttcgaaggctgccggcgtttcctcgatttccataaactcctcttcctc

SEQ ID NO: 143799 - DNA, 80 bp, synthetic construct
  source 1..80: mol_type = other DNA
gccacgcagtcctttttaggcaccgcgatcaacggcgtgatgtggactgtataccatggggcgggtagcaagaccatctg

SEQ ID NO: 143800 - DNA, 80 bp, synthetic construct
  source 1..80: mol_type = other DNA
cgcatatcgacgctgtcgtggcgtccgctacggtctgctccgctctctacgtaggggacttttgtggcgcggttatgata

SEQ ID NO: 143801 - DNA, 80 bp, synthetic construct
  source 1..80: mol_type = other DNA
ctcacgagttccaagtgggacacctccatgcgcctaccgggagcggaaagagcacgaaggtacccgctgcttatgcggcc

SEQ ID NO: 143802 - DNA, 80 bp, synthetic construct
  source 1..80: mol_type = other DNA
gtgctgcaggaccgagtagaggatggaaaaaacgtctcggtcgtaaaccacgaccgagcggggtccgatgcagccgtcgg

SEQ ID NO: 143803 - DNA, 80 bp, synthetic construct
  source 1..80: mol_type = other DNA
acttctcttttccatcatgaagaacacaaccaacacaagaaggggaactggcaacacaggagagacgcttggagagaaat

SEQ ID NO: 143804 - DNA, 80 bp, synthetic construct
  source 1..80: mol_type = other DNA
agagcaagaacagtggaagactgccaatgaagctgtccaagatccgaagttctgggaattagtggatgaagaacgacggc

SEQ ID NO: 143805 - DNA, 80 bp, synthetic construct
  source 1..80: mol_type = other DNA
attagtctcaactacctgggatggcacttgaaaagactgtccgaacttgaaggagggcttttctatgcagacgacacagc

SEQ ID NO: 143806 - DNA, 80 bp, synthetic construct
  source 1..80: mol_type = other DNA
cagctcccccaggggacgctccgcagccagcctatgacctcgagctcataacatcatgctcatccaacgtctcggtagcg

SEQ ID NO: 143807 - DNA, 80 bp, synthetic construct
  source 1..80: mol_type = other DNA
ggcatacgctcagcaaacccgcggacttcttggcactatcgtcaccagccttaccggaagggacaaaaatgatgctaccg

SEQ ID NO: 143808 - DNA, 80 bp, synthetic construct
  source 1..80: mol_type = other DNA
accgccgcagaggggggatgaggtggaggtcgaggaagtagaagtagaggaaaagctgcccccgctggagaaagttcccg

SEQ ID NO: 143809 - DNA, 80 bp, synthetic construct
  source 1..80: mol_type = other DNA
gcggtggtcgccacgtgcgcgagctttgcacgcggggttggtcggccggccccacggacccgcccggtggctcggtcgga

SEQ ID NO: 143810 - DNA, 80 bp, synthetic construct
  source 1..80: mol_type = other DNA
acaaactgttagacagagcactaaaatccctatggaccggttttgacgaacggacagtagctgcagagctagctgacata

SEQ ID NO: 143811 - DNA, 80 bp, synthetic construct
  source 1..80: mol_type = other DNA
ctcctttgtcagactgggccgctgacggcctcagcgacttggcggtggctctcgagccagtcatcttcacgccaatggag

SEQ ID NO: 143812 - DNA, 80 bp, synthetic construct
  source 1..80: mol_type = other DNA
cctaaaccagctggccaaaacctgcccgccggctatacactgcagggaaccgggactggaacaatgacagtggagagccc

SEQ ID NO: 143813 - DNA, 80 bp, synthetic construct
  source 1..80: mol_type = other DNA
aacgacctgcacgccggggtgactgaacccggtgtacaccacctcttcttcttcctcctcgctgtctggaaccacttcgg

SEQ ID NO: 143814 - DNA, 80 bp, synthetic construct
  source 1..80: mol_type = other DNA
ggcagtttaataataaaaaaatgagagatttgcgatttctgcctcaggaaataatctctgctgagactggaaatgaaata

SEQ ID NO: 143815 - DNA, 80 bp, synthetic construct
  source 1..80: mol_type = other DNA
ttttatggcaaggccatccccattacacaactcaagggggggagacacctagtgttttgccattcaaagaaaaagtgtga

SEQ ID NO: 143816 - DNA, 80 bp, synthetic construct
  source 1..80: mol_type = other DNA
ctagagactatcatgcttttggggttgctgggaacagtctcgctgggaatctttttcgtcttgatgcggaacaagggcat

SEQ ID NO: 143817 - DNA, 80 bp, synthetic construct
  source 1..80: mol_type = other DNA
atttcttttcaatccttcaaagccaggagcagttagacaaggcccttgcattcgagatgtatgggtcggtctattccgtc

SEQ ID NO: 143818 - DNA, 80 bp, synthetic construct
  source 1..80: mol_type = other DNA
tgtgcgctttaaactgaggcggctggtgctgaagcgcgtgtcttctccctgtgcttcggcaaggtagcattttaacataa

SEQ ID NO: 143819 - DNA, 80 bp, synthetic construct
  source 1..80: mol_type = other DNA
acattacattaaatggaccactacaaaatactacatggttaagataccacctaaatggttggcaacatatttgtacatgg

SEQ ID NO: 143820 - DNA, 80 bp, synthetic construct
  source 1..80: mol_type = other DNA
ccgtctgtcaggaccacctggagttttgggagggcgtatttacgggcctcacacacatcgatgcacacttcctgtcccag

SEQ ID NO: 143821 - DNA, 80 bp, synthetic construct
  source 1..80: mol_type = other DNA
gcagtttcattcgttatggactccaggcaacagtttattgtggattctggacctcagatgggcgcggttttaacttcaca

SEQ ID NO: 143822 - DNA, 80 bp, synthetic construct
  source 1..80: mol_type = other DNA
gccagttccctcctaaaaaatgatattcccatgacaggaccactagtggctggagggctcctcactgtgtgctacgtgct

SEQ ID NO: 143823 - DNA, 80 bp, synthetic construct
  source 1..80: mol_type = other DNA
aagcagatgttctaccagcacgacgtagaggagactctacggccagcttgctcagtcctagacctatagcatgcttaaaa

SEQ ID NO: 143824 - DNA, 80 bp, synthetic construct
  source 1..80: mol_type = other DNA
aaatggctggcttgtggggttgacaacttctgtgtgaaggtgttagctccatacatgccagatgttctcgagaaactgga

SEQ ID NO: 143825 - DNA, 80 bp, synthetic construct
  source 1..80: mol_type = other DNA
tttgctatactgccttgctccttcacgcccatgcctgcattgtcaacaggttggatacatctccatcaaaatatcgtaga

SEQ ID NO: 143826 - DNA, 80 bp, synthetic construct
  source 1..80: mol_type = other DNA
ctaagcgcaggctggccagggggtcccccccctccttggccagctcctcggctagtcagttgtctgcaccttccttgaaa

SEQ ID NO: 143827 - DNA, 80 bp, synthetic construct
  source 1..80: mol_type = other DNA
gcacatggcctgagacgcacaccctatggggtgatggagtcctggagagtgacctcatcattcccgtggccttggcagga

SEQ ID NO: 143828 - DNA, 80 bp, synthetic construct
  source 1..80: mol_type = other DNA
tgttcgggctgtggaagacgggatcaattacgcaacagggaatctacccggttgctctttctctatctttctcctggccc

SEQ ID NO: 143829 - DNA, 80 bp, synthetic construct
  source 1..80: mol_type = other DNA
agagcgcagcgatgtgcccctcgccatagcggatgtcagccttgcctacgaacgccacctattctcaccgcgcgtacccc

SEQ ID NO: 143830 - DNA, 80 bp, synthetic construct
  source 1..80: mol_type = other DNA
ctcccctttggccgattgggccagcgacggcttacgagaccttgccgttgctgtcgagccggtcattttctctcctatgg

SEQ ID NO: 143831 - DNA, 80 bp, synthetic construct
  source 1..80: mol_type = other DNA
gactcaccagtatgttcagcctcggccccagacagaagatcgagctggtcaatgtcaacgacagttggcacatcaatagc

SEQ ID NO: 143832 - DNA, 80 bp, synthetic construct
  source 1..80: mol_type = other DNA
agggcgtacgccgatagtgggagtgaggctgtgtctctggggttgttaactgttgccatcatcactgtgtttaccatcac

SEQ ID NO: 143833 - DNA, 80 bp, synthetic construct
  source 1..80: mol_type = other DNA
ggacgatgccggtggcatgcggcatgagcagcgtggtcaggggcagcctctggaggttcctgccccttgggcatagactc

SEQ ID NO: 143834 - DNA, 80 bp, synthetic construct
  source 1..80: mol_type = other DNA
tacttgcatggtgataaaactaaacctatgatacttaccattacacttaatggcactagtgaatccacagaaactagcga

SEQ ID NO: 143835 - DNA, 80 bp, synthetic construct
  source 1..80: mol_type = other DNA
aagcaaaaggcagtagagctatatggtacatgtggttgggagccaggtaccttgagttcgaagcccttggattcttaaat

SEQ ID NO: 143836 - DNA, 80 bp, synthetic construct
  source 1..80: mol_type = other DNA
cccttacgcttcaaaggagaagatgggtgctggtacggtatggaaatcagaccagtcaaggaaaaggaagagaatctagt

SEQ ID NO: 143837 - DNA, 80 bp, synthetic construct
  source 1..80: mol_type = other DNA
atcggtgtgcgggcccgtctactgctttacacccagcccggtggttgtcggcaccactgataagaggggacaccccacgt

SEQ ID NO: 143838 - DNA, 80 bp, synthetic construct
  source 1..80: mol_type = other DNA
agatggttgaagactggctacagcgaggaccaaaggaattttgcataaaagtgttgtgcccctacatgccaaaagtaatt

SEQ ID NO: 143839 - DNA, 80 bp, synthetic construct
  source 1..80: mol_type = other DNA
acttcttctccgtcttgatggcccaggataccctggaccaggatctcaacttcgaaatgtacggagcagtgtactcagtc

SEQ ID NO: 143840 - DNA, 80 bp, synthetic construct
  source 1..80: mol_type = other DNA
aagcttgatccccgccctcccgtagaggagcctccaccggccgtggagacagtgtctccagaggggcgtggcgaaaagcg

SEQ ID NO: 143841 - DNA, 80 bp, synthetic construct
  source 1..80: mol_type = other DNA
tagggggaggttaggcgtctatagatacgtgtctgcaggtgaaagaccgtctgggatgttcgactccgtggtgctctgcg

SEQ ID NO: 143842 - DNA, 80 bp, synthetic construct
  source 1..80: mol_type = other DNA
gctgtaccaagccttcgacgagatggaggagtgctcacagcgcatcccctacctcgctgagggccagcagatggccgagc

SEQ ID NO: 143843 - DNA, 80 bp, synthetic construct
  source 1..80: mol_type = other DNA
cgccgcatccagcgctgacggaagcaaaacaccagcagcagtttttccagttccgtttatccgggcaaaccatcgaagtg

SEQ ID NO: 143844 - DNA, 80 bp, synthetic construct
  source 1..80: mol_type = other DNA
caccatcgtgactagccttactggtagggacgccaatgagaattgtggggagatccaagtactatctacagccactcaga

SEQ ID NO: 143845 - DNA, 80 bp, synthetic construct
  source 1..80: mol_type = other DNA
taaactccaacggcagctggcatatcaacaggactgccttgaattgctttgactcaatacagacagggttccttgcagcc

SEQ ID NO: 143846 - DNA, 80 bp, synthetic construct
  source 1..80: mol_type = other DNA
cgcctttgctcaggaccaagagcaagcggcttgcattggggtctcggtcattgtagccttaactatctttactctcactc

SEQ ID NO: 143847 - DNA, 80 bp, synthetic construct
  source 1..80: mol_type = other DNA
tttctcgtgcatcaccatccccgcttcggcaatccatgtcaggaacagttctggcatttatcatctcaccaatgattgcc

SEQ ID NO: 143848 - DNA, 80 bp, synthetic construct
  source 1..80: mol_type = other DNA
ctcctcgtagatgggatcaagtgaagggtgacggtaagcaccagcggcagggctaccgatcatggagggcccacaaagcc

SEQ ID NO: 143849 - DNA, 80 bp, synthetic construct
  source 1..80: mol_type = other DNA
tattctgtccccacattatttttgacatcaccaaatggctactggcagtactcgggcctctttggctcctgagggacgtc

SEQ ID NO: 143850 - DNA, 80 bp, synthetic construct
  source 1..80: mol_type = other DNA
aaagtgcgcgcgggactgatcactcagggaggtagggccagaatctgtggcttatacctctttaactgggcggtcaaaac

SEQ ID NO: 143851 - DNA, 80 bp, synthetic construct
  source 1..80: mol_type = other DNA
agttgctaggcaatcgagttgctaggcaataaacacatttggattaattttaatcgttcgttgagcgattagcagagaac

SEQ ID NO: 143852 - DNA, 80 bp, synthetic construct
  source 1..80: mol_type = other DNA
gtttagcccaatggagaagaaagtcattgtgtggtgggctgagacggtggcatgtggggatatcctgcacggcctcccgg

SEQ ID NO: 143853 - DNA, 80 bp, synthetic construct
  source 1..80: mol_type = other DNA
cccgcgccccgccccgcatggcatctcattaccgcccgatccggcggtttccgcttccgttccgcatgctaacgaggaac

SEQ ID NO: 143854 - DNA, 80 bp, synthetic construct
  source 1..80: mol_type = other DNA
catgcgcatcatctacggggacacggactccatctttgtgctgtgccgcggcctcacggccgccgggctgacggccgtgg

SEQ ID NO: 143855 - DNA, 80 bp, synthetic construct
  source 1..80: mol_type = other DNA
gcccgggctgcctgaccaccgatccccgaaagcatcctgccactggcatggagccagaaccacagtgggttgggtgtgtg

SEQ ID NO: 143856 - DNA, 80 bp, synthetic construct
  source 1..80: mol_type = other DNA
ggattaccgaagactgccctgttccatgcgccggctcttggcttcgcgacatatgggactgggcctgtactatcttgact

SEQ ID NO: 143857 - DNA, 80 bp, synthetic construct
  source 1..80: mol_type = other DNA
actctcgtgcctcaccacccccgcctcggcagtacattacaggaatgcatctggtatttaccatctcaccaatgattgcc

SEQ ID NO: 143858 - DNA, 80 bp, synthetic construct
  source 1..80: mol_type = other DNA
tatagaaagactgacagtaataggagagcacgcctgggactttgggtccgctgggggcttctttagctcaattggaaagg

SEQ ID NO: 143859 - DNA, 80 bp, synthetic construct
  source 1..80: mol_type = other DNA
tgttattgtgtgtctacagaaatatacgatcagacctgctacccttatctacatcccagcaactgctgcttggaattatt

SEQ ID NO: 143860 - DNA, 80 bp, synthetic construct
  source 1..80: mol_type = other DNA
gcaaggcaattgggctaaggttgccatcgtgctaattatgttctcaggagtggacgcgagcacacgcatcaccggcggtg

SEQ ID NO: 143861 - DNA, 80 bp, synthetic construct
  source 1..80: mol_type = other DNA
tcggcaattgggctaaggtcctggttgtgatgctactgttcgctggtgttgacgccgacacctatgcgacgggtgcggcg

SEQ ID NO: 143862 - DNA, 80 bp, synthetic construct
  source 1..80: mol_type = other DNA
ccggggcgcgcggtgcgcgtccaccggcacggcgtgcggcgcgggcccggccgcgtccgcgctcgcagacaccacgggtg

SEQ ID NO: 143863 - DNA, 80 bp, synthetic construct
  source 1..80: mol_type = other DNA
cgtagcccgcgctaaagcccaagtcgtcgaggagacggttaaagagggcggcgggggggacgggcatggttggagagagc

SEQ ID NO: 143864 - DNA, 80 bp, synthetic construct
  source 1..80: mol_type = other DNA
atccaagcgggcctcacagtccaaggtcacagtctggtggaatgagaagaacgcacagattcatactcggaaaacaggat

SEQ ID NO: 143865 - DNA, 80 bp, synthetic construct
  source 1..80: mol_type = other DNA
ccaactagggttgtggccgctgagatggctgaagccctaagaggattgcctatccgataccaaacatctgcggtggccag

SEQ ID NO: 143866 - DNA, 80 bp, synthetic construct
  source 1..80: mol_type = other DNA
tcctatgtaacaggactgaccactgacaatctgaaaattccttgccaactaccttctccagagtttttctcctgggtgga

SEQ ID NO: 143867 - DNA, 80 bp, synthetic construct
  source 1..80: mol_type = other DNA
gtctttggagagatcaaatcatgcacgtggcctgagacacacactctttggagtgatggcgttgttgaaagtgatctggt

SEQ ID NO: 143868 - DNA, 80 bp, synthetic construct
  source 1..80: mol_type = other DNA
ggatgttcgattctgtggtactctgtgagtgctacgattccgctgctgcctggtacgagctcacaccgaaggaggttacc

SEQ ID NO: 143869 - DNA, 80 bp, synthetic construct
  source 1..80: mol_type = other DNA
tttatggcaagtgtatccccctcgaatttatcaaggggggaagacatctcatcttctgtcactcaaagaagaaatgcgac

SEQ ID NO: 143870 - DNA, 80 bp, synthetic construct
  source 1..80: mol_type = other DNA
gcaatctcgagaccaacggcggctcgacgagcgatgatgagatatcggatgcgacggactcggacgataccctcgcgtcc

SEQ ID NO: 143871 - DNA, 80 bp, synthetic construct
  source 1..80: mol_type = other DNA
aagatcatatggtggctccagtactttataaccaggactgaggccatgctgcaggtgtgggtccctcctctgaacgtccg

SEQ ID NO: 143872 - DNA, 80 bp, synthetic construct
  source 1..80: mol_type = other DNA
ggctgatgttcttagtgggtaaggccgaggcagctttggaaaacctcatcagtctgaatgctgccgcggctgcgggtacc

SEQ ID NO: 143873 - DNA, 80 bp, synthetic construct
  source 1..80: mol_type = other DNA
ggtcgtaagccagctcgcctcatcgtgttccccgacctgggtgtgcgcgtgtgcgagaaaatggccctgtacgacgtggt

SEQ ID NO: 143874 - DNA, 80 bp, synthetic construct
  source 1..80: mol_type = other DNA
tgcccgactcatcgtgtacccggatctaggggttcgggtgtgcgagaaaagggcactgtatgacatcacacgcaagttgc

SEQ ID NO: 143875 - DNA, 80 bp, synthetic construct
  source 1..80: mol_type = other DNA
ctgcattgatccaactaaaggtgggaaaaagccagctcgcctcatcgtgtatcctgacctcggggtcagggtgtgcgaaa

SEQ ID NO: 143876 - DNA, 80 bp, synthetic construct
  source 1..80: mol_type = other DNA
gggcatatctcaacaccccagggctgcccgtatgccaggaccacttggagttctgggaagctgtgtttacaggccttacc

SEQ ID NO: 143877 - DNA, 80 bp, synthetic construct
  source 1..80: mol_type = other DNA
ccaggctacggtctgtgctagagcgcaggctcccccaccatcgtgggacaccatgtggaaatgcctcatccgcctgaagc

SEQ ID NO: 143878 - DNA, 80 bp, synthetic construct
  source 1..80: mol_type = other DNA
atgtttgtctacagtaagtgaaattatgggcagtgggtgatagagtggtgggttcggtgtggtaatttttttttttaatt

SEQ ID NO: 143879 - DNA, 80 bp, synthetic construct
  source 1..80: mol_type = other DNA
cacaacaattatcactcccatgatgagacacacaattgaaaacacaacggcaaatatttccctgacagctattgcaaacc

SEQ ID NO: 143880 - DNA, 80 bp, synthetic construct
  source 1..80: mol_type = other DNA
atcggtgaccgttccgcatccgaacatcacagaggtcgcgctgccctcaactggggagatcccgttctacggaagaggga

SEQ ID NO: 143881 - DNA, 80 bp, synthetic construct
  source 1..80: mol_type = other DNA
ttgggatcttccacaccagtgtttggctgaaggtcagagaggactactcactagagtgtgacccagccgtcataggaaca

SEQ ID NO: 143882 - DNA, 80 bp, synthetic construct
  source 1..80: mol_type = other DNA
gacttgctagaagacaacactacacctatccctactaccatcatggccaagaatgaggtgttctgtgtggatcctcagaa

SEQ ID NO: 143883 - DNA, 80 bp, synthetic construct
  source 1..80: mol_type = other DNA
actgggagaactacctggtcaatccatggaaagggagaatggatgaccactgaagacatgcttgtggtgtggaacagagt

SEQ ID NO: 143884 - DNA, 80 bp, synthetic construct
  source 1..80: mol_type = other DNA
gtttcgattgcgtggagaagaaaggaagaactttgttgagctgatgcgcaacggtgacctcccagtgtggttagcttaca

SEQ ID NO: 143885 - DNA, 80 bp, synthetic construct
  source 1..80: mol_type = other DNA
agctgctgccgcgtctgctgctgcctctactgctcgtggcatggcagcagattttggactgtacaatcaactggccgcgt

SEQ ID NO: 143886 - DNA, 80 bp, synthetic construct
  source 1..80: mol_type = other DNA
tgcatgaaaggaagaaaactatggcaaaaaagaaaggtgctgtcctcttaggcctggccctcagttctactgggtggttt

SEQ ID NO: 143887 - DNA, 80 bp, synthetic construct
  source 1..80: mol_type = other DNA
acgctactaccatccttggcattggaacagtcctcgaccaggccgagactgcaggtgccaggctagtggttttggccaca

SEQ ID NO: 143888 - DNA, 80 bp, synthetic construct
  source 1..80: mol_type = other DNA
actgcttgtctggctaagtcttatgcccagatgtggctgcttctgtacttccacagaagagacctgcggctaatggccaa

SEQ ID NO: 143889 - DNA, 80 bp, synthetic construct
  source 1..80: mol_type = other DNA
gaccagtcttgtgttcttctggtcatgttgttggtctgttccgtgcggccgtgtgcactagaggtgttgctaaggcaatt

SEQ ID NO: 143890 - DNA, 80 bp, synthetic construct
  source 1..80: mol_type = other DNA
gcttccaaccactagagcacccaccacagttaggtcaactacacagtcctctactaaagagacaacacagcctaccactg

SEQ ID NO: 143891 - DNA, 80 bp, synthetic construct
  source 1..80: mol_type = other DNA
atccgtgtatgtcgatttctttccccccctccccggaaaccaaagaaggaagcaaagaatggatgggaggagttcaggaa

SEQ ID NO: 143892 - DNA, 80 bp, synthetic construct
  source 1..80: mol_type = other DNA
ggcatgcaggttacattgttggatgtggtggtcccaatctgctgctaggtcctcataccgagttgcatccaacgcgttca

SEQ ID NO: 143893 - DNA, 80 bp, synthetic construct
  source 1..80: mol_type = other DNA
tgcgttttgatctcgtggagctttcaccgttgtgtttctttggtgacagaggacgttgccactggtggtgcttcgtgatt

SEQ ID NO: 143894 - DNA, 80 bp, synthetic construct
  source 1..80: mol_type = other DNA
ttcgcaaataattgcatcgaggttaatttttctttaaggtctttgggacttaagaacgttgcataaaaaaaagaatgcac

SEQ ID NO: 143895 - DNA, 80 bp, synthetic construct
  source 1..80: mol_type = other DNA
atatagcatctgggaacaattatgctcaatctcaaatgcagcaaagcgacacctctcggatgcaaagtaaaatccacagg

SEQ ID NO: 143896 - DNA, 80 bp, synthetic construct
  source 1..80: mol_type = other DNA
ggcggaatgggcaaagaacatctggggatcagtggagaaagtgaggaggatgatcgggcccgagaggtatgcagattacc

SEQ ID NO: 143897 - DNA, 80 bp, synthetic construct
  source 1..80: mol_type = other DNA
actgtaaggggacggcgggttaatagacaatgaccacgttcggatcgcgcagagccgatagtatgtgctcactaatgacg

SEQ ID NO: 143898 - DNA, 80 bp, synthetic construct
  source 1..80: mol_type = other DNA
cgctggctcgtacagttccatgccacccctcgagggtgaacctggagatcctgacctttctgaggaggaaggttcggggt

SEQ ID NO: 143899 - DNA, 80 bp, synthetic construct
  source 1..80: mol_type = other DNA
aggacggtgtggcaacgggaggccatgctgtgtcccgaggaagtgcaaagctgagatggttggtggagcggggatacctg

SEQ ID NO: 143900 - DNA, 80 bp, synthetic construct
  source 1..80: mol_type = other DNA
tgcggtcgtggccgataccagctccgtggaacgcccgggcccatccgattctggtgcgggtcgcgccgcagaagaccgca

SEQ ID NO: 143901 - DNA, 80 bp, synthetic construct
  source 1..80: mol_type = other DNA
cgcagtgcgtaagacttccgagcggtcgcaacctcgcggacggcggcagcctatccccaaggcgcgccagagcgagggcc

SEQ ID NO: 143902 - DNA, 80 bp, synthetic construct
  source 1..80: mol_type = other DNA
ccgtggcttactatcgtggcctcgacgtgtctgtcatcccgagctcgggcgacgtcgttgtagtggcgacggacgcccta

SEQ ID NO: 143903 - DNA, 80 bp, synthetic construct
  source 1..80: mol_type = other DNA
atcacctggtaagttctggaacaccacgatagctgtttccatggcgaacatttttagagggagctatttagcaggagctg

SEQ ID NO: 143904 - DNA, 80 bp, synthetic construct
  source 1..80: mol_type = other DNA
ccggatcccgtacgtgatcgtggcccagacccgcgaggtagaggagacggtcgcgcggctggccgccctccgcgagctag

SEQ ID NO: 143905 - DNA, 80 bp, synthetic construct
  source 1..80: mol_type = other DNA
gagcttgttattaagccaatcaaggaagatgctagcaagaggagctacaatgtcatagatggcacccatgacaccctgta

SEQ ID NO: 143906 - DNA, 80 bp, synthetic construct
  source 1..80: mol_type = other DNA
gggatggagccttagagaaaccgcatgtttagggaaagcctacgcccaaatgtggagtctcatgtattttcacagaagag

SEQ ID NO: 143907 - DNA, 80 bp, synthetic construct
  source 1..80: mol_type = other DNA
agctcacgtctcaatgtgagctgcaaaaagtcactcaagtcctcggccactacagatgccaattcagagccagggctaag

SEQ ID NO: 143908 - DNA, 80 bp, synthetic construct
  source 1..80: mol_type = other DNA
cctaaggcaatcatgggggatgcctatggtttccaatattccccagcgcagcgggtcgaatacctcttgaagtcttggaa

SEQ ID NO: 143909 - DNA, 80 bp, synthetic construct
  source 1..80: mol_type = other DNA
ccttgtgtgcaagcgttttttctggctccagttatcaaccctcgtcctgcaactactgctcagcctgaaaaaattaccaa

SEQ ID NO: 143910 - DNA, 80 bp, synthetic construct
  source 1..80: mol_type = other DNA
gctacctccatactggggatcgggactgtactagaccaggcggagacagcaggggttaggctcgtggtcttggccactgc

SEQ ID NO: 143911 - DNA, 80 bp, synthetic construct
  source 1..80: mol_type = other DNA
aaactcctcccacaactccccggagtgcccttcctctcgtgccagagagggtacaggggcgtatggcgtgtggatggagt

SEQ ID NO: 143912 - DNA, 80 bp, synthetic construct
  source 1..80: mol_type = other DNA
tgtctttggatgatgctgctggtgtcgcaggttgaagcagccctgacaaacttgattaacatcaatgctgctgctgccgt

SEQ ID NO: 143913 - DNA, 80 bp, synthetic construct
  source 1..80: mol_type = other DNA
acagttgctcctcgagattttcttgggagcacactggggtgtccttggggcagtggtgtattactgcatggtggcgaatt

SEQ ID NO: 143914 - DNA, 80 bp, synthetic construct
  source 1..80: mol_type = other DNA
ctagggcagctggcctaagggactgcaccatgctggtctgcggtgacgatttggtcgtcatcgctgaaagtgctggcact

SEQ ID NO: 143915 - DNA, 80 bp, synthetic construct
  source 1..80: mol_type = other DNA
ggaggcccggttctgtgcccatctggtcatctgacgggcatatttcgggcagcggtttgtactcgcggtgtggcgaaagc

SEQ ID NO: 143916 - DNA, 80 bp, synthetic construct
  source 1..80: mol_type = other DNA
ccccccgaggtcggccagggccgccaggagctgggcgcgaagtccggggaagcaaaaccgcgccgtccagacgggcccga

SEQ ID NO: 143917 - DNA, 80 bp, synthetic construct
  source 1..80: mol_type = other DNA
cttgccgggaaatcccgctgttgcttccctgatgtctttctccgcagccttaaccagtccattgtccacttcaactaccc

SEQ ID NO: 143918 - DNA, 80 bp, synthetic construct
  source 1..80: mol_type = other DNA
acttacagaatcatcctcctcgtcatagggatttgctccctgctgcacgagaggaaaaagaccatggcgaaaaagaaagg

SEQ ID NO: 143919 - DNA, 80 bp, synthetic construct
  source 1..80: mol_type = other DNA
gccggcactggcatcatgaccacgcgctgcccttgcggcgccaacatctctggcaatgtccgcctgggctctatgaggat

SEQ ID NO: 143920 - DNA, 80 bp, synthetic construct
  source 1..80: mol_type = other DNA
tacatgtcggagccaagcaggagaactggaacactgacatcaaaattctcaagtttgatgccctgtcgggctctcaggaa

SEQ ID NO: 143921 - DNA, 80 bp, synthetic construct
  source 1..80: mol_type = other DNA
taaacatagcgagagagccaggtaattccggctgaggtggtcgcagcgcgggtgaactcgcggactcggttccagatgtt

SEQ ID NO: 143922 - DNA, 80 bp, synthetic construct
  source 1..80: mol_type = other DNA
tagacagagagcacagcagtacaagcgccaacagcagcgactgactacccactgacccagctccctatttaaaggcacct

SEQ ID NO: 143923 - DNA, 80 bp, synthetic construct
  source 1..80: mol_type = other DNA
cctaacaaaaggaggaccaggacacgaagaacccattcccatgtcaacatatggttggaatctggtgcgtctgcaaagtg

SEQ ID NO: 143924 - DNA, 80 bp, synthetic construct
  source 1..80: mol_type = other DNA
gcggtattgggcccattatacttgatacaggctgccatcactactaccccctattttgtgcgtgcgcatgtactggttcg

SEQ ID NO: 143925 - DNA, 80 bp, synthetic construct
  source 1..80: mol_type = other DNA
ggtggatgccactacctatgtcggcggtgctgtcggccatgcggcaagcggcgtcgccgggctatttgccccaggtccta

SEQ ID NO: 143926 - DNA, 80 bp, synthetic construct
  source 1..80: mol_type = other DNA
ccctccctaaacataacgcagcagcggggcccaacaccaggggaagctgtaccttggtggtaaggactagtggttagagg

SEQ ID NO: 143927 - DNA, 80 bp, synthetic construct
  source 1..80: mol_type = other DNA
agggagtctcgaaggagggaaactaggacagttcataggccgggagcgtggggcgcgcaccgctgtcccgacgattagcc

SEQ ID NO: 143928 - DNA, 80 bp, synthetic construct
  source 1..80: mol_type = other DNA
actaaatggagcctccgctaccacctccccacgtggtggtagaaagacggggtctagaggttagaggagaccctccaggg

SEQ ID NO: 143929 - DNA, 80 bp, synthetic construct
  source 1..80: mol_type = other DNA
ccatcaggccctcaagtggtttaaggattttgcagcgggcaagagatcagccgttagtttcatagaggtgctcggtcgca

SEQ ID NO: 143930 - DNA, 80 bp, synthetic construct
  source 1..80: mol_type = other DNA
cagccggatgcgggggggaccgtcgaggggttcgcatcggaactgctggtgcggatagtcgcgtgcatcgaaacccactt

SEQ ID NO: 143931 - DNA, 80 bp, synthetic construct
  source 1..80: mol_type = other DNA
atcctggacttcacggccatgcatctgtggaaggcctgggtcaggcagcggggacagagaatcttgaactactggcttct

SEQ ID NO: 143932 - DNA, 80 bp, synthetic construct
  source 1..80: mol_type = other DNA
aaccttcctggctacttgttgcaatggcgcatgctggacagtctaccacggggcaggaacaaggaccattgcctgcccga

SEQ ID NO: 143933 - DNA, 80 bp, synthetic construct
  source 1..80: mol_type = other DNA
gacctggtcaatctactgcctgccatcctttcgcccggagccctcgtagtcggtgtggtctgcgcagcaatactgcgccg

SEQ ID NO: 143934 - DNA, 80 bp, synthetic construct
  source 1..80: mol_type = other DNA
catgtaccaccgctcacgactccccagacgcagagctcatcactgcgaatctcctatggagacaagagatgggtggtaat

SEQ ID NO: 143935 - DNA, 80 bp, synthetic construct
  source 1..80: mol_type = other DNA
cctgactggacctactcctctgttgtatcggctgggcgctgttcaaaatgaggttgtaacaacccatcctatcaccaagt

SEQ ID NO: 143936 - DNA, 80 bp, synthetic construct
  source 1..80: mol_type = other DNA
cagagcatagtggtgcaggagcgcagcttgagcctggctgacaaggtggccgccattaactattccatgctcagtctggg

SEQ ID NO: 143937 - DNA, 80 bp, synthetic construct
  source 1..80: mol_type = other DNA
ccctacacgaaaatcacccgcctcctctgcgagctatccgttcaacgccagaccctggtgcagctgttcgaggcggatcc

SEQ ID NO: 143938 - DNA, 80 bp, synthetic construct
  source 1..80: mol_type = other DNA
ggatgaacagcaccggcttcgtcaaaacctgtggggcgcccccctgtaacatcaggcctgcccccaatgagacagatcca

SEQ ID NO: 143939 - DNA, 80 bp, synthetic construct
  source 1..80: mol_type = other DNA
gacacactcagacgggtctgctgactcagagacgggctctgacatctccatgcctccccttgaaggggaacctggagatc

SEQ ID NO: 143940 - DNA, 80 bp, synthetic construct
  source 1..80: mol_type = other DNA
tcgccacgtcgaccgccccctcgccacacccgcgacccccgggctacatggccgttgtctccccgatggccctccaggct

SEQ ID NO: 143941 - DNA, 80 bp, synthetic construct
  source 1..80: mol_type = other DNA
acacttacgggccccacgcctctgttatatcggctgggctccgtcaccaatgacattactatgacacaccccgtgaccaa

SEQ ID NO: 143942 - DNA, 80 bp, synthetic construct
  source 1..80: mol_type = other DNA
gcggtggaccgaggcggtccgtacgctacccggcgtctggctgagccccggggtccccctcttcggagcggcctcccgcg

SEQ ID NO: 143943 - DNA, 80 bp, synthetic construct
  source 1..80: mol_type = other DNA
cattgtcggagggctggcagagcttgacattgactccatggccattccaatgaccatcgcagggctcatgtttgctgcct

SEQ ID NO: 143944 - DNA, 80 bp, synthetic construct
  source 1..80: mol_type = other DNA
aggacgaactggtaggcagagctcgcatttctccaggggccggatggaacgtccgcgacaccgcttgtctggctaagtca

SEQ ID NO: 143945 - DNA, 80 bp, synthetic construct
  source 1..80: mol_type = other DNA
ctggaacagttctggcagaaacatttgtggaattttgtcagcggggtgcagtacctagccggcttgtccaccttgccagg

SEQ ID NO: 143946 - DNA, 80 bp, synthetic construct
  source 1..80: mol_type = other DNA
cccgtgtgccgcagaagaacaaaaactgcccatcaacgcactgagcaactcgctgctgcgtcaccacaacctcgtgtatt

SEQ ID NO: 143947 - DNA, 80 bp, synthetic construct
  source 1..80: mol_type = other DNA
ccaattccagcatcgtgtacgaggcagagagtataatcttgcaccttccgggatgcgtcccgtgcgtgcgatcaaagaac

SEQ ID NO: 143948 - DNA, 80 bp, synthetic construct
  source 1..80: mol_type = other DNA
agagatgccgtcatcctgatcacctgcttagcgcacccctccctcggttttgaggtcactaagatcctgctggccatttt

SEQ ID NO: 143949 - DNA, 80 bp, synthetic construct
  source 1..80: mol_type = other DNA
gcaacgagatcttcaacgccgcgctggccgttacgaacatcatcctggatctggacatcgccctgaaggagcccgtcccc

SEQ ID NO: 143950 - DNA, 80 bp, synthetic construct
  source 1..80: mol_type = other DNA
tcccggtgggactcaacacaacaaagggaggtgctagcagcagcactagaaatcatggttaagttctctccagaaccaca

SEQ ID NO: 143951 - DNA, 80 bp, synthetic construct
  source 1..80: mol_type = other DNA
acgtgggccaccaggtcccgatacacggccatgcactcctcggggaggtcgcccccgaggtaggtcacgatgtacgagac

SEQ ID NO: 143952 - DNA, 80 bp, synthetic construct
  source 1..80: mol_type = other DNA
tgagcgtgaggcacatctccgtggcgaatgctacacctgcatttacaacatgatgggcaagagagaaaagaaacccgggg

SEQ ID NO: 143953 - DNA, 80 bp, synthetic construct
  source 1..80: mol_type = other DNA
cccgggggttaagtccttggccccctgcacttgcggagcttcagatctgtttctgatcaccagacatgcagacgtgatac

SEQ ID NO: 143954 - DNA, 80 bp, synthetic construct
  source 1..80: mol_type = other DNA
cgcagtgggaaccatccaagggatggaaaaactggcaagaggttcctttttgctcccaccatttccacaagatcttcatg

SEQ ID NO: 143955 - DNA, 80 bp, synthetic construct
  source 1..80: mol_type = other DNA
ccgcgtatgcgcagcagacgcgaggggtgctgggcgctataattgtcagcctaaccggccgggacaaaaatgaagccgag

SEQ ID NO: 143956 - DNA, 80 bp, synthetic construct
  source 1..80: mol_type = other DNA
cccttccatttaaaccactggtatagagacaaccggttattccacgcagaaactcaagtaacgatgactgtaatgtttga

SEQ ID NO: 143957 - DNA, 80 bp, synthetic construct
  source 1..80: mol_type = other DNA
ctttagaaaggacgtaaacatgattttgcagagcacactgggaaatgatcttcgggtggacggagccagcgttcgctttg

SEQ ID NO: 143958 - DNA, 80 bp, synthetic construct
  source 1..80: mol_type = other DNA
gcattatgcactctcgctgccactgtggagccgagatcactggacatgtcaagaacgggacgatgaggatcgtcggtcct

SEQ ID NO: 143959 - DNA, 80 bp, synthetic construct
  source 1..80: mol_type = other DNA
attacaagtgcttcctggctcgtgggatatggtggctccagtacttcatagccaggattgaagcattattgcatgtctac

SEQ ID NO: 143960 - DNA, 80 bp, synthetic construct
  source 1..80: mol_type = other DNA
cgattgtggctcacaatccgggaggaaaacacaacggaatgcgattcggcaatcatcggcacagctataaaaggagacag

SEQ ID NO: 143961 - DNA, 80 bp, synthetic construct
  source 1..80: mol_type = other DNA
ccgatgtctgactgggcatgtgaagggctgcgcgacctcgcggttgcggtagagcccatcatattctcgcccatggagaa

SEQ ID NO: 143962 - DNA, 80 bp, synthetic construct
  source 1..80: mol_type = other DNA
tgacagtgcagacacatggagaaagcactctagcgaacaagaagggggcttggatggacagcaccaaggctacaaggtat

SEQ ID NO: 143963 - DNA, 80 bp, synthetic construct
  source 1..80: mol_type = other DNA
cacccagagcggaggacggaggcgagagaagcgctcagtagctttaacaccacattcaggaatgggattggaaacaagag

SEQ ID NO: 143964 - DNA, 80 bp, synthetic construct
  source 1..80: mol_type = other DNA
tagggtttaaatcgttttattcgccagtaacattcgagactgatacgaatacaggtcttctgttaaaaacaatccccgat

SEQ ID NO: 143965 - DNA, 80 bp, synthetic construct
  source 1..80: mol_type = other DNA
actcctactctccgtaggggtaggcatcttcctgctgcctgctcgataggcagcttaacactccgaccttagggtccccg

SEQ ID NO: 143966 - DNA, 80 bp, synthetic construct
  source 1..80: mol_type = other DNA
caacgagacttttgtcatcaaccagggttccaaattacaacctcatagtgatggatgaagcacattttactgacccttgt

SEQ ID NO: 143967 - DNA, 80 bp, synthetic construct
  source 1..80: mol_type = other DNA
aggacctgggcttcgaagagccggctcgtctagaacccccacaggatgaacaggagcacgagcaagacgcaggccaggag

SEQ ID NO: 143968 - DNA, 80 bp, synthetic construct
  source 1..80: mol_type = other DNA
cgtgccgcgcgcacgggttggtgtgacacaggcgggacaccagcaccaggagaggcttaagctcgggaggcagcgccacc

SEQ ID NO: 143969 - DNA, 80 bp, synthetic construct
  source 1..80: mol_type = other DNA
cttgcaggggcggcagttggcagtgtgggccttggcaagattctggtggacattctcgccggttacggcgccggcgtagc

SEQ ID NO: 143970 - DNA, 80 bp, synthetic construct
  source 1..80: mol_type = other DNA
catgaggaccccacacgtatgcacgttctcttcggcgaggtcgctgggttcgtggaagataaagcgccgcgtgtcggcgc

SEQ ID NO: 143971 - DNA, 80 bp, synthetic construct
  source 1..80: mol_type = other DNA
tgagttcaccggaatcgccgggacgaccgggtcctttcttggaacaaacccgctcaatgcccggcaatttgggcgtgccc

SEQ ID NO: 143972 - DNA, 80 bp, synthetic construct
  source 1..80: mol_type = other DNA
acttttaatcgacgttcgaacgggacttataggcgcgtcgttggacgttcttgtatgtgacagggaccctttaactggca

SEQ ID NO: 143973 - DNA, 80 bp, synthetic construct
  source 1..80: mol_type = other DNA
cgtcgcgggccaccttcgcccgctcccgcgctccctcgagcattgcctccagggagcgcgcgcgctcccgcaaacgggca

SEQ ID NO: 143974 - DNA, 80 bp, synthetic construct
  source 1..80: mol_type = other DNA
ttgctatcaggaaaaaattgatatgccctcctattacttggtgattgtgggaatagtcatggtctgctcctgcactttct

SEQ ID NO: 143975 - DNA, 80 bp, synthetic construct
  source 1..80: mol_type = other DNA
aacagaatcccgttgcccaacacaaggggaacccagcctaaaagaagagcaggataagaggttcgtctgcaaacactcca

SEQ ID NO: 143976 - DNA, 80 bp, synthetic construct
  source 1..80: mol_type = other DNA
catctgtgtatacgcctcctatgttagcgccagaggaccaacgcgtgaatcgcagtcaccaccagcgctttcaagatggc

SEQ ID NO: 143977 - DNA, 80 bp, synthetic construct
  source 1..80: mol_type = other DNA
cgcctgtcgggtcccgcgacgttacgggccgggaggcgcggaggcacctcccccatgtgcgtgtaatacgtggccggctg

SEQ ID NO: 143978 - DNA, 80 bp, synthetic construct
  source 1..80: mol_type = other DNA
cgtcggtcggaagcgagtgcccttcaagcgtgtccgctcctctgggctgcatgccgtcggatggggtgccttttaaggaa

SEQ ID NO: 143979 - DNA, 80 bp, synthetic construct
  source 1..80: mol_type = other DNA
cacaatggatggtgagtatcgattgaggggtgaggaaaagaaaaattttctggagctgattagaacagccgacctcccag

SEQ ID NO: 143980 - DNA, 80 bp, synthetic construct
  source 1..80: mol_type = other DNA
cgccgaggtgcatggtccactatgcgtaccggctgtggcacttcccgtgcactgtgaacttcaccatcttcaaggtcagg

SEQ ID NO: 143981 - DNA, 80 bp, synthetic construct
  source 1..80: mol_type = other DNA
gatgccggggggcagatgtacgtgaatcgcaacgagatattcaacggcgcgctggcaatcacaaacatcatcctggatct

SEQ ID NO: 143982 - DNA, 80 bp, synthetic construct
  source 1..80: mol_type = other DNA
cccctcctgaccagccctccgacgacggcgacgcgggatccgacgttgggtcgtactcctccatgcccccccttgaggtg

SEQ ID NO: 143983 - DNA, 80 bp, synthetic construct
  source 1..80: mol_type = other DNA
gcagggggaggttgggcatatacaggtacgtctccgccggtgagagggcgtcagggatgttcgactccgtggtgctgtgt

SEQ ID NO: 143984 - DNA, 80 bp, synthetic construct
  source 1..80: mol_type = other DNA
ccggacccgttccagccccccagcctcccgatcacggtttactacgccgtgttggagcgcgcctgccgcagcgtgctcct

SEQ ID NO: 143985 - DNA, 80 bp, synthetic construct
  source 1..80: mol_type = other DNA
cgttacgttcaagatcatgagtggcgaagctccctctttggaggatgcagccaacctgctaccagcactactgtcaccgg

SEQ ID NO: 143986 - DNA, 80 bp, synthetic construct
  source 1..80: mol_type = other DNA
cggcacgcgcgagagcaacccacgggtcccgttcgcgccaccgccagcccttgctcccaccaccctcctcccaccacgcc

SEQ ID NO: 143987 - DNA, 80 bp, synthetic construct
  source 1..80: mol_type = other DNA
atggagagatgtcccttatctaaccaagagacaagacaagctgtgcggatcactgattggaatgaccaatagggccacct

SEQ ID NO: 143988 - DNA, 80 bp, synthetic construct
  source 1..80: mol_type = other DNA
agcgtgtgtgtcaccgccaccggccccaacgcggtgtcggcggtgtttcttttaaaaccccagcgggtctgcctgaactg

SEQ ID NO: 143989 - DNA, 80 bp, synthetic construct
  source 1..80: mol_type = other DNA
gctcaaaaaagaacagctgctggaataatgaagaatccaacggtggatgggataatgacaatagacctagatcctgtaat

SEQ ID NO: 143990 - DNA, 80 bp, synthetic construct
  source 1..80: mol_type = other DNA
tccccttttatggcaaagccctcccactggcaatgatcaagggaggaagacaccttgtattctgccattcaaaggaaaaa

SEQ ID NO: 143991 - DNA, 80 bp, synthetic construct
  source 1..80: mol_type = other DNA
tactcaaagtatcagtttctataaacgatgaggatttgatgtgcaaacggcccgctgcaatttcttttatgagcccctct

SEQ ID NO: 143992 - DNA, 80 bp, synthetic construct
  source 1..80: mol_type = other DNA
tatttgacctgagtttgggtccccatctcaatccctttttactgcatttgtcacagatgtacaatggctgggttggactg

SEQ ID NO: 143993 - DNA, 80 bp, synthetic construct
  source 1..80: mol_type = other DNA
ggcggtcgacacgcgcacctcctcgcgactgcgaaccattttggtggcctcgaggtgcgggatcatgatagccgggtcga

SEQ ID NO: 143994 - DNA, 80 bp, synthetic construct
  source 1..80: mol_type = other DNA
ctatcaggaaaaggtctagggaaaacatccattggcttgctctgtgtgacggcctcaagcgcactgctatggatggccag

SEQ ID NO: 143995 - DNA, 80 bp, synthetic construct
  source 1..80: mol_type = other DNA
gtatttactggcttgactcacatagacgcccactttctgtctcagacgaagcaggggggtgagaacttcgcgtacctcgt

SEQ ID NO: 143996 - DNA, 80 bp, synthetic construct
  source 1..80: mol_type = other DNA
cttattcttggacaggcgcacttgtcaccccgtgtgccgcggaagaacaaaaattgcctatcaacgcactgagcaactcg

SEQ ID NO: 143997 - DNA, 80 bp, synthetic construct
  source 1..80: mol_type = other DNA
aactgcatatggagttttgttcagcggtgtttcctggaccatgaaaataggaataggagttctgctaacatggctaggat

SEQ ID NO: 143998 - DNA, 80 bp, synthetic construct
  source 1..80: mol_type = other DNA
caaaccgtagacttcagcctagaccctaccttttctatagagactacaactgtgccccaggatgctgtgtctcggagcca

SEQ ID NO: 143999 - DNA, 80 bp, synthetic construct
  source 1..80: mol_type = other DNA
tagctcaaaaactgccgacagcccttatggggccctcgtatgggtttcagtactccccagcgcagcgggttgacttctta

SEQ ID NO: 144000 - DNA, 80 bp, synthetic construct
  source 1..80: mol_type = other DNA
agcgttggaatcgggaaagtactcgttgacattctggctggttacggcgcaggggtggctggtgccctagtagccttcaa

SEQ ID NO: 144001 - DNA, 80 bp, synthetic construct
  source 1..80: mol_type = other DNA
tgttgcatagagcctttgatactctagcatgagccccccgtcgaagctgatgtccctcattttacaataaatgtctgcgg

SEQ ID NO: 144002 - DNA, 80 bp, synthetic construct
  source 1..80: mol_type = other DNA
tcttctgtctcttcaacgtgtgcgctgccttcgcggccgtctcgcacgcctcgcccgactgtctcgggcccttccccacc

SEQ ID NO: 144003 - DNA, 80 bp, synthetic construct
  source 1..80: mol_type = other DNA
ggcgatggagcccggcagaacaccgaggaaaaaaaaaccacagcgcatgcgccgggccgttgtggagccccgggccggtg

SEQ ID NO: 144004 - DNA, 80 bp, synthetic construct
  source 1..80: mol_type = other DNA
tggctcaaagcgaggctcgttccagcgctacccggagtccctttcctctcgtgtcaacgggggttccgagggacgtggcg

SEQ ID NO: 144005 - DNA, 80 bp, synthetic construct
  source 1..80: mol_type = other DNA
agctcatgggatagatccaaacatacgcaccggcaccaggactgtcaacacaggggcccggctcacctattccacctacg

SEQ ID NO: 144006 - DNA, 80 bp, synthetic construct
  source 1..80: mol_type = other DNA
actccgctggatttaccagcaatcattcagagactccatgggcttagcgcttttacactccatacctactctccagccga

SEQ ID NO: 144007 - DNA, 80 bp, synthetic construct
  source 1..80: mol_type = other DNA
cgatcctcggtataggcacagtcctggaccaagcccaaacggcaggtgtccggttgactgtactcgccaccgccactccc

SEQ ID NO: 144008 - DNA, 80 bp, synthetic construct
  source 1..80: mol_type = other DNA
gaggagaccgagaatctgagagccggcctggaccctccagtggaagactaggtgctgaggatgatcctgaagaggggact

SEQ ID NO: 144009 - DNA, 80 bp, synthetic construct
  source 1..80: mol_type = other DNA
tgacaggggggcagatagccagaaatgcctactcgctcacgaccctcttttcatctgggtcggctcagaacatccagctc

SEQ ID NO: 144010 - DNA, 80 bp, synthetic construct
  source 1..80: mol_type = other DNA
ggtgggaggtggacttactgtagagcaacagactggaaacctaagtgtgaaccctgccgcccccttgcaagttgcaagtg

SEQ ID NO: 144011 - DNA, 80 bp, synthetic construct
  source 1..80: mol_type = other DNA
cttgacttcgtacccgtagagagcatgcaaacgaccgcacgctcaccatccttttcagacaactccactccaccagcagt

SEQ ID NO: 144012 - DNA, 80 bp, synthetic construct
  source 1..80: mol_type = other DNA
cccgtccatcttggggcccaaacgacccccggcgaaggtcccgcaatttgggtaaggtcatcgatacccttacgtgcgga

SEQ ID NO: 144013 - DNA, 80 bp, synthetic construct
  source 1..80: mol_type = other DNA
aagagcccagaatgctctggacaacttggtcatgttgcacaattccgaacaaggaggaaaagcctacagacatgctatgg

SEQ ID NO: 144014 - DNA, 80 bp, synthetic construct
  source 1..80: mol_type = other DNA
ggtatgcggttggtatatgtacactttacctgggggcgtgccggtccgccccagcccctcccacgccccgcgcgtcatca

SEQ ID NO: 144015 - DNA, 80 bp, synthetic construct
  source 1..80: mol_type = other DNA
tcgtagtgggttcccagctcccatgcgagccggagccagacgtggccgtgctgacatccatgctgacagacccgtcacac

SEQ ID NO: 144016 - DNA, 80 bp, synthetic construct
  source 1..80: mol_type = other DNA
ttaaaccaaggtcaggattttgtggcggtggttaaggtaagcaatcttaaaaaccaagatgtgaatgaagatggcgtcga

SEQ ID NO: 144017 - DNA, 80 bp, synthetic construct
  source 1..80: mol_type = other DNA
gtggaagaagtaaccgccgacaaacagttatcctcggctgcggagacaagcaacagcgctaccatctccgctccgagtcg

SEQ ID NO: 144018 - DNA, 80 bp, synthetic construct
  source 1..80: mol_type = other DNA
ggtgcgcaccgggccgagattccttgcttttctcaccgacagccagcaagccgggagaaagcattcgacttggatatgta

SEQ ID NO: 144019 - DNA, 80 bp, synthetic construct
  source 1..80: mol_type = other DNA
gggacccgtgacaccctaccccagtccccgggcccagccttcccgttggctgaggacgtcgagaaggacaaacccaaccg

SEQ ID NO: 144020 - DNA, 80 bp, synthetic construct
  source 1..80: mol_type = other DNA
ggaaaccaagcgtgtcccccccaggacattcggcagcccccctcgcctcacggaggacgactttgggcttctcaactacg

SEQ ID NO: 144021 - DNA, 80 bp, synthetic construct
  source 1..80: mol_type = other DNA
acaacgagctgcgcctcacccgcgacgcgctcgagccgtgcaccgtgggccaccggcgctacttcatcttcggcggtggc

SEQ ID NO: 144022 - DNA, 80 bp, synthetic construct
  source 1..80: mol_type = other DNA
atattattggtcattggggtaaaaatataacactagttggaccgacagaaaaacctattgaatggcatggaccaagagtt

SEQ ID NO: 144023 - DNA, 80 bp, synthetic construct
  source 1..80: mol_type = other DNA
ccctggctcccaagggagctccaaactccgtagagtggccggataatactaaaacaaaagtgagagcccaagcaccgttt

SEQ ID NO: 144024 - DNA, 80 bp, synthetic construct
  source 1..80: mol_type = other DNA
tggaagacaacactacacccattcataccaccataatggcaaaaaacgaggtgttttgcgtggatgccacaaaggggggc

SEQ ID NO: 144025 - DNA, 80 bp, synthetic construct
  source 1..80: mol_type = other DNA
tctatgagatgagtggtatgatcttgcacgccccagggtgtgtgccctgcgttcgggagaacaactcttctcgttgctgg

SEQ ID NO: 144026 - DNA, 80 bp, synthetic construct
  source 1..80: mol_type = other DNA
acagagggttagacgtgtcagtgataccgacgtccggagacgtcgtggtgtgcgcgaccgacgccctcatgactggctac

SEQ ID NO: 144027 - DNA, 80 bp, synthetic construct
  source 1..80: mol_type = other DNA
tggaggcaggagatgggtggcaacattacaagagtagagtcagagaacaaagtagtgatcctcgactcatttgaccctct

SEQ ID NO: 144028 - DNA, 80 bp, synthetic construct
  source 1..80: mol_type = other DNA
accgggatcgcagcgagctatatcctctactgcattcaaccacagaacaagcgatactaccttgctcttttgcgccgata

SEQ ID NO: 144029 - DNA, 80 bp, synthetic construct
  source 1..80: mol_type = other DNA
gcttcatgttctggggtggtgttataaataatccaatcatagcaagaacgctgggcatggtggtgaaatatgtccttaag

SEQ ID NO: 144030 - DNA, 80 bp, synthetic construct
  source 1..80: mol_type = other DNA
tcctttgggcgggaggaagccacaaaatgcaaatgggatacatggaaggaacacacccccgtgactcaggacatcggtgt

SEQ ID NO: 144031 - DNA, 80 bp, synthetic construct
  source 1..80: mol_type = other DNA
tacgccctgattacgcggctgctgtacaccccggacgcggaggccatggggtggctccagaacccgcgcgtggtccccgg

SEQ ID NO: 144032 - DNA, 80 bp, synthetic construct
  source 1..80: mol_type = other DNA
catattgacctagtggtggcgtcagctaccctgtgctccgccttgtacgtgggggacatttgtggagccatcttcattgc

SEQ ID NO: 144033 - DNA, 80 bp, synthetic construct
  source 1..80: mol_type = other DNA
tctccgggggggaagggaaaacaaagaggtgctgagggagcggcaccactggtgcctgaacaaacaaacaaaccacagac

SEQ ID NO: 144034 - DNA, 80 bp, synthetic construct
  source 1..80: mol_type = other DNA
ccgcgcccccctcggcgcccatcgggccacacggcagcagtaacaccaacaccaccaccaacagcagcggcggcgtcggc

SEQ ID NO: 144035 - DNA, 80 bp, synthetic construct
  source 1..80: mol_type = other DNA
tcgggtctttcaacgggggcagataccactgacgccgtaggagaaacatcacccggcgaaacggcggctgagatcattgc

SEQ ID NO: 144036 - DNA, 80 bp, synthetic construct
  source 1..80: mol_type = other DNA
gctctagctcatggcttcgagacgtgtgggactgggtttgctctatcctgacagattttaagaactggctgtccgccaaa

SEQ ID NO: 144037 - DNA, 80 bp, synthetic construct
  source 1..80: mol_type = other DNA
gctactacgcagcaactctgaaaaaagttcaggaagtcaaagggtacacgaagggtggggcgggacacgaagaaccgatg

SEQ ID NO: 144038 - DNA, 80 bp, synthetic construct
  source 1..80: mol_type = other DNA
taatacagcgcggtgttgggtggctgggcgaagctgtgggtggagtgatcaaagaggggcccgttgacgagctcgaagaa

SEQ ID NO: 144039 - DNA, 80 bp, synthetic construct
  source 1..80: mol_type = other DNA
gccaactccaaccaagaaatacaaaggccttgatcccgactcactggaggtggagggagagacggaagaggcataattat

SEQ ID NO: 144040 - DNA, 80 bp, synthetic construct
  source 1..80: mol_type = other DNA
ggatgtgtgtgggccggtctactgtttcactcctagtcccgtggtcgtgggcacgaccgaccggagggaggatccaacct

SEQ ID NO: 144041 - DNA, 80 bp, synthetic construct
  source 1..80: mol_type = other DNA
aacggggccgaggtggagatagatacggaggatagggtggcctttagatgtagcatgataaatatgtggccggtggtgct

SEQ ID NO: 144042 - DNA, 80 bp, synthetic construct
  source 1..80: mol_type = other DNA
cgcggcggcccttcggggcatgggcttgaatgccgtggcatactatagagggttggacgtctccataataccagctcagg

SEQ ID NO: 144043 - DNA, 80 bp, synthetic construct
  source 1..80: mol_type = other DNA
gggcgcactgatcacgccttgcgctgcggaggagagtaaactacccatcaacgcgctaagcaattcgctagtgcgacacc

SEQ ID NO: 144044 - DNA, 80 bp, synthetic construct
  source 1..80: mol_type = other DNA
tccggccggtcgaagtacgggtatagtgcaaaggatgttcgttccttgtccagcaaagccatgaaccagatccgttccgt

SEQ ID NO: 144045 - DNA, 80 bp, synthetic construct
  source 1..80: mol_type = other DNA
atagaaaaagctacatcttttactaaaatgcaaaatggactcaaataaacgtgtacacaatgcattaataataaaaccat

SEQ ID NO: 144046 - DNA, 80 bp, synthetic construct
  source 1..80: mol_type = other DNA
cactatccaggaccgcaccatcacggactttcccctgaccacccgcagtgccgactttcgggacggccgtatgtccaaga

SEQ ID NO: 144047 - DNA, 80 bp, synthetic construct
  source 1..80: mol_type = other DNA
ctagaaccaatatcctatgacccaaaatttgaaaagcaattagggcaggtcatgttactcgtcttgtgtgctggacaact

SEQ ID NO: 144048 - DNA, 80 bp, synthetic construct
  source 1..80: mol_type = other DNA
acgtccctgaaactgatgcttcccaaaaagtgacccaaatactcagctctcttaccatcacaagcctcgtgaagaagcta

SEQ ID NO: 144049 - DNA, 80 bp, synthetic construct
  source 1..80: mol_type = other DNA
tacaacgggtgttgggtcatgcaaatcttcttttgttgcttctctccggtgctgcgttgtacggaggatgttcaatttac

SEQ ID NO: 144050 - DNA, 80 bp, synthetic construct
  source 1..80: mol_type = other DNA
ctgggctaaggttttgattgtgatgctactctttgctggcgttgacgggggcacccacacaacgggtggaacggcagccc

SEQ ID NO: 144051 - DNA, 80 bp, synthetic construct
  source 1..80: mol_type = other DNA
gggtgtcagggcgtataccattggtggaagagggcatgaggtcccaaagatggtgacaagcctgggttggaacttgatta

SEQ ID NO: 144052 - DNA, 80 bp, synthetic construct
  source 1..80: mol_type = other DNA
cccccctcgaccgcatatttcctccccgtgtcgtcaccgtgtaaatattcttaatgataagacgatgtagtgattggacg

SEQ ID NO: 144053 - DNA, 80 bp, synthetic construct
  source 1..80: mol_type = other DNA
cgcggctgggtgagcgtgaagctgacccccccgcccgtttcgtggcgggccacctggagctggcccagaaagtacgcctc

SEQ ID NO: 144054 - DNA, 80 bp, synthetic construct
  source 1..80: mol_type = other DNA
aaaaactgtgtgaaactaaagatggaaaacattcttgccatgggcggaacataacaatattcaacattagcagagcagat

SEQ ID NO: 144055 - DNA, 80 bp, synthetic construct
  source 1..80: mol_type = other DNA
atcgtggtggaaccagggaaacctgcagtaaacatccagacaaaaccgggagtgtttcgcacccctttcggggagattgg

SEQ ID NO: 144056 - DNA, 80 bp, synthetic construct
  source 1..80: mol_type = other DNA
agctgacatcttaaagccagttgtataaaatcatgcaaatcagaagccagcagcaaagaaagttcacctccaggtacaag

SEQ ID NO: 144057 - DNA, 80 bp, synthetic construct
  source 1..80: mol_type = other DNA
taacttttatgaatgtgaggtttgtagtggagggatttaatggcacagtgtttgcttctaccactcaattaaccttgcat

SEQ ID NO: 144058 - DNA, 80 bp, synthetic construct
  source 1..80: mol_type = other DNA
gcaggcccagcgcaccgcggccgcggcggccctggagaacgccgccctccaggccgccgagctgcccgtcgacatcgagc

SEQ ID NO: 144059 - DNA, 80 bp, synthetic construct
  source 1..80: mol_type = other DNA
tcggcagcgtcctgagacggtgttttgggctgagttggaggatgagttcaagaagggggaattaaacctcttgtacaagt

SEQ ID NO: 144060 - DNA, 80 bp, synthetic construct
  source 1..80: mol_type = other DNA
catttgattatctgttgtgtaggcagagattgccaagcgttgttgagcgagtccaattggacgggatcagaaaacttttc

SEQ ID NO: 144061 - DNA, 80 bp, synthetic construct
  source 1..80: mol_type = other DNA
taccctcacgtgcggcttcgccgacctcatggggtacattccgctcgtcggcgcccctcttggaggcgctgccagggccc

SEQ ID NO: 144062 - DNA, 80 bp, synthetic construct
  source 1..80: mol_type = other DNA
ggaggcaagaagtggggggcaacatcacccgcgtggagtctgagaataaggtcatcgttctcgactcattcgacccgctg

SEQ ID NO: 144063 - DNA, 80 bp, synthetic construct
  source 1..80: mol_type = other DNA
cttgggataggcacagtcctcgaccaggcagagacggctggagccaggctcgtcgtcttggccacggccactccccccgg

SEQ ID NO: 144064 - DNA, 80 bp, synthetic construct
  source 1..80: mol_type = other DNA
cccttctacggcagggcgattcccctcgctgtgatcaagggggggagacacctaatattctgtcattccaaaaagaaatg

SEQ ID NO: 144065 - DNA, 80 bp, synthetic construct
  source 1..80: mol_type = other DNA
cgggctacagcgggggggacatatttcacagcgtgtcccgtgcccgaccccgcattatactcctgtgcctactcctactt

SEQ ID NO: 144066 - DNA, 80 bp, synthetic construct
  source 1..80: mol_type = other DNA
gccatgtacgtgggcgacctatgtggcggcatattcctggccgggcaactcttcaccttcaggccccgtcagcatatgac

SEQ ID NO: 144067 - DNA, 80 bp, synthetic construct
  source 1..80: mol_type = other DNA
gaaacattgatgcttctagctttgatagctgtgttgactggtggagtgacgctgttcttcctatcaggaaaaggtctagg

SEQ ID NO: 144068 - DNA, 80 bp, synthetic construct
  source 1..80: mol_type = other DNA
agtaacggtagcatcgtgtatgaggccggggatgttatcctccacttgcctggctgtatcccctgcgtgcgcttaaacaa

SEQ ID NO: 144069 - DNA, 80 bp, synthetic construct
  source 1..80: mol_type = other DNA
gggaggacttgctggaggacaacaccacccctatacctacaacaatcatggccaagaatgaggttttcgcagtaaaaccg

SEQ ID NO: 144070 - DNA, 80 bp, synthetic construct
  source 1..80: mol_type = other DNA
agtgtgcccttttgttctcaccactttcatgaactgcaattgaaggatggcaggagaattgtagtgccttgccgggatca

SEQ ID NO: 144071 - DNA, 80 bp, synthetic construct
  source 1..80: mol_type = other DNA
cccgccgacacacgactgtacagacgtgcaactgctcaatttacccaggccacatttcaggacatcgtatggcgtgggat

SEQ ID NO: 144072 - DNA, 80 bp, synthetic construct
  source 1..80: mol_type = other DNA
aggttcacggccgcctgcaactggaccaggggggagcgctgcgacttggaggatagggacaggatcgagatgagtcctct

SEQ ID NO: 144073 - DNA, 80 bp, synthetic construct
  source 1..80: mol_type = other DNA
tttctagacagagaggatgacgaccgcccagagcatcaccaggaggctggcctcggggatcatgttgccgactacctctc

SEQ ID NO: 144074 - DNA, 80 bp, synthetic construct
  source 1..80: mol_type = other DNA
ttgctgacggccggccatgctttactcctaggcgagaaaatatggaggaggatcttaagctgcagccagactccgaaacc

SEQ ID NO: 144075 - DNA, 80 bp, synthetic construct
  source 1..80: mol_type = other DNA
atgacctgtatgtcagcagacttggaggtcatcaccagcacctgggtgcttgtgggcggggtcctcgcagctctagcggc

SEQ ID NO: 144076 - DNA, 80 bp, synthetic construct
  source 1..80: mol_type = other DNA
ctgcattccaccaccgagtgggccatcttgccctgttcctttacagacctaccagccctctccacaggactcatccacct

SEQ ID NO: 144077 - DNA, 80 bp, synthetic construct
  source 1..80: mol_type = other DNA
ccgatgtaagggttcgaggctgtgccttttactgctgctggaagggggtggtgtgtcgccccaaaagcagggcttcaatt

SEQ ID NO: 144078 - DNA, 80 bp, synthetic construct
  source 1..80: mol_type = other DNA
ggaggactgggttaacaaagccgttgaggcccccacggcccaagcctcgtctaagatgcaatagactaggtgtaaggact

SEQ ID NO: 144079 - DNA, 80 bp, synthetic construct
  source 1..80: mol_type = other DNA
tcttttgctaaacccactaacgtcaaaggcggacaggcaaaacaaaaaactactgaacaactgcaaaaccagcaggttga

SEQ ID NO: 144080 - DNA, 80 bp, synthetic construct
  source 1..80: mol_type = other DNA
gtttacacagggctgacgcacatagatgcccacttcctatcacaaaccaaacaggggggggaaaattttccgtacctcgt

SEQ ID NO: 144081 - DNA, 80 bp, synthetic construct
  source 1..80: mol_type = other DNA
tcgggccccagaaaggcaaagacgggggccagggccccgggtgcggcgtggaccgtggtatgccactgccggaaaaggtc

SEQ ID NO: 144082 - DNA, 80 bp, synthetic construct
  source 1..80: mol_type = other DNA
cacgccaaggtgcctgatcgactacccctacaggctctggcattacccctgcacagttaactataccatcttcaaaataa

SEQ ID NO: 144083 - DNA, 80 bp, synthetic construct
  source 1..80: mol_type = other DNA
ggcgctgacactgtcaccgtattacaagcgctatatcagctggtgcttatggtggcttcagtatttcctgaccagagcag

SEQ ID NO: 144084 - DNA, 80 bp, synthetic construct
  source 1..80: mol_type = other DNA
gcaagccgactcccgttcctccccctaggaggaagcggacagtcgtgctcacagagtccaccgtgtcccaagctctggcg

SEQ ID NO: 144085 - DNA, 80 bp, synthetic construct
  source 1..80: mol_type = other DNA
ggcgctgtccacgggcttaatacacctccaccagaatgtggtggacgtacagtatctgtacggtgtgtcgagctccctgg

SEQ ID NO: 144086 - DNA, 80 bp, synthetic construct
  source 1..80: mol_type = other DNA
ttgcagctggcgaacatggaggtccacgcgcccggatgcgcgtccacggcgtccatcagcgcgcgggccccggcctccag

SEQ ID NO: 144087 - DNA, 80 bp, synthetic construct
  source 1..80: mol_type = other DNA
ggtgtagtacggcctcgtggtagtcgataaacccgtcgttcgcctgggcccgctccagcagcccccccgcgagccgcaga

SEQ ID NO: 144088 - DNA, 80 bp, synthetic construct
  source 1..80: mol_type = other DNA
gcgggatgtctatctatcctgtaagttggaccctgtggctaggaaagccatagagtctctcaccgagaggctctatattg

SEQ ID NO: 144089 - DNA, 80 bp, synthetic construct
  source 1..80: mol_type = other DNA
gggttgttgaagcggaggcggtgcggccgagtggccggacgggcccccttgtcaacagacccgccccccttgcaaacaac

SEQ ID NO: 144090 - DNA, 80 bp, synthetic construct
  source 1..80: mol_type = other DNA
gccccgcagtggcccgacggccccccaagaggtctaggtccaagcgggccgttcggcaggcccgccccaccgcccccatc

SEQ ID NO: 144091 - DNA, 80 bp, synthetic construct
  source 1..80: mol_type = other DNA
ggcggggggaccggagaggggcactgctctcctcgagacccttgttcactctcaaaggggcgtcggggggggcggtcctc

SEQ ID NO: 144092 - DNA, 80 bp, synthetic construct
  source 1..80: mol_type = other DNA
gacctggtgctggaaggagacagttgcctcaccatcatggcgaacgataaaccaacactggacgtgcgcatgataaacat

SEQ ID NO: 144093 - DNA, 80 bp, synthetic construct
  source 1..80: mol_type = other DNA
ataccggtccctcccagggcggaatatttaccgagggccgagagactttgaccgattacgtggtggtttcgattgcggtg

SEQ ID NO: 144094 - DNA, 80 bp, synthetic construct
  source 1..80: mol_type = other DNA
gccaactctagcatcatcttcgaaggagacggcatcatcctacacgtgcccggctgtgtgccgtgcgtgaaaaatgaaaa

SEQ ID NO: 144095 - DNA, 80 bp, synthetic construct
  source 1..80: mol_type = other DNA
gttctgaatacgtttcaggccctccaccgctccgaagcctttcgccagctggtgcactttgtgcgggactttgcccagct

SEQ ID NO: 144096 - DNA, 80 bp, synthetic construct
  source 1..80: mol_type = other DNA
gctctctccacggggctcattcacctccaccagaacattgtggatgtccaatacttttacggtatcggctccagcgtcac

SEQ ID NO: 144097 - DNA, 80 bp, synthetic construct
  source 1..80: mol_type = other DNA
cggatacaacctccgcagctccggtcaagcctcctcgtagatgggatcgagtgaagggtgacggtaagcacgagcggcag

SEQ ID NO: 144098 - DNA, 80 bp, synthetic construct
  source 1..80: mol_type = other DNA
cactcattcctctatgtaggacaagctgtcttcaaaagcagtcccattgggtggaaataacagcactcatcctgggggcc

SEQ ID NO: 144099 - DNA, 80 bp, synthetic construct
  source 1..80: mol_type = other DNA
cgggaaaccgggcctccgggcgcaacaccgccctccagcgtcaagtatgtggtgtgcgggcctgacgtcgggagcggtgc

SEQ ID NO: 144100 - DNA, 80 bp, synthetic construct
  source 1..80: mol_type = other DNA
tcaaccctttgagcaactctctcatccgccatcataacctggtgtactccacgacatctcggagtgccgcagcgcggcag

SEQ ID NO: 144101 - DNA, 80 bp, synthetic construct
  source 1..80: mol_type = other DNA
ttggatcagagcaatgtgggggaggctctcatgcagctggccgttaaaagcttcggccagccgggccccagtgaagattc

SEQ ID NO: 144102 - DNA, 80 bp, synthetic construct
  source 1..80: mol_type = other DNA
tacccaacgtcggggtaggactggcagggggaagccgggcatctacagatttgtggcaccggaggagcgcccttccggca

SEQ ID NO: 144103 - DNA, 80 bp, synthetic construct
  source 1..80: mol_type = other DNA
gatcgcgagatcttataccagcagtttgacgagatggaggagtgcgcctctagggcggctctcatcgaagaggggcagcg

SEQ ID NO: 144104 - DNA, 80 bp, synthetic construct
  source 1..80: mol_type = other DNA
acctactctatcactccgctggatttaccggcaatcattcaaagactccatggcttaagcgcgttcacgctgcacggata

SEQ ID NO: 144105 - DNA, 80 bp, synthetic construct
  source 1..80: mol_type = other DNA
accgtcgttctttgcgaggcgtacgacgttggatgcgcgtggtatgagctgactccatcggaaacaagcgtcaggttgcg

SEQ ID NO: 144106 - DNA, 80 bp, synthetic construct
  source 1..80: mol_type = other DNA
caacggactccacgtcacatggcaattactctgagcaaattggaaaaagccaagcagctagattcaccataagcccacaa

SEQ ID NO: 144107 - DNA, 80 bp, synthetic construct
  source 1..80: mol_type = other DNA
accagaggaggtagtattacattaaatggaacttataaaaacactacatggacaagatatcacttagactcatggaaaaa

SEQ ID NO: 144108 - DNA, 80 bp, synthetic construct
  source 1..80: mol_type = other DNA
tgtaacagaacaataaaatattgttgtttttgtttttataactttattgatacttttacagaattctaaccgttaatccc

SEQ ID NO: 144109 - DNA, 80 bp, synthetic construct
  source 1..80: mol_type = other DNA
aacaaagacaccagtttccccaggtgaaatgaggctaagagatgaccagaggagagtcttccgagagctggtgaggaact

SEQ ID NO: 144110 - DNA, 80 bp, synthetic construct
  source 1..80: mol_type = other DNA
gataggagcggtcacattggactttccaaccggaacttctggatcaccaatcattgataagaatggagatgtaatcggat

SEQ ID NO: 144111 - DNA, 80 bp, synthetic construct
  source 1..80: mol_type = other DNA
caccgccccgcccggcaggggggccccggcgccgcgcagaacacacagacgaacacacggtggcgatcttttctttactt

SEQ ID NO: 144112 - DNA, 80 bp, synthetic construct
  source 1..80: mol_type = other DNA
gtcgaaagcctatgggatcgaccccaacgtccgcactgggaaccgcactgtcacaactggtgctaaactgacctattcca

SEQ ID NO: 144113 - DNA, 80 bp, synthetic construct
  source 1..80: mol_type = other DNA
catcattcaaagactccatggactccgcgcatttgaactccacacgtactctccagcagagctgtcgcgggtggctgcaa

SEQ ID NO: 144114 - DNA, 80 bp, synthetic construct
  source 1..80: mol_type = other DNA
aacgacccctcaccccaacatagaagaggtggcactccccctcacgggggaggtgcctttctatgggaaagccattcctc

SEQ ID NO: 144115 - DNA, 80 bp, synthetic construct
  source 1..80: mol_type = other DNA
tgtgcgccaccgacgcccttatgacaggattcactggcgatttcgactcagtgatagactgcaacacctccgtcgtgcag

SEQ ID NO: 144116 - DNA, 80 bp, synthetic construct
  source 1..80: mol_type = other DNA
ctatggagaaatatcagttgagtgtgaaccaagaaacgggttgaacaccgaggcatactacatcatgtcagtgggcacca

SEQ ID NO: 144117 - DNA, 80 bp, synthetic construct
  source 1..80: mol_type = other DNA
gctatagcttccctaatgtccttcaccgccgctgttaccagcccattaaccacccaacaaactctccttttcaacatatt

SEQ ID NO: 144118 - DNA, 80 bp, synthetic construct
  source 1..80: mol_type = other DNA
cgcatgcccgaccccgcctattactcctttgcctactcctacttagcgtaggagtaggcatctttttactccccgctcgg

SEQ ID NO: 144119 - DNA, 80 bp, synthetic construct
  source 1..80: mol_type = other DNA
ccccacctccatcgtgggaccaaatgtggaagtgcttgatcaggctaaaacctaccttgcacgggcccacccccctactg

SEQ ID NO: 144120 - DNA, 80 bp, synthetic construct
  source 1..80: mol_type = other DNA
cgcctccgcccagctgggacacaatgtggaagtgcctgatccgcctcaaacccacactgcatggacccacccccctcctt

SEQ ID NO: 144121 - DNA, 80 bp, synthetic construct
  source 1..80: mol_type = other DNA
gggcgaagggctggcaagactggaggcgccgtccccggagcgacacccccgcgtgcagctgcagaaggacgtgcgcccgg

SEQ ID NO: 144122 - DNA, 80 bp, synthetic construct
  source 1..80: mol_type = other DNA
gaagcctggttggattccaccaaggccactcgttacttaacgaagactgaaaactggatcattaggaatccgggctatgc

SEQ ID NO: 144123 - DNA, 80 bp, synthetic construct
  source 1..80: mol_type = other DNA
acccgctgtttcgactcaacggtcactgagcgcgacatccgtacggaagaggagctctatcaatgttgtgacttggcccc

SEQ ID NO: 144124 - DNA, 80 bp, synthetic construct
  source 1..80: mol_type = other DNA
atccccacccccgggttcacggaagcgcagacgccccgtcctccccagctcgtcggaatctgagggtaagcccgacacag

SEQ ID NO: 144125 - DNA, 80 bp, synthetic construct
  source 1..80: mol_type = other DNA
ggggggacatatttcacagcgtgtcccgggcccgaccccgcgtattactcctgtgcctactcctacttacggtaggagta

SEQ ID NO: 144126 - DNA, 80 bp, synthetic construct
  source 1..80: mol_type = other DNA
agctcttcagccagccagctgtcagccccttccctaaaagcaacatgcacaacacatgccgaccacccggatgcagagct

SEQ ID NO: 144127 - DNA, 80 bp, synthetic construct
  source 1..80: mol_type = other DNA
tcggaggtcgggcggctgcagtcggagcggcgcaactcaagctccccgcaccggtagaccgacgcaaagagtgtggtggc

SEQ ID NO: 144128 - DNA, 80 bp, synthetic construct
  source 1..80: mol_type = other DNA
agagatgagtcctctcctgttctcgacaacagagctcgcggttctcccctgctcgttcacgcccatgccggccttgtcca

SEQ ID NO: 144129 - DNA, 80 bp, synthetic construct
  source 1..80: mol_type = other DNA
ccgccgcgacccattggcccggtacggctcgcgggtgcagatccgatgccggtttcggaattccacccgcatggagttcc

SEQ ID NO: 144130 - DNA, 80 bp, synthetic construct
  source 1..80: mol_type = other DNA
gctggagctctcgtggcttttaagatcatgtgcggtgaaacccccactctggaggacaccgccaacttgctaccagcctt

SEQ ID NO: 144131 - DNA, 80 bp, synthetic construct
  source 1..80: mol_type = other DNA
cattgggggtggcgtcttagccttgttgaccatcttgacgctatccccatattacaagcagtggctggcacgaggtgttt

SEQ ID NO: 144132 - DNA, 80 bp, synthetic construct
  source 1..80: mol_type = other DNA
tccccaacattctggatgggaagccatgaggtgaatggaacatggatgattcataccctagagacactggactacaagga

SEQ ID NO: 144133 - DNA, 80 bp, synthetic construct
  source 1..80: mol_type = other DNA
catatcaaccgcacggctctgaactgcaatgacagcctgaatactggcttcatcgcggcgctcttttacgccaacaagtt

SEQ ID NO: 144134 - DNA, 80 bp, synthetic construct
  source 1..80: mol_type = other DNA
gaaggtcctccaggtcctccagtcacttggtttaatcaggatggaaagaaattttgcgaaggggaaagagtttatcatcc

SEQ ID NO: 144135 - DNA, 80 bp, synthetic construct
  source 1..80: mol_type = other DNA
atcttgctcctcgaacgtctccgtggcatgtgacggtgccgggaagaggtactattacctcacccgggacccagaaatcc

SEQ ID NO: 144136 - DNA, 80 bp, synthetic construct
  source 1..80: mol_type = other DNA
gtgatatcacgagaagaccaaagggggagcgggcaggtggtgacctacgctctcaacacattcacgaacattgccgtcca

SEQ ID NO: 144137 - DNA, 80 bp, synthetic construct
  source 1..80: mol_type = other DNA
cggagatatcctcgaagggctgccagtctctgcccgtctggggaaggagatactattgggccctgccgacggcatggcca

SEQ ID NO: 144138 - DNA, 80 bp, synthetic construct
  source 1..80: mol_type = other DNA
tgggagacttccattacgtggtgggggtaacacaggataacatcaagtgtccctgccaggttccttccccggagttcttc

SEQ ID NO: 144139 - DNA, 80 bp, synthetic construct
  source 1..80: mol_type = other DNA
gtgtttgggtggcagcaacaggacctagtgcgcacgatcgggcgcgtgggtttgggtaagtccatcagcggctcggccaa

SEQ ID NO: 144140 - DNA, 80 bp, synthetic construct
  source 1..80: mol_type = other DNA
tttaaatcttcttcctttttccttttctttttcctatctttggtggctccatcttagccctagtcacggctagctgtgaa

SEQ ID NO: 144141 - DNA, 80 bp, synthetic construct
  source 1..80: mol_type = other DNA
actcgtacaacaactgacagtgggaaattgatcacggattggtgttgcagaagctgcacactcccaccattacgcttcca

SEQ ID NO: 144142 - DNA, 80 bp, synthetic construct
  source 1..80: mol_type = other DNA
ggatccgtacacccaggtaatcgacatctggagcgccggcctggtgatctttgagaccgccgtccacaccgcgtccttgt

SEQ ID NO: 144143 - DNA, 80 bp, synthetic construct
  source 1..80: mol_type = other DNA
ccctgcatcccggggcgtttcgcggcgtccgggtggcggtcgagggaaatagcagccaggactcggccgtcgccatcgcc

SEQ ID NO: 144144 - DNA, 80 bp, synthetic construct
  source 1..80: mol_type = other DNA
tgaccaggtattctgccccccctggggatgaaccacacccagaatacgaccttgagctgattacatcttgctcttcaaac

SEQ ID NO: 144145 - DNA, 80 bp, synthetic construct
  source 1..80: mol_type = other DNA
agcctcagcgtggacactttatgcagtggccaccactattctaactcccatgctgagacataccatagagaacacgtcag

SEQ ID NO: 144146 - DNA, 80 bp, synthetic construct
  source 1..80: mol_type = other DNA
ccgttagctctgcctatctgggcgaggccggattataatcctcctctagttgagtcctggaagaaccctgactatcaacc

SEQ ID NO: 144147 - DNA, 80 bp, synthetic construct
  source 1..80: mol_type = other DNA
ggacacccgggggagtttgtgttcccttttctttcttcccacacacacaaaaggcgtaccaaacaaacaaaccaaaagat

SEQ ID NO: 144148 - DNA, 80 bp, synthetic construct
  source 1..80: mol_type = other DNA
ctatcaatgctacatggtgggataatataactttagtgggaccctcagatattccagtcacatggtatgatagcactgga

SEQ ID NO: 144149 - DNA, 80 bp, synthetic construct
  source 1..80: mol_type = other DNA
aacagctgggttggctatcctgcttgggttcatcacttgttgtggggctgtgattctctcaaactttcaagggaaggtta

SEQ ID NO: 144150 - DNA, 80 bp, synthetic construct
  source 1..80: mol_type = other DNA
acaaactagccctgcagacagccgcgccccttgtaactaacgctggcacccttcgcttacagagcgccgcccctttaggc

SEQ ID NO: 144151 - DNA, 80 bp, synthetic construct
  source 1..80: mol_type = other DNA
ttccagacaaagaggtgttgtatcaacaattcgatgagatggaggagtgctcgcaagctgccccatatatcgaacaagct

SEQ ID NO: 144152 - DNA, 80 bp, synthetic construct
  source 1..80: mol_type = other DNA
cgaggaccatcgcatcacccaagggtcctgtcatccagatgtataccaatgtggaccaagaccttgtgggctggcccgct

SEQ ID NO: 144153 - DNA, 80 bp, synthetic construct
  source 1..80: mol_type = other DNA
gggtgaggacgcgggggcggaggaggagggacgcgggtgcggaggagaaggctcacccgcgttcgtgccttcccgcagga

SEQ ID NO: 144154 - DNA, 80 bp, synthetic construct
  source 1..80: mol_type = other DNA
ggctgctttagccgcgtactgcctgtccaccggttgcgtagtgatagtaggcaggattgtcttgtccgggaagccggcaa

SEQ ID NO: 144155 - DNA, 80 bp, synthetic construct
  source 1..80: mol_type = other DNA
tgcaacaaaaaaaaatattaatgcccaaagcacctgggaaaacctgttctaaaaccaaacaggtataagtattacaaatg

SEQ ID NO: 144156 - DNA, 80 bp, synthetic construct
  source 1..80: mol_type = other DNA
catttatgaccacctttcccctctatcaacttgggcagcccagggcttgcgggacctagcggtcgctgtggagcctgtgg

SEQ ID NO: 144157 - DNA, 80 bp, synthetic construct
  source 1..80: mol_type = other DNA
tccaacgtgaaattatgctggaaaaccttgatggctcaccctatgacccaactgatgatattcctgcagtgttgggctct

SEQ ID NO: 144158 - DNA, 80 bp, synthetic construct
  source 1..80: mol_type = other DNA
cgttcccgtggcccacgacaacactggaaagagatattactacctcacaagagacccgaccataccgatttcccgggctg

SEQ ID NO: 144159 - DNA, 80 bp, synthetic construct
  source 1..80: mol_type = other DNA
ccagcaaactagaggcctccttgggactattgttaccagcttgactggcagggataagaacgtggtgaccggtgaagtgc

SEQ ID NO: 144160 - DNA, 80 bp, synthetic construct
  source 1..80: mol_type = other DNA
cggagacgacttggtggtcatctctgagagtgctggggtcaacgaggatatagccaacctgcgagctttcacggaagcca

SEQ ID NO: 144161 - DNA, 80 bp, synthetic construct
  source 1..80: mol_type = other DNA
acgtatgcggcccgtgtgacgtactaccggctcacccgcgcctgccgtcagcccatcctccttcggcagtatggagggtg

SEQ ID NO: 144162 - DNA, 80 bp, synthetic construct
  source 1..80: mol_type = other DNA
gtcatgttcatctatgccccctcttgagggggagcctggtgatcctgacctcagctgcgactcttggtccaccgtcagcg

SEQ ID NO: 144163 - DNA, 80 bp, synthetic construct
  source 1..80: mol_type = other DNA
actgcactccactacggaatgggctatcttaccctgtacgttctcagatttgccagccttgtctactggcctgctgcatc

SEQ ID NO: 144164 - DNA, 80 bp, synthetic construct
  source 1..80: mol_type = other DNA
gggcaaggagaggcgcggggccgccggagtcgtcagacgcgagctcctccaggccgtgaatccatgcccacatgcgagag

SEQ ID NO: 144165 - DNA, 80 bp, synthetic construct
  source 1..80: mol_type = other DNA
gcttgcaggtggtggacaatcactacaatgaagtgctcaaggagatcaaggcgcgagcatccagagtgaaggcacgcttg

SEQ ID NO: 144166 - DNA, 80 bp, synthetic construct
  source 1..80: mol_type = other DNA
acggtcgacccgtctttttccgttggttgttcatcagagatctgctctctaataaaaaactgttagtctacgtggaccga

SEQ ID NO: 144167 - DNA, 80 bp, synthetic construct
  source 1..80: mol_type = other DNA
gcagcagcatggtacctgtgggaagtgaagaaacaacgggccggagtattgtgggacgttccttcacccccacccatggg

SEQ ID NO: 144168 - DNA, 80 bp, synthetic construct
  source 1..80: mol_type = other DNA
ccaggaggaacaagggtggggaactgccgttgaggccgtgaatgacgagagattttggaagctagtggagaaggaaagaa

SEQ ID NO: 144169 - DNA, 80 bp, synthetic construct
  source 1..80: mol_type = other DNA
ggaacaaaagacccagattatgcacaagggaagagtttacaaaaaaggtcagaactaacgcagccatgggcgccgttttc

SEQ ID NO: 144170 - DNA, 80 bp, synthetic construct
  source 1..80: mol_type = other DNA
tgtcctcttctcaggcagaatgaaccagaagacatagactgttggtgcaactctacgtctacatgggtaacttatgggac

SEQ ID NO: 144171 - DNA, 80 bp, synthetic construct
  source 1..80: mol_type = other DNA
gccaacatatccggcccttccgaggacaagccgtactgctggcattattcgcccagaccctgtgacatagtgccagcagg

SEQ ID NO: 144172 - DNA, 80 bp, synthetic construct
  source 1..80: mol_type = other DNA
tgataagggtatgcgctttggtgaagcagctcgcgggaggtaggtatgttcaggtggcgctattggcccttggcaggtgg

SEQ ID NO: 144173 - DNA, 80 bp, synthetic construct
  source 1..80: mol_type = other DNA
gttacaaatactaccccgagacgccgcaaggacttgccaagatcatccagaaggcacatcaagagggagtctgtggcctc

SEQ ID NO: 144174 - DNA, 80 bp, synthetic construct
  source 1..80: mol_type = other DNA
aatgtacggggccacttactctgtcactccgctggatttgccggcaatcattgaaagactccatggtctaagcgcgttca

SEQ ID NO: 144175 - DNA, 80 bp, synthetic construct
  source 1..80: mol_type = other DNA
ttctcatcagaacctcatctggcccaatcatgaagacccatctgaaggctctcaaaatgatggaggagggggaggattta

SEQ ID NO: 144176 - DNA, 80 bp, synthetic construct
  source 1..80: mol_type = other DNA
gaaggtgtacaaaaaaggagacacgaccaccggggtctaccggatcatgacgcgaggaatactaggcagctaccaagcgg

SEQ ID NO: 144177 - DNA, 80 bp, synthetic construct
  source 1..80: mol_type = other DNA
gcgcgaaatgtgttcataacaccgctatacgcatttcgatgaggtgctgcttcttccggtgaatattcataaaactgtac

SEQ ID NO: 144178 - DNA, 80 bp, synthetic construct
  source 1..80: mol_type = other DNA
accacaaacataccaagtggggtaccttcatgcccctacgggtagtggtaagagcaccaaagtcccggccgcgtacgctg

SEQ ID NO: 144179 - DNA, 80 bp, synthetic construct
  source 1..80: mol_type = other DNA
ggccaggaaaaatacagggattacatgctttcacttagaagatatgaagaagttaatgtccaggaggacagggttttgta

SEQ ID NO: 144180 - DNA, 80 bp, synthetic construct
  source 1..80: mol_type = other DNA
aaacgccagagggagagatcggagcggtgacccttgactttccaactggaacgtcaggatctcccatcgtggacaagaat

SEQ ID NO: 144181 - DNA, 80 bp, synthetic construct
  source 1..80: mol_type = other DNA
cgcggcgccattggaccacccaggagtgcaactgctccatctatacgggccacatcaccggccacagaatggcctgggac

SEQ ID NO: 144182 - DNA, 80 bp, synthetic construct
  source 1..80: mol_type = other DNA
gcacgtggcactgccctaccgattgcttcaggaaacatccggagactacttatctcaaatgtggctcagggccatggctc

SEQ ID NO: 144183 - DNA, 80 bp, synthetic construct
  source 1..80: mol_type = other DNA
cacggatgtgtactcttatatcgcatcggagtatacccaccgccccgataacgtagaatcccaatgggccgctgcattag

SEQ ID NO: 144184 - DNA, 80 bp, synthetic construct
  source 1..80: mol_type = other DNA
gagcattatttgcgagtaggaagacagcatggagtgctggaaagtgacattggagttaagtttgacaccagaaactttcg

SEQ ID NO: 144185 - DNA, 80 bp, synthetic construct
  source 1..80: mol_type = other DNA
accagccgcccccagcctaagtatacatgcgaccccggagtcccgcgacgaaccgtaagcgtggtattcagcaataacac

SEQ ID NO: 144186 - DNA, 80 bp, synthetic construct
  source 1..80: mol_type = other DNA
ggtttggcaggagctgcagtgggcagcatcgggctcgggaaagtcatcgtggacgttcttgcgggatacggggcaggcat

SEQ ID NO: 144187 - DNA, 80 bp, synthetic construct
  source 1..80: mol_type = other DNA
gggagtggccgcttgggcgtccggacgcccggcggctgagggagtgtatgtaggacgcgagccaggccttgaaggagcgt

SEQ ID NO: 144188 - DNA, 80 bp, synthetic construct
  source 1..80: mol_type = other DNA
gagctcatgagaagaggagatctaccagtttggctatcctacaaagtagcctcagaaggtttccagtactccgacagaag

SEQ ID NO: 144189 - DNA, 80 bp, synthetic construct
  source 1..80: mol_type = other DNA
ctactggtgattgccgtggtcaccatcttcaccctcaccccggcatacaaaccacttctcataagcacgctctggtggat

SEQ ID NO: 144190 - DNA, 80 bp, synthetic construct
  source 1..80: mol_type = other DNA
gcctccagatatggcgttactccatgggtccgtcccccccaatcgctccggctcccgacctagaggaggtcctgacgaac

SEQ ID NO: 144191 - DNA, 80 bp, synthetic construct
  source 1..80: mol_type = other DNA
acgctggctgcgccgtacattggcgccccacttcactccatacgatatcacgtggacttaatggtgggcactgccacatt

SEQ ID NO: 144192 - DNA, 80 bp, synthetic construct
  source 1..80: mol_type = other DNA
gtggacctgttgtgtcccacagactgcttcaggaaacaccctgatgcaacctacatcaggtgcggggccgggccctggct

SEQ ID NO: 144193 - DNA, 80 bp, synthetic construct
  source 1..80: mol_type = other DNA
cggcgatgagacgagcggctcattcgccatcgggatagtcccgcgcgaagccgctcgcggaggccggatcggtggcgtga

SEQ ID NO: 144194 - DNA, 80 bp, synthetic construct
  source 1..80: mol_type = other DNA
actgctgatccgaggcaaaggcatacaacttaacaacgagttggtgagctcttccattggtctgcgacccgacggagtgt

SEQ ID NO: 144195 - DNA, 80 bp, synthetic construct
  source 1..80: mol_type = other DNA
cacggagccgggtcgaagaccctggccggtccaaagaagcctttgtgccaaatgtacaccaatgtggaccaagacctggt

SEQ ID NO: 144196 - DNA, 80 bp, synthetic construct
  source 1..80: mol_type = other DNA
actgtcctaaccctggattacatcaagatctttgttgtcatctctgtgctgagtataataaatacagaaattagaatcta

SEQ ID NO: 144197 - DNA, 80 bp, synthetic construct
  source 1..80: mol_type = other DNA
gcctaggacccagcgagcccgtcgccgccgcggcggcgccgcccgggggtctgcgagcagaccgaaaaggtcacactctg

SEQ ID NO: 144198 - DNA, 80 bp, synthetic construct
  source 1..80: mol_type = other DNA
acccctacagactttggcattatccgtgcactgtcaactacactatcttcaaggtgcgcatgtacgtcggtggggtggaa

SEQ ID NO: 144199 - DNA, 80 bp, synthetic construct
  source 1..80: mol_type = other DNA
atactctccgggcgaactcaatagagtggcggcttgcctcaggaagcttggggcgccaccgttgagagcttggaggcatc

SEQ ID NO: 144200 - DNA, 80 bp, synthetic construct
  source 1..80: mol_type = other DNA
cgagcctgaacctgatgtcgcggtacttacatctatgctgaccgacccctcccacataactgcagaggcagccagacgtc

SEQ ID NO: 144201 - DNA, 80 bp, synthetic construct
  source 1..80: mol_type = other DNA
gaaccaccaccgaaataaaaataggtcgtaacaaaaacattgtgtcctgcaacaaaaaaaaatattaatgcccaaagcac

SEQ ID NO: 144202 - DNA, 80 bp, synthetic construct
  source 1..80: mol_type = other DNA
gtggcggacgaccaaaccgacgtattgtacgccaagatacaacacccgcggcacctgcccgacgacgatcccatctatga

SEQ ID NO: 144203 - DNA, 80 bp, synthetic construct
  source 1..80: mol_type = other DNA
atgttgaacataatgaacaggaggaaaagatccgtgaccatgctcctcatgctgctgcctacagccctggcgttccattt

SEQ ID NO: 144204 - DNA, 80 bp, synthetic construct
  source 1..80: mol_type = other DNA
cacccggtcgtgctgtggtttagttaaggtttgggggggggtgtgggtcagaggcgcgccccgtgcggactgatgcgtcg

SEQ ID NO: 144205 - DNA, 80 bp, synthetic construct
  source 1..80: mol_type = other DNA
ggggccctatgttaaactccaagggccaatcctgtggctacaggagatgccgcgccagcggcactctcacgacgagcctc

SEQ ID NO: 144206 - DNA, 80 bp, synthetic construct
  source 1..80: mol_type = other DNA
tgaagcctccatatcaaacaccactacggccaccagatgccccacacagggagagccatacttgaaagaagagcaagatc

SEQ ID NO: 144207 - DNA, 80 bp, synthetic construct
  source 1..80: mol_type = other DNA
ctgtctgccccccagaatccgacgctgaatcattctcctcgatgccccctcttgaggtggaacccggggatcctgatctc

SEQ ID NO: 144208 - DNA, 80 bp, synthetic construct
  source 1..80: mol_type = other DNA
gggtctttcccagcattaccctccccacgtcgcccatcagtatcccggggtgctgttctcgggacccagcccactcgagg

SEQ ID NO: 144209 - DNA, 80 bp, synthetic construct
  source 1..80: mol_type = other DNA
gtgtggcgtagtccccgcgaggtctgtgtgtggcccagtgtactgtttcacccccagcccggtagtagtgggcacgaccg

SEQ ID NO: 144210 - DNA, 80 bp, synthetic construct
  source 1..80: mol_type = other DNA
tggaattgggagaagctgcggctatttttatgactgccactccacccggaacgactgacccgttcccggactccaatgct

SEQ ID NO: 144211 - DNA, 80 bp, synthetic construct
  source 1..80: mol_type = other DNA
gcaaagctaaccaacacaacaacagaatcccgttgcccaacacaaggggaacccagcctaaaagaagagcaggataagag

SEQ ID NO: 144212 - DNA, 80 bp, synthetic construct
  source 1..80: mol_type = other DNA
aacaaaacttacaaaaatgttccatttgattcatcttcgctaacattttcatatattgcccaagatgccgaagacaaaaa

SEQ ID NO: 144213 - DNA, 80 bp, synthetic construct
  source 1..80: mol_type = other DNA
ccgattttagctatcccctcaacaccaacacccttgaatcggataaacacagaatccgtatctccatatataacctttac

SEQ ID NO: 144214 - DNA, 80 bp, synthetic construct
  source 1..80: mol_type = other DNA
aacctccaattgtccatggatgcgccttaccaccacgggacgctccaccggtgcctccccctcggaggaaaagaacaatc

SEQ ID NO: 144215 - DNA, 80 bp, synthetic construct
  source 1..80: mol_type = other DNA
ttgctaagatcatatggtggctccagtatttcttgaccaggaccgaggctgcgttgcaagtgtgggtcccccccctgagt

SEQ ID NO: 144216 - DNA, 80 bp, synthetic construct
  source 1..80: mol_type = other DNA
tgtataaattgtgtttataacgtataacccgttaaggcaaatagggtacaaacgcgcaatgttttgaaatactaatataa

SEQ ID NO: 144217 - DNA, 80 bp, synthetic construct
  source 1..80: mol_type = other DNA
gtacaccggaatccccaggacgaccgggtcctttcttggatcaacccgctccatgcctgggtatttgggcgtgcccccgc

SEQ ID NO: 144218 - DNA, 80 bp, synthetic construct
  source 1..80: mol_type = other DNA
cctcgccgatggcgggtgctcgggcggggcctatgacgtcatcatctgtgatgagtgtcactcaactgacgccaccacaa

SEQ ID NO: 144219 - DNA, 80 bp, synthetic construct
  source 1..80: mol_type = other DNA
gcttttatatgcttgtcgctacaaaaagtttcatcctaaaaaacaagatctcctactaaggcttaacatttaatttcttt

SEQ ID NO: 144220 - DNA, 80 bp, synthetic construct
  source 1..80: mol_type = other DNA
gccacaggccgcacgcccggtccgcgctcggaccgggtggcggcgggtgacgtcctgcactgcccgctgaaccaacgcga

SEQ ID NO: 144221 - DNA, 80 bp, synthetic construct
  source 1..80: mol_type = other DNA
gcgcgcccgaccccgcttattactccttagcctactcctacttcttgtaggggtaggccttttcctactccccgctcggt

SEQ ID NO: 144222 - DNA, 80 bp, synthetic construct
  source 1..80: mol_type = other DNA
atgatgtaactctcagtgagcaaggggaatttaaactactctctgaagagaaggtgccatgggatcaggttgtgatgact

SEQ ID NO: 144223 - DNA, 80 bp, synthetic construct
  source 1..80: mol_type = other DNA
tccccacgacgaggaagaggatgaagacgaaacaaactcacgactctttggctttttctccactgggctgtcatcctcaa

SEQ ID NO: 144224 - DNA, 80 bp, synthetic construct
  source 1..80: mol_type = other DNA
actccattgcctgccgctgccaaactcgatttatcgggttggttcacggtgggcgccggcgggggagacatttatcacag

SEQ ID NO: 144225 - DNA, 80 bp, synthetic construct
  source 1..80: mol_type = other DNA
gcggcggcgatgcagccaccactggaggctccctttgtaccccctcggtatctggcacctacggaggggagaaacagcat

SEQ ID NO: 144226 - DNA, 80 bp, synthetic construct
  source 1..80: mol_type = other DNA
ggttggaggggggctaactttgcaagaagaaactggaaaattaacagttaatactgaaccacctttgcatcttacaaata

SEQ ID NO: 144227 - DNA, 80 bp, synthetic construct
  source 1..80: mol_type = other DNA
atacaacatgatggggaagagagaaaagaagccaggagagtttggaaaagcaaaaggcagtagagcgatctggttcatgt

SEQ ID NO: 144228 - DNA, 80 bp, synthetic construct
  source 1..80: mol_type = other DNA
gagagtgtcagccgaggagtacgtggaggttcgccgggtgggagattatcactatgtgacggtggtaacacaagacaaca

SEQ ID NO: 144229 - DNA, 80 bp, synthetic construct
  source 1..80: mol_type = other DNA
ggggctgaactcctacatagtaggatcacagctcccttgtgagcccgagccggatgtctcggtactgacctcaatgttgc

SEQ ID NO: 144230 - DNA, 80 bp, synthetic construct
  source 1..80: mol_type = other DNA
cttctcattaatgaaatctctaggaggaggtaggagaggcacgggagcccaaggggaaacactgggagagaaatggaaaa

SEQ ID NO: 144231 - DNA, 80 bp, synthetic construct
  source 1..80: mol_type = other DNA
cctacctggggccccaatgacccccggcgtagatcccgcaacttgggcaaagtcatcgacaccctcacttgcgggttcgc

SEQ ID NO: 144232 - DNA, 80 bp, synthetic construct
  source 1..80: mol_type = other DNA
ggcctacaaaaacctgattgtcctcgccatctggtggctccagtacttcctgaccagggcggaagccgcggtgtgtgtgt

SEQ ID NO: 144233 - DNA, 80 bp, synthetic construct
  source 1..80: mol_type = other DNA
ttgccaggcttgaacaattctgggcaaaacacatgtggaatttcatcagcggcatccaatatcttgccggtttatccacc

SEQ ID NO: 144234 - DNA, 80 bp, synthetic construct
  source 1..80: mol_type = other DNA
cagtggatgaacaggcttatagcatttgcctctaggggcaatcatgtctcaccaacgcactatgtgcctgaaacagacgc

SEQ ID NO: 144235 - DNA, 80 bp, synthetic construct
  source 1..80: mol_type = other DNA
gtgcggctgacccccccctcctccctccccgagccaggcgccctcccactcctgcccaccacccctcgggtctggtcggc

SEQ ID NO: 144236 - DNA, 80 bp, synthetic construct
  source 1..80: mol_type = other DNA
caacgggtgctacgcgccgaagattttgaacccgacgaacatagcggaataagtccggcacgggcgcacgtgtcggcggc

SEQ ID NO: 144237 - DNA, 80 bp, synthetic construct
  source 1..80: mol_type = other DNA
acagcccttaattgcaatgattctctgcacactggtttcatctcggccttattcaattacaacagattcaactcatccgg

SEQ ID NO: 144238 - DNA, 80 bp, synthetic construct
  source 1..80: mol_type = other DNA
tttctgggagatgccgtgaaccgcgaacccgcgctcatgctggagtacttttgccggtgcgcccgcgaggaaaccaagcg

SEQ ID NO: 144239 - DNA, 80 bp, synthetic construct
  source 1..80: mol_type = other DNA
gggacgccatcccggaacacgcgcgcggctctgcgccggctttcccccaccccaccccctccgggttcgcaggtgcgatg

SEQ ID NO: 144240 - DNA, 80 bp, synthetic construct
  source 1..80: mol_type = other DNA
ttaaggctcatctgaccatgcagactctgctcatactgctatccctattctcccataccctcgctgatgattactctaag

SEQ ID NO: 144241 - DNA, 80 bp, synthetic construct
  source 1..80: mol_type = other DNA
aggttccaaagatcttcgagggtctgggcaataatgagactcgggccgcaaacgctctgcaaaagggagaaaatggcatg

SEQ ID NO: 144242 - DNA, 80 bp, synthetic construct
  source 1..80: mol_type = other DNA
tcaaaatacaacagaatacctggatacagcgaacaaacgaaagggccatgggaccagacccctctgagggtggtccggga

SEQ ID NO: 144243 - DNA, 80 bp, synthetic construct
  source 1..80: mol_type = other DNA
gccattcttgaggaaaatgaggtagacatctcagtggtggtccaagactcaaaaaacatttatcagagagggacacatcc

SEQ ID NO: 144244 - DNA, 80 bp, synthetic construct
  source 1..80: mol_type = other DNA
ggtaacaccatgacctgctacatgaaagcccaagcggcctgtcgcgcggcaggccttaccaattatgacatgttggtctg

SEQ ID NO: 144245 - DNA, 80 bp, synthetic construct
  source 1..80: mol_type = other DNA
ttctgaaagagatggaaagagccctgcaagggaaacgtgtcaagttccactcggctgccgttgacaacacctcttcatca

SEQ ID NO: 144246 - DNA, 80 bp, synthetic construct
  source 1..80: mol_type = other DNA
gggttgacatagtcctggaacatggaagctgtgtgacgacaatggcaaaaaataaaccaacattggattttgaactgata

SEQ ID NO: 144247 - DNA, 80 bp, synthetic construct
  source 1..80: mol_type = other DNA
gggaggcccgacgcaccacgcccagagtcccgccggccgcagaggagcgcgaccgccggcgctccttgccgtgatagggc

SEQ ID NO: 144248 - DNA, 80 bp, synthetic construct
  source 1..80: mol_type = other DNA
tccccaaataacacccccggtgatgttccgcccgacctgagcctgggtccccatcccaatcctctcttgctccatccatc

SEQ ID NO: 144249 - DNA, 80 bp, synthetic construct
  source 1..80: mol_type = other DNA
tcaaagagggtccctatggggttctcatatgacactcgctgttttgactccactgttactgaaagagacatcaggactga

SEQ ID NO: 144250 - DNA, 80 bp, synthetic construct
  source 1..80: mol_type = other DNA
ttttctgcgtccaaccagagaagggaggccgcaagccagcccgccttatcgtattcccagatttgggagttcgtgtatgc

SEQ ID NO: 144251 - DNA, 80 bp, synthetic construct
  source 1..80: mol_type = other DNA
caccccatcgcccgctggctcgtccgccacgggcgaggcgcgggtgcgtgtggatgcgcgcctcctgcgccccgcgggtt

SEQ ID NO: 144252 - DNA, 80 bp, synthetic construct
  source 1..80: mol_type = other DNA
agagcatcaactttgctacacgctgcctactcagcgacaaagcttcaccgcagtcgtgggttcggtgcctattaaagtgt

SEQ ID NO: 144253 - DNA, 80 bp, synthetic construct
  source 1..80: mol_type = other DNA
ccttggccgagcttgccgccaaaagctttggcagctcctcaacttccggcattgcggctgacaactcaacaacaccttct

SEQ ID NO: 144254 - DNA, 80 bp, synthetic construct
  source 1..80: mol_type = other DNA
taggcgtaccactactggcattgggttgctattcacaagtgaacccactgactctaacagcggcagtacttttgctaatt

SEQ ID NO: 144255 - DNA, 80 bp, synthetic construct
  source 1..80: mol_type = other DNA
ccctggctcctaaaggcgctccaaatacatctcagtggattgcagaaggtgtaaaaaatacaactggtagaaatggtgag

SEQ ID NO: 144256 - DNA, 80 bp, synthetic construct
  source 1..80: mol_type = other DNA
ctggcttacgccgaggtgcttggttgactacccatatcggctgtggcactacccatgtactgtaaacttcaccatccaca

SEQ ID NO: 144257 - DNA, 80 bp, synthetic construct
  source 1..80: mol_type = other DNA
gggaagtcttacgcccaaatgtggaccctgatgtacttccacagacgtgacctcagactggcggcaaatgccatttgctc

SEQ ID NO: 144258 - DNA, 80 bp, synthetic construct
  source 1..80: mol_type = other DNA
agctgtgtcacagtaatggcaccagagaaaccaacactggacttcaaagtgatgaagatggaggccacggagttagccac

SEQ ID NO: 144259 - DNA, 80 bp, synthetic construct
  source 1..80: mol_type = other DNA
gatgttagtgggacaagtcacagtcttagaccttgtgaagtttgttgtggcagtgggattgcacttccatgaaattaata

SEQ ID NO: 144260 - DNA, 80 bp, synthetic construct
  source 1..80: mol_type = other DNA
aggggcgccgggggggaggcgcccaagcgtccggccgcagcccgagaggacgagtagcgggcggaggaggacggggagga

SEQ ID NO: 144261 - DNA, 80 bp, synthetic construct
  source 1..80: mol_type = other DNA
tcctgggtggtctagcgggggtccccggtctcctgaggcacaggtgtgccagtgcgcttgatgtagtttacaccctcctc

SEQ ID NO: 144262 - DNA, 80 bp, synthetic construct
  source 1..80: mol_type = other DNA
cgggaatgagggttgcggctgggcagggtggctcctgtccccccgcggctctcgcccgcattggtgccccaatgaccacc

SEQ ID NO: 144263 - DNA, 80 bp, synthetic construct
  source 1..80: mol_type = other DNA
ggcagctacggtctgttcggccttgtacgtgggggatgtgtgcggggctgtgatgattgtgtcgcaggccttcataatat

SEQ ID NO: 144264 - DNA, 80 bp, synthetic construct
  source 1..80: mol_type = other DNA
gagccagaaccggaacctgcaagacctgcccggcgtcctaaaatggtgcctgctatcctgagacgcccgacatcacctgt

SEQ ID NO: 144265 - DNA, 80 bp, synthetic construct
  source 1..80: mol_type = other DNA
ggggcaatggctgtggtttgtttggaaaaggaggagttgtgacatgtgcgaagtttttatgctcggggaagataacaggc

SEQ ID NO: 144266 - DNA, 80 bp, synthetic construct
  source 1..80: mol_type = other DNA
tctggcagcgcaggtgcggggcgatctcgtccgtgcacacggcacacacgtcgcccccccctcccgcttccgcttcctcc

SEQ ID NO: 144267 - DNA, 80 bp, synthetic construct
  source 1..80: mol_type = other DNA
caggccctggcgttcccatcccagcgccaaactactcgtttgcgctttggagggtgtccgccgaggagtatgtgcaggtt

SEQ ID NO: 144268 - DNA, 80 bp, synthetic construct
  source 1..80: mol_type = other DNA
cagcggccattaaagacaacagagccgttcatgccgatatgggttattggatagaaagtgcactcaatgacacatggaag

SEQ ID NO: 144269 - DNA, 80 bp, synthetic construct
  source 1..80: mol_type = other DNA
cccttttgctgaaaataccaacagtgtgaccaatatagaattggaacctccttttggggatagctacatagtgataggtg

SEQ ID NO: 144270 - DNA, 80 bp, synthetic construct
  source 1..80: mol_type = other DNA
ttcataatcaagctgcggcggatggtgtcggttaattgtctccgcccaagttcgtcaatagatgataccatgaacaacgt

SEQ ID NO: 144271 - DNA, 80 bp, synthetic construct
  source 1..80: mol_type = other DNA
taggtgtccgggtgtgcgagaagagggcgctttatgacgtcgtccagaaacttcctaaggccgtgatgggagctgcttac

SEQ ID NO: 144272 - DNA, 80 bp, synthetic construct
  source 1..80: mol_type = other DNA
taggtgcagttggccataagcgaccagttaacggtttgcaaaccgggctgcacgacctcggagtacctaagccgcgagaa

SEQ ID NO: 144273 - DNA, 80 bp, synthetic construct
  source 1..80: mol_type = other DNA
gtcccctggcgaccggccctcatgtttgacccgcgggccctggcctcgatcgccgcgcggtgcgccgggcccgcccccgc

SEQ ID NO: 144274 - DNA, 80 bp, synthetic construct
  source 1..80: mol_type = other DNA
tggatcgtatcatggctttaacggcgcgcagtcctgaggcttttcgccaacagccccaagcaaatcgattttcggccatt

SEQ ID NO: 144275 - DNA, 80 bp, synthetic construct
  source 1..80: mol_type = other DNA
tgtggaggggatcctcagggagatggcggacaaagtactcagccctctccaagattgcaatgactccggccactccactg

SEQ ID NO: 144276 - DNA, 80 bp, synthetic construct
  source 1..80: mol_type = other DNA
cctactcagacttacccgctttgtcaactggtcttctccaccttcaccagaacatcgtggacgtacaatacatgtatggc

SEQ ID NO: 144277 - DNA, 80 bp, synthetic construct
  source 1..80: mol_type = other DNA
tggagtgtaatttaggaaccgaacatcatagtacagatacgtggaatcgtagtaaaacggaacaagcggttgtggacgca

SEQ ID NO: 144278 - DNA, 80 bp, synthetic construct
  source 1..80: mol_type = other DNA
gccaggtctgccctaaaagatgggtccaaaaccaagtacgcagtgtccagagggaccagcaagattagatggattgttga

SEQ ID NO: 144279 - DNA, 80 bp, synthetic construct
  source 1..80: mol_type = other DNA
gcgccccccgggtcgcgctccctaacgccgtgcaattgcggctcaagtgacctttatttggtcacaagaaacgctgatgt

SEQ ID NO: 144280 - DNA, 80 bp, synthetic construct
  source 1..80: mol_type = other DNA
ttgaagggcataccaccatcggccattctgcgagccgcacagcattcagcattactagcctgttttcgcccgggtccaga

SEQ ID NO: 144281 - DNA, 80 bp, synthetic construct
  source 1..80: mol_type = other DNA
cgggggtttactaacttattttctcttggtgccagtcaggaaatcagtctggttaataccaatggcagctggcataaaca

SEQ ID NO: 144282 - DNA, 80 bp, synthetic construct
  source 1..80: mol_type = other DNA
ctaccaccatctaagccccccccggtgcctccaccgcgccggaagaagaccgtggtgctgactgaatccaacgtgacaac

SEQ ID NO: 144283 - DNA, 80 bp, synthetic construct
  source 1..80: mol_type = other DNA
accgtgccccaccctaacatcgaggaagtcgccttgtccggtatgggagaaatccccttttacggcaaggcaatccccct

SEQ ID NO: 144284 - DNA, 80 bp, synthetic construct
  source 1..80: mol_type = other DNA
tccgcatgacgtgcctggccgttagtgcctacactccttgggccatactcccatcagtcgtgggcttttggatcacgctc

SEQ ID NO: 144285 - DNA, 80 bp, synthetic construct
  source 1..80: mol_type = other DNA
tcagttgattgtcgacatttttgtcggtggtcattggggtgtggtggccggcctcatttattacggcttggcaggtaatt

SEQ ID NO: 144286 - DNA, 80 bp, synthetic construct
  source 1..80: mol_type = other DNA
ttatgcgcgctagtgcgcaagatggccgggggccattacgtgcagatggccatgatcaagttggtggcgcttactggcac

SEQ ID NO: 144287 - DNA, 80 bp, synthetic construct
  source 1..80: mol_type = other DNA
cccaactgacacttcacagcctggcccctccccaacagacgaggagtcggacaaggagtcttactcgtccatgcctcctc

SEQ ID NO: 144288 - DNA, 80 bp, synthetic construct
  source 1..80: mol_type = other DNA
gcacactaaaaggacctcaaggcggccatgtcttttggtggagaatatatgacaatggatggtttacaaaaccatgtgac

SEQ ID NO: 144289 - DNA, 80 bp, synthetic construct
  source 1..80: mol_type = other DNA
gcggccctgcaaagccaaccttcgggcgtgacaccctcagacgactgggcggcggccatggatcgcatcctggccctaac

SEQ ID NO: 144290 - DNA, 80 bp, synthetic construct
  source 1..80: mol_type = other DNA
aaggttaccttcgacaggctgcaggtgctcgatgaccattacaagaatgtacttaaggaggtgaaggagcgagcatcagg

SEQ ID NO: 144291 - DNA, 80 bp, synthetic construct
  source 1..80: mol_type = other DNA
ggaggcacggaatctaccgatttgtgacaccaggggaacggccgtcgggtatgtttgactcctcggtcctgtgtgagtgt

SEQ ID NO: 144292 - DNA, 80 bp, synthetic construct
  source 1..80: mol_type = other DNA
ctccaccacctgcagcgtgtttaaaacaacaacatttaataaggttctgccctcagcccttagctgacgtctaagtgtca

SEQ ID NO: 144293 - DNA, 80 bp, synthetic construct
  source 1..80: mol_type = other DNA
caccagcacgtgggtcctcgtgggtggagtcctagccgcgattgcagcctactgcttgtcggtgggttgtgttgtcatct

SEQ ID NO: 144294 - DNA, 80 bp, synthetic construct
  source 1..80: mol_type = other DNA
gcctgtgggtccggtaattttgccatcccacccaagcggctttttgggtttttctcttcccccctccccacattcccctc

SEQ ID NO: 144295 - DNA, 80 bp, synthetic construct
  source 1..80: mol_type = other DNA
gaaagtcattgacaattcaatttctggtttagaaggcttggtaggcacgcttgtagttttgactggtcatggaattggca

SEQ ID NO: 144296 - DNA, 80 bp, synthetic construct
  source 1..80: mol_type = other DNA
tttcacattcaggtgccgcaaaaattttttgccatcagaaatttgttgctgttgcccggttcctacacttacgaatggaa

SEQ ID NO: 144297 - DNA, 80 bp, synthetic construct
  source 1..80: mol_type = other DNA
cacatcgatatggttgtgatgtccgccaccttctgctctgctctctacgtgggggacctctgtggcgtggtgatgctcgc

SEQ ID NO: 144298 - DNA, 80 bp, synthetic construct
  source 1..80: mol_type = other DNA
ccgtcggggacgagaccgccaaacccaccacgttcgagctcggccccaacggcaagttttccgtgtttaacgcgcgcacc

SEQ ID NO: 144299 - DNA, 80 bp, synthetic construct
  source 1..80: mol_type = other DNA
aaagtcaacgagaccggctgccagcagcgcctatccaagtgccatccgatcacccacttcgatcaggggtatggtcgcat

SEQ ID NO: 144300 - DNA, 80 bp, synthetic construct
  source 1..80: mol_type = other DNA
taactgggccgtaaaaaccaagctcaaactcactccattgcgcgacgctcacctcctcgacctgtcagggtggtttgtgt

SEQ ID NO: 144301 - DNA, 80 bp, synthetic construct
  source 1..80: mol_type = other DNA
gaatgctggaaccaacaagggtagtcaactgggaggtcattattatggatgaagcgcactttctggatcctgctagcata

SEQ ID NO: 144302 - DNA, 80 bp, synthetic construct
  source 1..80: mol_type = other DNA
cacggcttatgcccaacagaccagaggcctctttagcaccatcgtgaccagcctcacaggccgtgacaacaacgaggtaa

SEQ ID NO: 144303 - DNA, 80 bp, synthetic construct
  source 1..80: mol_type = other DNA
tgacaggtttagcaaggccctctatttcttgaatgatatggccaagactagaaaggacatcggcgaatgggagcattctg

SEQ ID NO: 144304 - DNA, 80 bp, synthetic construct
  source 1..80: mol_type = other DNA
tcgccggcggagaaggtggccgtcgcgtcccagacatcgtgcgggcgccccggcaccgccacgatccgctccaccctgcc

SEQ ID NO: 144305 - DNA, 80 bp, synthetic construct
  source 1..80: mol_type = other DNA
actggtcatcgccgtgctccacctcctggctgagagacgtttgggactgggtctgcacagtactgtctgacttcaaaacg

SEQ ID NO: 144306 - DNA, 80 bp, synthetic construct
  source 1..80: mol_type = other DNA
ttagtgggtggtgggcgaggggggaggtggcattagggagaaagaacaagagcctccgttgggttttctttgtgcctgta

SEQ ID NO: 144307 - DNA, 80 bp, synthetic construct
  source 1..80: mol_type = other DNA
aatgccacggggtgccctgagcgactatccagctgtaagtctatcacatactttgaccagggatggtgccctttgacaga

SEQ ID NO: 144308 - DNA, 80 bp, synthetic construct
  source 1..80: mol_type = other DNA
aaggaacagaagaattaaaggcagatatcattttgtacactgaaaatgttaatctggaaacaccagacactcatgtggta

SEQ ID NO: 144309 - DNA, 80 bp, synthetic construct
  source 1..80: mol_type = other DNA
gtccgtggtggtgtccagatcaataacgacaaacggcccctcgttcctaccagacaagctatcgtaggggtgcggtggat

SEQ ID NO: 144310 - DNA, 80 bp, synthetic construct
  source 1..80: mol_type = other DNA
ggcaagttggtctgggcttgcttgtgatcataacgctcttcacactgaccccggcctacaaacttctcatttgccgctgc

SEQ ID NO: 144311 - DNA, 80 bp, synthetic construct
  source 1..80: mol_type = other DNA
ttcagagtttggcttaaagccaagctcatgcccaacctcccaggggttccctttttctcgtgtcagcgaggctataggtg

SEQ ID NO: 144312 - DNA, 80 bp, synthetic construct
  source 1..80: mol_type = other DNA
caattcaaggagaaagtgcttggcctcattggcacggccggtcagaaagctgagactctgaaaccggcagccacgtccat

SEQ ID NO: 144313 - DNA, 80 bp, synthetic construct
  source 1..80: mol_type = other DNA
gttacggcgcgggcatcgcgggagctctcgtagccttcaagatcatgagtggcgagactccaaccactgaggacctagca

SEQ ID NO: 144314 - DNA, 80 bp, synthetic construct
  source 1..80: mol_type = other DNA
ggggaccgttaacgttcaacagctccttgagggacaattgcagcaggccctattgctggcattacacgcccggcccgtgc

SEQ ID NO: 144315 - DNA, 80 bp, synthetic construct
  source 1..80: mol_type = other DNA
cttgctattgaaaataactcactagttgttaagctaggaaacggtcttcgctttgatagctggggaagcatagctgtctc

SEQ ID NO: 144316 - DNA, 80 bp, synthetic construct
  source 1..80: mol_type = other DNA
ggccgcgtcgacgtcctgcaccacatctggattcaccaactcgttggcgcgctgaagcaggtttttgccctcgcagaccg

SEQ ID NO: 144317 - DNA, 80 bp, synthetic construct
  source 1..80: mol_type = other DNA
caaagccaggaaaccctgaaagcactcgacttcgacatgtacggagtcacatactctatcactccatacttacctgctat

SEQ ID NO: 144318 - DNA, 80 bp, synthetic construct
  source 1..80: mol_type = other DNA
actgcggtagggacgagcgcgacgtcctccgcgtcgggtcgggcggcttctggccgcggcgctcgcgcctgtggtgcggc

SEQ ID NO: 144319 - DNA, 80 bp, synthetic construct
  source 1..80: mol_type = other DNA
gctgctgcaaaacatctctcaggtggtaagtacgtccagctgatgctattgagccttggtagatggactggtacatacat

SEQ ID NO: 144320 - DNA, 80 bp, synthetic construct
  source 1..80: mol_type = other DNA
aggctctagggcttaccgcaatgcactatcaatgatgcctgaggcaatgacaatagtcatgctgtttatactggctggac

SEQ ID NO: 144321 - DNA, 80 bp, synthetic construct
  source 1..80: mol_type = other DNA
gggagaacatcagggatgaactcaacacccttctcatggaaaacgcagtggaccttagcgttgtggttgaaaagcaaaaa

SEQ ID NO: 144322 - DNA, 80 bp, synthetic construct
  source 1..80: mol_type = other DNA
caacaaaaccaggaactattcaaccttcaagccttacaccaatgcaaaaagggtcttttctgcctggttaaacaagctga

SEQ ID NO: 144323 - DNA, 80 bp, synthetic construct
  source 1..80: mol_type = other DNA
gggttccaatactctcctgcagaacgggtcgattttctcctcaaagcttggggaagtaagaaggacccaatggggttctc

SEQ ID NO: 144324 - DNA, 80 bp, synthetic construct
  source 1..80: mol_type = other DNA
caatgcgcgtggcgcccgtcaccacacagtccaagacctcgttgattgtctgcacgcacgtgctctttccggagccagcg

SEQ ID NO: 144325 - DNA, 80 bp, synthetic construct
  source 1..80: mol_type = other DNA
ctctatgtcctactcctggacgggggctattataacaccttgcgctgctgaggaggagaaactgcctatcagccctctga

SEQ ID NO: 144326 - DNA, 80 bp, synthetic construct
  source 1..80: mol_type = other DNA
cttccttttggcacttctctcgtgcctgaccgttcccgcatcagccattcactaccgcaacaactcgggcgtctaccaca

SEQ ID NO: 144327 - DNA, 80 bp, synthetic construct
  source 1..80: mol_type = other DNA
cctgggagtgggaactcggtgtgtggtcctggctgaggataaggtaaaagaacaagatgtacaagagaggatcagagctt

SEQ ID NO: 144328 - DNA, 80 bp, synthetic construct
  source 1..80: mol_type = other DNA
ggtgcaaaaagggtgtccggatgggcctgcgagcgctccagaagccactcgccgaggcgtgtatacagattggccggcgg

SEQ ID NO: 144329 - DNA, 80 bp, synthetic construct
  source 1..80: mol_type = other DNA
gagtggtctagctggtgctgctattgggagcattggcctgggaaaagtcatcatagacatcttggccggctatggcgctg

SEQ ID NO: 144330 - DNA, 80 bp, synthetic construct
  source 1..80: mol_type = other DNA
acgccgccgcagcagaggagaaaggaagaggtcgcgcgccgaggctgagttgctttcaagatggccaccccatcgatgat

SEQ ID NO: 144331 - DNA, 80 bp, synthetic construct
  source 1..80: mol_type = other DNA
acagtatatattgaacaatcacgaaccgttgacaggacgtcagatcacgtccgtaagcatgcccgaaaaatggaagttcc

SEQ ID NO: 144332 - DNA, 80 bp, synthetic construct
  source 1..80: mol_type = other DNA
tggcaactcaccaacgcagttctccaccttcctggatgcgtcccatgtgagaatgacaacggcaccctgcgctgctggat

SEQ ID NO: 144333 - DNA, 80 bp, synthetic construct
  source 1..80: mol_type = other DNA
cctgcgatggcacatggctaagggccatttgggactgggtctgcacggcactgacagacttcaaagcctggctgcaggca

SEQ ID NO: 144334 - DNA, 80 bp, synthetic construct
  source 1..80: mol_type = other DNA
aaggctctgtatccgctcaccaccaaggaactcaagacttccgaccccggaggcgtgggcggggagggtgaggaaggcgc

SEQ ID NO: 144335 - DNA, 80 bp, synthetic construct
  source 1..80: mol_type = other DNA
gtcctccgcgtgggcccggagggcttctggccgcgtcgcttgcgcctgtggtgcggtgcggaccatgcccccgaggggtt

SEQ ID NO: 144336 - DNA, 80 bp, synthetic construct
  source 1..80: mol_type = other DNA
cgtggacgctgctcaccaccccggacgtcacctgcggcgcggagcaagtctactggtcgctgccggacctcatgcaagac

SEQ ID NO: 144337 - DNA, 80 bp, synthetic construct
  source 1..80: mol_type = other DNA
agtatgctgttcatactcatacagctggacaggggcgctagtcacaccatgcgccgctgaagaggaaaaactgcccatca

SEQ ID NO: 144338 - DNA, 80 bp, synthetic construct
  source 1..80: mol_type = other DNA
tacatttccccatccgcaccccacatctggcgttctagagtcacgacgcatttgcccccgtccccgcagcaacacacaaa

SEQ ID NO: 144339 - DNA, 80 bp, synthetic construct
  source 1..80: mol_type = other DNA
ctcccaggccttcatcatctcgccggaacaccaccagttcgttcaggactgcaattgctccatatacccaggtcacatct

SEQ ID NO: 144340 - DNA, 80 bp, synthetic construct
  source 1..80: mol_type = other DNA
gccctggtaagggtgccctactttgtgcgggctcatgctctcttacgggcgtgtgagcttgtgcgtggggtccttggtgg

SEQ ID NO: 144341 - DNA, 80 bp, synthetic construct
  source 1..80: mol_type = other DNA
tacatgcccaaggtgattgaaaaactggagagcctgcaacgcaggtttggaggtggattggtacgcgtccccctttctcg

SEQ ID NO: 144342 - DNA, 80 bp, synthetic construct
  source 1..80: mol_type = other DNA
gagctagtgaaacatgaggaggaaaatgagcaagtggagcaagatccgggctatgtaacgccccccgaggacggcaagga

SEQ ID NO: 144343 - DNA, 80 bp, synthetic construct
  source 1..80: mol_type = other DNA
agttttcactccacaggctgcgcaccatcaccaacgcgtttagcaggtcgggcgccgatatcttgaagtcgcagttggtg

SEQ ID NO: 144344 - DNA, 80 bp, synthetic construct
  source 1..80: mol_type = other DNA
ggaggtcctgatagatgggcagtctttttagaagagtccagggtccccgctccttggggctgataagcgatatgacgtac

SEQ ID NO: 144345 - DNA, 80 bp, synthetic construct
  source 1..80: mol_type = other DNA
ggctagcttggcctcgtcaaagtcgccgccctcctcgccctccccggacgcgtccgggttggtggggttcttgagctcct

SEQ ID NO: 144346 - DNA, 80 bp, synthetic construct
  source 1..80: mol_type = other DNA
gggctacaaggtgctggtgctcaacccctcggttgcggccactttgggctttggggcgtacatgtccaaggcatatggca

SEQ ID NO: 144347 - DNA, 80 bp, synthetic construct
  source 1..80: mol_type = other DNA
aagtgccaaaaatctttgagggtcttggacgcgacgagaagcgcgcggcaaacgctctgcaacaggaaaacagcgaaaat

SEQ ID NO: 144348 - DNA, 80 bp, synthetic construct
  source 1..80: mol_type = other DNA
cttgaaagacctagctgatgctaggttttcggtcgaggctccctccaccgaaggccgggactccgctgttggcgcaagcc

SEQ ID NO: 144349 - DNA, 80 bp, synthetic construct
  source 1..80: mol_type = other DNA
gagatgaaaaatattttgattacatgaacacgctccggaggttagaggagaccgtggttgttgaggattctgttttgtaa

SEQ ID NO: 144350 - DNA, 80 bp, synthetic construct
  source 1..80: mol_type = other DNA
agagctcggtgatatgctctatggcatctcgatccagcaaacttcttggttgcggggattgggccggctttggctgtacg

SEQ ID NO: 144351 - DNA, 80 bp, synthetic construct
  source 1..80: mol_type = other DNA
tctctgacatggagaccaaggtcatcacctgggaggcggaaaccgcggcgtgtggggacatcattctgggcttacctgtc

SEQ ID NO: 144352 - DNA, 80 bp, synthetic construct
  source 1..80: mol_type = other DNA
gggtctcccccctccttggccagctcagctagccagctgtctgcgccctccttgagggcgacatgcactacccattcttc

SEQ ID NO: 144353 - DNA, 80 bp, synthetic construct
  source 1..80: mol_type = other DNA
ccaagactctggcaggcccgaaagggcctgtgtgccagatgtacactaacgtggatcaggacatggtaggccggccggcg

SEQ ID NO: 144354 - DNA, 80 bp, synthetic construct
  source 1..80: mol_type = other DNA
gcgaccagcatactgggcataggtaccgtcttggaccaagctgaaacagctggggtgcggctaacagtcttggctacggc

SEQ ID NO: 144355 - DNA, 80 bp, synthetic construct
  source 1..80: mol_type = other DNA
agtgaccgttgattgtgagcctcgatcaggtatcgatacaaacgcatactacgtcatgtcagttggctccaagtcatttt

SEQ ID NO: 144356 - DNA, 80 bp, synthetic construct
  source 1..80: mol_type = other DNA
gtgatgctgctgatgaggaaattgaagtaggcggtcttcaaacggcggatggtggcaaggagagtgacgtcttttggtcc

SEQ ID NO: 144357 - DNA, 80 bp, synthetic construct
  source 1..80: mol_type = other DNA
ccatcatgagtctgtttggtgggctgatttggaagatgagtttaaaaacggtgaaatgaatttgttatacaagtatacat

SEQ ID NO: 144358 - DNA, 80 bp, synthetic construct
  source 1..80: mol_type = other DNA
gccaatgtatctggtagctcccaagataagccttactgttggcactatgcccctcggccgtgtggtgtcgtctcggcact

SEQ ID NO: 144359 - DNA, 80 bp, synthetic construct
  source 1..80: mol_type = other DNA
agctcatcgactggtgctgcgcgcgctacaattatctccaccacagtcccgaatacagggacgagaacgtagccagaatc

SEQ ID NO: 144360 - DNA, 80 bp, synthetic construct
  source 1..80: mol_type = other DNA
cgtatgcccagcagacgaggggcctcttgggatgcataatcaccagcttgaccggccgggacaaaaaccaggtggaaggt

SEQ ID NO: 144361 - DNA, 80 bp, synthetic construct
  source 1..80: mol_type = other DNA
cttgccctgcttaaggttggagcgtggaccggcacttatctatatgaccatctcaccccgctgtcagactgggctgccca

SEQ ID NO: 144362 - DNA, 80 bp, synthetic construct
  source 1..80: mol_type = other DNA
gcatcttcttaagatgtggacgtcgaagaagacccccttagggttttcatacgacactcgttgctttgactctactgtca

SEQ ID NO: 144363 - DNA, 80 bp, synthetic construct
  source 1..80: mol_type = other DNA
tcaggtcggcgtgttgggccacgcgccccccgagctcctccacggccccggcccgctcggcgctcttggcgcccaggacg

SEQ ID NO: 144364 - DNA, 80 bp, synthetic construct
  source 1..80: mol_type = other DNA
attttaagacctggctgaaggccaagctcatgccacaactgcctgggattccttttgtgtcctgccaacgcgggtatagg

SEQ ID NO: 144365 - DNA, 80 bp, synthetic construct
  source 1..80: mol_type = other DNA
gcgcagatagccgccccctccgagagcgcgaccgtcagcgttttggccgacagaaacccgttgttaaacatgtccatcac

SEQ ID NO: 144366 - DNA, 80 bp, synthetic construct
  source 1..80: mol_type = other DNA
tgtggcctctgttcttcctgctccttgcgttgcccgagagggcatacgctttcagcggggagacgacggcaactctcggc

SEQ ID NO: 144367 - DNA, 80 bp, synthetic construct
  source 1..80: mol_type = other DNA
tcataggccataaaacatgcagcaacatctggtgcggcacattccccatcaatgccaccaccactggcccaagcgtgccc

SEQ ID NO: 144368 - DNA, 80 bp, synthetic construct
  source 1..80: mol_type = other DNA
ttctgcacgatccaagtacggatttggggcgaaggaggttcgcagcttgtccaggagagccgtcgaccacatcaagtccg

SEQ ID NO: 144369 - DNA, 80 bp, synthetic construct
  source 1..80: mol_type = other DNA
ggtagcaaaaaattttttaattataatgttacaagagatggcataattaccttaaatgtaacaatttcaaatactacgtg

SEQ ID NO: 144370 - DNA, 80 bp, synthetic construct
  source 1..80: mol_type = other DNA
gttgatcctaatatcaggaccggggtgagaacaattaccactggcagccccatcacgtactccacctacggcaagttcct

SEQ ID NO: 144371 - DNA, 80 bp, synthetic construct
  source 1..80: mol_type = other DNA
cggggctctcgtggcttttaaaattatgagcggcgaggcccccgctgtggaggacatggtcaacttactgcccgccttgc

SEQ ID NO: 144372 - DNA, 80 bp, synthetic construct
  source 1..80: mol_type = other DNA
tgcacaatgaggaaaagatcatacagcaaatggaccctgaacacaggcagttagcgaacgctatattcaagctcacatac

SEQ ID NO: 144373 - DNA, 80 bp, synthetic construct
  source 1..80: mol_type = other DNA
cacatcaacaggaccgcactcaactgcaatgacagcttaaacacggggtttattgccagtctgttctatgccagtaactt

SEQ ID NO: 144374 - DNA, 80 bp, synthetic construct
  source 1..80: mol_type = other DNA
caaaagtgctttctagccgcaccttttaacatgtctattctaatctcgcccgataataacaccggctgggggttgcactc

SEQ ID NO: 144375 - DNA, 80 bp, synthetic construct
  source 1..80: mol_type = other DNA
acattgggctatacctcccggactctttaaaattaacccctgacaacatcacactcccagaaaacaaaaacacctaccag

SEQ ID NO: 144376 - DNA, 80 bp, synthetic construct
  source 1..80: mol_type = other DNA
tacatcatgacctgcatgtcagcagacttggaggtcacaaccagtacatgggtgttggtgggcgggctgctcgccgcctt

SEQ ID NO: 144377 - DNA, 80 bp, synthetic construct
  source 1..80: mol_type = other DNA
cgctacggatgccctcatgacggggtatacaggcgacttcgatagtgtgatcgactgcaatgttgcggtgacgcaggttg

SEQ ID NO: 144378 - DNA, 80 bp, synthetic construct
  source 1..80: mol_type = other DNA
aacgaaacgttccgcgacgccatgttgaacatcgcggagcccgagggtcgctggctcttggatctgattaacatcctgca

SEQ ID NO: 144379 - DNA, 80 bp, synthetic construct
  source 1..80: mol_type = other DNA
ggacacccgtacgattgggggtgctgtcgcgcacaacacccgcggcttcgccggacttttcagtactggcgccaagcaga

SEQ ID NO: 144380 - DNA, 80 bp, synthetic construct
  source 1..80: mol_type = other DNA
acgcgaaagctttctggagatgcgcttttaaacgaggtaccatgaaaagcgttcttgtctccatttaacgttgcatcatt

SEQ ID NO: 144381 - DNA, 80 bp, synthetic construct
  source 1..80: mol_type = other DNA
caacagccatcatgggagatgcctacggctttcaatactcacccaaacaacgggtagaccaactgctcaagatgtggcgt

SEQ ID NO: 144382 - DNA, 80 bp, synthetic construct
  source 1..80: mol_type = other DNA
gagtcctccctaccagtttgggcaacactatgacttgctacctgaaggccacggccgcttgtaaagcagccggcctcaag

SEQ ID NO: 144383 - DNA, 80 bp, synthetic construct
  source 1..80: mol_type = other DNA
ggcccttgaagacgggataaactttgcaacagggaacttgcccggttgctccttttctatcttctttcttgctctgttct

SEQ ID NO: 144384 - DNA, 80 bp, synthetic construct
  source 1..80: mol_type = other DNA
tgacaccgcggttctgtgcgaatgctacgactctggttgtgcatggtacgagctgaccccgggcgagaccaccgttaggc

SEQ ID NO: 144385 - DNA, 80 bp, synthetic construct
  source 1..80: mol_type = other DNA
agacgtcgtagtttgcgctactgacgcccttatgactggatacaccggagacttcgattctgtcatagactgcaacgtga

SEQ ID NO: 144386 - DNA, 80 bp, synthetic construct
  source 1..80: mol_type = other DNA
ccaaatatcaggaccggagtgagaactatcactacaggggcgcccatcacgtactccacctacggcaagttccttgccga

SEQ ID NO: 144387 - DNA, 80 bp, synthetic construct
  source 1..80: mol_type = other DNA
tggaggtcctaggaagaatgccagaacacttcgctgggaagactagagacgccctagacatcatgtatctagttgtcacg

SEQ ID NO: 144388 - DNA, 80 bp, synthetic construct
  source 1..80: mol_type = other DNA
gggagtgagatcatggaccatactcaccaccactgacgtgacctgcggctcgcagcaagtgtactggtccctgccggata

SEQ ID NO: 144389 - DNA, 80 bp, synthetic construct
  source 1..80: mol_type = other DNA
ttccaactcaagcattgtgtatgagacaacggacatgattatgcacacccccgggtgcgtgccctgtgttcgggaggtgg

SEQ ID NO: 144390 - DNA, 80 bp, synthetic construct
  source 1..80: mol_type = other DNA
acggcgtgcgtctgcatagattcgcaccctcatgccgtcccctcctacgcgatgaagtgaccttcagcgtggggttgacc

SEQ ID NO: 144391 - DNA, 80 bp, synthetic construct
  source 1..80: mol_type = other DNA
caagatgagaatgctgccggatttttttaccgggaactgggatgacatgttccaggggttgctggagactgaatatgtgt

SEQ ID NO: 144392 - DNA, 80 bp, synthetic construct
  source 1..80: mol_type = other DNA
aattaaaagctcgcgcacagcttcgtacttctgttttaagaaacgaacacgctgccaacaaatgttcgcaaatcgacggt

SEQ ID NO: 144393 - DNA, 80 bp, synthetic construct
  source 1..80: mol_type = other DNA
tgtagcgtaatggcctcgcggtcgtaactggggtatcggcgctgatatttgaccaccaacgtgtacatgacgttccacag

SEQ ID NO: 144394 - DNA, 80 bp, synthetic construct
  source 1..80: mol_type = other DNA
gacgtctccaagctttccgagggcgagctcagcttttaccgcttcctcttcgctttcctgtcggccgccgacgacctggt

SEQ ID NO: 144395 - DNA, 80 bp, synthetic construct
  source 1..80: mol_type = other DNA
ggggcagcggatagccgagatgttgaagtccaagatccaaggcttgctgcagcaggcctctaagcaggcccaggacatac

SEQ ID NO: 144396 - DNA, 80 bp, synthetic construct
  source 1..80: mol_type = other DNA
ggccctatgcataacagcaagggagacctgtgtgggtaccgtagatgccgcgcgagcggcgtctacaccacaagcttcgg

SEQ ID NO: 144397 - DNA, 80 bp, synthetic construct
  source 1..80: mol_type = other DNA
atgctccaactggcagtggaaagagcaccaaggtccctgtcgcgtatgccgcccaggggtacaaagtactagtgcttaac

SEQ ID NO: 144398 - DNA, 80 bp, synthetic construct
  source 1..80: mol_type = other DNA
gcagtgatattgctcacctgcctgctgcatccatcccttggctttgaggtcacgaagactcttctggcgatgttggggcc

SEQ ID NO: 144399 - DNA, 80 bp, synthetic construct
  source 1..80: mol_type = other DNA
gtacgccgctcaagggtataaggtacttgtactaaatccctctgtggccgccacgctgggttttggagcttacatggcca

SEQ ID NO: 144400 - DNA, 80 bp, synthetic construct
  source 1..80: mol_type = other DNA
gtattgggtcagtcgagcttctggcaacattgtgcactcagtcagcatgacaagccaagtgttgctgggaagaatggaaa

SEQ ID NO: 144401 - DNA, 80 bp, synthetic construct
  source 1..80: mol_type = other DNA
ccttatgacgggttacacgggcgacttcgactctgtcatagactgcaatgttgccgtaacacaggtagtggactttagtc

SEQ ID NO: 144402 - DNA, 80 bp, synthetic construct
  source 1..80: mol_type = other DNA
gccgggggcgcgggggccaagcgggccaccgtcagcgagttcgtgcaagtgaagcacatcgaccgtgttgtgtctccgag

SEQ ID NO: 144403 - DNA, 80 bp, synthetic construct
  source 1..80: mol_type = other DNA
gcaggatgtctacctatcctgcaagctggacccggaagccagagaggctatagtgtccctcacagaaaggctctacgtgg

SEQ ID NO: 144404 - DNA, 80 bp, synthetic construct
  source 1..80: mol_type = other DNA
ggaaggactgcaggaggcgctgtttgatcggggctgtggtgactagcaccccgtcgaccggccgcccgcgcgtgtcggca

SEQ ID NO: 144405 - DNA, 80 bp, synthetic construct
  source 1..80: mol_type = other DNA
tgagaggaaaatttgggaaaaaacacatgattgcaggggttctcttcacgtttgtgctccttctctcagggcaaataaca

SEQ ID NO: 144406 - DNA, 80 bp, synthetic construct
  source 1..80: mol_type = other DNA
ttccaaccattgtactttttgttggatcgacggattattaatagtgacatttacgtattgtacccgcaacgattcatccc

SEQ ID NO: 144407 - DNA, 80 bp, synthetic construct
  source 1..80: mol_type = other DNA
ttgtgttatcatagaactgcgtaaacactcggcaagtaatacagataactcgctacaggaacgtatgccacaagcggtat

SEQ ID NO: 144408 - DNA, 80 bp, synthetic construct
  source 1..80: mol_type = other DNA
atgcgctacacacaaaagttacaggcgcaatagggtatgatacatctggcaacatggaacttaaaactggagggggagtg

SEQ ID NO: 144409 - DNA, 80 bp, synthetic construct
  source 1..80: mol_type = other DNA
ctcaaactcactccattgcctgctgctgccagattagatttatctagctggtttacagtgggcgccggcgggggggacat

SEQ ID NO: 144410 - DNA, 80 bp, synthetic construct
  source 1..80: mol_type = other DNA
ggaagcattgacacatgcgccaaatttgcctgctccaccaaggcaacaggaagaaccatcttgaaagagaatatcaagta

SEQ ID NO: 144411 - DNA, 80 bp, synthetic construct
  source 1..80: mol_type = other DNA
gtggcaatgcaggatccagcgctcgtacccgctcaccatctgagctctcaccaagtccagggtagcggggcacaggcaca

SEQ ID NO: 144412 - DNA, 80 bp, synthetic construct
  source 1..80: mol_type = other DNA
tacattgcgaccccagcgattttgtaccaccttagctttagacggattctctttcaacgcccgctggccattttcactgg

SEQ ID NO: 144413 - DNA, 80 bp, synthetic construct
  source 1..80: mol_type = other DNA
cagtggcgtctggcggaaaacctcagtgtgacgctccccgccgcgtcccacgccatcccgcatctgaccaccagcgaaat

SEQ ID NO: 144414 - DNA, 80 bp, synthetic construct
  source 1..80: mol_type = other DNA
cataatctgctgctcatactcatacagctggacaggcgcggtcattactccgtgtgcaccagaggaggaaaaattgccaa

SEQ ID NO: 144415 - DNA, 80 bp, synthetic construct
  source 1..80: mol_type = other DNA
agctaattacatcttgctcctctaacgtgactgtggctttggaccctcaaggtcgccgcaaatacttcctgactagagac

SEQ ID NO: 144416 - DNA, 80 bp, synthetic construct
  source 1..80: mol_type = other DNA
ttgctggcactatgctccaagaccgtgcgatgttgtgccagctagagaagtctgcggtcctgtttattgtttcacacctt

SEQ ID NO: 144417 - DNA, 80 bp, synthetic construct
  source 1..80: mol_type = other DNA
ttggttcaaccttaactaatgtaatttatagagctaaagaggactactcttcgcgatttgctgagcttttgtcttttaac

SEQ ID NO: 144418 - DNA, 80 bp, synthetic construct
  source 1..80: mol_type = other DNA
ggggttagcgcactggtaaaccagcacacagggatactggatactggcaagagccaccttgtcggttacttcttcagctc

SEQ ID NO: 144419 - DNA, 80 bp, synthetic construct
  source 1..80: mol_type = other DNA
catacaccgtctcgggaagggccgcagagatgtggattgagaaagcagcagacatcacatgggaacagaatgctgagatc

SEQ ID NO: 144420 - DNA, 80 bp, synthetic construct
  source 1..80: mol_type = other DNA
gaccaagatcatcacctgggaggcagatactgcggcatgtggggacatcatctcagggctacccgtctccgcccggagtg

SEQ ID NO: 144421 - DNA, 80 bp, synthetic construct
  source 1..80: mol_type = other DNA
gttgatcagaccaaaattcagtatgtcattagggcacagctacatgtcggagccaagcaggagaactggaacactgacat

SEQ ID NO: 144422 - DNA, 80 bp, synthetic construct
  source 1..80: mol_type = other DNA
ggcggctgcggcggccgccgtgttcggtctcggtagccggccggcgagtggactcgcgggtggccggaggatggaaggca

SEQ ID NO: 144423 - DNA, 80 bp, synthetic construct
  source 1..80: mol_type = other DNA
ggaccctgcggattttggaaatggtgtctgactggctaagccgtggtccaaaggaattttgcataaagatactctgcccg

SEQ ID NO: 144424 - DNA, 80 bp, synthetic construct
  source 1..80: mol_type = other DNA
tctggaaactgaacgtgacaaggctagagaattgctcaagaagggtgagaccaacatgggcctggcggtgtcgagaggca

SEQ ID NO: 144425 - DNA, 80 bp, synthetic construct
  source 1..80: mol_type = other DNA
caggctcagagcttcaccaagcttttcacgtcggggccgaagcagaacctccagctgattaacaccaatgggagttggca

SEQ ID NO: 144426 - DNA, 80 bp, synthetic construct
  source 1..80: mol_type = other DNA
cgaggcgaggacaggctccggaacggaggcggggaccgcggccccgacggaggttttgcctttggtggtggatttcttct

SEQ ID NO: 144427 - DNA, 80 bp, synthetic construct
  source 1..80: mol_type = other DNA
gttcatcctgtgtgtggctttctttcatcctcgcctcgtctttgagaccaccaagtggctgctcgttttgctggctcctc

SEQ ID NO: 144428 - DNA, 80 bp, synthetic construct
  source 1..80: mol_type = other DNA
aataaccactgctatagcaaatatgacgatataaaaacattttatagcaaggccggacattactgtagcgcaacatgttg

SEQ ID NO: 144429 - DNA, 80 bp, synthetic construct
  source 1..80: mol_type = other DNA
cgtcatttccccaggcatcccattgtagttcgtgggccagacggcaggcttcctccactagggtgtcatcccccgagaga

SEQ ID NO: 144430 - DNA, 80 bp, synthetic construct
  source 1..80: mol_type = other DNA
aggcagttcaagggtttactagcctgttccgacttggggccaagcaaaacctccagctgataaactccaacggaagctgg

SEQ ID NO: 144431 - DNA, 80 bp, synthetic construct
  source 1..80: mol_type = other DNA
tgtggatttgccgacctcatggggtacattccgctcgtaggcgcccccgtaggaggtgtcgccagggccctggcacatgg

SEQ ID NO: 144432 - DNA, 80 bp, synthetic construct
  source 1..80: mol_type = other DNA
cggtgtctaccccccaccccaacatagaggaggtcgccttgccaacgacgggagagatacccttctatggtagggcgatc

SEQ ID NO: 144433 - DNA, 80 bp, synthetic construct
  source 1..80: mol_type = other DNA
ctgatcatgaaggatggtaggactctggtggtgccatgtcgaggtcaggatgaattagtgggcagagccagaatctcccc

SEQ ID NO: 144434 - DNA, 80 bp, synthetic construct
  source 1..80: mol_type = other DNA
ttgggaagttaaatcaaatcctaagcggagacaagttgtatgtaacccttgtatgccaatgccaagtgatcggttgtttt

SEQ ID NO: 144435 - DNA, 80 bp, synthetic construct
  source 1..80: mol_type = other DNA
gtgaagtacaggtgctttctacagctacccagaccttcctaggtacaacagtagggggggttatgtggactgtttaccac

SEQ ID NO: 144436 - DNA, 80 bp, synthetic construct
  source 1..80: mol_type = other DNA
ctcataaaggccaagaagggcggaaagatcgccgtgcggcgcgccatgattgaacaagatggattgcacgcaggttctcc

SEQ ID NO: 144437 - DNA, 80 bp, synthetic construct
  source 1..80: mol_type = other DNA
gaaatgcgagactgcaggtttagggccggtcgcgagctgcgccgcggatttaatcgcgagcgactgctgcgtgaggagga

SEQ ID NO: 144438 - DNA, 80 bp, synthetic construct
  source 1..80: mol_type = other DNA
aggtacgatgagacccgcaccaggtgcagaccctgcgagtgtggcggtaaacatattaggaaccagcctgtgatgctgga

SEQ ID NO: 144439 - DNA, 80 bp, synthetic construct
  source 1..80: mol_type = other DNA
acgggcggctctgccccgccgtccccgtgttcgtccacgagttcgtctcgtccgagccaatgcgcctccaccgagataac

SEQ ID NO: 144440 - DNA, 80 bp, synthetic construct
  source 1..80: mol_type = other DNA
tccgctcctatagctgtgtcagctaactctcttacattggccaccgccgcaccactgacagtaagcaacaaccagcttag

SEQ ID NO: 144441 - DNA, 80 bp, synthetic construct
  source 1..80: mol_type = other DNA
acgtgtgggttcgccgatctcatggggtacattcccgtcgtgggcgcgcctttgggcggcgtcgcggctgcactcgcaca

SEQ ID NO: 144442 - DNA, 80 bp, synthetic construct
  source 1..80: mol_type = other DNA
gcctccagctgctccggagaagaagatgtaaaatgtcagggacgccaaaaactgtggcagttgtccacatgtcgaagcgt

SEQ ID NO: 144443 - DNA, 80 bp, synthetic construct
  source 1..80: mol_type = other DNA
cccgcaaagccgttaaccacatcaactccgtgtgggaggacttgcgggaagacaacactacccccatccctacaacaatc

SEQ ID NO: 144444 - DNA, 80 bp, synthetic construct
  source 1..80: mol_type = other DNA
cagggaggtcttgctgggacccgcagaccattatacctcaaaaggatggaagttgttggctcccatcaccgcgtacgccc

SEQ ID NO: 144445 - DNA, 80 bp, synthetic construct
  source 1..80: mol_type = other DNA
aacaagagctggggatgggcaggaagaccatcctgaaaggcaaggggagcggtccccctcgacgagtgtcgaaagagacc

SEQ ID NO: 144446 - DNA, 80 bp, synthetic construct
  source 1..80: mol_type = other DNA
ctacaccaggctctggctggcgccatagtggtggagtattctagctcagtgaagttaacttctggccacctcaaatgtag

SEQ ID NO: 144447 - DNA, 80 bp, synthetic construct
  source 1..80: mol_type = other DNA
gatccaaggcttgctgcagcaggcctctaaacaggcccaggacatacaacccactgtgcgggcttcatggcccaaggtgg

SEQ ID NO: 144448 - DNA, 80 bp, synthetic construct
  source 1..80: mol_type = other DNA
cctgttgggggtcgccatgtgaccccctgactttatatatacagacccccaacacatacacatggcccttttgactcaga

SEQ ID NO: 144449 - DNA, 80 bp, synthetic construct
  source 1..80: mol_type = other DNA
ccggcgtgcgcggcaaaccgttccatgaccggattgaacaggcccaggggcaggacgaacgtcaggtccatggcgcccac

SEQ ID NO: 144450 - DNA, 80 bp, synthetic construct
  source 1..80: mol_type = other DNA
ctatgaccctccggtggtgtccggttgcgcgctccctcctcgggcgctgccccccgtgccaccaccaaggagaaaaaaac

SEQ ID NO: 144451 - DNA, 80 bp, synthetic construct
  source 1..80: mol_type = other DNA
gacagaaacccaccggtccgcctttttgcacgggtaagcaccttgggtgtgcggaggagggggggacgcgagtgcggaag

SEQ ID NO: 144452 - DNA, 80 bp, synthetic construct
  source 1..80: mol_type = other DNA
tctttcaaacttccaggcaggggttgcaaaccgtaaatttaagccaagcttttaagaatttgcaaggcctgtgggtggta

SEQ ID NO: 144453 - DNA, 80 bp, synthetic construct
  source 1..80: mol_type = other DNA
ccccagactgtgttcgacctaatcgcaggagctcactggggtgtgatggcaggtctggcctacttctccatgcagggcaa

SEQ ID NO: 144454 - DNA, 80 bp, synthetic construct
  source 1..80: mol_type = other DNA
ttatgaaagtgttggttgagacccgcgattataagatccgtgaaggattatccgaagccacccattcaatggcgttaacg

SEQ ID NO: 144455 - DNA, 80 bp, synthetic construct
  source 1..80: mol_type = other DNA
agagagtggtgttcatgattctgctcctcctagttgctccagcctatagcttcaattgcttgggtatgagcaacagagac

SEQ ID NO: 144456 - DNA, 80 bp, synthetic construct
  source 1..80: mol_type = other DNA
gttagggccaagctaatcgcccagggggggaaagccgcagtgtgcggcacatacctcttcaactggtcggttaaaacaaa

SEQ ID NO: 144457 - DNA, 80 bp, synthetic construct
  source 1..80: mol_type = other DNA
gaggtgagcttagaaaacccttagggtattaggccaaaggcgcagctactgtggggtttatgaacaattcaagcaactct

SEQ ID NO: 144458 - DNA, 80 bp, synthetic construct
  source 1..80: mol_type = other DNA
cgttgcgtttagttcattggaggccaaggggaaaaatggggtgtggaggaaacggaaaacccagtaggccgtgtcgggaa

SEQ ID NO: 144459 - DNA, 80 bp, synthetic construct
  source 1..80: mol_type = other DNA
tcttggagtacgtgggtcattggcgtggggggttacagcgacaccggccgaccccctggcggtcttccagccggccctta

SEQ ID NO: 144460 - DNA, 80 bp, synthetic construct
  source 1..80: mol_type = other DNA
tggcgggaaggcgctcgtagtcccgctgggctcgcagccccgacacagtgttggtggtgtcctgcagggcgcgaagctgc

SEQ ID NO: 144461 - DNA, 80 bp, synthetic construct
  source 1..80: mol_type = other DNA
gaagggggtcctcgccggcgaagaggcccagcgctgcgacaatatcttcagcgccctctggatgccagacctgtttttca

SEQ ID NO: 144462 - DNA, 80 bp, synthetic construct
  source 1..80: mol_type = other DNA
tgatgggagcagcatatggtttccaatactctcccaagcagcgagttgactaccttctcaagatgtggcgctcgaagaag

SEQ ID NO: 144463 - DNA, 80 bp, synthetic construct
  source 1..80: mol_type = other DNA
attataggagacaaacccatcaccgtaacccagcactcggtggaaactgaaggctgcctacactgcccctgtcagggccc

SEQ ID NO: 144464 - DNA, 80 bp, synthetic construct
  source 1..80: mol_type = other DNA
acaccactggcgcccttgtcagcctgctcaatccagggcccagtcagcgcctgcagctgatcaacaccaatgggtcatgg

SEQ ID NO: 144465 - DNA, 80 bp, synthetic construct
  source 1..80: mol_type = other DNA
cgcgctgtacgcgctaagctcctcgcccagggaggcagggccgccatctgcggcatctacctttttaactgggcagtgaa

SEQ ID NO: 144466 - DNA, 80 bp, synthetic construct
  source 1..80: mol_type = other DNA
agcaaaagaagctataatttaattgagggaaccacagacacgctgtaccgaagctggtacctatcctatacctacgggga

SEQ ID NO: 144467 - DNA, 80 bp, synthetic construct
  source 1..80: mol_type = other DNA
accctgctgtagcctcgatgatgtccttcagcgccgccctcaccagcccactctctaccagcactaccatcctcctcaac

SEQ ID NO: 144468 - DNA, 80 bp, synthetic construct
  source 1..80: mol_type = other DNA
ggcttagctggggccgctgtggggagcattggcttggggaaggtcattgttgacatcttggcaggatatggtgcgtgagt

SEQ ID NO: 144469 - DNA, 80 bp, synthetic construct
  source 1..80: mol_type = other DNA
cgtactaccacgcaggggccccaggttgggtgtgcgtgcagtgcgcaagacttccgagcggtcacaacctcgcagtaggc

SEQ ID NO: 144470 - DNA, 80 bp, synthetic construct
  source 1..80: mol_type = other DNA
tacagctggggcgagaatgagaccgatgtcttccttcttaagtccacaaaacccccggctgggcggtggtttggctgcac

SEQ ID NO: 144471 - DNA, 80 bp, synthetic construct
  source 1..80: mol_type = other DNA
gtcagggctcacgctctactgaggatgtgcaccatggcaaggcatctcgcggggggcaggtacgtccagatggcgctact

SEQ ID NO: 144472 - DNA, 80 bp, synthetic construct
  source 1..80: mol_type = other DNA
gggtgggggacttccactacattacggaggctacagaagatgagctcaagtgtccgtgccaagtgccggccgcagagttt

SEQ ID NO: 144473 - DNA, 80 bp, synthetic construct
  source 1..80: mol_type = other DNA
tcaccccaataactggctgcaagtgatagtttaacgaggtgcagctgccgtcgtcgcggagaagcggagccacatcgttc

SEQ ID NO: 144474 - DNA, 80 bp, synthetic construct
  source 1..80: mol_type = other DNA
cttacggcttccagtactccccagcgcagcgggtagattttcttctgactgcttggaagtcaaagaagaatcctatgggg

SEQ ID NO: 144475 - DNA, 80 bp, synthetic construct
  source 1..80: mol_type = other DNA
tctgcggggacgatttggtcgtcatctctgagagcgtagggatctcggaggatgctagtgcgctgcgagcgttcacggac

SEQ ID NO: 144476 - DNA, 80 bp, synthetic construct
  source 1..80: mol_type = other DNA
tggcccctgcttctcctgcttctaatgctgcccgaaagagcttatgcatatgatcaggaggtggcagggtcccttggcgg

SEQ ID NO: 144477 - DNA, 80 bp, synthetic construct
  source 1..80: mol_type = other DNA
cagtggcgctcacgagaaaaggaggagactccgtcacccccgactctgcgggaggctcctccccccgcgccctccccaca

SEQ ID NO: 144478 - DNA, 80 bp, synthetic construct
  source 1..80: mol_type = other DNA
gcgcgattaggccgtgaggtgttgttgggacctgctgatgactaccgggagatgggttggcgcctgttggccccgatcac

SEQ ID NO: 144479 - DNA, 80 bp, synthetic construct
  source 1..80: mol_type = other DNA
gagtcggatgcgtcgcagcgggtaacacagctgcttggctcccttaccataaccagcctgttgaggcgactacatcactg

SEQ ID NO: 144480 - DNA, 80 bp, synthetic construct
  source 1..80: mol_type = other DNA
tcgctcatgttctcacagtaagtgcagcacataatcaccatgttattcagcagcccataattcagggtgctccagccaaa

SEQ ID NO: 144481 - DNA, 80 bp, synthetic construct
  source 1..80: mol_type = other DNA
tcctcgtgtcaccacaacagcacgaattcacccaagactgcaactgctccatctacccaggtcatgtaacgggacaccgc

SEQ ID NO: 144482 - DNA, 80 bp, synthetic construct
  source 1..80: mol_type = other DNA
cctcctggctctgtcactgtcccccatccgaacatcacggaagctgcgctacccactacgggggagatacccttctatgg

SEQ ID NO: 144483 - DNA, 80 bp, synthetic construct
  source 1..80: mol_type = other DNA
acctaggaggcgccggtccatagtcttgagccaggataatgtggggggggctctcatggacttggctcgtcggagctttg

SEQ ID NO: 144484 - DNA, 80 bp, synthetic construct
  source 1..80: mol_type = other DNA
gcatcgggcatatgcctttgacggcgagcaggcggcatccattggcgtcgtggtgatcattggcttgacggtactcactc

SEQ ID NO: 144485 - DNA, 80 bp, synthetic construct
  source 1..80: mol_type = other DNA
cggtctgccgtgtttggatatttcacgaccctatcgtttatttacgtaatggcatcttccgacggtgacagactttgtcg

SEQ ID NO: 144486 - DNA, 80 bp, synthetic construct
  source 1..80: mol_type = other DNA
cccgctgcgcacgagccttctggactcgcttctggttatgggcgaccggggcatccttatccataacacgatctttggtg

SEQ ID NO: 144487 - DNA, 80 bp, synthetic construct
  source 1..80: mol_type = other DNA
gggaaagccaggatatccttggcctctgtacggaaatgagggctgcggttgggcaggttggctcctgtccccccgcgggt

SEQ ID NO: 144488 - DNA, 80 bp, synthetic construct
  source 1..80: mol_type = other DNA
gatgagctggccgggaaactgaagtcactcggcttaaacgccgtcgcgttctacagaggtgtcgatgtgtccgtcattcc

SEQ ID NO: 144489 - DNA, 80 bp, synthetic construct
  source 1..80: mol_type = other DNA
cgaagtggccatctttgtccatggaccaactactgtggagtcgcacggaaactactccacgcagactggagctgctcagg

SEQ ID NO: 144490 - DNA, 80 bp, synthetic construct
  source 1..80: mol_type = other DNA
gaaagcgcctagccatggcgttagtatgagtgtcgtgcagcctccaagaccccccctcccgggagagccatagtagtctg

SEQ ID NO: 144491 - DNA, 80 bp, synthetic construct
  source 1..80: mol_type = other DNA
ccggcaccatcagcgtcagcccatctgctccttcttcaacactgaaactgggtgattacggcgaagtcaccattgactgt

SEQ ID NO: 144492 - DNA, 80 bp, synthetic construct
  source 1..80: mol_type = other DNA
gctacatccactgcttcactcaacaactgaactcgccatactaccatgctcatttacgcccatgcctgctctatcaacag

SEQ ID NO: 144493 - DNA, 80 bp, synthetic construct
  source 1..80: mol_type = other DNA
agggaacttacccggttgctccttttctatcttcttgctggccctgctgtcctgcatcaccaccccggtctccgctgccg

SEQ ID NO: 144494 - DNA, 80 bp, synthetic construct
  source 1..80: mol_type = other DNA
atgtctcacaagtgctggcggaactcgcccagaaatccttccccgggggttcggtagcatcgcaagaagagtcgggaaga

SEQ ID NO: 144495 - DNA, 80 bp, synthetic construct
  source 1..80: mol_type = other DNA
cgggccaccgtatggcctgggatatgatgatgaattggtctcctacaaccacgatggtcttggcttacatcatgcgcatc

SEQ ID NO: 144496 - DNA, 80 bp, synthetic construct
  source 1..80: mol_type = other DNA
ccaggtgataggggggtcgtcgggccatggcgccttcgggataacgtccatctttgctcccggtgcgcgacagaaaatcc

SEQ ID NO: 144497 - DNA, 80 bp, synthetic construct
  source 1..80: mol_type = other DNA
cggtgaggtggtacgggactggcttttgatgcgatcgtccccgcccgcccagagagtgtgggacgcccgacggcgcggga

SEQ ID NO: 144498 - DNA, 80 bp, synthetic construct
  source 1..80: mol_type = other DNA
gcctgacacacatcgatgcccatttcctctcacaaaccaagcaggggggggaaaactttgcgtacttggtggcttaccaa

SEQ ID NO: 144499 - DNA, 80 bp, synthetic construct
  source 1..80: mol_type = other DNA
cataccgctcgtcggcgcccccctggggggtgctgccagagccctggcgcatggcgtccgggttctggaggacggcgtta

SEQ ID NO: 144500 - DNA, 80 bp, synthetic construct
  source 1..80: mol_type = other DNA
ggagatgaggtgcatcttagcctggatcttcagattggcgatgttaccgcccagatcccgcctgggattcatgttgtgca

SEQ ID NO: 144501 - DNA, 80 bp, synthetic construct
  source 1..80: mol_type = other DNA
accgtagacttcagtcttgacccaactttcaccattgaaacacagacagtgccccaggacgcagtcagtcggagtcagag

SEQ ID NO: 144502 - DNA, 80 bp, synthetic construct
  source 1..80: mol_type = other DNA
ttgatgaaatggaagagtgcgcctcacaccttccttacatcgaacagggaatgcagcttgccgagcagttcaaacagaag

SEQ ID NO: 144503 - DNA, 80 bp, synthetic construct
  source 1..80: mol_type = other DNA
gccaccacagctgccaactcagagcctgggctaagcgtgggactggcaagcgtgagggagtatcttagagctccataatt

SEQ ID NO: 144504 - DNA, 80 bp, synthetic construct
  source 1..80: mol_type = other DNA
gcaaggactcaacttcgcatatctaactgcctatcaagccactgtgtgcgctcgcgcgcaggctcctcccccgagttggg

SEQ ID NO: 144505 - DNA, 80 bp, synthetic construct
  source 1..80: mol_type = other DNA
gtaacggagttcttgagagtcagatgctcattccaaagcaatacgccggaccaccatctcagcacaattatagacaaggg

SEQ ID NO: 144506 - DNA, 80 bp, synthetic construct
  source 1..80: mol_type = other DNA
gtggcccccggtaacgtcccggggatccaggtggaggtcctcgtcgtcttcgtatccgccggcgatctgttgggttagaa

SEQ ID NO: 144507 - DNA, 80 bp, synthetic construct
  source 1..80: mol_type = other DNA
gtgcccatcccagcgccaaactacaagttcgcgctgtggagggtatccgccgaggagtacgtggaagttcgcagggtgtg

SEQ ID NO: 144508 - DNA, 80 bp, synthetic construct
  source 1..80: mol_type = other DNA
gctcttcgggtggtccgctgctctgcccctcggggcacgccgcgggcatcttccgggccgccgtgtgcacccggttggtt

SEQ ID NO: 144509 - DNA, 80 bp, synthetic construct
  source 1..80: mol_type = other DNA
tggcacgtaggctggagaggacgcacaagtcagaccagaaatgccacctgaaagcatgctaaaggtgctgtctgtacatg

SEQ ID NO: 144510 - DNA, 80 bp, synthetic construct
  source 1..80: mol_type = other DNA
tcaggtctgctgcccagtatactgcttcacccccagccccgtggtgataggtaccaccgaccggaagggcctccccacct

SEQ ID NO: 144511 - DNA, 80 bp, synthetic construct
  source 1..80: mol_type = other DNA
tccaatatttcatcgcacgtgctgaggcccagctacatgtttggataccatcgttgcgggctcgaggcgggcgcgacgcc

SEQ ID NO: 144512 - DNA, 80 bp, synthetic construct
  source 1..80: mol_type = other DNA
atttttgaagtcatgtgtgatatcacactgcatgtggctagacttcatggcttgtggccccctaccaaggagaacatggt

SEQ ID NO: 144513 - DNA, 80 bp, synthetic construct
  source 1..80: mol_type = other DNA
gtttggtgcggtcggcgttccggttgtcatcctggagggcgtggtgtggcgccccggcgcgtggcgggcctgcgcgtgat

SEQ ID NO: 144514 - DNA, 80 bp, synthetic construct
  source 1..80: mol_type = other DNA
cacccgtgaggttgtgtccatctttgcacctggggcgcgtcagaacatccaacttataaacaccaacggcagctggcaca

SEQ ID NO: 144515 - DNA, 80 bp, synthetic construct
  source 1..80: mol_type = other DNA
cccccgttacgctggaaaccccagaaccccgcgggtccctcgctgtgcgtctggaggatgagtttggggagtttgactgg

SEQ ID NO: 144516 - DNA, 80 bp, synthetic construct
  source 1..80: mol_type = other DNA
ggctggtcctactacgcagcctcccggcctgcggtcatgggggtcaaggcatacacgattggagggaaaggacatgagac

SEQ ID NO: 144517 - DNA, 80 bp, synthetic construct
  source 1..80: mol_type = other DNA
atggttttgtgcactcactttttccagatacttcaggcacaggagcaactccacaaagcactcgacttcgacatctacgg

SEQ ID NO: 144518 - DNA, 80 bp, synthetic construct
  source 1..80: mol_type = other DNA
ctgaactccgagatggatcaggacagcagttctgacgcatcggatgattttccgggatacgccttacatcattctacata

SEQ ID NO: 144519 - DNA, 80 bp, synthetic construct
  source 1..80: mol_type = other DNA
ccccaggattaaactgtccaggtgcaggcggtaggacctgcaaccgtataagcgcatccataacagaatgtgacgttaag

SEQ ID NO: 144520 - DNA, 80 bp, synthetic construct
  source 1..80: mol_type = other DNA
tcagagagaggaggaaaagcccacaaaatggcattagaggaattgcctgacgccttggagacgctagctttgattgcagc

SEQ ID NO: 144521 - DNA, 80 bp, synthetic construct
  source 1..80: mol_type = other DNA
gctatggccgcgagaacgcgcagcctggtcgaacgcagacgcgtgctgatggccggggtacgaagccatacgcgcttcta

SEQ ID NO: 144522 - DNA, 80 bp, synthetic construct
  source 1..80: mol_type = other DNA
aaagaaacacatcatggatccgcagtcaaaggaaaacttaaccgcccccaccgatactgctgttgctgccatggaaaaga

SEQ ID NO: 144523 - DNA, 80 bp, synthetic construct
  source 1..80: mol_type = other DNA
agggtcaggcagttgtcggccacggtctggtccaggctgaaggggagcgacacggtggtcgtctttaccaggagcacgga

SEQ ID NO: 144524 - DNA, 80 bp, synthetic construct
  source 1..80: mol_type = other DNA
ccagggctataaggtgctggtgcttaacccctcagtggcagctacattggggtttggggcgtatatgtccaaggcatacg

SEQ ID NO: 144525 - DNA, 80 bp, synthetic construct
  source 1..80: mol_type = other DNA
ggctggggtgaggctgacggtcctagcgacagctactcccccaggcagcattactgtgccacattctaacatcgaagagg

SEQ ID NO: 144526 - DNA, 80 bp, synthetic construct
  source 1..80: mol_type = other DNA
ctccacccaagccagttccggtgcccccccccaggaggcgccgtacagtggctttaagcgagagtgctgtcgcagaggcc

SEQ ID NO: 144527 - DNA, 80 bp, synthetic construct
  source 1..80: mol_type = other DNA
caaggcgctggccgaagaggtgcgggagtttcacgccaccaagatctgcggcacgctgttgacgctgttaagcgggtcgc

SEQ ID NO: 144528 - DNA, 80 bp, synthetic construct
  source 1..80: mol_type = other DNA
gctattaaaatcactcgccggagccccactggcgcacatcgagggaaccaaatatcacctgaagagcggccatgtcacct

SEQ ID NO: 144529 - DNA, 80 bp, synthetic construct
  source 1..80: mol_type = other DNA
cttaaatgggaatatgtggtactcgcgttcctgcttctcgcagacgcaagagtctctgcttgcctatggatgatggttat

SEQ ID NO: 144530 - DNA, 80 bp, synthetic construct
  source 1..80: mol_type = other DNA
cgcgaagacgggctcgcggcggaccagatccccggagctccaggacacggaggagatggtgtggcgtccgaggtcggtgg

SEQ ID NO: 144531 - DNA, 80 bp, synthetic construct
  source 1..80: mol_type = other DNA
gtgcccgccaccggcccctgggccagctgctgttgggtggcatccgtgtccaccagcagcaccgacatgacctccccggc

SEQ ID NO: 144532 - DNA, 80 bp, synthetic construct
  source 1..80: mol_type = other DNA
ttactatcataagttcaacagctccgggtgtccagaacggctcgctagctgccgccgcctcgatgactttgatcagggct

SEQ ID NO: 144533 - DNA, 80 bp, synthetic construct
  source 1..80: mol_type = other DNA
gggtgtgggcgcgggcgatgctgctggtgatgaagttgaaataggcggttctgagacggcggatggtggcgaggagcacc

SEQ ID NO: 144534 - DNA, 80 bp, synthetic construct
  source 1..80: mol_type = other DNA
ctggaaactctaaaaagctagaagtaaatcttaaaacaacaaaaggtcttatttttgacaccgatgctgttgcaataaat

SEQ ID NO: 144535 - DNA, 80 bp, synthetic construct
  source 1..80: mol_type = other DNA
aatcttccccgggatttttccgcctcctatactaaatttcccccaggaaactggggtggcggttcttgttctccctgagc

SEQ ID NO: 144536 - DNA, 80 bp, synthetic construct
  source 1..80: mol_type = other DNA
gcttttgacgagatggaggagtgcgcgtccaaagccgccctcattgaggaggggcagcggatagctgagatgttaaagtc

SEQ ID NO: 144537 - DNA, 80 bp, synthetic construct
  source 1..80: mol_type = other DNA
gggtcatctggccttccgcgacccatcggacccgcccgtgggccaggcgctgcccccaggcgttcaaaaacagctgctgc

SEQ ID NO: 144538 - DNA, 80 bp, synthetic construct
  source 1..80: mol_type = other DNA
catgcatgtcggccgacctggaggtcgtcacgagcacctgggtgctcgttggcggcgtcctggctgctctggccgcgtat

SEQ ID NO: 144539 - DNA, 80 bp, synthetic construct
  source 1..80: mol_type = other DNA
cctggtttgcccgtgtgccaagaccacctggaattctgggaggcagtctttaccggcctcacgcatatagatgcccactt

SEQ ID NO: 144540 - DNA, 80 bp, synthetic construct
  source 1..80: mol_type = other DNA
ggcattcaaagtcagaccagcgttgctggtatctttcatcttcagagctaattggacaccccgtgaaagcatgctgctgg

SEQ ID NO: 144541 - DNA, 80 bp, synthetic construct
  source 1..80: mol_type = other DNA
gagggggcgtgccagtggatgaacaggctgatagcgtttgcctcacgtggcaaccatgtgtcacccacgcactatgtgcc

SEQ ID NO: 144542 - DNA, 80 bp, synthetic construct
  source 1..80: mol_type = other DNA
cccgtgtaatgttcgaaggatatcggctctgttatcaaaaagagtccactgaacattactagccccttttagatagctta

SEQ ID NO: 144543 - DNA, 80 bp, synthetic construct
  source 1..80: mol_type = other DNA
aacgctggactcctttgagccactcacagccgagtctgaagatagggagatatctgtcgccgcggaaatcctgtgtccta

SEQ ID NO: 144544 - DNA, 80 bp, synthetic construct
  source 1..80: mol_type = other DNA
ttcggcgcttggtgggcagaggaggtagcggcggcgagaggctcctttcctgctccggcggatagcgcgccgacccgcgg

SEQ ID NO: 144545 - DNA, 80 bp, synthetic construct
  source 1..80: mol_type = other DNA
ttgtaggatccaagccagctaatgaagcaataagcatgaccaccagcatgttcaccctggacctccggccagccaccgcc

SEQ ID NO: 144546 - DNA, 80 bp, synthetic construct
  source 1..80: mol_type = other DNA
ggttatagccgttctaacgcctatcgaagttgatgtgcctagagtgacaaaaatacttaaagacacaggaaacaacgcga

SEQ ID NO: 144547 - DNA, 80 bp, synthetic construct
  source 1..80: mol_type = other DNA
agaatgggaggaaagacagccaagaccagttcgccctcctaggcaacgttggcagcgacgcaaaaaaggggcacatgcgg

SEQ ID NO: 144548 - DNA, 80 bp, synthetic construct
  source 1..80: mol_type = other DNA
cgctaccccgaaaccagtcgccgtagccaggtcacgtcccgggggcgctcctcgtccaaatgcgcactggcaaaatactc

SEQ ID NO: 144549 - DNA, 80 bp, synthetic construct
  source 1..80: mol_type = other DNA
ggccccacctagcctttgacattacaaaatacatcttggcccttttggggcccctctacatactacaggcctcgttgctg

SEQ ID NO: 144550 - DNA, 80 bp, synthetic construct
  source 1..80: mol_type = other DNA
ggcaacccagttgccacaactgttagttttaataaggaaacggggtgtacttattcgattacatttgactttgcttggaa

SEQ ID NO: 144551 - DNA, 80 bp, synthetic construct
  source 1..80: mol_type = other DNA
agctgctcctccggggagatgggggggtcggacgccacgacgatggacgggtctgcggccgccctctcgtggggccgggc

SEQ ID NO: 144552 - DNA, 80 bp, synthetic construct
  source 1..80: mol_type = other DNA
taacagctcggggtgtcctgaacggctcgcgcgctgcaggagcctcgacagttatccccaaggctggaggccactcggtg

SEQ ID NO: 144553 - DNA, 80 bp, synthetic construct
  source 1..80: mol_type = other DNA
tgccgggtagcaaaacctgattaaaataatcgatttgtgtgtccgtgtcttgcaacgcctcgtcccacttcttcaccgcg

SEQ ID NO: 144554 - DNA, 80 bp, synthetic construct
  source 1..80: mol_type = other DNA
ccgcaccccccaaaggggtataaaagggggcgtgcccaccctccccgtcactttcttccgcatcgctgtggaccagagcc

SEQ ID NO: 144555 - DNA, 80 bp, synthetic construct
  source 1..80: mol_type = other DNA
ttagagtcgaggaatcaatataccaatcatgtcaactcacaccagaggctagagtggcaataaaggccctaactgagcgc

SEQ ID NO: 144556 - DNA, 80 bp, synthetic construct
  source 1..80: mol_type = other DNA
agtgggttggccggcgcctgcggggacgaagtctctcgacccttgcacgtgcggttcctccgacctgtacctggtgactc

SEQ ID NO: 144557 - DNA, 80 bp, synthetic construct
  source 1..80: mol_type = other DNA
tgggatcggggagccagtccagggactctggagggtcgtggatgacgtggcgtcgccggttggccacataactgcggtgc

SEQ ID NO: 144558 - DNA, 80 bp, synthetic construct
  source 1..80: mol_type = other DNA
ctccgtagagtcaatggactcgacaaactcgctgatgttggtgttgacgacggacatgaagccgtgttggtcccgcaaga

SEQ ID NO: 144559 - DNA, 80 bp, synthetic construct
  source 1..80: mol_type = other DNA
ccccgccagtttcatgccgggccacctggagctggcccaggaagtacgcctccgacgcgcgctccgagaacagcacgttc

SEQ ID NO: 144560 - DNA, 80 bp, synthetic construct
  source 1..80: mol_type = other DNA
acatgcttgttatcctcctgctcgccacatttttcgctctctctcacgccagaacaagtattgttggcgcaggttacaat

SEQ ID NO: 144561 - DNA, 80 bp, synthetic construct
  source 1..80: mol_type = other DNA
gaacgtgtcgcgatgctgggtgtccttaacccccaccgtggcagcgccgcacctcaatgcgccactccagtccttgcgac

SEQ ID NO: 144562 - DNA, 80 bp, synthetic construct
  source 1..80: mol_type = other DNA
agtggatgaatcgcttgatcgcttttgcgtcgcgaggcaaccacgtagctcccacgcactacgtccctgaaagcgatgct

SEQ ID NO: 144563 - DNA, 80 bp, synthetic construct
  source 1..80: mol_type = other DNA
tgcacgcgttcgaccagggttgggggcctatatcatatgtcaacaaatcgggcccgtccgaggacaaaccctattgctgg

SEQ ID NO: 144564 - DNA, 80 bp, synthetic construct
  source 1..80: mol_type = other DNA
gctgcgtcccggagattggccagggggagcccgccttccttggccagttcctcggctagtcagctgtctgccccatcctt

SEQ ID NO: 144565 - DNA, 80 bp, synthetic construct
  source 1..80: mol_type = other DNA
cgccgggcgccctagtcgtgggcgtggtctgtgctgccgttttacggcgccatattgggccttcggaggtggcaaatcag

SEQ ID NO: 144566 - DNA, 80 bp, synthetic construct
  source 1..80: mol_type = other DNA
ctggatgacagattcgccacggctctccatttcctcaacgcaatgtcgaaggtcagaaaagatatccaagaatggaagcc

SEQ ID NO: 144567 - DNA, 80 bp, synthetic construct
  source 1..80: mol_type = other DNA
gcatcaaaggccaacaacaaagtgtgtcaaaagcatcacaaaactttattgtaaaatttttataaatataaagttttttt

SEQ ID NO: 144568 - DNA, 80 bp, synthetic construct
  source 1..80: mol_type = other DNA
gccacgataagaacaataaacctgtgaagtcaatcggatatgtgagtttggttgtgttttgtgggactgggggcgggggg

SEQ ID NO: 144569 - DNA, 80 bp, synthetic construct
  source 1..80: mol_type = other DNA
cagagccgggcttgcgtcagcggaagtccgcggcagggcgtttcgttggtctaggagggtaaccacacttacaacaacaa

SEQ ID NO: 144570 - DNA, 80 bp, synthetic construct
  source 1..80: mol_type = other DNA
attcacaaaatctgagtatgtaaccgcttgtaggtggtctgcgatctgtttccgattgaaacattcaaaatgtgccagat

SEQ ID NO: 144571 - DNA, 80 bp, synthetic construct
  source 1..80: mol_type = other DNA
tggatgaacggcaccgggtatgtcaaaacatgcggagctcccgcgtgtctgatttgacccggaaagtccaataatacctt

SEQ ID NO: 144572 - DNA, 80 bp, synthetic construct
  source 1..80: mol_type = other DNA
ggcagcacgcggatgcgggcgtctggatgcggggtcaggcgctgcacgaatagcatggaatctgctgcgttctgaaacgc

SEQ ID NO: 144573 - DNA, 80 bp, synthetic construct
  source 1..80: mol_type = other DNA
ctcggggggctctcttgagcgcgaggcccctctccactctcaaaggatcatccggcggtcccttgctatgccccatggcg

SEQ ID NO: 144574 - DNA, 80 bp, synthetic construct
  source 1..80: mol_type = other DNA
ggtctgatccatcttcaccagaacatcgtcgacgtccagtacctttacggtatcgggtcttcggtggtgtcgtgggctct

SEQ ID NO: 144575 - DNA, 80 bp, synthetic construct
  source 1..80: mol_type = other DNA
cggccgtctcaaactcccccacgagcgtgcgccgcaggctcgccaggtgttccgtcggcacggccgggcccatgatgcgc

SEQ ID NO: 144576 - DNA, 80 bp, synthetic construct
  source 1..80: mol_type = other DNA
cctaaagtgccctactgattgcttccgcaaccatccggaggccacttatgagagatgcgggtctggcccttggctgacac

SEQ ID NO: 144577 - DNA, 80 bp, synthetic construct
  source 1..80: mol_type = other DNA
ttacaactgatatcatcatattccacaaatttagagccacggacaactatattagcaatgcgggcaatcataacaaacat

SEQ ID NO: 144578 - DNA, 80 bp, synthetic construct
  source 1..80: mol_type = other DNA
aaaaagaagtcaccatgtcgtttactttgaccaacaagaacgtgattttcgttgccggtctgggaggcattggtctggac

SEQ ID NO: 144579 - DNA, 80 bp, synthetic construct
  source 1..80: mol_type = other DNA
aacagcaatgaagcacctcctcagtttcaagaaggaactaggcaccctgaccaacgccatgaatagacggagcacaaaac

SEQ ID NO: 144580 - DNA, 80 bp, synthetic construct
  source 1..80: mol_type = other DNA
tccctttcctctcatgccaacgtgggtacaagggagtctggcggggggacggcatcatgcacaccacctgcccatgtgga

SEQ ID NO: 144581 - DNA, 80 bp, synthetic construct
  source 1..80: mol_type = other DNA
ccaagagaggagccagatgacattgattgctggtgctatggggtggaaaacgttagagtcgcatatggtaagtgtgactc

SEQ ID NO: 144582 - DNA, 80 bp, synthetic construct
  source 1..80: mol_type = other DNA
gtttttaccggcctcacccatatagatgcccatttcctatctcagacaaaacaggcaggggaaaattttccttatcttgt

SEQ ID NO: 144583 - DNA, 80 bp, synthetic construct
  source 1..80: mol_type = other DNA
aaaatggacttaggcgtaccactactggcattgggttgctattcacaagtgaacccactaactctaacagcggcagtact

SEQ ID NO: 144584 - DNA, 80 bp, synthetic construct
  source 1..80: mol_type = other DNA
gctggggaaatgggtgcggcttgtttgggaagggcagcattgacacatgcgcaaagttcacgtgcacgaccagggcaacc

SEQ ID NO: 144585 - DNA, 80 bp, synthetic construct
  source 1..80: mol_type = other DNA
tttgggctcgacctgaatacaatccaccgctggttgagaagtggaagcagcaggactacaacccaccggttgtgagcggc

SEQ ID NO: 144586 - DNA, 80 bp, synthetic construct
  source 1..80: mol_type = other DNA
atgttcgacacggtcgtcctctgcgaggcctatgacactggagccgcgtggtacgaactaacacctgcagaaaccacggt

SEQ ID NO: 144587 - DNA, 80 bp, synthetic construct
  source 1..80: mol_type = other DNA
ccgccagccccgcctcttcgggggcgtcgtcgtccgggagatcgagcaggccctcgatggtagacccgtaattgtttttc

SEQ ID NO: 144588 - DNA, 80 bp, synthetic construct
  source 1..80: mol_type = other DNA
gtattgggtcagtagagcatcaggtaacatcgtccacgctgtgagcatgaccagccaagtgctgctcggaagaatggaga

SEQ ID NO: 144589 - DNA, 80 bp, synthetic construct
  source 1..80: mol_type = other DNA
ctctagtgtggttcctgaagcgcaagcccaggtacggaaatgaggagaaggaaaaattgctataaatctttttctcttcg

SEQ ID NO: 144590 - DNA, 80 bp, synthetic construct
  source 1..80: mol_type = other DNA
taccaggccactgtatgcgctagggcaaaagcccctcctccttcctgggacgtgatgtggaagtgtctaactaggctcaa

SEQ ID NO: 144591 - DNA, 80 bp, synthetic construct
  source 1..80: mol_type = other DNA
aggcagtgccgtcatttgcggcaggatcgtcacctccggacgacccgcggtcgtgcctgaccgagaggtgctgtaccagc

SEQ ID NO: 144592 - DNA, 80 bp, synthetic construct
  source 1..80: mol_type = other DNA
ccaccaggcgccaggtcgttgacaccctgcacatgcggcgccagtaacctttatctagtgaccaggaacgccgatgtcat

SEQ ID NO: 144593 - DNA, 80 bp, synthetic construct
  source 1..80: mol_type = other DNA
tagaccaacaacaaaaaagacgaatcggccgtctttcaatatgctgaaacgcgcgagaaaccgcgtgtcaactgtttcac

SEQ ID NO: 144594 - DNA, 80 bp, synthetic construct
  source 1..80: mol_type = other DNA
gacgtgaccttaggctggcggcaaacgctatttgctcggcggtcccttcacattgggttccaacaagtcgaacaacctgg

SEQ ID NO: 144595 - DNA, 80 bp, synthetic construct
  source 1..80: mol_type = other DNA
cgtgaggctgatgttataccggcgcgccacagaggggactctaccgcgagcctgctcagtcctagacccatctcctgcct

SEQ ID NO: 144596 - DNA, 80 bp, synthetic construct
  source 1..80: mol_type = other DNA
tcctgatgggtttggacaaaggatggccaatatcaaaaatggacttaggcgtgccactactggcactgggttgctattca

SEQ ID NO: 144597 - DNA, 80 bp, synthetic construct
  source 1..80: mol_type = other DNA
tcatctatgaggcagaggggatcatactgcacctccctggttgcgtcccgtgcgtcaggacgggaaacaggtcccagtgc

SEQ ID NO: 144598 - DNA, 80 bp, synthetic construct
  source 1..80: mol_type = other DNA
cggtcgctgtctccatgcacatgcgggtcagctgatttgtacctggttaccagacatgcagacgtcatccctgcccgtcg

SEQ ID NO: 144599 - DNA, 80 bp, synthetic construct
  source 1..80: mol_type = other DNA
gtactatgtgcgggcccacattttgttgcgggcttgcttgctagtacggaggttttgtgctggcaagtacgtgcaggccg

SEQ ID NO: 144600 - DNA, 80 bp, synthetic construct
  source 1..80: mol_type = other DNA
gctgtccagctcgtcaggctgatggaggctgagggggtcattggaccacaacacttggaacatctacctaggaaaaacaa

SEQ ID NO: 144601 - DNA, 80 bp, synthetic construct
  source 1..80: mol_type = other DNA
gtggcaaccctgaggaggaggccatcctggacctggaagagggcgaggtgctggcccgcttggaggcgccatcccccgag

SEQ ID NO: 144602 - DNA, 80 bp, synthetic construct
  source 1..80: mol_type = other DNA
gggaatgatggaacccacgtgaccatcgtaccagatgcggcagtatatcaggtgcctgcccctcatgaacacactgccca

SEQ ID NO: 144603 - DNA, 80 bp, synthetic construct
  source 1..80: mol_type = other DNA
cgtcctggccgagctcgccactgaaaccttcggcagctcagatacctcaggcgtcggcgacacagcgaccaccccgtccc

SEQ ID NO: 144604 - DNA, 80 bp, synthetic construct
  source 1..80: mol_type = other DNA
gctcctggtcccccgcgggtggcccgcgtttgcgcccgccagtcccgtggaggacacggcgtgcggcacgccgcccccac

SEQ ID NO: 144605 - DNA, 80 bp, synthetic construct
  source 1..80: mol_type = other DNA
ctcgccggggctgctgtgggcagcattggcctgggcaaggtcatcgtggatatcttagccggatacggtgcaggtgtctc

SEQ ID NO: 144606 - DNA, 80 bp, synthetic construct
  source 1..80: mol_type = other DNA
tgggcgctgttcagaatgaagtcaccctgacacacccagtcaccaagtacatcatgacatgcatgtcggctgatctggag

SEQ ID NO: 144607 - DNA, 80 bp, synthetic construct
  source 1..80: mol_type = other DNA
tacacttggggtgaaaatgagactgacgtgttccttctcgagagcttgcgtccaccgaagggaggatggtttggttgcac

SEQ ID NO: 144608 - DNA, 80 bp, synthetic construct
  source 1..80: mol_type = other DNA
gcacacatcgacatggttgtgatgtctgccacactttgttctgccctttatgtgggggacgtatgcggggcgttgatgat

SEQ ID NO: 144609 - DNA, 80 bp, synthetic construct
  source 1..80: mol_type = other DNA
agcccacaggggcccgatggccagaggggagcggacgccgcgcagcaggccgcgcaggtggcgctcgaacgtttccgcca

SEQ ID NO: 144610 - DNA, 80 bp, synthetic construct
  source 1..80: mol_type = other DNA
ggcagccgccctacggagcatgggtgtcaacgcagtcgcgtactacagaggtctcgatgtctccgtgataccgactcagg

SEQ ID NO: 144611 - DNA, 80 bp, synthetic construct
  source 1..80: mol_type = other DNA
gcgccagggtgtgccgcagcagcacgtgaaggctggggtcgcagtcgcccacggggtcctcggtgacgtccaggccgctg

SEQ ID NO: 144612 - DNA, 80 bp, synthetic construct
  source 1..80: mol_type = other DNA
tgtgttatgaggcggcttttccctgtagcgactctgaaggtgagcaagacgaaaacggaatggcgcatgtttctgcagct

SEQ ID NO: 144613 - DNA, 80 bp, synthetic construct
  source 1..80: mol_type = other DNA
cgaagagatccacaaagaatcgacgtcttacggaccagcggcccactagaaaaaccggcagcagcaacaaggaaagtcca

SEQ ID NO: 144614 - DNA, 80 bp, synthetic construct
  source 1..80: mol_type = other DNA
ccaaccagaacctcaagttggagaggagacatggcaggaaaatgaagttttctatggaggcagggctctcaaaaaagaaa

SEQ ID NO: 144615 - DNA, 80 bp, synthetic construct
  source 1..80: mol_type = other DNA
gatatctcggagatgggagccaaccttgacgtgagccgcgtcatagatgggaggacaaacatcaagcctgaggaggttga

SEQ ID NO: 144616 - DNA, 80 bp, synthetic construct
  source 1..80: mol_type = other DNA
agggcccgggaaaaaccgggctgtcaatatgcaaaaacgcggaacgccccgcgtgttgtccttaataggactgaagaggg

SEQ ID NO: 144617 - DNA, 80 bp, synthetic construct
  source 1..80: mol_type = other DNA
gcaggagtacagggctacttctggtatctggttgccttctgcgctgcttggcatgtgcgggggaaacttgttccactagt

SEQ ID NO: 144618 - DNA, 80 bp, synthetic construct
  source 1..80: mol_type = other DNA
ggtgcaggactttgtgaggcggggggggagggtgaacccgtgggcgctgattgacgcgggaaacccgccattcttacccg

SEQ ID NO: 144619 - DNA, 80 bp, synthetic construct
  source 1..80: mol_type = other DNA
ctctcatgaccgggtacactggagacttcgactctgtcatcgattgcaacgtcgcagtcacacagatagtagacttcagt

SEQ ID NO: 144620 - DNA, 80 bp, synthetic construct
  source 1..80: mol_type = other DNA
ggggtccgccagcccgctccccccgaggtcggccagggccgccaggagctgggcgcgaagtccggggaagcaaaaccgcg

SEQ ID NO: 144621 - DNA, 80 bp, synthetic construct
  source 1..80: mol_type = other DNA
accccactgcgggactgggcccacgcgggcctacgagaccttgcggtggcggtagagcccgtcgtcttctccgccatgga

SEQ ID NO: 144622 - DNA, 80 bp, synthetic construct
  source 1..80: mol_type = other DNA
agggtggccggaagcctgcccgcctgatcgtctatcctgatttgtctgtgcgcgtctgcgagaagcggtgcttgtatgac

SEQ ID NO: 144623 - DNA, 80 bp, synthetic construct
  source 1..80: mol_type = other DNA
gatattctcctggcgaactcactagggtggcaggagccctcagaaaacttggggccccccctttgagagcttggagacat

SEQ ID NO: 144624 - DNA, 80 bp, synthetic construct
  source 1..80: mol_type = other DNA
tatgcgtgctcaccttggtaggcgcagtcgcggcgaatgagatgggatggcttgacaagaccaagagtgacattggaagc

SEQ ID NO: 144625 - DNA, 80 bp, synthetic construct
  source 1..80: mol_type = other DNA
gggtgcttatgacataataatctgtgacgagtgccactccacggatgccacatccatcttgggcatcggcactgtccttg

SEQ ID NO: 144626 - DNA, 80 bp, synthetic construct
  source 1..80: mol_type = other DNA
ttcagataaagactgcaagctaactctggcgctaacaaaatgtggcagtcaaattttgggcactgtttcagctttggcag

SEQ ID NO: 144627 - DNA, 80 bp, synthetic construct
  source 1..80: mol_type = other DNA
ttcagatcagcgggcacagatcgaaggttgacttgcaggagacgggtaagggccgatgccaggcggcgatgaaacttgat

SEQ ID NO: 144628 - DNA, 80 bp, synthetic construct
  source 1..80: mol_type = other DNA
ctaccgcaacaaattcaacagttccgggtgcccggagaggctttccagatgcaaacgcctcgacgaccttgcgcaaggct

SEQ ID NO: 144629 - DNA, 80 bp, synthetic construct
  source 1..80: mol_type = other DNA
cgtcgtggtcctgccgccccattgggcccccggggccctagatgacggtccgtatgcccccttcccaccccgcccgcggt

SEQ ID NO: 144630 - DNA, 80 bp, synthetic construct
  source 1..80: mol_type = other DNA
gattcttcaagccagtttgcttaaagtcccctacttcgtgcgcgttcaaggccttctccggatctgcgcgctagcgcgga

SEQ ID NO: 144631 - DNA, 80 bp, synthetic construct
  source 1..80: mol_type = other DNA
cctctgtgagtgctatgacacgggctgtgcttggtatgagctcacacccgccgagaccacagttaggctacgagcataca

SEQ ID NO: 144632 - DNA, 80 bp, synthetic construct
  source 1..80: mol_type = other DNA
tttccggaccttggcgtgagggtatgcgagaagcgagccctctacgacatagcccagaagctaccccaagccatcatggg

SEQ ID NO: 144633 - DNA, 80 bp, synthetic construct
  source 1..80: mol_type = other DNA
gaccgtaatatgtctctgaaattagaagccttttatcctactggtttcgatgaagaactcattaaatcacttcactgggg

SEQ ID NO: 144634 - DNA, 80 bp, synthetic construct
  source 1..80: mol_type = other DNA
cctatggtgacacagatggcaatgacagacacgactccatttggacaacagcgtgtttttaaagagaaagtagacacgag

SEQ ID NO: 144635 - DNA, 80 bp, synthetic construct
  source 1..80: mol_type = other DNA
cggtgcttggtagactacccataccggctgtggcattacccgtgtaccatcaacttcaccatccataaagttcggatgtt

SEQ ID NO: 144636 - DNA, 80 bp, synthetic construct
  source 1..80: mol_type = other DNA
ggctcttactcctatgtaacgggcctgacctgcgataatttgaaagtcccttgccaattgcccgcaccagagttcttctc

SEQ ID NO: 144637 - DNA, 80 bp, synthetic construct
  source 1..80: mol_type = other DNA
aagacctttgtggaactcatgaaaagaggagatcttcctgtttggctggcctatcaggttgcatctgccggaataaccta

SEQ ID NO: 144638 - DNA, 80 bp, synthetic construct
  source 1..80: mol_type = other DNA
gcgactacaccagtgggtaagctcggagtgcaccaccccatgctccgattgctggctaagggacatctgggactgggtat

SEQ ID NO: 144639 - DNA, 80 bp, synthetic construct
  source 1..80: mol_type = other DNA
cccacctggagcattgctctatgtcgtactcatggacgggggcccttatcaccccatgcgctgcagaggaggaaaaactg

SEQ ID NO: 144640 - DNA, 80 bp, synthetic construct
  source 1..80: mol_type = other DNA
tgatgcgctccacggacgcgttggcgctgggcgcctcccgcagtggcgcgggcgtggcattccggggcttgcggtcctgc

SEQ ID NO: 144641 - DNA, 80 bp, synthetic construct
  source 1..80: mol_type = other DNA
ccgggttctaggtcgttgacgccgtgtacttgtggcgccagtgatctctacctagttactaggaatgcagatgtcatacc

SEQ ID NO: 144642 - DNA, 80 bp, synthetic construct
  source 1..80: mol_type = other DNA
cacctggggtgcggacacagcggcatgtggggatatcctcgcgggcctcccagtgtcagctaggagaggccatgagatct

SEQ ID NO: 144643 - DNA, 80 bp, synthetic construct
  source 1..80: mol_type = other DNA
ccctcgagtgggagcttggagatccagacctggagcctgagcaggtagagccccaaccccccccccaggggcgtgtggca

SEQ ID NO: 144644 - DNA, 80 bp, synthetic construct
  source 1..80: mol_type = other DNA
gcggccgtcggaagcataggcctgggtaagatactggtggacgttttggccgggtacggagcaggcatttcggtggccct

SEQ ID NO: 144645 - DNA, 80 bp, synthetic construct
  source 1..80: mol_type = other DNA
atcagacatctgcagtgaccagagaacacaatggaaatgagattgttgatgtcatgtgccatgccaccctcactcacagg

SEQ ID NO: 144646 - DNA, 80 bp, synthetic construct
  source 1..80: mol_type = other DNA
ggggggaaattgggcgcgttcgccacgtggtcggccccggcgaacagcgcgtggacggtgaggtggtaaaaatagtcgcc

SEQ ID NO: 144647 - DNA, 80 bp, synthetic construct
  source 1..80: mol_type = other DNA
cgctaaatggatactctttaacattcatgtggtcaggtctatcgaactatataaatcagcctttctctacaccatcctgc

SEQ ID NO: 144648 - DNA, 80 bp, synthetic construct
  source 1..80: mol_type = other DNA
tttaaaaacatccagcacctgacagtcacagaagaagttgctgtgcaaaactggttggcaagagtggggcgcgaaaggtt

SEQ ID NO: 144649 - DNA, 80 bp, synthetic construct
  source 1..80: mol_type = other DNA
gcacttgaccctgaggaagggcccagctgtgcagctgttaacattaagcgggaacgggaaacggttcttagtaggctagc

SEQ ID NO: 144650 - DNA, 80 bp, synthetic construct
  source 1..80: mol_type = other DNA
tccgtttccccactgcttttgacatcctcacagcaaaaaaccgattggataccattagcattgacaatcaagggtctcaa

SEQ ID NO: 144651 - DNA, 80 bp, synthetic construct
  source 1..80: mol_type = other DNA
ggtgagaactaagctcaaactcactccattgcgtggcgcgactaccctcgatttgtcggggtggttcacgtcaggctaca

SEQ ID NO: 144652 - DNA, 80 bp, synthetic construct
  source 1..80: mol_type = other DNA
cccctctatctagataataactttcttacactagccattgaacgcccgctagctctatccagtaacagagcagtggccct

SEQ ID NO: 144653 - DNA, 80 bp, synthetic construct
  source 1..80: mol_type = other DNA
ccaaacagcagcatcatttatgaggcagaggggcttatattacaccttcccggctgcatcccgtgtgttaggacggggaa

SEQ ID NO: 144654 - DNA, 80 bp, synthetic construct
  source 1..80: mol_type = other DNA
ccctgcaaagtcaaccttcgggcgtgaccgcctccgatgactgggcggcggccatggaccgcatcatggcgctgaccacc

SEQ ID NO: 144655 - DNA, 80 bp, synthetic construct
  source 1..80: mol_type = other DNA
acggtaggggtaggcatcttcctgttaccagcccgataggctggtaactaacactccatttttaacttatttgttttttt

SEQ ID NO: 144656 - DNA, 80 bp, synthetic construct
  source 1..80: mol_type = other DNA
cgcgccccaccgcagcgtggaggcggtcgtcaggccccgccgaagcagggcccagagctggcagtcggcctggttttgcg

SEQ ID NO: 144657 - DNA, 80 bp, synthetic construct
  source 1..80: mol_type = other DNA
tttcgggcgggcagggagctgcgcgagggcctggaccgccagcgcgtgctgcgcgacgatgattttgagccaaacgagca

SEQ ID NO: 144658 - DNA, 80 bp, synthetic construct
  source 1..80: mol_type = other DNA
gtttatggacctaaacctgccatggactagccctggaaacacaaactggagaaacagagaagccttgcttgagttcgagg

SEQ ID NO: 144659 - DNA, 80 bp, synthetic construct
  source 1..80: mol_type = other DNA
atcacccccaatgtggctatcagtcaacccggtgccctcactaagggcttgcgagcgcacatcgatgtcatcgtgacgtc

SEQ ID NO: 144660 - DNA, 80 bp, synthetic construct
  source 1..80: mol_type = other DNA
ctacggttctgggaataggtaccgtgctcgaccaggcggagacagcgggctgccgcctcacggtgttggccaccgctaca

SEQ ID NO: 144661 - DNA, 80 bp, synthetic construct
  source 1..80: mol_type = other DNA
aaagtgagtgtcccctagagagacggaagacaggtgttttcacggtggcagaattcggggttggcctgagaacaaaggtc

SEQ ID NO: 144662 - DNA, 80 bp, synthetic construct
  source 1..80: mol_type = other DNA
ctgtgggatagctttcatctgtgccgcctggtacattcgcggcaagtgtgcccctatcactctctatgctattctgcgga

SEQ ID NO: 144663 - DNA, 80 bp, synthetic construct
  source 1..80: mol_type = other DNA
acaccttttgtggaaaacaggaacgccctggcaagcatagagctggaacccccctttggcgatagttacattaccattgg

SEQ ID NO: 144664 - DNA, 80 bp, synthetic construct
  source 1..80: mol_type = other DNA
tcttgctggggttcctgtggcacacattgagggaaccaagtaccacctgaagagtggccatgtgacctgcgaagtgggac

SEQ ID NO: 144665 - DNA, 80 bp, synthetic construct
  source 1..80: mol_type = other DNA
agacgccatcccgaatccataaaacattacattggatggctgggggtgggtaatccatttgtttttgctgtggaattcgt

SEQ ID NO: 144666 - DNA, 80 bp, synthetic construct
  source 1..80: mol_type = other DNA
tagaaccctctttggaggaatgtcatggatcagccaaggtctgctgggggcgttactgctatggatggtggtcaatgcta

SEQ ID NO: 144667 - DNA, 80 bp, synthetic construct
  source 1..80: mol_type = other DNA
ccctgctccagctcatggctccgagacgtgtgggactgggtttgttcgatcctgacagacttcaagagttggctatctgc

SEQ ID NO: 144668 - DNA, 80 bp, synthetic construct
  source 1..80: mol_type = other DNA
gttgggtatttataattaccgcccccgtgttacttggaaacacccatacatatgttccactctacatcaaacttctcgca

SEQ ID NO: 144669 - DNA, 80 bp, synthetic construct
  source 1..80: mol_type = other DNA
caatgacagcctgaacactggcttcctcgcggctttgttctatacccgctccttcaactcttcagggtgccccgagcgct

SEQ ID NO: 144670 - DNA, 80 bp, synthetic construct
  source 1..80: mol_type = other DNA
aagctactgtccagaggaggcagagctgctatatgtggcaggtacctcttcaattgggcagtaaggacaaagctcaaaca

SEQ ID NO: 144671 - DNA, 80 bp, synthetic construct
  source 1..80: mol_type = other DNA
ttcgggacctggtaccgcactatccaggaccgcaccatcacggactttcccctgaccacccgcagtgccgactttcggga

SEQ ID NO: 144672 - DNA, 80 bp, synthetic construct
  source 1..80: mol_type = other DNA
gaacgcagttgcctattacaggggccttgacgtctccgttataccagcccaaggagatgtggtggttgtcgccaccgatg

SEQ ID NO: 144673 - DNA, 80 bp, synthetic construct
  source 1..80: mol_type = other DNA
tgagagccgacgcagtggcgcacctggaggctggcaaggactacctggagatcgaggtgggggggcgacggctgttcttc

SEQ ID NO: 144674 - DNA, 80 bp, synthetic construct
  source 1..80: mol_type = other DNA
ccaggagaactatccccggcggaaacatctgcattacagaaatgtgagggaaaaattattaccttctcaaccctgcgtca

SEQ ID NO: 144675 - DNA, 80 bp, synthetic construct
  source 1..80: mol_type = other DNA
ccgacacgctggtgcccatgtccccgcgcgagtaccgccgcgccgtgctcccggcgctggacggccgggccgccgcctcg

SEQ ID NO: 144676 - DNA, 80 bp, synthetic construct
  source 1..80: mol_type = other DNA
gcgccggccacgaacgacgggagcggctgcggagcacgcggaccgggagcgggagtcgcagagggccgtcggagcggacg

SEQ ID NO: 144677 - DNA, 80 bp, synthetic construct
  source 1..80: mol_type = other DNA
ttgacgtatctgtgctccaccagctcggcgatggtcatcggatcgggcagccagtccagggcctccggggcgtcgtggat

SEQ ID NO: 144678 - DNA, 80 bp, synthetic construct
  source 1..80: mol_type = other DNA
actaccaaaatgaccacagcaactttcaaaccacggtggtgcagaacaatgacttcacaccagcggaggcggggacgcaa

SEQ ID NO: 144679 - DNA, 80 bp, synthetic construct
  source 1..80: mol_type = other DNA
attgagctgccaactactaaggctcccacagttaggacaacgcagcctaccactgtacccactacacatccaaccacaac

SEQ ID NO: 144680 - DNA, 80 bp, synthetic construct
  source 1..80: mol_type = other DNA
tttctcctggggagcgaacggctatgcgccccctcaagcgcgaatacgatgaagtgtatgccgatgatgacattttggaa

SEQ ID NO: 144681 - DNA, 80 bp, synthetic construct
  source 1..80: mol_type = other DNA
catggacacctggcagggggccttccttatcaactgttacacggtgggtcactgtgtacctaaacccgcgccgaattata

SEQ ID NO: 144682 - DNA, 80 bp, synthetic construct
  source 1..80: mol_type = other DNA
actattccgccttcgagtgcgccgtgttgtgtctctacctgctgtaccgaaacacgcacggggccgccgacgatagcgac

SEQ ID NO: 144683 - DNA, 80 bp, synthetic construct
  source 1..80: mol_type = other DNA
gtggctaggggcccgcttcctggagtttgaagctctcggattcctcaatgaagaccactggctgggtaggaaaaactcag

SEQ ID NO: 144684 - DNA, 80 bp, synthetic construct
  source 1..80: mol_type = other DNA
ttattgatgccattgtaaaaatctgctccagagcgccctccaccttcagcctcaagcagcgaatcatgattgcaaaaata

SEQ ID NO: 144685 - DNA, 80 bp, synthetic construct
  source 1..80: mol_type = other DNA
cgcccgacttggtcgggaggtcctccttggcccagctgatggctatacctccaaggggtggagtcttctcgcccccatca

SEQ ID NO: 144686 - DNA, 80 bp, synthetic construct
  source 1..80: mol_type = other DNA
ggcaaaatcagtggactttgtgccggtcgagtcccttgaaactaccatgaggtcccccactttcacagacaactccaccc

SEQ ID NO: 144687 - DNA, 80 bp, synthetic construct
  source 1..80: mol_type = other DNA
gctaaggttttgattgtgatgctactctttgctggcgtcgatggggagacccatgtgacaggggggacgagcgcccgcac

SEQ ID NO: 144688 - DNA, 80 bp, synthetic construct
  source 1..80: mol_type = other DNA
tgcaaaaggcctccaatttataccagtggaaacccttagtacacagactaggtccccctccttctccgacaattcaaccc

SEQ ID NO: 144689 - DNA, 80 bp, synthetic construct
  source 1..80: mol_type = other DNA
gtgggagaccgctcaaccgtgtccagtttgttaacgccaaactcacgcttattgctgttgctgattgccccctttaccaa

SEQ ID NO: 144690 - DNA, 80 bp, synthetic construct
  source 1..80: mol_type = other DNA
tgcctgtcatgaaagttcctcttctctgtcttatcctccttcacaaagtcctggccaactgccacctccaccggcccacc

SEQ ID NO: 144691 - DNA, 80 bp, synthetic construct
  source 1..80: mol_type = other DNA
cggctctgttacggagggccatggaagttgcaacggaagtggaacgggcttgacgaagtccagatgattgtagctgaacc

SEQ ID NO: 144692 - DNA, 80 bp, synthetic construct
  source 1..80: mol_type = other DNA
ggccggtgggtttggctccactggcatctagaccgcgcctcgcgtcgggccagatggggccccggtcaataaagagctct

SEQ ID NO: 144693 - DNA, 80 bp, synthetic construct
  source 1..80: mol_type = other DNA
aaaagtgcggcggcggctggcggtagaggggccagcgtagggtggccgtggctccggaggcgaggtcttccaacataaga

SEQ ID NO: 144694 - DNA, 80 bp, synthetic construct
  source 1..80: mol_type = other DNA
ggccttaacagctacgtcgtaggttcgcaactcccttgcgagcctgaaccggatgtagttgttgtcacatctatgctcac

SEQ ID NO: 144695 - DNA, 80 bp, synthetic construct
  source 1..80: mol_type = other DNA
aaatgccggccgctgcacgcttttgaccagggttggggaccgctctcatatgccaacatatctggaccatctgatgagaa

SEQ ID NO: 144696 - DNA, 80 bp, synthetic construct
  source 1..80: mol_type = other DNA
agcagttcaaacaaaaggtcctcggtcttattcagtcctctgccaagcaggcggaggagctaaaaccagcagtcaatgca

SEQ ID NO: 144697 - DNA, 80 bp, synthetic construct
  source 1..80: mol_type = other DNA
aatgacaagtgccccagcactggagaggcccacctagctgaagagaacgaaggggacaatgcgtgcaagcgcacttattc

SEQ ID NO: 144698 - DNA, 80 bp, synthetic construct
  source 1..80: mol_type = other DNA
cgtcagacaacgggggagcgctccttttggcttccttccaggcgcggcgcagccgcgcggcgtaagcggttaggctggaa

SEQ ID NO: 144699 - DNA, 80 bp, synthetic construct
  source 1..80: mol_type = other DNA
gaagtcaatggaacgtggatgatacacactttggaaactcttgattacaaggagtgtgaatggccactgacacacactat

SEQ ID NO: 144700 - DNA, 80 bp, synthetic construct
  source 1..80: mol_type = other DNA
gaccgtgcatcatgagcacactacctaaacctcaaagaaaaacccacagaaacacaaaccgccgcccacaggacgtaaag

SEQ ID NO: 144701 - DNA, 80 bp, synthetic construct
  source 1..80: mol_type = other DNA
cagaaagcggaggcgttctggcaaaagcacatgtggaactttgtgagcgggattcagtatctggcaggcctctccacgct

SEQ ID NO: 144702 - DNA, 80 bp, synthetic construct
  source 1..80: mol_type = other DNA
tggacgcggtcattgacagcgtggtggctgacgcgcgcgactatgccagacgcaagagccggcggcgacgcattgccagg

SEQ ID NO: 144703 - DNA, 80 bp, synthetic construct
  source 1..80: mol_type = other DNA
aggtcgcagatcgtcggtatggagcctggggtggtgacgtgggtctggaccatcccggaggtaagttgcagcagggcgtc

SEQ ID NO: 144704 - DNA, 80 bp, synthetic construct
  source 1..80: mol_type = other DNA
atacgtgcttgtccgtcgtccacagcatccaggacgcccaccggtacagcacggagacgtaggccaggagctcgttgagc

SEQ ID NO: 144705 - DNA, 80 bp, synthetic construct
  source 1..80: mol_type = other DNA
gcgagagccgcgtgggaaacagcaagacacactccagttaattcctggctaggcaacataataatgtttgcccccacatt

SEQ ID NO: 144706 - DNA, 80 bp, synthetic construct
  source 1..80: mol_type = other DNA
gtaagcttcccgttgccatcatgggacctgcttatggcttccagtattcaccaaaggagagagttgaataccttctcaag

SEQ ID NO: 144707 - DNA, 80 bp, synthetic construct
  source 1..80: mol_type = other DNA
tccaagggtagctaaagcggggtattgatctttcaaaaacggttctaatatagcccgacgaatttcgtccctccgccctt

SEQ ID NO: 144708 - DNA, 80 bp, synthetic construct
  source 1..80: mol_type = other DNA
ctgtagtggatggcatcgtggccacggacgtcccagaattagagcgcaccacacccatcatgcagaagaaagttggacag

SEQ ID NO: 144709 - DNA, 80 bp, synthetic construct
  source 1..80: mol_type = other DNA
gggtacgcggtcatacacgccttgcacgtgcggcgctagtgatctctatctcgtcacgcgggatgctgacgtcattcccg

SEQ ID NO: 144710 - DNA, 80 bp, synthetic construct
  source 1..80: mol_type = other DNA
cgaagtccaggtggtctctacggccacacaaacattcctagctaccaccatcaatggagtgctatggactgtctatcatg

SEQ ID NO: 144711 - DNA, 80 bp, synthetic construct
  source 1..80: mol_type = other DNA
tagctggagcgccaggggcgaggtcttccaacataaggcggtgatagccgtagatgtacctggacatccaggtgattcct

SEQ ID NO: 144712 - DNA, 80 bp, synthetic construct
  source 1..80: mol_type = other DNA
cacctcgctcacataatgcatattcaaatgttcacactctaaaagtccaggagtcctttccattgtggcaataggcacag

SEQ ID NO: 144713 - DNA, 80 bp, synthetic construct
  source 1..80: mol_type = other DNA
accctggagctgaatctggcccaacagccgcttttgcgggtccggagggcgacgcgtgactatgccggggtgtacgtgtt

SEQ ID NO: 144714 - DNA, 80 bp, synthetic construct
  source 1..80: mol_type = other DNA
gagcttgcggagaagtcctttggccagtcgacaacttcgggagtcgccagcggcacgtcgtcctcggcgccggaggagga

SEQ ID NO: 144715 - DNA, 80 bp, synthetic construct
  source 1..80: mol_type = other DNA
gccatagcatcaatgatggcattcagcgctgccctcaccagcccgttgtccactagcaccaccattctcctcaacatcat

SEQ ID NO: 144716 - DNA, 80 bp, synthetic construct
  source 1..80: mol_type = other DNA
tggctcacaggaggctgaattcactggttatggaaaggcaacactagagtgtcaggtccagactgccgtggactttggga

SEQ ID NO: 144717 - DNA, 80 bp, synthetic construct
  source 1..80: mol_type = other DNA
attatatcactggggtgacgcaagataacatcaagtgcccctgccaagttcctgcccccgagttcttcactgagctggat

SEQ ID NO: 144718 - DNA, 80 bp, synthetic construct
  source 1..80: mol_type = other DNA
atctcaaagccacagccgctaccagagcggcggggctgaaagactgcactatgctggtttgcggtgacgacttggtcgtt

SEQ ID NO: 144719 - DNA, 80 bp, synthetic construct
  source 1..80: mol_type = other DNA
catggttcgggtgtacgtggatgaatggcacggggttcacgaaaacctgcggggctccgccatgccaagtgcaggcgtcg

SEQ ID NO: 144720 - DNA, 80 bp, synthetic construct
  source 1..80: mol_type = other DNA
tgacatcgttggggctaaatgctgtcgcgttctacaggggcgttgatgtggcagtaatccccacgtctggtgacgtggta

SEQ ID NO: 144721 - DNA, 80 bp, synthetic construct
  source 1..80: mol_type = other DNA
tactgtcatgcctgaccgtccctgcgtccgggctggtatatcgcaacaactcaggcctttacactgtcaccaacgactgc

SEQ ID NO: 144722 - DNA, 80 bp, synthetic construct
  source 1..80: mol_type = other DNA
ctgccaggaactcctccatctgacggaaggccatctgggccttcgtgccctcggtgaaaaagagcccacaggacttgcta

SEQ ID NO: 144723 - DNA, 80 bp, synthetic construct
  source 1..80: mol_type = other DNA
ttatcacagcgtgtctcatgtccggccccgctggttcttctggtgcctactcctactttcagtgggggtaggcatttacc

SEQ ID NO: 144724 - DNA, 80 bp, synthetic construct
  source 1..80: mol_type = other DNA
tgatactgctcacctgcctactacacccacagttggggtttgaggttactaagatcattttagctctcatgggccccatc

SEQ ID NO: 144725 - DNA, 80 bp, synthetic construct
  source 1..80: mol_type = other DNA
atccccctggaggtcatcaagggtggtaggcatctcatcttctgccattctaagaaaaagtgtgaagagctggctaaaca

SEQ ID NO: 144726 - DNA, 80 bp, synthetic construct
  source 1..80: mol_type = other DNA
agccttaccccttacaggggaggtacccttctacggcaagggcatccccatggagtacatcaaaggtggtaggcatttaa

SEQ ID NO: 144727 - DNA, 80 bp, synthetic construct
  source 1..80: mol_type = other DNA
accctcgtgggcagatgttagaaatgacatgatatcatatggtggaggatggagactagcagacaagtgggacaaggaag

SEQ ID NO: 144728 - DNA, 80 bp, synthetic construct
  source 1..80: mol_type = other DNA
tcgagtttgaagccctaggctttctcaacgaagatcactggcttggaaggaagaactctggaggtggtgtggaaggcctc

SEQ ID NO: 144729 - DNA, 80 bp, synthetic construct
  source 1..80: mol_type = other DNA
ggcaaaggtaaaggaccaaaggtaagaacctggctgtttgaaaacgggaaggagcgccttggtaggatggcagttagcgg

SEQ ID NO: 144730 - DNA, 80 bp, synthetic construct
  source 1..80: mol_type = other DNA
ctatcggaatctaaagttgtacaaataccatacggcagtgattatgttttagtgggaccaagagatccaccagttcaatg

SEQ ID NO: 144731 - DNA, 80 bp, synthetic construct
  source 1..80: mol_type = other DNA
aaaacgtctgggtgcccgtggtcacctttctgggggcgggcgcgcttgccgtcaagacggtgcgagaacatgcccggaga

SEQ ID NO: 144732 - DNA, 80 bp, synthetic construct
  source 1..80: mol_type = other DNA
tctcccatggagaagaaggtcattacatggggggcggacacggctgcctgtggtgacattctcgcaggccttcctgtttc

SEQ ID NO: 144733 - DNA, 80 bp, synthetic construct
  source 1..80: mol_type = other DNA
ggtctcctccgcccggacgccgagcggcgatttccgccaaggcgccgggatcaaagcttagcgcagggcgccaggccgtg

SEQ ID NO: 144734 - DNA, 80 bp, synthetic construct
  source 1..80: mol_type = other DNA
aatccatgcctttctcccaggcggaaaccaagggctctgcctgcggattaacaaccactgatgtaacagctttggaagtg

SEQ ID NO: 144735 - DNA, 80 bp, synthetic construct
  source 1..80: mol_type = other DNA
gaccaccactgcatctggaaaactggtaacgcagtggtgctgccgctcctgcacaatgcctcccttaaggttcttgggag

SEQ ID NO: 144736 - DNA, 80 bp, synthetic construct
  source 1..80: mol_type = other DNA
tccaagacggccccggcccagggctctgagggagcggccaccaccagcgcgtccagtcttgctaggcccgtccggccgtg

SEQ ID NO: 144737 - DNA, 80 bp, synthetic construct
  source 1..80: mol_type = other DNA
tacagtctgtggcccggtatattgtttcacacctagccccgtggttgtcggcactactgacaggaagggagcaccgactt

SEQ ID NO: 144738 - DNA, 80 bp, synthetic construct
  source 1..80: mol_type = other DNA
gcgacatttactctgctcgcgtccattgacgtcaccgtcaatcaccactgcgattggacggttggtaaggcgcagcgtgt

SEQ ID NO: 144739 - DNA, 80 bp, synthetic construct
  source 1..80: mol_type = other DNA
accaccgtacggctgagagcttacctatctactcccggactgcctgtctgccaagatcatctggacttctgggagggcgt

SEQ ID NO: 144740 - DNA, 80 bp, synthetic construct
  source 1..80: mol_type = other DNA
atctcactgaaggaaaaatcactctctccagcagcagggtgcccactgggtggccctcgcggacatacaaaaatcggtcc

SEQ ID NO: 144741 - DNA, 80 bp, synthetic construct
  source 1..80: mol_type = other DNA
atagaagcagaacctccattcggagacagctacatcattataggagtagaaccgggacaactgaagctcagctggtttaa

SEQ ID NO: 144742 - DNA, 80 bp, synthetic construct
  source 1..80: mol_type = other DNA
attttgagtggtctcccggtgtcagcgaggttggggaatttggtgctactgggacccgcggatgacatgcagcgcggagg

SEQ ID NO: 144743 - DNA, 80 bp, synthetic construct
  source 1..80: mol_type = other DNA
aggggaagctcttcaagcattggccattaagagctttggccaacttccccctagctgtgattcaggtcgctccacaggga

SEQ ID NO: 144744 - DNA, 80 bp, synthetic construct
  source 1..80: mol_type = other DNA
tacatgcctggatcaccgaagattgcccagtcccatgttcggggtcttggctccgggacatttgggattgggtttgttcc

SEQ ID NO: 144745 - DNA, 80 bp, synthetic construct
  source 1..80: mol_type = other DNA
gtccacctcggtgagatggagggccgagttggtgctaaataccatggcccccacgagtcccgcggcgcgcgccaggtacg

SEQ ID NO: 144746 - DNA, 80 bp, synthetic construct
  source 1..80: mol_type = other DNA
tttttggcctatggtccttcaccctgttggtcttagccttgccacagcaggcctacgctctcgacgccgtcgagcagggt

SEQ ID NO: 144747 - DNA, 80 bp, synthetic construct
  source 1..80: mol_type = other DNA
aaggcaatagattttgtgcctgtggagagtatggagaccactatgagatccccggtcttcaccgacaactcaactccgcc

SEQ ID NO: 144748 - DNA, 80 bp, synthetic construct
  source 1..80: mol_type = other DNA
caccatactggggcaatgtgaaagaggacagagtgacctatggtggcccatggaaattagatcaaaaatggaatggagtg

SEQ ID NO: 144749 - DNA, 80 bp, synthetic construct
  source 1..80: mol_type = other DNA
cggcgtaggtcgcgcaatttgggtaaggtcatcgataccctcacgtgcggcttcgccgacctcatggggtacattccgct

SEQ ID NO: 144750 - DNA, 80 bp, synthetic construct
  source 1..80: mol_type = other DNA
tagcaatgtctggcacggtcggtttcccatcaacgcctctaccaccgggcccagtgtcccatcccccgcgcccaattatt

SEQ ID NO: 144751 - DNA, 80 bp, synthetic construct
  source 1..80: mol_type = other DNA
ccacggtaaagaccccgggcagcaggcgcgcgtcgaagtagtctatcttgcatccttgcaagtctagcgcctgctgccat

SEQ ID NO: 144752 - DNA, 80 bp, synthetic construct
  source 1..80: mol_type = other DNA
gaagtggacagtttttcattaggaatactatgcgtatcaataatgattgaagaagtgatgagatccagatggagtagaaa

SEQ ID NO: 144753 - DNA, 80 bp, synthetic construct
  source 1..80: mol_type = other DNA
gtcagcctcctcccagcggtgactcgggtcactccacaggggcggttaccaccactgctcccgaacagacttctctggac

SEQ ID NO: 144754 - DNA, 80 bp, synthetic construct
  source 1..80: mol_type = other DNA
aggcggcctccgatcagagctccggttcatggacctcgtgttctgatgaggacgattcagtcgtgtgctgctccatgtcg

SEQ ID NO: 144755 - DNA, 80 bp, synthetic construct
  source 1..80: mol_type = other DNA
ccggcaagatgtacggcggagccaaaaggcgctccagtcagcacccagttcgagttcggggccacttccgcgctccctgg

SEQ ID NO: 144756 - DNA, 80 bp, synthetic construct
  source 1..80: mol_type = other DNA
actctcgtgccttactgtgcccgcctcggcccagcattatgccaatagatcaggcatttaccatctgaccaatgactgcc

SEQ ID NO: 144757 - DNA, 80 bp, synthetic construct
  source 1..80: mol_type = other DNA
ccccggcccccgcgccgcccggcgacgggagctacctgtggatcccggcctcccattacaaccagctcgtcgccggccat

SEQ ID NO: 144758 - DNA, 80 bp, synthetic construct
  source 1..80: mol_type = other DNA
tattgcttgagcccgagagcatgtccaaggtgaacctgaacggggtgtttgacatgaccatgaagatctggaaggtgctg

SEQ ID NO: 144759 - DNA, 80 bp, synthetic construct
  source 1..80: mol_type = other DNA
atcctaagtcccggggccctcgtcgttggcgttgtctgcgcagcagtcctgcgcaggcacgtcggcggcggtgatggcgc

SEQ ID NO: 144760 - DNA, 80 bp, synthetic construct
  source 1..80: mol_type = other DNA
cagatcctggctgaatgcgcacgaagacggttgcgcacacttgtgctggctcctactagagttgtcctttctgaaatgaa

SEQ ID NO: 144761 - DNA, 80 bp, synthetic construct
  source 1..80: mol_type = other DNA
tcctgggtggacggggttcaaatccacagattcgctcccactccaaagccgttcctcagagatgaggtctcgtttagcgt

SEQ ID NO: 144762 - DNA, 80 bp, synthetic construct
  source 1..80: mol_type = other DNA
ggaacctgactacgacccaccggttgtccacgggtgcgctttgcccgctggcggtctgccccccgtccctcccccacgga

SEQ ID NO: 144763 - DNA, 80 bp, synthetic construct
  source 1..80: mol_type = other DNA
ttgtgtggagagaggtctcagagtggtatgacaactatgcatactacccggagacaccaggggctcttgcatcggcaata

SEQ ID NO: 144764 - DNA, 80 bp, synthetic construct
  source 1..80: mol_type = other DNA
aagctaacactagttttaactaaatgtggcagtcaggtacttgcaactgtgtcagcactggctgtaaagggcagcctagc

SEQ ID NO: 144765 - DNA, 80 bp, synthetic construct
  source 1..80: mol_type = other DNA
aggtccgccacgttccccgtctggtccacgaggaccacgtaggcccctatgtggcccgtctccatgtccaggacgggcag

SEQ ID NO: 144766 - DNA, 80 bp, synthetic construct
  source 1..80: mol_type = other DNA
ttgcccgctaccacctgcgggtctcccacctgtcccgcctccacgtaggaagaggaaaccggtggtgctatctgactcca

SEQ ID NO: 144767 - DNA, 80 bp, synthetic construct
  source 1..80: mol_type = other DNA
agcagtaccacaaacataccaggtggggtacctccatgccccgacgggtagtgggaaaagcacgaaagtgccagcttcct

SEQ ID NO: 144768 - DNA, 80 bp, synthetic construct
  source 1..80: mol_type = other DNA
gacacccggatcactaatgctgatttggaggatgaagagcagatccttcggtacatggaaggagaacaccatgtgctggc

SEQ ID NO: 144769 - DNA, 80 bp, synthetic construct
  source 1..80: mol_type = other DNA
caatccccaaaccccgcgttgctcggctggccaggtcacgaacccccagttcgccgacaggctgtaccgctggcaaccgg

SEQ ID NO: 144770 - DNA, 80 bp, synthetic construct
  source 1..80: mol_type = other DNA
agtcagttatccgctccatcactgaaggccacgtgcactgcccaccacgactcccctggtaacgacctcattgaggccaa

SEQ ID NO: 144771 - DNA, 80 bp, synthetic construct
  source 1..80: mol_type = other DNA
ccactttgtggtgggcgctaccgcggacaacttgaagtgcccgtgtcaagttccagctcccgaattcttcaccgaggttg

SEQ ID NO: 144772 - DNA, 80 bp, synthetic construct
  source 1..80: mol_type = other DNA
atgcgcggtgagggcttgatttgcgcgctggtcgtgggcgcgctggtggccgcggtggcgtcggcggccccggcggcccc

SEQ ID NO: 144773 - DNA, 80 bp, synthetic construct
  source 1..80: mol_type = other DNA
tcaaatttaaaccaactgtagacgtgccggataaaacacaagtggcacatgtattaccccgcctacgagaagttgctaac

SEQ ID NO: 144774 - DNA, 80 bp, synthetic construct
  source 1..80: mol_type = other DNA
atagtgccagagggttaactagcctttttagtatgggcgccaagcagaaactgcaattggtcaacaccaatggctcgtgg

SEQ ID NO: 144775 - DNA, 80 bp, synthetic construct
  source 1..80: mol_type = other DNA
cgtgcgcccggcgtacgtgcctgcgcagaacctgttcagggaccgcagcggggaggagcccgaggagatgcgcgactgcc

SEQ ID NO: 144776 - DNA, 80 bp, synthetic construct
  source 1..80: mol_type = other DNA
agttcgaggctcttggattcttgaatgaagaccattgggcctctagagagtccagtggagctggagttgagggaataagc

SEQ ID NO: 144777 - DNA, 80 bp, synthetic construct
  source 1..80: mol_type = other DNA
aaggcctcttgcaagtttttaattaccataccgggaagtgggcggcccggcccattgggcggtaactcccgcccaatggt

SEQ ID NO: 144778 - DNA, 80 bp, synthetic construct
  source 1..80: mol_type = other DNA
catgcccccccttgaggtggagccgggggatcctgacctcagcgatggatcctggtcaaccgtgagtagcgaggagactg

SEQ ID NO: 144779 - DNA, 80 bp, synthetic construct
  source 1..80: mol_type = other DNA
tcctgtggagaacctggaaacaaccatgaggtccccggtgtttacggacaactcctctccaccagtagtgccccagagct

SEQ ID NO: 144780 - DNA, 80 bp, synthetic construct
  source 1..80: mol_type = other DNA
cttccaggcagggtttgcaaactgttaatttaacgcaggcttttaaaaatttgcaaggcttgtggggagtccgtgctcct

SEQ ID NO: 144781 - DNA, 80 bp, synthetic construct
  source 1..80: mol_type = other DNA
cgatgtcatccctgctagacgcaggggagatactcgtgcaggactccttagccccaggcccttgtctactcttaagggct

SEQ ID NO: 144782 - DNA, 80 bp, synthetic construct
  source 1..80: mol_type = other DNA
ccccggagcctcccggcccacccctccacggacaacgacatccccgtcctccgcccgagacccgacccccgccaccggag

SEQ ID NO: 144783 - DNA, 80 bp, synthetic construct
  source 1..80: mol_type = other DNA
gctcaaagccaagctgctgcccagcatgcccggcgtccccttcctctcctgtcagaaggggtataaggtggaatggcgcg

SEQ ID NO: 144784 - DNA, 80 bp, synthetic construct
  source 1..80: mol_type = other DNA
actttgtacaagcccccaatggagagtttacagtttccccccgcaattcccctggggaggttttgctaaatttagaattg

SEQ ID NO: 144785 - DNA, 80 bp, synthetic construct
  source 1..80: mol_type = other DNA
ccaacagcagcattgtgtatgaggcgcccactcttattatgcacttacctggatgcaccccttgcgttcaggttggcaac

SEQ ID NO: 144786 - DNA, 80 bp, synthetic construct
  source 1..80: mol_type = other DNA
atgccatttatcagtgctgccagttagatccggcagcacgcaaagtcatcacttcgctcactgaacggctgtactgcggt

SEQ ID NO: 144787 - DNA, 80 bp, synthetic construct
  source 1..80: mol_type = other DNA
gcgtactgggacgtggggacggactgatcggtagcagggagaggaagaagagccggggccggattgggcgtgggcccgcc

SEQ ID NO: 144788 - DNA, 80 bp, synthetic construct
  source 1..80: mol_type = other DNA
ccaacagagggccgtgttggcagcccaacagagggccgtgttggcagcagctctagaaacacatttggctcaggtagttc

SEQ ID NO: 144789 - DNA, 80 bp, synthetic construct
  source 1..80: mol_type = other DNA
caccacactcaggggaggaacactcagtaggcaatgacacaggaaagcacggacaagacgtgaaaataacaccccagagc

SEQ ID NO: 144790 - DNA, 80 bp, synthetic construct
  source 1..80: mol_type = other DNA
aaagaaggtcacttttgaccggctgcaagtgcttgactcacactatgaggatgtcctaaaggaggtgaagctgcaggcct

SEQ ID NO: 144791 - DNA, 80 bp, synthetic construct
  source 1..80: mol_type = other DNA
gttatcggtcaaccaattggtatacacacccaccccagatattgtccaattcagaaacattagttgcggttcaagaacta

SEQ ID NO: 144792 - DNA, 80 bp, synthetic construct
  source 1..80: mol_type = other DNA
gtcccaaggggggaaagccgccatctgcggcaagtaccttttcaactgggcggtaaaaaccaagctcaaactcactccat

SEQ ID NO: 144793 - DNA, 80 bp, synthetic construct
  source 1..80: mol_type = other DNA
catgctcggccccgcctcttctggttctgcctactcctactttccgtaggggtaggcgtctttttgctccccaaccgata

SEQ ID NO: 144794 - DNA, 80 bp, synthetic construct
  source 1..80: mol_type = other DNA
ccacggcatggcaggttcacagagattggtttaacgatctagctctgccttggaaacatgagggaatggtgggttggaac

SEQ ID NO: 144795 - DNA, 80 bp, synthetic construct
  source 1..80: mol_type = other DNA
gttggggcccctctgacccccggcgcaggtcacgcaatttgggtaaggtcatcgataccctcacgtgtggcttcgccgac

SEQ ID NO: 144796 - DNA, 80 bp, synthetic construct
  source 1..80: mol_type = other DNA
gaatcaaccctatctactgccttggccgagctcgccaccagaagctttggcagctcctcaacttccggcattacgggcga

SEQ ID NO: 144797 - DNA, 80 bp, synthetic construct
  source 1..80: mol_type = other DNA
aaagggacaaggcgcgggaacttctcaggagaggggagaccaacatggagctggcggtgtcacggagcacggctaaactt

SEQ ID NO: 144798 - DNA, 80 bp, synthetic construct
  source 1..80: mol_type = other DNA
gcggcgaggctgtttctggaggccgctatctggtgggcggttggcgcgcgcctatgaaagggtgcgagccaccgtcccgc

SEQ ID NO: 144799 - DNA, 80 bp, synthetic construct
  source 1..80: mol_type = other DNA
tagtgtccgcaccgactcgtagtagacccgaatctccacattgccccgccgcttgatcattatcaccccgttgcgggggt

SEQ ID NO: 144800 - DNA, 80 bp, synthetic construct
  source 1..80: mol_type = other DNA
acagttctcggggcagcaacgttcttctgttggatggctgatgtgcctgggacgaaaatcgctggtatgttgttactatc

SEQ ID NO: 144801 - DNA, 80 bp, synthetic construct
  source 1..80: mol_type = other DNA
tagaaactcgcgttggatgtgttaaatcatactggcaggcgaaccggattgaaaactccagggacgttccaaaacaattt

SEQ ID NO: 144802 - DNA, 80 bp, synthetic construct
  source 1..80: mol_type = other DNA
gcacggctctttctcgtacgtaacggggttaactagtgacaaccttaaggtcccttgccaggtaccagctccagaattct

SEQ ID NO: 144803 - DNA, 80 bp, synthetic construct
  source 1..80: mol_type = other DNA
atcaaatgggagtacatcctgttgcttttccttctcctggcagacgcgcgcgtgtgtgcctgcttgtggatgatgctgct

SEQ ID NO: 144804 - DNA, 80 bp, synthetic construct
  source 1..80: mol_type = other DNA
ctgttgtgctgtgcgagtgctacgatgcaggtttgtcctggtatgaattaactccgggagagactaccgtcagactcagg

SEQ ID NO: 144805 - DNA, 80 bp, synthetic construct
  source 1..80: mol_type = other DNA
agttattttagcgggtcccattccagtgactccagcaagcgctgctcagagaagagggcgaataggtaggaacccagcac

SEQ ID NO: 144806 - DNA, 80 bp, synthetic construct
  source 1..80: mol_type = other DNA
cgaccactataagagagcactcagtgaggtgaaggcgaaagcatccactgtcacggcgcgcatgctctctatagaggaag

SEQ ID NO: 144807 - DNA, 80 bp, synthetic construct
  source 1..80: mol_type = other DNA
cggtaatatggtctatggcatctcgatccaacaaacttcttggttgcgggggttgggacggctttggctgtacggtacca

SEQ ID NO: 144808 - DNA, 80 bp, synthetic construct
  source 1..80: mol_type = other DNA
gtaaataaaaccgtgacagctcatggggtgggagatatcgctgttccttaggacccttttactaaccctaattcgatagc

SEQ ID NO: 144809 - DNA, 80 bp, synthetic construct
  source 1..80: mol_type = other DNA
ggtggtggagtttctcagcggcagttacgccggcctctcgctctccagccggcgctgcgacgacgtggaggccgcgacgt

SEQ ID NO: 144810 - DNA, 80 bp, synthetic construct
  source 1..80: mol_type = other DNA
agcaacgcagacaggaataaccatcagccagatgaaaatcctttcttcaactgtaacgggactttacttggaaatttgac

SEQ ID NO: 144811 - DNA, 80 bp, synthetic construct
  source 1..80: mol_type = other DNA
gtccactccttagtagactacaaatcacgaacccgaggctgcaagaagaaggctacctccttcggaagtgggacatccga

SEQ ID NO: 144812 - DNA, 80 bp, synthetic construct
  source 1..80: mol_type = other DNA
ggtggcatggcgtcgagtcgggcgtgtactgcgacaccaggatcagcgagggctggctcacgcgtacgtggatacccgtc

SEQ ID NO: 144813 - DNA, 80 bp, synthetic construct
  source 1..80: mol_type = other DNA
tgaccgttggccaacggaacggcgtttcacgatcaaaatcgtatcgggtagtgtaggagacgtcggcggtgcagaatgcg

SEQ ID NO: 144814 - DNA, 80 bp, synthetic construct
  source 1..80: mol_type = other DNA
caccttcaggtgtttgtgctgaaaggtgaagtaatcaatgacagtcaccttccccaaaaaggcctgggtctctcgagggg

SEQ ID NO: 144815 - DNA, 80 bp, synthetic construct
  source 1..80: mol_type = other DNA
gcaccttacttaccatcagctatatcttcagaccaaaatgatacacgactagcttgtagctatttactgaagaattatgt

SEQ ID NO: 144816 - DNA, 80 bp, synthetic construct
  source 1..80: mol_type = other DNA
agaggtgtattcgtgctagggttcttgggttttctcacgacagcaggagctgcaatgggcgcggcgtccttgacgctgtc

SEQ ID NO: 144817 - DNA, 80 bp, synthetic construct
  source 1..80: mol_type = other DNA
tggtgcttccggctttttccggtgagtccacgatcctagccatgaaatgctcaaacgtacgcatcacgcgcccgtagctc

SEQ ID NO: 144818 - DNA, 80 bp, synthetic construct
  source 1..80: mol_type = other DNA
tctagacttaaacaccagtgcaggttttccatacataagcatgggcataaagaaaagggatttaattgacaagaatacca

SEQ ID NO: 144819 - DNA, 80 bp, synthetic construct
  source 1..80: mol_type = other DNA
accaattagctacagctgctggcggtagtgtttcagcagggtataattatacacatcctggtgaaaaaggtagagatgtt

SEQ ID NO: 144820 - DNA, 80 bp, synthetic construct
  source 1..80: mol_type = other DNA
atcttgtatcacaaaatggcggacaacttccgcttttttaaaaaaacgcgcgaaaaaacggcggcgtcggcgcgcgcgct

SEQ ID NO: 144821 - DNA, 80 bp, synthetic construct
  source 1..80: mol_type = other DNA
tgtgggaaggaggggcactcggcaagacaatgccgagcacctagaaggcagggctgctggaagtgtggcaagccaggaca

SEQ ID NO: 144822 - DNA, 80 bp, synthetic construct
  source 1..80: mol_type = other DNA
ggacctttctcaaagaaaagatatgttcatggttgggcattcccaaacctcctagtcatcaaagtgataattggctcaag

SEQ ID NO: 144823 - DNA, 80 bp, synthetic construct
  source 1..80: mol_type = other DNA
aaaagaaggttgtcaaaaaattcttgtagttttagatccattagtgccgacaggatcagaaaatttaagaagccttttta

SEQ ID NO: 144824 - DNA, 80 bp, synthetic construct
  source 1..80: mol_type = other DNA
tagagtggatgaagtccatgttacctcaagcccaacttaaagtgaaatacctttctgaacttcggaaactcaatcttctg

SEQ ID NO: 144825 - DNA, 80 bp, synthetic construct
  source 1..80: mol_type = other DNA
tggtatcaactactgaattcatagtcccaatggcgagtattgaggacaagggtagatctttcactagtcagtatgtatta

SEQ ID NO: 144826 - DNA, 80 bp, synthetic construct
  source 1..80: mol_type = other DNA
tacctaaacactggcagaatagctccagaatttccaggcctatacacagacataatatacaacccatgggtagacagagg

SEQ ID NO: 144827 - DNA, 80 bp, synthetic construct
  source 1..80: mol_type = other DNA
actggtgggtacaaactcttctaaagataaaagacatgatattgtcagttttcaaacctagtatggaaagaaaagcaatt

SEQ ID NO: 144828 - DNA, 80 bp, synthetic construct
  source 1..80: mol_type = other DNA
tctctacatgctggatgtggcgaccgtgccagaggctgagatcgccgcgcgtttggtctccacctatcgcgaccgcgata

SEQ ID NO: 144829 - DNA, 80 bp, synthetic construct
  source 1..80: mol_type = other DNA
taatagtgcccaaggaagcagccacttctacatatataattggattcgcagctgcgaaaaacgacttctcgcttcgctta

SEQ ID NO: 144830 - DNA, 80 bp, synthetic construct
  source 1..80: mol_type = other DNA
tggcgaccaccaaccaggaatgtaccgggacaggagcagggctggtacgacgccattttctcttctcacaatgctttttg

SEQ ID NO: 144831 - DNA, 80 bp, synthetic construct
  source 1..80: mol_type = other DNA
ctatttaacaaactacttccaacacaaaaccaaaaagacgaatggcaatacacatacaacaaaccaatgcaaaaaatata

SEQ ID NO: 144832 - DNA, 80 bp, synthetic construct
  source 1..80: mol_type = other DNA
ccaaccttaccaatcacaatatccattgcccccatcaaatcagaattttcgggcgcaagacagtctgctaaagtacaagg

SEQ ID NO: 144833 - DNA, 80 bp, synthetic construct
  source 1..80: mol_type = other DNA
atgtggtggtcgcatacggagaatggccagaatacctaagtgacagggaagcagtcgctgaagaccagccaacgcaacct

SEQ ID NO: 144834 - DNA, 80 bp, synthetic construct
  source 1..80: mol_type = other DNA
atgagaacactagtcttggagacttataaaaatatagacttggataaattgagaatagtagcatatggtgatgatgtagt

SEQ ID NO: 144835 - DNA, 80 bp, synthetic construct
  source 1..80: mol_type = other DNA
atcaattattttaaagatgctgcttcatctggagcctcaagattggacttttcacaagacccaagtaaatttacagaccc

SEQ ID NO: 144836 - DNA, 80 bp, synthetic construct
  source 1..80: mol_type = other DNA
tcagtccgcatgttgcgagacacacccatgatgaagcaagaagataacatcacccaaaacccagtagaagagtttgtaga

SEQ ID NO: 144837 - DNA, 80 bp, synthetic construct
  source 1..80: mol_type = other DNA
acaggtagtccaccagggccttgtcctgcccatcctcggccgtggccttcccaatctgaatcatgtcacacaccatgagc

SEQ ID NO: 144838 - DNA, 80 bp, synthetic construct
  source 1..80: mol_type = other DNA
acaaaacgtataaagccatagcaggccaaagagtccacgaagacaaaaaatacaaagagtaccttaaacaagtgtgggat

SEQ ID NO: 144839 - DNA, 80 bp, synthetic construct
  source 1..80: mol_type = other DNA
ggcgtgctgggcgccggcgctagtaacgggagttacgctggggacgcggctgagggaggttttgccaccgtaagcgcgcc

SEQ ID NO: 144840 - DNA, 80 bp, synthetic construct
  source 1..80: mol_type = other DNA
gcactgcaaaacaatgaccctgtgtctaattttattgatgctacattggaagaagtgctagtagtacctgacaccaaacc

SEQ ID NO: 144841 - DNA, 80 bp, synthetic construct
  source 1..80: mol_type = other DNA
cacccccactgtggcggacgtagtctccaacaattttgtattggaggagcacctggtagaagtagttgtgccgtggattg

SEQ ID NO: 144842 - DNA, 80 bp, synthetic construct
  source 1..80: mol_type = other DNA
aattcccaaatttaacacttgttcccaatgctattattcaagagttaatgcccataagttttaattctgaaggggatgaa

SEQ ID NO: 144843 - DNA, 80 bp, synthetic construct
  source 1..80: mol_type = other DNA
cagagagtaacacgaacacaaccgcggaagcaccagaaataaatgacaactcttcatgcatacgcgcaaacaactgctca

SEQ ID NO: 144844 - DNA, 80 bp, synthetic construct
  source 1..80: mol_type = other DNA
gctcaaaagattttttctattaaagtggatattgcctcacaacctttagtaaacactatgcttggccaaattgccagcta

SEQ ID NO: 144845 - DNA, 80 bp, synthetic construct
  source 1..80: mol_type = other DNA
gagatcttgaactactatgcaaattggtctggtagtattagagtcacatttatgtgtgtatgtgatagttttggtactgg

SEQ ID NO: 144846 - DNA, 80 bp, synthetic construct
  source 1..80: mol_type = other DNA
aagctaatctcatcgttatccgcaaggtgcctacgggaagcctagtaacattctgaagatattttggttggtcgatcagt

SEQ ID NO: 144847 - DNA, 80 bp, synthetic construct
  source 1..80: mol_type = other DNA
tggtggagaaggtggcgccgctggcccgccaggcgctggaggagacgccgccgccgacgcccacttaggagacgaagagc

SEQ ID NO: 144848 - DNA, 80 bp, synthetic construct
  source 1..80: mol_type = other DNA
gtgctgtgagtttaatggcttaagaaatgctatcactcaaggagtgcctacttatctgttgccaggttcctctcaattct

SEQ ID NO: 144849 - DNA, 80 bp, synthetic construct
  source 1..80: mol_type = other DNA
cttcgtacacttcctgggaggagttatccgcctaatataagtagctgcacttccgaatggctgagttttccacgcccgtc

SEQ ID NO: 144850 - DNA, 80 bp, synthetic construct
  source 1..80: mol_type = other DNA
cctaatcaataccatgccgccgttcctagacacccagctcacgggacccagcatccacccgggactcatggcactaaaca

SEQ ID NO: 144851 - DNA, 80 bp, synthetic construct
  source 1..80: mol_type = other DNA
tctgcagatatcttaaaactgggttcaggttgttcccacctgaacttcccacgtggagtagtacactattattacggtaa

SEQ ID NO: 144852 - DNA, 80 bp, synthetic construct
  source 1..80: mol_type = other DNA
cagacccccacgacaacctggcactcgtgggactggagacgatccctctttacagagacgggtcttaaaagaatgcgcga

SEQ ID NO: 144853 - DNA, 80 bp, synthetic construct
  source 1..80: mol_type = other DNA
tacctcaaaaaagtacaacaagaatacaaagaccaagaaaatttaaaaaacttaatacatccagttttctgtcagtatgt

SEQ ID NO: 144854 - DNA, 80 bp, synthetic construct
  source 1..80: mol_type = other DNA
ccaaattgcccggtgttcatgcacaacaggcgtatattactgcctgtcacgcaacaaacactaccccatcactgtcacta

SEQ ID NO: 144855 - DNA, 80 bp, synthetic construct
  source 1..80: mol_type = other DNA
gaacaagaaatacaattcctccaaacaaaaaatttaaaattccaaaatttccgggtctattacagagaaggcagagatca

SEQ ID NO: 144856 - DNA, 80 bp, synthetic construct
  source 1..80: mol_type = other DNA
gaaattgtcatgtgcttacaacagataagggggaattcaatctgcttggggtgcatgataactgtgctgttgtacccaca

SEQ ID NO: 144857 - DNA, 80 bp, synthetic construct
  source 1..80: mol_type = other DNA
ggaaaagcactggtgtttagggatagaaacacaggtgatcacttatcattggcaacaatatataataaaatagttgagga

SEQ ID NO: 144858 - DNA, 80 bp, synthetic construct
  source 1..80: mol_type = other DNA
cttcccacgtcagatacatgtctttcggtatcatcaacgcgaacacctccgttttgagcgtgttgtaaaggtagccgcgc

SEQ ID NO: 144859 - DNA, 80 bp, synthetic construct
  source 1..80: mol_type = other DNA
ctgtcttccatgccaacccaggggtactcacaggctcagcagtggggtgcaatccagatgttttttggtcccagatgtac

SEQ ID NO: 144860 - DNA, 80 bp, synthetic construct
  source 1..80: mol_type = other DNA
ttcaaactaaacaatccagcttatttggctttaatacatacaaacctgatgaacataaactaaaagaagctagaaacaaa

SEQ ID NO: 144861 - DNA, 80 bp, synthetic construct
  source 1..80: mol_type = other DNA
ataactcttactttcatgtgtgtttgtgactcattctctacaggaaaattcctgctagcatacacccctcccgggggtgc

SEQ ID NO: 144862 - DNA, 80 bp, synthetic construct
  source 1..80: mol_type = other DNA
ggctgagaccacccaagcagacttgtgtatcccctatgttgctgacacaaactatgttaagactgactcgtcggacttag

SEQ ID NO: 144863 - DNA, 80 bp, synthetic construct
  source 1..80: mol_type = other DNA
tggaagattaattacctagacgcataccagctacgccgcaagctagagatgttcacttactcacgatttgatgtggagct

SEQ ID NO: 144864 - DNA, 80 bp, synthetic construct
  source 1..80: mol_type = other DNA
ttgaggaatacttcaccaaagaccaagataatgccaacagatacatgtcatggactataaatgccaggaggatggtgcaa

SEQ ID NO: 144865 - DNA, 80 bp, synthetic construct
  source 1..80: mol_type = other DNA
catggatcccgtgtaaaaatctcaactagaatatatcacaaagctaaacatgtcaaagcttggtgcccaaggcctcctag

SEQ ID NO: 144866 - DNA, 80 bp, synthetic construct
  source 1..80: mol_type = other DNA
gacgaacagttaacctcaactacaagtagctgggttgactattacaaaaaatttttaaatgaagtttttaaaacagacag

SEQ ID NO: 144867 - DNA, 80 bp, synthetic construct
  source 1..80: mol_type = other DNA
ctggccttccagaaagacgtactgactgacctagccatgtcaggccccttctcctacagcgacgaccttaaaaacaccac

SEQ ID NO: 144868 - DNA, 80 bp, synthetic construct
  source 1..80: mol_type = other DNA
tgcaaaagcgacagctgggagtcgtgttccagcaactcctccgactcagacagggggcggagatccacccgggcctcgta

SEQ ID NO: 144869 - DNA, 80 bp, synthetic construct
  source 1..80: mol_type = other DNA
agggacttggccaggtgcacccttactggatgcagagatggagacccatggcccaggtacaaaaagagacaatgtcaaaa

SEQ ID NO: 144870 - DNA, 80 bp, synthetic construct
  source 1..80: mol_type = other DNA
cgagccgtcggatctaatagagacccgtcatgtcaagaactcccgcctcaggtcagagtgcaccatagaatcatttcttg

SEQ ID NO: 144871 - DNA, 80 bp, synthetic construct
  source 1..80: mol_type = other DNA
atgcatttaagtggctctggggtggcaaccgtatcttccaacaggttgtcaaagacccctgctcacaccagcaagaccag

SEQ ID NO: 144872 - DNA, 80 bp, synthetic construct
  source 1..80: mol_type = other DNA
tagataaatatggaatagacttgccacttgttacctatattaaagatgaactaagaagtgttgataaagtaagattaggc

SEQ ID NO: 144873 - DNA, 80 bp, synthetic construct
  source 1..80: mol_type = other DNA
ataaataacctagaacaaaatatcaggaatgtaaatatgtattcagtagttctgaaccaggaaaccacaacagctaagga

SEQ ID NO: 144874 - DNA, 80 bp, synthetic construct
  source 1..80: mol_type = other DNA
cggcggccgactttgaacagctgcggcgactgtgcgcgccgctggccatcgacacgcgctgtaacctatgcgccatcatc

SEQ ID NO: 144875 - DNA, 80 bp, synthetic construct
  source 1..80: mol_type = other DNA
atataccagacgggaccgttataacggttacgaagaaaattactacgtaacggtattatctgaaggttcaacgtcctcaa

SEQ ID NO: 144876 - DNA, 80 bp, synthetic construct
  source 1..80: mol_type = other DNA
ttaagcaaaagaaaagatgtgaaccagtcgctgttgttatacatggtgaccctggtactggcaagtctatgactacaagc

SEQ ID NO: 144877 - DNA, 80 bp, synthetic construct
  source 1..80: mol_type = other DNA
cagcccccgcgaccccttctagagaactagcatggcctactggttcagaaggtggggctggaggccgaggcgccggtgga

SEQ ID NO: 144878 - DNA, 80 bp, synthetic construct
  source 1..80: mol_type = other DNA
caggaccaactactccagcagctccgagaacagcgagccctccgactccacctccaacacctcgccggagaagtcctcaa

SEQ ID NO: 144879 - DNA, 80 bp, synthetic construct
  source 1..80: mol_type = other DNA
gtcctcactaccagcaatgtcaagaagattttattttgatctagatattcaagttaagaaagattatcttttagatggga

SEQ ID NO: 144880 - DNA, 80 bp, synthetic construct
  source 1..80: mol_type = other DNA
caaatattcggtactagattatacataggagatggtgtcttcaagaccactttatttggagaaattgctcagtactttac

SEQ ID NO: 144881 - DNA, 80 bp, synthetic construct
  source 1..80: mol_type = other DNA
gatggatatgacaaccaagatattcatctcatagatgatttgggtcaaaccagaaaagaaaaagacattgaaatgctgtg

SEQ ID NO: 144882 - DNA, 80 bp, synthetic construct
  source 1..80: mol_type = other DNA
caaaagatttcctcacaacaaaggtactctccaaagtagttaagatgatatcagcattagttataatctgtagaaatcat

SEQ ID NO: 144883 - DNA, 80 bp, synthetic construct
  source 1..80: mol_type = other DNA
cacaatggtttgttagatgtagcaaaggccttacaaccttgcgctaagtgtccaaagcctaatcactataaacagtgctg

SEQ ID NO: 144884 - DNA, 80 bp, synthetic construct
  source 1..80: mol_type = other DNA
caataaaattactaggccgtggaactctcactggtcggtgtctacctcttaaggtcactaagcactccgagcgtcagcga

SEQ ID NO: 144885 - DNA, 80 bp, synthetic construct
  source 1..80: mol_type = other DNA
ggttcccctaccgacaaccacctagagtaccacgcaggcatgtacagcagcattttcctaggcccaggcaggagcaactg

SEQ ID NO: 144886 - DNA, 80 bp, synthetic construct
  source 1..80: mol_type = other DNA
aaagcgaaacagactattgcttccgtttcgagtaactccaaacacactcagaaagttccaacactatcagcaagtgagac

SEQ ID NO: 144887 - DNA, 80 bp, synthetic construct
  source 1..80: mol_type = other DNA
ccctcactcaccagattatgtacatcccgccaggcggccccattcccaaatccaccacggattatgcatggcaaacctct

SEQ ID NO: 144888 - DNA, 80 bp, synthetic construct
  source 1..80: mol_type = other DNA
gaatttacatgaggctcaaacacgtccgtgcctgggtcccgcggccactacggtctgaaccatatgtgctgaagaatttc

SEQ ID NO: 144889 - DNA, 80 bp, synthetic construct
  source 1..80: mol_type = other DNA
ttggaatctattacaaccaggagggtttggagggtcacgaccaatgagaaatacaccacttacgggcttatttacactat

SEQ ID NO: 144890 - DNA, 80 bp, synthetic construct
  source 1..80: mol_type = other DNA
aagtactccaggatcccctgacaccactactcgtacagattgttcaactacaactgcgtcacaaaccaccgtttcaacaa

SEQ ID NO: 144891 - DNA, 80 bp, synthetic construct
  source 1..80: mol_type = other DNA
atcttatggactcaccataactccagcagacaaaggagagaagttcacacccacaacttgggataatctaacattcctga

SEQ ID NO: 144892 - DNA, 80 bp, synthetic construct
  source 1..80: mol_type = other DNA
ttcaaaacacaaagatttaccaaaattaaaaaagaatatcaaacagtataccccacactaacaacacaaacacctcaaac

SEQ ID NO: 144893 - DNA, 80 bp, synthetic construct
  source 1..80: mol_type = other DNA
gggcgtggggacgacgctgatttgacggggaacgctctgcggagattgcctcacgtgcgtaagcgaatcggtaagcgcaa

SEQ ID NO: 144894 - DNA, 80 bp, synthetic construct
  source 1..80: mol_type = other DNA
aagcaatagcaggcaaacataaaaacacagaaaaaacatacgaccaacaccttaaggaggtgtgggaaacattagtatca

SEQ ID NO: 144895 - DNA, 80 bp, synthetic construct
  source 1..80: mol_type = other DNA
cgagccctacctgcagccagcagcacacctagagacccaccatgtggtggtggagacggtggaagagccggtggagacgg

SEQ ID NO: 144896 - DNA, 80 bp, synthetic construct
  source 1..80: mol_type = other DNA
ctatttgaaaacccacagacatgaaccagtctgcctgttgttacatggtaacccaggttgtggtaaatcattggtaacat

SEQ ID NO: 144897 - DNA, 80 bp, synthetic construct
  source 1..80: mol_type = other DNA
tttgtctgtgaaagggttgtatataatgtcagagtctacgtcgtgcacttcctgggcatggtctacatcataatataaga

SEQ ID NO: 144898 - DNA, 80 bp, synthetic construct
  source 1..80: mol_type = other DNA
ctttaacggtccatatcttaaaaacgattatactaatctaatcagtagacagaatccgttaatcgaacatatgaatctta

SEQ ID NO: 144899 - DNA, 80 bp, synthetic construct
  source 1..80: mol_type = other DNA
agatggtaccccatactaaagagacagaaacaagtgatgaatgacatctgcaagacgggaccgtttgcctacagagacga

SEQ ID NO: 144900 - DNA, 80 bp, synthetic construct
  source 1..80: mol_type = other DNA
cggtaactggcagagccacgttgagattcaggacgaagagcccaactgcgagcagccggagcccgcacactggctggaat

SEQ ID NO: 144901 - DNA, 80 bp, synthetic construct
  source 1..80: mol_type = other DNA
tcagctaaagtaacagaactgcaggatgtggccaaagattttctaactataaaagtgttgtccaaagtagttaagatgat

SEQ ID NO: 144902 - DNA, 80 bp, synthetic construct
  source 1..80: mol_type = other DNA
ctttggaaatggtaaaatgccaggaggtagcagcaatgttcccataagaatgagagctaagtggtaccccactttatccc

SEQ ID NO: 144903 - DNA, 80 bp, synthetic construct
  source 1..80: mol_type = other DNA
gataccacgactggagtgcaggcgaacgtcattaacgcaggcatgggggttggagtgggaaacttgaccatattccctca

SEQ ID NO: 144904 - DNA, 80 bp, synthetic construct
  source 1..80: mol_type = other DNA
caccaaagccaaagcgaggaagagggtctccaacaagagacgcagacggtctcccagcagctccagcagcagctcaagga

SEQ ID NO: 144905 - DNA, 80 bp, synthetic construct
  source 1..80: mol_type = other DNA
accacggtaactgcgaactttgtgggtggaacagatatctacgcaatgttacacaatattacacaaacacatcgtgttat

SEQ ID NO: 144906 - DNA, 80 bp, synthetic construct
  source 1..80: mol_type = other DNA
tttcactcgcatgcttcttggtgcggctgtggtgactttgttgggcaccttaatagcattgctcctcgcttttctaacgc

SEQ ID NO: 144907 - DNA, 80 bp, synthetic construct
  source 1..80: mol_type = other DNA
caagtttctagacaacaaaccggaacccacgagaacgccaacattgccacaggtggttccaatataacttacaatcaaat

SEQ ID NO: 144908 - DNA, 80 bp, synthetic construct
  source 1..80: mol_type = other DNA
ccacacatggaccaagcccaccaacagctactacgagtaccacttaggtcttttcagccctatattcataggacccacta

SEQ ID NO: 144909 - DNA, 80 bp, synthetic construct
  source 1..80: mol_type = other DNA
gccacctacgaccccacaagatccaagtgcatgctaaaagacctaccactatacatgcgcttctatggctactgtgactg

SEQ ID NO: 144910 - DNA, 80 bp, synthetic construct
  source 1..80: mol_type = other DNA
caacaacacactgtatggaggggcggcatactacaagcaaaacggtaacaataccaacaatttaccaccagcaaaaatga

SEQ ID NO: 144911 - DNA, 80 bp, synthetic construct
  source 1..80: mol_type = other DNA
gccaggcaagctccagggggacaaccaagacaagacagttgcaaatacacaaccgagcggcccatcaaattccacagaaa

SEQ ID NO: 144912 - DNA, 80 bp, synthetic construct
  source 1..80: mol_type = other DNA
aacttagaagcacgaaaccattaacaattaggtacagctctagagcaaacaccgtatagagccagtacctttgttagtac

SEQ ID NO: 144913 - DNA, 80 bp, synthetic construct
  source 1..80: mol_type = other DNA
gccaggcccaagacatcacccatgaaacgcgcggcaatcggtttgttgtagatggccgagagaatggctgacgggttgat

SEQ ID NO: 144914 - DNA, 80 bp, synthetic construct
  source 1..80: mol_type = other DNA
gagtgtctttggcatagagggcttagaagctttagatctcaatactagtgcaggatttccctacatatccatgggcatta

SEQ ID NO: 144915 - DNA, 80 bp, synthetic construct
  source 1..80: mol_type = other DNA
taaacagagagcatttgagcaatggcgaagtggctaacatgtttgcgggcaccaaatcaagcaacgctaatgacgtgcaa

SEQ ID NO: 144916 - DNA, 80 bp, synthetic construct
  source 1..80: mol_type = other DNA
ccatggacatgtatagaatccctctgaacaccactggtggcacaaacccaatcttttgtctgagcctttccccagcatct

SEQ ID NO: 144917 - DNA, 80 bp, synthetic construct
  source 1..80: mol_type = other DNA
atttcagttaaaatcccccctcccaaactatttgctgacaagtggtacgctcagagcgacttatgcaaagttaacttact

SEQ ID NO: 144918 - DNA, 80 bp, synthetic construct
  source 1..80: mol_type = other DNA
gggcaaccctaattctcctcagatccgtcgagcccgccacccggcggcagctccggaccccccagcaggtaaccaacctc

SEQ ID NO: 144919 - DNA, 80 bp, synthetic construct
  source 1..80: mol_type = other DNA
ccagcacgcccaaaaacccccgtcctcgccggcgccgccccgaaaacatcgccgtcgccgcgcacaagctgcgtggaaac

SEQ ID NO: 144920 - DNA, 80 bp, synthetic construct
  source 1..80: mol_type = other DNA
ccaggccccgaacgcccccttagagccctgccagctctgccggccccggcagaccctgagccggcaccacggcgtggtgg

SEQ ID NO: 144921 - DNA, 80 bp, synthetic construct
  source 1..80: mol_type = other DNA
tgcagagacaagatgaactaatgcaggaggtttttgccataagggttgatgtagcatcacaaccacttgcaacaacatta

SEQ ID NO: 144922 - DNA, 80 bp, synthetic construct
  source 1..80: mol_type = other DNA
acccggccaggcgcatcagggcctgctctagggctataagttccccatagatttttctatacatggaataggcctccttg

SEQ ID NO: 144923 - DNA, 80 bp, synthetic construct
  source 1..80: mol_type = other DNA
ttaaacacaaacagtggctaggtaaaaacaatagtaattttcaaacaggcaagtcgtccctgtttggctttaacacatac

SEQ ID NO: 144924 - DNA, 80 bp, synthetic construct
  source 1..80: mol_type = other DNA
tgccaccctaaacaccccgtaacaatagaagtctacgcacacttagaccaatagggggtgttcatccagttcacccaagg

SEQ ID NO: 144925 - DNA, 80 bp, synthetic construct
  source 1..80: mol_type = other DNA
aaaaacaaccagatgaggatccttttttcaattgcaatggcacacttctaggaaacttgactatttttccccatcaattg

SEQ ID NO: 144926 - DNA, 80 bp, synthetic construct
  source 1..80: mol_type = other DNA
gcgccgccgctggaggaggctacgacgaaggcgacctggacgccctcttcgccgccgtcgaagaagaccgcgaacagtaa

SEQ ID NO: 144927 - DNA, 80 bp, synthetic construct
  source 1..80: mol_type = other DNA
ctaggatgcaccttctggttttacagagacaaaaaaactgactacttagtgcagtatgacatctctgctccctacaagct

SEQ ID NO: 144928 - DNA, 80 bp, synthetic construct
  source 1..80: mol_type = other DNA
cgttgggaaagaacgccgaagtgcctcccgcgacccgcacgtcttctacatacagcgtcctcagcgcttttgtagtgtgg

SEQ ID NO: 144929 - DNA, 80 bp, synthetic construct
  source 1..80: mol_type = other DNA
attaggtatgggatttctctttgccatgagcagaaaagttatttcaatgtccagtcagaatgtcaaaatcaacatgtcca

SEQ ID NO: 144930 - DNA, 80 bp, synthetic construct
  source 1..80: mol_type = other DNA
cccactcacagacaagggcataggcaacagggtctacctacagtggtgcagtgaacagagctgtaaatacagccccacaa

SEQ ID NO: 144931 - DNA, 80 bp, synthetic construct
  source 1..80: mol_type = other DNA
cacaacacaaattaagaactataaaattacatctttaataaactcatttttttacactaaactagtcactattttccact

SEQ ID NO: 144932 - DNA, 80 bp, synthetic construct
  source 1..80: mol_type = other DNA
cacaacacccctcggcaccaacaatgcccttcactcctgatttctccaatgttgacacattccactcaatggcatatgat

SEQ ID NO: 144933 - DNA, 80 bp, synthetic construct
  source 1..80: mol_type = other DNA
cgcagtacgggtcctggcccacgatcaccacgcgcacctgctcgggcggacacagatagctccagcggtgtacgtgctcg

SEQ ID NO: 144934 - DNA, 80 bp, synthetic construct
  source 1..80: mol_type = other DNA
tcacaagtgactcccagtgatacattgcaaacgcggcatgtgcgtaactatcactcacgcacggaatcgtcaatagagaa

SEQ ID NO: 144935 - DNA, 80 bp, synthetic construct
  source 1..80: mol_type = other DNA
catggagatccagggtgtggtaaatctctagctacaacaatagtgtcacgaggtcttgcagcagagggagatatttactc

SEQ ID NO: 144936 - DNA, 80 bp, synthetic construct
  source 1..80: mol_type = other DNA
actatggcgcctttggtcagcaatcaggggcaatctatgtagggaactacagggttgttaataggcatctggccactcac

SEQ ID NO: 144937 - DNA, 80 bp, synthetic construct
  source 1..80: mol_type = other DNA
ggagggggggtgtgcggcgacgtggggtgtgcgtagacggaggtgcgcgggggggcttttgcgacagggacggggcgttg

SEQ ID NO: 144938 - DNA, 80 bp, synthetic construct
  source 1..80: mol_type = other DNA
attgtgaaaattttggttaggattctctgttacatggttctatattgtcacaaaccaaatattctcaccacggcctgcct

SEQ ID NO: 144939 - DNA, 80 bp, synthetic construct
  source 1..80: mol_type = other DNA
accagcaagtttagtgtcaactacaacgttgtgaaacctaatagcaatggcctactggagcagaagcactttcttaaata

SEQ ID NO: 144940 - DNA, 80 bp, synthetic construct
  source 1..80: mol_type = other DNA
aattacaaagatgcacaaggcaaattagatgtgtccaaagcattcaaaccatgtgatgttgaaacaaaaataggaaatgc

SEQ ID NO: 144941 - DNA, 80 bp, synthetic construct
  source 1..80: mol_type = other DNA
gcctacacccattatttcaacagggcctataaataaagtgtacatgtttcccccagagggtcccaaacctatagagggct

SEQ ID NO: 144942 - DNA, 80 bp, synthetic construct
  source 1..80: mol_type = other DNA
cttgagaataatagcatatggtgatgatgttatcatttcatatccctttcctctagatccagagaaaattgcacagcagg

SEQ ID NO: 144943 - DNA, 80 bp, synthetic construct
  source 1..80: mol_type = other DNA
tgtcattgttgtgatccgatcgataataatgtgatgtactgtattatgctgcttatgtataggtataaattaacatgtga

SEQ ID NO: 144944 - DNA, 80 bp, synthetic construct
  source 1..80: mol_type = other DNA
ttgttttcaaagtataaaggaaatgttaattgtgatatgtctgagcatatgaaagttgctgtttcacactactctgcaca

SEQ ID NO: 144945 - DNA, 80 bp, synthetic construct
  source 1..80: mol_type = other DNA
ataacataccgacgctagtttattcaagataaagttttactactaaagctccacttttccaatccatcatgaagaatcgc

SEQ ID NO: 144946 - DNA, 80 bp, synthetic construct
  source 1..80: mol_type = other DNA
acagggaccagatatggcctgaccataacaccagcaaataaaactgaaaactttgaggatttaacttgggacaccatcac

SEQ ID NO: 144947 - DNA, 80 bp, synthetic construct
  source 1..80: mol_type = other DNA
tctacaccacaggaaatgcatgccctagagtgtccatcccttttgttgggatcggtgcagcatactctcacttctatgat

SEQ ID NO: 144948 - DNA, 80 bp, synthetic construct
  source 1..80: mol_type = other DNA
gtgcgtcagcgcggggcggcgtttgcggcgtgtttcgaccagcgctttgtgcgcgctgcctgtgcgtgtcgtcccatggt

SEQ ID NO: 144949 - DNA, 80 bp, synthetic construct
  source 1..80: mol_type = other DNA
gtgtatgttggctgggtacctgctcataagggtattggtggcaatcaagaagtagatcatttggtgagtcagggaattag

SEQ ID NO: 144950 - DNA, 80 bp, synthetic construct
  source 1..80: mol_type = other DNA
gagacccctgtaaacaccaagacggctctgcgccccgtagacaacctcgtgacctacaagtcgctgacccgaaatatcaa

SEQ ID NO: 144951 - DNA, 80 bp, synthetic construct
  source 1..80: mol_type = other DNA
tgcagagacgctgactctttgacccaaaccgctgaataccaaggtgacaaagtggcagacatgattgagaccgcagtgga

SEQ ID NO: 144952 - DNA, 80 bp, synthetic construct
  source 1..80: mol_type = other DNA
tatcatgccacccactacttatgctcacagcaaaacacaaaatagtagtaaaaagcctagaaaccaaaaaaacaggcaaa

SEQ ID NO: 144953 - DNA, 80 bp, synthetic construct
  source 1..80: mol_type = other DNA
cagaggttactttggtaccttgcattgcaggtaagggcaatgacataggccacatagtcatgcagtacatgtatgtacca

SEQ ID NO: 144954 - DNA, 80 bp, synthetic construct
  source 1..80: mol_type = other DNA
agacaatatcacgaaaacaaatcgtgctctccacgatttacatgttttaatgacaccaaaggtcttagactacataacgt

SEQ ID NO: 144955 - DNA, 80 bp, synthetic construct
  source 1..80: mol_type = other DNA
aaatcctacacaacaacctgcactatatactgacagaacaacagatcctataccaaaagcaaatgattaccttaaaggaa

SEQ ID NO: 144956 - DNA, 80 bp, synthetic construct
  source 1..80: mol_type = other DNA
taatgtgaaccagggaactgcaggtagtgccctagttgtctatgagcctaaaccggttgtcacatatgattcaaaactag

SEQ ID NO: 144957 - DNA, 80 bp, synthetic construct
  source 1..80: mol_type = other DNA
gtaacagtaaagatagggccccccaaactatttgaggacaagtggtacagccaacacgagctgtgcaaggtgcccctcgt

SEQ ID NO: 144958 - DNA, 80 bp, synthetic construct
  source 1..80: mol_type = other DNA
ggataaaaccacctgaatccaaagctgacaccacttgggactcggcgtctaatccaagtgttttctaccaacccaagagc

SEQ ID NO: 144959 - DNA, 80 bp, synthetic construct
  source 1..80: mol_type = other DNA
cccagggtgaaatagtcaacaaatgcaaagtacaggatgtgggtctcaagcctatcaacacaccagaacactctaaatta

SEQ ID NO: 144960 - DNA, 80 bp, synthetic construct
  source 1..80: mol_type = other DNA
caaattataatcctgatgaaaatgatgttgaaatctttattaagcctagagataatccaaagattgtcacagcaggacca

SEQ ID NO: 144961 - DNA, 80 bp, synthetic construct
  source 1..80: mol_type = other DNA
gctcgcgcgcccacagcgcggcgcgcgggtgcaggtgcagcgcgtcccagcgcggccgctcccactgctcgcggtccagc

SEQ ID NO: 144962 - DNA, 80 bp, synthetic construct
  source 1..80: mol_type = other DNA
tatggagaagtgcactcacattcccaaagaaaggccatggaatgttatcacaattctttgcctattttactggggaattg

SEQ ID NO: 144963 - DNA, 80 bp, synthetic construct
  source 1..80: mol_type = other DNA
gccccggcgccgctggaggaggtggagaacccgtcgcagacgcagactaccgaagcgaagacctagacgacctgttcgcc

SEQ ID NO: 144964 - DNA, 80 bp, synthetic construct
  source 1..80: mol_type = other DNA
aaagatttgggtctcaatacaataaacacacccagtaagacaaaactacaccccagtgtcttttatgatgtatttccagg

SEQ ID NO: 144965 - DNA, 80 bp, synthetic construct
  source 1..80: mol_type = other DNA
atagcatccattgatattttacaaaattattatagtatcacctcagctactataagctgcttcatgtacaaagatgagat

SEQ ID NO: 144966 - DNA, 80 bp, synthetic construct
  source 1..80: mol_type = other DNA
gttgatcctggtcgtgatggaccttggcaatccactctaatcggtcagctgtgtagatattacacccaatggtcgggctc

SEQ ID NO: 144967 - DNA, 80 bp, synthetic construct
  source 1..80: mol_type = other DNA
aacgttagaggacagctttgttgcatgggaaatcaactttcaagagcatgcccaagtcagaaagaaatttgaaatgttca

SEQ ID NO: 144968 - DNA, 80 bp, synthetic construct
  source 1..80: mol_type = other DNA
ctacaattactgtgaataacaacctagattatgatgaaaatcactttgatcagtggcagataactatacaggaaatggca

SEQ ID NO: 144969 - DNA, 80 bp, synthetic construct
  source 1..80: mol_type = other DNA
aggagtgcgacccttctctctgttcaccccccctgcccggtagcaacgccctcggagtccggcgctacgcgctgcgcgct

SEQ ID NO: 144970 - DNA, 80 bp, synthetic construct
  source 1..80: mol_type = other DNA
ttgtcaaccatcacattaggtcggaatcttcaatagagaattttctgagcagatcagcatgtgtctacattgacgtgtat

SEQ ID NO: 144971 - DNA, 80 bp, synthetic construct
  source 1..80: mol_type = other DNA
agcgcagggtattgactcaattgccagatgttcttgcagtgccggcgtgtactattgtgagtccagaagaaagtactacc

SEQ ID NO: 144972 - DNA, 80 bp, synthetic construct
  source 1..80: mol_type = other DNA
tgtgttcatgtagttgaaataaaaaacaaagaaccccaggatgtaaatcataaaagtgaacttttgttcaacgattggaa

SEQ ID NO: 144973 - DNA, 80 bp, synthetic construct
  source 1..80: mol_type = other DNA
aattttcctcacggaatgctagatttagaagagattgctgcaaattcaaaggagtttccaaatatgtcagagactgactt

SEQ ID NO: 144974 - DNA, 80 bp, synthetic construct
  source 1..80: mol_type = other DNA
acgctgggaacgtggactcgcggacccgggctgagggacgggggtggcgtgggtgtttgcggcgaggacggttgcctttt

SEQ ID NO: 144975 - DNA, 80 bp, synthetic construct
  source 1..80: mol_type = other DNA
acagggagacaaacagcgctcttcctattaaagttaattgccagatggccactaacccatttacatacagacaatggagc

SEQ ID NO: 144976 - DNA, 80 bp, synthetic construct
  source 1..80: mol_type = other DNA
aggatgatttcacagaaggtggatacatatgtgccttctatcaaacagccataattgttcccccaaataccccagtagac

SEQ ID NO: 144977 - DNA, 80 bp, synthetic construct
  source 1..80: mol_type = other DNA
tgtgccatctgggatatgtggtacatcagtattcaacaccatgctaaacaatatcatcattcgaactctagtgctgcaaa

SEQ ID NO: 144978 - DNA, 80 bp, synthetic construct
  source 1..80: mol_type = other DNA
acagcaattatctatacgccacataccatccagaaaacattgaaaccaaattatataaaattagagaaaactactttcag

SEQ ID NO: 144979 - DNA, 80 bp, synthetic construct
  source 1..80: mol_type = other DNA
gaattccccacagcataccaagatgtaacctacaacccactaactgacagaggcataggcaacagaatctggtaccagta

SEQ ID NO: 144980 - DNA, 80 bp, synthetic construct
  source 1..80: mol_type = other DNA
tttatcacttgacaaagaaatagatccagagaaactgcagagtgtcatggcagattcatttggtgctgaagtgactggtt

SEQ ID NO: 144981 - DNA, 80 bp, synthetic construct
  source 1..80: mol_type = other DNA
acgcgatggtcgtcatctggctctcctgtgtgacccctcactttgtacagacttttggcaatgggagcacattccccccg

SEQ ID NO: 144982 - DNA, 80 bp, synthetic construct
  source 1..80: mol_type = other DNA
gatgtccataaccccagacttactaaagtcaaactatgaaagtttttttagtgtattaaacactaaatttagtagcagcc

SEQ ID NO: 144983 - DNA, 80 bp, synthetic construct
  source 1..80: mol_type = other DNA
tctttagttcgaacgctattaaaagaatgcaaccacaacaagaatttgatgagtcttttacagtcaaacctaagcgaccc

SEQ ID NO: 144984 - DNA, 80 bp, synthetic construct
  source 1..80: mol_type = other DNA
gtaaatgttttaaatacattagcaactccttattgttttaaattcccccagtttgaaaaaataccaggaacagacacaca

SEQ ID NO: 144985 - DNA, 80 bp, synthetic construct
  source 1..80: mol_type = other DNA
ctaccagaccatgatggagccagagaagccattagaaaaaaactacacccagaatccctaacaggacattctcccaatca

SEQ ID NO: 144986 - DNA, 80 bp, synthetic construct
  source 1..80: mol_type = other DNA
tgtcataccggtctgtccattaagtggtgggactggaaataccaacacctatgttccaatcaccatatcaattgctccta

SEQ ID NO: 144987 - DNA, 80 bp, synthetic construct
  source 1..80: mol_type = other DNA
ctcatgagagtgcaataaatgctaacaatgggggtgtaattaagtatttcaacataaattactacagagattctgctagc

SEQ ID NO: 144988 - DNA, 80 bp, synthetic construct
  source 1..80: mol_type = other DNA
aggtcatattttaatgagcaacaagggaaaatagtctcaacatcagatgttaaagacaaaaacctatatagtatacacac

SEQ ID NO: 144989 - DNA, 80 bp, synthetic construct
  source 1..80: mol_type = other DNA
caacccggcgcttctagtgtgttgcaacgcacattacttggggaaattctgaactattacacacattggtctggcagttt

SEQ ID NO: 144990 - DNA, 80 bp, synthetic construct
  source 1..80: mol_type = other DNA
ctggtacaggagagatttagagtgcgagggtaccagatgttacatgagaacttgtaatacatcagtgatccaagagtcat

SEQ ID NO: 144991 - DNA, 80 bp, synthetic construct
  source 1..80: mol_type = other DNA
cttaattttgcaaaacaaaagaacaaaggctagttattctattaacaccgtggtgcaacaactacggcaggagaagaaaa

SEQ ID NO: 144992 - DNA, 80 bp, synthetic construct
  source 1..80: mol_type = other DNA
tgctgtaaacccggaagcaatcctcccacgtggttggtcacgtgactgcaacgtcacggccgccattttatatcacaaaa

SEQ ID NO: 144993 - DNA, 80 bp, synthetic construct
  source 1..80: mol_type = other DNA
tttgtttcacagtacacgcccagtaccaccacagatgaagcgcgtaagttctgtccagttgattacttgtttgggtcagg

SEQ ID NO: 144994 - DNA, 80 bp, synthetic construct
  source 1..80: mol_type = other DNA
ataagagttgggcaaaccccgggggccgcgctctcccacccagccccgcttctcacctgtgctagtggctcctctgaagg

SEQ ID NO: 144995 - DNA, 80 bp, synthetic construct
  source 1..80: mol_type = other DNA
ggattaagtcaatcaagcacagcaagctagagagggaattaaactatgcccaatattgcctcaactgcttgggtagctta

SEQ ID NO: 144996 - DNA, 80 bp, synthetic construct
  source 1..80: mol_type = other DNA
tatctatgaacatcataataatcacggcaattacaatgataaaaattttaatctgattatatatcctagaaataatacta

SEQ ID NO: 144997 - DNA, 80 bp, synthetic construct
  source 1..80: mol_type = other DNA
acaaatactcatcaggtggctacataacactatggagacaaacagactttgtccccggctcaaccaatggtgttggatac

SEQ ID NO: 144998 - DNA, 80 bp, synthetic construct
  source 1..80: mol_type = other DNA
gcaaagagacctagactattcccccccacagatcaagaagggctccaaaggcaagaaagaagctccgattcggaggaaga

SEQ ID NO: 144999 - DNA, 80 bp, synthetic construct
  source 1..80: mol_type = other DNA
caacaaacgcaaccattagtaacacatcattcgtaaattgcgaaatgtggaacactacgcttaaaaataatacaaaagac

SEQ ID NO: 145000 - DNA, 80 bp, synthetic construct
  source 1..80: mol_type = other DNA
tggtatgggatgtaggtttgcagtctacagtatcattggttgtaccatggatcagtgccagccaatacagattcactaca

SEQ ID NO: 145001 - DNA, 80 bp, synthetic construct
  source 1..80: mol_type = other DNA
caggccgttaggcccatgagcttctgcagcacagacacaaacccttgtactgcgcttgttcccacaatagcatggcctct

SEQ ID NO: 145002 - DNA, 80 bp, synthetic construct
  source 1..80: mol_type = other DNA
attgttttctttttttacagaaagatacttttttcatgagcaattcctcgcccggcgccggcatgccgaggtggggccac

SEQ ID NO: 145003 - DNA, 80 bp, synthetic construct
  source 1..80: mol_type = other DNA
cgaaggcgactagcaataaggcaggtgggttcagacgcttaaagtgtgttgtacatattcttttctaacctgtgttctac

SEQ ID NO: 145004 - DNA, 80 bp, synthetic construct
  source 1..80: mol_type = other DNA
tgcgggacctccgcctactccccgagcacccccgataagagccgtgcccgctttaccggcccctgaatcatggtctggtg

SEQ ID NO: 145005 - DNA, 80 bp, synthetic construct
  source 1..80: mol_type = other DNA
tctccagtttcatcacacacatctgataacgtgtgccatcgttgacgacgaagcgtagcagcttggtctgcttgggcacc

SEQ ID NO: 145006 - DNA, 80 bp, synthetic construct
  source 1..80: mol_type = other DNA
cacagatacagccctttggtggcagcttcagtaccaccacatggagcttaaaagtactctatgatgagcaccaaaaattt

SEQ ID NO: 145007 - DNA, 80 bp, synthetic construct
  source 1..80: mol_type = other DNA
attttctaggccgttgactgttcacttgtcggtgtctacctcttaaggtcactaagcactccgagcgtcagcgaggagtg

SEQ ID NO: 145008 - DNA, 80 bp, synthetic construct
  source 1..80: mol_type = other DNA
ccagggggctcagtgcctagcaatgtggaaagttatgcgtggcaaacatcaactaatcctagtgtgttctggactgaggg

SEQ ID NO: 145009 - DNA, 80 bp, synthetic construct
  source 1..80: mol_type = other DNA
gtgtggcccgcatttacttcaagccaaaacatgtgagggcctgggtgcctagaccgccacggttgtgcccttacatcaac

SEQ ID NO: 145010 - DNA, 80 bp, synthetic construct
  source 1..80: mol_type = other DNA
cccgcagcccggtccccagcgcgcccaaaaagcgtcgtagagagacccgtagagacattcctcagcgcggtgaaaccccg

SEQ ID NO: 145011 - DNA, 80 bp, synthetic construct
  source 1..80: mol_type = other DNA
tggtgcacctgtacctaagaaaagagatgattacacatggcaatctggaacaaatgcctcagttttctggcaacacggac

SEQ ID NO: 145012 - DNA, 80 bp, synthetic construct
  source 1..80: mol_type = other DNA
tggaatccttcttcgcacgtggagcgtgtgttaccatcatgactgtagaaaactttaatgcaacggaacaacaggacaag

SEQ ID NO: 145013 - DNA, 80 bp, synthetic construct
  source 1..80: mol_type = other DNA
aaaacaatgagtactacacacaatccaatgaagatatttcaaacatcaaatggcaatgtacaaaaaaccatacgttaatt

SEQ ID NO: 145014 - DNA, 80 bp, synthetic construct
  source 1..80: mol_type = other DNA
tcaactcccatggagcgcttacgtgtacccgtgcaagtgcaaactcaatctggtgagttgtgtgcagcattcaaagctga

SEQ ID NO: 145015 - DNA, 80 bp, synthetic construct
  source 1..80: mol_type = other DNA
tttgcaattatcacctagccactcaggaggatatggagcatgcagtggcggtgatgtgggaccgagacctcatggtggtg

SEQ ID NO: 145016 - DNA, 80 bp, synthetic construct
  source 1..80: mol_type = other DNA
ttacactagagaaaatgctcaagacttaaaagacctttataaagaactcttttgtaaaaaaagcagcagtcactactggc

SEQ ID NO: 145017 - DNA, 80 bp, synthetic construct
  source 1..80: mol_type = other DNA
aatcaaaccactcaaactttacaggagttaaaaaacaaaattgtttataatgcagagaattacttaaaaaaagtaacaca

SEQ ID NO: 145018 - DNA, 80 bp, synthetic construct
  source 1..80: mol_type = other DNA
gggatgagctgctccacacccgcgctgcctccctgttatacaatagcatgacagccaaggctgaccgaccaagggccacc

SEQ ID NO: 145019 - DNA, 80 bp, synthetic construct
  source 1..80: mol_type = other DNA
atgtttgccagggccactgttttctaacaccgatcaccgccaccattaccacccgttgaactccacacccgggagccgcc

SEQ ID NO: 145020 - DNA, 80 bp, synthetic construct
  source 1..80: mol_type = other DNA
ctggctaacaacaccaagctccactaaccaatgtcacattaacatgacatacagcaagggcaaatacgaagagtacgagt

SEQ ID NO: 145021 - DNA, 80 bp, synthetic construct
  source 1..80: mol_type = other DNA
ttttctttccgtcttgcggatgaagatgttgcgatgcggttgttgttggtgttgctatacaccgagagagatgatctttt

SEQ ID NO: 145022 - DNA, 80 bp, synthetic construct
  source 1..80: mol_type = other DNA
aacagaggcttttgatgcatgggataatacagtgacagatcaggcaacaaaggatgtgtggagtctctttgagacctcaa

SEQ ID NO: 145023 - DNA, 80 bp, synthetic construct
  source 1..80: mol_type = other DNA
cgtttctaccctcccctttcccgtaggtaaaaacccacgtttatcacacacgttgtttttacctgaaacccgcgcagccc

SEQ ID NO: 145024 - DNA, 80 bp, synthetic construct
  source 1..80: mol_type = other DNA
tcaccatgtgcgatgccagaatatgacgtcacaccagtcttgcgcattccaggcgaagtgtccaacctcatggagattgc

SEQ ID NO: 145025 - DNA, 80 bp, synthetic construct
  source 1..80: mol_type = other DNA
agcaaggcataactgactatgtgagtagactaggaaatgcatttggtgctggatttagtgctgagattgctagcagaatt

SEQ ID NO: 145026 - DNA, 80 bp, synthetic construct
  source 1..80: mol_type = other DNA
cagaggcccagtttagagtacccacacacagtccagatggtgaagtcaatacacataaagacaattggactaagatgtgg

SEQ ID NO: 145027 - DNA, 80 bp, synthetic construct
  source 1..80: mol_type = other DNA
gagcacggaagtgggccgtagattgtaccttccaccatacaatctattggagcgtgcttggatcgacaagttcatttaaa

SEQ ID NO: 145028 - DNA, 80 bp, synthetic construct
  source 1..80: mol_type = other DNA
atcaccttgccatagcccacctctgagaccttctgcaggtaggcgcgtttgcgcacgttcacctcgcgggtgacgttgtg

SEQ ID NO: 145029 - DNA, 80 bp, synthetic construct
  source 1..80: mol_type = other DNA
aactacacccaccctggtgaggcaggaagagatgtgggccaacaaaggacaaataatgaaaaacaacccagtgatgacaa

SEQ ID NO: 145030 - DNA, 80 bp, synthetic construct
  source 1..80: mol_type = other DNA
gcccctccaaaaagccgaaaagatgcaatgctcgggactcacatcatttgggacctgggcttacaatccagttgcacaat

SEQ ID NO: 145031 - DNA, 80 bp, synthetic construct
  source 1..80: mol_type = other DNA
accattctgggggcatcaaaacgcgggaggggactgagagcacgaaaacaattagttatactgtgaaatcatgtaaaggc

SEQ ID NO: 145032 - DNA, 80 bp, synthetic construct
  source 1..80: mol_type = other DNA
caactactattccaattactatttctatcagtcctatgtttgctgagttctctggtgcacgtgcaaagagtcaaggttta

SEQ ID NO: 145033 - DNA, 80 bp, synthetic construct
  source 1..80: mol_type = other DNA
ccaccaacaaaactggatgaatgacttggaccagtgtgggccgttctcgtacagaggggacttaaaactagctactctaa

SEQ ID NO: 145034 - DNA, 80 bp, synthetic construct
  source 1..80: mol_type = other DNA
gtgattgcaaccacaaacaagtctgacttctccagcacggtccttcaagactctggagccttaaagagaagattcccata

SEQ ID NO: 145035 - DNA, 80 bp, synthetic construct
  source 1..80: mol_type = other DNA
gttctagctaatgcattatcacacccccgtgttttcagaaaattttgggattctggtttattatcacccaattatggacc

SEQ ID NO: 145036 - DNA, 80 bp, synthetic construct
  source 1..80: mol_type = other DNA
ccaggcagcacacgaagcctgcctcatccttgaccattagcctgggcatgcgtgaactgccagcgtcctgaggctgctgc

SEQ ID NO: 145037 - DNA, 80 bp, synthetic construct
  source 1..80: mol_type = other DNA
atattcacagagcgggtgggactcagagctgataccagaactaccgggcacggtatataaactgccaaattactgctact

SEQ ID NO: 145038 - DNA, 80 bp, synthetic construct
  source 1..80: mol_type = other DNA
tgtgcgaaacccctgcaaaggaggctccggttcccgtagagagcctcgctcaatacaagcagctgacccgaaatacatca

SEQ ID NO: 145039 - DNA, 80 bp, synthetic construct
  source 1..80: mol_type = other DNA
atccagttaccctcggtagtggacatggttatcatccaggacaaaaagtacactggtataaccagtcatgcgtcggcatc

SEQ ID NO: 145040 - DNA, 80 bp, synthetic construct
  source 1..80: mol_type = other DNA
gcacatccctgtccccaacgtaacccccgtccccgccggcgccaccccctgtccccagcgcaatgaaccctcgcgctcgc

SEQ ID NO: 145041 - DNA, 80 bp, synthetic construct
  source 1..80: mol_type = other DNA
tctctcaaaccggagtgtatggatacacaacactgaactcaatgggcaagctgtacataagacacgtgaacgcgagtaca

SEQ ID NO: 145042 - DNA, 80 bp, synthetic construct
  source 1..80: mol_type = other DNA
gtagtttactccaattggacttccagaacccaagaacttatgatactgatgtagacatttatgacaatggcccaaaatca

SEQ ID NO: 145043 - DNA, 80 bp, synthetic construct
  source 1..80: mol_type = other DNA
aaagtaatcaaatggctggtgcgcattattagtgcccttactatcatggtcaggaatagtgccgatacacccacaatctt

SEQ ID NO: 145044 - DNA, 80 bp, synthetic construct
  source 1..80: mol_type = other DNA
gttgttcctgaacaccaattagcttacattggaggctccaatgcacaggtcagttacaagcacactcacccaggtgagcg

SEQ ID NO: 145045 - DNA, 80 bp, synthetic construct
  source 1..80: mol_type = other DNA
tgtcatctgggatctaggcttgcagtcttcatgcactatagtggtgccgtggatatcatcagggttttatcgccgcacca

SEQ ID NO: 145046 - DNA, 80 bp, synthetic construct
  source 1..80: mol_type = other DNA
actaattatgaagctcttataacttattttcaacaaaagtggagttatcaacaaggtactaaaaaaaaaggaccactagg

SEQ ID NO: 145047 - DNA, 80 bp, synthetic construct
  source 1..80: mol_type = other DNA
aaaatatgtggacaccgttctgaatgaggtgttagttgtcccaaatatcaatgaaagccacccaagtacatcaaatgctg

SEQ ID NO: 145048 - DNA, 80 bp, synthetic construct
  source 1..80: mol_type = other DNA
cgcacccgtggactggttgctgggatgtggggtcatggcaggcaatataaccatctacccccaccagatcatcaatttgc

SEQ ID NO: 145049 - DNA, 80 bp, synthetic construct
  source 1..80: mol_type = other DNA
ccactcggatgacaagaccccccagcaggagagtttcgggggcgggctcagtaccgtgagctttagcctcaaggtgctct

SEQ ID NO: 145050 - DNA, 80 bp, synthetic construct
  source 1..80: mol_type = other DNA
cccaggcacttgaggatcaagcggggaccaatttagagatcaccatagtgaaactcaagagaaatgagaaattcagagat

SEQ ID NO: 145051 - DNA, 80 bp, synthetic construct
  source 1..80: mol_type = other DNA
tgttaacaacgtggacgaagacaaagtcaagagcatagaggcctataggatacctatgaacgtggtgggtgactctgaga

SEQ ID NO: 145052 - DNA, 80 bp, synthetic construct
  source 1..80: mol_type = other DNA
ctagtacacgacccaccaaaccaaaaccaaggctttgtattctatgacacacaatttggagacggtaaaatgccagaggg

SEQ ID NO: 145053 - DNA, 80 bp, synthetic construct
  source 1..80: mol_type = other DNA
aatggcgacggggcagacgcagacggactcaccatataagaaggcgcacttccgaatggctgagttttccacgcccgtcc

SEQ ID NO: 145054 - DNA, 80 bp, synthetic construct
  source 1..80: mol_type = other DNA
cgtagctctgcgagttggtgtcgtagcggtgtaacaccaacgtgttggggtccagacgctcccacgcgccctcgtgcggg

SEQ ID NO: 145055 - DNA, 80 bp, synthetic construct
  source 1..80: mol_type = other DNA
actgcgcaggaagcttgaaatgttcacctattccagatttgacatcgagcttacctttgtcatcaccgagcggttcgcag

SEQ ID NO: 145056 - DNA, 80 bp, synthetic construct
  source 1..80: mol_type = other DNA
aagaaatgccagattcataaaaattaaagcagaataccaaacagtataccctacattaacaacacaaacaccacaaaact

SEQ ID NO: 145057 - DNA, 80 bp, synthetic construct
  source 1..80: mol_type = other DNA
aaatgaccctgtcagtaccattctactcttcaaagcccttgaggacaatcagggattcagctgctctagggtatgtgatg

SEQ ID NO: 145058 - DNA, 80 bp, synthetic construct
  source 1..80: mol_type = other DNA
ctacaaggagacgtggaagaagctgtaaacagagcagtagctcgggtggcggacacaatgcccacggggcctagaaactc

SEQ ID NO: 145059 - DNA, 80 bp, synthetic construct
  source 1..80: mol_type = other DNA
cgcgtgacaagcacaatacgtgtctactttaaaccaaagcacgtgagagcttgggtcccacgcccgccacgcctctgcca

SEQ ID NO: 145060 - DNA, 80 bp, synthetic construct
  source 1..80: mol_type = other DNA
cttaaaaatgatgaacccaccaccagcaatgcaaaggacctgtttgccacctggaagatcagctacttgaatgcatacca

SEQ ID NO: 145061 - DNA, 80 bp, synthetic construct
  source 1..80: mol_type = other DNA
agaccatcctctcctatgtagagcgacgtacaccgcggcacctgcggcgtcggcgtgtgggtggccacccgcatgagccc

SEQ ID NO: 145062 - DNA, 80 bp, synthetic construct
  source 1..80: mol_type = other DNA
cagatctgtaaataaattaaacacttttagcacagaaggagcctacagccacccacaaataaaaaaacatacagaaaata

SEQ ID NO: 145063 - DNA, 80 bp, synthetic construct
  source 1..80: mol_type = other DNA
gcgcgtgcgcatgttctatgccgtcttcactacgttgggtctgcgctgccccgataatcggctctcaggcgcgcagacgc

SEQ ID NO: 145064 - DNA, 80 bp, synthetic construct
  source 1..80: mol_type = other DNA
acaagtctaagccagacaagggctacgtattttatgacaccctttttggtaacggaaagatgccagacggttccggacac

SEQ ID NO: 145065 - DNA, 80 bp, synthetic construct
  source 1..80: mol_type = other DNA
cttcgacgagcaccaaaaacacagaaacaggtggggctaccccaacacccagctagacctggccaggtacaagggctgca

SEQ ID NO: 145066 - DNA, 80 bp, synthetic construct
  source 1..80: mol_type = other DNA
agaaaaagaaaaaaactaataccaagctttcaaacaaagccaaaaggtagaagtacaattaaatttaaagtaccaccccc

SEQ ID NO: 145067 - DNA, 80 bp, synthetic construct
  source 1..80: mol_type = other DNA
taaacccaggcgctgagtccgtgatgaacagaactctcctgggagaaattctcaattattacactcattggtcggggagt

SEQ ID NO: 145068 - DNA, 80 bp, synthetic construct
  source 1..80: mol_type = other DNA
ctggcccttctccggcatataagtaactgcacttccgaatggctgagttttccacgcccgtccgcagcggtgaagccacg

SEQ ID NO: 145069 - DNA, 80 bp, synthetic construct
  source 1..80: mol_type = other DNA
ctaccggagctccttgccttgataatccctgtaaacacacaccacctaagaacaaggcatcgttaacctttggtggaacc

SEQ ID NO: 145070 - DNA, 80 bp, synthetic construct
  source 1..80: mol_type = other DNA
ctgtctcattcaaagatcgaaacacatgtcaaagctatgctttatgtcagatttataacaaagtgttggaggaagacaaa

SEQ ID NO: 145071 - DNA, 80 bp, synthetic construct
  source 1..80: mol_type = other DNA
gcgacgagcagctgagcacggcgcagaacctgtggactgatctggtcacgcgccacaaaatgagcggcggactggacgtg

SEQ ID NO: 145072 - DNA, 80 bp, synthetic construct
  source 1..80: mol_type = other DNA
cagcccagttaatgactttggatattaacccacagcctttatctcttgaggaaagtgtgtatggaattgaaggattggag

SEQ ID NO: 145073 - DNA, 80 bp, synthetic construct
  source 1..80: mol_type = other DNA
atacttggtcagggcaggaagtaactagcaaaacagctgagactgcagggactttccagaagggactgtaaccaggggag

SEQ ID NO: 145074 - DNA, 80 bp, synthetic construct
  source 1..80: mol_type = other DNA
cacaggagacacctaccatgagctttgtagaacccttactaaccagcacccacagagagatagcatactaccatggctgt

SEQ ID NO: 145075 - DNA, 80 bp, synthetic construct
  source 1..80: mol_type = other DNA
gaaggaaaactacaaggagatgaggtgaagcatgaacccacagtggccaacacaacagcaagtggaccatcaaattcaca

SEQ ID NO: 145076 - DNA, 80 bp, synthetic construct
  source 1..80: mol_type = other DNA
acacaagtgctgggtacgtcacatgctggtatcagacaggcctcattgttccaccaggcgcacctccgtcgtgcactata

SEQ ID NO: 145077 - DNA, 80 bp, synthetic construct
  source 1..80: mol_type = other DNA
tagagtacatattggttttaaattcaattagacatggggtcacaggtatccacgcaacggtccgggtcgcacgaaaactc

SEQ ID NO: 145078 - DNA, 80 bp, synthetic construct
  source 1..80: mol_type = other DNA
tttatggggatgatgtcatcttatcccttgacaaggaaatagaaccagagagactgcaaagtatcatggcagaatcattt

SEQ ID NO: 145079 - DNA, 80 bp, synthetic construct
  source 1..80: mol_type = other DNA
ccccccgcgatccgtagagcccggcacccggccgcggctccggaccgcgcctcggaggccccggcgctgccatggcatgg

SEQ ID NO: 145080 - DNA, 80 bp, synthetic construct
  source 1..80: mol_type = other DNA
cgttggactcactagacacaccaaccacctctacatcagggacacagatggggaaggtcttaaaactttcatcaacgata

SEQ ID NO: 145081 - DNA, 80 bp, synthetic construct
  source 1..80: mol_type = other DNA
tacaagaataccaaacaacacaagcacaacacggtctattcacacactggacaggcatatatggacctccattcttagac

SEQ ID NO: 145082 - DNA, 80 bp, synthetic construct
  source 1..80: mol_type = other DNA
tcaggtacccatcagaatgagaagcaagtggtaccccaccctgttccaccaaaaagaagtgttagaagccatagcccagg

SEQ ID NO: 145083 - DNA, 80 bp, synthetic construct
  source 1..80: mol_type = other DNA
ggccaacatttgtgactctgataacattactcttataaaccttattcaaggtcttactgaggatgacaagatattattat

SEQ ID NO: 145084 - DNA, 80 bp, synthetic construct
  source 1..80: mol_type = other DNA
tgataaaggaaaacctttttcttcagactatgttttagcaagtactaatcataacctcttacacccacctactataacat

SEQ ID NO: 145085 - DNA, 80 bp, synthetic construct
  source 1..80: mol_type = other DNA
caataaccacacaggagtgtgccaatgtggtggtggggtatggtaggtggcctacgtatcttagggacgatgaggcgacc

SEQ ID NO: 145086 - DNA, 80 bp, synthetic construct
  source 1..80: mol_type = other DNA
tgacaccttcaaacaacttaattacagcaatgtcacattcttgaaaagaggatttaagcaagatgaaaaatatcagtttc

SEQ ID NO: 145087 - DNA, 80 bp, synthetic construct
  source 1..80: mol_type = other DNA
agtgagtgaggccagacttcaccatagggcctttatcttcttgccattggtccgtataggggtgcggcgtaggcttcggg

SEQ ID NO: 145088 - DNA, 80 bp, synthetic construct
  source 1..80: mol_type = other DNA
tactttcgtgataacaagtcagcaagatcaaggaacagacttgtcccaagatatgccagtacttacccaccaaatcatgt

SEQ ID NO: 145089 - DNA, 80 bp, synthetic construct
  source 1..80: mol_type = other DNA
actgtgctacaaaatggcggcggagcacttccggcttgccaaaaatggaggtcaattacttccaggttaaaggttagcta

SEQ ID NO: 145090 - DNA, 80 bp, synthetic construct
  source 1..80: mol_type = other DNA
tgtgtctgtgatagcttcagtactggaaagtttctcgtggcatatacaccacctggtggtaggctgcctgccgaccgcaa

SEQ ID NO: 145091 - DNA, 80 bp, synthetic construct
  source 1..80: mol_type = other DNA
acggcgacgccggcccacgccgtccaccgggtagaaccccgcgggccgccgggcgcccctccgggtagcggcaacaacag

SEQ ID NO: 145092 - DNA, 80 bp, synthetic construct
  source 1..80: mol_type = other DNA
gcaccctgctggtggttatgataccagaacatcaattagcagccgcaagcactggcaatgttgcagcaggatacaatttc

SEQ ID NO: 145093 - DNA, 80 bp, synthetic construct
  source 1..80: mol_type = other DNA
agtgaacagagctgtaaatacagccccacaaagagcaagtgccccatagtagacatgccactgtttatagccttctatgg

SEQ ID NO: 145094 - DNA, 80 bp, synthetic construct
  source 1..80: mol_type = other DNA
actatgttaaaacagattcgtcagacttagggcaactaaaagtctatgtttggacacccttgtccataccatcaggttct

SEQ ID NO: 145095 - DNA, 80 bp, synthetic construct
  source 1..80: mol_type = other DNA
gccaaccaagttgatgtgaccattttaggtagcctattacaattggattttcaaaatcccagagtctatggccaagatgt

SEQ ID NO: 145096 - DNA, 80 bp, synthetic construct
  source 1..80: mol_type = other DNA
gttggatctcacgaaagtggaatttcagcttcatcaggctcagtgattaaatattttaatatcaattactataaagactc

SEQ ID NO: 145097 - DNA, 80 bp, synthetic construct
  source 1..80: mol_type = other DNA
acaggaacacgtagtagaccctaaatgggaaacttacaaacaaccaaacattaacgaaagtggcaacaataaatacctac

SEQ ID NO: 145098 - DNA, 80 bp, synthetic construct
  source 1..80: mol_type = other DNA
catctctcgtaggtttttcttagatctagatttggtgattaggcaaggctacaaaaccccaaatggtctgcttgacacag

SEQ ID NO: 145099 - DNA, 80 bp, synthetic construct
  source 1..80: mol_type = other DNA
ccagctgcaccctgcagagaaaacacctcctgctatgagctactggcaaccacccaccaggaatgtaccgggacaagagc

SEQ ID NO: 145100 - DNA, 80 bp, synthetic construct
  source 1..80: mol_type = other DNA
taccacgtggtgtgtacgtcacacgccgccattttgaatcacaaaatggcggcgtgtgacgtacacaccacgtggtaagt

SEQ ID NO: 145101 - DNA, 80 bp, synthetic construct
  source 1..80: mol_type = other DNA
atgtcaacagcatggaagcctatcgcattcctgttcaagtaggaaaggtgggtgaacaagtgttcgggtttcaacttgaa

SEQ ID NO: 145102 - DNA, 80 bp, synthetic construct
  source 1..80: mol_type = other DNA
cttaacccatttagtgacgaaactggatatggggctcaaactatgaaattggcttacttagacaggggattctataaaca

SEQ ID NO: 145103 - DNA, 80 bp, synthetic construct
  source 1..80: mol_type = other DNA
attgaaaatctgcgttttcgctcgcgacgcgccttctggcagatccagagtctgctgggctacatctccgagcacgttac

SEQ ID NO: 145104 - DNA, 80 bp, synthetic construct
  source 1..80: mol_type = other DNA
aagcatgcaatgctctcagaggtctagattggctatcacaaaagatagacaaatttattaactggcttaaaaccaaaata

SEQ ID NO: 145105 - DNA, 80 bp, synthetic construct
  source 1..80: mol_type = other DNA
cactcaaaagggagtgtatggttacaacacgctgaataaaatgggacaattgttcgttagacatgtaaacaaagagactc

SEQ ID NO: 145106 - DNA, 80 bp, synthetic construct
  source 1..80: mol_type = other DNA
cgcaaaaggcccccggccccgcaacaccccgggccagcgcaacccccggccccgcaacaccccgggccagcgcaaccgcc

SEQ ID NO: 145107 - DNA, 80 bp, synthetic construct
  source 1..80: mol_type = other DNA
acgtggtgttgtgctctgttattccggtaactttgcacgccaattttataaccccctaccccatgtaacttagaagtttt

SEQ ID NO: 145108 - DNA, 80 bp, synthetic construct
  source 1..80: mol_type = other DNA
gcaaccagacgtggcaacatgtaggttttacactttggaatcagtcaactggggtgtgaactcaaacggctggtggtgga

SEQ ID NO: 145109 - DNA, 80 bp, synthetic construct
  source 1..80: mol_type = other DNA
agaaaagacacggacccgtacgagtcggggcaagaagaaaactcactttcaggacacctccagctccagccctgggtcca

SEQ ID NO: 145110 - DNA, 80 bp, synthetic construct
  source 1..80: mol_type = other DNA
acttgtcaaaactgaaacacctagacacacttgagaaccaggtaaccaccctgcatcaatcgtgccctagtcaagaagac

SEQ ID NO: 145111 - DNA, 80 bp, synthetic construct
  source 1..80: mol_type = other DNA
aaatacagctgcccatcataccacccaggtatgatgatgcagagacgcaagaaaatactagtaccaagctttcaaacaaa

SEQ ID NO: 145112 - DNA, 80 bp, synthetic construct
  source 1..80: mol_type = other DNA
cggcgcattccaaggaggtacctgcactcactgcagtcgagactggagccaccaatcctctgacaccatccgacacagtt

SEQ ID NO: 145113 - DNA, 80 bp, synthetic construct
  source 1..80: mol_type = other DNA
cgaagcacgttaccccggaagtcacctggcactcgtgggacatcaaacgaggactctttggcaaagcaggtattaagaga

SEQ ID NO: 145114 - DNA, 80 bp, synthetic construct
  source 1..80: mol_type = other DNA
ttgaatcaatcagatggactagagatcctaagaatacacaagatcacgtgtattctttatgtcttttgatgtggcacaac

SEQ ID NO: 145115 - DNA, 80 bp, synthetic construct
  source 1..80: mol_type = other DNA
cacttaagatttatgaactactggactaaaagcaacgaggacctagacctctgtagatacctaggctgtaacctcacctt

SEQ ID NO: 145116 - DNA, 80 bp, synthetic construct
  source 1..80: mol_type = other DNA
aagtaaattattttcatcttatgaagaagacctagaaaatatactatactcaagaggctcctactggaactcttttcact

SEQ ID NO: 145117 - DNA, 80 bp, synthetic construct
  source 1..80: mol_type = other DNA
ccagacgccgatcctccagcaccagctcagagagcacctccgggagcagaaaatcctcaagtcccagatcaaattcgtca

SEQ ID NO: 145118 - DNA, 80 bp, synthetic construct
  source 1..80: mol_type = other DNA
ctggtgcaagagccaggagtcagggtctgccaacaatgatgacaccaggatcaggacaatttatgaccacagatgacttc

SEQ ID NO: 145119 - DNA, 80 bp, synthetic construct
  source 1..80: mol_type = other DNA
tttgtaagttccttcacagccgcaacgcaagcctcacgcaagttctgccctatcgactacctgtttggctgcggagtgct

SEQ ID NO: 145120 - DNA, 80 bp, synthetic construct
  source 1..80: mol_type = other DNA
aaacccctgaggcgttagaacgcagattctttttagacatggatgttaaagtactaagcccatattctagtcagcgtggc

SEQ ID NO: 145121 - DNA, 80 bp, synthetic construct
  source 1..80: mol_type = other DNA
gccaacgcatattcacacttttatgatggcttttcgcgggtgccattaaaagatgaagaaactgaccctggtgatactta

SEQ ID NO: 145122 - DNA, 80 bp, synthetic construct
  source 1..80: mol_type = other DNA
aaaacctcaactatactcaaaatcaaaccccaaacaaggctgggttttttatgacacactgtttggagatggcaaaatgc

SEQ ID NO: 145123 - DNA, 80 bp, synthetic construct
  source 1..80: mol_type = other DNA
atgtatagagtgcggctgagtgacaaaccacacacagatgacccgatcctttgtctctcattgtccccggcctcagaccc

SEQ ID NO: 145124 - DNA, 80 bp, synthetic construct
  source 1..80: mol_type = other DNA
ccttaaccttttacagaagcccagatacagactttatagtaacatacaacagaaaaagtcctctaggaggaaacataatg

SEQ ID NO: 145125 - DNA, 80 bp, synthetic construct
  source 1..80: mol_type = other DNA
agatacctaggatgccaaataatattttatagacaccctacagtagactttatagcaaggataagaaccacaccaccctt

SEQ ID NO: 145126 - DNA, 80 bp, synthetic construct
  source 1..80: mol_type = other DNA
agccaataccagacctgctattccccaatactggtaaaaaaaaaaagttctctcccttcgattgggagtgcgagcaggaa

SEQ ID NO: 145127 - DNA, 80 bp, synthetic construct
  source 1..80: mol_type = other DNA
tcaatcagatggactagagacccaaagaatacacaagaccacgtgtattccctatgtcttttgatgtggcacaacggtga

SEQ ID NO: 145128 - DNA, 80 bp, synthetic construct
  source 1..80: mol_type = other DNA
agacgacctcccacaaagctggagaggcaacaaagcacactgccacttaacaggaatatacagcccaccttacctaaact

SEQ ID NO: 145129 - DNA, 80 bp, synthetic construct
  source 1..80: mol_type = other DNA
aacattttattaaaaagagtgatgtacctagagctttgaacaggctagcaacacttgtgacaacagttaatgggactcca

SEQ ID NO: 145130 - DNA, 80 bp, synthetic construct
  source 1..80: mol_type = other DNA
tcaaacaaaagaaaaggtgtgagccagtggctatagtcatccatgggccacctggtgctggaaaatcaataacaacaaat

SEQ ID NO: 145131 - DNA, 80 bp, synthetic construct
  source 1..80: mol_type = other DNA
gtatgttgcggcacaacaatgtgtcacttgttattgtacccatttgccccttgcgacctccaaacccaggacaacaaact

SEQ ID NO: 145132 - DNA, 80 bp, synthetic construct
  source 1..80: mol_type = other DNA
ggctattgaacaactataaaagatggcggccgcagaaaatgagagtgcagctatacaacctgcaaataaagcaggtggta

SEQ ID NO: 145133 - DNA, 80 bp, synthetic construct
  source 1..80: mol_type = other DNA
gctttccatcatacaacccaataaaagacaaactttacaaaattcaagagtggttttgggaacaagaaactaaccaaaaa

SEQ ID NO: 145134 - DNA, 80 bp, synthetic construct
  source 1..80: mol_type = other DNA
atccacgcacggactctcgccacacgaggtcaggcccatgtctaagttcaggttccacatctgcgacagcacctccaaca

SEQ ID NO: 145135 - DNA, 80 bp, synthetic construct
  source 1..80: mol_type = other DNA
gcgtcctcgaagtcttcatcatcgtcgtcgtcctcttgttcgcggaggcgacggctttccaagctgtcgtggtgactgag

SEQ ID NO: 145136 - DNA, 80 bp, synthetic construct
  source 1..80: mol_type = other DNA
ggcagccggacgttgtcaggacctgctacataacaggctggatgcccctcttaatctgtggctctggaaacacccagttt

SEQ ID NO: 145137 - DNA, 80 bp, synthetic construct
  source 1..80: mol_type = other DNA
tctatggggagactatatatataattcaaaaataatagatgccttcacagagaatgccactaactactacagctcaagga

SEQ ID NO: 145138 - DNA, 80 bp, synthetic construct
  source 1..80: mol_type = other DNA
atttcaagtgaacaatgagctctggcaaggtgtcaaggcgtgtgtcaagtccaaatttagggaaatttttggtgtgaatg

SEQ ID NO: 145139 - DNA, 80 bp, synthetic construct
  source 1..80: mol_type = other DNA
tttctcttttgtgggtctatgatggccactggaaaactactggtcgcctatgctccaccaggcgcaaaaccaccaaagac

SEQ ID NO: 145140 - DNA, 80 bp, synthetic construct
  source 1..80: mol_type = other DNA
ggggccgcgctgtgcgccggcgcgcaaacactgatagccgtcgcacagggtggcgcccttccccccgcccctcctgctcc

SEQ ID NO: 145141 - DNA, 80 bp, synthetic construct
  source 1..80: mol_type = other DNA
ataatcctgttgttcattttaacaacattgctactcgctttaactatctgcctacttccaatctcgctctggacccgccc

SEQ ID NO: 145142 - DNA, 80 bp, synthetic construct
  source 1..80: mol_type = other DNA
tgctatatgtgattcaacagttaaatcaagaggaacattctcatataattggtttgttgagagtgatgaattatgctgac

SEQ ID NO: 145143 - DNA, 80 bp, synthetic construct
  source 1..80: mol_type = other DNA
ctaaacgggtgaagaaaaaggcctatccagagcgcaagacgccgcatggggggccctcacactcttccaccgttatgtgg

SEQ ID NO: 145144 - DNA, 80 bp, synthetic construct
  source 1..80: mol_type = other DNA
cagaagcccaagaagaagagacgcagacggtccagcagcagctcaaccagcagcttcgagaacaaagaaaactggggaag

SEQ ID NO: 145145 - DNA, 80 bp, synthetic construct
  source 1..80: mol_type = other DNA
agtatcaatagactgctcgtgcgattgaaggagaaaacgttccttatcaggctagatacttcgggaaacctatcagcagc

SEQ ID NO: 145146 - DNA, 80 bp, synthetic construct
  source 1..80: mol_type = other DNA
gggaatgcttgaaaaccagataaacaccatacaccagtcctgccccagtcaagaacaacaagaagtgttattcaacaatg

SEQ ID NO: 145147 - DNA, 80 bp, synthetic construct
  source 1..80: mol_type = other DNA
cccagattttccctgcctttccttagcatagcatctgcttattatatgttttatgatggatatgatggagactctactga

SEQ ID NO: 145148 - DNA, 80 bp, synthetic construct
  source 1..80: mol_type = other DNA
aatgggacactgttaggaaatgcactcatatatccacaccaaatgatcaatttgcgtacaaacaactctgcaactattgt

SEQ ID NO: 145149 - DNA, 80 bp, synthetic construct
  source 1..80: mol_type = other DNA
agcacaattaaccacattagacatagatccaaaccccataactttagaggaaagtgtctttggtatagagggtttagaag

SEQ ID NO: 145150 - DNA, 80 bp, synthetic construct
  source 1..80: mol_type = other DNA
gattgtggtaagaaactacgaagacacaaccacagtacttgcgactctagccctgttggggtgtgacatctctccttggc

SEQ ID NO: 145151 - DNA, 80 bp, synthetic construct
  source 1..80: mol_type = other DNA
cccgcaccaccttcgattacacagagaaccccacccctccagatacccgcttggaaaactttttctctttctaccgcctg

SEQ ID NO: 145152 - DNA, 80 bp, synthetic construct
  source 1..80: mol_type = other DNA
attcagaagcacaacaacagctcattgtagaggtggatatactcaagaaaggattggatgatttagcaccactgtacgcc

SEQ ID NO: 145153 - DNA, 80 bp, synthetic construct
  source 1..80: mol_type = other DNA
gacatatttggaacacacaccctaagccaacaccacgccattggtctagtgggcaccattcttttgactgcgggtcttat

SEQ ID NO: 145154 - DNA, 80 bp, synthetic construct
  source 1..80: mol_type = other DNA
acctgaactcgcgaaagcgtggatatttgctaatctactcgccgcatttttaattgacgacataatccagccatcgctgg

SEQ ID NO: 145155 - DNA, 80 bp, synthetic construct
  source 1..80: mol_type = other DNA
tttcgaaggactagagctgataactattcctcaggtggcattatatcactgtggttccaaacagactttgttagtggtaa

SEQ ID NO: 145156 - DNA, 80 bp, synthetic construct
  source 1..80: mol_type = other DNA
ccgaatggcatgaaggcacagcctgttaccattggcaccttttttccatgtaaacctccgtgatcctgggtcctttggag

SEQ ID NO: 145157 - DNA, 80 bp, synthetic construct
  source 1..80: mol_type = other DNA
gcttttgactacacaaactatgatggaagtatacatccaatatggttccaggcactcaaagaagtactgtctaatctggg

SEQ ID NO: 145158 - DNA, 80 bp, synthetic construct
  source 1..80: mol_type = other DNA
tcttgttctgtggtagcatgatggcaactggaaaactaatcctgacatattcaccaccaggggcatcccccccgaaaacc

SEQ ID NO: 145159 - DNA, 80 bp, synthetic construct
  source 1..80: mol_type = other DNA
ttagatgaggagcaggcataaaagtccaaacaggacacagagtaccaccaggagtagtcttagtttgctgacgtctgggt

SEQ ID NO: 145160 - DNA, 80 bp, synthetic construct
  source 1..80: mol_type = other DNA
ggaaaaaaaccctggctctcattcctctctgcagcaaccagcgccattagtatattattattggtgacaaaaatttttag

SEQ ID NO: 145161 - DNA, 80 bp, synthetic construct
  source 1..80: mol_type = other DNA
attgagaaggtagttggagatgcacttagagtttcaatgccacaagttgcaaatacatctgcatctggtccagtgaattc

SEQ ID NO: 145162 - DNA, 80 bp, synthetic construct
  source 1..80: mol_type = other DNA
cctgctgccggaccccccgctccgccgggcctcagacctccaagaccccctgccccggccggtccgggcggtcccaccgg

SEQ ID NO: 145163 - DNA, 80 bp, synthetic construct
  source 1..80: mol_type = other DNA
tggtctcccaccttcactaatatggacgaactcgtggacgccatcatggcgcgcatggatcgttcatcaggtgtctcaaa

SEQ ID NO: 145164 - DNA, 80 bp, synthetic construct
  source 1..80: mol_type = other DNA
acaaacacctacaacccatctggcacagacgttagcgaagggaggaaatttgccgctctggattatctgctagggtcagg

SEQ ID NO: 145165 - DNA, 80 bp, synthetic construct
  source 1..80: mol_type = other DNA
gggcaggggtgccaaagaaccgaaaggaggcgatgttgggcacgcatgtgatatgggacatcgggttgcagtctagttgt

SEQ ID NO: 145166 - DNA, 80 bp, synthetic construct
  source 1..80: mol_type = other DNA
accgcgacagttctcgacgttgcacggggttctgagcgagtcccttgcgcagcagcgcagcctcgcctttaaacagcctg

SEQ ID NO: 145167 - DNA, 80 bp, synthetic construct
  source 1..80: mol_type = other DNA
ctgaaaaacttttgaaaacactaatcaagataatttccacgctggtgattattagtaggaactatgaggataccacaaca

SEQ ID NO: 145168 - DNA, 80 bp, synthetic construct
  source 1..80: mol_type = other DNA
ccaccgggcacactgtgcgtagtactctgtgattacggtcactttgtacgcctgtttgcatccccaacccacatttccta

SEQ ID NO: 145169 - DNA, 80 bp, synthetic construct
  source 1..80: mol_type = other DNA
gttttctttgatgtgtttgaaggttcaaaagaaccagcagtgctcacagaaaaggatccccgtttaacaactgattttaa

SEQ ID NO: 145170 - DNA, 80 bp, synthetic construct
  source 1..80: mol_type = other DNA
cacactttagttgataattgccttttcaatcttgccatttgtcttgacatcatggtcgatttccgttacctttatattaa

SEQ ID NO: 145171 - DNA, 80 bp, synthetic construct
  source 1..80: mol_type = other DNA
ctcaaaaaagtacaacaggaataccaaggacaggaaaatttaaaaaaccttatacatcccgtcttttgtcagtacgtagg

SEQ ID NO: 145172 - DNA, 80 bp, synthetic construct
  source 1..80: mol_type = other DNA
attcatgactacagaagatgagcaatcagccaatctactccctgggttccacccaacacctacaatgcatatcccaggtg

SEQ ID NO: 145173 - DNA, 80 bp, synthetic construct
  source 1..80: mol_type = other DNA
gatgcctgagacattgcgaaggcgggatggggggagggtcaggagatgcgcaaaggtgaacgggtcttcgtgtgaggtcg

SEQ ID NO: 145174 - DNA, 80 bp, synthetic construct
  source 1..80: mol_type = other DNA
actgtgctcaccccacctactgtgtcatcaccagaggccatagacaggaggttcttccttgattgtgatgtaaaaatcat

SEQ ID NO: 145175 - DNA, 80 bp, synthetic construct
  source 1..80: mol_type = other DNA
aaacgcgtgagggtccagcgcttcggatgcggcgtctgcgccatatcgttgcgaaggtaggtgactgaggaggtagacgg

SEQ ID NO: 145176 - DNA, 80 bp, synthetic construct
  source 1..80: mol_type = other DNA
atcgcctgcatgcgtgcatccagccatgtgtccttgttgattgacttggtgaaaaactcacgtagtgtcttgtagctcct

SEQ ID NO: 145177 - DNA, 80 bp, synthetic construct
  source 1..80: mol_type = other DNA
aacctttaagcttggctttcaataaacaaggccgtgggagtttcacttgtcggtgtgtacctctataagtcactaagctc

SEQ ID NO: 145178 - DNA, 80 bp, synthetic construct
  source 1..80: mol_type = other DNA
cgcctaccgcccatttgcgtcaatggggcggagttattacgacattttggaaagtcccgttgaatttggtgccaaaacaa

SEQ ID NO: 145179 - DNA, 80 bp, synthetic construct
  source 1..80: mol_type = other DNA
taatggtttgaggttagcataccaacaggggttaccagtgttaaacacaccagggagcaaccagttcatgacatcagatg

SEQ ID NO: 145180 - DNA, 80 bp, synthetic construct
  source 1..80: mol_type = other DNA
atattcaggggaaccaaaaccagtaactagaaaaccagagagaagagttgtaacccagggaccccaagaagagtttgggc

SEQ ID NO: 145181 - DNA, 80 bp, synthetic construct
  source 1..80: mol_type = other DNA
caagaagtagtttataaccctttagtagatgaaggagaaggcaacatagtatggatagactggtgctctaaagacgacac

SEQ ID NO: 145182 - DNA, 80 bp, synthetic construct
  source 1..80: mol_type = other DNA
ggtagccagaacgcagggcatagaggagttcatagataccgccatcaaaaatgccctgaaggtgtcgcagccttcaccag

SEQ ID NO: 145183 - DNA, 80 bp, synthetic construct
  source 1..80: mol_type = other DNA
taaacattcaaagctagagcgtgagttcaattatgtgcagtattgcttaaattgtgtgggtagcattatattaatcttag

SEQ ID NO: 145184 - DNA, 80 bp, synthetic construct
  source 1..80: mol_type = other DNA
gtagtgtaaatgacactgtgctgtttagaacaacctttggtaatcttttttcaaaatttcatctgaatccaggcattgtt

SEQ ID NO: 145185 - DNA, 80 bp, synthetic construct
  source 1..80: mol_type = other DNA
attacaattttacacttatgattattccatttgccaagctggattacgctactggctcgtccacgtacgttccaatcaca

SEQ ID NO: 145186 - DNA, 80 bp, synthetic construct
  source 1..80: mol_type = other DNA
gtagcgctcctggatcttggcggccgaatctccgcgcaacatgatggcggcgacggtggtgcgagcggaggttaggcggc

SEQ ID NO: 145187 - DNA, 80 bp, synthetic construct
  source 1..80: mol_type = other DNA
aaaaagactcaggttcggagacagagacgatcagcagctcccaagaaaaagaggcgcaaagacaagcggcgctaccagtc

SEQ ID NO: 145188 - DNA, 80 bp, synthetic construct
  source 1..80: mol_type = other DNA
gatgctaatagatttcagagaactaaacaaggtaacccaagaatttacagaggtccagctgggtattcctcacccagcag

SEQ ID NO: 145189 - DNA, 80 bp, synthetic construct
  source 1..80: mol_type = other DNA
atgtttctcggtaaaatctacagaaagaaaagggcactgccactgtactgcgtgcgagcttcaaagaagaaaccacctcc

SEQ ID NO: 145190 - DNA, 80 bp, synthetic construct
  source 1..80: mol_type = other DNA
tcttatgccagacaacaccagattatgtatgttaacttacccagtgggttttgggataattcaaggaaaccagcatatgg

SEQ ID NO: 145191 - DNA, 80 bp, synthetic construct
  source 1..80: mol_type = other DNA
agtgcttaggagatagcgagaacagttgcttgcatgaatcggaagaatgtggaaaacactatccagaatttccaaatgaa

SEQ ID NO: 145192 - DNA, 80 bp, synthetic construct
  source 1..80: mol_type = other DNA
ggtataagaaatggaaaatatcataaccattcattgaaaatcctgcattcgcgtgtactatgtgagtggcaaacaaatta

SEQ ID NO: 145193 - DNA, 80 bp, synthetic construct
  source 1..80: mol_type = other DNA
taatactttttgcggctgcactgaccctgttcgccatttttgtatccttgcttctcgctttgctacaactccgtccgtga

SEQ ID NO: 145194 - DNA, 80 bp, synthetic construct
  source 1..80: mol_type = other DNA
aacgttcaggccgacgtcaaaaacgagccatgcctcccccagtgagtccttctgacgctgggcctccttccaccaggcct

SEQ ID NO: 145195 - DNA, 80 bp, synthetic construct
  source 1..80: mol_type = other DNA
gaaaaaggtactttgtacaccagcccctttttaattgctacaacaaatgctggttctattcacgctcccactgtttcaga

SEQ ID NO: 145196 - DNA, 80 bp, synthetic construct
  source 1..80: mol_type = other DNA
gacagacacagtgtcctcccgctcctcctgagcaccctccccctgttcctcatcactctgctcactttcttcctgatcac

SEQ ID NO: 145197 - DNA, 80 bp, synthetic construct
  source 1..80: mol_type = other DNA
aaaagaaagttgaacaagaaattacagcaattacacagcaaggtactcctatgttttatcacctagttggtatatatggt

SEQ ID NO: 145198 - DNA, 80 bp, synthetic construct
  source 1..80: mol_type = other DNA
tgagggtccggctcccagatggcctggtgaggatggaggcgccgctggtggcgaccgaagagaaggtggagatggcggcg

SEQ ID NO: 145199 - DNA, 80 bp, synthetic construct
  source 1..80: mol_type = other DNA
atgccacaaagtttcacagcggcactttgttagtagtaatcatacctgaacatcaattagcatcagcaagaggcagtaat

SEQ ID NO: 145200 - DNA, 80 bp, synthetic construct
  source 1..80: mol_type = other DNA
catgaatgaggcgctgaggtccctgatcatgcccacggtggggcggaggtcggagatctccagcagatccctgagcgtcc

SEQ ID NO: 145201 - DNA, 80 bp, synthetic construct
  source 1..80: mol_type = other DNA
cccaggtggtgaagtccagattgatggcatagtcacaaaagtagaagattcttatgatttattcaacaaagatggtatta

SEQ ID NO: 145202 - DNA, 80 bp, synthetic construct
  source 1..80: mol_type = other DNA
ggccggccaggaagctcttgaccaggtagaggacgcagttgctgacgcactggatgccggcaaagcggccaaacttgcag

SEQ ID NO: 145203 - DNA, 80 bp, synthetic construct
  source 1..80: mol_type = other DNA
caactaacatgtatactgttcaggtgggacagcaagtaaaaacagctcaggaagttttctccatactagtggatgtagca

SEQ ID NO: 145204 - DNA, 80 bp, synthetic construct
  source 1..80: mol_type = other DNA
gggataccaggagccaccggccccccgggctccataccagggataccaggagccgccggcccccaggctccaatcatctt

SEQ ID NO: 145205 - DNA, 80 bp, synthetic construct
  source 1..80: mol_type = other DNA
caccacctgtcggtgttggtcgtcctccatcgttctctacgaacatctcgacgcccgggtgacggacgacggcaagacgt

SEQ ID NO: 145206 - DNA, 80 bp, synthetic construct
  source 1..80: mol_type = other DNA
cccatggaattcaaagacaggtggtatccttgcatgctgcaccaggaagaagtggtggaggagctggtcagatgtgggcc

SEQ ID NO: 145207 - DNA, 80 bp, synthetic construct
  source 1..80: mol_type = other DNA
aggatctcgaagggcgcgtgtccgaggcggaggcgttgttgaaccagcagtgcgagctcgacgaaggaccgtcgccgcgg

SEQ ID NO: 145208 - DNA, 80 bp, synthetic construct
  source 1..80: mol_type = other DNA
ggtaacaggcagatagttaaagcgagtagcaatattattaaagtgagtgacagtgtcgccacaccgcagtcaaggggcaa

SEQ ID NO: 145209 - DNA, 80 bp, synthetic construct
  source 1..80: mol_type = other DNA
gccgttccagtgacgtcacggcggccattttgagtaaggcggggcaaggccgacactatacaaaatggcggtgtcagtct

SEQ ID NO: 145210 - DNA, 80 bp, synthetic construct
  source 1..80: mol_type = other DNA
aagattctagtagcctatgcaccaccaggcgcacaacctccctccaaccgcaaggaggctatgctgggcactcatgtcgt

SEQ ID NO: 145211 - DNA, 80 bp, synthetic construct
  source 1..80: mol_type = other DNA
tcacatttaggaggatctgggggattatatccaatccaaaaaaagccacctattggatagcttagaccattactaccaca

SEQ ID NO: 145212 - DNA, 80 bp, synthetic construct
  source 1..80: mol_type = other DNA
acgagataatggggatgatgaaccaagtcttgccgtgacgtcgcggcaccaggaacacggtggctttctgcttaaagatg

SEQ ID NO: 145213 - DNA, 80 bp, synthetic construct
  source 1..80: mol_type = other DNA
catatggattgagggtaacaattattacccaagcaggtaccagcaaggagtgatgaaaggagtaggtcctgctgaacctg

SEQ ID NO: 145214 - DNA, 80 bp, synthetic construct
  source 1..80: mol_type = other DNA
atgatgcagaactacaggtgtctattagtaaagagttacaagacacacccaggggggcgaccctacgtaactgttaaaat

SEQ ID NO: 145215 - DNA, 80 bp, synthetic construct
  source 1..80: mol_type = other DNA
atggctgctgtaaacccggaagtagctgacccgcgtgacttgtcacgtggtgtgtgcgtcacggcggccattttgaatca

SEQ ID NO: 145216 - DNA, 80 bp, synthetic construct
  source 1..80: mol_type = other DNA
acgaatgctttaacacaaaaagacacagcagatttaaagacataaaagatgaatacacaacagtatatcccacactaaca

SEQ ID NO: 145217 - DNA, 80 bp, synthetic construct
  source 1..80: mol_type = other DNA
aagtgtgtactatttatgacggtgtaatttagacggtcttgccatcccgaggatattagtgttaggtaattcgtgttgtt

SEQ ID NO: 145218 - DNA, 80 bp, synthetic construct
  source 1..80: mol_type = other DNA
acgccaggcaacactgataaaatggaggcatgccgtattccacttgctcagggcggtccagcaaaggatcaagcaatatt

SEQ ID NO: 145219 - DNA, 80 bp, synthetic construct
  source 1..80: mol_type = other DNA
caccgctgaatctacaagcattatcactactacattgactacagatctttcatctacatatcaaacattatctgcattaa

SEQ ID NO: 145220 - DNA, 80 bp, synthetic construct
  source 1..80: mol_type = other DNA
cattgaccgcagtggactccatcaacactttcggcggttttggacatcagaatttggcagtttatgttgccggatacaaa

SEQ ID NO: 145221 - DNA, 80 bp, synthetic construct
  source 1..80: mol_type = other DNA
tcagacagctgtacacaatgctgggatgggtatcgcggtagggaatttgactatattccctcaccaatgggtcaatttga

SEQ ID NO: 145222 - DNA, 80 bp, synthetic construct
  source 1..80: mol_type = other DNA
atcgcggaaggaaaatacgatatgagtcgtctggcggcctttctttttctcaatgtatgagaggcgcattggagttctgc

SEQ ID NO: 145223 - DNA, 80 bp, synthetic construct
  source 1..80: mol_type = other DNA
ttagtcacagctatcttgcaagagcacaataataaaacaaaaattaccaactccctcgaagtcttgtttcagggccctgt

SEQ ID NO: 145224 - DNA, 80 bp, synthetic construct
  source 1..80: mol_type = other DNA
tagaagacaaactcgcgtaaccgttgtccgttatacgtcacgttactaatattccacggcggaatgagctggttgccctg

SEQ ID NO: 145225 - DNA, 80 bp, synthetic construct
  source 1..80: mol_type = other DNA
gagatagaaatgttcttagggagatctgcactgtgggctaacatagacatgagggacaaatttgccaaatgggatataag

SEQ ID NO: 145226 - DNA, 80 bp, synthetic construct
  source 1..80: mol_type = other DNA
atttccaatcccccagtgccctaccctggttccaccctactagggagatttcaattcctggccaggtaaagaatcttgtt

SEQ ID NO: 145227 - DNA, 80 bp, synthetic construct
  source 1..80: mol_type = other DNA
cgaggcgcccaggtacagttcagacggcacgttgtgatcgcccttgtgtttaagaaagttgtaggtgcagatgctgccga

SEQ ID NO: 145228 - DNA, 80 bp, synthetic construct
  source 1..80: mol_type = other DNA
tacagcacgtctggagcaacgtgatactgaacgtcaatacgcactttgcggttcagtacacggaagaagactttgaggca

SEQ ID NO: 145229 - DNA, 80 bp, synthetic construct
  source 1..80: mol_type = other DNA
gtggacaatatttttggtagggcttggttttttgaagcacatgatttttcaaatgatggaacatggaggcgtgagttaac

SEQ ID NO: 145230 - DNA, 80 bp, synthetic construct
  source 1..80: mol_type = other DNA
ataataccaatacaaatatcagggataaaagcatgtacacaatcagacttggtggagagactgatattaaggaggccatt

SEQ ID NO: 145231 - DNA, 80 bp, synthetic construct
  source 1..80: mol_type = other DNA
tttaggagttgccacaacagtattagcaatacagtttacaggcttttccaggaattggccaggatccccaaccggatcag

SEQ ID NO: 145232 - DNA, 80 bp, synthetic construct
  source 1..80: mol_type = other DNA
tcccttgtaccaagtgtctctgctgttttgtgcattgttacctgcttgatttagtggtgttgtgttttgtacggaagtcc

SEQ ID NO: 145233 - DNA, 80 bp, synthetic construct
  source 1..80: mol_type = other DNA
tttggatatacagactggataaaaaaagaattaaaccactgggacgcaccatggaactacagattattaatgtgctgtcc

SEQ ID NO: 145234 - DNA, 80 bp, synthetic construct
  source 1..80: mol_type = other DNA
gagagcatggacatctctccgtcttacgagttgccctggctctcgctggagtcatgcctcacaagcatcctgtcacaccc

SEQ ID NO: 145235 - DNA, 80 bp, synthetic construct
  source 1..80: mol_type = other DNA
agactcaaaacagaattttgggagcgaacatacgctagacaacatttgatagtggatgttgagcttcctcatgctttttg

SEQ ID NO: 145236 - DNA, 80 bp, synthetic construct
  source 1..80: mol_type = other DNA
ggacggcgagaggaagttcccaggggacggcagcgcgggtccctggggacacacgcaaaacaacggccagagacaagacg

SEQ ID NO: 145237 - DNA, 80 bp, synthetic construct
  source 1..80: mol_type = other DNA
taatctcataaaatccatttgtaacacacatcatatattcagagatcaaatttatgaggttgaaggcggtatgccatcag

SEQ ID NO: 145238 - DNA, 80 bp, synthetic construct
  source 1..80: mol_type = other DNA
cccagtagagaccagcaaagagatgccaaatggaacaccatgataggcacaagcagataccacctcacaacacatgtaaa

SEQ ID NO: 145239 - DNA, 80 bp, synthetic construct
  source 1..80: mol_type = other DNA
atacctatgggttagggcccagatttggggggattcacactgggagcatcaaaataatgaattatcacctgatgactcat

SEQ ID NO: 145240 - DNA, 80 bp, synthetic construct
  source 1..80: mol_type = other DNA
aaacaaggcatatatgcagactaatcaggggaaaaatgaccttgacagaagaagtacagtggacagaattagcagaggca

SEQ ID NO: 145241 - DNA, 80 bp, synthetic construct
  source 1..80: mol_type = other DNA
gtgctgaggaacccaccgcctctggaggcaagagcacccaccctatggtgactagaagcaaggctgaccagtaaactatt

SEQ ID NO: 145242 - DNA, 80 bp, synthetic construct
  source 1..80: mol_type = other DNA
ccgcactgtatttagccgctctgcggagaggctggcagatcgagccctgagaggttctctccagcactagccggtagagc

SEQ ID NO: 145243 - DNA, 80 bp, synthetic construct
  source 1..80: mol_type = other DNA
actgggtcccaggttttcggcttcacactacagcctggtgcagacacggtgatggagagaacgctactaggtgagattct

SEQ ID NO: 145244 - DNA, 80 bp, synthetic construct
  source 1..80: mol_type = other DNA
aagaacttatgatactgatgtagacatttatgacaatggcccaaaatcgaaatatgataaggcaagattggccaagaaat

SEQ ID NO: 145245 - DNA, 80 bp, synthetic construct
  source 1..80: mol_type = other DNA
aaacgcagacttctacgtggtttggctttaatggcaccagagcagagaatagaacatatatctattggcatggtaaagat

SEQ ID NO: 145246 - DNA, 80 bp, synthetic construct
  source 1..80: mol_type = other DNA
tgagtgcccgggaggaggctgagagtgcggggaatgcctcctgcagaaagctgcagggctgctccagaaacacgtcagtt

SEQ ID NO: 145247 - DNA, 80 bp, synthetic construct
  source 1..80: mol_type = other DNA
cttttcaggagaacagggataccaatatgctacacaaatgagacagtggtactggacccaattaacaactttaacagcca

SEQ ID NO: 145248 - DNA, 80 bp, synthetic construct
  source 1..80: mol_type = other DNA
aacttcacctctcagaaagtgaagatggtagcttggtgggtaggcatcgagcaatcatttggggtgccctataacccaca

SEQ ID NO: 145249 - DNA, 80 bp, synthetic construct
  source 1..80: mol_type = other DNA
cagccattccccttcggtggaggaatgagcaccaccacattctcactcagagccctgtacgacctgtacacaaagcacat

SEQ ID NO: 145250 - DNA, 80 bp, synthetic construct
  source 1..80: mol_type = other DNA
atctcgtgggccttcgccatcagggtctggctctcccggacctgctcttccagcgcccggacctcggccgcctcggcctc

SEQ ID NO: 145251 - DNA, 80 bp, synthetic construct
  source 1..80: mol_type = other DNA
aagacccacggttacaagtagatttaaacacatctcttttctcaaaatatgcaggtaacaagcagatggagataaatgaa

SEQ ID NO: 145252 - DNA, 80 bp, synthetic construct
  source 1..80: mol_type = other DNA
aactaaggaggaagttcgagatgttcacttacctaaggtttgacatggaggtaacctttgttattacaagctaccaacac

SEQ ID NO: 145253 - DNA, 80 bp, synthetic construct
  source 1..80: mol_type = other DNA
tcaaaatacaactaaacttaccccaacaggctccaatcaaaatcaatgcaatgacacttggtactatggaaaaacttata

SEQ ID NO: 145254 - DNA, 80 bp, synthetic construct
  source 1..80: mol_type = other DNA
atcagaccggtattgtcgtcccgcctcaaaccccgactcagtgcaccatcttgtgctttgtgtcggcatgcaatgatttc

SEQ ID NO: 145255 - DNA, 80 bp, synthetic construct
  source 1..80: mol_type = other DNA
tgcacctattacgacacctaacactgcttctaccactttcgtaaccacgatgaattctactgcaaatcccaacacatcga

SEQ ID NO: 145256 - DNA, 80 bp, synthetic construct
  source 1..80: mol_type = other DNA
acgatgcccgccgtcacgccggctggtatcgctccccccctaccctctccgttaatgtttacctcaatgaacaatttgat

SEQ ID NO: 145257 - DNA, 80 bp, synthetic construct
  source 1..80: mol_type = other DNA
gtacggttgttaagagataccacgcacatcagccaaagcgctttgattgtgtcaacacagggaattgatgacatcatcga

SEQ ID NO: 145258 - DNA, 80 bp, synthetic construct
  source 1..80: mol_type = other DNA
ttgtgaaaagaaggggtggattgttaagctcaataatgatctggtagtggaaagaaacctaagtagagctatgactatcc

SEQ ID NO: 145259 - DNA, 80 bp, synthetic construct
  source 1..80: mol_type = other DNA
agatgcctacacaaagcctagtacctcctttgacggtgtttgtctggtcgctcaggtgcttccccagcactagacctggc

SEQ ID NO: 145260 - DNA, 80 bp, synthetic construct
  source 1..80: mol_type = other DNA
attaggctcttgaagcggtcaagggtgtccttggcgtccgggtgggccccgaggctctcgcagagtgggcagatggtccg

SEQ ID NO: 145261 - DNA, 80 bp, synthetic construct
  source 1..80: mol_type = other DNA
acagcttcagtactgggaaatttctgattgcttacacgccccctggagcaggaatacctgaaacccgcaaagatgctatg

SEQ ID NO: 145262 - DNA, 80 bp, synthetic construct
  source 1..80: mol_type = other DNA
agacttcgacctccattttagggcttccggactaccaaaatggcggattcagtgacgtcacggcggccattttaagtaag

SEQ ID NO: 145263 - DNA, 80 bp, synthetic construct
  source 1..80: mol_type = other DNA
ctctgtaaaaaaattttatataaatgacaaaaatgacgatattttgtataaaacccaactacaaggcacacaattagatg

SEQ ID NO: 145264 - DNA, 80 bp, synthetic construct
  source 1..80: mol_type = other DNA
aaatacagctgcgccatgctgcaccccggcatgctcatgcagagcaagcacaggatccttatccccagctttgacactaa

SEQ ID NO: 145265 - DNA, 80 bp, synthetic construct
  source 1..80: mol_type = other DNA
ggtgagaaagaacctgctgcccttagtgagaaagatccacgcctagaggttgacctcaaaggagcagtgcttgccaaata

SEQ ID NO: 145266 - DNA, 80 bp, synthetic construct
  source 1..80: mol_type = other DNA
tgccaccgtagctttgatcgccgccgatcgttatcgcgtccttcataaacgaacatacgcacgccaatcataccgttcaa

SEQ ID NO: 145267 - DNA, 80 bp, synthetic construct
  source 1..80: mol_type = other DNA
atacaggcaattccacaaacaacgaagactttaaaaagctataccaaacccttttctactcagacaactccggccactac

SEQ ID NO: 145268 - DNA, 80 bp, synthetic construct
  source 1..80: mol_type = other DNA
agatggacaacttttccatttcgcaggagctgctgcttggcgtggtcaacgctttggaaaacgtgacggtgtatccgacg

SEQ ID NO: 145269 - DNA, 80 bp, synthetic construct
  source 1..80: mol_type = other DNA
atatcaatgattgctaatgttattagcatattaggtgtgatatacattatatataaattattttgttcattacagggacc

SEQ ID NO: 145270 - DNA, 80 bp, synthetic construct
  source 1..80: mol_type = other DNA
ataatactccaaaatcgcagaacacaggtcagtttagcactaaatatggtggtgtcgcaattgagagaagagtccatgtc

SEQ ID NO: 145271 - DNA, 80 bp, synthetic construct
  source 1..80: mol_type = other DNA
ctacacccaaccacagtaccagcgttcacatgagattgcaaacaagaggtgcttttggccaacaatcgggcgccgcatat

SEQ ID NO: 145272 - DNA, 80 bp, synthetic construct
  source 1..80: mol_type = other DNA
gcatgacaacccgggagtacacgttaaacaggagaatcttctgcagcacctcctctgctatgggcgtaggcagcaccatg

SEQ ID NO: 145273 - DNA, 80 bp, synthetic construct
  source 1..80: mol_type = other DNA
aggtctcgggtcttacagacctctcggcctgggtctcggcagtgggctccccgaccgtgctgtttttggccatcctcaag

SEQ ID NO: 145274 - DNA, 80 bp, synthetic construct
  source 1..80: mol_type = other DNA
gctgctttctgcggttgtggaggttttattgagcatcttaatagcattcatcctcgctttctcggggctggggggccacc

SEQ ID NO: 145275 - DNA, 80 bp, synthetic construct
  source 1..80: mol_type = other DNA
agaccacaagaaggatttgtattctatgactcactgtttggacaaggaaaaatgcccgacggaaccagccagataagcag

SEQ ID NO: 145276 - DNA, 80 bp, synthetic construct
  source 1..80: mol_type = other DNA
gtgacagaagcctttgatgcttggaataacactgtaacagaacaggcaatagaagatgtttggaacctgtttgaaacctc

SEQ ID NO: 145277 - DNA, 80 bp, synthetic construct
  source 1..80: mol_type = other DNA
gcctgccttcccccgcttccccttgttaacttatagcatgataggtaggtcacctaacgtggaagcctggtgggtgatcc

SEQ ID NO: 145278 - DNA, 80 bp, synthetic construct
  source 1..80: mol_type = other DNA
cagcacatatgactgggaaaactacagtgctacacaaaactataaaaaaaccaaagacaaatggaatgaggctagaaatg

SEQ ID NO: 145279 - DNA, 80 bp, synthetic construct
  source 1..80: mol_type = other DNA
aggaaaacctacagtaaaagtaactattaaaccccccactctactagtagataagtggtactttcaaaaggacatttgcg

SEQ ID NO: 145280 - DNA, 80 bp, synthetic construct
  source 1..80: mol_type = other DNA
agaagattaggaaagggaagactagggccatagaagctgctagcctcaatgacacagttcatttccgaatgctattcgga

SEQ ID NO: 145281 - DNA, 80 bp, synthetic construct
  source 1..80: mol_type = other DNA
tacaacctagtaatggacatacctcaaactcagcaccagccttagatgcagcagaaactgggcataccaaccaagtacaa

SEQ ID NO: 145282 - DNA, 80 bp, synthetic construct
  source 1..80: mol_type = other DNA
tcccggaaaagtagttcaagttgatgggataaacacaaatgttctagatgcctatgatttacacaacaaagatggaataa

SEQ ID NO: 145283 - DNA, 80 bp, synthetic construct
  source 1..80: mol_type = other DNA
taacgtcccccaccacgtctcaactccgcagttcagcaccgagccacgcacaaactccatggccggttacccacccaagt

SEQ ID NO: 145284 - DNA, 80 bp, synthetic construct
  source 1..80: mol_type = other DNA
ccaaccaaaacaggacaatgtggaggagtcttatgctccacaggcaaaatttttggaattcatgtcggaggtaatggcag

SEQ ID NO: 145285 - DNA, 80 bp, synthetic construct
  source 1..80: mol_type = other DNA
acgacccatcagccaaagagactaaaaacacaacaaatacagacgccgccggaaacaaatacaatacagtaacaagttta

SEQ ID NO: 145286 - DNA, 80 bp, synthetic construct
  source 1..80: mol_type = other DNA
actcaaaatgcagcaggtcgcgaggaggattggttccgagggatccacactacccacagagctttttgtggctgcggtga

SEQ ID NO: 145287 - DNA, 80 bp, synthetic construct
  source 1..80: mol_type = other DNA
aaatggtatgctcagaacgacctctgtgaggttcctcttgtgacatttgtggttagcctagcttcctttacacatccgtt

SEQ ID NO: 145288 - DNA, 80 bp, synthetic construct
  source 1..80: mol_type = other DNA
agcatagaaaactttttaagccgctctgcatgtgtgtatatgggtgaatacagcacgaaggcatcagaggagacaaagaa

SEQ ID NO: 145289 - DNA, 80 bp, synthetic construct
  source 1..80: mol_type = other DNA
ttcctcagtcgatcagcctgtgtgtacattgaggaatatttcaccaaggaccaggatagtgccaacagatacatgtcgtg

SEQ ID NO: 145290 - DNA, 80 bp, synthetic construct
  source 1..80: mol_type = other DNA
ccaatccctacaaaaagagatgattacacatggcagtctggcacaaatgcttcagtcttctggcagcaaggtcaaaccta

SEQ ID NO: 145291 - DNA, 80 bp, synthetic construct
  source 1..80: mol_type = other DNA
accttgtctgggatgttggtttacaatccacagtatctatggttgttccgtgggtttctgctagtcattacaggttcaca

SEQ ID NO: 145292 - DNA, 80 bp, synthetic construct
  source 1..80: mol_type = other DNA
ggcctctttggtgcagacgctatcaaaagagtgtcatcaaaaccgactgatgctgactggattacagtaccttacaaaaa

SEQ ID NO: 145293 - DNA, 80 bp, synthetic construct
  source 1..80: mol_type = other DNA
ctttaaacaacatggggcaattattctttagacacgttaacaaacccagtccccacacttacacaagtgtcgcccgcata

SEQ ID NO: 145294 - DNA, 80 bp, synthetic construct
  source 1..80: mol_type = other DNA
ctgtggcagagggtacactggtaccccagcgtcatacaccagagagaggtggcagaggccatctgccagaccggaccttt

SEQ ID NO: 145295 - DNA, 80 bp, synthetic construct
  source 1..80: mol_type = other DNA
cttaaaaaagaaacgtaggccaaaactgactctgagactatggcagccagacatggtcagaaaccttaaaatcagcgggt

SEQ ID NO: 145296 - DNA, 80 bp, synthetic construct
  source 1..80: mol_type = other DNA
ctgtgcgtcagcgcgtgcaggtgctccgagctcagggtctgggtaaacaggtgtgttttgatgtacttggaattctcaaa

SEQ ID NO: 145297 - DNA, 80 bp, synthetic construct
  source 1..80: mol_type = other DNA
gaacaagctgtttatggaatggaaggcttggaacctcttgacttgtcaactagtgcaggattcccatatgtgactttggg

SEQ ID NO: 145298 - DNA, 80 bp, synthetic construct
  source 1..80: mol_type = other DNA
aaacccagatggcacactcaacaataacgcacaatccttcaaccaatgggcaaacggagagtttaaaacaggtggcaatg

SEQ ID NO: 145299 - DNA, 80 bp, synthetic construct
  source 1..80: mol_type = other DNA
ctgcttgggctgcacaggagcagagctgacacaccttctcctgagggtcctccgccacctgttgcacctagaataaggtg

SEQ ID NO: 145300 - DNA, 80 bp, synthetic construct
  source 1..80: mol_type = other DNA
gactctgtggtgtattcgcatgctgccttttgtggctgtgggggctgtattggtcatcttagccgtctggctgctgacct

SEQ ID NO: 145301 - DNA, 80 bp, synthetic construct
  source 1..80: mol_type = other DNA
aaagatattaaggcaatggcagcctacaaaaagtcccatcgtactgagccagtgtgtattttgattcgaggaggcccagg

SEQ ID NO: 145302 - DNA, 80 bp, synthetic construct
  source 1..80: mol_type = other DNA
cggaatagtacctgcaacaactgtgtgcggccctgtctactgcttcacccccagtcccgtggttgtcggtactaccgacc

SEQ ID NO: 145303 - DNA, 80 bp, synthetic construct
  source 1..80: mol_type = other DNA
atatggagatcactgtcgttatcaccagctcacaagaccaatctacttcgcagaatcaaaatgcgcccgtccttacccat

SEQ ID NO: 145304 - DNA, 80 bp, synthetic construct
  source 1..80: mol_type = other DNA
gcgtcgggggggtcgggagctttattaaacagactccgagttgccattggacactgtagctgtaaatcagtaacgaaagt

SEQ ID NO: 145305 - DNA, 80 bp, synthetic construct
  source 1..80: mol_type = other DNA
ggtgagtgctgggaagtatcaaagaatggtagagactgggatactttaaaactgaaggacctagtccagaagattacaga

SEQ ID NO: 145306 - DNA, 80 bp, synthetic construct
  source 1..80: mol_type = other DNA
ggggacgtgaagcaaagaaagtgcaaatttctgattaataaatctttattgactttatacataggtctcggcgtcatcat

SEQ ID NO: 145307 - DNA, 80 bp, synthetic construct
  source 1..80: mol_type = other DNA
ttgactggatgaaatctatgttaccgcaagctcaattaaaagttaagtatcttagtgagttaaagaaactaaacttccta

SEQ ID NO: 145308 - DNA, 80 bp, synthetic construct
  source 1..80: mol_type = other DNA
gcgtgggaaatgcatatagcagcttctatgatgggtggtccaacttcacccagaacggcgtatatggtttcaatgcctta

SEQ ID NO: 145309 - DNA, 80 bp, synthetic construct
  source 1..80: mol_type = other DNA
gcccctaaaccccatccttacaaggtcagcttcaaaataggcttctctcaataaacaaggcattttactgttcacttgtc

SEQ ID NO: 145310 - DNA, 80 bp, synthetic construct
  source 1..80: mol_type = other DNA
ctgctctttcactacgaacacgggctagggcggctgttgtcagtgaccctgccgcgtcatcgtgtgtccactctgggctc

SEQ ID NO: 145311 - DNA, 80 bp, synthetic construct
  source 1..80: mol_type = other DNA
gacttaggaggagaaggaaaaagatacctataactcagtggaacccctccgtggtcagaaaatgcgtggtaaccggatac

SEQ ID NO: 145312 - DNA, 80 bp, synthetic construct
  source 1..80: mol_type = other DNA
tattgccaccaccaacaaatcagacttctctagtacagtcctacaagattctggggcactgaagaggagattcccttata

SEQ ID NO: 145313 - DNA, 80 bp, synthetic construct
  source 1..80: mol_type = other DNA
attagcagcctagtaataatcatcaggaactatgaagacaccacaacagtgctggcgacccttgcactgttgggctgtga

SEQ ID NO: 145314 - DNA, 80 bp, synthetic construct
  source 1..80: mol_type = other DNA
gagatcactatagtgatcaccagttcgcaggatcaatccaccatttcaaaccctgacacaccaatcctgacgcatcagat

SEQ ID NO: 145315 - DNA, 80 bp, synthetic construct
  source 1..80: mol_type = other DNA
ccctgacgagaaccccttctacttgtgtaatggtacactttttgggaatatccagatcttcccacatcaaatgattaacc

SEQ ID NO: 145316 - DNA, 80 bp, synthetic construct
  source 1..80: mol_type = other DNA
gtgtgggaaatcagctatacagacactgttcagctcaggcgcaaaatggagatgttcacatactcacgttttgatacaga

SEQ ID NO: 145317 - DNA, 80 bp, synthetic construct
  source 1..80: mol_type = other DNA
tctttatagttacaaacatgggagcgtgcacctggaagatgcagctggggtagatctttacatctttacagggcgcagcg

SEQ ID NO: 145318 - DNA, 80 bp, synthetic construct
  source 1..80: mol_type = other DNA
tgttagtcataccaaagtggataatatatttgggagagcttggtatgttgattcacacactttcaacaatggtgacattt

SEQ ID NO: 145319 - DNA, 80 bp, synthetic construct
  source 1..80: mol_type = other DNA
cccgccttttttaccaaaaaccaaaccagtaccgtgtgtctgctgtgcgaactcatggcctgctcctattacgataacgt

SEQ ID NO: 145320 - DNA, 80 bp, synthetic construct
  source 1..80: mol_type = other DNA
ggtgtttcaaggaagccttgattaaagcggcgaatttggatttcccgtcagacatgaaatcggtcggctatgttttcgat

SEQ ID NO: 145321 - DNA, 80 bp, synthetic construct
  source 1..80: mol_type = other DNA
ccccagctgataaatcagccacttttgaaacggtcacatgggaaaatgtaacatttttgaaaagattctttagagcagat

SEQ ID NO: 145322 - DNA, 80 bp, synthetic construct
  source 1..80: mol_type = other DNA
catcaagctaaacacaacaaaatgggagctcaagtgtcgacgcagaagaccggggcacacgaaaccggtctaagcgctag

SEQ ID NO: 145323 - DNA, 80 bp, synthetic construct
  source 1..80: mol_type = other DNA
caccacatgggaccctgagaatccaaaccacattaatcctacatactcagacgcccgttactcaaattatgaataccacg

SEQ ID NO: 145324 - DNA, 80 bp, synthetic construct
  source 1..80: mol_type = other DNA
cgttaagttgcaattttccacgcatgaaataacggtacagagcgcgaagtgcagcaggttgtcggccttgacgatgccgc

SEQ ID NO: 145325 - DNA, 80 bp, synthetic construct
  source 1..80: mol_type = other DNA
tgacaatcattgattgttatcataaagcgaattggattggccacccggtgagaataaagcatatcatatacctatttgtt

SEQ ID NO: 145326 - DNA, 80 bp, synthetic construct
  source 1..80: mol_type = other DNA
taataatagtgtactactccacgtaggaagtacgggtggcgtagtacactattattacggtaatcttgtacgccagtttt

SEQ ID NO: 145327 - DNA, 80 bp, synthetic construct
  source 1..80: mol_type = other DNA
ccgcctgcgtttacatcgtggaatacaagacaaaagacgacaccccggacaagatgtacgacagctgggtcattaacacc

SEQ ID NO: 145328 - DNA, 80 bp, synthetic construct
  source 1..80: mol_type = other DNA
gcacaaaatggccgccaaatacttccggggtcaaaggtcacgcctacgtcatcgagacacgtggtgtcagcagctgttaa

SEQ ID NO: 145329 - DNA, 80 bp, synthetic construct
  source 1..80: mol_type = other DNA
cagcatcgcaaccgcatcagactccggcatcgcaaactgcacccggtgccgggcagccacatccagcgcaaaaaccttcg

SEQ ID NO: 145330 - DNA, 80 bp, synthetic construct
  source 1..80: mol_type = other DNA
cttaaagacacctcaatatctggagaaagaaaatcaatacttaataaaatacacccatcgtctctaacaggaacaggcaa

SEQ ID NO: 145331 - DNA, 80 bp, synthetic construct
  source 1..80: mol_type = other DNA
aatcatcttgcttatctgggtgagcgttatggcttccgaccgggcaatagaggccctggctcgtctggcgtaggaggccc

SEQ ID NO: 145332 - DNA, 80 bp, synthetic construct
  source 1..80: mol_type = other DNA
ctactgaaagacactcccttcattgaacaaactgccgaattgcagggagacagggtagcgactgtagaagataccaaagc

SEQ ID NO: 145333 - DNA, 80 bp, synthetic construct
  source 1..80: mol_type = other DNA
caagacagatattttccagtgaaggttgtagcacatgaatggtatgaaattcaggaaagcccttactacccaaagcacat

SEQ ID NO: 145334 - DNA, 80 bp, synthetic construct
  source 1..80: mol_type = other DNA
ccgtttgtgccgctggattacgcgaagggcgcctctccttatgtgcccatcacggtgacggtagcaccaatgagcgctga

SEQ ID NO: 145335 - DNA, 80 bp, synthetic construct
  source 1..80: mol_type = other DNA
tacgatcaaaggctgtgatccaaggtcttcccgcagttttaacaccaggctcagagcagtttctaaccacagatgacaga

SEQ ID NO: 145336 - DNA, 80 bp, synthetic construct
  source 1..80: mol_type = other DNA
cctaggctataggctaaacttccctttcccctttccctttattgttgtaaatattaattcctgcaggttcaggtctcttg

SEQ ID NO: 145337 - DNA, 80 bp, synthetic construct
  source 1..80: mol_type = other DNA
atggaagcgtacagagtggaagttaacacatccaaacatgcaggtgatcaagtgtttggattcaagcttgacccaggttc

SEQ ID NO: 145338 - DNA, 80 bp, synthetic construct
  source 1..80: mol_type = other DNA
cccaggtgagaccttggtaattgatggaagggagattaaaattctcgacgcacaagccctagtggaccaggctggtacca

SEQ ID NO: 145339 - DNA, 80 bp, synthetic construct
  source 1..80: mol_type = other DNA
taccgagattggcaaggtatcaatatacaacataccaatattaaggaaaagtaacaatgatggactaatactctctatac

SEQ ID NO: 145340 - DNA, 80 bp, synthetic construct
  source 1..80: mol_type = other DNA
acttgagacatttccactgtgctgaagaacaaggaattactgattatatacatatgctaggtgaagcatttggtagtgga

SEQ ID NO: 145341 - DNA, 80 bp, synthetic construct
  source 1..80: mol_type = other DNA
tcctaaccactgatcctatgttcgcaatccagcgttcggtaggtcgtaacgcgcaagtcggtggcggaaccaactacttt

SEQ ID NO: 145342 - DNA, 80 bp, synthetic construct
  source 1..80: mol_type = other DNA
cttaacacagccaaggcactccagcgctgtgagggatgtcctacgccacagcactacaagcagtgttgcccaatgttatg

SEQ ID NO: 145343 - DNA, 80 bp, synthetic construct
  source 1..80: mol_type = other DNA
cagttctttttgaagacaagtggtacacccagcaggacttgtgtcccgttaatcttatgtcacttgcggttagcgcagct

SEQ ID NO: 145344 - DNA, 80 bp, synthetic construct
  source 1..80: mol_type = other DNA
gatttaaagacataaaagatgaatacacaacagtatatcccacactaacaacacaaacaccccaaaactactttttaaca

SEQ ID NO: 145345 - DNA, 80 bp, synthetic construct
  source 1..80: mol_type = other DNA
ctttaagagctttgtttagtgcaactttaaattacaaggagtagaaagctgaaatgaatctatgaaggtgctattctttg

SEQ ID NO: 145346 - DNA, 80 bp, synthetic construct
  source 1..80: mol_type = other DNA
ccgcgactccttgtgttttcaccgacgtgcttaatcagtcaaagccggtcacgttgtttctgtacggcgttgtctttatc

SEQ ID NO: 145347 - DNA, 80 bp, synthetic construct
  source 1..80: mol_type = other DNA
gcccctccaaagaatcggaaagatgcaatgctcgggacgcacatcatttgggatctaggcttgcaatccagctgcactat

SEQ ID NO: 145348 - DNA, 80 bp, synthetic construct
  source 1..80: mol_type = other DNA
aaaacatgtcgtggagaccgccgaattataacatccaaggcagagaaggccagtggtttgctgcaatttatcacagccat

SEQ ID NO: 145349 - DNA, 80 bp, synthetic construct
  source 1..80: mol_type = other DNA
acatttagaaggaaaagtcatcatagttgcagtccatgtagccagtggatttatagaggcagaagtcattccacaggaaa

SEQ ID NO: 145350 - DNA, 80 bp, synthetic construct
  source 1..80: mol_type = other DNA
atcggtcatacggactcggtgtcggcggccctggaactctcacacagcgcggcggccgggctgcccgaggccgatgagaa

SEQ ID NO: 145351 - DNA, 80 bp, synthetic construct
  source 1..80: mol_type = other DNA
atcggttcctccactgggctggtctcaaacaatggttactttactgtctttgttatgaaccctcttgtcactcctggtcc

SEQ ID NO: 145352 - DNA, 80 bp, synthetic construct
  source 1..80: mol_type = other DNA
ttcaggttcactacaagctgctctttggactcaacgtgcgtccgcaagcgccgtgcgcgttggacgctacacgcgacttt

SEQ ID NO: 145353 - DNA, 80 bp, synthetic construct
  source 1..80: mol_type = other DNA
gaagatcgtcactaaccacgtgactctccacagccaaccactgtgctatgtcgtacacttcctgggaggagtctacgtcc

SEQ ID NO: 145354 - DNA, 80 bp, synthetic construct
  source 1..80: mol_type = other DNA
cccacaccaccaaaccacaagcactgggtgccctagagattggagcaactgcagacttgaaaccagaggcaatgatagaa

SEQ ID NO: 145355 - DNA, 80 bp, synthetic construct
  source 1..80: mol_type = other DNA
tgtcggtgtggtagctagtgcagccctaggaacagggaagactgtcgccactatgtcctccgcacttcggtctcgggctc

SEQ ID NO: 145356 - DNA, 80 bp, synthetic construct
  source 1..80: mol_type = other DNA
tcaaaatgacttacattccacatatggaaaggcaacccttaaatgtatggagtaccacacaggtatttacagctccatat

SEQ ID NO: 145357 - DNA, 80 bp, synthetic construct
  source 1..80: mol_type = other DNA
gcagtaagaacacaaagttaacaccccgcaagaccaccgtttccaggcgaaacccaccgtcttcaatgaatgttaactcc

SEQ ID NO: 145358 - DNA, 80 bp, synthetic construct
  source 1..80: mol_type = other DNA
aacattgcccagtttcaccacggattttttacacagtggacaggcatatacagtgctgcttttttaaactaccatagaat

SEQ ID NO: 145359 - DNA, 80 bp, synthetic construct
  source 1..80: mol_type = other DNA
gagatgtccaaacttcttttttcctgtcccagcccttaagccagtgaactcgcgagcaattggacttagtgatgagagcc

SEQ ID NO: 145360 - DNA, 80 bp, synthetic construct
  source 1..80: mol_type = other DNA
acatcaattattttaaggatgctgcttcaagcggggcttccaaacttgaattttcacaagatccaagcaaatttactgac

SEQ ID NO: 145361 - DNA, 80 bp, synthetic construct
  source 1..80: mol_type = other DNA
ccgtgttcaacacctttaaaaccgaggagcacctaaagtgccctgcagcaaaagacttaaaacaaaaggaccctgctaat

SEQ ID NO: 145362 - DNA, 80 bp, synthetic construct
  source 1..80: mol_type = other DNA
catacaaaggagttgacttggataagttacgcattattgcgtatggtgatgatgttattgtgtcctacccattccagctg

SEQ ID NO: 145363 - DNA, 80 bp, synthetic construct
  source 1..80: mol_type = other DNA
ttcttgccatgatcaattgagcccaccaccttttttttttagagaggaggaatttcgtcttgatctccagccggagacaa

SEQ ID NO: 145364 - DNA, 80 bp, synthetic construct
  source 1..80: mol_type = other DNA
agtaaaagatgtgttgactaaaggaatacccacactgcaatcaccaactgttgaagcttgcggttactctgaccgcatca

SEQ ID NO: 145365 - DNA, 80 bp, synthetic construct
  source 1..80: mol_type = other DNA
aagtttataaagatagatacagcaacctaaacacagatcaagcattacaaagcagaaaacaagcatatacagaactaaca

SEQ ID NO: 145366 - DNA, 80 bp, synthetic construct
  source 1..80: mol_type = other DNA
aagaggaatacaacaagttcattagtaagataagatcaacagacattggaaaatgtttgaacttacctgagtacagcgta

SEQ ID NO: 145367 - DNA, 80 bp, synthetic construct
  source 1..80: mol_type = other DNA
aggagaaaactggaactgttcacgtaccttagatttgatgctgaaattaccatacttacaactgtggcagtaggtagcaa

SEQ ID NO: 145368 - DNA, 80 bp, synthetic construct
  source 1..80: mol_type = other DNA
cttacatgtacgccaggaatgtggactttgaaccacaaggtgtcactgagtctagagaaaaaatcacactcgacagggac

SEQ ID NO: 145369 - DNA, 80 bp, synthetic construct
  source 1..80: mol_type = other DNA
taactcatcaaataatgtatgtgcccccagggggaccagtgcccaccaagatcaacagttacagctggcagacatcaacc

SEQ ID NO: 145370 - DNA, 80 bp, synthetic construct
  source 1..80: mol_type = other DNA
tcagggtatcacagactatgtcacacaactgggaaatgcatttggagatgggttcacaagttctattagggaaacactag

SEQ ID NO: 145371 - DNA, 80 bp, synthetic construct
  source 1..80: mol_type = other DNA
tttattccaactactaacacaaatccactaacagaatcaaatgcatcatcagacaccatagttatacacaagacaacagt

SEQ ID NO: 145372 - DNA, 80 bp, synthetic construct
  source 1..80: mol_type = other DNA
acgtcatggccaccaatactgaagcaaagacttcgtacgtttcgtacgtgaatgcgaatcctggagaggcgggcggcaca

SEQ ID NO: 145373 - DNA, 80 bp, synthetic construct
  source 1..80: mol_type = other DNA
ataacttcacactgatgattatcccttttgcaaaacttgattacgcagctggttcttcaacctacatccctatcactgtg

SEQ ID NO: 145374 - DNA, 80 bp, synthetic construct
  source 1..80: mol_type = other DNA
tgactgcgcgcccttccacggcgtgtgggccgagcagggccagatcatcgtacagtcacgcgatacggcgttagcggccg

SEQ ID NO: 145375 - DNA, 80 bp, synthetic construct
  source 1..80: mol_type = other DNA
aatcagaccctcagatcagttgtgatgcatgcgtgattgatccgattattcttacaaagcaaagaatgcctatcccagat

SEQ ID NO: 145376 - DNA, 80 bp, synthetic construct
  source 1..80: mol_type = other DNA
cagccctacactatgctaaccaactcaagcaattagacataaagactacaaagatgagcatggaagatgcttgctacggc

SEQ ID NO: 145377 - DNA, 80 bp, synthetic construct
  source 1..80: mol_type = other DNA
ctgcagaaagaatagttaacatgataactgcagaacaggagatacaattcctccaaacaaaaaagttaaaatttcaaaat

SEQ ID NO: 145378 - DNA, 80 bp, synthetic construct
  source 1..80: mol_type = other DNA
tagtatggtggaacagaaagcctccctttaaactgaacaagctgagctgcccttcttttcacccaggcatgctcatgcag

SEQ ID NO: 145379 - DNA, 80 bp, synthetic construct
  source 1..80: mol_type = other DNA
gaagttgcaaaattaaagaaaggattggatgaactggcacctttgtatgcttgtgagaacaagagagtatcaatgattca

SEQ ID NO: 145380 - DNA, 80 bp, synthetic construct
  source 1..80: mol_type = other DNA
aacaacctgagaatgacatacaaaatccagtagaagacttcattgatgaaactctcaaagaagtgttagttgttccaaac

SEQ ID NO: 145381 - DNA, 80 bp, synthetic construct
  source 1..80: mol_type = other DNA
acgcaacgtgcacggcagtttggtgacggcgcaattgagcagcgtctggtagaagttcttcagctgcacgttgatacgca

SEQ ID NO: 145382 - DNA, 80 bp, synthetic construct
  source 1..80: mol_type = other DNA
caataccgtaatcacgattgccgctctacccgctgcgacagtgatttccactacggttgttgtggccccttactcagtgt

SEQ ID NO: 145383 - DNA, 80 bp, synthetic construct
  source 1..80: mol_type = other DNA
cagggattcctatatcacaattaactgtgtgcccccaccaatggatcaacctgcgcacaaacaattgcgctacaataata

SEQ ID NO: 145384 - DNA, 80 bp, synthetic construct
  source 1..80: mol_type = other DNA
atatcctagagagacaaataacaactatgcatgtttctaaccccacacaagaaaaaagagaacagttattcaataatgtt

SEQ ID NO: 145385 - DNA, 80 bp, synthetic construct
  source 1..80: mol_type = other DNA
cgcgacagagactttctccctgagggttctctatgaccagtaccagaagggcttcaacaggtggtcccacaccaacgagg

SEQ ID NO: 145386 - DNA, 80 bp, synthetic construct
  source 1..80: mol_type = other DNA
gaaatcacaatagttattaataaccaagacctaatgcagataatgtatgtaccacctggcatagccacacctgatagtaa

SEQ ID NO: 145387 - DNA, 80 bp, synthetic construct
  source 1..80: mol_type = other DNA
tgatgtttcacccctcaagattccccactctgtccccgcctttgctcacctcgtccagcgacaggggctgcggcggcaag

SEQ ID NO: 145388 - DNA, 80 bp, synthetic construct
  source 1..80: mol_type = other DNA
ctgtaaaagatgtattggaaaaaggcatccctacattacagtccccaacagttgaagcatgtggatattcagacaggatc

SEQ ID NO: 145389 - DNA, 80 bp, synthetic construct
  source 1..80: mol_type = other DNA
cctttagattttccaaagaaaggccatggtgccctaacccaattgtttgcttactattcaggtgaattaaatatacatgt

SEQ ID NO: 145390 - DNA, 80 bp, synthetic construct
  source 1..80: mol_type = other DNA
ctcacattcccacacaaatcatggagacaaaaaatgctgtcttagcagtgaacaccagcaaattccctaacatgtatatt

SEQ ID NO: 145391 - DNA, 80 bp, synthetic construct
  source 1..80: mol_type = other DNA
ccgagggtcttaaccctagaccatggcgtggtggtgatggcgcagacgctggtggcgaccgcggtggagacggaggcgcc

SEQ ID NO: 145392 - DNA, 80 bp, synthetic construct
  source 1..80: mol_type = other DNA
attacagaactggtaccgagggcaactacaccctaaagaacagacacttcatacaacatagaaacaatataaaaggttta

SEQ ID NO: 145393 - DNA, 80 bp, synthetic construct
  source 1..80: mol_type = other DNA
tgcaaattgccatagatcagtattcaggacaactattatcattggatataccaacagaggagttgacattgaaggatgca

SEQ ID NO: 145394 - DNA, 80 bp, synthetic construct
  source 1..80: mol_type = other DNA
gcaaattctgccctgtagattacctctttgggaatggcactttactaggtaacgcgtttgtgtttccacatcaaataatt

SEQ ID NO: 145395 - DNA, 80 bp, synthetic construct
  source 1..80: mol_type = other DNA
ttcccacaccagctcataaacttaaggacaaacaactcaagtaccattgttgtaccctacatcaactgtacgcctatgga

SEQ ID NO: 145396 - DNA, 80 bp, synthetic construct
  source 1..80: mol_type = other DNA
agaaacagcacataagtttgcatcaactaagactacgggtgagcatacggtacaatcgatagtatgcaacgcgggcatgg

SEQ ID NO: 145397 - DNA, 80 bp, synthetic construct
  source 1..80: mol_type = other DNA
tgccatcaggctgctcagggactagtatattcaacacaatgataaataatgttataatcagaacattagttttagatgca

SEQ ID NO: 145398 - DNA, 80 bp, synthetic construct
  source 1..80: mol_type = other DNA
tccaatattccttagtccatacagaaccagccctatagaaaactggcctatggcatacagagacatttcatacaatcccc

SEQ ID NO: 145399 - DNA, 80 bp, synthetic construct
  source 1..80: mol_type = other DNA
ttaccataaagccaaacatgtcaaagtctggtgccccagaccgcccagggcagttgaatacactaatgtacacctcacca

SEQ ID NO: 145400 - DNA, 80 bp, synthetic construct
  source 1..80: mol_type = other DNA
atgactttactcaagaccctggaaaattcactcaacctgtattggatgctctacgcgaggccgtaccacctttgcagtca

SEQ ID NO: 145401 - DNA, 80 bp, synthetic construct
  source 1..80: mol_type = other DNA
gccagcctataacaccaacaacctcctgaacgtagcaaaggcactccttccatgcactgactgtccaaaaccagaatttt

SEQ ID NO: 145402 - DNA, 80 bp, synthetic construct
  source 1..80: mol_type = other DNA
catcatcaattgacaaaccaacccaccctgagacatcatctgataggttctacacgctcaagagcgttgaatggggctca

SEQ ID NO: 145403 - DNA, 80 bp, synthetic construct
  source 1..80: mol_type = other DNA
ggcgatgacccgtgtggccgacacggtagccagcgggcctgcaaactccgagagtgtcccagcactgacagcagtagaga

SEQ ID NO: 145404 - DNA, 80 bp, synthetic construct
  source 1..80: mol_type = other DNA
cttttgtgataactagctcacaggagaacggaacgcaggtgaactccgacaatgcagtcctcacccaccaaattatgtac

SEQ ID NO: 145405 - DNA, 80 bp, synthetic construct
  source 1..80: mol_type = other DNA
cttaaaaatgatgaacccaccactagtaatactgaggacctgtttgccacttggaagatcagttatttgaacgcatacca

SEQ ID NO: 145406 - DNA, 80 bp, synthetic construct
  source 1..80: mol_type = other DNA
gattcaggaacatataccgaggacgtttacgagtgcgaccttttatgtaacattactaactgcacctacaccataaacag

SEQ ID NO: 145407 - DNA, 80 bp, synthetic construct
  source 1..80: mol_type = other DNA
ccccccccgaagatcgtcactaaccacgtgactcccacaggccaaccgaagcgtacgtcgtgcacttcctgggcggagtc

SEQ ID NO: 145408 - DNA, 80 bp, synthetic construct
  source 1..80: mol_type = other DNA
gtcgtagccattccagagcaccagttaggtaagtacaacacaggaacttcggcatctttcgacgatgtcatgaaagggaa

SEQ ID NO: 145409 - DNA, 80 bp, synthetic construct
  source 1..80: mol_type = other DNA
aaccataccatgttaacaccaccaacagtatcttctcttccagcaatgtcaaggagattttactttgatttagatattca

SEQ ID NO: 145410 - DNA, 80 bp, synthetic construct
  source 1..80: mol_type = other DNA
acaacattgaagataatgtcactagtgaagctatgtattccataaaattacaatcatcagttgatccagatcttaaaata

SEQ ID NO: 145411 - DNA, 80 bp, synthetic construct
  source 1..80: mol_type = other DNA
atgggcgcacaggtttccaagcaaagtgtgggagctcatgagaccatggtgcatgctggttctggtgctgttgttaagta

SEQ ID NO: 145412 - DNA, 80 bp, synthetic construct
  source 1..80: mol_type = other DNA
gtagtaaagacctgtcacataacagggtggctccccttcatagtctgtggcacagggaacactcagttcaactacataac

SEQ ID NO: 145413 - DNA, 80 bp, synthetic construct
  source 1..80: mol_type = other DNA
tctcaacacaattaaacatgggttcacaagtatccactcagcggtctggctcccacgagaattctaattcagctacagaa

SEQ ID NO: 145414 - DNA, 80 bp, synthetic construct
  source 1..80: mol_type = other DNA
tcggcataatcacagcaggtggtgaaggccatgtagcatttacagatctcagacagtttcaatgtgctgaagagcagggt

SEQ ID NO: 145415 - DNA, 80 bp, synthetic construct
  source 1..80: mol_type = other DNA
aactacaacagttaagagcatactactttgaatgggaaactaaacacactggggtcgcagtaccacctacctggaccacc

SEQ ID NO: 145416 - DNA, 80 bp, synthetic construct
  source 1..80: mol_type = other DNA
atggccgggctcgtagaaggacacggcagcttttcaaaaaactacagcagccacctagaggacagaattttaaagggtcc

SEQ ID NO: 145417 - DNA, 80 bp, synthetic construct
  source 1..80: mol_type = other DNA
ttatgatgggcagtaacacggccacttccaccggtggtgttacctacgcaaacgccaatccaggagagagtggaggaaag

SEQ ID NO: 145418 - DNA, 80 bp, synthetic construct
  source 1..80: mol_type = other DNA
cccactgatgtcacgagtactatcaggatatactttaaacccaagcatgtgcgagcctgggttcctcgaccacctaggct

SEQ ID NO: 145419 - DNA, 80 bp, synthetic construct
  source 1..80: mol_type = other DNA
tggcaattatcttctctcttacggtttctccggtacggctgtcactggtcagatttccatctctgcttccgcgggtgtgc

SEQ ID NO: 145420 - DNA, 80 bp, synthetic construct
  source 1..80: mol_type = other DNA
tggagcacggcaccaaatgcagagtgagatggtccaagtccgtgggcacccactggcgcaaacggaatacggcttcggtg

SEQ ID NO: 145421 - DNA, 80 bp, synthetic construct
  source 1..80: mol_type = other DNA
cctcagtagtgagacggtgcctcatcaggggcatagtccccatgatgatatgcgggcacactaactggaaccgaaactac

SEQ ID NO: 145422 - DNA, 80 bp, synthetic construct
  source 1..80: mol_type = other DNA
aaaggtttaggaaacagaatgtggctacagtcagtaaccaaaaaaacaacagacctagattctcagtgcagatgtgtttt

SEQ ID NO: 145423 - DNA, 80 bp, synthetic construct
  source 1..80: mol_type = other DNA
aagaaactagtactgactcagtggcacccctctgtagtaagacgctgctttatcaggggcatagtccccatcctcatatg

SEQ ID NO: 145424 - DNA, 80 bp, synthetic construct
  source 1..80: mol_type = other DNA
gcaccgtgcacagggctatcaacggtgctacaagcgtcgagtctgcagccaacaccgccccaagctcacaccgattggag

SEQ ID NO: 145425 - DNA, 80 bp, synthetic construct
  source 1..80: mol_type = other DNA
tacgtcacacgccgccattttgaatcacaaaatggcggacttccttccgcttttttgaaaataacggcccagcggcggcg

SEQ ID NO: 145426 - DNA, 80 bp, synthetic construct
  source 1..80: mol_type = other DNA
tgctcaggttcaccatggagatttttgaaggagaaattctgcaagtggactcaactcaactacattcacaaagagtctga

SEQ ID NO: 145427 - DNA, 80 bp, synthetic construct
  source 1..80: mol_type = other DNA
aggcactgtaatacatcagtcattcaggaatcatgtgataaacattattgggatgctataagatttagatattgtgctcc

SEQ ID NO: 145428 - DNA, 80 bp, synthetic construct
  source 1..80: mol_type = other DNA
tcaggcaagatgccagacggccgaggccaagtacccatctactggcaacaaagatggtacccccgtatggcctttcagct

SEQ ID NO: 145429 - DNA, 80 bp, synthetic construct
  source 1..80: mol_type = other DNA
acaatcattgccaatgtcattagtatagcaggtattatatatgttatctataaactcttctgcacactacaagggccata

SEQ ID NO: 145430 - DNA, 80 bp, synthetic construct
  source 1..80: mol_type = other DNA
caaaatatggtctcaccataactccagcagacaaatcagataagtttagtgaaaccacctgggataatatatcttttctc

SEQ ID NO: 145431 - DNA, 80 bp, synthetic construct
  source 1..80: mol_type = other DNA
caattgtacctctggcacacccaacaggaatgactacaacaataccaattacagtgaccatagcgcccatgtgcaccgaa

SEQ ID NO: 145432 - DNA, 80 bp, synthetic construct
  source 1..80: mol_type = other DNA
catcaccaatagaaggctggcccatggcctacagagacatctcttacaatccactaaatgacaaaggcataggtaacaaa

SEQ ID NO: 145433 - DNA, 80 bp, synthetic construct
  source 1..80: mol_type = other DNA
gaagatcgtcactgcccacgtgactcccgcaggccaatccagagatactacgtacacttcctggggtggagcttcgccga

SEQ ID NO: 145434 - DNA, 80 bp, synthetic construct
  source 1..80: mol_type = other DNA
ggtggttggatttattcatttaaatgtagatatagtacacaatttgtctagaattagtgtagtataaaaaaaaaaaaaaa

SEQ ID NO: 145435 - DNA, 80 bp, synthetic construct
  source 1..80: mol_type = other DNA
gagcggcagtggttcgagtgctgctaccgagcccacggtgctttttgtggctgcggtaattttattcttcatctttctgg

SEQ ID NO: 145436 - DNA, 80 bp, synthetic construct
  source 1..80: mol_type = other DNA
tggattcactccattaactattttcactccagaacttatttggattatcttaagactgagaaaactacatcacaatgggt

SEQ ID NO: 145437 - DNA, 80 bp, synthetic construct
  source 1..80: mol_type = other DNA
gaaaacacgcggaaaagaggaagtccccggggacagtctgccgggagcggcaggcgcacaacccgcgtcggggacacgcg

SEQ ID NO: 145438 - DNA, 80 bp, synthetic construct
  source 1..80: mol_type = other DNA
cacacagctccactagtagtgatgaactaataaacaattttttaaagctagctattccagatgatacaaaaaaaagacac

SEQ ID NO: 145439 - DNA, 80 bp, synthetic construct
  source 1..80: mol_type = other DNA
cgggtataaacctgacggtaccacattaaacggcaactctaaagtatggagtcaaagtgactgggcacaatttaaagctc

SEQ ID NO: 145440 - DNA, 80 bp, synthetic construct
  source 1..80: mol_type = other DNA
atgttggtatagctaacgcctactcccatttctatgacgggttcgcacgggtgccaattaaggatgaagcaacagattca

SEQ ID NO: 145441 - DNA, 80 bp, synthetic construct
  source 1..80: mol_type = other DNA
ctttggaaaagggaaaatgccagacggcaacgggtacatacccatagcctacagatttcagtggtacccttgcatgttcc

SEQ ID NO: 145442 - DNA, 80 bp, synthetic construct
  source 1..80: mol_type = other DNA
aaagacataactaaattgaagttggcacttgacaaatacggggttgatttgccaatggtgacatttctcaaagatgagct

SEQ ID NO: 145443 - DNA, 80 bp, synthetic construct
  source 1..80: mol_type = other DNA
gcctcagaaccacggctttcacacaccatgttgggtgaaattttaaattactacacacactggacagggtcaattagatt

SEQ ID NO: 145444 - DNA, 80 bp, synthetic construct
  source 1..80: mol_type = other DNA
acccagatataggagtagggaagaacaattttcatagcgcgaagaaagagttgtttattgaacctctagatccagccaag

SEQ ID NO: 145445 - DNA, 80 bp, synthetic construct
  source 1..80: mol_type = other DNA
agagttgctgatactatacggagtggaccatccaattcggaggcagtcccagcactcacagcagccgagactggacacac

SEQ ID NO: 145446 - DNA, 80 bp, synthetic construct
  source 1..80: mol_type = other DNA
tggaggcgtccgcgccgccgacgaagagtaccgacccgaagacctcgacgagcttttcggcgctatcgaacaagaacagt

SEQ ID NO: 145447 - DNA, 80 bp, synthetic construct
  source 1..80: mol_type = other DNA
tgataagtttgcgaatcctgtcaaggatatttttaccgagatggcagctccgctaaagtctccgtctgctgaggcatgtg

SEQ ID NO: 145448 - DNA, 80 bp, synthetic construct
  source 1..80: mol_type = other DNA
catcacagagaaattgttgaagaatttgatcaaacttatcagcagcttggttataatcattaggaattatgaagacacca

SEQ ID NO: 145449 - DNA, 80 bp, synthetic construct
  source 1..80: mol_type = other DNA
acagacaaaggaataggaaacatagtgtggatagactggctcagtaaatcagacgcagtatactcagaaaagcaaagcaa

SEQ ID NO: 145450 - DNA, 80 bp, synthetic construct
  source 1..80: mol_type = other DNA
aaatacttaatgtggatggtagggaagtcaaagtaatcaaaaggcaaattttaactgacatgaatgacattgacactgaa

SEQ ID NO: 145451 - DNA, 80 bp, synthetic construct
  source 1..80: mol_type = other DNA
taagtggcaatcagacagcaagaatgatcaagtataactacccaacaaaatcagggttctgtggtggtatcctttataaa

SEQ ID NO: 145452 - DNA, 80 bp, synthetic construct
  source 1..80: mol_type = other DNA
cgggcatactgtgcgtggtacaccgtgattccggtcaccttgtacgcctgtttgctaccccaccccaactttctttcatt

SEQ ID NO: 145453 - DNA, 80 bp, synthetic construct
  source 1..80: mol_type = other DNA
tacaacgcattaaataacatgggcaaattgtacgcacgtcacgtgaataaggatacaccataccagatgtccagcacaat

SEQ ID NO: 145454 - DNA, 80 bp, synthetic construct
  source 1..80: mol_type = other DNA
aatgggagcgcaggtatcaacacagaaaactggggcccatgaaaccggtttgagtgctagtgggaactctgttgtacatt

SEQ ID NO: 145455 - DNA, 80 bp, synthetic construct
  source 1..80: mol_type = other DNA
acaaaacaacaagagtactacacaaaaacttatggcagctatgccagtcaatattttactggaaagaagtactgggactg

SEQ ID NO: 145456 - DNA, 80 bp, synthetic construct
  source 1..80: mol_type = other DNA
tagctgactcatgtgacttatcacgtgacagatacgtcacggccgccattttaagtcacaaaatggctgacttccttcct

SEQ ID NO: 145457 - DNA, 80 bp, synthetic construct
  source 1..80: mol_type = other DNA
ccagatcgtcaagctctctccaacttcttcatgtctgaagtccccatctcagcttcctcttcaaccctggtttccttttc

SEQ ID NO: 145458 - DNA, 80 bp, synthetic construct
  source 1..80: mol_type = other DNA
gagacccctgcaccggaggtgccgtggcgccccacaccagtcgacaccctcgtgcaatacaagtccatgacccgaagtat

SEQ ID NO: 145459 - DNA, 80 bp, synthetic construct
  source 1..80: mol_type = other DNA
tggctacatagactgggcaattaaaaacacaggggtctcctcactagcgagagacgccagaatctgcatcaggtgtccct

SEQ ID NO: 145460 - DNA, 80 bp, synthetic construct
  source 1..80: mol_type = other DNA
accgcgcatgtctattccctatatggggattgggaatgcatacagtagtttttacgatggatggtcaaacttcaaccata

SEQ ID NO: 145461 - DNA, 80 bp, synthetic construct
  source 1..80: mol_type = other DNA
cataacaaacttaggaaaagcatttggtgtgggttttacagaccagatatcagcaaaagttacagagctccaagacagtg

SEQ ID NO: 145462 - DNA, 80 bp, synthetic construct
  source 1..80: mol_type = other DNA
atggcacggaggcatttcagatacccgtgagtgctggtaacacacaggaaaaaggtgccatatttagcttccagctaaat

SEQ ID NO: 145463 - DNA, 80 bp, synthetic construct
  source 1..80: mol_type = other DNA
tggttagcaccgcaggtgtagagaaggcacttagcctgggggtaactaaactggtcgagcgatggatttccgtctctggt

SEQ ID NO: 145464 - DNA, 80 bp, synthetic construct
  source 1..80: mol_type = other DNA
acaaattacagacagaagagatgtacaatttaagtgggaaactaaattcacagacaacgcaacacacgtaaacgcaacat

SEQ ID NO: 145465 - DNA, 80 bp, synthetic construct
  source 1..80: mol_type = other DNA
caaagatataatgacacaggcaaataaatggttctgggacaacctcatgcatgacaatgacctgcactcaacctatggca

SEQ ID NO: 145466 - DNA, 80 bp, synthetic construct
  source 1..80: mol_type = other DNA
gtctaattcggctaatcggcaagactttacacaagacccgagtaagtttacagagcctgttaaagatgttatgattaagt

SEQ ID NO: 145467 - DNA, 80 bp, synthetic construct
  source 1..80: mol_type = other DNA
gctgcggtccgcacgctgcgcccgctcccgcctgcctcccgccctaccccccaccctccccggccgaggcccggcgccgg

SEQ ID NO: 145468 - DNA, 80 bp, synthetic construct
  source 1..80: mol_type = other DNA
tgtgacgtagttgctgacctttgacccagagtagctgccagatgattaagatggccaataaagtcgccacagccacaaac

SEQ ID NO: 145469 - DNA, 80 bp, synthetic construct
  source 1..80: mol_type = other DNA
tacatgttttatgatgggtatgacacaaatgataagggttcagtaaaatatggtataggagtgactaatgatatgggcac

SEQ ID NO: 145470 - DNA, 80 bp, synthetic construct
  source 1..80: mol_type = other DNA
ggatatattacctgttggtatcagactaacatagtggtcccgcctgaaaccccatccgactgcgtggtgttgtgtttcgt

SEQ ID NO: 145471 - DNA, 80 bp, synthetic construct
  source 1..80: mol_type = other DNA
agattggaattgggggactacaaattagtagaaataacaccaattggctttgcacctacagacataaaaagatactcctc

SEQ ID NO: 145472 - DNA, 80 bp, synthetic construct
  source 1..80: mol_type = other DNA
accctcccactcctgctgtctctcttcccaaccccgacgctcccactcaggttggccccgcggccgaccgacagtggctc

SEQ ID NO: 145473 - DNA, 80 bp, synthetic construct
  source 1..80: mol_type = other DNA
ttacttcaaaccaaagcacgtcaaggcatgggtaccccggccgcccaggttgtgccagtatgagacatcaaggcaagtca

SEQ ID NO: 145474 - DNA, 80 bp, synthetic construct
  source 1..80: mol_type = other DNA
attagaaggtttattcctgaacatatacaggagtggcccaacatgcacctagccaccaatgtgacaaagttccctatgtt

SEQ ID NO: 145475 - DNA, 80 bp, synthetic construct
  source 1..80: mol_type = other DNA
ggtattgacgacattattgataaggtggtcaacaatgctctacagctctcacaacccagccgaccagtcaccgcctcaga

SEQ ID NO: 145476 - DNA, 80 bp, synthetic construct
  source 1..80: mol_type = other DNA
tcttaatgtactggctgctcgctatggcttcacagggggcccggcgccgccaggtggtcctgggccggcgccccaagtga

SEQ ID NO: 145477 - DNA, 80 bp, synthetic construct
  source 1..80: mol_type = other DNA
ttacaaccatcagagacaacaattttaaatatttaactacatgggacacaaaacatccctcacacattaatagcacatac

SEQ ID NO: 145478 - DNA, 80 bp, synthetic construct
  source 1..80: mol_type = other DNA
cgcatagaccaggtgctccacagcgtagtttcccggaccgttggttccggtcacgtctggcccaccccagcccgagaagc

SEQ ID NO: 145479 - DNA, 80 bp, synthetic construct
  source 1..80: mol_type = other DNA
caataaccatggcaggtttaattaacttgagtagtacacccaccaataggatgattcgctacgattatcccaccaaaacg

SEQ ID NO: 145480 - DNA, 80 bp, synthetic construct
  source 1..80: mol_type = other DNA
atttgtgatacagttaaatacactaagaccatattatctaatcaaggcccattcaaaggctttaatgaggtttccactgc

SEQ ID NO: 145481 - DNA, 80 bp, synthetic construct
  source 1..80: mol_type = other DNA
gggcatgactaccacaaaattcaccctaagaatactctttgacgagtaccaaagacacttaaatttctggaccgttagca

SEQ ID NO: 145482 - DNA, 80 bp, synthetic construct
  source 1..80: mol_type = other DNA
agaaattttcatacctggtgaggtcagaaacctcattgagatgtgtcaagttgatacactcatcccaattaacaacacac

SEQ ID NO: 145483 - DNA, 80 bp, synthetic construct
  source 1..80: mol_type = other DNA
ccaaagggcacagcacaaaaaccattagaataccaccccccactctatttgcagacaggtggtacttccagaaagacttt

SEQ ID NO: 145484 - DNA, 80 bp, synthetic construct
  source 1..80: mol_type = other DNA
gcttatgatgaattttctgcagacaggagcaagagacccaagaaagatacagacgtccagcacagccaagagcaaaaaga

SEQ ID NO: 145485 - DNA, 80 bp, synthetic construct
  source 1..80: mol_type = other DNA
tcagtttcgctctgcttactatgatgttacctacaatccatttaatgacaagggcaaaggtaacatgatatggttccagt

SEQ ID NO: 145486 - DNA, 80 bp, synthetic construct
  source 1..80: mol_type = other DNA
caccgggaacgctaacccaacacccaggaaacctgaattaaggagggcagttgtacaagggccccaacatgaatttgtga

SEQ ID NO: 145487 - DNA, 80 bp, synthetic construct
  source 1..80: mol_type = other DNA
tggacattacaaatacatcaatgcacatctcactaacagcaacccggatacagtattgttagccctcacagctgacttgc

SEQ ID NO: 145488 - DNA, 80 bp, synthetic construct
  source 1..80: mol_type = other DNA
aaacaggccaatgagaacctactacgtacacttcctggggcgtgtctatgaagtctatataagcaacagcagtgacgaat

SEQ ID NO: 145489 - DNA, 80 bp, synthetic construct
  source 1..80: mol_type = other DNA
acaatttcccaacaaaagcaggacaatgtggaggagtgctgatggctaccggtaaagttatagggatccatgttggagga

SEQ ID NO: 145490 - DNA, 80 bp, synthetic construct
  source 1..80: mol_type = other DNA
ggtcacctttgtcgcttggctaccctgtctaaccgtccggagaaccccggcccctccggaggaccccgtactcctcagat

SEQ ID NO: 145491 - DNA, 80 bp, synthetic construct
  source 1..80: mol_type = other DNA
ttatgcatatcagagctgccaaagcttacagcaaatcaggaaaactcaatgtcagccaggctatgtcaactatggctact

SEQ ID NO: 145492 - DNA, 80 bp, synthetic construct
  source 1..80: mol_type = other DNA
aatcgccgccgtgactcacgacagggcggaccctaacagggtcatcgtcctgggcctggaacacttcttcctcaaggacc

SEQ ID NO: 145493 - DNA, 80 bp, synthetic construct
  source 1..80: mol_type = other DNA
ctgctaatacaactcttaaacttttgattgcttatacaccacctggaataaagaagccggagaatagaaaacaagccatg

SEQ ID NO: 145494 - DNA, 80 bp, synthetic construct
  source 1..80: mol_type = other DNA
ggccacggtgggtggcctggcctccttaggtttggcggccctggcctcggtgagaagctcgcgtagccacacggcctggc

SEQ ID NO: 145495 - DNA, 80 bp, synthetic construct
  source 1..80: mol_type = other DNA
tgtgctaggaccaaattgctatgctacaacatctgaaccggagaataaaaatgtggtgcaagcaaccacgaccgtaaaca

SEQ ID NO: 145496 - DNA, 80 bp, synthetic construct
  source 1..80: mol_type = other DNA
agacatctatggtgtgacagttaatactgctagtgaaaataagttgatagtggctataccgcttcagatggacaatgaga

SEQ ID NO: 145497 - DNA, 80 bp, synthetic construct
  source 1..80: mol_type = other DNA
ctatatggctactgctcctttaccccaaaagacgaaacaggcatacgtaacattataaatataagagacagtaactttaa

SEQ ID NO: 145498 - DNA, 80 bp, synthetic construct
  source 1..80: mol_type = other DNA
taaaacaagggatatgaaggtgtcattgacccgaggatccaaaccccctcccctgtctcccctcgagcgcctcgctcagc

SEQ ID NO: 145499 - DNA, 80 bp, synthetic construct
  source 1..80: mol_type = other DNA
acttagtgttaacgataggtccagctaatatttttcccgtttttaacgtagtgcaaaacgctaaattgattctatctaga

SEQ ID NO: 145500 - DNA, 80 bp, synthetic construct
  source 1..80: mol_type = other DNA
gccggccacccgcgaccgcaccgccggtcacgccgccgctcagatacgggttgaaaaacatagcggaccgtgagaggctg

SEQ ID NO: 145501 - DNA, 80 bp, synthetic construct
  source 1..80: mol_type = other DNA
atcacaaagctaaacacgtcaaagcttggtgcccacgaccacctagggcagttgaatatacacatacacatgttacaaat

SEQ ID NO: 145502 - DNA, 80 bp, synthetic construct
  source 1..80: mol_type = other DNA
tttgagcagaagtggtacactcagcaagacctgtgttccgttggtcttgtgtcatttgcggtttctgcggccagcctaac

SEQ ID NO: 145503 - DNA, 80 bp, synthetic construct
  source 1..80: mol_type = other DNA
ggtttgtgtccggctggtatcaaacaaacatcatcgtaccgccgagcacccccacaagttgtaaggtcttgtgttttgtg

SEQ ID NO: 145504 - DNA, 80 bp, synthetic construct
  source 1..80: mol_type = other DNA
agacaattaaagaccccagcacacaacccgacttcccaattcccggtaccggtacattccctactcgactacaaatcacg

SEQ ID NO: 145505 - DNA, 80 bp, synthetic construct
  source 1..80: mol_type = other DNA
agttgcaggttcttaaaaagaatttagatgatctgagtccgctctatgcatgtgaaaacaagagagtgaccaacatgctc

SEQ ID NO: 145506 - DNA, 80 bp, synthetic construct
  source 1..80: mol_type = other DNA
ggcaagaaggaggcttcaattttcagggagaaatcatcccgccgtcgtcagacgaagaagcagatcaagaagccctccaa

SEQ ID NO: 145507 - DNA, 80 bp, synthetic construct
  source 1..80: mol_type = other DNA
caggctcctggatctggggctggcctgcctggatctgagctatgtggaaatgagggaatttgtggtttggtgcaggcccc

SEQ ID NO: 145508 - DNA, 80 bp, synthetic construct
  source 1..80: mol_type = other DNA
tgccaggcaatctgccactcgccagggtttgccaaccagaatgcccagtggtgccaatcagttcatgacaacagaggatg

SEQ ID NO: 145509 - DNA, 80 bp, synthetic construct
  source 1..80: mol_type = other DNA
tgacgttacctataacccatttaatgacaagggcaaaggtaacatggtgtggttccagtacctaactaaaccagacacag

SEQ ID NO: 145510 - DNA, 80 bp, synthetic construct
  source 1..80: mol_type = other DNA
tttcaaactttggtgctatagtccaaactggcaaagttgtaaaaagagttggatcaaataattttgaaacacattcagat

SEQ ID NO: 145511 - DNA, 80 bp, synthetic construct
  source 1..80: mol_type = other DNA
gcatgtaacggatatgtagactgggtaaaaaaagaaacagacaactgggtaataaacacccaagctagagttttaatagt

SEQ ID NO: 145512 - DNA, 80 bp, synthetic construct
  source 1..80: mol_type = other DNA
caaaaatcagacaatggcccctatccaaagagaaaatactagccctcaaagaaatctgtgaaaaaatggaaaaagaggga

SEQ ID NO: 145513 - DNA, 80 bp, synthetic construct
  source 1..80: mol_type = other DNA
agagctattgcccgtgttgctgataccattggaagtggctcagtgaactcagagtctatcccagccctaaccgccgcaga

SEQ ID NO: 145514 - DNA, 80 bp, synthetic construct
  source 1..80: mol_type = other DNA
gagacgggtcatacttctcaggtggttcctagtgacactatacagaccaggcatgtcaagaactaccactcccgctcgga

SEQ ID NO: 145515 - DNA, 80 bp, synthetic construct
  source 1..80: mol_type = other DNA
gcaccacaaagtaaaatcagaaaacccatcttctctacatcacagctgctttgctcacaacgtaggcatatttagcagct

SEQ ID NO: 145516 - DNA, 80 bp, synthetic construct
  source 1..80: mol_type = other DNA
attgggtaaagagaagccaaattatttcctaaattttaaatccattaatgttgaaatattcacagttagtcatacaaaag

SEQ ID NO: 145517 - DNA, 80 bp, synthetic construct
  source 1..80: mol_type = other DNA
agacactgagcagtacaaaactacttttgttactgctttatcttctaaattaggtacaacatggggaaacagactaaata

SEQ ID NO: 145518 - DNA, 80 bp, synthetic construct
  source 1..80: mol_type = other DNA
atggtggagacgccgcagacgcggatggctccgccgctggggatggaggcgccgccgcagacctgccagaagacgagcta

SEQ ID NO: 145519 - DNA, 80 bp, synthetic construct
  source 1..80: mol_type = other DNA
ggttcctgaggcagcaggcagagctgttttgccattttattcaggcggctaacgtcaaagggaggagctatatcctcacc

SEQ ID NO: 145520 - DNA, 80 bp, synthetic construct
  source 1..80: mol_type = other DNA
gttaaaattagcagggagatggcctatcacacacctacatacagacaatggtgccaacttcacctcgcaagaggtgaaga

SEQ ID NO: 145521 - DNA, 80 bp, synthetic construct
  source 1..80: mol_type = other DNA
ttataatcagtaggaattatgaagataccactacagtcttggccaccttggcactgctgggttgtgactcatcaccctgg

SEQ ID NO: 145522 - DNA, 80 bp, synthetic construct
  source 1..80: mol_type = other DNA
gattgttggcagcaaagacgcgcatacagtcgtccacgaagaggttgatcacgtcgtaggggctcaccaaccagcctaaa

SEQ ID NO: 145523 - DNA, 80 bp, synthetic construct
  source 1..80: mol_type = other DNA
ccaatcttatgcctgtccctgtcaccggcagccgatccccgtttatcacacactatgttaggggaggtgttgaactacta

SEQ ID NO: 145524 - DNA, 80 bp, synthetic construct
  source 1..80: mol_type = other DNA
ccagttcaaattatcagagagaaaataccactgacttacaaaacctttataaagaattattctgtaagaaagagagcggt

SEQ ID NO: 145525 - DNA, 80 bp, synthetic construct
  source 1..80: mol_type = other DNA
accagtgatgaaaacatgcttgaaactcgctgtgttgtcaactcacacagccttgcagaatcctcagtttctcacttctt

SEQ ID NO: 145526 - DNA, 80 bp, synthetic construct
  source 1..80: mol_type = other DNA
tccttaatacatagcacttatttctcttgctttacggcaggcgaagtaagaagagccatccgaggggaaaagatattatc

SEQ ID NO: 145527 - DNA, 80 bp, synthetic construct
  source 1..80: mol_type = other DNA
acagtttgagtgaaggagaaactgcgaagaaattcgcagcaactgccaccaatggcgccaacacggtgcaatccatcgtg

SEQ ID NO: 145528 - DNA, 80 bp, synthetic construct
  source 1..80: mol_type = other DNA
gaaagagggctaaaataactataagacagtggcaaccagccaagactagaaaatgctacataagaggctacatgcccgcc

SEQ ID NO: 145529 - DNA, 80 bp, synthetic construct
  source 1..80: mol_type = other DNA
acatgtgctattgaattagggttagtctggatagtatatgctactacccgggaagcatatgctacccgtttagggttaaa

SEQ ID NO: 145530 - DNA, 80 bp, synthetic construct
  source 1..80: mol_type = other DNA
acactccttatcatacctttagttaggttgcgtagtggtgccacgggaacaaacacactacccattaccgtcactatagc

SEQ ID NO: 145531 - DNA, 80 bp, synthetic construct
  source 1..80: mol_type = other DNA
attacaaacctcaggatggtgaggtccaaattttcctcaaagaaagagccagcttgacaacagttggacccagtgacatg

SEQ ID NO: 145532 - DNA, 80 bp, synthetic construct
  source 1..80: mol_type = other DNA
gaaaccatgcggcagtcgcaggcggtgcagatcggttttctgcacacacaactggtcatggtgcccttcgtgccgcacgc

SEQ ID NO: 145533 - DNA, 80 bp, synthetic construct
  source 1..80: mol_type = other DNA
ggcggtgtttccgggcgtgctgggcgccggcgccggtaacaggagttacgctggggttgacggtgacggttagcagcgcg

SEQ ID NO: 145534 - DNA, 80 bp, synthetic construct
  source 1..80: mol_type = other DNA
ctgtgctttgcctccgcatgcaacgacttctctgtacgaatgctaagggactcaagctttatcacgcaggacaccccact

SEQ ID NO: 145535 - DNA, 80 bp, synthetic construct
  source 1..80: mol_type = other DNA
cgtacaaagcaaagggtgaaaaaggatcagcagagaggtatgccagttgggagataacaactagacaaatggtacaacta

SEQ ID NO: 145536 - DNA, 80 bp, synthetic construct
  source 1..80: mol_type = other DNA
atgttaatttcagagggaccccttaaaatggaggagaaggctacctatgttcataaaaagaatgatggaaccaccataga

SEQ ID NO: 145537 - DNA, 80 bp, synthetic construct
  source 1..80: mol_type = other DNA
tatgatagggtacttcccagcaataatatgcggacaggggagatggtcagagaactttaccagccacatagaggacaaaa

SEQ ID NO: 145538 - DNA, 80 bp, synthetic construct
  source 1..80: mol_type = other DNA
cgacaacctcgaagcgatgcacccagcccagcacggccaccacggccgcttcatcatagtcgtcgttgttgccgctgtcg

SEQ ID NO: 145539 - DNA, 80 bp, synthetic construct
  source 1..80: mol_type = other DNA
aaagcatgtttcctggtaggatccacagaaagaaaaggaaagtgctattgtccccactgcaccctgcaccgaaaactcgc

SEQ ID NO: 145540 - DNA, 80 bp, synthetic construct
  source 1..80: mol_type = other DNA
gaagagacgcaggcgctggagacgtcgcagacgaagacctgctagacgccgtcgatttcgcagagtaaggagacgcaggg

SEQ ID NO: 145541 - DNA, 80 bp, synthetic construct
  source 1..80: mol_type = other DNA
ccggcgcaacccccggccttgccgccgtcccgcggacatcccgcacgcccagaaaccggacaacacgccgcaaaagcggc

SEQ ID NO: 145542 - DNA, 80 bp, synthetic construct
  source 1..80: mol_type = other DNA
caaagtaggaaacatgtgaaggataatctctatgccatcttccagggtttaggtagcagtgaaacaccaggctttattgt

SEQ ID NO: 145543 - DNA, 80 bp, synthetic construct
  source 1..80: mol_type = other DNA
ctcaatgaccgcaggacccggtagctaccccgaaggcagtaatattaacaaaacatcaatagagttatacaacaactggc

SEQ ID NO: 145544 - DNA, 80 bp, synthetic construct
  source 1..80: mol_type = other DNA
gtgaaaaaacaacagctgtaaatatactaaacacatttagaacagaaggatgttttagtcacccacaacttaaaaaacct

SEQ ID NO: 145545 - DNA, 80 bp, synthetic construct
  source 1..80: mol_type = other DNA
tcacgcgaaaaagggtcggccgagatcagaaagtcgtactgcggcacgcgatcgaaacccacggtagacatggtgaaggt

SEQ ID NO: 145546 - DNA, 80 bp, synthetic construct
  source 1..80: mol_type = other DNA
aataggttctacactttggagagcaaaacatggacaagtgattccaaagggtggtggtggaagttgcctgatgctctcaa

SEQ ID NO: 145547 - DNA, 80 bp, synthetic construct
  source 1..80: mol_type = other DNA
gtgttagtacctgtccattcacaggggtatccagcccttgcgccgcctcccccagcccgccagccaccccagacaggaga

SEQ ID NO: 145548 - DNA, 80 bp, synthetic construct
  source 1..80: mol_type = other DNA
tctggaggacaaaggtagagcattcaccagtgattacgtgattgccagtaccaatatgacggttcttactccaccaaccg

SEQ ID NO: 145549 - DNA, 80 bp, synthetic construct
  source 1..80: mol_type = other DNA
agtacataacaccgtatcgccactgtcgtcactagaaccacctccgatctttttccaggtagaatacacgtcaggattcc

SEQ ID NO: 145550 - DNA, 80 bp, synthetic construct
  source 1..80: mol_type = other DNA
ccacctggtttaacttccctcacactatcattaatcttgcaaactctaactctgctactctcaaacttccctacattgga

SEQ ID NO: 145551 - DNA, 80 bp, synthetic construct
  source 1..80: mol_type = other DNA
cttctaatccaagtgtgttctttcagtctaagaatggtttccctcgctttacaatcccttttacaggcttagcatcagca

SEQ ID NO: 145552 - DNA, 80 bp, synthetic construct
  source 1..80: mol_type = other DNA
gcctccgcgctaaccgccggtggcagtattttgcaaacaaacttcaagagtttaagcagcactgaatttatacctcgtga

SEQ ID NO: 145553 - DNA, 80 bp, synthetic construct
  source 1..80: mol_type = other DNA
aacaggaggtgttgtttaacaacattaggtggttagcacttaaagccagaaaatttgcaccgttatatgcagctgaggcc

SEQ ID NO: 145554 - DNA, 80 bp, synthetic construct
  source 1..80: mol_type = other DNA
aaagacttcagaaaattcaaaaggaatttacagcagtgtacccacagctaccaacacagaggcccacagacagcacactc

SEQ ID NO: 145555 - DNA, 80 bp, synthetic construct
  source 1..80: mol_type = other DNA
cagtgacggccgcaattggcagggttgccgataccatagggactggaccaacaaattctgaggccataccggctctcaca

SEQ ID NO: 145556 - DNA, 80 bp, synthetic construct
  source 1..80: mol_type = other DNA
tgcggttattatcaacgtctctgtgtttttattatttagaaataaatacagggaatgggaaaaacacgcgggggaaaaac

SEQ ID NO: 145557 - DNA, 80 bp, synthetic construct
  source 1..80: mol_type = other DNA
taccctgcggaaacccgctctacgtactggcccgacaagcggtgcagacgttttgcgacacgtgtccgcgatacctggtg

SEQ ID NO: 145558 - DNA, 80 bp, synthetic construct
  source 1..80: mol_type = other DNA
gcttcataccctgaagaattggatccagaacaactggctcaagcgggtgtgaagtatggtctcactataacacctgcaga

SEQ ID NO: 145559 - DNA, 80 bp, synthetic construct
  source 1..80: mol_type = other DNA
acaaacgtcccaatgtgcccactaacaggacggcaaaggtacaaggtcccggttttgattacgcggtggccatggctaaa

SEQ ID NO: 145560 - DNA, 80 bp, synthetic construct
  source 1..80: mol_type = other DNA
acgcacatggaggggactgatgcattccagataaaggttactgctgggaatgtgcaggataagaatgcaatcttctcatt

SEQ ID NO: 145561 - DNA, 80 bp, synthetic construct
  source 1..80: mol_type = other DNA
tgaatgttttaaacacattagcaactccttattgttttaaattccctcaacttgacaaaataccagcacaagacacacaa

SEQ ID NO: 145562 - DNA, 80 bp, synthetic construct
  source 1..80: mol_type = other DNA
ggacgagcacactaagatgcataacacctggagctaccccaacacccaactggacctagccaggttcctaggcagtacct

SEQ ID NO: 145563 - DNA, 80 bp, synthetic construct
  source 1..80: mol_type = other DNA
acacctgattgcgcagaccaattactgcatgggagttatttctcttgctttacagcgggtgaagtgaggagagccatcag

SEQ ID NO: 145564 - DNA, 80 bp, synthetic construct
  source 1..80: mol_type = other DNA
tcaaaccaagcacaagcaaatgatacatggtacctaggacatgcatatgtaaaagacaaaatacaacaggcagcctataa

SEQ ID NO: 145565 - DNA, 80 bp, synthetic construct
  source 1..80: mol_type = other DNA
agtaccagtagccgagcctagacccgcgctgccatggcgtggtggtggcgcacccggtggcgatggcggcgacccagaag

SEQ ID NO: 145566 - DNA, 80 bp, synthetic construct
  source 1..80: mol_type = other DNA
ctatgtgtggcaatgaattgtaatccagttacagggaataacaccaatgccacagccaaaccaaccgcagccagaccaac

SEQ ID NO: 145567 - DNA, 80 bp, synthetic construct
  source 1..80: mol_type = other DNA
ggactaataactcagcaactttggtactaccctatgtgaactctttagctatagactgcatggcaaaacacaacaattgg

SEQ ID NO: 145568 - DNA, 80 bp, synthetic construct
  source 1..80: mol_type = other DNA
attaaatactgtgaggaaaataagtggattgtaccagcagattgtaaattagaaagagatttaaattatgctaatttagt

SEQ ID NO: 145569 - DNA, 80 bp, synthetic construct
  source 1..80: mol_type = other DNA
ggacccaatagaagacaccatcaactccgctgtttctaacacactgaaccgcgcattgggtggagcaagccacacaacag

SEQ ID NO: 145570 - DNA, 80 bp, synthetic construct
  source 1..80: mol_type = other DNA
acaagcagatggtccctaaaagtactgtacgaggagttccaaaagcaccacaacttttggacgcgcagcaacaaagagct

SEQ ID NO: 145571 - DNA, 80 bp, synthetic construct
  source 1..80: mol_type = other DNA
acaccatgcgtacggggcctagcaattccgcgagcgtacctgcactcactgcagttgagacagggcacacctcgcaagtt

SEQ ID NO: 145572 - DNA, 80 bp, synthetic construct
  source 1..80: mol_type = other DNA
tccatgtaacatcagcgatgatcgtaaatataacgtagatgacattgataactgcaacgctactataaatgtaaccgact

SEQ ID NO: 145573 - DNA, 80 bp, synthetic construct
  source 1..80: mol_type = other DNA
atactgtggaaccggggacataggaaccacttttcagaactttggctctcatatgaatgagtacaaacagtataacgctg

SEQ ID NO: 145574 - DNA, 80 bp, synthetic construct
  source 1..80: mol_type = other DNA
cagtacaataagaatctacatgaagcccaagcacgttaaggcttggattcctagaccacccaggttgtgtgattatgtta

SEQ ID NO: 145575 - DNA, 80 bp, synthetic construct
  source 1..80: mol_type = other DNA
ttttgtcaaagtcagaccctagacttgaggtcgattttgaggaagccattttctccaaatatgtgggcaacaccatcaca

SEQ ID NO: 145576 - DNA, 80 bp, synthetic construct
  source 1..80: mol_type = other DNA
gcttattacatataaccacaaccctggtccccaccagcttaaggcatcttgcaatacagtgggtggactcaggacgctta

SEQ ID NO: 145577 - DNA, 80 bp, synthetic construct
  source 1..80: mol_type = other DNA
tttgattactatgcgtctggtatagtaaccatctggtaccaaacaaactttgtcgtgcctcctgacaccccaagtcaagc

SEQ ID NO: 145578 - DNA, 80 bp, synthetic construct
  source 1..80: mol_type = other DNA
ttcggatcccctgccgtggttcctctccgcggacgggcagcagtgcacttccgaatggctgagtttatgctgcccgtccg

SEQ ID NO: 145579 - DNA, 80 bp, synthetic construct
  source 1..80: mol_type = other DNA
gcaaataaagcatatatacaagcagccaaagtaaatttacctaactggaacattccaacaacttataatactgaacccta

SEQ ID NO: 145580 - DNA, 80 bp, synthetic construct
  source 1..80: mol_type = other DNA
taaacagaacgtacctagcgtacaaatgagcgtaaaatacaaatttaaatttaactggggtggaaatcctattcttgaac

SEQ ID NO: 145581 - DNA, 80 bp, synthetic construct
  source 1..80: mol_type = other DNA
ataccatacggagaagtcaacttgagtggaaatcctacctgtcgtctgctcaaatatgattatccaaccaaacccggcca

SEQ ID NO: 145582 - DNA, 80 bp, synthetic construct
  source 1..80: mol_type = other DNA
taaacccattattatacaaccatgtgtaaaccaaatattcatgtttcctcctgaggggcctaagccaataactggggcta

SEQ ID NO: 145583 - DNA, 80 bp, synthetic construct
  source 1..80: mol_type = other DNA
tgactgatatgcagagacaattgaaccaactcaaggcatatcagcgcacacacaggactgagccagtgtgtttattaata

SEQ ID NO: 145584 - DNA, 80 bp, synthetic construct
  source 1..80: mol_type = other DNA
ctaatttaaactacgaagtaatcaacgtaacaggatatgtcggtggatacgttactcttaaaaactgcactagaacggat

SEQ ID NO: 145585 - DNA, 80 bp, synthetic construct
  source 1..80: mol_type = other DNA
acagattattgagagaagaaatatacaatttggctgggaaaccaaattcactgagcaagcaacacacattaaccctacat

SEQ ID NO: 145586 - DNA, 80 bp, synthetic construct
  source 1..80: mol_type = other DNA
cacacagatacaacaattatacgttttaaagaaaccaacacaacgggaatagaagggagcaacgttactattaagggtaa

SEQ ID NO: 145587 - DNA, 80 bp, synthetic construct
  source 1..80: mol_type = other DNA
gctcctttcggtcgggcgctgcgggtcgtggtgcgggcgtcaggcaccgggcttgcgggtcatgcaccaggtgcgcggtc

SEQ ID NO: 145588 - DNA, 80 bp, synthetic construct
  source 1..80: mol_type = other DNA
tggagctggtggtggcaacgatggagaaggcgccgctggaaacccaggaggcgccgctggagacgtctacgatggagaag

SEQ ID NO: 145589 - DNA, 80 bp, synthetic construct
  source 1..80: mol_type = other DNA
gagagcgggtgccggaggtgagtttacacaccgcagtcaaggagcaattcgggctcgggactggccgggccatgggcaag

SEQ ID NO: 145590 - DNA, 80 bp, synthetic construct
  source 1..80: mol_type = other DNA
cgacgaactcccaagcagttccagcactgacggcggttgagaccgggcacacttcgcaagtagtacctggagataccatg

SEQ ID NO: 145591 - DNA, 80 bp, synthetic construct
  source 1..80: mol_type = other DNA
gacagcatcacctacataccagacaccgtcaagcctgacgtgtcgaaccatggcgcctttggacaacagtctggagctgt

SEQ ID NO: 145592 - DNA, 80 bp, synthetic construct
  source 1..80: mol_type = other DNA
gcaaacttccacaaacccgtctgtattttacaccacaggcaacgccccgccaagagtgtcagtaccattcatgggaatta

SEQ ID NO: 145593 - DNA, 80 bp, synthetic construct
  source 1..80: mol_type = other DNA
actaaactacaacaacacatggtacaaaggcaatgtatatacagaaaatataaaaaacataccacccaaagtaagagcca

SEQ ID NO: 145594 - DNA, 80 bp, synthetic construct
  source 1..80: mol_type = other DNA
cctcactgatatgcctttctatacccactgcaaaaccaattacaatgtaacctttcagcttaactacaaataaatggcca

SEQ ID NO: 145595 - DNA, 80 bp, synthetic construct
  source 1..80: mol_type = other DNA
ttatgtggtggagggtggaatgccatctggttgttctggaactagcatattcaattcaatgattaataacataattatta

SEQ ID NO: 145596 - DNA, 80 bp, synthetic construct
  source 1..80: mol_type = other DNA
cactacttatcttggggaaataagtagctatttcacacactggactggaagcttacgcttcagcttcatgttttgtggct

SEQ ID NO: 145597 - DNA, 80 bp, synthetic construct
  source 1..80: mol_type = other DNA
tcactgttcacttgtcggtgtctacctcttaaggtcactaagcactccgagcgtcagcgaggagtgcgacccttccccct

SEQ ID NO: 145598 - DNA, 80 bp, synthetic construct
  source 1..80: mol_type = other DNA
aaccatggttttcgatggactttagacacatgttacaatctgacagtgaacgaaaacggtacattccccactaccaccac

SEQ ID NO: 145599 - DNA, 80 bp, synthetic construct
  source 1..80: mol_type = other DNA
ctcgcgatcctcaaagagcagcgagaggacgtcacgcgtgacgcccttgacgaactcgcaggccgtcttgcgcaccagat

SEQ ID NO: 145600 - DNA, 80 bp, synthetic construct
  source 1..80: mol_type = other DNA
cccagaaaggccgaggtgcacagcaactcgctgcggtactcggccatggaaaccagcagcccgtgctccgtgtgcagcca

SEQ ID NO: 145601 - DNA, 80 bp, synthetic construct
  source 1..80: mol_type = other DNA
tcagcccaggatgatgggccgttgggtcaagaaaaaccaaactatttcctaaactttaggtctatgaatgtggacatttt

SEQ ID NO: 145602 - DNA, 80 bp, synthetic construct
  source 1..80: mol_type = other DNA
tttgacaaacaaaatccaaaccacggctatgttgtatatgactctaactttggaatgggaaaaaccccagaaggctacac

SEQ ID NO: 145603 - DNA, 80 bp, synthetic construct
  source 1..80: mol_type = other DNA
tgtgctaggaacttccgtattagaccaacggacaacttaccaaacccaaataactaagtttgaaacatggctatatgaaa

SEQ ID NO: 145604 - DNA, 80 bp, synthetic construct
  source 1..80: mol_type = other DNA
tgttgatctcattaacacagacctgcaggaagcggcggcggaagtcaggcatacgctggtaactttgaggcagctggtaa

SEQ ID NO: 145605 - DNA, 80 bp, synthetic construct
  source 1..80: mol_type = other DNA
acaggaagaatatttacaggaaatggaagaaatgttagatatctcaaacaaactgttaccactataccccagagaaaaca

SEQ ID NO: 145606 - DNA, 80 bp, synthetic construct
  source 1..80: mol_type = other DNA
gcacgccaatgactatgtacagtacgaccctttcggggggggaatgtgcaccatgctatttactctgggcaaactgtttg

SEQ ID NO: 145607 - DNA, 80 bp, synthetic construct
  source 1..80: mol_type = other DNA
gtatatgcaatattaaataaacttggtttaaaagaaaaagataaaataaaatcaaataatggacaagatgaagataattc

SEQ ID NO: 145608 - DNA, 80 bp, synthetic construct
  source 1..80: mol_type = other DNA
agctagttagccagctgtgtatagtttgttgtgttttgcttttgcgtatttgttttcagtcagagagtctgaaacggggt

SEQ ID NO: 145609 - DNA, 80 bp, synthetic construct
  source 1..80: mol_type = other DNA
ggtttttagaaaatgttaaaaaacccttaaacacaaaagaagaaggattcgcgagtattaacatagtaacccacagagac

SEQ ID NO: 145610 - DNA, 80 bp, synthetic construct
  source 1..80: mol_type = other DNA
tcaagatatgcctgtcctaacccaccagattatgtacgtgcccccgggaggctcagtacccagtagtgttgagagctatg

SEQ ID NO: 145611 - DNA, 80 bp, synthetic construct
  source 1..80: mol_type = other DNA
atacatattttttaagattgtaaaacaacaggaaacgattctcccggtccctcgtaaccaccatactctgtttcaacgct

SEQ ID NO: 145612 - DNA, 80 bp, synthetic construct
  source 1..80: mol_type = other DNA
tccatttctatggtcccctttacactggcattctccctaatctatctggacgcatcactaccggtgcaggtaccacacca

SEQ ID NO: 145613 - DNA, 80 bp, synthetic construct
  source 1..80: mol_type = other DNA
gagacaggcaggttttttagggtttggaccttggggaaagaagcctcgcaacttccccatgacccaagtccctcagggtc

SEQ ID NO: 145614 - DNA, 80 bp, synthetic construct
  source 1..80: mol_type = other DNA
gcatgggttgcgagaaggtctcgggcggacgcttctgcagatcgcagacgtcgtcgcgtagccaggcgctcatttgacct

SEQ ID NO: 145615 - DNA, 80 bp, synthetic construct
  source 1..80: mol_type = other DNA
cagcaccacacccaccatataacgctacccaaccaggagagggaggtaaagaatttgcattcccttatgtgttagattca

SEQ ID NO: 145616 - DNA, 80 bp, synthetic construct
  source 1..80: mol_type = other DNA
gactggtgggtacatactttacttaaaattaaggatatggtcattagtgttttcaaacctagcatagagagtaaagcaat

SEQ ID NO: 145617 - DNA, 80 bp, synthetic construct
  source 1..80: mol_type = other DNA
gtcctggcctgcgcggccttcgatagaccccccagacaagacctatcccgtccccctcactacccctggatgcctactac

SEQ ID NO: 145618 - DNA, 80 bp, synthetic construct
  source 1..80: mol_type = other DNA
cagactgggctgtacggctacacctctttaaataacatgggacaactattcttcaggcatgtgaacaaagctacggtaca

SEQ ID NO: 145619 - DNA, 80 bp, synthetic construct
  source 1..80: mol_type = other DNA
tgttcttggcacaatcctgttgcgggtgcagcgcgccgagagcagcacgcccatgtgggttgcacccactcacagggccc

SEQ ID NO: 145620 - DNA, 80 bp, synthetic construct
  source 1..80: mol_type = other DNA
atcaatgattatagaaacaagataaaaattacagattccttggaggctttgtttcaaggaccagtctataaggatctaga

SEQ ID NO: 145621 - DNA, 80 bp, synthetic construct
  source 1..80: mol_type = other DNA
tctagaccagatacttcctcaaataggttctatacattggagagcaaggtgtggacaaacagctcaaaaggctggtggtg

SEQ ID NO: 145622 - DNA, 80 bp, synthetic construct
  source 1..80: mol_type = other DNA
ttaaacaaaagaagagatgtgaaccagtagcaatagtcattcatggaccacctggtgctggaaagtctataacaacaaat

SEQ ID NO: 145623 - DNA, 80 bp, synthetic construct
  source 1..80: mol_type = other DNA
cggtccacctcgtcgtgccggtacacgttcatagggaagacgcgaaagaggtcctgcacgcggacgcccatgtcggttcg

SEQ ID NO: 145624 - DNA, 80 bp, synthetic construct
  source 1..80: mol_type = other DNA
cctagtgccacacaattagactttcaaccaacatgggcagaaatacaaaacaaaacatcattaaattcaacaggtacaaa

SEQ ID NO: 145625 - DNA, 80 bp, synthetic construct
  source 1..80: mol_type = other DNA
ccacactctttactgacaagtggtactttcaaaaggatattgcagacctgtcactgttaaacctcagtattacgcattgc

SEQ ID NO: 145626 - DNA, 80 bp, synthetic construct
  source 1..80: mol_type = other DNA
cgatggtaataccacccccagcaagaacgtaactctcagtcagggggggtccaccaccgacggagatgaagattactccg

SEQ ID NO: 145627 - DNA, 80 bp, synthetic construct
  source 1..80: mol_type = other DNA
aaggaattagtgaatactgcttcctcagctatggacactctcaatatctctgaagctactgacaaaattactaagggttt

SEQ ID NO: 145628 - DNA, 80 bp, synthetic construct
  source 1..80: mol_type = other DNA
ttgatctgtttagaacctttttctgtttctccaatgttggaaaaattggtccaagacaagttccacaatctccttaaagg

SEQ ID NO: 145629 - DNA, 80 bp, synthetic construct
  source 1..80: mol_type = other DNA
gaattcatgcaccacagaaacaggtggtcagcctccaaccatgacctagaactagtcagatacctcagaaccagcctaaa

SEQ ID NO: 145630 - DNA, 80 bp, synthetic construct
  source 1..80: mol_type = other DNA
aatagctgctggtaagactagatgtatagaagcttgtgaagtagattactgcatagtttacaggatgatcatgatggaaa

SEQ ID NO: 145631 - DNA, 80 bp, synthetic construct
  source 1..80: mol_type = other DNA
gccacttacagcacattttgttctaggtccatcttaggagcccgggccagcattctatcagcttaacgggaagagaagtg

SEQ ID NO: 145632 - DNA, 80 bp, synthetic construct
  source 1..80: mol_type = other DNA
aggcaatctatggcatggagcacttggaaccattagacctaacaactagtgctggtttcccttacgtctcaatgggcata

SEQ ID NO: 145633 - DNA, 80 bp, synthetic construct
  source 1..80: mol_type = other DNA
gagacacagatggtatcccaacttactaaaccaacaagcagtgttagaagacataagtcaatcaggacccttttcataca

SEQ ID NO: 145634 - DNA, 80 bp, synthetic construct
  source 1..80: mol_type = other DNA
aggtggacaagttaaagaaagggttagatgagttggcaccattgtatgcagttgaaaacaaaagagtgacaaaaatccag

SEQ ID NO: 145635 - DNA, 80 bp, synthetic construct
  source 1..80: mol_type = other DNA
ccaacaaccgctaaacacccttcgttggaggctaccaacctgggaagaaaggtaaaacttttaggcacccatacgttctt

SEQ ID NO: 145636 - DNA, 80 bp, synthetic construct
  source 1..80: mol_type = other DNA
cccccagtaggcaaggtgattcatggttaaagaaattcacagagttctgcaacgctgcacgtgggctggagtggattgga

SEQ ID NO: 145637 - DNA, 80 bp, synthetic construct
  source 1..80: mol_type = other DNA
tcatattgccgacaacagcaaaatagactcctttgggggaggatttagtactctgaactttaatatgagctacttatatg

SEQ ID NO: 145638 - DNA, 80 bp, synthetic construct
  source 1..80: mol_type = other DNA
atgtcacagtatagcaacaaaggccacttaaacatggcaactgcaaccaaaccatgcagtgattgccacaaaccatcaaa

SEQ ID NO: 145639 - DNA, 80 bp, synthetic construct
  source 1..80: mol_type = other DNA
ttatgaacccacacccaaaatacacattccaggagaagtcaaaaacttattagaaataattcaggttgacaccttaattc

SEQ ID NO: 145640 - DNA, 80 bp, synthetic construct
  source 1..80: mol_type = other DNA
tggagcacattcatgctgtcatggccaaacaatgccacactccgggagatcaggacgagggccgccaccaacctcaccca

SEQ ID NO: 145641 - DNA, 80 bp, synthetic construct
  source 1..80: mol_type = other DNA
agcagggcatttccagttacatcgagtccctaggtactgcctttggggcagggttcacccaatcaatcggagaaaaaatc

SEQ ID NO: 145642 - DNA, 80 bp, synthetic construct
  source 1..80: mol_type = other DNA
gtttgccctcccttccccaagtctttctatcattcttttcttcctaatgtaacttagacgttataccacagtccaatagg

SEQ ID NO: 145643 - DNA, 80 bp, synthetic construct
  source 1..80: mol_type = other DNA
accagatgcaaaccagtactttgcacctaaagatagcctgtggggagatgccatatacttaaatacaagtaatcaaactg

SEQ ID NO: 145644 - DNA, 80 bp, synthetic construct
  source 1..80: mol_type = other DNA
aagtaaatgtttaatatcagacctacctctatgggcagcagcatatggttatttagaattttgtgcaaaaagtacaggag

SEQ ID NO: 145645 - DNA, 80 bp, synthetic construct
  source 1..80: mol_type = other DNA
ttatgcacattagggcagcaaaacactatagcaaagcaggcaaattaaatgtagcacaggccatgtcagtaatgtcctct

SEQ ID NO: 145646 - DNA, 80 bp, synthetic construct
  source 1..80: mol_type = other DNA
gggagactatatatacaaacaaaatgtagtagaaaacttcataaaaaatgcagaaaattacttcaatgccagaaaaggca

SEQ ID NO: 145647 - DNA, 80 bp, synthetic construct
  source 1..80: mol_type = other DNA
gtattttctggaccgaaggtaacgcacctcccagaatgtctataccctttgtgagcattgggaatgcgtatagtaatttt

SEQ ID NO: 145648 - DNA, 80 bp, synthetic construct
  source 1..80: mol_type = other DNA
caaaagcggaccgtttgcctacagagacgaacacaacagtgtgactttgactacagcctataccttcaagtttaactggg

SEQ ID NO: 145649 - DNA, 80 bp, synthetic construct
  source 1..80: mol_type = other DNA
caccaccggtactactggagtcaatagattactaatccctgtccgggcgcagaacaatgtggaccaattatgcgcctcat

SEQ ID NO: 145650 - DNA, 80 bp, synthetic construct
  source 1..80: mol_type = other DNA
agtccacctcaccaggtgatgtggagacagcctgttcaccatgtgcaagggcaagagcacctgtggttcgaggctacccg

SEQ ID NO: 145651 - DNA, 80 bp, synthetic construct
  source 1..80: mol_type = other DNA
gtattattctttgattcatcgttcctcctaagggggtgtatgtatgtatgtactagtcgtatagtgttcctaacatcatg

SEQ ID NO: 145652 - DNA, 80 bp, synthetic construct
  source 1..80: mol_type = other DNA
gatggccccgcaggagatggaggacctaccgccgcagaagaagactaccgcgccgaagacctagaagagctgtacgccgc

SEQ ID NO: 145653 - DNA, 80 bp, synthetic construct
  source 1..80: mol_type = other DNA
ccttacgacccccaaacccagggcaacaaactctaccaatcaccatatctattgctcctatcaagtcagagttttcagga

SEQ ID NO: 145654 - DNA, 80 bp, synthetic construct
  source 1..80: mol_type = other DNA
ggtgagatagtatccaaaaagccagtatatgatgtaggtctcaaaccaataaacactcccagcaccactaaactttaccc

SEQ ID NO: 145655 - DNA, 80 bp, synthetic construct
  source 1..80: mol_type = other DNA
gcataacatacgggaacgcaaacccaggtgaaactggtggactgttctcagctacttttgtgccttctaccagtgatgag

SEQ ID NO: 145656 - DNA, 80 bp, synthetic construct
  source 1..80: mol_type = other DNA
aaacagcagggctggatagtggaaacaccatcaaattctgtgacgattgagagacatatatcgaaagctgctaccatctt

SEQ ID NO: 145657 - DNA, 80 bp, synthetic construct
  source 1..80: mol_type = other DNA
ctgacacggctttcggatacacacacgactatgacacctggatcccctatctcaccaccgggggcttttccaccccattt

SEQ ID NO: 145658 - DNA, 80 bp, synthetic construct
  source 1..80: mol_type = other DNA
atgatcaatttgcgcacaaacaactcagcaactttgatcataccttatatcaactgcttgcctatggacagcatgctcag

SEQ ID NO: 145659 - DNA, 80 bp, synthetic construct
  source 1..80: mol_type = other DNA
atagctttccaacaacaggtactcacagacattaccatgagcgggccattcagctacaaagacgatgttaaaaacacctg

SEQ ID NO: 145660 - DNA, 80 bp, synthetic construct
  source 1..80: mol_type = other DNA
gcccagtcggaagaaagcgaccaagaagaaatgcctcccctcgaagaagaacaagtactccacgagcaaaagaaagaggc

SEQ ID NO: 145661 - DNA, 80 bp, synthetic construct
  source 1..80: mol_type = other DNA
tatgatcccctatcccaaatgtaacttagaaacatgtacacaatgatcaatagggtggtggctatccaagtcacctaaga

SEQ ID NO: 145662 - DNA, 80 bp, synthetic construct
  source 1..80: mol_type = other DNA
ctttcactggtttaggagctgcttactacatcttttatgatgggtatgatgagaacaaggctgggaacgtgaactatggt

SEQ ID NO: 145663 - DNA, 80 bp, synthetic construct
  source 1..80: mol_type = other DNA
tcccaccaccaggcacacagtgcgtggtacactggaatttcggttcctttgtacgcctgttttcccaccctcatgtttgt

SEQ ID NO: 145664 - DNA, 80 bp, synthetic construct
  source 1..80: mol_type = other DNA
taaagattcactcggagccgttaacatgttatgttattataatgaaaaacgtgaagaagtacatagcaggttagacatta

SEQ ID NO: 145665 - DNA, 80 bp, synthetic construct
  source 1..80: mol_type = other DNA
tgtaaatttatattctacaggactaaacaaactgactggatagggcagtatgacatatcagaaccttacaagctagacaa

SEQ ID NO: 145666 - DNA, 80 bp, synthetic construct
  source 1..80: mol_type = other DNA
tactgagtttatattctcaggtccaaaaaagccaaggatcgaccaagacaggtaccaagaagcagaagagcactcagatt

SEQ ID NO: 145667 - DNA, 80 bp, synthetic construct
  source 1..80: mol_type = other DNA
atgaaacatccaaggaggctgtatcatatggtatatcatctaccaatgatatgggtacactatgcttcagagctcttgaa

SEQ ID NO: 145668 - DNA, 80 bp, synthetic construct
  source 1..80: mol_type = other DNA
gggtcaaaggtcatgcctacgtcacaagtcacgtggagagggttgccgtgtaacccggaagtcaatcctcccacgtggcc

SEQ ID NO: 145669 - DNA, 80 bp, synthetic construct
  source 1..80: mol_type = other DNA
acaataattgtgccttatgtgaatgcagtgcccatggattccatgctcagtcacaataattggagtttggttataattcc

SEQ ID NO: 145670 - DNA, 80 bp, synthetic construct
  source 1..80: mol_type = other DNA
tagagagacgaacagcgagagggaaaacctctccgaaagttcagatattctagaccaggaggacagtctaaaacctgaag

SEQ ID NO: 145671 - DNA, 80 bp, synthetic construct
  source 1..80: mol_type = other DNA
accccattgtcacaaggtggtttggatgcgacaatataatctaaccacacatggagattatttcccaatacgacataaac

SEQ ID NO: 145672 - DNA, 80 bp, synthetic construct
  source 1..80: mol_type = other DNA
cccagctagtgaccagagattgcaatacacactgctgggtgaagtgttaaattactacacccactggacaggttccatca

SEQ ID NO: 145673 - DNA, 80 bp, synthetic construct
  source 1..80: mol_type = other DNA
tggttgtaccgaacacacagccatcaggcccagtgcacactaccaagccatcgatacttggtgcgatggaaattggggcg

SEQ ID NO: 145674 - DNA, 80 bp, synthetic construct
  source 1..80: mol_type = other DNA
ttactgatcaatactctcccagtaatgactcttctgaaggaaggaaatttgcagctgttgattatctactggggtgcgga

SEQ ID NO: 145675 - DNA, 80 bp, synthetic construct
  source 1..80: mol_type = other DNA
gtgtataaaccgcagtgggtagcagaatagggcccctcttgccccgtgctgcagcgtaaacacagtgacgctcttcgcag

SEQ ID NO: 145676 - DNA, 80 bp, synthetic construct
  source 1..80: mol_type = other DNA
aacccgaaactggccgacgatgggtacatcttccgacggtgggatatcagacgtggcttctatggcgaaaaaagtcttaa

SEQ ID NO: 145677 - DNA, 80 bp, synthetic construct
  source 1..80: mol_type = other DNA
atgaacgtgtccgtgagcgtaaatggctcctctcagtttttcagtctcactctgctttccgtggctgcaatgatcctgtc

SEQ ID NO: 145678 - DNA, 80 bp, synthetic construct
  source 1..80: mol_type = other DNA
aacagactccgaggtgctcttggacactgagtgggcgtacagcaacgaaagtgagtggggccagacttcgccataaggcc

SEQ ID NO: 145679 - DNA, 80 bp, synthetic construct
  source 1..80: mol_type = other DNA
ggcaaagtacgtgaaccctaaccgcatgagcgccgtgtgcaagccggccacgccgatgtgcagcggacgcagtttttcca

SEQ ID NO: 145680 - DNA, 80 bp, synthetic construct
  source 1..80: mol_type = other DNA
ggctagaagaattaaagagctaaaaacaaagatagtaaactacatgcaattcaaatccaaacaaagaactgaaccagtat

SEQ ID NO: 145681 - DNA, 80 bp, synthetic construct
  source 1..80: mol_type = other DNA
tggaatcccaaacctagaagccttagatctcactactagtgctggattcccatatgtgttaaaaggtgtaaagaaaaagg

SEQ ID NO: 145682 - DNA, 80 bp, synthetic construct
  source 1..80: mol_type = other DNA
cctcaaacgataatacaaccaaatataacaccttacaacagaaattatatacccaatgcacatactttgaaacagggcaa

SEQ ID NO: 145683 - DNA, 80 bp, synthetic construct
  source 1..80: mol_type = other DNA
aaaaagagaataatgattcccagcttaaagtctagacctagcaaaaaacactatgtaaaagtaaaagtaggacccccaaa

SEQ ID NO: 145684 - DNA, 80 bp, synthetic construct
  source 1..80: mol_type = other DNA
aattattttaaaagaatggcaacctactaccattaaaagatgcaaaatagagggatatttatgcctatttcaagcaggaa

SEQ ID NO: 145685 - DNA, 80 bp, synthetic construct
  source 1..80: mol_type = other DNA
tgatggccagggccaactccgccagctcatcgccgctgtattccgcgtttaaaccgatagcatggtggcctggccccccg

SEQ ID NO: 145686 - DNA, 80 bp, synthetic construct
  source 1..80: mol_type = other DNA
tccctcatagagcctttaacactgggaatcctacaactacatgataaatctctcgacttagctggtagttttatgtcatt

SEQ ID NO: 145687 - DNA, 80 bp, synthetic construct
  source 1..80: mol_type = other DNA
aaataggcaatgttgtaccctacggggaaattaacctgagtggtaatccaacctgtagattgatgaagtatgattatcca

SEQ ID NO: 145688 - DNA, 80 bp, synthetic construct
  source 1..80: mol_type = other DNA
cccttgtaaagacgaaggtaccggaccccatagacagcctagagacgtacaagttacggacccgacaaccgtgggacctg

SEQ ID NO: 145689 - DNA, 80 bp, synthetic construct
  source 1..80: mol_type = other DNA
ccaggctagaagtcaacctgcgtgactccttattctcaaaatacaagggaaatgttgaaactgatatcacagaaaatatg

SEQ ID NO: 145690 - DNA, 80 bp, synthetic construct
  source 1..80: mol_type = other DNA
ctatatgtaaagattgtcaccaaccctcaaactttaagaaatgctgtcctctagtatgtggaaaggcaataagtcttgta

SEQ ID NO: 145691 - DNA, 80 bp, synthetic construct
  source 1..80: mol_type = other DNA
gaaagggaaaaaagcagacgaattagaaaaagttaggttacggcccggcggaaagaaaaaatatagactaaaacatattg

SEQ ID NO: 145692 - DNA, 80 bp, synthetic construct
  source 1..80: mol_type = other DNA
cagccatacggtgaactttttgaaccactcgagagcctccatgcgggagagcagcagcgcgttagcctcctgcgcctgca

SEQ ID NO: 145693 - DNA, 80 bp, synthetic construct
  source 1..80: mol_type = other DNA
tgacggtgcactcaccatgcgaaatgtcaagtggatcggagaaactgcctggaaatgggcccaccgcctccttgattgga

SEQ ID NO: 145694 - DNA, 80 bp, synthetic construct
  source 1..80: mol_type = other DNA
taccaattgtcacccttagatctaatggcaatgttgctaacactttaccaataacagtaactattgcaccggataaatct

SEQ ID NO: 145695 - DNA, 80 bp, synthetic construct
  source 1..80: mol_type = other DNA
aaacatgcaaggccgtgcactgttcacctgtcggtgtctacctctataagtcactaagcactccgagcgcagcgaggagt

SEQ ID NO: 145696 - DNA, 80 bp, synthetic construct
  source 1..80: mol_type = other DNA
aaaatgctgtccattcatatgtggtaaggctgtgtcttttaaagaccggaacacatgtgaagtctattccctctgtcaga

SEQ ID NO: 145697 - DNA, 80 bp, synthetic construct
  source 1..80: mol_type = other DNA
gctacaatgggtgctcaagtatctgctcagaacaacggaactcacgagaactccaatagcgcgagtggaggctcaaccat

SEQ ID NO: 145698 - DNA, 80 bp, synthetic construct
  source 1..80: mol_type = other DNA
aggcgacggaggagacagtactcctcctcaagcgacgactcagagagcagcggaagctcgagcagcagctccaattcctc

SEQ ID NO: 145699 - DNA, 80 bp, synthetic construct
  source 1..80: mol_type = other DNA
tatgttcgtaatatcggtgatcctctgaccgcatcattggctgacttgaaacgtatgatctctgcaaatatattgagtga

SEQ ID NO: 145700 - DNA, 80 bp, synthetic construct
  source 1..80: mol_type = other DNA
ggctagagcaaatgtcccagaaatttgcaccattgtatgctgtggaggcaaagagaatcaaaacactcaagaataaaatg

SEQ ID NO: 145701 - DNA, 80 bp, synthetic construct
  source 1..80: mol_type = other DNA
ggggaatctaagaaacatgaaggcttatcgtgtgcaagtgtcgacagggaaccatagtggcacggaaccaatatttagct

SEQ ID NO: 145702 - DNA, 80 bp, synthetic construct
  source 1..80: mol_type = other DNA
ttaatttgcttggaaccattttcaatttcgcctatgctggagaagctagtgcaggacaaattccataacctactaaaagg

SEQ ID NO: 145703 - DNA, 80 bp, synthetic construct
  source 1..80: mol_type = other DNA
acaaacggtagtaataatggatgatgttatgcagaaccctgatggagaagatatgtccctattctgccaaatggtatcct

SEQ ID NO: 145704 - DNA, 80 bp, synthetic construct
  source 1..80: mol_type = other DNA
taacccaaaactcaataagtggggcaacaggaaactcctttccctcactaaccactttcaatcagtgggttactactgga

SEQ ID NO: 145705 - DNA, 80 bp, synthetic construct
  source 1..80: mol_type = other DNA
acgggtttgccgccgcactgaaaaggtcgtacttcaccagtgagcagggcgagatacaatggatgagacctagtaaggat

SEQ ID NO: 145706 - DNA, 80 bp, synthetic construct
  source 1..80: mol_type = other DNA
atatctggctttgcttatttgcttgataaagtatatgattctgtatacatagggaaaggagggggagtacagaaaggtag

SEQ ID NO: 145707 - DNA, 80 bp, synthetic construct
  source 1..80: mol_type = other DNA
tccgagtagtagacgcatagtccctggttcatcaggctgggattcatcaggttctgacggggaatccgctgttgtagacg

SEQ ID NO: 145708 - DNA, 80 bp, synthetic construct
  source 1..80: mol_type = other DNA
tgcagaggttcagggacttgtcctctatcgtctcatacagcttgttagtattgtgttccaggcagcacacgaagcctgcc

SEQ ID NO: 145709 - DNA, 80 bp, synthetic construct
  source 1..80: mol_type = other DNA
cgtaatctaccttccacagggccgccgcgacgatgctgaacgacaggatcagacagacggcgtataggagtcctaggtcg

SEQ ID NO: 145710 - DNA, 80 bp, synthetic construct
  source 1..80: mol_type = other DNA
aaactgcttgcgatgttaggagcttggggtggttggcaggtgttaccacttaccatcctattgtcgtcggtggttggtgc

SEQ ID NO: 145711 - DNA, 80 bp, synthetic construct
  source 1..80: mol_type = other DNA
tgtggatagtgttaaggaccagattaactcaataaatcctatcaataatattagtagtaagatggtcaagtggatgttaa

SEQ ID NO: 145712 - DNA, 80 bp, synthetic construct
  source 1..80: mol_type = other DNA
ggaggcaaatatcagtcaaagtttagaagaggcacaacttcagcaagaaaagaatatgtatgaactacaaaaattaaaca

SEQ ID NO: 145713 - DNA, 80 bp, synthetic construct
  source 1..80: mol_type = other DNA
attgagcaaagcgcgttactccagggtgatgtggttgaagccattgagggcgcagttgctagagtagcagacactatcag

SEQ ID NO: 145714 - DNA, 80 bp, synthetic construct
  source 1..80: mol_type = other DNA
gatagcagaaccagaggacgaggaaacccattgtctggtgcatccagcacagacctccgcatgggatgacccccacgaag

SEQ ID NO: 145715 - DNA, 80 bp, synthetic construct
  source 1..80: mol_type = other DNA
gcattgaagcttgcggttactctgacagactcaagcagatcacaattggagactccactataacaactcaagacaccttg

SEQ ID NO: 145716 - DNA, 80 bp, synthetic construct
  source 1..80: mol_type = other DNA
cagtacagcaacgtcgccccgttcaccatagacaaagacagcactccctcctaccacccgggcatgctcatgcgcaccaa

SEQ ID NO: 145717 - DNA, 80 bp, synthetic construct
  source 1..80: mol_type = other DNA
cagtttttaaatgggggggttcccctctgcctccacagcccatcgacgacccttgccaaaaatccacacacgaactaccc

SEQ ID NO: 145718 - DNA, 80 bp, synthetic construct
  source 1..80: mol_type = other DNA
acccaggaaggtcaagagctggcgcagaacgttgtcggtgacaataaacaccccccccactggctctccccccttggcgg

SEQ ID NO: 145719 - DNA, 80 bp, synthetic construct
  source 1..80: mol_type = other DNA
ccccgaaggtgccggtatagccacagatggactttttggtcttgcagttgaccgacactgagctgtgcttcacgtaggtg

SEQ ID NO: 145720 - DNA, 80 bp, synthetic construct
  source 1..80: mol_type = other DNA
ccctcttagaaatgtcccctacagggagagatcttggcttgaggcctgtctcagagcccacgattctttttgtggctgtc

SEQ ID NO: 145721 - DNA, 80 bp, synthetic construct
  source 1..80: mol_type = other DNA
gtacactagtgcaggctacgtaacgtgctggtatcagaccagtctagtagtcccgcccggagccccagcaacgtgtggga

SEQ ID NO: 145722 - DNA, 80 bp, synthetic construct
  source 1..80: mol_type = other DNA
tgtttgcatcatggactatcaatgccaggcgcatggtgcaaatgagacgcaagctcgagttgttcacttacgtcagattt

SEQ ID NO: 145723 - DNA, 80 bp, synthetic construct
  source 1..80: mol_type = other DNA
aatacatatccaagctaaaacaactgggcatgctggaaaaccagattaacacaatacatcaatcatgccctagccaagaa

SEQ ID NO: 145724 - DNA, 80 bp, synthetic construct
  source 1..80: mol_type = other DNA
gagaagcaaattgaaaatctgcggagtgctgatacaaaaacacaagacaaaataaagcttgaaattgatacactgcatga

SEQ ID NO: 145725 - DNA, 80 bp, synthetic construct
  source 1..80: mol_type = other DNA
gaccaccaagagccaaaccatacttaagtattggaagaaccaattatcagaaagcaggtacaattattaaaaagagggaa

SEQ ID NO: 145726 - DNA, 80 bp, synthetic construct
  source 1..80: mol_type = other DNA
cccaacaatatgatgggtcattttgccatccggacagttagcgagtcgaccactggaaagaacattcacatccgagtgta

SEQ ID NO: 145727 - DNA, 80 bp, synthetic construct
  source 1..80: mol_type = other DNA
ggtggaagaggcgtcggtggagaccgcgccgacgctggagaatccgccggaggcgacgacctgcacccagaagacgtcga

SEQ ID NO: 145728 - DNA, 80 bp, synthetic construct
  source 1..80: mol_type = other DNA
accctaatctatattgggtagtatatgctaccctgatctatatctggatagcatatgctatcctaatctctattgggtag

SEQ ID NO: 145729 - DNA, 80 bp, synthetic construct
  source 1..80: mol_type = other DNA
atgacccagtaactattgaggccaaaattagagtttatatgaaaccaaaacatattaaagtgtggtgtcccagaccacca

SEQ ID NO: 145730 - DNA, 80 bp, synthetic construct
  source 1..80: mol_type = other DNA
tgttttggacggagggaaacgctccccctcgtatgtctatccctttcatcagcattggaggggcatatagttcattctat

SEQ ID NO: 145731 - DNA, 80 bp, synthetic construct
  source 1..80: mol_type = other DNA
catcttttggttgttttgacactctgtcgatagcgtcttggccaaaaaggccatgtctgtagtcccagttgtggaacgag

SEQ ID NO: 145732 - DNA, 80 bp, synthetic construct
  source 1..80: mol_type = other DNA
ccattggtgaaagcagggcaatgcaaactacaggagcatttggtcaacagtcgggagcagtatatgtgggcagttacaga

SEQ ID NO: 145733 - DNA, 80 bp, synthetic construct
  source 1..80: mol_type = other DNA
tgcgtagtgcagcacctgcctctgtgggcggctctgtactgctaccaagactttgtagaggaggagctggggtcctcctc

SEQ ID NO: 145734 - DNA, 80 bp, synthetic construct
  source 1..80: mol_type = other DNA
cccacactaacgaggacctagacctggcccgctacaggggctgcaggtggactttttacagacataaagacacagacttt

SEQ ID NO: 145735 - DNA, 80 bp, synthetic construct
  source 1..80: mol_type = other DNA
caaggcatagataccatagcaaggtgcaactgtagatgtggggtgtactactgtgagtcgatgaggaggtactacccagt

SEQ ID NO: 145736 - DNA, 80 bp, synthetic construct
  source 1..80: mol_type = other DNA
aacagcataacatacatacccgacacagttaagccagatgtatccaactatggagcatttggacagcagtcaggtgcagt

SEQ ID NO: 145737 - DNA, 80 bp, synthetic construct
  source 1..80: mol_type = other DNA
gcctgttttattcacccttccccagagaaacttagaagctcaatctgaacggtcaataggaaacccagtacaccaactgg

SEQ ID NO: 145738 - DNA, 80 bp, synthetic construct
  source 1..80: mol_type = other DNA
tgacggcttctccctggtaccacacaatcaaattgatgcaggggccaccaataaatacgggtacaacagcatcaatgact

SEQ ID NO: 145739 - DNA, 80 bp, synthetic construct
  source 1..80: mol_type = other DNA
ccggggcctgccacaggcggctgtagcggacccatagcagagacctgaggagttcggatgaaaggtcccccgccacctgc

SEQ ID NO: 145740 - DNA, 80 bp, synthetic construct
  source 1..80: mol_type = other DNA
gttcctcctaatgtgtggttggtggtatttgcctgtggacttgtttctcccacagtagggctggtggcatttggggttgg

SEQ ID NO: 145741 - DNA, 80 bp, synthetic construct
  source 1..80: mol_type = other DNA
agtagtgtgaatgatacaatagcctttagagtagtgtatggaaatttattctctactttccataaaaaccctggtgtggt

SEQ ID NO: 145742 - DNA, 80 bp, synthetic construct
  source 1..80: mol_type = other DNA
gtgcgttgtacactggaattacggttcctttgtatgcctgttttccctcccccccctcctttaatgtaacttagaagctt

SEQ ID NO: 145743 - DNA, 80 bp, synthetic construct
  source 1..80: mol_type = other DNA
ggacggcgtgttgcggggacggtggttgcgctggcccggggtgttgcgaggacagtggttgcgctgcggccggtgattgc

SEQ ID NO: 145744 - DNA, 80 bp, synthetic construct
  source 1..80: mol_type = other DNA
tgtcggtgtctgcttataaaagtaactaagcactccgagcgaagcgaggagtgcgacccttgggggctcaacgccttcgg

SEQ ID NO: 145745 - DNA, 80 bp, synthetic construct
  source 1..80: mol_type = other DNA
tatggtatagctccaacaaatgacatggggatcttgtgttttagagccttggatgacagaataaaaactgacatcaaggt

SEQ ID NO: 145746 - DNA, 80 bp, synthetic construct
  source 1..80: mol_type = other DNA
acaacggtgaagaaccgtataaagagttcataaataaaattagaaagacagaagtgggtcgtaggttgtatcttccacca

SEQ ID NO: 145747 - DNA, 80 bp, synthetic construct
  source 1..80: mol_type = other DNA
caagttgaccttcactttctgtggttcagctatggctactgggaaatttctactggcgtactcaccgccaggcgccaacg

SEQ ID NO: 145748 - DNA, 80 bp, synthetic construct
  source 1..80: mol_type = other DNA
ggctagtttagataacaagggaatgttatttaccagtaattttgttttagcatctacaaattcaaatactttaagtccac

SEQ ID NO: 145749 - DNA, 80 bp, synthetic construct
  source 1..80: mol_type = other DNA
ggagttaccgcagaagaccttaaatgtccatgccaggtccccgcacctgagttcttcacctatgtagacgggatcaggtt

SEQ ID NO: 145750 - DNA, 80 bp, synthetic construct
  source 1..80: mol_type = other DNA
gaaggaagagtatgaggcctgtaaatactgggacagaccccctagaggcaatctaagagacaccccctactacccctggg

SEQ ID NO: 145751 - DNA, 80 bp, synthetic construct
  source 1..80: mol_type = other DNA
caataattgctccatatgttaatgcagttcccatggattcaatgcgcagccacaacaactggagcctggtgataatccca

SEQ ID NO: 145752 - DNA, 80 bp, synthetic construct
  source 1..80: mol_type = other DNA
cgaggcggagatggggtgtgctgacataaccagggttgtaaatgcagcggcgttgtccgagggagagcaagcaaaggagt

SEQ ID NO: 145753 - DNA, 80 bp, synthetic construct
  source 1..80: mol_type = other DNA
cacaggcaacataacaccaactcaaaacctaaatacagtcatagacagacttgctgataatgccataaactactataaaa

SEQ ID NO: 145754 - DNA, 80 bp, synthetic construct
  source 1..80: mol_type = other DNA
tatgtgagtagatggtcgcgccgccgatacaggcgcagacggagaagggggcgacgtagacggggacgcagacgaagaaa

SEQ ID NO: 145755 - DNA, 80 bp, synthetic construct
  source 1..80: mol_type = other DNA
ccgttgtcaatgtagcaccggttgtcctcgatttgaaaccagggatgcttggccgtggacttccagggccggagcgcgtc

SEQ ID NO: 145756 - DNA, 80 bp, synthetic construct
  source 1..80: mol_type = other DNA
tctctgtccgattactgaaagataccccatttattgaacagagcgcattactccaaggagacgtggtggaggcaattgag

SEQ ID NO: 145757 - DNA, 80 bp, synthetic construct
  source 1..80: mol_type = other DNA
gccacctgcggcagctgcagcacctgcgcaagaacctgagcccgtcgctccggaacctgaagcagtaactcccactgtgc

SEQ ID NO: 145758 - DNA, 80 bp, synthetic construct
  source 1..80: mol_type = other DNA
gtgcttccccaccacaaaaccgcaagcaggcaatgctgggaacgcacgtgatctgggatgtggggctgcaatccagttgt

SEQ ID NO: 145759 - DNA, 80 bp, synthetic construct
  source 1..80: mol_type = other DNA
aagggaaattagatgtgccaaaatcctttaaaccgtgtgacatagataataagattggaaatgcaaaatgttgccctttt

SEQ ID NO: 145760 - DNA, 80 bp, synthetic construct
  source 1..80: mol_type = other DNA
gcctcctacgcactctgtctcttttaagctcaacttcaaataaatgttggccgtgggagtttcacttgtcggtgtctacc

SEQ ID NO: 145761 - DNA, 80 bp, synthetic construct
  source 1..80: mol_type = other DNA
agactctcatactcagacagtggaacccagacgttataaagagatgctttatcacaggatggatgccactcattatctgt

SEQ ID NO: 145762 - DNA, 80 bp, synthetic construct
  source 1..80: mol_type = other DNA
acccacaggctgttttaaagcctgtgggttgtacccacccacagggcccactgggcgttagcacactgattctacggaat

SEQ ID NO: 145763 - DNA, 80 bp, synthetic construct
  source 1..80: mol_type = other DNA
tatccggaggtgccaaggtagctgagcgcgctcaggccggcgtggtgaacgccagttgccgcctcgctaccgcgtcgggt

SEQ ID NO: 145764 - DNA, 80 bp, synthetic construct
  source 1..80: mol_type = other DNA
aggtggtaggagacgctttgagagtttccatgccacaagttgccaatacccagccatcaggtcctgtaaattctaaggaa

SEQ ID NO: 145765 - DNA, 80 bp, synthetic construct
  source 1..80: mol_type = other DNA
aaactacaatagtgttaagagtggcacactcaatgatcttgaacaaaagcacttcctgacccacagaccagacataacaa

SEQ ID NO: 145766 - DNA, 80 bp, synthetic construct
  source 1..80: mol_type = other DNA
gtagaatacaatgatcaccactttaggaaatgggacataactttacaagagatggcacaaatacgaaggaaatttgaatt

SEQ ID NO: 145767 - DNA, 80 bp, synthetic construct
  source 1..80: mol_type = other DNA
acgggacagggttgcggaagcgttgcgggacataggtaagcacggcggcgtcctcatcgcgtttgcggcgtgctgtgtcc

SEQ ID NO: 145768 - DNA, 80 bp, synthetic construct
  source 1..80: mol_type = other DNA
gtaacctccctcgtagactacaaatcgcggacccgaaactcctcgggccacactacacattccacagctgggactaccga

SEQ ID NO: 145769 - DNA, 80 bp, synthetic construct
  source 1..80: mol_type = other DNA
cgcgcgtctgtgtctgtttgagtccccggggacgtgcggcgcgcacggcgaaaagcagacgcgcgtctgtgtctgtttga

SEQ ID NO: 145770 - DNA, 80 bp, synthetic construct
  source 1..80: mol_type = other DNA
ccccagggcccaccgggcgttagtactctggtatcacggtaccttagtatgcctgttttatgttccctttcccccgcaac

SEQ ID NO: 145771 - DNA, 80 bp, synthetic construct
  source 1..80: mol_type = other DNA
acaataaatgcaagaaggatggtgcaattaaggcgaaagttcgagttattcacctacatgcggtttgacatggagattac

SEQ ID NO: 145772 - DNA, 80 bp, synthetic construct
  source 1..80: mol_type = other DNA
aaagcgcgaatgttgtggtagggtacggtgtttggcctacttacttgaaggatgaagaggcgacagcagaagaccagccc

SEQ ID NO: 145773 - DNA, 80 bp, synthetic construct
  source 1..80: mol_type = other DNA
tcctgtaaaataggcgccacattggaagaaaggagatattatcatgggcaatgttgatgctccatcctggttttgagaaa

SEQ ID NO: 145774 - DNA, 80 bp, synthetic construct
  source 1..80: mol_type = other DNA
cagtggattaagaaaaaggcatgcgacatactggaactaccatacgtaatgaggcagggagacagctggcttaaaaagtt

SEQ ID NO: 145775 - DNA, 80 bp, synthetic construct
  source 1..80: mol_type = other DNA
ccacaagcgacaccttccatgagccgctggcagccacccgtccacaatgcccctggcattgagagacagtggtatgactc

SEQ ID NO: 145776 - DNA, 80 bp, synthetic construct
  source 1..80: mol_type = other DNA
tctaaggacaaataacacagcgacaatagttgttccatacataaactcagtgccaattgattcaatgacccgtcataaca

SEQ ID NO: 145777 - DNA, 80 bp, synthetic construct
  source 1..80: mol_type = other DNA
aaacactgatgaatctataccagatacacaaattaaaatcagagataatatcaggcaggttagaacagttgggccctcag

SEQ ID NO: 145778 - DNA, 80 bp, synthetic construct
  source 1..80: mol_type = other DNA
actcactacctggtacacccagcacagacaagcaagtttgatgacccgcatggggaagtgctaatgtggaggtttgaccc

SEQ ID NO: 145779 - DNA, 80 bp, synthetic construct
  source 1..80: mol_type = other DNA
acaatgggtacaacggtagaaaggcgtaaaaacaacgtgtgtgtgcggggggggggtagctcgattaagtatgcattttg

SEQ ID NO: 145780 - DNA, 80 bp, synthetic construct
  source 1..80: mol_type = other DNA
ctggagctcaagtatctcaacatgatgaagatggccattacgggcaaagagtccatctgcttacccttcaatttccactc

SEQ ID NO: 145781 - DNA, 80 bp, synthetic construct
  source 1..80: mol_type = other DNA
ctcagtttggccacaacagttacaaccctacaaaagagaaaattaaaaaagctagagaagcctactggactgccttaaac

SEQ ID NO: 145782 - DNA, 80 bp, synthetic construct
  source 1..80: mol_type = other DNA
caatgtacatcaacactaaatcacagatccataagagtccagtttatggtgcggttgaggttaaaatgggacctgctgtc

SEQ ID NO: 145783 - DNA, 80 bp, synthetic construct
  source 1..80: mol_type = other DNA
caaacactgttaaaagatgctatataataggatatatggcagcaataataagtggcaacggaaccttttctataaactat

SEQ ID NO: 145784 - DNA, 80 bp, synthetic construct
  source 1..80: mol_type = other DNA
ccacacaagagtgtgcttttacactcttgagtcggtgaaatgggagagttcatcagcaggatggtggtggaagttcccag

SEQ ID NO: 145785 - DNA, 80 bp, synthetic construct
  source 1..80: mol_type = other DNA
tattctttacctgtttgttggatacgtccctctcaatttcaaggtcatttaaaactcttaattatatactacttctcaac

SEQ ID NO: 145786 - DNA, 80 bp, synthetic construct
  source 1..80: mol_type = other DNA
ctgaggctcagtttagaataccctcacattgtccagatggtcaagcgaatacagaaaaacaaacctggactaacatgtgg

SEQ ID NO: 145787 - DNA, 80 bp, synthetic construct
  source 1..80: mol_type = other DNA
gacgcggctccgccgtcggtgcgctcatctgcgacagcggtacccgacgcggcagcggcgccaacgaacgccgcgactcc

SEQ ID NO: 145788 - DNA, 80 bp, synthetic construct
  source 1..80: mol_type = other DNA
gtatcgtctgtccgactcccgccgtacggcgccgaggcccagcgacgacaggtccgcgaaccggcgctcgtattccccgt

SEQ ID NO: 145789 - DNA, 80 bp, synthetic construct
  source 1..80: mol_type = other DNA
cccatagacatgaaccagtgtgctgcttgatacgaggaccacctggatgtggtaaatctttggtaacatctataatagca

SEQ ID NO: 145790 - DNA, 80 bp, synthetic construct
  source 1..80: mol_type = other DNA
atcccagtgtgtttcatgacatcttcccagggaacaaggagccagctgcactgaatccaagagaccaccgtctagaaata

SEQ ID NO: 145791 - DNA, 80 bp, synthetic construct
  source 1..80: mol_type = other DNA
ggggacaacttcgcctactgggtgattaacacaagacaggttgcgcaattacgccgcaaactagaaatgttcacatatgc

SEQ ID NO: 145792 - DNA, 80 bp, synthetic construct
  source 1..80: mol_type = other DNA
gaggccgaggcgccggtggagaaggtggcgccgccgtcgaaggagactaccgagaagaagaactagacgagctgttcgcg

SEQ ID NO: 145793 - DNA, 80 bp, synthetic construct
  source 1..80: mol_type = other DNA
tatgaaaatcactctaaagccaacaactttagcaactggagcacgatcacacctcacaacaatacactatatgcaggcag

SEQ ID NO: 145794 - DNA, 80 bp, synthetic construct
  source 1..80: mol_type = other DNA
aatatgttggttgctactgctcactacacagcccaactgtcaacactggatattgacccacacccaattagcttagagga

SEQ ID NO: 145795 - DNA, 80 bp, synthetic construct
  source 1..80: mol_type = other DNA
aagaaacgccctgcagcaggatagcaccacgcaaggctgcctgggtgccgagaccccgagtattatgtacacgggggcca

SEQ ID NO: 145796 - DNA, 80 bp, synthetic construct
  source 1..80: mol_type = other DNA
caccagactaccccaagcaaaactatcagtcttttgttataaattaccttaaagcaaatgtaacaacagattataataca

SEQ ID NO: 145797 - DNA, 80 bp, synthetic construct
  source 1..80: mol_type = other DNA
ctgtttacgattggccagggataccaatttacacatgcaggagggtgtgcttgagcaaaaccctgtagagaattatgtag

SEQ ID NO: 145798 - DNA, 80 bp, synthetic construct
  source 1..80: mol_type = other DNA
ggagactctaactataactaccagtacttttcatgggaaacagataaagccccacaagccacaagcaatttaggtaaaca

SEQ ID NO: 145799 - DNA, 80 bp, synthetic construct
  source 1..80: mol_type = other DNA
gaacagatggacgttctcaaacgaccagctagacctggccagatacaggggctgcaaattcagattctacagacactcca

SEQ ID NO: 145800 - DNA, 80 bp, synthetic construct
  source 1..80: mol_type = other DNA
cgagagaaataacggactcttcatcattgtttccaacggttcacccggtgctgaacctgttgacattacggtccgttata

SEQ ID NO: 145801 - DNA, 80 bp, synthetic construct
  source 1..80: mol_type = other DNA
acatgtagactctacaaaagctaatgacacagactactctaacaacaagcatacaaaagcagtaaacgtaaaggaacaga

SEQ ID NO: 145802 - DNA, 80 bp, synthetic construct
  source 1..80: mol_type = other DNA
tggcttcacgcctttaacttatcacaccttaaacctcattcacattaccttgttgatcagacagtggtatcaccatgggg

SEQ ID NO: 145803 - DNA, 80 bp, synthetic construct
  source 1..80: mol_type = other DNA
caagccagcaatggacacacatctaatgctgccccagctttggatgctgctgaaacaggacacactagtcaagttcaacc

SEQ ID NO: 145804 - DNA, 80 bp, synthetic construct
  source 1..80: mol_type = other DNA
tggatttacatcactgacaccatactctccaatactcattaggttggttttattaataaggtattattaccataatgggc

SEQ ID NO: 145805 - DNA, 80 bp, synthetic construct
  source 1..80: mol_type = other DNA
cattgtttgagatctgaggaggactggaccctttaaaacatccggtcacgccctttgcaaattatttaaaaggtgaatgc

SEQ ID NO: 145806 - DNA, 80 bp, synthetic construct
  source 1..80: mol_type = other DNA
attacgcagcgagcagttacttgagcctgtaatataacgcattaccaaaatgaacagaccatcgtgtacgatataagtat

SEQ ID NO: 145807 - DNA, 80 bp, synthetic construct
  source 1..80: mol_type = other DNA
tctcagatgttgacgccacctctgtggataagcccactcatccagaaacatcagcagacagattctacacactagctagt

SEQ ID NO: 145808 - DNA, 80 bp, synthetic construct
  source 1..80: mol_type = other DNA
cccctgaagagccacggcgtggtggagatacagacggaggccttggagaagatggaggagacgcaggtggcgcctaccac

SEQ ID NO: 145809 - DNA, 80 bp, synthetic construct
  source 1..80: mol_type = other DNA
tgacatctaaagtgttagacttaaagaattatatagataagcaattgttaccaatcgttaataaacaatcatgttcaata

SEQ ID NO: 145810 - DNA, 80 bp, synthetic construct
  source 1..80: mol_type = other DNA
tcgctctggtctagtgggagtggttaacttaaccgatggaggaacagatgttgccggatatgctacttgggacattgaca

SEQ ID NO: 145811 - DNA, 80 bp, synthetic construct
  source 1..80: mol_type = other DNA
agggaaagtcctcatcaggtgtccctacaccaagccagcactagtagaccccaaagacgacactgcaggatatgtagtct

SEQ ID NO: 145812 - DNA, 80 bp, synthetic construct
  source 1..80: mol_type = other DNA
agtgatggctggcaatgtcacggtatttccccaccagattattaacttgcgcaccaacaactgcgcaacgttagtgcttc

SEQ ID NO: 145813 - DNA, 80 bp, synthetic construct
  source 1..80: mol_type = other DNA
caacatgttacggcacaataatgttagtttggtgatcataccaattgtcaacctgagagccaatggcaatgttgccaaca

SEQ ID NO: 145814 - DNA, 80 bp, synthetic construct
  source 1..80: mol_type = other DNA
aagccccctcagaagaagaagaaacgcagacagtacagcagcagctcaagcaacagctcagagagcaaaagcagctcagg

SEQ ID NO: 145815 - DNA, 80 bp, synthetic construct
  source 1..80: mol_type = other DNA
aagtgatcggtaacgctttgcagctttcacaacccacacaaccagttacagcatcaaacacgcccggcaccagcggagta

SEQ ID NO: 145816 - DNA, 80 bp, synthetic construct
  source 1..80: mol_type = other DNA
tgcatatcaggcgcggcttccttccgaattttgtgcgcaaaagtttccagatgatgataactgtgaggaggacgatcagg

SEQ ID NO: 145817 - DNA, 80 bp, synthetic construct
  source 1..80: mol_type = other DNA
gggagaagagacatcaaacttattgacatttctttaagcaaagaagattcaaggaagtttgaaaacattgtgtgggataa

SEQ ID NO: 145818 - DNA, 80 bp, synthetic construct
  source 1..80: mol_type = other DNA
tatattccaacaggtggttagagacccctgcaaacaccagacgagacccagtccccgtagacagcctcgtgaactacaaa

SEQ ID NO: 145819 - DNA, 80 bp, synthetic construct
  source 1..80: mol_type = other DNA
cagcgtggtcgcgccgcagcacgtcgagtatctcaaattcgtgctgcaagactttgacgtgcagcacctccgccgcctca

SEQ ID NO: 145820 - DNA, 80 bp, synthetic construct
  source 1..80: mol_type = other DNA
atgggtgcacaggtgagtaaacagaatactggttctcatgaaaactctgtctcagcatctggtggatctgtcataaagta

SEQ ID NO: 145821 - DNA, 80 bp, synthetic construct
  source 1..80: mol_type = other DNA
tcacatgagagtggtatctcagcatcatcaggatcagttatcaagtatttcaatatcaactactataaagactcagctag

SEQ ID NO: 145822 - DNA, 80 bp, synthetic construct
  source 1..80: mol_type = other DNA
ttggtcgtcctcccgttggcggatttccaccgggacaggggccgtctagagtgagagccctcccggctcctccggcccct

SEQ ID NO: 145823 - DNA, 80 bp, synthetic construct
  source 1..80: mol_type = other DNA
ggccgacgccgccggtggagacggtggagagcgcggcgcagacggtggagaccccggagacgtaggagacgacgccctgc

SEQ ID NO: 145824 - DNA, 80 bp, synthetic construct
  source 1..80: mol_type = other DNA
tctgtgggctaatgtgaatatgagaaatggccatgtaacctggccaataacctaccaggggaatgcacaaataagaaaga

SEQ ID NO: 145825 - DNA, 80 bp, synthetic construct
  source 1..80: mol_type = other DNA
cacactcacaaccagaaaatgaagtccttctcaatggttacaataccaaaattaaagataaatggagactggtagaccca

SEQ ID NO: 145826 - DNA, 80 bp, synthetic construct
  source 1..80: mol_type = other DNA
cctcctttcaaggaggacctcctcaccatcgtcagccaccagccggggctcatgatgcagaactacaggtgcatactcgt

SEQ ID NO: 145827 - DNA, 80 bp, synthetic construct
  source 1..80: mol_type = other DNA
ccgtaaaggacgtgttgatcaagacagccccgatgttaaattctccaaatatcgaagcttgtgggtacagtgatcgagtg

SEQ ID NO: 145828 - DNA, 80 bp, synthetic construct
  source 1..80: mol_type = other DNA
taaaggtaaagagtttgctacacaaatgagacagcattactgggtacaactaacacaactaacagccacagtcccacaca

SEQ ID NO: 145829 - DNA, 80 bp, synthetic construct
  source 1..80: mol_type = other DNA
acatagtcaagagacaacaagaactgttgcgactgaccgtctggggaacgaaaaatctccaggcaagagtcactgctatc

SEQ ID NO: 145830 - DNA, 80 bp, synthetic construct
  source 1..80: mol_type = other DNA
tgatgtataaatagagtctgcgacggggttcggcgctctgccggctgcggcggcactcgctccacggcctccgacgagcg

SEQ ID NO: 145831 - DNA, 80 bp, synthetic construct
  source 1..80: mol_type = other DNA
gtgtcggccgtggccagggcccgcctggcggcggcgtcccggcagacatcctggatgccctccacgcgtggagtagtggc

SEQ ID NO: 145832 - DNA, 80 bp, synthetic construct
  source 1..80: mol_type = other DNA
ggcaaaaagtatagaagaattagaattcacccccctaagatgtttgaagataagtggtactctcaggctgacctgtgtcc

SEQ ID NO: 145833 - DNA, 80 bp, synthetic construct
  source 1..80: mol_type = other DNA
tacgttgaaatgcaccttcctggatcggaagtagacagttcgttactgtccatgagtgggaatgcggtgaaagtaactcc

SEQ ID NO: 145834 - DNA, 80 bp, synthetic construct
  source 1..80: mol_type = other DNA
accaggcccaagaactcggggtgcggccagagggcggcccgggtatccatctcctcccaggcgtcctggaagaagatgaa

SEQ ID NO: 145835 - DNA, 80 bp, synthetic construct
  source 1..80: mol_type = other DNA
gggagcaggtgtttggattccagcttgaaccgggtagtggtagtgtgctatgcaggaccctattgggtgagatattgaat

SEQ ID NO: 145836 - DNA, 80 bp, synthetic construct
  source 1..80: mol_type = other DNA
ggtagccacagccgccggagagacgcgccaggatcgcaacccaaaagcgaggcccccaggcagccgagatctaccgccag

SEQ ID NO: 145837 - DNA, 80 bp, synthetic construct
  source 1..80: mol_type = other DNA
aagagacaggccaatcacagtgtacgtcgtgcacttcctgggcatggtctacatcataatataactaagtgcacttccga

SEQ ID NO: 145838 - DNA, 80 bp, synthetic construct
  source 1..80: mol_type = other DNA
tagggacagacataaaagtaatacccagaagaaaagctaaaatcatcaaagattatggaggaggaaaagaggtggatagt

SEQ ID NO: 145839 - DNA, 80 bp, synthetic construct
  source 1..80: mol_type = other DNA
tgcccccttatatgccagtgagaacaaaagggtatccaacatacagaaggacttacaacgcctaacggcgtaccagaaga

SEQ ID NO: 145840 - DNA, 80 bp, synthetic construct
  source 1..80: mol_type = other DNA
agacagccaagacggagatgctatatacaaagcagacactttagtaactaaatggctacaaaacaatgaaacatggtgga

SEQ ID NO: 145841 - DNA, 80 bp, synthetic construct
  source 1..80: mol_type = other DNA
taactaccacgcgaatgttagtaacaccctctaggtatagtgggatttcgctccgcagaaaccccatctgtagattaggg

SEQ ID NO: 145842 - DNA, 80 bp, synthetic construct
  source 1..80: mol_type = other DNA
tatagagatgacatcacaagtgttactactttgggacccagtgacatgtatgttcacacaaaggaagctatctacaagtg

SEQ ID NO: 145843 - DNA, 80 bp, synthetic construct
  source 1..80: mol_type = other DNA
gactgtgcaaatctaaacatatcttcagaaacacatactatgaggttgaagggggtgttccatctggatgctcaggtact

SEQ ID NO: 145844 - DNA, 80 bp, synthetic construct
  source 1..80: mol_type = other DNA
ccgatgacgacggacagcgaggaggagatcttcccctaatgcaataaaaacttaaaacactgaggttactttcacgtcat

SEQ ID NO: 145845 - DNA, 80 bp, synthetic construct
  source 1..80: mol_type = other DNA
aaagtgcaaatgtagtagttggctatggcgtctggccggagtatttgagggatgaggaagccacggcacaagaccaaccc

SEQ ID NO: 145846 - DNA, 80 bp, synthetic construct
  source 1..80: mol_type = other DNA
caaatgggatatcaatttccaggaacaagcacaaattaggaaaaaactagagatgttcacttatgcccgttttgacatgg

SEQ ID NO: 145847 - DNA, 80 bp, synthetic construct
  source 1..80: mol_type = other DNA
gcagcgagccaatgtagtctttgaagccgtagtagcagaggaatttgttatggaaacggctttccacgtaactcagcaca

SEQ ID NO: 145848 - DNA, 80 bp, synthetic construct
  source 1..80: mol_type = other DNA
cactgtacagctaactagtcaagtgaatttggcccaagaaatttttgcaataaaagttgatgttgcatcccaaccactgt

SEQ ID NO: 145849 - DNA, 80 bp, synthetic construct
  source 1..80: mol_type = other DNA
ggtgccagggacgagggaaacgttggggacggtggttgattgcgggaccgcgctgagggacggagagcagacagtgtgtt

SEQ ID NO: 145850 - DNA, 80 bp, synthetic construct
  source 1..80: mol_type = other DNA
tagaaggcctaccagtaatgttgacaccagggtcaggacaattcctaacaactgatgatatgcagtcgccatcagttttg

SEQ ID NO: 145851 - DNA, 80 bp, synthetic construct
  source 1..80: mol_type = other DNA
tcaactatcaaaaccccggtgactgctaccacaattaaagaatttttcaatcatgcagttgatggtgatgaacaaggttt

SEQ ID NO: 145852 - DNA, 80 bp, synthetic construct
  source 1..80: mol_type = other DNA
cgacgcctcggaaagcaactccaactcgtcatgctccaactcaccaagacgcagagcaacctgcacataaacccccgtgt

SEQ ID NO: 145853 - DNA, 80 bp, synthetic construct
  source 1..80: mol_type = other DNA
caccaattcccacgtatccactcacgttggttggacacttgccgtggttacgattattataatctgcgttctgatttact

SEQ ID NO: 145854 - DNA, 80 bp, synthetic construct
  source 1..80: mol_type = other DNA
tcgaacaatttactaacgtatgtcctaataggattatactgatacctaaattgaacgaaatacatcttatgaaacctcct

SEQ ID NO: 145855 - DNA, 80 bp, synthetic construct
  source 1..80: mol_type = other DNA
ttagaaagcagtactttgaaacactaacacaagacaatgacgtacacagcaaatatggtaaagccaatgcagagcaattt

SEQ ID NO: 145856 - DNA, 80 bp, synthetic construct
  source 1..80: mol_type = other DNA
ataatggtttgcgcttggcaacatctttgcagggtctgccagtgatgaatgtaccaggtagcaatcaatttctcacctcc

SEQ ID NO: 145857 - DNA, 80 bp, synthetic construct
  source 1..80: mol_type = other DNA
tgccctatgtaaactcagtggtgactgattgcatggcaaagcataacaactggggtctagtgattttaccattcgtccca

SEQ ID NO: 145858 - DNA, 80 bp, synthetic construct
  source 1..80: mol_type = other DNA
gacctaggcacacgatggagatcattaagcaagacagcgtcagacgcacgctggaaaagagctgctccagccggtgcggc

SEQ ID NO: 145859 - DNA, 80 bp, synthetic construct
  source 1..80: mol_type = other DNA
aaccaatattattgaaagaagaaatacatactttgagtgggaaactaaatttaataataatagtactcacttaaacccca

SEQ ID NO: 145860 - DNA, 80 bp, synthetic construct
  source 1..80: mol_type = other DNA
attacatgaaaactattacacagtaataggaacttccgtccacacaaacggcactacatacgaaacacaaatttcaaact

SEQ ID NO: 145861 - DNA, 80 bp, synthetic construct
  source 1..80: mol_type = other DNA
aaaatttaattgaaatatgccaagttgatacattaatccctattaataatgtaagtaataatttgagaaaggtaaacctt

SEQ ID NO: 145862 - DNA, 80 bp, synthetic construct
  source 1..80: mol_type = other DNA
gcttacaagcatactcacccaggggaaagaggacatgttattgggagtaacgagatgagaaatgataatcaaccagatga

SEQ ID NO: 145863 - DNA, 80 bp, synthetic construct
  source 1..80: mol_type = other DNA
tcaccataacccaccagactgaagtgctagagtgcatctcccagaccggaccgtttgcctaccacagcgacgaacgcaaa

SEQ ID NO: 145864 - DNA, 80 bp, synthetic construct
  source 1..80: mol_type = other DNA
gactgtgtaaatctaaacatatctttaaaaacacatattatgaagttgaaggaggaattccatcaggttgctctggaact

SEQ ID NO: 145865 - DNA, 80 bp, synthetic construct
  source 1..80: mol_type = other DNA
ccataccttttatgtgtattaattcagcatactcagttttttatgatggctttgccgggtttgagaaaactggtctgtat

SEQ ID NO: 145866 - DNA, 80 bp, synthetic construct
  source 1..80: mol_type = other DNA
acgtatcccaacagcagcaccatcgccatctgtatggcgatcacgaccccgagctctaagtgtctgtattcatagtgtag

SEQ ID NO: 145867 - DNA, 80 bp, synthetic construct
  source 1..80: mol_type = other DNA
ggcggtgattatccaaatcacttacggacaagcacttctgtctccccggcaactgctgatatgctccaacagggcaaaaa

SEQ ID NO: 145868 - DNA, 80 bp, synthetic construct
  source 1..80: mol_type = other DNA
caaaatgacccggctactgccattgttagatcagtggaacgggtggcggacaccatagcaagtggcccaatgaattccga

SEQ ID NO: 145869 - DNA, 80 bp, synthetic construct
  source 1..80: mol_type = other DNA
ctcagataatatgaaagtagccattgatcattatgctgggcagcttttgtcactagacatcccaactcaggaactcagcc

SEQ ID NO: 145870 - DNA, 80 bp, synthetic construct
  source 1..80: mol_type = other DNA
gagcgcactactccagggagatgtggtggaagcaattgagggcgcagttgccagggtagcagacaccattagtaatggcc

SEQ ID NO: 145871 - DNA, 80 bp, synthetic construct
  source 1..80: mol_type = other DNA
agtcaacatgtagaaagacccatcacggtaactcagggagatacagtttacctgaacggtagtaataatccctgcaacta

SEQ ID NO: 145872 - DNA, 80 bp, synthetic construct
  source 1..80: mol_type = other DNA
tccatggaaaagacacttatctacactacatcaaaattttggatccttatctgaaagaatggaacattacagtggatgat

SEQ ID NO: 145873 - DNA, 80 bp, synthetic construct
  source 1..80: mol_type = other DNA
tgtacgccgccgtcgaagaagagtaaggaggaaaaaaagggggtggcggagattgtacggacgatggaaacgcaggtggc

SEQ ID NO: 145874 - DNA, 80 bp, synthetic construct
  source 1..80: mol_type = other DNA
tgcccccaaaacccgtaaagacgcaatgttgggcacgcacgttgtatgggacgtgggcctgcagtcctcctgtgtactat

SEQ ID NO: 145875 - DNA, 80 bp, synthetic construct
  source 1..80: mol_type = other DNA
atgttaaaacacgtgacgtatgacgtcacggccgccattttgtgacacaagatggccgacttccttcctctttttcaaaa

SEQ ID NO: 145876 - DNA, 80 bp, synthetic construct
  source 1..80: mol_type = other DNA
atagtcatgactattccatggacctcgggagtgcaattcagatacacggacaaggacacttacactagtgcaggctttct

SEQ ID NO: 145877 - DNA, 80 bp, synthetic construct
  source 1..80: mol_type = other DNA
cttaaacaacaatggtagtaaaccaacatccgtagaccccataataaaaatactagtagagaacatgaaaacataccaca

SEQ ID NO: 145878 - DNA, 80 bp, synthetic construct
  source 1..80: mol_type = other DNA
catttgcaccggaagcctccaccatgatcccaattacagtgaccatagcaccaatgtttacagaatttaatgggctgagg

SEQ ID NO: 145879 - DNA, 80 bp, synthetic construct
  source 1..80: mol_type = other DNA
acaatgggtctaatattaagtgcaccgctgtgagtcgtcaatctataacaacactaggaaaatttggacaacaatcagga

SEQ ID NO: 145880 - DNA, 80 bp, synthetic construct
  source 1..80: mol_type = other DNA
aaagatctcaaaacctgaattgagacgggcagtggcccagggaccagaacacgagttcggaatggctttgttgaagagaa

SEQ ID NO: 145881 - DNA, 80 bp, synthetic construct
  source 1..80: mol_type = other DNA
tggccaggttctttggcagcacctggacactgtacagacacgaggaggtagactacatatgcacctttaacagaaaaagc

SEQ ID NO: 145882 - DNA, 80 bp, synthetic construct
  source 1..80: mol_type = other DNA
agtacaaatgtagttacaaatccatcagtactaaacacactagctacaccatttcactttaaatacccacaattcacaaa

SEQ ID NO: 145883 - DNA, 80 bp, synthetic construct
  source 1..80: mol_type = other DNA
aatggaccaggaacaaaattgacattgccgagggtccaggagcaatgaatatggccaatgtactcagtactacaggtgcc

SEQ ID NO: 145884 - DNA, 80 bp, synthetic construct
  source 1..80: mol_type = other DNA
ggacgaggacaacgatcctctgctccggttgtcgcaagtcgccggcagcggccgccggcgagggccctcgttcctcgagg

SEQ ID NO: 145885 - DNA, 80 bp, synthetic construct
  source 1..80: mol_type = other DNA
gacacctcaaagtgcaactccatctgcgccccctgcagatccagcagtggagatgctgaaagactacatgaaactgggga

SEQ ID NO: 145886 - DNA, 80 bp, synthetic construct
  source 1..80: mol_type = other DNA
gtggcagcccgccaccagacgcaaatgcaccatcacagggtacctacccatagtgtggtgcggacacgggagagcgggcg

SEQ ID NO: 145887 - DNA, 80 bp, synthetic construct
  source 1..80: mol_type = other DNA
taatacaagaatccagctactacccaaaacacattcagtatgatatactgatcggcgaagggccttgttctccaggggat

SEQ ID NO: 145888 - DNA, 80 bp, synthetic construct
  source 1..80: mol_type = other DNA
gcaaatgtgagatgttcacttatcttcgatttgatgtagagatcacttttgtaatcacaagttaccagcaccaaagcact

SEQ ID NO: 145889 - DNA, 80 bp, synthetic construct
  source 1..80: mol_type = other DNA
agcaacacaaaaagcaccaccggaggagaccccggaaacgcaagcagagacattactcctccagctccaccagctccaac

SEQ ID NO: 145890 - DNA, 80 bp, synthetic construct
  source 1..80: mol_type = other DNA
gatatgccaccacagccaaaactggagataacacttatggtattgccccaacaaatgatatgggtactctttgcttcaga

SEQ ID NO: 145891 - DNA, 80 bp, synthetic construct
  source 1..80: mol_type = other DNA
aaaagtagatgaaccgaaaacgtataatgacacctggtatgcagaagatgtacagtgtaatgggagcagatgccatataa

SEQ ID NO: 145892 - DNA, 80 bp, synthetic construct
  source 1..80: mol_type = other DNA
cgaagtatcttcaaccggttgagtattgagcgtatgttttggaataacaggcgcacgcttcattatctaatctcccagcg

SEQ ID NO: 145893 - DNA, 80 bp, synthetic construct
  source 1..80: mol_type = other DNA
ccaatacatacaactaaacccactgttcttaacgccatggaaattggtgccacaccagatgtgaatccagatgatgtcat

SEQ ID NO: 145894 - DNA, 80 bp, synthetic construct
  source 1..80: mol_type = other DNA
tgagcgcggccgacatgcgggcgcgccacagggacggaccgctgccgctgtgactgcttacggtgacgtggttccggacc

SEQ ID NO: 145895 - DNA, 80 bp, synthetic construct
  source 1..80: mol_type = other DNA
aaagggaagcggtaaagtaaaagttaaaataaaacctcctgtattatttgaagataagtggtacactcaacaagacctgt

SEQ ID NO: 145896 - DNA, 80 bp, synthetic construct
  source 1..80: mol_type = other DNA
catgcgcttcaatgcggaattcacgtttgttcccacactaagcgacggcaccaccccacacataatgcttcaatatatgt

SEQ ID NO: 145897 - DNA, 80 bp, synthetic construct
  source 1..80: mol_type = other DNA
caagcacaacaactggggaattgccatattgccccttgctgaattggacttcgcagaagcttcatcaactgaagtacccg

SEQ ID NO: 145898 - DNA, 80 bp, synthetic construct
  source 1..80: mol_type = other DNA
gactccgagttgccattggacactgtagctgtaaatcagtaacgaaagtgagtggggccagacttcgccataaggccttt

SEQ ID NO: 145899 - DNA, 80 bp, synthetic construct
  source 1..80: mol_type = other DNA
aattgaaccttaaatccgtcgcacagataaccctatcaatactcgcaatgataatctcaacaagcttaatcatagccgca

SEQ ID NO: 145900 - DNA, 80 bp, synthetic construct
  source 1..80: mol_type = other DNA
acaggatccttatccccagctttgacactaaacccagaggcaaactgaaggttagggtcaccatcagaccccccaccctg

SEQ ID NO: 145901 - DNA, 80 bp, synthetic construct
  source 1..80: mol_type = other DNA
ccggagtcatggcgttccggtggtggtggtggagacgccgcccccagcgacggtggacccgccgcagatggaggagacta

SEQ ID NO: 145902 - DNA, 80 bp, synthetic construct
  source 1..80: mol_type = other DNA
agatggaggagacggagagctcgcagacgaggacctgctagacgccatcgcgctcgccgcagagtaaggaggcgaaggtg

SEQ ID NO: 145903 - DNA, 80 bp, synthetic construct
  source 1..80: mol_type = other DNA
atagtccatcatgccccggagatcgtgcacaaagcagctgtcgccgcgcagaaaccgacgcagcgtctccacgtgctgca

SEQ ID NO: 145904 - DNA, 80 bp, synthetic construct
  source 1..80: mol_type = other DNA
atttcaggcctcaaatatggcctaacaataacacctgctgacaaatctgaccagtttgtgaaagtcacatgggataatgc

SEQ ID NO: 145905 - DNA, 80 bp, synthetic construct
  source 1..80: mol_type = other DNA
aacttgcagagattgactctcttatccccatgaatgctattcccggaaaggttaacaccatgcaagcctaccctatccca

SEQ ID NO: 145906 - DNA, 80 bp, synthetic construct
  source 1..80: mol_type = other DNA
tgtgttccagagtggtaacagagaagcacattcatgacatgcgaataatgacaagagtttaccacaaagctaagcatgtc

SEQ ID NO: 145907 - DNA, 80 bp, synthetic construct
  source 1..80: mol_type = other DNA
ctgtttgatggcttttgattacacaaattatgatggaagtcttaatccagtctggttcaagttactcaaacacaaagtta

SEQ ID NO: 145908 - DNA, 80 bp, synthetic construct
  source 1..80: mol_type = other DNA
ctggtgaacagatgacactttcagctccttattactcaaacaaaccactaaggactgttagagacaataatagtcttggc

SEQ ID NO: 145909 - DNA, 80 bp, synthetic construct
  source 1..80: mol_type = other DNA
caacgctgaatctacaagcgttatcactacactaactgcagatacctcatctacataccaatcattacctgcatcaactt

SEQ ID NO: 145910 - DNA, 80 bp, synthetic construct
  source 1..80: mol_type = other DNA
actacaaccctgatgcgtccaccaaattgcccataacagtgaccattgcaccaatgtgctgtgagtttaacgggttgagg

SEQ ID NO: 145911 - DNA, 80 bp, synthetic construct
  source 1..80: mol_type = other DNA
gacacgtcaacgctgataatccgggcagtattacaagcacagtgagggtttatttcaagcctaagcatgtcaaggcatgg

SEQ ID NO: 145912 - DNA, 80 bp, synthetic construct
  source 1..80: mol_type = other DNA
catcgaaggagacgagtaaggaggcggaggtggcgggtgcggaggcggtacacccgacggtggcgactcagactgagacg

SEQ ID NO: 145913 - DNA, 80 bp, synthetic construct
  source 1..80: mol_type = other DNA
gttgttgacccatcaaccatgggcccgatctacaccttccacacatgggactggcgacgggggctttttggtcaagatgc

SEQ ID NO: 145914 - DNA, 80 bp, synthetic construct
  source 1..80: mol_type = other DNA
tcaccggtttagcttcagcttattatatgttctatgatggttacagtaccacgtctacacaaccagagaatacttatggc

SEQ ID NO: 145915 - DNA, 80 bp, synthetic construct
  source 1..80: mol_type = other DNA
gctatcttactgcaaaggatgcatctgcaattgacaaaccaacacaaccagatacttcatctaatcggttctacactcta

SEQ ID NO: 145916 - DNA, 80 bp, synthetic construct
  source 1..80: mol_type = other DNA
taaactcacgcccatgggcggccaggtgttcgaagagaccagaaggcttacccttgccaccattcttttgttttaacgcg

SEQ ID NO: 145917 - DNA, 80 bp, synthetic construct
  source 1..80: mol_type = other DNA
gagttttgtacaaaattggtagcatcttaggtatacatgtgggtggcaatggaaaggatggcttttctgctacacttctc

SEQ ID NO: 145918 - DNA, 80 bp, synthetic construct
  source 1..80: mol_type = other DNA
caggcagtttatgggataacgaatttggaacccttagacctaacaacaagtgctggttatccatatgctgcctttggtgt

SEQ ID NO: 145919 - DNA, 80 bp, synthetic construct
  source 1..80: mol_type = other DNA
gcacagacggcccctgtgacatcaggccggtcatgcaaaaacagacaaagagaccgtgagcggttaccggggcgcagggc

SEQ ID NO: 145920 - DNA, 80 bp, synthetic construct
  source 1..80: mol_type = other DNA
gtaaggcagtaatgtttaaagacaggaatacttgcagatcatacacattagcacaagtgtacaatacaatacttgatgaa

SEQ ID NO: 145921 - DNA, 80 bp, synthetic construct
  source 1..80: mol_type = other DNA
tgacaccagtataccaattaccgtatcaatctctcccatggcggctgaattttccggagcacggaaccgcagtgcacgtg

SEQ ID NO: 145922 - DNA, 80 bp, synthetic construct
  source 1..80: mol_type = other DNA
tctgctggaaatgatggaggccctccaaatttgacggaagaggttgaaaacaaaggaggtaaccggggcccgccttcgat

SEQ ID NO: 145923 - DNA, 80 bp, synthetic construct
  source 1..80: mol_type = other DNA
gcaataacatcaaaaacagtgaagtggatcgtacgcataataagtgcgcttaccattgtgatccgcaatagctctgatac

SEQ ID NO: 145924 - DNA, 80 bp, synthetic construct
  source 1..80: mol_type = other DNA
tacatgtttcccgagagggccccaaaaccagcccctactagcggggactgggaaatggagtacctaatgtgcaaaatctt

SEQ ID NO: 145925 - DNA, 80 bp, synthetic construct
  source 1..80: mol_type = other DNA
tgggtcctgcaacagagcctcaaaggaaggaaaagcaggatatgtcacagacaggggaaaagatagggttaaagtgctag

SEQ ID NO: 145926 - DNA, 80 bp, synthetic construct
  source 1..80: mol_type = other DNA
aggtttttcctggataccgacttacaagtgcttagcaagtttaaaacgccgaatggtttgctagatgtggctaaggcgtt

SEQ ID NO: 145927 - DNA, 80 bp, synthetic construct
  source 1..80: mol_type = other DNA
ggggtaaatttgttatacacaaaaaaaacacaaaaaagtaaaccctgggaccaaaatgcacctttttgtgtggatttggg

SEQ ID NO: 145928 - DNA, 80 bp, synthetic construct
  source 1..80: mol_type = other DNA
aactttgaagccaccgcagtcacagacacccgtgataccatcaatacagtcccgctgtcaacacacggagtcagtagggg

SEQ ID NO: 145929 - DNA, 80 bp, synthetic construct
  source 1..80: mol_type = other DNA
ttaaagacaagtggagactggtggatccagataacttgaatctagaaattacagttttagaactagacagaaatgaaaaa

SEQ ID NO: 145930 - DNA, 80 bp, synthetic construct
  source 1..80: mol_type = other DNA
tgttaattagacattattatcacaatgggtgcacaagtgtcttcccagaaggttggagcccacgaaaacaccaatgtagc

SEQ ID NO: 145931 - DNA, 80 bp, synthetic construct
  source 1..80: mol_type = other DNA
ttactagctccattacagagaaattgctaaaaacactcataaagattatctccaccctagtgataattagcaggaactat

SEQ ID NO: 145932 - DNA, 80 bp, synthetic construct
  source 1..80: mol_type = other DNA
aacaaccgttgttctgcccttgagcgtgttgccacttttactattcccatcaattcccaacccggcgatattttgtttgt

SEQ ID NO: 145933 - DNA, 80 bp, synthetic construct
  source 1..80: mol_type = other DNA
tcaggtacttcttggagcgaacaatctgctgtatagtgtcacgtaggcggatgtacgtggggttctttgcggccccgact

SEQ ID NO: 145934 - DNA, 80 bp, synthetic construct
  source 1..80: mol_type = other DNA
gtcatggccgccattttaagtaaggcggaagcaggctgtcacttttacaaaatggcggcgacagccttccgctttacaca

SEQ ID NO: 145935 - DNA, 80 bp, synthetic construct
  source 1..80: mol_type = other DNA
catcttgccacccaagaagacatgaacaatgccgtaaacataatgtggaacagggatttgttggttactcaatcaagagc

SEQ ID NO: 145936 - DNA, 80 bp, synthetic construct
  source 1..80: mol_type = other DNA
tctactcggccaccctcgggggcgcaccggactccacccgggcgcccatagcctccgagccctccacatcggttccaacc

SEQ ID NO: 145937 - DNA, 80 bp, synthetic construct
  source 1..80: mol_type = other DNA
gggtctggccgggctatgggcaaggctcttaaaaaatttccccgttgtgttctacggcaggacaccaagtcatgccgtgg

SEQ ID NO: 145938 - DNA, 80 bp, synthetic construct
  source 1..80: mol_type = other DNA
ctacctaacacactgggactcccaaaacaacaaccatataaatgccacctatacaaatgcaaaatactcacaatatgagt

SEQ ID NO: 145939 - DNA, 80 bp, synthetic construct
  source 1..80: mol_type = other DNA
aaaacacaaagcctgggaggacacaacggaggaagagacagaagccccctcagaagaggaggaagagaaccaagagctcc

SEQ ID NO: 145940 - DNA, 80 bp, synthetic construct
  source 1..80: mol_type = other DNA
gaagtgagacaatactgtagagagaagaaatggcttatccctgaaataccaacaaatattgacagggcagttaatcaagc

SEQ ID NO: 145941 - DNA, 80 bp, synthetic construct
  source 1..80: mol_type = other DNA
cggagaaaagaggaagcggtccctgaacatcagacgcggaaaagaggaagaagtccccggggacgggcacaggcggaaaa

SEQ ID NO: 145942 - DNA, 80 bp, synthetic construct
  source 1..80: mol_type = other DNA
aaacgaacactccaaccacaaccttccaggtgttgaaagaaatgtattatgacactataggcatagttgacacacaagaa

SEQ ID NO: 145943 - DNA, 80 bp, synthetic construct
  source 1..80: mol_type = other DNA
gttggatttactccattcacttccctttctttaaagttcatcactacaaccttgttgattagagacttatattataatgg

SEQ ID NO: 145944 - DNA, 80 bp, synthetic construct
  source 1..80: mol_type = other DNA
tacactacccagctgtaaatgtgtaatagaagacatccccctatgggccgcattctatggctactctgactttgtacaac

SEQ ID NO: 145945 - DNA, 80 bp, synthetic construct
  source 1..80: mol_type = other DNA
ctaaaagacgtatccatatcaggagaaagaaaatccatcttaaacaaaattcacccagaaactctcacaggatcaggcaa

SEQ ID NO: 145946 - DNA, 80 bp, synthetic construct
  source 1..80: mol_type = other DNA
ccccgggccgtgccttataggggagagggtgtagatcttaagcagggcacaataacaccactaaccccagtaaataagat

SEQ ID NO: 145947 - DNA, 80 bp, synthetic construct
  source 1..80: mol_type = other DNA
caatgtaattctagtaaatttcaccagggtttactaatagttgctgctattccagaacatcaattggcatctgcaacaag

SEQ ID NO: 145948 - DNA, 80 bp, synthetic construct
  source 1..80: mol_type = other DNA
agccgcactactacaaggagacgtggtggaggcagttgagaatgctgtcgcgcgggtggcggacacgatcggaagtgggc

SEQ ID NO: 145949 - DNA, 80 bp, synthetic construct
  source 1..80: mol_type = other DNA
gttagaaatttaattgagatgtgccaggttgataccatgattccaataaacaacacaaatgaaagaattggcaatgttaa

SEQ ID NO: 145950 - DNA, 80 bp, synthetic construct
  source 1..80: mol_type = other DNA
tattgcacgaggagtattacgacgtctttggcaactctgacctatatgatgaagcagtacacgatgatggtaaaataaaa

SEQ ID NO: 145951 - DNA, 80 bp, synthetic construct
  source 1..80: mol_type = other DNA
ccaccaggtacctcaacttaccagaactgggacctatggtggagatatgacttttatgctaacaaggcagatagtcacta

SEQ ID NO: 145952 - DNA, 80 bp, synthetic construct
  source 1..80: mol_type = other DNA
cttccgctttgcacaaaatggaggtgtttatcttccgggtcaaaggtcgcagctacgtcatcagtcacgtggggagggtt

SEQ ID NO: 145953 - DNA, 80 bp, synthetic construct
  source 1..80: mol_type = other DNA
tggttgttctaatacctgaacaccaactggcatatgcaggtggtgcgaatgccagtgttgggtataaacacactcatcca

SEQ ID NO: 145954 - DNA, 80 bp, synthetic construct
  source 1..80: mol_type = other DNA
ggctagcccaccacaactactggacagccagtaacaaagacttagacctagcaaggtacctaggctgtacaataatattt

SEQ ID NO: 145955 - DNA, 80 bp, synthetic construct
  source 1..80: mol_type = other DNA
actaaccataaccttttacatcctccaaccataacctgcaccacagccatgaacagaagatttttccttgatttagatat

SEQ ID NO: 145956 - DNA, 80 bp, synthetic construct
  source 1..80: mol_type = other DNA
caaacagcaataatagtgccacctagcacccccacagcaatgtatatgttggcatttgttagtgcatgcaatgatttttc

SEQ ID NO: 145957 - DNA, 80 bp, synthetic construct
  source 1..80: mol_type = other DNA
acgcatgagagtgtacatgaaacccaagcacattagagtgtggtgcccgcgaccaccaagggctgttccctataatggca

SEQ ID NO: 145958 - DNA, 80 bp, synthetic construct
  source 1..80: mol_type = other DNA
tgcattagttgttgccgcaatcccagaacatcagttggcatacataggatcagagaatgttagtgtaggatacaaacaca

SEQ ID NO: 145959 - DNA, 80 bp, synthetic construct
  source 1..80: mol_type = other DNA
catgcccttatacatgatgctatatggctatatggactatgctataaaatgcacagggtccaaaagcctttggacagacg

SEQ ID NO: 145960 - DNA, 80 bp, synthetic construct
  source 1..80: mol_type = other DNA
gctgccggtgcgtgtcgtgccacggtacttgtcgtttcggcaatacggcgcgggatctttctgcgggggttttcacggcg

SEQ ID NO: 145961 - DNA, 80 bp, synthetic construct
  source 1..80: mol_type = other DNA
ccagctcaagcacctcttccaccagctctgcaaaacccaagcgggtctccacctcaaccccctactatttacccagcagt

SEQ ID NO: 145962 - DNA, 80 bp, synthetic construct
  source 1..80: mol_type = other DNA
ttctctttttccttttatatttgcttatggtgacaattatacggatatagttgtcatcatgggcgctcaagtatcaaggc

SEQ ID NO: 145963 - DNA, 80 bp, synthetic construct
  source 1..80: mol_type = other DNA
tttaaaactggaaacaatagtatatatggcctaccaaactacaatccacaagcagacaccttaaacaaattaagagaatg

SEQ ID NO: 145964 - DNA, 80 bp, synthetic construct
  source 1..80: mol_type = other DNA
cctaaagtgacgcaaggtctgtcagccgccagggtccgtttaccaggctttcaggtgtggaatttagatagagtgggtgt

SEQ ID NO: 145965 - DNA, 80 bp, synthetic construct
  source 1..80: mol_type = other DNA
aactaacttccacatcttgggaaagttactacacagaatttttaaataaagctatacctgaaaacaaagacagaaaagca

SEQ ID NO: 145966 - DNA, 80 bp, synthetic construct
  source 1..80: mol_type = other DNA
acaccaactagcatacataggtggcaccaatgtaagtgttggatacaatcacactcacccaggagaaaatggtcacacga

SEQ ID NO: 145967 - DNA, 80 bp, synthetic construct
  source 1..80: mol_type = other DNA
tggccctgttgaagcaggtgattgtgggggactattggtatgtccccatggtgttatagggctggtcactgcaggtggtg

SEQ ID NO: 145968 - DNA, 80 bp, synthetic construct
  source 1..80: mol_type = other DNA
atgggcgcccaagtgagcagacagagtgttggatcacatgagaataccattagtacagggaatggatcaattgttaagta

SEQ ID NO: 145969 - DNA, 80 bp, synthetic construct
  source 1..80: mol_type = other DNA
ggggaccatgtgtgtcagaattgttacagaccaacaacagcatagagttaagatcgactctatggtatatctagaagcta

SEQ ID NO: 145970 - DNA, 80 bp, synthetic construct
  source 1..80: mol_type = other DNA
gacagcacattagcatattaccaaatgaaaccacaatggacaccctaaaaaactttgtacaaactaatgtattcgcacac

SEQ ID NO: 145971 - DNA, 80 bp, synthetic construct
  source 1..80: mol_type = other DNA
gtcaatcaattaggtgttgcttttggagatggattctccagcaatattaaggatcatttaacagggttgtgcacctcaat

SEQ ID NO: 145972 - DNA, 80 bp, synthetic construct
  source 1..80: mol_type = other DNA
ggaaaaagaccaaagctcctcggaagaggaagaagagagacccctccgagagcagctgcagctccagctcaaggagcagc

SEQ ID NO: 145973 - DNA, 80 bp, synthetic construct
  source 1..80: mol_type = other DNA
tcctctggacttaacaataattattactggagccactgatgttgatggaatggcatggtttactcctgttggattggcag

SEQ ID NO: 145974 - DNA, 80 bp, synthetic construct
  source 1..80: mol_type = other DNA
acacgagtgctggaaacgttacatgctggtaccaaacagggattgtagtccccgcgggcactccaacatcatgttctatc

SEQ ID NO: 145975 - DNA, 80 bp, synthetic construct
  source 1..80: mol_type = other DNA
agtggaaaatttcctcagtaggtctgcctgcgtgtacatagtagagtacaagaccaaagacacgacgcctgacaaaatgt

SEQ ID NO: 145976 - DNA, 80 bp, synthetic construct
  source 1..80: mol_type = other DNA
tcgatggaggtctgcgagaggaagtcgatctggaaggcgtggatgaggtactgcagcacgcgattggccagcacggggat

SEQ ID NO: 145977 - DNA, 80 bp, synthetic construct
  source 1..80: mol_type = other DNA
aacacttgcgtatacttccaggttttaagcaatgcctggaacaatatgctaagtatagcacacccccacacagaaaataa

SEQ ID NO: 145978 - DNA, 80 bp, synthetic construct
  source 1..80: mol_type = other DNA
acaggttctgctgtgggctgcgatcctgaaacgttctggtcaaagatacctgtcatgctggatggagagtgcataatggc

SEQ ID NO: 145979 - DNA, 80 bp, synthetic construct
  source 1..80: mol_type = other DNA
tccgtcctaatttgctttaaccttccagcaaccctaaggcacaggctgcgaactttaaacgtcaactggataacgtgatt

SEQ ID NO: 145980 - DNA, 80 bp, synthetic construct
  source 1..80: mol_type = other DNA
cactggctgatgccttgaccaacccagcacttatgtcacctacagtagaggcttgtggattttccgataggctcaagcaa

SEQ ID NO: 145981 - DNA, 80 bp, synthetic construct
  source 1..80: mol_type = other DNA
gataaatatggagtctaaaagattgaaagtcaaggttgtgttctcaatatacttcataatctatattcaaatgtctagag

SEQ ID NO: 145982 - DNA, 80 bp, synthetic construct
  source 1..80: mol_type = other DNA
ctggcaaaactatagcaatccaaacaactatcaagcatgccaccaacaattcatagcatttaaagcacaaagatttgcca

SEQ ID NO: 145983 - DNA, 80 bp, synthetic construct
  source 1..80: mol_type = other DNA
atatagatctgccccctttatgtaccgatgctaaaacactagatagtaccaaaggaaaccaaactaacaaaactcacgta

SEQ ID NO: 145984 - DNA, 80 bp, synthetic construct
  source 1..80: mol_type = other DNA
ggtacccatataacatgaaaactaatgaaagccaattacatgctatcagaaaacaatactttgactggcttacaacaaaa

SEQ ID NO: 145985 - DNA, 80 bp, synthetic construct
  source 1..80: mol_type = other DNA
tcaaaccggctgtaaataaagtttacctttttcctcccgaggggcctaaacccatctctggctacagagcatgggaagac

SEQ ID NO: 145986 - DNA, 80 bp, synthetic construct
  source 1..80: mol_type = other DNA
atgcgcgcgcgccggggggctgcgcccccctcccccgcgcatgcgcgccgggccctccccccccggtaggctccgccctt

SEQ ID NO: 145987 - DNA, 80 bp, synthetic construct
  source 1..80: mol_type = other DNA
aggcaagaacgtaacggacattaaatttcaaaaaccaggaaaaggctcagacccagaagtggaatacatgtggactaact

SEQ ID NO: 145988 - DNA, 80 bp, synthetic construct
  source 1..80: mol_type = other DNA
cagaccatcgtgtacgatataagtgtgtcatcggtgtaattggatgtctattatgtatcaccgacactaatgtgatattg

SEQ ID NO: 145989 - DNA, 80 bp, synthetic construct
  source 1..80: mol_type = other DNA
cggattcattccaatagaatattcttcgccaaagttgatccaaataatcttagtgattagaagttattatttcagcaatg

SEQ ID NO: 145990 - DNA, 80 bp, synthetic construct
  source 1..80: mol_type = other DNA
ctagaccttgccaggtacctaggagccacaatagtactttacagacaccctacagtagacttcttagttagaattcgcac

SEQ ID NO: 145991 - DNA, 80 bp, synthetic construct
  source 1..80: mol_type = other DNA
ctaataagttttataaaaacttcttagacgctgctatgcccgctacaaaaccccgctcagcaaacatactaaacacagca

SEQ ID NO: 145992 - DNA, 80 bp, synthetic construct
  source 1..80: mol_type = other DNA
caacaagcacagtagatgagcagatccagtggatgttcaggccacaaaatcctgtaccagtaggaaatatctacagaaga

SEQ ID NO: 145993 - DNA, 80 bp, synthetic construct
  source 1..80: mol_type = other DNA
acaactaagttatgttcacaaagaatcagatggttggattaagaagtttacagagatgtgcaacgcagctaggggtttag

SEQ ID NO: 145994 - DNA, 80 bp, synthetic construct
  source 1..80: mol_type = other DNA
atatggggctcttcggtcagaatatgtattatcattacctaggtcgggctgggtacacaattcatgtgcaatgcaacgca

SEQ ID NO: 145995 - DNA, 80 bp, synthetic construct
  source 1..80: mol_type = other DNA
tatcagacaaattttatagtacctccaaatacaccaacaagtgcaaaaatggtctgcatggtttcggcttgtaaggactt

SEQ ID NO: 145996 - DNA, 80 bp, synthetic construct
  source 1..80: mol_type = other DNA
ttccatgacacagctacaactaaggaccgaggatttataccaataggaacacaatttgcctacggacgcatgcctgacgg

SEQ ID NO: 145997 - DNA, 80 bp, synthetic construct
  source 1..80: mol_type = other DNA
ttgggcgtgccattgctgaaaaagaaagcacctcagtgtattctctaccaccagacccctcacacttcgacggttacaaa

SEQ ID NO: 145998 - DNA, 80 bp, synthetic construct
  source 1..80: mol_type = other DNA
tcctgggagacgtcctccgactccggaaaggagtccactgggacccccgcctataataattcaaggagatccaattccag

SEQ ID NO: 145999 - DNA, 80 bp, synthetic construct
  source 1..80: mol_type = other DNA
tgcgtaccagtgaacacaggaagtcactccactgatactgccattttctctttccaattggatcctggcaacggatctgt

SEQ ID NO: 146000 - DNA, 80 bp, synthetic construct
  source 1..80: mol_type = other DNA
ggaaagaagcgatgttaggtacacatgtggtttgggatgttggactgcaatccacagttgtcatgaacataccgtggaca

SEQ ID NO: 146001 - DNA, 80 bp, synthetic construct
  source 1..80: mol_type = other DNA
ttcaacaatactccttctaacactcccagacgtttccaatttagattccgcgtggttcctgtcagaaacttgaatgtttc

SEQ ID NO: 146002 - DNA, 80 bp, synthetic construct
  source 1..80: mol_type = other DNA
tctgctaagcccaacactccaccacacccaggcacacactacacacacccacccgtctcagggtcccctcggacagctcc

SEQ ID NO: 146003 - DNA, 80 bp, synthetic construct
  source 1..80: mol_type = other DNA
gcggtgcaattgagaagaaagttagaattctttacatacatgaggtttgatctagagcttacctttgtcatcacgagcac

SEQ ID NO: 146004 - DNA, 80 bp, synthetic construct
  source 1..80: mol_type = other DNA
aaggattaccggtaatgaacacccctgggagtaaccagtatctgaccgccgataactttcagtctccatgcgcacttcct

SEQ ID NO: 146005 - DNA, 80 bp, synthetic construct
  source 1..80: mol_type = other DNA
aggctccaccattaattatactactatcaactattacaaggactcttacgctgctacagcaggcaaacagagcctcaaac

SEQ ID NO: 146006 - DNA, 80 bp, synthetic construct
  source 1..80: mol_type = other DNA
atactttagaacaaaagatgcacaatggggagacgccattcacatagttaattccacagaaacagtgacaggacaaacag

SEQ ID NO: 146007 - DNA, 80 bp, synthetic construct
  source 1..80: mol_type = other DNA
taaatagagaacacctgagcaatggtgaagtagctaacaaattcacaggcactaaatcaaataacaccaatgatgtacag

SEQ ID NO: 146008 - DNA, 80 bp, synthetic construct
  source 1..80: mol_type = other DNA
agaggggtcatcagattgatcatgttaatctaccagttgacttctgggatgaacagaggaaaccagcttatggccatgct

SEQ ID NO: 146009 - DNA, 80 bp, synthetic construct
  source 1..80: mol_type = other DNA
acccacacaaccaaaccatcagcacttggagcaatggagattggagcaaccccagatgttatcccagaggatgtgattga

SEQ ID NO: 146010 - DNA, 80 bp, synthetic construct
  source 1..80: mol_type = other DNA
gtaacgtacaaccagaagacaccattgaaacccgttatgtgcagacttcacacactagagatgaaatgagtatagaaagc

SEQ ID NO: 146011 - DNA, 80 bp, synthetic construct
  source 1..80: mol_type = other DNA
gccctccccttccctgtaacgtagaagcattgtaaacggaccaataggggacggcaaaccacgtcgttcaaggtcaagca

SEQ ID NO: 146012 - DNA, 80 bp, synthetic construct
  source 1..80: mol_type = other DNA
gaggatcacaacaacgctgtaagtgtgctatggaacagagatctgatggtcgttaacagcaaagctcaagggatagacac

SEQ ID NO: 146013 - DNA, 80 bp, synthetic construct
  source 1..80: mol_type = other DNA
agaagggggttatataacatgcttttaccaaactcgcattgtggtccctgcaagcacaccaaccagtatggccatgcttg

SEQ ID NO: 146014 - DNA, 80 bp, synthetic construct
  source 1..80: mol_type = other DNA
ggcaaggtacaatatgatgatttcattcaaaagatacggaccacatcagtagggaggacactctacctaccaccctacga

SEQ ID NO: 146015 - DNA, 80 bp, synthetic construct
  source 1..80: mol_type = other DNA
tcaggcacacggccggggcccggccctcgcagagcgagcacatggggctggcggccgcccccgccacgtagctgcccgtc

SEQ ID NO: 146016 - DNA, 80 bp, synthetic construct
  source 1..80: mol_type = other DNA
cagcagtaccagcacttcggccacaaagttgcgtcccggtcgcggacgtcccgtcacgcctagcacataccacggcgtgg

SEQ ID NO: 146017 - DNA, 80 bp, synthetic construct
  source 1..80: mol_type = other DNA
acttttaccgcgactcatacgcggctgcagcatcaaaacaagatttaagcatggacccgagcaagttcacgcaaccactg

SEQ ID NO: 146018 - DNA, 80 bp, synthetic construct
  source 1..80: mol_type = other DNA
atgggagctcaagtatcaacacagaagactggcgcgcatgagacgagcctgagcgctagcggaaactccatcatccacta

SEQ ID NO: 146019 - DNA, 80 bp, synthetic construct
  source 1..80: mol_type = other DNA
tagcagaagactcctgcctgaatcagatcgcccccttttccgcatcagagcaccccgccttctccatggttgagtccgta

SEQ ID NO: 146020 - DNA, 80 bp, synthetic construct
  source 1..80: mol_type = other DNA
aatcagagggaagatgaccctgacagaggaagtgcagtggacagaactagcagaggcagagttacaggaaaataaaatca

SEQ ID NO: 146021 - DNA, 80 bp, synthetic construct
  source 1..80: mol_type = other DNA
caaccagaagatacagttgagactcgttacgtgcaaacatcacagactagagatgaaatgagcatagaaagttttctagg

SEQ ID NO: 146022 - DNA, 80 bp, synthetic construct
  source 1..80: mol_type = other DNA
cagaaaatatgttttagctaagataccaccccccaaactgtttgaagaccactggtacactcagccagacttatgcaaag

SEQ ID NO: 146023 - DNA, 80 bp, synthetic construct
  source 1..80: mol_type = other DNA
ttgcacgaacagctggaccgcttcctgcgacaccagcacgacggcggcggggacgaggaccggttgccgttctaccacaa

SEQ ID NO: 146024 - DNA, 80 bp, synthetic construct
  source 1..80: mol_type = other DNA
ggacttatgtcagacgcaggagacgaaagaagggcaaaaaactagtactgactcagtggcagcccgccaccagacgcaaa

SEQ ID NO: 146025 - DNA, 80 bp, synthetic construct
  source 1..80: mol_type = other DNA
agaggccgttggccaccccggtgaagccgtagacggcgttgcacgtgcacttgatggccagctgctgcttgtcgaggatg

SEQ ID NO: 146026 - DNA, 80 bp, synthetic construct
  source 1..80: mol_type = other DNA
tgacatatggtaagctcttttctagttttcacaaaaacccagggatcatcacgggctcagcagtggggtgtgaccctgaa

SEQ ID NO: 146027 - DNA, 80 bp, synthetic construct
  source 1..80: mol_type = other DNA
gcggagttaccccagcctctagaatggatgcaatgctaggcactcacatcatatgggattttgggttgcaatcttcagtt

SEQ ID NO: 146028 - DNA, 80 bp, synthetic construct
  source 1..80: mol_type = other DNA
gctgctaagggcctggagtggattagtttgaagattggtaaattcattgattggttaaaagagaaacttatacctacagt

SEQ ID NO: 146029 - DNA, 80 bp, synthetic construct
  source 1..80: mol_type = other DNA
ttcctcgccccctccccgggcttcagagcccaggcctccctcgcggagagtggcctctttgggccctcacgtccagcccc

SEQ ID NO: 146030 - DNA, 80 bp, synthetic construct
  source 1..80: mol_type = other DNA
cacggggagttgccaaggctcttgacttcataccagtggaaactctggagacaacccaacggtcgcccgtgtttacggac

SEQ ID NO: 146031 - DNA, 80 bp, synthetic construct
  source 1..80: mol_type = other DNA
ttaaacagaagaagaggtgtgagccagttgcagttgttatacatggtgaacctggtactggaaagtctatgaccacaaat

SEQ ID NO: 146032 - DNA, 80 bp, synthetic construct
  source 1..80: mol_type = other DNA
gctcaagcaaatcactattggaaactccactataacaactcaagatgctgttaactcaatcgttgcatatggagagtggc

SEQ ID NO: 146033 - DNA, 80 bp, synthetic construct
  source 1..80: mol_type = other DNA
catagctcctccacagtatgtaccagacctactgttccctaacactcaaaaaaaacccaaattttccaaattcgggtggg

SEQ ID NO: 146034 - DNA, 80 bp, synthetic construct
  source 1..80: mol_type = other DNA
gtgagcatttgtccctagctactgtatataacagaatcacccaggagagtaagaatagaaaagaactaacaaactctctg

SEQ ID NO: 146035 - DNA, 80 bp, synthetic construct
  source 1..80: mol_type = other DNA
catcagactaaacacaacaaaatgggggcacaagtttctacacaaaaaaccggggcgcatgaaactggcctgaatgctag

SEQ ID NO: 146036 - DNA, 80 bp, synthetic construct
  source 1..80: mol_type = other DNA
gttttcaatgagagatggttaattcatggtggtatgccatcaggatctccctgcaccacagtgttgaattcactctgcaa

SEQ ID NO: 146037 - DNA, 80 bp, synthetic construct
  source 1..80: mol_type = other DNA
gggttttactgattaatgctttttcgggaggaagtgatacggcaatgagacgtgccggaaagggagctccggctttttta

SEQ ID NO: 146038 - DNA, 80 bp, synthetic construct
  source 1..80: mol_type = other DNA
ccccgagatgccgccttccactcgatgccagcacagcgcgtgtcgtacgcgcaccgtcagcgtgggcgtcagatccgcgt

SEQ ID NO: 146039 - DNA, 80 bp, synthetic construct
  source 1..80: mol_type = other DNA
ttagattatgctgccgggtcttcgacctatataccgatcactgtcacagtggcgccaatgtgcgctgaatataacgggct

SEQ ID NO: 146040 - DNA, 80 bp, synthetic construct
  source 1..80: mol_type = other DNA
gtgctggccaccctcagcttattgggatgcgactcctcaccatggcattggttaaaagagaaggtttgcaacatactagg

SEQ ID NO: 146041 - DNA, 80 bp, synthetic construct
  source 1..80: mol_type = other DNA
taaaagagttgtagaaaacatgtcagcaaccaatggaaacaatgtatgggcaaactacataaatactataaagttcacag

SEQ ID NO: 146042 - DNA, 80 bp, synthetic construct
  source 1..80: mol_type = other DNA
gaatggctgagttttccacgcccgtccgcagcggtggagcagcgcagcagcgacccccgcgtcccgagggcgtgtgccgg

SEQ ID NO: 146043 - DNA, 80 bp, synthetic construct
  source 1..80: mol_type = other DNA
taaaattaaccataacgctgggactactgatgaaggagtagtaatgagccaggacgccgtacatcgaaggcaacaagaaa

SEQ ID NO: 146044 - DNA, 80 bp, synthetic construct
  source 1..80: mol_type = other DNA
agttaaaatacaccccccaaaactctttgaagacaagtggtactctcagtcagatctttgtagggtgccccttgtcagtt

SEQ ID NO: 146045 - DNA, 80 bp, synthetic construct
  source 1..80: mol_type = other DNA
aactaactacactaagaaaatactactttagttgggaaacacaaacagaaggagtggcagtaccccctacgtggaccacc

SEQ ID NO: 146046 - DNA, 80 bp, synthetic construct
  source 1..80: mol_type = other DNA
ccgcgcacaaagctccgtgcaaacacccgcagaaagatgtctgagtgaggctcggagtcctgctgaaaactcccttagcg

SEQ ID NO: 146047 - DNA, 80 bp, synthetic construct
  source 1..80: mol_type = other DNA
cggtggctttggcggcaccttctcagaaatcgaagcgcaggtaaacggaatctggggaattcaacacaggtaagaaatat

SEQ ID NO: 146048 - DNA, 80 bp, synthetic construct
  source 1..80: mol_type = other DNA
cccatctcgtatcagcagccgtagcgtagcattaatggtcagcggggtaaccaaagaaatcacatagggatgtgtacagg

SEQ ID NO: 146049 - DNA, 80 bp, synthetic construct
  source 1..80: mol_type = other DNA
tacaaactgccattgcaagttatgttgctggtattcaaccagggagtagtactatgaatggtagaaaacgttaatgttgg

SEQ ID NO: 146050 - DNA, 80 bp, synthetic construct
  source 1..80: mol_type = other DNA
gagaaacaagttgagagtttgagagtggcagacattaaaacacaggaaaagatcaagatggagattgacacccttcatga

SEQ ID NO: 146051 - DNA, 80 bp, synthetic construct
  source 1..80: mol_type = other DNA
gactggccgggctatgggcaagtgtcttagggtcatcgctcttaaaacatgtttctcggcaggccttggagaaagaaaag

SEQ ID NO: 146052 - DNA, 80 bp, synthetic construct
  source 1..80: mol_type = other DNA
gtgaattcaccatgttgggtatacatgatagagtagcagttatccccacacatgcatctgttggagaaaccatttacatc

SEQ ID NO: 146053 - DNA, 80 bp, synthetic construct
  source 1..80: mol_type = other DNA
ctgacccagtggcagccctctatagttaaaaaatgttatatagtgggctttgaccccataataatatgtggactgaacag

SEQ ID NO: 146054 - DNA, 80 bp, synthetic construct
  source 1..80: mol_type = other DNA
tggagacggaggcgctggccaaggcgcaggtggaggcgctaccgctaccgaagaagagtaccgcgcagaagacctagaag

SEQ ID NO: 146055 - DNA, 80 bp, synthetic construct
  source 1..80: mol_type = other DNA
gagggctttacacacaatatcagagagcattttacaaatctgagtactagcatcactgacaaactcaccagtaaagtggt

SEQ ID NO: 146056 - DNA, 80 bp, synthetic construct
  source 1..80: mol_type = other DNA
agctttatgttctgtggcacagcaaacacaacattgaaacttcttatagcttacactccaccaggagttccaaagccaga

SEQ ID NO: 146057 - DNA, 80 bp, synthetic construct
  source 1..80: mol_type = other DNA
gttagtgcgtattattagtgctctcactattatgattagaaactcaacagacacagcaacaatacttgccactctggcgc

SEQ ID NO: 146058 - DNA, 80 bp, synthetic construct
  source 1..80: mol_type = other DNA
caactgcagaatactatcaaacagtacacacacagggcataattaacaaaacacaaagaacagctcaattcactacaaca

SEQ ID NO: 146059 - DNA, 80 bp, synthetic construct
  source 1..80: mol_type = other DNA
ggaaacagatctagatactacagtactatcaaaatataaaggtaacaaagaaatagaatataaccagtatatagaaacag

SEQ ID NO: 146060 - DNA, 80 bp, synthetic construct
  source 1..80: mol_type = other DNA
caactggggttttgtaccctacagcgaaaactttggactgggcagactacccggtggcagtacaaacccccctaccagaa

SEQ ID NO: 146061 - DNA, 80 bp, synthetic construct
  source 1..80: mol_type = other DNA
tcttatgcacagaaacagatggaccagaagcaaccatgacctagacctcatgagatacctaggggtgagattcaaggcct

SEQ ID NO: 146062 - DNA, 80 bp, synthetic construct
  source 1..80: mol_type = other DNA
aacaacagttcaggaacagaaatcattagagtgtttggaaagcctaaacatacacgtgcttggattccacgaccacccag

SEQ ID NO: 146063 - DNA, 80 bp, synthetic construct
  source 1..80: mol_type = other DNA
atacaacagaaaacctcccttcactgacagccaactgacaggaccgtatctacacccgggtaacatgatgctcagaaaga

SEQ ID NO: 146064 - DNA, 80 bp, synthetic construct
  source 1..80: mol_type = other DNA
gcaggtggagataatcatgttgctttcatagacctcaggaaatacaggattacagaagctgaagagcaaggaataactga

SEQ ID NO: 146065 - DNA, 80 bp, synthetic construct
  source 1..80: mol_type = other DNA
cccaaattttcgcccttcgactgggagaacgaggctcaaatagccggctggttagacaggcccatgaggctgtatcctgg

SEQ ID NO: 146066 - DNA, 80 bp, synthetic construct
  source 1..80: mol_type = other DNA
aattcaaccccacaagagtcactgctaaagtgagggtctatatgaagcctaagcacatccgctgttggtgcccacgccca

SEQ ID NO: 146067 - DNA, 80 bp, synthetic construct
  source 1..80: mol_type = other DNA
atgggagctcaagtgtcaactcaaaaatctggatctcatgaaactgggctaaatgctagtggtaactccatcatccacta

SEQ ID NO: 146068 - DNA, 80 bp, synthetic construct
  source 1..80: mol_type = other DNA
ctcgttgttgtggttccagaacatcagctagcgtacattggcgctggtggggtcaatgtcaagtacgaacacacccatcc

SEQ ID NO: 146069 - DNA, 80 bp, synthetic construct
  source 1..80: mol_type = other DNA
ccccccactctgttagaggacaagtggtacacccagcaggacctgtgcgacgttaacctgttgcaacttgtggtcactgc

SEQ ID NO: 146070 - DNA, 80 bp, synthetic construct
  source 1..80: mol_type = other DNA
tggtttcacaacagccatcaaatcacaactggacatgctgggtaacactgtgtgtgaccaattgactgggaaagttatca

SEQ ID NO: 146071 - DNA, 80 bp, synthetic construct
  source 1..80: mol_type = other DNA
ggaaacacaaaaatgcctgatgggaacggatacataccactggcatacagatttaaatggtacatatgcatgtttcacca

SEQ ID NO: 146072 - DNA, 80 bp, synthetic construct
  source 1..80: mol_type = other DNA
ccgaggcttacccctccacaaccactcacgatgccaccaaggcctactcctcctacccctctgccacctgcaacactact

SEQ ID NO: 146073 - DNA, 80 bp, synthetic construct
  source 1..80: mol_type = other DNA
aacattacaataccagcaactcaaggtttaccagtcctagttactccaggatccagtcaatacctgacatctgacgactt

SEQ ID NO: 146074 - DNA, 80 bp, synthetic construct
  source 1..80: mol_type = other DNA
aggaagtgtatcagtgtattatgagaaaacccatccaggagaaaagggaatagatcttagtgaaacagatagtgatggtc

SEQ ID NO: 146075 - DNA, 80 bp, synthetic construct
  source 1..80: mol_type = other DNA
acaggtcgtgcacctcccccccggcggcgtccgttaatcgctgggcgtcggcgtccagcacgcgtcgcaagttctccagc

SEQ ID NO: 146076 - DNA, 80 bp, synthetic construct
  source 1..80: mol_type = other DNA
caggggccggtggagcccctccgggcctgccggccctcccggctcctccacagcaggccgataacccgcagccacggcct

SEQ ID NO: 146077 - DNA, 80 bp, synthetic construct
  source 1..80: mol_type = other DNA
tatccactaattgggcaaaaagcccttctctttcctgaaagggtaccacaacatgtgtggaccacccaagactggaaaga

SEQ ID NO: 146078 - DNA, 80 bp, synthetic construct
  source 1..80: mol_type = other DNA
gctgctagaggtttagaatggttgggtaataagatatctaaatttattgactggttcaaatcaatgctaccacaggcaaa

SEQ ID NO: 146079 - DNA, 80 bp, synthetic construct
  source 1..80: mol_type = other DNA
atacctggcagcaacacagaaagcatttccagcttatgctaccctgcaatcacctctctatgaataccatgggggctgct

SEQ ID NO: 146080 - DNA, 80 bp, synthetic construct
  source 1..80: mol_type = other DNA
gctcattacgagtattatccgcatccacatatatcaacgtcatagctaggcacgctataagtaccccccccccacaatgg

SEQ ID NO: 146081 - DNA, 80 bp, synthetic construct
  source 1..80: mol_type = other DNA
agattatgatttctacccttacttacatatgtatgtagatagatatatagaagtttacctgtgtaggagtaggcttttat

SEQ ID NO: 146082 - DNA, 80 bp, synthetic construct
  source 1..80: mol_type = other DNA
tcaaccacgtaactggtcacgtggtgcgcacgtcacggcaaccattttgttttacaaaatggcgcatttccttcctcttt

SEQ ID NO: 146083 - DNA, 80 bp, synthetic construct
  source 1..80: mol_type = other DNA
gacttcaaggtgcagggggtaactgacgcacgaacctcgctcactactacaggggtgtttggacaacaatctggagccat

SEQ ID NO: 146084 - DNA, 80 bp, synthetic construct
  source 1..80: mol_type = other DNA
ttggggggacgggggttgcgctggcccggggtgtttgcggcgaggacgggggttacgcttagacggggggccttctgcgc

SEQ ID NO: 146085 - DNA, 80 bp, synthetic construct
  source 1..80: mol_type = other DNA
gtgacaaatataaagattcacaagggaaattgaatgtgtctgctgcttttaaaccatgtgatgtcaatacaaaaattggg

SEQ ID NO: 146086 - DNA, 80 bp, synthetic construct
  source 1..80: mol_type = other DNA
gctcgagtcagtttctgactactgacaatttccaatcaccatgtgctataccaaattatgatgtctctccgcccatacat

SEQ ID NO: 146087 - DNA, 80 bp, synthetic construct
  source 1..80: mol_type = other DNA
agagacagcaaagaaatatggactcaccatcactccacctgataaatcaacagagtttaaaccaatgtcatgggacaatg

SEQ ID NO: 146088 - DNA, 80 bp, synthetic construct
  source 1..80: mol_type = other DNA
aggcagcaaattcaattgtagcatatggggaatggccatcatttctcgatgactcagatgcaagtgatgtgaacaaaacc

SEQ ID NO: 146089 - DNA, 80 bp, synthetic construct
  source 1..80: mol_type = other DNA
agcctggtcatttaaatatgaaacaaacaatccagtcagtaacaaaatatggccacaatccactaccacaaaaccaacag

SEQ ID NO: 146090 - DNA, 80 bp, synthetic construct
  source 1..80: mol_type = other DNA
tatccaataatatgtgagaagcccacaaacatctggattgaaggaggaaactattaccctagcaggtttcagtcaggagt

SEQ ID NO: 146091 - DNA, 80 bp, synthetic construct
  source 1..80: mol_type = other DNA
aaacaacttagaacaaaatgtcactaatactgatatgtattcagttgtattaaataatgaaacaatattagaaaaagaga

SEQ ID NO: 146092 - DNA, 80 bp, synthetic construct
  source 1..80: mol_type = other DNA
aacccatacatggacaagggcaaaggcaaccacgtgtggctagactggataagcaaagctgactctaacctagaggaaaa

SEQ ID NO: 146093 - DNA, 80 bp, synthetic construct
  source 1..80: mol_type = other DNA
agcctggtcaacctgctgactatcatcggttgcctctgggtgttgcgtgttacgcggccgcccgtgtccgtgatgatttt

SEQ ID NO: 146094 - DNA, 80 bp, synthetic construct
  source 1..80: mol_type = other DNA
gccgccagcgcccccgtggcctttggcacgggcctggcacccaccgctttaattgtgggagtgtgcagggcagctgcatc

SEQ ID NO: 146095 - DNA, 80 bp, synthetic construct
  source 1..80: mol_type = other DNA
gggatcttatggaggtggacacagtacaatgagattctcccttagaattttatttgaggagcaccaaaaacaccacaatt

SEQ ID NO: 146096 - DNA, 80 bp, synthetic construct
  source 1..80: mol_type = other DNA
cgacgccggataacgaggcagcggtctttgggccagaccagggccacgcgttgcccgggtttccacggtcgcgacgtctt

SEQ ID NO: 146097 - DNA, 80 bp, synthetic construct
  source 1..80: mol_type = other DNA
cagaaagcctgttggaggccaaagaaggatgtcaaaaaattttatcggtgttagctccattagttccaacaggttcagaa

SEQ ID NO: 146098 - DNA, 80 bp, synthetic construct
  source 1..80: mol_type = other DNA
caccattatgacagtggaaaatttcaatgccattgagacaactgataagaagaagctgtttgccacatggaacatcacct

SEQ ID NO: 146099 - DNA, 80 bp, synthetic construct
  source 1..80: mol_type = other DNA
aaaccttcaataaaagcatttcgcaactcttcatctgtgcatggtaaattatcagacccatgattgtcatctccgaaaca

SEQ ID NO: 146100 - DNA, 80 bp, synthetic construct
  source 1..80: mol_type = other DNA
cccgcgggcgtggacccgggtgccttcttggcgatggacgctcacacctaccacccccacccacacccccctccggccta

SEQ ID NO: 146101 - DNA, 80 bp, synthetic construct
  source 1..80: mol_type = other DNA
aacaacttttagaactggaaacaacacaatatatggccaaccaagctacagacctgacaatgacaaacttactaaaataa

SEQ ID NO: 146102 - DNA, 80 bp, synthetic construct
  source 1..80: mol_type = other DNA
cttatggcagtgtttactgttctgcttttactcttggaccaggctgtcattctaacacaataacaggggaagcaaggccc

SEQ ID NO: 146103 - DNA, 80 bp, synthetic construct
  source 1..80: mol_type = other DNA
caactttttattcagcttatcatcggtatctactcaaagcagaccaagtacgacgcgtgtgtcatcaaggttagtcgtaa

SEQ ID NO: 146104 - DNA, 80 bp, synthetic construct
  source 1..80: mol_type = other DNA
agtacaactggcccatgtcgtttaatgtgttgtatccatacgggccctgttgattaaaatgggaccacccatcatagaaa

SEQ ID NO: 146105 - DNA, 80 bp, synthetic construct
  source 1..80: mol_type = other DNA
tggagagatgctccggggcgcatgtgttctccaggggcagctcccaacccctctgcaccgtgaagctgcgccacggacag

SEQ ID NO: 146106 - DNA, 80 bp, synthetic construct
  source 1..80: mol_type = other DNA
ctaatgtcacagacacttacaacaacaaaatatttaatagccaaaacgcaacacttgtatcatggctatcaggaaaaggc

SEQ ID NO: 146107 - DNA, 80 bp, synthetic construct
  source 1..80: mol_type = other DNA
atgtgcttaattgcttaggtagtcttatcttgatattaggtactatctatgtcttatataaattaatgtgtttcactcaa

SEQ ID NO: 146108 - DNA, 80 bp, synthetic construct
  source 1..80: mol_type = other DNA
tagaagtatggaatggatgtcaatgaataacataaaagaaaaatatatatcagttcatagacaccactgtgtttatgctt

SEQ ID NO: 146109 - DNA, 80 bp, synthetic construct
  source 1..80: mol_type = other DNA
ccaccagaccaaatgaaagaagcaaacaaagcatactatttagcagctaaagtaaatttacctaactggaatacaccata

SEQ ID NO: 146110 - DNA, 80 bp, synthetic construct
  source 1..80: mol_type = other DNA
tggatttactccactcaactctttcgcttacaaactcattacaacaactctgttgattgaaacaacaatactacaatggg

SEQ ID NO: 146111 - DNA, 80 bp, synthetic construct
  source 1..80: mol_type = other DNA
attctctcaatcctgtccacatttgacatacttccttaaatctttatacagaacaccttaacacaatgggagctcaagtg

SEQ ID NO: 146112 - DNA, 80 bp, synthetic construct
  source 1..80: mol_type = other DNA
acaactgtacaaccccacggtaccaaactatggatacgtaccatttgcagatcagttcggggcgggtcagatgccagacg

SEQ ID NO: 146113 - DNA, 80 bp, synthetic construct
  source 1..80: mol_type = other DNA
acaaaccacagaccctgggtgccttggaaattggggcaacagctgaaataggaccagagacattgattgaaacgagatat

SEQ ID NO: 146114 - DNA, 80 bp, synthetic construct
  source 1..80: mol_type = other DNA
gtcaaaaacccctgcaaagacacaggagtggctcccccgaccggtagactccgcagggacgtacaagttgttaacccact

SEQ ID NO: 146115 - DNA, 80 bp, synthetic construct
  source 1..80: mol_type = other DNA
ccaaaagaatatgacacactatgaaactgccttattttctaaagtggcttactataacacctttgaaactatagcacagc

SEQ ID NO: 146116 - DNA, 80 bp, synthetic construct
  source 1..80: mol_type = other DNA
accattcatgtgcagtgcaacgccacaaagttccacagtggtactctgttagttgtcattatcccagaacaccaattggc

SEQ ID NO: 146117 - DNA, 80 bp, synthetic construct
  source 1..80: mol_type = other DNA
gcgcgctctctacccaccattcggacgctgacattagcgcgtccaggcgcgcgttgccccaaaccaccgcctcggtcacc

SEQ ID NO: 146118 - DNA, 80 bp, synthetic construct
  source 1..80: mol_type = other DNA
gggtggcaaaattgtgacgcacaatctcttgttgctgtgtccaaccactcactttatgacgtcccttttctggaccttgc

SEQ ID NO: 146119 - DNA, 80 bp, synthetic construct
  source 1..80: mol_type = other DNA
gagcctcacgaagggagaagcagcacatgagtttgcatcgaccaagacaacaggtgaacacgcggtgcaatcgatagtgt

SEQ ID NO: 146120 - DNA, 80 bp, synthetic construct
  source 1..80: mol_type = other DNA
caggcccaaaattccctcgatgggtaccacccaccaacgcaaacctcacgcaaagagaagactcgagttcagaggagaca

SEQ ID NO: 146121 - DNA, 80 bp, synthetic construct
  source 1..80: mol_type = other DNA
gtccccataaccaccactaaacccacaaaagactggtgggagtacagagtaggcctattcagtcccatctttctctcacc

SEQ ID NO: 146122 - DNA, 80 bp, synthetic construct
  source 1..80: mol_type = other DNA
gagagtggccacagtacctaagtgatctggacgccagtgcagttgataaacctactcatccagaaacatcaactgatcgt

SEQ ID NO: 146123 - DNA, 80 bp, synthetic construct
  source 1..80: mol_type = other DNA
accaaaagaaggtgatattaaaactcatattagatatagaaatactgtcacagatctaacatatcctaaagaactggcaa

SEQ ID NO: 146124 - DNA, 80 bp, synthetic construct
  source 1..80: mol_type = other DNA
agttcaatggtaaataccaaaaaatttacaacagcttccacacccactaccacaaatggctcagccccatactacacatt

SEQ ID NO: 146125 - DNA, 80 bp, synthetic construct
  source 1..80: mol_type = other DNA
tcagacgttgcaggatatcggaggtcctgccaatgatactgtgcggtgcgggcagggccgggtttaactatggactgcac

SEQ ID NO: 146126 - DNA, 80 bp, synthetic construct
  source 1..80: mol_type = other DNA
tctaggagtgagtccaccattgaaagtttctttggacgctcagcgtgcattaccataatgtcagtggagaacttcaatgc

SEQ ID NO: 146127 - DNA, 80 bp, synthetic construct
  source 1..80: mol_type = other DNA
cggtccctcgagtccccgtcctcaacgtaacccttgttcccaacgtcgtccccgctgcaaaagccctccgtccccgccgc

SEQ ID NO: 146128 - DNA, 80 bp, synthetic construct
  source 1..80: mol_type = other DNA
gtctacggacgtagtactcttgtatttcggtacacttgtacgccagtttgcttccctccccaaatgtaacaatagaagcc

SEQ ID NO: 146129 - DNA, 80 bp, synthetic construct
  source 1..80: mol_type = other DNA
aactcaatgagttaagacgatactactttgaatgggagactaagcatacaaatgtggcggtcccacctacctggaccacc

SEQ ID NO: 146130 - DNA, 80 bp, synthetic construct
  source 1..80: mol_type = other DNA
tggcaatagacatgtcacatttaataaaagataaggggggactggaagggatgtattatagtgaaagaagacatagaatc

SEQ ID NO: 146131 - DNA, 80 bp, synthetic construct
  source 1..80: mol_type = other DNA
tgctgccgaacgtcagcatggagatggtctccgtgtctaacagttgcggccgttctacgccggccgcgtgccggatccag

SEQ ID NO: 146132 - DNA, 80 bp, synthetic construct
  source 1..80: mol_type = other DNA
tggtaattggtttgacttcacctcctgggtaggatacatcaagataggactatatgtagtagtaggattaatagtgttaa

SEQ ID NO: 146133 - DNA, 80 bp, synthetic construct
  source 1..80: mol_type = other DNA
agatgtatatgaatcaatcagatggacaaaagacccgaagaacacccaggatcacgtccggtctctgtgtttgctggcat

SEQ ID NO: 146134 - DNA, 80 bp, synthetic construct
  source 1..80: mol_type = other DNA
tactcacaagtaagaactaaatggctatcagtagcacaggacggatacaatttagtaaaagcagaatataaagaagtata

SEQ ID NO: 146135 - DNA, 80 bp, synthetic construct
  source 1..80: mol_type = other DNA
cagacgttacatacaacccactaaatgacaaaggtaaaggcaatgaaatttgggtacaatatgtaacaaaaccagacact

SEQ ID NO: 146136 - DNA, 80 bp, synthetic construct
  source 1..80: mol_type = other DNA
ttactatgggatgcctgaatacaaaggttctttctaaagtaatcaaaattgtctctgccttagtgattatatgtagaaat

SEQ ID NO: 146137 - DNA, 80 bp, synthetic construct
  source 1..80: mol_type = other DNA
cagatgctgacgatagcgcggcgacacgttttcgggcgagtcgaagaagagcacggcgtccgtctgatcgtaggtgtgaa

SEQ ID NO: 146138 - DNA, 80 bp, synthetic construct
  source 1..80: mol_type = other DNA
aaactcctcctcggagacgtcctgaaactccgccgagggctacacatagaccccctgcttacatagcacccccaccatac

SEQ ID NO: 146139 - DNA, 80 bp, synthetic construct
  source 1..80: mol_type = other DNA
ataaggaggcaaatatactagggaaaacataagaataggaagaaaccgaggtttgggagaaaagctgagataaaatagcg

SEQ ID NO: 146140 - DNA, 80 bp, synthetic construct
  source 1..80: mol_type = other DNA
cgcatgttgctgtggctgcggtaattttgttaatcatattaatgtactggctaatcggtatggctttactggctccgcgc

SEQ ID NO: 146141 - DNA, 80 bp, synthetic construct
  source 1..80: mol_type = other DNA
atgcaaggaatgttaactttgatgtgcaaggggtaaccgagtcccgggataaaattacccttgaccggtcaacccataat

SEQ ID NO: 146142 - DNA, 80 bp, synthetic construct
  source 1..80: mol_type = other DNA
cagatgaggctggacgtgccccaccagtgatggtggtccagcctgcgtggctgcctactcaccctaacagggtgagaagc

SEQ ID NO: 146143 - DNA, 80 bp, synthetic construct
  source 1..80: mol_type = other DNA
acacaaaatggcggcggagcacttccggcttgcccaaaatggtagtcaaaaacatccgggtcaaaggttaccgctacgtc

SEQ ID NO: 146144 - DNA, 80 bp, synthetic construct
  source 1..80: mol_type = other DNA
tgaattggctcaaccctactgtactaaccgaactagataacggtgcagtaggggtaaattctccgcattcggtgcggagg

SEQ ID NO: 146145 - DNA, 80 bp, synthetic construct
  source 1..80: mol_type = other DNA
cagaaatggggagttccatacctgggcaagccttcacgtcagacaaaatagcgaaaggtgagacagcactcacgttcacg

SEQ ID NO: 146146 - DNA, 80 bp, synthetic construct
  source 1..80: mol_type = other DNA
gactatgcaaatcaaagcacattttcaaaaatacatattatgaagttgagggagggataccatcaggttgctctgggacg

SEQ ID NO: 146147 - DNA, 80 bp, synthetic construct
  source 1..80: mol_type = other DNA
cagccacaggcattaataaagacgactactttaccacacctgacggactgtggggagaccctatatacagcaaaaacaat

SEQ ID NO: 146148 - DNA, 80 bp, synthetic construct
  source 1..80: mol_type = other DNA
acggtgtgatcggcataattacagcaggtggacctggagtggtggcctttgccgacatcagggacctctgggtgtatgag

SEQ ID NO: 146149 - DNA, 80 bp, synthetic construct
  source 1..80: mol_type = other DNA
gtaaggaaacaaaatagcgttactgtggccaccatggcataaatgactgaacgatgactaaaatggaagcctgacgccgt

SEQ ID NO: 146150 - DNA, 80 bp, synthetic construct
  source 1..80: mol_type = other DNA
cagcctcccatgtataacaaatcaaagccaacacagggctatgtattctatgacactaactttggaaacggcaaaatgcc

SEQ ID NO: 146151 - DNA, 80 bp, synthetic construct
  source 1..80: mol_type = other DNA
gtaaaggagttaagtttaaaagaggccttatatggagttgatggacttgaacccctagacataacaaccagtgcaggtta

SEQ ID NO: 146152 - DNA, 80 bp, synthetic construct
  source 1..80: mol_type = other DNA
tctatcgctgtgctagggctcttggcctttcccccactccccaatctgctgctcaagccgccggtggacgccagggtgtt

SEQ ID NO: 146153 - DNA, 80 bp, synthetic construct
  source 1..80: mol_type = other DNA
gtgtcctcccttcatcagtgtggggaacgcatacagctgcttttacgacgggtggtcgcacttcacgcaaagtggagtgt

SEQ ID NO: 146154 - DNA, 80 bp, synthetic construct
  source 1..80: mol_type = other DNA
aaaattgtgtggccaagataatgctaaagagttctcaaaagagggacccactgtgtcagaaggcgcgaccgatgtccaaa

SEQ ID NO: 146155 - DNA, 80 bp, synthetic construct
  source 1..80: mol_type = other DNA
acaaaagaagaaggaaattcttgacaaatgcaaaaagatctcccttttggaggaacaggtgaatggctttagctctgctg

SEQ ID NO: 146156 - DNA, 80 bp, synthetic construct
  source 1..80: mol_type = other DNA
gccagacttcgccatagggcctttatcttcttgccatttgtcagtggagaggggtcgccataacgcggaccccgttttta

SEQ ID NO: 146157 - DNA, 80 bp, synthetic construct
  source 1..80: mol_type = other DNA
tggtttactaactgctggtggagaaggacatgtggcttttattgatctcagggattttcatgttgcagatacacaaggaa

SEQ ID NO: 146158 - DNA, 80 bp, synthetic construct
  source 1..80: mol_type = other DNA
atggtgccaaacacatcttgaaagtagacatctacagattccaggcttacttgttgctcctctccggtggtgatgttaat

SEQ ID NO: 146159 - DNA, 80 bp, synthetic construct
  source 1..80: mol_type = other DNA
atttttcagcgagacttctacgtgattccccctttgtgcgacagcttgagacagcgtggaaacaaggtgtagaggacaag

SEQ ID NO: 146160 - DNA, 80 bp, synthetic construct
  source 1..80: mol_type = other DNA
tagtggaattatgtcaagtggatactttgataccaattaataacacagaagctaatatcagaaacaaaaacatgtacact

SEQ ID NO: 146161 - DNA, 80 bp, synthetic construct
  source 1..80: mol_type = other DNA
gaggcggtgccagatgccaacgtcataatcacaaggtgatttgttacgtcacgcgcgcgcacgcacgcgcgcgcggtaga

SEQ ID NO: 146162 - DNA, 80 bp, synthetic construct
  source 1..80: mol_type = other DNA
aaaaagaaggacttgataaataagaccacaaaggatgtcaccaaaatgcaggaaatgatggataaatatggcatagactt

SEQ ID NO: 146163 - DNA, 80 bp, synthetic construct
  source 1..80: mol_type = other DNA
tacccaccaaacgtcttataatatactacaagacaaattatacagtacttgtacatactatgaaacagtacaagtactgg

SEQ ID NO: 146164 - DNA, 80 bp, synthetic construct
  source 1..80: mol_type = other DNA
ctatagatatgttagtaactgatatcatcaaggagtatagaatcagaaacagtacacaagataaactggaggctctgttc

SEQ ID NO: 146165 - DNA, 80 bp, synthetic construct
  source 1..80: mol_type = other DNA
acattcgtgataacgagttgtcaggaacaaggaacccaactgtcgcaggatatgcctgtactaacccatcagatcatgta

SEQ ID NO: 146166 - DNA, 80 bp, synthetic construct
  source 1..80: mol_type = other DNA
gtgagataccacgcttgtggaccttatgctcacacagccatcctctagtaagtttatgagagcccctttcccagccctga

SEQ ID NO: 146167 - DNA, 80 bp, synthetic construct
  source 1..80: mol_type = other DNA
gtgtattttccgggaatgcaaagggaaagaccaattacaccagttatgtaaatgcaaatccaggtgaaacaggtggtgtt

SEQ ID NO: 146168 - DNA, 80 bp, synthetic construct
  source 1..80: mol_type = other DNA
aaatttgttgagggcatacgcagtaccagtgttggtaaggctcttatcattccatcatactcagttctcagacgtaggcg

SEQ ID NO: 146169 - DNA, 80 bp, synthetic construct
  source 1..80: mol_type = other DNA
ccggcacccttgtatacgcttcacccgaggcgaaaaacgaggtcgtcgttatccgcaaagtgcctacgaaaagcctagta

SEQ ID NO: 146170 - DNA, 80 bp, synthetic construct
  source 1..80: mol_type = other DNA
tattttacaggcccaccaaagcgcccgcgattcgaggtacccgccattgcaaacgcaggctcagatttacaccctaccaa

SEQ ID NO: 146171 - DNA, 80 bp, synthetic construct
  source 1..80: mol_type = other DNA
tagcggcggcccgctcgctcgggaggcgatgggggcgcgccgatgacgacaggctcgcgggtcgttaaatactacgatgg

SEQ ID NO: 146172 - DNA, 80 bp, synthetic construct
  source 1..80: mol_type = other DNA
cagagaaacaaaccctacaaggaggtgacagaagacttgctgcacctcagctctctctttggagacgaccagtagtcact

SEQ ID NO: 146173 - DNA, 80 bp, synthetic construct
  source 1..80: mol_type = other DNA
gcatcttcagatctacaattcgagttttgatatgatgatattgatggatcaaaccttctaaacgagcttgatcagagcat

SEQ ID NO: 146174 - DNA, 80 bp, synthetic construct
  source 1..80: mol_type = other DNA
aggtggcaagcatccacagaagagaaagcccaagaagcgacagtactcctcctcaagcgaagactccgagagcagcgaaa

SEQ ID NO: 146175 - DNA, 80 bp, synthetic construct
  source 1..80: mol_type = other DNA
ctccgtgaggatgttgaaagacacgcctttcataaagcaggacagttttttccaaggaccacccggtgaagccgttgaac

SEQ ID NO: 146176 - DNA, 80 bp, synthetic construct
  source 1..80: mol_type = other DNA
agattccaagtcaacaacgaactatggcaaggtgtcaaagcctgtgtcaagtccaaatttagggaaatttttggtgtaaa

SEQ ID NO: 146177 - DNA, 80 bp, synthetic construct
  source 1..80: mol_type = other DNA
ccaggagcggctttctacggggcaacctccattaatgatttcggtatcctagcagtgagagtggtgaatgagcacaatcc

SEQ ID NO: 146178 - DNA, 80 bp, synthetic construct
  source 1..80: mol_type = other DNA
tacacagtcttgggtggcatgccatcaggaacatctgggacctcaatatttaacaccatgattaacaatataattattag

SEQ ID NO: 146179 - DNA, 80 bp, synthetic construct
  source 1..80: mol_type = other DNA
ggcgatgagcaagttggaagcggtgtagtgacgttttcatttgcatttatcatagtagtagtgttggttgataatgatat

SEQ ID NO: 146180 - DNA, 80 bp, synthetic construct
  source 1..80: mol_type = other DNA
cagaagacataactcccagaggagctgcctatggaggcaacttaacacacataacatggtgtttagaagccatataccaa

SEQ ID NO: 146181 - DNA, 80 bp, synthetic construct
  source 1..80: mol_type = other DNA
taccaatatttcacctaccagtagagagagaaacttgggaatcatggtggacagactattggcaagtcacgtggatacct

SEQ ID NO: 146182 - DNA, 80 bp, synthetic construct
  source 1..80: mol_type = other DNA
tgtgacatccaaattccgcaacagtgctggattgttagatgtggcaaaagctttgcaaccgtgtacacaatgtcccaaac

SEQ ID NO: 146183 - DNA, 80 bp, synthetic construct
  source 1..80: mol_type = other DNA
taatggccaccctaagtttgttaggatgtgactcttcaccatggcagtggcttaaacagaaagtgtgtaatatgttggag

SEQ ID NO: 146184 - DNA, 80 bp, synthetic construct
  source 1..80: mol_type = other DNA
agccatattcacatccatgttcctcaaatggctcgagggcctgtcgcagctcgtctctggcctcaagctcctgctcacgg

SEQ ID NO: 146185 - DNA, 80 bp, synthetic construct
  source 1..80: mol_type = other DNA
tgactactatagcagacgaactattaagagaatgtcagaacaacaagaaacttctgagtttttattctcaggcccgaaaa

SEQ ID NO: 146186 - DNA, 80 bp, synthetic construct
  source 1..80: mol_type = other DNA
attcttcttgctgcggttgtggcgatcctgtacgccactttacttatcttgctgaaaggtatggtctcgcccccggcccg

SEQ ID NO: 146187 - DNA, 80 bp, synthetic construct
  source 1..80: mol_type = other DNA
ttgatagagcagctgcgggcacgggccacggacaaagcggaggcgttaaataccgtgagccaattggagatcggcgcggt

SEQ ID NO: 146188 - DNA, 80 bp, synthetic construct
  source 1..80: mol_type = other DNA
cctcacaataccaaggaaacacacacttactagactactacctgggcttttacagccccatattcctctcagatggcagg

SEQ ID NO: 146189 - DNA, 80 bp, synthetic construct
  source 1..80: mol_type = other DNA
ctcaccggagaaggggttaacaaacccgtggggggtcttagtggaagtgacgtgctgtgaatacaggtccatagcaccgc

SEQ ID NO: 146190 - DNA, 80 bp, synthetic construct
  source 1..80: mol_type = other DNA
gtgagcgcggcgctctgccgctgcgtgccacggtctttgggtggcgagaccgggctgcggagtttttgcgggccgtgagc

SEQ ID NO: 146191 - DNA, 80 bp, synthetic construct
  source 1..80: mol_type = other DNA
ccttgtacagagagcaaaatgttgactttttatttaaatataatagaagacagccattttcagacagccaacttacagga

SEQ ID NO: 146192 - DNA, 80 bp, synthetic construct
  source 1..80: mol_type = other DNA
tgcccgtcatctgggcgggcatgggctccgggggcaaaaactacgccgtccgctcggacgactacacccagtcttccttc

SEQ ID NO: 146193 - DNA, 80 bp, synthetic construct
  source 1..80: mol_type = other DNA
agagatgatataaaaaacttgggtcccagtgatctgtttgtccacaccaaggaagctatttaccgcaatgcacacctgac

SEQ ID NO: 146194 - DNA, 80 bp, synthetic construct
  source 1..80: mol_type = other DNA
gtgtgagcactaccctagtttcgtgaaactcaacggggtgcagcgctggacacctgttcggagacctatgggcgaggttg

SEQ ID NO: 146195 - DNA, 80 bp, synthetic construct
  source 1..80: mol_type = other DNA
ggatcacactcaagcgagggtgccatatttgccttccaactcgacccgggcagtggatcagttctcaaacgcacactatt

SEQ ID NO: 146196 - DNA, 80 bp, synthetic construct
  source 1..80: mol_type = other DNA
tctgctgcgtcatatgcggaggtaggccccgctacgtcacagtcacgtgggtgctgcgtcacagccgccattttagttca

SEQ ID NO: 146197 - DNA, 80 bp, synthetic construct
  source 1..80: mol_type = other DNA
acagagacgaatataaaaatgtacagctaactctctactacaactttatttttaactgggggggcgacatgtattaccca

SEQ ID NO: 146198 - DNA, 80 bp, synthetic construct
  source 1..80: mol_type = other DNA
tgcctctggggccaaaagccaaggtttgacagaccctctaggattggttcatacctgaactgttatggaagatacttagt

SEQ ID NO: 146199 - DNA, 80 bp, synthetic construct
  source 1..80: mol_type = other DNA
gcacgttctggttctacagagacaaaaagactgactttatagtgcagtacgatgtgagcgccccctttaaactggacaaa

SEQ ID NO: 146200 - DNA, 80 bp, synthetic construct
  source 1..80: mol_type = other DNA
ttaattaattatgattggcttgaccctaccgcataaaccgaacttgacaaaagtgcggtaggggtaaattatccgcattc

SEQ ID NO: 146201 - DNA, 80 bp, synthetic construct
  source 1..80: mol_type = other DNA
gaacttctttcgccaggccgaaaaagatacaggcgagacacagaggctctgctccccagccaagaagagcagcaaaaaga

SEQ ID NO: 146202 - DNA, 80 bp, synthetic construct
  source 1..80: mol_type = other DNA
aaaacaatgccaacgagtccatcttttcaatctccctaagtcctgcagcagataacagattatctcacacgatgctaggt

SEQ ID NO: 146203 - DNA, 80 bp, synthetic construct
  source 1..80: mol_type = other DNA
cgtggtcagtcgcagaagcagcaccgtcacgggggcagcggcggacacaacaaacgccgtaaggaagccgcggcggcgtc

SEQ ID NO: 146204 - DNA, 80 bp, synthetic construct
  source 1..80: mol_type = other DNA
cccaggtcagcagacaaaacaatggtacacatgagaatggtgtaacagctagcaatggatcagttattaagtatttcaac

SEQ ID NO: 146205 - DNA, 80 bp, synthetic construct
  source 1..80: mol_type = other DNA
cgggggcacaaggatcagagatggttccccattgcaattgcacttctggagtttactactctcagtattacagaaaatac

SEQ ID NO: 146206 - DNA, 80 bp, synthetic construct
  source 1..80: mol_type = other DNA
tgctactgctggctgtgcgagctccaccggcggcaccttccatgagtctgtggcgaccccccgcgcaccatgtacccggc

SEQ ID NO: 146207 - DNA, 80 bp, synthetic construct
  source 1..80: mol_type = other DNA
atgatccttcatgtttagttgacacgttacaaaatcccaaactgctgtgagtacagttacagatgcctgtcaaacccgaa

SEQ ID NO: 146208 - DNA, 80 bp, synthetic construct
  source 1..80: mol_type = other DNA
agtcaagaaagattatcttatagatgggaaattggatatagccaaaagctttaaaccatgtgatgtcaataataaaatag

SEQ ID NO: 146209 - DNA, 80 bp, synthetic construct
  source 1..80: mol_type = other DNA
agaaacatggacagtcaatgacatccaaaaactagtgggaatcttaaattgggcggcacaaatctatccaggaataaaaa

SEQ ID NO: 146210 - DNA, 80 bp, synthetic construct
  source 1..80: mol_type = other DNA
aaccacctctactgaattgataccagatactcatattgaaattagggaaaacatcagatatgtcaagacagttggtccat

SEQ ID NO: 146211 - DNA, 80 bp, synthetic construct
  source 1..80: mol_type = other DNA
gccggcccctcgagattctgaccggggacctctggttgctctgttgcttcggggagctcttggagacctcggtgctctag

SEQ ID NO: 146212 - DNA, 80 bp, synthetic construct
  source 1..80: mol_type = other DNA
tggtctgactcctaccactcctattggtacctcccctactgttgccggcaattcaattattgccaccacgcccacctcgt

SEQ ID NO: 146213 - DNA, 80 bp, synthetic construct
  source 1..80: mol_type = other DNA
tctcccgttccgggttggtgggagtggtcaatctcaccgacgggggtactgacaccacaggttatgccacttgggatata

SEQ ID NO: 146214 - DNA, 80 bp, synthetic construct
  source 1..80: mol_type = other DNA
gcggcgggtgtttctacggtgtttgtgcggcgtttccacgcagcttttgcgcggcgcttcgctgggcgccggcggtacgg

SEQ ID NO: 146215 - DNA, 80 bp, synthetic construct
  source 1..80: mol_type = other DNA
cggtgcttcagatgatccgcgtgcgacaccaggacacaaccaccacagacacaaacacgaccacagagccaggactttta

SEQ ID NO: 146216 - DNA, 80 bp, synthetic construct
  source 1..80: mol_type = other DNA
aagccattctgctcaaagaactctcgtgcatcaagaacatgcgcgacgtgtgcatcgattacggtctgcaccgcgttttc

SEQ ID NO: 146217 - DNA, 80 bp, synthetic construct
  source 1..80: mol_type = other DNA
gtgacactacacacatagaacaaaaggcaatcacacagggtttagggcaaatgttagagagtatgattgacaacacagtc

SEQ ID NO: 146218 - DNA, 80 bp, synthetic construct
  source 1..80: mol_type = other DNA
cgcccacccagattgtgtgagtacacacacaaggacaatgtagactttgaacccaagggcgttacaacgtcccgaaccca

SEQ ID NO: 146219 - DNA, 80 bp, synthetic construct
  source 1..80: mol_type = other DNA
tctgtgggctaacgtgaacatgtcagatggttatgcatcatggtcaattacttaccaaggaaatgcacagataaggaaga

SEQ ID NO: 146220 - DNA, 80 bp, synthetic construct
  source 1..80: mol_type = other DNA
cacatatgccacaaacaaagcaacaggtactagtccacaaaacaaaataccacccgatcaaatgaaagaagcaaacttag

SEQ ID NO: 146221 - DNA, 80 bp, synthetic construct
  source 1..80: mol_type = other DNA
ccaacccaaacaaaggctacgtgttctatgacaccacctttggcaacggaaagatgccagacgggtcaggccacattccc

SEQ ID NO: 146222 - DNA, 80 bp, synthetic construct
  source 1..80: mol_type = other DNA
gcgaatgcctcatttagccagtacgagtaccactgcgggtggttctcttccatgtttatctccccacacagataccaact

SEQ ID NO: 146223 - DNA, 80 bp, synthetic construct
  source 1..80: mol_type = other DNA
ggatatcaatgctgcctccacattggaattcaccattccctttatttcccagtcctattggaagacagtggacatcaaca

SEQ ID NO: 146224 - DNA, 80 bp, synthetic construct
  source 1..80: mol_type = other DNA
acctagtaagacaaaactacaacctagtgtttttcatgatatttttcccggggaaaaagcacctgtagtactatcaccaa

SEQ ID NO: 146225 - DNA, 80 bp, synthetic construct
  source 1..80: mol_type = other DNA
ttgaaactcatgggtggacaccatcttgggccaggaggcaccagatcacacatgtggaattgcccaaagtattttgggac

SEQ ID NO: 146226 - DNA, 80 bp, synthetic construct
  source 1..80: mol_type = other DNA
ttttcaagagcaggtctagtgggggtgatcaatgtgcaaggtggtggcacacagaagggatttgaggtgtgggatgtaga

SEQ ID NO: 146227 - DNA, 80 bp, synthetic construct
  source 1..80: mol_type = other DNA
caagagacgctgttcaacaacattcgctggttggccataaaggcgaggaagtttgctcccttatacgccagcgaggcacg

SEQ ID NO: 146228 - DNA, 80 bp, synthetic construct
  source 1..80: mol_type = other DNA
ttgacacggtgatcagcaacgctttgcagctatcccagcctaaaccaaacaagcaactcacagcacagtccacaccatcc

SEQ ID NO: 146229 - DNA, 80 bp, synthetic construct
  source 1..80: mol_type = other DNA
aacacatacaacgacaacatatcaaagttagcagagataacaagacagaggtttaaaagcgcaacaatatcagcactacc

SEQ ID NO: 146230 - DNA, 80 bp, synthetic construct
  source 1..80: mol_type = other DNA
ccacgacggccgcactgaacgtgcccggggcggcgggtcgggaccgagacctggtgtaccggatcgccaaccagatcttt

SEQ ID NO: 146231 - DNA, 80 bp, synthetic construct
  source 1..80: mol_type = other DNA
agagtacctatgactgggaaaattacagcacagaacaaaactacaaaaacacaaaagctaaatgggatgaagccaaatca

SEQ ID NO: 146232 - DNA, 80 bp, synthetic construct
  source 1..80: mol_type = other DNA
ggggaggacgtgccccccttctcatctcaccagtggaacctgcgcgtaggtttagccgcactcgaggccctgatgctcgt

SEQ ID NO: 146233 - DNA, 80 bp, synthetic construct
  source 1..80: mol_type = other DNA
ccacacggtttcgtaacgtcctagcagaagcaccagacgggcctggctaggtggctcaatttcctctacatacacgaaaa

SEQ ID NO: 146234 - DNA, 80 bp, synthetic construct
  source 1..80: mol_type = other DNA
gcaaggcgatgttgaagaggcaattgatagagctgttgctagagttgctgacacgatgccaacagggccgcgtaacactg

SEQ ID NO: 146235 - DNA, 80 bp, synthetic construct
  source 1..80: mol_type = other DNA
ctcctagggaaggactgttgtcctgcaactctacagtaaccagcataattgctaacattgactttagagatcacaaccag

SEQ ID NO: 146236 - DNA, 80 bp, synthetic construct
  source 1..80: mol_type = other DNA
atgatggaaatagcagaagtagactcagtggtgcctattaacaatgttgcagacaagatccagtcggtggaagcattctg

SEQ ID NO: 146237 - DNA, 80 bp, synthetic construct
  source 1..80: mol_type = other DNA
tccggcggagcgtcctcagacaaaactggcacagttgtctcatcaggcaaccgcgttggctcccgcttcaccaaatggtg

SEQ ID NO: 146238 - DNA, 80 bp, synthetic construct
  source 1..80: mol_type = other DNA
aaatggaagcatatccaataccattgcaagcttcaaaaccaaatgcctcagaatccattttctccatttcacttagtccg

SEQ ID NO: 146239 - DNA, 80 bp, synthetic construct
  source 1..80: mol_type = other DNA
ggagtgagtggtgcctactcacatttctacgacgggtttgccattgttcctcacacggcaattgatgctggcgcatttaa

SEQ ID NO: 146240 - DNA, 80 bp, synthetic construct
  source 1..80: mol_type = other DNA
catagaatgccgcgttcacgatcgtcgttgcggtcatcctcgtcctcttcttttttcttctctttttccttttttttctc

SEQ ID NO: 146241 - DNA, 80 bp, synthetic construct
  source 1..80: mol_type = other DNA
gggtgctaaagcacccccccccccgcgcatgcgcggggcccccccccccgggtggctctgcccctcggcccgctccgtgc

SEQ ID NO: 146242 - DNA, 80 bp, synthetic construct
  source 1..80: mol_type = other DNA
actagtagaccccaacggggtaaatttagagatcaccatagttgagctagatagaaatgagaagttcagagatattagaa

SEQ ID NO: 146243 - DNA, 80 bp, synthetic construct
  source 1..80: mol_type = other DNA
gcaggagcacccgcttcgggtttaatacctacaatcctaaagcaaaacagactcagattgaaaaccttagacacgagatt

SEQ ID NO: 146244 - DNA, 80 bp, synthetic construct
  source 1..80: mol_type = other DNA
ataagcaaaggaccgtacgggggggtaggccgtgtcctgcttgcactttgaggacttgtgttgcgaggtgctggagctgg

SEQ ID NO: 146245 - DNA, 80 bp, synthetic construct
  source 1..80: mol_type = other DNA
agtaactcagcgctggcgtgtgacgtggtgtaaagttttgcctgaacctgtggttgggcaggtacatgccaacaaccttc

SEQ ID NO: 146246 - DNA, 80 bp, synthetic construct
  source 1..80: mol_type = other DNA
ctaagtaacaagaaattaataaaatcctcggccatgataagaacaaattattcaaaacaagatttatataatttatttcc

SEQ ID NO: 146247 - DNA, 80 bp, synthetic construct
  source 1..80: mol_type = other DNA
ccttagacattagtactgaaccaattcctcttgagagtgctatgtatgggatggaaggattagaagcccttgacctaacc

SEQ ID NO: 146248 - DNA, 80 bp, synthetic construct
  source 1..80: mol_type = other DNA
atcccagtcaccatcaacgccccattgcaaaaacaggttttcgggttgaggctacagcctgggctggatagtgtatttaa

SEQ ID NO: 146249 - DNA, 80 bp, synthetic construct
  source 1..80: mol_type = other DNA
tctaaagaaccaaatagagagaatcagagaacaggcaaatacaatggagaccatagtcctaatggcagctcactgcatga

SEQ ID NO: 146250 - DNA, 80 bp, synthetic construct
  source 1..80: mol_type = other DNA
cggccgcgggtgtccgcggacacgttagttatacacggaattgagtcacgtggcacgttgccagctgaaaccgccgtcgt

SEQ ID NO: 146251 - DNA, 80 bp, synthetic construct
  source 1..80: mol_type = other DNA
tggccgggcccgggcaaggctcttaaagcgaaaccatgttcctcggcaggccctaccgccacagaaagcggcaccaggcc

SEQ ID NO: 146252 - DNA, 80 bp, synthetic construct
  source 1..80: mol_type = other DNA
ttggacccagtgtggtttgatgcactcaagattgtattagatgaattaggctttgatggagagctaaccagaagacttaa

SEQ ID NO: 146253 - DNA, 80 bp, synthetic construct
  source 1..80: mol_type = other DNA
ccgtgtgtacttcaaacccaagcacattagagtctgggtgccacgaccaccacgcctatgcccctacatcaaatctagta

SEQ ID NO: 146254 - DNA, 80 bp, synthetic construct
  source 1..80: mol_type = other DNA
attttgaaagatcatcaacaaaagatagagagggcaattgaggaggctgataatttttgtgtccttcagattcaggatgt

SEQ ID NO: 146255 - DNA, 80 bp, synthetic construct
  source 1..80: mol_type = other DNA
ctttactgtgcagggcacaacccctaaccagaaaataaaggagtttactgattggttatatggttgtagtgtccactatc

SEQ ID NO: 146256 - DNA, 80 bp, synthetic construct
  source 1..80: mol_type = other DNA
gcaatatccgttcggctcaccactaactgacactgtggttgtgggtttccaggttctgcaatccatgtacaacgactgcc

SEQ ID NO: 146257 - DNA, 80 bp, synthetic construct
  source 1..80: mol_type = other DNA
caccatggtagcgccatggatatccagtactttcttccgcaggacaaaagctgacaaatattcatcaggtggcatcataa

SEQ ID NO: 146258 - DNA, 80 bp, synthetic construct
  source 1..80: mol_type = other DNA
atgcggcccgatccacttaagcaggtcggccaccacgccgaaatctagatccacgtgcacggccgaattctcgctttcgc

SEQ ID NO: 146259 - DNA, 80 bp, synthetic construct
  source 1..80: mol_type = other DNA
gttttttgtttcgcggaccggcgccggggacggggtgttgcggccactgccggtgcgttccactgtacttgtctgtgtcg

SEQ ID NO: 146260 - DNA, 80 bp, synthetic construct
  source 1..80: mol_type = other DNA
ctggcgtggtgtccccagccggaaatcagccaaagtgttacattatgtgttttgtgtcagcatgcaacgatttttcagtg

SEQ ID NO: 146261 - DNA, 80 bp, synthetic construct
  source 1..80: mol_type = other DNA
tggattcacccctttgacttcacgttcactgaatcttattaaagttgtgttgttgatacgctattatcatcacaatgggt

SEQ ID NO: 146262 - DNA, 80 bp, synthetic construct
  source 1..80: mol_type = other DNA
aatttatccatgctaataacgatggcatgaaatttttgctgactggggtacattaaaaaccggtatccgtcagatgatgt

SEQ ID NO: 146263 - DNA, 80 bp, synthetic construct
  source 1..80: mol_type = other DNA
ctttataacaccagctagatttaatgatcagtggcacagcccagtaacctacataagatacaaccccatgtctgacagag

SEQ ID NO: 146264 - DNA, 80 bp, synthetic construct
  source 1..80: mol_type = other DNA
gtttccaagtgtattctttcatgtgttccctggagagaaagaacctgccgccctcagccagaaagaccccagactggaga

SEQ ID NO: 146265 - DNA, 80 bp, synthetic construct
  source 1..80: mol_type = other DNA
agtgagggtctatttgaagcctaaacatgtgagagtgtggtgccccaggccaccaagagctgtggaatacaccgggccat

SEQ ID NO: 146266 - DNA, 80 bp, synthetic construct
  source 1..80: mol_type = other DNA
tggctcaggtagacactttgatacctatcaataatgcaaaagatgtagttggcttggatatgtacagaataccattgcat

SEQ ID NO: 146267 - DNA, 80 bp, synthetic construct
  source 1..80: mol_type = other DNA
gatcccacgctagttgctgtggctgcggcaattttgttaatcatattaatgtactggctgctcgctacggctttactggg

SEQ ID NO: 146268 - DNA, 80 bp, synthetic construct
  source 1..80: mol_type = other DNA
ataggcttcgggctcggttttaggccttccggactaccaaaatggcggattccgtgacgtcatggccgccattttgagta

SEQ ID NO: 146269 - DNA, 80 bp, synthetic construct
  source 1..80: mol_type = other DNA
taagaaaccatctcaaatgcaggagcacgtcttatcgttgtgtcacttaatgtggcataatggtagggacatatacaagc

SEQ ID NO: 146270 - DNA, 80 bp, synthetic construct
  source 1..80: mol_type = other DNA
cagaagattgtaatagatcagtattaaattatatactaatactaaaatttaggataggaatatctttcgaggacaggggc

SEQ ID NO: 146271 - DNA, 80 bp, synthetic construct
  source 1..80: mol_type = other DNA
cacagctcaaagtgaagtatcttagtgaacttaagaaattaggactccttgaaaaacaaatagaaaacctgcgtggcgct

SEQ ID NO: 146272 - DNA, 80 bp, synthetic construct
  source 1..80: mol_type = other DNA
agcgcaaccccccaccagccgtaaggaagccatgttgggcacacatgtcatttgggatcttggattgcaatcatcctgca

SEQ ID NO: 146273 - DNA, 80 bp, synthetic construct
  source 1..80: mol_type = other DNA
aaatgggagctgctaccaccgatcacgccatgaaccatacaaaactaagcaacatcggccaagccatggagttttgcgga

SEQ ID NO: 146274 - DNA, 80 bp, synthetic construct
  source 1..80: mol_type = other DNA
gccccgtgcatctcgggctacgcgcgccccccgggccccagtgctgtgatcgagcatctgaggtccctagtcccaaaggg

SEQ ID NO: 146275 - DNA, 80 bp, synthetic construct
  source 1..80: mol_type = other DNA
agaagagggatttaataaacaacaagaccaaagacataagtaaacttagagaggcaattgacaaatatggggttgacttg

SEQ ID NO: 146276 - DNA, 80 bp, synthetic construct
  source 1..80: mol_type = other DNA
gacgcagactaccgaagcgaagacctagacgacctgttcgccgctatcgaaggagatacacagtaaggaggcgccgcgct

SEQ ID NO: 146277 - DNA, 80 bp, synthetic construct
  source 1..80: mol_type = other DNA
tgacagctggaccaagtgacatgtatgtgcatgttggtaatctaatatatagaaatcttcaccttttcaattcagagatg

SEQ ID NO: 146278 - DNA, 80 bp, synthetic construct
  source 1..80: mol_type = other DNA
aattcgcgatgctataaaccagacccccgggggtggtgatgtagctatactttcttccctgtttgctttatggaatgccc

SEQ ID NO: 146279 - DNA, 80 bp, synthetic construct
  source 1..80: mol_type = other DNA
ggagccccaacatcagcttacattatcgcccttgctgctgctcagaagaactttacattgaggttgcccaaggacactgg

SEQ ID NO: 146280 - DNA, 80 bp, synthetic construct
  source 1..80: mol_type = other DNA
taccagcgccaaaacccacatcaagtcgcatgctacgaggtgatatggcacagctgactaaccaaagcccgtatgaccaa

SEQ ID NO: 146281 - DNA, 80 bp, synthetic construct
  source 1..80: mol_type = other DNA
tccagcagcagcgggtcatgggagtccaactcagaaacatctgcctccagctcgccagagtccaagcagggcacagccta

SEQ ID NO: 146282 - DNA, 80 bp, synthetic construct
  source 1..80: mol_type = other DNA
catgttatatgggatgttggtttgcaatcaacagtatcaatagtggtaccatgggtgagtgctagtcactatagaaatac

SEQ ID NO: 146283 - DNA, 80 bp, synthetic construct
  source 1..80: mol_type = other DNA
cccacaagaaacgcagacgctctcccagcagctccagcagcagctcaaggagcagcagctcatgggggtccaactccgag

SEQ ID NO: 146284 - DNA, 80 bp, synthetic construct
  source 1..80: mol_type = other DNA
taccaagaaaaaaataacagtgtaaacataacagcaaaatacaaattcagatggcattttggtggcaaccctgtgtttga

SEQ ID NO: 146285 - DNA, 80 bp, synthetic construct
  source 1..80: mol_type = other DNA
ttatgaacctgaacaaaaaagtaaagtaccctaaagaactcatagcattcaaaggaatacccatgcccgttaaacgaaaa

SEQ ID NO: 146286 - DNA, 80 bp, synthetic construct
  source 1..80: mol_type = other DNA
tgctaggtacccacatcatctgggacatcgggctacaatccagttgtgtactgtgcgttccgtggattagccaaacgcac

SEQ ID NO: 146287 - DNA, 80 bp, synthetic construct
  source 1..80: mol_type = other DNA
gctactaacgtgaccaaattcccaatgttctttgctgatgtgggtttaaccataccctatggtgagatcaacttgagtgg

SEQ ID NO: 146288 - DNA, 80 bp, synthetic construct
  source 1..80: mol_type = other DNA
tcattacatgctggtatcaaacaaaactggtagttcccccaaacacagcctccacagctgatatgctgtgctttgtttca

SEQ ID NO: 146289 - DNA, 80 bp, synthetic construct
  source 1..80: mol_type = other DNA
gctaaaagcgtcatggccacaatggggttgtctgccaggtcttccatcagggctttgggcgcagagacgtattcccgaag

SEQ ID NO: 146290 - DNA, 80 bp, synthetic construct
  source 1..80: mol_type = other DNA
cgcctttcatagaacaatctgcactattacaaggagatgtggtggaggcaattgataatgctgttgcacgggtggcagat

SEQ ID NO: 146291 - DNA, 80 bp, synthetic construct
  source 1..80: mol_type = other DNA
ccatgagccgctggcagccacccgtccataatgcccccggcattgagagacagtggtatgactccgtttggcgcagtcac

SEQ ID NO: 146292 - DNA, 80 bp, synthetic construct
  source 1..80: mol_type = other DNA
ggcagtttctatcaacaagtactgactgccagctttattcgcaaaattaatcacaacccagacggcagcacaccagtaca

SEQ ID NO: 146293 - DNA, 80 bp, synthetic construct
  source 1..80: mol_type = other DNA
tctataaagccatgtgtcaagctgacacccctctgtatagcaatgaggtgtaataaaacggagacagacaaatgggggtt

SEQ ID NO: 146294 - DNA, 80 bp, synthetic construct
  source 1..80: mol_type = other DNA
cgaggaggaagagacttcacagagcagcaggtacactctggggtctcaggcctcccagtctatccaggaggaggacgtga

SEQ ID NO: 146295 - DNA, 80 bp, synthetic construct
  source 1..80: mol_type = other DNA
ggcgccgcccgggggccagtctccgggtcaggtcgcggaccagggtcaacaggtggtcgtgggatggcgtggccttgtct

SEQ ID NO: 146296 - DNA, 80 bp, synthetic construct
  source 1..80: mol_type = other DNA
agtttcttaccacagatgatagacaatcaccttcagcattaccgaactatgaagtgactccattgatacatattccaggg

SEQ ID NO: 146297 - DNA, 80 bp, synthetic construct
  source 1..80: mol_type = other DNA
aggaactgataaacaggaaaggaacatgttggggatgggggacattgcagtttcttccccttcctcttctgaaacatcga

SEQ ID NO: 146298 - DNA, 80 bp, synthetic construct
  source 1..80: mol_type = other DNA
tgcaaccattaccaaccaaaaacttaaccacctatggttttggtcatcagaataaggcagtgtatgtggcaggctacaag

SEQ ID NO: 146299 - DNA, 80 bp, synthetic construct
  source 1..80: mol_type = other DNA
gcctccactgtgaatttcacacctgaggtggtcactaagtctcgggctgatttaatgacgacaggggcctttggccaaca

SEQ ID NO: 146300 - DNA, 80 bp, synthetic construct
  source 1..80: mol_type = other DNA
tcaaccaaattaatggttgtcaaattggtgccaaatattaaagaggtggcaaattgtacacataaacaaattgagaacta

SEQ ID NO: 146301 - DNA, 80 bp, synthetic construct
  source 1..80: mol_type = other DNA
atatggagtagatgggctagaacccatagacattacaactagtgcaggattcccctatgtgagtcttggaatcaagaaaa

SEQ ID NO: 146302 - DNA, 80 bp, synthetic construct
  source 1..80: mol_type = other DNA
tgagaaaacaacccaagcctatgccaactgggaaattgatacaatgggctttgtccagatgaggagaaaacttgaaatgt

SEQ ID NO: 146303 - DNA, 80 bp, synthetic construct
  source 1..80: mol_type = other DNA
accaattcccacactataacgcccccaacggtctcccacagcgacgcactgagtagaagattcgcctttgatatggaagt

SEQ ID NO: 146304 - DNA, 80 bp, synthetic construct
  source 1..80: mol_type = other DNA
ctgaaaaaggggaatttacaggtttaggtgtctatgatcgtgtgtgtgttataccaactcatgcacaaccagacaataaa

SEQ ID NO: 146305 - DNA, 80 bp, synthetic construct
  source 1..80: mol_type = other DNA
gggaccactacattaaaaccagggcaacagtcacaacagctggacctagtgatatgtatgtacacactaaagaagctatc

SEQ ID NO: 146306 - DNA, 80 bp, synthetic construct
  source 1..80: mol_type = other DNA
agacagggagagatggtgtttggaaccaaacttttcataggagatggtgtgtttaaaaccactcttcttggtgaaatagt

SEQ ID NO: 146307 - DNA, 80 bp, synthetic construct
  source 1..80: mol_type = other DNA
cgggagggggctttagcacaatgctttttaccatgcaaaacctgtatgaagagtaccaaaaacatagatgcagatggtct

SEQ ID NO: 146308 - DNA, 80 bp, synthetic construct
  source 1..80: mol_type = other DNA
ttccttgctagaatgataactaatgaaagtgatgtctactcattacctccagatcccaagtattttgatggttacgatca

SEQ ID NO: 146309 - DNA, 80 bp, synthetic construct
  source 1..80: mol_type = other DNA
gctaagacgcaaatgtgagatgttcacttatatgaggttcgacctcgaagtgacatttgtaataaccagctgccaggatc

SEQ ID NO: 146310 - DNA, 80 bp, synthetic construct
  source 1..80: mol_type = other DNA
tgtgttggcggtccgtgtagtcaatgatcacaaccccaccaaagtaacctccaaaatccgcatttacatgaaacccaagc

SEQ ID NO: 146311 - DNA, 80 bp, synthetic construct
  source 1..80: mol_type = other DNA
gatcagattgccaggtgttcatgcaggtgcggcgtctactattgtgaatcaagaaacaaacactatccaatcaccatttc

SEQ ID NO: 146312 - DNA, 80 bp, synthetic construct
  source 1..80: mol_type = other DNA
taacagacaaccttactcaaaaagtggttaagtggttaatacgcataattagtgcgttaacaatcatgattagaaataac

SEQ ID NO: 146313 - DNA, 80 bp, synthetic construct
  source 1..80: mol_type = other DNA
ttgcacgttgtgattgtcaaacaggagtgtattattgtaactccaagagaaagcattatccagttaacttttctaaaccc

SEQ ID NO: 146314 - DNA, 80 bp, synthetic construct
  source 1..80: mol_type = other DNA
cttcaatggtaaatactatgaaatttacaacagcttctacacccactaccactaataactcagctccatactacacattt

SEQ ID NO: 146315 - DNA, 80 bp, synthetic construct
  source 1..80: mol_type = other DNA
atgggcagctttaaatggatactcagactactgtgctaagtactttcaccatgcaggagtaattaaagaaggcagactaa

SEQ ID NO: 146316 - DNA, 80 bp, synthetic construct
  source 1..80: mol_type = other DNA
gtcaaaggtcaaaacccaagatttttaccaaagatattcagattgtctagctaaatttaagccaatcatggccatttgct

SEQ ID NO: 146317 - DNA, 80 bp, synthetic construct
  source 1..80: mol_type = other DNA
gaatttgcattatcattactcaggaaaaatataattactgtaacaacttcaaaaggggaatttacagctttaggggtttg

SEQ ID NO: 146318 - DNA, 80 bp, synthetic construct
  source 1..80: mol_type = other DNA
atttctcttctttttcttacctttaggttgctgttgagatgagttcttgccagattcgatagtcgggcgattcctatatt

SEQ ID NO: 146319 - DNA, 80 bp, synthetic construct
  source 1..80: mol_type = other DNA
ccacctgccacacctgcttctgccattctgcagtccttcattcaggcaggggacactttccgtgtccgctgccaacaaaa

SEQ ID NO: 146320 - DNA, 80 bp, synthetic construct
  source 1..80: mol_type = other DNA
acacatacaagtctaggtacggaacagtagtcactaacgatatgggaactttgtgttcacgtattgtgactagtgaacaa

SEQ ID NO: 146321 - DNA, 80 bp, synthetic construct
  source 1..80: mol_type = other DNA
gcaaggctcttaaaaaagcatgtttctcggtaaaatttacagaaagaaaaggacactgccactgccctgcgtgcgagctc

SEQ ID NO: 146322 - DNA, 80 bp, synthetic construct
  source 1..80: mol_type = other DNA
gaacggcctggtcgccggtcagcgtgacgcggagggtgattcgcacacgatcgggtagcgggccggcttctatggagacg

SEQ ID NO: 146323 - DNA, 80 bp, synthetic construct
  source 1..80: mol_type = other DNA
ctgcgagcaccagctacagctcccccaaccttaccaatcacaatatccattgcccccatcaaatcagaattttcgggcgc

SEQ ID NO: 146324 - DNA, 80 bp, synthetic construct
  source 1..80: mol_type = other DNA
tgacactacatagactgtacccacggtcaaaagtggttgatccgttatccgctctcgtacttcgagaagcctagtaccgc

SEQ ID NO: 146325 - DNA, 80 bp, synthetic construct
  source 1..80: mol_type = other DNA
acccgtctcagggtcccctcggacagctcctaagaaggcaccggtcgcccagtcctaccagagggggccaagaacccaga

SEQ ID NO: 146326 - DNA, 80 bp, synthetic construct
  source 1..80: mol_type = other DNA
agacccgcgctgccatggcatggggatactggtggagaaggcgcttctggcgacccaagagaaggtggagacggtggcgt

SEQ ID NO: 146327 - DNA, 80 bp, synthetic construct
  source 1..80: mol_type = other DNA
atgttaagtttgtaaatgcaggcccaactgatctatatgtgcacgtagggaatttgatttatagaaacttacatctttta

SEQ ID NO: 146328 - DNA, 80 bp, synthetic construct
  source 1..80: mol_type = other DNA
cactcgagaagtacaagtcgttagcccgttgtccatggggcctcagtacatcctccacctcttcggccaaagacgcgggt

SEQ ID NO: 146329 - DNA, 80 bp, synthetic construct
  source 1..80: mol_type = other DNA
attaggtggggaaaagccaaattactttttgaatttcaaaactatgaatgtggacatattcacagttagtcacaccaagg

SEQ ID NO: 146330 - DNA, 80 bp, synthetic construct
  source 1..80: mol_type = other DNA
aagaaagaaactcatacttaaacagtggcagcccgccaatgttagaaaatgcaaaataaggggtctgtttccaatagtta

SEQ ID NO: 146331 - DNA, 80 bp, synthetic construct
  source 1..80: mol_type = other DNA
cttagaaaatgaagaaggcattgtgtctggatggcagaactacacacatgggccaggagtaagatatcccaagttctttg

SEQ ID NO: 146332 - DNA, 80 bp, synthetic construct
  source 1..80: mol_type = other DNA
gattgaggccgcaattgacaacattacacaaaacgcactaagtacagtacagaacacaaacacttcaggaccaacccact

SEQ ID NO: 146333 - DNA, 80 bp, synthetic construct
  source 1..80: mol_type = other DNA
gggaagaattatggcttaaccattacaccacctgacaaatcagaaaggtttgtcaaaatgacatgggaaaatttaacatt

SEQ ID NO: 146334 - DNA, 80 bp, synthetic construct
  source 1..80: mol_type = other DNA
caaagaagtccccgcactgactgcagtcgaaacaggtgccactagccaagtgaccccagaagatgtcattgaaacacgac

SEQ ID NO: 146335 - DNA, 80 bp, synthetic construct
  source 1..80: mol_type = other DNA
tacttggaatctggtacttagtcagtttttttccatcgtggccaccatgttgtccaagggtatcatgctgcgtggcgctc

SEQ ID NO: 146336 - DNA, 80 bp, synthetic construct
  source 1..80: mol_type = other DNA
gcgacaccactcacatagaacagaaagcattgtcacagggactaggccaaatgttggagaacatgatagacaacacagtc

SEQ ID NO: 146337 - DNA, 80 bp, synthetic construct
  source 1..80: mol_type = other DNA
ccgggctgagggcggtttgcgggccgccggtatttgctcgcgggacggcgcctgcggcgtattgcggccggcgcgttgtg

SEQ ID NO: 146338 - DNA, 80 bp, synthetic construct
  source 1..80: mol_type = other DNA
tacagcagcacctccagctccagctccgcaagcagcagcgactcggacagcagctccggctcctccagagccacctcctc

SEQ ID NO: 146339 - DNA, 80 bp, synthetic construct
  source 1..80: mol_type = other DNA
gcagtcctagaagacacaacagaaccgagaatcagccatgtggtggtggagacgcagattttggagaccaaagagacgct

SEQ ID NO: 146340 - DNA, 80 bp, synthetic construct
  source 1..80: mol_type = other DNA
ttagatgggaaatctaagctaaagccaccaacacttagagctgtggtcacacaaggacccaatacagaatttgctttatc

SEQ ID NO: 146341 - DNA, 80 bp, synthetic construct
  source 1..80: mol_type = other DNA
aaatacaagactccataggctcaggcaccacagcagtaactggcatgaccacatataacacttgggtaaagtccaacttt

SEQ ID NO: 146342 - DNA, 80 bp, synthetic construct
  source 1..80: mol_type = other DNA
acatcttagaaagacaaataactacaatgcatgtatcaaaccccacccaggagaagagagaacagctgttcaacaacgtg

SEQ ID NO: 146343 - DNA, 80 bp, synthetic construct
  source 1..80: mol_type = other DNA
ggcgcagaaaaaaagctaaaataataataagacaatggcaaccaaactacagaaggagatgtaacatagtaggctacatc

SEQ ID NO: 146344 - DNA, 80 bp, synthetic construct
  source 1..80: mol_type = other DNA
ttttaggccttccggactaccaaaatggcgatttcagtgacgtcacggcggccattttaagtaagcaggaagcgtctcca

SEQ ID NO: 146345 - DNA, 80 bp, synthetic construct
  source 1..80: mol_type = other DNA
gtatcccaccaccagacccactgggtgtggtacactggtactttgtacctttgtatgcctgtttgcatccctttcccctc

SEQ ID NO: 146346 - DNA, 80 bp, synthetic construct
  source 1..80: mol_type = other DNA
attagggtccaggtatggtggtgtgtttactagcaacgttaagatcatgaactaccacttgatgactccagaagatcact

SEQ ID NO: 146347 - DNA, 80 bp, synthetic construct
  source 1..80: mol_type = other DNA
gtccatctccttcacctccgccacctcctaggacccctacttgggagagtccggcaaggccagagacaccctcgcctgcc

SEQ ID NO: 146348 - DNA, 80 bp, synthetic construct
  source 1..80: mol_type = other DNA
acttagaagtttctaaacacaggaccaacagcaggcaactctccaggttgtccaaggtcaagcactcctgtttccccggt

SEQ ID NO: 146349 - DNA, 80 bp, synthetic construct
  source 1..80: mol_type = other DNA
tggtggcgacggtctcggcacaaagccgctgcggcgcacctacccttctcttatacacaagcgagcgagtggggcacggt

SEQ ID NO: 146350 - DNA, 80 bp, synthetic construct
  source 1..80: mol_type = other DNA
accaaggccccataacagattaccttacacaattaggcaatgcatttggggaaggctttacccagaacataagagatgga

SEQ ID NO: 146351 - DNA, 80 bp, synthetic construct
  source 1..80: mol_type = other DNA
ttctacgtggcactgtcgttcagtcacttgggtacgacactacaacaggtccacacatggacatcatttaggataccgtc

SEQ ID NO: 146352 - DNA, 80 bp, synthetic construct
  source 1..80: mol_type = other DNA
gaagaggaggagggtgctcaggaggagcgggaggacactgtgtctgtcaagtctgagccagtgtctgagatagaggaagt

SEQ ID NO: 146353 - DNA, 80 bp, synthetic construct
  source 1..80: mol_type = other DNA
caagtgaattcaagcaactggattatagtaatgtgacttttttaaagagaggatttaagcaggatgacaagtaccaattt

SEQ ID NO: 146354 - DNA, 80 bp, synthetic construct
  source 1..80: mol_type = other DNA
tgacccagtatataatatggatggtaccctgctgggaaatgtgctcatcttcccacatcaatttataaatttgagaacca

SEQ ID NO: 146355 - DNA, 80 bp, synthetic construct
  source 1..80: mol_type = other DNA
tgcacttccgaatggctgagtttatgctgcccgtccgcggagaggagccacggcaggggatccgaacgtcccgagtgcgg

SEQ ID NO: 146356 - DNA, 80 bp, synthetic construct
  source 1..80: mol_type = other DNA
gcatcactttccaggttttgaaagacatttactcaagctgcataggagttaactcttccaaccaaacaacatattcaact

SEQ ID NO: 146357 - DNA, 80 bp, synthetic construct
  source 1..80: mol_type = other DNA
ggggtatagccattctaccgctagccccacttgcgtttgcggctacatcatcgccccaggtcccaatcacagtcaccata

SEQ ID NO: 146358 - DNA, 80 bp, synthetic construct
  source 1..80: mol_type = other DNA
gtacaaatgaatactttaaaaagaaagacgcacagtggggagatccaattcacgtactaaatagtggagaaacagtaaca

SEQ ID NO: 146359 - DNA, 80 bp, synthetic construct
  source 1..80: mol_type = other DNA
gctcaggtatcaagccagaaggttggagcacatgagaattcaaatagggcatatggtggatctactattaattataccac

SEQ ID NO: 146360 - DNA, 80 bp, synthetic construct
  source 1..80: mol_type = other DNA
taagaaaatatttaacgaaagaagcacaacattaatggactggctaacaggaaaaggcgcaacaaaatttaacacaggca

SEQ ID NO: 146361 - DNA, 80 bp, synthetic construct
  source 1..80: mol_type = other DNA
tttccgatggtctgtcgtgaccgcaatgatattttacaagtattccgaaacctgtatggaggtcactgtcagagtaggtg

SEQ ID NO: 146362 - DNA, 80 bp, synthetic construct
  source 1..80: mol_type = other DNA
ccgcgggggaaacgacagtacggcacaacccgcgtcgagaccagacgcggaaaagaggaaagaacagacacacgcagaag

SEQ ID NO: 146363 - DNA, 80 bp, synthetic construct
  source 1..80: mol_type = other DNA
gactcacccaggaggcacaggtatactcactaccacctgatcccaaatattttgatggatacaaccagcaaaaggtggta

SEQ ID NO: 146364 - DNA, 80 bp, synthetic construct
  source 1..80: mol_type = other DNA
ccaatagttgatgccaccactaatggaaactggtctcagtacataaacactaaaaaactagaccaaacacctccaacaac

SEQ ID NO: 146365 - DNA, 80 bp, synthetic construct
  source 1..80: mol_type = other DNA
acatgggcagaaatacaaaacaaaacatcattaaattcaacaggtacaaaccaatcaacagctaatgacacctggtactt

SEQ ID NO: 146366 - DNA, 80 bp, synthetic construct
  source 1..80: mol_type = other DNA
agacaaacaattaaaaataacatgacttcttactttaaaaaaatagaagaagagagtacaataataacaaaaggagacaa

SEQ ID NO: 146367 - DNA, 80 bp, synthetic construct
  source 1..80: mol_type = other DNA
ggcgtgctgtgtccggcgctttgtgcgcactgccgttgcgtggcgtcccgcggtgttttttttcgcggaccggcgccggg

SEQ ID NO: 146368 - DNA, 80 bp, synthetic construct
  source 1..80: mol_type = other DNA
tacaccttggagaaccccagcaacagggaaagataaattacaatataagcaacaaaacatggatgatgtagatgaagaag

SEQ ID NO: 146369 - DNA, 80 bp, synthetic construct
  source 1..80: mol_type = other DNA
catggggatccagggtcaggaaaatccatctgcacaaacattctcgctcgaatgatcaccaacccatcagacatatattc

SEQ ID NO: 146370 - DNA, 80 bp, synthetic construct
  source 1..80: mol_type = other DNA
aggtatatataaaatacctaagactatacttgacttccgtgaaagcaatgcggttgcattcaatttgctagtgtcattac

SEQ ID NO: 146371 - DNA, 80 bp, synthetic construct
  source 1..80: mol_type = other DNA
agtgtcaggatcaaatttcgcatctggtttatttttactttcataagaaccttttgtccaatacacatatgaggcggcag

SEQ ID NO: 146372 - DNA, 80 bp, synthetic construct
  source 1..80: mol_type = other DNA
atttaacctaaccgcagccgatttccaacatccgttcggctcaccactaactgacactccttgtgtaaccttccaggtcc

SEQ ID NO: 146373 - DNA, 80 bp, synthetic construct
  source 1..80: mol_type = other DNA
atggagtcattcaaagatgccactaaattgaacatgttcaaagcagtagagctgtgcaaatccgacgagtgtgctccagc

SEQ ID NO: 146374 - DNA, 80 bp, synthetic construct
  source 1..80: mol_type = other DNA
cagacgcagactttacagacgtaggagacgatacagacgcaaacgaaaaagagctaaaataactcttaaacagtggcaac

SEQ ID NO: 146375 - DNA, 80 bp, synthetic construct
  source 1..80: mol_type = other DNA
ggcgcgcttacgtttgtcaacactctctgcgaagcgccgcgcaaaagctgcgtggaaacgccgcaaaaggcccccgtgcc

SEQ ID NO: 146376 - DNA, 80 bp, synthetic construct
  source 1..80: mol_type = other DNA
aggtggtaccgagtgatacaatgcagacacggcatgtggtcaactaccataccagatcagaatcgtcaatagagaacttt

SEQ ID NO: 146377 - DNA, 80 bp, synthetic construct
  source 1..80: mol_type = other DNA
acataataattggagtctagtcattattccaatatgccctttgcaagttcaggctggggggacaaattccatacccataa

SEQ ID NO: 146378 - DNA, 80 bp, synthetic construct
  source 1..80: mol_type = other DNA
agagggcccccagacccgctcctaccagcggagactgggagaccgagtactttgcctgtaagatgatgaatagacccccc

SEQ ID NO: 146379 - DNA, 80 bp, synthetic construct
  source 1..80: mol_type = other DNA
acgtcattcagacgcgcagtaggagtgagtccactgttgaatcgttcttcgccaggggggcttgcgtcaccatcatgtca

SEQ ID NO: 146380 - DNA, 80 bp, synthetic construct
  source 1..80: mol_type = other DNA
gtagaatcacaatataattcactactttcagctatagagacgaacacccaaggcactctatttaatacatttaaaacacc

SEQ ID NO: 146381 - DNA, 80 bp, synthetic construct
  source 1..80: mol_type = other DNA
atggctgaggccttaaaagaagccctaacacctgtacccatgccgtttgctgccgctcagcagaaagcaggaaagagggg

SEQ ID NO: 146382 - DNA, 80 bp, synthetic construct
  source 1..80: mol_type = other DNA
acaatggctagaaagaaacaaagagcatgtgtgtggagtacttgattatgcttctgacatcattgtagaatcaaaagatc

SEQ ID NO: 146383 - DNA, 80 bp, synthetic construct
  source 1..80: mol_type = other DNA
tccaacgaggtagatgtcacagtaatgggtagcttattacaactggattttcagaacccacgaccctatggtgaggacgt

SEQ ID NO: 146384 - DNA, 80 bp, synthetic construct
  source 1..80: mol_type = other DNA
cgcgacctccgtcactgagacgctaccccgctctcccgggacccgatacccctgcttctaatccgccgccgagaccatgc

SEQ ID NO: 146385 - DNA, 80 bp, synthetic construct
  source 1..80: mol_type = other DNA
cacaagtagcctagttcagaaaataaaagcatacagaaaaaagagatttggctggctaacaacccctagctccagcaacc

SEQ ID NO: 146386 - DNA, 80 bp, synthetic construct
  source 1..80: mol_type = other DNA
aactggccctttatgaagagcaatgcaaaggattctccaaatcagatgcccaggctcaacaacaactcatcatagaagtg

SEQ ID NO: 146387 - DNA, 80 bp, synthetic construct
  source 1..80: mol_type = other DNA
caccacatgggataacctaacattccttaaaagaaaatttagacctgattctaaatattcattccttgtccacccagtct

SEQ ID NO: 146388 - DNA, 80 bp, synthetic construct
  source 1..80: mol_type = other DNA
ctcttttaaacttggctggcaataaaattacaaggccgtggaactttcacttgtcggtgtctacctcttaaggtcactaa

SEQ ID NO: 146389 - DNA, 80 bp, synthetic construct
  source 1..80: mol_type = other DNA
tcttcccagagagaatgcccaagccccctcctacttccggggactgggccatggagtacctcatgtgtaagataatgaac

SEQ ID NO: 146390 - DNA, 80 bp, synthetic construct
  source 1..80: mol_type = other DNA
gaaccttacaaaaggcgaaacggcacacaagtttgaaccaaccaaaaccaccggtgaacatacagtgcaatcaatagtgt

SEQ ID NO: 146391 - DNA, 80 bp, synthetic construct
  source 1..80: mol_type = other DNA
ggggcaattgggcatacccatgttgtcacgtcactcagctccgcgctcaacaccttctcgcgttggaaaacattagcgac

SEQ ID NO: 146392 - DNA, 80 bp, synthetic construct
  source 1..80: mol_type = other DNA
ggcttaactaccaaactaactattcacaagtactagccaaatttaaatccaaaagaaatgacagcctgcaactaataaaa

SEQ ID NO: 146393 - DNA, 80 bp, synthetic construct
  source 1..80: mol_type = other DNA
agggcaaggttgggcccctgggtagtcacgttcagccgcaactcgcgtagcaccacgtggctgccgataaacagggtctc

SEQ ID NO: 146394 - DNA, 80 bp, synthetic construct
  source 1..80: mol_type = other DNA
ccaatctcctggctacccttggacaacacagggccggtctcgccggtctctgtttgatgaggatggcaaccccgtccctg

SEQ ID NO: 146395 - DNA, 80 bp, synthetic construct
  source 1..80: mol_type = other DNA
gccggctgtgccgtctctagcgtggcctcacgacggagtttatttacccaaagacgcttttttctcgctacttggggcca

SEQ ID NO: 146396 - DNA, 80 bp, synthetic construct
  source 1..80: mol_type = other DNA
cagaacagtggaatacggtgggatactttaaggaggataaagcacattcggccgaaatagtgctaaaccaattgtgtgtg

SEQ ID NO: 146397 - DNA, 80 bp, synthetic construct
  source 1..80: mol_type = other DNA
agtcagttatgtgatgtaactttgctaaccatacaggcaaccgcagcggatctgcaatatccgttcggctcaccactaac

SEQ ID NO: 146398 - DNA, 80 bp, synthetic construct
  source 1..80: mol_type = other DNA
ctgaggcggaagtttgaattgtttacatacatgcggtttgacatggaagtcacatttgttatcacgagcaggcaactgcc

SEQ ID NO: 146399 - DNA, 80 bp, synthetic construct
  source 1..80: mol_type = other DNA
gtcaaaacattttcaagtgccttatatagagagacaagccaatgatggatggtttagaaagttcaatgatgcttgcaatg

SEQ ID NO: 146400 - DNA, 80 bp, synthetic construct
  source 1..80: mol_type = other DNA
ggctccgccccccggccccccccccgaagtccgtcactaaaccacgtgactcctctcgtccaatcaggtgctatatcgtc

SEQ ID NO: 146401 - DNA, 80 bp, synthetic construct
  source 1..80: mol_type = other DNA
caactccaccattggcccatacacaagtgcagtgagaatttacttcaaaccaaagcatgtaaaggcatgggtacccagac

SEQ ID NO: 146402 - DNA, 80 bp, synthetic construct
  source 1..80: mol_type = other DNA
cggaaccgctaagttattcctactcctcatttagccaactcttccagaataatacgagggtaaaataacaatactataat

SEQ ID NO: 146403 - DNA, 80 bp, synthetic construct
  source 1..80: mol_type = other DNA
ggtcataatcttaaattgactgaaactataattagtactcatttttttgtgtactctaaacgaatctattatgatggtat

SEQ ID NO: 146404 - DNA, 80 bp, synthetic construct
  source 1..80: mol_type = other DNA
aaatagcatcacaacatatggtcttggacaccaaaaccaagcagtgttcgttgctggatttaaaataatgaattaccacc

SEQ ID NO: 146405 - DNA, 80 bp, synthetic construct
  source 1..80: mol_type = other DNA
cagggagagataccttccaatggcaatctgctactaacccttcagtgctagtaaaaatgacggatccaccggcccaagtt

SEQ ID NO: 146406 - DNA, 80 bp, synthetic construct
  source 1..80: mol_type = other DNA
acacagcgggaggttttattacatgttggtaccaaaccaacatcgtggtccccgctgatgcacagagttcatgttacata

SEQ ID NO: 146407 - DNA, 80 bp, synthetic construct
  source 1..80: mol_type = other DNA
tacttaaaaccctcataaagatagtctcaaccatggtgataatttgtagaaattatgaggacaccacaacagtcttagct

SEQ ID NO: 146408 - DNA, 80 bp, synthetic construct
  source 1..80: mol_type = other DNA
gggatagacctgctagaaagtatcatacagacacccctttctatccctgggctcccccagagccaaaacctgtgcgtgta

SEQ ID NO: 146409 - DNA, 80 bp, synthetic construct
  source 1..80: mol_type = other DNA
gttttgttaagtcaggttacaaaaagaaggatttaatttgtcttgaacctttttctgtttcccctatgcttgagaaactt

SEQ ID NO: 146410 - DNA, 80 bp, synthetic construct
  source 1..80: mol_type = other DNA
gttcctagaaaggcgcgggtcggtaccagacagcgtgaggaacgggagtgaagaggcctccgggtgcgcaggtaagtgca

SEQ ID NO: 146411 - DNA, 80 bp, synthetic construct
  source 1..80: mol_type = other DNA
tcagcaccacatcttttaacctaagagtactatatgaccagcatcagagaggactgaacaggtggacgttccccaacgac

SEQ ID NO: 146412 - DNA, 80 bp, synthetic construct
  source 1..80: mol_type = other DNA
gttcttaggcacagatggcttgatttgttttaattttaatatatagagtattaatttagtgtagtgaatttttcctctat

SEQ ID NO: 146413 - DNA, 80 bp, synthetic construct
  source 1..80: mol_type = other DNA
acccagactttttcaagacaagtggtacccccagtcagacctgtgtgacacagttctgctttccgtgtttgcaacggcct

SEQ ID NO: 146414 - DNA, 80 bp, synthetic construct
  source 1..80: mol_type = other DNA
ctaggaaactatgttactgagttaaagtcaggcggtagtttccacacaggcgcaaatccagtatttggcatgtgcaccta

SEQ ID NO: 146415 - DNA, 80 bp, synthetic construct
  source 1..80: mol_type = other DNA
tggtttgagtgaaggggagactgccaagaagttcacggctaccagctctaatggtcaaaatatagtgcaatcgattgtaa

SEQ ID NO: 146416 - DNA, 80 bp, synthetic construct
  source 1..80: mol_type = other DNA
aatggcaaagaggtctatgaagatttcatccaaaagatcaagacagtagaagttgggaggactctaaatttaccacctta

SEQ ID NO: 146417 - DNA, 80 bp, synthetic construct
  source 1..80: mol_type = other DNA
tattgggggtcgccataaactttgggctccattttaggccttccggactacaaaaatcgccatatttgtgacgtcagagc

SEQ ID NO: 146418 - DNA, 80 bp, synthetic construct
  source 1..80: mol_type = other DNA
accagaggtcccgcaaagctatgagacagctaccagtcacgggtcggcgcaagtcccagaacccccacccacccacccat

SEQ ID NO: 146419 - DNA, 80 bp, synthetic construct
  source 1..80: mol_type = other DNA
acaacacaggctcagaccaaacagcctcaagtattagaaatacaataaaaaataacatgacatcttactttaacaaaata

SEQ ID NO: 146420 - DNA, 80 bp, synthetic construct
  source 1..80: mol_type = other DNA
acagtgcacgttcagtgtaatgcaagtaaatttcatcaaggcaccttgattgttgcaatgattccagaacatcaattggc

SEQ ID NO: 146421 - DNA, 80 bp, synthetic construct
  source 1..80: mol_type = other DNA
gggaaaaaagacaataagcttcagagccagacccccaaaactattccaagacaagtggtacactcaacaagacctctgcc

SEQ ID NO: 146422 - DNA, 80 bp, synthetic construct
  source 1..80: mol_type = other DNA
cagataatgtacgtgccccccggagggcctataccaaagagcgttgatgactacagttggcagacatccaccaatcctag

SEQ ID NO: 146423 - DNA, 80 bp, synthetic construct
  source 1..80: mol_type = other DNA
gaaaaacaagttgaaaacttaagatgtgctgacactaagactcaagagaagattaaagttgagatagacactttgcatga

SEQ ID NO: 146424 - DNA, 80 bp, synthetic construct
  source 1..80: mol_type = other DNA
aatcaatctattacccaaagcatatacaatatgacatcctaattggtgaaggaccatgctctccaggggattgtggtggt

SEQ ID NO: 146425 - DNA, 80 bp, synthetic construct
  source 1..80: mol_type = other DNA
cgcctctgcagcccttaaattgattgactaacggggtattaattctttatttcaatatgaacaaccaaccacgtacccca

SEQ ID NO: 146426 - DNA, 80 bp, synthetic construct
  source 1..80: mol_type = other DNA
atccactacccttttcctaaattttccacccgtgtaaccttagaagcaaacaaattgtacaatagggtgcatcacaacca

SEQ ID NO: 146427 - DNA, 80 bp, synthetic construct
  source 1..80: mol_type = other DNA
tgaaaggtgttggtcccgccgaaccaggagactgtggaggcatcttacgatgcatccatggaccaattggtttgttgaca

SEQ ID NO: 146428 - DNA, 80 bp, synthetic construct
  source 1..80: mol_type = other DNA
cggggctatgttagcgagcaagctctcaaaagagtgtcagagaaacctcttgactatgaagagtattttaaaaagccaaa

SEQ ID NO: 146429 - DNA, 80 bp, synthetic construct
  source 1..80: mol_type = other DNA
gtagaaaatacgctggtcacaaaggtggtagaagcagtgttgggtgatgtgatggatgcagtattggtagtagtactgtt

SEQ ID NO: 146430 - DNA, 80 bp, synthetic construct
  source 1..80: mol_type = other DNA
ccaacgtaacagacatgtacaacagcaaaatatttaatgccagaggcacaacattactagactggctatcaggaaaaggc

SEQ ID NO: 146431 - DNA, 80 bp, synthetic construct
  source 1..80: mol_type = other DNA
ctcctggtggtcctgttccaaagaccagaaaagatgaagagtggcagacaggaaccaatgcttcagttttttggcagcat

SEQ ID NO: 146432 - DNA, 80 bp, synthetic construct
  source 1..80: mol_type = other DNA
cttgcggtatccgttctgctcaccacaaactgacaacccttgcgtcagcttcctcgttttgtcaaccgtctacaacaact

SEQ ID NO: 146433 - DNA, 80 bp, synthetic construct
  source 1..80: mol_type = other DNA
tttgctgcctcctcctcgccgtcgccgtcgcggccgacgtggtggaccagcaccgcgcaggaactctcgcgtcgccggcg

SEQ ID NO: 146434 - DNA, 80 bp, synthetic construct
  source 1..80: mol_type = other DNA
ggcaaatgatagagctattgacggatttattatcagacacatctgttcacgtattcagggtgttaactaatgcattatca

SEQ ID NO: 146435 - DNA, 80 bp, synthetic construct
  source 1..80: mol_type = other DNA
actagttacttgcagtggttgcccagatctctctgttagaatgttaagggacactcccatgatgcagcatgtcaatgacc

SEQ ID NO: 146436 - DNA, 80 bp, synthetic construct
  source 1..80: mol_type = other DNA
tgaacaaaaactgctccacagaaacaggtggtccaagtccaactttgacctagacctagccagatacctctacacaaaaa

SEQ ID NO: 146437 - DNA, 80 bp, synthetic construct
  source 1..80: mol_type = other DNA
taacctctccctcaacatcaacatctctgctccttcccagccctgcactttctatgtctactatgcccctcctggcgcat

SEQ ID NO: 146438 - DNA, 80 bp, synthetic construct
  source 1..80: mol_type = other DNA
gttttctttgatgtgtttgaagggtcgaaagagccagcagtgttgtcagagagagacccccgtctaaaaactgattttaa

SEQ ID NO: 146439 - DNA, 80 bp, synthetic construct
  source 1..80: mol_type = other DNA
cgctggtcgtgcactgtatatccctccttacgaaatgcttctgcatgagtggtatgaaaaattttaaattgtttagatat

SEQ ID NO: 146440 - DNA, 80 bp, synthetic construct
  source 1..80: mol_type = other DNA
gttgaattttgatggaacattacttggtaatattacaatattccctcatcaatttattaatctgagaagcaataattcag

SEQ ID NO: 146441 - DNA, 80 bp, synthetic construct
  source 1..80: mol_type = other DNA
gtttaacctataacagttctagtccaaataaggtgcattgtatagtacagggaaggcttggggatgatgcaaaatttttc

SEQ ID NO: 146442 - DNA, 80 bp, synthetic construct
  source 1..80: mol_type = other DNA
cgccgtcagcgtcgtcgtccgtgccatcaatcgcgtccgaccgggaaaccacgccggcggttacagaatcaccgttgtcg

SEQ ID NO: 146443 - DNA, 80 bp, synthetic construct
  source 1..80: mol_type = other DNA
ttgaccagtcagtagaaaagaagggatgagatcatccagtgcgtcctcagtaagcagctcctggtcacgttcattacctg

SEQ ID NO: 146444 - DNA, 80 bp, synthetic construct
  source 1..80: mol_type = other DNA
gaaaaagactgactttatagtgttctttaacagaaagcctccctttaagctaaacaaatacagctgcgcctcttaccatc

SEQ ID NO: 146445 - DNA, 80 bp, synthetic construct
  source 1..80: mol_type = other DNA
gcaaaaacacagggtattgaagaaacaatagatacagtgatcagcaatgctcttcaattatctcaacccaagccacagaa

SEQ ID NO: 146446 - DNA, 80 bp, synthetic construct
  source 1..80: mol_type = other DNA
gatctgcttgcgtagcaatcatccatacaaaccttgagcatgttgaagcagacagacaagcctacaatgcaaaagggaaa

SEQ ID NO: 146447 - DNA, 80 bp, synthetic construct
  source 1..80: mol_type = other DNA
gagtactcaactttgtaccgccgctcctaccattagaacagctaaagtgcaaggcccaggatttgattatgcagtagcaa

SEQ ID NO: 146448 - DNA, 80 bp, synthetic construct
  source 1..80: mol_type = other DNA
tggtgacaactttgcctactgggtgatcagtacaagacaggttgcgcaactacgccgcaagttggaaatgttcacgtacg

SEQ ID NO: 146449 - DNA, 80 bp, synthetic construct
  source 1..80: mol_type = other DNA
cttcggctgcgccggacacctcggcccccccctccacccgaaacgcttgcgcgtttcggaccttcggcgtcggggtggtc

SEQ ID NO: 146450 - DNA, 80 bp, synthetic construct
  source 1..80: mol_type = other DNA
ttatacattggacagcaagacatggtcagctaactcaaaagggtggtgttggaagcttccagatgcacttaaggatatgg

SEQ ID NO: 146451 - DNA, 80 bp, synthetic construct
  source 1..80: mol_type = other DNA
ggtcgtagtgccagaacatcagttggcatcacgtactgaaggaaacgtatcagtaaactacaagtatacccacccaggtg

SEQ ID NO: 146452 - DNA, 80 bp, synthetic construct
  source 1..80: mol_type = other DNA
tctacggacgttgtactcttgtattccggtacatttgtacgccagtttttccttccccaccccattgtaacatatagaag

SEQ ID NO: 146453 - DNA, 80 bp, synthetic construct
  source 1..80: mol_type = other DNA
gagccaaagaggcaggcaggggccggttggcccacggggatccgggtggatggaagggcctgatcctctttggctgacac

SEQ ID NO: 146454 - DNA, 80 bp, synthetic construct
  source 1..80: mol_type = other DNA
tagtcataagaagcccctttactaaccctcagctgctagaccataacaacccattaagagggtacgttccctactccata

SEQ ID NO: 146455 - DNA, 80 bp, synthetic construct
  source 1..80: mol_type = other DNA
ggtgtgtgataaatataaagatccacaaggaaaacttaatgtatcagctgcttttcaaccctgtgatgtagatgcaaaga

SEQ ID NO: 146456 - DNA, 80 bp, synthetic construct
  source 1..80: mol_type = other DNA
acatccgtcctgctcaccacaaacgaacaacccttgcaccaccttccaggtgttgcgcgagcagtataacgccatgatag

SEQ ID NO: 146457 - DNA, 80 bp, synthetic construct
  source 1..80: mol_type = other DNA
atgatttttcggcgaggcttctgcgcgactctcctttcgtgcgacaacttgaaatggcatggaagcaaggtgttgaggat

SEQ ID NO: 146458 - DNA, 80 bp, synthetic construct
  source 1..80: mol_type = other DNA
tgctcgctttaaccgtctgcatgctgccccttcgcctctggatccgtcctacccccctcccccgaggcgggcgcgtgtga

SEQ ID NO: 146459 - DNA, 80 bp, synthetic construct
  source 1..80: mol_type = other DNA
agggttggcgtgtaacccggaagtcaatcctcccacatggcctgtcacgtgactgctacgtcacggccgccattttagtt

SEQ ID NO: 146460 - DNA, 80 bp, synthetic construct
  source 1..80: mol_type = other DNA
catcaacgaccaacaattacatcatctaccctcggggccaccatggtggccacccatctgcgaccccccgcaaccctcta

SEQ ID NO: 146461 - DNA, 80 bp, synthetic construct
  source 1..80: mol_type = other DNA
ggggaagacctttacaagtaaatatatattagccagcacaaatcttttaaatctccaaccacccacagtaacagtccccg

SEQ ID NO: 146462 - DNA, 80 bp, synthetic construct
  source 1..80: mol_type = other DNA
gtgtaaactcacctccggcacccgccacggagggagatcagcgcgtcccgagggcgggtgccggaggtgagtttacacac

SEQ ID NO: 146463 - DNA, 80 bp, synthetic construct
  source 1..80: mol_type = other DNA
ggactaggggaggaggagacagttagttgccagttcaacatgacaggattagagagagacaagaaaaaactgtataatga

SEQ ID NO: 146464 - DNA, 80 bp, synthetic construct
  source 1..80: mol_type = other DNA
acagcagttgacactttgtgtgctgctttcaaagttgacccaggtagagatggaccatggcaatccacgcttgtaggaca

SEQ ID NO: 146465 - DNA, 80 bp, synthetic construct
  source 1..80: mol_type = other DNA
cttggtgttggtttggaggcaaatggaaggaagccatgcaggaggtaaaggaaaccgtggtcaagcaccccagctataaa

SEQ ID NO: 146466 - DNA, 80 bp, synthetic construct
  source 1..80: mol_type = other DNA
gagagcgagagcgaagcagaagccccccaagaagaagaaccgaagaaaccgatacaggagcagctcgaacagcaactcag

SEQ ID NO: 146467 - DNA, 80 bp, synthetic construct
  source 1..80: mol_type = other DNA
acaaactgaatatatacaaatacccatcacagtagctgagggaaacacaatttactttaatgctagcgataactcctgta

SEQ ID NO: 146468 - DNA, 80 bp, synthetic construct
  source 1..80: mol_type = other DNA
taccaatgcatgttgagcgaaaactaatattgcaatggactggcgagttacggttacttggacgatactaatgtcaacgt

SEQ ID NO: 146469 - DNA, 80 bp, synthetic construct
  source 1..80: mol_type = other DNA
cggcagtggacctcaaagaagaggtagggataaccatggacgaggacggggaagaggacgaggacgaggaggcggaagac

SEQ ID NO: 146470 - DNA, 80 bp, synthetic construct
  source 1..80: mol_type = other DNA
acatcaatccagaacccataacaatagagcaagcagtctatggtgtaactaatcttgagcctctggatcttacaaccagt

SEQ ID NO: 146471 - DNA, 80 bp, synthetic construct
  source 1..80: mol_type = other DNA
atgcttcattatgtgcatggtgtcggcatgtaatgacttttcagtgcgcctgctgaaggacacaccattcattgaacaaa

SEQ ID NO: 146472 - DNA, 80 bp, synthetic construct
  source 1..80: mol_type = other DNA
atactgtcgtgattgttgttagaccggcacataccttcacaatgtcctcgggggcaaaatactgtgttaggagccaggca

SEQ ID NO: 146473 - DNA, 80 bp, synthetic construct
  source 1..80: mol_type = other DNA
acttttcaaaactcatggggttcgcagatggacttaacagatccactgtgtatggaagatgactgcactgaagattgcaa

SEQ ID NO: 146474 - DNA, 80 bp, synthetic construct
  source 1..80: mol_type = other DNA
cggcgtacgcccaaccctggaacacgagcggacatcgcggaccgtgagcggacatcgcgccggcggttgttaccgtcgtc

SEQ ID NO: 146475 - DNA, 80 bp, synthetic construct
  source 1..80: mol_type = other DNA
ctaccgcatgaaccgaacttgacacaagtgcggttcatgcggtagggttaagccaattgcaattcactaattatgctcta

SEQ ID NO: 146476 - DNA, 80 bp, synthetic construct
  source 1..80: mol_type = other DNA
acagcgggttacataacgtgctggtaccagacaaacatagtggttccaagcgggaccccaactgaatgcgttgtgcttgg

SEQ ID NO: 146477 - DNA, 80 bp, synthetic construct
  source 1..80: mol_type = other DNA
actaacctaaccgcagcacatatccacccgggcatcatgatgctcagcaaaaaacacatactccgccccccggccccccc

SEQ ID NO: 146478 - DNA, 80 bp, synthetic construct
  source 1..80: mol_type = other DNA
aaaaaacacctactgcagacaaaccagcagcgacatctagtggcagaaattacccagtgcaacaagtagctggcaattat

SEQ ID NO: 146479 - DNA, 80 bp, synthetic construct
  source 1..80: mol_type = other DNA
agctaagtttacaaagacaaagttgacttcagattgggtagttgaggaagagtgcgagctagactattttagggttaagt

SEQ ID NO: 146480 - DNA, 80 bp, synthetic construct
  source 1..80: mol_type = other DNA
tctcactcaattaccccacccactgtcgcacatagtgatgccctaagtagaagatttgcatttgacatggatgtatacac

SEQ ID NO: 146481 - DNA, 80 bp, synthetic construct
  source 1..80: mol_type = other DNA
caaacttcactacaaacacaacctcagagatagacaattcaatctatactatttgtgacattggatccgacaatagcttt

SEQ ID NO: 146482 - DNA, 80 bp, synthetic construct
  source 1..80: mol_type = other DNA
tcagcgctaccccagcgtagatcagggcaatggggctacggaaaccccaccggcgacggtgtcgtagcccgcgaggtgcc

SEQ ID NO: 146483 - DNA, 80 bp, synthetic construct
  source 1..80: mol_type = other DNA
cttagctgaactgggccgtgggggtcgtcatcatctccaccggaaccagaagtacccaaaagcagcgtaggaaggtgtgg

SEQ ID NO: 146484 - DNA, 80 bp, synthetic construct
  source 1..80: mol_type = other DNA
acagagcgtcgctacggcgggcgggcggcggggggtcggggtccgcagtctctggggtctgcgggcggtggacggcggcg

SEQ ID NO: 146485 - DNA, 80 bp, synthetic construct
  source 1..80: mol_type = other DNA
ttttcggttaggttgctgaaagattctccgtttgtggagcaaaccgctctattgcagaacgaccccgcaaccgctattga

SEQ ID NO: 146486 - DNA, 80 bp, synthetic construct
  source 1..80: mol_type = other DNA
atgttcacagacaagtggtacccccagtcagacctgtgtgacctccccctactcaccatctttgcaagtgcagctgacat

SEQ ID NO: 146487 - DNA, 80 bp, synthetic construct
  source 1..80: mol_type = other DNA
tttgaatcacaaaatggcggacttccttccgcttttttaaaaataacggccctgcggcggcgcgcgcgctgcgcgcgcgc

SEQ ID NO: 146488 - DNA, 80 bp, synthetic construct
  source 1..80: mol_type = other DNA
caaatttggacaacaaagggatgctttttaccagtagttttgttttggcttccactaactctcagacattaaaccctcca

SEQ ID NO: 146489 - DNA, 80 bp, synthetic construct
  source 1..80: mol_type = other DNA
atgtactcccagggttccaccctaccaagcagattcacatacctggtgaaatcaaaacaatcatggatatggctcgtgtg

SEQ ID NO: 146490 - DNA, 80 bp, synthetic construct
  source 1..80: mol_type = other DNA
cgggacaagcattgcccaagacatgccgccgctgacacaccaaataatgtacataccccccgggggcccagtgccgaaca

SEQ ID NO: 146491 - DNA, 80 bp, synthetic construct
  source 1..80: mol_type = other DNA
tgggtacgcacatcatatgggatgtgggtctgcagtcctcatgcgtgctatgcatcccttggatcagccagactcactac

SEQ ID NO: 146492 - DNA, 80 bp, synthetic construct
  source 1..80: mol_type = other DNA
tacacgttggagagcgtggagtggcaatcaagctctcgcggctggtggtggaagcttcccgacgcccttaaagatatggg

SEQ ID NO: 146493 - DNA, 80 bp, synthetic construct
  source 1..80: mol_type = other DNA
aacatgaccctaggttaaagactaactttaaagaagctttattctctaagtataaaggaaacaatcaatgtgagatcaat

SEQ ID NO: 146494 - DNA, 80 bp, synthetic construct
  source 1..80: mol_type = other DNA
gagtggggccagacttcgccataaggcctttatcttcttgccattggatagtgtaggtggtcgctccaaacgcgaacccc

SEQ ID NO: 146495 - DNA, 80 bp, synthetic construct
  source 1..80: mol_type = other DNA
tttacggatcagtataatccctctaccgatgcctccgatggaagaagctttgcagcagttgattacctactaggatgtgg

SEQ ID NO: 146496 - DNA, 80 bp, synthetic construct
  source 1..80: mol_type = other DNA
gaaatgggtcggctctcccctgccttcacaggcaatcgacgacccctgccagaagtccacccacgaacttcccgaccccg

SEQ ID NO: 146497 - DNA, 80 bp, synthetic construct
  source 1..80: mol_type = other DNA
ttaagagaagagtctatcaccaggaaaagagttcatactaatttaaatgccattttccaaggtctaggatcagatgaaac

SEQ ID NO: 146498 - DNA, 80 bp, synthetic construct
  source 1..80: mol_type = other DNA
aaccgccggaacaacctggaggaggcgcggcatgacggcacccaagtgtgttacgaccactacttatctggtcaagacca

SEQ ID NO: 146499 - DNA, 80 bp, synthetic construct
  source 1..80: mol_type = other DNA
ctctcattagaggaaagtgtgtttggtatagaagggcttgaagctttagacctcagtactagtgcaggtttcccctatgt

SEQ ID NO: 146500 - DNA, 80 bp, synthetic construct
  source 1..80: mol_type = other DNA
cactttcaaccatatacaataagattgtggaagagaacaaaaacagaaaaatgctttcaaaaagtctggaggctattttc

SEQ ID NO: 146501 - DNA, 80 bp, synthetic construct
  source 1..80: mol_type = other DNA
aacccaagcctagtgtgtttaaatgttttgctaacaaaattggctcaaaaatttccaaagcatctagggaagttgttaat

SEQ ID NO: 146502 - DNA, 80 bp, synthetic construct
  source 1..80: mol_type = other DNA
ctacaaggatagtgctagtaatgccgccagcaagcaggatttttcgcaggacccttctaaattcaccgaaccagtcaagg

SEQ ID NO: 146503 - DNA, 80 bp, synthetic construct
  source 1..80: mol_type = other DNA
gccctgtcccgtgctgtggagacacacgcaccggcagcacgcagaaagcgccgtggaaaacacgccgcaaacgcggcgcc

SEQ ID NO: 146504 - DNA, 80 bp, synthetic construct
  source 1..80: mol_type = other DNA
accgcacacctggtctccactggccgaaggcaactagcaataaggcaggtgggttcagacgcttaaagtgtgttgtgcat

SEQ ID NO: 146505 - DNA, 80 bp, synthetic construct
  source 1..80: mol_type = other DNA
agtcgtagttgaggctggccggggtctcgtgcgaggcctccagcatggcgggtgcgtagctcaccgccagctcgcatgcc

SEQ ID NO: 146506 - DNA, 80 bp, synthetic construct
  source 1..80: mol_type = other DNA
acgtgtcacttttggtgattcccattgcacccttggtggctccaactggatcgctacagacacttccaataacagtgaca

SEQ ID NO: 146507 - DNA, 80 bp, synthetic construct
  source 1..80: mol_type = other DNA
cagtctaaatgacactgtgcatatgcgcatgttatttggaaacctgtttaaagctttccatgccaatccaggtattatta

SEQ ID NO: 146508 - DNA, 80 bp, synthetic construct
  source 1..80: mol_type = other DNA
acccggatgtgttctggtcccaaatttacgccagtatggatgggaacttgatggcttttgactacaccaactttgatggc

SEQ ID NO: 146509 - DNA, 80 bp, synthetic construct
  source 1..80: mol_type = other DNA
gactactacctgggcttttacagcccaatattcctgtcacctggcaggtcaaacatagaattcttcacagccttcagaga

SEQ ID NO: 146510 - DNA, 80 bp, synthetic construct
  source 1..80: mol_type = other DNA
caacctccacaccaacaaccaccacaacagcaaacacaacaataggagagaattcttcatgcatacgcacagacaactgc

SEQ ID NO: 146511 - DNA, 80 bp, synthetic construct
  source 1..80: mol_type = other DNA
cgacgacccctgccagcagggaacccacccgattcccgaccccgataagcaccctcgcctcctacaagtctcgaacccga

SEQ ID NO: 146512 - DNA, 80 bp, synthetic construct
  source 1..80: mol_type = other DNA
cctcaggcctaatgccagacggcagcagctacattcccttcagctttaggggcaagtggtaccccaacctgctcaaccaa

SEQ ID NO: 146513 - DNA, 80 bp, synthetic construct
  source 1..80: mol_type = other DNA
gcccccagcagtggctgttcccggagcgtaagcctaagccccctcccagcagcggagactgggagacagagtatgcagca

SEQ ID NO: 146514 - DNA, 80 bp, synthetic construct
  source 1..80: mol_type = other DNA
tttctcgctctggtctggtaggagtggttaatatgtcagacgggggcacggacactacagggtatgccacgtgggatatt

SEQ ID NO: 146515 - DNA, 80 bp, synthetic construct
  source 1..80: mol_type = other DNA
cccattcgaggaaaccctatcgaaaagccaagaagaagtccaaacacagcagcagcagcgagacctccacctccgactcg

SEQ ID NO: 146516 - DNA, 80 bp, synthetic construct
  source 1..80: mol_type = other DNA
caatgtcaatttactatgacaggactaagaagagatgagcagaaaaattatactgacacctggtactcagaagatttaga

SEQ ID NO: 146517 - DNA, 80 bp, synthetic construct
  source 1..80: mol_type = other DNA
attcaccgtgtggcctatcacatacaccaatacagtccaactgagaagaaaattggaatttttcacctactccagatttg

SEQ ID NO: 146518 - DNA, 80 bp, synthetic construct
  source 1..80: mol_type = other DNA
taaagatattcagaatgtttcattcctacactagtatttattgcccaagtggtttgtgagggttatattggtgtcatagc

SEQ ID NO: 146519 - DNA, 80 bp, synthetic construct
  source 1..80: mol_type = other DNA
aaattaaatagctgggatgtttttggcaactggtttgatttaacctcctggatcagatatattcagtatggagtttatat

SEQ ID NO: 146520 - DNA, 80 bp, synthetic construct
  source 1..80: mol_type = other DNA
gccgaggccgccgctcctgagagcgctgccggcccccgaggtccgcagagaaacgcgcacagaaaacccgggcgcctccg

SEQ ID NO: 146521 - DNA, 80 bp, synthetic construct
  source 1..80: mol_type = other DNA
ggggggaccttaacatccgagacctccgggcccacgtcaaggcccggatgatctcgtcccagttttgcggctacgtcctc

SEQ ID NO: 146522 - DNA, 80 bp, synthetic construct
  source 1..80: mol_type = other DNA
tgtattataacaactgataaaggcaaatttacaggtcttgggatatatgatcaggttatggtactcccaacacactctga

SEQ ID NO: 146523 - DNA, 80 bp, synthetic construct
  source 1..80: mol_type = other DNA
aatactttaaggtttgctcaggagtgggggcttcttattggttaattcaggtgtgtcattttagcccgttgggtttcatt

SEQ ID NO: 146524 - DNA, 80 bp, synthetic construct
  source 1..80: mol_type = other DNA
ggaggccatacggaccaccgtgcgggacgacacggtacgccgggtagccgcgcaggtcaacaaccagagccgttcggggc

SEQ ID NO: 146525 - DNA, 80 bp, synthetic construct
  source 1..80: mol_type = other DNA
ttatacatggcaaacgtccactaacccaagcattttctggacggaaggaaatgcgccacctagaatgtccatccctttta

SEQ ID NO: 146526 - DNA, 80 bp, synthetic construct
  source 1..80: mol_type = other DNA
atcagcacgattcggatgtacatgaagcccaagcatgtgcgcgcgtgggttccaagaccaccgcgtttatgcccatactt

SEQ ID NO: 146527 - DNA, 80 bp, synthetic construct
  source 1..80: mol_type = other DNA
aattcagctaggaattccacacccagcaggattagccaaaaagaaaaggattactgtactagatgtaggggatgcctact

SEQ ID NO: 146528 - DNA, 80 bp, synthetic construct
  source 1..80: mol_type = other DNA
cacagatagctatttctggcctcaaatatggactaacaataacacctgctgacaaatctgatcaatttgtgaaagtcaat

SEQ ID NO: 146529 - DNA, 80 bp, synthetic construct
  source 1..80: mol_type = other DNA
gcggcgtgccgctgccggtggaaggggaagacgcggtagcaccgcgggtttcgacttcttcaccctgttcttcctcgcta

SEQ ID NO: 146530 - DNA, 80 bp, synthetic construct
  source 1..80: mol_type = other DNA
gtgggcccgggagcccccgtccacaaagagggccaggtcagagtactcctccgcgctggccccgctggcgacagggaccg

SEQ ID NO: 146531 - DNA, 80 bp, synthetic construct
  source 1..80: mol_type = other DNA
cagagggatctagcccttcggggaagaagtcccccggctcggagctttccctcggtagggcgctgtaggcgtcgtatcca

SEQ ID NO: 146532 - DNA, 80 bp, synthetic construct
  source 1..80: mol_type = other DNA
tgtgaaatcaacacctccaccctcagcaatctcagacttattgaaagcagtagacagtgaggaagtgcgagaatactgca

SEQ ID NO: 146533 - DNA, 80 bp, synthetic construct
  source 1..80: mol_type = other DNA
caaaaacagacaccaactacccagcaaaaagaatgaaagaagcaaacaaagcctactttttagcagccaaaaaaaattta

SEQ ID NO: 146534 - DNA, 80 bp, synthetic construct
  source 1..80: mol_type = other DNA
gtacttgcaccaatctataacgagttcctgtctataaccgcaaaggaactaacctcaacaggctggaaagcatattataa

SEQ ID NO: 146535 - DNA, 80 bp, synthetic construct
  source 1..80: mol_type = other DNA
gcattaccactaaaatacctcaaaatgccaaaaattacatgacaaaatttaaacaagaatttccctccactacacaacta

SEQ ID NO: 146536 - DNA, 80 bp, synthetic construct
  source 1..80: mol_type = other DNA
ctgcaatgcttcttaaatcctattttaatgaaactcaaggtttaattaccaaagagcttcctgtatcaactaaaaactta

SEQ ID NO: 146537 - DNA, 80 bp, synthetic construct
  source 1..80: mol_type = other DNA
atctctatgttcatactggtgaattaatatatagaaacctacatttgtgtgagccagaagacctgaatgattcagtatta

SEQ ID NO: 146538 - DNA, 80 bp, synthetic construct
  source 1..80: mol_type = other DNA
ctcaaaggaggtccccgcgctgaccgctgttgaaacaggcgcgacgagtaaagtcgtaccgtctgatgtcatagagacac

SEQ ID NO: 146539 - DNA, 80 bp, synthetic construct
  source 1..80: mol_type = other DNA
cattccgctcctgctcatcgtcacgcccgtggtctttgaccctcagtttacgcgccatgccgtctctaccgtgctagacc

SEQ ID NO: 146540 - DNA, 80 bp, synthetic construct
  source 1..80: mol_type = other DNA
agttgaatcttttataccaatcaataacatccagactcaaattggccagattagcatgtacactatccctgtgactaaga

SEQ ID NO: 146541 - DNA, 80 bp, synthetic construct
  source 1..80: mol_type = other DNA
taccgtttgtgccatcgacgcacgttgtactgttggttgtattgttattactgcttacgatggcaactgccgcgacggct

SEQ ID NO: 146542 - DNA, 80 bp, synthetic construct
  source 1..80: mol_type = other DNA
gtggtacctacgcatgctgaatgcggagagactgtggacatagatggtagggaagtcaaggttttaaaacaacagattct

SEQ ID NO: 146543 - DNA, 80 bp, synthetic construct
  source 1..80: mol_type = other DNA
gacatgacactgttaaacctcaatgccgttgcttgcaacttgcggtttccgttctgctcaccacaaactgacaactattg

SEQ ID NO: 146544 - DNA, 80 bp, synthetic construct
  source 1..80: mol_type = other DNA
atcctggaggtatcctaagctccgacccccctaccctaccttaaggtgcgccacccttcctccttccgttttaatggtag

SEQ ID NO: 146545 - DNA, 80 bp, synthetic construct
  source 1..80: mol_type = other DNA
gtgcaaccaaaaatagggacacgtggggaactacacaatgcctgcctgataataatgattacgttgaaatcccactaaat

SEQ ID NO: 146546 - DNA, 80 bp, synthetic construct
  source 1..80: mol_type = other DNA
aattagacaaactcaaaatagtggcatatggagatgatgtcatagcctcctatcctgaggagcttgaccctgctgagatt

SEQ ID NO: 146547 - DNA, 80 bp, synthetic construct
  source 1..80: mol_type = other DNA
ggagcattcgttatccgcacacgtactacgcgaaaactagtaacatcttggattgtggggtggtgtttcactcagcgctt

SEQ ID NO: 146548 - DNA, 80 bp, synthetic construct
  source 1..80: mol_type = other DNA
gtctggctgaggtcggtgtcgctaatgccacttttttgtctcgcttcaatgtcggtgattttcacggagcgtcatgggaa

SEQ ID NO: 146549 - DNA, 80 bp, synthetic construct
  source 1..80: mol_type = other DNA
aatgaagtataatatcggtcatctatcaacttatctgctatgtaacgtacccttttaggtattttgcgtttcttaacgag

SEQ ID NO: 146550 - DNA, 80 bp, synthetic construct
  source 1..80: mol_type = other DNA
aagtatctgaaatacagaacaggagatctagagaaggtgcgctatgtcccccaccataaggtgggatgggcatggtggac

SEQ ID NO: 146551 - DNA, 80 bp, synthetic construct
  source 1..80: mol_type = other DNA
actctggtactgaggtacctttgtgcgcctgttttacttcccttccccagaaataacttagaagctttgaaccaacgatc

SEQ ID NO: 146552 - DNA, 80 bp, synthetic construct
  source 1..80: mol_type = other DNA
ggcctggctagatgagtaccagacggccggggtgtggcatagaccagtaagaacctaccacacagacacccctttttacc

SEQ ID NO: 146553 - DNA, 80 bp, synthetic construct
  source 1..80: mol_type = other DNA
agggctcccggcgccccgggagtaggcggaccaccggccccgctccgtcgagccctgccggcacccccggctccggagcc

SEQ ID NO: 146554 - DNA, 80 bp, synthetic construct
  source 1..80: mol_type = other DNA
catattttactttacagagacaaaaaaactgactacatagtaaactttcagagaaagggcccctttaagataaacaagta

SEQ ID NO: 146555 - DNA, 80 bp, synthetic construct
  source 1..80: mol_type = other DNA
tttctaaaggaactacaaaacacactatacagcacaggttcctactggaactcttttcataccatggaatacttaaatgc

SEQ ID NO: 146556 - DNA, 80 bp, synthetic construct
  source 1..80: mol_type = other DNA
ccaggaatctcaaaacctacaaccaggaaggaagcaatgttgggtactcatgtggtttgggatgttggcttacaatcaac

SEQ ID NO: 146557 - DNA, 80 bp, synthetic construct
  source 1..80: mol_type = other DNA
aaaagttgacatggctaagagaatactactttgaatgggaaactgcacaatctacaaaccatacttttaatgtacaacac

SEQ ID NO: 146558 - DNA, 80 bp, synthetic construct
  source 1..80: mol_type = other DNA
agagaactcaataacaattgcaggagactctaactataactggtatccctataatgttcaaaagtttacagacaaagtaa

SEQ ID NO: 146559 - DNA, 80 bp, synthetic construct
  source 1..80: mol_type = other DNA
ttagaaaagctgttaaacaaggacctgaacatgagtttgtgcattcacttatacgaagaaattgtcatgtggcaacaaca

SEQ ID NO: 146560 - DNA, 80 bp, synthetic construct
  source 1..80: mol_type = other DNA
agaagagaggtgagtatcctaagaaccgagcacgtataattgtttagcataatatgaatatatactatagctaataaagt

SEQ ID NO: 146561 - DNA, 80 bp, synthetic construct
  source 1..80: mol_type = other DNA
cccatgccgccacctcaggggacacccaccgccatgcagaggcctcagggtgcgcccactcccatgccgccacctcaggg

SEQ ID NO: 146562 - DNA, 80 bp, synthetic construct
  source 1..80: mol_type = other DNA
actggctgagacttaaggcggcctacctgcaatatgggtgcgagtggatccaagaagctttccaagcaatcgcaaggact

SEQ ID NO: 146563 - DNA, 80 bp, synthetic construct
  source 1..80: mol_type = other DNA
cctgcccaatatctccatccagcagtgcaaggccggggacagaccgggggacctggagatcattctacagagtaacggcg

SEQ ID NO: 146564 - DNA, 80 bp, synthetic construct
  source 1..80: mol_type = other DNA
tgaatttgctccattgtaagtgtttgccctgagtacaattttaatagttactttgattggacaattgtactataatgggt

SEQ ID NO: 146565 - DNA, 80 bp, synthetic construct
  source 1..80: mol_type = other DNA
ttccccatccgacaaaaccgtgtccctcaaaattccccacctttctctgttcaaatggccccgaaactgtaaaacaccgt

SEQ ID NO: 146566 - DNA, 80 bp, synthetic construct
  source 1..80: mol_type = other DNA
atacaagtttaaaccagacaacccagagtcacaaaactccacagacaaatactttgcaactaaagatgcactatggggag

SEQ ID NO: 146567 - DNA, 80 bp, synthetic construct
  source 1..80: mol_type = other DNA
actattgcatatacttccaggttttagatccctggtaccacacccgcctgagcataactggtggaaagccagctgaatat

SEQ ID NO: 146568 - DNA, 80 bp, synthetic construct
  source 1..80: mol_type = other DNA
tcacaaaaaccctggtactataacgggttcagcagttgggtgtgatcctgacactttctggtccgttataccatgtttga

SEQ ID NO: 146569 - DNA, 80 bp, synthetic construct
  source 1..80: mol_type = other DNA
gttcgtatgctgcatctgcccctacaccgatccccccatgtacagaaaggacaatccacagcagggatacgtattctatg

SEQ ID NO: 146570 - DNA, 80 bp, synthetic construct
  source 1..80: mol_type = other DNA
tggatgttacctgcagattgtaaaatagagagagacttaaatcttgctaacagtataataactataatagcaaatatcat

SEQ ID NO: 146571 - DNA, 80 bp, synthetic construct
  source 1..80: mol_type = other DNA
ttccatttgcccccctggactacactgcccaagcatccgaatatgtcccagtgactgtcacgatcgccccaatgtgtgct

SEQ ID NO: 146572 - DNA, 80 bp, synthetic construct
  source 1..80: mol_type = other DNA
ttttacaatcttaaaaaaatatgtattacataaagtgacaaatgtgcgagaatatcgttgacctagttggatttcctgta

SEQ ID NO: 146573 - DNA, 80 bp, synthetic construct
  source 1..80: mol_type = other DNA
tttaactctgaatttcacgattctatccttgtatcttactctagtgatttaatcatctaccgaacaaacactgaaggcaa

SEQ ID NO: 146574 - DNA, 80 bp, synthetic construct
  source 1..80: mol_type = other DNA
atgtggaggttacatttgtaatcacaagtacccaggggacatcgacgcagacaaacacagacactcccgtacttacacac

SEQ ID NO: 146575 - DNA, 80 bp, synthetic construct
  source 1..80: mol_type = other DNA
ggagggaccgcggtcgtcttgtagacgacggtgtccccgtgtcgatccgtggctcgtaccagatcttgactgctagcgtc

SEQ ID NO: 146576 - DNA, 80 bp, synthetic construct
  source 1..80: mol_type = other DNA
gccacaccatacttggcccagaccccacacacaatcggggacagaataacccagatgaggaccctttattcaactgcaat

SEQ ID NO: 146577 - DNA, 80 bp, synthetic construct
  source 1..80: mol_type = other DNA
agacatttcaaactgaacagatgtttagacccagacagagaaacccagacgggagtcctaatgctgactaccaaaactta

SEQ ID NO: 146578 - DNA, 80 bp, synthetic construct
  source 1..80: mol_type = other DNA
cgccactatggccccaggcccgtgtttgtagcttctgatgaatcattacccatgttcggtgcgagccccgcccttcacac

SEQ ID NO: 146579 - DNA, 80 bp, synthetic construct
  source 1..80: mol_type = other DNA
tcacccagtccaccggccctgcacctcggagcttctgggaaatgcgggccggccgtgatgctcccaaaattcaacaagaa

SEQ ID NO: 146580 - DNA, 80 bp, synthetic construct
  source 1..80: mol_type = other DNA
tgttcgcatcatggaccattagcgcacgacgcatggtccagatgcggcgtaagctggagattttcacctacattcggttt

SEQ ID NO: 146581 - DNA, 80 bp, synthetic construct
  source 1..80: mol_type = other DNA
ctgcagcaccggaaaccctgcgagactacttggaagctttccgaaattcggataatcacttttatctcccgacgacaggg

SEQ ID NO: 146582 - DNA, 80 bp, synthetic construct
  source 1..80: mol_type = other DNA
cgccagcgagccctggctctggatgaagccgtgtcccagtccacacaggtatgtgtgtgtctgacactcataaccttgaa

SEQ ID NO: 146583 - DNA, 80 bp, synthetic construct
  source 1..80: mol_type = other DNA
tcgacagagtgtcaaaaaaaccagacgatgatgcagagtattatccagtaccaaaaaggcctcgattcttccctccaaca

SEQ ID NO: 146584 - DNA, 80 bp, synthetic construct
  source 1..80: mol_type = other DNA
cagaccggcatagtagttccccctggcacgcccaacaagtgtgtggtgctgtgctttgtgtcagcgtgtaatgacttctc

SEQ ID NO: 146585 - DNA, 80 bp, synthetic construct
  source 1..80: mol_type = other DNA
atgaatgtggacatcttcacagtatcacacacaaaagtagacaatctctttgggcgagcatggtttttcatggagcacac

SEQ ID NO: 146586 - DNA, 80 bp, synthetic construct
  source 1..80: mol_type = other DNA
gaccggggtgttgcggggagggggtgttgcttgcagcggggacttgcgggaccgagctgaaggacagtggtggggacggg

SEQ ID NO: 146587 - DNA, 80 bp, synthetic construct
  source 1..80: mol_type = other DNA
gttcaatcacagacaaattgctcaaaactctcataaaaatcatctcaactatggtgataatttgtagaaattacgaagac

SEQ ID NO: 146588 - DNA, 80 bp, synthetic construct
  source 1..80: mol_type = other DNA
aggcatctagcaataagatgagtggagatatgggcgcttaaagtacagagtcaatgatcttttctagcctacgcttatgc

SEQ ID NO: 146589 - DNA, 80 bp, synthetic construct
  source 1..80: mol_type = other DNA
ggctgcatttggctcaggtttcactaaccaaattggggagaagatctcagagctcacgagcatggtcacaagcacaatta

SEQ ID NO: 146590 - DNA, 80 bp, synthetic construct
  source 1..80: mol_type = other DNA
tcagagatcaccttgctcagaccagcccaatcgaaaaactgagatcgtattgccggattcttcaatgcctgcatgtaaat

SEQ ID NO: 146591 - DNA, 80 bp, synthetic construct
  source 1..80: mol_type = other DNA
ccaggtagaaaccattttagaagtcaacaatgtgcccaccaacgcaaccagtttgatggaaaggctacggtttccagtgt

SEQ ID NO: 146592 - DNA, 80 bp, synthetic construct
  source 1..80: mol_type = other DNA
gtggattcatttatgccaattaacaacattgaacaaaagttagatgtacctatctataatttgacagtgactgcacagtc

SEQ ID NO: 146593 - DNA, 80 bp, synthetic construct
  source 1..80: mol_type = other DNA
aacacccccttcggaggggcactgagtaccacctcctggagcctaaaagtactgtatgaccagcaccagaggggtctcaa

SEQ ID NO: 146594 - DNA, 80 bp, synthetic construct
  source 1..80: mol_type = other DNA
ggtcggggacagggacacgagagtcccaccttcgagagattctccagcccgacggtgcgcggcagtctcggattccgcgg

SEQ ID NO: 146595 - DNA, 80 bp, synthetic construct
  source 1..80: mol_type = other DNA
cctgtatgatgagtacaaaaggtttatgaactactggacagcatctaatgaagatctagacctctgtagatacctaggag

SEQ ID NO: 146596 - DNA, 80 bp, synthetic construct
  source 1..80: mol_type = other DNA
gaaggtggggttggagacgggggcgacgcaggagactgagacgcaggaggagacgcagacgtggactcaggttcagaaag

SEQ ID NO: 146597 - DNA, 80 bp, synthetic construct
  source 1..80: mol_type = other DNA
gcgggtctccggcggtaacgacggcggtatcgtcgacacgtgtgcggcctgctgtgctctgcggaaaagcgccggtctcg

SEQ ID NO: 146598 - DNA, 80 bp, synthetic construct
  source 1..80: mol_type = other DNA
aaattggataaaattgctgcaggcaaaaccagatgtattgaggcatgtgaggtggattactgtattgtctacagaatgat

SEQ ID NO: 146599 - DNA, 80 bp, synthetic construct
  source 1..80: mol_type = other DNA
acctacatgtgattgcactcaagctacctactactgcaaacataagaatagatactacccaatcaatgtcacaagccatg

SEQ ID NO: 146600 - DNA, 80 bp, synthetic construct
  source 1..80: mol_type = other DNA
gatgggactttaattggaaacctaacaattttcccacaccaatttatcaacctcagaacaaataatacagctactataat

SEQ ID NO: 146601 - DNA, 80 bp, synthetic construct
  source 1..80: mol_type = other DNA
ttactatcggtaactccactgtcacgacgcaggattcactcaacagcgtgttggcgtatggtgaatggccagaatacctc

SEQ ID NO: 146602 - DNA, 80 bp, synthetic construct
  source 1..80: mol_type = other DNA
ccaaacacttgtgcaggttaattagaggaaaaatgacactcacagaagaagtgcagtggacagagttagcagaagcagag

SEQ ID NO: 146603 - DNA, 80 bp, synthetic construct
  source 1..80: mol_type = other DNA
ccccgtgtcgcagcgagtgccagagcaggcgctggacgcgcgccgtctcgggcgtcggcggcgcgcgacagccccggcgc

SEQ ID NO: 146604 - DNA, 80 bp, synthetic construct
  source 1..80: mol_type = other DNA
agcatggtaggccgctcaactcggcctgtcttactgcccagcctactctccacttccagtccatgttcgcactcctatgc

SEQ ID NO: 146605 - DNA, 80 bp, synthetic construct
  source 1..80: mol_type = other DNA
atttaactttcgctggggtggcaatatgctttatcagcagacaatcaaaaacccctgcacggacggacagcctaccgact

SEQ ID NO: 146606 - DNA, 80 bp, synthetic construct
  source 1..80: mol_type = other DNA
cttgaaaacacatcacacgaagtgcttcgcactggggaggacactacatttgaatttgacttcgattgcggttggatatt

SEQ ID NO: 146607 - DNA, 80 bp, synthetic construct
  source 1..80: mol_type = other DNA
ctcctagactacaaatcgagaacccgatgctcctcgatgaaggatactacttccgagcgtgggacatcagaagaggcatt

SEQ ID NO: 146608 - DNA, 80 bp, synthetic construct
  source 1..80: mol_type = other DNA
aggaggagacgagactcctattccacccgtcgccgccaaggagccaagaagagatccagcaagagcagcagcgagacatc

SEQ ID NO: 146609 - DNA, 80 bp, synthetic construct
  source 1..80: mol_type = other DNA
gaacagggaatttctagttacgttgagtcgctaggtgcagcttttggctcaggattcaccagccaaattggggagaaagt

SEQ ID NO: 146610 - DNA, 80 bp, synthetic construct
  source 1..80: mol_type = other DNA
acacaatcatcccaatcaatcacactacagcaacaacgtctagtgtcaacatgtatactgtagtgttggacaagaaaaca

SEQ ID NO: 146611 - DNA, 80 bp, synthetic construct
  source 1..80: mol_type = other DNA
tggatcacctataactgaagggggtttctcctcaacattaaactcatataataactgggtatcaggaaccggaccaagca

SEQ ID NO: 146612 - DNA, 80 bp, synthetic construct
  source 1..80: mol_type = other DNA
ctactgactttattgtccctatggcatctctagaagataaaggtaaatcattcacaagtcagtatgtgcttgcaagcaca

SEQ ID NO: 146613 - DNA, 80 bp, synthetic construct
  source 1..80: mol_type = other DNA
ggcactccgagcgccagcgaggagtgcgacccttccccctgactcaacttcttcggagccgcgcgctacgccttcggctg

SEQ ID NO: 146614 - DNA, 80 bp, synthetic construct
  source 1..80: mol_type = other DNA
ccacccagcaaagatgataatggctaaaaacaaaatactaatccctagctatgataccagacccaagggtcgccaaaaag

SEQ ID NO: 146615 - DNA, 80 bp, synthetic construct
  source 1..80: mol_type = other DNA
atcaatgattacaaaaataaaatgaagattacagattcacttgaagtgctgttccaaggcccagtgtataaagatttgga

SEQ ID NO: 146616 - DNA, 80 bp, synthetic construct
  source 1..80: mol_type = other DNA
ttggtaccaaactaattttgtcacagctccagacgcaccttctactgcggatattatttgtttagtgtccgcatgtaaag

SEQ ID NO: 146617 - DNA, 80 bp, synthetic construct
  source 1..80: mol_type = other DNA
tgccataattgaggtggacaatgaacaaccaactaccagggcccaaaaactgttcgccacatggcgaatcacctataagg

SEQ ID NO: 146618 - DNA, 80 bp, synthetic construct
  source 1..80: mol_type = other DNA
gacaataacatgttggaattgtggcaaagggggccacacagccaggcaatgcagagcccctagaagacagggatgctgga

SEQ ID NO: 146619 - DNA, 80 bp, synthetic construct
  source 1..80: mol_type = other DNA
acatttcatcaaaaagagtgatgtacccagagctttgaatagactggcaacacttgtgacaacggttaacgggactccaa

SEQ ID NO: 146620 - DNA, 80 bp, synthetic construct
  source 1..80: mol_type = other DNA
agctatggtggctgtattagcaccaccacatggagccttaaagtactctgggacgagcacactaagatgcataacacctg

SEQ ID NO: 146621 - DNA, 80 bp, synthetic construct
  source 1..80: mol_type = other DNA
ctgaagtcgcacagggcgccctaactttgtcgctcccgaagcaacaagatagtttacctgatactaaggccagtggcccg

SEQ ID NO: 146622 - DNA, 80 bp, synthetic construct
  source 1..80: mol_type = other DNA
atgaattgtgtattaatgtagacaaattaaaaagaggcttggatgatctagcaccactatatgcaaaggaaaataagatg

SEQ ID NO: 146623 - DNA, 80 bp, synthetic construct
  source 1..80: mol_type = other DNA
ggccgcaggttgtatcttccaccatacaacctgctagagcgtacttggattgataaattcatttgaatagcaatagtaat

SEQ ID NO: 146624 - DNA, 80 bp, synthetic construct
  source 1..80: mol_type = other DNA
ctcaaaggaagttcctgcactgactgccgtcgagacaggtgcgacaagcaaggtcatcccatctgatgtcatagagaccc

SEQ ID NO: 146625 - DNA, 80 bp, synthetic construct
  source 1..80: mol_type = other DNA
ggagctatcagacgtctgctcaaacaaccactacctggcgagtatgatactcaacccccgcgggtcccactcctctttct

SEQ ID NO: 146626 - DNA, 80 bp, synthetic construct
  source 1..80: mol_type = other DNA
gaggcaagcccgggtgcggtgtcaagtgtagttaggatttacttcaaacccaaacatgtgaaggcatgggtcccgagacc

SEQ ID NO: 146627 - DNA, 80 bp, synthetic construct
  source 1..80: mol_type = other DNA
caatatgctattccaacagacaatcaaaaacccttgcaaagacgacggacagcgaccttccaactccggtagactcccta

SEQ ID NO: 146628 - DNA, 80 bp, synthetic construct
  source 1..80: mol_type = other DNA
ccttagacatgagcaacagtctgtttgccactacacttttgggggaagtgctgaattactttactaactggtcaggtagt

SEQ ID NO: 146629 - DNA, 80 bp, synthetic construct
  source 1..80: mol_type = other DNA
cttcttccgagtcaaaggtcacggtcgccatcttacatcacgtgacctgctacgtcacggccgccattttagctcacaaa

SEQ ID NO: 146630 - DNA, 80 bp, synthetic construct
  source 1..80: mol_type = other DNA
tgtaaaacaaagctgtaccccagtgttttccacgacatttttcctggtaaaaaggaaccagctgcattgcatgataaaga

SEQ ID NO: 146631 - DNA, 80 bp, synthetic construct
  source 1..80: mol_type = other DNA
gcctcgaacgtgacggagaaagcttcgtacgtgcagggctgcatctttctctcgtttcccgtcatttacaacaacacgca

SEQ ID NO: 146632 - DNA, 80 bp, synthetic construct
  source 1..80: mol_type = other DNA
tcagggtactcaaggacagaccagacccaactcccagcaggatcaactgactcttctcaatcctcaagcaggaaagcaag

SEQ ID NO: 146633 - DNA, 80 bp, synthetic construct
  source 1..80: mol_type = other DNA
accagacttcactgtacaacacttttcaaaccatagctcagcttaaagaaacaggacaaaccacaaacatatctcctaat

SEQ ID NO: 146634 - DNA, 80 bp, synthetic construct
  source 1..80: mol_type = other DNA
gccgcttcgcaccgctgtatgcggtggaagcaaagcgcatttccaaattagagaacactatcaacaattatatacagttc

SEQ ID NO: 146635 - DNA, 80 bp, synthetic construct
  source 1..80: mol_type = other DNA
catcccaaaaggttggagcccatgagaactcaaatagggcgtacggtggttccaccataaattacaccactattaattat

SEQ ID NO: 146636 - DNA, 80 bp, synthetic construct
  source 1..80: mol_type = other DNA
caacaaggcgacgggcaatgggtggagactgggcggggggtatgggaacgccacattatattctgtataaatttacccgc

SEQ ID NO: 146637 - DNA, 80 bp, synthetic construct
  source 1..80: mol_type = other DNA
gaaaattaccacaacataacacgaggcgccaaagaattctgccacctaacaggtatatacagcggtccatacctatcaca

SEQ ID NO: 146638 - DNA, 80 bp, synthetic construct
  source 1..80: mol_type = other DNA
aaggctggattgtcaacatctcaagtgacgtgacagtggaaagaaatctcaaccgagccatgaccatcctgcaagccttg

SEQ ID NO: 146639 - DNA, 80 bp, synthetic construct
  source 1..80: mol_type = other DNA
gcggttgactacaccaacaaatactcaccaaattaccatacacgaactggggagaaccatggtacacttgaagaaaagca

SEQ ID NO: 146640 - DNA, 80 bp, synthetic construct
  source 1..80: mol_type = other DNA
agctccgatgtgcagtgagttcaatggtttgcgcaatgttacagccccaaagcttcaaggattgccagtgctaaatacac

SEQ ID NO: 146641 - DNA, 80 bp, synthetic construct
  source 1..80: mol_type = other DNA
caaacatcgattttgaagtgactccgatcactgataagcgtgacttcataactagtattccagtgcctaagcacatggag

SEQ ID NO: 146642 - DNA, 80 bp, synthetic construct
  source 1..80: mol_type = other DNA
cagcagaacgggaccctttgagatcagccacatgacctacctcagcactcacccccttctcatgctgctaaacaaacacc

SEQ ID NO: 146643 - DNA, 80 bp, synthetic construct
  source 1..80: mol_type = other DNA
acgcagaagaagagctagaagaacttttcagggccgctcaagaagacgatatgtaagtaggagatggcgccggccttaca

SEQ ID NO: 146644 - DNA, 80 bp, synthetic construct
  source 1..80: mol_type = other DNA
gtgtccagttctggctcccggcagcctcccttcatctccagcaggaccagtttctggagaacgtagcgagcgtagctggc

SEQ ID NO: 146645 - DNA, 80 bp, synthetic construct
  source 1..80: mol_type = other DNA
tgaagaggctaaatgtagcagagttcactgtgtgtccctgggtagtaaatattgattatcatccaactcacatgaaagca

SEQ ID NO: 146646 - DNA, 80 bp, synthetic construct
  source 1..80: mol_type = other DNA
aaatacaacagctgcacccacagcaaacgcaacaaccacatccgcaaacacaacaaccacaacaacaaaaaatgtatgga

SEQ ID NO: 146647 - DNA, 80 bp, synthetic construct
  source 1..80: mol_type = other DNA
cacaggatggcccaacaatccagacagtggagatggggacgttatataccaatcaaacagtataacaactacctggatga

SEQ ID NO: 146648 - DNA, 80 bp, synthetic construct
  source 1..80: mol_type = other DNA
tccaatgctgcacagttggtgtgcgcgaggtccatattttatccattctatatcgtgccatacatccgttctactgcagt

SEQ ID NO: 146649 - DNA, 80 bp, synthetic construct
  source 1..80: mol_type = other DNA
tagtagtgcctagctttagaaccaaaccaagagggcgcagatctataaaaatcagaataaagcccccaaaactaatgcta

SEQ ID NO: 146650 - DNA, 80 bp, synthetic construct
  source 1..80: mol_type = other DNA
atcagatcacaagccgtcagggtgcaaggcttgcccaccttaaccacccccggatctggtcagtttctaacaacagatga

SEQ ID NO: 146651 - DNA, 80 bp, synthetic construct
  source 1..80: mol_type = other DNA
ctgtgtgccggcgcacaaacactgatagccgtcgcacagggtggttccaccccggagaccccccccatccccaaccgcgc

SEQ ID NO: 146652 - DNA, 80 bp, synthetic construct
  source 1..80: mol_type = other DNA
ggccccttaccagcggggcagcttagggaaccaagagggtctgacatagcagggacaacaagcacagtagacgaacagat

SEQ ID NO: 146653 - DNA, 80 bp, synthetic construct
  source 1..80: mol_type = other DNA
agtcagaaatactacccaggataagttggaagcactgttccaggggcctccccagtttaaagagattaaaatttcagtag

SEQ ID NO: 146654 - DNA, 80 bp, synthetic construct
  source 1..80: mol_type = other DNA
ctgagaggtatggcagtcccccagctccacctgccccaccagtaacccccacgccaagcatccgtagagccaggcccgcg

SEQ ID NO: 146655 - DNA, 80 bp, synthetic construct
  source 1..80: mol_type = other DNA
gtccacgggcctgtggtcagcaaggccatccctcgcagcaccgtcaaggtgacggtgccccaggaggcctttgtggatct

SEQ ID NO: 146656 - DNA, 80 bp, synthetic construct
  source 1..80: mol_type = other DNA
gtatacaggtcccgccttgtctagtgcaaagttaatactatcttacactcccccaggagctaatggaccaacaaccagaa

SEQ ID NO: 146657 - DNA, 80 bp, synthetic construct
  source 1..80: mol_type = other DNA
ttcaggtaagtttctcatggcatacactcctccagggggtaggcaacccactactaggaaagaggcaatgcttggaacaa

SEQ ID NO: 146658 - DNA, 80 bp, synthetic construct
  source 1..80: mol_type = other DNA
actggactcaaatcttccactcactcacccctttctctaatgtctggtctattgattactcttgctttgatgccactatc

SEQ ID NO: 146659 - DNA, 80 bp, synthetic construct
  source 1..80: mol_type = other DNA
gctgaggctggtaaggggtatggattggtcatgacacctgctgacaagggagagtgtttcaatgaggtgacatggactaa

SEQ ID NO: 146660 - DNA, 80 bp, synthetic construct
  source 1..80: mol_type = other DNA
ctccgtgcccctacgccgaaagttcatgggcacaggcggccgtgcagacggccctcgagctgttctcggccctgtacccg

SEQ ID NO: 146661 - DNA, 80 bp, synthetic construct
  source 1..80: mol_type = other DNA
caacacgtaccacacgcgggcacaaaacctgcaaaagactggtgggagtacagaacaggcctattttcacctatatttct

SEQ ID NO: 146662 - DNA, 80 bp, synthetic construct
  source 1..80: mol_type = other DNA
cagggtacggtctataacactcggcaattccaccataaccacccaagagagtgcaaacgtggtggtgggttatgtgcggt

SEQ ID NO: 146663 - DNA, 80 bp, synthetic construct
  source 1..80: mol_type = other DNA
gggactcaagtaaagataacaactagaatttaccataaagcaaagcatgtaaaggcctggtgtccaagaccaccaagagc

SEQ ID NO: 146664 - DNA, 80 bp, synthetic construct
  source 1..80: mol_type = other DNA
gcgacgcggccgacgcgcgtgcccgggcagaggaggaaggcgcgacggcggcgacgacgaggaggaagacgccgtggccg

SEQ ID NO: 146665 - DNA, 80 bp, synthetic construct
  source 1..80: mol_type = other DNA
cattgatacttgatgcttacaaatacattgatctggacaaacttaaaataatagcatatggggatgatataatctttaca

SEQ ID NO: 146666 - DNA, 80 bp, synthetic construct
  source 1..80: mol_type = other DNA
tcggagggccggaaggtcccggtggtcccccaagagtcctgccagccctgccggccccggcagaccctgagccggcgcca

SEQ ID NO: 146667 - DNA, 80 bp, synthetic construct
  source 1..80: mol_type = other DNA
tggagacagcggtggctacagatcttggccttggcagataagatatatacatttcctgatccaccaactgattcgcctgt

SEQ ID NO: 146668 - DNA, 80 bp, synthetic construct
  source 1..80: mol_type = other DNA
tccgcgacccgttaacgtcgaacgggtgcgcgctgtttttgcggctctctaccgtgcctgtccgatacacgtgaggaccg

SEQ ID NO: 146669 - DNA, 80 bp, synthetic construct
  source 1..80: mol_type = other DNA
tagtgtgtttgggaccgatggtcttgaagcactggacttaaatactagtgcaggatttccatatatcagcctaggaatta

SEQ ID NO: 146670 - DNA, 80 bp, synthetic construct
  source 1..80: mol_type = other DNA
ggccaccgtccggggaaggtcagtggggtcccagctcagcaattctccaaattctctctccccaatagtgactcgcttct

SEQ ID NO: 146671 - DNA, 80 bp, synthetic construct
  source 1..80: mol_type = other DNA
ggcgtgccataactctatcagggtgataccacgcttgtggatcttatgctcacacagccatcctctagtaagcttgcaag

SEQ ID NO: 146672 - DNA, 80 bp, synthetic construct
  source 1..80: mol_type = other DNA
tctattatatctaattgctcattacaaccacattatcacaatgggtgctcaagtttccactcagaagtccggttcacacg

SEQ ID NO: 146673 - DNA, 80 bp, synthetic construct
  source 1..80: mol_type = other DNA
agaaaaggaaactgccactgctggctgtgcagactctaccgaagacacctcccatgagtcactggcgaccccctcttaga

SEQ ID NO: 146674 - DNA, 80 bp, synthetic construct
  source 1..80: mol_type = other DNA
agtttagccagtttattgttacaccaatgccccgaaagtccccccctgtccctttgggtctcaggacccagccctggagc

SEQ ID NO: 146675 - DNA, 80 bp, synthetic construct
  source 1..80: mol_type = other DNA
tcccaacaagtatttggtttcaaacttcagccaggatatgattctgttttcaaacacacactattaggtgaaattttaaa

SEQ ID NO: 146676 - DNA, 80 bp, synthetic construct
  source 1..80: mol_type = other DNA
gtgatgcacaaggggccataatatccaccacccacaccagtgaatgtgggttaaaccctatcaatgtaccaaccaacact

SEQ ID NO: 146677 - DNA, 80 bp, synthetic construct
  source 1..80: mol_type = other DNA
gtcactgtcttcgtcctcttccagctcgccctcagagtagtgctgctgcggttgcgacggtggctgggcgtgaggagcgg

SEQ ID NO: 146678 - DNA, 80 bp, synthetic construct
  source 1..80: mol_type = other DNA
actagtaccagtaaacatgtcacaagaggcagaggatgatgagaccaactgcttaatgcacccagcacaaacaagcagat

SEQ ID NO: 146679 - DNA, 80 bp, synthetic construct
  source 1..80: mol_type = other DNA
taagggataggaggacctcagcaaattatcctttaatggcagtagtagagcaacttagaatggaaaacaataccagagaa

SEQ ID NO: 146680 - DNA, 80 bp, synthetic construct
  source 1..80: mol_type = other DNA
ctataaccaacacagtgaatgctacgatagacagggtgttgaatcggccagtgtctcattcaccaacagctgctaacacc

SEQ ID NO: 146681 - DNA, 80 bp, synthetic construct
  source 1..80: mol_type = other DNA
cagtccgccactaccctaccgatccccctcactacccgtggctaccaaaaaagcccactatccagcctacatgtagggta

SEQ ID NO: 146682 - DNA, 80 bp, synthetic construct
  source 1..80: mol_type = other DNA
tatttgttgccagcttgctagctagtgcttacttaatatattgcaccaaatatgtgactgttttctatggcgtgcccgtg

SEQ ID NO: 146683 - DNA, 80 bp, synthetic construct
  source 1..80: mol_type = other DNA
tacgggtacacggggattttcgatgatacatcgcatatgacgttgaccgttgtggggatttttgacgggcaacacttttt

SEQ ID NO: 146684 - DNA, 80 bp, synthetic construct
  source 1..80: mol_type = other DNA
aaacccaaacaaagggtacgtgttctatgacgccctgttcggaaacggaaagaccccagacggacgcggacaggtagacg

SEQ ID NO: 146685 - DNA, 80 bp, synthetic construct
  source 1..80: mol_type = other DNA
ggcaactatacccacataccactgagtccccgaaccctaaatgcttgggtaaaattagtagaagaaaagaagttcggggc

SEQ ID NO: 146686 - DNA, 80 bp, synthetic construct
  source 1..80: mol_type = other DNA
ctttagtattagatacatatagacacatcaatttagataaattaaagatccttgcttatggtgatgatgtgcttttctgt

SEQ ID NO: 146687 - DNA, 80 bp, synthetic construct
  source 1..80: mol_type = other DNA
aaacgcagcgtttcctcgacggactctcgtacgacgatccgcccaccgaacagaccatcaagcgacacccacaattacgc

SEQ ID NO: 146688 - DNA, 80 bp, synthetic construct
  source 1..80: mol_type = other DNA
gttttatcaggggcctacacaggttacatatcaatactaccaaacaatgcaacagatactaaactaaatgaatttgtttc

SEQ ID NO: 146689 - DNA, 80 bp, synthetic construct
  source 1..80: mol_type = other DNA
gacagctaggatgatatgctttgtttcaggatgcaaagacttttgcttgcgcatggctagagacacaaacttacacaagc

SEQ ID NO: 146690 - DNA, 80 bp, synthetic construct
  source 1..80: mol_type = other DNA
ggggcactgccggcgttgaggcgcgctctcccggcacccccggccccgcgagatcagcccgagcctgagctatggcgtgg

SEQ ID NO: 146691 - DNA, 80 bp, synthetic construct
  source 1..80: mol_type = other DNA
ctaaccacatatggttttggccatcaaaacaaggcagtgtacgttgcaggctacaagatagtgaactaccacttagccac

SEQ ID NO: 146692 - DNA, 80 bp, synthetic construct
  source 1..80: mol_type = other DNA
tcctgatgaagaccctttcttcaattgtaatggtacactctttggtaacctcaccatctttccccatcagattattaacc

SEQ ID NO: 146693 - DNA, 80 bp, synthetic construct
  source 1..80: mol_type = other DNA
acaacaaagaccatcccaccatgggatacgtattttacaacaccaactttggaaacggaaaatgggtagatggaaaagga

SEQ ID NO: 146694 - DNA, 80 bp, synthetic construct
  source 1..80: mol_type = other DNA
tagagagtaccacgagcacagcaacaccactaataaatgacacctctccatgcatacgtacaaacaactgctcaggacta

SEQ ID NO: 146695 - DNA, 80 bp, synthetic construct
  source 1..80: mol_type = other DNA
acttcctgggaggtgatgtaggttgtagtttccaggccttccttttcatcataactgagcagggcaaagccacaaaaaat

SEQ ID NO: 146696 - DNA, 80 bp, synthetic construct
  source 1..80: mol_type = other DNA
gtcataatcaccaggaactatgaggataccaccacagtgttggccacgttggccctgttgggttgcgatgtctcaccttg

SEQ ID NO: 146697 - DNA, 80 bp, synthetic construct
  source 1..80: mol_type = other DNA
cccatggtaactttcctaaaagatgaacttaggaagaaggaaaaaatctctgctggcaagacacgtgtaatagaggctag

SEQ ID NO: 146698 - DNA, 80 bp, synthetic construct
  source 1..80: mol_type = other DNA
aacatgggctcacaagtgtctacccaacggtccggctctcatgaaaattccaactcagccacggaaggctccactattaa

SEQ ID NO: 146699 - DNA, 80 bp, synthetic construct
  source 1..80: mol_type = other DNA
ctctaaacaaaattagcaggaccggaccgttcagctacagagacgagcaccctagcgtgacgctgaccgcgaagtacaag

SEQ ID NO: 146700 - DNA, 80 bp, synthetic construct
  source 1..80: mol_type = other DNA
tgggcggtgatcagggagaacaattccccggggacacctgcacgagacccctgggctctcaggaactccgcccaggtctc

SEQ ID NO: 146701 - DNA, 80 bp, synthetic construct
  source 1..80: mol_type = other DNA
tggatccaggtagggctacagaagtgtgtcaggatgtacaatccaaccaacatcctagacataaaacagggaccaaagga

SEQ ID NO: 146702 - DNA, 80 bp, synthetic construct
  source 1..80: mol_type = other DNA
cttccaagtcctgggggacctctataacgagtgccttaacatagatctgccccctttaaaagatactcaaaaattagacg

SEQ ID NO: 146703 - DNA, 80 bp, synthetic construct
  source 1..80: mol_type = other DNA
atgctactttcttgaagaggggttttagaccagatgaaaaacacagtttcttgatacaccctgtgtaccctgaagaggaa

SEQ ID NO: 146704 - DNA, 80 bp, synthetic construct
  source 1..80: mol_type = other DNA
gtaagcttaacttaagatgtgcacttaaaccatgtagtgagggaaaagttggaaacgctaaatgctgcccattaatatgt

SEQ ID NO: 146705 - DNA, 80 bp, synthetic construct
  source 1..80: mol_type = other DNA
agtctgggccgtggctgcccgcgcgctttgcgactctgggcccgctggtgctggctcttctgctggtgctggctctgctg

SEQ ID NO: 146706 - DNA, 80 bp, synthetic construct
  source 1..80: mol_type = other DNA
tgctggtggcagacagctggccgacgagctaaagatcgtgtccgcgctgcgagacacttactcgggccacttggtccttc

SEQ ID NO: 146707 - DNA, 80 bp, synthetic construct
  source 1..80: mol_type = other DNA
accagacacgtggttaactataagacaaggtccgagagtacattagaatccttctttggtagatcagcctgtgttacgat

SEQ ID NO: 146708 - DNA, 80 bp, synthetic construct
  source 1..80: mol_type = other DNA
gtctcgttcaaacttggctttcaataaacttgcaaggcagtgtaaatttcacttgtcggtgtctacctctataagtcact

SEQ ID NO: 146709 - DNA, 80 bp, synthetic construct
  source 1..80: mol_type = other DNA
caggacaaaaagcgagactaatggccgaggctttaaaagaagccttaacgcccgcacccataccattcgctgctgctcaa

SEQ ID NO: 146710 - DNA, 80 bp, synthetic construct
  source 1..80: mol_type = other DNA
tggtttaggacctaggtacggtgggatttatacatcaaatgttaaaataatgaattaccacttgatgacaccagaagacc

SEQ ID NO: 146711 - DNA, 80 bp, synthetic construct
  source 1..80: mol_type = other DNA
atctagacaaccagtggacatataagatccatcagggcaataaaatcttaaaagtaggaaaatttgcaaagataaagaat

SEQ ID NO: 146712 - DNA, 80 bp, synthetic construct
  source 1..80: mol_type = other DNA
cccaccccctccccgcacccccggcgacgggagcccgcgcgggtggtggcgaggcggactgtccccagtgcgccccggtc

SEQ ID NO: 146713 - DNA, 80 bp, synthetic construct
  source 1..80: mol_type = other DNA
gacagccgactaacaccagtcacaaacgatggctctaactattataaagaattcttaaacgctgcatttaaaaaagacag

SEQ ID NO: 146714 - DNA, 80 bp, synthetic construct
  source 1..80: mol_type = other DNA
tccaactggtagcaaaatacaaatttgactttaactggggtggcaaccccatatccacacaggttgtcagagacccgtgc

SEQ ID NO: 146715 - DNA, 80 bp, synthetic construct
  source 1..80: mol_type = other DNA
tgaggcgacagcaattgataaacccacccaaccagaaacgtcaactgacagattttacacattaaaatcagtgaaatggg

SEQ ID NO: 146716 - DNA, 80 bp, synthetic construct
  source 1..80: mol_type = other DNA
tgagatttatgattctggaccatctaggcctatagggaccaaattcaacaaaagaaaatatctcactgcctccactaaat

SEQ ID NO: 146717 - DNA, 80 bp, synthetic construct
  source 1..80: mol_type = other DNA
tcaagccaaaacacacgtccgcatggtgccccagaccacccagagcggttgattacacccacaaatactcaccaaattat

SEQ ID NO: 146718 - DNA, 80 bp, synthetic construct
  source 1..80: mol_type = other DNA
cattcatagacttgaggaactacagttcactcagtgaacatcaaggtatcacagattatgtcacacaattagggaatgca

SEQ ID NO: 146719 - DNA, 80 bp, synthetic construct
  source 1..80: mol_type = other DNA
gggaaataaattaggacaggacatgccacctcttacccaccaactcatgttcattccgccaggtggtcccatccctaaat

SEQ ID NO: 146720 - DNA, 80 bp, synthetic construct
  source 1..80: mol_type = other DNA
atattagtccttgatagaaacgaaaaatttagggatataagaggatttatatcagaagatttagaaggattggatgccac

SEQ ID NO: 146721 - DNA, 80 bp, synthetic construct
  source 1..80: mol_type = other DNA
gcactcggagctgctcagaagaatttcaccctcaaattgtgtaaggacacagatgaagttacgcaacaggccattctgca

SEQ ID NO: 146722 - DNA, 80 bp, synthetic construct
  source 1..80: mol_type = other DNA
gcgagccggtgcgcgacggcctcggtctgctcatcgaccccacgtcggggctgctgggcgcttccatggacctgtgcttc

SEQ ID NO: 146723 - DNA, 80 bp, synthetic construct
  source 1..80: mol_type = other DNA
cactttcatgtgtgtgtgtgatggattcagcactggaaaattccttatggcatacactccacctggtggaacagtaccag

SEQ ID NO: 146724 - DNA, 80 bp, synthetic construct
  source 1..80: mol_type = other DNA
gaagaatctcttccgggcagtccagcagctggtcaagagcggcatcgtgctgtcagggcacgacatcagcgacggtggcc

SEQ ID NO: 146725 - DNA, 80 bp, synthetic construct
  source 1..80: mol_type = other DNA
ctgtgataccaatcaacaatttgcaaaacactgtgaactcaatggaagcctatcgcgtggaggtggtgccaaacgcggaa

SEQ ID NO: 146726 - DNA, 80 bp, synthetic construct
  source 1..80: mol_type = other DNA
tttatgacaaaatttaccagactccatgctactactcaggactggccgttggtataaacccttataaggattggcacttt

SEQ ID NO: 146727 - DNA, 80 bp, synthetic construct
  source 1..80: mol_type = other DNA
ctatgttactaaggctctgcacgaccccggactcagtaaagaggtcagagtaactattatatgcccatatacacaaccca

SEQ ID NO: 146728 - DNA, 80 bp, synthetic construct
  source 1..80: mol_type = other DNA
cagctcttttaaatagcattcaattaccagcactcatactttgttttgaattactaccaaatagtcagaatgggagctca

SEQ ID NO: 146729 - DNA, 80 bp, synthetic construct
  source 1..80: mol_type = other DNA
accatctccgcccttccggcaaccacggttctttccacctcagtcattgtagctccatactccgtttgactcggggttat

SEQ ID NO: 146730 - DNA, 80 bp, synthetic construct
  source 1..80: mol_type = other DNA
aatgtatacaggtcccgcactatcaagtgctaaattgattttggcatacactccaccaggaactgaaggccctaaatcca

SEQ ID NO: 146731 - DNA, 80 bp, synthetic construct
  source 1..80: mol_type = other DNA
tacgcagagtactgtgcaaaagccacaggagactccaacatagacatgaacgccagagtagtcatgaggtgtccatatac

SEQ ID NO: 146732 - DNA, 80 bp, synthetic construct
  source 1..80: mol_type = other DNA
gtagaggaggggagcaacgaccctgacctgtcccagggtcttcaggttaaacagatattgagaggagacaaagagagtta

SEQ ID NO: 146733 - DNA, 80 bp, synthetic construct
  source 1..80: mol_type = other DNA
tcagaagaccaagaacaagcaccccaacaagagacggagacgcagcaactcctccagcagctccagctccagaaacacca

SEQ ID NO: 146734 - DNA, 80 bp, synthetic construct
  source 1..80: mol_type = other DNA
aaagatagtactgactcagtggaacccccagacagtcaggagatgcaccataaagggtctcatgcccgtactgtgggcgg

SEQ ID NO: 146735 - DNA, 80 bp, synthetic construct
  source 1..80: mol_type = other DNA
acaaacacagtgcaaaatattgtgacaaacgctgggatgggagtgggtgttgggaacctaacgatattcccacatcagtg

SEQ ID NO: 146736 - DNA, 80 bp, synthetic construct
  source 1..80: mol_type = other DNA
agggtttccatatgtcacactaggggtcaagaaaaaggacatactaaatcgcaccactaaagatgttactaagctccaac

SEQ ID NO: 146737 - DNA, 80 bp, synthetic construct
  source 1..80: mol_type = other DNA
gagccacgatgctttttgtggctgtcgtgatcctgtttttcatctttctcgtctggctgcacgttctaaccatcagggac

SEQ ID NO: 146738 - DNA, 80 bp, synthetic construct
  source 1..80: mol_type = other DNA
taatgcaggcatgggggtgggtgtcggtaacttaactattttcccacaccaatggattaacttgcggaccaataacagtg

SEQ ID NO: 146739 - DNA, 80 bp, synthetic construct
  source 1..80: mol_type = other DNA
gggtgataaaagaacgtacgatgacacgctgttagtacgattctcgtcgtcgctctgggaacgacgtgatggacgacggt

SEQ ID NO: 146740 - DNA, 80 bp, synthetic construct
  source 1..80: mol_type = other DNA
ttggatttaccccactcacccaatttactcccagcataacatccattgtttgttaacaagatactgctaccacaatgggc

SEQ ID NO: 146741 - DNA, 80 bp, synthetic construct
  source 1..80: mol_type = other DNA
caccagatacaccctaagaatcctgtaccaagactggctagcccaccgtaactactggacagccagtaacaaggacttag

SEQ ID NO: 146742 - DNA, 80 bp, synthetic construct
  source 1..80: mol_type = other DNA
ataatagttcccccaaatactccaacagacatgtcaatgttggcatttgttagtgcgtgcaatgacttctctgccaggtt

SEQ ID NO: 146743 - DNA, 80 bp, synthetic construct
  source 1..80: mol_type = other DNA
aaaaacaatcctgataacactgcgaacactgaggccaataagtttaatgagtgggttgacaaaacgtttaaaacaggcaa

SEQ ID NO: 146744 - DNA, 80 bp, synthetic construct
  source 1..80: mol_type = other DNA
atcaggcaataggcttctctgcaagcacacaagcaatgacatcagtattagacacgctatacacacaaaacagttattgg

SEQ ID NO: 146745 - DNA, 80 bp, synthetic construct
  source 1..80: mol_type = other DNA
acggcctgctgtgcgcgcgctgtcagacgggcgagtaccgcgacagctgtttggaaagcgaggacggcgccccgctgtgt

SEQ ID NO: 146746 - DNA, 80 bp, synthetic construct
  source 1..80: mol_type = other DNA
tctgtcggtgaacctcttcctcactcctcttgactctcacttctacggtctccgctacccaactgcccagcacatcaagg

SEQ ID NO: 146747 - DNA, 80 bp, synthetic construct
  source 1..80: mol_type = other DNA
tcaatggaacccagctgtggtaaagaaatgcgtagttcgcggctacatgcccctgctcatctgtggcagtgggtccaccg

SEQ ID NO: 146748 - DNA, 80 bp, synthetic construct
  source 1..80: mol_type = other DNA
tccccctgtggctgcttcttggcgctcagtgtgagcagttccacgaggggcgtgagcgagcgcagggcccccgcgcgatc

SEQ ID NO: 146749 - DNA, 80 bp, synthetic construct
  source 1..80: mol_type = other DNA
tgcaaacccaggtgagaagggaggtgtgttcgtatcaacctttacacccgacacatcatcaaatccgaaacgagagtttc

SEQ ID NO: 146750 - DNA, 80 bp, synthetic construct
  source 1..80: mol_type = other DNA
cagaatagtcatgagatgcccatacacttaccctcagcttataaaacacacagaccccaactttgggttcgtggtgtaca

SEQ ID NO: 146751 - DNA, 80 bp, synthetic construct
  source 1..80: mol_type = other DNA
ttaatgcgaaatttatagattcaccaagtataattggttaacttggtggagtaaacgattttgatactaccttggtattt

SEQ ID NO: 146752 - DNA, 80 bp, synthetic construct
  source 1..80: mol_type = other DNA
ctgtctgtaaagtccagcctcccacgcccgtccacggctcccaggcccagccccgtccacccctccccacgttggacagg

SEQ ID NO: 146753 - DNA, 80 bp, synthetic construct
  source 1..80: mol_type = other DNA
tcgtcttttttccagaagcccggccagcccccgctcgtactccgcgtagggggcctccagatccgtgttgaccaccgctg

SEQ ID NO: 146754 - DNA, 80 bp, synthetic construct
  source 1..80: mol_type = other DNA
tgcacaccacaattacattttacagacacccagacacagactttatagcagtatacaacagaaaaacaccactaggtggc

SEQ ID NO: 146755 - DNA, 80 bp, synthetic construct
  source 1..80: mol_type = other DNA
acagcaatcatcacgcacaacacccttcactctctttttagtcatccatatcatcgctgtaacacagcatgtcctcgtaa

SEQ ID NO: 146756 - DNA, 80 bp, synthetic construct
  source 1..80: mol_type = other DNA
tgctaagaaaactactaatggtactggtaaaacagctgcaactctaggtgacgcagtctcagaattaaaaaacacaaatg

SEQ ID NO: 146757 - DNA, 80 bp, synthetic construct
  source 1..80: mol_type = other DNA
acaatatgcatgacatttcaggtattgcgagagttttactacacacacctaactgtcactccaaccacaactacctccac

SEQ ID NO: 146758 - DNA, 80 bp, synthetic construct
  source 1..80: mol_type = other DNA
gtcgaggagccggccctcgaagcagatgtcgacttaatgctacaggaagccggggcaggtacggtggaaacgcctagagg

SEQ ID NO: 146759 - DNA, 80 bp, synthetic construct
  source 1..80: mol_type = other DNA
gctcccctacgtcaactcactgtccattgattgtatggcaaggcacaacaattggggaattgttataatcccagtggttc

SEQ ID NO: 146760 - DNA, 80 bp, synthetic construct
  source 1..80: mol_type = other DNA
tcaccgcctggggcgcgggttcctaagaacaggaaagaagcaatgctgggtacccacgttatctgggatgtgtggctgca

SEQ ID NO: 146761 - DNA, 80 bp, synthetic construct
  source 1..80: mol_type = other DNA
tccagggattgggagacaatgagacaccaggctttattatagacttattatcctcatcaaaggacccaaaagttatcaga

SEQ ID NO: 146762 - DNA, 80 bp, synthetic construct
  source 1..80: mol_type = other DNA
gcgtggtatccgcagcacagatattgggaaagttctgataattccatcttattcagttctcagacacagatggcttgaaa

SEQ ID NO: 146763 - DNA, 80 bp, synthetic construct
  source 1..80: mol_type = other DNA
atcgtaaatgtatccgacgttaaaaatttatcgtaatatttattgtacactacggatctataaaacaaattgtacacgca

SEQ ID NO: 146764 - DNA, 80 bp, synthetic construct
  source 1..80: mol_type = other DNA
gccacataggcctcttccagctctgggccacaggcctagagctcagaaacccctggctaagatcaggcacaaacagccca

SEQ ID NO: 146765 - DNA, 80 bp, synthetic construct
  source 1..80: mol_type = other DNA
gtcgggcatggacctctagcatctgctatgcgaatgctttggatggctaattatattgtaagacaatcacggggtgaccg

SEQ ID NO: 146766 - DNA, 80 bp, synthetic construct
  source 1..80: mol_type = other DNA
gactgctcgccgccctcgacgacgaagagtaaggaggcgcagacggtggaggagggggagacgcagacgcagacagtaca

SEQ ID NO: 146767 - DNA, 80 bp, synthetic construct
  source 1..80: mol_type = other DNA
ttgagacgggcggcgcccgttctttcttttttcccggtttcccacccgtgcccgtctacgcggtccacggtctgcacacg

SEQ ID NO: 146768 - DNA, 80 bp, synthetic construct
  source 1..80: mol_type = other DNA
gcttaaacatgaaaatgagtgtaggagacgagttaagcacaacttggaggcaatattccaaggccttggtgatgatacca

SEQ ID NO: 146769 - DNA, 80 bp, synthetic construct
  source 1..80: mol_type = other DNA
tgtggtgcccgttaacaacacagccgccaacgtcaacaacatggacgcatatcgcataccagtccaggtgagcaaggtag

SEQ ID NO: 146770 - DNA, 80 bp, synthetic construct
  source 1..80: mol_type = other DNA
aacagcacgggggtgtatgggtacacaacactgaacaacatgcggaggttatatttcagacatgtgaacaaaattagccc

SEQ ID NO: 146771 - DNA, 80 bp, synthetic construct
  source 1..80: mol_type = other DNA
cgtgctacgtcactaaccacgtggcattcgcaggccaaccacagtctacgtcgtgcacttcctgggcatggtctacataa

SEQ ID NO: 146772 - DNA, 80 bp, synthetic construct
  source 1..80: mol_type = other DNA
accgatacaagacttgcactggcaaagagaatgttatataccatctgcatgcaagagagaactgctgtgttatagaaatg

SEQ ID NO: 146773 - DNA, 80 bp, synthetic construct
  source 1..80: mol_type = other DNA
atcttcacgggaatctacaccagcccacgggaccgtctacacctccagtgacccgtagagctctggccctgccggctgct

SEQ ID NO: 146774 - DNA, 80 bp, synthetic construct
  source 1..80: mol_type = other DNA
agtacagaggactgcaaacaggatatttcacccaatgaattaggcttaacatccgcccaggatgatggaccactaggctc

SEQ ID NO: 146775 - DNA, 80 bp, synthetic construct
  source 1..80: mol_type = other DNA
ccagaggtggtgatccgcgatgccccggctctccctgagggccggcaccaggaggcgccttctgagggtggccgtgtcgg

SEQ ID NO: 146776 - DNA, 80 bp, synthetic construct
  source 1..80: mol_type = other DNA
cccccctctgatggtggccggcagcctggctcaaacgctgcttggtaatctgtacgggaacatcaaccagtgggtaccgt

SEQ ID NO: 146777 - DNA, 80 bp, synthetic construct
  source 1..80: mol_type = other DNA
ctttgcactgagacacaacagttggacaattggcgttataccagtttgcccattaaatggtggaacaggaaacactaata

SEQ ID NO: 146778 - DNA, 80 bp, synthetic construct
  source 1..80: mol_type = other DNA
caaccgcagcttccttgcggtatccgttctgctcaccacaaacgaacaaccccaactgtaccttccaggtactgcgcaag

SEQ ID NO: 146779 - DNA, 80 bp, synthetic construct
  source 1..80: mol_type = other DNA
gaagtgtgtcagaatgtacaacccaaccaacgtcttagacgtaaagcagggaccaaaagaatcattccagagctatgtag

SEQ ID NO: 146780 - DNA, 80 bp, synthetic construct
  source 1..80: mol_type = other DNA
tgagggtcagccagtagaagttttgttagacacaggggctgatgactcaatagtagcaggaatagaattagggagcaatt

SEQ ID NO: 146781 - DNA, 80 bp, synthetic construct
  source 1..80: mol_type = other DNA
cgaacgcgtcccagccctcacagcagtggagactggccacacttcgcaggtcgtacccagcgacacagtgcaaactcgcc

SEQ ID NO: 146782 - DNA, 80 bp, synthetic construct
  source 1..80: mol_type = other DNA
tatatggggttcaagtagccgcccaaacaacacacaatgggcttatagttgctatacctctacagatggataacacactg

SEQ ID NO: 146783 - DNA, 80 bp, synthetic construct
  source 1..80: mol_type = other DNA
cgctggtcctgtgtgtcttgtcggatctcagtccagggcctcagcgccggctggaaatgcggccccatgtagttgcctgt

SEQ ID NO: 146784 - DNA, 80 bp, synthetic construct
  source 1..80: mol_type = other DNA
aaaaattcataaaatgtcactaattcctcttacctgtttagagtattgtgcaattcttcagcctgcctattttcaatttg

SEQ ID NO: 146785 - DNA, 80 bp, synthetic construct
  source 1..80: mol_type = other DNA
gcagcgagatcgcgacggaggagcgatcgagcgtcccgagggcgtgtgccggaggtgagtttacacaccgcagtcaaggg

SEQ ID NO: 146786 - DNA, 80 bp, synthetic construct
  source 1..80: mol_type = other DNA
gtgggccaaagttgttgaggtccaccagcagtcggtcccgttcgcccaccacgcagcggcccttgatgtttaggtcggtc

SEQ ID NO: 146787 - DNA, 80 bp, synthetic construct
  source 1..80: mol_type = other DNA
tggtatcgcagaacccaccacaagaaaggatgcaatgctaggcactcatgttatatgggatgtggggttgcagtctacaa

SEQ ID NO: 146788 - DNA, 80 bp, synthetic construct
  source 1..80: mol_type = other DNA
tgtaatatgggacataggcttacaatctacaatatcaatggtggtaccttggattagtgctagtcattacaggaacacat

SEQ ID NO: 146789 - DNA, 80 bp, synthetic construct
  source 1..80: mol_type = other DNA
cgctgcaactctgcccccaccgctcagtgctcaggcaagcgtcagccacgcactccgatacgatgacgagttgtggcgcc

SEQ ID NO: 146790 - DNA, 80 bp, synthetic construct
  source 1..80: mol_type = other DNA
ggggccatttactagcctttgactacaccaactatgatgggagtttacacccagtctggtttctgtgtttaaataaagta

SEQ ID NO: 146791 - DNA, 80 bp, synthetic construct
  source 1..80: mol_type = other DNA
aggctgcaaatgcaattgttgcctatggggagtggccaacctacataaacgataacgaggccaaccctgtcgatgcaccg

SEQ ID NO: 146792 - DNA, 80 bp, synthetic construct
  source 1..80: mol_type = other DNA
aagccctaccggcacctacaggccagaacacgcaggtaagcagccacccactagaatgtgggaaagtcccagcacttcaa

SEQ ID NO: 146793 - DNA, 80 bp, synthetic construct
  source 1..80: mol_type = other DNA
caaacaggtgatatgaatgttgtttatcaccttcatgctaaaatgaactgctgtgttatagaaatgtcacctaccggtag

SEQ ID NO: 146794 - DNA, 80 bp, synthetic construct
  source 1..80: mol_type = other DNA
gcaagacaatccacaaaacaaggactaccagttagaatgccaagtggagccaatcaattcatgacaacagaagatgagca

SEQ ID NO: 146795 - DNA, 80 bp, synthetic construct
  source 1..80: mol_type = other DNA
ctggcttactccagccgggatggcactcgttactgctccactgctcctgctttcttcctctgtgcccggcactcgttact

SEQ ID NO: 146796 - DNA, 80 bp, synthetic construct
  source 1..80: mol_type = other DNA
aaaatatgggttcagcctctcactaaacccaccacagagttcgatgaaaagagatgcaagtgtgtggtagagaacctgcc

SEQ ID NO: 146797 - DNA, 80 bp, synthetic construct
  source 1..80: mol_type = other DNA
aggcaaattaaatgtagcaatggcttgtgaactatgtaaggattgccatactccaactaattttaaaaagtgctgccctc

SEQ ID NO: 146798 - DNA, 80 bp, synthetic construct
  source 1..80: mol_type = other DNA
gaaagcaagagggataccatttagttaagggcaggaacaaccatacatggccagggcaggaagtagctactgaaaacagc

SEQ ID NO: 146799 - DNA, 80 bp, synthetic construct
  source 1..80: mol_type = other DNA
ccgcgcgcgaacaagagaaagtacggcacaacaacccgcgtcaaggacacacgcacaagaagctcgcgggcgcaagggag

SEQ ID NO: 146800 - DNA, 80 bp, synthetic construct
  source 1..80: mol_type = other DNA
acgtgcgtgtttggtgccccagaccaccgcgcgctgtaccatactacggaccaggggtggattacaagaacaacttggaa

SEQ ID NO: 146801 - DNA, 80 bp, synthetic construct
  source 1..80: mol_type = other DNA
ccattagagtttaaagaacccaaaattgacataaagacagccccaccaccacctgcaatagctgacctattacgatctgt

SEQ ID NO: 146802 - DNA, 80 bp, synthetic construct
  source 1..80: mol_type = other DNA
caagtgagtacaaagcacttctaataaaaggacgtctatattgtattgggaagtagtttccgtgtgtggttcgattatag

SEQ ID NO: 146803 - DNA, 80 bp, synthetic construct
  source 1..80: mol_type = other DNA
acagaaagtgtgtagaacacaatctcactgccatatttcaaggattgggggatgattcaacaccaggatttattgtggat

SEQ ID NO: 146804 - DNA, 80 bp, synthetic construct
  source 1..80: mol_type = other DNA
attactactccaactggtctgggtctattaaactcacatttttctgtgtttgcgatagcttcagtactggtaagttctta

SEQ ID NO: 146805 - DNA, 80 bp, synthetic construct
  source 1..80: mol_type = other DNA
aacgagtactactcacctaaagatgcacagtggggagaccccattcatattatcaataacaacgaaactacaggcaacca

SEQ ID NO: 146806 - DNA, 80 bp, synthetic construct
  source 1..80: mol_type = other DNA
ccttgcgccggcccagtagcttgatgacgatgccacatggcaccacatacccctgtttatccgatggaatgacggcgcat

SEQ ID NO: 146807 - DNA, 80 bp, synthetic construct
  source 1..80: mol_type = other DNA
tactacagcctcacactatcaaacttttgccaccgaggcacaagtgggtagaataccaagctttaacccagacggtacaa

SEQ ID NO: 146808 - DNA, 80 bp, synthetic construct
  source 1..80: mol_type = other DNA
gagtccaccgtccgatcccatgatagttactgcgggtgtggtaacactgtcactcattttaataatattgctactcgctt

SEQ ID NO: 146809 - DNA, 80 bp, synthetic construct
  source 1..80: mol_type = other DNA
caacacaagggaaaacagaaatgaacaacagccaactgatgaaagctggctcaattgtgatggcacattattaggtaata

SEQ ID NO: 146810 - DNA, 80 bp, synthetic construct
  source 1..80: mol_type = other DNA
aaaattatcaaaccaactatgaaacagtatataaaaaatttgaggaagacagaactacaaaattatcactaataaatgaa

SEQ ID NO: 146811 - DNA, 80 bp, synthetic construct
  source 1..80: mol_type = other DNA
caaagttatgacccaagttgcatccatacgaacctacgggtttggacatcaaaacaaggctatttatgtagctggatata

SEQ ID NO: 146812 - DNA, 80 bp, synthetic construct
  source 1..80: mol_type = other DNA
agcatcagaggaagcacaagatgaattaatggtaaaggtcaacaaacttgaaaaagggctccaggatcttgccccattat

SEQ ID NO: 146813 - DNA, 80 bp, synthetic construct
  source 1..80: mol_type = other DNA
cctgccgcaaaaggcccgtgtctccgtccccaccaccgtccccgccgcaaaagcccgcaagtccccgcacgcaaaagccc

SEQ ID NO: 146814 - DNA, 80 bp, synthetic construct
  source 1..80: mol_type = other DNA
agcctacaatacaaacaatctcttaaatgttgccaaagctttgctaccatgtacagattgtcccaaacctgagttcttca

SEQ ID NO: 146815 - DNA, 80 bp, synthetic construct
  source 1..80: mol_type = other DNA
tttggatgcttataaaggaatagatctagacaaacttaagattcttgcatatggagatgatctaatagtgtcttatcctt

SEQ ID NO: 146816 - DNA, 80 bp, synthetic construct
  source 1..80: mol_type = other DNA
cagtcaaggggcaattcgggctcgggactggccgggccccgggcaaggctcttaaaaaatgcactttcgcagagtgcgag

SEQ ID NO: 146817 - DNA, 80 bp, synthetic construct
  source 1..80: mol_type = other DNA
aaccacgacggagagctcctgtaaaggcgcaggccggtaccaggcagcgtgaggagcgggaggagaagaggcctccggga

SEQ ID NO: 146818 - DNA, 80 bp, synthetic construct
  source 1..80: mol_type = other DNA
taggtatacctcaccctgcaggactagcagagaaaagaagaataacagtactggacgtaggagatgcctatttcagcatt

SEQ ID NO: 146819 - DNA, 80 bp, synthetic construct
  source 1..80: mol_type = other DNA
atcgtatcgccagatgcgagtgccgatcaggagtgtactattgtgaatcaagaagaagacactaccccatcacaattaca

SEQ ID NO: 146820 - DNA, 80 bp, synthetic construct
  source 1..80: mol_type = other DNA
caagagtagtgggttccactgggggctagcactctgattctgcggaatctttgtgcgcctgttttataaccctcccccga

SEQ ID NO: 146821 - DNA, 80 bp, synthetic construct
  source 1..80: mol_type = other DNA
tccccctttacccattaattacaagagatgttagtttggttttttatttggcaaaaacagcaattcatcattttcagagt

SEQ ID NO: 146822 - DNA, 80 bp, synthetic construct
  source 1..80: mol_type = other DNA
ccgaaccctaaatgcctgggtaaaattagtagaagaaaagaagttcggggcagaagtagtgccaggattccaagcactat

SEQ ID NO: 146823 - DNA, 80 bp, synthetic construct
  source 1..80: mol_type = other DNA
accaccacacagcagcaatccacagctcccaaccccgacactcctctgctgacacaccagatcatgtatgtgcccccggg

SEQ ID NO: 146824 - DNA, 80 bp, synthetic construct
  source 1..80: mol_type = other DNA
tgggaaactcgcgtaaaatcaggcgttttcgccgatttgcgaggctggccagctccacgtcgccggccgaaatcgagcct

SEQ ID NO: 146825 - DNA, 80 bp, synthetic construct
  source 1..80: mol_type = other DNA
gcaatttccccgtccaggcaccccaggggatagtgccatctgcgcccccgatgaacccagcattcggcatgacacctcag

SEQ ID NO: 146826 - DNA, 80 bp, synthetic construct
  source 1..80: mol_type = other DNA
caggatactagtgcccagctggcagacctttcccagggggagaaaatatgttaaagttaagatacccccacctaaactct

SEQ ID NO: 146827 - DNA, 80 bp, synthetic construct
  source 1..80: mol_type = other DNA
ggtttgaccaagcaagaattttctcaggacccgtctaagttcactcaacccgtggctgatgtcttgactaacccagctct

SEQ ID NO: 146828 - DNA, 80 bp, synthetic construct
  source 1..80: mol_type = other DNA
ttcaattagtctcagccctggttcggacactcgcctttcccgaacaatgctgggtgaaatcctcaattactacacacatt

SEQ ID NO: 146829 - DNA, 80 bp, synthetic construct
  source 1..80: mol_type = other DNA
gtcacaacaacaccgccaccagaatgcattgtggatttactcaaatcagtagataatgaagaggttaggcaatactgtca

SEQ ID NO: 146830 - DNA, 80 bp, synthetic construct
  source 1..80: mol_type = other DNA
tgacgctaccacaaactgctttctaaaagtgagcagcctgtggggagaccacgtatatgacaaagacaaattaataaaag

SEQ ID NO: 146831 - DNA, 80 bp, synthetic construct
  source 1..80: mol_type = other DNA
gcgcgtttttatgacgtcacggcagccattttgtcgtgacgtttgagacacgtgatgggggaatgcgtgaacccggaagc

SEQ ID NO: 146832 - DNA, 80 bp, synthetic construct
  source 1..80: mol_type = other DNA
cagtaggagaggcattcgaatggctagagacaacattagaacatctcaacagagtagcagtcaatcacttgcccagggaa

SEQ ID NO: 146833 - DNA, 80 bp, synthetic construct
  source 1..80: mol_type = other DNA
gacatattagagcgccagataactacaatgcatgtatccaaccccacacaagaaaggagagaacagttgtttaacaatgt

SEQ ID NO: 146834 - DNA, 80 bp, synthetic construct
  source 1..80: mol_type = other DNA
ctgccagctccaccgccgcctaggcaacttctaatgtggcagccacctacccagaatggaacccaactcgaacggcactg

SEQ ID NO: 146835 - DNA, 80 bp, synthetic construct
  source 1..80: mol_type = other DNA
ttacactaaatatagatacctatgcttaatacagaaagctttatatatgcattgcaaaagagggtgccaatgtctgagag

SEQ ID NO: 146836 - DNA, 80 bp, synthetic construct
  source 1..80: mol_type = other DNA
tcacaagtcaaccccagtgacactatgcagacaaggcacgtgtgcaacttccactccagatcagagtccacgctagaaaa

SEQ ID NO: 146837 - DNA, 80 bp, synthetic construct
  source 1..80: mol_type = other DNA
aaaaaatatagattaaaacacattgtgtgggcagcgaatgaattggacagattcggattagcagagagcctgttggagtc

SEQ ID NO: 146838 - DNA, 80 bp, synthetic construct
  source 1..80: mol_type = other DNA
gttacaacggcttctccgcgcgcctcactcctgaccgtgttcaagctttcctttccaaccttgctacacctcagtctgtc

SEQ ID NO: 146839 - DNA, 80 bp, synthetic construct
  source 1..80: mol_type = other DNA
taccagaatatgtactgggtactgtgtcaggtaacacaggagttgaacacacacacccgccatacgccacgactcaaccc

SEQ ID NO: 146840 - DNA, 80 bp, synthetic construct
  source 1..80: mol_type = other DNA
aaagatgaaactacaataataacaaagggagacaaagccttctgtcacttaacaggcattttctccccaccttggctaaa

SEQ ID NO: 146841 - DNA, 80 bp, synthetic construct
  source 1..80: mol_type = other DNA
tgtgtggttaccactgagaatggtaaatttacaggattgggcatatatgacaaagtaatgatcttgcccacacatgctga

SEQ ID NO: 146842 - DNA, 80 bp, synthetic construct
  source 1..80: mol_type = other DNA
gccctgcctccaaactgctgtcggttctgcggcgccagttcggcgtcacggtcagtcgcacggcccagtggtgagccgtg

SEQ ID NO: 146843 - DNA, 80 bp, synthetic construct
  source 1..80: mol_type = other DNA
cagattttagatccctactggtataaccgccggatgtccataaccccagacctactaaagtcaaactatgaaagtttctt

SEQ ID NO: 146844 - DNA, 80 bp, synthetic construct
  source 1..80: mol_type = other DNA
tacaggtttgcctaacccgaggcccaaagtccctacgttgcgcgcagcaaaggtgcagggtccagcgtttgactacgcag

SEQ ID NO: 146845 - DNA, 80 bp, synthetic construct
  source 1..80: mol_type = other DNA
aattttcaagagcaaccacaattcagaaggaaaatagaattcttcacatatgtgagatttgacatggaaatcactgttgt

SEQ ID NO: 146846 - DNA, 80 bp, synthetic construct
  source 1..80: mol_type = other DNA
cttcctgccgctagaaatatgctggagtatattcccgagtggtattcgtacagtgctgtgggcatgagtgtggcatactg

SEQ ID NO: 146847 - DNA, 80 bp, synthetic construct
  source 1..80: mol_type = other DNA
agacctcgacgaactgttcgccgctatcgaaagagaagagtaaggaggcgccgatggcgggggaggcggtacaccagacg

SEQ ID NO: 146848 - DNA, 80 bp, synthetic construct
  source 1..80: mol_type = other DNA
aactacctgaggcactgaataggagattctaccttgacatggaattgaaaataatgcctaactactactcaactggaaac

SEQ ID NO: 146849 - DNA, 80 bp, synthetic construct
  source 1..80: mol_type = other DNA
ttgcgtccgccgttggtgtcgctggcccgcaccccgctgtgccgacgtcgtgtgggcggtgtggacgcggtgctcgaaga

SEQ ID NO: 146850 - DNA, 80 bp, synthetic construct
  source 1..80: mol_type = other DNA
cagggccagacacttccagtcctagtatgcctcaattaagtccggttgtcagtcttcatcagggacaggggcctgagaac

SEQ ID NO: 146851 - DNA, 80 bp, synthetic construct
  source 1..80: mol_type = other DNA
ttcagtgtcccactagacccagacttcaggcaatatacagcattcactttgccatcaataaataatgcagagccaggaaa

SEQ ID NO: 146852 - DNA, 80 bp, synthetic construct
  source 1..80: mol_type = other DNA
ccaactagcttacattgggggcaccaatgcgcaagttagttataaacacacccacccaggtgaaagtgggcatgagatag

SEQ ID NO: 146853 - DNA, 80 bp, synthetic construct
  source 1..80: mol_type = other DNA
atacggattagaggtgccggatccaattgagtcaatgcaaggtgctataatatctggtagtgaggagtgtactgtctgca

SEQ ID NO: 146854 - DNA, 80 bp, synthetic construct
  source 1..80: mol_type = other DNA
tacctttcttgctggtaccaaacatctttaattctaccaccagacacatcgggtgaggtttacttactagcatttgttag

SEQ ID NO: 146855 - DNA, 80 bp, synthetic construct
  source 1..80: mol_type = other DNA
taggcggaccaggccagaaggccagattaatggcagaagccttaaaggaggccatggcaccagcccccatcccatttgca

SEQ ID NO: 146856 - DNA, 80 bp, synthetic construct
  source 1..80: mol_type = other DNA
cagatgctcttacactttctccagtccacagacccaaacgccccaagagagacacccaggtcaaagaaaaaacgcccgaa

SEQ ID NO: 146857 - DNA, 80 bp, synthetic construct
  source 1..80: mol_type = other DNA
ggttttaggccttccggactacaaaaaccgccattttagtgacgtcacggccgccattttaagtaagcatggcgggcggt

SEQ ID NO: 146858 - DNA, 80 bp, synthetic construct
  source 1..80: mol_type = other DNA
ctaacataacaatgggtgcacaagtgtcatcacaaaaagtgggagcacatgagaatactaatgtggcaacgggtggttcc

SEQ ID NO: 146859 - DNA, 80 bp, synthetic construct
  source 1..80: mol_type = other DNA
agccccgtgctagatgtgttgactgaaatggctgcaccacttcaatccccaagcgcagaagcgtgcggttacagtgatag

SEQ ID NO: 146860 - DNA, 80 bp, synthetic construct
  source 1..80: mol_type = other DNA
aattccagataatagaacacactttgcttggcaatcaggaacaaatgcatctatattctggcaacttggacaaccattcc

SEQ ID NO: 146861 - DNA, 80 bp, synthetic construct
  source 1..80: mol_type = other DNA
aatgttgtgcaagccacaaccacagtaaacacgacaaacctgacccagcatccatcagcacccacaatgcctttttcacc

SEQ ID NO: 146862 - DNA, 80 bp, synthetic construct
  source 1..80: mol_type = other DNA
ctcagcaactgtctcggtctggtcaagtcgaggatacgggcgccagagtcacaggtggaggaggtcccaggcctggcgtc

SEQ ID NO: 146863 - DNA, 80 bp, synthetic construct
  source 1..80: mol_type = other DNA
cccctatatccaaatgctgctacaacagtgccctcaggccccgtaggcactgtttttaacacatttaaaacacaagaaca

SEQ ID NO: 146864 - DNA, 80 bp, synthetic construct
  source 1..80: mol_type = other DNA
aatcagctggggggacgccaacagaaagatatgcaagttggcgcattaacaccagacagatggtacagctcaggaggaag

SEQ ID NO: 146865 - DNA, 80 bp, synthetic construct
  source 1..80: mol_type = other DNA
tacctgcggtgtaaaaaactgttgtgggcgttcaccgtcgttgaccacgtaggccacgtagaggccaacattttccacca

SEQ ID NO: 146866 - DNA, 80 bp, synthetic construct
  source 1..80: mol_type = other DNA
cggcaaccgcagatcgcagcgggcgcgcctcggggctcgccggcgacacccaaggccggcaagtcgcctaaagtctcgcg

SEQ ID NO: 146867 - DNA, 80 bp, synthetic construct
  source 1..80: mol_type = other DNA
gtcttccactccttcgaccagagacgaggaatgtttactgagtcagctatcagacgtctgctcctccaaccaggccctag

SEQ ID NO: 146868 - DNA, 80 bp, synthetic construct
  source 1..80: mol_type = other DNA
gtcactattgcaccgatgtgttgggagttcaatggtctacgcaacattacaatcccagcaactcagggactccctgtcat

SEQ ID NO: 146869 - DNA, 80 bp, synthetic construct
  source 1..80: mol_type = other DNA
cgtgtactttattacaacgagcaagagtgccccctaactattggggcccgtaccgttttagaaggttttgtgtgaatgtc

SEQ ID NO: 146870 - DNA, 80 bp, synthetic construct
  source 1..80: mol_type = other DNA
gcatacccggaagcaatcctcacccacgtgactcaccacgtggtgcgtgcgtcacggccgccattttgttttacaaaatg

SEQ ID NO: 146871 - DNA, 80 bp, synthetic construct
  source 1..80: mol_type = other DNA
tcagtagcattggttggggagagggctttttatgatcccaggactgctggtagcaaatctagatttgatgacttagtaaa

SEQ ID NO: 146872 - DNA, 80 bp, synthetic construct
  source 1..80: mol_type = other DNA
gttatagcaaccaccaataaatcagatttctcaagtactgtcttgcaagattctggtgcgctcaaaagaaggttccctta

SEQ ID NO: 146873 - DNA, 80 bp, synthetic construct
  source 1..80: mol_type = other DNA
aaacgccggccggcctggtaaattttgagcagacccacggttaacaacatatccacgctgtcagccaaccgccagatctc

SEQ ID NO: 146874 - DNA, 80 bp, synthetic construct
  source 1..80: mol_type = other DNA
tctctcatgtagcagaatagagaccttttgtcgtctttttgtttgtcattacttgttttccagggaattagagagaggga

SEQ ID NO: 146875 - DNA, 80 bp, synthetic construct
  source 1..80: mol_type = other DNA
agataaatcaagcactccttctaccaacatacctgcaacagactactttcaaaccctagatgcattatggggagacccta

SEQ ID NO: 146876 - DNA, 80 bp, synthetic construct
  source 1..80: mol_type = other DNA
acattcgttataacaagctgccaagaacaagggacactattgtcccaagatatgccagtgcttacacaccaaatcatgtt

SEQ ID NO: 146877 - DNA, 80 bp, synthetic construct
  source 1..80: mol_type = other DNA
tacgttgtgcgaagtttcatctgacgtgatagttacggtgattgttgtgttataagatgatgtagcgtttgctgttacgt

SEQ ID NO: 146878 - DNA, 80 bp, synthetic construct
  source 1..80: mol_type = other DNA
catgccagtgaagccctctgacaatgttgagaccagaactacttacatgcattttgatggatcagagacagatgttgaaa

SEQ ID NO: 146879 - DNA, 80 bp, synthetic construct
  source 1..80: mol_type = other DNA
actatggcagacattctataagataacgaggagagatgaggtgagggcagaggacattgggcaggtgtgggccacggtgc

SEQ ID NO: 146880 - DNA, 80 bp, synthetic construct
  source 1..80: mol_type = other DNA
ggtaacaaccatgcggatatcaacattaagcacaaaaatcgaaaccaccacgtgtataaatacaactacaaacgttacat

SEQ ID NO: 146881 - DNA, 80 bp, synthetic construct
  source 1..80: mol_type = other DNA
gtggttcacatgttaatccaactttcttatctaatggatccagccaaacatttacagtaatcaattattacaaggacgcg

SEQ ID NO: 146882 - DNA, 80 bp, synthetic construct
  source 1..80: mol_type = other DNA
gatcacattagagtagcagtttcacattactcagcacaattggcaacacttgatatcgacccaagtccaatttctctaga

SEQ ID NO: 146883 - DNA, 80 bp, synthetic construct
  source 1..80: mol_type = other DNA
aaatccgtctagcctacatcacagctgctttgcccacaatgtgggcatttttagcagctcattcctgtgcgcaggcagac

SEQ ID NO: 146884 - DNA, 80 bp, synthetic construct
  source 1..80: mol_type = other DNA
tgtgcacaccaaagatgccatatatacatgtgcgcatctcacccaacctaatgaaaacacaattttactagcattgacag

SEQ ID NO: 146885 - DNA, 80 bp, synthetic construct
  source 1..80: mol_type = other DNA
acttttatactgtccctaacctaggaccggcaagttctaattctgacgagtgttacacaaacccctctttttcaattggg

SEQ ID NO: 146886 - DNA, 80 bp, synthetic construct
  source 1..80: mol_type = other DNA
cattgaagaatacttcaccaaggatcaggataatgctaatagatacatgtcatggaccataaatgctagaaggatggtgc

SEQ ID NO: 146887 - DNA, 80 bp, synthetic construct
  source 1..80: mol_type = other DNA
cgccctcgggacgcgtgcactccacaggccaaccaccgtgtatgtcgtacacttcctgggcgtggtctacgtcataatat

SEQ ID NO: 146888 - DNA, 80 bp, synthetic construct
  source 1..80: mol_type = other DNA
cctgtcgaaaaagactctttgccccagcaaagagaacagagaccctgggagacgagcgagagcgaaaaagagacagaagt

SEQ ID NO: 146889 - DNA, 80 bp, synthetic construct
  source 1..80: mol_type = other DNA
aagcaatagggagaaggttcttcttggatgctgatttacaagtcatcagtaaatacaagacatcaaatggtttactggat

SEQ ID NO: 146890 - DNA, 80 bp, synthetic construct
  source 1..80: mol_type = other DNA
taagcggtgctgcttccattgccagatatgttttttaaacaaggggctcggcatatgttatgaccgaaagaccagacgaa

SEQ ID NO: 146891 - DNA, 80 bp, synthetic construct
  source 1..80: mol_type = other DNA
gctgcataggagttaactcttccaaccaaacaacatattcaactctacaagagaagctttactcacaatgcacatacttt

SEQ ID NO: 146892 - DNA, 80 bp, synthetic construct
  source 1..80: mol_type = other DNA
gtgaagatcaactgtaatgaaacaaaattttatcttctttcttctttgtccatgcttcgaggggccttcatctacagaat

SEQ ID NO: 146893 - DNA, 80 bp, synthetic construct
  source 1..80: mol_type = other DNA
actgtcaccatccctgaagccctcactcgcagatttttcttagacactgatttaaaaatcatgtcaggctataaaaacca

SEQ ID NO: 146894 - DNA, 80 bp, synthetic construct
  source 1..80: mol_type = other DNA
tatgagaagcagaaaaatgtcaattttagccctataggagtgaccacaagtagaacggacattataacaacaggcacttt

SEQ ID NO: 146895 - DNA, 80 bp, synthetic construct
  source 1..80: mol_type = other DNA
aaaaccaaccatttcagctgtggaaactggccacacatcccaggtcttcccgagtgacaccatgcaaacgcgtcacgtga

SEQ ID NO: 146896 - DNA, 80 bp, synthetic construct
  source 1..80: mol_type = other DNA
gatcaacggttacagtataccatgttgggtgaaatcctgaattactacacccattggactggctccctcagattcacatt

SEQ ID NO: 146897 - DNA, 80 bp, synthetic construct
  source 1..80: mol_type = other DNA
gaactaacctcaacaggctggaaagcatattataaaaaatttttagacaaagctatgccagcaacaaaacaaagaaaagc

SEQ ID NO: 146898 - DNA, 80 bp, synthetic construct
  source 1..80: mol_type = other DNA
ctgtttcttggtggaagggggtttctgagaatagctcacacttatgatactagtggggatagagtcaatttcctgtcctc

SEQ ID NO: 146899 - DNA, 80 bp, synthetic construct
  source 1..80: mol_type = other DNA
ctcgtgttattgaagcatcaagcatcaatgacactatccatttcagaatgaagtttggaaacctcttttccagcttccac

SEQ ID NO: 146900 - DNA, 80 bp, synthetic construct
  source 1..80: mol_type = other DNA
tttgcggtggcatccaaacgtgaggtattgacaggtcaatgggcggtggcacagtggtgggctgttcacctaggctgtct

SEQ ID NO: 146901 - DNA, 80 bp, synthetic construct
  source 1..80: mol_type = other DNA
acctgattgccttagggatatgggactatttgggcagaacatgttttatcattcaatgggaagatcaggttacctaatac

SEQ ID NO: 146902 - DNA, 80 bp, synthetic construct
  source 1..80: mol_type = other DNA
agggccgcggtgtcggccagtggtggcgtggcttcggtgttgtcgtggttggcgggtgtcgcagagggagaggcgagaga

SEQ ID NO: 146903 - DNA, 80 bp, synthetic construct
  source 1..80: mol_type = other DNA
ataatgaaataagatcactaccgggcgtattttttgagttatcgagattttcaggagctaaggaagctaaaatggagaaa

SEQ ID NO: 146904 - DNA, 80 bp, synthetic construct
  source 1..80: mol_type = other DNA
taacactaacgctgaaattgctgcatctgatcaagtacacacacttctcacaacaggtgaaaacaccaaaaacattaaaa

SEQ ID NO: 146905 - DNA, 80 bp, synthetic construct
  source 1..80: mol_type = other DNA
caaccgacaggcggcatatccacccggcacattcgcggacaataagatttacaacctgtttgtgggagcgggactactgc

SEQ ID NO: 146906 - DNA, 80 bp, synthetic construct
  source 1..80: mol_type = other DNA
gcagggagtccacataaacccatgcctacagtagggcctgcacagtggctgttcccagagagaaagcccgccccgccgcc

SEQ ID NO: 146907 - DNA, 80 bp, synthetic construct
  source 1..80: mol_type = other DNA
tctactcggccaccctcgtgggcccaccagactctacacatacacccatagcctccgagccctccacatcaaatcccacc

SEQ ID NO: 146908 - DNA, 80 bp, synthetic construct
  source 1..80: mol_type = other DNA
gtggtggcaaactgctgtgtaaacatggagtaataggcattattacagctggtggagaaggacatgtggcattcatagac

SEQ ID NO: 146909 - DNA, 80 bp, synthetic construct
  source 1..80: mol_type = other DNA
gatgccaaagtaagagtgtacatgaaaccaaaacacatccgtgcgtggtgtcccaggccaccacgtgctatgccctataa

SEQ ID NO: 146910 - DNA, 80 bp, synthetic construct
  source 1..80: mol_type = other DNA
ttttcttaagtgtgactctccttacggtaaatcgcacctgtgacctcttaacccctcctccctggtacccaataacagtg

SEQ ID NO: 146911 - DNA, 80 bp, synthetic construct
  source 1..80: mol_type = other DNA
gaagctgaaccacttaaaacactgataatttttctcgatcaaaccgtactaatacttatctcaactttttggaagaaata

SEQ ID NO: 146912 - DNA, 80 bp, synthetic construct
  source 1..80: mol_type = other DNA
acaccccacctggaattagagttccgagaaacagaaaagaagcaatgcttggcacacatcttatatgggatgttggtttg

SEQ ID NO: 146913 - DNA, 80 bp, synthetic construct
  source 1..80: mol_type = other DNA
agaccagacacgtcatacaacacagatcgagatcagagtctagtattgagtctttctttgcgcgtggtgcatgtgtgact

SEQ ID NO: 146914 - DNA, 80 bp, synthetic construct
  source 1..80: mol_type = other DNA
agccttgttgtgcaatatcatcctgaacatgaagactaacgtttccggacatgcaacacataaaattaagtaacatatct

SEQ ID NO: 146915 - DNA, 80 bp, synthetic construct
  source 1..80: mol_type = other DNA
cgaactcctgcgaaaaaaccacctctaatgagctggtcccagccgctgcagaatgtcaccacccgcgagggcttctttta

SEQ ID NO: 146916 - DNA, 80 bp, synthetic construct
  source 1..80: mol_type = other DNA
cttcatagtgactgttagaacctctccccccttcaaagacacagactacactgcagcattcacgcatcccggggtactca

SEQ ID NO: 146917 - DNA, 80 bp, synthetic construct
  source 1..80: mol_type = other DNA
tatacaaaatggcggcgacagccttccgctttacacaaaatggtggtaaatttcttccgggtcaaaggtcgctgctacgt

SEQ ID NO: 146918 - DNA, 80 bp, synthetic construct
  source 1..80: mol_type = other DNA
taaagctgataactattcctcaggtggcattatatcactgtggttccaaacagactttgttagtggtaacactgctaacg

SEQ ID NO: 146919 - DNA, 80 bp, synthetic construct
  source 1..80: mol_type = other DNA
acagttgcccggaaccagtatcgcacaagatatgccaccactaacacaccaaatcatgtacataccacctgggggtccgg

SEQ ID NO: 146920 - DNA, 80 bp, synthetic construct
  source 1..80: mol_type = other DNA
cggacacacatcgcaggtagttcccagcgacaccatgcaaacgagacacgtcaacaatttccacactagatccgaatcgt

SEQ ID NO: 146921 - DNA, 80 bp, synthetic construct
  source 1..80: mol_type = other DNA
tgtcttgccaaaagggttatcggggcgcctggaggggcgacggcgtgatgcataccacttgcccgtgtggtgccaaacta

SEQ ID NO: 146922 - DNA, 80 bp, synthetic construct
  source 1..80: mol_type = other DNA
acaatgagtactactcacctaaagatgcacagtggggagaccccattcatattatctctcaatcagacactatagtcaac

SEQ ID NO: 146923 - DNA, 80 bp, synthetic construct
  source 1..80: mol_type = other DNA
aactatgataactatgatgattctattgaaaacttcaaggtgtggaaaataaacctgcaagagatggcacaaatacgtag

SEQ ID NO: 146924 - DNA, 80 bp, synthetic construct
  source 1..80: mol_type = other DNA
cccaagtaagcaagcagaatgttggttcacatgaaaatggtatctcagctagtggaggttcagtaatcaaatactttaac

SEQ ID NO: 146925 - DNA, 80 bp, synthetic construct
  source 1..80: mol_type = other DNA
gaaaagaagacgcgtgtctgtgtctgtctgattccccggaggtccctggggacacacgaaaagcaacgcccgggaggcga

SEQ ID NO: 146926 - DNA, 80 bp, synthetic construct
  source 1..80: mol_type = other DNA
gttggccatattaatcatttggcaactactctgggtcgtcctccgcgtcctgggcccccaggcggaccccgcacgccgca

SEQ ID NO: 146927 - DNA, 80 bp, synthetic construct
  source 1..80: mol_type = other DNA
agtagacccggggagagatggaccgtgggaatcaactaccgttgggcagatatgccgttactatacccagtggtctgggt

SEQ ID NO: 146928 - DNA, 80 bp, synthetic construct
  source 1..80: mol_type = other DNA
gaatctcactaaaggtgaaacagcgcataaatttgaaccaaccacaactacaggtgagcacacagtgcaatcaatagtgt

SEQ ID NO: 146929 - DNA, 80 bp, synthetic construct
  source 1..80: mol_type = other DNA
agctttgaccggtaaggctagattcactaaaactagactcacctctgattgggtggttgaggaagagtgtgaattggatt

SEQ ID NO: 146930 - DNA, 80 bp, synthetic construct
  source 1..80: mol_type = other DNA
catggtcaaccataccccagatttaccattccatttgtaagtattgcttcagcttactacatgttttatgatggctatga

SEQ ID NO: 146931 - DNA, 80 bp, synthetic construct
  source 1..80: mol_type = other DNA
gcaaaaaacgtaggagacgaaagcccaaaacagttttaaaacaatggcagccagacattacaaagaggtgctacataata

SEQ ID NO: 146932 - DNA, 80 bp, synthetic construct
  source 1..80: mol_type = other DNA
aatgaaccatcatctgaaaaatcagatagacagaattagagatcaggcagtatcaatagagacagttgtgttaatggcaa

SEQ ID NO: 146933 - DNA, 80 bp, synthetic construct
  source 1..80: mol_type = other DNA
cacctattttaggggttcccttgtgctcagaatgtcagtatatgctagcactttcaataggggacggctgcgcatgggtt

SEQ ID NO: 146934 - DNA, 80 bp, synthetic construct
  source 1..80: mol_type = other DNA
aatataaagacacagacacaccctttgaaaacagcttttacaaaaagaacaacagtctatggggagacttagtatacaaa

SEQ ID NO: 146935 - DNA, 80 bp, synthetic construct
  source 1..80: mol_type = other DNA
agtgtgtgataaatataaagattctcagggaaaattaaatgtgtcagctgcttttcgaccatgtgatgtcaacacaaaaa

SEQ ID NO: 146936 - DNA, 80 bp, synthetic construct
  source 1..80: mol_type = other DNA
cactcgatcggagtcatcaattgagaactttttgtgcagatcagcttgcgcacacatgtcatcgtatgaggccttcccaa

SEQ ID NO: 146937 - DNA, 80 bp, synthetic construct
  source 1..80: mol_type = other DNA
cggggggggcatgacggcatggtctacatcataatataagaaggcgcacttccgaatggctgagttttccacgcccgtcc

SEQ ID NO: 146938 - DNA, 80 bp, synthetic construct
  source 1..80: mol_type = other DNA
gatgccattaccctgcctgactgcgctgaatacatagacctactaaagcacacaaaacatgtcttagaaaactgttctgc

SEQ ID NO: 146939 - DNA, 80 bp, synthetic construct
  source 1..80: mol_type = other DNA
cacaacatcgatgactaatgcaactgtaatgacaatctcaccaaacggcggcataaattcatcgatacaacatgtaacta

SEQ ID NO: 146940 - DNA, 80 bp, synthetic construct
  source 1..80: mol_type = other DNA
ttttgtgggaaccccaaccaaaaaacgcttcccaagccgaagctgaaagccaactgaaagatgaagatggcgtacacacg

SEQ ID NO: 146941 - DNA, 80 bp, synthetic construct
  source 1..80: mol_type = other DNA
ggcccacgtggcgctagcactctggtattccggtacctttgtgcgcctgttttattcatcccaatccccattgtaactta

SEQ ID NO: 146942 - DNA, 80 bp, synthetic construct
  source 1..80: mol_type = other DNA
tctaggaccgtaccgtttttcaaaagcatgaggtagtgagttcgcggagatgagaccaccacttcgttgtagggatccag

SEQ ID NO: 146943 - DNA, 80 bp, synthetic construct
  source 1..80: mol_type = other DNA
caacgactcacagtgcccaccggcagcaggaacttgtcgcagcacaggaaggtcttctccaaacctttaatattgagatg

SEQ ID NO: 146944 - DNA, 80 bp, synthetic construct
  source 1..80: mol_type = other DNA
tatccacaggcaagcgaagacgctcaaaatgaactgctagtgagtattgagaaattgaagaagggattggacacactagc

SEQ ID NO: 146945 - DNA, 80 bp, synthetic construct
  source 1..80: mol_type = other DNA
agtctttgaaagctctgatcaagattgtatctgctttagtgattgtcgtgaggaaccacgacgacctggtcacggtgact

SEQ ID NO: 146946 - DNA, 80 bp, synthetic construct
  source 1..80: mol_type = other DNA
gtgcggcgtttctacgcagcttttgcgagttacgctggggacagggacggaggttgcgccgaggccgggtggtgtacgag

SEQ ID NO: 146947 - DNA, 80 bp, synthetic construct
  source 1..80: mol_type = other DNA
cagatcattaatctgaggaccaataacagcgcaaccattgtcctaccatacgtgaatgctttagctattgactcaatggt

SEQ ID NO: 146948 - DNA, 80 bp, synthetic construct
  source 1..80: mol_type = other DNA
ccagacgcagactctttagacgaaagagacgctttaagagacgcagacgaaaagctaagataaaactgactcagtggcag

SEQ ID NO: 146949 - DNA, 80 bp, synthetic construct
  source 1..80: mol_type = other DNA
ggtaactttgtgtttgagtagtactctattattacggtaatcttgtacgccagttttatatccccttccccctttgtaac

SEQ ID NO: 146950 - DNA, 80 bp, synthetic construct
  source 1..80: mol_type = other DNA
tatacgccttggaagccaagagggtggcagcactagagaagaaaattaataactacatccagttcaagtccaaatctcgc

SEQ ID NO: 146951 - DNA, 80 bp, synthetic construct
  source 1..80: mol_type = other DNA
ggcaattcgggcacgggtctggccgggctatgggcaagattctgaaaaaattcccccgttctgtactaaaacaggacatc

SEQ ID NO: 146952 - DNA, 80 bp, synthetic construct
  source 1..80: mol_type = other DNA
acgctctgtcggatgaggcaggcgatgcgcacggccgccgcctggttggtgttgccctccacggcgatacgcagttcgtc

SEQ ID NO: 146953 - DNA, 80 bp, synthetic construct
  source 1..80: mol_type = other DNA
accctttcctaattcacccagtttactcaatggcagatattcatgagtcaattagatggacaaaggacccctcaaacaca

SEQ ID NO: 146954 - DNA, 80 bp, synthetic construct
  source 1..80: mol_type = other DNA
ggacgggggcggccagacgcggaaaaaaagaggaagtcccggaggcgacggcgcaaagagggggggggtcgcgggccccg

SEQ ID NO: 146955 - DNA, 80 bp, synthetic construct
  source 1..80: mol_type = other DNA
ttcaaattggatatggaaatacttgccagggagggagacaaatatggtctaactattacacctgcagataaatctagcac

SEQ ID NO: 146956 - DNA, 80 bp, synthetic construct
  source 1..80: mol_type = other DNA
gcagagtttgcagggttgaggcaagcggtgacacaggggttaccagctgagctcaaaccaggaactaaccagtttctcac

SEQ ID NO: 146957 - DNA, 80 bp, synthetic construct
  source 1..80: mol_type = other DNA
acttctcatggtgtgtccgtacacctacccaaaactatacaacgatgcaaacccaaactacgggtacgtgtgcttttcct

SEQ ID NO: 146958 - DNA, 80 bp, synthetic construct
  source 1..80: mol_type = other DNA
cgcgctgcctgcccctgaggcatggcctggcgaaggggcagacggtggcgccggtggagacgccgccggaggccgtggtg

SEQ ID NO: 146959 - DNA, 80 bp, synthetic construct
  source 1..80: mol_type = other DNA
gaaactcgtactgactcagtggaacccagcagtagttaagaggtgcaacattaagggcggacttccaataatcatatgcg

SEQ ID NO: 146960 - DNA, 80 bp, synthetic construct
  source 1..80: mol_type = other DNA
gggaaccacaaacactagactagacacagtctggcaatatccaatgcaagcatggaatggacaggaagtaactagatatg

SEQ ID NO: 146961 - DNA, 80 bp, synthetic construct
  source 1..80: mol_type = other DNA
tggtattatgtacctttgtacgcctgttcttcccattgtaccctccccaaatttccaacccaagtaacgttagaagttac

SEQ ID NO: 146962 - DNA, 80 bp, synthetic construct
  source 1..80: mol_type = other DNA
ggggagaccatgtatataaacatggcattgtacaagccatgaaagacaatgcaaaaaacatgtacaacagccacaaacag

SEQ ID NO: 146963 - DNA, 80 bp, synthetic construct
  source 1..80: mol_type = other DNA
tgggccaagggttgccagtttatgtcacaccaggttctggtcaatttatgacaacagatgattttcaatccccatcagcc

SEQ ID NO: 146964 - DNA, 80 bp, synthetic construct
  source 1..80: mol_type = other DNA
ctaacatggctaagaaaatactactttgagtgggaaacacaaaagaacgcatcagtaaagccagaccacctaactccctc

SEQ ID NO: 146965 - DNA, 80 bp, synthetic construct
  source 1..80: mol_type = other DNA
gtcaatagacccgggtacgctcctctggccatcagcgtgaccccgatcaaagtcaaacttgtgccgacgctaaatctaga

SEQ ID NO: 146966 - DNA, 80 bp, synthetic construct
  source 1..80: mol_type = other DNA
tttctccaatgtggacacttttcattcaatggcctatgacataacaacagggagcaaaaaccccaataaattaattaggc

SEQ ID NO: 146967 - DNA, 80 bp, synthetic construct
  source 1..80: mol_type = other DNA
gtaagcctatggatttagctattcttaaatgcaaattgccatttaggtttaaaaagaattctaagtactataccaataaa

SEQ ID NO: 146968 - DNA, 80 bp, synthetic construct
  source 1..80: mol_type = other DNA
tgtgtctgtttgattccccggggaacgacggcagcgcgggtccctggggacacacgaagcacgacgcggaaaagaggaag

SEQ ID NO: 146969 - DNA, 80 bp, synthetic construct
  source 1..80: mol_type = other DNA
gggggcagccgggcggccgccggtgggtccgctgagccgctgccccgctccggatagggggtggcccaggtgggcaccgc

SEQ ID NO: 146970 - DNA, 80 bp, synthetic construct
  source 1..80: mol_type = other DNA
cgtgcaagtcctcaaaacccaagcaggtctccacctaaacccattattattaaaccaagcataaaccaggtattcatgtt

SEQ ID NO: 146971 - DNA, 80 bp, synthetic construct
  source 1..80: mol_type = other DNA
aagcccctgctaatccatgagccccgcctttaggaagcaccacgtcccggggacggaaggggacttggcgtgattttcta

SEQ ID NO: 146972 - DNA, 80 bp, synthetic construct
  source 1..80: mol_type = other DNA
gaggtaggctacattccagtaagtgacaccttttgcaatggagacacgccgtttcttgctccatacatccctgtgggctg

SEQ ID NO: 146973 - DNA, 80 bp, synthetic construct
  source 1..80: mol_type = other DNA
tctcgagtggcttggggtcctcgtcaaagacgaccctaggaccaagctcgcccaccagcttggggtcctcgtccaacacc

SEQ ID NO: 146974 - DNA, 80 bp, synthetic construct
  source 1..80: mol_type = other DNA
cgcgccgacgatggaggacgcgcagacggagacgacttccagtctggagacgtcggagaactactagatatgctagacga

SEQ ID NO: 146975 - DNA, 80 bp, synthetic construct
  source 1..80: mol_type = other DNA
atgttggggtttgttagtgcatgccctgatttcagtgtccgcttactgcgtgacacaacccacatcagtcagtctaagtt

SEQ ID NO: 146976 - DNA, 80 bp, synthetic construct
  source 1..80: mol_type = other DNA
actgacaatcacaaggcacaaaagttattcaatgactggaaaataaacctgtccagcttagtgcaactaagaagaaagct

SEQ ID NO: 146977 - DNA, 80 bp, synthetic construct
  source 1..80: mol_type = other DNA
aatgcctacacaaagcctagtatcatcttgaaaggcgcagagttggtcgttccactattccccatagtagacctggcaga

SEQ ID NO: 146978 - DNA, 80 bp, synthetic construct
  source 1..80: mol_type = other DNA
tcctgtgggccattgtcatcagtgttgtcagggtcctgtgggccattgtcatcagtgttgtcagggtcctgtgggccatt

SEQ ID NO: 146979 - DNA, 80 bp, synthetic construct
  source 1..80: mol_type = other DNA
ttggcccaggtatacaatttaatgcttgaagaagataggaaacgtacacaagttattgatgtcatggctgcaattttcca

SEQ ID NO: 146980 - DNA, 80 bp, synthetic construct
  source 1..80: mol_type = other DNA
aaatgaggagggaataatcccagattggcagaattacacctcaggaccaggaactagatggccaatgtgctttggatggc

SEQ ID NO: 146981 - DNA, 80 bp, synthetic construct
  source 1..80: mol_type = other DNA
ggtcctgaccacggtcatggccacccctgggtggatcttgagcttggcctgggcaatataggccatggaggacatcttga

SEQ ID NO: 146982 - DNA, 80 bp, synthetic construct
  source 1..80: mol_type = other DNA
tcagaatcatctcagcaatggttataatcatcagaaacaacgccgatcctcagaccataattgcaactcttactcttctt

SEQ ID NO: 146983 - DNA, 80 bp, synthetic construct
  source 1..80: mol_type = other DNA
tcacttgttggtaccaaacaaatttggttgttccacccaatacaccatcaactgctaaaatgctttgctttgtatcgggt

SEQ ID NO: 146984 - DNA, 80 bp, synthetic construct
  source 1..80: mol_type = other DNA
tgggaagtctagttataatccttggtactatctacaccatatacaagctgctctgtgtaacccaaggtgcgtatacaggc

SEQ ID NO: 146985 - DNA, 80 bp, synthetic construct
  source 1..80: mol_type = other DNA
acgctattctatcccaaccttttccatcaaacatccaaaaacgtctgaagcgaagtagctcgcgagcatatttatccaca

SEQ ID NO: 146986 - DNA, 80 bp, synthetic construct
  source 1..80: mol_type = other DNA
gaaaacagagtacgaggcctgtaaacactgggacaggccacctagaaaatatctctctgacacacctttctacccctgga

SEQ ID NO: 146987 - DNA, 80 bp, synthetic construct
  source 1..80: mol_type = other DNA
ggggcctagtattctatgacaccacatttggcgatggaaaaatgcccaatggctcaggcctagttccagtatacctacaa

SEQ ID NO: 146988 - DNA, 80 bp, synthetic construct
  source 1..80: mol_type = other DNA
agccgccaatgctgtggtatgttacgctgaatggccagagtatttatcagatgatgatgctagtgatgtcaataaaactt

SEQ ID NO: 146989 - DNA, 80 bp, synthetic construct
  source 1..80: mol_type = other DNA
tacaagtgtaaaaaggtattcctcagcgacaccgaggaataagagaggtgtaccggtgctagggtttttgggatttcttg

SEQ ID NO: 146990 - DNA, 80 bp, synthetic construct
  source 1..80: mol_type = other DNA
ttggcccgaacgctgccacctttgcgaggatcgccattgggaaaaccaacccacatgggtgcaccctccgatctgcgcgc

SEQ ID NO: 146991 - DNA, 80 bp, synthetic construct
  source 1..80: mol_type = other DNA
atgcaataacatcaaagacagtcaagtgggtagtgcgcataataagtgcgctcactattgtgatccgcaatagttctgac

SEQ ID NO: 146992 - DNA, 80 bp, synthetic construct
  source 1..80: mol_type = other DNA
gtaagttctgccccgtggattacctctttggtaatggtactctactaggtaacgcgttcgtgtttccacatcaaataatc

SEQ ID NO: 146993 - DNA, 80 bp, synthetic construct
  source 1..80: mol_type = other DNA
tagctgatacccaatgttatcttttgcggcagaaattgaaagtgctggccatatctacaatggggtgtcctaggtgggat

SEQ ID NO: 146994 - DNA, 80 bp, synthetic construct
  source 1..80: mol_type = other DNA
cagagcctgccactaatgcagatgcttttataaatgcttggctatctgcagcatttccaagcacaaataacagagtttac

SEQ ID NO: 146995 - DNA, 80 bp, synthetic construct
  source 1..80: mol_type = other DNA
acagagtacatagaggctcaggccaaatgcaccatcacaaacattcccctgtacgcggccttctttggctacgaggacta

SEQ ID NO: 146996 - DNA, 80 bp, synthetic construct
  source 1..80: mol_type = other DNA
aaacccatgcataaaaaatgacagctgcataggactaggaaatgaaaatattaggcaatgtcaatttactatgacaggac

SEQ ID NO: 146997 - DNA, 80 bp, synthetic construct
  source 1..80: mol_type = other DNA
atgattactttcttaaaagatgaacttaggaaacctgagaagatatgcacaggaaagactagaatcatagaagctagtag

SEQ ID NO: 146998 - DNA, 80 bp, synthetic construct
  source 1..80: mol_type = other DNA
acttggcagagtgccagcgctccaagcagcagaaacaggcgcctcatcaaacgctacagataaaaatatgatagagacca

SEQ ID NO: 146999 - DNA, 80 bp, synthetic construct
  source 1..80: mol_type = other DNA
actttggaaatggtaaaatgccaggaggtagtagtaatgtgcctattagaatgagagctaaatggtatcccactttattc

SEQ ID NO: 147000 - DNA, 80 bp, synthetic construct
  source 1..80: mol_type = other DNA
aaatattacagatactcataataataaaatacttaatgagttaaattcatggttaacaagtaaaggaactaacagcttac

SEQ ID NO: 147001 - DNA, 80 bp, synthetic construct
  source 1..80: mol_type = other DNA
actccccctggtggcggattgccgaaagataggatgacggctatgctcggcactcatgtcatttgggactttggtttaca

SEQ ID NO: 147002 - DNA, 80 bp, synthetic construct
  source 1..80: mol_type = other DNA
actatgagcacattagtaagggagaggttgcttctaagtttactaccaccacaacggcagaggaacacggcgtccaggct

SEQ ID NO: 147003 - DNA, 80 bp, synthetic construct
  source 1..80: mol_type = other DNA
gcaaccgagtatggatgcagagtctagtaaaaccagacacccagttcacagtgccctcatgtgtatttgtgctagaagac

SEQ ID NO: 147004 - DNA, 80 bp, synthetic construct
  source 1..80: mol_type = other DNA
gttctgcaatgggtgcggcgtcgttgacgctgtcagctcagtcccggactttactggctgggatagtgcagcaacagcaa

SEQ ID NO: 147005 - DNA, 80 bp, synthetic construct
  source 1..80: mol_type = other DNA
accgccgttctccccatccgtccgagcgccgaccgaccagccggccgattcgcccgccggggcttctggagaacgccggg

SEQ ID NO: 147006 - DNA, 80 bp, synthetic construct
  source 1..80: mol_type = other DNA
gctagttcgggagagtctctgagaaggaaccatcttgtctgtctctacgacgggctagctgggatgtagtgctgtcttga

SEQ ID NO: 147007 - DNA, 80 bp, synthetic construct
  source 1..80: mol_type = other DNA
gtggctaccccccaagcgagatatcccaaaaatatgtaaagtaaacttcaaaataaatttcacagagtaactactcgagg

SEQ ID NO: 147008 - DNA, 80 bp, synthetic construct
  source 1..80: mol_type = other DNA
tccgcagtccccgttttcaaccgttttcaaccgtttttgtttccttctccgcgactagatgttaacgcccgcggtctttc

SEQ ID NO: 147009 - DNA, 80 bp, synthetic construct
  source 1..80: mol_type = other DNA
agtgaccactatcaggtggtctaacacgtagcgcatcactatagggcacgcgatggaacatgcgtcgttgccggcattct

SEQ ID NO: 147010 - DNA, 80 bp, synthetic construct
  source 1..80: mol_type = other DNA
gctgcagcagctgagctcgtcgccgccgttgccacaggaaccggtgcctccgcagggcctttttgagggcctcgcaggct

SEQ ID NO: 147011 - DNA, 80 bp, synthetic construct
  source 1..80: mol_type = other DNA
cctccccttaactcaacccattaaccatggggcacccgcagcccatttcctccatcagccaccaatggaggtgccgtggg

SEQ ID NO: 147012 - DNA, 80 bp, synthetic construct
  source 1..80: mol_type = other DNA
aggttttataatagacctcttaagtgcctctaaagatccaaaagttattgaattctgtgagaaagaagggtggattaaac

SEQ ID NO: 147013 - DNA, 80 bp, synthetic construct
  source 1..80: mol_type = other DNA
ggtcagctcggtggaagggagggccaggtcgctgccgaaggagaccagccagcgcagagcggccagagagcgggttttgg

SEQ ID NO: 147014 - DNA, 80 bp, synthetic construct
  source 1..80: mol_type = other DNA
tcaaacctaaacacatatccacatggtgcccgcgaccaccacgggctacacaatatgttcataaatacagtccaaattat

SEQ ID NO: 147015 - DNA, 80 bp, synthetic construct
  source 1..80: mol_type = other DNA
tttttcatgatgtattcaaaggtacaaaggaacctgctgttttatcagagagagatccgcgtttagaagtggatttcaag

SEQ ID NO: 147016 - DNA, 80 bp, synthetic construct
  source 1..80: mol_type = other DNA
gcgtggataccacgccgtcgtcagttcatggtggcattgagcagccatagcaccagagtcccggcgcccggtatcagaca

SEQ ID NO: 147017 - DNA, 80 bp, synthetic construct
  source 1..80: mol_type = other DNA
aacacatacagaatccaaactttcagactgacaaagaacaagtgagtactccatatacatatgacactgtaactagctta

SEQ ID NO: 147018 - DNA, 80 bp, synthetic construct
  source 1..80: mol_type = other DNA
caattacaattacagttgcgcccatggatgccgagtacaatgggctgcgactggcggggcaccaaggattgccaactatg

SEQ ID NO: 147019 - DNA, 80 bp, synthetic construct
  source 1..80: mol_type = other DNA
tccttctgtgacagcgacatcgaagactttgagcgcgaatgttaccgggtcagcgtggccgacaatctgggcttcgagcc

SEQ ID NO: 147020 - DNA, 80 bp, synthetic construct
  source 1..80: mol_type = other DNA
acgttatggcaaccaacacagagaccaagacatcatacgtctcgtatgtgaatgcgaatccaggggagagtggtggtgtg

SEQ ID NO: 147021 - DNA, 80 bp, synthetic construct
  source 1..80: mol_type = other DNA
cacaaactgggacagttgaaacccacattaaatttagacctaatgttaaagatgtaacatcagtaatgacagcaggtcca

SEQ ID NO: 147022 - DNA, 80 bp, synthetic construct
  source 1..80: mol_type = other DNA
acccttgtatgaaggattcaggcagtacacagcctttaccttgccagcagtaaacaacatgaggccaggtaaaaggtatg

SEQ ID NO: 147023 - DNA, 80 bp, synthetic construct
  source 1..80: mol_type = other DNA
ggtgggaaaacaaccataacaagtactgggaagccagaaatgacaagacttttagcgagtcaaaagccctaagtcacaaa

SEQ ID NO: 147024 - DNA, 80 bp, synthetic construct
  source 1..80: mol_type = other DNA
aacaacactctgggaaatataagtggcataggaacctacttagaccaaccatcaactaataacataggacaaacattatc

SEQ ID NO: 147025 - DNA, 80 bp, synthetic construct
  source 1..80: mol_type = other DNA
actttctatacagatggatcctgcaataggcagtcaaaagaaggaaaagcaggatacataacagatagaggaagagacaa

SEQ ID NO: 147026 - DNA, 80 bp, synthetic construct
  source 1..80: mol_type = other DNA
ctgtggccccttcatgcccagagatcaggaagcaggctcttgggacataactgtaggttacaaagcaacctttaaatggg

SEQ ID NO: 147027 - DNA, 80 bp, synthetic construct
  source 1..80: mol_type = other DNA
tcccatcctttcaattaagttaacattgtatatatgattatcccgtcctgtctacagaatcacgatatacctcgtaattg

SEQ ID NO: 147028 - DNA, 80 bp, synthetic construct
  source 1..80: mol_type = other DNA
agacgcaggtactccttgtcaggctttttcagaaggcctttattaggtcttaggaaagggttatagaagagtcccccgga

SEQ ID NO: 147029 - DNA, 80 bp, synthetic construct
  source 1..80: mol_type = other DNA
tagtaaaaagcctagaaaccaaaaaaacaggcaaaaaatatgtaaaatttagagtaaaaccaccaaaactaatgcttaac

SEQ ID NO: 147030 - DNA, 80 bp, synthetic construct
  source 1..80: mol_type = other DNA
cagtaaccgttagaataagaccccccaaactatttcaagacaagtggtacacccagcaggacctgtgttcagttcctctt

SEQ ID NO: 147031 - DNA, 80 bp, synthetic construct
  source 1..80: mol_type = other DNA
tttaagacatttccattgtgctgaagagcaaggtatcacagattacatacacatgctaggtgaggcctttggcactgggt

SEQ ID NO: 147032 - DNA, 80 bp, synthetic construct
  source 1..80: mol_type = other DNA
tcaggttgtatacacatgtcaacaatgaatataaattatgagaactatgatgatgctcctgaaaattttaccaaatggaa

SEQ ID NO: 147033 - DNA, 80 bp, synthetic construct
  source 1..80: mol_type = other DNA
acaggtgaccgtgtactggtacgcgtgttacgatgtcgagagtttgtcagtgtaattggatattggttacttatgtgtgt

SEQ ID NO: 147034 - DNA, 80 bp, synthetic construct
  source 1..80: mol_type = other DNA
accccaaactagtggacagcacagatgagaccataggctttgtacccataggctacaactttgccaggggcagaatgccc

SEQ ID NO: 147035 - DNA, 80 bp, synthetic construct
  source 1..80: mol_type = other DNA
catccaaaacctaggcaacgcatttggtgccggtttcaccgagaccatctcagagaaggcaagagaaatccagggtatgc

SEQ ID NO: 147036 - DNA, 80 bp, synthetic construct
  source 1..80: mol_type = other DNA
acgtcggcgaccgttgtggtaacgacggccacgtctgagaaagccacgttggtggagcacgcggaaggtatggcttccga

SEQ ID NO: 147037 - DNA, 80 bp, synthetic construct
  source 1..80: mol_type = other DNA
cataggaaacatgatttggatagaccccataacaaaatccaacagcagatatgatgaaggcaaatccaaatgccttatag

SEQ ID NO: 147038 - DNA, 80 bp, synthetic construct
  source 1..80: mol_type = other DNA
atggggttcacaaatggacttgactgatccactacgtttagaagaatctgcagaggaatgcaaacagaccatatcgccaa

SEQ ID NO: 147039 - DNA, 80 bp, synthetic construct
  source 1..80: mol_type = other DNA
tataccttttgttggactatgcaacgcttacagtatgttatttgacgtttgttctagctttatgcagtcaggtggctacc

SEQ ID NO: 147040 - DNA, 80 bp, synthetic construct
  source 1..80: mol_type = other DNA
catacagattactagaggagattcaacaataacttcacaagatgtggccaatgctgttgtcgcatacggtgtttggccgc

SEQ ID NO: 147041 - DNA, 80 bp, synthetic construct
  source 1..80: mol_type = other DNA
aaaccgccccaggagcagaagggggagggcaacaagacatagaggaagatgatgaggacaatgaagtagtggtatatgtc

SEQ ID NO: 147042 - DNA, 80 bp, synthetic construct
  source 1..80: mol_type = other DNA
agcgagctacgtcacgtatgcgtacgtcacctccggcggaaatcatctctgatgacgtagcgagcgaagcgagctacgtc

SEQ ID NO: 147043 - DNA, 80 bp, synthetic construct
  source 1..80: mol_type = other DNA
gcggtgacgatggtgtggacggcgcgttgcgggaccgtggacggaggtggcgccggagacacggggtgacgtcggagaca

SEQ ID NO: 147044 - DNA, 80 bp, synthetic construct
  source 1..80: mol_type = other DNA
aacgtaacatgccgtcttggtatagcgtgagtgacgacagcgtcaggtccggcggtgattcgttcgggtctagctccaat

SEQ ID NO: 147045 - DNA, 80 bp, synthetic construct
  source 1..80: mol_type = other DNA
gagtcatgaaaggtgtgggaccagctgaaccaggagattgtggtggcatacttagatgcatacatggtccaattggactg

SEQ ID NO: 147046 - DNA, 80 bp, synthetic construct
  source 1..80: mol_type = other DNA
aatacgtgttaggcacagtgtcaggaaacacaggagtagagcacacgcaccctccattcgccaccacccagccaggtcca

SEQ ID NO: 147047 - DNA, 80 bp, synthetic construct
  source 1..80: mol_type = other DNA
cggcacattacccgagcacttactgtagttcaagcagtatcatcatttgtagtagtctcagggatgctatatatgatcta

SEQ ID NO: 147048 - DNA, 80 bp, synthetic construct
  source 1..80: mol_type = other DNA
ctggtgccattcacgctcccactgtttcagactctaaagcactggccagaaggtttaaatttgatgttgacatagaagtc

SEQ ID NO: 147049 - DNA, 80 bp, synthetic construct
  source 1..80: mol_type = other DNA
gtgaaacagggcgcattatcggctcacgagataataacatgacagggcagccgacagatgagagttggttaaactgtgat

SEQ ID NO: 147050 - DNA, 80 bp, synthetic construct
  source 1..80: mol_type = other DNA
accgacgccaccggcggtcgttcaggtggaaagcggcgtccgcgaggacggggaaacggtcgccgccgtgtcggcctttg

SEQ ID NO: 147051 - DNA, 80 bp, synthetic construct
  source 1..80: mol_type = other DNA
caccgtcgtacctttgctgtagtggttgggcaggataaaatcgcggcaggcgcactcgtccagcagcgaggtgtagatac

SEQ ID NO: 147052 - DNA, 80 bp, synthetic construct
  source 1..80: mol_type = other DNA
cttgatacatcctacttttccagttgaagagatttatgagtccatcagatggacgaagaaaccatctcaaatgcaggaac

SEQ ID NO: 147053 - DNA, 80 bp, synthetic construct
  source 1..80: mol_type = other DNA
aagacaatgacatagcaggcacatatggaaaaccccagggacacgaagctaagtatttcaactaccagctaggtatatac

SEQ ID NO: 147054 - DNA, 80 bp, synthetic construct
  source 1..80: mol_type = other DNA
agaacgggccgccagtcgcttaatgacggcaatgtgcggcaggttagattgacggtacaacgagatgtccttagaaagca

SEQ ID NO: 147055 - DNA, 80 bp, synthetic construct
  source 1..80: mol_type = other DNA
taaccttttgctcaaggagtctctgctagaggactttaagggctaccttggatgccaggccctgtcagaaatgatccaat

SEQ ID NO: 147056 - DNA, 80 bp, synthetic construct
  source 1..80: mol_type = other DNA
gtggtatgggatgttggcttacagtccactgtatcaatggtggttccctgggtttccgcaagtcactataggcttaccac

SEQ ID NO: 147057 - DNA, 80 bp, synthetic construct
  source 1..80: mol_type = other DNA
caatgttggagactagatatgtatacaacacaaacacaaatgttgaagcagaaattgaaatgtttcttggtaggtctgca

SEQ ID NO: 147058 - DNA, 80 bp, synthetic construct
  source 1..80: mol_type = other DNA
agaaaaatttatagatttgaattatgaaaatgccacatttctgaaaagaggatttcaaccagaccaaaaacattcattcc

SEQ ID NO: 147059 - DNA, 80 bp, synthetic construct
  source 1..80: mol_type = other DNA
agcaatactctaggaaatctatctgacataggaaactacttagagcaaccaacaacttctaacataggacagacattatc

SEQ ID NO: 147060 - DNA, 80 bp, synthetic construct
  source 1..80: mol_type = other DNA
taaaacctatcaatacccccagtaaaactaaattacacccaagtgttttctataatgtctttccaggcaccaaggaacca

SEQ ID NO: 147061 - DNA, 80 bp, synthetic construct
  source 1..80: mol_type = other DNA
cctatggttactttcttaaaggatgaacttaggaagcatgaaaagataatcaagggtaaaactagagtcattgaggctag

SEQ ID NO: 147062 - DNA, 80 bp, synthetic construct
  source 1..80: mol_type = other DNA
ctatggatatgtatagaataccactaagtacaactgggagtaatgatcctattttctgcttgagtctctccccggcgtct

SEQ ID NO: 147063 - DNA, 80 bp, synthetic construct
  source 1..80: mol_type = other DNA
tttcagtgacgtcacaggcgccatcttagattggcgcccgggaactgacgtcacagttcaaaggtcaggccctcggcgtc

SEQ ID NO: 147064 - DNA, 80 bp, synthetic construct
  source 1..80: mol_type = other DNA
aattccactgttaccagcctcatagccaacattgactggatagataagaaccttactaatattactgtgagtgcagaagt

SEQ ID NO: 147065 - DNA, 80 bp, synthetic construct
  source 1..80: mol_type = other DNA
acttcacaggatgttgcaaatgctgtggtggcttatggcatatggccagagtatttatctgcccaagatgccagtgctat

SEQ ID NO: 147066 - DNA, 80 bp, synthetic construct
  source 1..80: mol_type = other DNA
gcatgatgaatacaccagtgccgggtatgttacatgttggtaccaaaccagcattgttgtgccacccgagacccctacac

SEQ ID NO: 147067 - DNA, 80 bp, synthetic construct
  source 1..80: mol_type = other DNA
ttcagcttttttgtctacatgcggtccaccaccacctcccgttgttaccacaactttgtaccatgagttactattttgag

SEQ ID NO: 147068 - DNA, 80 bp, synthetic construct
  source 1..80: mol_type = other DNA
agcttacgggcagaacaagcggacacggccgtgagagcgtggatgacagagacactactggtccagaatgctaacccaga

SEQ ID NO: 147069 - DNA, 80 bp, synthetic construct
  source 1..80: mol_type = other DNA
tctcattcagaaagtagtgatagaggtgattgaccacagtctggaccaggccctggacttgttcaggctcccacttgtcc

SEQ ID NO: 147070 - DNA, 80 bp, synthetic construct
  source 1..80: mol_type = other DNA
atgttctgctcatggcgctagcacactggttctgcgggacctttgtgcgcctgttttataacccttcccttaagcagtaa

SEQ ID NO: 147071 - DNA, 80 bp, synthetic construct
  source 1..80: mol_type = other DNA
cctgcggtttccgttcggctcaccacaaacagaaaactattgcatatacttccaggttttagatccctggtaccacaccc

SEQ ID NO: 147072 - DNA, 80 bp, synthetic construct
  source 1..80: mol_type = other DNA
agtttgtggttgcagctagtagccctgccacaaagcccaatacaggggcgtacccagacttcgcccacaccaacccaggt

SEQ ID NO: 147073 - DNA, 80 bp, synthetic construct
  source 1..80: mol_type = other DNA
gggagagtatcaagaatgtgggacccagtgacatgtatgtccacactcaagatgcaaaatacatgtgtgcccacttgaca

SEQ ID NO: 147074 - DNA, 80 bp, synthetic construct
  source 1..80: mol_type = other DNA
gaaacatgccatttttgcaaccatttatcccaatctcgtggttttgccgttggtacccttgcctcacacaccagcgtgaa

SEQ ID NO: 147075 - DNA, 80 bp, synthetic construct
  source 1..80: mol_type = other DNA
attccacagtggcctcctacttgttgcaatagtgccagaacatcagttagcatatattggtgggacaaatgccattgtcg

SEQ ID NO: 147076 - DNA, 80 bp, synthetic construct
  source 1..80: mol_type = other DNA
acgacaagaaatatactaactggggaaactggtggaaatatgacttctataccaccaaggcagacagcctgtatggctac

SEQ ID NO: 147077 - DNA, 80 bp, synthetic construct
  source 1..80: mol_type = other DNA
gagaatcagatccattatctacttgttcattggatttactccattgacaacatacacatacgaccttattagagtcaatt

SEQ ID NO: 147078 - DNA, 80 bp, synthetic construct
  source 1..80: mol_type = other DNA
tccaaagatgggcaacacaaaaccctcacaataacacactatatggtggctcagtatatgccacaaaaacagacagcaca

SEQ ID NO: 147079 - DNA, 80 bp, synthetic construct
  source 1..80: mol_type = other DNA
gaaactttacagaccactatgacgatgtgttccccaagggacccagcggaggtgggcacgggagcatggtgttcaacctg

SEQ ID NO: 147080 - DNA, 80 bp, synthetic construct
  source 1..80: mol_type = other DNA
atattcaggtgaacccaaaccgattactagaaaaccagagagaagagttgtcacccaagggcctcaggaggaatttggac

SEQ ID NO: 147081 - DNA, 80 bp, synthetic construct
  source 1..80: mol_type = other DNA
ccatagagaactttctgtgtcgctctgcgtgcgcaaccatcgtcacatacaacacaaacatcagtgacaacttcacaaac

SEQ ID NO: 147082 - DNA, 80 bp, synthetic construct
  source 1..80: mol_type = other DNA
ttcagaagctgccacaatagtatcagcaatacagtttacagacttttccaagagttagctaggatccccagtcggatcaa

SEQ ID NO: 147083 - DNA, 80 bp, synthetic construct
  source 1..80: mol_type = other DNA
gagccaggtgattgtggcggcatcttgagatgtgttcatggtcccataggcctcctcactgcagggggtagtgggtttgt

SEQ ID NO: 147084 - DNA, 80 bp, synthetic construct
  source 1..80: mol_type = other DNA
caactatctccacactttcaacctgccttaaaagccaccaacacaacatctacctcaaaccctaccaaaacaacactagg

SEQ ID NO: 147085 - DNA, 80 bp, synthetic construct
  source 1..80: mol_type = other DNA
agtgccttacataaatgctgtacctatggacaacatgcttagacacaataacctaacactaatgatagtgcccattgtac

SEQ ID NO: 147086 - DNA, 80 bp, synthetic construct
  source 1..80: mol_type = other DNA
ggtatggggtatggccacattatctaacctcacgtgatgctactgctatagataaaccttcacaaccagacacatcttcc

SEQ ID NO: 147087 - DNA, 80 bp, synthetic construct
  source 1..80: mol_type = other DNA
gctatgaacagaagatttttccttgatttagatatagttgttaaagatgaatataagcttagtcagggtaagctcaatct

SEQ ID NO: 147088 - DNA, 80 bp, synthetic construct
  source 1..80: mol_type = other DNA
tcgtgtccctggactattcgtctgatgcctctacatatgtgcccataaccgtcaccgttgcgccaatgtgtgcagagtac

SEQ ID NO: 147089 - DNA, 80 bp, synthetic construct
  source 1..80: mol_type = other DNA
aaacctgctgatcttgcggcgttcataaaggccaaggccggcatgaatgtcactcctgctgacaaatctgatgtctttcc

SEQ ID NO: 147090 - DNA, 80 bp, synthetic construct
  source 1..80: mol_type = other DNA
ggggaaacaggacatgcaattggttcaaataatcgtagaaatgacaaacaacctgatgaagaccctttctttaactgtaa

SEQ ID NO: 147091 - DNA, 80 bp, synthetic construct
  source 1..80: mol_type = other DNA
tgtagttagtgaaaaatataaggatcaacagggaaaactcaatgttgctgctgcattccaaccttgtgatgttgatgcta

SEQ ID NO: 147092 - DNA, 80 bp, synthetic construct
  source 1..80: mol_type = other DNA
gcctagcaactccaccagcatccctgctctcaccgcggttgaaaccgggcacacttcacaggtagaaccgagtgatacaa

SEQ ID NO: 147093 - DNA, 80 bp, synthetic construct
  source 1..80: mol_type = other DNA
attagttttccacgcccgtccgcagcgagaacgcaacggaggagcgaccgcgcgtcccgagggcgggtgccgaaggtgag

SEQ ID NO: 147094 - DNA, 80 bp, synthetic construct
  source 1..80: mol_type = other DNA
tgttttatgatgtattcaaaggaaccaaggaaccagctgtgttatctgagagagatccacgcttagaaacagatttcaag

SEQ ID NO: 147095 - DNA, 80 bp, synthetic construct
  source 1..80: mol_type = other DNA
ataggtttagtcttaggcatacatgttgggggtaatggtagaaatggcttctcggcaatgttgttaaggtcatactttaa

SEQ ID NO: 147096 - DNA, 80 bp, synthetic construct
  source 1..80: mol_type = other DNA
actgttggatacaatcatacacacccaggtgagtcagggagacgaattgggggttttgatggcactgaacgcaacagaca

SEQ ID NO: 147097 - DNA, 80 bp, synthetic construct
  source 1..80: mol_type = other DNA
ctccgagtcctgctccaagagatgttcaagacccaagcgaacctgcacctaaacccatatatattcacccagcagtgaac

SEQ ID NO: 147098 - DNA, 80 bp, synthetic construct
  source 1..80: mol_type = other DNA
gtgttttatgatgtgttccctggttcaaaagaaccagctgtgctgtctgacaaggatactagattgcaggttgattttaa

SEQ ID NO: 147099 - DNA, 80 bp, synthetic construct
  source 1..80: mol_type = other DNA
tgggtttactctaactaacttctccatttataaacttgtcatcacagttttaataattagaagtgcagtttacaatgggc

SEQ ID NO: 147100 - DNA, 80 bp, synthetic construct
  source 1..80: mol_type = other DNA
agaaaatttataagaccaccaaaattaatgaaaaaccaatggtattttcaacaacaactagcaccatatccactactaca

SEQ ID NO: 147101 - DNA, 80 bp, synthetic construct
  source 1..80: mol_type = other DNA
cgcgtaccagcgcttcaagctgctgagacaggagctacatccaatgcttctgacgagaatctgatagaaacaaggtgtgt

SEQ ID NO: 147102 - DNA, 80 bp, synthetic construct
  source 1..80: mol_type = other DNA
gtaaacagtgcagtgacagatatgagaatagccataataagtccctacactgaaccagcacttatagggtcaacagcaga

SEQ ID NO: 147103 - DNA, 80 bp, synthetic construct
  source 1..80: mol_type = other DNA
tccagggaatctttgggccatggccttggggaccttcccggagaccggtctgggctctcggaagccctcgtttcggcccc

SEQ ID NO: 147104 - DNA, 80 bp, synthetic construct
  source 1..80: mol_type = other DNA
agcaatgttgccccctaacctgtggcaaggctttgattctacaaaataaaagaacaaaggctagttactccatcaacact

SEQ ID NO: 147105 - DNA, 80 bp, synthetic construct
  source 1..80: mol_type = other DNA
tgtgctagtggctcctctgaaggatgggcggaggttgttgccacaaagcccaggatgaactcgtctgcataagcccaggt

SEQ ID NO: 147106 - DNA, 80 bp, synthetic construct
  source 1..80: mol_type = other DNA
cttgcgtgggtcctgaagcactttagtgacctggaaccgtctatcgccgcccagattgagaatgacgccaatgccgcaaa

SEQ ID NO: 147107 - DNA, 80 bp, synthetic construct
  source 1..80: mol_type = other DNA
cctccgagtctttcacaccttgcaggaaagcctaggtgatacagcaacagaaagctattagccggtggttcccccaccat

SEQ ID NO: 147108 - DNA, 80 bp, synthetic construct
  source 1..80: mol_type = other DNA
ttggtgcctccagtgatgcaactccagaatccacaatagagactaggtatgtatataacacaaacacaaatgcagaagca

SEQ ID NO: 147109 - DNA, 80 bp, synthetic construct
  source 1..80: mol_type = other DNA
ttaactgctgcagagactgggcacacttcacaagtcgttccgagtgacacaatgcagacccgttgtgtgaagaaccacca

SEQ ID NO: 147110 - DNA, 80 bp, synthetic construct
  source 1..80: mol_type = other DNA
gttcaaaggaactaaactttaaaacaggtatgtactctgccatatttttaacaaacggtagactaagccctgactatcct

SEQ ID NO: 147111 - DNA, 80 bp, synthetic construct
  source 1..80: mol_type = other DNA
atggccccaacttcacttcacaggaagtaaaaatggtggcatggtgggtaggtatagagcaatcctttggagtaccttac

SEQ ID NO: 147112 - DNA, 80 bp, synthetic construct
  source 1..80: mol_type = other DNA
taaaacaaaactataccccagtgttttctatgacatctttcctggaaaaaaagaaccagctgctctaagtgacaaagacc

SEQ ID NO: 147113 - DNA, 80 bp, synthetic construct
  source 1..80: mol_type = other DNA
accagaaagagatctagcagtggtgagtctacaaggacatggttcagaaacagtaccacaatgcaaatgcacttctggag

SEQ ID NO: 147114 - DNA, 80 bp, synthetic construct
  source 1..80: mol_type = other DNA
cagggtgtggaccaaattgccagatgctcatgtaagactggagtatacttttgcgcatctcgccaaaagcattatccagt

SEQ ID NO: 147115 - DNA, 80 bp, synthetic construct
  source 1..80: mol_type = other DNA
cctcgcagcctacaagcagttgacccgaagcacgtctcaccgcccctcgtcttccacagctgggacatcagacgcggcat

SEQ ID NO: 147116 - DNA, 80 bp, synthetic construct
  source 1..80: mol_type = other DNA
tttaacaggcatatttagtcctccatacctatcacaaggcagaataagtccagaaataccaggcttatacacagaaataa

SEQ ID NO: 147117 - DNA, 80 bp, synthetic construct
  source 1..80: mol_type = other DNA
gccccgttaatcttttgtcacttgcggtcagcgcatgttccttcctgcatccgtttataccaccagaaagtgacaacata

SEQ ID NO: 147118 - DNA, 80 bp, synthetic construct
  source 1..80: mol_type = other DNA
ggactccgagggcgcggtcatcttttacttttcggttttttcgttggcgggtcagaggtagtcagatcatgagactgtcg

SEQ ID NO: 147119 - DNA, 80 bp, synthetic construct
  source 1..80: mol_type = other DNA
ctgcaatttttcactcgtagtgatacctatagcccctcttgcattcaatgagggtgcaacctcagccataccaatcacca

SEQ ID NO: 147120 - DNA, 80 bp, synthetic construct
  source 1..80: mol_type = other DNA
acccggtccgccgccgagtggtggtcctcgggagaggctcacaccaccactagtaagaagcctgcccgcactcccggctg

SEQ ID NO: 147121 - DNA, 80 bp, synthetic construct
  source 1..80: mol_type = other DNA
atcttcagttccttttataccaccaatggcagacttaccagataagggtaaacacttcacatcagagtatgttctagcaa

SEQ ID NO: 147122 - DNA, 80 bp, synthetic construct
  source 1..80: mol_type = other DNA
aactggaaataactctatatatggctttccctcatataaaccagacaaaaacaaactacacaaaattttagactggtttt

SEQ ID NO: 147123 - DNA, 80 bp, synthetic construct
  source 1..80: mol_type = other DNA
gaatgaaacggcggatgctggagacacatattatggccaaacttcaatcaacgattttggagcaatcgcccttagagtgg

SEQ ID NO: 147124 - DNA, 80 bp, synthetic construct
  source 1..80: mol_type = other DNA
atcgagcgcgctcttgaggcgctcgtgaaacagcagctcgcgctggctttcctcgggcgagttgtagtcgcggtggcggc

SEQ ID NO: 147125 - DNA, 80 bp, synthetic construct
  source 1..80: mol_type = other DNA
tcaaacagcaatcatagtaccaccaagcacccccacagcaatgtacatgttagcgttcgttagcgcatgtaatgacttct

SEQ ID NO: 147126 - DNA, 80 bp, synthetic construct
  source 1..80: mol_type = other DNA
gcagatccctgcaaccaacccacctatgaaatgcccggaaccggtaacctgcctcgcagagtacaagtcactgacccgaa

SEQ ID NO: 147127 - DNA, 80 bp, synthetic construct
  source 1..80: mol_type = other DNA
gatgcccagggaacccccaaaagtaagtgttagcttcaagctaggatttaaaccctaataaaatttcaaggccgtgggag

SEQ ID NO: 147128 - DNA, 80 bp, synthetic construct
  source 1..80: mol_type = other DNA
gtaaccttggctataaagaggtaattaacgtaacagcatatgtcggtggatacgtaactctccaaaaatgcaacaaaaca

SEQ ID NO: 147129 - DNA, 80 bp, synthetic construct
  source 1..80: mol_type = other DNA
gatcaaagacatgcccctgtgggccctcctcaacggatacgcggactacctagagactcaagtacagtggggcgacctca

SEQ ID NO: 147130 - DNA, 80 bp, synthetic construct
  source 1..80: mol_type = other DNA
gacttagaaactcaaatgctagaagccaatacattctatacaactgcaggcaaacaactaataaagaactttacacccat

SEQ ID NO: 147131 - DNA, 80 bp, synthetic construct
  source 1..80: mol_type = other DNA
gatattgtgaggaaaataaatggataatccccgcagattgtagacgtgagcgggatcttaattatgcaaatctaataata

SEQ ID NO: 147132 - DNA, 80 bp, synthetic construct
  source 1..80: mol_type = other DNA
ttgaggacacctggagccctgatcattctcggcttttactgccacctggcttctgttgggtcagacagtttggtgcgcta

SEQ ID NO: 147133 - DNA, 80 bp, synthetic construct
  source 1..80: mol_type = other DNA
agaccacctaaatttgattacaccttatgttaatagagatttagcagttgtgtttactggagcacacggtgcagaaacta

SEQ ID NO: 147134 - DNA, 80 bp, synthetic construct
  source 1..80: mol_type = other DNA
agcaagactgggaaacagaatatcaaacatgcgccgctttagacagacccgcgcgcacaaacctaagcagccccccgttt

SEQ ID NO: 147135 - DNA, 80 bp, synthetic construct
  source 1..80: mol_type = other DNA
aacggccactattcaaggggacagagtggcagatgtgattgagagctctataggagatagtgtgagtaaggccctcaccc

SEQ ID NO: 147136 - DNA, 80 bp, synthetic construct
  source 1..80: mol_type = other DNA
ccggacacgggataatttcatctacctatacggagatcgcggtcctcgccatgaggatcgcgacaggcgcgtcgagggtg

SEQ ID NO: 147137 - DNA, 80 bp, synthetic construct
  source 1..80: mol_type = other DNA
gacacatagtcaattacaaaaccagatcagagtcaacactggagtcgttcttcggaagatcagcgtgtgtcaccatcctc

SEQ ID NO: 147138 - DNA, 80 bp, synthetic construct
  source 1..80: mol_type = other DNA
atagggcaactaacattaggtacagtgttgatcaactagtcacagccattatcaatgattacagaaacaagataaaaatt

SEQ ID NO: 147139 - DNA, 80 bp, synthetic construct
  source 1..80: mol_type = other DNA
tgcaacaatggttgccccgtggatttccaatgtgaattacaggaggtgtgtcaaagatgattttactgagggcgggtaca

SEQ ID NO: 147140 - DNA, 80 bp, synthetic construct
  source 1..80: mol_type = other DNA
agtaagtcaggtaaactgaatgtggcacaagctatgcctgtcatggcaactggggactgttgggaagtgtcaaagaatgg

SEQ ID NO: 147141 - DNA, 80 bp, synthetic construct
  source 1..80: mol_type = other DNA
ggtgtggcggcgacagcggggtcttcttccgacacgggcgacggcaggctcggcggcgcggacagcacccgttgcgccgg

SEQ ID NO: 147142 - DNA, 80 bp, synthetic construct
  source 1..80: mol_type = other DNA
aactagaaattactgtgttaaaattagacagaaatgaaaaattcagggacatacgtaagtatatacctgaatcagaagat

SEQ ID NO: 147143 - DNA, 80 bp, synthetic construct
  source 1..80: mol_type = other DNA
tcaaggaaactgatccagtctcaaacttcttcaagtggctggtcagagtctttggctacattcttgttgtctttggctcc

SEQ ID NO: 147144 - DNA, 80 bp, synthetic construct
  source 1..80: mol_type = other DNA
ttacacaaagtcaaggtggtaacaaggatatatcacaaagccaaacacaccaaagcttggtgtccaaggccacctagagc

SEQ ID NO: 147145 - DNA, 80 bp, synthetic construct
  source 1..80: mol_type = other DNA
caacatggaacatcacatatacagatacggtgcaactgcgaaggaaactggaattttttacgtattccaggtttgacttg

SEQ ID NO: 147146 - DNA, 80 bp, synthetic construct
  source 1..80: mol_type = other DNA
ataatcgcagtgataccagaacaccaacttgcttatgtggggggggtgaaagttaatatagggtatgatcacacacaccc

SEQ ID NO: 147147 - DNA, 80 bp, synthetic construct
  source 1..80: mol_type = other DNA
tcatgggggttgataactacaatgagagtttgtctggtactcaaaaatccactttgtttgccacctggaatatcacgtac

SEQ ID NO: 147148 - DNA, 80 bp, synthetic construct
  source 1..80: mol_type = other DNA
gcaggcgtgggcaacgcgccacgcactgacattgcgaccacgccgccgcgctgacgccgcgcactgccatgccgtcagca

SEQ ID NO: 147149 - DNA, 80 bp, synthetic construct
  source 1..80: mol_type = other DNA
ccacacatatgacacagaagaaggaagagacaaatttttgtcgtccaatggtgtgattacaattcctgctggtgaacaga

SEQ ID NO: 147150 - DNA, 80 bp, synthetic construct
  source 1..80: mol_type = other DNA
tacaacctttagaactggaaacaatacaatatatggacaaccaggttacagaccagaccatgaaaaactaacaaaaataa

SEQ ID NO: 147151 - DNA, 80 bp, synthetic construct
  source 1..80: mol_type = other DNA
ctccaccaacaatactcaaacatataaccctagtggtacactagaagaaattacatggggacaatcagactggcaggcct

SEQ ID NO: 147152 - DNA, 80 bp, synthetic construct
  source 1..80: mol_type = other DNA
tactacatgttttatgatgggtatagtaatagaaaacgcccccaggacaatgtgtatggtatatcccccactaatgatat

SEQ ID NO: 147153 - DNA, 80 bp, synthetic construct
  source 1..80: mol_type = other DNA
agtcgcctgcgcttccagtgtcgccgtccgttctccccgcggaatcaccgccgtcgctttctccctcggagtcggcagag

SEQ ID NO: 147154 - DNA, 80 bp, synthetic construct
  source 1..80: mol_type = other DNA
caaatgcttactcacacttttatgatggcttttctaagatccctctgaaaaatcaaacagtggctctgggcgattcactt

SEQ ID NO: 147155 - DNA, 80 bp, synthetic construct
  source 1..80: mol_type = other DNA
ccactgagggcggcatgccttctggcatctgtgggacatccatatttaatacaatgattaacaatatcattctcagaaca

SEQ ID NO: 147156 - DNA, 80 bp, synthetic construct
  source 1..80: mol_type = other DNA
attcctcagcaacaccgaggaataagagaggggtctttgtgctagggttcttgggatttctcgcaacggcaggttctgca

SEQ ID NO: 147157 - DNA, 80 bp, synthetic construct
  source 1..80: mol_type = other DNA
gtcacgttatgtgtgtcgttaaaagacggcgcctgtacagtatggctttgagttgtatcttgaattgttattgcatctgg

SEQ ID NO: 147158 - DNA, 80 bp, synthetic construct
  source 1..80: mol_type = other DNA
catatctgagacgatgttccgctgtcccagaccagtccagtaatggacgggccagtgcgcgtagtcgtcttccggcttgt

SEQ ID NO: 147159 - DNA, 80 bp, synthetic construct
  source 1..80: mol_type = other DNA
gaccaccaccagcatacaaagtaacatttaagcttggatttaaaccacaataaaaatacaaggccgtgggagtttcactt

SEQ ID NO: 147160 - DNA, 80 bp, synthetic construct
  source 1..80: mol_type = other DNA
tagcataagtagctggctaaatgacacaggaatagatactaaaattaattcatttttacaacaagctttacctatgctag

SEQ ID NO: 147161 - DNA, 80 bp, synthetic construct
  source 1..80: mol_type = other DNA
ccagtcttcacaattagagttgatattgcatcacagccactagccaccacacttataggtgaaatctccagctattacac

SEQ ID NO: 147162 - DNA, 80 bp, synthetic construct
  source 1..80: mol_type = other DNA
aagacaataagtctacgtagaagactaggccggccatcgattcgatttaggtgttcacctcagagctgccagtttttatg

SEQ ID NO: 147163 - DNA, 80 bp, synthetic construct
  source 1..80: mol_type = other DNA
aattgccaatcttaatgaaattagaaagcagtactttaaatgggaaacagatgaaggcccccaggccacatctgattatg

SEQ ID NO: 147164 - DNA, 80 bp, synthetic construct
  source 1..80: mol_type = other DNA
tactactctaaaagcaaagacagatactttccagtggagtgtgttagtcatgactggtatgaaatacaagaatctggcta

SEQ ID NO: 147165 - DNA, 80 bp, synthetic construct
  source 1..80: mol_type = other DNA
tccccgccgcaatcaacaccccgtccccagcgcaacccccggccccccgtccccaacgtcggccgaaaaccctcgtggcc

SEQ ID NO: 147166 - DNA, 80 bp, synthetic construct
  source 1..80: mol_type = other DNA
cttcttcggcagagcagcatgtgtgtgcgtgaagcggtatcaaattcgaggaactgagggatcaacagataggtacgcca

SEQ ID NO: 147167 - DNA, 80 bp, synthetic construct
  source 1..80: mol_type = other DNA
agctaacattggaaattgtatggaagcgctattccaaggcccattgcaatacaaagacttgaagatagatataaagacca

SEQ ID NO: 147168 - DNA, 80 bp, synthetic construct
  source 1..80: mol_type = other DNA
gagaaaaagatcttcaaaaagggctaaggttactgcgcctactgcatcaaacgagtgagtatggcacatatcaataagta

SEQ ID NO: 147169 - DNA, 80 bp, synthetic construct
  source 1..80: mol_type = other DNA
ctggcattcaggagaagatgagtacaacaagtttgtggatggaattaggagtactgacattgggaaagcattgctaatac

SEQ ID NO: 147170 - DNA, 80 bp, synthetic construct
  source 1..80: mol_type = other DNA
aaataccttgatgatagggaagccaatcccgtggatgcacctactgaaccagatgtaagcagcaatagattttacacact

SEQ ID NO: 147171 - DNA, 80 bp, synthetic construct
  source 1..80: mol_type = other DNA
aactactcatcttcataagtcaccatgtccgcaactatggagcccagatcatacgtggggtagagtacggtagttccagt

SEQ ID NO: 147172 - DNA, 80 bp, synthetic construct
  source 1..80: mol_type = other DNA
tcggtgtctacctctaaaggtcactaagcactccgagcgtcagcgaggagtgcgaccctgggggtgggtgcaacgccctc

SEQ ID NO: 147173 - DNA, 80 bp, synthetic construct
  source 1..80: mol_type = other DNA
cgagctctctatctcctacctgctggtctacgtgcccaaagaggacgatttttgccacaagatttgttatgccgtggaca

SEQ ID NO: 147174 - DNA, 80 bp, synthetic construct
  source 1..80: mol_type = other DNA
agtactgtgagaaggagggacttatccacaggtctaaaacaacactggaaaggaaccttgaaaggacacaatattatctc

SEQ ID NO: 147175 - DNA, 80 bp, synthetic construct
  source 1..80: mol_type = other DNA
tggcccccgtaataatgtattagaagtcttgcaacgtgaccaatagctagtaaagcaacccagctttacttgggtcaagt

SEQ ID NO: 147176 - DNA, 80 bp, synthetic construct
  source 1..80: mol_type = other DNA
ggaaaatttcttatagcctatacaccaccgggaggtggtctacccaagaacagaaaggatgcaatgcttggtgttcatgt

SEQ ID NO: 147177 - DNA, 80 bp, synthetic construct
  source 1..80: mol_type = other DNA
atagttagtgttgagaaaagtggcgttttcatcaacgccccagcaaaaaccaagttagaacctagtgttttccatgaagt

SEQ ID NO: 147178 - DNA, 80 bp, synthetic construct
  source 1..80: mol_type = other DNA
gtggcagacacattacctaaaacatcactacgatttatgttttacatgcgatcagaatttatctttgtctctgtacggtc

SEQ ID NO: 147179 - DNA, 80 bp, synthetic construct
  source 1..80: mol_type = other DNA
gcagatattgatgccacatcagtagacaaacccacccaccctgagacttcatctgataggttttacaccctagctagtgt

SEQ ID NO: 147180 - DNA, 80 bp, synthetic construct
  source 1..80: mol_type = other DNA
tcatacctgagcaccagttgtcttacatagggggagatggcacgaatgtcaaatacaagcacacccacccaggtgaagca

SEQ ID NO: 147181 - DNA, 80 bp, synthetic construct
  source 1..80: mol_type = other DNA
gtgtgttttactagacctgcccctgtgggccatgttctatggctacactgactttatagaagcagagctaggcatctccg

SEQ ID NO: 147182 - DNA, 80 bp, synthetic construct
  source 1..80: mol_type = other DNA
cctatggtaacttttttaaaagatgaactcaggaaaaaagagaaaatttcagctggcaaaacaagagtgattgaggctag

SEQ ID NO: 147183 - DNA, 80 bp, synthetic construct
  source 1..80: mol_type = other DNA
aagagatgaaactagtatagagagctttctaggtagatctggatgcattgccaaagtcgggcttgacacaacaaaaggta

SEQ ID NO: 147184 - DNA, 80 bp, synthetic construct
  source 1..80: mol_type = other DNA
acgttaggtctctgtgcatgttagcatggcattcaggagagaaagactacaatgacttcactcaaagaattagaacaaca

SEQ ID NO: 147185 - DNA, 80 bp, synthetic construct
  source 1..80: mol_type = other DNA
acgggtcttggatgggctctagggtcagagaggccaggtggctgggcaaggtgacaaatgtaatcttggagacaggctta

SEQ ID NO: 147186 - DNA, 80 bp, synthetic construct
  source 1..80: mol_type = other DNA
agggaggcggctttgcattatgccaaccaactcaaacagttagatatcaagaccaccaaaatgagcatagaggatgcttg

SEQ ID NO: 147187 - DNA, 80 bp, synthetic construct
  source 1..80: mol_type = other DNA
aatggaaatagctgaggtagactcggttgttcctgttaacaacaccgaggaacacgtgaattcaatagaagcatatagaa

SEQ ID NO: 147188 - DNA, 80 bp, synthetic construct
  source 1..80: mol_type = other DNA
atcaaaaggtgaagcaccttgcactttcacaaaaattaaatcctcagaacagaatggggtgcaaaccatagtgtgcaacg

SEQ ID NO: 147189 - DNA, 80 bp, synthetic construct
  source 1..80: mol_type = other DNA
caccagatacaacaggcatacaaaaagacacaactatatttgatgaacacttatttaaaaatccacaattttatcaaact

SEQ ID NO: 147190 - DNA, 80 bp, synthetic construct
  source 1..80: mol_type = other DNA
ttgctatggcgaagcgtaatatactgactgcaacaacagacaggggcgaattcactatgctgggcatttacgaccgagtg

SEQ ID NO: 147191 - DNA, 80 bp, synthetic construct
  source 1..80: mol_type = other DNA
cagctgttagatgtggctttcatttccaagtgcaggtcaatgtgaaccaaggaactgcaggtagtgccttggttgtttat

SEQ ID NO: 147192 - DNA, 80 bp, synthetic construct
  source 1..80: mol_type = other DNA
gctgctttatgataggatactttcctactattattcagggacaaggacggtggtcagagaactttaccagtcacatagaa

SEQ ID NO: 147193 - DNA, 80 bp, synthetic construct
  source 1..80: mol_type = other DNA
ccccaggaagcaaccaattcctcacctcggatgattttcagtccccatcagcgatgccccaatttgacgtaacacctgaa

SEQ ID NO: 147194 - DNA, 80 bp, synthetic construct
  source 1..80: mol_type = other DNA
tggactgggaagcgacatctataggttggtggtggaaacttccagactgcctcaaggacatggggatttttggacaaaat

SEQ ID NO: 147195 - DNA, 80 bp, synthetic construct
  source 1..80: mol_type = other DNA
cacctagtggcggcagaggaaattacccggtgcagcagataggtggcaattatgcccacctacctctaagtcctagaaca

SEQ ID NO: 147196 - DNA, 80 bp, synthetic construct
  source 1..80: mol_type = other DNA
acctctcccaacgcccacccaggcatggccatgcagatgaaacacaagatactcattcccagctttgccacaagacccgg

SEQ ID NO: 147197 - DNA, 80 bp, synthetic construct
  source 1..80: mol_type = other DNA
cgcaccgtgggtcccaaatgggttttccacacatgggactacagacggggactgtttggtgaaggagctatcaaaagagt

SEQ ID NO: 147198 - DNA, 80 bp, synthetic construct
  source 1..80: mol_type = other DNA
cccacactctgtctcggcaactgcagaaatcatgtaagcttaatggtgtttttaccaacccaactgctagtgagttcatg

SEQ ID NO: 147199 - DNA, 80 bp, synthetic construct
  source 1..80: mol_type = other DNA
aaaagcaatcaagacctagacctgtgtagatatctagactgtaaactaacattttacagatcccctaacacagactttat

SEQ ID NO: 147200 - DNA, 80 bp, synthetic construct
  source 1..80: mol_type = other DNA
ccgcaatgaacggaactacagccacacaggaagatgaagacattcttaacaaactatattcaactgccagttactggcag

SEQ ID NO: 147201 - DNA, 80 bp, synthetic construct
  source 1..80: mol_type = other DNA
acactgattttagggacagtttatgccatatacaaactcatgtgcatggctcaaggaccttactctggcctgcctcaacc

SEQ ID NO: 147202 - DNA, 80 bp, synthetic construct
  source 1..80: mol_type = other DNA
caatgactttattcagaaagtgcgatccgtaccagttggccgcacactgtatttaccaccctacacagtcctcaaccgtg

SEQ ID NO: 147203 - DNA, 80 bp, synthetic construct
  source 1..80: mol_type = other DNA
aaattatatccaagtgtcttctatgatgttttccctggcgtcaaacaacctgcagcccttaatccaagagatccaagatt

SEQ ID NO: 147204 - DNA, 80 bp, synthetic construct
  source 1..80: mol_type = other DNA
ttggccatattactgtactggctcagcggtatggtgctcctcctcgaccgccggcgcccggggctcccagaccaccgcta

SEQ ID NO: 147205 - DNA, 80 bp, synthetic construct
  source 1..80: mol_type = other DNA
cactaaacccgggggcagagccaaaattagagttagaattaagccccccactctcttagaggacaagtggtatactcagc

SEQ ID NO: 147206 - DNA, 80 bp, synthetic construct
  source 1..80: mol_type = other DNA
cgccagggatcgattggaaaagggcccagggtcactggcttatgcgtgggacgtttagaaacaggccgcctatggagcct

SEQ ID NO: 147207 - DNA, 80 bp, synthetic construct
  source 1..80: mol_type = other DNA
aagggtgggtattctatgacacactctttggagatggcaagatgccctccggaacgggcctagtccccgtttggctgcag

SEQ ID NO: 147208 - DNA, 80 bp, synthetic construct
  source 1..80: mol_type = other DNA
tacttatatgtggggagaatactgttgccagaaactatgccacccactcagacgacagctactaccctggaccctttggg

SEQ ID NO: 147209 - DNA, 80 bp, synthetic construct
  source 1..80: mol_type = other DNA
catggacagttccatttccgtactaatgtggtgtttgtggcaatttttgaccacaatgaatgtccgctgcttgctgggtc

SEQ ID NO: 147210 - DNA, 80 bp, synthetic construct
  source 1..80: mol_type = other DNA
aggtacaccactccagacacatactcagcagctggatacataacttgctggtatcaaactaactttgtgtttccaccaaa

SEQ ID NO: 147211 - DNA, 80 bp, synthetic construct
  source 1..80: mol_type = other DNA
catacccagatgttttagatgcagcagaattagccgaaactggttccaaatatggtttgactataacacctgctgacaaa

SEQ ID NO: 147212 - DNA, 80 bp, synthetic construct
  source 1..80: mol_type = other DNA
tatgacaccataggcatagttgacacagaagaaacttacacttcagttaatgataaaactaactctgaaacatacaatac

SEQ ID NO: 147213 - DNA, 80 bp, synthetic construct
  source 1..80: mol_type = other DNA
aataggttctatacattagaaagtaaagagtggaaaagtgactctaagggatggtggtggaaactaccggatgccctcaa

SEQ ID NO: 147214 - DNA, 80 bp, synthetic construct
  source 1..80: mol_type = other DNA
tcactgtatgcttaattaaataaaacatatgaatcaacattttcatgttgtaaaacaacctaagagggaaagagttaagc

SEQ ID NO: 147215 - DNA, 80 bp, synthetic construct
  source 1..80: mol_type = other DNA
ctttatcttcttgccatttgtcagtgtagggggtcgccataacttgggtcgccattttagggtccgcgaactaccaaaat

SEQ ID NO: 147216 - DNA, 80 bp, synthetic construct
  source 1..80: mol_type = other DNA
gtaggggatgtcatatcatatggaaatattctacttagtgggacccaaacagctagaatgcttaagtacaattatccaac

SEQ ID NO: 147217 - DNA, 80 bp, synthetic construct
  source 1..80: mol_type = other DNA
aacacagtgaaggcagaaaactttacaaatcaataactgaatatattccatactacaacaccacagaaacaatagcacag

SEQ ID NO: 147218 - DNA, 80 bp, synthetic construct
  source 1..80: mol_type = other DNA
atcactttgggtccacccattgtaattgataaaattgacattggtaatcaattagctggcattaatcaatctttgcaaaa

SEQ ID NO: 147219 - DNA, 80 bp, synthetic construct
  source 1..80: mol_type = other DNA
cgacatgcatacacaacgggccggcttgtcggcgattgtcgcgacatatcgttatcagttagcgaccggagttgtctatc

SEQ ID NO: 147220 - DNA, 80 bp, synthetic construct
  source 1..80: mol_type = other DNA
tttgtggctgtggcgattttattaatcatcttgttaatctgggcgatcggtacggctttaggccgggaccgcgcgctcct

SEQ ID NO: 147221 - DNA, 80 bp, synthetic construct
  source 1..80: mol_type = other DNA
ggggcggcgcgcttcgcgcgccgcccactaggtggcgctgcgcgccccctagtgggcgtgtgccgtaggtgagtttacac

SEQ ID NO: 147222 - DNA, 80 bp, synthetic construct
  source 1..80: mol_type = other DNA
acctggtgcaacttcttcggagccgcgcgctacgccttcggctgcgcgcggcacctcagaccccccctccacccgaaacg

SEQ ID NO: 147223 - DNA, 80 bp, synthetic construct
  source 1..80: mol_type = other DNA
tcagatttagatgccacatcagtagacaaacccactcatcctgaaacatcagcagacaggttttacaccttagacagtgt

SEQ ID NO: 147224 - DNA, 80 bp, synthetic construct
  source 1..80: mol_type = other DNA
cttatcacatagaggtgaatacagggaaccaccaaggggataagatatttgcattccagatacaacctggattggattca

SEQ ID NO: 147225 - DNA, 80 bp, synthetic construct
  source 1..80: mol_type = other DNA
gctctgcccgcggctccggagcaacaaccggccctgccatggcatggtggtggtggagaaggagacgccgcccgtggagg

SEQ ID NO: 147226 - DNA, 80 bp, synthetic construct
  source 1..80: mol_type = other DNA
gctacgtcataagtgacgtagctggtgtctgctgtaaacacggaagtaggccccgccacgtcacttgtcacgtgactgca

SEQ ID NO: 147227 - DNA, 80 bp, synthetic construct
  source 1..80: mol_type = other DNA
cagcccccccgagaacacgaaaggatgccatgttaggaacgcacgtaatttgggacattggcctgcaatccagtgctacc

SEQ ID NO: 147228 - DNA, 80 bp, synthetic construct
  source 1..80: mol_type = other DNA
tggtggtgtcatcttaaatacaggaaatgttgtgggcatccatgttggtggaaatggtagggttgggtactgtgctagtc

SEQ ID NO: 147229 - DNA, 80 bp, synthetic construct
  source 1..80: mol_type = other DNA
agcctgacaaacgcaggatatgcaggattaaggggtaccttcctgccctcatatatggagacgggacattctccaagaac

SEQ ID NO: 147230 - DNA, 80 bp, synthetic construct
  source 1..80: mol_type = other DNA
ggttgaaagaaaagctcctgccaacagtgcaaagaaagaaagaaacacttcaggaatgtggcaaactgtcactttatgag

SEQ ID NO: 147231 - DNA, 80 bp, synthetic construct
  source 1..80: mol_type = other DNA
tggcggataacggttaagagcttaaaacagcggatgggtttcccaccatccgacccaatgggtgtagtactctggtattc

SEQ ID NO: 147232 - DNA, 80 bp, synthetic construct
  source 1..80: mol_type = other DNA
aatcacacagacacagacacgcgtcttcttttcgccgcacgtcgcttttattcgccgtcgccgtctcaaccgcaccgcag

SEQ ID NO: 147233 - DNA, 80 bp, synthetic construct
  source 1..80: mol_type = other DNA
aggcgcgggttctataatccaaaagctatcaaacgagtgtctgaaaaaccaacaaatgatgaactctttattcagcctcc

SEQ ID NO: 147234 - DNA, 80 bp, synthetic construct
  source 1..80: mol_type = other DNA
atttcatcaagggacgttacttgtagccatgatcccagagttgatgctagctaggtccaataactcaaccagccctgcca

SEQ ID NO: 147235 - DNA, 80 bp, synthetic construct
  source 1..80: mol_type = other DNA
cgccgggtctagaggcgaccgttttcgaaagaaggccgtcacaatgttcacccggggtgagcagtctctcccgggcttgc

SEQ ID NO: 147236 - DNA, 80 bp, synthetic construct
  source 1..80: mol_type = other DNA
gttatgactctacaaaaagcaaatgtatgctacaagacctgccactatatgtaatgctatatggctactttgactatgta

SEQ ID NO: 147237 - DNA, 80 bp, synthetic construct
  source 1..80: mol_type = other DNA
gcatcactaacaaagagctactttgcttctgcccagggtgaaatagtcaacaaatgcaaagtacaggatgtgggtctcaa

SEQ ID NO: 147238 - DNA, 80 bp, synthetic construct
  source 1..80: mol_type = other DNA
acacatcctggtgaagctgggagggatgtgagcataaccaatcgtgaacacgctagtagacagccaagtgatgagaattg

SEQ ID NO: 147239 - DNA, 80 bp, synthetic construct
  source 1..80: mol_type = other DNA
agagtccatatgaccaacaaccaaaagtccagaccatgaaactagcttacaaggataggggtttttacaaacactatggt

SEQ ID NO: 147240 - DNA, 80 bp, synthetic construct
  source 1..80: mol_type = other DNA
cttttgttgtgacagagagatattacaccagtaactcaggacatgccaaaaattcggtttaccaaattatgtatatacct

SEQ ID NO: 147241 - DNA, 80 bp, synthetic construct
  source 1..80: mol_type = other DNA
agtgtcgactcaaaaatctggatcccatgaaactggcaacgtggccactgggggatcgacaataaatttcactaacatta

SEQ ID NO: 147242 - DNA, 80 bp, synthetic construct
  source 1..80: mol_type = other DNA
acccaaacacattaagtgttggtgccctagaccacccagggctgtccagtatagaggagaaggtgtagacctaaagagtg

SEQ ID NO: 147243 - DNA, 80 bp, synthetic construct
  source 1..80: mol_type = other DNA
cctcaagattccccgatctgttcccgcctttgctcaccttgtccagcgacaggggctgcggcggcaaggcaattccatca

SEQ ID NO: 147244 - DNA, 80 bp, synthetic construct
  source 1..80: mol_type = other DNA
ttcgggctgccctgataggctcgccagctgtcgcccccttgaccagttcgctcagggctggggtcccatcacgtacgccg

SEQ ID NO: 147245 - DNA, 80 bp, synthetic construct
  source 1..80: mol_type = other DNA
caggggaacagcatataaagataacattaaagatgtaccacaaaaagcagcacaattatactttcaaacaacacaaaaac

SEQ ID NO: 147246 - DNA, 80 bp, synthetic construct
  source 1..80: mol_type = other DNA
ggggctgccttcgggtctggattcaccaaccaaatcagtgataaagtcagtgagattacatcattggtaacatccacatt

SEQ ID NO: 147247 - DNA, 80 bp, synthetic construct
  source 1..80: mol_type = other DNA
aggccttcgaccgtcctcccagaaactacctttcagacaaacccatctacccctggctccctcgccccgaacccgaaatt

SEQ ID NO: 147248 - DNA, 80 bp, synthetic construct
  source 1..80: mol_type = other DNA
gaacaactaccttagcaggcattattaatctcagcaatacaccaactgctagaatgatcagatatgactttcctacaaag

SEQ ID NO: 147249 - DNA, 80 bp, synthetic construct
  source 1..80: mol_type = other DNA
ttcaacaactgatttccatgtaccaatggctgctcttgaagataagggtaaagctttcaccagttcttatctgttagcta

SEQ ID NO: 147250 - DNA, 80 bp, synthetic construct
  source 1..80: mol_type = other DNA
tgggagagcctggaccacttgtggaacaataaccagcagatgttctggatacagctactcctaccactagcggccttgat

SEQ ID NO: 147251 - DNA, 80 bp, synthetic construct
  source 1..80: mol_type = other DNA
ttcgctcttcggaggtttctggtgacgccggttgcgctggggacgtgttgcgggaccggactgagggacgggtggtgtgc

SEQ ID NO: 147252 - DNA, 80 bp, synthetic construct
  source 1..80: mol_type = other DNA
tacataagacgcagacgcagaaaaaaaaagcaagaactgactcagtggaacccccaagacgtcaggagatgcacaataag

SEQ ID NO: 147253 - DNA, 80 bp, synthetic construct
  source 1..80: mol_type = other DNA
ggaccgagactcatcttccactcgttcgaccaaagacgggggctctttactgacagagctatcaaaagaatgtacgatga

SEQ ID NO: 147254 - DNA, 80 bp, synthetic construct
  source 1..80: mol_type = other DNA
cttaggcaattccattgtgcagaagagcaaggagtaactgactacattcatatgttaggtgaagcttttggaacaggttt

SEQ ID NO: 147255 - DNA, 80 bp, synthetic construct
  source 1..80: mol_type = other DNA
atgtacgacgcaggagcctctgctttggtacccattacagtcaccatagcaccaatgtgctgtgagtttaacggactgag

SEQ ID NO: 147256 - DNA, 80 bp, synthetic construct
  source 1..80: mol_type = other DNA
tccccttccagacggcgaatactttcaggaaaaagatgccctatggggagacccaatacacattacaacatcacaaacta

SEQ ID NO: 147257 - DNA, 80 bp, synthetic construct
  source 1..80: mol_type = other DNA
aaattcttaagaacttagtcaaactcatctctgcgctcgttattgtcatcaggagtgattatgacatggtcacattgacg

SEQ ID NO: 147258 - DNA, 80 bp, synthetic construct
  source 1..80: mol_type = other DNA
tggctccacaggatcagcactacataacttaagttcatataatgaatgggtatcaggtgtaggaccaaataaattcacac

SEQ ID NO: 147259 - DNA, 80 bp, synthetic construct
  source 1..80: mol_type = other DNA
cgacctggacgccctcttcgccgccgtcgaagaagaccgcgaacagtaaggaggcgaaggtggggttggagacggtggcg

SEQ ID NO: 147260 - DNA, 80 bp, synthetic construct
  source 1..80: mol_type = other DNA
taccacctggagctccacgaccttcgtcgtgggatgattatacgtggcaatcctcgtccaacccatcaatattctacatg

SEQ ID NO: 147261 - DNA, 80 bp, synthetic construct
  source 1..80: mol_type = other DNA
ccgctctggttgtatttcaattattgaattggatctagatcatgaaaattattcagcagagggaagtaactttaagacat

SEQ ID NO: 147262 - DNA, 80 bp, synthetic construct
  source 1..80: mol_type = other DNA
aaaccaaggatacaacaaaaatggaggaatgtttaagcaaatatggaattgatcttcctttggtgacatacattaaagat

SEQ ID NO: 147263 - DNA, 80 bp, synthetic construct
  source 1..80: mol_type = other DNA
gattcactacgaacttgaaagacagcttttctacattagccgggcaaatacaggacaagataacatcaaaagttatcaag

SEQ ID NO: 147264 - DNA, 80 bp, synthetic construct
  source 1..80: mol_type = other DNA
gtcaagctcttccgggtcaaaggttagcaactacgtcataagtcacgtggggacggctgcgtcacaacacggaagtagct

SEQ ID NO: 147265 - DNA, 80 bp, synthetic construct
  source 1..80: mol_type = other DNA
tcccctgtctagactcaaaagctgtaaggctgtcttatagcatgtagtcttgcacgtcacggggaacagggtggtgatct

SEQ ID NO: 147266 - DNA, 80 bp, synthetic construct
  source 1..80: mol_type = other DNA
aaaggtattatatgacgagaaccagagaggcctaaacaaatggacgtactccaacgaccaactagacctagctcgctaca

SEQ ID NO: 147267 - DNA, 80 bp, synthetic construct
  source 1..80: mol_type = other DNA
tgcactcacccatgcaatagacctggcagatggggctaggcatacctcactggtaacagtggcctagcccgcgtggctgc

SEQ ID NO: 147268 - DNA, 80 bp, synthetic construct
  source 1..80: mol_type = other DNA
attatcatatgtgggagcagctgatagcaaggtacgttatgaccacacacacccaggggaggagtggcatactttctcag

SEQ ID NO: 147269 - DNA, 80 bp, synthetic construct
  source 1..80: mol_type = other DNA
tggccccgccagcacttaatcaatgatgtggagttaccaaaagctttttgggataagaattcaaagccagcttatggaca

SEQ ID NO: 147270 - DNA, 80 bp, synthetic construct
  source 1..80: mol_type = other DNA
gttagacagtgcagagcccccagaagacaggggtgctggaagtgtgggaagccaggccacattatggccaaatgtccaga

SEQ ID NO: 147271 - DNA, 80 bp, synthetic construct
  source 1..80: mol_type = other DNA
gtgccaccaattccaaccatttttaaacctcctggaattctatcattaaacggcatgcaggaaaaggacaagcagcgaaa

SEQ ID NO: 147272 - DNA, 80 bp, synthetic construct
  source 1..80: mol_type = other DNA
agaattagcaagtgagggagttaagtatggtttgaccattactcctgctgacaaatcagaagaattcagtaaactggatt

SEQ ID NO: 147273 - DNA, 80 bp, synthetic construct
  source 1..80: mol_type = other DNA
agaggctaccttagcccagcagctctcaagagaattggagagcaaccgctcgattatgaagcttattcgtaccgcccaaa

SEQ ID NO: 147274 - DNA, 80 bp, synthetic construct
  source 1..80: mol_type = other DNA
gttcaacaggcaagatatatggtattcatgtgggtggtaatggaaaacaaggattctcagcccaacttaaaaaacagtac

SEQ ID NO: 147275 - DNA, 80 bp, synthetic construct
  source 1..80: mol_type = other DNA
ttataattacgcacgctcggctggaagcctacagagtcggggtggggccggacaggtgagccaggtgagccgccaggtga

SEQ ID NO: 147276 - DNA, 80 bp, synthetic construct
  source 1..80: mol_type = other DNA
tgtcggtctgaatcgacccgggatacgtaagagagcggccctacatcggggggcgctcgagaccgacgacgttccatctg

SEQ ID NO: 147277 - DNA, 80 bp, synthetic construct
  source 1..80: mol_type = other DNA
tattaaccagacagtggtgccaacatgggagctcaggtatcatcacagaaagttggagctcatgagaacactaatgtggc

SEQ ID NO: 147278 - DNA, 80 bp, synthetic construct
  source 1..80: mol_type = other DNA
taggtgttgtcgtgtttctagccctaatagttgtttgtattatggggtggtggaagttgttgtgtagtaaaccagagtta

SEQ ID NO: 147279 - DNA, 80 bp, synthetic construct
  source 1..80: mol_type = other DNA
aaacacgtattgtagtacctgccagcactccgacaaccatgtcaatgctcgccttcgtgagtgcttgtccagatttcagt

SEQ ID NO: 147280 - DNA, 80 bp, synthetic construct
  source 1..80: mol_type = other DNA
caacgaccagctagacctcgccagatacacagggtgctacttttacttctacagagacaaagacacagactttatagtgc

SEQ ID NO: 147281 - DNA, 80 bp, synthetic construct
  source 1..80: mol_type = other DNA
aggctcttgggacataactgtaggttacaaagcaacctttaaatgggggggctcccctctacctccacagccaatcgacg

SEQ ID NO: 147282 - DNA, 80 bp, synthetic construct
  source 1..80: mol_type = other DNA
gatggagaatataccttggctttcaactgcaagtactaaatgacattagcaacagtggaccctacgcatacagagacgaa

SEQ ID NO: 147283 - DNA, 80 bp, synthetic construct
  source 1..80: mol_type = other DNA
agctcacattcaacactcccgagagaaccggagccctggaactcggaccaagagatggaggacagccagcaaagcgaaga

SEQ ID NO: 147284 - DNA, 80 bp, synthetic construct
  source 1..80: mol_type = other DNA
ataaatgattcagaagcaaacccagtagatgcacccactgaaccagatgttagcagcaacaggttctataccttagactc

SEQ ID NO: 147285 - DNA, 80 bp, synthetic construct
  source 1..80: mol_type = other DNA
ggacccgtggaatacaacaaatttctggaccagataagatcagtcgcggttggccgcgcattactcctgccggagtatac

SEQ ID NO: 147286 - DNA, 80 bp, synthetic construct
  source 1..80: mol_type = other DNA
agccaccattaaccacttcttctcccgttccgggttggtgggagtggtcaatctcaccgataggggtactgacactacag

SEQ ID NO: 147287 - DNA, 80 bp, synthetic construct
  source 1..80: mol_type = other DNA
agaaacaaaacaaaatacaattcacggagaatacggacacccaacaaacaatgcagtagactaccacataggaaaataca

SEQ ID NO: 147288 - DNA, 80 bp, synthetic construct
  source 1..80: mol_type = other DNA
aatgtgtccactctgcaaccaccaacaatacaaaccccagaggccttagagcgcagatttttcctagacatggatgtcaa

SEQ ID NO: 147289 - DNA, 80 bp, synthetic construct
  source 1..80: mol_type = other DNA
acttcctcttttcccccggggaatcaaacagacacagacacgcgtggcgggtgtgtcgcgggtgtgtcaggtgtgtgtcg

SEQ ID NO: 147290 - DNA, 80 bp, synthetic construct
  source 1..80: mol_type = other DNA
acggttcctttgtatgcctgttttccctcccccgcctcctttaacgtaacttagaagcttgaacaaacgcccaataggat

SEQ ID NO: 147291 - DNA, 80 bp, synthetic construct
  source 1..80: mol_type = other DNA
tcaactattaagaccccagtcaatgcaacgactattaaggaatttttcaaccatgcgattgaaggtgatgagcaaggatt

SEQ ID NO: 147292 - DNA, 80 bp, synthetic construct
  source 1..80: mol_type = other DNA
cacctacaggagtcaccaccaccagagacaagataaccctagacaaaattacacatgtcccgtttgcacggacgacgggg

SEQ ID NO: 147293 - DNA, 80 bp, synthetic construct
  source 1..80: mol_type = other DNA
tatacttatgaattggacatggaagctatagcaatggagggtgttaaatatggcttgactataacccctgctgacaaatc

SEQ ID NO: 147294 - DNA, 80 bp, synthetic construct
  source 1..80: mol_type = other DNA
aagcacaaattcagcaagaaaaaaatatgtatgagttacagaaattaaatagctgggatgtatttggcaattggtttgac

SEQ ID NO: 147295 - DNA, 80 bp, synthetic construct
  source 1..80: mol_type = other DNA
gaaagtttggtcagcaatcaggggctatttacgtaggcaactacagagtagtgaacaggcatctcgctactcataatgac

SEQ ID NO: 147296 - DNA, 80 bp, synthetic construct
  source 1..80: mol_type = other DNA
ggtgtgcgggaaggggcacaagaatgacggcgaaactggaccacggtccaccccgccctcaagcgtccgggagccaggcg

SEQ ID NO: 147297 - DNA, 80 bp, synthetic construct
  source 1..80: mol_type = other DNA
agatttgatatgtttagagccattttttgtgtcaccaatgctagaaaaaaaggttcaggacaaattccacaatcttttga

SEQ ID NO: 147298 - DNA, 80 bp, synthetic construct
  source 1..80: mol_type = other DNA
ttgactatacaattttgtgtagaatgtactggggtccagccattagttatttccatttaaatcctggttttcatactggt

SEQ ID NO: 147299 - DNA, 80 bp, synthetic construct
  source 1..80: mol_type = other DNA
aatccattggaaccatctgatactatccaaaccagacacgtgatacaaactagatcacgatcagagtctacagtagagtc

SEQ ID NO: 147300 - DNA, 80 bp, synthetic construct
  source 1..80: mol_type = other DNA
acaaatacagcagctgcatgtaccatcctggcatgctaatgatgcaggccaaaaagagaatactaatacctagctttgac

SEQ ID NO: 147301 - DNA, 80 bp, synthetic construct
  source 1..80: mol_type = other DNA
agtcatagagtttgaccgtggcattatctgcatgtgcatacacggccccgtagctcccccgccccagcagatactcgcag

SEQ ID NO: 147302 - DNA, 80 bp, synthetic construct
  source 1..80: mol_type = other DNA
ttttaaaagctggaaaatcaactttcaagaacatgctcacgttaggaagaagtttgagatgtttacctatgtcaggtttg

SEQ ID NO: 147303 - DNA, 80 bp, synthetic construct
  source 1..80: mol_type = other DNA
ctcaggaggctgctaacgcagttgtagcatatgctgaatggcctagctttctcagagacattgatgctagtgatgtaaac

SEQ ID NO: 147304 - DNA, 80 bp, synthetic construct
  source 1..80: mol_type = other DNA
ggaagggttggctattgtgcagcattactgagaaaatacttcaatgacacccagggagcaattgtaactacacagcatgt

SEQ ID NO: 147305 - DNA, 80 bp, synthetic construct
  source 1..80: mol_type = other DNA
aatcctgacattttctggtcacagctctatgccatgctagatgggaatctgctagcttttgattatacaaactatgatgg

SEQ ID NO: 147306 - DNA, 80 bp, synthetic construct
  source 1..80: mol_type = other DNA
ccaacagaaaggggaagctgttcatggacaggtaaatgcagaactaggaacatggcagatggactgtacacacttagaag

SEQ ID NO: 147307 - DNA, 80 bp, synthetic construct
  source 1..80: mol_type = other DNA
taatacaaccaacctaacacaacatccttctgcaccaacaataccattcatgccagattttaagaatgttgacaatttcc

SEQ ID NO: 147308 - DNA, 80 bp, synthetic construct
  source 1..80: mol_type = other DNA
ctgctggcggtttgggacgatgagcccctcagtctctttctcatgaacacctttttgctgcaccaggagggcttccgtaa

SEQ ID NO: 147309 - DNA, 80 bp, synthetic construct
  source 1..80: mol_type = other DNA
aaccatacttttagcaatttcatctgatcttcaagtggatagtgtagacactcctgggcctgacaacatacccacctgtg

SEQ ID NO: 147310 - DNA, 80 bp, synthetic construct
  source 1..80: mol_type = other DNA
gtacttccagaaagacatatgtgacctcacattactaaacatgaacgttgtaacatgtgacctgcggtttccgttctgcc

SEQ ID NO: 147311 - DNA, 80 bp, synthetic construct
  source 1..80: mol_type = other DNA
acgagtgctggatttccctatgttactatggggataaaaaagagagatatcttgaacagaaatacaaaggacattacaaa

SEQ ID NO: 147312 - DNA, 80 bp, synthetic construct
  source 1..80: mol_type = other DNA
ataccaggaaacacatctgtacactataacttttgcacatacaatcccaagtatgacaacctaaaagctctcagaagtta

SEQ ID NO: 147313 - DNA, 80 bp, synthetic construct
  source 1..80: mol_type = other DNA
gaatttgtgcgcgctgcgggatctctctacgggtgtttccccggcgcttctgcgcggcgcttcgccttccgcgggttttt

SEQ ID NO: 147314 - DNA, 80 bp, synthetic construct
  source 1..80: mol_type = other DNA
atggtcaacacaccgtacagacagtcgtgtataatgctggcatgggcgtaggtgttgggaacttaaccatcttccctcac

SEQ ID NO: 147315 - DNA, 80 bp, synthetic construct
  source 1..80: mol_type = other DNA
gcttggtcaaaagcttgtacaaaaggcacctggtatgggtcaggtgtaaattttacatcttcagaagtcgagtttgggtc

SEQ ID NO: 147316 - DNA, 80 bp, synthetic construct
  source 1..80: mol_type = other DNA
gggtcctataacccttgaaggaccaccaccggccgccataaatgatcttcttcagtcagtacgcacaccagaggtcatta

SEQ ID NO: 147317 - DNA, 80 bp, synthetic construct
  source 1..80: mol_type = other DNA
ccgttccgggctggtgggagtggtcaatctcactgacggaggtacagataccacaggatatgccacttgggatatagaca

SEQ ID NO: 147318 - DNA, 80 bp, synthetic construct
  source 1..80: mol_type = other DNA
cactatagctcagtgcaattgtaggtgtggggtttactactgtgagtctcaacggaagtattacccagttaccgtaacag

SEQ ID NO: 147319 - DNA, 80 bp, synthetic construct
  source 1..80: mol_type = other DNA
accacgggaaaatcagtcaacaatgaagcgcccataacacatcaaattatgtatgtgccaccaggtgggcccataccaaa

SEQ ID NO: 147320 - DNA, 80 bp, synthetic construct
  source 1..80: mol_type = other DNA
agcgacttcggttccacctcagcggactcgggtgtcctacaagggagaaaataagaaaagataatgaaagcgacgtcaac

SEQ ID NO: 147321 - DNA, 80 bp, synthetic construct
  source 1..80: mol_type = other DNA
tccccagcgccgtgccgctgacaaagaccgtgggacgccgcgtggcctactgcagaaatgcacaacgcgtgggccgcaac

SEQ ID NO: 147322 - DNA, 80 bp, synthetic construct
  source 1..80: mol_type = other DNA
gtctgtgtctgtctgattccccggggaaaagaggaagttccctggggacacacgaaaaacaacggccagagacaagacgc

SEQ ID NO: 147323 - DNA, 80 bp, synthetic construct
  source 1..80: mol_type = other DNA
ccactctctttactgacaagtggtactttcaaaaggacatctgtgaccttacactgttaaacctcaatgtggtgcaagct

SEQ ID NO: 147324 - DNA, 80 bp, synthetic construct
  source 1..80: mol_type = other DNA
acacgctcgcgcgtgtcagaccacttcgggctcgcgggggtcgggaattttattaaacagactccaggttgccattggac

SEQ ID NO: 147325 - DNA, 80 bp, synthetic construct
  source 1..80: mol_type = other DNA
ggccccatgcagggagacaacagaggacttgctgcacctcaattctctctttggaaaagaccagtagtcacagcacacat

SEQ ID NO: 147326 - DNA, 80 bp, synthetic construct
  source 1..80: mol_type = other DNA
ctcgcaaggatgaacctccttcacttaaaccccgaatggaggtagaatttctcaagagaaagccgggttacttcccagag

SEQ ID NO: 147327 - DNA, 80 bp, synthetic construct
  source 1..80: mol_type = other DNA
ccgcaaagaaacctaacagaaccaacaactcaaccagcacaacactaggcaacaaagtcacagacctaaaatccaacaat

SEQ ID NO: 147328 - DNA, 80 bp, synthetic construct
  source 1..80: mol_type = other DNA
caatccatgtatgataaaacaattagcatattaccagacgaaaaatcacaaagagaaattctacttaacaagatagcaag

SEQ ID NO: 147329 - DNA, 80 bp, synthetic construct
  source 1..80: mol_type = other DNA
ggagaaatttctagttattacactcagtggactggtagtctacgcttcagctttatgttttgtggaacagccaacacaac

SEQ ID NO: 147330 - DNA, 80 bp, synthetic construct
  source 1..80: mol_type = other DNA
cattttgtcccacctgttaccacattctaggtcctgcatccagtgggccaggtgtctccccatggctctttctaggtgga

SEQ ID NO: 147331 - DNA, 80 bp, synthetic construct
  source 1..80: mol_type = other DNA
caccaatataaacagcctcaaggcatatcaaatcccagtgcagtcaaacagtgacaacgggaagcaggtttttgggttcc

SEQ ID NO: 147332 - DNA, 80 bp, synthetic construct
  source 1..80: mol_type = other DNA
ataggcccccctaggctatttacagatcactggtatttccagagagacttttgcgcagtacccctgctaactgtcaacgc

SEQ ID NO: 147333 - DNA, 80 bp, synthetic construct
  source 1..80: mol_type = other DNA
gccctcctcaaagcctttctggtacatgaagctccggctcgtggagtccgcacctccttctgtgcacgaagttttgcgga

SEQ ID NO: 147334 - DNA, 80 bp, synthetic construct
  source 1..80: mol_type = other DNA
aagtgctaaattactacgctcattgggccggatctttgaaattcaccttcctgttttgcggttcaatgatggctacgggg

SEQ ID NO: 147335 - DNA, 80 bp, synthetic construct
  source 1..80: mol_type = other DNA
agtttatgataatgtggccatcttgccaacccacgcctcacctggtgaaagcattgcgatcgacggtaaagaggtggaaa

SEQ ID NO: 147336 - DNA, 80 bp, synthetic construct
  source 1..80: mol_type = other DNA
gcaaggtccaaaagagccattccaagtttatgtagacaggttctacaaaagtttgagagcagaacaaacagacccagcag

SEQ ID NO: 147337 - DNA, 80 bp, synthetic construct
  source 1..80: mol_type = other DNA
aatgtggtgtgcatgctttggctacatagactggataaaaaaagagttagacaactgggaggcaccctttgactacagag

SEQ ID NO: 147338 - DNA, 80 bp, synthetic construct
  source 1..80: mol_type = other DNA
aggtcctcataactagccgaatatatcataaggctaaacacattaaagcatggtgccccagagcacccagggcagtccca

SEQ ID NO: 147339 - DNA, 80 bp, synthetic construct
  source 1..80: mol_type = other DNA
tgctttgcaaaaggctgaagccccgagagtcgttatccgcatacatactacgcaaagcctagtattgtcctagaagtctg

SEQ ID NO: 147340 - DNA, 80 bp, synthetic construct
  source 1..80: mol_type = other DNA
tggaatgacgtacaaaattctacacaactttcaaatgatggtactaatgcccttcaaagccgagacacttggtacaaagg

SEQ ID NO: 147341 - DNA, 80 bp, synthetic construct
  source 1..80: mol_type = other DNA
tatccgtacgcatgctaagggacacaccactcatcagttatgcacaaagtgccacccagaatcctgtggagactttcaca

SEQ ID NO: 147342 - DNA, 80 bp, synthetic construct
  source 1..80: mol_type = other DNA
cgtcaacaatgcagtggccagagttgctgacaccatcgccagcggtcccagtaactccaccagcatccccgcactaaccg

SEQ ID NO: 147343 - DNA, 80 bp, synthetic construct
  source 1..80: mol_type = other DNA
ttatccccagacaactacacaccagagtggcacacagcatactcatcagtaagatacaatcccctggcagacagaggcat

SEQ ID NO: 147344 - DNA, 80 bp, synthetic construct
  source 1..80: mol_type = other DNA
tataaagattcacttagagtcgttaacatgttatgttattataatgaaaaacatgaagaagtatacagcgagttaaacat

SEQ ID NO: 147345 - DNA, 80 bp, synthetic construct
  source 1..80: mol_type = other DNA
ccaccacagactttattgtaccaatggcagcattggaagataaaggtaagtgtttcaccagcaattatgtactagccagt

SEQ ID NO: 147346 - DNA, 80 bp, synthetic construct
  source 1..80: mol_type = other DNA
catccacgtacgtgccaattacagtgacggtggccccaatgtgtgcggagtataacggcttacgtctggcacaagcgcaa

SEQ ID NO: 147347 - DNA, 80 bp, synthetic construct
  source 1..80: mol_type = other DNA
gctctgcagatatcccccccccccaatgaaacttagaagcagtaaaccacgatcaatagtaggcataacgctccagttgt

SEQ ID NO: 147348 - DNA, 80 bp, synthetic construct
  source 1..80: mol_type = other DNA
tggtagtaaccccaggtttggggccatatacacttgcaactacaagatcatgaattaccacctaatgacacaagaggatc

SEQ ID NO: 147349 - DNA, 80 bp, synthetic construct
  source 1..80: mol_type = other DNA
accagcagccctgactaagaaagatccacggttagaggtggatcttgatgctgcagtgttctcaaagtataaaggcaacc

SEQ ID NO: 147350 - DNA, 80 bp, synthetic construct
  source 1..80: mol_type = other DNA
ttttacactacaggcaacgccccaccaagggtgtcagtaccatttatggggattagcggagcttactcgcacttttatga

SEQ ID NO: 147351 - DNA, 80 bp, synthetic construct
  source 1..80: mol_type = other DNA
tcgagcgttctggccgccggcgaggccggggtgttgcgggcgctcggaggttggcggctggtgtttctacggtgtttgtg

SEQ ID NO: 147352 - DNA, 80 bp, synthetic construct
  source 1..80: mol_type = other DNA
cccgaagcgctcgagctggcagagcgggaggccgaaagggccaggtcggagcggtgggacaggtgtgcccaggtgctcaa

SEQ ID NO: 147353 - DNA, 80 bp, synthetic construct
  source 1..80: mol_type = other DNA
cgttccaaacggccccgtcacagacgcagttattcataagcgttaacaaccggtggctaggatgaatatccaaatcacag

SEQ ID NO: 147354 - DNA, 80 bp, synthetic construct
  source 1..80: mol_type = other DNA
aagagtgtcagaacaaccaagcaatgatgcagactattatgctccaccaaaaaaacctagactattccctccaacagacc

SEQ ID NO: 147355 - DNA, 80 bp, synthetic construct
  source 1..80: mol_type = other DNA
gggtttttgggcgtgctgggcgccggtggcgtcccacagtgtttgttcgcgggacagagctcagagagtgttgagaaacg

SEQ ID NO: 147356 - DNA, 80 bp, synthetic construct
  source 1..80: mol_type = other DNA
cacccccaccgccccagccttcttcctctgtgctgctgcgtctgttgacacagtactcccctactctatttctcaatcac

SEQ ID NO: 147357 - DNA, 80 bp, synthetic construct
  source 1..80: mol_type = other DNA
tagagtggatgaaatccatgttgccacaggcacagttaaaagtcaaatatcttgaaggacttaagaagctcaatttcctg

SEQ ID NO: 147358 - DNA, 80 bp, synthetic construct
  source 1..80: mol_type = other DNA
gtggagccaggggatggatgcccccggacctgacggtccgcgacagggaagatgcctggtggactagcttcgtatgtagc

SEQ ID NO: 147359 - DNA, 80 bp, synthetic construct
  source 1..80: mol_type = other DNA
ggtgattgcaaatatccttttcaatcttatagattcagcagtgttgattcgtgaatcgtaagctataaaaagtaatcaca

SEQ ID NO: 147360 - DNA, 80 bp, synthetic construct
  source 1..80: mol_type = other DNA
ttgaaaaagattatgaaatgatggaattttatttcaacagaggtggtacttattactcaatttcagcgggaaatgtagtg

SEQ ID NO: 147361 - DNA, 80 bp, synthetic construct
  source 1..80: mol_type = other DNA
acttttgtcttctatatgtggtccattatcagagtttttctttataaacactttatgccaccagttacttcgtttgccat

SEQ ID NO: 147362 - DNA, 80 bp, synthetic construct
  source 1..80: mol_type = other DNA
tcttaattattatgcaaattggtctggaagtgttagagtaacatttatgtgtgtttgtgattcttttagcactggtaaat

SEQ ID NO: 147363 - DNA, 80 bp, synthetic construct
  source 1..80: mol_type = other DNA
gtcctctgcccaccctgaccacgctgcccacctcccggtgcccagggtcatcacatacaccgactgcccgggttccataa

SEQ ID NO: 147364 - DNA, 80 bp, synthetic construct
  source 1..80: mol_type = other DNA
cctaccggaggagcgccgccgcgccgcccgcagctacgccgccttgcagcgctcccggcggcgccccccagcacccctga

SEQ ID NO: 147365 - DNA, 80 bp, synthetic construct
  source 1..80: mol_type = other DNA
atcgtaactccaccatcgacccagagcaagtgctttatcatgtgcttggtgtcagcgtgtaatgatttctcggtgagatt

SEQ ID NO: 147366 - DNA, 80 bp, synthetic construct
  source 1..80: mol_type = other DNA
gtgtgagtacgaggcctgtaagcactgggatagaccccccagaaagttcctcacagacccccctttctacccctgggccc

SEQ ID NO: 147367 - DNA, 80 bp, synthetic construct
  source 1..80: mol_type = other DNA
gtgagtggccacagtatcttgcagatatagatgcttcatcagttgacaaaccaactcaccccgagacatctgctgaccga

SEQ ID NO: 147368 - DNA, 80 bp, synthetic construct
  source 1..80: mol_type = other DNA
ggcttgacctttgacaactttgtgtttgaggagcagtactctactattccggtagttttgtacaccagttttatctccct

SEQ ID NO: 147369 - DNA, 80 bp, synthetic construct
  source 1..80: mol_type = other DNA
aagggcgcacaccactccctcatgggtctcaatcagggtgcactcgctggatccatcacatacatggtactcgccacagc

SEQ ID NO: 147370 - DNA, 80 bp, synthetic construct
  source 1..80: mol_type = other DNA
ccagacccagcaaaaaacactttgttagagtaaaagtaggggcccctaaattatttgaagacaagtggtacccacagagt

SEQ ID NO: 147371 - DNA, 80 bp, synthetic construct
  source 1..80: mol_type = other DNA
gtagtaaatttcatctggcatgctaaaacctcagccgacgtgtcttcccttccatgcctcgcccgagtcacattcttgtg

SEQ ID NO: 147372 - DNA, 80 bp, synthetic construct
  source 1..80: mol_type = other DNA
tcaacaaggaccatacacaggcttgcccactaaaagaccaaatgtccccaccattagaactgctagagtgcagggtccag

SEQ ID NO: 147373 - DNA, 80 bp, synthetic construct
  source 1..80: mol_type = other DNA
ttgtgaccaatgtacctaaatttcctatgtttgatgctgaggtgggtgatgtcataccatacggtgatataaacctgagt

SEQ ID NO: 147374 - DNA, 80 bp, synthetic construct
  source 1..80: mol_type = other DNA
ccggcagaggaccagggctggcaaaggcaggtctttctcatcccgggtgaacaccgcgtacatggccctgaacatgaggt

SEQ ID NO: 147375 - DNA, 80 bp, synthetic construct
  source 1..80: mol_type = other DNA
aggacaactcacaaacttatggaacgaagtacaaaacacaacagcactgtcaccaaaaggcacaaatgcaactataagca

SEQ ID NO: 147376 - DNA, 80 bp, synthetic construct
  source 1..80: mol_type = other DNA
aaatcttactttggtgaaactcaaggcttaattactaaagagctacctgtatctgtcaagaatttaccatctatacatgt

SEQ ID NO: 147377 - DNA, 80 bp, synthetic construct
  source 1..80: mol_type = other DNA
tgtagaggagagtttttgtactgtaatatgacttggttcctaaactgggtagaaaataggacaggaattaagaaaaatta

SEQ ID NO: 147378 - DNA, 80 bp, synthetic construct
  source 1..80: mol_type = other DNA
cgcattaaatacatttagaacagaagggtgtgccagtcacccacaactcaaaaagcctaccagtagtagtaatccctcca

SEQ ID NO: 147379 - DNA, 80 bp, synthetic construct
  source 1..80: mol_type = other DNA
gggcatttataatagggtactttcctgctgtaatatgtggacccggcaggtggtctgagaactttaccagccacatagaa

SEQ ID NO: 147380 - DNA, 80 bp, synthetic construct
  source 1..80: mol_type = other DNA
aatctgttttttccaatcccagcacctaagcctgccaatgcattaaggtcactcaacccatttagtgatgaaagtccata

SEQ ID NO: 147381 - DNA, 80 bp, synthetic construct
  source 1..80: mol_type = other DNA
aaggagagcctggaagagaagtttttgccatgagagttgatatagcaacacaccctctagccacaacattaattggagag

SEQ ID NO: 147382 - DNA, 80 bp, synthetic construct
  source 1..80: mol_type = other DNA
agactgggtaacaaagtccataggctcagaatcagcctggagagacatgagactcatggtaatatgcccatacacagagc

SEQ ID NO: 147383 - DNA, 80 bp, synthetic construct
  source 1..80: mol_type = other DNA
taatgaaaacaccatactcctggccatatcatcagatctccaagttgacagcacaagcatccctggccctgacaatatac

SEQ ID NO: 147384 - DNA, 80 bp, synthetic construct
  source 1..80: mol_type = other DNA
acggggcatacgtcgcaagcggtgcccagtgacactattcagacaaggtgtgtgctgaatcaacacaagcgttcggagtc

SEQ ID NO: 147385 - DNA, 80 bp, synthetic construct
  source 1..80: mol_type = other DNA
ttccgtcagaactccccgagccgaaagcaggcgcatacacgctgtggctcagcacccgtcggccggcgactaaagtttcg

SEQ ID NO: 147386 - DNA, 80 bp, synthetic construct
  source 1..80: mol_type = other DNA
tacctcctaatataagtagcggcacttccgaatggctgagtttttcacgcccgtccgcagcggcagcaccacggagggtg

SEQ ID NO: 147387 - DNA, 80 bp, synthetic construct
  source 1..80: mol_type = other DNA
aggacaagtcacatcagacagtacaaacagtaactggtggacaaaagtgcaaaacacacttgcactatcacctgaaggct

SEQ ID NO: 147388 - DNA, 80 bp, synthetic construct
  source 1..80: mol_type = other DNA
ggccagtttcagacaatcgggtggatatggatacagcaccctgaaccacatgggccagatattcgtaagacacgtgaatg

SEQ ID NO: 147389 - DNA, 80 bp, synthetic construct
  source 1..80: mol_type = other DNA
aaagttagcatatttattaagccccccactctatttgaagacaagtggtacactcagcaagacctttgtccagtaaatct

SEQ ID NO: 147390 - DNA, 80 bp, synthetic construct
  source 1..80: mol_type = other DNA
aatacatttagaacccaagctaatttctcacacccacaacttacactccccaacagtgcatcaaatacatcagcaaacca

SEQ ID NO: 147391 - DNA, 80 bp, synthetic construct
  source 1..80: mol_type = other DNA
gaaaataacttgggaaaatgtcacattcctcaagaggcattttagaccagataaacagtttcctttcctggtacacccag

SEQ ID NO: 147392 - DNA, 80 bp, synthetic construct
  source 1..80: mol_type = other DNA
acacaaaaacagacaacaaatacataccgggaaaatgtaaatatctagtagaaaacatgcccctgtggagtctactgcac

SEQ ID NO: 147393 - DNA, 80 bp, synthetic construct
  source 1..80: mol_type = other DNA
cacctaatgccgtcattgttcaggcggatgtgcacgctgaacaagcttcctctaggtggtctataccttcagcttctgat

SEQ ID NO: 147394 - DNA, 80 bp, synthetic construct
  source 1..80: mol_type = other DNA
caaacaatgcctcaaacacatcaaataatcaatactttaatacatatgatggctactggggagacccaatatatgccaga

SEQ ID NO: 147395 - DNA, 80 bp, synthetic construct
  source 1..80: mol_type = other DNA
aacagcagcgagagctgggacgaggcctcagatgcctcttccagcaactaacccgtacccagatgggtctccacgtagac

SEQ ID NO: 147396 - DNA, 80 bp, synthetic construct
  source 1..80: mol_type = other DNA
ccttaacactccaggatccaatcaattcttgacaacagataactttcaatcaccgtgcatagttcccaattatgatgtca

SEQ ID NO: 147397 - DNA, 80 bp, synthetic construct
  source 1..80: mol_type = other DNA
caaggacactgatgagttaacgcaacaagcagtcctgcaaggtgacggtcttgaagcagccctcgttcatgcgacagagt

SEQ ID NO: 147398 - DNA, 80 bp, synthetic construct
  source 1..80: mol_type = other DNA
gttgtgtgcttagcagcaacgcacaccaggctgactgccttagcagtgtggccctttattgtggcatcctaaggagggat

SEQ ID NO: 147399 - DNA, 80 bp, synthetic construct
  source 1..80: mol_type = other DNA
cgcgtcggcgtcatgagcgtgacgcagcagcatcgctaccacgtcgtgcggtacccgcgtagcaaacggcgtctgtggct

SEQ ID NO: 147400 - DNA, 80 bp, synthetic construct
  source 1..80: mol_type = other DNA
tgtagttccaattaccatatcaatcagtccaatgtttgctgagttctctggagcacgagcaaggcctgcaagagctgctt

SEQ ID NO: 147401 - DNA, 80 bp, synthetic construct
  source 1..80: mol_type = other DNA
gcgcgtgggtgccaagaccaccgcggttgtgtcaatacaagtataaggctaacgtaaactttgagccaacgcctgtgacc

SEQ ID NO: 147402 - DNA, 80 bp, synthetic construct
  source 1..80: mol_type = other DNA
atgagctacatgctatctcaccccctcatgatgctactaaacaagcaccacgtagtggtgcccagcctaaagactaagcc

SEQ ID NO: 147403 - DNA, 80 bp, synthetic construct
  source 1..80: mol_type = other DNA
actagcaataaggcaggtgggttcagacgcttaaagtgtgttgtacatattcttttctaacctgtgttccacacagggtg

SEQ ID NO: 147404 - DNA, 80 bp, synthetic construct
  source 1..80: mol_type = other DNA
atccaacactctctgtgtcactggaaatgttccttttggctttgcgacagggagtgttggattgggcaccctatgacggg

SEQ ID NO: 147405 - DNA, 80 bp, synthetic construct
  source 1..80: mol_type = other DNA
gcctacaccccctattatcaagccaagcgtaaacaaggtctatatgtttgatcccccaggtccaaagctcattgagggct

SEQ ID NO: 147406 - DNA, 80 bp, synthetic construct
  source 1..80: mol_type = other DNA
ggtgatgtacacgatgctgttgttggtgcaatgactcgcgtggctgacacggtgtccagtgggccggcaaactccgaaag

SEQ ID NO: 147407 - DNA, 80 bp, synthetic construct
  source 1..80: mol_type = other DNA
aagcaacctgctgtgttgaaagacaatgatcccagattggaagtcaatttctctgaatctttgttttcaaagtataaagg

SEQ ID NO: 147408 - DNA, 80 bp, synthetic construct
  source 1..80: mol_type = other DNA
gtaatcctcacaataactcactatatggaggctcagtatatcaaacaaaattagatactaataacccatacaaaagaatg

SEQ ID NO: 147409 - DNA, 80 bp, synthetic construct
  source 1..80: mol_type = other DNA
atccggctcaccgagcgtagtactctggtattttgtacctttgtacgcctgttttccaaaattccccatcctattcattt

SEQ ID NO: 147410 - DNA, 80 bp, synthetic construct
  source 1..80: mol_type = other DNA
acattaaagaggattacaatacccagagctttactaaatggaaaattaacttacaagagatggcacagattaggagaaag

SEQ ID NO: 147411 - DNA, 80 bp, synthetic construct
  source 1..80: mol_type = other DNA
ctgaaaagggagagtttacaggtctaggtatctatgaccgtgtgtgtgtcataccaactcacgcacaaccagataacaaa

SEQ ID NO: 147412 - DNA, 80 bp, synthetic construct
  source 1..80: mol_type = other DNA
ggaaaccattctcttcagactatgtgctagcaagtacaaatcatactctacttcaccctccaaccataacatgcacaaca

SEQ ID NO: 147413 - DNA, 80 bp, synthetic construct
  source 1..80: mol_type = other DNA
cccttttaggttgtgatatttcaccatggcagtggttaaaaaagaaggcttgtgacattctagagattccttatgtcgtc

SEQ ID NO: 147414 - DNA, 80 bp, synthetic construct
  source 1..80: mol_type = other DNA
gcgcagacgaaccctgttttgcaagggctgcctgtcctcaacactccaggatccaatcagttcttgacaacagacaactt

SEQ ID NO: 147415 - DNA, 80 bp, synthetic construct
  source 1..80: mol_type = other DNA
agatgaacgacttgaagtcaattttgaggaatccctattctcaaaatataaaggcaatgtgaagatggagatcacagaga

SEQ ID NO: 147416 - DNA, 80 bp, synthetic construct
  source 1..80: mol_type = other DNA
acgccgggtggcatctgcggcatggcggtgggaggcgcgtcgggcggaccgccgggcatcgccgtcggctgtgacggttg

SEQ ID NO: 147417 - DNA, 80 bp, synthetic construct
  source 1..80: mol_type = other DNA
tgaaaaaggggagttcacaggcctgggtatctatgatcgcgtgtgtgttatacctacacatgcacaaccaggcaataatg

SEQ ID NO: 147418 - DNA, 80 bp, synthetic construct
  source 1..80: mol_type = other DNA
tcatcactaatagcatggttaagtggcacgtccctaaggacgaaaaccccaatgacacagactacaatagtttgaaacac

SEQ ID NO: 147419 - DNA, 80 bp, synthetic construct
  source 1..80: mol_type = other DNA
tactgtaacaggccccacatttaggtacatggaagctaatgattattacccagcaagataccaatcccacatgcttattg

SEQ ID NO: 147420 - DNA, 80 bp, synthetic construct
  source 1..80: mol_type = other DNA
ttgggtggctatggaagctagtaccagtagacatcccacaagaggaagaagacaatgaggctaactgcttaatgcatgca

SEQ ID NO: 147421 - DNA, 80 bp, synthetic construct
  source 1..80: mol_type = other DNA
gaagactataatgagagggtgaagaactacaatgcttggaaacaacaattggaaaatcaaactcttgatgacttagatga

SEQ ID NO: 147422 - DNA, 80 bp, synthetic construct
  source 1..80: mol_type = other DNA
gtcatgttaatacagttaaatttacaacagcctcaaaccccactacgacgaatggtagtgccccatactacacatttgca

SEQ ID NO: 147423 - DNA, 80 bp, synthetic construct
  source 1..80: mol_type = other DNA
tttgtctaatgagtcctcggtggtgaagaggataagaatgagcaggtacaagtacaccaggttctcatagagacacaagg

SEQ ID NO: 147424 - DNA, 80 bp, synthetic construct
  source 1..80: mol_type = other DNA
tgttccacccaccgcccttcaccacggtcgaggcggtggatctgtgcgccgagaacctgtccgacgtaacacaacgtcgc

SEQ ID NO: 147425 - DNA, 80 bp, synthetic construct
  source 1..80: mol_type = other DNA
ccccacgggcgaccgtgtctcagcctgcgtggcggccagcccagcttttgctgggacgccttgattgagacatggtgtga

SEQ ID NO: 147426 - DNA, 80 bp, synthetic construct
  source 1..80: mol_type = other DNA
gaatcgagtgcctcttcgagcagctgataaaaacacagcagggagtccacctagatccttccctcctgtaggccccagac

SEQ ID NO: 147427 - DNA, 80 bp, synthetic construct
  source 1..80: mol_type = other DNA
gactatcctgattgtaacttagccttgttagcaaatcaacctgagcccactataatcaatgttggagatgttgtatccta

SEQ ID NO: 147428 - DNA, 80 bp, synthetic construct
  source 1..80: mol_type = other DNA
aggatgatcaacagccacgtggagtaccacaactacggctgcaagcggccggtcagcgtggcggcctacatggagccctg

SEQ ID NO: 147429 - DNA, 80 bp, synthetic construct
  source 1..80: mol_type = other DNA
cctttgaagatgagagtccatataccacaccatcatgcaaccaaatgatgaaattggcttatttagataggggattttac

SEQ ID NO: 147430 - DNA, 80 bp, synthetic construct
  source 1..80: mol_type = other DNA
tgtgtgccgtggataagtcagacgcattaccggtttgttcaacacgatgtgtacacggatgctggttatatcacatgctg

SEQ ID NO: 147431 - DNA, 80 bp, synthetic construct
  source 1..80: mol_type = other DNA
cacggcctggggatggtaccggagaagaagatggcgcccatggagaaggagaaggtgggcgatacgcagaagaagaccta

SEQ ID NO: 147432 - DNA, 80 bp, synthetic construct
  source 1..80: mol_type = other DNA
ggcgacggcgccggtacgttagacgatacagacgcagactaactgtcagacgaaagagaaacaaactcagactaagcgta

SEQ ID NO: 147433 - DNA, 80 bp, synthetic construct
  source 1..80: mol_type = other DNA
tcttcttgccatttgtcagtggcttccgggtccgtctgggggccgccattttagcttcggccgccattttaggccctcgc

SEQ ID NO: 147434 - DNA, 80 bp, synthetic construct
  source 1..80: mol_type = other DNA
gtcttaggctagcttaccaacaggggctaccagtgctgaacacaccaggaagtaaccagtttatgacctcagatgatttc

SEQ ID NO: 147435 - DNA, 80 bp, synthetic construct
  source 1..80: mol_type = other DNA
tggtgttacaaaacaagagaacaaaagctagctactccatcaacactgttgttcaacagcttaggcaagagaagaaaaac

SEQ ID NO: 147436 - DNA, 80 bp, synthetic construct
  source 1..80: mol_type = other DNA
aacgaatactattcacccaaagacgcacagtggggagaccccattcatataatttcaagcaatgaagttacaggcactca

SEQ ID NO: 147437 - DNA, 80 bp, synthetic construct
  source 1..80: mol_type = other DNA
ttcgtctttcggacgctcgaactctcggtctcgacctcaccaccgtcatgacagagcgtcaaagtcaattgcccgaaaag

SEQ ID NO: 147438 - DNA, 80 bp, synthetic construct
  source 1..80: mol_type = other DNA
cttcattaattcaatcaatttgtaatacccatcatatctttagggatgaaatatatgtggttgaaggtggcatgccctca

SEQ ID NO: 147439 - DNA, 80 bp, synthetic construct
  source 1..80: mol_type = other DNA
gaaggaagactgcctacgggaaatctgatcacacgtatgctgacagcacaaataatagaaccaaaggaggtgagtggagc

SEQ ID NO: 147440 - DNA, 80 bp, synthetic construct
  source 1..80: mol_type = other DNA
gcaaagcggccaaacttgcagtgggcctggttgcacgaggccgtgcctaggatgcggagggccgagcctccactcccgcc

SEQ ID NO: 147441 - DNA, 80 bp, synthetic construct
  source 1..80: mol_type = other DNA
ccaatgataacatatctaaaagatgaacttagagctccagaaaagattaaaatggggaaaaccagagtgatagaagctag

SEQ ID NO: 147442 - DNA, 80 bp, synthetic construct
  source 1..80: mol_type = other DNA
ggtctaaacacgttagaaaatgcaaatattgttctagcgttaataagtgtatgttaatcgttaagtatcacgctcaagac

SEQ ID NO: 147443 - DNA, 80 bp, synthetic construct
  source 1..80: mol_type = other DNA
cccactatctttagcacacctcacataaagtatgacatgttccaaggtaaattcattcgtcctcccaccaaggaggactg

SEQ ID NO: 147444 - DNA, 80 bp, synthetic construct
  source 1..80: mol_type = other DNA
cttgcaccctccctcattatcctaacccttgtaacattagaagatgagcaacccgtgcaataggagataccacaaccagt

SEQ ID NO: 147445 - DNA, 80 bp, synthetic construct
  source 1..80: mol_type = other DNA
catccaccgcctccctaatacgcaggcgcagtaggaggctccgccccctacaacccccgggggggtaaaccccgcctaag

SEQ ID NO: 147446 - DNA, 80 bp, synthetic construct
  source 1..80: mol_type = other DNA
gcctctcaaaacaatgcttcagaatccattttctctataagcttgagcccagcagctgacaggagactagcgtacaccat

SEQ ID NO: 147447 - DNA, 80 bp, synthetic construct
  source 1..80: mol_type = other DNA
gatgtctccacccgcgagtctcgatggtacgacgcgcttcgaggaagccacgatgctttttgtggctgtggtgatcctat

SEQ ID NO: 147448 - DNA, 80 bp, synthetic construct
  source 1..80: mol_type = other DNA
ggcgtagtactcttgtactctggtacatttgtacgccagtttttcttcccacccccaagtaacctttagaagcaattgca

SEQ ID NO: 147449 - DNA, 80 bp, synthetic construct
  source 1..80: mol_type = other DNA
tggatttactccaatcaacctctccacttataagattatcatcacagtcttaccaaatagaagcatattcaacaatgggc

SEQ ID NO: 147450 - DNA, 80 bp, synthetic construct
  source 1..80: mol_type = other DNA
ttaaggagcccgctgttttgactaagtcagatcctagacttgaagtcgattttgaggaagccatcttttccaaatacgtg

SEQ ID NO: 147451 - DNA, 80 bp, synthetic construct
  source 1..80: mol_type = other DNA
caagactaaaccagacaaagggtacgtgttctatgacaccctttttggcaacggcaaaatgccagacggctccggacacg

SEQ ID NO: 147452 - DNA, 80 bp, synthetic construct
  source 1..80: mol_type = other DNA
ctagctcagatctatcacaaaatcttggaggaagataaaaggagacaatgcctttctaatgctttagaagcagtttttca

SEQ ID NO: 147453 - DNA, 80 bp, synthetic construct
  source 1..80: mol_type = other DNA
tccacattaaatgttgtatcatattttcagtgtccaatttccctactttcatagtagggaaattggacactgaaaatatg

SEQ ID NO: 147454 - DNA, 80 bp, synthetic construct
  source 1..80: mol_type = other DNA
gtactctggtacttcggtacctttgtacgcctgttttatctccctccccaatccacctattgagctttgatttgaaagct

SEQ ID NO: 147455 - DNA, 80 bp, synthetic construct
  source 1..80: mol_type = other DNA
ccgcaactcatcacgccgccgtgggtcctccacagcttcgaccagcgaagaggcctctttactgagacagctctcagacg

SEQ ID NO: 147456 - DNA, 80 bp, synthetic construct
  source 1..80: mol_type = other DNA
caaccaacccggtacagacgagtactttacaaaatatgacgcactgtggggagacaacatatatgctaatagcttaataa

SEQ ID NO: 147457 - DNA, 80 bp, synthetic construct
  source 1..80: mol_type = other DNA
agatgtgtataagagacaagtgtatgtcgtgcatttcctgggcggggtttacatcataatataaagaagtgcacttccga

SEQ ID NO: 147458 - DNA, 80 bp, synthetic construct
  source 1..80: mol_type = other DNA
atatggattgggtccaagatttggaggggtgtatactggtaatgtaaagataatgaattaccatcttatgactccagaag

SEQ ID NO: 147459 - DNA, 80 bp, synthetic construct
  source 1..80: mol_type = other DNA
tccgacaccgcctttggttacacgcatgactacaccacttggatttcctatctgacgactggtggcttttctactccttt

SEQ ID NO: 147460 - DNA, 80 bp, synthetic construct
  source 1..80: mol_type = other DNA
gtaccatgggcaaatgagtctttaacacctgattggaacaatatgacatggcaggaatgggaacaaaaggtccgctacct

SEQ ID NO: 147461 - DNA, 80 bp, synthetic construct
  source 1..80: mol_type = other DNA
attacaaacctgatcaaggagaagttgcaattttcattgagcatagagaaaatccaaaattcattacagcagggccaagt

SEQ ID NO: 147462 - DNA, 80 bp, synthetic construct
  source 1..80: mol_type = other DNA
ccagagcctagccctgagccatggcgtggcgccggtggcgatggcggccgtggtggagacgccggaggcgccgccggtgg

SEQ ID NO: 147463 - DNA, 80 bp, synthetic construct
  source 1..80: mol_type = other DNA
tatatttgtttgttggatttactccgttgactttgctcacgcttggttttattgagatagtgtagttaataagacaccac

SEQ ID NO: 147464 - DNA, 80 bp, synthetic construct
  source 1..80: mol_type = other DNA
gattatgataattatgataagagtgtcaaaaatttcacaatttggaagataaatataaaagaaatggcccaaatcagaag

SEQ ID NO: 147465 - DNA, 80 bp, synthetic construct
  source 1..80: mol_type = other DNA
cttggattcccagaccaccaagggccaaaccataccttcatataggtagaacaaactatgatggatcacagtcaatcatt

SEQ ID NO: 147466 - DNA, 80 bp, synthetic construct
  source 1..80: mol_type = other DNA
acccggcacacacccacccacccagccgcgcccgcgacacacccaacccggcgccggtgcgggacggtgctgagggactc

SEQ ID NO: 147467 - DNA, 80 bp, synthetic construct
  source 1..80: mol_type = other DNA
tgtgccttacattaactgcacaccaatggacagtatgttacgccacaacaatgtctctcttgtaattatacccatctgtc

SEQ ID NO: 147468 - DNA, 80 bp, synthetic construct
  source 1..80: mol_type = other DNA
caacgaagaaacaccaggattcattgttgacttgctctcagcatccaaagaccctaaagtaatacagtattgtgaagaac

SEQ ID NO: 147469 - DNA, 80 bp, synthetic construct
  source 1..80: mol_type = other DNA
caacggactcttcatcattgtctccaacggttcacctggtgctgaacctgttgacattacggtccgttataagtacgact

SEQ ID NO: 147470 - DNA, 80 bp, synthetic construct
  source 1..80: mol_type = other DNA
aacacagatcgagatcagagtctagtattgaatctttctttgcgcgtggtgcatgtgtgactatcatgactgtggacaat

SEQ ID NO: 147471 - DNA, 80 bp, synthetic construct
  source 1..80: mol_type = other DNA
gcggggtcttttggactaccaactttccctcggtggtgtcctgccaggacggtctcaacgtgtcctggtttaaggccgca

SEQ ID NO: 147472 - DNA, 80 bp, synthetic construct
  source 1..80: mol_type = other DNA
acccttcataattgcaacatctaactggtctaatccaagtcctaaaacggtttatgttaaggaagccatagaccgtaaac

SEQ ID NO: 147473 - DNA, 80 bp, synthetic construct
  source 1..80: mol_type = other DNA
tgctcactcaccaggtcatgtacgtaccaccaggaggttcggtaccaagcaatgcagatagctacgcgtggcaaacttca

SEQ ID NO: 147474 - DNA, 80 bp, synthetic construct
  source 1..80: mol_type = other DNA
atactattagccatctcatcagacttgcaagtagaccacacaaatgaacctggtccagacaacattcctacatgtaactg

SEQ ID NO: 147475 - DNA, 80 bp, synthetic construct
  source 1..80: mol_type = other DNA
tgctcaagtctcatctcagaaagttggagctcacgaaaattcgaacagagcgtatggtggatccactatcaactacacca

SEQ ID NO: 147476 - DNA, 80 bp, synthetic construct
  source 1..80: mol_type = other DNA
tttggcgtcgctgccccggtcgtgctgctccatcatctccaccagcttcttgcagttgagctcgtggcggctggcggtca

SEQ ID NO: 147477 - DNA, 80 bp, synthetic construct
  source 1..80: mol_type = other DNA
catctatacctataacagtatctattagtccaatgttttcagaattttcaggaccaagaaataaggttgtttttagtcaa

SEQ ID NO: 147478 - DNA, 80 bp, synthetic construct
  source 1..80: mol_type = other DNA
agactcgcatagtcgttcccgccagcactccaaccaacatggctatgctcgcgtttgtcagcgcatgtccagactttagt

SEQ ID NO: 147479 - DNA, 80 bp, synthetic construct
  source 1..80: mol_type = other DNA
aggttggatcatcaggctggtggtggaaattaccagactgtttaagggacatgggtgtatttggacaaaacatgtaccac

SEQ ID NO: 147480 - DNA, 80 bp, synthetic construct
  source 1..80: mol_type = other DNA
aaaaagaatctgatggctggtggtggaagttccctgaggcactcaagaatatgggcttgttcgggcaaaacatggaatac

SEQ ID NO: 147481 - DNA, 80 bp, synthetic construct
  source 1..80: mol_type = other DNA
tgccttcgctgacattagagacttgtgggtttatgaagaggaagccatggaacaaggtatttcaagttatattgagtcac

SEQ ID NO: 147482 - DNA, 80 bp, synthetic construct
  source 1..80: mol_type = other DNA
cttttaaaccaattacttgggagactgttacctttcttaaacggggcttcaaacctgatgaaaagtatcctttcctaatt

SEQ ID NO: 147483 - DNA, 80 bp, synthetic construct
  source 1..80: mol_type = other DNA
gggggcagacatttcacctcttgtttgtggacgaggctaactttatcaagaaggaggccctgccggcgatcctgggcttt

SEQ ID NO: 147484 - DNA, 80 bp, synthetic construct
  source 1..80: mol_type = other DNA
agaagagcaaacatattaaacacattcttaacagaaggctcatacagaaggccacaagtagataagtacagaaaaccttt

SEQ ID NO: 147485 - DNA, 80 bp, synthetic construct
  source 1..80: mol_type = other DNA
ctaagccaaatgacaccaatgctaaacaactgttcaaaacgtggagaatttcataccttgaaacataccaactaaggaga

SEQ ID NO: 147486 - DNA, 80 bp, synthetic construct
  source 1..80: mol_type = other DNA
aggaaatgtatcagtcaaatacactctcacacatcctggtgaagctggtattgacttgagcaaagcagaagtagataaag

SEQ ID NO: 147487 - DNA, 80 bp, synthetic construct
  source 1..80: mol_type = other DNA
tgtgtctggtctcaagtacgggctaacaataacacctgctgacaagtctgaccagtttgtgaaagtcaactgggacaatg

SEQ ID NO: 147488 - DNA, 80 bp, synthetic construct
  source 1..80: mol_type = other DNA
acagaggaacagtatataacaatcaaattaaaaacttaccaaaacaagcagctgaattatactcaaaagcaacaaaaacc

SEQ ID NO: 147489 - DNA, 80 bp, synthetic construct
  source 1..80: mol_type = other DNA
tggaacggctagaacgtgaatggcaagaagaggccggcaagctcacggtaacttctgtggaggacgtgcagcgtgtcttg

SEQ ID NO: 147490 - DNA, 80 bp, synthetic construct
  source 1..80: mol_type = other DNA
ttctttggtaggtcagcatgtgtcaccattttggaggtagagaactttaacgcaacagaagcgagtgataagaaaaaaca

SEQ ID NO: 147491 - DNA, 80 bp, synthetic construct
  source 1..80: mol_type = other DNA
ccacaataattgttccatatgtcaatgcagttcccatggactcaatgcgaagtcataacaattggagtctggtgataatt

SEQ ID NO: 147492 - DNA, 80 bp, synthetic construct
  source 1..80: mol_type = other DNA
tatcaatgattgctaatgtaattagtattttgggtgtaatttatattatctataagctcttctgttcactgcagggacca

SEQ ID NO: 147493 - DNA, 80 bp, synthetic construct
  source 1..80: mol_type = other DNA
ctcgcaaagacgaacctccatcattaaaacccagactggaggtagagttcctaaagcgtaaacctggttacttcccagag

SEQ ID NO: 147494 - DNA, 80 bp, synthetic construct
  source 1..80: mol_type = other DNA
gttattgtacccttaataacatggggaaaatatttgttaggcatgttaacgcaaacataccaaacttggtgagcaccgtc

SEQ ID NO: 147495 - DNA, 80 bp, synthetic construct
  source 1..80: mol_type = other DNA
tcccacccctcttatgttgaacagatccctatccaacgggaccaggaacagccaaccaaaggagaaatagaagaaggcgc

SEQ ID NO: 147496 - DNA, 80 bp, synthetic construct
  source 1..80: mol_type = other DNA
agatggcacaatgtggactggatccactatggacattacacacataaaatgtgtgaactaggggactaccatagaactac

SEQ ID NO: 147497 - DNA, 80 bp, synthetic construct
  source 1..80: mol_type = other DNA
ctctagaagagatgctgacagcttgccaaggagtgggaggtccagggcaaaaggctagactcatggcagaagcgctaaaa

SEQ ID NO: 147498 - DNA, 80 bp, synthetic construct
  source 1..80: mol_type = other DNA
cactcgtctacgtccttgaggtcaaagacagtgtcctcctcaaggtcaaagcctaggtcttcccactcgtcgtcatcgct

SEQ ID NO: 147499 - DNA, 80 bp, synthetic construct
  source 1..80: mol_type = other DNA
tcaagacagagccagttaccgatacaaggtctaccatcacactagcgagagacgaacacttgcccgacatgcactcacac

SEQ ID NO: 147500 - DNA, 80 bp, synthetic construct
  source 1..80: mol_type = other DNA
gccgcacatctatttttgctaattgcacgtttcttcgtggtcacgtcggctcgaagaggttggtgtgaaaacgtcatctc

SEQ ID NO: 147501 - DNA, 80 bp, synthetic construct
  source 1..80: mol_type = other DNA
cgttcaggacgttatcacccgtggtgttggggcgggtgttcctcgtcctcagtttttggccctgcctccggccccatccc

SEQ ID NO: 147502 - DNA, 80 bp, synthetic construct
  source 1..80: mol_type = other DNA
gagtgatgcaactaaccctaggcaattctaccattaccacacaggaggcggccaattctgtcgttgcatacggccggtgg

SEQ ID NO: 147503 - DNA, 80 bp, synthetic construct
  source 1..80: mol_type = other DNA
aggaagtccccaggtggacgggcggaaaagaggaagcgcctaggggaccgcggaggcaggaacagacgaagtacgcttgt

SEQ ID NO: 147504 - DNA, 80 bp, synthetic construct
  source 1..80: mol_type = other DNA
cgaccccacaaaatgcagatacgtgcttagagacatgcccctgtgggccatgtgccagggctacgcagattatatagact

SEQ ID NO: 147505 - DNA, 80 bp, synthetic construct
  source 1..80: mol_type = other DNA
agtgtattaatgacctacttaaatctgttgattctaaagagctcagagagtattgcaagcagaaaaactggcttatccca

SEQ ID NO: 147506 - DNA, 80 bp, synthetic construct
  source 1..80: mol_type = other DNA
tctcctttaccaacaatccccccatgaagaccaaccagtacactgctcccatgacccatccgggcatgctcatgagagcc

SEQ ID NO: 147507 - DNA, 80 bp, synthetic construct
  source 1..80: mol_type = other DNA
ggatctgctgtccgtcaaagatgacacgccgcaacggaattttagccagccgcgcgatggccccggcctcgtagtgaaaa

SEQ ID NO: 147508 - DNA, 80 bp, synthetic construct
  source 1..80: mol_type = other DNA
ctaatgtataattaatcatgcatttgattttaaaaaagtaggttacactcattttaggccagactttatttgtagattaa

SEQ ID NO: 147509 - DNA, 80 bp, synthetic construct
  source 1..80: mol_type = other DNA
gtgacaatcagccagattgttgacggtcaagcacttctgtttccccggtaccctcgtatacgcttcacccgaggcgaaaa

SEQ ID NO: 147510 - DNA, 80 bp, synthetic construct
  source 1..80: mol_type = other DNA
gcgaaggagccacggaggggatcctgcgcgtcccgagggcgggtgccgaaggtgagtttacacaccggagtcaagaggca

SEQ ID NO: 147511 - DNA, 80 bp, synthetic construct
  source 1..80: mol_type = other DNA
tcccgcgcagggtccacagagcctccagtcgaccgcccgatcggagcacgcagcgcgcctcggaatactctactcggtac

SEQ ID NO: 147512 - DNA, 80 bp, synthetic construct
  source 1..80: mol_type = other DNA
agttgttgacccgatcaccatgggtcccagatgggtattccacgcctgggactggcgacgtggctaccttagtgagggag

SEQ ID NO: 147513 - DNA, 80 bp, synthetic construct
  source 1..80: mol_type = other DNA
gtccagagatttacaacgcatgatgtgttacaaaaaaactcatagaacagaaccagtttgcatattgttgcacggccaac

SEQ ID NO: 147514 - DNA, 80 bp, synthetic construct
  source 1..80: mol_type = other DNA
aaaaggtagaataaaacgcaaaattaaagtaaggccccccaccttattcacagacaaatggtactttcagagagacctct

SEQ ID NO: 147515 - DNA, 80 bp, synthetic construct
  source 1..80: mol_type = other DNA
tcataccaagccttctagatggtgaacttttggcattcgattactccaactttgatgcaagcttgtctccagtgtggttt

SEQ ID NO: 147516 - DNA, 80 bp, synthetic construct
  source 1..80: mol_type = other DNA
tgaacctgctacaaacaaaggcctgtggcagtatacatacaccagactaatgtcatcgtactattataagggcaatcctc

SEQ ID NO: 147517 - DNA, 80 bp, synthetic construct
  source 1..80: mol_type = other DNA
tgggccctcaagtccagccccaccgagacccgagtggcccggatccccccagcggcccttctctctgtccccctgctcct

SEQ ID NO: 147518 - DNA, 80 bp, synthetic construct
  source 1..80: mol_type = other DNA
ccagaagatttaattgagacaaggcatgtaattaacaacaggttgaggtcggaatgcacaatcgagtccttctttggtag

SEQ ID NO: 147519 - DNA, 80 bp, synthetic construct
  source 1..80: mol_type = other DNA
agaaggccgcagagacgctggagatggcgccgctggagacgacgacctacccggagagtccgtagaagagctgctcgacc

SEQ ID NO: 147520 - DNA, 80 bp, synthetic construct
  source 1..80: mol_type = other DNA
atgtaactatcagaataagaccccccaacctcttccagcacaagtggtacactcagtcagacctgtgttccgttagtctg

SEQ ID NO: 147521 - DNA, 80 bp, synthetic construct
  source 1..80: mol_type = other DNA
gtcacatttttacacaaagagagacagcaactatggctggtgtaactttaaccctattgcctttaataacaatttaatta

SEQ ID NO: 147522 - DNA, 80 bp, synthetic construct
  source 1..80: mol_type = other DNA
agtcgtcatcgtccgagtcctcgtcctcagaagaggaccgcggcccgtgtactctgggcaacacggtggtagagaactgc

SEQ ID NO: 147523 - DNA, 80 bp, synthetic construct
  source 1..80: mol_type = other DNA
gaaagaaccagccctgactttccaggcctataccaagaagtagtttacaaccctttagtagatgaaggagaaggcaacat

SEQ ID NO: 147524 - DNA, 80 bp, synthetic construct
  source 1..80: mol_type = other DNA
tgcctgtgcctttgtctgtgaaggggttgtatataatgtcagagtaggcccctgtggtttcaaagtagctcctgccagct

SEQ ID NO: 147525 - DNA, 80 bp, synthetic construct
  source 1..80: mol_type = other DNA
agctggagatcaccccggccgacctgcgaaccttttctcgcgacacggacgtggtgaaccacctgctgaagctgctgccg

SEQ ID NO: 147526 - DNA, 80 bp, synthetic construct
  source 1..80: mol_type = other DNA
gtcatcagtgttgtcagggtcctgtgggccattgtcaggaccacctccaggtgcgcctaggttttgagagcagagtggtg

SEQ ID NO: 147527 - DNA, 80 bp, synthetic construct
  source 1..80: mol_type = other DNA
tggacaatccggcctccaccacgtcaaaagacaaactgttttcagtatggaaaatcacatacagggacactgtgcagcta

SEQ ID NO: 147528 - DNA, 80 bp, synthetic construct
  source 1..80: mol_type = other DNA
agtacaagttctactttaactgggggggcgactctatatttccacagattattaaaaacccctgtccagacaacagcctg

SEQ ID NO: 147529 - DNA, 80 bp, synthetic construct
  source 1..80: mol_type = other DNA
tgcttacatagcacccccaccatacgtccctgaccttctttttcctaacactcaaaaaaaaaaacaattttccaactacg

SEQ ID NO: 147530 - DNA, 80 bp, synthetic construct
  source 1..80: mol_type = other DNA
aaccacaagccctgggtgctgtagagataggggcgaccgctgatgtgggcccagaaacactaattgaaacaaggtatgta

SEQ ID NO: 147531 - DNA, 80 bp, synthetic construct
  source 1..80: mol_type = other DNA
caagaaggagacgtgcaagagctgctagatatcctcgacgacgcagagtaaggagattcaaaaggaggagaaggagaagg

SEQ ID NO: 147532 - DNA, 80 bp, synthetic construct
  source 1..80: mol_type = other DNA
accaacgccaccaggttcataccagaaaatgatgccattacatctcaaacacttagagcgatagtcataaatagaataaa

SEQ ID NO: 147533 - DNA, 80 bp, synthetic construct
  source 1..80: mol_type = other DNA
tctggcgtgcagttcaggtatacagatcctgatacttacaccagtgctgggcatctttcctgttggtatcagacatccct

SEQ ID NO: 147534 - DNA, 80 bp, synthetic construct
  source 1..80: mol_type = other DNA
tactcacaaatgtaccaaagtttccaatgcttgatgtggaggtaggggatgttataccctacggagacataaatttgagc

SEQ ID NO: 147535 - DNA, 80 bp, synthetic construct
  source 1..80: mol_type = other DNA
tagagtgatgacccaaattgcatccatacgaacctacgggtttggacaccaaaacaaggctatctatgtggccggataca

SEQ ID NO: 147536 - DNA, 80 bp, synthetic construct
  source 1..80: mol_type = other DNA
atcaggcaataggcttctctgctacagatgacaaaagacaaaaggtgtttgatgtattatacgaacaaaactcttattgg

SEQ ID NO: 147537 - DNA, 80 bp, synthetic construct
  source 1..80: mol_type = other DNA
tctgataatttcaagaaattagattatagtaatgtgactttcttgaaaagaggatttagacaagatgaaaaatataattt

SEQ ID NO: 147538 - DNA, 80 bp, synthetic construct
  source 1..80: mol_type = other DNA
tctactcgaccaccctcgttagcacaccttactccacaggtgctcccatagcctccgagccctccacatcaaattccacc

SEQ ID NO: 147539 - DNA, 80 bp, synthetic construct
  source 1..80: mol_type = other DNA
tctcagtcagactattgagagacactacgcacatctcacaagcagcattgccccaggggattgaagatttaattgagaag

SEQ ID NO: 147540 - DNA, 80 bp, synthetic construct
  source 1..80: mol_type = other DNA
caaactctgccaccgcataccccttgcccttctcctttgtgcgtgcgtacccagactccccctgggctgccatgtacaac

SEQ ID NO: 147541 - DNA, 80 bp, synthetic construct
  source 1..80: mol_type = other DNA
gggcccagcaccgagaccaccaggcgcgccgcagcctcctgtaaacagaggcctaccggcactgccgccgcctccagaac

SEQ ID NO: 147542 - DNA, 80 bp, synthetic construct
  source 1..80: mol_type = other DNA
catatgagacaataggacgcacaaattaccccaagaaaaataaaattgttccagtaattaagaagagagaaaatataaca

SEQ ID NO: 147543 - DNA, 80 bp, synthetic construct
  source 1..80: mol_type = other DNA
ttgtgcggtggccaatatcatataggcaagtagcccagctacgcaggaagatggaaatgtttacatacctacggtatgat

SEQ ID NO: 147544 - DNA, 80 bp, synthetic construct
  source 1..80: mol_type = other DNA
cttccgggtcaaagttcaccagtgacatcataagtcacgtggtggaggcgtgcctaaaacccggaagcatcctcgatcac

SEQ ID NO: 147545 - DNA, 80 bp, synthetic construct
  source 1..80: mol_type = other DNA
gaggttggcttatcagcaaggtctgccagtgctgaatacaccgggaagcaatcagttcatgacctcggatgactttcagt

SEQ ID NO: 147546 - DNA, 80 bp, synthetic construct
  source 1..80: mol_type = other DNA
aatcccctaaatgacaaaggggtgggcaacatgatgtggtatcaatacaacacaaaggcagacacacagtttgttgcctc

SEQ ID NO: 147547 - DNA, 80 bp, synthetic construct
  source 1..80: mol_type = other DNA
aacatgttggtatcaaacatcacttgtgtcacctcccagcaccccccaacaagctagaatgctatgttttgtatcaggat

SEQ ID NO: 147548 - DNA, 80 bp, synthetic construct
  source 1..80: mol_type = other DNA
tcccgttgcaaaaactaagggcgctttccccgtgacgcaacgggagtttaaaaatgaggcaccttatgacgggcaacttg

SEQ ID NO: 147549 - DNA, 80 bp, synthetic construct
  source 1..80: mol_type = other DNA
ctgttgactgcgttggattccacggatgcggacgtggcaatttactgcagagacaaaaaatgggagactacactgaaaga

SEQ ID NO: 147550 - DNA, 80 bp, synthetic construct
  source 1..80: mol_type = other DNA
caccataatgttgaaattactactagagtataccataaggctaagcatgttaaagcctggtgtcctagaccacttagagc

SEQ ID NO: 147551 - DNA, 80 bp, synthetic construct
  source 1..80: mol_type = other DNA
tgtcttacatagggggggatggtacaaatgtcaaatacaaacacactcacccaggtgaagtaggacaccgcattggtgca

SEQ ID NO: 147552 - DNA, 80 bp, synthetic construct
  source 1..80: mol_type = other DNA
aaggatttgaagtgtgggagattgatgtgatgggctttgtgcagttacgcaggaagctagaaatgttcacctacatgcgc

SEQ ID NO: 147553 - DNA, 80 bp, synthetic construct
  source 1..80: mol_type = other DNA
aaggagcaccagcactgaattcaccaaatgttgaagcatgcggttacagtgatagggttcaacaaatcaccctaggtaat

SEQ ID NO: 147554 - DNA, 80 bp, synthetic construct
  source 1..80: mol_type = other DNA
ttaactatattcccacatcagctgattaacctaagaaccaacaattcagcaactattgtggtaccttacatcaattgtgt

SEQ ID NO: 147555 - DNA, 80 bp, synthetic construct
  source 1..80: mol_type = other DNA
agtacaacaaactgctttctaaaagtcagcagtctttggggagaccacgtatatgacaaagccaagttaattcaagcctg

SEQ ID NO: 147556 - DNA, 80 bp, synthetic construct
  source 1..80: mol_type = other DNA
acgaaaggaagcaatgctaggaacacacgttatatgggatgttggactccaatcttcttgtaccatggtagtgccctgga

SEQ ID NO: 147557 - DNA, 80 bp, synthetic construct
  source 1..80: mol_type = other DNA
cgtctaacaccaaacgtcaagttgcccgtttaccttgcgatactgtgttgtgctcgcacagcccgtgctgaaacggcgtg

SEQ ID NO: 147558 - DNA, 80 bp, synthetic construct
  source 1..80: mol_type = other DNA
tccaggcaaagaggtgcaaatagatggtatcacaactgaagtgcaagactcttatgatctatataacaaagatggagtga

SEQ ID NO: 147559 - DNA, 80 bp, synthetic construct
  source 1..80: mol_type = other DNA
agactcaataacaatggaattcaagaaggaacatgttactcacctgtgttcggtgccgtacgaggtgcggttcacccccg

SEQ ID NO: 147560 - DNA, 80 bp, synthetic construct
  source 1..80: mol_type = other DNA
ggttacaattatacagtaaccatgggcgcacaggtgagtaaacaaaatgttggttcacatgagagcggcatatcagcatc

SEQ ID NO: 147561 - DNA, 80 bp, synthetic construct
  source 1..80: mol_type = other DNA
cttacgggatttcatccactgatgacatgggtaccttatgtttcagagcacttgaggtaacagacaatacacacattaag

SEQ ID NO: 147562 - DNA, 80 bp, synthetic construct
  source 1..80: mol_type = other DNA
tttttaccctttccggactacaaaaatggcggattccgtgacgtcatggccgccattttaagtaaggcggggcaaggctg

SEQ ID NO: 147563 - DNA, 80 bp, synthetic construct
  source 1..80: mol_type = other DNA
cttccacaccttcgacatcagacgtggactgtttagctcggcaagtcttaaaagagtgtcagaataccaacctcctgatg

SEQ ID NO: 147564 - DNA, 80 bp, synthetic construct
  source 1..80: mol_type = other DNA
actcaggcaaacctgacaaataaggccccccaggaaagacccccgggtggcatcgggaggtatagagaggtggcatgcgg

SEQ ID NO: 147565 - DNA, 80 bp, synthetic construct
  source 1..80: mol_type = other DNA
tctatggtgatgatgtcatcttatccctagacaaagaaattgaaccagaaaaactgcagagtattatggcagaatcattt

SEQ ID NO: 147566 - DNA, 80 bp, synthetic construct
  source 1..80: mol_type = other DNA
ttgtttgtgttatctgtccatacaccgtacctcccttatatgatgaaaaacatccccttactggatatgtattttatgac

SEQ ID NO: 147567 - DNA, 80 bp, synthetic construct
  source 1..80: mol_type = other DNA
ctactgataagggagagtttacaggattggggatatatgaaagagtattagtgataccaacccatgcacaaccctcagat

SEQ ID NO: 147568 - DNA, 80 bp, synthetic construct
  source 1..80: mol_type = other DNA
gggggaaagccaatatatagacaaggtgccaagagccgcgtttgctaattgtgagtcctccggcccctgattgcggctaa

SEQ ID NO: 147569 - DNA, 80 bp, synthetic construct
  source 1..80: mol_type = other DNA
acgcggaacccggcgcccagcgccaggtacagtccgtcctgcgcgcacagaccctcgggatggccggccttgtcgcccac

SEQ ID NO: 147570 - DNA, 80 bp, synthetic construct
  source 1..80: mol_type = other DNA
ttcgtggcgctacagactccctacgtctctctcatgatcttcaacagttatgccacaaccgcctggcccatgcagtgtga

SEQ ID NO: 147571 - DNA, 80 bp, synthetic construct
  source 1..80: mol_type = other DNA
ccaatggcacagaagatatgcaattacagagcatctcaatgtaaattggtaatagcaacaaccaataaatctgatttttc

SEQ ID NO: 147572 - DNA, 80 bp, synthetic construct
  source 1..80: mol_type = other DNA
aggtacttgggggcttctattatattttttaaacaccctacagtagactttgtagccagagtaagaaccatgcctccctt

SEQ ID NO: 147573 - DNA, 80 bp, synthetic construct
  source 1..80: mol_type = other DNA
gaactttaccagtcacatagaggacaaagtagccataggatcctttgggggagggcacagcaccagcaggtggtccttaa

SEQ ID NO: 147574 - DNA, 80 bp, synthetic construct
  source 1..80: mol_type = other DNA
gtcgttgacggtcaagcacttctgtctccccggtgatactggatacgctttacccaaggcgaaaaccgggctcatcgtta

SEQ ID NO: 147575 - DNA, 80 bp, synthetic construct
  source 1..80: mol_type = other DNA
caatggacattttccgcattcctgttcagagtgggaaccatcagagcacacaggtttttggcttccaggtccaaccagga

SEQ ID NO: 147576 - DNA, 80 bp, synthetic construct
  source 1..80: mol_type = other DNA
gcacggtccccgagcgcccgcaataccccgtccccgtccccgcacaccccccgtccccggcgcaaccaccgtccctgtcc

SEQ ID NO: 147577 - DNA, 80 bp, synthetic construct
  source 1..80: mol_type = other DNA
tgaccagaaggagaagcatgtgctgacctgccatgccagcggccgtgtgtactgctccaactgcggctctgcggcggtgg

SEQ ID NO: 147578 - DNA, 80 bp, synthetic construct
  source 1..80: mol_type = other DNA
tcgtacagattgttcagatacaaccgcacaaacaaccaccgtttctacagaaccatcggttacaaccacgcggatatcaa

SEQ ID NO: 147579 - DNA, 80 bp, synthetic construct
  source 1..80: mol_type = other DNA
tatggtaatatattattaagtggtaatcaaactgcaaggatgatcaaatacaactacccaactaaatcagggtattgtgg

SEQ ID NO: 147580 - DNA, 80 bp, synthetic construct
  source 1..80: mol_type = other DNA
gagtggttctggaaccaattaactgcaacagagtcagacacactaggacagtacggacgtgcctcaattaagtactttga

SEQ ID NO: 147581 - DNA, 80 bp, synthetic construct
  source 1..80: mol_type = other DNA
atgcaggtttgacttcatatgtatggcttggcatgacgtcaactttacttttatttcagttctggtgatgcttgtgctcc

SEQ ID NO: 147582 - DNA, 80 bp, synthetic construct
  source 1..80: mol_type = other DNA
ggcccacttacttgagtgaccgtgaagccactgcagtggatcaaccaacgcaacctgatgtagcgacatgtcgtttctac

SEQ ID NO: 147583 - DNA, 80 bp, synthetic construct
  source 1..80: mol_type = other DNA
gccaacttcacctcacaggaggtaaagatggtggcatggtgggtaggtatagaacaatccttcggagtaccttacaatcc

SEQ ID NO: 147584 - DNA, 80 bp, synthetic construct
  source 1..80: mol_type = other DNA
aacacgcttttgtctgcctggattcttacagcaggattcctgattttcctcattggtaagtgtgacaccaacaggtgttg

SEQ ID NO: 147585 - DNA, 80 bp, synthetic construct
  source 1..80: mol_type = other DNA
tgaacttgctgtattgataccacatacactcaaccctatccgaggtacacgattgttaagacattaataccacaatggga

SEQ ID NO: 147586 - DNA, 80 bp, synthetic construct
  source 1..80: mol_type = other DNA
aagcccaagtgtactctctacccccggaccccaaatattttgatgggtatgatcaacaagtggtggttataatggatgac

SEQ ID NO: 147587 - DNA, 80 bp, synthetic construct
  source 1..80: mol_type = other DNA
ttgggggatagttgtcattccatttgtgaaattggcttaccaaaatggtgcaaccacgaaggtgcccattactgtgacca

SEQ ID NO: 147588 - DNA, 80 bp, synthetic construct
  source 1..80: mol_type = other DNA
ccaatggggttacaaacactaacatgtatactgtgacaataaatagggaagcaaacattaccccagccaaagaaattttt

SEQ ID NO: 147589 - DNA, 80 bp, synthetic construct
  source 1..80: mol_type = other DNA
gccgcggagcacttccggcttgcccaaaatggtggccaatctcttccaggtcaaaggtcaccgacgccatgacagtcacg

SEQ ID NO: 147590 - DNA, 80 bp, synthetic construct
  source 1..80: mol_type = other DNA
tgtttctatgacgggtactcacatgatgatgagaatacaccgtatggcataaatgtcttaaatcatatgggtagcatagc

SEQ ID NO: 147591 - DNA, 80 bp, synthetic construct
  source 1..80: mol_type = other DNA
ttacgccgcaaatcagagactttaaaagaatgcaagaaaatccctttgtacagagaacaggtgaaagcatttggagctgc

SEQ ID NO: 147592 - DNA, 80 bp, synthetic construct
  source 1..80: mol_type = other DNA
ttgtcctttagaagttagtagccctggaagtaatagtattccaattactgtgtccataagtccaatgtttgctgagtttt

SEQ ID NO: 147593 - DNA, 80 bp, synthetic construct
  source 1..80: mol_type = other DNA
actggacattcaatggtatgaattcatctacaaacaatgacttaaaagaccttaactactttgactactacacaggcatg

SEQ ID NO: 147594 - DNA, 80 bp, synthetic construct
  source 1..80: mol_type = other DNA
gggacaaacagctctagtttcaacatatgcgaacaaaatataacaatacgcgttaaagcaactgaaataacagcagaaga

SEQ ID NO: 147595 - DNA, 80 bp, synthetic construct
  source 1..80: mol_type = other DNA
tccaggttgaatctacgggaaatgcttttgcaaagaattttgttgtcatccgccacgttcctaatggtgaccctgctcgt

SEQ ID NO: 147596 - DNA, 80 bp, synthetic construct
  source 1..80: mol_type = other DNA
aagatcaagataatcaatggacatataaaatacaccagggagaaaagattctaaaggtaggaaagtatgcaaaggtaaaa

SEQ ID NO: 147597 - DNA, 80 bp, synthetic construct
  source 1..80: mol_type = other DNA
tgtttattatgccacgtataagacaactgctagcaaacccgaagaccagtttgtgcggtggccgatcacgtataggcaag

SEQ ID NO: 147598 - DNA, 80 bp, synthetic construct
  source 1..80: mol_type = other DNA
tcctgggaaaattagggtacaccaacaaagagacaaattacatagattacctttgcaattcccatcatttgtacagggat

SEQ ID NO: 147599 - DNA, 80 bp, synthetic construct
  source 1..80: mol_type = other DNA
gggcctcaacgtccgtgagagcctgcccatgaccaacatgagagcaccgatcatctcgctggctcgcctcatcctggccc

SEQ ID NO: 147600 - DNA, 80 bp, synthetic construct
  source 1..80: mol_type = other DNA
aactacttcaattggacactaaacatcagggaattcgttcaattgagacggaagatggagttgttcacttacctgagatt

SEQ ID NO: 147601 - DNA, 80 bp, synthetic construct
  source 1..80: mol_type = other DNA
aaccctctggtaccgtctgacacggtgcaaacacgccacgtggtccaacgtcgcagcaggtcagagtcctcgatagaatc

SEQ ID NO: 147602 - DNA, 80 bp, synthetic construct
  source 1..80: mol_type = other DNA
aatatagacaaaagtgatgcaggatcagatattactatatttgacatagctgataaggctacagatcatctgcgaaggaa

SEQ ID NO: 147603 - DNA, 80 bp, synthetic construct
  source 1..80: mol_type = other DNA
gggagttcaagaatgaggcaccatatgacggacaattagaacacattatctcacagatggcctatataactggttctaca

SEQ ID NO: 147604 - DNA, 80 bp, synthetic construct
  source 1..80: mol_type = other DNA
gtcacgtgtgcacacgtcaccgccgccattttgttttacaaaatggccgacttccttcctcttttttgaaaaaaggcgcc

SEQ ID NO: 147605 - DNA, 80 bp, synthetic construct
  source 1..80: mol_type = other DNA
ctgtgtatggtatcaccaatcttgaacccctagacttgaatacaagtgcaggttatccctatgctgcaataggaatgaag

SEQ ID NO: 147606 - DNA, 80 bp, synthetic construct
  source 1..80: mol_type = other DNA
gcagagtctcctgtgtactttgcacagaactctgtgtatcctgtgcaggcggcccacaggggcatgtctgttatctcgca

SEQ ID NO: 147607 - DNA, 80 bp, synthetic construct
  source 1..80: mol_type = other DNA
tggaaggaaagaaatacgggttaaccatcaccccagcagataaatcagatacttttaagaaattggattatgatagtgtt

SEQ ID NO: 147608 - DNA, 80 bp, synthetic construct
  source 1..80: mol_type = other DNA
agagatactcccctgctcacgggagacctaaaagaggtgcgtttgtgctagggttcttgggttttctcacaacagcagga

SEQ ID NO: 147609 - DNA, 80 bp, synthetic construct
  source 1..80: mol_type = other DNA
tctagaatggatagcaaacaaaatctccaaacttatagagtggataaaggtaaaaataattccacaagcaaaggaaaaac

SEQ ID NO: 147610 - DNA, 80 bp, synthetic construct
  source 1..80: mol_type = other DNA
ccaatgtgttaggaccaaacagttatgctactacttctgaacctgaaaataaaaatgtggtacaggcaacaacaactgtc

SEQ ID NO: 147611 - DNA, 80 bp, synthetic construct
  source 1..80: mol_type = other DNA
caaatggcggtgttatgaaggaaaaggatgggagcctctctgttgctgttgacctgtcacttcccaagccctggcacctg

SEQ ID NO: 147612 - DNA, 80 bp, synthetic construct
  source 1..80: mol_type = other DNA
caacccatttcgatagataatgatcaggagacaaacatacaggtgtttgtcggggaggtaataaaaagtgttgcgttttg

SEQ ID NO: 147613 - DNA, 80 bp, synthetic construct
  source 1..80: mol_type = other DNA
ttgatccagtaacaatagaagctaagatcagggtgtacatgaaaccaaagcatgttagggtgtggtgcccaagaccacca

SEQ ID NO: 147614 - DNA, 80 bp, synthetic construct
  source 1..80: mol_type = other DNA
atcacttgttggtatcagaccagcatcgtaacaccaccagacatacccaccacaagcaccatactgtgttttgtgtccgc

SEQ ID NO: 147615 - DNA, 80 bp, synthetic construct
  source 1..80: mol_type = other DNA
accacgagccgtcccatacagaggggagggagtagatctaaaaagtgggaccatcaccccgttaacccctgtgtctagca

SEQ ID NO: 147616 - DNA, 80 bp, synthetic construct
  source 1..80: mol_type = other DNA
accattgttccaagtaatgcagcaatagaaggaagcaatggtcacgtggtaattcagtacatgtatgtgcctcccggtgc

SEQ ID NO: 147617 - DNA, 80 bp, synthetic construct
  source 1..80: mol_type = other DNA
gacctggagaggctctacggggaggagtttgagcgcgagtactatcggctggtgacagcgggcaagttttgtgggcgtgt

SEQ ID NO: 147618 - DNA, 80 bp, synthetic construct
  source 1..80: mol_type = other DNA
ggggcagacgcagacggactcacagaaaaaagataattataaaacagtggcaaccaaactttattagacgctgctacata

SEQ ID NO: 147619 - DNA, 80 bp, synthetic construct
  source 1..80: mol_type = other DNA
aaaacacgtgcgcgcttgggtcccaagaccgcccagactgtgcccgtatgtcaagagttcaaacgtgaacttcaaaccaa

SEQ ID NO: 147620 - DNA, 80 bp, synthetic construct
  source 1..80: mol_type = other DNA
ccagacaataaggtcctagtgaatggccaagctgttcaattaaaagacaaatataaattggttgacccagataacattaa

SEQ ID NO: 147621 - DNA, 80 bp, synthetic construct
  source 1..80: mol_type = other DNA
actcattttattgcaagtcgctttcaactagtggagaccaggcatggggttaataaaagcctcaatagtaacaaacatct

SEQ ID NO: 147622 - DNA, 80 bp, synthetic construct
  source 1..80: mol_type = other DNA
gtgcaaaaagataccactatataaagagcaaattaaagcttttgctgctgcatcagaggaagcacaggatgaactagtga

SEQ ID NO: 147623 - DNA, 80 bp, synthetic construct
  source 1..80: mol_type = other DNA
caccacctttggtaatggaaaaatgcccaacgggtcaggccacatccctgtgtactggcagcagagatggtggcctagaa

SEQ ID NO: 147624 - DNA, 80 bp, synthetic construct
  source 1..80: mol_type = other DNA
ccctcaggttccgtcgccggtgtcgcgcccgttgccgccgcagtcgaaacaccagctgctcctccccggcccgtgtgtga

SEQ ID NO: 147625 - DNA, 80 bp, synthetic construct
  source 1..80: mol_type = other DNA
ctcatacagaaaaccacaagtggacaagtacagaaaaccattaagtgaaaaccaatactactctcctaaagatgcacagt

SEQ ID NO: 147626 - DNA, 80 bp, synthetic construct
  source 1..80: mol_type = other DNA
attcaatcctaatttaattgatagattgtgtaagtctaaacacattttcaaaaatatctattatgaagttgagggaggag

SEQ ID NO: 147627 - DNA, 80 bp, synthetic construct
  source 1..80: mol_type = other DNA
aaatgctaaattaaaaacgtataaaaggcaaagcgacgtggaggggggtagcagcaatgatacgtgttgtaatacaggtt

SEQ ID NO: 147628 - DNA, 80 bp, synthetic construct
  source 1..80: mol_type = other DNA
ttgggcgctgcatttgggtgcgggttcaccaatcaaattagtgaaaaaatcaccgagatcacatcaatggtgagtagtgt

SEQ ID NO: 147629 - DNA, 80 bp, synthetic construct
  source 1..80: mol_type = other DNA
tggatttgttccatcgactcaactcacgcctgattagataaccatagtgttattgattagaaaaagctatcataatgggt

SEQ ID NO: 147630 - DNA, 80 bp, synthetic construct
  source 1..80: mol_type = other DNA
cccccacagtgccgccagtccctgctcggcccccgccgccttccccaccggcgctaccccggatgttgctggggttctcg

SEQ ID NO: 147631 - DNA, 80 bp, synthetic construct
  source 1..80: mol_type = other DNA
aatgacatctcgctcacaaccagggggcctggtttcgggggagcatttgtaggctcatacaagatcataaattaccatct

SEQ ID NO: 147632 - DNA, 80 bp, synthetic construct
  source 1..80: mol_type = other DNA
ataaacgctaccagcatgacgtctcagatcacacaagtgacgaggagcgtaccgcaaatcactagggaaaaggccagcag

SEQ ID NO: 147633 - DNA, 80 bp, synthetic construct
  source 1..80: mol_type = other DNA
atacaaagtaaaaagcgacgtacgtcgttcgtcgagacggaggaaatcataatgactccgcgcgagggtcgcgggagtgg

SEQ ID NO: 147634 - DNA, 80 bp, synthetic construct
  source 1..80: mol_type = other DNA
cctggcagaggttctaacaaatccagcacttatgtccccgactgttgaagcatgtgggttctccgataggctcaagcaaa

SEQ ID NO: 147635 - DNA, 80 bp, synthetic construct
  source 1..80: mol_type = other DNA
ctccaaggactcgggcccagtttctaactttttccccttccctccctcgtcttgccctgcgcccggggccaccttcatca

SEQ ID NO: 147636 - DNA, 80 bp, synthetic construct
  source 1..80: mol_type = other DNA
catttcactgggtcagaaactactatagaaaactttttgggtagatcagcttgtgtgcatataacagaaatccagaataa

SEQ ID NO: 147637 - DNA, 80 bp, synthetic construct
  source 1..80: mol_type = other DNA
cgccaaaaacatccgggtcaaagttcgccgctacgtcataagtcacgtgactggggaggtacttaaacacggaagtatcc

SEQ ID NO: 147638 - DNA, 80 bp, synthetic construct
  source 1..80: mol_type = other DNA
tacggcttcaggccaaatcctcgcgggcctgcatctcctggagtagggggtcctcctcctcccctccgtcgagcgctgcc

SEQ ID NO: 147639 - DNA, 80 bp, synthetic construct
  source 1..80: mol_type = other DNA
aataatctgtgggactggacacacacaatttaactttataacccacgaagaggatatccctggtgcaggagcctcctatg

SEQ ID NO: 147640 - DNA, 80 bp, synthetic construct
  source 1..80: mol_type = other DNA
actatccaggatcctccagactctccaaccgctgttccaaagaatctccaggaccctccaagcaattagagaacatctcc

SEQ ID NO: 147641 - DNA, 80 bp, synthetic construct
  source 1..80: mol_type = other DNA
agattggccacccccttgcagggtttgccagtgatgaatactcctggtagtaaccagttcctaacatctgatgatttcca

SEQ ID NO: 147642 - DNA, 80 bp, synthetic construct
  source 1..80: mol_type = other DNA
caacagaagaatattggttataccattggatatgagtaacacgcttttctctacaacacttttaggagaagtgctaaatt

SEQ ID NO: 147643 - DNA, 80 bp, synthetic construct
  source 1..80: mol_type = other DNA
ctgcggacgggcgtggaaaactcaaccatatgctacgtcgtacatttcctgggcggagtttatgtcctgatataagtaag

SEQ ID NO: 147644 - DNA, 80 bp, synthetic construct
  source 1..80: mol_type = other DNA
atataaagatccaaacttatatcaaacagtacacaccctaggacagctaaacccgacacaaaaaccagcattatactcaa

SEQ ID NO: 147645 - DNA, 80 bp, synthetic construct
  source 1..80: mol_type = other DNA
ttttaatattaattattataaagatgcagctagttcaggtctgactaaacaagacttttcacaggatccatcgaaattca

SEQ ID NO: 147646 - DNA, 80 bp, synthetic construct
  source 1..80: mol_type = other DNA
taaggatatggggctctttggtcagaacatgtatcatcattctatgggaagaacagggtacattatacatgtgcaatgta

SEQ ID NO: 147647 - DNA, 80 bp, synthetic construct
  source 1..80: mol_type = other DNA
ggaccatcacaacacgcagagtagctcagctgagaaggaaattggaaatgttcacatacttaagatttgacttggaagtg

SEQ ID NO: 147648 - DNA, 80 bp, synthetic construct
  source 1..80: mol_type = other DNA
cctcatctggccactactggcaaaccttcataaccaacagtatggttagatcccacatagacgccacagctgcaaagaac

SEQ ID NO: 147649 - DNA, 80 bp, synthetic construct
  source 1..80: mol_type = other DNA
actaccctcaaattactcatagcttacacaccccctggcatacgcaaaccaaggaacaggaaagaggcaatgttgggcac

SEQ ID NO: 147650 - DNA, 80 bp, synthetic construct
  source 1..80: mol_type = other DNA
acgggggcggcgtgttgcggggacgggggttgcgctggcccggagtgttgagaggacggggattacgttggggacggagg

SEQ ID NO: 147651 - DNA, 80 bp, synthetic construct
  source 1..80: mol_type = other DNA
ttatcaaatattgttggtgtcacctcgcccagtattatgtacactatggatataaaatatacaacttcaacaatatcttc

SEQ ID NO: 147652 - DNA, 80 bp, synthetic construct
  source 1..80: mol_type = other DNA
taacagtggggccccccaaactgtttgaagataagtggtacagccagcatgacttgtgtaaggtgcccctagtcagttgg

SEQ ID NO: 147653 - DNA, 80 bp, synthetic construct
  source 1..80: mol_type = other DNA
aagttgactttgattcagcacttttctctaaatataaaggaaatgttagttgtcaaataaccccacacatgggagtagct

SEQ ID NO: 147654 - DNA, 80 bp, synthetic construct
  source 1..80: mol_type = other DNA
gacaaacaagggctgaaataaacaacaagcaacctagtgatgacaattggttaaattttgatgggacttttcttggcaat

SEQ ID NO: 147655 - DNA, 80 bp, synthetic construct
  source 1..80: mol_type = other DNA
ccgtcactatagccccaatgtgtgcagagtacaatggtctaagattggcttaccagcaaggcttaccagtactaaacaca

SEQ ID NO: 147656 - DNA, 80 bp, synthetic construct
  source 1..80: mol_type = other DNA
tgaccccgaggcagtcgatggtgtagagtttggagacaatgtgtagacgatgggcccttgttcagaagcccagggacttg

SEQ ID NO: 147657 - DNA, 80 bp, synthetic construct
  source 1..80: mol_type = other DNA
ggttgcggtgatcttgttggccatcttactgtactggctggtcggtatggtgctcctcctcgtcccccggccccaggggc

SEQ ID NO: 147658 - DNA, 80 bp, synthetic construct
  source 1..80: mol_type = other DNA
catcacaggatgtggccaatgcagttatagcttatggagtctggccgcactacctgagtgctgaggacgccactgccatt

SEQ ID NO: 147659 - DNA, 80 bp, synthetic construct
  source 1..80: mol_type = other DNA
ggagttcaattcagatacacagacccagatacatacaccagcgcaggatttgtttcatgctggtatcaaacttcattggt

SEQ ID NO: 147660 - DNA, 80 bp, synthetic construct
  source 1..80: mol_type = other DNA
ttgcccagcttcgcagaaaaatggaaatgttcacctatctgcggtatgacgtggaggtgacctttgtcatcactagttca

SEQ ID NO: 147661 - DNA, 80 bp, synthetic construct
  source 1..80: mol_type = other DNA
cgcaattgccagggtggcggacacaattagcagtggtccgacgaactcccaggcagtcccagcactgacggcggtcgaga

SEQ ID NO: 147662 - DNA, 80 bp, synthetic construct
  source 1..80: mol_type = other DNA
atagtggcagcaatacctgaacatcagctagcttacataggtaagggaaatgttacagttggatacaaccacactcatcc

SEQ ID NO: 147663 - DNA, 80 bp, synthetic construct
  source 1..80: mol_type = other DNA
cacgcaaagacgcaatgctgggaacacacatcatatgggacgtgggcctgcaatcctcatgcgtgttatgtatcccttgg

SEQ ID NO: 147664 - DNA, 80 bp, synthetic construct
  source 1..80: mol_type = other DNA
ccttctcctaccacgacgaactagtaagtacacaactgactgctaaatacaaatttgactttatgtggggtggaaacatg

SEQ ID NO: 147665 - DNA, 80 bp, synthetic construct
  source 1..80: mol_type = other DNA
ccagtcctcccaggaggaggaaacggagtcgcaaagcgagcaagaagagacgagcctacaagaccaactcaaaaaacaac

SEQ ID NO: 147666 - DNA, 80 bp, synthetic construct
  source 1..80: mol_type = other DNA
agcatagtattaattttaggtacagtttatgctttatacagactaatgtgtattgcccaaggcccgtatacgggtctccc

SEQ ID NO: 147667 - DNA, 80 bp, synthetic construct
  source 1..80: mol_type = other DNA
tccacaactatccaactcacaacgtggcactggggttgtgccgcctttgcaggtgtatcttatacacgtggcttttggcc

SEQ ID NO: 147668 - DNA, 80 bp, synthetic construct
  source 1..80: mol_type = other DNA
catgcttacaagtttgaaaaagattatgaaatgatggaattttacttcaacagaggtggtacttattactcaatttcagc

SEQ ID NO: 147669 - DNA, 80 bp, synthetic construct
  source 1..80: mol_type = other DNA
gtagtttttatactggaaacaatagtacttttggctgctgtacatataaccccactgaagaaataggtaaagcagcaaat

SEQ ID NO: 147670 - DNA, 80 bp, synthetic construct
  source 1..80: mol_type = other DNA
gagagttcaatcttctcggtatacacgacaactgtgctgtcctgccaacccatgctgactgtggtgagacaataaacata

SEQ ID NO: 147671 - DNA, 80 bp, synthetic construct
  source 1..80: mol_type = other DNA
ttgattatacaaattatgatgggagcctgcacccagtgtggtttcaagcacttgaacaactcctgaataacttaggcttt

SEQ ID NO: 147672 - DNA, 80 bp, synthetic construct
  source 1..80: mol_type = other DNA
cagaccctaacaaccatgagttaaccaaagtacacttcttgaaacccagaactgagattaagacaacaggtcccagtgac

SEQ ID NO: 147673 - DNA, 80 bp, synthetic construct
  source 1..80: mol_type = other DNA
acgtcacggccgccattttaagtaaggcggaagcagcgcagcgtgtacaaaatggcggctgagcacttccggcttgcaca

SEQ ID NO: 147674 - DNA, 80 bp, synthetic construct
  source 1..80: mol_type = other DNA
agtctgtggcgacccccggtccacaatgcccccggcagagagagactttggtttcaggcctgttacgaatctcacagtgc

SEQ ID NO: 147675 - DNA, 80 bp, synthetic construct
  source 1..80: mol_type = other DNA
ttatccctataaacaatacagataacaatttaaggaaagtgaatttatacactgtggagttaactaaccaaccaacacca

SEQ ID NO: 147676 - DNA, 80 bp, synthetic construct
  source 1..80: mol_type = other DNA
gcaaggtcattatctgcacttctaacttctaccttcccaaccagaaggcggcccggtgcaccccagctctggagcgccga

SEQ ID NO: 147677 - DNA, 80 bp, synthetic construct
  source 1..80: mol_type = other DNA
cacgcaaacggacaagaccgttaatcaggagcatttgagtcaaggtgagagagcgatgagtttcaagaccgagaccacag

SEQ ID NO: 147678 - DNA, 80 bp, synthetic construct
  source 1..80: mol_type = other DNA
caacatctatctctaatacagctatcacaagcactcgcatggcttccagtccaaatacatcgtatgtttccacctcttac

SEQ ID NO: 147679 - DNA, 80 bp, synthetic construct
  source 1..80: mol_type = other DNA
ctcccgcccctgtccactgccccggtccccccagaagcccccaaaagtagaggctcaggccatgcgcgccctgtcaccag

SEQ ID NO: 147680 - DNA, 80 bp, synthetic construct
  source 1..80: mol_type = other DNA
ccgccctccccatccccagcccagccgttcactcggctcaccgggaacgcccagtatgcagtctcaatctctcccacgga

SEQ ID NO: 147681 - DNA, 80 bp, synthetic construct
  source 1..80: mol_type = other DNA
catctcaggacattgcaaatgcagttgttggttatggtgtatggccatcatacctaaccccagatgatgcaactgccatt

SEQ ID NO: 147682 - DNA, 80 bp, synthetic construct
  source 1..80: mol_type = other DNA
gagcggggaccccgggggtgtgacctaggccgaggatggagatgaagaggagagggctggaggccggcgccccggaggcc

SEQ ID NO: 147683 - DNA, 80 bp, synthetic construct
  source 1..80: mol_type = other DNA
ctacctcagtcaaattggattgggtcatactgttgtaggggtgaatttttctttaatttggagaagaagaatacaacaaa

SEQ ID NO: 147684 - DNA, 80 bp, synthetic construct
  source 1..80: mol_type = other DNA
cagatgctctttacattcctccaggaccattcaagagacctcggagggacacgaacgccgaaaacccagaagagcaaaac

SEQ ID NO: 147685 - DNA, 80 bp, synthetic construct
  source 1..80: mol_type = other DNA
aacaggcccctttagctacaaagatgacctaaaaagcacagtactaacagtagaatacaagttcaaattcttatggggcg

SEQ ID NO: 147686 - DNA, 80 bp, synthetic construct
  source 1..80: mol_type = other DNA
ggtaaatgactctttaacacctagatggaacaatatgacatggcaggaatgggaaaaacaagtccgctacctagaggcaa

SEQ ID NO: 147687 - DNA, 80 bp, synthetic construct
  source 1..80: mol_type = other DNA
cacaccctggagagaaaggcatagaccttaatgaagaggattcaaaaggtccaatgaaagatcccctttacatgatggat

SEQ ID NO: 147688 - DNA, 80 bp, synthetic construct
  source 1..80: mol_type = other DNA
gaattgttgatatgaaaacggcccaatatagaacttcccatgtcaacatccatggacttgagcacttcagctgggtactc

SEQ ID NO: 147689 - DNA, 80 bp, synthetic construct
  source 1..80: mol_type = other DNA
aagcattttacaaagaagcaagaagagtctattccgagtgaaggagtgtatcatggtgtgacaaaaccaaaacaagtaat

SEQ ID NO: 147690 - DNA, 80 bp, synthetic construct
  source 1..80: mol_type = other DNA
acaggacatttaacacattgtgccggttaccagcatgatgagattattctgcatggccattcaatcaagtacctggagca

SEQ ID NO: 147691 - DNA, 80 bp, synthetic construct
  source 1..80: mol_type = other DNA
caggtcacaggacctagtctgcaccctggcatcctaatgaccaggaaaaaaaagaaaataattaaaagttttctcactag

SEQ ID NO: 147692 - DNA, 80 bp, synthetic construct
  source 1..80: mol_type = other DNA
gacggagacaggagacggagagctgttgcgctggcgacggtggccttttgcggcggggacaggggccttttgcggagacg

SEQ ID NO: 147693 - DNA, 80 bp, synthetic construct
  source 1..80: mol_type = other DNA
caccagaggttccacaacaggtggagctaccccaacactcagctagacctagcaagatataaaggagtaaggttctggtt

SEQ ID NO: 147694 - DNA, 80 bp, synthetic construct
  source 1..80: mol_type = other DNA
ctaccacagaataagcccagaaattccaggcctgtacaaagacataatatataatccactaacagacaaaggcataggaa

SEQ ID NO: 147695 - DNA, 80 bp, synthetic construct
  source 1..80: mol_type = other DNA
atggagcgtgtcctaataacatgatgggcactttctcggtgcgaactgtggggtcattaaagtccaagtaccctctggtt

SEQ ID NO: 147696 - DNA, 80 bp, synthetic construct
  source 1..80: mol_type = other DNA
tgcgcaaatactacccagtgtctgtggagggtccaacctttaggtacatggatgcgaacgagtattaccccgctcgatac

SEQ ID NO: 147697 - DNA, 80 bp, synthetic construct
  source 1..80: mol_type = other DNA
tgtatcgtatcatgacccgtcgcattttgggtgcttaccagataggagttggggtcatgtatgaaggggttttacacacc

SEQ ID NO: 147698 - DNA, 80 bp, synthetic construct
  source 1..80: mol_type = other DNA
tagcctatggagtttggcctgaatatctacctagtcaagatgctagtgcaatagacaaaccaacacatcctgacacctct

SEQ ID NO: 147699 - DNA, 80 bp, synthetic construct
  source 1..80: mol_type = other DNA
tcatcctcacccctgagagtcgttgcttcattgttgcccacactactactccctactattctatctttctggtcaacccc

SEQ ID NO: 147700 - DNA, 80 bp, synthetic construct
  source 1..80: mol_type = other DNA
accagccccacttactaacaaagatagtaggttagaagctaatctggatgatgctgtattttcaaagtacaagggcaatt

SEQ ID NO: 147701 - DNA, 80 bp, synthetic construct
  source 1..80: mol_type = other DNA
tgactttgtcagtgcccttttattcaaataaaccattgaggacaattcgtgatcccgcagcactaggttatttaatgtgt

SEQ ID NO: 147702 - DNA, 80 bp, synthetic construct
  source 1..80: mol_type = other DNA
aacagagataaaaaaaatcatacaaagagacttcactacagaatcccaacaagcaacagacaacacgcagtttaaaacag

SEQ ID NO: 147703 - DNA, 80 bp, synthetic construct
  source 1..80: mol_type = other DNA
cacaaaggaaccttagacaattacaatgacccatccagggtattaacagtatttaatacatttaaaactgaagaacacct

SEQ ID NO: 147704 - DNA, 80 bp, synthetic construct
  source 1..80: mol_type = other DNA
ttccgcttccgggtcgccgccatatttggtcacgtgacttcccacgtcacggccgccattttagttcacaaaatggccga

SEQ ID NO: 147705 - DNA, 80 bp, synthetic construct
  source 1..80: mol_type = other DNA
cacccgcagaaagagccctcagcgcgcagaagctccgcacaaactcgtctccagcgccgttccgcgagcaaataccgtgg

SEQ ID NO: 147706 - DNA, 80 bp, synthetic construct
  source 1..80: mol_type = other DNA
acagagtactcaaccgcccggtgtcacactcacctactgctgctaacacccaagtgagccagcactctattgagacaggg

SEQ ID NO: 147707 - DNA, 80 bp, synthetic construct
  source 1..80: mol_type = other DNA
tacttcaaacctaagcacataagagtgtgggtgccacgaccgccgcgtttgtgcccctatatcaaatccagtaacgttaa

SEQ ID NO: 147708 - DNA, 80 bp, synthetic construct
  source 1..80: mol_type = other DNA
ccggccagaaagggccactgccactgcaagatctgctgcctgcacagaaagaacgggctggtggtccgcaaccgatggcc

SEQ ID NO: 147709 - DNA, 80 bp, synthetic construct
  source 1..80: mol_type = other DNA
agaggcgcagcctttgggggcaacctcacacacattacatggtgcttagaggccatatacaatgaattcttaatgcacag

SEQ ID NO: 147710 - DNA, 80 bp, synthetic construct
  source 1..80: mol_type = other DNA
gatacgtaatgaatgacaacacaaatgctgaagcagcagtggagaacttcctaggaagatctgctttgtgggcaaaccta

SEQ ID NO: 147711 - DNA, 80 bp, synthetic construct
  source 1..80: mol_type = other DNA
ttacacagttaaaggtggaatgccttctggttgttctgggaccagcattttcaattctatgattaacaatataattatta

SEQ ID NO: 147712 - DNA, 80 bp, synthetic construct
  source 1..80: mol_type = other DNA
tccctccggtggctcttcgctgcggacgggcgtggaaaactcagtctacgtcgtgcacttcctgggcatggtctatgtca

SEQ ID NO: 147713 - DNA, 80 bp, synthetic construct
  source 1..80: mol_type = other DNA
tgttcccccagtttgccccatcgtttccctgacggcctcaggggccaagcaaaactgcggtggcatgggatccttgaact

SEQ ID NO: 147714 - DNA, 80 bp, synthetic construct
  source 1..80: mol_type = other DNA
gaaaaccaaagcaaatttacatttaaacccactatcttttcagcaagagataaactagacatgtttggtaagattataga

SEQ ID NO: 147715 - DNA, 80 bp, synthetic construct
  source 1..80: mol_type = other DNA
acgtggtttctaagcccccaccatcagctatatctgacttgcttaaggctgtagacaatgatgaagtaagggaatattgc

SEQ ID NO: 147716 - DNA, 80 bp, synthetic construct
  source 1..80: mol_type = other DNA
aactgtatttcctcagtaccctacatagtacccatggcacatcttgaagaaaaaggaaaattttacactagtaaattagt

SEQ ID NO: 147717 - DNA, 80 bp, synthetic construct
  source 1..80: mol_type = other DNA
tgtcggagagtaccggccagtatttggccatgtcccgccgctggagttcctctagggcggcgtccgtagagcgaccatga

SEQ ID NO: 147718 - DNA, 80 bp, synthetic construct
  source 1..80: mol_type = other DNA
aggacaaatagagccacaaaacacgcaatgggggtggaacgcagtacaaaactcaacaacacttaccttgcaaggcagta

SEQ ID NO: 147719 - DNA, 80 bp, synthetic construct
  source 1..80: mol_type = other DNA
cggcgccgccgatacaggcgcagactaagacgggggagacgacgaaggggacgcagacgcagaaaagagactataatagt

SEQ ID NO: 147720 - DNA, 80 bp, synthetic construct
  source 1..80: mol_type = other DNA
atacaggaaattaaagaaaaaggagtgggactcattggcgagtgccgagctttcctggactctataactagcaccttaaa

SEQ ID NO: 147721 - DNA, 80 bp, synthetic construct
  source 1..80: mol_type = other DNA
ttctgcggatcagtcgctggctggtgggcatcggagtcggtgggcggtcctccacggggacacgctccttcttggccttg

SEQ ID NO: 147722 - DNA, 80 bp, synthetic construct
  source 1..80: mol_type = other DNA
tgatggctggtctgagttttccagaaacggagtgtacggcatcaacactctgaacaacatgggaactctttacgcaagac

SEQ ID NO: 147723 - DNA, 80 bp, synthetic construct
  source 1..80: mol_type = other DNA
gaagatggcactgaagattgcaaacaggatatttcacctaatgagctgggtctaacatccgcccaggatgatggaccatt

SEQ ID NO: 147724 - DNA, 80 bp, synthetic construct
  source 1..80: mol_type = other DNA
aaccgaccgctgcgctgcctcacctccatcaaacgcccgggctcacgcaccctggaggacgcactaaacgatatgtatct

SEQ ID NO: 147725 - DNA, 80 bp, synthetic construct
  source 1..80: mol_type = other DNA
aaccctgtggaagacttcattgattcgacccttcaggaggtcttggttgtgccaaatactcaaccctctggaacaacaca

SEQ ID NO: 147726 - DNA, 80 bp, synthetic construct
  source 1..80: mol_type = other DNA
cagaaagccccgggggttccatactacccctgccagccctaccggcaccacctgatccgccaccacggcctggtggtgtg

SEQ ID NO: 147727 - DNA, 80 bp, synthetic construct
  source 1..80: mol_type = other DNA
gacttctgagtttttattctcaggtggcaaacgccccaggatcgacctacccaagtacgtcccgccagaagaagacttca

SEQ ID NO: 147728 - DNA, 80 bp, synthetic construct
  source 1..80: mol_type = other DNA
gttaccgttgctccaatgtgtgcagagtacaatggtctcaggctagctggacatcaaggcttacccgtgatgtgcactcc

SEQ ID NO: 147729 - DNA, 80 bp, synthetic construct
  source 1..80: mol_type = other DNA
accaccacggttatgcccgtacctttataaagccaacaccaacttcaaaccggcacctgtggcagagcaccgacgtgacc

SEQ ID NO: 147730 - DNA, 80 bp, synthetic construct
  source 1..80: mol_type = other DNA
aggaagtggttcggcaactggcccgtcggtaccctcaattgccgagggcgacagccactgggaggatgctcgacgtaaat

SEQ ID NO: 147731 - DNA, 80 bp, synthetic construct
  source 1..80: mol_type = other DNA
aggctttatcagtgcatgtccagatttcaagctcagactcatgaaagatactcaatcaatacatcaggaaacagcgttaa

SEQ ID NO: 147732 - DNA, 80 bp, synthetic construct
  source 1..80: mol_type = other DNA
gaaaagcaaattgagaccattagacttgctccgtcttgtgaccaggaaaaaatcttttgtgatataaacactcttcatga

SEQ ID NO: 147733 - DNA, 80 bp, synthetic construct
  source 1..80: mol_type = other DNA
tgttcagggtcaccatggcggtttcttaaagagaagttctgcaaatggacacaactgcattatgtgcataaagaatcaga

SEQ ID NO: 147734 - DNA, 80 bp, synthetic construct
  source 1..80: mol_type = other DNA
tctaccgctgttgcatcggcttccaagacgacctagtttcccgcaccttggctgtgtaccgagcttgtatccagggaccg

SEQ ID NO: 147735 - DNA, 80 bp, synthetic construct
  source 1..80: mol_type = other DNA
gcatgatgatgcagcaaaaaagaaaactggtggtccccagtttccagaccagacccaaaggcagaaaaagatacagagtc

SEQ ID NO: 147736 - DNA, 80 bp, synthetic construct
  source 1..80: mol_type = other DNA
gaggtggcctgcatcttccccgcgcacgactggccagaggtctctatccgagtccacctctgctactggcccgagatcgt

SEQ ID NO: 147737 - DNA, 80 bp, synthetic construct
  source 1..80: mol_type = other DNA
ttaaaactgggcaggagttgttcccactcttgccacccacagggtgtggtgctcttgtattacggtacacttgcatgcca

SEQ ID NO: 147738 - DNA, 80 bp, synthetic construct
  source 1..80: mol_type = other DNA
ccataaaagcataccagattccagtgagcgcaggtgattcatcgagaccggacgcggtgtttaagttccagctagaccct

SEQ ID NO: 147739 - DNA, 80 bp, synthetic construct
  source 1..80: mol_type = other DNA
tataaatgactttggtacgctagccgtaagggtcgtgaatgagttcaatccaacacgagttactgctaaagtgagggtgt

SEQ ID NO: 147740 - DNA, 80 bp, synthetic construct
  source 1..80: mol_type = other DNA
ctgcatcagacaagtgagtatggagcgtggcagaaatcagctgcttattgccattctactagctagtgcttgcttaatat

SEQ ID NO: 147741 - DNA, 80 bp, synthetic construct
  source 1..80: mol_type = other DNA
gcatcggcagcacacctgcctcgacatctcgccgtacggcaacgagcaggtctcgcgcatcgcctgcacctcgtgcgagg

SEQ ID NO: 147742 - DNA, 80 bp, synthetic construct
  source 1..80: mol_type = other DNA
cctttgactacagaatactttttatatgtccatacacagggtccacttacgtccccataaaatggagaggcaagtggtac

SEQ ID NO: 147743 - DNA, 80 bp, synthetic construct
  source 1..80: mol_type = other DNA
ctaccaccttaccaatcactgtttcaattgcacctgacagatctgaattctctggtgccaggcagtccgccactcgccag

SEQ ID NO: 147744 - DNA, 80 bp, synthetic construct
  source 1..80: mol_type = other DNA
ccagcactgacagcagccgagacgggcgcaagttctaacagtgaaccagaggaagccatacaaactcgcacagtgataaa

SEQ ID NO: 147745 - DNA, 80 bp, synthetic construct
  source 1..80: mol_type = other DNA
tctaacttaaaaccatttgttaatgcatatacttatttcagagggtcattagtacttaggatgtctgtttatgctagtac

SEQ ID NO: 147746 - DNA, 80 bp, synthetic construct
  source 1..80: mol_type = other DNA
tctctgtcgtttcgccagtaccacgctgtggacggggtttcgccgcgctccgggatctctgtacgggtgtctgtccggcg

SEQ ID NO: 147747 - DNA, 80 bp, synthetic construct
  source 1..80: mol_type = other DNA
cgcagacgggtaaggagacgccgtcgcccccagaaactagtactgactcagtggaatccccagactgtgagaaagtgtgt

SEQ ID NO: 147748 - DNA, 80 bp, synthetic construct
  source 1..80: mol_type = other DNA
gcgctgtaaccaggcctctttctctgtggtcggcgagtcttccgacgggtagggagtctgggagtccatcgcttcaggcc

SEQ ID NO: 147749 - DNA, 80 bp, synthetic construct
  source 1..80: mol_type = other DNA
ccatgtttctgtcagaaaaccataaattcaaaggtacaaacagcagtacagctttaacagaacacaacgcaaacaatatt

SEQ ID NO: 147750 - DNA, 80 bp, synthetic construct
  source 1..80: mol_type = other DNA
cagtctgtcttcttattcatggtgtgcctggctgtggtaaatcattaacgacaactgtcatagccagaggcttggcttcg

SEQ ID NO: 147751 - DNA, 80 bp, synthetic construct
  source 1..80: mol_type = other DNA
gtgtgctgcaacttccaggttttagacagcaattatgacaacatactaaccgtcttagaggacaccacagaggccactaa

SEQ ID NO: 147752 - DNA, 80 bp, synthetic construct
  source 1..80: mol_type = other DNA
gcagggagactctgtttccagccagagggtgccggcgtatttcgccggccctgccgccgccagaaattgtgcccgccggg

SEQ ID NO: 147753 - DNA, 80 bp, synthetic construct
  source 1..80: mol_type = other DNA
ctggggctcacttcgctgccttggtacaaaggtacaactctaacactatgcaacaccagcacctactgttaccagcatcc

SEQ ID NO: 147754 - DNA, 80 bp, synthetic construct
  source 1..80: mol_type = other DNA
aggaactgtttatgcactgtataagttgatgtgtatagcacaaggcccctacactggactaccacaaccaaaagtgagaa

SEQ ID NO: 147755 - DNA, 80 bp, synthetic construct
  source 1..80: mol_type = other DNA
atggttatgataatcaagacattcatttgattgatgatttaggccaaacaagaaaggagaaagacattgaaatgttatgc

SEQ ID NO: 147756 - DNA, 80 bp, synthetic construct
  source 1..80: mol_type = other DNA
gccacggtcttgacagcccccacgtactctgcgtactcgaccggggtctcggggatactatgcaggatctccagatccag

SEQ ID NO: 147757 - DNA, 80 bp, synthetic construct
  source 1..80: mol_type = other DNA
ctttagttttggatgcatacaaaaacattgatctagataaacttaaaatcatagcatatggtgatgatgtcatctttaca

SEQ ID NO: 147758 - DNA, 80 bp, synthetic construct
  source 1..80: mol_type = other DNA
agtgtactgtacgctggtcggtgtctacctctataagtcactaagcactccgagcgtcagcgaggagtgcgaccctaagg

SEQ ID NO: 147759 - DNA, 80 bp, synthetic construct
  source 1..80: mol_type = other DNA
acacgcggatctgctgcccatcgtccagcacccgcctgcaggggatgtgagcgatcttggcaatctctgccacctccacg

SEQ ID NO: 147760 - DNA, 80 bp, synthetic construct
  source 1..80: mol_type = other DNA
tctctttcgacgtcgtacctgacgtggagaccgcggtggcggccggcatcaggagaaacgccggtcggtaaaagaggtct

SEQ ID NO: 147761 - DNA, 80 bp, synthetic construct
  source 1..80: mol_type = other DNA
aaaagacaacagatactcagtgcctaactgtcactggatgctagaaaaccttcccctctggtcactcctacacggttact

SEQ ID NO: 147762 - DNA, 80 bp, synthetic construct
  source 1..80: mol_type = other DNA
aaatctttcttgactcatactttgtccagacaactccagaaatcatgcaaattaaatggggtatacacaaatccaactgc

SEQ ID NO: 147763 - DNA, 80 bp, synthetic construct
  source 1..80: mol_type = other DNA
ctcagactggggctattacccaaaatccagtggaaaaatatacagaagctgttcttaatgaggtccttgtagtacctaac

SEQ ID NO: 147764 - DNA, 80 bp, synthetic construct
  source 1..80: mol_type = other DNA
acccacaagaattggctaggactgctgtgaggtatgggctaaccatcactccaccagacaagggcagtacatttcataag

SEQ ID NO: 147765 - DNA, 80 bp, synthetic construct
  source 1..80: mol_type = other DNA
gctagacagcttaacaaaaacagacaacatttacaaaaaaggacaaagtgtacttctaatagaagacatgcctatgtaca

SEQ ID NO: 147766 - DNA, 80 bp, synthetic construct
  source 1..80: mol_type = other DNA
tgtactaggaacttccgtattagaccaaccgacaacttactcaaaacaaataagtaactttgaaacctggctatatgaaa

SEQ ID NO: 147767 - DNA, 80 bp, synthetic construct
  source 1..80: mol_type = other DNA
ccgaacagattatcaaggacccgtgtaagagagagcagtccctcggtacctaccccgatagacaacgtcgcgacctacaa

SEQ ID NO: 147768 - DNA, 80 bp, synthetic construct
  source 1..80: mol_type = other DNA
gcccggaaccaatcagttcctgaccacggaggatgacaccgcagcacccatattaccggggttctctcccactcccataa

SEQ ID NO: 147769 - DNA, 80 bp, synthetic construct
  source 1..80: mol_type = other DNA
gaaactggtgcaaaatatggactgacaataaccccagcagataagtcaactgaattcagggaagtcacctgggacacagt

SEQ ID NO: 147770 - DNA, 80 bp, synthetic construct
  source 1..80: mol_type = other DNA
acgccgtgggcaacgaaaccagaaggagccctgacggataaaaccgcgcagcgtctcggccaacttaaccagcatcgtac

SEQ ID NO: 147771 - DNA, 80 bp, synthetic construct
  source 1..80: mol_type = other DNA
tttccgcgtctacattataaaacgtttcagttgtatttaatggatatttattgtaagttgtgtttaaaatccaaggttta

SEQ ID NO: 147772 - DNA, 80 bp, synthetic construct
  source 1..80: mol_type = other DNA
cacttacaacattaaaattactaattgcatacaccccacctggcatcagagttcctaggagcagaaaggaagcaatgctt

SEQ ID NO: 147773 - DNA, 80 bp, synthetic construct
  source 1..80: mol_type = other DNA
accgtcactgtagcccctatgtgttgtgagtttaacgggcttcggtcaatgacagcccccgtcttgcaggggctgccagt

SEQ ID NO: 147774 - DNA, 80 bp, synthetic construct
  source 1..80: mol_type = other DNA
aagaagccaacccagtagacgcacctactgagcctgacgcctctgctaacagattctacacactagaaagtatcacatgg

SEQ ID NO: 147775 - DNA, 80 bp, synthetic construct
  source 1..80: mol_type = other DNA
caaacacagccacaacccctaaaaccacaacaagcacaaccgcaagcccaatgctaaatgtgaactcttcatgcatacgc

SEQ ID NO: 147776 - DNA, 80 bp, synthetic construct
  source 1..80: mol_type = other DNA
ttgtattctgagaaaacgtacttagccggttttcgaagctgagtgctataaaaatcgaaccaaagataggtaacactgtt

SEQ ID NO: 147777 - DNA, 80 bp, synthetic construct
  source 1..80: mol_type = other DNA
aagcaatgctacagggaccagaacatgaatttatacaagcactagttaggaggaactgccatgtgcttacaactagaaaa

SEQ ID NO: 147778 - DNA, 80 bp, synthetic construct
  source 1..80: mol_type = other DNA
tttagtgttccatatttgggcatagcttctgcatataacaatttctatgatggctactcacatgacaacaaggacacagt

SEQ ID NO: 147779 - DNA, 80 bp, synthetic construct
  source 1..80: mol_type = other DNA
gtcgagctcagagaaagagcagaagccgaagaagactcaggttcggagaaagcgtcactcacctcgtcccaagagaaaga

SEQ ID NO: 147780 - DNA, 80 bp, synthetic construct
  source 1..80: mol_type = other DNA
caacgactacgccttgcctatgtcacacgagcttattggctgcttacagggagatacatctaagtgtgctagagagaagg

SEQ ID NO: 147781 - DNA, 80 bp, synthetic construct
  source 1..80: mol_type = other DNA
gtggggacccagacaggttattaaaggcacccggtctttccgcctccaggagtacccctgctagtgaattctagtagggc

SEQ ID NO: 147782 - DNA, 80 bp, synthetic construct
  source 1..80: mol_type = other DNA
gcaaaaacaacagcagtactacacaaaaacctatggcggttatgccagccagtattttaccggaaaacaatattgggact

SEQ ID NO: 147783 - DNA, 80 bp, synthetic construct
  source 1..80: mol_type = other DNA
atggtttaactataacaccaccagataaatcaccaaaatttacaaaaatggattggcatacagtcactttcttgaagcga

SEQ ID NO: 147784 - DNA, 80 bp, synthetic construct
  source 1..80: mol_type = other DNA
tgtattaatgaatttggcagaaacaacacaagctgatttatgtatcccctacgtttcagatacaaactacgttaaaacag

SEQ ID NO: 147785 - DNA, 80 bp, synthetic construct
  source 1..80: mol_type = other DNA
ggatgaactcctgctggccctccctcgactctcagtcaccctacctggagagggggcagtcggtgatggattctcgctag

SEQ ID NO: 147786 - DNA, 80 bp, synthetic construct
  source 1..80: mol_type = other DNA
gccgttggcctcataaaagtcatacacgccatagtgttccagcataaagatgcgggggtcctctgtctcaaaggcctcgg

SEQ ID NO: 147787 - DNA, 80 bp, synthetic construct
  source 1..80: mol_type = other DNA
gcagccatgcaaattattagggaaataattaatgatgaagcagcagactgggaccagcagcacccgtcaccgggcccaat

SEQ ID NO: 147788 - DNA, 80 bp, synthetic construct
  source 1..80: mol_type = other DNA
cgctctcgcttcctaaacctcaaaacagtctcccggacactgttgcaagtggccctgctcattccaaagaagtcccggcc

SEQ ID NO: 147789 - DNA, 80 bp, synthetic construct
  source 1..80: mol_type = other DNA
acttacattcacaatatggcatacccacatctgaaggcctagaataccacacaggatttttcagtgccatattcctatct

SEQ ID NO: 147790 - DNA, 80 bp, synthetic construct
  source 1..80: mol_type = other DNA
catctgcccagggaacttattttccaggtgtggcaaaggtcctggggatactggcatgatgagcaagggatgacaccaag

SEQ ID NO: 147791 - DNA, 80 bp, synthetic construct
  source 1..80: mol_type = other DNA
tgctgtgtcatacattaagcacaattttccagacgctgtaccatacattgatgaatacttgaacattgaaatgtcaacct

SEQ ID NO: 147792 - DNA, 80 bp, synthetic construct
  source 1..80: mol_type = other DNA
actggagctacagtaatgaaaacttagaactggcattatactatggagccagattaaagttctacagagacccagaaact

SEQ ID NO: 147793 - DNA, 80 bp, synthetic construct
  source 1..80: mol_type = other DNA
caaacaactcagccaccattatgttaccctggatgaattgcgcaccaatggacttcgcactaagacacaaccaatggact

SEQ ID NO: 147794 - DNA, 80 bp, synthetic construct
  source 1..80: mol_type = other DNA
acatgtcccccctctacgcccgacagcacccaccattttgtcacctctgtcacgaccgaggcttacccctccacaaccac

SEQ ID NO: 147795 - DNA, 80 bp, synthetic construct
  source 1..80: mol_type = other DNA
ccctcttggaagtccatggtgaggggacctgatacctcaccgccgtttgcctaggctataggctatttctccccttccct

SEQ ID NO: 147796 - DNA, 80 bp, synthetic construct
  source 1..80: mol_type = other DNA
ccacttccaacacctcaccagaggaagcaattcagaccagagccgtgatcaatcaacatggcaccagtgagactttggtg

SEQ ID NO: 147797 - DNA, 80 bp, synthetic construct
  source 1..80: mol_type = other DNA
tccatttcaaaattgaggtgaagcctgcttctttcttcaaaaatcctcataatgatatgttgaatgttaatttagccaaa

SEQ ID NO: 147798 - DNA, 80 bp, synthetic construct
  source 1..80: mol_type = other DNA
ccatgtacatcaacactaaatcgcaaattcataagagtccagtctatggggcagtagaggttaaaatggggccagcagtt

SEQ ID NO: 147799 - DNA, 80 bp, synthetic construct
  source 1..80: mol_type = other DNA
tgctactcactttaattacctgcctcttacctcttcgcctctggacccttcctcgggcccgccgcgaggccgcccggcga

SEQ ID NO: 147800 - DNA, 80 bp, synthetic construct
  source 1..80: mol_type = other DNA
ttattacaagtaagcaagatcaagggacctcgctaacccaagatatgccagtcctaacacatcaaatcatgtatgtcccg

SEQ ID NO: 147801 - DNA, 80 bp, synthetic construct
  source 1..80: mol_type = other DNA
accattgagaattttcttgccagatcagcatgtgtcttcttcctggaatacaagaccggtaccaaggaagattccaacag

SEQ ID NO: 147802 - DNA, 80 bp, synthetic construct
  source 1..80: mol_type = other DNA
ttcgggtaaagcaaacaccatggatatgtatagaattgggctagatagtgctgcttcagaccttaataagccaatctttt

SEQ ID NO: 147803 - DNA, 80 bp, synthetic construct
  source 1..80: mol_type = other DNA
gacgtcttctggcaacagcggtggtacccccgcatggccacgcagactcaggtgatgcatgacattaccatgacaagccc

SEQ ID NO: 147804 - DNA, 80 bp, synthetic construct
  source 1..80: mol_type = other DNA
tcacaacacaagaagcagccaattcagttgtagcctatggagtctggcccagctacctgaacgatagagatgccaatcca

SEQ ID NO: 147805 - DNA, 80 bp, synthetic construct
  source 1..80: mol_type = other DNA
ttgttgggtttgttccactcaattcacacactttgcacttaatcagaattgtcttattgacacgacaatatcatcactat

SEQ ID NO: 147806 - DNA, 80 bp, synthetic construct
  source 1..80: mol_type = other DNA
gtgatactacgcatattgaacagagggcgttagctcagggcttaggacgaatgttagagaacatgattgacaacactgtt

SEQ ID NO: 147807 - DNA, 80 bp, synthetic construct
  source 1..80: mol_type = other DNA
acaaaaactaaaagaatttgttactattatactacaaagcaaacccactgtactaaacactctagcaactccatacaacc

SEQ ID NO: 147808 - DNA, 80 bp, synthetic construct
  source 1..80: mol_type = other DNA
gtgcctagaacattgctaatgtgccctgtgtttcctgccttcatgcaaatatcctacctcccccggcctggtgcaaaatg

SEQ ID NO: 147809 - DNA, 80 bp, synthetic construct
  source 1..80: mol_type = other DNA
tttcaatcagtccaatgtgtgctgaattttctggtgccagagcaagaccagctgctgcagcacaaggtttgccagtttac

SEQ ID NO: 147810 - DNA, 80 bp, synthetic construct
  source 1..80: mol_type = other DNA
gcgccgtcaagctgtgtcttcggcgcatgctgggtctgccgccgccaccgtcagtcgcaccacctggggaaaagaaggag

SEQ ID NO: 147811 - DNA, 80 bp, synthetic construct
  source 1..80: mol_type = other DNA
ccagtctgtacagacaatggattgatgaattcatttagattatatagtagtatgtttgcagtagaactagctattataaa

SEQ ID NO: 147812 - DNA, 80 bp, synthetic construct
  source 1..80: mol_type = other DNA
aaattacattgcaagaaatggctcaaatcagacgcaaatttgagatgttcacatatgttaggtttgattctgaaattaca

SEQ ID NO: 147813 - DNA, 80 bp, synthetic construct
  source 1..80: mol_type = other DNA
ggtgttttgagaagccgtggaagtcgtaggcatcctgaagggattgtgagccaggtgaggattcttgagggcccacgcgc

SEQ ID NO: 147814 - DNA, 80 bp, synthetic construct
  source 1..80: mol_type = other DNA
gctctggatatgtgacaacatagagagcgtgggggctaaaaatatgagcaattcccctgaccagggccctggactcacga

SEQ ID NO: 147815 - DNA, 80 bp, synthetic construct
  source 1..80: mol_type = other DNA
ctgacgaacaaaaatggcaagaatggtggtctaaaaagggagaaacatggcaaggaaacgcctaccctcaaactagcaca

SEQ ID NO: 147816 - DNA, 80 bp, synthetic construct
  source 1..80: mol_type = other DNA
atatggagattactgtggtcattactagctcccaagaccagtccacatcacaaaatcaaaatgcgcccgtcctgactcac

SEQ ID NO: 147817 - DNA, 80 bp, synthetic construct
  source 1..80: mol_type = other DNA
aagtacgggttgacaataacccctgcagataagtcaagccagtttacaaaaattgactggactaatgccacttttttaaa

SEQ ID NO: 147818 - DNA, 80 bp, synthetic construct
  source 1..80: mol_type = other DNA
cgctagcggcaaacagcgcaagttgcgcgactgtccaattactaccaccaaaactctcaacacattgaatcgacgctgag

SEQ ID NO: 147819 - DNA, 80 bp, synthetic construct
  source 1..80: mol_type = other DNA
gggggagaggagacagaacaataaaaagtaactaatgtttcttagaacttacccgctaaggacttaccaaactatattca

SEQ ID NO: 147820 - DNA, 80 bp, synthetic construct
  source 1..80: mol_type = other DNA
gaagattatgtagatcaggtattgaatgaggtcctggtggtgccaaatataaagcaaagtgaacccacgacttccaattc

SEQ ID NO: 147821 - DNA, 80 bp, synthetic construct
  source 1..80: mol_type = other DNA
tacatgaaagtggcagcatcacattatgcctctcagctggaaactctagacatacccaaccaacaaatgtcaattgaaga

SEQ ID NO: 147822 - DNA, 80 bp, synthetic construct
  source 1..80: mol_type = other DNA
tttgtcacctgttggtaccagaccagtatcgtggttcccacaggagtggttacccaaagcaccattctttgcttcgtgtc

SEQ ID NO: 147823 - DNA, 80 bp, synthetic construct
  source 1..80: mol_type = other DNA
tggattagccagacgcactatagacttgtggagcaagatgtgtacaccgctgctggttatatcacatgttggtaccaaac

SEQ ID NO: 147824 - DNA, 80 bp, synthetic construct
  source 1..80: mol_type = other DNA
tacacgacttataagaatgcaaacccaggtgaggcaggtggagtgtttgtggactccttcaccgcctcggcgcaggcttc

SEQ ID NO: 147825 - DNA, 80 bp, synthetic construct
  source 1..80: mol_type = other DNA
tctggcattaaacgcacacgggagcgttggaggcccgcaccgtggacgccaaacccaccccgctctcccagtcagatgtc

SEQ ID NO: 147826 - DNA, 80 bp, synthetic construct
  source 1..80: mol_type = other DNA
tatgacagcaactatctctttgccacctaccacccagaaaacataccagaaaatattaaagttatgagagacgcctactt

SEQ ID NO: 147827 - DNA, 80 bp, synthetic construct
  source 1..80: mol_type = other DNA
ggtacctttgtgcgcctgttttatatacccttccccctctacagtaacttagaagtttgaatcatacggtcaatagacaa

SEQ ID NO: 147828 - DNA, 80 bp, synthetic construct
  source 1..80: mol_type = other DNA
ttaggtattgtgaagataacagatggattgtacctgttgattgtagattggagagagatcttaactatgccaatttagtg

SEQ ID NO: 147829 - DNA, 80 bp, synthetic construct
  source 1..80: mol_type = other DNA
cacctcccagggctgggcggacgagtatgcctgcgctagagcctgggacaggcccgtccgcaccaactacacagacaccc

SEQ ID NO: 147830 - DNA, 80 bp, synthetic construct
  source 1..80: mol_type = other DNA
gacgagacgtatgacagttgggcgatcacggtgcgtgacatggtgcaactccgcagaaaatgcgagatgtttacttacat

SEQ ID NO: 147831 - DNA, 80 bp, synthetic construct
  source 1..80: mol_type = other DNA
acacatggacaaagcccaccgacgactattacgagtaccacttaggtctcttcagccccatattcataggacccactaga

SEQ ID NO: 147832 - DNA, 80 bp, synthetic construct
  source 1..80: mol_type = other DNA
ccggactaccaaaatggcggaatctgtgacgtcacggcagccattttgtgcaaagcaccctgggtgttgcgtccaggtca

SEQ ID NO: 147833 - DNA, 80 bp, synthetic construct
  source 1..80: mol_type = other DNA
aggagcaaaaaagacacagaagtgcaaagagaagactcagatacagtccagcagccagtcctcaagccctggatcgactc

SEQ ID NO: 147834 - DNA, 80 bp, synthetic construct
  source 1..80: mol_type = other DNA
gtgacattggctctgacaatagttttgagctaactataccatattctttctccacttggatgaggaaaacgcatggtcat

SEQ ID NO: 147835 - DNA, 80 bp, synthetic construct
  source 1..80: mol_type = other DNA
gtatacatcctaatataagtaagcgcacttccgaatggctgagttttccacgcccgtccgcagcgagaacgacacggagg

SEQ ID NO: 147836 - DNA, 80 bp, synthetic construct
  source 1..80: mol_type = other DNA
attaaatggacaatcaggttaatcagtgccctatcgattatagttaggaacagtactgacacccccaccatcatagccac

SEQ ID NO: 147837 - DNA, 80 bp, synthetic construct
  source 1..80: mol_type = other DNA
caggacttttcacaagatccaagtaaattcacagagccagtcaaagacatcatgattaagtccatgccagcactgaactc

SEQ ID NO: 147838 - DNA, 80 bp, synthetic construct
  source 1..80: mol_type = other DNA
gtttcggcgaacggacacgcgctgtcttccaccgcgctcccgacgacgagcgcgggtcacaagctgtcactgccgcgcga

SEQ ID NO: 147839 - DNA, 80 bp, synthetic construct
  source 1..80: mol_type = other DNA
catagttgctgcggccctgctgccagaggtgtccgtggggcaccaggagctgtctccgctcatgtccagaagccatggag

SEQ ID NO: 147840 - DNA, 80 bp, synthetic construct
  source 1..80: mol_type = other DNA
aggagacgccgctttcagtgggggaggccgcgtagatatagaccaagacgaaggcgcaggagacgaaagagacaaaaaat

SEQ ID NO: 147841 - DNA, 80 bp, synthetic construct
  source 1..80: mol_type = other DNA
aaacatctgtgcatgctatgtgacttatattgtaatgaatatggaccacctcacataagagatttaatgcctcatcagaa

SEQ ID NO: 147842 - DNA, 80 bp, synthetic construct
  source 1..80: mol_type = other DNA
ctgctggtagatatggtcttaccatcactccccctgataaatctgatgaattcaaggaagttagcgggagcaacgtgacc

SEQ ID NO: 147843 - DNA, 80 bp, synthetic construct
  source 1..80: mol_type = other DNA
tcacccaggagatgctggtagagttgtaggccaacaacgtgacaccaacttaagacagcctagtgatgatagttggctta

SEQ ID NO: 147844 - DNA, 80 bp, synthetic construct
  source 1..80: mol_type = other DNA
gctacaacaccttgaataatatgggtaagttgtacgttagacatgtcaatggtgcaagtccagggcctgtaaaaagcaca

SEQ ID NO: 147845 - DNA, 80 bp, synthetic construct
  source 1..80: mol_type = other DNA
tatttacgtgggtaactacagagtggttaacaggcacctggccacgcatgtggactggcgcaactgcgtctgggaggatt

SEQ ID NO: 147846 - DNA, 80 bp, synthetic construct
  source 1..80: mol_type = other DNA
gcccgctcctactagaggagactgggagaccgagatgcaggcctgtaaagccttcgacaggcctatgagaagcaacctct

SEQ ID NO: 147847 - DNA, 80 bp, synthetic construct
  source 1..80: mol_type = other DNA
gactagcatttaacttagtaggggatcctataccaggcacagagaccttctacacagatggatcctgcaataggcaatca

SEQ ID NO: 147848 - DNA, 80 bp, synthetic construct
  source 1..80: mol_type = other DNA
tttgacttggaactcacatttgtaatcaccgaaaggttttactccagtaattcggctgctgcccggaactatatatacca

SEQ ID NO: 147849 - DNA, 80 bp, synthetic construct
  source 1..80: mol_type = other DNA
ttatgatccaagatcggcaggaagtagatcacgatttgatgacttggctaaaataacacaactattttcagtcatggctg

SEQ ID NO: 147850 - DNA, 80 bp, synthetic construct
  source 1..80: mol_type = other DNA
aagtaaggcggaagcagctccactatacaaaatggcggcggagcacttccggcttacttaaatcggccattttagtgacg

SEQ ID NO: 147851 - DNA, 80 bp, synthetic construct
  source 1..80: mol_type = other DNA
gaaaacccccctttaaggacactcaaataacaggccctagtctacatcctggcatcctcatgaccagaagaaaaaagaaa

SEQ ID NO: 147852 - DNA, 80 bp, synthetic construct
  source 1..80: mol_type = other DNA
ttaaagattatctcacaactaaaatgttatctaaagtggttaaaatggtatcagctttggttattatttgtagaaatcat

SEQ ID NO: 147853 - DNA, 80 bp, synthetic construct
  source 1..80: mol_type = other DNA
tcatagatctgagaaactacagctcactcagtgaacatcagggtattacagactatgtcacgcaactgggaaatgcattt

SEQ ID NO: 147854 - DNA, 80 bp, synthetic construct
  source 1..80: mol_type = other DNA
cctccattttaggccttccgaactacaaaaatggccgttttagtgacgtcacggcagccattttaagtcagcttcgggga

SEQ ID NO: 147855 - DNA, 80 bp, synthetic construct
  source 1..80: mol_type = other DNA
tataaaatacattaaaacagctggtccatcagacctccatgttcatgtgggagatttaatatataaaaatctacatttat

SEQ ID NO: 147856 - DNA, 80 bp, synthetic construct
  source 1..80: mol_type = other DNA
aaaatatgcagggagaacaagtgtttggcttcagattgtacctgggggatggtgttttaaagacaacactattaggtgaa

SEQ ID NO: 147857 - DNA, 80 bp, synthetic construct
  source 1..80: mol_type = other DNA
ggctggttcagtaacatattcatagggcccaacagatacaatttacaatttcaagcagcatatgtagacaccacatacaa

SEQ ID NO: 147858 - DNA, 80 bp, synthetic construct
  source 1..80: mol_type = other DNA
caccttctacgtgacgtgtctcatgctttttgtgccttactactgcttcagagtcctacgcggtgtactgcagcccgcta

SEQ ID NO: 147859 - DNA, 80 bp, synthetic construct
  source 1..80: mol_type = other DNA
acaggacatctcacacattgcgcaggttatcagcatgatgaaatcattttgcatggacattcaattaagtacctcgaaca

SEQ ID NO: 147860 - DNA, 80 bp, synthetic construct
  source 1..80: mol_type = other DNA
gcttccactcccctttacctaatattcttccccaagtatattttgcggtaacgttagaagaagcaaagttagtgcaatag

SEQ ID NO: 147861 - DNA, 80 bp, synthetic construct
  source 1..80: mol_type = other DNA
atcttgccaataaacgtttattgccatgtccaagttgttgtacgtgcgtgatcatgagggctttgcctgcctaacggtcg

SEQ ID NO: 147862 - DNA, 80 bp, synthetic construct
  source 1..80: mol_type = other DNA
atcaattacaccacaataaactattataaagacagcgccagtaacgcggcgtccaagttagatttctctcaggacccttc

SEQ ID NO: 147863 - DNA, 80 bp, synthetic construct
  source 1..80: mol_type = other DNA
acgacggtggcgctgcagacgccgggcaggcgactgcagccgatggtgctgctgggcgcgtggcaggagctggcgcagta

SEQ ID NO: 147864 - DNA, 80 bp, synthetic construct
  source 1..80: mol_type = other DNA
cggcggggtgtgcggagccgggggttgccggcgggagtttttgttcgtactggggacgggaggtgtgcgggaaccgaggt

SEQ ID NO: 147865 - DNA, 80 bp, synthetic construct
  source 1..80: mol_type = other DNA
cacagcacccagctctcatagtttaaatactggtctagtccccgctctccaggccgctgagacaggagcctcatccacag

SEQ ID NO: 147866 - DNA, 80 bp, synthetic construct
  source 1..80: mol_type = other DNA
ggtgggtggtacctggaggtcattctatcgggataacgagaggaggagaggctagaggtccgcgagatttggcgtaggcg

SEQ ID NO: 147867 - DNA, 80 bp, synthetic construct
  source 1..80: mol_type = other DNA
ggattgggctcatccgtgcccccctccccccgcgggaggctcaatcggccttggtctgacattccaccccggccaggtcc

SEQ ID NO: 147868 - DNA, 80 bp, synthetic construct
  source 1..80: mol_type = other DNA
catatcttatatgaagactttgacagagatgtcaaattttaagcatgacgagttctgggatgacttattgtacaagtcag

SEQ ID NO: 147869 - DNA, 80 bp, synthetic construct
  source 1..80: mol_type = other DNA
acatttttaaaagagaagatatgtaaatggctgaatgttcccaaaccacctagtaagcagggagaaggttggctgaagaa

SEQ ID NO: 147870 - DNA, 80 bp, synthetic construct
  source 1..80: mol_type = other DNA
actactctcctgatgcaagcaccaagttacccattaccatcaccatagctccaatgtgctgtgagttcaatgggctccgc

SEQ ID NO: 147871 - DNA, 80 bp, synthetic construct
  source 1..80: mol_type = other DNA
ttttagaggttcatttgtttttaggttaactgtttatgccagtacttttaacagggggagattgagaatgggattcttcc

SEQ ID NO: 147872 - DNA, 80 bp, synthetic construct
  source 1..80: mol_type = other DNA
ggtatcgaagacattatcgatagagttgcagcgaacgccctgtctttatcactaccaaatgcagctcagtccacacaagc

SEQ ID NO: 147873 - DNA, 80 bp, synthetic construct
  source 1..80: mol_type = other DNA
acgatggtttcgccagagtccctattaaaggagaaaccgcagactccggtgacacgtactacggcttggtttccattaat

SEQ ID NO: 147874 - DNA, 80 bp, synthetic construct
  source 1..80: mol_type = other DNA
tgggtttcgccgtgcgcgccgcacggcgcttttattcgccgtcgccgtcccccgccaccgccaacttcccaaattcccac

SEQ ID NO: 147875 - DNA, 80 bp, synthetic construct
  source 1..80: mol_type = other DNA
gtaagcctatggatttggcaatattgaaatgcaaattaccttttaggttcaagaaaaattccaagtattatacaaacaaa

SEQ ID NO: 147876 - DNA, 80 bp, synthetic construct
  source 1..80: mol_type = other DNA
ccagaggggcctgtgttactatcatgtcggttgaaaactataatgagaccaatgtgaccaaaagcaagctgtttgccaag

SEQ ID NO: 147877 - DNA, 80 bp, synthetic construct
  source 1..80: mol_type = other DNA
aacccctgacacttattcattagctggttatatcacatgttggtaccaaacaaagctagtagaacctccaaacacaactc

SEQ ID NO: 147878 - DNA, 80 bp, synthetic construct
  source 1..80: mol_type = other DNA
ggctgccggcgctgttacgggagcgcgtgagcgtgtccgagctggaagccgtgtaccgcgagatcctctttcgcttcgtg

SEQ ID NO: 147879 - DNA, 80 bp, synthetic construct
  source 1..80: mol_type = other DNA
cgggctatctcatccggcaccatctcctggaagagattcaagaggtcatgatgctcatgccggataaggcctcggaccag

SEQ ID NO: 147880 - DNA, 80 bp, synthetic construct
  source 1..80: mol_type = other DNA
tcctcccgaaaaagcattaatcagtaaaacccgactgctcagcgagaatcgtcgaaaaggacgagtagttcaggcggaaa

SEQ ID NO: 147881 - DNA, 80 bp, synthetic construct
  source 1..80: mol_type = other DNA
tttactttttatagacaccccacagtagactttatagtacaaatacatacttcgcctccattcctagacactcctctaac

SEQ ID NO: 147882 - DNA, 80 bp, synthetic construct
  source 1..80: mol_type = other DNA
gaatagtcatgaggtgtccctacacatacccgcaattaataaagcacagcgacgaccagtgggggtttgtgccatacagt

SEQ ID NO: 147883 - DNA, 80 bp, synthetic construct
  source 1..80: mol_type = other DNA
ggaaataggtaaaggacaagacacacaagaaactggtctagtctgtataatatgcagatacacagaccctcccatgtata

SEQ ID NO: 147884 - DNA, 80 bp, synthetic construct
  source 1..80: mol_type = other DNA
aaagtactgtatgacgaccacctaaaaggactgaacatatggacgtacagtaacaaggacctggaactgactagatactt

SEQ ID NO: 147885 - DNA, 80 bp, synthetic construct
  source 1..80: mol_type = other DNA
gggacggggacggtggtggggagggggacgggagtggggacggtagtgaggacgtggacggggacagtggtggggacagc

SEQ ID NO: 147886 - DNA, 80 bp, synthetic construct
  source 1..80: mol_type = other DNA
tccgggtggccaatcccaatggcctacccgtttctctcattgtggccttcgctccacccggagccacaatcccctccaaa

SEQ ID NO: 147887 - DNA, 80 bp, synthetic construct
  source 1..80: mol_type = other DNA
cgcgcctaagtttcaaggactgccagtgttgaacacccctggcagtaaccagtatttgacttcagacaatcaccaatcac

SEQ ID NO: 147888 - DNA, 80 bp, synthetic construct
  source 1..80: mol_type = other DNA
gtggatatttatgacactgctccatctagacctataccaatcaggaaaactaaatatttgtctatgagtaccaagtataa

SEQ ID NO: 147889 - DNA, 80 bp, synthetic construct
  source 1..80: mol_type = other DNA
tagcagcgagtctagatagtcccacaggggatctataaacgttctctgaaatcccgttgatggtgacgtaggtgtagttt

SEQ ID NO: 147890 - DNA, 80 bp, synthetic construct
  source 1..80: mol_type = other DNA
agaagaacttctttcaaggcgacaaggcttctgaggtcacagtctccgatacacaacctagcgggcctagtaattcggtc

SEQ ID NO: 147891 - DNA, 80 bp, synthetic construct
  source 1..80: mol_type = other DNA
accagacaaggaaagctgccaaggaggttgtggaatggttcagtagtaagatcaagtcaatgctgagttttgtggaaagg

SEQ ID NO: 147892 - DNA, 80 bp, synthetic construct
  source 1..80: mol_type = other DNA
ttaaaggaaactggacagaagccatacaggaggtgaaagagaccattaaaaatcatcccagatattcaggaacaacaaat

SEQ ID NO: 147893 - DNA, 80 bp, synthetic construct
  source 1..80: mol_type = other DNA
aaaagaatgcttgaaaaatcagatgatgctaaccaatctccagcaggccaaccagagtctacgttgtgcacttcctgggc

SEQ ID NO: 147894 - DNA, 80 bp, synthetic construct
  source 1..80: mol_type = other DNA
tgacaacaggtgcgttcggacaacagtctggggcgatatacgtgggcaattacagactagtgaatagacaccttgccacg

SEQ ID NO: 147895 - DNA, 80 bp, synthetic construct
  source 1..80: mol_type = other DNA
gttgctagggtagcagacacaattagcagtggtccgacgaactcccaagcagttccagcactgacggcggttgagaccgg

SEQ ID NO: 147896 - DNA, 80 bp, synthetic construct
  source 1..80: mol_type = other DNA
aatttctatgatggctattcacatgatagtaagaccactgtttatggcataaatgtgttaaatcatatgggtagtatagc

SEQ ID NO: 147897 - DNA, 80 bp, synthetic construct
  source 1..80: mol_type = other DNA
ggccgggccatgggcaaggctcttagggttatcgctctcttctgaggacgacggtctcgtttgtaggatattgaagtctt

SEQ ID NO: 147898 - DNA, 80 bp, synthetic construct
  source 1..80: mol_type = other DNA
cgagccggtttcgtgagtccaccttcgagtcgtggtccacgaccatgaagctgaccgtgcgtgacctgctgaccaccaac

SEQ ID NO: 147899 - DNA, 80 bp, synthetic construct
  source 1..80: mol_type = other DNA
tggacacagtagtctatgaacagcaacgaaaatgagtggggccagacttcgccataaggcctttatcttcttgccatttg

SEQ ID NO: 147900 - DNA, 80 bp, synthetic construct
  source 1..80: mol_type = other DNA
cccagaatgtctataccatttgtaggaataggagctgcatattcacacttttatgatggtttcagtgttgtgccctttaa

SEQ ID NO: 147901 - DNA, 80 bp, synthetic construct
  source 1..80: mol_type = other DNA
caaagggtgttactgacgctagatccagcatcacagctaccactgacaccattggtgagagcagggcaatgcaaaccaca

SEQ ID NO: 147902 - DNA, 80 bp, synthetic construct
  source 1..80: mol_type = other DNA
ctactgggcacttgacacattgtgctggataccagcatgatgaaatcatattacatgggcattcaattaagtatcttgag

SEQ ID NO: 147903 - DNA, 80 bp, synthetic construct
  source 1..80: mol_type = other DNA
tggctgccattctaccagttaacgaggagagagagagtaggtccgcggaaattggtgcccctctctgccctcctgacgag

SEQ ID NO: 147904 - DNA, 80 bp, synthetic construct
  source 1..80: mol_type = other DNA
aagaaacaacccaagcctatgccaactgggaaattgacacaatgggttttgtccaaatgaggagaaaattggaaatgttt

SEQ ID NO: 147905 - DNA, 80 bp, synthetic construct
  source 1..80: mol_type = other DNA
agaaacaacacaaacgggacacacgtaaatccctggatatgcgaagaaccaaagcacgaatgggacacttctcataaacc

SEQ ID NO: 147906 - DNA, 80 bp, synthetic construct
  source 1..80: mol_type = other DNA
aggttaaaaacacccacaccaacggagtaagactactggcacatgtaatccagaaaataggaaaggaagcattggtcacc

SEQ ID NO: 147907 - DNA, 80 bp, synthetic construct
  source 1..80: mol_type = other DNA
cagaatccattaaagacgtgcctttgaaagcagcaactctataccaaaaccaaaccaaaaaacttttatccacaacattc

SEQ ID NO: 147908 - DNA, 80 bp, synthetic construct
  source 1..80: mol_type = other DNA
atgtcaatcaactgggtgttgctttcggagatggtttctctagcaacataaaggatcatttaacaggcttgtgcacctca

SEQ ID NO: 147909 - DNA, 80 bp, synthetic construct
  source 1..80: mol_type = other DNA
atttccttccctcccacttttaccccagtcccaacccaaaaccacacacaacacatagaattgttagtttaaacagttta

SEQ ID NO: 147910 - DNA, 80 bp, synthetic construct
  source 1..80: mol_type = other DNA
ctgcaggactttccagaaggggctgtaacagtgtgagggacatgggaggagcagggaggaacgcccatcaagactctgta

SEQ ID NO: 147911 - DNA, 80 bp, synthetic construct
  source 1..80: mol_type = other DNA
ggccagcagggtgttccagtcatcgggcgaagtgggagcgggctctgggcgtgcccccagcgccttcctaattctggccc

SEQ ID NO: 147912 - DNA, 80 bp, synthetic construct
  source 1..80: mol_type = other DNA
acttaaagaagtgttgaaagatctacaatttgaacatagattaattgatagactgtgtaactccaaacacatatacaagg

SEQ ID NO: 147913 - DNA, 80 bp, synthetic construct
  source 1..80: mol_type = other DNA
aatatggagttgacctaccttttgtaacctttgtaaaagatgaactcagatcaagagaaaaagttgaaaaagggaaatca

SEQ ID NO: 147914 - DNA, 80 bp, synthetic construct
  source 1..80: mol_type = other DNA
tagtagacaaaggcctcggaaacaaaatgtggatccaatctgtaactaaaccagacacaaactttaatgaaacacaatgt

SEQ ID NO: 147915 - DNA, 80 bp, synthetic construct
  source 1..80: mol_type = other DNA
cagagaccatgattgaaacacgctatgtcatgaatgacaataccaatggtgaggccgccattgaaaactttctaggtaga

SEQ ID NO: 147916 - DNA, 80 bp, synthetic construct
  source 1..80: mol_type = other DNA
aacccacccatcctgaaacatcatcagataggttttacacgctgaagagcgttacttgggaggttgggtcatcaggctgg

SEQ ID NO: 147917 - DNA, 80 bp, synthetic construct
  source 1..80: mol_type = other DNA
aattacaaaggataccaccaaactccaagagatgattgacatatatggccttgacttaccctacattacatacttaaaag

SEQ ID NO: 147918 - DNA, 80 bp, synthetic construct
  source 1..80: mol_type = other DNA
acacagcagttcatgacaacagaggatgagcaatccgccaacttgctccctggtttccacccaacacctgtcatgcatat

SEQ ID NO: 147919 - DNA, 80 bp, synthetic construct
  source 1..80: mol_type = other DNA
aaacgcagactgtacagacgcaggagacgctttaagagacgcagacgaaggagacctaagataaaactgactcagtggca

SEQ ID NO: 147920 - DNA, 80 bp, synthetic construct
  source 1..80: mol_type = other DNA
cgttacgcttactcgcatgtgcattgagtggtgcacgtgttgaacaaacagctacactcacatggggcgggtcttcccgc

SEQ ID NO: 147921 - DNA, 80 bp, synthetic construct
  source 1..80: mol_type = other DNA
caatggcaggttctgcaatgggcgcagcgtctttgacactgtcagctcagtcccggactctactggctgggatagtgcag

SEQ ID NO: 147922 - DNA, 80 bp, synthetic construct
  source 1..80: mol_type = other DNA
caagaaaagagacacaataaatacatatggcttaggacccaggtttgggggaatatttactggaaatgtcaagattatga

SEQ ID NO: 147923 - DNA, 80 bp, synthetic construct
  source 1..80: mol_type = other DNA
cgacagtaaacttttcacccacaaacatcacagacaagagggatagcatcacttacattccagacaccgtgagacccgac

SEQ ID NO: 147924 - DNA, 80 bp, synthetic construct
  source 1..80: mol_type = other DNA
gctgtgtggggcagacccgttcgcagcttccacacagacatgcctttttaccccgagattcccaagatcccccccaaatt

SEQ ID NO: 147925 - DNA, 80 bp, synthetic construct
  source 1..80: mol_type = other DNA
agtcatcctcggccacacggccggagctccgggcctcgtgccagggcctgttgtcctggtggaggatattggacacgagc

SEQ ID NO: 147926 - DNA, 80 bp, synthetic construct
  source 1..80: mol_type = other DNA
tccccaacgtcgcccaaaaaaccccgagcaaaccaagaccgtgcgaccccacgcaccggcagcgcgcacaaagcgccgcg

SEQ ID NO: 147927 - DNA, 80 bp, synthetic construct
  source 1..80: mol_type = other DNA
tgacaccagatatcatccactctacaatcgagctcatcaactgtgggacttattagatttgatgtttgaggagattggaa

SEQ ID NO: 147928 - DNA, 80 bp, synthetic construct
  source 1..80: mol_type = other DNA
gagctaatattggaaattgcatggaggcactattccaaggacctttgcagtacaaagatctgagaatagatattaagact

SEQ ID NO: 147929 - DNA, 80 bp, synthetic construct
  source 1..80: mol_type = other DNA
atgatctggatagactggatcacaaaaggtgacaccatctactctgagagcaaaagcaagtgcctgctgagagacctccc

SEQ ID NO: 147930 - DNA, 80 bp, synthetic construct
  source 1..80: mol_type = other DNA
taccaatctcccacatgtcttgatgaatttggctgagaccacacaagcagacctatgtatcccctatgtcgctgacacaa

SEQ ID NO: 147931 - DNA, 80 bp, synthetic construct
  source 1..80: mol_type = other DNA
tttcgtgtattaccgcgcccactggagttgcttgattacctacgtcaaagcggtctcactgtgacgttagagaaagagca

SEQ ID NO: 147932 - DNA, 80 bp, synthetic construct
  source 1..80: mol_type = other DNA
agaacactaattcaatagggatactaaaaacttcagcacattcaagcagcaacttcaatcctacttaatggagttatgcc

SEQ ID NO: 147933 - DNA, 80 bp, synthetic construct
  source 1..80: mol_type = other DNA
acggtggcgcaggtggagacgcagaccatggaggcgccgctggaggacccgaagacgcagacctgctagacgccgtggcc

SEQ ID NO: 147934 - DNA, 80 bp, synthetic construct
  source 1..80: mol_type = other DNA
cccaaatctgtcacgtgcgctcacagccgctctcttttctaccgaggctcttagttgctgggccaccagatctcgcttag

SEQ ID NO: 147935 - DNA, 80 bp, synthetic construct
  source 1..80: mol_type = other DNA
ctatgttaccatgggcattaagaaaaaggatattataaataaggttacaaaagacacaaccaaactccaaaacatgatag

SEQ ID NO: 147936 - DNA, 80 bp, synthetic construct
  source 1..80: mol_type = other DNA
actgccagaaaaaacgtgagctaccaagaagccaaagaacttaatcacaaaacaggcttctacagctctatatttctaag

SEQ ID NO: 147937 - DNA, 80 bp, synthetic construct
  source 1..80: mol_type = other DNA
catggtgtgagactggaactgtactaaatttgctgacatatgtacaatgagagccaaaaatttgataaaccttaaaagtc

SEQ ID NO: 147938 - DNA, 80 bp, synthetic construct
  source 1..80: mol_type = other DNA
tttctagctagaatgttaacaagtgagagtgatatatactcactccccccagatcccaaatactttgatggatatgatca

SEQ ID NO: 147939 - DNA, 80 bp, synthetic construct
  source 1..80: mol_type = other DNA
tatcctaaaacagcagattatcacagatttgaatgacacggatacagaaatcaccataatctggttggacaggaatgaaa

SEQ ID NO: 147940 - DNA, 80 bp, synthetic construct
  source 1..80: mol_type = other DNA
agctggagcaggccagtgcacaatgccccgggtatcgagagaaactggtatgaatcagtattccgatcccacgcagggtg

SEQ ID NO: 147941 - DNA, 80 bp, synthetic construct
  source 1..80: mol_type = other DNA
tattttgatggttacgatcaacagaaggttgtcataatggatgatatagggcaaaatccagatgggaaagacctcagtat

SEQ ID NO: 147942 - DNA, 80 bp, synthetic construct
  source 1..80: mol_type = other DNA
gaaggaggattcaaaagatgagagagcctacaaccccacactccctgtagcaaagccaaaaggtgcatttccagtgtcgc

SEQ ID NO: 147943 - DNA, 80 bp, synthetic construct
  source 1..80: mol_type = other DNA
actttttgtcatcaaatggagtaatcacagtgccagcaggtgaacagatgacactttctgttcctttctattcttctaaa

SEQ ID NO: 147944 - DNA, 80 bp, synthetic construct
  source 1..80: mol_type = other DNA
tacaagggggccactattaaattctacagacacccagacacagactacatagctgtatacaacagaaagacacctctggg

SEQ ID NO: 147945 - DNA, 80 bp, synthetic construct
  source 1..80: mol_type = other DNA
cagtgttgaagcgggcagtaggctgtcctgttctcgagcttccaagatagggtgtaagtgcccttgtccaggaaggctcg

SEQ ID NO: 147946 - DNA, 80 bp, synthetic construct
  source 1..80: mol_type = other DNA
tatacgacaatgtctagggaatcatacattgcttcttattaatttaacgagtcactatagcgggacttactatttcgagt

SEQ ID NO: 147947 - DNA, 80 bp, synthetic construct
  source 1..80: mol_type = other DNA
gctacgtcactaaccacgtgcacttcacaggccaaccagagcctatgtcgtgcacttcctgggccgggtctacatcctaa

SEQ ID NO: 147948 - DNA, 80 bp, synthetic construct
  source 1..80: mol_type = other DNA
ggcacgggttttcgatgagttgttccgtgccttcgacgcagacgtactgcgtgtccgtgtcgccgcggatgcagtccttg

SEQ ID NO: 147949 - DNA, 80 bp, synthetic construct
  source 1..80: mol_type = other DNA
ggttaactgtggtttctgctgtcactagtgctataagcattttacttttggtgactaaaatcttcaagaaagaggaatca

SEQ ID NO: 147950 - DNA, 80 bp, synthetic construct
  source 1..80: mol_type = other DNA
agtctcgcaccgaaatcacggcaatgcagaccactggtttacatggtcaacaatccggggctgtgtatgtgggcaattac

SEQ ID NO: 147951 - DNA, 80 bp, synthetic construct
  source 1..80: mol_type = other DNA
tgcggtttccgttctgctcaccacaaactgacaactattgcgtgacattccaagttctctcttctgtgtacaacaacttc

SEQ ID NO: 147952 - DNA, 80 bp, synthetic construct
  source 1..80: mol_type = other DNA
tcccaagacctacgcacgttcatgatgagacggcccgtgtacacgagcttgttgacggcgttgaccagcgccgtgttggc

SEQ ID NO: 147953 - DNA, 80 bp, synthetic construct
  source 1..80: mol_type = other DNA
ggggatgtccctgggcgttgctgcagcccattcgccctctggggatgagatgttcaggtgtggccggtaccctacgctgc

SEQ ID NO: 147954 - DNA, 80 bp, synthetic construct
  source 1..80: mol_type = other DNA
ctggccaggagacgagaccccgacgcagacggggtcgcagccctcggaggaggaagcggagacgacgagggagctcgagc

SEQ ID NO: 147955 - DNA, 80 bp, synthetic construct
  source 1..80: mol_type = other DNA
agtttgaggagcggatacgtagtgtgagcgctggtcgcgcattatatatccctccctatgacctgcttttgcatgagtgg

SEQ ID NO: 147956 - DNA, 80 bp, synthetic construct
  source 1..80: mol_type = other DNA
cgctgcgcgcgccgcccagtaggaggcgccaagcgccccccccgcgcatgcgcggaggaggcgcttggcgccccctactg

SEQ ID NO: 147957 - DNA, 80 bp, synthetic construct
  source 1..80: mol_type = other DNA
cataagaaactgctacatagttggctacctaccactaatatggtgtggagaaaacaccacaagcagaaactttgccaccc

SEQ ID NO: 147958 - DNA, 80 bp, synthetic construct
  source 1..80: mol_type = other DNA
ccgtcgacatcgcggctccagatggacttctcaaccttcttggctacatttctgtgtgggtcatgaatcctctcagtggc

SEQ ID NO: 147959 - DNA, 80 bp, synthetic construct
  source 1..80: mol_type = other DNA
tgtgatggcgggtaatatcactgtctatccacatcagataattaatctcagaacgaacaactgtgccacactggtgctgc

SEQ ID NO: 147960 - DNA, 80 bp, synthetic construct
  source 1..80: mol_type = other DNA
gatattataaaacaggtcattgctcggattgtggcagccgatagcaccctagatctagtgaatcatggcgagcccggaag

SEQ ID NO: 147961 - DNA, 80 bp, synthetic construct
  source 1..80: mol_type = other DNA
ccttgcgcacatctggaaacgcccctggaattctaccaatcactatctctattgcaccagataaatcagaattttccgga

SEQ ID NO: 147962 - DNA, 80 bp, synthetic construct
  source 1..80: mol_type = other DNA
tcggttgcattagttggtgagagggctttctacgatccaagaacagctgggagcaagaccagatttggagatttaataaa

SEQ ID NO: 147963 - DNA, 80 bp, synthetic construct
  source 1..80: mol_type = other DNA
cgcagactattgtacaaaagcctcaaaagatgaaagttttatctacaactatagagtagttatacagtgcccatacacag

SEQ ID NO: 147964 - DNA, 80 bp, synthetic construct
  source 1..80: mol_type = other DNA
aaattatacaagtagacactcttattcctatgaacaacaaaggtaccactgataccttggaagagtaccgcatcccactc

SEQ ID NO: 147965 - DNA, 80 bp, synthetic construct
  source 1..80: mol_type = other DNA
ttccattgagaacttcatgagtcgatctgcttgtgtattttacactaagtacaaaacaaaagacacagacccatcggaga

SEQ ID NO: 147966 - DNA, 80 bp, synthetic construct
  source 1..80: mol_type = other DNA
agtgcacacttgagagaaatatcgatcacctgcagtacattcttaattgtctaggaagtttgattctcatcctgggtacc

SEQ ID NO: 147967 - DNA, 80 bp, synthetic construct
  source 1..80: mol_type = other DNA
catcatgacaaattgccctgatagacaggcgggttttttagggattggcccctggggaaagaagccccgcaatttccccg

SEQ ID NO: 147968 - DNA, 80 bp, synthetic construct
  source 1..80: mol_type = other DNA
ttccagcttatgccactttacagtcacccctctatgaataccacgggggctgctattcctctatccttctatcagcaggc

SEQ ID NO: 147969 - DNA, 80 bp, synthetic construct
  source 1..80: mol_type = other DNA
actatttgaagacaagtggtacactcagcaagacctgtgcaaggttccgctcgttagtattacagcaactgcggctgact

SEQ ID NO: 147970 - DNA, 80 bp, synthetic construct
  source 1..80: mol_type = other DNA
ccagctccgaaagcagctcagacagcagcgagacatcagacaacagctcaagttcatgctccagcaagtcctcaaaacac

SEQ ID NO: 147971 - DNA, 80 bp, synthetic construct
  source 1..80: mol_type = other DNA
taattccacctccaccgattcaatggtgaaacacaacaactggggcattgtggttatgccatttgtaccgttggactacg

SEQ ID NO: 147972 - DNA, 80 bp, synthetic construct
  source 1..80: mol_type = other DNA
cagaatacaagttatcgacccgcaaatactcggaccgagctactcgttccgtagctgggacatcagacgtggattcttta

SEQ ID NO: 147973 - DNA, 80 bp, synthetic construct
  source 1..80: mol_type = other DNA
ataacggccgcaattggtagagttgctgacaccgtagggactggaccaacaaattccgaagctataccagcactcactgc

SEQ ID NO: 147974 - DNA, 80 bp, synthetic construct
  source 1..80: mol_type = other DNA
ggtactctgcttgggaacatcaccatatatccacatcagttaataaacctacgtactaataattctagtacaatagtaat

SEQ ID NO: 147975 - DNA, 80 bp, synthetic construct
  source 1..80: mol_type = other DNA
tgtttgtgacctttcatgatttgtttaaatgaatcttcttaaaatttctgaggtttgtttattttagtgttcagtaaata

SEQ ID NO: 147976 - DNA, 80 bp, synthetic construct
  source 1..80: mol_type = other DNA
cacgacttgaagtaaacctaaaagaagctgttatgtccaaatataaaggaaataagggctgtcaaatgaatgactatgtg

SEQ ID NO: 147977 - DNA, 80 bp, synthetic construct
  source 1..80: mol_type = other DNA
acacattgactctgagaaggcaaatagcacagattatacctcaaacaagcacaccaagaagatacaagaatcagcaaaca

SEQ ID NO: 147978 - DNA, 80 bp, synthetic construct
  source 1..80: mol_type = other DNA
ggtggttcaacagtgaactataccacaatcaattattacaaagattcagcaagcaatgcagcaagtaaacaggacttcag

SEQ ID NO: 147979 - DNA, 80 bp, synthetic construct
  source 1..80: mol_type = other DNA
tacatgctcacacaccctctcgccatgctcctaaacaagcaccacatagtagttccaagctttaaaacaaggcccaaagg

SEQ ID NO: 147980 - DNA, 80 bp, synthetic construct
  source 1..80: mol_type = other DNA
aatcaagccctacgtggtaaaccccgttgtcgccaccgccgcggctgccagtaactcttcctcgtcttcttcggctccac

SEQ ID NO: 147981 - DNA, 80 bp, synthetic construct
  source 1..80: mol_type = other DNA
actggaccagcactgtctagtgctaaacttatactagcttatacaccacctggagctcctggacctagtaacaggaagga

SEQ ID NO: 147982 - DNA, 80 bp, synthetic construct
  source 1..80: mol_type = other DNA
gcgtttcgggaaaagcgaacaccatggaaatgtacagaatcccattgaatacaaccggcagcaaagatcccatattctgc

SEQ ID NO: 147983 - DNA, 80 bp, synthetic construct
  source 1..80: mol_type = other DNA
atgtccagtgtaattctacaaagtttcacagtggatgtttaatagttgctattataccagagcaccaacttgcttatata

SEQ ID NO: 147984 - DNA, 80 bp, synthetic construct
  source 1..80: mol_type = other DNA
caggtcaaatgtagaattcttcaccgcatacaaagacattgtatacaaccccctcttagacagaggcacaggcaacatgg

SEQ ID NO: 147985 - DNA, 80 bp, synthetic construct
  source 1..80: mol_type = other DNA
gagcttggagctttaaatatgaaacagacaatccagtcagcaaaaagatctggccacaacctaccacaacaaaaccaaca

SEQ ID NO: 147986 - DNA, 80 bp, synthetic construct
  source 1..80: mol_type = other DNA
gcccggagaacccgggaccctccggaggacgtagtgctcctcagatcgggctcctacccgctctcccggctgctcccgag

SEQ ID NO: 147987 - DNA, 80 bp, synthetic construct
  source 1..80: mol_type = other DNA
attgattggttctcaaataaaatcaagtccatgttaagctttgttgaaagaaataaggcctggttaactgttgtttcggc

SEQ ID NO: 147988 - DNA, 80 bp, synthetic construct
  source 1..80: mol_type = other DNA
tctctcttgcaaatttcttccactttatgctagtgaggcaaagagaatcaagatattacataataaatgtagtacaataa

SEQ ID NO: 147989 - DNA, 80 bp, synthetic construct
  source 1..80: mol_type = other DNA
agaaaaagtttttgatatattatacaaaaacaactcatactgggaatcaaacataactcccttttatgtaattaatgtta

SEQ ID NO: 147990 - DNA, 80 bp, synthetic construct
  source 1..80: mol_type = other DNA
gaactttgattctagatgcttataagggtatagatcttgacaaattgagggttattgcatatggagatgatctgatagtc

SEQ ID NO: 147991 - DNA, 80 bp, synthetic construct
  source 1..80: mol_type = other DNA
aaatgggttcagccaaggtgaaagaggcgttcacgcatgaagcattaagtaagggtgagatagcaaaggaattcactccc

SEQ ID NO: 147992 - DNA, 80 bp, synthetic construct
  source 1..80: mol_type = other DNA
gtcccaacaacatgatgggtacctttgcggtacgagttgttagtagggtagcaagtcaactcaaattgcaaactagggtg

SEQ ID NO: 147993 - DNA, 80 bp, synthetic construct
  source 1..80: mol_type = other DNA
gctgaagttgtcgcaaccgaaaccaaacacgcagcagagtctaccaaacaccaatagttcagagccaactcactcacaag

SEQ ID NO: 147994 - DNA, 80 bp, synthetic construct
  source 1..80: mol_type = other DNA
cactaactctgatgtcccagtccagacgcttaaatatgtacgtgccacctggaggccccgtgccaccactagtcagttat

SEQ ID NO: 147995 - DNA, 80 bp, synthetic construct
  source 1..80: mol_type = other DNA
ttgggcagccatctcatccatgtttccaaccctctcaataaactggggcgcggccagggtgtcagcgtaaacctcatttc

SEQ ID NO: 147996 - DNA, 80 bp, synthetic construct
  source 1..80: mol_type = other DNA
ccaacattctcacagcatttaaagaaaatgcaaacaaatactggaactctagaaaaggaacacagtttacagctagtaaa

SEQ ID NO: 147997 - DNA, 80 bp, synthetic construct
  source 1..80: mol_type = other DNA
acgccgcaaacgcgctgaggacaccgctgcgcttacttatgtccagagacacacgcaccgccagcgcgcagaaagctccg

SEQ ID NO: 147998 - DNA, 80 bp, synthetic construct
  source 1..80: mol_type = other DNA
ccatcaaaaggccgactgcctcgaactggcttttcagattgtccacggtccagggcacaaagtcctccatctttggagtt

SEQ ID NO: 147999 - DNA, 80 bp, synthetic construct
  source 1..80: mol_type = other DNA
gcggctgacttgcggtttccgttcggctcaccacaaactgacaacgtttgcataaccttccaggtgcttagttccgcata

SEQ ID NO: 148000 - DNA, 80 bp, synthetic construct
  source 1..80: mol_type = other DNA
tgaatttcgatgcaactgcagttaccgaaacacgagcgactattaacaccgtccctgtgtcaaaccacggtggaggtcgc

SEQ ID NO: 148001 - DNA, 80 bp, synthetic construct
  source 1..80: mol_type = other DNA
gcctcgacaaactcacacaccatcacacccccaacggtttcacatagtgacgctctaaacaggagattcgcctttgacat

SEQ ID NO: 148002 - DNA, 80 bp, synthetic construct
  source 1..80: mol_type = other DNA
tgctccgtctccatacagatgaagggccagacgcctttgaggttctcggcctggccgcagagcagcaacggacgcgtcat

SEQ ID NO: 148003 - DNA, 80 bp, synthetic construct
  source 1..80: mol_type = other DNA
ttaaaactgggtccaggttgttcccatctggatctcctacgcggagttgtactctattatttcggtaattttgtacgcca

SEQ ID NO: 148004 - DNA, 80 bp, synthetic construct
  source 1..80: mol_type = other DNA
accggagatacaacgtcatccattcttggcacatgccctatgagatatgaagatgaatctaggaacaccgaaaacaccat

SEQ ID NO: 148005 - DNA, 80 bp, synthetic construct
  source 1..80: mol_type = other DNA
acgttgactttatattcacatataacagaaaacccccatttacagacagccaaataacaggggccagcctgcacccagga

SEQ ID NO: 148006 - DNA, 80 bp, synthetic construct
  source 1..80: mol_type = other DNA
gattaccatttcaaaaccagtagttgaacttggcttacctagtatccacacaccaagcaagacaaaattgcaacctagtg

SEQ ID NO: 148007 - DNA, 80 bp, synthetic construct
  source 1..80: mol_type = other DNA
ctgtagaagttaagccctatgactggtatgaaatccaagaatcagattactaccccagacatattcaatataatctattg

SEQ ID NO: 148008 - DNA, 80 bp, synthetic construct
  source 1..80: mol_type = other DNA
gactgggaaacagaatatgcagcctgcagggcctttgataggccccctcgcacaaacctacactctcctccttactatcc

SEQ ID NO: 148009 - DNA, 80 bp, synthetic construct
  source 1..80: mol_type = other DNA
tttccgtaccatatgtgggattggcaaacgcatactcgcacttctatgacggtttcgccaaagtacctttgaaatctgat

SEQ ID NO: 148010 - DNA, 80 bp, synthetic construct
  source 1..80: mol_type = other DNA
gactccttcatgcccataaataatgtgaatcagtctcatacactgggagtttactacatcacaatatcaaatgtgagcag

SEQ ID NO: 148011 - DNA, 80 bp, synthetic construct
  source 1..80: mol_type = other DNA
ccctgtgaagagtaccatacggttttacatgaagcccaaacacgtgaaggcttggatacccagacctcctcgcctctgcg

SEQ ID NO: 148012 - DNA, 80 bp, synthetic construct
  source 1..80: mol_type = other DNA
attggaggtggaaaatttcaatgcaacagaaacacaagacaagaaaaagcaattcactgtatggcctatcacgtacacca

SEQ ID NO: 148013 - DNA, 80 bp, synthetic construct
  source 1..80: mol_type = other DNA
agctacagaatacacacataaaactagtacaaactacaacaggaaattggcagataacactcttaaagtagatcattaca

SEQ ID NO: 148014 - DNA, 80 bp, synthetic construct
  source 1..80: mol_type = other DNA
ccttctctaatagccctcaatccttctgccacccaatctggcaatgctgccatcctcactggctctactgctccctcttt

SEQ ID NO: 148015 - DNA, 80 bp, synthetic construct
  source 1..80: mol_type = other DNA
gctgccctggtacagcggttcaactccaacacgatgcaacagcagcacctactgccaccaacacccgtattaaggtctcc

SEQ ID NO: 148016 - DNA, 80 bp, synthetic construct
  source 1..80: mol_type = other DNA
taggagagggacattgccagccaggtgattgtggaggtaaattactgtgcaagcatggagtaataggaatgataactgca

SEQ ID NO: 148017 - DNA, 80 bp, synthetic construct
  source 1..80: mol_type = other DNA
tggagttgtactctattattccggtaatcttgtacgccagttttatatcccttccccctttgtaacttagaagttaagca

SEQ ID NO: 148018 - DNA, 80 bp, synthetic construct
  source 1..80: mol_type = other DNA
ttgaagacataataagcaacactgtcacccgtacactgcaacaaatcagtgccccatcacacgacactacagcagccaac

SEQ ID NO: 148019 - DNA, 80 bp, synthetic construct
  source 1..80: mol_type = other DNA
ggtaaggcaaatcagggaaaaatggacgtgtcaggtgtccaagctcctgtaggtgctattacaaccattgaagatccagt

SEQ ID NO: 148020 - DNA, 80 bp, synthetic construct
  source 1..80: mol_type = other DNA
tattcccaaacccccacccgttattcgcccaacccctgtaacgttagaagtttggaacttaattgtacaatagggagcac

SEQ ID NO: 148021 - DNA, 80 bp, synthetic construct
  source 1..80: mol_type = other DNA
gtcgcgagtcacggaccccgagcacctcatgatgaacgttaacccgttgcgactgccctatgagaagaacaccgctatca

SEQ ID NO: 148022 - DNA, 80 bp, synthetic construct
  source 1..80: mol_type = other DNA
gcgtgtgctgtggaggacggtgacggcggtgcggttgtaacggcgacggcgaataaaagcggcgtgcgccgcgcacggcg

SEQ ID NO: 148023 - DNA, 80 bp, synthetic construct
  source 1..80: mol_type = other DNA
accctcgggccatctgatctttatgtacatactggtaatcttatatataggaatttgcatttgtgtgaaccagagaactt

SEQ ID NO: 148024 - DNA, 80 bp, synthetic construct
  source 1..80: mol_type = other DNA
gtatacgggacagtcgtgtgcatggaaatggtaccctgcatcctgtgttggagctagcagcaagagaaacacctctccgc

SEQ ID NO: 148025 - DNA, 80 bp, synthetic construct
  source 1..80: mol_type = other DNA
taccatatctaattactcatcacagccacataatcacaatgggagctcaagtttctactcagaagtccggctcacatgaa

SEQ ID NO: 148026 - DNA, 80 bp, synthetic construct
  source 1..80: mol_type = other DNA
tcagctgagacagcagtggttagataactttgtgtgattctattccccttaaatttaatatatatacatatagcatctag

SEQ ID NO: 148027 - DNA, 80 bp, synthetic construct
  source 1..80: mol_type = other DNA
aaatatggctcccgccgcctgtgacaagctcgccaagaaactattctccaaggttaaggatgagttcgattggcaaatgc

SEQ ID NO: 148028 - DNA, 80 bp, synthetic construct
  source 1..80: mol_type = other DNA
tggtctgagtgagggagaaaccgccaaaaagttctcggcaaccggcacgaatggtactaacacagtgcagtcaattgtga

SEQ ID NO: 148029 - DNA, 80 bp, synthetic construct
  source 1..80: mol_type = other DNA
aatctcacactgctgatagtgccactggttaaactcacacctggaactggtgcttcacccagcgtgtctataacagtgtc

SEQ ID NO: 148030 - DNA, 80 bp, synthetic construct
  source 1..80: mol_type = other DNA
caagcttctaccaaggagatgtacatgatgctgttgttggggcgatgacccgtgtggccgacacggtggccagtgggcct

SEQ ID NO: 148031 - DNA, 80 bp, synthetic construct
  source 1..80: mol_type = other DNA
gtaccaatttacaacacttgaatccatctacagtgcagacacccgacgcagtggatagaagattcttcttagacacagac

SEQ ID NO: 148032 - DNA, 80 bp, synthetic construct
  source 1..80: mol_type = other DNA
tccacggctcccaggcccagccccgtccacccctccccacgttggacaggccctctgtccacccgggccatccccgctcc

SEQ ID NO: 148033 - DNA, 80 bp, synthetic construct
  source 1..80: mol_type = other DNA
tggaaaggacctggtgagcttttgtggaaaggggaaggagctgtcatcataaaggtagggacagaaatcaaagttgtacc

SEQ ID NO: 148034 - DNA, 80 bp, synthetic construct
  source 1..80: mol_type = other DNA
cataatgtgtggctggggagcttactcaaagaactataccagccacttagaggacaaactgggcaaaggaccctacggtg

SEQ ID NO: 148035 - DNA, 80 bp, synthetic construct
  source 1..80: mol_type = other DNA
ctataaagtggagggaggtatgccatcaggttgctcaggaactagtatattcaattctatgataaataatatcattatca

SEQ ID NO: 148036 - DNA, 80 bp, synthetic construct
  source 1..80: mol_type = other DNA
gccatgctatgtctgtcactatgctttcacaccgctttggtgttactgcctcccatcttttccctcctgaaggacaaccc

SEQ ID NO: 148037 - DNA, 80 bp, synthetic construct
  source 1..80: mol_type = other DNA
agtgatgtgcgtacaatgacgaaaaagtgcgaaagcgacgtggagggggggggggtagcagcgatgatacgtgttgtaat

SEQ ID NO: 148038 - DNA, 80 bp, synthetic construct
  source 1..80: mol_type = other DNA
ccagagaaattaacagaaataagaaagtggtttttcaaacaagctacaacacctaatgaaattcatggcacatatggaaa

SEQ ID NO: 148039 - DNA, 80 bp, synthetic construct
  source 1..80: mol_type = other DNA
tccgcagacgcggcttccctggtacgctccgtttccgacgacgcggtttcccgctgcgtggaaactgtctccatgtcggg

SEQ ID NO: 148040 - DNA, 80 bp, synthetic construct
  source 1..80: mol_type = other DNA
atactacaccacaaacacggacgaaaccaaaaggtttgccagttggacaatcaatgcaaggcgcatggtacaaatgagaa

SEQ ID NO: 148041 - DNA, 80 bp, synthetic construct
  source 1..80: mol_type = other DNA
cacccacctagtgtgggatgtgggattacaatcaacagtatctatgattgtaccatgggtatcagcaagccatttccgct

SEQ ID NO: 148042 - DNA, 80 bp, synthetic construct
  source 1..80: mol_type = other DNA
tgcacctcagagtgggaggtagccgctcaagaattggctaaacaaggagaagaactccttgcccagctacaccgacccct

SEQ ID NO: 148043 - DNA, 80 bp, synthetic construct
  source 1..80: mol_type = other DNA
agctataaatcaggtgtttatgtttccagagagggcccccaaacggcctccctccagtggagactgggaaacagaatacc

SEQ ID NO: 148044 - DNA, 80 bp, synthetic construct
  source 1..80: mol_type = other DNA
aaggatggtggtggaaaattcccgattgtcttaaggaaatgggcatgtttggacagaacatgtaccaccatgctctgggt

SEQ ID NO: 148045 - DNA, 80 bp, synthetic construct
  source 1..80: mol_type = other DNA
cacaaaataggaaagatgcaatgttaggggtacatgtcatatgggacctggggttgcaatctacgtgtacaattgttgtt

SEQ ID NO: 148046 - DNA, 80 bp, synthetic construct
  source 1..80: mol_type = other DNA
ccccagaggattacaggtattgcgtgagaagcatgtgggagagagacatcatggttgttgaatctagagctcaaggtatt

SEQ ID NO: 148047 - DNA, 80 bp, synthetic construct
  source 1..80: mol_type = other DNA
agggcgctgccggcacccgagccgcgccgccaccggcagaccgagaaccccgggtctgagccatggcctggagatggtgg

SEQ ID NO: 148048 - DNA, 80 bp, synthetic construct
  source 1..80: mol_type = other DNA
atacctaaaggatcaggcaagtctaaatgcatggggatgtgcgtttaggcaggtctgccatactactgtaccatgggtaa

SEQ ID NO: 148049 - DNA, 80 bp, synthetic construct
  source 1..80: mol_type = other DNA
accaggaaggtgaggatgttgtcgcactcgcgaatcttgtttacctgggtctcgtggctaaaggaggactgaaaggcgtc

SEQ ID NO: 148050 - DNA, 80 bp, synthetic construct
  source 1..80: mol_type = other DNA
gcttccacaacttcatcacccctgtgggccctctggtggagaatataaagagcacctatctgaataaaatcaccacggtg

SEQ ID NO: 148051 - DNA, 80 bp, synthetic construct
  source 1..80: mol_type = other DNA
cttgcctgggtctctcaacggatgttgacctaccaaagaactccatcattatgctgggccaggatgacttcattaagttc

SEQ ID NO: 148052 - DNA, 80 bp, synthetic construct
  source 1..80: mol_type = other DNA
agcgtgcggctcgcgctgggatcaagctcaacaagctcccttacaactacctccagacttcctgggtgaaaactctcacc

SEQ ID NO: 148053 - DNA, 80 bp, synthetic construct
  source 1..80: mol_type = other DNA
ttttgcagaaaataaataaatttcatttaactcgcgaacatgttgaagatatgaatattaatgagatgcgagtaacattt

SEQ ID NO: 148054 - DNA, 80 bp, synthetic construct
  source 1..80: mol_type = other DNA
tgctaatcctggtatcctcaccggctcagctgtgggctgtaacccagatacattctggtctcagatgtatgcctcaatgg

SEQ ID NO: 148055 - DNA, 80 bp, synthetic construct
  source 1..80: mol_type = other DNA
gcgaagcgagcgatcgagcgacccgtgggcgggagccgaaggtgagtttacacaccgcagtctagtggcaattcgggcac

SEQ ID NO: 148056 - DNA, 80 bp, synthetic construct
  source 1..80: mol_type = other DNA
aaaaacaagatacagtagagaaaattatcgacatactatatcaaaacatgaaaacatacgcacaaaaaccaaaagagatg

SEQ ID NO: 148057 - DNA, 80 bp, synthetic construct
  source 1..80: mol_type = other DNA
atcttcttctccctcagagtctactcgaccagcacgtgggtttctgccccctgtctctttctggccaacctgcctctctt

SEQ ID NO: 148058 - DNA, 80 bp, synthetic construct
  source 1..80: mol_type = other DNA
gagggggactgtgtactaccagatacactctaagaatactgtaccaagactggctagcccaccgtaactactggacagcc

SEQ ID NO: 148059 - DNA, 80 bp, synthetic construct
  source 1..80: mol_type = other DNA
gagccaaagcgagcaagaagaaacagccccgaaaacggtccaagagcagctacaagaacaactccagcagcagcagctca

SEQ ID NO: 148060 - DNA, 80 bp, synthetic construct
  source 1..80: mol_type = other DNA
gcgacgccaacccagtagatgctccaaccttgcccgactcttcgagcaaccggttctacactctcgagagtgttgaatgg

SEQ ID NO: 148061 - DNA, 80 bp, synthetic construct
  source 1..80: mol_type = other DNA
ggacccactaactaaagagaacaacatatataaagaaggacagagcaaatgcctactgactgacatgcccctatggactt

SEQ ID NO: 148062 - DNA, 80 bp, synthetic construct
  source 1..80: mol_type = other DNA
ctaccgagaagaagaactaaacgagctgttcgcggccttggaagaagacgcaaaccaagggtaaggaggcgccgcagaac

SEQ ID NO: 148063 - DNA, 80 bp, synthetic construct
  source 1..80: mol_type = other DNA
gggacagacccgtcagaaaataccacacagataccccctactacccctggatgcctaaacccccccgaccagtttcgtgt

SEQ ID NO: 148064 - DNA, 80 bp, synthetic construct
  source 1..80: mol_type = other DNA
gacagcacattactatattaccaagtgaatctactgtacaaaacctatcaaactttgtgcaaactaatgtagtaaacaat

SEQ ID NO: 148065 - DNA, 80 bp, synthetic construct
  source 1..80: mol_type = other DNA
caaactccatctcccttgccgcctctgatgttcgcgaggccgcccacaaggtggcctcctctctcaatggcttcaccgat

SEQ ID NO: 148066 - DNA, 80 bp, synthetic construct
  source 1..80: mol_type = other DNA
tgggagcatacaccctatgtggtttcaagccctcaaagaagttctatccaacttgtcatttgaagctggtttaattgaca

SEQ ID NO: 148067 - DNA, 80 bp, synthetic construct
  source 1..80: mol_type = other DNA
gtattctcctcccctccctcttatgttcaacagatccctatccacaagggccagggacggccagccagcgaagaaacaga

SEQ ID NO: 148068 - DNA, 80 bp, synthetic construct
  source 1..80: mol_type = other DNA
tacctatttgtaacctaccacccagaaaacataccagaaaaaatcaaagcaattagggacaactactttaacttagagac

SEQ ID NO: 148069 - DNA, 80 bp, synthetic construct
  source 1..80: mol_type = other DNA
ctaggccgtccgggcagcatgccccgagcagcaaacacgcggcagaccctcgtgagacccgtccggtcactgaagagagt

SEQ ID NO: 148070 - DNA, 80 bp, synthetic construct
  source 1..80: mol_type = other DNA
gtcctccacagcttcgaccagcgaagaggcctctttactgaaacagctctcagacgcctgctccaggaaccactacctgg

SEQ ID NO: 148071 - DNA, 80 bp, synthetic construct
  source 1..80: mol_type = other DNA
gtcacgggacattaacctcaaccacaaaatggaggttggagaaagtaaccacatatactggagatgattcatgggctggg

SEQ ID NO: 148072 - DNA, 80 bp, synthetic construct
  source 1..80: mol_type = other DNA
ggtttcatgcctgcagtaatatgtggacaaggctcctacaacagaaactttaccagtcacttagaggacagaatagcaaa

SEQ ID NO: 148073 - DNA, 80 bp, synthetic construct
  source 1..80: mol_type = other DNA
taaagagaacaaagagacattagaaaagtggctctacggcacaggcagtctataccacacctttcacactagtgaatact

SEQ ID NO: 148074 - DNA, 80 bp, synthetic construct
  source 1..80: mol_type = other DNA
atggtatctctcagactaacgatatgggaacattgtgtatacgtgctcttgatgacaccaggaagaacgatgttaaaata

SEQ ID NO: 148075 - DNA, 80 bp, synthetic construct
  source 1..80: mol_type = other DNA
acatccctgcggtagaaccaccacaaacactacaacaagcaaaagaagtattaataaataacatggaaaattggcataga

SEQ ID NO: 148076 - DNA, 80 bp, synthetic construct
  source 1..80: mol_type = other DNA
agcaagccgcagcggtctggaatagaccaatgcgaacaaatctaaatgatacccctttctatccatggatgcccagaaca

SEQ ID NO: 148077 - DNA, 80 bp, synthetic construct
  source 1..80: mol_type = other DNA
ctctgcggcggtgggctgccagaggctggctgagccaccgagcgcccgctcgggctggcggccccgaatccgggcagtgc

SEQ ID NO: 148078 - DNA, 80 bp, synthetic construct
  source 1..80: mol_type = other DNA
cagtggttagaaagaaacaaggagcatgtgtgtgggattctagattatgcttctgacattattgtggaatctaaagacca

SEQ ID NO: 148079 - DNA, 80 bp, synthetic construct
  source 1..80: mol_type = other DNA
ttttcccttagaacggatattgcttcacagcctctagccactactctaattggtgaaatatccaattacttcacacattg

SEQ ID NO: 148080 - DNA, 80 bp, synthetic construct
  source 1..80: mol_type = other DNA
agactctaaggagccaaaagcaggctgggtcccgtacaacaaaaactttggcatgggcaagtggatagacggaggtggat

SEQ ID NO: 148081 - DNA, 80 bp, synthetic construct
  source 1..80: mol_type = other DNA
cgtccaaaatgatgccattacacaaaatccagttgaagattatgttgagggtgttttaaatgaagttttagtagtaccaa

SEQ ID NO: 148082 - DNA, 80 bp, synthetic construct
  source 1..80: mol_type = other DNA
ggggacttgcgggcttttgcggcggggacggggcgtcgcgggatggagagctgttgcgtggcgaggacaggagactcttg

SEQ ID NO: 148083 - DNA, 80 bp, synthetic construct
  source 1..80: mol_type = other DNA
taaaatgccaaaaaaagacaacgcagacacatccaagcctccagagtctctaactaaacaaaacctttcatcaacatacc

SEQ ID NO: 148084 - DNA, 80 bp, synthetic construct
  source 1..80: mol_type = other DNA
tggcaaaatttcacagtctccccccggctagaaaggcggcaggtaagcgagcgcaccttaggtgttactccaagctgctc

SEQ ID NO: 148085 - DNA, 80 bp, synthetic construct
  source 1..80: mol_type = other DNA
caacgacagagcattttgtcctccacaatgtgatttcaatccactagtaaaaaccagaaggaacagattcatatggggat

SEQ ID NO: 148086 - DNA, 80 bp, synthetic construct
  source 1..80: mol_type = other DNA
ggagcacgacgaagatatcaccgcgccgcagagtttgtggtgcacggcgttcaaggaagccctgtgggatgtggccctgc

SEQ ID NO: 148087 - DNA, 80 bp, synthetic construct
  source 1..80: mol_type = other DNA
agaaagaaatagatggtcttagactggccagccaaaaacaacaacaagaatatgtagaaaccctcaggataatggctgat

SEQ ID NO: 148088 - DNA, 80 bp, synthetic construct
  source 1..80: mol_type = other DNA
ttatacaccccaccccgaaacatatagaagcttgtacacaatgaccaataggtggtgaccatccaggttactgacggtcg

SEQ ID NO: 148089 - DNA, 80 bp, synthetic construct
  source 1..80: mol_type = other DNA
ccggccctgcccaatgctacggccgtctccttcttgcttacactccgccctccgccaatccccccaccaccatcgatgag

SEQ ID NO: 148090 - DNA, 80 bp, synthetic construct
  source 1..80: mol_type = other DNA
cctttacaggctcctcacacagactacactactgtggaggactatactcctcagtatggctatcagcaggaagatcatac

SEQ ID NO: 148091 - DNA, 80 bp, synthetic construct
  source 1..80: mol_type = other DNA
aaacagcaaggttggatagtggaggcaccatcaaactccataacaattgagagacacatatcaaaagctgctaccatctt

SEQ ID NO: 148092 - DNA, 80 bp, synthetic construct
  source 1..80: mol_type = other DNA
gcctatcaagatgtcacatacaaccccctcatggacaaaggggtaggcaaccacgtatggtttcagtacaacacaaaggc

SEQ ID NO: 148093 - DNA, 80 bp, synthetic construct
  source 1..80: mol_type = other DNA
tggtgatgtgaagaaattggctgaagtggttgctgaatcaatgtcaaacacagatgatgaggaagtcaaggaacaaattt

SEQ ID NO: 148094 - DNA, 80 bp, synthetic construct
  source 1..80: mol_type = other DNA
gatatggtgtgtggccccattatttaacaccacaagatgccacagctattgataaacctacacaaccagacacatcatca

SEQ ID NO: 148095 - DNA, 80 bp, synthetic construct
  source 1..80: mol_type = other DNA
cgtgaacgcagaggggcgcgaagagacggcgcagagcctggtggaactcatcagtcgcggtgtgcggagcgtgtcggaga

SEQ ID NO: 148096 - DNA, 80 bp, synthetic construct
  source 1..80: mol_type = other DNA
tcaccattgtccgctgtctccgtgacctgcggtccacccagggtgcatacaatgggactcctgttccgaaaccacggaaa

SEQ ID NO: 148097 - DNA, 80 bp, synthetic construct
  source 1..80: mol_type = other DNA
ctgtattaaaaatgccctttattggcaggcactggagaaagaaaaggcaagtgccactgccagacctgcaccagctaccg

SEQ ID NO: 148098 - DNA, 80 bp, synthetic construct
  source 1..80: mol_type = other DNA
tagttgctgtggtccccgaacaccaattagcttacattggcggtgtcaaagtcaatgttggctacgagcacacacatcca

SEQ ID NO: 148099 - DNA, 80 bp, synthetic construct
  source 1..80: mol_type = other DNA
taggcagctcagaaaagtttagctattccaccaacccggccccaatgaatgcttgccaaaattggggccttgctctcagc

SEQ ID NO: 148100 - DNA, 80 bp, synthetic construct
  source 1..80: mol_type = other DNA
actgtaactgtggccccaatgtgctgcgagtttaacgggcttcggtcgatgacagcccctgtcttgcagggattaccagt

SEQ ID NO: 148101 - DNA, 80 bp, synthetic construct
  source 1..80: mol_type = other DNA
tcactatcggaaattccacaatcacaacacaagactctctacacacagtacttgcatatggtgaatggcccacatacttg

SEQ ID NO: 148102 - DNA, 80 bp, synthetic construct
  source 1..80: mol_type = other DNA
agcaaatgcctcagcattaaatgagaacacatactttgtcacaccagacggactgtggggagaccctatatacagcaaaa

SEQ ID NO: 148103 - DNA, 80 bp, synthetic construct
  source 1..80: mol_type = other DNA
ggacctggatcacgttatggggcagttgtgacaaatgatatgggcacattgtgctctagaattgtaactgaagaacacca

SEQ ID NO: 148104 - DNA, 80 bp, synthetic construct
  source 1..80: mol_type = other DNA
cagcgtccttgacgctgtcagcccagtcccggactttattggccgggatagtgcagcagcagcaacagctgctggacgtg

SEQ ID NO: 148105 - DNA, 80 bp, synthetic construct
  source 1..80: mol_type = other DNA
gactgaagacgtgggcttctgcctgctaagcaacaccttcatgaacggagacatgcccgttcttgcaccatatatcccaa

SEQ ID NO: 148106 - DNA, 80 bp, synthetic construct
  source 1..80: mol_type = other DNA
tagtggagccagaaatgcaacaatacctcagggtttgccagttatgctaacaccaggatctggtcaattcctgacaacag

SEQ ID NO: 148107 - DNA, 80 bp, synthetic construct
  source 1..80: mol_type = other DNA
tcacaagtggaccctagcgatacagtgcagacacggcacgtacaaaactttcactcacggactgaatccacattggaaaa

SEQ ID NO: 148108 - DNA, 80 bp, synthetic construct
  source 1..80: mol_type = other DNA
ggccgaggtggagtgcaagaaatcgcagcgtatcctagaggccctggacattctcatcctcaaactggtggtgggcgagt

SEQ ID NO: 148109 - DNA, 80 bp, synthetic construct
  source 1..80: mol_type = other DNA
aaaggtcaccatcagccacacctactcaagatggtggacaatatcttccgggtcaaaggttaacagctacgtcataagtc

SEQ ID NO: 148110 - DNA, 80 bp, synthetic construct
  source 1..80: mol_type = other DNA
gacaaacgacatgggaaccatatgtgtcagaatagttacatccaaacagagacataatttaaatattgtttcccgcattt

SEQ ID NO: 148111 - DNA, 80 bp, synthetic construct
  source 1..80: mol_type = other DNA
cttatgtgtaagaatgcattgcaaaaccccacctatggaaagcaccaagagtccaaccacaactacaccaagcaacacca

SEQ ID NO: 148112 - DNA, 80 bp, synthetic construct
  source 1..80: mol_type = other DNA
cacggccaaccagagtctacgtcgtgcacttcctgggcatggtctacatcataatataagaaggcgcacttccgaatggc

SEQ ID NO: 148113 - DNA, 80 bp, synthetic construct
  source 1..80: mol_type = other DNA
gtcattctaaacacaggaaacatagtagctattcatgtgggtggtaatggcaaagtggggtatggagctacactactgcg

SEQ ID NO: 148114 - DNA, 80 bp, synthetic construct
  source 1..80: mol_type = other DNA
tggcagccaaactttataagacgctgctacatcataggctatctgcctctaatattctgtggcgagaacaccaccgccca

SEQ ID NO: 148115 - DNA, 80 bp, synthetic construct
  source 1..80: mol_type = other DNA
ttaacgttccaacgaccctgagacacaaactacaaactagaaacaacgtaaatcgaataacgtgatcacaaagtatcgac

SEQ ID NO: 148116 - DNA, 80 bp, synthetic construct
  source 1..80: mol_type = other DNA
cagcagttattctattagctaaacgaaggagaatgaagaagcaggcgaagattcaggagagttcactgcccgctccttga

SEQ ID NO: 148117 - DNA, 80 bp, synthetic construct
  source 1..80: mol_type = other DNA
caacatgtagaagcacccattacagtaacgcagggagacacagtctacctagatgctagcaataatccctgtaattattc

SEQ ID NO: 148118 - DNA, 80 bp, synthetic construct
  source 1..80: mol_type = other DNA
ccctcactgtcactggcctccctccacccagacataccccaaaccaccgcagatggaggcaagctgtccttctttgacca

SEQ ID NO: 148119 - DNA, 80 bp, synthetic construct
  source 1..80: mol_type = other DNA
tgcacacttgactgagcctaacgaaaatactatacttctggctatatcatcagatcttcaggttgacagtacaaatgttc

SEQ ID NO: 148120 - DNA, 80 bp, synthetic construct
  source 1..80: mol_type = other DNA
ggcagcaaatacattcctatgcaaatgagagctaaatggtaccctaacctgttaaaccaacaggcagtacttgaagacat

SEQ ID NO: 148121 - DNA, 80 bp, synthetic construct
  source 1..80: mol_type = other DNA
caggtgaagggggccatgaaattggtaagaacaccgaaagaaacgacaagcagcctgatgaggacccacttttcaactgc

SEQ ID NO: 148122 - DNA, 80 bp, synthetic construct
  source 1..80: mol_type = other DNA
gcaacgtggccactgggggatcgacaataaatttcactaatattaattactacaaggactcctatgcagcatcagccacc

SEQ ID NO: 148123 - DNA, 80 bp, synthetic construct
  source 1..80: mol_type = other DNA
tcgatgacgtcatcgacacagtcgtcaccaatgcactcaaagtgtccatgccacgggtacaggatacacaaccaagtgga

SEQ ID NO: 148124 - DNA, 80 bp, synthetic construct
  source 1..80: mol_type = other DNA
gcctctaaatatctaaatcacaaaacaggcctattttcctccatatttcttagcagacaaagactgtccccagactttcc

SEQ ID NO: 148125 - DNA, 80 bp, synthetic construct
  source 1..80: mol_type = other DNA
gaatggggtgtacggattcaacacgttaaacaacatgggcaagttatatgttaggcatgtcaacggtgccagcccaggac

SEQ ID NO: 148126 - DNA, 80 bp, synthetic construct
  source 1..80: mol_type = other DNA
gtcacacaacctactgcaagcaatcctaactctaaaatgaaagaagcaaacaaagcatatgttatagcagctaaaaaaaa

SEQ ID NO: 148127 - DNA, 80 bp, synthetic construct
  source 1..80: mol_type = other DNA
gtggtgacaatagtatttatctgtgttttaacttgcattaacgtctcagcaactctaaggcacagactacgaactagaaa

SEQ ID NO: 148128 - DNA, 80 bp, synthetic construct
  source 1..80: mol_type = other DNA
agtaacacaaactgttttctaaaagtgagcagtctgtggggagaccacgtatatgacaaacaaaaattaatagacgggtg

SEQ ID NO: 148129 - DNA, 80 bp, synthetic construct
  source 1..80: mol_type = other DNA
gaaaaatttagggacatacgccgctttctcccagaacacatcaatgattggcgcaacatgcgtttggccactaatgtacc

SEQ ID NO: 148130 - DNA, 80 bp, synthetic construct
  source 1..80: mol_type = other DNA
gtggtgtaaccgcgatcctcgggcagatacagccctacggggaagaaaaacgtcaggtccacgttacgttctagcggatc

SEQ ID NO: 148131 - DNA, 80 bp, synthetic construct
  source 1..80: mol_type = other DNA
atacttcaaacccaaacacatacgagcttgggtaccgcgaccacccagattatgcccatacctgcgcaaggggaacgtga

SEQ ID NO: 148132 - DNA, 80 bp, synthetic construct
  source 1..80: mol_type = other DNA
tggaagagaatttacagacccatatgttttggatgcagggataccattgagccaggcattgatcttcccacatcaatgga

SEQ ID NO: 148133 - DNA, 80 bp, synthetic construct
  source 1..80: mol_type = other DNA
tgcaccctacgcatcaaacatacattcacacaactacattgtttcatctgcctacatccacacgtaattcattaacgata

SEQ ID NO: 148134 - DNA, 80 bp, synthetic construct
  source 1..80: mol_type = other DNA
agtggggccaaacttcgccataaggcctttaactttgggtcgcttgtcagcagcttccgggtccgcctggaggccgccat

SEQ ID NO: 148135 - DNA, 80 bp, synthetic construct
  source 1..80: mol_type = other DNA
cttcccgaccccgatagaaaccctccaagaatacaaatatcagacccgcaacacctcggaccggcgacactcttccactc

SEQ ID NO: 148136 - DNA, 80 bp, synthetic construct
  source 1..80: mol_type = other DNA
attttagttcacaaaatggccgacttccttcctctttttcaaaaaaaagcggaagtgccgccgcggcggcacttccgctt

SEQ ID NO: 148137 - DNA, 80 bp, synthetic construct
  source 1..80: mol_type = other DNA
aaaggagcatacacagacatctgctacaacccttacacagacagaggagaaggcaacatggtgtggatagactggctagt

SEQ ID NO: 148138 - DNA, 80 bp, synthetic construct
  source 1..80: mol_type = other DNA
tgctacgtcactaaccacgtggcccctcccacccaaccagagtctacttcgtgcacttcctgggaggagtcatccgccta

SEQ ID NO: 148139 - DNA, 80 bp, synthetic construct
  source 1..80: mol_type = other DNA
ggggagggccatgttgcattcacagacgtcagaccatatcgggacctaaatcaccatcaaggacctagctcaaattatct

SEQ ID NO: 148140 - DNA, 80 bp, synthetic construct
  source 1..80: mol_type = other DNA
aaaaaaagagttttgttttcctatgtgagaggagaaaggtatgtgaggagatgttcgatgatcgtatgttacagttatgc

SEQ ID NO: 148141 - DNA, 80 bp, synthetic construct
  source 1..80: mol_type = other DNA
aactcctggggctcacaaatggacctatcagatccactatgtcttgaagatagtgtggaggactgtaaacaaactgtatc

SEQ ID NO: 148142 - DNA, 80 bp, synthetic construct
  source 1..80: mol_type = other DNA
atcagtcaatggacacggatgacaagacgaagcgttacacaaactgggacataaacattagggagatggtgcagttaaga

SEQ ID NO: 148143 - DNA, 80 bp, synthetic construct
  source 1..80: mol_type = other DNA
taaatcccaaaaacaattcatctacacaaaataacattaataacattaaaactgcagccaaaatttactggcagtggata

SEQ ID NO: 148144 - DNA, 80 bp, synthetic construct
  source 1..80: mol_type = other DNA
aaccctgcgtccaaattaatgaaccacggcccctttggacaccaatctggtgcaatatatgtgggaaactataggatagc

SEQ ID NO: 148145 - DNA, 80 bp, synthetic construct
  source 1..80: mol_type = other DNA
caccagcaggcacaacaaagtccttcccaaccccaggagagaacaaaaccataaatgaaaatgatacatgcatacgcgaa

SEQ ID NO: 148146 - DNA, 80 bp, synthetic construct
  source 1..80: mol_type = other DNA
ctgccgtatatccttactggcttccgcagaggtcaatccgaatatttcagcatatttagcaacatggatctcgcagatac

SEQ ID NO: 148147 - DNA, 80 bp, synthetic construct
  source 1..80: mol_type = other DNA
gaccaatccacgagtgttgcccaagacgctccagtcttaacacatcaaattatgtacataccgcctggaggcccggtgcc

SEQ ID NO: 148148 - DNA, 80 bp, synthetic construct
  source 1..80: mol_type = other DNA
cgtggatctggctgctcgttttggacgccctggaaaccccaggcctcctggggctccccagccgccgccaataaggcccc

SEQ ID NO: 148149 - DNA, 80 bp, synthetic construct
  source 1..80: mol_type = other DNA
ctctccttgtcttcctgttctcggagcttctccttttccttgcgcccggtctccataagctgccgcagcttcttctcata

SEQ ID NO: 148150 - DNA, 80 bp, synthetic construct
  source 1..80: mol_type = other DNA
aatcccttaacaaacactggtgtctttggccaacaatcaggagcagcatatgtaggcaattacagagtggttaacaggca

SEQ ID NO: 148151 - DNA, 80 bp, synthetic construct
  source 1..80: mol_type = other DNA
tcaagacgtatacactgatgctgggaatgtaacatgctggtaccagacgggcattgtagtgcctccagagacccccacac

SEQ ID NO: 148152 - DNA, 80 bp, synthetic construct
  source 1..80: mol_type = other DNA
cccaaggtgaaatagtaaacaggtgcaaagtgcaagacgcgggactcaaacccatcaacacaccagatcactcaaaattg

SEQ ID NO: 148153 - DNA, 80 bp, synthetic construct
  source 1..80: mol_type = other DNA
tgtattaccactcaatgggtaggtcaggcttcataatccatacacagtgcaatgcaaccaaattccatagtggcgcactc

SEQ ID NO: 148154 - DNA, 80 bp, synthetic construct
  source 1..80: mol_type = other DNA
aaacccagtagaagattatgtagatcaagtgttaaatgaggtcctggtggtgccaagtataaagcaaagtgaacctacaa

SEQ ID NO: 148155 - DNA, 80 bp, synthetic construct
  source 1..80: mol_type = other DNA
gtataagtggtacccaccgccgaaagcctttaaccgttatccgccaatcaactacgtaatggctagtattatcatgtgtg

SEQ ID NO: 148156 - DNA, 80 bp, synthetic construct
  source 1..80: mol_type = other DNA
cacgtcatttgactggggaacctcaggttactcacgagctgattactgagcctaccaccaagaatttttctgtcacagac

SEQ ID NO: 148157 - DNA, 80 bp, synthetic construct
  source 1..80: mol_type = other DNA
cagctgtccgttgtgggttccattttcaagttcaagtcaatgtcaatcaaggcacagctggtagtttattagtggtttat

SEQ ID NO: 148158 - DNA, 80 bp, synthetic construct
  source 1..80: mol_type = other DNA
ttaacagaccctaattggttggttttaaaacctgagcgtgtacggatgctacttagtacctgtggatttggtaactgtgc

SEQ ID NO: 148159 - DNA, 80 bp, synthetic construct
  source 1..80: mol_type = other DNA
ttgagtaaggcggggcaaggccgacactatacaaaatggcggtgtcagtcttccgctttacacgaaatggtggtcaattt

SEQ ID NO: 148160 - DNA, 80 bp, synthetic construct
  source 1..80: mol_type = other DNA
gctacacagaatactgcagcaaagttacaggagacacaaacatagaacacaactgtagatgtgtaattagaagcccctac

SEQ ID NO: 148161 - DNA, 80 bp, synthetic construct
  source 1..80: mol_type = other DNA
tacatcaacaaagcagactgcaacttcgctgttacgccacttaccaagcaacggtctggcatcaatgatgtaccaagacc

SEQ ID NO: 148162 - DNA, 80 bp, synthetic construct
  source 1..80: mol_type = other DNA
agaacagtcacctaaaaatgacaatggcataggaggtccatactgcacctactcagacacatggtacaaaggcacagcat

SEQ ID NO: 148163 - DNA, 80 bp, synthetic construct
  source 1..80: mol_type = other DNA
caagtacacgtaccaaacagtacaagtaatcctaataatcaaataactgaaaatgaatactttcaaaaactagatggact

SEQ ID NO: 148164 - DNA, 80 bp, synthetic construct
  source 1..80: mol_type = other DNA
acttagaggacagaattagcaagggaccctttggtggagggcacagcactatgaggttctctctatttgtcctgtatcag

SEQ ID NO: 148165 - DNA, 80 bp, synthetic construct
  source 1..80: mol_type = other DNA
ggcaggtccttcgtcttgccaaagatcaggctcaacacatgctcatctcccttctcggtcactcgcttgtaggtgcccat

SEQ ID NO: 148166 - DNA, 80 bp, synthetic construct
  source 1..80: mol_type = other DNA
cctcgctaaggagagcgctgccacctcctccggccccccaagaccaggctgaaccagagctatggcgtggtcgtggtggt

SEQ ID NO: 148167 - DNA, 80 bp, synthetic construct
  source 1..80: mol_type = other DNA
tctttgccacaaccttgttaggtgaagtcctaaattattattcaaattggtcaggtagtgtcagaatcacttttatgtgt

SEQ ID NO: 148168 - DNA, 80 bp, synthetic construct
  source 1..80: mol_type = other DNA
caacctaagacacaacttagccttcagaccagcctacatagacataacttacaatcccattactgacaaaggagagggaa

SEQ ID NO: 148169 - DNA, 80 bp, synthetic construct
  source 1..80: mol_type = other DNA
ccatctttgcctgtaccacttttatcactgtcctctcaggcctgatctggatgttcacgctggcaaaacagtatagacag

SEQ ID NO: 148170 - DNA, 80 bp, synthetic construct
  source 1..80: mol_type = other DNA
gtacgacgtcaccccaccgctagacatacccggtgaggttaataatctaatggaggttgctgaagtagattctgtggtac

SEQ ID NO: 148171 - DNA, 80 bp, synthetic construct
  source 1..80: mol_type = other DNA
caaaaaaaaaattattataaaacaatggcagcccaactacagacgcagatgcaacatagtgggctacatgcctctactta

SEQ ID NO: 148172 - DNA, 80 bp, synthetic construct
  source 1..80: mol_type = other DNA
caaccggcagtggaggatcttcgtgctcgtagaaggaggggttgagtacatcggtcggccatcgtgaggccccggccgcg

SEQ ID NO: 148173 - DNA, 80 bp, synthetic construct
  source 1..80: mol_type = other DNA
ccagtgaagccaagcaggtgcgtgaaatgagtagagaactacagcgcatgatgtgttacaagaagactcacaggactgaa

SEQ ID NO: 148174 - DNA, 80 bp, synthetic construct
  source 1..80: mol_type = other DNA
caaaatggcggtcaatatcttccgggtcaaaggtcacacctacgtcataagtcacgtgactgggtcctgctacgtcatat

SEQ ID NO: 148175 - DNA, 80 bp, synthetic construct
  source 1..80: mol_type = other DNA
cacccccgtccgcccgaaaacaccgccgcgcaaaagctgcgtagaaacgccgcacaaacaccgtagaaacacccgccgcc

SEQ ID NO: 148176 - DNA, 80 bp, synthetic construct
  source 1..80: mol_type = other DNA
gtgatatggcacagctatcagaccaaagcccctatgataaacaaccccaggttcagatgatgaagttagcctatttagat

SEQ ID NO: 148177 - DNA, 80 bp, synthetic construct
  source 1..80: mol_type = other DNA
atacaaattccactttctctttgggggcaaccccgttccccaacagactgtcagagacccttgtaaccaaccagtctttg

SEQ ID NO: 148178 - DNA, 80 bp, synthetic construct
  source 1..80: mol_type = other DNA
gtacaccgacggcttccagggtgtcatcgcagcagagatagtcggcggccagagaacgtgcgtaaatctgcgggatggcg

SEQ ID NO: 148179 - DNA, 80 bp, synthetic construct
  source 1..80: mol_type = other DNA
tataaagattcacttataacgaaaaatatgaacaagtgtataacaagttacacattacacgacaatgtcttggaaatcat

SEQ ID NO: 148180 - DNA, 80 bp, synthetic construct
  source 1..80: mol_type = other DNA
tccacagcccatcgacgacccttgccaaaaatccacacacgaactacccgaccccgataaataccctccaagaatacaaa

SEQ ID NO: 148181 - DNA, 80 bp, synthetic construct
  source 1..80: mol_type = other DNA
tgccaagtgggcagtttaccgtaaatactcctcccattgacgtcaatggaaagtccctattggcgttactatgggaacat

SEQ ID NO: 148182 - DNA, 80 bp, synthetic construct
  source 1..80: mol_type = other DNA
gacgcatgtgatttgggattttggtctacagtcatcagttactttggttataccttggattagcaacagtcactttagaa

SEQ ID NO: 148183 - DNA, 80 bp, synthetic construct
  source 1..80: mol_type = other DNA
tggacgcgctctacatccgtgagcgactgcccaagctgcgctacgacaagcaactagtcggcgtgacggagcgcgagtcg

SEQ ID NO: 148184 - DNA, 80 bp, synthetic construct
  source 1..80: mol_type = other DNA
tccaccctattgataatggatgtgacctcatcatcagtcctttccccttcttgtaaggcacttatgcagtgcctaatgga

SEQ ID NO: 148185 - DNA, 80 bp, synthetic construct
  source 1..80: mol_type = other DNA
tcgtggtggtgtcgggcccgcgcattcctggaaaaagtggaggtggcgtggccttcccccgcggccccccagccccctgc

SEQ ID NO: 148186 - DNA, 80 bp, synthetic construct
  source 1..80: mol_type = other DNA
gcaagaagtaaacacacactgctaggttcaaaggaactaaactttaaaacaggtatgtactctgccatatttttaacaaa

SEQ ID NO: 148187 - DNA, 80 bp, synthetic construct
  source 1..80: mol_type = other DNA
atgtacacagtgcagttggaaagaacagctgatttgatgagtgaagtttttgctataaatgtagatatagcctcccaccc

SEQ ID NO: 148188 - DNA, 80 bp, synthetic construct
  source 1..80: mol_type = other DNA
ggctccagttttgaagtcccctagtgctgaggcatgtggctacagtgatagagtattacaacttaaattaggtaattcgg

SEQ ID NO: 148189 - DNA, 80 bp, synthetic construct
  source 1..80: mol_type = other DNA
tggccacgtgacacacactgttgggatgggagagggtgatcttgtggtagtcgccggcatggttgccgtagcccataatg

SEQ ID NO: 148190 - DNA, 80 bp, synthetic construct
  source 1..80: mol_type = other DNA
tttgtcatggactctatcattctaccactaattcaattataacactattttgtagtattgcccattccaaaaaaaaaaaa

SEQ ID NO: 148191 - DNA, 80 bp, synthetic construct
  source 1..80: mol_type = other DNA
tccgcactgccgacagaccacggccaccagcgagcgcgcgtccagatggcgctcgcacttgagtcgacacagacaccaga

SEQ ID NO: 148192 - DNA, 80 bp, synthetic construct
  source 1..80: mol_type = other DNA
acaactggatttccagaaccctagaccctataataaacaagtcaatatttatgataacgggcctaaaaagataatcagta

SEQ ID NO: 148193 - DNA, 80 bp, synthetic construct
  source 1..80: mol_type = other DNA
cctggatgcctccaactttcaatgtaaacttcagccttaaattcaaataaatgttggccgtgggagttacgctggtcggt

SEQ ID NO: 148194 - DNA, 80 bp, synthetic construct
  source 1..80: mol_type = other DNA
tgaaggatacgccattcatatcgcaggacagcttttaccaaggggatgtgcataatgcagtggttggggccatgacccgt

SEQ ID NO: 148195 - DNA, 80 bp, synthetic construct
  source 1..80: mol_type = other DNA
cggcgaatgtacaccatggcgtgcttgggatgtttgggcgccggcgttttctttttctgaccgccggcggccgccagatc

SEQ ID NO: 148196 - DNA, 80 bp, synthetic construct
  source 1..80: mol_type = other DNA
actatcactacaaggctaatgacactagtcctcttgaagataggcacttcataaagaccagaaatgccatctggaatgtg

SEQ ID NO: 148197 - DNA, 80 bp, synthetic construct
  source 1..80: mol_type = other DNA
ttctgacatctcccagccgatcctggtccatgggatatcgcacagcaacactacgcacattaactcccgtgcctaacagg

SEQ ID NO: 148198 - DNA, 80 bp, synthetic construct
  source 1..80: mol_type = other DNA
cggatggtattatctatcctactgggcggtcctattctaatatttcattatcctaccaaggtctgtttccacgacaagga

SEQ ID NO: 148199 - DNA, 80 bp, synthetic construct
  source 1..80: mol_type = other DNA
ctctataatgacaccaccacaaattattccataaatactactagcacaacagttattaacaatataagcactccagaatc

SEQ ID NO: 148200 - DNA, 80 bp, synthetic construct
  source 1..80: mol_type = other DNA
gtgcccgcctggccggcctcgtcgcgcacctgtttgttgtgcgcgctctacagtcagaaccgtctctgtttagatctcgc

SEQ ID NO: 148201 - DNA, 80 bp, synthetic construct
  source 1..80: mol_type = other DNA
aacctcattagtattaccaccagaaaccaatcaaaatgtgtacatacttggtttcatcagtgcatgtcccgacttcaaac

SEQ ID NO: 148202 - DNA, 80 bp, synthetic construct
  source 1..80: mol_type = other DNA
cctgaactaaggaaagccacacttcagggaccagagcatgaattcatgtatgcactagttaagagaaactgccatatagc

SEQ ID NO: 148203 - DNA, 80 bp, synthetic construct
  source 1..80: mol_type = other DNA
tgggagggacatgggaggagcagggaggaacgcccatcaagactctgtataaatgtacccgctttgtgcattgtattcag

SEQ ID NO: 148204 - DNA, 80 bp, synthetic construct
  source 1..80: mol_type = other DNA
ggccccaaaaaaataaatggctacgaggcctggaaagatgagtttgaaacctgccactactggggcaggccacccagaaa

SEQ ID NO: 148205 - DNA, 80 bp, synthetic construct
  source 1..80: mol_type = other DNA
ttttgaccatccagccatttagatatatgatgttcggaatccaaacatacaggtttaccgtgaggaggcgccaaataata

SEQ ID NO: 148206 - DNA, 80 bp, synthetic construct
  source 1..80: mol_type = other DNA
cttttcagcctagacagacagtgtggctaagggagtgtgtgccagttaaggtgattagctaaagcattcccagtaaatgg

SEQ ID NO: 148207 - DNA, 80 bp, synthetic construct
  source 1..80: mol_type = other DNA
gaggtcacctttgtaatcactagctcccaagaccaatctacatccctgagtcaggacacgccagtgttgacccaccagat

SEQ ID NO: 148208 - DNA, 80 bp, synthetic construct
  source 1..80: mol_type = other DNA
tatcaccactccagactatagaaggaacaccttatgtcccaattacactatcaataagtcctatggcttcagagttttca

SEQ ID NO: 148209 - DNA, 80 bp, synthetic construct
  source 1..80: mol_type = other DNA
agggacgagggcctttcgcagcgcggacggaggcctttcgcggcggggaacacagacggcacgcacacgcagctcgccta

SEQ ID NO: 148210 - DNA, 80 bp, synthetic construct
  source 1..80: mol_type = other DNA
tgtgcacgtcacaggcgccattttgaatcacaaaatggcggacttccttcctctttttcaaaaataacggtccggcggcg

SEQ ID NO: 148211 - DNA, 80 bp, synthetic construct
  source 1..80: mol_type = other DNA
gccatggagttataggaattataaccgccggcggcgaggggcacgtagcattcactgacctaaggccatataacaatctt

SEQ ID NO: 148212 - DNA, 80 bp, synthetic construct
  source 1..80: mol_type = other DNA
ccaggtaccaatcaacaggtttaccttcttggatttattagtgcatgtccagattttaagttgaggctaatgaaggatac

SEQ ID NO: 148213 - DNA, 80 bp, synthetic construct
  source 1..80: mol_type = other DNA
ttttatttagacaatatggagacaattaagaatattgcagatatggcgacatcaactgttaacaaaattgattcctcaat

SEQ ID NO: 148214 - DNA, 80 bp, synthetic construct
  source 1..80: mol_type = other DNA
agctgcaactaccagagactatgtatatcaaataatgtatgtaccaccaggagctcccttaccaaatgcttgggatgact

SEQ ID NO: 148215 - DNA, 80 bp, synthetic construct
  source 1..80: mol_type = other DNA
tggtgatgtcaagaaattagctgaagttgtggctgagtcaatgtctaacaccgatgacgatgaggtgaaggaacagattt

SEQ ID NO: 148216 - DNA, 80 bp, synthetic construct
  source 1..80: mol_type = other DNA
gggacactggtggggacggagacacagggtgacgtcaaagacgggggcctttttcggcagggacggggcgtacgcgggcc

SEQ ID NO: 148217 - DNA, 80 bp, synthetic construct
  source 1..80: mol_type = other DNA
ttactgactcactggaagtactctttcagggacctgtctacaaagatctggaaatagatgtaaccaatactccagctcca

SEQ ID NO: 148218 - DNA, 80 bp, synthetic construct
  source 1..80: mol_type = other DNA
atctgcaaagcatggacgcatatcacatagaggtgaacacaggaaatcaccaaggtgaaaagatattcgctttccagata

SEQ ID NO: 148219 - DNA, 80 bp, synthetic construct
  source 1..80: mol_type = other DNA
attcacacaactacattgcttcatctgcctacatccacacgtaattcattaacgatatcatcattcacctcaaccaactt

SEQ ID NO: 148220 - DNA, 80 bp, synthetic construct
  source 1..80: mol_type = other DNA
caaaagaaaaggaaagtgctactgcgacgtgtgcgagctaaaccgaaagctaggcctccaatgagccacaggcctccagc

SEQ ID NO: 148221 - DNA, 80 bp, synthetic construct
  source 1..80: mol_type = other DNA
aggcactgtatttaacacatttaaaacccaagaacatatagtagaccccagatgggatactgtaaaaaaaccgagcacag

SEQ ID NO: 148222 - DNA, 80 bp, synthetic construct
  source 1..80: mol_type = other DNA
ccgtctggcgataggaggagttgtacatgatgtcgcccagagaacccagctgagatgcccagggattcacagtgctccgg

SEQ ID NO: 148223 - DNA, 80 bp, synthetic construct
  source 1..80: mol_type = other DNA
gtggcccctggactgccttagtgaagagaacctcgggcctggccacggtggctagggttccattgatgtagacggtcaca

SEQ ID NO: 148224 - DNA, 80 bp, synthetic construct
  source 1..80: mol_type = other DNA
aaactaggcacgtaatacagagcaggtcaaggtcagagagcaccgtagaatcattctttgcaaggggggcgtgtgttacc

SEQ ID NO: 148225 - DNA, 80 bp, synthetic construct
  source 1..80: mol_type = other DNA
gttaggaacacacattgtttgggatgtaggattacagtctacaatctcactagtggtaccatgggttagtgccagccact

SEQ ID NO: 148226 - DNA, 80 bp, synthetic construct
  source 1..80: mol_type = other DNA
aaaggcccccgtggccgtccccgcacacccctcgtccccggcgcaacccccgtccccgtccccagcgtaacgcccgttac

SEQ ID NO: 148227 - DNA, 80 bp, synthetic construct
  source 1..80: mol_type = other DNA
gctgctcaaaactgctttttcaaagttagcagtctgtggggagaccacgtatattcaaaaaacaaattaatagacgcttg

SEQ ID NO: 148228 - DNA, 80 bp, synthetic construct
  source 1..80: mol_type = other DNA
aactggcaatacacatacactcctttaatgagcaaagtataccaccaggcaaccaaaacaaacaatgaaaaactacccac

SEQ ID NO: 148229 - DNA, 80 bp, synthetic construct
  source 1..80: mol_type = other DNA
tagaaaattacatagatgaggttttaaatgaagtgttggttgtacctaacattaaggaaagcaaaccaacaacatcaaac

SEQ ID NO: 148230 - DNA, 80 bp, synthetic construct
  source 1..80: mol_type = other DNA
aatactcacagactctttcattaaaaaactagtaaaaaatccagatggtacagacatctccagtaacccctcatcaggca

SEQ ID NO: 148231 - DNA, 80 bp, synthetic construct
  source 1..80: mol_type = other DNA
aaggacgattctcttttaactatccttcatataaagaaagcttctgtcctgaacatgaaccgggaggaggaggatgggga

SEQ ID NO: 148232 - DNA, 80 bp, synthetic construct
  source 1..80: mol_type = other DNA
aattgcatctcctccgttcccttcattgttccaatggcacaccttgaagaaaaaggaaagttctataccagtaaattagt

SEQ ID NO: 148233 - DNA, 80 bp, synthetic construct
  source 1..80: mol_type = other DNA
gaaaggagactccaaggatgagagggcttataacccaaccctaccagtaaccaagccaaaaggagccttcccagttactc

SEQ ID NO: 148234 - DNA, 80 bp, synthetic construct
  source 1..80: mol_type = other DNA
gagctaggcataagcgcagaaatatacaacgcatgcatagtctgtgttatctgtccctacacttttccacctatgtatga

SEQ ID NO: 148235 - DNA, 80 bp, synthetic construct
  source 1..80: mol_type = other DNA
ccaagacatcacatacaacccaaacacagacaaaggcctaggcaacaaaatgtggattcaatcagttactaaaaaagaca

SEQ ID NO: 148236 - DNA, 80 bp, synthetic construct
  source 1..80: mol_type = other DNA
agttacacataaaggcaatgttgtgttgcagtccacagactgcaaagtctgcttcaggatgaaagccactcagtgttggc

SEQ ID NO: 148237 - DNA, 80 bp, synthetic construct
  source 1..80: mol_type = other DNA
aaaaatcctgacaatactcccaacaacgttgctactacttttaatacgtgggtagataattcatttaaaacaggcaagtt

SEQ ID NO: 148238 - DNA, 80 bp, synthetic construct
  source 1..80: mol_type = other DNA
ataccactgcatgaggattttagacaatatactgcatttaccctaccatcaacaaacaatgctgaaccaggaaaaagata

SEQ ID NO: 148239 - DNA, 80 bp, synthetic construct
  source 1..80: mol_type = other DNA
tattccaacatgcaactgtactgaggccacatatttctgcaagcacaagaatagatactatccaattagtgttacacccc

SEQ ID NO: 148240 - DNA, 80 bp, synthetic construct
  source 1..80: mol_type = other DNA
tcactctctcgcatgctgccaactctgtcactcacatccagctgtgcacacgcgctatcactaactactccacagctctc

SEQ ID NO: 148241 - DNA, 80 bp, synthetic construct
  source 1..80: mol_type = other DNA
caggctgtcaaggtgagcatgcctctaactgggttcatgggggccatctaaggcccacgtgtgacccatgtttccattaa

SEQ ID NO: 148242 - DNA, 80 bp, synthetic construct
  source 1..80: mol_type = other DNA
ctcagaacaaacaacacagctacaatagttgtgccatacatcaactctgtaccaatagactcaatgacacgtcacaataa

SEQ ID NO: 148243 - DNA, 80 bp, synthetic construct
  source 1..80: mol_type = other DNA
ccacccaggcatgctcatgcaacagaaacacaaggtgctcatccctagctttgacactaaacccgggggcagagctaaaa

SEQ ID NO: 148244 - DNA, 80 bp, synthetic construct
  source 1..80: mol_type = other DNA
caaactagaaataacgtcaagtacataacgtaattaaaacattccgacgctaatttatccaggataaatttttactactt

SEQ ID NO: 148245 - DNA, 80 bp, synthetic construct
  source 1..80: mol_type = other DNA
acttcacattaatgattataccattcgtggctttggacttcaacaacaccgcctcaaacgtgccgataaccatcacagtg

SEQ ID NO: 148246 - DNA, 80 bp, synthetic construct
  source 1..80: mol_type = other DNA
gggtaacttctacaggaacatctggctggcttacaaatgcaaaccaacactttcatttctgcaactacaaaccagatgct

SEQ ID NO: 148247 - DNA, 80 bp, synthetic construct
  source 1..80: mol_type = other DNA
accaactcgccgcagctcatcaaagcattgcccaagaagccctccatcgcttccttgcaacccatgacaccttcatcgag

SEQ ID NO: 148248 - DNA, 80 bp, synthetic construct
  source 1..80: mol_type = other DNA
cgtatttcgccggccctgccgccgccagaaattgtgcccgccgggtcggggctccattgccccatccagttggtggtgcc

SEQ ID NO: 148249 - DNA, 80 bp, synthetic construct
  source 1..80: mol_type = other DNA
gagtgggagacccaaaaaaacgcagatgtaaaaccagaccaccttactccttcagttgactggtacgagtaccacatagg

SEQ ID NO: 148250 - DNA, 80 bp, synthetic construct
  source 1..80: mol_type = other DNA
tctgctcaagcggggaagggtgaattgtgcgccgtgttcagagccgatccaggaagggacggcccgtgggagtcaaccat

SEQ ID NO: 148251 - DNA, 80 bp, synthetic construct
  source 1..80: mol_type = other DNA
acagcttatagaagagagtaaatccaggaaaagtgttggtaataatctgtcagccatattccagggcttaggtgacaggg

SEQ ID NO: 148252 - DNA, 80 bp, synthetic construct
  source 1..80: mol_type = other DNA
agactaatcaatatgatcactacagaacaggaaatacaattcctccaagcaaaaaattcaaaattcaaaaattttcgggt

SEQ ID NO: 148253 - DNA, 80 bp, synthetic construct
  source 1..80: mol_type = other DNA
acaaataaatggccagctctctgagctaggccgtgggagtttcacttgtcggtgtctacctctataagtcactaagcact

SEQ ID NO: 148254 - DNA, 80 bp, synthetic construct
  source 1..80: mol_type = other DNA
acaacaactactcaaaacccaagcgggcctgcacataaacccccttttatctatccaagcatagaaaaggcctatctgtt

SEQ ID NO: 148255 - DNA, 80 bp, synthetic construct
  source 1..80: mol_type = other DNA
ccgcatgggaggccctcacactcttccaccgttatgtgggagaatgtcagccagggacaacagcagactctggagtgcgg

SEQ ID NO: 148256 - DNA, 80 bp, synthetic construct
  source 1..80: mol_type = other DNA
tgggtttgcccctttgatttgtaacactctttatctaccttatattgtacttttggttagacaacagtatcacgatggga

SEQ ID NO: 148257 - DNA, 80 bp, synthetic construct
  source 1..80: mol_type = other DNA
tattgagcccatactccagtcagcgtggtctacttgacacagcaaaagcattgcaaccctgcaccaaatgtgacaagccc

SEQ ID NO: 148258 - DNA, 80 bp, synthetic construct
  source 1..80: mol_type = other DNA
acatggagattacagtggtgatcacaagctcacaggatcaatcaacctcgcagaatcagaacgcccctgttttaacacac

SEQ ID NO: 148259 - DNA, 80 bp, synthetic construct
  source 1..80: mol_type = other DNA
atgaagactattacccagtaataggctcttcagctttagaacagggaagtaattacagtaatgcaaacatagacaaatta

SEQ ID NO: 148260 - DNA, 80 bp, synthetic construct
  source 1..80: mol_type = other DNA
aaataatgtatgtaccacccggaggaccagtgccaacgtcagtcacagattacagttggcaaacctctacaaatccgagt

SEQ ID NO: 148261 - DNA, 80 bp, synthetic construct
  source 1..80: mol_type = other DNA
atgagcaaaattggtggtgtgtgggcgaaactcggcgaaaccgcgtagcatggccagcgtggacacgggcacgatggagg

SEQ ID NO: 148262 - DNA, 80 bp, synthetic construct
  source 1..80: mol_type = other DNA
ctggtctctctgacacgggttcttgataatctgttcggggatgatattaccgccccatttgaatctaaatttgtaccttg

SEQ ID NO: 148263 - DNA, 80 bp, synthetic construct
  source 1..80: mol_type = other DNA
gcggaaaagagggacggcagacacgcgaagagcaacgcccggagctcgcgcgcggaaaaggggaagcgctcggcgcgcct

SEQ ID NO: 148264 - DNA, 80 bp, synthetic construct
  source 1..80: mol_type = other DNA
tgcagaaggggaaaagtcagagggagcagagggagagaccttacaaagaggtgacggaggacttgctgcacctcagttct

SEQ ID NO: 148265 - DNA, 80 bp, synthetic construct
  source 1..80: mol_type = other DNA
gatgaagaaatcttcttcgattacaatgtcgagacactcccagaaattgaacccaccgctaatgaaatcctccaaagcaa

SEQ ID NO: 148266 - DNA, 80 bp, synthetic construct
  source 1..80: mol_type = other DNA
cccgctcttaccgctgtggagactggacacacatcacaggttgtcccaagtgacaccatccaaaccaggcacgtacagaa

SEQ ID NO: 148267 - DNA, 80 bp, synthetic construct
  source 1..80: mol_type = other DNA
tggaatgaaagaggggtcaccgtcaaatatacacctgagaactgtgagccgtggtccctagtaactaccatgtgcctgtt

SEQ ID NO: 148268 - DNA, 80 bp, synthetic construct
  source 1..80: mol_type = other DNA
gatcaggtactcgcaggtgtgcgcgtcggcgccccacagcatgaacaccagatgctcccggcgctctgacagcctccgga

SEQ ID NO: 148269 - DNA, 80 bp, synthetic construct
  source 1..80: mol_type = other DNA
gacctggagctggccaggttctttggcagcacctggacattttacagacaccagaccacagactacataatcacattcag

SEQ ID NO: 148270 - DNA, 80 bp, synthetic construct
  source 1..80: mol_type = other DNA
acatcacctgatgggctctggggagacgcagttttcgacatctcaaaacctcaagtaattaccgaaaatatggagtctta

SEQ ID NO: 148271 - DNA, 80 bp, synthetic construct
  source 1..80: mol_type = other DNA
cctcctcattacaagacatgctgccccatgttgtgtggtaaagcaatagttttacaagacaggaaaaccaaagttaacta

SEQ ID NO: 148272 - DNA, 80 bp, synthetic construct
  source 1..80: mol_type = other DNA
ccccccgaagatcgtcactaaccacgtgcttcctctcgcccaatcagagtctatgtcgtccatttcctgggcatggtcta

SEQ ID NO: 148273 - DNA, 80 bp, synthetic construct
  source 1..80: mol_type = other DNA
tcccccccttccgccccagtccatgtaagcctgcctcgagtcggtgcccacactttgtccagatgtccaggggtccccga

SEQ ID NO: 148274 - DNA, 80 bp, synthetic construct
  source 1..80: mol_type = other DNA
agggccaggaacgccaaatagcagcagtaatagatgaaaacaaagctcagcatgaaacagcgtggaggctcagctagggt

SEQ ID NO: 148275 - DNA, 80 bp, synthetic construct
  source 1..80: mol_type = other DNA
tggtagtatacacccaatctggtttgaggctctaaagcaagtcttgaataatttatcctttgattccaaattaatagaca

SEQ ID NO: 148276 - DNA, 80 bp, synthetic construct
  source 1..80: mol_type = other DNA
ctgaaattttagataatgatttggtcaagtttatagtgaaaatcctggttaggattttgtgttacatggtcttatattgt

SEQ ID NO: 148277 - DNA, 80 bp, synthetic construct
  source 1..80: mol_type = other DNA
tattttatctcttgcaatatggacacactcaaagacttagtcaatactgcatcctctgccatggatactcttagcttctc

SEQ ID NO: 148278 - DNA, 80 bp, synthetic construct
  source 1..80: mol_type = other DNA
gctccaggatgttagcttttttggtggggctggttgtcaggaagaggttccagtgttgtcctttatttttagatgttagc

SEQ ID NO: 148279 - DNA, 80 bp, synthetic construct
  source 1..80: mol_type = other DNA
ttggacaggaatcaggactccatgggggtacatcaacatgaactcatacagctgtcacttttcgccaaatgactggcaga

SEQ ID NO: 148280 - DNA, 80 bp, synthetic construct
  source 1..80: mol_type = other DNA
atcggtagaaccaactttccactaaatcatggcaaaattattgccaaaagagacaagatcacaacttatggtggtaattc

SEQ ID NO: 148281 - DNA, 80 bp, synthetic construct
  source 1..80: mol_type = other DNA
agtgagccatgaccatggaacatatggtaccagcatcactaatgacatgggaaagttatgctttaggaccccaaataaca

SEQ ID NO: 148282 - DNA, 80 bp, synthetic construct
  source 1..80: mol_type = other DNA
gggaaaaaaatagcgctggttggtggtggaagtttcctgaggcgctcaaagatatgggtctctttggtcagaacatgtta

SEQ ID NO: 148283 - DNA, 80 bp, synthetic construct
  source 1..80: mol_type = other DNA
gactggtgcacaaaaaatgacagtacctggagagacacacctcaaaaactaccagtagtagacattcccttatgggccgc

SEQ ID NO: 148284 - DNA, 80 bp, synthetic construct
  source 1..80: mol_type = other DNA
atggctatacaacacaggcagtctataccacacttttcacacccaagaataccttaacccaaacagaacttttaagtcac

SEQ ID NO: 148285 - DNA, 80 bp, synthetic construct
  source 1..80: mol_type = other DNA
gaacaaacgataccgcaaaaataaagttagcagagcactcgcaaggctcagatccagaagtaagatatatgtggactaac

SEQ ID NO: 148286 - DNA, 80 bp, synthetic construct
  source 1..80: mol_type = other DNA
cccccctaccaacagaaaggacgccatgcttggcactcatattgtatgggacgtgggcctccaatccagctgcgtgctgt

SEQ ID NO: 148287 - DNA, 80 bp, synthetic construct
  source 1..80: mol_type = other DNA
atactggatcgtctgtcggccatctcttacggccgtgatctctggcatcatgagacgcgcgaaaacgccggcgtggcgct

SEQ ID NO: 148288 - DNA, 80 bp, synthetic construct
  source 1..80: mol_type = other DNA
aacatgaaaattgcagccgcccactatgcagcacaactatcaactcttgacatcaactcagaaccattaactctagaaga

SEQ ID NO: 148289 - DNA, 80 bp, synthetic construct
  source 1..80: mol_type = other DNA
tcgtcgcaggttatccactgaattcccgtagctgaaataacgtatatggtaccgaggctggcaccacatgggtttgcatt

SEQ ID NO: 148290 - DNA, 80 bp, synthetic construct
  source 1..80: mol_type = other DNA
atgaatccccgtgcccttggccttgcataaataaagtgtcgcgcgctacgccttcggctgcgcgcggcacctcggacccc

SEQ ID NO: 148291 - DNA, 80 bp, synthetic construct
  source 1..80: mol_type = other DNA
cctgaggagtttggatatcagtcagggctgccagaggaagagtggaaggctagactgaaggcaaggggaatacccacaga

SEQ ID NO: 148292 - DNA, 80 bp, synthetic construct
  source 1..80: mol_type = other DNA
ttggctttaatacctatgcacccaaaaataaaaaaaacgaaatcgaaaagctaagagacgcctactgggaaatcttacaa

SEQ ID NO: 148293 - DNA, 80 bp, synthetic construct
  source 1..80: mol_type = other DNA
ccgctctgggttggtgggagtggttaatctcactgatggtggtactgacaccactgggtacgctacttgggatatagaca

SEQ ID NO: 148294 - DNA, 80 bp, synthetic construct
  source 1..80: mol_type = other DNA
agctcatgttccagcaactcctcaaaacccaagcgggcatccaactcaacccattattattcaaccaagcataaatcagg

SEQ ID NO: 148295 - DNA, 80 bp, synthetic construct
  source 1..80: mol_type = other DNA
cagaggctcaatttagagtacccgcataccaaccagatggtacagagaactcaaaaaaaactgaatggactaaaacatgg

SEQ ID NO: 148296 - DNA, 80 bp, synthetic construct
  source 1..80: mol_type = other DNA
tctagcttatggggacgacctaattgtctcttacccatatgaactcaatccagaagtgctagcaactcttgggaagagtt

SEQ ID NO: 148297 - DNA, 80 bp, synthetic construct
  source 1..80: mol_type = other DNA
agccaggagaatcaaggagatgaaaatgaagatgatgaactatatacaatttaagtcaaaacaaagaactgagccagttt

SEQ ID NO: 148298 - DNA, 80 bp, synthetic construct
  source 1..80: mol_type = other DNA
aggtgatagtttgacctcacagtacggttcagtagtcacaaatgctatggggacactatgtgttcgtgtggtcacagagc

SEQ ID NO: 148299 - DNA, 80 bp, synthetic construct
  source 1..80: mol_type = other DNA
gtaacctttaagcttgggtttcaataaactaggccgtgggagtttcacttgtcggtgtctgcctcttaaggtcaccaagc

SEQ ID NO: 148300 - DNA, 80 bp, synthetic construct
  source 1..80: mol_type = other DNA
ggcagcattacctacataccagatactgtcaagcctgacgtgtcaaactacggggcatttggtcaacagtccggtgctat

SEQ ID NO: 148301 - DNA, 80 bp, synthetic construct
  source 1..80: mol_type = other DNA
aatatgcaggaccggaccgttcagttacagagacgagcaccctggcataaccctgactgccagctacaagtttcacttta

SEQ ID NO: 148302 - DNA, 80 bp, synthetic construct
  source 1..80: mol_type = other DNA
ttagtgaaataacctccatggtcacatcagtcgttactgaaaagctcctcaaaaacttaatcaagttaattagcagtttg

SEQ ID NO: 148303 - DNA, 80 bp, synthetic construct
  source 1..80: mol_type = other DNA
gagactgcataatggcatttgattatacaaattatgatggtagcatacatccaatttggttccaagcgctgaaacaagtc

SEQ ID NO: 148304 - DNA, 80 bp, synthetic construct
  source 1..80: mol_type = other DNA
tagacaccccatgggttgagaaggagtctgctctttccattgattataaaacagctcttggtgctgttaggtttaatact

SEQ ID NO: 148305 - DNA, 80 bp, synthetic construct
  source 1..80: mol_type = other DNA
attgttgcagacccatgcaaacaaccctcctttgaaatgcccggaaccagtacaatccctcctcgactacaagtcacgga

SEQ ID NO: 148306 - DNA, 80 bp, synthetic construct
  source 1..80: mol_type = other DNA
tcctagccccaccaactatcacttcactctctgctatgaatagaaggttttacttagatttggacataattgtgcatgaa

SEQ ID NO: 148307 - DNA, 80 bp, synthetic construct
  source 1..80: mol_type = other DNA
cccatgggttcctgctgaaaacgacactcgagcagtcgttgcatggcgggttccgagggcggtccgcgttccgtgaaggt

SEQ ID NO: 148308 - DNA, 80 bp, synthetic construct
  source 1..80: mol_type = other DNA
ttaccaattattataactggacagggaactgcctcaatgaactattcatctcactcagatgacattacttaccctggacc

SEQ ID NO: 148309 - DNA, 80 bp, synthetic construct
  source 1..80: mol_type = other DNA
cctaaaagacaaggtttgcaagtggttaggtattgatccaccacctagtaagcagggtgattcatggttaaagaaattca

SEQ ID NO: 148310 - DNA, 80 bp, synthetic construct
  source 1..80: mol_type = other DNA
tttaacctctactccctccagcagagactggaaagaggagtatgaggcctgcagagtctgggacagacctcccagaaacg

SEQ ID NO: 148311 - DNA, 80 bp, synthetic construct
  source 1..80: mol_type = other DNA
gaacactgatagagatatgtgtcctgaaatttgcaatactagaggttatcaagatatttttccattgtcggaggattcag

SEQ ID NO: 148312 - DNA, 80 bp, synthetic construct
  source 1..80: mol_type = other DNA
ctggtctcccagcgagtagcgacctaacgccggcgtgcagcaaggttcgtcgggccggctgagcgtctccagttgcgtga

SEQ ID NO: 148313 - DNA, 80 bp, synthetic construct
  source 1..80: mol_type = other DNA
cagcaccgtcatgtgtgccacctgcttcaataagaatgtaagacctgacgtttcagtacttggcaattgtagagcatagc

SEQ ID NO: 148314 - DNA, 80 bp, synthetic construct
  source 1..80: mol_type = other DNA
acgaacacctgagacaccttaactactggactgtcagtaacgaggacttagacctgtgcagataccttgggggaaccttc

SEQ ID NO: 148315 - DNA, 80 bp, synthetic construct
  source 1..80: mol_type = other DNA
ttggagacgggagcaacgccgtaaataaatatcatcttttatttgatcaacgaatccaatttctttaaaaatagaatagg

SEQ ID NO: 148316 - DNA, 80 bp, synthetic construct
  source 1..80: mol_type = other DNA
cgccattttaagtaagcaggaagctggctgtcactatacaaaatggcggtgacagacttccggcttacacaaaatggatg

SEQ ID NO: 148317 - DNA, 80 bp, synthetic construct
  source 1..80: mol_type = other DNA
atcacagtctcctccttcacgacgcccccgtgccgctcacgctatccagcacgctacggcccgaaaacacgtactcgctg

SEQ ID NO: 148318 - DNA, 80 bp, synthetic construct
  source 1..80: mol_type = other DNA
agatgaatactattcaccaaaagatgcacagtggggagaccccatccacattatctctgcaaatgaaattacaggcaacc

SEQ ID NO: 148319 - DNA, 80 bp, synthetic construct
  source 1..80: mol_type = other DNA
aagtactcatcaggtggtattataacattatggcaccaaactgcttttgttagcggagacaccgccaatgtggggactat

SEQ ID NO: 148320 - DNA, 80 bp, synthetic construct
  source 1..80: mol_type = other DNA
acttccaagggcaagaaggcagcttcagttcaggggaaggaaaaccgggggagtcggaggaagagagcgaagccgaagtc

SEQ ID NO: 148321 - DNA, 80 bp, synthetic construct
  source 1..80: mol_type = other DNA
ataaacacagacaactgctcagggataagggatgaagacatgctcacatgtcagttcaaaatgacaggattacagagaga

SEQ ID NO: 148322 - DNA, 80 bp, synthetic construct
  source 1..80: mol_type = other DNA
aatcaaactctcttggcccctcctacaattacatctctgccagccatgaataggcgtttcttcttagatttagatatagt

SEQ ID NO: 148323 - DNA, 80 bp, synthetic construct
  source 1..80: mol_type = other DNA
caaccatatttcctactgtagagcccagcaaaccgccaacgaccgaagaagatgaagatacatcagacgatgacaaagtt

SEQ ID NO: 148324 - DNA, 80 bp, synthetic construct
  source 1..80: mol_type = other DNA
tctcaccagacttttccaacgttgatacatttcattctatggcctatgacataaccagtggagataaaaatccaagcaaa

SEQ ID NO: 148325 - DNA, 80 bp, synthetic construct
  source 1..80: mol_type = other DNA
taggaattttcccttcgcggatccgccgctcagattccaggatggcgcgcacgtagctgttcaccgacttggcaaaagtg

SEQ ID NO: 148326 - DNA, 80 bp, synthetic construct
  source 1..80: mol_type = other DNA
gaaaaagatcttcaaaaaggaataagactgctacatcttctgcatcagacaagtgagtaagatgtgtggtaagaatctac

SEQ ID NO: 148327 - DNA, 80 bp, synthetic construct
  source 1..80: mol_type = other DNA
tatgatggttatgaagatgataatgggacaacctatggtgcagtggttacaaaccatatgggaacactttgtgcacgcat

SEQ ID NO: 148328 - DNA, 80 bp, synthetic construct
  source 1..80: mol_type = other DNA
gctctatttaacatgtataggtcatgtttcgttgacattaagatagcatttccaaaatatagtaacccaaactccactga

SEQ ID NO: 148329 - DNA, 80 bp, synthetic construct
  source 1..80: mol_type = other DNA
atttccttggaagatctgcactgtgggcaaatctgcgcctggataatgggtatattaagtggagcatcaattttcaggag

SEQ ID NO: 148330 - DNA, 80 bp, synthetic construct
  source 1..80: mol_type = other DNA
ggtgcccaaactttttcttccctgtgcctgctcctagaccaattaacactacaccagtaggccgtgcttttactgatgaa

SEQ ID NO: 148331 - DNA, 80 bp, synthetic construct
  source 1..80: mol_type = other DNA
tgtgtgtgtttttcttttccttcctattttgttacggcaacagcgctgatggcacgttgccggcttcgaacatcgcgtcg

SEQ ID NO: 148332 - DNA, 80 bp, synthetic construct
  source 1..80: mol_type = other DNA
ccaggggagagagagccagtactttgcagcagtctatcacgctcacgctgggttttgcggctgtggtgaccctattgggc

SEQ ID NO: 148333 - DNA, 80 bp, synthetic construct
  source 1..80: mol_type = other DNA
aagtgtctgacccgcttaccgtgggacccagatactgcttccaccagtgggactggagacgtgggttccttggtgacaaa

SEQ ID NO: 148334 - DNA, 80 bp, synthetic construct
  source 1..80: mol_type = other DNA
tgtccagctggttctttggtagccttccaaaactcatgggggtctcagatggatctaactgaccccttatgcattgaaga

SEQ ID NO: 148335 - DNA, 80 bp, synthetic construct
  source 1..80: mol_type = other DNA
ttacatcccagtgtattttatgatgtttttccaggtgacaaggaacctgctgtattgagtgacaatgatcccagactgga

SEQ ID NO: 148336 - DNA, 80 bp, synthetic construct
  source 1..80: mol_type = other DNA
gtaagactaacctggtatacagaaaagttctggacagatgttaccccagactgtgcagacatcctaatacatagcaccta

SEQ ID NO: 148337 - DNA, 80 bp, synthetic construct
  source 1..80: mol_type = other DNA
caacaaatgtacaaaataccttatgacagcaactatggctttccaacctataaacccattaaagactacatgctagccag

SEQ ID NO: 148338 - DNA, 80 bp, synthetic construct
  source 1..80: mol_type = other DNA
ggcaacttacagtgtatgtctggactccactatctacaccaaataatgcttcaaacactgtggatgttaccattatgggt

SEQ ID NO: 148339 - DNA, 80 bp, synthetic construct
  source 1..80: mol_type = other DNA
gcccacacatgcagacccaggtagagaagtgcaaatagatggcatcacaactgaggttcaagattcttacgatttgtaca

SEQ ID NO: 148340 - DNA, 80 bp, synthetic construct
  source 1..80: mol_type = other DNA
ggaacactattaggcaatttgactattttccctcaccagctcataaacctgaggacaaacaactccagcagcatagttgt

SEQ ID NO: 148341 - DNA, 80 bp, synthetic construct
  source 1..80: mol_type = other DNA
acccttgcgtcaacttccagatcctggggccccagtacaaaaaccaccttagtattagcacacttaaagacaccgaaaat

SEQ ID NO: 148342 - DNA, 80 bp, synthetic construct
  source 1..80: mol_type = other DNA
ctgcagtcaggtgtggcttccacttccaggtacagattaatgttaaccaaggtactgctggtagtgcacttgtggtctat

SEQ ID NO: 148343 - DNA, 80 bp, synthetic construct
  source 1..80: mol_type = other DNA
gacaactacacagagagtgggttcattacactgtggcatcagacagcatttgtgtccaatgggacttcaggatccataat

SEQ ID NO: 148344 - DNA, 80 bp, synthetic construct
  source 1..80: mol_type = other DNA
gtgaaacacgctcgcttttcgtctctccaaggaacactgggtccgctgaaagggaccgtgtaccgaccaaagcaaaaaac

SEQ ID NO: 148345 - DNA, 80 bp, synthetic construct
  source 1..80: mol_type = other DNA
aggaactcaactaggccaggacatgccccccctcactcaccagattatgtacatcccgccaggcggccccattcccaaat

SEQ ID NO: 148346 - DNA, 80 bp, synthetic construct
  source 1..80: mol_type = other DNA
caagctttgttctctaagtacaaaggaaatgttgaatgcaatatgtctgaacatatgatggttgccatatcacattattc

SEQ ID NO: 148347 - DNA, 80 bp, synthetic construct
  source 1..80: mol_type = other DNA
tggcaagacgcatggtctaaacaaggagaaagctactcaccacaggcatacccacaaacctcaataacaggtatacagtc

SEQ ID NO: 148348 - DNA, 80 bp, synthetic construct
  source 1..80: mol_type = other DNA
tttgaatgacacagtacaatttagaatggcctttggtagattattttctgccttccaccaaaacccaggtatagtcacag

SEQ ID NO: 148349 - DNA, 80 bp, synthetic construct
  source 1..80: mol_type = other DNA
ttgtaaaagactaaaacagttggatattctagaaaggcagattgataccctgcatgtgaatcaggtcaatgataatgaca

SEQ ID NO: 148350 - DNA, 80 bp, synthetic construct
  source 1..80: mol_type = other DNA
tagcgctattaggttgtcaaagctcaccatggaattttttgaagaataagatctgtcaatggttagatatacccaggcca

SEQ ID NO: 148351 - DNA, 80 bp, synthetic construct
  source 1..80: mol_type = other DNA
taagtggggtggcaatctcttccaccaacagaccattagaaacccctgcaaaccagaggagacctcgaccggtagattcc

SEQ ID NO: 148352 - DNA, 80 bp, synthetic construct
  source 1..80: mol_type = other DNA
gtgattaaattagataggaatgaaaagtttagagacattaggaaatatattccagacactgaggatgattaccctgaatg

SEQ ID NO: 148353 - DNA, 80 bp, synthetic construct
  source 1..80: mol_type = other DNA
aatgcggatctctacgataatgggagattttcccgactgtttcgttcgcttctcagtggataacagccagcttctctgtt

SEQ ID NO: 148354 - DNA, 80 bp, synthetic construct
  source 1..80: mol_type = other DNA
gtccaggagatttgcctttgacacagatatctgtcccatgtcagaatatacagttagaggtaaattaaacatggcactgg

SEQ ID NO: 148355 - DNA, 80 bp, synthetic construct
  source 1..80: mol_type = other DNA
ccacagcatacaagcagtgacaacggctatgccagccagtggaccacccccagcacagacgcctacgagtaccatctagg

SEQ ID NO: 148356 - DNA, 80 bp, synthetic construct
  source 1..80: mol_type = other DNA
tacaccacctataaaaatgccaaccctggcgaggctggaggtgaatttgttgataagtttgcggctgccactgacgcttc

SEQ ID NO: 148357 - DNA, 80 bp, synthetic construct
  source 1..80: mol_type = other DNA
ggccttgctgggttgtagtggctcaccatggaattatctgaagacaaaactctgtgcatggttgggagttaacaagccac

SEQ ID NO: 148358 - DNA, 80 bp, synthetic construct
  source 1..80: mol_type = other DNA
gatgctgatgcatatccgctcactccaaaaagacctagagtattccctcccacagaccaagaaggggtccatgtgcgagg

SEQ ID NO: 148359 - DNA, 80 bp, synthetic construct
  source 1..80: mol_type = other DNA
accccagggcgggtgcctggtggatgggaaagccggacggcgcttctcccgggtcgaacgctggagtagcggaggctgct

SEQ ID NO: 148360 - DNA, 80 bp, synthetic construct
  source 1..80: mol_type = other DNA
catgagctttacctgaaacactatcccgaagtgggggatgtggtgcatctactgaacaccatcggggtcgactgcgacct

SEQ ID NO: 148361 - DNA, 80 bp, synthetic construct
  source 1..80: mol_type = other DNA
agtggggccagatttcgccataaggcctttatcttcttgccattggtcagtatttgaggttaccataggcttcggcctcc

SEQ ID NO: 148362 - DNA, 80 bp, synthetic construct
  source 1..80: mol_type = other DNA
cgagtaaggagaaggcgcgcgagagggtggcgggggcgaccgagacgcaggggctacagacgcagactgtatatcagacg

SEQ ID NO: 148363 - DNA, 80 bp, synthetic construct
  source 1..80: mol_type = other DNA
gacgcagacgcagacgaaagaaaataagactgactcagtggaacccagccaaagttaggagatgtactattaagggggtg

SEQ ID NO: 148364 - DNA, 80 bp, synthetic construct
  source 1..80: mol_type = other DNA
ctcataaagcacaggtaccatcacttcaatacctagccctagtggtagtgcaacaaaatgacagaccccagagaaagggt

SEQ ID NO: 148365 - DNA, 80 bp, synthetic construct
  source 1..80: mol_type = other DNA
aacctaatcaatggagaggatgcacacacgttcagtccaagtgaggctacagcggaggctggaaaggtgcaaaccgctgt

SEQ ID NO: 148366 - DNA, 80 bp, synthetic construct
  source 1..80: mol_type = other DNA
cctgtttttactccccttcccccgaagtaacttagaagctgtaaatcaacgatcaatagcaggtgtggcacaccagtcat

SEQ ID NO: 148367 - DNA, 80 bp, synthetic construct
  source 1..80: mol_type = other DNA
aggagacaaaaaataaatataaagcagtggaaccccgcagtgactaaaatgtgccacatagtgggatactacccactaat

SEQ ID NO: 148368 - DNA, 80 bp, synthetic construct
  source 1..80: mol_type = other DNA
cacacaaatgtcagttacacccacaacaaccacttccctaaatgagaaagaccaaaaaatatttagtgaacatttatata

SEQ ID NO: 148369 - DNA, 80 bp, synthetic construct
  source 1..80: mol_type = other DNA
agttcactagtgatgacagtagaaattagaaagcaaaatatgtcagaatttatggaactttggtcacaaggaatgtcaga

SEQ ID NO: 148370 - DNA, 80 bp, synthetic construct
  source 1..80: mol_type = other DNA
ggcaattcgggcacgggactggccgggcttatgggcaaggctcttaaaaaatttcctcgctgtgtattacagcaggacat

SEQ ID NO: 148371 - DNA, 80 bp, synthetic construct
  source 1..80: mol_type = other DNA
gatatatttgagtttaaggtgtcctaacttattcttcccactccccgccccaaaacccacatctaatcgctcactaaggg

SEQ ID NO: 148372 - DNA, 80 bp, synthetic construct
  source 1..80: mol_type = other DNA
tcacggtcactgccactttggctctgttgggctgtgatggttccccttggagattcttgaagatgtatatttctaagcac

SEQ ID NO: 148373 - DNA, 80 bp, synthetic construct
  source 1..80: mol_type = other DNA
tgaatccaatcaatgcacccaacaaaactaagttgtaccctagtgtattttttgacatcttccctggagagaaagaacct

SEQ ID NO: 148374 - DNA, 80 bp, synthetic construct
  source 1..80: mol_type = other DNA
ccccggtatacgaggaatagactcctacagggttaaagcctcaagtatcgtcatccgcattggtactacgcaaagcttag

SEQ ID NO: 148375 - DNA, 80 bp, synthetic construct
  source 1..80: mol_type = other DNA
gggtaaccctatatcacagcagactattaaagacccgtgccaacagcccgaatggcaaatacccggtaccggtggacaac

SEQ ID NO: 148376 - DNA, 80 bp, synthetic construct
  source 1..80: mol_type = other DNA
caccgtggcgctgattaatcgttcccccgccctgcgtaacgctattctaaagttcctcaacaggccagatacgttctcgg

SEQ ID NO: 148377 - DNA, 80 bp, synthetic construct
  source 1..80: mol_type = other DNA
ccggttaccgtatattggtacacgcactacgctataagtattcaatcgctgtaattgaatgcttgttacttatgtatgcg

SEQ ID NO: 148378 - DNA, 80 bp, synthetic construct
  source 1..80: mol_type = other DNA
actttccaatacatggaagccaatgattattacccagccagataccaaacacatatgcttctcggcatgggatttgctga

SEQ ID NO: 148379 - DNA, 80 bp, synthetic construct
  source 1..80: mol_type = other DNA
aaactggtacattagataactacaatgataccaatagatggggagtagtattcaatacatttaagacagaagaacacctg

SEQ ID NO: 148380 - DNA, 80 bp, synthetic construct
  source 1..80: mol_type = other DNA
gggggggtgcggggacggggggtgtgcggtgacgagggccttttgcgacagggacgagagtggggacggagacggggacg

SEQ ID NO: 148381 - DNA, 80 bp, synthetic construct
  source 1..80: mol_type = other DNA
aataaagccccccaaactattcctagacaagtggtacacacaagaggacctgtgcaccgttaatcttgtgacatttgcgg

SEQ ID NO: 148382 - DNA, 80 bp, synthetic construct
  source 1..80: mol_type = other DNA
atagtcgacaaagcaaaacagactattgcctcagtatctagtgattcaaaacacacacagaaagtcccaactctatcagc

SEQ ID NO: 148383 - DNA, 80 bp, synthetic construct
  source 1..80: mol_type = other DNA
accatgaagtacagcaaatatctactaatgtctatccatccaacagtgataccatgcactggcatcttgcgattacatgg

SEQ ID NO: 148384 - DNA, 80 bp, synthetic construct
  source 1..80: mol_type = other DNA
gggatttgggtttacaatcaagttgcactatggttgcaccatggatctcaagcacatacttccgcagaaccaaagcagac

SEQ ID NO: 148385 - DNA, 80 bp, synthetic construct
  source 1..80: mol_type = other DNA
tggttgcgcatgcatggtacccaatagaagagacatgttactacccaaaacatatacagtacaacttacttttgggtgaa

SEQ ID NO: 148386 - DNA, 80 bp, synthetic construct
  source 1..80: mol_type = other DNA
ggagcaaaaaatgagaataaagaccccgaaaacgaaacaaaccacgccgatcatgccgatgcagacgttcatgtcgacgt

SEQ ID NO: 148387 - DNA, 80 bp, synthetic construct
  source 1..80: mol_type = other DNA
tacacttccaggttttaagccccgcctataacggcatactaagcatacaagcagactaccttagacaaaactatgaagca

SEQ ID NO: 148388 - DNA, 80 bp, synthetic construct
  source 1..80: mol_type = other DNA
agctcgagttatcctcagggtttaagaaatgggacatcaactttcaggaacaagcacaaattagacgaaagttagaattc

SEQ ID NO: 148389 - DNA, 80 bp, synthetic construct
  source 1..80: mol_type = other DNA
tcaaccagggcattttccacaatatgaataccacctggggtggttcagtcccatattcataggcccaaacagatacaacg

SEQ ID NO: 148390 - DNA, 80 bp, synthetic construct
  source 1..80: mol_type = other DNA
accagtacaccagacacctaaacaggtggtcttacccaaacgaccagctagacctagccagatacagaggctgcaaattt

SEQ ID NO: 148391 - DNA, 80 bp, synthetic construct
  source 1..80: mol_type = other DNA
tcatgtagtatgggatgttggactgcaatctacaatgtccatggtagtaccatgggtttcagcaagtcactacaggtaca

SEQ ID NO: 148392 - DNA, 80 bp, synthetic construct
  source 1..80: mol_type = other DNA
gacgtcttgtaaattaacttgtagcggttaagcatagacgccaaatcttcggtgacatttgcctctctccacagcgcctc

SEQ ID NO: 148393 - DNA, 80 bp, synthetic construct
  source 1..80: mol_type = other DNA
acacccccgacacacccgacccacgcccgctggacgaagtacggcacgaccagcctcagaggccaagagaagggggggtg

SEQ ID NO: 148394 - DNA, 80 bp, synthetic construct
  source 1..80: mol_type = other DNA
cggaacctcccagataaccaggttctgggcagccaggtggagagtgtacctaggagtacaacaacaagtactaaatgaca

SEQ ID NO: 148395 - DNA, 80 bp, synthetic construct
  source 1..80: mol_type = other DNA
gcagcagcgactcggagtccaactcagatacatcctccaagaagtcctcaaaacgcaagcgggtctccacctaaaccccc

SEQ ID NO: 148396 - DNA, 80 bp, synthetic construct
  source 1..80: mol_type = other DNA
gacggtggttgcgctgcggacgggcacgcggtgctgattgcggcgtggacgggaggcttctgcgctgaggaccgggcgtg

SEQ ID NO: 148397 - DNA, 80 bp, synthetic construct
  source 1..80: mol_type = other DNA
aaagaaggaaaagcaggatatgtaacagatagaggaagagacaaggtaaaaatactagagcaaactaccaatcagcaagc

SEQ ID NO: 148398 - DNA, 80 bp, synthetic construct
  source 1..80: mol_type = other DNA
ccctgtccaggagcgaggggagcacgacgccccccttccctcgttgaagcactgtgcgtgggccaaatagacgtagcgca

SEQ ID NO: 148399 - DNA, 80 bp, synthetic construct
  source 1..80: mol_type = other DNA
aggtagttgaatggttttcaaataaaattaaatctatgctgagttttgttgagaggaacaaagcatggctgactgtagtt

SEQ ID NO: 148400 - DNA, 80 bp, synthetic construct
  source 1..80: mol_type = other DNA
acacctacaggtactggcaaaccaacacaagaagacttaattaacaaaatacaccaaaacatgacttcatactgggcaaa

SEQ ID NO: 148401 - DNA, 80 bp, synthetic construct
  source 1..80: mol_type = other DNA
ctaacaatataagaaaatgcaggataaccggcatgctccccatgctcatatgcgggcacggcatggccgccaacaactat

SEQ ID NO: 148402 - DNA, 80 bp, synthetic construct
  source 1..80: mol_type = other DNA
gctatcttatcataatcacactcaccctctatagcattgaaaacttctttgcacatagttttaacatccgctaaattaat

SEQ ID NO: 148403 - DNA, 80 bp, synthetic construct
  source 1..80: mol_type = other DNA
tgactggataaaagaagggtttttcccagtaagatgatccccgtatcacatgaggtctggatatatataaatgaggagtg

SEQ ID NO: 148404 - DNA, 80 bp, synthetic construct
  source 1..80: mol_type = other DNA
tcaggaacaaacggcatttatactaaaaaaacagatagtaactatggataccactcttttaacgtcaaaggcaaaaaaaa

SEQ ID NO: 148405 - DNA, 80 bp, synthetic construct
  source 1..80: mol_type = other DNA
taagaggagagaacagatcacaaaatatggcttgggtccaagatttggaggtgtatttaccagtaatttcaaaataatga

SEQ ID NO: 148406 - DNA, 80 bp, synthetic construct
  source 1..80: mol_type = other DNA
ttaaacagaaaaagaggagcgagccagtcgctgtgatgatacacggtccacctggaactggcaaatctataaccacaagt

SEQ ID NO: 148407 - DNA, 80 bp, synthetic construct
  source 1..80: mol_type = other DNA
tggcggccccgggctgcgggagtgtatttgttggcggaaccgggctgcgggatgtttctgcggtggttttcacggcgctt

SEQ ID NO: 148408 - DNA, 80 bp, synthetic construct
  source 1..80: mol_type = other DNA
gtttcttgcaccatatatcccaatcaactggtgggttaagtggtaccccaacattgcacatcaaaaggaagtacttgagg

SEQ ID NO: 148409 - DNA, 80 bp, synthetic construct
  source 1..80: mol_type = other DNA
aaatgtggaatcctagcatgattagagcctgtagcataaggggcatgatagcactagtaatctgtggacatactcaggct

SEQ ID NO: 148410 - DNA, 80 bp, synthetic construct
  source 1..80: mol_type = other DNA
ccgtgacgtatgcgtcacgtgacaggccacgtgagaggattgacttccgggttacacctacatccttatataaggccgcg

SEQ ID NO: 148411 - DNA, 80 bp, synthetic construct
  source 1..80: mol_type = other DNA
ttgattggcttaaatccatgttgccacaagccagattaaaagtagattttattaagaatcttaaacaactaccattatta

SEQ ID NO: 148412 - DNA, 80 bp, synthetic construct
  source 1..80: mol_type = other DNA
cagtaccgagagcagcgaagaatcggaaagcaactccaactcgtcatgctccaactcaccaagacgcagagcaacctgca

SEQ ID NO: 148413 - DNA, 80 bp, synthetic construct
  source 1..80: mol_type = other DNA
acggcctccagagccgtgtgaaagccccgccgagtgcttgccgccatctcgtgggccttcgccatcagggtctggctctc

SEQ ID NO: 148414 - DNA, 80 bp, synthetic construct
  source 1..80: mol_type = other DNA
ccgtggtcccagtgaataatctggaggacaaggtaaattcaattgaagcttacagaatccctgtcaaatcaatgagtggt

SEQ ID NO: 148415 - DNA, 80 bp, synthetic construct
  source 1..80: mol_type = other DNA
caaatggtccagaaccaaccaagacctagaactagccagatacctgtttacaaccataaaactgtacagacacgagtcag

SEQ ID NO: 148416 - DNA, 80 bp, synthetic construct
  source 1..80: mol_type = other DNA
tctttgccctaaaaccagacttctatcccaataacagcatactaccagacaaaatatcaacatatgcaccaacattctat

SEQ ID NO: 148417 - DNA, 80 bp, synthetic construct
  source 1..80: mol_type = other DNA
acgctacatcagtcgataagccaacacaccctgagacctcatcagatcggttctacacattggagagtgttacatggaat

SEQ ID NO: 148418 - DNA, 80 bp, synthetic construct
  source 1..80: mol_type = other DNA
atgacaggacataggcctggattaccacggtgcgatcgaaacacagcccgatggtggacacggatatcgtagtgagggtg

SEQ ID NO: 148419 - DNA, 80 bp, synthetic construct
  source 1..80: mol_type = other DNA
gcgctcagcgtgcgtgtatttcctagagtacaagaccggcacgagggctgattccaacgcttttaacaactgggttatca

SEQ ID NO: 148420 - DNA, 80 bp, synthetic construct
  source 1..80: mol_type = other DNA
gaaaagcagattgataacctgcgctgtgcagattcaaaggttcaagaaaagattaaattagaaattgatacccttcatga

SEQ ID NO: 148421 - DNA, 80 bp, synthetic construct
  source 1..80: mol_type = other DNA
cgacagtgatcaggtgcgtgagtactgcgctaagcaaggctgggtcactgagctgccatcgtcatcattggtagtagaga

SEQ ID NO: 148422 - DNA, 80 bp, synthetic construct
  source 1..80: mol_type = other DNA
tatagcaaccacaaacaagtctgatttctctagtacggtccttcaagattctggcgctctcaagaggcgtttcccttaca

SEQ ID NO: 148423 - DNA, 80 bp, synthetic construct
  source 1..80: mol_type = other DNA
ctacaagagaagctttactcacaatgcacatactttcaaaccacacaagttctagcccagttatctccagcatttcagcc

SEQ ID NO: 148424 - DNA, 80 bp, synthetic construct
  source 1..80: mol_type = other DNA
tgtgtgttatgcatcccctggattagtcagacccattacagactggtacaccaagatgaatacaccagtgctggtaacgt

SEQ ID NO: 148425 - DNA, 80 bp, synthetic construct
  source 1..80: mol_type = other DNA
aagacacacaagtagaaaatataacagcatttttaaaaacagtttttaaagaccagggaacaaaactaacaagctttaac

SEQ ID NO: 148426 - DNA, 80 bp, synthetic construct
  source 1..80: mol_type = other DNA
cgggtgcatctacagcaggatacataacatgctggtatcaaaccagattagtaattccacctcaaactccacccacagct

SEQ ID NO: 148427 - DNA, 80 bp, synthetic construct
  source 1..80: mol_type = other DNA
tgttcctcttctaactgttcatgcaaccgcagcggatctgcaatatccgttcggctcaccactaacgaactccatatgct

SEQ ID NO: 148428 - DNA, 80 bp, synthetic construct
  source 1..80: mol_type = other DNA
acacaatgccgcgggcattgagcgcctctggtacgacagttgctttaggtcccatggagcttgttgtggctgtggtaatt

SEQ ID NO: 148429 - DNA, 80 bp, synthetic construct
  source 1..80: mol_type = other DNA
attttgtgacgaaactaaaacaactagattttcttgagagccaaattagcaccatccaccagtcttgccctagtcaggag

SEQ ID NO: 148430 - DNA, 80 bp, synthetic construct
  source 1..80: mol_type = other DNA
tgataattccatcttattcagttctcagacacagatggcttgaaatgttttaaaagatttagatatatagagatttaatt

SEQ ID NO: 148431 - DNA, 80 bp, synthetic construct
  source 1..80: mol_type = other DNA
tggatatgtatagaatccctgttaccaccagtgctaatacagactcccccatattatgtctgagtctatcaccagcttca

SEQ ID NO: 148432 - DNA, 80 bp, synthetic construct
  source 1..80: mol_type = other DNA
aaagtccagcctttactgcactgggagagctactgagcagagacacatagaaggtcttgttgggtattatcttgtggaca

SEQ ID NO: 148433 - DNA, 80 bp, synthetic construct
  source 1..80: mol_type = other DNA
caaaagaagagataacataacaacctatggacttggacccaggtatggtggagtttttacaagcaatgtcaaaattatga

SEQ ID NO: 148434 - DNA, 80 bp, synthetic construct
  source 1..80: mol_type = other DNA
gtaagcagtgcagtaacagacatgagaatagctatcagaagcccttacactgaaccagcacttatagggtcaacagaaga

SEQ ID NO: 148435 - DNA, 80 bp, synthetic construct
  source 1..80: mol_type = other DNA
aagatgcgaattccaccttctactactcttgttacaatctgaccgtgtcctagagaacgcacgtgaagttccacagagcc

SEQ ID NO: 148436 - DNA, 80 bp, synthetic construct
  source 1..80: mol_type = other DNA
tgatcttaaaacagctgtcttgtccaagtacagaggaaatgtggaaattgaaatgagtgaaaatatgcaaattgctgtag

SEQ ID NO: 148437 - DNA, 80 bp, synthetic construct
  source 1..80: mol_type = other DNA
tctcaactttacaaccatattagagaggaagacagaaggagatgtagtgcagcccaagcaatggaggccatatttcaagg

SEQ ID NO: 148438 - DNA, 80 bp, synthetic construct
  source 1..80: mol_type = other DNA
gctagtaaaaacccagcagggagtacacgtacatccatccctcttgtaggcccaaagcagtacatgttcccagagagggc

SEQ ID NO: 148439 - DNA, 80 bp, synthetic construct
  source 1..80: mol_type = other DNA
cagatctgcatgtgtctactataccacttacgacacacatggctccgatgctgatgataaatacgctagctgggctataa

SEQ ID NO: 148440 - DNA, 80 bp, synthetic construct
  source 1..80: mol_type = other DNA
atagtaaataagataattgaagaaatgatcaaaaaggaagcaatatatgtaggatgggtgccagctcacaaaggactagg

SEQ ID NO: 148441 - DNA, 80 bp, synthetic construct
  source 1..80: mol_type = other DNA
tccagcacagtgtacaggaggtgtgtgaaagatgatttcactgaaggtggttacatcacttgtttttaccagacacgcat

SEQ ID NO: 148442 - DNA, 80 bp, synthetic construct
  source 1..80: mol_type = other DNA
gacctagacgccttgttcgacgccgtcgcaagagatacagagtaaggagacggaggcggtggggaaggagacgtgggcga

SEQ ID NO: 148443 - DNA, 80 bp, synthetic construct
  source 1..80: mol_type = other DNA
ttccaagatgaaatcccaggagttctaccaaaaatacacagattgtttatcaaagttcaagcccatcatggctatatgtt

SEQ ID NO: 148444 - DNA, 80 bp, synthetic construct
  source 1..80: mol_type = other DNA
cagaaaaaaaataattataaaacagtggcagccaaactttataagacgctgctacatcataggctatctgcctctaatat

SEQ ID NO: 148445 - DNA, 80 bp, synthetic construct
  source 1..80: mol_type = other DNA
cccctagatacaacctgtcctctcctcctttttaccccagctgcccttcaaaattcagcgaggagtgcgacccttccccc

SEQ ID NO: 148446 - DNA, 80 bp, synthetic construct
  source 1..80: mol_type = other DNA
cagcatcaggcaggagaaggtcttctcggcctccagggagatgggggccacaaacaggctccgggtggtgtgtgcggcca

SEQ ID NO: 148447 - DNA, 80 bp, synthetic construct
  source 1..80: mol_type = other DNA
gggtactgtacaaaattggccatatcattggaatccatgtagggggtaatggtagagatgggttctctgctatgatttta

SEQ ID NO: 148448 - DNA, 80 bp, synthetic construct
  source 1..80: mol_type = other DNA
cgccctccactccatctaacaccagcacaccatggcctactggagatggtggacaaggaggcgctggccgcggcggagat

SEQ ID NO: 148449 - DNA, 80 bp, synthetic construct
  source 1..80: mol_type = other DNA
ggctacagtgactttgtacaacaagagataggagactacacagacgcagaggcggtgggcttcgtctgtgtcatctgccc

SEQ ID NO: 148450 - DNA, 80 bp, synthetic construct
  source 1..80: mol_type = other DNA
attccggcagatgtacccaagtatgacttaatattcattaatgtccgcacccagtacatacatcaccactaccagcagtg

SEQ ID NO: 148451 - DNA, 80 bp, synthetic construct
  source 1..80: mol_type = other DNA
ttactttaagcccaagcatgtcagagcgtgggtccccaggccaccaagactgtgccagtatgaaaagcaaggtagtgtcg

SEQ ID NO: 148452 - DNA, 80 bp, synthetic construct
  source 1..80: mol_type = other DNA
tcacttagcggtgtctacctcttaaggtcaccaagcactccgagcgccagcgaggagtgcgaccctccaccaaggggcaa

SEQ ID NO: 148453 - DNA, 80 bp, synthetic construct
  source 1..80: mol_type = other DNA
gggaccaattgacatgaagaatccaccgccgcctgcaattacagatctactccaatcagttaggactcctgaagttatca

SEQ ID NO: 148454 - DNA, 80 bp, synthetic construct
  source 1..80: mol_type = other DNA
gagatctgtgaaaaaatggaaaaggaggggcagctagaagaagcatctcccactaatccatacaacacacccacctttgc

SEQ ID NO: 148455 - DNA, 80 bp, synthetic construct
  source 1..80: mol_type = other DNA
gctccggcgggggggggccggctgcagccgggtccgaggttccgcccctgtagctcgggggggcggccgggaggcccacc

SEQ ID NO: 148456 - DNA, 80 bp, synthetic construct
  source 1..80: mol_type = other DNA
acaaggaggaagatgccaactcgggcttcacatttaacctgttttatcaagattctttattgaccaagcatttccagtgc

SEQ ID NO: 148457 - DNA, 80 bp, synthetic construct
  source 1..80: mol_type = other DNA
gagaacctgcccctgtggagtctcctccacggttaccgagagtacctagagagccagatcaagtacggtgacatactcct

SEQ ID NO: 148458 - DNA, 80 bp, synthetic construct
  source 1..80: mol_type = other DNA
cgatctgcaggtgttaatggtgagcttattttaaccataccactcaacatgagtaacacattattctctaccactctgtt

SEQ ID NO: 148459 - DNA, 80 bp, synthetic construct
  source 1..80: mol_type = other DNA
ctgcacaatttttgacaactgatgatgctcaatctccatctgcacttccctacttccatcctactaaggagatatttatc

SEQ ID NO: 148460 - DNA, 80 bp, synthetic construct
  source 1..80: mol_type = other DNA
agagaggactgaacaagtggtcttactccaacgaccagctagacctagccagatacaagggctgcagactcacattttac

SEQ ID NO: 148461 - DNA, 80 bp, synthetic construct
  source 1..80: mol_type = other DNA
gttcgcctgttacgagacaccacacacatatcacaatcaactctaattgctgccacacaagggatagatgatgtcattga

SEQ ID NO: 148462 - DNA, 80 bp, synthetic construct
  source 1..80: mol_type = other DNA
acgcggactgtttggacaaagtgctgttagaagagtgtcagaaaaaccaggacatgatgcagagtattatgcgcctccaa

SEQ ID NO: 148463 - DNA, 80 bp, synthetic construct
  source 1..80: mol_type = other DNA
aggctaagcatatcaaagcatggtgccctagacctcccagagctgttgagtacactaatgtgcatgtcacaaactacaag

SEQ ID NO: 148464 - DNA, 80 bp, synthetic construct
  source 1..80: mol_type = other DNA
cacaacacccctcagctccaaccatgccatttatgcctgacttcaaaaatgtagacaatttccactctatggcctatgat

SEQ ID NO: 148465 - DNA, 80 bp, synthetic construct
  source 1..80: mol_type = other DNA
gccaggcgttttctgagcatacctggaaaatgcttctgtccgtttgccggtcgtgggcggcatggtgcaagttgaataac

SEQ ID NO: 148466 - DNA, 80 bp, synthetic construct
  source 1..80: mol_type = other DNA
tcctggaaaacaagtccagataaatggaatcaatgtcaatgttagcgattcatatgatctatataacaaagatggtgtta

SEQ ID NO: 148467 - DNA, 80 bp, synthetic construct
  source 1..80: mol_type = other DNA
agcccaaacacgtgcgggcttgggtgccaagaccaccacgcctgtgtccatacctgcgggcgggtgatataaactttgaa

SEQ ID NO: 148468 - DNA, 80 bp, synthetic construct
  source 1..80: mol_type = other DNA
ggaccaaaacaaaacacagcatttaatacttttaaaacacaagaacaccttagagagcctgctgcagaatctgcaaaaca

SEQ ID NO: 148469 - DNA, 80 bp, synthetic construct
  source 1..80: mol_type = other DNA
atcccgatggcgctgactgggctgactttgtgaacatcgtgtcctctgcccccttcattgtccccatggctgacgttaat

SEQ ID NO: 148470 - DNA, 80 bp, synthetic construct
  source 1..80: mol_type = other DNA
gactatggcaatcaggatagttaatgaatacgacccagtcacaattgatgcaaaagtcagggtttacatgaaaccaaagc

SEQ ID NO: 148471 - DNA, 80 bp, synthetic construct
  source 1..80: mol_type = other DNA
tggtcagaattcgccagaagcggggtatatggcataaacaccctgaacaacatgggaaccctttatgcaagacacgtgaa

SEQ ID NO: 148472 - DNA, 80 bp, synthetic construct
  source 1..80: mol_type = other DNA
gcacggcgcgggcgaggtggtgcgcctgtaccgctgcaaccggctgggcgtgggcaccccgcgcgcgacgctgctgcctc

SEQ ID NO: 148473 - DNA, 80 bp, synthetic construct
  source 1..80: mol_type = other DNA
agaaagggccactgccactgcccggtgtgccagctgaaccgcaagaacggtctggtagttcgcccctgatggcctgcgga

SEQ ID NO: 148474 - DNA, 80 bp, synthetic construct
  source 1..80: mol_type = other DNA
caggtggtcttctagcaacagagactttgacctggtgagataccacggcacagtcatgaaattctacagacacagcgact

SEQ ID NO: 148475 - DNA, 80 bp, synthetic construct
  source 1..80: mol_type = other DNA
tggattcgctccaccgcaagtgtttgctctgagtacaatttcaatagttactttaagtagacaattgtattacaatgggt

SEQ ID NO: 148476 - DNA, 80 bp, synthetic construct
  source 1..80: mol_type = other DNA
tatctaacaccacaagacgccactgctatagacaaaccaaccaggcctgacacttcttccaatagattttacacactgga

SEQ ID NO: 148477 - DNA, 80 bp, synthetic construct
  source 1..80: mol_type = other DNA
aggcaacagactcaggggatgcattctatgggttagtgtccataaatgactttggagccctagctgttagagtggtcaat

SEQ ID NO: 148478 - DNA, 80 bp, synthetic construct
  source 1..80: mol_type = other DNA
acaaactcaaactagagaccagttaattagcaaaatacaaagcaatgcagaaaatgtattaaagaaagtaaaccaagaat

SEQ ID NO: 148479 - DNA, 80 bp, synthetic construct
  source 1..80: mol_type = other DNA
tggggtattgcaattctccccctatcaccattggattttgcacaagactcatcagtggagatacccattacagtcacaat

SEQ ID NO: 148480 - DNA, 80 bp, synthetic construct
  source 1..80: mol_type = other DNA
tcgatcaccttaccccaggccgaggccccttcctcatacagcgggtggctatctatccataggcaggcatccggcgtctt

SEQ ID NO: 148481 - DNA, 80 bp, synthetic construct
  source 1..80: mol_type = other DNA
gccagtaggacgagcgtgaacagcaagcgcaacatgctgcgcgggttaggaaatgcggcgtgccggccaccgcccgactc

SEQ ID NO: 148482 - DNA, 80 bp, synthetic construct
  source 1..80: mol_type = other DNA
actacgaacaatccgcaatgaagatgcactggggtacctgttatgccagcctatgctcactggaacatcatcagggaaaa

SEQ ID NO: 148483 - DNA, 80 bp, synthetic construct
  source 1..80: mol_type = other DNA
aagctagtggtcatcggctcgtatcccgaagtgcacgagccgcgtgtggtcacgcatgccgcggaacgcgtctccgaaga

SEQ ID NO: 148484 - DNA, 80 bp, synthetic construct
  source 1..80: mol_type = other DNA
taaccagtgggtaaaatctagctttaaagtaccaggcacatctgttcactacaacttttgcacatacaaacctgataatc

SEQ ID NO: 148485 - DNA, 80 bp, synthetic construct
  source 1..80: mol_type = other DNA
ccaatagtaacaacaaacttttaggagaccacgttacagagcttaaatcaaatggtagcttttatactggaaataatcca

SEQ ID NO: 148486 - DNA, 80 bp, synthetic construct
  source 1..80: mol_type = other DNA
gggacctcgggctccagtcttcatgcaccatgttagctccctggatttccaacactgtttacaggaggtgtgtgaaggat

SEQ ID NO: 148487 - DNA, 80 bp, synthetic construct
  source 1..80: mol_type = other DNA
tggtagtatacaccccatatggttccaggctctcaaggaagtactgtccaatttaggatttcaacctgacttaatagaca

SEQ ID NO: 148488 - DNA, 80 bp, synthetic construct
  source 1..80: mol_type = other DNA
ggccccctcgtaccaaactcacagaccctcctttctacccctactgcaaaaacaattacaatgtaacctttcagctcaac

SEQ ID NO: 148489 - DNA, 80 bp, synthetic construct
  source 1..80: mol_type = other DNA
ccatgacatcgttaaacaattgggctcacagtacgcatcgccatagagctcccgggtggaacttagacacatgttacaat

SEQ ID NO: 148490 - DNA, 80 bp, synthetic construct
  source 1..80: mol_type = other DNA
tggcagtaggtagcaataacagcacatacatgggacttcctgacttgacacttcaagcaatgtacatccccccagtgggt

SEQ ID NO: 148491 - DNA, 80 bp, synthetic construct
  source 1..80: mol_type = other DNA
cttaatctgtgtcatctgtccatacacatttcccccaatgtttaacaaagtaaaacccacctggggatatgtgttttatg

SEQ ID NO: 148492 - DNA, 80 bp, synthetic construct
  source 1..80: mol_type = other DNA
tttgctgcccgtccgcagagaggagccacggcaggggatccgaacgtcccgagggcgggtgccgtaggtgagtttacaca

SEQ ID NO: 148493 - DNA, 80 bp, synthetic construct
  source 1..80: mol_type = other DNA
accgccagaagacgcctcgtgtacactccaaagagaatcgagaccctggtcgacggaagaagaagaaacagagagcgaag

SEQ ID NO: 148494 - DNA, 80 bp, synthetic construct
  source 1..80: mol_type = other DNA
gtcttgtctttgtgccaactcatgtggcataatggagaagaagcatacaaggagtttgtgtgcaaaatacgcagtgttag

SEQ ID NO: 148495 - DNA, 80 bp, synthetic construct
  source 1..80: mol_type = other DNA
gaagattccacatatgactccacacgcagcaagtgtatgctaaaagacctgccactatacatgctattctatggctatgc

SEQ ID NO: 148496 - DNA, 80 bp, synthetic construct
  source 1..80: mol_type = other DNA
gggtatataacgtgttggtatcaaacaaattttgtttttcccccaaatactcctaatacagccaacatgttgtgttttgt

SEQ ID NO: 148497 - DNA, 80 bp, synthetic construct
  source 1..80: mol_type = other DNA
tacgccactttacttatcttgctgaaaggtatggtctcgcccccggcccgagagctcctggggccccgccagtagctccc

SEQ ID NO: 148498 - DNA, 80 bp, synthetic construct
  source 1..80: mol_type = other DNA
cgcacataccttagacgcggacttaaaaagagaaaaaggagaaaaaaactcagactgactcagtggaaccctagcacaat

SEQ ID NO: 148499 - DNA, 80 bp, synthetic construct
  source 1..80: mol_type = other DNA
tcactggtaacgcatttgtattcccccaccaaataataaatctgaggactaacaactcagccaccttggtgttgccatac

SEQ ID NO: 148500 - DNA, 80 bp, synthetic construct
  source 1..80: mol_type = other DNA
gtgcctggcgatactatgcagactaggcatgtagtaaacaaacatgtgcgatccgagtccaccattgaaaattttcttgc

SEQ ID NO: 148501 - DNA, 80 bp, synthetic construct
  source 1..80: mol_type = other DNA
ggagaagtacagtaccaaagaacgacaacgcattactcttggatgctgattatcgttatcattttcatcatttttattat

SEQ ID NO: 148502 - DNA, 80 bp, synthetic construct
  source 1..80: mol_type = other DNA
gtcatgtccatcacaagagcaacaggaagttctcttcaacaacattagatggttggcgctgaaggctagaaaattcgcac

SEQ ID NO: 148503 - DNA, 80 bp, synthetic construct
  source 1..80: mol_type = other DNA
gaaaaaagggaacagcttttcaacaatgtcttatggctagagcagatgtcccaaaaatttgccccactatatgcagtaga

SEQ ID NO: 148504 - DNA, 80 bp, synthetic construct
  source 1..80: mol_type = other DNA
cccagacccccgggcgctcctcagccgccgccagtgaggcccctgccggccctgccggctccggagcccccggctgaccg

SEQ ID NO: 148505 - DNA, 80 bp, synthetic construct
  source 1..80: mol_type = other DNA
cccccggtagcaacttcttcggagtccggcgctacgccttcggctgcgccggacacctcagaccccccctccacccgaaa

SEQ ID NO: 148506 - DNA, 80 bp, synthetic construct
  source 1..80: mol_type = other DNA
catcattgacacagtggcccataatgctcttcagttatctcagcctaagccttcacaaaagccagcgatagccaatacag

SEQ ID NO: 148507 - DNA, 80 bp, synthetic construct
  source 1..80: mol_type = other DNA
cagtttaatacaggtgcaaatcaacactacaacttctgtaactacaaacctgactatcagaagttagaatggcttagaaa

SEQ ID NO: 148508 - DNA, 80 bp, synthetic construct
  source 1..80: mol_type = other DNA
ccccgaggacggcggctcgcaaactccctcagcccgcaaacctcccgcaaacctcaaacccccctcagccctgccgccaa

SEQ ID NO: 148509 - DNA, 80 bp, synthetic construct
  source 1..80: mol_type = other DNA
agacatacaaataacgtggagggagatgggatcagttacaggaatagtatgtgtacgatatgagtatgtcatcggtgtaa

SEQ ID NO: 148510 - DNA, 80 bp, synthetic construct
  source 1..80: mol_type = other DNA
aaggaatagatcttgacaagttgaaagtaatagcctatggagatgaccttattgtttcttatccatttgaattacaacca

SEQ ID NO: 148511 - DNA, 80 bp, synthetic construct
  source 1..80: mol_type = other DNA
agccgagaacagtgaaataaagatctttgccaagccaaaacacacaacagcttggatccctcgacctcccagagccaccc

SEQ ID NO: 148512 - DNA, 80 bp, synthetic construct
  source 1..80: mol_type = other DNA
ggctctactgcattaaccgaaagcaaagcacagaacattaaatttccactaaataaaaacaaccctgaacacagagacac

SEQ ID NO: 148513 - DNA, 80 bp, synthetic construct
  source 1..80: mol_type = other DNA
ctggttctgcagttgggtgtgaccctgacacattctggtcaaaaattccactcatgcttgatggagagtgccttatggcc

SEQ ID NO: 148514 - DNA, 80 bp, synthetic construct
  source 1..80: mol_type = other DNA
ggaggacgccggacttcctaacagaagcaattgttcattctgtatttattttaagctattatacaaatcatgatttaaaa

SEQ ID NO: 148515 - DNA, 80 bp, synthetic construct
  source 1..80: mol_type = other DNA
cactaaaattcccaaaacagggtcacgggtctctatctcttttatttgcttactttactggtgagttgaatattcatgtt

SEQ ID NO: 148516 - DNA, 80 bp, synthetic construct
  source 1..80: mol_type = other DNA
gttacagtatataacaccacacaaacagcagcacaactctctaaatttttacctagtaacaacacaaatccattaatatc

SEQ ID NO: 148517 - DNA, 80 bp, synthetic construct
  source 1..80: mol_type = other DNA
taaacagtcaagaagtaccagctctcaccgcagttgagaccggtgcatcaggacaggcagtcccttcagatgtcgttgaa

SEQ ID NO: 148518 - DNA, 80 bp, synthetic construct
  source 1..80: mol_type = other DNA
gcaatcctcccacgtggcttaccacgtggtgtgtgcgtcacaaccgccattttgtatcacaaaatggccgacttccttcc

SEQ ID NO: 148519 - DNA, 80 bp, synthetic construct
  source 1..80: mol_type = other DNA
aggatgaatatacgagtgcaggatatgtaacttgctggtatcaaactagtttggttgtcccgcccggcgctcccgccacg

SEQ ID NO: 148520 - DNA, 80 bp, synthetic construct
  source 1..80: mol_type = other DNA
agactttccaggcctatactgggaagcagtttacaacccattaaacgataaaggagtaggaaacaaagtttggatagact

SEQ ID NO: 148521 - DNA, 80 bp, synthetic construct
  source 1..80: mol_type = other DNA
ctcgatggcttcctcccgtcgacaaccaagaccgagaagaagactacacttcggagagagagagctcggagtcctcgcaa

SEQ ID NO: 148522 - DNA, 80 bp, synthetic construct
  source 1..80: mol_type = other DNA
ctcaggattggagagcaagactaaactcaaggcccccacactacgtgcagttgtgacacaagggcctaacaccgagttcg

SEQ ID NO: 148523 - DNA, 80 bp, synthetic construct
  source 1..80: mol_type = other DNA
taacccaaagcaaggctatgtattttatgacactttatttggagatggaaaaatgcccacaggaactggcctggtacctt

SEQ ID NO: 148524 - DNA, 80 bp, synthetic construct
  source 1..80: mol_type = other DNA
gtggggccagacttcgccatagggcctttaacttccgggtgcgtctggtggccgccattttagcttcggccgccatttta

SEQ ID NO: 148525 - DNA, 80 bp, synthetic construct
  source 1..80: mol_type = other DNA
caatgaatagtgtctcaggcaaggcaaataccatggacatgtataggattccactgaacaccgatggtagcaaggacccc

SEQ ID NO: 148526 - DNA, 80 bp, synthetic construct
  source 1..80: mol_type = other DNA
agaagaccgcgttatacaaaacttcccaaatacgacccagatgaattttaacatgcacatcaataaacttttgtttttat

SEQ ID NO: 148527 - DNA, 80 bp, synthetic construct
  source 1..80: mol_type = other DNA
taccattgacactgtcattaacaatgccctacaactatctcaaccacagccaaataagcagttgacagctcagtctaccc

SEQ ID NO: 148528 - DNA, 80 bp, synthetic construct
  source 1..80: mol_type = other DNA
tgggctaaggcctgggacctttgccatcagttcggtccatgggatggtgtaatgcgaagcatgcccctctatgtccaggt

SEQ ID NO: 148529 - DNA, 80 bp, synthetic construct
  source 1..80: mol_type = other DNA
tgctccacccatgtctacgactccctgtggtacaccatgattggtgggaacccctctgggtgtgttgggacctccatcct

SEQ ID NO: 148530 - DNA, 80 bp, synthetic construct
  source 1..80: mol_type = other DNA
cagtaagaacctaccacacagacacccctttctacccctggatgcctaagccccccaatcagtttcgtgtaaccttcaaa

SEQ ID NO: 148531 - DNA, 80 bp, synthetic construct
  source 1..80: mol_type = other DNA
accacctggcgcgccgcgtccaagtaagtgggatgactatacgtggcagtcttccagcaacccatcaatattctacacat

SEQ ID NO: 148532 - DNA, 80 bp, synthetic construct
  source 1..80: mol_type = other DNA
tgatgatgttataccagattgtgattgtacaacgggtacatattactgcaagagcaaagaccgctattatcccatagaag

SEQ ID NO: 148533 - DNA, 80 bp, synthetic construct
  source 1..80: mol_type = other DNA
ggtacggtgggaggcatgtacacagatggaacaaaagcagaagtaacgtgagacggagcatatagtccagtatccagcgg

SEQ ID NO: 148534 - DNA, 80 bp, synthetic construct
  source 1..80: mol_type = other DNA
agggatggatcaaacaatccaaacattcaaaaatagaacgtgacttcaattatgtgcagtactgcttaaactgtgtaggt

SEQ ID NO: 148535 - DNA, 80 bp, synthetic construct
  source 1..80: mol_type = other DNA
acttagaagcttgagcaatcgcccaataggacatgaccactccatggttatgaagggcaagcacttctgtttccccgggt

SEQ ID NO: 148536 - DNA, 80 bp, synthetic construct
  source 1..80: mol_type = other DNA
cagctcgagctacgagtcctacaagtacggcggttgtctcagctgccgcttccagagcaaactcacgagcttcccgcgct

SEQ ID NO: 148537 - DNA, 80 bp, synthetic construct
  source 1..80: mol_type = other DNA
tagtagttaagattcccccccccaaactgttcgttgataagtggtatgcacaggaggacctgtgcgacgttaatcttgta

SEQ ID NO: 148538 - DNA, 80 bp, synthetic construct
  source 1..80: mol_type = other DNA
tgggtctactccaatcgacctctttacctacaatcttattgccacagttttactggttagaagtgtgtttcacaatgggc

SEQ ID NO: 148539 - DNA, 80 bp, synthetic construct
  source 1..80: mol_type = other DNA
cacttacgagtggggagcgagctagcacattccaagcaaccactaatagtaaccagaacgacgtgcaaaacgtggtacac

SEQ ID NO: 148540 - DNA, 80 bp, synthetic construct
  source 1..80: mol_type = other DNA
tgtgtattaatacatggtacacctggctctggaaagtctctaacaacatcaattgtaggacgagcacttgcagagtactt

SEQ ID NO: 148541 - DNA, 80 bp, synthetic construct
  source 1..80: mol_type = other DNA
ttcagactcggattccactgaaccccgccgataaaataaagctgctttcactgtacgttggccgtgggagtttcacttag

SEQ ID NO: 148542 - DNA, 80 bp, synthetic construct
  source 1..80: mol_type = other DNA
agaccccgcaccgtccgtctgccttgtggtttggcttgcctgcgtgtactcactgctgattctggtcgttttgctgctca

SEQ ID NO: 148543 - DNA, 80 bp, synthetic construct
  source 1..80: mol_type = other DNA
tccccaagggacccagcggaggtgggcacgggagcatggtgttcaacctgtcctttctgtaccaagagtttaagaagcac

SEQ ID NO: 148544 - DNA, 80 bp, synthetic construct
  source 1..80: mol_type = other DNA
tgacactccagacaaaatgtacgacagctgggttatcaataccagacaagttgcccagttacggaggaaattggaattct

SEQ ID NO: 148545 - DNA, 80 bp, synthetic construct
  source 1..80: mol_type = other DNA
cataaagacaacacccccaccacctgctatagcggatttgcttcggtctgtcgacagtgatcaagtgcgagagtactgta

SEQ ID NO: 148546 - DNA, 80 bp, synthetic construct
  source 1..80: mol_type = other DNA
agtgatttcgtcttggcatctaccaatttggcctccctcctaccacaaacagtacaaactcccgaggccctcttgaggcg

SEQ ID NO: 148547 - DNA, 80 bp, synthetic construct
  source 1..80: mol_type = other DNA
tttggacaccagaaccgagcagtatatgttgctggttacaaaataatcaattatcatttggccactgcagaagacttcag

SEQ ID NO: 148548 - DNA, 80 bp, synthetic construct
  source 1..80: mol_type = other DNA
aatttgcccacatcaatggatcaatctcagaaccaacaattgtgctacaattatcatgccctacattaatagtgtgcctt

SEQ ID NO: 148549 - DNA, 80 bp, synthetic construct
  source 1..80: mol_type = other DNA
gaggattcatcaattcttagaatcgtcgtctttttggctaattggactttgcccatgttggttgtcattcgtggcctgag

SEQ ID NO: 148550 - DNA, 80 bp, synthetic construct
  source 1..80: mol_type = other DNA
taacggggggcgtcaagagtgggagaccatcacttaagtttaaggctgcccttgagcgtcaagccgctgcgggcttgcga

SEQ ID NO: 148551 - DNA, 80 bp, synthetic construct
  source 1..80: mol_type = other DNA
caaaccccagtgttttctttgaagtcggcaaaatggctaggtttagtgtgccgttcataggcattgcatcagcctacaac

SEQ ID NO: 148552 - DNA, 80 bp, synthetic construct
  source 1..80: mol_type = other DNA
gtaaacaaattaccaccatcttcaatacatgtttaaaagatgaacttagaaaattagacaaagatacagctggaaaaaat

SEQ ID NO: 148553 - DNA, 80 bp, synthetic construct
  source 1..80: mol_type = other DNA
aagaaagctcatctttcagagtccagcgacagctccagccctggatccagtccagtcaagaaacgcaaagcagccaagaa

SEQ ID NO: 148554 - DNA, 80 bp, synthetic construct
  source 1..80: mol_type = other DNA
ccgccttcaacaggcctccccgctcagacctgagcagaccccctcactacccctactttccaacctcctgcaaggtctcc

SEQ ID NO: 148555 - DNA, 80 bp, synthetic construct
  source 1..80: mol_type = other DNA
tttatctacctcttcagaagacaaatttatagatgattttctaaacgctgcttttccagacgacaaaccaagacatgcaa

SEQ ID NO: 148556 - DNA, 80 bp, synthetic construct
  source 1..80: mol_type = other DNA
cgtaccaatttcaagattcaaaataaagatatcaaaacaggaattaaatctagagcaattatcacaacagctggtcctag

SEQ ID NO: 148557 - DNA, 80 bp, synthetic construct
  source 1..80: mol_type = other DNA
aaaccaaaacccactatcacaagacttaaaaaactggattcaaacacagttccccacgggaaacaacagcacatttggtt

SEQ ID NO: 148558 - DNA, 80 bp, synthetic construct
  source 1..80: mol_type = other DNA
atggagaacctggaactggcaaatctataactacttcaatccttgctcgcatgcttacaactgaatcagatatatactct

SEQ ID NO: 148559 - DNA, 80 bp, synthetic construct
  source 1..80: mol_type = other DNA
atctctggactgaagtacgggttaacaataactcctgcagacaaatcgagtcagtttgtaaaaattgattggaataacgc

SEQ ID NO: 148560 - DNA, 80 bp, synthetic construct
  source 1..80: mol_type = other DNA
ttaaaaatttgatcaagattatctcatccttagttatcattaccaggaattatgaggacactaccactgtactagctact

SEQ ID NO: 148561 - DNA, 80 bp, synthetic construct
  source 1..80: mol_type = other DNA
actgttccccgagtaaccgggacgcggaacgtgacggttgctgaggggaaaggcaacagagaaggtacaaacccaccggc

SEQ ID NO: 148562 - DNA, 80 bp, synthetic construct
  source 1..80: mol_type = other DNA
ctcacccgggtgaacagggcagagaaatagatccaaaccggaggtcaactgataacaagagacccagtgatgacaattgg

SEQ ID NO: 148563 - DNA, 80 bp, synthetic construct
  source 1..80: mol_type = other DNA
agactttgtcagtgatagtcccaacaacaatggagctattgtagccacttgttcggggtgcccagatatatccgtacgca

SEQ ID NO: 148564 - DNA, 80 bp, synthetic construct
  source 1..80: mol_type = other DNA
gaattctgtacaaaattggacaagtcctggggatccatgttggaggcaatgggagagatggatttgctgctatgctatta

SEQ ID NO: 148565 - DNA, 80 bp, synthetic construct
  source 1..80: mol_type = other DNA
ggattagccagacccattacagactagtgcaccaagatgaatacaccagtgctggtaatgtgacgtgctggtatcagact

SEQ ID NO: 148566 - DNA, 80 bp, synthetic construct
  source 1..80: mol_type = other DNA
tcagagaaaccaggagatgatggcagctatactgtcccgtacaaaaagcccagatattttccacccacagagcgcctcca

SEQ ID NO: 148567 - DNA, 80 bp, synthetic construct
  source 1..80: mol_type = other DNA
cggacggacagacgcccaataccagtagacagtctagagagatacaaatcgttgacccgctcaccatgggaccccgatat

SEQ ID NO: 148568 - DNA, 80 bp, synthetic construct
  source 1..80: mol_type = other DNA
cccagtctgcttaccagacccaggggcagaaaaaaaatatcagttagaataggtccccccagactattcacagaccactg

SEQ ID NO: 148569 - DNA, 80 bp, synthetic construct
  source 1..80: mol_type = other DNA
atctagcaatggcattcaagcggcctatgcgcttctatccctcagacaaccccttctacccgtggttaccccccaagcga

SEQ ID NO: 148570 - DNA, 80 bp, synthetic construct
  source 1..80: mol_type = other DNA
tacaagttgttgacccacgcaccatgggcccccaatgggtattccacacctttgactacagacgggggctatttggaaag

SEQ ID NO: 148571 - DNA, 80 bp, synthetic construct
  source 1..80: mol_type = other DNA
accactctggtggcatcaaaacccgagagggaactgaaagtacaaaaacaatcagttacactgtgaaatcctgcaaaggt

SEQ ID NO: 148572 - DNA, 80 bp, synthetic construct
  source 1..80: mol_type = other DNA
aaaagtgagcaccatgaaaacgatagaagcgctccatgtccgtgtattcactttatccacgtgcgagggggccatggcga

SEQ ID NO: 148573 - DNA, 80 bp, synthetic construct
  source 1..80: mol_type = other DNA
gacatgcaatcaccctgtgcattaccgtggtatcaccccactaaggaaatatccatcccaggtgaagtaaagaatctcat

SEQ ID NO: 148574 - DNA, 80 bp, synthetic construct
  source 1..80: mol_type = other DNA
agctgactcacacaagtcctcagtttactcacttccaccagatccaaaacattttgatggttaccaacaacaagctgttg

SEQ ID NO: 148575 - DNA, 80 bp, synthetic construct
  source 1..80: mol_type = other DNA
accaacagaactttatgaatgacattgtacagtcaggaccctttgcataccacggagaagaaaaaagctgcactctaact

SEQ ID NO: 148576 - DNA, 80 bp, synthetic construct
  source 1..80: mol_type = other DNA
tgcgtgcagtgtccttacacttgcccacccctatataacaaagacaagccaaacatggggtacgtggtgtatgacagcaa

SEQ ID NO: 148577 - DNA, 80 bp, synthetic construct
  source 1..80: mol_type = other DNA
gccagtggactgtctaattaagaaatcagcttccaaatatagagtaaataaattccaagtgaataatgaactatggcaag

SEQ ID NO: 148578 - DNA, 80 bp, synthetic construct
  source 1..80: mol_type = other DNA
gtttgacaaggtgtgaagagccccgtgtgctcattttgattcctccggcccctgaatgtggctaaccttaaccctgcagc

SEQ ID NO: 148579 - DNA, 80 bp, synthetic construct
  source 1..80: mol_type = other DNA
gtcccgacggacccttcccgggctggccttggtcacctgcggggagacgagactgaaagccgcgtgacgctgttgttgct

SEQ ID NO: 148580 - DNA, 80 bp, synthetic construct
  source 1..80: mol_type = other DNA
cagactgcctgagagatatgggtctgtttggtcagaatatgtattatcatgctatggggaggactggttacattgtacac

SEQ ID NO: 148581 - DNA, 80 bp, synthetic construct
  source 1..80: mol_type = other DNA
accaggctacctcacagtgtccaaagtaccctatcctaacacagaaaacaatggcaatgacaatgtactaaacgccatta

SEQ ID NO: 148582 - DNA, 80 bp, synthetic construct
  source 1..80: mol_type = other DNA
acaatccctcattgtccccacaggcgaggtcaaacccggtgtcaacatcaaccggatgtctcgcctccacccctcccccg

SEQ ID NO: 148583 - DNA, 80 bp, synthetic construct
  source 1..80: mol_type = other DNA
gccaagagacgcaaagctccgaagaagagacgcaggcgcaggggtcggtacaagaccaactactcctccagctccgagag

SEQ ID NO: 148584 - DNA, 80 bp, synthetic construct
  source 1..80: mol_type = other DNA
tacacctggcagtcatctaccaacccctctgtcttctacaccacaggcaatgccagcccacgcatgtctataccctttgt

SEQ ID NO: 148585 - DNA, 80 bp, synthetic construct
  source 1..80: mol_type = other DNA
acgaagtcaccctacgaacatcccaaccgtgtcatattgtggatggacacggctacttcttactggcaagatgtccccct

SEQ ID NO: 148586 - DNA, 80 bp, synthetic construct
  source 1..80: mol_type = other DNA
catacgaagggtgccacggaggcggagcgcgagtacctgtatcgggacctgcacagcaagtggggcgtgcacctgtttac

SEQ ID NO: 148587 - DNA, 80 bp, synthetic construct
  source 1..80: mol_type = other DNA
tcagggcccaagggggttcgcgttgctaggccaccttctcagtccagcgcgtttacgtaagccagacagcagccaattgt

SEQ ID NO: 148588 - DNA, 80 bp, synthetic construct
  source 1..80: mol_type = other DNA
cgccttaaagagaggatacttttgtagtgagcagggtgagattcaatggatgaaacccaacaaagaaactggcagattga

SEQ ID NO: 148589 - DNA, 80 bp, synthetic construct
  source 1..80: mol_type = other DNA
ctgagtctctcccctgcttctgatcaaagacttcaatacaccatgttaggggaaatcctgaattattatacacattggac

SEQ ID NO: 148590 - DNA, 80 bp, synthetic construct
  source 1..80: mol_type = other DNA
atcaaacaagagatgaaacaagtattgagagtttcttgggtaggtcaggatgtatagctatgatagaattcagtacaagt

SEQ ID NO: 148591 - DNA, 80 bp, synthetic construct
  source 1..80: mol_type = other DNA
agtgcacaatattggggttcgtgtcggcatgtaatgatttttccgtgcggttgctgcgcgatacaccattcatcagccaa

SEQ ID NO: 148592 - DNA, 80 bp, synthetic construct
  source 1..80: mol_type = other DNA
cacatacaggttgcagtggcacattactcagctcaattagcaacactagatatagatccacagccaatcgcaatggaaga

SEQ ID NO: 148593 - DNA, 80 bp, synthetic construct
  source 1..80: mol_type = other DNA
tcttgaaaactctcacttttgtcataatactaaacactgcaaaatgggagcacaggtgtcgacccaaaaaaccggagctc

SEQ ID NO: 148594 - DNA, 80 bp, synthetic construct
  source 1..80: mol_type = other DNA
cttaaatagctatgtttttcggtaggcctcacagaaagaagaggtcactgtcactgcctagcttgccagctgcaaagaaa

SEQ ID NO: 148595 - DNA, 80 bp, synthetic construct
  source 1..80: mol_type = other DNA
gaaatatttcccgatggaggccccgagggaaaacatttccaccacctccacttacctacccctcggcggtgatgccaaag

SEQ ID NO: 148596 - DNA, 80 bp, synthetic construct
  source 1..80: mol_type = other DNA
tatcagttagaaaatatatggtagaaattttgattgaagtaaagaagagcggtgtttctaggggaagactaaacgagatg

SEQ ID NO: 148597 - DNA, 80 bp, synthetic construct
  source 1..80: mol_type = other DNA
aaaaaattctttgacaacagagactccttatttctctttgccacttaccacccagcaaacatactcaaggaactgaaaac

SEQ ID NO: 148598 - DNA, 80 bp, synthetic construct
  source 1..80: mol_type = other DNA
acctcactaaaccagacacggagttcgaccctgcacagtgcaaatgtgtcctactagacatgccactgtgggccgccttc

SEQ ID NO: 148599 - DNA, 80 bp, synthetic construct
  source 1..80: mol_type = other DNA
gggcccggtgccagtccatctggcaaattaccgatgacgatacgcggtgtacacagcgccaccgtttcgctgttttcctg

SEQ ID NO: 148600 - DNA, 80 bp, synthetic construct
  source 1..80: mol_type = other DNA
ttgattatcatatttttgggacacaacaccgtaaagccgttgcgctcgtggaggcgcatgaagggttgcgggttgcgggt

SEQ ID NO: 148601 - DNA, 80 bp, synthetic construct
  source 1..80: mol_type = other DNA
aactgtgtgacatgcccctactaacgatctatgcaaccgcaacggatatgcaacatccgttcggctcaccactaactgac

SEQ ID NO: 148602 - DNA, 80 bp, synthetic construct
  source 1..80: mol_type = other DNA
actgaagaattaacactcaaggaagctctttatggcgtagatgggttagaacccatagacataacaaccagtgcaggtta

SEQ ID NO: 148603 - DNA, 80 bp, synthetic construct
  source 1..80: mol_type = other DNA
aaaaccaaacccagagggagcggcaaaattagagtagtaataaaaccccccactctgttagtagataagtggtactttca

SEQ ID NO: 148604 - DNA, 80 bp, synthetic construct
  source 1..80: mol_type = other DNA
atttactacgcaaagcctattagcgttctggaagttcactggctggtcgttccgctagactaacccgtctagtagacctg

SEQ ID NO: 148605 - DNA, 80 bp, synthetic construct
  source 1..80: mol_type = other DNA
caggctttagaggaagtactggtagtaccagacacacaggcatcaggaccagttcacaccaccaaacctcaaactttggg

SEQ ID NO: 148606 - DNA, 80 bp, synthetic construct
  source 1..80: mol_type = other DNA
caggtgtggggtttattattgtgaatccagaagaaagtattaccctgtcactttcaccggtccaacatttcgattcatgg

SEQ ID NO: 148607 - DNA, 80 bp, synthetic construct
  source 1..80: mol_type = other DNA
cagctcccaccgactcgggacaggtcaagtaccagccttacaagcagcagaaacgggtgcaacctcaaatgccactgatg

SEQ ID NO: 148608 - DNA, 80 bp, synthetic construct
  source 1..80: mol_type = other DNA
ggaagcagtaggagtatcatcttcgagagatgctctcccgaatactgaacacagtgggcctgcacattccaaagagattc

SEQ ID NO: 148609 - DNA, 80 bp, synthetic construct
  source 1..80: mol_type = other DNA
aaccgtggtccgctctgagccggctccgccgtcggaaacccgacgagacaacaatgacacgtcttacttcagcggcacct

SEQ ID NO: 148610 - DNA, 80 bp, synthetic construct
  source 1..80: mol_type = other DNA
gctggttctacagtagaaagggatttcaactatgttcattacatactaaattgcttgggtagccttatcatcattctagg

SEQ ID NO: 148611 - DNA, 80 bp, synthetic construct
  source 1..80: mol_type = other DNA
caacagttccacatcggtgtaattggatgtctggtacttatcactggcgtcgttataacattgtaaaacaagttttcgaa

SEQ ID NO: 148612 - DNA, 80 bp, synthetic construct
  source 1..80: mol_type = other DNA
cgtcgtcgtcctccagttctggctcttcttcatccaccgcaatgtctacgctgctttgagattcctcttcgtacaggatg

SEQ ID NO: 148613 - DNA, 80 bp, synthetic construct
  source 1..80: mol_type = other DNA
ggtgttgcgctgcagacagagtgttgcggggacggggggttgcggagacagggggtgtgcgggacagtgagtgtacgggg

SEQ ID NO: 148614 - DNA, 80 bp, synthetic construct
  source 1..80: mol_type = other DNA
aaaaaccacaagacagatcagaattaattaaaaagattatacagaacgcaaagaatgttctaacaaaagtaaaccaagaa

SEQ ID NO: 148615 - DNA, 80 bp, synthetic construct
  source 1..80: mol_type = other DNA
tttcgccacccctgggtttcgccagagagcaacaccccagtaacgacattccaagtgttgaaagagttctattacaacag

SEQ ID NO: 148616 - DNA, 80 bp, synthetic construct
  source 1..80: mol_type = other DNA
gaaatagggccttgccatcaatcggtggcctgggagagtgatgggagcggccaatcccggggtaactgtcacgtcccgcg

SEQ ID NO: 148617 - DNA, 80 bp, synthetic construct
  source 1..80: mol_type = other DNA
atcaccaccggtgataagaatcccagtaaactaatcaggttagacaccaacacatggcaaaagtcatgggctagaaaaca

SEQ ID NO: 148618 - DNA, 80 bp, synthetic construct
  source 1..80: mol_type = other DNA
agcgccccacctttccgcaccgtacttagcgtgaccggtagcaaacattctgtgggacatgtggggagaaaactcaacag

SEQ ID NO: 148619 - DNA, 80 bp, synthetic construct
  source 1..80: mol_type = other DNA
aagtctggtttgactggtgcacaaaaaatgacactagctggaaagacatacccggcagagtcccaatacaagatgtacca

SEQ ID NO: 148620 - DNA, 80 bp, synthetic construct
  source 1..80: mol_type = other DNA
gccacatacaagacaactgctagtaaacccgaagatcaatttgtacggtggccaatctcatacagacaagtagctcagct

SEQ ID NO: 148621 - DNA, 80 bp, synthetic construct
  source 1..80: mol_type = other DNA
tcaaccttaccccagattttctttgccttttctcagcattgcatctgcttactacatgttctatgatggatatgatggag

SEQ ID NO: 148622 - DNA, 80 bp, synthetic construct
  source 1..80: mol_type = other DNA
attataattttactctaatggtgattccttttgccaagttggagcactcccctcaagcttccacgtacgttccaatcacc

SEQ ID NO: 148623 - DNA, 80 bp, synthetic construct
  source 1..80: mol_type = other DNA
aaagtacacaaaagaagaaccatatccctttgaatactacacaggactatacagtagcatattccttagtgcaggcaggt

SEQ ID NO: 148624 - DNA, 80 bp, synthetic construct
  source 1..80: mol_type = other DNA
agacagccaccaacccgtcggtgtttgtaaaactgtctgaccccccggctcaagtctccgtcccgtttatgtcacctgct

SEQ ID NO: 148625 - DNA, 80 bp, synthetic construct
  source 1..80: mol_type = other DNA
gaaattaatagcttaaattcagaacaaaaaataaaagagtttttagatgctgctatgcctaatgagcgctcagcaaacat

SEQ ID NO: 148626 - DNA, 80 bp, synthetic construct
  source 1..80: mol_type = other DNA
gacaagcctactcaaccagatacttcatcaaatagattttataccttggagagcaagatgtgggatagtcaatccaaagg

SEQ ID NO: 148627 - DNA, 80 bp, synthetic construct
  source 1..80: mol_type = other DNA
cccgatggaggccccgagggaaaacatttccaccacttccacttacttacccctcggtggtgatgccaaaggcgtcgtca

SEQ ID NO: 148628 - DNA, 80 bp, synthetic construct
  source 1..80: mol_type = other DNA
gattgaaggcatcttcttcattagctccttctacagcatagccctgctgcgggtccggggcctaatgcctggcatctgcc

SEQ ID NO: 148629 - DNA, 80 bp, synthetic construct
  source 1..80: mol_type = other DNA
cctctcggaagaagaggagacgagctccgtccaccagcagctcaggcagcagctcaaggagcaaaagcagctcagacagg

SEQ ID NO: 148630 - DNA, 80 bp, synthetic construct
  source 1..80: mol_type = other DNA
taattgtgatggcacattaatgggcaacttaccaatattcccacaccagttcattaacctccgaactaacaattctgcaa

SEQ ID NO: 148631 - DNA, 80 bp, synthetic construct
  source 1..80: mol_type = other DNA
caatagcactgtcacccctccggctgccaccaccaccaatgccacccttctgattaacgagaacaacacatgtgtacaaa

SEQ ID NO: 148632 - DNA, 80 bp, synthetic construct
  source 1..80: mol_type = other DNA
tcaaaatcagtgtaatgatacctggtactatggaaaaacttatacaaccaatataacaaacgcagcaaaaaaaattagaa

SEQ ID NO: 148633 - DNA, 80 bp, synthetic construct
  source 1..80: mol_type = other DNA
caagacacgtgtgcaatttccattccagatcagagtcaacgcttgaaaacttcttcggcagagcggcatgtgtgtgcgta

SEQ ID NO: 148634 - DNA, 80 bp, synthetic construct
  source 1..80: mol_type = other DNA
tagtcaagattcttgttagaatcctttgttacatggtgttgtattgccacaaaccaaatattttgactactgcttgtcta

SEQ ID NO: 148635 - DNA, 80 bp, synthetic construct
  source 1..80: mol_type = other DNA
gcgcgtaccctcacctcttgagcacgtcaaagttgtccaagccgtggctcgcatcgtagtggtagttcaacgtgaggtcc

SEQ ID NO: 148636 - DNA, 80 bp, synthetic construct
  source 1..80: mol_type = other DNA
attgcagacataggtaattatatcgaagagaccggcatggcaggattctttttgactatcaaatatgggctagaaatgaa

SEQ ID NO: 148637 - DNA, 80 bp, synthetic construct
  source 1..80: mol_type = other DNA
gaacccaaaccagttgttacttatgactcaaaactagaatttggagctttcacaaaccttccacatgttctaatgaattt

SEQ ID NO: 148638 - DNA, 80 bp, synthetic construct
  source 1..80: mol_type = other DNA
gacagcaagaaggccattttcagtttccagttggaccccggaaatagcacagtgatgaacaagacaattctaggagagat

SEQ ID NO: 148639 - DNA, 80 bp, synthetic construct
  source 1..80: mol_type = other DNA
tcagccaagctggggtgtacggatacacaacattgaacgcgatggggaagctttatgtgcgccatgtcaatgcaagcagt

SEQ ID NO: 148640 - DNA, 80 bp, synthetic construct
  source 1..80: mol_type = other DNA
tatttggagagattgctcaatactatacacattggtcaggctccattagaatatccttaatgtacacaggtccagcatta

SEQ ID NO: 148641 - DNA, 80 bp, synthetic construct
  source 1..80: mol_type = other DNA
aggggctgcggcggcaaggcaattccaccaccaacatctatggcaacggcaacgacgtcaccactgacgtcggtgccaac

SEQ ID NO: 148642 - DNA, 80 bp, synthetic construct
  source 1..80: mol_type = other DNA
tagacaaaaatatttaacagctacaaggtcagcactaccactactagcaacacatggggatgaactgctagaatatcaca

SEQ ID NO: 148643 - DNA, 80 bp, synthetic construct
  source 1..80: mol_type = other DNA
gttcctaacgtggacaataaacactagacagatggtacaacttcgtaggaagtttgaaatgttcacgtacatgaggtttg

SEQ ID NO: 148644 - DNA, 80 bp, synthetic construct
  source 1..80: mol_type = other DNA
gacctagccaggtacctgggggccgtgttctggttctacagagaccaaaagacagactacatagtccagtatgacatctc

SEQ ID NO: 148645 - DNA, 80 bp, synthetic construct
  source 1..80: mol_type = other DNA
tgaatttatcgacacaacatataatcagcagtaccgcgacttcgcaagcaactacatcattaccaatcaatactagtaca

SEQ ID NO: 148646 - DNA, 80 bp, synthetic construct
  source 1..80: mol_type = other DNA
gctttacgtggtcatgtgcagcttgcatacgacgcccgtgtcctgacgcctgactttcatgaaatccctgacctcgatga

SEQ ID NO: 148647 - DNA, 80 bp, synthetic construct
  source 1..80: mol_type = other DNA
gtgcgattactgagggataccactcatatcagccaatcaaccctgatagctcaaactcaaggcattgatgatgtcattga

SEQ ID NO: 148648 - DNA, 80 bp, synthetic construct
  source 1..80: mol_type = other DNA
cctacgtaaactcagtggtaactgattgcatggcaaaacataacaattggggtctagtgattttaccatttgtctcgctt

SEQ ID NO: 148649 - DNA, 80 bp, synthetic construct
  source 1..80: mol_type = other DNA
taaaaatgcccacctgactactccaaatgataatactgtgttattgtcttatagttctgatttacaagtagacacatcta

SEQ ID NO: 148650 - DNA, 80 bp, synthetic construct
  source 1..80: mol_type = other DNA
gtcagatagcactacaccctccactagtagtggtattgacaatttagggtattttaagtggtcctcgacaacagctcccc

SEQ ID NO: 148651 - DNA, 80 bp, synthetic construct
  source 1..80: mol_type = other DNA
tctgacgatcgctcagacaacaaaccagatgaagatcctttttatttatgtaatgggacactgcttggaaatgcactcat

SEQ ID NO: 148652 - DNA, 80 bp, synthetic construct
  source 1..80: mol_type = other DNA
cttaatacccttgacagctaacaaacagaatggccaaatatttgggacaaaactgtttattggagatggtgtgtttaaaa

SEQ ID NO: 148653 - DNA, 80 bp, synthetic construct
  source 1..80: mol_type = other DNA
tctgcctcagaatactaacagctaatccaagctaacattctatcagtaaacgggcagaaaacggataaggaccgcggagt

SEQ ID NO: 148654 - DNA, 80 bp, synthetic construct
  source 1..80: mol_type = other DNA
agaggcctatactaatgttaataaaccctctgagagtaaattgtttagcaagtactcagaagaactagaaaaaatattat

SEQ ID NO: 148655 - DNA, 80 bp, synthetic construct
  source 1..80: mol_type = other DNA
accaccgtgtccacgttacggtacttgccgggtcagcgtccttctcttgagatttctgttcgcaaacttatccgtttccc

SEQ ID NO: 148656 - DNA, 80 bp, synthetic construct
  source 1..80: mol_type = other DNA
aggttaccgtgtactggtgcgcgtgttacgatggcagtatgttgtcggtgtaatcgcatattggttacttatgtgtgtgt

SEQ ID NO: 148657 - DNA, 80 bp, synthetic construct
  source 1..80: mol_type = other DNA
tttcttagtttttcttttatacttgcttatggtgacaaatagtgcatactgtttgacaccatgggcgcacaggttagcaa

SEQ ID NO: 148658 - DNA, 80 bp, synthetic construct
  source 1..80: mol_type = other DNA
tacgcaaagcttagtagtgccttgaaagtcccttggttggtcgctccgctagtttcccctagtagacctggcagatgagg

SEQ ID NO: 148659 - DNA, 80 bp, synthetic construct
  source 1..80: mol_type = other DNA
gttaaacattagaataatagacgttagtggataacagcatgttattcgcccaagtgtgatcgtggttatacactttcttg

SEQ ID NO: 148660 - DNA, 80 bp, synthetic construct
  source 1..80: mol_type = other DNA
gcctttactgttctgggaattgcatagtcattacaggtaataatgcaggggggaaacagttgagacaccttattagtatg

SEQ ID NO: 148661 - DNA, 80 bp, synthetic construct
  source 1..80: mol_type = other DNA
tattaacagcagctaaacattatgcagcccaattgtttcccctagatattaatcctgaacctataacaatggaacaggct

SEQ ID NO: 148662 - DNA, 80 bp, synthetic construct
  source 1..80: mol_type = other DNA
cagcatctatgataatgcaccaaacagtaaaaagaaaaattggaaaaagattatgacaatgagcacaaaatataagtgga

SEQ ID NO: 148663 - DNA, 80 bp, synthetic construct
  source 1..80: mol_type = other DNA
aacttaccagcaaaagtacaaatgtttgctacaggtacacaatcagactctctaacaacatcctcaacaggattttataa

SEQ ID NO: 148664 - DNA, 80 bp, synthetic construct
  source 1..80: mol_type = other DNA
ctacaaacctgatgaaaatgaagttacaatctttgttaaacacagggataatccaaagattatcacagcaggaccaagtg

SEQ ID NO: 148665 - DNA, 80 bp, synthetic construct
  source 1..80: mol_type = other DNA
aaactattacactcattggtcaggaagcatcaagataacctttgtcttctgcggttctgccatgaccactggcaaatttt

SEQ ID NO: 148666 - DNA, 80 bp, synthetic construct
  source 1..80: mol_type = other DNA
actgtgtatcagagctctagatgacatagaaaaggatgatgtcaaaatttttgtcaagccaaaacatataacagcatgga

SEQ ID NO: 148667 - DNA, 80 bp, synthetic construct
  source 1..80: mol_type = other DNA
tgtactagtgaatggtcagaaaattagagttaaggataagtacaaattagtagatccagagaacattaatctagagctta

SEQ ID NO: 148668 - DNA, 80 bp, synthetic construct
  source 1..80: mol_type = other DNA
tgtaccttaccaacacacacactctactaattatgtaccaaaagatggggaagtaacaacccaaattaaaaccagacggg

SEQ ID NO: 148669 - DNA, 80 bp, synthetic construct
  source 1..80: mol_type = other DNA
tagcttcctatcccttccccttggatgcaaaggaactctcagagacagcaaagaaatatggactcaccatcactccacct

SEQ ID NO: 148670 - DNA, 80 bp, synthetic construct
  source 1..80: mol_type = other DNA
tgcacactctcaggaggtgccagctttaacggcggttgagaccggcgccaccaatccacttgaaccatcagatactgtcc

SEQ ID NO: 148671 - DNA, 80 bp, synthetic construct
  source 1..80: mol_type = other DNA
aggtggagacgccgctggaggacccgcagacgcagacctgctggacgccgtagacgccgcagaacagtaaggagacgaag

SEQ ID NO: 148672 - DNA, 80 bp, synthetic construct
  source 1..80: mol_type = other DNA
ggatggggtatgagctctggccaaagaagtggaaactgcaaaaaatacaaataccagaaaaggaagtctggacagtaaat

SEQ ID NO: 148673 - DNA, 80 bp, synthetic construct
  source 1..80: mol_type = other DNA
gtggggattacggcatgatgcacaccaactcgtttggcacacttgcattctacctggaggccgatgagtcctacgcgtgg

SEQ ID NO: 148674 - DNA, 80 bp, synthetic construct
  source 1..80: mol_type = other DNA
cacatggaagttgctgttgcccactactcagcacaattaatgacactagatattgattccagaccaatagcattggaaga

SEQ ID NO: 148675 - DNA, 80 bp, synthetic construct
  source 1..80: mol_type = other DNA
gaggctggcataccagcaggggttaccagtgctaaacacaccagggagtaatcagttcatgacgtccgatgactttcaat

SEQ ID NO: 148676 - DNA, 80 bp, synthetic construct
  source 1..80: mol_type = other DNA
gaagaagcgacggagggcctccagcagcagcagcaactcagacagcagctcagaaaccaacagcgaatcggacagcagct

SEQ ID NO: 148677 - DNA, 80 bp, synthetic construct
  source 1..80: mol_type = other DNA
ccgagagcagcgactcctcagagggcacctgcagcagctcgccaaccaagtcctcaaagtccaagcaggccacagcctac

SEQ ID NO: 148678 - DNA, 80 bp, synthetic construct
  source 1..80: mol_type = other DNA
atcagggccccaacacactacacgaccttcaaatttaggtgcaatggaaatcggagcttccagtgatgccaccccagagt

SEQ ID NO: 148679 - DNA, 80 bp, synthetic construct
  source 1..80: mol_type = other DNA
tcgatgcaggtgcttccaataagtatggttactcatcaataaatgatttcggtactctggctgtaagaattgtgaatgaa

SEQ ID NO: 148680 - DNA, 80 bp, synthetic construct
  source 1..80: mol_type = other DNA
tgcacaaggtccaaccaacagaaaagatgcaatgcttggaacacatgttgtttgggatattggattacaatccactattg

SEQ ID NO: 148681 - DNA, 80 bp, synthetic construct
  source 1..80: mol_type = other DNA
tttttcatgatgtattcaaaggcacaaaagaacctgctgttttaacagaaaaagatccacgtttggaggtggattttaaa

SEQ ID NO: 148682 - DNA, 80 bp, synthetic construct
  source 1..80: mol_type = other DNA
tgaacgaggcagagaagttggtggtgatcgtatcgctcatgccaacctcccaagtgatgataactggctcaattttgatg

SEQ ID NO: 148683 - DNA, 80 bp, synthetic construct
  source 1..80: mol_type = other DNA
gaccgctgccggtgtgcgggtcaccggcgccgtggaaagtgaggctcagacggcggtcgccggcggcatgggcgcgtcgg

SEQ ID NO: 148684 - DNA, 80 bp, synthetic construct
  source 1..80: mol_type = other DNA
cacataaaagtggcaattgcccattattcagcccaactaatgactctagatatccaaacaagtagtgtctcactagaaga

SEQ ID NO: 148685 - DNA, 80 bp, synthetic construct
  source 1..80: mol_type = other DNA
tacacaacacacatcttatgatatacttacagagaaattatatagcacctgtacatactatgaaacagtacaagtactgg

SEQ ID NO: 148686 - DNA, 80 bp, synthetic construct
  source 1..80: mol_type = other DNA
gccctcggtgttttaccgaaagccagatactaaatcaaccaaaaaatgcagggccatagtgactgaccttagtataatca

SEQ ID NO: 148687 - DNA, 80 bp, synthetic construct
  source 1..80: mol_type = other DNA
cggcggggccggggtgctgcggagacggggggtgtgcgagacggtagtgtagacggggacaggggttgcgctgggcccgg

SEQ ID NO: 148688 - DNA, 80 bp, synthetic construct
  source 1..80: mol_type = other DNA
tgagagtggcgaggggtccgatacctccgagccgtatgaagctcttgatttgtcaatccatggcaggccctgccctcagg

SEQ ID NO: 148689 - DNA, 80 bp, synthetic construct
  source 1..80: mol_type = other DNA
ggggtcaaattctgacttggaaaagaggtacttgaagcggcacttaatctcataaatgcagctccggtcggtgaacagta

SEQ ID NO: 148690 - DNA, 80 bp, synthetic construct
  source 1..80: mol_type = other DNA
caaacacttcgacgggtataaccagcagaaagtggtgatcatggatgatgttggacaaaaccctgatggtgaagacctga

SEQ ID NO: 148691 - DNA, 80 bp, synthetic construct
  source 1..80: mol_type = other DNA
ataagcaaaggaccgtacggggggggcatgactaccacgaaattcactctgagaatactgtacgacgagtttaccaggtt

SEQ ID NO: 148692 - DNA, 80 bp, synthetic construct
  source 1..80: mol_type = other DNA
ccactagtgttacctacccacctgaatggttaaacagacaatacctagaacatgactgtggcattttcagcccatacttt

SEQ ID NO: 148693 - DNA, 80 bp, synthetic construct
  source 1..80: mol_type = other DNA
ccaactggacccaggcagaagctcggttttaaagagaaccttgttgggggagatcctcaactactacgcccactggtctg

SEQ ID NO: 148694 - DNA, 80 bp, synthetic construct
  source 1..80: mol_type = other DNA
tttaactcagaagccaatgattcagttttaatctcttattcttcagatttagtcatttaccgaacaaacactaaaggtga

SEQ ID NO: 148695 - DNA, 80 bp, synthetic construct
  source 1..80: mol_type = other DNA
accatgatagataaatatggcattgacttaccttatgttacatatcttaaagatgagttgaggactccccagaaaataaa

SEQ ID NO: 148696 - DNA, 80 bp, synthetic construct
  source 1..80: mol_type = other DNA
gtcaagtggaaaccatccttgaagttaataatgtgcctactaatgctaccagtttgatggaaagactacgattcccggta

SEQ ID NO: 148697 - DNA, 80 bp, synthetic construct
  source 1..80: mol_type = other DNA
aatctggccaacatctgcctcccgcgctgcctggtgaatgcgcctctggcggtgcgggcacagcgggccgacacgcaggg

SEQ ID NO: 148698 - DNA, 80 bp, synthetic construct
  source 1..80: mol_type = other DNA
aataacaatagtcaccacactagcaggccaaggagatgacattggacatgtggtcatacaatatatgtatgtgcctcccg

SEQ ID NO: 148699 - DNA, 80 bp, synthetic construct
  source 1..80: mol_type = other DNA
aaactgccttgttttctaaatataaaggcaataaaaaatttgaaatgaacgatcatataagagtagcagtttcacactac

SEQ ID NO: 148700 - DNA, 80 bp, synthetic construct
  source 1..80: mol_type = other DNA
gtaaatccctctcgccttgtttctcagagagcatttcaggccggttttgcagtcgctgctgcagctatggggtccctaga

SEQ ID NO: 148701 - DNA, 80 bp, synthetic construct
  source 1..80: mol_type = other DNA
cccagacctccgagattgtgtgaatatgtgaagtcaagcaacgttggattcaccccagcaaatattacggatggaaggac

SEQ ID NO: 148702 - DNA, 80 bp, synthetic construct
  source 1..80: mol_type = other DNA
gaaaagaaacggtgttcgttgggcggcggcaagttcatgagctgccagggttctggcacaaaacaggggaaaacgccgat

SEQ ID NO: 148703 - DNA, 80 bp, synthetic construct
  source 1..80: mol_type = other DNA
agcagatggtaccctagatgccagtttcaacaacaggtgctgcatgacttatacgtctcgggtccatttagctacaaaga

SEQ ID NO: 148704 - DNA, 80 bp, synthetic construct
  source 1..80: mol_type = other DNA
ttcaccagaacaccaccatttcaaatgacagaacttacctacctcagctgccaccccttactaatgctcttaagcaaaca

SEQ ID NO: 148705 - DNA, 80 bp, synthetic construct
  source 1..80: mol_type = other DNA
attaaaatctcccaacacgtcaaagatgttggattgccctccatacatacaccaagtaaaaccaagcttcaacctagtgt

SEQ ID NO: 148706 - DNA, 80 bp, synthetic construct
  source 1..80: mol_type = other DNA
accgcctagtgtgccctcgctgcccgagaacggcgccggcggcggtggcgacgataacagcagcagcggcggtagcagca

SEQ ID NO: 148707 - DNA, 80 bp, synthetic construct
  source 1..80: mol_type = other DNA
atacaaacatccatactactaccaacaaatactcacagactcttttatcagagagatacaaactaacccagacggcaccc

SEQ ID NO: 148708 - DNA, 80 bp, synthetic construct
  source 1..80: mol_type = other DNA
gcaccaccttccaggtgttgcgcgagcagtataacgccatgataggcttcccctttaactataacccatcaaattcaaat

SEQ ID NO: 148709 - DNA, 80 bp, synthetic construct
  source 1..80: mol_type = other DNA
caccttaagagctcactacttcagctgggaaacagacaaagcccctcaactaacacaaagctcacaaggcatgcaccacg

SEQ ID NO: 148710 - DNA, 80 bp, synthetic construct
  source 1..80: mol_type = other DNA
ccttgttatgtcaccgttctgacacatgacttacatgggtttggcttttgtaggctttgccctctttggggtcattagat

SEQ ID NO: 148711 - DNA, 80 bp, synthetic construct
  source 1..80: mol_type = other DNA
atttagcttttacagacaccaagacactgactacatagtgcagtatgacacagtgcctcccatgcagatggacgagtaca

SEQ ID NO: 148712 - DNA, 80 bp, synthetic construct
  source 1..80: mol_type = other DNA
gagggccacggtgaacatctggtacctacgacgcagttttgtcgcgggccgctgctctacgtgcaccgacgttgttgttg

SEQ ID NO: 148713 - DNA, 80 bp, synthetic construct
  source 1..80: mol_type = other DNA
agggcttttccgctcaattaagaaaacaatactttgtccagcaacaagggcagataatatcaagaaagcatgttgatgat

SEQ ID NO: 148714 - DNA, 80 bp, synthetic construct
  source 1..80: mol_type = other DNA
tcatactctctaaaaaacacatactaatacccagcttaaaaaccagaccctctaaaaaacactatgtaaaagttagggta

SEQ ID NO: 148715 - DNA, 80 bp, synthetic construct
  source 1..80: mol_type = other DNA
tattcatgtttccaccagacaccccaaggcctattataagcaaagaggcctgggaagatgagtataccacctgcaaacac

SEQ ID NO: 148716 - DNA, 80 bp, synthetic construct
  source 1..80: mol_type = other DNA
aaaaaaagaaagaaaattaatataacacaatggaatccatccgttgtaagaaaatgcgtggtaaccggatacatacccct

SEQ ID NO: 148717 - DNA, 80 bp, synthetic construct
  source 1..80: mol_type = other DNA
aaggcttcagccttgtacaaaatagcggcggagcacttccggcttgcccaaaatggcggccaaaaacatccgggtcaaag

SEQ ID NO: 148718 - DNA, 80 bp, synthetic construct
  source 1..80: mol_type = other DNA
agaaggaggtggagacgacggggactacagatcttggccctggcagatagaatacattcattttctactacgccagctga

SEQ ID NO: 148719 - DNA, 80 bp, synthetic construct
  source 1..80: mol_type = other DNA
taactacctgcctcttacctcttcgcctctggacccttcctcgggaccgccgcgaggccgcccggcgatccgcgcactcc

SEQ ID NO: 148720 - DNA, 80 bp, synthetic construct
  source 1..80: mol_type = other DNA
gcgtggtggggagtttgaggaggtgttgcggtcactcgagactctggcctttcactccggaccgaagaattattcggcct

SEQ ID NO: 148721 - DNA, 80 bp, synthetic construct
  source 1..80: mol_type = other DNA
acaaaaattgctcactccgactcgagtgccacattatcaggtgtacatcatggatgaagcccacttcattgatccagcca

SEQ ID NO: 148722 - DNA, 80 bp, synthetic construct
  source 1..80: mol_type = other DNA
tgttgttattcttcaatttctgcaggtaacttaggaagcgtttcttgagcttccctgggatgagcgtttgggagagctga

SEQ ID NO: 148723 - DNA, 80 bp, synthetic construct
  source 1..80: mol_type = other DNA
caaggccgtggaactttgtccggcgctacgccttcggctgcgccggacgcctcggaccccccctcgacccgaatcgctcg

SEQ ID NO: 148724 - DNA, 80 bp, synthetic construct
  source 1..80: mol_type = other DNA
ataggattgcagtcgagttgtgtgctctgtgtgccatggattagtcagacaaactatcgcttcgtgacacatgatgctta

SEQ ID NO: 148725 - DNA, 80 bp, synthetic construct
  source 1..80: mol_type = other DNA
tgtcacctacaatcccctcacagacaagggggtgggcaacagaatgtggttccagtacaacactaagatagacacccagt

SEQ ID NO: 148726 - DNA, 80 bp, synthetic construct
  source 1..80: mol_type = other DNA
tttgatcaggtactggtttgttacgacataactgacgtgttcggagacggtcagcgcggagaaggattcgcctagtggca

SEQ ID NO: 148727 - DNA, 80 bp, synthetic construct
  source 1..80: mol_type = other DNA
taaaatggcctgcaccagtaaaaaaaccaggcacaactacacaaaattactcaccagacagccaagacggagaccaaata

SEQ ID NO: 148728 - DNA, 80 bp, synthetic construct
  source 1..80: mol_type = other DNA
aacagcacaagcagactcatctgttgacatctcagctagtaacattgttaatgatttggatgccctcgataattgaatat

SEQ ID NO: 148729 - DNA, 80 bp, synthetic construct
  source 1..80: mol_type = other DNA
gattacatgacaggcgcaacgcccaccatcccaatcaccctcacagtagctcctatgtgctcagaatttggaggcttaag

SEQ ID NO: 148730 - DNA, 80 bp, synthetic construct
  source 1..80: mol_type = other DNA
ggtttaataattctgagtccgggcaccgtccctggcccccttggagtccagagtctggagcatacagactgcgaaatatg

SEQ ID NO: 148731 - DNA, 80 bp, synthetic construct
  source 1..80: mol_type = other DNA
tttgaaagtcatattgaaaagaggaaaccttacaaagagttaagattggaggtaggtaagcaaaggctaaagtatgctca

SEQ ID NO: 148732 - DNA, 80 bp, synthetic construct
  source 1..80: mol_type = other DNA
actgccttgccggagactcggaagccaaaaactcatatacgtcttatgtgaatgccaaccctggggaagcaggaggcgag

SEQ ID NO: 148733 - DNA, 80 bp, synthetic construct
  source 1..80: mol_type = other DNA
accaagagcttcgactccaagcgtgtagaggtcaacaaggagaccagcaccatcacgtttaggcacagtgggaaaatctc

SEQ ID NO: 148734 - DNA, 80 bp, synthetic construct
  source 1..80: mol_type = other DNA
attccagattggcagaattacacagcaggaccaggtataagatatccagtgacgtttggctggctatggaaactagtacc

SEQ ID NO: 148735 - DNA, 80 bp, synthetic construct
  source 1..80: mol_type = other DNA
aggttcgacgatcccgagagaaccggagccctggaactcggaccaagagatggaggacagccagcaaagcgaagaagaga

SEQ ID NO: 148736 - DNA, 80 bp, synthetic construct
  source 1..80: mol_type = other DNA
ctggttttataggaacggtattcaggttaaagaaatcaatatcgggttttggggctgcaccagcagcacgggagtgccag

SEQ ID NO: 148737 - DNA, 80 bp, synthetic construct
  source 1..80: mol_type = other DNA
cagcagtacggtgtggttttcatttccaggtacaagtgaatgttaatcaaggaacagctggtagtgcattggtggtatat

SEQ ID NO: 148738 - DNA, 80 bp, synthetic construct
  source 1..80: mol_type = other DNA
taaaggtgtatggttttaaatttgatttataaattgggaagggttataataattggccaatttcaaaagaggggttataa

SEQ ID NO: 148739 - DNA, 80 bp, synthetic construct
  source 1..80: mol_type = other DNA
atccgggtcaaaggtcaccgctacgtcacaagtcacgtgattggagggtcgctcaatgcggaagcaatcctcccacgtgg

SEQ ID NO: 148740 - DNA, 80 bp, synthetic construct
  source 1..80: mol_type = other DNA
ctatttcagagaaggcagagatcagctgtggaaaggacctggggagctactgtggaagggagacggagcagtcatagtca

SEQ ID NO: 148741 - DNA, 80 bp, synthetic construct
  source 1..80: mol_type = other DNA
accggtacgttgagagaatatgatcccaaagttaacccagtgcccgttaaccgtagactgccacatgccctggtgacatc

SEQ ID NO: 148742 - DNA, 80 bp, synthetic construct
  source 1..80: mol_type = other DNA
gtcaacataagcaaactggagaagggccttcaagaccttgcacccctttacgcttgtgaggccaagcaggtgcgcgagat

SEQ ID NO: 148743 - DNA, 80 bp, synthetic construct
  source 1..80: mol_type = other DNA
catgtctcaatatcgaccttcctcaattttcacaggaaggtactattagtaattactctaaatccaataaaacagactta

SEQ ID NO: 148744 - DNA, 80 bp, synthetic construct
  source 1..80: mol_type = other DNA
tgaataccactcaggagcatacagctccatattcctagcagccgggaggtcctactttgagacccccggagcatacacag

SEQ ID NO: 148745 - DNA, 80 bp, synthetic construct
  source 1..80: mol_type = other DNA
gatatgattaccctaccaagacagggcagtgtggtggagtcttgtgttcaacaggtaaaatttatggaattcatgtgggt

SEQ ID NO: 148746 - DNA, 80 bp, synthetic construct
  source 1..80: mol_type = other DNA
tgttgaatacacatttagacgtgtaacaaattacaaaagagatggacaacaagttgagattgctattgagcccagaagag

SEQ ID NO: 148747 - DNA, 80 bp, synthetic construct
  source 1..80: mol_type = other DNA
ctccccacttttcccgctgttgtccccttttatgtggaaaagcagttgttttagtaaataggaagacacaagtcagttac

SEQ ID NO: 148748 - DNA, 80 bp, synthetic construct
  source 1..80: mol_type = other DNA
tattattaggtccgccacaaacaaggtctatctctttgagccccccagaggcctactccccatagtgggaaaagaggcct

SEQ ID NO: 148749 - DNA, 80 bp, synthetic construct
  source 1..80: mol_type = other DNA
ccaaccccagtgtgttttatcaaccccactctggattccctagattcaccatcccttttacaggaattgcttcagcatat

SEQ ID NO: 148750 - DNA, 80 bp, synthetic construct
  source 1..80: mol_type = other DNA
gggtggaaatggtaaagtcggatatggagcagcattgctacgcaaatactttgctgttgcccagggggaaattgttaaga

SEQ ID NO: 148751 - DNA, 80 bp, synthetic construct
  source 1..80: mol_type = other DNA
agcttgagtaatggagaaacagccaacacgtttgattcacaagacacgaccgggcaaacagctgtccaggttaacgttat

SEQ ID NO: 148752 - DNA, 80 bp, synthetic construct
  source 1..80: mol_type = other DNA
attccatgtttccatcctttcatttcaactttaaaggcggctttgagagcgaagaagtgcgaggataaaaatggatgact

SEQ ID NO: 148753 - DNA, 80 bp, synthetic construct
  source 1..80: mol_type = other DNA
cgggtcacccagagcaaacatgaactatgccatgcactgcgaagacagcaccccgcagcccgaaccttttgggtgcggca

SEQ ID NO: 148754 - DNA, 80 bp, synthetic construct
  source 1..80: mol_type = other DNA
agtgtgggaaaccaggacacaacatgtcacaatgcccagaaagacaggctggttttttaggatttggaccctggggaaag

SEQ ID NO: 148755 - DNA, 80 bp, synthetic construct
  source 1..80: mol_type = other DNA
tcctcgaacgccactgataagaacatgatagagactagatgtgtggtcaataaacacagcactgccgagaccactttaac

SEQ ID NO: 148756 - DNA, 80 bp, synthetic construct
  source 1..80: mol_type = other DNA
cccccccccctgtggcaacttcctcggggtccggcgctacgcgcttcgcgctgcgccggacgcctcggaccccccctcga

SEQ ID NO: 148757 - DNA, 80 bp, synthetic construct
  source 1..80: mol_type = other DNA
ccactaggaccacaaacacgctctcaggtcaccttggaacgtcaacctgtccacaaccctcgccaggaggcacccatcat

SEQ ID NO: 148758 - DNA, 80 bp, synthetic construct
  source 1..80: mol_type = other DNA
tttaggcaaattaatttgtaaaccattgctatctgggactcattctggtaaaattgaagtatatttaagtcttcggtgcc

SEQ ID NO: 148759 - DNA, 80 bp, synthetic construct
  source 1..80: mol_type = other DNA
tgtgcctttagctgctgcgaaaaagatcggtagctggccaggtctttggataccagcgcgtaagtgttaagtctctgttg

SEQ ID NO: 148760 - DNA, 80 bp, synthetic construct
  source 1..80: mol_type = other DNA
gctccgccgaaggagagcagccccaagaagacgtagaagacctcctccgcgtgctcgaagacgcagagtaaggagatgga

SEQ ID NO: 148761 - DNA, 80 bp, synthetic construct
  source 1..80: mol_type = other DNA
atggggagaagacctacagaaattttgttgacaaaatcagaacaacagaagtgggccgaagactgtaccttcccccatac

SEQ ID NO: 148762 - DNA, 80 bp, synthetic construct
  source 1..80: mol_type = other DNA
ttgagcgaccagtttgtcccgcacctcctgagattgctatgcagggcccgggggaaccttctggcattaaacgcacacgg

SEQ ID NO: 148763 - DNA, 80 bp, synthetic construct
  source 1..80: mol_type = other DNA
catgggttcccagaccaccaagattatgccagtatgagaaacaaggaagtgtcgactttaaagtccaaggtgtaactgat

SEQ ID NO: 148764 - DNA, 80 bp, synthetic construct
  source 1..80: mol_type = other DNA
acaaccgtacattctacattcaatacatcatataacaatgcatccaatacgattaccactacagaattgattacaacata

SEQ ID NO: 148765 - DNA, 80 bp, synthetic construct
  source 1..80: mol_type = other DNA
gggtgcgccgtgaaggcggcggcgcagtccgccttcagcgcctccaccgcgtcgcccgaggagctgtagaccccgccgca

SEQ ID NO: 148766 - DNA, 80 bp, synthetic construct
  source 1..80: mol_type = other DNA
aatttggatcatgaacccattcgcgtacgtaacacgggagcttttggtcaccaatctggagcggtctacgtgggcaatta

SEQ ID NO: 148767 - DNA, 80 bp, synthetic construct
  source 1..80: mol_type = other DNA
ctgtgctttttttgagacgttttagaagagctttttttctgctcagagcgaaaaaatgatagccctgaaaatctcgacga

SEQ ID NO: 148768 - DNA, 80 bp, synthetic construct
  source 1..80: mol_type = other DNA
caatcaggggcggtttacgtaggcaactacaggctggtgaacaggcatctagcgacccatacggattggcagagttgcgt

SEQ ID NO: 148769 - DNA, 80 bp, synthetic construct
  source 1..80: mol_type = other DNA
tacctcactatcagctatgaacagaagattttatttagatctagatatcatagttcatgataattataaggatagccagg

SEQ ID NO: 148770 - DNA, 80 bp, synthetic construct
  source 1..80: mol_type = other DNA
tccagcctctataggcagtggattgatgaatttatttagatgatatagtaacatgtttgcagtagaactagttattatat

SEQ ID NO: 148771 - DNA, 80 bp, synthetic construct
  source 1..80: mol_type = other DNA
acacaaaacgacttgattcgtgttgaacctattggcatatggattcagggtgaaccaggacaaggcaaatcatttttgac

SEQ ID NO: 148772 - DNA, 80 bp, synthetic construct
  source 1..80: mol_type = other DNA
tggttaacaagaatagtgtggaagaggccagtattaaccactttttctctcgtgcggcattggtcggcaaggtggaattg

SEQ ID NO: 148773 - DNA, 80 bp, synthetic construct
  source 1..80: mol_type = other DNA
acacccagcaatcaaccaggcacaaaccaatactttgcagagttagatggtctgtggggagaccctatctatgccaatag

SEQ ID NO: 148774 - DNA, 80 bp, synthetic construct
  source 1..80: mol_type = other DNA
atacagctacacgtttggtgcgggacaaatgccagacaaatcagcatacattcccatagaatggagaggcaaatggtacc

SEQ ID NO: 148775 - DNA, 80 bp, synthetic construct
  source 1..80: mol_type = other DNA
ggggggaatgtgtactactatattctctttatcagtactatatgaccagtttcaaagacatagaaacttttggacaaaga

SEQ ID NO: 148776 - DNA, 80 bp, synthetic construct
  source 1..80: mol_type = other DNA
tttgaaaatttgagaagaaattggcttgaattattttaatattacagcttgaagctgaaccccactagaaatctggtcgt

SEQ ID NO: 148777 - DNA, 80 bp, synthetic construct
  source 1..80: mol_type = other DNA
gcagacagtcagtttagacaaaacatctggaaatcaggtgaaattattaaaattattaaagatatagcccaaaacaacat

SEQ ID NO: 148778 - DNA, 80 bp, synthetic construct
  source 1..80: mol_type = other DNA
tgtgggtaccacccagacacggtgtgagcggccgcgaacactgctggtatgaaggctgttatcgcactcatgctgcttat

SEQ ID NO: 148779 - DNA, 80 bp, synthetic construct
  source 1..80: mol_type = other DNA
atctgaaaatttcacaaaaatgacatgggaaaacatcacttttctaaagcgatattttaaaccagacaaggaattcccct

SEQ ID NO: 148780 - DNA, 80 bp, synthetic construct
  source 1..80: mol_type = other DNA
cacagtgccttcctgataatggtgattattcagagttagcattaaatgtcacagaggcctttgatgcctggaataacaca

SEQ ID NO: 148781 - DNA, 80 bp, synthetic construct
  source 1..80: mol_type = other DNA
cccactacactaatagacaagtggtactttcaacatgatatctgtgacactacactactgaacatgaacgttgtgctatg

SEQ ID NO: 148782 - DNA, 80 bp, synthetic construct
  source 1..80: mol_type = other DNA
ttttatgtcgatctgcgtgtgtgtactacaccacctatgacacgcacggtgacgaagcagatcaaaagtacgctagctgg

SEQ ID NO: 148783 - DNA, 80 bp, synthetic construct
  source 1..80: mol_type = other DNA
atccatagtgaaggagtgatatcgacgtgcttacgaaacggcgattatatatgttctcaacaataccgccctacgttgta

SEQ ID NO: 148784 - DNA, 80 bp, synthetic construct
  source 1..80: mol_type = other DNA
attgaatagattgacatacaacagttcaagtcctagctctgtgcattgcatagttcaagggagattgggtaatgatgcta

SEQ ID NO: 148785 - DNA, 80 bp, synthetic construct
  source 1..80: mol_type = other DNA
ggtatggagtatggcctcattacctatctccagaggatgctacagccattgataaaccaacacgccctgacacatcatct

SEQ ID NO: 148786 - DNA, 80 bp, synthetic construct
  source 1..80: mol_type = other DNA
gaacggaggtggcgagggtgtttgcggcgaggacgtgggccttttgcggcgtggacggtgacgagggtgttgcgcagacg

SEQ ID NO: 148787 - DNA, 80 bp, synthetic construct
  source 1..80: mol_type = other DNA
cagatggttggattaaaaagtttactgaaatgtgcaatgctgctaggggtttagaatggcttggaaacaaaatatcaaag

SEQ ID NO: 148788 - DNA, 80 bp, synthetic construct
  source 1..80: mol_type = other DNA
agagctttgtcagctatgccttgggcaccactagtatcgaaacaccgtggatggatgagaatcctagcacagagacggca

SEQ ID NO: 148789 - DNA, 80 bp, synthetic construct
  source 1..80: mol_type = other DNA
aaggctggtgacttaaccccgttacaaagcaagggattgactacctacggttttgggcatcaaaacaaagctgtatacgt

SEQ ID NO: 148790 - DNA, 80 bp, synthetic construct
  source 1..80: mol_type = other DNA
tgaaaggagtaggaccagcagaaccaggtgactgtggtggtattttaagatgtattcatggtccaataggtttacttaca

SEQ ID NO: 148791 - DNA, 80 bp, synthetic construct
  source 1..80: mol_type = other DNA
cggacgagctccacccccttcatcagggtcttgccgtccgtcagcacccccacatatctcttctttgtaatcagcatcag

SEQ ID NO: 148792 - DNA, 80 bp, synthetic construct
  source 1..80: mol_type = other DNA
ccgcacctgggaaggtgcagactgcggtgatcaacgcagctatgggtgtgggtgttggcaacctcactatatacccacac

SEQ ID NO: 148793 - DNA, 80 bp, synthetic construct
  source 1..80: mol_type = other DNA
gcaccaaacaaccagcagcattacaccctaaagattcaagactggaaacagacctggatgtgactgtactttccaaatac

SEQ ID NO: 148794 - DNA, 80 bp, synthetic construct
  source 1..80: mol_type = other DNA
aagttcgtcactaaccacgtgactcccacaggccaatcgcagtgtatgtcgtgcacttcctgggcatggtctatgtgcta

SEQ ID NO: 148795 - DNA, 80 bp, synthetic construct
  source 1..80: mol_type = other DNA
ttggagcctttgtgcttgcgttttttgggagcgcggtgccaatgcaccaactggggtgtgcgccggtgcggccaagccgg

SEQ ID NO: 148796 - DNA, 80 bp, synthetic construct
  source 1..80: mol_type = other DNA
gaagcgaataagcgcgaccggcagcaccagttggccacgaccacgaatcaccgtcggcggggcggactgcgtaataactt

SEQ ID NO: 148797 - DNA, 80 bp, synthetic construct
  source 1..80: mol_type = other DNA
attttacaaaggcactatggagactattaaggatttagttaatactgctactggtgccatggaaaatttgtcgatgacta

SEQ ID NO: 148798 - DNA, 80 bp, synthetic construct
  source 1..80: mol_type = other DNA
ttaaggtctcctttaagctaaactttcaataaaagcacatctacactgtactaggccgtgggagtttcactcgtcggtgt

SEQ ID NO: 148799 - DNA, 80 bp, synthetic construct
  source 1..80: mol_type = other DNA
acagtaagtcatacaaaagtggataacatttttggtagggcatggtattctatggctcatgaattcaggaatgaggggtt

SEQ ID NO: 148800 - DNA, 80 bp, synthetic construct
  source 1..80: mol_type = other DNA
cagcatgttacgtcacaacaatgtgtcacttgtcatcataccagtctgccctctacgggctccggcaacagccccccaaa

SEQ ID NO: 148801 - DNA, 80 bp, synthetic construct
  source 1..80: mol_type = other DNA
aaacagtactttgaaacactaacacaagacaatgacttacactctaagtatggtaaagccaatgcagaccaatttgagta

SEQ ID NO: 148802 - DNA, 80 bp, synthetic construct
  source 1..80: mol_type = other DNA
gcttttactttaccatccattaataatgcagagccaggaaaaagatacatctacaaggtgttgcctcaaggctggaaagg

SEQ ID NO: 148803 - DNA, 80 bp, synthetic construct
  source 1..80: mol_type = other DNA
ctatagttatagataagattgacataggaaatcagctggcaggtattaatcaaaccttacaagaggcagaagattacatt

SEQ ID NO: 148804 - DNA, 80 bp, synthetic construct
  source 1..80: mol_type = other DNA
acttcttccgggtcaaaggtcagcttctacgtcataagtcacgtggcggggcctacttccgtgtttgcgcagtagccgtc

SEQ ID NO: 148805 - DNA, 80 bp, synthetic construct
  source 1..80: mol_type = other DNA
atgaaaagtattacgacgtctttggtaactatggcctaacagacccagacggtgacatgaaggaaaagataacaaacttt

SEQ ID NO: 148806 - DNA, 80 bp, synthetic construct
  source 1..80: mol_type = other DNA
acttaactggagcatttggcttcacttcaacaaatatgtcagcaaccaactcttccgctgaggataattggagcgtaacc

SEQ ID NO: 148807 - DNA, 80 bp, synthetic construct
  source 1..80: mol_type = other DNA
tggggctggtggcatttggggttggggtagtcactgctgaggtgggacttgtttttcccaaggtggtgctggtggcattt

SEQ ID NO: 148808 - DNA, 80 bp, synthetic construct
  source 1..80: mol_type = other DNA
aactactcattcaaaagctgggacattaggcgtcaccaatttagcaaacaaagtattaagagaatgtcagaacaaccaga

SEQ ID NO: 148809 - DNA, 80 bp, synthetic construct
  source 1..80: mol_type = other DNA
attatcgaagaagcttttactctcccaatcgcttacattaacttcgtcgcaaagcgcttccgggttttgctcgttgggga

SEQ ID NO: 148810 - DNA, 80 bp, synthetic construct
  source 1..80: mol_type = other DNA
tagaaaaattagaagtgtgcccgtgggaagggcgttgacactacctgcatactctagtcttagacgaaaatggttggatt

SEQ ID NO: 148811 - DNA, 80 bp, synthetic construct
  source 1..80: mol_type = other DNA
aaattcttttgtcccgcaggttcattggtggcatttcagaactcttggggatctcagatggatttaacagatcccttatg

SEQ ID NO: 148812 - DNA, 80 bp, synthetic construct
  source 1..80: mol_type = other DNA
cgcccgtacatgttgcagtacatgtatgtacccccaggtgcccctaaacctactggtagggatgcatttcagtggcaaac

SEQ ID NO: 148813 - DNA, 80 bp, synthetic construct
  source 1..80: mol_type = other DNA
aaatggctgacttccttcctcttttttgaaaaaaggcgccaaaaaaccgtcggcggtggggccgcgcgctgcgctcgcgg

SEQ ID NO: 148814 - DNA, 80 bp, synthetic construct
  source 1..80: mol_type = other DNA
acaggctccagtgatccaactagtccatgctgtttatgattccatgttggtaagaggcacctagaacatttccagatgtt

SEQ ID NO: 148815 - DNA, 80 bp, synthetic construct
  source 1..80: mol_type = other DNA
agataaatacaacccatctactgatgccgccacgggcagaacatttgcggcacttgattatctgttaggatgtggtgtct

SEQ ID NO: 148816 - DNA, 80 bp, synthetic construct
  source 1..80: mol_type = other DNA
taaggagatgcagcgcatgttggacaagtacgggattaacctaccattggtcacgtacgtgaaggacgaattgcgcaaac

SEQ ID NO: 148817 - DNA, 80 bp, synthetic construct
  source 1..80: mol_type = other DNA
ctttagtcataaacaggatcagagatgatgcattgaggagggctttactgagcagtcttgaaaaagctacatcacaagag

SEQ ID NO: 148818 - DNA, 80 bp, synthetic construct
  source 1..80: mol_type = other DNA
aagaaaaacagaaaatgtgtggaacataatcttacagctatatttcagggcctaggagatgataccacgccaggatttat

SEQ ID NO: 148819 - DNA, 80 bp, synthetic construct
  source 1..80: mol_type = other DNA
ttattatcatggcacaatggagaggaacagtacaatgactttattcagaaagtgcgatccgtaccagttggccgcacact

SEQ ID NO: 148820 - DNA, 80 bp, synthetic construct
  source 1..80: mol_type = other DNA
gatagtacaaatgctgaggcaacagttgaaaatttcttatgtagatctgctctgtgggcaaatttaaaactaaagcaagg

SEQ ID NO: 148821 - DNA, 80 bp, synthetic construct
  source 1..80: mol_type = other DNA
gcaagtacgtggtgaaagagacggcgttcaccgtcagtctattctttacggacggggtgggggccaacctagccatcaat

SEQ ID NO: 148822 - DNA, 80 bp, synthetic construct
  source 1..80: mol_type = other DNA
ctttctacccctgggctcccatagagccaaaacctgtgcgtgtaacttttcgcctgggcttcaaataaacaaggccgttt

SEQ ID NO: 148823 - DNA, 80 bp, synthetic construct
  source 1..80: mol_type = other DNA
cttgggaagtcagtattcgcgacatggtgcagttgcgacgcaaatgtgagatgttcacttatcttcgatttgatgtagag

SEQ ID NO: 148824 - DNA, 80 bp, synthetic construct
  source 1..80: mol_type = other DNA
tgggcaaggctcttaaagcgtacgctctttactatgttttttggcaggagttggagaaagaaaaggaaagtgtcactgtc

SEQ ID NO: 148825 - DNA, 80 bp, synthetic construct
  source 1..80: mol_type = other DNA
aactgtctcaatatagaccttccgcaatttgatgacaagggtacaatttcagacgcatcctcttacagtagagataataa

SEQ ID NO: 148826 - DNA, 80 bp, synthetic construct
  source 1..80: mol_type = other DNA
tgctcggtgtccgtgaccggttagccatcttgccgcggcatgcacaaccagggaaaacaatatgggttgaacacaagcta

SEQ ID NO: 148827 - DNA, 80 bp, synthetic construct
  source 1..80: mol_type = other DNA
tacaagtatgattttcacttttatggccctctttacaccggtattctcccgaacctttctggccgcataactgcgacctc

SEQ ID NO: 148828 - DNA, 80 bp, synthetic construct
  source 1..80: mol_type = other DNA
catggtgcccacgaccaccaagagcagtagattacactaataagttcagtcccaattatcatacaaagaatgcaagcaat

SEQ ID NO: 148829 - DNA, 80 bp, synthetic construct
  source 1..80: mol_type = other DNA
aggaatagaagatacaacattggcaactgtctggaagctttgtttcaaggcccgctggagttcaaggaacccaggattga

SEQ ID NO: 148830 - DNA, 80 bp, synthetic construct
  source 1..80: mol_type = other DNA
gggccaatagaggagatcatatccacagttgccagcaatgctcttgcccttagccaacccaagccagtagacaattcagt

SEQ ID NO: 148831 - DNA, 80 bp, synthetic construct
  source 1..80: mol_type = other DNA
gaacagttcactctatggcccaagttgatcctagcttgatgattcatttatcccccctgagagattgcattgctagagtg

SEQ ID NO: 148832 - DNA, 80 bp, synthetic construct
  source 1..80: mol_type = other DNA
atgtactatcactctatgggtagatctgggtacattattcatacacagtgcaacgccacaaagttcaacagtggttgttt

SEQ ID NO: 148833 - DNA, 80 bp, synthetic construct
  source 1..80: mol_type = other DNA
atggtgtcgagaccaaaattttaaaacaaacaattgtcacagatgagaatgatgtggatacagaaataacaatcttgtgg

SEQ ID NO: 148834 - DNA, 80 bp, synthetic construct
  source 1..80: mol_type = other DNA
caatccacgttctatcttgtggaaagccccagtccttgatcgaggacatccccctccctggacctccttcttacgtctcc

SEQ ID NO: 148835 - DNA, 80 bp, synthetic construct
  source 1..80: mol_type = other DNA
aagacaatatatactcatccacgcagagcaaatgtcacctagcagaccttccactgtggatagcctgcttcggcctggta

SEQ ID NO: 148836 - DNA, 80 bp, synthetic construct
  source 1..80: mol_type = other DNA
taggatgtaatggttcaccctggcgttttctaaaggaaaaaatctgtaaatggtttcaactaaactatgtacataaagaa

SEQ ID NO: 148837 - DNA, 80 bp, synthetic construct
  source 1..80: mol_type = other DNA
gctagaaggatggtgcaattgagaaggaagtttgaaatgttcacatacatgcgatttgacatggaaatcaccttcgtcat

SEQ ID NO: 148838 - DNA, 80 bp, synthetic construct
  source 1..80: mol_type = other DNA
tccacactgttgataatggatgtcacatcatcatcagtgttgtcaccttcttgtaaggcacttatgcagtgcttgatgga

SEQ ID NO: 148839 - DNA, 80 bp, synthetic construct
  source 1..80: mol_type = other DNA
ctggtgtccccctgtccacgatgtacgcgggcgcgaacaccagtggtatgaggcttgctaccgctctcatggtgctatgt

SEQ ID NO: 148840 - DNA, 80 bp, synthetic construct
  source 1..80: mol_type = other DNA
ggggtgaggaagtcggagtggtaagctccgtcaggttcttgacggtggccaacgagcgcggggtcagaggtagccaagct

SEQ ID NO: 148841 - DNA, 80 bp, synthetic construct
  source 1..80: mol_type = other DNA
tctattaagacagatattgcctcccagcctttagccactactttaattggtgaaatttctagttattttactcactggac

SEQ ID NO: 148842 - DNA, 80 bp, synthetic construct
  source 1..80: mol_type = other DNA
acacactggaagagtatcgcatcccgctcacagttaacaaaaagaatgaccaaatattcggcaccagactgttcatagga

SEQ ID NO: 148843 - DNA, 80 bp, synthetic construct
  source 1..80: mol_type = other DNA
tggcgttcgtgtagaccccgagtagcacctcaaacttgatgcccgcctctctggcatccttgcccaccagcaggtcaaag

SEQ ID NO: 148844 - DNA, 80 bp, synthetic construct
  source 1..80: mol_type = other DNA
ctaagaggtcttaacagatggacatactccaacgaacagctagacctagccagatacaagggctgcagactaacattcta

SEQ ID NO: 148845 - DNA, 80 bp, synthetic construct
  source 1..80: mol_type = other DNA
tgagaactacgacgaaacctacacgagcaaaagcaaattatttgccaagtggaacatcacctacaccgacaccgtgcagc

SEQ ID NO: 148846 - DNA, 80 bp, synthetic construct
  source 1..80: mol_type = other DNA
tgcaccaatgtacactgaatttaatgggctgcggaatataaccattccagccacacaaggtttaccaactatgttagtgc

SEQ ID NO: 148847 - DNA, 80 bp, synthetic construct
  source 1..80: mol_type = other DNA
agggaaggtctgagtgtagctttctggggggtctgtcccagaacttgcaagcagtgtactcctctagccaatcgttgtag

SEQ ID NO: 148848 - DNA, 80 bp, synthetic construct
  source 1..80: mol_type = other DNA
ccagtatctaaagcactagagcaccacacaggactatttagtccagtacttctaaccccaagcagactaaacccacagtt

SEQ ID NO: 148849 - DNA, 80 bp, synthetic construct
  source 1..80: mol_type = other DNA
aatttctctttcaaacagaccaatcagcatctactacgtacatttcctggggtgtgtcctcccactctatataagcagaa

SEQ ID NO: 148850 - DNA, 80 bp, synthetic construct
  source 1..80: mol_type = other DNA
gagaggaacttgacctggacctccgccgacgaagtcggtgaccagcttgtttcctatcccatccaaccggagaccctcgc

SEQ ID NO: 148851 - DNA, 80 bp, synthetic construct
  source 1..80: mol_type = other DNA
ttccttattcatccaacatttcctgaaagtgaaatctttgaatcaattagatggaccagagatccaaagaacacccaaga

SEQ ID NO: 148852 - DNA, 80 bp, synthetic construct
  source 1..80: mol_type = other DNA
ccaaccgtctcttctccagaggccatagacagaagattctttctagattgtgatgtgaaaataatgccagcatttaatac

SEQ ID NO: 148853 - DNA, 80 bp, synthetic construct
  source 1..80: mol_type = other DNA
gatggcactttaattggcaatttactcatattcccccaccaatttattaatcttagaacaaataacacagcaactataat

SEQ ID NO: 148854 - DNA, 80 bp, synthetic construct
  source 1..80: mol_type = other DNA
ggcgtcatgaacaacaccagctgacgcgtgggccgcaccgaagcttcctcccaggcctcgatgaccccgaacatgatgag

SEQ ID NO: 148855 - DNA, 80 bp, synthetic construct
  source 1..80: mol_type = other DNA
aaagaagcaaggagataactggttaaagaaatttacagaatggtgtaatgctgcaaagggtcttgagtgggtaggagtga

SEQ ID NO: 148856 - DNA, 80 bp, synthetic construct
  source 1..80: mol_type = other DNA
gaagtagttgtgccgtggattgatgaagatgttgactgggacccggtctttaataccaatgcgccccgcattttcgcttg

SEQ ID NO: 148857 - DNA, 80 bp, synthetic construct
  source 1..80: mol_type = other DNA
agttcattaaactttattgactacaccagtcccttgtaaagcgacgggtctcgcgtgacggcattcgtgagcagggcttc

SEQ ID NO: 148858 - DNA, 80 bp, synthetic construct
  source 1..80: mol_type = other DNA
aacagtataacctatatacctgacacagttaaaccagatgtatcgaatcacggagcttttgggcagcagtcaggtgcggt

SEQ ID NO: 148859 - DNA, 80 bp, synthetic construct
  source 1..80: mol_type = other DNA
gaccccttaacaaaacccgataacatatttgatgctagaagcaaagtagaactagaagacatgcctctctggatggcatg

SEQ ID NO: 148860 - DNA, 80 bp, synthetic construct
  source 1..80: mol_type = other DNA
cccaccacctcagcgcagggatgcctggacacaagagccatcacctcttgatagggatccgctaggatatgacgtcgggc

SEQ ID NO: 148861 - DNA, 80 bp, synthetic construct
  source 1..80: mol_type = other DNA
gcggcaggtcgatgacgctgccgatgaggccgccgcgcagcgcggcgctgagtgcaaagaggacgatcttggtgggctct

SEQ ID NO: 148862 - DNA, 80 bp, synthetic construct
  source 1..80: mol_type = other DNA
acaaggcgcctttcaactcggccattggctctggtgacgttaaatgtcctgttcctattagtcacagcctgtagatttgg

SEQ ID NO: 148863 - DNA, 80 bp, synthetic construct
  source 1..80: mol_type = other DNA
ctatgtcgtgcacttcctgggctgtgtctacgtgataatataaatgcttgcacttccgaatggctgagtttatgctgccc

SEQ ID NO: 148864 - DNA, 80 bp, synthetic construct
  source 1..80: mol_type = other DNA
tagagcatgacaaagtggtcctgcagctaaaagaactcctaaatggcctagggttctctaccccagaggagaagttccaa

SEQ ID NO: 148865 - DNA, 80 bp, synthetic construct
  source 1..80: mol_type = other DNA
gccgttggagggtggaatgacaggtgtgcggggacagagaggcggtcgcgtccccggccgcggcagccaagcccccaagg

SEQ ID NO: 148866 - DNA, 80 bp, synthetic construct
  source 1..80: mol_type = other DNA
tgttaatagtgttaaggaacaaattagtgcaataaaccctgttaacaacatcagtaaaaagatagttaaatggatgctaa

SEQ ID NO: 148867 - DNA, 80 bp, synthetic construct
  source 1..80: mol_type = other DNA
aagatctttgagaacatgctatccattaacccagacctactacaaagcaactatcaaaatttaattaactatttaaatag

SEQ ID NO: 148868 - DNA, 80 bp, synthetic construct
  source 1..80: mol_type = other DNA
ccatttccaacaaaacctgacagaaaccaatttgaacaatggaaaaacaaattcacagaccccagagacagcaactttct

SEQ ID NO: 148869 - DNA, 80 bp, synthetic construct
  source 1..80: mol_type = other DNA
ccattgaaaacttcatgagccgatctgcgtgcgtgtattacaccaagtacaaaacaaaagatacagacccatcggagatg

SEQ ID NO: 148870 - DNA, 80 bp, synthetic construct
  source 1..80: mol_type = other DNA
tggatacccagagcccctagggcattaccatatgagacaatagggcgtacaaattatcccaaaacagttgtcccagtcat

SEQ ID NO: 148871 - DNA, 80 bp, synthetic construct
  source 1..80: mol_type = other DNA
agaaagcacacggctgagtgaaggcagcaagggcggcagagaccaaccgcgacggaggaagacccggtgccagagggctg

SEQ ID NO: 148872 - DNA, 80 bp, synthetic construct
  source 1..80: mol_type = other DNA
cactatcgcatggttcacacggacccgtacacagacgcaggttacatcacctgttggtaccagaccagcgtggtggtgcc

SEQ ID NO: 148873 - DNA, 80 bp, synthetic construct
  source 1..80: mol_type = other DNA
gctttaattgtgggaaaccaggccacactgccagaaattgcagggcaccaagaagaaaggggtgctggaaatgtggagag

SEQ ID NO: 148874 - DNA, 80 bp, synthetic construct
  source 1..80: mol_type = other DNA
tagcttggatattttggccagtcttaatttattgtcattggtttcagcaatcggacatccggtctctaggcagtttattc

SEQ ID NO: 148875 - DNA, 80 bp, synthetic construct
  source 1..80: mol_type = other DNA
gtggtaccgaaagctggaataattgcagggattgttactagcgttgagataaactgtgtcttcctgaattagtgtaatag

SEQ ID NO: 148876 - DNA, 80 bp, synthetic construct
  source 1..80: mol_type = other DNA
ccggcggcagcggcggttccggccccgcgggcaggtgcggcagaggcacgtcggcgtggcgctcgggcaggtcccggtgc

SEQ ID NO: 148877 - DNA, 80 bp, synthetic construct
  source 1..80: mol_type = other DNA
acacaatagaaaagtatagaataccattgatgcagaatcagcaagaacaacaagtctttggtttttccctatttttggga

SEQ ID NO: 148878 - DNA, 80 bp, synthetic construct
  source 1..80: mol_type = other DNA
tagtgggttgagtaagcaagatttttccatggaccctgaaaaatttacgaagccaattgctgaagcgatgacaaatcctg

SEQ ID NO: 148879 - DNA, 80 bp, synthetic construct
  source 1..80: mol_type = other DNA
atgtcacctacaagatttaccactgtgggctgccttccatggctacatagattttgtacagagtgaactaggcatacaag

SEQ ID NO: 148880 - DNA, 80 bp, synthetic construct
  source 1..80: mol_type = other DNA
gctagtggcgctgcgtggcaccaacaacgatcccaggcctcagcgtcaggagagggccagagaactggccctcgttggca

SEQ ID NO: 148881 - DNA, 80 bp, synthetic construct
  source 1..80: mol_type = other DNA
gacagcgcttttacaaggtgatacggaggtagctgtcaacgatgctgtggccagggtggctgacacaatagctagtggac

SEQ ID NO: 148882 - DNA, 80 bp, synthetic construct
  source 1..80: mol_type = other DNA
ataaggcaataggcttttccgcttctactgaagcccaaagtgcagtattagacactttatatacacaaaactcatactgg

SEQ ID NO: 148883 - DNA, 80 bp, synthetic construct
  source 1..80: mol_type = other DNA
cttgtgtaactttccaagttctgcaatctgtctataacgaataccttagtattacagcctttgatggcaccgataaaaca

SEQ ID NO: 148884 - DNA, 80 bp, synthetic construct
  source 1..80: mol_type = other DNA
acaaaatttgcaattaccatctggccacaccctcagaccacctgaatgcggtgagtgtgatgtgggatagagatctcatg

SEQ ID NO: 148885 - DNA, 80 bp, synthetic construct
  source 1..80: mol_type = other DNA
gcataagaccccccaacatgtttgaagacaagtggtacacacaagaggacctctgtcccgttaatcttgtgtcacttgcg

SEQ ID NO: 148886 - DNA, 80 bp, synthetic construct
  source 1..80: mol_type = other DNA
tggaagcatacaccccatttggttccaagctttgaaggaagtgttagcaaatttatcatttgaaccaatcctaatagata

SEQ ID NO: 148887 - DNA, 80 bp, synthetic construct
  source 1..80: mol_type = other DNA
cggttcaaacgcggtacgcgcgccgccagatgtttctgaaccctttctcttccggttccactgcagaattcacaagactg

SEQ ID NO: 148888 - DNA, 80 bp, synthetic construct
  source 1..80: mol_type = other DNA
gtgaggttactaagggacaccacccacattagtcaaactgctttgaatgtaagaacacagggcattgacgatgtcattga

SEQ ID NO: 148889 - DNA, 80 bp, synthetic construct
  source 1..80: mol_type = other DNA
ggatattgtgcagccttacttagaaagtactttgccacttctcagggagaaattacttcaaaaaagaatgtgtctgaagc

SEQ ID NO: 148890 - DNA, 80 bp, synthetic construct
  source 1..80: mol_type = other DNA
ctcatcaatctaagtagcactccaaccaacagaatgattcgttatgagtatgcaacaaaaacaggtcagtgtggaggggt

SEQ ID NO: 148891 - DNA, 80 bp, synthetic construct
  source 1..80: mol_type = other DNA
ttacccaacacaacctggacagtgtggaggtgtcataatgagcacaggtaatattattggcatacacgtgggcggtaatg

SEQ ID NO: 148892 - DNA, 80 bp, synthetic construct
  source 1..80: mol_type = other DNA
ttcaaccaagcataaatcaggttctaatgtttccagaaagaggtccaaaacccgctcctagcactggagactgggaaaca

SEQ ID NO: 148893 - DNA, 80 bp, synthetic construct
  source 1..80: mol_type = other DNA
gaagagtaaggaggaggcgatgggggaggcggaggtggagacggaggtacagacgcagactaagactgagacgcagacgc

SEQ ID NO: 148894 - DNA, 80 bp, synthetic construct
  source 1..80: mol_type = other DNA
tggctcttagggtaggggttgtaacggaaggcaataatcacatcatccaatagggtcatgcccaccttgacgttcagcgg

SEQ ID NO: 148895 - DNA, 80 bp, synthetic construct
  source 1..80: mol_type = other DNA
aatataggagcagcgtcagacgaatcgcggctggtggcccggggggtgggacgcgccgcctacacaaaatgctcccgaaa

SEQ ID NO: 148896 - DNA, 80 bp, synthetic construct
  source 1..80: mol_type = other DNA
aagaaaatatgaattgtttacatatacaagatttgattcagaaatcacaatagtcaccgcagcagcagtacaaggagatg

SEQ ID NO: 148897 - DNA, 80 bp, synthetic construct
  source 1..80: mol_type = other DNA
gtacaagatgggtcaaaatgttgccactacagataggtatgacaactggataatttccatcagagatatggtgcagttaa

SEQ ID NO: 148898 - DNA, 80 bp, synthetic construct
  source 1..80: mol_type = other DNA
aatcccaccttagaagaaatgttaacagcttgtcagggagtgggaggtcctggacaaaaggctaggttaatggccgaggc

SEQ ID NO: 148899 - DNA, 80 bp, synthetic construct
  source 1..80: mol_type = other DNA
ctatagctcccatgagtgctgaatataatggtttgagattagccggaccacaaggtctgcccaccatgttaaccccgggt

SEQ ID NO: 148900 - DNA, 80 bp, synthetic construct
  source 1..80: mol_type = other DNA
ttatctcttcggcaatggtactctactaggcaacgcgtttgtgttcccacatcagataatcaacctacgtaccaacaatt

SEQ ID NO: 148901 - DNA, 80 bp, synthetic construct
  source 1..80: mol_type = other DNA
ctccagtgacccgtagagctctggcactgcctgctgctccggagtcatggcgttccggtggtggtggtggagacgccgcc

SEQ ID NO: 148902 - DNA, 80 bp, synthetic construct
  source 1..80: mol_type = other DNA
aggtgtacactgttgagggtggaatgccatctggtatatgtgggacaagtatctttaacacaatgatcaataatattatc

SEQ ID NO: 148903 - DNA, 80 bp, synthetic construct
  source 1..80: mol_type = other DNA
aactgtattcccagccgcccgaacacggagtagaacacccatgccacgtctacgctcacgatgcgcaagtacgtggttcc

SEQ ID NO: 148904 - DNA, 80 bp, synthetic construct
  source 1..80: mol_type = other DNA
ctattccaaaaattactaccacaaaatacctctacagacaaagacgcctggcaatacacatacacaccactcatgtccaa

SEQ ID NO: 148905 - DNA, 80 bp, synthetic construct
  source 1..80: mol_type = other DNA
gacgggcaaaataaactctaccattcgtcaccgtcattgtttatatagacttcctggggcgtgtctatgaagtctatata

SEQ ID NO: 148906 - DNA, 80 bp, synthetic construct
  source 1..80: mol_type = other DNA
tggcttaagtgagggggaaactgccaagaaattctcgaaaaccagcactaatggtaccaacactgtgcagtcgattgtga

SEQ ID NO: 148907 - DNA, 80 bp, synthetic construct
  source 1..80: mol_type = other DNA
gctcaagtttcgtcacagaaagttggggcccacgagaacaccaatgtggcaactggtggttcaactgtaaactacaccac

SEQ ID NO: 148908 - DNA, 80 bp, synthetic construct
  source 1..80: mol_type = other DNA
taataaattatgccaaatgaatgattacataatgacagcagcaagacactatgctgcccaactatttccattagatatta

SEQ ID NO: 148909 - DNA, 80 bp, synthetic construct
  source 1..80: mol_type = other DNA
taaaaaccacaggtgatttttacacaggtaacaatccagtttttggcatgtgtaaatacaagccaaccaaggacatacta

SEQ ID NO: 148910 - DNA, 80 bp, synthetic construct
  source 1..80: mol_type = other DNA
ggcttgcttcagcatacaactgtttttatgatggttattcacatgatgataaagatacaccatatggaataacagttctc

SEQ ID NO: 148911 - DNA, 80 bp, synthetic construct
  source 1..80: mol_type = other DNA
tcatcgacagatgagagatcagaaatcaaacttggacatgttaagtcatccagtcgtgccctcaagtcagctataaggat

SEQ ID NO: 148912 - DNA, 80 bp, synthetic construct
  source 1..80: mol_type = other DNA
ctcagccggtggcgcccagaaatgatgtttcagcaagaagtaatgagagacattgttcagactggcccctacagctataa

SEQ ID NO: 148913 - DNA, 80 bp, synthetic construct
  source 1..80: mol_type = other DNA
gacattagagatttccaatgtgctgaggaacaaggaatatcagattacatgcagtacttaggtgaggcttttggaactgg

SEQ ID NO: 148914 - DNA, 80 bp, synthetic construct
  source 1..80: mol_type = other DNA
tacaccttggacacagtagagtggagtaaggagtccaagggttggtggtggaaactccctgacgccctgaaagacatggg

SEQ ID NO: 148915 - DNA, 80 bp, synthetic construct
  source 1..80: mol_type = other DNA
cacaaacctaatattttgacaactgcttgtttatccaccttattaattatggatgttacttcttcctcagtattgtcacc

SEQ ID NO: 148916 - DNA, 80 bp, synthetic construct
  source 1..80: mol_type = other DNA
aaactgccatgtgataaccacctcaaaaggggagttcaacatgcttggaatccatgataactgtgctgtcctgccaaccc

SEQ ID NO: 148917 - DNA, 80 bp, synthetic construct
  source 1..80: mol_type = other DNA
atcaattggcaagtgccaccactggaaatgtgacagcagggtataactttactcatcctggtgaaggaggaagggaagtt

SEQ ID NO: 148918 - DNA, 80 bp, synthetic construct
  source 1..80: mol_type = other DNA
tcaggaagaaattggaacttttcacatatgttagatttgattcagaatacaccatcttggcaactgcctcacaacccacc

SEQ ID NO: 148919 - DNA, 80 bp, synthetic construct
  source 1..80: mol_type = other DNA
catactgcgtacaggtgggggttggaaatcacgagtctaccaaacccatattctcatttcagttaagtcctggcagtagt

SEQ ID NO: 148920 - DNA, 80 bp, synthetic construct
  source 1..80: mol_type = other DNA
atgttgctacgtgcagattctacaccttggagtctgtcacgtgggagacctcatctgatgggtggtggtggaagttccca

SEQ ID NO: 148921 - DNA, 80 bp, synthetic construct
  source 1..80: mol_type = other DNA
tgtgataaatgtcaccaaaagggagaagccatacatgggcaagtaaatacagaactagggacatggcaaatggattgcac

SEQ ID NO: 148922 - DNA, 80 bp, synthetic construct
  source 1..80: mol_type = other DNA
caataatagtgccatatgtgaatgcagtgccaatggattcaatgctcagacataataattggagtttagtgataattcct

SEQ ID NO: 148923 - DNA, 80 bp, synthetic construct
  source 1..80: mol_type = other DNA
aatttaacttcacctggggtggcaacctggtatctcaacaggacatcagaaacccctgcaaagaaaccagcgactctccc

SEQ ID NO: 148924 - DNA, 80 bp, synthetic construct
  source 1..80: mol_type = other DNA
aagaaatacaatttcaacaaacaaaaaattcaaaatttaaaaattttcgggtctattacagagaaggcagagaccagctc

SEQ ID NO: 148925 - DNA, 80 bp, synthetic construct
  source 1..80: mol_type = other DNA
aaagccaagtgtcttcaaatgctttgcaaataaagtagtctcaaatacaagaaaggcggcaaaggaggtggttgattggt

SEQ ID NO: 148926 - DNA, 80 bp, synthetic construct
  source 1..80: mol_type = other DNA
atcctgtgtttaagcctttcaccagcgtcagatgagagactgtcctacacaatgctgggtgaaatactaaactactatac

SEQ ID NO: 148927 - DNA, 80 bp, synthetic construct
  source 1..80: mol_type = other DNA
atctccttctgcagcacgtttaggtcctgacagtccgaaaaattgaaaaaacccatgtacttcaccaccatccactcact

SEQ ID NO: 148928 - DNA, 80 bp, synthetic construct
  source 1..80: mol_type = other DNA
caaggctcttaaaaagccatgtttctcggtaaactttacagaaagaaaagcaaagtgcttctgcaagctgtgccaacttt

SEQ ID NO: 148929 - DNA, 80 bp, synthetic construct
  source 1..80: mol_type = other DNA
tagacaagggcgagggcaacagaatctggttccagtaccacactaaaaaagacaacagatacacactaggcaactgtcac

SEQ ID NO: 148930 - DNA, 80 bp, synthetic construct
  source 1..80: mol_type = other DNA
gttgtagagtcaaaagcacagggcatcgatcagatagctaggtgtaactgtaggtctggtgtgtattactgtgaatctag

SEQ ID NO: 148931 - DNA, 80 bp, synthetic construct
  source 1..80: mol_type = other DNA
acgctaatccaggagagaaaggaggagaattcactaacacgtacaaccccgcggctacagatgctgccgaggggcggaag

SEQ ID NO: 148932 - DNA, 80 bp, synthetic construct
  source 1..80: mol_type = other DNA
gtcacgcggccgcgcttgcgcgcgccgcgtatgtgcttacacaccacgcacctagattaaggtgcgcgcgctagcgcgcg

SEQ ID NO: 148933 - DNA, 80 bp, synthetic construct
  source 1..80: mol_type = other DNA
atagttaaaattctagttagaatcctatgttatatggttctttactgtcacaagccaaacatcctcactacagcttgtct

SEQ ID NO: 148934 - DNA, 80 bp, synthetic construct
  source 1..80: mol_type = other DNA
tcaccacgtgatttgtcacgtgaccgctacgtcacggccgccattttagttcacaaaatggcggacttccttcctgtttt

SEQ ID NO: 148935 - DNA, 80 bp, synthetic construct
  source 1..80: mol_type = other DNA
tcacacaagacccgggaaaattcacacaacctgtattagatgctctgcgtgaagcagtgccgcccttacaatcaccaagt

SEQ ID NO: 148936 - DNA, 80 bp, synthetic construct
  source 1..80: mol_type = other DNA
gcagggggactttatgaacaccccatggaggaacccaggagatccaaattcatataggcagcaaaacatggatgatgtag

SEQ ID NO: 148937 - DNA, 80 bp, synthetic construct
  source 1..80: mol_type = other DNA
gatttctcagtgcgcatgctcagggatacaccgttcatagatcagaaggctgaactacaaggtgatgttgaggactcagt

SEQ ID NO: 148938 - DNA, 80 bp, synthetic construct
  source 1..80: mol_type = other DNA
tattgtagaagcaaagaccgctactaccctataacagtgacaccccatgattggtacccaattgaagagacaatctatta

SEQ ID NO: 148939 - DNA, 80 bp, synthetic construct
  source 1..80: mol_type = other DNA
ccgggggtggggacggcgcgttgcggaaccggggacagtagtgaggacggagacacggggtgacgtcggagtgttcgggg

SEQ ID NO: 148940 - DNA, 80 bp, synthetic construct
  source 1..80: mol_type = other DNA
gtcgggtacaaaagaccccggctggaaacccaatacaaagggcacacatcagaccaagaagaagacgcctattatttact

SEQ ID NO: 148941 - DNA, 80 bp, synthetic construct
  source 1..80: mol_type = other DNA
acaagctgaaccgagtgacacaatccagacacgacatgtggtaaatcaccacaaaagatctgagtcatccgttgagaact

SEQ ID NO: 148942 - DNA, 80 bp, synthetic construct
  source 1..80: mol_type = other DNA
agctcctcaagcacaagctcaaaaagctattcaagcaattagtaaaaacacaacatcacctgaacgcccccattttccac

SEQ ID NO: 148943 - DNA, 80 bp, synthetic construct
  source 1..80: mol_type = other DNA
gagaactttcccttagtgggaatcccacatgtagattaatgaaatacaattatccaacccgccctggtcagtgtggtggt

SEQ ID NO: 148944 - DNA, 80 bp, synthetic construct
  source 1..80: mol_type = other DNA
tatggcaggcgggcttgtggacggcttcggcccacccacagcaagaatgccatcatctgtcctcacccccatgtttcccc

SEQ ID NO: 148945 - DNA, 80 bp, synthetic construct
  source 1..80: mol_type = other DNA
aacatacgagccgggagcataaagtgtaaagcctggggtgcctaatgagtgagctaactcacattaattgcgttgcgctc

SEQ ID NO: 148946 - DNA, 80 bp, synthetic construct
  source 1..80: mol_type = other DNA
gccggggacaccttctacgggctagtatccatcaatgattttggtgtactggcagttagggcagtgaaccgcagcagccc

SEQ ID NO: 148947 - DNA, 80 bp, synthetic construct
  source 1..80: mol_type = other DNA
ttgctatcagggttgatattgcctctcagcctctggctaccaccctgcttggcgaaattgcaagttactacactcattgg

SEQ ID NO: 148948 - DNA, 80 bp, synthetic construct
  source 1..80: mol_type = other DNA
aagttattacacccttagtttacagtccaaaaccgcagggcggcgtgtgggggctgacgcgtgcccccactccacaattt

SEQ ID NO: 148949 - DNA, 80 bp, synthetic construct
  source 1..80: mol_type = other DNA
tagtgtgaatgatactctactatttagaacaacttttgggaatcttttttcaaaatttcatctaaatcctggaatcgtca

SEQ ID NO: 148950 - DNA, 80 bp, synthetic construct
  source 1..80: mol_type = other DNA
aggctcttttctcaaaatacgtgggaaatacgcttcacgaaccagacgagtttgtcaaggaggcggccttacattatgcc

SEQ ID NO: 148951 - DNA, 80 bp, synthetic construct
  source 1..80: mol_type = other DNA
agaactaggaggtgcacaaatacaaagatttatacacggaatgttcacacagtggacaggtatattcagtcctgcatttt

SEQ ID NO: 148952 - DNA, 80 bp, synthetic construct
  source 1..80: mol_type = other DNA
tgtgcgtcccatggatcagccagacgcattacaggtttgtatccaaggacagttacactgacgccggattcatcacatgt

SEQ ID NO: 148953 - DNA, 80 bp, synthetic construct
  source 1..80: mol_type = other DNA
atgggcggaggttggtgccacaaagcccaggatgaactcgtctgcataagcccaggtcagtcctaggtcagcggccgcgt

SEQ ID NO: 148954 - DNA, 80 bp, synthetic construct
  source 1..80: mol_type = other DNA
cacaactactggacccgtagcaaccaggacctagagctagcactgtactacgggtgcaccattaaattctacaggagtcc

SEQ ID NO: 148955 - DNA, 80 bp, synthetic construct
  source 1..80: mol_type = other DNA
gatttcaaggttcagggtgtgaccgatgcacgcacatcactcaccacgacgggtgctttcggccagcagtctggtgcggt

SEQ ID NO: 148956 - DNA, 80 bp, synthetic construct
  source 1..80: mol_type = other DNA
agggatttataatgtcattgatactgaatattaccgaagaggatcaatttagaaaaagattctataatagtatgttaaac

SEQ ID NO: 148957 - DNA, 80 bp, synthetic construct
  source 1..80: mol_type = other DNA
tgctaaaaaaactacaactggctccggtaaggaagctgccacactaggcgacgcagttacacaattaaaaaaccaacacg

SEQ ID NO: 148958 - DNA, 80 bp, synthetic construct
  source 1..80: mol_type = other DNA
accagaaaaaaaaaaggcacccctcggtagcgacctctcaccatcgtttgcccgtccgcccgtccttcgtagccatcatc

SEQ ID NO: 148959 - DNA, 80 bp, synthetic construct
  source 1..80: mol_type = other DNA
ttgcagaggagaattcttgtattgtaaaatgacttggtttctaaattggatagaggacagaaatatgactctcctaaagc

SEQ ID NO: 148960 - DNA, 80 bp, synthetic construct
  source 1..80: mol_type = other DNA
atagtggataacagagccaccactagcgcttagcccggtctcatgagccccagtttattgagctaattggtagtcctccg

SEQ ID NO: 148961 - DNA, 80 bp, synthetic construct
  source 1..80: mol_type = other DNA
ataatactgcaaccttggtggtcccatacattaactcagtaccaatggattcaatgactagacacaataacctatcactt

SEQ ID NO: 148962 - DNA, 80 bp, synthetic construct
  source 1..80: mol_type = other DNA
cgtttagacaagtctgccacactactgtaccatgggtaaatgataccttaacacctgattggaacaacatgacgtggcaa

SEQ ID NO: 148963 - DNA, 80 bp, synthetic construct
  source 1..80: mol_type = other DNA
atgacaatgcacttagtatactgcacttatctaatgaagtaacatctcccatacatacagagagacagagatgttataag

SEQ ID NO: 148964 - DNA, 80 bp, synthetic construct
  source 1..80: mol_type = other DNA
acagaatttaaagcagagcaagctaagtgtgtaatagagaacctgccactgtactgcgccttctttggctacgaggacta

SEQ ID NO: 148965 - DNA, 80 bp, synthetic construct
  source 1..80: mol_type = other DNA
tcggagataaaataagtgaaattacctctatggttacatcagtagtcactgaaaagttattaaagaatctaattaagctg

SEQ ID NO: 148966 - DNA, 80 bp, synthetic construct
  source 1..80: mol_type = other DNA
gtgtcacttgcggttagcgcagcttcctttacacatccgttctgcccaccactaactgacactccttgtgtaacactcca

SEQ ID NO: 148967 - DNA, 80 bp, synthetic construct
  source 1..80: mol_type = other DNA
caggtgcaaatgctcccaaaactcgcaaggatgcgatgcttggcacacatgtcatatgggacgtgggcctgcagtcttct

SEQ ID NO: 148968 - DNA, 80 bp, synthetic construct
  source 1..80: mol_type = other DNA
tggagagagggactcgtaggtgtggacgagtggtgggtaggctatgccttcttccgcgttggctggaagataggagtggg

SEQ ID NO: 148969 - DNA, 80 bp, synthetic construct
  source 1..80: mol_type = other DNA
ttaatactgtcttagcttatggagaatggcctgaatatctatcagatctagatgccacttctgtagacaagccaactcat

SEQ ID NO: 148970 - DNA, 80 bp, synthetic construct
  source 1..80: mol_type = other DNA
gatactttgctgtttagaacaacttttggaaatctcttttcaaaatttcatttgaatcccggaatagttacaggttcagc

SEQ ID NO: 148971 - DNA, 80 bp, synthetic construct
  source 1..80: mol_type = other DNA
catcgagcccaaggccggccaggccctcctcaaagcctttctggtacatgaagctccggctcgtggagtccgcacctcct

SEQ ID NO: 148972 - DNA, 80 bp, synthetic construct
  source 1..80: mol_type = other DNA
gtgctcaccaagcttggatttaaacactccaatttaataaaaacaatatgtaacacacaccacatatttagggatgaaat

SEQ ID NO: 148973 - DNA, 80 bp, synthetic construct
  source 1..80: mol_type = other DNA
gtagtcccaaatattagtgcaagcaacccacaaacttcaaattcagcaccagcactagatgctgcagaaacgggtcatac

SEQ ID NO: 148974 - DNA, 80 bp, synthetic construct
  source 1..80: mol_type = other DNA
gcatccccggggaaaaaagaggaagaagtcccaaagggacggcagcgcgagtctctggggacgcgacgatcaactcccga

SEQ ID NO: 148975 - DNA, 80 bp, synthetic construct
  source 1..80: mol_type = other DNA
tatctgaaggttgtaatgatacatgcccttgttcgtgcaactgcctcacctccaccgcctcaaccatcaaaaattcgtct

SEQ ID NO: 148976 - DNA, 80 bp, synthetic construct
  source 1..80: mol_type = other DNA
gcaagccaatggatcttgccatcttaaagtgtaagctgccattcaggttcaagaagaactccaagtattatactaacaaa

SEQ ID NO: 148977 - DNA, 80 bp, synthetic construct
  source 1..80: mol_type = other DNA
aggcaaggccatttatgttacagtatatgtatgtacctccaggtgcccctaagccaacgggtagagatgcttttcagtgg

SEQ ID NO: 148978 - DNA, 80 bp, synthetic construct
  source 1..80: mol_type = other DNA
tttcataaatgcgcgcgcggagaagggtttctctttggatgttgtcaaagcctatgctcgtactcttgtttccgagattc

SEQ ID NO: 148979 - DNA, 80 bp, synthetic construct
  source 1..80: mol_type = other DNA
caccgggcctcgtgacatggcgcctccttccaccgggcctcgtgacatggcgcctccttccaccgggcctcgtgacatgg

SEQ ID NO: 148980 - DNA, 80 bp, synthetic construct
  source 1..80: mol_type = other DNA
caatacgtagtgggccctcaaattccgaagcagttcctgcgctcacagccgctgaaaccgggcatacctcacaagtagta

SEQ ID NO: 148981 - DNA, 80 bp, synthetic construct
  source 1..80: mol_type = other DNA
gacgggcgtctgtgtctgtttgattccccggggaaaagaggaagacgtccccaggggacggcagcgcgaaagtggaagcg

SEQ ID NO: 148982 - DNA, 80 bp, synthetic construct
  source 1..80: mol_type = other DNA
attttataccaaggaaaagttcagcacgtcatgtttgacgcacgacgtctgatacaccaccgtggccaccactgcggtct

SEQ ID NO: 148983 - DNA, 80 bp, synthetic construct
  source 1..80: mol_type = other DNA
cctagaacatttccagatgtttagcttggatattttggccagtcttaatttattgtcattggtttcagcaatcggacctc

SEQ ID NO: 148984 - DNA, 80 bp, synthetic construct
  source 1..80: mol_type = other DNA
agcagctaaaaatgctagaaaagcatacacagaagctgccaaaaaaataattacaccttgggtttttggtaacgaagaag

SEQ ID NO: 148985 - DNA, 80 bp, synthetic construct
  source 1..80: mol_type = other DNA
agcccgatagtcttgctcttcgcgaacgatctcgtccggttcctcgcagtcttcgtggtccacagaagatgaggagcagg

SEQ ID NO: 148986 - DNA, 80 bp, synthetic construct
  source 1..80: mol_type = other DNA
ttgttgagattgatacgggtttttaatcaaattaacataatgattatcacatgatttttactaatcaaactaattttggg

SEQ ID NO: 148987 - DNA, 80 bp, synthetic construct
  source 1..80: mol_type = other DNA
ttaccacttatggatacgggcaccaaaaccaagcagtatacgttgctggctacaaaatagtcaactaccacttagctact

SEQ ID NO: 148988 - DNA, 80 bp, synthetic construct
  source 1..80: mol_type = other DNA
acaacactaatatattgtgaacgccaaacagacccgccctcagaaatcaaagtggtctggtcaatctcaaaataaacacc

SEQ ID NO: 148989 - DNA, 80 bp, synthetic construct
  source 1..80: mol_type = other DNA
aacaagggtgattatggatacgtgtaatacaacactaaatactacaaacttaggattcaggacacaatcaattggtgcag

SEQ ID NO: 148990 - DNA, 80 bp, synthetic construct
  source 1..80: mol_type = other DNA
ttggtgggtccattcttaatggtggagagcagcttggaagaggaaattatgccatttcgcaatatgtcccacatcaggtt

SEQ ID NO: 148991 - DNA, 80 bp, synthetic construct
  source 1..80: mol_type = other DNA
catgtggtacagaagataggaaaagaagccatagtaatatggggaaaaattccaatgttccatctgccagtagaaagaga

SEQ ID NO: 148992 - DNA, 80 bp, synthetic construct
  source 1..80: mol_type = other DNA
cttagactacaacagaataagtccagaaataccaggagtatacaaagacataatatacaacccactaacagataagggca

SEQ ID NO: 148993 - DNA, 80 bp, synthetic construct
  source 1..80: mol_type = other DNA
gcacattgatggtcgttgcaattcctgaacatcagcttgcatacattggtactggcaatgtcacagtgggatacaagcat

SEQ ID NO: 148994 - DNA, 80 bp, synthetic construct
  source 1..80: mol_type = other DNA
acactagacctagttcacaccagattggcacaggtgaagtcccggcactgcaagcagcagaaactggtgctacgtcaaac

SEQ ID NO: 148995 - DNA, 80 bp, synthetic construct
  source 1..80: mol_type = other DNA
aagtgactatgtgttagctagtaccaacatagcacatttgactcccccaaccgttactattcctgaggctctcacacgta

SEQ ID NO: 148996 - DNA, 80 bp, synthetic construct
  source 1..80: mol_type = other DNA
tacttgggaaacagcaacgttcttgaaacggtttttccgcgctgatgaacaattcccttacttagtacacccagttatgc

SEQ ID NO: 148997 - DNA, 80 bp, synthetic construct
  source 1..80: mol_type = other DNA
aatttaaaaagcctttttaatactgtctgcgtcatatggtgcatacacgcagaagagaaagtgaaagatactgaagaagc

SEQ ID NO: 148998 - DNA, 80 bp, synthetic construct
  source 1..80: mol_type = other DNA
gccatcgcgtctggacgcagaaggcctcccggcctcttttatagctagtctccacacccaatactctactgaaccatcac

SEQ ID NO: 148999 - DNA, 80 bp, synthetic construct
  source 1..80: mol_type = other DNA
ggagaagaacaatataaaacacttcaaaatattctatacacaacgtgcacatactatgaaacatcacaagtattagcaca

SEQ ID NO: 149000 - DNA, 80 bp, synthetic construct
  source 1..80: mol_type = other DNA
tctccagcagctgcgagttcgaaaaatcactcaagcgcgcgctcatcttgaccgagtcactcgccttttgtcactgttgt

SEQ ID NO: 149001 - DNA, 80 bp, synthetic construct
  source 1..80: mol_type = other DNA
tgcgcgtcgtaggcgaacacggcgccgtacgcgtccacgaacacctggtaccggcaggtggcgtgcgagaccgtgccaat

SEQ ID NO: 149002 - DNA, 80 bp, synthetic construct
  source 1..80: mol_type = other DNA
acccttggtgtctttgcagtccccgaatgctgcttagcaggagattcgaatacgaagacaaactacacttcatacatcaa

SEQ ID NO: 149003 - DNA, 80 bp, synthetic construct
  source 1..80: mol_type = other DNA
ttagaattaaatatcttgaatcagctgtgaactcagaacacattttctcagtagacaaaaattgtgaaactattgcaaaa

SEQ ID NO: 149004 - DNA, 80 bp, synthetic construct
  source 1..80: mol_type = other DNA
aacaacagaaagaacggactacaatgagcgactgggtacccccaacacagaatgtatccggtagagaagaagactggcta

SEQ ID NO: 149005 - DNA, 80 bp, synthetic construct
  source 1..80: mol_type = other DNA
gacgtttaagtcacagtacacaccaggcaccaccactgaagatgcgagaacgtttagccctattgactacctattcggat

SEQ ID NO: 149006 - DNA, 80 bp, synthetic construct
  source 1..80: mol_type = other DNA
ggagactcttgtctggcagtttgattccctcctggcatattcagatgaggccttcaacaggttcccagaagagtttgggt

SEQ ID NO: 149007 - DNA, 80 bp, synthetic construct
  source 1..80: mol_type = other DNA
aggttggttcacatcagattgaacctttgaaaacctctgttgataaacctggttctaaaaagactcagggggagaagttt

SEQ ID NO: 149008 - DNA, 80 bp, synthetic construct
  source 1..80: mol_type = other DNA
acaatattaaatccagaagccttagctagaagatttggatttgatttggacatatgtttacatactacatatactaaatc

SEQ ID NO: 149009 - DNA, 80 bp, synthetic construct
  source 1..80: mol_type = other DNA
acaacagtctggagctgtgtatgtaggcaactacaggatcacaaacagacacttagcaacaagctttgattggcagaatt

SEQ ID NO: 149010 - DNA, 80 bp, synthetic construct
  source 1..80: mol_type = other DNA
ctgacgtcagcgggggacctgccgttggatcttagtgttattttatttaaccacgcctccgaagaggcggccgccagtac

SEQ ID NO: 149011 - DNA, 80 bp, synthetic construct
  source 1..80: mol_type = other DNA
aatttgaaatgttcacatacctgagatttgatattgagatgaccatcgttatcacaagctcccaggtgcccgggaccatt

SEQ ID NO: 149012 - DNA, 80 bp, synthetic construct
  source 1..80: mol_type = other DNA
aattagagatcactgtactcaaattaaagagaaatgaaaaatttaaagacatcaggaagtacataccagaaaatgaagat

SEQ ID NO: 149013 - DNA, 80 bp, synthetic construct
  source 1..80: mol_type = other DNA
ataacggtgtacagacacccagagcaggactttttaatagtgtacaacagaaagagtcctctaggaggaaacatatacac

SEQ ID NO: 149014 - DNA, 80 bp, synthetic construct
  source 1..80: mol_type = other DNA
tgaggtgagtgacatcaaagtttttgctaagcccaaacacacagctgcatggatccctcgtccacctagagcaactcagt

SEQ ID NO: 149015 - DNA, 80 bp, synthetic construct
  source 1..80: mol_type = other DNA
caccggcgagcatactgtgcgttgtacactggaattacggttcctttgtatgcctgttttatgatcccttcccctctttt

SEQ ID NO: 149016 - DNA, 80 bp, synthetic construct
  source 1..80: mol_type = other DNA
gtcacccaaactggtcaacaagtatttgggtttaacctgcaacctggagcagactctgtgtttaagaggaccctattggg

SEQ ID NO: 149017 - DNA, 80 bp, synthetic construct
  source 1..80: mol_type = other DNA
ctttcttgaaagatgaacttagaaaggaagaaaaaatttcaaagggtaagactagggttattgaagcaagcagtgtgaat

SEQ ID NO: 149018 - DNA, 80 bp, synthetic construct
  source 1..80: mol_type = other DNA
ttaaactttgatggcacgctactcggaaacttgcccatttacccacatcagtacataaatttaaggactaataattcagc

SEQ ID NO: 149019 - DNA, 80 bp, synthetic construct
  source 1..80: mol_type = other DNA
aatgaaagtcaccctagcacatcaaacgctgcaccagcattagatgctgctgaaactggacacacaagcaatgtgcaacc

SEQ ID NO: 149020 - DNA, 80 bp, synthetic construct
  source 1..80: mol_type = other DNA
gaacgaggctcaaatagcagggtggttagacaggcctatgaggctgtatcctggggacccccccttctacccttggctac

SEQ ID NO: 149021 - DNA, 80 bp, synthetic construct
  source 1..80: mol_type = other DNA
acgcatggcatacggattggtgatttcttttgtttcactaagccgaaactgcgtaaaccggttctgtaacccgataaaga

SEQ ID NO: 149022 - DNA, 80 bp, synthetic construct
  source 1..80: mol_type = other DNA
tttgagaaaatgacttgggaaaatctaacatttttgaagagatattttaaaccagatgagcaatttccattccttgtcca

SEQ ID NO: 149023 - DNA, 80 bp, synthetic construct
  source 1..80: mol_type = other DNA
cgagtaggtatcttcgctgagttgtgtaaggcagtggagtcacgttatgaagtgataggaacctccatcattataatggc

SEQ ID NO: 149024 - DNA, 80 bp, synthetic construct
  source 1..80: mol_type = other DNA
tctctctgtgggccccctcctgccaagactcaacttcttcggagccgcgcgctacgccttcggctgcgcgcggcacctca

SEQ ID NO: 149025 - DNA, 80 bp, synthetic construct
  source 1..80: mol_type = other DNA
gaagagagttcgatacagacggggtcggagtcctcggaagacaagaaggagacgacgagggagctcctccagcgaaagct

SEQ ID NO: 149026 - DNA, 80 bp, synthetic construct
  source 1..80: mol_type = other DNA
accaggacctagaactggccctgtactatggctgcacaattaagttttacagggaccccgaaacagactttatagttaca

SEQ ID NO: 149027 - DNA, 80 bp, synthetic construct
  source 1..80: mol_type = other DNA
cggaggctggtaaggtgcaaacagctgtatgtaatgcaggaatgggggttgctgtaggaaaccttacaatatttccacat

SEQ ID NO: 149028 - DNA, 80 bp, synthetic construct
  source 1..80: mol_type = other DNA
gaagaggaggtggtaagcggttcaccttcaggggtaagtaacctgacctctccagggctcacataaagggaggcttagta

SEQ ID NO: 149029 - DNA, 80 bp, synthetic construct
  source 1..80: mol_type = other DNA
acataaacagtaccacgaaaacaaatcatgctctccgcgatttacatgttttaacgacacaaaaggtctcagacttaata

SEQ ID NO: 149030 - DNA, 80 bp, synthetic construct
  source 1..80: mol_type = other DNA
gacgtagtgaggccctgtaagataacaggatggatgcccctcatattctccttagaggccatctatgaacaatttctgta

SEQ ID NO: 149031 - DNA, 80 bp, synthetic construct
  source 1..80: mol_type = other DNA
gcgtggggacatgtttcttgggtaccgacgagaaggccgaaccgccgccgagcgagaggagattggcgtcatcatcaaac

SEQ ID NO: 149032 - DNA, 80 bp, synthetic construct
  source 1..80: mol_type = other DNA
catgtgttgccatcatggcattggaaaatttcaatgaaacaacaccaacttcaggcaagtcccaactctttgcaacatgg

SEQ ID NO: 149033 - DNA, 80 bp, synthetic construct
  source 1..80: mol_type = other DNA
atcagctagatctagttaggtacaaacacaccagatttaagttctatagaagcaaagacactgactttatagtaaccttt

SEQ ID NO: 149034 - DNA, 80 bp, synthetic construct
  source 1..80: mol_type = other DNA
aaatgttgccaaggctttgctaccatgtactgactgtccaaagccagagttttacaaacagtgctgcccattgacttgtg

SEQ ID NO: 149035 - DNA, 80 bp, synthetic construct
  source 1..80: mol_type = other DNA
taaagggtgtcggacctgctgagccaggtgattgtggtggtatcctaagatgtgtgcatggtccaataggtttgttgaca

SEQ ID NO: 149036 - DNA, 80 bp, synthetic construct
  source 1..80: mol_type = other DNA
ctgaatattgccagcgccttgatcttcttctcccttagagtctactcgaccagcacgtgggtttctgccccctgtctctt

SEQ ID NO: 149037 - DNA, 80 bp, synthetic construct
  source 1..80: mol_type = other DNA
acaccccggccccgccggcggccagaacgctcgaaaacccccgagaagcgcagcgccgaaacgacacagacagggaccgt

SEQ ID NO: 149038 - DNA, 80 bp, synthetic construct
  source 1..80: mol_type = other DNA
ggcagaaagagagttacagttagagtagccccccctaaactgtttgaagataaatggtactcgcagcatgacttgtgcaa

SEQ ID NO: 149039 - DNA, 80 bp, synthetic construct
  source 1..80: mol_type = other DNA
ctacgggctccggcaacagctcctcagaccctgccgatcacaatatctattgcccccatcaagtcagaattctccggtgc

SEQ ID NO: 149040 - DNA, 80 bp, synthetic construct
  source 1..80: mol_type = other DNA
gttggcggccccgggctgaggtagtcttgcggtgcggcgttgcggggaccgggccgcgcgcactgccgttgcgtggcgtg

SEQ ID NO: 149041 - DNA, 80 bp, synthetic construct
  source 1..80: mol_type = other DNA
ccagtaccgtgtaaacttaaacagactccgagttgccattggacactggagctgtgaatcagtaacgaaagtgagtgggg

SEQ ID NO: 149042 - DNA, 80 bp, synthetic construct
  source 1..80: mol_type = other DNA
atgtcgaggctttctacctcatcatccacccacgtagcttctgccgagctttggaaacgcgtcgatgcttttatccggga

SEQ ID NO: 149043 - DNA, 80 bp, synthetic construct
  source 1..80: mol_type = other DNA
gtgtctaacaccacctcgagcgggcctagcaatacagtcagcgtgcccatgttgacggcagctgaaactggacacacttc

SEQ ID NO: 149044 - DNA, 80 bp, synthetic construct
  source 1..80: mol_type = other DNA
tggcccattcccggaaccggtactctgcctagaacagtacaaatcgcggacccgcggctcctccacgagggatactattt

SEQ ID NO: 149045 - DNA, 80 bp, synthetic construct
  source 1..80: mol_type = other DNA
acaaactgttaacattgaacaaaatcctgtagaaaaatatacagaagcaatactcaatgaggttctagttgtgccaaata

SEQ ID NO: 149046 - DNA, 80 bp, synthetic construct
  source 1..80: mol_type = other DNA
ccagtggtgtcaccaacggcagccgcggtcgccgcagttgcggggcctcatcgcagccttgcgccggtacgccgggaagg

SEQ ID NO: 149047 - DNA, 80 bp, synthetic construct
  source 1..80: mol_type = other DNA
acaacagaaaaagtcctctaggaggaaacataatgactgcaccatcactacatccaggaaatgccatgctaagcaaatac

SEQ ID NO: 149048 - DNA, 80 bp, synthetic construct
  source 1..80: mol_type = other DNA
accggttacagttcttactgcggttgtcacttgtgagtacacacgcaccatttacaatgcataatgttcgtgagattgat

SEQ ID NO: 149049 - DNA, 80 bp, synthetic construct
  source 1..80: mol_type = other DNA
atcgcacgaggattggcatcagaagcccaaatatattcactgcctccagatccaaaatattttgatggatacgatcaaca

SEQ ID NO: 149050 - DNA, 80 bp, synthetic construct
  source 1..80: mol_type = other DNA
ctctcttataattagactttccatatatgccagtacattcaacaggggtcgactacgaatggggttctttccaaatttaa

SEQ ID NO: 149051 - DNA, 80 bp, synthetic construct
  source 1..80: mol_type = other DNA
cgttccctttggatacgcattcggttcaggacaaatgccagacgggtctgcatacataccctttagctttagaactaaat

SEQ ID NO: 149052 - DNA, 80 bp, synthetic construct
  source 1..80: mol_type = other DNA
actccctaaactttggaaacggaaaaatgccggggggaagcagtcaggtacccatcagaatgagaagcaagtggtacccc

SEQ ID NO: 149053 - DNA, 80 bp, synthetic construct
  source 1..80: mol_type = other DNA
aggtaccacttatttttagataacaaaccacaacagtcagacaactcacaaagagaagagagggggcacggttatccctt

SEQ ID NO: 149054 - DNA, 80 bp, synthetic construct
  source 1..80: mol_type = other DNA
cggggtgacgtcggggacggtggtgtggacggggacggaggtggcgccagagaaggggtcgttgcgggatggccggctgt

SEQ ID NO: 149055 - DNA, 80 bp, synthetic construct
  source 1..80: mol_type = other DNA
gcttaattttgatggtaccctgttgggtaacataactgtatacccacatcagttaatcaatttaagaactaacaattcag

SEQ ID NO: 149056 - DNA, 80 bp, synthetic construct
  source 1..80: mol_type = other DNA
taactatgccctgcactcggacgacgtagtgccaatgagacaggccttcggaggggctctcagcactgtatcttttagcc

SEQ ID NO: 149057 - DNA, 80 bp, synthetic construct
  source 1..80: mol_type = other DNA
cacatatgttaggtttgattcagagtacaccatcattgctacatcctcgcaaccgcaggcagcacgattttcaaacacac

SEQ ID NO: 149058 - DNA, 80 bp, synthetic construct
  source 1..80: mol_type = other DNA
cttttaccaaacagcaattatagtaccacctagcacacccactgcaatgtatatgctggcatttgttagtgcatgcaatg

SEQ ID NO: 149059 - DNA, 80 bp, synthetic construct
  source 1..80: mol_type = other DNA
ggtaacaacaacaggacccaacgggtggctcacaaatgccaaccaacactttcatttctgtaactacaagccaaatgcca

SEQ ID NO: 149060 - DNA, 80 bp, synthetic construct
  source 1..80: mol_type = other DNA
taaattgtgtaaatctatttggcaatgtgaatcatttaaacaaaaactttgtgtttaacgattgctcgaacaagctggtc

SEQ ID NO: 149061 - DNA, 80 bp, synthetic construct
  source 1..80: mol_type = other DNA
cggcgggggcgcgcgcgctacgcgcgcgcgccccggggagcggggttgcccgcacccccaccgcgcatgcgcgagtgggg

SEQ ID NO: 149062 - DNA, 80 bp, synthetic construct
  source 1..80: mol_type = other DNA
tggaagggatttactatagtgagagaagacatagaatactagacacatatctagagaatgaggaaggcattgtatctgga

SEQ ID NO: 149063 - DNA, 80 bp, synthetic construct
  source 1..80: mol_type = other DNA
gcgctggcctcggccgtgactacggacgccgacgagcgccggcgcggcctagagcagcgtagcgccgtgttggcgcgcgt

SEQ ID NO: 149064 - DNA, 80 bp, synthetic construct
  source 1..80: mol_type = other DNA
cccaaattgtgattgcactgaatgtacatattattgtcatcacaaagatagatatttccctatcaaagttaccccacatg

SEQ ID NO: 149065 - DNA, 80 bp, synthetic construct
  source 1..80: mol_type = other DNA
aaccacatgggcacactatgtttcagagcattggacgacctcgacaggaatgatgttaaagtgtatgtcaaaccaaaaca

SEQ ID NO: 149066 - DNA, 80 bp, synthetic construct
  source 1..80: mol_type = other DNA
gaggatacattaataaatatattatatctggtgtatatactgaatgctgctggttcataaggtaacgatgctactttttt

SEQ ID NO: 149067 - DNA, 80 bp, synthetic construct
  source 1..80: mol_type = other DNA
caaagactccctatggggagaccctgtatataaaacagaccaggtatatgccgcctttaaattaaatgcagaaaacttat

SEQ ID NO: 149068 - DNA, 80 bp, synthetic construct
  source 1..80: mol_type = other DNA
atagtccccaatgagtcttccaacacatgttccttaatagggtttgtggcagcaaaagatgacttttccctcagattaat

SEQ ID NO: 149069 - DNA, 80 bp, synthetic construct
  source 1..80: mol_type = other DNA
actattgcaaaagtaaggaccgttactatcctattgatgttgttacacatgattggtaccctattgaggaaagtcaatac

SEQ ID NO: 149070 - DNA, 80 bp, synthetic construct
  source 1..80: mol_type = other DNA
gggttgactacctctgtcctggtgagtcaattaaaaaacgtctagtgggccaaacccaggggggatccctggtttccttt

SEQ ID NO: 149071 - DNA, 80 bp, synthetic construct
  source 1..80: mol_type = other DNA
ctgtcccttactttgggccaggggttgactacaaaggcgatgccctcacaccattgtcacgtaaagacttgaccacctat

SEQ ID NO: 149072 - DNA, 80 bp, synthetic construct
  source 1..80: mol_type = other DNA
ctcaattgagtggcaaacttatatatgtacaactaaatatgaacctaatatcaataatcgaatgggagaaaaaatgtata

SEQ ID NO: 149073 - DNA, 80 bp, synthetic construct
  source 1..80: mol_type = other DNA
cacgacgatcccataacggtaacggccaccctcgcactcattgggtgcaccgcatcaccatggcgttggctcaaacaaaa

SEQ ID NO: 149074 - DNA, 80 bp, synthetic construct
  source 1..80: mol_type = other DNA
caaagcgaggaagaagagacggagacgccgatcctcaagcagcagctcagacagcagctccgggagcagaagctcatcaa

SEQ ID NO: 149075 - DNA, 80 bp, synthetic construct
  source 1..80: mol_type = other DNA
tcagttgccaccctctgttaatgcttctcagcaagcaccacatagtggtaaaaagcctacagactaagcccagaggcaaa

SEQ ID NO: 149076 - DNA, 80 bp, synthetic construct
  source 1..80: mol_type = other DNA
tgtataaggcattccacaagaatcctgggatattaaccgggtctgcagtagggtgtgatccagacactttttggtccatt

SEQ ID NO: 149077 - DNA, 80 bp, synthetic construct
  source 1..80: mol_type = other DNA
acctcagacgagggctctttggccaaaaagctattaagagaatgcaggaacaaccgttctatgctgaattttttgcaggc

SEQ ID NO: 149078 - DNA, 80 bp, synthetic construct
  source 1..80: mol_type = other DNA
gtgttacattcttgaagagaggcttcaaacaggatgataaatatcccttcttgattcaccctaccttcccaatttctgag

SEQ ID NO: 149079 - DNA, 80 bp, synthetic construct
  source 1..80: mol_type = other DNA
gtcagcagcgcagtcaccgacatgagagtagctatcataagcccctacaccgagccggcacttatagggtcaacaccaga

SEQ ID NO: 149080 - DNA, 80 bp, synthetic construct
  source 1..80: mol_type = other DNA
cataacatatacactaatgcacatcttactacccccaaggaagacactatattgttagcaattacggctgacctgcaagt

SEQ ID NO: 149081 - DNA, 80 bp, synthetic construct
  source 1..80: mol_type = other DNA
acagttgctttcactcccactcttctatgtgtggctgtactgattttattggtcatttcaatcacatcgctgctatgctc

SEQ ID NO: 149082 - DNA, 80 bp, synthetic construct
  source 1..80: mol_type = other DNA
tgggtaggtctgcatgtgtacatgttactgaaattgaaaacaaaagtcctgcaacagatatgaaccacaagaatcaaaag

SEQ ID NO: 149083 - DNA, 80 bp, synthetic construct
  source 1..80: mol_type = other DNA
ggttcccgccctcactgctgccgagactggacacacatctcaggttgttcctagtgacaccatacagactaggcatgtgc

SEQ ID NO: 149084 - DNA, 80 bp, synthetic construct
  source 1..80: mol_type = other DNA
agccagcgacaggacagacttagaacatgacagagtggtcctgcagctaaaggaacttctaaatggcctaggattttcca

SEQ ID NO: 149085 - DNA, 80 bp, synthetic construct
  source 1..80: mol_type = other DNA
ctatttaagcgatcatgaagccactgcagtggatcagccgacacagcctgatgtagcaacatgtcgcttctacactcttg

SEQ ID NO: 149086 - DNA, 80 bp, synthetic construct
  source 1..80: mol_type = other DNA
gatgccatttacatatactcagacaacacaggtaatacaactgcaagtcaaaacttacaaacagtaataaaaagacttgc

SEQ ID NO: 149087 - DNA, 80 bp, synthetic construct
  source 1..80: mol_type = other DNA
gataccaggagccgccggccccccgggctccataccagggataccaggagccgccggccccacatcgcacgaagaacaac

SEQ ID NO: 149088 - DNA, 80 bp, synthetic construct
  source 1..80: mol_type = other DNA
ccaaacagcacatatgactgggaaaactacagtacagacgcaaattataaaaacaccaaagagaaatgggatgcagccag

SEQ ID NO: 149089 - DNA, 80 bp, synthetic construct
  source 1..80: mol_type = other DNA
ggtacaatcttacgcatcctggagagacgggtagagatgttagcccgaaggtccgtgagaatcctgataaacaacccagt

SEQ ID NO: 149090 - DNA, 80 bp, synthetic construct
  source 1..80: mol_type = other DNA
taacagcaccgcaacaggagttacctctgactctcaacagaacacaactcagctgcctgcttcttctgctgctgctgcct

SEQ ID NO: 149091 - DNA, 80 bp, synthetic construct
  source 1..80: mol_type = other DNA
ggtgagtgctgggaagtatccaaaaatggtagggattgggaaactctaaaattgaaggaactggtgaataaaataacaga

SEQ ID NO: 149092 - DNA, 80 bp, synthetic construct
  source 1..80: mol_type = other DNA
ctttcaagaacaggcacacatcaggaaaaaatttgagtttttcacctatctgagatttgacatggaaatcactatagtaa

SEQ ID NO: 149093 - DNA, 80 bp, synthetic construct
  source 1..80: mol_type = other DNA
tccctcgcgatgtacaagtatcgaacccgcgcttgcaaaccgaagggtccacgttccacgcgtgggacttcagacggggt

SEQ ID NO: 149094 - DNA, 80 bp, synthetic construct
  source 1..80: mol_type = other DNA
tccccgccaggagcatctgtgcctaaaaaccggaaggatgctatgttgggaacccatgttatatgggacttgggcttgca

SEQ ID NO: 149095 - DNA, 80 bp, synthetic construct
  source 1..80: mol_type = other DNA
taaaaaatatgatggagctggcggaaattgataccatgatcccttttgatttgagcgctacaaagaagaacaccatggag

SEQ ID NO: 149096 - DNA, 80 bp, synthetic construct
  source 1..80: mol_type = other DNA
ggaggaggcgtaggaaaaagataaacatccagcagtggaacccccccaccgtcaggaaatgcgtggtcaccggatacctc

SEQ ID NO: 149097 - DNA, 80 bp, synthetic construct
  source 1..80: mol_type = other DNA
accaattggcttatgtaggaggagggaatgttactgttgggtacaaccatacacacccaggagaatcaggaagaaggata

SEQ ID NO: 149098 - DNA, 80 bp, synthetic construct
  source 1..80: mol_type = other DNA
ttcattacccagaaaaactttttccaaggagacaaggcgtctgaagtcacagtttctgacacacaacccagcggaccaag

SEQ ID NO: 149099 - DNA, 80 bp, synthetic construct
  source 1..80: mol_type = other DNA
ggggtcgcagaagagtaaaagtgactatccgcccccccaccctcttagaggacaagtggtacacccagcaagacctagcg

SEQ ID NO: 149100 - DNA, 80 bp, synthetic construct
  source 1..80: mol_type = other DNA
atgacaaagcactcagcatacttaacacaggtggtgtactaacacaagaaatacatactaagagacaagagtgctacagt

SEQ ID NO: 149101 - DNA, 80 bp, synthetic construct
  source 1..80: mol_type = other DNA
aggcatatagattggtggatccatactttgcttagaattaaggatatggtgttgagtgtgttcaaacccagtttagaaag

SEQ ID NO: 149102 - DNA, 80 bp, synthetic construct
  source 1..80: mol_type = other DNA
agatccaacaccttcagataatcctttcagtaaattatataaagaaacaatagaaacatttgataataatgaagaagaaa

SEQ ID NO: 149103 - DNA, 80 bp, synthetic construct
  source 1..80: mol_type = other DNA
gggcgcgaaggccagtggttcgcgtcggtttttcacagccacaattgtttttgcgggtgcggtgaccctgttgggcatct

SEQ ID NO: 149104 - DNA, 80 bp, synthetic construct
  source 1..80: mol_type = other DNA
ttacctctttgggaatggtactttactaggcaacgcgttcgtgtttccacatcaaataattaacctgcgtaccaacaatt

SEQ ID NO: 149105 - DNA, 80 bp, synthetic construct
  source 1..80: mol_type = other DNA
catcgaagcagctagtatgaatgacacagcaaatttcagaagagtgtttggcaacttatacgctggcttccatgcaaacc

SEQ ID NO: 149106 - DNA, 80 bp, synthetic construct
  source 1..80: mol_type = other DNA
atcgccaggaaccggtgtgtttgttgatccatggtagtccaggtactggtaaatctttgatcacaatgatggtggcccgt

SEQ ID NO: 149107 - DNA, 80 bp, synthetic construct
  source 1..80: mol_type = other DNA
aatgctaacccaggtgaggcgggtggtgagtttgtggacagattcaccgcagcaacagaggcatctaggaagttctgtcc

SEQ ID NO: 149108 - DNA, 80 bp, synthetic construct
  source 1..80: mol_type = other DNA
atggatacagtgggcaactggtgtgcattatagatgacataggtcaaaatacaacagatgaagattggtctgatttttgt

SEQ ID NO: 149109 - DNA, 80 bp, synthetic construct
  source 1..80: mol_type = other DNA
tcctctctattgccccagacgaactgtccccagtaacatcaaatggaaaagagtattataaaaaatttttagatgctgca

SEQ ID NO: 149110 - DNA, 80 bp, synthetic construct
  source 1..80: mol_type = other DNA
aggccccccagacccgggtctcggccagccgagccgaccggccccgcgccgggcgccttctcggggccagccgccggtgt

SEQ ID NO: 149111 - DNA, 80 bp, synthetic construct
  source 1..80: mol_type = other DNA
ggtgacgttcgtgatcacaagttgccaagatcctagcacacagctggatcaggacatgccagtattgacacaccagatca

SEQ ID NO: 149112 - DNA, 80 bp, synthetic construct
  source 1..80: mol_type = other DNA
taacaggggacgctgccctccagatcgccacctgcgtcgtggccctcgtctcctcgatcgtcaccctgcacccccacttg

SEQ ID NO: 149113 - DNA, 80 bp, synthetic construct
  source 1..80: mol_type = other DNA
ggggaagagcatgacagtcatgtggcaaacactgaggctacaggaccaacaaactcaatgcaagtccctgctctcaccgc

SEQ ID NO: 149114 - DNA, 80 bp, synthetic construct
  source 1..80: mol_type = other DNA
gcccctcatctgtcagtagtcgcgcccctcaagtgtcaataccgcagggcacttatccccaggcttgtccacatcatctg

SEQ ID NO: 149115 - DNA, 80 bp, synthetic construct
  source 1..80: mol_type = other DNA
taagaatattgcagatatggctactggtttcactaacaccattgactcaactgtgaatgctgtaactgaaggaatatcaa

SEQ ID NO: 149116 - DNA, 80 bp, synthetic construct
  source 1..80: mol_type = other DNA
cctaatctctatgtaggtagcatatgctatccatcgcaacattagcccaccgtgctctcagcgacctcgtgaatatgagg

SEQ ID NO: 149117 - DNA, 80 bp, synthetic construct
  source 1..80: mol_type = other DNA
ccgaagcatctccacgaaggctactacttcagagcctgggatctcagacgtggcctctttggtgagagagctgtcaaaag

SEQ ID NO: 149118 - DNA, 80 bp, synthetic construct
  source 1..80: mol_type = other DNA
tcacctacagcagaacaggcccatttgagaccaatgagatgagctatatgctctctcaccccctcatgatgctactaaac

SEQ ID NO: 149119 - DNA, 80 bp, synthetic construct
  source 1..80: mol_type = other DNA
tggaaagcttaatgcaacaatgtcaacaagtctatgcaaagattgtcaccaaccagccaacttcaaaaagtgttgcccac

SEQ ID NO: 149120 - DNA, 80 bp, synthetic construct
  source 1..80: mol_type = other DNA
caccccgggggcccgcgcgcgcctggggctccgggagtaggtggcaaccctaattctcctcagatccgtcgagcccgcca

SEQ ID NO: 149121 - DNA, 80 bp, synthetic construct
  source 1..80: mol_type = other DNA
attagagaaagagattgatggattaagactagcaacccagaaacagcagcaagaatacattgataccctcagagtcatgt

SEQ ID NO: 149122 - DNA, 80 bp, synthetic construct
  source 1..80: mol_type = other DNA
cctaaaagctctcagaagctactactttcattgggaaacagtacagtcagtagccacctcaagctttaatgcccaacacg

SEQ ID NO: 149123 - DNA, 80 bp, synthetic construct
  source 1..80: mol_type = other DNA
agaaagggtacaaataatggactgatactcacaataccattggagatgagtaataccctcttctccactacactgctggg

SEQ ID NO: 149124 - DNA, 80 bp, synthetic construct
  source 1..80: mol_type = other DNA
ttatgtgggaaagctgtggtggttcaagacagaaagacaaaagcaaatttttccataaacacaattgtagaacaacttaa

SEQ ID NO: 149125 - DNA, 80 bp, synthetic construct
  source 1..80: mol_type = other DNA
acccacactgtctacggacgtagtgctctcatattacggtatgcttgcacgccagtttgcccccccctctccccgttttg

SEQ ID NO: 149126 - DNA, 80 bp, synthetic construct
  source 1..80: mol_type = other DNA
cctccagcatttgccgggctacgggacgataacggaggagctggtgcaagagcgtctgtcgggccaggtgcgcgacgacg

SEQ ID NO: 149127 - DNA, 80 bp, synthetic construct
  source 1..80: mol_type = other DNA
ggtgcaccttgtcagttggagggcaaccgcatgcaacttgcggtttccgttctgctcaccacaaactgacaacccttgtg

SEQ ID NO: 149128 - DNA, 80 bp, synthetic construct
  source 1..80: mol_type = other DNA
agttatgtaccgtgccacatcaggcagatagtcaacacgtggcacaaggttggaaaatacgtatatttgcctccaaggga

SEQ ID NO: 149129 - DNA, 80 bp, synthetic construct
  source 1..80: mol_type = other DNA
aaccaaagccgagtgtcttcaaatgctttgcaaacaaaatggtctcaaatacaagaaaggcggcaaaggaagtggttgac

SEQ ID NO: 149130 - DNA, 80 bp, synthetic construct
  source 1..80: mol_type = other DNA
cagtgacaccattcaaacgaggcacgttaagaactttcatgtgaggtctgagtcatccgtggaaaatttcttaagcaggt

SEQ ID NO: 149131 - DNA, 80 bp, synthetic construct
  source 1..80: mol_type = other DNA
tggagtgcttgccggaaacataaccgtgtttccacatcaaattataaacctaaggactaataattgtgctacactagtct

SEQ ID NO: 149132 - DNA, 80 bp, synthetic construct
  source 1..80: mol_type = other DNA
atggaaataggtgccacttctgatgctacacctgaatcagtgattgaaacaagatatgttatcaacaatcacactaataa

SEQ ID NO: 149133 - DNA, 80 bp, synthetic construct
  source 1..80: mol_type = other DNA
cttcagtaccgtttattccacctatggcagatctgcccgacaagggaaaacctttctcctctgactacgtgctagcaagt

SEQ ID NO: 149134 - DNA, 80 bp, synthetic construct
  source 1..80: mol_type = other DNA
ctgttggagatctattcaccaccgctatcatttacgtgaatggagaaacacccgtcaacttcaacggtgtgaaaatggtg

SEQ ID NO: 149135 - DNA, 80 bp, synthetic construct
  source 1..80: mol_type = other DNA
gtccaaaattaattttcctcatggaatgctagatctagaagagatagctgcaaatgcaaaggaatttccaaatatgtcag

SEQ ID NO: 149136 - DNA, 80 bp, synthetic construct
  source 1..80: mol_type = other DNA
tgtgtttggctggggacaacaacaccactcccacatacaccagttaccagaatgcaaacccgggcgagaagggaggcacc

SEQ ID NO: 149137 - DNA, 80 bp, synthetic construct
  source 1..80: mol_type = other DNA
accaacttctcaccaggcagctcaggcgcagcctccacccccgggcacacaggcccccgaagcccactgtgtggccgagt

SEQ ID NO: 149138 - DNA, 80 bp, synthetic construct
  source 1..80: mol_type = other DNA
acaaaacattcctgagtgagggcgacaccgctaaagagttcacagaggcatctgtttcgacatcgcacggggtccaaaca

SEQ ID NO: 149139 - DNA, 80 bp, synthetic construct
  source 1..80: mol_type = other DNA
tacatttgtgtgaaccagaaaatctgaatgactcagtgctgatctgttactcaagtgatttagtcatataccgaacaaac

SEQ ID NO: 149140 - DNA, 80 bp, synthetic construct
  source 1..80: mol_type = other DNA
aagtcaatcaggaccctttgcatttagagaaaaaaaacctagcgccagcataacagcaaagtacaaatttagatggcact

SEQ ID NO: 149141 - DNA, 80 bp, synthetic construct
  source 1..80: mol_type = other DNA
tgtcagatcatgaatatcttaagaatttattactcaccatccatcatgcaccgctatgctgtggtccagcccctacatat

SEQ ID NO: 149142 - DNA, 80 bp, synthetic construct
  source 1..80: mol_type = other DNA
gtcaaactcagagagggtacccgccctcactgcagcggaaacagggcacacatcacaagttgtacccagtgacaccatcc

SEQ ID NO: 149143 - DNA, 80 bp, synthetic construct
  source 1..80: mol_type = other DNA
agaattacaaatatacttcacatggctatggttgactctttcatgccactaaataatgttgaaaccaatgtgggacaagt

SEQ ID NO: 149144 - DNA, 80 bp, synthetic construct
  source 1..80: mol_type = other DNA
gtcgcagctacgtcatcagtcacgtggggagggtttgctgtaaacccggaagcaatcctcccacgtggttggtcacgtga

SEQ ID NO: 149145 - DNA, 80 bp, synthetic construct
  source 1..80: mol_type = other DNA
atgtataaccctaccaatatactggacataaagcagggaccaaaggaacccttccaaagctatgtagacagattctacaa

SEQ ID NO: 149146 - DNA, 80 bp, synthetic construct
  source 1..80: mol_type = other DNA
aggtagggacagatataaaagtaataccaagaaggaaggccaaaatcatcagagactatggaggaagacaagagatggat

SEQ ID NO: 149147 - DNA, 80 bp, synthetic construct
  source 1..80: mol_type = other DNA
cgtaccttaccaatcaccgtctcaattgctccagacagatctgagttttctggtgccagacagtccgccactcgccaggg

SEQ ID NO: 149148 - DNA, 80 bp, synthetic construct
  source 1..80: mol_type = other DNA
tacttgattatgcttcagatatcattgtagagtccaaagatcagacaaaagttaaaacacaagaattctatcagagatac

SEQ ID NO: 149149 - DNA, 80 bp, synthetic construct
  source 1..80: mol_type = other DNA
gcagaagggcctgggaccatgaacatggcccatgtcctgagcacaacaggagcccaatctgtggctctagtgggtgaaag

SEQ ID NO: 149150 - DNA, 80 bp, synthetic construct
  source 1..80: mol_type = other DNA
tatgcctggtgtccccttagtgggacgcaggcctaggtagcatcatttacactaaaagcagtgaccttgttggtacttta

SEQ ID NO: 149151 - DNA, 80 bp, synthetic construct
  source 1..80: mol_type = other DNA
aaacaaggatgtagtacaggcaacaactactgttaatactacaaatttaacccaacatccatcagcaccaaccatgccgt

SEQ ID NO: 149152 - DNA, 80 bp, synthetic construct
  source 1..80: mol_type = other DNA
caatggatatgtacagagtacaattgtcagacaccctggtcaaaaagcccattttgtgcctgtcgctctccccagccagt

SEQ ID NO: 149153 - DNA, 80 bp, synthetic construct
  source 1..80: mol_type = other DNA
tcatcttgcttctgtgcttcgtgccccgcaaaacccaccccctcccggtccccagcgaaacctgcccctccgacggctgc

SEQ ID NO: 149154 - DNA, 80 bp, synthetic construct
  source 1..80: mol_type = other DNA
aagaagctctatatgtaggatgggtaccagctcataaaggaataggaggtaatcaagaggtagaccgtctagtaagccag

SEQ ID NO: 149155 - DNA, 80 bp, synthetic construct
  source 1..80: mol_type = other DNA
tacatgttttaatgacaccaaaggtcttagactacataacgttacgtttagcgattcaggaacatacacagaatacatgt

SEQ ID NO: 149156 - DNA, 80 bp, synthetic construct
  source 1..80: mol_type = other DNA
gcaatgacttctctgtccgattactgaaggataccccatttattgaacagaacgcattactccaaggagacgtagtggag

SEQ ID NO: 149157 - DNA, 80 bp, synthetic construct
  source 1..80: mol_type = other DNA
ctgttaaggatgttttgataaagggagtccctactttacaatcaccatcggtggaggcctgtggatattcagacagaata

SEQ ID NO: 149158 - DNA, 80 bp, synthetic construct
  source 1..80: mol_type = other DNA
tggtggaggcccaggtggccaagcttgaggccgtgcgctcagtcatctggaataccatgatctctctggctgtaagcggc

SEQ ID NO: 149159 - DNA, 80 bp, synthetic construct
  source 1..80: mol_type = other DNA
acagcgagtagcgctgctcacgcgcacggtatcgcttcattaacacgctaggcacgttgaaagcgtagcaaacccccgtc

SEQ ID NO: 149160 - DNA, 80 bp, synthetic construct
  source 1..80: mol_type = other DNA
tctttatagtcggcacgatgccatcacgggacccgccgccgccccgtctgacgcggcgaccgcgtcagcggccgccggtg

SEQ ID NO: 149161 - DNA, 80 bp, synthetic construct
  source 1..80: mol_type = other DNA
atggtgcaattgagacgaaagtttgagatgttcacttatatgcggtttgacatggaaattacatttgttatcactagcag

SEQ ID NO: 149162 - DNA, 80 bp, synthetic construct
  source 1..80: mol_type = other DNA
gccactgagaccttctccctgaaggtgctctacgaccagtaccagaggggcttcaacaggtggacttatagcaacgagga

SEQ ID NO: 149163 - DNA, 80 bp, synthetic construct
  source 1..80: mol_type = other DNA
taaactaccaagacaattacaatactacttaccaagcatttaaaacaaaaatgactaataatttaactttaatacaaaaa

SEQ ID NO: 149164 - DNA, 80 bp, synthetic construct
  source 1..80: mol_type = other DNA
agttcacgttcttattttgtggaagcatgatggcgactggtaaactcttgatatcttacgcaccaccaggggctaaacca

SEQ ID NO: 149165 - DNA, 80 bp, synthetic construct
  source 1..80: mol_type = other DNA
gcgtgtaacccggaagtcatcctcgtcacgtgacctgacgtcacggccgccattctgtgctgtccgccatcttgtgactt

SEQ ID NO: 149166 - DNA, 80 bp, synthetic construct
  source 1..80: mol_type = other DNA
caaaatactagtacccagtttacaaactaaaccaaaaggaaaaaaaactgtaaaagttaacatagcaccccccactctat

SEQ ID NO: 149167 - DNA, 80 bp, synthetic construct
  source 1..80: mol_type = other DNA
agatatgaacacacacacccaggagaaaagggtcatactttgaaagatagccaggataggtcaactaacaacccagatga

SEQ ID NO: 149168 - DNA, 80 bp, synthetic construct
  source 1..80: mol_type = other DNA
caatgaaagagggatgaatcccattaatacacccagtaaaagcaagctataccctagtgttttttatgatatctttccag

SEQ ID NO: 149169 - DNA, 80 bp, synthetic construct
  source 1..80: mol_type = other DNA
aagaccttttcaaactccagcttgacgggctccacaaaaagacaggccgtcacgtagtgcgccaggctgggcccacgcgc

SEQ ID NO: 149170 - DNA, 80 bp, synthetic construct
  source 1..80: mol_type = other DNA
ctttccgtacgcctacgcagacgtcacatacaatcccctcacagacaaaggggtgggcaaccgcatgtggtaccagtaca

SEQ ID NO: 149171 - DNA, 80 bp, synthetic construct
  source 1..80: mol_type = other DNA
catttgccacagaagacagactaggtagaatacccccatttaatccagatggctcctcaaacacaaataaagacacatgg

SEQ ID NO: 149172 - DNA, 80 bp, synthetic construct
  source 1..80: mol_type = other DNA
tttattggccatcttaatactctggctactcgctacggctttactcctgggcccgcgccgccgcctggtggtccaggccc

SEQ ID NO: 149173 - DNA, 80 bp, synthetic construct
  source 1..80: mol_type = other DNA
caatccaacaaagcacatatgagctagttaaaaaagaatatcaaaacatatacaccaccagtgtaacatacccacctgag

SEQ ID NO: 149174 - DNA, 80 bp, synthetic construct
  source 1..80: mol_type = other DNA
acacatacactgccacatcagtacaaagacacaacaacaccctctatggaggagcagcatactatactacaacaccagca

SEQ ID NO: 149175 - DNA, 80 bp, synthetic construct
  source 1..80: mol_type = other DNA
agtaactgaacaacaaaaacatgaagtcaaaataaccagtagagtgtttcataaagctaaacatgtcagtgcatggtgtc

SEQ ID NO: 149176 - DNA, 80 bp, synthetic construct
  source 1..80: mol_type = other DNA
agagaacgctactgggagaagtgcttaattactacgcacactggtcgggaagcatcaagctaacgtttacattttgtggt

SEQ ID NO: 149177 - DNA, 80 bp, synthetic construct
  source 1..80: mol_type = other DNA
gaacaccgactggtttttcgagaagatcatgtcccacatcaagaatcttctcgagtggcttggggtcctcgtcaaagatg

SEQ ID NO: 149178 - DNA, 80 bp, synthetic construct
  source 1..80: mol_type = other DNA
caaagcgcagggtctcgctctctgaaaatccccggcactcgataaacagcgagtccgtgtccccgtagatgactcgaagc

SEQ ID NO: 149179 - DNA, 80 bp, synthetic construct
  source 1..80: mol_type = other DNA
gaacttacacaaaatggcggtcaaaaacatccgggtcaaaggtcattctacgtcataagtcacgtgtctgggtcctgcta

SEQ ID NO: 149180 - DNA, 80 bp, synthetic construct
  source 1..80: mol_type = other DNA
agtggagactgggccatggagtttctcgcagcaaaaatatttgataggccagttagaagcaaccttaaagatacccctta

SEQ ID NO: 149181 - DNA, 80 bp, synthetic construct
  source 1..80: mol_type = other DNA
gtaatatgcaaatatacagaccctcctctgctaagaacagccttagacaaaaagaaatggggctttatattttatgacac

SEQ ID NO: 149182 - DNA, 80 bp, synthetic construct
  source 1..80: mol_type = other DNA
ctatccgcactaatagcaactgcaatcatcctaactgccattctagctccggtacttttacatgaacaagaaaaggcatt

SEQ ID NO: 149183 - DNA, 80 bp, synthetic construct
  source 1..80: mol_type = other DNA
aaagaatctgtaccgttctgctgcgctcgctgctctgcgtccagacggaccagggccagaagcatctggtaagcctgctc

SEQ ID NO: 149184 - DNA, 80 bp, synthetic construct
  source 1..80: mol_type = other DNA
cctattacaactgaatagtagaagatggggacgcagttctcaacccaacgctccggttcccacgagacaagcaatatcgc

SEQ ID NO: 149185 - DNA, 80 bp, synthetic construct
  source 1..80: mol_type = other DNA
aagtatactaccaaaccacagactcaggaacacaaaaacttacaggatataactggcaaaaatacaaagaaaactaccaa

SEQ ID NO: 149186 - DNA, 80 bp, synthetic construct
  source 1..80: mol_type = other DNA
aaaaggttgggagattagctacacaaaactaatggctccaatatattaccaagccaacaaaaacagcacatacaactggc

SEQ ID NO: 149187 - DNA, 80 bp, synthetic construct
  source 1..80: mol_type = other DNA
cgcgctcaactcgccaaatgtcgaagcctgtgggtacagtgacagagtgagacaaatcacactaggtaactccaccatca

SEQ ID NO: 149188 - DNA, 80 bp, synthetic construct
  source 1..80: mol_type = other DNA
gatataaggcaacgcagactgctgaaggccactcaacgacgaggcgccgaaatcgacagacccatgcctgtcgtgcccga

SEQ ID NO: 149189 - DNA, 80 bp, synthetic construct
  source 1..80: mol_type = other DNA
gtcatttctcaaggacaaaatatgtgattggcttggcatacaacgacctccaaaaaaacagggtgattcatggttacgaa

SEQ ID NO: 149190 - DNA, 80 bp, synthetic construct
  source 1..80: mol_type = other DNA
tctgtgcacgaagttttgcggaaccaggagaaggggtctggcgtcttgctggggccacactcccggctacgtggcttcgg

SEQ ID NO: 149191 - DNA, 80 bp, synthetic construct
  source 1..80: mol_type = other DNA
ctaacccaaaaagacccaagattggaagtgaacctaaaggatgctgttatgtcgaaatacaagggtaacattaagattga

SEQ ID NO: 149192 - DNA, 80 bp, synthetic construct
  source 1..80: mol_type = other DNA
atggaacactcctaggtaatgtaactatctttccacaccagatgattaatctacgtaccaacaactcagcaaccattata

SEQ ID NO: 149193 - DNA, 80 bp, synthetic construct
  source 1..80: mol_type = other DNA
ccgtcgtctgagcagtgtgggcgctgccgggctcggagggcatgaagtagagcacggagacaaagaggtacatgaggtcc

SEQ ID NO: 149194 - DNA, 80 bp, synthetic construct
  source 1..80: mol_type = other DNA
agacaatactgtaaggaaaagaaatggattataccagagattcctacaaatatagatagagctgttaatcaagcaacatc

SEQ ID NO: 149195 - DNA, 80 bp, synthetic construct
  source 1..80: mol_type = other DNA
cggcaggtcacccaacgttggttcaggcccagtcgggtttttccccggcacaaacgcacgtccccgtgggctccacgcgt

SEQ ID NO: 149196 - DNA, 80 bp, synthetic construct
  source 1..80: mol_type = other DNA
ggcaagctcttccgggtcaaaggtcagcaactacgtcacaagtcacgtggggagggttggcatgtaacccggaagtcaat

SEQ ID NO: 149197 - DNA, 80 bp, synthetic construct
  source 1..80: mol_type = other DNA
cgcctataataattcaaggagatccaattccagacctgctgtttcccagtactggtaaaaaaagaaaattctccaaattc

SEQ ID NO: 149198 - DNA, 80 bp, synthetic construct
  source 1..80: mol_type = other DNA
gcatgtcttggcaatcagctgcttatcgctctattgtgtttaaatgcatgcgtgatatactgtactcagtatgtcactgt

SEQ ID NO: 149199 - DNA, 80 bp, synthetic construct
  source 1..80: mol_type = other DNA
tccaattagaccccggtagcagctcagtattgaagcataccttgctgggtgaaatactaaattattatgcccactggtct

SEQ ID NO: 149200 - DNA, 80 bp, synthetic construct
  source 1..80: mol_type = other DNA
acacttttatctacctggaccaataaaatttatcataaaaagacagacagcaactttggatatacatcctataacttttc

SEQ ID NO: 149201 - DNA, 80 bp, synthetic construct
  source 1..80: mol_type = other DNA
gaatggagaccatgggccaggagtgtgtcatgaccgtgcaggggatggtaacttgctctccctcggcgaccaacaccggc

SEQ ID NO: 149202 - DNA, 80 bp, synthetic construct
  source 1..80: mol_type = other DNA
agaagggctggaagagtccaaattatcctctttagcgctatcagaactcaggtgtgaaacaactggttcgtccaggatgc

SEQ ID NO: 149203 - DNA, 80 bp, synthetic construct
  source 1..80: mol_type = other DNA
tttataccggagagcatacaagagtgggaccatatgaaattggctacaaatgtcacaaaatttccaatgttactggttga

SEQ ID NO: 149204 - DNA, 80 bp, synthetic construct
  source 1..80: mol_type = other DNA
ggtcactagctcagtcacagaaaaattgcttaaaacactcataaagataatatccaccttagtgataattagcagaaatt

SEQ ID NO: 149205 - DNA, 80 bp, synthetic construct
  source 1..80: mol_type = other DNA
ccaaaagcagcaggcgagacgctgaaagggaagctgcacgtgccctacctccttacaggtgcgaagtgcactgtgccatt

SEQ ID NO: 149206 - DNA, 80 bp, synthetic construct
  source 1..80: mol_type = other DNA
gtacggggtagatggattagaacccattgatgttacaactagtgctgggtacccttatgttagcctgggaattaaaaaga

SEQ ID NO: 149207 - DNA, 80 bp, synthetic construct
  source 1..80: mol_type = other DNA
agggtgtaaagacttctgcttgcgtatggccagggacactaatctacataaacaagttggacccatcacacagaatccag

SEQ ID NO: 149208 - DNA, 80 bp, synthetic construct
  source 1..80: mol_type = other DNA
ttgattacgaaccaccaaaaagcaaatttttaatagaaaacataccactatggagtgcagtaacaggatacttagattac

SEQ ID NO: 149209 - DNA, 80 bp, synthetic construct
  source 1..80: mol_type = other DNA
gcaggaatcaatgctgggctgacttactctcagcttatgactttgaaagactcaatgctgcagttagatcctaatgcaaa

SEQ ID NO: 149210 - DNA, 80 bp, synthetic construct
  source 1..80: mol_type = other DNA
ataacgccacatcaagcaaagacacctggtacaaaggcaacacatacaatacacaaataaaagacttagctaaaaaaacc

SEQ ID NO: 149211 - DNA, 80 bp, synthetic construct
  source 1..80: mol_type = other DNA
ttaacatctatctcaatgctcgccgtcactccggctggtatcgctccccccccaccttacccgttaacatctatctcaat

SEQ ID NO: 149212 - DNA, 80 bp, synthetic construct
  source 1..80: mol_type = other DNA
tcgacctcaccggcgtcgtccgggaaagcgcggacacggcggcgacaacgaccaccgccgcaccttccttacctccgctg

SEQ ID NO: 149213 - DNA, 80 bp, synthetic construct
  source 1..80: mol_type = other DNA
cccagtctgtagatcagggtaatgaggctacacaatccccactggtgacagtggtgtagcctgcgtggtgccctgcccga

SEQ ID NO: 149214 - DNA, 80 bp, synthetic construct
  source 1..80: mol_type = other DNA
tcagaagctgtcacaatagtattagcaacacagtgtataggctatttcaagagctagccagaattcctaatcggattagt

SEQ ID NO: 149215 - DNA, 80 bp, synthetic construct
  source 1..80: mol_type = other DNA
tctaccagtgagaatgcctagtggggctaatcaattcatgacaacggaagatgaacaatcaccgaatgtattcccaggat

SEQ ID NO: 149216 - DNA, 80 bp, synthetic construct
  source 1..80: mol_type = other DNA
caaggctcttaaaaaagctatgtttctcggtcgcatttacagaaagaaaaggcgcctgtcactgtccccactgcactctc

SEQ ID NO: 149217 - DNA, 80 bp, synthetic construct
  source 1..80: mol_type = other DNA
cccaaaacacattcagtacaatttgttgttaggagaaggcccatgtgaaccaggtgattgtggtgggaaactcctgtgct

SEQ ID NO: 149218 - DNA, 80 bp, synthetic construct
  source 1..80: mol_type = other DNA
aaaccctacacaacaacctgcactattttcagacagacaaaaccaaggaataccagaaaaagacagttacctatcaggaa

SEQ ID NO: 149219 - DNA, 80 bp, synthetic construct
  source 1..80: mol_type = other DNA
gacaaaacacgcccatcaggtacaggcacacatttctgtgggaggttcgcttgggcgttcggctgaacaatgctagggtc

SEQ ID NO: 149220 - DNA, 80 bp, synthetic construct
  source 1..80: mol_type = other DNA
atatcggctacggcgtctatgtggacaaggcctttgccatgctcacggcttgcgtggaggtctgggcgcgagagttattg

SEQ ID NO: 149221 - DNA, 80 bp, synthetic construct
  source 1..80: mol_type = other DNA
taacaagaccagggggtcgcagatttgtaaagataaggctgcccccccctaagctctttgaagacaaatggtacacccag

SEQ ID NO: 149222 - DNA, 80 bp, synthetic construct
  source 1..80: mol_type = other DNA
cgtctgctcgtgcattgcggggtgatatggcacacttttcagatcaaagtccacacagccagcagccccatgtgcaaacc

SEQ ID NO: 149223 - DNA, 80 bp, synthetic construct
  source 1..80: mol_type = other DNA
cggagggtggtacccctaggccgcggcccccgctactaagagctttgccacaaccctcgcctcgccgagagacccgtacc

SEQ ID NO: 149224 - DNA, 80 bp, synthetic construct
  source 1..80: mol_type = other DNA
cagacgcagaaaaaaaatagtactaactcagtggaaccccgccaaagtgcgaaggtgcaccatatcgggggtcctgccca

SEQ ID NO: 149225 - DNA, 80 bp, synthetic construct
  source 1..80: mol_type = other DNA
gcagtagagaataaaaaagtcacagaaatgcaaaaagaattgaaaaggttaagctcttacagaagaactcatcgccatga

SEQ ID NO: 149226 - DNA, 80 bp, synthetic construct
  source 1..80: mol_type = other DNA
ccaggctgtcaccccgtgtcaaaggtcaggggtcagccttccgctttacacaaaatggaggtcaattacttccgggtcaa

SEQ ID NO: 149227 - DNA, 80 bp, synthetic construct
  source 1..80: mol_type = other DNA
cagcggcaacagacggcgatgcatgaaatagccgtcgtcttggtccattttatacatgtagggcagacgtacagagcgtc

SEQ ID NO: 149228 - DNA, 80 bp, synthetic construct
  source 1..80: mol_type = other DNA
tgggaccagaggcgtggactctttagtaaaagaagtattgaaagaatgtcagaatacaaagagtctgatgaattattttc

SEQ ID NO: 149229 - DNA, 80 bp, synthetic construct
  source 1..80: mol_type = other DNA
agaacagtgggaagagagagtaggggagatcctggaggaaataaagcaagaagccctaaagcattttgatcctcgcttgc

SEQ ID NO: 149230 - DNA, 80 bp, synthetic construct
  source 1..80: mol_type = other DNA
agttggttgtgatccagaaacattttggtccaaaataccagctatgttagatgataaatgcataatggcttttgattata

SEQ ID NO: 149231 - DNA, 80 bp, synthetic construct
  source 1..80: mol_type = other DNA
gtcctgcatcagataaaaggttacagtacacaatgttaggtgaaatacttaactactacactcactggactgggtcattg

SEQ ID NO: 149232 - DNA, 80 bp, synthetic construct
  source 1..80: mol_type = other DNA
cattaaaatacccccccctaccatgctaactgacaagtggtacttttccaaagacgttgcagacctcacattgctaaacc

SEQ ID NO: 149233 - DNA, 80 bp, synthetic construct
  source 1..80: mol_type = other DNA
tctcgggactgtagcagacttcgccgtccggacaccgcagcctgtggattcatgaaaatctactctggcattcccgagga

SEQ ID NO: 149234 - DNA, 80 bp, synthetic construct
  source 1..80: mol_type = other DNA
gaagcagtaatggaagacatagttagctcaggccccttcgccccaaaagtaaagaaagcaaacatgcaactaaactttaa

SEQ ID NO: 149235 - DNA, 80 bp, synthetic construct
  source 1..80: mol_type = other DNA
ctgttttctggcaacaaggacaaccatatcccagattcactataccctttatgagcattgcctcagcttattacatgttt

SEQ ID NO: 149236 - DNA, 80 bp, synthetic construct
  source 1..80: mol_type = other DNA
tcataaaggtttgtgggatgctacgggggctggcccatggtaaatatctccaaatggctgcgctcaggcttgtggcactg

SEQ ID NO: 149237 - DNA, 80 bp, synthetic construct
  source 1..80: mol_type = other DNA
cagaactcctcaaggagaccccatatcaaatgattctaccacgggtatgactttcaaccccactactacacagtttcaaa

SEQ ID NO: 149238 - DNA, 80 bp, synthetic construct
  source 1..80: mol_type = other DNA
cggtacacgcagaaatctatccacaggccaacgcccggctgtagcttcggatggtggataatagcgcggtgacgtacgcc

SEQ ID NO: 149239 - DNA, 80 bp, synthetic construct
  source 1..80: mol_type = other DNA
aagaatagtggtcatacctttagatatgagcaacactcttttctcttcaacacttttgggagaagtcttgaactacttct

SEQ ID NO: 149240 - DNA, 80 bp, synthetic construct
  source 1..80: mol_type = other DNA
ggatgatacaacaccagggtttattgttgacctcctcagcgcatccaaagacccaaaagtcatagagttttgtgaaaaag

SEQ ID NO: 149241 - DNA, 80 bp, synthetic construct
  source 1..80: mol_type = other DNA
atgagcttcgggctcctgttaaaataaaaacagggaaaacaagagctattgaagcagctagcatgaatgacacagcaaac

SEQ ID NO: 149242 - DNA, 80 bp, synthetic construct
  source 1..80: mol_type = other DNA
cagcccaaagactcgtgaaaatattgataaacagcccagtgatgatgcatggctcaattttgatggcacactgctaggta

SEQ ID NO: 149243 - DNA, 80 bp, synthetic construct
  source 1..80: mol_type = other DNA
atcagtttatgtatgtgccaccgggaggcccaattccaactagcgcctctagcttcgcctggcaaacatcaacaaaccct

SEQ ID NO: 149244 - DNA, 80 bp, synthetic construct
  source 1..80: mol_type = other DNA
tttaaacgagccatctctcattgcacgtacgatgacgtgctacatgactggaacaagttcgaggcctgcatccagaagcg

SEQ ID NO: 149245 - DNA, 80 bp, synthetic construct
  source 1..80: mol_type = other DNA
ggacggcgacgaatagttgcgtgtgctgcggtgcggttgagatttggagttgcgtgtgtgctgcggtgcggtgcggtagg

SEQ ID NO: 149246 - DNA, 80 bp, synthetic construct
  source 1..80: mol_type = other DNA
taaagtcattagtaatgccttacaactttcacaaccaacccggccaaccacagtgtccgacacacccagtactagtggag

SEQ ID NO: 149247 - DNA, 80 bp, synthetic construct
  source 1..80: mol_type = other DNA
gctgcaggttctgctgcctctcctcccaagccttcagctgctgtttctcacgctgcaccacctcgtcgtccacccgtttc

SEQ ID NO: 149248 - DNA, 80 bp, synthetic construct
  source 1..80: mol_type = other DNA
gctcgcgtgattacgcttggcaaacatctaccaatcccagcgtgttttggactgaggggaatgcccctcccagaatttca

SEQ ID NO: 149249 - DNA, 80 bp, synthetic construct
  source 1..80: mol_type = other DNA
gggttattcccacccacactacctacgggtgtagtacacttgtatcacggtacatttgtacgccagtttgccttcccttc

SEQ ID NO: 149250 - DNA, 80 bp, synthetic construct
  source 1..80: mol_type = other DNA
aagcctttggaacaggatttactgatcatatcagtgaaaaagtggttgaacttcagaatatctcaatgggctacctaaat

SEQ ID NO: 149251 - DNA, 80 bp, synthetic construct
  source 1..80: mol_type = other DNA
gactactgatgactttcaatcaccttcagccttaccatggtatcatccaactaaggaaattttgattccaggtgaagtaa

SEQ ID NO: 149252 - DNA, 80 bp, synthetic construct
  source 1..80: mol_type = other DNA
ttggactacactgcccaagcgtctgaatacgtgcccatcactgtcacgatagctccgatgtgtgcagaatacaatggctt

SEQ ID NO: 149253 - DNA, 80 bp, synthetic construct
  source 1..80: mol_type = other DNA
cacttgcgggcagactacgtccccgctccctcgcgatccaacaagcggaaaagagaccccgaggaggatgaagaaggcgg

SEQ ID NO: 149254 - DNA, 80 bp, synthetic construct
  source 1..80: mol_type = other DNA
tgtctactatactaagtataagaccaaagacccggacccaacggagatgtactctagttggaaggttaccaccaggcaag

SEQ ID NO: 149255 - DNA, 80 bp, synthetic construct
  source 1..80: mol_type = other DNA
gccgatttagtgacgtcacggcggccattttagattggcgcagaggatctgacgtctaagttcaaaggtcaggccctcgg

SEQ ID NO: 149256 - DNA, 80 bp, synthetic construct
  source 1..80: mol_type = other DNA
tatcccaggagatcactgagtccgcacgttcaagaaaagccaccaacctgtgggtctctaacgcagaattcggtcttcca

SEQ ID NO: 149257 - DNA, 80 bp, synthetic construct
  source 1..80: mol_type = other DNA
aaatatttgacaggccccccagaagcaagctcacagacacccctttctatccctactgcaaaaacaattacaatgtatcc

SEQ ID NO: 149258 - DNA, 80 bp, synthetic construct
  source 1..80: mol_type = other DNA
agagaatgaatacgcctcctacccccatcgagtcagtcgcgacctacaaattgttgacccagcaaccatgggtccacaat

SEQ ID NO: 149259 - DNA, 80 bp, synthetic construct
  source 1..80: mol_type = other DNA
tagactacaccaattataatgaggaaaataataatttcagaacttggcagataaatttgaaagagatggcacagatcagg

SEQ ID NO: 149260 - DNA, 80 bp, synthetic construct
  source 1..80: mol_type = other DNA
atgttcacatactcacgctttgacacagagtttacctttgtgttaactgaaaggtactacacccagaattcaggacatgc

SEQ ID NO: 149261 - DNA, 80 bp, synthetic construct
  source 1..80: mol_type = other DNA
tcacactgggagacggcctggattatcacatcggtgtcaaggattctgagggccgatggctgcccgtcaagaccgatgtg

SEQ ID NO: 149262 - DNA, 80 bp, synthetic construct
  source 1..80: mol_type = other DNA
aagagaacacaagccagttatagtataaatatggttgttgaacaactaagagaagaatgtgcaaatagaaagagtgtagg

SEQ ID NO: 149263 - DNA, 80 bp, synthetic construct
  source 1..80: mol_type = other DNA
ccatcgccgccaggtggtccgggcccgcgtcccccggcgcagctaaggaggcagaacgccaccgagaacccgggtagcgg

SEQ ID NO: 149264 - DNA, 80 bp, synthetic construct
  source 1..80: mol_type = other DNA
aacagtactagccatgatctcaccaagacacacttcatcaagactcgggattcgatcaaaacagcagggccaagtgactt

SEQ ID NO: 149265 - DNA, 80 bp, synthetic construct
  source 1..80: mol_type = other DNA
ctctggatgggctccgggcccgtcaacacgcgactcgcgcggcaaaaggcacgctgttgacggcgcgagagcccgtcgtg

SEQ ID NO: 149266 - DNA, 80 bp, synthetic construct
  source 1..80: mol_type = other DNA
ttaagattagagtttatcatagggcaaaacacattgaggcatggatcccaagagcgcccagagcgctgccctacacatca

SEQ ID NO: 149267 - DNA, 80 bp, synthetic construct
  source 1..80: mol_type = other DNA
ccaagctcctccatcttgaccgtggccatcagcacggcggccaagcgctccagcccgtaggattgcatgcccttgacagt

SEQ ID NO: 149268 - DNA, 80 bp, synthetic construct
  source 1..80: mol_type = other DNA
gaggagtgcatactgggagccagccgaggccccaagcgccaggcccctggcagcctccaccacgatcttgagctggcgcg

SEQ ID NO: 149269 - DNA, 80 bp, synthetic construct
  source 1..80: mol_type = other DNA
cggaggaaggcgtagagcccgcccccggccatactccaagagttgacaagccaggactcgaatcccccagccggctcgag

SEQ ID NO: 149270 - DNA, 80 bp, synthetic construct
  source 1..80: mol_type = other DNA
tactcatatagtgtgggatgtgggtttgcaatcaactgtgtccctggttgttccatgggttagtgccagccattttagat

SEQ ID NO: 149271 - DNA, 80 bp, synthetic construct
  source 1..80: mol_type = other DNA
aacacactgtaaaacacgcgtagacagctttcctggtcaacgagcgccatctggtgtcggcataagaacaggcatcaacc

SEQ ID NO: 149272 - DNA, 80 bp, synthetic construct
  source 1..80: mol_type = other DNA
agggcaagttggatgtatcaagagcatttcaaccatgtgacactaacttaaaaattggaaatgcaaagtgctgcccattt

SEQ ID NO: 149273 - DNA, 80 bp, synthetic construct
  source 1..80: mol_type = other DNA
ctccgaaagcagctccgagagcagcgagacctcagaggacagctcaagcagctgctccagcaagtcctcaaaacccaagc

SEQ ID NO: 149274 - DNA, 80 bp, synthetic construct
  source 1..80: mol_type = other DNA
ggtgaatgctgggaggtctcaaagaatggtagggattgggaaactctaaaactaaaagatttagtccagaaaatcacaga

SEQ ID NO: 149275 - DNA, 80 bp, synthetic construct
  source 1..80: mol_type = other DNA
ggctcgggactggccggaccccgggcaaggctctgaaaaaagctatgtttctcggtaggccttggagaaagaaaagggcg

SEQ ID NO: 149276 - DNA, 80 bp, synthetic construct
  source 1..80: mol_type = other DNA
cgcacttggattgataaattcatctagatcttttagcaatgtagaaatctacctgagtaggagtaggattttacaaaaaa

SEQ ID NO: 149277 - DNA, 80 bp, synthetic construct
  source 1..80: mol_type = other DNA
agtcgccaggactgggagacggagtaccaggcctgcgcggccttcgatagaccccccagacaagacctatcccgtccccc

SEQ ID NO: 149278 - DNA, 80 bp, synthetic construct
  source 1..80: mol_type = other DNA
tgtatgtgatagtttcagcactggaaaatttctgatcgcctacacacctccaggagcaggtttaccaactgaccgcaagc

SEQ ID NO: 149279 - DNA, 80 bp, synthetic construct
  source 1..80: mol_type = other DNA
agatatcttggagagacaaataacaactatacatgtttctaaccccacacaggaaaaaagggagcagttatttaacaatg

SEQ ID NO: 149280 - DNA, 80 bp, synthetic construct
  source 1..80: mol_type = other DNA
tatcagctagtcattacagatacaccactccagatacatactcaaaagctggttatattacttgttggtaccaaacaaat

SEQ ID NO: 149281 - DNA, 80 bp, synthetic construct
  source 1..80: mol_type = other DNA
tacaaaccatctgaaggggagtacaagccacctgtcccagttaggaatagccccagagacattgtcacagtaggacctag

SEQ ID NO: 149282 - DNA, 80 bp, synthetic construct
  source 1..80: mol_type = other DNA
aactactaccccctaataacacaaaagacgagtggcaactgacatacactccactcatgaaaacattctacacacaagca

SEQ ID NO: 149283 - DNA, 80 bp, synthetic construct
  source 1..80: mol_type = other DNA
taatgagacacaaatggtaccctaacctactacaccagcagtctgtgctagaagacatatccagaagcggcccctttagc

SEQ ID NO: 149284 - DNA, 80 bp, synthetic construct
  source 1..80: mol_type = other DNA
cagccaggcaccagcccagcttttgtatgaccccggtacacagagggatctggcgtgggcgcgtgatgcgacggttgaca

SEQ ID NO: 149285 - DNA, 80 bp, synthetic construct
  source 1..80: mol_type = other DNA
atgcctcgcccatggcatccacaaggttgcacaccacatcaaacacacagtcttcctcctgtttttgtgatataatggcc

SEQ ID NO: 149286 - DNA, 80 bp, synthetic construct
  source 1..80: mol_type = other DNA
ctacagttctgcgaggaatgtcacagaagggatctagacactgcttaatccactcctggccatcagcagacacccccact

SEQ ID NO: 149287 - DNA, 80 bp, synthetic construct
  source 1..80: mol_type = other DNA
ctactaccaaggcaatgcaaacagcacatatgactggcaaaactatagtactttaacaaactatgcacaaacatatacca

SEQ ID NO: 149288 - DNA, 80 bp, synthetic construct
  source 1..80: mol_type = other DNA
gagtgattgacctcccattacagggaacagtcaacacaggaggattcgcctcgtgggatattgatgtaatgggatatgtt

SEQ ID NO: 149289 - DNA, 80 bp, synthetic construct
  source 1..80: mol_type = other DNA
taggcatggtgctcaataagttaggattcccgggggccatgatggataagttgagtaatacaacccacatttacagagac

SEQ ID NO: 149290 - DNA, 80 bp, synthetic construct
  source 1..80: mol_type = other DNA
gctgtatacacttgtaactataaaatcatgaactaccacttaatgacacatgaggaccatctcaacctcataacaccata

SEQ ID NO: 149291 - DNA, 80 bp, synthetic construct
  source 1..80: mol_type = other DNA
ttctcatacatgctctgcatagttagcccaatacacttcatctcctcgaaaggctcatgaaccttatctaagatatctaa

SEQ ID NO: 149292 - DNA, 80 bp, synthetic construct
  source 1..80: mol_type = other DNA
caaggttatccctaacagtcttcctgatgggccggtcctcgtgctctgcccaaccggtgcccttgctgataaatatcgcg

SEQ ID NO: 149293 - DNA, 80 bp, synthetic construct
  source 1..80: mol_type = other DNA
ccccaactttctttcgttctttacttccagtaacttagaagttgacacagagtccaataggatgcagctaatccaagtct

SEQ ID NO: 149294 - DNA, 80 bp, synthetic construct
  source 1..80: mol_type = other DNA
cggctgacatttggggtcccaatgaacatggatgttgaggccctggagctaaacaatatgttttcagagaggatctcatc

SEQ ID NO: 149295 - DNA, 80 bp, synthetic construct
  source 1..80: mol_type = other DNA
gactatccggattgtaatttggctttgtcagcaaatcaaccagaaacaaccattatcaatgtgggggatgtagtgtcata

SEQ ID NO: 149296 - DNA, 80 bp, synthetic construct
  source 1..80: mol_type = other DNA
ctgcactgaccgctgtcgaaacaggtgcgacaagcaaagtcatcccatccgacgtcatagagacccgccatgtgataaac

SEQ ID NO: 149297 - DNA, 80 bp, synthetic construct
  source 1..80: mol_type = other DNA
cggcgtctttgacgctgtctgctcagtctcggactttattggctgggatagtgcagcaacaacaacagttgttggacgtg

SEQ ID NO: 149298 - DNA, 80 bp, synthetic construct
  source 1..80: mol_type = other DNA
ccctttaaactcaacaagctgagctgcccgtccttccacccaggcatgctcatgcaacagaaacacaaggtgctcatccc

SEQ ID NO: 149299 - DNA, 80 bp, synthetic construct
  source 1..80: mol_type = other DNA
ttctgcttttactcttggaccaggccgtcattctatcagaataacaggggaagcaatgccccctgcgtcagcgggacacg

SEQ ID NO: 149300 - DNA, 80 bp, synthetic construct
  source 1..80: mol_type = other DNA
tttttagatgttagctttgtgttgggttagtatgggctgggtattcactagtgaaggcaactaacacagctagacgtgct

SEQ ID NO: 149301 - DNA, 80 bp, synthetic construct
  source 1..80: mol_type = other DNA
aacccagtggaagagtttgtggagaacacattaaaagaggtgttggtagttccagacactcaagcttcagggcctgtcca

SEQ ID NO: 149302 - DNA, 80 bp, synthetic construct
  source 1..80: mol_type = other DNA
taatccaagctaacattctatcagtaaacgggcagaaaactgataaggaccgcggagtttggccctccgcggtgtccggt

SEQ ID NO: 149303 - DNA, 80 bp, synthetic construct
  source 1..80: mol_type = other DNA
gaataggcctcttcagtcccatcttcctgagccccttcagatccagcagcctagactttcccagagcctaccaggacgtt

SEQ ID NO: 149304 - DNA, 80 bp, synthetic construct
  source 1..80: mol_type = other DNA
gatctgtgtgatgtaaatcttttgtcacttgcggtttctgcggccagcttctcgcatccgttcagccaaccgtcaagtaa

SEQ ID NO: 149305 - DNA, 80 bp, synthetic construct
  source 1..80: mol_type = other DNA
gcacctccaactaatccttataatacccccacatttgcaatcaggaaaaaggacaagaacaaatggaggatgctaataga

SEQ ID NO: 149306 - DNA, 80 bp, synthetic construct
  source 1..80: mol_type = other DNA
cgcgaaagccctccgagcgcccgcaacaccccgtccccagcgccggcccgtgaacaaacaccgcagaactccttgacgca

SEQ ID NO: 149307 - DNA, 80 bp, synthetic construct
  source 1..80: mol_type = other DNA
tggatgtggattcactaaccaaatcagtgagaaagtaactgaaattacatcaatggtgagtaatgtcattacagaaaaat

SEQ ID NO: 149308 - DNA, 80 bp, synthetic construct
  source 1..80: mol_type = other DNA
cgcctccttccaccgggcctcgtgacatggcgcctaccgtcgtacatatgtttacgagggagcgcctgctcacccagtcc

SEQ ID NO: 149309 - DNA, 80 bp, synthetic construct
  source 1..80: mol_type = other DNA
atccgaagcagatccaacacgtcgacttttcaggactttggagcgggtgcacaatgctcgaagccctcctacctgccata

SEQ ID NO: 149310 - DNA, 80 bp, synthetic construct
  source 1..80: mol_type = other DNA
actttaaaccaaaacacgtgcaagcatgggtgcctagaccacccagactgtgcccatacatcaaccgaagagacaccaac

SEQ ID NO: 149311 - DNA, 80 bp, synthetic construct
  source 1..80: mol_type = other DNA
tgaatcggtggtcccctccggcacacgatgcccgcggaattgagaggcagtggtatgagtgtgtttggcgcagccacgct

SEQ ID NO: 149312 - DNA, 80 bp, synthetic construct
  source 1..80: mol_type = other DNA
tagtaaggagtggacacaaaattcaaaaggttggtgttggaaattgcctgatgcattgaaggatatgggcgtcttcggac

SEQ ID NO: 149313 - DNA, 80 bp, synthetic construct
  source 1..80: mol_type = other DNA
gtggtagtgttttccgaagaagtgacgttgtcagtgatattgtcagtgacgttaatttcttcccagtgtacggataactc

SEQ ID NO: 149314 - DNA, 80 bp, synthetic construct
  source 1..80: mol_type = other DNA
ctttggatggaactggagcaagtgatatcaaagtgtttggcaaacccaagcatataactgcatggattcctcgcccgccc

SEQ ID NO: 149315 - DNA, 80 bp, synthetic construct
  source 1..80: mol_type = other DNA
acaagagaccagacaatacaaatgccaaagacctcttcacaacatggagaataacatatttacagacatatcagctgaga

SEQ ID NO: 149316 - DNA, 80 bp, synthetic construct
  source 1..80: mol_type = other DNA
tagttaaccgcatgggtgcactatgcatgagaattgttacaaataaacaggttcatgatgttgaggtcacaaccaatatt

SEQ ID NO: 149317 - DNA, 80 bp, synthetic construct
  source 1..80: mol_type = other DNA
ttggcttacaggagaaccaggacaaaacaaatttaaaacaggaaacaacagtatatatggcctacctaactatgctccta

SEQ ID NO: 149318 - DNA, 80 bp, synthetic construct
  source 1..80: mol_type = other DNA
aacataacagatgggagaaccaacatcatgcacataccactcacattccaccctccgctcgagagtaggggagcctttgg

SEQ ID NO: 149319 - DNA, 80 bp, synthetic construct
  source 1..80: mol_type = other DNA
cgcatggccttccagagacaggtgatgcacgacatcaccatgaccggtcccttctcttacaaggacgagctagttagcac

SEQ ID NO: 149320 - DNA, 80 bp, synthetic construct
  source 1..80: mol_type = other DNA
ctgaagggggaatgccttctggaatctgtggtacttctatattcaacaccatgatcaacaatgtaataatcaggacactt

SEQ ID NO: 149321 - DNA, 80 bp, synthetic construct
  source 1..80: mol_type = other DNA
gtagagaggtatgtagatgaggttttaaatgaagtccttgtggttcccaatattaatgaaagccatccaacaacttccaa

SEQ ID NO: 149322 - DNA, 80 bp, synthetic construct
  source 1..80: mol_type = other DNA
gatcactatcggcaactccactatcaccacccaggatgcgctacatactattctagcctatggagaatggcctcaatatc

SEQ ID NO: 149323 - DNA, 80 bp, synthetic construct
  source 1..80: mol_type = other DNA
taactttattctgcatatgtcttctgttgctgcacgtcttaactttcagggaggccccgctccccccggaggcccccaga

SEQ ID NO: 149324 - DNA, 80 bp, synthetic construct
  source 1..80: mol_type = other DNA
tagatgtcatgggctacgtgcaaatgaggcgaaagctagagctgttcacgtatgcccgatttgacgcagaattcactttt

SEQ ID NO: 149325 - DNA, 80 bp, synthetic construct
  source 1..80: mol_type = other DNA
cacactggtctttatcgcggactgcgtggctttcatctactacgcctgcggcgaggtggcgctaatcaaggcccgaaaaa

SEQ ID NO: 149326 - DNA, 80 bp, synthetic construct
  source 1..80: mol_type = other DNA
cagcaccagtgaaactggtgagattttgtataacatggcggccagcgtcatgactgagtgcaacacgttgggacaggtgg

SEQ ID NO: 149327 - DNA, 80 bp, synthetic construct
  source 1..80: mol_type = other DNA
gatgtattgaggcttgtgaagttgactattgcattgtatacaggatgatcatgatggaaatttatgacaaaatttaccaa

SEQ ID NO: 149328 - DNA, 80 bp, synthetic construct
  source 1..80: mol_type = other DNA
gttagtatgttgacttcctttctctctatcttcattttcgatatcggtgttgtatctagggcaaacgaaagtagcattaa

SEQ ID NO: 149329 - DNA, 80 bp, synthetic construct
  source 1..80: mol_type = other DNA
agataagttgctaaagaatttgatcaaaattgtgtctgcactggtgatagtggcaagaaactatgaggattctattacag

SEQ ID NO: 149330 - DNA, 80 bp, synthetic construct
  source 1..80: mol_type = other DNA
cgggggatctactaataatcctggatggacccaaacagactttcaacaatttaaaaagcaaaccgacagcaactatggct

SEQ ID NO: 149331 - DNA, 80 bp, synthetic construct
  source 1..80: mol_type = other DNA
gtctacgtaatgtatcgcctatttgcaggacaacaaggaccatacacaggattacctaccaggaaaccaaatgttccaac

SEQ ID NO: 149332 - DNA, 80 bp, synthetic construct
  source 1..80: mol_type = other DNA
ttaatggtgttgaacagatcgcgcaccaatacggcgtcctgcagacagtaacggcctacctgggcgcggccctcggcatt

SEQ ID NO: 149333 - DNA, 80 bp, synthetic construct
  source 1..80: mol_type = other DNA
ttagattatgaagagagagttaaaaactacaatgcttggaaacagcaattaggcaaccagtcacttgatgatttagatga

SEQ ID NO: 149334 - DNA, 80 bp, synthetic construct
  source 1..80: mol_type = other DNA
ccagaggcctcagattcagccgtagtgctccccttttccccctggtctgtctcccctcctcccaactgctggagccggtc

SEQ ID NO: 149335 - DNA, 80 bp, synthetic construct
  source 1..80: mol_type = other DNA
atttgatgtggaaatcaccttcgtcataaccacgacgcaacaacagtcgacagcacccaaccctgacacaccactattga

SEQ ID NO: 149336 - DNA, 80 bp, synthetic construct
  source 1..80: mol_type = other DNA
gctcaatccgttgctttggttggtgaaagagctttttatgacccaagaactgctggcagtaaatctagatttggggattt

SEQ ID NO: 149337 - DNA, 80 bp, synthetic construct
  source 1..80: mol_type = other DNA
tccgacgaaagattgtcatacacaatgttgggagaaatcctgaattattatacacactgggcaggatcaataaagtacac

SEQ ID NO: 149338 - DNA, 80 bp, synthetic construct
  source 1..80: mol_type = other DNA
aaagtcaggaaatgttacagttggttataaatatacacatcctggagaacagggcagagaaatagggacctttggggaga

SEQ ID NO: 149339 - DNA, 80 bp, synthetic construct
  source 1..80: mol_type = other DNA
ggcctatgcgggcggtaccaaagctaatgttgggtatgcacacacacaccctggtgaagatgggcatgaaattcgtgacc

SEQ ID NO: 149340 - DNA, 80 bp, synthetic construct
  source 1..80: mol_type = other DNA
cacccactggaaataaaatacaaaacacaacacctcctacaagtacaacttggaacccaaaaactactacttatacaatt

SEQ ID NO: 149341 - DNA, 80 bp, synthetic construct
  source 1..80: mol_type = other DNA
tgttggtatcaaacatccttgatattgccacctcaaaccagtggcactgcatatttactatccttcattagtgcttgtcc

SEQ ID NO: 149342 - DNA, 80 bp, synthetic construct
  source 1..80: mol_type = other DNA
tggaaagctaaatgcagcaatggttactaccatatgtaaagattgtcaccagccaacaaactttaagaaatgttgtccac

SEQ ID NO: 149343 - DNA, 80 bp, synthetic construct
  source 1..80: mol_type = other DNA
aataaacaagtgccagacagtagtggacaagttgaaccaaaacactttctcatacctagagatgacatcaaaaacttggg

SEQ ID NO: 149344 - DNA, 80 bp, synthetic construct
  source 1..80: mol_type = other DNA
tggcaatagacatgtctcattggataaaagaaaaggggggactggaagggatttactacagtgagaggagacatagatta

SEQ ID NO: 149345 - DNA, 80 bp, synthetic construct
  source 1..80: mol_type = other DNA
attctcaggcccaaaaaaacccagaatcgatcttcaaaagtacgagccaccagaagacgtctacggtacactccaaaaag

SEQ ID NO: 149346 - DNA, 80 bp, synthetic construct
  source 1..80: mol_type = other DNA
gccacactactcattcaaaagcttcgacatcagacgtgggtactttagcgcgaagagtgttaaaagagtgtcagaacaat

SEQ ID NO: 149347 - DNA, 80 bp, synthetic construct
  source 1..80: mol_type = other DNA
aatatattccagatagtgaggatgattattcagattgttgtctggctcttttagctaaccaaccagaacctacaattata

SEQ ID NO: 149348 - DNA, 80 bp, synthetic construct
  source 1..80: mol_type = other DNA
tgttgacccattcaccgtgggcccagaatgggtcttccacacatgggactggagacgtggactttttggtaaagatgcta

SEQ ID NO: 149349 - DNA, 80 bp, synthetic construct
  source 1..80: mol_type = other DNA
cgtagagctagccaccaacagcaccgcttccaacaaggtgcctatcacggtgaccgtggcccctatgcacgcagaataca

SEQ ID NO: 149350 - DNA, 80 bp, synthetic construct
  source 1..80: mol_type = other DNA
actgcatactggactaacttaacacaaaaccacccacaggccacaaacagcaacgaaggcctagtggaaccctggacatc

SEQ ID NO: 149351 - DNA, 80 bp, synthetic construct
  source 1..80: mol_type = other DNA
ataatacccccacatttgcaatcaagaaaaaggataagaacaaatggagaatgctgatagattttagagagctaaacaag

SEQ ID NO: 149352 - DNA, 80 bp, synthetic construct
  source 1..80: mol_type = other DNA
agatagggaaatttatcgattggttaaaggaaaaattaatacccactgttcagaggaaaagggaaaccttggagcaatgc

SEQ ID NO: 149353 - DNA, 80 bp, synthetic construct
  source 1..80: mol_type = other DNA
cattgagcctagacccagtgtcttcaaatgttttgcaaccaaagttgctaaccagacacgaaaggctgctaaggaagttg

SEQ ID NO: 149354 - DNA, 80 bp, synthetic construct
  source 1..80: mol_type = other DNA
ttcgggacggtgtttcggcgcgctgccggtgcgttccacggtccttgcctgtgtcgtttccggccgcgtggtgggtccat

SEQ ID NO: 149355 - DNA, 80 bp, synthetic construct
  source 1..80: mol_type = other DNA
tttggacccaacaactcgcgatgtcagcaagatgaaattctacatggacaagtatgggttggatctaccgtactctactt

SEQ ID NO: 149356 - DNA, 80 bp, synthetic construct
  source 1..80: mol_type = other DNA
gtacatttgtacgccagtttgcctcccttccctaccttgtaactttagaagatataactacatgacaaatagggagccaa

SEQ ID NO: 149357 - DNA, 80 bp, synthetic construct
  source 1..80: mol_type = other DNA
tccatgtatctcagctcttagccaagatattggacacatcacaatgcagtatatgtatgtcccacctggtgccccaattc

SEQ ID NO: 149358 - DNA, 80 bp, synthetic construct
  source 1..80: mol_type = other DNA
accagtagccacattctctcctcctacttctttccctggcacaactgtaacaaaaacctccatagaatcatttaaccaat

SEQ ID NO: 149359 - DNA, 80 bp, synthetic construct
  source 1..80: mol_type = other DNA
ttggtgttcaaacagagttgaaagctgaaatctttgctattcctgttgatgtagcatcacaaccactagcaacaacactc

SEQ ID NO: 149360 - DNA, 80 bp, synthetic construct
  source 1..80: mol_type = other DNA
gagaagcaagttgaaaacttgcgagtggcagacatcaaaacacaagaaaagatcaagatggaaattgatacccttcatga

SEQ ID NO: 149361 - DNA, 80 bp, synthetic construct
  source 1..80: mol_type = other DNA
gacggtggaactggagctagagtcagagccgaggcctaggccctcgcgcacgccatcacccgggcgcaaccgccgccgct

SEQ ID NO: 149362 - DNA, 80 bp, synthetic construct
  source 1..80: mol_type = other DNA
atttaacctattggtgtctctgagaatagacacagatcttacccgagccggaatgaaggggattgttgacaaagagggga

SEQ ID NO: 149363 - DNA, 80 bp, synthetic construct
  source 1..80: mol_type = other DNA
ccaggtatacaaccaccaacatcactcagagacaaaaagtgggatggtgcatcaaatccaagtgtattctaccagccaaa

SEQ ID NO: 149364 - DNA, 80 bp, synthetic construct
  source 1..80: mol_type = other DNA
aaccataaaaaaaatgagagacagaaactttgaactccacacaggtaaaaatgacctatacggaggcttcacagcccagt

SEQ ID NO: 149365 - DNA, 80 bp, synthetic construct
  source 1..80: mol_type = other DNA
ccagcactgacagcagttgagattggagcaacctcaaacgccaccgatgagagcatgattgaaactaggtgtgtggtcaa

SEQ ID NO: 149366 - DNA, 80 bp, synthetic construct
  source 1..80: mol_type = other DNA
agggagtccaagatgtccgtgtttctggctactgccgccgctgctgccgcggctgagtccgtattgtctggcagcaggga

SEQ ID NO: 149367 - DNA, 80 bp, synthetic construct
  source 1..80: mol_type = other DNA
aagagagcttttacacagatgtaacacctgatgtggcagaccagctactgcatgggtcttatttctcttgctttacagcc

SEQ ID NO: 149368 - DNA, 80 bp, synthetic construct
  source 1..80: mol_type = other DNA
tgcccataaccgtgacagtagcgccgatgagtgcagaatacaacggccttcggttgggcggccatcagggtttgccgact

SEQ ID NO: 149369 - DNA, 80 bp, synthetic construct
  source 1..80: mol_type = other DNA
cggactgaggctagcatcaaagcagggcgtaccagtgctatgcacaccaggcagttcccagtttttgacatccgacgact

SEQ ID NO: 149370 - DNA, 80 bp, synthetic construct
  source 1..80: mol_type = other DNA
actactccttgcatcacatttaacgttctttccggtgactacacaggcaaactaagcatactaccagaccaacaaactga

SEQ ID NO: 149371 - DNA, 80 bp, synthetic construct
  source 1..80: mol_type = other DNA
attacacacaccgtgaatcggcggcgttgctagcgtgtaattcttcgtcccctccacactacatacgtcggtatcatttt

SEQ ID NO: 149372 - DNA, 80 bp, synthetic construct
  source 1..80: mol_type = other DNA
tagcaactctgagagagtccctgcactgaccgccgttgagactggccacacgtcacaggtgacaccaagtgacacgatgc

SEQ ID NO: 149373 - DNA, 80 bp, synthetic construct
  source 1..80: mol_type = other DNA
gtggtaggccgatgaagaagagaataggcttttgagggccgaaaggactccagccaagtgggggatgcgcgttgtcaggt

SEQ ID NO: 149374 - DNA, 80 bp, synthetic construct
  source 1..80: mol_type = other DNA
atagaaccctactggcaggttaggtggcgcccagagatgcttttccaagagtcagttatgtcagacatagtgcagacagg

SEQ ID NO: 149375 - DNA, 80 bp, synthetic construct
  source 1..80: mol_type = other DNA
tgtgtggcccatcacctacacagacacagttcaactaagaaggaagttagaattctttacctactcaagatttgacattg

SEQ ID NO: 149376 - DNA, 80 bp, synthetic construct
  source 1..80: mol_type = other DNA
caagaaagacacaaaccccgctcctcaacaagaggagcaaaaagaagactcgcgtttcagagtcccagagctcagaccct

SEQ ID NO: 149377 - DNA, 80 bp, synthetic construct
  source 1..80: mol_type = other DNA
acctgagcgcagggatgcctggacacaagagcccttaccactggatatgaatcccctgggcagtgacgccagtcaaggcc

SEQ ID NO: 149378 - DNA, 80 bp, synthetic construct
  source 1..80: mol_type = other DNA
accttaacccaaacagaacttttaagtcaccaaatgataaattttgcagtacgttacaaccctggctggggtcaggtacc

SEQ ID NO: 149379 - DNA, 80 bp, synthetic construct
  source 1..80: mol_type = other DNA
gtgagaaaggtcacgtgattggcagtaactcagacagaaacaaccaccaaccagatgagagtgctttcttcaactgtaat

SEQ ID NO: 149380 - DNA, 80 bp, synthetic construct
  source 1..80: mol_type = other DNA
caccaccaaaccccaggctttaggtgcactggagatcggtgccactgcaaatgtgggaccagaggcaatgatagaaacca

SEQ ID NO: 149381 - DNA, 80 bp, synthetic construct
  source 1..80: mol_type = other DNA
ttagtaagatcacgacatacggatttggacaccagaacaaaggcatattcgtggctgggtataaaatcattaattaccac

SEQ ID NO: 149382 - DNA, 80 bp, synthetic construct
  source 1..80: mol_type = other DNA
gcacgatgaatttactacctgcaaatattggaacaggccccccagaaagtaccacacagatatacccttttacccagacg

SEQ ID NO: 149383 - DNA, 80 bp, synthetic construct
  source 1..80: mol_type = other DNA
aggagattctaccttgacatggaattaaagataatgcctaactactactcagctggaaacatgttgaatactgccaaagc

SEQ ID NO: 149384 - DNA, 80 bp, synthetic construct
  source 1..80: mol_type = other DNA
caccttacttgaatgcaagaagttgaccttgtatgaagaccaggtcagggcatttcctcaatctccagaggcctttcaga

SEQ ID NO: 149385 - DNA, 80 bp, synthetic construct
  source 1..80: mol_type = other DNA
taccagcagggagactttatgaatactccatggagaaccccagaagggagagaaagttcatacaggcaacaaaatatgga

SEQ ID NO: 149386 - DNA, 80 bp, synthetic construct
  source 1..80: mol_type = other DNA
gaacacttaaaaacaagatgacaaacttcatacagttcaggtccaagcaccgtacagaaccggtgtgtgttctcatacat

SEQ ID NO: 149387 - DNA, 80 bp, synthetic construct
  source 1..80: mol_type = other DNA
actgcacttccgaatggctgagttttccacgcccgtccgcagcgagaacgccacggacgaagattctcgcgtcccgaggg

SEQ ID NO: 149388 - DNA, 80 bp, synthetic construct
  source 1..80: mol_type = other DNA
ggtactggaagttcccagatgtgttaactgaaactggggtttttgggcaaaatgcacaattccactacctctaccgatca

SEQ ID NO: 149389 - DNA, 80 bp, synthetic construct
  source 1..80: mol_type = other DNA
cgccgttatcagggacgttatttttgtcctctttcccgtcttcgtcttcctctgtgtcgcgctcgtcccggtaatcgaga

SEQ ID NO: 149390 - DNA, 80 bp, synthetic construct
  source 1..80: mol_type = other DNA
accgcgccgttaggtacggcctcgacaatcgaaggtaattcaatcatagctagcaccgccagtactttcacccttatccc

SEQ ID NO: 149391 - DNA, 80 bp, synthetic construct
  source 1..80: mol_type = other DNA
gtcgacgttgccgtgtaccagcacgtcgaccaggtagcagagctcggggtaattggggcttgtcacggtggttttgaaaa

SEQ ID NO: 149392 - DNA, 80 bp, synthetic construct
  source 1..80: mol_type = other DNA
ttttactgggaaacagctcagtctgtagctacgtcacagtttaatgcagaacacatccccataacaggcactatgcccac

SEQ ID NO: 149393 - DNA, 80 bp, synthetic construct
  source 1..80: mol_type = other DNA
agtgttgcccacccatgcagaatgtggtgaaacccttaatgtcgacggccgtgatattaaggtaattaaaagacaaatct

SEQ ID NO: 149394 - DNA, 80 bp, synthetic construct
  source 1..80: mol_type = other DNA
aaaagaaagatcttatcaacaagcagacaaaagatttgaccagactcaaaatggctctagataaatatggtgttgatctg

SEQ ID NO: 149395 - DNA, 80 bp, synthetic construct
  source 1..80: mol_type = other DNA
ttcggggtcacttccccttttataagtgtgtgaacagtgatttcagtaaaacctaagagatatttggtgtcacttccgca

SEQ ID NO: 149396 - DNA, 80 bp, synthetic construct
  source 1..80: mol_type = other DNA
ggccctttagctacactccacaaaaagacactcagagcaccaccctagtaagcaaatacaaattcagatggcactttggg

SEQ ID NO: 149397 - DNA, 80 bp, synthetic construct
  source 1..80: mol_type = other DNA
gggctccacggttcccctcggtggactcaactttgtcaacgacctggcgtccccggtttccaccgccgagatgatggatg

SEQ ID NO: 149398 - DNA, 80 bp, synthetic construct
  source 1..80: mol_type = other DNA
atagtatgggatttggggcttcaatccagttgtgtgttgtgtgtgccatggatcagtcaaacccattacaggttagtgca

SEQ ID NO: 149399 - DNA, 80 bp, synthetic construct
  source 1..80: mol_type = other DNA
acggcgaatagttgcgtgtgctgcggtgcggttgagacggcgacggcgaataaaagcggcgtgcgccgcgcacggcgaaa

SEQ ID NO: 149400 - DNA, 80 bp, synthetic construct
  source 1..80: mol_type = other DNA
cgaggcggcgctacccggtgaggacgaagcgtggatcgcgtccaaaaacgtgcagtacgaattcatgggtctcattttca

SEQ ID NO: 149401 - DNA, 80 bp, synthetic construct
  source 1..80: mol_type = other DNA
cgggccccgggcaaggctcttaaatagctatgttttttggtaggcctcacagaaagaagaggctactgtcactgcttagc

SEQ ID NO: 149402 - DNA, 80 bp, synthetic construct
  source 1..80: mol_type = other DNA
accagacatgtggttaactacaagacaagatctgagagcacattggaatccttctttggtagatcagcatgtgtcacaat

SEQ ID NO: 149403 - DNA, 80 bp, synthetic construct
  source 1..80: mol_type = other DNA
ggcctgcaaggcctttgacagaccccctagaaactacctgtcagacaaacccatctatccctggcttccccgctcccaac

SEQ ID NO: 149404 - DNA, 80 bp, synthetic construct
  source 1..80: mol_type = other DNA
cctcccagattcctgacgttttggttgtctttcctgccaattcctcccgtaaacttatgattatcctagcccattcccga

SEQ ID NO: 149405 - DNA, 80 bp, synthetic construct
  source 1..80: mol_type = other DNA
acgtcaactggataacgtgattataacataccgacgctagtttattcaagataaagttttactactttgtgtagccctca

SEQ ID NO: 149406 - DNA, 80 bp, synthetic construct
  source 1..80: mol_type = other DNA
atctgcaggaagactagccacagaaattccaggcctatacacagatataatttataacccctacacagacaaaggcaaag

SEQ ID NO: 149407 - DNA, 80 bp, synthetic construct
  source 1..80: mol_type = other DNA
aaaccctgaaggtcttgaaaaccagaaagagcataaactgtttaatgattggagaataaacttatctagtttggtacaac

SEQ ID NO: 149408 - DNA, 80 bp, synthetic construct
  source 1..80: mol_type = other DNA
caggcttcatagtggaccttctatcctcctcaaaagatcccagagttatagaatattgcaatgagcaaggttggataggg

SEQ ID NO: 149409 - DNA, 80 bp, synthetic construct
  source 1..80: mol_type = other DNA
taatcatcttaacagtctggcgtctcgtattggatctcctggaaatggccagccgccgcgcccagaccccccgcctagac

SEQ ID NO: 149410 - DNA, 80 bp, synthetic construct
  source 1..80: mol_type = other DNA
tgcatagcgaggactacacagaggagggccgcttccctcacggagggtccctctcgaccactacatggtctctaaaggtg

SEQ ID NO: 149411 - DNA, 80 bp, synthetic construct
  source 1..80: mol_type = other DNA
ttctctgtccgattgctgaaggacaccccatttattgaacagaatgcactacttcaaggagacgtagtggaggcaattga

SEQ ID NO: 149412 - DNA, 80 bp, synthetic construct
  source 1..80: mol_type = other DNA
caccaggcatcacaccaccaggaagtgaatcagacaaaagatgggacagtgcgacaaaccctagtgttttttaccaaccc

SEQ ID NO: 149413 - DNA, 80 bp, synthetic construct
  source 1..80: mol_type = other DNA
tgattaactccgtggtgacggaaaagttgctcaagcatctaatcaaactggtcagcagcatggtcattattgttagaaac

SEQ ID NO: 149414 - DNA, 80 bp, synthetic construct
  source 1..80: mol_type = other DNA
tgccacacactcagacgataccaactacccaggaccctttggggggggtatgactacagacaaatttactttaagaattc

SEQ ID NO: 149415 - DNA, 80 bp, synthetic construct
  source 1..80: mol_type = other DNA
tcatctacataagggcctaggtgcagacggaaatcgtggtcgtggtctccgttaacccggtagccgtacaaggccacaaa

SEQ ID NO: 149416 - DNA, 80 bp, synthetic construct
  source 1..80: mol_type = other DNA
acagacacatctcctagactactacctgggactctacagtcccatattcctacacccaggcaggtcaaatgtagaattct

SEQ ID NO: 149417 - DNA, 80 bp, synthetic construct
  source 1..80: mol_type = other DNA
aggttggttcacatcaaattgagcccctcaaaacttcagtagataaacctggttcaaagaaaacacagggagaaaaattt

SEQ ID NO: 149418 - DNA, 80 bp, synthetic construct
  source 1..80: mol_type = other DNA
tcaaagaagcagttatgtctaagtacaagggaaacaaaggtgttgaaatgaatgagtacataataacagctgccaagcac

SEQ ID NO: 149419 - DNA, 80 bp, synthetic construct
  source 1..80: mol_type = other DNA
ttgatgtcaaccattaaaaccccagtaaacacaaccacaatcaaggaattcttcaatcatgccattgaaggtgatgagca

SEQ ID NO: 149420 - DNA, 80 bp, synthetic construct
  source 1..80: mol_type = other DNA
agtcacgtttgtaataactagttaccaacatcaagggactattaaccaagacatgcccccaatgacccaccaaataatgt

SEQ ID NO: 149421 - DNA, 80 bp, synthetic construct
  source 1..80: mol_type = other DNA
gtcgtccttattaaacacaacaaaacttacaacaagtacaacaaccacatacacatacccaggaactacatccacaccag

SEQ ID NO: 149422 - DNA, 80 bp, synthetic construct
  source 1..80: mol_type = other DNA
gtgttcgcaacttccactcgaggtcagagtcatcaatagagaactttctttgtagatcggcctgtgctcacatgtcgagc

SEQ ID NO: 149423 - DNA, 80 bp, synthetic construct
  source 1..80: mol_type = other DNA
tctgcctcgagagctcattttccaggtctggcgaagatcctgggaatattggcataatgagcaggggatgtcacgagctt

SEQ ID NO: 149424 - DNA, 80 bp, synthetic construct
  source 1..80: mol_type = other DNA
aattaagatctgatgggggaacgacctacgtgcccattacagtcaccattgctcccatgtgcgcagaatataacggtcta

SEQ ID NO: 149425 - DNA, 80 bp, synthetic construct
  source 1..80: mol_type = other DNA
ctacccgtttagggttaaaaagggggccttataaacactcttgctaacgccctcttgagggtcctcttatcggtagctac

SEQ ID NO: 149426 - DNA, 80 bp, synthetic construct
  source 1..80: mol_type = other DNA
ggaagggtgggatatggcgctgctttgctgcgcaagtactttgtacaagcacaaggtgagataacatccaagtccagtgt

SEQ ID NO: 149427 - DNA, 80 bp, synthetic construct
  source 1..80: mol_type = other DNA
accagataatcaacttgcgcaccaataattgcgccaccattgtccttccatatgtgaactctctttcaatagacagtatg

SEQ ID NO: 149428 - DNA, 80 bp, synthetic construct
  source 1..80: mol_type = other DNA
atgagggaagaagcaacaaccagacttaaggttagacacaatttagatgcaatattccaaggtctaggagactctgagac

SEQ ID NO: 149429 - DNA, 80 bp, synthetic construct
  source 1..80: mol_type = other DNA
ggactgcaacatagttcagtccgcaatgttccctttcactcccgctatgtatccaatgcaaccaatgcctttccgcagcc

SEQ ID NO: 149430 - DNA, 80 bp, synthetic construct
  source 1..80: mol_type = other DNA
agtctacgtcgtgcacttcctgggcatggtctatgtgataatataaagcggcgcacttccgaatggctgagttttccacg

SEQ ID NO: 149431 - DNA, 80 bp, synthetic construct
  source 1..80: mol_type = other DNA
cccccccccgaggcgggcgcgtgtgagaggcctgccggccctccccgctcctgagaacccaccggcgccatggcctggcg

SEQ ID NO: 149432 - DNA, 80 bp, synthetic construct
  source 1..80: mol_type = other DNA
cacaacaagggccgccgccagcaggacaaatcagggaaccgacaggatcagatatagcagggaccactagtacaatagaa

SEQ ID NO: 149433 - DNA, 80 bp, synthetic construct
  source 1..80: mol_type = other DNA
taccagagaaaatctcctctgggaggtaacataatgacagcaccatcactacacccagcagaagccatgcttacgagaaa

SEQ ID NO: 149434 - DNA, 80 bp, synthetic construct
  source 1..80: mol_type = other DNA
gcacactgattgtggcaatgatcccagagcatcaattggccagtgcaattggagggaatgttactgctggatacaaatac

SEQ ID NO: 149435 - DNA, 80 bp, synthetic construct
  source 1..80: mol_type = other DNA
ttgaaactagacatgtggcaaaccagaggctgcgctcagagtgcactattgagtcattctttggacgcagtgcctgcgtg

SEQ ID NO: 149436 - DNA, 80 bp, synthetic construct
  source 1..80: mol_type = other DNA
ttcaacgatgttagcaaagctgtgacagataaattgacatcaaaagtgttcaaatggttggttagaatcattagtgccct

SEQ ID NO: 149437 - DNA, 80 bp, synthetic construct
  source 1..80: mol_type = other DNA
gcagttttacaccctagtgatagtagattggaagtagactttgaagaatcattattttcaaaatataagggtaatacaaa

SEQ ID NO: 149438 - DNA, 80 bp, synthetic construct
  source 1..80: mol_type = other DNA
tcttaaggtcactaagcactccgagcgtcagcgaggagtgcgaccctccttactgcacacccccctgccctggtgcaacg

SEQ ID NO: 149439 - DNA, 80 bp, synthetic construct
  source 1..80: mol_type = other DNA
ccctggctaaaaagagaatactaatacccagcctaaaaactagacccagcagaaaacactacattaaaattaaagtaggg

SEQ ID NO: 149440 - DNA, 80 bp, synthetic construct
  source 1..80: mol_type = other DNA
tggtgttgaaacaaaaatattaaagcaaacaattgttacagatgaaaatgatgtggatacagaaataactatcttgtggt

SEQ ID NO: 149441 - DNA, 80 bp, synthetic construct
  source 1..80: mol_type = other DNA
tttcagatagaggtgcttaataggttaacttacaacagctccagtcctaatgaagtttactgtattgtgcaaggtaaaat

SEQ ID NO: 149442 - DNA, 80 bp, synthetic construct
  source 1..80: mol_type = other DNA
cactcggatttatcttgacccttaatacgagaaaatgggcgctcaggtgtcgacgcaaaagaccggtgcgcacgagacca

SEQ ID NO: 149443 - DNA, 80 bp, synthetic construct
  source 1..80: mol_type = other DNA
ccccactaaaaacagtagggggatcttcatatgtaccaatcaccataaccattgcaccaatgtgcgctgagtataatgga

SEQ ID NO: 149444 - DNA, 80 bp, synthetic construct
  source 1..80: mol_type = other DNA
aggagcagtccggcgagtggcggacacgatccagagcggaccgagcaattcggagcgggttccagcgttaacggccgttg

SEQ ID NO: 149445 - DNA, 80 bp, synthetic construct
  source 1..80: mol_type = other DNA
tggatgatagaaaacctgcccctgtggagtctgctccacggctaccgagagtacctagagagccagatcaagtacggaga

SEQ ID NO: 149446 - DNA, 80 bp, synthetic construct
  source 1..80: mol_type = other DNA
ttatttttacaaccaggatgtcactaaattagcaattgacttaatcatctcgtcttacactatgtaccttactgtttggc

SEQ ID NO: 149447 - DNA, 80 bp, synthetic construct
  source 1..80: mol_type = other DNA
gtgttctatataaaattggacaagtacttgggatacatgtagggggaaatggtagagatggattttcagctatgttactt

SEQ ID NO: 149448 - DNA, 80 bp, synthetic construct
  source 1..80: mol_type = other DNA
gtgtcttatacaaaattggcagtgttattggcattcatgttggcggtaatggaagagatggtttttctgcaatgctcctt

SEQ ID NO: 149449 - DNA, 80 bp, synthetic construct
  source 1..80: mol_type = other DNA
acgtacatgagatttgatgtggaagtcaccttcgtaatcaccagctctcaggatcaatctacatccctcagtcaagacac

SEQ ID NO: 149450 - DNA, 80 bp, synthetic construct
  source 1..80: mol_type = other DNA
tcccccgtaccattgtccgccaggacaccaaatcatgccgtgggctccgccgatctacaacgttcaggggagagaagaag

SEQ ID NO: 149451 - DNA, 80 bp, synthetic construct
  source 1..80: mol_type = other DNA
cgcagaaatatttccagcaaattcattctgcaatcggcttgcataacgctgaccacgttcataagcacttgttgggcgat

SEQ ID NO: 149452 - DNA, 80 bp, synthetic construct
  source 1..80: mol_type = other DNA
tgatcaggccggtaccaatctggagattacaatagtcaaactacaacgcaatgagaaattcagagacatcagacctcaca

SEQ ID NO: 149453 - DNA, 80 bp, synthetic construct
  source 1..80: mol_type = other DNA
ggggaggcgctttcgcagacggggctacagacgcagactgtacattagaaagagacgcagacgcagaaaaaagcatgtac

SEQ ID NO: 149454 - DNA, 80 bp, synthetic construct
  source 1..80: mol_type = other DNA
aacccacaagagggaggcaccacaggggtatactttaacacctttaaaacagaggaacacatatttcaaccaaactggac

SEQ ID NO: 149455 - DNA, 80 bp, synthetic construct
  source 1..80: mol_type = other DNA
tgacctaaacaaaaaccctttttacccctggatgcctcctacttacaatgtaaaatttaaccttaacttcaaataaatgt

SEQ ID NO: 149456 - DNA, 80 bp, synthetic construct
  source 1..80: mol_type = other DNA
ccattaccatctccattagccctatgtgtgctgagttttctggagcacgtgcaaagagccaggggcttccagttatgtta

SEQ ID NO: 149457 - DNA, 80 bp, synthetic construct
  source 1..80: mol_type = other DNA
ggccgacgagtacgccacggcagccgcctgggacaggcccgtccgctccttccactcagacacccccacttatccctgga

SEQ ID NO: 149458 - DNA, 80 bp, synthetic construct
  source 1..80: mol_type = other DNA
gggaggtttgcgggccgtcagcgcggcgcggcgtcagcgcactgccactgcgtgcctttgtgcgcactgccggtgcgttt

SEQ ID NO: 149459 - DNA, 80 bp, synthetic construct
  source 1..80: mol_type = other DNA
ggaagatcagcgtgcgtgacaatcttagaagtggaaaatttcaacgctacaacagattctgacaagaagaaacagttcac

SEQ ID NO: 149460 - DNA, 80 bp, synthetic construct
  source 1..80: mol_type = other DNA
aggacaagctataacaggcaatacaaatcaacctaacatgtggtcacaagtacagaacacaactccactatcacctaatg

SEQ ID NO: 149461 - DNA, 80 bp, synthetic construct
  source 1..80: mol_type = other DNA
gaggcccagcacggctttccagcccacgcgtacgcagcgctgtccaaagagcgtctcggagacgagctcgtagacgcgct

SEQ ID NO: 149462 - DNA, 80 bp, synthetic construct
  source 1..80: mol_type = other DNA
ccgcgtgacgacggcgacggtgaaaacaacgtcgtggaagtcagcagcagcaccggcggtgcgcacccgccgagcgacga

SEQ ID NO: 149463 - DNA, 80 bp, synthetic construct
  source 1..80: mol_type = other DNA
gccaagaagaagactcacatacactccaaagagaaccgagaccgtggacgagcgaggaagaaacagagacagaagtccaa

SEQ ID NO: 149464 - DNA, 80 bp, synthetic construct
  source 1..80: mol_type = other DNA
cccagctgcgccggacgcctcggaccccccctcgacccgaatcgcttgcgcgattcggacctgcggcctcggggtggtcg

SEQ ID NO: 149465 - DNA, 80 bp, synthetic construct
  source 1..80: mol_type = other DNA
aagtgctgtccgttaatttgtggaaaagctctcagtttagtagatagacacactaatgtcagatatagtatagatcagct

SEQ ID NO: 149466 - DNA, 80 bp, synthetic construct
  source 1..80: mol_type = other DNA
ataagtcactaagcactccgagcgcagcgaggagtgcgaccctggggagtgggtgcaacgccctcggcggccgcgcgcta

SEQ ID NO: 149467 - DNA, 80 bp, synthetic construct
  source 1..80: mol_type = other DNA
ctagactactacctgggtctctacagtcctatattcctacaccccggcagatcaaacacagagctattcacagcatacaa

SEQ ID NO: 149468 - DNA, 80 bp, synthetic construct
  source 1..80: mol_type = other DNA
tgactgcagatctacaggtggatagtacaaatgttccaggtcccgatgtgattccgtgttgtgattgcacagctggttgc

SEQ ID NO: 149469 - DNA, 80 bp, synthetic construct
  source 1..80: mol_type = other DNA
gcgcatgcgcggtgccccccccccgcggaggggctccgccccccggtcccccccccgaaatacgtcactaaccacttgac

SEQ ID NO: 149470 - DNA, 80 bp, synthetic construct
  source 1..80: mol_type = other DNA
acaaattacatttccattaaatgataaggacccaacacacagagacactctttatggaggcagcccatataataagacca

SEQ ID NO: 149471 - DNA, 80 bp, synthetic construct
  source 1..80: mol_type = other DNA
actcctcgggcaatagagtccctagaagcatacaaatcgttgaccagaaatacaactcaccggaacttaccatccattcc

SEQ ID NO: 149472 - DNA, 80 bp, synthetic construct
  source 1..80: mol_type = other DNA
accactccggtggaatcaaaactagagagggtactgaaagtactaaaaccattagttacaccgtcaagtcctgcaaaggg

SEQ ID NO: 149473 - DNA, 80 bp, synthetic construct
  source 1..80: mol_type = other DNA
agaagaaagatttgataccaaaagatagggacttaaccaagtttaaacaagctttggaaaaatatggcttagatttaccc

SEQ ID NO: 149474 - DNA, 80 bp, synthetic construct
  source 1..80: mol_type = other DNA
cacatgcaaatacagatcaaatgtacaaaataccttttgacagcaactatggctttcccacatacaaaccaataaaagcc

SEQ ID NO: 149475 - DNA, 80 bp, synthetic construct
  source 1..80: mol_type = other DNA
ttgctcctttggactacaccgcccaagcgtctgagtacgtgcccattactgttaccatagctccgatgtgtgcagaatac

SEQ ID NO: 149476 - DNA, 80 bp, synthetic construct
  source 1..80: mol_type = other DNA
ccagacttcgccataaggcctttatcttcttgccatttgtcagtgtcgggggtcgccataggcttcggcctcggttttag

SEQ ID NO: 149477 - DNA, 80 bp, synthetic construct
  source 1..80: mol_type = other DNA
tttacaacatgattatgcaggaagataaacaccgcagaagtgttgtggatgtaatgacagcaatatttcaaggaccaatc

SEQ ID NO: 149478 - DNA, 80 bp, synthetic construct
  source 1..80: mol_type = other DNA
aaaaaactgtaccttactcaatggaacccgcctatagtaaaacgctgcttcataaagggggctcttcccctaattctctg

SEQ ID NO: 149479 - DNA, 80 bp, synthetic construct
  source 1..80: mol_type = other DNA
ccacagtagttgctgcggctgcggcaattttattaatcatcttaatgtactggctactcgctatggctttactggggggc

SEQ ID NO: 149480 - DNA, 80 bp, synthetic construct
  source 1..80: mol_type = other DNA
gtacttaactattatggtaattgggctggtagtgtcaggataacattcatgtgtgtatgtgatagctttagcacaggaaa

SEQ ID NO: 149481 - DNA, 80 bp, synthetic construct
  source 1..80: mol_type = other DNA
caatggaaatgtatagggtgaagctctccgacaatgcagattgtagaaagccaattttgtgcctatcattgtcaccagca

SEQ ID NO: 149482 - DNA, 80 bp, synthetic construct
  source 1..80: mol_type = other DNA
tgtcaaagaaaaccaaagatctagccttcacatacgtgaccatggacaagtatggtttgaacttgccaatggtcacgtat

SEQ ID NO: 149483 - DNA, 80 bp, synthetic construct
  source 1..80: mol_type = other DNA
agtaccagtctaccccaaagtcccgctaagagtaatgagttacaaattggcaatagacatgtcacattttataaaagaaa

SEQ ID NO: 149484 - DNA, 80 bp, synthetic construct
  source 1..80: mol_type = other DNA
gagattgatgtttgcaatactcctccccctgaatgcataaatgatctcctcaaatcagtagattctgaggaagttagaga

SEQ ID NO: 149485 - DNA, 80 bp, synthetic construct
  source 1..80: mol_type = other DNA
cttccagatcagccacctcactcacctcagcactcacccactgctcatgcttctctcaaaacatcacatagtagttccta

SEQ ID NO: 149486 - DNA, 80 bp, synthetic construct
  source 1..80: mol_type = other DNA
tgtctccgcatgcaacgatttttcagtgcgaatgctgcgtgacacgccattcatatcacagagtgccggtttgcagggag

SEQ ID NO: 149487 - DNA, 80 bp, synthetic construct
  source 1..80: mol_type = other DNA
gtgggactaaaaccaattaacacccctactaaaacaaaactccatcccagtgtgttttatgaaattttcccagggtcaaa

SEQ ID NO: 149488 - DNA, 80 bp, synthetic construct
  source 1..80: mol_type = other DNA
taagtgaaaaagtttcagagattacatccatggtgagcaacatcatcactgagaaactgctcaagaacctggtcaagctc

SEQ ID NO: 149489 - DNA, 80 bp, synthetic construct
  source 1..80: mol_type = other DNA
cggtttcaatgtgatcatcgaaaaggttgcttggcacggcagtcaatttgaattagccatttcgaaagtcacggctggtg

SEQ ID NO: 149490 - DNA, 80 bp, synthetic construct
  source 1..80: mol_type = other DNA
aacatatcctaaagagctagcaaatcttggaccatctgatctttatgtgcacactggaaacctcatatacaggaacctac

SEQ ID NO: 149491 - DNA, 80 bp, synthetic construct
  source 1..80: mol_type = other DNA
ggagctcatgaaaccagtttaagtgcggcaggtaattcaattatacattatacgaacatcaactactataaagatgctgc

SEQ ID NO: 149492 - DNA, 80 bp, synthetic construct
  source 1..80: mol_type = other DNA
catgcaaggatttctgtctgcgcatggctagggacacaaaccttcataaacaaacggggcccattacccaaaacccagta

SEQ ID NO: 149493 - DNA, 80 bp, synthetic construct
  source 1..80: mol_type = other DNA
aggcctaagcaaaggtgtagaagtgtgtccccctccattccacccactgatatacgcccgacaataaagttgatgatatt

SEQ ID NO: 149494 - DNA, 80 bp, synthetic construct
  source 1..80: mol_type = other DNA
actatttgaagacaagtggtacccccagtcagatctgtgcaaggtgccccttgtcagttggcgggtgaccgcatgtgact

SEQ ID NO: 149495 - DNA, 80 bp, synthetic construct
  source 1..80: mol_type = other DNA
aacgtggacctagaactggtcagatacctaggggcctctttcagactgtacagagccccaaaggcagactttatattcac

SEQ ID NO: 149496 - DNA, 80 bp, synthetic construct
  source 1..80: mol_type = other DNA
cccgctcctactagtggagactgggctactgagtaccaggcctgtaaaatatgggacagacctcccagacggcatctatc

SEQ ID NO: 149497 - DNA, 80 bp, synthetic construct
  source 1..80: mol_type = other DNA
ccacaaaacttcggagaaatacaagaacaagagattgcagattggttgttaacctgcaaagagaaatacacatgcacatt

SEQ ID NO: 149498 - DNA, 80 bp, synthetic construct
  source 1..80: mol_type = other DNA
gaacaaaacccagttgaaaattatgtgggagaggcgcttaatgaggtcttggttgtaccaaatatcaaagagagtcatcc

SEQ ID NO: 149499 - DNA, 80 bp, synthetic construct
  source 1..80: mol_type = other DNA
ggaaatcactggtcacttcaattattgcacgtggacttgcaccagaagcccatgtttactcattgcccccagatccaaaa

SEQ ID NO: 149500 - DNA, 80 bp, synthetic construct
  source 1..80: mol_type = other DNA
cagcgaagagactcataacaaagatttctgggtaatacggttataataatgcttatggactaaaggatacttggaaaaaa

SEQ ID NO: 149501 - DNA, 80 bp, synthetic construct
  source 1..80: mol_type = other DNA
tttctgccggcacctttaggccgccgcgatgtagtcccggggatcgccagtggttgtatgttcagagccgcgtgggtgac

SEQ ID NO: 149502 - DNA, 80 bp, synthetic construct
  source 1..80: mol_type = other DNA
aatacagtagttaaccaaatgagagaagaagccaatatcaggaagagtgtaggtagtagtctatatgccatattccaggg

SEQ ID NO: 149503 - DNA, 80 bp, synthetic construct
  source 1..80: mol_type = other DNA
cggaggtcctttgggtccagccagcattgatttcttgccaagctttagccaggtgaccagcagtatgacgtgcgatggta

SEQ ID NO: 149504 - DNA, 80 bp, synthetic construct
  source 1..80: mol_type = other DNA
tggccgacacaaaaccatctggctcagttcattcaaaagaggttcctgctcttactgctgtggagactggagcgaccagt

SEQ ID NO: 149505 - DNA, 80 bp, synthetic construct
  source 1..80: mol_type = other DNA
tgtgccgtgccacatcagacaggtaatcaacacgtggcataaggttggaaaaaatgtatatttgcctccaagagaaggtc

SEQ ID NO: 149506 - DNA, 80 bp, synthetic construct
  source 1..80: mol_type = other DNA
gttctaaatgaaaggtcaaataggtccttctcggcggcatcggcgagcatagcaatgagccccccgctgcgcctgagctc

SEQ ID NO: 149507 - DNA, 80 bp, synthetic construct
  source 1..80: mol_type = other DNA
ccaaaaacccccgtccttaccggcgccggcgcccagcacgcccgaaaagcgaagcgccgcgcaatagctgcgtggaaacg

SEQ ID NO: 149508 - DNA, 80 bp, synthetic construct
  source 1..80: mol_type = other DNA
gggttttttgggcgtactggggacggagggtgtgcgaggccggggggtgtgcgtagccggggggtgtgcggcgccgggga

SEQ ID NO: 149509 - DNA, 80 bp, synthetic construct
  source 1..80: mol_type = other DNA
ctatgggcagcagcatatggatatgtagaattttgtgcaaaaagtacaggagaccagaacatacacatgaatgccaggct

SEQ ID NO: 149510 - DNA, 80 bp, synthetic construct
  source 1..80: mol_type = other DNA
acgaggagcgtgcgtaacaatcatgagtgttgacaactacaacgaaactatcgttgccggtcagaagtccacactttttg

SEQ ID NO: 149511 - DNA, 80 bp, synthetic construct
  source 1..80: mol_type = other DNA
attcatcccagatagagaagatgactaccctgaatgtcatttagcattgactgcaaatcaggaacaaccaactatccttg

SEQ ID NO: 149512 - DNA, 80 bp, synthetic construct
  source 1..80: mol_type = other DNA
actattatatgcccatatacaaaacccaagctctacaacccagacagcacagacgaaggctacgtaccctatgactataa

SEQ ID NO: 149513 - DNA, 80 bp, synthetic construct
  source 1..80: mol_type = other DNA
aactgcccattactgttacagtggcccccatgtgttgtgagttcaatgggttgagaaacatcacaattccagcaacccag

SEQ ID NO: 149514 - DNA, 80 bp, synthetic construct
  source 1..80: mol_type = other DNA
tcatcttaacccttaacaagataaaatgggagcacaagtatcaacacaaaagaccggagcgcatgagacgctgctcgagg

SEQ ID NO: 149515 - DNA, 80 bp, synthetic construct
  source 1..80: mol_type = other DNA
tttcccggtgtcaaagaacctgcacccctgcacccaagtgaccccaggttagagactgacctagaccaggctgttatggc

SEQ ID NO: 149516 - DNA, 80 bp, synthetic construct
  source 1..80: mol_type = other DNA
ccacggtatttgttcgcggaaccgggctgagggatgtttctgcgggggttttcgccgtttcgggacttttgcgcgcccca

SEQ ID NO: 149517 - DNA, 80 bp, synthetic construct
  source 1..80: mol_type = other DNA
accgaagggagatcctcgcgtcccgtggtcgggtgccggaggtgagtttacacaccgaagtcaaggggcaattcgggcac

SEQ ID NO: 149518 - DNA, 80 bp, synthetic construct
  source 1..80: mol_type = other DNA
aacagtgcaactattatactaccatggatgaattgtgctcccatggactttgcactgagacacaacagttggacaattgg

SEQ ID NO: 149519 - DNA, 80 bp, synthetic construct
  source 1..80: mol_type = other DNA
ttttcaatctcccagtgctttgccatggtatcaccccacaaaagagatatcaataccaggacaggttcgaaacctagttg

SEQ ID NO: 149520 - DNA, 80 bp, synthetic construct
  source 1..80: mol_type = other DNA
catttgcatatacttcctcgttttacataagtggtataacaagcaattatctataactacagactatcctaaaaaactat

SEQ ID NO: 149521 - DNA, 80 bp, synthetic construct
  source 1..80: mol_type = other DNA
aacagattttacacattggacagtgttatctggcagcccgagtctctaggttggtggtggaaaattccagattgtcttaa

SEQ ID NO: 149522 - DNA, 80 bp, synthetic construct
  source 1..80: mol_type = other DNA
tcgctacttcggagacgagctccgtgtcctctatgccccccctcgagggggagccggtggacccagacctggagtccgga

SEQ ID NO: 149523 - DNA, 80 bp, synthetic construct
  source 1..80: mol_type = other DNA
cggctgcatgcatctttggtgtctacatcagcctccatgatgcctgcataccggtggttggcaagataggtaccaacgtt

SEQ ID NO: 149524 - DNA, 80 bp, synthetic construct
  source 1..80: mol_type = other DNA
ttaaacaaaagaagagatgtgaaccagtagctgttgtcattcatggtgaaccaggaacggggaaatcaatgacaactaac

SEQ ID NO: 149525 - DNA, 80 bp, synthetic construct
  source 1..80: mol_type = other DNA
ttatgatcagtgctttgtttgtgacctttcatgatttgtttaaacaaattttcttaaaatttctgaggtttgtacctgct

SEQ ID NO: 149526 - DNA, 80 bp, synthetic construct
  source 1..80: mol_type = other DNA
ttatatcaaaacacgcacgaacatcaaaacattttggccaagtgatcaatttgtacacacacaatatgccaagtacacca

SEQ ID NO: 149527 - DNA, 80 bp, synthetic construct
  source 1..80: mol_type = other DNA
cttggtcacggctataaaaaagatgacgtgtatcaataaattcttttgaaacggttcgagtcggatggcttttgcgtcgc

SEQ ID NO: 149528 - DNA, 80 bp, synthetic construct
  source 1..80: mol_type = other DNA
tgttaaaacaaaactataacatggtaataggagttttatcaaactatactgaaagtgcaggcaataacaaacaatatact

SEQ ID NO: 149529 - DNA, 80 bp, synthetic construct
  source 1..80: mol_type = other DNA
cgctttcgggctcggaaaccacgccgttcaaacacgtggctttgtgcagcgtgggtcggcgtcgcggtacgttggccgtg

SEQ ID NO: 149530 - DNA, 80 bp, synthetic construct
  source 1..80: mol_type = other DNA
atggaaaaacaacagttacatcagggccttcctaccaggctaccaagtggttctcaacaatttatgaccacagaagatga

SEQ ID NO: 149531 - DNA, 80 bp, synthetic construct
  source 1..80: mol_type = other DNA
tacacatacccccagctagtaaaacacaacaacgacaacttcgggtttgtagtgtacagtgacaactttggacgcggacg

SEQ ID NO: 149532 - DNA, 80 bp, synthetic construct
  source 1..80: mol_type = other DNA
taccagaaaaagacggtactagacaagccattagaaagcacttgcaccctacgtcactaacaggctcacctccaaatgcc

SEQ ID NO: 149533 - DNA, 80 bp, synthetic construct
  source 1..80: mol_type = other DNA
ggtcacagtctccgatacacaacctagcgggcctagtaattcggtcagcataccaatgctaacagcagccgagacggggc

SEQ ID NO: 149534 - DNA, 80 bp, synthetic construct
  source 1..80: mol_type = other DNA
gggctccgccccctaacaccccctaataaatattcaacaggaaaaccacataattagaattgccgaccacaaaccgtcac

SEQ ID NO: 149535 - DNA, 80 bp, synthetic construct
  source 1..80: mol_type = other DNA
cgtacacttcctgggcatggtctacgtgataatataaagcggtgcacttccgaatggctgagttttccacgctcgtccgc

SEQ ID NO: 149536 - DNA, 80 bp, synthetic construct
  source 1..80: mol_type = other DNA
caggttgtgcaggaactagcatatttaatactatgattaataatgtgattattaggaccttagtactggacacttataaa

SEQ ID NO: 149537 - DNA, 80 bp, synthetic construct
  source 1..80: mol_type = other DNA
taccaatggtcacattcctcaaagatgaacttagaaagaaagagaaaatatccacaggcaaaacaagggtcattgaggct

SEQ ID NO: 149538 - DNA, 80 bp, synthetic construct
  source 1..80: mol_type = other DNA
tccctgtcttctcgctccaaagagagacgcccaagaaacccatccacagcatttgaaacggccgcctggtccagcattgc

SEQ ID NO: 149539 - DNA, 80 bp, synthetic construct
  source 1..80: mol_type = other DNA
ctgccccgtacaaactagacaaatacagctctccaagctaccaccccggcaacatgataatgcagaaaaagaaaatcctc

SEQ ID NO: 149540 - DNA, 80 bp, synthetic construct
  source 1..80: mol_type = other DNA
tgcttctatgatggttactcacatgacaatgaggacacgcagtatggtattaatgtcttgaatcacatgggaagcattgc

SEQ ID NO: 149541 - DNA, 80 bp, synthetic construct
  source 1..80: mol_type = other DNA
acaccatacatccagtgtggttacgagcaagcacttctgtctccccggttgcgccctatatgctgtgtgaacggcaaaaa

SEQ ID NO: 149542 - DNA, 80 bp, synthetic construct
  source 1..80: mol_type = other DNA
actaatagcaaggcaaatagtaaacacatgcaaccaatgtcagcagaaaggggaagctatacatgggcaagtgaatgcag

SEQ ID NO: 149543 - DNA, 80 bp, synthetic construct
  source 1..80: mol_type = other DNA
caaagattgccataaaccaacaaatttcaaacgttgctgtcctttaatttgtggcaaggcattgagcttggttgataggc

SEQ ID NO: 149544 - DNA, 80 bp, synthetic construct
  source 1..80: mol_type = other DNA
gttgcaaccaggccatgacagcgtgttgaaacgcactcttctcggtgagatcttaaactattacgccaattggtcaggga

SEQ ID NO: 149545 - DNA, 80 bp, synthetic construct
  source 1..80: mol_type = other DNA
ctgataccgtcccacaatgtgactgtatggaagggtgttactattgccacagtcaggatcgctactttcctgtaaaagtt

SEQ ID NO: 149546 - DNA, 80 bp, synthetic construct
  source 1..80: mol_type = other DNA
agactaagagcatggatgcatatcaaatacccgtgggcactggcaatactgacaagaccaaacccatatttagctttcag

SEQ ID NO: 149547 - DNA, 80 bp, synthetic construct
  source 1..80: mol_type = other DNA
cagaatatactatcttggctactgcatcacaaccagataactcaaagtattccagcaacttgactgtacaggctatgtat

SEQ ID NO: 149548 - DNA, 80 bp, synthetic construct
  source 1..80: mol_type = other DNA
ctcgacgccttagtggatgggatggtcaacatgtccctggacacagtccagaacacgatggccagtgggtctgtacactc

SEQ ID NO: 149549 - DNA, 80 bp, synthetic construct
  source 1..80: mol_type = other DNA
aataaggcgtggctcacagtggtctcagctgtcactagtgcaatcagcatattacttttggtgacaaaaatttttaagaa

SEQ ID NO: 149550 - DNA, 80 bp, synthetic construct
  source 1..80: mol_type = other DNA
gtggccaagtccagtcccagagcttgagcgtcggcgcggcgtcgggcgtcttgcaggtagtcttccacatttgcacagat

SEQ ID NO: 149551 - DNA, 80 bp, synthetic construct
  source 1..80: mol_type = other DNA
aaccagatcaggcccagtatgctagcaatctaatagtgcaggcaatgtatgttccaccaggtgcaccaaatcccattgag

SEQ ID NO: 149552 - DNA, 80 bp, synthetic construct
  source 1..80: mol_type = other DNA
tcacagtaactgtagcgcccatgtatgccgagtataatgggctcagattagcctcgcatcaaggattacccacgatgctc

SEQ ID NO: 149553 - DNA, 80 bp, synthetic construct
  source 1..80: mol_type = other DNA
aggaaatgtgaacttcaacccaacagacatcactacaacaaggaaagatttgaacgacgttcccaccacctctcactcca

SEQ ID NO: 149554 - DNA, 80 bp, synthetic construct
  source 1..80: mol_type = other DNA
gatattgatgccgtaatctttatcacttgtactttagaaaacaaataatagtttctaaaaggaccgaagttaacaactcc

SEQ ID NO: 149555 - DNA, 80 bp, synthetic construct
  source 1..80: mol_type = other DNA
caaattttatccagttcagatcaaaacatcgcactgagccagtatgtgttttgatacatggtacacccggttctggtaaa

SEQ ID NO: 149556 - DNA, 80 bp, synthetic construct
  source 1..80: mol_type = other DNA
gatcaacgcgcccaaccgttactggacaagttcaaccaggacttgctgtcggcgctacagcagctgagcaaaaaactaga

SEQ ID NO: 149557 - DNA, 80 bp, synthetic construct
  source 1..80: mol_type = other DNA
acccgggagctccgccggccatcttgccggccctaccgcctcctgctaacccagacgaccagcagccaccacggcgtggt

SEQ ID NO: 149558 - DNA, 80 bp, synthetic construct
  source 1..80: mol_type = other DNA
gagagaaacttagaacggacacagtattatctaaattgcctaggtagtttgattattatattgggaacaattttagctat

SEQ ID NO: 149559 - DNA, 80 bp, synthetic construct
  source 1..80: mol_type = other DNA
aaaatcattgaagaaatgatcatgaaggaagctttatatgtaggctgggtaccagcccacaaaggaataggaggcaattt

SEQ ID NO: 149560 - DNA, 80 bp, synthetic construct
  source 1..80: mol_type = other DNA
caccatattccatgttgtacagacagtggatagatcaattcatctagataattcatatataatacaatgtttgtaggtag

SEQ ID NO: 149561 - DNA, 80 bp, synthetic construct
  source 1..80: mol_type = other DNA
aggtgacgttgcatatcaggcgcggcttccttccgaattttgtgcgcaaaagtttccagatgatgatgactgtgaggagg

SEQ ID NO: 149562 - DNA, 80 bp, synthetic construct
  source 1..80: mol_type = other DNA
tgcttgagaaacaaattgatggtttgagagcagctacagaaaaacaaagagaagattacacagagacaatttccaggtta

SEQ ID NO: 149563 - DNA, 80 bp, synthetic construct
  source 1..80: mol_type = other DNA
tcatactcggccgcgggaggtgggacgatgaagatgcgcagaggcgttacggcgtcccaagggtccgccgccgcccccac

SEQ ID NO: 149564 - DNA, 80 bp, synthetic construct
  source 1..80: mol_type = other DNA
cctgcttctgaacacggcaaaatgggagcacaggtgtcaacaacaaaaactgggtctcatgaaaatgggaatatcgcaac

SEQ ID NO: 149565 - DNA, 80 bp, synthetic construct
  source 1..80: mol_type = other DNA
acaagtatggtatagatcttccatatgtcacttatctaaaagatgaattgagagcccctgaaaagatcaaaatggggaaa

SEQ ID NO: 149566 - DNA, 80 bp, synthetic construct
  source 1..80: mol_type = other DNA
tccttaaagataagtactacccagttataggcattttaactaactataataatcagacagcaggcaatgataaaaaatac

SEQ ID NO: 149567 - DNA, 80 bp, synthetic construct
  source 1..80: mol_type = other DNA
ttgggaggaacctagttctgccaccctacagttatttggagcaacaatggctagataaattcatataaacaatatatagt

SEQ ID NO: 149568 - DNA, 80 bp, synthetic construct
  source 1..80: mol_type = other DNA
tatataagacgtagaaggcgccgcaaaaagaaaattaacatacaacagtggaaccccgccactgtaaagaaatgcgtggt

SEQ ID NO: 149569 - DNA, 80 bp, synthetic construct
  source 1..80: mol_type = other DNA
tacccatataaactggatatgtctgaattagctagtgaaggaaagaaatatggtcttaaaattaccccagcagataagtc

SEQ ID NO: 149570 - DNA, 80 bp, synthetic construct
  source 1..80: mol_type = other DNA
cgctgccatggcatggagatggtggaaacgaaggcgccgctggtggtggagacgccgcttcgccggagggaggtttcgaa

SEQ ID NO: 149571 - DNA, 80 bp, synthetic construct
  source 1..80: mol_type = other DNA
tgatttaaaaagctttagtgtaaatgcaaaatacaagttcaaattcttatggggcggtaatatgattcctgaacaggtca

SEQ ID NO: 149572 - DNA, 80 bp, synthetic construct
  source 1..80: mol_type = other DNA
acctgccggtagagagagagacatgggatcagtggtggacagactactggcaagtaacttggatcccagaatgggatttt

SEQ ID NO: 149573 - DNA, 80 bp, synthetic construct
  source 1..80: mol_type = other DNA
cagtgacacctcacagacgctaacaccccaaattacagatacagagtttagaaaaaaagttaacaccaactacaactggt

SEQ ID NO: 149574 - DNA, 80 bp, synthetic construct
  source 1..80: mol_type = other DNA
ggcagaaaatataaaagagttaaaatacaccccccaaagatgtttgaagacaagtggtactcgcaacaggacctgtgtcc

SEQ ID NO: 149575 - DNA, 80 bp, synthetic construct
  source 1..80: mol_type = other DNA
caatcactagcacaatacgtgtttatttcaagcctaaacacgtaagggtatggatcccgcgagcacctaggctatgtccc

SEQ ID NO: 149576 - DNA, 80 bp, synthetic construct
  source 1..80: mol_type = other DNA
tgcctcttcgagcaactaaccaaaacccagcagggagtccaaataaacccttcccttgtgtaggcccaaaagcatacatg

SEQ ID NO: 149577 - DNA, 80 bp, synthetic construct
  source 1..80: mol_type = other DNA
gctgctgctgcagtcggggaaggggatggggtggtcagagggatttttgggttcgagagagctgcctgtggcagagtgat

SEQ ID NO: 149578 - DNA, 80 bp, synthetic construct
  source 1..80: mol_type = other DNA
acatgaggtagctggactcagccaccttgtcgtccggcggcgagggcgcgacccacgcctcgaccggggtcctcacaaac

SEQ ID NO: 149579 - DNA, 80 bp, synthetic construct
  source 1..80: mol_type = other DNA
tgactttcaatcaccgtgtgcacttccaagctttgatgttactccagaaatccacattcctggtgaagtgaaaaacatca

SEQ ID NO: 149580 - DNA, 80 bp, synthetic construct
  source 1..80: mol_type = other DNA
taacaccaatgtcactgattcttatgatttatataataaagaaggaatcaaacttgagatcaccgttgttaaattagata

SEQ ID NO: 149581 - DNA, 80 bp, synthetic construct
  source 1..80: mol_type = other DNA
aatcttgaagataagggtagagcattcaccagtgattatgtcatagccagtacaaatatgtctgttctcacaccacctac

SEQ ID NO: 149582 - DNA, 80 bp, synthetic construct
  source 1..80: mol_type = other DNA
acaatcctttcttagacaaggcccagggcaacatggtgtggtttcaataccacacaaaaacagacaacaagtttaagaaa

SEQ ID NO: 149583 - DNA, 80 bp, synthetic construct
  source 1..80: mol_type = other DNA
ttcaagaggggtctccggagatttccggagcccctcttggaagtccatggtgaggggacttgatacctcaccgccgtttg

SEQ ID NO: 149584 - DNA, 80 bp, synthetic construct
  source 1..80: mol_type = other DNA
ctgtatacaatgcagtagattaccatgtaggtaaatacagcatgatatttttaagcccatacagaaccaacctacaattt

SEQ ID NO: 149585 - DNA, 80 bp, synthetic construct
  source 1..80: mol_type = other DNA
gctgctacacagacatcagttacaatcccctaacagacaaaggcataggtaacatgatatggctagatgtaataactaaa

SEQ ID NO: 149586 - DNA, 80 bp, synthetic construct
  source 1..80: mol_type = other DNA
aaatatgataaggcaagattggccaagaaatttttaaccatgtctaccaagtacaagtggacgaggaacaaagtagacat

SEQ ID NO: 149587 - DNA, 80 bp, synthetic construct
  source 1..80: mol_type = other DNA
ctcaggagaaactaatcctttaacagcatggacacaatcagactttacaaagtttaaaaaacaaacagacagcaactacg

SEQ ID NO: 149588 - DNA, 80 bp, synthetic construct
  source 1..80: mol_type = other DNA
gaggtggatgggctggcgcgcggccaggtagcgcgagagctgcagcgtttcgttgttcacggcgaagacgggcgccaccc

SEQ ID NO: 149589 - DNA, 80 bp, synthetic construct
  source 1..80: mol_type = other DNA
gtacaaaccagacatgttattcagactaggtctcgatcagagtcaacgatcgagtcctttttcgcccgtggagcttgtgt

SEQ ID NO: 149590 - DNA, 80 bp, synthetic construct
  source 1..80: mol_type = other DNA
gggaatgaaccccacattagaagaaatgctaacagcctgccaggggataggaggcccagggcagaaggcaaggctaatgg

SEQ ID NO: 149591 - DNA, 80 bp, synthetic construct
  source 1..80: mol_type = other DNA
ctacattccaagttctgcaattcaattacaacagtgtaataggttacccaaaccaaacgaacaccagtgaacaacaaact

SEQ ID NO: 149592 - DNA, 80 bp, synthetic construct
  source 1..80: mol_type = other DNA
ggttaagaaagagtatcttatggatggtaaattagatatagccaagagttttagaccatgtgatgttgacactaaaatag

SEQ ID NO: 149593 - DNA, 80 bp, synthetic construct
  source 1..80: mol_type = other DNA
gacacaaacacaatttctcaaacagaagcactcacagaaggattgggcagtgaattagaagaagtcattgttgagaaaac

SEQ ID NO: 149594 - DNA, 80 bp, synthetic construct
  source 1..80: mol_type = other DNA
tttacttcaaacccaaacatgtgaaggcatgggtacccagaccaccgcgcctgtgcgactacgtttacgcacataatgtt

SEQ ID NO: 149595 - DNA, 80 bp, synthetic construct
  source 1..80: mol_type = other DNA
tccatctgatgataggttggaagtagattttgaagaagccctattctccaaatacaaaggaaatgtaaaaatagaaatga

SEQ ID NO: 149596 - DNA, 80 bp, synthetic construct
  source 1..80: mol_type = other DNA
ggacattactggtagtgatgatacctgaacatcaactagcaagtgtaggtactgacaaggttggacctggatacgccttc

SEQ ID NO: 149597 - DNA, 80 bp, synthetic construct
  source 1..80: mol_type = other DNA
gagcagtctctcccgggcttaccacccccactgtggcggacgtagtctccaacaattttgtattggaggagcacctggta

SEQ ID NO: 149598 - DNA, 80 bp, synthetic construct
  source 1..80: mol_type = other DNA
ctcgggcggagcgaccgccgctgagagcgctccttcctctgcccgcgatccccggtgagggtcgagagaaccgaccatgg

SEQ ID NO: 149599 - DNA, 80 bp, synthetic construct
  source 1..80: mol_type = other DNA
cgccggacagcaggcgcgtcacgtagagcccaccaagatcgtcctctttgcactcagcgccgcgctgcgcggcggcctca

SEQ ID NO: 149600 - DNA, 80 bp, synthetic construct
  source 1..80: mol_type = other DNA
ccatccagatcacccaagcggtgtagtgctctgttattccggtaactttgcacgccagttttattacccctttccccagt

SEQ ID NO: 149601 - DNA, 80 bp, synthetic construct
  source 1..80: mol_type = other DNA
gaagggaagttcaatattgcagttggcgggatagaatctctcctcacagacgaggatgatgacatcacaaactcaagata

SEQ ID NO: 149602 - DNA, 80 bp, synthetic construct
  source 1..80: mol_type = other DNA
cgttgacactcttcaggtagccagcatccagtcctgactcatgtttcctccctcgcttcttcaggcggcgcatgttctcc

SEQ ID NO: 149603 - DNA, 80 bp, synthetic construct
  source 1..80: mol_type = other DNA
gacaggtaataaatctgtagctccccaaccagccctccttcatcgtaaaatcgaagggcggccacgtggaaggggttgta

SEQ ID NO: 149604 - DNA, 80 bp, synthetic construct
  source 1..80: mol_type = other DNA
aaaagtatcaactgaaggcatcagcaagctacatcactctgtatttgcacacaacgtaggcatatttagtagtagctact

SEQ ID NO: 149605 - DNA, 80 bp, synthetic construct
  source 1..80: mol_type = other DNA
cttttaccctaatttaagcatactaccagacaaaataaatgaataccaagctcaattttataacacagcacacccagtat

SEQ ID NO: 149606 - DNA, 80 bp, synthetic construct
  source 1..80: mol_type = other DNA
gccaagttcacaccactaaaccttcagccttaaacgcaatggaagtgggagtcactccagatgtgcgacctgaaaacttg

SEQ ID NO: 149607 - DNA, 80 bp, synthetic construct
  source 1..80: mol_type = other DNA
acagaaaaaaaataataatgaaacagtggcaaccaaactttataagacactgctttatagtgggctttatgccacttata

SEQ ID NO: 149608 - DNA, 80 bp, synthetic construct
  source 1..80: mol_type = other DNA
cttatggaaacttattctctaaatttcacttgaatccaggggttgttacaggttgtgcagtaggttgtgatccagaaacc

SEQ ID NO: 149609 - DNA, 80 bp, synthetic construct
  source 1..80: mol_type = other DNA
caagccatggatgagagcgcatcccgtcgccgttccttatgacgatccattaacaagtgaggagactgacctggcctatg

SEQ ID NO: 149610 - DNA, 80 bp, synthetic construct
  source 1..80: mol_type = other DNA
taccagtagtaccgttgggcacgcgtacggtatcgagcatggttccaataacagtttcaattgctccaatgtgttgtgaa

SEQ ID NO: 149611 - DNA, 80 bp, synthetic construct
  source 1..80: mol_type = other DNA
ataaaaccctcagctcaacaaacaggatttagtcctcaatggtcctcaatagtaaacaatacacaattatcagcagatgg

SEQ ID NO: 149612 - DNA, 80 bp, synthetic construct
  source 1..80: mol_type = other DNA
gtcctttggcgcggatcctcgcaggccgccagcagcttcttgatggccttgcgcttggccagccaggaggtcaacagact

SEQ ID NO: 149613 - DNA, 80 bp, synthetic construct
  source 1..80: mol_type = other DNA
ttgaatatggcatcaatcaatacaccaaccaaaagtaaattacaccccagtgttttttataatgttttcccaggtagtaa

SEQ ID NO: 149614 - DNA, 80 bp, synthetic construct
  source 1..80: mol_type = other DNA
cagaactaacagggcccagcatacacccaggcatgatgattcttaataagaaaaaaatattcgtgcccagtcttaaagcc

SEQ ID NO: 149615 - DNA, 80 bp, synthetic construct
  source 1..80: mol_type = other DNA
tgacatctgcaagactggacctttcagctacagagacgaactgcttcaggtggacttgacagcctcttacacattcagat

SEQ ID NO: 149616 - DNA, 80 bp, synthetic construct
  source 1..80: mol_type = other DNA
ttacactaacgaaaatgatagggaaacattattcaacaatgtattatggttggaacaaatgtctcagaagtttgcaccac

SEQ ID NO: 149617 - DNA, 80 bp, synthetic construct
  source 1..80: mol_type = other DNA
aaacaaatggagctatcccaacactgacctagacctagccagatacaggggagccacatttacattttacagagacccaa

SEQ ID NO: 149618 - DNA, 80 bp, synthetic construct
  source 1..80: mol_type = other DNA
tgtgccaacttgatgtcgcctctatcggcgatatggcctcatatcgtctgtcacctatatcgaaactgcgatatttgcga

SEQ ID NO: 149619 - DNA, 80 bp, synthetic construct
  source 1..80: mol_type = other DNA
aggacaaatttcaggaatgtcaccaacttggagtaacgttcaaaacactaacaccctcaatgaatcaggtactaatgcaa

SEQ ID NO: 149620 - DNA, 80 bp, synthetic construct
  source 1..80: mol_type = other DNA
gctcaattttgatggaacattattaggaaacataacaatatacccccaccaactcatcaatttgaggagcaataactctg

SEQ ID NO: 149621 - DNA, 80 bp, synthetic construct
  source 1..80: mol_type = other DNA
tagctgacagtcactgcttagaggattttgagacagtgaatcaagaagagcttgatgcaatcaaaaaatctaaatgttgg

SEQ ID NO: 149622 - DNA, 80 bp, synthetic construct
  source 1..80: mol_type = other DNA
ttggggttcccatatatagtataaacataacaaagaaatcatcaaaagaacaacaggatttaatattggctctacccctg

SEQ ID NO: 149623 - DNA, 80 bp, synthetic construct
  source 1..80: mol_type = other DNA
gggagagaaccatgttgcatttatagacttgaggaactacagctcactcagtgaacatcaaggtattacagattatgtca

SEQ ID NO: 149624 - DNA, 80 bp, synthetic construct
  source 1..80: mol_type = other DNA
aacacgtagttgaccccaaatttgacactatgaaacaaccaaaccctacaggaactgcacagaataaatacctaacagtc

SEQ ID NO: 149625 - DNA, 80 bp, synthetic construct
  source 1..80: mol_type = other DNA
caagacgatggaggagatggcgccgcagaagaattccaacaaggagacgtcgaagagctattggatatgctcgaagacgc

SEQ ID NO: 149626 - DNA, 80 bp, synthetic construct
  source 1..80: mol_type = other DNA
cccggcacacaatgttgccggtcaggagagacagttctttgaggcttgtctccgagcccacgcttctttttgtggctgtg

SEQ ID NO: 149627 - DNA, 80 bp, synthetic construct
  source 1..80: mol_type = other DNA
cctaccacaacaaaaccaacaatagactactatgaataccacgcaggctggttcagtaacatcttcataggccccaacag

SEQ ID NO: 149628 - DNA, 80 bp, synthetic construct
  source 1..80: mol_type = other DNA
aaacacgcattgtggtgcctgccagtactccaacaaacatgtcaatgcttgcatttgtgagcgcctgtccagatttcagc

SEQ ID NO: 149629 - DNA, 80 bp, synthetic construct
  source 1..80: mol_type = other DNA
tgttgacttgcgcacacaagttgatctagctaaagaagtattctccataccagtagatattgcctcacaacccttagcca

SEQ ID NO: 149630 - DNA, 80 bp, synthetic construct
  source 1..80: mol_type = other DNA
aacacgagcctactgtagccaatacggtagcgagcgggccttcaaactcgcagcaagtaccagcactgacagcagtggag

SEQ ID NO: 149631 - DNA, 80 bp, synthetic construct
  source 1..80: mol_type = other DNA
actggagctatgaatcagtaacgaaagtgagtggggccagacttcgccataaggcctttatcttcttgccatttgtccgt

SEQ ID NO: 149632 - DNA, 80 bp, synthetic construct
  source 1..80: mol_type = other DNA
tggtgctcgttgagcctctttttttttcctgattctctgaagaatcaccgtcacagccctatgacgcgaaatcaattgct

SEQ ID NO: 149633 - DNA, 80 bp, synthetic construct
  source 1..80: mol_type = other DNA
ggtagaaacagccggcggcaggccgcatcgtcgtcgtcctcctcctctcggagatcgcgacggagaaacaaccgccacga

SEQ ID NO: 149634 - DNA, 80 bp, synthetic construct
  source 1..80: mol_type = other DNA
ggactcttaaatactgccaaagcactacagaagtgtgatggatgtccaacccctccttattataaatcctgttgccccat

SEQ ID NO: 149635 - DNA, 80 bp, synthetic construct
  source 1..80: mol_type = other DNA
gaaaagatgggttttctgcaatgttattacgctcatatttcaacaaccaccaaggacagattgtaaataagaccactaca

SEQ ID NO: 149636 - DNA, 80 bp, synthetic construct
  source 1..80: mol_type = other DNA
atgtggagttaccaaaagctttttgggataagaattcaaagccagcttatggacaatcaagatatttcgcagctgttaga

SEQ ID NO: 149637 - DNA, 80 bp, synthetic construct
  source 1..80: mol_type = other DNA
cattaattcaaccatcggtccatacaccagtgcagtgagaatgtattttaaacccaaacatgtaaaggcatgggtggcaa

SEQ ID NO: 149638 - DNA, 80 bp, synthetic construct
  source 1..80: mol_type = other DNA
ccggcaactctgagacacaaactacgaactagaaacaacgtaaatcgcatagcgtgattacaaagtatcgacgctaattt

SEQ ID NO: 149639 - DNA, 80 bp, synthetic construct
  source 1..80: mol_type = other DNA
gatctcttcgccacatggaaaatatcttaccactacgcatatcagttgcgtaggaaattggaaatgttcacctattctag

SEQ ID NO: 149640 - DNA, 80 bp, synthetic construct
  source 1..80: mol_type = other DNA
ccccaggatttatagtagacttactttcatcttcccgagatccccgggttattgagtactgtgagaaagagggactaatt

SEQ ID NO: 149641 - DNA, 80 bp, synthetic construct
  source 1..80: mol_type = other DNA
tggtcaagagtgccccagcattgaactcacccaacattgaagcctgcgggtatagtgacagggtattacagctaacactg

SEQ ID NO: 149642 - DNA, 80 bp, synthetic construct
  source 1..80: mol_type = other DNA
gttacccaattataacaaaactgttgtagggtaacgaagacctgatggaagtggtattgttgccgttgaaagacgggtgt

SEQ ID NO: 149643 - DNA, 80 bp, synthetic construct
  source 1..80: mol_type = other DNA
acgacaagaagatgaggaccacgaaccccagagagacaccgattgagatagacacaacgggcagcaccaagccgaagaag

SEQ ID NO: 149644 - DNA, 80 bp, synthetic construct
  source 1..80: mol_type = other DNA
gagtgttggctacagacatacacacccaggagaaaatggacgaacacttaatggctcaagggtagatggcaattcaaagc

SEQ ID NO: 149645 - DNA, 80 bp, synthetic construct
  source 1..80: mol_type = other DNA
tgggcaccctgtgtttcagagcacttgaggatgaacagaataatgatgtcaaaatttttgtaaaacctaagcatactaga

SEQ ID NO: 149646 - DNA, 80 bp, synthetic construct
  source 1..80: mol_type = other DNA
acacagctaaatagagcacaggccaaatgtctcatagaagacctgcccctgtactgtgccttctttggctacgaagacta

SEQ ID NO: 149647 - DNA, 80 bp, synthetic construct
  source 1..80: mol_type = other DNA
atatagtgtccgtaatggatggtggcgtgggtctgtttgacagacataaactcatcgatgagtgcccgggaggaggctga

SEQ ID NO: 149648 - DNA, 80 bp, synthetic construct
  source 1..80: mol_type = other DNA
gctcctttctattcacataggccactacgcacagtaaggagtatttcagccttgggatcactactctgcaaaccactttt

SEQ ID NO: 149649 - DNA, 80 bp, synthetic construct
  source 1..80: mol_type = other DNA
gaaacatccactgacaactttgcagtgtggaccataaacgttagggagatggcacagttaagaaggaagtgcgaaatgtt

SEQ ID NO: 149650 - DNA, 80 bp, synthetic construct
  source 1..80: mol_type = other DNA
ttcggcgcgacaccgacaccgaactggacacggtgcttctgatgcattttttttacacacactaccgttcggttaacggc

SEQ ID NO: 149651 - DNA, 80 bp, synthetic construct
  source 1..80: mol_type = other DNA
caggacaaagcggcgcgtggcatccacgttggcctcaaagatccgacacccgtgcttgtcttgcagccacgtggccacgt

SEQ ID NO: 149652 - DNA, 80 bp, synthetic construct
  source 1..80: mol_type = other DNA
accgatttacaagtgcttagcaaatttaagacaccaaatggtttgctagatgtggctaaggcattacaaccttgtacaaa

SEQ ID NO: 149653 - DNA, 80 bp, synthetic construct
  source 1..80: mol_type = other DNA
ttcaggtggatcctggacgcaatggtccatggcaatcaacaatggtcgggcaaatttgtagatattacacccagtggtct

SEQ ID NO: 149654 - DNA, 80 bp, synthetic construct
  source 1..80: mol_type = other DNA
gattgagcgtgatttcaactacgcacagtactgtatcaactgtgtgggtagtatagtgttgattctaggaactgtttatg

SEQ ID NO: 149655 - DNA, 80 bp, synthetic construct
  source 1..80: mol_type = other DNA
ggacagagaaggtctcttctgaagataaagatgatcaaaattataattataagcatgagagcaaaggaatagaggacaag

SEQ ID NO: 149656 - DNA, 80 bp, synthetic construct
  source 1..80: mol_type = other DNA
cccccccccccgaagtccgtcactaaaccacgtgactcctctcgtccaatcaggtgctatgtcgtccacttcctgggcca

SEQ ID NO: 149657 - DNA, 80 bp, synthetic construct
  source 1..80: mol_type = other DNA
ggcccagctgcatcgcgaccgcgcccgcgtcatgatggcgcttcgcttgcccgagcagacggtgtgccacctgagcacct

SEQ ID NO: 149658 - DNA, 80 bp, synthetic construct
  source 1..80: mol_type = other DNA
ccaacacactcagacccaggctctgaagtgatgatagatggtgtgaaaataaaggttctggattcttatgatttgcataa

SEQ ID NO: 149659 - DNA, 80 bp, synthetic construct
  source 1..80: mol_type = other DNA
tattcagtacaacatactaattggggaaggtccctgtgagccaggggattgtggaggcaaattactgtgtagacatggtg

SEQ ID NO: 149660 - DNA, 80 bp, synthetic construct
  source 1..80: mol_type = other DNA
gtgtttgcacggagtttctgcggcgtttccacgcagcttttgcgcggcgcctcgcttttcgggcgtgctgggcgccggcg

SEQ ID NO: 149661 - DNA, 80 bp, synthetic construct
  source 1..80: mol_type = other DNA
tagccctatatttctttcgcctcacagaactaacttacaatttccaacagcataccaagatgttacatacaatccactaa

SEQ ID NO: 149662 - DNA, 80 bp, synthetic construct
  source 1..80: mol_type = other DNA
agtttccactggaagtcataccaccaccaaagcaatatttagcttccaacttgacccaggtaactcatctgtcatgtcgc

SEQ ID NO: 149663 - DNA, 80 bp, synthetic construct
  source 1..80: mol_type = other DNA
caggcccagcggaaaacacagagtggtcgtcagggtgggcatggtctacaacataatataagaaactgcacttccgaatg

SEQ ID NO: 149664 - DNA, 80 bp, synthetic construct
  source 1..80: mol_type = other DNA
aaactcagttaaaaagttttacattaacaataatgacactgaaatatgtgacaaacaaaagttacaaggaacaggcacag

SEQ ID NO: 149665 - DNA, 80 bp, synthetic construct
  source 1..80: mol_type = other DNA
gctaaagaaggagagaaatatggactgacaatcacccctgctgacaaatctaacacttttcaggaattgacttataagaa

SEQ ID NO: 149666 - DNA, 80 bp, synthetic construct
  source 1..80: mol_type = other DNA
ggttggaacagaacgagaagttcagggacatcagaagattcatccccgaatacatccaggaatgggatcacatgaaactg

SEQ ID NO: 149667 - DNA, 80 bp, synthetic construct
  source 1..80: mol_type = other DNA
ggcgctacctctaatgcaactgatgagagcatgatcgagacacgatgcgtagtcaataagcatggggtaagtgagactag

SEQ ID NO: 149668 - DNA, 80 bp, synthetic construct
  source 1..80: mol_type = other DNA
tgttgactcaccaactcatgtacgtaccacccggtggccctgttccaaagaactcgcgcgattatgcctggcagacatcc

SEQ ID NO: 149669 - DNA, 80 bp, synthetic construct
  source 1..80: mol_type = other DNA
ggctacacatcaggcacaactacaacaacatggggctcactactaaacacaaccaaattcacaactgcaactaccaccac

SEQ ID NO: 149670 - DNA, 80 bp, synthetic construct
  source 1..80: mol_type = other DNA
ctgtagacagggcgcgggctcgtgcagcaccgggtggcacagcgtcttgagcgcgtccacaaagtctatcttttgtacgg

SEQ ID NO: 149671 - DNA, 80 bp, synthetic construct
  source 1..80: mol_type = other DNA
gagcattgcaagatgggagatccaagagagagaatcccaccaggaaattcagaagaagaaactgtaggagaggctttcag

SEQ ID NO: 149672 - DNA, 80 bp, synthetic construct
  source 1..80: mol_type = other DNA
tcaatgccattgtaggcaataggacaaacattaccactatgcccaatgatatagttacagcgggaccaggttttgggggg

SEQ ID NO: 149673 - DNA, 80 bp, synthetic construct
  source 1..80: mol_type = other DNA
cttcgccgagatataaagcggtgcacttccgaatggctgagttttccacgcccgtccgcagcggtgaagccacggaggga

SEQ ID NO: 149674 - DNA, 80 bp, synthetic construct
  source 1..80: mol_type = other DNA
ataacggcccggcggcggcgcgcgcgctgccgccgggccgttgttttacaaaatggcgcacttccttccgcttttttaaa

SEQ ID NO: 149675 - DNA, 80 bp, synthetic construct
  source 1..80: mol_type = other DNA
gaaagtggttttttagtcaaaccactacagtaaatgaaatacatggcacatatggaaaaccaacatatgatggagtagac

SEQ ID NO: 149676 - DNA, 80 bp, synthetic construct
  source 1..80: mol_type = other DNA
tgacttagccatgagcggaccatttagctacaaagacgactggaaaaacacctccatccagtgtaaatacaaatttaact

SEQ ID NO: 149677 - DNA, 80 bp, synthetic construct
  source 1..80: mol_type = other DNA
ggtaaggtcgatcatgggcggcgtggtgaccgtggcggtggcaggcatgacggggtttgcggcgacgggcactccggcca

SEQ ID NO: 149678 - DNA, 80 bp, synthetic construct
  source 1..80: mol_type = other DNA
atcactatcgggaattcaacaattacaacacaagacaccctacagacagtccttgcatatggtgaatggcctgaatatct

SEQ ID NO: 149679 - DNA, 80 bp, synthetic construct
  source 1..80: mol_type = other DNA
caccccccccgaagtccgtcactgaccacgtgactcccgcaggccaatgaatgtctacgtcgtgcacttcctgggcatgg

SEQ ID NO: 149680 - DNA, 80 bp, synthetic construct
  source 1..80: mol_type = other DNA
tatgggacttagggctgcagtcatcttgctccattgtagttccatggatgtctgctgggtttttcagacacacaaaaaca

SEQ ID NO: 149681 - DNA, 80 bp, synthetic construct
  source 1..80: mol_type = other DNA
tgtgtgtgagatgtccttacacagaccccatgctcatagacagaaacaatgacttacaggggttcgtgccttactctaaa

SEQ ID NO: 149682 - DNA, 80 bp, synthetic construct
  source 1..80: mol_type = other DNA
caggtattataaacttgagtaacactcccacagccaggatgattcgttacgagtttccaacaaaaacagggcaatgtgga

SEQ ID NO: 149683 - DNA, 80 bp, synthetic construct
  source 1..80: mol_type = other DNA
ggccgaagataagcagcatgggtgtgtcgtcgtctatggacaccgtaactacgaagaagtcctcggtcagtgtgatttta

SEQ ID NO: 149684 - DNA, 80 bp, synthetic construct
  source 1..80: mol_type = other DNA
aatggggcgagatgctaggttcttctgtccaaccggctctgtagtaactttccaaaattcatggggttcacaaatggatt

SEQ ID NO: 149685 - DNA, 80 bp, synthetic construct
  source 1..80: mol_type = other DNA
tacggagggggcatgacagtgactaaatttaacctaagaatactgtacgacgagtttcagagaggactgaatttctggac

SEQ ID NO: 149686 - DNA, 80 bp, synthetic construct
  source 1..80: mol_type = other DNA
gggcagtatcattttgatattgggcacagtctatgctctatacaaattgatgtgtattgcacagggaccttacactggat

SEQ ID NO: 149687 - DNA, 80 bp, synthetic construct
  source 1..80: mol_type = other DNA
aaagaatagcttctgcagaaggccattgacgcaagttttgcccgtggggattacccgacccggccacttacagcacattt

SEQ ID NO: 149688 - DNA, 80 bp, synthetic construct
  source 1..80: mol_type = other DNA
acaaggaactgatactatcgcacgctgtcactgtaaatgtggtgtgtattactgtgaatcacagagaaaatattatccag

SEQ ID NO: 149689 - DNA, 80 bp, synthetic construct
  source 1..80: mol_type = other DNA
aacgggtcttaaaagaatgcgagaacaacaaccgtatgatgagattacttatgcaggccctaaaaggcccaaactcacag

SEQ ID NO: 149690 - DNA, 80 bp, synthetic construct
  source 1..80: mol_type = other DNA
accgaggcacggcccttgagcgcgcacagcaacatctttttcagaaaatcgtccgtgttcacgatcaccttggggcacga

SEQ ID NO: 149691 - DNA, 80 bp, synthetic construct
  source 1..80: mol_type = other DNA
tcccgctctgggcttccgaactcagtcggatgctgcccccgagggagatgctgtcaagccaggcatcacctccttcgagg

SEQ ID NO: 149692 - DNA, 80 bp, synthetic construct
  source 1..80: mol_type = other DNA
acccccagggattccagctcccagtgagaagaatagcagggagtgggatacagcttcaaaccccagtgtcctctttcagc

SEQ ID NO: 149693 - DNA, 80 bp, synthetic construct
  source 1..80: mol_type = other DNA
tttcagagttgtgaatgatcatgatgaacacacaactatagttaaaattagggtcttccacagagcaaagcatatcagag

SEQ ID NO: 149694 - DNA, 80 bp, synthetic construct
  source 1..80: mol_type = other DNA
ccgccgcctccggggctagaccaagctctcgggccccctaacccgggagctccgccggccatcttgccggccctaccgcc

SEQ ID NO: 149695 - DNA, 80 bp, synthetic construct
  source 1..80: mol_type = other DNA
atatcacacaggactatacagttccatatttttaagtccactaaggagcaacctagaattttctacagcataccaggatg

SEQ ID NO: 149696 - DNA, 80 bp, synthetic construct
  source 1..80: mol_type = other DNA
tccagtgatatgtgaaaagccaaccaccatatggatagaaggcagctcttactacccaagtagataccaagcgggtgtgc

SEQ ID NO: 149697 - DNA, 80 bp, synthetic construct
  source 1..80: mol_type = other DNA
gagacaaaaaataataataagacaatggcaaccagccattgtaagacgctgcagaatagtaggatacatggctgctctta

SEQ ID NO: 149698 - DNA, 80 bp, synthetic construct
  source 1..80: mol_type = other DNA
agccggcgcttcgccagacgttgctgcgcgccgaggaggcgacggcgctcggacgggagctgcgccggcggtgtgccggc

SEQ ID NO: 149699 - DNA, 80 bp, synthetic construct
  source 1..80: mol_type = other DNA
tacacatcttatgcaaatgccaaccccggagaggctggaggcacctttgtgtctacttacacaccagacaccagtactgc

SEQ ID NO: 149700 - DNA, 80 bp, synthetic construct
  source 1..80: mol_type = other DNA
ttcatccggaagatcaggagcgtccctgttgggcgttgcctggctctcccagcgttttccactctacgcaggaagtggtt

SEQ ID NO: 149701 - DNA, 80 bp, synthetic construct
  source 1..80: mol_type = other DNA
gaaagacaaacaagcccaataccagaggcagacacataccttaaaggactaggaaatggtaaactacaaacaggcaacaa

SEQ ID NO: 149702 - DNA, 80 bp, synthetic construct
  source 1..80: mol_type = other DNA
tacctggccggcaccgatgtgcgggcaccgaggacacccgctgttcctcgtccgcgtcagccggagtcataagtttacga

SEQ ID NO: 149703 - DNA, 80 bp, synthetic construct
  source 1..80: mol_type = other DNA
cctccttctggcagtccaatgtagccagatggtttctagaaaatgtaaagaaacctttaaatacaaaagaaaatatgttt

SEQ ID NO: 149704 - DNA, 80 bp, synthetic construct
  source 1..80: mol_type = other DNA
ggacatatttgggacacatacattaagccagcatcaagccattggtttagtggggactattcttttgacagcaggtctta

SEQ ID NO: 149705 - DNA, 80 bp, synthetic construct
  source 1..80: mol_type = other DNA
atgaatatgacccagtaaccattgaggccaaagttagagtttacatgaaaccaaaacacatcaaagtatggtgtcctaga

SEQ ID NO: 149706 - DNA, 80 bp, synthetic construct
  source 1..80: mol_type = other DNA
ttatgataagggaagctggaagaatcctcactgagatgtctggagcccctgttcattttggagaggccctcattaacaca

SEQ ID NO: 149707 - DNA, 80 bp, synthetic construct
  source 1..80: mol_type = other DNA
agacataatagacagaagaaacaaacaatttcagtgggaaactaagtttactatcaatgcaacacatattaacccaacat

SEQ ID NO: 149708 - DNA, 80 bp, synthetic construct
  source 1..80: mol_type = other DNA
agatcttacttcaatgaaaaccagggtctcatcaagaacaagactgaagttagtgctgtaggttataacccagtacatgt

SEQ ID NO: 149709 - DNA, 80 bp, synthetic construct
  source 1..80: mol_type = other DNA
cacaaaattggctattgatcttataatttcttcctacacgatgtacttaactatttggttagaggggagaactgttagct

SEQ ID NO: 149710 - DNA, 80 bp, synthetic construct
  source 1..80: mol_type = other DNA
agcccggcatacagctagccaccatgaaaaagagaaaaataatagttcctagctataagactaaacccaaggggcccata

SEQ ID NO: 149711 - DNA, 80 bp, synthetic construct
  source 1..80: mol_type = other DNA
cagaatgcattaatgacttgctacaatctgttgatagtcaggaagttagagaatactgtgagaaaaagggttggattatc

SEQ ID NO: 149712 - DNA, 80 bp, synthetic construct
  source 1..80: mol_type = other DNA
ccgcgtctggtctcttcgctgggttggtgtgtcgcgggtgtgccgcgggcgtgtgccgggtgtgtcggtggtgtgcgcgg

SEQ ID NO: 149713 - DNA, 80 bp, synthetic construct
  source 1..80: mol_type = other DNA
cctcttttccgcgtcttgccgttgttttgcgtgtgtcccggtgtgtcaggggcgcggctggatggaagcagtgtgccccg

SEQ ID NO: 149714 - DNA, 80 bp, synthetic construct
  source 1..80: mol_type = other DNA
ggtggtatattacgctgtaatcacggtgtaatgggaattatcacagctggtgggcacggagtcgtggcctttgcagatat

SEQ ID NO: 149715 - DNA, 80 bp, synthetic construct
  source 1..80: mol_type = other DNA
cgtattgctcagacgctgacgccaccgcagtggacaagcccactcgcccggacgtttcggtaaacagattttacacatta

SEQ ID NO: 149716 - DNA, 80 bp, synthetic construct
  source 1..80: mol_type = other DNA
cactggttaagtgtttccatgagtttcattctgaacatcctttaatcattgctttgcgtttttttattaaatcttgcaat

SEQ ID NO: 149717 - DNA, 80 bp, synthetic construct
  source 1..80: mol_type = other DNA
ccaccaaaaagcaagtttttaatagaaaacatacaactatgggcagcagttacaggttacatagactactgcacaaaagc

SEQ ID NO: 149718 - DNA, 80 bp, synthetic construct
  source 1..80: mol_type = other DNA
tgggactagtattgctcaggatatgccgccactgacccaccagattatgtacatcccacccggaggccccgtaccaaaca

SEQ ID NO: 149719 - DNA, 80 bp, synthetic construct
  source 1..80: mol_type = other DNA
tattttacacagacactatggagacaattaaaaatattgctgatatggctaccggcttcaccaacacaattgactctact

SEQ ID NO: 149720 - DNA, 80 bp, synthetic construct
  source 1..80: mol_type = other DNA
ttgcccccttagactatgctgcacaagcgtcagaatacgtccctgtgaccgttacaattgctccaatgtgcgcagagtat

SEQ ID NO: 149721 - DNA, 80 bp, synthetic construct
  source 1..80: mol_type = other DNA
gaaccagtgaaagacataatggtgaaatcactaccggctttaaattctccatccgccgaggaatgtggttacagtgatag

SEQ ID NO: 149722 - DNA, 80 bp, synthetic construct
  source 1..80: mol_type = other DNA
cttcttgggtagatcagcgtgtgttcatgtcactgaaatagtaaataaactcccagatgatgcaactaaccacaagcagc

SEQ ID NO: 149723 - DNA, 80 bp, synthetic construct
  source 1..80: mol_type = other DNA
gacgcaggttccgacgcaaaaagatagtactgactcagtggaacccccagactaccagaaaatgtatattaaggggcatg

SEQ ID NO: 149724 - DNA, 80 bp, synthetic construct
  source 1..80: mol_type = other DNA
ggaaggggacttggggtgattttctatgtggaggtggaaatatgagcaagaataaggacggctccttattaacctgatca

SEQ ID NO: 149725 - DNA, 80 bp, synthetic construct
  source 1..80: mol_type = other DNA
ccattttaagtaaggcggaacaggctgacaccccgtgtcaaaggtcagggttcagcttccgccttacacaaaatggaggt

SEQ ID NO: 149726 - DNA, 80 bp, synthetic construct
  source 1..80: mol_type = other DNA
cccggagaccatccgtagagcccgggccctgcccgcggctccggagcagcctccggccctgccatggcatggtgatggtg

SEQ ID NO: 149727 - DNA, 80 bp, synthetic construct
  source 1..80: mol_type = other DNA
acaagtgtgtcgtcctgtgctttgtgtcagcgtgtaatgacttctccgtgcgcatgctgcgtgacacaccattcatcggc

SEQ ID NO: 149728 - DNA, 80 bp, synthetic construct
  source 1..80: mol_type = other DNA
gatatggagtttggccacactatttaactccacaagatgcaactgctatagataagccaacacaacctgacacatcatca

SEQ ID NO: 149729 - DNA, 80 bp, synthetic construct
  source 1..80: mol_type = other DNA
actatcattgcccgcgggctcacagacagtggaaatatatattcattacccccaaatcccaaacactttgacggatactg

SEQ ID NO: 149730 - DNA, 80 bp, synthetic construct
  source 1..80: mol_type = other DNA
caaaccaactttgttccaagttcgaatggaggaattggtattatattagccacatgttcaggttgtccagatctatcagt

SEQ ID NO: 149731 - DNA, 80 bp, synthetic construct
  source 1..80: mol_type = other DNA
agaccgagtaccaggccgccgcggccttcgacaggcctccccgcagcgacctcacgagaccccctcactacccctggatg

SEQ ID NO: 149732 - DNA, 80 bp, synthetic construct
  source 1..80: mol_type = other DNA
gtgcgtttcactgttgctgggccgtgggagtttcacttctcggtgtctacctctaaaggtcactaagcactccgagcgta

SEQ ID NO: 149733 - DNA, 80 bp, synthetic construct
  source 1..80: mol_type = other DNA
tgggacgatcgatctccaaaccacagcgtaacacggttttcttccaacgtcgttgatacacgtcgtttttacggttactc

SEQ ID NO: 149734 - DNA, 80 bp, synthetic construct
  source 1..80: mol_type = other DNA
aataaggctgcactgactataaaatactcattcagatggaaatggggaggaaatcctatatttcaacaggtggtcagaga

SEQ ID NO: 149735 - DNA, 80 bp, synthetic construct
  source 1..80: mol_type = other DNA
ggagatttggttttgaccttgacatctgcctacacacaacatacaccaagtcaggaaaattaaatgcagcaatggcaaca

SEQ ID NO: 149736 - DNA, 80 bp, synthetic construct
  source 1..80: mol_type = other DNA
agagtccagctcgagtccatcgcccaagaagtcctcaaaatcaggaggggccacagcctccaccccctactatcttccca

SEQ ID NO: 149737 - DNA, 80 bp, synthetic construct
  source 1..80: mol_type = other DNA
cggtggtccccgtctacaatgtgcctagacatgtcaactcaatggacgcttacgcgattccagtgcagactggcaaatcc

SEQ ID NO: 149738 - DNA, 80 bp, synthetic construct
  source 1..80: mol_type = other DNA
ttagaactggaaacaacacaatatatggccaacctagttacagaccaaacaatgacgaactaactaaaataagagaatgg

SEQ ID NO: 149739 - DNA, 80 bp, synthetic construct
  source 1..80: mol_type = other DNA
tatgacaccattggcatagttgacacacaggaaaactacacttcagttaatgataaaagtaaaactactacatacaatga

SEQ ID NO: 149740 - DNA, 80 bp, synthetic construct
  source 1..80: mol_type = other DNA
ccccaggatatgctctgctgaggtgtaatgacaccagctattcaggctttatgcctaactgtagtaaagtagtagcatcc

SEQ ID NO: 149741 - DNA, 80 bp, synthetic construct
  source 1..80: mol_type = other DNA
ctgagtacgtcaatgcacgtagttcaaatgccactgaccccaccaaagcaccacaccccccttataatgtcacacaacca

SEQ ID NO: 149742 - DNA, 80 bp, synthetic construct
  source 1..80: mol_type = other DNA
gcaaacaccacacctggactaagcccactaatagctactacgagtaccatctgggcctattcagtcccatatttatagga

SEQ ID NO: 149743 - DNA, 80 bp, synthetic construct
  source 1..80: mol_type = other DNA
tactcattcaaatcgtgggacctcagacgtggctactatagctcaaaaagtattaagcgaatgtcagaatacgaagaacc

SEQ ID NO: 149744 - DNA, 80 bp, synthetic construct
  source 1..80: mol_type = other DNA
tgcaggccatatcttcctttgtggttgtctctggtatgttatacattatttacaaattgttcgccaacttccaaggggcg

SEQ ID NO: 149745 - DNA, 80 bp, synthetic construct
  source 1..80: mol_type = other DNA
aacatccaggagcagctcgcaatcaagcagcagctccaattcctcctgctccaactcctcaagacccaatccaatttgca

SEQ ID NO: 149746 - DNA, 80 bp, synthetic construct
  source 1..80: mol_type = other DNA
ctcttcattaaaatctctatgtcatttattaggcacaaacttacatcgactttatgccccccgtaaaactccacagagta

SEQ ID NO: 149747 - DNA, 80 bp, synthetic construct
  source 1..80: mol_type = other DNA
tgtggcttgggctgaatccaaatgtgtattggcacaagatggaaagcaaagttgctggagttactgggtgggagacaggg

SEQ ID NO: 149748 - DNA, 80 bp, synthetic construct
  source 1..80: mol_type = other DNA
actacgttgttacctggaacagaaaccccccttttaagctaaacaaatacagcagcgcctttatgcacccgggcatgatc

SEQ ID NO: 149749 - DNA, 80 bp, synthetic construct
  source 1..80: mol_type = other DNA
caaaggcaaagtgcacctggcggactttatgcgcgatttcacgcagctgttggagagttgcgacatcaagctggtggacc

SEQ ID NO: 149750 - DNA, 80 bp, synthetic construct
  source 1..80: mol_type = other DNA
ccggactacaaaaatggccgtttccgtgacgtcacggccgccattttaagtaaggcggaagcagctcggcatatacaaaa

SEQ ID NO: 149751 - DNA, 80 bp, synthetic construct
  source 1..80: mol_type = other DNA
gccaaggacaggtgaaattacaactcatatcagattcagaaacactgtcaaagatctaacataccccacagaaatgacga

SEQ ID NO: 149752 - DNA, 80 bp, synthetic construct
  source 1..80: mol_type = other DNA
aaccatacccaaggtttacaatccccttcatgagcattgcatcagcatattacatgttctatgatgggtatgaaggtgat

SEQ ID NO: 149753 - DNA, 80 bp, synthetic construct
  source 1..80: mol_type = other DNA
ccccggtttgaattgatacgctccaacagggcgaaaacaatttgaatcgttacccgcaaagtgcctacgcaaagcctagt

SEQ ID NO: 149754 - DNA, 80 bp, synthetic construct
  source 1..80: mol_type = other DNA
ccgatggaggacccgcagacgcagacctggtcgccgctatagacgccgcagacatgtaaggagacggaggcccgggaggt

SEQ ID NO: 149755 - DNA, 80 bp, synthetic construct
  source 1..80: mol_type = other DNA
agttggcgggtaaccgcaagcgacatgcggtttccgttctgctcaccacaaactgacaacccttgcttcaccttccaagt

SEQ ID NO: 149756 - DNA, 80 bp, synthetic construct
  source 1..80: mol_type = other DNA
tgccatttgtcagtgtcttccgggttcgtgtggaggtcgccattttaacttcgacctccattttaggccctagcgggcac

SEQ ID NO: 149757 - DNA, 80 bp, synthetic construct
  source 1..80: mol_type = other DNA
tgaggccgctagggagtttgttcgcgggacagggctcgggtaggtttgcggggcgtcagcgcgcgtccgtccttagcgct

SEQ ID NO: 149758 - DNA, 80 bp, synthetic construct
  source 1..80: mol_type = other DNA
acgataaccacgcaggagtgtgctaacgtggtggtggggtatggtagatggcccacttacctcagggacgacgaggcgac

SEQ ID NO: 149759 - DNA, 80 bp, synthetic construct
  source 1..80: mol_type = other DNA
ttaaagacctcttaataaagctgccagttagaagcaagttaagtgtgtgttcccatctctcctagtcgccgcctggtcat

SEQ ID NO: 149760 - DNA, 80 bp, synthetic construct
  source 1..80: mol_type = other DNA
ttgatcccaccagcgggcacaatgtgcgttgtacactgcgatctcggtcgctttgtatgcctgtttttaccacccacccc

SEQ ID NO: 149761 - DNA, 80 bp, synthetic construct
  source 1..80: mol_type = other DNA
tttgctatcccccccaacttatgtaatttagaagatgtacacaacgcccattaggatgcggccaaaccaggtccgcttag

SEQ ID NO: 149762 - DNA, 80 bp, synthetic construct
  source 1..80: mol_type = other DNA
ccattatgacagaaaacatgcacctatggagtccggggaggaggaatttctgttgtaattcgatcctctctcacgcgtcc

SEQ ID NO: 149763 - DNA, 80 bp, synthetic construct
  source 1..80: mol_type = other DNA
tttattagtcaccttgttgctctgggtgatcagtttggtttcaggccgggtccccgcgctcccggcgccccgggagtagg

SEQ ID NO: 149764 - DNA, 80 bp, synthetic construct
  source 1..80: mol_type = other DNA
tcccaggtggtgcccagtgacacaatgcagacgcgccacgtgtgcaattaccacaccaggtctgaatcgtcaatagagaa

SEQ ID NO: 149765 - DNA, 80 bp, synthetic construct
  source 1..80: mol_type = other DNA
ttacctacgacggcgaattaatctacggcagttacctgttgtatcgcaaggctcacgtggagctgtcactctccagcaac

SEQ ID NO: 149766 - DNA, 80 bp, synthetic construct
  source 1..80: mol_type = other DNA
gcccagcttgatgacggcggctgagatcggcacccggggctgatcctcgacccctgcggccacagccggcaggtcagact

SEQ ID NO: 149767 - DNA, 80 bp, synthetic construct
  source 1..80: mol_type = other DNA
ctctattaggtgagatattgaactactacacccattgggctgggtctatcaaatttacattcctgttctgcgggagcatg

SEQ ID NO: 149768 - DNA, 80 bp, synthetic construct
  source 1..80: mol_type = other DNA
tcgggccgccacgccggcggctggggcgcgcgttccctcttcatccccgtcacctccagtcgaaccgccatctcctgttc

SEQ ID NO: 149769 - DNA, 80 bp, synthetic construct
  source 1..80: mol_type = other DNA
ggaaactgatttgaaaacagccgttatgtccaaatacaaagggaatgtgaaaattgaaatgagtgaaaacatacagattg

SEQ ID NO: 149770 - DNA, 80 bp, synthetic construct
  source 1..80: mol_type = other DNA
caggcgtaacacgtttattgagtaggattacagagtataacatagagtataatatagagtatacaatagtgacgtgggat

SEQ ID NO: 149771 - DNA, 80 bp, synthetic construct
  source 1..80: mol_type = other DNA
tacttattatatgtccctacacatttccaaaactatatgacactacaaatcctaacagtggatttgtagtaatagggtcc

SEQ ID NO: 149772 - DNA, 80 bp, synthetic construct
  source 1..80: mol_type = other DNA
ctctgggcgatctctatggcttcaggccgggtccgcgggctcccggcgccccgggagtaggcggaccgccaccctcgctc

SEQ ID NO: 149773 - DNA, 80 bp, synthetic construct
  source 1..80: mol_type = other DNA
tttcagacgcaggagacgactaagacgaaagagacgaaagcctaagatagtacttaaacaatggcagccggacagtgtga

SEQ ID NO: 149774 - DNA, 80 bp, synthetic construct
  source 1..80: mol_type = other DNA
tactgctttctgtgtcgcctgcaccgccgccatcttccatgagcctgtggcgtccccccgctcacaatgtcgccggccag

SEQ ID NO: 149775 - DNA, 80 bp, synthetic construct
  source 1..80: mol_type = other DNA
aagtgcttctgctggctgtgcgagctacacaggagacatcttccatgagtatctggcgtccccccctcgggaatgtctcc

SEQ ID NO: 149776 - DNA, 80 bp, synthetic construct
  source 1..80: mol_type = other DNA
cctgagacggtcaaaccagacctatcaaactacggagcttttggataccaatcaggggccgtgtacgtcgtaaactacag

SEQ ID NO: 149777 - DNA, 80 bp, synthetic construct
  source 1..80: mol_type = other DNA
cactaaaaggagaaagtcatctagagatacaggcatattggaacctaacgccagaaaaaggatggctctcctctcattca

SEQ ID NO: 149778 - DNA, 80 bp, synthetic construct
  source 1..80: mol_type = other DNA
cagggagacagacggccctcttcctgttaaaattggcaactagatggcctatctcacatttgcatacagataatggtgcc

SEQ ID NO: 149779 - DNA, 80 bp, synthetic construct
  source 1..80: mol_type = other DNA
attgtgtagacaagatctaaggcaagatccctctaagttcactgaaccaataaaagatgtgatggtcaaaacactacccg

SEQ ID NO: 149780 - DNA, 80 bp, synthetic construct
  source 1..80: mol_type = other DNA
tggtgcatataaaactaacacaaaagtatacagccatgtcatatatgatgaaacggtttccaacctttagcctgcaatta

SEQ ID NO: 149781 - DNA, 80 bp, synthetic construct
  source 1..80: mol_type = other DNA
actgtatgaccagcaccagaggggtctcaacagatggtcttcatccaacgagatgctagaccttgccagatacaacgggt

SEQ ID NO: 149782 - DNA, 80 bp, synthetic construct
  source 1..80: mol_type = other DNA
agaccagggggtcgcctcggtagctcagtagccgaacatgcacatagtcgcggctagcgttgacagacggcccgtggagg

SEQ ID NO: 149783 - DNA, 80 bp, synthetic construct
  source 1..80: mol_type = other DNA
gaacattccaaagaagtgccagctttaacagctgttgaaactggtgcttcaaaccctttggagcccagtgacacagtaca

SEQ ID NO: 149784 - DNA, 80 bp, synthetic construct
  source 1..80: mol_type = other DNA
tcctcaattatatcttgatactcaaatttagaataggtatatccttcgaagatagagggagaagtgtttgcgacgggaag

SEQ ID NO: 149785 - DNA, 80 bp, synthetic construct
  source 1..80: mol_type = other DNA
ttagtacctagctatgctacaaaaccaaagggtagcagctatgtaaaagtaaacatagcaccccccacactactaactga

SEQ ID NO: 149786 - DNA, 80 bp, synthetic construct
  source 1..80: mol_type = other DNA
tggtagcattcacccaatctggtttcaagctctgaaagaagttttatttaatcttggatttgagtgtggcttagtggata

SEQ ID NO: 149787 - DNA, 80 bp, synthetic construct
  source 1..80: mol_type = other DNA
aaacatttcacacaggaggatacattaatacaggacttaaagaaggcaaaaaaggcacaaatccactttcaacagattta

SEQ ID NO: 149788 - DNA, 80 bp, synthetic construct
  source 1..80: mol_type = other DNA
agtggcatcaacaacattgccttctccaactaaataaaaatagcacctaatcatgttcttacaatggtttactatctgct

SEQ ID NO: 149789 - DNA, 80 bp, synthetic construct
  source 1..80: mol_type = other DNA
acgggacacacaagccagacacaacctgaagatatggttgagaccaggtatgtaatcactgatcaaactcgtgatgaaat

SEQ ID NO: 149790 - DNA, 80 bp, synthetic construct
  source 1..80: mol_type = other DNA
tcaccttgatacctgggcgctactttttgtcctatggtttttcaggtaccaccgttaccaaccaaatttcaatctccgca

SEQ ID NO: 149791 - DNA, 80 bp, synthetic construct
  source 1..80: mol_type = other DNA
ctggtctggaacgttgaggcgcgaccctttccgtccacacatcagctgattgtgctgccccctcctgtagcgtcagctcc

SEQ ID NO: 149792 - DNA, 80 bp, synthetic construct
  source 1..80: mol_type = other DNA
tccaacaaagacaaaactacaaccaagtgtcttccacaatgttttccccggaaagaaggagcctgcagtcttatccccaa

SEQ ID NO: 149793 - DNA, 80 bp, synthetic construct
  source 1..80: mol_type = other DNA
gcgggacggatcaaccatcaatttcactaatataaactactataaggattcttatgctgcctcagccgccaagcacgatt

SEQ ID NO: 149794 - DNA, 80 bp, synthetic construct
  source 1..80: mol_type = other DNA
acaatacattgatggtgtgttgaatgaagttttgattgtcccaaacatcaatgagagccatcccagcacttccaatgcag

SEQ ID NO: 149795 - DNA, 80 bp, synthetic construct
  source 1..80: mol_type = other DNA
acctctacgaggcctgctaccgcacacacgcggctagctgtggctgtgggaattttcttggccatcttactcgcctggtt

SEQ ID NO: 149796 - DNA, 80 bp, synthetic construct
  source 1..80: mol_type = other DNA
ttcttagcaagaatgataacaaatgacagtgacatttattcattaccaccagatccaaaatattttgatggatatgatca

SEQ ID NO: 149797 - DNA, 80 bp, synthetic construct
  source 1..80: mol_type = other DNA
tactgccagagccgggtaaaacgccgtcctgactcgacggcgcagattgcaagggcggcgacatctgaaacatggccgcc

SEQ ID NO: 149798 - DNA, 80 bp, synthetic construct
  source 1..80: mol_type = other DNA
aaagctctattctccaaatacaaagggaacttaaactgtgagatgaatgaccatgttaaagttgcagttgcacactattc

SEQ ID NO: 149799 - DNA, 80 bp, synthetic construct
  source 1..80: mol_type = other DNA
ttccaggtgccttacatagagagacaggcgaatgacggctggttcagaaagtttaacgacgcctgtaatgctgcaaaagg

SEQ ID NO: 149800 - DNA, 80 bp, synthetic construct
  source 1..80: mol_type = other DNA
cggcgtccgtagagcgaccatgactgctgacccgctgcgtcatatttatgtggcggctcttgaacccaaaggcgctatag

SEQ ID NO: 149801 - DNA, 80 bp, synthetic construct
  source 1..80: mol_type = other DNA
agatcatatttctcagaaactcaaggccaaatagtttcctccaaatctactgctgagtgtaattaccctagtatacacac

SEQ ID NO: 149802 - DNA, 80 bp, synthetic construct
  source 1..80: mol_type = other DNA
aactcattatttcaagacgatgtttttgaatggtacatagacaaaccaatggttactaacaagttatgtctttatcaaag

SEQ ID NO: 149803 - DNA, 80 bp, synthetic construct
  source 1..80: mol_type = other DNA
aatttcaccaacataactttctcactagccagcctgtatgaggagtacatgcaccacagaaacaagtggtcccgctccaa

SEQ ID NO: 149804 - DNA, 80 bp, synthetic construct
  source 1..80: mol_type = other DNA
tacaggacccagtctacacccgggagccgccatgctatcaaaacataagatactggtacccagttttaagaccagacctg

SEQ ID NO: 149805 - DNA, 80 bp, synthetic construct
  source 1..80: mol_type = other DNA
tagcaccccatcagtggatcaacctgcgcactaacaactgcgctactatagttatgccgtacatcaatgctgtcccttat

SEQ ID NO: 149806 - DNA, 80 bp, synthetic construct
  source 1..80: mol_type = other DNA
atggggcttcagtttactaaacagcaaaccggaacccacaaaaatgccaactttgccacaaatggatctcatatcccata

SEQ ID NO: 149807 - DNA, 80 bp, synthetic construct
  source 1..80: mol_type = other DNA
gaccaggaccaggaatgttgcgcgaaggagaccccgcggggccggcattcttgagacgtggcgacgtggatttcttgtta

SEQ ID NO: 149808 - DNA, 80 bp, synthetic construct
  source 1..80: mol_type = other DNA
cgagcctactgcaccgacatcgcgcgctagcgccgatgacctggcccgcgggcacgggcgttgcggcggcggccgaagcg

SEQ ID NO: 149809 - DNA, 80 bp, synthetic construct
  source 1..80: mol_type = other DNA
tttccttttattctcatgtttttgcttatggtgacaatactgacgtatagtgttgttaccatgggcgcccaagtgagtaa

SEQ ID NO: 149810 - DNA, 80 bp, synthetic construct
  source 1..80: mol_type = other DNA
tccttgccctgaccggttgacttcgagacccccgagacgtagaggacggaattggtggcaaagatctgcgtggacacgtg

SEQ ID NO: 149811 - DNA, 80 bp, synthetic construct
  source 1..80: mol_type = other DNA
gagactacgaacgcgaagacctagacgccctgtacgacgccgtcgccgccgaccaagagtaaggaggagacggtggggca

SEQ ID NO: 149812 - DNA, 80 bp, synthetic construct
  source 1..80: mol_type = other DNA
tattaacaatattaaatacaaatctgaaaatactggcaatgaaactgggggtaacattctgacaaaagttgctgatgatg

SEQ ID NO: 149813 - DNA, 80 bp, synthetic construct
  source 1..80: mol_type = other DNA
cctatacctctataggaagaactaactttccagagagtcatagtaaggttatagccacaagagaaagcatcaccacctat

SEQ ID NO: 149814 - DNA, 80 bp, synthetic construct
  source 1..80: mol_type = other DNA
tctcagcgccggaggatcgtactggcgcagatagaggccttgcagcatcgataacgtcttttgaaagacggtgtttctaa

SEQ ID NO: 149815 - DNA, 80 bp, synthetic construct
  source 1..80: mol_type = other DNA
tgcttagttatgtgtggacacacaaaagcgggcagaaactatgccctgcactcagaagactatgtgccccagactcatgc

SEQ ID NO: 149816 - DNA, 80 bp, synthetic construct
  source 1..80: mol_type = other DNA
aacagtccaacaaagagaaccgaaaccgtgggcatccgaagaagagacggagagccagagccaaagcgaagaagaggggg

SEQ ID NO: 149817 - DNA, 80 bp, synthetic construct
  source 1..80: mol_type = other DNA
ctgccaagtacaagttccgatggcattttggtggcaatcctgtttccgaacaggttattaaagacccgtgccaacagccc

SEQ ID NO: 149818 - DNA, 80 bp, synthetic construct
  source 1..80: mol_type = other DNA
aaccctagcactgaagcagatgaagggaggaaattcgccgcccttgactacctacttggttgtggagttctggcaggaaa

SEQ ID NO: 149819 - DNA, 80 bp, synthetic construct
  source 1..80: mol_type = other DNA
ccgggctatatgtcgccttacctcccctatatagtcacgaccccaccgaaccaggcatgatgtagaataaaattttatgc

SEQ ID NO: 149820 - DNA, 80 bp, synthetic construct
  source 1..80: mol_type = other DNA
ctccctattgtaccttccctcacaatcctaacccctgtaacgttagaagatgtgcaactcgtgcaataggagatactgca

SEQ ID NO: 149821 - DNA, 80 bp, synthetic construct
  source 1..80: mol_type = other DNA
atccagtaatgctatacccgagtccgttatggaaactcggtatgtggtcaatgacaacaccaatgaagaagctgagattg

SEQ ID NO: 149822 - DNA, 80 bp, synthetic construct
  source 1..80: mol_type = other DNA
agttcccagaagcgttgaaagacatggggttgtttggacagaacatgtactatcactacttgggtcgagcgggttacact

SEQ ID NO: 149823 - DNA, 80 bp, synthetic construct
  source 1..80: mol_type = other DNA
acggatattaccttcaaagcaccagaaagaggttcagacccagaagtgacatacatgtggtctaactgcagaggagaatt

SEQ ID NO: 149824 - DNA, 80 bp, synthetic construct
  source 1..80: mol_type = other DNA
caacctgtgtatggatagaaggaaacaactattatccaagtagatatcaacagggagtcatgaagggtgttggcccagca

SEQ ID NO: 149825 - DNA, 80 bp, synthetic construct
  source 1..80: mol_type = other DNA
atgtggctttcacagatctgagaccttataatatcaaagcgacctctcaaggcccagtgacaaactatctcaaccaactg

SEQ ID NO: 149826 - DNA, 80 bp, synthetic construct
  source 1..80: mol_type = other DNA
ccccggatgtgaggataggctttacccaaggccgaaaccgtaacattcgttatccgcatgtttactgcgcaatggctagt

SEQ ID NO: 149827 - DNA, 80 bp, synthetic construct
  source 1..80: mol_type = other DNA
gcggcgcggcgtctgcggcgtgttgcggccaccgcgttgtgcatttcggcagtacgccacgcggtgtcccacggcatttg

SEQ ID NO: 149828 - DNA, 80 bp, synthetic construct
  source 1..80: mol_type = other DNA
ttccaagcctcgttcactccatccgcagaggacgggaaaaagaatacatttgcccccgttgattggctgctgggttgcgg

SEQ ID NO: 149829 - DNA, 80 bp, synthetic construct
  source 1..80: mol_type = other DNA
cttgtatttatgactataatatgtgcactcgtgtgtcgatgttcctattgggaagggtgtcaatgtaggaggtataaaga

SEQ ID NO: 149830 - DNA, 80 bp, synthetic construct
  source 1..80: mol_type = other DNA
gctacaggcgcagaggcagacgaaggggcaaacggacttttagggggcgacgaaaaaagagacagactttaatcttaaga

SEQ ID NO: 149831 - DNA, 80 bp, synthetic construct
  source 1..80: mol_type = other DNA
caccaacaagaagttctagaggctttagcgcagtcaggacccttcgcttatcactcagacattaaaaaagtatctctagg

SEQ ID NO: 149832 - DNA, 80 bp, synthetic construct
  source 1..80: mol_type = other DNA
tcgacagcagacgttgtgggcggttggtgtatttttgcgggttgcggtgaaagtcggcagccggcgtcttgtgaagtatc

SEQ ID NO: 149833 - DNA, 80 bp, synthetic construct
  source 1..80: mol_type = other DNA
cagcgtcgcgacttacaaattgttgacccacactccatgggcccgcaattctcgttccacaactgggactacagacggtg

SEQ ID NO: 149834 - DNA, 80 bp, synthetic construct
  source 1..80: mol_type = other DNA
taagagccctgcccgctccggccgcccagggagctaacccgggtgagccgccggcatggcctggcgacgctggagaccgt

SEQ ID NO: 149835 - DNA, 80 bp, synthetic construct
  source 1..80: mol_type = other DNA
cgaacgtagacaacccagggtacgatgagctgttagatggagtactgagatgtcaagggaggtccaagaggtccctggac

SEQ ID NO: 149836 - DNA, 80 bp, synthetic construct
  source 1..80: mol_type = other DNA
acggcaacgggtacatacccatagcctacagatttcagtggtacccctgcatgttccaccaacagaactttatgaatgac

SEQ ID NO: 149837 - DNA, 80 bp, synthetic construct
  source 1..80: mol_type = other DNA
cggcgaatgcagtcgtcgcatacggggaatggccccgatttattaacgaccaggaagcaaaccctgttgatgccccaact

SEQ ID NO: 149838 - DNA, 80 bp, synthetic construct
  source 1..80: mol_type = other DNA
caccagcggggactgggccacagagtacctagcagctaagatatttgacaggccagtcaggagcaacctaagagacaccc

SEQ ID NO: 149839 - DNA, 80 bp, synthetic construct
  source 1..80: mol_type = other DNA
caggttgcaaagatttttgtttacgtatggctagagacaccaacctgcatgttcaaactggaccaataacccaaaatcca

SEQ ID NO: 149840 - DNA, 80 bp, synthetic construct
  source 1..80: mol_type = other DNA
ccatacttcgtatacgaacctaaccggcgtaaagtgttttccgatatataaactggcgcctattgtggctgtagcgccca

SEQ ID NO: 149841 - DNA, 80 bp, synthetic construct
  source 1..80: mol_type = other DNA
acgtgggcattgctaacgcatattcacacttttatgatggcttttcgcgggtgccattgaaagatgacaacacagactct

SEQ ID NO: 149842 - DNA, 80 bp, synthetic construct
  source 1..80: mol_type = other DNA
attgttttaaattccctcaacttgacaaaataccagcacaagacacacaatcagggtggtcaacaaacccagacagtcaa

SEQ ID NO: 149843 - DNA, 80 bp, synthetic construct
  source 1..80: mol_type = other DNA
cccagccccgtatacgcgctggaggccctggtggacttccaggtgcgcaacgcttttatgaaggtaaagcccgtggccca

SEQ ID NO: 149844 - DNA, 80 bp, synthetic construct
  source 1..80: mol_type = other DNA
agtggtaaagggcggtgtccgaaaccagaatgacaacagagctgaagcattctgtacatcttacgggttctttccaggtg

SEQ ID NO: 149845 - DNA, 80 bp, synthetic construct
  source 1..80: mol_type = other DNA
tacctattaccgtcaccgtagccccaatgtctgcagaatacaatgggctgcgactcgccagcacacagggtttaccaact

SEQ ID NO: 149846 - DNA, 80 bp, synthetic construct
  source 1..80: mol_type = other DNA
ttaacttaaaggtgctatatgaccaaaatcagagaggactgaacaagtggtcttactccaacgaccagctagacctagcc

SEQ ID NO: 149847 - DNA, 80 bp, synthetic construct
  source 1..80: mol_type = other DNA
aattagggttacatcctataaacaccccatccaagactaaattacatcccagtgtattttacaatgtatttgaaggtaat

SEQ ID NO: 149848 - DNA, 80 bp, synthetic construct
  source 1..80: mol_type = other DNA
cacagaaagctcgcaaactactaagaggtatgtggagaccccccactcaaaatgtttcaggacaggagagaaagtggttc

SEQ ID NO: 149849 - DNA, 80 bp, synthetic construct
  source 1..80: mol_type = other DNA
gcaaggctcttaaaaagccatgtttctcggtaaattatacagaaagaagaggccactgccactgtcccgcttgccagctt

SEQ ID NO: 149850 - DNA, 80 bp, synthetic construct
  source 1..80: mol_type = other DNA
gaaaataagatcgaccagtatcggcaagtgtctattgataccagaatacagtgtcctacgccggcgatggttggatttgt

SEQ ID NO: 149851 - DNA, 80 bp, synthetic construct
  source 1..80: mol_type = other DNA
atgtggactaactgcaggggagaattcctctactgcaatatgacttggttcctcaattgggtagaaaacagaacaaatca

SEQ ID NO: 149852 - DNA, 80 bp, synthetic construct
  source 1..80: mol_type = other DNA
cgcgcgcgtgccagcgccgtgcggtaggccaggtagacgtagtgcacgcagaccgtgtcgggcagacgcgcacgttcgcg

SEQ ID NO: 149853 - DNA, 80 bp, synthetic construct
  source 1..80: mol_type = other DNA
ggacacacatctcccgatgttccaagtgacacgatgcaaacacgtcacgtaaaaaattaccactcaaggtctgagtccac

SEQ ID NO: 149854 - DNA, 80 bp, synthetic construct
  source 1..80: mol_type = other DNA
acgcttcatcctctcccggatgctgctctttgtcgtatttctcctcggtcgattggggcagcgtaaatgtggtttgaaaa

SEQ ID NO: 149855 - DNA, 80 bp, synthetic construct
  source 1..80: mol_type = other DNA
ccctgccaccaaagtcgccgagatgactgatcaggtgttggctctttaccaggactcaatcaatgcaaaagctgcaattg

SEQ ID NO: 149856 - DNA, 80 bp, synthetic construct
  source 1..80: mol_type = other DNA
tcacccagctcgccggcacattctcgaccaccggttcctctcgttcagctttcttgcagacgcaggcaaacaccgtcatt

SEQ ID NO: 149857 - DNA, 80 bp, synthetic construct
  source 1..80: mol_type = other DNA
ctggggccaaaagccaaggtttaacagaccctagtggattggtttcaaaacctgaaatattgtggaacacactcagtacc

SEQ ID NO: 149858 - DNA, 80 bp, synthetic construct
  source 1..80: mol_type = other DNA
ggggcgacgcagactgtacagacgcagatacaaaaagaggcgcaaaagacgaaaaaaaatgactttaaaaatgtggaatc

SEQ ID NO: 149859 - DNA, 80 bp, synthetic construct
  source 1..80: mol_type = other DNA
cgtgacactatggcaccaaacagcgtttgtctccaacgggcaagtggggtccataatggtcacctgttctgcatgctccg

SEQ ID NO: 149860 - DNA, 80 bp, synthetic construct
  source 1..80: mol_type = other DNA
tagacttgtcagaaagcaagaaaaacaccatggatatgtacagagtacaattgcaagcatctccatctaacagggatacc

SEQ ID NO: 149861 - DNA, 80 bp, synthetic construct
  source 1..80: mol_type = other DNA
acacatcagcagaccaatactttaacacactagatggctactggggagaccccatatatgtacacacaggtaatatacag

SEQ ID NO: 149862 - DNA, 80 bp, synthetic construct
  source 1..80: mol_type = other DNA
accattcttttgttttaacgcggaatgagaagagggcctgcggaaattagactcatcctcagactcacagtcagatttgt

SEQ ID NO: 149863 - DNA, 80 bp, synthetic construct
  source 1..80: mol_type = other DNA
taccaggagcagccggccccccaggctccataccagggataccaggagccgccggcccacgggctccaatcatcttcata

SEQ ID NO: 149864 - DNA, 80 bp, synthetic construct
  source 1..80: mol_type = other DNA
ggccatgtgttcctgcatgtctacttgcctcctgtggtggcagagcttggccctgggcccaacccccgccttgggagcct

SEQ ID NO: 149865 - DNA, 80 bp, synthetic construct
  source 1..80: mol_type = other DNA
taggtttcactgaccaaatctcagcaaagatcacagagcttcaagatagtgccaaagattacataaatgtcaaaattctt

SEQ ID NO: 149866 - DNA, 80 bp, synthetic construct
  source 1..80: mol_type = other DNA
agggcggaccctaacagggtcatcgtcctgggcctggaacacttcttcctcaaggacctaacaggggacgctgccctcca

SEQ ID NO: 149867 - DNA, 80 bp, synthetic construct
  source 1..80: mol_type = other DNA
caactgacagcaccaggctctctgatgcgtctggcccgatcgtgatcggggccgaaatccatgtggagcagagttcgctg

SEQ ID NO: 149868 - DNA, 80 bp, synthetic construct
  source 1..80: mol_type = other DNA
ttctgcagcccagagagtagtctcagggcatcctctggagcctgacctgtgaccgtcgcatcatagaccgccagtagacc

SEQ ID NO: 149869 - DNA, 80 bp, synthetic construct
  source 1..80: mol_type = other DNA
ttaaggtcactaagcactccgagcgccagcgaggagtgcgaccctaggccaaggggcaactccctcggagtccggcgcta

SEQ ID NO: 149870 - DNA, 80 bp, synthetic construct
  source 1..80: mol_type = other DNA
aatacaaattacaagaggtgattctaccataacatcccaagatatagccaatgcagttgtagcatatggtgtatggccca

SEQ ID NO: 149871 - DNA, 80 bp, synthetic construct
  source 1..80: mol_type = other DNA
tgtatttcaaacctaaacacattaaagcatgggttccaaggccacctaggttgtgtcaatataaaaacgcatccacagtc

SEQ ID NO: 149872 - DNA, 80 bp, synthetic construct
  source 1..80: mol_type = other DNA
gggaatagggggattcataaataccaaagaatatagaaatgtagaaatagaagtattaaataagaaagtaagagccacca

SEQ ID NO: 149873 - DNA, 80 bp, synthetic construct
  source 1..80: mol_type = other DNA
ggcaaatttttcagaccagagtccttacggccaacaatcacaaggtcaagtgatgaagctggcttacttggataggggtt

SEQ ID NO: 149874 - DNA, 80 bp, synthetic construct
  source 1..80: mol_type = other DNA
cacaaacgaacaacccttgcataactttccaggttttgaaagatatctatgacagttgcataggagttaactctacccaa

SEQ ID NO: 149875 - DNA, 80 bp, synthetic construct
  source 1..80: mol_type = other DNA
caggagctgcatattacggagctgtgtctataaatgactttggattgctagcagcaagagtagtgaatgaacacaaccca

SEQ ID NO: 149876 - DNA, 80 bp, synthetic construct
  source 1..80: mol_type = other DNA
tgaggaggcaagcaagctatactatgaagagactaaacaattaataggaataacatttacaggatcctcacacaggttgc

SEQ ID NO: 149877 - DNA, 80 bp, synthetic construct
  source 1..80: mol_type = other DNA
acaactacagttctagccaccttaacactcctcgggtgtgatgtgtcaccctggcagtggctcaaaaagaaggcctgtga

SEQ ID NO: 149878 - DNA, 80 bp, synthetic construct
  source 1..80: mol_type = other DNA
aggaagcgatgttgggcacccacatgatatgggatatcggactgcaatccagctgtgtgttgtgtgtaccgtggatcagc

SEQ ID NO: 149879 - DNA, 80 bp, synthetic construct
  source 1..80: mol_type = other DNA
cgccttcggctgcgcgcggcacctcggacccccgctcgtgctgacacgctcgcgcgtgtcagaccacttcgggctcgcgg

SEQ ID NO: 149880 - DNA, 80 bp, synthetic construct
  source 1..80: mol_type = other DNA
gtgatgctagtgatgttaataaaacttccaaaccatacacatctgtatgtagattttacactttagaaagcaaggagtgg

SEQ ID NO: 149881 - DNA, 80 bp, synthetic construct
  source 1..80: mol_type = other DNA
ttttgagcaaatctgattccagacttgaggaaccagttgaatgcctaattaagaaatcagctgcaaagtatagaatcaac

SEQ ID NO: 149882 - DNA, 80 bp, synthetic construct
  source 1..80: mol_type = other DNA
cctagaggtggaaaatttcaatgccactgaaacctcagacaaaaagaaacaattcactgtgtggcccatcacctacacta

SEQ ID NO: 149883 - DNA, 80 bp, synthetic construct
  source 1..80: mol_type = other DNA
ctgtggacactagtatttggatatcatgactgggtaaaaaaagaactaaacaactgggtaatatcagcacaagctagagt

SEQ ID NO: 149884 - DNA, 80 bp, synthetic construct
  source 1..80: mol_type = other DNA
cagggaccactggcaaagggtttgacctgtgggatatagatgtcatggggtatgtgcaacttagacgcaagttagaactg

SEQ ID NO: 149885 - DNA, 80 bp, synthetic construct
  source 1..80: mol_type = other DNA
ggcgttgcggatccacgcgggttcctcattcaacctgcgaaaagaggaagttgcggtaaaaccacgtcaataaagacgtc

SEQ ID NO: 149886 - DNA, 80 bp, synthetic construct
  source 1..80: mol_type = other DNA
ttcctctctataactgcccaacaactaatacagaaccaaggagctaactggaaaggctattataaacaatttctacaaaa

SEQ ID NO: 149887 - DNA, 80 bp, synthetic construct
  source 1..80: mol_type = other DNA
cccccaaaactcgtaaagatgcaatgctaggtacacatgttatatgggacgtgggcctgcagtcctcttgtgtgttatgc

SEQ ID NO: 149888 - DNA, 80 bp, synthetic construct
  source 1..80: mol_type = other DNA
gaacccccacgggggcagtatgagtacagtgacttttagcctacaagtactatttgaccagtaccagaggtttatgaacc

SEQ ID NO: 149889 - DNA, 80 bp, synthetic construct
  source 1..80: mol_type = other DNA
gcacttcaggttgttactatgtcagacatttggatagatactgcccagtaaccttaacttctcatgattggtatgaaata

SEQ ID NO: 149890 - DNA, 80 bp, synthetic construct
  source 1..80: mol_type = other DNA
tcattagggcccttatcaagagaaattgtcacattttgaccacagagaaaggggaattcaacctacttggaatacatgac

SEQ ID NO: 149891 - DNA, 80 bp, synthetic construct
  source 1..80: mol_type = other DNA
gagccctcatcgcagggttcttaccatgcggccatgtaggcccacttaacactacaagacctacgcctctccattcatca

SEQ ID NO: 149892 - DNA, 80 bp, synthetic construct
  source 1..80: mol_type = other DNA
tctaaagttgtcacaaccaaaacctagtacacaacagagtctgccaaacactagtagctcagagccaactcattctcaag

SEQ ID NO: 149893 - DNA, 80 bp, synthetic construct
  source 1..80: mol_type = other DNA
aagttgattttgattcagcattattttccaagtataaagggaatgttaattgtcaattgaccccacatatggagatagcc

SEQ ID NO: 149894 - DNA, 80 bp, synthetic construct
  source 1..80: mol_type = other DNA
acaggttgattattcccccgtccacgtcgcctatggagttgactcgtcgtcggcaaagagaccagagggcacccatggcg

SEQ ID NO: 149895 - DNA, 80 bp, synthetic construct
  source 1..80: mol_type = other DNA
aaaaaagatcccaaacctcaaaccaaaaaaccaaaggaagttctcaaccaccaggccacagaaaaacccaccctcgaccc

SEQ ID NO: 149896 - DNA, 80 bp, synthetic construct
  source 1..80: mol_type = other DNA
caccatcatgactgtggagaacttcaacgcaacggacgtgctggaaaagaagaaattgtttgccacgtggaacattgcat

SEQ ID NO: 149897 - DNA, 80 bp, synthetic construct
  source 1..80: mol_type = other DNA
gtactttctgtcaaatggtttcgaccgcagacttccacgtgcctatggcggcattggaggataagggaagatcattcacc

SEQ ID NO: 149898 - DNA, 80 bp, synthetic construct
  source 1..80: mol_type = other DNA
gacaacctcttctcaatattgccgaatcctattcccgtcgcggcgaatccatcaaactccagttagattccaacaccaaa

SEQ ID NO: 149899 - DNA, 80 bp, synthetic construct
  source 1..80: mol_type = other DNA
gttatggagtttggccgcattacttgacaccacaagatgccactgcaattgacaaaccatctagaccagacacttcctca

SEQ ID NO: 149900 - DNA, 80 bp, synthetic construct
  source 1..80: mol_type = other DNA
caagaagaagaccagcagcgactcctcgagcgaggggtcttccagcagttcagaatcagacagcagctccagcacctact

SEQ ID NO: 149901 - DNA, 80 bp, synthetic construct
  source 1..80: mol_type = other DNA
aaccaccaattatctaaatacaaaagttttgtcaaaggtagttaaaattgtatcagctctagttatcatttgtagaaacc

SEQ ID NO: 149902 - DNA, 80 bp, synthetic construct
  source 1..80: mol_type = other DNA
acagcaatttgagtaccacctagggtggtactcccctatatttcttagcagacacagaagcaacacagagtttgccaccg

SEQ ID NO: 149903 - DNA, 80 bp, synthetic construct
  source 1..80: mol_type = other DNA
ccggcgccgcaacaccccggccccgtccccaacggcacccccgtccccagcgcaaccccgtgtcccgacgccaacaccgt

SEQ ID NO: 149904 - DNA, 80 bp, synthetic construct
  source 1..80: mol_type = other DNA
cgccgctattcaactcgaaacagagagaggaccagtggtaccagtcaattattttcagccataatactttttgcggctgc

SEQ ID NO: 149905 - DNA, 80 bp, synthetic construct
  source 1..80: mol_type = other DNA
tcatccgtaccatcacccgcacccgcaccccagtccacagccaccggccaaggtcctgggcctcccaccactgttatgcc

SEQ ID NO: 149906 - DNA, 80 bp, synthetic construct
  source 1..80: mol_type = other DNA
tggccatcttatttgaaggacagcgaagcaacctcggaggaccagcctacacaaccagacgttgccacatgcagatttta

SEQ ID NO: 149907 - DNA, 80 bp, synthetic construct
  source 1..80: mol_type = other DNA
catgccgccaggtgggccaatcccaactagcaatgagagctatgcctggcagtcatcaacaaaccccagtgtgttctgga

SEQ ID NO: 149908 - DNA, 80 bp, synthetic construct
  source 1..80: mol_type = other DNA
atttcttccgggtcaaaggtcgttgctacgtcataggtgacgtagctggtgtctgctgtaaacacggaagtaggccccgc

SEQ ID NO: 149909 - DNA, 80 bp, synthetic construct
  source 1..80: mol_type = other DNA
aacgtcgtgagccagacggccacgcgagtacgtacgtggtttgtggaaagaaccacgttttggcgtcgcacgtggattcc

SEQ ID NO: 149910 - DNA, 80 bp, synthetic construct
  source 1..80: mol_type = other DNA
gggagcgggggtggcgaggaccccgaggcacactgcttccatccagccgcgcacaccgcacccctgacacaccggaacac

SEQ ID NO: 149911 - DNA, 80 bp, synthetic construct
  source 1..80: mol_type = other DNA
atgacccaagattagaaactgactttgacacggcacttttctcaaagtacaaaggtaaccctgcttgtgaagtgaccaca

SEQ ID NO: 149912 - DNA, 80 bp, synthetic construct
  source 1..80: mol_type = other DNA
ttccagtaacaacgaggactttacaaagctatataaaacactattcacttcaaataactcaggacactactggcagacat

SEQ ID NO: 149913 - DNA, 80 bp, synthetic construct
  source 1..80: mol_type = other DNA
gcacagaaggctgttattatagtaaaagtttagatagatacataccagtgcagtgtatagctcatgattggtatccaata

SEQ ID NO: 149914 - DNA, 80 bp, synthetic construct
  source 1..80: mol_type = other DNA
gagctgggggaagtcccggctttgcaagctgctgaaaccggcgcgacgtctcttgtgtctgatgaaaacatgatagagac

SEQ ID NO: 149915 - DNA, 80 bp, synthetic construct
  source 1..80: mol_type = other DNA
tacagagccggtaaaggatattatgatcaagtcaatgccggcccttaattcaccatctgctgaggagtgtgggtacagcg

SEQ ID NO: 149916 - DNA, 80 bp, synthetic construct
  source 1..80: mol_type = other DNA
aaggccacggtgcactttcacaattttttgcttattatactggagagttaaatatccatgtactgtttttgtgtgaaaaa

SEQ ID NO: 149917 - DNA, 80 bp, synthetic construct
  source 1..80: mol_type = other DNA
gtcattaggaattaaaaagaaagatcttatagacaagaaaacaagagacattacaaagttgaagaaagcaattgatgaat

SEQ ID NO: 149918 - DNA, 80 bp, synthetic construct
  source 1..80: mol_type = other DNA
gatactgtaattaataatgcacttcagttgtcacagcccaggccaaataaacaactaactgcacagtccactgcatctac

SEQ ID NO: 149919 - DNA, 80 bp, synthetic construct
  source 1..80: mol_type = other DNA
ccagggcacgaggtttttgcaatgaaagtggatatagcatctcaacctttggcaacaacaatgattggggagatttccag

SEQ ID NO: 149920 - DNA, 80 bp, synthetic construct
  source 1..80: mol_type = other DNA
gattcattcatgcctataaataacatccccactatgattaacagcgtaggagcttacaacatccccataacaggtggaca

SEQ ID NO: 149921 - DNA, 80 bp, synthetic construct
  source 1..80: mol_type = other DNA
tggaggactatgtatctcagattaaaccgttcggagggtccttcagtaccaccacctggagcttaaaagtactgtgggac

SEQ ID NO: 149922 - DNA, 80 bp, synthetic construct
  source 1..80: mol_type = other DNA
acaaactaatacccacagtacgagaaaagaaggaaaccctggacgagtgcaagaaaatagcattatatcaagaacaagtc

SEQ ID NO: 149923 - DNA, 80 bp, synthetic construct
  source 1..80: mol_type = other DNA
attttctagggaggagtggttatacagtccatgttcagtgcaatgccagcaaattccaccaaggaacattgttagttgca

SEQ ID NO: 149924 - DNA, 80 bp, synthetic construct
  source 1..80: mol_type = other DNA
tgatattgggcatgtagtgatgcaatacatgtatgtcccaccaggtgctcctaaaccagaaaagagagacgactacactt

SEQ ID NO: 149925 - DNA, 80 bp, synthetic construct
  source 1..80: mol_type = other DNA
acaaacctttgatacaaaactactcccacaaacatctaccaaaggagaatggcaactaacatacactcaactcatgtcca

SEQ ID NO: 149926 - DNA, 80 bp, synthetic construct
  source 1..80: mol_type = other DNA
cagcctggacacatgtgccagacgcctgggcctctaagcccgcccccctcgctcctgatcctcccccggtccccagtaag

SEQ ID NO: 149927 - DNA, 80 bp, synthetic construct
  source 1..80: mol_type = other DNA
gtgtctctcgttgtcccccgcttcagaccccagattggcacacactatgttgggtgagatattaaattactacacacact

SEQ ID NO: 149928 - DNA, 80 bp, synthetic construct
  source 1..80: mol_type = other DNA
gtgccaagaacccaaggattaccagtcctgaacactccagggagtaaccagtacctgaccgcagacaattaccagtctcc

SEQ ID NO: 149929 - DNA, 80 bp, synthetic construct
  source 1..80: mol_type = other DNA
ggggtacgtgtgtgcctccgcctctcctctgtctgggccgccgccgccgcttgcccgccttgaaggagaggtggtagtcc

SEQ ID NO: 149930 - DNA, 80 bp, synthetic construct
  source 1..80: mol_type = other DNA
aagtcatctgtatattctttaccaccagatccaaaacattttgatggataccagcaacaggcagtagtgatattagatga

SEQ ID NO: 149931 - DNA, 80 bp, synthetic construct
  source 1..80: mol_type = other DNA
gaagctccccccactaatccatacaacactcccacctttgccataaagaagaaggacaaaaacaaatggagaatgttaat

SEQ ID NO: 149932 - DNA, 80 bp, synthetic construct
  source 1..80: mol_type = other DNA
tacggtgctgcatctttgaacgatttcggtatcctggccgttagggtggtcaatgaccacaaccccaccaaagtcacttc

SEQ ID NO: 149933 - DNA, 80 bp, synthetic construct
  source 1..80: mol_type = other DNA
cacaaccagggaaaaccatttggattgaacacaagctggtgaggatcgtggatgccgtggagttggtggacgagcaagga

SEQ ID NO: 149934 - DNA, 80 bp, synthetic construct
  source 1..80: mol_type = other DNA
tggtaaattactctgtaaacatggggtcataggcattgtcactgctggtggtgaggggcacgtggcattcactgatttac

SEQ ID NO: 149935 - DNA, 80 bp, synthetic construct
  source 1..80: mol_type = other DNA
aacaacaagtttcaaacaaaaaaatcctctttgtttggctttaacacatacaaccctgacataacaaacctaaaaaaggc

SEQ ID NO: 149936 - DNA, 80 bp, synthetic construct
  source 1..80: mol_type = other DNA
aaaccccttaaccagaacccccacgggggcggcatgagcactgtaaccttcagcctccaggtgctctatgaccagcacca

SEQ ID NO: 149937 - DNA, 80 bp, synthetic construct
  source 1..80: mol_type = other DNA
gtatataccatgaccagcatcagggtcccgggtaggcgccgacgttccagccagtacgcgtggcaacgcagagcgcaggg

SEQ ID NO: 149938 - DNA, 80 bp, synthetic construct
  source 1..80: mol_type = other DNA
acaacgatgcagaagaatggcaaaactactggtcaaaaaaaaatgaaaactatcaaggccaagcataccctcaagattca

SEQ ID NO: 149939 - DNA, 80 bp, synthetic construct
  source 1..80: mol_type = other DNA
aacaatttgacaatctttgcctggcagctctacgctacccaggctccaaattgtacccttctgtctacactctgttccct

SEQ ID NO: 149940 - DNA, 80 bp, synthetic construct
  source 1..80: mol_type = other DNA
agacgctgtactattaagggcattattccactggttatctgtggaaacactcaggcaggcagaaactatgccattagatc

SEQ ID NO: 149941 - DNA, 80 bp, synthetic construct
  source 1..80: mol_type = other DNA
tccgtgatggtgttggcaacgcgccgcacatagtggttggggtcgtccatctggatggcgtacacggcaccgaaccagtc

SEQ ID NO: 149942 - DNA, 80 bp, synthetic construct
  source 1..80: mol_type = other DNA
ttgtatatgacgatgatatcatagaggtgattgatgttgaaaccaccgaagaggagacgacgtcaatgcaaagacagcct

SEQ ID NO: 149943 - DNA, 80 bp, synthetic construct
  source 1..80: mol_type = other DNA
ccaggagcaccattaccaacaaaaagggatgattacacgtggcaatctggcacaaatgcttctgtattttggcaacatgg

SEQ ID NO: 149944 - DNA, 80 bp, synthetic construct
  source 1..80: mol_type = other DNA
ggtttgatgctgcgtgcaactggacgcggggagaccgttgcgaactggacgaccgtgaccgggtagtaatgtccccactg

SEQ ID NO: 149945 - DNA, 80 bp, synthetic construct
  source 1..80: mol_type = other DNA
gtcattaaatctaccagtcgccaagatagaaccaataaaaataatgctaaagccaggaaaagatggaccaagattgagac

SEQ ID NO: 149946 - DNA, 80 bp, synthetic construct
  source 1..80: mol_type = other DNA
caaacttttcatacaataggctttattaacacaggactaaaaccaggaaaaaaaggctccaatgaactatccagtgattt

SEQ ID NO: 149947 - DNA, 80 bp, synthetic construct
  source 1..80: mol_type = other DNA
caagtacttcgctcagacccaaggggatatagttaaaagagaagctactcgggatgcagggtatcacaccataaacacac

SEQ ID NO: 149948 - DNA, 80 bp, synthetic construct
  source 1..80: mol_type = other DNA
ttagagttctgcagtaagctgaagcagttagatatactagaaagacagataaccacaatgcacatttccaatcctacgca

SEQ ID NO: 149949 - DNA, 80 bp, synthetic construct
  source 1..80: mol_type = other DNA
cgggtgggcgggcatagaggcctaggtccacagttgtggtcttcatcgggcgcagcaggatggtggtcttgttgaccaag

SEQ ID NO: 149950 - DNA, 80 bp, synthetic construct
  source 1..80: mol_type = other DNA
tccgcgactgtgcccgtatctgaggactgcagatgtcaatttcgaggtcacacaggttactgatacacgagcagatgtga

SEQ ID NO: 149951 - DNA, 80 bp, synthetic construct
  source 1..80: mol_type = other DNA
atcattattagtacaaaaatgtactaccttcttttcctcggcagccactgaaattcttgataatgatttggtcaaatttg

SEQ ID NO: 149952 - DNA, 80 bp, synthetic construct
  source 1..80: mol_type = other DNA
agaaccatggagcttttggccaacagtccggagcgatctacgtgggcaactataaaataattaatagacacttggccaca

SEQ ID NO: 149953 - DNA, 80 bp, synthetic construct
  source 1..80: mol_type = other DNA
caccatgcaattcaccttagagactctctttgacgagtgggtaaaacacagatgtacctggagtagatcgaacaaagatt

SEQ ID NO: 149954 - DNA, 80 bp, synthetic construct
  source 1..80: mol_type = other DNA
gatacacaatcaccatcagctttgccgtatttccaccctactaaggaaatatttataccaggtgaagtcaagaacctctc

SEQ ID NO: 149955 - DNA, 80 bp, synthetic construct
  source 1..80: mol_type = other DNA
tcatattgatgaatacacttctgatactgacaggtgctattattacaataacactaaatatcaccaacctgacagcggct

SEQ ID NO: 149956 - DNA, 80 bp, synthetic construct
  source 1..80: mol_type = other DNA
ataggcaatgctgtatatgcacagtggtgctctgagagcagctgcaaactagaccccaaaaagtccaagtgcataatgag

SEQ ID NO: 149957 - DNA, 80 bp, synthetic construct
  source 1..80: mol_type = other DNA
gtcgcggacggggacggggacggtggtgaggacggcgcgttgcggagcgtcgcgggatggcgtggacggtggcctttcgc

SEQ ID NO: 149958 - DNA, 80 bp, synthetic construct
  source 1..80: mol_type = other DNA
tggatgtagagactgaggaccacatccaccaccttctcggaggaggcccccctaaacagcatcaggcagcaagggaacac

SEQ ID NO: 149959 - DNA, 80 bp, synthetic construct
  source 1..80: mol_type = other DNA
aaaaggaagattcaaaggatgagagggcttataacccaacactccctataacaaaaccaaaaggtacgttcccagtgtca

SEQ ID NO: 149960 - DNA, 80 bp, synthetic construct
  source 1..80: mol_type = other DNA
ccccagcgcaacccccggcggccagcacgcccagaagcccccgtccccgcaataccccgtccgcgccctcagcgcggaag

SEQ ID NO: 149961 - DNA, 80 bp, synthetic construct
  source 1..80: mol_type = other DNA
aacagatccaattctgtgcctcagcttgagcccagccagcgagcagcgcctgggatataccatgctaggagaaattttga

SEQ ID NO: 149962 - DNA, 80 bp, synthetic construct
  source 1..80: mol_type = other DNA
gcttaaaataattgcatatggtgatgatgttatattctcatatacatatgaattggacatggaagctatagcagtagagg

SEQ ID NO: 149963 - DNA, 80 bp, synthetic construct
  source 1..80: mol_type = other DNA
tggccatgatgacggcgatgataagatcgtccgagatacgattctggcgcttggccgagtagcgtgccgtcgtgccttcg

SEQ ID NO: 149964 - DNA, 80 bp, synthetic construct
  source 1..80: mol_type = other DNA
aggcggcgcatgaggcgcagtacctcacgccgcacggtccggcacaggtcatagatttcctccagcgaccaggaggcccc

SEQ ID NO: 149965 - DNA, 80 bp, synthetic construct
  source 1..80: mol_type = other DNA
taaatgtcaatcaaggaacagcaggcagtgcactggttgtatatgagccgaaacctgcagtcacccatagtgataaaatg

SEQ ID NO: 149966 - DNA, 80 bp, synthetic construct
  source 1..80: mol_type = other DNA
tggtttaatcagacgatcgaaaatttcattgcagacaggttcccaaatagaaagagcatttctccaggcaccagttgaag

SEQ ID NO: 149967 - DNA, 80 bp, synthetic construct
  source 1..80: mol_type = other DNA
atatgtcctcttgaaacatcaagtactgtcaatacaatacctattacaatatcaataagtcccatgtgtgcagagttttc

SEQ ID NO: 149968 - DNA, 80 bp, synthetic construct
  source 1..80: mol_type = other DNA
gcaggtccaagtgatctgtacgtccatactaaagatgctatctatatatgtgcacacttgaccaaaccaaatgacaacac

SEQ ID NO: 149969 - DNA, 80 bp, synthetic construct
  source 1..80: mol_type = other DNA
cagctgcccctgaccagttaggacccttgacggatgtctttaacggcgcggtgcagttggtcaccaatgacggcctaaag

SEQ ID NO: 149970 - DNA, 80 bp, synthetic construct
  source 1..80: mol_type = other DNA
tggcagaggccactaggttatgcaaagattgtccacagccagctaattttaaaaagtgttgtccacttgtgtgtggcaaa

SEQ ID NO: 149971 - DNA, 80 bp, synthetic construct
  source 1..80: mol_type = other DNA
ccatggattgcacaaggatactatcgccacaccaaatctgaccattatactgaggctggctttgtgtcactctggtacca

SEQ ID NO: 149972 - DNA, 80 bp, synthetic construct
  source 1..80: mol_type = other DNA
cgacagtgttagccaccctagctctcttgggatgtgattgttcaccgtggcaatggatcaagaagaaggcgtgtgacatt

SEQ ID NO: 149973 - DNA, 80 bp, synthetic construct
  source 1..80: mol_type = other DNA
aatagatgaaaattctacctgtataggcgacaacaactgcacaggattagggaaagaagaggtggttgagtgtgagttca

SEQ ID NO: 149974 - DNA, 80 bp, synthetic construct
  source 1..80: mol_type = other DNA
ccagaacatagtgttttagttacacgcggtgcgtttgggcagcagtccggagcagcatatataggcaactataaagttgt

SEQ ID NO: 149975 - DNA, 80 bp, synthetic construct
  source 1..80: mol_type = other DNA
cagaaaaggaactgaaagaagcatgccaaattgtatatactgcagatctagttatacaccgcacaagagacaaaggtgat

SEQ ID NO: 149976 - DNA, 80 bp, synthetic construct
  source 1..80: mol_type = other DNA
ccaccaaacactccaaacaatgcaaatatgatatgctttgtgtctggttgtaaggacttttgtcttcggatggcgcgcga

SEQ ID NO: 149977 - DNA, 80 bp, synthetic construct
  source 1..80: mol_type = other DNA
aactctatttacaactaaattactcccaagtaataacaccaaagacgaatggcaatacgcctataccccactaatgaaaa

SEQ ID NO: 149978 - DNA, 80 bp, synthetic construct
  source 1..80: mol_type = other DNA
agattttacacacttgagtctgtgcaatggggcaaaagttccaaaggttggtggtggaaactccccgattgtttaaagga

SEQ ID NO: 149979 - DNA, 80 bp, synthetic construct
  source 1..80: mol_type = other DNA
gtactagtaaaaaaaaaaaattctccaaattcgactgggaaacggaggcggagctagggcgcatcttcaggcggcccatg

SEQ ID NO: 149980 - DNA, 80 bp, synthetic construct
  source 1..80: mol_type = other DNA
agctgtagcatattgtgctttgtctcagcgtgcaatgatttctctgtcaggatgcttagagacacaaagttcatcagtca

SEQ ID NO: 149981 - DNA, 80 bp, synthetic construct
  source 1..80: mol_type = other DNA
ccagacacctctacaaacagattctacactctagagagtaaggtttgggattctgaatcaaaaggctggtggtggaaact

SEQ ID NO: 149982 - DNA, 80 bp, synthetic construct
  source 1..80: mol_type = other DNA
tcgtggtggtggaggcgaaggaaacgatggtggccgcgcagaaggaggcgatggaggagacttcgcacccgaagaactag

SEQ ID NO: 149983 - DNA, 80 bp, synthetic construct
  source 1..80: mol_type = other DNA
tgtccttgtcaatgtctctgtaatgacaccaccacaaattacttcgtaaatactactagcacaacagttaccagcaatat

SEQ ID NO: 149984 - DNA, 80 bp, synthetic construct
  source 1..80: mol_type = other DNA
aagtagggatcggtattttcccatagaagtcacaccacatgaatggtacccaatagaagaaacatgttactacccaaaac

SEQ ID NO: 149985 - DNA, 80 bp, synthetic construct
  source 1..80: mol_type = other DNA
aacagacaaccttcataagataagagagcaatactttaagtgggaaacagatgaaggcccccaagctacctcagactatg

SEQ ID NO: 149986 - DNA, 80 bp, synthetic construct
  source 1..80: mol_type = other DNA
gaaagccgggcccaggggattgatactattgctaggtgttcttgcaaatgtggtgtgtattactgtgagtctatgcgcaa

SEQ ID NO: 149987 - DNA, 80 bp, synthetic construct
  source 1..80: mol_type = other DNA
gatgactacacgtggcagagctcaactaacccatcagtattttacaccaccggaaatgcgagccctaggatgtcagttcc

SEQ ID NO: 149988 - DNA, 80 bp, synthetic construct
  source 1..80: mol_type = other DNA
attaccagcattgctgtcccattctatgcggcaaggctgttaccttgtttaacagaagaactcaagccagctattcaatc

SEQ ID NO: 149989 - DNA, 80 bp, synthetic construct
  source 1..80: mol_type = other DNA
gcagcacctatgacttccaaaactacagtacagaaactaactatcaaaagacatataatgcatggtcagatgacagaaat

SEQ ID NO: 149990 - DNA, 80 bp, synthetic construct
  source 1..80: mol_type = other DNA
ctagagttttaatagtaacaccatacacttacccaaaactatatagagaagacaacccaaattttggctttgttgtgtac

SEQ ID NO: 149991 - DNA, 80 bp, synthetic construct
  source 1..80: mol_type = other DNA
ccccaaaatgcccaaagcagacaatgcacatacctcaaaagaccctgaacagctaactaaaacaaacgtacaaaatacat

SEQ ID NO: 149992 - DNA, 80 bp, synthetic construct
  source 1..80: mol_type = other DNA
accccaaggacaacctataactggaaagtcactaacaggagttaacattatgagaaattccaaagtaactcagtttttaa

SEQ ID NO: 149993 - DNA, 80 bp, synthetic construct
  source 1..80: mol_type = other DNA
gcacctccccaccccttccaattacccttacccgaattgtattatgcggtaacattagaagaagtgaacacagtgcaata

SEQ ID NO: 149994 - DNA, 80 bp, synthetic construct
  source 1..80: mol_type = other DNA
aaagcagatagtacagagacatctagcggtggaaactgaaactgcagaaaaaatgccagccacaagtagaccaacagctc

SEQ ID NO: 149995 - DNA, 80 bp, synthetic construct
  source 1..80: mol_type = other DNA
aaaggaaagatgatttgatgcaggaggttttctccataagagttgacattgcatcacaaccacttgcaaccactatgatt

SEQ ID NO: 149996 - DNA, 80 bp, synthetic construct
  source 1..80: mol_type = other DNA
ccctggatgagatcacaaccctgattgtgaatgagaagaacaggcgtgcgaatataggaaattgcatggaagcgttattt

SEQ ID NO: 149997 - DNA, 80 bp, synthetic construct
  source 1..80: mol_type = other DNA
ttcctcctagaaccagcactcccactaggggagactgggaaaccgagtaccaggcctgcaaggcctttgatagacccccc

SEQ ID NO: 149998 - DNA, 80 bp, synthetic construct
  source 1..80: mol_type = other DNA
gttagcatggcattcaggtgagagtgagtataatgatttcctttctaaaattagaacaacagacataggaaagtgcttga

SEQ ID NO: 149999 - DNA, 80 bp, synthetic construct
  source 1..80: mol_type = other DNA
aaatacaaaggtaatgtaaaaatggaaattagtgaaaacatgaccattgccattgaccattatgcaggtcagttgctttc

SEQ ID NO: 150000 - DNA, 80 bp, synthetic construct
  source 1..80: mol_type = other DNA
ggagaaggtgctggaaatcttcttctaagaactgtggtggagcttcatcctgatataagatacatctacagaagtttaaa

SEQ ID NO: 150001 - DNA, 80 bp, synthetic construct
  source 1..80: mol_type = other DNA
ttttccatgacatctttcctggagagaaagcacctgcagtactttcaccaaaagacccaagattgcttgtatatttagat

SEQ ID NO: 150002 - DNA, 80 bp, synthetic construct
  source 1..80: mol_type = other DNA
catagaaagcctggctcactatagcagcccatatttgttccagggtgggggaaaggcacgtgcccttagaaaacttagct

SEQ ID NO: 150003 - DNA, 80 bp, synthetic construct
  source 1..80: mol_type = other DNA
gtcatcgtcgtccacgacgacgtgtctatagcgtgcggtgtgatcattgtgtcgagccagagaaagcgcgcctcgcacga

SEQ ID NO: 150004 - DNA, 80 bp, synthetic construct
  source 1..80: mol_type = other DNA
gagctcgagctcctccagcgaaagctcagagagcagcagctcctccaaatccagctccagcgtctcacagtctccctcgc

SEQ ID NO: 150005 - DNA, 80 bp, synthetic construct
  source 1..80: mol_type = other DNA
ctcaagtctctagacagaatgttggcacacactcgactcagaacactgtatcaaatggatctagcttaaattatttcaac

SEQ ID NO: 150006 - DNA, 80 bp, synthetic construct
  source 1..80: mol_type = other DNA
aaaccaactagacccgacacatctgcttgtaggttttacacgttggccagcaaaaattggaatcccacatcaaaaggatg

SEQ ID NO: 150007 - DNA, 80 bp, synthetic construct
  source 1..80: mol_type = other DNA
ttttagcactcgcacctgcaagcgctatcaaacctgatactcgatagtggtttagacacacaacacctcttgtgcttcgt

SEQ ID NO: 150008 - DNA, 80 bp, synthetic construct
  source 1..80: mol_type = other DNA
agaggcgtcttcaggaggcgccgatttgccagaagacgacctcgatggactgctcgccgccctagacgacgaagagtaag

SEQ ID NO: 150009 - DNA, 80 bp, synthetic construct
  source 1..80: mol_type = other DNA
gcggcctcatgtttcccatcattagcacgcgcatctccaccgtgaacctttacctgtcgcccgaacgtatgtttttccac

SEQ ID NO: 150010 - DNA, 80 bp, synthetic construct
  source 1..80: mol_type = other DNA
tcccttgtggtgcatggtatacggttacgcagactactgcagaaaagtcacaggagactcagccatactactagactgca

SEQ ID NO: 150011 - DNA, 80 bp, synthetic construct
  source 1..80: mol_type = other DNA
ggaaatgtatagagtgaagctgtcagacgctggtaaccgcgccaagccgattttgtgtttatcactttctccggcatcag

SEQ ID NO: 150012 - DNA, 80 bp, synthetic construct
  source 1..80: mol_type = other DNA
tgtacccacccacactgtccacggacgtagtgctctcatattacggtatgtttgcacgccagtttttcccccccttcccc

SEQ ID NO: 150013 - DNA, 80 bp, synthetic construct
  source 1..80: mol_type = other DNA
caactcagaccccgaggctgatgtcctggcagggcgcctgctccaccgccttaaggccgagtcagttacacacacagtag

SEQ ID NO: 150014 - DNA, 80 bp, synthetic construct
  source 1..80: mol_type = other DNA
ccccttgggaggagagaaaccaaattacttcttaaattttagggcagtcactgaaatagatctgatttcttttcttcaaa

SEQ ID NO: 150015 - DNA, 80 bp, synthetic construct
  source 1..80: mol_type = other DNA
tgacaaatttgtacaaggtatccgcagtacagatataggaagggttcttgtgataccaccatattcagttctcagacaca

SEQ ID NO: 150016 - DNA, 80 bp, synthetic construct
  source 1..80: mol_type = other DNA
gacaatcctgctgtaaatccacaacaaacattagctcaggctaaaactgttttaatttccaacatgaaaaactggcacaa

SEQ ID NO: 150017 - DNA, 80 bp, synthetic construct
  source 1..80: mol_type = other DNA
cccatcatctgtacaagaacaaattatactgtgttaaaggagggatgccatctgggtgctccggcacgtccattttcaac

SEQ ID NO: 150018 - DNA, 80 bp, synthetic construct
  source 1..80: mol_type = other DNA
cgctacgcgcgcgcgccggtgggctccgccccccggccccccccccgaagatcgtcactaaccacgtgactcctctcgcc

SEQ ID NO: 150019 - DNA, 80 bp, synthetic construct
  source 1..80: mol_type = other DNA
cacctttaaaaagcagtggaggaaccaactatgtcccaattacgatcacagtcgcacctatggatgccgagtacaacggg

SEQ ID NO: 150020 - DNA, 80 bp, synthetic construct
  source 1..80: mol_type = other DNA
gagattcagagaacatacgacatggcactaaataaaaatatgttcagttcactgttccttggttatctattagtgtacgc

SEQ ID NO: 150021 - DNA, 80 bp, synthetic construct
  source 1..80: mol_type = other DNA
atacaagaaattagagacaaaagattccagtttttaacatcagtagggtccacagccacacaaaaccagcatgtaaacac

SEQ ID NO: 150022 - DNA, 80 bp, synthetic construct
  source 1..80: mol_type = other DNA
gaaaagcagattgagaacctaagggcagcagacgcaaacacacaagagaaaattaagttagaaatcgataccctccatga

SEQ ID NO: 150023 - DNA, 80 bp, synthetic construct
  source 1..80: mol_type = other DNA
tcaaatttacttggacccaacagttttgctacaacttcaactccagagaataaagatgttgtacaagccaccacaactgt

SEQ ID NO: 150024 - DNA, 80 bp, synthetic construct
  source 1..80: mol_type = other DNA
tggattcacctcgttgactcagtttacacccaatttggtacatatagtgatagtgattagagaaaaataccacaatgggt

SEQ ID NO: 150025 - DNA, 80 bp, synthetic construct
  source 1..80: mol_type = other DNA
aacaccagtaagtaccctaacatgttcattcccgttggcgcggtgtcagagcagggaatgctaaaccttggtggtagacc

SEQ ID NO: 150026 - DNA, 80 bp, synthetic construct
  source 1..80: mol_type = other DNA
catacttgctatctcctttacctagagagcgcaaccacgtgaaaacaaaagaaacatctttaaaggcagtccagatggat

SEQ ID NO: 150027 - DNA, 80 bp, synthetic construct
  source 1..80: mol_type = other DNA
gcttgcccaaaatggcggtcaagctcttccgggtcaaaggttaactgctacgtcacaagtcacgtgggaaggcttggcgt

SEQ ID NO: 150028 - DNA, 80 bp, synthetic construct
  source 1..80: mol_type = other DNA
atcatggtgcagaacggcgacggagaggagcgtgtccgccgccgggaaggtggtctctttctcttttcttttttcaagaa

SEQ ID NO: 150029 - DNA, 80 bp, synthetic construct
  source 1..80: mol_type = other DNA
gtggtgggtctggacccgggccgtgcgagcaaaggcggcgagaaccgaggggcttctggtggtgactgtgatctgttccg

SEQ ID NO: 150030 - DNA, 80 bp, synthetic construct
  source 1..80: mol_type = other DNA
gatgagccctccaagcccggtccttctggggaccgtgcctggctgattgactcctggaactgggatgccacttcctctgc

SEQ ID NO: 150031 - DNA, 80 bp, synthetic construct
  source 1..80: mol_type = other DNA
cactaggtacctcccaagaagatcagtttataactgaatttttacaagttgcttttccagataacaaacccagacacgct

SEQ ID NO: 150032 - DNA, 80 bp, synthetic construct
  source 1..80: mol_type = other DNA
agaaaaatacaatgggcatgtatagagtagagctgggttcctctaaatcacaaacagatccaattttatgtctcagcttg

SEQ ID NO: 150033 - DNA, 80 bp, synthetic construct
  source 1..80: mol_type = other DNA
aacggtaagctcacgcactgctccgacgcctgtctgctcattctggcggcgcaaatgagctacggcgcctgtctcctggg

SEQ ID NO: 150034 - DNA, 80 bp, synthetic construct
  source 1..80: mol_type = other DNA
tcgtagccatgctgctgtttgtagctgtggggatcctgtacgccatcttactgctcttgctgaaagatatggcgtcccgg

SEQ ID NO: 150035 - DNA, 80 bp, synthetic construct
  source 1..80: mol_type = other DNA
aatgtactaaacacatacaaaacagagggcaactactctcacccacaactaaagaagtacatacctaaaaaaacagatcc

SEQ ID NO: 150036 - DNA, 80 bp, synthetic construct
  source 1..80: mol_type = other DNA
cgcagctgaaaaagccagagaggcatacacaactgcagccaaaaaaatagtcacaccctgggtgtttggcttacaggaaa

SEQ ID NO: 150037 - DNA, 80 bp, synthetic construct
  source 1..80: mol_type = other DNA
caatccatgcaagcaaaaaaaggatgcgaaaccaacatcgtggggtggggggggggtaaaagcaatgttaatcattggtc

SEQ ID NO: 150038 - DNA, 80 bp, synthetic construct
  source 1..80: mol_type = other DNA
caagatgttcatagacaagtggtacacccaagaggacctgtgccccgttattcttgtgtcacttgcggttagcgcagctt

SEQ ID NO: 150039 - DNA, 80 bp, synthetic construct
  source 1..80: mol_type = other DNA
aggtctacggtgtcgtgcggagatttgttctcctgaaaacagcagagaaccgagggtcggctcacctctatgttggtacg

SEQ ID NO: 150040 - DNA, 80 bp, synthetic construct
  source 1..80: mol_type = other DNA
ccgccaaccggagacccctcctaacggcctcagggggctgccggcactgccagcaccccctgaaccaccagcaccgccac

SEQ ID NO: 150041 - DNA, 80 bp, synthetic construct
  source 1..80: mol_type = other DNA
acaaacataccccagattctcacttccttttctcagcatagcatcagcttattacatgttctatgatggttatgatggtg

SEQ ID NO: 150042 - DNA, 80 bp, synthetic construct
  source 1..80: mol_type = other DNA
aaagttcagagagtatcaagcaaatttaggcagacaagggaaacctcttgcctcaacggctacattgactacaaaggtaa

SEQ ID NO: 150043 - DNA, 80 bp, synthetic construct
  source 1..80: mol_type = other DNA
ggtagctcttaaaaataaattaagcactcaatataacgccaccagtagcacaaaaaaacccacaaggggctatgctggta

SEQ ID NO: 150044 - DNA, 80 bp, synthetic construct
  source 1..80: mol_type = other DNA
aatcacttaatcggttcagaaggcgctgtggaaaggattcttaagaacttagtgaaacttatctctgcactcgtcatcgt

SEQ ID NO: 150045 - DNA, 80 bp, synthetic construct
  source 1..80: mol_type = other DNA
cgtcatacgactcaggtctttgaattctgtgttcacacaggacacggccagtgccgtctccaggaagcgaacatattgga

SEQ ID NO: 150046 - DNA, 80 bp, synthetic construct
  source 1..80: mol_type = other DNA
cagagataactttagttccatgcattgcagggcatggcaatgatataggtcatatagttatgcagtacatgtatgtacca

SEQ ID NO: 150047 - DNA, 80 bp, synthetic construct
  source 1..80: mol_type = other DNA
gccatggcgtgcttataagtgcagtattagtggatacgttgtgcgaagtttcatctgacgtgatagttacggtgattgtt

SEQ ID NO: 150048 - DNA, 80 bp, synthetic construct
  source 1..80: mol_type = other DNA
ctgcaaatcacaagatcggtatttcccaatcaaatgtactgcacatgattggtatgaaatccaagagacatcctactacc

SEQ ID NO: 150049 - DNA, 80 bp, synthetic construct
  source 1..80: mol_type = other DNA
gaatctaacattactcccttttatgtgctaaatgttaaaaaaggctcaaataccactcaacagttagactccaatgcacc

SEQ ID NO: 150050 - DNA, 80 bp, synthetic construct
  source 1..80: mol_type = other DNA
acatcgggcaggatccggaggtgcgggactgggctaatttcccaaacctcgtctcctctgcccccttcattgtcccaatg

SEQ ID NO: 150051 - DNA, 80 bp, synthetic construct
  source 1..80: mol_type = other DNA
agcgcttggggtattcgccgtaccagagatgtgcttggccggggacagtaacaccactaccacacacaccagctatcaaa

SEQ ID NO: 150052 - DNA, 80 bp, synthetic construct
  source 1..80: mol_type = other DNA
caaactgtgactttatattaagctttgacacggtgccccctatgaaaatgaatgaactaacaggcccaaacactcaccca

SEQ ID NO: 150053 - DNA, 80 bp, synthetic construct
  source 1..80: mol_type = other DNA
cctttcatgtaaatttctcccattatatgcaagtgaagcaaagaggattaaaattttacacaataggtgtagtactatta

SEQ ID NO: 150054 - DNA, 80 bp, synthetic construct
  source 1..80: mol_type = other DNA
cgcagtcaaggggcaattcgggctcgggactggccgggcagtgggcaaggctcttagggtcttcattcttaatatgtttg

SEQ ID NO: 150055 - DNA, 80 bp, synthetic construct
  source 1..80: mol_type = other DNA
ttacagctccactgaccaccccaggcatgctcatgaggagcaaatacaagataataatccccagctttaaaactagaccc

SEQ ID NO: 150056 - DNA, 80 bp, synthetic construct
  source 1..80: mol_type = other DNA
acaaatgcttgaccaatatggtgttgatctaccatacatcacatatctcaaggatgagctacgtagtccagagaaaatca

SEQ ID NO: 150057 - DNA, 80 bp, synthetic construct
  source 1..80: mol_type = other DNA
acgtgtcgctgacaccattgcgagtggcccgtctaattccgagagggtcccggcgctgacagccgctgaaacaggtcaca

SEQ ID NO: 150058 - DNA, 80 bp, synthetic construct
  source 1..80: mol_type = other DNA
acacgagatcaattgaggcttacggtatccccgtcaagacagggataacatctcaacaggtttttgggtttcgggtccaa

SEQ ID NO: 150059 - DNA, 80 bp, synthetic construct
  source 1..80: mol_type = other DNA
gtaccaccatttttaatgacatgggtaggctctgcttccgggcgttggaagacaccacacagaaaactgtcaaagtgtac

SEQ ID NO: 150060 - DNA, 80 bp, synthetic construct
  source 1..80: mol_type = other DNA
aacgaatgcatgatgaacaaattgatgttccagactttacacaacagcctaaaatcccccgcattttcccaccagtcgag

SEQ ID NO: 150061 - DNA, 80 bp, synthetic construct
  source 1..80: mol_type = other DNA
ccaaggtctcggggatacgcaaccaccagggtttattgttgatctcctatcagcttcaaaagatccaaaagttctggagt

SEQ ID NO: 150062 - DNA, 80 bp, synthetic construct
  source 1..80: mol_type = other DNA
ccgggggcccgtcgcacaccacgctccgtcttcttgtcctcaccgcggccagcgtggcgaggacactttccgcgcccgag

SEQ ID NO: 150063 - DNA, 80 bp, synthetic construct
  source 1..80: mol_type = other DNA
acgctccctagaatcctacaagtcagtgacccgacgcaacttggaccgaaaacaatcttccacctctgggaccagaggcg

SEQ ID NO: 150064 - DNA, 80 bp, synthetic construct
  source 1..80: mol_type = other DNA
accagaacaacaatcaaaacggctggacctagtgacctatttgtccatacagaacaagccatttacaaaaatgcacacct

SEQ ID NO: 150065 - DNA, 80 bp, synthetic construct
  source 1..80: mol_type = other DNA
gtatgaagcgagaggcaaccctgaaagcacagaccgctttgatgcatgggaggtgggtgtgcgcgacatggtacagatgc

SEQ ID NO: 150066 - DNA, 80 bp, synthetic construct
  source 1..80: mol_type = other DNA
tttggcagcactaaagataagcagattgaagtactagactggctataccagaaccacaatgtgtgggccagtcatctcac

SEQ ID NO: 150067 - DNA, 80 bp, synthetic construct
  source 1..80: mol_type = other DNA
aaacccttgcgtcaccttccaagttctgcaaaatttctataacaatgttataggctacacctcagcagacacactagtag

SEQ ID NO: 150068 - DNA, 80 bp, synthetic construct
  source 1..80: mol_type = other DNA
tgatgtaaccgcgcaatgtgtcataggtgaactgcagctgggcgtagaccagattgtgcaccgattccatgctggataaa

SEQ ID NO: 150069 - DNA, 80 bp, synthetic construct
  source 1..80: mol_type = other DNA
agtttgtacttaatatataaagtgtatataattaaatggtgtgtcaataatttaaactacctattgaatattaaacaaaa

SEQ ID NO: 150070 - DNA, 80 bp, synthetic construct
  source 1..80: mol_type = other DNA
gaggcatgagcacagtaacattcagcctatttgtactatatgaccagtggaccagacacctaaaccgctggtcctaccca

SEQ ID NO: 150071 - DNA, 80 bp, synthetic construct
  source 1..80: mol_type = other DNA
acggaaagaccccagagggactaggccaagtacacccttactggatgcagagatggagaccctatgtacagttccaaaaa

SEQ ID NO: 150072 - DNA, 80 bp, synthetic construct
  source 1..80: mol_type = other DNA
ccccgggccaggccaccttagacccggccaagccccatccctgaagacccagcggccattctctctggtaacgagcagag

SEQ ID NO: 150073 - DNA, 80 bp, synthetic construct
  source 1..80: mol_type = other DNA
accttggaccatctgatctctacgtacacactggaaacctcatatacagaaacttacatttgtgtgaaccagaaaattta

SEQ ID NO: 150074 - DNA, 80 bp, synthetic construct
  source 1..80: mol_type = other DNA
tcactattggaaactccactataacaactcaggactctctgaacactgtcttagcctatggggaatggcctacttatttg

SEQ ID NO: 150075 - DNA, 80 bp, synthetic construct
  source 1..80: mol_type = other DNA
ttagacttaacaactagtgctggtttcccctatgtttcaatgggcatcaagaagaaagacttggtaaataaaactacaaa

SEQ ID NO: 150076 - DNA, 80 bp, synthetic construct
  source 1..80: mol_type = other DNA
tattcaaatcgcaatatgcgccaggcacgaccactgaggatgctagagcattcagtcctattgactacttatttgggtca

SEQ ID NO: 150077 - DNA, 80 bp, synthetic construct
  source 1..80: mol_type = other DNA
ctttacgtacatccggcaatgcccctcaaactctaccagttaccatttccattgcaccagacaaatcagaattctctgga

SEQ ID NO: 150078 - DNA, 80 bp, synthetic construct
  source 1..80: mol_type = other DNA
atgggagcacaggtgtctacgcagcggtccggatctcacgagaccagcaccgtggcaagagagggttcgacaataaactt

SEQ ID NO: 150079 - DNA, 80 bp, synthetic construct
  source 1..80: mol_type = other DNA
cggttcctcagccagttgaccgttgttaagtcccggcagcgctgagatgcgcgttaccagacgcagcacggcgaccagat

SEQ ID NO: 150080 - DNA, 80 bp, synthetic construct
  source 1..80: mol_type = other DNA
ccaatgcagtcacaaaagcaaggcattcccacacgggcaccaagtggttcacagcagtttatgaccactgaagatgagca

SEQ ID NO: 150081 - DNA, 80 bp, synthetic construct
  source 1..80: mol_type = other DNA
gggagatcaacaccaggcaggtggcgcagttaagaaggaaactggagtttttcacatacatcaggttcgatatggaggtg

SEQ ID NO: 150082 - DNA, 80 bp, synthetic construct
  source 1..80: mol_type = other DNA
taaacgagtgtcagaatacgcagacactaatgagtatttttcaacaggcgtcgggttcaaaagaccccgtctggacactc

SEQ ID NO: 150083 - DNA, 80 bp, synthetic construct
  source 1..80: mol_type = other DNA
aatgaacttctcacaaatatcgggaagcttaagaaagggctggacacactggcacctttgtatgcggtggaaaacaagaa

SEQ ID NO: 150084 - DNA, 80 bp, synthetic construct
  source 1..80: mol_type = other DNA
ccagtatgtcccagatacgtagaaacacaatcacaggaagatgaacaagacgacgattatacactaagcactaccataaa

SEQ ID NO: 150085 - DNA, 80 bp, synthetic construct
  source 1..80: mol_type = other DNA
ccagaggtgtccgtggggcaccaggagctgtctccgctcatgtccagaagccatggagggcagacggatgtcaggtcgtg

SEQ ID NO: 150086 - DNA, 80 bp, synthetic construct
  source 1..80: mol_type = other DNA
aagagaatggagtgataaattattccgtactcgatctaacagccgaagagttggaggcaattaaacatcaattgaatccg

SEQ ID NO: 150087 - DNA, 80 bp, synthetic construct
  source 1..80: mol_type = other DNA
attacccaaaaaggcagtaacacctggaaatgacaaaacatactttactgtacccgatggcttatggggagacgctgtat

SEQ ID NO: 150088 - DNA, 80 bp, synthetic construct
  source 1..80: mol_type = other DNA
taactatgaagttaataatccagttagcaaaaaagtatggccacaacctagtacaacaacacccacagtagactactatg

SEQ ID NO: 150089 - DNA, 80 bp, synthetic construct
  source 1..80: mol_type = other DNA
tggggaatgctcgctgctgtccttttatttgtggaaaagctgtaatctttagggacagaaacacatgccaaacttacacc

SEQ ID NO: 150090 - DNA, 80 bp, synthetic construct
  source 1..80: mol_type = other DNA
tgtgtcacttgcggttagcgcagcttcctttctacatccgttctgccctccggaagctgacaacccttgcattactttcc

SEQ ID NO: 150091 - DNA, 80 bp, synthetic construct
  source 1..80: mol_type = other DNA
cggaatatatgatggccagcaactcaggcaccagcactggaggcattacctaccaatacgccaatcccggagaaactggc

SEQ ID NO: 150092 - DNA, 80 bp, synthetic construct
  source 1..80: mol_type = other DNA
tgacatctatgaccacaacccaaagagaagccaaaaatttaacaagaagaaatatttgacagcatcaacaaaatataaat

SEQ ID NO: 150093 - DNA, 80 bp, synthetic construct
  source 1..80: mol_type = other DNA
agtatcaacaaatcattactttcaaatactagatggtctctggggaaacccaatatatgctaactctagaaacaacggag

SEQ ID NO: 150094 - DNA, 80 bp, synthetic construct
  source 1..80: mol_type = other DNA
gagcatcagctaggtaagtataacacgggaacttcggcatcctttgatgatgtcatgaaagggaagactgggggaatttt

SEQ ID NO: 150095 - DNA, 80 bp, synthetic construct
  source 1..80: mol_type = other DNA
aaaaacagcggacagtcccacgctgtttctgttgtggctctctccagtttcctcatcgccgtcccgatctccgtcgtcat

SEQ ID NO: 150096 - DNA, 80 bp, synthetic construct
  source 1..80: mol_type = other DNA
tttgagtcacagtacaaccccgggagtaccatcgaaacagcacgcaagttttgcccaattgattacttgtttggttcagg

SEQ ID NO: 150097 - DNA, 80 bp, synthetic construct
  source 1..80: mol_type = other DNA
tgttcaggatctccatggaggtttattaaagataaagtctgtaagtggttacagttgacttatgtacataaagaatcaga

SEQ ID NO: 150098 - DNA, 80 bp, synthetic construct
  source 1..80: mol_type = other DNA
tttgtgtgagccggaagttggcaatggtgtgagggtggcgctggttaagctgacgacctcccaaggtctctcaccctggg

SEQ ID NO: 150099 - DNA, 80 bp, synthetic construct
  source 1..80: mol_type = other DNA
ctattatgaaaatgcacaaatcagaaagaaactggagttgtttacatatgttaggtttgatctagaaatcactgttttaa

SEQ ID NO: 150100 - DNA, 80 bp, synthetic construct
  source 1..80: mol_type = other DNA
acaagtagtgttacattctttttattttctgatctcaatcaaatctttagagattacagacaccatgtttgacatctttc

SEQ ID NO: 150101 - DNA, 80 bp, synthetic construct
  source 1..80: mol_type = other DNA
ctgaaatatttgcaataccagttgacatagcagctcagccattagcaacgaccctcataggtgaaattgctagttattac

SEQ ID NO: 150102 - DNA, 80 bp, synthetic construct
  source 1..80: mol_type = other DNA
tggggagatgctattcacataacaagcgagcaaaatcttcaaaaagttaaagacataataatttcaaatgcaaagaacta

SEQ ID NO: 150103 - DNA, 80 bp, synthetic construct
  source 1..80: mol_type = other DNA
aaaagatacaacacaatttgatgaaaaacaatgtaaatgccacataaaagacatacccctttgggctgccttttatggat

SEQ ID NO: 150104 - DNA, 80 bp, synthetic construct
  source 1..80: mol_type = other DNA
tgactcagtggaaccctagcacaattaggggatgtacaattaagggaatggcgcccctaatagtgtgcggccacaccatg

SEQ ID NO: 150105 - DNA, 80 bp, synthetic construct
  source 1..80: mol_type = other DNA
gaggagaaagctggagttttttacatattccaggttcgatatggaattcacctttgtaatcactgccaactttacagaaa

SEQ ID NO: 150106 - DNA, 80 bp, synthetic construct
  source 1..80: mol_type = other DNA
tgctggggacattttcagctagagttgtgagcaagcaaattaccaatcagaagttccagattcgtatttatttgcggctt

SEQ ID NO: 150107 - DNA, 80 bp, synthetic construct
  source 1..80: mol_type = other DNA
agcctggctcaaacgctgcttggtaatctgtacgggaacatcaaccagtgggtaccgtccttcggaccctggtacaggac

SEQ ID NO: 150108 - DNA, 80 bp, synthetic construct
  source 1..80: mol_type = other DNA
aaactaggtatgttattaacaatcatgtcaataacgaagcattgatagaaaacttcttaggcaggtcagcattatgggca

SEQ ID NO: 150109 - DNA, 80 bp, synthetic construct
  source 1..80: mol_type = other DNA
aagccttccagtggcaatcttcaaccaacccgtctgtattcagtaaaatgacagacccaccaccgcaggtctcagtgcca

SEQ ID NO: 150110 - DNA, 80 bp, synthetic construct
  source 1..80: mol_type = other DNA
aaaagaccccttaccaggtgtagaaaccttctacacagatggatcctgcaataggcaatcaaaagaaggaaaagcaggat

SEQ ID NO: 150111 - DNA, 80 bp, synthetic construct
  source 1..80: mol_type = other DNA
gcactacagctatgaacaggagatttttcttagacttggatatagtggttaaggaggactttaaaatcaatcagggtaga

SEQ ID NO: 150112 - DNA, 80 bp, synthetic construct
  source 1..80: mol_type = other DNA
ggaagacagaagtgggccgtagattgtatctcccaccatacaatctactggagcgcacttggattgacaaatttatctga

SEQ ID NO: 150113 - DNA, 80 bp, synthetic construct
  source 1..80: mol_type = other DNA
agatacttaatgttgatggtcgtgacatcaaagtaatcaagagacaaattttaactgatatgaatgatgtggacactgag

SEQ ID NO: 150114 - DNA, 80 bp, synthetic construct
  source 1..80: mol_type = other DNA
gggaatatttggtcagaacatgtattatcactctatgggtagatctggttacatcatacatacacaatgcaatgcaacta

SEQ ID NO: 150115 - DNA, 80 bp, synthetic construct
  source 1..80: mol_type = other DNA
agatatagccccctacttagaacaaccaacagcaacaaacttaacaaagacattatccacaggtaacaactcaatatatg

SEQ ID NO: 150116 - DNA, 80 bp, synthetic construct
  source 1..80: mol_type = other DNA
tgtaatgatttcagcgtgcgactgcttcgggacacaacccacattgagcaaaaagcgctatcgcagggcctgggacagat

SEQ ID NO: 150117 - DNA, 80 bp, synthetic construct
  source 1..80: mol_type = other DNA
tactcatttagatttacatggggcggtaatcctatctctgcacagattgttaaagacccctgcacccagcccacctttga

SEQ ID NO: 150118 - DNA, 80 bp, synthetic construct
  source 1..80: mol_type = other DNA
acacaaaaccagacacacagctctccgtacccagttgcaagtgtgtcatagaggacaagcccctgtgggcggccttctat

SEQ ID NO: 150119 - DNA, 80 bp, synthetic construct
  source 1..80: mol_type = other DNA
acaaggcacatatgcagactgatcaagggaaagatgaccctgacagaggaggtgcagtggacagaactagcagaggcaga

SEQ ID NO: 150120 - DNA, 80 bp, synthetic construct
  source 1..80: mol_type = other DNA
taggtcaggatgtatccatatatcaacaattaatgtggatagcacaaaaacatatgatgaatccaaatttagaacatggc

SEQ ID NO: 150121 - DNA, 80 bp, synthetic construct
  source 1..80: mol_type = other DNA
atgacctgcaatcaccatcagccttaccatggtatcacccaacaaaagagattatgataccaggcgaggtcaagaatttg

SEQ ID NO: 150122 - DNA, 80 bp, synthetic construct
  source 1..80: mol_type = other DNA
aaatcttcaaaacgcaagcgggtctccacataaaccctatattattaagccatgtctaacaacagcttacatgttctctc

SEQ ID NO: 150123 - DNA, 80 bp, synthetic construct
  source 1..80: mol_type = other DNA
actgtggtgacatcctgcgttgcaatcacggggtgatcgggatcgtcactgctggtggcaatggcatcgttgcatttgct

SEQ ID NO: 150124 - DNA, 80 bp, synthetic construct
  source 1..80: mol_type = other DNA
gttttatcgttgtgtcacttaatgtggcataatggtaaagacgtgtataagcagtttgaaagaaagatacgcagtgttag

SEQ ID NO: 150125 - DNA, 80 bp, synthetic construct
  source 1..80: mol_type = other DNA
gcgtggagaacttctttgggcgagcagcctgtgtcaaagtgagaacatacaacattggacccaacattaaagaagaagat

SEQ ID NO: 150126 - DNA, 80 bp, synthetic construct
  source 1..80: mol_type = other DNA
gtaaatctgtattgggtaatggttgtccctttacatcttcaaacacaacaagcattttatcaattgcacaccctaattca

SEQ ID NO: 150127 - DNA, 80 bp, synthetic construct
  source 1..80: mol_type = other DNA
ggcggcgccgccgatacaggcgcagacccagacggtggcgacgaaggaggggacgcagacgcagacgcagaaagactcta

SEQ ID NO: 150128 - DNA, 80 bp, synthetic construct
  source 1..80: mol_type = other DNA
aaccacgggtaatgttacagcaggttataactacacacacccaggagaacttggtagaactgtgggtcagagaagatctg

SEQ ID NO: 150129 - DNA, 80 bp, synthetic construct
  source 1..80: mol_type = other DNA
ccgccgtagccggccagccccaggccgtgcgggctggtcgccgagtggggggattcgtcgagacccagtaggtgcgtctc

SEQ ID NO: 150130 - DNA, 80 bp, synthetic construct
  source 1..80: mol_type = other DNA
aatcctagcacagagacggcacaggcttggaatgccggcttgctccgggggcgtgcgtacgggcaagacttgcttagaac

SEQ ID NO: 150131 - DNA, 80 bp, synthetic construct
  source 1..80: mol_type = other DNA
ttagtgcagtatgacatctctgctccctacaagctagacaaagacagcggaccgtcctaccatccgggagtactcatgca

SEQ ID NO: 150132 - DNA, 80 bp, synthetic construct
  source 1..80: mol_type = other DNA
ctcttctaaggcggtactttgctcaaccacagggtgagatcaccagcaaaaagagcaccactgaagtgggtttaaaccca

SEQ ID NO: 150133 - DNA, 80 bp, synthetic construct
  source 1..80: mol_type = other DNA
aacccactggagccatccgacaccgttcaaaccagacatgtgattcaaactaggtcaagatcggagtccacagtagagtc

SEQ ID NO: 150134 - DNA, 80 bp, synthetic construct
  source 1..80: mol_type = other DNA
gataacaaaaaacagtataatgaaacatggtactcaacagatgtagtttgtgaatcaaataataccagatgttacatgaa

SEQ ID NO: 150135 - DNA, 80 bp, synthetic construct
  source 1..80: mol_type = other DNA
atgggtgcacaggtttcatcacagaaagtgggagcacatgaaaacaccaatgtggcaacaggtggttccactgtgaatta

SEQ ID NO: 150136 - DNA, 80 bp, synthetic construct
  source 1..80: mol_type = other DNA
cagaggaagtaagccgacacgccaagggtcaccgcacggtggcccagatgagcaaggcgctcaaaaagacggcctccaaa

SEQ ID NO: 150137 - DNA, 80 bp, synthetic construct
  source 1..80: mol_type = other DNA
atttgtggttagcctagcttccttccaacatccgttctgccgaccacaaactgacaatccttgtgtaaccttccaagttc

SEQ ID NO: 150138 - DNA, 80 bp, synthetic construct
  source 1..80: mol_type = other DNA
ggagagacagtaactttctctttgccacctatcaccctgaccaagtaaaagacacaataaaaaaaatgagagacaataat

SEQ ID NO: 150139 - DNA, 80 bp, synthetic construct
  source 1..80: mol_type = other DNA
gtggacacatgtgacacaccaggaccagataatatacctgtttgtgattgcacagagggctgttactactcacgctctaa

SEQ ID NO: 150140 - DNA, 80 bp, synthetic construct
  source 1..80: mol_type = other DNA
acttcgggctcgcgggggtcgggagctttattaaacagactccaggttgccattggacactggagctgtgaatccagtaa

SEQ ID NO: 150141 - DNA, 80 bp, synthetic construct
  source 1..80: mol_type = other DNA
ctactccatttatacctatcacattatccataagtccaatgtgttcagaattttctggtgccagaaacaacaccacacaa

SEQ ID NO: 150142 - DNA, 80 bp, synthetic construct
  source 1..80: mol_type = other DNA
agatcgcagcagaatcagcgagctacagcggagacaaatctagcggctggcaacaattcacaatcagtggctacgtcatt

SEQ ID NO: 150143 - DNA, 80 bp, synthetic construct
  source 1..80: mol_type = other DNA
agaatctttgacaggccccctagatcccagcttacagaccctcctttctacccctactgcaaaaacaattacaatgttac

SEQ ID NO: 150144 - DNA, 80 bp, synthetic construct
  source 1..80: mol_type = other DNA
agactaagatacctgaaagaaggatagtagcccagggtccagaggaagaatttgggcgttctcttatcaaacataacaca

SEQ ID NO: 150145 - DNA, 80 bp, synthetic construct
  source 1..80: mol_type = other DNA
cttctttttggtggaatatgtttacgtaccacttggctctcattcttgtgggcacgttggagctgcctccaggcattttt

SEQ ID NO: 150146 - DNA, 80 bp, synthetic construct
  source 1..80: mol_type = other DNA
ttcatgccctcctcagttccctagtccccgggcttcagcccccctccgtccccgtcctccagagacccgggcttcaggcc

SEQ ID NO: 150147 - DNA, 80 bp, synthetic construct
  source 1..80: mol_type = other DNA
catgggtgcctcgtgcaccacgcttgtgcccgtatttgtatgcaagaaacgttaactttgatgtgcaaggggtaaccgaa

SEQ ID NO: 150148 - DNA, 80 bp, synthetic construct
  source 1..80: mol_type = other DNA
ttgaccccctgtaccacgtgtcctaaaccatcatattacaaatcttgctgcccgcttttgtgtgggaaggctgtggtagt

SEQ ID NO: 150149 - DNA, 80 bp, synthetic construct
  source 1..80: mol_type = other DNA
gcgtgtggacgagctatatgtggcaggaggtcgcgtcacctcttgtgacgcctaaacgtccagctccagataaaagaggc

SEQ ID NO: 150150 - DNA, 80 bp, synthetic construct
  source 1..80: mol_type = other DNA
gtaagcttaccggtcttaagctgcaggaattatcccgggttgtggcaagcttatcatcgtgtttttcaaaggaaaaccac

SEQ ID NO: 150151 - DNA, 80 bp, synthetic construct
  source 1..80: mol_type = other DNA
acagagcatggatgcataccacatagaagtgaatacaggtaaccaccagggtgataaaatatttgcctttcaaatacaac

SEQ ID NO: 150152 - DNA, 80 bp, synthetic construct
  source 1..80: mol_type = other DNA
ctgaggcggaagtttgaattgttcacctacatgcgattcgacatggagatcacatttgtcatcaccagcagacagttgcc

SEQ ID NO: 150153 - DNA, 80 bp, synthetic construct
  source 1..80: mol_type = other DNA
gtcataagtcacgtgacagggaggagttaccatatgcggaagtaatcctcgcccacgtgacttgtcacgtggtgcatgcg

SEQ ID NO: 150154 - DNA, 80 bp, synthetic construct
  source 1..80: mol_type = other DNA
caggacccgtccacaaatgtcagtcaagacgctccagtgttgactcaccagcttatgtacgtgccacccggcggtcctgt

SEQ ID NO: 150155 - DNA, 80 bp, synthetic construct
  source 1..80: mol_type = other DNA
ttttggaagaaatattctggtcaaattaggaatgtctctaaatttcccagtggcaaaggtagaaacagtaaaagtaacac

SEQ ID NO: 150156 - DNA, 80 bp, synthetic construct
  source 1..80: mol_type = other DNA
ctataatccagtacatggatgacattctcgtggcaagtgacaggagcgatctggagcatgacagggtagtgtctcaacta

SEQ ID NO: 150157 - DNA, 80 bp, synthetic construct
  source 1..80: mol_type = other DNA
tccgtcttatgagagacagtcctgatattgggcaatcacagcaattggaaggggccactgctgccttccagatagaagag

SEQ ID NO: 150158 - DNA, 80 bp, synthetic construct
  source 1..80: mol_type = other DNA
atacgagggacacctcagacacgagaactactggacttacagtaaccagaacctagaactgggcagatacaagggggcca

SEQ ID NO: 150159 - DNA, 80 bp, synthetic construct
  source 1..80: mol_type = other DNA
ttttgtacgccagttttgcttccctccccaatggtaacttagaagatgtacacaacgaccaacaggcggtggttacccaa

SEQ ID NO: 150160 - DNA, 80 bp, synthetic construct
  source 1..80: mol_type = other DNA
acgggtcacacatcacaagcagaacctagtgacacaatccagacaaggcatgtgataaaccatcacaaaagatccgagtc

SEQ ID NO: 150161 - DNA, 80 bp, synthetic construct
  source 1..80: mol_type = other DNA
gtggcaggagcggtaaggaatcatcgtcgtctttcattcttcgatgattatggtaatactaaatcttatctaggagcata

SEQ ID NO: 150162 - DNA, 80 bp, synthetic construct
  source 1..80: mol_type = other DNA
gattctacactttgaggtcagtcaaatgggaggctacaagtacaggatggtggtggaaactacccgatgcactaaataat

SEQ ID NO: 150163 - DNA, 80 bp, synthetic construct
  source 1..80: mol_type = other DNA
aggacccacgacttagtgttgattttaaaacagctttattttctaaatacaaaggaaacaatacatgtgaattgaatgac

SEQ ID NO: 150164 - DNA, 80 bp, synthetic construct
  source 1..80: mol_type = other DNA
tatgtcatggaccataaatgcaaggaggatggtgcaattgagacgaaagttcgaaatgttcacctacatgcggtttgaca

SEQ ID NO: 150165 - DNA, 80 bp, synthetic construct
  source 1..80: mol_type = other DNA
tggtctccttatttctaaggttgaagggaatttcaaaatattgggcatgcatattgctggcaatggtgaaatgggagttg

SEQ ID NO: 150166 - DNA, 80 bp, synthetic construct
  source 1..80: mol_type = other DNA
aggccaagctataacagacggtaataaccaacctaacatgtgggccaaagtacaaaacacaacagcactatcacctactg

SEQ ID NO: 150167 - DNA, 80 bp, synthetic construct
  source 1..80: mol_type = other DNA
ttccttatgtacctagaccgagtgaatcgtggcttagaaaagtcacagaagcatgcaatgctctcagaggtctagattgg

SEQ ID NO: 150168 - DNA, 80 bp, synthetic construct
  source 1..80: mol_type = other DNA
aagctacagcgctcgcgggcgaactttccgcgtgcaacgtcgaccagggtctgccagtgtgcgatgctggaggtgagcac

SEQ ID NO: 150169 - DNA, 80 bp, synthetic construct
  source 1..80: mol_type = other DNA
gggggaagcaacggccacgaagtacggcacaagccgcgtcgagagaagaggggtccggccgaggagagtggtgtggctcg

SEQ ID NO: 150170 - DNA, 80 bp, synthetic construct
  source 1..80: mol_type = other DNA
tgtaattataccttgttcagtcatccatttaacatactttcaaaatattgcaccaataaaattggggctgaaagtatgtt

SEQ ID NO: 150171 - DNA, 80 bp, synthetic construct
  source 1..80: mol_type = other DNA
cagagtgtgcaaggattgccatcaaccaacaaattttaaaaagtgctgtccacttgtttgtggaaaagctactagtttgg

SEQ ID NO: 150172 - DNA, 80 bp, synthetic construct
  source 1..80: mol_type = other DNA
acaagagaatgatgaaattggcctatttggacaggggtttttacaaacattatggtataatagttgaagactatgtttac

SEQ ID NO: 150173 - DNA, 80 bp, synthetic construct
  source 1..80: mol_type = other DNA
tacctctcaaagtccgacgccgtctggaaaccccctcagagcaaatgcaccattaaagaccagcccctctgggccgcctt

SEQ ID NO: 150174 - DNA, 80 bp, synthetic construct
  source 1..80: mol_type = other DNA
ggcaaatcataaatacttggcacaaagtagggaaaaatgtgtacctgcctccaagagaaggtaatctaacgtgtaactca

SEQ ID NO: 150175 - DNA, 80 bp, synthetic construct
  source 1..80: mol_type = other DNA
gcccagcggcatgacgggctcgcgcgtgtacaacgaacgttgaaagcggcgcagcatcgaggccgagagccccagatcgc

SEQ ID NO: 150176 - DNA, 80 bp, synthetic construct
  source 1..80: mol_type = other DNA
atccaaaagtagtcaatgtaggacctagcgacatgtttgtacatgctggtaaccttatatatagaaatcttcacttgttc

SEQ ID NO: 150177 - DNA, 80 bp, synthetic construct
  source 1..80: mol_type = other DNA
aggtcaaccaggagacagaggcccgtctctacccaagccctcatctcctccgttttaccgatgacgacggacagcgagga

SEQ ID NO: 150178 - DNA, 80 bp, synthetic construct
  source 1..80: mol_type = other DNA
ctgaacatgagtttatgtatgcactaataaaaagaaattgtcatatagttgaaacagacaaaggtgaatttaacatgcta

SEQ ID NO: 150179 - DNA, 80 bp, synthetic construct
  source 1..80: mol_type = other DNA
gacacctgcccaggattgggagaagaagagatggtcgggtgtcaattcaatatgacaggattagaaagagataagaaaaa

SEQ ID NO: 150180 - DNA, 80 bp, synthetic construct
  source 1..80: mol_type = other DNA
atacaagagatcaaagaaaaaggagtaggattaattggtgagtgtagagctttccttgattcaataactaccactttgaa

SEQ ID NO: 150181 - DNA, 80 bp, synthetic construct
  source 1..80: mol_type = other DNA
ttttgagccaacaaacttaaccgataaaagggaaagcataacatatgtgcctgatacaatccgcccagatgtccgcacgg

SEQ ID NO: 150182 - DNA, 80 bp, synthetic construct
  source 1..80: mol_type = other DNA
tttgaatcgattagatggaccagagacccaaagaacactcaagaccatgtatactctttatgtcttttgatgtggcacaa

SEQ ID NO: 150183 - DNA, 80 bp, synthetic construct
  source 1..80: mol_type = other DNA
acaccactgattcacattcccggggagttcacatcactcctggacctgtgccgaatagaaaccattctggaggtcaataa

SEQ ID NO: 150184 - DNA, 80 bp, synthetic construct
  source 1..80: mol_type = other DNA
gtccccatactcctgctcagccgtcttgttaaagttaaccggcggtggaggatccaccggccagacctctacatttggtt

SEQ ID NO: 150185 - DNA, 80 bp, synthetic construct
  source 1..80: mol_type = other DNA
accggaaaagtttatggggaaaaagacgtaggaaaggatcatgtagaaaaaacatgcggtgtttccgatggtggctctac

SEQ ID NO: 150186 - DNA, 80 bp, synthetic construct
  source 1..80: mol_type = other DNA
agacaagttacagtccacagtcacatacacgataaacaataccaacagggtaatgtttatggagtaaaacactattgtcc

SEQ ID NO: 150187 - DNA, 80 bp, synthetic construct
  source 1..80: mol_type = other DNA
aaactgcgtgagaagcatgtgggagagagacctcatggttgtggaatccaaagcccagggaattgaccgaattgccaggt

SEQ ID NO: 150188 - DNA, 80 bp, synthetic construct
  source 1..80: mol_type = other DNA
aacaaaaccaccaaaccagacacttcagcatgtaggttttacactttggatagcaaaacatggagtcagagttcaaaggg

SEQ ID NO: 150189 - DNA, 80 bp, synthetic construct
  source 1..80: mol_type = other DNA
acaacccttgtgtcaccttccaaatattgcatgaggtttaccacgacttcctctctataactgacaccgggctacttagc

SEQ ID NO: 150190 - DNA, 80 bp, synthetic construct
  source 1..80: mol_type = other DNA
cccattgaatttgacagaacaagcacaacaccagaagttggagtagtgcaaaaggcggtgtacaacgcaggtatgggagt

SEQ ID NO: 150191 - DNA, 80 bp, synthetic construct
  source 1..80: mol_type = other DNA
agaatcaagtggtaccccatattatttcaccaactagaacttatggaagagctggtacagtccggaccgtttgcatacag

SEQ ID NO: 150192 - DNA, 80 bp, synthetic construct
  source 1..80: mol_type = other DNA
ttgactggatgaaatcaatgctaccacaagcacaactcaaggtcaagtatttaagtgaacttaaaaaattgaatctctta

SEQ ID NO: 150193 - DNA, 80 bp, synthetic construct
  source 1..80: mol_type = other DNA
tctgcagactgtgccagacccaaagaaggctaggcggcttctgattatgtggcagccccccgtgcacaatgtacccggga

SEQ ID NO: 150194 - DNA, 80 bp, synthetic construct
  source 1..80: mol_type = other DNA
gttcaacagatccatacccacgaggaccaggaacagccaaccaaagaagaaacagaaggagacggtggagacaacgttgg

SEQ ID NO: 150195 - DNA, 80 bp, synthetic construct
  source 1..80: mol_type = other DNA
gtacagacagtggattgacctcttcatttgattggcccacaatctatatactaaattgtttgattagaacttagttagta

SEQ ID NO: 150196 - DNA, 80 bp, synthetic construct
  source 1..80: mol_type = other DNA
ccatggatcagccaaacgcactacagactcgtggcgcaagatgaatacacatccgcgggatacattacttgctggtacca

SEQ ID NO: 150197 - DNA, 80 bp, synthetic construct
  source 1..80: mol_type = other DNA
gacttcagtgtgcgtctactgcaggacactagccacatatcacaaactgcattggtggcgcgcactcagggtatcgaaga

SEQ ID NO: 150198 - DNA, 80 bp, synthetic construct
  source 1..80: mol_type = other DNA
cacataaacagcacctttgccaatgccatacacccagagtttgaataccacgcgggctggtactcaaacatatttatagg

SEQ ID NO: 150199 - DNA, 80 bp, synthetic construct
  source 1..80: mol_type = other DNA
cggtgcataatgccgcaatgggaattgctgcaggtaacttgacaatatacccccaccaatgggtgaacttaaggaccaac

SEQ ID NO: 150200 - DNA, 80 bp, synthetic construct
  source 1..80: mol_type = other DNA
aatgcacacctcacaacccccagagatgacaccatactactcgctatcacagctgacttacaagttgatccagtggatga

SEQ ID NO: 150201 - DNA, 80 bp, synthetic construct
  source 1..80: mol_type = other DNA
aaacgagtccgggtcgatgagggagcaaacacccggcgcaccatccgggatattctggagatccccgtgactgtgctctc

SEQ ID NO: 150202 - DNA, 80 bp, synthetic construct
  source 1..80: mol_type = other DNA
aggactagtaacaaaccatgcaaactcaacaaatttatggcaagcagtacaaaacacagctacactattagcagatggta

SEQ ID NO: 150203 - DNA, 80 bp, synthetic construct
  source 1..80: mol_type = other DNA
acatttaaacccactatctttagcacacctcacataaagtatgacatgtttcaaggcaaatttatccgtcctcccaccaa

SEQ ID NO: 150204 - DNA, 80 bp, synthetic construct
  source 1..80: mol_type = other DNA
tagctcaggtggattctttgatacctattaacaatgcagaaaatgtaactggcttggacatgtatagaataccactgcac

SEQ ID NO: 150205 - DNA, 80 bp, synthetic construct
  source 1..80: mol_type = other DNA
aatgtaactaacatctaagacaactattttacaaccttgtacctggtctccactggtcgaaggcaacttgcaataagata

SEQ ID NO: 150206 - DNA, 80 bp, synthetic construct
  source 1..80: mol_type = other DNA
gacaaactatgacaaatgacccaggcataccactaagtaacaacaataattacactaaaaatgaatggggaaatgtattc

SEQ ID NO: 150207 - DNA, 80 bp, synthetic construct
  source 1..80: mol_type = other DNA
ccagatggacaacatgacacaaagtatgatgtgtggcacattaatctacaagaaatggctcagattaggcgtaaatatga

SEQ ID NO: 150208 - DNA, 80 bp, synthetic construct
  source 1..80: mol_type = other DNA
cctgggtcccacggcccctaagatctgaaccttatgtgttaaagaactttccaaattacaccgcagtgacgcatatcacc

SEQ ID NO: 150209 - DNA, 80 bp, synthetic construct
  source 1..80: mol_type = other DNA
gcccaagtgtcttctcagaaagttggagcacatgagaacaccaacgtggcgactggcggatccaccgtcaattatactac

SEQ ID NO: 150210 - DNA, 80 bp, synthetic construct
  source 1..80: mol_type = other DNA
gtctatgctttatacaagttgatgtgtattgcacaggggccttatactggactaccacaaccaaaaccaaggaaaccaga

SEQ ID NO: 150211 - DNA, 80 bp, synthetic construct
  source 1..80: mol_type = other DNA
tcaattgaggccgctattgacaatatcacccaaaatgcactgaccactgtccaaaacacggcacaatcaggacccaccca

SEQ ID NO: 150212 - DNA, 80 bp, synthetic construct
  source 1..80: mol_type = other DNA
cggcgctggtggtggagaaaacgatggacccgagggaggtttcgaagacgacggactggacgccctcgtcgccgccctcg

SEQ ID NO: 150213 - DNA, 80 bp, synthetic construct
  source 1..80: mol_type = other DNA
ccgccacaggcagcgcggggagctccggcggcacaactgcagcgccgtcagggccagaacccgcagccggatccatcatt

SEQ ID NO: 150214 - DNA, 80 bp, synthetic construct
  source 1..80: mol_type = other DNA
gcgacccccctgcccggtagcaacttcttcggagtccggcgctacgccttcggctgcgccggacacctcagaccccccct

SEQ ID NO: 150215 - DNA, 80 bp, synthetic construct
  source 1..80: mol_type = other DNA
cgttcggcaggatagcggttaaggattcggtgctaaggccgtgtcgccaacgtcgaatgctacgttgcaatagcttcgac

SEQ ID NO: 150216 - DNA, 80 bp, synthetic construct
  source 1..80: mol_type = other DNA
acgaggggaagattgacatctactcagtcacaatcacaaggaaacccactcgggatcttattgtgaccatcccactgcag

SEQ ID NO: 150217 - DNA, 80 bp, synthetic construct
  source 1..80: mol_type = other DNA
ggaggaggctttcgccacacctatcctgaaagcgttgcattctttatgataggtgtgacgatgtctttaccattcccacg

SEQ ID NO: 150218 - DNA, 80 bp, synthetic construct
  source 1..80: mol_type = other DNA
aatgaatattgacatctatacagtgtcacacacaaaagtcgacaacatctttggtagagcatggcatgtcactagccatg

SEQ ID NO: 150219 - DNA, 80 bp, synthetic construct
  source 1..80: mol_type = other DNA
ttgatgatctgtaggcgcagctcatccccacattccaggtccttgatggcctcgtagatggcatcttcgtcgacattgac

SEQ ID NO: 150220 - DNA, 80 bp, synthetic construct
  source 1..80: mol_type = other DNA
tgctgcgtgacacccccaccttagcattcccacgttccacactccagaatccagtagaagattttattgataccacactc

SEQ ID NO: 150221 - DNA, 80 bp, synthetic construct
  source 1..80: mol_type = other DNA
ctgtagacaatgatgtaaattatgattcaaaacactataccaaatggcaaataaccttacaagagatggctcaagttagg

SEQ ID NO: 150222 - DNA, 80 bp, synthetic construct
  source 1..80: mol_type = other DNA
agataatggcagagtctccagtgtactttgcacagaactctgtgtatcctgtgcaggccgcccacaggggcatgtccatt

SEQ ID NO: 150223 - DNA, 80 bp, synthetic construct
  source 1..80: mol_type = other DNA
gtttcatcacctgaagccattgacaggaggttctttcttgactgtgatgtgaagatcatgccagcatacaatacaaacaa

SEQ ID NO: 150224 - DNA, 80 bp, synthetic construct
  source 1..80: mol_type = other DNA
attccaattgacattgcatcgtcaccgcttaacacaacactcttgggtgagatagcttcatattatacacactggactgg

SEQ ID NO: 150225 - DNA, 80 bp, synthetic construct
  source 1..80: mol_type = other DNA
tttactttaagccgaagcacatcaaagcgtgggtgcccagaccaccacgcctatgcgattatgtgtatgcgcacaatgtt

SEQ ID NO: 150226 - DNA, 80 bp, synthetic construct
  source 1..80: mol_type = other DNA
gtgccaacactcgaggattggacaaccagggggaggaaatcctctctcagttataccgccctcttgaagcatgcagaaat

SEQ ID NO: 150227 - DNA, 80 bp, synthetic construct
  source 1..80: mol_type = other DNA
gagtttacttcaagcccaaacatgtacgcggatgggtgccacgaccacccagattatgtccatacatcagaaaggctagt

SEQ ID NO: 150228 - DNA, 80 bp, synthetic construct
  source 1..80: mol_type = other DNA
cagacctcctaaactattccaagacaagtggtacccccagtcagagctctgtgacacaacactactaaccgtctttgcaa

SEQ ID NO: 150229 - DNA, 80 bp, synthetic construct
  source 1..80: mol_type = other DNA
cttgaccacttatactcaactgcagaatactatcaaactgttcacacacaaggaataattaacaaaacacaaagagtagc

SEQ ID NO: 150230 - DNA, 80 bp, synthetic construct
  source 1..80: mol_type = other DNA
cctggactcgcgcgcttgaacaagtactcgtcaaccaaagcaaaggacgcgttaaaattcttagtcaaaagtcagacttc

SEQ ID NO: 150231 - DNA, 80 bp, synthetic construct
  source 1..80: mol_type = other DNA
ctatgcttatctcttagataaacaatatgactctgtctttataggtaagggcggtggtattcagaaaggtaacgatctat

SEQ ID NO: 150232 - DNA, 80 bp, synthetic construct
  source 1..80: mol_type = other DNA
atacaaagacacttttaataaaaaacgagactactttgtgtgtgtgctccgtaaactgtttattctccccctccgcttcg

SEQ ID NO: 150233 - DNA, 80 bp, synthetic construct
  source 1..80: mol_type = other DNA
gcagggacccaagtctttggcttccagttaaacccgggagctgagtcggtcatgaatcgcacactgatgggcgaaatact

SEQ ID NO: 150234 - DNA, 80 bp, synthetic construct
  source 1..80: mol_type = other DNA
taatggccagtactggcagacattcatcacaggcccttttatcaaagacacaatgcaggcaaacaattatcagcaaaaga

SEQ ID NO: 150235 - DNA, 80 bp, synthetic construct
  source 1..80: mol_type = other DNA
tatgaggatactacaacagtactagccaccctggcactgttgggttgtgatgtgtctccgtggtcctggctaaagaaaaa

SEQ ID NO: 150236 - DNA, 80 bp, synthetic construct
  source 1..80: mol_type = other DNA
caatgtagaagtaggacacactgtaccctatggggaaatcaatcttagtggtaatgctacatgcaggttgtacaaatatg

SEQ ID NO: 150237 - DNA, 80 bp, synthetic construct
  source 1..80: mol_type = other DNA
gctactggagaccaaatatagcaggcagtgtacccatagaagacatgcccttatggatggccctatgtggatacacagac

SEQ ID NO: 150238 - DNA, 80 bp, synthetic construct
  source 1..80: mol_type = other DNA
gcacggcgcccaggcgctcggccacctgcagcagcagcgccaggttagcctgcagcaggtcctgcgccagcgggtgtgtc

SEQ ID NO: 150239 - DNA, 80 bp, synthetic construct
  source 1..80: mol_type = other DNA
agaccccgcactgcctcgcagatgccccggatccacttggcggctgccagggatttccggtagggccacgagccgttccc

SEQ ID NO: 150240 - DNA, 80 bp, synthetic construct
  source 1..80: mol_type = other DNA
aggtgcctacgcaaagcctagtaacctcttggaggatatatggttggtcgctcagctataccccatagtagacctggcag

SEQ ID NO: 150241 - DNA, 80 bp, synthetic construct
  source 1..80: mol_type = other DNA
ggtgtcgcggaccccggagcacactgcttccatccagccgcgcggccgcaagggaggagaggagcgagtcgcgggccccg

SEQ ID NO: 150242 - DNA, 80 bp, synthetic construct
  source 1..80: mol_type = other DNA
attattgctacatgcagtgcatgtcctgatatgtctgttaggatgatgagagatagtcccatgatgaaacaggaagggaa

SEQ ID NO: 150243 - DNA, 80 bp, synthetic construct
  source 1..80: mol_type = other DNA
ttgagtggatgaaatctatgttaccccaagctcagctcaaggttaaataccttagtgaactcaagaagctaagcttctta

SEQ ID NO: 150244 - DNA, 80 bp, synthetic construct
  source 1..80: mol_type = other DNA
gaccccctagaaagtttcacacagatatacccttctaccccgacgtccctaaagtagcagaccaaataagggtctcattt

SEQ ID NO: 150245 - DNA, 80 bp, synthetic construct
  source 1..80: mol_type = other DNA
gcccatgcttactctcacttttacgatggtttcgcaaaagtgccgatcgagggcgttacctcagacccgggtgatgcgta

SEQ ID NO: 150246 - DNA, 80 bp, synthetic construct
  source 1..80: mol_type = other DNA
tttttgtcgtcaaatggggttatcaccatcccagcaggggagcaaatgtcactttcagccccattttattcacacaaacc

SEQ ID NO: 150247 - DNA, 80 bp, synthetic construct
  source 1..80: mol_type = other DNA
gtgcactcaacagggcagtgggtagggtagctgacactatggctagtgggcccgtcaacacagagcaaattcccgctttg

SEQ ID NO: 150248 - DNA, 80 bp, synthetic construct
  source 1..80: mol_type = other DNA
tttacttatcttgctgagaggtatggctttgccccaacttcccgggccccgccggtagccccaacgcccaccatccgtag

SEQ ID NO: 150249 - DNA, 80 bp, synthetic construct
  source 1..80: mol_type = other DNA
gtgataacaacccagatgaggatcccttctacttgtgtaatggcacactgtttgggaacatacaggtttatccacaccag

SEQ ID NO: 150250 - DNA, 80 bp, synthetic construct
  source 1..80: mol_type = other DNA
caccgagggcagaactggtgctaccatgacgccgacgacgacgaccgcggaactcacgacggagtttgactacgatgaag

SEQ ID NO: 150251 - DNA, 80 bp, synthetic construct
  source 1..80: mol_type = other DNA
gctggtggtggtggttatgtttgttttgcagacataagacaactagacttcattgcagatgaacagggcttgggtgacta

SEQ ID NO: 150252 - DNA, 80 bp, synthetic construct
  source 1..80: mol_type = other DNA
tacacaccacaacaggttatacaccgaaacgttgtaaaattaagccaattttcaaatttaaaaccatttgtcaatgcata

SEQ ID NO: 150253 - DNA, 80 bp, synthetic construct
  source 1..80: mol_type = other DNA
atgtttccttgaacttcataacctctgtgttgtgggtccagaaggcgaaatgggtgtcgggacactcatcgaaagggtcg

SEQ ID NO: 150254 - DNA, 80 bp, synthetic construct
  source 1..80: mol_type = other DNA
aaaaatctggatctcacgaaactggtaatgtggccacagggggatcgacaataaattttactaacatcaattactacaag

SEQ ID NO: 150255 - DNA, 80 bp, synthetic construct
  source 1..80: mol_type = other DNA
atgggcgctcaggtgactaaacaaaaagttggatcgcatgataatactattgcagcacaaagtggttcagtggtcaagta

SEQ ID NO: 150256 - DNA, 80 bp, synthetic construct
  source 1..80: mol_type = other DNA
cgacgaaccacatcatcttttttttatgttgctcctttagaaaatgacttatgtcgacgacactcggcatcagccatctc

SEQ ID NO: 150257 - DNA, 80 bp, synthetic construct
  source 1..80: mol_type = other DNA
ctgttcaatccaggtatcttgcgggatatcaacaacatagtcatcaaccagcggacgaccagccggttttgcgaagatgg

SEQ ID NO: 150258 - DNA, 80 bp, synthetic construct
  source 1..80: mol_type = other DNA
tgaacacctacgtcataagtcacgtgcctggggaggtactcaacccggaagtatcctcaccacgtggcctaccacgtggg

SEQ ID NO: 150259 - DNA, 80 bp, synthetic construct
  source 1..80: mol_type = other DNA
aaggaaacaaatacggcctaaccattacaccggctgacaaatcagacactttcaagaaacttgactatgacaatgtgact

SEQ ID NO: 150260 - DNA, 80 bp, synthetic construct
  source 1..80: mol_type = other DNA
cacgtcacggggaactgacgtctcagcgatcttggcatgccgcccagcctcgcaaaccagagtctgcgatagagggccag

SEQ ID NO: 150261 - DNA, 80 bp, synthetic construct
  source 1..80: mol_type = other DNA
gaaataatcaatgaggaggcggcagactgggaccagcagcacccgataccaggcccactgccagcaggacaacttaggga

SEQ ID NO: 150262 - DNA, 80 bp, synthetic construct
  source 1..80: mol_type = other DNA
gagtttgggtccatcatcttcagcaaagatagcaaaggtggccggcaaggtgcaatgtttagtgagttacctgtctaaca

SEQ ID NO: 150263 - DNA, 80 bp, synthetic construct
  source 1..80: mol_type = other DNA
gtgtgttcttcaagattgatgacccaccagctagactgaccatcccatttatgtgcataaactccgcctatggcatgttt

SEQ ID NO: 150264 - DNA, 80 bp, synthetic construct
  source 1..80: mol_type = other DNA
atattccaaggtttgggatcaggtgaaactccagggttcataattgatttgctttcctcatctaaggacccacgggtggt

SEQ ID NO: 150265 - DNA, 80 bp, synthetic construct
  source 1..80: mol_type = other DNA
tgcgtgtgtttattacaccaaatataaaacaaaagatacggacccaacagaaatgtactccagttggaaggttaccacca

SEQ ID NO: 150266 - DNA, 80 bp, synthetic construct
  source 1..80: mol_type = other DNA
ctccaagttgatgtggctgaggtaccaggtgatgatgttataccagattgtagttgtacagtaggcacttattattgtag

SEQ ID NO: 150267 - DNA, 80 bp, synthetic construct
  source 1..80: mol_type = other DNA
atctaagttccgcacgttccactttaacgactccccgggaacgaactccacgtcgtcggcgtgtacgtacaggttctctc

SEQ ID NO: 150268 - DNA, 80 bp, synthetic construct
  source 1..80: mol_type = other DNA
ccgaacaacatgatgggtgatttttgtgcccgcataatagggagtggaacaccaccaacttcactaaccatcagaatcta

SEQ ID NO: 150269 - DNA, 80 bp, synthetic construct
  source 1..80: mol_type = other DNA
accataacaattccagaggcaattacacgcagatttttcctggatgtagacttgaagataatgccaggatacaaaacaca

SEQ ID NO: 150270 - DNA, 80 bp, synthetic construct
  source 1..80: mol_type = other DNA
caggcgaagtacacaacctaatggagattgcagaggtcgactccgtggtgcccgtcaacaatatcaaagtcaacctgcaa

SEQ ID NO: 150271 - DNA, 80 bp, synthetic construct
  source 1..80: mol_type = other DNA
attatgagtgtagacaactacaatgaaacactgactagtagtcaaaaatcaactttgttctccacatggaatatcacata

SEQ ID NO: 150272 - DNA, 80 bp, synthetic construct
  source 1..80: mol_type = other DNA
ccaacaacagctgatagtagaaatatccaaattgaagagagggttggacgatcttgccccattgtatgccagtgagaata

SEQ ID NO: 150273 - DNA, 80 bp, synthetic construct
  source 1..80: mol_type = other DNA
ctgaaactccttgcgtagagttccaggtactgggtgacttgtacaatacatgtctcaatatcgaccttcctcaatttaac

SEQ ID NO: 150274 - DNA, 80 bp, synthetic construct
  source 1..80: mol_type = other DNA
aggtcctatttttctgaaacccagggtcaaattatatctcctaaaccaactagtctctgcgggctacctagtatacacac

SEQ ID NO: 150275 - DNA, 80 bp, synthetic construct
  source 1..80: mol_type = other DNA
agccccgacgtgcctcgggaggcggtgatgtcaccgaccatggtcaccatacctcctccccagataccctttgtgggttc

SEQ ID NO: 150276 - DNA, 80 bp, synthetic construct
  source 1..80: mol_type = other DNA
accacaacctatacctaagaaaccagaactgcgcagagccactctacagggacctgaacatgagtttataaatgcactca

SEQ ID NO: 150277 - DNA, 80 bp, synthetic construct
  source 1..80: mol_type = other DNA
gactactgcaaaaaatatttccacgacgatggcttcttaaaagaggccagaataactataatcagcccatacacaaatcc

SEQ ID NO: 150278 - DNA, 80 bp, synthetic construct
  source 1..80: mol_type = other DNA
acactcccggctgtaaattccttgttgaggacgttgcagtagtcagagaccagagagcccagctgctttttgatttcagg

SEQ ID NO: 150279 - DNA, 80 bp, synthetic construct
  source 1..80: mol_type = other DNA
tacacacacacagattgttcctataactcaaaacccagtggaaaactatgttaatgatgtacttaatgaggttttagtag

SEQ ID NO: 150280 - DNA, 80 bp, synthetic construct
  source 1..80: mol_type = other DNA
ctattcaaagctaatccaaattacgctggcaactccattaaaccaactggcgccagtcgcacggcaatcaccacccttgg

SEQ ID NO: 150281 - DNA, 80 bp, synthetic construct
  source 1..80: mol_type = other DNA
ataagatcaggaagactagtgttgggaggaacctagttctgccaccctacagttatttggaacagcaatggctggacaaa

SEQ ID NO: 150282 - DNA, 80 bp, synthetic construct
  source 1..80: mol_type = other DNA
acttggacttcctcttcacacggttggtggtggaaactccctgatgcactgaaggatatggggatctttggacaaaatct

SEQ ID NO: 150283 - DNA, 80 bp, synthetic construct
  source 1..80: mol_type = other DNA
gatgggcttctttccaaatgctacagaggacagtacttcagaaatagataatgctatttacacaatttgtgatttgggca

SEQ ID NO: 150284 - DNA, 80 bp, synthetic construct
  source 1..80: mol_type = other DNA
ggagtaactattcgaggcctctggcggttcacttagcggtgtctacctcttaaggtcaccaagcactccgagcgcaagcg

SEQ ID NO: 150285 - DNA, 80 bp, synthetic construct
  source 1..80: mol_type = other DNA
gcgggttatattacttgttggtatcagaccaacatcatagtgccgccagacaccccaactgattgcattgtgctctgctt

SEQ ID NO: 150286 - DNA, 80 bp, synthetic construct
  source 1..80: mol_type = other DNA
tagtggattacctactaagaaaaaagtgaccccagagaaaagagtagtggtacaaggtccttctactgaatttggtctga

SEQ ID NO: 150287 - DNA, 80 bp, synthetic construct
  source 1..80: mol_type = other DNA
gcaatgccgtccagctcgatggttttaaagtggtggtagtcgttgtagacgtggatctcgttgccggactggaagtagta

SEQ ID NO: 150288 - DNA, 80 bp, synthetic construct
  source 1..80: mol_type = other DNA
agaaagccaattcaccaagcgatacatttatttgacttccaagtgccacacatcaccactatattcatccatgttttcac

SEQ ID NO: 150289 - DNA, 80 bp, synthetic construct
  source 1..80: mol_type = other DNA
tagtaggcaactacgtgccaaaagaggcgttacggtactttccgtactgggatttccaaaccgggactttccacacggcg

SEQ ID NO: 150290 - DNA, 80 bp, synthetic construct
  source 1..80: mol_type = other DNA
ctacattccaagtgttgcaaagaaattacaacaaagtcattggttacccaactaattttggaaccaacgactcctcagaa

SEQ ID NO: 150291 - DNA, 80 bp, synthetic construct
  source 1..80: mol_type = other DNA
cacatcagatcatgtatgtaccaccaggaggtccagtaccaaacagtgctaccgattactgctggcaatcttccaccaat

SEQ ID NO: 150292 - DNA, 80 bp, synthetic construct
  source 1..80: mol_type = other DNA
gggtatttgcaaagggaggcgaggagatggagtgactgaaggagcgatagttgagactggtgcggagtggggtgtcggtg

SEQ ID NO: 150293 - DNA, 80 bp, synthetic construct
  source 1..80: mol_type = other DNA
tattaatgagagtcacccgtccacatcaaatgcagccccagttttggatgctgccgaaacaggacatactaataagatac

SEQ ID NO: 150294 - DNA, 80 bp, synthetic construct
  source 1..80: mol_type = other DNA
ttttagccaataatgtctccgtgtggtttttgttagctgctgatataaagcgatacattcacaattatcgctaaacaaca

SEQ ID NO: 150295 - DNA, 80 bp, synthetic construct
  source 1..80: mol_type = other DNA
atacaaaggaactatctcaagggtaattgcactcaatggtccgtcatttatagcgggtttcaaacccccgtcacccaccc

SEQ ID NO: 150296 - DNA, 80 bp, synthetic construct
  source 1..80: mol_type = other DNA
atgcacccggcatcgagcacaattggtaccaggcctgtttcagagcccacgctggagcttgtggctgtagcaattttgtt

SEQ ID NO: 150297 - DNA, 80 bp, synthetic construct
  source 1..80: mol_type = other DNA
actgacgacaaattccagcgcggttggacacgctagttatcaacgacaacagcgtgttgaaaacgggacgttatccaaga

SEQ ID NO: 150298 - DNA, 80 bp, synthetic construct
  source 1..80: mol_type = other DNA
cccgtcagattgataattggttcctacagaaactattctaaccgcggaagaaagaaattgaaaaaaaaaattgacaaaaa

SEQ ID NO: 150299 - DNA, 80 bp, synthetic construct
  source 1..80: mol_type = other DNA
aggcacatattagacgcaagcttgaatttttcacatatgttagatttgacatggaagttacaattgttaccaacaataat

SEQ ID NO: 150300 - DNA, 80 bp, synthetic construct
  source 1..80: mol_type = other DNA
tgacttatggcaatttatttgcatgctttcacaagaaccctggaattgtcactggttcagcagtgggatgtgatcctgaa

SEQ ID NO: 150301 - DNA, 80 bp, synthetic construct
  source 1..80: mol_type = other DNA
agccccatccctgaagacccagcggccattctctctggtaacgagcagagaagaagtagaggcccgcggccattgggccc

SEQ ID NO: 150302 - DNA, 80 bp, synthetic construct
  source 1..80: mol_type = other DNA
agaaccaacactacaaacattgaaactaacatttatcaaaaactacagttttataacactaaacaaacagaggcacagct

SEQ ID NO: 150303 - DNA, 80 bp, synthetic construct
  source 1..80: mol_type = other DNA
aaaactatgtagatgaggttcttaatgaggtcttagttgttcctaatatcaatagtagccaccccacaacatcaaattcc

SEQ ID NO: 150304 - DNA, 80 bp, synthetic construct
  source 1..80: mol_type = other DNA
tgcataaataaggtatttatgtttccaccagacacccctagacccattataacaaaagaaggatggcaagatgagtttac

SEQ ID NO: 150305 - DNA, 80 bp, synthetic construct
  source 1..80: mol_type = other DNA
ctggggaggtaacatggtacattctcaggtcatcaggaacccgtgcaaagacacccaagtatccggcccccgtcgacagc

SEQ ID NO: 150306 - DNA, 80 bp, synthetic construct
  source 1..80: mol_type = other DNA
agataagaagagcacatacctcagtcacttattatcactagcgctcgccgcagccgtgtaaccgagcatagcgagcgaac

SEQ ID NO: 150307 - DNA, 80 bp, synthetic construct
  source 1..80: mol_type = other DNA
ggtgtcttacccttttgaattggatccaatggaaattgccaataaagcggaaaggtatgggttgaccatcactccaccag

SEQ ID NO: 150308 - DNA, 80 bp, synthetic construct
  source 1..80: mol_type = other DNA
agcaactggatacacacacaggtacagcacaaattacaacagaaaagttagtgatgatgacagtacattgaccagggatc

SEQ ID NO: 150309 - DNA, 80 bp, synthetic construct
  source 1..80: mol_type = other DNA
tctgcgtttcgaacgctacgacaccgactacctgctgcgccgtctgcggctctacccgcccgagcggctgcacgcgttgt

SEQ ID NO: 150310 - DNA, 80 bp, synthetic construct
  source 1..80: mol_type = other DNA
aagagggtttagacccgactcggagttccctttccttgtgcaccccgtgtatgcaatggaagatgtctatgagtcaattc

SEQ ID NO: 150311 - DNA, 80 bp, synthetic construct
  source 1..80: mol_type = other DNA
cccgtccgcagcggcaacaccacggagggtgatctccgcgtcccgagggcgggtgccgaaggtgagtttacacaccgaag

SEQ ID NO: 150312 - DNA, 80 bp, synthetic construct
  source 1..80: mol_type = other DNA
cagtaccacaaatgatagacacaagcgatccccttaggggctttgtaccctacagctttaactttggtaagggcaaaatg

SEQ ID NO: 150313 - DNA, 80 bp, synthetic construct
  source 1..80: mol_type = other DNA
attttgattgggcagctacagtagcaccccaaaatatggtacatagaaatgttgttacattggatcaattcccaaactta

SEQ ID NO: 150314 - DNA, 80 bp, synthetic construct
  source 1..80: mol_type = other DNA
gacttatgcaaagtaccgctcgttactttgcggtcaaccgcagctgacttcagacatccgttctgctcaccacaaacgaa

SEQ ID NO: 150315 - DNA, 80 bp, synthetic construct
  source 1..80: mol_type = other DNA
aattaacccaattaatggtattagtaagaaaattattaaatggctgttaagaataatgtcagcaatggtgattataatta

SEQ ID NO: 150316 - DNA, 80 bp, synthetic construct
  source 1..80: mol_type = other DNA
ataccaaatggaaatacatttggcagatggaacggacataacccacacaataacacactatatggaggctccacatatgt

SEQ ID NO: 150317 - DNA, 80 bp, synthetic construct
  source 1..80: mol_type = other DNA
aatactgtgaggaaaataaatggattataccagctgagtgtaaaattgagagagatcttaatttagcaaacaccattatt

SEQ ID NO: 150318 - DNA, 80 bp, synthetic construct
  source 1..80: mol_type = other DNA
aacccacccacccggaaacatctacagatcgcttctacacactaaccagtgttgaatggcacggctcatcaaagggatgg

SEQ ID NO: 150319 - DNA, 80 bp, synthetic construct
  source 1..80: mol_type = other DNA
acaacttctgaataacttgggttttcctggtgagttggcatataagttatgcaatacaactcacatatacaaagatgaaa

SEQ ID NO: 150320 - DNA, 80 bp, synthetic construct
  source 1..80: mol_type = other DNA
aattcaagaagaaatactaaacattgccattatagtagttatatgtccatacacaaaacctaaactagtacatgagacaa

SEQ ID NO: 150321 - DNA, 80 bp, synthetic construct
  source 1..80: mol_type = other DNA
acttcagaatcccttgacaccactactcgtacagattgttcaactacagctgcacaaaccaccgtttctacagaaccatc

SEQ ID NO: 150322 - DNA, 80 bp, synthetic construct
  source 1..80: mol_type = other DNA
tatcgtggacttactagcttcatcaaaggatcctaaagtgattaagtactgtgaagaaaatggcctcatatctcaggcaa

SEQ ID NO: 150323 - DNA, 80 bp, synthetic construct
  source 1..80: mol_type = other DNA
agggagagtcagtcaggcaagcctatgacatggtaatgcctagaagtaaagaaaggttagtcatagtagcttagctgaac

SEQ ID NO: 150324 - DNA, 80 bp, synthetic construct
  source 1..80: mol_type = other DNA
gtttaattaaacacaacacatgtgtagtcactacaagtaatggaaaattcactggattaggtatttatgataatgtaatg

SEQ ID NO: 150325 - DNA, 80 bp, synthetic construct
  source 1..80: mol_type = other DNA
atgctctcaggggtttagattggttatcacagaaaatagataaatttatcagctggcttaaaaacaagatattaccagag

SEQ ID NO: 150326 - DNA, 80 bp, synthetic construct
  source 1..80: mol_type = other DNA
aaacagcacagtggactttgatccaacagcccaagtgatgacaagagtcgcagacatcagaacttatggatttggacacc

SEQ ID NO: 150327 - DNA, 80 bp, synthetic construct
  source 1..80: mol_type = other DNA
tgcggcgaaggggccctgccggccctgggccgctaccaacagctggtcgacgaggtagagcaggagttgaaggctctgac

SEQ ID NO: 150328 - DNA, 80 bp, synthetic construct
  source 1..80: mol_type = other DNA
atcagcgtgactcccacaaaagtccaattggtgcccacattgaacttggagtacattacatgccactacaaaactggact

SEQ ID NO: 150329 - DNA, 80 bp, synthetic construct
  source 1..80: mol_type = other DNA
atctctactaatgatacagaaaaagagaaaaatagtaccaggattcaaaacaaaacccaaaggtagatcaactaaaaaac

SEQ ID NO: 150330 - DNA, 80 bp, synthetic construct
  source 1..80: mol_type = other DNA
aattaacaaaacagccagcagggacagaagtttttgctatgagggttgatgtagcatcacagcctttggcaaccacatta

SEQ ID NO: 150331 - DNA, 80 bp, synthetic construct
  source 1..80: mol_type = other DNA
cgggccattgagtacacacatacacatgtcactaattataaaataagagataaacaagaggaaacagcaattaaacatag

SEQ ID NO: 150332 - DNA, 80 bp, synthetic construct
  source 1..80: mol_type = other DNA
tagacaaacctactcaaccagacacatcatccaatcgtttttacactttggagagcaaggtgtggactcgaacatcgaaa

SEQ ID NO: 150333 - DNA, 80 bp, synthetic construct
  source 1..80: mol_type = other DNA
ttcgccatagggcctttatcttctcgccattggatagtgtcaggggtcgccataacgcggaccccgttttcaccccttcc

SEQ ID NO: 150334 - DNA, 80 bp, synthetic construct
  source 1..80: mol_type = other DNA
agccagttgattacttgtttggtagtggagttctggcaggaaacgcttttgtgtttccacaccaaatcatcaatctgaga

SEQ ID NO: 150335 - DNA, 80 bp, synthetic construct
  source 1..80: mol_type = other DNA
ttgcgtcgcagagtcagccacgtccccgtcttgtcgctccccaatcggctcccgcacaccccccgcggcacccagagggc

SEQ ID NO: 150336 - DNA, 80 bp, synthetic construct
  source 1..80: mol_type = other DNA
tagccagctttgacactaaaccgcccatgaaaatggaccagtacaccggtcccagcacgcaccccggcatgctcatgcag

SEQ ID NO: 150337 - DNA, 80 bp, synthetic construct
  source 1..80: mol_type = other DNA
tgcgtgacctgctgaccaccaacatctaccgagtgctacacagccgctccgtgctctcctatgagcgttatgtggactgg

SEQ ID NO: 150338 - DNA, 80 bp, synthetic construct
  source 1..80: mol_type = other DNA
gccacagccggcaggtcagacttggtgcttccggctttttccggtgagtccacgatcctagccatgaaatgctcaaacgt

SEQ ID NO: 150339 - DNA, 80 bp, synthetic construct
  source 1..80: mol_type = other DNA
gaccgctttgatgcatgggagataagtatgcgcgatatggtacagatgcgccgcaagtgtgagatgtttacatacctacg

SEQ ID NO: 150340 - DNA, 80 bp, synthetic construct
  source 1..80: mol_type = other DNA
ggactttatagccaggtacaacagaaagacccccctggggggcaacatactgactgcaccatcactgcacccaggcagca

SEQ ID NO: 150341 - DNA, 80 bp, synthetic construct
  source 1..80: mol_type = other DNA
aatgaaggaagcctttaatggctccttcgcggccgtgcagatgagagggaaacaacagaagggggcatcaactattagat

SEQ ID NO: 150342 - DNA, 80 bp, synthetic construct
  source 1..80: mol_type = other DNA
ggggcatttggtcaacaatcaggtgcaatatatgtgggaaattacagattggtcaacaggcatctagcgacgcacactga

SEQ ID NO: 150343 - DNA, 80 bp, synthetic construct
  source 1..80: mol_type = other DNA
acaataacgatagtaaattaaaagatttttttaatgaagctttacccacaacaggcacaaaaaacacagagataaatgta

SEQ ID NO: 150344 - DNA, 80 bp, synthetic construct
  source 1..80: mol_type = other DNA
cagggcatgacaattagctacaccaagtatagatacttgtgtctgatgcagaaagcactgtatatgcaccttgcaagggg

SEQ ID NO: 150345 - DNA, 80 bp, synthetic construct
  source 1..80: mol_type = other DNA
cgtgggactctcacttagcggtgtctacctcttaaggtcaccaagcactccgagcgccagcgaggagtgcgacccttccc

SEQ ID NO: 150346 - DNA, 80 bp, synthetic construct
  source 1..80: mol_type = other DNA
aatactgtgaaggcaacaagtggataatacctgctgaatgtaaggtggaaagagatcttaacatagctaacactattata

SEQ ID NO: 150347 - DNA, 80 bp, synthetic construct
  source 1..80: mol_type = other DNA
cgctggtcgcgcactgtatattcccccttacgaactccttcagcatgagtggtatgaaaaattttaattatatagaagta

SEQ ID NO: 150348 - DNA, 80 bp, synthetic construct
  source 1..80: mol_type = other DNA
agcagtaaatcaatactaactgctatgaaagacaatgcaactaaaatgtatgacagaagaaaaagagatacatacctagg

SEQ ID NO: 150349 - DNA, 80 bp, synthetic construct
  source 1..80: mol_type = other DNA
cactgattcccttgagatactattccagggccctgtatacaaagacctagaaatagatgtgaacagcacaccaccacctg

SEQ ID NO: 150350 - DNA, 80 bp, synthetic construct
  source 1..80: mol_type = other DNA
aaccttacagccatttttcaaggtttgggagatactacccccccaggattcatagtggatctgttatcagcatctaaaga

SEQ ID NO: 150351 - DNA, 80 bp, synthetic construct
  source 1..80: mol_type = other DNA
attacagagaaactgcttaaaaacttgatcaagttagtaagcagtttggtaataattgttagaaattatgaggacactac

SEQ ID NO: 150352 - DNA, 80 bp, synthetic construct
  source 1..80: mol_type = other DNA
gccacctccgcctgccctaaggagagccctgccagcccccgaaggccccggaggccctccgcagcacgccccgcccaacc

SEQ ID NO: 150353 - DNA, 80 bp, synthetic construct
  source 1..80: mol_type = other DNA
gccaccttgcccaacgccgacgcctggatcagtccccccacgtccatctgcgtctgtcgccactcggcctcgtccagcag

SEQ ID NO: 150354 - DNA, 80 bp, synthetic construct
  source 1..80: mol_type = other DNA
gatgcagagcaatttgagtaccacctagggtggtacagccccatattcctcagcagacacagaagcaacacagagtttcc

SEQ ID NO: 150355 - DNA, 80 bp, synthetic construct
  source 1..80: mol_type = other DNA
tggacaagcagtcgttctacaagacagaagaagcaaggcaaactaccctgttaatgctatagttcaacagctacagcatg

SEQ ID NO: 150356 - DNA, 80 bp, synthetic construct
  source 1..80: mol_type = other DNA
acctaaatgatactcctttttacccatgggtccccagaaaccctaaatattgtgtgtctccggcgctacgcgcttcgcgc

SEQ ID NO: 150357 - DNA, 80 bp, synthetic construct
  source 1..80: mol_type = other DNA
tggggagactacatttataaagagacagtagtagacaatttcattaataatgccaaaaactattttgagtctagaaaagg

SEQ ID NO: 150358 - DNA, 80 bp, synthetic construct
  source 1..80: mol_type = other DNA
atcttccggtacagatacactatagccgccgcgtttctcttgaacggcgtggactccgccagtaacacgttcggatcgca

SEQ ID NO: 150359 - DNA, 80 bp, synthetic construct
  source 1..80: mol_type = other DNA
catactcgtagagggcaaggtactaataacctgtccttataccatgccgcccctgtacgaccccaaagacccaagcaagg

SEQ ID NO: 150360 - DNA, 80 bp, synthetic construct
  source 1..80: mol_type = other DNA
cagagacaagacgcggaaaagaggaagtccccaggggaaaacacagacacacgcagaagctcgcgggcgcaagggagtgg

SEQ ID NO: 150361 - DNA, 80 bp, synthetic construct
  source 1..80: mol_type = other DNA
acacccttgacattagagcaagctgcttatggtatccccaacttggaagctctagatcttaccaccagtgctggctttcc

SEQ ID NO: 150362 - DNA, 80 bp, synthetic construct
  source 1..80: mol_type = other DNA
cataagaactcttgttttagatacatacaaacacattaatttggataaactcaaaattttgtcttatggtgatgatgttc

SEQ ID NO: 150363 - DNA, 80 bp, synthetic construct
  source 1..80: mol_type = other DNA
gaaaacccagcaaaacttgcatatcaacccatgcctacaataggacctaaagcctatctgttcccagaacgcttaccacc

SEQ ID NO: 150364 - DNA, 80 bp, synthetic construct
  source 1..80: mol_type = other DNA
tacacacaagtatagtaccaactaccattacaaggctgatgagaatagtccccttgaggataggcacttcataacaacta

SEQ ID NO: 150365 - DNA, 80 bp, synthetic construct
  source 1..80: mol_type = other DNA
cgaatggctgagtttatgccgccagacggagacgggatcacttcagtgactccaggctgattcagggcgggtgccgaagg

SEQ ID NO: 150366 - DNA, 80 bp, synthetic construct
  source 1..80: mol_type = other DNA
attcattaagaagattgtaccctggtttgtttgaaaaacatttattgcctttcatgagtgatcttgcagccacccgcatg

SEQ ID NO: 150367 - DNA, 80 bp, synthetic construct
  source 1..80: mol_type = other DNA
tcttcatctttctcgtctggctgcacgttttaaccatcagggacctccgacgccccccacggacgaccgtgcgccgcaga

SEQ ID NO: 150368 - DNA, 80 bp, synthetic construct
  source 1..80: mol_type = other DNA
aatcgccaggagtggaccgtttagctacagagacgagataccctcagccacgctgactgccaactacaagttctacttta

SEQ ID NO: 150369 - DNA, 80 bp, synthetic construct
  source 1..80: mol_type = other DNA
gcacaggtctcatcgcaaaaagttggtgctcacgagaactctaatagggcgtatggtggctccaccattaattacaccac

SEQ ID NO: 150370 - DNA, 80 bp, synthetic construct
  source 1..80: mol_type = other DNA
gactcagcttctaatcccagtgtatttttccaacccaagagtggattcccacgcttcactataccattcacaggactggc

SEQ ID NO: 150371 - DNA, 80 bp, synthetic construct
  source 1..80: mol_type = other DNA
gaccttgtactcattacacatggtttccacacatgtagtgaggatatccataaatatgtgatcaatgtgcgtgagcacct

SEQ ID NO: 150372 - DNA, 80 bp, synthetic construct
  source 1..80: mol_type = other DNA
tcctctaaacggcatgtgtttagactgcaacatgacttctctcaccatatacaacataaccgttgaacacgctggaaaat

SEQ ID NO: 150373 - DNA, 80 bp, synthetic construct
  source 1..80: mol_type = other DNA
accgcgcatgcgcggccacgcccccgccgccattttgtgcagcccgccaatttctctttcaaacagaccaattagaagac

SEQ ID NO: 150374 - DNA, 80 bp, synthetic construct
  source 1..80: mol_type = other DNA
aactaatgttcaagctggatctggtgctgttgtaaagtactttaacattaattattacaaggatgcagcaagttctggac

SEQ ID NO: 150375 - DNA, 80 bp, synthetic construct
  source 1..80: mol_type = other DNA
agcccactcaccctgagacatcttcagatcgtttctataccctagagagtgtaatatggaatggcagttccaggggatgg

SEQ ID NO: 150376 - DNA, 80 bp, synthetic construct
  source 1..80: mol_type = other DNA
tgtactgattttattggtcatttcaatcacatcgctgctatgctcggccgtccggaagaccagaaccctcctccgccacc

SEQ ID NO: 150377 - DNA, 80 bp, synthetic construct
  source 1..80: mol_type = other DNA
acaggagatggattcaattaggactccaaaaatgtgtcaggatgtataatccaacaaacatcctggacgtaaaacaaggg

SEQ ID NO: 150378 - DNA, 80 bp, synthetic construct
  source 1..80: mol_type = other DNA
atggctgagttttccacgcccgtccgcagcgaggtagccacggagggaataccgcgcgtcccgagggcgtgtgccggagg

SEQ ID NO: 150379 - DNA, 80 bp, synthetic construct
  source 1..80: mol_type = other DNA
gttagtggatccaaacgggataaatttggaaatcacaatagtgaaattggatagaaatgaaaagtttagagacataagaa

SEQ ID NO: 150380 - DNA, 80 bp, synthetic construct
  source 1..80: mol_type = other DNA
agctgaacaaggctacatgtttcacaaactgcaccagtaccacatagaggaatgtcaggtagcgtctctccgcaaacagc

SEQ ID NO: 150381 - DNA, 80 bp, synthetic construct
  source 1..80: mol_type = other DNA
gtgcgactgttgagagacaccacacatatatctcagaccactctggttgcgcgtacgcagggaatagaagaaactattga

SEQ ID NO: 150382 - DNA, 80 bp, synthetic construct
  source 1..80: mol_type = other DNA
cctgtcataatgcagggtccgtctatcccagacctgcttttccctaacacacaaaaaaaaagccaacttcgactggtcgt

SEQ ID NO: 150383 - DNA, 80 bp, synthetic construct
  source 1..80: mol_type = other DNA
agacccagcctgttacacctggcagatgaggctacacaatccccactggcgacagtggtgtagcctgcgtggtgccctgc

SEQ ID NO: 150384 - DNA, 80 bp, synthetic construct
  source 1..80: mol_type = other DNA
gagaattagatcaattatctacttatttgttggatttacacccttatctatatacacactaaacctaattagaattacct

SEQ ID NO: 150385 - DNA, 80 bp, synthetic construct
  source 1..80: mol_type = other DNA
tggtaatgcattcggggatggattcacaacaaatatcaagcaacaatttgcagcagtcggaaataccatagtggatggct

SEQ ID NO: 150386 - DNA, 80 bp, synthetic construct
  source 1..80: mol_type = other DNA
acgccagagtcatgtaataaaaccaatgttccctcagcatatacatattccagaacaaacagtctctggggagactatgt

SEQ ID NO: 150387 - DNA, 80 bp, synthetic construct
  source 1..80: mol_type = other DNA
caaacaacaaaggcttaatgcagatcatgtttgttccacctggtcttgaacctccaaatgggaaagacagccgcctttgg

SEQ ID NO: 150388 - DNA, 80 bp, synthetic construct
  source 1..80: mol_type = other DNA
tccaaagagaatcgagaccgtggagcagctcggaggccgaggcagagacagaagccccctcggaagaggagccggagaac

SEQ ID NO: 150389 - DNA, 80 bp, synthetic construct
  source 1..80: mol_type = other DNA
ggaataggggaggaaccaggaataggtgaggaagaaatggtccagtgtaatttcagtatgacaggattacaaagggataa

SEQ ID NO: 150390 - DNA, 80 bp, synthetic construct
  source 1..80: mol_type = other DNA
tagaactaaatatttaaatgctacaagattagcactgccactactacaaacagtaggaaatgaactactagaatatcaca

SEQ ID NO: 150391 - DNA, 80 bp, synthetic construct
  source 1..80: mol_type = other DNA
ctggtaaatatagctttcgatgttacataaatgggtatccctctgaacaaaatcaaaactttaatttacaagtacatcct

SEQ ID NO: 150392 - DNA, 80 bp, synthetic construct
  source 1..80: mol_type = other DNA
acaacaaagacttgagaaaatccaaaaagaatttgaagctgtgtacccacagctacctacacagcgtcccacagacagca

SEQ ID NO: 150393 - DNA, 80 bp, synthetic construct
  source 1..80: mol_type = other DNA
caatgcttggtacccatgttgtttgggacattggactgcaatctaccatagtaatgacaataccatggacgtcaggggtg

SEQ ID NO: 150394 - DNA, 80 bp, synthetic construct
  source 1..80: mol_type = other DNA
tgcagaatcaggggcataatccccatcctgatatgcggacacgggagcggggccagaaactacgcgctccacagcgacga

SEQ ID NO: 150395 - DNA, 80 bp, synthetic construct
  source 1..80: mol_type = other DNA
gatgaatgagaacatacacatagcagtagaacattatgcagcccaactctacatgctagatataaacccagagcccataa

SEQ ID NO: 150396 - DNA, 80 bp, synthetic construct
  source 1..80: mol_type = other DNA
atatctgccaccaatgacatgggtacactatgcttcagagcacttgaagatgtgcagggcacagatataaaggtgtacat

SEQ ID NO: 150397 - DNA, 80 bp, synthetic construct
  source 1..80: mol_type = other DNA
aaatcagtaaattcattgattggatcaagagtaaagtgataccacaagtcaagtcaaagaaagagctactggagcattgc

SEQ ID NO: 150398 - DNA, 80 bp, synthetic construct
  source 1..80: mol_type = other DNA
cttagggttatcgctcttaaaatgcgcctgtctcgcatatacaggacccctaaaccgaaaggtgccgtgccactgccacc

SEQ ID NO: 150399 - DNA, 80 bp, synthetic construct
  source 1..80: mol_type = other DNA
ccggggtttatgggtacaacacactaaaccacatgggtagactatatgttagacatgtcaataaacacagccccaacact

SEQ ID NO: 150400 - DNA, 80 bp, synthetic construct
  source 1..80: mol_type = other DNA
cggaagcaatcctctcacgtggctagtcacgtgcgtgctacgtcatcgccgccattttaagtcacaaaatggccgacttc

SEQ ID NO: 150401 - DNA, 80 bp, synthetic construct
  source 1..80: mol_type = other DNA
ggggacaccccgttctacccgtggctaccccccaggcaaagtatcccccctacatgtagagtttccttcaaaataaagct

SEQ ID NO: 150402 - DNA, 80 bp, synthetic construct
  source 1..80: mol_type = other DNA
attaaattcttacagttcacaaaacaattacaactcaaggagaaacaaattgatgggttgccttatgcaaccactaagca

SEQ ID NO: 150403 - DNA, 80 bp, synthetic construct
  source 1..80: mol_type = other DNA
ttgttttatcggtggcagcggggagttctggtaacagctcatccacgtcaacctccgcaactacgttaaaatcgtccagt

SEQ ID NO: 150404 - DNA, 80 bp, synthetic construct
  source 1..80: mol_type = other DNA
aactcgcgcagcacgctcaaatcaaagtaacgtcgcgtgttccccaaaaccacgtcgggtagatgcagcttctgctcgtc

SEQ ID NO: 150405 - DNA, 80 bp, synthetic construct
  source 1..80: mol_type = other DNA
aatacaggaaataccagcaaatgctatataaaaacctgcaacacaacagttattcaagagtcatgtgacaaacattattg

SEQ ID NO: 150406 - DNA, 80 bp, synthetic construct
  source 1..80: mol_type = other DNA
tactttgcgctgttacacggaatccagaccttcagctacgggctggactttcggtcgcagttggaaaagatccgcgatct

SEQ ID NO: 150407 - DNA, 80 bp, synthetic construct
  source 1..80: mol_type = other DNA
tttatcaacttgcatcttgataactttaatttgaaaaattaatttgaaaattttaacaatgggagctcaggttactagac

SEQ ID NO: 150408 - DNA, 80 bp, synthetic construct
  source 1..80: mol_type = other DNA
gggggttacggcgggggccgagtcaagtagagtgggcaccggtgctcgcgttagggatccggccggttcatggacagggg

SEQ ID NO: 150409 - DNA, 80 bp, synthetic construct
  source 1..80: mol_type = other DNA
ttggatcagacaacagttttgaacttactataccttattcattctcaacttggatgcggaaaactcatggtaacaaactg

SEQ ID NO: 150410 - DNA, 80 bp, synthetic construct
  source 1..80: mol_type = other DNA
aaccagcaccccaagaaaaagcccagaaagaggagctactccaccagctccagctccagagacgccaccagcgagtcctc

SEQ ID NO: 150411 - DNA, 80 bp, synthetic construct
  source 1..80: mol_type = other DNA
ccggacacaccaatcctgacacatcaagttatgtatgtgccaccagggggtccaataccagcgaaggtcgacgattacag

SEQ ID NO: 150412 - DNA, 80 bp, synthetic construct
  source 1..80: mol_type = other DNA
gttgccgctggcggttccaccataaactatactaccataaattattataaggatagcgccagcaattcggcagcgaaaca

SEQ ID NO: 150413 - DNA, 80 bp, synthetic construct
  source 1..80: mol_type = other DNA
ctcactccattgcgcctgggtttcgggactgatgatctttgttggcgcactggtcatctgcttcctgcgatcacaacgaa

SEQ ID NO: 150414 - DNA, 80 bp, synthetic construct
  source 1..80: mol_type = other DNA
tctttaacagtccctgtaacgcaggggctgcccacaatgctcacacccgggtcaaatcagtttctaacttcagatgactt

SEQ ID NO: 150415 - DNA, 80 bp, synthetic construct
  source 1..80: mol_type = other DNA
gggagaagtcaataacttgatggaaattgctgaggtggactctgtggtgccagtaaacaacctcagcgacaatgtgaaga

SEQ ID NO: 150416 - DNA, 80 bp, synthetic construct
  source 1..80: mol_type = other DNA
aacaaatgcatccacaggaaccataaaagttcatactacaacttccacaagtggaaacacatttacccactggtcaagca

SEQ ID NO: 150417 - DNA, 80 bp, synthetic construct
  source 1..80: mol_type = other DNA
agcagcgtgcccgcgtcgcgctgcgaccacttgcgcatggcgcggcccgtgctgttggccaaaaacgcggcgcgccacac

SEQ ID NO: 150418 - DNA, 80 bp, synthetic construct
  source 1..80: mol_type = other DNA
gttcatgtacatcccacctggagcaccacacccagacactagggatgctttccagtggcaaacctcaaccaatccctccg

SEQ ID NO: 150419 - DNA, 80 bp, synthetic construct
  source 1..80: mol_type = other DNA
tctaaagaccccagagtgatacagtattgtgagaaagaaggattgatcacaaaatccccccactcagttgaaaggagttt

SEQ ID NO: 150420 - DNA, 80 bp, synthetic construct
  source 1..80: mol_type = other DNA
agagagttatgtatggacatgtccagtcaggtctaggggtcctgctggcgacagtgttctagcctgcgtggctgcctgcg

SEQ ID NO: 150421 - DNA, 80 bp, synthetic construct
  source 1..80: mol_type = other DNA
tccccttaccgggtagctcctcctgaaaccctcgtcccaggtccagtctcaccccctcccccccccctctctctctctct

SEQ ID NO: 150422 - DNA, 80 bp, synthetic construct
  source 1..80: mol_type = other DNA
ctcaactaagaccaaatgtagaccatgaaacagcaggccaaccgagtgctatgtcgtgcacttcctgggtggagtctacg

SEQ ID NO: 150423 - DNA, 80 bp, synthetic construct
  source 1..80: mol_type = other DNA
cattgcagttgtacttcaggggtttactattcccgatactacaataaatactatccaataatatgtgacaaacccacaaa

SEQ ID NO: 150424 - DNA, 80 bp, synthetic construct
  source 1..80: mol_type = other DNA
ccacacaaatccagggataataactggctcagcagtagggtgtgatccagatacattttggtcaattataccatgtctta

SEQ ID NO: 150425 - DNA, 80 bp, synthetic construct
  source 1..80: mol_type = other DNA
tacgcaggaactgtcacatagctaccacgaccaagggggagttcaatctcctgggtatctatgataattgtgcagtaata

SEQ ID NO: 150426 - DNA, 80 bp, synthetic construct
  source 1..80: mol_type = other DNA
agatgattcaactccggggttcattgtagatcttcttagtgcctccaaagacccaaaagtcatagaattctgtgagaaag

SEQ ID NO: 150427 - DNA, 80 bp, synthetic construct
  source 1..80: mol_type = other DNA
agacatctactatgaatgcataggtgttaactctttagctgaaaacaccgaaaaatataagaacctacaaaacacactat

SEQ ID NO: 150428 - DNA, 80 bp, synthetic construct
  source 1..80: mol_type = other DNA
cttacgaactccttcagcatgagtggtatgaaaaattttaattatatagaagtaataaataagtagtttattagttttac

SEQ ID NO: 150429 - DNA, 80 bp, synthetic construct
  source 1..80: mol_type = other DNA
gttggccattttaatcgtctggttgagcgctatggtactcctccgcgcccgggggctcccggcgctcccagaccgaatct

SEQ ID NO: 150430 - DNA, 80 bp, synthetic construct
  source 1..80: mol_type = other DNA
actgtcaagtccatcaggaatgaccactacaattccagttacagtgactattgcccctatgtacactgaattctcaggca

SEQ ID NO: 150431 - DNA, 80 bp, synthetic construct
  source 1..80: mol_type = other DNA
tgtagatctccttagtgcctccaaggacccaaaagtcatagagttttgtgagaaagagggatggattaaacagtcaaagt

SEQ ID NO: 150432 - DNA, 80 bp, synthetic construct
  source 1..80: mol_type = other DNA
aaccagcattgaaaactacatctataaatgggacactagaagggacatccttacacaaaaagctacagacagaattacaa

SEQ ID NO: 150433 - DNA, 80 bp, synthetic construct
  source 1..80: mol_type = other DNA
aacaaatgccccacaaactgcaaggatgttgtgttttgtctcagcctgcaaggatttttgtttaagaatggcacgtgaca

SEQ ID NO: 150434 - DNA, 80 bp, synthetic construct
  source 1..80: mol_type = other DNA
aattatgacaattatgatgactctattgaaaattttaaggtatggaaaataaacctacaggagatggcacaaatacgtag

SEQ ID NO: 150435 - DNA, 80 bp, synthetic construct
  source 1..80: mol_type = other DNA
tctggaactgacctttgtaatcactagcacccaacaaccctccaccacacaaaatcaggatgcgcagatactaacacacc

SEQ ID NO: 150436 - DNA, 80 bp, synthetic construct
  source 1..80: mol_type = other DNA
tggcgcagacgccgccgcagactatggagaagaagacctagagctactgttcgccgccgccgacgaagaccagtgagtag

SEQ ID NO: 150437 - DNA, 80 bp, synthetic construct
  source 1..80: mol_type = other DNA
cagaacaccaactgggtaaatataacacagggacgtcagcatcttttgacgatgtcatgaaagggaaaactgggggagtt

SEQ ID NO: 150438 - DNA, 80 bp, synthetic construct
  source 1..80: mol_type = other DNA
ggtccagtgcccactagcactgagagttttgcatggcagacatcaacaaaccccagcgtgttctggaccgaaggtaatgc

SEQ ID NO: 150439 - DNA, 80 bp, synthetic construct
  source 1..80: mol_type = other DNA
catgacataacaggaccaaacaataaaaaatggcagtacacatataccaaactcatggcccccatttactattcagcaaa

SEQ ID NO: 150440 - DNA, 80 bp, synthetic construct
  source 1..80: mol_type = other DNA
ggttgcctgttcttaacactcctgggagcgagcaattccttacgtccgatgacttccaatcaccgtgtgctctaccagaa

SEQ ID NO: 150441 - DNA, 80 bp, synthetic construct
  source 1..80: mol_type = other DNA
tacatgctaaaatacccaccaccaacaaaaaaaacaccacaaggagatcaagccaaccaagcagacagccaagatggaga

SEQ ID NO: 150442 - DNA, 80 bp, synthetic construct
  source 1..80: mol_type = other DNA
caatgaaagtaacccaactacatccaactcagcacctgcactagatgctgcagaaactggtcataccagtggtgtgcaac

SEQ ID NO: 150443 - DNA, 80 bp, synthetic construct
  source 1..80: mol_type = other DNA
tttcgatcccacgccggttgttgtggctgtggcaattttgtgcatcatctcactgtattggctgctcgctatggctttac

SEQ ID NO: 150444 - DNA, 80 bp, synthetic construct
  source 1..80: mol_type = other DNA
gaacttggaattatcaggtattagatctagaactgttgtcacccaaggactacccacaaccttaacaccaggatcggagc

SEQ ID NO: 150445 - DNA, 80 bp, synthetic construct
  source 1..80: mol_type = other DNA
tggctaatacgcattatcagtgcccttacaattatggttagaaatagtgcagacactccaaccattcttgccacactttc

SEQ ID NO: 150446 - DNA, 80 bp, synthetic construct
  source 1..80: mol_type = other DNA
ctggtgaggcaggccacaccattacagcatctaagcagtggggtgagcataatcctgatgaaaacccattctataattta

SEQ ID NO: 150447 - DNA, 80 bp, synthetic construct
  source 1..80: mol_type = other DNA
tctgcagatatccttacagcgcccttggcatcaggaaaagagacattctcaaccccgtaactagggatgtgtctaagatg

SEQ ID NO: 150448 - DNA, 80 bp, synthetic construct
  source 1..80: mol_type = other DNA
ccgcaactactcgacgaaggctactacttcaaagcctgggacctccgacgtggactatttggtgagaaagctctcaaaag

SEQ ID NO: 150449 - DNA, 80 bp, synthetic construct
  source 1..80: mol_type = other DNA
tcagggatactgtcccacgaatggccacctgtaagctccagatgaccatttttgttattctccacaacgagttagttctt

SEQ ID NO: 150450 - DNA, 80 bp, synthetic construct
  source 1..80: mol_type = other DNA
ttgaatgccgcattagcatcagaattgtgtaaggactgtcacaagccagctaatttcaaaaagtgttgtccccttatttg

SEQ ID NO: 150451 - DNA, 80 bp, synthetic construct
  source 1..80: mol_type = other DNA
gcggcgcgcccctgcccggcagtcttgagcgtggcgtggagtgtggtgaggaaggtcttgacctcggcgtgggagaggaa

SEQ ID NO: 150452 - DNA, 80 bp, synthetic construct
  source 1..80: mol_type = other DNA
gaaatgattgacaaatatggaatagacttgccttatgtcacctacctgaaagatgaactaagagctcctgagaaaatcaa

SEQ ID NO: 150453 - DNA, 80 bp, synthetic construct
  source 1..80: mol_type = other DNA
atatgtatactgttgatttaagatcgcaaacagaacttgcacaagaagtttttgctataccagttgacattgcttcacaa

SEQ ID NO: 150454 - DNA, 80 bp, synthetic construct
  source 1..80: mol_type = other DNA
cagtttgccctccctccctgtaacgtagaagtaatacgaacagaccaataggggatggcgaaccacgccgttcgaggtca

SEQ ID NO: 150455 - DNA, 80 bp, synthetic construct
  source 1..80: mol_type = other DNA
attttaatggtcactatggagtctattaaggatttagttaatgttgctactggtgccatggacactctttctttatctgg

SEQ ID NO: 150456 - DNA, 80 bp, synthetic construct
  source 1..80: mol_type = other DNA
tgcggaccgtggcagtacagagatgataacaaaaactctcagctagtggccaagtactactttcggttcaagtggggagg

SEQ ID NO: 150457 - DNA, 80 bp, synthetic construct
  source 1..80: mol_type = other DNA
ttctcccccagatcacggctgtctagacgcgtgggcctcccagggggtgttgctactcaacaccatcctgaccgtgcaaa

SEQ ID NO: 150458 - DNA, 80 bp, synthetic construct
  source 1..80: mol_type = other DNA
aatagattttacactcttgaaagcaaagtctggacaagtacatctcagggttggtggtggaaattgccagatgcacttaa

SEQ ID NO: 150459 - DNA, 80 bp, synthetic construct
  source 1..80: mol_type = other DNA
ctaaaaattgttgcatatggtgatgatgtgatagcttcatacccggaagaacttgacccagcacaaatagccatatccgg

SEQ ID NO: 150460 - DNA, 80 bp, synthetic construct
  source 1..80: mol_type = other DNA
aaacaccgtagaaacacccgccgccaaccccagagcgcctgcaacgcgcaacatgacaagtgctgtggagcgacacgcac

SEQ ID NO: 150461 - DNA, 80 bp, synthetic construct
  source 1..80: mol_type = other DNA
cttccgaatggctgagtttttgctgtccgtccgcagcgaggaacgaccacggagggcgatccgcgcgtcccgagggcgtg

SEQ ID NO: 150462 - DNA, 80 bp, synthetic construct
  source 1..80: mol_type = other DNA
gtacctgacgactccactctcctacaagactttggcatatacagccccttctacctcacacccacaagaataagcctaga

SEQ ID NO: 150463 - DNA, 80 bp, synthetic construct
  source 1..80: mol_type = other DNA
tactggaagtggaaaatttcaatgccacagaagcagcagacaaaaagaaacaatttgtagtttggcctattacttacacg

SEQ ID NO: 150464 - DNA, 80 bp, synthetic construct
  source 1..80: mol_type = other DNA
tggcgtcattaccgttccagcaggggagcaaatggcgccatttgaagaaaagaaatcacttggagacgatctatttgtgt

SEQ ID NO: 150465 - DNA, 80 bp, synthetic construct
  source 1..80: mol_type = other DNA
ataaatatggatacacctccatcaatgacttcgggacacttgcagtgcgcattgtcaatgaatatgatccagtgcaagtt

SEQ ID NO: 150466 - DNA, 80 bp, synthetic construct
  source 1..80: mol_type = other DNA
tttttaccaaaccgccattatagttcccccaaacacacccaccagcatgtctatgcttgcttttgtcagtgcgtgtaacg

SEQ ID NO: 150467 - DNA, 80 bp, synthetic construct
  source 1..80: mol_type = other DNA
aatagaccacaatccagacggctctccagtagctaacaacggtaaacccgatggaaatagctttccatcattagagaact

SEQ ID NO: 150468 - DNA, 80 bp, synthetic construct
  source 1..80: mol_type = other DNA
gacactctttgaagagtatgaaaaactgcacaataactggagcagatctaatgtagacttagagttagtaagatacctag

SEQ ID NO: 150469 - DNA, 80 bp, synthetic construct
  source 1..80: mol_type = other DNA
agcacacacatcccataaaaataacaactagagtgtatcacaaagccaagcacgttaaggcttggtgccctagaccacca

SEQ ID NO: 150470 - DNA, 80 bp, synthetic construct
  source 1..80: mol_type = other DNA
tctacattttgcggttgtactgaccctctgctgcatattactctcattgctggccgccttactaaccccgtacccgtcac

SEQ ID NO: 150471 - DNA, 80 bp, synthetic construct
  source 1..80: mol_type = other DNA
agatggcgacgaaggaggagggcgtggggcaggagacggtacataaggcgccgcagacttaggaggagaaggaaaaagat

SEQ ID NO: 150472 - DNA, 80 bp, synthetic construct
  source 1..80: mol_type = other DNA
tggatttacccctctgactacacacacgcttgattagaatcgttatattgataagacactaccaccacaatgggtgctca

SEQ ID NO: 150473 - DNA, 80 bp, synthetic construct
  source 1..80: mol_type = other DNA
ggaacagtatacgccctctacaaactcatgtgcattgcccaagggccttatactggattaccccaacccaaaccaagaaa

SEQ ID NO: 150474 - DNA, 80 bp, synthetic construct
  source 1..80: mol_type = other DNA
gaccgggctgcgggtgtttgcggcgtgctgtaggcgggacggtgcggaactgggctggtggttttgcggcccgtagctgt

SEQ ID NO: 150475 - DNA, 80 bp, synthetic construct
  source 1..80: mol_type = other DNA
cacatccaggtgatcagggcattgatctaagcacagctgaggtacaatatggacctgctaaagatgttgtttatagtatg

SEQ ID NO: 150476 - DNA, 80 bp, synthetic construct
  source 1..80: mol_type = other DNA
agcatacaacacaaataacctactgaatgttgccaaggctctattgccatgcactgattgtccaaaaccagagttctaca

SEQ ID NO: 150477 - DNA, 80 bp, synthetic construct
  source 1..80: mol_type = other DNA
catctccccaactaatgatatggggacattgtgtttccgatcattagatgattctgtcaatagtcacatcaaggtgtaca

SEQ ID NO: 150478 - DNA, 80 bp, synthetic construct
  source 1..80: mol_type = other DNA
gttatgaccaatcctgctcttatgagtcccagtattgaggcatgtggtttctccgataggctcaaacaaattactatcgg

SEQ ID NO: 150479 - DNA, 80 bp, synthetic construct
  source 1..80: mol_type = other DNA
agactactgtgagaaaaagggatggattgccaggctcaacaatgatttggtgatggaaagaaatttgaacagggctatga

SEQ ID NO: 150480 - DNA, 80 bp, synthetic construct
  source 1..80: mol_type = other DNA
tacagaaacccatttgcagctccccgtcgtccttggtttcctaggtctgaccccttcttggctatgagggtggaagaatt

SEQ ID NO: 150481 - DNA, 80 bp, synthetic construct
  source 1..80: mol_type = other DNA
tgggttccttagtgaaaacgctctcaagcgcctgcacgaaaaaccgctcgattttgatggctatacaaaacctccaaaaa

SEQ ID NO: 150482 - DNA, 80 bp, synthetic construct
  source 1..80: mol_type = other DNA
attccaagtactaagtggattctataacagtattttaggcatacaaaatccacatgtagacaaagcctatgaatatctaa

SEQ ID NO: 150483 - DNA, 80 bp, synthetic construct
  source 1..80: mol_type = other DNA
tcagtcaccttgtgccctaccctggttccatcctactaaagaaatattcataccaggacaggtcagaaatcttattgaat

SEQ ID NO: 150484 - DNA, 80 bp, synthetic construct
  source 1..80: mol_type = other DNA
catatggaagttgctattgctcattactcagcacaattggcaacattggacattgaccccaaaccaatagcattagaaga

SEQ ID NO: 150485 - DNA, 80 bp, synthetic construct
  source 1..80: mol_type = other DNA
gccaccacacaaggtcccatcactgattatgtaacccaactcggaaatgccttcgggaatggatttacacaaaccttgga

SEQ ID NO: 150486 - DNA, 80 bp, synthetic construct
  source 1..80: mol_type = other DNA
tatcaatagaaacagttgtgctaatggcagctcattgcatgaattttaaaagaaggggaggaataggggatatgacccct

SEQ ID NO: 150487 - DNA, 80 bp, synthetic construct
  source 1..80: mol_type = other DNA
tactcatttaacaacactgagacagtactacttcttttgggaaacacacccagcagcggccaacaaaacacctgtaacac

SEQ ID NO: 150488 - DNA, 80 bp, synthetic construct
  source 1..80: mol_type = other DNA
caccgtgtgcgttaccaaactttgatgtcaccccgcccattgacatacctggagaggtgaagaacatgatggagttggca

SEQ ID NO: 150489 - DNA, 80 bp, synthetic construct
  source 1..80: mol_type = other DNA
tgtcggtgcagccaacctttcacatacagcccccaaaacacttgaatcactgccaccatcatcagcgtatactgcgccga

SEQ ID NO: 150490 - DNA, 80 bp, synthetic construct
  source 1..80: mol_type = other DNA
gaaggccggcctcgcccgtcccacataatggatgggcaggaagggaaagcccgggacatagggctggaaatctgagcccc

SEQ ID NO: 150491 - DNA, 80 bp, synthetic construct
  source 1..80: mol_type = other DNA
gtcccggtcagaggccgagggcatgggcaggataaagttttccttttgggcggccgccaggaggcaggagaacacgcgga

SEQ ID NO: 150492 - DNA, 80 bp, synthetic construct
  source 1..80: mol_type = other DNA
aaggtgcaacacgtggaagccgtgctgcgacaggtgtacacgccgggcttgttagatcatcacaacgtgtgcgacgtgga

SEQ ID NO: 150493 - DNA, 80 bp, synthetic construct
  source 1..80: mol_type = other DNA
actacaaatacacccacccaggtgagagaggaataaacttagatgatatagaaaaagaaggaggagcaacacacaaccca

SEQ ID NO: 150494 - DNA, 80 bp, synthetic construct
  source 1..80: mol_type = other DNA
tacaccaattggacaggtagtataagattaagtttcatgttttgtggcagtgcaaacacctcactcaaacttcttctagc

SEQ ID NO: 150495 - DNA, 80 bp, synthetic construct
  source 1..80: mol_type = other DNA
aaaggccacaggtcccccaaagtagtgatttgtggagatgggagctggctcaaacaccttggtgggtccattcttaatgg

SEQ ID NO: 150496 - DNA, 80 bp, synthetic construct
  source 1..80: mol_type = other DNA
tcaccatcgtccgttgtcttcgcgacctccggaacccgcaaaaaggatctcctgaagcaacctgttcctactctgggcca

SEQ ID NO: 150497 - DNA, 80 bp, synthetic construct
  source 1..80: mol_type = other DNA
ccgctgcggagacaggtcatacctcacaggtggttcccagcgataccattcagacgcgccacgtcgtcaacttccacaca

SEQ ID NO: 150498 - DNA, 80 bp, synthetic construct
  source 1..80: mol_type = other DNA
tggatggatcgggcggacgtgcgtagctgtattattaaggcgctaacgcctcgtctgagccggggtgccgccgctgccgc

SEQ ID NO: 150499 - DNA, 80 bp, synthetic construct
  source 1..80: mol_type = other DNA
attcatgttctgttcctcagtgataggggttttcttagagttggacatacatacgacacagaaacaaatagaaccaattt

SEQ ID NO: 150500 - DNA, 80 bp, synthetic construct
  source 1..80: mol_type = other DNA
agatgcctacgcaaagcctagtaatacactggaagatttatggctggtcgctccactataccccatagtagacctggcag

SEQ ID NO: 150501 - DNA, 80 bp, synthetic construct
  source 1..80: mol_type = other DNA
gaggtccggctatctgaggcacgtacacagctgacacggcggttgtggccgtatagactttcatctggggcgtagaggca

SEQ ID NO: 150502 - DNA, 80 bp, synthetic construct
  source 1..80: mol_type = other DNA
gatttatactgcaatgaacaaggaccaccacatattagggacttgatgcctcatcaaaaaatagatatactgtcagattt

SEQ ID NO: 150503 - DNA, 80 bp, synthetic construct
  source 1..80: mol_type = other DNA
caccaatcttaacgtaacttcaagtggcacaaatgaaggaaacattagtaatgaagacaaagaaatttttgaaaaatggt

SEQ ID NO: 150504 - DNA, 80 bp, synthetic construct
  source 1..80: mol_type = other DNA
accagtggtatcaagcacaagaacttctgtttcctcggagcggagtatagatggtccccaccgtcaaaagctcttaaccg

SEQ ID NO: 150505 - DNA, 80 bp, synthetic construct
  source 1..80: mol_type = other DNA
aaaacccaaaagcctagcagccagttagtaatgaaatacaagtttagatttaactggggtggcaatcctatatccgaaca

SEQ ID NO: 150506 - DNA, 80 bp, synthetic construct
  source 1..80: mol_type = other DNA
atacttccacgccgattacgcccacaagcttgatatctactacacagttagcatctaccaacacatttacatcctccaac

SEQ ID NO: 150507 - DNA, 80 bp, synthetic construct
  source 1..80: mol_type = other DNA
ataaggcaataggcttctcagcaacggaagagaagcaaaagcaagtactagatacactgtatgaacacaactcatactgg

SEQ ID NO: 150508 - DNA, 80 bp, synthetic construct
  source 1..80: mol_type = other DNA
aagacctggcagcagtcatgtcagacccgaatttggaacgagattcgatgtgtcttcacgacgacgaatcctgccgattc

SEQ ID NO: 150509 - DNA, 80 bp, synthetic construct
  source 1..80: mol_type = other DNA
ctacctcatgacgcacgcaggccgttacgccgacgtgatccaagaggtggtcgagcgcgaccgcctcaaaaagcaggtgg

SEQ ID NO: 150510 - DNA, 80 bp, synthetic construct
  source 1..80: mol_type = other DNA
ggggagaccatgtatataaagacagcattgtagaagcaatgaaaaaaaatgcagaaaacatgtataatgcccacaaacag

SEQ ID NO: 150511 - DNA, 80 bp, synthetic construct
  source 1..80: mol_type = other DNA
accttccaaatgcccggaaccggtacactccctcgcagaatacaagtggcggacccgaaatacctcgggccccagtacac

SEQ ID NO: 150512 - DNA, 80 bp, synthetic construct
  source 1..80: mol_type = other DNA
tcagccaaagcgctgagaaaagaaaccaccaccgacccaacaaaagaaccaaccttcaagaccacggaaagagacaccag

SEQ ID NO: 150513 - DNA, 80 bp, synthetic construct
  source 1..80: mol_type = other DNA
tgccccttgactgcggtgtgtaaactcacctccgccgcctctacgtgcacttcctgggctgggtcttcgagtccatataa

SEQ ID NO: 150514 - DNA, 80 bp, synthetic construct
  source 1..80: mol_type = other DNA
ctaccagaaaaagacggcactagacaagccatactacgccacttgcaccctcagtcactcacaggcacagcgccaaatgc

SEQ ID NO: 150515 - DNA, 80 bp, synthetic construct
  source 1..80: mol_type = other DNA
tcactttacaaaatggcggcgacagccttccgctttacacaaaatggtggtgtttatcttcctggtgaaaggtcagcaac

SEQ ID NO: 150516 - DNA, 80 bp, synthetic construct
  source 1..80: mol_type = other DNA
aaaaggtgatgactttattcctacatgtaattgtactcaagccacatattattgtagacacaaaaacaggtattttccaa

SEQ ID NO: 150517 - DNA, 80 bp, synthetic construct
  source 1..80: mol_type = other DNA
ctaacgcatattctcatttttatgatggatttgctactatccccatcgaaggagagaccatggatccaggtgcagcatac

SEQ ID NO: 150518 - DNA, 80 bp, synthetic construct
  source 1..80: mol_type = other DNA
gagcagcgagcactccagttccagctgcagcagttcgcagtccaactcgccaagacgcaggcgaacctccacgtaaaccc

SEQ ID NO: 150519 - DNA, 80 bp, synthetic construct
  source 1..80: mol_type = other DNA
aatattgtgaggaaaataaatggataattccaactgattgtagaatagaaagggatttaaacttagccaataatatcatt

SEQ ID NO: 150520 - DNA, 80 bp, synthetic construct
  source 1..80: mol_type = other DNA
atccggtacgtactccacggtaggacgagctatagaattgataaatctgataaatgacctcttgcatggcctcttgtaaa

SEQ ID NO: 150521 - DNA, 80 bp, synthetic construct
  source 1..80: mol_type = other DNA
tatcatgcacattagagccgccaaagcctacagcaaatctgggaaactcaatgttagccaggctatggctactatgtcat

SEQ ID NO: 150522 - DNA, 80 bp, synthetic construct
  source 1..80: mol_type = other DNA
cagcacaactccttacactagacattgactccagaccaataactgtagaggatagtgtttttggaatagatggtttagaa

SEQ ID NO: 150523 - DNA, 80 bp, synthetic construct
  source 1..80: mol_type = other DNA
tcctagccccccctactattacctccctgtctgcgatgaacagaagatttttcttagacttggatattgttgtgcatgag

SEQ ID NO: 150524 - DNA, 80 bp, synthetic construct
  source 1..80: mol_type = other DNA
atcgttatcacttcgacccgccggcacctcctcccggaggccccccgccgggaccgcggccagcactaagggccctacct

SEQ ID NO: 150525 - DNA, 80 bp, synthetic construct
  source 1..80: mol_type = other DNA
cgatcacgaagaatcgacggcaggcgcgacgtccgtaccggaggtcctgggtgcgcgctacgaacccgcacacctggccg

SEQ ID NO: 150526 - DNA, 80 bp, synthetic construct
  source 1..80: mol_type = other DNA
ctaagcctccgagaacacggaaggaagccatgcttggaacccatgtgatttgggatgtcgggttacagtcttcgtgcaca

SEQ ID NO: 150527 - DNA, 80 bp, synthetic construct
  source 1..80: mol_type = other DNA
gccctatatgcccccggccagcgacaggctgaggaacgagcagatgattgggcaggtgctgttgatgcccaagacggctt

SEQ ID NO: 150528 - DNA, 80 bp, synthetic construct
  source 1..80: mol_type = other DNA
ccagggtggcagacacaattagcagtggtccaacgaactcccaagcagtcccagcattgacggcggttgagaccgggcac

SEQ ID NO: 150529 - DNA, 80 bp, synthetic construct
  source 1..80: mol_type = other DNA
aacactacaacaagcaaaagaagtattaataaataacatggaaaattggcatagaaaagtacaacaagaaggagttagca

SEQ ID NO: 150530 - DNA, 80 bp, synthetic construct
  source 1..80: mol_type = other DNA
tttgaatcacaaaatggccgacttccttcctctttttcaaaaaaaaagcggaagtgccgccgcggcggcggggtgcggcg

SEQ ID NO: 150531 - DNA, 80 bp, synthetic construct
  source 1..80: mol_type = other DNA
cctcttccgaggaagaaaagagccttatctcgcaagaagaggtcctccagacggagaacctacagctccagctcagaaag

SEQ ID NO: 150532 - DNA, 80 bp, synthetic construct
  source 1..80: mol_type = other DNA
ggtacattcacagacaagtataatccatccactgatgccaatgatgggagaacctttgcagcagtagattacttactagg

SEQ ID NO: 150533 - DNA, 80 bp, synthetic construct
  source 1..80: mol_type = other DNA
agggctgggtggtgcttgggcacagaggtctcagcagccgccttggtctcggccccggccctaagtctgagccccaggca

SEQ ID NO: 150534 - DNA, 80 bp, synthetic construct
  source 1..80: mol_type = other DNA
attagagatatggtgcagttaaggcgaaaatgtgagatgttcacatacatgagatttgacttggaagttaccttcgtggt

SEQ ID NO: 150535 - DNA, 80 bp, synthetic construct
  source 1..80: mol_type = other DNA
ctcaaaaaacactgaggacgtgaccccctttgaagactggctatatactacagcctcacactatcaaacttttgccaccg

SEQ ID NO: 150536 - DNA, 80 bp, synthetic construct
  source 1..80: mol_type = other DNA
aacagaaaagatagtcatgggtgctaggggtacgctaggttgcttggcaccttggtcatctgttctcaacaatggtgcca

SEQ ID NO: 150537 - DNA, 80 bp, synthetic construct
  source 1..80: mol_type = other DNA
tccgagaacggtaatttgcaagtgacttacgtgcggcattacctgaaaaaccacggcgaatcctccagcggaggcggtgg

SEQ ID NO: 150538 - DNA, 80 bp, synthetic construct
  source 1..80: mol_type = other DNA
tcccagaagcaattaaaaggcgattcttcattgatgtggatctagttattatcagcaaatttaggaatgctaatggatta

SEQ ID NO: 150539 - DNA, 80 bp, synthetic construct
  source 1..80: mol_type = other DNA
aggaatcaatctactacccaaagcacatccagtatgacattctcattggtgagggaccttgttctccaggtgattgtggt

SEQ ID NO: 150540 - DNA, 80 bp, synthetic construct
  source 1..80: mol_type = other DNA
tgttcttcaacgtaggcaagacagccaggtttagtgttccttacttaggaattgcatcagcatacaacaatttctatgat

SEQ ID NO: 150541 - DNA, 80 bp, synthetic construct
  source 1..80: mol_type = other DNA
tgggtgtccgtgtttccatttttactttttgtgtcatttatggttacaattaagttgtaaccatgggtgcacaggtgtct

SEQ ID NO: 150542 - DNA, 80 bp, synthetic construct
  source 1..80: mol_type = other DNA
aactgacaccaatgatgttgacactgagataacactactgtggctggaccgcaatgaaaaattcagggatattcgccgct

SEQ ID NO: 150543 - DNA, 80 bp, synthetic construct
  source 1..80: mol_type = other DNA
aacctaagccagtgacaaaggtgcggaataacataataacaacaggagcatttggacagcagtctggtgcagtttacgta

SEQ ID NO: 150544 - DNA, 80 bp, synthetic construct
  source 1..80: mol_type = other DNA
cctctaatggtacaggtacagcaacagcagactccattattaaaattctagttgacaacatgaaatcatactatcaaaaa

SEQ ID NO: 150545 - DNA, 80 bp, synthetic construct
  source 1..80: mol_type = other DNA
agaaaaggcaacgtagtaaccagcaatgaatacctaaatcataaaacaggcctattttcacccatatttctaagtgcaaa

SEQ ID NO: 150546 - DNA, 80 bp, synthetic construct
  source 1..80: mol_type = other DNA
actgagaaaagctgtggtccagggtccagagcatgaatttggcatggcacttataaagagaaattgccacatagctacta

SEQ ID NO: 150547 - DNA, 80 bp, synthetic construct
  source 1..80: mol_type = other DNA
ttacgcagcgagcagttacttgagtctgtaataggacgcattaccaatatgaaaagttactcaataagatcaaaaagtag

SEQ ID NO: 150548 - DNA, 80 bp, synthetic construct
  source 1..80: mol_type = other DNA
cggcaccctattgggtaatgcatttgtgtttccacaccaaataatcaacctacggaccaacaattgcgccaccttggtgc

SEQ ID NO: 150549 - DNA, 80 bp, synthetic construct
  source 1..80: mol_type = other DNA
ggtgcgactgccgccgcctccgccgccgcagctgtcgataccgggtcaggtggcgagggacaaccccaagacaccgcccc

SEQ ID NO: 150550 - DNA, 80 bp, synthetic construct
  source 1..80: mol_type = other DNA
ctgatttatttacaaagtggagagtcacctacctccagacatatcaaatcagaaggaaattagaaatgtttacatatgcc

SEQ ID NO: 150551 - DNA, 80 bp, synthetic construct
  source 1..80: mol_type = other DNA
gaacccaaacctgttgtgacatatgactcaaagttagaatttggggcatttaccaatctaccacatgtgttgatgaattt

SEQ ID NO: 150552 - DNA, 80 bp, synthetic construct
  source 1..80: mol_type = other DNA
tactgctcctttaccccaaaagacaaaaagggccaagagaacattataaatataagagactctaactttcattatttaac

SEQ ID NO: 150553 - DNA, 80 bp, synthetic construct
  source 1..80: mol_type = other DNA
acccactctacctatagagtgtcctttcaactaaaagccccccaataaaatgtcaaggccgtgggagtttcactgctcgg

SEQ ID NO: 150554 - DNA, 80 bp, synthetic construct
  source 1..80: mol_type = other DNA
acatccaggtgagagaggtagaacaattgggatacctgatcgtctacatccaaataaacaacctagtgacgataattggt

SEQ ID NO: 150555 - DNA, 80 bp, synthetic construct
  source 1..80: mol_type = other DNA
ccctcccactcgtggagactgggagacagagtatgcagcagccaaagcttttaacagaccccctagatccttcctaacag

SEQ ID NO: 150556 - DNA, 80 bp, synthetic construct
  source 1..80: mol_type = other DNA
agcaactacgcaaagcctagtatcacttttgagaatatatggttggtcgctccactataaacccaatagtagacctggca

SEQ ID NO: 150557 - DNA, 80 bp, synthetic construct
  source 1..80: mol_type = other DNA
gtgtattaattcacggcagccctggctccgggaaatctctagccacttcattgattggcagatcaattgcagacaatcat

SEQ ID NO: 150558 - DNA, 80 bp, synthetic construct
  source 1..80: mol_type = other DNA
gtatggtctagatctcccttatgtaacatacctcaaagatgaactgagaagtccagagaagataaaagctggtaaaacca

SEQ ID NO: 150559 - DNA, 80 bp, synthetic construct
  source 1..80: mol_type = other DNA
gtggggaagggtcgctgcaagcgcggaccccgttttcaccccttccggactacaaaaatggcgcattagtgacgtcacgg

SEQ ID NO: 150560 - DNA, 80 bp, synthetic construct
  source 1..80: mol_type = other DNA
tgctgctttctgcggctgtgctgaccctgctgggcattttaatcgcctttattctggccagccgggcggcggaccagcta

SEQ ID NO: 150561 - DNA, 80 bp, synthetic construct
  source 1..80: mol_type = other DNA
gtaccttaatccaggaatatctgacagttacaactcaaagatttttaactctacatccacatcactaataaattggctta

SEQ ID NO: 150562 - DNA, 80 bp, synthetic construct
  source 1..80: mol_type = other DNA
tactgctgacttacaggttgatgttgctgacacacctggaaaggatgtgatacctgactgtaattgcaccagtggcactt

SEQ ID NO: 150563 - DNA, 80 bp, synthetic construct
  source 1..80: mol_type = other DNA
atggggcatgtccaaacaacatgatgggcacattctcagtacgcaccgtggggtcgtcaaagtcaaaatatcccttagtc

SEQ ID NO: 150564 - DNA, 80 bp, synthetic construct
  source 1..80: mol_type = other DNA
tggagttgaagtaaaagtagtagactcatatgatttgtttaacaaagaaggagtaaaactggagattacagtaatcctct

SEQ ID NO: 150565 - DNA, 80 bp, synthetic construct
  source 1..80: mol_type = other DNA
aggagccttttggaggtggtcacagcaccatgagattctcccttcagatactctttgaggagcacctcaggggtcttaac

SEQ ID NO: 150566 - DNA, 80 bp, synthetic construct
  source 1..80: mol_type = other DNA
cttgcaatgtaagctttaaacttggcttcaaataaactaggccgtgggagtttcacttgtcggtgtctacctctataagt

SEQ ID NO: 150567 - DNA, 80 bp, synthetic construct
  source 1..80: mol_type = other DNA
tcctgtttttcgtccgaagagctttaaacaaaaaatatcatccactgagggacgatataagtgaatcagaatttatagtt

SEQ ID NO: 150568 - DNA, 80 bp, synthetic construct
  source 1..80: mol_type = other DNA
attttagtgaaacacaaggacaaatcactaagaggacaagcactaaagaatatggtttaccaactatacacactcctagt

SEQ ID NO: 150569 - DNA, 80 bp, synthetic construct
  source 1..80: mol_type = other DNA
ttgcatcgtacccagacccactagatccaaaagaaattgcagaaactggtgcaaaatatggactgacaataaccccagca

SEQ ID NO: 150570 - DNA, 80 bp, synthetic construct
  source 1..80: mol_type = other DNA
gggggggacggcgcgttgcggggcgtcgcgggatggcaggaacgggggcctttcgcagcggacagggggaaaacacaggg

SEQ ID NO: 150571 - DNA, 80 bp, synthetic construct
  source 1..80: mol_type = other DNA
aacagaccctaatgaattggttcaaacctggaatgttatggaagatacttagtacctgctgatctggtagtaatgcaaac

SEQ ID NO: 150572 - DNA, 80 bp, synthetic construct
  source 1..80: mol_type = other DNA
cacggtggcccaggaagtggtaaatctcttgctactaccataatatctaggggtttagcagcagaaggagatatttactc

SEQ ID NO: 150573 - DNA, 80 bp, synthetic construct
  source 1..80: mol_type = other DNA
caccacctttggtaatggaaagatgccagatggttcggggcacatacccatctactggcaacaaagatggtggatcagac

SEQ ID NO: 150574 - DNA, 80 bp, synthetic construct
  source 1..80: mol_type = other DNA
aactgtacccatcacaatttccattagtcctatgtgtgctgagttctctggagcaagagcaaagaaccagggattaccag

SEQ ID NO: 150575 - DNA, 80 bp, synthetic construct
  source 1..80: mol_type = other DNA
gaattcatgacaattgtgctgttgtaccaactcatgctgaatgtggagatatagttaatatagatggtagagacattaga

SEQ ID NO: 150576 - DNA, 80 bp, synthetic construct
  source 1..80: mol_type = other DNA
ctccacttcagaggtggatgtcggcactcaaggatcggcagcagcaggggaggaaatcctctcacaactgtaccgccctc

SEQ ID NO: 150577 - DNA, 80 bp, synthetic construct
  source 1..80: mol_type = other DNA
gctgtaagactaacatggtataagaaaagtttctatacagatgtgacacctgatgtagcagaccacctattgcatgggtc

SEQ ID NO: 150578 - DNA, 80 bp, synthetic construct
  source 1..80: mol_type = other DNA
caccacaaacaagattggctgaagaaatttttgcaattaaagtagatattgcctcacatcccttggccacaactcttatt

SEQ ID NO: 150579 - DNA, 80 bp, synthetic construct
  source 1..80: mol_type = other DNA
ccaatcataacttattgcacccacccacaataacctgcaccactgctatgaacaggaggtttttccttgatctggatata

SEQ ID NO: 150580 - DNA, 80 bp, synthetic construct
  source 1..80: mol_type = other DNA
tcccaaaaagctcgcgtgattacgcttggcaaacatctaccaatcccagcgtattttggactgaggggaatgcccctccc

SEQ ID NO: 150581 - DNA, 80 bp, synthetic construct
  source 1..80: mol_type = other DNA
ctcgatagtggtttagacacacaacacctcttgtgcttcgtgatggcagccaggcagcgtcttcaggacattcgacgtgg

SEQ ID NO: 150582 - DNA, 80 bp, synthetic construct
  source 1..80: mol_type = other DNA
agttaaaccatgaaacagacatgtacaatgctgatggtcaaaatttttcacagtggaaaataacattgatggagatggca

SEQ ID NO: 150583 - DNA, 80 bp, synthetic construct
  source 1..80: mol_type = other DNA
tccgcatcatctactccaaacaatcagttaagtgataatgaatactttgtaaaacttgatggcctatggggagaccccat

SEQ ID NO: 150584 - DNA, 80 bp, synthetic construct
  source 1..80: mol_type = other DNA
tatccagataaactagatatggcttatttagctcaaattggggaaaaatatggtttaaagatgacacctgcagataaatc

SEQ ID NO: 150585 - DNA, 80 bp, synthetic construct
  source 1..80: mol_type = other DNA
agacttcggcctccactttaccttgtaaaaactaccaaaatggccgttccagtgacgtcacagccgccattttaagtagc

SEQ ID NO: 150586 - DNA, 80 bp, synthetic construct
  source 1..80: mol_type = other DNA
cggaccgtgcacgcgctctcgcggcccttcaacggcaccaccgagacgtgcgacctggacggctacatgtgtccgggcat

SEQ ID NO: 150587 - DNA, 80 bp, synthetic construct
  source 1..80: mol_type = other DNA
tatacacagttgaggcaacagtggcttgataactttatataaatatactacacaaatttgtaatagaattagtttagtat

SEQ ID NO: 150588 - DNA, 80 bp, synthetic construct
  source 1..80: mol_type = other DNA
aaagaatataaagatgtagaaataaaagtactaaacaaaaaggtaagagccaccataatgacaggtgataccccaatcaa

SEQ ID NO: 150589 - DNA, 80 bp, synthetic construct
  source 1..80: mol_type = other DNA
tccgctaaaaagcagcggtggcactaattatgtcccgattacaatcacagttgcgcccatggatgccgagtataatgggt

SEQ ID NO: 150590 - DNA, 80 bp, synthetic construct
  source 1..80: mol_type = other DNA
tggtggcgaggaaagtgagcggcggcgctgacagagctcggcgttggcggcggcatttgccgctgtgtcggctgctattg

SEQ ID NO: 150591 - DNA, 80 bp, synthetic construct
  source 1..80: mol_type = other DNA
ccttcgcaccacagacatatacacaaatccctattacagtgaccatcgcaccaaagtataccgaattcaacggcctaaga

SEQ ID NO: 150592 - DNA, 80 bp, synthetic construct
  source 1..80: mol_type = other DNA
aaggtgatgactttattccgacatgcaactgcacgcaagccacatactattgtaaacataaaaacagatatttccctata

SEQ ID NO: 150593 - DNA, 80 bp, synthetic construct
  source 1..80: mol_type = other DNA
gctctgccagcttcacagaaaacacttaccatgagctttgtagaaccctttctcagcagtcacaagagagaaattctcta

SEQ ID NO: 150594 - DNA, 80 bp, synthetic construct
  source 1..80: mol_type = other DNA
ccacttggcgcattacctacaaggatacagtacaattgcgccgcaagttggagtttttcacatactctcgcttcgacatg

SEQ ID NO: 150595 - DNA, 80 bp, synthetic construct
  source 1..80: mol_type = other DNA
gggtgtggatttaccaatcttataagcgaaaaggtcaccaaaatcgcctctatggttaatagtgttgtcacagacaagtt

SEQ ID NO: 150596 - DNA, 80 bp, synthetic construct
  source 1..80: mol_type = other DNA
agaaatgctgcccattgatttgtggtaaagctctcagcttagtggatagacataccaatgttagatatagtatagatcaa

SEQ ID NO: 150597 - DNA, 80 bp, synthetic construct
  source 1..80: mol_type = other DNA
tcaaagaaccaggcatcataacagaaaaatcatctacacaacccactgagccaccaaacaacaacaaatacaacactaca

SEQ ID NO: 150598 - DNA, 80 bp, synthetic construct
  source 1..80: mol_type = other DNA
taaaagtactaaaacaacaaattctcacagatatggatgatgtggataccgaggttaccctgctttggttagatcaaaat

SEQ ID NO: 150599 - DNA, 80 bp, synthetic construct
  source 1..80: mol_type = other DNA
ataattggacgggtggaggaagtcttcggtgggcagcccgcacttgagagctatatctgtcacggtggctgcatacttgt

SEQ ID NO: 150600 - DNA, 80 bp, synthetic construct
  source 1..80: mol_type = other DNA
gcgtccggccgaggggaggggggggtggactcgcgggcacacgcccgcgacacacccggcacacacgcacccactcagcc

SEQ ID NO: 150601 - DNA, 80 bp, synthetic construct
  source 1..80: mol_type = other DNA
tggcgccgtaagcgcgccgccgcttctgcggcgtgttccccacggcgcttcctgcgcgcttccggtgcgtcaaggagttc

SEQ ID NO: 150602 - DNA, 80 bp, synthetic construct
  source 1..80: mol_type = other DNA
agaaggaggcgatggaggacccgccgtcgcagacgagtaccgacccgaagacctcgaagacctcttcgccgccatcgaag

SEQ ID NO: 150603 - DNA, 80 bp, synthetic construct
  source 1..80: mol_type = other DNA
attgtgggagatgggcgcgagacactccgtcctgtcagggaagaaaactgatgaattagaaaaggttaggttacggccca

SEQ ID NO: 150604 - DNA, 80 bp, synthetic construct
  source 1..80: mol_type = other DNA
gttgtgacagaaggacagctttattcagtttacagagtgccctcggaggctacgatattcccgttaaatgtcttgttgat

SEQ ID NO: 150605 - DNA, 80 bp, synthetic construct
  source 1..80: mol_type = other DNA
aaaggatggatagttctgcaccccccgacagagctaacagtggaaaaacacatcagcagagctttcattgctcttcaggc

SEQ ID NO: 150606 - DNA, 80 bp, synthetic construct
  source 1..80: mol_type = other DNA
tggtgatcgtaggccgcagagacaggcaccagtgagagctctgcccgctctgcccgctcccgagtcccgcggcaacccac

SEQ ID NO: 150607 - DNA, 80 bp, synthetic construct
  source 1..80: mol_type = other DNA
ggagagaagctggctccggagcagcattagagggaaaaccacggaggccgacagcaaatggcgatcatgcaaaatccaac

SEQ ID NO: 150608 - DNA, 80 bp, synthetic construct
  source 1..80: mol_type = other DNA
cagatggaaatggggaggaaatcctatatttcaacaggtggtcagagacccctgcaaacatccacaaggacccagtcccc

SEQ ID NO: 150609 - DNA, 80 bp, synthetic construct
  source 1..80: mol_type = other DNA
aataacaaagacagagaatgttagagaaagggatctcccaaccatacacactccaagcaaaacaaaattgcaacctagtg

SEQ ID NO: 150610 - DNA, 80 bp, synthetic construct
  source 1..80: mol_type = other DNA
ataatcactacaaacaaaggtgattttaacctactaggaatttacaacaactgtgcagtagtacctacacatgcaaattg

SEQ ID NO: 150611 - DNA, 80 bp, synthetic construct
  source 1..80: mol_type = other DNA
cggtagtggctgcgggggaaacgacagtagtagcggcagccaccgcgaggccgcccacgacagctccaagaaaaacgcgg

SEQ ID NO: 150612 - DNA, 80 bp, synthetic construct
  source 1..80: mol_type = other DNA
ataaaactggcgtgcaaagttcccatccagatcacccaagcggtgtagtgctctgttattccggtaactttgcacgccag

SEQ ID NO: 150613 - DNA, 80 bp, synthetic construct
  source 1..80: mol_type = other DNA
ctgacttaggttcaacaataccatatggtgaaataactcttagtggtaaccctacttgtagattaatgaaatatgattat

SEQ ID NO: 150614 - DNA, 80 bp, synthetic construct
  source 1..80: mol_type = other DNA
gttggcggcctccggcgtaacgggacggtaacggataagttgcgatagcgggccatcgcgcccggtaacattcaccaacg

SEQ ID NO: 150615 - DNA, 80 bp, synthetic construct
  source 1..80: mol_type = other DNA
aaacctccaaggagggaaaagcaggctacgtcacagacagaggaaaagacaaggtaaaggtcttagagcagacaacaaac

SEQ ID NO: 150616 - DNA, 80 bp, synthetic construct
  source 1..80: mol_type = other DNA
caaggccactatggcgtgggccacgtacatcggcgtcgtcgacgcatctgtcatttacctaccttgtaccaactgagctt

SEQ ID NO: 150617 - DNA, 80 bp, synthetic construct
  source 1..80: mol_type = other DNA
tttttctcgtctggttgcacgttctcaccatcagggacctccgacgccccccacggacgaccgtgcgccacagaataccc

SEQ ID NO: 150618 - DNA, 80 bp, synthetic construct
  source 1..80: mol_type = other DNA
acaagtattaaaagaatgtcagaacaacaagaaacttctgagtcttatttcccaggtccaaaaagacccagaatcgattt

SEQ ID NO: 150619 - DNA, 80 bp, synthetic construct
  source 1..80: mol_type = other DNA
caaaatggatcccattattaatggaagctctgctaatgtatatctaactgatagttatctaaaaggtgttatctcttttt

SEQ ID NO: 150620 - DNA, 80 bp, synthetic construct
  source 1..80: mol_type = other DNA
cctttcttgtaaattcttaccattatatgctagtgaagcaaagagaatcaaagttcttcataacaaatgcaatgtggtta

SEQ ID NO: 150621 - DNA, 80 bp, synthetic construct
  source 1..80: mol_type = other DNA
ctcagaactctagtacttgaaacatataagcatatcaacctagataatctaagaatcatagcatatggagatgatattat

SEQ ID NO: 150622 - DNA, 80 bp, synthetic construct
  source 1..80: mol_type = other DNA
agggtccatctttctcttggcagaggactccatcgtgtcaaggacggtgactgcagaaaagacccatggaaaggaacagt

SEQ ID NO: 150623 - DNA, 80 bp, synthetic construct
  source 1..80: mol_type = other DNA
accgatgagagcatgattgagaccaggtgcgtagtgaacaggcatgggatcatggaaactagtattgagcacttcttttc

SEQ ID NO: 150624 - DNA, 80 bp, synthetic construct
  source 1..80: mol_type = other DNA
aaagccatgcttgggacacatgtcatttgggacgtgggatttcaatcaacctgtgggttgtgtgtgccttggattagtca

SEQ ID NO: 150625 - DNA, 80 bp, synthetic construct
  source 1..80: mol_type = other DNA
gccagagcagagcccgggactgactcagggccacatcccctcggcccgcggacgccgcctcgccagcccccgggccttca

SEQ ID NO: 150626 - DNA, 80 bp, synthetic construct
  source 1..80: mol_type = other DNA
ggactacaaaaatggcggattcagtgacgtcacggccgccattttaagtaggtgccgtccaggactgcagttccgggtca

SEQ ID NO: 150627 - DNA, 80 bp, synthetic construct
  source 1..80: mol_type = other DNA
tgcacctaaacccatatacatacacccagctataaacaaggtgtttatgtttgaccctgagggtcccaggcccataaaca

SEQ ID NO: 150628 - DNA, 80 bp, synthetic construct
  source 1..80: mol_type = other DNA
tagtggggtaaactcccaagaagtaccagcattgaccgccgttgagactggtgcatcagggcaggcagtgcctagcgacg

SEQ ID NO: 150629 - DNA, 80 bp, synthetic construct
  source 1..80: mol_type = other DNA
atcagttagcaagtctgaatgctgagaacgttgggcctggatacaatttcacacatcctggtgaaacaggtagagaaatt

SEQ ID NO: 150630 - DNA, 80 bp, synthetic construct
  source 1..80: mol_type = other DNA
acttcagtatcccactagatccagatttcagacaatacacagcatttaccttgccatcagtgaataatgcagaaccagga

SEQ ID NO: 150631 - DNA, 80 bp, synthetic construct
  source 1..80: mol_type = other DNA
aacttaacactgcaaaatagttttgttgcatgggatattaactttcaagagcatgcccaagtcagaaagaaatttgaaat

SEQ ID NO: 150632 - DNA, 80 bp, synthetic construct
  source 1..80: mol_type = other DNA
aatcacaaaggacactaccaaactgcaagagatgattgacacatatggccttgatttaccttatattacatatctaaagg

SEQ ID NO: 150633 - DNA, 80 bp, synthetic construct
  source 1..80: mol_type = other DNA
acagggttgatgcagattatgtttgttcccccaggtattgaccctccatcccagattgatgataagaaatgggatagtgc

SEQ ID NO: 150634 - DNA, 80 bp, synthetic construct
  source 1..80: mol_type = other DNA
aaattaccatctgtgataattttgcagcgtgggcaaaacgtcgatacaacgacgagtggggcgccacaaccaccacagag

SEQ ID NO: 150635 - DNA, 80 bp, synthetic construct
  source 1..80: mol_type = other DNA
atttcacatgagcaaaaaacatcctaccggcaacttttgctgcaaagtgaacgtgtgcaaatacccatcacaacagtcga

SEQ ID NO: 150636 - DNA, 80 bp, synthetic construct
  source 1..80: mol_type = other DNA
gggaggtttgcgttccgtcagcgcggcgcttcgccttccgcgggttttcgggcgtgctggccgccggcgtggacggcgtg

SEQ ID NO: 150637 - DNA, 80 bp, synthetic construct
  source 1..80: mol_type = other DNA
cacaaaatatacaacaaataagacaaacaattaaaagtaacatggatagttactaccaaaaactaaaggacgaatccaca

SEQ ID NO: 150638 - DNA, 80 bp, synthetic construct
  source 1..80: mol_type = other DNA
cgcaagtcggtgtccgttagggtgaggccccccaagctatttcaagacaagtggtacactcagcaagacctgtgttcagt

SEQ ID NO: 150639 - DNA, 80 bp, synthetic construct
  source 1..80: mol_type = other DNA
ctgactctgagactgtggcagccagacatggtcagaaaccttaaagttagcggatacatacccataataattagtggctt

SEQ ID NO: 150640 - DNA, 80 bp, synthetic construct
  source 1..80: mol_type = other DNA
acaaagcccagaggcagaaaaagaattaaagtaaggctaaagccccccactctatttgaggacaaatggtacactcaaaa

SEQ ID NO: 150641 - DNA, 80 bp, synthetic construct
  source 1..80: mol_type = other DNA
cgtagcgcataacctgtacaccaccgtcaacccgctgatcgaggacgtgatgcgcagcagcgccggcagtctgagaaact

SEQ ID NO: 150642 - DNA, 80 bp, synthetic construct
  source 1..80: mol_type = other DNA
gaccttctccccatgaactgatgttgattaaaagcccagaaaccaatcagccccttaccccattcccctcccacaattac

SEQ ID NO: 150643 - DNA, 80 bp, synthetic construct
  source 1..80: mol_type = other DNA
cagtgcgcatgcttcgagacactccaatgatgaagcaagaagtcaacattgcacaaaacccagtagaaaagttcattgat

SEQ ID NO: 150644 - DNA, 80 bp, synthetic construct
  source 1..80: mol_type = other DNA
acttggaaaaaagccttcactgacactagagacagctccttcttatttgccacatatcacccagacaaaattacatcgta

SEQ ID NO: 150645 - DNA, 80 bp, synthetic construct
  source 1..80: mol_type = other DNA
aacgcaaacccaggagaaaaagggggcgtgtttacaagtacctacaacccctcaaccgatgccacagagggtagaaagtt

SEQ ID NO: 150646 - DNA, 80 bp, synthetic construct
  source 1..80: mol_type = other DNA
tgcccgaggtctcacggatagtgggaacatatattcattgcccccaaatccaaaacactttgatggttactgtcagcagg

SEQ ID NO: 150647 - DNA, 80 bp, synthetic construct
  source 1..80: mol_type = other DNA
cagcaacagacaacagatgggagtacacatacaatggcctaatggaaaaattctttaaacaaggaaacacaggccaaaca

SEQ ID NO: 150648 - DNA, 80 bp, synthetic construct
  source 1..80: mol_type = other DNA
tttatcacaggtccctttgtaaaagaccaaatggaggcaaataagtatgacagttaccttaacaacttaaaaacggcaac

SEQ ID NO: 150649 - DNA, 80 bp, synthetic construct
  source 1..80: mol_type = other DNA
cttttgcttcttagaaaaaaaatacccatatagagaaataatgatagtttgacaacacatatggcagggatttcttcttc

SEQ ID NO: 150650 - DNA, 80 bp, synthetic construct
  source 1..80: mol_type = other DNA
gtgcgacccttccccctgactcaacttctccgcagccgcgcgctacgccttcggccgcgcgcggcaccgcagaccaccgc

SEQ ID NO: 150651 - DNA, 80 bp, synthetic construct
  source 1..80: mol_type = other DNA
agatgtgcaggatgccgtgaccggagccatagtacgcgtagctgacacactgcacacaggaccatcgaacaatgaagcga

SEQ ID NO: 150652 - DNA, 80 bp, synthetic construct
  source 1..80: mol_type = other DNA
tccaatgccacagatgagaatatgatcgaaacccgttgtgtggtcaataggaacggagtgttagaaactaccatcaacca

SEQ ID NO: 150653 - DNA, 80 bp, synthetic construct
  source 1..80: mol_type = other DNA
tcaataatagatcagcagtgggaaatacaattgaagctctctttcaaggaccaccccaattcaaaccaatcagaatctcg

SEQ ID NO: 150654 - DNA, 80 bp, synthetic construct
  source 1..80: mol_type = other DNA
caagtcgttccaagcgacacgatgcaaacacgtcacgtcaaaaattaccactcgagatcagagtccaccatcgagaattt

SEQ ID NO: 150655 - DNA, 80 bp, synthetic construct
  source 1..80: mol_type = other DNA
acctcatcattacaaggtgtgttgccccattctttgtggtcaagctgtagtggttagggatagaaagactcaaatcagtt

SEQ ID NO: 150656 - DNA, 80 bp, synthetic construct
  source 1..80: mol_type = other DNA
accggcgacggtgatgcagcctgcgtggtgccccgcctgggttaacccccaggacgccaacattaagacagggtgtgaag

SEQ ID NO: 150657 - DNA, 80 bp, synthetic construct
  source 1..80: mol_type = other DNA
tgactcatcaaataatgtatgtacccccgggaggtccagtgcccaccaagattaacagctatagctggcagacatcaact

SEQ ID NO: 150658 - DNA, 80 bp, synthetic construct
  source 1..80: mol_type = other DNA
atgttgtgtgggatgttggtctgcaatccaccatatcaatggtagtcccttggattagtgctagtcattttagaaatacc

SEQ ID NO: 150659 - DNA, 80 bp, synthetic construct
  source 1..80: mol_type = other DNA
cttcctcaaaattaacttccacaaattgggaacaatactacaaagaatttttaaataaggctatacctgaaaataaagaa

SEQ ID NO: 150660 - DNA, 80 bp, synthetic construct
  source 1..80: mol_type = other DNA
ttcaaaagaagttccagctttgacagcagtagaaacaggtgcaaccagtcaagtggtgcctggtgacttgatagaaacca

SEQ ID NO: 150661 - DNA, 80 bp, synthetic construct
  source 1..80: mol_type = other DNA
agttaaagatgtacttgaaaaaggtattcccactctgcaatctccaactgttgaggcatgtggttattcagatagaatta

SEQ ID NO: 150662 - DNA, 80 bp, synthetic construct
  source 1..80: mol_type = other DNA
gcttaccacccatgtggaccaagcaagattgggaaacagaatatcaagtcgcggcggccttcaacaggcctgcgcgaaca

SEQ ID NO: 150663 - DNA, 80 bp, synthetic construct
  source 1..80: mol_type = other DNA
tgttcgctaagacacacgacctgaccatgcttcaggacatcccgatggacaggttcgtgatggatttgaagcgggatgtc

SEQ ID NO: 150664 - DNA, 80 bp, synthetic construct
  source 1..80: mol_type = other DNA
ggccttacactggcttaccaaacccccagaccaaaagaccagaacttaggaaggccacactacagggtcctgagcatgaa

SEQ ID NO: 150665 - DNA, 80 bp, synthetic construct
  source 1..80: mol_type = other DNA
agaacagctcctggacgttgcgtggattcgggggaagctggtatccaaccggcagtggaggatcttcgtgctcgtagaag

SEQ ID NO: 150666 - DNA, 80 bp, synthetic construct
  source 1..80: mol_type = other DNA
gtattgaatgtagaatatacggttgtgaaagtactcaagtcggaggtaacgttggtgatgttgccaatggttgacgcttg

SEQ ID NO: 150667 - DNA, 80 bp, synthetic construct
  source 1..80: mol_type = other DNA
agagcgccaacgtggtggttgcatacgggcgttggccagaatatctgaaagacaacgaggccactgccgaagatcaacca

SEQ ID NO: 150668 - DNA, 80 bp, synthetic construct
  source 1..80: mol_type = other DNA
gggtgacttggcaaatttctcagaccagagcccatatgatcaacaaccacagagccaagtgatgaaattagcttatttag

SEQ ID NO: 150669 - DNA, 80 bp, synthetic construct
  source 1..80: mol_type = other DNA
atgtggtggtcgggtatggagtgtggcctagttacctcaaggataatgaagctgtcgctgaggaccaacccacacaaccg

SEQ ID NO: 150670 - DNA, 80 bp, synthetic construct
  source 1..80: mol_type = other DNA
catctcccccacacacctagcaaacaactacactgcctttagaaatcatctacaaactcaattttcagtacaaaacatca

SEQ ID NO: 150671 - DNA, 80 bp, synthetic construct
  source 1..80: mol_type = other DNA
ggaaggtccttgtacacccctccctattctgtactgtatagacagtggattgatttatttgtttagataatcaaatataa

SEQ ID NO: 150672 - DNA, 80 bp, synthetic construct
  source 1..80: mol_type = other DNA
aactggtgtaggcccagctggtagtgtttgatgagatgtagacgctgcggaatgggcacaacggccgctactagcttggt

SEQ ID NO: 150673 - DNA, 80 bp, synthetic construct
  source 1..80: mol_type = other DNA
cccgctctggtctggtaggagtagtcaatatgtcagacggggacacagacactacagggtatgccacgtgggatatagac

SEQ ID NO: 150674 - DNA, 80 bp, synthetic construct
  source 1..80: mol_type = other DNA
gaaatttagggatgagatcaaaacaacatatccactcgtttcagcaggacctagtgatttgtgtgtgcacaccaaagatg

SEQ ID NO: 150675 - DNA, 80 bp, synthetic construct
  source 1..80: mol_type = other DNA
ggatttcacagaaaataggcaagttcattgattggataaagactaaaattttgccagaagcacaagacaaagtagaatat

SEQ ID NO: 150676 - DNA, 80 bp, synthetic construct
  source 1..80: mol_type = other DNA
gagagaagggtagaagaattggtggttttatagataatgagagtaggcaacccagtgatgaaaattggttgaattgtgat

SEQ ID NO: 150677 - DNA, 80 bp, synthetic construct
  source 1..80: mol_type = other DNA
tactctctcgtaggcggcctacataagcctctgtcactgctctgtcagcttctttcctcagttgccttgctcctgccaca

SEQ ID NO: 150678 - DNA, 80 bp, synthetic construct
  source 1..80: mol_type = other DNA
aagggaccctttgggggcggacacagtaccagcaggtggtctctaaaagtactgtacgaagaaaaccagagacaccacaa

SEQ ID NO: 150679 - DNA, 80 bp, synthetic construct
  source 1..80: mol_type = other DNA
tacgtagtaagtcacgtggggagggctactgtgaacccggaagtagctgactcatgtgacttatcacgtgacagatacgt

SEQ ID NO: 150680 - DNA, 80 bp, synthetic construct
  source 1..80: mol_type = other DNA
taactttaatttaagctttctatacgacgaatatgtaaaacatagaaatacctggagcaaaagcaacgtagacctagaac

SEQ ID NO: 150681 - DNA, 80 bp, synthetic construct
  source 1..80: mol_type = other DNA
caccagagcctgcggcgtcaggccacgaaagcggacaaacacgctgtccgtgtccccgtagatgacccgcgcctccaccc

SEQ ID NO: 150682 - DNA, 80 bp, synthetic construct
  source 1..80: mol_type = other DNA
aaattggataagatcgcagcagggaaaactagatgcattgaagcttgtgaggttgactattgcattgtctacagaatgat

SEQ ID NO: 150683 - DNA, 80 bp, synthetic construct
  source 1..80: mol_type = other DNA
ttgaggcgaaagtttgaactgttcacatacatgcggtttgatatggagatcacatttgttatcactagtagacaactgcc

SEQ ID NO: 150684 - DNA, 80 bp, synthetic construct
  source 1..80: mol_type = other DNA
ccacttaggacaataagagaaacaggtgcattgggcaaattaatctgtaaaccattattatctggcacacactcagggaa

SEQ ID NO: 150685 - DNA, 80 bp, synthetic construct
  source 1..80: mol_type = other DNA
ggaggcatgaccaccacaaaattcactctcagaatcctgtatgacgaacacctcaggtttatgaactactggactgtcag

SEQ ID NO: 150686 - DNA, 80 bp, synthetic construct
  source 1..80: mol_type = other DNA
caccttccaggtgtgtcgcaaagagtacaatgaagtaattggcatctactgcaaagacaacgacacagatgaaacatata

SEQ ID NO: 150687 - DNA, 80 bp, synthetic construct
  source 1..80: mol_type = other DNA
ggactgtacacatttagaagggaaagtcataatagtagcagtccatgtagccagtgggtttatagaagcagaggtaatac

SEQ ID NO: 150688 - DNA, 80 bp, synthetic construct
  source 1..80: mol_type = other DNA
ttaggttacttaatgtgtcaaccaatgttacaagggacagataggactaaagcagaggtttacctaagtctaaggtgccc

SEQ ID NO: 150689 - DNA, 80 bp, synthetic construct
  source 1..80: mol_type = other DNA
gttgcctggctggggattccaacactaaaactaattacaccagttatgtgaatgccaaccccggagaagctggaggtatc

SEQ ID NO: 150690 - DNA, 80 bp, synthetic construct
  source 1..80: mol_type = other DNA
ctgtccaatagtgaaactcccattgaatttgacagaacaagcacagcaccagaggttggagtggtgcaaaaggcagtgta

SEQ ID NO: 150691 - DNA, 80 bp, synthetic construct
  source 1..80: mol_type = other DNA
ccaagcttcaggtccaatacacacaaccaaaccacagacccttggtgccttggaaataggtgctacgtccaatgcaggcc

SEQ ID NO: 150692 - DNA, 80 bp, synthetic construct
  source 1..80: mol_type = other DNA
ttataccatcatcacaaaccagtcagggagccattttggtcacttgtagtggatgtccagatttatcagtcagaatgttg

SEQ ID NO: 150693 - DNA, 80 bp, synthetic construct
  source 1..80: mol_type = other DNA
ttcaataacctgtatttggataacttcatttgaaaatcctaaactcgttcgcaaacatgggagctcaagttactagacag

SEQ ID NO: 150694 - DNA, 80 bp, synthetic construct
  source 1..80: mol_type = other DNA
acacctataatgccaaatcaaacaaagacaacttacataagctaagacaggcgtactttaaacaattaaccagtgaaggt

SEQ ID NO: 150695 - DNA, 80 bp, synthetic construct
  source 1..80: mol_type = other DNA
actggagtggacataaaagagaacaccctgacacccatcacgccagttgattccataaccacctatggattcggccacca

SEQ ID NO: 150696 - DNA, 80 bp, synthetic construct
  source 1..80: mol_type = other DNA
gtggaaactccaggtttggagcagtgtacacctgtaattataaaataatgaattaccacctaatgacacatgaagaccat

SEQ ID NO: 150697 - DNA, 80 bp, synthetic construct
  source 1..80: mol_type = other DNA
tataatagatctgctagcatcatctaaggaccccagagttatccagtattgtgaagatgaaggcctacttaagaaagcaa

SEQ ID NO: 150698 - DNA, 80 bp, synthetic construct
  source 1..80: mol_type = other DNA
gtcggtttgacccgtcacaccaatcatttatacattcgtgataccgataacgaggggcttaaaacttttattaatgataa

SEQ ID NO: 150699 - DNA, 80 bp, synthetic construct
  source 1..80: mol_type = other DNA
tgactatacacacaaatactcaaccaactaccacactaaggcagatgaatctggtaacctaaaagaggagcactatttcc

SEQ ID NO: 150700 - DNA, 80 bp, synthetic construct
  source 1..80: mol_type = other DNA
ttggtgtattgcaatcacagaagggaaaaaacagaaagacaatcctcaacggatatatgcacattcttacaaaattaggc

SEQ ID NO: 150701 - DNA, 80 bp, synthetic construct
  source 1..80: mol_type = other DNA
agttccgtgacatcaggcggttcctcccagaatcaatacaagaatgggaccacatgagattagccactaatgtaagtaaa

SEQ ID NO: 150702 - DNA, 80 bp, synthetic construct
  source 1..80: mol_type = other DNA
agatacgtgctcagagacatacccgtgtgggccatggcacacgggtatgcagactatatagactcccagctaggccccac

SEQ ID NO: 150703 - DNA, 80 bp, synthetic construct
  source 1..80: mol_type = other DNA
gcgtgacgaggcgcggaccgtgagttatagccccatcgttatccaagactgcgccgcggctgtcaccgacgtcactttga

SEQ ID NO: 150704 - DNA, 80 bp, synthetic construct
  source 1..80: mol_type = other DNA
gattctttaagtaaggaaaataaaacattgttaaattctaaagtgatcacaaacaccataggtcataacacttttaacac

SEQ ID NO: 150705 - DNA, 80 bp, synthetic construct
  source 1..80: mol_type = other DNA
cccctcggcccgcggacgccgcctcgccagcccccgggccttcatgggcccgctttctacctctctccgccgccgagagg

SEQ ID NO: 150706 - DNA, 80 bp, synthetic construct
  source 1..80: mol_type = other DNA
acaggcccgtccgctcctaccactcagacacccccacttatccctggatgccccagcagttccgtgtgagcttcaaactt

SEQ ID NO: 150707 - DNA, 80 bp, synthetic construct
  source 1..80: mol_type = other DNA
ccgcgtgcccagaaccgaccttaaaaagccgcccttctatccttggatgccccccactcatcccttcaaagtctcctttg

SEQ ID NO: 150708 - DNA, 80 bp, synthetic construct
  source 1..80: mol_type = other DNA
acacatggcaaagttccacaaacccatcagttttccatacgaccgggagtgcgaacccgcgtatatcaatacccttcatg

SEQ ID NO: 150709 - DNA, 80 bp, synthetic construct
  source 1..80: mol_type = other DNA
gtcactaaccacgtgactcccacaggccaaccgaagtgtatgtcgtgcatttcctgggcggggtttacatcataatataa

SEQ ID NO: 150710 - DNA, 80 bp, synthetic construct
  source 1..80: mol_type = other DNA
cgtcgtgtgggacctgggtctccagtcatcatgtcacctcgttgtaccctggatcagctcccacttcttcagaaggacca

SEQ ID NO: 150711 - DNA, 80 bp, synthetic construct
  source 1..80: mol_type = other DNA
caggaagctgtagacatactcgggctgctcatgcccgtgggcctccacgaagctgtccgcctcgagcgtgtccataaagt

SEQ ID NO: 150712 - DNA, 80 bp, synthetic construct
  source 1..80: mol_type = other DNA
tgtgctggaacttccctcgtcccgacaaatgtagcggaaatcttcaagcaaatcgcgacgaagtccgatgaggaggatgc

SEQ ID NO: 150713 - DNA, 80 bp, synthetic construct
  source 1..80: mol_type = other DNA
cgcaacaatcagcaccagtacattcacaggaagttccagcactgacggcggttgagacaggtgctaccaatccattggaa

SEQ ID NO: 150714 - DNA, 80 bp, synthetic construct
  source 1..80: mol_type = other DNA
tgcctctccttttcccacgtaacgttagaagcttatgcactaaatcgaccactaggtgagtgataaaccatatcattctt

SEQ ID NO: 150715 - DNA, 80 bp, synthetic construct
  source 1..80: mol_type = other DNA
tggtcaaaaattcccttaatgttagatggagattgcctcatggcttttgactacagcaattatgatggaagcttaagtcc

SEQ ID NO: 150716 - DNA, 80 bp, synthetic construct
  source 1..80: mol_type = other DNA
gggtcccacggccgcctcgactgagcccgtacatcaaatcaagtaatgtaaattttaaccccacgaacctgacggacgag

SEQ ID NO: 150717 - DNA, 80 bp, synthetic construct
  source 1..80: mol_type = other DNA
ggccataacctcttgcgctacatatgtacgatctcactgtaagaaatggggtcacaagtctctactcagcgatccgggtc

SEQ ID NO: 150718 - DNA, 80 bp, synthetic construct
  source 1..80: mol_type = other DNA
agcattctgtaggttaaacgcgaggagaaggttattcttgtttacgatccatgcctccaccggtagctgctgtgtggggt

SEQ ID NO: 150719 - DNA, 80 bp, synthetic construct
  source 1..80: mol_type = other DNA
cagtaatgtcagaatacagagtgtgtattagaagcccatatacatggccagttatgaccaaaggctcagatgacaactgg

SEQ ID NO: 150720 - DNA, 80 bp, synthetic construct
  source 1..80: mol_type = other DNA
cccccgtcctgctatcccgctcgtcgccgcgcctcccatgctaagggcccccttcctttcccttgactttggggatattc

SEQ ID NO: 150721 - DNA, 80 bp, synthetic construct
  source 1..80: mol_type = other DNA
cttttggccactggaggcctggggcgacgttgcatttttgggtggcgtgcctttggtgacattaacctcccccggttttg

SEQ ID NO: 150722 - DNA, 80 bp, synthetic construct
  source 1..80: mol_type = other DNA
accagctagctaccgctgtaggcggcagtgtatctgcaggatacaattacacacaccctggtgaaaagggtagggatgtt

SEQ ID NO: 150723 - DNA, 80 bp, synthetic construct
  source 1..80: mol_type = other DNA
agcagccctaacacacacccaggcatgcttatgcagcaaaaaagaaagatactcgtccctagctgggatacgtatcccaa

SEQ ID NO: 150724 - DNA, 80 bp, synthetic construct
  source 1..80: mol_type = other DNA
aaccagacgttagtagtaacagattttacacgctagagtcggtgcaatggggcaaggattccaaaggctggtggtggaaa

SEQ ID NO: 150725 - DNA, 80 bp, synthetic construct
  source 1..80: mol_type = other DNA
gcgcgacacaccatttattgggcagactgcactgctgcaaggtgacacagaagtggctgttaataacgcagtggccagag

SEQ ID NO: 150726 - DNA, 80 bp, synthetic construct
  source 1..80: mol_type = other DNA
taggaggaacagccttacaaacaggcaacaatagcatatatggacaaccaaactacaatccagtagcaacaaacttacat

SEQ ID NO: 150727 - DNA, 80 bp, synthetic construct
  source 1..80: mol_type = other DNA
acactaatttggaatattggacatactggttatttcccagagtctacttttatagtagggaaattagacactgaaaatat

SEQ ID NO: 150728 - DNA, 80 bp, synthetic construct
  source 1..80: mol_type = other DNA
acgccacgaccactattaacgcgagtctcgacctagccgcgggcgacgccgctggcggcggcgctgatcaccacctgcgg

SEQ ID NO: 150729 - DNA, 80 bp, synthetic construct
  source 1..80: mol_type = other DNA
agcgcctacgcaaagcctagtagcacctttgaaattatttggttggtcgctccgccatttcccctggtagacctggcaga

SEQ ID NO: 150730 - DNA, 80 bp, synthetic construct
  source 1..80: mol_type = other DNA
gcctcctgggtcaaatatattcagtatggagtttatatagtagtaggaatagtagctctcagagtaataatatatgtagt

SEQ ID NO: 150731 - DNA, 80 bp, synthetic construct
  source 1..80: mol_type = other DNA
aatcctctcacgtggcctgtcacgtggctgctacgtcatcggcgccatcttgtataacaaaatggcggacaacttccgct

SEQ ID NO: 150732 - DNA, 80 bp, synthetic construct
  source 1..80: mol_type = other DNA
caaacattttgatggttacaaccaacaaacagttgtcataatggatgatgttggtcaaaacccagatggtaaggacctta

SEQ ID NO: 150733 - DNA, 80 bp, synthetic construct
  source 1..80: mol_type = other DNA
atattgttttacaaaatggctgacttccttcctcttttttaaaaataacggtccagcggcggcgcgcgcgctacgcgcgc

SEQ ID NO: 150734 - DNA, 80 bp, synthetic construct
  source 1..80: mol_type = other DNA
tccctcagcccggtctcgcacactcccaagtccccgccgcaatcaacaccccgtccccagcgcaaaccaccagccccggt

SEQ ID NO: 150735 - DNA, 80 bp, synthetic construct
  source 1..80: mol_type = other DNA
actgtaaggacctctcccccctttaaagacactgactacacagcagcattcacacaccctggggtgcttatgatgcagaa

SEQ ID NO: 150736 - DNA, 80 bp, synthetic construct
  source 1..80: mol_type = other DNA
ctacatgcccgtgctcatctgtggcaacaatactgtgtccagaaactatgccacgcactcagatgactcctacctgccgg

SEQ ID NO: 150737 - DNA, 80 bp, synthetic construct
  source 1..80: mol_type = other DNA
tcgcctggctagacaggacagtagaagctataaacagagaggcagtgaatcacctgccccgggagcttattttccaggtg

SEQ ID NO: 150738 - DNA, 80 bp, synthetic construct
  source 1..80: mol_type = other DNA
ctgactttaaaaacaaccacctagagtaccacgcaggcatgtacagcagcatattcttagggcccggcaggagcaactgg

SEQ ID NO: 150739 - DNA, 80 bp, synthetic construct
  source 1..80: mol_type = other DNA
cctccacaagtggagtaaactcccaggaggttccagctctgaccgctgtggaaaccggtgcctcgggacaagcagtgccc

SEQ ID NO: 150740 - DNA, 80 bp, synthetic construct
  source 1..80: mol_type = other DNA
aagaaaatgagaacattttagtaccaaaacacttcattaaaccaagagaaaacataaagaatgtaggccctagtgacttg

SEQ ID NO: 150741 - DNA, 80 bp, synthetic construct
  source 1..80: mol_type = other DNA
aacccaaatggtgaagacatgtctctattctgtcagatggtttcttcagtacctttcattcctccaatggctgatctacc

SEQ ID NO: 150742 - DNA, 80 bp, synthetic construct
  source 1..80: mol_type = other DNA
tgcagagtctgaactaggctcagaagtgcttgctgtatatgtatgctgtattatctgtccttatacaaaaccagctttgt

SEQ ID NO: 150743 - DNA, 80 bp, synthetic construct
  source 1..80: mol_type = other DNA
atgtacaagcagagcgcgcccgggatataactctcatactcgatgtcgtgcaggatgtcctgcgtatcgcacaccaccga

SEQ ID NO: 150744 - DNA, 80 bp, synthetic construct
  source 1..80: mol_type = other DNA
gtccacattaattgaacaaatggaggcttttattgagccaaagcccagtgtttttaagtgtttcgctactaaagtggcaa

SEQ ID NO: 150745 - DNA, 80 bp, synthetic construct
  source 1..80: mol_type = other DNA
gatgagcaggagcacaatggtggtgatgatcccttggaagtccatactcggcagcctagatttgtggatgtgaacccaac

SEQ ID NO: 150746 - DNA, 80 bp, synthetic construct
  source 1..80: mol_type = other DNA
tgcccgtcctgacgcaccagatcatgtatgtcccacccgggggaccaataccagctaaagtagacagttgtgaatggcag

SEQ ID NO: 150747 - DNA, 80 bp, synthetic construct
  source 1..80: mol_type = other DNA
gagagcccctatgtattgactgacaatagaaaaatgcagctagcttatttagataggggtttctacaagcactatggcat

SEQ ID NO: 150748 - DNA, 80 bp, synthetic construct
  source 1..80: mol_type = other DNA
tttatcaacttgcatctcgataactctaatttgaaaatatcatctctaaccaatttgaaaattttaacaatgggagctca

SEQ ID NO: 150749 - DNA, 80 bp, synthetic construct
  source 1..80: mol_type = other DNA
caagacgccgagctcgccgccctgctagacgctatcgaagacgaccaacaacagtaaggaggaggcgcaggcggtgtggt

SEQ ID NO: 150750 - DNA, 80 bp, synthetic construct
  source 1..80: mol_type = other DNA
gcctaccactcagaggactacacagagcagccattcccctatggtggaggaatgagcaccaccacattctcactcagagc

SEQ ID NO: 150751 - DNA, 80 bp, synthetic construct
  source 1..80: mol_type = other DNA
aaaccctaataaaattaccaggccgtgggagtttcacttgtcggtgtctacctctataagtcactaagcactccgagcgc

SEQ ID NO: 150752 - DNA, 80 bp, synthetic construct
  source 1..80: mol_type = other DNA
tagggggtcgccataggcttcggcctccgtttcaggccttccggactaccaaaatggcgcattccgtgacgtcatggccg

SEQ ID NO: 150753 - DNA, 80 bp, synthetic construct
  source 1..80: mol_type = other DNA
tctgaagccagtgcatttacccatcatgcaaggagagggggacatcccatcacagtgcagccacgaggaggagtggtacc

SEQ ID NO: 150754 - DNA, 80 bp, synthetic construct
  source 1..80: mol_type = other DNA
agaatatgttcaatattgtttaaattgcttaggaagcttagtcataatccttggtaccatctatactatatacaaattgt

SEQ ID NO: 150755 - DNA, 80 bp, synthetic construct
  source 1..80: mol_type = other DNA
gtagtctacttaaacataatgcatgcattgtcacaactgaaaatggcaaattcacagggttaggtatttatgataatgta

SEQ ID NO: 150756 - DNA, 80 bp, synthetic construct
  source 1..80: mol_type = other DNA
ctacggccaagggcagttgtccatccccgggagtgtatccccggcccaactcgatccgagagaccgactcattgctagga

SEQ ID NO: 150757 - DNA, 80 bp, synthetic construct
  source 1..80: mol_type = other DNA
caggccatatcttcatttgtggctgtctctggcatgctatacattatttacaagttgtttgccaatttccaaggggcgta

SEQ ID NO: 150758 - DNA, 80 bp, synthetic construct
  source 1..80: mol_type = other DNA
tatccactatgtctcgcccgggctatatgtcgccttacctcccctgtatagtcacgaccccaccgaaccaggcatgatgt

SEQ ID NO: 150759 - DNA, 80 bp, synthetic construct
  source 1..80: mol_type = other DNA
acaattcagctactattgtaatcccatacatcaactgtatacccatggacaatatgttacgccacaacaatttcagtctg

SEQ ID NO: 150760 - DNA, 80 bp, synthetic construct
  source 1..80: mol_type = other DNA
agagacaaatcacctagcgtacagctgactaccaagtacaagttccgatggcattttggtggcaatcctgtctccgaaca

SEQ ID NO: 150761 - DNA, 80 bp, synthetic construct
  source 1..80: mol_type = other DNA
tcataacaatcccgggaggcgagtgttagggtagcagaatagtttcggggtcggtttccttccggcgacgacagctccgt

SEQ ID NO: 150762 - DNA, 80 bp, synthetic construct
  source 1..80: mol_type = other DNA
gaatctaacattacacctttttatgtacttaatgttaagaagggttcaaatactactgaacaattactcagtaatccact

SEQ ID NO: 150763 - DNA, 80 bp, synthetic construct
  source 1..80: mol_type = other DNA
aaaagtttgacaccctctttgagattatcaaccagaagcttttatttcacgacccggctgccatgctggcggcgcgcaca

SEQ ID NO: 150764 - DNA, 80 bp, synthetic construct
  source 1..80: mol_type = other DNA
caagagtcaaattactaccccaaacatatacaatacaatatcttgattggcgagggtccttgcaaacctggagattgcgg

SEQ ID NO: 150765 - DNA, 80 bp, synthetic construct
  source 1..80: mol_type = other DNA
gatgatccatttttcaactgtaatggaacacttttaggtaacctaacaatatttccacaccaattaataaatttaagaac

SEQ ID NO: 150766 - DNA, 80 bp, synthetic construct
  source 1..80: mol_type = other DNA
tgtaatggtagtgtgtcgctacattagaaaacgtgacgcgtcgcatgtcgcggcacaatctggcagcggggtcggggtag

SEQ ID NO: 150767 - DNA, 80 bp, synthetic construct
  source 1..80: mol_type = other DNA
tccctgaggccaaaaagggcgaatcataagctgtcgtgttacaaaaaatagtcaggttagtatcgttgtgctcatagata

SEQ ID NO: 150768 - DNA, 80 bp, synthetic construct
  source 1..80: mol_type = other DNA
tcaagcataacctagaagcaatatttcaaggcctaggtgatgacaccacacctggtttcatcgtagatctgttatcctca

SEQ ID NO: 150769 - DNA, 80 bp, synthetic construct
  source 1..80: mol_type = other DNA
ccggaggacgaaggcccacagagagagccttgggatgagtgggtcgttgaggtcttggaggaattaaagcaagaagcttt

SEQ ID NO: 150770 - DNA, 80 bp, synthetic construct
  source 1..80: mol_type = other DNA
catggcgattgcgaactttgtggatggaacggatacatacaaagacaatatcacgaaaacaaatcgtgctctccacgatt

SEQ ID NO: 150771 - DNA, 80 bp, synthetic construct
  source 1..80: mol_type = other DNA
ttagtgcagcttcctttacacatccgttctgcccaccacaaactgacaacccctgttgcacattccaagtgttgaaagac

SEQ ID NO: 150772 - DNA, 80 bp, synthetic construct
  source 1..80: mol_type = other DNA
atataccgagaaaatagttgactcattctttaacaatgcagagaacatgtggactgctagaaaaaacaaaacattttcag

SEQ ID NO: 150773 - DNA, 80 bp, synthetic construct
  source 1..80: mol_type = other DNA
tgtggtggtcgggtatggtacgtggcctacgtatctcaaagatgaagaggctacggcagaggaccaaccaacccagccag

SEQ ID NO: 150774 - DNA, 80 bp, synthetic construct
  source 1..80: mol_type = other DNA
gctgagggacgggggacttttgcgggaccgagctgaaggacggggatgttgattgcggggacgagctgaagtacaggggt

SEQ ID NO: 150775 - DNA, 80 bp, synthetic construct
  source 1..80: mol_type = other DNA
aagaaagccaagagtgtgaactttgatgttgaggccgttacagcggagcgtgcaagcttgataaccacaggcccctatgg

SEQ ID NO: 150776 - DNA, 80 bp, synthetic construct
  source 1..80: mol_type = other DNA
ctccctagacagtatactctcaacgccacggtggaatggtacaacaaatctgaaggtgacgtaccagaagaattcatgga

SEQ ID NO: 150777 - DNA, 80 bp, synthetic construct
  source 1..80: mol_type = other DNA
tgtctgatagacctactcaaccagcaccagagaaaataccagcaaaggaaagccgaaaattgagagctcttgagaaaact

SEQ ID NO: 150778 - DNA, 80 bp, synthetic construct
  source 1..80: mol_type = other DNA
ccaaacacatcagagtgtggtgcccaaggccaccgcgagcggtgccatacaatggtaccggggtggacataaaagaaaac

SEQ ID NO: 150779 - DNA, 80 bp, synthetic construct
  source 1..80: mol_type = other DNA
ttatactgaaaaacttgaagaaatagatagcaagccagatattatacgacgatgttttttgaatcatacattgtttctta

SEQ ID NO: 150780 - DNA, 80 bp, synthetic construct
  source 1..80: mol_type = other DNA
ccgcgcaagcggggaaaggtgaattgtgtgctgtatttagggctgatcctggaagagacggtccatggcagtcaacgatg

SEQ ID NO: 150781 - DNA, 80 bp, synthetic construct
  source 1..80: mol_type = other DNA
tagcatacataggtggttccaatgcccaggttagttatgaacacacacaccctggtgagcgtggccatgaaataggctcc

SEQ ID NO: 150782 - DNA, 80 bp, synthetic construct
  source 1..80: mol_type = other DNA
tgatgcctgggataacacagtaacagaacaggcagtagaagatgtttggaatctgtttgagacatctacaaaaccttgtg

SEQ ID NO: 150783 - DNA, 80 bp, synthetic construct
  source 1..80: mol_type = other DNA
caaaacaaaagaggagtcagatcagcacaggcgcggagcgtgggacgacgtaataacaactgtaaaaaacactaacattc

SEQ ID NO: 150784 - DNA, 80 bp, synthetic construct
  source 1..80: mol_type = other DNA
ggccacaagtcaggtagtgcctgctgatctcattgaaacaagacacgtggttaacaagcgccagcgaacagagtgcactg

SEQ ID NO: 150785 - DNA, 80 bp, synthetic construct
  source 1..80: mol_type = other DNA
gccctaacaacatgatgggcactttcgcagtgcgggttgtcagcacagtggcaagtcagctcaaactacaaactagggtg

SEQ ID NO: 150786 - DNA, 80 bp, synthetic construct
  source 1..80: mol_type = other DNA
aaacaaaaactatgcaactaaaataagacaatggtactggactaaccttacaacaatgacagccacagtaccaaacatag

SEQ ID NO: 150787 - DNA, 80 bp, synthetic construct
  source 1..80: mol_type = other DNA
caactacaaatcgttgtcggagaaaacactggggcacccgcaccgccccaaccaccccccccaccccctccacctcctcc

SEQ ID NO: 150788 - DNA, 80 bp, synthetic construct
  source 1..80: mol_type = other DNA
gtggtggtggaaattaccagatgccttgaagaacatgggtatttttggagaaaatatgttctatcactttctggggagag

SEQ ID NO: 150789 - DNA, 80 bp, synthetic construct
  source 1..80: mol_type = other DNA
ccatttgttccactagattttagtacgggggcctccacttacgtaccaatcaccgttaccgtagcgccaatgtgtgccga

SEQ ID NO: 150790 - DNA, 80 bp, synthetic construct
  source 1..80: mol_type = other DNA
gggcatgtcaattagctacaccaagtataggtacttgcttctgatacaaaaagcaatgtttgtacattttgcaaagggct

SEQ ID NO: 150791 - DNA, 80 bp, synthetic construct
  source 1..80: mol_type = other DNA
ggccactcagttaatctaaatgacactaaggtacaagcagtatttaaagacatattatataaaaaacctgaattctatca

SEQ ID NO: 150792 - DNA, 80 bp, synthetic construct
  source 1..80: mol_type = other DNA
tgttgcgtgtctttgaatccccggggaaaagaggaagaagaaggggagtccctggggacggcagcgcgagtccctgtgga

SEQ ID NO: 150793 - DNA, 80 bp, synthetic construct
  source 1..80: mol_type = other DNA
agctcaattaatgacattagatattgaccacagcaacatgtctctaggagatagtgtctttggtatagaaggtcttgaag

SEQ ID NO: 150794 - DNA, 80 bp, synthetic construct
  source 1..80: mol_type = other DNA
gccctagaggttttgctagggaggagacgtgtgtggctgtagccacccgtcccgggtacaagtcccgggtggtgaggacg

SEQ ID NO: 150795 - DNA, 80 bp, synthetic construct
  source 1..80: mol_type = other DNA
ctggctcgcctcatcctggcccccaacccctatatcctagagggacagctgacggtgggcatgacacaggacaacggcat

SEQ ID NO: 150796 - DNA, 80 bp, synthetic construct
  source 1..80: mol_type = other DNA
ttagaacactgattcttgagacctacaagaatattaatttggacaagctcaagatagtagcttatggtgatgatatctta

SEQ ID NO: 150797 - DNA, 80 bp, synthetic construct
  source 1..80: mol_type = other DNA
atggcggacttccttcctctttttcaaagattaaccgtcggcggcggctgtcgccgccattaagtaaggcggaacctggc

SEQ ID NO: 150798 - DNA, 80 bp, synthetic construct
  source 1..80: mol_type = other DNA
gtggaggtgcatcaactggtagccttgctgccacacgagcgccaccgcgaactgtgccacgtcctcatcggcttgttgca

SEQ ID NO: 150799 - DNA, 80 bp, synthetic construct
  source 1..80: mol_type = other DNA
tagactataccacaaaatgcacaggctccaactccatctggacagacgccagagtagccatcagatgtccatacacagat

SEQ ID NO: 150800 - DNA, 80 bp, synthetic construct
  source 1..80: mol_type = other DNA
acttttacgatgggtttgctcgggtaccaattaaagatgaaacagcagattcaggggactcgttttatggattagtgtcc

SEQ ID NO: 150801 - DNA, 80 bp, synthetic construct
  source 1..80: mol_type = other DNA
gggaggcggcggtaccgaaggggctacagacgcaggtgcgcggtcagactgagacgcagacgcagacggagacgtaagag

SEQ ID NO: 150802 - DNA, 80 bp, synthetic construct
  source 1..80: mol_type = other DNA
acacagacaatgcatcgggtggtgatattttgactagggttgcagatgatgcatctaatgtactagggcctaattgttat

SEQ ID NO: 150803 - DNA, 80 bp, synthetic construct
  source 1..80: mol_type = other DNA
agcgtccaaagctcgacacgagaccagagggactaccagaagagcaaagaggagcctacaatttacttcgagccctccag

SEQ ID NO: 150804 - DNA, 80 bp, synthetic construct
  source 1..80: mol_type = other DNA
tggccgacctgctcgacgctatcgaagacgacgcacagtaagaaccaggcgaaggcggtggggtcgcagacggtacaggc

SEQ ID NO: 150805 - DNA, 80 bp, synthetic construct
  source 1..80: mol_type = other DNA
cgcaccccaaaggaaaggccaaagtaaaaattagaattaagccccccaaactttttatagacaagtggtactctcaagag

SEQ ID NO: 150806 - DNA, 80 bp, synthetic construct
  source 1..80: mol_type = other DNA
tggggtggcaatatgattcccgaacaggttatcaaaaacccgtgcaaaacaacagatccaacattcaccctgcccggtag

SEQ ID NO: 150807 - DNA, 80 bp, synthetic construct
  source 1..80: mol_type = other DNA
gacctgcggtttccgttctgctcaccacaaactgacacttcctgcatacagtttcaagtgttgtcatacaccgcttacag

SEQ ID NO: 150808 - DNA, 80 bp, synthetic construct
  source 1..80: mol_type = other DNA
ggacccgcatcgtggtagcgttcaagcgagtcccgtacacggcgtagatgggataggtgaaaaggtcccaagtggcgttg

SEQ ID NO: 150809 - DNA, 80 bp, synthetic construct
  source 1..80: mol_type = other DNA
gagattcatccctgagcatgtagaggagtggagaaacatgagattggctaccaatgtccctaaatttccaatgatggatg

SEQ ID NO: 150810 - DNA, 80 bp, synthetic construct
  source 1..80: mol_type = other DNA
ccatgtatatcaatactaaaacacaaatccataaaagcccagtctatggggcagtggaagtgaaaatggggccagctgtt

SEQ ID NO: 150811 - DNA, 80 bp, synthetic construct
  source 1..80: mol_type = other DNA
tgaatgcaaaccctggggaaagtggcggcacatttactgataaatacaacccaagtacggaggttgaccaaggtagggcg

SEQ ID NO: 150812 - DNA, 80 bp, synthetic construct
  source 1..80: mol_type = other DNA
acactaacaagattggcacagaaagtatgctggtttggatgacagaacaagggataattaccaaggaagttcaaagagtt

SEQ ID NO: 150813 - DNA, 80 bp, synthetic construct
  source 1..80: mol_type = other DNA
ctccagtatgggatcggctggttccaagaagcagtccaagcagcaacgagggctgcgggagagactcttgcgaacacagg

SEQ ID NO: 150814 - DNA, 80 bp, synthetic construct
  source 1..80: mol_type = other DNA
ttggctgcgatcctgataccttttggtccgtcataccatgcctgatggatggacatttaatggcatttgattattcaaat

SEQ ID NO: 150815 - DNA, 80 bp, synthetic construct
  source 1..80: mol_type = other DNA
gcaaatacacaaatgacatcgattcccgtccccacataaagaaatgtgctttactgtgaaagaatgaagaagattcttgt

SEQ ID NO: 150816 - DNA, 80 bp, synthetic construct
  source 1..80: mol_type = other DNA
agatatgttatgaacagtaataccaacgccgaggcagcggtggaaaacttcttaggtagatcagccttgtgggcaaattt

SEQ ID NO: 150817 - DNA, 80 bp, synthetic construct
  source 1..80: mol_type = other DNA
tgcggagcgccgtgcaaaagctccgggcaaagacccgcagaaagatcccggcagcccggcagcgcgcacgaaggcacgta

SEQ ID NO: 150818 - DNA, 80 bp, synthetic construct
  source 1..80: mol_type = other DNA
ctggtttaagggaaactggacagaagccataaaagaggtgaaggagaccatcataaaacatcccaggtatagaggaggtg

SEQ ID NO: 150819 - DNA, 80 bp, synthetic construct
  source 1..80: mol_type = other DNA
agccttcctgagtcccagcagactaaatccccagaacccaggggcatacacagaggtctcctacaacccctggacagacg

SEQ ID NO: 150820 - DNA, 80 bp, synthetic construct
  source 1..80: mol_type = other DNA
cgtgccaccttttaaaatagacaaatactcctcagccatgctacacccaggcatgcttatgcagagaaaaaagaagatat

SEQ ID NO: 150821 - DNA, 80 bp, synthetic construct
  source 1..80: mol_type = other DNA
cctgctttgacagccgtggaaactggccatacatctcaggttgttccgagcgacaccatgcagactcgacacgtaaagaa

SEQ ID NO: 150822 - DNA, 80 bp, synthetic construct
  source 1..80: mol_type = other DNA
acgtcataagtcacgtggggacggctgtacttaaacacggaagtaggccccgtcacgtgatttaccacgtggtgcatgcg

SEQ ID NO: 150823 - DNA, 80 bp, synthetic construct
  source 1..80: mol_type = other DNA
catgaccacggacgatcactcttcagctcctgcttttccagatttttcaccaactcctgaaatccatataccaggtaggg

SEQ ID NO: 150824 - DNA, 80 bp, synthetic construct
  source 1..80: mol_type = other DNA
ctgatcaacgactacagtacactatgctaggggaaatcctgaactattacactcactggaccgggtcacttagattcacg

SEQ ID NO: 150825 - DNA, 80 bp, synthetic construct
  source 1..80: mol_type = other DNA
ccagcagcagcagcgagacctccgactcaggctccaccagcaacagcgaatcggagtccagctccgacagctcatggagc

SEQ ID NO: 150826 - DNA, 80 bp, synthetic construct
  source 1..80: mol_type = other DNA
tatagctcaatgccaaccagattcggaatgaacagagtcaactaaaaatgaaacaaggaagtttgctataactttataca

SEQ ID NO: 150827 - DNA, 80 bp, synthetic construct
  source 1..80: mol_type = other DNA
agacgacgagctcctttccgccgtcgtggacgccgccgaagagtaagaaaaaggagggtgaggtggaggaggacttatag

SEQ ID NO: 150828 - DNA, 80 bp, synthetic construct
  source 1..80: mol_type = other DNA
gggccttggtggttgccgccattcccgaatttatgatggctagcaactcaagggatagtacaggtggcatcacctacgag

SEQ ID NO: 150829 - DNA, 80 bp, synthetic construct
  source 1..80: mol_type = other DNA
atgctagagctaaaatgtcttttgctcttgaccaggaagattggaaatctgatgcctctcaggggggaggaatcaaaatt

SEQ ID NO: 150830 - DNA, 80 bp, synthetic construct
  source 1..80: mol_type = other DNA
ccattatcccgggtggggtcggcgttacgagcccacgccgcctttgcattcgtcttatcccgtgccgccgccaccatcac

SEQ ID NO: 150831 - DNA, 80 bp, synthetic construct
  source 1..80: mol_type = other DNA
gcgtggaaacaaggacaacacttatgcattacactgggtcagaaacaacactggaaaatttcctgggcagagcagcttgt

SEQ ID NO: 150832 - DNA, 80 bp, synthetic construct
  source 1..80: mol_type = other DNA
tcagatgcttgcaacgctgctaagggattggagtggattgctaccaagattagcaagttcattgactggatcaaggctaa

SEQ ID NO: 150833 - DNA, 80 bp, synthetic construct
  source 1..80: mol_type = other DNA
aggttcctcctcagggaaatgttcaaaacccaagcgggcatacacatgaacccccgcgcatttcaagagctgtaaacaag

SEQ ID NO: 150834 - DNA, 80 bp, synthetic construct
  source 1..80: mol_type = other DNA
gataatgatgtagattataattcaaagcattataataaatggcaaataaccttacaagaaatggctcaagttaggcgtaa

SEQ ID NO: 150835 - DNA, 80 bp, synthetic construct
  source 1..80: mol_type = other DNA
gctccgattcctgttccaacaaatgctcaaaacccaggccaatctgcacctaaacccatatacatacacccagctataaa

SEQ ID NO: 150836 - DNA, 80 bp, synthetic construct
  source 1..80: mol_type = other DNA
tggccctcggggttgaggggcgcccaggcgtccagagagggggccagggcctgcaggttgggggggctcaaggcctcgac

SEQ ID NO: 150837 - DNA, 80 bp, synthetic construct
  source 1..80: mol_type = other DNA
caatcttataaggacaatttgcaatactcatcacatcttcagagatgaaatttatgaagttgaaggtggaatgccatctg

SEQ ID NO: 150838 - DNA, 80 bp, synthetic construct
  source 1..80: mol_type = other DNA
cacagaacctaaactatttttagaagacagtcccacagagggctttgtattctatgactccctgtttggacaaggaaaaa

SEQ ID NO: 150839 - DNA, 80 bp, synthetic construct
  source 1..80: mol_type = other DNA
tctagtatgtttgtacatgtgggtaatctaatctataggaatcttcatctttttaattctgatcttgatgattctattct

SEQ ID NO: 150840 - DNA, 80 bp, synthetic construct
  source 1..80: mol_type = other DNA
catgactacagaagatgaacaatcacccaacatcttgcctagtttccactctactaagcagatacacataccaggccaaa

SEQ ID NO: 150841 - DNA, 80 bp, synthetic construct
  source 1..80: mol_type = other DNA
ggctatgggcaaggctcttaaaaagctatgtttctcggtaaactttacagaaagaaaaggcgcctgtcactgtccccact

SEQ ID NO: 150842 - DNA, 80 bp, synthetic construct
  source 1..80: mol_type = other DNA
gtgatatcggctcggacaacagcttcgagttgaccataccatattcattttctacttggatgaggaaaactcatggtcat

SEQ ID NO: 150843 - DNA, 80 bp, synthetic construct
  source 1..80: mol_type = other DNA
tggccaaatgacacattgcaaccaaattgggacaacatgacttggcaagagtgggaaagaaaagtagactttctcacaga

SEQ ID NO: 150844 - DNA, 80 bp, synthetic construct
  source 1..80: mol_type = other DNA
aagagctaaccaaaacggggtggaaacagtactataaatcgtttttaaacacggctatgccatcaacaaaagagagaaaa

SEQ ID NO: 150845 - DNA, 80 bp, synthetic construct
  source 1..80: mol_type = other DNA
atagccccttacaaatcagaattttctggcgctatggatagtcagaaacagggtcttcccacccgtatacccagtggtgg

SEQ ID NO: 150846 - DNA, 80 bp, synthetic construct
  source 1..80: mol_type = other DNA
aaataagacggaaatttgaaatgttcacatacttaagatttgacatagagatgaccatagtcataaccagctgccaagtt

SEQ ID NO: 150847 - DNA, 80 bp, synthetic construct
  source 1..80: mol_type = other DNA
atctacaaatactcaacaaacatacgccccctcaggctcccaagaaactatagtttggagtcaatcagattttaacttat

SEQ ID NO: 150848 - DNA, 80 bp, synthetic construct
  source 1..80: mol_type = other DNA
atgaagcaaatatctactctctgccacctgaccccaaacactttgatgggtacaatcaacaaacagtggtgattatggat

SEQ ID NO: 150849 - DNA, 80 bp, synthetic construct
  source 1..80: mol_type = other DNA
tgagatgccctaacttgttctttcctgttccagcgccacgaccaaatgctaggtcgagagcaatttcatacacagatgag

SEQ ID NO: 150850 - DNA, 80 bp, synthetic construct
  source 1..80: mol_type = other DNA
ggtgttttcaaaaccacccttcttggtgaaatagttcagtactacacccattgggcagggtcattgagattttctttaat

SEQ ID NO: 150851 - DNA, 80 bp, synthetic construct
  source 1..80: mol_type = other DNA
tactattctgtaataggctacagttcctcagatgagaaaaagcaaagtgtccttaacactttatattcacaaaattcata

SEQ ID NO: 150852 - DNA, 80 bp, synthetic construct
  source 1..80: mol_type = other DNA
ggatgcagctggcttagacaaccataagagagagggcctatttaatgattggaaaattaacctttcaagccttgttcaac

SEQ ID NO: 150853 - DNA, 80 bp, synthetic construct
  source 1..80: mol_type = other DNA
gaagtggagaacttcaacgccaccagtgaagcagacaagaggaagcagttcactacctggcccatcacgtataccaatac

SEQ ID NO: 150854 - DNA, 80 bp, synthetic construct
  source 1..80: mol_type = other DNA
gagtctatgtcgtgcatttcctgggcatggtctacatcctaatataagtaagtgcacttccgaatggctgagttttccac

SEQ ID NO: 150855 - DNA, 80 bp, synthetic construct
  source 1..80: mol_type = other DNA
ctacctatggttacatttcttaaagatgaacttaggaagaaagaaaagatctctgctggaaagacacgggtcatagaagc

SEQ ID NO: 150856 - DNA, 80 bp, synthetic construct
  source 1..80: mol_type = other DNA
taactttgtgtttgactcccctaacatgtaacttagaagtttgaacgataagaccaataggtgataatcatccagattat

SEQ ID NO: 150857 - DNA, 80 bp, synthetic construct
  source 1..80: mol_type = other DNA
ggaggctcctttggcacagagaccttcagtctaagggtactttttgaccagtaccagagaggctttaacaagtggagcca

SEQ ID NO: 150858 - DNA, 80 bp, synthetic construct
  source 1..80: mol_type = other DNA
cacgagttagaaatacatactaacactatgctttaagcgtccttgctccactcatcttattgcctggtccccactagtcg

SEQ ID NO: 150859 - DNA, 80 bp, synthetic construct
  source 1..80: mol_type = other DNA
cgtaacatcagacaggatcaaactgaccagggacattttaccatgcttggagtgcgcgaccgccttgctgtgctaccacg

SEQ ID NO: 150860 - DNA, 80 bp, synthetic construct
  source 1..80: mol_type = other DNA
tgagcaaagacccaatattgtgtctttccttatcaccagcctctgaccccagactatcttatactatgttaggtgaaatc

SEQ ID NO: 150861 - DNA, 80 bp, synthetic construct
  source 1..80: mol_type = other DNA
gagaccgtgggagaccgaggaagaaagcgagacagaagccctctcgcaagagagccaagaggtccccttccaacagcagt

SEQ ID NO: 150862 - DNA, 80 bp, synthetic construct
  source 1..80: mol_type = other DNA
caccttttggcacggcccggagcgcttgctgctgtctcagattccggtggagcgccaggcgctgacggagctggaatacc

SEQ ID NO: 150863 - DNA, 80 bp, synthetic construct
  source 1..80: mol_type = other DNA
acgagacgtctaggcaagtcaattttacagtggcaggggtcaccgagtctagagagagcataaccacaatgaaaaccacc

SEQ ID NO: 150864 - DNA, 80 bp, synthetic construct
  source 1..80: mol_type = other DNA
atttcatgtccggggactgcagggcctggcgcgtctgcgcgagggccgaacggatggcatcggccgccgtcctggcacga

SEQ ID NO: 150865 - DNA, 80 bp, synthetic construct
  source 1..80: mol_type = other DNA
tttttaaaacagcctgggggttgtttccccctccgaggtcccctggacgcccgtaccccggcatcacggtgcccttgtat

SEQ ID NO: 150866 - DNA, 80 bp, synthetic construct
  source 1..80: mol_type = other DNA
cgccctcttcgccgccgtcgccgaggacgcagagtaaggaggcggaggtggggcaggagacggtggcgacgcagacggta

SEQ ID NO: 150867 - DNA, 80 bp, synthetic construct
  source 1..80: mol_type = other DNA
agacgcgacatgtgaggaattttcacgttcggtctgagtcatcggtagagaattttcttagcaggtcagcttgcgtgtac

SEQ ID NO: 150868 - DNA, 80 bp, synthetic construct
  source 1..80: mol_type = other DNA
acgccaggtaacattaataaaatggaggcgtaccctattccactcgcccaaggtgctccagtaaaggatcaagcaatatt

SEQ ID NO: 150869 - DNA, 80 bp, synthetic construct
  source 1..80: mol_type = other DNA
aacggaaagaccccagacggacgcggacaggtagacgtgttctggcagcagcggtggtacccccgcatggcctgccaggt

SEQ ID NO: 150870 - DNA, 80 bp, synthetic construct
  source 1..80: mol_type = other DNA
ttaccacacaagagagtgctaatgtggttgtggcatatggacagtggccatcatacttggcggatgaccaagccacggca

SEQ ID NO: 150871 - DNA, 80 bp, synthetic construct
  source 1..80: mol_type = other DNA
cccgtgtatcagagtggaggatgctagccaatttagcttcccctccccttaacaggtggtctcgcggggtgccaattgtc

SEQ ID NO: 150872 - DNA, 80 bp, synthetic construct
  source 1..80: mol_type = other DNA
cactttacaatgttaggagtcagagaccgcttgtctgtgctccgcagacactcccaaccaggaaagaccatctgggttga

SEQ ID NO: 150873 - DNA, 80 bp, synthetic construct
  source 1..80: mol_type = other DNA
atgacccagttactataaatgcgaaaattcgcatttacatgaaacccaaacatgttagagtgtggtgcccacgagccccc

SEQ ID NO: 150874 - DNA, 80 bp, synthetic construct
  source 1..80: mol_type = other DNA
cactactggcaaaccttcatcactaactccatgatgaaggcccacatagatgctacggaagcccagtcagctaccactaa

SEQ ID NO: 150875 - DNA, 80 bp, synthetic construct
  source 1..80: mol_type = other DNA
gacaggctataatacaaaaaattgttaaaaatgcaacaaactatctaaaaaaatacacagacgaatttaaacaatttcca

SEQ ID NO: 150876 - DNA, 80 bp, synthetic construct
  source 1..80: mol_type = other DNA
ggaaaagaacaaagaaatcaggtagatttcaataaagtgagtctagatggcgccgataactacggtttataaagtctgtg

SEQ ID NO: 150877 - DNA, 80 bp, synthetic construct
  source 1..80: mol_type = other DNA
aaagtcaagagtaatctcagagccatcttccagggattgggcgatacaacacccccaggttttatagtggacctactatc

SEQ ID NO: 150878 - DNA, 80 bp, synthetic construct
  source 1..80: mol_type = other DNA
tctgacatgcatgattctattttagtatcctactcatcagatttagtcatataccgaacaaatacacaaggtgatgacta

SEQ ID NO: 150879 - DNA, 80 bp, synthetic construct
  source 1..80: mol_type = other DNA
gtactttttacacaggcaacaatagcacctttggctgctgcacatataaacccactaaagaaataggtagtaatgccaat

SEQ ID NO: 150880 - DNA, 80 bp, synthetic construct
  source 1..80: mol_type = other DNA
cccatacgccatcctaggtctaaagaagagagacattctgaaccggaatacaaaggacttaacaaaattacaacaaatga

SEQ ID NO: 150881 - DNA, 80 bp, synthetic construct
  source 1..80: mol_type = other DNA
tggtcaatcgcatgggtgcattgtgtatgagagttgtaacaaacaagcaactccataaagttgaaatcacaactaacatc

SEQ ID NO: 150882 - DNA, 80 bp, synthetic construct
  source 1..80: mol_type = other DNA
acaacaactacctagctatacatacatttgacaatgatacttcagacacaaaattaaaacaattctttaaagacgctatg

SEQ ID NO: 150883 - DNA, 80 bp, synthetic construct
  source 1..80: mol_type = other DNA
tgccagcagatcgccagtctccaagcagggcacggccttcatcccctactccaatgccatgtataaataaagtatacatg

SEQ ID NO: 150884 - DNA, 80 bp, synthetic construct
  source 1..80: mol_type = other DNA
ttcaaataaatggcaacttcactgcggcacctcagacccccgctcgtgctgacacgcttgcgcgtgtcagaccacttcgg

SEQ ID NO: 150885 - DNA, 80 bp, synthetic construct
  source 1..80: mol_type = other DNA
catcacatatgacaaaacccatccaggagaagttgggggagaattccagaaaactgcagctttgactgcaggtgatggga

SEQ ID NO: 150886 - DNA, 80 bp, synthetic construct
  source 1..80: mol_type = other DNA
tcgaaagcaggcaatgttgggtgttcatgtcatttgggatctgggcctacaatcctcttgcactatagtagttccatgga

SEQ ID NO: 150887 - DNA, 80 bp, synthetic construct
  source 1..80: mol_type = other DNA
tcacgatcaccgtcgcacctatggatgccgaatataatgggctacggctagcaggacatcaaggcttgccaactatgaac

SEQ ID NO: 150888 - DNA, 80 bp, synthetic construct
  source 1..80: mol_type = other DNA
cgggagcaggaggagcagatggggaagcaggaggaacagatgtgggagcagaaggagcaaatgtgggagcagaaggagca

SEQ ID NO: 150889 - DNA, 80 bp, synthetic construct
  source 1..80: mol_type = other DNA
aataacatgggcaaactgtatgcgcgccatgtgaacaaagatacaccataccaaatgtccagcacgatacgtgtgtattt

SEQ ID NO: 150890 - DNA, 80 bp, synthetic construct
  source 1..80: mol_type = other DNA
atattgtgtgggatgtgggtctgcaatcaacaatatctatgattgtaccttgggttagtgctagtcatttcagaaacacc

SEQ ID NO: 150891 - DNA, 80 bp, synthetic construct
  source 1..80: mol_type = other DNA
ggatggtatgtggttggtcgttccgctatttcccatagtagacctggcagatgaggctggaaattccccactggcgacag

SEQ ID NO: 150892 - DNA, 80 bp, synthetic construct
  source 1..80: mol_type = other DNA
ggccctaacgacaggtacggagactacacatcacaatactctcgctctacacacctcctagactactacctgggactata

SEQ ID NO: 150893 - DNA, 80 bp, synthetic construct
  source 1..80: mol_type = other DNA
ggggggacagtggtggggacggggaccttttgtgctgcgcacagactgagtaacgggggcctttcgcggcggggaaccca

SEQ ID NO: 150894 - DNA, 80 bp, synthetic construct
  source 1..80: mol_type = other DNA
atgctaggttttactgtccaacaggatctttggtagaatttcagaattcatggggttcacaaatggacttaagtgatcca

SEQ ID NO: 150895 - DNA, 80 bp, synthetic construct
  source 1..80: mol_type = other DNA
agaaaccatgaacaggatatgcaggaccggaccgttcagctacagagacgaacaccctagcataaccctgactgccagct

SEQ ID NO: 150896 - DNA, 80 bp, synthetic construct
  source 1..80: mol_type = other DNA
aacgacctcagtaaaacacccttctatccctggatgccccccaccagaccctaccaggttagctttaagctcaacttcaa

SEQ ID NO: 150897 - DNA, 80 bp, synthetic construct
  source 1..80: mol_type = other DNA
gttactccattcagcttcttcggaacctgttcggaggaattaaacgggcacccatacacccccacccccttttctgcaac

SEQ ID NO: 150898 - DNA, 80 bp, synthetic construct
  source 1..80: mol_type = other DNA
cgtataacccggaagtcaatcctctcacgtggcctgtcacgtgactgctacgtcacggcggccattttaggccttccgga

SEQ ID NO: 150899 - DNA, 80 bp, synthetic construct
  source 1..80: mol_type = other DNA
tgtggatcactacgcagcacaattgtatactttagatataaacccagagcccttgacgctagaacaagcagtctatggta

SEQ ID NO: 150900 - DNA, 80 bp, synthetic construct
  source 1..80: mol_type = other DNA
ccccggtgttatattgtagaatttaagacggccatgagcaacacggccaacccgcaaagcgttactcgcaaggcacagag

SEQ ID NO: 150901 - DNA, 80 bp, synthetic construct
  source 1..80: mol_type = other DNA
gcggcgtccatgtcgcaccctctgagtgctgcggttaccgccgctacggctcctccaggtgctaccgtggcaggtgcgtc

SEQ ID NO: 150902 - DNA, 80 bp, synthetic construct
  source 1..80: mol_type = other DNA
gcctgggtgcctcgaccaccacgattgtgcccctacattaatagtggcaatgtgaatttcgagccaaaacccgtgacaga

SEQ ID NO: 150903 - DNA, 80 bp, synthetic construct
  source 1..80: mol_type = other DNA
cacagccgccacgaccccgccgccatgggtggcgacggcggccgaggcccggcagcggcgccgccagcggcgaccatggt

SEQ ID NO: 150904 - DNA, 80 bp, synthetic construct
  source 1..80: mol_type = other DNA
aaagtggttggtgatgctctaagggtctcaatgccacaagttgccaacacccagccatcaggacccgtaaattctaagga

SEQ ID NO: 150905 - DNA, 80 bp, synthetic construct
  source 1..80: mol_type = other DNA
tgcctacgaaaagtccagcaacgtcaatttcaaacccaccgatgtgacaacatcacgcacttcgatcacagaagtcccca

SEQ ID NO: 150906 - DNA, 80 bp, synthetic construct
  source 1..80: mol_type = other DNA
caacatttgcacatacttccaggttttgtcaccgcggtataacgtcgcctgcagtattgacccaaactacctaaaaacta

SEQ ID NO: 150907 - DNA, 80 bp, synthetic construct
  source 1..80: mol_type = other DNA
ggcggcttcggcctccagaacggtggtgatgctggtaatctccactccaacacgtgggggaccctcgtcttctacgtgga

SEQ ID NO: 150908 - DNA, 80 bp, synthetic construct
  source 1..80: mol_type = other DNA
agcctagaggtaggtatccatagggttccattatcctggaggtatcctaagctccgcccctatataccaggtgggtggag

SEQ ID NO: 150909 - DNA, 80 bp, synthetic construct
  source 1..80: mol_type = other DNA
gaggtagtctcccatgactggtacgagattcaagaatcggactactacccaaaacacatacagtataatttactcattgg

SEQ ID NO: 150910 - DNA, 80 bp, synthetic construct
  source 1..80: mol_type = other DNA
atgaggcaaaccctgttgacgctccaacagaaccagacgcttcggcaaataggttttatacactggagagtgtttcatgg

SEQ ID NO: 150911 - DNA, 80 bp, synthetic construct
  source 1..80: mol_type = other DNA
ttcacccctctgtcctgcatggtgatataaagaccctttgtggaccctaagccatgtagttgctgctccctctttcctgc

SEQ ID NO: 150912 - DNA, 80 bp, synthetic construct
  source 1..80: mol_type = other DNA
cagaacttctatcaaggtgatgtgcacgatgctgttgttggggcaatgactcgcgtggctgacacagtggccagtggacc

SEQ ID NO: 150913 - DNA, 80 bp, synthetic construct
  source 1..80: mol_type = other DNA
gcgcaaacgcggaagtaagccccgtcacgtgacggtcacgtgggtgctgcgtcacagccgccattttagttaacaaaatg

SEQ ID NO: 150914 - DNA, 80 bp, synthetic construct
  source 1..80: mol_type = other DNA
gaaaaacaaattgaaaatctgcgtgcagcggataatgccacacaagaaaagataaagtgtgaaattgacaccttgcacga

SEQ ID NO: 150915 - DNA, 80 bp, synthetic construct
  source 1..80: mol_type = other DNA
agtggagtttaatcaatatatagaagtggctgtggatcactatgctgcacaattgtcagtgttggatatcaatcccactc

SEQ ID NO: 150916 - DNA, 80 bp, synthetic construct
  source 1..80: mol_type = other DNA
taggcagcaattacaccccaaaaatagtaggtgggataggaggatttataaataccaatgaatacaaaaatgtagaaata

SEQ ID NO: 150917 - DNA, 80 bp, synthetic construct
  source 1..80: mol_type = other DNA
catcatacattaactcaggcctaaaaccaggaaaatcaggacaaaatgaactagacacacaagtaaaaacctggatacaa

SEQ ID NO: 150918 - DNA, 80 bp, synthetic construct
  source 1..80: mol_type = other DNA
acatgtggccagtggctttatagaagcagaagtgatcccgcaggaaactggtaggcaaacagccctgttcctactaaagc

SEQ ID NO: 150919 - DNA, 80 bp, synthetic construct
  source 1..80: mol_type = other DNA
cactggtaccccacagtacagcatcagactgaagtactagagtgcctagcacagactggaccctttgcataccacagtga

SEQ ID NO: 150920 - DNA, 80 bp, synthetic construct
  source 1..80: mol_type = other DNA
ttggtagtgacaacagttttgaaatcacgatcccctactctttttccacttggatgagaaaaacaaatggtcaccccatt

SEQ ID NO: 150921 - DNA, 80 bp, synthetic construct
  source 1..80: mol_type = other DNA
tgtaatacaactcacatatacaaagatgagatgtactctgtgaaaggagggatgccatcaggtatttcaggcacttcaat

SEQ ID NO: 150922 - DNA, 80 bp, synthetic construct
  source 1..80: mol_type = other DNA
gggacgccagaatctgcattagatgtccctacacggagccccagctggtgggctccacagaggacatagggttcgtcccc

SEQ ID NO: 150923 - DNA, 80 bp, synthetic construct
  source 1..80: mol_type = other DNA
tacagatggaaatgcatttgaaaaatggtcatctaaaaatcctcacaacaatacactgtacggaggcagtacttacacta

SEQ ID NO: 150924 - DNA, 80 bp, synthetic construct
  source 1..80: mol_type = other DNA
cttcagatggaaatggggaggcaatcctatattccaacaggtggttagagacccctgcaaacactcatcaggacccagtc

SEQ ID NO: 150925 - DNA, 80 bp, synthetic construct
  source 1..80: mol_type = other DNA
tcatccttagacgggcatttgctggcttttgattacacaaactatgatggtagtctacatccaatttggtttaaagcctt

SEQ ID NO: 150926 - DNA, 80 bp, synthetic construct
  source 1..80: mol_type = other DNA
tggtttgtgacaagtcatgatttcaataatgaaggtcagtggcccttagacctaacattcccatttgagggtcatggctc

SEQ ID NO: 150927 - DNA, 80 bp, synthetic construct
  source 1..80: mol_type = other DNA
ctggacggcatcatgcgtgaccacctggccagggcggaggagatccgccaggacctggatgctgtagtggccttctctga

SEQ ID NO: 150928 - DNA, 80 bp, synthetic construct
  source 1..80: mol_type = other DNA
ggtcactagaatttccagcagcataccaagacgtcacctacaaccccaactgtgacagagcagcaggtaacagagtctgg

SEQ ID NO: 150929 - DNA, 80 bp, synthetic construct
  source 1..80: mol_type = other DNA
gaggtttcatatcagaggatgcagaagggcttgatgcatcattagtgatacactccaataactatactaacaccattcta

SEQ ID NO: 150930 - DNA, 80 bp, synthetic construct
  source 1..80: mol_type = other DNA
tataacttggcgatctttgtattgtatatgtgccgtgcaatgtgtcctagaatattatgatgcgaagtgttgcaataaca

SEQ ID NO: 150931 - DNA, 80 bp, synthetic construct
  source 1..80: mol_type = other DNA
gatggttgttgaatcccgagctcaaggtactgacacaattgccaggtgcaactgcagatgtggagtgtattactgtgaat

SEQ ID NO: 150932 - DNA, 80 bp, synthetic construct
  source 1..80: mol_type = other DNA
accacctttgcagctgtggctggtgttgtgtacgtgatgtacagattatttgctggtcaacagggggcttatactggttt

SEQ ID NO: 150933 - DNA, 80 bp, synthetic construct
  source 1..80: mol_type = other DNA
caaagcaccccaaatgatccagatagtccagaaccacggtccccaaatgtattttataacattccacctatgccattacc

SEQ ID NO: 150934 - DNA, 80 bp, synthetic construct
  source 1..80: mol_type = other DNA
aaccagtgcctcagtataacccccacctacgtagacaataactggacagctcttaaaaataaactaaccacccagtatga

SEQ ID NO: 150935 - DNA, 80 bp, synthetic construct
  source 1..80: mol_type = other DNA
ccattgcagatgctctcaccaacccagcactaatgtcaccatcagtagaggcttgtgggtactccgataggctaaaacaa

SEQ ID NO: 150936 - DNA, 80 bp, synthetic construct
  source 1..80: mol_type = other DNA
tgcaatgccgccatggcctgactgcagccattggtggtcttagggaaggctgagttcttggtaaagaactctatattcct

SEQ ID NO: 150937 - DNA, 80 bp, synthetic construct
  source 1..80: mol_type = other DNA
actgaacacctaaattccataagaaaacagtactttgagtgggaaacagataaaggcccacaggccacatctaagtatgg

SEQ ID NO: 150938 - DNA, 80 bp, synthetic construct
  source 1..80: mol_type = other DNA
ggagaccgaagtgaagtccctggaccagcccggcccgggccccccggtatcgggccagaggtaagtggactttaattttt

SEQ ID NO: 150939 - DNA, 80 bp, synthetic construct
  source 1..80: mol_type = other DNA
taagacaatattattttcactgggaaacaatacaatcagtagctacctcacacttcaatgcacaacatgtacctatagca

SEQ ID NO: 150940 - DNA, 80 bp, synthetic construct
  source 1..80: mol_type = other DNA
agtgtgtggtcctgtgttttgtttcagcctgtaacgacttctccgtgcgcatgctgcgcgacactccattcatcggccag

SEQ ID NO: 150941 - DNA, 80 bp, synthetic construct
  source 1..80: mol_type = other DNA
gatgaagtattaaatgaagtgctggttgttccaaacatcagagaaagtcatccagctacatccaattcagcccctgcgtt

SEQ ID NO: 150942 - DNA, 80 bp, synthetic construct
  source 1..80: mol_type = other DNA
acaagtttttaacactctcatgcctgaaactgcaggcaaaaactggcaatacacatacactcctttaatgagcaaagtat

SEQ ID NO: 150943 - DNA, 80 bp, synthetic construct
  source 1..80: mol_type = other DNA
ctaggatatggtcctataaggtgtcttctatcacggtggcttgtttatcgcttggcggttacgagcaagagttcatcacg

SEQ ID NO: 150944 - DNA, 80 bp, synthetic construct
  source 1..80: mol_type = other DNA
gttcacgtacatgagatttgatgctgagttcacctttctcacaacaggactgaatggtaatgctccacaaacagtcatac

SEQ ID NO: 150945 - DNA, 80 bp, synthetic construct
  source 1..80: mol_type = other DNA
ttctgagtttattttcccaggtcccaaaaaacccagggtcgacctcgggcctatccaagagcaagaaaggccctcagatt

SEQ ID NO: 150946 - DNA, 80 bp, synthetic construct
  source 1..80: mol_type = other DNA
gtgttgtgtttaacacattcagaacagaggagcatattaaagatcctggaattaaaacatgtacaaataacaccaataca

SEQ ID NO: 150947 - DNA, 80 bp, synthetic construct
  source 1..80: mol_type = other DNA
gtgccgccgcgacggttctgacgtctaaagtcgctgatgagcaacgacacctcggtcacgttgattctgcaagcacaggt

SEQ ID NO: 150948 - DNA, 80 bp, synthetic construct
  source 1..80: mol_type = other DNA
ctcgcgtccagcacacacgcagaagaagcgtccggccgaggtgaggggggggtggactcgcgggcacacgcccgcgacac

SEQ ID NO: 150949 - DNA, 80 bp, synthetic construct
  source 1..80: mol_type = other DNA
ctgaattgggtctgacatcagcccaagatgatggtccccttggcaatgacaaaccaaactatttcttaaattttaaatca

SEQ ID NO: 150950 - DNA, 80 bp, synthetic construct
  source 1..80: mol_type = other DNA
ggctccgcccccccggcccccccccgagctatattcaccgcgcatgcgcggccacacccccgccgccattttgtgcagcc

SEQ ID NO: 150951 - DNA, 80 bp, synthetic construct
  source 1..80: mol_type = other DNA
tggatttactccactgaacgcttataccccagtccttattagacttgcattgttgattagatatcactattataatgggt

SEQ ID NO: 150952 - DNA, 80 bp, synthetic construct
  source 1..80: mol_type = other DNA
cgcggcgtctgcggcgtgttgcgtccgccactgtgtccacggcgcttagtgcgcgctgccggtgcgtgccgtcccgcggt

SEQ ID NO: 150953 - DNA, 80 bp, synthetic construct
  source 1..80: mol_type = other DNA
acaataacaagtgcgatggcggtaaacaatggcaccctcacctgcttaaacgaaaccatggcaaccacttcaaagagagc

SEQ ID NO: 150954 - DNA, 80 bp, synthetic construct
  source 1..80: mol_type = other DNA
tgtggtaaatcacttgtgacttctgttatagcacatggtctaacaaatgaagcaaacatatactcattaccaccagatcc

SEQ ID NO: 150955 - DNA, 80 bp, synthetic construct
  source 1..80: mol_type = other DNA
agtgtttcagatccctcgcctccagaccggtgtctggcccggattaccctcccttggccgtgttttgcatggactgcggt

SEQ ID NO: 150956 - DNA, 80 bp, synthetic construct
  source 1..80: mol_type = other DNA
agcactgcacacccagtaaccatagaaagcagccacgatgtaagatgggaatacacatacacaaatttaatgcgaacaat

SEQ ID NO: 150957 - DNA, 80 bp, synthetic construct
  source 1..80: mol_type = other DNA
cgcggaggactggcagaccgagtacgaggcctgcaaggcctggaatagaccccctagaagcaaactcacagacaaaccct

SEQ ID NO: 150958 - DNA, 80 bp, synthetic construct
  source 1..80: mol_type = other DNA
aaagaataagaataaagcccccaactctctttacagaccgttggtactttcaaaaagactttagtaacttccccctagta

SEQ ID NO: 150959 - DNA, 80 bp, synthetic construct
  source 1..80: mol_type = other DNA
gttcagggacatcagaaggttcatcccagaacaccaacaagaatggtgtaacatgcatttagccaccaatgttaccaagt

SEQ ID NO: 150960 - DNA, 80 bp, synthetic construct
  source 1..80: mol_type = other DNA
aatatcactgtacctgccactcagggattaccagtgctggttactccagggtcgtcacagtatcttacttccgacgactt

SEQ ID NO: 150961 - DNA, 80 bp, synthetic construct
  source 1..80: mol_type = other DNA
accatgctaggagtgcgagaccacctagctgtactccccagacattcacaaccagggaaaaccatttggattgaacacaa

SEQ ID NO: 150962 - DNA, 80 bp, synthetic construct
  source 1..80: mol_type = other DNA
cgattagaaagaaatacctaaatgctactagaaaggcactacctgccctactaacactaggagacgaacttctagaatat

SEQ ID NO: 150963 - DNA, 80 bp, synthetic construct
  source 1..80: mol_type = other DNA
cgccgagagctgtggcttattatggtccgggagtagactataaagatggcactcttgcccccttatccacaaaggatttg

SEQ ID NO: 150964 - DNA, 80 bp, synthetic construct
  source 1..80: mol_type = other DNA
atccctccccctaaggtagtaacttagaagttgaacacttacacgaccaatagcgggcgtggcgcaccagcctcgtcttg

SEQ ID NO: 150965 - DNA, 80 bp, synthetic construct
  source 1..80: mol_type = other DNA
gcagacatctacgaatcctagtgtattttggaccgaaggcaacgcaccaccgcgcatgtcaatcccctttattagcatag

SEQ ID NO: 150966 - DNA, 80 bp, synthetic construct
  source 1..80: mol_type = other DNA
tcatcacaaaaggttggagcacatgaaaacactaatgtagccactggtgggtccacagtaaattacaccactattaacta

SEQ ID NO: 150967 - DNA, 80 bp, synthetic construct
  source 1..80: mol_type = other DNA
gttgtgtccgacgctgcctgcgcactgccggtgcgttccacggtcgtagctgcgcttctcgggggttttggagcgttctg

SEQ ID NO: 150968 - DNA, 80 bp, synthetic construct
  source 1..80: mol_type = other DNA
gcctatgagctcgaccgtggctcccgcctcttggatgccatcatcccctgcttgggacccgaccgcacatgcatgcggcc

SEQ ID NO: 150969 - DNA, 80 bp, synthetic construct
  source 1..80: mol_type = other DNA
atatcagaaattgatgagccacccaagcccatctccctatcaaaagcaaaactggaactgctctatgaagaagacgaaga

SEQ ID NO: 150970 - DNA, 80 bp, synthetic construct
  source 1..80: mol_type = other DNA
gtcaaggccgtggatgcgcaggaccacgtccagttccttagtgacatccacgaggattgttttgcccactctggccactt

SEQ ID NO: 150971 - DNA, 80 bp, synthetic construct
  source 1..80: mol_type = other DNA
tgaagtgttctggtcgaaagtgccagtaatgctggatggtgaatgtttaatggcttttgattatacaaattatgatggga

SEQ ID NO: 150972 - DNA, 80 bp, synthetic construct
  source 1..80: mol_type = other DNA
cacgggcaaatttacgttggccgacctgctgggttcggatgccgtagccagcggcgggttgcccgggtggcgcgcgtgcg

SEQ ID NO: 150973 - DNA, 80 bp, synthetic construct
  source 1..80: mol_type = other DNA
acagacctgtacacacaaatgttagcaagtaacaagttctacacatcagcaggtaaacaaattatagatggctttacccc

SEQ ID NO: 150974 - DNA, 80 bp, synthetic construct
  source 1..80: mol_type = other DNA
ctatgcccccctttgatgacacagacgcaacagccatgaccttacacccaggaatgattatgctatctaaaaaaagaata

SEQ ID NO: 150975 - DNA, 80 bp, synthetic construct
  source 1..80: mol_type = other DNA
tttacacactggctagtgtggattggacacaatcttcaaagggatggtggtggaagatacctgactgtctcaaagacatg

SEQ ID NO: 150976 - DNA, 80 bp, synthetic construct
  source 1..80: mol_type = other DNA
ttaacatactcgctgacgctagtaacatcgatgttaaagctttggacatccaaccaaaacctaaagacctcgttattgag

SEQ ID NO: 150977 - DNA, 80 bp, synthetic construct
  source 1..80: mol_type = other DNA
ttccagggatgtgtggtggtgctttgatttcctctaatcagtctattcaaaatgccatattagggatacatgttgctggt

SEQ ID NO: 150978 - DNA, 80 bp, synthetic construct
  source 1..80: mol_type = other DNA
gggaatttgtgcgcgctgagggatctctctacgggtgtgtccacgggatttgttcgcttttgcgcggcgcttcaccttcc

SEQ ID NO: 150979 - DNA, 80 bp, synthetic construct
  source 1..80: mol_type = other DNA
gcctggtaatccactctaacaactttaccaacaccatactagatgtagggccaattaccatggcaggccttattaactta

SEQ ID NO: 150980 - DNA, 80 bp, synthetic construct
  source 1..80: mol_type = other DNA
ccttatactagtttaggtatcaagaaaagggacctaattggaaaagacaaagatttaagtaaattaaaagctgccatgaa

SEQ ID NO: 150981 - DNA, 80 bp, synthetic construct
  source 1..80: mol_type = other DNA
aatgggactggccccactactatccctatcactgtttctgtagccccttataagtctgaattttctggagcaatggaagc

SEQ ID NO: 150982 - DNA, 80 bp, synthetic construct
  source 1..80: mol_type = other DNA
tgagctctgcatagcaatagataaactgaagagagggctagatgaattagcaccactttatgcaaaggagaataaacagg

SEQ ID NO: 150983 - DNA, 80 bp, synthetic construct
  source 1..80: mol_type = other DNA
aaaaagcagctaaagaagtggtggaatggttttctgataagattaagaccatgctaagttttgttgagagaaacaaggct

SEQ ID NO: 150984 - DNA, 80 bp, synthetic construct
  source 1..80: mol_type = other DNA
tgcttaaattcatctctctgatgttcagagaagtataggagcaagactaatgtgactattatgtgcaaggactcacaagt

SEQ ID NO: 150985 - DNA, 80 bp, synthetic construct
  source 1..80: mol_type = other DNA
gcctctaatggcgtgatcaccataccagctggagaacaaatgtcattatcagcccctttctattctcacaagccattgag

SEQ ID NO: 150986 - DNA, 80 bp, synthetic construct
  source 1..80: mol_type = other DNA
gccaccctctaccgcaaggacatagcgggcctctccaagagcgtgaatgagttacagcacacgctacaggccctgcgccg

SEQ ID NO: 150987 - DNA, 80 bp, synthetic construct
  source 1..80: mol_type = other DNA
tacgccgctccatgagcttatcgcgaataaatacctgtgacggaagatcacttcgcagaataaataaatcctggtgtccc

SEQ ID NO: 150988 - DNA, 80 bp, synthetic construct
  source 1..80: mol_type = other DNA
aacatgcaaaaggctcagttctcatatacaagacaagcacctagtatggataacataaattacgtcagtaggtgaattaa

SEQ ID NO: 150989 - DNA, 80 bp, synthetic construct
  source 1..80: mol_type = other DNA
tatggttttggacatcagaataaagcagtgtacacagctggatataaaatatgtaattaccatctagccaccccagaaga

SEQ ID NO: 150990 - DNA, 80 bp, synthetic construct
  source 1..80: mol_type = other DNA
agtacacaagagaagaaaactatgcccgtatataatagacaggtattgactaagaaacaacgagatcaaatagatctatt

SEQ ID NO: 150991 - DNA, 80 bp, synthetic construct
  source 1..80: mol_type = other DNA
aggagagtaaaagtagaaaggaattgaccaattcgttacaagccatattccaaggtcctatagatatgaacaaaccacca

SEQ ID NO: 150992 - DNA, 80 bp, synthetic construct
  source 1..80: mol_type = other DNA
aaatgtttaaatctacctgaatacagtgttcttaggagacgctggttggacttgttttagattatatatatatatagacc

SEQ ID NO: 150993 - DNA, 80 bp, synthetic construct
  source 1..80: mol_type = other DNA
tgtcagaacaactcccaaatgatgactttcctacagagcgctacaagaggcccaggaaagacaccaccgtcagagaagaa

SEQ ID NO: 150994 - DNA, 80 bp, synthetic construct
  source 1..80: mol_type = other DNA
ttctgtccattgctgacataatccgctccacttcaacgtaacaccgcacgaagatttctattgttcctgaaggcatattc

SEQ ID NO: 150995 - DNA, 80 bp, synthetic construct
  source 1..80: mol_type = other DNA
ataggaacttccgtaaaagaccaagagtccacacaagactttgaaaattggctttataaaacagactcacactatcaaac

SEQ ID NO: 150996 - DNA, 80 bp, synthetic construct
  source 1..80: mol_type = other DNA
ttccccaggggaaaaactttacaaacaaatatctacatatcttccatactacaacacaacagaaacaatagcacagttaa

SEQ ID NO: 150997 - DNA, 80 bp, synthetic construct
  source 1..80: mol_type = other DNA
acttgtaccatgcattgcagcaaagagtgataacattggtcatgttgttatacaatatatgtatgttccccccggagccc

SEQ ID NO: 150998 - DNA, 80 bp, synthetic construct
  source 1..80: mol_type = other DNA
ggttacaaattcacgtttgtaatcatgggtgcacaggtgtccacacaaaagagcggatcacatgaaaaccaaaacatact

SEQ ID NO: 150999 - DNA, 80 bp, synthetic construct
  source 1..80: mol_type = other DNA
caccaaacagatttcatagccaccaccacaactggccaaggggccattttagtaacatgtagcgggtgtccagatatatc

SEQ ID NO: 151000 - DNA, 80 bp, synthetic construct
  source 1..80: mol_type = other DNA
aacaggtttttggcctcagattgcaaccaggcttagatagtgtgtttaagcacactctgttgggagaaattctaaactac

SEQ ID NO: 151001 - DNA, 80 bp, synthetic construct
  source 1..80: mol_type = other DNA
aaggtctaggtggttagataatttcatttaattgattaaagatatatagcatactatttgtggtagaatagatatgatat

SEQ ID NO: 151002 - DNA, 80 bp, synthetic construct
  source 1..80: mol_type = other DNA
caccccgtgtggtgccttaccgcggggaaggggtcgacttcaagtcaggttcaatcactccattaacagcagtaagcaac

SEQ ID NO: 151003 - DNA, 80 bp, synthetic construct
  source 1..80: mol_type = other DNA
ctatgataacagtaaaatcgccaacagtgcacgagatcggtccagcatcaaacaagccaacatgggtaaatttgggcaac

SEQ ID NO: 151004 - DNA, 80 bp, synthetic construct
  source 1..80: mol_type = other DNA
ttaaagaacctgataaaaataatttcatctctagtcatcataaccaggaattacgaagacaccacaacggtcttagctac

SEQ ID NO: 151005 - DNA, 80 bp, synthetic construct
  source 1..80: mol_type = other DNA
ggcaaggctcttaaaaagctatgtttctcggtaggtgttggagaaagaaaaggcaactgcttctgccagctgtgcgtcct

SEQ ID NO: 151006 - DNA, 80 bp, synthetic construct
  source 1..80: mol_type = other DNA
ggtaaaatgccaggaggcagtagcaatgtgcctattagaatgagagctaagtggtacccaacactgtttcatcagcaaga

SEQ ID NO: 151007 - DNA, 80 bp, synthetic construct
  source 1..80: mol_type = other DNA
ctgtggccggcgctttgtgcgcgctgccggtgcgtgtggtgccacgggacagggctggaggagtgttgcggcccgtacct

SEQ ID NO: 151008 - DNA, 80 bp, synthetic construct
  source 1..80: mol_type = other DNA
gggtggcagacaccattgcgagtggtccaatgaattccgagagagtcccggcgttaacagctgtcgagacgggccacaca

SEQ ID NO: 151009 - DNA, 80 bp, synthetic construct
  source 1..80: mol_type = other DNA
taagaagagcggaaagcagaacaccataagtttttatggtcctgccagtacaggaaagaccaacctggccaaagccattg

SEQ ID NO: 151010 - DNA, 80 bp, synthetic construct
  source 1..80: mol_type = other DNA
tttcgatgtgaccgctgtgacggacagtagacaaacaatcaccaccgtgcctcaagtggagcataacctaaggacagcgg

SEQ ID NO: 151011 - DNA, 80 bp, synthetic construct
  source 1..80: mol_type = other DNA
ggaaagtcattaactacatcaattattggtagggctatagcagaaaggtacaaatctacagtatattcacttcccccaga

SEQ ID NO: 151012 - DNA, 80 bp, synthetic construct
  source 1..80: mol_type = other DNA
ggccaaaactgtacaaccccagagacaacacagaactgtttgtagtatactcatacaactttgggcacggacgcatgccg

SEQ ID NO: 151013 - DNA, 80 bp, synthetic construct
  source 1..80: mol_type = other DNA
atatatatatggttaatatatacatatatatggagagagagagagagattgattcactcttgttgcccaggctggagtgc

SEQ ID NO: 151014 - DNA, 80 bp, synthetic construct
  source 1..80: mol_type = other DNA
ctactttgggtgtccgtgtttcctgtttttctttgatgtgtgttatatggtgacaatttatagtgtataagttgtcatca

SEQ ID NO: 151015 - DNA, 80 bp, synthetic construct
  source 1..80: mol_type = other DNA
gtgaacggacccctggtccatctccgtgtggtatacatgtgctgttttgtctttactttttgtgaatatctgttggtgac

SEQ ID NO: 151016 - DNA, 80 bp, synthetic construct
  source 1..80: mol_type = other DNA
gcaggagaagaaaaacagaaaatgcgtggagcacaatctcactgccattttccagggattaggagatgattcaacaccag

SEQ ID NO: 151017 - DNA, 80 bp, synthetic construct
  source 1..80: mol_type = other DNA
ggacgatatcaccccccggggagcctcctacggtggcaacctcactaacatgactttcaccctggagggtctgttcgaac

SEQ ID NO: 151018 - DNA, 80 bp, synthetic construct
  source 1..80: mol_type = other DNA
ctgcgtgtcgtcccacggcatttgttggcgggcccgggctgagggagctttgcggcgtactgtggccggcgctttgtgcg

SEQ ID NO: 151019 - DNA, 80 bp, synthetic construct
  source 1..80: mol_type = other DNA
gtggagttgacaaatatggatattttaattggtcctcaactactgaaccacagaatatggtgcataggagtatggtttac

SEQ ID NO: 151020 - DNA, 80 bp, synthetic construct
  source 1..80: mol_type = other DNA
gacttatatgctgcatatgtagatacacagaccccccaatgtttaatgaagatcatccagacatgggatttgtattttat

SEQ ID NO: 151021 - DNA, 80 bp, synthetic construct
  source 1..80: mol_type = other DNA
aaacacaaacaccacaaacgcaccaacctcttcaaccggagaagagctgataaatgaaacttctccatgcatacgaaatg

SEQ ID NO: 151022 - DNA, 80 bp, synthetic construct
  source 1..80: mol_type = other DNA
accaggcacgtggtcaattacaaaactagatcagagagtaccttgaagtccttctttgggatatcaacatgggttacaat

SEQ ID NO: 151023 - DNA, 80 bp, synthetic construct
  source 1..80: mol_type = other DNA
gcacatgaagtggagatcaccactagtgtttaccacaaagctaagcatgttaaagcttggtgtccaagaccacccagagc

SEQ ID NO: 151024 - DNA, 80 bp, synthetic construct
  source 1..80: mol_type = other DNA
aaggattattggacacagcaaagtcattacaaccatgtacagattgtcctaaaccaccccattacaagtcatgctgcccc

SEQ ID NO: 151025 - DNA, 80 bp, synthetic construct
  source 1..80: mol_type = other DNA
atgtaatatgggcagcaaatgaattagacagattcggattggcagaaaacctgttggaatcaaaagaaggatgtcagaaa

SEQ ID NO: 151026 - DNA, 80 bp, synthetic construct
  source 1..80: mol_type = other DNA
cccgagcagcaaacacgcggcagaccctcgtgagacccgtccggtcactgaagagagtctggcaccaggccccctcgcag

SEQ ID NO: 151027 - DNA, 80 bp, synthetic construct
  source 1..80: mol_type = other DNA
aattgcatatctgctgttccttttgttgtaccaatggcacacctggaggaaaaaggaaaattctacactagcaagttagt

SEQ ID NO: 151028 - DNA, 80 bp, synthetic construct
  source 1..80: mol_type = other DNA
tacctcttaaggtcactaagcactccgagcgtcagcgaggagtgcgaccctctgccctggtgcaacgccctcggcggccg

SEQ ID NO: 151029 - DNA, 80 bp, synthetic construct
  source 1..80: mol_type = other DNA
tttttagctaggatgataactaatgatagtgacatatactctttacccccagatccaaaatattttgatggttacgatca

SEQ ID NO: 151030 - DNA, 80 bp, synthetic construct
  source 1..80: mol_type = other DNA
ctgctgatttgttaaagttgttggcaaacaatcagaaagctatgcttgcaaaattagatgcactagataggaatgtcagc

SEQ ID NO: 151031 - DNA, 80 bp, synthetic construct
  source 1..80: mol_type = other DNA
tgacatttcaccaatacatgaaccagagtcctctgatagtgaagaacccccctttctcttccccagtgattggtatcctc

SEQ ID NO: 151032 - DNA, 80 bp, synthetic construct
  source 1..80: mol_type = other DNA
ccagatacttccagcactgaaattcctatcactgtgactatcgctccgatgtgttgtgagtttaatggactcagaaatat

SEQ ID NO: 151033 - DNA, 80 bp, synthetic construct
  source 1..80: mol_type = other DNA
tacactgtgcagttgaccagccagcccaaaccagctcaacaagtttttgctattaaggtggacattgcttcacaaccctt

SEQ ID NO: 151034 - DNA, 80 bp, synthetic construct
  source 1..80: mol_type = other DNA
ggcgtgagaaggctgagccccggtggcctggatgtgggccaacgaattggctcgcagcgagtcgcgatccacgaaggtca

SEQ ID NO: 151035 - DNA, 80 bp, synthetic construct
  source 1..80: mol_type = other DNA
taagtctttccccagcgtctgatcagcggttgcaatacaccatgctgggcgaaatattgaactactacacccattggact

SEQ ID NO: 151036 - DNA, 80 bp, synthetic construct
  source 1..80: mol_type = other DNA
tcactgtatcaaagagagcatcaggaggggacggattaattctgtccatcccacttgacatgagcaacagtttattttcc

SEQ ID NO: 151037 - DNA, 80 bp, synthetic construct
  source 1..80: mol_type = other DNA
ctattatctccattttagtaaaaaacatgaagtcgtactatcaaaaatttatagacgaaggctttccatcatcctggtac

SEQ ID NO: 151038 - DNA, 80 bp, synthetic construct
  source 1..80: mol_type = other DNA
tcataaaataacatgggagaatgtaacatttttgaaaagatacttcaggccagacaaacagtttcctttccttgttcatc

SEQ ID NO: 151039 - DNA, 80 bp, synthetic construct
  source 1..80: mol_type = other DNA
ctcagaaagaaagcatgcgatatcctagaactaccctatgtgtgtaagcagggagactcctggttgaaaaagtttactga

SEQ ID NO: 151040 - DNA, 80 bp, synthetic construct
  source 1..80: mol_type = other DNA
atagctcctatgtgtacggagtttacaggtatcaggtcaaagactattgttccacaagggttaccaactacaactttacc

SEQ ID NO: 151041 - DNA, 80 bp, synthetic construct
  source 1..80: mol_type = other DNA
gggaggtggagacggacttacagacgatggcgcaggcgaaaggggcgacgcagacacagaaaaaaaataataatgaaaca

SEQ ID NO: 151042 - DNA, 80 bp, synthetic construct
  source 1..80: mol_type = other DNA
gacagggaggacagacacccaaaatatcacaattataaatgacacttcccatgcgcgtgcagacaactgcacaggattaa

SEQ ID NO: 151043 - DNA, 80 bp, synthetic construct
  source 1..80: mol_type = other DNA
actaccatccagcaaagtacatatgaactagtaaagtcagaatatcaaaacatatacacaactagtgtaacatatccccc

SEQ ID NO: 151044 - DNA, 80 bp, synthetic construct
  source 1..80: mol_type = other DNA
cacaaacatcaactactacaaagactccgcctccaattcactgaatcggcaagattttactcaagaccccagtaaattta

SEQ ID NO: 151045 - DNA, 80 bp, synthetic construct
  source 1..80: mol_type = other DNA
tatagatgtacatgataaaccccctccagaatgtattgtagatttattgaaatctgtggactgtgatgaagttagacagt

SEQ ID NO: 151046 - DNA, 80 bp, synthetic construct
  source 1..80: mol_type = other DNA
atgattacacagaaagtgggtttgtcacgctttggcatcagacagcatttgtatcaaatggaacttctgggtctataatg

SEQ ID NO: 151047 - DNA, 80 bp, synthetic construct
  source 1..80: mol_type = other DNA
atataaagcggtgcacttccgaatggctgagtttttcacgcccgtccgcagcgagatcgcgacgcaggagcgatcgagcg

SEQ ID NO: 151048 - DNA, 80 bp, synthetic construct
  source 1..80: mol_type = other DNA
tcggacgcagtgggtacactatacatgtacagtgtaacgcctcgaaatttcaccaggggtgtttgttagtggtgtgtgtg

SEQ ID NO: 151049 - DNA, 80 bp, synthetic construct
  source 1..80: mol_type = other DNA
acgttactttcctcaaaagaaagtttcgtcctgatgaccgatacagatttctcatccaccctgtgtacagtatggaggat

SEQ ID NO: 151050 - DNA, 80 bp, synthetic construct
  source 1..80: mol_type = other DNA
agtagtagcaataatagcttttagaatagtgatatatgtagtacaaatgttaggtagacttagaaggggctataggcctg

SEQ ID NO: 151051 - DNA, 80 bp, synthetic construct
  source 1..80: mol_type = other DNA
accaatcagttcctgactaccgatgtaggagtgtctgccccaatactgccagggttcgacccaacacccttgattcacat

SEQ ID NO: 151052 - DNA, 80 bp, synthetic construct
  source 1..80: mol_type = other DNA
ctagcgcattgcgcgatatgggtttgtttggacaaaatatgctataccattatctgggaagaaccggttacacactccac

SEQ ID NO: 151053 - DNA, 80 bp, synthetic construct
  source 1..80: mol_type = other DNA
tacccatatgtgacattaggaatcaagaaaagggatatattgaaccgcactaccaaagatctatctaagttacaacacat

SEQ ID NO: 151054 - DNA, 80 bp, synthetic construct
  source 1..80: mol_type = other DNA
taatatgtggcaaagcaattagccttgtagatcggacctctaatgttagatatagcctagaccaactagttacagcaatt

SEQ ID NO: 151055 - DNA, 80 bp, synthetic construct
  source 1..80: mol_type = other DNA
tggggctatcccaacaaccagctagacctggccaggtacaaggaggccaagttcaccttctacagacacaaaaagactga

SEQ ID NO: 151056 - DNA, 80 bp, synthetic construct
  source 1..80: mol_type = other DNA
cgccgaccatggaggcgccgctggaggacccgcagacgcagacctgctagacgccgtggccgccgcagaaacgtaaggag

SEQ ID NO: 151057 - DNA, 80 bp, synthetic construct
  source 1..80: mol_type = other DNA
ggacacgtggggggccaggctggcattatatcggtgtaacgcagccacacgggcctctggaccctcacagtcggcaaaca

SEQ ID NO: 151058 - DNA, 80 bp, synthetic construct
  source 1..80: mol_type = other DNA
tcccaagtggtgcctggagataccatgcagaccagacacgtgaaaaatttccacacccggtctgagtcatcagttgaaaa

SEQ ID NO: 151059 - DNA, 80 bp, synthetic construct
  source 1..80: mol_type = other DNA
acttaacagatccactttgcattgaggatgatacagaaaattgtaaacaaaccatgtctccaaatgaattaggactcaca

SEQ ID NO: 151060 - DNA, 80 bp, synthetic construct
  source 1..80: mol_type = other DNA
gcaatggttgaaacacaaagtatgtgacatcctgcaactgccattcgccctcaaacagagtgacagttggctaaagaagt

SEQ ID NO: 151061 - DNA, 80 bp, synthetic construct
  source 1..80: mol_type = other DNA
taaggagacggaggcgagggtggcagaggggctacaggcgccggtacagactcagacgctaccgtagacgggtcaggcga

SEQ ID NO: 151062 - DNA, 80 bp, synthetic construct
  source 1..80: mol_type = other DNA
gacctcgggcaccatatatggttcttcttgaagattcgatacagacaaagttcgccccgggtaactatccacttctatgg

SEQ ID NO: 151063 - DNA, 80 bp, synthetic construct
  source 1..80: mol_type = other DNA
gttatctccaacagatccatatccatacagaccggggacagccggccaacgaagaaacagaaggagacgccggagacgcc

SEQ ID NO: 151064 - DNA, 80 bp, synthetic construct
  source 1..80: mol_type = other DNA
atccatattagcaagaatgataaccacagaatctgacatatattcactaccaccatcaccaaaatactttgatggctatg

SEQ ID NO: 151065 - DNA, 80 bp, synthetic construct
  source 1..80: mol_type = other DNA
ttggattacaatctagttgtgtgttgtgtgtgccatggatcagccaaacccactaccggctggtcgagcaagatgagtac

SEQ ID NO: 151066 - DNA, 80 bp, synthetic construct
  source 1..80: mol_type = other DNA
cattgtcacgtggctgctacgtcacggccgccattttgttttacaaaatggccgacttccttccgtttttttgaaaaaag

SEQ ID NO: 151067 - DNA, 80 bp, synthetic construct
  source 1..80: mol_type = other DNA
tcgaccataaagacaccagtaaataagacaactattaaagaatttttcaaccatgccattgaaggggatgaacaaggctt

SEQ ID NO: 151068 - DNA, 80 bp, synthetic construct
  source 1..80: mol_type = other DNA
tgcaggacaagtttcacagtctgttaaagggttaccatattacaaccattttttacacttgtctttaagatggattgaga

SEQ ID NO: 151069 - DNA, 80 bp, synthetic construct
  source 1..80: mol_type = other DNA
agatcatactttacagaggtacaaggtcaaattgtcaccaccaaatccactatagagtgtaacctacctagtattcatac

SEQ ID NO: 151070 - DNA, 80 bp, synthetic construct
  source 1..80: mol_type = other DNA
atctgcaaagcatggatgcataccacatagaggtaaatacagggaaccaccagggagataagatctttgcctttcaaata

SEQ ID NO: 151071 - DNA, 80 bp, synthetic construct
  source 1..80: mol_type = other DNA
ggtttgctcgagtgcccattaaagatgaatcagcagataatggcgacacatattatggacaaacatcaatcaacgacttt

SEQ ID NO: 151072 - DNA, 80 bp, synthetic construct
  source 1..80: mol_type = other DNA
gaaaattatgataacaatttcaagaactggggaataaacatacaagagatgtcacaaattagaaggaaatttgagatgtt

SEQ ID NO: 151073 - DNA, 80 bp, synthetic construct
  source 1..80: mol_type = other DNA
gaattagtccagaaattcctggcttatttacagaaataatatataacccatacacagacaaaggaaaaggtaacagaatt

SEQ ID NO: 151074 - DNA, 80 bp, synthetic construct
  source 1..80: mol_type = other DNA
caggccacttggcttctaagctttgtaatacaacacacatatacaaagaccaagtgtacactgtagaaggaggaatgcca

SEQ ID NO: 151075 - DNA, 80 bp, synthetic construct
  source 1..80: mol_type = other DNA
atgaagagggcccagttgcgggccacgtccacgtaggtcgcggccctggggttgcccaccaggaaggtgaggatgttgtc

SEQ ID NO: 151076 - DNA, 80 bp, synthetic construct
  source 1..80: mol_type = other DNA
atatctccccagcccatagtacaattgagcgggattttgcttatgttacctatgccttaaactgcctaggtagtcttgta

SEQ ID NO: 151077 - DNA, 80 bp, synthetic construct
  source 1..80: mol_type = other DNA
ctatgttggggacgcatgtcatctgggatgtagggttgcagtcaagttgtgtgctgtgtgtgccttggatcagccaaacg

SEQ ID NO: 151078 - DNA, 80 bp, synthetic construct
  source 1..80: mol_type = other DNA
gcgtttgttggttcatacaagatcataaactatcaccttgctacagaccaggaaaaacgtgatgcagtgtatgttgattg

SEQ ID NO: 151079 - DNA, 80 bp, synthetic construct
  source 1..80: mol_type = other DNA
caactactctgtaactttcaaactcaacttcaaataaacaaggccgtgggagtttcacttgtcggtgtctacctcttaag

SEQ ID NO: 151080 - DNA, 80 bp, synthetic construct
  source 1..80: mol_type = other DNA
atggcggcggagcacttccggcttgcccaagatggcgggaaaaaacatccgggtcaaaggtcacagctacgtcacaagtc

SEQ ID NO: 151081 - DNA, 80 bp, synthetic construct
  source 1..80: mol_type = other DNA
cagctagttatcccttattggcagtggtagaacaactcagggcagaaaatgagacgagaggcaaagtcaaaaccaacctc

SEQ ID NO: 151082 - DNA, 80 bp, synthetic construct
  source 1..80: mol_type = other DNA
tggttctcagacaaaattaaatctatgttgagtttcgttgaaagaaataaggcttggctcaccgtggtttcagcagttac

SEQ ID NO: 151083 - DNA, 80 bp, synthetic construct
  source 1..80: mol_type = other DNA
tgatgatactacaccaggtttcatcatagatctattaagtgcttccaaagatccaaaagtgattgagttttgtgagaaag

SEQ ID NO: 151084 - DNA, 80 bp, synthetic construct
  source 1..80: mol_type = other DNA
caaagttaatactgtcttacactcccccaggagctaatggaccaacaaccagaaaggaggcaatgcttggaacacatgtg

SEQ ID NO: 151085 - DNA, 80 bp, synthetic construct
  source 1..80: mol_type = other DNA
ctcaaggacaccccattcatagaacaggccgcggagctgcagaatgatgtgcgacaagcggtggagtgggcaataggcag

SEQ ID NO: 151086 - DNA, 80 bp, synthetic construct
  source 1..80: mol_type = other DNA
gatttgggtttacaatcatcctgttccatagtggtaccatggatgtctgctgggtttttccggcacactatgaaggataa

SEQ ID NO: 151087 - DNA, 80 bp, synthetic construct
  source 1..80: mol_type = other DNA
gacatacgacagttggagtgtatcgcagaggaacaggggctgagtgattacatcacaggtttgggtagagcttttggtgt

SEQ ID NO: 151088 - DNA, 80 bp, synthetic construct
  source 1..80: mol_type = other DNA
agagtaacaaaactcaaggcataccaatcagaatgcccagcggcgctcaacagttcatgaccacagaagatgaacagtca

SEQ ID NO: 151089 - DNA, 80 bp, synthetic construct
  source 1..80: mol_type = other DNA
ccagggtgtgatatctgactattttacacagttaggaaatgcttttggggaaggttttactacaaacatccaaaaccact

SEQ ID NO: 151090 - DNA, 80 bp, synthetic construct
  source 1..80: mol_type = other DNA
tacagatcacaagaggtgactctaccattacctcacaggatgtgggtaatgcggttgttggttatggggtgtggcctcat

SEQ ID NO: 151091 - DNA, 80 bp, synthetic construct
  source 1..80: mol_type = other DNA
tttagcttcggccgccattttaggccctcgcgggcctccgtaggcgcgttctaatgacgtcacggcagccattttgactg

SEQ ID NO: 151092 - DNA, 80 bp, synthetic construct
  source 1..80: mol_type = other DNA
aggcctcgggtggcgcccactcccatgccgccacctcaggggccacccaccgccatgcagctgtcaccaagggcacttac

SEQ ID NO: 151093 - DNA, 80 bp, synthetic construct
  source 1..80: mol_type = other DNA
tattgagaagcttaaaaagggattagatgggttagcaccattatatgcagcagaaaacaaaatagtgactaatttacaca

SEQ ID NO: 151094 - DNA, 80 bp, synthetic construct
  source 1..80: mol_type = other DNA
gggctaagggtcggcgggtgacgaagcagcagacggcggatatgggaatttcagaatgaggtggcggagtcaggcgaaaa

SEQ ID NO: 151095 - DNA, 80 bp, synthetic construct
  source 1..80: mol_type = other DNA
ctggatgacctagccccactgtatgctagtgaaaataaaagagtaacaaacatccagaaggagctacaacgctcggccgc

SEQ ID NO: 151096 - DNA, 80 bp, synthetic construct
  source 1..80: mol_type = other DNA
agccttctcatataccgtgtctctggggctgacctttatacagaaggcgtcccctactaggtccacggccagctcgtagg

SEQ ID NO: 151097 - DNA, 80 bp, synthetic construct
  source 1..80: mol_type = other DNA
gtaaagcaatacaactgatggacagacacaccagggtgagatattcagtagaccaactaaccacaatgatgataaacgag

SEQ ID NO: 151098 - DNA, 80 bp, synthetic construct
  source 1..80: mol_type = other DNA
gaaaacatgttctatcacttcttaggtcgatctggttacacagttcatgtgcagtgcaatgctagcaaattccaccaagg

SEQ ID NO: 151099 - DNA, 80 bp, synthetic construct
  source 1..80: mol_type = other DNA
gtaaaaatgcaggaggctaccaatatgctacaaaaatgagacaacactactggacacaactaacaacactcacaagcaca

SEQ ID NO: 151100 - DNA, 80 bp, synthetic construct
  source 1..80: mol_type = other DNA
tacagggttgcccaacccgaagcccaaagttcccacgctgcgtgcagcaaaggtccagggtccagcgtttgattacgcag

SEQ ID NO: 151101 - DNA, 80 bp, synthetic construct
  source 1..80: mol_type = other DNA
gcagtctcagaagatcaaccaacccaacccgatgtggccacatgtcgtttttacacactagaatctgtagtgtggcaaaa

SEQ ID NO: 151102 - DNA, 80 bp, synthetic construct
  source 1..80: mol_type = other DNA
attatgcacattcgggcagcaaaggcctatagcaaagctggaaagctcaatgtgagccaagctatggctataatgtcaac

SEQ ID NO: 151103 - DNA, 80 bp, synthetic construct
  source 1..80: mol_type = other DNA
aggttcacacctgggacaccactatttggacagggtgtgaagaccggcgtgcgctaggcatgagtcctccggcccctgaa

SEQ ID NO: 151104 - DNA, 80 bp, synthetic construct
  source 1..80: mol_type = other DNA
agtatacaacctgaggataccatagaaacaagatatgttcagacatcacaaactagagatgagatgagtgtagaaagttt

SEQ ID NO: 151105 - DNA, 80 bp, synthetic construct
  source 1..80: mol_type = other DNA
ttcaaataatttactaaatgtctccaaagctctccttccatgcaccgactgtcaaaaacctgaacactacaaacagtgtt

SEQ ID NO: 151106 - DNA, 80 bp, synthetic construct
  source 1..80: mol_type = other DNA
cctcaaaggattaggacactttttgaaggctgaaggcaaggttgaatgctatcgaacactgtatccgatccccatttact

SEQ ID NO: 151107 - DNA, 80 bp, synthetic construct
  source 1..80: mol_type = other DNA
caggtccaggagtcgcagacgaccggcttccagcgagccgccttccacgttggtgatgagccgaagcacctggcagtgca

SEQ ID NO: 151108 - DNA, 80 bp, synthetic construct
  source 1..80: mol_type = other DNA
atcccggccaggaaggcctcgatgaccgagtctgggacgccgtaagtctggtcccagagcagggcctcgtacacatagtc

SEQ ID NO: 151109 - DNA, 80 bp, synthetic construct
  source 1..80: mol_type = other DNA
accgctccgtggcggtgccattgttgtccaccggagtatttgctggaaacaaagataggctgatgcagtcatttaaccac

SEQ ID NO: 151110 - DNA, 80 bp, synthetic construct
  source 1..80: mol_type = other DNA
actcacccaggagaggagggcagagaggtcagaacaaacaggactgagtaccttggtcagcaacccacagaagaatactg

SEQ ID NO: 151111 - DNA, 80 bp, synthetic construct
  source 1..80: mol_type = other DNA
tagtggtcccaccgggaacacctaataagtgtgtggtcttgtgctttgtatcagcatgcaatgacttctccgtccgcatg

SEQ ID NO: 151112 - DNA, 80 bp, synthetic construct
  source 1..80: mol_type = other DNA
tacaataataaaattaaagatatacctgaaaaagcaagtaaattatactacgaccaaaccaaacaactaattggcattac

SEQ ID NO: 151113 - DNA, 80 bp, synthetic construct
  source 1..80: mol_type = other DNA
ccttgtgctatattttgaatttaaacacacgaaaatgggagctcaagtgtcaactcaaaaatctggatctcacgaaactg

SEQ ID NO: 151114 - DNA, 80 bp, synthetic construct
  source 1..80: mol_type = other DNA
agcagtagtctttagagatagaaatacaggggattatttatcactagcaactgtgtataacaagatcacagaggagaata

SEQ ID NO: 151115 - DNA, 80 bp, synthetic construct
  source 1..80: mol_type = other DNA
aagacgcgtaaggatgcaatgttgggcacgcatgtcatatgggacgtgggtttacaatcatcatgtgtgttatgtatccc

SEQ ID NO: 151116 - DNA, 80 bp, synthetic construct
  source 1..80: mol_type = other DNA
tgcgaattgtgaatgagcacgacccaacaccagttgacgctaaggtaagagtttacatgaagcccaaacacattcgcgta

SEQ ID NO: 151117 - DNA, 80 bp, synthetic construct
  source 1..80: mol_type = other DNA
cagaatactgtacgatgactataagagatttatgaactactggacctcctcaaacgaggacctagacctctgcagataca

SEQ ID NO: 151118 - DNA, 80 bp, synthetic construct
  source 1..80: mol_type = other DNA
aactagaaattacagtacttaaattaaagagaaacgaaaaattcaaagacattaggaagtatatacctgaaaatgaagat

SEQ ID NO: 151119 - DNA, 80 bp, synthetic construct
  source 1..80: mol_type = other DNA
aaatttctcatccacaaacatcaccgacaagagggatagtatcacctacataccagacaccgttaagcctgacgtgacaa

SEQ ID NO: 151120 - DNA, 80 bp, synthetic construct
  source 1..80: mol_type = other DNA
aacagttcatgacaacagaagatgagcagtctgccaatatattaccagggtatacccccacaaaacagatattcatccca

SEQ ID NO: 151121 - DNA, 80 bp, synthetic construct
  source 1..80: mol_type = other DNA
aagtatggagactacacagcacagtaccaaggaaacacacacatgctagactactaccttggcttttacagccccatatt

SEQ ID NO: 151122 - DNA, 80 bp, synthetic construct
  source 1..80: mol_type = other DNA
atataataaagatggagtcaaactagagattacagttttaaaactcaagagaaatgaaaaattcaaagacatcagaaagt

SEQ ID NO: 151123 - DNA, 80 bp, synthetic construct
  source 1..80: mol_type = other DNA
ccatggatatgtacagaattccactaaacacagatggtagcaaaggtcccatattttgtttgagcctctcccccgcctca

SEQ ID NO: 151124 - DNA, 80 bp, synthetic construct
  source 1..80: mol_type = other DNA
ttcggccgtggcgtacgagccctcgggcgtggtgtcattgagaaacaaaacatgcatggtacgcgcgcccttagggtatc

SEQ ID NO: 151125 - DNA, 80 bp, synthetic construct
  source 1..80: mol_type = other DNA
ccactgcttctggtgcgagctgaaccgaaggcactcgctactgatatgagctggcgccctcccgttcaccatgcggcagg

SEQ ID NO: 151126 - DNA, 80 bp, synthetic construct
  source 1..80: mol_type = other DNA
actttctggtacaatttaacagaaaccctcctttcacagactctgtgttaacagggcctatgctgcatcctggtatacta

SEQ ID NO: 151127 - DNA, 80 bp, synthetic construct
  source 1..80: mol_type = other DNA
gaaaaaagtgttgatggactaagacttgctaatccagaaaaacaatacttgtttttgaagcaaattgaagagatgaaaga

SEQ ID NO: 151128 - DNA, 80 bp, synthetic construct
  source 1..80: mol_type = other DNA
caacacaacaaaatgggggctcaggtatcgacccaaaagacaggggcccacgagactggtttaaacgctagtggtaactc

SEQ ID NO: 151129 - DNA, 80 bp, synthetic construct
  source 1..80: mol_type = other DNA
ttaacaaatgggtaacaacaggtctaactattactaatggacagccatcaggacaaccaggacacagtaaaaaatttata

SEQ ID NO: 151130 - DNA, 80 bp, synthetic construct
  source 1..80: mol_type = other DNA
gttagtctgtatcatatgcccctacaccaatccgcccctcttcgataagagtaaccccaagatgggctatgtattctatg

SEQ ID NO: 151131 - DNA, 80 bp, synthetic construct
  source 1..80: mol_type = other DNA
gatgctatatatgttaatagcaatacaacacctactcaatcagaaacaacaattccaggcatattagctagtaatgccat

SEQ ID NO: 151132 - DNA, 80 bp, synthetic construct
  source 1..80: mol_type = other DNA
aggagtgcagcggaagaggcgaaggaagtgcaggctgctgaggctctgagagaggcccttcctcctctcgccccggatgt

SEQ ID NO: 151133 - DNA, 80 bp, synthetic construct
  source 1..80: mol_type = other DNA
ctttgccacgccacaaggggaaatcatgacaaagaagagtgtgtcagaggcaggtataccacccataaatacacctgcat

SEQ ID NO: 151134 - DNA, 80 bp, synthetic construct
  source 1..80: mol_type = other DNA
tgtacgaggaatatgagaagcaccacaacaggtggtctaggtccaacgtagatctagaactcattagatacaagggctgc

SEQ ID NO: 151135 - DNA, 80 bp, synthetic construct
  source 1..80: mol_type = other DNA
gtgccaggtaaggtgaacaaaatggaagcgtaccctataccattaactcatggtaaacagtccagtgatgtctctatatt

SEQ ID NO: 151136 - DNA, 80 bp, synthetic construct
  source 1..80: mol_type = other DNA
tagttatgagatgtccatacactgttccccaaatgatagacacaagcaatcccctcaggggctttgtaccatacagcttt

SEQ ID NO: 151137 - DNA, 80 bp, synthetic construct
  source 1..80: mol_type = other DNA
tcttgctagcctggctgctaattttggttttcaacccgcgccggcgagtcgttcagatccgagtgccgcggccacaccac

SEQ ID NO: 151138 - DNA, 80 bp, synthetic construct
  source 1..80: mol_type = other DNA
agcagccgtggctcgactccagtcaagaggtacaagcactccaaaaccagcaaaaagaacaagaacaagcgcagagtctc

SEQ ID NO: 151139 - DNA, 80 bp, synthetic construct
  source 1..80: mol_type = other DNA
ttgaattgaaagctccatctctcgctgtcaccatacacgccgggctgcgccaacttgacaagcagaaatggtcactggtc

SEQ ID NO: 151140 - DNA, 80 bp, synthetic construct
  source 1..80: mol_type = other DNA
gtttgggttccgatgtcggtgttggcggctgcggtgggatgacgggctggtgggactcctccgacggcggagtgacgaac

SEQ ID NO: 151141 - DNA, 80 bp, synthetic construct
  source 1..80: mol_type = other DNA
caggatggctccccctaatagtctgtggcacagggaacacccagaacaactatatagtacactcagaggatgtaacccca

SEQ ID NO: 151142 - DNA, 80 bp, synthetic construct
  source 1..80: mol_type = other DNA
ccactaaatgaccatggcaaaggcaatatgatgtggttccaatacctaacaaaacccaccactgaatttgatgcagtaaa

SEQ ID NO: 151143 - DNA, 80 bp, synthetic construct
  source 1..80: mol_type = other DNA
ctgtgacaattgcacctatgaaccttgaactgtccggaattagatccaaaacagtcataacacaaggccttcctacaaca

SEQ ID NO: 151144 - DNA, 80 bp, synthetic construct
  source 1..80: mol_type = other DNA
agaatatattactgcagcagcatggaatagacccgcacgctcaaacctaaatgatacccccttctacccatgggtaccca

SEQ ID NO: 151145 - DNA, 80 bp, synthetic construct
  source 1..80: mol_type = other DNA
aggaaatttgaacttttcacttaccttaggtttgattcagaggtgacgttggttccttgcatagctgccaaaagtgaaaa

SEQ ID NO: 151146 - DNA, 80 bp, synthetic construct
  source 1..80: mol_type = other DNA
gccacctcagtcacctgagcacacaccccctactcatgcttctatctaagcacagagtagtggtccccagtctcaggacc

SEQ ID NO: 151147 - DNA, 80 bp, synthetic construct
  source 1..80: mol_type = other DNA
gtactatccttgtgtcatttgatgtggcacaatggcaagcacacataccaggaatttgttaaaggtatacgcagtgtatc

SEQ ID NO: 151148 - DNA, 80 bp, synthetic construct
  source 1..80: mol_type = other DNA
ttagtagtcaggatatgccggtcctgacacaccaaataatgtacgtgcccccaggcgggccagtaccaacaagtgtgaaa

SEQ ID NO: 151149 - DNA, 80 bp, synthetic construct
  source 1..80: mol_type = other DNA
gcttgcgcctggcaacttctttgcagggactaccggtgatgaacgtgccgggtagcaatcaattcctcacctcagacgac

SEQ ID NO: 151150 - DNA, 80 bp, synthetic construct
  source 1..80: mol_type = other DNA
ttggtggtgaggcgggcttctaccacattttaaataatccaaaagcatctttgctttctttaacacaatttcctcatttt

SEQ ID NO: 151151 - DNA, 80 bp, synthetic construct
  source 1..80: mol_type = other DNA
agacgcagacgttggaggagggggcgacccagacgcagactgtacagacgttacagacgcaaaaaacgtaggagacgaga

SEQ ID NO: 151152 - DNA, 80 bp, synthetic construct
  source 1..80: mol_type = other DNA
ctgacacgcaaaaagctggaacaacacgcggctaaaaagcagaacatctacgaacggattccataccggccctccagaca

SEQ ID NO: 151153 - DNA, 80 bp, synthetic construct
  source 1..80: mol_type = other DNA
tacaaatacacacacagcctcccttccaagacacagagataacagcacccagcatacacccaggaatgctcatactctct

SEQ ID NO: 151154 - DNA, 80 bp, synthetic construct
  source 1..80: mol_type = other DNA
aagtcggcgctcatgaaactaaactcaatactggcaacaactcgacaataaactacactaacatcaactattataaagat

SEQ ID NO: 151155 - DNA, 80 bp, synthetic construct
  source 1..80: mol_type = other DNA
aaaagtttgagctgttcacctatgtcagatttgatatggaagttacaattgttaccaacaatacagggttgatgcaaatt

SEQ ID NO: 151156 - DNA, 80 bp, synthetic construct
  source 1..80: mol_type = other DNA
agcatagtgtacgtaaacctttctaacttgtgttatacacaaggtggcagatggcgtgccataattctattagtgagata

SEQ ID NO: 151157 - DNA, 80 bp, synthetic construct
  source 1..80: mol_type = other DNA
gtgaaccgtagattgcctcacgctctggtaaccgttcacacacaacagcctgccagcgactattcagccttcgtgagcaa

SEQ ID NO: 151158 - DNA, 80 bp, synthetic construct
  source 1..80: mol_type = other DNA
tacgagtccagtgtcacggaaacagaaacagaagcagaagcccaagaagaaacgcaggagacacacctccagcagcagct

SEQ ID NO: 151159 - DNA, 80 bp, synthetic construct
  source 1..80: mol_type = other DNA
cgctggacgtgcactgtatatccctccttatgaactcctaagacatgagtggtatgaaaaattttagatatagaattaat

SEQ ID NO: 151160 - DNA, 80 bp, synthetic construct
  source 1..80: mol_type = other DNA
tcccttttacccttggatgcctagaccccaatacaaagtaacctttaaacttggctttactgaacaataaacaaggccgt

SEQ ID NO: 151161 - DNA, 80 bp, synthetic construct
  source 1..80: mol_type = other DNA
atctgcgccaccggcatggtgcccgccgttaagaagcccataacccaagagctccactccaagataaagagcctgaggga

SEQ ID NO: 151162 - DNA, 80 bp, synthetic construct
  source 1..80: mol_type = other DNA
ggtaccaatatataatgtacctattctgaaaaagtctagtggagctcaatcagaccttattttaaccatacccttaaaga

SEQ ID NO: 151163 - DNA, 80 bp, synthetic construct
  source 1..80: mol_type = other DNA
cggcggcggtctctgtctctggtgccgcggcgctaaccttcggggctgttgctgctgttgatgatgcgacgccgtctgtc

SEQ ID NO: 151164 - DNA, 80 bp, synthetic construct
  source 1..80: mol_type = other DNA
ttagtcccatgcattgcaggaaagggtgatgatataggacatattgtgatgcaatacatgtatgtaccacctggagcccc

SEQ ID NO: 151165 - DNA, 80 bp, synthetic construct
  source 1..80: mol_type = other DNA
gtagcgactcgcccaccacacccattatcatggtttcacagcataagcggtccacaaagaacttcaacaggtcgttgaat

SEQ ID NO: 151166 - DNA, 80 bp, synthetic construct
  source 1..80: mol_type = other DNA
gcacattgattgtggcaatgataccagagcaccaattggctgcagctgaaaaaggaaatgtgaccgctggctataatctt

SEQ ID NO: 151167 - DNA, 80 bp, synthetic construct
  source 1..80: mol_type = other DNA
gtctaaggctggcatatcagcaaggactgccaattttgaacacaccaggcagcaaccaatttctgacgtcagatgatttc

SEQ ID NO: 151168 - DNA, 80 bp, synthetic construct
  source 1..80: mol_type = other DNA
ccaccaatggattaacctgcgcactaataattgtgccactattgtggtcccatacattaatgctctaccatttgactctg

SEQ ID NO: 151169 - DNA, 80 bp, synthetic construct
  source 1..80: mol_type = other DNA
aacagattctacacattggacagtaaactgtggagtggtgattcaaagggttggtggtggaaactgcctgatgccttaag

SEQ ID NO: 151170 - DNA, 80 bp, synthetic construct
  source 1..80: mol_type = other DNA
ctggtggccctgatgtactttacgcagcagcaggcacgcaacgggagcggcagcggctagataagtctctggcggctaca

SEQ ID NO: 151171 - DNA, 80 bp, synthetic construct
  source 1..80: mol_type = other DNA
agcaacggcgaaaatacgcatcctatctgcacctacgaccctcctaaacctggtagacaaaagacaatgaaaaccactcc

SEQ ID NO: 151172 - DNA, 80 bp, synthetic construct
  source 1..80: mol_type = other DNA
tacgaccagtacaagcgctttatgaacacctggtcgtaccccaacgaccagctagacctggccaggtacaacggctgcaa

SEQ ID NO: 151173 - DNA, 80 bp, synthetic construct
  source 1..80: mol_type = other DNA
cggagacggagactcgcgtgcccgggctgagggacgggtgtggcggcggtgtttgcgggcccagaacggagagcttttgc

SEQ ID NO: 151174 - DNA, 80 bp, synthetic construct
  source 1..80: mol_type = other DNA
ctgagtacgccatgaaagtgacgggggacgcctctctagaagacaacgcccgactgacgctaatatgtccctacactaat

SEQ ID NO: 151175 - DNA, 80 bp, synthetic construct
  source 1..80: mol_type = other DNA
tcagccaaacacactacaggtatgtcatccacgagccatacacggatgcaggctttgtgacatgctggtaccagactagt

SEQ ID NO: 151176 - DNA, 80 bp, synthetic construct
  source 1..80: mol_type = other DNA
cgtggacaatattaaagaccaaatccagactatcaacccaattaacaaaataacaagcaaaataattaagtgggtgataa

SEQ ID NO: 151177 - DNA, 80 bp, synthetic construct
  source 1..80: mol_type = other DNA
aacagtgctgtcctctaacctgcggcaaggccctaattttgcaaaacaaaagaacaaaggccagttattctatcaacact

SEQ ID NO: 151178 - DNA, 80 bp, synthetic construct
  source 1..80: mol_type = other DNA
ccatttgtagatgcaggcaataaagtatcaggcacaacaacaacaacatgggcatcatacataaacacaaccagatttac

SEQ ID NO: 151179 - DNA, 80 bp, synthetic construct
  source 1..80: mol_type = other DNA
agaatgtctttgaaaaaaaactttacccacaatcaaatacaccaacagacacatggcaactaacatacacaccactaatg

SEQ ID NO: 151180 - DNA, 80 bp, synthetic construct
  source 1..80: mol_type = other DNA
gtaggtggccggcgccgagaccgtttctttggtgatgtggcttgagagcagcgacatgatgatctgcataacgttggccg

SEQ ID NO: 151181 - DNA, 80 bp, synthetic construct
  source 1..80: mol_type = other DNA
cccaggaaagaccccgggtggcatcggggggtatagagggggggcatgcgggggtgttgtcgggcccgggcattcttggg

SEQ ID NO: 151182 - DNA, 80 bp, synthetic construct
  source 1..80: mol_type = other DNA
tggctataattggactttccaaccagaagcctactaatgataatgcagccaaactttttgctacatggaagataagttac

SEQ ID NO: 151183 - DNA, 80 bp, synthetic construct
  source 1..80: mol_type = other DNA
ggacgcgtggctctccggcggcgccgggtgtggcggtggaggatgcttcgtcgtgaggctgggcctgcagccgtgccccg

SEQ ID NO: 151184 - DNA, 80 bp, synthetic construct
  source 1..80: mol_type = other DNA
ccaaacaaggctgggttaccgaactgccatcatccacacttgtggtggaaagacaccttaaccgagccatgacaattgtg

SEQ ID NO: 151185 - DNA, 80 bp, synthetic construct
  source 1..80: mol_type = other DNA
ttacagtaaacgcagcggcatccaaccaggttcctatcacagttactgtagccccaatgtgtgctgagtacaacgggctt

SEQ ID NO: 151186 - DNA, 80 bp, synthetic construct
  source 1..80: mol_type = other DNA
tcacctgaccaacccgaatgagcacaccatccttttagccttgacagcagacttgcaggtggatgctaccacagagccag

SEQ ID NO: 151187 - DNA, 80 bp, synthetic construct
  source 1..80: mol_type = other DNA
tcaggactagtgttccattctcaagctatcaataacaatccaaaacaagcttggtgttggtttggtggaaattggaaagg

SEQ ID NO: 151188 - DNA, 80 bp, synthetic construct
  source 1..80: mol_type = other DNA
ctacagctccagctcaagcagcagatcagggagcagcgacaactcagatgtggaatccaacacctcttccagcaactagt

SEQ ID NO: 151189 - DNA, 80 bp, synthetic construct
  source 1..80: mol_type = other DNA
tagtttactgcagttagatttccagaacccaagaacttatgatacagatgtagacatctacgacaataatccagacacaa

SEQ ID NO: 151190 - DNA, 80 bp, synthetic construct
  source 1..80: mol_type = other DNA
cctctcccctggcctctccttcccgcctcccacccgagccccctcagcttgcctccccaccgggtccatcaggccggccg

SEQ ID NO: 151191 - DNA, 80 bp, synthetic construct
  source 1..80: mol_type = other DNA
agtggtacgagtcctgctttcgctctcacgcttctttttgtggctgtggtgattttattcggcatctttgtgatctggcg

SEQ ID NO: 151192 - DNA, 80 bp, synthetic construct
  source 1..80: mol_type = other DNA
tctagatcagggctggtgggagttatggaagtggacgatacaggtacagccggcaaaggcttctcgaactgggatattga

SEQ ID NO: 151193 - DNA, 80 bp, synthetic construct
  source 1..80: mol_type = other DNA
atcaattactacaaagactcagcaagttctggtttgagtcgtcaagatttttctcaggacccatctaaatttacccaacc

SEQ ID NO: 151194 - DNA, 80 bp, synthetic construct
  source 1..80: mol_type = other DNA
taacactattaaatacaacccactaacagacaaaggagagggaaatagaatctggtgcgacccttgcactaaagaatcat

SEQ ID NO: 151195 - DNA, 80 bp, synthetic construct
  source 1..80: mol_type = other DNA
atagctcctatgtgcacagaattctcaggtattagatctaaaactattgttccaaatgcaactccacaagggttacccac

SEQ ID NO: 151196 - DNA, 80 bp, synthetic construct
  source 1..80: mol_type = other DNA
ccaagacaaaattgcaccccagtgtattctatgaaatctttccaggatcaaaagaaccagctgtgttggatgaccatgac

SEQ ID NO: 151197 - DNA, 80 bp, synthetic construct
  source 1..80: mol_type = other DNA
ctcaggtgaaccaaagcccaaaacaaaggtaccagaaaggagggtcgtagctcaagggccagaggaggaatttggaaggt

SEQ ID NO: 151198 - DNA, 80 bp, synthetic construct
  source 1..80: mol_type = other DNA
acttgcagagtatggaagcatatcacatagaagtgaacacaggaaatcaccagggtgataaaatatttgctttccaaata

SEQ ID NO: 151199 - DNA, 80 bp, synthetic construct
  source 1..80: mol_type = other DNA
agaagaacaggaaacattcagattaggttgccctggtactcctatctttatgctgtctcaggagcactggatgggcttgg

SEQ ID NO: 151200 - DNA, 80 bp, synthetic construct
  source 1..80: mol_type = other DNA
gtacccagttttaagaccagacctggtggaaaacccactgtaaaatttaggataaaacctccaacaacactaatagacaa

SEQ ID NO: 151201 - DNA, 80 bp, synthetic construct
  source 1..80: mol_type = other DNA
cgcgatctgaatccaccgtagaaaacttcatggggcgtgccgcctgcgtgttcatggaccagtacaaactaaatggagag

SEQ ID NO: 151202 - DNA, 80 bp, synthetic construct
  source 1..80: mol_type = other DNA
agcacccctcagccagagaaattcgggggaggcatgagcacagtgacttttagcctgtatgtactgtatgaccagtttac

SEQ ID NO: 151203 - DNA, 80 bp, synthetic construct
  source 1..80: mol_type = other DNA
ttacaaccccggtcaataggaggtggtgaaccacaccacttaagaccaagcacttctgtttccccggctcaagaggaata

SEQ ID NO: 151204 - DNA, 80 bp, synthetic construct
  source 1..80: mol_type = other DNA
agtgcctacgcaaagcctagtaacactttgaattgtttatggttggtcgctcagctattccccctagtagacctggcaga

SEQ ID NO: 151205 - DNA, 80 bp, synthetic construct
  source 1..80: mol_type = other DNA
agtcctaagtccgtactctggtcagcgcggactacttgacacagccaaggcactacaaccttgcacaaaatgtgataaac

SEQ ID NO: 151206 - DNA, 80 bp, synthetic construct
  source 1..80: mol_type = other DNA
tagcctgcatgcttcttttttttgttcgacgagccctcaataaaaaatatcgtccactacgagatgatattagtgaatct

SEQ ID NO: 151207 - DNA, 80 bp, synthetic construct
  source 1..80: mol_type = other DNA
agataggtgatagctgctcctatggaaatattttacttagtggcaatcaaacagctagaatgatcaaatataattaccca

SEQ ID NO: 151208 - DNA, 80 bp, synthetic construct
  source 1..80: mol_type = other DNA
gcgtcggcttccagcttgtctgacttggcgggcgaggccgtgggagaattggtgggctcgctcgtcgcgtacgtcatcct

SEQ ID NO: 151209 - DNA, 80 bp, synthetic construct
  source 1..80: mol_type = other DNA
atacactccacctggagtaaataaaccaactagcaggagggaagccatgctgggtacccatattgtatgggatgttggtc

SEQ ID NO: 151210 - DNA, 80 bp, synthetic construct
  source 1..80: mol_type = other DNA
accaaatcgccgaaaagagatggcattgcacgagcatgcagttctccgacctctgcgtttctatttatatacttagtctc

SEQ ID NO: 151211 - DNA, 80 bp, synthetic construct
  source 1..80: mol_type = other DNA
tagtgatttggacccgaaatctgacactttagagctctggaggactttaaaactctaaaaatcaaaactttagaggcgaa

SEQ ID NO: 151212 - DNA, 80 bp, synthetic construct
  source 1..80: mol_type = other DNA
gctatgtttctcggtaggccgtaccgccagaaaagggcactgtcactgcttggcctgcgaactccaaagaaaaaaccacc

SEQ ID NO: 151213 - DNA, 80 bp, synthetic construct
  source 1..80: mol_type = other DNA
aaaccaacagcaccatctagcggcagaaactacccagtgcagcaggtggccggcaattacgtccacttgccgctaagccc

SEQ ID NO: 151214 - DNA, 80 bp, synthetic construct
  source 1..80: mol_type = other DNA
caagtctgatagccaacatagattggactgatacaaatcgaactaatatcaccatgagtgcagaggtggcagaactgtat

SEQ ID NO: 151215 - DNA, 80 bp, synthetic construct
  source 1..80: mol_type = other DNA
actgcctcgaactggcttttcagattgtccacggtccagggcacaaactcctccatctttggagttctgcccgcggtctg

SEQ ID NO: 151216 - DNA, 80 bp, synthetic construct
  source 1..80: mol_type = other DNA
gatgactacgaccggctgtacttcctgacgctgggctacctggcctccccggtggccccaagctgagccagttcctcgca

SEQ ID NO: 151217 - DNA, 80 bp, synthetic construct
  source 1..80: mol_type = other DNA
tgctcaggatctccatggaggttccttaaagaaaagttctgtaaatggacacaattgaattacattcataaagagtctga

SEQ ID NO: 151218 - DNA, 80 bp, synthetic construct
  source 1..80: mol_type = other DNA
tgaaactggctctaaatatggcttgaccataacacctgctgataaaagtactgaattcaaacaaattacctgggatactg

SEQ ID NO: 151219 - DNA, 80 bp, synthetic construct
  source 1..80: mol_type = other DNA
aaacttaccttacaattctaagaaagtactatttcttttgggaaacagtacaaagcagcagccaccaaacatacaatgct

SEQ ID NO: 151220 - DNA, 80 bp, synthetic construct
  source 1..80: mol_type = other DNA
gatggatatgacaaccaggatattcatttaattgatgatttgggtcagactaggaaagagaaagatattgaaatgttgtg

SEQ ID NO: 151221 - DNA, 80 bp, synthetic construct
  source 1..80: mol_type = other DNA
aggcacaagtgggtagaataccaagctttaacccagacggtacaaaaaatactcaagaagctcaatggcaaaattactgg

SEQ ID NO: 151222 - DNA, 80 bp, synthetic construct
  source 1..80: mol_type = other DNA
ggatttaaataacagggccccgtagacagtcttttgtgagtaaatagagatgatgacatggatgtagagactgaggacca

SEQ ID NO: 151223 - DNA, 80 bp, synthetic construct
  source 1..80: mol_type = other DNA
tagtcccctaaagtcagatcctagtgccagtgccttagttcccataaccatttctatcagtccaatgtttgctgaatttt

SEQ ID NO: 151224 - DNA, 80 bp, synthetic construct
  source 1..80: mol_type = other DNA
aaatggattattcgcataattagtgcattgacaattgtaatcagaaataattcagacacaccaactattatggccactat

SEQ ID NO: 151225 - DNA, 80 bp, synthetic construct
  source 1..80: mol_type = other DNA
tcgggaatgcccgatgttgcccattcgtgtgtggaaaggctgtttctttcaaagaccgcaattcttgcagtaaatacacc

SEQ ID NO: 151226 - DNA, 80 bp, synthetic construct
  source 1..80: mol_type = other DNA
gaattgactgtcccctattcattttctacttggatgcgtaggacacatggtaaacctctaggtttgttacaggttgaggt

SEQ ID NO: 151227 - DNA, 80 bp, synthetic construct
  source 1..80: mol_type = other DNA
gtgctatgcaacatcaaacccagggattacccacacgtatacctagtggggggcaacagtttatgaccacagaggatgag

SEQ ID NO: 151228 - DNA, 80 bp, synthetic construct
  source 1..80: mol_type = other DNA
cgacgcaaacgcagacgcagacgcagacataagcccaccttagtactcagacagtggcagccggacgttatcagacactg

SEQ ID NO: 151229 - DNA, 80 bp, synthetic construct
  source 1..80: mol_type = other DNA
cgtgtctatctgtgccctgggtcgtcggcgcggcaccacggcagtctacggtacagaccttgcgtgggtcctgaagcact

SEQ ID NO: 151230 - DNA, 80 bp, synthetic construct
  source 1..80: mol_type = other DNA
gtgtacttagaagaagatggttagacatgttttaaataatgatatagaaacttaatttgtgtgcagaatttagaatctat

SEQ ID NO: 151231 - DNA, 80 bp, synthetic construct
  source 1..80: mol_type = other DNA
aaagggggaccaacaaaaggaaagttaggaaaatcttaaccatgtcaacaaaatataaatggacaagatcaaaaatagat

SEQ ID NO: 151232 - DNA, 80 bp, synthetic construct
  source 1..80: mol_type = other DNA
gtgatggtctcttcctctctggtcctgatcgtcttttttctaggcgcttccgaggaggcgaagccggcgacgacgacgac

SEQ ID NO: 151233 - DNA, 80 bp, synthetic construct
  source 1..80: mol_type = other DNA
aagtgttgaaagacttttactacacacaaatgtcagttacaccgcaaggtactacacaaccaccaactgaagatgtagaa

SEQ ID NO: 151234 - DNA, 80 bp, synthetic construct
  source 1..80: mol_type = other DNA
accttcaaacttggctggaaataaaattacaaggccgtacactgttcacctgtcggtgtctacctctataagtcactaag

SEQ ID NO: 151235 - DNA, 80 bp, synthetic construct
  source 1..80: mol_type = other DNA
ggagtcgctcaccccagtagactgcgccgcgacttacaaatcgttagcccgctcacaatgggaccggaatacatattcca

SEQ ID NO: 151236 - DNA, 80 bp, synthetic construct
  source 1..80: mol_type = other DNA
ttcatggcttaaaaaattcactgagatgtgtaacgcagctcgtggtttggaatggattggtaataaaatatcaaaattca

SEQ ID NO: 151237 - DNA, 80 bp, synthetic construct
  source 1..80: mol_type = other DNA
ttatgaccatcaaccccagaaacagataatgaaattggcctacaaagacagggggttctataaacattatggcattgttg

SEQ ID NO: 151238 - DNA, 80 bp, synthetic construct
  source 1..80: mol_type = other DNA
agtggaatatcaactttcaggagcaggcacacattagaaagaaatttgaattattcacttatctcaggtttgacatggaa

SEQ ID NO: 151239 - DNA, 80 bp, synthetic construct
  source 1..80: mol_type = other DNA
cagcaactccactagcatccctgctcttaccgcggtcgaaaccgggcacacatcacaggtggaaccgggcgatacaatgc

SEQ ID NO: 151240 - DNA, 80 bp, synthetic construct
  source 1..80: mol_type = other DNA
aactcagaaatgcatgattcagtgctagtgtcttactcatcagatttagtcatttaccgcacaaatactacaggcaatga

SEQ ID NO: 151241 - DNA, 80 bp, synthetic construct
  source 1..80: mol_type = other DNA
tggcctcctgtgtggccgccggccaggctgtcaccgctttcttgggtgagcgagtcaccctgacctcctactggaggagg

SEQ ID NO: 151242 - DNA, 80 bp, synthetic construct
  source 1..80: mol_type = other DNA
ggcgctaatcaaggcccgaaaaaaggtctcgggtcttacagacctctcggcctgggtctcggcagtgggctccccgaccg

SEQ ID NO: 151243 - DNA, 80 bp, synthetic construct
  source 1..80: mol_type = other DNA
atggaatacagaaacagtagtaaaaacagtaaaacacattgcaaagttaaatatggataaacaaagtgagtattatacaa

SEQ ID NO: 151244 - DNA, 80 bp, synthetic construct
  source 1..80: mol_type = other DNA
tatggtcaaagttcaatttaaacaataaatttggcaaatggaacatcaacttccaagaacaagctaatatcaggaagaag

SEQ ID NO: 151245 - DNA, 80 bp, synthetic construct
  source 1..80: mol_type = other DNA
atccacgagcgtggctcaagatgcaccggttttaacacatcagataatgtacataccacctgggggaccggtgcctaagt

SEQ ID NO: 151246 - DNA, 80 bp, synthetic construct
  source 1..80: mol_type = other DNA
caaagaaaacagaagccgtgggaagacagcgagacccagacagagagcgaagtcccatcagaagaagagacgcagaacct

SEQ ID NO: 151247 - DNA, 80 bp, synthetic construct
  source 1..80: mol_type = other DNA
gtactaatgactaagaaaagaaagcgcatactacccagctttaaaaccagaccaaaaggacacactacaaccagggttaa

SEQ ID NO: 151248 - DNA, 80 bp, synthetic construct
  source 1..80: mol_type = other DNA
gaggggacctgatacctcaccgccgtttgcctaggctataggctatttgtccctttccctctcccctgttttgtgtaaat

SEQ ID NO: 151249 - DNA, 80 bp, synthetic construct
  source 1..80: mol_type = other DNA
aaccccattaacaaagttactagtaaaatagtcaaatggattattagaatcatatcagccattacaatcatagttagaaa

SEQ ID NO: 151250 - DNA, 80 bp, synthetic construct
  source 1..80: mol_type = other DNA
acaaatgatatgggatctttatgttcccgtgtagttactgaagagcatggaccccgtgtcaaaatttcaaccagaatata

SEQ ID NO: 151251 - DNA, 80 bp, synthetic construct
  source 1..80: mol_type = other DNA
caaaaactgtagccagaaaaggcttgttatcctacttttagacaggtagaagattgtgggagatgggcgcgagaaactcc

SEQ ID NO: 151252 - DNA, 80 bp, synthetic construct
  source 1..80: mol_type = other DNA
tcatataactttggagagggaaaaatgccaaacggggccacatacataccctttaagtttagaaacaagtggtatccaac

SEQ ID NO: 151253 - DNA, 80 bp, synthetic construct
  source 1..80: mol_type = other DNA
tggatggattaaaaaatttacagagatgtgtaatgctgctagaggattggagtggttaggcaataaaatctcaaaattca

SEQ ID NO: 151254 - DNA, 80 bp, synthetic construct
  source 1..80: mol_type = other DNA
acttcacccaattgggaaatgcctttggtgagggtttcaccaccaatattcaagaccatttcagtaaactaggacaatct

SEQ ID NO: 151255 - DNA, 80 bp, synthetic construct
  source 1..80: mol_type = other DNA
taaaattactgtgttatctctactttccatttaactggttaatcaggaacgatacgagaataaaacaacaacatcacgat

SEQ ID NO: 151256 - DNA, 80 bp, synthetic construct
  source 1..80: mol_type = other DNA
tcaatgagtgcaccacctcctccagccattgctgatcttttgcaatcggttcggacaccagaggttattaagtattgtga

SEQ ID NO: 151257 - DNA, 80 bp, synthetic construct
  source 1..80: mol_type = other DNA
ggcagctgaaagcgctagaaaagcatacacattagctgccaaaaacataattacaccttggatttttcataacttaaacg

SEQ ID NO: 151258 - DNA, 80 bp, synthetic construct
  source 1..80: mol_type = other DNA
cacaccctggggaatcaggacgaacacttaatgatagagagaataataactcacaacaacctactgatgaaagttggctg

SEQ ID NO: 151259 - DNA, 80 bp, synthetic construct
  source 1..80: mol_type = other DNA
ttaaacagatacgcatggcatcgcgggggctagacctctggctggatgagcacgtgtggaagaggaaacaggagattggt

SEQ ID NO: 151260 - DNA, 80 bp, synthetic construct
  source 1..80: mol_type = other DNA
ggccctgatggagatggagaaggtggccacggcgctcaagatggacgagaccggtgcctgggcgcaagagatctcggccg

SEQ ID NO: 151261 - DNA, 80 bp, synthetic construct
  source 1..80: mol_type = other DNA
tagatagcacatcaaatttgagcagccctatattctgcctatcactctcccccgcaagtgatcagagactgcaatacaca

SEQ ID NO: 151262 - DNA, 80 bp, synthetic construct
  source 1..80: mol_type = other DNA
aaataacaggcttagatctgagtgcactgtagaagcctttttcggaaggtctgcatgtgttgccattcttggtgtagcaa

SEQ ID NO: 151263 - DNA, 80 bp, synthetic construct
  source 1..80: mol_type = other DNA
acttactacaagggaagagaagaaagagtatatttaatagacatactagagacaccagtgaaatgacaaagatgttagag

SEQ ID NO: 151264 - DNA, 80 bp, synthetic construct
  source 1..80: mol_type = other DNA
tcctatcgaatcgatgcagggaaccattatcagaggaagcgaagaatgtagcctctgtgcatctgaaaaatctccttatt

SEQ ID NO: 151265 - DNA, 80 bp, synthetic construct
  source 1..80: mol_type = other DNA
gcaggcccgggcccaggccttgtagggcagacggttaggctgacaaggggacaagtgtggcaggtgtgcgtgaatgggca

SEQ ID NO: 151266 - DNA, 80 bp, synthetic construct
  source 1..80: mol_type = other DNA
agcctgtaggtgaggaccgagtccgacaggaggtctcccaaacccccatctctcgctagagccgagaccaggccgagtcc

SEQ ID NO: 151267 - DNA, 80 bp, synthetic construct
  source 1..80: mol_type = other DNA
gctatgcagaagcaacaagggttacccacacgcatgcccagcggtgcacagcaattcatgaccacagaggacgaacagtc

SEQ ID NO: 151268 - DNA, 80 bp, synthetic construct
  source 1..80: mol_type = other DNA
tcagcagccgccgcgccgacatcgtcatcgagcggccgcggccgcagacgacgacggacagatagatcacgtacaagacg

SEQ ID NO: 151269 - DNA, 80 bp, synthetic construct
  source 1..80: mol_type = other DNA
cagctccgatccacatacctggtgaagtgcacaacatgatggaattggcagagattgatagtgttataccaatgaatgcc

SEQ ID NO: 151270 - DNA, 80 bp, synthetic construct
  source 1..80: mol_type = other DNA
tcatgtctgtggagaatttcaatgagacaacgtcaaccgcaggtaagtccctactcttcgcaacgtggaacatcacatac

SEQ ID NO: 151271 - DNA, 80 bp, synthetic construct
  source 1..80: mol_type = other DNA
acacagaaaatgcagttggcatgcagcgtctcaaagttgatatatcagtactaacagacgttgatcaattgttattcaac

SEQ ID NO: 151272 - DNA, 80 bp, synthetic construct
  source 1..80: mol_type = other DNA
ttcatcaaacaaattcttacctctgtatgcatcagaaaataaaagaatcaaagagctccttaaaagaagtgacatgatat

SEQ ID NO: 151273 - DNA, 80 bp, synthetic construct
  source 1..80: mol_type = other DNA
ataacaacacagtgtggtacacaaaagaccaaagagccataactaacatacacagtgcatatggagtaccagacaaccac

SEQ ID NO: 151274 - DNA, 80 bp, synthetic construct
  source 1..80: mol_type = other DNA
tgatgtaatccctaattgtaattgcactgactgtacatattactgttaccataaggatagatactttccaatcaaagtca

SEQ ID NO: 151275 - DNA, 80 bp, synthetic construct
  source 1..80: mol_type = other DNA
aggtatgtggagaccccccgttcacaatgtacagggacaagccaggaactggtacgaatcgtgcttcaggagccatgctg

SEQ ID NO: 151276 - DNA, 80 bp, synthetic construct
  source 1..80: mol_type = other DNA
taaatctcagcctctgtcgcttagtgctctttgttgacgacgtgggcctatattcgacggcgttgtttttcctctttctg

SEQ ID NO: 151277 - DNA, 80 bp, synthetic construct
  source 1..80: mol_type = other DNA
tcaacttctgagtatttattctcaggctcaaaaaggcccaaaatcgatctcccaaaatacgagccaccagaagaaagctc

SEQ ID NO: 151278 - DNA, 80 bp, synthetic construct
  source 1..80: mol_type = other DNA
gggacggtgtttcggcgcgctgccggtgcgttccacggtccttgcctgtgtcgtttccggccgcgccccgacacacccaa

SEQ ID NO: 151279 - DNA, 80 bp, synthetic construct
  source 1..80: mol_type = other DNA
ctgcgttgacagcagctgagacaggtcacacctcacaagtggaaccaagcgacaccatacaaacaaggcatgttgtgaac

SEQ ID NO: 151280 - DNA, 80 bp, synthetic construct
  source 1..80: mol_type = other DNA
atatgttacacaaattagacagtggtactggactcaactaacatcctggacacaaacagtaccccacataaacagcacct

SEQ ID NO: 151281 - DNA, 80 bp, synthetic construct
  source 1..80: mol_type = other DNA
tgtaaacaacaagacccatctagtagtgcaaacaataattacctaaaagtcaatagtctctggggagaccacgtatatga

SEQ ID NO: 151282 - DNA, 80 bp, synthetic construct
  source 1..80: mol_type = other DNA
gccagctttcaagaatcccagtacttaaactttaaaacaggctactacagcagtatatttctaactaatggcagattaag

SEQ ID NO: 151283 - DNA, 80 bp, synthetic construct
  source 1..80: mol_type = other DNA
caccccccactctctttacacacaagtggtactttcaaaaggacatttgcgacattacactgtttaacctcaatgccgtt

SEQ ID NO: 151284 - DNA, 80 bp, synthetic construct
  source 1..80: mol_type = other DNA
ggaacccccactttatgacaaagacaatacagacatgggcttcctaccttatgactacaattttggcaacggaaaaatgc

SEQ ID NO: 151285 - DNA, 80 bp, synthetic construct
  source 1..80: mol_type = other DNA
cagaccgaggagaaccttttagatttcgtgcgtttcatgggtgtcatgtccagctgcaatagttcatctgtgaattactg

SEQ ID NO: 151286 - DNA, 80 bp, synthetic construct
  source 1..80: mol_type = other DNA
actattgtgatccgcaatagctctgatgtacctacggttctagctacaatggccctactggggtgctcaggttctccatg

SEQ ID NO: 151287 - DNA, 80 bp, synthetic construct
  source 1..80: mol_type = other DNA
ttgctcctatgtacacagaatttacgggtattaggtcaaaagctgtagtgccacaggggttacctactttaactactcct

SEQ ID NO: 151288 - DNA, 80 bp, synthetic construct
  source 1..80: mol_type = other DNA
ctccgatgctgttttcgcacgcaccttattggcagccttatttcacctcaatatgttctttattctcaaagattacataa

SEQ ID NO: 151289 - DNA, 80 bp, synthetic construct
  source 1..80: mol_type = other DNA
ttccccggacgtgtgaataggctccaccaggggctgaagctgtagcgttcgttacccgcactgctactacgcaagggtta

SEQ ID NO: 151290 - DNA, 80 bp, synthetic construct
  source 1..80: mol_type = other DNA
gtagcagttcatgtggccagtggctttgtagaagcagaagtaatcccacaagaaacaggaaggcaaacagcattattcct

SEQ ID NO: 151291 - DNA, 80 bp, synthetic construct
  source 1..80: mol_type = other DNA
gtgtgccgaaagacagaaagggagccatgttgggcacgcacgtgatttgggatgttgggttacaatctagctgtgtgttg

SEQ ID NO: 151292 - DNA, 80 bp, synthetic construct
  source 1..80: mol_type = other DNA
tgacctttgcccccgtgcctccaacgccgataagtgctgcttccactttgtgttacaggtgggccaaacctccagaatat

SEQ ID NO: 151293 - DNA, 80 bp, synthetic construct
  source 1..80: mol_type = other DNA
gcaaacatctaatggaggtttgtgcgcagcctttagaacagaccctgggttggatggtccttggcaagccactatgctgg

SEQ ID NO: 151294 - DNA, 80 bp, synthetic construct
  source 1..80: mol_type = other DNA
cgcccaagcctttaaccgttacccgccaatcaactacgtaatggctagtatcatcatgtttgtaatctggcgttcgatca

SEQ ID NO: 151295 - DNA, 80 bp, synthetic construct
  source 1..80: mol_type = other DNA
ggaaagtggactgacggacgcggacacatagagacttactggcagtgcagatggaggccagaaatgctctttcaggagca

SEQ ID NO: 151296 - DNA, 80 bp, synthetic construct
  source 1..80: mol_type = other DNA
accaacaaccctgtgcttggcgctcaggcgcaagtgtgtataacttgtcctccagatcgcagcaatcgcgcccctatctt

SEQ ID NO: 151297 - DNA, 80 bp, synthetic construct
  source 1..80: mol_type = other DNA
aatgtacattacaacttttgcacctataaaccaaatgccacaaacttaacatatttaagagaatactactttagctggga

SEQ ID NO: 151298 - DNA, 80 bp, synthetic construct
  source 1..80: mol_type = other DNA
gtgggacagctggcactacccttaaactattgcttgcttacactcctcctggtattgctaaaccgcagaagagaaaagat

SEQ ID NO: 151299 - DNA, 80 bp, synthetic construct
  source 1..80: mol_type = other DNA
ttgaaaacagaagaatttgttgtgaagtcctgtctcttatcgttaatgacaagaaggattcaggcgctccacacacttta

SEQ ID NO: 151300 - DNA, 80 bp, synthetic construct
  source 1..80: mol_type = other DNA
gacataatatacaatccactagtagacaaaggcataggcaacggagtatggatagactacctcagtaaaaatgacacaaa

SEQ ID NO: 151301 - DNA, 80 bp, synthetic construct
  source 1..80: mol_type = other DNA
atgacgcaggtgagcaacgaggtgatgcccagcgagacggtcttgacgcagcccagcgtctcgaggcggcggtgcagcag

SEQ ID NO: 151302 - DNA, 80 bp, synthetic construct
  source 1..80: mol_type = other DNA
gtagtggattggttttcaggtaaaattaagtcaatgttaagctttgttgagagaaataaagcatggttaaccgtggtttc

SEQ ID NO: 151303 - DNA, 80 bp, synthetic construct
  source 1..80: mol_type = other DNA
taagatagggaagtttattgactggttaaaagaaaagttactccccactgttcagaggaagaaagagactctagagcagt

SEQ ID NO: 151304 - DNA, 80 bp, synthetic construct
  source 1..80: mol_type = other DNA
gacagcctctattcagggagatagggtggcagacgtgatcgagagctctataggaaatagtgtgagtagggcacttaccc

SEQ ID NO: 151305 - DNA, 80 bp, synthetic construct
  source 1..80: mol_type = other DNA
ggagccgcctacgggggcaacctcacacacataacatggtgcttagaagctatataccaagaattcctcatgcacagaaa

SEQ ID NO: 151306 - DNA, 80 bp, synthetic construct
  source 1..80: mol_type = other DNA
taatgcagacccccatacaatcatagctacattggctctgctagggtgttcaggatctccttggaggtttatgaaagaaa

SEQ ID NO: 151307 - DNA, 80 bp, synthetic construct
  source 1..80: mol_type = other DNA
ccaatgtttacagaattcaatgggctaagaaacatcacggtgccagctactcagggactaccgacgatgctcgtaccggg

SEQ ID NO: 151308 - DNA, 80 bp, synthetic construct
  source 1..80: mol_type = other DNA
tggattcactccaatcacatcatttactccacatctaatcaatcttgtgttgatactcagaaggtgttatcaaaatgggt

SEQ ID NO: 151309 - DNA, 80 bp, synthetic construct
  source 1..80: mol_type = other DNA
aatctggagccgtgtatgtgggtaattacaggattgtaaacagacacctggcaacaagctacgactggcaaaattgtgtg

SEQ ID NO: 151310 - DNA, 80 bp, synthetic construct
  source 1..80: mol_type = other DNA
aaaactatgccactcactcagacgacctggtggtcaagggaccttatgggggaggcatgaccaccacaaaattcactctc

SEQ ID NO: 151311 - DNA, 80 bp, synthetic construct
  source 1..80: mol_type = other DNA
tacatactaccaaagctttctcacacagcaatttataggaaaaattgtaaagctaccagacggtacacttgtctccaacc

SEQ ID NO: 151312 - DNA, 80 bp, synthetic construct
  source 1..80: mol_type = other DNA
aaggagctgctgggagtgcattggttgtgtacatgcctaaaccagttattgacaatgaaacaaaaatggagttcggagct

SEQ ID NO: 151313 - DNA, 80 bp, synthetic construct
  source 1..80: mol_type = other DNA
ggtgcacaagtttcgagtcagaaggtgggtgcgcatgagaacaccaatgtggctacaggcggttcaacggtcaactacac

SEQ ID NO: 151314 - DNA, 80 bp, synthetic construct
  source 1..80: mol_type = other DNA
agctttttagggacacgccctggtcggactggtacctgtttgaccccaaggacgccggggacctggagaggctctacggg

SEQ ID NO: 151315 - DNA, 80 bp, synthetic construct
  source 1..80: mol_type = other DNA
ggaccaaccaagggaacgggcagaccaaccagaacaatgggcagagaagcagtaaggctaaagcaaaacagcagaagaag

SEQ ID NO: 151316 - DNA, 80 bp, synthetic construct
  source 1..80: mol_type = other DNA
tttaactagagagaccagcctggcacaagaaatatttgctattaaagttgatattgcttcagatcctcttgcaactaccc

SEQ ID NO: 151317 - DNA, 80 bp, synthetic construct
  source 1..80: mol_type = other DNA
actgagttgactttactatggctagaccagaatgaaaagtttagggacatccgcagattcattcccgagcatcagcagga

SEQ ID NO: 151318 - DNA, 80 bp, synthetic construct
  source 1..80: mol_type = other DNA
tggcattgttgacatgaaaactgcgatccttggtacttcgcatgtcaactcaatggaccttagtacctctgctgggtact

SEQ ID NO: 151319 - DNA, 80 bp, synthetic construct
  source 1..80: mol_type = other DNA
aattagtccaatgttttctgaattctcaggacctagaaataaggtcgtcttcactgaaggtttgccagtaatgcttacac

SEQ ID NO: 151320 - DNA, 80 bp, synthetic construct
  source 1..80: mol_type = other DNA
ccgcagtcaaggggcaattcgggcacaggactggccgggctatgggcaaggctcttaaaaaatttccccgtactgttctc

SEQ ID NO: 151321 - DNA, 80 bp, synthetic construct
  source 1..80: mol_type = other DNA
gtccctcactaaccacgtgactctcctcaaccaatcagagtctatgtcgtacacttcctgggcatggtctacatcctaat

SEQ ID NO: 151322 - DNA, 80 bp, synthetic construct
  source 1..80: mol_type = other DNA
tgataacaaaaggatagtggttatacctttggatatgagtaacactctcttttcttcaacacttctgggagaagttttaa

SEQ ID NO: 151323 - DNA, 80 bp, synthetic construct
  source 1..80: mol_type = other DNA
gtttctcagctatgttacttaaaagatatttcaaccaacaacaaggccagataatcttgaagaaaccagttaaggaagtt

SEQ ID NO: 151324 - DNA, 80 bp, synthetic construct
  source 1..80: mol_type = other DNA
tgcagaaatagccagcatggttaccagctcagtcaccgaaagactactgaaaacactagtcaagataatttccaccttgg

SEQ ID NO: 151325 - DNA, 80 bp, synthetic construct
  source 1..80: mol_type = other DNA
acgcggcggcggcttccctgactgaagcccaggaccagttctactcctacacatgtaatgcggacacattctcgccttct

SEQ ID NO: 151326 - DNA, 80 bp, synthetic construct
  source 1..80: mol_type = other DNA
ctggctgaggcctaaagtagccttcctgcaatatgggtgcgagtggatccaagaagcgttccaggccgctgcaagggctg

SEQ ID NO: 151327 - DNA, 80 bp, synthetic construct
  source 1..80: mol_type = other DNA
ttggtcttaatgaccaacgaggtgatagacaaccagatgaggatcccttttttaactgcaatggtacactcttgggaaat

SEQ ID NO: 151328 - DNA, 80 bp, synthetic construct
  source 1..80: mol_type = other DNA
actatacgcactggaagcaaaaagaattagatcacttaaaaataagataaccaattttatacagtttcggtctaaacaca

SEQ ID NO: 151329 - DNA, 80 bp, synthetic construct
  source 1..80: mol_type = other DNA
tttccacggccaccgcgtggttgcccagcttgatgacggcggctgagatcggcacccggggctgatcctcgacccctgcg

SEQ ID NO: 151330 - DNA, 80 bp, synthetic construct
  source 1..80: mol_type = other DNA
gtatactcatataactttggagacggcaaaatgccaaacgggtccacctacataccatttcagtttagaaacaagtggta

SEQ ID NO: 151331 - DNA, 80 bp, synthetic construct
  source 1..80: mol_type = other DNA
tttaaggttgaacacagcaaaatgggcgcacaggtttcaacacaaaaagtgggcgcccacgagacaagactcagcactgg

SEQ ID NO: 151332 - DNA, 80 bp, synthetic construct
  source 1..80: mol_type = other DNA
taatgcttgggtagaaagcagctttaaaacaggcaagttagtcaagtacaactataatcagtatgctcctgacatagaca

SEQ ID NO: 151333 - DNA, 80 bp, synthetic construct
  source 1..80: mol_type = other DNA
caaaacatatccagtataatattttgataggggaaggtccagcattacctggtgactgtggcggtaagctgctttgtaag

SEQ ID NO: 151334 - DNA, 80 bp, synthetic construct
  source 1..80: mol_type = other DNA
cgtcactaaccacgtgactcccgcaggccaaccatatgctacgtgattcacttcctgggctgtacctatgtactcatata

SEQ ID NO: 151335 - DNA, 80 bp, synthetic construct
  source 1..80: mol_type = other DNA
ccttgtgaaccaggtgattgtggaggcaagcttttgtgtaagcatggtgttattgggatagtgacagctgggggtgaagg

SEQ ID NO: 151336 - DNA, 80 bp, synthetic construct
  source 1..80: mol_type = other DNA
tgcaaccactaccaacaaagaacttgaccacttatggttttggccatcaaaacaaagcagtgtatgtagcgggctacaag

SEQ ID NO: 151337 - DNA, 80 bp, synthetic construct
  source 1..80: mol_type = other DNA
ggttcatcatgccgtttgtgatggcttccatgtcggcagaatgcttaatgaattacaacagtactgcgatgagtggcagg

SEQ ID NO: 151338 - DNA, 80 bp, synthetic construct
  source 1..80: mol_type = other DNA
tcagcatctcttttagtttagttgtgaaacttggcattaagcagtccaaccaggccacagctcctaataattgagttatt

SEQ ID NO: 151339 - DNA, 80 bp, synthetic construct
  source 1..80: mol_type = other DNA
tctctacgggtgcttccacggcgcttctgcgcggcgcttcgctctggacgtgggttttcgggcgtgctggccgccggcgg

SEQ ID NO: 151340 - DNA, 80 bp, synthetic construct
  source 1..80: mol_type = other DNA
aactaccaaaaacccactaactcagcagtagactaccatataggaaaatatagccctatatttttaagtccacacagaac

SEQ ID NO: 151341 - DNA, 80 bp, synthetic construct
  source 1..80: mol_type = other DNA
atcgtgcgcgaccacgtcgttatcagcgtgctgtgtcacgccgtctcggccagcagcgtcaagatcgacgtgactatttt

SEQ ID NO: 151342 - DNA, 80 bp, synthetic construct
  source 1..80: mol_type = other DNA
tcttgagtaagacagaccccagacttgaggaaccagttgaatgcttaatcaagaaatcagctgccaaatacagagtcaat

SEQ ID NO: 151343 - DNA, 80 bp, synthetic construct
  source 1..80: mol_type = other DNA
caaatggcaactactggaacagcttccatgtaatggaggtgttctcctccaacctggctggtgttgatggaaaagagggc

SEQ ID NO: 151344 - DNA, 80 bp, synthetic construct
  source 1..80: mol_type = other DNA
gatatattggtaagacactactatcacaatgggtgctcaagtttcatcccaaaaagttggagcccatgagaattcgaata

SEQ ID NO: 151345 - DNA, 80 bp, synthetic construct
  source 1..80: mol_type = other DNA
gcaaaagaatggcgctacgtgccccaccacaaagtgggatgggcatggtggacagcatcaagggtaatcatacccctatt

SEQ ID NO: 151346 - DNA, 80 bp, synthetic construct
  source 1..80: mol_type = other DNA
tatagcaatgagatgtagtaaaactgaaacaaatagatggggattaacaggaacagcagcaacaacaactagcccagcaa

SEQ ID NO: 151347 - DNA, 80 bp, synthetic construct
  source 1..80: mol_type = other DNA
accagaaaaatcagagttctctggtccaatgcaaaatgagaggcaaggaataccaacacgtctcccaagcggttcccaac

SEQ ID NO: 151348 - DNA, 80 bp, synthetic construct
  source 1..80: mol_type = other DNA
ccagtccgctccaaggacggcgcgcacggcggagacggcggatgacggtgatgggtcgacacccctcgccgacgactcac

SEQ ID NO: 151349 - DNA, 80 bp, synthetic construct
  source 1..80: mol_type = other DNA
tttgtcatgcaaatttctgccattgtatgctagtgaagcaaagagaattaaagctttatacaataaatgtaataacataa

SEQ ID NO: 151350 - DNA, 80 bp, synthetic construct
  source 1..80: mol_type = other DNA
catctatgtgaaccagagaacctaaatgattcagtattgatatgctactccagtgatttagtcatataccgaacaaatgc

SEQ ID NO: 151351 - DNA, 80 bp, synthetic construct
  source 1..80: mol_type = other DNA
cgtgttggtaccaaacaggaatagtggtgccccctggcactccaaataagtgtgtagtgctttgttttgcatcagcttgt

SEQ ID NO: 151352 - DNA, 80 bp, synthetic construct
  source 1..80: mol_type = other DNA
agtgcccgccctcactgcagcagaaacaggacacacgtcgcaggtcgtgcccagcgacaccatccagacccggcacgtgg

SEQ ID NO: 151353 - DNA, 80 bp, synthetic construct
  source 1..80: mol_type = other DNA
aaacactaatgcttcgcaaacatacaaccctagtggcacattagaaaatataacatgggggcaatcagactggcaggctt

SEQ ID NO: 151354 - DNA, 80 bp, synthetic construct
  source 1..80: mol_type = other DNA
cagagtacgtaatggcatgcaatacagaaactaaaacatcgtacgtgtcttatgtcaatgccaacccaggagagaaaggt

SEQ ID NO: 151355 - DNA, 80 bp, synthetic construct
  source 1..80: mol_type = other DNA
caccgggtgctaaggcaccaagtagcagaaaagacgccatgcttgggacccacgtcatatgggacattggtttgcagtcc

SEQ ID NO: 151356 - DNA, 80 bp, synthetic construct
  source 1..80: mol_type = other DNA
gctccagcgcctcacagtcagcctcgccaagacccaagcgggtctccatataaacccccttttgttatcttccccgcctc

SEQ ID NO: 151357 - DNA, 80 bp, synthetic construct
  source 1..80: mol_type = other DNA
tccacagtcacttccaccctcccatggggccgcctgcgcacgtctcccggcgcagtcgactccagccgccctctcccgaa

SEQ ID NO: 151358 - DNA, 80 bp, synthetic construct
  source 1..80: mol_type = other DNA
aatcacacaaaactcagcaacggagaagtggccagcgagttcaaacccaacgcaaccaacgatgcaaacggtgtgcaggc

SEQ ID NO: 151359 - DNA, 80 bp, synthetic construct
  source 1..80: mol_type = other DNA
catggggagattggctgcggaggaagacaagtacactagctgggacatatctgttagagacatggcacagattaggcgta

SEQ ID NO: 151360 - DNA, 80 bp, synthetic construct
  source 1..80: mol_type = other DNA
agaggaagttcccagaggacggcacgcaaaacaacggccagagacacacgcagaagctcgcgggcgcaagggaggtggtg

SEQ ID NO: 151361 - DNA, 80 bp, synthetic construct
  source 1..80: mol_type = other DNA
atagtgttgatatcttcatacaaccaagagatagtttaaaaacagctgggccaagtgacatgtatgtccacgttggtaac

SEQ ID NO: 151362 - DNA, 80 bp, synthetic construct
  source 1..80: mol_type = other DNA
ccactggtgtttactattgtgcatccaaaaacaaacactacccagttgtattcgagggccccggcctcgtggaagtccaa

SEQ ID NO: 151363 - DNA, 80 bp, synthetic construct
  source 1..80: mol_type = other DNA
aatatataagctgttcatttcattacagggtccgtatagcggcctaccaacaaagaaaaagactgtaccagaaaaaagaa

SEQ ID NO: 151364 - DNA, 80 bp, synthetic construct
  source 1..80: mol_type = other DNA
gatggtaccagcagtgacaacacacgatatggaatctcacaaaccagtgacatgggaacattgtgcatacgtgcactaga

SEQ ID NO: 151365 - DNA, 80 bp, synthetic construct
  source 1..80: mol_type = other DNA
ccagcggcagttcacccagctccatcccagcagtcacctccggatcccacgtacgcccgggcaggggcacagcaccaagc

SEQ ID NO: 151366 - DNA, 80 bp, synthetic construct
  source 1..80: mol_type = other DNA
ctgatgagatcacccaacaggccatgttgcagggggatggtattgaggataccataactaacacagtcaatgccaccata

SEQ ID NO: 151367 - DNA, 80 bp, synthetic construct
  source 1..80: mol_type = other DNA
tggacaaattaaagatagtggcatacggggatgatgtcatagcctcttaccctgaggaacttgaccctgctgagattgct

SEQ ID NO: 151368 - DNA, 80 bp, synthetic construct
  source 1..80: mol_type = other DNA
catagacagcctagagacgtacaagtcactgaccacgtgactcccgcaggccaatcagccgctactacgtacacttcctg

SEQ ID NO: 151369 - DNA, 80 bp, synthetic construct
  source 1..80: mol_type = other DNA
tactggcggggaacgcattcgtttacccgcaccaaataataaacttgcgtaccaataattgtgctacgctcgtactacct

SEQ ID NO: 151370 - DNA, 80 bp, synthetic construct
  source 1..80: mol_type = other DNA
cagagccacagctagtggggaccaacgaaaacgtgggctactgcctcatcagcaacacgttcatgaacggagacatgccc

SEQ ID NO: 151371 - DNA, 80 bp, synthetic construct
  source 1..80: mol_type = other DNA
ctgcggggtatgttacctgctggtatcagacaggagtcgtgtcaccagcaggaaaccagcccaaatgctacattatgtgc

SEQ ID NO: 151372 - DNA, 80 bp, synthetic construct
  source 1..80: mol_type = other DNA
gcgtggcagatactgtggctagtgggcccgcaaactcagaacaaattcctgccctaactgctgccgagactgggcatacc

SEQ ID NO: 151373 - DNA, 80 bp, synthetic construct
  source 1..80: mol_type = other DNA
acagagtgttggatctcacgaaaatgcaataaacgcgggtagtggctcaattgtgaagtatttcaacatcaactactaca

SEQ ID NO: 151374 - DNA, 80 bp, synthetic construct
  source 1..80: mol_type = other DNA
ctccagataaaacagaccagttttctaagataaattgggataatgtgaccttccttaaacgcaaatttaagcctgactct

SEQ ID NO: 151375 - DNA, 80 bp, synthetic construct
  source 1..80: mol_type = other DNA
ttgtaaccaatgtacccaaattccccatgtttgacgctgaggtaggtgatgtcacaccatatggtgacatcaacttgagt

SEQ ID NO: 151376 - DNA, 80 bp, synthetic construct
  source 1..80: mol_type = other DNA
agcggacccgcgaacactgagcaggtgcccgccctcactgcggtggagaccggtcacacgtcacaggtcaaccccagtga

SEQ ID NO: 151377 - DNA, 80 bp, synthetic construct
  source 1..80: mol_type = other DNA
acgtggtgggcctgtctccgattgcagatggtgattacagtcaaggtgcatttaccccactggacattaatgccaaaaag

SEQ ID NO: 151378 - DNA, 80 bp, synthetic construct
  source 1..80: mol_type = other DNA
ttcactgcccgctccttgatcttcagccactgcccttgtgactaaaatggttcactaccctcgtggaatcctgaccccat

SEQ ID NO: 151379 - DNA, 80 bp, synthetic construct
  source 1..80: mol_type = other DNA
agacaggtcacacagcacaggttaccccgagtgatacaatgcaaactagacatgtacacaacttccacaccagatcggag

SEQ ID NO: 151380 - DNA, 80 bp, synthetic construct
  source 1..80: mol_type = other DNA
ggactgggacccagatttggaggtgtgttcactagtaatgttaagataatgaactatcacttaatgacaccagaagatca

SEQ ID NO: 151381 - DNA, 80 bp, synthetic construct
  source 1..80: mol_type = other DNA
aacgactccagatggggaaaaggtgcaaagctcagatggatccaggccctcagttaaacctagaatgatcagacatatgc

SEQ ID NO: 151382 - DNA, 80 bp, synthetic construct
  source 1..80: mol_type = other DNA
tattttccagcaacgactggaaatgtgagtatgaatcctgtaagcagtgggacaggccagctagacaaagccttacagac

SEQ ID NO: 151383 - DNA, 80 bp, synthetic construct
  source 1..80: mol_type = other DNA
cgtcgacaaggtcaagtctctctcgcgcgagcgctttgcgcccgaggatttttcgttccagtggtttcgctccatcagtc

SEQ ID NO: 151384 - DNA, 80 bp, synthetic construct
  source 1..80: mol_type = other DNA
cagagcacattcaggagtggaagaacatgaaactcgccaccaacgtcacaaaattcccaatgttctttgtagatgttggt

SEQ ID NO: 151385 - DNA, 80 bp, synthetic construct
  source 1..80: mol_type = other DNA
ccccaacaaactgattctgagaaaggctatggtagtcagtggactacccccagcacagacgcctacgagtaccacttagg

SEQ ID NO: 151386 - DNA, 80 bp, synthetic construct
  source 1..80: mol_type = other DNA
tcctatcttgctttccatgctggtcccaacaactacaacaagtgggccgacgctgtcaccgagcgtgcggctcgcgctgg

SEQ ID NO: 151387 - DNA, 80 bp, synthetic construct
  source 1..80: mol_type = other DNA
aaaagccattcgcagtccaggatactggaaagaaagcagaataactataatatgcccctatacagacccaccattataca

SEQ ID NO: 151388 - DNA, 80 bp, synthetic construct
  source 1..80: mol_type = other DNA
ttgatgccagtgatgttaacaaaacaacaaaaccagacacatcagcatgtagattctatacattacaaagcaaaatgtgg

SEQ ID NO: 151389 - DNA, 80 bp, synthetic construct
  source 1..80: mol_type = other DNA
gataacaattttgacttacgtacaaagatcttatcattggaactatataagaacacagtgtactcctaaaattggacacg

SEQ ID NO: 151390 - DNA, 80 bp, synthetic construct
  source 1..80: mol_type = other DNA
aacgatagatgcgcgagtgcctactgttctcgatagccgccgtcaacgccacggcgatgcgcaaaaacacgccgcccgga

SEQ ID NO: 151391 - DNA, 80 bp, synthetic construct
  source 1..80: mol_type = other DNA
tttcaatcaaaacagatgtagcctctcagccactagctaccactctaattggtgaaatatccagctattacactcactgg

SEQ ID NO: 151392 - DNA, 80 bp, synthetic construct
  source 1..80: mol_type = other DNA
gtctgtgtcagcccacctcaagtccatcttttgcgaggaattgctgaataaacgcgtggcttgaaagtaaactttattgc

SEQ ID NO: 151393 - DNA, 80 bp, synthetic construct
  source 1..80: mol_type = other DNA
gatagagggttttataaacactatggagtgatagttgacaattatgtataccaattggactcagatgatatatttaaaac

SEQ ID NO: 151394 - DNA, 80 bp, synthetic construct
  source 1..80: mol_type = other DNA
caacttgcaagcgccacacacggtaatgtgaatgttggttataactacacacacccaggtgaagcaggcagggaagtcaa

SEQ ID NO: 151395 - DNA, 80 bp, synthetic construct
  source 1..80: mol_type = other DNA
gccattccagagttatgtagatagattctacaaaagcttgagagcagaacaaacagatccagcagtaaagaattggatga

SEQ ID NO: 151396 - DNA, 80 bp, synthetic construct
  source 1..80: mol_type = other DNA
gccgatccgcagcaggctaacccgggatggcctggtggggacggtggcgatgggccccgcggcgaaggtggagacggcgc

SEQ ID NO: 151397 - DNA, 80 bp, synthetic construct
  source 1..80: mol_type = other DNA
tatttggactgtacacagagataatttacaacccatacacagacaaaggcaagggaaacaaaatatgggtagacgcatta

SEQ ID NO: 151398 - DNA, 80 bp, synthetic construct
  source 1..80: mol_type = other DNA
agacctttgccacagacacacgcttagcccctcagaccacttccaaatacaaacctgacggtagcgcaataacatcaaca

SEQ ID NO: 151399 - DNA, 80 bp, synthetic construct
  source 1..80: mol_type = other DNA
acctggggaactactgtggaagggagacggagcagtcatagtcaaggtaggaacagatataaaaataataccaaggagga

SEQ ID NO: 151400 - DNA, 80 bp, synthetic construct
  source 1..80: mol_type = other DNA
acacagctttcactttaccatcagtaaacaatgcagaaccaggaaaaagatacatctacaaggtcctaccgcaaggatgg

SEQ ID NO: 151401 - DNA, 80 bp, synthetic construct
  source 1..80: mol_type = other DNA
ttactgtaagtaaaatgaaaaattataatgagcacacttttgacaaatggcaaataaccctacaggaaatggcccaaatt

SEQ ID NO: 151402 - DNA, 80 bp, synthetic construct
  source 1..80: mol_type = other DNA
gtcaagcacttctgtttccccggtattaggggttaggcttttcaagaggctgaagcctgaagtatcgttacccgcgcaat

SEQ ID NO: 151403 - DNA, 80 bp, synthetic construct
  source 1..80: mol_type = other DNA
gggacccaatagaagaggccattaactcaactgtttctaacacattaaatcgtgcactaggtagcgcgaatcacacaaca

SEQ ID NO: 151404 - DNA, 80 bp, synthetic construct
  source 1..80: mol_type = other DNA
cgcccccccccgcgcatgcgcggggacccttgccaaaaaggcaaacacgaccttcccgaccccgatagaaaccctccaag

SEQ ID NO: 151405 - DNA, 80 bp, synthetic construct
  source 1..80: mol_type = other DNA
cagaggctcagtttagaataccctcacactgtccagatggtagtacaaatacacacaaaagcaagtggactgaaatgtgg

SEQ ID NO: 151406 - DNA, 80 bp, synthetic construct
  source 1..80: mol_type = other DNA
tagactttatagtgaggataaacacacagcctccatttttagacactaacctcaccgcggcacagatacacccgggcatc

SEQ ID NO: 151407 - DNA, 80 bp, synthetic construct
  source 1..80: mol_type = other DNA
ggccgggccatgggcaaggctcttaaaaagaaatgtttctcggtaaactttacagaaagaaaaggaaagtgccactgtcc

SEQ ID NO: 151408 - DNA, 80 bp, synthetic construct
  source 1..80: mol_type = other DNA
gcgcgtcgtcgtgatcccggtcgcggagcatcggcgtgggctccatgtcggtggcagtgacggcgacggtggtaactgtg

SEQ ID NO: 151409 - DNA, 80 bp, synthetic construct
  source 1..80: mol_type = other DNA
taataggggagccacatcaaatggttggtggtggaagctaccagatgcactcaaagatatgggtgtgtttggtcagaata

SEQ ID NO: 151410 - DNA, 80 bp, synthetic construct
  source 1..80: mol_type = other DNA
tcgctatcgctagcgaaacgcacgcagtaacgcatgttgacggatttctcggctaggatgatggagcctgatgacggtgc

SEQ ID NO: 151411 - DNA, 80 bp, synthetic construct
  source 1..80: mol_type = other DNA
taccaaatactaagccaacaggtcccacccacacaaccaaaccatcagcacttggagcaatggagattggagcaacccca

SEQ ID NO: 151412 - DNA, 80 bp, synthetic construct
  source 1..80: mol_type = other DNA
cagtgcgcaaaaagcgccggccacggcacgccgtaaacaaaactccggccccgcacacccgtggaaacagccctgaacgc

SEQ ID NO: 151413 - DNA, 80 bp, synthetic construct
  source 1..80: mol_type = other DNA
cggcggaagctatacaaaatggtggacaacatcttccgggtcaaaggtcgtgcctacgtcataagtcacgtggtgtggac

SEQ ID NO: 151414 - DNA, 80 bp, synthetic construct
  source 1..80: mol_type = other DNA
gtcctattaataaggtactattatcataatgggtgcccaggtttcttcacaaaaagttggagcacacgagaacaccaacg

SEQ ID NO: 151415 - DNA, 80 bp, synthetic construct
  source 1..80: mol_type = other DNA
gctcaaagatctctagagcatctaaggaggttgtggattggttctcagaaaaaattaaatccatgctcagttttgtagag

SEQ ID NO: 151416 - DNA, 80 bp, synthetic construct
  source 1..80: mol_type = other DNA
tatcttcacaatactcagaactagaaacaatattatatgaaagaaactgcacatactatcaaacaggccaagtcctagca

SEQ ID NO: 151417 - DNA, 80 bp, synthetic construct
  source 1..80: mol_type = other DNA
cgcagactgagactgagacgcagacgcagacgaaaacgaaagctagtactgactcagtggaaccccgccaaagtgcggag

SEQ ID NO: 151418 - DNA, 80 bp, synthetic construct
  source 1..80: mol_type = other DNA
ggatgttactattcaaagtcactagatagatacatacctgttgaatgtgaagctcatgattggtaccccgtagaagaaac

SEQ ID NO: 151419 - DNA, 80 bp, synthetic construct
  source 1..80: mol_type = other DNA
aggtgtgatagaacaaaaccctgttgaaaattttgtagatgaggtcctcaacgaagtcctagttgttccaaacattaaca

SEQ ID NO: 151420 - DNA, 80 bp, synthetic construct
  source 1..80: mol_type = other DNA
cgctcgtaccagccgcgggctccgcgtcctcgtcgatcaccagcggtcgcgtcggcaccggagaatccacgtcatcctgc

SEQ ID NO: 151421 - DNA, 80 bp, synthetic construct
  source 1..80: mol_type = other DNA
gtgcaaacggatcagggccattttacaatgctcggcgttcgcgaccgactagccatcttaccgcggcacgcacacccagg

SEQ ID NO: 151422 - DNA, 80 bp, synthetic construct
  source 1..80: mol_type = other DNA
agtctgcccgctcatggaaggtttccttatttttcccgtcatagaaaggggacatttccacagtctgcccggtggtggtc

SEQ ID NO: 151423 - DNA, 80 bp, synthetic construct
  source 1..80: mol_type = other DNA
attcttcgttaatctctgccaggatactagtgctataccacaccagagcgctcagcgtgcccagggctaccgcacggtaa

SEQ ID NO: 151424 - DNA, 80 bp, synthetic construct
  source 1..80: mol_type = other DNA
gcaaggagctagttaaagttaaaattcagccccccaagatgttcatagacaagtggtacactcaggaggacctgtgtccc

SEQ ID NO: 151425 - DNA, 80 bp, synthetic construct
  source 1..80: mol_type = other DNA
taactctacctcacacgctgacgaccacacctttaacaaccaggcctttggagggggactgtgtactaccagatacactc

SEQ ID NO: 151426 - DNA, 80 bp, synthetic construct
  source 1..80: mol_type = other DNA
ccaggcagagtgaacaatttgtcagaaatttgtcaaatagactcaatgataccagtaaataacactcatgctgtcaaaaa

SEQ ID NO: 151427 - DNA, 80 bp, synthetic construct
  source 1..80: mol_type = other DNA
tatatgtccatacacagagccacaactagtagacccccaagataaaactaagggctttgtactatatggagacacatttg

SEQ ID NO: 151428 - DNA, 80 bp, synthetic construct
  source 1..80: mol_type = other DNA
tgtactcagataacaatgtaaatatgggctatgtattttatgacagcttatttggagatggcaaaatgccctccggcaca

SEQ ID NO: 151429 - DNA, 80 bp, synthetic construct
  source 1..80: mol_type = other DNA
gtaggcggggagatgccacgcatccctgtcttctcgctccaaagagagacgcccaagaaacccatccacagcatttgaaa

SEQ ID NO: 151430 - DNA, 80 bp, synthetic construct
  source 1..80: mol_type = other DNA
atgactacccagagtgttgtttggcactagtagccaaccaagtagaaccaaccatcattgaagttggagattgtctgtct

SEQ ID NO: 151431 - DNA, 80 bp, synthetic construct
  source 1..80: mol_type = other DNA
caggtagcaatcagtacctgacctcggacaaccaccagtccccgtgtgctatcccagaatttgatgtcacgccaccaatt

SEQ ID NO: 151432 - DNA, 80 bp, synthetic construct
  source 1..80: mol_type = other DNA
ttcagtggcagactgcaactaatccatcagtcttccaaaaaatggacagtccaccaccacaagtgtcggttcccttcatg

SEQ ID NO: 151433 - DNA, 80 bp, synthetic construct
  source 1..80: mol_type = other DNA
agtgatttgttcgtacatgtgggtaatttgatatacagaaatttacatctatttaattcagaagtacatgactcagtatt

SEQ ID NO: 151434 - DNA, 80 bp, synthetic construct
  source 1..80: mol_type = other DNA
ggcaccacacaaggttagcaaccaatgttccaaaattcccaatgtttttcgcagacttgggcacaaccataccctatggt

SEQ ID NO: 151435 - DNA, 80 bp, synthetic construct
  source 1..80: mol_type = other DNA
ctggggcaactacagcaatcccaattactatttctatagcccctctcaactcagagttcgggggtttacggcaagctgtc

SEQ ID NO: 151436 - DNA, 80 bp, synthetic construct
  source 1..80: mol_type = other DNA
gtgctgaaacaatttgttaccataagctctgacgataatattaacagcttaataactgaatttttactggttgatgttaa

SEQ ID NO: 151437 - DNA, 80 bp, synthetic construct
  source 1..80: mol_type = other DNA
ttgatttaaccacacaagatcatccatatgcgcaggaagtctttgctatacctgttgatgttgcttcacacccattagcg

SEQ ID NO: 151438 - DNA, 80 bp, synthetic construct
  source 1..80: mol_type = other DNA
gacgcaggaggtacataagacgggggcgacgcaaaaagaaactcatactgactcagtggaacccggcaatagttaagagg

SEQ ID NO: 151439 - DNA, 80 bp, synthetic construct
  source 1..80: mol_type = other DNA
aaaaacataaataatcgcagcattgctgcatctaaatttttataattttctctgccaatattagattggattttgttttt

SEQ ID NO: 151440 - DNA, 80 bp, synthetic construct
  source 1..80: mol_type = other DNA
cgggcttcaggccccctccgtccccgtcctccagagacccgggcttcaggccctgcctctcctgttacccttttagaacc

SEQ ID NO: 151441 - DNA, 80 bp, synthetic construct
  source 1..80: mol_type = other DNA
gaagattcggctttgatttggatatttgtttacacagtacttatacaaaaaatggaaagttgaatgctgcaatggctaca

SEQ ID NO: 151442 - DNA, 80 bp, synthetic construct
  source 1..80: mol_type = other DNA
cgacggttaccacggcttgcgctgccgcgaaacttcggccatgtggtcgttcgagtacgatcgcgacggcgacgtgacca

SEQ ID NO: 151443 - DNA, 80 bp, synthetic construct
  source 1..80: mol_type = other DNA
acttccttccgcttttttaaaaaaaggcgccaaaaaaccgtcggcgtgggcgcgcgcgctacgcgcgcgcgcccgtggtg

SEQ ID NO: 151444 - DNA, 80 bp, synthetic construct
  source 1..80: mol_type = other DNA
aaaccacgtaaagatgatttgatccttacatgttttagagggtgggtgaagcagttgcaaattgattacaagggcaatga

SEQ ID NO: 151445 - DNA, 80 bp, synthetic construct
  source 1..80: mol_type = other DNA
aaaagacctagaggtggtgcgctatgttccccaccacaaggtgggatgggcatggtggacttgcagcagggtaatattcc

SEQ ID NO: 151446 - DNA, 80 bp, synthetic construct
  source 1..80: mol_type = other DNA
tgaacactcctccattcttgaggttactttcctcaaacgctacttcattcctgatgagtctcatcctctcctcatccatc

SEQ ID NO: 151447 - DNA, 80 bp, synthetic construct
  source 1..80: mol_type = other DNA
agcatgatgctttacacaaaacacaagatcttagtacccagttttgagaccaaacctaagggcaagaccaccgtgtccgt

SEQ ID NO: 151448 - DNA, 80 bp, synthetic construct
  source 1..80: mol_type = other DNA
ccgtttgggtgagaagccttattattgacaaggtgtgaagagccccgtgtgcttagtgtgaatcctccggcccctgaatg

SEQ ID NO: 151449 - DNA, 80 bp, synthetic construct
  source 1..80: mol_type = other DNA
atttggatacgcagactgggtaaaaaaagacacaggcaactggggcatagtagactgggccagggtacttattatatgtc

SEQ ID NO: 151450 - DNA, 80 bp, synthetic construct
  source 1..80: mol_type = other DNA
aagtccaactaggtattccccacccggcagggctggcagaaaaaaggagaataacagtgatagatgtaggagatgcctac

SEQ ID NO: 151451 - DNA, 80 bp, synthetic construct
  source 1..80: mol_type = other DNA
tcaggagtaagcccaacttggagtaacgtacaaaacacagcaccacttgacaacacaggtagcaacgcaactagcagcag

SEQ ID NO: 151452 - DNA, 80 bp, synthetic construct
  source 1..80: mol_type = other DNA
cgtgccagtgaatacagggagccactccactgataccgccatcttctctttccaattagatcctggcaatggatcagtgc

SEQ ID NO: 151453 - DNA, 80 bp, synthetic construct
  source 1..80: mol_type = other DNA
actgtctgcacgcagaagtgaaagtgaaagatactgaggatgctaaaaagatagcacagagccatctagcggcgaacacg

SEQ ID NO: 151454 - DNA, 80 bp, synthetic construct
  source 1..80: mol_type = other DNA
aaattagagttctttacatattccagatttgatttggaagtgacaatagttatcacagaaagggtcttcaatgccattaa

SEQ ID NO: 151455 - DNA, 80 bp, synthetic construct
  source 1..80: mol_type = other DNA
acttctcagtgcgtatgttgagggataccccacacattgaccaagatgccaggttgcaaggggacgaaaaggacaacaac

SEQ ID NO: 151456 - DNA, 80 bp, synthetic construct
  source 1..80: mol_type = other DNA
gcagccgccggccgtacacccggccctgcagggccgcgtccaggtctggcaggtcgcaggtgggctccccatgcaccacc

SEQ ID NO: 151457 - DNA, 80 bp, synthetic construct
  source 1..80: mol_type = other DNA
ccatgtgttgtgaatttaatgggttaagaaatctcactattccagcaactcaaggattacccgtgatgaatactccagga

SEQ ID NO: 151458 - DNA, 80 bp, synthetic construct
  source 1..80: mol_type = other DNA
agcgagcagtcctcgcaagaagagaaagaagcagaagcccccaaaacgcaagcgcaaatacagcagcagctcagacagca

SEQ ID NO: 151459 - DNA, 80 bp, synthetic construct
  source 1..80: mol_type = other DNA
tccccccagtcaagctcctccgaagagtccccccgtgggaggactcggacaggaagcaaagcgggtcgcaaagctcagag

SEQ ID NO: 151460 - DNA, 80 bp, synthetic construct
  source 1..80: mol_type = other DNA
agatcaatagagagcgtttgagcaatggcgaggtagccaacacattctcaggtgcaaagtcaagtaacaccaacgatgtc

SEQ ID NO: 151461 - DNA, 80 bp, synthetic construct
  source 1..80: mol_type = other DNA
acagaagaattgtcacttaaagaagcactctatggaacagatggtcttgaaccaattgatctgaacacaagtgcaggtta

SEQ ID NO: 151462 - DNA, 80 bp, synthetic construct
  source 1..80: mol_type = other DNA
tgggaatatattactcagtggaaatcaaactgcaagaatgcttaaatataactacccaactaaatcaggatactgtgggg

SEQ ID NO: 151463 - DNA, 80 bp, synthetic construct
  source 1..80: mol_type = other DNA
tgtccggcgagagctcgaggccgtactcgagggtcttcatgaggtgtccaaactggacgtcggtgcagcgcttgttgttg

SEQ ID NO: 151464 - DNA, 80 bp, synthetic construct
  source 1..80: mol_type = other DNA
atggatatgataaccaagacatccacctaattgatgatttgggacaaactaggaaagagaaagacattgagatgctttgc

SEQ ID NO: 151465 - DNA, 80 bp, synthetic construct
  source 1..80: mol_type = other DNA
gatctaaaccaaaacccagatggtcaagacatcagtatgttttgtcaaatggtttcctcagttgactttctccctccaat

SEQ ID NO: 151466 - DNA, 80 bp, synthetic construct
  source 1..80: mol_type = other DNA
acttggccagtaccaggcagacggctccacgcttgcttgcttgactctcaataaagctgccatttagaagcaagtcagcg

SEQ ID NO: 151467 - DNA, 80 bp, synthetic construct
  source 1..80: mol_type = other DNA
ctttcctacaacaggtccaaaacgcccaagaacagaggtccccgtggccgttgcaggagacgccttaccttccagggaga

SEQ ID NO: 151468 - DNA, 80 bp, synthetic construct
  source 1..80: mol_type = other DNA
ttgagtaatacacccactgcacgaatgattcgctacgacttccctaccagaacagggcagtgtggtggagtcttgtgctc

SEQ ID NO: 151469 - DNA, 80 bp, synthetic construct
  source 1..80: mol_type = other DNA
tgccggtcatgaatgttccgggtagcaatcagttcctcacctccgacgacttccaatcgccatcagcaatgccacagttt

SEQ ID NO: 151470 - DNA, 80 bp, synthetic construct
  source 1..80: mol_type = other DNA
gatattctagaaagacaaataactacaatgcatgtgtcaaacccttctcaggaaaagagggagcagttgttcaataatgt

SEQ ID NO: 151471 - DNA, 80 bp, synthetic construct
  source 1..80: mol_type = other DNA
caaaaggaccccccattcaaatggatggggtatgagctctggccaaaaaagtggaaactgcaaaaaatacagctgccaga

SEQ ID NO: 151472 - DNA, 80 bp, synthetic construct
  source 1..80: mol_type = other DNA
ttgtcccttactttggaccgggagttgattacaagggagacgcgcttacaccactatcaagaaaagatttgacaacctat

SEQ ID NO: 151473 - DNA, 80 bp, synthetic construct
  source 1..80: mol_type = other DNA
ctgacctagccatgtcaggccccttctcctacagcgacgaccttaaaaacaccaccatccaggccaaatacaaattcaaa

SEQ ID NO: 151474 - DNA, 80 bp, synthetic construct
  source 1..80: mol_type = other DNA
cacacagaaccgcaaccgaaccaaggatagatgaaaactctacatgcatacggacagatgactgcaaaggattagaggca

SEQ ID NO: 151475 - DNA, 80 bp, synthetic construct
  source 1..80: mol_type = other DNA
gttatttcaagagctgtaaacagagtgtacatgttcgatcctccccagggcctaaaacccatcctgggcacaaaagcctg

SEQ ID NO: 151476 - DNA, 80 bp, synthetic construct
  source 1..80: mol_type = other DNA
ggagatatacagcgtgggtctggtagtggtgcagtgcccctacacgttcccccccatgtatgacaagaacagaccagaca

SEQ ID NO: 151477 - DNA, 80 bp, synthetic construct
  source 1..80: mol_type = other DNA
agaggttgactcggtcgtgccggtaaacaacgttaacggcactactgaccaaatggacatgttcagaatcccagtgacaa

SEQ ID NO: 151478 - DNA, 80 bp, synthetic construct
  source 1..80: mol_type = other DNA
ctacgtcactaaccacgtgtgctccgcaggccaaccattgtgtatgtcgtgcacttcctgggcatggtctacgtaataat

SEQ ID NO: 151479 - DNA, 80 bp, synthetic construct
  source 1..80: mol_type = other DNA
caccacccagcaccactagcaccacaaccacaacagagcccacaacaaagttagagataaatgaaacttttccatgcata

SEQ ID NO: 151480 - DNA, 80 bp, synthetic construct
  source 1..80: mol_type = other DNA
tgcgcaatagtgctgacacacccaccataatggccactttagcattgcttggatgttctggttccccatggaaatttatt

SEQ ID NO: 151481 - DNA, 80 bp, synthetic construct
  source 1..80: mol_type = other DNA
ccgaagacctcgacgacctgtacgccgctatcgaaagagacgcagagtaaggaggagacgatgggggaggcgatggaccc

SEQ ID NO: 151482 - DNA, 80 bp, synthetic construct
  source 1..80: mol_type = other DNA
ccaccggggactcccaactccagctcgatcatgtgttttgcttcagcttgcaatgacttttctgtaaggatgttgagaga

SEQ ID NO: 151483 - DNA, 80 bp, synthetic construct
  source 1..80: mol_type = other DNA
atagtcaaaattcttgtcaggatactttgttacatggtcctatattgccataagcccaacatcctaaccaccgcttgctt

SEQ ID NO: 151484 - DNA, 80 bp, synthetic construct
  source 1..80: mol_type = other DNA
caccacacggaggccctttgggtactgtgtggaacactttcaagacacaagagcacgtagttgaccccaactacaaaact

SEQ ID NO: 151485 - DNA, 80 bp, synthetic construct
  source 1..80: mol_type = other DNA
acacacctacctacccctggctccccgtccccaatcctgaaataaaggtgagctttaagctcggtttcaaataaacaagg

SEQ ID NO: 151486 - DNA, 80 bp, synthetic construct
  source 1..80: mol_type = other DNA
aaacgcctgcacgagaaacctctcgactatgaaagctattttacacaaccaaaaagacctagaatctttcctccaacaga

SEQ ID NO: 151487 - DNA, 80 bp, synthetic construct
  source 1..80: mol_type = other DNA
tgggttaaaaccaaaggcgagtagggccaggaacgccaaatagcagcagtaatagatgaaaacaaagctcagcatgaaac

SEQ ID NO: 151488 - DNA, 80 bp, synthetic construct
  source 1..80: mol_type = other DNA
ccagcccaatttaatagatagattatgcaaatccaaacatatttttaaaaatgtgtactatgaagttgaagggggagtac

SEQ ID NO: 151489 - DNA, 80 bp, synthetic construct
  source 1..80: mol_type = other DNA
aagtttaaattcttatggggtggaaatatgattcccgaacaggttatcaaaaacccgtgcaaaacaacagatccaacata

SEQ ID NO: 151490 - DNA, 80 bp, synthetic construct
  source 1..80: mol_type = other DNA
agcttatgtaaatacacaaggtatagaagacacaattgagaaagtcgtgggagatgcccttgctatttcaatgccaaaag

SEQ ID NO: 151491 - DNA, 80 bp, synthetic construct
  source 1..80: mol_type = other DNA
tgggtaatcagtttggcttcaggccgggtccccgagctcctggcgcaccggggctaggtggaccccccgttctgccccgt

SEQ ID NO: 151492 - DNA, 80 bp, synthetic construct
  source 1..80: mol_type = other DNA
agtagaagaatttgtggagcgtacgctgcaaaatgcaatggccgtcccagacacacaagcctcaggacccacccacacca

SEQ ID NO: 151493 - DNA, 80 bp, synthetic construct
  source 1..80: mol_type = other DNA
cagttccagatccagcggctcgacgacgtcttctttcggattgcgatagcagcacgcgcaggcaccacgcttatcagaag

SEQ ID NO: 151494 - DNA, 80 bp, synthetic construct
  source 1..80: mol_type = other DNA
ggcaaattccacacaggcaacaacccagtgtttggcatgtgttcatataaacccagcaaggacatactatataaagcaaa

SEQ ID NO: 151495 - DNA, 80 bp, synthetic construct
  source 1..80: mol_type = other DNA
acataccagaaaatgaagatgactacccagattgcaatttagctttatccgcaaatcaaccagagactacaataattaat

SEQ ID NO: 151496 - DNA, 80 bp, synthetic construct
  source 1..80: mol_type = other DNA
atattctctaagtacttatataaaaatgcaaacttttggcaaagtttacatgcaccagcacaagttaatttaactcaaaa

SEQ ID NO: 151497 - DNA, 80 bp, synthetic construct
  source 1..80: mol_type = other DNA
ggcaaaagtacaaaacaatactagtttatcaccatcaggtactaatgcaaccagtagccgagacacatggtacaaaggca

SEQ ID NO: 151498 - DNA, 80 bp, synthetic construct
  source 1..80: mol_type = other DNA
actcttacaagcacgtggagagccttatggaaaactctgggaagggttggaagagggatactcgcaataccgagaagaat

SEQ ID NO: 151499 - DNA, 80 bp, synthetic construct
  source 1..80: mol_type = other DNA
gcttggttagtctgttgattctgggttatgtctgagactgggaatagctgaggtgctgcataagcttgataagcattctc

SEQ ID NO: 151500 - DNA, 80 bp, synthetic construct
  source 1..80: mol_type = other DNA
gccttacaaggaattcatatctaaaattaggaagacagaagtgggtcgtaggttgtatcttccaccatataacctgctag

SEQ ID NO: 151501 - DNA, 80 bp, synthetic construct
  source 1..80: mol_type = other DNA
tttgtgctagggtttttgggatttcttgcaatggcaggttctgcaatgggcacagcgtcgttgacgctgtcggctcagtc

SEQ ID NO: 151502 - DNA, 80 bp, synthetic construct
  source 1..80: mol_type = other DNA
gaagcactattttctaaatacaaagggaatacagattgctccattaatgaccacataagaattgcatcatcacattatgc

SEQ ID NO: 151503 - DNA, 80 bp, synthetic construct
  source 1..80: mol_type = other DNA
tacgtcatatgtcacgtggggaggccctgctgcgcaaacgcggaagtaggccccgtcacgtgtcataccacgtgggcagt

SEQ ID NO: 151504 - DNA, 80 bp, synthetic construct
  source 1..80: mol_type = other DNA
ggttgccagtactatgtacccctggtagtaaccaatttctcacgtcagacgattttcaatcgccctccgctatgccccag

SEQ ID NO: 151505 - DNA, 80 bp, synthetic construct
  source 1..80: mol_type = other DNA
gatagcccaactgttctctgttatggctgattcaacaaccccttcagcaaaccatggcatagaccagaagggttatttca

SEQ ID NO: 151506 - DNA, 80 bp, synthetic construct
  source 1..80: mol_type = other DNA
aaggaattagaagtacagaaattggcaaagtcttagtgataccatcttactcagtcttaaggcgcaggtggctagacttg

SEQ ID NO: 151507 - DNA, 80 bp, synthetic construct
  source 1..80: mol_type = other DNA
cctcgtcggccgggtcgcgcggccgtttggccaccgcgcgcgcgtccatgatggcgaggcgcacggtagatttcaaaaag

SEQ ID NO: 151508 - DNA, 80 bp, synthetic construct
  source 1..80: mol_type = other DNA
agattatgttgatggaattctaaatgaggttctagttgtacccaacataaaggagagtcaagccaccacatcaaactcag

SEQ ID NO: 151509 - DNA, 80 bp, synthetic construct
  source 1..80: mol_type = other DNA
tgacaccgttagcgaatcggaatttattgtacggtataacccagagcatgaagattgatctacgtttccgagaagtttat

SEQ ID NO: 151510 - DNA, 80 bp, synthetic construct
  source 1..80: mol_type = other DNA
gctgacccacagcacgggcgaaaagtaaagcaataggtaaaagacgatgacggaccagccgtagccaatcccgatgactt

SEQ ID NO: 151511 - DNA, 80 bp, synthetic construct
  source 1..80: mol_type = other DNA
catcaaatcgaacaaaacgcggcctgtgaaaattttattgcacagcatcaagagacgactgccaacggcgcgtccacgcc

SEQ ID NO: 151512 - DNA, 80 bp, synthetic construct
  source 1..80: mol_type = other DNA
agcaatcaattcttaacgtccgatgacttccaatcgccgtgcgccatgcctgagtttgatgtgaccccgccaatggatat

SEQ ID NO: 151513 - DNA, 80 bp, synthetic construct
  source 1..80: mol_type = other DNA
gctgagaagaaagcttgagctattcacctactcaagatttgatttggagttaacatttgtcatcacggagcggtactttt

SEQ ID NO: 151514 - DNA, 80 bp, synthetic construct
  source 1..80: mol_type = other DNA
cataggtctcggcgtcatcatatggtggggtggtgtaggtatgggatgtcgacaagttacgcctgaaggcgcagtccgcc

SEQ ID NO: 151515 - DNA, 80 bp, synthetic construct
  source 1..80: mol_type = other DNA
cactggttatgcggcggatccgaaaagaaaacgttgatgccggtgaacgtgcaaaacaggctctagcgttcgaacgcact

SEQ ID NO: 151516 - DNA, 80 bp, synthetic construct
  source 1..80: mol_type = other DNA
ttcagaaattactatagtggctactatagctgggcaaggtgatgacatagggcacatagtgcttcaatacatgtatgtgc

SEQ ID NO: 151517 - DNA, 80 bp, synthetic construct
  source 1..80: mol_type = other DNA
aattcaacaaatatgcaccacccaccatatctttagagaccagatttatgtggtggaaggtggtatgccctctggatgct

SEQ ID NO: 151518 - DNA, 80 bp, synthetic construct
  source 1..80: mol_type = other DNA
agtagactacattgttatatataacacacagccaccctttaagattaacaagtacagcagccctttcttacacccaggct

SEQ ID NO: 151519 - DNA, 80 bp, synthetic construct
  source 1..80: mol_type = other DNA
caacagaactttttcaagtggaccattaacacccgttcctatgtgcaactcagaagaaagtttgagcttttcacttatat

SEQ ID NO: 151520 - DNA, 80 bp, synthetic construct
  source 1..80: mol_type = other DNA
tactttactacaccagacggactatggggggaccctatatacagcaaaaacaatacaggcacatcccaaactgcacaaac

SEQ ID NO: 151521 - DNA, 80 bp, synthetic construct
  source 1..80: mol_type = other DNA
cgaccagagaacgcaggatatctgcaggatcaggtcagcctcgttggtggccgtggggaagccctcctcccctagacact

SEQ ID NO: 151522 - DNA, 80 bp, synthetic construct
  source 1..80: mol_type = other DNA
tcagagatcacgatacagccggcggtatcgataatcttgttgcggtactggatggtaaagtcgggctcgggcttgatgtc

SEQ ID NO: 151523 - DNA, 80 bp, synthetic construct
  source 1..80: mol_type = other DNA
aatgaaaagaaaggttataattcctagttttaagacaaaaccaaagggcagctcctcaattaaagtaagaataacacccc

SEQ ID NO: 151524 - DNA, 80 bp, synthetic construct
  source 1..80: mol_type = other DNA
gcggtttccgttctgctcaccacaaactgacaacacttgtgtaactttccaagttctgcaatctgtctataacgaatacc

SEQ ID NO: 151525 - DNA, 80 bp, synthetic construct
  source 1..80: mol_type = other DNA
tcccccgccggccccgcccccactgtgctccaccagctccacggccatggccttgatgtccgcggccgtgggctgaccct

SEQ ID NO: 151526 - DNA, 80 bp, synthetic construct
  source 1..80: mol_type = other DNA
taggtgtgcgcgcgctcggcggcccgttgttggtggcttgtcgcgcatcttctttcggttttttcacggccttccagact

SEQ ID NO: 151527 - DNA, 80 bp, synthetic construct
  source 1..80: mol_type = other DNA
ctgaaaacttccaccacacttgtttcctcgaagcgctagataagatgcagacccgcgggcacgacttggagaagttgaaa

SEQ ID NO: 151528 - DNA, 80 bp, synthetic construct
  source 1..80: mol_type = other DNA
cgagcgccagcgaggagtgcgacccttccccctggtgcaacgccctcggcggccgcgcgctacgccttcggctgcgcgcg

SEQ ID NO: 151529 - DNA, 80 bp, synthetic construct
  source 1..80: mol_type = other DNA
ttttggtttgggctttgtagacagtgttaaggaccaaataaatgcaatcaacccaattaatggtattagtaagaaaatta

SEQ ID NO: 151530 - DNA, 80 bp, synthetic construct
  source 1..80: mol_type = other DNA
ttgcctacccccatcgacagcctagagcagtacaaattgtcgacccgcagaccgttggacccccgtgggtcttccactcc

SEQ ID NO: 151531 - DNA, 80 bp, synthetic construct
  source 1..80: mol_type = other DNA
gtcgcaacgtctcttcgtagtcgggtggtggccgcagtcgcatgtgttccatgatctcccaggtgcgcagttcgtggaag

SEQ ID NO: 151532 - DNA, 80 bp, synthetic construct
  source 1..80: mol_type = other DNA
attcgcagctgtcgattacttactagggtgcggtgttcttgcaggaaacgccttcgtgtttccccatcagatcatcaatt

SEQ ID NO: 151533 - DNA, 80 bp, synthetic construct
  source 1..80: mol_type = other DNA
aaacattagtctggaggtatgaccccatgctggcttatagctacgaggcttttactcgacaccccgaggagtttgggtac

SEQ ID NO: 151534 - DNA, 80 bp, synthetic construct
  source 1..80: mol_type = other DNA
accaggcaggtactaatttggagatcacagtggttaaactacaaagaaatgaaaagttcagggatattagaccacacata

SEQ ID NO: 151535 - DNA, 80 bp, synthetic construct
  source 1..80: mol_type = other DNA
attttgtgttggcatccacaaattctcaaactctgaacccaccaacagttctcaaccccgaagccctagcacgcagattt

SEQ ID NO: 151536 - DNA, 80 bp, synthetic construct
  source 1..80: mol_type = other DNA
gagggccccaaaaccccctcctagcagccaagactggcagcttgagtacgaggcctgcgccgcctgggacaggcctccca

SEQ ID NO: 151537 - DNA, 80 bp, synthetic construct
  source 1..80: mol_type = other DNA
gattattctaattatgatgggagtttaaatccagtgtggtttgagctcttagaaaaagtccttaatgatctgggtttccc

SEQ ID NO: 151538 - DNA, 80 bp, synthetic construct
  source 1..80: mol_type = other DNA
tcgagtgatagttctgggtcgcgcagtacaccaacaatagtaagaggcctaagagcactcccggcagcccccactaatcc

SEQ ID NO: 151539 - DNA, 80 bp, synthetic construct
  source 1..80: mol_type = other DNA
tgaacgtaaccgcagcggatctgctgggtgtaccacttgtgcaggaacagtttggggggctttattctaacactgatggt

SEQ ID NO: 151540 - DNA, 80 bp, synthetic construct
  source 1..80: mol_type = other DNA
aaacgtcggtacagaagcagctcaagctccagctcaagcagcagcaacagctcggactccagctccgagagctctgggtg

SEQ ID NO: 151541 - DNA, 80 bp, synthetic construct
  source 1..80: mol_type = other DNA
ttactgtactaaatacatttagaacagaaggtatatactcacacccacaactaaaaaaaccacctgaagcaagtaacaaa

SEQ ID NO: 151542 - DNA, 80 bp, synthetic construct
  source 1..80: mol_type = other DNA
tcttaatgtgggacccagtgacatgtatgtacatgttggaaacttaatatataggaatttacatctctttaattctgatg

SEQ ID NO: 151543 - DNA, 80 bp, synthetic construct
  source 1..80: mol_type = other DNA
cagacgctgctatataatagggtacatggccgggctcgtagaaggacacggcagcttttcaaaaaactacagcagccacc

SEQ ID NO: 151544 - DNA, 80 bp, synthetic construct
  source 1..80: mol_type = other DNA
aacaggccccctagatccttttacacagatattcccacatacacctggatgcccaaagcccaagaccaatttcgtgtaag

SEQ ID NO: 151545 - DNA, 80 bp, synthetic construct
  source 1..80: mol_type = other DNA
actgcaaattagtacttaagggcctgggaatgaaccccacactagaggaaatgctaacagcctgccaagggataggaggc

SEQ ID NO: 151546 - DNA, 80 bp, synthetic construct
  source 1..80: mol_type = other DNA
aagataataattcctagctggaacacatgcccaaaaggcagagaaaaggttaaagtaaaagtgcagccccccaaactgtt

SEQ ID NO: 151547 - DNA, 80 bp, synthetic construct
  source 1..80: mol_type = other DNA
atgatatggctagagtggtgcaccaaactcacaagtgaatacaatgaaagacagtgctataacttaattcagcacgtacc

SEQ ID NO: 151548 - DNA, 80 bp, synthetic construct
  source 1..80: mol_type = other DNA
actggcatgatgaacaagggatgtcaaccagttacacaaagtatagatatttgtgcctaatgcagaaagctgtgttcata

SEQ ID NO: 151549 - DNA, 80 bp, synthetic construct
  source 1..80: mol_type = other DNA
tacaggtaaatttctcatagcctacacaccaccagggggcggacttccaaagaatagaaaagaagcaatgcttggtgtcc

SEQ ID NO: 151550 - DNA, 80 bp, synthetic construct
  source 1..80: mol_type = other DNA
gcgacccataaaaaccacgtacggggtagccaccatgccatcatggtgatcgcgacgtggctcgggcaacaaaataacag

SEQ ID NO: 151551 - DNA, 80 bp, synthetic construct
  source 1..80: mol_type = other DNA
ttaagcaatatgggttgggtccaagatttggaggggtgtacactggcaatgtaaagataatgaattaccatcttatgact

SEQ ID NO: 151552 - DNA, 80 bp, synthetic construct
  source 1..80: mol_type = other DNA
acaccacaccagatacatactcagcagctgggtacataacttgctggtatcagacaaactttgtttttcctccaaacacc

SEQ ID NO: 151553 - DNA, 80 bp, synthetic construct
  source 1..80: mol_type = other DNA
cacctgactgccagagtagtagttaggtgcccctacaccgaacccatgctcatagaccactcagaccccaacagaggctt

SEQ ID NO: 151554 - DNA, 80 bp, synthetic construct
  source 1..80: mol_type = other DNA
gaccaatcacgagcccacctaggacaactatcttcatcaagtacctccatacctatctgctggtgaactcgattctcaat

SEQ ID NO: 151555 - DNA, 80 bp, synthetic construct
  source 1..80: mol_type = other DNA
agcccaactacagaagacgctgcaacacagtgggctacatgcccgtgctcatctgtggcaacaatactgcttgcagaaac

SEQ ID NO: 151556 - DNA, 80 bp, synthetic construct
  source 1..80: mol_type = other DNA
atctgttcccacttctagaaaggatgcaatgctgggtacacatatcatatgggatattgggctccagtcaagttgtgtac

SEQ ID NO: 151557 - DNA, 80 bp, synthetic construct
  source 1..80: mol_type = other DNA
acagctggcaaaaaacaagctttatcaccaacgctagccagcattacaattactgtaattataatccagacaatactaaa

SEQ ID NO: 151558 - DNA, 80 bp, synthetic construct
  source 1..80: mol_type = other DNA
ggtgaacaacactaatcgataagtcgcgtgtaggcgactggctacatcaaccggatatctgcggggatttaaaaagacga

SEQ ID NO: 151559 - DNA, 80 bp, synthetic construct
  source 1..80: mol_type = other DNA
cccatgcacattccgggagaagtcaggaatttaatggaaattgcagaggttgactcagtcatgcccattaataatattga

SEQ ID NO: 151560 - DNA, 80 bp, synthetic construct
  source 1..80: mol_type = other DNA
actggggaataccagcctgggctagagtagtaatgatatgcccatacacctatccaaaactatacaacacaccagaccca

SEQ ID NO: 151561 - DNA, 80 bp, synthetic construct
  source 1..80: mol_type = other DNA
cacttcgctcggccggccagaagagcgcaagtccaagtctggtgctggggccgatgtgcagcggtttgtgcccgcagttg

SEQ ID NO: 151562 - DNA, 80 bp, synthetic construct
  source 1..80: mol_type = other DNA
ttacccatggttacttttcttaaagatgaactcaggaaacaagaaaagatttctgctggaaaaacccgtgtcatagaagc

SEQ ID NO: 151563 - DNA, 80 bp, synthetic construct
  source 1..80: mol_type = other DNA
aacatgatcctaggctgaaagttgattttaaagaggctttattttccaagtataaagggaacaatccatgtgaaataaat

SEQ ID NO: 151564 - DNA, 80 bp, synthetic construct
  source 1..80: mol_type = other DNA
ttgagagaagaatccaataccagaaagaggatacacacaaacctaaatgctattttccaaggtctgggatcagatgaaac

SEQ ID NO: 151565 - DNA, 80 bp, synthetic construct
  source 1..80: mol_type = other DNA
gatcgacacttcatggagttcagacgggagattaagacaacatacccacttgcaactgcaggacctagtgacctgtgtgt

SEQ ID NO: 151566 - DNA, 80 bp, synthetic construct
  source 1..80: mol_type = other DNA
cccagctaaaagttgattatttaactaaattaaaacagttgaacctgttagaaaagcaggtagaaactatcagattagcc

SEQ ID NO: 151567 - DNA, 80 bp, synthetic construct
  source 1..80: mol_type = other DNA
agatttctccaatgttgacaatttccattccatggcttatgacatcacgactggagacaagaaccctagcaaattagttc

SEQ ID NO: 151568 - DNA, 80 bp, synthetic construct
  source 1..80: mol_type = other DNA
cccgcctggggcaggtgtgccaggtacgcgcaaggatgcaatactaggtacccacgtcgtgtgggacctgggtctgcaat

SEQ ID NO: 151569 - DNA, 80 bp, synthetic construct
  source 1..80: mol_type = other DNA
cagagaccttctacacagatggatcatgcaatagacagtcaaaggaaggaaaagcaggatatgtaacagatagaggaaga

SEQ ID NO: 151570 - DNA, 80 bp, synthetic construct
  source 1..80: mol_type = other DNA
acacccccgacacacccgacccacgcccgcggtacggaggacatcacagacgaagtacggcacgaccagcctcaggggcc

SEQ ID NO: 151571 - DNA, 80 bp, synthetic construct
  source 1..80: mol_type = other DNA
tgatttatgctatataaccaatgactaatatggctaatggccaatattgattcaatgtatatatcgatatggattggcca

SEQ ID NO: 151572 - DNA, 80 bp, synthetic construct
  source 1..80: mol_type = other DNA
gaatatcacgaacaaatgacatgggattactgtgtatacgtgcactagatgacaccacaaagaatgacgtgaaggtgttt

SEQ ID NO: 151573 - DNA, 80 bp, synthetic construct
  source 1..80: mol_type = other DNA
aaaattcaactcgcaggaaagtaaaggacaacctgactgctatcttccaaggcttgggcgatccaacccccccagggttc

SEQ ID NO: 151574 - DNA, 80 bp, synthetic construct
  source 1..80: mol_type = other DNA
attagaaaagtgagtcccacaaacaccagtgtccagagaggaagaccgtaagataaagatggctgcctctcatctggaac

SEQ ID NO: 151575 - DNA, 80 bp, synthetic construct
  source 1..80: mol_type = other DNA
aggaaataatgttacaatacgggccaattccacatggagttgtcccttggtaacctggatacggcattataacttaacca

SEQ ID NO: 151576 - DNA, 80 bp, synthetic construct
  source 1..80: mol_type = other DNA
tcggtataatgtggcgatgattattttatgtgtgtgctatgcagcgaacacaacgtcagtgtaacatgaagcgccgcaag

SEQ ID NO: 151577 - DNA, 80 bp, synthetic construct
  source 1..80: mol_type = other DNA
ctacagaggtaaagattagagtttatcacagagcaaaacatgttgaagcctggatccccagagcacctagagcattacct

SEQ ID NO: 151578 - DNA, 80 bp, synthetic construct
  source 1..80: mol_type = other DNA
tctccagtcatcatgccacctcgttgtaccgtggatcagctcccacttttttagaaggactaggaaagacaactacacag

SEQ ID NO: 151579 - DNA, 80 bp, synthetic construct
  source 1..80: mol_type = other DNA
tggagcatgctatttggctactcagaatatgtagagagtcagctaggcccctttcaagaccacgaaacagtaggcctagt

SEQ ID NO: 151580 - DNA, 80 bp, synthetic construct
  source 1..80: mol_type = other DNA
tgataaccagcaagcaggatcagggaaccaaccttaaccaggacatgccagttcttacacatcaaatcatgtacgtgcct

SEQ ID NO: 151581 - DNA, 80 bp, synthetic construct
  source 1..80: mol_type = other DNA
aaaacccacataacaacactctatatggaggctcagcatacgccactaaagtagataacacaagtaaaataccaccaaat

SEQ ID NO: 151582 - DNA, 80 bp, synthetic construct
  source 1..80: mol_type = other DNA
actcaccctggagaaagaggcagagttatcaatgtggcaagtcgtgaagacaatgaaaaacaacccagtgatgacaattg

SEQ ID NO: 151583 - DNA, 80 bp, synthetic construct
  source 1..80: mol_type = other DNA
ttccacaaaaatccaggcatattgacaggatcagctgtgggatgtgatccagatgtcttctggtcccaaatgagagctac

SEQ ID NO: 151584 - DNA, 80 bp, synthetic construct
  source 1..80: mol_type = other DNA
cacttgctggtatcaaactaatctagtggtaccacccagcacgccaactactgctaagatgctgtgctttgtctcaggct

SEQ ID NO: 151585 - DNA, 80 bp, synthetic construct
  source 1..80: mol_type = other DNA
agtgggtctcacttccgcatgttcaatagtgatgcaaagtccataaatgcaaatgtgggatacgtgacttgttttatgca

SEQ ID NO: 151586 - DNA, 80 bp, synthetic construct
  source 1..80: mol_type = other DNA
gctgggatagtgcagcaacagcaacagctgttagacgtggtcaagagacaacaagaaatgttgcgactgaccgtctggtg

SEQ ID NO: 151587 - DNA, 80 bp, synthetic construct
  source 1..80: mol_type = other DNA
gagtggcctggctccgccgggtggccctggggtaagtctgagaggcagagggacggcctaggcccgaggaagtagaggtg

SEQ ID NO: 151588 - DNA, 80 bp, synthetic construct
  source 1..80: mol_type = other DNA
atcttaagtcacgtgacctgtgacgtcacgggcgccattttgcttgaccaaatggccgacttccttcctcttttttaaaa

SEQ ID NO: 151589 - DNA, 80 bp, synthetic construct
  source 1..80: mol_type = other DNA
ggaagaaccggtggagacggccggcaagacgctggagaagatggaggagacggagacgacctcgcaccaggagatatcga

SEQ ID NO: 151590 - DNA, 80 bp, synthetic construct
  source 1..80: mol_type = other DNA
acgtggtgcgtttgggcaacaatcgggagctgtgtatgtgggaaattacagagtggttaacagacacctcgctacacaca

SEQ ID NO: 151591 - DNA, 80 bp, synthetic construct
  source 1..80: mol_type = other DNA
gttcctcatggcttacacaccacctggtggccagttaccaaagaaccgcaaggaggcaatgcttggaactcacctgatat

SEQ ID NO: 151592 - DNA, 80 bp, synthetic construct
  source 1..80: mol_type = other DNA
tcacaaacatttaataaagacacatttataaccaagtatctaataggtaatatgatcagctatcatcaaaaatttaaaac

SEQ ID NO: 151593 - DNA, 80 bp, synthetic construct
  source 1..80: mol_type = other DNA
gaattcttcactgcctacagagacatagtatacaatcccttcttagacaaggcccagggcaacatggtgtggtttcagta

SEQ ID NO: 151594 - DNA, 80 bp, synthetic construct
  source 1..80: mol_type = other DNA
gggtctccacctaaaccccctattatctatccagccatgaacagggtgtacctgttcccagacagcgcgcctaggcctct

SEQ ID NO: 151595 - DNA, 80 bp, synthetic construct
  source 1..80: mol_type = other DNA
caagaaacgcaaagctcgcaagaagagatgcaaacggaggggacggtacaggaacaactcctcctccagctccgagagca

SEQ ID NO: 151596 - DNA, 80 bp, synthetic construct
  source 1..80: mol_type = other DNA
tgggaggagctgtggttggacaagcattttccgccaccgcgatggcaaatggtgataaagcatatgagttcactagcgca

SEQ ID NO: 151597 - DNA, 80 bp, synthetic construct
  source 1..80: mol_type = other DNA
tttggatagaagggaatccttactacccaagcaggtttcaagcaggagtgatgaaaggagttggcccagcagagccagga

SEQ ID NO: 151598 - DNA, 80 bp, synthetic construct
  source 1..80: mol_type = other DNA
ttggaaacacatgaatggacaccaacctgggctagaggacatcaaattactcatgtggaattaccaaaagtcttctggga

SEQ ID NO: 151599 - DNA, 80 bp, synthetic construct
  source 1..80: mol_type = other DNA
atgcccagaatcaacagaccatgctcaagatgatacaggatgaagttgacctgaagctcagtgtgtttgataacctggaa

SEQ ID NO: 151600 - DNA, 80 bp, synthetic construct
  source 1..80: mol_type = other DNA
ctttaaacaccatcaacaggccctccgtgtgattctcccgcgtgccaaacgagggacactggatgtccgaggagaagcgg

SEQ ID NO: 151601 - DNA, 80 bp, synthetic construct
  source 1..80: mol_type = other DNA
agaagagtgggatttagacgcttaaagcatagagtacactttcccagccttgaggcggctggccaataaaagccttaacc

SEQ ID NO: 151602 - DNA, 80 bp, synthetic construct
  source 1..80: mol_type = other DNA
agatataaatgaacacatgtcgtatgagattattaagaaaccgaaaccacccatagttcaccatcctcttcatcattcag

SEQ ID NO: 151603 - DNA, 80 bp, synthetic construct
  source 1..80: mol_type = other DNA
actaaatgacattaaaaacactggaccgtgggcctacagagacgaaagagcaagcactaccctgtgcatggcctacacct

SEQ ID NO: 151604 - DNA, 80 bp, synthetic construct
  source 1..80: mol_type = other DNA
gggttcgttcatgagatcgttatccagacccgggccgtcgtcgtgcagaccgccggcattggccagcgaagagaggctgc

SEQ ID NO: 151605 - DNA, 80 bp, synthetic construct
  source 1..80: mol_type = other DNA
aaggcacgcagtggcaacacgccgcagacgccgcgtcgcgcttacgccgccgagagatccctcagcgcggggaaaccccg

SEQ ID NO: 151606 - DNA, 80 bp, synthetic construct
  source 1..80: mol_type = other DNA
tcctgttatatgtgagaaacccacaacaatctggattgaaggtggaccttattatccaagcaggtaccaagttggtgtca

SEQ ID NO: 151607 - DNA, 80 bp, synthetic construct
  source 1..80: mol_type = other DNA
ggctacaaagtgtcttttaaactagggtttcacccagacaaacatctgtaaaccccgccaataaaccactgctgctacac

SEQ ID NO: 151608 - DNA, 80 bp, synthetic construct
  source 1..80: mol_type = other DNA
acacacgaactacccgaccccgataaataccctccaagaatacaaatcgcagatccggaacacctcggcccacaaacaat

SEQ ID NO: 151609 - DNA, 80 bp, synthetic construct
  source 1..80: mol_type = other DNA
caagtgaggcaaaaaggataaaaaccctatacattaaatgtgataatatcatcaagcagaagaaaagatgtgaaccagta

SEQ ID NO: 151610 - DNA, 80 bp, synthetic construct
  source 1..80: mol_type = other DNA
cttatcctgcaaattcttgcctctatatgctagtgaagcaaaaagaattaaagtgctgtatcataaatgtaataatataa

SEQ ID NO: 151611 - DNA, 80 bp, synthetic construct
  source 1..80: mol_type = other DNA
ttaaagttaacaaactggagaaaggcctccaagaccttgcacctttatatgcctgtgaggccaagcaggtgcgtgaaatg

SEQ ID NO: 151612 - DNA, 80 bp, synthetic construct
  source 1..80: mol_type = other DNA
ctctcactcaccaaattatgtacatcccaccaggtggccccattcccaagtctactacagattatgcatggcaaacgtca

SEQ ID NO: 151613 - DNA, 80 bp, synthetic construct
  source 1..80: mol_type = other DNA
aacgcaggtagcgtaagtttctttccacaagccgaaacatgtaaagtgcaatctaatagagtgttttgcgatacaatgaa

SEQ ID NO: 151614 - DNA, 80 bp, synthetic construct
  source 1..80: mol_type = other DNA
gagcctatggcgggtccaccatcaattacactacaatcaattactatagggactctgcaagcaatgcagcaagcaagcaa

SEQ ID NO: 151615 - DNA, 80 bp, synthetic construct
  source 1..80: mol_type = other DNA
ggcttggtaactgactatgtcaatcaattgggtgttgcttttggagatggattctccagcaatattaaggatcatttaac

SEQ ID NO: 151616 - DNA, 80 bp, synthetic construct
  source 1..80: mol_type = other DNA
gatgcgtgatacaccaatgatgtcacaaactttagacattgcacagaacccagtagaagacttcatagacaatactctag

SEQ ID NO: 151617 - DNA, 80 bp, synthetic construct
  source 1..80: mol_type = other DNA
ccgatccgggttagtgggagtagttaacctcactgacggaggtactgataccacagagtatgccacttgggatatagaca

SEQ ID NO: 151618 - DNA, 80 bp, synthetic construct
  source 1..80: mol_type = other DNA
tcgtatgaaaaataaaaaacagctttttatttacaggaacggggaaaaaaaaggcacacggtccgtgggagacgcgggtt

SEQ ID NO: 151619 - DNA, 80 bp, synthetic construct
  source 1..80: mol_type = other DNA
gatccagagaatgtaaatttagaactcaccattctgatccttgataggaatgaaaagtttagagacattagaaactttat

SEQ ID NO: 151620 - DNA, 80 bp, synthetic construct
  source 1..80: mol_type = other DNA
attacaagaaacctaatcaggaagatgttacaattttcattgaacacagagaaaacccaaaaatcattacagcaggacca

SEQ ID NO: 151621 - DNA, 80 bp, synthetic construct
  source 1..80: mol_type = other DNA
ataatgatttagtaggagtagcagtaagaccaagagtagcactgagaacaatgacttacaaattggcagtagatatgtca

SEQ ID NO: 151622 - DNA, 80 bp, synthetic construct
  source 1..80: mol_type = other DNA
tcaaggtagggacacaattaggccaagatgcccccccgctaactcaccaagtcatgtatatacccccaggaggcccagta

SEQ ID NO: 151623 - DNA, 80 bp, synthetic construct
  source 1..80: mol_type = other DNA
aaaactcactatgacaacaatctttttaatcaaatacaatactacaacacttttcaaacaatagctcagctaaaagacac

SEQ ID NO: 151624 - DNA, 80 bp, synthetic construct
  source 1..80: mol_type = other DNA
tgttgcgactgaccgtctggggaacaaaaaatctccaggcaagagtcactgctattgagaaatacttaaaggaccaggcg

SEQ ID NO: 151625 - DNA, 80 bp, synthetic construct
  source 1..80: mol_type = other DNA
ttctgcatattacatgttttatgatgggtataatggagactccacagatgcacgttatggaacaacagtcactaatgata

SEQ ID NO: 151626 - DNA, 80 bp, synthetic construct
  source 1..80: mol_type = other DNA
cagaaggcaggaagaagagggacagtgacatgctggaactgtggcaaagggggacatacagccaagcaatgcagggctcc

SEQ ID NO: 151627 - DNA, 80 bp, synthetic construct
  source 1..80: mol_type = other DNA
ccactgggggatgagatgttgctgattctgtttagagagtatgtagaccaggcgtacgaggctggtgatgtcggtgatct

SEQ ID NO: 151628 - DNA, 80 bp, synthetic construct
  source 1..80: mol_type = other DNA
aaatctcataaccctatgcctggtccccactagtcgaaagcacctagcaataagatgagtggaccatggacgcttaaagc

SEQ ID NO: 151629 - DNA, 80 bp, synthetic construct
  source 1..80: mol_type = other DNA
aacttacaagagatggcccagattagaaggaaatttgagttgttcacttatactagatttgactctgagataaccctagt

SEQ ID NO: 151630 - DNA, 80 bp, synthetic construct
  source 1..80: mol_type = other DNA
tcggtacggctttgcagggtgcgcgccgccgccgggtggtcctaggccggggccccaagcggtaagaggtgcaggcgcag

SEQ ID NO: 151631 - DNA, 80 bp, synthetic construct
  source 1..80: mol_type = other DNA
taaaaacttacacttgtgtgagccagaaaacttaaatgactcaacattaatatgttactccagtgatcttgtcatttacc

SEQ ID NO: 151632 - DNA, 80 bp, synthetic construct
  source 1..80: mol_type = other DNA
tggggtaataagtcacattgttaatgaccacggccgggataagggtgtaaaccttgcagaatggattggtaggacaccca

SEQ ID NO: 151633 - DNA, 80 bp, synthetic construct
  source 1..80: mol_type = other DNA
agataaaaacaacaaagaaagtcaatgaatgtggataccccaccatccacacacctgcaaagacaaaattgcaacccagt

SEQ ID NO: 151634 - DNA, 80 bp, synthetic construct
  source 1..80: mol_type = other DNA
gagagcttatcaaaatcctgcaaagagccctctttgtgcacttccgaggaggatgtgcgcattccagaatcgggggacaa

SEQ ID NO: 151635 - DNA, 80 bp, synthetic construct
  source 1..80: mol_type = other DNA
atggacaggaagtatcataagtttatggtggaaacagctattaattacaagcctcgatctagttgtactgttttaaatct

SEQ ID NO: 151636 - DNA, 80 bp, synthetic construct
  source 1..80: mol_type = other DNA
gcgccaccggggaagaagagggtgatacaaagcagtttgcagtgtggaacataagtgtgaaagacatggtgcaaatgcgt

SEQ ID NO: 151637 - DNA, 80 bp, synthetic construct
  source 1..80: mol_type = other DNA
cacagctgaccccaagtataaaaacttattagatggtaacaaaaaagtatataacgatagccaatatagacaaccaattt

SEQ ID NO: 151638 - DNA, 80 bp, synthetic construct
  source 1..80: mol_type = other DNA
tacagaatcctgtggaggatttcatagatgaaactttaaaggaagtcctagtagttccaaacactcaaccatctggccaa

SEQ ID NO: 151639 - DNA, 80 bp, synthetic construct
  source 1..80: mol_type = other DNA
gataacatgcaaaccagacacgtgaagaactatcactcacgctcagagactagcattgagaatttcttatgtaggtctgc

SEQ ID NO: 151640 - DNA, 80 bp, synthetic construct
  source 1..80: mol_type = other DNA
agacaaaaatcccagaaaggcgtgtggtggcacaaggtcctgaggaggaatttggtagatcacttattaaacataattca

SEQ ID NO: 151641 - DNA, 80 bp, synthetic construct
  source 1..80: mol_type = other DNA
ttgactgaccctttgtgtatggagggtgatgaagctgaggattgtaaacaaactatatcccctgatgaattaggtcttac

SEQ ID NO: 151642 - DNA, 80 bp, synthetic construct
  source 1..80: mol_type = other DNA
tacgaactagaaataacgttaaccacatactgtaattacaaagtatcgacgctagtttattcaggataaatttgtgctac

SEQ ID NO: 151643 - DNA, 80 bp, synthetic construct
  source 1..80: mol_type = other DNA
agggtgtcttcatctttggtgattacggtgactcgacggatcggcggtggtgacggcggcgacacgggtggtggtttctc

SEQ ID NO: 151644 - DNA, 80 bp, synthetic construct
  source 1..80: mol_type = other DNA
ggtgacactttctatggtttagtttccatcaatgatttcgggacattggcagtcagagtcgtgaatgaattcaaccctgc

SEQ ID NO: 151645 - DNA, 80 bp, synthetic construct
  source 1..80: mol_type = other DNA
gatcccgccaagccaagatgtacccagtagagaagaaagctggtttagatcagtatactgtagccacagaagcttttgtg

SEQ ID NO: 151646 - DNA, 80 bp, synthetic construct
  source 1..80: mol_type = other DNA
cgcaggcgacgacttcgctgggcgcctttacacgcgggttgaacgcgctggaacgacacgtccagctgggtcaccagtat

SEQ ID NO: 151647 - DNA, 80 bp, synthetic construct
  source 1..80: mol_type = other DNA
tcacagcgcaaggaccccaagaaggagctgctgaacctgctggtcaagctctcggagaacaagaccatcagcggggtcac

SEQ ID NO: 151648 - DNA, 80 bp, synthetic construct
  source 1..80: mol_type = other DNA
gacaaatgacatgggaactatatgtgttagaatagttacatccaaacagagacacaatctgaatatcgtctctcgcattt

SEQ ID NO: 151649 - DNA, 80 bp, synthetic construct
  source 1..80: mol_type = other DNA
agctagggtgcaggggccagggtttgattttgcacaagctataatgaagaaaaacaccgtcattgccaggactgaaaagg

SEQ ID NO: 151650 - DNA, 80 bp, synthetic construct
  source 1..80: mol_type = other DNA
tggaacgaaaaaggtgtcacggtcaaatatacaccggaaaattgtgaacagtggtctttgattaccaccatgtgcatact

SEQ ID NO: 151651 - DNA, 80 bp, synthetic construct
  source 1..80: mol_type = other DNA
ctatataacatacctaaaggatgaactccgtagccctgagaagattaggtcagggaaaaccagagcaatagaagcagcaa

SEQ ID NO: 151652 - DNA, 80 bp, synthetic construct
  source 1..80: mol_type = other DNA
actgcgagcaccaggacaaggtggtgagctacgcgcgcgacgagttgaccaaacgctgcggcgaaaaatcggcgctgggc

SEQ ID NO: 151653 - DNA, 80 bp, synthetic construct
  source 1..80: mol_type = other DNA
aaaagaaaattaacatacaacagtggaaccccgccactgtaaagaaatgcgtggtcaccggatacgtacccctcctcatc

SEQ ID NO: 151654 - DNA, 80 bp, synthetic construct
  source 1..80: mol_type = other DNA
caaaggatttaacaaaagaagatacttaactgcatccacaaagtataaatggactagaaacaaaatggacatagcagaag

SEQ ID NO: 151655 - DNA, 80 bp, synthetic construct
  source 1..80: mol_type = other DNA
cgcgcgcgtacagacgatggaggagacggagagggcgacggagacacaaaaagagacttgtactgactcagtggcagccc

SEQ ID NO: 151656 - DNA, 80 bp, synthetic construct
  source 1..80: mol_type = other DNA
gaggcagtaatagaagacatagtcacctcaggcccctttgcaccaaaagagacaaagccagtcatgcagctgaacatgaa

SEQ ID NO: 151657 - DNA, 80 bp, synthetic construct
  source 1..80: mol_type = other DNA
gggcaagattcttaaaaaattcccccgttctattgtccgccaggacaccaagtcatgccgtggtctccgccaacagctaa

SEQ ID NO: 151658 - DNA, 80 bp, synthetic construct
  source 1..80: mol_type = other DNA
tagataagctaaagatagtagcatatggtgatgatgtaatagcctcttacccagaagaacttgacccagctcaaattgcc

SEQ ID NO: 151659 - DNA, 80 bp, synthetic construct
  source 1..80: mol_type = other DNA
ctatatcaaacatttcaaacaatagctcaaattaaacccagtgccacagaaagtaatttttcacccagttggcaaaactg

SEQ ID NO: 151660 - DNA, 80 bp, synthetic construct
  source 1..80: mol_type = other DNA
agcgcgtcacgccacacggagctgagacggtgctcccaagccacgccgttgcaggccacgaacaacgtccacgttaagat

SEQ ID NO: 151661 - DNA, 80 bp, synthetic construct
  source 1..80: mol_type = other DNA
aatcacacatgctcattgggtgtggctttgccgaacctggcgactgtggcgggatactccgttgtaaccatggggtgata

SEQ ID NO: 151662 - DNA, 80 bp, synthetic construct
  source 1..80: mol_type = other DNA
cccgaagtccgtcactaaccacgtgactcccgcaggccaatcagcagatactacgtacacttcctgggctggcctttccc

SEQ ID NO: 151663 - DNA, 80 bp, synthetic construct
  source 1..80: mol_type = other DNA
atgagttgcgaagtcccgccaagataaaagctggaaaaaccagggccatagaagcagccagcatgaatgatacagcaaat

SEQ ID NO: 151664 - DNA, 80 bp, synthetic construct
  source 1..80: mol_type = other DNA
gatactgtacctcagagacaggccttcggaggggctctaagcaccacctccttcagcctaaaagtactgtatgaccagca

SEQ ID NO: 151665 - DNA, 80 bp, synthetic construct
  source 1..80: mol_type = other DNA
taataagagcagcagatgctatatgaatcattgtaatacctctgttattcaagagtcctgtgacaaacattattgggatg

SEQ ID NO: 151666 - DNA, 80 bp, synthetic construct
  source 1..80: mol_type = other DNA
gtgtttgaaaacgggggaaacccgcgtttgggtgcgctaagccccggactgggacgtagccggcgtccggcacctatatt

SEQ ID NO: 151667 - DNA, 80 bp, synthetic construct
  source 1..80: mol_type = other DNA
tatatgttagaaatataggagatcctattacggcatctttagcagacttgaagagaatgattaattctggcttaatgaca

SEQ ID NO: 151668 - DNA, 80 bp, synthetic construct
  source 1..80: mol_type = other DNA
tttctctattttggtggatgtagcttcacaaccaatagcaacaacactaataggtgaaatagccagttattacacacatt

SEQ ID NO: 151669 - DNA, 80 bp, synthetic construct
  source 1..80: mol_type = other DNA
cacggccaacacgaaagccaagaagaagacgtctatcttttactcaaacaactccaggaggagcaagaaacgaccagttc

SEQ ID NO: 151670 - DNA, 80 bp, synthetic construct
  source 1..80: mol_type = other DNA
agtctaagtattttgcagcagttaggtgtgggttccatttccaagtccaaataaatgtcaatcaagggactgccggtagt

SEQ ID NO: 151671 - DNA, 80 bp, synthetic construct
  source 1..80: mol_type = other DNA
ggccgtacacccggccctgcagggccgcgtccaggtctggcaggtcgcaggtgggctccccatgcactaccttggcctcc

SEQ ID NO: 151672 - DNA, 80 bp, synthetic construct
  source 1..80: mol_type = other DNA
ggagatctagaagatcttttcgccgcggccgccgaagacgatatgtgagtaggcgtgggcgccgccgcacctacaggcgc

SEQ ID NO: 151673 - DNA, 80 bp, synthetic construct
  source 1..80: mol_type = other DNA
atctggcactgataggactattgctgaagtttacattagcttaaggtgcccaaactttttcttccctgtgcctgctccta

SEQ ID NO: 151674 - DNA, 80 bp, synthetic construct
  source 1..80: mol_type = other DNA
gtatcaaacaaactttgtgttcccacccaatacacccaacactgctgacatgttatgttttgtgtctgcttgcaaagact

SEQ ID NO: 151675 - DNA, 80 bp, synthetic construct
  source 1..80: mol_type = other DNA
cgccacgattgtcacatacaacaccaatgtaagtgacaactttactagttggcgtattaacacgagagaggtagctcaac

SEQ ID NO: 151676 - DNA, 80 bp, synthetic construct
  source 1..80: mol_type = other DNA
catgtacacaggtccagccttatctagtgcaaagctgttacttgcatacacaccaccaggagcaccaggacctacaaata

SEQ ID NO: 151677 - DNA, 80 bp, synthetic construct
  source 1..80: mol_type = other DNA
tactcctgggaaacatacagtgatacagcaaaatactctgcaacataccaagcatttaactcagcaagagacaaaagata

SEQ ID NO: 151678 - DNA, 80 bp, synthetic construct
  source 1..80: mol_type = other DNA
attcgtgtgagatggacatccagtctttacggcttgtccccaccccatggatttctattgttaaagatattcagaatgtt

SEQ ID NO: 151679 - DNA, 80 bp, synthetic construct
  source 1..80: mol_type = other DNA
tcaacggtcacacctaggcgatgttgctatgtacaatgtacaagtcattaagaagtcaaacacagacttaatcttagcat

SEQ ID NO: 151680 - DNA, 80 bp, synthetic construct
  source 1..80: mol_type = other DNA
accaatgatatgggtactttgtgctttagagctcttgaagataagaccaaacagatcataaaggtgtatataaaaccaaa

SEQ ID NO: 151681 - DNA, 80 bp, synthetic construct
  source 1..80: mol_type = other DNA
acacaacctgacacttcctctaatagattttacactttggaaagccggaattggacaaactcatcgactggctggtggtg

SEQ ID NO: 151682 - DNA, 80 bp, synthetic construct
  source 1..80: mol_type = other DNA
atttcaattacatacagtatgtcctgaattgcctgggtagtctagtagtgattttgggcaccatatatgccctttacaaa

SEQ ID NO: 151683 - DNA, 80 bp, synthetic construct
  source 1..80: mol_type = other DNA
aaccactttcaagcaattggactatagtaatgtaacatttttgaaaagaggcttcaaacaggatgacaaataccggtttt

SEQ ID NO: 151684 - DNA, 80 bp, synthetic construct
  source 1..80: mol_type = other DNA
caaaagaggccgccagctagacaccccagaaaagaagcagagaaagagagttctttgtgcgacacgttttattccgcgtc

SEQ ID NO: 151685 - DNA, 80 bp, synthetic construct
  source 1..80: mol_type = other DNA
attaatcttgaccacctcagcgcagggatgcctggacacaagagccatcacctcttgatagggatccgctaggatatgac

SEQ ID NO: 151686 - DNA, 80 bp, synthetic construct
  source 1..80: mol_type = other DNA
caccacagactttattgtcccaatggcatccttggaagacaagggtaagtccttcactagtcagtatgtccttgccagca

SEQ ID NO: 151687 - DNA, 80 bp, synthetic construct
  source 1..80: mol_type = other DNA
ccattccgggccgcgtggtgggtccccggggggcgggggggtgtttttagcgtgggggtgaaaagaggaagtttctgggg

SEQ ID NO: 151688 - DNA, 80 bp, synthetic construct
  source 1..80: mol_type = other DNA
cggcaaatcgtcaggactttacccaggacccaagcaagtttactgagcctgtgaaggacgtgatggttaaatcattaccc

SEQ ID NO: 151689 - DNA, 80 bp, synthetic construct
  source 1..80: mol_type = other DNA
acccccggaaaggttgattcactggaggccttccaaattccagtctcaactggatcacactcaggagagggtgccatatt

SEQ ID NO: 151690 - DNA, 80 bp, synthetic construct
  source 1..80: mol_type = other DNA
gattggttcacaagcagatctaggggacagatacacggagtggacgatctcggttagggatatggctcagataagaagaa

SEQ ID NO: 151691 - DNA, 80 bp, synthetic construct
  source 1..80: mol_type = other DNA
ataatgactgccccttcactacatccaggcaacgccatgctaagcaaaagaaaaatattaatacccagtctacagacaaa

SEQ ID NO: 151692 - DNA, 80 bp, synthetic construct
  source 1..80: mol_type = other DNA
agagaaacacaacttataattctttattaaacatagttactatatacaacaccacacaaacagcagctcaactaagtaaa

SEQ ID NO: 151693 - DNA, 80 bp, synthetic construct
  source 1..80: mol_type = other DNA
aaatcaaattactacaatcttcaatacttgtcttaaagatgaacttagaaaacttgataaaattgcagctggcaaaaccc

SEQ ID NO: 151694 - DNA, 80 bp, synthetic construct
  source 1..80: mol_type = other DNA
ggagtaatgccagacggaaccccctacatacctatagagtgcagaatgaaatggtacccctgtatgttccaccaacaaaa

SEQ ID NO: 151695 - DNA, 80 bp, synthetic construct
  source 1..80: mol_type = other DNA
cttagcagatcagacactagattagaagagccaattgaatgcctaattaagaagtctgccgcaaaatacagagtgaataa

SEQ ID NO: 151696 - DNA, 80 bp, synthetic construct
  source 1..80: mol_type = other DNA
ttgaatggatgaagtcaatgctcccacaagcacaactcaaagtgaagtacttaaatgaacttaaaaaattaagcctatat

SEQ ID NO: 151697 - DNA, 80 bp, synthetic construct
  source 1..80: mol_type = other DNA
cttttgcgctgcggacggggcgtcgcgggtacgggaggcctttggccgcgaggacggaggcctttcgcggcgtggacggt

SEQ ID NO: 151698 - DNA, 80 bp, synthetic construct
  source 1..80: mol_type = other DNA
aaatggggtctatgggtacaatacactaaataacatggggcagttgtacatgcgtcacgtgaatgggccgtcaccacttc

SEQ ID NO: 151699 - DNA, 80 bp, synthetic construct
  source 1..80: mol_type = other DNA
aaacacccaaaccaatgcagcttttgtcctgtccctcttttcccagtggcgcggctctctgcaaatctccctcatcttca

SEQ ID NO: 151700 - DNA, 80 bp, synthetic construct
  source 1..80: mol_type = other DNA
gatcaaatatcagcaaaagtgacggagttgcaagatgtggccaaagattttttgacaaccaaagtgttatccaaggttgt

SEQ ID NO: 151701 - DNA, 80 bp, synthetic construct
  source 1..80: mol_type = other DNA
tggaaaacttcctgggaagggctgcatgcgtgcatgtggtggaaattaagaataaacaggccactgatgatactaatcat

SEQ ID NO: 151702 - DNA, 80 bp, synthetic construct
  source 1..80: mol_type = other DNA
tccactcctgggactggcgacgggggtttcttagcgaacaagctctcaaacgcttgtttgaaaaacctctcaactatgaa

SEQ ID NO: 151703 - DNA, 80 bp, synthetic construct
  source 1..80: mol_type = other DNA
atcaattagcaaatgaaaaccgtaccaaagcagatgccggatataatttcacacatcctggtgaggttggcagagaagtt

SEQ ID NO: 151704 - DNA, 80 bp, synthetic construct
  source 1..80: mol_type = other DNA
tgaaagttggcataatgcacaaaggttgtaacaatcaccagggaatagtccccgctttgggcactggttaaggatgggta

SEQ ID NO: 151705 - DNA, 80 bp, synthetic construct
  source 1..80: mol_type = other DNA
agcatcaagacgttcgagatcatctcgcaagagatcatcaaactcctcatagtctgcataacgatcaaattgagctcgtg

SEQ ID NO: 151706 - DNA, 80 bp, synthetic construct
  source 1..80: mol_type = other DNA
ggattctctttagtacctttcaataccatcgatgctggtgcttcaaacaggtacgggtacaccaccataaatgattttgg

SEQ ID NO: 151707 - DNA, 80 bp, synthetic construct
  source 1..80: mol_type = other DNA
cgagggcgactttgcacgctaccgcagcagtcaacagaagatggagggacaattacaagagactagacaacagatgaccg

SEQ ID NO: 151708 - DNA, 80 bp, synthetic construct
  source 1..80: mol_type = other DNA
ttttaaatatacctggggaagtgcgcaatttgatggagatagctgaggttgattcagtggtacccgtgaataatgtagca

SEQ ID NO: 151709 - DNA, 80 bp, synthetic construct
  source 1..80: mol_type = other DNA
cggggaaacagaagtgcttgtacaaaacagcggatgggtaccccaccatccgacccactgggtgtagtactctggtatta

SEQ ID NO: 151710 - DNA, 80 bp, synthetic construct
  source 1..80: mol_type = other DNA
ttatactaccatcaactattacaaagactcctatgctgcgacagcgggcaaacagagcctcaaacaagaccctgataagt

SEQ ID NO: 151711 - DNA, 80 bp, synthetic construct
  source 1..80: mol_type = other DNA
atgatacatcatccaagtatggctctgttgtaaccaatgatatgggaaccatatgtgttaggctggttacatctacacaa

SEQ ID NO: 151712 - DNA, 80 bp, synthetic construct
  source 1..80: mol_type = other DNA
ctaagacccgttatagtccagggtcccaatacagagtttgcattatctctgcttaggaaaaatatagtcactattacaac

SEQ ID NO: 151713 - DNA, 80 bp, synthetic construct
  source 1..80: mol_type = other DNA
acacggcagggccagctacaactatgcctggcactcagatgactgtataaaacagccgtggtcctttggagggtccgtat

SEQ ID NO: 151714 - DNA, 80 bp, synthetic construct
  source 1..80: mol_type = other DNA
gacaaaacaggtcggggaaggtttccaacgtgcttggttgcatggtagataggatggagagcgcggcgggaacggtagtg

SEQ ID NO: 151715 - DNA, 80 bp, synthetic construct
  source 1..80: mol_type = other DNA
ggaagagctctgtatcttccaccttactcagtcctgtaccgcgcctggattgataagttcatttaattagtaaacttgca

SEQ ID NO: 151716 - DNA, 80 bp, synthetic construct
  source 1..80: mol_type = other DNA
ccccgaagatcgtcactaaccacgtgattcctttcagccaaccaatatgctatgtcgtccacttcctgggccgggtctac

SEQ ID NO: 151717 - DNA, 80 bp, synthetic construct
  source 1..80: mol_type = other DNA
attatccaacaaagactggtcaatgtggtggtgtgttatgttcaacaggtaaaatttatggaatacatgtaggaggtaat

SEQ ID NO: 151718 - DNA, 80 bp, synthetic construct
  source 1..80: mol_type = other DNA
ttacagacagccaactgacagggcccagcctgcacgcaggcatgctcatgaccagaaaaaaaaagaaacttgttaagagc

SEQ ID NO: 151719 - DNA, 80 bp, synthetic construct
  source 1..80: mol_type = other DNA
agtgcctacgcaaagcctagtaatgctttcgaagtcatttggttggtcgctccgctgtaacccacagtagacctggcaga

SEQ ID NO: 151720 - DNA, 80 bp, synthetic construct
  source 1..80: mol_type = other DNA
gcgtttcggaccttcggcgtcgggggggtcgggggctttattaaacggactccaaggtgccattggacactgaggttgcg

SEQ ID NO: 151721 - DNA, 80 bp, synthetic construct
  source 1..80: mol_type = other DNA
aatccggatggaaaagatcttagcatgttttgccaaatggtttccaccacagaatatatagttcccatggccagtgtaga

SEQ ID NO: 151722 - DNA, 80 bp, synthetic construct
  source 1..80: mol_type = other DNA
acttgcaggatatgaacgcctaccacatagaagtgaacacagggaatcatcagggtgagaagatatttgcattccaaata

SEQ ID NO: 151723 - DNA, 80 bp, synthetic construct
  source 1..80: mol_type = other DNA
gcgagtacaaccccacaaagagcaagtgcacactagtagacatgcccctatttatcatgttctatggctacatagactgg

SEQ ID NO: 151724 - DNA, 80 bp, synthetic construct
  source 1..80: mol_type = other DNA
caaataccaacactatctcaccttttaccaacgtaacagcaaacgctacatcatcttataacacaacaatcaccgtaact

SEQ ID NO: 151725 - DNA, 80 bp, synthetic construct
  source 1..80: mol_type = other DNA
actgctgctgaaattaaaaactggggagatacaaactatgactggtatccctacaaaataccagacaaaaccaaactaga

SEQ ID NO: 151726 - DNA, 80 bp, synthetic construct
  source 1..80: mol_type = other DNA
taagcggtaatcccacttgccggcttatgaagtatgattatccaactcggccaggccagtgcggtggagtaatcatgaat

SEQ ID NO: 151727 - DNA, 80 bp, synthetic construct
  source 1..80: mol_type = other DNA
cctttgacatccccggtgccggtggaatccctcgtccaatacaaattgtcaacccgaagtacctcgacccgggcatcacg

SEQ ID NO: 151728 - DNA, 80 bp, synthetic construct
  source 1..80: mol_type = other DNA
acgataaaacagcatcaggagccacaacgtcgaatcccacgtccagtcgattcgtatgttatgctgcacagcaatgctag

SEQ ID NO: 151729 - DNA, 80 bp, synthetic construct
  source 1..80: mol_type = other DNA
cagctgttggacgtggtcaaaagacaacaagaaatgttgcggctgaccgtctggggaactaaaaacctccagactagagt

SEQ ID NO: 151730 - DNA, 80 bp, synthetic construct
  source 1..80: mol_type = other DNA
ccttatatatggcctttctaggctactctgactactgtcaaaagaaacttatatcaccaggaatagacaaagaagttaga

SEQ ID NO: 151731 - DNA, 80 bp, synthetic construct
  source 1..80: mol_type = other DNA
actatattccaacatgtgattgtacagatgcaacttattattgtaaacataagaacagatactacccaattaaagttaca

SEQ ID NO: 151732 - DNA, 80 bp, synthetic construct
  source 1..80: mol_type = other DNA
caacccccgtccccgtccccggtcccgcacaaagcgtcggcgcccagcacggccgaaaagcggagcgccgcgcagaagct

SEQ ID NO: 151733 - DNA, 80 bp, synthetic construct
  source 1..80: mol_type = other DNA
cgtaccggggagagggagtggacctaaaaagtggatccattactccgttgacccccgtgaccagcattactacctatggg

SEQ ID NO: 151734 - DNA, 80 bp, synthetic construct
  source 1..80: mol_type = other DNA
atttgacgttgcaagctatgtttgttccagtaggagctccaaccccaaaatcgcaggactcatatgagtggcagtcggct

SEQ ID NO: 151735 - DNA, 80 bp, synthetic construct
  source 1..80: mol_type = other DNA
atcacaactcgcaaagttgctcaattgaaaaaaaaattggaaatgttcacatatttaaggtttgatttggaggtgacgtt

SEQ ID NO: 151736 - DNA, 80 bp, synthetic construct
  source 1..80: mol_type = other DNA
aaagacatatccaagcttaaattggcattagacaagtatggagtagatctgcccatggtcacatttctcaaggatgagct

SEQ ID NO: 151737 - DNA, 80 bp, synthetic construct
  source 1..80: mol_type = other DNA
gtgaatgctgtgaccgaaggtgtatccaaagttggtaatgactcaggtggggaaatcttaactaaagtagctgatgatgc

SEQ ID NO: 151738 - DNA, 80 bp, synthetic construct
  source 1..80: mol_type = other DNA
acacagtacactcacaatgggaaaaggtagcccaagaaaactatacacaagtatacaatgaatttaaagaggtctatcct

SEQ ID NO: 151739 - DNA, 80 bp, synthetic construct
  source 1..80: mol_type = other DNA
gtcgccgtcacccgagcccgtgcaacagcagccgccggtcgagcccgtgcagcagcagccccagggacgcgggtctcacc

SEQ ID NO: 151740 - DNA, 80 bp, synthetic construct
  source 1..80: mol_type = other DNA
tctggcagatgcagcgcaagacagtcgtgtaacgccgtgtgatgcgcggctttacgtcgtagcggtagccgtttcagcag

SEQ ID NO: 151741 - DNA, 80 bp, synthetic construct
  source 1..80: mol_type = other DNA
atgatcacagagcaacttatggcaccacagtggttaaccgaatggggacactttgtgccagaattgttacgggtaagcaa

SEQ ID NO: 151742 - DNA, 80 bp, synthetic construct
  source 1..80: mol_type = other DNA
aagatttctgtttaaggatggcgcgtgacaccaatttgcacacacaaagcacaactataacacaaaatcctgtagaaaat

SEQ ID NO: 151743 - DNA, 80 bp, synthetic construct
  source 1..80: mol_type = other DNA
tgggtgtggattcaccagccaaattagtgagaaagttgccgagatttcaacgatggtgagtagtgttattactgaagagc

SEQ ID NO: 151744 - DNA, 80 bp, synthetic construct
  source 1..80: mol_type = other DNA
ggtgccgacaccggggtgccaagataatggattgagtaagcatggggctctgatcgggtccgccgggttctcaggtgtgt

SEQ ID NO: 151745 - DNA, 80 bp, synthetic construct
  source 1..80: mol_type = other DNA
tgggaatgtatcagtagggtataatcacacccatccaggtgaacaaggtagagaagtggtgccatcacgaaattctgatg

SEQ ID NO: 151746 - DNA, 80 bp, synthetic construct
  source 1..80: mol_type = other DNA
gcgccgagatacgtcaaaatagaaaaattcgcaggctcggtcgaccaggatcacgaaatcggcgtgaaaaacgccggagg

SEQ ID NO: 151747 - DNA, 80 bp, synthetic construct
  source 1..80: mol_type = other DNA
caacatcaccctcaggagacactaactcaaacgtatcatggacacaaaatgatttttcacaatttaaaaaacaaacagac

SEQ ID NO: 151748 - DNA, 80 bp, synthetic construct
  source 1..80: mol_type = other DNA
aaagtgctttcgggttggaagaaatgacgctggagaagctgcacatttttaagcaaaaagccagcgtgtttcttatcccc

SEQ ID NO: 151749 - DNA, 80 bp, synthetic construct
  source 1..80: mol_type = other DNA
tgcaaggggacaaccaggatagaacagtcgcagacacgcaaccgagcggtccgtcaaattctaaggagataccagcactc

SEQ ID NO: 151750 - DNA, 80 bp, synthetic construct
  source 1..80: mol_type = other DNA
ccaatgttgtcgtggcatatggaaggtggcccacatacctgagggatgatgaagcaaccgcggaagatcagccaacgcaa

SEQ ID NO: 151751 - DNA, 80 bp, synthetic construct
  source 1..80: mol_type = other DNA
ttcagcccaatattcttatcaaacagcagactcagtccagacttcccaggattttatatagatgttatctataatccagc

SEQ ID NO: 151752 - DNA, 80 bp, synthetic construct
  source 1..80: mol_type = other DNA
ttgacagtgaggaagtcagggagtactgcaaaggtcaagggtgggtcactgaggtgccatcctcaagcgtcgtgatagaa

SEQ ID NO: 151753 - DNA, 80 bp, synthetic construct
  source 1..80: mol_type = other DNA
caagtattacacacaaatgtcagttacaccgagtagtgaaaaccaacaaaaagatacggaaatactagatcatctatatt

SEQ ID NO: 151754 - DNA, 80 bp, synthetic construct
  source 1..80: mol_type = other DNA
ccttagtagagaatttcttaggaagagcagctctagtgatgatgaaagattttgagtacaagaaccatgtgactaccaca

SEQ ID NO: 151755 - DNA, 80 bp, synthetic construct
  source 1..80: mol_type = other DNA
tttgtcagcgagattcgcgagaaactcatacagatcatctacaatttttacacgtttttcatgtgcctctatgtgtacag

SEQ ID NO: 151756 - DNA, 80 bp, synthetic construct
  source 1..80: mol_type = other DNA
acccacactgggactctctgtatggaggcctagcatatggctttacatctacaagtactacagaaagcacaaaccaagcc

SEQ ID NO: 151757 - DNA, 80 bp, synthetic construct
  source 1..80: mol_type = other DNA
ccccagcgtagatcaaggcaatggggctaccggaaaccccaccggcaactgtgtacacatcccgcgtggaagccctgccc

SEQ ID NO: 151758 - DNA, 80 bp, synthetic construct
  source 1..80: mol_type = other DNA
tcgccaggtacaggggctgcacccttaaggtgtacagagacagacacgtagactacataatgacttttgacactatacct

SEQ ID NO: 151759 - DNA, 80 bp, synthetic construct
  source 1..80: mol_type = other DNA
ggtggatgggatggtcaatatgtctctggatacggtccagaacacggtggctagtgggtctgtacactcaaaggaagttc

SEQ ID NO: 151760 - DNA, 80 bp, synthetic construct
  source 1..80: mol_type = other DNA
caacttcacattaatggtcatccctttcgccccattagccagccaaggggggtcgacatacgtacccataacaattacaa

SEQ ID NO: 151761 - DNA, 80 bp, synthetic construct
  source 1..80: mol_type = other DNA
gagaggtagtatattgtgggagatgggcgcgagaaactcgtcttgtcagggaagaaagtagatgaattagaaaaagttag

SEQ ID NO: 151762 - DNA, 80 bp, synthetic construct
  source 1..80: mol_type = other DNA
ttgttgcattcgccgacatcagagacttgtacattgaggaggaggccatggaacagggaatcaccgattacatggaatct

SEQ ID NO: 151763 - DNA, 80 bp, synthetic construct
  source 1..80: mol_type = other DNA
catatggtgatgatgttattatttcatatccctttcctttggacccagaaaaaattgcacagcagggagtcacatatggt

SEQ ID NO: 151764 - DNA, 80 bp, synthetic construct
  source 1..80: mol_type = other DNA
gatcacgtacgagaaggccaatccaggcgaagcgggtggtaagttccaacccaccttcactccgtctagtgaggatggaa

SEQ ID NO: 151765 - DNA, 80 bp, synthetic construct
  source 1..80: mol_type = other DNA
aatagaagcactaaatgagtcattcctaaactgtcagttttaaaactccctgcttctcaggcctaaatacgtggtggggt

SEQ ID NO: 151766 - DNA, 80 bp, synthetic construct
  source 1..80: mol_type = other DNA
tactatataagtcgacttccgcgacgtgtgtggctctgcatcacactcttcaaggcctttcagattacaaaacgcaccta

SEQ ID NO: 151767 - DNA, 80 bp, synthetic construct
  source 1..80: mol_type = other DNA
gcgtatattacacaacctacaagaaccatggtactgacggggacaattttgcttactgggtgattaatacaagacaggtt

SEQ ID NO: 151768 - DNA, 80 bp, synthetic construct
  source 1..80: mol_type = other DNA
gaagacaccaaatagcaagatgcaagtgcaacacaggggtttactattgtagacacaaagacagaagctatccaatttgc

SEQ ID NO: 151769 - DNA, 80 bp, synthetic construct
  source 1..80: mol_type = other DNA
ctttacgaactcccagtggagcacccactaccttaccaattactgtttcaattgccccagacagatctgaattctctggc

SEQ ID NO: 151770 - DNA, 80 bp, synthetic construct
  source 1..80: mol_type = other DNA
taggtgcatccagttcagtcatcccagaatctttaattgaaaccaggtatgtagtgaatgataatactaatgaagaggca

SEQ ID NO: 151771 - DNA, 80 bp, synthetic construct
  source 1..80: mol_type = other DNA
atccttgacggtgccagttttacagggactgcccacaatgtccaccccagggtcaaaccagttcttgacttcagacgatt

SEQ ID NO: 151772 - DNA, 80 bp, synthetic construct
  source 1..80: mol_type = other DNA
atgcgattttctcgaatttatcgcagaaagaagaggctactgccactgctactggtgccaacagaaccgaaagaacaatt

SEQ ID NO: 151773 - DNA, 80 bp, synthetic construct
  source 1..80: mol_type = other DNA
gccactgctttgcttgcgagctaaaccgaaagcacaacctagtatgagctggtgcgctccacttgaaaatgcctataaga

SEQ ID NO: 151774 - DNA, 80 bp, synthetic construct
  source 1..80: mol_type = other DNA
tcttcagccactgcccttgtgactaaaatggttcactaccctcgtggaatcctgatcccatgtaaataaaaccgtgacag

SEQ ID NO: 151775 - DNA, 80 bp, synthetic construct
  source 1..80: mol_type = other DNA
gcttgagatgtcccaacttcttctttccagtacctgcccctaagccagttaataccaggagtgctgccctgtttgatgag

SEQ ID NO: 151776 - DNA, 80 bp, synthetic construct
  source 1..80: mol_type = other DNA
tggagaagaaggggctggaggccccgccgccgatggaggacctggagacgccgaaggagactacgcccaagacgagctag

SEQ ID NO: 151777 - DNA, 80 bp, synthetic construct
  source 1..80: mol_type = other DNA
atagaagttaacaccacacaaggcacacaagcaaactcattttcaaactgggcatctaaaaacccacatcaaaataccct

SEQ ID NO: 151778 - DNA, 80 bp, synthetic construct
  source 1..80: mol_type = other DNA
atcacctccacgtacccatcttccccttgtaggaccaagagcccatctgttccaggaccgcttgccacaagtgtggtcta

SEQ ID NO: 151779 - DNA, 80 bp, synthetic construct
  source 1..80: mol_type = other DNA
ctgtcatcgaacccgacgtctacgaacagtccatcatgtggactcggggcggtgacttctgtgacacctttgaggctctt

SEQ ID NO: 151780 - DNA, 80 bp, synthetic construct
  source 1..80: mol_type = other DNA
acttcctcggggtccggcgctacgccttcggctgcgccggacgcctcggacccccgctcgtgctgacacgctcgcgcgtg

SEQ ID NO: 151781 - DNA, 80 bp, synthetic construct
  source 1..80: mol_type = other DNA
gacttacaaattgttgacccacactccatggggccctccttcgcgttccacacatgggactacagacgcggactatttgg

SEQ ID NO: 151782 - DNA, 80 bp, synthetic construct
  source 1..80: mol_type = other DNA
taggccagagcgccgagtccgaggccagcctgggcggggcggttgcctggaggatagttggaggagaaggcaggttagcc

SEQ ID NO: 151783 - DNA, 80 bp, synthetic construct
  source 1..80: mol_type = other DNA
acactttggattccgtctcatggcatattacatcggccggctggtggtggaaattcccacaaacactacaggacatggga

SEQ ID NO: 151784 - DNA, 80 bp, synthetic construct
  source 1..80: mol_type = other DNA
atgttcacaccaaagatgctatttacagaaatgcccatcttgctactgccaatgacaatacaatcttgatagccctgaca

SEQ ID NO: 151785 - DNA, 80 bp, synthetic construct
  source 1..80: mol_type = other DNA
gctttgtaccctatagtgacaactttggaaggggcagaatgcctggaggcaacccagtgccctctctatggagcagagtg

SEQ ID NO: 151786 - DNA, 80 bp, synthetic construct
  source 1..80: mol_type = other DNA
gtagaagagctgcttctcaagggaggcactaagcatgcaggcaggggaattcaggccgctaatgactccgggatggacct

SEQ ID NO: 151787 - DNA, 80 bp, synthetic construct
  source 1..80: mol_type = other DNA
aacctaaccaatgcagatatgtactagaaaatctaccactttatgccatgtgtcatggctatgtagactacatagaaagt

SEQ ID NO: 151788 - DNA, 80 bp, synthetic construct
  source 1..80: mol_type = other DNA
aggtcagagcagtgcccccaacaatgtcaatgccatagttggaaatagaacaaacatcacaaccatgcccaatgatatcg

SEQ ID NO: 151789 - DNA, 80 bp, synthetic construct
  source 1..80: mol_type = other DNA
gcatacgtagacaccacatacaatccactaaatgacaaaggaaagggcaacaaaatatggttccagtaccacagcaaagt

SEQ ID NO: 151790 - DNA, 80 bp, synthetic construct
  source 1..80: mol_type = other DNA
cctgttacccttttagaaccacagcctggacacatgtgccagacgcctgggcctctaaggccctcgggtccccctggacc

SEQ ID NO: 151791 - DNA, 80 bp, synthetic construct
  source 1..80: mol_type = other DNA
caaggtgatgtgcagaatgcagttgaaggggctatggtcagagtggcggacacagtgcaaacctcagccacaaattctgg

SEQ ID NO: 151792 - DNA, 80 bp, synthetic construct
  source 1..80: mol_type = other DNA
gaacggtgtcgtatgcgccaccgctctcaacacgtaactacggccggtgaggttaagtgttagttgtcccacggtcacat

SEQ ID NO: 151793 - DNA, 80 bp, synthetic construct
  source 1..80: mol_type = other DNA
caagcactattttccaagtatgtgggtaacacgctacatgagcctgatgagtacatcagagaggcagctctgcattatgc

SEQ ID NO: 151794 - DNA, 80 bp, synthetic construct
  source 1..80: mol_type = other DNA
atagggagcatttgagtaacggtgaggtagcaaacacttttaccagcactaaatctagcaatacaaatggtgtgcaacag

SEQ ID NO: 151795 - DNA, 80 bp, synthetic construct
  source 1..80: mol_type = other DNA
cccccccctccacccgaaacgcttgcgcgtttcggaccttcggcgtcggggtgtgcgggagctttactaaacagactccg

SEQ ID NO: 151796 - DNA, 80 bp, synthetic construct
  source 1..80: mol_type = other DNA
atgtggaggggggtagcagcaatgatacgagttgtaatacaggttaccgtgtactggtgcgcgtgttacgatggcagtat

SEQ ID NO: 151797 - DNA, 80 bp, synthetic construct
  source 1..80: mol_type = other DNA
ctggttgtggaaagtcactggcctctaagatagttgccagagggctgacaaatgagagcaacgtgtactcactaccacct

SEQ ID NO: 151798 - DNA, 80 bp, synthetic construct
  source 1..80: mol_type = other DNA
tttatggagatgatgtcatcctgtctcttgataaagaaatagacccagagaaactgcaaggtatcatggcagattcattt

SEQ ID NO: 151799 - DNA, 80 bp, synthetic construct
  source 1..80: mol_type = other DNA
cactcctaccaaaacaaagatacacccaagtgtattctatgacgtgtttccaggcagtaaagaacctgcagtcctcagtg

SEQ ID NO: 151800 - DNA, 80 bp, synthetic construct
  source 1..80: mol_type = other DNA
ggtgaagaggtgtatgaggagttcagaaataaaataagatcagtcccgttgggaaaacaactctacaccccaccatattc

SEQ ID NO: 151801 - DNA, 80 bp, synthetic construct
  source 1..80: mol_type = other DNA
accttcttggcggctgctccatgattactataaaaatcttcgtaagcatgctgaatttcatcagccaattgaaacatttc

SEQ ID NO: 151802 - DNA, 80 bp, synthetic construct
  source 1..80: mol_type = other DNA
gtagtaggcgtggtggcggaggaccgccgccgggtaagcgtggccgctcatgagggtgagagtatttaaaaaatcgcgca

SEQ ID NO: 151803 - DNA, 80 bp, synthetic construct
  source 1..80: mol_type = other DNA
ttaacctctgcacaagatgatggacccctaggtaatgaaaaaccaaattatttcttaaactttagaactatgaatgtgga

SEQ ID NO: 151804 - DNA, 80 bp, synthetic construct
  source 1..80: mol_type = other DNA
tgaagcacaataattggggaatcgcaatagtaccattggccccattaaattttgctaatgagtcctccccagaaattcca

SEQ ID NO: 151805 - DNA, 80 bp, synthetic construct
  source 1..80: mol_type = other DNA
ctttttacttttatgactgcttatggtgacaatttgatattgttaccatttagcttgtcaaattaatcacacaaagcctt

SEQ ID NO: 151806 - DNA, 80 bp, synthetic construct
  source 1..80: mol_type = other DNA
atttagatcataatgagaaccagtacaatgcacctgggaaaaacttttctcaatggaaaattacaatcaaggagatggct

SEQ ID NO: 151807 - DNA, 80 bp, synthetic construct
  source 1..80: mol_type = other DNA
ctactactactggtaattctactacaccaatagtagtcaatgaagcaattccatgtgttaaagctaacaactgctcggga

SEQ ID NO: 151808 - DNA, 80 bp, synthetic construct
  source 1..80: mol_type = other DNA
aataaaataccaaaagcctgcaaataacacaacagaatactttagaacaaaagatgcacaatggggagatgccattcaca

SEQ ID NO: 151809 - DNA, 80 bp, synthetic construct
  source 1..80: mol_type = other DNA
gagtttctagtaagcttttgcgcggcgcttcgcttttcggggcggggacggcggtgttttcgggcgtactggtgttgacg

SEQ ID NO: 151810 - DNA, 80 bp, synthetic construct
  source 1..80: mol_type = other DNA
cggcatggcgcggccgtcgtttccttcgtcttcctcttcaccgtctcccaaggaacgcggtcgacgacgttccgcgaagt

SEQ ID NO: 151811 - DNA, 80 bp, synthetic construct
  source 1..80: mol_type = other DNA
atctttattggttcaaaagtgcacaacttttttctcttctgctgctactgagatattggataatgacttagtcaaattta

SEQ ID NO: 151812 - DNA, 80 bp, synthetic construct
  source 1..80: mol_type = other DNA
gcaacgacttctctgtccgattgttgaaagacaccccattcattgagcagagtgtgatgcttcaaggtgacgtggtggag

SEQ ID NO: 151813 - DNA, 80 bp, synthetic construct
  source 1..80: mol_type = other DNA
gggctattataaacggactccgagacgccattggacactgaggtggcatacagcaacgaaagtgagtggggccagacttc

SEQ ID NO: 151814 - DNA, 80 bp, synthetic construct
  source 1..80: mol_type = other DNA
taaagtgtctgaagtggagggcgacagacagctggctgaggcatatgagtctgtggcaaaaattataaatgataaccact

SEQ ID NO: 151815 - DNA, 80 bp, synthetic construct
  source 1..80: mol_type = other DNA
tgaatttcgagccaaaacccgtgacagaggttaggtcgagtattatcactactggagcttttggccaccattccggcgca

SEQ ID NO: 151816 - DNA, 80 bp, synthetic construct
  source 1..80: mol_type = other DNA
ggcaagactaagaaaactacaagaacaatggaaaaaagtatatccacaactacctacacaacaaccaaccgataccacac

SEQ ID NO: 151817 - DNA, 80 bp, synthetic construct
  source 1..80: mol_type = other DNA
agacgctccccagccagacggagaccgagacagaagcccccgaggaagaactccaagaagaagaagtcccggagggactc

SEQ ID NO: 151818 - DNA, 80 bp, synthetic construct
  source 1..80: mol_type = other DNA
ccagatgcaggagctgacccaggcgacgagatccaggcccagatgtccctctatcatggcgcagacattctccacggtgg

SEQ ID NO: 151819 - DNA, 80 bp, synthetic construct
  source 1..80: mol_type = other DNA
aatgaggcagtaaagcaattgcaattggccaataaacaaacactagctgtgattgacaccataagaggagagatcaataa

SEQ ID NO: 151820 - DNA, 80 bp, synthetic construct
  source 1..80: mol_type = other DNA
tgcccacaggtcaaacacgacaaaaattaatagaacaaatagaaaaaaatatgcaaaactacaacaaaaaactaaaacaa

SEQ ID NO: 151821 - DNA, 80 bp, synthetic construct
  source 1..80: mol_type = other DNA
gtggacgcgacaaaaaaccgcggcactagaaagaaaatgaaacaagtatgtttattaagcagcatgtggggctaataggg

SEQ ID NO: 151822 - DNA, 80 bp, synthetic construct
  source 1..80: mol_type = other DNA
tttcctatgccgttcggcatgcgtatactacaccacatacaaaacgcaaggggatcaggcgcatgacaaatatgcaagtt

SEQ ID NO: 151823 - DNA, 80 bp, synthetic construct
  source 1..80: mol_type = other DNA
gttgacgtgctctcggcgctgattcagaacgaggtgctcatcaactactgcgacatcgccgacaactgggtcatgtttat

SEQ ID NO: 151824 - DNA, 80 bp, synthetic construct
  source 1..80: mol_type = other DNA
accacacgttaatactgtcacggggaatcactatgtacaagagtccatgtctctttccagtttttcacttactgagactt

SEQ ID NO: 151825 - DNA, 80 bp, synthetic construct
  source 1..80: mol_type = other DNA
tggcgtgtggctggaacaggcgggcgaatgtgtaatcccggaaccggtaggcgacgctgcgcctgagggcgcccgtcagg

SEQ ID NO: 151826 - DNA, 80 bp, synthetic construct
  source 1..80: mol_type = other DNA
tacccgaatttgttgtggctgagcaggacgcaacacagaagcccaatacagctaaacacccggctcttgaggttacacaa

SEQ ID NO: 151827 - DNA, 80 bp, synthetic construct
  source 1..80: mol_type = other DNA
atccaaccccgcagctgtagtatgcaagccagcatatgtgcagtcgtaatgggtaactgcgggacggaaccgactacttt

SEQ ID NO: 151828 - DNA, 80 bp, synthetic construct
  source 1..80: mol_type = other DNA
aactaaatggaagttgcagaaaatacaattgccccaaaaggaggtgtggacagtcaatgacatccaaaagctagtaggtg

SEQ ID NO: 151829 - DNA, 80 bp, synthetic construct
  source 1..80: mol_type = other DNA
tgtcagaccacttcgggctcgcgggggtcgagaaatttgctaaacagactccgagttgccatttgacactggagatgtga

SEQ ID NO: 151830 - DNA, 80 bp, synthetic construct
  source 1..80: mol_type = other DNA
gccagtgatgggagagacagatgctacatgaatcattgcaacacatcagtcatcacagaatcatgcgacaagcactactg

SEQ ID NO: 151831 - DNA, 80 bp, synthetic construct
  source 1..80: mol_type = other DNA
caccccgtccccagcgccggaccgtgaacaaacaccgcagaactccttgacgcaccggaagcgcgcaggaagcgccgtgg

SEQ ID NO: 151832 - DNA, 80 bp, synthetic construct
  source 1..80: mol_type = other DNA
ctactatgtagatggatcctgcaacagaaatagcaaagaaggtaaagcaggatatatcacagatcgaggaaaagaaaagg

SEQ ID NO: 151833 - DNA, 80 bp, synthetic construct
  source 1..80: mol_type = other DNA
tgcctcgaccaccacgcctatgcccatacctcaagtctagtaatgtcaattttgacccaactaacataactgattcaaga

SEQ ID NO: 151834 - DNA, 80 bp, synthetic construct
  source 1..80: mol_type = other DNA
tatggccacgaggatgatggtgaaggctccgaaggggtttttgaggaaggtggcaacgccttcgaccacggaggccaccg

SEQ ID NO: 151835 - DNA, 80 bp, synthetic construct
  source 1..80: mol_type = other DNA
gaaaatcatcacagaaaaaagtgtcagagagtatggatttcctaccatacataccccaagtaaaacaaagttgcaaccca

SEQ ID NO: 151836 - DNA, 80 bp, synthetic construct
  source 1..80: mol_type = other DNA
tgtgtaactttccaagtgttgaaagacatgtacaatgctgtaataggttacagctcaccacaaacaaccgtcgactctgt

SEQ ID NO: 151837 - DNA, 80 bp, synthetic construct
  source 1..80: mol_type = other DNA
caggacaaattatactaaacactgataaccaaggaaacatgtggtccaaggtacaaaacacaacacaactgtcagcacag

SEQ ID NO: 151838 - DNA, 80 bp, synthetic construct
  source 1..80: mol_type = other DNA
acctcatcagcggcgttctgagacgctgtttgtgtcaccgcggcgcgtggagtcgacggcctccgaggggtggtggacac

SEQ ID NO: 151839 - DNA, 80 bp, synthetic construct
  source 1..80: mol_type = other DNA
atactcaagaggtgccagcgctcaccgcggttgagacaggggcttcaggacaagcaataccctctgacgtgattgaaacc

SEQ ID NO: 151840 - DNA, 80 bp, synthetic construct
  source 1..80: mol_type = other DNA
caacccaggggaaaaaggcggaacatttgtctcaacgttcacaccggatactagtgccgcaccaaagagggagttccaac

SEQ ID NO: 151841 - DNA, 80 bp, synthetic construct
  source 1..80: mol_type = other DNA
agggttgtccaatagtgaaactcccattgaatttgacagaacaagcacaacgccagaggttggagtagtacaaaaggcag

SEQ ID NO: 151842 - DNA, 80 bp, synthetic construct
  source 1..80: mol_type = other DNA
attgccagttatgctttcttaaaaagggacttgggatatgttatgaacaatccagaagaagaagtccgaagaaggctaag

SEQ ID NO: 151843 - DNA, 80 bp, synthetic construct
  source 1..80: mol_type = other DNA
aactggttacagctagtatatgttcacaaagaatcagatggttggattaaaaagttcacagagatgtgcaatgcagctag

SEQ ID NO: 151844 - DNA, 80 bp, synthetic construct
  source 1..80: mol_type = other DNA
catcaacttaaaagcggttttccgcgatttaccatcccttgcactggtctggggtcagcatactacatgttctatgatgt

SEQ ID NO: 151845 - DNA, 80 bp, synthetic construct
  source 1..80: mol_type = other DNA
cgtcgttcccagtaccgatagattccgccgctcggtacaagttgtcgacccgctctccatggctcctcagtggatcttcc

SEQ ID NO: 151846 - DNA, 80 bp, synthetic construct
  source 1..80: mol_type = other DNA
agaaaggcatagaccttaacaaagaagattcaaaaggtccaatgaaagatcccctttacatgatggatggtacattaatt

SEQ ID NO: 151847 - DNA, 80 bp, synthetic construct
  source 1..80: mol_type = other DNA
cagacttcgccatagggcctttatcttctcgccattggatagtgtagggggtcgccataggcttcggcctcattttcagg

SEQ ID NO: 151848 - DNA, 80 bp, synthetic construct
  source 1..80: mol_type = other DNA
ttgatagaacaagcacaacaccagaggttggagtagtacaaaaggcagtgtacaacgcaggtatgggagttggtgttggg

SEQ ID NO: 151849 - DNA, 80 bp, synthetic construct
  source 1..80: mol_type = other DNA
gagcagtagctcgagtggcggacacaatgcccacagggcccagaaactcggaaagcattcccgcactgacagcagcagag

SEQ ID NO: 151850 - DNA, 80 bp, synthetic construct
  source 1..80: mol_type = other DNA
cggcgcgacacgtcgtaaacatggcccatatgaaaaagagcatgccgaacgaccagctgatgccggtgcggtattcgttg

SEQ ID NO: 151851 - DNA, 80 bp, synthetic construct
  source 1..80: mol_type = other DNA
aacaggtagtgtactatacttttggtcttagcggattaaataaaagtctaaaactaacaatcacacatgtgcatttacaa

SEQ ID NO: 151852 - DNA, 80 bp, synthetic construct
  source 1..80: mol_type = other DNA
cctcggaggaggacccggcggagacgacgagggagctcctccagcgaaagctccgagagcagcgagcactccagttccag

SEQ ID NO: 151853 - DNA, 80 bp, synthetic construct
  source 1..80: mol_type = other DNA
agaaccaggtttcaaaaagctacacaaaccgtcctgccacagtatgccacacttatgcctacagcactatatgagtacca

SEQ ID NO: 151854 - DNA, 80 bp, synthetic construct
  source 1..80: mol_type = other DNA
cccagacaaagcggatctgcgagtggaatttccctcattacccccgtgtgtcggcatacagtgcgctgcataagaacacg

SEQ ID NO: 151855 - DNA, 80 bp, synthetic construct
  source 1..80: mol_type = other DNA
agtaagggaggaggtggcctccgcgtaggccgctgccgactccaccgcccgcgtgcccagtacgtggaggtagtcacggg

SEQ ID NO: 151856 - DNA, 80 bp, synthetic construct
  source 1..80: mol_type = other DNA
tgtgtctgtttgattccccggggaaaagaggaagaagtccccaggggacggcagacacgcgaagagcaacgcccggattc

SEQ ID NO: 151857 - DNA, 80 bp, synthetic construct
  source 1..80: mol_type = other DNA
agaacatcaattagcgtcacatgaaggtggcaatgtgtcagtcaaatacaaacttacacacccaggtgaaggtggcatcg

SEQ ID NO: 151858 - DNA, 80 bp, synthetic construct
  source 1..80: mol_type = other DNA
gagaattttcttgggagggcggcattggtaatgatgaaagactttgagtataaaaaccacgttaccagcacaaaaaaagt

SEQ ID NO: 151859 - DNA, 80 bp, synthetic construct
  source 1..80: mol_type = other DNA
atttgacatgcccctgtgggcagcattctttggatatgcagagttctgctccaaaagcacaggagacacagccatagcat

SEQ ID NO: 151860 - DNA, 80 bp, synthetic construct
  source 1..80: mol_type = other DNA
aatgcagttgaacagttaaaatctggtggtaacttctatacaggacaaaacccagtatttggcatgagttcatacaaacc

SEQ ID NO: 151861 - DNA, 80 bp, synthetic construct
  source 1..80: mol_type = other DNA
aacagctaccatccaaggggatagagtggcagatgtgatcgagagctctattggagacagtgtaagtaaggcactcactc

SEQ ID NO: 151862 - DNA, 80 bp, synthetic construct
  source 1..80: mol_type = other DNA
gacaattataaggacaacctgggcaagctagatgtaccaaaagcatttaaaccatgtgatatcgacacaaaaataggtaa

SEQ ID NO: 151863 - DNA, 80 bp, synthetic construct
  source 1..80: mol_type = other DNA
tagggggtaatggtaaagtgggatattgtgcagctttacttaggaaatattttgcagaatgccagggtgaaatagtctca

SEQ ID NO: 151864 - DNA, 80 bp, synthetic construct
  source 1..80: mol_type = other DNA
aatagcgccaccatcatactgccgtggatgaattgtgctcccatggattttgcactaagacacaataattggactattgg

SEQ ID NO: 151865 - DNA, 80 bp, synthetic construct
  source 1..80: mol_type = other DNA
acacagtgcatacaacaaaccaacaagtagaggactagaaatgcacacaggaatgtacagcagcatttttttaagcccaa

SEQ ID NO: 151866 - DNA, 80 bp, synthetic construct
  source 1..80: mol_type = other DNA
ttctgctcaccacaaactgacaacatttgtgtaaccttccagatattgcatgaggtttaccacaattacataagcataac

SEQ ID NO: 151867 - DNA, 80 bp, synthetic construct
  source 1..80: mol_type = other DNA
cagagtaacgcgtgtttcttgggatgtaggcccggagggatttgcggggtctgccggaggcagtacgggtacagatttcc

SEQ ID NO: 151868 - DNA, 80 bp, synthetic construct
  source 1..80: mol_type = other DNA
ccaacctattcacaaaggagaaaaatactacagaccatgaggtccaaaccatcgtacacaacgctgggatgggctgtcgc

SEQ ID NO: 151869 - DNA, 80 bp, synthetic construct
  source 1..80: mol_type = other DNA
ggtcacccttacgtcaaccctcgccctgattaggatccacggaagcccgtgggcgtgtataaaatcaatgaccgcatcca

SEQ ID NO: 151870 - DNA, 80 bp, synthetic construct
  source 1..80: mol_type = other DNA
aggattccacagaagattgtaaacagtccatatcaccagatgaattgggattgacttcagcacaagatgatggaccactt

SEQ ID NO: 151871 - DNA, 80 bp, synthetic construct
  source 1..80: mol_type = other DNA
tgataaacacgtaggtggtggtaaaacttcggcccgcgatctgaacgtggagacgcacgacagtatacgtgccgttgagg

SEQ ID NO: 151872 - DNA, 80 bp, synthetic construct
  source 1..80: mol_type = other DNA
ccgctcgggcaacaaccgcccccccccgtgatttctaccgggagtgccatgtcttccagtcacacggatccatcagtaac

SEQ ID NO: 151873 - DNA, 80 bp, synthetic construct
  source 1..80: mol_type = other DNA
acttccagattttggggccccagtacaaaaaacaccttagtattagctccactatggatgctactaacaaaactcattat

SEQ ID NO: 151874 - DNA, 80 bp, synthetic construct
  source 1..80: mol_type = other DNA
ttgtctaatagcgaaaaccccattgaatttgagagaacaagcacaaccccggaagtgggagtggtgcaaaaggcagtgta

SEQ ID NO: 151875 - DNA, 80 bp, synthetic construct
  source 1..80: mol_type = other DNA
aggaaattaaaaacgtaccacttaaagcagccgaattatatgaacaacaaaccaaaaacttactatctacaacatttaca

SEQ ID NO: 151876 - DNA, 80 bp, synthetic construct
  source 1..80: mol_type = other DNA
aaataaagatcccagattggaagttgatcttaaagagagtgttttatccaaatacaagggcaacagaggttgcaagatga

SEQ ID NO: 151877 - DNA, 80 bp, synthetic construct
  source 1..80: mol_type = other DNA
cagacaaattgttcaacgattggaaaatcagtttgtcaagtttggtccaactcaggaaaaaactggagcttttcacatat

SEQ ID NO: 151878 - DNA, 80 bp, synthetic construct
  source 1..80: mol_type = other DNA
aaagttgtgcggccaagataatgctaaggagttttctagagagggacccactatttcagaaggtgcgaccgatgtccaaa

SEQ ID NO: 151879 - DNA, 80 bp, synthetic construct
  source 1..80: mol_type = other DNA
acgtggccgccggcaccgacggtgcgttacttctacccattgagcgcggagcggtggtttcgtcgccgtcgtcgacgtcg

SEQ ID NO: 151880 - DNA, 80 bp, synthetic construct
  source 1..80: mol_type = other DNA
attccgaggacggcgtctctgtctggcgtcagcacctggtttttttactcggaggccacggccgccgtgtacagttagaa

SEQ ID NO: 151881 - DNA, 80 bp, synthetic construct
  source 1..80: mol_type = other DNA
ccattacgccgcccaactgttctcccttgatataaatccacaaccaattactttggatcaagctgcctatggcatggaaa

SEQ ID NO: 151882 - DNA, 80 bp, synthetic construct
  source 1..80: mol_type = other DNA
atgacgcacttttctccaaatataaaggcaacaatcagtgcaccatgaatgatcacatcaaagtggccatttcccattat

SEQ ID NO: 151883 - DNA, 80 bp, synthetic construct
  source 1..80: mol_type = other DNA
ctggaaacaatacaaaaaaacagacaaaataaatacagcaacaaacaaaaaatatgagaacatttccagtttatggggag

SEQ ID NO: 151884 - DNA, 80 bp, synthetic construct
  source 1..80: mol_type = other DNA
tggacagtgccgcatcagacctcaacaagccgatcttctgcctttccctgtcgccagccagtgatcaaaggttacaatac

SEQ ID NO: 151885 - DNA, 80 bp, synthetic construct
  source 1..80: mol_type = other DNA
agatcttacttctctgagacacaaggtcaaataactagttcaaaacccacaagtgaatgtggtttaccaagtatccatac

SEQ ID NO: 151886 - DNA, 80 bp, synthetic construct
  source 1..80: mol_type = other DNA
aatgcgctacttcaaggagacgtggtggaggcaattgagaacgcagttgccagggtagcggacacaatcagcagtggtcc

SEQ ID NO: 151887 - DNA, 80 bp, synthetic construct
  source 1..80: mol_type = other DNA
cttctccacgaacagaccatcagaaacccttgtccaacgaacgcacatccctcgaccggtagacagcctagagatgtaca

SEQ ID NO: 151888 - DNA, 80 bp, synthetic construct
  source 1..80: mol_type = other DNA
gacacttgtaaacaacagaaccccacttcagcaactggtaacaaatactatcaagtatctagcctatggggagaccatgt

SEQ ID NO: 151889 - DNA, 80 bp, synthetic construct
  source 1..80: mol_type = other DNA
tgtctctggccgttgttttgcgaacttcctctggcggggtgtgtcaggggtgcggtgtgcgcggctggatggaagccgtg

SEQ ID NO: 151890 - DNA, 80 bp, synthetic construct
  source 1..80: mol_type = other DNA
gaagacgtctgtgtctgcctgattccccggggaaaagaggaagttcccaggggacggcagcgacaagacgcgcaaaagag

SEQ ID NO: 151891 - DNA, 80 bp, synthetic construct
  source 1..80: mol_type = other DNA
aacatacccacccaggtgatcaaggacatgagcttaaagtttcagttgatagaagtgaccatcaaccagatgaggatccc

SEQ ID NO: 151892 - DNA, 80 bp, synthetic construct
  source 1..80: mol_type = other DNA
cctgtttccgaggtttactacaacggcgtccccctccttaccccaagacgtttccagtttagatttcgcattgttcccgc

SEQ ID NO: 151893 - DNA, 80 bp, synthetic construct
  source 1..80: mol_type = other DNA
gtggcctactactgtggccgtcgcatcaggctgcatgtgctcttccccccggccatctttgccggaacggtgaccttcga

SEQ ID NO: 151894 - DNA, 80 bp, synthetic construct
  source 1..80: mol_type = other DNA
tggacatgttgaacctttatccaagcgtccagagttacgtaaagctgtaacacaaggtccagaacacgagttcatgtatg

SEQ ID NO: 151895 - DNA, 80 bp, synthetic construct
  source 1..80: mol_type = other DNA
cactagcactgcttggatgctctggatcaccatggcgttatttaaaagacaaggtttgcaagtggttgggtattgaccca

SEQ ID NO: 151896 - DNA, 80 bp, synthetic construct
  source 1..80: mol_type = other DNA
cgaacgcctactcacatttctatgatggcttttccaaggtccccctaaaagatcaggcagaagcattaggcgactcactc

SEQ ID NO: 151897 - DNA, 80 bp, synthetic construct
  source 1..80: mol_type = other DNA
tctgggaaagctaacactatggatatgtacaggattccactaaacaccacaggcacaacagacccaattttctgtttaag

SEQ ID NO: 151898 - DNA, 80 bp, synthetic construct
  source 1..80: mol_type = other DNA
acatgggtgtgtttgggcaaaacatgtttttccatgcgttggggaggacagggtacactatccatgtgcagtgcaatgcc

SEQ ID NO: 151899 - DNA, 80 bp, synthetic construct
  source 1..80: mol_type = other DNA
agaagaaagatttgataccaaagaatagagatttgtcaaaattaaaaggtgcaattgaaaaatacggtctggatttgcca

SEQ ID NO: 151900 - DNA, 80 bp, synthetic construct
  source 1..80: mol_type = other DNA
aggaccagcccccatcccatttgcagcagcccagcaaaggaagccaattagatgctggaattgtggaaaggaagggcact

SEQ ID NO: 151901 - DNA, 80 bp, synthetic construct
  source 1..80: mol_type = other DNA
actgacaagttaacctccaaagtgatcaagtggttggtacgcatcattagtgctcttactatcatggttagaaatagtgc

SEQ ID NO: 151902 - DNA, 80 bp, synthetic construct
  source 1..80: mol_type = other DNA
tgtgccaataagaaccgtgtcaggtattctcttccattcacagcctatcaataaaagacctaaacaagcttggtgctggt

SEQ ID NO: 151903 - DNA, 80 bp, synthetic construct
  source 1..80: mol_type = other DNA
ggaagggattttttatagtgaaagaagacataggatattagatacatattttgagaatgagagaggtatagttggtggat

SEQ ID NO: 151904 - DNA, 80 bp, synthetic construct
  source 1..80: mol_type = other DNA
tggaaccccactgttgtaaagaaatgcgtgatccgcggatacatgcccctccttatatgtggaacgggcacaaccgggac

SEQ ID NO: 151905 - DNA, 80 bp, synthetic construct
  source 1..80: mol_type = other DNA
taaaaaccacattgctaggtgaaatagcacaatactacacacattggtcaggttcaattaggatgtcattcatgtacact

SEQ ID NO: 151906 - DNA, 80 bp, synthetic construct
  source 1..80: mol_type = other DNA
tgacacaccatctaccacacatgggcatgatgccaagggttattttaagtggtctgcaactactaacccaatgtatattg

SEQ ID NO: 151907 - DNA, 80 bp, synthetic construct
  source 1..80: mol_type = other DNA
aaacatggcaactgccaccaaggcatgcgtggactgccacaagccagcaaacttttccagttgttgccctctagtgtgtg

SEQ ID NO: 151908 - DNA, 80 bp, synthetic construct
  source 1..80: mol_type = other DNA
agcaggtggtctctaaaagtactgtacgaagaaaaccagagacaccacaacttctggacagccagcaacaacgacctaga

SEQ ID NO: 151909 - DNA, 80 bp, synthetic construct
  source 1..80: mol_type = other DNA
gcgttatcatgtgttgcttgaggagataattgaacgaaattcagagacatttacagaaacttggaacagatttataacac

SEQ ID NO: 151910 - DNA, 80 bp, synthetic construct
  source 1..80: mol_type = other DNA
ctaatgatcctgcacagtacccagctttttcagttactaacccaggaaaaaatgggagagaattcacagacccgtacgtc

SEQ ID NO: 151911 - DNA, 80 bp, synthetic construct
  source 1..80: mol_type = other DNA
ctttactgtccagggtaactcacaacatgagaaaattaacaaatttactgaatggctatatgggtccagtgtccactatc

SEQ ID NO: 151912 - DNA, 80 bp, synthetic construct
  source 1..80: mol_type = other DNA
cacagttcaaaggtcatcctcggcggaacttacacaaaatggtggtcaactccttccgggtcaaaggtcactgctacgtc

SEQ ID NO: 151913 - DNA, 80 bp, synthetic construct
  source 1..80: mol_type = other DNA
tcaaggtgaaattgtgaacaagtgcaaagtacaggatgttggccttaaacccatcaacacaccagaacattccaagttgt

SEQ ID NO: 151914 - DNA, 80 bp, synthetic construct
  source 1..80: mol_type = other DNA
ctactgaagtcaaaataagagtttatcacagggcaaaacatgttcgtgcctggatcccaagaccacctagagcacttcca

SEQ ID NO: 151915 - DNA, 80 bp, synthetic construct
  source 1..80: mol_type = other DNA
tttacaagtgtcagcaactcaataacagataaattaacatcaaagatagttaaatggttaattagaattattagtgcttt

SEQ ID NO: 151916 - DNA, 80 bp, synthetic construct
  source 1..80: mol_type = other DNA
ttgcaaaactagaacactcaccgcaggcatccacttacgtccccattacggtgactgtcgcacccatgtgtgctgaatac

SEQ ID NO: 151917 - DNA, 80 bp, synthetic construct
  source 1..80: mol_type = other DNA
gagaagtacttaaaggaccaggcacagctaaattcatggggatgtacgtttaggcaggtctgccacactactgtaccttg

SEQ ID NO: 151918 - DNA, 80 bp, synthetic construct
  source 1..80: mol_type = other DNA
gtcaggctactcagagatactacacacatttctcaaaccgctctcattgcagcaactcaagggattgacgacgtaatcga

SEQ ID NO: 151919 - DNA, 80 bp, synthetic construct
  source 1..80: mol_type = other DNA
ttccaaaccttcgtaacgttagtaagtatgctgtttcattgtctagccaaactgattttgctaaggaaatatttgccatt

SEQ ID NO: 151920 - DNA, 80 bp, synthetic construct
  source 1..80: mol_type = other DNA
cattcttcctgttaacgggaagaataagagttgggcaaaccccgggggccgcgctctcccacccagccccgctcctcacc

SEQ ID NO: 151921 - DNA, 80 bp, synthetic construct
  source 1..80: mol_type = other DNA
cagggttacggcgtcaaacaggtctttcttggtggcgcccgagacccacatctggtatacacccgtctcgtggtacgaag

SEQ ID NO: 151922 - DNA, 80 bp, synthetic construct
  source 1..80: mol_type = other DNA
ggaagcacgtcgctggacataggtctgagagacaggattcgtaaactgatggaggacaaaaagaacccgacacctatcat

SEQ ID NO: 151923 - DNA, 80 bp, synthetic construct
  source 1..80: mol_type = other DNA
cagcactatgaggttcagcctctacattttgtttgaggagcgcctcagacacatgaacttctggaccagaagcaacgata

SEQ ID NO: 151924 - DNA, 80 bp, synthetic construct
  source 1..80: mol_type = other DNA
aggttttaaactatttctctacatgggcagggagtatcactctgagttttctatgtgtttgtgacagttttagcacaggg

SEQ ID NO: 151925 - DNA, 80 bp, synthetic construct
  source 1..80: mol_type = other DNA
gtacgcgacctgtctcattgctacctcggatgtttaagaaggaacgttcatctgcgtcacagggtctgatgaagctgcca

SEQ ID NO: 151926 - DNA, 80 bp, synthetic construct
  source 1..80: mol_type = other DNA
tggaaaagttgtgccacaggtacaggcttgagagcttagtgtccgggaatagggtcttgtggtaggtgttgaggaatttc

SEQ ID NO: 151927 - DNA, 80 bp, synthetic construct
  source 1..80: mol_type = other DNA
caacactttcttatccaaaatccgaaccgtgccggtgggtagaaccttgagtttaccaccttacagttacttacgccacc

SEQ ID NO: 151928 - DNA, 80 bp, synthetic construct
  source 1..80: mol_type = other DNA
cacttacaatccatttaatgacaaaggcataggaaacaaagtgtggatagactggtgcaccaaaaatgactctcagtaca

SEQ ID NO: 151929 - DNA, 80 bp, synthetic construct
  source 1..80: mol_type = other DNA
ggaatttcaccaattaacacccccaacaagaccaaattacaacccagtgtattccatgatattttcccaggtaccaagca

SEQ ID NO: 151930 - DNA, 80 bp, synthetic construct
  source 1..80: mol_type = other DNA
cccaactaaaagttgactatttaaataaattaaagcagctaaatttgttagaaaaacagatagaaacaatcagattagcc

SEQ ID NO: 151931 - DNA, 80 bp, synthetic construct
  source 1..80: mol_type = other DNA
atactgagtttcgtcagcgcatgccctgactttagcgtgcgcctactaagggacaccacccacattggacagacagttat

SEQ ID NO: 151932 - DNA, 80 bp, synthetic construct
  source 1..80: mol_type = other DNA
ccgaggccggttccccgccccttccccgggcttcagagccccggatgtccccccgagagcctccccctcgcggcgagagg

SEQ ID NO: 151933 - DNA, 80 bp, synthetic construct
  source 1..80: mol_type = other DNA
ccgtgttcaacacctttaagactgaagagcaccttaagtgccctgcagcaaaagagttgaaacaaacagaccctaatgat

SEQ ID NO: 151934 - DNA, 80 bp, synthetic construct
  source 1..80: mol_type = other DNA
ctcacgaaaatgcaatcagcgccaacaatggaggtgtgatcaagtatttcaatattaactactataaggactctgctagc

SEQ ID NO: 151935 - DNA, 80 bp, synthetic construct
  source 1..80: mol_type = other DNA
acattggtaaatgtttaaatctacctgaatacagtgttcttaggagacgctggctggacttattttagactatatatata

SEQ ID NO: 151936 - DNA, 80 bp, synthetic construct
  source 1..80: mol_type = other DNA
tttccttgcacgctcagcatgcgtgtatttcttagaatacaagactggcacaaaatctgattccaatgccttcaacaact

SEQ ID NO: 151937 - DNA, 80 bp, synthetic construct
  source 1..80: mol_type = other DNA
gtattttatacaaaataggtttagtattgggtatacatgtgggaggaaatggaagggatggtttttctgctatgttactt

SEQ ID NO: 151938 - DNA, 80 bp, synthetic construct
  source 1..80: mol_type = other DNA
caccacaaactgacaacatttgtgtaaccttccaggtacttgcaccaatctataacgagttcctgtctataaccgcaaag

SEQ ID NO: 151939 - DNA, 80 bp, synthetic construct
  source 1..80: mol_type = other DNA
tgaggatgcgagatcaaacttcctatcatcaaatggtgttatcactgtaccagctggtgagcaaatgactttatctgtcc

SEQ ID NO: 151940 - DNA, 80 bp, synthetic construct
  source 1..80: mol_type = other DNA
aatgctgcaatgggggttggtgtgggaaatttgaccatatttccacatcaatggatcaacttgcgcacaaacaatagtgc

SEQ ID NO: 151941 - DNA, 80 bp, synthetic construct
  source 1..80: mol_type = other DNA
atcagtgctttgtttgtgacctttcatgatttgtttaaacaaattttcttaaaatttctgaggtttgtttatttctgagg

SEQ ID NO: 151942 - DNA, 80 bp, synthetic construct
  source 1..80: mol_type = other DNA
caggggttcctcctccctggcaagtaaaatttagcctaaaatttcaataaagtacagtttcaaattagctgggccgtggg

SEQ ID NO: 151943 - DNA, 80 bp, synthetic construct
  source 1..80: mol_type = other DNA
tatgccctacatcaatgcagtcccattcgactcggcgattaaccataataatttcactctagtagtgatacccatcagcc

SEQ ID NO: 151944 - DNA, 80 bp, synthetic construct
  source 1..80: mol_type = other DNA
acgagtactgcacctgcaagcactgggatcgccctcccagaaccaatcacctagacatccccacttatccctggatgccc

SEQ ID NO: 151945 - DNA, 80 bp, synthetic construct
  source 1..80: mol_type = other DNA
gttactacacccaatgaaggacaaggtgcaggcacatactttaacacctttaaaactgaagaacacatatttgatcccaa

SEQ ID NO: 151946 - DNA, 80 bp, synthetic construct
  source 1..80: mol_type = other DNA
tcggggctccattgccccatccagttggtggtgccgaaatcgtgatgaggagtggcaggttgttggtcaagggatgctta

SEQ ID NO: 151947 - DNA, 80 bp, synthetic construct
  source 1..80: mol_type = other DNA
aaaagtacaaatagaaggagttagcaaactacatcactcagtatttgctcacaatgtaggcctatttagtagcagttttt

SEQ ID NO: 151948 - DNA, 80 bp, synthetic construct
  source 1..80: mol_type = other DNA
aatttaattgagatgtgtcaagttgatactttgatacccataaataacactgcatctaatattaggaacgttagtatgta

SEQ ID NO: 151949 - DNA, 80 bp, synthetic construct
  source 1..80: mol_type = other DNA
actagcactacttggatgctccggttcaccatggcgctatctaaaagataaagtatgcaaatggttaggtattgacccac

SEQ ID NO: 151950 - DNA, 80 bp, synthetic construct
  source 1..80: mol_type = other DNA
aggggagtcaccttctggttctacagagaccaaaagacagactatatagtacagtggagcagaaatcctccctttaaact

SEQ ID NO: 151951 - DNA, 80 bp, synthetic construct
  source 1..80: mol_type = other DNA
gcaaccgggagcagacactgtgatggaaagaacactcctgggggagatcttgaattactatgctaattggtctggcagca

SEQ ID NO: 151952 - DNA, 80 bp, synthetic construct
  source 1..80: mol_type = other DNA
gggtaacatctatcggagatggatccaattgggcctacaaaaatgtgttagaatgtacaatccaactaatatcttagata

SEQ ID NO: 151953 - DNA, 80 bp, synthetic construct
  source 1..80: mol_type = other DNA
ttaattcacccaacatagaagcctgtggttatagcgaccgcgtccagcaattgaccttaggaaattcaactattaccact

SEQ ID NO: 151954 - DNA, 80 bp, synthetic construct
  source 1..80: mol_type = other DNA
cgagaaacgcagcaagtgcgttctaactgacatacctttgtgggccgccctatactgctaccacaactttgtagaggagg

SEQ ID NO: 151955 - DNA, 80 bp, synthetic construct
  source 1..80: mol_type = other DNA
agtcaacaacaacccaagggacgtcaattctatcagagcttaccaaataccagtttcgacaggtacccacgcctcaagca

SEQ ID NO: 151956 - DNA, 80 bp, synthetic construct
  source 1..80: mol_type = other DNA
gccacgtggtggaggggcgaggcgttgtggcacaaacaaaacaggcggaagccctcgtcaggccgcgagaggatggcatc

SEQ ID NO: 151957 - DNA, 80 bp, synthetic construct
  source 1..80: mol_type = other DNA
acaccactatgccgagatgaacttgtggccgtggcgcccggcgccgccagcaccagtttcgcctcgccgcctatcacggt

SEQ ID NO: 151958 - DNA, 80 bp, synthetic construct
  source 1..80: mol_type = other DNA
taccaacctaactcagggttcccccgtttcaccatcccctttacgggcttggcatcagcttattatatgttctatgatgg

SEQ ID NO: 151959 - DNA, 80 bp, synthetic construct
  source 1..80: mol_type = other DNA
aataacacttatgtcagggcaaagatttcactcccggccaatcattaataaaaggcccaggcaagcatggtgctggttca

SEQ ID NO: 151960 - DNA, 80 bp, synthetic construct
  source 1..80: mol_type = other DNA
tggccagggtggattccttcatgcctataaacaacctgccacaaactcaagacgtagggatctacaatattacattgact

SEQ ID NO: 151961 - DNA, 80 bp, synthetic construct
  source 1..80: mol_type = other DNA
gcaggagacgccgaagaacaagagtaaggaggcggcgcggtggtcggtgggggcgcagacgcgggcgacgcacttttaag

SEQ ID NO: 151962 - DNA, 80 bp, synthetic construct
  source 1..80: mol_type = other DNA
ctcatactgagacagtggcagcccgccactagacgcaggtgcaccatcaccgggtacctgcccatagttttctgtggaca

SEQ ID NO: 151963 - DNA, 80 bp, synthetic construct
  source 1..80: mol_type = other DNA
tacccatcactgtcaccgtagctccaatgtctgctgaatacaatgggctgcggcttgccagtacgcaaggctttccaacc

SEQ ID NO: 151964 - DNA, 80 bp, synthetic construct
  source 1..80: mol_type = other DNA
tgctaagacaaaggcattacttcaaacacagaggtgacatcaaaaacttgggccccagtgatatgtttgttcacaccgtt

SEQ ID NO: 151965 - DNA, 80 bp, synthetic construct
  source 1..80: mol_type = other DNA
tttcctggaagagattcaagaggtcgtaatgctcatgccggataaggcctcggaccaggcgcatactggccctgggcagc

SEQ ID NO: 151966 - DNA, 80 bp, synthetic construct
  source 1..80: mol_type = other DNA
aactggaccaataggtgataaccatccaggttatcaacggtcaagcacttctgtctccccggcataggggtgttaggctt

SEQ ID NO: 151967 - DNA, 80 bp, synthetic construct
  source 1..80: mol_type = other DNA
aacaatctatcactactgatcatcccacttgtacctctacgcccaggcaacggtagtgtcaacatggtaccaataactgt

SEQ ID NO: 151968 - DNA, 80 bp, synthetic construct
  source 1..80: mol_type = other DNA
acgtctagcaggcccaggcccacgggccaaccgtccacggtcttacgctcggtcagcttgaggctaaacgagtgtgcctc

SEQ ID NO: 151969 - DNA, 80 bp, synthetic construct
  source 1..80: mol_type = other DNA
acccgaaactactcgacgagggatacttcttcaaagcatgggacatcagacggggcctctttggcgcgaaggctcttaaa

SEQ ID NO: 151970 - DNA, 80 bp, synthetic construct
  source 1..80: mol_type = other DNA
ctgttgattgtcgtcggcctgccgttttttctagaatatgccaagcatcaccccaaactcagccgagaggtggtttgttc

SEQ ID NO: 151971 - DNA, 80 bp, synthetic construct
  source 1..80: mol_type = other DNA
acgtggtgctgcgccgttattatcgcagtcacggcggcgtgcaggcgcggacgctggcggcggcccgggctttgttagcc

SEQ ID NO: 151972 - DNA, 80 bp, synthetic construct
  source 1..80: mol_type = other DNA
gtcaaaggtcagggttcagccttccgcctcacacgaaatggtggacaatatcttccgggtcaaaggtcatgctacgtcat

SEQ ID NO: 151973 - DNA, 80 bp, synthetic construct
  source 1..80: mol_type = other DNA
ttaaaactgggctcgggttgtacccacccgagctgcccatgtggcgtggtgctcttgtatcccggtacacttgcacgcca

SEQ ID NO: 151974 - DNA, 80 bp, synthetic construct
  source 1..80: mol_type = other DNA
agttaaggatgttttaataaagggagtaccaacactacaatcgccaacagtagaagcttgtgggtattcagacaggataa

SEQ ID NO: 151975 - DNA, 80 bp, synthetic construct
  source 1..80: mol_type = other DNA
gagtgttgcttagcaggagattccaacacaaagacgaactatacttcatacgtgaatgcaaatccaggcgagaaaggggg

SEQ ID NO: 151976 - DNA, 80 bp, synthetic construct
  source 1..80: mol_type = other DNA
cagttgtgttcaaggacagaaacacatgccaaacatatacactgtgccagatttataacatgattattgaggaggataag

SEQ ID NO: 151977 - DNA, 80 bp, synthetic construct
  source 1..80: mol_type = other DNA
ctccagttagaaaatggcttcaagaaatggaacattaactttcaggagcaggcacacattagaaagaaatttgaattgtt

SEQ ID NO: 151978 - DNA, 80 bp, synthetic construct
  source 1..80: mol_type = other DNA
ggggcagacgctttgttaaaataagacttaatccccccaaactatttgaagacaagtggtacactcagcaagacctgtgc

SEQ ID NO: 151979 - DNA, 80 bp, synthetic construct
  source 1..80: mol_type = other DNA
gacggcgacacggggtgacgtcggggacgggggactcttgcggcgaagacgaagacggggacctttcgcagcggggacgg

SEQ ID NO: 151980 - DNA, 80 bp, synthetic construct
  source 1..80: mol_type = other DNA
gtggaatgcaccacctaatgaaaatccatatcacgcacggagaggcataaaagaacaagtaatccagaaagcatttctaa

SEQ ID NO: 151981 - DNA, 80 bp, synthetic construct
  source 1..80: mol_type = other DNA
ccatgctgtgtacccacattatctgggacgtaggtttacagtccagttgcgtgctctgcgtgccgtggatcagccagacg

SEQ ID NO: 151982 - DNA, 80 bp, synthetic construct
  source 1..80: mol_type = other DNA
gtaataatcctgttattcattttaacaacattgctactcgctttaactatctgcctactgccaacccgcctgtgggaccc

SEQ ID NO: 151983 - DNA, 80 bp, synthetic construct
  source 1..80: mol_type = other DNA
agtaggaaaattagacactgaaaatatgatacaacatttaatgagaaagaagaattttagcacattcaaggtgttggtaa

SEQ ID NO: 151984 - DNA, 80 bp, synthetic construct
  source 1..80: mol_type = other DNA
aaagctaaaacaggcacactaaagcaccacctaggcgctatggcacactgtcacctaacaggaatttttaaccctgcact

SEQ ID NO: 151985 - DNA, 80 bp, synthetic construct
  source 1..80: mol_type = other DNA
aagatcgtcactaaccacgtgacttccgcaggccaatacaagtctatgtcgttcacttcctgggcatggtctacgtgctg

SEQ ID NO: 151986 - DNA, 80 bp, synthetic construct
  source 1..80: mol_type = other DNA
gcatctaaacaaggtgattcttggattaaaaagtttactgaatgttgcaatgcagcaaaaggtttggagtgggttgccat

SEQ ID NO: 151987 - DNA, 80 bp, synthetic construct
  source 1..80: mol_type = other DNA
agacccagcaacctggtgcccaacaacactccgagaaaaagaaacgacatcagaggagtcgacctcggaagaagaagaaa

SEQ ID NO: 151988 - DNA, 80 bp, synthetic construct
  source 1..80: mol_type = other DNA
ggtgaaagtgaaatacattatctattcaattgttgaattcatccagaacacacccgcaacactacatctgattaaactcg

SEQ ID NO: 151989 - DNA, 80 bp, synthetic construct
  source 1..80: mol_type = other DNA
ccctggaccttttacctacaagtcctcacccccctctcgcctcctaccggactccccacctccctctcctgctccatcta

SEQ ID NO: 151990 - DNA, 80 bp, synthetic construct
  source 1..80: mol_type = other DNA
gaaaacccggttcgcgcgtgcactgcgcttcgggcgccgcgtcagcgtcgtaagccaccacgcgccggtactcgagcaac

SEQ ID NO: 151991 - DNA, 80 bp, synthetic construct
  source 1..80: mol_type = other DNA
attagtaccaagtttacagacaagaccaaagggtagaaaagcaattagactaagaatagcaccccccacactctttacag

SEQ ID NO: 151992 - DNA, 80 bp, synthetic construct
  source 1..80: mol_type = other DNA
attcactgaatgttgtaatgctgccaagggactagaatgggttgcacagaagattggcaaattcattgattggctaaaag

SEQ ID NO: 151993 - DNA, 80 bp, synthetic construct
  source 1..80: mol_type = other DNA
tcaacttgaacgttgttgcggctgacttgcggtttccgttctgctcaccacaaactgacaacatttgcatcaccttccag

SEQ ID NO: 151994 - DNA, 80 bp, synthetic construct
  source 1..80: mol_type = other DNA
aagccccagggagaggaagctaaatatttcaactaccagctaggtatatacagccccatattcctctcacacaagcgcag

SEQ ID NO: 151995 - DNA, 80 bp, synthetic construct
  source 1..80: mol_type = other DNA
tctcctacagggagagaagttggcttaacgccgtcgaacaatcccacagttctttttgtggctgtagtgattttattctt

SEQ ID NO: 151996 - DNA, 80 bp, synthetic construct
  source 1..80: mol_type = other DNA
agcgtgccggcgaacgttctgtaatcttccataataaaggtaaaaatgcccgtctcgtgtcgactccgctggatctcgaa

SEQ ID NO: 151997 - DNA, 80 bp, synthetic construct
  source 1..80: mol_type = other DNA
acgtcacggccgccactttagtttacaaaatggccgacttccttcctcttttgtgaaaaaaagcggaagtgccgcacggc

SEQ ID NO: 151998 - DNA, 80 bp, synthetic construct
  source 1..80: mol_type = other DNA
cccacaaaacctactaaagaaaagtttaatacttggaaaaagcaattcactgatactagagacagcctgtttctctttgc

SEQ ID NO: 151999 - DNA, 80 bp, synthetic construct
  source 1..80: mol_type = other DNA
acaatcgtgcacaacgccggaatgggcgtggctgccggaaatctaacaatatttccacatcagtggatcaacctcaggac

SEQ ID NO: 152000 - DNA, 80 bp, synthetic construct
  source 1..80: mol_type = other DNA
tcactgtgtcatttaatgtggcacaatggtagacatgaatatcaagacttcgttaggggtatacgcagtgtgtccgctgg

SEQ ID NO: 152001 - DNA, 80 bp, synthetic construct
  source 1..80: mol_type = other DNA
aagtatactaccaaacaactaacacatcaggacaaaaactcacaggatacaactgggaaaaatacaaagataactacaca

SEQ ID NO: 152002 - DNA, 80 bp, synthetic construct
  source 1..80: mol_type = other DNA
aaattccaagtcaacaatgagttgtggcaaggagtcaaggcttgtgttaaatctaaatttagagaaatctttggagttaa

SEQ ID NO: 152003 - DNA, 80 bp, synthetic construct
  source 1..80: mol_type = other DNA
gtggcaatgtgaacttcgacccgaagcccgtaacggaggttaggtctagtattatcaccactggtgcttttggtcagcaa

SEQ ID NO: 152004 - DNA, 80 bp, synthetic construct
  source 1..80: mol_type = other DNA
gaaaaaggacaaaaacaaatggagaatgctaatagattttagagaactaaacaaggtaactcaggacttcacagaaatcc

SEQ ID NO: 152005 - DNA, 80 bp, synthetic construct
  source 1..80: mol_type = other DNA
ggccagttactaagcctaagggagctttcccagtctctcaacgggagttcaagaatgaagcaccttatgatggacaactg

SEQ ID NO: 152006 - DNA, 80 bp, synthetic construct
  source 1..80: mol_type = other DNA
cctctgctcatctgtggcactgggaccaccggcaccacctacagaaactatggcagtcacacgactgactacaaaaagta

SEQ ID NO: 152007 - DNA, 80 bp, synthetic construct
  source 1..80: mol_type = other DNA
ccgcagtctaggggcaattcgggctcgggtctggccgggctatgggtaaggctcttaaaaagctccctcgctgtgttctc

SEQ ID NO: 152008 - DNA, 80 bp, synthetic construct
  source 1..80: mol_type = other DNA
ggttttgctcattctgatgctgatgcccagcagcagttattggtagaagtatccaaattaaaaagaggcttagatgacct

SEQ ID NO: 152009 - DNA, 80 bp, synthetic construct
  source 1..80: mol_type = other DNA
aaagcaaaacacattagtgcatggtgcccaagagctccaagagcagtgccctatcaacacactaagagcacaaacctggt

SEQ ID NO: 152010 - DNA, 80 bp, synthetic construct
  source 1..80: mol_type = other DNA
attgttgtacaggcaatggatagatcaattcatataaacaagtaatataatacaatgtttgagtagaacttagtattata

SEQ ID NO: 152011 - DNA, 80 bp, synthetic construct
  source 1..80: mol_type = other DNA
aaggttacggacaaaggcctcagtctccggactgcggaggaagcgggcaaacgtgtaggaggtcatctcctccatgggat

SEQ ID NO: 152012 - DNA, 80 bp, synthetic construct
  source 1..80: mol_type = other DNA
cgtgccggtatctcaacggatggaacatggccaagaggaaacccacgacatcccctgcctgtccagccaccatgacgact

SEQ ID NO: 152013 - DNA, 80 bp, synthetic construct
  source 1..80: mol_type = other DNA
cccgcttcgggtttaatacctacagtcccaaagtcaaaaaacaacagattgagggccttagggaggagatttggactata

SEQ ID NO: 152014 - DNA, 80 bp, synthetic construct
  source 1..80: mol_type = other DNA
tagatggtgaactcttagcttttgattattcaaattttgatgcaagcttgtccccaatatggtttgagtgtttagaatta

SEQ ID NO: 152015 - DNA, 80 bp, synthetic construct
  source 1..80: mol_type = other DNA
gtttactgaaccgatgaaggatattatgattaagtctctgccaccattaaattcgccatctgcggaaaaatgtggttata

SEQ ID NO: 152016 - DNA, 80 bp, synthetic construct
  source 1..80: mol_type = other DNA
caaattcataccaaggaaacaaggccttttgccacctaacaggcatatacagcccaccatacctaaaccaaggcagaata

SEQ ID NO: 152017 - DNA, 80 bp, synthetic construct
  source 1..80: mol_type = other DNA
agtcacaatcgcacccatgtgtgcggagtacaacggcttgcgcttatcaacaccacatcaagggttgccagtcatggcca

SEQ ID NO: 152018 - DNA, 80 bp, synthetic construct
  source 1..80: mol_type = other DNA
agtttatggggagactatgtatataaaaaagatataattgatgcatttaatgaaaatgccactaagtattatgaatcaag

SEQ ID NO: 152019 - DNA, 80 bp, synthetic construct
  source 1..80: mol_type = other DNA
aacaggcctttcagaccagggcggcggctgaatgccatgccaaaagcggggtgccggtcgtggccggcttctacaggacc

SEQ ID NO: 152020 - DNA, 80 bp, synthetic construct
  source 1..80: mol_type = other DNA
ccgcccaagcagaaaacacagggtggtcgtcagggtaggcgcctgtggtttcaaagtagctcctgccagctgatagatat

SEQ ID NO: 152021 - DNA, 80 bp, synthetic construct
  source 1..80: mol_type = other DNA
tttaatacatccaacttttccagttaatgaaattcaagagtccattagatggacaaagaaaccatctcagatgcaggagc

SEQ ID NO: 152022 - DNA, 80 bp, synthetic construct
  source 1..80: mol_type = other DNA
ctacccgtggctaccaaaaaggccacctacccagcctacatgtagagtgtcctttaaaataaagctggatgattaatttt

SEQ ID NO: 152023 - DNA, 80 bp, synthetic construct
  source 1..80: mol_type = other DNA
gcctcacaagtcctcaaaatcagggcgggatacgggatacaccccctattatcttcccaagcctaaacaaagtttatatg

SEQ ID NO: 152024 - DNA, 80 bp, synthetic construct
  source 1..80: mol_type = other DNA
tgcgtacggtcatcaatcaggcgcacgttatgtgggtaattacagaatagttaataggcacttggctacacacacggact

SEQ ID NO: 152025 - DNA, 80 bp, synthetic construct
  source 1..80: mol_type = other DNA
atatctatgagtgctcctccaccaccagcaatagcagatctattacagtcagttagaactccagaggtcattaaatactg

SEQ ID NO: 152026 - DNA, 80 bp, synthetic construct
  source 1..80: mol_type = other DNA
atgaatatattaaaacagcagttgatcactactcagctcaattgtttatgctagatatcaacccagaacccatatctcta

SEQ ID NO: 152027 - DNA, 80 bp, synthetic construct
  source 1..80: mol_type = other DNA
atttttggtagagcatggtttgcatatgaccacacttatcgggatgaagggacttggagacgatctatttgtgtcactgt

SEQ ID NO: 152028 - DNA, 80 bp, synthetic construct
  source 1..80: mol_type = other DNA
gtccactggaaccccagcctataattctgcctccagagccaataccagatcttttattccccaatactaaaaaaaaaaag

SEQ ID NO: 152029 - DNA, 80 bp, synthetic construct
  source 1..80: mol_type = other DNA
gagagcagtagtgcatgtggccgatacaatgcgcagtggaccaagcaattcggaaagtattccagcgctcacggcagttg

SEQ ID NO: 152030 - DNA, 80 bp, synthetic construct
  source 1..80: mol_type = other DNA
ctgcgtggataccacgtccaccacgagccacgcagtatgtgtccagatacagtgtcaattacaatgtaatcaaaacagga

SEQ ID NO: 152031 - DNA, 80 bp, synthetic construct
  source 1..80: mol_type = other DNA
tcaacagtcgcccaggcggtggacgctgatgggtcagcacctagtataacagtggatgcgggcgtggaccgactggacac

SEQ ID NO: 152032 - DNA, 80 bp, synthetic construct
  source 1..80: mol_type = other DNA
gcttctcgtgtgcaaagtgggcaaaagcctctgtctgctccgcccatgccgaggagccaaagacctcccccagctcggcc

SEQ ID NO: 152033 - DNA, 80 bp, synthetic construct
  source 1..80: mol_type = other DNA
acgacagacaccacctacaaccttactaactcttccaacgcttgtcacacagatacaacaattatacgttttaaagaaac

SEQ ID NO: 152034 - DNA, 80 bp, synthetic construct
  source 1..80: mol_type = other DNA
actgtacagacgcagatacagggtcagacgaaagagaaaaaaactaataatcaaacagtggcagccagctaacatcagac

SEQ ID NO: 152035 - DNA, 80 bp, synthetic construct
  source 1..80: mol_type = other DNA
gcctcttcgtcggcgaaacgaaagcggcccgggtgcttgcaacacgaggagtaaactaccgcgatgagtaccgctatgaa

SEQ ID NO: 152036 - DNA, 80 bp, synthetic construct
  source 1..80: mol_type = other DNA
tttttggtttccagatgcagccaggaaaggaaacggtgtttaagagaacattgctcggcgagatattaaattattacgct

SEQ ID NO: 152037 - DNA, 80 bp, synthetic construct
  source 1..80: mol_type = other DNA
taacaaatttctagatcaggtaagatcggtcgcggtcggtcgcgcgctactcctaccggagtacacaactctgcgccgcc

SEQ ID NO: 152038 - DNA, 80 bp, synthetic construct
  source 1..80: mol_type = other DNA
atcctcacaccacccactgtctcaacacctgaagccattgacaggcggtttttcctggactgcgatgtcaagatcatgcc

SEQ ID NO: 152039 - DNA, 80 bp, synthetic construct
  source 1..80: mol_type = other DNA
ctaagcaaatctgatactagactggaggaaccagtagattgtctaatcaagaaatctgcttcaaagtacagggtgaacaa

SEQ ID NO: 152040 - DNA, 80 bp, synthetic construct
  source 1..80: mol_type = other DNA
tatgaaagaatagggcgcacaaactacactagaccaagtggaccaatcatcaagaaaagaccagcaatcacacagtatgt

SEQ ID NO: 152041 - DNA, 80 bp, synthetic construct
  source 1..80: mol_type = other DNA
tgccagcttttaatacaaataatcttttaaatgttgctaaagcccttttgccatgcactgactgtccaaaaccagaattc

SEQ ID NO: 152042 - DNA, 80 bp, synthetic construct
  source 1..80: mol_type = other DNA
aggaaagcctaggagatacagcaacagaaagctattagccggtggttcccccaccatcattcttcctgttaacgggaaga

SEQ ID NO: 152043 - DNA, 80 bp, synthetic construct
  source 1..80: mol_type = other DNA
cccagttaaaagttgattatttaaccaaattgaagcagctcaatttgttagaaaagcagatagaaacaatcagactagcc

SEQ ID NO: 152044 - DNA, 80 bp, synthetic construct
  source 1..80: mol_type = other DNA
ggataggctcagagtggccattgcttcccaaactgacatggatacattattgttcaacatcccactggacatacaattag

SEQ ID NO: 152045 - DNA, 80 bp, synthetic construct
  source 1..80: mol_type = other DNA
gcacaggtgtcatctcagaaagttggtgcccacgaaaacaccaacgtggccactggcggctccactgttaactacaccac

SEQ ID NO: 152046 - DNA, 80 bp, synthetic construct
  source 1..80: mol_type = other DNA
ccattaaaaaaatgagagacaacaactttgctctacagacaggccccaatgacctatatggagacagcacagcacaatat

SEQ ID NO: 152047 - DNA, 80 bp, synthetic construct
  source 1..80: mol_type = other DNA
cactattctgcccaattgtttatgttagacatcaacccggaacccatatccttagaacaagctgtgtatggaatggagaa

SEQ ID NO: 152048 - DNA, 80 bp, synthetic construct
  source 1..80: mol_type = other DNA
gctgcacatttgtacttgaagacaaacccctgtgggccatgtgttatggatacagagactttataaagagcaccagagag

SEQ ID NO: 152049 - DNA, 80 bp, synthetic construct
  source 1..80: mol_type = other DNA
gcggacagcccggtaccggcgcgccgcgctcacggcccgcaaaactccctcagccctgtcccgcgaacaaataccatggg

SEQ ID NO: 152050 - DNA, 80 bp, synthetic construct
  source 1..80: mol_type = other DNA
accccaaggacaacctattactggacagagcattacaaacactgctatagagaaaaatcccacaaaaactaaatttctaa

SEQ ID NO: 152051 - DNA, 80 bp, synthetic construct
  source 1..80: mol_type = other DNA
gtccaaataacatgatgggcacttttgctgttagagtggtgggatcacaaagtagcaccgaagctatcactataaggatc

SEQ ID NO: 152052 - DNA, 80 bp, synthetic construct
  source 1..80: mol_type = other DNA
cttttaggccttccggactaccaaaatggccgatttagtgacgtcacggcggccattttagattggcgcagaggatctga

SEQ ID NO: 152053 - DNA, 80 bp, synthetic construct
  source 1..80: mol_type = other DNA
ctgtataccttttgattctgctctaaatcactgcaatttttcactcgtagtgatacctatagcccctcttgcatttaatg

SEQ ID NO: 152054 - DNA, 80 bp, synthetic construct
  source 1..80: mol_type = other DNA
aggtgtgtaatttgatggagattgccgaggttgactccgtcgtcccggttaacaacttgagcagccacatcaactctatt

SEQ ID NO: 152055 - DNA, 80 bp, synthetic construct
  source 1..80: mol_type = other DNA
tcacagtagtaaggactctcaatttcattttgtgcttgaataaggcgaaatgggggcacaagtttcaacacaaaagacag

SEQ ID NO: 152056 - DNA, 80 bp, synthetic construct
  source 1..80: mol_type = other DNA
cctgtctgcagccggtgcgcgaccgcaaccgcgagcggaacccgggctcaccgcagttgctgccttacggcgaccgtctg

SEQ ID NO: 152057 - DNA, 80 bp, synthetic construct
  source 1..80: mol_type = other DNA
gtgaacaccatggaaatgtaccagatcccactgaacgaccaagtgtccaagaatcctattttctgtttgtccctgtcacc

SEQ ID NO: 152058 - DNA, 80 bp, synthetic construct
  source 1..80: mol_type = other DNA
ccacgtagacccccaattattggcacaagtataaataaagtatacatgtttcccccagagggccccaaactcatatcagg

SEQ ID NO: 152059 - DNA, 80 bp, synthetic construct
  source 1..80: mol_type = other DNA
ctcatgcattgtaacaacacaaaatggcaagtttacaggtcttggaatttatgatagggtgttaatcctaccaacacatg

SEQ ID NO: 152060 - DNA, 80 bp, synthetic construct
  source 1..80: mol_type = other DNA
ccgcgccagtgactgagactagaaacaaaattgatgaagttcctggtatcacccactcacaccttagtagttatggtgca

SEQ ID NO: 152061 - DNA, 80 bp, synthetic construct
  source 1..80: mol_type = other DNA
tgaaaagacctatagccagtgtacccagacagggcaatgtcgcgcatatcggctgcaatccacaaagtgggtgtacaact

SEQ ID NO: 152062 - DNA, 80 bp, synthetic construct
  source 1..80: mol_type = other DNA
gacgacacgcaccggcagcgcgaacaaagcgccgtggacacaacgccacacaccgcgcagcccggtcccgcgaacaaaga

SEQ ID NO: 152063 - DNA, 80 bp, synthetic construct
  source 1..80: mol_type = other DNA
catcgtccacgagcagggatcgcagtctctccctcctcaccctcgttattcccaatagcatagcggcaaggatctgtgtg

SEQ ID NO: 152064 - DNA, 80 bp, synthetic construct
  source 1..80: mol_type = other DNA
gataatctagaagccatatttcaaggactgggcgacccaacccccccaggatttattgtggatttgctgtcagcctcaaa

SEQ ID NO: 152065 - DNA, 80 bp, synthetic construct
  source 1..80: mol_type = other DNA
ggtgacaaggcatccgaggttactgtttctgacacacaacccagtggaccaagcaactcagtcagcgtgccaatgttaac

SEQ ID NO: 152066 - DNA, 80 bp, synthetic construct
  source 1..80: mol_type = other DNA
accaaagggaagttttagaaagagtggtttcctgtggaccgttcatggtcagagaccaggaaaagaacagttgggacatt

SEQ ID NO: 152067 - DNA, 80 bp, synthetic construct
  source 1..80: mol_type = other DNA
agctcagctatctccctcatttgcacctgcatacaaacccaatggaactaacaacaacacacataagccattaggaggaa

SEQ ID NO: 152068 - DNA, 80 bp, synthetic construct
  source 1..80: mol_type = other DNA
aacttaacaccagaaaaaggatggctctcctcttatgcagtaagaatgacttggtacacagaaaagttctggacagatgt

SEQ ID NO: 152069 - DNA, 80 bp, synthetic construct
  source 1..80: mol_type = other DNA
cagaacactcaatcagaggtaaactaaacatgtgcactgcaacccaaatgtgtagagattgtccacaaccagctaatttt

SEQ ID NO: 152070 - DNA, 80 bp, synthetic construct
  source 1..80: mol_type = other DNA
gtgcatttcctgggagggcttatccgcatgatataagtaagtgcacttccgaatggctgagttttccacgcccgtccgca

SEQ ID NO: 152071 - DNA, 80 bp, synthetic construct
  source 1..80: mol_type = other DNA
cgatggacgtcttccgcattcctgttcaaagtgggaatcaccagagcgcccaggtttttggctttcaaattcagccagga

SEQ ID NO: 152072 - DNA, 80 bp, synthetic construct
  source 1..80: mol_type = other DNA
tttgcaatcaaggtggatattgcatcacatccactggccacaaccttaattggagagattgccagttactttacccactg

SEQ ID NO: 152073 - DNA, 80 bp, synthetic construct
  source 1..80: mol_type = other DNA
tcagagcctggggacattatactaattgatggttatgcaaccaaagttatcaaacaggaaatcatcacagatctgaatga

SEQ ID NO: 152074 - DNA, 80 bp, synthetic construct
  source 1..80: mol_type = other DNA
tgtggcgctgtcattgcaaacacaggaaacatagtagcaattcatgttggcggaaatggacgtgtggggtatggagcagc

SEQ ID NO: 152075 - DNA, 80 bp, synthetic construct
  source 1..80: mol_type = other DNA
cttttaccaaactgccattatagtccccccaaatacgcccaccagcatgtctatgctcgcttttgtcagtgcatgcaatg

SEQ ID NO: 152076 - DNA, 80 bp, synthetic construct
  source 1..80: mol_type = other DNA
aggtttgacatggaaatcacgttcgtcattacaagtaaacaagaccaaggtacctcactatctcaagacatgccagtgtt

SEQ ID NO: 152077 - DNA, 80 bp, synthetic construct
  source 1..80: mol_type = other DNA
agtccggggcagtatacgtaggcaattatagagttgtaaacaggcacttggcaacccactttgattggcagaactgcgtg

SEQ ID NO: 152078 - DNA, 80 bp, synthetic construct
  source 1..80: mol_type = other DNA
cccctggaatcgagaaaccaacaaagaggaaagatgcaatgcttggaactcatgtagtgtgggatgttggccttcagtct

SEQ ID NO: 152079 - DNA, 80 bp, synthetic construct
  source 1..80: mol_type = other DNA
ataatgctgcaatgggagttgctgcaggcaatttgacaatatacccccaccaatgggtcaatctaaggaccaacaactgt

SEQ ID NO: 152080 - DNA, 80 bp, synthetic construct
  source 1..80: mol_type = other DNA
tcaaaccaacagtcaagcaatgacacctggtacctaggccatgcatatgtaaaagataaagcacaacaagcagcctataa

SEQ ID NO: 152081 - DNA, 80 bp, synthetic construct
  source 1..80: mol_type = other DNA
catgttacatgaatcattgcaacacatcagtcatcacagagtcatgtgacaagcactattgggatgctatgaggtttaga

SEQ ID NO: 152082 - DNA, 80 bp, synthetic construct
  source 1..80: mol_type = other DNA
ggggcgaccagtcaagttacacctgaggatttaattgagactagacatgtagcaaaccaaaagttgcgctcagagtgtac

SEQ ID NO: 152083 - DNA, 80 bp, synthetic construct
  source 1..80: mol_type = other DNA
aacaacagagagaggtgagttcaatttactaggtatctatggaaattgtgctgtgttgcccacccacgcagagtgcgggg

SEQ ID NO: 152084 - DNA, 80 bp, synthetic construct
  source 1..80: mol_type = other DNA
aaccaaacttcacaatgcgactatgtagagatgcagtatcactcacccagacagcagaattccaaggtgacaccatagca

SEQ ID NO: 152085 - DNA, 80 bp, synthetic construct
  source 1..80: mol_type = other DNA
gagagtacacttactgcgatcagacaccagtgccagaagaaggaacaggtggacggggaccacaggatcatagccgccgg

SEQ ID NO: 152086 - DNA, 80 bp, synthetic construct
  source 1..80: mol_type = other DNA
atttctgaacagattgtcaagaacccctgcagagacgaaggcatggaaccctcctaccccagtagactccgtagggacct

SEQ ID NO: 152087 - DNA, 80 bp, synthetic construct
  source 1..80: mol_type = other DNA
attgacaattgtcttttcaatcttgctatttgtcttgacatcatggtcgatttccgttacctctatatcaaaggtgacga

SEQ ID NO: 152088 - DNA, 80 bp, synthetic construct
  source 1..80: mol_type = other DNA
ggcacttgggagcaatggcacactgtcatttaacaggtatatttagccctgcactactaacacaaggcagactatcaccg

SEQ ID NO: 152089 - DNA, 80 bp, synthetic construct
  source 1..80: mol_type = other DNA
caacaccgctaaggcactgcaaaggtgtgatgggtgttccacgccaccacactataaacaatgctgtcccatgttgtgtg

SEQ ID NO: 152090 - DNA, 80 bp, synthetic construct
  source 1..80: mol_type = other DNA
ataacaacaacaaggaaagtcagtgaacttaatcttccaacaatacatactcctgccaaaaccaaattacaaccaagtgt

SEQ ID NO: 152091 - DNA, 80 bp, synthetic construct
  source 1..80: mol_type = other DNA
cagtactaaatgacttagcaaagagcggaccgtttgcatacaaagacacaaaaaccagtgtgactgtgactgctaaatac

SEQ ID NO: 152092 - DNA, 80 bp, synthetic construct
  source 1..80: mol_type = other DNA
aggacactattcaacacatgcggtttctctatcttttgtaaccgacactgacagtagcgggtaataaaaacaagaggatt

SEQ ID NO: 152093 - DNA, 80 bp, synthetic construct
  source 1..80: mol_type = other DNA
acaaggtttttccaattgaacaaccttccgtcacccaagtgaccttaggtggtaaacctatggatttggctatcttaaaa

SEQ ID NO: 152094 - DNA, 80 bp, synthetic construct
  source 1..80: mol_type = other DNA
tggtcagacagaaacacaaacaatgaaacttgcctacttggatcgagggttttataaacattatggtttaatagtgggtg

SEQ ID NO: 152095 - DNA, 80 bp, synthetic construct
  source 1..80: mol_type = other DNA
aggctacttgcctcagtgccacttttaccttctcaaatctatacggggggggggctctgtaacatttggtgagacctgat

SEQ ID NO: 152096 - DNA, 80 bp, synthetic construct
  source 1..80: mol_type = other DNA
tacccagaagaaaagcaaagatcataaggaactatggaggaggaaaagaattggattgcagtgccgacgtggaggatacc

SEQ ID NO: 152097 - DNA, 80 bp, synthetic construct
  source 1..80: mol_type = other DNA
attggctaaactaccaagacaactatgtagccacttacactaaatttaaagcaaaaatgacagaaaacttacaactaatc

SEQ ID NO: 152098 - DNA, 80 bp, synthetic construct
  source 1..80: mol_type = other DNA
caggtttcccatatgtaactatgggaattaaaaagaaagacgtcttaaacaaagtcactaaggatgtcacaaaacttcaa

SEQ ID NO: 152099 - DNA, 80 bp, synthetic construct
  source 1..80: mol_type = other DNA
ttagtgccggcgcatttaacaagtacggttacaacagcataaacgactttggaaccctggcagtgcgcgttgtgaatgag

SEQ ID NO: 152100 - DNA, 80 bp, synthetic construct
  source 1..80: mol_type = other DNA
ctcaccagattgtcagaaacccctgtaaagacggacaagggtatgcgcccggtagaaagcctcgctcaatacaagtcact

SEQ ID NO: 152101 - DNA, 80 bp, synthetic construct
  source 1..80: mol_type = other DNA
caaaataaacaaggtgaacaagtttttggattcagactttacctgggagatggtgtcctgaaaacaacattgttaggtga

SEQ ID NO: 152102 - DNA, 80 bp, synthetic construct
  source 1..80: mol_type = other DNA
tccaccatacaatctactagaacgcacttggatcgataaattcatttaaatcttttagcaatgtagaagtctacctgact

SEQ ID NO: 152103 - DNA, 80 bp, synthetic construct
  source 1..80: mol_type = other DNA
ggtttttcactgcagccgggcgcctccagtgtactcaaacgcacgttgttgggagagatcttgaattattatgcacactg

SEQ ID NO: 152104 - DNA, 80 bp, synthetic construct
  source 1..80: mol_type = other DNA
aaccaccatattcaatgatatggggaaattgtgcttccgagcgctggaagacaccacacaacaaaccatcaaggtctaca

SEQ ID NO: 152105 - DNA, 80 bp, synthetic construct
  source 1..80: mol_type = other DNA
caaaagaataatcaccatgaacaccaggaaagccagcacgccgtaggccagcagccggtcctcgaacagcgggtcgctct

SEQ ID NO: 152106 - DNA, 80 bp, synthetic construct
  source 1..80: mol_type = other DNA
ctatgtgtgctgagttttcaggagctcgtgcccgcagtcaaggtcttccagctatgctaactcctgggtctggacaattc

SEQ ID NO: 152107 - DNA, 80 bp, synthetic construct
  source 1..80: mol_type = other DNA
ccagcgctttgtgcgcgctgcctgtgcgtgtcgtcccatggtctttgtcagcggcacggcgctggggacgcggtttcacc

SEQ ID NO: 152108 - DNA, 80 bp, synthetic construct
  source 1..80: mol_type = other DNA
gaccgttcagctacaaagacgaccttaagaacactactatcactatgaagtacagatttgactttaaatggggtggcaat

SEQ ID NO: 152109 - DNA, 80 bp, synthetic construct
  source 1..80: mol_type = other DNA
atccttaacagtgcctgtgacacagggactacccacaatgctcacacccggatcaaaccagtttttgacctcagatgatt

SEQ ID NO: 152110 - DNA, 80 bp, synthetic construct
  source 1..80: mol_type = other DNA
ttttcaggcattcggtcaaaagcagtggcaatacagggtttacctacactgactactccagggtctggccagttcttgac

SEQ ID NO: 152111 - DNA, 80 bp, synthetic construct
  source 1..80: mol_type = other DNA
gccggtggaggagatggcggcgccgccgtagaaggagactaccagcaagaagaactcgacgagctgttcgcggccttgga

SEQ ID NO: 152112 - DNA, 80 bp, synthetic construct
  source 1..80: mol_type = other DNA
tcctgcatacagttcctcgttttggcaggaaattacagtggttacattagcatattacctgacaatgctaacaaagctaa

SEQ ID NO: 152113 - DNA, 80 bp, synthetic construct
  source 1..80: mol_type = other DNA
tgtttgcgtggattcctggggtagggtgtctgccagaggttgtacgtttgtgggatgttggaaagggctggtggtgcaaa

SEQ ID NO: 152114 - DNA, 80 bp, synthetic construct
  source 1..80: mol_type = other DNA
ctactggttcaaaattcaataagaaaaagtacctcactgcctctaccaagtacaagtggactagaaccaagatggatatc

SEQ ID NO: 152115 - DNA, 80 bp, synthetic construct
  source 1..80: mol_type = other DNA
cctggttgagatgacgtagcacggccgcgtggtgaaagtacaccaggtgcttgaattcgcgcacctcgccgccgtgttcg

SEQ ID NO: 152116 - DNA, 80 bp, synthetic construct
  source 1..80: mol_type = other DNA
taaaaccttccgccacacaatcaaacttctcaccctcatggaatgatatacaaaataaaacaacattagatgcatcaggc

SEQ ID NO: 152117 - DNA, 80 bp, synthetic construct
  source 1..80: mol_type = other DNA
ttaaaaagagacgtttcagacgcaaaagaaagagacagaaaataataattagagaatggcaacccgccatggtcagacgc

SEQ ID NO: 152118 - DNA, 80 bp, synthetic construct
  source 1..80: mol_type = other DNA
ggggggggcgctctcaggccggaccctggtgccaggcaggggccccgcgcaacccgcttcatgggggggggggccgccgc

SEQ ID NO: 152119 - DNA, 80 bp, synthetic construct
  source 1..80: mol_type = other DNA
gactacgccccagacgaactagacgcactgttcgacgccgtcgcaggagaacaacagtaaggagacggaggtggcggggc

SEQ ID NO: 152120 - DNA, 80 bp, synthetic construct
  source 1..80: mol_type = other DNA
tctggccgcgcgcacaccccgccgacacacccctgacacacccgcgacacacccggcacacgcccgcgacacacccggca

SEQ ID NO: 152121 - DNA, 80 bp, synthetic construct
  source 1..80: mol_type = other DNA
ctggggatacgtagtctatgacacaaactttggcaatggaaaaatgccctccggaacaggccaagttccagtatactggc

SEQ ID NO: 152122 - DNA, 80 bp, synthetic construct
  source 1..80: mol_type = other DNA
atggaagccaccatgtggatggtcgtaatgagtaattgcgggacggaaccgactactttgggtgtccgtgtttcttgttt

SEQ ID NO: 152123 - DNA, 80 bp, synthetic construct
  source 1..80: mol_type = other DNA
aacgattagaaaatggtactggcaacaagaaacagaaacaaacgatgtacactcatcctatggccgccctatatacaatg

SEQ ID NO: 152124 - DNA, 80 bp, synthetic construct
  source 1..80: mol_type = other DNA
actgggaaagtaaaatatcagagtttttatctgctgctatgccaaaagaaaagtcagccaacgttcttaacacctttaaa

SEQ ID NO: 152125 - DNA, 80 bp, synthetic construct
  source 1..80: mol_type = other DNA
atgctctatcagcagaccatcagaaacccgtgccggggcgacggacagccttccgactcccatagagacactagatcagt

SEQ ID NO: 152126 - DNA, 80 bp, synthetic construct
  source 1..80: mol_type = other DNA
tcggggaacaggacgctgaacagctgcggacggacctggatacggaacctttgttgttgacggtggacggagatttggaa

SEQ ID NO: 152127 - DNA, 80 bp, synthetic construct
  source 1..80: mol_type = other DNA
accgtggtcgcctcctccacgcatggaatcagctgaccggcaaagagaaactccttcaagccgttgcccaccaccacgtg

SEQ ID NO: 152128 - DNA, 80 bp, synthetic construct
  source 1..80: mol_type = other DNA
gttcttgctcgaatgttgactgttgagactgatatatattctttgcctccagatccaaagtactttgatggttatgatca

SEQ ID NO: 152129 - DNA, 80 bp, synthetic construct
  source 1..80: mol_type = other DNA
cgagtcacgtaggggaactacgtgggtaagtgacgtggatactagtaaaaaaagtgcgtcaaagttctcagcgtgtgacg

SEQ ID NO: 152130 - DNA, 80 bp, synthetic construct
  source 1..80: mol_type = other DNA
agcaagaatatcagtgccctacgtgggaattgctaatgcgtattcccacttttatgatgggtttgcaaaagtaccactag

SEQ ID NO: 152131 - DNA, 80 bp, synthetic construct
  source 1..80: mol_type = other DNA
cgaagcacgcacaaagcggtgagtcacgccgttctctagcgtgacgctgtatacgtcggcggggtccacggggtactcgc

SEQ ID NO: 152132 - DNA, 80 bp, synthetic construct
  source 1..80: mol_type = other DNA
agaacctgctcaaagtacttgtcggtgtgaatgggcacgccgtgctcgcgcacgtagctcggatcttcggctacctcgta

SEQ ID NO: 152133 - DNA, 80 bp, synthetic construct
  source 1..80: mol_type = other DNA
ccacaaaaacccaggaacattaacagggtcggcagtagggtgtgatccagatgttttctggtcagtgataccttgcttgt

SEQ ID NO: 152134 - DNA, 80 bp, synthetic construct
  source 1..80: mol_type = other DNA
catttagaacacagggatgcttaagccatcctcaagtaaatgtacccaatgctaacagtaccccaaacaaccaagtaaaa

SEQ ID NO: 152135 - DNA, 80 bp, synthetic construct
  source 1..80: mol_type = other DNA
cgctcagtacagttcacgaccacaaagcctggttggatctcgacgaatcacactgggtcctcggagacagccgacccgac

SEQ ID NO: 152136 - DNA, 80 bp, synthetic construct
  source 1..80: mol_type = other DNA
tatataccagatgatggtgaagtgacaacacaaatcaaacccagaaccaatgtctatactattacatctgctggaccgtc

SEQ ID NO: 152137 - DNA, 80 bp, synthetic construct
  source 1..80: mol_type = other DNA
agacagcccccatccactgccgtgatgctcaagtgtaagcagcccggggcccgcttcattcacggggccgtgcatctgcc

SEQ ID NO: 152138 - DNA, 80 bp, synthetic construct
  source 1..80: mol_type = other DNA
aatggcttaaggaaaaagtttgcaacattctcggcataccatttgtgatgaagcagggggattcatggatgaagaagttc

SEQ ID NO: 152139 - DNA, 80 bp, synthetic construct
  source 1..80: mol_type = other DNA
acattaacaccctacagccaaacatctctaaattacaagaacataaagctgaagacacagaggcaaaaactacctataaa

SEQ ID NO: 152140 - DNA, 80 bp, synthetic construct
  source 1..80: mol_type = other DNA
ctgttagtctgtcagctattatgtctggtggcgcgcgcggcagcaacgagtactgctcagactacactgccctccaccgt

SEQ ID NO: 152141 - DNA, 80 bp, synthetic construct
  source 1..80: mol_type = other DNA
gtggagacccaagccttgggcgcgcgttggcctggatggcctggtgcatgcatgcctgcaggacattgtgttgtaaccag

SEQ ID NO: 152142 - DNA, 80 bp, synthetic construct
  source 1..80: mol_type = other DNA
atgatgtttcagaaaaagaaaatactaattccaagctatgacactaatcccaagggtcctcagaaaattaaggttaaagt

SEQ ID NO: 152143 - DNA, 80 bp, synthetic construct
  source 1..80: mol_type = other DNA
gctggttttttataccaaaagacatggatttagacaaagtccataagcctaccaatagtatcagagtcccgtatatagga

SEQ ID NO: 152144 - DNA, 80 bp, synthetic construct
  source 1..80: mol_type = other DNA
caacccgggctggattcagtgtttaagagaacactgctaggtgaagtgctcaattattacgcgcactggtcagggagcat

SEQ ID NO: 152145 - DNA, 80 bp, synthetic construct
  source 1..80: mol_type = other DNA
aatatccacatactatatatggcccagcatggttttctaagagtggcacatacctatgatacagaagaaggtagagataa

SEQ ID NO: 152146 - DNA, 80 bp, synthetic construct
  source 1..80: mol_type = other DNA
cacctgctgccgccactgggcctcggcgtgctcgggccacccgccggagcccggtctgagctccgacgcaggatgcgcgt

SEQ ID NO: 152147 - DNA, 80 bp, synthetic construct
  source 1..80: mol_type = other DNA
actggccccggcccacctccgctgccgccaaagcaacggcacggttccaccgacggaaaagtttctgcgccccgacagtc

SEQ ID NO: 152148 - DNA, 80 bp, synthetic construct
  source 1..80: mol_type = other DNA
ttaaaactgtggaaacttacagcttaccaagaatagtggccatccaaaaccatgaagtaaagattggccaaataaatgat

SEQ ID NO: 152149 - DNA, 80 bp, synthetic construct
  source 1..80: mol_type = other DNA
taaacctttcatgtcaggaactactggagggaagatagaagtgtacttgagtttaagatgccccaacttgttcttcccct

SEQ ID NO: 152150 - DNA, 80 bp, synthetic construct
  source 1..80: mol_type = other DNA
atggcagatgtacccactatcaaacatttgccacagacacaagactaaaccctcaaagacccatatcatcaaacaaccaa

SEQ ID NO: 152151 - DNA, 80 bp, synthetic construct
  source 1..80: mol_type = other DNA
gaattggattcagaaaaaattgctcagcaaggtgctaagtatggtctgactatcacaccaccagacaagtctacacagtt

SEQ ID NO: 152152 - DNA, 80 bp, synthetic construct
  source 1..80: mol_type = other DNA
ttgacgaacatacaaacaaaaacctgtggcagtacacatacacaggcctcatgtccaagtactactacaaagccaacaca

SEQ ID NO: 152153 - DNA, 80 bp, synthetic construct
  source 1..80: mol_type = other DNA
taggaactcatgtgatttgggatttaggtctgcaatcatcatgcactatggttgtcccatggatttcttcaggattttac

SEQ ID NO: 152154 - DNA, 80 bp, synthetic construct
  source 1..80: mol_type = other DNA
taaacacgccagcttcactgttctaggccgtgggagtttcactggtcggtgtctacctctaaaggtcactaagcactccg

SEQ ID NO: 152155 - DNA, 80 bp, synthetic construct
  source 1..80: mol_type = other DNA
atgctgtagtggccttctctgatggcctggagagcatgcaggtcaggtccccctccacgggagggcgctctgcgccagcc

SEQ ID NO: 152156 - DNA, 80 bp, synthetic construct
  source 1..80: mol_type = other DNA
ctcctcggtcacgtgactgtacacgtgactgctacgtcattgacgccatcttgtgtcacaaaatggcggtgcacttccgc

SEQ ID NO: 152157 - DNA, 80 bp, synthetic construct
  source 1..80: mol_type = other DNA
ttattcccacccacgcacaaccatctgatcaagtattaatcaatgggttctctactaatgttaaagacaaatggaagtta

SEQ ID NO: 152158 - DNA, 80 bp, synthetic construct
  source 1..80: mol_type = other DNA
tgttacagttccaatcactatatcaataagcccaatgtttgctgaattttctggagcacgagcaagacctacaagagctg

SEQ ID NO: 152159 - DNA, 80 bp, synthetic construct
  source 1..80: mol_type = other DNA
caaagtgtggatggactggtgcacaaagaatgacagtacatggagagacacaaactccaagctacctgttgtagacattc

SEQ ID NO: 152160 - DNA, 80 bp, synthetic construct
  source 1..80: mol_type = other DNA
cgctaaactcacccacagcggaagagtgcgggtatagtgatagagtacgctccatcacgctgggcaactcaacaatcact

SEQ ID NO: 152161 - DNA, 80 bp, synthetic construct
  source 1..80: mol_type = other DNA
cagcacatcagcatgtccatgttaacgaaaaacatgtacagggccccttctgcataccaggcaccaccccgtcccagtgg

SEQ ID NO: 152162 - DNA, 80 bp, synthetic construct
  source 1..80: mol_type = other DNA
tcatctgcgggcacaccagaagctgctataactatgcactacactctgacgataaggtggccgagcaaagggccttcggg

SEQ ID NO: 152163 - DNA, 80 bp, synthetic construct
  source 1..80: mol_type = other DNA
gaaattaaaacaaatcctgatggtagtagtcccgttacaggccctaacaataaaccctcagcaagtaacatgactactta

SEQ ID NO: 152164 - DNA, 80 bp, synthetic construct
  source 1..80: mol_type = other DNA
ggtctgaatttttatagatacgggagtaggaggtgggaataacaactgggatttcttgttgtgctgtccaggcctgcatg

SEQ ID NO: 152165 - DNA, 80 bp, synthetic construct
  source 1..80: mol_type = other DNA
cacaaatgccacctctagcaatgacacttggtatggaggacatgcatacaaactcgcagaaatacaagccatagctaaac

SEQ ID NO: 152166 - DNA, 80 bp, synthetic construct
  source 1..80: mol_type = other DNA
cccacgtgacttaccacgtggtgtgtgcgtcacagccgccattttgtatcacaaaatggccgacttccttcctctttttc

SEQ ID NO: 152167 - DNA, 80 bp, synthetic construct
  source 1..80: mol_type = other DNA
ccatttgtacctctggatatgagtactggggcttcctccgtcgttccaataacggtcacagtggccccaatgagcgccga

SEQ ID NO: 152168 - DNA, 80 bp, synthetic construct
  source 1..80: mol_type = other DNA
gttgagggctagtatgggcccggtacctccggtaccggcaacacagccacagtattttgacatccccttaactgaaccca

SEQ ID NO: 152169 - DNA, 80 bp, synthetic construct
  source 1..80: mol_type = other DNA
aaaacaatttgccacaggcacatcctcagacacaataactacaaacggattttactctaaagtccaaccagcttccataa

SEQ ID NO: 152170 - DNA, 80 bp, synthetic construct
  source 1..80: mol_type = other DNA
tttccaacagtgatcttgatgctctagataagtgaatcaagccacccacatgggcatataactttagcagactcaactgt

SEQ ID NO: 152171 - DNA, 80 bp, synthetic construct
  source 1..80: mol_type = other DNA
tgtgagtgtaggttatcggcacacccaccctggtgaggtaggtcacactataggtgtcagtgacagcagaggcaataatg

SEQ ID NO: 152172 - DNA, 80 bp, synthetic construct
  source 1..80: mol_type = other DNA
tttgtagacaaattcaccccagccagtgaatcctcagacaaaaacaaatttgccccagttgattggcttttgggttgtgg

SEQ ID NO: 152173 - DNA, 80 bp, synthetic construct
  source 1..80: mol_type = other DNA
tgaggtcagatgactatgtggtgaacaaagggttcgggggctccttcgccacggagaccttctccctgaaggttctctat

SEQ ID NO: 152174 - DNA, 80 bp, synthetic construct
  source 1..80: mol_type = other DNA
aattagaaacaaatacttaacagcaacaagaacagcactaccagcactagcaacactaggacacgaaatgctagaatacc

SEQ ID NO: 152175 - DNA, 80 bp, synthetic construct
  source 1..80: mol_type = other DNA
aatcaaaagaaattgccatattgcaaccactaacaaaggagagtttaacttgctaggcatttatgacaactgtgctgtta

SEQ ID NO: 152176 - DNA, 80 bp, synthetic construct
  source 1..80: mol_type = other DNA
ggatagcatcacctacataccagacactgtcaagcccgacgtgacaagtcacggagcatttggtcagcaatccggggcta

SEQ ID NO: 152177 - DNA, 80 bp, synthetic construct
  source 1..80: mol_type = other DNA
ctcctacatggagttgtactctattattccggtaattttgtacgccagttttatctccccttcccccgacgtaacttaga

SEQ ID NO: 152178 - DNA, 80 bp, synthetic construct
  source 1..80: mol_type = other DNA
gccagagtacttgagggacagtgaggctaatccagttgaccaaccgaccgagccggatgttgcagcgtgcagattctaca

SEQ ID NO: 152179 - DNA, 80 bp, synthetic construct
  source 1..80: mol_type = other DNA
ctaccctcataggtgaacttgcaagttattatacacattggactggtagtttacgcttcagctttatgttttgtggttct

SEQ ID NO: 152180 - DNA, 80 bp, synthetic construct
  source 1..80: mol_type = other DNA
caaatcagaattttctggagctatgaagtcccaacccaatatccctggtattccagagtccacacatcaaggtatcccta

SEQ ID NO: 152181 - DNA, 80 bp, synthetic construct
  source 1..80: mol_type = other DNA
tagacatcaatggaatacagacaagagttgcagatgcatatgatttgtacaattcacaaggggtgaaacttgagatcaca

SEQ ID NO: 152182 - DNA, 80 bp, synthetic construct
  source 1..80: mol_type = other DNA
agtacaagcgggcgagccgcccaggcggattttgctaccggcgtggagctgacatacgcgcagcagattggcgcggtcgt

SEQ ID NO: 152183 - DNA, 80 bp, synthetic construct
  source 1..80: mol_type = other DNA
ccataatagcacgtggtttaactagtgaagcccaagtgtattcactacctcctgacccgaagtactttgatggctatgat

SEQ ID NO: 152184 - DNA, 80 bp, synthetic construct
  source 1..80: mol_type = other DNA
cgccgcacatggcgctggccccgcaggagatggaggacccgccgccgacgacgagtaccaaccagaagacctagaagacc

SEQ ID NO: 152185 - DNA, 80 bp, synthetic construct
  source 1..80: mol_type = other DNA
ctaggtagatctggatgcatagcaaagattgagcttgatacaaataaaggtgattatgacacaataggcgttggctttgt

SEQ ID NO: 152186 - DNA, 80 bp, synthetic construct
  source 1..80: mol_type = other DNA
tcgcgctgggcacgagggacgtggacggcggttgcgtggcggtgacggtggactcttgcgggggggactggctaggtacg

SEQ ID NO: 152187 - DNA, 80 bp, synthetic construct
  source 1..80: mol_type = other DNA
tgattaccaccatcctgtactaccgtcgtaagaaaaaatctccgagcgatacttacatctgcaacctggctgtagccgat

SEQ ID NO: 152188 - DNA, 80 bp, synthetic construct
  source 1..80: mol_type = other DNA
ccagttaaagatgtacttactaagggaataccaacactccagtccccatcagttgaggcatgtggatattctgatagaat

SEQ ID NO: 152189 - DNA, 80 bp, synthetic construct
  source 1..80: mol_type = other DNA
actgctatgccagccacaaaaacacgctcagcaaacatcttaaacacagcagccacagagggcaacttctcacaccccaa

SEQ ID NO: 152190 - DNA, 80 bp, synthetic construct
  source 1..80: mol_type = other DNA
acggggcatacctcacaggtagtaccaagcgacaccatgcaaactaggcacgtccataacttccatactagatcagagtc

SEQ ID NO: 152191 - DNA, 80 bp, synthetic construct
  source 1..80: mol_type = other DNA
tgaatgcagagtacaacggcctcaggctgggggtacaccaaggtttgccagtgctcaacacccctgggagcaaccaattc

SEQ ID NO: 152192 - DNA, 80 bp, synthetic construct
  source 1..80: mol_type = other DNA
acagtacacacctataggtgaggcaataaagggagacgcaataacaggagttagcattcaaaaaaaccccaaacttacac

SEQ ID NO: 152193 - DNA, 80 bp, synthetic construct
  source 1..80: mol_type = other DNA
cagcattctttgtacactgttcattcatcactatttgcattttgttcttgaattttaaacagtcaaaatgggcgctcagg

SEQ ID NO: 152194 - DNA, 80 bp, synthetic construct
  source 1..80: mol_type = other DNA
gttactaatcagctacagcccacctggcgcagcaccaccaaagacacgaaaagacgctatgctgggaactcacttgattt

SEQ ID NO: 152195 - DNA, 80 bp, synthetic construct
  source 1..80: mol_type = other DNA
catttggccacccaagaagatctagaaaatgcggttagcgttttgtggaacagggatctcttaattgctgagtccagagc

SEQ ID NO: 152196 - DNA, 80 bp, synthetic construct
  source 1..80: mol_type = other DNA
cgtgccagaacagcccagccgctacctgcgccgacgtatgttcgtggaacggcccgaaaccctgcagatcttctataact

SEQ ID NO: 152197 - DNA, 80 bp, synthetic construct
  source 1..80: mol_type = other DNA
cgctccggcgcaaatcagacacattaaaggaatgtaagaagattccactatacaaagagcaagtcaaagcttttgccact

SEQ ID NO: 152198 - DNA, 80 bp, synthetic construct
  source 1..80: mol_type = other DNA
cagacatattttggtcccagctttatgcctccatggagaagcacctccttgtgtttgattacacaaattatgatggtagc

SEQ ID NO: 152199 - DNA, 80 bp, synthetic construct
  source 1..80: mol_type = other DNA
aacaacagctagaatgatttgttttgtgtcagggtgtaaggacttttgcctacgaatggctagagatactaacctacaca

SEQ ID NO: 152200 - DNA, 80 bp, synthetic construct
  source 1..80: mol_type = other DNA
ccaattaatataattcataggaatgttgtacatatggaacagttcccaaatttaaatttgttcatgaattcctattctta

SEQ ID NO: 152201 - DNA, 80 bp, synthetic construct
  source 1..80: mol_type = other DNA
gatgatctccgagggtgtgatatcttgcagttcttctactgttttaacggcggttgaggtggtaaagacgtgggccgtgg

SEQ ID NO: 152202 - DNA, 80 bp, synthetic construct
  source 1..80: mol_type = other DNA
ggatgcctaaagaccgcgcgctacgccttcggctgcgcgcggcacctcagacccccgctcgtgctgacacgctcgcgcgt

SEQ ID NO: 152203 - DNA, 80 bp, synthetic construct
  source 1..80: mol_type = other DNA
aggtcatatttcaatgaaacacaagggaaaatagttgcagcaaaggatgtaaggaacattggatacccaaccattcacac

SEQ ID NO: 152204 - DNA, 80 bp, synthetic construct
  source 1..80: mol_type = other DNA
catcaataaactttttttaaccaataacatgtctctgtttttttttttgttaacaacctatgatataaagcggtatattc

SEQ ID NO: 152205 - DNA, 80 bp, synthetic construct
  source 1..80: mol_type = other DNA
tacgtaacggtgttaattggagacacaacgttattcactcttggcacatgccctgtaagatataaagaatctacgaacac

SEQ ID NO: 152206 - DNA, 80 bp, synthetic construct
  source 1..80: mol_type = other DNA
tgcccagttgacggtaggtaactcaaccatcaccacccaagaggctgccaatatagtgttaagttatggagagtggccag

SEQ ID NO: 152207 - DNA, 80 bp, synthetic construct
  source 1..80: mol_type = other DNA
accaaattagaaccacatcagtgggtagggccttaaatttaccaccctacacctacctacgccatcagtggctggaaaat

SEQ ID NO: 152208 - DNA, 80 bp, synthetic construct
  source 1..80: mol_type = other DNA
gtattgcagaagaacagggtctacatgactatatcaccagtttaggaagggcatttggggtcggttttactgatcagata

SEQ ID NO: 152209 - DNA, 80 bp, synthetic construct
  source 1..80: mol_type = other DNA
cgcggtcggtcgcgcgctactcctaccagagtacacaactctgcgccgccgctggctagattctttttgatcaaccacac

SEQ ID NO: 152210 - DNA, 80 bp, synthetic construct
  source 1..80: mol_type = other DNA
agatgattcaacaccagggttcattatagacctccttagtgcctctaaagacccaaaagtcatagagttttgtgagaagg

SEQ ID NO: 152211 - DNA, 80 bp, synthetic construct
  source 1..80: mol_type = other DNA
ttatgtttaaccctccaggtccaaaacgcatcactgggtacgaggcctggagggatgaatatgaaacatgcaaggcctgg

SEQ ID NO: 152212 - DNA, 80 bp, synthetic construct
  source 1..80: mol_type = other DNA
cacaccaggtggtgaccacataccatcatgtgattgcaccgtagggtgttattactccaaacacaatgacagatacattc

SEQ ID NO: 152213 - DNA, 80 bp, synthetic construct
  source 1..80: mol_type = other DNA
cccgaagtccgccactaaccacgtgactcccgcaggccaacccagtactatgtcgtccacttcctgggacgagtctacgt

SEQ ID NO: 152214 - DNA, 80 bp, synthetic construct
  source 1..80: mol_type = other DNA
cccgtagtcagtttattgaggtcgtggaacttgatggcgtgcgccgccgcggccaagccgctggtcaaaaaataaaccca

SEQ ID NO: 152215 - DNA, 80 bp, synthetic construct
  source 1..80: mol_type = other DNA
gtcctcttctatgtggaaaagcagtggtcttacaaaacaaaagaacccagggcagctactcagttctaaccgttgtggag

SEQ ID NO: 152216 - DNA, 80 bp, synthetic construct
  source 1..80: mol_type = other DNA
ccagtatatggaggccaatgactattacccagctagatatcaaacacatatgcttctcggaatgggatttgcagaaccag

SEQ ID NO: 152217 - DNA, 80 bp, synthetic construct
  source 1..80: mol_type = other DNA
gactatcattagcttaaacaaacattataatcttacaatgcattgcaagagaccaggaaataagacagttgtaccaataa

SEQ ID NO: 152218 - DNA, 80 bp, synthetic construct
  source 1..80: mol_type = other DNA
gcgccgtgcgcagcaccagggaatgcttctcgggccagatgagggtcagctgcgcctcgcgatgcgcctctacgtaggcg

SEQ ID NO: 152219 - DNA, 80 bp, synthetic construct
  source 1..80: mol_type = other DNA
ttccagtcgtcccgcggccactgtcagatcatgaatatcttaagaatttattactcaccatccatcatgcaccgctacgc

SEQ ID NO: 152220 - DNA, 80 bp, synthetic construct
  source 1..80: mol_type = other DNA
aaatgataataggttaacaaatttggcttcaaatggaattgtaacagtaccagctggggagcaaatgactatatcagtac

SEQ ID NO: 152221 - DNA, 80 bp, synthetic construct
  source 1..80: mol_type = other DNA
acgaatatgaaatactcaattattttgataactgtaactagcaccaagcatattatcaccgtggtgccttcacgtcattc

SEQ ID NO: 152222 - DNA, 80 bp, synthetic construct
  source 1..80: mol_type = other DNA
attaatgataagctcacatctaaagctgttaagtggttaattcgtgttgtcagtgctcttacaattatgatcagaaacaa

SEQ ID NO: 152223 - DNA, 80 bp, synthetic construct
  source 1..80: mol_type = other DNA
tggaacccctccactgtcagcagatgctatattgttggatacctgcctattattattatgggacaggggactgcatccat

SEQ ID NO: 152224 - DNA, 80 bp, synthetic construct
  source 1..80: mol_type = other DNA
gagatgctcttgctatttcaatgccaaaagtggccgacactaaaccatctggaccagtcaactcaaaagaggttccagct

SEQ ID NO: 152225 - DNA, 80 bp, synthetic construct
  source 1..80: mol_type = other DNA
ctttcccagagcctaccaggacgttaactacaaccccctggtagacaaaggagtgggcaacataatatggttccagtaca

SEQ ID NO: 152226 - DNA, 80 bp, synthetic construct
  source 1..80: mol_type = other DNA
tatgggttagaaatgttaatttacaccatgctttaagcgtcttgtctccactagttgaaggcaacttgcaataaaatgag

SEQ ID NO: 152227 - DNA, 80 bp, synthetic construct
  source 1..80: mol_type = other DNA
agagtttgaaatgtgtaaaatatttgacagacccgctagaacagaccttagcaagccccctttctacccctggatgccca

SEQ ID NO: 152228 - DNA, 80 bp, synthetic construct
  source 1..80: mol_type = other DNA
atgccctcaaaccaaacaccagaaaaattaagggagtctatactaaaaaacatgcagaattacaataaaaaactaaaaca

SEQ ID NO: 152229 - DNA, 80 bp, synthetic construct
  source 1..80: mol_type = other DNA
cgtacggtaggtggccatcatatctcaagccaacagaagctaacccggtagacgcccccaccgaaccagatgttagttca

SEQ ID NO: 152230 - DNA, 80 bp, synthetic construct
  source 1..80: mol_type = other DNA
ggcatctggctccgaggacccaccagattatggagatcaaggtaatgtgcaacaggtgggatctgatcctatttcacctg

SEQ ID NO: 152231 - DNA, 80 bp, synthetic construct
  source 1..80: mol_type = other DNA
gcatacacccctccaggtgctgacatcccagagtcacgccgtgatgcaatgctcggcacgcacgttgtgtgggacctggg

SEQ ID NO: 152232 - DNA, 80 bp, synthetic construct
  source 1..80: mol_type = other DNA
aagcaatgtaaacacgatggaagcgtttcaggtaaaggttagtgctggtaccgccccgaggtctgatgccgtgttcactt

SEQ ID NO: 152233 - DNA, 80 bp, synthetic construct
  source 1..80: mol_type = other DNA
agtcttcatcaagccaaaacacacatccgcatggtgccccagaccacccagagcggttgattacacccacaaatactcac

SEQ ID NO: 152234 - DNA, 80 bp, synthetic construct
  source 1..80: mol_type = other DNA
actatgatggaataggcatcaaccaacagacacagcacaccgccatacaacaaacactatacactcaaggaaactactac

SEQ ID NO: 152235 - DNA, 80 bp, synthetic construct
  source 1..80: mol_type = other DNA
ggcctgttagtagtgcccattagtccgcttgatttcgaccaaggggcgaccccggtcattcctatcaccattacgctggc

SEQ ID NO: 152236 - DNA, 80 bp, synthetic construct
  source 1..80: mol_type = other DNA
gaccatcacacacagtacgcccaaccgctcttagcgcgcttgaaattggtgcatcctcaacagcaactccagagacaacc

SEQ ID NO: 152237 - DNA, 80 bp, synthetic construct
  source 1..80: mol_type = other DNA
gctttagctccactaaacaaaaaactgtattagatcaaatgtataaatcaaaccaatactgggcctctcacttaactcca

SEQ ID NO: 152238 - DNA, 80 bp, synthetic construct
  source 1..80: mol_type = other DNA
cagacgcagacgcagacgaaagggtaggagacacagagccaaactgataataaaacaatggcaaccagaaattgtcagaa

SEQ ID NO: 152239 - DNA, 80 bp, synthetic construct
  source 1..80: mol_type = other DNA
aaaaaccaactgctatgagcttctggagacctccggtgcacaatgtcacggggatccagcgcctgtggtacgaatccttt

SEQ ID NO: 152240 - DNA, 80 bp, synthetic construct
  source 1..80: mol_type = other DNA
taaaagtactgtatgatcagtatctaagacacctgaacagatggagcacctcaaacgatgtcctagaccttgccaggtac

SEQ ID NO: 152241 - DNA, 80 bp, synthetic construct
  source 1..80: mol_type = other DNA
aatggataaaatatggacctcgcgcacaccaactgtgcagcattggacattattattcaacttccccactgaacggcatg

SEQ ID NO: 152242 - DNA, 80 bp, synthetic construct
  source 1..80: mol_type = other DNA
tttaagctctccttcaaataaatgttggccgtgggagtttcacttgtcggtgtctacctctataagtcactaagcactcc

SEQ ID NO: 152243 - DNA, 80 bp, synthetic construct
  source 1..80: mol_type = other DNA
gatttggaggtgtatgtacaggaaacataaaaataatgaactatcacctaatgactcatgaggacatgttaaacttacaa

SEQ ID NO: 152244 - DNA, 80 bp, synthetic construct
  source 1..80: mol_type = other DNA
ttacacagcaggcaacccaaacagtacctatgattggcaaaactatagcacaacaacaaactacaaaaagacaaaagata

SEQ ID NO: 152245 - DNA, 80 bp, synthetic construct
  source 1..80: mol_type = other DNA
cgacctcaaaacggccgtcttgtctaagtacaaaggaaatgtccaaattgaaatgaatgaaaacatccagattgctgtgg

SEQ ID NO: 152246 - DNA, 80 bp, synthetic construct
  source 1..80: mol_type = other DNA
attcgggctcgggactggccgggctatgggcaaggctcttaaaaaagcatgtttctcggcagggtctggagaaagaagag

SEQ ID NO: 152247 - DNA, 80 bp, synthetic construct
  source 1..80: mol_type = other DNA
cctttgtacgcctgttttatctcccttcccaacgcaacttagaagttttcaaatcgaggctcaataggtgaagcgcaaac

SEQ ID NO: 152248 - DNA, 80 bp, synthetic construct
  source 1..80: mol_type = other DNA
agttcatgaccactgaagatgaacaatcagcaaacctactccctgagtatagccctacaaaggagatccacataccaggt

SEQ ID NO: 152249 - DNA, 80 bp, synthetic construct
  source 1..80: mol_type = other DNA
tggcaccgtgccagaactgcgccatgctgggcgccaggaaaaacaggataccggagtcgtaggcgaacacgtcccacttg

SEQ ID NO: 152250 - DNA, 80 bp, synthetic construct
  source 1..80: mol_type = other DNA
cacaagttgaatcttttataccaatcaataatatccaggcccaaatcggtcagatcagcatgtacactatccctgtaacc

SEQ ID NO: 152251 - DNA, 80 bp, synthetic construct
  source 1..80: mol_type = other DNA
catccaatgtaggtaacacattagctacaccatacatgctaaaatttccaccaccaactaaaaaacaaggcacaggcaca

SEQ ID NO: 152252 - DNA, 80 bp, synthetic construct
  source 1..80: mol_type = other DNA
gccacagttccttaacccgaacgacgccaacccagtggatgcaccaaccctgcccgactcttcgagtaatcgattttaca

SEQ ID NO: 152253 - DNA, 80 bp, synthetic construct
  source 1..80: mol_type = other DNA
aagcaggagataccttaccaggacattgatattgagctacaaaaggacatacaaagaagggccaaaaacaccaaacgtac

SEQ ID NO: 152254 - DNA, 80 bp, synthetic construct
  source 1..80: mol_type = other DNA
gggaaaagcacaatcaaccatagagagagactttaattatatacaatatgttttaaattgtttaggcagcttaatagtaa

SEQ ID NO: 152255 - DNA, 80 bp, synthetic construct
  source 1..80: mol_type = other DNA
ggaaaaagaaaaattgttaacgcataatgacattgaagtccaagtgcctattcgcacgcggcgactactcgtcccttgga

SEQ ID NO: 152256 - DNA, 80 bp, synthetic construct
  source 1..80: mol_type = other DNA
agtgtttggcaaacccaagcatataactgcatggattcctcgcccgcccagagcaacccaatacctgcacaagtttagta

SEQ ID NO: 152257 - DNA, 80 bp, synthetic construct
  source 1..80: mol_type = other DNA
attgctagaaggaataagatcaccacttatgggggtagtcttagatttggtgcagtgtacacttgtaattacaaaataat

SEQ ID NO: 152258 - DNA, 80 bp, synthetic construct
  source 1..80: mol_type = other DNA
tgggccatattaatactctcgcccgcgataatagtcctctggcccagactcctactacaacttcaggccaggggccgccg

SEQ ID NO: 152259 - DNA, 80 bp, synthetic construct
  source 1..80: mol_type = other DNA
attcaaaattaaaaaattttcgggtctatttcagagaaggcagagatcagctgtggaaaggacctggggaactactgtgg

SEQ ID NO: 152260 - DNA, 80 bp, synthetic construct
  source 1..80: mol_type = other DNA
gtggcaatatgatttccgaacagattgtcaagaacccctgcagagacgaaggactggaaccctcctaccccagtagactc

SEQ ID NO: 152261 - DNA, 80 bp, synthetic construct
  source 1..80: mol_type = other DNA
caagctatctcagcctttgcagttacagcagggatggtgtatgttgtgtacaaactctttgcaggatttcagggcgcata

SEQ ID NO: 152262 - DNA, 80 bp, synthetic construct
  source 1..80: mol_type = other DNA
tttctagctaagatgattacaaatgatagtgatatatactctctgcctccagatccaaagtattttgatggttatgatca

SEQ ID NO: 152263 - DNA, 80 bp, synthetic construct
  source 1..80: mol_type = other DNA
tcactcaccagatcatgtacgtaccccctggcggtcccgtgcccacaaaagtaaacagctacagttggcagacgtccacc

SEQ ID NO: 152264 - DNA, 80 bp, synthetic construct
  source 1..80: mol_type = other DNA
aggaagagtaagggaaaggtggagtggggcaaagggtgtaatacttactcatcagtaggagtagacaaagggctccaagt

SEQ ID NO: 152265 - DNA, 80 bp, synthetic construct
  source 1..80: mol_type = other DNA
ccagagtgccactgggaaataaaagacctgcccctgtgggccctcctaaacggatacacagactacctagagacacaagt

SEQ ID NO: 152266 - DNA, 80 bp, synthetic construct
  source 1..80: mol_type = other DNA
aagtccgtcactaaccacgtgactcccgcaggccaaccgaattctacatcgtgcacttcctgggcggggtttacgtcata

SEQ ID NO: 152267 - DNA, 80 bp, synthetic construct
  source 1..80: mol_type = other DNA
gatgatgcgcagccccagtttgcccttgcagcggcagtaagggggtgacgtgtcaacggaggacgttggtttttgaaaaa

SEQ ID NO: 152268 - DNA, 80 bp, synthetic construct
  source 1..80: mol_type = other DNA
gcaaagtcatcaatctcagcgtaaaagttttcgtgtctttcgttttcaggggactcatcctcctgacattttcgccagcc

SEQ ID NO: 152269 - DNA, 80 bp, synthetic construct
  source 1..80: mol_type = other DNA
gaagaccacgacaatgcagtttatatactatggaatagagatctcatggttgtttgtagcagagctcaaggaactgacac

SEQ ID NO: 152270 - DNA, 80 bp, synthetic construct
  source 1..80: mol_type = other DNA
tttaaagatttaaaaattgacataaaaaccagcccacccccagaatgtatcaatgacctgctgcagtcagtagactcacc

SEQ ID NO: 152271 - DNA, 80 bp, synthetic construct
  source 1..80: mol_type = other DNA
gccctctcgtttcaggtccggcgtgtccacggagactcggacgtagcccttaccgcggcgtatggcgttgaccggacaca

SEQ ID NO: 152272 - DNA, 80 bp, synthetic construct
  source 1..80: mol_type = other DNA
agggtgcaacttcagctataccaatcaccataactattgcaccaatgtgttctgagttttcaggcctcagacaagctgtt

SEQ ID NO: 152273 - DNA, 80 bp, synthetic construct
  source 1..80: mol_type = other DNA
catcacgaattttataacactaaactacattctattattaaactcagcaaaatgggcgcgcaagtctccacgcagaagac

SEQ ID NO: 152274 - DNA, 80 bp, synthetic construct
  source 1..80: mol_type = other DNA
tcagattgctaggtgttcgtgtgtgactggcgtgtattactgctcttcgcgccgcaaacattacccaatcactgtgacca

SEQ ID NO: 152275 - DNA, 80 bp, synthetic construct
  source 1..80: mol_type = other DNA
ctttggctcggcctcctgccccgagaccggctcgtccgcctccagcttcatgactgtggtggcctctgtctccgccccag

SEQ ID NO: 152276 - DNA, 80 bp, synthetic construct
  source 1..80: mol_type = other DNA
ggaattgaggatataatatctgaggtcgcaagtaatgcactaaaattgtcacagccaaaacccaacgtgcagcatagtct

SEQ ID NO: 152277 - DNA, 80 bp, synthetic construct
  source 1..80: mol_type = other DNA
agaaaccagagttaagaagagcaattcaccaaggacctgagcatgaatttctgtacgctgtcattaagagaaactgccat

SEQ ID NO: 152278 - DNA, 80 bp, synthetic construct
  source 1..80: mol_type = other DNA
gctgctttacacccaaaggaccctaggttagacgctgatctagatgtcgcagtgctcagtaaatataagggtaacactca

SEQ ID NO: 152279 - DNA, 80 bp, synthetic construct
  source 1..80: mol_type = other DNA
cctttggaggtttcggacaccagagcaaggctgtgtatgtagcaggatataaaatatgtaattaccatcttgcaacccca

SEQ ID NO: 152280 - DNA, 80 bp, synthetic construct
  source 1..80: mol_type = other DNA
acctcgcccggaggcgactcggactatcacggcctgagcggcgtcgacggcgcactggcgcgacccgacccggtattttg

SEQ ID NO: 152281 - DNA, 80 bp, synthetic construct
  source 1..80: mol_type = other DNA
gacctctcagcatccctctcccctggcccagaacagcacccgaaagagtgcccagcagaagttcctgggcaacaaccact

SEQ ID NO: 152282 - DNA, 80 bp, synthetic construct
  source 1..80: mol_type = other DNA
tagcgccagcataacagcaaagtacaaatttagatggcactttgggggcaaccctgtatctgaacaggttattgcagacc

SEQ ID NO: 152283 - DNA, 80 bp, synthetic construct
  source 1..80: mol_type = other DNA
ctgtccctgctggactcaatttaccacgattgcgatattgcacagagtcagcgcctgcccctccctcgagaacccaagtt

SEQ ID NO: 152284 - DNA, 80 bp, synthetic construct
  source 1..80: mol_type = other DNA
ttgactcaatatgtagaattatttctaagcaataagactttaaaaagtggttctcatgtaaattcaaatttaattttggc

SEQ ID NO: 152285 - DNA, 80 bp, synthetic construct
  source 1..80: mol_type = other DNA
cttccccaaaactaacttccacaaattgggaagactactacaaacaattcttaaacacagccatacctgaaaataaagac

SEQ ID NO: 152286 - DNA, 80 bp, synthetic construct
  source 1..80: mol_type = other DNA
tcaaacaaaagaagagaagtgagccagtggctattgttgtgcatggtccaccaggtacagggaaatcaataacaactagt

SEQ ID NO: 152287 - DNA, 80 bp, synthetic construct
  source 1..80: mol_type = other DNA
gggatgaaggtgacgtgaaaagatatgccgtctgggacatcagtgtgaaggatatggtccaaatgagaagaaagtgtgag

SEQ ID NO: 152288 - DNA, 80 bp, synthetic construct
  source 1..80: mol_type = other DNA
tgtatactttaacagaaagagtcccatgggaggcagcatatacacagcacccatgatgcacccaggagcccttatgctta

SEQ ID NO: 152289 - DNA, 80 bp, synthetic construct
  source 1..80: mol_type = other DNA
caacagattctatactttggaaagccagatgtggtcccctgaatctaaaggatggtggtggaaactacctgatgctctga

SEQ ID NO: 152290 - DNA, 80 bp, synthetic construct
  source 1..80: mol_type = other DNA
tatatcttaatagtaagaaatgggggcgcagttttcaactcagcgctcaggttcccacgagacgagcaatatagctcgtg

SEQ ID NO: 152291 - DNA, 80 bp, synthetic construct
  source 1..80: mol_type = other DNA
taagtcgggtaataacaagtacagatttgcaggtgcaattatggctggagttgccctcggtgttgcaacagcagccactg

SEQ ID NO: 152292 - DNA, 80 bp, synthetic construct
  source 1..80: mol_type = other DNA
gccacccaccgccatgcagctgtcaccaagggcacttaccggccagaaggggccagcaaagcacattctgcgccagttgt

SEQ ID NO: 152293 - DNA, 80 bp, synthetic construct
  source 1..80: mol_type = other DNA
ttactccacctgataaatccactgagtttaagaatatgacttgggaaagtgtcacattcctgaagagaggtttccgtcca

SEQ ID NO: 152294 - DNA, 80 bp, synthetic construct
  source 1..80: mol_type = other DNA
agactttaatgctgtaaatacctttagaacaatatcgaacttctcacacccacaactacagcttcccacaccatccacca

SEQ ID NO: 152295 - DNA, 80 bp, synthetic construct
  source 1..80: mol_type = other DNA
ttatgttagatttgatttggagatcacaatagtgactaacaatgcaggcctaatgcaaattatgtatgtgccaccaggag

SEQ ID NO: 152296 - DNA, 80 bp, synthetic construct
  source 1..80: mol_type = other DNA
tagtgatgtaaacaaaccaactagaccagatacatcagcatgtagattctatactctcaaaagtaagacatggacagcag

SEQ ID NO: 152297 - DNA, 80 bp, synthetic construct
  source 1..80: mol_type = other DNA
gcaacacgaagggagaagaaaagcaataagtgagcacctacaccccaaaactttaacaggctcagttcccaatcgaaaag

SEQ ID NO: 152298 - DNA, 80 bp, synthetic construct
  source 1..80: mol_type = other DNA
agataataaatggatcattccagctgattgcaaaattgagcgggatttaaaccttgcaaataacatcataacaatcattg

SEQ ID NO: 152299 - DNA, 80 bp, synthetic construct
  source 1..80: mol_type = other DNA
tttaacttttgtacatataatcctgacatacagcaactaacaaacctaagaaaatactacttctactgtgagacagcaca

SEQ ID NO: 152300 - DNA, 80 bp, synthetic construct
  source 1..80: mol_type = other DNA
ggacctggagcagccgccccggcaacgacgccgcatggtcagcgtgaccctcttttcgccctactcggtagcctacagcc

SEQ ID NO: 152301 - DNA, 80 bp, synthetic construct
  source 1..80: mol_type = other DNA
gtgttgtaattattccggtggttccattagattttgcagattcgagtagcactcaaataccaattacggtcacaattgca

SEQ ID NO: 152302 - DNA, 80 bp, synthetic construct
  source 1..80: mol_type = other DNA
atgactacagatgattttcaatccccatgtgccttgccctggttccatcctactaaagagatatcaataccaggtcaagt

SEQ ID NO: 152303 - DNA, 80 bp, synthetic construct
  source 1..80: mol_type = other DNA
cgagcacaacatcagagattggggtggtgcagaaggcggtgtacaatgcaggtatgggagttggtgttggtaacttgaca

SEQ ID NO: 152304 - DNA, 80 bp, synthetic construct
  source 1..80: mol_type = other DNA
ccggaagctgtactcctcacgtgacttgtcacgtggttgtgacgtcacggccgccattttgtttaacaaaatggccgact

SEQ ID NO: 152305 - DNA, 80 bp, synthetic construct
  source 1..80: mol_type = other DNA
accatccagggaataattttagtaaatggaatattactctcaaagaaatggcccaaatcagaagaaagtgtgaaatgttt

SEQ ID NO: 152306 - DNA, 80 bp, synthetic construct
  source 1..80: mol_type = other DNA
acagactctttatggggagaccctgtatataacacaagcaacgtatataatgcctttacacaaaatgcagaaaacttatg

SEQ ID NO: 152307 - DNA, 80 bp, synthetic construct
  source 1..80: mol_type = other DNA
tacctatcacgttaattccagcgataaagcgtcaagtcgggccaacggtaccatttcttggatggctaacgtctcggcgg

SEQ ID NO: 152308 - DNA, 80 bp, synthetic construct
  source 1..80: mol_type = other DNA
gtgttacatttataccaccaatggctgacttacctgataaaggcaaaccatttgactcaagatttgttttttgcagcaca

SEQ ID NO: 152309 - DNA, 80 bp, synthetic construct
  source 1..80: mol_type = other DNA
ggggtttcaccgcgccgagggatctctctacgggtgtttccacggcgcttctgcgcggcgcttcgccttccgcgcgtttt

SEQ ID NO: 152310 - DNA, 80 bp, synthetic construct
  source 1..80: mol_type = other DNA
ccgacgccagatccagtatcactgctaccaccgacaccttaattgaaagtagggcaatgcaaaacacaggagcatttgga

SEQ ID NO: 152311 - DNA, 80 bp, synthetic construct
  source 1..80: mol_type = other DNA
cttggatcaacttggttttcctggttccatgatggataaactgagcaaaacaactcatatttacaaggacaccatataca

SEQ ID NO: 152312 - DNA, 80 bp, synthetic construct
  source 1..80: mol_type = other DNA
ggcttagtgcgtcaccacccacgtgacccgcctccgccaattaacaggtacttcgtacacttcctgggcgggcttataag

SEQ ID NO: 152313 - DNA, 80 bp, synthetic construct
  source 1..80: mol_type = other DNA
gtatggaattgacctccccctaattacatatattaaggatgaacttagaggcaaagacaaaatcaggttgggtaaaagca

SEQ ID NO: 152314 - DNA, 80 bp, synthetic construct
  source 1..80: mol_type = other DNA
agctggggagcaaatgactttgtctgtgcctttctactccaacaaacctctaaggacgataagatcatcaaatgctttag

SEQ ID NO: 152315 - DNA, 80 bp, synthetic construct
  source 1..80: mol_type = other DNA
tgccggtgcgtgtggctccacagcacttgccgttccgccagtccggcaccggggacggggtgttgcgggcgctcggtggt

SEQ ID NO: 152316 - DNA, 80 bp, synthetic construct
  source 1..80: mol_type = other DNA
ttgcccagctccgtaggaagatggaaatgtttacatacctacggtatgatgtggaagttacatttgtcataaccagctcg

SEQ ID NO: 152317 - DNA, 80 bp, synthetic construct
  source 1..80: mol_type = other DNA
gtggtgtccaagaccccctagagcagtcagttatagagggcctggggtagatcttttgtcaacatcattgacccctctgt

SEQ ID NO: 152318 - DNA, 80 bp, synthetic construct
  source 1..80: mol_type = other DNA
actatgtaaaacagccagacagctttggtggctcctttagcaccatgacatttaatttaaaagtactgtttgacgaaaac

SEQ ID NO: 152319 - DNA, 80 bp, synthetic construct
  source 1..80: mol_type = other DNA
acgggtgccagcggacaggcagtacctgctgacgtcattgagaccagaaaggtgatcaactacaagaccagaagtgagtc

SEQ ID NO: 152320 - DNA, 80 bp, synthetic construct
  source 1..80: mol_type = other DNA
aaagccccccagactaatgttaaacaagtggtacttcactcatgacttttgtaaagtcccactattcagcatgtgggcct

SEQ ID NO: 152321 - DNA, 80 bp, synthetic construct
  source 1..80: mol_type = other DNA
agcctgagtaatggagagacagctaatacctttgactcgcaaaacacgactgggcaaacagctgtacaggccaacgtcgt

SEQ ID NO: 152322 - DNA, 80 bp, synthetic construct
  source 1..80: mol_type = other DNA
agacactacaattttacccttatgattatcccattcgccaaattggattatactgacacagcctcctacgtgccaatcac

SEQ ID NO: 152323 - DNA, 80 bp, synthetic construct
  source 1..80: mol_type = other DNA
aaaccagacatgttattcaaacgagatccaggagtgagtctaccattgaatcgttctttgcgcggggcgcttgtgttacc

SEQ ID NO: 152324 - DNA, 80 bp, synthetic construct
  source 1..80: mol_type = other DNA
gatgcaccggatactgtaaatttcccccccggcccagaccaactacttttcggggccgtgtgggaccaactactttgggt

SEQ ID NO: 152325 - DNA, 80 bp, synthetic construct
  source 1..80: mol_type = other DNA
gcgctcatcgcctgggtggaggagatgctgcgctacgtggaaagcaagcccactaacgaactgtctcaacgactgcaacg

SEQ ID NO: 152326 - DNA, 80 bp, synthetic construct
  source 1..80: mol_type = other DNA
gactcagaaacaccaggttttattgtagatttactatcctcatccaaagaccctagggtaatccagtattgtgaagatga

SEQ ID NO: 152327 - DNA, 80 bp, synthetic construct
  source 1..80: mol_type = other DNA
ttcctcggtagggagcgcttagggctgttgagctcaacagccccacctgggtaaaatgtatgttctaaagagttacccaa

SEQ ID NO: 152328 - DNA, 80 bp, synthetic construct
  source 1..80: mol_type = other DNA
cgagtaacgcactccagttgtctcagcccaggcccagcacatcacaacaaagtttacccaacaccaacagctcagaacca

SEQ ID NO: 152329 - DNA, 80 bp, synthetic construct
  source 1..80: mol_type = other DNA
aagataactggagcaaaaaaaattcaccatggacaggtaactcaggtacatacccacaaacaaccagtgaaatgtacaaa

SEQ ID NO: 152330 - DNA, 80 bp, synthetic construct
  source 1..80: mol_type = other DNA
caccttctggttctacagagaccaaaaaacagactatatagttcagtggagcagaaatcccccttttaaactaaacaagt

SEQ ID NO: 152331 - DNA, 80 bp, synthetic construct
  source 1..80: mol_type = other DNA
gcttatactgaacacgtttacgaatgtgacctttcgtgtaacattactacttataacgaatatgaaatactcaattattt

SEQ ID NO: 152332 - DNA, 80 bp, synthetic construct
  source 1..80: mol_type = other DNA
tggacaagttaaggattatagcatatggggatgatgtggttgcatcatatccagacccactagattcaaaagaaattgca

SEQ ID NO: 152333 - DNA, 80 bp, synthetic construct
  source 1..80: mol_type = other DNA
cagaatataatgggctgcggttgggtggttaccaaggccttcctactatgaacacccccggtagcaatcaattcctcact

SEQ ID NO: 152334 - DNA, 80 bp, synthetic construct
  source 1..80: mol_type = other DNA
gaaggagactacagttcagaggaagaaaaatcgccgtcattcaccgaagagacgacgcagacgctacagctccagctcca

SEQ ID NO: 152335 - DNA, 80 bp, synthetic construct
  source 1..80: mol_type = other DNA
ttcagaattatggcgcttttggtcagcaatcaggcgcaatgtacgtgggcaattacaggatagtgaacaggcacttggca

SEQ ID NO: 152336 - DNA, 80 bp, synthetic construct
  source 1..80: mol_type = other DNA
gtgcctgttttatatcccttccctaattcgaaacatagaagtaatgcgcaccactgatcaatagcaggcgtaacgcgcca

SEQ ID NO: 152337 - DNA, 80 bp, synthetic construct
  source 1..80: mol_type = other DNA
actatgctctaaggagcgatgactatatctcacaaaacagaccctatggagggtcctttagcacaaccacctggagctta

SEQ ID NO: 152338 - DNA, 80 bp, synthetic construct
  source 1..80: mol_type = other DNA
ttacattcctattttgtgggagcatgatggccactggcaagatccttatcagttactctccacctggtgccgctccgcca

SEQ ID NO: 152339 - DNA, 80 bp, synthetic construct
  source 1..80: mol_type = other DNA
cggcagcccccagcggttctagcaaccaacaatgtggtggaaccgctggaagaggtaccggtggagaccgctcagaaggt

SEQ ID NO: 152340 - DNA, 80 bp, synthetic construct
  source 1..80: mol_type = other DNA
aaaacttgattacgctactgggtcatcgacctatgtgcctatcacagtcactgtagcgccaatgtgtgcggagtacaatg

SEQ ID NO: 152341 - DNA, 80 bp, synthetic construct
  source 1..80: mol_type = other DNA
atgaggcaggcacccagtatggacaagacgctcctccgttaacacaccaggtcatgtacataccaccagggggcccggtg

SEQ ID NO: 152342 - DNA, 80 bp, synthetic construct
  source 1..80: mol_type = other DNA
tataacaaatgttactgattcatatgatctacacaataaagagggtattaaacttgaaattacagttataaagctggaca

SEQ ID NO: 152343 - DNA, 80 bp, synthetic construct
  source 1..80: mol_type = other DNA
tggatactagtaaaagggacgtcaaagctcactacgtgttgcgtgttttttttttttctatgatatgcgtgtctagttcg

SEQ ID NO: 152344 - DNA, 80 bp, synthetic construct
  source 1..80: mol_type = other DNA
atgtacatcccgccaggtggtcccgtcccggattccgtggatgactacgcgtggcaaacctcaacaaacccaagcatctt

SEQ ID NO: 152345 - DNA, 80 bp, synthetic construct
  source 1..80: mol_type = other DNA
cattccggtccgcatacatagacatcacctacaatcccataacagacaaaggagaaggcaacataatttggtttcaatat

SEQ ID NO: 152346 - DNA, 80 bp, synthetic construct
  source 1..80: mol_type = other DNA
atgatcctagattggaagttgattttaaacaagctttgttttcaaagtataaaggcaacaatcagtgtgagataaatgag

SEQ ID NO: 152347 - DNA, 80 bp, synthetic construct
  source 1..80: mol_type = other DNA
taacgttggtgatgttgccaatggttgacgcttgtgaggtgacagatgtgtgtggcgtcgttgatgtgttgttattcgga

SEQ ID NO: 152348 - DNA, 80 bp, synthetic construct
  source 1..80: mol_type = other DNA
taaactcgtgtgctgtcgcagctggagacgagatgggatgggtgttatgctcagtgacattaactgcagcatcaggggag

SEQ ID NO: 152349 - DNA, 80 bp, synthetic construct
  source 1..80: mol_type = other DNA
taccaacaatgatttaatcagaattgaacctattgggatctggatccaaggagaaccagggcaagggaaatctttcttga

SEQ ID NO: 152350 - DNA, 80 bp, synthetic construct
  source 1..80: mol_type = other DNA
ataagaactcttattttggacacatacaagaatatagatttagacaaattgaaaatcattgcttatggggatgatgtggt

SEQ ID NO: 152351 - DNA, 80 bp, synthetic construct
  source 1..80: mol_type = other DNA
actgtatcgattagagttgggcgattataaattagtagagataacaccaattggcttggccccgacaagtgtaaaaagat

SEQ ID NO: 152352 - DNA, 80 bp, synthetic construct
  source 1..80: mol_type = other DNA
ggaaaattagaaccacagacattggtaagtgtttaattctgcctgaatacagtgttcttaggaagcgctggttggacctc

SEQ ID NO: 152353 - DNA, 80 bp, synthetic construct
  source 1..80: mol_type = other DNA
tggctcatgtggtccaaaagataggaaaggaagcactagtaatatggggaaaattacccttctttcatctgccagtagaa

SEQ ID NO: 152354 - DNA, 80 bp, synthetic construct
  source 1..80: mol_type = other DNA
agcaataagaatagggggataataaaaacatttagtaacggttgcgattacgttagtaataagggagtcgataccgtaag

SEQ ID NO: 152355 - DNA, 80 bp, synthetic construct
  source 1..80: mol_type = other DNA
agcttgtacacacagtggcttgatgaatttatttaatcattaataaatatagtacaatgtttagaggaacaaagtattat

SEQ ID NO: 152356 - DNA, 80 bp, synthetic construct
  source 1..80: mol_type = other DNA
tggatttacccctctgattgcacatacgcccgacttgattagaattatcatattggtaagacactattatcacaatgggt

SEQ ID NO: 152357 - DNA, 80 bp, synthetic construct
  source 1..80: mol_type = other DNA
atcatcttctaatctgtgccgcttggagggaaacatgaccacctgaagtctgttaaccaggtcagtggttttgtttcctt

SEQ ID NO: 152358 - DNA, 80 bp, synthetic construct
  source 1..80: mol_type = other DNA
ctatctctgcaccctgcatcgcagacacctgccatgagcttcagggcgcccactcttaatgccggtcaacgagagcagct

SEQ ID NO: 152359 - DNA, 80 bp, synthetic construct
  source 1..80: mol_type = other DNA
gagtgtggggaatgcgtattgcaacttttacgacggttggtctcacttttcccagagtggtgtgtacggatttaccaccc

SEQ ID NO: 152360 - DNA, 80 bp, synthetic construct
  source 1..80: mol_type = other DNA
tggtgttgccatacgtaaacagtttagcgatagattgtatggccaaacacaataactggggtttagtaattataccactc

SEQ ID NO: 152361 - DNA, 80 bp, synthetic construct
  source 1..80: mol_type = other DNA
tgccccagatgacctgtcccctgtaacatcagatggagaagcttactataaaaaatttttagatgaagcatttaaaaaac

SEQ ID NO: 152362 - DNA, 80 bp, synthetic construct
  source 1..80: mol_type = other DNA
tgagccatggcctactggtggcgccgccggaggtggccgtggagacgcagatggaggcgctggagacgtcgccgacgagt

SEQ ID NO: 152363 - DNA, 80 bp, synthetic construct
  source 1..80: mol_type = other DNA
gttggattcactccaaacacttccccttcttttaaactcatcactacggtcttgttgatcagagactcatatcacaatgg

SEQ ID NO: 152364 - DNA, 80 bp, synthetic construct
  source 1..80: mol_type = other DNA
tttggtatcggtgtttttgtagacgcgccgcaagttttccataatcaccgttttttcgcccagtcggatcacgtccatgc

SEQ ID NO: 152365 - DNA, 80 bp, synthetic construct
  source 1..80: mol_type = other DNA
gatatggggtttggccccattatttaacccctcaagatgctacagcaatagataaaccaactcaacctgacacatcttcc

SEQ ID NO: 152366 - DNA, 80 bp, synthetic construct
  source 1..80: mol_type = other DNA
tttcattagtttgggaatctgccagctggtgctgttggaaggttcttccatttccgaggcggtcagttcatcgtacaccg

SEQ ID NO: 152367 - DNA, 80 bp, synthetic construct
  source 1..80: mol_type = other DNA
aaccacaccaaacgatcagacaatactattagccctcacggctgatttacagatagatgggtgtgaccaaccagggccag

SEQ ID NO: 152368 - DNA, 80 bp, synthetic construct
  source 1..80: mol_type = other DNA
agaaaacaaagagacagttagcaaaccctacacatacaacactgttacaagcttatggggagactatgtctacaaaaaag

SEQ ID NO: 152369 - DNA, 80 bp, synthetic construct
  source 1..80: mol_type = other DNA
catcgtagaaatgtagtagatgtgatgactgctatatttcaaggacccatttccatgaataatccaccaccccctgcaat

SEQ ID NO: 152370 - DNA, 80 bp, synthetic construct
  source 1..80: mol_type = other DNA
atgtgctatccttgtgtcacttaatgtggcataatgggcagagtgcttataggagttttgtagagaggatccgcagtgtt

SEQ ID NO: 152371 - DNA, 80 bp, synthetic construct
  source 1..80: mol_type = other DNA
ggacagcatcacctacataccagacactgttaagcccgacgtgtcaaactacggagcatttggtcaacaatccggtgctg

SEQ ID NO: 152372 - DNA, 80 bp, synthetic construct
  source 1..80: mol_type = other DNA
ccggcaaacttcagaaaatgttgccctctggtttgtgggaaagccctccaattaatggacaagaataccaggcaacgctt

SEQ ID NO: 152373 - DNA, 80 bp, synthetic construct
  source 1..80: mol_type = other DNA
gcccccgccagggtgtctatcccatttatcagcataggaaatgcatatagtagcttttatgatgggtggtcccactttac

SEQ ID NO: 152374 - DNA, 80 bp, synthetic construct
  source 1..80: mol_type = other DNA
agacactgaacattataaaagtacttttgttaatactttacaaacaaaactaggctcaacatggggcaacagattaaaca

SEQ ID NO: 152375 - DNA, 80 bp, synthetic construct
  source 1..80: mol_type = other DNA
aagacatttattacaacactatgagcatctctgagcctccagaggcctacactaatgttaataagccttctgaatccaaa

SEQ ID NO: 152376 - DNA, 80 bp, synthetic construct
  source 1..80: mol_type = other DNA
agaagcctgagactagaaaacaagccatgttgggcacgcatatagtgtgggatgtgggactgcaatcaactgtttctcta

SEQ ID NO: 152377 - DNA, 80 bp, synthetic construct
  source 1..80: mol_type = other DNA
gttcgattgctgagggataccacacacattagccagaacaccttgattgcgtcaacacagggtattgatgatgttattga

SEQ ID NO: 152378 - DNA, 80 bp, synthetic construct
  source 1..80: mol_type = other DNA
atgaacaataacactaatgcagaagcagcagtagaaaatttcttaggcagatcagccctatgggccaacctaacactgac

SEQ ID NO: 152379 - DNA, 80 bp, synthetic construct
  source 1..80: mol_type = other DNA
acattgatgatgaagagatcaaagagcaaatttgtgatacagtgaaatacactaagagtatcctgtctaatcaaggacct

SEQ ID NO: 152380 - DNA, 80 bp, synthetic construct
  source 1..80: mol_type = other DNA
atttagaatagttaatgaaaatgatgttcacctcaccaaggttaaaatcagagtttaccaccgtgctaagcacgtcttgg

SEQ ID NO: 152381 - DNA, 80 bp, synthetic construct
  source 1..80: mol_type = other DNA
agatcttacttttctgaaacacaagggcaaatagtcaccacaaagtccacttttgattgcaacctacccagtatacacac

SEQ ID NO: 152382 - DNA, 80 bp, synthetic construct
  source 1..80: mol_type = other DNA
agcggtcccagaagggaaagttttcgtgggggcagcgacccggcacttccaaacgttcggcgtcgtccacggcgtagtgg

SEQ ID NO: 152383 - DNA, 80 bp, synthetic construct
  source 1..80: mol_type = other DNA
ttataacaccctgttacgtatagccgaaattgccaggatcagggttaaagatgtaagtatcaaggttacaagacaggttt

SEQ ID NO: 152384 - DNA, 80 bp, synthetic construct
  source 1..80: mol_type = other DNA
cttttggacattcttctgaaggaacggcggagagtagcgtagaatccagccagtggtctacccggtcgcatggtggcttc

SEQ ID NO: 152385 - DNA, 80 bp, synthetic construct
  source 1..80: mol_type = other DNA
catccgttccgaagaatgagggctttaatgaggataactggaaaattagtaaacgccctttcaagagaattgagagcaag

SEQ ID NO: 152386 - DNA, 80 bp, synthetic construct
  source 1..80: mol_type = other DNA
agtcccgctagtgaacagagattgggattcactatgctaggtgaaatactaaattactacacacactggagtgggtccct

SEQ ID NO: 152387 - DNA, 80 bp, synthetic construct
  source 1..80: mol_type = other DNA
cacaagagcacctcagagaacctactgcagaatctgtaaaaaacaccgaaaaaacaaatccaccctttaaatatgaaaac

SEQ ID NO: 152388 - DNA, 80 bp, synthetic construct
  source 1..80: mol_type = other DNA
cgccatctggctccctgctgttggctacctctcggatttcaaaaaagagcacgtgccgatgacggtgcacaggaaagagc

SEQ ID NO: 152389 - DNA, 80 bp, synthetic construct
  source 1..80: mol_type = other DNA
gaaggacacatgcaagcaaactgcccaaaccaacgggcgggttttttagggttaggaccatggggaaagaagcctcgcaa

SEQ ID NO: 152390 - DNA, 80 bp, synthetic construct
  source 1..80: mol_type = other DNA
acactcttcctgctgctgtctctctctacttctctaaattcccctccacattcagaaccctcaccctggatgaggccatc

SEQ ID NO: 152391 - DNA, 80 bp, synthetic construct
  source 1..80: mol_type = other DNA
gtttaagacgcagacgcaaaaagaaaaagataattattaaacagtggaacccagatactgtaaagagatgcagaatagtg

SEQ ID NO: 152392 - DNA, 80 bp, synthetic construct
  source 1..80: mol_type = other DNA
tatggcggattcgtgacgtcactgccgtcatattcagtggctgtcgccaaggattgacgtcacagttcaaaggtcatcct

SEQ ID NO: 152393 - DNA, 80 bp, synthetic construct
  source 1..80: mol_type = other DNA
gactaacagagctttggtttatcagttcattgggttcgtgcccttatcacctacagtttatacaactttggtgtacctgt

SEQ ID NO: 152394 - DNA, 80 bp, synthetic construct
  source 1..80: mol_type = other DNA
gctcaggatgatggaccattgggcgatgacaagccaaattatttcctaaatttcaagtccatgaatgtggacatcttcac

SEQ ID NO: 152395 - DNA, 80 bp, synthetic construct
  source 1..80: mol_type = other DNA
caatggagacactttttatggtctggtaactatcaatgattttggcaccctggccgtgagggttgtgaatgagtttaatc

SEQ ID NO: 152396 - DNA, 80 bp, synthetic construct
  source 1..80: mol_type = other DNA
acaccacccttaaggaggtgctggtagtaccaaacaacccagcttccggcccaacacacaccacacatccatctacactt

SEQ ID NO: 152397 - DNA, 80 bp, synthetic construct
  source 1..80: mol_type = other DNA
taaatttggatgacacaccagaagcagggggggcgtcacacgatccagtgtactccatgaacggaaccttagcgggtaat

SEQ ID NO: 152398 - DNA, 80 bp, synthetic construct
  source 1..80: mol_type = other DNA
acaaaaacaaagctcctccccagtgtgttctacaatgtttttcctggatcaaaagagccagcagtcctacatccagcaga

SEQ ID NO: 152399 - DNA, 80 bp, synthetic construct
  source 1..80: mol_type = other DNA
acacaattgttggaagaggcacagatacagcaggaaaagaatatgtatgagctacagaaattaaatcaatgggatgtttt

SEQ ID NO: 152400 - DNA, 80 bp, synthetic construct
  source 1..80: mol_type = other DNA
ctagcacaagtgtacaacaatatacttgatgaagacaagagaaggagacaagttgtggatgtcatgtctgcaatttttca

SEQ ID NO: 152401 - DNA, 80 bp, synthetic construct
  source 1..80: mol_type = other DNA
gcgcagcccccccaagaacaagaaaagatgccatgttggggacgcacgtaatctgggatattggattgcaatccagcgcc

SEQ ID NO: 152402 - DNA, 80 bp, synthetic construct
  source 1..80: mol_type = other DNA
gcgggggtgcggcgcgcttcgcgcgccgcccaccaggcggcgctacgcgccccccccgccgccattttgtgcagcccgcc

SEQ ID NO: 152403 - DNA, 80 bp, synthetic construct
  source 1..80: mol_type = other DNA
ggaacattacagtaccagcaactcaaggtctgccagttttagtaacaccaggatccagtcagtatttaacgtctgatgac

SEQ ID NO: 152404 - DNA, 80 bp, synthetic construct
  source 1..80: mol_type = other DNA
actgctcagtacaaattctactttaactgggggggcgacgctgtgtttccacagattatcaaagacccatgtccccagac

SEQ ID NO: 152405 - DNA, 80 bp, synthetic construct
  source 1..80: mol_type = other DNA
tcagtagcccttgtaggagagagagctttttatgatccaaggactgctggtagcaaatcccgattcaatgatatgattaa

SEQ ID NO: 152406 - DNA, 80 bp, synthetic construct
  source 1..80: mol_type = other DNA
agtatatttaacacaatgattaacaatatcattattaggacattagttttagatgcatataaaaatattgatttagataa

SEQ ID NO: 152407 - DNA, 80 bp, synthetic construct
  source 1..80: mol_type = other DNA
attgtcccacgttctgctattatgctggtctgattcctcttttgttttacatttatcaggtataggagacgatgttgcag

SEQ ID NO: 152408 - DNA, 80 bp, synthetic construct
  source 1..80: mol_type = other DNA
caccgtgggaagcaaggagcacttggtcaggcacacggacagggtcagcgggggacgcgtggcacagcagcccgtggtag

SEQ ID NO: 152409 - DNA, 80 bp, synthetic construct
  source 1..80: mol_type = other DNA
ggtgacaaaactcctcatcatcacgacagtcgtcgagatactcgtacgtggtgagcggatcgcgaaataggcgctcgtca

SEQ ID NO: 152410 - DNA, 80 bp, synthetic construct
  source 1..80: mol_type = other DNA
tcaaccggttcagcggaatcagaacgggatgaagaaaggagaaagagggaagaagaagaaacagcgcgagaacgccccgc

SEQ ID NO: 152411 - DNA, 80 bp, synthetic construct
  source 1..80: mol_type = other DNA
ttatgtccccgagcgtggaagcatgtgggttctcagataggctaaagcaaatcactatcggagactccactattaccacc

SEQ ID NO: 152412 - DNA, 80 bp, synthetic construct
  source 1..80: mol_type = other DNA
gcgtgggaggtggaggagcagatataggagatggaggcgaaagggcagacgcaggcgaaaaaagaaactaataataagac

SEQ ID NO: 152413 - DNA, 80 bp, synthetic construct
  source 1..80: mol_type = other DNA
tgtccaacaagatatccaaattcatcagctggctacaggataagattatcccacaagcgagagataaactagagtttgtc

SEQ ID NO: 152414 - DNA, 80 bp, synthetic construct
  source 1..80: mol_type = other DNA
accaatgatatgggttccctgtgttcccgtatagttactgaagaacatggctctcgtgtgaaaattgcaacgcgggtgta

SEQ ID NO: 152415 - DNA, 80 bp, synthetic construct
  source 1..80: mol_type = other DNA
accacagagtttgatgaaaagagatgcaagtgcgtggtagagaacctgcccctgtgggcagccttctactgctaccacaa

SEQ ID NO: 152416 - DNA, 80 bp, synthetic construct
  source 1..80: mol_type = other DNA
gatgccatacaaaacacagtcacttccaccatacagagggttgcgaccagtgctgtcgggcaagacgcaacggctgctaa

SEQ ID NO: 152417 - DNA, 80 bp, synthetic construct
  source 1..80: mol_type = other DNA
agtcaataaaactactagagatgtgagcaaactagcaagcatgatagacaagtatggcttagatttaccatatgttacat

SEQ ID NO: 152418 - DNA, 80 bp, synthetic construct
  source 1..80: mol_type = other DNA
cggttagtcacaccaaggtggacaacatttttggcagagcctggtatgttacatcacatgattttaataatggtgacaca

SEQ ID NO: 152419 - DNA, 80 bp, synthetic construct
  source 1..80: mol_type = other DNA
aatagaaaaatggaagccacaacaactcggtaacaatgaatactttcaaaaggtagatggtctctggggagacacagtat

SEQ ID NO: 152420 - DNA, 80 bp, synthetic construct
  source 1..80: mol_type = other DNA
tagagattacaactagagtgtaccacaaagctaaacatgtaaaggcttggtgccccagaccccccagagcagtagaatac

SEQ ID NO: 152421 - DNA, 80 bp, synthetic construct
  source 1..80: mol_type = other DNA
aagatcattacataaccaccagggaatcaattaagacagctggacccagtgatatgtatgtacacactaaggatgccatt

SEQ ID NO: 152422 - DNA, 80 bp, synthetic construct
  source 1..80: mol_type = other DNA
gcacaagacaattttattgtgcactcagaagacataactcccagaggagctgcctatggaggcaacttaacacacataac

SEQ ID NO: 152423 - DNA, 80 bp, synthetic construct
  source 1..80: mol_type = other DNA
aacagcttaaatggggaagaggagggctgagtgacactgcaaggacattcctgcagaagtttggcatcagactcccataa

SEQ ID NO: 152424 - DNA, 80 bp, synthetic construct
  source 1..80: mol_type = other DNA
aagacccatattcggcagcgggatatgtcacctgttggtatcagaccggggtggtgtcgccagctggtaaccagccaaag

SEQ ID NO: 152425 - DNA, 80 bp, synthetic construct
  source 1..80: mol_type = other DNA
gaggacctctcggagctgtgcgagagcaatatcatcgtcatcgacgagtgcggccttatgctgcgctacatgctgcaggt

SEQ ID NO: 152426 - DNA, 80 bp, synthetic construct
  source 1..80: mol_type = other DNA
gacaagattatgcacactggtatccaagatacagataccaaagagaagctatagaaaatatattaatgacaggaccaatg

SEQ ID NO: 152427 - DNA, 80 bp, synthetic construct
  source 1..80: mol_type = other DNA
agtgcaccttatggaactgtagtcaccaatgacatgggttcactatgtgtcagaatagtcacagaccagcaaaaacataa

SEQ ID NO: 152428 - DNA, 80 bp, synthetic construct
  source 1..80: mol_type = other DNA
gtttttttttcttttctctttggaacaacaaaagaggataaagatggtcggtgaatgtattattattattatcatcatta

SEQ ID NO: 152429 - DNA, 80 bp, synthetic construct
  source 1..80: mol_type = other DNA
cacacacatgtcaccaattacaaaccatcacaaggggattacagtgttgttattccagttagagaaagccctagacagat

SEQ ID NO: 152430 - DNA, 80 bp, synthetic construct
  source 1..80: mol_type = other DNA
gacggttagggacactcacagcttgggtaggcttatttgcaaaccattcctgactggaacaacatctggcaggatagaag

SEQ ID NO: 152431 - DNA, 80 bp, synthetic construct
  source 1..80: mol_type = other DNA
gacagtggcacctatgaatgcagagtataacgggcttcgactggccggacaccaggggctgcccaccatgctgacgccag

SEQ ID NO: 152432 - DNA, 80 bp, synthetic construct
  source 1..80: mol_type = other DNA
tggatttatccctctggttacacgtacgcctgacttgattaaaattgttatattggcaagacactactatcgcaatgggt

SEQ ID NO: 152433 - DNA, 80 bp, synthetic construct
  source 1..80: mol_type = other DNA
ctttactgcagaccacagcacacagactcctcccacacctatcaaagaatttgaaaaatggctatattcatctagtgtac

SEQ ID NO: 152434 - DNA, 80 bp, synthetic construct
  source 1..80: mol_type = other DNA
acaacaagtgcataggtacttccgttaacctttcagacagcacttttgaatctatattcagagactatttatacaaaatg

SEQ ID NO: 152435 - DNA, 80 bp, synthetic construct
  source 1..80: mol_type = other DNA
gaaagtaaccagcgtggaagaatgggagaacgcgcagacggagaagatttggacgcagaagacctagacgcacttatggc

SEQ ID NO: 152436 - DNA, 80 bp, synthetic construct
  source 1..80: mol_type = other DNA
gcattatcagccatcaaccagcactcatgatgcagaactacaggtgtctattagtaaagagttacaagacacacccaggg

SEQ ID NO: 152437 - DNA, 80 bp, synthetic construct
  source 1..80: mol_type = other DNA
cacctaacatgtaagtgcaatccgaatagcacatctaccaatggcagcaagtgccacgcgatgtgcaaatgccgggtcac

SEQ ID NO: 152438 - DNA, 80 bp, synthetic construct
  source 1..80: mol_type = other DNA
cttcaaacttggctttcattaaaatttcaaggccgtgcaacattcacttgtcggtgtctacctctaaaggtcactaagca

SEQ ID NO: 152439 - DNA, 80 bp, synthetic construct
  source 1..80: mol_type = other DNA
cttcagcaattgggtcatcacaacgcgcaaggctgcgcagctgaggcgcaagttggagatgtttacatacttaaggtttg

SEQ ID NO: 152440 - DNA, 80 bp, synthetic construct
  source 1..80: mol_type = other DNA
cagaccattacaaggtgtgctgccctatcctctgtggacaagcagtggtgattcgagacaggaaaacccagataagctat

SEQ ID NO: 152441 - DNA, 80 bp, synthetic construct
  source 1..80: mol_type = other DNA
cttgaggtgtccaaatctgtttttccccctccctgcgccaaagcccacatctggccgctcgctgcggggtgatatggcac

SEQ ID NO: 152442 - DNA, 80 bp, synthetic construct
  source 1..80: mol_type = other DNA
ggggaccgggctgagggacggtggtttttgggcgtgctagacgccggcgtggacaaggtgttgcgtggacgtggtgttgc

SEQ ID NO: 152443 - DNA, 80 bp, synthetic construct
  source 1..80: mol_type = other DNA
ggccgggggctccatgcggattttcagctgctggacacgcacatgctcagccaggtaagtctcccgggtgaagtaggtgc

SEQ ID NO: 152444 - DNA, 80 bp, synthetic construct
  source 1..80: mol_type = other DNA
tacagttcaaagcaacacttacaaaaactgggaaaactggtggagatgtgacttttatgcctccaaagcagacagcctct

SEQ ID NO: 152445 - DNA, 80 bp, synthetic construct
  source 1..80: mol_type = other DNA
gggcctcggcaaagcgcagggtctcgctctctgaaaacccccggcactcgataaacagcgagtccgtgtccccgtagatg

SEQ ID NO: 152446 - DNA, 80 bp, synthetic construct
  source 1..80: mol_type = other DNA
tcctctatgggcaatgtgctacgggtaccccgactactgcagaaaacaaactggagactctgctgtatactatgacacta

SEQ ID NO: 152447 - DNA, 80 bp, synthetic construct
  source 1..80: mol_type = other DNA
acctcgtttccttacagcaccagagtccccagagcaagaagacatctcaagttcacaagagacagcgaccctctcggaag

SEQ ID NO: 152448 - DNA, 80 bp, synthetic construct
  source 1..80: mol_type = other DNA
cataaaccaggacatgcccccaatgacccaccaaataatgtatataccacccggtggcccaattcccaagaaagtggatg

SEQ ID NO: 152449 - DNA, 80 bp, synthetic construct
  source 1..80: mol_type = other DNA
ccgtctacggacgtagtactcttgtatctcggtacatttgtacgccagttttccctccctcccccctttcacgtaactta

SEQ ID NO: 152450 - DNA, 80 bp, synthetic construct
  source 1..80: mol_type = other DNA
ggcaattcgggctcgggactggccgggctatgggcaaggctcttaaagcgtacgtcccccgctatgtttctcggcagggt

SEQ ID NO: 152451 - DNA, 80 bp, synthetic construct
  source 1..80: mol_type = other DNA
catacatggaacaccaggatcaggaaagtcattaactacttcattgattggcagggctattgctgataattacaactcat

SEQ ID NO: 152452 - DNA, 80 bp, synthetic construct
  source 1..80: mol_type = other DNA
acaactcattattcagttaatccacaaagtggtagaccaacaggaggaccagtaggaacagtattcaacacttttaaaac

SEQ ID NO: 152453 - DNA, 80 bp, synthetic construct
  source 1..80: mol_type = other DNA
gacagccacgctggtaagcaacgtgtacgtcagtaagatccatacgtttttgggaaagttgggctcggcccaacgcaaca

SEQ ID NO: 152454 - DNA, 80 bp, synthetic construct
  source 1..80: mol_type = other DNA
caacctacacaagatttagaaagttgtaaaaatatacttataaaaaacatgaaagcctggcacgcaaaggtaaaatcaga

SEQ ID NO: 152455 - DNA, 80 bp, synthetic construct
  source 1..80: mol_type = other DNA
catatgaaaattgctgtagcacattatgcagcacaattatccacactagatataaatccccaacccctctcacttgagga

SEQ ID NO: 152456 - DNA, 80 bp, synthetic construct
  source 1..80: mol_type = other DNA
caaacccctccggtgatcgagcggcatggcctactggtggtggagacgccgtagacgacggccctggagaaggaggcgcc

SEQ ID NO: 152457 - DNA, 80 bp, synthetic construct
  source 1..80: mol_type = other DNA
ctttgtcagcgggaccgggctgcgggaggtttgcgttccgtcagcgcggcgcttcgccttccgcgggttttcgggcgtgc

SEQ ID NO: 152458 - DNA, 80 bp, synthetic construct
  source 1..80: mol_type = other DNA
taccagcaagttttagtacaatcctttattaaaaagataacttcaaacccagacggatctactactatagcaggaccaaa

SEQ ID NO: 152459 - DNA, 80 bp, synthetic construct
  source 1..80: mol_type = other DNA
cgcgcgtgaactcaggggcgtgaagaaaaagaaacccacggcggcggccttgctgtcctccgcgtgaacagcctggcacg

SEQ ID NO: 152460 - DNA, 80 bp, synthetic construct
  source 1..80: mol_type = other DNA
tttaaatgatacagttcaatttagaatggcttttggcagactcttctctgtttttcaccaaaatcctggtataatcactg

SEQ ID NO: 152461 - DNA, 80 bp, synthetic construct
  source 1..80: mol_type = other DNA
gcgggtctccacataaacccccttttgttatcctccccgccactaataaggtaaccatgtttccaaccaccagcactcct

SEQ ID NO: 152462 - DNA, 80 bp, synthetic construct
  source 1..80: mol_type = other DNA
gtgtgtattacactacctacaagaaccatggtaccgacggcgataatttcgcttactgggtaattagtacaagacaggtt

SEQ ID NO: 152463 - DNA, 80 bp, synthetic construct
  source 1..80: mol_type = other DNA
acccatgtgcacggagttcaatggcctcagaaacattactgttccagcagtccaaggtctacccacaatgttgactccag

SEQ ID NO: 152464 - DNA, 80 bp, synthetic construct
  source 1..80: mol_type = other DNA
caagggctacctgtaatggcaaccccgggcagcaatcagtttctaacgtcagataactttcaatcgccatcagcaatgcc

SEQ ID NO: 152465 - DNA, 80 bp, synthetic construct
  source 1..80: mol_type = other DNA
taccatgacaataacccagactatggctttgtacccttcggatacaaattcggagcaggacaaatgccagatggctcagc

SEQ ID NO: 152466 - DNA, 80 bp, synthetic construct
  source 1..80: mol_type = other DNA
atccctcaaaacttttgaacgagtgaccgaggattgcaacgagaaccccgagaaagatgtcctggcagaactcgagtccc

SEQ ID NO: 152467 - DNA, 80 bp, synthetic construct
  source 1..80: mol_type = other DNA
ttgggagcaacaacggtcagcggatcatcttcaccattcttttgctcctagttgcaccagcgtacagttttaactgtctc

SEQ ID NO: 152468 - DNA, 80 bp, synthetic construct
  source 1..80: mol_type = other DNA
aatgctaacccaggtgagaaaggagggaagttttatgcacaatttaacaaagatactgctgtaacttctccaaaaaggga

SEQ ID NO: 152469 - DNA, 80 bp, synthetic construct
  source 1..80: mol_type = other DNA
aacaatcgcccaataggatatgaccactccatggttgtgaagggcaagcacttctgtctccccgggtgtgtgaataggct

SEQ ID NO: 152470 - DNA, 80 bp, synthetic construct
  source 1..80: mol_type = other DNA
attgtcgtaccggccgacgtgcagaacaagagcaccattctatgttttgtgtctgcttgcaatgacttctctgtcaggtt

SEQ ID NO: 152471 - DNA, 80 bp, synthetic construct
  source 1..80: mol_type = other DNA
atatctcctactaatgacatgggcacactgtgttttcgagtcttggatggtgctgatgatgccattgtaaaagtatacat

SEQ ID NO: 152472 - DNA, 80 bp, synthetic construct
  source 1..80: mol_type = other DNA
ctcctcctcgaccgccggcgcccggggctcccagaccaccgctaagacggcagctggcccttcccgcgccccccgctgat

SEQ ID NO: 152473 - DNA, 80 bp, synthetic construct
  source 1..80: mol_type = other DNA
gagatcactataccatatacattctcaacttggatgaggaaaactaatgggcatgctttgggactatttcagattgaagt

SEQ ID NO: 152474 - DNA, 80 bp, synthetic construct
  source 1..80: mol_type = other DNA
cagaccccctcactacccctggctgcctcagtcttacagggtctccttcaaactaggatggcattagaccccgccaataa

SEQ ID NO: 152475 - DNA, 80 bp, synthetic construct
  source 1..80: mol_type = other DNA
ggtgtggttccagtatggaaccaagatggacaccttctttaacgacaagcagtgcaagtgcgtgctgttagacattcccc

SEQ ID NO: 152476 - DNA, 80 bp, synthetic construct
  source 1..80: mol_type = other DNA
caggtggctatagatcagtattcaggtcagttactatcactagacatttcaacagatgagttgtcacttaaggaagcttt

SEQ ID NO: 152477 - DNA, 80 bp, synthetic construct
  source 1..80: mol_type = other DNA
ataacaacaggggacaaaaatcctagtaaattagtgaggttgctaaccacaacttgggttggaacccaggctaggcaaca

SEQ ID NO: 152478 - DNA, 80 bp, synthetic construct
  source 1..80: mol_type = other DNA
cactgttctagccactttggcattgttgggttgtgatatttcaccatggtcgtggttgaagaaaaaggtttgtgatatat

SEQ ID NO: 152479 - DNA, 80 bp, synthetic construct
  source 1..80: mol_type = other DNA
ggctttttgactagccgtttgagcgtgctgcaatggtcgccccagccgtcctggtggtccaggatgcagcccaggtccag

SEQ ID NO: 152480 - DNA, 80 bp, synthetic construct
  source 1..80: mol_type = other DNA
aagatgtctggagtctatttgagacatcaataaaaccatgcgtcaaactaacacctctatgtgtagcaatgagttgtaac

SEQ ID NO: 152481 - DNA, 80 bp, synthetic construct
  source 1..80: mol_type = other DNA
ggtgggctccacagaggacatagggttcgtccccatctcagagactttcatgaggggcgacatgccggtacttgcaccat

SEQ ID NO: 152482 - DNA, 80 bp, synthetic construct
  source 1..80: mol_type = other DNA
cccggcggcagctccggaccccccagcaggtaaccaacctccggccctgccatggcatggagatggtggaaacgaaggcg

SEQ ID NO: 152483 - DNA, 80 bp, synthetic construct
  source 1..80: mol_type = other DNA
gtggtggactacagacttttatgcctctaaagcagacagcctatatggctacagctcctttacaccaaaagaccaaaaag

SEQ ID NO: 152484 - DNA, 80 bp, synthetic construct
  source 1..80: mol_type = other DNA
aaaacccaggtattacactcaatgttgccctctactttgtggtaaagcagttgtcttatacaaccgcagaacacaggcta

SEQ ID NO: 152485 - DNA, 80 bp, synthetic construct
  source 1..80: mol_type = other DNA
tgtttggatttccattgcaaccaggctactcaagtgtgttcagccgcacattgttaggggaaattctcaattattacaca

SEQ ID NO: 152486 - DNA, 80 bp, synthetic construct
  source 1..80: mol_type = other DNA
ttgctcgtctatctgctgattttggctaccagcccggtccggcgccgcacggtgattctgggccgcgtgctacaccggag

SEQ ID NO: 152487 - DNA, 80 bp, synthetic construct
  source 1..80: mol_type = other DNA
cagacaccacggatgctggagcagcgtactatggagcagtgtccattaatgattttggactccttgctgtgcgcgtggtc

SEQ ID NO: 152488 - DNA, 80 bp, synthetic construct
  source 1..80: mol_type = other DNA
gcccgtccgcagcgagaacaacacggaggggagttcgcgcgtcccgtgggcgtgtgccggaggtgagtttacacaccgaa

SEQ ID NO: 152489 - DNA, 80 bp, synthetic construct
  source 1..80: mol_type = other DNA
agtactagaatgcatctcccagactggaccgtttgcctaccacagcgacgaacgcaaagcagtactgactataaaataca

SEQ ID NO: 152490 - DNA, 80 bp, synthetic construct
  source 1..80: mol_type = other DNA
catgtattaccattcaatgggtagatcaggatacatcatacacacacaatgtaatgccactaaatttcacagtggggcac

SEQ ID NO: 152491 - DNA, 80 bp, synthetic construct
  source 1..80: mol_type = other DNA
atcagtcccatttattccacctatggctgacctacctgataagggtaaacctttctcctctgattacgttttagccagta

SEQ ID NO: 152492 - DNA, 80 bp, synthetic construct
  source 1..80: mol_type = other DNA
ataacatgtacaacattatttcattgattgagcctttgacattaggaatattgcaactacaggataaagcagttgctttg

SEQ ID NO: 152493 - DNA, 80 bp, synthetic construct
  source 1..80: mol_type = other DNA
aggttgtaacaatcaccagggaatagtccccgctttgggcactggttaaggatgggtaactaaaaggccccctcagatcc

SEQ ID NO: 152494 - DNA, 80 bp, synthetic construct
  source 1..80: mol_type = other DNA
actatgaggatacaacaactgtgctcgcaactttagccctcctaggatgtgatgtatcaccgtggtcctggcttaggaag

SEQ ID NO: 152495 - DNA, 80 bp, synthetic construct
  source 1..80: mol_type = other DNA
gtccccatatctcgttcgaagagggacaggaaccgaaagcccaggcggtacagcagcacctcctccgacacctcagaaag

SEQ ID NO: 152496 - DNA, 80 bp, synthetic construct
  source 1..80: mol_type = other DNA
tgtagtacaagcaaccacaactgttaacacaactaatttaacacaacatccttcggcacctacaatgcctttcactcctg

SEQ ID NO: 152497 - DNA, 80 bp, synthetic construct
  source 1..80: mol_type = other DNA
aaatgaaagtagtaattcagccatgaaaggaaaaacatataattggaaacattacaaagaatattttagcaacacacaaa

SEQ ID NO: 152498 - DNA, 80 bp, synthetic construct
  source 1..80: mol_type = other DNA
acccgaatagtggaagctgctagtttgaatgacacgacccactttcggatggtgtttggcaatctcttcagtaccttcca

SEQ ID NO: 152499 - DNA, 80 bp, synthetic construct
  source 1..80: mol_type = other DNA
ctactgcaccacaccccgattttgggcgtacgatgcccggttctgaaggtgccacatttgagcacccatatgttttagat

SEQ ID NO: 152500 - DNA, 80 bp, synthetic construct
  source 1..80: mol_type = other DNA
tccctataacagtgaccatagcgccgatgagtgctgagtacaacggcttgagattagctggcccgcaaggcttgcccacc

SEQ ID NO: 152501 - DNA, 80 bp, synthetic construct
  source 1..80: mol_type = other DNA
aggatgagcttcgcagcccacagaagataaaggcagggaaaactagagccattgaggctgccagcttgaatgatacaaca

SEQ ID NO: 152502 - DNA, 80 bp, synthetic construct
  source 1..80: mol_type = other DNA
tcagcggcacggcgctggggacgcggtttccccgcgctgagggatctctctacgggttacgggtccgctgtggacgggtg

SEQ ID NO: 152503 - DNA, 80 bp, synthetic construct
  source 1..80: mol_type = other DNA
ggggaggtacatgggtggagctgggaggaacgccctctaaaactctgtataaatacaaccgctctttgcattgtattcag

SEQ ID NO: 152504 - DNA, 80 bp, synthetic construct
  source 1..80: mol_type = other DNA
tagttaaaatcttagtcaggattctttgttacatggtactatattgccacaaaccaaatatcttaaccactgcttgctta

SEQ ID NO: 152505 - DNA, 80 bp, synthetic construct
  source 1..80: mol_type = other DNA
acacctgcccgcaacaaaggcctctggcaatacacatacaccagactaatgtccaaatactactatcaaggcaaccaaag

SEQ ID NO: 152506 - DNA, 80 bp, synthetic construct
  source 1..80: mol_type = other DNA
catcaccgcattttaccaaacagccatagtggtcccttcaggtgcacctaaaacaatgagcatgttagcctttgttagcg

SEQ ID NO: 152507 - DNA, 80 bp, synthetic construct
  source 1..80: mol_type = other DNA
tggctgaccggtatggcactgcacctcggccaccggcaccgggggctcctcgaccgcagttgagacggcagctagccctg

SEQ ID NO: 152508 - DNA, 80 bp, synthetic construct
  source 1..80: mol_type = other DNA
atattgtaaaaagaaaaagtggactattccagaaatacccacagacattgagagagcagtgaatcaggcaagtatgatta

SEQ ID NO: 152509 - DNA, 80 bp, synthetic construct
  source 1..80: mol_type = other DNA
cctcctagttccggggactgggccatggaataccttatgtgtaaaataatgaacaggcctccccgcactcacctcacaga

SEQ ID NO: 152510 - DNA, 80 bp, synthetic construct
  source 1..80: mol_type = other DNA
attcttacctacctccaacacagtagcactgtcagaatcaaatgcagacaaatctattaacccatcaaaccctacagaaa

SEQ ID NO: 152511 - DNA, 80 bp, synthetic construct
  source 1..80: mol_type = other DNA
ccaaggaccaatctctttggaaggaccacctccagctgcaataagtgatttattgcgatctgttagaaccccagaagtta

SEQ ID NO: 152512 - DNA, 80 bp, synthetic construct
  source 1..80: mol_type = other DNA
ttaataatacagaagataatatcaccagtgaagccatgtactccataaagttacaatcatcagttgatcaggataagata

SEQ ID NO: 152513 - DNA, 80 bp, synthetic construct
  source 1..80: mol_type = other DNA
ttggcaggtcagggtataccattcacgttcagtgcaacgcatcaaaatttcatcaagggtgcatattggtggtgtgcgtc

SEQ ID NO: 152514 - DNA, 80 bp, synthetic construct
  source 1..80: mol_type = other DNA
tcaaagaacaaatttgccccatgggactggttgctgggatgcggggtcatggctggtaacatcacagtgtacccacatca

SEQ ID NO: 152515 - DNA, 80 bp, synthetic construct
  source 1..80: mol_type = other DNA
cttctacgcgccgcatcaacgtcagcgtcatattgcgcagcaggccgcgcagtcgtacgtagccgcgggtgtgatctacg

SEQ ID NO: 152516 - DNA, 80 bp, synthetic construct
  source 1..80: mol_type = other DNA
tcttttatgatgtgttcaagggcactaaagaacctgctgttttgtcggagaaggatccacgtttagaaactgattttaaa

SEQ ID NO: 152517 - DNA, 80 bp, synthetic construct
  source 1..80: mol_type = other DNA
gcaaggcgtatgttatcatcatggagctactcacgttggtgttgtagcaactggcaaaaagcgccgtgctcttggcgccg

SEQ ID NO: 152518 - DNA, 80 bp, synthetic construct
  source 1..80: mol_type = other DNA
gtgcgattgttgagagacaccacacatattagccaagatgccttgattgctacaacacagggtattgatgacgtcatcga

SEQ ID NO: 152519 - DNA, 80 bp, synthetic construct
  source 1..80: mol_type = other DNA
ttccaaagtgatcaagtggttggtacgcatcattagtgctcttaccatcatggttagaaatagtgctgacacacccacaa

SEQ ID NO: 152520 - DNA, 80 bp, synthetic construct
  source 1..80: mol_type = other DNA
gtgttatcactgtcccagctggggaacaaatgacattatcagtaccattctattcctctaaacctttaagaactattagg

SEQ ID NO: 152521 - DNA, 80 bp, synthetic construct
  source 1..80: mol_type = other DNA
aacaaagacaatccccagatggggtacgtgttctatgacagttcatttggtaatggcaaatggatagacggaaccgggtt

SEQ ID NO: 152522 - DNA, 80 bp, synthetic construct
  source 1..80: mol_type = other DNA
cccaagtagcctgaaccacagctgctttgcccacaatgtaggcatattcagcagctcattcctatccgcaggcagactag

SEQ ID NO: 152523 - DNA, 80 bp, synthetic construct
  source 1..80: mol_type = other DNA
ccacgtgtgccccacaggccaaccacggtgtatgtcgtgcacttcctgggcatggtctacgtgataatataaagcggtgc

SEQ ID NO: 152524 - DNA, 80 bp, synthetic construct
  source 1..80: mol_type = other DNA
gttaataatgaagaccacaaaaaccacttgcgtcagtatgacaatcataaaggctcggtgattgctacgcctaaagtacg

SEQ ID NO: 152525 - DNA, 80 bp, synthetic construct
  source 1..80: mol_type = other DNA
tgacacaaaagtacaggaaaagataaaatttgaaatagacacactccatgacttatcctgtaaatttcttccattatatg

SEQ ID NO: 152526 - DNA, 80 bp, synthetic construct
  source 1..80: mol_type = other DNA
gcagcgccgaaacgacacagacaagtacagtggaacgcacactccctcagccctgtcccgtgccggactggcgcgcagaa

SEQ ID NO: 152527 - DNA, 80 bp, synthetic construct
  source 1..80: mol_type = other DNA
catggatgacgttggtcagaaccccgatggcaaggacttgggattgttttgtcagatggtatcaactacagagtttgttg

SEQ ID NO: 152528 - DNA, 80 bp, synthetic construct
  source 1..80: mol_type = other DNA
ttgtgccttctcatgtggcataatggggagaagacctacaggaactttgttgataaaatcagaacaacagaagtgggccg

SEQ ID NO: 152529 - DNA, 80 bp, synthetic construct
  source 1..80: mol_type = other DNA
gaaaaaaaattgttataacacagtggaaccctgctgtggtaaaaaaatgtgtgattcgcggttacatgcctctcctaata

SEQ ID NO: 152530 - DNA, 80 bp, synthetic construct
  source 1..80: mol_type = other DNA
aacccaactcgaccggcactggttcgagtcagtgtggcgttcgcatgctgccttttgcggctgtggcgactgtattggcc

SEQ ID NO: 152531 - DNA, 80 bp, synthetic construct
  source 1..80: mol_type = other DNA
tactttgggtgtccgtgtttcctgtttttcataaatttttcttatggtcacagcatatagtacatatatactgtgatcat

SEQ ID NO: 152532 - DNA, 80 bp, synthetic construct
  source 1..80: mol_type = other DNA
cagttatagagggcctggggtagatcttttgtcaacatcattgacccctctgtccagacatgatctcacaacatatggtt

SEQ ID NO: 152533 - DNA, 80 bp, synthetic construct
  source 1..80: mol_type = other DNA
tcatggggatgtgcgtttagacaggtctgccacactactgtaccttgggatgcccttggtgctaataaaacattggagcc

SEQ ID NO: 152534 - DNA, 80 bp, synthetic construct
  source 1..80: mol_type = other DNA
acaaatatcaaacaacagtttgctaccataagtaacacaattatggatagcttgaccagcaaagtcattaagtggctgat

SEQ ID NO: 152535 - DNA, 80 bp, synthetic construct
  source 1..80: mol_type = other DNA
gactctttttagtaaccctacctcagtcgaattggattgggtcatgctgttgtaggggtaaatttttctttaattcggtg

SEQ ID NO: 152536 - DNA, 80 bp, synthetic construct
  source 1..80: mol_type = other DNA
ggctcccaccgatcaaaacgccgatgacctctttgccacgtggaagatcagctactactacgcgtaccagttgcgcagga

SEQ ID NO: 152537 - DNA, 80 bp, synthetic construct
  source 1..80: mol_type = other DNA
ctggctggtcgcctggcacacctccgtcatcttttttgtgaggaagatctcgttgtcggtgcccagctgtccctcgtagg

SEQ ID NO: 152538 - DNA, 80 bp, synthetic construct
  source 1..80: mol_type = other DNA
catattcatgactggaccgtttgcataccggggcgacgaaaaacaggcaaccctaacagccaagtactcctttaaatggc

SEQ ID NO: 152539 - DNA, 80 bp, synthetic construct
  source 1..80: mol_type = other DNA
ccaaaatttaagtcagcttagagaaaaactggcacacaatgccaaaaactactacaagaaaatgaaagagataaaactac

SEQ ID NO: 152540 - DNA, 80 bp, synthetic construct
  source 1..80: mol_type = other DNA
gcgcaggtttcatcccagaaagttggtgctcacgagaactcgaacagagcatacgggggttctactattaactacaccac

SEQ ID NO: 152541 - DNA, 80 bp, synthetic construct
  source 1..80: mol_type = other DNA
caaatgcagcatgcagtcaggtagacccagaaaggctaatatatgatgaaccaacacaaacaggacaaacagcagatgca

SEQ ID NO: 152542 - DNA, 80 bp, synthetic construct
  source 1..80: mol_type = other DNA
tcaagcattacatatgtacccgacaccatccgtccagaagtgcgcacaactggtaggtttgggcagcaatccggcgctat

SEQ ID NO: 152543 - DNA, 80 bp, synthetic construct
  source 1..80: mol_type = other DNA
tgttaattagaagtatacatcacaatgggtgcccaggtttcaagtcagaaggtgggagcacacgagaatactaacgtggc

SEQ ID NO: 152544 - DNA, 80 bp, synthetic construct
  source 1..80: mol_type = other DNA
ccaacacaaatataggaacaggattcgtaaactcaaatgttagtgtacactataattattgtcagtacaaccctaaccat

SEQ ID NO: 152545 - DNA, 80 bp, synthetic construct
  source 1..80: mol_type = other DNA
cagaacattctaaggaagtgccagctcttacagcagtcgaaacaggagcaacaaatccattggagcccagtgatactgta

SEQ ID NO: 152546 - DNA, 80 bp, synthetic construct
  source 1..80: mol_type = other DNA
cagggtgtggcaaatctttagcctccaaaatcattgctaggggattgaccaatgaaagtaatgtttactcactaccacct

SEQ ID NO: 152547 - DNA, 80 bp, synthetic construct
  source 1..80: mol_type = other DNA
aacaggctggcaactatggctacaccacactgaaccaccttggccagatatatgccaggcacgtaaacaaagaagctggg

SEQ ID NO: 152548 - DNA, 80 bp, synthetic construct
  source 1..80: mol_type = other DNA
tgagcccaagggtcccaagcgcataaatgggtacgaggcctggctagatgagtaccagacggccggggtgtggaatagac

SEQ ID NO: 152549 - DNA, 80 bp, synthetic construct
  source 1..80: mol_type = other DNA
ctattgcaaatttgctaaccctctcactcagttttctatgtttaatctggctgtcgattacaaatcagttgtccttccca

SEQ ID NO: 152550 - DNA, 80 bp, synthetic construct
  source 1..80: mol_type = other DNA
atgtgcgctccaaaaatcttggcgtcttccacgctgatctgcacgtttccgtcgctcggtttcgaagccgttcggggcat

SEQ ID NO: 152551 - DNA, 80 bp, synthetic construct
  source 1..80: mol_type = other DNA
ggccgccaccgccttaccgtagatgctggacatgacggtggtgggattaatcttggttagttctctcagcaccatgttct

SEQ ID NO: 152552 - DNA, 80 bp, synthetic construct
  source 1..80: mol_type = other DNA
gttgggttacaatccagttgtgtgttgtgtatcccttggattagtcagacccattatagatttgttgagaaagacccata

SEQ ID NO: 152553 - DNA, 80 bp, synthetic construct
  source 1..80: mol_type = other DNA
cgaggcactataaaatactgggagtaccacctaggctggtactcaaacatatttataggcaacctgagacacaacttagc

SEQ ID NO: 152554 - DNA, 80 bp, synthetic construct
  source 1..80: mol_type = other DNA
ttgaggcaatagtttcctgcagccccttcatgcccagagatcaggaacagaacagttgggacataaccgtaggttacaaa

SEQ ID NO: 152555 - DNA, 80 bp, synthetic construct
  source 1..80: mol_type = other DNA
tgaaatccttaattaaaattgtctcagctcttgtcatagtcgttaggagcgactatgatttggtaacacttactgcaact

SEQ ID NO: 152556 - DNA, 80 bp, synthetic construct
  source 1..80: mol_type = other DNA
tttagtgcaaatgaagaaaagagaaagacagtacttcatacattatactcccaaaatgcatactggtccagtaacttaac

SEQ ID NO: 152557 - DNA, 80 bp, synthetic construct
  source 1..80: mol_type = other DNA
tggtaatattctattaagtggaaaccagactgctagaatgcttaaatacaattatcctactaaatcaggttactgtggtg

SEQ ID NO: 152558 - DNA, 80 bp, synthetic construct
  source 1..80: mol_type = other DNA
gacatgtttggtaacattatagatagaaagcctacctcccaagactgggaaacagagtacataacctgtaagatatttga

SEQ ID NO: 152559 - DNA, 80 bp, synthetic construct
  source 1..80: mol_type = other DNA
ccagttgattatcttttcggttgcggtgttatggcaggaaacgcatttgtgttcccacatcaaataataaacctgcgcac

SEQ ID NO: 152560 - DNA, 80 bp, synthetic construct
  source 1..80: mol_type = other DNA
gcaagaacaagcaggtttgatgacccacatggggagacactggtatggaagtttgactccatgctggcttatagctatga

SEQ ID NO: 152561 - DNA, 80 bp, synthetic construct
  source 1..80: mol_type = other DNA
gggagcacaggtttctacgcagaagtccggaagtcatgagactggcgtcgtggcggcagaaagttccaccatcaacttta

SEQ ID NO: 152562 - DNA, 80 bp, synthetic construct
  source 1..80: mol_type = other DNA
atatgattaatttgttcaattgtataaccaacacgttgctcaacccgtcctcgaatttccatatccgggtgcggtagtcg

SEQ ID NO: 152563 - DNA, 80 bp, synthetic construct
  source 1..80: mol_type = other DNA
tattaagagacacaacccacatcacccaagcagccctacctcaaggcatagatgaaataattcagcaagtggcatcaagc

SEQ ID NO: 152564 - DNA, 80 bp, synthetic construct
  source 1..80: mol_type = other DNA
gcaattctacagtaactagcatgattgcaaatattgatcggattaacaaaaatcaaacaaatatctccatgagcgcagaa

SEQ ID NO: 152565 - DNA, 80 bp, synthetic construct
  source 1..80: mol_type = other DNA
acatctggttagcaggttgataaaatgggtcagtgatggaaaggttggcatattggggcagcacatcagcatgtccatgt

SEQ ID NO: 152566 - DNA, 80 bp, synthetic construct
  source 1..80: mol_type = other DNA
gtgcagatcggcatgtgtacacatagctacctacaaggcgaagggcagtgccggagacacaaacaggtatgacagctggg

SEQ ID NO: 152567 - DNA, 80 bp, synthetic construct
  source 1..80: mol_type = other DNA
tcgtgatacagctccgtcacagagtcatagagtttgaccgtggcattatctgcatgtgcatacacggccccgtagctccc

SEQ ID NO: 152568 - DNA, 80 bp, synthetic construct
  source 1..80: mol_type = other DNA
cccatccaggagagcaaggtatagatctcagttctccggaacaaagaggtggaccagtaaaagatcctgtatataacatg

SEQ ID NO: 152569 - DNA, 80 bp, synthetic construct
  source 1..80: mol_type = other DNA
actagtttggccgatgaggctgggagtccctcacaggtaactgtgtcccagcctgcgtggcggccaacccagcaattgct

SEQ ID NO: 152570 - DNA, 80 bp, synthetic construct
  source 1..80: mol_type = other DNA
cctttggctttggccaccaaaacaaggccgtctatgtggccggttacaagatttgtaactaccaccttgccacacaagag

SEQ ID NO: 152571 - DNA, 80 bp, synthetic construct
  source 1..80: mol_type = other DNA
ccatggatatgtatagaatcccgctgaacaccactggtggaacagatcccatcttttgtctgagtctctcccccgcttct

SEQ ID NO: 152572 - DNA, 80 bp, synthetic construct
  source 1..80: mol_type = other DNA
gcagctccagccgcagcaggtcataattggacgggtggaggaagtcttcggtgggcagcccgcacttgagagctatatct

SEQ ID NO: 152573 - DNA, 80 bp, synthetic construct
  source 1..80: mol_type = other DNA
cttaatcaaaattgtgtcagcactagtgatagtggctagaaactatgaggactccattacagttatggcaaccttgagcc

SEQ ID NO: 152574 - DNA, 80 bp, synthetic construct
  source 1..80: mol_type = other DNA
caaaaacgaaatatggcaaattaagattctccaagaaaattttgtctatgtcaactaaatacaaatggactaggaacaaa

SEQ ID NO: 152575 - DNA, 80 bp, synthetic construct
  source 1..80: mol_type = other DNA
ttacttacataaaagatgagttgagaagcactgataaagtgcgactaggtaaaagtagacttattgaagcttcaagcctg

SEQ ID NO: 152576 - DNA, 80 bp, synthetic construct
  source 1..80: mol_type = other DNA
gaggccctagctcccggacccctgcccttcgctgctgtccagcaaagaacaggaggaaagaaaagcatgataaaatgctg

SEQ ID NO: 152577 - DNA, 80 bp, synthetic construct
  source 1..80: mol_type = other DNA
ttctctattcgaacagatgttgcttcccaacctttagctactactttgattggtgagatatctagctatttcacccactg

SEQ ID NO: 152578 - DNA, 80 bp, synthetic construct
  source 1..80: mol_type = other DNA
cgcctcggcctctgagctattccagaagtagtgaggatcgatccaccggtctcgaggaagatgtccaatttactgaccgt

SEQ ID NO: 152579 - DNA, 80 bp, synthetic construct
  source 1..80: mol_type = other DNA
gttacaccacctatgttaatgccaaccctggtgaaaaaggtggaacattcgtttcaacgttcacaccagatactagcgac

SEQ ID NO: 152580 - DNA, 80 bp, synthetic construct
  source 1..80: mol_type = other DNA
agtataagacgcgaggcctgggtgaggagagtccagagcaatggccaggttcatcgctcagctcctcctgttggcctcct

SEQ ID NO: 152581 - DNA, 80 bp, synthetic construct
  source 1..80: mol_type = other DNA
tttctgctggagctgcaaaagctttggctgggcgttgaatatcaccacgaagtgacgtcggagtttttcggtcgcgtgct

SEQ ID NO: 152582 - DNA, 80 bp, synthetic construct
  source 1..80: mol_type = other DNA
tatgcgattgaagcacatccgcggatggatacctagacctatgcgcagccaggactacacagctagaaactaccccaatt

SEQ ID NO: 152583 - DNA, 80 bp, synthetic construct
  source 1..80: mol_type = other DNA
tgtgacagttgtcccagtggatgtcaccgtggttgtgttggtgctcaggagagcagtcgtggttataggggcgctggtcg

SEQ ID NO: 152584 - DNA, 80 bp, synthetic construct
  source 1..80: mol_type = other DNA
aacaccatctcagtgtaataagaccaatgttcccacagcatacacatactccagaacaaacagtctgtggggagactatg

SEQ ID NO: 152585 - DNA, 80 bp, synthetic construct
  source 1..80: mol_type = other DNA
acagaagcaatatacaacccctatacagacaaaggtataggaaacagaatatggatagacacactaacaaaaccagacaa

SEQ ID NO: 152586 - DNA, 80 bp, synthetic construct
  source 1..80: mol_type = other DNA
gcctattggtactcggtccggggtaacagaagtgcttggccaaggtggctgaaggggaaaacgttcgttaaccgactaat

SEQ ID NO: 152587 - DNA, 80 bp, synthetic construct
  source 1..80: mol_type = other DNA
tgattgtaaattagagagagacctgaattatgcaaatttagttatatcaatgattgccaatgtagttagcatattaggtg

SEQ ID NO: 152588 - DNA, 80 bp, synthetic construct
  source 1..80: mol_type = other DNA
atccccaaaccaccatctcgccagggtgacaactggttaaagaagtttacagagtgttgtaatgcagcaaagggccttga

SEQ ID NO: 152589 - DNA, 80 bp, synthetic construct
  source 1..80: mol_type = other DNA
acaaagccagatggtctgtggggagacactatatttgatgtagaaaatggacaaaaaattataaaaaatatggaatcata

SEQ ID NO: 152590 - DNA, 80 bp, synthetic construct
  source 1..80: mol_type = other DNA
ttaaaacagcggatgggtatcccaccatccggctcactgagcgtagtactctggtataatgtacctttgtacgcctgttt

SEQ ID NO: 152591 - DNA, 80 bp, synthetic construct
  source 1..80: mol_type = other DNA
cagggcagacaacaggtgtgtcacctaactggcaagaggtacaaaacaacacagccctaaactcctcaggagataaccaa

SEQ ID NO: 152592 - DNA, 80 bp, synthetic construct
  source 1..80: mol_type = other DNA
tctatacataggtgatggtgtgttcaaaaccacacttctaggtgagattgtgcaatattatgcacattggtctggatccc

SEQ ID NO: 152593 - DNA, 80 bp, synthetic construct
  source 1..80: mol_type = other DNA
atacagacggggcagacgtagaaggggacgcagacgcaggcacagacagactattgtactaagacaatggcagccggacg

SEQ ID NO: 152594 - DNA, 80 bp, synthetic construct
  source 1..80: mol_type = other DNA
gtgtaaactcacctccggctcccgcccacggggcgcggggccgcggcgaggacgcgagcgcccgcgagcggccgagcgac

SEQ ID NO: 152595 - DNA, 80 bp, synthetic construct
  source 1..80: mol_type = other DNA
gaaaaactcccctgggaggtaacagactcacagcacctagcctacaccccggggtacaaatgcttagcaaaaacaaaata

SEQ ID NO: 152596 - DNA, 80 bp, synthetic construct
  source 1..80: mol_type = other DNA
gggacgcgtgtagagattacaactagagtgtatcacaaagctaaacatgtaaaggcttggtgccccagaccccctagagc

SEQ ID NO: 152597 - DNA, 80 bp, synthetic construct
  source 1..80: mol_type = other DNA
ctgctccaactccagctcctccgcggcccatagaggacctcgcagcgtacaagcggttgacccgaaatacaataccccag

SEQ ID NO: 152598 - DNA, 80 bp, synthetic construct
  source 1..80: mol_type = other DNA
gttcgcgcggccagttggcgtggttcatatccccgggcaacggcgccgtcggagcccagggcgagttaccgttgaccggg

SEQ ID NO: 152599 - DNA, 80 bp, synthetic construct
  source 1..80: mol_type = other DNA
gaattggacagatatggattagcagagagcctgttggaatcaaaagaaggatgtcacaaaattcttacggtcttagctcc

SEQ ID NO: 152600 - DNA, 80 bp, synthetic construct
  source 1..80: mol_type = other DNA
aatcaagaataccactaccactatccacaatatttaacacaagactttaaaacaaacaacactcttacacatgactatgg

SEQ ID NO: 152601 - DNA, 80 bp, synthetic construct
  source 1..80: mol_type = other DNA
gaggggcagaaaaaagattaagataagaatagcaccccccactttatttgtagataagtggtactttcaaaaggacatct

SEQ ID NO: 152602 - DNA, 80 bp, synthetic construct
  source 1..80: mol_type = other DNA
ttttactgctcttgctgaaaggtatggtctcccccaagggccgggacctgctcggcccgcagctataagccagccccccg

SEQ ID NO: 152603 - DNA, 80 bp, synthetic construct
  source 1..80: mol_type = other DNA
gggatacagcacacatgcagggcttttgaatgtctccaaagcactacagccctgtgctacatgtcccaagccacctcact

SEQ ID NO: 152604 - DNA, 80 bp, synthetic construct
  source 1..80: mol_type = other DNA
tgtgcagtctttggttaccaagactggattaaaaaagaattaaatcactgggacgccccctttaattacagggtactatt

SEQ ID NO: 152605 - DNA, 80 bp, synthetic construct
  source 1..80: mol_type = other DNA
agttcttttgccccacaggatctattacgacattccaaaattcatggggttcacaaatggacttgactgatccactatgt

SEQ ID NO: 152606 - DNA, 80 bp, synthetic construct
  source 1..80: mol_type = other DNA
gactcttccggcactaaattcacctaccgtggaagagtgtggttacagcgacagagtgaggtctatcacccttggtaaca

SEQ ID NO: 152607 - DNA, 80 bp, synthetic construct
  source 1..80: mol_type = other DNA
actgagacagctctcagacgtctgctcaagcaaccactacctggcgagtatgttacttcaaccctcagggcacccctcct

SEQ ID NO: 152608 - DNA, 80 bp, synthetic construct
  source 1..80: mol_type = other DNA
agggactagcattgctcaggacatgccaccgttaacacaccaaattatgtacattccacctgggggccctgtgccaaaca

SEQ ID NO: 152609 - DNA, 80 bp, synthetic construct
  source 1..80: mol_type = other DNA
agcgaccctagaccaaggggcaactccctcgaagtccgcggctacccgttcgcgctgcgccgcacatctcggaccccccc

SEQ ID NO: 152610 - DNA, 80 bp, synthetic construct
  source 1..80: mol_type = other DNA
gctcgatcacgctaggaaattccactattactacacaggagtgcgcgaacgtggtcgtggggtatggagtgtggcccacc

SEQ ID NO: 152611 - DNA, 80 bp, synthetic construct
  source 1..80: mol_type = other DNA
ccagaccaggcctaaaggcaaaaaaagatacagagtgagaataagaccccccaacatgtttgctgacaagtggtacactc

SEQ ID NO: 152612 - DNA, 80 bp, synthetic construct
  source 1..80: mol_type = other DNA
agcggttaagcatagacgccaaatcttcggtgacatttgcctctctccacagcgcctctgggctaaggcctgggaccttt

SEQ ID NO: 152613 - DNA, 80 bp, synthetic construct
  source 1..80: mol_type = other DNA
gtggaggaaagctattatgcaaacatggggttattggcatagtaacagctggtggtgagggacatgttgctttcattgat

SEQ ID NO: 152614 - DNA, 80 bp, synthetic construct
  source 1..80: mol_type = other DNA
tacgcttcacccaaggcgaaaaccgggcccatcgttacccgcaaagtgcctacgagaagtctattagcactctagaagcc

SEQ ID NO: 152615 - DNA, 80 bp, synthetic construct
  source 1..80: mol_type = other DNA
gtggatgtttgttagtggttgtagtcccagaacatcaattagcatcccatgatggtggcagtgtctcagtcaaatacagt

SEQ ID NO: 152616 - DNA, 80 bp, synthetic construct
  source 1..80: mol_type = other DNA
gttaaaaacacccacaccaatggagtaagaatactagcacatgtagtccaaaaaataggaaaagaagcattggttatttg

SEQ ID NO: 152617 - DNA, 80 bp, synthetic construct
  source 1..80: mol_type = other DNA
acctcccgttagtcacctatattaaagatgaattgaggggccaggataaagttagattgggaaaaagtagactgattgag

SEQ ID NO: 152618 - DNA, 80 bp, synthetic construct
  source 1..80: mol_type = other DNA
tgggccaccagatctcgcttagaactactcatcttcataagtcaccatgtccgcaactatggagcccagatcatacgtgg

SEQ ID NO: 152619 - DNA, 80 bp, synthetic construct
  source 1..80: mol_type = other DNA
ctgaggagtatttatcaaaaggggagcaaccctgtaatttcacaacgaccaacgcaactgggtccaatgaagtgcagacc

SEQ ID NO: 152620 - DNA, 80 bp, synthetic construct
  source 1..80: mol_type = other DNA
agtcaaggtaggggcagacataaaagtagtaccaagaaggaaggccaagattatcagggactatggaggaaggcaagagc

SEQ ID NO: 152621 - DNA, 80 bp, synthetic construct
  source 1..80: mol_type = other DNA
agtttagagatatcagaatgtttattgcagatgatttagaatgttctgaggctagcttagtgatccattccaacaattac

SEQ ID NO: 152622 - DNA, 80 bp, synthetic construct
  source 1..80: mol_type = other DNA
acaaagccataggcattaacagctccttaacctcacaatatgcacaaatagaagacagtttataccaaaataactgcaca

SEQ ID NO: 152623 - DNA, 80 bp, synthetic construct
  source 1..80: mol_type = other DNA
cgtcctccccccctccctcgccgccttcccgcgtgcaaacgtggcgagggttaatctcctttcgggtcggaggccagatt

SEQ ID NO: 152624 - DNA, 80 bp, synthetic construct
  source 1..80: mol_type = other DNA
tgcaggcgaatccgggtgaggctggtggtgttttcaccgatgcatacaaccctagcacagaaacatcaggggcacgtaaa

SEQ ID NO: 152625 - DNA, 80 bp, synthetic construct
  source 1..80: mol_type = other DNA
tggtcctgggagaacatgaccatcgccgccaacgctcagcggggggacgtattgggaacacagaggatgagggaaaactc

SEQ ID NO: 152626 - DNA, 80 bp, synthetic construct
  source 1..80: mol_type = other DNA
aaaagtcggtctcgccgtgtccggccacgaagaggctgcttactaaatcgggcgccagagctaggtcaggcgtatcaaat

SEQ ID NO: 152627 - DNA, 80 bp, synthetic construct
  source 1..80: mol_type = other DNA
gtcttgtctctgtgtcatcttatgtggcacaatggaagagacacatacaagcagtttgaggacaagatacgcagtgttag

SEQ ID NO: 152628 - DNA, 80 bp, synthetic construct
  source 1..80: mol_type = other DNA
tgtcgttgtcgggtatggagtgtggcctgactatcttagtgatgaggaagccactgcggaagaccagcccactcaacctg

SEQ ID NO: 152629 - DNA, 80 bp, synthetic construct
  source 1..80: mol_type = other DNA
gctgcacgccgctaaccacgacatcgtgccctttatgcacgccgaggacggccggttgcacatgcacgtcatcttcgaaa

SEQ ID NO: 152630 - DNA, 80 bp, synthetic construct
  source 1..80: mol_type = other DNA
tgtggttactgcggctgactttcaacatccgttctgctcaccacaaacgaacactccaaccacaacgttccaagtgttga

SEQ ID NO: 152631 - DNA, 80 bp, synthetic construct
  source 1..80: mol_type = other DNA
actggttaaattatcaaaccaactatgcagcaacatatgctaaatttacagaagaaaaagcaacaaaattagatttaatc

SEQ ID NO: 152632 - DNA, 80 bp, synthetic construct
  source 1..80: mol_type = other DNA
catagatgctgacaaagccaaaactgcacaaacaacagctaccacacctacatataaccaagaaccctttcctacattac

SEQ ID NO: 152633 - DNA, 80 bp, synthetic construct
  source 1..80: mol_type = other DNA
tgataccagaatacagtgtcctgcgccggcgatggttggatctgttctaaataatatagatttttgatttgattagaatt

SEQ ID NO: 152634 - DNA, 80 bp, synthetic construct
  source 1..80: mol_type = other DNA
gatgtcctagccaaatcgttccacgaggtagttgtttgtcaaatcgatgataccccacgcacgtacaacgtccgttacct

SEQ ID NO: 152635 - DNA, 80 bp, synthetic construct
  source 1..80: mol_type = other DNA
ataaactactacaaagatgctgctagttcaggtttaaccaaacaagattttagccaagacccatctaaattcactcaacc

SEQ ID NO: 152636 - DNA, 80 bp, synthetic construct
  source 1..80: mol_type = other DNA
gagcatgtgaactcaatagaggcatacaggataccggtgagaccacaaaccagcagcggtgaacaagtttttggatttca

SEQ ID NO: 152637 - DNA, 80 bp, synthetic construct
  source 1..80: mol_type = other DNA
catggattcccagaccccccagagcaaaaccatatctttcaataggtagaactaattatgagaaaacagggaacataatc

SEQ ID NO: 152638 - DNA, 80 bp, synthetic construct
  source 1..80: mol_type = other DNA
tagaatactatgaaaacggaacaaaaaaagacaacaccaacatatttgactactacacgggtatgttcagcagcatattc

SEQ ID NO: 152639 - DNA, 80 bp, synthetic construct
  source 1..80: mol_type = other DNA
aagtgggaaccatcagagcacacaggtctttggtttccaggttcaaccggggctagacagtgtgttcaaacacacgctgc

SEQ ID NO: 152640 - DNA, 80 bp, synthetic construct
  source 1..80: mol_type = other DNA
gcccaggaagtgcacgaccaaccacagtgtacgtcgtgcacttcctgggcatggtctacatcataatataagtagctgta

SEQ ID NO: 152641 - DNA, 80 bp, synthetic construct
  source 1..80: mol_type = other DNA
gcggcgcttgttgcgcgggctgcgtcgtcactcaccgccattctagcggtggcggcgacggtggtggtggcgtgtgcgac

SEQ ID NO: 152642 - DNA, 80 bp, synthetic construct
  source 1..80: mol_type = other DNA
cgtatgtggggatcgctaacgcatactcccacttttacgatgggttcgctaccgtacccattgaaggggaaaccacagat

SEQ ID NO: 152643 - DNA, 80 bp, synthetic construct
  source 1..80: mol_type = other DNA
caataaagtacagtttcaaattagctgggccgtgggagtttcacttgtcggtgtctacctcttaaagtcactaagcactc

SEQ ID NO: 152644 - DNA, 80 bp, synthetic construct
  source 1..80: mol_type = other DNA
gagaatgggatttttcccaaatgccagtgaggatgtggatgaacacttagataatgccatttataccatttgtgatattg

SEQ ID NO: 152645 - DNA, 80 bp, synthetic construct
  source 1..80: mol_type = other DNA
gtcgggggtcgccataggcttcgaactcggttttaggccttccggactacaaaaaccgccatatttgtgacgtcacggcc

SEQ ID NO: 152646 - DNA, 80 bp, synthetic construct
  source 1..80: mol_type = other DNA
acactcaatacctcaattaacattacacaccatacatctgcaacaaccgccgctttttccagtactaatactaggttcac

SEQ ID NO: 152647 - DNA, 80 bp, synthetic construct
  source 1..80: mol_type = other DNA
aaaaatgcgtgatcaccggatacacgcccctcctcatctgtggaacgggcactaccgggaccacctacagaaactatgcc

SEQ ID NO: 152648 - DNA, 80 bp, synthetic construct
  source 1..80: mol_type = other DNA
aatagagttaataattaagaatgcagacaactacctcagtaaggtcaaacaagaattttcctctaccacattagcaacca

SEQ ID NO: 152649 - DNA, 80 bp, synthetic construct
  source 1..80: mol_type = other DNA
tttacaacatgatcatagaagaggacaaacgccgcagaaatgtggtggatgtcatgacagcaatattccaaggcccaatt

SEQ ID NO: 152650 - DNA, 80 bp, synthetic construct
  source 1..80: mol_type = other DNA
actgtcttctatggcgtacccgtgtggagaaatgcatctatccccctattttgtgcaaccaaaaatagagatacttgggg

SEQ ID NO: 152651 - DNA, 80 bp, synthetic construct
  source 1..80: mol_type = other DNA
acctggcctggtctggacacagtgcccgtgtcggagccgcgcgagatatggcccgcgctggagtttcaataccggagatc

SEQ ID NO: 152652 - DNA, 80 bp, synthetic construct
  source 1..80: mol_type = other DNA
tatcaacctcgcggccgccgatttgcttttcgtttgtacactacctctgtggatgcaatacctcctagatcacaactccc

SEQ ID NO: 152653 - DNA, 80 bp, synthetic construct
  source 1..80: mol_type = other DNA
caagcaatccccagcgacgtggtggagaccagacatgttataaactacaaaactcgatcggagtcgtgcttggaatcgtt

SEQ ID NO: 152654 - DNA, 80 bp, synthetic construct
  source 1..80: mol_type = other DNA
gatgaaaggttgtcccacactatgttaggagagattctgaactattacacccattgggctggatccataaaatacacgtt

SEQ ID NO: 152655 - DNA, 80 bp, synthetic construct
  source 1..80: mol_type = other DNA
ttgtgtacacaaagacactacaaaaaaagaatggggctacgtattttatgatgtaaactttggaaacggaaagacccccg

SEQ ID NO: 152656 - DNA, 80 bp, synthetic construct
  source 1..80: mol_type = other DNA
gatagagtgttaaatcgaccgatcacccattctcctacagccgctgatacccaagtgagccaacactccatcgaaacagg

SEQ ID NO: 152657 - DNA, 80 bp, synthetic construct
  source 1..80: mol_type = other DNA
agacccgggagcggcagcaaattcgcagtcacagacgtcccgctgtgggccgctttgttcgggtactatgaccagtgtag

SEQ ID NO: 152658 - DNA, 80 bp, synthetic construct
  source 1..80: mol_type = other DNA
tacccagttttaaaaccagacccggtggaaaacccaccgttaaaattaatattaaaccccctacaacactaatagacaaa

SEQ ID NO: 152659 - DNA, 80 bp, synthetic construct
  source 1..80: mol_type = other DNA
gacgcgcggactcccctccgtggtgttctcgctgcggacgggcgtggtctacgtcataatataagtaagtgcacttccga

SEQ ID NO: 152660 - DNA, 80 bp, synthetic construct
  source 1..80: mol_type = other DNA
catcatagcgcttgtttctggtggatttaaataacagggccccgtagacagtcttttgtgagtaaatagagatgatgaca

SEQ ID NO: 152661 - DNA, 80 bp, synthetic construct
  source 1..80: mol_type = other DNA
agatccgcagtgtgagcgctggtcgcgcactgtacattcctccttatgagctgcttcagcatgagtggtatgagaaattt

SEQ ID NO: 152662 - DNA, 80 bp, synthetic construct
  source 1..80: mol_type = other DNA
aacaccgtcaacggcggtcggagacgggagaagaggaggaggaagagacgctggaatcggtggagactgacgccacgccg

SEQ ID NO: 152663 - DNA, 80 bp, synthetic construct
  source 1..80: mol_type = other DNA
tcattaacatcgttattgcgagcagggtattgagggagcgcttgacaaattcaccttgtgcagcattcatcggagatgac

SEQ ID NO: 152664 - DNA, 80 bp, synthetic construct
  source 1..80: mol_type = other DNA
cataaacaacattaaacaaattagaaagaaaaactttgaggcactcacctcatgggacactaacaatccaaaccacttaa

SEQ ID NO: 152665 - DNA, 80 bp, synthetic construct
  source 1..80: mol_type = other DNA
ttgggtaaaagctatggtttaacaattacacccccagataaatcagcagctttttctaaagtaacatgggaaaatctcac

SEQ ID NO: 152666 - DNA, 80 bp, synthetic construct
  source 1..80: mol_type = other DNA
tatgggtctgttatgcttcaggaccttggatagcagtggtggaaatgacgtaaagatatacgtcaaacccaaacacataa

SEQ ID NO: 152667 - DNA, 80 bp, synthetic construct
  source 1..80: mol_type = other DNA
gagccgctaccatggcgtggagctggtggtggcaacgatggaggcgccgcggctggaaacccaggcgccgccgctggaga

SEQ ID NO: 152668 - DNA, 80 bp, synthetic construct
  source 1..80: mol_type = other DNA
tcgccctgtcgctcgactgcggcgagcactactggctgtaaaaggacagaccacatcatggttctgtgttcattaggttg

SEQ ID NO: 152669 - DNA, 80 bp, synthetic construct
  source 1..80: mol_type = other DNA
tggatgcgacaatataatctaaccacacatggagattattgaaatatgcggccatacatacacacacaatcttctacact

SEQ ID NO: 152670 - DNA, 80 bp, synthetic construct
  source 1..80: mol_type = other DNA
gatgtggaagtaggtggtgtagtgccctttggagagttgagcctcagtggtaacccgaccacacggttgatgaaatacaa

SEQ ID NO: 152671 - DNA, 80 bp, synthetic construct
  source 1..80: mol_type = other DNA
tcaacctgcaaccaacaaaggcctctggcagtacacatacaccaggctaatgtcaaactactattacaaaggcaaccctc

SEQ ID NO: 152672 - DNA, 80 bp, synthetic construct
  source 1..80: mol_type = other DNA
acacgtcactgtcacgtgacagtacgtcacagccgccattttgttttacaaaatagccgacttccttcctcttttttaaa

SEQ ID NO: 152673 - DNA, 80 bp, synthetic construct
  source 1..80: mol_type = other DNA
atcctgggtattggtcttggtctctcctcccccattggcatggattggcataggtgggtgtggctcaggctcaggttccg

SEQ ID NO: 152674 - DNA, 80 bp, synthetic construct
  source 1..80: mol_type = other DNA
cactatgctgcccaattatcttcccttgacataaatccacaaccaattacactggcccaagccgcttatgggatggagaa

SEQ ID NO: 152675 - DNA, 80 bp, synthetic construct
  source 1..80: mol_type = other DNA
atcactaacagtgccatacacacaaggtttgccagtaatgaacactcctggatccaaccaattcttaacaactgacaatt

SEQ ID NO: 152676 - DNA, 80 bp, synthetic construct
  source 1..80: mol_type = other DNA
agtaactatgactggtttcccttaaacccactaaatgcaccaggcccaacaggcacatcacatattactgaaatacattc

SEQ ID NO: 152677 - DNA, 80 bp, synthetic construct
  source 1..80: mol_type = other DNA
cccctatatccaaatgctgctagtacagtaccctctggtcccataggcactgtatttaacacctttaaaactcaagaaca

SEQ ID NO: 152678 - DNA, 80 bp, synthetic construct
  source 1..80: mol_type = other DNA
aggaaaaggatgcttcagaagatactttaaagagcagacacttcatggaattcaggacagcaatcaagaatgtgggaccc

SEQ ID NO: 152679 - DNA, 80 bp, synthetic construct
  source 1..80: mol_type = other DNA
cactccctactaccccggggtccctactccctggcaggttaaattctctctcagtttcaaataaagtgcgtttcactgtt

SEQ ID NO: 152680 - DNA, 80 bp, synthetic construct
  source 1..80: mol_type = other DNA
aactttgtggtacccccaggaactcctaacaccgcaaatatgctatgttttgtttctggttgtaaggatttttgtttgcg

SEQ ID NO: 152681 - DNA, 80 bp, synthetic construct
  source 1..80: mol_type = other DNA
agacttacaggtcatcagtaagtacagaaatgcaagtggccttctagacgtggccaaggctctacaaccctgcacaaagt

SEQ ID NO: 152682 - DNA, 80 bp, synthetic construct
  source 1..80: mol_type = other DNA
agttctgcaaaatttctacaacaaatgcattggtacttccgttaacctgtcagacagtacctttgactccatatttagag

SEQ ID NO: 152683 - DNA, 80 bp, synthetic construct
  source 1..80: mol_type = other DNA
aggccatcaccaatcccattaacaccaagacaggtgcagacacccaagctagccagcaccggataggattgggcgaggtc

SEQ ID NO: 152684 - DNA, 80 bp, synthetic construct
  source 1..80: mol_type = other DNA
aatgccaagtgctgtccctttatatgtggcaaggctgtcatgttcagagacagaaatacatgtcaaacctatacactatc

SEQ ID NO: 152685 - DNA, 80 bp, synthetic construct
  source 1..80: mol_type = other DNA
agataaacttaaggtcatagcatatggtgatgacctgattgtttcctatccctttgaactggacccagaggttttagcaa

SEQ ID NO: 152686 - DNA, 80 bp, synthetic construct
  source 1..80: mol_type = other DNA
tgcccaattaatgacacttgatatagactcaaacaacatgagtttggaggacagtgtatttggctcagagggattagagg

SEQ ID NO: 152687 - DNA, 80 bp, synthetic construct
  source 1..80: mol_type = other DNA
tccacgtttgtttgtctttgtatgtaacttagaagcaagacactggctcaataggggtgatccagccaggattaccatga

SEQ ID NO: 152688 - DNA, 80 bp, synthetic construct
  source 1..80: mol_type = other DNA
tcaattacattattgactgataaggggatctacaaaatacctaaaactgtgctcgagtttcgcgagagtaatgccgtggc

SEQ ID NO: 152689 - DNA, 80 bp, synthetic construct
  source 1..80: mol_type = other DNA
acaagtactagaggacatatttatgtgtggaccctttgcatacaagggagaacaaccctcagccacccttaacacaaaat

SEQ ID NO: 152690 - DNA, 80 bp, synthetic construct
  source 1..80: mol_type = other DNA
gcctcagatcccacgcatgcttttgtggctgtaataatcctgttattcattttaacaacattgctactcgctttaactat

SEQ ID NO: 152691 - DNA, 80 bp, synthetic construct
  source 1..80: mol_type = other DNA
ctccagggaaactcctcttccttctgctcttcctccttcaccgcagggaccgtctccctcgaccagggacccgccgaagc

SEQ ID NO: 152692 - DNA, 80 bp, synthetic construct
  source 1..80: mol_type = other DNA
ttgcggatatgattgaccaaactgtaagtaatcaggtaaatcgctccctaactgcactacaagtgttgcccacagctgcc

SEQ ID NO: 152693 - DNA, 80 bp, synthetic construct
  source 1..80: mol_type = other DNA
atttgcagctgttgattatttattagggtgcggtgtcttggcaggaaatgctttcgtgtttcctcaccagatcattaact

SEQ ID NO: 152694 - DNA, 80 bp, synthetic construct
  source 1..80: mol_type = other DNA
gttcttgaaaaacttgggtttaaagattccaacttaattagatccatatgcaacacacatcatattttcagggatgagat

SEQ ID NO: 152695 - DNA, 80 bp, synthetic construct
  source 1..80: mol_type = other DNA
ttccagcatcattgcatgtgtcatggccaccctctgcaccctgtcatctgttgtggtatatttcctccatgaaacccttg

SEQ ID NO: 152696 - DNA, 80 bp, synthetic construct
  source 1..80: mol_type = other DNA
ttcactgtgcgttggccgtgggagtttcacttagcggtgtctacctcttaaggtcaccaagcactccgagcgtcagcgag

SEQ ID NO: 152697 - DNA, 80 bp, synthetic construct
  source 1..80: mol_type = other DNA
gcataatatgcatggtgttaagttagaaattacagtattgaagttaaacagaaatgaaaaatttagggacataagaaaat

SEQ ID NO: 152698 - DNA, 80 bp, synthetic construct
  source 1..80: mol_type = other DNA
tgtttgaagataaatggtactcgcagcatgacttgtgcaaggtgcaccttgtcagttggagggcaaccgcatgcaacttg

SEQ ID NO: 152699 - DNA, 80 bp, synthetic construct
  source 1..80: mol_type = other DNA
agagccccgcttgttttttcctgtctatcttgtttagcaactcgtaaactgtcagtctagccacgtccgtttagatcaaa

SEQ ID NO: 152700 - DNA, 80 bp, synthetic construct
  source 1..80: mol_type = other DNA
tcgcggctcacattgtcctcaccaaggactgcgggtgtctcaagctactcaatgagagggacttggagttttacaagttc

SEQ ID NO: 152701 - DNA, 80 bp, synthetic construct
  source 1..80: mol_type = other DNA
gctacacgcatcagcgttcttaaacattgctcaggcacctgctatacatggccacaatggaataccaaacaacagtaggt

SEQ ID NO: 152702 - DNA, 80 bp, synthetic construct
  source 1..80: mol_type = other DNA
ttaaccagggggcatccgcggcccattttctccctcagcaaccaatggagtggccgttggtacccgagcggtggatgttc

SEQ ID NO: 152703 - DNA, 80 bp, synthetic construct
  source 1..80: mol_type = other DNA
acattattagtcgctatggtgcctgagcaccagttggctagtgcaaacattggcaatgttactgttggatataattacac

SEQ ID NO: 152704 - DNA, 80 bp, synthetic construct
  source 1..80: mol_type = other DNA
ctttcccagccagaggtggctggttaaacaatacctactgacaaaacatctaagagacaataaccgcacacctggtctcc

SEQ ID NO: 152705 - DNA, 80 bp, synthetic construct
  source 1..80: mol_type = other DNA
ccttcatccagtagagagcgtcgctcagtacaagtcgttagccggctcacaatggggccagaatacatattccaccggtg

SEQ ID NO: 152706 - DNA, 80 bp, synthetic construct
  source 1..80: mol_type = other DNA
ttgaaaggcttgggtcattacctgagatcagagggacgggtcgagtgctatcggaccttgcatccggtgccgttgtactc

SEQ ID NO: 152707 - DNA, 80 bp, synthetic construct
  source 1..80: mol_type = other DNA
gaccacctgactggtttgtgcacctccatatcagacaaaataactactagggttatcaagtggttagttcgagtaatcag

SEQ ID NO: 152708 - DNA, 80 bp, synthetic construct
  source 1..80: mol_type = other DNA
aggacacctggtataaacaagatttagtgtgtgaaaaggggacaaggagtaatgaaagcaaatgttatataaaaacctgt

SEQ ID NO: 152709 - DNA, 80 bp, synthetic construct
  source 1..80: mol_type = other DNA
ttatacaccgcacaagtgataaaggtgatgactatatcccgcaatgtaattgcacagaatgctgttattattgtgcccac

SEQ ID NO: 152710 - DNA, 80 bp, synthetic construct
  source 1..80: mol_type = other DNA
aaaaggttgggaatacagctacacaaaactaatggctcccatttactaccaagccattagaaacagcacatacaactggc

SEQ ID NO: 152711 - DNA, 80 bp, synthetic construct
  source 1..80: mol_type = other DNA
acgacactaaccaggtgacaccgacaggaccaaccacagtgtatgtcgtgcacttcctgggcatggtctacgttataata

SEQ ID NO: 152712 - DNA, 80 bp, synthetic construct
  source 1..80: mol_type = other DNA
tatcatttaatagtgcaaaatgggagctcaggtgtcgacacagaagactggggcacacgagaccgggctgaatgcacaag

SEQ ID NO: 152713 - DNA, 80 bp, synthetic construct
  source 1..80: mol_type = other DNA
agcttctctaatctgtccgaaactacatcaaaacccaccaccatactagcttcaacaacatcaaatgctgagtcaacccc

SEQ ID NO: 152714 - DNA, 80 bp, synthetic construct
  source 1..80: mol_type = other DNA
agcctaaaacagactcaaactccataggaggaccatacaccacatacagtgacacatggtacaaaggcactgcttataat

SEQ ID NO: 152715 - DNA, 80 bp, synthetic construct
  source 1..80: mol_type = other DNA
cccaaaaatgccaaaaacagataatgcaagtacctcaaaagaccctgaaaagctcactaagtcacaagtatctacaacat

SEQ ID NO: 152716 - DNA, 80 bp, synthetic construct
  source 1..80: mol_type = other DNA
gctagccaggttctttggcagcacctggagattttacagacacgagacccaagactacatagttacatggaacagaaggg

SEQ ID NO: 152717 - DNA, 80 bp, synthetic construct
  source 1..80: mol_type = other DNA
cgcttttcacttcctttcttaagcatagcctcagcctattacatgttttatgatggttatgatggtgatgttcccggatc

SEQ ID NO: 152718 - DNA, 80 bp, synthetic construct
  source 1..80: mol_type = other DNA
aggtgtagttacggagtctttctatgcaggtagtgttgagatatttttgaatgctggttatgttcgattctgtgaggtta

SEQ ID NO: 152719 - DNA, 80 bp, synthetic construct
  source 1..80: mol_type = other DNA
caatctccacgctgaggtctctgatgagctggaagaaggcgtagagcatgtccagctccgatgggaactcgtagacctca

SEQ ID NO: 152720 - DNA, 80 bp, synthetic construct
  source 1..80: mol_type = other DNA
aactgtacagacacccggaagtagactacatagtgacctacagcaggacgggaccctttgagatcagccacatgacctac

SEQ ID NO: 152721 - DNA, 80 bp, synthetic construct
  source 1..80: mol_type = other DNA
ggtaggagatgtcttgatttctgtcggatcatatctaggagatggagaatataatgctgataatgtagagcttggcccac

SEQ ID NO: 152722 - DNA, 80 bp, synthetic construct
  source 1..80: mol_type = other DNA
aatgatccagtagagcaatttgtacatgatacattaaaagaagtaattgttgtcccaaacacgcaggcttctggaccaca

SEQ ID NO: 152723 - DNA, 80 bp, synthetic construct
  source 1..80: mol_type = other DNA
accaacgtcaacttcgagcccaaaccagtaacagaagtaagatcaaacataataacaacgggaatttttgggcagcaatc

SEQ ID NO: 152724 - DNA, 80 bp, synthetic construct
  source 1..80: mol_type = other DNA
gtagggagttttttgtcattttgtatcagtgaaattcgaagtgagttggtgaagaatgggttccatgatgaacaagatat

SEQ ID NO: 152725 - DNA, 80 bp, synthetic construct
  source 1..80: mol_type = other DNA
acaactacttcaacattcagtacaacaattatcagcaatagaagcaccttagaatctttaaattgctcaactgcaaatgt

SEQ ID NO: 152726 - DNA, 80 bp, synthetic construct
  source 1..80: mol_type = other DNA
gcagccgatcaaaggttaatcagacaaggggaggagcttctctatcagctacaccgacccctagagacatgcaataacaa

SEQ ID NO: 152727 - DNA, 80 bp, synthetic construct
  source 1..80: mol_type = other DNA
aaggaaccagctgctttacatgacaaagacccacggttaaacgtggagcttaaagaagctattatgtcaaagtacaaagg

SEQ ID NO: 152728 - DNA, 80 bp, synthetic construct
  source 1..80: mol_type = other DNA
agaaggctcttttctctaaatataaaggaaatgaacattgtgttataaatgatcatattaatgtggccatttctcactac

SEQ ID NO: 152729 - DNA, 80 bp, synthetic construct
  source 1..80: mol_type = other DNA
gcagagtatgtgttagatgcccatacacagagccacagctgttaaaccacaacaacccctcacagggatatgtgttttac

SEQ ID NO: 152730 - DNA, 80 bp, synthetic construct
  source 1..80: mol_type = other DNA
gagatgaccggctgtgtctgacactcctccccttcctcaggcggcccgggcgccgacgcgaatgtcggagtttgccagcg

SEQ ID NO: 152731 - DNA, 80 bp, synthetic construct
  source 1..80: mol_type = other DNA
aaagcaagtgcatgctacaagacatgcccctttttatgctaacctatgggtacctagactatgtactaaaatgcgcaggc

SEQ ID NO: 152732 - DNA, 80 bp, synthetic construct
  source 1..80: mol_type = other DNA
tgccattggacactggagctgtgaatcagtaacgaaagtgagtggggccagacttcgccataaggcctttatcttcttgc

SEQ ID NO: 152733 - DNA, 80 bp, synthetic construct
  source 1..80: mol_type = other DNA
caccggactccacacgaacacccgtagcctccgagccctccacatcaggttccacccaaggactccagtcatatattgag

SEQ ID NO: 152734 - DNA, 80 bp, synthetic construct
  source 1..80: mol_type = other DNA
ggtacaacgcattaaacaacatgggcaagttgtacgcacgacacgtgaataaagatacaccataccaaatgtctagcacg

SEQ ID NO: 152735 - DNA, 80 bp, synthetic construct
  source 1..80: mol_type = other DNA
gaccaatccgagtgaacacaccatcctattagccctaactgcagacttgcaagtggatgccaccacagaaccaggagatg

SEQ ID NO: 152736 - DNA, 80 bp, synthetic construct
  source 1..80: mol_type = other DNA
aaagatcttgaaacacaaatgttacaagcaaacaagttttatacaacagctggaaaacaactcattaaagggtttacacc

SEQ ID NO: 152737 - DNA, 80 bp, synthetic construct
  source 1..80: mol_type = other DNA
gggcgatcaacaagcagccatgcagataatcagagaaattatcaatgaagaagcagcggattgggatgcgcagcacccaa

SEQ ID NO: 152738 - DNA, 80 bp, synthetic construct
  source 1..80: mol_type = other DNA
accaaacagatacagcacagagtggcacatggcagttacctatgttagatacaacccactagcagacaaaggcataggca

SEQ ID NO: 152739 - DNA, 80 bp, synthetic construct
  source 1..80: mol_type = other DNA
ttgcactcatgccagagcatgtagttgccggtatgggcgcgggcgataagccctccacagctccacatcccgactataag

SEQ ID NO: 152740 - DNA, 80 bp, synthetic construct
  source 1..80: mol_type = other DNA
atatgtgtgatcccaactcactcacaacctgaagatgaggtgttagtgaatggattcaaaactagagttagtgacaaatg

SEQ ID NO: 152741 - DNA, 80 bp, synthetic construct
  source 1..80: mol_type = other DNA
ttttgcggtaactttagaagtttgtaaatcacgcgcaatagggtataccacatccagtggtatgaagcacaagcaattct

SEQ ID NO: 152742 - DNA, 80 bp, synthetic construct
  source 1..80: mol_type = other DNA
caagatactcgttcccagctggcagacattcccaaggggcagaaaatacgttaaagttaagatacccccccccaagctct

SEQ ID NO: 152743 - DNA, 80 bp, synthetic construct
  source 1..80: mol_type = other DNA
gtgtgggatatcaattatacagacactgttcaactcagacggaagctagaaatgttcacttactcacgtttcgacacaga

SEQ ID NO: 152744 - DNA, 80 bp, synthetic construct
  source 1..80: mol_type = other DNA
aatacattttggccagcacaaatcttgatgcactcaccccacccacaataactattccagaggcaattaaaagaaggttc

SEQ ID NO: 152745 - DNA, 80 bp, synthetic construct
  source 1..80: mol_type = other DNA
aaaatacacataccaggtatgatcacaaacgtcttgcacatggccagagttgattcctttatgcctatcaacaacatccg

SEQ ID NO: 152746 - DNA, 80 bp, synthetic construct
  source 1..80: mol_type = other DNA
ctgatcctggcggcctgggtattctcggtatccatgtcgccggggtggctggctacaacggcttctccgcgcgccttacc

SEQ ID NO: 152747 - DNA, 80 bp, synthetic construct
  source 1..80: mol_type = other DNA
tccggttgggtcaagtacaagggttaccaacactgaacacacctggcagtagtcagttcctgacgtctgatgacttccag

SEQ ID NO: 152748 - DNA, 80 bp, synthetic construct
  source 1..80: mol_type = other DNA
gggtgtccgtgtttcctttatttcctcattgaatgcttatggtgacaattgttgagtacagttgttaccattactgcact

SEQ ID NO: 152749 - DNA, 80 bp, synthetic construct
  source 1..80: mol_type = other DNA
gagtactcataagaagcccctacacggtacccaaactatacaatgaagcggacccatcctatggctgggtcccaatatct

SEQ ID NO: 152750 - DNA, 80 bp, synthetic construct
  source 1..80: mol_type = other DNA
tcagagaccgtcaactggtaatggggtgctgctgggcatttagaaaacacaaggttacctccgtctacaaaaaaccagac

SEQ ID NO: 152751 - DNA, 80 bp, synthetic construct
  source 1..80: mol_type = other DNA
gaggggcaggagcaggagggggggcaggagcaggagaaggggcaagagcaggagaaggggcaggagcagaaagaggggca

SEQ ID NO: 152752 - DNA, 80 bp, synthetic construct
  source 1..80: mol_type = other DNA
gaagtcaatcctcccacgtggcctgtcacgtgacgcatacgtcacggcggccattttgttttacaaaatggcggacttcc

SEQ ID NO: 152753 - DNA, 80 bp, synthetic construct
  source 1..80: mol_type = other DNA
taagtttcccatgttagatgtagagataggagatgtaaccccatatggagaaataaaccttagtggtaacccaacatgcc

SEQ ID NO: 152754 - DNA, 80 bp, synthetic construct
  source 1..80: mol_type = other DNA
agatgttgagagggaggttgttgcagcctctcttagtagtgaggacactgctaagagtttctcccgcactgagtccaacg

SEQ ID NO: 152755 - DNA, 80 bp, synthetic construct
  source 1..80: mol_type = other DNA
tgagtgaaaccaccgaagtcaaggggcttaatgggctgaatcagtcttggcggaacgggcaactaacttaaaatatttta

SEQ ID NO: 152756 - DNA, 80 bp, synthetic construct
  source 1..80: mol_type = other DNA
aggagtagcagaaactatgctctccacagcgaggactacaccacacaattaaagcctttcggagggtcctttagcacaac

SEQ ID NO: 152757 - DNA, 80 bp, synthetic construct
  source 1..80: mol_type = other DNA
tcgccttctcctcagcctccaacaggtgcccgagcccagcctgccggacttcattctcaaacagtcccgagaccggctcc

SEQ ID NO: 152758 - DNA, 80 bp, synthetic construct
  source 1..80: mol_type = other DNA
aacatgactcagtgtactctaaaactcagagcaaatgcctaatagagggcctgcccctgtgggcagcagtctatggctac

SEQ ID NO: 152759 - DNA, 80 bp, synthetic construct
  source 1..80: mol_type = other DNA
tcagcttactacatgttttatgatgggtatgatactgacagcacagatgcagtgtatggtgttagtgtaactaatcatat

SEQ ID NO: 152760 - DNA, 80 bp, synthetic construct
  source 1..80: mol_type = other DNA
gttgccatggcacggcgcaacatagtcacagccaccacgtctaaaggagagttcaccatgcttggtattcatgacagaat

SEQ ID NO: 152761 - DNA, 80 bp, synthetic construct
  source 1..80: mol_type = other DNA
caatttctcagtgtcacattgcacgtgtagtaacctgcatgcgcaagggtcacattggggattatcagagagacggaggt

SEQ ID NO: 152762 - DNA, 80 bp, synthetic construct
  source 1..80: mol_type = other DNA
ctacaaatagtaacgaaggcctagtacaaccatggactaatgccactataaaacaatatgaatatcacctaggtatgttc

SEQ ID NO: 152763 - DNA, 80 bp, synthetic construct
  source 1..80: mol_type = other DNA
acagccacccaccaggggtgactgggaaactgagtatcaagcttgcaaagcctttgacaggcctgcccgcacaaacctat

SEQ ID NO: 152764 - DNA, 80 bp, synthetic construct
  source 1..80: mol_type = other DNA
ttccgtacgcatgatgcgtgacacaccaatgattaagcaaccagcaaataacatccagaatccagtggaagagtttatag

SEQ ID NO: 152765 - DNA, 80 bp, synthetic construct
  source 1..80: mol_type = other DNA
ggagcacatggagcagaaactattcctcattgcagttgtacgtcaggtgtatactactccagatattataacaaatttta

SEQ ID NO: 152766 - DNA, 80 bp, synthetic construct
  source 1..80: mol_type = other DNA
cctgtcatactaccctcaataaacaaggtgttcatgttccccccagaggggccaaaacccatctgcgggcgagaggcctg

SEQ ID NO: 152767 - DNA, 80 bp, synthetic construct
  source 1..80: mol_type = other DNA
ccacaatgtctggcacaacactaacgaacgaagatgaacaaatatttgataaactttatacaactgccagttactggcag

SEQ ID NO: 152768 - DNA, 80 bp, synthetic construct
  source 1..80: mol_type = other DNA
cagtgagtccttctgacgctgggcctccttccaccaggcctcgtgtcatggcgcctccttccaccgggcctcgtgtcatg

SEQ ID NO: 152769 - DNA, 80 bp, synthetic construct
  source 1..80: mol_type = other DNA
ttgtttaggtagtttagttatcatacttggtactgtctatgcactctacaaacttatgtgtctcactcaaggagcatact

SEQ ID NO: 152770 - DNA, 80 bp, synthetic construct
  source 1..80: mol_type = other DNA
aacccagtggagaagttcattgatcaaaccctagaggaggtactggtggtgccagacacacaggcatcagggccagtcca

SEQ ID NO: 152771 - DNA, 80 bp, synthetic construct
  source 1..80: mol_type = other DNA
taccaggcgaagttcacaacttaatggaaattgcagaggtggactcagttgtgccagttaacaacacaaaggaaaatatt

SEQ ID NO: 152772 - DNA, 80 bp, synthetic construct
  source 1..80: mol_type = other DNA
cagcacccttacacacactagacattgatcctaaacctataactgtagaagatagtgtctttggtgtggagggtttggaa

SEQ ID NO: 152773 - DNA, 80 bp, synthetic construct
  source 1..80: mol_type = other DNA
ctacacatcatataacttttcaggtaacgacggctatcagtatgtaacaaaaataagacagtggtactggacacaactaa

SEQ ID NO: 152774 - DNA, 80 bp, synthetic construct
  source 1..80: mol_type = other DNA
aggaagtcttagttgttcccgatacaaaaccatcaggcccacaacatacaaccaaacccacagcacttagtgccatggaa

SEQ ID NO: 152775 - DNA, 80 bp, synthetic construct
  source 1..80: mol_type = other DNA
gcagcagcgatctggagaagccgctaaacccctgcgtttttatatggtagctctgccgagcgcgggctgacgcgttaagt

SEQ ID NO: 152776 - DNA, 80 bp, synthetic construct
  source 1..80: mol_type = other DNA
gacaggagcagcttgacaggaagtgtgttaaggagaatctacatgcaatcttccaagggttaggtagtgatgagacacct

SEQ ID NO: 152777 - DNA, 80 bp, synthetic construct
  source 1..80: mol_type = other DNA
tgtcacgtgacgcatacgtcacggcggtcattttgttttacaaaatggcggacttccttccgcttttttgaaaataacgg

SEQ ID NO: 152778 - DNA, 80 bp, synthetic construct
  source 1..80: mol_type = other DNA
atgggagctcaggtcactagacaacaaactggcactcacgaaaatgccaatgttgccacaaatggatctcacatcacata

SEQ ID NO: 152779 - DNA, 80 bp, synthetic construct
  source 1..80: mol_type = other DNA
ggatctcggtccagggcctcagcgccggctggaaatgcggccccatgtagttgcctgtaagggcgcacaccactccctca

SEQ ID NO: 152780 - DNA, 80 bp, synthetic construct
  source 1..80: mol_type = other DNA
gtttggatcctggttgcaaaggcagtgacagcccctgacaccgccgaggacagtgaaaataagagatgggccaagtatgt

SEQ ID NO: 152781 - DNA, 80 bp, synthetic construct
  source 1..80: mol_type = other DNA
ttgcaaattctccaaccccctcacccagttctccatgttcaatctggctgttgactacaaatcagttgttctccccaaca

SEQ ID NO: 152782 - DNA, 80 bp, synthetic construct
  source 1..80: mol_type = other DNA
ggaaccagccgtcctgaccaaaaacgatcccagactgaaagttgattttgaagaggccatattttctaaatacattggaa

SEQ ID NO: 152783 - DNA, 80 bp, synthetic construct
  source 1..80: mol_type = other DNA
tccgtcgagccctgccggcacccccggctccggagccgtcccagcaggctaacaacaacaacaaccagagatggcctggg

SEQ ID NO: 152784 - DNA, 80 bp, synthetic construct
  source 1..80: mol_type = other DNA
ctcatcaacaactttgtagcccgcaagtacgtggtgaaagagacggcgttcaccgtcagtctattctttacggacggggt

SEQ ID NO: 152785 - DNA, 80 bp, synthetic construct
  source 1..80: mol_type = other DNA
atctcagtggaaatcctacttgcaggttactaaagtacaactacccaaccaaaccagggcagtgtggagctgtcatcggc

SEQ ID NO: 152786 - DNA, 80 bp, synthetic construct
  source 1..80: mol_type = other DNA
ggagcacatggtgcagaaactatacctcactgtaactgcacctcaggggtgtactattcaagatactacagaaaatttta

SEQ ID NO: 152787 - DNA, 80 bp, synthetic construct
  source 1..80: mol_type = other DNA
atacttgcatcacaggtggatagataattttatttgattgaacaatatagtatactatttggagtagaatagatacaata

SEQ ID NO: 152788 - DNA, 80 bp, synthetic construct
  source 1..80: mol_type = other DNA
cagacttcatagtgacttatgatatatctgccccttacaaactggataaatacagctctcccagctaccaccccggcatg

SEQ ID NO: 152789 - DNA, 80 bp, synthetic construct
  source 1..80: mol_type = other DNA
agaagttatgaggatttcgcctggcagacatccaccaacccgagtgtgttctggacggaaggtaatgccccccccaggat

SEQ ID NO: 152790 - DNA, 80 bp, synthetic construct
  source 1..80: mol_type = other DNA
tcaacaccaatcgggtgatcaacactaaattggtgtgctcagagcccctggtgaagatgcgagtttgcaatgtcccccgc

SEQ ID NO: 152791 - DNA, 80 bp, synthetic construct
  source 1..80: mol_type = other DNA
tggctgtgttaccaacccattccagccctggtgatacggtggtcatagctgggaaggaggtgaaagttaaagacgccagg

SEQ ID NO: 152792 - DNA, 80 bp, synthetic construct
  source 1..80: mol_type = other DNA
ccctttggggggggtatgactacagacaaatttactttaagaattctgtatgacgagtacaaaaggtttatgaactactg

SEQ ID NO: 152793 - DNA, 80 bp, synthetic construct
  source 1..80: mol_type = other DNA
ctgggaaagccgctgttaacatccaaacaaagccgggtatctttaagacaccacagggagagattggagcggttagcctg

SEQ ID NO: 152794 - DNA, 80 bp, synthetic construct
  source 1..80: mol_type = other DNA
ttctgccagtggtgcgagctcctccgaaaaaaccttccatgagctggagcagacccgtgcacgatgccccgggcattgag

SEQ ID NO: 152795 - DNA, 80 bp, synthetic construct
  source 1..80: mol_type = other DNA
catagccccctcacacttagataataactacacagcctttaaaaacgagttaaccaccagattcgatgtttctaagaaaa

SEQ ID NO: 152796 - DNA, 80 bp, synthetic construct
  source 1..80: mol_type = other DNA
atgggcgcacaagtgagcagacagagcgttggagcacatgaaaacacaatcacagcaaacaagggttccatcatcaagta

SEQ ID NO: 152797 - DNA, 80 bp, synthetic construct
  source 1..80: mol_type = other DNA
cttgcgttaacaaaaacgaaggcaaaagtacttgggggtacgttttctacgatgtaaactttggcaacggaaagacccca

SEQ ID NO: 152798 - DNA, 80 bp, synthetic construct
  source 1..80: mol_type = other DNA
tcaagaagtcctccaagaaacgcaagtactccgattccagccagagcagcacaagcaactccacctgcagctcgcagagc

SEQ ID NO: 152799 - DNA, 80 bp, synthetic construct
  source 1..80: mol_type = other DNA
gcacacgtaagcacctggtggagaaataagaaaaatccacgcacgttgaaaacacctggaaagaacgtgcccgagcgaac

SEQ ID NO: 152800 - DNA, 80 bp, synthetic construct
  source 1..80: mol_type = other DNA
ggaccccgctccctcccctggtaatgactatatacctgattgtgattgcactgttggatgctactactgcaagagccagg

SEQ ID NO: 152801 - DNA, 80 bp, synthetic construct
  source 1..80: mol_type = other DNA
caaccagaaaccgccacagatagtttttataccttgaaatcagtcaaatgggaaaccgaaagcacaggctgggtggtgga

SEQ ID NO: 152802 - DNA, 80 bp, synthetic construct
  source 1..80: mol_type = other DNA
cttcaaacatatcagctcaggcgaaagcttgaattctttacctactctagatttgatgttgagttaacctttgtaattac

SEQ ID NO: 152803 - DNA, 80 bp, synthetic construct
  source 1..80: mol_type = other DNA
gtatatggaacagactatctagagccattggatctcaatactagtgctgggtatccgtatgtcacactgggtgtcaagaa

SEQ ID NO: 152804 - DNA, 80 bp, synthetic construct
  source 1..80: mol_type = other DNA
ccaaagaaaacaaataatgacttaatccttgctctaccactcaaaatggacaacaccttgttttccaccactctcctagg

SEQ ID NO: 152805 - DNA, 80 bp, synthetic construct
  source 1..80: mol_type = other DNA
caacgtagactactttgacaactgtaacaactataaatagagccgagtatattatcaccgtgttatcttcacgttattct

SEQ ID NO: 152806 - DNA, 80 bp, synthetic construct
  source 1..80: mol_type = other DNA
cgtaccggtgacttgcaacgcgcgacggcgtagcgagacggccacgcgcgagaaagagcacacgtaggccatggcgcggt

SEQ ID NO: 152807 - DNA, 80 bp, synthetic construct
  source 1..80: mol_type = other DNA
ggtgattgtggaaggatcctcacgtgtcaacatggaatgatggcattgtcaccatgggcggaaaaggcgttgttgggttc

SEQ ID NO: 152808 - DNA, 80 bp, synthetic construct
  source 1..80: mol_type = other DNA
tggaatagtgctattccagtgtccatacacctttcccccttgctacaacaaacagaaaccaaacaaaggctacgtgtttt

SEQ ID NO: 152809 - DNA, 80 bp, synthetic construct
  source 1..80: mol_type = other DNA
tatcatctgacctccagattgatagcacgagtattcctggtccagataccatacctacttgtgattgcaccacaggcact

SEQ ID NO: 152810 - DNA, 80 bp, synthetic construct
  source 1..80: mol_type = other DNA
agatgcaactccacaacaacttgagagcagacacttcatgaaattcagagaacaaataaagaatgtgggacctagtgatc

SEQ ID NO: 152811 - DNA, 80 bp, synthetic construct
  source 1..80: mol_type = other DNA
acaccgaaaatttggacctggattttaactcagtatttttagagatatttcaccgtggagacccaagccttgggcgcgcg

SEQ ID NO: 152812 - DNA, 80 bp, synthetic construct
  source 1..80: mol_type = other DNA
agatggacctaacagaccctttatgcatcgaaggggacactgaggattgcaagcagtcaatatccccagatgaattaggg

SEQ ID NO: 152813 - DNA, 80 bp, synthetic construct
  source 1..80: mol_type = other DNA
atcacaattttactctaatgattataccttttgtggagctggattatgcgggaggtaccacgtacgtgcccattactgtc

SEQ ID NO: 152814 - DNA, 80 bp, synthetic construct
  source 1..80: mol_type = other DNA
tgtatcttagtttgaggtgtccaaatttatttttccctttaccggcacctaaaccagctagtagatccctgaatgatgag

SEQ ID NO: 152815 - DNA, 80 bp, synthetic construct
  source 1..80: mol_type = other DNA
ttaaacaccgttgtattcctactccgtctccagataagatagatctgcgagtggaatttccctcgttacccccatgtgtc

SEQ ID NO: 152816 - DNA, 80 bp, synthetic construct
  source 1..80: mol_type = other DNA
ttaatcaatatgataaccacagaacaagaaatccaattccaacaaacaaaaaattcaaaattcaaaaattttcgggtcta

SEQ ID NO: 152817 - DNA, 80 bp, synthetic construct
  source 1..80: mol_type = other DNA
gcctgcggtttcctttctgctcaccacaaactgtcacttcttgcaccaccttccaggtgttgtcagaagagtacaatgaa

SEQ ID NO: 152818 - DNA, 80 bp, synthetic construct
  source 1..80: mol_type = other DNA
ttgggtttaaaacccattaatactccaaccaaaacaaagcttcaccccagtgtgttttatgaaattttcccaggatcaaa

SEQ ID NO: 152819 - DNA, 80 bp, synthetic construct
  source 1..80: mol_type = other DNA
gcgctgtagctggtgcaacccaacaagtacccataacagtaaccatagctccaatgttttgtgaatttaacggtctcaga

SEQ ID NO: 152820 - DNA, 80 bp, synthetic construct
  source 1..80: mol_type = other DNA
tcctgttaaagctggccagcagatggcctatcacacacctgcacacagacaacggtgccaacttcacttcacaagatgtg

SEQ ID NO: 152821 - DNA, 80 bp, synthetic construct
  source 1..80: mol_type = other DNA
taccatctttgtatctctccttaccgggcccaacggagttactcgcacagccatcggaggtctgtattcaaactacacca

SEQ ID NO: 152822 - DNA, 80 bp, synthetic construct
  source 1..80: mol_type = other DNA
tctgcatgctctgacatgtcggttcgcatgctgcgagacacacccatgatgcaacaggacgaagatatagcccaaaatcc

SEQ ID NO: 152823 - DNA, 80 bp, synthetic construct
  source 1..80: mol_type = other DNA
ctttacagaatcaatttccagagaagtcaatcaactcaagaactacttatttggttcagagaatgtagtagagaagattt

SEQ ID NO: 152824 - DNA, 80 bp, synthetic construct
  source 1..80: mol_type = other DNA
ctgtctccccggcacgcatggaatagaccttgaaaagggttgaagccataaatgtcgttatccgcattggtactacacaa

SEQ ID NO: 152825 - DNA, 80 bp, synthetic construct
  source 1..80: mol_type = other DNA
ggatatctatgacaacaatcccccattggctaaaagtaagtataacaaggctagattcaccaaaaaatttttgaccatgt

SEQ ID NO: 152826 - DNA, 80 bp, synthetic construct
  source 1..80: mol_type = other DNA
tggtacgaggcctgcttcagatctcacgctggatgctgcggctgtggcaactttattgctcatctgcttactctggctga

SEQ ID NO: 152827 - DNA, 80 bp, synthetic construct
  source 1..80: mol_type = other DNA
gtagactcattcatgccaatcaacaatgtcacaggccaacaaatagatgtgcccatatacagtgtgacagtaactgcgca

SEQ ID NO: 152828 - DNA, 80 bp, synthetic construct
  source 1..80: mol_type = other DNA
atacacatgtaaccaattacaaaattgcaaataaagatgtcacttctgcagttgagtccagaagaacaattgtcacagtt

SEQ ID NO: 152829 - DNA, 80 bp, synthetic construct
  source 1..80: mol_type = other DNA
cttgccttcatggcggtatttctcttcctcccccctaaccccatattaactcgtgagtgtgatggttagagtggctgctt

SEQ ID NO: 152830 - DNA, 80 bp, synthetic construct
  source 1..80: mol_type = other DNA
catacactcccccaggtgcagaaggaccaacaaaacgtaaagatgccatgctaggaacacatgtagtgtgggatataggg

SEQ ID NO: 152831 - DNA, 80 bp, synthetic construct
  source 1..80: mol_type = other DNA
ccaataaatacacccagcaagagcaaattgtttccaagtgttttctatgatgttttccctggtactaaacaaccagcagc

SEQ ID NO: 152832 - DNA, 80 bp, synthetic construct
  source 1..80: mol_type = other DNA
aatccagatggatctccaataaatacaaacaagccacatgacatgtctagctacaatacatgggtatccacacgaggtaa

SEQ ID NO: 152833 - DNA, 80 bp, synthetic construct
  source 1..80: mol_type = other DNA
aagggtcaggagctggcgggtcgaatcacgccgccacccgccgacttccagcggcccgtcttcaaaacgctgctagatca

SEQ ID NO: 152834 - DNA, 80 bp, synthetic construct
  source 1..80: mol_type = other DNA
aaattttctgggtagatcagctctgtgggccaatgtgaacatgtcagatggttatgcattatggccaatcacttatcaag

SEQ ID NO: 152835 - DNA, 80 bp, synthetic construct
  source 1..80: mol_type = other DNA
cagagaaaagcgcggtattaacagcaaaatataaatttacatttctattcggtggaaatcccattacacagcaaactatc

SEQ ID NO: 152836 - DNA, 80 bp, synthetic construct
  source 1..80: mol_type = other DNA
agctgctgtgaacctggaagtagctgacccgcgtggcttgtcacgtgagtgcacgtcacggcggccattttgaatcacaa

SEQ ID NO: 152837 - DNA, 80 bp, synthetic construct
  source 1..80: mol_type = other DNA
aacttggccattatattgtatatgtgccgcgcaaagtgtcctagaatattatgatacgaagcgttgcaataacaggaaaa

SEQ ID NO: 152838 - DNA, 80 bp, synthetic construct
  source 1..80: mol_type = other DNA
caaggatttcaataccttacatcggtattgccaatgcctactcccatttctacgacgggtatgcggttgtaccattgaaa

SEQ ID NO: 152839 - DNA, 80 bp, synthetic construct
  source 1..80: mol_type = other DNA
tggctcgatcaaaacgagaaattcagggatattaggagattcattccagaacaacagcaggaatggtcacacatgcatct

SEQ ID NO: 152840 - DNA, 80 bp, synthetic construct
  source 1..80: mol_type = other DNA
gtataacatactaattggggaaggtccatgcagtccaggtgattgtggaggaaaactcttgtgcagacatggtgtgatag

SEQ ID NO: 152841 - DNA, 80 bp, synthetic construct
  source 1..80: mol_type = other DNA
cactgaccacgtggtctgtgtcaggatgatcatctctgctatggtagcacaaaagcacccacaggcaaaatgtaaatgag

SEQ ID NO: 152842 - DNA, 80 bp, synthetic construct
  source 1..80: mol_type = other DNA
tgttcaacgagagatggttgattcatggcggtatgccttcaggatcaccctgtaccacagtgttaaattcactttgtaat

SEQ ID NO: 152843 - DNA, 80 bp, synthetic construct
  source 1..80: mol_type = other DNA
ctgaggtgaactctatgttgtcgcgaatcagcatgttgttggtaaatgtgcagaaggggaggtccctgaactcccttctg

SEQ ID NO: 152844 - DNA, 80 bp, synthetic construct
  source 1..80: mol_type = other DNA
accatagtaattttggtttagtggtggtgccagtgagtccattaaaatactcatcaggggcaactacagcaatcccaatt

SEQ ID NO: 152845 - DNA, 80 bp, synthetic construct
  source 1..80: mol_type = other DNA
aactagagatcacagttcttaaactcaaaagaaatgaaaaatttaaagatattaggaagtacatcccagaaaatgaagat

SEQ ID NO: 152846 - DNA, 80 bp, synthetic construct
  source 1..80: mol_type = other DNA
atccagtatactctatgaatggaactttactaggaaatcttttaatttttccacaccagtttattaatctcagaacaaac

SEQ ID NO: 152847 - DNA, 80 bp, synthetic construct
  source 1..80: mol_type = other DNA
gttatattgactggatagtaaaaagcacaggggtctcatcagcagtaacagacatgagagttatgataaggtgcccctac

SEQ ID NO: 152848 - DNA, 80 bp, synthetic construct
  source 1..80: mol_type = other DNA
gacgaagagactataggagaggcattcgcatggctagaaagaacaatagtagaactcaacagggaagcagtcaaccattt

SEQ ID NO: 152849 - DNA, 80 bp, synthetic construct
  source 1..80: mol_type = other DNA
cgcagcccgtcgagctctggttccgccagaacttggcgcgcatcattaactactcgcagtttgtcgaccacaacctctcc

SEQ ID NO: 152850 - DNA, 80 bp, synthetic construct
  source 1..80: mol_type = other DNA
agttggctacaatagaaagcctccctttatagacactcaaataacaagatgtactttacatccaggaatgctaatacaag

SEQ ID NO: 152851 - DNA, 80 bp, synthetic construct
  source 1..80: mol_type = other DNA
cacttcctgcatacagtttcaagtgttgtcatacaccgcttacagacagcgcattaccatattaccatctgaaagtacag

SEQ ID NO: 152852 - DNA, 80 bp, synthetic construct
  source 1..80: mol_type = other DNA
aaaggaaatagtgttgtagaatacaatcactatatagagactgctgtggaccattacacagcacaattgtatattctaga

SEQ ID NO: 152853 - DNA, 80 bp, synthetic construct
  source 1..80: mol_type = other DNA
ttcaaccggaggtaatggtctagtaggatttgctgatgtcagggatctcctatggttggatgaagaagctatggagcagg

SEQ ID NO: 152854 - DNA, 80 bp, synthetic construct
  source 1..80: mol_type = other DNA
tcgtgctgtcagccgcgttggtccgcatggctccggactcgtttatcgtgagcttcatgatttctacgggtatctgcagc

SEQ ID NO: 152855 - DNA, 80 bp, synthetic construct
  source 1..80: mol_type = other DNA
acaatgcagatgaagggactcaagtatcacaaataacacaatttttaaaaacagtttttaaagatcagggcacaaaacta

SEQ ID NO: 152856 - DNA, 80 bp, synthetic construct
  source 1..80: mol_type = other DNA
acaccagagcactccaagttgtatcccagtgtgttttatgatatattccctggtgaaaaagaacctgctgtgttgaccca

SEQ ID NO: 152857 - DNA, 80 bp, synthetic construct
  source 1..80: mol_type = other DNA
gcgttcgccttgcgggttcgtccctcggttgtcgtagtccactatcttgtagttagttctcacgtggaaggagtctgccc

SEQ ID NO: 152858 - DNA, 80 bp, synthetic construct
  source 1..80: mol_type = other DNA
aactatgccacccactcggacgatatgctctctacagggccctacggagggggcatgactaccacaaaattcaccctaag

SEQ ID NO: 152859 - DNA, 80 bp, synthetic construct
  source 1..80: mol_type = other DNA
actagcatacataggtggagataatacacaggttaattatgaacacacacaccctggtgagaggggtcacacaattggat

SEQ ID NO: 152860 - DNA, 80 bp, synthetic construct
  source 1..80: mol_type = other DNA
gttttatccacctccccctgcgtaatttagaagtggaacttatacggtcaacaggcaactcggtaagccaaccgggcaac

SEQ ID NO: 152861 - DNA, 80 bp, synthetic construct
  source 1..80: mol_type = other DNA
gtgtgcatgtggtggagatcagaaacaagcgacctgaagaaaatcaggaacacaaaatgcagctcctgtttaatgattgg

SEQ ID NO: 152862 - DNA, 80 bp, synthetic construct
  source 1..80: mol_type = other DNA
ttgagggatacaactcatattagccagactgcaatgccacaaggcattgaggaccttatcactgaagttgcaagcaacgc

SEQ ID NO: 152863 - DNA, 80 bp, synthetic construct
  source 1..80: mol_type = other DNA
gacaagctgtgccatcagatgtcattgaaaccagacacgtggttaattacaaaactagatctgaaagtactttagaatct

SEQ ID NO: 152864 - DNA, 80 bp, synthetic construct
  source 1..80: mol_type = other DNA
gatgtggcaacgtgccggttttacaccctcgactccgtgtcatggcaaaagacatccgatgggtggtggtggaagtttcc

SEQ ID NO: 152865 - DNA, 80 bp, synthetic construct
  source 1..80: mol_type = other DNA
gattctgtgactggctcgtccaccagcacgataagattcttgagctctacactgattctgtgactgcctctcacctcctc

SEQ ID NO: 152866 - DNA, 80 bp, synthetic construct
  source 1..80: mol_type = other DNA
actccgacgtgcacatcccctgcgactgcatcacgcagatgctcacggcggcgcgcgaagactacagcgtcacgctcaac

SEQ ID NO: 152867 - DNA, 80 bp, synthetic construct
  source 1..80: mol_type = other DNA
aacatatgagaaggccaagaaattatttcctcaatatctttctgtaaattatcttcatcgtctaactgtttcttcaagac

SEQ ID NO: 152868 - DNA, 80 bp, synthetic construct
  source 1..80: mol_type = other DNA
tgtacactcaaaggaagttcctgcactgactgctgtagaaacaggtgcgacaagtaaggttatcccgtcggacgtcatag

SEQ ID NO: 152869 - DNA, 80 bp, synthetic construct
  source 1..80: mol_type = other DNA
cgccaggagtccacacaaatgtaagaggaggtcttctacctctccctagccctccgccccctccaaggactcgggcccag

SEQ ID NO: 152870 - DNA, 80 bp, synthetic construct
  source 1..80: mol_type = other DNA
ttacaaagatactgttcaactgagacgcaaactggaatttttcacatattcgagatttgacatggagttcacttttgtgg

SEQ ID NO: 152871 - DNA, 80 bp, synthetic construct
  source 1..80: mol_type = other DNA
ctgtaggacctagtgacttatatgtgcacgcagggcactataagtatactaatgcacacttgaccaacagcaactcagac

SEQ ID NO: 152872 - DNA, 80 bp, synthetic construct
  source 1..80: mol_type = other DNA
tttattctgcatcttactaatctggctgcacgctttgctcttcaggggcccccgccggagggtggtcctcctcggccgag

SEQ ID NO: 152873 - DNA, 80 bp, synthetic construct
  source 1..80: mol_type = other DNA
aattataaggacaatcaaggaaaattggacgtatcaaaatcctttaaaccatgtgatgtggataataaaattgggaacgc

SEQ ID NO: 152874 - DNA, 80 bp, synthetic construct
  source 1..80: mol_type = other DNA
acttttcaaattggtcaggctctatcaaactcacattcttctgtgtttgtaatagttttagtactggtaagtttctaatt

SEQ ID NO: 152875 - DNA, 80 bp, synthetic construct
  source 1..80: mol_type = other DNA
ttcccaaaagaaggccatggttcattagcccagctgtttgcatactatactggtgaacttaacattcatgtgctatttct

SEQ ID NO: 152876 - DNA, 80 bp, synthetic construct
  source 1..80: mol_type = other DNA
agcagcgtcgtcgtcactcgtggcgtcacagtcaacggtgctgacgtcctttggggcagtcgggcacgcgatcgtagatg

SEQ ID NO: 152877 - DNA, 80 bp, synthetic construct
  source 1..80: mol_type = other DNA
gcaagcagtccccagacttcaaattcagcaccagcattagacgctgcagaaacgggtcatacaagtcagacacaacctga

SEQ ID NO: 152878 - DNA, 80 bp, synthetic construct
  source 1..80: mol_type = other DNA
tgttatacgtcactagaccacgtgactctcctcagccaaccgctgtgctacgtgattcatttcctgggctgtacctacgt

SEQ ID NO: 152879 - DNA, 80 bp, synthetic construct
  source 1..80: mol_type = other DNA
gacaggaaaaactagtaaaaatcagaaaagagtggcagatgctttacccacagcagcccactgcactgccagactcctat

SEQ ID NO: 152880 - DNA, 80 bp, synthetic construct
  source 1..80: mol_type = other DNA
atcggacgatgagctgccatatatcgatcccaacatggagccagttcagcagaggcccgtcatgtttgtgagccgtgtgc

SEQ ID NO: 152881 - DNA, 80 bp, synthetic construct
  source 1..80: mol_type = other DNA
caccacacaaaacccagtggagaccttcactgaggaggtactcaaagaggtacttgtcgtacctaatacccaacccagtg

SEQ ID NO: 152882 - DNA, 80 bp, synthetic construct
  source 1..80: mol_type = other DNA
ttgcccatacaaaaacaaggcaaatgtgaactttgaggttaccagcgtcaccactgccagaaccagcctcaacgacgtgc

SEQ ID NO: 152883 - DNA, 80 bp, synthetic construct
  source 1..80: mol_type = other DNA
tacaaatcacataaatgacacatttgcaaagggcaaacaccaagaatacgagtaccacctaggctggtactcaaacatat

SEQ ID NO: 152884 - DNA, 80 bp, synthetic construct
  source 1..80: mol_type = other DNA
ttctgtccgaggatgaccgctcagccgccgctgcaccaccgccaccacccgtacaccctgttcgggaccagctgtcatct

SEQ ID NO: 152885 - DNA, 80 bp, synthetic construct
  source 1..80: mol_type = other DNA
aaaggtaatccagaagtgagttggaatgaaaatatccagatagcagttgatcattacagtgcacaattgtacatgctaga

SEQ ID NO: 152886 - DNA, 80 bp, synthetic construct
  source 1..80: mol_type = other DNA
caaacaacacccagaaagaattggacaatgcaatttatacaatatgtgatattggcactgacaacagctttgaattaacc

SEQ ID NO: 152887 - DNA, 80 bp, synthetic construct
  source 1..80: mol_type = other DNA
gagccgaccggccccgcgccgggcgcctcctcggagccagcccccggggttggttctgcccctctctctgtccttcagag

SEQ ID NO: 152888 - DNA, 80 bp, synthetic construct
  source 1..80: mol_type = other DNA
caaatgcacctcaaagcaaagacacttggtacaagggaaacacctacaagcagagtattaaaggcttagcagaaaaaacc

SEQ ID NO: 152889 - DNA, 80 bp, synthetic construct
  source 1..80: mol_type = other DNA
aacaacaattcaggaactgacattattagaatatttggaaaaccaaaacacacacgtgcttggatccctcgaccaccaag

SEQ ID NO: 152890 - DNA, 80 bp, synthetic construct
  source 1..80: mol_type = other DNA
accagataagtcagagttctcaggggctagacagtctgtaaaacaggggttaccaacacggctgccaagtggatctcaac

SEQ ID NO: 152891 - DNA, 80 bp, synthetic construct
  source 1..80: mol_type = other DNA
aactattcagttcaaaagatacctggcagacccgaaggaggaccggtaggcaccgtgttcaatacctttaaaacacagga

SEQ ID NO: 152892 - DNA, 80 bp, synthetic construct
  source 1..80: mol_type = other DNA
acgtcccaggcaaactagatagtatggatatttttagaatccctgtcaagagcgggaaccatcagagtgagcaggtgttt

SEQ ID NO: 152893 - DNA, 80 bp, synthetic construct
  source 1..80: mol_type = other DNA
ggcagcgcgcacaaagcgccggccgcagcacgccgcgctgacgtcccgcaaacctccctcagcccggtcccgcgaacaaa

SEQ ID NO: 152894 - DNA, 80 bp, synthetic construct
  source 1..80: mol_type = other DNA
tcacgggggttgccgtaggcttcgggctcggttttaggccttccggactacaaaaaccgccatattagtgacgtcacagc

SEQ ID NO: 152895 - DNA, 80 bp, synthetic construct
  source 1..80: mol_type = other DNA
cacgctagtaataatcagcagaaattatgaggataccaccacagttctagctacgttagctctcctaggttgtgactgct

SEQ ID NO: 152896 - DNA, 80 bp, synthetic construct
  source 1..80: mol_type = other DNA
ctattatggcttgaccagaatgagaaattcagagacattaggagattcatcccagaacaccagcaagagtggtataacat

SEQ ID NO: 152897 - DNA, 80 bp, synthetic construct
  source 1..80: mol_type = other DNA
caggaagcagctaacgcagtggtggcatacggagagtggccttctttcttgggaccagaggacgccaaccccgttgacgc

SEQ ID NO: 152898 - DNA, 80 bp, synthetic construct
  source 1..80: mol_type = other DNA
gtataacatatggaaatgcaaatccaggtgaaactggtggacagttctcagctacatttgttccatccactagtggtgag

SEQ ID NO: 152899 - DNA, 80 bp, synthetic construct
  source 1..80: mol_type = other DNA
gctgaccgaccgcattgacgcacagtttccgagtacgcgcgtctcggagcacctgacggtgagccacccagctcacgcgg

SEQ ID NO: 152900 - DNA, 80 bp, synthetic construct
  source 1..80: mol_type = other DNA
ctgtggccttgggtaggagagagggctttttatgaccctagaactgcaggtagtaaatctagatttactacctgcagttc

SEQ ID NO: 152901 - DNA, 80 bp, synthetic construct
  source 1..80: mol_type = other DNA
gaccatagcgccttacaaatctgaattctcaggcgcaatggaatcacgacaccagggcttacccacaaggatacccagtg

SEQ ID NO: 152902 - DNA, 80 bp, synthetic construct
  source 1..80: mol_type = other DNA
ctaccagagcaagagggagccagagaagccattagaaaaaaactacacccacagtcactcacaggctcagtccctaacca

SEQ ID NO: 152903 - DNA, 80 bp, synthetic construct
  source 1..80: mol_type = other DNA
gccattaaaaacacaggggtctcctcgctagtcagggacgccagaatctgcattagatgtccctacacggagccccagct

SEQ ID NO: 152904 - DNA, 80 bp, synthetic construct
  source 1..80: mol_type = other DNA
ctcctgggactcaaacaacccaaatcacattaacagcacctatgcaaatgctacctactctatatatgaataccactgtg

SEQ ID NO: 152905 - DNA, 80 bp, synthetic construct
  source 1..80: mol_type = other DNA
gaagtacgtagatgctgttctaaatgaggtgttagtcgttccaaacattaatgaaagccacccaagtacatcaaatgctg

SEQ ID NO: 152906 - DNA, 80 bp, synthetic construct
  source 1..80: mol_type = other DNA
atacgcgctcgcgccgggaggctgctgcccccccccccgcgcatgcgcgcgggtccccccgcccgcggtaggctccgccc

SEQ ID NO: 152907 - DNA, 80 bp, synthetic construct
  source 1..80: mol_type = other DNA
tgagggatcatggatacaatccaatcaacactccaactaagacaaaacttcagcccagtgtcttctatgatgtgttccct

SEQ ID NO: 152908 - DNA, 80 bp, synthetic construct
  source 1..80: mol_type = other DNA
gtctcaaactacttgttgcatacacaccgcctggagtgcccaaaccagactcaagaacaaaagccatgttaggaactcat

SEQ ID NO: 152909 - DNA, 80 bp, synthetic construct
  source 1..80: mol_type = other DNA
tatctcccgctagtgatcaaagattgcaattcacgttgttgggagaagtgttaaattactacactcattggacgggatcc

SEQ ID NO: 152910 - DNA, 80 bp, synthetic construct
  source 1..80: mol_type = other DNA
cgtgcagcagagtacactggaccttctgtggactacaagaaagatgaccaggtaatgacccatgtggcagacattagaac

SEQ ID NO: 152911 - DNA, 80 bp, synthetic construct
  source 1..80: mol_type = other DNA
accaactaaaaccaaattacagccaagtgtcttccatgatgttttcccaggaagtaaagaaccagctgtccttacagata

SEQ ID NO: 152912 - DNA, 80 bp, synthetic construct
  source 1..80: mol_type = other DNA
ggcagctgggaggcggcggatggaggtgcttcttttcgcacggtgtatgtttggtgacccgcatgccggtactgggatag

SEQ ID NO: 152913 - DNA, 80 bp, synthetic construct
  source 1..80: mol_type = other DNA
aactacttttacacaccagatggtctctggggagacccagtttatagctatcagaactctgccaacaaccctacaactca

SEQ ID NO: 152914 - DNA, 80 bp, synthetic construct
  source 1..80: mol_type = other DNA
ctcaaggagagataataaataagtgtaaagtgtctgatgttggcttgaaacctgtgaatacacctgagaaaaccaagctc

SEQ ID NO: 152915 - DNA, 80 bp, synthetic construct
  source 1..80: mol_type = other DNA
ccgctcctatgtgggaaagctgtagtggttcaagacaggaaaacaaaagcaaatttttccataaacacaattgtggaaca

SEQ ID NO: 152916 - DNA, 80 bp, synthetic construct
  source 1..80: mol_type = other DNA
gacagagattccaagctgcaacaaaggcagcactaccaaactaccccacaattatgtccacagacctgtatgagtaccac

SEQ ID NO: 152917 - DNA, 80 bp, synthetic construct
  source 1..80: mol_type = other DNA
cacttcgggctcgcgggggtcggggggctttactaacagactccgagtcgctcttggactctggtgtggcatacagcaac

SEQ ID NO: 152918 - DNA, 80 bp, synthetic construct
  source 1..80: mol_type = other DNA
aaatactcatccggtgcaaccaccgcaatcccgatcaccattacaatagcccctcttaactcagaatttgggggtttgcg

SEQ ID NO: 152919 - DNA, 80 bp, synthetic construct
  source 1..80: mol_type = other DNA
gcgtgaggtcaagataatagatgctaaaagactagtggacaataatgaagtaaacctagagattacagttgtcacccttg

SEQ ID NO: 152920 - DNA, 80 bp, synthetic construct
  source 1..80: mol_type = other DNA
tgcacatacaatcccctaaatgaccatggaaaaggaaacatgatttggtttcaatacctatcaaaaccaaacacagacta

SEQ ID NO: 152921 - DNA, 80 bp, synthetic construct
  source 1..80: mol_type = other DNA
ttcagcgctgccgcccccgggcgcactgattgctgttccatcgacaagacgcaatctctttccgcttgtacaacccgtaa

SEQ ID NO: 152922 - DNA, 80 bp, synthetic construct
  source 1..80: mol_type = other DNA
attatcacttgatgactccagaagatcacttgaatttaatagcaccataccaaagtagagacctagccattgtagcaaca

SEQ ID NO: 152923 - DNA, 80 bp, synthetic construct
  source 1..80: mol_type = other DNA
gttttgatgttgcgcagcaagtgaccgccttccacgctgttttcgaaacacctgaggttgcatagacgcagttccgttcc

SEQ ID NO: 152924 - DNA, 80 bp, synthetic construct
  source 1..80: mol_type = other DNA
cgctgcagccaggtgccaacagtgtcctgaacaggacactgttaggagagatcttaaactattacacccattggagtgga

SEQ ID NO: 152925 - DNA, 80 bp, synthetic construct
  source 1..80: mol_type = other DNA
caaggggacatgccctggccaaccacaaacattccgttaaaaatgtggtttaagtggtatcccatgatcatgcaccagaa

SEQ ID NO: 152926 - DNA, 80 bp, synthetic construct
  source 1..80: mol_type = other DNA
caaatgaatactttcaaacactagatggtctgtggggaaacccaatatatgctaactctagaaacaacggagaaacatct

SEQ ID NO: 152927 - DNA, 80 bp, synthetic construct
  source 1..80: mol_type = other DNA
gccagggtgttgcttgcggcgtggacggggtgctgcttgcggcgggacggtgctgttgattgcggcgcggaggcttttgc

SEQ ID NO: 152928 - DNA, 80 bp, synthetic construct
  source 1..80: mol_type = other DNA
tgcaaatccaggcattgtaacaggatgtgcagttggttgtgatccagagacattttggtcaaaaattcctccgatgttgg

SEQ ID NO: 152929 - DNA, 80 bp, synthetic construct
  source 1..80: mol_type = other DNA
tcactaaccacgtgactctcctccgccaatcaggtactggtacgtgcacttcctgggctgggtctatcgctgcatataag

SEQ ID NO: 152930 - DNA, 80 bp, synthetic construct
  source 1..80: mol_type = other DNA
agttggtacataatacaagaatctagttattatccaaagcacatccagtatgacatactgattggtgaaggaccatgctc

SEQ ID NO: 152931 - DNA, 80 bp, synthetic construct
  source 1..80: mol_type = other DNA
aggttccaaccagaaatttgagaacattgcagaaggtttaagaactctcctggctaggtgtcacgtagaaaggactaccg

SEQ ID NO: 152932 - DNA, 80 bp, synthetic construct
  source 1..80: mol_type = other DNA
aacactattaagagcactgtgaggatatatttcaagcccaagcacgtccaggcgtgggtcccaagaccaccgcgcttgtg

SEQ ID NO: 152933 - DNA, 80 bp, synthetic construct
  source 1..80: mol_type = other DNA
gcccctacacggaaccaccactgactgacaaaaacagtaccgacactggattcataccttttgactataactttggagac

SEQ ID NO: 152934 - DNA, 80 bp, synthetic construct
  source 1..80: mol_type = other DNA
cagcgccagccagccgcagcacagacgctggttcaggtgccgacgcacggccgtcagcagcgacgcggggtgcggcgccg

SEQ ID NO: 152935 - DNA, 80 bp, synthetic construct
  source 1..80: mol_type = other DNA
tttactggcacatttgtgcctgacaacaaccaaacgtcacctgctcgtaggttctgcccggtggactaccttttcgggaa

SEQ ID NO: 152936 - DNA, 80 bp, synthetic construct
  source 1..80: mol_type = other DNA
cagatgctaccttcagatcacgcctggatcttggcataccggctgaagtacctaagtatgatcttgtgtttgttaatgtc

SEQ ID NO: 152937 - DNA, 80 bp, synthetic construct
  source 1..80: mol_type = other DNA
ccagtagtctgattggacttcacaccaggaagatttttccgggtttcaaacagagcaagtatgccggggggtggtttcac

SEQ ID NO: 152938 - DNA, 80 bp, synthetic construct
  source 1..80: mol_type = other DNA
gctggtagacaatgatgagataaaccttgaaattaccattgtgactttggacagaaatgagaaattcagagatattagaa

SEQ ID NO: 152939 - DNA, 80 bp, synthetic construct
  source 1..80: mol_type = other DNA
ccccggtcaatgaggatatgctttacccaaggcaaaaaccttaaagatcgttatccccacactgcctacacagagcctag

SEQ ID NO: 152940 - DNA, 80 bp, synthetic construct
  source 1..80: mol_type = other DNA
caacccggtgatcgagccccatggcttatgggtggtggaggagacgccgcaggaggtggaagagatggaggagaaggccc

SEQ ID NO: 152941 - DNA, 80 bp, synthetic construct
  source 1..80: mol_type = other DNA
tacaaaaactttttaaacgcagcactaccaaatgacagatctgtaaataaattaaacacttttagcacagaaggagccta

SEQ ID NO: 152942 - DNA, 80 bp, synthetic construct
  source 1..80: mol_type = other DNA
ctacaggcctatgagtccagacaaacagaacatgcaattttcacacattggacaggcatatttggacctcctttcttaga

SEQ ID NO: 152943 - DNA, 80 bp, synthetic construct
  source 1..80: mol_type = other DNA
atggaagaaatagctcagagcggaccgtttgcatacaagggcgacgaaaagagtgctgtactgtctatgaaatatgtgtc

SEQ ID NO: 152944 - DNA, 80 bp, synthetic construct
  source 1..80: mol_type = other DNA
acaccacagaggccactaacagaaatactgcttatgaaaaaatacttaactttattacagtatataacaccacagaaaca

SEQ ID NO: 152945 - DNA, 80 bp, synthetic construct
  source 1..80: mol_type = other DNA
tccaacaatgcccagtgttaatactgctgaaaattctaaaccacctgaagaactaacaaaatctaaagtagaatccagtt

SEQ ID NO: 152946 - DNA, 80 bp, synthetic construct
  source 1..80: mol_type = other DNA
aatgaaacacagtgcaaatgtgtactatcagacttgccactgtggagcatgttttatggctatgtagattttatagagtc

SEQ ID NO: 152947 - DNA, 80 bp, synthetic construct
  source 1..80: mol_type = other DNA
ggacaggcggtccctgcagatgtcatagaaaccaggaaagtcataaattacaaaactcggagtgaatcaaccattgagag

SEQ ID NO: 152948 - DNA, 80 bp, synthetic construct
  source 1..80: mol_type = other DNA
tcaccgtcacccgcaaaggctcaaatagcgggcttttgctcaccataccactagagatgagcaacacactcttttccact

SEQ ID NO: 152949 - DNA, 80 bp, synthetic construct
  source 1..80: mol_type = other DNA
cgtgcaacgacttctcagtgcgtctccttaaggacaccccattcatatcccaagataacttctaccagggggatgtgcat

SEQ ID NO: 152950 - DNA, 80 bp, synthetic construct
  source 1..80: mol_type = other DNA
tgcaagacaagttccacaacctgataaaaggcaaccagatcactaccatcttcaacacatgcctaaaagatgagcttagg

SEQ ID NO: 152951 - DNA, 80 bp, synthetic construct
  source 1..80: mol_type = other DNA
aacagcagctaaaaatcactttgataacaatttatattcagttgctgcttactacaacacattccaaacaatagctcaaa

SEQ ID NO: 152952 - DNA, 80 bp, synthetic construct
  source 1..80: mol_type = other DNA
agaaggagagactctggaaatacaggcatattggaacctaacccccgagagagggtggctgtcacgatatgcagtcagac

SEQ ID NO: 152953 - DNA, 80 bp, synthetic construct
  source 1..80: mol_type = other DNA
atccaaacacagacaaaggtttgggaaacaaagtatggattcaatctgtaacaaaaaaaactactgatttagactctagc

SEQ ID NO: 152954 - DNA, 80 bp, synthetic construct
  source 1..80: mol_type = other DNA
gacaataccttgaacatgactgtggcatctacagcccatactttctaacaccacaagtatacaccccagaatggcacaca

SEQ ID NO: 152955 - DNA, 80 bp, synthetic construct
  source 1..80: mol_type = other DNA
ggtgtccgtgtttcctgttttacttttactcagttcatggtgacaattgtatgatctacaattggcatcatgggcgcgca

SEQ ID NO: 152956 - DNA, 80 bp, synthetic construct
  source 1..80: mol_type = other DNA
agtattatacatacataggcataactcctaataatggtggaactaaaaactttgtggccgtacgtgactcagatggtcat

SEQ ID NO: 152957 - DNA, 80 bp, synthetic construct
  source 1..80: mol_type = other DNA
gggccggtgtttccgcgcgctgccggtgcgttccacggtccttgtctgtgtcgggacggaggttgcgctggggccggtgc

SEQ ID NO: 152958 - DNA, 80 bp, synthetic construct
  source 1..80: mol_type = other DNA
cactttctcacaaaatggcggcggagcacttccggcttgcccaaaatggcgggcaagctcttccgggtcaaaggtcagca

SEQ ID NO: 152959 - DNA, 80 bp, synthetic construct
  source 1..80: mol_type = other DNA
gtctgcaggataaacatgggagtggcgtggcgaagcttcacactcaggacggtgttaatgaggcccctctccagggcatc

SEQ ID NO: 152960 - DNA, 80 bp, synthetic construct
  source 1..80: mol_type = other DNA
ttgccgcttgggaaggccccgtcgccgtgggtaacaactattacgcgtatcgcgactcgcccgatctacgctactacatg

SEQ ID NO: 152961 - DNA, 80 bp, synthetic construct
  source 1..80: mol_type = other DNA
aacttcctcagtaggtctgcatgtgtgtacatgggagaatatagtacgaaggcctcagaagaaacaaagaagtacatgtc

SEQ ID NO: 152962 - DNA, 80 bp, synthetic construct
  source 1..80: mol_type = other DNA
ccgtcatcgcctgggcccatgcacatggtggtctgcatgccagcatgacgaactttggactctgagccccaagcggtacg

SEQ ID NO: 152963 - DNA, 80 bp, synthetic construct
  source 1..80: mol_type = other DNA
ttgaccactcttgggttcccaggtgaattgatggagaaactgagcaattcaaagcacatatataaaaatgccttttatac

SEQ ID NO: 152964 - DNA, 80 bp, synthetic construct
  source 1..80: mol_type = other DNA
ccaacccccgagcgcccgcagcaccccgtacccggcgccggcccgcgaaaacaaacaccgcagaactccctcacgcaccg

SEQ ID NO: 152965 - DNA, 80 bp, synthetic construct
  source 1..80: mol_type = other DNA
gttgcagacctgttgcagaatcctgtggaacagtttgtagatagcgttctagaggaagttttagttgttcccaatactca

SEQ ID NO: 152966 - DNA, 80 bp, synthetic construct
  source 1..80: mol_type = other DNA
tcttcttgccatttgtcagtgtcgggggtcgccataggcttcgatctcggttttaggccttccggactacaaaaatggcg

SEQ ID NO: 152967 - DNA, 80 bp, synthetic construct
  source 1..80: mol_type = other DNA
gacatatttggatcacacacattaagccagcaccaggccatcggtctgataggaactattttattgactgcaggacttat

SEQ ID NO: 152968 - DNA, 80 bp, synthetic construct
  source 1..80: mol_type = other DNA
tcaactacttcaaagatgctgcttcaaatggtgcatctaaattagagttcacccaagaccctagcaaatttacagaccct

SEQ ID NO: 152969 - DNA, 80 bp, synthetic construct
  source 1..80: mol_type = other DNA
gacttttgtcatcactagcacccaggccgatggcacaaaccaagcagcagataactcggttttgacacaccaaatcatgt

SEQ ID NO: 152970 - DNA, 80 bp, synthetic construct
  source 1..80: mol_type = other DNA
taataacactgaagcaaacaatatcacatctggaaatgaagttggtggagaaattataaccaaggtcgctgatgatgctt

SEQ ID NO: 152971 - DNA, 80 bp, synthetic construct
  source 1..80: mol_type = other DNA
agaaacaaagcctggctcacagttgtctctgcagcaaccagtgccattagtatattactattggtgacaaaaatttttaa

SEQ ID NO: 152972 - DNA, 80 bp, synthetic construct
  source 1..80: mol_type = other DNA
tggaaaacggtccctggctgcctgcaatgctctgctggccactgagggtccggccgccctctgagctgctctcttttgct

SEQ ID NO: 152973 - DNA, 80 bp, synthetic construct
  source 1..80: mol_type = other DNA
tgttattggaatgattacagcaggaggagatggacatgttgcatttattgatcttagacgctttcattgtgctgaggaac

SEQ ID NO: 152974 - DNA, 80 bp, synthetic construct
  source 1..80: mol_type = other DNA
gagacatttaagaagatggattggtctacagtcacattcctcaaaagacacttcaaacctgattccaaatacaagttttt

SEQ ID NO: 152975 - DNA, 80 bp, synthetic construct
  source 1..80: mol_type = other DNA
gtaaggcgatacagttgatggatagacacacgagagtgagatactcagtggatcagcttaccacaatgatgattaatgag

SEQ ID NO: 152976 - DNA, 80 bp, synthetic construct
  source 1..80: mol_type = other DNA
tgtgcccgctttctacctctctccggcaccccagcctggtcagccgcagaggaagcatgaccttggggtgggacggtgca

SEQ ID NO: 152977 - DNA, 80 bp, synthetic construct
  source 1..80: mol_type = other DNA
gaggctatattttcaaaatacaaagggaatacaaaaactgaggtaacacacaatatgagagttgctgcagcccactatac

SEQ ID NO: 152978 - DNA, 80 bp, synthetic construct
  source 1..80: mol_type = other DNA
aactgcagccaagtgttttccatgacaccttccctgggaaaaaggaacctgcggttctatcttcaaaagaccccagatta

SEQ ID NO: 152979 - DNA, 80 bp, synthetic construct
  source 1..80: mol_type = other DNA
acaaattagaaactggtactggacacaagaaacacaaacaaatgatgtacactcatcttatggccgtcccatatacaatg

SEQ ID NO: 152980 - DNA, 80 bp, synthetic construct
  source 1..80: mol_type = other DNA
cagctcatctgtaattatctgtgtgacttcatcgtaccgtgatgtaaaaacaacaacaggaagcttacagggtgcggtag

SEQ ID NO: 152981 - DNA, 80 bp, synthetic construct
  source 1..80: mol_type = other DNA
ctctgccagctgcaccgccgacaccttccatgagccgctggcgtcctccgctccaccatggccaaggggtcgagcgaaat

SEQ ID NO: 152982 - DNA, 80 bp, synthetic construct
  source 1..80: mol_type = other DNA
aagactgtcagcatcggcacagcgcaatcaacctggtggtgagtaaccatgcctctgatcaactttcaagcagcatttga

SEQ ID NO: 152983 - DNA, 80 bp, synthetic construct
  source 1..80: mol_type = other DNA
accatggtacatttgtacgccagttttatctcccccaccccaattgtaacttagaagtcaaacaaataaatgaccaatag

SEQ ID NO: 152984 - DNA, 80 bp, synthetic construct
  source 1..80: mol_type = other DNA
gaggcggccttgacgacgttggcagcgaaaaaattggcacgcgagtcaaacgggaagtagcgtcggtgttttatgcccca

SEQ ID NO: 152985 - DNA, 80 bp, synthetic construct
  source 1..80: mol_type = other DNA
agagctcctggggccccgccagtagctcccgtgcccaccatccgtagagccaggcccgcgcctgccgctccggagccccg

SEQ ID NO: 152986 - DNA, 80 bp, synthetic construct
  source 1..80: mol_type = other DNA
cagtggagaactttttatgcagatccgcgtgcgtatactacacaacctacaagaaccatggtactgacggggacaatttt

SEQ ID NO: 152987 - DNA, 80 bp, synthetic construct
  source 1..80: mol_type = other DNA
ggagtaatggcgggtaatgccacagtcttcccccaccaattcatcaacttacgtaccaacaactcagccacattggtcct

SEQ ID NO: 152988 - DNA, 80 bp, synthetic construct
  source 1..80: mol_type = other DNA
tgtctcatcacctgaagccatagataggaggttcttcttggattgtgatgttaaaatcatgccagcatataacacaaata

SEQ ID NO: 152989 - DNA, 80 bp, synthetic construct
  source 1..80: mol_type = other DNA
aagttctggtttcaatacaacacaaaggcagacacccaggtagccaaacaaggctgctactgtatgctagaggacattcc

SEQ ID NO: 152990 - DNA, 80 bp, synthetic construct
  source 1..80: mol_type = other DNA
acagctctcttcctgttaaaattggccagtagatggcctatcacacacctgcacacagacaacggcgccaacttcacctc

SEQ ID NO: 152991 - DNA, 80 bp, synthetic construct
  source 1..80: mol_type = other DNA
ggctacaaaatctgtaactaccatctggcaacccaagaggacttacaaaaagcagtgaacgtcatgtggaacagagatct

SEQ ID NO: 152992 - DNA, 80 bp, synthetic construct
  source 1..80: mol_type = other DNA
cattactaacgcccacaaacgcaacctatactaactttgaaaagtggctatatggcaaatgcacacactatcaaacattt

SEQ ID NO: 152993 - DNA, 80 bp, synthetic construct
  source 1..80: mol_type = other DNA
ggtcggtgtggcccctggcctgggtgaccagatcctgcagcgttccctgcagctgggactcttcctgggcctcctggatg

SEQ ID NO: 152994 - DNA, 80 bp, synthetic construct
  source 1..80: mol_type = other DNA
gagtacacccctcactagtctggtcgatgaggctgagaattccccacgggcgaccgtgtctcagcctgcgtggcggccag

SEQ ID NO: 152995 - DNA, 80 bp, synthetic construct
  source 1..80: mol_type = other DNA
tggataaacttaagataatagcctatggggatgatgtagttatctcataccctgatcctctagatccagcagagttggcc

SEQ ID NO: 152996 - DNA, 80 bp, synthetic construct
  source 1..80: mol_type = other DNA
gattttaccgaaggtggctacatcacctgtttctatcagactagaatagtggtaccagcctcgaccccaaccagcatgtt

SEQ ID NO: 152997 - DNA, 80 bp, synthetic construct
  source 1..80: mol_type = other DNA
gccgccgtctcgggcgcaagcggcggttttctgctacatcgcaagacgatgaagctggccgcctgtctgtgtttgttgct

SEQ ID NO: 152998 - DNA, 80 bp, synthetic construct
  source 1..80: mol_type = other DNA
ccaaaggggcgaaaagtaaaaagaataacaataaagccccccactctatacacagacaagtggtacttccagagtgactt

SEQ ID NO: 152999 - DNA, 80 bp, synthetic construct
  source 1..80: mol_type = other DNA
tgtccagcttgtagtctgagagactgagcttgtcccggcacacggcgtacatgtctatggggatgaggccggtgatgcgg

SEQ ID NO: 153000 - DNA, 80 bp, synthetic construct
  source 1..80: mol_type = other DNA
agtttaattaacggtaacaaaaaggtatataacgatagtcaatacatgcaaaacgtttgggcacaaaacaaaataaatac

SEQ ID NO: 153001 - DNA, 80 bp, synthetic construct
  source 1..80: mol_type = other DNA
ctgcacaatgcagctcccactgaccaaaacgctgatgacctatttgccacatggaagattagttactactacgcatacca

SEQ ID NO: 153002 - DNA, 80 bp, synthetic construct
  source 1..80: mol_type = other DNA
gaccttgtaaaccaggtgattgtggaggcaaactcctttgcaaacatggtgtgattggtataataactgctggaggtgat

SEQ ID NO: 153003 - DNA, 80 bp, synthetic construct
  source 1..80: mol_type = other DNA
attttatgacgttggttgactagttcatgagattctgctgtacgtgtgatggttattcgctggttcgttctaagatgagt

SEQ ID NO: 153004 - DNA, 80 bp, synthetic construct
  source 1..80: mol_type = other DNA
tgagaaaaacgcccagctagtggcgggctataccttcagattcaagtggggcggtaccaccatccattcccaggtcatca

SEQ ID NO: 153005 - DNA, 80 bp, synthetic construct
  source 1..80: mol_type = other DNA
tgacccaataactagggataatccaacaaagcaacctagtgatgatagctggcttaattttgatggaacactattaggaa

SEQ ID NO: 153006 - DNA, 80 bp, synthetic construct
  source 1..80: mol_type = other DNA
gagacaggacatacatcacaggtagtaccaagtgacactatccagacacgccatgtcaagaactaccacgtcaggtcaga

SEQ ID NO: 153007 - DNA, 80 bp, synthetic construct
  source 1..80: mol_type = other DNA
cttctttggaagggcagcatgtgtgaaagttagacaatacagcatgggaaggtcagctgaggagagcgacaagtacacta

SEQ ID NO: 153008 - DNA, 80 bp, synthetic construct
  source 1..80: mol_type = other DNA
tctagcgtgtcaacaagcaaattgacgacaactgcgacaactacgacaactacgatgagtacgacctcatcgacaactac

SEQ ID NO: 153009 - DNA, 80 bp, synthetic construct
  source 1..80: mol_type = other DNA
tactcaaatatattcactaactatttatacaaagaagcctcttttttccaacaaattctagttccatcatatattaaaaa

SEQ ID NO: 153010 - DNA, 80 bp, synthetic construct
  source 1..80: mol_type = other DNA
agaagctgcgcacagacaccgtgcaaacacccggtgaaacatccctgtccccgaaacaccccggccccagcgccgggccg

SEQ ID NO: 153011 - DNA, 80 bp, synthetic construct
  source 1..80: mol_type = other DNA
cttttaactataacccacaaaacaatgagcaatgtgaaaaattaaaaacttttgaagagtggctatactcatctagcaca

SEQ ID NO: 153012 - DNA, 80 bp, synthetic construct
  source 1..80: mol_type = other DNA
ccatagtagctacatgtagtgcctgtccagacatgtcagttagaatgctacgtgacagccctatgatgaaacaagaacag

SEQ ID NO: 153013 - DNA, 80 bp, synthetic construct
  source 1..80: mol_type = other DNA
gctaccccacaaggtcttccaatttacatgacacctggttctggtcagtttatgacaactgacgacttccaatcaccttc

SEQ ID NO: 153014 - DNA, 80 bp, synthetic construct
  source 1..80: mol_type = other DNA
aaactaccggtacagctccagctcagaaaccaactcagacagcagcagcagctgcgagtccacttgcagcaattattcct

SEQ ID NO: 153015 - DNA, 80 bp, synthetic construct
  source 1..80: mol_type = other DNA
tcgctccaatgtgtgccgagtataatggactgcgactggcgcaggcacagggtctaccaacgatgaacacaccgggaagc

SEQ ID NO: 153016 - DNA, 80 bp, synthetic construct
  source 1..80: mol_type = other DNA
cagtagcagacatgatatgttttgtttcagggtgtaaagatttttgtttgcgcatggcaagagatacaaatttacataaa

SEQ ID NO: 153017 - DNA, 80 bp, synthetic construct
  source 1..80: mol_type = other DNA
ggatagcaatatacattatacagatgctagcaagacttaggaagggctataggccagtattctcctcccctccctcttat

SEQ ID NO: 153018 - DNA, 80 bp, synthetic construct
  source 1..80: mol_type = other DNA
gcaggcggaagtgggtatgtatgcttcgcagatattagacaactagattttattgctgagacacaaggcatcactgatta

SEQ ID NO: 153019 - DNA, 80 bp, synthetic construct
  source 1..80: mol_type = other DNA
tcgctgcagtagccggtgtcgtatacgttatgtacaagttgttcgctgggcatcagggtgcatacactggtttgccaaat

SEQ ID NO: 153020 - DNA, 80 bp, synthetic construct
  source 1..80: mol_type = other DNA
tacagaaagaaaagggcgctgttactgtgtgctgtgcaaccagcaaagaaggcttgcaaactactaatagtaatgtggac

SEQ ID NO: 153021 - DNA, 80 bp, synthetic construct
  source 1..80: mol_type = other DNA
cctaagaatgggagcaaccagctggtcatcagccgctgcgcaaacggactcaacgtggtctccttctttatctccatcct

SEQ ID NO: 153022 - DNA, 80 bp, synthetic construct
  source 1..80: mol_type = other DNA
accgtcggcgccgaaaccgggggactctcgactatctcgcagatcaccctgtcaggatcgtcgccgtgcccgggacgccg

SEQ ID NO: 153023 - DNA, 80 bp, synthetic construct
  source 1..80: mol_type = other DNA
gaggagtcctttgaaggagagaaaggagaaacaccacgagaaggaacggagacggagcaggagcaggagccccttgagaa

SEQ ID NO: 153024 - DNA, 80 bp, synthetic construct
  source 1..80: mol_type = other DNA
gtcccttcttatactatcccggagtctgtggttttttttgtttacccctgcttactggtgagactgctgggggccgttgt

SEQ ID NO: 153025 - DNA, 80 bp, synthetic construct
  source 1..80: mol_type = other DNA
atagcgccctataagtcagagttctcaggtgccatggaggctcaacgccagggcttgccaacacgtcttcctagtggtag

SEQ ID NO: 153026 - DNA, 80 bp, synthetic construct
  source 1..80: mol_type = other DNA
tcaaataaatgttggccgtgggagtttcacttgtcggtgtctacctcttaaggtcactaagcactccgagcgatagcgag

SEQ ID NO: 153027 - DNA, 80 bp, synthetic construct
  source 1..80: mol_type = other DNA
catgctacaagtctctgacccgacaaaactcggaccgaagacagtgttccacaaatgggactggagacgtgggatgctta

SEQ ID NO: 153028 - DNA, 80 bp, synthetic construct
  source 1..80: mol_type = other DNA
cagcccttagtgctagtgaaacaggggcaacacttcccaccaacccctctgatagtgttgaaacgaggactacttacatg

SEQ ID NO: 153029 - DNA, 80 bp, synthetic construct
  source 1..80: mol_type = other DNA
accaggaacaccaaatccacccagaacatcggcaattgtttttatccaatcgccgtcagcattatttttgaccttagtac

SEQ ID NO: 153030 - DNA, 80 bp, synthetic construct
  source 1..80: mol_type = other DNA
actataatagcaaatattattagtatagcaggcatcatatttgtaatatacaaattgttttgctcactacaaggtccata

SEQ ID NO: 153031 - DNA, 80 bp, synthetic construct
  source 1..80: mol_type = other DNA
cttgtgtaactttccaagttctgcaatctgtctataacgaataccttagcattaatgcatttaatggcacatcacaaaca

SEQ ID NO: 153032 - DNA, 80 bp, synthetic construct
  source 1..80: mol_type = other DNA
aagaagtgttgcccacttgtatgcggcaaggctatacagctcatggacaaaataactagacagagattcagtgtggacga

SEQ ID NO: 153033 - DNA, 80 bp, synthetic construct
  source 1..80: mol_type = other DNA
acatagatctgccccctttaaaagatactcaaaaattagacgacaccaagggaaaccaaagtaacatacaacacgtacaa

SEQ ID NO: 153034 - DNA, 80 bp, synthetic construct
  source 1..80: mol_type = other DNA
tccaaaaggacatatgcgacgttacactgtttaacctcaacattacagcatgcagcctgcggtttccgttctgctcacca

SEQ ID NO: 153035 - DNA, 80 bp, synthetic construct
  source 1..80: mol_type = other DNA
ggcatgtgataaacaaaagacaaagatcagagtgtactgtggagtccttcttggggagggctgcgttggtgacaattatg

SEQ ID NO: 153036 - DNA, 80 bp, synthetic construct
  source 1..80: mol_type = other DNA
cgtcggtgcagcgcttgttgttgatgaagagggcccagttgcgggccacgtccacgtaggtcgcggccctggggttgccc

SEQ ID NO: 153037 - DNA, 80 bp, synthetic construct
  source 1..80: mol_type = other DNA
cgaggacggggtgttgcggggacggggtgttgcggtgacgggagttaattgcgctggtgacggagttggctggtgtgttt

SEQ ID NO: 153038 - DNA, 80 bp, synthetic construct
  source 1..80: mol_type = other DNA
cccgatgctagaaagacttgtacaggacaaattccacaacttattaaaagggtaccaaattactacagtttttaacacct

SEQ ID NO: 153039 - DNA, 80 bp, synthetic construct
  source 1..80: mol_type = other DNA
cactgaaaacatgatacaacatttaatgtggatgaaaaatttcagcacattcaagcagcaacttcaatcctacttaatgg

SEQ ID NO: 153040 - DNA, 80 bp, synthetic construct
  source 1..80: mol_type = other DNA
aatgacccagaacaggctattgatagggcgctggctagaattgcccacaccatccgcagtggtccatctaactccaagca

SEQ ID NO: 153041 - DNA, 80 bp, synthetic construct
  source 1..80: mol_type = other DNA
gagacgcagacgcagacggactcacaaacccaccctagttatgagacagtggcaaccggacgttgttaggacctgctaca

SEQ ID NO: 153042 - DNA, 80 bp, synthetic construct
  source 1..80: mol_type = other DNA
accatcaccagggaccacacgaggatgaaaatttcggactaactgtaaatcccaggaacaacactgacaattataccatc

SEQ ID NO: 153043 - DNA, 80 bp, synthetic construct
  source 1..80: mol_type = other DNA
cccatattcctcagcagacatagaagcaacacagaatttgccaccgcataccaggatgtcacatacaacccaaactgtga

SEQ ID NO: 153044 - DNA, 80 bp, synthetic construct
  source 1..80: mol_type = other DNA
caaatccaagcgtgttcttcaatgtaggtaattcagcaagattcagtgttccatacttaggaatagcttcagcttataac

SEQ ID NO: 153045 - DNA, 80 bp, synthetic construct
  source 1..80: mol_type = other DNA
ataccagaagcagtaaaacccaccacagacttatttgagtaccacgcaggcatatacagctccatattcctgtccccagg

SEQ ID NO: 153046 - DNA, 80 bp, synthetic construct
  source 1..80: mol_type = other DNA
taatgtgcgggcacactcaggcgggtagaaactatgccattagaagtgaagactttatacctcagctccagagctttggg

SEQ ID NO: 153047 - DNA, 80 bp, synthetic construct
  source 1..80: mol_type = other DNA
acgcgtactcagtgtcagcgaggtagacgactacgtaaccgccgtctccggctacctgggcgaggccgcggcgccgcgca

SEQ ID NO: 153048 - DNA, 80 bp, synthetic construct
  source 1..80: mol_type = other DNA
gacccggagagccccccgcaaaacgcgccgctcctacagcagcagcagcagcagcgggagctctcagtccagctcgcaga

SEQ ID NO: 153049 - DNA, 80 bp, synthetic construct
  source 1..80: mol_type = other DNA
aaattattttgcaaattggtccggaagcatcaaactaacctttatgtattgtggatcagctatggcgacgggaaagttcc

SEQ ID NO: 153050 - DNA, 80 bp, synthetic construct
  source 1..80: mol_type = other DNA
taactacattcgccgcagttgcgggtgtggtgtatgtgatgtatagattgtttgcagggcaacagggcccatacacaggt

SEQ ID NO: 153051 - DNA, 80 bp, synthetic construct
  source 1..80: mol_type = other DNA
ttgtaccatgcatagctggtcaaagtggagatgtggggcacgtagttatgcagtatatgtatgtcccacctggagcccct

SEQ ID NO: 153052 - DNA, 80 bp, synthetic construct
  source 1..80: mol_type = other DNA
ctaattatttaatacttttatagttttttaatctgtaaatttttataccattcctgcaaaattaagtaataaggtgggat

SEQ ID NO: 153053 - DNA, 80 bp, synthetic construct
  source 1..80: mol_type = other DNA
ggccattttaagtaagcaccgcctaggagcgacgtcacagttcaaaggtcatcctcagcggaacttacacaaaatggcgg

SEQ ID NO: 153054 - DNA, 80 bp, synthetic construct
  source 1..80: mol_type = other DNA
ctagacctcgagtccggggagaacggtggccagacggcgcttgcgtctgcccccggagccctgccctcctccacccagca

SEQ ID NO: 153055 - DNA, 80 bp, synthetic construct
  source 1..80: mol_type = other DNA
atgcgcctgacgttgtgccggctggtgttgggctggtgacatccgcggtggatacagtggggcctgtgcttgcaggtgcg

SEQ ID NO: 153056 - DNA, 80 bp, synthetic construct
  source 1..80: mol_type = other DNA
agagcattcccgccttgacggctgcagaaaccgggcacacttctcaagtagtcccaggggacacaatgcaaacccgtcat

SEQ ID NO: 153057 - DNA, 80 bp, synthetic construct
  source 1..80: mol_type = other DNA
cccatccagagcacagcgtcctggcaacgcacggagcatttgggcaacaatcaggggccgcgtacgtgggtaactacaga

SEQ ID NO: 153058 - DNA, 80 bp, synthetic construct
  source 1..80: mol_type = other DNA
cctcaaggggttggtggtggaaactaccagactgtctaaaagacatggggatgtttggtcagaatatgtactaccactac

SEQ ID NO: 153059 - DNA, 80 bp, synthetic construct
  source 1..80: mol_type = other DNA
agatattgcatgaggtttaccacaattacataagcataactgcaaaagagttacttacaggcacagaatggagacagtac

SEQ ID NO: 153060 - DNA, 80 bp, synthetic construct
  source 1..80: mol_type = other DNA
gtgactattctagggagtttattacaattggattttcagaaccctagggtttacggtcagaacgtaaatatatatgataa

SEQ ID NO: 153061 - DNA, 80 bp, synthetic construct
  source 1..80: mol_type = other DNA
ggaggttggcaacattcatgctacacatcgggaattttgtgagaaggggaagaaagccctattctatagaatactgtaaa

SEQ ID NO: 153062 - DNA, 80 bp, synthetic construct
  source 1..80: mol_type = other DNA
ttaatgccgggatccgagagcagcaatggttcgagtccatccttagatcccaccactccttctgtggctgtggtgatccc

SEQ ID NO: 153063 - DNA, 80 bp, synthetic construct
  source 1..80: mol_type = other DNA
acaacactcttgggtgaaatagctcagtattacacacactgggcaggttcattgagagtctcattcatgtacacaggacc

SEQ ID NO: 153064 - DNA, 80 bp, synthetic construct
  source 1..80: mol_type = other DNA
cttcaggtggagagtaatcagtacattgacattgcagtggatcattatgccgcgcagttgagtgtactaaacatatcccc

SEQ ID NO: 153065 - DNA, 80 bp, synthetic construct
  source 1..80: mol_type = other DNA
actacaggtgcacagtctattgcactagttggtgagagggctttttatgaccctagaacagcagggagtaagtcaaggtt

SEQ ID NO: 153066 - DNA, 80 bp, synthetic construct
  source 1..80: mol_type = other DNA
atactcctgggtctcgttatggaaccacagtagttaatcatatgggtacattatgtattaggattgttacaaatgaacag

SEQ ID NO: 153067 - DNA, 80 bp, synthetic construct
  source 1..80: mol_type = other DNA
gtagactcacagtatgtcatgggaataatagctggacagccaacagaaacagagtcaccaatagtaaataaaataattga

SEQ ID NO: 153068 - DNA, 80 bp, synthetic construct
  source 1..80: mol_type = other DNA
ggctttcgatgcatgggataatacaataacagaacaagcaatagaggatgtctggaatctattcgagacatcaataaaac

SEQ ID NO: 153069 - DNA, 80 bp, synthetic construct
  source 1..80: mol_type = other DNA
gctgtgcgtgctccacagacgccatcttccatgagccgctgctggtgtccccctcggggtgatgtctcctcccgcgagtc

SEQ ID NO: 153070 - DNA, 80 bp, synthetic construct
  source 1..80: mol_type = other DNA
gcgaagttaagaatttaatggaaattgccgaagtggattccgtggtccctataaataacatcgaaacagctatcagctcc

SEQ ID NO: 153071 - DNA, 80 bp, synthetic construct
  source 1..80: mol_type = other DNA
taatcttaaggaagctgtgatgtccaagtacaaaggtaatgcagaaattgcaatgaatgaaaacatacatatagcagttg

SEQ ID NO: 153072 - DNA, 80 bp, synthetic construct
  source 1..80: mol_type = other DNA
ctgcactaaatgtactaaacacattcagaacagagggctgtgccagccatccacaattaaaaaagccaacaccaaacagt

SEQ ID NO: 153073 - DNA, 80 bp, synthetic construct
  source 1..80: mol_type = other DNA
gagcccgatgtagccgcgtgcaggttctacacattagataccgtcacttggcgcaaggagtccagagggtggtggtggaa

SEQ ID NO: 153074 - DNA, 80 bp, synthetic construct
  source 1..80: mol_type = other DNA
ttagacgctattggaacaacaactacaggacaaaatggagacgccgacgatttcccgctagacgaaggagatttacaaca

SEQ ID NO: 153075 - DNA, 80 bp, synthetic construct
  source 1..80: mol_type = other DNA
tccggcctgcctgcgctgccgcctccggccactccgggaccctcacgaccatgtggtggttccgaaggaggccgtggagg

SEQ ID NO: 153076 - DNA, 80 bp, synthetic construct
  source 1..80: mol_type = other DNA
caaggggctgaactcgccctcttgtgatggacaaaagactttgggagcagaaggtggaggaaaacaagattcagatgagg

SEQ ID NO: 153077 - DNA, 80 bp, synthetic construct
  source 1..80: mol_type = other DNA
cgctggtcgtgcactgtatatccccccatacgacctgctcttgcacgagtggtatgaaaaattttaaatgtttatatata

SEQ ID NO: 153078 - DNA, 80 bp, synthetic construct
  source 1..80: mol_type = other DNA
gccgccgcagacgccgagtaccaagaagacgagctcaacgcgcttttcgacgccctagaagaagaagagtaaggaggagg

SEQ ID NO: 153079 - DNA, 80 bp, synthetic construct
  source 1..80: mol_type = other DNA
actgaggtgagcgacatcaaggtctttgctaagcccaaacacacggctgcatggattccccgtccacccagagcaaccca

SEQ ID NO: 153080 - DNA, 80 bp, synthetic construct
  source 1..80: mol_type = other DNA
ttgagtaaatcagatcccagacttggtgaaccagttgagtgtttgattaagaagtctgctgcaaaatatagagttaataa

SEQ ID NO: 153081 - DNA, 80 bp, synthetic construct
  source 1..80: mol_type = other DNA
gagttacgctggtcggtgtctgcttattaaggtcgccaagcactccgagcgatagcgaggagtgcgaccctgggcgtggg

SEQ ID NO: 153082 - DNA, 80 bp, synthetic construct
  source 1..80: mol_type = other DNA
aacgggtaaattcctcatgaaattagagacaatttgaaataacttaaatttgctgttccccgttatgccaagccaatagg

SEQ ID NO: 153083 - DNA, 80 bp, synthetic construct
  source 1..80: mol_type = other DNA
cccgtccgcaatgccacagttcgacgtaacgccaatgatgcacattcctggagaggtgaaaaaccttatggaaatagcag

SEQ ID NO: 153084 - DNA, 80 bp, synthetic construct
  source 1..80: mol_type = other DNA
cttaaacaggccacctgcacagggcccagaaagccccgggggttccatactacccctgccagccctaccggcaccacctg

SEQ ID NO: 153085 - DNA, 80 bp, synthetic construct
  source 1..80: mol_type = other DNA
ggcctggctagatgagtaccagacagcaggtgtgtgggacaggccagtcagaaactaccacacagacacccccttctacc

SEQ ID NO: 153086 - DNA, 80 bp, synthetic construct
  source 1..80: mol_type = other DNA
actctacagaatcacattatggaacagtggttaccaatgacatgggaacactttgttcaaggatagtcactgaaaatcat

SEQ ID NO: 153087 - DNA, 80 bp, synthetic construct
  source 1..80: mol_type = other DNA
gtggccggctgcagccgggtccggggttccggccctggagctcgggagccggccgagtggcccaccgggtccgctgggtc

SEQ ID NO: 153088 - DNA, 80 bp, synthetic construct
  source 1..80: mol_type = other DNA
atacagacacaactagggatgatttcctctcctcaaatggtgtgataacaatcccagctggagaacagatgtcaatttct

SEQ ID NO: 153089 - DNA, 80 bp, synthetic construct
  source 1..80: mol_type = other DNA
atcaggcattgatgctacttcagtagataaacccacacatcccgagacttcagctgatagattctacaccttatccagta

SEQ ID NO: 153090 - DNA, 80 bp, synthetic construct
  source 1..80: mol_type = other DNA
gctgcaggaaaaaggaatttacaaagccatgagtgaatttgacatttttattaactacatagaagcatacatgacaatta

SEQ ID NO: 153091 - DNA, 80 bp, synthetic construct
  source 1..80: mol_type = other DNA
cacagactgtgttattaatgaccgttgtaccattactagtcacattgcataaagatcctccgccgtcgtcccatcttttc

SEQ ID NO: 153092 - DNA, 80 bp, synthetic construct
  source 1..80: mol_type = other DNA
gcaggcactgagcaaaatgcagacactattagaaagacaattaaagacaacatgcagtcatactttaaaaaaattactga

SEQ ID NO: 153093 - DNA, 80 bp, synthetic construct
  source 1..80: mol_type = other DNA
aaagaaaaagttcgacacgccaatcggaggactccaaggcgaggaaagaagaggctacactttactccaagccctccaag

SEQ ID NO: 153094 - DNA, 80 bp, synthetic construct
  source 1..80: mol_type = other DNA
atgggagctcaagtatcaactcagaaatccggttcacatgaaactagcaatgtggccacagggggctcgacaataaattt

SEQ ID NO: 153095 - DNA, 80 bp, synthetic construct
  source 1..80: mol_type = other DNA
agcttcagaagatgctcaagatgaattaatggtgaacataaccaaattagaaaaaggtctccaggatttagcaccactct

SEQ ID NO: 153096 - DNA, 80 bp, synthetic construct
  source 1..80: mol_type = other DNA
acgaatgcatacccatgccggccttcgcgctcaccagcctcgtcgaccccgtcttaaacaacgtagcgcctggcgagcgc

SEQ ID NO: 153097 - DNA, 80 bp, synthetic construct
  source 1..80: mol_type = other DNA
tacgggtttgttccgggtccgccaccgccgggtggtcctcggccgcgtcccgcgccactagcctcccctccgagtccaga

SEQ ID NO: 153098 - DNA, 80 bp, synthetic construct
  source 1..80: mol_type = other DNA
cctcccccaatttactaaggacggagaccttgaaactgaaacaccttacactagagaaaatgctcaagacttaaaagacc

SEQ ID NO: 153099 - DNA, 80 bp, synthetic construct
  source 1..80: mol_type = other DNA
agagcactaagtggaccaattcagccagtgacagcggccaacacctctcccagttcacatcggcttggtacggggcaagt

SEQ ID NO: 153100 - DNA, 80 bp, synthetic construct
  source 1..80: mol_type = other DNA
atccagttactatccaaagcacattcagtatgacattttgatcggtgaaggaccatgctctccaggggattgtggtggca

SEQ ID NO: 153101 - DNA, 80 bp, synthetic construct
  source 1..80: mol_type = other DNA
aggaaagatgcaatgttagggactcatgtaatttgggacttaggtttgcaatccagctgcacaatggtggctccatggat

SEQ ID NO: 153102 - DNA, 80 bp, synthetic construct
  source 1..80: mol_type = other DNA
ttctaatgaagccacaaatacctcctttaaaggtaaaacatacaattggaaaaattacaaagaaaattttaaagcagtaa

SEQ ID NO: 153103 - DNA, 80 bp, synthetic construct
  source 1..80: mol_type = other DNA
acctacataagaaaaaaaaaagtgaaggaggaaggaagtgcagtgtctgggtaattaggtcatacaggatgatttgcata

SEQ ID NO: 153104 - DNA, 80 bp, synthetic construct
  source 1..80: mol_type = other DNA
aatccagacaaccccatgatggggtacgtcttctacgacagcaatttcggggcaggcaagtgggtagatggcagtggctt

SEQ ID NO: 153105 - DNA, 80 bp, synthetic construct
  source 1..80: mol_type = other DNA
tgcgcagccaaggagatccagcaacattgtcagccactctgctcttgcttgggtgttccaattccccatggcggttccta

SEQ ID NO: 153106 - DNA, 80 bp, synthetic construct
  source 1..80: mol_type = other DNA
gcgccgcgaggacggtggtttttgggcgtgctggggacgtgttgcgggaccggactgagggacggaaggtgtgcgctgtg

SEQ ID NO: 153107 - DNA, 80 bp, synthetic construct
  source 1..80: mol_type = other DNA
aaacacagacgaaaaatccccagttttaaaaccagaccctttggtaaaaagacagtcactatcaaagttgggcctcctaa

SEQ ID NO: 153108 - DNA, 80 bp, synthetic construct
  source 1..80: mol_type = other DNA
ctggctgctctgtctgctgcgtttggttttcaacccgccccaacgccgcgtggtggtcctgggccgagcaccacaccacc

SEQ ID NO: 153109 - DNA, 80 bp, synthetic construct
  source 1..80: mol_type = other DNA
ctaagacgaaagttcgagttgttcacctacatgcggtttgacatggaaatcacatttgttatcaccagtaggcaactgcc

SEQ ID NO: 153110 - DNA, 80 bp, synthetic construct
  source 1..80: mol_type = other DNA
gagtggtgccatatttcggacctggggtagattataaagaagggctgacaccactatcaactaagaatctaaccacctat

SEQ ID NO: 153111 - DNA, 80 bp, synthetic construct
  source 1..80: mol_type = other DNA
tcagcccaattaatgacacttgatattgaccctacaaaaatatctttggaagagagtgtttttggcactgagggtttgga

SEQ ID NO: 153112 - DNA, 80 bp, synthetic construct
  source 1..80: mol_type = other DNA
ctggccagattgatggatcggcccttgcgtcactacccatcagacccccctcactacccatggctaccaaaaaagccaaa

SEQ ID NO: 153113 - DNA, 80 bp, synthetic construct
  source 1..80: mol_type = other DNA
aatcaggcaatggcccctatctaaggaaaaaatacaagcactcagggaaatttgtgacaaaatggaacaggaagggcaat

SEQ ID NO: 153114 - DNA, 80 bp, synthetic construct
  source 1..80: mol_type = other DNA
gttacgctccttggagggacaaagactcgtggtcggaatccgaggcggcgccgtggaagaaggaactcgtgaggcacccc

SEQ ID NO: 153115 - DNA, 80 bp, synthetic construct
  source 1..80: mol_type = other DNA
aaagccaaggagttgtagaagcaatgaatcaacatctgaaaaaacagatagatagaattagggaacaagcagaaaccgta

SEQ ID NO: 153116 - DNA, 80 bp, synthetic construct
  source 1..80: mol_type = other DNA
tcattatcagcccctttctattctcataagccattgaggacagttagggacactcacagcttaggtaggctcatttgcaa

SEQ ID NO: 153117 - DNA, 80 bp, synthetic construct
  source 1..80: mol_type = other DNA
aagataatggttatattattaagtcgcaaaacactatagagagacatgtaaatcatctacagtatgtgttaaattgctta

SEQ ID NO: 153118 - DNA, 80 bp, synthetic construct
  source 1..80: mol_type = other DNA
aactacctgatgcactctcaaacctaggactattcggtcaaaatatgcaataccactacttgggccggactgggtatacc

SEQ ID NO: 153119 - DNA, 80 bp, synthetic construct
  source 1..80: mol_type = other DNA
gtagagccttcactagtgattatgtcattgctagcaccaacataactatgttgaccccacccactgtgtcatcacctgaa

SEQ ID NO: 153120 - DNA, 80 bp, synthetic construct
  source 1..80: mol_type = other DNA
caactgcaccagagggaggtgggctcctcaaagaggagcattatttcaagttcagggagaatatcaaaacagccggaccc

SEQ ID NO: 153121 - DNA, 80 bp, synthetic construct
  source 1..80: mol_type = other DNA
gtaggggccaacacccttggtttgtttgtgttcctgtttgctggcaacttactggcagccgagcagattctaatgggcgc

SEQ ID NO: 153122 - DNA, 80 bp, synthetic construct
  source 1..80: mol_type = other DNA
tcaattctaaggaagttcctgctctcacggcggtggagacgggagcaaccagccaagttacacccgaagatttgattgag

SEQ ID NO: 153123 - DNA, 80 bp, synthetic construct
  source 1..80: mol_type = other DNA
tatccctacttgtacaaaagtgtacaacttttttttcttcggcagccacagaaattctagacaatgatttggttaagttc

SEQ ID NO: 153124 - DNA, 80 bp, synthetic construct
  source 1..80: mol_type = other DNA
gtaaacagtttggcgatagattgtatggccaaacacaataactggggtttagtagttataccactcagtaaattacaatt

SEQ ID NO: 153125 - DNA, 80 bp, synthetic construct
  source 1..80: mol_type = other DNA
tcttcggtcaccctggtagtcccctggatcagtaacacacacttccgaacgggaaagacaggaggatactatgactatta

SEQ ID NO: 153126 - DNA, 80 bp, synthetic construct
  source 1..80: mol_type = other DNA
caatttcttccgggtgaaaggtcattactacgtcatcggtgacgtacggagcctgctacgtaaaacccggaagtaggccc

SEQ ID NO: 153127 - DNA, 80 bp, synthetic construct
  source 1..80: mol_type = other DNA
gggtttagatgagttagcaccattatatgctagtgagaacaagagagtgactaaaattcaaaaagagctcagacaattat

SEQ ID NO: 153128 - DNA, 80 bp, synthetic construct
  source 1..80: mol_type = other DNA
cctggcgccgctcctccaacaaccagaaaagatgccatgcttggaacacatgtcatttgggacataggattgcagtctag

SEQ ID NO: 153129 - DNA, 80 bp, synthetic construct
  source 1..80: mol_type = other DNA
tccaacgacggcgagcgcgcgcccaaaaaggtgtgcgccgactgcgggaagctgtccacgtagatgtcaaagtcctcgat

SEQ ID NO: 153130 - DNA, 80 bp, synthetic construct
  source 1..80: mol_type = other DNA
aaacaaatgctcaaagatactatgcagccagaaaaggcaacaatccagcatttagttcagcacaacaactaaaccataaa

SEQ ID NO: 153131 - DNA, 80 bp, synthetic construct
  source 1..80: mol_type = other DNA
tatcttccttatggggagataaaatttataaagaaagtacatttaatagctttaaaacaaatgcagagaacttatggaag

SEQ ID NO: 153132 - DNA, 80 bp, synthetic construct
  source 1..80: mol_type = other DNA
aaagaatgtctgagtggagccaccctcggggcccaggccccagagtccagaggtcaggggcacctcagggtgcctccccg

SEQ ID NO: 153133 - DNA, 80 bp, synthetic construct
  source 1..80: mol_type = other DNA
ggttcatgataactataaagatattcagggtaaattggatgttccaaaagcatttaaactatgtgatatagatacaaaag

SEQ ID NO: 153134 - DNA, 80 bp, synthetic construct
  source 1..80: mol_type = other DNA
agacgcaggcgacgcaaaaaactttacttgactcagtggaacccgcctatagtaaaacgctgctttatcaagggggctct

SEQ ID NO: 153135 - DNA, 80 bp, synthetic construct
  source 1..80: mol_type = other DNA
atcagctagcaaatgaaaaccgtactagagcagatgctggatataacttcacacatcctggtgagttaggtagggaagtt

SEQ ID NO: 153136 - DNA, 80 bp, synthetic construct
  source 1..80: mol_type = other DNA
acagctgggagtcgtgttccagcaactcctccgactcagacagggtgcggagatccacccgggcctcgtataattcctgg

SEQ ID NO: 153137 - DNA, 80 bp, synthetic construct
  source 1..80: mol_type = other DNA
tgaggtcaccatttctgctccctatacttctcctcaatcctgtctcttcactcgctactctggctgggaatcctacggtg

SEQ ID NO: 153138 - DNA, 80 bp, synthetic construct
  source 1..80: mol_type = other DNA
gagaccgtggacgaaaaagagaacgcagcagctaccgctggcggcggcgtcgttaatgctgccgttgatgatcgacgttg

SEQ ID NO: 153139 - DNA, 80 bp, synthetic construct
  source 1..80: mol_type = other DNA
ataagttaagggacaactttcaaccagatgaggatccattctataattgtaatggcactcttttcggtaacctcactatc

SEQ ID NO: 153140 - DNA, 80 bp, synthetic construct
  source 1..80: mol_type = other DNA
ctggtgagtgttgggaagtatctaaaaatggtagagattgggagacacttaaattgaaagacttagttgataaaattaca

SEQ ID NO: 153141 - DNA, 80 bp, synthetic construct
  source 1..80: mol_type = other DNA
ttcgttgataaatggtatgcacagcatgacctctgtgaggtacctcttgtgtcatttgtggtcagcctagcttcctttag

SEQ ID NO: 153142 - DNA, 80 bp, synthetic construct
  source 1..80: mol_type = other DNA
caagaaacactgttcaacaacattcgttggctagctataaaggcgagaaaatttgctcccttgtatgccagcgaggcacg

SEQ ID NO: 153143 - DNA, 80 bp, synthetic construct
  source 1..80: mol_type = other DNA
ggggacctcgagtccctccgccctgggaagctcttctccgcgtgtataggcctgcttcacaaagtcacgcaggtagtcct

SEQ ID NO: 153144 - DNA, 80 bp, synthetic construct
  source 1..80: mol_type = other DNA
acattcaaatatactaaacacatttagaacagaaggatgtatgtcacatccacaactaagaaaatataacccaaacttaa

SEQ ID NO: 153145 - DNA, 80 bp, synthetic construct
  source 1..80: mol_type = other DNA
cggctcctgggtgtctgcggagacgtaggccgggttaaggtggtcgcagggagactctgtttccagccagagggtgccgg

SEQ ID NO: 153146 - DNA, 80 bp, synthetic construct
  source 1..80: mol_type = other DNA
cgggcacgggactggccgggctatgggcaaggctcttaaaaaagcatgtttatcggtaggcattacaggcgaaagaagag

SEQ ID NO: 153147 - DNA, 80 bp, synthetic construct
  source 1..80: mol_type = other DNA
gattcccgctacaaccaggttattcaagcgtttttagtcgcacactcctgggtgaaatccttaattactacactcactgg

SEQ ID NO: 153148 - DNA, 80 bp, synthetic construct
  source 1..80: mol_type = other DNA
agattacaatgagaggattaagaactacaatgcttggaaagaacaactggaaaatcagactttagatgatttagatgatg

SEQ ID NO: 153149 - DNA, 80 bp, synthetic construct
  source 1..80: mol_type = other DNA
gcaaggttttgctcattctgatgctgatgcccagcaacagttgttggtggaagtatccaaactaaaaagaggcttggatg

SEQ ID NO: 153150 - DNA, 80 bp, synthetic construct
  source 1..80: mol_type = other DNA
ccattttgttatatggtggtctgggcccaaacatacagttttaccttgcgaagtcaataaaaaatgttgaggtttgtcac

SEQ ID NO: 153151 - DNA, 80 bp, synthetic construct
  source 1..80: mol_type = other DNA
gttataataactcgaaactacgaagacaccaccacagtattggccactctagcattgttgggttgtgattgctctccgtg

SEQ ID NO: 153152 - DNA, 80 bp, synthetic construct
  source 1..80: mol_type = other DNA
gcgagtacgagctggccaaatttatggatcgccctttgcggcaatacccatcagacctccctcactacccgtggctacca

SEQ ID NO: 153153 - DNA, 80 bp, synthetic construct
  source 1..80: mol_type = other DNA
caatcagtaacaaaagaaacatctgattttgactcacgtagctgcagatgtataatagaaaacttacccatgtgggccat

SEQ ID NO: 153154 - DNA, 80 bp, synthetic construct
  source 1..80: mol_type = other DNA
ctgctcgggcgtctgactgggaggcgaaatgacgtcgttgtaatcggacgacggtgttgtgtgtcccaggctgacgacgg

SEQ ID NO: 153155 - DNA, 80 bp, synthetic construct
  source 1..80: mol_type = other DNA
tgttattgccacactagcattaattgggtgctcaggctctccatggagattcattaaagaaaaagtttgtaaatggttgc

SEQ ID NO: 153156 - DNA, 80 bp, synthetic construct
  source 1..80: mol_type = other DNA
aaggatacactacttgagtgcaaaaaattaactctctatgaagaccaagtcaaggctttcccccaatcctcagaaacttt

SEQ ID NO: 153157 - DNA, 80 bp, synthetic construct
  source 1..80: mol_type = other DNA
cagtttaaaacttctttataaagaatatgctggaattggtcataaattaaaaggaacagaaacttatatttcaagagata

SEQ ID NO: 153158 - DNA, 80 bp, synthetic construct
  source 1..80: mol_type = other DNA
ggtccaagcagcactgcggggtcactggatcctcacaggccgcacccagctcttcttccgttgccccagtagcatctctg

SEQ ID NO: 153159 - DNA, 80 bp, synthetic construct
  source 1..80: mol_type = other DNA
aaaacacaaacacaggccttatagaaataatacttaaaaacatgaagtcatattttaaaaaaatgcaagacgaacagttc

SEQ ID NO: 153160 - DNA, 80 bp, synthetic construct
  source 1..80: mol_type = other DNA
cgaaggccaggcgcgtctcgcagcacaggtagtgactccaagctttcacgtcctccggtttgaagtcctcgtccgtctcg

SEQ ID NO: 153161 - DNA, 80 bp, synthetic construct
  source 1..80: mol_type = other DNA
gcatgctctgacatgtcagttcgcatgttgcgagacacacctatgatgagacaggatgaagacattacccaaaatccagt

SEQ ID NO: 153162 - DNA, 80 bp, synthetic construct
  source 1..80: mol_type = other DNA
agtgactttcaacttcagtggatcattttggagctacattgaatggttccggtacagttctccaggctggctttattcct

SEQ ID NO: 153163 - DNA, 80 bp, synthetic construct
  source 1..80: mol_type = other DNA
ctactacacaaacctcagcaacctgcctgaacatgcaacaacaagagcaagcatacaacattcattccatccatcaacat

SEQ ID NO: 153164 - DNA, 80 bp, synthetic construct
  source 1..80: mol_type = other DNA
ctaccccacaagcgagatatcccaaaaagatgtagtgtgaacgtcgaaataaaacaagatgaacgaaattcgagaccccg

SEQ ID NO: 153165 - DNA, 80 bp, synthetic construct
  source 1..80: mol_type = other DNA
aaattttgctaaacagactccgagttgccattggacactgtagccgtgaatcagtaacgaaagtgagtggggccagactt

SEQ ID NO: 153166 - DNA, 80 bp, synthetic construct
  source 1..80: mol_type = other DNA
tacatgaggttcgacctcgaagtgacttttgtgataactagctgtcaggaccctggcacagcactagaccaagacatgcc

SEQ ID NO: 153167 - DNA, 80 bp, synthetic construct
  source 1..80: mol_type = other DNA
agtggggccagacttcgccatagggcctttaactttgggtcgtttgatggtggcttccgggttcgcctggtggccgccat

SEQ ID NO: 153168 - DNA, 80 bp, synthetic construct
  source 1..80: mol_type = other DNA
aacattcaagccaatcacctgggaaactgtaactttccttaagcgtggctttaagcctgacaagcagtacccttttctca

SEQ ID NO: 153169 - DNA, 80 bp, synthetic construct
  source 1..80: mol_type = other DNA
tgtccataccaccaaaccacaagctctaggtgccgtagaaataggagctactgctgatgtgggcccagaaacactaattg

SEQ ID NO: 153170 - DNA, 80 bp, synthetic construct
  source 1..80: mol_type = other DNA
gaagtgggtgatagctgctcatatggtaatatcctgctcagtggaactcaaacagcaagaatgattaaatacaactaccc

SEQ ID NO: 153171 - DNA, 80 bp, synthetic construct
  source 1..80: mol_type = other DNA
taacagccttgctcctcgctttcctaacaaccaaggacccccgcatccacctgccttaaacaggccacctgcacagggcc

SEQ ID NO: 153172 - DNA, 80 bp, synthetic construct
  source 1..80: mol_type = other DNA
aggtaagtattattaaattttagagacactatcacgtgtaacttgacgtgcaaggatggaggagaggggcagggaaacgc

SEQ ID NO: 153173 - DNA, 80 bp, synthetic construct
  source 1..80: mol_type = other DNA
aagcccctgctaatccatgagccccgcctttaggaagcaccacgtcccggggacggaagctggattttggccagtcttaa

SEQ ID NO: 153174 - DNA, 80 bp, synthetic construct
  source 1..80: mol_type = other DNA
gatcggagtccacagtggagaactttttatgcagatccgcgtgcgtatattacacaacctacaagaatcatggcaccgac

SEQ ID NO: 153175 - DNA, 80 bp, synthetic construct
  source 1..80: mol_type = other DNA
gtagatcagggcaatggggctacacaacccccaccggcgacggtggtgtagcccgcgtggtgccccgcccgagctatcag

SEQ ID NO: 153176 - DNA, 80 bp, synthetic construct
  source 1..80: mol_type = other DNA
tttccgttcggctcaccacaaactgacaacatttgcataaccttccaagttctctcttccatttacaacggcttcctctc

SEQ ID NO: 153177 - DNA, 80 bp, synthetic construct
  source 1..80: mol_type = other DNA
tggatatttatgatcaggttaaaaattacagcaaaggaaaaattaggaaaatgctcactatgagcactaagtacaaatgg

SEQ ID NO: 153178 - DNA, 80 bp, synthetic construct
  source 1..80: mol_type = other DNA
tccaataagtagatccagagacctaagactgcgttgaaaaaagagtgttagggttggaaaagtgggggtgtggtaaataa

SEQ ID NO: 153179 - DNA, 80 bp, synthetic construct
  source 1..80: mol_type = other DNA
aactcaaacaactaagagaatactactttaaatgggaaactcagcatacaggcgtggcggtcccacctacgtggaccacc

SEQ ID NO: 153180 - DNA, 80 bp, synthetic construct
  source 1..80: mol_type = other DNA
agggcatacccatgtggagcgccctgttcgggtacggggagtacgtagagagccagctaggccccttccaggaccacgag

SEQ ID NO: 153181 - DNA, 80 bp, synthetic construct
  source 1..80: mol_type = other DNA
gaggagcaatcttggttacttgcagcgggtgccctgatctgtccgttagaatgttgagggatactccaatgatgaagcaa

SEQ ID NO: 153182 - DNA, 80 bp, synthetic construct
  source 1..80: mol_type = other DNA
aactgatttattgcaatcagtaagaactccagaggtagttaaatactgtgaggataataattggataattcctgcagagt

SEQ ID NO: 153183 - DNA, 80 bp, synthetic construct
  source 1..80: mol_type = other DNA
acacagacagcaactatggctactgcacctatcaacctaaaacagagttagttacaaaaattaaacagtacagaaacctt

SEQ ID NO: 153184 - DNA, 80 bp, synthetic construct
  source 1..80: mol_type = other DNA
cacatacgccacaaacaaaggaacaagtggcaattcacaaaacaaaataccacctgatcaaatgaaagaggcaaacttag

SEQ ID NO: 153185 - DNA, 80 bp, synthetic construct
  source 1..80: mol_type = other DNA
cagtaccacacattaaccctacatacagcaatgcaataacaccagaatatgaataccacacaggctggttcagcccagta

SEQ ID NO: 153186 - DNA, 80 bp, synthetic construct
  source 1..80: mol_type = other DNA
gtaatgcaaaatgctgccctctcatctgtggaaaggctttgcaattcagagatagaaataacggagagcatttgtctcta

SEQ ID NO: 153187 - DNA, 80 bp, synthetic construct
  source 1..80: mol_type = other DNA
gaccagcctacgaggaacggataacgcggtggcgacggcagcggtggtggcgctgggggtggcggtagtggtactgctga

SEQ ID NO: 153188 - DNA, 80 bp, synthetic construct
  source 1..80: mol_type = other DNA
aaggggctattcttacaacccagcatgtcagtgatgtgggcttacatccaatcaatacccctagcagtaccaagttaaga

SEQ ID NO: 153189 - DNA, 80 bp, synthetic construct
  source 1..80: mol_type = other DNA
atgcccgtgatgaggctagagatccaggctcgtggggcatttagacagtagtagcagagcagggcatagtcctcaaagaa

SEQ ID NO: 153190 - DNA, 80 bp, synthetic construct
  source 1..80: mol_type = other DNA
aagtgaccggtcgcaggatgtccctaaaggggacgggagagaggtcgtcgggagtctcggtggaataggtgaaaacatcc

SEQ ID NO: 153191 - DNA, 80 bp, synthetic construct
  source 1..80: mol_type = other DNA
cccgcactgagggcactgccgcctcccggggaagcaaaccccggtgacggcgagcaacaaccatggcgtggcgatggtgg

SEQ ID NO: 153192 - DNA, 80 bp, synthetic construct
  source 1..80: mol_type = other DNA
tctgcggttctgccatggcaacagggaagttcctcctagcgtactcgccacctggagctaatgcgccaaaaagtagaaag

SEQ ID NO: 153193 - DNA, 80 bp, synthetic construct
  source 1..80: mol_type = other DNA
acccatatgttcttgattgtggtgtaccgttgagccaagcattagtgttcccccaccagtggatcaatttacgcaccaat

SEQ ID NO: 153194 - DNA, 80 bp, synthetic construct
  source 1..80: mol_type = other DNA
ctctaacactagagcaagcagtatgtggaattaaaaatctagaacctctagacctcaccaccagtgctggattcccatat

SEQ ID NO: 153195 - DNA, 80 bp, synthetic construct
  source 1..80: mol_type = other DNA
caaaagacaaagattccagaaagaagagttgttgcacaaggtcctgaggaagaatttggaagatcacttatcaagcacaa

SEQ ID NO: 153196 - DNA, 80 bp, synthetic construct
  source 1..80: mol_type = other DNA
tggagtcttttctaggtagggcggcgctggtgaccatactcaaactgcaaaacgcggctcccactagtagcaacgccaag

SEQ ID NO: 153197 - DNA, 80 bp, synthetic construct
  source 1..80: mol_type = other DNA
aagtcggagacgatagtgtagttcggaaaaatgaaaaacttgtcggcgttttctccaaaatagctggcattgcgattagt

SEQ ID NO: 153198 - DNA, 80 bp, synthetic construct
  source 1..80: mol_type = other DNA
accattatgggccatgtgctttggatacagagacttcattaaaagtgtaaaagagaaacaagacccagactttgaaaaca

SEQ ID NO: 153199 - DNA, 80 bp, synthetic construct
  source 1..80: mol_type = other DNA
cacctggagccatcccagaggggtaaaaagagaaaacgggtcgatgatgatgccggtggttcagctccagcacaacacgt

SEQ ID NO: 153200 - DNA, 80 bp, synthetic construct
  source 1..80: mol_type = other DNA
agtgctacaaactgctttctaaaagtcagcagtctgtggggagaccacgtatatagcaagtcaaagttaattgacggttg

SEQ ID NO: 153201 - DNA, 80 bp, synthetic construct
  source 1..80: mol_type = other DNA
caaactacaacagaaaattggcagacaatactcttaaagtggaccattacattacaacccggccaactgttaaaacagct

SEQ ID NO: 153202 - DNA, 80 bp, synthetic construct
  source 1..80: mol_type = other DNA
cagatggtcttcatccaacgagatgctagaccttgccagatacaacgggtgcagattcaccttttacagagacaaagtaa

SEQ ID NO: 153203 - DNA, 80 bp, synthetic construct
  source 1..80: mol_type = other DNA
gagcttccatagcctggaccctgataaagaatgcagacaaaccagccaacaagcgtggtcgtcccggaggacgaacattg

SEQ ID NO: 153204 - DNA, 80 bp, synthetic construct
  source 1..80: mol_type = other DNA
agctagaggtctaacagacagtggtaatgtttactcattgcccccaaaccctaaacattttgatggatactgtcaacaac

SEQ ID NO: 153205 - DNA, 80 bp, synthetic construct
  source 1..80: mol_type = other DNA
atcaactactttaaagatgctgcctcaagtggagcgtcacgactggatttttcacaggatcctagtaaattcacagatcc

SEQ ID NO: 153206 - DNA, 80 bp, synthetic construct
  source 1..80: mol_type = other DNA
gtagagaactttctgtgtagatccgcgtgtgtgtattacacaacttacaagaaccatggcactgatggagacaatttcgc

SEQ ID NO: 153207 - DNA, 80 bp, synthetic construct
  source 1..80: mol_type = other DNA
ggctaacctcaccttaaatagcaatgggtttgctaaatgggatattaactttcaggagcaagcacagatcaggaaaaaac

SEQ ID NO: 153208 - DNA, 80 bp, synthetic construct
  source 1..80: mol_type = other DNA
cacagactacaatgaaaaacagtgctactgcaccctagaagacatgcccctatgggcaatgtgcttcgggtacagtgact

SEQ ID NO: 153209 - DNA, 80 bp, synthetic construct
  source 1..80: mol_type = other DNA
ttcagtaccacacaaagtcagacaacaagtttaaaaaaccagagtgccactgggaaatcagtgacctgcccctgtgggcc

SEQ ID NO: 153210 - DNA, 80 bp, synthetic construct
  source 1..80: mol_type = other DNA
cacaaaccaggagagctgccaaggaagtggttgattggtttagttcaaaaattaagtccatgttaagctttgtggaaaga

SEQ ID NO: 153211 - DNA, 80 bp, synthetic construct
  source 1..80: mol_type = other DNA
actgcccgctttccagtcgggaaacctgtcgtgccagctgcattaatgaatcggccaacgcgcggggagaggcggtttgc

SEQ ID NO: 153212 - DNA, 80 bp, synthetic construct
  source 1..80: mol_type = other DNA
gaaagccgtgctcaggggattgacacgattgctaggtgctcatgcagatgtggtgtatattattgcgagtccatgcgcaa

SEQ ID NO: 153213 - DNA, 80 bp, synthetic construct
  source 1..80: mol_type = other DNA
aacaacatttgcacaaccttccaggtgttgaaagacatgtactatgactgcataggagttaattcctctttagatgataa

SEQ ID NO: 153214 - DNA, 80 bp, synthetic construct
  source 1..80: mol_type = other DNA
tttcttgccagaatgataacaagtgaaagtgacatatattcactcccccctgatccaaaatatttcgatggatacgacca

SEQ ID NO: 153215 - DNA, 80 bp, synthetic construct
  source 1..80: mol_type = other DNA
aattattcagttcaaaaaatagcaaatagacctgaaggaggaccagtgggtacagtattcaacacatttaaaacacagga

SEQ ID NO: 153216 - DNA, 80 bp, synthetic construct
  source 1..80: mol_type = other DNA
ccctgtaacgtagaagcattgcaaacggaccaaaaggggacggcaaaccacgtcgttcaaggtcaagcacttctgtttcc

SEQ ID NO: 153217 - DNA, 80 bp, synthetic construct
  source 1..80: mol_type = other DNA
tcggccttggatgaaccaaatttccccgtttcctcagaatccaattggggcactcaagctggtagtgcccccactgccta

SEQ ID NO: 153218 - DNA, 80 bp, synthetic construct
  source 1..80: mol_type = other DNA
aggtgcctcagggcaagcagtgcctagtgatgtgattgaaactagacatgtggtaaactacaaaaccagatcagaatcga

SEQ ID NO: 153219 - DNA, 80 bp, synthetic construct
  source 1..80: mol_type = other DNA
tgttgtagtcccaatcactatatcaataagtccaatgttcgctgaattttccggagcacgagcgagacccgcaagagcta

SEQ ID NO: 153220 - DNA, 80 bp, synthetic construct
  source 1..80: mol_type = other DNA
gtgtaagaaaattcccttgtataaagaacaagtaaaagcatttgccacagcctcagaagatgcacaaaatgaactcatgg

SEQ ID NO: 153221 - DNA, 80 bp, synthetic construct
  source 1..80: mol_type = other DNA
acacttctttaagtacagacaagacatcacaagtattaccaacctgggacccagtgacatgtatgttcacacaaaagagg

SEQ ID NO: 153222 - DNA, 80 bp, synthetic construct
  source 1..80: mol_type = other DNA
cagaatatgtattatcacttccttggaagaagtggatacacagtgcatgtacaatgtaactctagtaaatttcatcaggg

SEQ ID NO: 153223 - DNA, 80 bp, synthetic construct
  source 1..80: mol_type = other DNA
ctccgttcgactgctaaaagacaccccattcatcgaacagagtgcactactccaaggtgacgtgatggaggcagttgagg

SEQ ID NO: 153224 - DNA, 80 bp, synthetic construct
  source 1..80: mol_type = other DNA
agatatttaggagtaaacctgtacattttcagacacccagatgtagattttatcataaaaattaataccatgcctccttt

SEQ ID NO: 153225 - DNA, 80 bp, synthetic construct
  source 1..80: mol_type = other DNA
gaggtgtcactcatcggactctctatgagcacacacaacacctcgcctccggcattccaacggaaaccttttgcctaaac

SEQ ID NO: 153226 - DNA, 80 bp, synthetic construct
  source 1..80: mol_type = other DNA
ttttagcactactacctggagcctaaaagtactgtttgacgagcacattaagtttagaaacaaatggagctatcctaata

SEQ ID NO: 153227 - DNA, 80 bp, synthetic construct
  source 1..80: mol_type = other DNA
tttatcatgtaaatttttgccattgtatgcgagtgaggcaaagagaataaagaatctttatataaaatgcaataatatta

SEQ ID NO: 153228 - DNA, 80 bp, synthetic construct
  source 1..80: mol_type = other DNA
acacgcagaagagaaagtgaaagatactgaaggagcaaaacaaatagtacagagacatctagcggcagaaacaaaaactg

SEQ ID NO: 153229 - DNA, 80 bp, synthetic construct
  source 1..80: mol_type = other DNA
tgacccccggcgtagctcaggctgatgaggctccgaacaccccacaggcgactgtgtcggagcctgcgttggcggcctgc

SEQ ID NO: 153230 - DNA, 80 bp, synthetic construct
  source 1..80: mol_type = other DNA
atacatcaaggacagccgactctgcattagtctctaccgcctttggcgggtccgtctttcaagaaaaccgactgggagaa

SEQ ID NO: 153231 - DNA, 80 bp, synthetic construct
  source 1..80: mol_type = other DNA
acaccacaaatacagatgagaccaagagatttgccagctggataattaacgcaagacgcatggtgcagatgagaaggaag

SEQ ID NO: 153232 - DNA, 80 bp, synthetic construct
  source 1..80: mol_type = other DNA
agtggacggttacaaaaaatacttataaaaactggggaaactggtggaaatatgacttttatgccaccaagtcagatagc

SEQ ID NO: 153233 - DNA, 80 bp, synthetic construct
  source 1..80: mol_type = other DNA
tatttaatgagagatggttaatacatggtggcatgccatctggatccccttgcaccaccgtactaaattcactctgtaac

SEQ ID NO: 153234 - DNA, 80 bp, synthetic construct
  source 1..80: mol_type = other DNA
acgtgattaaacagggtgactcttggctgaaaaagtttacagaagcttgtaatgcactcaggggcttggactggctagcc

SEQ ID NO: 153235 - DNA, 80 bp, synthetic construct
  source 1..80: mol_type = other DNA
ggtgatacctattatggtttagtctccatcaatgatttcggaactctggcagttagagtggtgaatgagttcaacccagc

SEQ ID NO: 153236 - DNA, 80 bp, synthetic construct
  source 1..80: mol_type = other DNA
ggcaatgaaacttgcataaatgacaataactgcgcaggattggagacagaacccatgatagggtgtaagtttaacatgtc

SEQ ID NO: 153237 - DNA, 80 bp, synthetic construct
  source 1..80: mol_type = other DNA
gtttctaatacatcccatttatccagaaagtgaggtttgggagtccattagatggacaaaaaacccaagaaatatgcgag

SEQ ID NO: 153238 - DNA, 80 bp, synthetic construct
  source 1..80: mol_type = other DNA
caattaacatcagattggattgtagaggaagagtgtgaaatggattacttcagagtgaaatatttggaatcatctgtgaa

SEQ ID NO: 153239 - DNA, 80 bp, synthetic construct
  source 1..80: mol_type = other DNA
ctgccatcgagaaatatctcaaagaccaggcacaactaaattcatggggatgtgctttcagacaggtctgtcacacgact

SEQ ID NO: 153240 - DNA, 80 bp, synthetic construct
  source 1..80: mol_type = other DNA
atgctagtaagtttcatcaaggtaccctaatagttgctgccattccagaacatcagttggctttcatctctaagggtaat

SEQ ID NO: 153241 - DNA, 80 bp, synthetic construct
  source 1..80: mol_type = other DNA
cttcatgtgtagggctgcatgtgtgcgcatggcaaaatatgaagcaagaggtgacgccaccagcacaagcaggtttgatg

SEQ ID NO: 153242 - DNA, 80 bp, synthetic construct
  source 1..80: mol_type = other DNA
caatcgccaggtgcagctgcagaacaggagtttactactgtgagtccagacgaaaatactatccagtctcttttgtgggg

SEQ ID NO: 153243 - DNA, 80 bp, synthetic construct
  source 1..80: mol_type = other DNA
tggcaatagactgcatggccaagcacaacaactgggggttggttattttaccattgtgcaagctagattatgcaccaaac

SEQ ID NO: 153244 - DNA, 80 bp, synthetic construct
  source 1..80: mol_type = other DNA
tgaagatataataaccaacacagtctctcgcacactgcagcaaattagcgccccaactcatggtaccactgcagcaaaca

SEQ ID NO: 153245 - DNA, 80 bp, synthetic construct
  source 1..80: mol_type = other DNA
caactcgtaatttagaagtaacgcacaccattgatcaacagtaagcgtggcgcgccagccatgtttagatcaagtacttc

SEQ ID NO: 153246 - DNA, 80 bp, synthetic construct
  source 1..80: mol_type = other DNA
tacgccatacacagcgaagactacatacctcaactaagaccttacggagggtcttttagcactactacctggagcctaaa

SEQ ID NO: 153247 - DNA, 80 bp, synthetic construct
  source 1..80: mol_type = other DNA
tactaatttgcctgcatcatcatgcctgggtggtacatggcactgctgtacttgttcagtttaaaagggggatttctact

SEQ ID NO: 153248 - DNA, 80 bp, synthetic construct
  source 1..80: mol_type = other DNA
tacattccaaactatagcacaccttagagaaactggcaaacaagattcagcaaaccctacatggggccagtgcttaaaca

SEQ ID NO: 153249 - DNA, 80 bp, synthetic construct
  source 1..80: mol_type = other DNA
acacacatccaggtgaattaggccataaaattggtagtaactcagaaagaggtgataatcaaccagatgaaaaccctttc

SEQ ID NO: 153250 - DNA, 80 bp, synthetic construct
  source 1..80: mol_type = other DNA
aacttcatatgaaaaccactataaaactaacctatatgaagtagtacaatattatgatacattccaaactatagcacaaa

SEQ ID NO: 153251 - DNA, 80 bp, synthetic construct
  source 1..80: mol_type = other DNA
aacaaacagctacactcacattgggtgcgggttttcccgccctatggcctctcgcgaggcccacccctcccctccctccc

SEQ ID NO: 153252 - DNA, 80 bp, synthetic construct
  source 1..80: mol_type = other DNA
cagacccaaaaacccatactctgtctgctttcgcttaggcttcaaataaacgttggccgtgcactattcacttgtcggtg

SEQ ID NO: 153253 - DNA, 80 bp, synthetic construct
  source 1..80: mol_type = other DNA
caccgcagaactccctcacgcaccggcagtgcgcacaaagcgccggacacagcacgccgtaaacgcgctgaggacgccgc

SEQ ID NO: 153254 - DNA, 80 bp, synthetic construct
  source 1..80: mol_type = other DNA
gccagagacaagactcggaaaagaggaaagaacagacacacgcagacgctcgcgggcgcgggggggggggagtcgcgtgc

SEQ ID NO: 153255 - DNA, 80 bp, synthetic construct
  source 1..80: mol_type = other DNA
aacaacctaaaaatgtaagcaaatattactatgctacttttcatcctacaaaactaatgctatataatagaaaaatagtt

SEQ ID NO: 153256 - DNA, 80 bp, synthetic construct
  source 1..80: mol_type = other DNA
agcaacagagtacacacataaagatagtactaactacaacaggagagtgaatcctaactctgaagacagtacacttacca

SEQ ID NO: 153257 - DNA, 80 bp, synthetic construct
  source 1..80: mol_type = other DNA
gtggtatgcacaggaggacctgtgcgacgttaatcttgtaacacttgcggtcagcgcagcttcctttacacatccgttcg

SEQ ID NO: 153258 - DNA, 80 bp, synthetic construct
  source 1..80: mol_type = other DNA
ttagtattacagcctttgatggcaccgataaaacagacgtaacaacaccaaaagacaaaattaaaaaattcttaaacaag

SEQ ID NO: 153259 - DNA, 80 bp, synthetic construct
  source 1..80: mol_type = other DNA
ctggaggaaataaagcaagaagccttaagacattttgatccccgcttgctaactgcgcttggtaactttatttacagtag

SEQ ID NO: 153260 - DNA, 80 bp, synthetic construct
  source 1..80: mol_type = other DNA
cccaacctctgctcccctctattctcctcttgcgttatctccaatagaatttgcttgaggtcatacgttttagggtgctc

SEQ ID NO: 153261 - DNA, 80 bp, synthetic construct
  source 1..80: mol_type = other DNA
gcccagaggcaaactcaaagttagggtcaccatcaggccccccaccctcttagaggacaagtggtacacgcaacaggacc

SEQ ID NO: 153262 - DNA, 80 bp, synthetic construct
  source 1..80: mol_type = other DNA
aagatagaactattcacctacactagattcgatgtggaaatcactttcgttataaccacaacacaacaacagtcaacagc

SEQ ID NO: 153263 - DNA, 80 bp, synthetic construct
  source 1..80: mol_type = other DNA
gtggggcagatggaggcgccgccgctggggccgccgccgacgcagaccataccgggtacgaagaaggagacctagaagat

SEQ ID NO: 153264 - DNA, 80 bp, synthetic construct
  source 1..80: mol_type = other DNA
ggccgtaacgctaactttttaacgaggtgtaagcatcaggttaatctaagacagtcacctattttcctgaccctcctgag

SEQ ID NO: 153265 - DNA, 80 bp, synthetic construct
  source 1..80: mol_type = other DNA
aatgtttagacccagacaaaacaatccagatggctccaataattctaactaccaaaacctattaaatacttggaccacaa

SEQ ID NO: 153266 - DNA, 80 bp, synthetic construct
  source 1..80: mol_type = other DNA
gtgtgttcccatctctcctagtcgccgcctggtcactcggtgctcaactgagataaagaccctggtctgttaggaccctt

SEQ ID NO: 153267 - DNA, 80 bp, synthetic construct
  source 1..80: mol_type = other DNA
gctgagagatacggccaccccgggggcccgcgcgcgcctggggctccgggagtaggtggcaaccctaattctcctcagat

SEQ ID NO: 153268 - DNA, 80 bp, synthetic construct
  source 1..80: mol_type = other DNA
caggagaatcagggcatgagataggaaagaacaccactaacagaggtactaatgagcccgatgagaacccattctttagt

SEQ ID NO: 153269 - DNA, 80 bp, synthetic construct
  source 1..80: mol_type = other DNA
aatgaagataggtttgtgaggtgggaaataaacaacaaagagctggtacaacttaggaggaagtgtgagatgtttactta

SEQ ID NO: 153270 - DNA, 80 bp, synthetic construct
  source 1..80: mol_type = other DNA
tcagcggcgttaagctgtgcgccccggcctgcgaaagcgagtcgttgggcaaatgcggttggcccgaagtcagatgagcc

SEQ ID NO: 153271 - DNA, 80 bp, synthetic construct
  source 1..80: mol_type = other DNA
tctaacgaggacctggacctctgtagatacaggggctgcaccctctggttctttagacacccagaggtagactttatcat

SEQ ID NO: 153272 - DNA, 80 bp, synthetic construct
  source 1..80: mol_type = other DNA
agagtgcggctacagtgatagagtaaggtccatcactcttggtaactcgactatcactacccaggaaagtgctaatgtgg

SEQ ID NO: 153273 - DNA, 80 bp, synthetic construct
  source 1..80: mol_type = other DNA
caaatgctgctagtaatacaacacaagaccaatactttaacacattagatggttactggggagacccaatatatgccaga

SEQ ID NO: 153274 - DNA, 80 bp, synthetic construct
  source 1..80: mol_type = other DNA
cccatacacagaacctgcactaacaaaaaaaaatgaccccacctatggatatataatatatggctacaactttgcaaacg

SEQ ID NO: 153275 - DNA, 80 bp, synthetic construct
  source 1..80: mol_type = other DNA
agatcaagcaagacacgcccgagcagccatgtctaatgaactccgcggttaccgtccaaacgccacccaaactcttgctg

SEQ ID NO: 153276 - DNA, 80 bp, synthetic construct
  source 1..80: mol_type = other DNA
aacactcagggcagtagtaacacaaggacctaacacagaatttgctttgtctttactaaggaaaaatatagtaacagtga

SEQ ID NO: 153277 - DNA, 80 bp, synthetic construct
  source 1..80: mol_type = other DNA
gattgcaaccactaacaaatcagatttttcaagcactgttttacaagactcaggtgctttgaagaggagattcccataca

SEQ ID NO: 153278 - DNA, 80 bp, synthetic construct
  source 1..80: mol_type = other DNA
gatacgctagctggagaatttcggtccgtgatttggtgcaactaagacgcaagtgtgaaatgttcacttatatgaggttt

SEQ ID NO: 153279 - DNA, 80 bp, synthetic construct
  source 1..80: mol_type = other DNA
ggctataccactagatatgagcaatacacttttctctacaacacttatgggggaggttctaaactactactcaaattggt

SEQ ID NO: 153280 - DNA, 80 bp, synthetic construct
  source 1..80: mol_type = other DNA
attatctgaaggttcaacgtcctcaactcctggcacatgccccgtaaaatatagagtaaaatccagtgagtctacgaaca

SEQ ID NO: 153281 - DNA, 80 bp, synthetic construct
  source 1..80: mol_type = other DNA
gagctcgacgacgaagagtaaggaggcgcagactgaggaggagtgggcgaccgagacgcaggacttttaaacgtaggagg

SEQ ID NO: 153282 - DNA, 80 bp, synthetic construct
  source 1..80: mol_type = other DNA
tgagctttcctgttactttattcagaaagcaccagaacccgtcgccatttcccctcatatacggtacacgtccccctgat

SEQ ID NO: 153283 - DNA, 80 bp, synthetic construct
  source 1..80: mol_type = other DNA
tgtaaaccgagttttgcggtggatggtgagccagacacggcgggtggggggaaggagctgacacgagtgcgtagaaagtg

SEQ ID NO: 153284 - DNA, 80 bp, synthetic construct
  source 1..80: mol_type = other DNA
gctaacgggcacgcggtctagcggcagcgcaaaggccagcaccgagaccgtgttgttttctgagcctggcgtcaggcgtc

SEQ ID NO: 153285 - DNA, 80 bp, synthetic construct
  source 1..80: mol_type = other DNA
cgcacaccgagtaattgggatttttacagataaggccggcgtcggtgacgcgcagctcgctgggacccaacttgaggata

SEQ ID NO: 153286 - DNA, 80 bp, synthetic construct
  source 1..80: mol_type = other DNA
gccagctaggccccttccaagaccacgagacggtaggcatagtgtgctttatatgcccatacacagtaccccccatgtac

SEQ ID NO: 153287 - DNA, 80 bp, synthetic construct
  source 1..80: mol_type = other DNA
gtactttgtgatgtttgtcatgtcggcggtggtccccatcaccgccatgttccccaacctggggtacccctgctacttta

SEQ ID NO: 153288 - DNA, 80 bp, synthetic construct
  source 1..80: mol_type = other DNA
gtggcagccactcgcgggtccccgtaaaacatatggaaaggaatggcgtgaaagagacactgggtgacggcccgggtcct

SEQ ID NO: 153289 - DNA, 80 bp, synthetic construct
  source 1..80: mol_type = other DNA
tacactacaacctaatacctccactaaaaatgaaccagttcacaagtcccaacacgcacccgggactactcatgctcagc

SEQ ID NO: 153290 - DNA, 80 bp, synthetic construct
  source 1..80: mol_type = other DNA
agacaacctgtacaatgagagacagagcaagtgcctaataaaagacatgccactgtggtgtgcatgctttggctacatag

SEQ ID NO: 153291 - DNA, 80 bp, synthetic construct
  source 1..80: mol_type = other DNA
accaacctgtgattgcactgatgcaacttacttttgcaagcataaaaacagatactatccaataaaagttaccagtcatg

SEQ ID NO: 153292 - DNA, 80 bp, synthetic construct
  source 1..80: mol_type = other DNA
ccccagcgccgtgccgctgacaaatgccgtaggacacgccgcagacgccgcgccgcgcttccgggggggggggagtggtg

SEQ ID NO: 153293 - DNA, 80 bp, synthetic construct
  source 1..80: mol_type = other DNA
gctgtgactgtactgaatgcactttctattccaaacataaggatagatactttcctatcactgtaaagaaatacaactgg

SEQ ID NO: 153294 - DNA, 80 bp, synthetic construct
  source 1..80: mol_type = other DNA
ttaaaccctgaggaagggaaatggtggaagaaaaataccagaaagcagaaaacatgtatgcccaaataaaggaggaggtg

SEQ ID NO: 153295 - DNA, 80 bp, synthetic construct
  source 1..80: mol_type = other DNA
tcctcgacactggctgcggcggcttcctctttttccgcctgtgcccgtccccggggacttcttcctcttttccgcgtctg

SEQ ID NO: 153296 - DNA, 80 bp, synthetic construct
  source 1..80: mol_type = other DNA
agaagcattatatggtgttgatggcctagaacctatagatgtaacaactagtgcaggttacccctatgttagtttaggca

SEQ ID NO: 153297 - DNA, 80 bp, synthetic construct
  source 1..80: mol_type = other DNA
ttcttgaaaagaggctttcaacctgatcaaaggtacaagtttttaatccatccagtttatagcatgtttgatgtgtatga

SEQ ID NO: 153298 - DNA, 80 bp, synthetic construct
  source 1..80: mol_type = other DNA
cctctagtcatcgcgcctgaccccttttataaactgctcgaagaaaagaacaccttatgtgaaaaaatacagaatgatga

SEQ ID NO: 153299 - DNA, 80 bp, synthetic construct
  source 1..80: mol_type = other DNA
cgggcacctccgaggccgccggctcccgcgccggtcaggggacgggcctcagcacctcccaggccaccagccccagttca

SEQ ID NO: 153300 - DNA, 80 bp, synthetic construct
  source 1..80: mol_type = other DNA
aaccagaaaagagagatgactacacatggcaatctggcactaatgcatctgttttctggcaacatggccaaccttatcct

SEQ ID NO: 153301 - DNA, 80 bp, synthetic construct
  source 1..80: mol_type = other DNA
gcaccattaccactcaggagagtgctaatgtagttgttgggtatggagtgtggcctgagtacctctccgataaagaggcc

SEQ ID NO: 153302 - DNA, 80 bp, synthetic construct
  source 1..80: mol_type = other DNA
acagttggaccatctgatttatacgtccactgtggagaccttatttacaggaatctacatttgtgtgaaccagaacatct

SEQ ID NO: 153303 - DNA, 80 bp, synthetic construct
  source 1..80: mol_type = other DNA
tatgaatgtggcttttcagcctagacagacagtgtggctaagggagtgtgtgccagttaaggtgattagctaaggcattc

SEQ ID NO: 153304 - DNA, 80 bp, synthetic construct
  source 1..80: mol_type = other DNA
ctgcccagctaatgactctagatatagaacctagtaatataactttagaagaaagtgtttttggtactgaaggcttagaa

SEQ ID NO: 153305 - DNA, 80 bp, synthetic construct
  source 1..80: mol_type = other DNA
acccaactgacattgaaaaccagaaagaggctaagttgttcaatgattggaaaattaatttgtccagtttagttcaatta

SEQ ID NO: 153306 - DNA, 80 bp, synthetic construct
  source 1..80: mol_type = other DNA
atttaaccaccacatcgtgctacaaacaagcttggcttagacattttaatgtatccacacacggaaaatacacccatccc

SEQ ID NO: 153307 - DNA, 80 bp, synthetic construct
  source 1..80: mol_type = other DNA
gtatagtggatcataacatgggagaagagtatggccttcttcaatccatcataccattattcaatggaagacctgaaaca

SEQ ID NO: 153308 - DNA, 80 bp, synthetic construct
  source 1..80: mol_type = other DNA
caatactctactgaaccatcacatacatgacctcctcgaggtatgcagggaatgagcggtccgtgagccggtcaacacga

SEQ ID NO: 153309 - DNA, 80 bp, synthetic construct
  source 1..80: mol_type = other DNA
cccatccaaaacaaagttacaacccagtattttctttgatgtctttcctggtgataaagaaccagctgttcttagtaagc

SEQ ID NO: 153310 - DNA, 80 bp, synthetic construct
  source 1..80: mol_type = other DNA
atgacagtagaaattagaaaacaaaatatgtcagagtttatggaactctggtcacagggattatcagatgatgacaatga

SEQ ID NO: 153311 - DNA, 80 bp, synthetic construct
  source 1..80: mol_type = other DNA
aaaacccatagaatcctcggaagagggaaaaaacacccataaggaacagatgttgtttaatgattggaaaataagtctgt

SEQ ID NO: 153312 - DNA, 80 bp, synthetic construct
  source 1..80: mol_type = other DNA
tcaggaaaagagatctaatcaacaaacaaaccaaagatattacaaaactgaagttagcactagacaaatatggtgttgat

SEQ ID NO: 153313 - DNA, 80 bp, synthetic construct
  source 1..80: mol_type = other DNA
tgggaccagtatcgcacaggacatgccgccgctaacgcatcaaattatgtatataccacccgggggtcctgtgccaaaca

SEQ ID NO: 153314 - DNA, 80 bp, synthetic construct
  source 1..80: mol_type = other DNA
tagtttctatgacgggtggtcaagcttcaataactcaagtgtgtacggttatacaaccttaaacaatatggggaaattgt

SEQ ID NO: 153315 - DNA, 80 bp, synthetic construct
  source 1..80: mol_type = other DNA
ctaccatcaatttcaccaatatcaactactataaggactcgtacgcagcctcagccagtaggcaagaatttacgcaagat

SEQ ID NO: 153316 - DNA, 80 bp, synthetic construct
  source 1..80: mol_type = other DNA
caagttgcacagctcagaaggaaaatggagatgttcacgtacctgcgctttgacgtggaagtcacttttgtgattactag

SEQ ID NO: 153317 - DNA, 80 bp, synthetic construct
  source 1..80: mol_type = other DNA
caccagcttcgagagccacgacattgatcactactacaccgagcagaaggccatggagaacgtccacggggagacttatg

SEQ ID NO: 153318 - DNA, 80 bp, synthetic construct
  source 1..80: mol_type = other DNA
gctaatatattaaatacttataaaacagaaggcaactactcccatccacaactaaaaaaatacaaacgacctacaaactt

SEQ ID NO: 153319 - DNA, 80 bp, synthetic construct
  source 1..80: mol_type = other DNA
agttctaacagccaatatgcacagctacaacccacgtggaccagcacaatatatgccaaaaagacagacagcaactttgg

SEQ ID NO: 153320 - DNA, 80 bp, synthetic construct
  source 1..80: mol_type = other DNA
ggaccgcttgaaaattgtggcgtatggtgatgatgtgatcgcatcatacccagactatcttgatcccaaagagatagctc

SEQ ID NO: 153321 - DNA, 80 bp, synthetic construct
  source 1..80: mol_type = other DNA
cacgtacaattgtacctatgaccgcctaacgttactgaatctgacaatggaaaacagcaggaattactatttcagaagag

SEQ ID NO: 153322 - DNA, 80 bp, synthetic construct
  source 1..80: mol_type = other DNA
caggaagatgacattgtgcaaaatccagtagaagagtttgtagaccacacacttaaagaagttttagttgtcccagatac

SEQ ID NO: 153323 - DNA, 80 bp, synthetic construct
  source 1..80: mol_type = other DNA
ataacacacaaagtccaccccaacttgtcttacttggctaagaaggatgcaagtgccaggagggccaaaatatactttga

SEQ ID NO: 153324 - DNA, 80 bp, synthetic construct
  source 1..80: mol_type = other DNA
ggcgtcatgagcaccacgccactcacggaactcacgcacactaagttcgcgaggctagacgcgttatccacggcctcgga

SEQ ID NO: 153325 - DNA, 80 bp, synthetic construct
  source 1..80: mol_type = other DNA
gagcaatacattgatggtgtactgaatgaggttttagttgtcccaaacattaatgagagtcaccctagtacatccaatgc

SEQ ID NO: 153326 - DNA, 80 bp, synthetic construct
  source 1..80: mol_type = other DNA
caacttgatgggggggtgtccgcagcattattaatcatgtgcgcgattttctaaaacataacgcaaaacgtcgcgagaat

SEQ ID NO: 153327 - DNA, 80 bp, synthetic construct
  source 1..80: mol_type = other DNA
ccctccccacgttggacaggccctctgtccacccgggccatccccgcccccctgtgtccaccccagtcccgtccaggtgg

SEQ ID NO: 153328 - DNA, 80 bp, synthetic construct
  source 1..80: mol_type = other DNA
acgaagacctagacctcgccctgtacttcgggtgtactttcactttctacagacacaacactacagactttatagtcagc

SEQ ID NO: 153329 - DNA, 80 bp, synthetic construct
  source 1..80: mol_type = other DNA
cacacagcccaccttccaaattcccggtggcggtgacctccctcgcagaatacaaattctcgacccgaaatccctcgggc

SEQ ID NO: 153330 - DNA, 80 bp, synthetic construct
  source 1..80: mol_type = other DNA
agcccaaaattccagagaggagagttgtagctcaaggacctgaagaggagtttggtcgttccctgattaaacataataca

SEQ ID NO: 153331 - DNA, 80 bp, synthetic construct
  source 1..80: mol_type = other DNA
cacacgtaaccccgcctacaaccgtgacgtggctgtttaccagcatgtatagagttacggttcactacatcaaacaggac

SEQ ID NO: 153332 - DNA, 80 bp, synthetic construct
  source 1..80: mol_type = other DNA
ggtctgcatcccaggctggctcaaagaattttatttaatacaacaatgatggaaaattgctcagatttggatgttgtttt

SEQ ID NO: 153333 - DNA, 80 bp, synthetic construct
  source 1..80: mol_type = other DNA
ttgatgccagtctttcaccagtatggtttaaatgccttgaaaatgttcttagaaaaataggatttcaatgtgcagacatg

SEQ ID NO: 153334 - DNA, 80 bp, synthetic construct
  source 1..80: mol_type = other DNA
ttcaatgcccagacataataattggagtttagttataatacccatatgtcctttagaatcccaagaccagtctacagtac

SEQ ID NO: 153335 - DNA, 80 bp, synthetic construct
  source 1..80: mol_type = other DNA
ttttttcaacttggatgaggaaaactgatggccacccgattggattattccaaattgaagttctcaacaggttaacctac

SEQ ID NO: 153336 - DNA, 80 bp, synthetic construct
  source 1..80: mol_type = other DNA
cacctcagtagagagggacttgaattatgtccactatgtactcaattgcttaggtagtctaatacttatacttggtacta

SEQ ID NO: 153337 - DNA, 80 bp, synthetic construct
  source 1..80: mol_type = other DNA
caacgttaacagcataacgtgattacaaagtatcaacgctagtttatccaagagaaactttcatgaaggatcgcaataaa

SEQ ID NO: 153338 - DNA, 80 bp, synthetic construct
  source 1..80: mol_type = other DNA
tgctacaactgtatattctacattcaatacatcatataacaatgcatctagtacgattaccatcacagagtccgtttcaa

SEQ ID NO: 153339 - DNA, 80 bp, synthetic construct
  source 1..80: mol_type = other DNA
gagtgagcgtccggttggcatggtattggtcgtcttcttcccctgcagagtaattgcagtggaccccggaggccacactg

SEQ ID NO: 153340 - DNA, 80 bp, synthetic construct
  source 1..80: mol_type = other DNA
agcaggcctaatgccagacaaaatatccattccacccatagcatggagaggcaagtggtacccacacatactacaccaag

SEQ ID NO: 153341 - DNA, 80 bp, synthetic construct
  source 1..80: mol_type = other DNA
ttttattacccctttccccagtaacttagaagttttaatacactgaccaatagggtgcgacaaccagtcgtacaaggtca

SEQ ID NO: 153342 - DNA, 80 bp, synthetic construct
  source 1..80: mol_type = other DNA
atgatgttttgtccctctctgtcttactctcccataggctgtaaggccctcgaggaagagacttacggattgtagttgca

SEQ ID NO: 153343 - DNA, 80 bp, synthetic construct
  source 1..80: mol_type = other DNA
accagatacctgtcaggtctaacgaggggtctgggacccaggtgtttggtttcccactgcaaccgggttattcaagtgtt

SEQ ID NO: 153344 - DNA, 80 bp, synthetic construct
  source 1..80: mol_type = other DNA
acagttaccacctccaaaggtgagttcacagctttagggatacacgataggatttgtgtggttcccacccactcacaacc

SEQ ID NO: 153345 - DNA, 80 bp, synthetic construct
  source 1..80: mol_type = other DNA
gacttggagttttacaagttcctctttacgttcctggccatggccgagaagcttgtgaactttaacattgatgaactggt

SEQ ID NO: 153346 - DNA, 80 bp, synthetic construct
  source 1..80: mol_type = other DNA
cgcggctgccacctgcttcacactagtttttgcggttgtggcgattttattaatcaccttctgcgtctacacaatctcca

SEQ ID NO: 153347 - DNA, 80 bp, synthetic construct
  source 1..80: mol_type = other DNA
ttttacaccacaggtaacgccccaccaagggtatcagtgccgttcatgggaattagtggagcttattcgcacttttatga

SEQ ID NO: 153348 - DNA, 80 bp, synthetic construct
  source 1..80: mol_type = other DNA
aatgacgtacatatacgtggttatacaacaggtgtttgtgttatgcggcgactgattaaccatatcgtgaaccatgatct

SEQ ID NO: 153349 - DNA, 80 bp, synthetic construct
  source 1..80: mol_type = other DNA
attaggtcgttggtgaacgatcccgatattgaggtagtgattactgatatatcagaatttgatcacggagtgcctcgcct

SEQ ID NO: 153350 - DNA, 80 bp, synthetic construct
  source 1..80: mol_type = other DNA
cctgtcaaggcgattcgcatttgacatggaggtgtttgtgatgtcagagcactcaatcaggggaaaattgaacatgagta

SEQ ID NO: 153351 - DNA, 80 bp, synthetic construct
  source 1..80: mol_type = other DNA
cggtgtttgtcgttgcggggacgggggtttttgggcgtggtgttgcggcgtggtgttgcgggtacgtggtttgcgcctcg

SEQ ID NO: 153352 - DNA, 80 bp, synthetic construct
  source 1..80: mol_type = other DNA
tgacccaccagattatgtacgtgccgccaggtggcccggtcccagcaaaagcagacagctatgcgtggcaaacatcaacg

SEQ ID NO: 153353 - DNA, 80 bp, synthetic construct
  source 1..80: mol_type = other DNA
gttaattatccaggaattatcaaagaatacagactaactataatttgcccatacactgacccaccactcacagaccctac

SEQ ID NO: 153354 - DNA, 80 bp, synthetic construct
  source 1..80: mol_type = other DNA
atgataaaactgtattactagctcttactgcagatcttcaagtagatgcagctgatcatccaggccctgatactgttcca

SEQ ID NO: 153355 - DNA, 80 bp, synthetic construct
  source 1..80: mol_type = other DNA
tttgcggcagggacgggggccttttgcgtcagggacgggaacgggggcctttcgcagcggggacaggggactttcgagaa

SEQ ID NO: 153356 - DNA, 80 bp, synthetic construct
  source 1..80: mol_type = other DNA
gcccaagtctcatcacagaaagttggagcccatgagaattcaaacagagcttatggcggatccaccattaattacactac

SEQ ID NO: 153357 - DNA, 80 bp, synthetic construct
  source 1..80: mol_type = other DNA
gttcatgtggtagaaatcagaaacaagcgaccaactgatgagatagaacataagaaggaccttttgttcaatgattggaa

SEQ ID NO: 153358 - DNA, 80 bp, synthetic construct
  source 1..80: mol_type = other DNA
cccatgctaatcaatgttatctcaaaatatctagtagattgattgacctattagacaaaactgagtgcagtttgactgga

SEQ ID NO: 153359 - DNA, 80 bp, synthetic construct
  source 1..80: mol_type = other DNA
caatgaggaagcagaaatagagattttcttaggtaggtcagcaatctggacacatatccagctaaagaatgggtttgaaa

SEQ ID NO: 153360 - DNA, 80 bp, synthetic construct
  source 1..80: mol_type = other DNA
gtagcctgtggggagaccacgtatatacacataacatagtagacgcattctttaacaatgcagagaacatgtacactgct

SEQ ID NO: 153361 - DNA, 80 bp, synthetic construct
  source 1..80: mol_type = other DNA
tttttattaaaaagctgtaaggttttgctctaaaaacaccccgcctccggtcttttttcttttgtattcggcacgcgaaa

SEQ ID NO: 153362 - DNA, 80 bp, synthetic construct
  source 1..80: mol_type = other DNA
gaccttccaaagtaccagccgcccgaagacatctcgacttcggcacaaagagaacaaagaccctggacaaccgaggaaga

SEQ ID NO: 153363 - DNA, 80 bp, synthetic construct
  source 1..80: mol_type = other DNA
cattctccaaattgtcgagtatgtcctcgtccctggtaaaatggtggctgaaggctggcccgttgtaggccagggtctgg

SEQ ID NO: 153364 - DNA, 80 bp, synthetic construct
  source 1..80: mol_type = other DNA
tgaaactccgccggggtctacacatagacccggtccttacatagcaccccctccatacatccctgaccttctttttccca

SEQ ID NO: 153365 - DNA, 80 bp, synthetic construct
  source 1..80: mol_type = other DNA
tatcaaccctgaaccaatatccatggaacaagcagtttatggtatagaaaacttagaacctctggatttgaccaccagtg

SEQ ID NO: 153366 - DNA, 80 bp, synthetic construct
  source 1..80: mol_type = other DNA
ttatgcagctagtgatagtgttgacatcttcatacaaccaagagatagtttaaaaacagctggaccaagtgacatgtacg

SEQ ID NO: 153367 - DNA, 80 bp, synthetic construct
  source 1..80: mol_type = other DNA
ggggacgggcgtgttgctttcacagatctaagaccatacagagacttgaatcatcatcagggaatagtatcagattacct

SEQ ID NO: 153368 - DNA, 80 bp, synthetic construct
  source 1..80: mol_type = other DNA
cacgagtttacaaatggtgacttatggcgtagtccccttactttccctaagaagggccatggcatgttgtctcagttatt

SEQ ID NO: 153369 - DNA, 80 bp, synthetic construct
  source 1..80: mol_type = other DNA
attataaaccacaagatggtgatgtacagatcttcttaaaacccagacccagcctaacaacatttggacctagtgacatg

SEQ ID NO: 153370 - DNA, 80 bp, synthetic construct
  source 1..80: mol_type = other DNA
cgattctgtgtggagtgacaatcccatcttgcctggtccgaccgggggcgcggaggtacgtctggagggcatggattggt

SEQ ID NO: 153371 - DNA, 80 bp, synthetic construct
  source 1..80: mol_type = other DNA
ctccagcatggcagcgccgttggacgcaatcccgacatccactggactcaaatctttcactctctcacccctttccctaa

SEQ ID NO: 153372 - DNA, 80 bp, synthetic construct
  source 1..80: mol_type = other DNA
atccagtactacttcgtgcacttcctggggcgtgtcctgccactctatataaacagaggcggtgacgaatggtagagttt

SEQ ID NO: 153373 - DNA, 80 bp, synthetic construct
  source 1..80: mol_type = other DNA
tgtaggtatgcggcagccggatgcaccgcccggcgtgatacacgccgctgtcaaaaagcggggccccaatctctttgatc

SEQ ID NO: 153374 - DNA, 80 bp, synthetic construct
  source 1..80: mol_type = other DNA
atagctaatgtggtgtccatagtgggtattatttatataatttacaaactattttgtactctccaaggcccttattcagg

SEQ ID NO: 153375 - DNA, 80 bp, synthetic construct
  source 1..80: mol_type = other DNA
attttgcagaagcgagcagtgttcaaatccccatcacagtcacaattgcgccaatgtacacggaattcaatggattgaga

SEQ ID NO: 153376 - DNA, 80 bp, synthetic construct
  source 1..80: mol_type = other DNA
tcacaatgctacatgttgtgtttggcatcagcttgcaatgatttttctgtcaggatgttaaaagatactccctttatcca

SEQ ID NO: 153377 - DNA, 80 bp, synthetic construct
  source 1..80: mol_type = other DNA
tcctacaagactttggcatatacagccccttctacctcacacccgtcagaatcagcctagactggcgcaccacctacaca

SEQ ID NO: 153378 - DNA, 80 bp, synthetic construct
  source 1..80: mol_type = other DNA
aaccaatacgcacataaaccccctgttatacagccgtacgtaggccctgccccagacatgtttcagaccagacataaaaa

SEQ ID NO: 153379 - DNA, 80 bp, synthetic construct
  source 1..80: mol_type = other DNA
gtatgtgattgcagaccaaaccagatatgaaacttccattgaatccttcttgggtagggctggatgtgtgactattatta

SEQ ID NO: 153380 - DNA, 80 bp, synthetic construct
  source 1..80: mol_type = other DNA
ttcaaatgacacaggcaaccaagatatgaaaaaccaaacatataattggaaaaactacaaaacttattttcaaaaagtaa

SEQ ID NO: 153381 - DNA, 80 bp, synthetic construct
  source 1..80: mol_type = other DNA
ggaggatggcgaataaaagcgacgtgcggcgcgcacggcgaaaagcagccgcgcgcctgatcttgcgtgtctttgaatcc

SEQ ID NO: 153382 - DNA, 80 bp, synthetic construct
  source 1..80: mol_type = other DNA
ctgcacctatactcccaggttttgaaccaacacccgcaatacacattccaggtgaggtgaagagcttgttagagatttgt

SEQ ID NO: 153383 - DNA, 80 bp, synthetic construct
  source 1..80: mol_type = other DNA
ccagattgtctcacacaatgcttggagagatcttgaattattatactcattgggcaggatccttgaagttcacattcctg

SEQ ID NO: 153384 - DNA, 80 bp, synthetic construct
  source 1..80: mol_type = other DNA
ccacactgtctacggacgtagtactcttgtatttcggtacacttgtacgccagtttgctaccctccccaaacgtaacaat

SEQ ID NO: 153385 - DNA, 80 bp, synthetic construct
  source 1..80: mol_type = other DNA
agaaagaagaggctactgccactgcttctggtgccaactaaaccgaaagaacaacctgtgatgagctggcgctgtcccat

SEQ ID NO: 153386 - DNA, 80 bp, synthetic construct
  source 1..80: mol_type = other DNA
cgcagcagggtccaaggttgtgctgtacatgggacctctttcccattagcaagaaccccctgcaggacgcgtgacatgtc

SEQ ID NO: 153387 - DNA, 80 bp, synthetic construct
  source 1..80: mol_type = other DNA
aagagatctttgcaataaaagtagatgttgcatcacaacccttgtcaagtacaatacttggcgaaatcgccagttatttc

SEQ ID NO: 153388 - DNA, 80 bp, synthetic construct
  source 1..80: mol_type = other DNA
aaaacagcagtggcacacaatttaaaacaggcaaaagcacaagatttggctttaactcttacaatcccaaagccaaaaaa

SEQ ID NO: 153389 - DNA, 80 bp, synthetic construct
  source 1..80: mol_type = other DNA
gtaacgacggaggagacaccgcgcgtcccgagggcgggtgccggaggtgagtttacacaccgaagtcaagaggcaattcg

SEQ ID NO: 153390 - DNA, 80 bp, synthetic construct
  source 1..80: mol_type = other DNA
cagtgttgactttagatagaaatgaaaaattcagagatatcaggggatttatatcagaagatctagaaggtgtggatgcc

SEQ ID NO: 153391 - DNA, 80 bp, synthetic construct
  source 1..80: mol_type = other DNA
aatttttgctaagccaaaacatacaacagcttggattcctcgaccacccagagccacccaatacctgcacaaatttagta

SEQ ID NO: 153392 - DNA, 80 bp, synthetic construct
  source 1..80: mol_type = other DNA
agatattgcctgcggtaccgcctgctcactatcttctcgtaatacgttctcaacttttgtgtttaaatctctaaaccaca

SEQ ID NO: 153393 - DNA, 80 bp, synthetic construct
  source 1..80: mol_type = other DNA
gaggacaaactaaggaattaggctttcaatcagttaacactcctacaaaaacaaaattacagccaagtgctttctaccat

SEQ ID NO: 153394 - DNA, 80 bp, synthetic construct
  source 1..80: mol_type = other DNA
ccttcaccgcgttgtacaggccgtaaaagagcgtgatgccctcgggcgcggcagcggtgctcacgggcagacgcacggcg

SEQ ID NO: 153395 - DNA, 80 bp, synthetic construct
  source 1..80: mol_type = other DNA
gtgattgtaccaatagtacccttgagacctgggaactcaggagctcctattctacccatcactgtgacaatagcaccata

SEQ ID NO: 153396 - DNA, 80 bp, synthetic construct
  source 1..80: mol_type = other DNA
ttacatagttattggcattgctagcatagtttttgtaggtgactcccgcaggccaaccacagtgtatgtcgtgcacttcc

SEQ ID NO: 153397 - DNA, 80 bp, synthetic construct
  source 1..80: mol_type = other DNA
gagaggaaaactccgtgcaagctgcagtgtggaacgcaggtttgggagttggcgcaggtaatctcacaatattcccccat

SEQ ID NO: 153398 - DNA, 80 bp, synthetic construct
  source 1..80: mol_type = other DNA
gagacgcctgctgcctctccccagctaccccggcgagggtccccaggctagatggcctggtggggatggaggcgccgctg

SEQ ID NO: 153399 - DNA, 80 bp, synthetic construct
  source 1..80: mol_type = other DNA
caaacctagatgctttaacacctcccaccattacaatccctgaggccatcaaacgcagattcttcatggacgctgacctt

SEQ ID NO: 153400 - DNA, 80 bp, synthetic construct
  source 1..80: mol_type = other DNA
catagatgtcttgtcttgctcatgtgcagaggagggggtgttggtgtgcaatatagtttctggattccaaattgagttgg

SEQ ID NO: 153401 - DNA, 80 bp, synthetic construct
  source 1..80: mol_type = other DNA
cgcggggcgcatgcgtgaccatcatgactgtagacaactcagcttccaccacaaacaaggacaagctattttcagtgtgg

SEQ ID NO: 153402 - DNA, 80 bp, synthetic construct
  source 1..80: mol_type = other DNA
caaaagtggaagacaaaatcctgatctacaacccactgaggagtattggctaaattttgatggaacactccttggaaata

SEQ ID NO: 153403 - DNA, 80 bp, synthetic construct
  source 1..80: mol_type = other DNA
agatgaatactactcacctaaagatgcacagtggggagaccccattcatataatcttacaatcagaaattacaggcaatc

SEQ ID NO: 153404 - DNA, 80 bp, synthetic construct
  source 1..80: mol_type = other DNA
catttgggtgtggattcacaaatcaaataagtgaaaaagttgcagaaatcacttcaatggtcagcagtgttgtcacagag

SEQ ID NO: 153405 - DNA, 80 bp, synthetic construct
  source 1..80: mol_type = other DNA
cagtctggcgccacatccagcagatcgtgctcctgatagtcagccgtcacagccaccagaaatttgacgaaagcattgaa

SEQ ID NO: 153406 - DNA, 80 bp, synthetic construct
  source 1..80: mol_type = other DNA
cctgcaaggataacatcaaaggtcagagtttatatgaagcccaaacatgtgaggtgttggtgtcctaggccaccgcgcgc

SEQ ID NO: 153407 - DNA, 80 bp, synthetic construct
  source 1..80: mol_type = other DNA
aatataggtacacagatccagacacatacacccatccaggttacatttcatgctggtatcaaacttcactagtattaccc

SEQ ID NO: 153408 - DNA, 80 bp, synthetic construct
  source 1..80: mol_type = other DNA
ggccggggtcgaggaggtagtggaggccgccggggtagaggacgtgaaagagccaggtgaggaagtcgtgaaagagccag

SEQ ID NO: 153409 - DNA, 80 bp, synthetic construct
  source 1..80: mol_type = other DNA
ttgggtttgcctcaatcggcttggcgacgctggcaaagccacgtggacgatgaagaacgtggtttgttaatataggaagt

SEQ ID NO: 153410 - DNA, 80 bp, synthetic construct
  source 1..80: mol_type = other DNA
ctagaattttttacctatgttagatttgatatggaggttaccatagtcacaaacaacaccgggttaatgcagatcatgtt

SEQ ID NO: 153411 - DNA, 80 bp, synthetic construct
  source 1..80: mol_type = other DNA
aacatgggctcacaggtgtccacacagcgctccggttcgcacgaaaactctaactcagctaccgagggttccactataaa

SEQ ID NO: 153412 - DNA, 80 bp, synthetic construct
  source 1..80: mol_type = other DNA
cttatataatcaaactagattttataacactacagaaacagtagcacaactaaaacctatagttgatgctaccacaaatg

SEQ ID NO: 153413 - DNA, 80 bp, synthetic construct
  source 1..80: mol_type = other DNA
gtaacaagtactacccaattaccgtcaccaaaccaacttttcagtggatggaagccaatgattactatccagccagatat

SEQ ID NO: 153414 - DNA, 80 bp, synthetic construct
  source 1..80: mol_type = other DNA
cacatttagaacagagggatgctttagccaccctcaaattaaaaagccaaacgccacatcctcaccaagtaaccaaatac

SEQ ID NO: 153415 - DNA, 80 bp, synthetic construct
  source 1..80: mol_type = other DNA
gcctccccaccgggtccatcaggccggccggagggaccccggcggcccggtgtcagttccccctgcagccgcccagtctc

SEQ ID NO: 153416 - DNA, 80 bp, synthetic construct
  source 1..80: mol_type = other DNA
cgaggccaacgtgtacctctgcccgggatatttacatttcagcgcgtacaagctgctgaaaaagatccaatcggtctcgg

SEQ ID NO: 153417 - DNA, 80 bp, synthetic construct
  source 1..80: mol_type = other DNA
ccgtgggatggtggtggaaattcccagaggcacttagcgacatggggctgtttggccagaatatgcagtatcactacctg

SEQ ID NO: 153418 - DNA, 80 bp, synthetic construct
  source 1..80: mol_type = other DNA
tgtaaccttccaagtcctgggggacctctacaacgagtgccttaacatagatctaccccctttaaaagatgaaaacacct

SEQ ID NO: 153419 - DNA, 80 bp, synthetic construct
  source 1..80: mol_type = other DNA
attatgatagtagtaagatcacatacagcgcaagagatcgtgccagcataaaacaagctaatatgggaaagtttgggcaa

SEQ ID NO: 153420 - DNA, 80 bp, synthetic construct
  source 1..80: mol_type = other DNA
aaacacccagataaggcccgtaaaagcggcggtagatacgtaacgtgtgcgagtttttcagcgtcaattcgtaagggacg

SEQ ID NO: 153421 - DNA, 80 bp, synthetic construct
  source 1..80: mol_type = other DNA
ctttacccaagatggtggtgtttaccttccgggtcagaggtcggcagctacgtcataagtcacgtgggaagagcgaagcg

SEQ ID NO: 153422 - DNA, 80 bp, synthetic construct
  source 1..80: mol_type = other DNA
acagcctagagaagtacaagtcgttgacccgcagctcatcacaccgccgtgggtcctccacacgttcgaccagagacgcg

SEQ ID NO: 153423 - DNA, 80 bp, synthetic construct
  source 1..80: mol_type = other DNA
gtcctcatcggcactggagccaaagagcctccgggaggcgctcggtttacgtgccgggtgcggtggttgctgttgacgtt

SEQ ID NO: 153424 - DNA, 80 bp, synthetic construct
  source 1..80: mol_type = other DNA
ggtgctagacaaagtaacaaaactcaaggcataccaatcagaatgcccagtggtgctcagcagtttatgaccacagaaga

SEQ ID NO: 153425 - DNA, 80 bp, synthetic construct
  source 1..80: mol_type = other DNA
ttccagcccacaccccttactgacaaaaggaaaacctaattaccacagggccctattggccacaatccagggccatttat

SEQ ID NO: 153426 - DNA, 80 bp, synthetic construct
  source 1..80: mol_type = other DNA
aaaagggtaagggccactataatgacaggcgacaccccaatcaacatttttggcagaaatattctgacagccttaggcat

SEQ ID NO: 153427 - DNA, 80 bp, synthetic construct
  source 1..80: mol_type = other DNA
gattagtctagaggagaaacccgcacctgatgcaattagtgacctgttggctagtgttgacagtgaagaagttcgccaat

SEQ ID NO: 153428 - DNA, 80 bp, synthetic construct
  source 1..80: mol_type = other DNA
tgagtttttattctcaggcccaaagaaacccagaatcgatcaaggtccttacatcccgccagaaaaaggctcacgttcac

SEQ ID NO: 153429 - DNA, 80 bp, synthetic construct
  source 1..80: mol_type = other DNA
ggcaggggcaggggcaggggcaagggcaagtccagggacaagcaacgcaagcccggtggaccttggagaccagagccaaa

SEQ ID NO: 153430 - DNA, 80 bp, synthetic construct
  source 1..80: mol_type = other DNA
gccgccgctcccgcttggagcggtggagagaatccgataaataatcacgtcgacgcggattcttctcagggcggccagag

SEQ ID NO: 153431 - DNA, 80 bp, synthetic construct
  source 1..80: mol_type = other DNA
ccccacctggcatcagagttcctaggaacagaaaggaagcaatgcttggtacacacctgatatgggatgttggtttacaa

SEQ ID NO: 153432 - DNA, 80 bp, synthetic construct
  source 1..80: mol_type = other DNA
tggatggaattaggagtactgacattgggaaagcattgctaataccatcttactctgttcttagacgcagatggcttgat

SEQ ID NO: 153433 - DNA, 80 bp, synthetic construct
  source 1..80: mol_type = other DNA
tcaactactacaaagattctgctagctcaggtctaacaaaacaagatttttctcaagatccctctaaatttacccaacct

SEQ ID NO: 153434 - DNA, 80 bp, synthetic construct
  source 1..80: mol_type = other DNA
agactgaaccactcacagacgtcagatcaaccattaccctggcacgagatgaacatttaccagacatgcaaaacactggt

SEQ ID NO: 153435 - DNA, 80 bp, synthetic construct
  source 1..80: mol_type = other DNA
tgtccataccattcatcagcataggcaatgcatacagcaacttttatgacggatggtcacatttccaccaaaatggcgtg

SEQ ID NO: 153436 - DNA, 80 bp, synthetic construct
  source 1..80: mol_type = other DNA
acagagatcacaggacccagcatacacccaggcatgctggcactaaacaagagagctagatttattcccagcctaaaaac

SEQ ID NO: 153437 - DNA, 80 bp, synthetic construct
  source 1..80: mol_type = other DNA
atgcaatcatacgtgctcttgcccgtgtcagtgcgaaacttcaacacccactgatactacaaatcgaagtaccacatctg

SEQ ID NO: 153438 - DNA, 80 bp, synthetic construct
  source 1..80: mol_type = other DNA
atacaacagaaaagccccctttaatgacacacaactaacgtgtccctccatgcagccatgcattcaactaaacagcaaaa

SEQ ID NO: 153439 - DNA, 80 bp, synthetic construct
  source 1..80: mol_type = other DNA
gaaggtgaatgatctggcaagtgggaaacctgtgataataggacagacatttccgccctcagattcttataaaggctcaa

SEQ ID NO: 153440 - DNA, 80 bp, synthetic construct
  source 1..80: mol_type = other DNA
ataaactcagtacctatggattctatgaccagacataacaatatatccttgttagtcattccaattgtaccactgtcaaa

SEQ ID NO: 153441 - DNA, 80 bp, synthetic construct
  source 1..80: mol_type = other DNA
tgtgaagaattatcactcccgatctgaatccacaatagagaatttcttatgcagagcagcctgcgtgcggatggccaagt

SEQ ID NO: 153442 - DNA, 80 bp, synthetic construct
  source 1..80: mol_type = other DNA
actggacctttactaagatgaacacaccctcataccaggacctagaaaacctaaactactttgactactacacaggtatg

SEQ ID NO: 153443 - DNA, 80 bp, synthetic construct
  source 1..80: mol_type = other DNA
tgggtatgtacagagtgcctttgagtaccagcgctgatttagacttgcctatcttatgtctatcactgtcaccagccagt

SEQ ID NO: 153444 - DNA, 80 bp, synthetic construct
  source 1..80: mol_type = other DNA
tgtagacagtgttaaagagcaagtgaatgctattaacccaattaataatgttagtaagaaaataatcaaatggatgctta

SEQ ID NO: 153445 - DNA, 80 bp, synthetic construct
  source 1..80: mol_type = other DNA
aagcacattcgttgttggtgcccccggccaccacgtgcagtcctgtatagaggggagggagttgacatgatttccagtgc

SEQ ID NO: 153446 - DNA, 80 bp, synthetic construct
  source 1..80: mol_type = other DNA
ttcagtatagaggggaaggtgtagaccttaagagtggggccatcacacctctcactccagtggcctcaatcaccaccttt

SEQ ID NO: 153447 - DNA, 80 bp, synthetic construct
  source 1..80: mol_type = other DNA
tcaaaacgctccgttaaacagagccagtcatactgctgctgcagaatacgccgctcgcgctcgcgtcgctcatcgggcaa

SEQ ID NO: 153448 - DNA, 80 bp, synthetic construct
  source 1..80: mol_type = other DNA
acaactgaggcgaaaattcgagttgttcacctacatgcggtttgacatggaagtcacatttgtcatcaccagtaggcaat

SEQ ID NO: 153449 - DNA, 80 bp, synthetic construct
  source 1..80: mol_type = other DNA
gaaacattacagtaccagcaacccagggcttgccagtgctggtgacgccaggttctaaccagtacttaacctctgatgac

SEQ ID NO: 153450 - DNA, 80 bp, synthetic construct
  source 1..80: mol_type = other DNA
gagattggacttttccaaattgaagtgttaaatcgattgacatataacagttctagcccaaatacagtgcattgcattgt

SEQ ID NO: 153451 - DNA, 80 bp, synthetic construct
  source 1..80: mol_type = other DNA
tgagaacaaacaattcagcaacaatcattgtcccatacatcaactgtctacctatggatagcatgcttagacataataac

SEQ ID NO: 153452 - DNA, 80 bp, synthetic construct
  source 1..80: mol_type = other DNA
ctctcaaaagaatgcttgaaaaaccagttaatgatggagaatatccaacaggcccaaaggtgcctcgatggtttccccca

SEQ ID NO: 153453 - DNA, 80 bp, synthetic construct
  source 1..80: mol_type = other DNA
acaagtggtactttcaaaaggacatagccgacctcacccttttcaacatcatggcagttgaggctgacttgcggtttccg

SEQ ID NO: 153454 - DNA, 80 bp, synthetic construct
  source 1..80: mol_type = other DNA
gtggcagaagcaacccagaagttaaaggcagttacactgacatatcttacaatccactaacagacaaaggagtaggaaac

SEQ ID NO: 153455 - DNA, 80 bp, synthetic construct
  source 1..80: mol_type = other DNA
ggcgagggcgacgtaggcgcagactgtacagacgcagatacactataaggagaaaaagaaagaaactcatacttaaacag

SEQ ID NO: 153456 - DNA, 80 bp, synthetic construct
  source 1..80: mol_type = other DNA
tttgttggccatcttaatcatctggcaactactttggtggaatatgtttacgtaccacttggctctcattcttatgggca

SEQ ID NO: 153457 - DNA, 80 bp, synthetic construct
  source 1..80: mol_type = other DNA
tccgaaacatcgggcagaggcggtaacggctccgtctccaccaagggcggaggttcatcgaaaagagtcaaggataattc

SEQ ID NO: 153458 - DNA, 80 bp, synthetic construct
  source 1..80: mol_type = other DNA
cctatatttataggacccaccagagctcaaactaaatttcctacagcatatgtagatgttacctacaatcccctactaga

SEQ ID NO: 153459 - DNA, 80 bp, synthetic construct
  source 1..80: mol_type = other DNA
tttcctagatctacaactggaaagctacccggagcaagtaactgtttgatagccacacgggggctaattttctgtttaag

SEQ ID NO: 153460 - DNA, 80 bp, synthetic construct
  source 1..80: mol_type = other DNA
aggtcatacttcacagacacccagggccagattaaaatctctaaacatgccagcgagtgtggtcttccaagtatacatac

SEQ ID NO: 153461 - DNA, 80 bp, synthetic construct
  source 1..80: mol_type = other DNA
agatgtgaagagcgtggtcactgccttgaacctcataaatggggagaacgcacatacgttcagtccaaacgaggtgacgg

SEQ ID NO: 153462 - DNA, 80 bp, synthetic construct
  source 1..80: mol_type = other DNA
ttgtcatccaaacaagggttgcctgtgttagcaacacccggtagtgatcagttcttgacctcagatgattaccagtcacc

SEQ ID NO: 153463 - DNA, 80 bp, synthetic construct
  source 1..80: mol_type = other DNA
gccttggtgatcaaattgccgaaagaagatggcattgcacgagcaagcaattctccgacctctgcgtttctatttatata

SEQ ID NO: 153464 - DNA, 80 bp, synthetic construct
  source 1..80: mol_type = other DNA
caccatacgaactcttgcgccatgaatggtatgagaaattttaaacagatatagaatatataaatggttagtttatagat

SEQ ID NO: 153465 - DNA, 80 bp, synthetic construct
  source 1..80: mol_type = other DNA
aggagaacagttattgtcctgctgcaactttccatcggctcatagacagcaggtaccatctttacaatttctagcactca

SEQ ID NO: 153466 - DNA, 80 bp, synthetic construct
  source 1..80: mol_type = other DNA
acagacctagattctcagtgcagatgtgttttagaagacatacccctgtgggctatggctacaggctatggagaattctg

SEQ ID NO: 153467 - DNA, 80 bp, synthetic construct
  source 1..80: mol_type = other DNA
ccagtttggccacaacagctacaacccaaatgatagtaacattaaatcagccaggagtgcatactggactgccctaaaca

SEQ ID NO: 153468 - DNA, 80 bp, synthetic construct
  source 1..80: mol_type = other DNA
gcgacggcgaatgggacgtggaccgcgagtgtagcgtggatttgacttggtgcgtcattgctgacaggcaaccgcgattc

SEQ ID NO: 153469 - DNA, 80 bp, synthetic construct
  source 1..80: mol_type = other DNA
atacatgtttcccccagagggtcccaagcccatagaggggtaccatgcatggctagatgaatatcaaacctgtaagcatt

SEQ ID NO: 153470 - DNA, 80 bp, synthetic construct
  source 1..80: mol_type = other DNA
ctagagaaaaagcagaattcttaaccaacttgaagcaattgccactgttagagaaccagatcacaaatttggaacagtcc

SEQ ID NO: 153471 - DNA, 80 bp, synthetic construct
  source 1..80: mol_type = other DNA
caaggtgtttccaatagagcagccttcggttactcaagtgacactaggtggtaaaccaatggatctagccatcctaaaat

SEQ ID NO: 153472 - DNA, 80 bp, synthetic construct
  source 1..80: mol_type = other DNA
acatagtagctccctacgccctagacaaagacagttgtccctcctatcaccccggcatgatgatacaggccaaaaacaaa

SEQ ID NO: 153473 - DNA, 80 bp, synthetic construct
  source 1..80: mol_type = other DNA
gaccaccctctgcccctcacgaagctcatagctaaggccatcgatgctggatttctgagaaaccgcgtggagactctgag

SEQ ID NO: 153474 - DNA, 80 bp, synthetic construct
  source 1..80: mol_type = other DNA
tcatcagttccctttatcccacccatggcagatttaccagacaaagggaaacctttctcctcagattatgtactagctag

SEQ ID NO: 153475 - DNA, 80 bp, synthetic construct
  source 1..80: mol_type = other DNA
aacacaatggatatgtataggatagggttggatagtgcagtcagcaacttgaattcaccgatcttctgtctttcattgtc

SEQ ID NO: 153476 - DNA, 80 bp, synthetic construct
  source 1..80: mol_type = other DNA
ttttcaggaattaacctataagaatgtcacgtttcttaaacgtggatttagacctgatgaccgccactcttttctcatac

SEQ ID NO: 153477 - DNA, 80 bp, synthetic construct
  source 1..80: mol_type = other DNA
gtacatttaatgcatgggtcaccacaggagtaacaggaaatgataatgatcacaacggagacaaaggaaaaagcaagaaa

SEQ ID NO: 153478 - DNA, 80 bp, synthetic construct
  source 1..80: mol_type = other DNA
aagatcttagtcaggatccttccaaatttacggagcccgtgaaagacatcatgctgaagtccgctccagcactaaactct

SEQ ID NO: 153479 - DNA, 80 bp, synthetic construct
  source 1..80: mol_type = other DNA
aggaccattcaagagacctcggagggacacgaacgccgaaaacccagaagagcaaaacgaaagctcaggtttcagagtcc

SEQ ID NO: 153480 - DNA, 80 bp, synthetic construct
  source 1..80: mol_type = other DNA
ataaaacaaacatggaccaaattagaaaatggtactttcaacaagaaacaacagacaatgcagtacacggctcctatgga

SEQ ID NO: 153481 - DNA, 80 bp, synthetic construct
  source 1..80: mol_type = other DNA
aaaagaaccaagcgaagaagaagaaagttaataacaagcctggcaagagacagagaatggtgatgaaacttgaatctgac

SEQ ID NO: 153482 - DNA, 80 bp, synthetic construct
  source 1..80: mol_type = other DNA
ttgatctaccttttgtaacttttgtaaaagatgaacttagatcaagagaaaaagttgaaaaagggaaatcacgcttaatt

SEQ ID NO: 153483 - DNA, 80 bp, synthetic construct
  source 1..80: mol_type = other DNA
accatatgtgacctatctgaaagatgagcttcgggctcctgctaaagtgaaagcagggaaaacaagagccatcgaagcag

SEQ ID NO: 153484 - DNA, 80 bp, synthetic construct
  source 1..80: mol_type = other DNA
agcaaatataagccagaggggtgacgaatggtagagttttttctgcccgtccgcggcgaggacgcgagcgaagcgagcgg

SEQ ID NO: 153485 - DNA, 80 bp, synthetic construct
  source 1..80: mol_type = other DNA
cccaagccaaaaacagtatagcatgcataagaagccaagggggtgggcctatagagtctataggcggtacttacgtcact

SEQ ID NO: 153486 - DNA, 80 bp, synthetic construct
  source 1..80: mol_type = other DNA
agttaccacaggtagaatatcgggcgttggcccataaaaataagtgcatggatatagctctgcacaggcttggaaacacc

SEQ ID NO: 153487 - DNA, 80 bp, synthetic construct
  source 1..80: mol_type = other DNA
tgaagggctggttggagttgtggaggtgaaggactcaggcaccagcctggatgggtacacagtttggcctgtagatgtaa

SEQ ID NO: 153488 - DNA, 80 bp, synthetic construct
  source 1..80: mol_type = other DNA
atgagaaggaaacttgaaatgtttacatacatccgctttgatgtagaggtcacatttgtaattaccagtaaacaggatca

SEQ ID NO: 153489 - DNA, 80 bp, synthetic construct
  source 1..80: mol_type = other DNA
gaacaacccttgcgtcaacttccaggtactaggttccgtttacaaacggcacctcagtatacttcctgagaaactattag

SEQ ID NO: 153490 - DNA, 80 bp, synthetic construct
  source 1..80: mol_type = other DNA
aagaatgggagggagaggacgtggggctcgagaagaaataaacgccaagctcgattcgaaccaaaaaaccacatgtgtat

SEQ ID NO: 153491 - DNA, 80 bp, synthetic construct
  source 1..80: mol_type = other DNA
tcaagcaccaatggtatctacgcaaaaaaaacagacagtaactatggataccactcttttcaagttaaaggcaaaaaaaa

SEQ ID NO: 153492 - DNA, 80 bp, synthetic construct
  source 1..80: mol_type = other DNA
gtttgtgtgtttagtgtggccagtacggccacccctgtgccacgccctggcatgctgctgacatctggccgccaatttca

SEQ ID NO: 153493 - DNA, 80 bp, synthetic construct
  source 1..80: mol_type = other DNA
gggacccattgatatgcaagcacctcccccaccagcaatagttgatttgcttagatccaccagaaatgaagatgtcatca

SEQ ID NO: 153494 - DNA, 80 bp, synthetic construct
  source 1..80: mol_type = other DNA
gctagttgttgtaattccagaacatcagttagcatatataggtggaacaaatgcatcagttagttataaccacacacacc

SEQ ID NO: 153495 - DNA, 80 bp, synthetic construct
  source 1..80: mol_type = other DNA
attaaagagagtcattcaagcacatctaattcagcaccagcattagatgcggctgaaactggccatactagtaatgttca

SEQ ID NO: 153496 - DNA, 80 bp, synthetic construct
  source 1..80: mol_type = other DNA
tcaagtaacaatggcatataccacagaaaaacagacagtaactatggctaccactcctttcaagttaaaaacaaaatgac

SEQ ID NO: 153497 - DNA, 80 bp, synthetic construct
  source 1..80: mol_type = other DNA
atgaagagtactacaatgtaataggcacttccgcattactaacgcccacaaacgcaacctatactaactttgaaaagtgg

SEQ ID NO: 153498 - DNA, 80 bp, synthetic construct
  source 1..80: mol_type = other DNA
tcaacttgcgcacctaataattgtgccaccattgtgatgccttatgtgaactgtataccctttgattctgctcttaatca

SEQ ID NO: 153499 - DNA, 80 bp, synthetic construct
  source 1..80: mol_type = other DNA
tttcttgttttacttatcaattcgcttatggtgacaatatatacagttaatatattgttcaccatgggcgctcaagtatc

SEQ ID NO: 153500 - DNA, 80 bp, synthetic construct
  source 1..80: mol_type = other DNA
ccttgcatgttccatcagcaaaactggatgaatgacattgtaaaatgcggtcccttcgcctatcagggcgaccacaaaaa

SEQ ID NO: 153501 - DNA, 80 bp, synthetic construct
  source 1..80: mol_type = other DNA
ttatgacagtagcaagatctccaacagcgctcgagaccgatccagcatcaagcaagccaacatgggaaaattcgggcaac

SEQ ID NO: 153502 - DNA, 80 bp, synthetic construct
  source 1..80: mol_type = other DNA
taagatcaggatagcatatctaccctaatctctatttgggtagtatatgctacccagataagctccggatagcatatgct

SEQ ID NO: 153503 - DNA, 80 bp, synthetic construct
  source 1..80: mol_type = other DNA
tattctggcaatgtagctcataataaactaaaaccccctacacttagaccagtggtagttcagggacctaatacagaatt

SEQ ID NO: 153504 - DNA, 80 bp, synthetic construct
  source 1..80: mol_type = other DNA
aagaaaagaagaatagaaagtgtgtggagcataacttatctgccattttccagggtcttggtgatgacaccacaccaggc

SEQ ID NO: 153505 - DNA, 80 bp, synthetic construct
  source 1..80: mol_type = other DNA
atattacatgttctatgatgggtacgatcgagcctccaacggtgaaaacacttatggtatatcaacaaccaatgatatgg

SEQ ID NO: 153506 - DNA, 80 bp, synthetic construct
  source 1..80: mol_type = other DNA
cgggtgagcgcacatgcttttttctttcttaaccaaggcgggagaggatcttcaaggcgttttcgctggatccagcggta

SEQ ID NO: 153507 - DNA, 80 bp, synthetic construct
  source 1..80: mol_type = other DNA
gatctactttaacgttccggcaacccggagacacagactacgaactagaaataacgttaaccacatactgtaattacaaa

SEQ ID NO: 153508 - DNA, 80 bp, synthetic construct
  source 1..80: mol_type = other DNA
gtatgatcaggggcatgatgcccatgctctgggccggtatgggcaccggaggccacaactatgccgtccgctccgacgac

SEQ ID NO: 153509 - DNA, 80 bp, synthetic construct
  source 1..80: mol_type = other DNA
ctgctgacccgctgcgtcatatttatgtggcggctcttgaacccaaaggcgctatagacggttgggcagtaggctcggag

SEQ ID NO: 153510 - DNA, 80 bp, synthetic construct
  source 1..80: mol_type = other DNA
gttgacgacgtgacggtgtttttcgtcccgcttgttggccaccgtgggtcccggcgcggtgttagacatggggcaggccg

SEQ ID NO: 153511 - DNA, 80 bp, synthetic construct
  source 1..80: mol_type = other DNA
ccaaccaattttggagccaacaacccagatgaaaacccattttacttgtgtaatggtactctctttggcaacataactgc

SEQ ID NO: 153512 - DNA, 80 bp, synthetic construct
  source 1..80: mol_type = other DNA
ctccaagggcggtgagctacagagggcctggtgtagacttgttgtccactgcggtcacgcccttgtcaaaacacgatctg

SEQ ID NO: 153513 - DNA, 80 bp, synthetic construct
  source 1..80: mol_type = other DNA
caaaagaccccgattcgacactccagtccaagggcagctcgaaagccaagaagaagaaagctatcgtttactcagagcac

SEQ ID NO: 153514 - DNA, 80 bp, synthetic construct
  source 1..80: mol_type = other DNA
tgtttatccggtcccaaatgtcaccacagaacacagggggctggatttggcagcagcacttgtgcttttgttgattttta

SEQ ID NO: 153515 - DNA, 80 bp, synthetic construct
  source 1..80: mol_type = other DNA
aataaagcttggcttacagttgtctcagctgtaaccagcgccattagtattttactacttgtcactaaaatcttcaagag

SEQ ID NO: 153516 - DNA, 80 bp, synthetic construct
  source 1..80: mol_type = other DNA
aatgctttcgtgtttccccatcaaataattaatctaagaaccaacaatagcgcaacactagtgttaccttatgtgaattc

SEQ ID NO: 153517 - DNA, 80 bp, synthetic construct
  source 1..80: mol_type = other DNA
tacgcagactacatagactctcagctaggcccagtacaagaccacgaaacagtgggcatagtagtagttatatgccccta

SEQ ID NO: 153518 - DNA, 80 bp, synthetic construct
  source 1..80: mol_type = other DNA
ggactttgctgtcggggcgtcatcatacgtacctattacagtcaccatcgctcccatgagtgccgagtacaatggactca

SEQ ID NO: 153519 - DNA, 80 bp, synthetic construct
  source 1..80: mol_type = other DNA
caaccaatattgatagagcagtaaaccaggcaactagtttaattaacaccattctaatgtttatcactacacttggtata

SEQ ID NO: 153520 - DNA, 80 bp, synthetic construct
  source 1..80: mol_type = other DNA
agtaccatgtattgcctcacagagtgaaaatattggtcatgtagttatgcaatacatgtatgttcctcctggagctccca

SEQ ID NO: 153521 - DNA, 80 bp, synthetic construct
  source 1..80: mol_type = other DNA
agctccggcgacagcagcgactcggagagcagctccagctcctccaacaccacctgctcaaaacacaagcgggtctccaa

SEQ ID NO: 153522 - DNA, 80 bp, synthetic construct
  source 1..80: mol_type = other DNA
caatatttaacacttttaaaactgaggagcacctaaagtgccctccagccaaagacatgaaacaaactgaccctaccggt

SEQ ID NO: 153523 - DNA, 80 bp, synthetic construct
  source 1..80: mol_type = other DNA
gttagagtctgttttcaagagaacccttatgggggagattcttaattattatgcacactggtcagggagcattaagctga

SEQ ID NO: 153524 - DNA, 80 bp, synthetic construct
  source 1..80: mol_type = other DNA
aggaagctcggaggcgcaagggaggtggggcaagacgcggaaaagaggaagtccctaggagaccgcggaggaaacgacag

SEQ ID NO: 153525 - DNA, 80 bp, synthetic construct
  source 1..80: mol_type = other DNA
gtccgcttcttggatgaaaatataacaaaattattagaagtggcacagatacaacaagaagagaacatgtacaagttaca

SEQ ID NO: 153526 - DNA, 80 bp, synthetic construct
  source 1..80: mol_type = other DNA
acatcaacattaaagaacttgtgcaacttcggcgtaagtgtgaaatgttcacctatctgaggtttgatatggaggtcact

SEQ ID NO: 153527 - DNA, 80 bp, synthetic construct
  source 1..80: mol_type = other DNA
aagttcacatttttgttttgcggtagcatgatggccacaggaaagatactcttaagttattcaccaccaggtgctaaacc

SEQ ID NO: 153528 - DNA, 80 bp, synthetic construct
  source 1..80: mol_type = other DNA
aaatgaaacttttccatgcatgcgcacagacaactgcacaggattgggagaggaagagatggtcgattgtcagttcaaca

SEQ ID NO: 153529 - DNA, 80 bp, synthetic construct
  source 1..80: mol_type = other DNA
ccccggcaactgctgatatgctccaacagggcaaaaacagcgggagtcgttatccgcaaaatgcctacacaaagcctagt

SEQ ID NO: 153530 - DNA, 80 bp, synthetic construct
  source 1..80: mol_type = other DNA
tgataatgatgaggagcaccggagccaccacagcacaagtgattaggagcagggcccagtgcacccaggtggtcttaggg

SEQ ID NO: 153531 - DNA, 80 bp, synthetic construct
  source 1..80: mol_type = other DNA
tcatgtacatacccccgggggccccagtgccgagcaagtgggatgatttcacatggcaaacctccacaaacccatctgtg

SEQ ID NO: 153532 - DNA, 80 bp, synthetic construct
  source 1..80: mol_type = other DNA
atgcaaccggtctgaacagactcctaattccagtctccgcccaaaacaaggcagatgaactatgtgctgcattcatggtt

SEQ ID NO: 153533 - DNA, 80 bp, synthetic construct
  source 1..80: mol_type = other DNA
tgttgctgggtacaaaataatgaactaccacctagccactgcagatgactacaggcactgtgttaggtccatgtgggaga

SEQ ID NO: 153534 - DNA, 80 bp, synthetic construct
  source 1..80: mol_type = other DNA
cacgagtggactcattcatgccaataaacaacatacagagtcagttgcaggatgtcagtgtatataatgtccaggtcaca

SEQ ID NO: 153535 - DNA, 80 bp, synthetic construct
  source 1..80: mol_type = other DNA
ttgacaacagtcatttcgagaggtctcacaacagaagcggaggtttactcacttcctccagatcccaagcattttgatgg

SEQ ID NO: 153536 - DNA, 80 bp, synthetic construct
  source 1..80: mol_type = other DNA
ttcaaaccttcttgggccaaattgcattgcctccacttctaaaccggaaaacaaggatgtggttcaggcaacaacaaccg

SEQ ID NO: 153537 - DNA, 80 bp, synthetic construct
  source 1..80: mol_type = other DNA
ccactttggaaacggaaagagtccagagggacttggacagatacacacctactggatgcaaagatggagaccatacatga

SEQ ID NO: 153538 - DNA, 80 bp, synthetic construct
  source 1..80: mol_type = other DNA
aattaggtgccgtagccggcgcaacccaacaagtgcctataacggtaaccatagcaccaatgttttgtgagtttaacggt

SEQ ID NO: 153539 - DNA, 80 bp, synthetic construct
  source 1..80: mol_type = other DNA
gtggcagtgatgatgcatcaccaccacagcactcgccaggaccctctgcatatcttgtacaaggcgcctttcaactcggc

SEQ ID NO: 153540 - DNA, 80 bp, synthetic construct
  source 1..80: mol_type = other DNA
cagctgtgggatgtgacccggacacattctggtctgtcataccctgcctcatggatgggcaactcatggcgtttgattac

SEQ ID NO: 153541 - DNA, 80 bp, synthetic construct
  source 1..80: mol_type = other DNA
aaaaaggctcatattcagaggaagaaaggtcgcaagcctctgcagaagagcaggcgacggaggagacagtactcctcctc

SEQ ID NO: 153542 - DNA, 80 bp, synthetic construct
  source 1..80: mol_type = other DNA
gagtgctggtagggaatgcatttgtatatccacatcaaataataaacctgcgcactaacaactgtgctacgctagtattg

SEQ ID NO: 153543 - DNA, 80 bp, synthetic construct
  source 1..80: mol_type = other DNA
tggtgaccattccagcgggtgagcaaatgacaatctcagctccttattattcaaataaaccccttagaactgtgagggac

SEQ ID NO: 153544 - DNA, 80 bp, synthetic construct
  source 1..80: mol_type = other DNA
aacttttcaggagagcaaggctataaatatgtaacagaaatcagacaattctactggacacaacttacaccctggaacca

SEQ ID NO: 153545 - DNA, 80 bp, synthetic construct
  source 1..80: mol_type = other DNA
gatggagattgcggaagtcgactctgttgtgccagtaaacaacaccccagctgccgttaccagcatggacgcataccgca

SEQ ID NO: 153546 - DNA, 80 bp, synthetic construct
  source 1..80: mol_type = other DNA
caccaggagcatcccctccaaagaacagaaaagatgcaatgcttggcacccacatcatatgggacttggggttgcagtct

SEQ ID NO: 153547 - DNA, 80 bp, synthetic construct
  source 1..80: mol_type = other DNA
atctggttgtattcatatttcgaagctagttgtagaatatgagggatatgatgacacaaaaaattttaagacatggaaaa

SEQ ID NO: 153548 - DNA, 80 bp, synthetic construct
  source 1..80: mol_type = other DNA
gctccggacaaacagccgcagaaagatccctcagcgcgccgaaaccccgtccccaacgtaatccccgtccccgcgacacc

SEQ ID NO: 153549 - DNA, 80 bp, synthetic construct
  source 1..80: mol_type = other DNA
cccggttccagtggattgcctcgcgacgtacaaatcgaggacccgcaactcctccacgagggatactacttcagagcctg

SEQ ID NO: 153550 - DNA, 80 bp, synthetic construct
  source 1..80: mol_type = other DNA
agtcgggcatcaagtacgggttaactattacccctgcagataaatcagagagatttgaaaaggtcacttggaagaatgcc

SEQ ID NO: 153551 - DNA, 80 bp, synthetic construct
  source 1..80: mol_type = other DNA
ttttgttgtaccagatggtgcccctaccacagcaaacatcatagttttggggtccgcgcaaccaaatttcacaatgcgac

SEQ ID NO: 153552 - DNA, 80 bp, synthetic construct
  source 1..80: mol_type = other DNA
actggccgggctatgggcaaggctcttagggtcttcattcttaaaatgtttatcggcagggcttacagaaagaaaaggaa

SEQ ID NO: 153553 - DNA, 80 bp, synthetic construct
  source 1..80: mol_type = other DNA
tgactgtgctggccacccttagcctgctggggtgtgacgcctccccatggcattggctgaaagagaaagtctgcaacata

SEQ ID NO: 153554 - DNA, 80 bp, synthetic construct
  source 1..80: mol_type = other DNA
cgcgcaacagcgggcgaaagtagcgcttaaccaacgacgaggtcaggtagcgcatgcagtgcagggtttcgacggcgcgc

SEQ ID NO: 153555 - DNA, 80 bp, synthetic construct
  source 1..80: mol_type = other DNA
gtctattcaaaatgccatattagggatacatgttgctggtggtaactcaattttggtcgctaaattagtcactcaagaaa

SEQ ID NO: 153556 - DNA, 80 bp, synthetic construct
  source 1..80: mol_type = other DNA
atcgtgtgcgttccatcactttgggcaactccacgatcactacacaggaatgtgccaacgtggtagttgcatacgggcgc

SEQ ID NO: 153557 - DNA, 80 bp, synthetic construct
  source 1..80: mol_type = other DNA
acatgcacccaatgccaacagaaaggagaagctatacatgggcaagtaaatgcagaattaggcacttggcagatggactg

SEQ ID NO: 153558 - DNA, 80 bp, synthetic construct
  source 1..80: mol_type = other DNA
taaaaggttatcccttagcttcagaagatgcccagaatgaactggctgtgaatattgaaaaacttaagaaagggctggat

SEQ ID NO: 153559 - DNA, 80 bp, synthetic construct
  source 1..80: mol_type = other DNA
aatagacaagaatgaccccactgccgggttcgttgtctacaacactaactttggcatgggcaagtggatagacgggtcgg

SEQ ID NO: 153560 - DNA, 80 bp, synthetic construct
  source 1..80: mol_type = other DNA
taaggtaggctcaactaagtataagaaatataccgaatataacactaaatacggaacattcccaatgcctatattcataa

SEQ ID NO: 153561 - DNA, 80 bp, synthetic construct
  source 1..80: mol_type = other DNA
cacatgcatgactatagaaaatatgacccatttggagggggcataagcactatgcaattcaatctaagcatcctgtttga

SEQ ID NO: 153562 - DNA, 80 bp, synthetic construct
  source 1..80: mol_type = other DNA
gagagtaaactggtgagtgacatgcaaaaacaactcaaacagatgttctcataccagagatcacacagagtggaacctgt

SEQ ID NO: 153563 - DNA, 80 bp, synthetic construct
  source 1..80: mol_type = other DNA
ctggaacttgcgcggcaacacagcagtccggccttccagccgatgctgtacaatctgttgcagctactgacgcaactgca

SEQ ID NO: 153564 - DNA, 80 bp, synthetic construct
  source 1..80: mol_type = other DNA
gttccagtaatcgtcgtactgcaccatgggccgctggtagtcgcgcatagtgtggaagtggtcgcagtgacgaaagccat

SEQ ID NO: 153565 - DNA, 80 bp, synthetic construct
  source 1..80: mol_type = other DNA
ctccataatggctgtttaaaattaaaagaaaaccagggatcccccttgggattggtttaaacctgaactactatggaaga

SEQ ID NO: 153566 - DNA, 80 bp, synthetic construct
  source 1..80: mol_type = other DNA
ggcaggatacaagataatcaactaccacctagccaccgcagcagactaccaacagtgtgtcaggagcatgtgggagcgcg

SEQ ID NO: 153567 - DNA, 80 bp, synthetic construct
  source 1..80: mol_type = other DNA
taggcatcctaactgaaaaacttgagtcaaactatgatgcactattcacaaaattaaagaacgactatgataaatacaag

SEQ ID NO: 153568 - DNA, 80 bp, synthetic construct
  source 1..80: mol_type = other DNA
agttagattctttggaagtagttggagattttacagacacgaggacactgactatatagtgtactactctagaaaggctc

SEQ ID NO: 153569 - DNA, 80 bp, synthetic construct
  source 1..80: mol_type = other DNA
tgatactagcatacagaaggagatggcgccgtttgactgtttgtggcggcatgatgtttttggcatgtctagttgtcctc

SEQ ID NO: 153570 - DNA, 80 bp, synthetic construct
  source 1..80: mol_type = other DNA
tccaggagattgtggtggtaagttactgtgtgtacatggaaccataggaatggtgacagcaggaggagagaaccatgttg

SEQ ID NO: 153571 - DNA, 80 bp, synthetic construct
  source 1..80: mol_type = other DNA
tattttggtttcttattcatctgatttagtcatataccgaacaaacacaataggtgatgactatataccaacatgtgact

SEQ ID NO: 153572 - DNA, 80 bp, synthetic construct
  source 1..80: mol_type = other DNA
gggtcgtggacgagaaagactcgttcacgtaccgctgctcatctttccaaggcttgtgcggttcgccgatgattgccact

SEQ ID NO: 153573 - DNA, 80 bp, synthetic construct
  source 1..80: mol_type = other DNA
cccaggcactcccaaccaggtaaaaccatctgggttgaacacaagttagtgaagattgtagacgctgtagagctagtaga

SEQ ID NO: 153574 - DNA, 80 bp, synthetic construct
  source 1..80: mol_type = other DNA
tggtagcgatgataccagaacaccaactagcaaccgctgtaggtggtagtgtgtctgcaggatataattacacacaccct

SEQ ID NO: 153575 - DNA, 80 bp, synthetic construct
  source 1..80: mol_type = other DNA
gatcaggttgtgtaacgatcatgagactagaactagaccacactgattataacgctgaagggaaaaatttcacaacatgg

SEQ ID NO: 153576 - DNA, 80 bp, synthetic construct
  source 1..80: mol_type = other DNA
ggacacacatcacaggtcgtgcctggcgacaccatccagactagacatgttgtgaacttccactcgcgatcggaatcctc

SEQ ID NO: 153577 - DNA, 80 bp, synthetic construct
  source 1..80: mol_type = other DNA
tggataattccagcagattgtaaaattgaaagggacttaaatttagcaaataatatcataacaattgtagcaaatgttat

SEQ ID NO: 153578 - DNA, 80 bp, synthetic construct
  source 1..80: mol_type = other DNA
cttaaagacacatcaatcagtggagaaagaaaatcaatactaaacaaaatacacccaacatctctaacaggatcaggcaa

SEQ ID NO: 153579 - DNA, 80 bp, synthetic construct
  source 1..80: mol_type = other DNA
tcggctgtgaccccgacatattttggtcacagatttactccaccttggatggacacttgcttgccttcgactacaccaac

SEQ ID NO: 153580 - DNA, 80 bp, synthetic construct
  source 1..80: mol_type = other DNA
cagggcctcgtacacatagtcgtaaaagagggcccctgagggctccaaaagccggagccgggcggcgtcaaaggccagga

SEQ ID NO: 153581 - DNA, 80 bp, synthetic construct
  source 1..80: mol_type = other DNA
cagagagggcacaaacagccccatagtagggttttatgttttaaaaccctcactatataatggagccatgtcaaacttag

SEQ ID NO: 153582 - DNA, 80 bp, synthetic construct
  source 1..80: mol_type = other DNA
agagtgggaatcatcagagcactcaggtttttggctttcaagttcaaccaggactagacagtgttttcaagcacacactg

SEQ ID NO: 153583 - DNA, 80 bp, synthetic construct
  source 1..80: mol_type = other DNA
agtatcaaggtgacattcatgtgtgtgtgtgattcttttagctcaggcaaatttcttgtagcatatacacctcctggtgg

SEQ ID NO: 153584 - DNA, 80 bp, synthetic construct
  source 1..80: mol_type = other DNA
tcccggttcccgtccgcggcccggagggacccgagcgtgggcttcccacccccaccccgctcctccccgggctccggccc

SEQ ID NO: 153585 - DNA, 80 bp, synthetic construct
  source 1..80: mol_type = other DNA
ggaattagacaagtactattcttggaaaaaatagaacctgctcaagaagaacatgaaaagtttcatagtaatgtaaaaga

SEQ ID NO: 153586 - DNA, 80 bp, synthetic construct
  source 1..80: mol_type = other DNA
tccgcatccaacgctcccgggacctcaatctcagtcaactgctccaggacacgtggaccgaaacgccgctggagcactgc

SEQ ID NO: 153587 - DNA, 80 bp, synthetic construct
  source 1..80: mol_type = other DNA
cagacaaatactcatcaggaggaattatttctctatggtatcaaacagactttgtgggtgggagtgatcctacgggtaca

SEQ ID NO: 153588 - DNA, 80 bp, synthetic construct
  source 1..80: mol_type = other DNA
ggaagaggaattgactctgcattacaaaaataaggttttcccaattgacaacccatctgtgacacaagttactctgggtg

SEQ ID NO: 153589 - DNA, 80 bp, synthetic construct
  source 1..80: mol_type = other DNA
gggacctataacactggatgcaccaccacctcctgctataacggatttattacggtctgttagaactccagaagtaatta

SEQ ID NO: 153590 - DNA, 80 bp, synthetic construct
  source 1..80: mol_type = other DNA
actacgaacacattagtaagggtgagatcgcatcaaggttcactaccacgacaacagcagaagaccatggcgtgcaggcc

SEQ ID NO: 153591 - DNA, 80 bp, synthetic construct
  source 1..80: mol_type = other DNA
gacctggatggacttatcgccgccctagacgacgaagagtaaggaggcaaagacggtggaggagggggcgacccagacgc

SEQ ID NO: 153592 - DNA, 80 bp, synthetic construct
  source 1..80: mol_type = other DNA
agctgcaccatggttgcaccatggatctcaagcacatacttccgcaggaccaaagcagataagtactcatcaggaggaat

SEQ ID NO: 153593 - DNA, 80 bp, synthetic construct
  source 1..80: mol_type = other DNA
tagcagatcgtcgtcaagatcgggtagcgcgtgcccgtcttcaccgtcctcgtcgtcaccacctcccccctcgagcccac

SEQ ID NO: 153594 - DNA, 80 bp, synthetic construct
  source 1..80: mol_type = other DNA
gtctatgttgggaattataaaatagttaacagacatctggcaactgaagcagactggaatagtttagtctgggaaagcta

SEQ ID NO: 153595 - DNA, 80 bp, synthetic construct
  source 1..80: mol_type = other DNA
ctaaaccagcacactataaaacgtgctgtcctctgctgtgtggcaaggcagttgtagttcaggacaggaaatcaaaagca

SEQ ID NO: 153596 - DNA, 80 bp, synthetic construct
  source 1..80: mol_type = other DNA
aaaaggaaagtgccactgtgctcagtgccagtccctgcgaaaaaaccaactgttatgagcagcgtgtacagaccgccggc

SEQ ID NO: 153597 - DNA, 80 bp, synthetic construct
  source 1..80: mol_type = other DNA
aagtctctccccagcatccgatcaacgattgcaatatactatgcttggtgagatcttgaattattacacacactggaccg

SEQ ID NO: 153598 - DNA, 80 bp, synthetic construct
  source 1..80: mol_type = other DNA
tatgtaccacaacaggtcattcaccgcaatgtggtgaagttgagtcaattttcaaatttgaaaccattcgtaaacgcata

SEQ ID NO: 153599 - DNA, 80 bp, synthetic construct
  source 1..80: mol_type = other DNA
gagatgggatgctgcctcaaatcctagtgtattctatcaacccaaaagtggatttccacgtttcactattccctttacag

SEQ ID NO: 153600 - DNA, 80 bp, synthetic construct
  source 1..80: mol_type = other DNA
gtgaaccacctgcccagggagcttattttccaggtgtggcaaaggtcctggagatactggcatgatgaacaagggatgcc

SEQ ID NO: 153601 - DNA, 80 bp, synthetic construct
  source 1..80: mol_type = other DNA
gacaaagcaagactgggaaacagaacagcaagccgcggcggtctgggacagaccaatgcgcaacaatctcaccgaccctc

SEQ ID NO: 153602 - DNA, 80 bp, synthetic construct
  source 1..80: mol_type = other DNA
gatcctcatggattgcctcacgaattagttactcactactatcatcggtatcccctaacgacatctataggagtgtccat

SEQ ID NO: 153603 - DNA, 80 bp, synthetic construct
  source 1..80: mol_type = other DNA
gatttcagcctcatcaaagctacgaagtgcccagatacgtccctcatccgcccccaccaccaacttctcaccaggcagct

SEQ ID NO: 153604 - DNA, 80 bp, synthetic construct
  source 1..80: mol_type = other DNA
gggtaaactgtatgtgagacaagtgaacctaaaagcccctatgccagtcagcagtacagttaggatctatttcaaaccca

SEQ ID NO: 153605 - DNA, 80 bp, synthetic construct
  source 1..80: mol_type = other DNA
cccaggattccacttacaagacagggtgtgaaggcacaagtgtgctagtcatgagtcctccggcccctgaatgcggctaa

SEQ ID NO: 153606 - DNA, 80 bp, synthetic construct
  source 1..80: mol_type = other DNA
tttcagtgcgtttgctgagggatacaccattcatatcccagagtgcactcctccagaatgacccagccactgctattgtc

SEQ ID NO: 153607 - DNA, 80 bp, synthetic construct
  source 1..80: mol_type = other DNA
cactctacgcggcggaggccagaagaattttcaccttggaaaataagatcaataactacatacaattcaagaccaaacat

SEQ ID NO: 153608 - DNA, 80 bp, synthetic construct
  source 1..80: mol_type = other DNA
actcgtagttgtggttccagaacaccagttagcatacataggtgctgataaggttaatgtcaagtatgagcacacccacc

SEQ ID NO: 153609 - DNA, 80 bp, synthetic construct
  source 1..80: mol_type = other DNA
ccaagtgacacggtacaaacacgtcacgtggtgaacacgcacagtaggactgaatcaacaattgaaaacttcttcagccg

SEQ ID NO: 153610 - DNA, 80 bp, synthetic construct
  source 1..80: mol_type = other DNA
ctcccccggttatatccaacagatccatatccacaaggacccggaacagccagccagcgaagaaacagaagaagacgttg

SEQ ID NO: 153611 - DNA, 80 bp, synthetic construct
  source 1..80: mol_type = other DNA
gtttacagcatatatgtcttagtagttataagtccttacactgaaccaaaaatgtacaacaaaagtaaacctacacatgg

SEQ ID NO: 153612 - DNA, 80 bp, synthetic construct
  source 1..80: mol_type = other DNA
aatccccatgtgcactcccttggtatcacccaaccaaagaaatatccatcccaggtgaggtaaaaaatttagttgaaata

SEQ ID NO: 153613 - DNA, 80 bp, synthetic construct
  source 1..80: mol_type = other DNA
gtcatcacagagtcatgtgataagcactattgggatgctatgaggtttagatactgtgcaccaccgggttttgccatact

SEQ ID NO: 153614 - DNA, 80 bp, synthetic construct
  source 1..80: mol_type = other DNA
caaaagatttatctagacttaaaagtgcacttgataagtatggagtagatttacctatggtgacttttctaaaagatgaa

SEQ ID NO: 153615 - DNA, 80 bp, synthetic construct
  source 1..80: mol_type = other DNA
tgggcccgcaaaaggccgccgtctccagcgccaaagcttcccgtccgcagccccaacgtcacccccggtggccgccgcca

SEQ ID NO: 153616 - DNA, 80 bp, synthetic construct
  source 1..80: mol_type = other DNA
gcttgattacagtaatgttacctttctgaaaagaggctttaagcaagatgaaagatactcattcttaatccatccaacct

SEQ ID NO: 153617 - DNA, 80 bp, synthetic construct
  source 1..80: mol_type = other DNA
tatttggcagacaagctattaaaagagtgtcagcaaaaccaacagatgatgagcttattccaacaggtccaaaacgcccc

SEQ ID NO: 153618 - DNA, 80 bp, synthetic construct
  source 1..80: mol_type = other DNA
cgtagtagaccccaactacgcccaatataaaaaacagtcctcaggcactaagtggtcagacacttatgtagattctttat

SEQ ID NO: 153619 - DNA, 80 bp, synthetic construct
  source 1..80: mol_type = other DNA
acctgcccctcctcatctgtggaacgggcactaccgggaccacctacaaaaactatggcagccatgcctcagactataaa

SEQ ID NO: 153620 - DNA, 80 bp, synthetic construct
  source 1..80: mol_type = other DNA
caatgctgggcactcatatcatttgggatgtaggattgcaatcatcgtgcgtgctatgtataccctggatcagccagacg

SEQ ID NO: 153621 - DNA, 80 bp, synthetic construct
  source 1..80: mol_type = other DNA
gtacatgagatttgatttagagatcaccttcgtggtcacgagttaccaacaatatagtacatccttgacacaggacatgc

SEQ ID NO: 153622 - DNA, 80 bp, synthetic construct
  source 1..80: mol_type = other DNA
ggcgagcctgcggtttccgttctgctcaccacaaacggacaacatttgcataaccttccaggtcttacatcctcttttct

SEQ ID NO: 153623 - DNA, 80 bp, synthetic construct
  source 1..80: mol_type = other DNA
aattcctgaacaggttatcaaaaatccatgcaaagagcaagactcaccattcacctttaccggtagacagcctcgcgact

SEQ ID NO: 153624 - DNA, 80 bp, synthetic construct
  source 1..80: mol_type = other DNA
aagaaagctcgcaagaagaaaactcagaagagacagaagaagaaacctcgttatcgcagcagctcaagcagcagtgcatc

SEQ ID NO: 153625 - DNA, 80 bp, synthetic construct
  source 1..80: mol_type = other DNA
aagatgagtatacgagtgctggcaatgtcacctgctggtaccaaacaggcatagtagtccccccaggcacgcctaacaag

SEQ ID NO: 153626 - DNA, 80 bp, synthetic construct
  source 1..80: mol_type = other DNA
tttgaacacagaacaggcatattttgcccagcattactaagccctcaaagactaaacccacaagtaccgggcttatacac

SEQ ID NO: 153627 - DNA, 80 bp, synthetic construct
  source 1..80: mol_type = other DNA
gatacgctccaccagggcgaaaacaatttgaatcgttatccgcaaagtgactacgcaaagcccagtaataccttgaagaa

SEQ ID NO: 153628 - DNA, 80 bp, synthetic construct
  source 1..80: mol_type = other DNA
aaattaccctgtacaaagcataggcggcaattatacccatgtgccgctaagtccccgaaccctaaatgcttgggtaaaat

SEQ ID NO: 153629 - DNA, 80 bp, synthetic construct
  source 1..80: mol_type = other DNA
agaaaaccctccaagggcgactgggagaccgagtaccaggcctgcgccgccttcgaccggcctcccaggaccgatctcag

SEQ ID NO: 153630 - DNA, 80 bp, synthetic construct
  source 1..80: mol_type = other DNA
accccgggggccccggcactccgcagataagaaacctgccagcgctcccggcaccccagggtgagcccggtgacagagcg

SEQ ID NO: 153631 - DNA, 80 bp, synthetic construct
  source 1..80: mol_type = other DNA
ccatgactcgactcgctcacgtacgagacgctgtcgtccggtctggcgccggccagagacatggagtcggtgcacaaata

SEQ ID NO: 153632 - DNA, 80 bp, synthetic construct
  source 1..80: mol_type = other DNA
gaatcatatcagctatggtaataatcatcagaaattcatcagatccacaaacaattatagccacattaactttaattggc

SEQ ID NO: 153633 - DNA, 80 bp, synthetic construct
  source 1..80: mol_type = other DNA
tggtgaagggccatacaaggaattcatagacaagatcagaaagacagaagtgggccgtaggttgtatctcccaccataca

SEQ ID NO: 153634 - DNA, 80 bp, synthetic construct
  source 1..80: mol_type = other DNA
tagacttgtcctccttttttttcctcatctcctgtatctggagatatatgttgaccaccaccgccatgaccaccaaaaag

SEQ ID NO: 153635 - DNA, 80 bp, synthetic construct
  source 1..80: mol_type = other DNA
tgtagaaatagaagtagtaggaaaaaaggtaagagcaactataatgacaggagacaccccaataaacatttttggcagaa

SEQ ID NO: 153636 - DNA, 80 bp, synthetic construct
  source 1..80: mol_type = other DNA
agcccggctccacggtgatgccgcaaaggagcggcaccgtcaggcacctgtggcccgcgtagccggtccccagtgtggcc

SEQ ID NO: 153637 - DNA, 80 bp, synthetic construct
  source 1..80: mol_type = other DNA
taaaaataacggccctgcggcggcgcgcgcgctacggaccaatggcaagaagataaaggccttatggcgaagtctggccc

SEQ ID NO: 153638 - DNA, 80 bp, synthetic construct
  source 1..80: mol_type = other DNA
gaagtttgagttgttcacatatcttagatttgacatggagataaccatagtcaccaacaacactggcttgatgcaaataa

SEQ ID NO: 153639 - DNA, 80 bp, synthetic construct
  source 1..80: mol_type = other DNA
atacaaagcacaacctcaatatattaaaaacagaagagccttaaactttaaatatgaaatagaaaaccctgttagtaaaa

SEQ ID NO: 153640 - DNA, 80 bp, synthetic construct
  source 1..80: mol_type = other DNA
caaacagatctctgtgacatggtgcttctaactatctatgcaaccgcagcggatatgcaatatccgttcggctcaccact

SEQ ID NO: 153641 - DNA, 80 bp, synthetic construct
  source 1..80: mol_type = other DNA
cctcctgctgagctttctgcagacgccatccggtccaatctggatttggccaagcaacttctcactctctcgcacgctgc

SEQ ID NO: 153642 - DNA, 80 bp, synthetic construct
  source 1..80: mol_type = other DNA
gattatggaaactagtattgagcacttcttctcccgctcaggtctagcaggaattttgataattgaagactctgggactt

SEQ ID NO: 153643 - DNA, 80 bp, synthetic construct
  source 1..80: mol_type = other DNA
gcggcgctcttcagggccacgctcaagcgcgcgcgcccgctcaagccgcccgaaccgctgcgcgagtacctggccgatct

SEQ ID NO: 153644 - DNA, 80 bp, synthetic construct
  source 1..80: mol_type = other DNA
accagagccagattcaaaggtgcaacacaggcagccctgccaaactaccctactataatgtccacagacctatatgaata

SEQ ID NO: 153645 - DNA, 80 bp, synthetic construct
  source 1..80: mol_type = other DNA
cgctgtggaaaggattctcaagaatttagtgaaacttatctctgcactcgtcatcgtcatcaggagtgactacgacatgg

SEQ ID NO: 153646 - DNA, 80 bp, synthetic construct
  source 1..80: mol_type = other DNA
catgtgcaatcccaggaatcgacgtcactccacccattgatatcccaggtgaggtcaaaaacatgatggagctcgctgaa

SEQ ID NO: 153647 - DNA, 80 bp, synthetic construct
  source 1..80: mol_type = other DNA
aggacctttaccaagaaaaagaaacaagttcgatactcgagtccaaggccctccaaccccagaaaaagaaagttacactt

SEQ ID NO: 153648 - DNA, 80 bp, synthetic construct
  source 1..80: mol_type = other DNA
aacacaaatagagacagaaaccaaccggatgaagatcccttctttaactgcaatggtacactattaggaaatttgaccat

SEQ ID NO: 153649 - DNA, 80 bp, synthetic construct
  source 1..80: mol_type = other DNA
ctcagtggaaccccagcacagtagtaagatgctttattgtaggatatttacctataattatttgtggacaaggcacatca

SEQ ID NO: 153650 - DNA, 80 bp, synthetic construct
  source 1..80: mol_type = other DNA
accctacagaacagaacatgaaaacatacaatgagtgggttaatgggactggaccaactaaatttagaccaggaaatacc

SEQ ID NO: 153651 - DNA, 80 bp, synthetic construct
  source 1..80: mol_type = other DNA
atggcacggtccagaagcagatagccggccaggcagaggaaggccacgaagaggtggcgaaggcgtgcccgaacccgggt

SEQ ID NO: 153652 - DNA, 80 bp, synthetic construct
  source 1..80: mol_type = other DNA
cggcaccgggctgcgggacggtgtttcggcgcgctaaggggtctctctacgggtatttgtccgccgcttttgcgcgacgc

SEQ ID NO: 153653 - DNA, 80 bp, synthetic construct
  source 1..80: mol_type = other DNA
cattatgtgctagtttcaaagtggatcctgggagagatggaccgtggcaatctacactagtgggtcaaatctgtaagtat

SEQ ID NO: 153654 - DNA, 80 bp, synthetic construct
  source 1..80: mol_type = other DNA
ccagtaggagctgttagtgagcaaggaatgctaaatttggggggtagacccaccaaccgaacattgatgtataacttccc

SEQ ID NO: 153655 - DNA, 80 bp, synthetic construct
  source 1..80: mol_type = other DNA
cgttactcatcttcggcggtggggcggggaggacgccttgtcgccccccttctggtccgtggtcttacgcggctggcgtc

SEQ ID NO: 153656 - DNA, 80 bp, synthetic construct
  source 1..80: mol_type = other DNA
tgggaattcatgctgtatgggcgggtatagtggtatctgtggcacttatagccttatacatgggtagccgtcgcgtcccc

SEQ ID NO: 153657 - DNA, 80 bp, synthetic construct
  source 1..80: mol_type = other DNA
agaccccatatatttaaacagtgctataacaaaccaaaactcaagagataacataataaccaactttttattaaaaaaca

SEQ ID NO: 153658 - DNA, 80 bp, synthetic construct
  source 1..80: mol_type = other DNA
ctataacacacatacaggactcttgaatgtctccaaagcactacaaccctgcactacatgccccaaaccccctcactaca

SEQ ID NO: 153659 - DNA, 80 bp, synthetic construct
  source 1..80: mol_type = other DNA
ttactgtacctattacaatatctatcagtcctatgtgtgctgagttctctggtgccagagctagaaatgttactcaagga

SEQ ID NO: 153660 - DNA, 80 bp, synthetic construct
  source 1..80: mol_type = other DNA
attgttattgctagtcgcattaatactgattgcaataatcctaactggtaccctagtgccgatacttttacatgaacaaa

SEQ ID NO: 153661 - DNA, 80 bp, synthetic construct
  source 1..80: mol_type = other DNA
cttcacctaacacgcacccagcgttcctcatgcaggccaaaaaaaaggttataatatacagctttaaaaccagaccgggg

SEQ ID NO: 153662 - DNA, 80 bp, synthetic construct
  source 1..80: mol_type = other DNA
atagacagcctagagacgtacaagtatctgacccgattaccgtgggaccaagatatgtcttccaccagtgggactggaga

SEQ ID NO: 153663 - DNA, 80 bp, synthetic construct
  source 1..80: mol_type = other DNA
tgcggtatccgttctgctcaccacaaacgaacaacccttgcaccaccttccaggtactgcgcaagaactacaatacagtt

SEQ ID NO: 153664 - DNA, 80 bp, synthetic construct
  source 1..80: mol_type = other DNA
gcagaaaataaaagggttactaacattcagaagaacctcaagcaacagacagcctatcttaagacccacagacatgaacc

SEQ ID NO: 153665 - DNA, 80 bp, synthetic construct
  source 1..80: mol_type = other DNA
tattacagtaactaacccaacatttcagtggatggaaaagaacgaatactaccctggtaggtaccagtcacacatgatac

SEQ ID NO: 153666 - DNA, 80 bp, synthetic construct
  source 1..80: mol_type = other DNA
cctatcagctcagtatgtatctgaatcttcacaaaaaacttaggggtcaaggcaccaaaacagcccccacacacatcccc

SEQ ID NO: 153667 - DNA, 80 bp, synthetic construct
  source 1..80: mol_type = other DNA
ggacaaggaacaaagtagacatagctgaaggaccaggatctatgaacatggccaatgtgctaagtactacgggcgctcaa

SEQ ID NO: 153668 - DNA, 80 bp, synthetic construct
  source 1..80: mol_type = other DNA
gcagggggcgactcagactccgtaggagacgtaggcgccgcaaaaagatagtcctcactcagtggaacccccagaccgta

SEQ ID NO: 153669 - DNA, 80 bp, synthetic construct
  source 1..80: mol_type = other DNA
gttacagcgcaccctgcttggggaggtactaaactattacgcacattggtcaggcagcataaagttgacattcttgtttt

SEQ ID NO: 153670 - DNA, 80 bp, synthetic construct
  source 1..80: mol_type = other DNA
gaagagacggacccgaagaaaaaagagcaaaaacagcagcagcgactccacctccagttccaagagcagcagcgactcgg

SEQ ID NO: 153671 - DNA, 80 bp, synthetic construct
  source 1..80: mol_type = other DNA
cgttatggggtacagtgactactgtagaaaatactatcaaggaaccaatgtgctaaaagaagccagacttacagttatat

SEQ ID NO: 153672 - DNA, 80 bp, synthetic construct
  source 1..80: mol_type = other DNA
acaccagacacatgtaacaaatacaacgtacctagtaaatactcatatgacagagtaaacagcttatggggagactacat

SEQ ID NO: 153673 - DNA, 80 bp, synthetic construct
  source 1..80: mol_type = other DNA
caggtcgctgaggtattcgtggtgcggatgagctagcaactgcgtaaagtgtgatagctcggccaatgaacagaggcccg

SEQ ID NO: 153674 - DNA, 80 bp, synthetic construct
  source 1..80: mol_type = other DNA
tgtgtagtcacaacacaaaatggaaagtttactggtttaggaatttatgatagggtcatgattatccccacacatgctga

SEQ ID NO: 153675 - DNA, 80 bp, synthetic construct
  source 1..80: mol_type = other DNA
cctagaaaccagacctaaaggcaaaaaaacagttaaaataagactagcccccccaactctatttgtagataagtggtact

SEQ ID NO: 153676 - DNA, 80 bp, synthetic construct
  source 1..80: mol_type = other DNA
ccatccatcagtcgtgtccgagccaagaacaacaggaagtcctgttcaacaatgtacgttggctggctatccagtcacgc

SEQ ID NO: 153677 - DNA, 80 bp, synthetic construct
  source 1..80: mol_type = other DNA
cataccatttgactacaactttggagacggaaaaatgcctgacggacagtcatacatacccattctgtacagatttaact

SEQ ID NO: 153678 - DNA, 80 bp, synthetic construct
  source 1..80: mol_type = other DNA
acatcaccagatggactgtggggagacgcagtcttccaaaccacagacccatgtattataactaaaaacatggagtctta

SEQ ID NO: 153679 - DNA, 80 bp, synthetic construct
  source 1..80: mol_type = other DNA
aatctggtgttaaatatggactaactatcacccctgcagacaagtcagaaaaatttgaaaaagtcacttgggaaaatgcc

SEQ ID NO: 153680 - DNA, 80 bp, synthetic construct
  source 1..80: mol_type = other DNA
cggagccgcgcgctacgccttcggctgcgcgcggcacctcagaactgggcgcaagcgcggccgcacgagcggtggtctga

SEQ ID NO: 153681 - DNA, 80 bp, synthetic construct
  source 1..80: mol_type = other DNA
agagttgctgataccatacggagcggaccatccaactcagaggcaatcccagcactcacagcagttgaaaccgggcacac

SEQ ID NO: 153682 - DNA, 80 bp, synthetic construct
  source 1..80: mol_type = other DNA
ctacttaagaggaactgccatattgcagaaactagaaaaggggagttcaacctcttaggcatccactctaactgtgcagt

SEQ ID NO: 153683 - DNA, 80 bp, synthetic construct
  source 1..80: mol_type = other DNA
catggccaccctctgcaccctgacatctgttgtggtatatttcctccatgaaacccttggacccctgggcaagaccgtgc

SEQ ID NO: 153684 - DNA, 80 bp, synthetic construct
  source 1..80: mol_type = other DNA
agctgatggcaggggctgctgctgaggaggaagaggagaaggagcccgggcggctgatggcggtggctgctgctgaggaa

SEQ ID NO: 153685 - DNA, 80 bp, synthetic construct
  source 1..80: mol_type = other DNA
agccagcaacaaggacctggacctggccaggtaccacggggtcactatcatattttttagacaccccactacagacttta

SEQ ID NO: 153686 - DNA, 80 bp, synthetic construct
  source 1..80: mol_type = other DNA
ttaaattaacacctctgtgcattgccatgagatgcaataaaactgagacaaacaaatggggtctaacagggaccaccact

SEQ ID NO: 153687 - DNA, 80 bp, synthetic construct
  source 1..80: mol_type = other DNA
gtttttagcccttccggactacaaaaatcgccatatttatgacgtcacggcggccattttaagtaaggcggaagtttctc

SEQ ID NO: 153688 - DNA, 80 bp, synthetic construct
  source 1..80: mol_type = other DNA
tgaagaattggatgacccaaacactgctgatccaaaatgccaaccctgattgcaaactagtattaaaaggattgggaatg

SEQ ID NO: 153689 - DNA, 80 bp, synthetic construct
  source 1..80: mol_type = other DNA
aagttaacatttacattttttgggtcggcgatggctacaggaaagttgctcctggcgtactcccctcctggcgccgatgt

SEQ ID NO: 153690 - DNA, 80 bp, synthetic construct
  source 1..80: mol_type = other DNA
tcacatggggtgcaacatctaagggttggtggtggaaattacctgattgtttaaaagatatgggaatatttggtcagaac

SEQ ID NO: 153691 - DNA, 80 bp, synthetic construct
  source 1..80: mol_type = other DNA
gtggacttcgatgtaacccctgttactacacacagatctgacatcaacaacgtgtcaaatctcacaacattcggggcgtt

SEQ ID NO: 153692 - DNA, 80 bp, synthetic construct
  source 1..80: mol_type = other DNA
tgtcagtcaggatgatgagggacagcccaatgatgaaacaagaggggaaactccaaaacaatgatcctgtggaatccttc

SEQ ID NO: 153693 - DNA, 80 bp, synthetic construct
  source 1..80: mol_type = other DNA
ctaatcaaaatagtgtcagcattggtcatagttgcaaggaattatgaggactctattacagttatggcaacactgagttt

SEQ ID NO: 153694 - DNA, 80 bp, synthetic construct
  source 1..80: mol_type = other DNA
taagtcatggtacagtgaaggtctttcatgttgagaatgacatacagtatgagaggtaaggatgcgtaaccaataccaag

SEQ ID NO: 153695 - DNA, 80 bp, synthetic construct
  source 1..80: mol_type = other DNA
caccaaaaacttaagaatcttggttccattaatcaggctatggtgacaagatgcgaaccagtggtctgttatctatatgg

SEQ ID NO: 153696 - DNA, 80 bp, synthetic construct
  source 1..80: mol_type = other DNA
aatccgagattaaggaaaggagaagataaaataaaaaaaaaataaaacagaagccgaccggccgccgacccgttccccag

SEQ ID NO: 153697 - DNA, 80 bp, synthetic construct
  source 1..80: mol_type = other DNA
ccctgacatcttttggtcgcaactatattcatcaatggagaagcatctattggtgttcgattacaccaattatgatggga

SEQ ID NO: 153698 - DNA, 80 bp, synthetic construct
  source 1..80: mol_type = other DNA
agtatactatgataaaacccacccaggtgaaaatgggatagacctatctgtagcagacgagcttggacctaaaactgacc

SEQ ID NO: 153699 - DNA, 80 bp, synthetic construct
  source 1..80: mol_type = other DNA
ttggttgtgatccagacactttttggtcagtcataccttgcttgttagatggagagttagttgcttttgactattcaaat

SEQ ID NO: 153700 - DNA, 80 bp, synthetic construct
  source 1..80: mol_type = other DNA
gcgtgaatccggatgcccggaagaccaccctctgcccctcacgaagctcatagctaaggccatcgatgctggatttctga

SEQ ID NO: 153701 - DNA, 80 bp, synthetic construct
  source 1..80: mol_type = other DNA
ccttgggttgaattattcaaaacaacaatgggagctcaggtgtccacacagaagtcaggatcgcatgaaaatgcgaatct

SEQ ID NO: 153702 - DNA, 80 bp, synthetic construct
  source 1..80: mol_type = other DNA
ttctcctttggaggaggattcagtaccaccacattcaccctaaaagtgctgtatgaccagcacctaagaggtatgaatag

SEQ ID NO: 153703 - DNA, 80 bp, synthetic construct
  source 1..80: mol_type = other DNA
tctcagtaaaaatcccccctcctaaactctttatagacaagtggtatgctcagagtgacctgtgttccgttaaccttgtg

SEQ ID NO: 153704 - DNA, 80 bp, synthetic construct
  source 1..80: mol_type = other DNA
tttccccttccctccctcgtcttgccctgcgcccggggccaccttcatcaccgtcgctgactccgccatccaagcctagg

SEQ ID NO: 153705 - DNA, 80 bp, synthetic construct
  source 1..80: mol_type = other DNA
gtactgatgctgccaacacaaactatggaatttcactgacaaatgacatgggaaccttgtgttttcgggcactggatggg

SEQ ID NO: 153706 - DNA, 80 bp, synthetic construct
  source 1..80: mol_type = other DNA
agggcacgggcaacgtagtgtgcctgcagtatctgactaaagagacctcagactacaaaccaggtggtgggagcaagttc

SEQ ID NO: 153707 - DNA, 80 bp, synthetic construct
  source 1..80: mol_type = other DNA
atttgggagagcatggtttaatagtgatcatgaattcactaatggtaatctctggagaagtcaattaacttttccaaagc

SEQ ID NO: 153708 - DNA, 80 bp, synthetic construct
  source 1..80: mol_type = other DNA
acccaaccctatcagttgctaagccaaagggtactttccctgtttcacaaagggaatttaagaatgaggcaccctacgat

SEQ ID NO: 153709 - DNA, 80 bp, synthetic construct
  source 1..80: mol_type = other DNA
cgtgaatgcatttccccatccccacgtccagtggctcatgcccgagggcgtggagcccgcaccaactgcggcaaatggcg

SEQ ID NO: 153710 - DNA, 80 bp, synthetic construct
  source 1..80: mol_type = other DNA
actaaacttagcaacacggaacatgcaagcacattcgggtccatggactcaaatgaagccggagccgtccaaaatgcagt

SEQ ID NO: 153711 - DNA, 80 bp, synthetic construct
  source 1..80: mol_type = other DNA
acacagagccacagctggtgggctccacagaagacatagggttcgtacccatcacagagaccttcatgaggggcgacatg

SEQ ID NO: 153712 - DNA, 80 bp, synthetic construct
  source 1..80: mol_type = other DNA
ccgtatcattcaaagacaggaatacatgccaagaatattcactcagtcagatctacaatctgattatagaggaagataag

SEQ ID NO: 153713 - DNA, 80 bp, synthetic construct
  source 1..80: mol_type = other DNA
ttaaaccctgcataaaccaggtgtttatgtttcctcctgacacccctaaacccattaccactgcacaagattggaaacag

SEQ ID NO: 153714 - DNA, 80 bp, synthetic construct
  source 1..80: mol_type = other DNA
atgcagttaaactttaaatacaaatttttgtttaactggggcggttcccctatatctgaacagattgtcaaggacccctg

SEQ ID NO: 153715 - DNA, 80 bp, synthetic construct
  source 1..80: mol_type = other DNA
ctttcagaatgaactcactaccaaattgcaaattttaaagaaaaacttagatgatatgtgtcctctctatgctgcagaaa

SEQ ID NO: 153716 - DNA, 80 bp, synthetic construct
  source 1..80: mol_type = other DNA
ccaaatgaagtcagtcaacaattcgacttctttttaaactctgctcacccaccaagcatacaatcagaaaaagatgttag

SEQ ID NO: 153717 - DNA, 80 bp, synthetic construct
  source 1..80: mol_type = other DNA
gccaaaccagatgagaatgtagacgcaacaaacttaaccaacggtgagaatacatgtgaattaacagcaggtgcagcacc

SEQ ID NO: 153718 - DNA, 80 bp, synthetic construct
  source 1..80: mol_type = other DNA
aacaacaagcacaacatacatgggctcaccagcactacaacaagtaaactggccagggaaatcaatgccaacagctccag

SEQ ID NO: 153719 - DNA, 80 bp, synthetic construct
  source 1..80: mol_type = other DNA
tgaatgtggctaatcctaaccccgcagctgtagtgtgcaatccagcacatttgcagtcgtaatgggtaactgcgggatgg

SEQ ID NO: 153720 - DNA, 80 bp, synthetic construct
  source 1..80: mol_type = other DNA
attactctcactttcatgtgtgtgtgtgattctttctcaactggaaaattcttgttagcgtacaccccccctgggggagc

SEQ ID NO: 153721 - DNA, 80 bp, synthetic construct
  source 1..80: mol_type = other DNA
gcaatagaaaacaagagagtcacaaagatccagcaaaatcttaagcaacttacagcttatctaaaaacccacaggcatga

SEQ ID NO: 153722 - DNA, 80 bp, synthetic construct
  source 1..80: mol_type = other DNA
ggtcgccataggcttcggcctcagttttaggccttccggactacaaaaatcgccatattggtgacgtcacggccgccatt

SEQ ID NO: 153723 - DNA, 80 bp, synthetic construct
  source 1..80: mol_type = other DNA
ctatgggcaaggctcttaaagaatgcatttttctcgaatttatcgcagaaagaagaggctactgccactgcgccgcttgc

SEQ ID NO: 153724 - DNA, 80 bp, synthetic construct
  source 1..80: mol_type = other DNA
aatgagcacagagtttgatgccacccaatgcaaatgtgtcctagaaaacataccgctgtgggcggcctttaatggctacg

SEQ ID NO: 153725 - DNA, 80 bp, synthetic construct
  source 1..80: mol_type = other DNA
aaacataacaataccagccactcaaggattaccaacaatgttagtgccagggtccaatcaatttttaacatctgataatt

SEQ ID NO: 153726 - DNA, 80 bp, synthetic construct
  source 1..80: mol_type = other DNA
acacagcagcagcagcgagacctccacctccgactcgcacagcagcagcgactcggacagcagctcaaacacctctacac

SEQ ID NO: 153727 - DNA, 80 bp, synthetic construct
  source 1..80: mol_type = other DNA
gactggcatcaaagaaaagaataacagtactagatgtaggagatgcctacttcagtgtcccactagatccagacttcaga

SEQ ID NO: 153728 - DNA, 80 bp, synthetic construct
  source 1..80: mol_type = other DNA
tgttggctttacatccttcaacctccacaccccgtattttgttaaggttgtgttgtcgatcagatcactataccacaatg

SEQ ID NO: 153729 - DNA, 80 bp, synthetic construct
  source 1..80: mol_type = other DNA
ccaagggcagctcgaaagccaagaagaagaaagctatcgtttactcagagcactccaaaaagagcaagagacaagcagct

SEQ ID NO: 153730 - DNA, 80 bp, synthetic construct
  source 1..80: mol_type = other DNA
tgaaaccaagggtccctacacagacataacatacaacccattctcagacagaggcgaaggcaacatgctgtggatagact

SEQ ID NO: 153731 - DNA, 80 bp, synthetic construct
  source 1..80: mol_type = other DNA
gctttatcagaaggggaaagagcatcgatgttcacaaaagaaaaatccaccaaccgaaatggagtgcaaactattgtgca

SEQ ID NO: 153732 - DNA, 80 bp, synthetic construct
  source 1..80: mol_type = other DNA
cccactcaacctggtcaatgtggagctgttgtagctaatgtgggcaacataatcgccatccatgttggtggcaacggcag

SEQ ID NO: 153733 - DNA, 80 bp, synthetic construct
  source 1..80: mol_type = other DNA
actccgcccgaaccgtcgcggcttgctggccctgggcgtggtcccccactcccctccccccatcggccgcccagccgtgg

SEQ ID NO: 153734 - DNA, 80 bp, synthetic construct
  source 1..80: mol_type = other DNA
aatcgcgatcgcccatctgcaatatggaggccagtggatccaagaagcgttccaggccttcgcgagggctacacgagaga

SEQ ID NO: 153735 - DNA, 80 bp, synthetic construct
  source 1..80: mol_type = other DNA
agaccggacagcatctctcccatcgagagcgtcgctcagtacaagtcgttagcccgctcacaatgggaccagaatacata

SEQ ID NO: 153736 - DNA, 80 bp, synthetic construct
  source 1..80: mol_type = other DNA
aagatgtttcaattttctttcagaataaagtaatggggaagagcattttggttgatgattttttggatcttgacatggct

SEQ ID NO: 153737 - DNA, 80 bp, synthetic construct
  source 1..80: mol_type = other DNA
gacatgtcaatacttgcccttgacaggcattgatggaatcgtagtctcacgctgatagtctgatcgacaatacaagtggg

SEQ ID NO: 153738 - DNA, 80 bp, synthetic construct
  source 1..80: mol_type = other DNA
ttatatccccttcccttaatgtaacttagaagcaaagcaaaccgatcaataggggacaatcatccagattgtcaaagatc

SEQ ID NO: 153739 - DNA, 80 bp, synthetic construct
  source 1..80: mol_type = other DNA
cgtggatgtgcttgtaatcatcactgacgtcgatgtgttatcgtaagaggtggaaacatacgatgtatttggactggaag

SEQ ID NO: 153740 - DNA, 80 bp, synthetic construct
  source 1..80: mol_type = other DNA
cttcaccaggtgactgtggaggcatccttaggtgtcaacatggtgtcatcggaattgtgacggctggtggtgaaggactg

SEQ ID NO: 153741 - DNA, 80 bp, synthetic construct
  source 1..80: mol_type = other DNA
ttctgaagtatctggcggtgactgtcacctggttcttgagagagtccataaaatggctgaagctccaggcgtatagtata

SEQ ID NO: 153742 - DNA, 80 bp, synthetic construct
  source 1..80: mol_type = other DNA
gaactgtgcgcagcattcatggtggacccaggccggattgggccatggcagtccaccctagttgggcaaatctgccggta

SEQ ID NO: 153743 - DNA, 80 bp, synthetic construct
  source 1..80: mol_type = other DNA
gtagttacgttgtatatagtgagagaggtcttattgcagtctaaacacatgccgttcagtggggaagttgaataataatg

SEQ ID NO: 153744 - DNA, 80 bp, synthetic construct
  source 1..80: mol_type = other DNA
ttatgagcacgccatggcctacaaattgcaacgctacgacagacaccacctacaaccttactaactcttccaacgcttgt

SEQ ID NO: 153745 - DNA, 80 bp, synthetic construct
  source 1..80: mol_type = other DNA
ctaacctcctgggttaaatacgtttacttaggcctttatgtagtggcaggagtaatagtgttaagaatagtcatatatgt

SEQ ID NO: 153746 - DNA, 80 bp, synthetic construct
  source 1..80: mol_type = other DNA
cttacaaagggcgagtcggcacacgagtttgcccggaccaaagccaatggtaatcacacggtgcaatcaatagtgtgcaa

SEQ ID NO: 153747 - DNA, 80 bp, synthetic construct
  source 1..80: mol_type = other DNA
tatgtcagaaacgaccgacaccatgtttaatctggtaagacctacgagggattatgaatcctctaaagtgagcccaaagg

SEQ ID NO: 153748 - DNA, 80 bp, synthetic construct
  source 1..80: mol_type = other DNA
ccactggctgaaggcaactagcaataaggcaggtgggttcaaacgcttaaagtgtgttgtatatattcttttctaacctg

SEQ ID NO: 153749 - DNA, 80 bp, synthetic construct
  source 1..80: mol_type = other DNA
cccaggcaaattttgaatgtggggccaagtgatatgtatgtacatgttggcaatttaatctacagaaatttgcacctctt

SEQ ID NO: 153750 - DNA, 80 bp, synthetic construct
  source 1..80: mol_type = other DNA
ggcccctgagccatggtctggcgcaggtggcgacgctggcgccggtggagatggcgccgcaggccgcggtggaggagatg

SEQ ID NO: 153751 - DNA, 80 bp, synthetic construct
  source 1..80: mol_type = other DNA
caaatgcttactcacacttctatgatggcttctcaaaaatcccactaaaagatcagtcggcagcgctaggtgattcacta

SEQ ID NO: 153752 - DNA, 80 bp, synthetic construct
  source 1..80: mol_type = other DNA
acagcctttctgctcgctttcgggacggtggtgctccaagaccacctccaggcctagaccagccgaacccagacccgcag

SEQ ID NO: 153753 - DNA, 80 bp, synthetic construct
  source 1..80: mol_type = other DNA
aacgacagaagaagagacagaagccccatcagaaacggaggaagagaacaaccaagagcagcagctcctcagaaggctcc

SEQ ID NO: 153754 - DNA, 80 bp, synthetic construct
  source 1..80: mol_type = other DNA
aacccactagaaccaggagacacagtacaaaccagacacgtaatccagactaggtctcggagcgagagtacagttgagtc

SEQ ID NO: 153755 - DNA, 80 bp, synthetic construct
  source 1..80: mol_type = other DNA
gctcaggtttcctctcagaaagttggagcacacgagaacaccaacgtggcgactggtggttctacagtaaactataccac

SEQ ID NO: 153756 - DNA, 80 bp, synthetic construct
  source 1..80: mol_type = other DNA
taaaggacatggttcagttgcgcagaaagtttgaaatgttcacctacatgcgtttcgacattgaagtaacgtttgtcatc

SEQ ID NO: 153757 - DNA, 80 bp, synthetic construct
  source 1..80: mol_type = other DNA
gaactcaaaaagatggaggctcaagtgtcaactcaaaaatctggatctcatgaaactggtaatgtggccacagggggatc

SEQ ID NO: 153758 - DNA, 80 bp, synthetic construct
  source 1..80: mol_type = other DNA
acaaaaagttgagttcgcatgacaatgcgataaatgcttcttctggatctgttgttaagtattttaacataaattattac

SEQ ID NO: 153759 - DNA, 80 bp, synthetic construct
  source 1..80: mol_type = other DNA
ttgtgtgaaaatattgagatacgcgatgaatgttttcgctatctatattataaagcgtttcagtgtcacctaggggttgt

SEQ ID NO: 153760 - DNA, 80 bp, synthetic construct
  source 1..80: mol_type = other DNA
tcaactgagaccatcgcaatcatgaagtcctccaagaatgacacgttcgtctatagaacgtggttcaaaacgcttgttgt

SEQ ID NO: 153761 - DNA, 80 bp, synthetic construct
  source 1..80: mol_type = other DNA
caaccagggaccaacaccatccttctggccatttcatctgatttgcaggtcgacagtgtcgactcgccaggagatgatgt

SEQ ID NO: 153762 - DNA, 80 bp, synthetic construct
  source 1..80: mol_type = other DNA
aggcttcttgagggttgtacacacttatgacactgctaacaatagattaattaacttggcctctaatggcgtgattacca

SEQ ID NO: 153763 - DNA, 80 bp, synthetic construct
  source 1..80: mol_type = other DNA
gtggaagtcacctttgtcataaccagtgtgcaggatgattccacaagacagaacactgacaccccggtcctgacccacca

SEQ ID NO: 153764 - DNA, 80 bp, synthetic construct
  source 1..80: mol_type = other DNA
ttatgaacgatatctgcaagaccggaccgtacgcttacagagacgagtacaaaaacgtggtcctgaccgcctactacacc

SEQ ID NO: 153765 - DNA, 80 bp, synthetic construct
  source 1..80: mol_type = other DNA
tccagaaagttgtggtagacggggatgtagttgagcggctcctgggtgtctgcggagacgtaggccgggttaaggtggtc

SEQ ID NO: 153766 - DNA, 80 bp, synthetic construct
  source 1..80: mol_type = other DNA
agtaatcaaagtcaatgtaatgatacctggtactatggaaaaacttatacaaatgagatatctaaagcagcaaaacaaat

SEQ ID NO: 153767 - DNA, 80 bp, synthetic construct
  source 1..80: mol_type = other DNA
ataaccccagcgcagatgcaaatgaaggacgtaagtttgctgctttagattatctgttgggttgcggtgttctggctgga

SEQ ID NO: 153768 - DNA, 80 bp, synthetic construct
  source 1..80: mol_type = other DNA
cctgttgaacgtcatcgtcttcactctgctgctcggcgtcatggtcagcatcgccgcctggtacttcacgtgaaccaccg

SEQ ID NO: 153769 - DNA, 80 bp, synthetic construct
  source 1..80: mol_type = other DNA
caccagtgacctggaatgacaatatccaggtggctgttgaccactattcagcccagctatacatgttggatataaaccct

SEQ ID NO: 153770 - DNA, 80 bp, synthetic construct
  source 1..80: mol_type = other DNA
aaagccctcctccagggagacatcgtggaggctgtggagggagccatctcgcgagtggcagatactgttagtagtgggcc

SEQ ID NO: 153771 - DNA, 80 bp, synthetic construct
  source 1..80: mol_type = other DNA
atcggaacagaaagtatgttaatttggatgactgaacaaggtataatcactaaagaggtccagagagtccaccactctgg

SEQ ID NO: 153772 - DNA, 80 bp, synthetic construct
  source 1..80: mol_type = other DNA
accagactcatgtcaaaccacggtttgttgggcaggggcctctggctgcgttcttgcctcgcctgcttccttgtgctcct

SEQ ID NO: 153773 - DNA, 80 bp, synthetic construct
  source 1..80: mol_type = other DNA
agctcaattaatgactcttgacataaacccaaacaacataactatggaagagagtgtatttggaacagatggcttagagg

SEQ ID NO: 153774 - DNA, 80 bp, synthetic construct
  source 1..80: mol_type = other DNA
cccttgtccaccaaactgccattcttctggtaaacggggattgaggggcaagagctccaaagccaggctcgagaagtcat

SEQ ID NO: 153775 - DNA, 80 bp, synthetic construct
  source 1..80: mol_type = other DNA
tggattcactccgctaaacacattcactccaggtatcatctctatagtgattgaaattaggcaattacatcacaatgggt

SEQ ID NO: 153776 - DNA, 80 bp, synthetic construct
  source 1..80: mol_type = other DNA
actccaattaccccagtcacttctatgaccacctttggatttggacatcagaacaaagcagtctacgttgcaggttataa

SEQ ID NO: 153777 - DNA, 80 bp, synthetic construct
  source 1..80: mol_type = other DNA
tagaagtcaagaagcatgaatggtatgagattcaagaatcagagtattacccaaaacatatacagtacaatatactgata

SEQ ID NO: 153778 - DNA, 80 bp, synthetic construct
  source 1..80: mol_type = other DNA
tatagaccttcaatcaccaccacctccagccataacagatcttcttagatcagttaggaccccagaaattattaaatact

SEQ ID NO: 153779 - DNA, 80 bp, synthetic construct
  source 1..80: mol_type = other DNA
gactggcacagccagaggtaaaattgaagtctacatcagtttgaggtgtcccaacctattcttcccagtcccagctccaa

SEQ ID NO: 153780 - DNA, 80 bp, synthetic construct
  source 1..80: mol_type = other DNA
aaatgtcaaacacacgcccctcaccacgttcatcattgaaagtctctccagtccatatgttgtcaggacgtgctgtcgtt

SEQ ID NO: 153781 - DNA, 80 bp, synthetic construct
  source 1..80: mol_type = other DNA
tagtaattatcccacttagtaagttacaatttccagatgcgtccagtacggaaattccaattaccatcacaattgcccca

SEQ ID NO: 153782 - DNA, 80 bp, synthetic construct
  source 1..80: mol_type = other DNA
taggagagggtccacaaaagaacctgtggcagtacacatacacaggcctcatgtcaaagtactactataaaggcaaccca

SEQ ID NO: 153783 - DNA, 80 bp, synthetic construct
  source 1..80: mol_type = other DNA
ggcaacagagtatatgttcagtgggtcagtgaagcctcctgtaactatgataaaaccaaaagtaaatgcatgctccaaga

SEQ ID NO: 153784 - DNA, 80 bp, synthetic construct
  source 1..80: mol_type = other DNA
agggacgacggccccggggaccgcggaggagataacggccgcgaggccacacactcgttcccgcgaagccgcacaccccg

SEQ ID NO: 153785 - DNA, 80 bp, synthetic construct
  source 1..80: mol_type = other DNA
gtgattgcacagtaggttgctactatgttaaacatttagatagatacttcccagtcacagtgactgctcatgattggtat

SEQ ID NO: 153786 - DNA, 80 bp, synthetic construct
  source 1..80: mol_type = other DNA
ctgggagtttacgacaatgtggctatactacccacccactcagctccaggtgatacaatagttattgatggaaaggaggt

SEQ ID NO: 153787 - DNA, 80 bp, synthetic construct
  source 1..80: mol_type = other DNA
catgagaacactattagtacagggaatggatcaattgtcaagtatttcaacatcaattactataaggatgcagcaagctc

SEQ ID NO: 153788 - DNA, 80 bp, synthetic construct
  source 1..80: mol_type = other DNA
aatatcttccgggtcaaaggtcgctaccgcgtcataagtcacgtggggacggctgctgtaaacacggaagtagctgaccc

SEQ ID NO: 153789 - DNA, 80 bp, synthetic construct
  source 1..80: mol_type = other DNA
ttgaggacttgacttgggacaccatcactttcttaaaaagaggttttaaaccagatacagaatttcctttccttatacac

SEQ ID NO: 153790 - DNA, 80 bp, synthetic construct
  source 1..80: mol_type = other DNA
aagctatccttttggccttacaagagtcaggacaggaagcaaacatagtcactgactctcagtatgctatgggaataatt

SEQ ID NO: 153791 - DNA, 80 bp, synthetic construct
  source 1..80: mol_type = other DNA
attctatcttagtatcttattcatcagatttaatcatttaccgaacaaacactataggtgatgattatattccttcttgt

SEQ ID NO: 153792 - DNA, 80 bp, synthetic construct
  source 1..80: mol_type = other DNA
ttgcaacaagggtcagtgattcatatgatatgtacaataaacaaggaattaaactagagattacagctgtactattggat

SEQ ID NO: 153793 - DNA, 80 bp, synthetic construct
  source 1..80: mol_type = other DNA
tccattcaacctcctccgaaggcaatacaagcccttcacaaatctatacaacatccgagcctatcacatccatctccatc

SEQ ID NO: 153794 - DNA, 80 bp, synthetic construct
  source 1..80: mol_type = other DNA
tttctaccaaaccaaaattgtcgtgcccttgagtactccaactaaaatggatatgttagcgtttgtgagtgcttgtcccg

SEQ ID NO: 153795 - DNA, 80 bp, synthetic construct
  source 1..80: mol_type = other DNA
aagaatctgcctctgtgggccgccctatttggctactcagaatacatagagagccagctaggccccttccaagaccacga

SEQ ID NO: 153796 - DNA, 80 bp, synthetic construct
  source 1..80: mol_type = other DNA
gcgtagacgacttcacatggcaaacgtccacaaaccctagtgtgttttggtcagaaggtaatgcacccccaaggatgaca

SEQ ID NO: 153797 - DNA, 80 bp, synthetic construct
  source 1..80: mol_type = other DNA
gcaccaatataagcagatgttacatgaatcactgcaacacctctgtgattcaggaatcctgtgacaagcattattgggat

SEQ ID NO: 153798 - DNA, 80 bp, synthetic construct
  source 1..80: mol_type = other DNA
cgcacccaaacaaaacaaacccagcatacagctagtagcaaaatacaaatttgactttaactggggtggcaaccccatat

SEQ ID NO: 153799 - DNA, 80 bp, synthetic construct
  source 1..80: mol_type = other DNA
ctcatcaagcagcagctccaactcctgctcctccaaatattcaaaacacaagcaaatattcacataaacccacgtttcat

SEQ ID NO: 153800 - DNA, 80 bp, synthetic construct
  source 1..80: mol_type = other DNA
gcgctgggatcgggggtggcgccggggacggagggctttcgcagcggagaacacacaccgcctatttaacctacacccgc

SEQ ID NO: 153801 - DNA, 80 bp, synthetic construct
  source 1..80: mol_type = other DNA
cggaaatggtttcccgcagaacctgaagatgttcgcgattatcttctatatcttcaggcgcgcggtctggcagtaaaaac

SEQ ID NO: 153802 - DNA, 80 bp, synthetic construct
  source 1..80: mol_type = other DNA
tgttcaattcaaatgctaaagctatcaatgcaaacgtgggttatgtcacttgcttcatgcagacaaaccttatcgcacct

SEQ ID NO: 153803 - DNA, 80 bp, synthetic construct
  source 1..80: mol_type = other DNA
aacgttttttatatacaacgtttcccaaaatcatagcggcacttattatcgaaaaggtgacaactgtaccgacaaacata

SEQ ID NO: 153804 - DNA, 80 bp, synthetic construct
  source 1..80: mol_type = other DNA
cccttcccctccccccacgggtggctgggtcacggaccccggttcctaggctcgttccgcggtgggcgaccggagatccc

SEQ ID NO: 153805 - DNA, 80 bp, synthetic construct
  source 1..80: mol_type = other DNA
aataacaaccagcagggtaatcccgcaacataaatacaaagtcacagcgaagaatccgtgtcgttctatcaagcgaaacg

SEQ ID NO: 153806 - DNA, 80 bp, synthetic construct
  source 1..80: mol_type = other DNA
ggcattctgcaaacatccccccatcatattaaaggcgccagtgaatttctcttccgtctgggtatattttttcagcatgt

SEQ ID NO: 153807 - DNA, 80 bp, synthetic construct
  source 1..80: mol_type = other DNA
tgctgtctcccgcgtagcagacactatcagcagcggtcccagcaattcccaggccgtgccagcacttacggcagttgaga

SEQ ID NO: 153808 - DNA, 80 bp, synthetic construct
  source 1..80: mol_type = other DNA
tcctcgaacacggtgccgcgcgaagcccacactgacggcgtcacgccccacagatgcgccacctcgtcgtcgggacccac

SEQ ID NO: 153809 - DNA, 80 bp, synthetic construct
  source 1..80: mol_type = other DNA
tatgacatagttgctccctacgcgctagacaaaaacagcagcccctcttacgccccgggaatcatgatgcaggccaaaaa

SEQ ID NO: 153810 - DNA, 80 bp, synthetic construct
  source 1..80: mol_type = other DNA
ccccggttgacgttgatatgctccaacagggcaaaaacaactgatatcgttatccgccaagtgcctacacagagcttagt

SEQ ID NO: 153811 - DNA, 80 bp, synthetic construct
  source 1..80: mol_type = other DNA
ttaaataacatggattgctgtagcgggatgatttcgcctacgacgtagttaccaaagtgcgtttcggacgtggcaaaagc

SEQ ID NO: 153812 - DNA, 80 bp, synthetic construct
  source 1..80: mol_type = other DNA
taacagtactgtacaatgactttttaagacacatgaacttttggacaaaaagcaaccaagacttagaacttgctagatac

SEQ ID NO: 153813 - DNA, 80 bp, synthetic construct
  source 1..80: mol_type = other DNA
ccagtggaagctccagtagacactatgtataccaaatcatgtacatacctccgggggccccggtgccgagtaagtgggat

SEQ ID NO: 153814 - DNA, 80 bp, synthetic construct
  source 1..80: mol_type = other DNA
aaggtggtattgatttgtcaacaaatgtagaggcagatggacctgttaaggacccagtttataatatgaatggtacacta

SEQ ID NO: 153815 - DNA, 80 bp, synthetic construct
  source 1..80: mol_type = other DNA
tgggccccagtgatatgtatgtacacaccaaggaggcaatttataggtgtgcccacctgaccaatccaaatgagaataca

SEQ ID NO: 153816 - DNA, 80 bp, synthetic construct
  source 1..80: mol_type = other DNA
atggctagggtagactctttcatgcctataaacaaccagccacaaacccaaaacgtaggaatatactacattacattgac

SEQ ID NO: 153817 - DNA, 80 bp, synthetic construct
  source 1..80: mol_type = other DNA
attttatcaaactgccatagtggtcccttcaggtgcacctaaaacaatgagcatgttagcctttgttagcgcgtgcaatg

SEQ ID NO: 153818 - DNA, 80 bp, synthetic construct
  source 1..80: mol_type = other DNA
ttgaagcaattgggaatgttggagaaccaaattaacactatacatcaatcttgccccagccaagaacaacaggaaatctt

SEQ ID NO: 153819 - DNA, 80 bp, synthetic construct
  source 1..80: mol_type = other DNA
gtacaaaatttgcaactaccaccttgccactccagaggatcacaacagggcagtcagcgtcatgtggaacagggatttac

SEQ ID NO: 153820 - DNA, 80 bp, synthetic construct
  source 1..80: mol_type = other DNA
tgacgtcaaagtcacgtggtgacggccattttaacccggaagtggctgttgtcacgtgacttgacgtcacggccgccatt

SEQ ID NO: 153821 - DNA, 80 bp, synthetic construct
  source 1..80: mol_type = other DNA
agaaaacaaaattatcctaagccaggagcaggagggatgctattaccaagaggaaaaggaactagaggcaacagtccaaa

SEQ ID NO: 153822 - DNA, 80 bp, synthetic construct
  source 1..80: mol_type = other DNA
gggcacggccaccaggtcagagacatcgcagtcgacctcgatatcacaagtcgacgcgcgaccctgctgccgccagtcgt

SEQ ID NO: 153823 - DNA, 80 bp, synthetic construct
  source 1..80: mol_type = other DNA
caaaaactatatgataccctattcacacaacagtcctcaggtcactactggcagacattcattacaaattccatggtaaa

SEQ ID NO: 153824 - DNA, 80 bp, synthetic construct
  source 1..80: mol_type = other DNA
ccccgttgatactgtggcacgagtgtattttaaaccaaaacatgttaaggcttgggtgccacgacccccgcgcctgtgtc

SEQ ID NO: 153825 - DNA, 80 bp, synthetic construct
  source 1..80: mol_type = other DNA
ggtcacctacaatgacaccttcggccgtggcaagtggacagacggggggggctacgtccctcttatagagagaggacgct

SEQ ID NO: 153826 - DNA, 80 bp, synthetic construct
  source 1..80: mol_type = other DNA
tccagcaactcaaccaatccctccacagcaccacatccaccatacaatgccacccaaccaggagaagcaggcaaggagtt

SEQ ID NO: 153827 - DNA, 80 bp, synthetic construct
  source 1..80: mol_type = other DNA
cgtcatggccgccattttgagtaggtgccgtccagggttggcgttccgggtcaaaggccatcctcggcggaacctaccta

SEQ ID NO: 153828 - DNA, 80 bp, synthetic construct
  source 1..80: mol_type = other DNA
aaagacgcagacgcaggaaaaagcatgtactgactcaatggaacccaccctttgtcagacgctgtacataacaggcatgc

SEQ ID NO: 153829 - DNA, 80 bp, synthetic construct
  source 1..80: mol_type = other DNA
cccatgtggagttgtactctattattccggtaattttgtacgccagttttatctccccttccccttttgtaacttagaag

SEQ ID NO: 153830 - DNA, 80 bp, synthetic construct
  source 1..80: mol_type = other DNA
cggaggtgacaaaaccaagaaacgacctaaatgatgtgccaaaatctgaacatgccctgcatacttttggagcctttggc

SEQ ID NO: 153831 - DNA, 80 bp, synthetic construct
  source 1..80: mol_type = other DNA
ccactaataatatgtggagagaacaccttctcccacaactatgccacccactcggacgatatggtctctacaggggccta

SEQ ID NO: 153832 - DNA, 80 bp, synthetic construct
  source 1..80: mol_type = other DNA
cacactcctagatggtgatcttctagcctttgattatacaaattatgatggtagtctacacccagtatggttcaaggcac

SEQ ID NO: 153833 - DNA, 80 bp, synthetic construct
  source 1..80: mol_type = other DNA
tcacgaccaaattgtgtaacacaacccacatatacaaaaacaaaatctatactacagagggtggtatgccgtctggcatc

SEQ ID NO: 153834 - DNA, 80 bp, synthetic construct
  source 1..80: mol_type = other DNA
ctttctctgccgctcggcatgtgtgtactatactacatacgacacgcatggagatgaagcggacgccaaatatgccaatt

SEQ ID NO: 153835 - DNA, 80 bp, synthetic construct
  source 1..80: mol_type = other DNA
tatgatcactgcaggtggtgataaccaggtcgctttcacagacttgagaccatacagggatctaaaccagcaccagggtg

SEQ ID NO: 153836 - DNA, 80 bp, synthetic construct
  source 1..80: mol_type = other DNA
cagtgtgcaatcacgaaaacaaaactatcagttgttatcatccctcacgttcagcgtacaatcacaaaaacgagtttttc

SEQ ID NO: 153837 - DNA, 80 bp, synthetic construct
  source 1..80: mol_type = other DNA
gcgcagtcgccgagatacagaagcactccaatccagccaagaagagcacgaaaaagaaaacttacttttcccagtccagc

SEQ ID NO: 153838 - DNA, 80 bp, synthetic construct
  source 1..80: mol_type = other DNA
aacataacaattgggggattgtaattttacctttcgtgccacttaaatatgaggccggtgcgtcaacagcaatccctata

SEQ ID NO: 153839 - DNA, 80 bp, synthetic construct
  source 1..80: mol_type = other DNA
tttccaccctttcctggaggggtccggaacaccgtgaatccgcggcgagggtctcggcacgggccgaggagaccacgacc

SEQ ID NO: 153840 - DNA, 80 bp, synthetic construct
  source 1..80: mol_type = other DNA
atctagaacatgacagggtagtgcttcaactgaaagagctattaaatgacataggattctctaccccagaagaaaagttc

SEQ ID NO: 153841 - DNA, 80 bp, synthetic construct
  source 1..80: mol_type = other DNA
tcttaaaatgtttctcggcagagtgtaccgccagaagaaaaggaaactgctactgctggctgtgcagactccaccggagg

SEQ ID NO: 153842 - DNA, 80 bp, synthetic construct
  source 1..80: mol_type = other DNA
gccagggcaagtggtcagagaactttaccagtcacatagaggacaaggtggccaagggaccctttgggtgcgggcacagc

SEQ ID NO: 153843 - DNA, 80 bp, synthetic construct
  source 1..80: mol_type = other DNA
tgtttagaacaacctttggaaatcttttctcaaaatttcacctgaaccctgggattgtgactggctctgctgtgggttgt

SEQ ID NO: 153844 - DNA, 80 bp, synthetic construct
  source 1..80: mol_type = other DNA
ccccactggcgacagtgactcagcctgcgtggctgcctacacacctggcaacaggtgtgaagccatagaaaggacagggt

SEQ ID NO: 153845 - DNA, 80 bp, synthetic construct
  source 1..80: mol_type = other DNA
gagtggttctggcatcagctaacatcaacagagtcagacacactaggccagtacggacgtgccagtattaaatatatgga

SEQ ID NO: 153846 - DNA, 80 bp, synthetic construct
  source 1..80: mol_type = other DNA
attgtaaacaaaagaactggcttattccagaaatcccaactaacatagagagggcagtaaaccaagctagcactataatc

SEQ ID NO: 153847 - DNA, 80 bp, synthetic construct
  source 1..80: mol_type = other DNA
cggaagattcgcgggcggtggtcatgttggtttcggttgtaggttcgctactcgtagtgctctcgacggtatttctgctg

SEQ ID NO: 153848 - DNA, 80 bp, synthetic construct
  source 1..80: mol_type = other DNA
cggagacacacccggagcgagaacccgggacctcagcaatggcctactggtggcgccgccgccgctggccgtggagacgg

SEQ ID NO: 153849 - DNA, 80 bp, synthetic construct
  source 1..80: mol_type = other DNA
tataactacaacatcaaaagaatgggaatacacatacacaggcctaatggaaaaattctttaaacaagccacaaacaaac

SEQ ID NO: 153850 - DNA, 80 bp, synthetic construct
  source 1..80: mol_type = other DNA
ctgcacaattcacaaggggtaaaacttgaaattacagtggtcaaactaaatagaaatgagaaatttagggatatcaggaa

SEQ ID NO: 153851 - DNA, 80 bp, synthetic construct
  source 1..80: mol_type = other DNA
tgccgcacaacgcggcctacgagctcgaccgtggctcccgcctcttggatgccatcatcccctgcttgggacccgaccgc

SEQ ID NO: 153852 - DNA, 80 bp, synthetic construct
  source 1..80: mol_type = other DNA
cagaggcccagtttagagtacccgcatacagtccagacggtgaagtaaattcacataaacaaacctggaataacatgtgg

SEQ ID NO: 153853 - DNA, 80 bp, synthetic construct
  source 1..80: mol_type = other DNA
ccccccagtgctgtgtaacatttaagctcgggttcaaataaacaaggccgtgcactgttcacttgtcggtgtctacctct

SEQ ID NO: 153854 - DNA, 80 bp, synthetic construct
  source 1..80: mol_type = other DNA
actgggatgtttttaccaactggtttgacttaacctcctggatcagctatattcaatatggagtttatatagtagtagga

SEQ ID NO: 153855 - DNA, 80 bp, synthetic construct
  source 1..80: mol_type = other DNA
agctacagcagctaagagcatactactttaagtgggagactcaacacacaggggtagcagtcccacctacgtggaccacc

SEQ ID NO: 153856 - DNA, 80 bp, synthetic construct
  source 1..80: mol_type = other DNA
caacaacacgggggaaacactcaacacaaccacatcccagaacatattaaatgaaagcttttcatgcataaaagataaca

SEQ ID NO: 153857 - DNA, 80 bp, synthetic construct
  source 1..80: mol_type = other DNA
tttatcatgcaaatttcttcctttgtatgctagtgaagcaaagaggatcaaggttctgtataataaatgcaataacataa

SEQ ID NO: 153858 - DNA, 80 bp, synthetic construct
  source 1..80: mol_type = other DNA
atctgcgacagcacctccaacagcaccacctttggggctgcaaattgcaaaaagtagagcgggtcggatcggtcaaatcc

SEQ ID NO: 153859 - DNA, 80 bp, synthetic construct
  source 1..80: mol_type = other DNA
acaggtattaattaatggattttctacaaagctcaaggacaaatggaagttagtagatccagatgatataaatttggaaa

SEQ ID NO: 153860 - DNA, 80 bp, synthetic construct
  source 1..80: mol_type = other DNA
aaggctcttagggttatcattcttaaaacatgttttttggcaggccgtggagaaagaaaaggaaagtgccactgccgcct

SEQ ID NO: 153861 - DNA, 80 bp, synthetic construct
  source 1..80: mol_type = other DNA
gcccagtgacacaatgcaaacgcgccatgtgaaaaattatcactcgcggtctgaatcgacaatcgaaaacttcctcagtc

SEQ ID NO: 153862 - DNA, 80 bp, synthetic construct
  source 1..80: mol_type = other DNA
aaaaggaagactcgaaagatgaaagggcttataaccccacattaccagttgccaaaccaaaaggaacgtttcctgtcaca

SEQ ID NO: 153863 - DNA, 80 bp, synthetic construct
  source 1..80: mol_type = other DNA
aatatcttaacccaaacagaacttttacaacagcatcagacgggtttgatgcgccgctgaaaacatggctaagtaaaaat

SEQ ID NO: 153864 - DNA, 80 bp, synthetic construct
  source 1..80: mol_type = other DNA
tcctattccacccgtcgccgccaaggagccaagaagagatccagcaagagcagcagcgagacctccacctcagactcgga

SEQ ID NO: 153865 - DNA, 80 bp, synthetic construct
  source 1..80: mol_type = other DNA
cattttaaaaggggatgcacttgcctgggtggaggacatggaccgggagagtggagaccaggacctccgcctcctcgccc

SEQ ID NO: 153866 - DNA, 80 bp, synthetic construct
  source 1..80: mol_type = other DNA
gtacctcctcagacgactccagcaacagcgggagttgggacgaggcctcagatgcctcttccagcaactaacccgcaccc

SEQ ID NO: 153867 - DNA, 80 bp, synthetic construct
  source 1..80: mol_type = other DNA
cattcccccaggtgcacccacgccaaggtcgtgggacgactacacttggcaaacatcatccaacccatccatattttaca

SEQ ID NO: 153868 - DNA, 80 bp, synthetic construct
  source 1..80: mol_type = other DNA
gtgcaagaaaatcccattatataaggagcaggttaaagcctttgctactgcatcagaagaagcccaggatgaactgataa

SEQ ID NO: 153869 - DNA, 80 bp, synthetic construct
  source 1..80: mol_type = other DNA
ggttccacgtggttactgccgaccatgaccctccagtcgttaatctcgctccagtcgtacagccgaatcgtggagacgcg

SEQ ID NO: 153870 - DNA, 80 bp, synthetic construct
  source 1..80: mol_type = other DNA
tgataacatacccacttgtgactgcaccacaggcacttattactgtaaaagcagggatagatactatccaatcaacctaa

SEQ ID NO: 153871 - DNA, 80 bp, synthetic construct
  source 1..80: mol_type = other DNA
gtcaagcacttctgtttccccggcatgcgaggaatagaccctcccaagggttgaagccacaagtgtcgttacccgcattg

SEQ ID NO: 153872 - DNA, 80 bp, synthetic construct
  source 1..80: mol_type = other DNA
ggacattctgaatcgagaaactcaagatgtggaaaagatgaaactctacctagataagtatggaatagatttacccttag

SEQ ID NO: 153873 - DNA, 80 bp, synthetic construct
  source 1..80: mol_type = other DNA
ttacctacctgcgttttgatatggagatcacctttgtcattaccagcacacaagaccctgggacccagttagcgcaggac

SEQ ID NO: 153874 - DNA, 80 bp, synthetic construct
  source 1..80: mol_type = other DNA
tcactaacaatccccccatgaaaaccaaccagtacacttcctgggcatggtctacgtgataatataaagcggtgcacttc

SEQ ID NO: 153875 - DNA, 80 bp, synthetic construct
  source 1..80: mol_type = other DNA
gtcctcacaccacctactgtctcatcacctgaagccatagatagaagattcttcttggactgcgatgtcaaaatcatgcc

SEQ ID NO: 153876 - DNA, 80 bp, synthetic construct
  source 1..80: mol_type = other DNA
ttgactggttaaaatctaagattgttcccacagttcaaagaaaggctgagacactacgtgagtgcaagaaaatccccctt

SEQ ID NO: 153877 - DNA, 80 bp, synthetic construct
  source 1..80: mol_type = other DNA
tgaggctagaaatcccccactggcgacagtgttctagcctgcgtggctgcctgcgcaccccttgggtgcgaagccataca

SEQ ID NO: 153878 - DNA, 80 bp, synthetic construct
  source 1..80: mol_type = other DNA
tcaccttttacagacaccccacagcagactttatagttacctacaacagaaaaactccactaggaggaaacatactaaca

SEQ ID NO: 153879 - DNA, 80 bp, synthetic construct
  source 1..80: mol_type = other DNA
aggaaagttgaacgcggcaatggctacagagctttgcaaggactgccacaaacccagtaatttcaacaggtgttgcccat

SEQ ID NO: 153880 - DNA, 80 bp, synthetic construct
  source 1..80: mol_type = other DNA
gaatgagagccaagtggtacgtgaacatatttcaccagcaagagttcatggaggccatagttgaaagcggaccgtttgct

SEQ ID NO: 153881 - DNA, 80 bp, synthetic construct
  source 1..80: mol_type = other DNA
ttggttggtcgctccgtcaattccccattgatagacctggcagatgaggcaggaaatcccccactggcgacagtgttcct

SEQ ID NO: 153882 - DNA, 80 bp, synthetic construct
  source 1..80: mol_type = other DNA
ttgaaacagtagcacacaatgcactccagatctcccaacccaaacccacgcagaagcctgcgatcaccaacactgcagca

SEQ ID NO: 153883 - DNA, 80 bp, synthetic construct
  source 1..80: mol_type = other DNA
tgtttcagagagaagtaatgaccaccatcagcagggcaggaccctttgcctacagagacgaactgcccagcaccacactg

SEQ ID NO: 153884 - DNA, 80 bp, synthetic construct
  source 1..80: mol_type = other DNA
aattgtatatcttcagttccattcattgtaccaatggcactgaagatatacaatgacaaattttacactagtaaattggt

SEQ ID NO: 153885 - DNA, 80 bp, synthetic construct
  source 1..80: mol_type = other DNA
cctctcagatggaaggtctaacgtagaattcttcactgcctacagagacatagtatacaatcccttcttagacaaggccc

SEQ ID NO: 153886 - DNA, 80 bp, synthetic construct
  source 1..80: mol_type = other DNA
gatggggtggctctcctctgcccactcaggccattgacgacccctgccagaagcccacccacgcactgcccgagcccggt

SEQ ID NO: 153887 - DNA, 80 bp, synthetic construct
  source 1..80: mol_type = other DNA
cggcacaattacacacactagatgttgaccctaggcccataaccgtagaagacagtgtctttggtgtagaaggcttagaa

SEQ ID NO: 153888 - DNA, 80 bp, synthetic construct
  source 1..80: mol_type = other DNA
cgccgtagaaatgttgttgatgttatgtcggcaattttccagggccctatatccatgaatgctcccccaccaccagcaat

SEQ ID NO: 153889 - DNA, 80 bp, synthetic construct
  source 1..80: mol_type = other DNA
ctagcccactaaccatggagcaagcagtttatggtgttcaaaacctagaaccattggacttgactacaagtgctggattc

SEQ ID NO: 153890 - DNA, 80 bp, synthetic construct
  source 1..80: mol_type = other DNA
cagctccatgacgttgcaacattatctgacgtggctctcctgaagcggctgcggaatgccgccgactggtttggcatact

SEQ ID NO: 153891 - DNA, 80 bp, synthetic construct
  source 1..80: mol_type = other DNA
attattaacataagaaatgcaaacttccactacttaactaattgggaccctaagaacagcaatcacattaacagcacata

SEQ ID NO: 153892 - DNA, 80 bp, synthetic construct
  source 1..80: mol_type = other DNA
tagagcgatgtgtttcaataaaaattatgtcgtatcatagtatgcgtgtcctggtttttcatttttggatgtatttgtga

SEQ ID NO: 153893 - DNA, 80 bp, synthetic construct
  source 1..80: mol_type = other DNA
ctatgtcagaatggtcagtaccatcggcctcagactttgatttggacagcatctccgtcttggacggatcaagtgagacc

SEQ ID NO: 153894 - DNA, 80 bp, synthetic construct
  source 1..80: mol_type = other DNA
tgaaaagaggatttcgagtagacaagaagcatagtttccttgtccacccagtttttccagaaaaagaaatttttgaatca

SEQ ID NO: 153895 - DNA, 80 bp, synthetic construct
  source 1..80: mol_type = other DNA
gagcagaagctcctcaagcgaacgctccaccaactcgtcaagcaattagtaaagacccagtatcacctacacgcccccat

SEQ ID NO: 153896 - DNA, 80 bp, synthetic construct
  source 1..80: mol_type = other DNA
caaatggtacttccaaaaagatatctgcaacctgccgctcgttaacattgcagcatctgcgtgcagcttgcggtttccgt

SEQ ID NO: 153897 - DNA, 80 bp, synthetic construct
  source 1..80: mol_type = other DNA
tggacagcatgttgcgtcataataatgtgtcactcgttattatacctatatgccctctgcgagcgccagccacagctccc

SEQ ID NO: 153898 - DNA, 80 bp, synthetic construct
  source 1..80: mol_type = other DNA
tgactggctcagctgtgggatgtgatccagagacattttggtccaagataccagtaatgttagatggtgagtgcataatg

SEQ ID NO: 153899 - DNA, 80 bp, synthetic construct
  source 1..80: mol_type = other DNA
agcattactaccctggggcccagcgacatgtatgttcacacaaaggaagctatctacaggtgtgcacacttaactgagcc

SEQ ID NO: 153900 - DNA, 80 bp, synthetic construct
  source 1..80: mol_type = other DNA
ggcgagcccggaagagaggctcctagacgagctcaataacttaattgtgtcatttctgtgtgactctgggtctctggaag

SEQ ID NO: 153901 - DNA, 80 bp, synthetic construct
  source 1..80: mol_type = other DNA
atgctcagataccagacggacgtcttccatgacatagtgacctgtgggccctggcagtacagagacgacaacaaaaacag

SEQ ID NO: 153902 - DNA, 80 bp, synthetic construct
  source 1..80: mol_type = other DNA
cccacttctacaatcccgtgtataaataaagtgtacatgtttaacccacccatgcccccttctagcaacgactggaaaga

SEQ ID NO: 153903 - DNA, 80 bp, synthetic construct
  source 1..80: mol_type = other DNA
ccaaggatgcaggttaccacacaatcaacactccaactaagagtaaactacacccaagtgtctttcatgatatttttcct

SEQ ID NO: 153904 - DNA, 80 bp, synthetic construct
  source 1..80: mol_type = other DNA
tcacagcagttcagaatcagacagcagctgcagcacctcttcgtacaagtcctcaaaacccaagccggtctccacataaa

SEQ ID NO: 153905 - DNA, 80 bp, synthetic construct
  source 1..80: mol_type = other DNA
gacaattatacttcaggcatgtcaataagtcgactgtggggaagtatgagagtgtggctcgtatatacttcaaaccaaaa

SEQ ID NO: 153906 - DNA, 80 bp, synthetic construct
  source 1..80: mol_type = other DNA
catgacacaaggtgcttactctggtatgccaaccccagtcatcaagcgaccagagctaagacgtgccactgtgcaggggc

SEQ ID NO: 153907 - DNA, 80 bp, synthetic construct
  source 1..80: mol_type = other DNA
gggattgtcgtgccagctggaacgcctacgtcatgttcaattatgtgctttgtgtcagcttgcaatgacttctctgtccg

SEQ ID NO: 153908 - DNA, 80 bp, synthetic construct
  source 1..80: mol_type = other DNA
caagctaagcaacatcgggcaagcaatggagttcactgcgcacaagagtaccgaccaaaccggaccacaaacagcggtgc

SEQ ID NO: 153909 - DNA, 80 bp, synthetic construct
  source 1..80: mol_type = other DNA
cctacggtatgacgtggaagttacatttgtcataaccagctcgcaggacccatccacaaatgtcagtcaagatgctccgg

SEQ ID NO: 153910 - DNA, 80 bp, synthetic construct
  source 1..80: mol_type = other DNA
aaacctggaaccactcgatctcaccacgagtgcaggctttccctatgtcaccatgggggttaaaaagagagacattctga

SEQ ID NO: 153911 - DNA, 80 bp, synthetic construct
  source 1..80: mol_type = other DNA
gatctattacacttggaaactcgactattaccacgcaagagtgtgctaatgtggtggtgggttacggtacgtggccaagt

SEQ ID NO: 153912 - DNA, 80 bp, synthetic construct
  source 1..80: mol_type = other DNA
gaagagatgttttgttataggatactttccattagtaatatgtggacccggaaggtggtcagaaaactttactagtcaca

SEQ ID NO: 153913 - DNA, 80 bp, synthetic construct
  source 1..80: mol_type = other DNA
cttgaacgcacgaaaatgggagctcaagtatcaactcaaaaatctggatctcatgagactggcaacgtggccactggagg

SEQ ID NO: 153914 - DNA, 80 bp, synthetic construct
  source 1..80: mol_type = other DNA
aacagtcatcagtaaatctgtctctcgagtgatttccataggcatggcgtagccggggtggagggccgatatcacatcaa

SEQ ID NO: 153915 - DNA, 80 bp, synthetic construct
  source 1..80: mol_type = other DNA
acagggcacctcacacactgcgctggttaccagcatgatgaggttatattacatggtcactcaattaagtaccttgagca

SEQ ID NO: 153916 - DNA, 80 bp, synthetic construct
  source 1..80: mol_type = other DNA
atccatttgaagatgagagctcctataacacaacatctggaaaacagactatgaaattggcatatttagatagaggcttc

SEQ ID NO: 153917 - DNA, 80 bp, synthetic construct
  source 1..80: mol_type = other DNA
tagcttttgattactcaaactttgatgctagtttgtctccagtgtggtttgactgtttagagcaggtacttagaaaattg

SEQ ID NO: 153918 - DNA, 80 bp, synthetic construct
  source 1..80: mol_type = other DNA
tggacagaggtttctataagcattatggtataatagttgaggactgtgtgtatcaactggactcagatgacatatttaaa

SEQ ID NO: 153919 - DNA, 80 bp, synthetic construct
  source 1..80: mol_type = other DNA
tcctcctgcagctccgagagcagcgaaacctcaagcaccagctgcaacagctcgccagccaagtcctcaaagtccaagcg

SEQ ID NO: 153920 - DNA, 80 bp, synthetic construct
  source 1..80: mol_type = other DNA
gtggaacccgttagggttccaccgtcctcggtgtacgtacaggcttctccgtctaccggaaatatacacctgctgacgta

SEQ ID NO: 153921 - DNA, 80 bp, synthetic construct
  source 1..80: mol_type = other DNA
aagagctcctaaagagaagtgaaatgattctgcgcacctctaagagaacagaaccagttggggtgctcttccatggtgaa

SEQ ID NO: 153922 - DNA, 80 bp, synthetic construct
  source 1..80: mol_type = other DNA
gtaaatttgttataaccagaatagcggtcatagctgtttcctggggtgggtacaacccacaggctgttttaaactggccg

SEQ ID NO: 153923 - DNA, 80 bp, synthetic construct
  source 1..80: mol_type = other DNA
gtctacatccagtatggtttcaagcacttgaacaactcctgaataacttaggctttcctggtgagttggcatacaagcta

SEQ ID NO: 153924 - DNA, 80 bp, synthetic construct
  source 1..80: mol_type = other DNA
acaactgatttccatgtacccatggcagcactagaagataagggcatgtgttttactagcgagtatgtgttagctagcac

SEQ ID NO: 153925 - DNA, 80 bp, synthetic construct
  source 1..80: mol_type = other DNA
ttttctgggcagatcagctctgtgggccaacgtgaacatgtcagatggttatgcatcatggtcaattacttaccaaggaa

SEQ ID NO: 153926 - DNA, 80 bp, synthetic construct
  source 1..80: mol_type = other DNA
gtttcagacgggatatcaagggtattgaaaccatgggccccagtgacatgtatgtgcatacacagaatgccaagtatacc

SEQ ID NO: 153927 - DNA, 80 bp, synthetic construct
  source 1..80: mol_type = other DNA
tgttccctgttggaccgagctgaagagtgaccctagtttgtggaccaactactttgggtgtccgtgtttctctttttatt

SEQ ID NO: 153928 - DNA, 80 bp, synthetic construct
  source 1..80: mol_type = other DNA
cattaaatgacatgggccagttgtactttagacatgtgaatgaaggaagtccgggagcagtgacaagctatgtcagaata

SEQ ID NO: 153929 - DNA, 80 bp, synthetic construct
  source 1..80: mol_type = other DNA
tatccctggttgcccagggcacctcaaagcttcaaagtcagctttaaactaggctttcagccctaaataaaatgcaaggc

SEQ ID NO: 153930 - DNA, 80 bp, synthetic construct
  source 1..80: mol_type = other DNA
ttaaaataactcagtggcagcccagcgcagtaaagagggcatttatcatagggtactttccagctgtcatatgcggaccc

SEQ ID NO: 153931 - DNA, 80 bp, synthetic construct
  source 1..80: mol_type = other DNA
tcccacaatagcatggcctctaggtagggtggtgatgacgcgaaagcccagttttcccgtgcatatgcaaaaggggagca

SEQ ID NO: 153932 - DNA, 80 bp, synthetic construct
  source 1..80: mol_type = other DNA
ggaaaaacttgtacctagtgtgcaggcaaagaaacaaatattaattgaatgtaaaaagattcccctataccaggaacaag

SEQ ID NO: 153933 - DNA, 80 bp, synthetic construct
  source 1..80: mol_type = other DNA
cgacgactggccatgaccgcgccacagcagagccagcaccagcagaagagccagcaccagcgggcccagagtcgcaaagc

SEQ ID NO: 153934 - DNA, 80 bp, synthetic construct
  source 1..80: mol_type = other DNA
atataagtaagtgtacttccgaatggctgagttttccacgcccgtccgcagcgagaacgcaccgaagggagatcctcgcg

SEQ ID NO: 153935 - DNA, 80 bp, synthetic construct
  source 1..80: mol_type = other DNA
gcgttcacatagcaaagtatgaggcaggtgcaaatgcaaacaatgaagacaggtttgtgaggtgggaaataaataacaag

SEQ ID NO: 153936 - DNA, 80 bp, synthetic construct
  source 1..80: mol_type = other DNA
tatcagcccaatgtttgccgaattttctggagcaagaaacgcagtggttcaacagggtttaccagtgatgcttacaccag

SEQ ID NO: 153937 - DNA, 80 bp, synthetic construct
  source 1..80: mol_type = other DNA
gatgtggaaaatcactcatcacatctgtaattgcacgtggcttgacctctgaggcccaaatttattcactacccccagac

SEQ ID NO: 153938 - DNA, 80 bp, synthetic construct
  source 1..80: mol_type = other DNA
gtcattttagatacacaactccagatacatactcaatggctggatatataacatgttggtatcaaacaaactttgtcttt

SEQ ID NO: 153939 - DNA, 80 bp, synthetic construct
  source 1..80: mol_type = other DNA
gataatcaccaccaaaactacacttgaatgcaatttacccagtattcacacaccaagcaaaaccaagctacagcctagtg

SEQ ID NO: 153940 - DNA, 80 bp, synthetic construct
  source 1..80: mol_type = other DNA
cctaaactactttgactactacacaggtatgttcagcagcatatttttagccagcggcaggtcaaactgggaggtaaaag

SEQ ID NO: 153941 - DNA, 80 bp, synthetic construct
  source 1..80: mol_type = other DNA
agcccaagagtttcctggactatacacagatataatatacaatccttgggtagataaaggcacaggtaacagagtatggc

SEQ ID NO: 153942 - DNA, 80 bp, synthetic construct
  source 1..80: mol_type = other DNA
acaaatgtacaaagtaccttatgacagtaactttggcttccctacatacataccaaacacatcatacatattttcaagaa

SEQ ID NO: 153943 - DNA, 80 bp, synthetic construct
  source 1..80: mol_type = other DNA
gtttatgcactctacaaactaatgtgtatagcacaaggaccatacacaggatttacacagccatcacccaaaaagccaga

SEQ ID NO: 153944 - DNA, 80 bp, synthetic construct
  source 1..80: mol_type = other DNA
tcggcgggattcggggccagctgctgcgtaacgtcattgtccaccgacacgcgcacggcgcgggtgaaagtggtgcaggt

SEQ ID NO: 153945 - DNA, 80 bp, synthetic construct
  source 1..80: mol_type = other DNA
atacaaaatgaaaatagtagatgacttcagctcaaacgctgagaagtacttccaacaaagagcaggatctgtagtaacag

SEQ ID NO: 153946 - DNA, 80 bp, synthetic construct
  source 1..80: mol_type = other DNA
ccaacaaaaccaacatgacagaaatacttaaatggtattttaaacaagaaacactatcaaatgacccacacgggcaatac

SEQ ID NO: 153947 - DNA, 80 bp, synthetic construct
  source 1..80: mol_type = other DNA
gggcatatcagattacatacactcattaggggaagcctttggtgctggcttcattgataacatcaaagatcaaatccaga

SEQ ID NO: 153948 - DNA, 80 bp, synthetic construct
  source 1..80: mol_type = other DNA
tctccaccagccgaaggcaactggcaataaggtgggtggacatagacgcttaaagtgtgttgtacatattcttttctagc

SEQ ID NO: 153949 - DNA, 80 bp, synthetic construct
  source 1..80: mol_type = other DNA
gaaagaaagaaatcatttttctttttaatgcctaaatcacgtatgactactcccgtagctgtgtccatcttcatttgaga

SEQ ID NO: 153950 - DNA, 80 bp, synthetic construct
  source 1..80: mol_type = other DNA
ccaggagtcctgctggttcgcagcaatttatgacaacagaagatgagcaatccccaaacatactacctgagtatagccca

SEQ ID NO: 153951 - DNA, 80 bp, synthetic construct
  source 1..80: mol_type = other DNA
tggacaaaggcataggcaacatggtctggatagactacctcagcaaagaagatgcagtttacactcccagaaccagtaaa

SEQ ID NO: 153952 - DNA, 80 bp, synthetic construct
  source 1..80: mol_type = other DNA
tctcatcaaagggtgtatatggtttggacactctgaacaacatgggtacactgtacatccgtcatgtcaatgggcctaac

SEQ ID NO: 153953 - DNA, 80 bp, synthetic construct
  source 1..80: mol_type = other DNA
tggtggaagcgacggaggcgcggctggtggaggagactctggacgagacgccgcagagctgcccgaagacgacctcgatg

SEQ ID NO: 153954 - DNA, 80 bp, synthetic construct
  source 1..80: mol_type = other DNA
acatacaacccaaactgtgacaggggcaaaggcaacagaatctggttccagtacggaaccaagcaggacacctggtttaa

SEQ ID NO: 153955 - DNA, 80 bp, synthetic construct
  source 1..80: mol_type = other DNA
cctcggggaagatggggtgcctggccaggtcacccaaggattactgcgcggatctaaacaaggaggaagatgccaactcg

SEQ ID NO: 153956 - DNA, 80 bp, synthetic construct
  source 1..80: mol_type = other DNA
tgcaatgacttttccgttcgcctgttgaaggatacaccattcataacacaacagaacttctttcaaggtgacgacccgac

SEQ ID NO: 153957 - DNA, 80 bp, synthetic construct
  source 1..80: mol_type = other DNA
caatgaggaagcagcagactgggacgcacagcatccaaggcagctaccggcacctccggggctgcgcgacccgtcagggt

SEQ ID NO: 153958 - DNA, 80 bp, synthetic construct
  source 1..80: mol_type = other DNA
ggaaagcaattcagctaatggatagacacacaagggtaagatattcagttgatcagcttacaacaatgatgatcaatgag

SEQ ID NO: 153959 - DNA, 80 bp, synthetic construct
  source 1..80: mol_type = other DNA
ttactgaaaagcgagacaacataaactgggtcccccagatacaacacaccgacacgtacactaatcatgggaagtttgga

SEQ ID NO: 153960 - DNA, 80 bp, synthetic construct
  source 1..80: mol_type = other DNA
ggagtggatttacacagcaaattggagacaaagtttctgaaatcaccagtatgataaccagtaccatcactgaaaaacta

SEQ ID NO: 153961 - DNA, 80 bp, synthetic construct
  source 1..80: mol_type = other DNA
gggatagaagacctgatcaacaaagttgcaagcaacgcactaaaactatcacaaccaaaacccaacactacccaacaaag

SEQ ID NO: 153962 - DNA, 80 bp, synthetic construct
  source 1..80: mol_type = other DNA
gtgttattagaagcccctacacagtgccacaactgttagatcacaacaatcccctcagaggatacgtaccttatagcttc

SEQ ID NO: 153963 - DNA, 80 bp, synthetic construct
  source 1..80: mol_type = other DNA
tgccacaagctccgggtgggccactgcagccacccactacctcatccttggcccctcggcatacccacctgcaaatccaa

SEQ ID NO: 153964 - DNA, 80 bp, synthetic construct
  source 1..80: mol_type = other DNA
aaccttcttggaccaaattgtgttgcatccacctcacagcctgaaaataaggatgtagtacaagcaactaccacagtcaa

SEQ ID NO: 153965 - DNA, 80 bp, synthetic construct
  source 1..80: mol_type = other DNA
tggaattcattaagaacttgaaacagttaccattattggaaaaacaagttgatgggttgcggttagccacacaaaagcaa

SEQ ID NO: 153966 - DNA, 80 bp, synthetic construct
  source 1..80: mol_type = other DNA
ctcttgctgaaaggtatggtctcccccaagggccgggacctgctcggcccgcagctgtgagccagccccccgcgatccgt

SEQ ID NO: 153967 - DNA, 80 bp, synthetic construct
  source 1..80: mol_type = other DNA
tctaattctctaaacaggcaagacttgaggcaagaccctgctaaattcactgaaccgattaaagatgtgatgataaaaac

SEQ ID NO: 153968 - DNA, 80 bp, synthetic construct
  source 1..80: mol_type = other DNA
agcccggtgcttctagtgtgttgcaacgcacactacttggagagattttaaactattacacacattggtctggtagctta

SEQ ID NO: 153969 - DNA, 80 bp, synthetic construct
  source 1..80: mol_type = other DNA
cggccggcgagccatcgccgcactcgctgtagccgcgcattaccgtcatccagcgcggcgctgtgtccgagcttaacagc

SEQ ID NO: 153970 - DNA, 80 bp, synthetic construct
  source 1..80: mol_type = other DNA
gggactggccgggctgtgggcaagtgtctgaaaaaaagacatgttcctcggcaggccgtggagaaagaggagagcggccg

SEQ ID NO: 153971 - DNA, 80 bp, synthetic construct
  source 1..80: mol_type = other DNA
cagctgcgtctagccttcgaggacggcgtcggtgttgccctggggcgcccctcgcccatgcttgcggcgcgggagatcct

SEQ ID NO: 153972 - DNA, 80 bp, synthetic construct
  source 1..80: mol_type = other DNA
cagaagcccagtttagagtgcccacatattgcccagatggtaccgtcaatacgaacaaatctaactggacagacgcatgg

SEQ ID NO: 153973 - DNA, 80 bp, synthetic construct
  source 1..80: mol_type = other DNA
tccgtccgcgggcccgtcccaccgccctggagcaccatccggagccgtgggccgggcaccgggcgcggcccgctccggac

SEQ ID NO: 153974 - DNA, 80 bp, synthetic construct
  source 1..80: mol_type = other DNA
gcggggctttagaatctccacctgtaaggccatctcctccaggtagtgggtctgactgcgacgcagcgtccagttcatgt

SEQ ID NO: 153975 - DNA, 80 bp, synthetic construct
  source 1..80: mol_type = other DNA
gggagcacaggtttcaacacaaaagtctggtagccacgaaactggcaatgtagccactgaagggtccactatcaacttta

SEQ ID NO: 153976 - DNA, 80 bp, synthetic construct
  source 1..80: mol_type = other DNA
gcaccgtacgcagggccatcaataacacctcaaatgtagagtctgcagcaaataccgctcctagttcacaccgcctggag

SEQ ID NO: 153977 - DNA, 80 bp, synthetic construct
  source 1..80: mol_type = other DNA
agggaggcccgaagtcgatggcaagtgtagcggtcacgctgcgcgtaaccaccacacccgccgcgcttaatgcgccgcta

SEQ ID NO: 153978 - DNA, 80 bp, synthetic construct
  source 1..80: mol_type = other DNA
aatcgtcagatttacattgtgttcttgcgcaatctctggcacataccataattgattcaatctctaaaagtgataatgat

SEQ ID NO: 153979 - DNA, 80 bp, synthetic construct
  source 1..80: mol_type = other DNA
aactatcctatgtatataaagaatctgatgggtggatcaagaagtttacagaaatgtgtaatgcagctaggggattggaa

SEQ ID NO: 153980 - DNA, 80 bp, synthetic construct
  source 1..80: mol_type = other DNA
ccccaacaactaggaaagaggctatgttaggcactcatgtcatctgggatcttggcctgcaatccagtgttacgcttgta

SEQ ID NO: 153981 - DNA, 80 bp, synthetic construct
  source 1..80: mol_type = other DNA
acacttggtacagaggcactgcatacaatacagcaattacaaaaattccactaaaggcagcacagctatatgacaacact

SEQ ID NO: 153982 - DNA, 80 bp, synthetic construct
  source 1..80: mol_type = other DNA
gacatctttaatcaataccatactcatgtttatcaccaccatgggtatagtatacatgatctacaagatgtttgctcaaa

SEQ ID NO: 153983 - DNA, 80 bp, synthetic construct
  source 1..80: mol_type = other DNA
gtctcgcaccgaaatcacggcaatgcgaaccactggcgcctttggacaacaaactggggccatttacataggcaactata

SEQ ID NO: 153984 - DNA, 80 bp, synthetic construct
  source 1..80: mol_type = other DNA
ggcaggagagtgtcttctgcatgaatatgaagatctggtacccatccgtgatacattgaggctgttccctgggggtcgtt

SEQ ID NO: 153985 - DNA, 80 bp, synthetic construct
  source 1..80: mol_type = other DNA
gtcatcgctacgtcataagtcacgtgggaacggctgctgtaaacacggaagtagctgaccctcgtgacttgtcacgtggt

SEQ ID NO: 153986 - DNA, 80 bp, synthetic construct
  source 1..80: mol_type = other DNA
ttgtatggcttgcaatactgatgctaagaccaattacgtcagctatgtgcaggcgaatccaggtgaaaccggtggtgtat

SEQ ID NO: 153987 - DNA, 80 bp, synthetic construct
  source 1..80: mol_type = other DNA
tgtcacatcgagaggtgaattcaacctacttggcattcatgacaactgtgctgtgattcctacacacgcccaaccagaca

SEQ ID NO: 153988 - DNA, 80 bp, synthetic construct
  source 1..80: mol_type = other DNA
atagttgtatagcatacaaagcaattataacatttgtttcctaaagtagcatggcttaggtattcatttatacactctgg

SEQ ID NO: 153989 - DNA, 80 bp, synthetic construct
  source 1..80: mol_type = other DNA
cgtaatatgctagaggtagtccaagtggaatctatgatggaaatcaacaacacagaaagtgcggttggtatggagcgtct

SEQ ID NO: 153990 - DNA, 80 bp, synthetic construct
  source 1..80: mol_type = other DNA
aggtgtctttggaatggaaggattagaggctttggatttgaacacaagtgcagggtttccatatgttgccatgggtatta

SEQ ID NO: 153991 - DNA, 80 bp, synthetic construct
  source 1..80: mol_type = other DNA
atggtacaaaagctttatgttctggttcacaataaaaactgagttacgaaataatatcaaggagaacaataaatattcaa

SEQ ID NO: 153992 - DNA, 80 bp, synthetic construct
  source 1..80: mol_type = other DNA
acaaagaccgtgcgacgccacgccgccggcgtttagcacgcccaaaaaccccacgcaccgtcagcgcaaaacttcctcgg

SEQ ID NO: 153993 - DNA, 80 bp, synthetic construct
  source 1..80: mol_type = other DNA
accaccacttcctaccatgtctacgactccatgtggtacaccatgatcggtggcaacccctctgggtgtgttgggacctc

SEQ ID NO: 153994 - DNA, 80 bp, synthetic construct
  source 1..80: mol_type = other DNA
aatgggggaaaacatattagcctttgactacaccaactatgatggtagtttagatcctgtatggtttgatgctcttaaga

SEQ ID NO: 153995 - DNA, 80 bp, synthetic construct
  source 1..80: mol_type = other DNA
cacgtagtcgtgcagaaagttgtcgagcgagaagtatttttgcatgacgtccagcagctcggtggaaagccggcggccca

SEQ ID NO: 153996 - DNA, 80 bp, synthetic construct
  source 1..80: mol_type = other DNA
gaaggatgagctcagaaaaccagacaaaatttgtacaggtaaaaccaggatcatagaagctagcagcttaaatgatacag

SEQ ID NO: 153997 - DNA, 80 bp, synthetic construct
  source 1..80: mol_type = other DNA
ggacaggtagtgtacggttttctttcatgttttgtggttcagctctcactacactcaaattgttaattgcatacactcca

SEQ ID NO: 153998 - DNA, 80 bp, synthetic construct
  source 1..80: mol_type = other DNA
tagtgagttcatggatggttatgataaccaggatatccatctcattgatgatttggggcagactagaaaagaaaaagata

SEQ ID NO: 153999 - DNA, 80 bp, synthetic construct
  source 1..80: mol_type = other DNA
cacaggcctagaactctcaaacccctggctaagatctggcacaaacagccctgtaataggcttttgggtacttaaaaatc

SEQ ID NO: 154000 - DNA, 80 bp, synthetic construct
  source 1..80: mol_type = other DNA
ctgtccaacctgaagatatgatagaaactagatatgttataacagaccaaacaagggatgaaaccagcattgaaagtttt

SEQ ID NO: 154001 - DNA, 80 bp, synthetic construct
  source 1..80: mol_type = other DNA
cccttatgtttaacctgtccgtactgtatgatgaatacaagaaacagaggtgtaggtggagtcacactaatgacgaccta

SEQ ID NO: 154002 - DNA, 80 bp, synthetic construct
  source 1..80: mol_type = other DNA
cacattctggtttcccaaggttcacaataccctttacaggactgggatcagcatattacatgttttatgatgggtatgat

SEQ ID NO: 154003 - DNA, 80 bp, synthetic construct
  source 1..80: mol_type = other DNA
tatcaaattgtaattggcaagttagccattctagtattgcgaaaatagatgtccacagtgtggaggacattgatcagtac

SEQ ID NO: 154004 - DNA, 80 bp, synthetic construct
  source 1..80: mol_type = other DNA
ccgaggcttacccctccaccctacccctctgccacctgcaaccctacactctgccacccacaccactactcacggtacta

SEQ ID NO: 154005 - DNA, 80 bp, synthetic construct
  source 1..80: mol_type = other DNA
aggatgcaatttattggctttacacaaaaatcagagaatattatgatctgaattatggtaataaaaaggatgttcttaat

SEQ ID NO: 154006 - DNA, 80 bp, synthetic construct
  source 1..80: mol_type = other DNA
ggaagtccctaggagaccgcgagggaaacgacagacgaagtacggcacaacccgcgcagaggcgatcgcccggtggggtg

SEQ ID NO: 154007 - DNA, 80 bp, synthetic construct
  source 1..80: mol_type = other DNA
tgcacaagtggtacacccagcaggaacagtttggggggctttattctaacactgatggtctttctgcccttgggtctagt

SEQ ID NO: 154008 - DNA, 80 bp, synthetic construct
  source 1..80: mol_type = other DNA
catataagtacacacttgatatggaagcaatcgcatcagaaggtacaaaatatggtctaactataacaccagcagataaa

SEQ ID NO: 154009 - DNA, 80 bp, synthetic construct
  source 1..80: mol_type = other DNA
ttatctcccccccccccttatgtaacttagaagttttgcacaccgaccaatagtggacaatcagccagattgttttaggt

SEQ ID NO: 154010 - DNA, 80 bp, synthetic construct
  source 1..80: mol_type = other DNA
acatctaaattgagacctagtgcattctatgatgtttttcccggaaagaaagaaccggcagctctgcacccaaaggactc

SEQ ID NO: 154011 - DNA, 80 bp, synthetic construct
  source 1..80: mol_type = other DNA
ggatgaaagaatcacgagggtggtggtggaagtttcctgacgctttaagagacatgggcctatttggacaaaacatgcaa

SEQ ID NO: 154012 - DNA, 80 bp, synthetic construct
  source 1..80: mol_type = other DNA
atcgccgacgctgttttgcagctgagtcccctccttggagctgtaactgtggtttccatgacgctgctgctactggcttt

SEQ ID NO: 154013 - DNA, 80 bp, synthetic construct
  source 1..80: mol_type = other DNA
aagatcgtcactaaccacgtgactctccacagcgaaccactggtgtacgtgattcacttcctgggcgtaacttatgtact

SEQ ID NO: 154014 - DNA, 80 bp, synthetic construct
  source 1..80: mol_type = other DNA
ggccgcggacgcctcctcctcctcgtcccagtcccgagtttccaaccgctgataagggctcgaggaacaaaatccggcgg

SEQ ID NO: 154015 - DNA, 80 bp, synthetic construct
  source 1..80: mol_type = other DNA
ggagctcaagtgtcttcacagaaggtgggagctcatgagaacactaacgtagcaactggaggttctactgttaattacac

SEQ ID NO: 154016 - DNA, 80 bp, synthetic construct
  source 1..80: mol_type = other DNA
caggtgtggaccaagcaagactgggaaacagaacagcaaacagcagccgcgtgggacagacccatgcgcacaaacctaaa

SEQ ID NO: 154017 - DNA, 80 bp, synthetic construct
  source 1..80: mol_type = other DNA
tcctagcaaaacaaaattacagcctagtgtcttccatgatattttcccaggtagtaaagagccagcagttctttctagta

SEQ ID NO: 154018 - DNA, 80 bp, synthetic construct
  source 1..80: mol_type = other DNA
caaaacagacttgtacagttctgaatttgtcagatattgatcgaccattgaattcaacactctatatagatttaggcgat

SEQ ID NO: 154019 - DNA, 80 bp, synthetic construct
  source 1..80: mol_type = other DNA
aaatacaagaagatgggctcgcaggtgtctacgcaacgctccggttcgcatgaaaattcaaactcagctactgagggttc

SEQ ID NO: 154020 - DNA, 80 bp, synthetic construct
  source 1..80: mol_type = other DNA
gcgtcgacgcggcaagtgcggatgtctcgcaggttgggtagatgggcgatgcacaactctttctccccccgcacgtacat

SEQ ID NO: 154021 - DNA, 80 bp, synthetic construct
  source 1..80: mol_type = other DNA
cctaaactatttacagacaagtggtacagtcaagctgacttatgcaaggtaaatcttgtgtcacttgcggtttctgcggc

SEQ ID NO: 154022 - DNA, 80 bp, synthetic construct
  source 1..80: mol_type = other DNA
ttaaacaaaagaagagaagtgaaccagttgccatcatggtacatgggccaccaggaactggtaaatccataacaaccagc

SEQ ID NO: 154023 - DNA, 80 bp, synthetic construct
  source 1..80: mol_type = other DNA
ttaactatctgcctactgccaatccgcctgtgggaccctcccaaccgcccacacgcccgccgtcccgcttgagacccctt

SEQ ID NO: 154024 - DNA, 80 bp, synthetic construct
  source 1..80: mol_type = other DNA
ggcggctggtggccgaccgccgcttccacaacttcatcacccctgtgggccccctggtggagaatataaagagcacctat

SEQ ID NO: 154025 - DNA, 80 bp, synthetic construct
  source 1..80: mol_type = other DNA
tcttacgtagcgggagatacggcgttctcccgcgggccacttacttgcacggtcgcttgaacggcggcttggactgccac

SEQ ID NO: 154026 - DNA, 80 bp, synthetic construct
  source 1..80: mol_type = other DNA
catgactttgagaatgaagatttgtggcgcactgatttgacatttccaaaacaaggacatggtgccctctcccaattttt

SEQ ID NO: 154027 - DNA, 80 bp, synthetic construct
  source 1..80: mol_type = other DNA
atacaggaaataaaagaaaaaggggtgggattgattggcgagtgccgagcttttttagattctataactagcaccttgaa

SEQ ID NO: 154028 - DNA, 80 bp, synthetic construct
  source 1..80: mol_type = other DNA
ttctagtagacctggcagatgaggctaggagttccccactggtaacagtgtcctagcctgcgtggctgcctgcacacctt

SEQ ID NO: 154029 - DNA, 80 bp, synthetic construct
  source 1..80: mol_type = other DNA
cctggagcaccaataccaaaaactcgagatgattttgcttggcagtctggaacaaatgcatcaattttctggcagcatgg

SEQ ID NO: 154030 - DNA, 80 bp, synthetic construct
  source 1..80: mol_type = other DNA
gtgaaaaatacaaagatccacaaggtaaattgaatgtgaccgctgctttccaaccatgcgatgtaaatacaaaaattggt

SEQ ID NO: 154031 - DNA, 80 bp, synthetic construct
  source 1..80: mol_type = other DNA
cactgggacagaaaaaaacgtagttttgggctgccagtacaaatttaactttctatttggtggcaaccctatctcctcac

SEQ ID NO: 154032 - DNA, 80 bp, synthetic construct
  source 1..80: mol_type = other DNA
agaggtagatcatttggttagtcagggaatcagacaggttttattcctagaaaaaatagaaccagctcaggaagaacatg

SEQ ID NO: 154033 - DNA, 80 bp, synthetic construct
  source 1..80: mol_type = other DNA
ggcagttcatactcgtggtgttagaagtgatgttaacacccgtgccgtggtacgtgcatcggaccgaaacaccgtgtccc

SEQ ID NO: 154034 - DNA, 80 bp, synthetic construct
  source 1..80: mol_type = other DNA
gcatatggaatctctgcaacaaatgatatggggacgctttgcttcagatatgtggcgggccacaccaatgatgatgtaaa

SEQ ID NO: 154035 - DNA, 80 bp, synthetic construct
  source 1..80: mol_type = other DNA
tgaggcaagcagtggagggagcaattggtagagtagctgatacaattcgcagtgggccttccaactctgaagcagtcccg

SEQ ID NO: 154036 - DNA, 80 bp, synthetic construct
  source 1..80: mol_type = other DNA
taatgacatgggtacactgtgttttagaatagtgacggaagcacacaccaacaaggttaaaataacaaccagagtttatc

SEQ ID NO: 154037 - DNA, 80 bp, synthetic construct
  source 1..80: mol_type = other DNA
caaagtgtcacggcgtctttttttatttgtattcctttcctgttttgtactcgtaaactgttgacgttgtttttacatcc

SEQ ID NO: 154038 - DNA, 80 bp, synthetic construct
  source 1..80: mol_type = other DNA
aaccaatcgcaccctcatgtataacttcccaaccaaggccgggcagtgcggcggtgtggttatggccacaggaaaagtga

SEQ ID NO: 154039 - DNA, 80 bp, synthetic construct
  source 1..80: mol_type = other DNA
tcgcctatagatagcggcactttacataaaaccaccgtacctgcatcacggtggctcgatacactggaaattcaataaaa

SEQ ID NO: 154040 - DNA, 80 bp, synthetic construct
  source 1..80: mol_type = other DNA
gccggcatcgacaggcagttctttgaggcttgttttcgatgccacgcaggttgctgtggctgcggcaattttgttagcca

SEQ ID NO: 154041 - DNA, 80 bp, synthetic construct
  source 1..80: mol_type = other DNA
cgcgtcggccgcaacacgccgctaatgcggcgcggcgctcacggccttgaggagtccctcagccccgtcccgcaccggcg

SEQ ID NO: 154042 - DNA, 80 bp, synthetic construct
  source 1..80: mol_type = other DNA
tcaagccccccacacttagagcagttgtgacacaaggacccaacacagaatttgctttatctttgctcaggaagaacata

SEQ ID NO: 154043 - DNA, 80 bp, synthetic construct
  source 1..80: mol_type = other DNA
gtccaactgtccgggagactcagagtgcctctgagcatgggggcatgtctgttccccctccatctcggacccgaagccat

SEQ ID NO: 154044 - DNA, 80 bp, synthetic construct
  source 1..80: mol_type = other DNA
ttcagctacactttgctcttgcggaactgcggtttccgatcggctcaccacaaactgccaacacttgtgtaaacttcctg

SEQ ID NO: 154045 - DNA, 80 bp, synthetic construct
  source 1..80: mol_type = other DNA
acagttcttaacccagaagctctagcacgcagatttggctttgatttagacatgtgtctacactcttcatacactaaatc

SEQ ID NO: 154046 - DNA, 80 bp, synthetic construct
  source 1..80: mol_type = other DNA
ggcattgatgatgtcatagacaaggtcgtttccaatgcattacaactatctcaaccaaccaggcctcctagtgaagcggc

SEQ ID NO: 154047 - DNA, 80 bp, synthetic construct
  source 1..80: mol_type = other DNA
atacagtacagacaactatagtaaaattctaagtgcagcccaagcatactggaaatatttaactagtgagcacccacaag

SEQ ID NO: 154048 - DNA, 80 bp, synthetic construct
  source 1..80: mol_type = other DNA
gcgccctgggtctgctccgggcaaggggagaacccgagcctcctggacctaccccgtagctcccggaggccccggtagca

SEQ ID NO: 154049 - DNA, 80 bp, synthetic construct
  source 1..80: mol_type = other DNA
agattagtgaaagtattgaaacaacagattttaacagatatggatgatgtggacactgaaatcactttaatttggctgga

SEQ ID NO: 154050 - DNA, 80 bp, synthetic construct
  source 1..80: mol_type = other DNA
acaatggaggtctaccggattccagtgcagagtggtaatcaccaaagtgaccaagtcttcggttttcaagtgcaacctgg

SEQ ID NO: 154051 - DNA, 80 bp, synthetic construct
  source 1..80: mol_type = other DNA
tatccctggcagggttaccaacttgctagagttggtgcaggttgacacaatgatcccaatcaacaacgtaacagatttgg

SEQ ID NO: 154052 - DNA, 80 bp, synthetic construct
  source 1..80: mol_type = other DNA
tcaaggtcaacaagcttgaaaagggactccaggatcttgccccattgtatgcatgtgaagccaaacaagtgcgtgagatg

SEQ ID NO: 154053 - DNA, 80 bp, synthetic construct
  source 1..80: mol_type = other DNA
actgctggcaatgtacaggacaaaaacgcaatattttctttccagctgaacccaggcaatagtaccgtattacgccgcac

SEQ ID NO: 154054 - DNA, 80 bp, synthetic construct
  source 1..80: mol_type = other DNA
actgtatctaccaccttacacagttcttagtcgtgcatggattgacaaatttatttagagtctatagactacatacatac

SEQ ID NO: 154055 - DNA, 80 bp, synthetic construct
  source 1..80: mol_type = other DNA
ccgggcttctaactaaaaacaacacagcttttggcaacaacagctgcaggcccaatgcagacaaaattaaaaaagccaga

SEQ ID NO: 154056 - DNA, 80 bp, synthetic construct
  source 1..80: mol_type = other DNA
ggcgcccaacgcccactattgcccatgattgtacaaagcttctaagttactgcctgttttataaccctcccctaagcagt

SEQ ID NO: 154057 - DNA, 80 bp, synthetic construct
  source 1..80: mol_type = other DNA
cgtgggtaccaagaccaccgcggttgtgtcagtacaagaataaagcgaatgtgaactttgacgcaaccgcagtcaccgaa

SEQ ID NO: 154058 - DNA, 80 bp, synthetic construct
  source 1..80: mol_type = other DNA
tagcttacttcaattggactttcaaaaccctagggtctttggtgttgatgtggacatatatgacaatgcaccagcaaaaa

SEQ ID NO: 154059 - DNA, 80 bp, synthetic construct
  source 1..80: mol_type = other DNA
ttttactagatggagttgaaaaatacagagtacccttgatgcaaaatcaacaagaaagtcaagtttttggtttttcattg

SEQ ID NO: 154060 - DNA, 80 bp, synthetic construct
  source 1..80: mol_type = other DNA
aaattttgatggtactttactgggtaatgcacttatattcccacatcaatttatcaatttaagaagcaacaactcagcaa

SEQ ID NO: 154061 - DNA, 80 bp, synthetic construct
  source 1..80: mol_type = other DNA
acgtcatggccactaacacagaaaagaagacttcgtacgtttcttacgtcaatgcaaacccaggtgaagcaggtggcact

SEQ ID NO: 154062 - DNA, 80 bp, synthetic construct
  source 1..80: mol_type = other DNA
tataaccatagggactatgcccctgatggagcagtttctgactgtctacgtcgtccatttcctgggcatggtctacatcc

SEQ ID NO: 154063 - DNA, 80 bp, synthetic construct
  source 1..80: mol_type = other DNA
agccacatgttctggatgtcccgatatatctgtcagaatgctccgggataccccaatggcaaagcaaccccagaatgtta

SEQ ID NO: 154064 - DNA, 80 bp, synthetic construct
  source 1..80: mol_type = other DNA
aaccgtaaattttgagccagctaacataacggagtcgcgcactgacatcaatcacgtgcctgacactgtaaaaccagacc

SEQ ID NO: 154065 - DNA, 80 bp, synthetic construct
  source 1..80: mol_type = other DNA
caacgagtgaagactacagaaattgtgtgaggagcttgtgggaacgtgacatcatggttgtggagtctagagcacaagga

SEQ ID NO: 154066 - DNA, 80 bp, synthetic construct
  source 1..80: mol_type = other DNA
taccgcgcgaagaaaaggaaactgcttctgctggctctgccgcctacaccgccgccatctcccatgagtctgtggcgacc

SEQ ID NO: 154067 - DNA, 80 bp, synthetic construct
  source 1..80: mol_type = other DNA
ccggcaaagcaaatacaatggacatgtacagaataggattagatagcgcagcaaatgtaaatgaaccaatattttgtctc

SEQ ID NO: 154068 - DNA, 80 bp, synthetic construct
  source 1..80: mol_type = other DNA
cccaagaggcagctaatgcagtagtggcttatgcagaatggcctagttatttaacagatactgatgcaagtgatgtaaac

SEQ ID NO: 154069 - DNA, 80 bp, synthetic construct
  source 1..80: mol_type = other DNA
tatagacctcctcagtgcatccaaagatccaaaagtcatagagttctgtgagaaggaaggttggatcaaacaatctaaat

SEQ ID NO: 154070 - DNA, 80 bp, synthetic construct
  source 1..80: mol_type = other DNA
acaaagaagtcgaaggggctgttggacttggccatcatgtcagttatcaggcagttgacggtagttcttgttctgtaagt

SEQ ID NO: 154071 - DNA, 80 bp, synthetic construct
  source 1..80: mol_type = other DNA
gttttttgggcgtactggggacggggggtgtgcggagacggaggccttttgcggcgcggacttgcgtgcttttgcgacgg

SEQ ID NO: 154072 - DNA, 80 bp, synthetic construct
  source 1..80: mol_type = other DNA
ggctcaattaatgactttggatatcaacccacaacccttatcccttgaggaaagtgtatatggaattgatgggctagagg

SEQ ID NO: 154073 - DNA, 80 bp, synthetic construct
  source 1..80: mol_type = other DNA
tagcctaccaatcaacatataccacaaattttgttccacaagacgggatcaattccattaaaaccaagatcaaaatcaga

SEQ ID NO: 154074 - DNA, 80 bp, synthetic construct
  source 1..80: mol_type = other DNA
ccctcaagcaagaacgaaattaaccctgggggcaaaaaaactacatcttagcaaagaaccgtgatccctcaagcaagaac

SEQ ID NO: 154075 - DNA, 80 bp, synthetic construct
  source 1..80: mol_type = other DNA
ttaaaaattacagttcaaaaagtatgagaaaatccatgcaggctgaaggaaacagcaaaactgtgacaaattaccctcag

SEQ ID NO: 154076 - DNA, 80 bp, synthetic construct
  source 1..80: mol_type = other DNA
ttataagcggacgaggtagcttctctagaaactacagcagccacctagaagacagaatcttaaagggaccctttggcggg

SEQ ID NO: 154077 - DNA, 80 bp, synthetic construct
  source 1..80: mol_type = other DNA
cgccctgccatggcatggggatggtggagaagaaagaggcgctggtggtggagacgccgcttcgcccgaggcagacttcg

SEQ ID NO: 154078 - DNA, 80 bp, synthetic construct
  source 1..80: mol_type = other DNA
tttaagaatagcaatatatgtagtgcaattgttaagtagatttagaaagggctataggcctgttttctcctccccccccg

SEQ ID NO: 154079 - DNA, 80 bp, synthetic construct
  source 1..80: mol_type = other DNA
ctttgacgttgaggttacctttgtcattaccagttaccagcaccagagtactgtcaaccaggatatgcctccaatgacac

SEQ ID NO: 154080 - DNA, 80 bp, synthetic construct
  source 1..80: mol_type = other DNA
cctgctaggctacagtgactactgcaccaaatactttaatgacaagggactaataaaagaagccagactgactataatat

SEQ ID NO: 154081 - DNA, 80 bp, synthetic construct
  source 1..80: mol_type = other DNA
cctttctgcacagctccttggcgagggatttcttacaatacccgcaaaccgattctcgatgacgacccgtccgagagaaa

SEQ ID NO: 154082 - DNA, 80 bp, synthetic construct
  source 1..80: mol_type = other DNA
cccaatttggtcacaatagctacaaacctactgttgaaaacattaaatcagccaggtcagcctactggactgccttaaac

SEQ ID NO: 154083 - DNA, 80 bp, synthetic construct
  source 1..80: mol_type = other DNA
ggtattgaagacttgattgagaaggttgctaataacgccctgcagctctcacaacccagacccagtaacaatcagcaatc

SEQ ID NO: 154084 - DNA, 80 bp, synthetic construct
  source 1..80: mol_type = other DNA
cccttaaatctgtacttgagaatttacaatttgaacccaaactagtagatagattatgcaattctaaacacatttataga

SEQ ID NO: 154085 - DNA, 80 bp, synthetic construct
  source 1..80: mol_type = other DNA
gagatattctaaataaagagacccaggacacagagaaaatgaaattctatctggataagtatggcatagatttgccccta

SEQ ID NO: 154086 - DNA, 80 bp, synthetic construct
  source 1..80: mol_type = other DNA
cggctccaatccatatacccggcgaactgcacaatataatggaactggcagaaattgatagtgtcatacctatgaatgct

SEQ ID NO: 154087 - DNA, 80 bp, synthetic construct
  source 1..80: mol_type = other DNA
gcacctctcatgtgaattctatggacttaagtacctcggctgggtatagctttgttaaatctggctacaaaaagaaggac

SEQ ID NO: 154088 - DNA, 80 bp, synthetic construct
  source 1..80: mol_type = other DNA
agctagttatccagaagaactagacccaaaggaaattgctattacagcctctaagtatggcctgacaattaccccagcag

SEQ ID NO: 154089 - DNA, 80 bp, synthetic construct
  source 1..80: mol_type = other DNA
ggttgttcccacctagatctcctacatggagttgtactctattattccggtaattttgtacgccagttttatctcccctc

SEQ ID NO: 154090 - DNA, 80 bp, synthetic construct
  source 1..80: mol_type = other DNA
agtctcttatgtcctatatgaatatacactggggcacctcaaaaggctctctatctaattacaaagacagagacagaata

SEQ ID NO: 154091 - DNA, 80 bp, synthetic construct
  source 1..80: mol_type = other DNA
atcttagggaccatctatgctatatacaaactactgtgtatctcacagggtgcttacacaggcaatgcaaatcctgtccc

SEQ ID NO: 154092 - DNA, 80 bp, synthetic construct
  source 1..80: mol_type = other DNA
agctagacacaatggatattttccgcatacctgtccagagcggcaaccgtcaaagcgcacaagtctttggtttccaggtg

SEQ ID NO: 154093 - DNA, 80 bp, synthetic construct
  source 1..80: mol_type = other DNA
ctacacctgtacacaattcattaacaatatcaccgtcattagcttcaaccaactttacacatgttgcggtccatcatgcc

SEQ ID NO: 154094 - DNA, 80 bp, synthetic construct
  source 1..80: mol_type = other DNA
actccgaggccttgacggaattcaagaccagcgtgtcctctgcccgtgccatccttgaggaccccaactttttggagatg

SEQ ID NO: 154095 - DNA, 80 bp, synthetic construct
  source 1..80: mol_type = other DNA
ccatggatatgtacagagtaccagtgactaccagtgcgaaactggatgaaccaatattatgcctgtcattatcaccagct

SEQ ID NO: 154096 - DNA, 80 bp, synthetic construct
  source 1..80: mol_type = other DNA
acccctgcattgcacaccaaaaggaagtccttgaggcaatagttaactgtggaccgtttgtcccacgagaccagacgaaa

SEQ ID NO: 154097 - DNA, 80 bp, synthetic construct
  source 1..80: mol_type = other DNA
tgcatctcgtgcgacaacggaacactacatctctacggtgtaaacacaactcattcaggtagatatactgcacgttgtca

SEQ ID NO: 154098 - DNA, 80 bp, synthetic construct
  source 1..80: mol_type = other DNA
ataggtggcggccatccaggtcgttagtggtcaagcacttctgtctccccggtgatactggatacgctttacccaaggcg

SEQ ID NO: 154099 - DNA, 80 bp, synthetic construct
  source 1..80: mol_type = other DNA
gcgtggtacactggaattacggttcctttgtacgcctgttttccctccctgctttctttctttcttcacttcttaatcgt

SEQ ID NO: 154100 - DNA, 80 bp, synthetic construct
  source 1..80: mol_type = other DNA
catcaaactccgccaaccggcaagattttcaacaggaccctagcaaattcacagagcccatgaaagacatcatgataaaa

SEQ ID NO: 154101 - DNA, 80 bp, synthetic construct
  source 1..80: mol_type = other DNA
gttctcactggctctgcagtaggctgtaaccctgatgtgttctggtctcaaatgtatgcatgtatggatggacatctgct

SEQ ID NO: 154102 - DNA, 80 bp, synthetic construct
  source 1..80: mol_type = other DNA
cgagatatcccaaaaatatgtagtgtaaacttcaaaataaagcttgctgagtaactaattcgaggccccgggagtttcac

SEQ ID NO: 154103 - DNA, 80 bp, synthetic construct
  source 1..80: mol_type = other DNA
cgtaactcccgttagcagcgccgccgcgctcacggcccaaaaacccccgtcctcgccggcgccgccccgaaaagcgaagc

SEQ ID NO: 154104 - DNA, 80 bp, synthetic construct
  source 1..80: mol_type = other DNA
caatcaaccagattgtcactggtcaagcacttctgtttccccggctctcgttgatatgctccaccagggcaaaaacaatt

SEQ ID NO: 154105 - DNA, 80 bp, synthetic construct
  source 1..80: mol_type = other DNA
catcactgcaacaagtggtacaactccctctataccagtaaccataaccattgccccaatgtttctagaattgtctggca

SEQ ID NO: 154106 - DNA, 80 bp, synthetic construct
  source 1..80: mol_type = other DNA
ttgccaggtgcaactgcagggctggtatttattattgcagatcaaggaagaagtactaccctattactgtcactgaccct

SEQ ID NO: 154107 - DNA, 80 bp, synthetic construct
  source 1..80: mol_type = other DNA
acttttgtctgagaatggcaagagatacagatcaacacacccaagtgggtgctataacacaaaaccctattgagcaattc

SEQ ID NO: 154108 - DNA, 80 bp, synthetic construct
  source 1..80: mol_type = other DNA
tgacagtgcaagcaatgtttatacctccaggagcaccaaacccagtagaatgggatgattacacctggcaaagtgcttca

SEQ ID NO: 154109 - DNA, 80 bp, synthetic construct
  source 1..80: mol_type = other DNA
cacttgggaaaaactatggacttgtgattaccccaccagataaatcagagaagttcacaaagatgacatgggaaaatctg

SEQ ID NO: 154110 - DNA, 80 bp, synthetic construct
  source 1..80: mol_type = other DNA
tcatcgaacagcgacgtcgggtgttgcaacgtcaacgcgaggaataccacggcgtttacgagcacttggccggcctcatc

SEQ ID NO: 154111 - DNA, 80 bp, synthetic construct
  source 1..80: mol_type = other DNA
gtggttaaagatgtttttaaaataaatcagggtaggcttaatctacagtgtgctcttaaaccatgcaaggaagggaaagt

SEQ ID NO: 154112 - DNA, 80 bp, synthetic construct
  source 1..80: mol_type = other DNA
atgcagctaagggattagaatggatagcaaacaagatatcaaaattaatagattggataaagaacaaaatcctaccacaa

SEQ ID NO: 154113 - DNA, 80 bp, synthetic construct
  source 1..80: mol_type = other DNA
cctatccagtatcaaggggtgtctaaatctgagagcgaacctcaaggagaacatggggccaacaatgaaacagtcaatgt

SEQ ID NO: 154114 - DNA, 80 bp, synthetic construct
  source 1..80: mol_type = other DNA
tgctgtttttggccatcctcaagctctggtccatacaggtcttcatccaggtcctttcctacaagcacgtctttctctcg

SEQ ID NO: 154115 - DNA, 80 bp, synthetic construct
  source 1..80: mol_type = other DNA
gagcaggacaaatgccagacaaagacccttacgtaccagtaaactggagaggaaagtggtacccacacgtactacaccaa

SEQ ID NO: 154116 - DNA, 80 bp, synthetic construct
  source 1..80: mol_type = other DNA
tggtggggttggtggaagaggcgctggagacggccgaagagacgatggagaacatggagaaggagacgacctgcaaccag

SEQ ID NO: 154117 - DNA, 80 bp, synthetic construct
  source 1..80: mol_type = other DNA
atataaacgcgggggatgtcaattttaaaccaacacccgtgacagaaaagagagcaagcctaatcactactgggccatat

SEQ ID NO: 154118 - DNA, 80 bp, synthetic construct
  source 1..80: mol_type = other DNA
ggtaaactcaatcgaggcatacaggatccctgttaaatcaatgagtggcagcgcaacacaagtttttgggttcaagttgc

SEQ ID NO: 154119 - DNA, 80 bp, synthetic construct
  source 1..80: mol_type = other DNA
cggggcagacgcagacggactcacagaaaaaagatagtcataaaacagtggcaaccagagtctacgtcgtgcacttcctg

SEQ ID NO: 154120 - DNA, 80 bp, synthetic construct
  source 1..80: mol_type = other DNA
accaattgatattgtaaataaaccaccaccaccagctattgtggatttactcaaatcagttaggaatccagatgtgatta

SEQ ID NO: 154121 - DNA, 80 bp, synthetic construct
  source 1..80: mol_type = other DNA
tacgtgggttgcacccccgatatgggccgctgtctttgttacgtgccctgtgggcccatgacgcagtcgctcatccacaa

SEQ ID NO: 154122 - DNA, 80 bp, synthetic construct
  source 1..80: mol_type = other DNA
accatgctagggatacatgacagaattgccgtgatacccacacatgcttccattggggaaaccatttacattaatgatgt

SEQ ID NO: 154123 - DNA, 80 bp, synthetic construct
  source 1..80: mol_type = other DNA
ttgctcgcagcgcgaatactctttctcgaaagccgactcctgacccaggtccgagagccgccgggagacaggccgcccga

SEQ ID NO: 154124 - DNA, 80 bp, synthetic construct
  source 1..80: mol_type = other DNA
agcaaattacagtttccagatacatccagcacggaaatacctattacagtgacaatagcaccaatgtgttgtgagttcaa

SEQ ID NO: 154125 - DNA, 80 bp, synthetic construct
  source 1..80: mol_type = other DNA
cgggccatctccgtgagttgttaaccaccctggagactctttacggttcattctcagtggaagacctgtttggtgccaac

SEQ ID NO: 154126 - DNA, 80 bp, synthetic construct
  source 1..80: mol_type = other DNA
cctaaatcactatgacactaatctttttggaaacgtgtcactatacaacacttttcaaaccatagctcagctaaaagaca

SEQ ID NO: 154127 - DNA, 80 bp, synthetic construct
  source 1..80: mol_type = other DNA
gctagcgtcactgattttgggcacacttaacttgactacaatgttccttctcatgctcctatggacacttggtaagtttt

SEQ ID NO: 154128 - DNA, 80 bp, synthetic construct
  source 1..80: mol_type = other DNA
gtcacacgactgtaccatggccaaacaaaaatttcactccaaactgggacaacatgacatggcagcagtgggagaaccag

SEQ ID NO: 154129 - DNA, 80 bp, synthetic construct
  source 1..80: mol_type = other DNA
catactgtgcgttgtacactggaatcacggttcctttgtatgcctgttttataatcccttcccctcttttctatcgtctc

SEQ ID NO: 154130 - DNA, 80 bp, synthetic construct
  source 1..80: mol_type = other DNA
agctggaaattacagttcttaaactaaagagaaatgagaaatttaaagacatcagaaaatatattccggagaatgaggat

SEQ ID NO: 154131 - DNA, 80 bp, synthetic construct
  source 1..80: mol_type = other DNA
atattgctaatcatgcgtcttgcagtacagatagccgctgtatcttacgcgtattgtcgcaatagttccacatcggtgta

SEQ ID NO: 154132 - DNA, 80 bp, synthetic construct
  source 1..80: mol_type = other DNA
tgacgtaaagttcaaaggtcatcctcggcggaacctatacaaaatggcggacaacatcttccgagtcaaaggtcatcact

SEQ ID NO: 154133 - DNA, 80 bp, synthetic construct
  source 1..80: mol_type = other DNA
gtaccagtagacagcctcgtcaggtacaagtcgttagcccgctctccatgggaccccagtggatcctccacacctttgac

SEQ ID NO: 154134 - DNA, 80 bp, synthetic construct
  source 1..80: mol_type = other DNA
aacaaccccggtatgaggatcctgacactcctctggatttgagtttacatccagatactgcaactctgccgcccacccag

SEQ ID NO: 154135 - DNA, 80 bp, synthetic construct
  source 1..80: mol_type = other DNA
ggagactccgtaaccatggagtttaagaaggagagtgtactacattcctgcaccgtcccttatgaggtcaaattcacgcc

SEQ ID NO: 154136 - DNA, 80 bp, synthetic construct
  source 1..80: mol_type = other DNA
acttttcgaaaaagaagaagaagaacaaaaaaggtaaagagacacttttattctaaaaagtacaaaaaaaaactaaagaa

SEQ ID NO: 154137 - DNA, 80 bp, synthetic construct
  source 1..80: mol_type = other DNA
cgtaggaaacagaatatggctagacagcttaactaaaaaaaataacatgtacacaaaaggccaaagtgtatgcctgttag

SEQ ID NO: 154138 - DNA, 80 bp, synthetic construct
  source 1..80: mol_type = other DNA
cccccacgtcatgctcaataatgtgttttgtgtcggcatgtaacgatttctccgtacggttgctaaaggataccccattc

SEQ ID NO: 154139 - DNA, 80 bp, synthetic construct
  source 1..80: mol_type = other DNA
tcgcaccgtttcgcgtcgcagccgcaggcgaaacgccactgggtcggctggcgcctcggtgcggtcgcaggtcacgttga

SEQ ID NO: 154140 - DNA, 80 bp, synthetic construct
  source 1..80: mol_type = other DNA
agagaggatggattgtcaagatggacaacaatatggttgttgaacgtaacctgaacagggcaatgacaatcttacaggcc

SEQ ID NO: 154141 - DNA, 80 bp, synthetic construct
  source 1..80: mol_type = other DNA
ttccatgaatggattgctcaatgtgcccaaagctctccaaccgtgtacaacatgccctacaccagaacactacaaacaat

SEQ ID NO: 154142 - DNA, 80 bp, synthetic construct
  source 1..80: mol_type = other DNA
atggtaaagatggattctcagccacattgctcagatcttactttagtgaaactcaaggacagataacaaaaactgcaaat

SEQ ID NO: 154143 - DNA, 80 bp, synthetic construct
  source 1..80: mol_type = other DNA
aggtggtccaataccagagaccagggatgccgatgaatggcagtctggaactaatgcatcagtcttttggcagcacggcc

SEQ ID NO: 154144 - DNA, 80 bp, synthetic construct
  source 1..80: mol_type = other DNA
tcctgaatatatacaggaatgggatcatatgaaattagctacaaatgtcacaaaattcccaatgcacttcgtagatgttg

SEQ ID NO: 154145 - DNA, 80 bp, synthetic construct
  source 1..80: mol_type = other DNA
aggttgaatcattcttaccattaaacaacactgatcagcatgtgggtagcatagatatttatggtgtcaccatcacagga

SEQ ID NO: 154146 - DNA, 80 bp, synthetic construct
  source 1..80: mol_type = other DNA
ttgtttaacctcctgggactcatcaaacccaaatcacattaacagcacctatgcaaatgctacctactctatatatgaat

SEQ ID NO: 154147 - DNA, 80 bp, synthetic construct
  source 1..80: mol_type = other DNA
cataaccccccagaacacccccttcgggggaggactcagtactacctcctggagcttaaaggtgctgtacgaccagcaca

SEQ ID NO: 154148 - DNA, 80 bp, synthetic construct
  source 1..80: mol_type = other DNA
aacaccccgttcccgccggcgcccagcacgcccaaaaatacccgtccacagcgaagcgccgcgcaaaggcgccgcacaga

SEQ ID NO: 154149 - DNA, 80 bp, synthetic construct
  source 1..80: mol_type = other DNA
atacactgaagaaaactatgcaaaaattcaagatgcagcccaacaatactggaaatatttaactagtgaccacccacaag

SEQ ID NO: 154150 - DNA, 80 bp, synthetic construct
  source 1..80: mol_type = other DNA
aatggccaccaggtttccgctgtagagtcgctccttgaaggcctcggttattgccaccgcccccaggtaggcagagggat

SEQ ID NO: 154151 - DNA, 80 bp, synthetic construct
  source 1..80: mol_type = other DNA
cagaaaattaaagagaacattaaaaactacaaaaaaaaagtagaccaagtgataacagctgcaactcaaagaggcaccag

SEQ ID NO: 154152 - DNA, 80 bp, synthetic construct
  source 1..80: mol_type = other DNA
gaagatacctagggagagcgtagccaacgcactgaaagaactggcataggtacgattcagatgacaacccaacaggagga

SEQ ID NO: 154153 - DNA, 80 bp, synthetic construct
  source 1..80: mol_type = other DNA
attgctgctcgctttcactatctgcctgctacctcctcgcctctggaccctaccggaggagcgccgccgcgccgcccgca

SEQ ID NO: 154154 - DNA, 80 bp, synthetic construct
  source 1..80: mol_type = other DNA
ctctgtgccgttaacctgttgtcacttgaggtttctgcggctaccctcaaacatccgttctgccaaccacaaactgccaa

SEQ ID NO: 154155 - DNA, 80 bp, synthetic construct
  source 1..80: mol_type = other DNA
aaagcgtgcgtgtttatgctgtggggtgcgaaggcgggagacaaagcttcactaatcaactccaagaagcatctggttct

SEQ ID NO: 154156 - DNA, 80 bp, synthetic construct
  source 1..80: mol_type = other DNA
catgctaagcaaaagaaaaatattaatacccagtctacagacaaaacctaaaggaaaaaaaactgtcagtgtaacaatag

SEQ ID NO: 154157 - DNA, 80 bp, synthetic construct
  source 1..80: mol_type = other DNA
acaggcacaacacaacaagaagcattaacaccacaaataattagacaaaaaattttatcaaacatgcaaagttattataa

SEQ ID NO: 154158 - DNA, 80 bp, synthetic construct
  source 1..80: mol_type = other DNA
cttgaccaaacccaatgaacaaaccatacttttagcaatttcatctgatctccaggtggatagtatagacacccctggac

SEQ ID NO: 154159 - DNA, 80 bp, synthetic construct
  source 1..80: mol_type = other DNA
ccgcaccacacgcaactattcgccgtccacgcccgcgactccccccccctcccctgcttgcagcttcctcttttgtctgc

SEQ ID NO: 154160 - DNA, 80 bp, synthetic construct
  source 1..80: mol_type = other DNA
cggacgacggtagttctaagagacgtagatcgctcagcaggtcctgacagttgcggattcgcaagatcagaaaaaaaagg

SEQ ID NO: 154161 - DNA, 80 bp, synthetic construct
  source 1..80: mol_type = other DNA
gagttgtccacacctatgacaatgcagataacaggctaaccaacctggcttcaaatggggtgattaccataccagctggg

SEQ ID NO: 154162 - DNA, 80 bp, synthetic construct
  source 1..80: mol_type = other DNA
aattccaacagcgctagcgaagggtccaccatcaattataccaccataaattactataaggatagtgcgagtaatgcggc

SEQ ID NO: 154163 - DNA, 80 bp, synthetic construct
  source 1..80: mol_type = other DNA
atggccgagcgatgactcgtgtgcgagccggtttcgtgagtccaccttcgagtcgtggtccacgaccatgaagctgaccg

SEQ ID NO: 154164 - DNA, 80 bp, synthetic construct
  source 1..80: mol_type = other DNA
acataaattccacctttgccaagggcaaatacaaagaatacgagtaccacctgggctggtactcaaacatattcctgggc

SEQ ID NO: 154165 - DNA, 80 bp, synthetic construct
  source 1..80: mol_type = other DNA
tccccgaggccaaaaagggcgaattgcaagctgtagtgttacaaaaaatagtcaagttagtgtcattgtgttgataaatg

SEQ ID NO: 154166 - DNA, 80 bp, synthetic construct
  source 1..80: mol_type = other DNA
tctaagtccaagcaggctatccccagactttccaggcctataccaagaagtagtctacaacccagcaaacgacaaaggag

SEQ ID NO: 154167 - DNA, 80 bp, synthetic construct
  source 1..80: mol_type = other DNA
tatctttacttgtgcaaaagtgtactactttcttctcttcagcagccacagaaatcttagacaatgatctggttaaattt

SEQ ID NO: 154168 - DNA, 80 bp, synthetic construct
  source 1..80: mol_type = other DNA
cacatctagagatcaagtatgatggttacaatgatgctggcaacaatttccaatcatggcaaattaccctaaaagaaatg

SEQ ID NO: 154169 - DNA, 80 bp, synthetic construct
  source 1..80: mol_type = other DNA
taagcttaaacagtggaatcccgcagtaactaaattctgcagaattattggatattaccctttaataatatgcggtgaag

SEQ ID NO: 154170 - DNA, 80 bp, synthetic construct
  source 1..80: mol_type = other DNA
atggcccgacgggtcttagagaaagaaacaggcaccctcgagagtgcccccgacccgacccccacagtgccgccagtccc

SEQ ID NO: 154171 - DNA, 80 bp, synthetic construct
  source 1..80: mol_type = other DNA
tggtatcaaacagactttatccctagctcatcaggtgggataggtactattttggccacatgttcagcatgcccagacct

SEQ ID NO: 154172 - DNA, 80 bp, synthetic construct
  source 1..80: mol_type = other DNA
cgccgcaaaagcgaaacttgccccaatagccgtgacaatgacactttttgcccatcaacatgcgcgtagcctgtatcggc

SEQ ID NO: 154173 - DNA, 80 bp, synthetic construct
  source 1..80: mol_type = other DNA
tcagtataggtaatgcctacagcaattttattgatgtgtggtcgcacttcttggaagaggatgcgtatgatcacacggca

SEQ ID NO: 154174 - DNA, 80 bp, synthetic construct
  source 1..80: mol_type = other DNA
agtagcatcctgttgccttcatggcgttcgatcaggtgagacttccctcctcactagtctggtcgatgaggctgagaact

SEQ ID NO: 154175 - DNA, 80 bp, synthetic construct
  source 1..80: mol_type = other DNA
cacttgaagagaaacactatttcaagttcagaggggatatcaagacagcaggaccaagtgaccagtttgtacacactcag

SEQ ID NO: 154176 - DNA, 80 bp, synthetic construct
  source 1..80: mol_type = other DNA
ggaggagatcgtcccgctctcgccttgtcagcagctggggtttcttaggccagagcgccgagtccgaggccagcctgggc

SEQ ID NO: 154177 - DNA, 80 bp, synthetic construct
  source 1..80: mol_type = other DNA
tgttatatcatgtgtttcgtctcagcttgcaacgatttttcggtgcggctactgcgtgacaccaaattcatcaatcagga

SEQ ID NO: 154178 - DNA, 80 bp, synthetic construct
  source 1..80: mol_type = other DNA
caagtggtactttagcaaagacgtttgtgacacaactttggttaacttagacgttgtactctgcaacttgcggtttccgt

SEQ ID NO: 154179 - DNA, 80 bp, synthetic construct
  source 1..80: mol_type = other DNA
atccaccatagagaacttcttagggaggtcagcatgtgtacacatcgacacgtatatgacaaagggtcaggtcggtgaaa

SEQ ID NO: 154180 - DNA, 80 bp, synthetic construct
  source 1..80: mol_type = other DNA
acatctttgggagagcatggtttgcatatgaccatacctacagggatgaagggacttggagacgagcccttgatttccca

SEQ ID NO: 154181 - DNA, 80 bp, synthetic construct
  source 1..80: mol_type = other DNA
caaacccaacaatgtgaaccttatggagatgtgcgccctgctctcgatgattgagaatgccaagagcccctccataggcc

SEQ ID NO: 154182 - DNA, 80 bp, synthetic construct
  source 1..80: mol_type = other DNA
gggcgtgctctaacccggaagcatcctcgaccacgtgactgtgacgtcacggccgccattttgtgctatccgccattttg

SEQ ID NO: 154183 - DNA, 80 bp, synthetic construct
  source 1..80: mol_type = other DNA
aggagcagggggggcaggagcaggagggacaggagcaggaagaggggcaggagaagaaggggcaggagcaggaggggcag

SEQ ID NO: 154184 - DNA, 80 bp, synthetic construct
  source 1..80: mol_type = other DNA
atgggaaacaacaatatgatgactttgtccagaaagttcgatctgtccctgtaggtcgaactttgtacttaccaccatat

SEQ ID NO: 154185 - DNA, 80 bp, synthetic construct
  source 1..80: mol_type = other DNA
gtcaaaacattatcccgttactgtgacctccccaaccttccaatggatggagaaaaacgacttttatccagccaggtatc

SEQ ID NO: 154186 - DNA, 80 bp, synthetic construct
  source 1..80: mol_type = other DNA
gtatagcttttagagtagttaatgaaaatgatgttcacttaactaaagtcaaaatcagagtctaccatcgtgccaaacat

SEQ ID NO: 154187 - DNA, 80 bp, synthetic construct
  source 1..80: mol_type = other DNA
ggtacgttctttgaccctgggtaactcaactatcacaactcaagagagcgccaacgtggtggtcgcatacggggtatggc

SEQ ID NO: 154188 - DNA, 80 bp, synthetic construct
  source 1..80: mol_type = other DNA
catgggtatccgcaagaaagacattattaacagaatagataaggacactaccaaactacaacagatgatggatctgtatg

SEQ ID NO: 154189 - DNA, 80 bp, synthetic construct
  source 1..80: mol_type = other DNA
gaacagcaatgcaaatttgtaatacgagacatccctatgtgggccgcctgccacggctatgcagaatacatacagtccca

SEQ ID NO: 154190 - DNA, 80 bp, synthetic construct
  source 1..80: mol_type = other DNA
tggacaacaggacaacaataaatcaatattctccattagtttaagtccagcagcagatcccaggttatcctacacaatgt

SEQ ID NO: 154191 - DNA, 80 bp, synthetic construct
  source 1..80: mol_type = other DNA
aatactttgcagcagtccaaggcgagataacatcaagaaagactgccaaggatgtcggcatagcaccaatcaacacaccc

SEQ ID NO: 154192 - DNA, 80 bp, synthetic construct
  source 1..80: mol_type = other DNA
agtcggtgaggcccctgcccgcgctgccggcccctgaaacatggtctggggccgccgccggcggtggcgccgctggagac

SEQ ID NO: 154193 - DNA, 80 bp, synthetic construct
  source 1..80: mol_type = other DNA
ttggtgctttgtctttgccaacctgctctctctggagatcttctcaccgtggcagacacacgtgtacaggcttggattcc

SEQ ID NO: 154194 - DNA, 80 bp, synthetic construct
  source 1..80: mol_type = other DNA
agatgatgaattacattcagtttaaatcaaagcaaagaaccgaaccagtctgtgtgttaatacatggttcaccaggctca

SEQ ID NO: 154195 - DNA, 80 bp, synthetic construct
  source 1..80: mol_type = other DNA
tccattgtggtcactttgttatggatacccagactactgcagaaaacaaaccggagactcaggtatttactatgactaca

SEQ ID NO: 154196 - DNA, 80 bp, synthetic construct
  source 1..80: mol_type = other DNA
cgtgggacggctgcgtcacaaacgcggaagtggctgttccacgtgacttgtcacgtgacctgctacgtcacggcggccat

SEQ ID NO: 154197 - DNA, 80 bp, synthetic construct
  source 1..80: mol_type = other DNA
cactcggtggaaaaccggtcgctatcatcaactatggtgagattttcaccctgcgtggtattcagtttcttcatattcat

SEQ ID NO: 154198 - DNA, 80 bp, synthetic construct
  source 1..80: mol_type = other DNA
gtgatattgagctaacatttgtcataaccagcgcacaagacccttcaactgccatgaacctggatgtaccagtgctgacc

SEQ ID NO: 154199 - DNA, 80 bp, synthetic construct
  source 1..80: mol_type = other DNA
ccacaaacgaacactccaaccacaacgttccaagtgttgaaagacatttattacaacactatgagcatctctgagccccc

SEQ ID NO: 154200 - DNA, 80 bp, synthetic construct
  source 1..80: mol_type = other DNA
atggctggactatctaggtaaaagcaacgccatactagacgagaaaaaagcaaaagtagtaattaaagaccaacccctat

SEQ ID NO: 154201 - DNA, 80 bp, synthetic construct
  source 1..80: mol_type = other DNA
ctgaaggtaccgtcggaagtaaccttatagaaaccattcggaataataacatcaccctgggaattcatgctgtgtgggcg

SEQ ID NO: 154202 - DNA, 80 bp, synthetic construct
  source 1..80: mol_type = other DNA
gcccagttagctactctagacatagacccacaaccagtaacactagaagatagtgtatttggaatggatggtttggaggc

SEQ ID NO: 154203 - DNA, 80 bp, synthetic construct
  source 1..80: mol_type = other DNA
tggattcactccgttgtcctctcgcactacgtatattattaacgctgtgctattaattaggtcaatacatcacaatggga

SEQ ID NO: 154204 - DNA, 80 bp, synthetic construct
  source 1..80: mol_type = other DNA
aggtctagctttaactatgccatccactcagacgactaccagctacaggtgttaccttttggaggaggcatgagcaccat

SEQ ID NO: 154205 - DNA, 80 bp, synthetic construct
  source 1..80: mol_type = other DNA
ctcagagaatactactttcaatggcttaccaaaaatgatggcaacaacctagcagtaaaacccacctggaccactcctac

SEQ ID NO: 154206 - DNA, 80 bp, synthetic construct
  source 1..80: mol_type = other DNA
aagcagctatgttgggcacacatgtagtttgggacattggattacaatcaacagtagttctcaacatcccctggacttca

SEQ ID NO: 154207 - DNA, 80 bp, synthetic construct
  source 1..80: mol_type = other DNA
aacctaatgaaaacacaattttattagcattgacagcagatctacaagtggatgcctcagatactcaaggtccagacaac

SEQ ID NO: 154208 - DNA, 80 bp, synthetic construct
  source 1..80: mol_type = other DNA
tcagagtgtagtgataatggatgacatcatgcagaaccctggtggtgaggatatgacattattctgtcaaatggtatcca

SEQ ID NO: 154209 - DNA, 80 bp, synthetic construct
  source 1..80: mol_type = other DNA
catactccctcagcccggtgccgctgacaaacaccgcgggacgacatgcaccggcagtgcgcaaaaagcgccggccacgg

SEQ ID NO: 154210 - DNA, 80 bp, synthetic construct
  source 1..80: mol_type = other DNA
tacccatagcatccactatgcccacaaaggactactgggagtatagaataggaatgttttctccaatattcctcagccca

SEQ ID NO: 154211 - DNA, 80 bp, synthetic construct
  source 1..80: mol_type = other DNA
tttttcgcgactgtctcaaactctggaagggaggcaatgctggggtcgtcctcctcaactcgctccaggggccaggtgat

SEQ ID NO: 154212 - DNA, 80 bp, synthetic construct
  source 1..80: mol_type = other DNA
gcaacaagtaatgacacctggtactatggaaacacatacaaagacaacattaaagacttaactaaaaaagccagagatag

SEQ ID NO: 154213 - DNA, 80 bp, synthetic construct
  source 1..80: mol_type = other DNA
tgatgctgaagcccggctccacggtgatgccacaaaggagcggcaccgtcaggcacctgtggcccgcgtagccggtcccc

SEQ ID NO: 154214 - DNA, 80 bp, synthetic construct
  source 1..80: mol_type = other DNA
tgtagggaagaccagagagaagctacccaagacggccaccgccgcggagatttggaagaggagcaagccggcgattcgga

SEQ ID NO: 154215 - DNA, 80 bp, synthetic construct
  source 1..80: mol_type = other DNA
acgtgggtgggtgacgctgtaaacccggaagcaatcctcccacgtggcttctcacgtgactgctacgtcacggccgccat

SEQ ID NO: 154216 - DNA, 80 bp, synthetic construct
  source 1..80: mol_type = other DNA
caccctgtgtcaaaggtcaagggtcagcttccgctttgcacaaaatggtggacaaaagcatccgggtcaaaggtcactgt

SEQ ID NO: 154217 - DNA, 80 bp, synthetic construct
  source 1..80: mol_type = other DNA
aaaagtagattaatagaagcatcaagcctgaatgactcagttaatatgagagtcaaattaggtcacttatacaaagcatt

SEQ ID NO: 154218 - DNA, 80 bp, synthetic construct
  source 1..80: mol_type = other DNA
cggcctgtatcgtcccgaagaagaggtgttcctcctcttgaaccgctgccatgggccactgtcaacgccgaaaaatgctt

SEQ ID NO: 154219 - DNA, 80 bp, synthetic construct
  source 1..80: mol_type = other DNA
agtgatgccacggacggggtccagacagctgtgcacaacgcagccatgggtgtagctgttggcaatctaacaatcttccc

SEQ ID NO: 154220 - DNA, 80 bp, synthetic construct
  source 1..80: mol_type = other DNA
tacatatcatgagaaagcaatacttcaagcaactaacttcagaaggtccacaacaaacaaacagcactgaaggctatgca

SEQ ID NO: 154221 - DNA, 80 bp, synthetic construct
  source 1..80: mol_type = other DNA
cataaccacctatggattcggccatcagagcaaagcggtttacgtcgctgggtacaagatctgcaattatcatctcgcca

SEQ ID NO: 154222 - DNA, 80 bp, synthetic construct
  source 1..80: mol_type = other DNA
ttttggtcagcaagcaacgaagacctagacctttctagatacctaggagcctcattaatattttttagacaccccacagt

SEQ ID NO: 154223 - DNA, 80 bp, synthetic construct
  source 1..80: mol_type = other DNA
ggggtcagagagctcttctgtccctggcaaaactgcaggtagtaggcatagcgggcaagaaggttgggcgagaaggaggc

SEQ ID NO: 154224 - DNA, 80 bp, synthetic construct
  source 1..80: mol_type = other DNA
tgaaccattaacactggaacaagctgtgtgtggcataaaaaatttggaacctcttgacttaacaaccagtgcaggattcc

SEQ ID NO: 154225 - DNA, 80 bp, synthetic construct
  source 1..80: mol_type = other DNA
atgaaaccacagttcatgcaggatccggggcagtagttaaatattttaacattaactattacaaagatgctgcaagttca

SEQ ID NO: 154226 - DNA, 80 bp, synthetic construct
  source 1..80: mol_type = other DNA
aataaggcctggttaactgttgtttctgctgttactagtgctataagtatcttgcttctagttacaaaaatttttaaagg

SEQ ID NO: 154227 - DNA, 80 bp, synthetic construct
  source 1..80: mol_type = other DNA
tccaattcctcttgctccaactcctcaaaacccaatccaatttgcatttaaacccacaatttttaagcccttcataaaat

SEQ ID NO: 154228 - DNA, 80 bp, synthetic construct
  source 1..80: mol_type = other DNA
acacgtcaacaagcccaacccggccgctatcactagcgttgcacgtatatactttaaaccgaaacacgtgcgcgcttggg

SEQ ID NO: 154229 - DNA, 80 bp, synthetic construct
  source 1..80: mol_type = other DNA
actacgtaagcacacaactaggcccaaacgtggaccacgagactcaaggcctggtgtgcataatatgcccatacactgag

SEQ ID NO: 154230 - DNA, 80 bp, synthetic construct
  source 1..80: mol_type = other DNA
atccacactgggacacactatacgggggtctagcctatggcttttcaccttcctcaaattcagaaaacacaaaccaagca

SEQ ID NO: 154231 - DNA, 80 bp, synthetic construct
  source 1..80: mol_type = other DNA
tagaacgtgactttaactacacacaatactgtctgaactgcataggcagcatcatactaatccttggtacggtgtatgcc

SEQ ID NO: 154232 - DNA, 80 bp, synthetic construct
  source 1..80: mol_type = other DNA
cttgctgaagcagcctatggcatggagaatctagaaggcttggatttgaccactagtgcagggttcccctatgtcactaa

SEQ ID NO: 154233 - DNA, 80 bp, synthetic construct
  source 1..80: mol_type = other DNA
cggccagaaggggccagcaaagcacattctgcgccagttgttaacgggtggcgtcaagagtgggagaccatcacttaagt

SEQ ID NO: 154234 - DNA, 80 bp, synthetic construct
  source 1..80: mol_type = other DNA
ttgttcattatgaagaatataacaaagagggaaaaaattttactaagtggcaagtaaacatccaagagatggctcagatt

SEQ ID NO: 154235 - DNA, 80 bp, synthetic construct
  source 1..80: mol_type = other DNA
aattagagctttttacctatgttaggtttgacttagaaattacaattataaccagtaactccagtttaatgcagatcatg

SEQ ID NO: 154236 - DNA, 80 bp, synthetic construct
  source 1..80: mol_type = other DNA
ctaacactgcaactgaccgtgcaagcataaccaccacggattatgaaggtggggtgccagtaaacccacaaaggacatct

SEQ ID NO: 154237 - DNA, 80 bp, synthetic construct
  source 1..80: mol_type = other DNA
gttatcaacccgaaagtgctcggcccaagctattccttcaaaagctttgacatcagacgtggactctttagcactcaaag

SEQ ID NO: 154238 - DNA, 80 bp, synthetic construct
  source 1..80: mol_type = other DNA
gttcagattttaaattaagactgatgaaggacacacaaaccatatcacaaacagatgcattaccagagggcttgggagaa

SEQ ID NO: 154239 - DNA, 80 bp, synthetic construct
  source 1..80: mol_type = other DNA
gaagtccgtcactaaacacgtgactcctctcgcccaatcagcgtctacttcgtgcatttcctgggaggagtcatccgcct

SEQ ID NO: 154240 - DNA, 80 bp, synthetic construct
  source 1..80: mol_type = other DNA
atattatccagtaatttgtgaaaaacctacatgtatttggattgagggcaataattattacccaagtaggtatcaacaag

SEQ ID NO: 154241 - DNA, 80 bp, synthetic construct
  source 1..80: mol_type = other DNA
acccaacactgccaatcgctaaaccaaagggagcttttcccgtgtctcaaagggagtttaaaaatgaagcaccatatgat

SEQ ID NO: 154242 - DNA, 80 bp, synthetic construct
  source 1..80: mol_type = other DNA
aagattccgttaataaagactggcaaaaaaaattctttgatgacagagacagtctatttctctttgccacttaccaccca

SEQ ID NO: 154243 - DNA, 80 bp, synthetic construct
  source 1..80: mol_type = other DNA
ggtctctaagtaccaccacttggactctacaggcgctgtatgaccagcaccagagattcatgaacaagtggtcttatccc

SEQ ID NO: 154244 - DNA, 80 bp, synthetic construct
  source 1..80: mol_type = other DNA
gaaacaaactggacaccagaacagcaggcctacaaacccccgaaaaagaaagctacactttactccaagccctccaagag

SEQ ID NO: 154245 - DNA, 80 bp, synthetic construct
  source 1..80: mol_type = other DNA
agacccggcacgtggtcaactttcacacaaggtccgagtcaacaatagagaacttcatgtgtcgagccgcatgcgtgtac

SEQ ID NO: 154246 - DNA, 80 bp, synthetic construct
  source 1..80: mol_type = other DNA
tatccaccctctccccatagtaacttagaagtatgtttcatatggtcaataggcggctcagtatgccaactgagtctcga

SEQ ID NO: 154247 - DNA, 80 bp, synthetic construct
  source 1..80: mol_type = other DNA
cgcagacggggcagacgcagggggcgacgacgaaagcacaaacaaactttagttataagacaatggcagccggacgttgt

SEQ ID NO: 154248 - DNA, 80 bp, synthetic construct
  source 1..80: mol_type = other DNA
aagggacgaagcagtattcacctccagcgtgagcacccgcacaccgtccctggcgatcgcgccgcctcctgaccgatcga

SEQ ID NO: 154249 - DNA, 80 bp, synthetic construct
  source 1..80: mol_type = other DNA
gcacttgatgacactgtgaagaatgatgttaaggtgtttgtcaaacctaaacacatatcagcatgggtaccccgaccccc

SEQ ID NO: 154250 - DNA, 80 bp, synthetic construct
  source 1..80: mol_type = other DNA
tgcaatgacttctccgctagactgctcaaggacaccccatttgtgagacaggatgcctatgcgaacacacaaggcataga

SEQ ID NO: 154251 - DNA, 80 bp, synthetic construct
  source 1..80: mol_type = other DNA
taccaaacatggaaccaaaaggcacaagcaaattataacttagtaaaagaagaataccaaacagtatatccagttaccac

SEQ ID NO: 154252 - DNA, 80 bp, synthetic construct
  source 1..80: mol_type = other DNA
cccccctttctatccttactgcaaaaacaattacaatgtaacctttcagcttaactacaaataaagctcagccttactgt

SEQ ID NO: 154253 - DNA, 80 bp, synthetic construct
  source 1..80: mol_type = other DNA
tgctagaaaatcaaatcaacaccatccatcagtcatgcccgagtcaagagcagcaagaagtgctcttcaacaacgtgagg

SEQ ID NO: 154254 - DNA, 80 bp, synthetic construct
  source 1..80: mol_type = other DNA
ccccgtaaccacattccaggtgttgaaagagttctattacaacagcataggcgttggaactgacccaaataaaaagtata

SEQ ID NO: 154255 - DNA, 80 bp, synthetic construct
  source 1..80: mol_type = other DNA
tattaaaaagagatcattgattacaaattatggaataggacccagatttgggggagtctttacaggaaatgttaagataa

SEQ ID NO: 154256 - DNA, 80 bp, synthetic construct
  source 1..80: mol_type = other DNA
caggacaggacccttccagatcagtgagatgacatacatgagcactcacccagcaataatgctactaatgaaacacagaa

SEQ ID NO: 154257 - DNA, 80 bp, synthetic construct
  source 1..80: mol_type = other DNA
tcctgcacccaaacctcaattctctgtaaccttcaaactgggcttcaaataaaattgctaggccgtgggagttacgcttg

SEQ ID NO: 154258 - DNA, 80 bp, synthetic construct
  source 1..80: mol_type = other DNA
aaaggctggttggtcaacatttcgagtcaagttcaattggaacgcaacatcaacagggctatgactatcctacaggctgt

SEQ ID NO: 154259 - DNA, 80 bp, synthetic construct
  source 1..80: mol_type = other DNA
acttggataggcaacatggattgctttgtccatatcatgagaatgattaagagtcatagtcttgggttagtgcatagtga

SEQ ID NO: 154260 - DNA, 80 bp, synthetic construct
  source 1..80: mol_type = other DNA
gtcataagtcacgtggggggggtcccactgtaacccggaagtaggccccgccacgtgactactcacgtggtgctcacgtc

SEQ ID NO: 154261 - DNA, 80 bp, synthetic construct
  source 1..80: mol_type = other DNA
cttcatcccagtgttttctacaatgtgttccctggaaacaaagaaccagcggtcttacaccctgcagatgaacgacttga

SEQ ID NO: 154262 - DNA, 80 bp, synthetic construct
  source 1..80: mol_type = other DNA
tcaacatgaattcatccgggcattggtcaaaagaaactgtcacatcttgaccacaaaaaggggcgaattcaatctgctcg

SEQ ID NO: 154263 - DNA, 80 bp, synthetic construct
  source 1..80: mol_type = other DNA
agacggacgcacagaaaaaagataataataaaacagtggcaaccaaactttataagacgctgctacatcataggctacct

SEQ ID NO: 154264 - DNA, 80 bp, synthetic construct
  source 1..80: mol_type = other DNA
tgttgcgtgatacaacgcacatcagtcaaacagcactaccacaagggattgaggatctgatttcagaagtggcgagcaac

SEQ ID NO: 154265 - DNA, 80 bp, synthetic construct
  source 1..80: mol_type = other DNA
tcaaactcggctggaaataaataaacaaggccttaaactgttcacttgtcggtgtctacctcttaaggtcactaagcact

SEQ ID NO: 154266 - DNA, 80 bp, synthetic construct
  source 1..80: mol_type = other DNA
ttatcacaagtgtacaacctaatattagaagaagatagaaagcggacacaggttgttgatgtcatggcagcaatatttca

SEQ ID NO: 154267 - DNA, 80 bp, synthetic construct
  source 1..80: mol_type = other DNA
gggagatgccatctttgtaaatacagcacaaaatctacaaacattaaaagagaaaattactaataacattaaaaactata

SEQ ID NO: 154268 - DNA, 80 bp, synthetic construct
  source 1..80: mol_type = other DNA
attcttatgaacactcgttatctttatggacgagtattcgatctttgtactactgtagcatttcttggaccttccatttt

SEQ ID NO: 154269 - DNA, 80 bp, synthetic construct
  source 1..80: mol_type = other DNA
ttccagggacgaaagagccagcagttttacatccagcagatgaaagattagaagtggattttgaggaatcactgttctca

SEQ ID NO: 154270 - DNA, 80 bp, synthetic construct
  source 1..80: mol_type = other DNA
agactcgcatactcaccagcgagtcctccagccctggctccactcctcccaagaggagcaaacggagtcgcaaagcgagc

SEQ ID NO: 154271 - DNA, 80 bp, synthetic construct
  source 1..80: mol_type = other DNA
aggaacagccctggtggcccgacaacgccatcaggagatggtggatcagcgttgccatcgtcatcttcatcggagtctgt

SEQ ID NO: 154272 - DNA, 80 bp, synthetic construct
  source 1..80: mol_type = other DNA
atgccagtaaatttcatcaaggaacactattagttgttgccatcccagaacatcagcttgcttacataggtactggtaat

SEQ ID NO: 154273 - DNA, 80 bp, synthetic construct
  source 1..80: mol_type = other DNA
cttgtgcagagttctaatccatgctacagtattttctttgactacatggccatacataggagcctcacgaaaatctggga

SEQ ID NO: 154274 - DNA, 80 bp, synthetic construct
  source 1..80: mol_type = other DNA
acaaacatgactttctccctggaggcaatatacgaacagtttctgtaccacagaaacaggtggtcagcctccaaccacga

SEQ ID NO: 154275 - DNA, 80 bp, synthetic construct
  source 1..80: mol_type = other DNA
catatgccagctaggcctcttccagctatatgccacaggagccaacctacaaaacccctggctcagatcaggcacaaaca

SEQ ID NO: 154276 - DNA, 80 bp, synthetic construct
  source 1..80: mol_type = other DNA
caaaggctatatgagctactctctgacccacgctccgcgctcggcctagacccggggcccctgattgctgagaacctgct

SEQ ID NO: 154277 - DNA, 80 bp, synthetic construct
  source 1..80: mol_type = other DNA
actagatacaatggacatctttcgtatccccgtccaaagtgggaaccatcagagtatgcaggtctttggctttcaagtgc

SEQ ID NO: 154278 - DNA, 80 bp, synthetic construct
  source 1..80: mol_type = other DNA
ttaaatgacaagggtgagacttcaccgatatttagtatatcgctcagtccagcatcagacaagaggttgcgatacacgat

SEQ ID NO: 154279 - DNA, 80 bp, synthetic construct
  source 1..80: mol_type = other DNA
ggcaccttgcgtgccaacacacgattcgtgcggtttccagtatttatcacggcttcccgccacaggtaaaagttaacact

SEQ ID NO: 154280 - DNA, 80 bp, synthetic construct
  source 1..80: mol_type = other DNA
gtgttatctcatatgcacccagcctagaatattgactgccacaacccctgaattagtactggaacattgtgtagacaaac

SEQ ID NO: 154281 - DNA, 80 bp, synthetic construct
  source 1..80: mol_type = other DNA
aataccaattacgatcacagtcgcacctttgtgttcagaattcgctggattgcggcaagcggttaagcaaggagtgccag

SEQ ID NO: 154282 - DNA, 80 bp, synthetic construct
  source 1..80: mol_type = other DNA
tatggtcggacgactgggcgtcggacctcaggtaacggaactctacgagcgatatcaacacgagatggaagaacagcacc

SEQ ID NO: 154283 - DNA, 80 bp, synthetic construct
  source 1..80: mol_type = other DNA
gaccgaccttccagtggatggaagccaacgaatactacccagccagataccaatcacacatgacgataggttgcggtttt

SEQ ID NO: 154284 - DNA, 80 bp, synthetic construct
  source 1..80: mol_type = other DNA
gtggttcagcagctgcgccaggaaaagaaaaacagaaagtgtgtggaacacaatctcactgccatatttcagggtctggg

SEQ ID NO: 154285 - DNA, 80 bp, synthetic construct
  source 1..80: mol_type = other DNA
cacacaggcggcccgtccccttggagagttggacttttgaaaataagccacgtctgccgtgaccggtgttacgataatct

SEQ ID NO: 154286 - DNA, 80 bp, synthetic construct
  source 1..80: mol_type = other DNA
ttatgattagagaagctggaagaatactgactgagatgtctggagcacccaatcattttggggaagctctgataaataca

SEQ ID NO: 154287 - DNA, 80 bp, synthetic construct
  source 1..80: mol_type = other DNA
gatatggagtctggccccactacttaacaccacaagacgccacagcaattgataaaccatcaagacctgacacttcatcc

SEQ ID NO: 154288 - DNA, 80 bp, synthetic construct
  source 1..80: mol_type = other DNA
ggcgctcggagtttgacggcgggtgtttctacggtgtttgtgaacgccggcgccggtaacgggagttacgctgtggttga

SEQ ID NO: 154289 - DNA, 80 bp, synthetic construct
  source 1..80: mol_type = other DNA
acccagtacggatatcatttcgggacaacggcgaccgcgcgactccatgctgcctgcgcgtacgggtgtaggcgactgag

SEQ ID NO: 154290 - DNA, 80 bp, synthetic construct
  source 1..80: mol_type = other DNA
aagttttccgcgaggtatccacaacgccggcggccggccgcggtgtctcgcacacggcttcgacggcgtttctggcgcgt

SEQ ID NO: 154291 - DNA, 80 bp, synthetic construct
  source 1..80: mol_type = other DNA
acttaaagtagagtacattaagaacctcaagcaactccctttactggaaaaggaaattgatgggttacgactggcctccc

SEQ ID NO: 154292 - DNA, 80 bp, synthetic construct
  source 1..80: mol_type = other DNA
ccaccgatcgattttacacacttacaagtgttacctggaatggctcatctaaaggttggtggtggaaactgcccgatgca

SEQ ID NO: 154293 - DNA, 80 bp, synthetic construct
  source 1..80: mol_type = other DNA
gacgtagaaacagtgggcatagtttgctttatatgcccctacaccgagcccgcctgcgttaacaaaaacgacggcaaatc

SEQ ID NO: 154294 - DNA, 80 bp, synthetic construct
  source 1..80: mol_type = other DNA
cggaaagacgctaaagaagtcttgggtgtggatacccatgtcagtagtgatggccgccaccctggccggagtcatggtcg

SEQ ID NO: 154295 - DNA, 80 bp, synthetic construct
  source 1..80: mol_type = other DNA
cgagctgtttaacaccttcaagttaacacccgtggttgataatcaggggcagcgtctctacgtcagatactcgtcagaca

SEQ ID NO: 154296 - DNA, 80 bp, synthetic construct
  source 1..80: mol_type = other DNA
tatggaaaaagccgtcaatgtcatgtgggatagggatctcttggtttgcgaaagtggtgcacaaggaattgataccatcg

SEQ ID NO: 154297 - DNA, 80 bp, synthetic construct
  source 1..80: mol_type = other DNA
aaagttcgatccgtccctgtaggtcgaaccttgtacttaccaccatatgagtacttagaaagaagatggatagataaatt

SEQ ID NO: 154298 - DNA, 80 bp, synthetic construct
  source 1..80: mol_type = other DNA
gcagaaattacaggagcaaacaacaaaaagtggcagtacacatacaccaagctcatggcccctatatactattcagcaaa

SEQ ID NO: 154299 - DNA, 80 bp, synthetic construct
  source 1..80: mol_type = other DNA
tcaagtatcatctcaaaaagttggagcccacgaaaatactaacgtggccactggtgggtccacagtaaattacactacta

SEQ ID NO: 154300 - DNA, 80 bp, synthetic construct
  source 1..80: mol_type = other DNA
ggattacgcaccaagttcatcaacagagatccctataaccgtcaccattgcacctatgtgcacagagtttaatggactga

SEQ ID NO: 154301 - DNA, 80 bp, synthetic construct
  source 1..80: mol_type = other DNA
ccgccggaggaggagacgacctcggctccgacgccgtagaagagctgctcgacctgctagacgacccagagtaaggaggc

SEQ ID NO: 154302 - DNA, 80 bp, synthetic construct
  source 1..80: mol_type = other DNA
agcaacgtgctcatcgccaaccgctcccacaactctctaaggctggtgcccaatccggacttgctgcctctccagcattt

SEQ ID NO: 154303 - DNA, 80 bp, synthetic construct
  source 1..80: mol_type = other DNA
gcagagtgtggttattatggatgacataatgcaaaaccccagtggagaggacatgtcattattttgtcaaatggtgtcgt

SEQ ID NO: 154304 - DNA, 80 bp, synthetic construct
  source 1..80: mol_type = other DNA
tcacccgaagccatagatagaagatttttcttagattgtgatgttaagattatgccagcatacaacacaaacaacctact

SEQ ID NO: 154305 - DNA, 80 bp, synthetic construct
  source 1..80: mol_type = other DNA
aggagcaggttaaagccttcccagatgctagtgaagatgcacaatgtgaacttattgtaaacattgacaaacttaagaag

SEQ ID NO: 154306 - DNA, 80 bp, synthetic construct
  source 1..80: mol_type = other DNA
gaattttctcagtagagcagctttggtgtcaaagagaagtttcgaatacaaagaccatacttcgtctgcagcacaagcag

SEQ ID NO: 154307 - DNA, 80 bp, synthetic construct
  source 1..80: mol_type = other DNA
aagaacctacttgagatcatacaggttgataccttgataccaatgaacaatacacacacaggtgataaggttgaaagtta

SEQ ID NO: 154308 - DNA, 80 bp, synthetic construct
  source 1..80: mol_type = other DNA
tctgcgtgtaatgacttctcagttcgaatgctgaaggacaccccattcatagagcaaaccaacaaattgcaaggggacac

SEQ ID NO: 154309 - DNA, 80 bp, synthetic construct
  source 1..80: mol_type = other DNA
caagaagaacaagtactccagttgcagctcagacagcagctccgagaacagcgaaaactcagacagggaatccagtgcct

SEQ ID NO: 154310 - DNA, 80 bp, synthetic construct
  source 1..80: mol_type = other DNA
attaattattttaaggatgcagcctccagtggggcatcaaaattggaattttcacaagatccaagtaaattcacagatcc

SEQ ID NO: 154311 - DNA, 80 bp, synthetic construct
  source 1..80: mol_type = other DNA
gcccaaaataatcttaaaacaatggcaaccagacattgtaaagaggtgctacatagtgggctacattcctgccataatat

SEQ ID NO: 154312 - DNA, 80 bp, synthetic construct
  source 1..80: mol_type = other DNA
ctttacccaacaaaagaaatgattacacatggcaatcaggaacaaatgcttctgttttctggcaacatggtcaaccttac

SEQ ID NO: 154313 - DNA, 80 bp, synthetic construct
  source 1..80: mol_type = other DNA
cagattaatggcctagagaaggagagggagctctatctaaagaagatccgctccatggagtctcagctgcaggcctccct

SEQ ID NO: 154314 - DNA, 80 bp, synthetic construct
  source 1..80: mol_type = other DNA
aaggcgccggcgagtaccgagaagaagacctagacgagctgttcgccgctatggaaagagacgagtaaggaggcgccggt

SEQ ID NO: 154315 - DNA, 80 bp, synthetic construct
  source 1..80: mol_type = other DNA
taagaatgagagccaagtggtacgtaaacatattccaccaaaaagaagtattggagagcatagtacagtccggaccgttc

SEQ ID NO: 154316 - DNA, 80 bp, synthetic construct
  source 1..80: mol_type = other DNA
tagtgaccatctggtaccagacaaactttgttgtacctcctgatacaccgagtcaagcacacataatagctctgggtgct

SEQ ID NO: 154317 - DNA, 80 bp, synthetic construct
  source 1..80: mol_type = other DNA
cacgcgtcgtcaaaaagttggtggtccactccgtaaggacaggtaggcttatttagcttccgcatgctcctggttccgta

SEQ ID NO: 154318 - DNA, 80 bp, synthetic construct
  source 1..80: mol_type = other DNA
ttaaagtagaactgcacgtccggcagattgtgccgataggtgaaacacttccagatgatgttttttctgttggccaggat

SEQ ID NO: 154319 - DNA, 80 bp, synthetic construct
  source 1..80: mol_type = other DNA
attctactgtcaccacaagaaccacgggatactctttttaggtgggtcaatatgcctacccacaccaagatacacccaag

SEQ ID NO: 154320 - DNA, 80 bp, synthetic construct
  source 1..80: mol_type = other DNA
gtctactagatactggtaaggcattgaccccatgcactacatgcccaaaacccccctactacaagtcctgctgcccactt

SEQ ID NO: 154321 - DNA, 80 bp, synthetic construct
  source 1..80: mol_type = other DNA
cctcccaccagggtgtagtatcagattactttacacaactaggaaatgcctttggtgagggttttaccacaaacatacag

SEQ ID NO: 154322 - DNA, 80 bp, synthetic construct
  source 1..80: mol_type = other DNA
agcacctgataaatcagaattttcaggccccatgcatacacagaaacaggggatccccacccgtatcccaagtggatcac

SEQ ID NO: 154323 - DNA, 80 bp, synthetic construct
  source 1..80: mol_type = other DNA
caacatttttacacaaaaagagacagcaactatggctggtgtaactttaaccctactgcctttaatacaaatttagtaac

SEQ ID NO: 154324 - DNA, 80 bp, synthetic construct
  source 1..80: mol_type = other DNA
ttttctgtccggttgctaaaggacaccccgttcatcgagcagagtgcactactccaaggcgacgtggtggaggcaattga

SEQ ID NO: 154325 - DNA, 80 bp, synthetic construct
  source 1..80: mol_type = other DNA
attgtgcacagaaacatagtatatttgagattattcccaaacttaaatgtatttgtaaatagctactcttactttagggg

SEQ ID NO: 154326 - DNA, 80 bp, synthetic construct
  source 1..80: mol_type = other DNA
gaatggcctcaattttctctatacactcagttggaacacgagacctgtccaggttaagcaccattttatcgcccttatac

SEQ ID NO: 154327 - DNA, 80 bp, synthetic construct
  source 1..80: mol_type = other DNA
gactttatgtgacccttgggcctggctccccatagactcccatgtaagcctgcctcgagtaggtgcctccagagcccctt

SEQ ID NO: 154328 - DNA, 80 bp, synthetic construct
  source 1..80: mol_type = other DNA
gtcattcggtgttcatctggctaacaagaccctggtctgttaggaccctttctgttttgggaaaccgaaacgggaaaatc

SEQ ID NO: 154329 - DNA, 80 bp, synthetic construct
  source 1..80: mol_type = other DNA
tttggaaactccaaaatgcctgacggaaacagctacatacccatagaatacagatttaactggtatccatgcatgttcca

SEQ ID NO: 154330 - DNA, 80 bp, synthetic construct
  source 1..80: mol_type = other DNA
actctgccaccaggcaggactttagtcaagacccgtccaaattcactgaaccagttaaagacttgatgctaaaaagcgct

SEQ ID NO: 154331 - DNA, 80 bp, synthetic construct
  source 1..80: mol_type = other DNA
caaggctcttaaaaagatgcgtttctctaatatcgcccgcagaaagaaaaggaaactgtcactgctacctgtgcaccctt

SEQ ID NO: 154332 - DNA, 80 bp, synthetic construct
  source 1..80: mol_type = other DNA
gatgcagccaatatcatttaatcctgcagtgagacccactccccatcagccacctcaggtggagcccactttctatcagt

SEQ ID NO: 154333 - DNA, 80 bp, synthetic construct
  source 1..80: mol_type = other DNA
ctttatcacaggtccctttattaaagatcaaatgcaagcaaacacttatgatacctatttacaaacgttacaaaaagcct

SEQ ID NO: 154334 - DNA, 80 bp, synthetic construct
  source 1..80: mol_type = other DNA
aagtaacatatatgcgattaatgacaggtatcgtaccgataacagattgatatgcgagtttgaaaccggatggtgcaacc

SEQ ID NO: 154335 - DNA, 80 bp, synthetic construct
  source 1..80: mol_type = other DNA
gcaatttccagacacatccagcacggagattcctatcactattacaattgctccaatgtgctgtgagttcaacggactca

SEQ ID NO: 154336 - DNA, 80 bp, synthetic construct
  source 1..80: mol_type = other DNA
tgggaaactctaccattaccactcaagaggccgccaattccgtgatcggatatgggcagtggccaacatacttgaacgct

SEQ ID NO: 154337 - DNA, 80 bp, synthetic construct
  source 1..80: mol_type = other DNA
cgactcaaaaacacaagaaaggatcaaagtagaaatagacacattgcatgatttatcctgtaaatttctaccactttatg

SEQ ID NO: 154338 - DNA, 80 bp, synthetic construct
  source 1..80: mol_type = other DNA
gtggtagtgtagtcaatatagatggtagagaagtgaaagtaatcaaacaacagatcttaaccaatatggatgatatagat

SEQ ID NO: 154339 - DNA, 80 bp, synthetic construct
  source 1..80: mol_type = other DNA
atcgggtcatcgggcatatcggccttgaccgcgttgaacatgctgtatgcctcgcagcgcggccgtctgaccgagaacct

SEQ ID NO: 154340 - DNA, 80 bp, synthetic construct
  source 1..80: mol_type = other DNA
tatggtctaaattaaatctcacaggtaaattcgccaaatggaacatcaatttccaggaacaggctaatatcagaaagaaa

SEQ ID NO: 154341 - DNA, 80 bp, synthetic construct
  source 1..80: mol_type = other DNA
cctactaatagttgctgctatcccagaacaccaacttgcttctgcattgactggaaatgtttcagttggatataaacaca

SEQ ID NO: 154342 - DNA, 80 bp, synthetic construct
  source 1..80: mol_type = other DNA
atgaccagcagcagcagaagggtcagcacagccagagaggcccactgcagtactagcatggagaggtttgagaatctggg

SEQ ID NO: 154343 - DNA, 80 bp, synthetic construct
  source 1..80: mol_type = other DNA
acacgacgtgtataccgatgctgggtatattacgtgttggtaccagaccagccttgtggttcctgcagaaacccctcagc

SEQ ID NO: 154344 - DNA, 80 bp, synthetic construct
  source 1..80: mol_type = other DNA
gcctcagcaaagaagatgcagttttagatgaaaaaagagcaaaagtacttattgtagaccaacccctgtgggcagcactg

SEQ ID NO: 154345 - DNA, 80 bp, synthetic construct
  source 1..80: mol_type = other DNA
tcaacccaacacctgttgcagaacatcgccgggacctaaacgatgtgcccgaactggcccacccgagcgtatcaaacact

SEQ ID NO: 154346 - DNA, 80 bp, synthetic construct
  source 1..80: mol_type = other DNA
attgtgtggaacagggatgggtgggcaaagcaacatctactatagaaagagatttcaactacgttcaatacctgttgaac

SEQ ID NO: 154347 - DNA, 80 bp, synthetic construct
  source 1..80: mol_type = other DNA
cacttccgcattagacacccccacaaactcaaactacacacaatttgaaaaatggctatatggcaaatgcacccactatc

SEQ ID NO: 154348 - DNA, 80 bp, synthetic construct
  source 1..80: mol_type = other DNA
tggaaacattcttcttagtggcactcaaacggctagaatgctcaaatataattacccaacaaaatcaggttattgtggtg

SEQ ID NO: 154349 - DNA, 80 bp, synthetic construct
  source 1..80: mol_type = other DNA
ctaaaggggacgggagagaggtcgtcgggagtctcggtggaataggtgaaaacatccccacgcggtgtcctgatgtatac

SEQ ID NO: 154350 - DNA, 80 bp, synthetic construct
  source 1..80: mol_type = other DNA
gtttgaaggatgagctaagaaagctagacaaaatctcagtaggtaaaacaagatgcattgaggcctgcgaagtggactat

SEQ ID NO: 154351 - DNA, 80 bp, synthetic construct
  source 1..80: mol_type = other DNA
gtacgcagttattaaaagaaactgccacattatcactacagataggggagattttaatttactaggaatatacaataatt

SEQ ID NO: 154352 - DNA, 80 bp, synthetic construct
  source 1..80: mol_type = other DNA
cccagatacctattcacttgcaggctatgtaacttgctggtaccagactaacttagttgttccacctaataccccaccaa

SEQ ID NO: 154353 - DNA, 80 bp, synthetic construct
  source 1..80: mol_type = other DNA
atgctgatggcactaatatcatggtgtatataaaacccaaacacataacagcatggatacctagaccacccagagccaca

SEQ ID NO: 154354 - DNA, 80 bp, synthetic construct
  source 1..80: mol_type = other DNA
atgaccttacacccaggaatgctaatgctatctaaaaagagaataataatacccagcttaaaaaccagacccagtaaaaa

SEQ ID NO: 154355 - DNA, 80 bp, synthetic construct
  source 1..80: mol_type = other DNA
attcatcatcttcgtgggcggtccacttaacgccatagtgttgatcacgcagctgctcacgaatcgcgtgcttggctatt

SEQ ID NO: 154356 - DNA, 80 bp, synthetic construct
  source 1..80: mol_type = other DNA
aaggaaccgctggtagtgccttggtagtgtatgagccaaaacctgtcattgattctaaccagtatttggaatttggatct

SEQ ID NO: 154357 - DNA, 80 bp, synthetic construct
  source 1..80: mol_type = other DNA
gctccgcaagcgccgccaacgcgagctggccagcaaagtggcgtcaacggtgaacggcgctacgtcggccaacaaccacg

SEQ ID NO: 154358 - DNA, 80 bp, synthetic construct
  source 1..80: mol_type = other DNA
tccatggacttttctcaaagataagatatgcagctggcttaatattcccaagcctccagggcatcagggggatggttggt

SEQ ID NO: 154359 - DNA, 80 bp, synthetic construct
  source 1..80: mol_type = other DNA
ccttggcggctccaactggttcagcaacaacattaccagttactgtaaccattgcaccaatgttcactgaatttactgga

SEQ ID NO: 154360 - DNA, 80 bp, synthetic construct
  source 1..80: mol_type = other DNA
atgttttatgacggttggtcaaacttctccagggacggcatatatggctacaactcactaaataatatgggaaccatcta

SEQ ID NO: 154361 - DNA, 80 bp, synthetic construct
  source 1..80: mol_type = other DNA
caagtaggtccacatgaacacgtacaaaattatggtaagccatcgtttttcataccacagcctgtagctgtcgtacatga

SEQ ID NO: 154362 - DNA, 80 bp, synthetic construct
  source 1..80: mol_type = other DNA
attagaagatttatcccagagcaccaacgcgaatggtcaaatatgcatcttgctacaaatgtaactaaattccccatgct

SEQ ID NO: 154363 - DNA, 80 bp, synthetic construct
  source 1..80: mol_type = other DNA
agcccccagagagacctgcagttccctgcagcataccaagatgtaacttataatcctaactgtgacagggctgttggaaa

SEQ ID NO: 154364 - DNA, 80 bp, synthetic construct
  source 1..80: mol_type = other DNA
taactttgtgtttgagtctccccccccctgcaacacttagaagaaatgtacttgtagaccaataggcggcggctacccag

SEQ ID NO: 154365 - DNA, 80 bp, synthetic construct
  source 1..80: mol_type = other DNA
caatcgcatatgcttataggagccgggtttgcaatgccaggcgactgtggagggatcctacgatgcacccacggtgtgat

SEQ ID NO: 154366 - DNA, 80 bp, synthetic construct
  source 1..80: mol_type = other DNA
actcaaaatgatttgattagagtggaaccaattggtgtatggattcaaggtgaaccaggacaagggaaatctttcttaac

SEQ ID NO: 154367 - DNA, 80 bp, synthetic construct
  source 1..80: mol_type = other DNA
gttttcctgaaggcacaacaattaacaaaaactctatagacagctacaatacgtggcaaaaaaccacatttatcaccaat

SEQ ID NO: 154368 - DNA, 80 bp, synthetic construct
  source 1..80: mol_type = other DNA
aaataattaatgttgaagaagtttaaacacagaccaatagggagcgacaaaccagtcgtgaaaggtcaagcacctctgtt

SEQ ID NO: 154369 - DNA, 80 bp, synthetic construct
  source 1..80: mol_type = other DNA
tattaaccccatcaatagcatcagcaagaaagtgattaaatggctccttagaatcatatcagctatggtgataattatta

SEQ ID NO: 154370 - DNA, 80 bp, synthetic construct
  source 1..80: mol_type = other DNA
taacattataggtatccatgtaggaggaaatggtagagttggttactgtgcatcactaacaaaaagctactttgccacca

SEQ ID NO: 154371 - DNA, 80 bp, synthetic construct
  source 1..80: mol_type = other DNA
tctaaacacaccgatttgcacgtatccgctcacgccggtttggcagctgccatggtgacagtaattataatttgcgtttt

SEQ ID NO: 154372 - DNA, 80 bp, synthetic construct
  source 1..80: mol_type = other DNA
gcggaaagcgccggcgttgagccagcgaaaatgctgcggatcgggcggcaagggcacgcctcgaagcgcggcccagacag

SEQ ID NO: 154373 - DNA, 80 bp, synthetic construct
  source 1..80: mol_type = other DNA
agcgagcaagaagagacgagcctacaagaccaactcaaaaaacaacttctccagcagcgagtcatgggagacaaactcag

SEQ ID NO: 154374 - DNA, 80 bp, synthetic construct
  source 1..80: mol_type = other DNA
agtggggccagacttcgccatagggcctttatcttcttgccatttgtccgtagggagtggtcgccataacgcgaaccccg

SEQ ID NO: 154375 - DNA, 80 bp, synthetic construct
  source 1..80: mol_type = other DNA
ctcaatgaatggaactttagtaggtaatcttttgatctttccacatcagtttattaatcttaggaccaacaacactgcta

SEQ ID NO: 154376 - DNA, 80 bp, synthetic construct
  source 1..80: mol_type = other DNA
gacatgtgataaacaagagacaaaggtcagagtgcactgtagagtcctttttggggagggccgcgctggtgacgattatg

SEQ ID NO: 154377 - DNA, 80 bp, synthetic construct
  source 1..80: mol_type = other DNA
ggtgccctatataaactgtgttcccatggacaatatgcttagacacaacaacttcagtcttttagtcatcccaattgtcc

SEQ ID NO: 154378 - DNA, 80 bp, synthetic construct
  source 1..80: mol_type = other DNA
acgtaacgtagttcgtcgatgaggtaaaagccttggtgcaaacaaggtgtgacggtgctgaatagtagatcgtgtccatc

SEQ ID NO: 154379 - DNA, 80 bp, synthetic construct
  source 1..80: mol_type = other DNA
ttggtttcacagaccaaatatcagcaaaggttaccgaattgcaggatgtggcaaaggattttctaaccacaaaagttctt

SEQ ID NO: 154380 - DNA, 80 bp, synthetic construct
  source 1..80: mol_type = other DNA
ctgacaagaaggaaactagctgagctgacagaaggaaactagctgagctgacagggactttccagaatgggctgtaacaa

SEQ ID NO: 154381 - DNA, 80 bp, synthetic construct
  source 1..80: mol_type = other DNA
aggccctcgcgggcacccgtaggcgcgcttcaatgacgtcacggcagccattttgactgttacgtcaaagtcacgtggtg

SEQ ID NO: 154382 - DNA, 80 bp, synthetic construct
  source 1..80: mol_type = other DNA
caatcagtgcgcccgggggcggcagcgctgaatggcgactacatatgggatatgatcctcatacctgtcagttcactgat

SEQ ID NO: 154383 - DNA, 80 bp, synthetic construct
  source 1..80: mol_type = other DNA
gacacccctatgataacacaagagaaggacatccaccagaaccctgtagaggaatttatagatacaaccttaaaagaagt

SEQ ID NO: 154384 - DNA, 80 bp, synthetic construct
  source 1..80: mol_type = other DNA
gggactgtggtggcatcattagatgccaacacggtgtcatgggcctcgtcactgccggtggtaatggagtagtggccttt

SEQ ID NO: 154385 - DNA, 80 bp, synthetic construct
  source 1..80: mol_type = other DNA
gaagacacaacaacagtgctggctgccttagcattgttgggatgtgactgctccccgtggcaatggattaagaagaaagc

SEQ ID NO: 154386 - DNA, 80 bp, synthetic construct
  source 1..80: mol_type = other DNA
ctaggcaggaaacagcagcttaaagaggaactagctgacagtgcataagaaagaactagctgacactgcagggactttcc

SEQ ID NO: 154387 - DNA, 80 bp, synthetic construct
  source 1..80: mol_type = other DNA
caaaaaaggcacccaggccagtagagtgcctcgtggactacaagcgactgacccgaaacacgtcacgccagaactcgtct

SEQ ID NO: 154388 - DNA, 80 bp, synthetic construct
  source 1..80: mol_type = other DNA
acttagcatgagcacgcagggcagttcctgcgcctgcttggtgtttcgtgttagatcgctgtcgggtggacgcacggcta

SEQ ID NO: 154389 - DNA, 80 bp, synthetic construct
  source 1..80: mol_type = other DNA
cagctagaccttgttagatacaaacacaccaggttcaaattctacaggagcaaagacactgactttatagtaacctttaa

SEQ ID NO: 154390 - DNA, 80 bp, synthetic construct
  source 1..80: mol_type = other DNA
aaaaaaactggcaccttagataactacaatgatagaaatagattaggagtagtatttaatacatttaaaacagaagaaca

SEQ ID NO: 154391 - DNA, 80 bp, synthetic construct
  source 1..80: mol_type = other DNA
ccccaggattcatagtagacttgctttcatcatcaaaagaccctagggttattgaatattgtgaaagagaagggttgatc

SEQ ID NO: 154392 - DNA, 80 bp, synthetic construct
  source 1..80: mol_type = other DNA
caggcaaaggcacacaattacataagaaaattataaatcatttaccgtactacaacaccacacaaacacaagcacaattt

SEQ ID NO: 154393 - DNA, 80 bp, synthetic construct
  source 1..80: mol_type = other DNA
tcacccaatatagaagcctgtggttatagtgatagggtagaacaaatcaccttaggaaactctacaataacaactcaaga

SEQ ID NO: 154394 - DNA, 80 bp, synthetic construct
  source 1..80: mol_type = other DNA
agaaagatatatgtcaggtcccagatacaactgtgtttatgcttgtcaaatgacacgtggacaatgcgcacagcgaaaaa

SEQ ID NO: 154395 - DNA, 80 bp, synthetic construct
  source 1..80: mol_type = other DNA
aacatgggctcacaggtgtctacccaacgatccggctcccatgagaactccgactcagccgcagaaggctcgactattaa

SEQ ID NO: 154396 - DNA, 80 bp, synthetic construct
  source 1..80: mol_type = other DNA
aatttgaggataagatacgcagtgtcagcgctggtcgtgcactgtatatccccccatatgacctgctcttgcatgagtgg

SEQ ID NO: 154397 - DNA, 80 bp, synthetic construct
  source 1..80: mol_type = other DNA
ggcttggaccctggggaaagaagcctcgcaacttccccatggcccaagtgcctcaggagatagtgccatctgcgcccccg

SEQ ID NO: 154398 - DNA, 80 bp, synthetic construct
  source 1..80: mol_type = other DNA
tttgggcagccttttatggctactcagactatgtacaaactgaaataggagcacaacaagaaatatttaacataggagta

SEQ ID NO: 154399 - DNA, 80 bp, synthetic construct
  source 1..80: mol_type = other DNA
actggtatgaaatccaagaaagtgaatattacccaaaacacatccagtataatttgctgattggtgagggaccttgtgaa

SEQ ID NO: 154400 - DNA, 80 bp, synthetic construct
  source 1..80: mol_type = other DNA
tgtaatggcaggtaacatcactgtttatccacaccagataattaaccttagaacgaacaattgtgctacactagtgttgc

SEQ ID NO: 154401 - DNA, 80 bp, synthetic construct
  source 1..80: mol_type = other DNA
gcccggcctttatgaaatccctaggataataccacacactaagcagtgtagtcctgtcaatctcctgaacatgttggtcc

SEQ ID NO: 154402 - DNA, 80 bp, synthetic construct
  source 1..80: mol_type = other DNA
gcggtctgattttgatggaaatgtggacgtttttggcgttggagtgacactttttggtgaaacagcggctccagaggctg

SEQ ID NO: 154403 - DNA, 80 bp, synthetic construct
  source 1..80: mol_type = other DNA
tagaactaaatatttacaagctactaggtcagcactaccactactacaaacacaaggagatgaactactagaataccaca

SEQ ID NO: 154404 - DNA, 80 bp, synthetic construct
  source 1..80: mol_type = other DNA
acaccgtacctacaccagaacacacaaccccagggactagcgggcaccgtggagacttggctacacttagcaaccatggt

SEQ ID NO: 154405 - DNA, 80 bp, synthetic construct
  source 1..80: mol_type = other DNA
ccctgccgattacaatatccattgcccctatcaagtctgaattctctggcgcgagacaatccacaaaacaaggattgcca

SEQ ID NO: 154406 - DNA, 80 bp, synthetic construct
  source 1..80: mol_type = other DNA
agcccaccttcgaactgcccggagccagtacgcagcctccacgaatacaagtcacggacccgaaactcctcggtccccac

SEQ ID NO: 154407 - DNA, 80 bp, synthetic construct
  source 1..80: mol_type = other DNA
agacaggtatagtggtgccacctggtacgcccaacaagtgtgtggtgctgtgttttgtatcagcatgtaatgatttctca

SEQ ID NO: 154408 - DNA, 80 bp, synthetic construct
  source 1..80: mol_type = other DNA
aggaaactctgtaaatataacagacaatcaatacgagtccatcttcaccaattatttatacaaagaagcctctttctatc

SEQ ID NO: 154409 - DNA, 80 bp, synthetic construct
  source 1..80: mol_type = other DNA
ccctcccccagggcgtacccggcttgcctggttctggggctcctctggaggtcgctgcatccgccggtagggttcgaatg

SEQ ID NO: 154410 - DNA, 80 bp, synthetic construct
  source 1..80: mol_type = other DNA
ttgagtggatgaaatcaatgctgccacaagcacaacttaaagtaaaatacttgagtgaactcaagaagttgaaccttctt

SEQ ID NO: 154411 - DNA, 80 bp, synthetic construct
  source 1..80: mol_type = other DNA
ggggcccgctgcaaagaggcgaggaatctccttgtaatgcacatcctccttcttggcccccagtaggtgcctggctactg

SEQ ID NO: 154412 - DNA, 80 bp, synthetic construct
  source 1..80: mol_type = other DNA
atgtctacactgtcactacagctggtccatccagcatgtatgtacatgtaggtaatttaatctatagaaatcttcacctc

SEQ ID NO: 154413 - DNA, 80 bp, synthetic construct
  source 1..80: mol_type = other DNA
acgcaggccggtaccaggcagcgtgaggagcgggaggagaagaggctccgggagtaaaaggtaagtactccaaatttgca

SEQ ID NO: 154414 - DNA, 80 bp, synthetic construct
  source 1..80: mol_type = other DNA
ccccagacgagaagttccaaaaagaccctccataccaatggatgggctatgaactatggccaactaaatggaagctgcaa

SEQ ID NO: 154415 - DNA, 80 bp, synthetic construct
  source 1..80: mol_type = other DNA
caaaggtcaccgctacgtcataagtcacgtggggagggctgctgtaaacacggaagtagctgacccgcgtgacttgtcac

SEQ ID NO: 154416 - DNA, 80 bp, synthetic construct
  source 1..80: mol_type = other DNA
cacccgtagacgaaagagacgcattaagcccagaaactttaaaaagaaactagtactgacccagtggcatccctctgtag

SEQ ID NO: 154417 - DNA, 80 bp, synthetic construct
  source 1..80: mol_type = other DNA
tggcaacgatggaggcgccgcggctggaaacccaggcgccgccgctggagacgcctacgatggagaagacctcgacgccc

SEQ ID NO: 154418 - DNA, 80 bp, synthetic construct
  source 1..80: mol_type = other DNA
accaaaggaaggtgatattaaaactcatattaaatttaggaatactgttaaagatttggcatatcctccagaattagcaa

SEQ ID NO: 154419 - DNA, 80 bp, synthetic construct
  source 1..80: mol_type = other DNA
ttacaatctccatttcccctatggcagcagaattctctggagcgcgcaatcgtagtgcgcggatagaaggtttaccagtt

SEQ ID NO: 154420 - DNA, 80 bp, synthetic construct
  source 1..80: mol_type = other DNA
aaccagccaactattctaccaatgataaaataccacaagaaacatggctgtccacaacaggacctgcaggttttaaaaca

SEQ ID NO: 154421 - DNA, 80 bp, synthetic construct
  source 1..80: mol_type = other DNA
gtagagtgcctcgatcaatacaagtcgttgacccgcggtacaacacaccagaactcaccattcacgcgtgggacttcaga

SEQ ID NO: 154422 - DNA, 80 bp, synthetic construct
  source 1..80: mol_type = other DNA
tacgggcgcgatcccgagtgggtcactcagcggtttccagacctcacggcggccgaccgcgacgggctacgtgcacagtg

SEQ ID NO: 154423 - DNA, 80 bp, synthetic construct
  source 1..80: mol_type = other DNA
cttcttataaaccagcggagctcaggcagtcttgctctggagcgtcgcagtggtggtgttgaggatgacgctgagcgtgc

SEQ ID NO: 154424 - DNA, 80 bp, synthetic construct
  source 1..80: mol_type = other DNA
gattttgcagaggctagtagtactcaaatcccaatcacggttacagtggccccgatgtgtacagagtttaatggattaag

SEQ ID NO: 154425 - DNA, 80 bp, synthetic construct
  source 1..80: mol_type = other DNA
cactactgggactactggggtcaacagattgctaatccctgttcgagcgcagaacaatgtggatcaactttgcgcctcat

SEQ ID NO: 154426 - DNA, 80 bp, synthetic construct
  source 1..80: mol_type = other DNA
ctactactctggcgttgtactgtatggcagagtctcctgtaaacttggcacaaaattctccgtaccctgtgaaggccgcc

SEQ ID NO: 154427 - DNA, 80 bp, synthetic construct
  source 1..80: mol_type = other DNA
ttgcatggcataacggtgaagatgtttacgagcggttcttaaaccagattagaactacatcagtgggtagggccctaaat

SEQ ID NO: 154428 - DNA, 80 bp, synthetic construct
  source 1..80: mol_type = other DNA
ctacagatcctggccctggccgatagaatacgctcactttctgattcgccaactgaggaacctcttgatttggctgtacg

SEQ ID NO: 154429 - DNA, 80 bp, synthetic construct
  source 1..80: mol_type = other DNA
gagggatctagcatgtgcattctgccgtcccatgcgcttctatccctcagacaacccaacttacccgtggttacccccca

SEQ ID NO: 154430 - DNA, 80 bp, synthetic construct
  source 1..80: mol_type = other DNA
tttcctaaaatggtggacaatctcttccgggtcaaaggtcacgcctacgtcattcgtgacgtggggaggcctgctgcgca

SEQ ID NO: 154431 - DNA, 80 bp, synthetic construct
  source 1..80: mol_type = other DNA
agtacagctctgccatgctgcacccaggcatgatgatgcagcaaaaatataaacttttaattccaagctgggacactaaa

SEQ ID NO: 154432 - DNA, 80 bp, synthetic construct
  source 1..80: mol_type = other DNA
cctggattggactcagtcttcaaaagaacattgctgggcgaggtgctcaactactacgcacactggtcagggagtatcaa

SEQ ID NO: 154433 - DNA, 80 bp, synthetic construct
  source 1..80: mol_type = other DNA
caatagtctcctgaatgtagccaaagcacttctcccatgtacagattgccccaaacccgagcactataagcagtgttgtc

SEQ ID NO: 154434 - DNA, 80 bp, synthetic construct
  source 1..80: mol_type = other DNA
ggaagactcaaaggatgagagagcctataaccctacactccctgtggcaaaaccaaaaggtacattcccagtgacacaaa

SEQ ID NO: 154435 - DNA, 80 bp, synthetic construct
  source 1..80: mol_type = other DNA
gctgtgggacgagcaccagaaattccaaaacagatgccggaggtgagtttacacaccgcagtcaaggggcaattcgggct

SEQ ID NO: 154436 - DNA, 80 bp, synthetic construct
  source 1..80: mol_type = other DNA
tctattatgaagttgaaggtggtgttccatcaggatgttctggtacaagtatattcaacactatgatcaataatataata

SEQ ID NO: 154437 - DNA, 80 bp, synthetic construct
  source 1..80: mol_type = other DNA
atatggaaacagcagaaataccgcaaaccaaaacacatcaggtgtaataaaaataattaaagagaacatgatgtcctact

SEQ ID NO: 154438 - DNA, 80 bp, synthetic construct
  source 1..80: mol_type = other DNA
aaattaaaaatttaccaaaacaagcagctacattatactcaaaagcaacaaaaaccttgctaggaaacaccttcacaact

SEQ ID NO: 154439 - DNA, 80 bp, synthetic construct
  source 1..80: mol_type = other DNA
actactggacaaagcctagtaacaccccacgatataggatggttggtcgctccaccagtgtaccccctggtagacctggc

SEQ ID NO: 154440 - DNA, 80 bp, synthetic construct
  source 1..80: mol_type = other DNA
aagaagaagcagcccagacgacgctctcgcaagagctacaaaaacaactcaagcagcagcagctcatgggaaagcagctc

SEQ ID NO: 154441 - DNA, 80 bp, synthetic construct
  source 1..80: mol_type = other DNA
aacttcctcgtgtagtgtccagggatggaactaagcacagacgaccccctatatttttaagacgcctgcacaggttgctg

SEQ ID NO: 154442 - DNA, 80 bp, synthetic construct
  source 1..80: mol_type = other DNA
caaatcatcaacctgaggactaataacagtgcaaccattgtcctgccatacgtgaatgccttagccattgattcaatggt

SEQ ID NO: 154443 - DNA, 80 bp, synthetic construct
  source 1..80: mol_type = other DNA
catcgaggaatattttaccaaggaccaagacaacgtcaacagatacatgtcgtggactataaatgccaggagaatggtgc

SEQ ID NO: 154444 - DNA, 80 bp, synthetic construct
  source 1..80: mol_type = other DNA
tttctgaaccacaaaacaggcctatactcccctatatttttaagtagacaaagactatcaccagactttccagggttcta

SEQ ID NO: 154445 - DNA, 80 bp, synthetic construct
  source 1..80: mol_type = other DNA
gctagacagtctgccactcgtcaggggttgccaactaggatgcctagtggtgccaatcagtttatgacgacagaggatga

SEQ ID NO: 154446 - DNA, 80 bp, synthetic construct
  source 1..80: mol_type = other DNA
gagatcacaatagtaattaccagttcccaggatcaatctactatttcaaaccctgatacaccaatcttgacgcatcaaat

SEQ ID NO: 154447 - DNA, 80 bp, synthetic construct
  source 1..80: mol_type = other DNA
tcagcctgtaatgactttacagtcagattattgagagacaccacacacataacccaggcggcgttaacacaaggaataga

SEQ ID NO: 154448 - DNA, 80 bp, synthetic construct
  source 1..80: mol_type = other DNA
ccagatcatgtatattcctcctggagggcccattcccaaatcggtaactgactacacatggcaaacctccacaaatccta

SEQ ID NO: 154449 - DNA, 80 bp, synthetic construct
  source 1..80: mol_type = other DNA
ggggagttttcacccacccttatgttttagatgatggcacctctttagcgtgttcccttatatttccacaccagtggatt

SEQ ID NO: 154450 - DNA, 80 bp, synthetic construct
  source 1..80: mol_type = other DNA
ttctttttcccattacctgcccccaagccatcgaccagtaaacgtcggggagacttagccactctaactgatcaaagtcc

SEQ ID NO: 154451 - DNA, 80 bp, synthetic construct
  source 1..80: mol_type = other DNA
taaaaagatacatagacaatacagcatctacaacagacacatggaattcatacctaaatactactaaatttactacagta

SEQ ID NO: 154452 - DNA, 80 bp, synthetic construct
  source 1..80: mol_type = other DNA
gcgcgaacatcagtggtatgaggcttgctaccgctctcatggtgctatgtgtggctgtggcaattttattaatcatcttg

SEQ ID NO: 154453 - DNA, 80 bp, synthetic construct
  source 1..80: mol_type = other DNA
cagacttcgccatagggcctttatcttctcgccattggatcgtggtgagggtcgccataacttggacctccattttaggg

SEQ ID NO: 154454 - DNA, 80 bp, synthetic construct
  source 1..80: mol_type = other DNA
acacattcagaacagaagggtgctttagccacccacagctacataaaccatcatcaggcagcacaccaccaaacacagta

SEQ ID NO: 154455 - DNA, 80 bp, synthetic construct
  source 1..80: mol_type = other DNA
ttaacaatagactaagatctgagtgcactgtggaggccttctttggaaggtctgcatgtgttgccatccttggtgtggta

SEQ ID NO: 154456 - DNA, 80 bp, synthetic construct
  source 1..80: mol_type = other DNA
tagagcaagagataggagagtaccaggacctagagtccaacgggtacgtctgtgttatcagtccttacaccaaacccccc

SEQ ID NO: 154457 - DNA, 80 bp, synthetic construct
  source 1..80: mol_type = other DNA
acttgactataatactgtaacctttctaaaaagaggatttaaaccagatgataagtaccctttcttaattcacccaacct

SEQ ID NO: 154458 - DNA, 80 bp, synthetic construct
  source 1..80: mol_type = other DNA
ctttggatttgaacacaagtgcaggatttccatatgtgagtatgggagttaagaagagggatcttattaacaatagcact

SEQ ID NO: 154459 - DNA, 80 bp, synthetic construct
  source 1..80: mol_type = other DNA
gttggcaattatcgcttagtaaacaggcacttggcgacgtttgacgattggcaaaactgcgtttgggaagattacaatag

SEQ ID NO: 154460 - DNA, 80 bp, synthetic construct
  source 1..80: mol_type = other DNA
atgatgttatcatttcatatccctttcctttaaatccagagaaaattgcacagcagggagtcacatatggtttaaccatc

SEQ ID NO: 154461 - DNA, 80 bp, synthetic construct
  source 1..80: mol_type = other DNA
gggacaagcccgcccccccccccgcgcatgcgcgcggggccccccgccccgcgggaggctccgcccgccggcctcgcccg

SEQ ID NO: 154462 - DNA, 80 bp, synthetic construct
  source 1..80: mol_type = other DNA
tcaatagccaagaagtaccagcacttacagcggttgagaccggagcttcagggcaggcagtgccttctgatgtagtggaa

SEQ ID NO: 154463 - DNA, 80 bp, synthetic construct
  source 1..80: mol_type = other DNA
acaggtacttactactgtaggagtaaagacagatactttcctgtgaatctcacacaccatagttggtacatcatacagga

SEQ ID NO: 154464 - DNA, 80 bp, synthetic construct
  source 1..80: mol_type = other DNA
ctattcacctacactagattcgatgtggaaatcacctttgttataaccactacacaacagcaatcaacagcacccaaccc

SEQ ID NO: 154465 - DNA, 80 bp, synthetic construct
  source 1..80: mol_type = other DNA
catatgacactgaagttaacagggagaaatttatttcttcaaatggagttattactatacccgctggagaacaaatgaca

SEQ ID NO: 154466 - DNA, 80 bp, synthetic construct
  source 1..80: mol_type = other DNA
gtgacaagtattactacgtatggctttggacaccaaaaccaagcagtgtatgtcgctggctacaaaatagtcaactacca

SEQ ID NO: 154467 - DNA, 80 bp, synthetic construct
  source 1..80: mol_type = other DNA
ttcaggattaaataccttgaatcatcagttaattcggagcacattttttctgtagataggaattgtgaaacaatagctaa

SEQ ID NO: 154468 - DNA, 80 bp, synthetic construct
  source 1..80: mol_type = other DNA
tatcctaaacatatacagtataatattctcattggcacaggacactgtgaaccaggagactgtgggggcaagttgatgtg

SEQ ID NO: 154469 - DNA, 80 bp, synthetic construct
  source 1..80: mol_type = other DNA
cccaaaaagcgccgtggagacacccgtacagagatccctcagcgcgatgacgccccgcaaacctcacgcagtccggtccc

SEQ ID NO: 154470 - DNA, 80 bp, synthetic construct
  source 1..80: mol_type = other DNA
aatgtggggtatgatcacacccaccctggagaaggagggcatactatccgtggacccagtcaaacccatcccaggtgagg

SEQ ID NO: 154471 - DNA, 80 bp, synthetic construct
  source 1..80: mol_type = other DNA
atgattacttttctcaaagatgagttacgtaaaccagaaaagatctgtagtggaaagactaggattatagaagctagtag

SEQ ID NO: 154472 - DNA, 80 bp, synthetic construct
  source 1..80: mol_type = other DNA
cgtgcaggtggtggtacttcatgtagctgagcgtttcgtcgatgatggccagcaacgtgtgcaagttgggagcgttgtac

SEQ ID NO: 154473 - DNA, 80 bp, synthetic construct
  source 1..80: mol_type = other DNA
gctaaaatatttgacagaccccctagaagcaagctatctgatactccattttacccatatgttaaacatcaatacaatgt

SEQ ID NO: 154474 - DNA, 80 bp, synthetic construct
  source 1..80: mol_type = other DNA
acaacatcaaggccatatcacaaggacctgtaacagattacctcaaccaactgggaagtgcctttggagaaggcttcacc

SEQ ID NO: 154475 - DNA, 80 bp, synthetic construct
  source 1..80: mol_type = other DNA
ctgaaacaagccactactgcgccttgtgctgtcatggatattactggagtacagtcaactttgagatttcgtgttccttg

SEQ ID NO: 154476 - DNA, 80 bp, synthetic construct
  source 1..80: mol_type = other DNA
gggtctgctgttgtttctgtctcacctaccggatgatgttaaggacgggctcggagaaatggggccggccagggccacgg

SEQ ID NO: 154477 - DNA, 80 bp, synthetic construct
  source 1..80: mol_type = other DNA
ggccccgcaacgcgccgccaaccccccagcaacgtcaccccccggccccgcaagtccccgccgcaaaaggcccccgtgcc

SEQ ID NO: 154478 - DNA, 80 bp, synthetic construct
  source 1..80: mol_type = other DNA
atgccagtactgtgggccggcatgggtacgggaggcaaaaactatgcagtgaggtcagatgactatgtggtgaacaaagg

SEQ ID NO: 154479 - DNA, 80 bp, synthetic construct
  source 1..80: mol_type = other DNA
ttctacagagacacaaacactgactttatagtctcctatgacataaatccacccatgaaaaacacagaactcagcagccc

SEQ ID NO: 154480 - DNA, 80 bp, synthetic construct
  source 1..80: mol_type = other DNA
gggataacagattacatcagtggcctaggggcggcttttggtgcaggctttagtactgagatttccagtcggatacaaga

SEQ ID NO: 154481 - DNA, 80 bp, synthetic construct
  source 1..80: mol_type = other DNA
gaggggtatatctaggatagccgcacctacacaaatgagacacagacacaggtcgtgaggatttaggcaacgcaggcttg

SEQ ID NO: 154482 - DNA, 80 bp, synthetic construct
  source 1..80: mol_type = other DNA
cagactgcactactgcaaggtgacacagaagtggctgttaacaacgcggtggccagagtggctgatacgatcgccagcgg

SEQ ID NO: 154483 - DNA, 80 bp, synthetic construct
  source 1..80: mol_type = other DNA
actttgaccctcgcttgttgcacgctttgggtaactatatctatgataggtatggagacacccttgaaggagcaggagaa

SEQ ID NO: 154484 - DNA, 80 bp, synthetic construct
  source 1..80: mol_type = other DNA
ttaagccaggcaacactgacagcaactatggctactgcacctacaaagtagatgataacacatttactgccattaaaaac

SEQ ID NO: 154485 - DNA, 80 bp, synthetic construct
  source 1..80: mol_type = other DNA
ccagggccgagagcaatactggctgcagtgtgttatttcttcacatgctgctttctgcggctgcaataacccttctgggc

SEQ ID NO: 154486 - DNA, 80 bp, synthetic construct
  source 1..80: mol_type = other DNA
agtgttatccaaaattggatttaaatgtgcttcactgattcagacaatttgcaatactcaccatattttcagagatgaga

SEQ ID NO: 154487 - DNA, 80 bp, synthetic construct
  source 1..80: mol_type = other DNA
tacagggagggaaattggcttcaggccgtcgaaggatcccacagttctttttgtggctgatcctgggcatggtctacatc

SEQ ID NO: 154488 - DNA, 80 bp, synthetic construct
  source 1..80: mol_type = other DNA
aaattgtttcgcctcaactgctgaaccagaaaacaaaaatgtcgtgcaggctacaactacagttaacacaacaaacttga

SEQ ID NO: 154489 - DNA, 80 bp, synthetic construct
  source 1..80: mol_type = other DNA
cagttctacgatggttatacgggccagccagtccacttcattgacgacctcggccaggtccccgatgctagtgactggaa

SEQ ID NO: 154490 - DNA, 80 bp, synthetic construct
  source 1..80: mol_type = other DNA
ggatgctataaggtttagatactgtgcaccaccgggttttgctctgctaagatgtaatgacaccaactattcaggcttta

SEQ ID NO: 154491 - DNA, 80 bp, synthetic construct
  source 1..80: mol_type = other DNA
tggtcaagttttgagtaatttaggctttccaggggagctcatgtctaaattatgcaatacaactcatatctataaggaca

SEQ ID NO: 154492 - DNA, 80 bp, synthetic construct
  source 1..80: mol_type = other DNA
ctcctgaatgtagccaaagcacttctcccatgcacagattgccctaagcctgaacattacaagcagtgttgtccactaat

SEQ ID NO: 154493 - DNA, 80 bp, synthetic construct
  source 1..80: mol_type = other DNA
ctataagaacaaagataatgacatgacaaacaaatacgtcgcatggacaatcaacacaagacagatggtacaaatgaggc

SEQ ID NO: 154494 - DNA, 80 bp, synthetic construct
  source 1..80: mol_type = other DNA
tatcaccggtccaggtgagaaagagaagccgcaatccgggcggcggcacatcaagtctgcggcacgatgagagtgtgacg

SEQ ID NO: 154495 - DNA, 80 bp, synthetic construct
  source 1..80: mol_type = other DNA
cgtgcaccgggtcgcagcggatcatgcccttggcaaaaaatccggccagatccgaggccaactcgtacaggcagtcctct

SEQ ID NO: 154496 - DNA, 80 bp, synthetic construct
  source 1..80: mol_type = other DNA
ggttgtatttctgaaatgcataccattgtggaacatggtgaaggtgtatataatgcagtggataaaaatttcactaaatg

SEQ ID NO: 154497 - DNA, 80 bp, synthetic construct
  source 1..80: mol_type = other DNA
gtactatccagtagagtttgtccaacacaattggtatgaaattcaagaatctgattactacccaaaacacattcaataca

SEQ ID NO: 154498 - DNA, 80 bp, synthetic construct
  source 1..80: mol_type = other DNA
aatggcacggatgcctggcgctttgctatgaattatccaagaaaccccacggagcagggcaacattgcagggctctgttc

SEQ ID NO: 154499 - DNA, 80 bp, synthetic construct
  source 1..80: mol_type = other DNA
aaggataacgtggactatgaaccaaagggggtcacaacatcacgcacttcaatcaccatcaccaactccacacacatgga

SEQ ID NO: 154500 - DNA, 80 bp, synthetic construct
  source 1..80: mol_type = other DNA
gccaggcagtccgccacccgccagggcttgccaaccagaatgcccagtggcgctaaccagttcatgacaacagaagatga

SEQ ID NO: 154501 - DNA, 80 bp, synthetic construct
  source 1..80: mol_type = other DNA
ctgctcatgattggtatgaaatacaagaatctgaatactacccaaagcacatccagtacaacatcttgattggggaggga

SEQ ID NO: 154502 - DNA, 80 bp, synthetic construct
  source 1..80: mol_type = other DNA
gatggctctcctcttattcagtaagaataacttggtatacagaaagattctggacagatgttaccccagactgtgcagac

SEQ ID NO: 154503 - DNA, 80 bp, synthetic construct
  source 1..80: mol_type = other DNA
caaagctcgacacacgtcccgaaggactaccagaggagcaaagaggagcttacaatttactccaagccctcgaagactca

SEQ ID NO: 154504 - DNA, 80 bp, synthetic construct
  source 1..80: mol_type = other DNA
ctcaagtggtgccaagcgataccatacagactaggcacgtggtaaattaccattccaggtcagagtcatcattggaaaat

SEQ ID NO: 154505 - DNA, 80 bp, synthetic construct
  source 1..80: mol_type = other DNA
tttggcaacggaaagctaggccacggactgggccaagtacacagatactggcatcagagatggtaccccctcttaaagag

SEQ ID NO: 154506 - DNA, 80 bp, synthetic construct
  source 1..80: mol_type = other DNA
cctggatatcaaacactgtgtacaggagatgcgtgaaagacgatttcactgagggtggcttcatcacgtgcttctatcaa

SEQ ID NO: 154507 - DNA, 80 bp, synthetic construct
  source 1..80: mol_type = other DNA
ggcactagagttccagttaggataattgtaatcagcattaatgcaattagtaatagcaattcagtgttacattgcacgct

SEQ ID NO: 154508 - DNA, 80 bp, synthetic construct
  source 1..80: mol_type = other DNA
gcagagagactagttaacatgataaccacagaacaagaaatacaattcttccaagcaaaaaatttaaaatttcaaaattt

SEQ ID NO: 154509 - DNA, 80 bp, synthetic construct
  source 1..80: mol_type = other DNA
tgtagatagtgttaaagagcatgtgcaggccataaatccaattggtaatatcagcaaaaagattgttaaatggatgttga

SEQ ID NO: 154510 - DNA, 80 bp, synthetic construct
  source 1..80: mol_type = other DNA
agtgccatatatgaacacgctgccatttgactccgctttaaatcattgtaactttggcctgctagttgtgcccatcagcc

SEQ ID NO: 154511 - DNA, 80 bp, synthetic construct
  source 1..80: mol_type = other DNA
aggcgagacaccgaagtcctgcaaagcagccaagaaaggcaaaaagaaagcttacttttccaacagctccagctccagcg

SEQ ID NO: 154512 - DNA, 80 bp, synthetic construct
  source 1..80: mol_type = other DNA
gacgtgggacaaaaccctgatggtaaagatctgagcatgttttgtcagatggtgtccaccacagaattcatagtcccaat

SEQ ID NO: 154513 - DNA, 80 bp, synthetic construct
  source 1..80: mol_type = other DNA
acctagcttagatagaccccctttctacccctggatgcccagggaacccgcaacttgtcgtgtaaccttcaagcttggct

SEQ ID NO: 154514 - DNA, 80 bp, synthetic construct
  source 1..80: mol_type = other DNA
aacaacaatcctgatggctctttaattactactcaagtaggcacaatgcctacgatgaactcatacaacacttgggtgtc

SEQ ID NO: 154515 - DNA, 80 bp, synthetic construct
  source 1..80: mol_type = other DNA
tccaactccgctggctcaatctgctagcagcctgatagttagggaacacagtgctccggcacgctcagttagttagaacc

SEQ ID NO: 154516 - DNA, 80 bp, synthetic construct
  source 1..80: mol_type = other DNA
cttccacaccctcaaccacggttcacaatccccgaaactacgccgtccaacttcacgccgaaacgacccgcacatggcgc

SEQ ID NO: 154517 - DNA, 80 bp, synthetic construct
  source 1..80: mol_type = other DNA
gttgttctttggaagtgggcccgatggggtagtaggttttgggagggtgccgtgctagatatttcaactgccacagaccc

SEQ ID NO: 154518 - DNA, 80 bp, synthetic construct
  source 1..80: mol_type = other DNA
cccaccggggggagcagtacctagtgatgcggagagtttcgcatggcagtcatccaccaatcctagtgtcttttggacag

SEQ ID NO: 154519 - DNA, 80 bp, synthetic construct
  source 1..80: mol_type = other DNA
aaaatacacagggtacaatgaggagggtaataactttaatatatggccaattaaccttaaagaaatggcccagataagaa

SEQ ID NO: 154520 - DNA, 80 bp, synthetic construct
  source 1..80: mol_type = other DNA
ccagtggctagaaaggaacaaggaacatgtgtgtggaatcttggattatgcatctgatataattgtagagtctaaggacc

SEQ ID NO: 154521 - DNA, 80 bp, synthetic construct
  source 1..80: mol_type = other DNA
ccatgtacatcaataccaagtcacaaattcataaaagtccagtctatggggctgttgaggtcaaaatggggcctgccgtg

SEQ ID NO: 154522 - DNA, 80 bp, synthetic construct
  source 1..80: mol_type = other DNA
tcaagtattgtgaggacaataaatggatagttcctgctgaatgtagaatagaaagagatttaaatatagccaataccata

SEQ ID NO: 154523 - DNA, 80 bp, synthetic construct
  source 1..80: mol_type = other DNA
cactgtggaactaactaatcaaccaatgccagcacaaaagattttttccattaaagtagatattgcctcgcaacctttag

SEQ ID NO: 154524 - DNA, 80 bp, synthetic construct
  source 1..80: mol_type = other DNA
cacccagaatccttaacaggatctgtaccaaaccaaaaaggttgggaatacagctacacaaaactaatggctcccattta

SEQ ID NO: 154525 - DNA, 80 bp, synthetic construct
  source 1..80: mol_type = other DNA
acacagtccctggcaccggaaacagaagccccgcgccagtggccaatgccactgcgacctatccctctgcaccccttgcg

SEQ ID NO: 154526 - DNA, 80 bp, synthetic construct
  source 1..80: mol_type = other DNA
tgaggactaataattccagcacaatcataactccatatattaattgccagcctatggataatatgctcaaacacaataac

SEQ ID NO: 154527 - DNA, 80 bp, synthetic construct
  source 1..80: mol_type = other DNA
cggactcaggtgatactttttacgggctagtcaccatcaatgattttggaatcttagcaataagagtagtgaatgaattt

SEQ ID NO: 154528 - DNA, 80 bp, synthetic construct
  source 1..80: mol_type = other DNA
acaaccgcggattattgagtgtctttttttattacaaaaaaaaagaggcaaagccccaccgtcaccacaccccatcacac

SEQ ID NO: 154529 - DNA, 80 bp, synthetic construct
  source 1..80: mol_type = other DNA
cccccagaagcaacctaaaagatgtgcctttttacccctgggtgaaaaaccaatacaatgtaagctttcagcttaactac

SEQ ID NO: 154530 - DNA, 80 bp, synthetic construct
  source 1..80: mol_type = other DNA
ggcacccagaccaagactttatagtaatatacaacagaagaacccctctaggaggcaacatctacacagcaccctctcta

SEQ ID NO: 154531 - DNA, 80 bp, synthetic construct
  source 1..80: mol_type = other DNA
gtgacactgatgagtctgactactcagatgaagacgaggagattgatttggaggaagagtaccccagtgacgaagaccca

SEQ ID NO: 154532 - DNA, 80 bp, synthetic construct
  source 1..80: mol_type = other DNA
cacacgctcatccattacggaggttcctagcctcagaccatcagtgcagaacaccggggctttcggccaacaatccggtg

SEQ ID NO: 154533 - DNA, 80 bp, synthetic construct
  source 1..80: mol_type = other DNA
ttctatgttttgtgtcagcatgcaacgatttctccgtgaggttgttgcgtgataccccattcataacacaaacagcgttc

SEQ ID NO: 154534 - DNA, 80 bp, synthetic construct
  source 1..80: mol_type = other DNA
ccgggtacgcgacgcgctggggctgcgcgcgtctcccgaggccgaggcgcgctatccgcgcctcaccacctacaacctgc

SEQ ID NO: 154535 - DNA, 80 bp, synthetic construct
  source 1..80: mol_type = other DNA
atggattgtacacacttagagggaaaaattataatagtggcagtccatgtagccagtggatttatagaagcagaagtaat

SEQ ID NO: 154536 - DNA, 80 bp, synthetic construct
  source 1..80: mol_type = other DNA
gtgcgagccccgcccttcacaccccagtccaggtccagatgtgcctactaccagagctacgtgacacgttacagcgcctg

SEQ ID NO: 154537 - DNA, 80 bp, synthetic construct
  source 1..80: mol_type = other DNA
attaccatggggccagaatgggtcttccacacctgggactggagacatggactttttggtaaaagtgctctcgacagagt

SEQ ID NO: 154538 - DNA, 80 bp, synthetic construct
  source 1..80: mol_type = other DNA
tatggcagccttggcaaaggataatgccgcctttagacacctaagagggaaccccatagttctctacggctaacctgaat

SEQ ID NO: 154539 - DNA, 80 bp, synthetic construct
  source 1..80: mol_type = other DNA
gcgtttacatcgaagagtattacaccaaggaccaagatcaaaagaacagatacatgtcatggactataaatgcaagaagg

SEQ ID NO: 154540 - DNA, 80 bp, synthetic construct
  source 1..80: mol_type = other DNA
caatatacagcatttactttgccagcagtaaataatgcagaaccaggaaagagatatctttacaaagtcctaccacaggg

SEQ ID NO: 154541 - DNA, 80 bp, synthetic construct
  source 1..80: mol_type = other DNA
acgttggccgtgggagtttcacttagcggagtctacctcttaaagtcactaagcactccgagcgtcagcgaggagtgcga

SEQ ID NO: 154542 - DNA, 80 bp, synthetic construct
  source 1..80: mol_type = other DNA
ggacggagacacggggtgacgtcgaggacgggggtgtgcggcgccgaggacgggggccttttgcggcggggacagaggcc

SEQ ID NO: 154543 - DNA, 80 bp, synthetic construct
  source 1..80: mol_type = other DNA
cctgctatgagccgctggtgtccccctactcaacatgccgcaagtcgcgaagaggactggttccgatccttccacaccag

SEQ ID NO: 154544 - DNA, 80 bp, synthetic construct
  source 1..80: mol_type = other DNA
tccccgactgtattttataacattccacctatgccattacccccctcacaattgccaccaccagcagcaccagcacagcc

SEQ ID NO: 154545 - DNA, 80 bp, synthetic construct
  source 1..80: mol_type = other DNA
aaactttttcttccctctccctgctcccaaggttacgacgagtcgagcactacgaggtgacctggcaaatttttcagatc

SEQ ID NO: 154546 - DNA, 80 bp, synthetic construct
  source 1..80: mol_type = other DNA
gcaaaccaaacacgaaaagcagctaaggcagttgtggactggtttagtagtaagatcaaatcaatgctaagttttgtgga

SEQ ID NO: 154547 - DNA, 80 bp, synthetic construct
  source 1..80: mol_type = other DNA
atttccaagtaatgggggtgactgatgctagagaatccatcacggcgcaacctggcatgcacgctacccttcatacaaga

SEQ ID NO: 154548 - DNA, 80 bp, synthetic construct
  source 1..80: mol_type = other DNA
ctaggctacttaatgtgccaaccaatgttacaagggactgatagatctaaagcagaagtttacctgagcttgaggtgccc

SEQ ID NO: 154549 - DNA, 80 bp, synthetic construct
  source 1..80: mol_type = other DNA
aaatgactcagttgccatgcggcaagcctttgggcacttatatgccaagttccaccaaaaccctggcatagtgaccggca

SEQ ID NO: 154550 - DNA, 80 bp, synthetic construct
  source 1..80: mol_type = other DNA
ataaccactggtgataaaaacccaagtaaactcataagattggatacagcacaatggcaaactagttattctaggcagta

SEQ ID NO: 154551 - DNA, 80 bp, synthetic construct
  source 1..80: mol_type = other DNA
accaccagaagacccggacaaaaaactacgctgtcgcgattaaaaactacgccaaataaacatacgcagcacaaaagatc

SEQ ID NO: 154552 - DNA, 80 bp, synthetic construct
  source 1..80: mol_type = other DNA
gacatctgtgacgttacattgctaaacctgaacgttacagaatgtgacttgcggtttccgttctgctcaccacaaacgaa

SEQ ID NO: 154553 - DNA, 80 bp, synthetic construct
  source 1..80: mol_type = other DNA
gacggttcaggccaagtacccatctactggcagcagagatggtacccccgtatggtctttcagctacaagtcatgcacga

SEQ ID NO: 154554 - DNA, 80 bp, synthetic construct
  source 1..80: mol_type = other DNA
agccgcagatcaaaggttatccaggactatgttaggtgaaattttaaattattacactcactggacagggtcaattaagt

SEQ ID NO: 154555 - DNA, 80 bp, synthetic construct
  source 1..80: mol_type = other DNA
gcactcgatcgctactacgctattgtttacatgagatatcggcctgtaaaacaggcctgccttttcagtattttttggtg

SEQ ID NO: 154556 - DNA, 80 bp, synthetic construct
  source 1..80: mol_type = other DNA
atcaggtgtccgtacaccaagccgcctctaacagaccccaaagacgagactgcaggtttcgtagtctacaacagaaactt

SEQ ID NO: 154557 - DNA, 80 bp, synthetic construct
  source 1..80: mol_type = other DNA
gcgcccgtggcgatggagatggaggcgaaggagacgaccagctagacgccgaagacgtagaagacctgctcggcgtgcta

SEQ ID NO: 154558 - DNA, 80 bp, synthetic construct
  source 1..80: mol_type = other DNA
tagcagattgcaattcccagatacatctagtacagaaattcctattaccatcacaatagctccaatgtgctgtgagttca

SEQ ID NO: 154559 - DNA, 80 bp, synthetic construct
  source 1..80: mol_type = other DNA
tgtggaggccccccgtgcacaatgtccgcgggcaggagagacagtggtacgagtcctgctttcggtctcacgcttgcttt

SEQ ID NO: 154560 - DNA, 80 bp, synthetic construct
  source 1..80: mol_type = other DNA
ggtattggaagtttcctgatgtattgactgagaccggagtctttggccagaacgcacagtttcactatttatatagatca

SEQ ID NO: 154561 - DNA, 80 bp, synthetic construct
  source 1..80: mol_type = other DNA
ttaaaacagcgggtgggtatcccaccacccgacccactgggtgtggtacactggtactttgtacctttgtatgcctgttt

SEQ ID NO: 154562 - DNA, 80 bp, synthetic construct
  source 1..80: mol_type = other DNA
gccccagcccaaaccaaggaaaccagaattaagaaaagctgtgatacagggcccagaacacgaattcgggatggctttgc

SEQ ID NO: 154563 - DNA, 80 bp, synthetic construct
  source 1..80: mol_type = other DNA
atgacaacattttaactgtcttagaaggcacccctgaagctaacaaaagaaacgcaacgtatgaaagccttctaaacatt

SEQ ID NO: 154564 - DNA, 80 bp, synthetic construct
  source 1..80: mol_type = other DNA
acccaccagatgagctggtccagacctatccacaatgcacccgctcttgaaagaaactggtttcaaggtatggttcatac

SEQ ID NO: 154565 - DNA, 80 bp, synthetic construct
  source 1..80: mol_type = other DNA
tgcttagaagctatataccaagaattcctcatgcacagaaacagatggtccagaagtaaccatgacctggacctctgcag

SEQ ID NO: 154566 - DNA, 80 bp, synthetic construct
  source 1..80: mol_type = other DNA
cagaatagacaagaggcacaagtctttggtttcagattgttcctaggtgatggtgtcctgaaaacaacattattaggtga

SEQ ID NO: 154567 - DNA, 80 bp, synthetic construct
  source 1..80: mol_type = other DNA
cttctgcctacctagcaagcacagttactgcacaaacttttagaactggaaataatagtatttatggtcaaccaaattac

SEQ ID NO: 154568 - DNA, 80 bp, synthetic construct
  source 1..80: mol_type = other DNA
caacaaaagcaggacagaggagacttaattaagaaaataattgacaatgccaaaaatgtgttaacaaaagtaaaccaaga

SEQ ID NO: 154569 - DNA, 80 bp, synthetic construct
  source 1..80: mol_type = other DNA
tcttccgcattcctgttcagagcgggaaccaccagagcacacaggtttttggcttccaggtccaaccaggattggacagc

SEQ ID NO: 154570 - DNA, 80 bp, synthetic construct
  source 1..80: mol_type = other DNA
atttgccacagaggctcaactaggcagaattcctgcatttaatcctgatggcactaaaaacactaaacagcagtcgtggc

SEQ ID NO: 154571 - DNA, 80 bp, synthetic construct
  source 1..80: mol_type = other DNA
acaatactggaactaacactacaagcattaacatgtatacagtacaagtagagagacaagctgatttgatgagtgaagtt

SEQ ID NO: 154572 - DNA, 80 bp, synthetic construct
  source 1..80: mol_type = other DNA
ggacttgtgcaaacaaccgttagtgactctaaccgcaaccgcagcttccttgcggtatccgttctgctcaccacaaacga

SEQ ID NO: 154573 - DNA, 80 bp, synthetic construct
  source 1..80: mol_type = other DNA
atcaacgggtgataaaacggatgatgaagtcacatccgttttatcaccctcatgcaaggcactcatgcagtgtttgatgg

SEQ ID NO: 154574 - DNA, 80 bp, synthetic construct
  source 1..80: mol_type = other DNA
cgggccatcaccacttccaatgactagcatagtaagagtgtatttcaaaccaaaacacgtgaaagcgtgggtgccacgac

SEQ ID NO: 154575 - DNA, 80 bp, synthetic construct
  source 1..80: mol_type = other DNA
aggaacaaggcctggcttacagttgtttctgccgtaaccagtgctatcagcatactcctattggttacaaaaatcttcaa

SEQ ID NO: 154576 - DNA, 80 bp, synthetic construct
  source 1..80: mol_type = other DNA
ctctagctacaacaatagtgtcacgaggtcttgcagcagagggggacatttactctctaccacccaacccaaaacacttt

SEQ ID NO: 154577 - DNA, 80 bp, synthetic construct
  source 1..80: mol_type = other DNA
taacaaccaaggcacccccccgaccggccctccagtaatccgtagagccttgcctgccccggcggctccggagccctccc

SEQ ID NO: 154578 - DNA, 80 bp, synthetic construct
  source 1..80: mol_type = other DNA
acgtttcactcatggtcatccctattgttccccttatggcacctacaggaaatgcaacaacactccctattactgtgacc

SEQ ID NO: 154579 - DNA, 80 bp, synthetic construct
  source 1..80: mol_type = other DNA
acagccaaaagatacttattatatcacaaaattagaaaacacttaccgtactacaatacaacacaaacacaagcacaact

SEQ ID NO: 154580 - DNA, 80 bp, synthetic construct
  source 1..80: mol_type = other DNA
aaactagggactgacacgttgtacaacaacgatctaacagcaggcgtgcacgtcatgtgtgatggctcacatcagtatcc

SEQ ID NO: 154581 - DNA, 80 bp, synthetic construct
  source 1..80: mol_type = other DNA
caagattttgacatgcaggacagcatggtctcatgcccctgctttcgcctgcacatcccgtcctacatcaccatggacag

SEQ ID NO: 154582 - DNA, 80 bp, synthetic construct
  source 1..80: mol_type = other DNA
ggataacaccaataaacctgcttatggacagtctcgatattttgcagctgttagatgtggtttccactttcaagtccagg

SEQ ID NO: 154583 - DNA, 80 bp, synthetic construct
  source 1..80: mol_type = other DNA
gatacaacccactagcagacaaaggcctaggcaacatgatatgggcagactggtgtagcagagatgaggccgcctacagc

SEQ ID NO: 154584 - DNA, 80 bp, synthetic construct
  source 1..80: mol_type = other DNA
gaatgctagaaagaatcacacattactaggagcaaaagaactaaactttaaaacaggcatgtactctgccatatttttaa

SEQ ID NO: 154585 - DNA, 80 bp, synthetic construct
  source 1..80: mol_type = other DNA
acaaagacctagacctgggaaggtacctgggatgctgtattatattttttagacaccccactgtagactttatagccaga

SEQ ID NO: 154586 - DNA, 80 bp, synthetic construct
  source 1..80: mol_type = other DNA
tgccatagctggcagagacaaaactaccatgcaaaacacactatacaaagaccaccttaaaaacgtatggcgtaccctag

SEQ ID NO: 154587 - DNA, 80 bp, synthetic construct
  source 1..80: mol_type = other DNA
atgacgcatcatctaagtatggctcagtggtgactaatgacatgggaaccatatgcattagattggtcacatctacccaa

SEQ ID NO: 154588 - DNA, 80 bp, synthetic construct
  source 1..80: mol_type = other DNA
acaagcgtttcctggaaggcctgctagactgcgcctccctcctgcgcctggatcccagctgtatcaaccgaatcgcctcc

SEQ ID NO: 154589 - DNA, 80 bp, synthetic construct
  source 1..80: mol_type = other DNA
tcttctactcaaccgtacagcgcacgtcacagaaacaaaggagtcgtaccttaacctttgttagcgtgctactcatctcc

SEQ ID NO: 154590 - DNA, 80 bp, synthetic construct
  source 1..80: mol_type = other DNA
ttcagtctacgtgttctttggtcatcccatggatatcagcatcacattttaggaatactacaccagacacctactcaaaa

SEQ ID NO: 154591 - DNA, 80 bp, synthetic construct
  source 1..80: mol_type = other DNA
atgatgaggacaatgaagtaggggtccgtgtaagacccggggtcccactgaggccaatgacattcaaactagcagtagac

SEQ ID NO: 154592 - DNA, 80 bp, synthetic construct
  source 1..80: mol_type = other DNA
gatacacatttagctgctggatggtgatgcccacccgcttgacgataacctccgaggtacgggaccagtaggtaaaatcc

SEQ ID NO: 154593 - DNA, 80 bp, synthetic construct
  source 1..80: mol_type = other DNA
atgataacttttttaaaagatgaactcagaaaacctgaaaagataaacacagggaaaaccagaattgttgaagctagtag

SEQ ID NO: 154594 - DNA, 80 bp, synthetic construct
  source 1..80: mol_type = other DNA
gcgcgtaagcacagcgagacggtgctcacggtctggatgtcgggcctgatccgcacgcgcgccgctggcgagcaacagca

SEQ ID NO: 154595 - DNA, 80 bp, synthetic construct
  source 1..80: mol_type = other DNA
catttgtgatcacgagctcccagcgtgtgtccactacatacgattcagacactcccgctttgactcaccagataatgtac

SEQ ID NO: 154596 - DNA, 80 bp, synthetic construct
  source 1..80: mol_type = other DNA
gaggcacagatgcttggaatcatggatttagcattcaagaagacatctgcaggacagactcctacctctagtactgcagc

SEQ ID NO: 154597 - DNA, 80 bp, synthetic construct
  source 1..80: mol_type = other DNA
gacaacaaagaaaacttagaaaagtggctatacggcacaggcagtctataccacacctttcacactagtgaatacttgaa

SEQ ID NO: 154598 - DNA, 80 bp, synthetic construct
  source 1..80: mol_type = other DNA
gtaggtgatgtagtgtcctacggcaatatcctattaagtggtaatcaaactgctagaatgcttaaatacaattacccaac

SEQ ID NO: 154599 - DNA, 80 bp, synthetic construct
  source 1..80: mol_type = other DNA
aattggagtttagttataatacctatatgtcctcttcgggttgagttgtcaggcacacctagtgtacctattacagtgtc

SEQ ID NO: 154600 - DNA, 80 bp, synthetic construct
  source 1..80: mol_type = other DNA
caaccgccattttgttttacaaaatggctgacttccttcctcttttttaaaaaaaacggccgtgcggcggcgcgcgcgct

SEQ ID NO: 154601 - DNA, 80 bp, synthetic construct
  source 1..80: mol_type = other DNA
aaccatccttttgccaatcaattctgtgacggggtttcctggacacccagtcttagttcaggtagacacccagttatgca

SEQ ID NO: 154602 - DNA, 80 bp, synthetic construct
  source 1..80: mol_type = other DNA
atggcaaaaaacctgacggacaagatttaggaaatgacaaagtatggacacaaagtgactggaacatatttaaacagcaa

SEQ ID NO: 154603 - DNA, 80 bp, synthetic construct
  source 1..80: mol_type = other DNA
accgtagtcattaccagttcccaagatcaatccacgtcacaaaaccaaaatgcacctgtcctaacccaccaaatcatgta

SEQ ID NO: 154604 - DNA, 80 bp, synthetic construct
  source 1..80: mol_type = other DNA
cactgagacgcctgccagcgcttcccgctccccagaactcccctaacaacagcaaccgcagatcatggcctggtggggat

SEQ ID NO: 154605 - DNA, 80 bp, synthetic construct
  source 1..80: mol_type = other DNA
tccaagcctgcacccaggagcagccatgctaagcaaacacaaaataattgtaccaagttttaaaactagaccagggggca

SEQ ID NO: 154606 - DNA, 80 bp, synthetic construct
  source 1..80: mol_type = other DNA
agcattagttgatcaggctggcacgaacttggaaatcaccataattaaattgcagcgcaatgaaaagtttagggacatta

SEQ ID NO: 154607 - DNA, 80 bp, synthetic construct
  source 1..80: mol_type = other DNA
cccatgctctacgactggcagaacccacagaagggcttcataccctacggacgcaattttggactggggcgcatgcccaa

SEQ ID NO: 154608 - DNA, 80 bp, synthetic construct
  source 1..80: mol_type = other DNA
ttcctgtttgatgaggagaggcagcatgataggcgcgggaggcacgggcggtttaataatcaccttgaaaggacgcgtgg

SEQ ID NO: 154609 - DNA, 80 bp, synthetic construct
  source 1..80: mol_type = other DNA
ggagatacattctacggattagtgtccataaatgacttcggcaccttagcaattagagtggttaacgagttcaatcccgc

SEQ ID NO: 154610 - DNA, 80 bp, synthetic construct
  source 1..80: mol_type = other DNA
ggcttctacagtccttactacttaagtcctgctagaagagacatagactggcacacagtatacacatacacaagatacaa

SEQ ID NO: 154611 - DNA, 80 bp, synthetic construct
  source 1..80: mol_type = other DNA
gccacaattaagaagagcagtggcacagggtccagaacatgaatttggaatggccctgctcaaaagaaactgccatatag

SEQ ID NO: 154612 - DNA, 80 bp, synthetic construct
  source 1..80: mol_type = other DNA
ggccagcaatgccgctgacagtactggtggcatcacttacgagcgggccaaccccggtgaagtgggaggtaagtttcaga

SEQ ID NO: 154613 - DNA, 80 bp, synthetic construct
  source 1..80: mol_type = other DNA
gattcctttatgcctataaacaacacacccagtttaatcaatgatgtaggagcttataacatccctataacaggaggaca

SEQ ID NO: 154614 - DNA, 80 bp, synthetic construct
  source 1..80: mol_type = other DNA
ccactacgtcaaaagacaagttattctctgtgtggaaaatcacgtacaaggacactgtgcagttgaggagaaaattagag

SEQ ID NO: 154615 - DNA, 80 bp, synthetic construct
  source 1..80: mol_type = other DNA
tcaatgctagtagaaatagaatagacatgtatgcactaccactcaccagacagcctaagactgctataaaattatttacc

SEQ ID NO: 154616 - DNA, 80 bp, synthetic construct
  source 1..80: mol_type = other DNA
aggactacatgcagctagggagaaagcagaaagggggcagggagaaaccctacaaggaggtgacagaggatttgctgcac

SEQ ID NO: 154617 - DNA, 80 bp, synthetic construct
  source 1..80: mol_type = other DNA
ccagtgggccctaagcccatacaggggtaccaagactggtacgaagagttccaggcctgcaaagcctgggacagaccccc

SEQ ID NO: 154618 - DNA, 80 bp, synthetic construct
  source 1..80: mol_type = other DNA
ctgtctgttagaatgctgagagacacccctatgatgcaacatgtcaatgagctccagaataatgatccagtggacacatt

SEQ ID NO: 154619 - DNA, 80 bp, synthetic construct
  source 1..80: mol_type = other DNA
gcctggtgattgtggtggcatattgaggtgcaaccacggcgtgatggggatcatcactgcaggtggcaacggaattgtgg

SEQ ID NO: 154620 - DNA, 80 bp, synthetic construct
  source 1..80: mol_type = other DNA
cccaaagtgtcagttacaatcagaccccccaccctgtttgaggacaagtggtatacgcaacaggatctgtgtgaggtaaa

SEQ ID NO: 154621 - DNA, 80 bp, synthetic construct
  source 1..80: mol_type = other DNA
ttggtcgttccaccagtaaattccccctggtagacctggcagatggggctagaaattcctcactggcgacagtgttctag

SEQ ID NO: 154622 - DNA, 80 bp, synthetic construct
  source 1..80: mol_type = other DNA
gctcactcgcaggaagtcccagctttgactgcggttgagacaggggctaccaatccgttaaccccatctgataccgtgca

SEQ ID NO: 154623 - DNA, 80 bp, synthetic construct
  source 1..80: mol_type = other DNA
tatcagatggctcctactggaatagcttccatgtactagaagtgttctcctccagtgtgggaggaattcatggatcagaa

SEQ ID NO: 154624 - DNA, 80 bp, synthetic construct
  source 1..80: mol_type = other DNA
gcgactcagaccgtcctggtccctcccggtagccccgccgagtgagcagccatggcaagctggtggtgtggcaggcgcag

SEQ ID NO: 154625 - DNA, 80 bp, synthetic construct
  source 1..80: mol_type = other DNA
ataaatttggtataccacaattagtagccaaacaaatagtaaatacttgtcatgtttgccagcagaaaggagaagccatg

SEQ ID NO: 154626 - DNA, 80 bp, synthetic construct
  source 1..80: mol_type = other DNA
cggttcgctgacgatgagcaattgcctctacatctggtgctcgaccaggaggtgctgagtaacgaggaggccgagacgct

SEQ ID NO: 154627 - DNA, 80 bp, synthetic construct
  source 1..80: mol_type = other DNA
tgcagacacagtagacaatcaagctactaatgtaactaactttttaaaacaagccattaaaccttcaggaacaaaattaa

SEQ ID NO: 154628 - DNA, 80 bp, synthetic construct
  source 1..80: mol_type = other DNA
ggtctgcgatgaggcggtgggtggaacgctccagcttgcggcgaagctggctcacgaagcgagacaggactcggctagcc

SEQ ID NO: 154629 - DNA, 80 bp, synthetic construct
  source 1..80: mol_type = other DNA
ttatccgcgcatctactacgcagaggctagtagggccatgtcaatcctttgggcgtttcgctcagcgtgtacccccacgt

SEQ ID NO: 154630 - DNA, 80 bp, synthetic construct
  source 1..80: mol_type = other DNA
accggcaagttcttgctggcttactctcctccaggtgcgaatgcccccaaaactcgtaaggacgcaatgttgggcacgca

SEQ ID NO: 154631 - DNA, 80 bp, synthetic construct
  source 1..80: mol_type = other DNA
accaattaaggttaagtattacaattattacaccatacaagaatcagaatattacccaaaacacattcaatatgacatct

SEQ ID NO: 154632 - DNA, 80 bp, synthetic construct
  source 1..80: mol_type = other DNA
aggatgtggcaaatccctggcttcaaaagtcattgccaggggtttgacaaatgagagcaatgtttactctttgccaccgg

SEQ ID NO: 154633 - DNA, 80 bp, synthetic construct
  source 1..80: mol_type = other DNA
cgccccgttcacgggagaggaccgcggccgagccaccaggggcccggcggtggtgcagggtgcgctcccaggccggaccc

SEQ ID NO: 154634 - DNA, 80 bp, synthetic construct
  source 1..80: mol_type = other DNA
ataggagaaatttctagttactttacaaattggactggaagcctacgtttcagccttatgttttgtggttctgcaggaac

SEQ ID NO: 154635 - DNA, 80 bp, synthetic construct
  source 1..80: mol_type = other DNA
tgtattatatacaaaaacatgcacataaacagacgggaccaccgtgctcgtcatcctctcctcaatcagttgttcatgta

SEQ ID NO: 154636 - DNA, 80 bp, synthetic construct
  source 1..80: mol_type = other DNA
tataaacccagaacctataactctagaacaggctgtgtacggatacgtgcatctagaacccctagacttaaccactagtg

SEQ ID NO: 154637 - DNA, 80 bp, synthetic construct
  source 1..80: mol_type = other DNA
ggattactgcaggtggaagttttgaataggttgacctataacagctccagccctaataaagtccactgcataatacaagg

SEQ ID NO: 154638 - DNA, 80 bp, synthetic construct
  source 1..80: mol_type = other DNA
cttagaggacagaataagcaagggaccctttggagggggacactccactctcaggttctccctaacagtactgtacaacg

SEQ ID NO: 154639 - DNA, 80 bp, synthetic construct
  source 1..80: mol_type = other DNA
aataggagaatgactaaatgggaatatgaacaagaactagaagatgctaaaatatggtgcagagtacctagagattacat

SEQ ID NO: 154640 - DNA, 80 bp, synthetic construct
  source 1..80: mol_type = other DNA
gggcaactacctatgtgccaataacagtcaccattgcgccaatgtgtgccgaatacaacggcctaagacttgggtctaca

SEQ ID NO: 154641 - DNA, 80 bp, synthetic construct
  source 1..80: mol_type = other DNA
acacgcaatttgcccccctgggcggccgcagcctgcccctcggcggcccgtgccccagctccgtcacgggtggcgcatag

SEQ ID NO: 154642 - DNA, 80 bp, synthetic construct
  source 1..80: mol_type = other DNA
aagacggatggggccttagtagcaactagtctgacaaacggcgagatggcacatgagttcactgaatcggcagctcccag

SEQ ID NO: 154643 - DNA, 80 bp, synthetic construct
  source 1..80: mol_type = other DNA
tgaggcattcttgtgccttagtccaaacatgggggccaggaggcaagggccctgcgaatggtcgccagcctccggtctgg

SEQ ID NO: 154644 - DNA, 80 bp, synthetic construct
  source 1..80: mol_type = other DNA
gaaggaggtggagacgactacgcacccgaagacctagacgcactgttcgacgccgtcgcaggagaccaacagtaaggaga

SEQ ID NO: 154645 - DNA, 80 bp, synthetic construct
  source 1..80: mol_type = other DNA
catcccaggggagattaaaacaatcatggacattgcacgtgtcgactcattcatgccaataaacaacattgaaaaacata

SEQ ID NO: 154646 - DNA, 80 bp, synthetic construct
  source 1..80: mol_type = other DNA
gaaaaacatactggaatgcccttgtggacaaaaacgacctggccactaacataggccaggccagagcagaacggttcgag

SEQ ID NO: 154647 - DNA, 80 bp, synthetic construct
  source 1..80: mol_type = other DNA
ggaaaatttccttggtaggtcctcgttatgggcaaatctcaccctagacactaatgggtatgtcaaatgggatattaatt

SEQ ID NO: 154648 - DNA, 80 bp, synthetic construct
  source 1..80: mol_type = other DNA
attcaatcttagtctcatactcatcagatttagtcatttaccgaacaaacacaacaggtgatgactacattccaacatgt

SEQ ID NO: 154649 - DNA, 80 bp, synthetic construct
  source 1..80: mol_type = other DNA
ggaacaaatgacacaaagaacataacctttacaacaccaggagaaggttcagatccagaagtaaagttcatgtggactaa

SEQ ID NO: 154650 - DNA, 80 bp, synthetic construct
  source 1..80: mol_type = other DNA
tgagttgtccggaggagacagtgccagaatattcactgacacacaggtcggggagtcaaacgccaagaaagtgcagacag

SEQ ID NO: 154651 - DNA, 80 bp, synthetic construct
  source 1..80: mol_type = other DNA
atccgaacgggtatgccaactgggacgtagacataaccggtcatgcgcagatgcgcagaaaagtggaactattcacctat

SEQ ID NO: 154652 - DNA, 80 bp, synthetic construct
  source 1..80: mol_type = other DNA
agacatgccactatacatgctaacctatggctacttagactatgtaagcaagtgcacaggttccaagtcagcatggacag

SEQ ID NO: 154653 - DNA, 80 bp, synthetic construct
  source 1..80: mol_type = other DNA
ataacacctgggtaaaaactaaatttaaaataccaggcacatctgttcactacaacttttgcacatacaaacctgacgca

SEQ ID NO: 154654 - DNA, 80 bp, synthetic construct
  source 1..80: mol_type = other DNA
ctcagtacggtctgggatccaggtttggcggggtgttcactagtaatgttaaagtcatgaattaccatttaatgactcca

SEQ ID NO: 154655 - DNA, 80 bp, synthetic construct
  source 1..80: mol_type = other DNA
acagtggaccctacgcatacagagacgaacaccagagcacccaactgaccatggcttacaactttaaatttaactggggg

SEQ ID NO: 154656 - DNA, 80 bp, synthetic construct
  source 1..80: mol_type = other DNA
ccccggcatgcgaggaatagaccttctcaagggttgaagccacaagtgtcgttacccgcattggtactacacagagccta

SEQ ID NO: 154657 - DNA, 80 bp, synthetic construct
  source 1..80: mol_type = other DNA
aaacaccccccgaggtccgtcactaaccacgtgactcccgcaggccaaccagagtctacgtcgtgcacttcctgggcatg

SEQ ID NO: 154658 - DNA, 80 bp, synthetic construct
  source 1..80: mol_type = other DNA
atcaaaagcaatgtgagagtgtatttcaaaccaaagcatgttagtgcatgggtgccacgacctccgcggctgtgcgcata

SEQ ID NO: 154659 - DNA, 80 bp, synthetic construct
  source 1..80: mol_type = other DNA
tacctaatgctgtagtacaggagttaatgcctatcagttataacatagacggggatgagtgggtcacacttgtgccaagg

SEQ ID NO: 154660 - DNA, 80 bp, synthetic construct
  source 1..80: mol_type = other DNA
ctcgaatacagaaagagaagtagttgcagcatcactcagcagtgaggacacagccaagagtttctcgcgcacagagtcta

SEQ ID NO: 154661 - DNA, 80 bp, synthetic construct
  source 1..80: mol_type = other DNA
acacaaaagagtggttcacatgagaatcaaaactttttgactaatggatccaaccaaacatttacagtcataaattatta

SEQ ID NO: 154662 - DNA, 80 bp, synthetic construct
  source 1..80: mol_type = other DNA
ataaatcatcatctaggtatggtgtttctgtcaccaatgacatgggtacactttgcaccagaattgtaacaaaccaacag

SEQ ID NO: 154663 - DNA, 80 bp, synthetic construct
  source 1..80: mol_type = other DNA
tatcttcctggtgaaaggtcagcaactacgtcacaagtcacgtggggagggttggtcataaacccggaagcaatcctccc

SEQ ID NO: 154664 - DNA, 80 bp, synthetic construct
  source 1..80: mol_type = other DNA
taatttacatgatatataaactctttgctcagacacagggaccttattcaggacttgataataaatccaagctcaaaccc

SEQ ID NO: 154665 - DNA, 80 bp, synthetic construct
  source 1..80: mol_type = other DNA
tctttccacactcctaataatggatgtaacttcctcatcagtgttatcgccctcttgtaaggcactaatgcaatgtctca

SEQ ID NO: 154666 - DNA, 80 bp, synthetic construct
  source 1..80: mol_type = other DNA
gcccgggcagggcttcttgccggtggcggcgacgtttgggttgcgcagcgggctgccatacgccttccaattcggcgaag

SEQ ID NO: 154667 - DNA, 80 bp, synthetic construct
  source 1..80: mol_type = other DNA
tctacactctgccagctaagctctggagcgcaaattccccaggttggtactggaagttccctgacgtactgtgtgaatta

SEQ ID NO: 154668 - DNA, 80 bp, synthetic construct
  source 1..80: mol_type = other DNA
gagacatctacagatcgcttttacacgttggctagtgtggaatggaatcaatcttcaaaaggatggtggtggaagctgcc

SEQ ID NO: 154669 - DNA, 80 bp, synthetic construct
  source 1..80: mol_type = other DNA
cggctgttgagggatactacgcacatcagccagagtgccctgatagcaacaacacaaggtatagatgatgtaattgataa

SEQ ID NO: 154670 - DNA, 80 bp, synthetic construct
  source 1..80: mol_type = other DNA
aaataggcaaagggtatcagacaccagcctcgtcatgcagccgttggttctctcagcggaggaactatcgtctctgctaa

SEQ ID NO: 154671 - DNA, 80 bp, synthetic construct
  source 1..80: mol_type = other DNA
atgataaattcttaaatcaagtgaggtcagtaccagttggtcgagcgctactattacctgagtattcaactctgcgccgc

SEQ ID NO: 154672 - DNA, 80 bp, synthetic construct
  source 1..80: mol_type = other DNA
tttctcccgacacccccaggcctataaacacccctgaggcctggaaagatgagtacgagacctgcagggtctgggataga

SEQ ID NO: 154673 - DNA, 80 bp, synthetic construct
  source 1..80: mol_type = other DNA
caggtttcgtcccaaaaagtaggcgctcatgaaaactccaaccgggcctacggtggttccaccatcaactacaccacaat

SEQ ID NO: 154674 - DNA, 80 bp, synthetic construct
  source 1..80: mol_type = other DNA
catacaatcagaaaaagatgttagatgggaatatacatacacaaacttaatgaggcctatatacaaccagaccccatcac

SEQ ID NO: 154675 - DNA, 80 bp, synthetic construct
  source 1..80: mol_type = other DNA
gcacctattggcttttgattacacaaactttgatggtagtcttaatcccatttggtttgaagctttagggagagtgcttg

SEQ ID NO: 154676 - DNA, 80 bp, synthetic construct
  source 1..80: mol_type = other DNA
ccatatgaatatctggaaaggaggtggatagacaaattcatataaattaaatatggtattcaagttgcatagaattgact

SEQ ID NO: 154677 - DNA, 80 bp, synthetic construct
  source 1..80: mol_type = other DNA
taaatccccagtagacatcatgcgtactgttggtgtatttctggccacctgtcttgtcaccattttcgtcctcccaacat

SEQ ID NO: 154678 - DNA, 80 bp, synthetic construct
  source 1..80: mol_type = other DNA
ataggaccccccaaactgtttgaggacaagtggtacagccagtcagacttgtgcaaagttagccttgtcagttggcgggt

SEQ ID NO: 154679 - DNA, 80 bp, synthetic construct
  source 1..80: mol_type = other DNA
ctgattcaggggacacctactacggactagtcactatcaatgattttggaaatcttgctgtgagggtagtgaatgaattc

SEQ ID NO: 154680 - DNA, 80 bp, synthetic construct
  source 1..80: mol_type = other DNA
aacataagaaaatgtagaattaggggcataatccccatgattatctgtggccacctccgcagcaacagaaactatgcgtt

SEQ ID NO: 154681 - DNA, 80 bp, synthetic construct
  source 1..80: mol_type = other DNA
agatggaccctgataatcctgacgagggcccttcctccaaggtgccacggcccgagacacccgtgaccaaggccacgacg

SEQ ID NO: 154682 - DNA, 80 bp, synthetic construct
  source 1..80: mol_type = other DNA
gttggagatgttgtttcttatggcaatatactcctgagtggtaacaacactgctaggatgcttaagtatgaataccctac

SEQ ID NO: 154683 - DNA, 80 bp, synthetic construct
  source 1..80: mol_type = other DNA
cagagtatcaggcctgcaatcgggctcgcgggggtcgggaattttgctaaacagactccgagttgccattggacactgta

SEQ ID NO: 154684 - DNA, 80 bp, synthetic construct
  source 1..80: mol_type = other DNA
cttagacactttcattgtgctgaagagcaaggagtttcagattacatacatatgctaggtgaggcatttggaaatggatt

SEQ ID NO: 154685 - DNA, 80 bp, synthetic construct
  source 1..80: mol_type = other DNA
aaaactcaccgcacagaaccagtgtgtatgcttatacacgggggtcctggaagtggaaagtctcttgccactacagtaat

SEQ ID NO: 154686 - DNA, 80 bp, synthetic construct
  source 1..80: mol_type = other DNA
acaagcacaacaccagaagttggagcggtgcagaaagctgtgtataacgcaggtatgggaattggagttggaaatttaac

SEQ ID NO: 154687 - DNA, 80 bp, synthetic construct
  source 1..80: mol_type = other DNA
ctgaaatggggtgtagtgacgtcgatggggtcgtgaatgaacacggcttgagtgagggcgagagagcaaagacgttcagc

SEQ ID NO: 154688 - DNA, 80 bp, synthetic construct
  source 1..80: mol_type = other DNA
aagtgggggggtcttcaatcacccctacgttttagacgatgggacatcattggcatgttctcttatatttccacaccaat

SEQ ID NO: 154689 - DNA, 80 bp, synthetic construct
  source 1..80: mol_type = other DNA
cggtccgcggtgtctcctcgcgaggctgacagtctacgagtggtatctacaagagaaagaaacccgggtgggagcgacgc

SEQ ID NO: 154690 - DNA, 80 bp, synthetic construct
  source 1..80: mol_type = other DNA
gctcaggtctcgtctcagaaagtcggagcacacgaaaactcgaacagagcgtatggtggatctaccatcaattacaccac

SEQ ID NO: 154691 - DNA, 80 bp, synthetic construct
  source 1..80: mol_type = other DNA
atggcctaacaataacccctccagataaaacagagaaattttccaaaataacatgggataatttaacatttctaaagagg

SEQ ID NO: 154692 - DNA, 80 bp, synthetic construct
  source 1..80: mol_type = other DNA
actttctaacaccacaaagatacactccagagtggcactgcccctggacatacatcagatacaatccactatcagacaaa

SEQ ID NO: 154693 - DNA, 80 bp, synthetic construct
  source 1..80: mol_type = other DNA
cttcttctacctggctggcgcagtgcgccgagcggccgttgcccgggaacgtacctagctactttggaatcacgcagaac

SEQ ID NO: 154694 - DNA, 80 bp, synthetic construct
  source 1..80: mol_type = other DNA
tctccgccgccgccggcggtggcggagaaggcgacgctggcccagaaggcgccggtggaggcgaaggagacgacgtgcga

SEQ ID NO: 154695 - DNA, 80 bp, synthetic construct
  source 1..80: mol_type = other DNA
aataaacccaatgtgcaaatgtggtttgtatggctactttgtgttcctaaaaaatgcaacaatagaagtggaaaccctca

SEQ ID NO: 154696 - DNA, 80 bp, synthetic construct
  source 1..80: mol_type = other DNA
ctaacataattagtatagcaggcatcatatatattatatataaactgttttgttctttccaaggaccctattcaggtgaa

SEQ ID NO: 154697 - DNA, 80 bp, synthetic construct
  source 1..80: mol_type = other DNA
agtaacacaggagactacatgtcacctcaaatttcagactcacactttagaaataaggtaaataccaactacaactggta

SEQ ID NO: 154698 - DNA, 80 bp, synthetic construct
  source 1..80: mol_type = other DNA
tccaccacaatgggcgacattctcaacccccaccagcagcctacggctagcgatgtcgaggccagctcacatgctatagg

SEQ ID NO: 154699 - DNA, 80 bp, synthetic construct
  source 1..80: mol_type = other DNA
catgtatctttcaaactcggctggaaataaaaatacaaggcctttcactgttcacttgtcggtgtctacctcttaaggtc

SEQ ID NO: 154700 - DNA, 80 bp, synthetic construct
  source 1..80: mol_type = other DNA
tgcgcattcgcccccccacactctttgacgaccgttggtactttcaacatgacatctgcaaaaccacactgttcaccatt

SEQ ID NO: 154701 - DNA, 80 bp, synthetic construct
  source 1..80: mol_type = other DNA
caaggaccgctccagtacaaggacatcaaaatagacatcaaagaaacccccgctccagagtacataaatgatttgctcca

SEQ ID NO: 154702 - DNA, 80 bp, synthetic construct
  source 1..80: mol_type = other DNA
acttgcacaaataaggtttcaaatatgtgtcctgagatttgtagtacccgaggttatcaagatatcttcccattatcagc

SEQ ID NO: 154703 - DNA, 80 bp, synthetic construct
  source 1..80: mol_type = other DNA
gccgcctcgtgcggtagagtattatggtagtggagttgattacaaagccaacacacttgacatcctaccagaaaagacat

SEQ ID NO: 154704 - DNA, 80 bp, synthetic construct
  source 1..80: mol_type = other DNA
attttaggccttccggactacaaaatccgccattttaagtagttgaggcggacggtggcgtgagttgaaaggtcaccatc

SEQ ID NO: 154705 - DNA, 80 bp, synthetic construct
  source 1..80: mol_type = other DNA
gccattttgtatcacaaaatggccgacttccttcctctttttcaaaaaaaacggtccggcggcggcgcgcgcgcttcgcg

SEQ ID NO: 154706 - DNA, 80 bp, synthetic construct
  source 1..80: mol_type = other DNA
gccacatcttgcccggccagagcaccgtctcgcttttccccgtctaccacgtcggcaagttgctggacgctctctcgctg

SEQ ID NO: 154707 - DNA, 80 bp, synthetic construct
  source 1..80: mol_type = other DNA
ctcaagagatgtagtatgtgaaaatgaaacaacaggtaatagctcagggaacaacatgcgctgctacatgaaccattgca

SEQ ID NO: 154708 - DNA, 80 bp, synthetic construct
  source 1..80: mol_type = other DNA
gtgacctacaaccccctagtagacaaaggggtaggcaatgttatctggttccaatacaacacaaaggcagacacccaact

SEQ ID NO: 154709 - DNA, 80 bp, synthetic construct
  source 1..80: mol_type = other DNA
gatatataattcacacacagtgcaacgcaaccaagtttcacagtggagccatcattgttgctgttgtacccgagcaccaa

SEQ ID NO: 154710 - DNA, 80 bp, synthetic construct
  source 1..80: mol_type = other DNA
taggattattagtgccatgacaattatgattagaaatagctcagatactccaacagtattggccaccctggcattactag

SEQ ID NO: 154711 - DNA, 80 bp, synthetic construct
  source 1..80: mol_type = other DNA
ggtgaaactgaaaagactgcaattaaacccagggcaaaaattacaatggctggtccaagtgatatgtatgtacacgttgg

SEQ ID NO: 154712 - DNA, 80 bp, synthetic construct
  source 1..80: mol_type = other DNA
tcctggcgcaacccccgtcctcgccgcgcaaaagctgcgtagacacaccgggaaaacacccgtcgggaaaccccgtcccg

SEQ ID NO: 154713 - DNA, 80 bp, synthetic construct
  source 1..80: mol_type = other DNA
gacccacatacgcaaacaccaccactcccgagtatgagtaccacgcgggatggttctctccagtattcatagggccaaac

SEQ ID NO: 154714 - DNA, 80 bp, synthetic construct
  source 1..80: mol_type = other DNA
caaaacccaagcgggcctccatgtaaacccgctcctattatctaccctgccacaaacagggtagagatgtttcccacctt

SEQ ID NO: 154715 - DNA, 80 bp, synthetic construct
  source 1..80: mol_type = other DNA
cgcaaatactacccagtaactgtggagggtccaacttttaggtacatggatgcaaatgagtactaccccgcccgatacca

SEQ ID NO: 154716 - DNA, 80 bp, synthetic construct
  source 1..80: mol_type = other DNA
cttctaactcagctccagctttagatgctgctgagacaggtcataccagtggtgtacagcctgaagacatgattgagact

SEQ ID NO: 154717 - DNA, 80 bp, synthetic construct
  source 1..80: mol_type = other DNA
gattcagtggccatgaggcaagcatttggcaacttgtatgcaaccttccataaaaaccccggtactatcacaggaagcgc

SEQ ID NO: 154718 - DNA, 80 bp, synthetic construct
  source 1..80: mol_type = other DNA
agctcaagtttccacacaaaaatccggttcacatgagaatcaaaatattgctgctggtggttctactattaactacacca

SEQ ID NO: 154719 - DNA, 80 bp, synthetic construct
  source 1..80: mol_type = other DNA
ggacgatggggccccagttcgtattccacacgtgggactggagacggggcgcgtttggtaaaggcgctatcgacagagtg

SEQ ID NO: 154720 - DNA, 80 bp, synthetic construct
  source 1..80: mol_type = other DNA
gtcacgggggctgcatacttgttatcatagaactcgtccacaataacaagcacattcatgtgattgggcctcctgtgttg

SEQ ID NO: 154721 - DNA, 80 bp, synthetic construct
  source 1..80: mol_type = other DNA
ctaatccttggcacggtgtatgccctgtacagattgatgtgtataacccaaggaccttatacaggcctacctcaacccat

SEQ ID NO: 154722 - DNA, 80 bp, synthetic construct
  source 1..80: mol_type = other DNA
cactattgtgtggcaaggcagttgttctatacaaccgccggactcaagctagttactctatcaacatggttgtagaacaa

SEQ ID NO: 154723 - DNA, 80 bp, synthetic construct
  source 1..80: mol_type = other DNA
attcaggaggctttggtgggtcacgaccaatccaaaatacaccacctatgggacgatttaaaacattatgggtacatgga

SEQ ID NO: 154724 - DNA, 80 bp, synthetic construct
  source 1..80: mol_type = other DNA
ccagaagaagacgcctacaatttactcaaagcactccaaaaagaacaagaaacgagcagctcggaggaagacatacacca

SEQ ID NO: 154725 - DNA, 80 bp, synthetic construct
  source 1..80: mol_type = other DNA
cttctagaataccacctaggcatctacagccccatattcctcagctccgggaggtccaacacccagatgtggaccgccta

SEQ ID NO: 154726 - DNA, 80 bp, synthetic construct
  source 1..80: mol_type = other DNA
gcaaccacgttctttctgggcgacatgcaattgcccgcggacaactttctcacgtctccccatccctgaccctccgtccg

SEQ ID NO: 154727 - DNA, 80 bp, synthetic construct
  source 1..80: mol_type = other DNA
tttattattctaggtattataacaagttttacccagtgatttgtgaaaaaccaacatgtttatggattgaaggtaataat

SEQ ID NO: 154728 - DNA, 80 bp, synthetic construct
  source 1..80: mol_type = other DNA
ctctctgttagaatgttaagggacactcccatgatgcagcatgtcaatgatctccagaacaatgatccagtggacacatt

SEQ ID NO: 154729 - DNA, 80 bp, synthetic construct
  source 1..80: mol_type = other DNA
gcatatggtgtctggcctcattacttatctgatactgatgctaatgccattgacaaaccatcacatccggatacttcatc

SEQ ID NO: 154730 - DNA, 80 bp, synthetic construct
  source 1..80: mol_type = other DNA
atcagaaactaatatctatcctacaggcccaccaagaaaaagaccaaaaagagacacggacccgtacgactcgcagcaag

SEQ ID NO: 154731 - DNA, 80 bp, synthetic construct
  source 1..80: mol_type = other DNA
aacgtcgcgtcggaagaagtgaatgcggcattggtgtacgcgtgggttgttttgctctctgactcggaggagttgccgca

SEQ ID NO: 154732 - DNA, 80 bp, synthetic construct
  source 1..80: mol_type = other DNA
acaaagagcatccaccacaccctcatacaacaatgaccccttccccacaatacctgttaaatcagagtttgcacagtgga

SEQ ID NO: 154733 - DNA, 80 bp, synthetic construct
  source 1..80: mol_type = other DNA
ttgggcaaggctcttaaaaatgcgcttctctagaatatacaggcagaaaaggaaagtgctactgttcccgctgcgaactg

SEQ ID NO: 154734 - DNA, 80 bp, synthetic construct
  source 1..80: mol_type = other DNA
acaggtgctgttcccaaacgccagttccaaccagtagactacttgttcgggtgtggggttctggccggtaatgcatttgt

SEQ ID NO: 154735 - DNA, 80 bp, synthetic construct
  source 1..80: mol_type = other DNA
gtaggtactattctcctgactgctgggcttatgtccaccattaaaacaccagttactggcgccactattaaagaattctt

SEQ ID NO: 154736 - DNA, 80 bp, synthetic construct
  source 1..80: mol_type = other DNA
gaatctcaaactccgtgtcgggaagggccggtgtacggacatttatgccttggatttctggaaacgtcattttttggcaa

SEQ ID NO: 154737 - DNA, 80 bp, synthetic construct
  source 1..80: mol_type = other DNA
tgagagcaatgtctactcattaccacctgaccccaaatactttgatggctacaatcaacaagaagttgtgatcatggatg

SEQ ID NO: 154738 - DNA, 80 bp, synthetic construct
  source 1..80: mol_type = other DNA
ctatatatcatacatgaagggcttatcagaaatgacaaactttaagtacgatgaattctgggatgaccttctacacaagc

SEQ ID NO: 154739 - DNA, 80 bp, synthetic construct
  source 1..80: mol_type = other DNA
ataccgggtacgaagaaggagacctagaagatcttttcgccgccgcggccgaggacgatatgtgagtaggcggaggcgcc

SEQ ID NO: 154740 - DNA, 80 bp, synthetic construct
  source 1..80: mol_type = other DNA
gctgtggagcatgctatttggatacgcagactgggtaaaaaaagacacaggcaactggggcatagtagactgggccagag

SEQ ID NO: 154741 - DNA, 80 bp, synthetic construct
  source 1..80: mol_type = other DNA
ttggagagaaagtaaactctatggaagcctatcagatacaggtgagatctacggatgagatgggtggtcaaatatttggg

SEQ ID NO: 154742 - DNA, 80 bp, synthetic construct
  source 1..80: mol_type = other DNA
cggaaattatggactcacggaaaccgccaatacaacgcgtacaaatagcagtgactgggtaacgttaggaaccagtacgc

SEQ ID NO: 154743 - DNA, 80 bp, synthetic construct
  source 1..80: mol_type = other DNA
gttcagggtcgcaaccaccagtggtatgaaagctgctaccgtagccatgctgcttattgtggctgtggcgattttattag

SEQ ID NO: 154744 - DNA, 80 bp, synthetic construct
  source 1..80: mol_type = other DNA
acaacttcacgagcagcacgaggtgacatggcaaatttatcaaaccaaagtccgtatgatgaccaaccaagcaaacagtc

SEQ ID NO: 154745 - DNA, 80 bp, synthetic construct
  source 1..80: mol_type = other DNA
ggcaatcagacatcttggttacccccattgctgctcatggaagacaccaaattgcaagatgcaagtgtaatacaggggtt

SEQ ID NO: 154746 - DNA, 80 bp, synthetic construct
  source 1..80: mol_type = other DNA
ggggacattgtgcatgagggtggtcactgatgagcaacgtcacaatgttgaagttgttactagagtatatcataaagcaa

SEQ ID NO: 154747 - DNA, 80 bp, synthetic construct
  source 1..80: mol_type = other DNA
atacactgaactacaaaatacatggacctccactatatatgccaaaaagacagacagcaattttggatacacatcctaca

SEQ ID NO: 154748 - DNA, 80 bp, synthetic construct
  source 1..80: mol_type = other DNA
aggaagcaatattctccaagtacaagggaaataacgactgtgtgatgaatgaccacatcaaagttgctgtctcccactac

SEQ ID NO: 154749 - DNA, 80 bp, synthetic construct
  source 1..80: mol_type = other DNA
tgcttcttcaacccctccctctgagctttctgctgtcgccatccggtctaacctggacttggccaagcaacttctcactc

SEQ ID NO: 154750 - DNA, 80 bp, synthetic construct
  source 1..80: mol_type = other DNA
gaaagctcaacttacaatgtgctcttaaaccctgcaatgtagggaaaattgggaatgctaaatgctgtcctctaatttgt

SEQ ID NO: 154751 - DNA, 80 bp, synthetic construct
  source 1..80: mol_type = other DNA
attccagaataatcataggagacactcaaaaactgtgcctgctcagttaaaaaataggacacaattggattccagaatag

SEQ ID NO: 154752 - DNA, 80 bp, synthetic construct
  source 1..80: mol_type = other DNA
tccttgccggggctcaccgtgctgtaacgtcgcaccgagtcggtcatctgctccagatcggtagaccagaaaggcgtgca

SEQ ID NO: 154753 - DNA, 80 bp, synthetic construct
  source 1..80: mol_type = other DNA
cgccacgcgtatgtctcccctttattagcattggaggagcttacagttccttctacgatgggtggtcccacttcaatcaa

SEQ ID NO: 154754 - DNA, 80 bp, synthetic construct
  source 1..80: mol_type = other DNA
gatgagcttacaaccctaatgattaatgagagaaacagaaggcataacattgggggttgtcttgaagctctgttccaagg

SEQ ID NO: 154755 - DNA, 80 bp, synthetic construct
  source 1..80: mol_type = other DNA
aagcagccaggtcacctcctccgctccgcggtccgccggtctcgacggaccgcgccgccgtcggcaacacggaaaacagt

SEQ ID NO: 154756 - DNA, 80 bp, synthetic construct
  source 1..80: mol_type = other DNA
cttccccaaacttaacttccacagcttgggaaaagtactatgaagactttttaaataaagctatacccccaaaccaagaa

SEQ ID NO: 154757 - DNA, 80 bp, synthetic construct
  source 1..80: mol_type = other DNA
tgatgttaagattatgactggttacagcaataatggggtgctaaatgtggcaaaatcactgcagccctgcgcttcatgtc

SEQ ID NO: 154758 - DNA, 80 bp, synthetic construct
  source 1..80: mol_type = other DNA
ataggcagtgtcataggcagtatcctgcacagtctcaataacggcctgatccaccacgtgggccagagatgtggcggtct

SEQ ID NO: 154759 - DNA, 80 bp, synthetic construct
  source 1..80: mol_type = other DNA
cacggcagccatcttggctgtgacgtcaacgtcacgtggggaggacggcgtgtaacccggaagtcatcctcatcacgtga

SEQ ID NO: 154760 - DNA, 80 bp, synthetic construct
  source 1..80: mol_type = other DNA
gattaccctgattgcaacttggctcttgtagccaatcaacctgaacccactataataaatgtaggtgatgtgatatctta

SEQ ID NO: 154761 - DNA, 80 bp, synthetic construct
  source 1..80: mol_type = other DNA
aattgctgctggcaaaaccagatgcattgaagcttgtgaagtggactattgcattgtgtacagaatgattatgatggaaa

SEQ ID NO: 154762 - DNA, 80 bp, synthetic construct
  source 1..80: mol_type = other DNA
ctgggatcttggcctgcagtcatcttgtactatggtggtgccgtggattagcaacgtgacatacagacagaccacgcaag

SEQ ID NO: 154763 - DNA, 80 bp, synthetic construct
  source 1..80: mol_type = other DNA
gcaactaacaactgctacaaaaaagtaagcagtttatggggagaccacgtatatgacaaaaacaaaataatagaagcgtg

SEQ ID NO: 154764 - DNA, 80 bp, synthetic construct
  source 1..80: mol_type = other DNA
taactgttcactacactccaacagtcaaaatgggcgctcaggtctccagacaacaaactgggacgcatgaaaatgccaac

SEQ ID NO: 154765 - DNA, 80 bp, synthetic construct
  source 1..80: mol_type = other DNA
atacttggtcaaagcaggaagtagctactaagaaatagctgagactgcagggactttccagaaggggctgtaaccaaggg

SEQ ID NO: 154766 - DNA, 80 bp, synthetic construct
  source 1..80: mol_type = other DNA
tgtcaaagattacataaatgtcaaaattctttctaaggttgttaaaatgatttcagcattagtaattatatgtagaaacc

SEQ ID NO: 154767 - DNA, 80 bp, synthetic construct
  source 1..80: mol_type = other DNA
tcagacgtctccattagcgcttccacggaagatgtgtccggtccagttgtgatcaaggccgaaatccacgcggagcaggg

SEQ ID NO: 154768 - DNA, 80 bp, synthetic construct
  source 1..80: mol_type = other DNA
tggcaatttcattcgccaccttaatcttctggctgatcgttatcacttcgacccgccggcacctcctcccggaggccccc

SEQ ID NO: 154769 - DNA, 80 bp, synthetic construct
  source 1..80: mol_type = other DNA
atgttgaaatgaaaccaactccaaatatgattgttgcagtagatcattatgctgggcaattgatgtctttggatatacca

SEQ ID NO: 154770 - DNA, 80 bp, synthetic construct
  source 1..80: mol_type = other DNA
acgagctcaccaccaagctacaaattctaaagaaaaacttagatgacatgtgtcctctttatgctgcagaaaataaaagg

SEQ ID NO: 154771 - DNA, 80 bp, synthetic construct
  source 1..80: mol_type = other DNA
tccaaaggttaacatcatagtagactcacagtatgtaatgggaatagtagcaagccaaccaacagagtcagagagtagaa

SEQ ID NO: 154772 - DNA, 80 bp, synthetic construct
  source 1..80: mol_type = other DNA
actgttcaaaccaggtttgtcaagaactatcactcacgttcagaatccacattggaaaatttcctatgtagatcagcgtg

SEQ ID NO: 154773 - DNA, 80 bp, synthetic construct
  source 1..80: mol_type = other DNA
ttggcgcgaaggctcttaaaagaatgtcagaacaacaaattaatgctgagttttttacaggacctccaaaacgccccaga

SEQ ID NO: 154774 - DNA, 80 bp, synthetic construct
  source 1..80: mol_type = other DNA
aagagaggaacaacataaattatgtgccaggccccagccacagcagttctgtccgggtgcaactcgggacgcatggcgca

SEQ ID NO: 154775 - DNA, 80 bp, synthetic construct
  source 1..80: mol_type = other DNA
ttgtagcatacggcgagtggcctcattacctggaggataaggaggccgttgctgaggaccagcctacacagccagatgta

SEQ ID NO: 154776 - DNA, 80 bp, synthetic construct
  source 1..80: mol_type = other DNA
tacgtttagcgattcaggaacatacacagaatacatgtacgactgtgattttccatgtaacacgagtgactatgaatatg

SEQ ID NO: 154777 - DNA, 80 bp, synthetic construct
  source 1..80: mol_type = other DNA
ccccctggtaatatgcggccacaccaggtggaactacaactacgccctccatagcgaggactacacagaggagggtcgct

SEQ ID NO: 154778 - DNA, 80 bp, synthetic construct
  source 1..80: mol_type = other DNA
agggaaggcccatggcaatctactatggtgggacaaatatgtaggtattttacacagtggtcaggttcattggaaattac

SEQ ID NO: 154779 - DNA, 80 bp, synthetic construct
  source 1..80: mol_type = other DNA
ttgaagtcaagtgcggcgtcaagaaagtccgggtctttgagataagagtgacggttcagttgatctttcttaactagcac

SEQ ID NO: 154780 - DNA, 80 bp, synthetic construct
  source 1..80: mol_type = other DNA
acagcacaacaatctagaccaacagacaaccaaacagagtactttggagaactagatggcctatggggagaccctatatt

SEQ ID NO: 154781 - DNA, 80 bp, synthetic construct
  source 1..80: mol_type = other DNA
gtagagcggcatgtgttgcaatcataggacttagcaacaaagaaccaaccgatggtaacgcaaaggacctgtttgctaag

SEQ ID NO: 154782 - DNA, 80 bp, synthetic construct
  source 1..80: mol_type = other DNA
tttccctttcccttttttcaagaagggtctccgggaatttccggagtccctcttggaagtccatggtgaggggacttgat

SEQ ID NO: 154783 - DNA, 80 bp, synthetic construct
  source 1..80: mol_type = other DNA
ctcatctaaaactcgcttgcaacccagtgtttttcatgatgtctttcccggaacaaaggaacctgcagttctaagcaata

SEQ ID NO: 154784 - DNA, 80 bp, synthetic construct
  source 1..80: mol_type = other DNA
ggggactggaatggattggatgtaaaatatcaaagtttattgattggctaaaatctatgcttccacaagcacaaaataaa

SEQ ID NO: 154785 - DNA, 80 bp, synthetic construct
  source 1..80: mol_type = other DNA
ggcgaccctgtacctagcaccagaaacagagtgcactggtacccaaccatcacccaccagactgaagtactagaggccat

SEQ ID NO: 154786 - DNA, 80 bp, synthetic construct
  source 1..80: mol_type = other DNA
aaactgattttgattcagcacttttttccaaatataaaggcaatcctgcttgtcaagtgactccacacatgaaaattgct

SEQ ID NO: 154787 - DNA, 80 bp, synthetic construct
  source 1..80: mol_type = other DNA
ccaagggtatcagtgccgtttatgggaatcagtggagcttattcgcacttttatgatgggttttccgcagtgccgcatga

SEQ ID NO: 154788 - DNA, 80 bp, synthetic construct
  source 1..80: mol_type = other DNA
agtcagatacacttaaggagtgtaaaaagattccattgtataaggaacaagtcaaagcatttgccacagcatcagaggaa

SEQ ID NO: 154789 - DNA, 80 bp, synthetic construct
  source 1..80: mol_type = other DNA
gcatggatatcccagggaaggttcacaacttaatggagatagcagaagttgacatcggcgtgccggtcaacaacactagc

SEQ ID NO: 154790 - DNA, 80 bp, synthetic construct
  source 1..80: mol_type = other DNA
taccacaagggtggaaaggatccccagcaatttttcaatactccatggggaagatactagaccccttcagaaaagccaat

SEQ ID NO: 154791 - DNA, 80 bp, synthetic construct
  source 1..80: mol_type = other DNA
gattggtgggttcacaccctgcttaagattaaagacatgatcctcagtgtctttaagcctagtttagagagtaaagcaat

SEQ ID NO: 154792 - DNA, 80 bp, synthetic construct
  source 1..80: mol_type = other DNA
tatcccttagacataaacccaagcccgattagtattgaacaagcagtttatgggtaccctaatcttgaaccactagactt

SEQ ID NO: 154793 - DNA, 80 bp, synthetic construct
  source 1..80: mol_type = other DNA
ccaccactaacagcacaaccaccactagcagcacaaccacagcaaagcccacaacagagtcagagataaatgaaactttt

SEQ ID NO: 154794 - DNA, 80 bp, synthetic construct
  source 1..80: mol_type = other DNA
ctgctcaggcagggaaaggcgaactgtgtgctgtgttcagagctgaccccgggagggatggtccctggcagtcaactatg

SEQ ID NO: 154795 - DNA, 80 bp, synthetic construct
  source 1..80: mol_type = other DNA
aatacaatactgatgtttgttagtactttaggtatagtgtatgtcatttacaaattatttgcacaaacccaaggtccata

SEQ ID NO: 154796 - DNA, 80 bp, synthetic construct
  source 1..80: mol_type = other DNA
ggttacatgattcatgttcaatgcaacgcaagtaaattccactcaggtactcttttggttgttgccattccagaacatca

SEQ ID NO: 154797 - DNA, 80 bp, synthetic construct
  source 1..80: mol_type = other DNA
cacgagcctttcgcggcggggacggtgctggggacggcgacacggggtgcgtgtcgtggacgggggactcttgaagcggg

SEQ ID NO: 154798 - DNA, 80 bp, synthetic construct
  source 1..80: mol_type = other DNA
gaatatcactataaaacacaacctaaccataacatcgtgctacaaaacagcttggcttagacattttaatatatccacac

SEQ ID NO: 154799 - DNA, 80 bp, synthetic construct
  source 1..80: mol_type = other DNA
gtgcctttcgccctgtatcaagaccaaacaccagagaagggagggggcaaaaaccagcagcagaggggaagattcatgtt

SEQ ID NO: 154800 - DNA, 80 bp, synthetic construct
  source 1..80: mol_type = other DNA
tcatcgccaccattttgtgctacaagatggcggacttccttccgcttttttaaaaaaaggcgcgaaaaaaccgccgcggg

SEQ ID NO: 154801 - DNA, 80 bp, synthetic construct
  source 1..80: mol_type = other DNA
aaatacctactacaggcataggcactgaaaactactttactacaccagacggactatggggggaccctatatacagcaaa

SEQ ID NO: 154802 - DNA, 80 bp, synthetic construct
  source 1..80: mol_type = other DNA
aaggatggattgtgaatgtgtccggccaagtccagttggaacgcaacatcaacagggccatgacgatcctccaggcagtg

SEQ ID NO: 154803 - DNA, 80 bp, synthetic construct
  source 1..80: mol_type = other DNA
attacgaaattagttggttgaagcaaaacaaaacgtacatcgacggtaaaattaaaaacatcagcgagggggatactaca

SEQ ID NO: 154804 - DNA, 80 bp, synthetic construct
  source 1..80: mol_type = other DNA
tgtgtagtaactacacaaaatggtaagtttacaggccttggaatttatgacaggacaataattataccaacacatgccga

SEQ ID NO: 154805 - DNA, 80 bp, synthetic construct
  source 1..80: mol_type = other DNA
cacccgaggcgaaaaacgaggttgtcgttacccgcaaagtgcctacgagaagcctagtagcacctttgaagcctatggct

SEQ ID NO: 154806 - DNA, 80 bp, synthetic construct
  source 1..80: mol_type = other DNA
gggcacattatgcttcagagctctcgaggatacaactaggcaggtcgtcaaggtgtatatcaaacccaagcatatacatg

SEQ ID NO: 154807 - DNA, 80 bp, synthetic construct
  source 1..80: mol_type = other DNA
acagcggatggataccccaccatccgacccactgggtgtagtacactggtactctgtacctttgtacgcctgtttctccc

SEQ ID NO: 154808 - DNA, 80 bp, synthetic construct
  source 1..80: mol_type = other DNA
ctccccatggaggccccttaggcaccgtgtggaacacatttaagacacaagaacacgtagttgcaccctcatacaaagac

SEQ ID NO: 154809 - DNA, 80 bp, synthetic construct
  source 1..80: mol_type = other DNA
ggaagactggttccgaggaatctactgcactcatagagctttttgtggctgcggtgatcctgttagccatcttgctgctc

SEQ ID NO: 154810 - DNA, 80 bp, synthetic construct
  source 1..80: mol_type = other DNA
ttgtattaaggagatacacgaagaattcagaaacaatggatttactgatcaagcagacatcaacgacttcacagatcgaa

SEQ ID NO: 154811 - DNA, 80 bp, synthetic construct
  source 1..80: mol_type = other DNA
cccctgaagaagtcccgtagtgaaaaatgggatctgtctacaccatgtctggtgtgccgggaacatattgagcgggccac

SEQ ID NO: 154812 - DNA, 80 bp, synthetic construct
  source 1..80: mol_type = other DNA
tagaaatattgggatacgcgacgtaaattttccgcgtctacattataaaacgtttcagttgtatttaatggatatttatt

SEQ ID NO: 154813 - DNA, 80 bp, synthetic construct
  source 1..80: mol_type = other DNA
tgttgctggacctaaaaacagaaaagaagcaatgcttggaacacatgtggtatgggatataggtttacaatctaccatta

SEQ ID NO: 154814 - DNA, 80 bp, synthetic construct
  source 1..80: mol_type = other DNA
ttcctggcttaagaagtttactgaagcctgcaatgctgcccgcggactagagtggattggacaaaagatctcaaaattca

SEQ ID NO: 154815 - DNA, 80 bp, synthetic construct
  source 1..80: mol_type = other DNA
caggcgaaaatggtcatgagatacgtggtccggacagtggacatgacaggggaaacaacaaccctgatgaggatccatta

SEQ ID NO: 154816 - DNA, 80 bp, synthetic construct
  source 1..80: mol_type = other DNA
ttatacccattgccccattagactatatgacaggagctaccactgccattccaattactgttacaatcgctccactgtgt

SEQ ID NO: 154817 - DNA, 80 bp, synthetic construct
  source 1..80: mol_type = other DNA
cactatctgtacagatctggctttctgtgccatgttcagtgcaatgccacaaaattccaccagggagcgttgctagttgt

SEQ ID NO: 154818 - DNA, 80 bp, synthetic construct
  source 1..80: mol_type = other DNA
gttcatagacaagtggtacactcaggaggacctgtgtcccgttattcttgtgtcatttgcggtcactgcggcttccttta

SEQ ID NO: 154819 - DNA, 80 bp, synthetic construct
  source 1..80: mol_type = other DNA
gtgccgatacccaggttaggcgcgctgtcaataactatgacatcatagtcatgagcaacagtttcaatggccagtcggag

SEQ ID NO: 154820 - DNA, 80 bp, synthetic construct
  source 1..80: mol_type = other DNA
agtacctatggctgctattgaggaaaagggcaaatgttttacaagtgactacatactggccagtacaaacctggacactc

SEQ ID NO: 154821 - DNA, 80 bp, synthetic construct
  source 1..80: mol_type = other DNA
ccaagacgcgcgacgtggctatgttaggcactcacgttatttgggattttgggctccaatcttcggtcactctggttatt

SEQ ID NO: 154822 - DNA, 80 bp, synthetic construct
  source 1..80: mol_type = other DNA
agacccgacatgtgataaacaaaaggcaaagatcagagtgcactgtggagtccttcttggggagggctgcgttggtgaca

SEQ ID NO: 154823 - DNA, 80 bp, synthetic construct
  source 1..80: mol_type = other DNA
caggtaagggtgcaggctcagcaccgagatgatcatgtgcgccgcgcactcggcgatggctacctcagaactctcggaga

SEQ ID NO: 154824 - DNA, 80 bp, synthetic construct
  source 1..80: mol_type = other DNA
gaatggagaggggagtgggctaggtgccgacgccggggtgccaagataatggattgagtaagcatggtgctctgatcgtg

SEQ ID NO: 154825 - DNA, 80 bp, synthetic construct
  source 1..80: mol_type = other DNA
ccatccgagctgtcggaatcctcgtcgcccgagaaaagatcccctctggtctccgtgagcggcctcacgtcccacgcgct

SEQ ID NO: 154826 - DNA, 80 bp, synthetic construct
  source 1..80: mol_type = other DNA
gatcttgctcagctactgcccacctggtgcgcaacccccgaagacgcgaaaggaggccatgcttggtacccacctaatat

SEQ ID NO: 154827 - DNA, 80 bp, synthetic construct
  source 1..80: mol_type = other DNA
cagagcactctaaggaagtgccagcacttacagcagtcgagacgggagcgacgaatcccttggagcccagcgacactgtt

SEQ ID NO: 154828 - DNA, 80 bp, synthetic construct
  source 1..80: mol_type = other DNA
gatggtgtagaaggtgatggatttcaggatgttcatcaggtactttttggagcggacaatctgctgtatagtgtcacgta

SEQ ID NO: 154829 - DNA, 80 bp, synthetic construct
  source 1..80: mol_type = other DNA
gttactcgtggttgaagtgacgttaggggaggtagtagtggtaccggtggtggcgacggtagtgtttgtcgtggcgacgg

SEQ ID NO: 154830 - DNA, 80 bp, synthetic construct
  source 1..80: mol_type = other DNA
atctttctgatcagggagtggttactgaaatcacaccaatccagccaatgtacataaatactaaaactcagatccataaa

SEQ ID NO: 154831 - DNA, 80 bp, synthetic construct
  source 1..80: mol_type = other DNA
ggtatcctaagctccgcccctatataccaggtgggtggagctaggtaggattcagctaggttcctactggggtacccccc

SEQ ID NO: 154832 - DNA, 80 bp, synthetic construct
  source 1..80: mol_type = other DNA
acctattcaaagccaacccaaattatgctggcaactccattaagccaactggtgccagtcgcacagcgatcactactctc

SEQ ID NO: 154833 - DNA, 80 bp, synthetic construct
  source 1..80: mol_type = other DNA
ctatccccaggaagagcatactttgagacccccggagcataccaagacataatctacaaccccttaacagacaaaggagt

SEQ ID NO: 154834 - DNA, 80 bp, synthetic construct
  source 1..80: mol_type = other DNA
aaaaaaaagtagaccaagagataacagctgcaacacaaagaggcaccagtgccttctatcacttagtaggcatatatggc

SEQ ID NO: 154835 - DNA, 80 bp, synthetic construct
  source 1..80: mol_type = other DNA
aagaattacaacgcttgtcagcttaccaaaagactcacagacatgagcctgtctgctgcttgatacgtggtactcctggt

SEQ ID NO: 154836 - DNA, 80 bp, synthetic construct
  source 1..80: mol_type = other DNA
ctaggtgcagcattcgggtgcggattcactaatcaaataagtgaaaaggtcgcagagattacctctatggtgagcagcgt

SEQ ID NO: 154837 - DNA, 80 bp, synthetic construct
  source 1..80: mol_type = other DNA
atggtctagcacagccaggtgatcgcgcgccttaccacgatcaccgaacgggtaagtgtagccgcgacgcgccacggccg

SEQ ID NO: 154838 - DNA, 80 bp, synthetic construct
  source 1..80: mol_type = other DNA
gtggtacacagaaaggattcgaggtgtgggacgtggacgtaatgggattcgtgcagctcagaagaaagttagagatgttt

SEQ ID NO: 154839 - DNA, 80 bp, synthetic construct
  source 1..80: mol_type = other DNA
ccacggagaaggtggaggagatggcgccggcgcagacctgcaagacgcagacgtccaggagctcctcgatatactcgacg

SEQ ID NO: 154840 - DNA, 80 bp, synthetic construct
  source 1..80: mol_type = other DNA
ctagatatcttcctcccacagaccgcgcagaccaagagcaagaaaaagacttcaatttccaggaagaaagcggggcgtcc

SEQ ID NO: 154841 - DNA, 80 bp, synthetic construct
  source 1..80: mol_type = other DNA
accagggaccggaagggctcagagtgcccgtcgcagtagaggaggggagcaacgaccctgacctgtcccagggtcttcag

SEQ ID NO: 154842 - DNA, 80 bp, synthetic construct
  source 1..80: mol_type = other DNA
gccaggtggattttgagctccgatggacgcagcgtggagttgtagcgccgctgattctggaggattagccggagttcccc

SEQ ID NO: 154843 - DNA, 80 bp, synthetic construct
  source 1..80: mol_type = other DNA
gacacagtcattagtaatgctctacagctatcccagcccaagccgagcaaacaactcacggcacaatccactacatccac

SEQ ID NO: 154844 - DNA, 80 bp, synthetic construct
  source 1..80: mol_type = other DNA
caagaatctatcataaagccaaacatgtcaaagcgtggtgtccgcgcccacccagagcacttgaatatactcgtgctcac

SEQ ID NO: 154845 - DNA, 80 bp, synthetic construct
  source 1..80: mol_type = other DNA
tccagatgaattaggtctcacatcagctcaagatgatggacctcttgggtctgagaaaccaaattacttcctgaacttta

SEQ ID NO: 154846 - DNA, 80 bp, synthetic construct
  source 1..80: mol_type = other DNA
ggcttggtgccaccatctggcagcttttggccttcatcctagccttcttcctagccatcatcctgcttattattgctctc

SEQ ID NO: 154847 - DNA, 80 bp, synthetic construct
  source 1..80: mol_type = other DNA
ctcacagcagcggaaactggtcacacctcgcaggtggtcccgagtgataccgtacaaactcgttgtgtgaaaaacttcca

SEQ ID NO: 154848 - DNA, 80 bp, synthetic construct
  source 1..80: mol_type = other DNA
atcatgagtgtagacaattacaacgagaccctgtccggtaaccagaggtccacactgtttgccacctggaatgtaaccta

SEQ ID NO: 154849 - DNA, 80 bp, synthetic construct
  source 1..80: mol_type = other DNA
aaaagcagacgcgcgtctgtgtctgtttgattccccggggaaaagaggaagacgtccgcggaaaagagggacggcagaca

SEQ ID NO: 154850 - DNA, 80 bp, synthetic construct
  source 1..80: mol_type = other DNA
ggaaaccttgagtgcagcaacctccagggatgcccttccaaacaacgagtctagcgggccagcacactccaaagaaattc

SEQ ID NO: 154851 - DNA, 80 bp, synthetic construct
  source 1..80: mol_type = other DNA
atgagagaagaggcgacagccagactcaaggttagacataatctagatgcaatatttcaaggattaggtgactctgaaac

SEQ ID NO: 154852 - DNA, 80 bp, synthetic construct
  source 1..80: mol_type = other DNA
ttcatattttagagggtcattggtcttaaggctgagtgtttatgctagtacctttaacagaggtcggctaaggatgggct

SEQ ID NO: 154853 - DNA, 80 bp, synthetic construct
  source 1..80: mol_type = other DNA
cagaaatataactcatggaagatggagtactcaaaaaccagcagagaaacagaagaggaactatgtgccttgccacataa

SEQ ID NO: 154854 - DNA, 80 bp, synthetic construct
  source 1..80: mol_type = other DNA
tataatctcctaattggagaaggacatgctgaaccaggtgactgtggaggcaaattgctatgcaaacatggtgtcatcgg

SEQ ID NO: 154855 - DNA, 80 bp, synthetic construct
  source 1..80: mol_type = other DNA
aagccagggacaaattggatttctgcaaaagacttaaacaattagatatactggagaggcagattgacaccttgcacatg

SEQ ID NO: 154856 - DNA, 80 bp, synthetic construct
  source 1..80: mol_type = other DNA
ctccatcctcactcccgagagccgctgttacatcgtggctcacaccactgcgcatgactcctcacggtgacgagtccatt

SEQ ID NO: 154857 - DNA, 80 bp, synthetic construct
  source 1..80: mol_type = other DNA
ccctcagtaaactggtacgagtacagaataggcctcttcagtcccatcttcctgagccccttcagatccagcagcctaga

SEQ ID NO: 154858 - DNA, 80 bp, synthetic construct
  source 1..80: mol_type = other DNA
cattcgtcagtcaaaccgctttttaccagaatgatgtacaaagtgcagtggagcgggcagtggtgcgagtggctgacaca

SEQ ID NO: 154859 - DNA, 80 bp, synthetic construct
  source 1..80: mol_type = other DNA
agccaaagagacctagaatattccctccaacagaaggagaacaccactaccagcagcaaggagaagactcgagttcagag

SEQ ID NO: 154860 - DNA, 80 bp, synthetic construct
  source 1..80: mol_type = other DNA
gtcggtgtctgcttattaaggtcactaaggcctccgagcgaagcgaggaggccgaccctccttggggactcaacttcttc

SEQ ID NO: 154861 - DNA, 80 bp, synthetic construct
  source 1..80: mol_type = other DNA
tctagtaaggttagtctacaacctagtcaaagaacctctagagcagacagagacctattatacagacgggtcctgcaata

SEQ ID NO: 154862 - DNA, 80 bp, synthetic construct
  source 1..80: mol_type = other DNA
aaacacaagggatgttactaaacttcaacacatgattgacacctacggacttgatctaccatatgtgacctacctaaaag

SEQ ID NO: 154863 - DNA, 80 bp, synthetic construct
  source 1..80: mol_type = other DNA
atccgttcggctcaccacaaactgccaacctttgcacaaccttccaggtgttgcgagatcccttttataaagcaataggc

SEQ ID NO: 154864 - DNA, 80 bp, synthetic construct
  source 1..80: mol_type = other DNA
agtatccaaacttaaaaggggattagatgacttagctccattgtatgccagtgaaaataaaagaataacaaatgttcaga

SEQ ID NO: 154865 - DNA, 80 bp, synthetic construct
  source 1..80: mol_type = other DNA
gaaattaatagctcaaattcagacaccaaaatagacgagtttttaaatgctgctatgcctaatgaccgctcagcaaacat

SEQ ID NO: 154866 - DNA, 80 bp, synthetic construct
  source 1..80: mol_type = other DNA
tggatgtggaactgtttccagggcctgacgcttggctggtggtgcctgggcgtggcgctggcgaactggtggacacatga

SEQ ID NO: 154867 - DNA, 80 bp, synthetic construct
  source 1..80: mol_type = other DNA
cccgttgtcatccggcttagagcaaaccgtccttttatcatcttccgtcgccatggctatgtacacatccgaatccgaac

SEQ ID NO: 154868 - DNA, 80 bp, synthetic construct
  source 1..80: mol_type = other DNA
tggatacgtccccttgacacttagaacctacaacacgctacactatattctaatcttgaactcgagacgatgggggcgca

SEQ ID NO: 154869 - DNA, 80 bp, synthetic construct
  source 1..80: mol_type = other DNA
cactgcttctggtgcagccaaaacagaaaaaacaacataccatgagcgattgggtccctccaacccaaaatgtacccagt

SEQ ID NO: 154870 - DNA, 80 bp, synthetic construct
  source 1..80: mol_type = other DNA
gaatctgccccaataatctcatggggactttttgtgtgagggtattaggatcagaaaaacttactgaagctctcagagtg

SEQ ID NO: 154871 - DNA, 80 bp, synthetic construct
  source 1..80: mol_type = other DNA
attatttgtcttcaaaagatgctactgcaattgacaagccttctcggcctgacacatcttctaataggttttacacttta

SEQ ID NO: 154872 - DNA, 80 bp, synthetic construct
  source 1..80: mol_type = other DNA
ggatgagcataagcgcagacttacttaagtccaactatgacagtttctttagcttattaaacactaaattctcaagtgag

SEQ ID NO: 154873 - DNA, 80 bp, synthetic construct
  source 1..80: mol_type = other DNA
ggtacatccaacaacaggatactagccatacccttggatatgagtaacacactgttttctaccacgctaatgggtgaaat

SEQ ID NO: 154874 - DNA, 80 bp, synthetic construct
  source 1..80: mol_type = other DNA
gataaatctgtctagtttagtacaacttagaagaaaacttgaaatgttcacatatgttagatttgattcagagtacacta

SEQ ID NO: 154875 - DNA, 80 bp, synthetic construct
  source 1..80: mol_type = other DNA
gatttgccaactggacgattaacgcaagacgtatggtgcaaatgagaaggaaacttgaaatgttcacatacatccgcttt

SEQ ID NO: 154876 - DNA, 80 bp, synthetic construct
  source 1..80: mol_type = other DNA
acacactctttcacggcaattacagaagtcttgtaaattaaatggagtttatacaaacccaactgctagtgagtttatgg

SEQ ID NO: 154877 - DNA, 80 bp, synthetic construct
  source 1..80: mol_type = other DNA
tggcgcggtcatggccagtcgtcgtctccgacacgctccgcacaccgcgactgatgagttccaccaggctctgcgccgtc

SEQ ID NO: 154878 - DNA, 80 bp, synthetic construct
  source 1..80: mol_type = other DNA
cttctgcccagctggatcactcactactttccagaactcatggggctcacaaatggacctgactgatccattgtgtattg

SEQ ID NO: 154879 - DNA, 80 bp, synthetic construct
  source 1..80: mol_type = other DNA
gctaaaaaaacaagtaatggcactggtgactcagctgctacactaggagacgcagttacagaactcaaaagtacaagcgg

SEQ ID NO: 154880 - DNA, 80 bp, synthetic construct
  source 1..80: mol_type = other DNA
gacccaaccaggtcagtgtggagctgtggttgccaatgtgggcaacatagtagccatacatgttggtggtaatggtagag

SEQ ID NO: 154881 - DNA, 80 bp, synthetic construct
  source 1..80: mol_type = other DNA
atcacccatgaagatgacatccccccacgcaacgcctcctacggaggcaacttcaccaacataacaataaccctaggtgg

SEQ ID NO: 154882 - DNA, 80 bp, synthetic construct
  source 1..80: mol_type = other DNA
atacctaaaggaccagacactgctaaattcatggggatgtgcttttagacaggtctgccacactactgtaccatggccaa

SEQ ID NO: 154883 - DNA, 80 bp, synthetic construct
  source 1..80: mol_type = other DNA
ccagcaatcactacaaactgcacctctgtgttgctggtggctgggtgccctccaagtcgctggctgtactcgttgaccat

SEQ ID NO: 154884 - DNA, 80 bp, synthetic construct
  source 1..80: mol_type = other DNA
aaaggtcctggcaatactggcgtgatgaacagggcatgtcagaaagttatactaagtatagatatctctgtctgatacag

SEQ ID NO: 154885 - DNA, 80 bp, synthetic construct
  source 1..80: mol_type = other DNA
tgtgccaggtaggcccgcaaaaaagcacaccacccctaggcaagctatggctctacgccatggccacgctggtctttcca

SEQ ID NO: 154886 - DNA, 80 bp, synthetic construct
  source 1..80: mol_type = other DNA
gttttacttaatggacaaaagatacagattaaggataaatacaaattgatggatccagacaacattaatttggaattgac

SEQ ID NO: 154887 - DNA, 80 bp, synthetic construct
  source 1..80: mol_type = other DNA
cggtaaggagacgccggcgccgacccagacgcatttaccgacgggtgtggcgacgcagacggtacataagacgtaggagg

SEQ ID NO: 154888 - DNA, 80 bp, synthetic construct
  source 1..80: mol_type = other DNA
cggcgactagttgcgtgtgctgcggtgggtacggcgacggcgaataaaagcgacgtgcggcgcgcacggcgaaaagcaga

SEQ ID NO: 154889 - DNA, 80 bp, synthetic construct
  source 1..80: mol_type = other DNA
aacaaaaggcttgattagaactggattgtcaaaaggaggaatacagccaagacttgtgtccagattatcacactacgact

SEQ ID NO: 154890 - DNA, 80 bp, synthetic construct
  source 1..80: mol_type = other DNA
cacctatgtatgaccagaagaatcccaataggggattcatacccataggttacaacttctcacaaggactaatgccagac

SEQ ID NO: 154891 - DNA, 80 bp, synthetic construct
  source 1..80: mol_type = other DNA
cctagaggtccaagggtactggaatctgaccccggaaaggggattcttgagttcctatgctgtgagattaacatggtata

SEQ ID NO: 154892 - DNA, 80 bp, synthetic construct
  source 1..80: mol_type = other DNA
gataagacaaacaatgatgtcaaagtgttcatcaagcctaagcatataagagcatggtgcccaagacctccaagagccac

SEQ ID NO: 154893 - DNA, 80 bp, synthetic construct
  source 1..80: mol_type = other DNA
actttgacgcgacagccgtaactgacacaaggaccacaattaccaccgtccctatgtcaaaccatgggggtgtgcgtcgt

SEQ ID NO: 154894 - DNA, 80 bp, synthetic construct
  source 1..80: mol_type = other DNA
tgtagatagtgttaaagagcagataagtgcaataaatccaatcaatagtataagcaagaaaataattaagtggctactca

SEQ ID NO: 154895 - DNA, 80 bp, synthetic construct
  source 1..80: mol_type = other DNA
aatactctgtaacctttaagctcggtttcaaataaacaaggccgtgcactgttggggcaactccctcgaagtccggcgct

SEQ ID NO: 154896 - DNA, 80 bp, synthetic construct
  source 1..80: mol_type = other DNA
tgccaaaaaaaccctgcttctctgtaagtttcaagcttggatttaaaccctaaataaaatacaaggccgtacactgttca

SEQ ID NO: 154897 - DNA, 80 bp, synthetic construct
  source 1..80: mol_type = other DNA
tcacaatgggataccttaacacaaaaatcttgtccaaaataatcaaaattgtgtccgctttggtaatcatatgtagaaac

SEQ ID NO: 154898 - DNA, 80 bp, synthetic construct
  source 1..80: mol_type = other DNA
cagggcagaattagcccagaaatatttggcctatacacagaaatactgtacaacccatacacagacaaaggtgtaggaaa

SEQ ID NO: 154899 - DNA, 80 bp, synthetic construct
  source 1..80: mol_type = other DNA
attaaaagagtgcaacaacaacaaacgcctcttacgctttttacaggcccaccaaaaagaccaagaatggaagtacccgc

SEQ ID NO: 154900 - DNA, 80 bp, synthetic construct
  source 1..80: mol_type = other DNA
aacccagtagagaacttcattgatgaaacactcaaagaggtgttagtggtccccaatactaaggagactggtcccataca

SEQ ID NO: 154901 - DNA, 80 bp, synthetic construct
  source 1..80: mol_type = other DNA
gcggtacgtcagaaacgccgtggtgtcgcgcctcgatgttggccgggttcaacggttgccggtcggccactacctgtacg

SEQ ID NO: 154902 - DNA, 80 bp, synthetic construct
  source 1..80: mol_type = other DNA
cgtgccccctggtggaccaattccgacatcagccactgactacagttggcaaacatctacaaatcctagtgtgttctgga

SEQ ID NO: 154903 - DNA, 80 bp, synthetic construct
  source 1..80: mol_type = other DNA
acatgtagtgtgggatgttgggttacaatcgacagtggtaatgaacataccatggacatctggtgtacaatttagataca

SEQ ID NO: 154904 - DNA, 80 bp, synthetic construct
  source 1..80: mol_type = other DNA
aatatatttacaagccacaagtggcactgcaaaactacctacaccatacaactggaaaaattacaaagacaactaccaac

SEQ ID NO: 154905 - DNA, 80 bp, synthetic construct
  source 1..80: mol_type = other DNA
atcagacttggtggagagacagatatcaaggaagccatttttgcgatgagagttgatatcgcctctcagcccttagcaac

SEQ ID NO: 154906 - DNA, 80 bp, synthetic construct
  source 1..80: mol_type = other DNA
ttgggaatgcatacagcaacttctatgacgggtggtctcacttcacacaagatggtggatacgggtataacacactcaac

SEQ ID NO: 154907 - DNA, 80 bp, synthetic construct
  source 1..80: mol_type = other DNA
actgtggcaccaaactgcatttgtttccaatggacaggtggggtctattatggtcacttgctctgcgtgttctgacatgt

SEQ ID NO: 154908 - DNA, 80 bp, synthetic construct
  source 1..80: mol_type = other DNA
gatatgtctcaggacccgtctaaattcacagaaccagtgaaagatattatgataaaatctctacctgcattgaattctcc

SEQ ID NO: 154909 - DNA, 80 bp, synthetic construct
  source 1..80: mol_type = other DNA
ttagatgcaaaggaactctcagagacaggaaagaaatatggactcaccatcactccacctgacaaatcaacagagtttaa

SEQ ID NO: 154910 - DNA, 80 bp, synthetic construct
  source 1..80: mol_type = other DNA
caaaaccaagtgtcttcaaatgctttgcaaataaagtggcttcaaacacaagaaaagcagccaaagaagtagttgagtgg

SEQ ID NO: 154911 - DNA, 80 bp, synthetic construct
  source 1..80: mol_type = other DNA
tgaagaggaagaggaggggtcccgagaatccccatccctaccgtccagcaaaaaggtggccgaggaatttgaggcctggc

SEQ ID NO: 154912 - DNA, 80 bp, synthetic construct
  source 1..80: mol_type = other DNA
tttattagtcaccttgttgctctgggtaatcagtttggcttcaggccgggcccccgcgctcctggggcatcgggcctagg

SEQ ID NO: 154913 - DNA, 80 bp, synthetic construct
  source 1..80: mol_type = other DNA
ccgctgctgtccatttatatgtggcaaagcagtaaccttcaaagaccgcaacacttgcctaagttatccattgagtcaaa

SEQ ID NO: 154914 - DNA, 80 bp, synthetic construct
  source 1..80: mol_type = other DNA
gaatggtcggtagagtacgagctggccaaatggatggatcgccctttgcggcactacccatccgacctccctcactaccc

SEQ ID NO: 154915 - DNA, 80 bp, synthetic construct
  source 1..80: mol_type = other DNA
acatggccagggtagactccttcatgcctataaacaacctacagtcacaactccaggatgtgggggtctataacattaca

SEQ ID NO: 154916 - DNA, 80 bp, synthetic construct
  source 1..80: mol_type = other DNA
gaagagttagcactaaacattgacaaactgaaaaagggcctagatgggttagcaccactctatgctgtggaaaataaaac

SEQ ID NO: 154917 - DNA, 80 bp, synthetic construct
  source 1..80: mol_type = other DNA
ggccgggccatgggcaaggctcttaaagcgcacgtcccccactatgtttctcggcagggtgtggaggaaacagaaaagga

SEQ ID NO: 154918 - DNA, 80 bp, synthetic construct
  source 1..80: mol_type = other DNA
cataacttatgaaaaggctaatcctggtgaagtgggaggcaccttccagaagactgccaccttgactaccggggatggta

SEQ ID NO: 154919 - DNA, 80 bp, synthetic construct
  source 1..80: mol_type = other DNA
caccggcgtcggcactcgatccgcgtagccctccagcgtctggtagtacacccggggtgtcggcgtgggcacggacaggt

SEQ ID NO: 154920 - DNA, 80 bp, synthetic construct
  source 1..80: mol_type = other DNA
tgtgcttgtaacgccatgggggaaatcacttgatcgaacgcctagtaccatcatgtctttgactaggcgttcgatcaagt

SEQ ID NO: 154921 - DNA, 80 bp, synthetic construct
  source 1..80: mol_type = other DNA
aggtctccccaaccccccttctaaaagacctgagctgaggaaagcaacactgcaaggacctgaacatgaatttattagag

SEQ ID NO: 154922 - DNA, 80 bp, synthetic construct
  source 1..80: mol_type = other DNA
atccgttctattagattaactcgcaagatactaaaattaaccaaggtcagcccaagtgacgcgtgttatgccaggctgcc

SEQ ID NO: 154923 - DNA, 80 bp, synthetic construct
  source 1..80: mol_type = other DNA
agtccccgctgtccaatcaaagaagactactctagcagagtgcaagaaaatacctctataccaagaacagattaatggat

SEQ ID NO: 154924 - DNA, 80 bp, synthetic construct
  source 1..80: mol_type = other DNA
aaggtgagaagttgccatgtagggaaacaactctatctccccccttatcaaagcttgtacacacagtggcttgatgaatt

SEQ ID NO: 154925 - DNA, 80 bp, synthetic construct
  source 1..80: mol_type = other DNA
ccaggttaaagaaagcatctgccgatgttatcaattggtttagtgataaaatcaaatctatgctaaattttgtagagaga

SEQ ID NO: 154926 - DNA, 80 bp, synthetic construct
  source 1..80: mol_type = other DNA
ttgtccacccaacatcagggactgccagtgatgaatgtaccaggtagtaaccaattcctcacatcagatgacttccagtc

SEQ ID NO: 154927 - DNA, 80 bp, synthetic construct
  source 1..80: mol_type = other DNA
accactcattccatctaactctagctccaaggctgaaatttatgttagtttaaggtgtccaaattttttcttcccagtcc

SEQ ID NO: 154928 - DNA, 80 bp, synthetic construct
  source 1..80: mol_type = other DNA
gagggactgggccaagtacacccttactggatgcagagatggagacccgtgtcccaggtgcaaaaagagactctaaacaa

SEQ ID NO: 154929 - DNA, 80 bp, synthetic construct
  source 1..80: mol_type = other DNA
aaagggcacattagataattacaatgacccaaacagactactaacagtatttaacacatttaaaactgaagaacacttat

SEQ ID NO: 154930 - DNA, 80 bp, synthetic construct
  source 1..80: mol_type = other DNA
tttccaaagaaaggtcacgggatgttatcccagttttttgcttatttcacaggagagattaatatccatgttttgtacat

SEQ ID NO: 154931 - DNA, 80 bp, synthetic construct
  source 1..80: mol_type = other DNA
gctcagctgtagggtgtgatccagagacattctggtcaaagattccagtgatgttggatggagattgccttatggcattt

SEQ ID NO: 154932 - DNA, 80 bp, synthetic construct
  source 1..80: mol_type = other DNA
atggggttcccaaatggacttgactgacccgctttgcatagaagattcagtagaagattgtaagcaaaccattacaccaa

SEQ ID NO: 154933 - DNA, 80 bp, synthetic construct
  source 1..80: mol_type = other DNA
ctatccttatgtgcctacagtacctaaatactgtgtaaactttgacttaaatgcgccacaataaatacaaggcctgcaaa

SEQ ID NO: 154934 - DNA, 80 bp, synthetic construct
  source 1..80: mol_type = other DNA
ggttacaacaccattaatgactttgggaccgtggctgtgcgtattgtgaatgaacatgatccggttaaaatagagtcaaa

SEQ ID NO: 154935 - DNA, 80 bp, synthetic construct
  source 1..80: mol_type = other DNA
gcttttctccatgtcgcggacgacttcgacgttcgcctccctcagtgtcccgccctcggtttccagtcgggagccgatgg

SEQ ID NO: 154936 - DNA, 80 bp, synthetic construct
  source 1..80: mol_type = other DNA
atggatgactttcctcccatggggtacacctacgggggcaacttcaccaacctcaccttctccttagaggcggtatatga

SEQ ID NO: 154937 - DNA, 80 bp, synthetic construct
  source 1..80: mol_type = other DNA
agaagaaataggagagtaccaggacacagacatcaatggctttgtctgtgtcatctgtccctacactgatccccccatgt

SEQ ID NO: 154938 - DNA, 80 bp, synthetic construct
  source 1..80: mol_type = other DNA
aataaatatttttggcagaaatatcttaaacaccttaggcatgactctaaatttcccagtggcaaaaatagagccagtga

SEQ ID NO: 154939 - DNA, 80 bp, synthetic construct
  source 1..80: mol_type = other DNA
tttaattcagaaattagtgattctgttttagtttcttactcatcagatttagtcatctaccgaacaaacactacaggtga

SEQ ID NO: 154940 - DNA, 80 bp, synthetic construct
  source 1..80: mol_type = other DNA
gccatcttgtgacttccttccgctttttcaaaaaaaaagaggaagtatgacagtagcggcgggggggcggccgcgttcgc

SEQ ID NO: 154941 - DNA, 80 bp, synthetic construct
  source 1..80: mol_type = other DNA
acatcaagtcaaagctccaaaaactaatgaaagaattagtgaaaacccaactacacctccacgcacccatctaccactag

SEQ ID NO: 154942 - DNA, 80 bp, synthetic construct
  source 1..80: mol_type = other DNA
ttagtagtaaaattaagtcaatgttgaattccctttgggaaacagaggcttggttgactgtagtctctgctgttactagt

SEQ ID NO: 154943 - DNA, 80 bp, synthetic construct
  source 1..80: mol_type = other DNA
tatggtaatatactactaagtggaaaccaaactgccagaatgcttaaatataattatcccacaaaatcaggatattgtgg

SEQ ID NO: 154944 - DNA, 80 bp, synthetic construct
  source 1..80: mol_type = other DNA
caatggacatgtacagggtaccagtgagcactagtgcaaccctagaaagccccatcttatgtttgtcactatcaccagcc

SEQ ID NO: 154945 - DNA, 80 bp, synthetic construct
  source 1..80: mol_type = other DNA
accgactgcccgggttccataagcacgagctcaatgtttcgccttatcatccgctacttgtctcatcaccaatttgagcg

SEQ ID NO: 154946 - DNA, 80 bp, synthetic construct
  source 1..80: mol_type = other DNA
tttaaccatcagggacctccgccgcccccccaggacgaccgcccggcgtcggctaccccagtgagacgcctcctcccgct

SEQ ID NO: 154947 - DNA, 80 bp, synthetic construct
  source 1..80: mol_type = other DNA
tagtggctgaatcaagggcccttggcaccgactcgatcgcaaggtgcagctgtaacacgggtgtgtactactgtgaatcc

SEQ ID NO: 154948 - DNA, 80 bp, synthetic construct
  source 1..80: mol_type = other DNA
actcatcacgcaacacccactgtttattcatttacaaagatttcaggaagtcagtcaggctggccagggcccacgtcacg

SEQ ID NO: 154949 - DNA, 80 bp, synthetic construct
  source 1..80: mol_type = other DNA
gaataccaaagatgttaaaaagttacagtgcatgattgatacctatggattggatttaccatacatcacttacctcaaag

SEQ ID NO: 154950 - DNA, 80 bp, synthetic construct
  source 1..80: mol_type = other DNA
agcatatttaacaccatgataaataacatcatcattaggactttagttcttgatgcttataagcacattgatttggacaa

SEQ ID NO: 154951 - DNA, 80 bp, synthetic construct
  source 1..80: mol_type = other DNA
ggaaccccagtactgtaacaaagtgctttatagtgggctacttacccattataatttgtggacagggtacctctgccatg

SEQ ID NO: 154952 - DNA, 80 bp, synthetic construct
  source 1..80: mol_type = other DNA
aattcattgttagatataacccagaacatgaagattgagctacgtttccgggaagacatcttatgaagccagacaataaa

SEQ ID NO: 154953 - DNA, 80 bp, synthetic construct
  source 1..80: mol_type = other DNA
aactactatagggactcttacgcggcctctgcagctaaacatgacttcacccaagatcctggcaagttcgcacaacctgt

SEQ ID NO: 154954 - DNA, 80 bp, synthetic construct
  source 1..80: mol_type = other DNA
tgtgattaccgccgtcgtcgcgcccgtcgccgcactcgcaaaaggccgcgtagaggtccttcaacgccgcttcggctcgc

SEQ ID NO: 154955 - DNA, 80 bp, synthetic construct
  source 1..80: mol_type = other DNA
tagcctgagtgaaggggagacagctaagaaatttgcttccaccagcacgaatggaactaacaccgttcagtcgatcgtaa

SEQ ID NO: 154956 - DNA, 80 bp, synthetic construct
  source 1..80: mol_type = other DNA
ccccgtccccgccgccgtgggcgcaaacgcgttgacgccgcccagacagtcccgcaactccccgaagcgccgcgcaacac

SEQ ID NO: 154957 - DNA, 80 bp, synthetic construct
  source 1..80: mol_type = other DNA
gggtggcacagtagcaacaaaccaaaaaatgaatgactacaacacatgggtatcaacaataggaaaccaaggaaactttg

SEQ ID NO: 154958 - DNA, 80 bp, synthetic construct
  source 1..80: mol_type = other DNA
ttacaaccaggaggacctgattcagatgtcccgggacagggccccctttgtggaccagagccaatctcacagcctgtttt

SEQ ID NO: 154959 - DNA, 80 bp, synthetic construct
  source 1..80: mol_type = other DNA
tttcaaaatgaacccggaaatgccgttgagcgagcgatcgtgcgcgtggcggacacaatggctagtgggccagcgaactc

SEQ ID NO: 154960 - DNA, 80 bp, synthetic construct
  source 1..80: mol_type = other DNA
atatggacaagcttccctagaaattatatgcctagtcatatacaaaattatatcgaacacgaaaaattgaaatttagcga

SEQ ID NO: 154961 - DNA, 80 bp, synthetic construct
  source 1..80: mol_type = other DNA
ctttatccctccttaggaagaatatagttactgtcactaccactaagggagaatttacagcattaggcatacatgatagg

SEQ ID NO: 154962 - DNA, 80 bp, synthetic construct
  source 1..80: mol_type = other DNA
aaatgcctggtatcggaccggtttacttggccgagaaccagcacgacatcctcgttcaagaatgtctcaaaggtgccgac

SEQ ID NO: 154963 - DNA, 80 bp, synthetic construct
  source 1..80: mol_type = other DNA
tctcatttctcacaagacgggtcctacgggtacacggccctaaataggatgggcaagatatacgtgagacatgtgaataa

SEQ ID NO: 154964 - DNA, 80 bp, synthetic construct
  source 1..80: mol_type = other DNA
acgagcgagagcgaggaagagacagaagccctctcggaagaagaagagacgggctccgtccaccagcagctcaggcagca

SEQ ID NO: 154965 - DNA, 80 bp, synthetic construct
  source 1..80: mol_type = other DNA
tacatccggctgatcagagattggaagtcaattttgaagattcattattttcaaaatataaaggaaatgtggacatggaa

SEQ ID NO: 154966 - DNA, 80 bp, synthetic construct
  source 1..80: mol_type = other DNA
aagggagacggagcagtcatagtcaaggtagggacagacataaaagtagtaccaagaaggaaagccaagatcatcagaga

SEQ ID NO: 154967 - DNA, 80 bp, synthetic construct
  source 1..80: mol_type = other DNA
ctcatgctcttgcgcagggtgacggtggcctggttaacgggcacgcactgggagactgagatgacatcccccaggcgctt

SEQ ID NO: 154968 - DNA, 80 bp, synthetic construct
  source 1..80: mol_type = other DNA
atgcggtggtgtagtggcaaacacaggcaatattgtggggatacatgttggtgggaatgggcgtgtggtgtattgcgccg

SEQ ID NO: 154969 - DNA, 80 bp, synthetic construct
  source 1..80: mol_type = other DNA
agtgagatgagtactttagcgatgtcggcgggggcgctacgtttcaccgtgacggtgagaacttgaccgtcgttttgtat

SEQ ID NO: 154970 - DNA, 80 bp, synthetic construct
  source 1..80: mol_type = other DNA
cctactcgtccaccctcgttggcgcacctgactccacaggaacacccatagcctccgagccctccacatcaagttccacc

SEQ ID NO: 154971 - DNA, 80 bp, synthetic construct
  source 1..80: mol_type = other DNA
cctacaaaccatggatatatatcgcatccccgtacagagtggcaatcatcagagttctcaagttttcggtttccaagtgc

SEQ ID NO: 154972 - DNA, 80 bp, synthetic construct
  source 1..80: mol_type = other DNA
acttaacagtggatcaagcctggagaggaaaaggtgagggtttgccaggaatgtgtggtggcgccttgatttcatcaaat

SEQ ID NO: 154973 - DNA, 80 bp, synthetic construct
  source 1..80: mol_type = other DNA
ataattgcttatggggatgatgtattaatatcttatgtggatgacttggacccagctgaattggcagagacagggaaaaa

SEQ ID NO: 154974 - DNA, 80 bp, synthetic construct
  source 1..80: mol_type = other DNA
atgatcaacatcctaccatgggatacgtgccatacaacactaactttggcaatggcaagtggatagatggtaaaggacat

SEQ ID NO: 154975 - DNA, 80 bp, synthetic construct
  source 1..80: mol_type = other DNA
gtacgcttacagagacgagtacaaaaacgtggtcctgaccgcctactacacctttaagtttaactgggggggcgacatgt

SEQ ID NO: 154976 - DNA, 80 bp, synthetic construct
  source 1..80: mol_type = other DNA
taggaccaaataaattacaaacaggcaacaacagcatatatggacagccaaactacaatccagacatagaaaaactacac

SEQ ID NO: 154977 - DNA, 80 bp, synthetic construct
  source 1..80: mol_type = other DNA
ggtgcttgataacctatccttcaactctgcactcattgataaactttgtaattctaagcatatttttaaatccacatatt

SEQ ID NO: 154978 - DNA, 80 bp, synthetic construct
  source 1..80: mol_type = other DNA
gaagaagtttgagatgtttacatatgtcagatttgacctggagataacagtggttactaacaacaccggtttgatgcaga

SEQ ID NO: 154979 - DNA, 80 bp, synthetic construct
  source 1..80: mol_type = other DNA
ctccaactggatcaccacaaacattacctataacagtcacaatagctcccatgtgtaccgagttcactggcatcagatcc

SEQ ID NO: 154980 - DNA, 80 bp, synthetic construct
  source 1..80: mol_type = other DNA
aaccaaatgaagccaaattctctagcaatctaaccattcaggcaatgttcatcccaccaggtgcaccaaatcccaaaaag

SEQ ID NO: 154981 - DNA, 80 bp, synthetic construct
  source 1..80: mol_type = other DNA
tgccacaccaagcgataacaactggtataaatggcaatacacatacctaaaaaccatgaaaaacatatactaccagacag

SEQ ID NO: 154982 - DNA, 80 bp, synthetic construct
  source 1..80: mol_type = other DNA
actgacccgcaactcgtgggccccagatacgtattccactactgggattggagacgggggtaccttagtgaacgcgctat

SEQ ID NO: 154983 - DNA, 80 bp, synthetic construct
  source 1..80: mol_type = other DNA
ctgacaagagaaacagcataacatacatacctgagacagttaaaccagacgtgacaagtcacggggcatttgggcaacag

SEQ ID NO: 154984 - DNA, 80 bp, synthetic construct
  source 1..80: mol_type = other DNA
catacagaggaaatggagtggatctgaaaaatggagctgtcacaccgctaaccccaattacaaacatcacaacatatgga

SEQ ID NO: 154985 - DNA, 80 bp, synthetic construct
  source 1..80: mol_type = other DNA
tgcgaaatatcactgccccgaaacttcaaggactccccgtgttaaacactcctggtagtaaccaatacttgacatcagac

SEQ ID NO: 154986 - DNA, 80 bp, synthetic construct
  source 1..80: mol_type = other DNA
tttgtccagaaagttcgatctgtccctataggtcgaactttgtacttaccaccatatgagtacttagaaagaagatggat

SEQ ID NO: 154987 - DNA, 80 bp, synthetic construct
  source 1..80: mol_type = other DNA
aattgcaacttagaagtattttacatgaagcccaataggaagcaccttccccagaggtgtagagggcaggcacttctgtt

SEQ ID NO: 154988 - DNA, 80 bp, synthetic construct
  source 1..80: mol_type = other DNA
ccggcggagacgacgagggagctcctccagcgaaagctccgagagcagcgagcactccagttccaactccagcacttcgc

SEQ ID NO: 154989 - DNA, 80 bp, synthetic construct
  source 1..80: mol_type = other DNA
tgggactacaggcatgcaccaacatccccattgggactagggtgttcttataatgctgaaaattgaggtcattacctgta

SEQ ID NO: 154990 - DNA, 80 bp, synthetic construct
  source 1..80: mol_type = other DNA
gaaagaccaaaaaatatttagtgaacatttatataaaaaccctgaatactggcaatcgcaccacactgctgctagattat

SEQ ID NO: 154991 - DNA, 80 bp, synthetic construct
  source 1..80: mol_type = other DNA
cccagaatgaacttattgtaaatatagacaaacttaagaaaggtctagaccaattagcacctctgtatgcagtagagaat

SEQ ID NO: 154992 - DNA, 80 bp, synthetic construct
  source 1..80: mol_type = other DNA
tcttgtgctgctcgtatttttccttggaggaaagaccgtggtcgtgatcaccgccgccgccaccgctgctcattttccgc

SEQ ID NO: 154993 - DNA, 80 bp, synthetic construct
  source 1..80: mol_type = other DNA
aaaatcacacctcatctgaggcacgaacagacaagaacttttacaaatggacaattaacaccaagtcctttgtccagttg

SEQ ID NO: 154994 - DNA, 80 bp, synthetic construct
  source 1..80: mol_type = other DNA
atgacaccctgaatgaagtcgtggttgtcccaaatacacaagcatcagggccacaacacactaccaaacccagtgcatta

SEQ ID NO: 154995 - DNA, 80 bp, synthetic construct
  source 1..80: mol_type = other DNA
tgttgagagataccacccacatcaagcaagatgtgatgcctcaaggtattgaagagattatccagcaagttgcatccaat

SEQ ID NO: 154996 - DNA, 80 bp, synthetic construct
  source 1..80: mol_type = other DNA
gctctaagtactgttacttttagtttaaaggtgctatttgaccagcacaccaagggtcttaacagatggacgttccccaa

SEQ ID NO: 154997 - DNA, 80 bp, synthetic construct
  source 1..80: mol_type = other DNA
agcaatcgggagcaatatacgtgggcaattatagggtggtgaatagacacttggccacaatcacagactggcagaactgt

SEQ ID NO: 154998 - DNA, 80 bp, synthetic construct
  source 1..80: mol_type = other DNA
catgtttgctgacaagtggtacactcaagaggacctttgtccagtacctcttgtgcaaattgtggtttctgcggcgagcc

SEQ ID NO: 154999 - DNA, 80 bp, synthetic construct
  source 1..80: mol_type = other DNA
ctcaggtatctagacagaatgttggaactcactccactcaaaactcagtatccaatggttcgagtctgaactatttcaac

SEQ ID NO: 155000 - DNA, 80 bp, synthetic construct
  source 1..80: mol_type = other DNA
gagcgacagcagcatcagtttctgcggcgtacctacggaccgcagcaccggctcaccacgcagcaggctttgacggtgat

SEQ ID NO: 155001 - DNA, 80 bp, synthetic construct
  source 1..80: mol_type = other DNA
gtacaacgacgcccttagcatacttccctctaactttgaaaaagattccccaggggaaaaactttacaaacaaatatcta

SEQ ID NO: 155002 - DNA, 80 bp, synthetic construct
  source 1..80: mol_type = other DNA
gagaacgcgccgtgaatggattgaaaatgctgcgtcatccatttggataccaagttggtggtcaacggattgtccacaat

SEQ ID NO: 155003 - DNA, 80 bp, synthetic construct
  source 1..80: mol_type = other DNA
gaaaagcaaattgaacacctaagaatagctgattctagtactcaagagaaaattaagtgtgaaatagacactctacatga

SEQ ID NO: 155004 - DNA, 80 bp, synthetic construct
  source 1..80: mol_type = other DNA
gaccctgggagacaagccagagcgaggaagagagcgaagccccctcagaagaagaagaaacgcagacagtacagcagcag

SEQ ID NO: 155005 - DNA, 80 bp, synthetic construct
  source 1..80: mol_type = other DNA
ccccgctcctcccgctgacccacaagcgccatggcctggggctggtggctcaagcggtggaggagaagaaagaagccagc

SEQ ID NO: 155006 - DNA, 80 bp, synthetic construct
  source 1..80: mol_type = other DNA
atgggtgcacaagtgtctactcagaaaagtggctcgcatgaaaatcaaaacattctgacaaatggttcgacacaacactt

SEQ ID NO: 155007 - DNA, 80 bp, synthetic construct
  source 1..80: mol_type = other DNA
gaacatcttagatgtccctcagcagaagcttgtaaaagacccctaggacaagatacaaactgctataaacatgtaaattc

SEQ ID NO: 155008 - DNA, 80 bp, synthetic construct
  source 1..80: mol_type = other DNA
agaaaggatgccatgcttggtactcacgtcatatgggacttagggttacagtctagctgcactatggtagcaccttggat

SEQ ID NO: 155009 - DNA, 80 bp, synthetic construct
  source 1..80: mol_type = other DNA
tagtttactcaaacacaatgcatgtatagttactactgagaatggtaagttcacaggcttgggaatttatgacaatgtta

SEQ ID NO: 155010 - DNA, 80 bp, synthetic construct
  source 1..80: mol_type = other DNA
tagagccgagtatattatcaccgtgttatcttcacgttattctgaacacacgaactcctacgtagccactcacgttgatt

SEQ ID NO: 155011 - DNA, 80 bp, synthetic construct
  source 1..80: mol_type = other DNA
ttaaccacagcaaactcagcaacgccgagaatgcgaacgtgttcacaaaggagaaaaacacagcagaacatgaagtccaa

SEQ ID NO: 155012 - DNA, 80 bp, synthetic construct
  source 1..80: mol_type = other DNA
ccttaacttgaacgttgtactctgcaacctgcggtttccgttctgctcaccacaaactgacaacatttgtgtaaccttcc

SEQ ID NO: 155013 - DNA, 80 bp, synthetic construct
  source 1..80: mol_type = other DNA
ggcgcagccaactttcatacttgtcaccctgaaacacctcacccaacaggcatcggcgcgttagttcggggcactccgcg

SEQ ID NO: 155014 - DNA, 80 bp, synthetic construct
  source 1..80: mol_type = other DNA
attcaattttggtgtcttactcatctgatctagtcatttaccgaacaaacactataggtgatgactacatcccatcctgt

SEQ ID NO: 155015 - DNA, 80 bp, synthetic construct
  source 1..80: mol_type = other DNA
tgtcttggctggcaatgcatttgtgttcccacaccagattattaatttaagaacaaacaatagtgccacgttagtactgc

SEQ ID NO: 155016 - DNA, 80 bp, synthetic construct
  source 1..80: mol_type = other DNA
gcctgttttccctcccccccccctcctttaatgtaacttagaagcttgaacaaacgcccaataggatatgaccactccat

SEQ ID NO: 155017 - DNA, 80 bp, synthetic construct
  source 1..80: mol_type = other DNA
cagggactttccagaatgggctgtaaccaggggagggacatgggaggagttggtgtggaacgccctcataccttctgtat

SEQ ID NO: 155018 - DNA, 80 bp, synthetic construct
  source 1..80: mol_type = other DNA
atatgtatcaacaattagacagttttactggacacaactaacatcctggacacaaacagtaccccacattaactccacct

SEQ ID NO: 155019 - DNA, 80 bp, synthetic construct
  source 1..80: mol_type = other DNA
tactgtgcccataactatatctatcagtcccatgtatgctgagttctctggagctcgtgcaaggagccaaggcttaccag

SEQ ID NO: 155020 - DNA, 80 bp, synthetic construct
  source 1..80: mol_type = other DNA
aaaactgctaacatcatatgctttgtttcaggttgcaaagatttctgtttgcgaatggctagagacactaatttgcactc

SEQ ID NO: 155021 - DNA, 80 bp, synthetic construct
  source 1..80: mol_type = other DNA
atttcccctctagaagctaatgtaacagacccagttcctataacgatctctataagtccaatgtgtactgaattctcagg

SEQ ID NO: 155022 - DNA, 80 bp, synthetic construct
  source 1..80: mol_type = other DNA
aggggttccactgaccacgtgactcccgcaggccaaccacagcgtatgtcgtacgcttcctgggcgtggtttacatcctg

SEQ ID NO: 155023 - DNA, 80 bp, synthetic construct
  source 1..80: mol_type = other DNA
gatactccacctagtgggccagtacattctaaggaagtgccagcattgacagctgtagagaccggtgccaccagccaggt

SEQ ID NO: 155024 - DNA, 80 bp, synthetic construct
  source 1..80: mol_type = other DNA
atatactagagagacaaataaccaccatgcatatctcgaatccaacacaggaaaaacgagagcagttgttcaacaacgta

SEQ ID NO: 155025 - DNA, 80 bp, synthetic construct
  source 1..80: mol_type = other DNA
gactatgaaatactccttttactttacctggggcggtaaccaggcataccaacagacaatcaaaaacccttgcaaagatg

SEQ ID NO: 155026 - DNA, 80 bp, synthetic construct
  source 1..80: mol_type = other DNA
cacaccacagctggtacataatacaagaatctagttattatccaaagcacatacaatacgacatactgattggagaggga

SEQ ID NO: 155027 - DNA, 80 bp, synthetic construct
  source 1..80: mol_type = other DNA
atggtcagagaactttaccagccacatagaggacaaaacccctaagggaccctttggagggggacacagtacagctaggc

SEQ ID NO: 155028 - DNA, 80 bp, synthetic construct
  source 1..80: mol_type = other DNA
ctgttaacatagcacaggcaaaggcagagagattcgagtaccacctaggctggtattctcccatactactaagcaaccac

SEQ ID NO: 155029 - DNA, 80 bp, synthetic construct
  source 1..80: mol_type = other DNA
gagggcgaacaaaatatagggcatatcaattgggacattgacatcatgggtttcgtccaactgcggcgcaagctcgaaat

SEQ ID NO: 155030 - DNA, 80 bp, synthetic construct
  source 1..80: mol_type = other DNA
ttctttcctcaacccacaggaggcgaatccagttgatgcaccaacaatgccggatgcttccagtaacagattttacactt

SEQ ID NO: 155031 - DNA, 80 bp, synthetic construct
  source 1..80: mol_type = other DNA
cagattccccctctgttagtctggtcgatgaggctagaagtaccccacaggtaactgtgttctagcctgcgtggcggcca

SEQ ID NO: 155032 - DNA, 80 bp, synthetic construct
  source 1..80: mol_type = other DNA
gccgataggtacggtccacgctagcgcccagcatgcgaccgccgcgccccatcattcccccggaatccccgccaccgcca

SEQ ID NO: 155033 - DNA, 80 bp, synthetic construct
  source 1..80: mol_type = other DNA
gggaccaactactttgggtgtccgtgtttctctttattccttatgttgacctatggtgacaagtgtgcaattcacgtttg

SEQ ID NO: 155034 - DNA, 80 bp, synthetic construct
  source 1..80: mol_type = other DNA
aatagattttatactttggagagtaaaatttggatgaatgactcaaaaggttggtggtggaaattacctgatgcactcaa

SEQ ID NO: 155035 - DNA, 80 bp, synthetic construct
  source 1..80: mol_type = other DNA
ggtttgccaactatgaacacaccaggaagcacgcaattcctaacatcagatgactttcaatcgccgtgcgctttgccaca

SEQ ID NO: 155036 - DNA, 80 bp, synthetic construct
  source 1..80: mol_type = other DNA
agtcccagtatactggcaatgccgatggaggcccatgctgtggttccaacaacaagtactcaatgacatctcaaagactg

SEQ ID NO: 155037 - DNA, 80 bp, synthetic construct
  source 1..80: mol_type = other DNA
cgtgatggccaccaacacagaagcaaaaacatcgtatgtttcgtacgttaatgctaacccaggagaggcaggtggtgtat

SEQ ID NO: 155038 - DNA, 80 bp, synthetic construct
  source 1..80: mol_type = other DNA
gcgaggacggcagttggcggcggggaggggggcttttgcactagggacttgagagacagggtgtcgcggggacggaggga

SEQ ID NO: 155039 - DNA, 80 bp, synthetic construct
  source 1..80: mol_type = other DNA
tcggagccagcccccggggttggttctgcccctctctctgtccttcagaggaaccagggacctcgggcaccccagagccc

SEQ ID NO: 155040 - DNA, 80 bp, synthetic construct
  source 1..80: mol_type = other DNA
agagttagaagcctttgcgatggcactaacagactcaggtccaaaagctaatattatagtagactcacagtatgtaatgg

SEQ ID NO: 155041 - DNA, 80 bp, synthetic construct
  source 1..80: mol_type = other DNA
gcgggcgcgcagcgccacggaagatctggatcgcatggaggccggtttgtcgccctacagcgtctcctcggacgctccgt

SEQ ID NO: 155042 - DNA, 80 bp, synthetic construct
  source 1..80: mol_type = other DNA
cccgggtgaagcaggacaccgcatcggtgcgagaacggaccgtggagatcacaacccagacgaaaacccgttttatctat

SEQ ID NO: 155043 - DNA, 80 bp, synthetic construct
  source 1..80: mol_type = other DNA
acgccactaacaacgagaccaccactcacaaaacaaccaccactagcaaagtaaccacagcagagcccacaatagactcg

SEQ ID NO: 155044 - DNA, 80 bp, synthetic construct
  source 1..80: mol_type = other DNA
tctgtagcactagtaggtgagagagctttttacgaccctagaactgcaggtagtaggtccagatttgatgacttagtcaa

SEQ ID NO: 155045 - DNA, 80 bp, synthetic construct
  source 1..80: mol_type = other DNA
agaccaccccaccaccagagtgtattagtgacttattaaaatcagtggatagtcaggaagttagggattactgcgagaag

SEQ ID NO: 155046 - DNA, 80 bp, synthetic construct
  source 1..80: mol_type = other DNA
gcgtactatgtttgttggcagggtttttcacgcccgtccgcagcggcagcaccacggagggtgatccccgcgtcccgagg

SEQ ID NO: 155047 - DNA, 80 bp, synthetic construct
  source 1..80: mol_type = other DNA
tgggtgacaggctccacctggctcacaaatgcaaaccaacactttcatttttgtaactataaacctaacaaagacaaact

SEQ ID NO: 155048 - DNA, 80 bp, synthetic construct
  source 1..80: mol_type = other DNA
tctgcatgttctgacatgtcggttcgcatgttacgggatacacctatgatgaggcaggatgaagacattacccagaatcc

SEQ ID NO: 155049 - DNA, 80 bp, synthetic construct
  source 1..80: mol_type = other DNA
caaagtggtgagcaatgccttgcagctctcgcagccaacgcgaccggtcacagcatcagatacacccagctctagtgggg

SEQ ID NO: 155050 - DNA, 80 bp, synthetic construct
  source 1..80: mol_type = other DNA
acacctataaaggaattgatttggacaaactcaaaataattgcatatggtgatgatgtgattgcatcatacccatttgaa

SEQ ID NO: 155051 - DNA, 80 bp, synthetic construct
  source 1..80: mol_type = other DNA
catggtcagagaccaggaaaagaacagttgggacattacactaggctaccacttcctattcaaatggggcggatcccctc

SEQ ID NO: 155052 - DNA, 80 bp, synthetic construct
  source 1..80: mol_type = other DNA
taagattggtagggccctcggcaggttcagacccagaggtgagacatatgtggactaactgtaggggagaattcttctat

SEQ ID NO: 155053 - DNA, 80 bp, synthetic construct
  source 1..80: mol_type = other DNA
catgatttgtttaaacaaattttcttaaaatttctgaggtttgtttattttatcttttcagtaaataaaaaaaaaaaaaa

SEQ ID NO: 155054 - DNA, 80 bp, synthetic construct
  source 1..80: mol_type = other DNA
ctggcggagattgacacagtcataccaatgaatgcagtgccaggaaaggtgaacaaaatggaagcgtaccctataccatt

SEQ ID NO: 155055 - DNA, 80 bp, synthetic construct
  source 1..80: mol_type = other DNA
caaattcgaagttgtgctgttggaaagcgactccaactcccaccatactccagcctctataggcagtggattgatgaatt

SEQ ID NO: 155056 - DNA, 80 bp, synthetic construct
  source 1..80: mol_type = other DNA
taatgtggcaatcctaccaacacatgcagcacccggagaaaccattgttattgatggcagggagattgaggttcttgacg

SEQ ID NO: 155057 - DNA, 80 bp, synthetic construct
  source 1..80: mol_type = other DNA
agaaacaaagcttggttgacagtagtttcagcagtgactagcgccattagcatcctcctgcttgtcacaaaaatctttaa

SEQ ID NO: 155058 - DNA, 80 bp, synthetic construct
  source 1..80: mol_type = other DNA
aggcgtgtgacatcatggagttaccttacgtgtgcaaacagggtgacagctggttaaagaagtttactgaagcctgtaat

SEQ ID NO: 155059 - DNA, 80 bp, synthetic construct
  source 1..80: mol_type = other DNA
gggcacacgagaacaccgtgagagccaatggtggatctactatcaattacactacaattaattactataaggactctgca

SEQ ID NO: 155060 - DNA, 80 bp, synthetic construct
  source 1..80: mol_type = other DNA
gcaatgttgggcacacatattgtgtgggattttgggttacaatctagtataacattggtcatcccttggataagtggatc

SEQ ID NO: 155061 - DNA, 80 bp, synthetic construct
  source 1..80: mol_type = other DNA
gcagcgaggagtgcgaccctcctgcccggtagcaacttcctcggggtccggcgctacgcgcttcgcgctgcgccggacgc

SEQ ID NO: 155062 - DNA, 80 bp, synthetic construct
  source 1..80: mol_type = other DNA
acaatcaccatcagctttaccctatttccacccaacaaaagaaatattcataccaggtagggttactaatctatcagaaa

SEQ ID NO: 155063 - DNA, 80 bp, synthetic construct
  source 1..80: mol_type = other DNA
tgggatgtagggccggtgggatttgcggggtctgccggaggcagtacgggtacagatttcccgaaagcggcggtgtgtgt

SEQ ID NO: 155064 - DNA, 80 bp, synthetic construct
  source 1..80: mol_type = other DNA
tctgcccaccactaactgacactccttgtgtaacactccaagtgttgaaagagttctactacacaaccataggctattcc

SEQ ID NO: 155065 - DNA, 80 bp, synthetic construct
  source 1..80: mol_type = other DNA
tccacgataaaaaccccagttaatgccaccacaatcagggagttctttaatcatgctatagatggagatgaacaggggct

SEQ ID NO: 155066 - DNA, 80 bp, synthetic construct
  source 1..80: mol_type = other DNA
gagacaataactataaactagaaacaggcccaaatgacaagtatggacagtaccaagcccaatacagcagaaacactcac

SEQ ID NO: 155067 - DNA, 80 bp, synthetic construct
  source 1..80: mol_type = other DNA
attacaattatagcaaatgtaattagtatatctggaattatttatgtgatatataaactgttctgtacattgcaaggacc

SEQ ID NO: 155068 - DNA, 80 bp, synthetic construct
  source 1..80: mol_type = other DNA
ctataaccaacagcaagttacaggcaacaaattggacggatgaatacactaacttcttaaacaaagcattcccctctgac

SEQ ID NO: 155069 - DNA, 80 bp, synthetic construct
  source 1..80: mol_type = other DNA
accgcagcgcccggcggcgtatccgcaaggtctcgaagctacagcttgtcagaggaaaagtaggtttgcaaaaaggtgcg

SEQ ID NO: 155070 - DNA, 80 bp, synthetic construct
  source 1..80: mol_type = other DNA
gtacatcgataccaggggactgtggtggtatcctcagatgccaacacggtgtcattggcctagtgaccatgggaggtgat

SEQ ID NO: 155071 - DNA, 80 bp, synthetic construct
  source 1..80: mol_type = other DNA
ccaaggaattagacaaatcctatttctagaaaaaatagaaccagctcaagaagaacatgaaaaatatcataataatgtaa

SEQ ID NO: 155072 - DNA, 80 bp, synthetic construct
  source 1..80: mol_type = other DNA
actcgaagctggccctcggggttgaggggcgcccaggcgtctggtgaggaggccagggcctgcaggttggcgtggctcag

SEQ ID NO: 155073 - DNA, 80 bp, synthetic construct
  source 1..80: mol_type = other DNA
gatggagatgtttacatacatgaggtttgacctggaaatgacatttgtgatcacgagttcccagcgcacgtccaccacct

SEQ ID NO: 155074 - DNA, 80 bp, synthetic construct
  source 1..80: mol_type = other DNA
atggtaacaaatacaactcaaaacatcagtacaccactcccaacttgctcatcatctaatagcacattcaatgatacatc

SEQ ID NO: 155075 - DNA, 80 bp, synthetic construct
  source 1..80: mol_type = other DNA
tggaataggtaccatactagccacatgttcaggatgcgaggacttatctgtgagaatgttaagagacacaccaatgataa

SEQ ID NO: 155076 - DNA, 80 bp, synthetic construct
  source 1..80: mol_type = other DNA
cctgttatctaccctgccacaaacagggtagagatgtttcccaccttcaaaaagctcactcccaccaagggagactggga

SEQ ID NO: 155077 - DNA, 80 bp, synthetic construct
  source 1..80: mol_type = other DNA
cgatgagtggatctccgtcgagaaaggctaccgttttaagagagaccgcaagaccaataaagtttcattctcttggctct

SEQ ID NO: 155078 - DNA, 80 bp, synthetic construct
  source 1..80: mol_type = other DNA
caacaatgaggttaccacttttatcaaacctagagaaaatctaagggatattagaaattttggacccagtgacatgtatg

SEQ ID NO: 155079 - DNA, 80 bp, synthetic construct
  source 1..80: mol_type = other DNA
tagccaatgtaattagtatagctggtattatatatgtgatatataaattattttgcaccctacagggtccatattcaggt

SEQ ID NO: 155080 - DNA, 80 bp, synthetic construct
  source 1..80: mol_type = other DNA
gcaattatcacaccaggtgtgagtcatccatagaaaacttcctgtgtagggccgcttgtgtgtacattgttagctacaaa

SEQ ID NO: 155081 - DNA, 80 bp, synthetic construct
  source 1..80: mol_type = other DNA
gactaatcctatattttctacaacactactgggtgaagtcttgaattacttttctacatggtctggcagcattactttaa

SEQ ID NO: 155082 - DNA, 80 bp, synthetic construct
  source 1..80: mol_type = other DNA
ggcaagtgtcttaaaaatgtacttttccagaaaaagaagacccaagaaggagaggccgctgccactgcgatacgtgtgtg

SEQ ID NO: 155083 - DNA, 80 bp, synthetic construct
  source 1..80: mol_type = other DNA
cacatgagttatctgatgtcctctagcccatgttggtgtccactcatgtgtttccaatctaaccagtctaggagagtccc

SEQ ID NO: 155084 - DNA, 80 bp, synthetic construct
  source 1..80: mol_type = other DNA
actacgtggtctcttaaggtgctgtatgacgagcacctcaaacaccacaacttctggggctatcccaacaaccagctaga

SEQ ID NO: 155085 - DNA, 80 bp, synthetic construct
  source 1..80: mol_type = other DNA
ttagcacagccgatcggtccctactccttattagcccctgctcgaggaccactgtcacaagaagatagtctatcatgctc

SEQ ID NO: 155086 - DNA, 80 bp, synthetic construct
  source 1..80: mol_type = other DNA
tggtcaagcacttctgtttccccggtatgcagggaataggccctccccagggctgaagccttaattatcgttatccgcac

SEQ ID NO: 155087 - DNA, 80 bp, synthetic construct
  source 1..80: mol_type = other DNA
tgcagcggtcgttttaaccgcaggtcgtccgtcttctccatctattggcagaagcatagcgatctggtgtacgcgcttac

SEQ ID NO: 155088 - DNA, 80 bp, synthetic construct
  source 1..80: mol_type = other DNA
cacaaaggaaccagctgtgttatccccttatgacaacagattaaatgtggatctggaagactctatattttctaaataca

SEQ ID NO: 155089 - DNA, 80 bp, synthetic construct
  source 1..80: mol_type = other DNA
cgagagtggttactggaaaacaagaacatccagttgagatcaccacaagggtgtaccataaagcaaaacacattagagct

SEQ ID NO: 155090 - DNA, 80 bp, synthetic construct
  source 1..80: mol_type = other DNA
caaatttcactactaacactacttcagaaatagataactcaatttacaccatctgtgacatagggtctgacaatagtttt

SEQ ID NO: 155091 - DNA, 80 bp, synthetic construct
  source 1..80: mol_type = other DNA
tcacaagtagttcctagtgataccatgcaaactcgccatgtctgcaactaccacacgagatctgaatcatctatcgagaa

SEQ ID NO: 155092 - DNA, 80 bp, synthetic construct
  source 1..80: mol_type = other DNA
aactcgtgaagagtttatggcaaaaaaaaataccaattacaactggtatacatacaaggccgcgtcagtaaaaaataaac

SEQ ID NO: 155093 - DNA, 80 bp, synthetic construct
  source 1..80: mol_type = other DNA
cacgtccagaccctgaggcgcgctggcgtagaagtaggcctgctgcccaaacacgttcacacacacgctggccccatcgg

SEQ ID NO: 155094 - DNA, 80 bp, synthetic construct
  source 1..80: mol_type = other DNA
ataggctactctagtgaccctaacaaagtagatacagtatttaaaaatacactttataaacatccatattactaccaaca

SEQ ID NO: 155095 - DNA, 80 bp, synthetic construct
  source 1..80: mol_type = other DNA
tacaacgtatctactaacagcaccgtgtttactatgagcatgcctctagtcacaaactgcagtatcgcaacaaacgcata

SEQ ID NO: 155096 - DNA, 80 bp, synthetic construct
  source 1..80: mol_type = other DNA
ttagacaaaacccagttgaacaatttattgatgacactcttaaggaggtccttgtagtaccagatactcaaacctcggga

SEQ ID NO: 155097 - DNA, 80 bp, synthetic construct
  source 1..80: mol_type = other DNA
gcatggagatacccttgcaggggcaggagaactcattaagattctccagcgagcgctcttcctccacttcagaggcggtt

SEQ ID NO: 155098 - DNA, 80 bp, synthetic construct
  source 1..80: mol_type = other DNA
ctgggcactcatgtagtttgggatctaggtttacagtcatcatgtcacctcatagtaccatggataagttctcactttta

SEQ ID NO: 155099 - DNA, 80 bp, synthetic construct
  source 1..80: mol_type = other DNA
cgagacccggccagtgtgggggggtcattggaagcactgggcacatcatcggcatccatgtcggtggaaatggtagagtg

SEQ ID NO: 155100 - DNA, 80 bp, synthetic construct
  source 1..80: mol_type = other DNA
ttagcgggcgacagtgacacacagaggtacactagttatgcaaatgccaatccaggtgagaaagggggagagttcttctc

SEQ ID NO: 155101 - DNA, 80 bp, synthetic construct
  source 1..80: mol_type = other DNA
tctgagtcttaggtgccctaatttgtttttcccatcaccagccccaaaagaaaagagctccaggtctatagctggaaact

SEQ ID NO: 155102 - DNA, 80 bp, synthetic construct
  source 1..80: mol_type = other DNA
gcggaccccgtttttaccccttccggactacaaaaatcgccattttagtgacgtcacggccgccattttaagtaaggcgg

SEQ ID NO: 155103 - DNA, 80 bp, synthetic construct
  source 1..80: mol_type = other DNA
atggtggcgaccggtggatccgataacttcgtataatgtatgctatacgaagttatgggcccggaagctgctaaacccct

SEQ ID NO: 155104 - DNA, 80 bp, synthetic construct
  source 1..80: mol_type = other DNA
ttaactgtacaccgatggacagtatgttgcgccacaacaatgtctctcttgtaatcatacccatttgtcccttgcgtgct

SEQ ID NO: 155105 - DNA, 80 bp, synthetic construct
  source 1..80: mol_type = other DNA
cgccagaaaccgcgtggcacgccgtatttcttgacttcatcgagtgagaggcgcgacaggcgcacggctgcttccgagac

SEQ ID NO: 155106 - DNA, 80 bp, synthetic construct
  source 1..80: mol_type = other DNA
atctaccgagtgctacacagccgctccgtgctctcctatgagcgttatgtggactggatctgcgccaccggcatggtgcc

SEQ ID NO: 155107 - DNA, 80 bp, synthetic construct
  source 1..80: mol_type = other DNA
acaatgatgctagtgatgttaataaaactaccaaaccagatacttcagcttgtagattttatactttagatagtaagttg

SEQ ID NO: 155108 - DNA, 80 bp, synthetic construct
  source 1..80: mol_type = other DNA
ccatggacatgtaccggatcccggtcaccaccagtgctgacactaataatcctatcctgtgcctgagcctatccccagct

SEQ ID NO: 155109 - DNA, 80 bp, synthetic construct
  source 1..80: mol_type = other DNA
ttgtggcgtattggccggaaatgcgtttgttttcccccaccaaattattaatctcagaaccaataactcggcaaccttaa

SEQ ID NO: 155110 - DNA, 80 bp, synthetic construct
  source 1..80: mol_type = other DNA
acggttgggcagtaggctcggagtgtctgggagaggttctgtgcggccacggttgtggctcccgtgaccaggcagtccat

SEQ ID NO: 155111 - DNA, 80 bp, synthetic construct
  source 1..80: mol_type = other DNA
agatgagaatcctttctataatttgaatggtaccctatttggaaacatacaggtcttcccccaccagatgataaacctta

SEQ ID NO: 155112 - DNA, 80 bp, synthetic construct
  source 1..80: mol_type = other DNA
tactcataggcggcatccgggcgagaatggtcatagatgagcccctcggcaacctcctgattgtagttttcacaggagac

SEQ ID NO: 155113 - DNA, 80 bp, synthetic construct
  source 1..80: mol_type = other DNA
tactgtttgaccagcatcagagaggactgaacaagtggtctttccccaacgaccagctagacctggccagatacaggggc

SEQ ID NO: 155114 - DNA, 80 bp, synthetic construct
  source 1..80: mol_type = other DNA
atctacctgtttgttggttttgttccattgaattttaaagttctaaaaactatcgactttatcttagcactcaatacggc

SEQ ID NO: 155115 - DNA, 80 bp, synthetic construct
  source 1..80: mol_type = other DNA
acaggaagtgccagcactaactgcagtggagactggtgcatccaacccagcagtcccctcagacttagtacaaacaaggc

SEQ ID NO: 155116 - DNA, 80 bp, synthetic construct
  source 1..80: mol_type = other DNA
caagaaacatatacaggaaagccttatcctcaaacagacacaacacaaatgtacaaaataccttatgacagcaactatgg

SEQ ID NO: 155117 - DNA, 80 bp, synthetic construct
  source 1..80: mol_type = other DNA
tcgtcctggctggtgacgggagagccactgaggaagatctggggctcgctggtgtttagcttgtccccactctgggtgca

SEQ ID NO: 155118 - DNA, 80 bp, synthetic construct
  source 1..80: mol_type = other DNA
tcaatcttgacgcgaccccgccgagtctgcacgttgggtgtgcagaagggggtgttcttatctttcatgatattgcgcac

SEQ ID NO: 155119 - DNA, 80 bp, synthetic construct
  source 1..80: mol_type = other DNA
ccccaattttacctggctttcaccccactccacaaatacacatccccggggaagtacacaacttgttggagttgtgtcag

SEQ ID NO: 155120 - DNA, 80 bp, synthetic construct
  source 1..80: mol_type = other DNA
gcctttcccgggcctagaccaacaatcccccactaacctgcctgccttaccaccgcctccacctaacccacaaccaccac

SEQ ID NO: 155121 - DNA, 80 bp, synthetic construct
  source 1..80: mol_type = other DNA
ataacccacacaataacacactatatggaggctccacatatgtaacacaccaagtaaacaatgctaaaaacccatacaca

SEQ ID NO: 155122 - DNA, 80 bp, synthetic construct
  source 1..80: mol_type = other DNA
cggcgccaagacgcagcagggcttcatgtccattgacattacgggcgacggggaacttcaggagcacctctttgtacgcg

SEQ ID NO: 155123 - DNA, 80 bp, synthetic construct
  source 1..80: mol_type = other DNA
ctatgaaacagcccctcggccgctgactgccgcaggttcgagagcaggtcggcatccaccgtcagataggggaagggtct

SEQ ID NO: 155124 - DNA, 80 bp, synthetic construct
  source 1..80: mol_type = other DNA
aaagtccggtggaggagtccattgagaggagtataggaaccgtggatgacacaatgccaaccggtcctcgcaacactgag

SEQ ID NO: 155125 - DNA, 80 bp, synthetic construct
  source 1..80: mol_type = other DNA
ttttatcagcatcgggaatgcctatagcaacttttacgatggctggtcgcacttcacacaggagggcgtctatgggttca

SEQ ID NO: 155126 - DNA, 80 bp, synthetic construct
  source 1..80: mol_type = other DNA
agaatcgaccaaggaccgcaggcccagcaagaaaaagacttcggttcgagagtccaaagagaaccgaacccgtgggagtc

SEQ ID NO: 155127 - DNA, 80 bp, synthetic construct
  source 1..80: mol_type = other DNA
tcaccatcacggttgctcccatggacgccgagtacaacgggctacgattagcggggcatcaaggtttaccaaccatgaat

SEQ ID NO: 155128 - DNA, 80 bp, synthetic construct
  source 1..80: mol_type = other DNA
tgcttgggacccacctgatatgggatttgggtttacaatcctcttgtactatggtggcaccctggatatcaagcactttc

SEQ ID NO: 155129 - DNA, 80 bp, synthetic construct
  source 1..80: mol_type = other DNA
ttaacagtaactatgacaatgcacattccatacttaacttttctaatgaagttacccacaaatggcacacatatagaaac

SEQ ID NO: 155130 - DNA, 80 bp, synthetic construct
  source 1..80: mol_type = other DNA
ccctttttactcattattattcatcacattaactaataaacagtgtaattccggggaggagctattaacctatataacta

SEQ ID NO: 155131 - DNA, 80 bp, synthetic construct
  source 1..80: mol_type = other DNA
ttccaacagtacaacgcaaggcagaaacacttagagaatgtaagaaaatcccactgtacaaagagcagattttggcattt

SEQ ID NO: 155132 - DNA, 80 bp, synthetic construct
  source 1..80: mol_type = other DNA
ttggcacaagacatgcctgtcttaacgcaccagatcatgtacatcccacctgggggaccagtaccaaacagcgccacaga

SEQ ID NO: 155133 - DNA, 80 bp, synthetic construct
  source 1..80: mol_type = other DNA
ttactactgcaagaaatagcctaaatgatgtcccaactcccaatcatagcagcagcgcccacccgcacttggggacaacg

SEQ ID NO: 155134 - DNA, 80 bp, synthetic construct
  source 1..80: mol_type = other DNA
aattttaggtacagtttatgctctgtacagactaatgtgtattgcccaaggcccgtatacgggtctcccccaacccaaaa

SEQ ID NO: 155135 - DNA, 80 bp, synthetic construct
  source 1..80: mol_type = other DNA
atgactttatccgtcccattctattcagcaaaaccgcttagaactgtgagggctgaagctgcattgggatatttaatgtg

SEQ ID NO: 155136 - DNA, 80 bp, synthetic construct
  source 1..80: mol_type = other DNA
tggctgaggccactaggctatgtaaggagtgtccacaaccagctaactttaaaaagtgttgcccactcgtgtgtggtaaa

SEQ ID NO: 155137 - DNA, 80 bp, synthetic construct
  source 1..80: mol_type = other DNA
gtcaagacaataactggattgtcccggcagagtgctctattgaaagagatttagggatagcaaacatgactataggtata

SEQ ID NO: 155138 - DNA, 80 bp, synthetic construct
  source 1..80: mol_type = other DNA
tagctccagactaccccaagaataactataactcttttgtagaaacttatcttaagaatgcagagaaaaactacgataca

SEQ ID NO: 155139 - DNA, 80 bp, synthetic construct
  source 1..80: mol_type = other DNA
gatttttttgccctgctgggtcacttgtgagttttcaaaattcatggggttcgcaaatggacttgtctgatccattgtgc

SEQ ID NO: 155140 - DNA, 80 bp, synthetic construct
  source 1..80: mol_type = other DNA
acaatattccaaagtacatgcaaaatggctaaccatagccaaagatggctacaacttagtttcagaagaatacaaaaata

SEQ ID NO: 155141 - DNA, 80 bp, synthetic construct
  source 1..80: mol_type = other DNA
caggttgctattgatcaatactcaggccagttgctatcattggacatacccacaaatgaactgacactcaaggaagccct

SEQ ID NO: 155142 - DNA, 80 bp, synthetic construct
  source 1..80: mol_type = other DNA
ttctacttagatctccatacacctttccaaaactataccatgatacacaaccagagtatggctttgttatagtgtcttac

SEQ ID NO: 155143 - DNA, 80 bp, synthetic construct
  source 1..80: mol_type = other DNA
accccaggaccaaactacatggccagcctgggaagatcctggaactctacactgattctgtcactgtttcttcaacccct

SEQ ID NO: 155144 - DNA, 80 bp, synthetic construct
  source 1..80: mol_type = other DNA
attataaaccccagacaggtgaagtcactcttccaattgaaataagagataaccctagacatataaagaatgtaggacct

SEQ ID NO: 155145 - DNA, 80 bp, synthetic construct
  source 1..80: mol_type = other DNA
tgctgaggattatatagaaaaatctgaggaatttctaaaaggcattaatccatcagttataacgctaggatctatggtag

SEQ ID NO: 155146 - DNA, 80 bp, synthetic construct
  source 1..80: mol_type = other DNA
taggacgctgtccgccaggacggagaagcggcccaataagtactccgcgtcgtccctagtcagcgaggcgcatgcctcgc

SEQ ID NO: 155147 - DNA, 80 bp, synthetic construct
  source 1..80: mol_type = other DNA
acctgggaagttgcagggagacaaccaagatagaacagtcgcaaacacacagccgagtggcccatcaaattctaaggaga

SEQ ID NO: 155148 - DNA, 80 bp, synthetic construct
  source 1..80: mol_type = other DNA
atgggtcccgtagtgacaactatgctgaatatcttgaatatgggaggagcggggctttgggttccattgtgtgccctttc

SEQ ID NO: 155149 - DNA, 80 bp, synthetic construct
  source 1..80: mol_type = other DNA
atttgtcataacaagcgcacaagtgacttcaacaaaccaaagtcaggacgcgcccgttctcacccatcaagtcatgtacg

SEQ ID NO: 155150 - DNA, 80 bp, synthetic construct
  source 1..80: mol_type = other DNA
ggtcacaatataagtgttatattgtgatcatgggtgcacaagtgtctacacagaagagcggttcacatgagaatcagaac

SEQ ID NO: 155151 - DNA, 80 bp, synthetic construct
  source 1..80: mol_type = other DNA
gggtgagccaagtattcttaaggccgttctctgttccatatcccataaattgtttattccggagctcgttggcgcggaaa

SEQ ID NO: 155152 - DNA, 80 bp, synthetic construct
  source 1..80: mol_type = other DNA
aacacaatcttgatgtttgttagtacactaggcatagtgtatgttatatataaactctttgcacagactcagggacccta

SEQ ID NO: 155153 - DNA, 80 bp, synthetic construct
  source 1..80: mol_type = other DNA
tgatgtgtttcaaaaagagccaccgtgcagaaccagtgtgtatattactccacgggcaaccaggatgtggtaaatcactg

SEQ ID NO: 155154 - DNA, 80 bp, synthetic construct
  source 1..80: mol_type = other DNA
gttggagacggtggcgacgcaggagactgagacggaggaggagacggagacggggactcaggttcagaaagagactcata

SEQ ID NO: 155155 - DNA, 80 bp, synthetic construct
  source 1..80: mol_type = other DNA
tatacatccattggtagaaccaacttcccactgaggcatggtaaaattattgccaaaagaaacaagatcaccacctatgg

SEQ ID NO: 155156 - DNA, 80 bp, synthetic construct
  source 1..80: mol_type = other DNA
aggacaaactacaggcataaatcctagttggaatgacgtgcaaaacacaacagcacttaataacgaaggtaccaatgcaa

SEQ ID NO: 155157 - DNA, 80 bp, synthetic construct
  source 1..80: mol_type = other DNA
atgccctaaacctacacattacaagcaatgttgcccactcttatgtggccaggccttggtgctacgtgacaggaggactt

SEQ ID NO: 155158 - DNA, 80 bp, synthetic construct
  source 1..80: mol_type = other DNA
cctccccccgcgggaggctcaatcggccttggtctgacattccaccccggccaggtccaggagggtgcaaatattctcca

SEQ ID NO: 155159 - DNA, 80 bp, synthetic construct
  source 1..80: mol_type = other DNA
actatcacgtgggtgctacgtcatcgccgccatcttagatcacaaaatggccgacttccttcctctttttttaaaattaa

SEQ ID NO: 155160 - DNA, 80 bp, synthetic construct
  source 1..80: mol_type = other DNA
cggccacgtggaaggggttgtagagctctggaaggccctcctcgcagtacactggcacactggtaaacgtgccccgatgg

SEQ ID NO: 155161 - DNA, 80 bp, synthetic construct
  source 1..80: mol_type = other DNA
gctttgtatctgcttgcaaggacttctgcttgcgaatggctcgggataccaatctacacaagcaaagtggcccaataacc

SEQ ID NO: 155162 - DNA, 80 bp, synthetic construct
  source 1..80: mol_type = other DNA
tgaccttgctcgctacaaggggtgccaactgacattttacagacagaaagccacagactttatagctgtctatgacatct

SEQ ID NO: 155163 - DNA, 80 bp, synthetic construct
  source 1..80: mol_type = other DNA
catctgaggcttgagggagcctacctacagtatgggtgccagtggttccaagaagcgctccaagcaggctggaaggctac

SEQ ID NO: 155164 - DNA, 80 bp, synthetic construct
  source 1..80: mol_type = other DNA
gagatataataaacaaagaaacaaaagatgtagaaaaaatgaaatactatttagataaatatggtatagatttgccatta

SEQ ID NO: 155165 - DNA, 80 bp, synthetic construct
  source 1..80: mol_type = other DNA
ggttacagctcaccacaaacaaccgtcgactctgtcttctccaaactatactctaatggggcctactttcagtcccactt

SEQ ID NO: 155166 - DNA, 80 bp, synthetic construct
  source 1..80: mol_type = other DNA
ggtttggccttaatgaatctctcaccccattggacgccaccggtggcctgttttaccacatctccctcaaccccatcaac

SEQ ID NO: 155167 - DNA, 80 bp, synthetic construct
  source 1..80: mol_type = other DNA
gacgacccccggcatgctcatgcgcagtaaatacaaagtcctcatccccagcttccagaccagacccaagggtcgcaaaa

SEQ ID NO: 155168 - DNA, 80 bp, synthetic construct
  source 1..80: mol_type = other DNA
ttttagttaatggccagaaaatacaaattaaggataagtataagcttgttgatccagaaaatgttaacttggagttaact

SEQ ID NO: 155169 - DNA, 80 bp, synthetic construct
  source 1..80: mol_type = other DNA
cgtgtacatcgcgcaatatgccaccgaaaaagcgaacgatgatctggacaggtacaccaactgggagatcaccaccaggc

SEQ ID NO: 155170 - DNA, 80 bp, synthetic construct
  source 1..80: mol_type = other DNA
gtgatagagtaaggtctatcacccttggtaactcaactatcaccacccaggaaagcgccaatgtagtcgtcgggtatggg

SEQ ID NO: 155171 - DNA, 80 bp, synthetic construct
  source 1..80: mol_type = other DNA
atgggtgcacaagtgagtaagcaaaataccggttctcatgagaattcagtttcagcatcaggaggttctgtcataaaata

SEQ ID NO: 155172 - DNA, 80 bp, synthetic construct
  source 1..80: mol_type = other DNA
taggtagtgataacagctttgagattacaattccttactctttctccacatggatgcggaaaacaaatggccacccaatt

SEQ ID NO: 155173 - DNA, 80 bp, synthetic construct
  source 1..80: mol_type = other DNA
acagcagaaacaggccttgtatgctgcatatgtccatacacagaaccgcccatgtacaacaaagaccacccaaccatggg

SEQ ID NO: 155174 - DNA, 80 bp, synthetic construct
  source 1..80: mol_type = other DNA
tggcggcgtggccgggcacggtggccttttgcggcgtttccacgcagcttttgcgcggcgcttcgcttttcggtgcggcg

SEQ ID NO: 155175 - DNA, 80 bp, synthetic construct
  source 1..80: mol_type = other DNA
aagaaaaaatgtcagctaccaggaagccaaagaactaaatcacaaaacgggcttctacagctcaatctttctctcccgag

SEQ ID NO: 155176 - DNA, 80 bp, synthetic construct
  source 1..80: mol_type = other DNA
caacatttgcgtaaacttccaggtactaagttccgtttacaacggctacttagacatacaccactttgatagtacaagcc

SEQ ID NO: 155177 - DNA, 80 bp, synthetic construct
  source 1..80: mol_type = other DNA
atttcaagttaacaatgagttgtggcaaggtgttaaagcatgtgtcaaatccaaatttagagagatctttgggatcaatg

SEQ ID NO: 155178 - DNA, 80 bp, synthetic construct
  source 1..80: mol_type = other DNA
gtctcctaaaagacatgcctctgtggtgtgcactatttggatacacagactggataaagaaagaactagacaactgggag

SEQ ID NO: 155179 - DNA, 80 bp, synthetic construct
  source 1..80: mol_type = other DNA
aatcgcagtcatacaagtaatgtcatcacaaccccaaaaacgcggtttgaatataatatcacgggatatgttggccaaga

SEQ ID NO: 155180 - DNA, 80 bp, synthetic construct
  source 1..80: mol_type = other DNA
gacccaaggggaaaaagactgtaaaaataagaatagcagcccccactctattcacagacaagtggtacttttccaaagac

SEQ ID NO: 155181 - DNA, 80 bp, synthetic construct
  source 1..80: mol_type = other DNA
cctttactctagactcagaagccattgccaaacagggaagcaaatatggtctgacaatcacaccaccagacaaatcacca

SEQ ID NO: 155182 - DNA, 80 bp, synthetic construct
  source 1..80: mol_type = other DNA
tacccccagtgagtggagggacagggcgcattcttgctacctgtagtgcttgccctgacatgtctgttaggatgctgcgg

SEQ ID NO: 155183 - DNA, 80 bp, synthetic construct
  source 1..80: mol_type = other DNA
gcttcccctttaactataacccatcaaattcaaatcaagaacaacaactaaaaacatttgaaaaatggctatactgctcc

SEQ ID NO: 155184 - DNA, 80 bp, synthetic construct
  source 1..80: mol_type = other DNA
tgatttgtgaatttcagtttatttactttcttccaatcaagctttcccagcctccgcttctcaggtcccagttatgggtt

SEQ ID NO: 155185 - DNA, 80 bp, synthetic construct
  source 1..80: mol_type = other DNA
ccccgtatgtccccattacactatccataagcccaatgtgttcagagttttctggagccagaaataatacaacacagggt

SEQ ID NO: 155186 - DNA, 80 bp, synthetic construct
  source 1..80: mol_type = other DNA
gacttcatattcgggtacaacagaaagtggcccttcacagacagcttgctgacatgccccgcactgcagccgggtatcca

SEQ ID NO: 155187 - DNA, 80 bp, synthetic construct
  source 1..80: mol_type = other DNA
cgatggcggctggagagaaggatgcccggctccccgccgcctcctgcacacgagcggccagggcctccatctctgccgcc

SEQ ID NO: 155188 - DNA, 80 bp, synthetic construct
  source 1..80: mol_type = other DNA
cgtttgctccatctgtcagcaacgccaagctccagaggacgcccgcgacgagcctcacctgttctcctcctgtttagagg

SEQ ID NO: 155189 - DNA, 80 bp, synthetic construct
  source 1..80: mol_type = other DNA
ccaactcaaggcatatcagcgcacgcacagaactgaaccagtgtgtttattaatacatggagatccagggtgcggtaaat

SEQ ID NO: 155190 - DNA, 80 bp, synthetic construct
  source 1..80: mol_type = other DNA
cagatccttgtataagccagaataattgcacaggattagaatcagagccaatggtaggctgtcagttcaatatgacaggg

SEQ ID NO: 155191 - DNA, 80 bp, synthetic construct
  source 1..80: mol_type = other DNA
agcactcaacgatgagtcacggacgatccccacaggcgactgtggcggtggctgcgttggcggcctgcccatggggaaac

SEQ ID NO: 155192 - DNA, 80 bp, synthetic construct
  source 1..80: mol_type = other DNA
aagcaaagaccgctattacccaatcaccgtgactccccatgactggtacccaatagaagaaacatgctattacccaaaac

SEQ ID NO: 155193 - DNA, 80 bp, synthetic construct
  source 1..80: mol_type = other DNA
atgaatgttgacatatttacagttagtcacaccaaagtggacaacatctttggtagggcttggtttgctcatgtacatga

SEQ ID NO: 155194 - DNA, 80 bp, synthetic construct
  source 1..80: mol_type = other DNA
tacaacccccaattcagaccagcctacatagacattacctacaacgccctaaacgacaagggagacggcaacatgatatg

SEQ ID NO: 155195 - DNA, 80 bp, synthetic construct
  source 1..80: mol_type = other DNA
taggtgccgcggtgcacccgaggctgacggatgtcgtgtttatccgtcagtgtgaggatggtctgcggcgagccgctgtg

SEQ ID NO: 155196 - DNA, 80 bp, synthetic construct
  source 1..80: mol_type = other DNA
gggcgtggcgaagcttcacactcaggacggtgttaatgaggcccctctccagggcatcgaccccaaactgtagggccgag

SEQ ID NO: 155197 - DNA, 80 bp, synthetic construct
  source 1..80: mol_type = other DNA
gctagtaccaacctgaactctctgtcgcctcccacagtgaccatcccagaagcaatagaccgtagatttttcttggattg

SEQ ID NO: 155198 - DNA, 80 bp, synthetic construct
  source 1..80: mol_type = other DNA
gggccttggtgggctgcataaggcagtaggtttgaggtgacctacttggaccatgtggatccagtgtcctgatcctggac

SEQ ID NO: 155199 - DNA, 80 bp, synthetic construct
  source 1..80: mol_type = other DNA
tgttgcatacaagtatgttggtttaactaattacacacttgaagagagagatacagttgtagaatctagagcaaatttaa

SEQ ID NO: 155200 - DNA, 80 bp, synthetic construct
  source 1..80: mol_type = other DNA
gggtcctttagcacaaccacctggagcttaaaagtactgtttgatgaataccaaaagttccacaacaggtggtcctaccc

SEQ ID NO: 155201 - DNA, 80 bp, synthetic construct
  source 1..80: mol_type = other DNA
ttggcacatgccctgtaagatataaagaatctacgaacactgaaaacaccattggaagtagcatcatagaaaccattgag

SEQ ID NO: 155202 - DNA, 80 bp, synthetic construct
  source 1..80: mol_type = other DNA
atagcatacacacctccaggtgctggcatcccagacacgcgacgtgatgccatgcttggcacgcatgttgtgtgggactt

SEQ ID NO: 155203 - DNA, 80 bp, synthetic construct
  source 1..80: mol_type = other DNA
cattcatcactcagaagaacttcttccaaggcgacaaggcgtccgaggttactgtttctgacacacaacccagtggacca

SEQ ID NO: 155204 - DNA, 80 bp, synthetic construct
  source 1..80: mol_type = other DNA
gagtttggtgcttttactaatttaccacatgtactcatgaatctggctgaaacaacacaggcagacctatgtatccccta

SEQ ID NO: 155205 - DNA, 80 bp, synthetic construct
  source 1..80: mol_type = other DNA
aggctcttaaaaaatgcgcttttcccggattgctcgctcgaaaaggaaagtgccactgccaccgctgccagtactaccgc

SEQ ID NO: 155206 - DNA, 80 bp, synthetic construct
  source 1..80: mol_type = other DNA
tcacagaaaaaagatagtcataaaacagtggcaaccaaactttattagacgctgctggactgtgaaacctgagctttcgt

SEQ ID NO: 155207 - DNA, 80 bp, synthetic construct
  source 1..80: mol_type = other DNA
aagagaaggtggagatggcggcgcgcgcgccgccgaagacgagtaccagcccgaagacctagacgggcttttcggcgcta

SEQ ID NO: 155208 - DNA, 80 bp, synthetic construct
  source 1..80: mol_type = other DNA
gaagtgggacaattaacctttgctggcctaataaacctcagcagtgttccaacaaaccgcatgatacgctatgagtatcc

SEQ ID NO: 155209 - DNA, 80 bp, synthetic construct
  source 1..80: mol_type = other DNA
tagtgtgttgagtatgttactactaatgtatatgatgacaaacataaagatccataaacttacatacatataaaagtaca

SEQ ID NO: 155210 - DNA, 80 bp, synthetic construct
  source 1..80: mol_type = other DNA
agactcaagatgtggaaaagatgaaattttatctagacaagtatggaatagatttacccttagtcacttacataaaagat

SEQ ID NO: 155211 - DNA, 80 bp, synthetic construct
  source 1..80: mol_type = other DNA
atgtgtggtggcttactcatctccaaagttgaagtatccttcaactttggagatgcatattgctggaaatggtggatggg

SEQ ID NO: 155212 - DNA, 80 bp, synthetic construct
  source 1..80: mol_type = other DNA
tctcgcccgtgggccttggcctcatttataaatgccttgcatattttgtaggatctcagagtaatctccacactcccggc

SEQ ID NO: 155213 - DNA, 80 bp, synthetic construct
  source 1..80: mol_type = other DNA
tcgctctggtctagtggaggtggtcaacctcactgatgggggaactgacaccacaggatatgccacctgggatatagaca

SEQ ID NO: 155214 - DNA, 80 bp, synthetic construct
  source 1..80: mol_type = other DNA
ccaccaacccatctatatttgtgaagatgagtgacccaccagcccaggtttcagttccttttatgtcccctgcagcagct

SEQ ID NO: 155215 - DNA, 80 bp, synthetic construct
  source 1..80: mol_type = other DNA
gttaaattttgatggtacattgttaggtaatataacaatcttcccacatcagtttattaatcttagaagtaataactctg

SEQ ID NO: 155216 - DNA, 80 bp, synthetic construct
  source 1..80: mol_type = other DNA
ctcacacacttcgtcggccggccccgtcactgtcggttggaaatgttgattctggacgaacaggtgtctaagagatcctg

SEQ ID NO: 155217 - DNA, 80 bp, synthetic construct
  source 1..80: mol_type = other DNA
taaccaaggtggcagatgatgcttcaaatgttttaggaccaaattgttatgcgactacgtctgaacctgaaaacaaagat

SEQ ID NO: 155218 - DNA, 80 bp, synthetic construct
  source 1..80: mol_type = other DNA
taaaaaacacccataccaatggggtcagattactagcacaggtagttcagaaaataggaaaggaagcactagtcatttgg

SEQ ID NO: 155219 - DNA, 80 bp, synthetic construct
  source 1..80: mol_type = other DNA
gttagctcttaaaaataaattaaatactgaatatgaagccacctctggcacaaaaaaccctaaaaggggctacgccggca

SEQ ID NO: 155220 - DNA, 80 bp, synthetic construct
  source 1..80: mol_type = other DNA
caaaagaagtcccagctctaacagcagtcgaaaccggggccacaagtcaggttgttcctgccgaccttattgagacaaga

SEQ ID NO: 155221 - DNA, 80 bp, synthetic construct
  source 1..80: mol_type = other DNA
ggactacgttgttttttagaagcggccacatgacctcgagatgtcgtcacccaaggtatttaacggcacacagccagacg

SEQ ID NO: 155222 - DNA, 80 bp, synthetic construct
  source 1..80: mol_type = other DNA
tgcgtgctatgcatcccctggattagtcagacccactacagactagtgcgccaagatgagtataccagtgctggcaatgt

SEQ ID NO: 155223 - DNA, 80 bp, synthetic construct
  source 1..80: mol_type = other DNA
cttctaccctaacctaagcattctaccaaatgaaataaactcatcagcacccacattttactctacagcacacccagaaa

SEQ ID NO: 155224 - DNA, 80 bp, synthetic construct
  source 1..80: mol_type = other DNA
gttgctatcgatcccatgctgctgtttgtggctgtggcgactttgttggccatattaatcatttggcagctactctgggt

SEQ ID NO: 155225 - DNA, 80 bp, synthetic construct
  source 1..80: mol_type = other DNA
ccagacaggggagtgggcttgtttgtgacttcaccaaaggtcagggcccaaggtggttcgcgttgctaggccaccttctc

SEQ ID NO: 155226 - DNA, 80 bp, synthetic construct
  source 1..80: mol_type = other DNA
tggatggtgatgtcaagaaattggcagaagttgtggctgagtccatgtctaatacagatgatgaagaaataaaggaacaa

SEQ ID NO: 155227 - DNA, 80 bp, synthetic construct
  source 1..80: mol_type = other DNA
accagaagatcatttgaacctagtaaccccataccctagcagggacctagcagttgtctcaacaggagcacatggtgcag

SEQ ID NO: 155228 - DNA, 80 bp, synthetic construct
  source 1..80: mol_type = other DNA
actccatccaaaactaagttacaacctagtgtcttctttgatgtatttgagggatctaaagagccagctgtcctaactga

SEQ ID NO: 155229 - DNA, 80 bp, synthetic construct
  source 1..80: mol_type = other DNA
gaagatatggtcagttgtgagttcaatatgacaggattagagagggataagaaaaaactttataatgaaacatggtactc

SEQ ID NO: 155230 - DNA, 80 bp, synthetic construct
  source 1..80: mol_type = other DNA
tctggccttcccggttgtacagcagatacagggtctcgttgcgacactcgggacccgttgatacccgctggaaccccgag

SEQ ID NO: 155231 - DNA, 80 bp, synthetic construct
  source 1..80: mol_type = other DNA
atcacgttccagactctaatgagacagatggattgaaggagaaacactttatcaaaccaagagaacacataaagaatgtt

SEQ ID NO: 155232 - DNA, 80 bp, synthetic construct
  source 1..80: mol_type = other DNA
ggggcggggacagtggtggggacggagacacagggtgacgtagaagacggggatgtgcaaggacggggcgttgcggggcc

SEQ ID NO: 155233 - DNA, 80 bp, synthetic construct
  source 1..80: mol_type = other DNA
ctgatgccaaaggatgggagcctacttatacaaaactaatggcacccacttactacaaagctaatccaaacagcacatac

SEQ ID NO: 155234 - DNA, 80 bp, synthetic construct
  source 1..80: mol_type = other DNA
ttacatactaaacttgggaaaggcatttggcactggtttcacagatcacattagtgagaaggttagtgaacttcaaaaca

SEQ ID NO: 155235 - DNA, 80 bp, synthetic construct
  source 1..80: mol_type = other DNA
accagcccaaatctggctttcctcggttcactattcctttcacaggactggcctctgcatactatatgttttatgatggg

SEQ ID NO: 155236 - DNA, 80 bp, synthetic construct
  source 1..80: mol_type = other DNA
gacgcctgcagccatccggacgtgaacgtcgcggagacaagcaacacctgtcgtccctgcccttctcctgccccctccgc

SEQ ID NO: 155237 - DNA, 80 bp, synthetic construct
  source 1..80: mol_type = other DNA
gtgactgatgttacagaaaaacgaaataacatcaattatgtcccaaccccatcccacagcagcagtgtgcacatgcgctt

SEQ ID NO: 155238 - DNA, 80 bp, synthetic construct
  source 1..80: mol_type = other DNA
caggctatccccagtgacgtggtagagacacgtcatgtggtgaattataaaaccagatccgagtcatgcttagagtcctt

SEQ ID NO: 155239 - DNA, 80 bp, synthetic construct
  source 1..80: mol_type = other DNA
caattacaaaaggtgttgtccacttatttgtgggaaagctatacaatttagagacaggagaactaatgctagatcaacag

SEQ ID NO: 155240 - DNA, 80 bp, synthetic construct
  source 1..80: mol_type = other DNA
cacactgggactctctgtatggaggcctagcatatggctttacacctaaaactaattcagaaaacacaaaccaagcaaaa

SEQ ID NO: 155241 - DNA, 80 bp, synthetic construct
  source 1..80: mol_type = other DNA
gcactttgatagtggctgccataccagaacatcagttagcaagtgcagagaaaggaaatgttaatactggctacaactac

SEQ ID NO: 155242 - DNA, 80 bp, synthetic construct
  source 1..80: mol_type = other DNA
ccatggagatgcggttcaccatagcctggatgtggtttcccagtgtgctgctgatactggggttgttgacgcctccgagt

SEQ ID NO: 155243 - DNA, 80 bp, synthetic construct
  source 1..80: mol_type = other DNA
gaacaaatcaaccgcatatccagtcaacagcgttgctcgtgtctattttaagcccaagcacgtaaaagcatgggtgccac

SEQ ID NO: 155244 - DNA, 80 bp, synthetic construct
  source 1..80: mol_type = other DNA
attcttctatcttcctttcagcaggcagggcctactttgaaactctaggtgcttactcagacattatatacaaccccttt

SEQ ID NO: 155245 - DNA, 80 bp, synthetic construct
  source 1..80: mol_type = other DNA
taagaatactgtaccaagactggctagcccaccgtaactactggacagccagtaacaaagacctagacctagcaaggtac

SEQ ID NO: 155246 - DNA, 80 bp, synthetic construct
  source 1..80: mol_type = other DNA
gacaacttcttcgcccccgttttcaccatgggcaaatattatacgcaaggcgacaaggtgctgatgccgctggcgattca

SEQ ID NO: 155247 - DNA, 80 bp, synthetic construct
  source 1..80: mol_type = other DNA
acctagttcaggtaatacttctaacgcagctccagtcctagatgctgctgagactggtcacaccagccaaacacaaccag

SEQ ID NO: 155248 - DNA, 80 bp, synthetic construct
  source 1..80: mol_type = other DNA
ggaggcgctggaggaggtggcgtggtcgcagacgcagagtaccaacaagaagagctagacgacctcttcgccgcactcga

SEQ ID NO: 155249 - DNA, 80 bp, synthetic construct
  source 1..80: mol_type = other DNA
cagaaggctgcttctcacacccacaactgcaaaaatacaaaatacctactacaggcataggcactgaaaactactttact

SEQ ID NO: 155250 - DNA, 80 bp, synthetic construct
  source 1..80: mol_type = other DNA
ttacagaaccagtggtagagggcttgaaggctggagccccagtcctaaagtcacccagtgctgaggcttgtggatatagt

SEQ ID NO: 155251 - DNA, 80 bp, synthetic construct
  source 1..80: mol_type = other DNA
tctcctagagagcttggccgtcgggccttataccccgacttgctgagcttctctaggagagcccctttcccagccttgag

SEQ ID NO: 155252 - DNA, 80 bp, synthetic construct
  source 1..80: mol_type = other DNA
ccgctctggattagtgggagtggttaacctcacagatggggggacggacaccactgggtatgctacatgggacatagaca

SEQ ID NO: 155253 - DNA, 80 bp, synthetic construct
  source 1..80: mol_type = other DNA
gagaaacaaattgaaaatttgcgtggtgctgacactaatacacaagaaaaaattaaactagaaattgatacactacatga

SEQ ID NO: 155254 - DNA, 80 bp, synthetic construct
  source 1..80: mol_type = other DNA
ggagacagagatctccgagtcctcggaagaagaagccgctcaagaagtcctccaagaaatccaggaggcgccgctacagc

SEQ ID NO: 155255 - DNA, 80 bp, synthetic construct
  source 1..80: mol_type = other DNA
cctcgggacgctcggactcccctccgtggtgttctcgctgcgggtgccggaggtgagtttacacaccgcagtcaaggggc

SEQ ID NO: 155256 - DNA, 80 bp, synthetic construct
  source 1..80: mol_type = other DNA
acgagctgttccacatacttgtaacgggtttggtcgggcagcgcgcgagagcacgcgtcccagtaatgcggtactcggta

SEQ ID NO: 155257 - DNA, 80 bp, synthetic construct
  source 1..80: mol_type = other DNA
tatgggtgcccaagtatctaggcagagtgttggaagccatgagactaatgttcaagctggatctggtgctgttgtaaagt

SEQ ID NO: 155258 - DNA, 80 bp, synthetic construct
  source 1..80: mol_type = other DNA
atgggggtgaagaagagggacattctaaatagaaacactaaggatgtcaagaaattgcaaagcatgattgatacttatgg

SEQ ID NO: 155259 - DNA, 80 bp, synthetic construct
  source 1..80: mol_type = other DNA
agtcctgcttcatttcgttcaccgtgcgcgggacctcgcgtcgtacgcggtaaaaatgcggtatgcggcgcgccgcaccg

SEQ ID NO: 155260 - DNA, 80 bp, synthetic construct
  source 1..80: mol_type = other DNA
tctgagaaactacagctcactcagtgaacaccagggtattacagactatgtcacacaactgggaaatgcatttggagatg

SEQ ID NO: 155261 - DNA, 80 bp, synthetic construct
  source 1..80: mol_type = other DNA
tgtgtgattacaacagacaatggaaagttcacaggccttggaatttatgacaaatttgtggttgtgccgacacatgcaga

SEQ ID NO: 155262 - DNA, 80 bp, synthetic construct
  source 1..80: mol_type = other DNA
aagttttgtctatggaagcctacagggtcgagttaaacactaacaccaatgcagggacacaggtttttggcttccaatta

SEQ ID NO: 155263 - DNA, 80 bp, synthetic construct
  source 1..80: mol_type = other DNA
atgatgctcaatcaccttcagctttaccttattttcatcctacaaaagaaatctttataccaggacaggttaaaaacttg

SEQ ID NO: 155264 - DNA, 80 bp, synthetic construct
  source 1..80: mol_type = other DNA
attaacaaaaaattataacacattaatagaggccatacaaaaaggaccaaaaaaagacactgcttttaacacctttaaaa

SEQ ID NO: 155265 - DNA, 80 bp, synthetic construct
  source 1..80: mol_type = other DNA
cccagtaattcccaaacatcaaatgcagcgccagcattagatgctgctgaaacaggacatacaagccaggtccaaccaga

SEQ ID NO: 155266 - DNA, 80 bp, synthetic construct
  source 1..80: mol_type = other DNA
ttcctgataacacggttaaatagtagttttcctttttaccgtcactgtaacgttgcaaaacgtattttccagcgtgttcg

SEQ ID NO: 155267 - DNA, 80 bp, synthetic construct
  source 1..80: mol_type = other DNA
tctcttcaggtccatcatcctatcccgagggctcaaacattaacaaaacttcaatagatgcatacaatacatggctagca

SEQ ID NO: 155268 - DNA, 80 bp, synthetic construct
  source 1..80: mol_type = other DNA
ctgttacattacataaccatccttgattcagatggctccatttcgtagtcatcgggtcgtttttgtgttcaatggttaca

SEQ ID NO: 155269 - DNA, 80 bp, synthetic construct
  source 1..80: mol_type = other DNA
caggggaaaaaacagctgatgaaactggcttatttagatagaggtttttacaagcactatggaattgttgtaggtgatga

SEQ ID NO: 155270 - DNA, 80 bp, synthetic construct
  source 1..80: mol_type = other DNA
aatacgaggataaaacaacaatactacaatgggagctcaagtttcatcacagaaagttggagcccacgaaaattcaaaca

SEQ ID NO: 155271 - DNA, 80 bp, synthetic construct
  source 1..80: mol_type = other DNA
atacaacccagcagatccaaactacggctacataccatacggagagcagtttggagcaggaaacatgccagacggcagca

SEQ ID NO: 155272 - DNA, 80 bp, synthetic construct
  source 1..80: mol_type = other DNA
agtttcaacacaaaagtctggcagccatgagactggcaatatagccactgggggttctactataaatttcaccaacatta

SEQ ID NO: 155273 - DNA, 80 bp, synthetic construct
  source 1..80: mol_type = other DNA
tgtccagcattttgatggcggcggaggtcgtgtacttgggattgggcataaacaggcccactgggaaatagtagctgtac

SEQ ID NO: 155274 - DNA, 80 bp, synthetic construct
  source 1..80: mol_type = other DNA
tggacaaattgaaaattgtggcatatggtgatgatgtgatagcctcatatccagaagaacttgacccagcacaaattgcc

SEQ ID NO: 155275 - DNA, 80 bp, synthetic construct
  source 1..80: mol_type = other DNA
ggcggaccccccccggtcccgcccagaaccatacgtggtctatctctatggagatcctggcactggcaaatctgtccttg

SEQ ID NO: 155276 - DNA, 80 bp, synthetic construct
  source 1..80: mol_type = other DNA
tactcctttttcagcggccgcagtgggcccacggcttggacattgtcgaggaggacgagtggctacgggagatacaagga

SEQ ID NO: 155277 - DNA, 80 bp, synthetic construct
  source 1..80: mol_type = other DNA
ttccagttcaaaggtcatcctcaccataactggcacaaaatggccgccaacttcttccgggtcaaaggtcactgctacgt

SEQ ID NO: 155278 - DNA, 80 bp, synthetic construct
  source 1..80: mol_type = other DNA
gcatgaccgtgactaagtttaacctgaggatactgtacgacgagtttcagaggagccttaacttctggaccggtagcaac

SEQ ID NO: 155279 - DNA, 80 bp, synthetic construct
  source 1..80: mol_type = other DNA
agcaacgaaggcctagtggaaccctggacatcagccacaatatcagaatatgaataccacctaggtatgttcagtcccat

SEQ ID NO: 155280 - DNA, 80 bp, synthetic construct
  source 1..80: mol_type = other DNA
acgccgcagacgccgcgccgcgctgacggcccgcaaacctcccgcagtccggtcccgcgaacaaatagcgtgggacgcca

SEQ ID NO: 155281 - DNA, 80 bp, synthetic construct
  source 1..80: mol_type = other DNA
acactcatcataaatgaaaagaaccggagggcgaacataggcaactgcatggaagctcttttccaggggccactacagta

SEQ ID NO: 155282 - DNA, 80 bp, synthetic construct
  source 1..80: mol_type = other DNA
gtatcccttggattagccagacccactacagaatggtgcaccaagatgaatataccagtgccggctatgtgacttgctgg

SEQ ID NO: 155283 - DNA, 80 bp, synthetic construct
  source 1..80: mol_type = other DNA
agcaccatataaatctgaattttctggcgccatggaggcccaaagacagggactacccacacgtatacccagtggtggcc

SEQ ID NO: 155284 - DNA, 80 bp, synthetic construct
  source 1..80: mol_type = other DNA
gtcatgacaatcccatggacctcaggtgtgcaatttagatatacagataaagatacctacactagtgctggtttcctatc

SEQ ID NO: 155285 - DNA, 80 bp, synthetic construct
  source 1..80: mol_type = other DNA
tactgctactaccgcatttccagaatcgttgcggtgtctcagtcacgccacaaaggtcgcattgtacgggtacttatagc

SEQ ID NO: 155286 - DNA, 80 bp, synthetic construct
  source 1..80: mol_type = other DNA
ttgaaacatggctatatggaaaatgcactcactatcaaacatttgccacagaaaccagactggcacctcagagagacaac

SEQ ID NO: 155287 - DNA, 80 bp, synthetic construct
  source 1..80: mol_type = other DNA
ttcacaaagaagccgcaccatatggaccattgtattaatttgtatagcctgcttagtcctgttttttgcacgacgagcct

SEQ ID NO: 155288 - DNA, 80 bp, synthetic construct
  source 1..80: mol_type = other DNA
aacgcttcctgcgcgaatggctggtgtgtcggcaagccgagcgggaggcggtgacggcgctctttcagcgtatggttatg

SEQ ID NO: 155289 - DNA, 80 bp, synthetic construct
  source 1..80: mol_type = other DNA
acaaatggagaatgctaatagatttcagagaattaaacaaggtaacccaagactttacagaagtccaactgggtatcccc

SEQ ID NO: 155290 - DNA, 80 bp, synthetic construct
  source 1..80: mol_type = other DNA
tgttcaggttctccatggagatttcttaaggaaaaattttgtaaatggacccaacttacttatatccacaaggaatctga

SEQ ID NO: 155291 - DNA, 80 bp, synthetic construct
  source 1..80: mol_type = other DNA
aatacaaacgatcttcgagggtggctgcgttcatcttagtgcactgatctaaaataggcgcgtaaatcgatctataagta

SEQ ID NO: 155292 - DNA, 80 bp, synthetic construct
  source 1..80: mol_type = other DNA
tggcaatgtttagagaatcatacattaatccttataaacttaaccacgtcatataatagacgctattattttgaatcatt

SEQ ID NO: 155293 - DNA, 80 bp, synthetic construct
  source 1..80: mol_type = other DNA
acacactcaaaatgaagactcttacttttgccctttctaaactgtggtgatgaaatggtgatattgatgccgtaatcttt

SEQ ID NO: 155294 - DNA, 80 bp, synthetic construct
  source 1..80: mol_type = other DNA
aaatgaatccaaagatgcccacagttttaaatgctaactcatctaaaccacctgaagacctaacaaaaaccaatgtacaa

SEQ ID NO: 155295 - DNA, 80 bp, synthetic construct
  source 1..80: mol_type = other DNA
aactccaagaagcatctggttctgacctctcagcatccctctcccctggcccagaacagcacccgaaagagtgcccagca

SEQ ID NO: 155296 - DNA, 80 bp, synthetic construct
  source 1..80: mol_type = other DNA
aagttgactcacttgtaccagtgaacaatgttaccgggaaagttaactctctagaagccttccagatcccagtttcaacc

SEQ ID NO: 155297 - DNA, 80 bp, synthetic construct
  source 1..80: mol_type = other DNA
ataccaaggatgcgatatacaggaatgcacatttagcaagtataaatgaaaacaccatcctgtatgccataacagcagac

SEQ ID NO: 155298 - DNA, 80 bp, synthetic construct
  source 1..80: mol_type = other DNA
ttggtgtccatatcatatgggatctgggcttgcaatcttcatgtactatggtggtaccatggttatcttcagggttttac

SEQ ID NO: 155299 - DNA, 80 bp, synthetic construct
  source 1..80: mol_type = other DNA
tgccaccataagcaacacgattatggatagcttaaccaacaaagtcattaagtggctgattaggattattagtgccatga

SEQ ID NO: 155300 - DNA, 80 bp, synthetic construct
  source 1..80: mol_type = other DNA
atcacatgatggtggtactgtatcagtcaaatataaatttacccacccaggtgatcaaggtatagacctcagtacagcag

SEQ ID NO: 155301 - DNA, 80 bp, synthetic construct
  source 1..80: mol_type = other DNA
aagatgagctccgggctcccgccaaaataaaagcagggaagacaagagccattgaagcagccagcatgaatgatacagct

SEQ ID NO: 155302 - DNA, 80 bp, synthetic construct
  source 1..80: mol_type = other DNA
gctacacaagttgatgtaaccatattgggtagcctattgcaattggacttccaaaatcctagggtatttggtcaagacgt

SEQ ID NO: 155303 - DNA, 80 bp, synthetic construct
  source 1..80: mol_type = other DNA
gtcagcggctgtctgcccggcgccgcggcggcggacggttcgggtggcgtcggctcgcactacacgggctcgcgcgccgg

SEQ ID NO: 155304 - DNA, 80 bp, synthetic construct
  source 1..80: mol_type = other DNA
ctcatcagaatcttgcaaagagccctcttcttgcacttcagagcaggctgccgactctcaagaattggtgggcccagagg

SEQ ID NO: 155305 - DNA, 80 bp, synthetic construct
  source 1..80: mol_type = other DNA
gaatatgatgaatttgtgcgtggtatccgcagcacagatatagggaaagtcctgataattccagcttattcagttctcag

SEQ ID NO: 155306 - DNA, 80 bp, synthetic construct
  source 1..80: mol_type = other DNA
aagatcagaagtacagcagtaggaagatccttatacacccccccttactctgtactgtatagacagtggattgatttatt

SEQ ID NO: 155307 - DNA, 80 bp, synthetic construct
  source 1..80: mol_type = other DNA
aacctgaactaaggaaagctgtcattcaaggtccagaacatgagtttggaatggcattgatcaaaagaaactgccatata

SEQ ID NO: 155308 - DNA, 80 bp, synthetic construct
  source 1..80: mol_type = other DNA
agttgtgtaccaatgatcaatagcaggtgtgacgtacaaataacatcttgatcaatcacttctgtttccccggaccgagt

SEQ ID NO: 155309 - DNA, 80 bp, synthetic construct
  source 1..80: mol_type = other DNA
acgtacacctgatttcttaaccgaagctatagtgcatagcgtattcatactatcatattatactaatcacgatcttaaag

SEQ ID NO: 155310 - DNA, 80 bp, synthetic construct
  source 1..80: mol_type = other DNA
gtaggttctacactttagatactgtaatgtggggtaaggagtcgaaaggctggtggtggaagttacccgacgcactgaga

SEQ ID NO: 155311 - DNA, 80 bp, synthetic construct
  source 1..80: mol_type = other DNA
gagaccccatatacgcaaacagcctaaacaatggcaattcaacaaacacaaaaccaacatcagtagatcccattattaac

SEQ ID NO: 155312 - DNA, 80 bp, synthetic construct
  source 1..80: mol_type = other DNA
acacaaccaacctcacacaacacccctcagctccaaccatacccttcgctcctgatttctcaaatgtggatagtttccac

SEQ ID NO: 155313 - DNA, 80 bp, synthetic construct
  source 1..80: mol_type = other DNA
acatcaattactttaaagatgcagcatcaagtggagcctctaaattggaattttcacaagatcccagtaaattcacagac

SEQ ID NO: 155314 - DNA, 80 bp, synthetic construct
  source 1..80: mol_type = other DNA
aaagctacattacaaggtccacaacatgagttcatcaaagcacttgtaaagaggaactgccatatacttaccactgagaa

SEQ ID NO: 155315 - DNA, 80 bp, synthetic construct
  source 1..80: mol_type = other DNA
tttcgctcacggtgcacgcgccttacgatatccacttcggggtgcaaccgcggcagacggtggagttggacttgcgctac

SEQ ID NO: 155316 - DNA, 80 bp, synthetic construct
  source 1..80: mol_type = other DNA
gatacagtgacagagtgaggtccatcactctcggcaactcaacaattaccacgcaggagagtgccaatgtagtcgttgga

SEQ ID NO: 155317 - DNA, 80 bp, synthetic construct
  source 1..80: mol_type = other DNA
gaccccccggagccccgcagccggctgcactgagaccactgcctgctctcccggcccctgacggggcgtccggtgatcga

SEQ ID NO: 155318 - DNA, 80 bp, synthetic construct
  source 1..80: mol_type = other DNA
aaaaagagagacattctgaacagaaacacaagggatgttacaaagcttcagcatatgattgacacctatggacttgatct

SEQ ID NO: 155319 - DNA, 80 bp, synthetic construct
  source 1..80: mol_type = other DNA
ataggtgctatcacatccagtgatggcttgtacaagcacttctgtttccccggagcggagtatagatggccaccgctgtc

SEQ ID NO: 155320 - DNA, 80 bp, synthetic construct
  source 1..80: mol_type = other DNA
cggcgtgtgtgtatattacgaagtacaagacaaaagacactgacccggtgcaaagatatgcaaattggcgtataaacacc

SEQ ID NO: 155321 - DNA, 80 bp, synthetic construct
  source 1..80: mol_type = other DNA
aaaaccaccttagtattagcacacttaaagacaatgacaactcaagtcactataattcacatctatttaaccaagtgtca

SEQ ID NO: 155322 - DNA, 80 bp, synthetic construct
  source 1..80: mol_type = other DNA
cagaactaaactccgcctgcagatgtcttattgaagacatacccctgtgggccatggccacagggtacggagagttctgt

SEQ ID NO: 155323 - DNA, 80 bp, synthetic construct
  source 1..80: mol_type = other DNA
aagcccgaggacatcagcgtgcacctgggcgccgacgatgtgacattcggcgtgctaaaacgagcgctggtccggctgca

SEQ ID NO: 155324 - DNA, 80 bp, synthetic construct
  source 1..80: mol_type = other DNA
ttcggcgaacgtgacaaagcttgtggtaaacgagcgcaagacccgcctggacatactgggccgtaacgctaactttttaa

SEQ ID NO: 155325 - DNA, 80 bp, synthetic construct
  source 1..80: mol_type = other DNA
ccatggagatgtacagagtacagctttcagacagcgctgatcgctctaaaccgattctctgtctatccctctcaccagcc

SEQ ID NO: 155326 - DNA, 80 bp, synthetic construct
  source 1..80: mol_type = other DNA
ggaggctaatttagatgaagcagtcttaggcaagtataaaggtaacaagcatgtggagttcaaccagtacatacaaatag

SEQ ID NO: 155327 - DNA, 80 bp, synthetic construct
  source 1..80: mol_type = other DNA
ctgactgccgcaggttcgagagcaggtcggcatccaccgtcagataggggaagggtctgttttccacaccctcatttgag

SEQ ID NO: 155328 - DNA, 80 bp, synthetic construct
  source 1..80: mol_type = other DNA
ttttgcctcaacagcatctgttccacctctacactcccagatgtcgtccccgatgtcaataacccaaacattagcctggc

SEQ ID NO: 155329 - DNA, 80 bp, synthetic construct
  source 1..80: mol_type = other DNA
gaccaccaagagcagtacagtacaggggagagggggtggatttgaagagtggagccatcacaccactcaccccggtggct

SEQ ID NO: 155330 - DNA, 80 bp, synthetic construct
  source 1..80: mol_type = other DNA
accgcctattggtctttgtgtaaacttctaagttacgcaaaagggaaggggtggcaaatccataccactaacggtcaaac

SEQ ID NO: 155331 - DNA, 80 bp, synthetic construct
  source 1..80: mol_type = other DNA
aaccggatgtaagcagtaataggttttacacattagaatcagtacagtggagtaaaagcagtaagggatggtggtggaag

SEQ ID NO: 155332 - DNA, 80 bp, synthetic construct
  source 1..80: mol_type = other DNA
aagaaaaacaggaagtgtgtggaacacaatcttacagccatattccagggcctaggagatgacactacaccagggtttat

SEQ ID NO: 155333 - DNA, 80 bp, synthetic construct
  source 1..80: mol_type = other DNA
acatttgagccaaggtgagagagccatgagttttaaggatagcaccacaggtgatgagaattccgtgcaagccgccgtgt

SEQ ID NO: 155334 - DNA, 80 bp, synthetic construct
  source 1..80: mol_type = other DNA
ttagaacattataaaactgctctgtttcaaaaaacagcctactacaacacatttgaaaccatagcacagctaaaacccac

SEQ ID NO: 155335 - DNA, 80 bp, synthetic construct
  source 1..80: mol_type = other DNA
cccccagacacaacctgtcctctcctcccttctacccccggtgcccctctcgcttttctgtaaaattcagcctcggcttc

SEQ ID NO: 155336 - DNA, 80 bp, synthetic construct
  source 1..80: mol_type = other DNA
acagcatatatggccagcctaactatgcacctaattatgaaaaattagaagaaattagaaaatggtattggaatcaagaa

SEQ ID NO: 155337 - DNA, 80 bp, synthetic construct
  source 1..80: mol_type = other DNA
gccgtggtctgtcggcagtgcggacactgcctcaacctgggtaaggaaaagctacactgccagcaaaactttccgctcaa

SEQ ID NO: 155338 - DNA, 80 bp, synthetic construct
  source 1..80: mol_type = other DNA
tgaactattagtgagtattgagaagttgaagaaagggctagatacattggcaccactttatgctgcagaaaacaagaagg

SEQ ID NO: 155339 - DNA, 80 bp, synthetic construct
  source 1..80: mol_type = other DNA
cggcagccggagcactctgggcccacggagctcgcgttaacgtagcaaccagactccacaccaaataaacattttattga

SEQ ID NO: 155340 - DNA, 80 bp, synthetic construct
  source 1..80: mol_type = other DNA
ggaggtacaggagatggaaaagaaagggcagacgcagaaaaaaagctaaaataataataagacaatggcaacctaactac

SEQ ID NO: 155341 - DNA, 80 bp, synthetic construct
  source 1..80: mol_type = other DNA
tttgtgccaattacctgggagaatgcaacctttcttaaacgaggctttaaacctgatgagagataccctttccttatcca

SEQ ID NO: 155342 - DNA, 80 bp, synthetic construct
  source 1..80: mol_type = other DNA
tggacatgtcaagagcagtggagatgtgtaaaccagatgactgtgctcccattaattacaagagatgctgcccattgatt

SEQ ID NO: 155343 - DNA, 80 bp, synthetic construct
  source 1..80: mol_type = other DNA
cagatggaaacggatacatccccatggagtaccgtttcaaatggtatctgtgcatgttccaccagaaaaactggatgaat

SEQ ID NO: 155344 - DNA, 80 bp, synthetic construct
  source 1..80: mol_type = other DNA
gaagcccaaagaccgcaaggacgcaatgttggggacacatgttaaaagggatgtaggcctgcagtctagttgcgtgttat

SEQ ID NO: 155345 - DNA, 80 bp, synthetic construct
  source 1..80: mol_type = other DNA
tgtttattacgccacgtacaagacgactgccagcaaacctgaggaccaatttgtgcggtggccaatatcatacaggcaag

SEQ ID NO: 155346 - DNA, 80 bp, synthetic construct
  source 1..80: mol_type = other DNA
atacgctcaaaagcagtaattcagggtttaccaacagtactaacaccaggttcagaacaatttttaacaacagatgacag

SEQ ID NO: 155347 - DNA, 80 bp, synthetic construct
  source 1..80: mol_type = other DNA
atgagcttgacccagaagttttggcagcactcgggaaaaaatatgggttaacaataacccctcctgacaaaacagaaaag

SEQ ID NO: 155348 - DNA, 80 bp, synthetic construct
  source 1..80: mol_type = other DNA
taagtgcccagaagagtttgggagtaagtcaggtctgtcagaggaagaggttaagaggaggctaaccgcaagaggcctcc

SEQ ID NO: 155349 - DNA, 80 bp, synthetic construct
  source 1..80: mol_type = other DNA
gaacatgtagacatgttcggtaactactatgatagaaagccaacagcctcagactggcaaactgaatatgagtgctgtag

SEQ ID NO: 155350 - DNA, 80 bp, synthetic construct
  source 1..80: mol_type = other DNA
cctatgtcgggattgctaacgcctactcgcacttctacgatggcttcgcgcgagtgccgcttgaaggtgagaacacagat

SEQ ID NO: 155351 - DNA, 80 bp, synthetic construct
  source 1..80: mol_type = other DNA
ggctgcaaaggggcccacggtggaacaggagcaggaggagtggcaggagcaggagaggcaggagcaggagggacaggagc

SEQ ID NO: 155352 - DNA, 80 bp, synthetic construct
  source 1..80: mol_type = other DNA
cgtgctcattaacggtcaaaaagttcaaattaaggacaagtttaaattagtggacccagacaacattaatctggaactga

SEQ ID NO: 155353 - DNA, 80 bp, synthetic construct
  source 1..80: mol_type = other DNA
tctgattatcagaccgacgatacaagtggaacagtgggcccagagagaatattcaggccagttatgctttctggcctgta

SEQ ID NO: 155354 - DNA, 80 bp, synthetic construct
  source 1..80: mol_type = other DNA
tcaatccaacagatatcaccacgacaagggaaaacttgaacgacgttcccacctcctcacacgccaaagtgactaataca

SEQ ID NO: 155355 - DNA, 80 bp, synthetic construct
  source 1..80: mol_type = other DNA
cgctacaatccagagcacgaggactaagcaccgtttccggataaacgtcttatgagaccacacaacaaaataaacgatca

SEQ ID NO: 155356 - DNA, 80 bp, synthetic construct
  source 1..80: mol_type = other DNA
gaccccggtatgcggagaataggctctcaaaagggctgaaacttcaattatcgttatccgcgcaattactacgcaaagct

SEQ ID NO: 155357 - DNA, 80 bp, synthetic construct
  source 1..80: mol_type = other DNA
ggagccaacgtggtggtggcttatggagagtggcctaactacttagaagacgaccaagccacggcagaagatcagccaac

SEQ ID NO: 155358 - DNA, 80 bp, synthetic construct
  source 1..80: mol_type = other DNA
acgagaactattacccgtgctttggaacttcctgtttagaccaacggacaacttacacagaagccataaatgctttagag

SEQ ID NO: 155359 - DNA, 80 bp, synthetic construct
  source 1..80: mol_type = other DNA
ttacacagtaccaaaactttacaatgaagcagacccaaactacggatgggtcccttactcctactactttggagaaggaa

SEQ ID NO: 155360 - DNA, 80 bp, synthetic construct
  source 1..80: mol_type = other DNA
aagggagcagtactttccaaatacaaaggaaacttagaggtgaagtggaatgagaacatccaaacagctgttgatcacta

SEQ ID NO: 155361 - DNA, 80 bp, synthetic construct
  source 1..80: mol_type = other DNA
ccccatgagacccacgtggcaggcctaggggctacattcgcctcccacgtttcccttcgcgtgaggcatccgatatgact

SEQ ID NO: 155362 - DNA, 80 bp, synthetic construct
  source 1..80: mol_type = other DNA
gcccaccaggtgattcgtgagcgtcgacgaacccgacaagcccgtgttatacaccgagacacgatttagataccagacga

SEQ ID NO: 155363 - DNA, 80 bp, synthetic construct
  source 1..80: mol_type = other DNA
catacgcaccacaagcctcaactcagatcccaattacagtgacaattgcaccaatgtttaccgagttcaatggtttaaga

SEQ ID NO: 155364 - DNA, 80 bp, synthetic construct
  source 1..80: mol_type = other DNA
cttagaaggaaaatggagatgtttacatacctgcgcttcgacgtggaggtcacgtttgttatcactagttcgcaggacca

SEQ ID NO: 155365 - DNA, 80 bp, synthetic construct
  source 1..80: mol_type = other DNA
ggtagagcaccgaattagcgctgaagaccaaggcggccacgtgcgtcgagagatgcaacttgagctcggtcagcgcgcgg

SEQ ID NO: 155366 - DNA, 80 bp, synthetic construct
  source 1..80: mol_type = other DNA
ttagacccagaaaagatttcacagcaaggagttaaatatggtctaaccatcacaccacctgacaaatctaaagaattcca

SEQ ID NO: 155367 - DNA, 80 bp, synthetic construct
  source 1..80: mol_type = other DNA
ggagtgcgaccctctaccctggtgcaacgccctcggcggccgcgcgctacgccttcggctgcgcgcggcacctcggaccc

SEQ ID NO: 155368 - DNA, 80 bp, synthetic construct
  source 1..80: mol_type = other DNA
attcccagccactccagcaacaccgcactggagaggcctctggctgttcagctcgcgaggaaaaggacatcgtcggaggc

SEQ ID NO: 155369 - DNA, 80 bp, synthetic construct
  source 1..80: mol_type = other DNA
ccatgttgggtacccacatgatatgggacattggactgcaatccagatgtgtcctgtgcgtgccttggatcagccaaaca

SEQ ID NO: 155370 - DNA, 80 bp, synthetic construct
  source 1..80: mol_type = other DNA
gggtgttgcgatcccattcaacttcttgaaaaatgatatgtctgatcagggtattgttacagaagtgacacccatccaac

SEQ ID NO: 155371 - DNA, 80 bp, synthetic construct
  source 1..80: mol_type = other DNA
aaatccagcacgtcgacttttcaggactttggagcgggtgcacaatgcttgaagctctcctacccgccatacctcgtcat

SEQ ID NO: 155372 - DNA, 80 bp, synthetic construct
  source 1..80: mol_type = other DNA
tatttgaggagcaccaaaaacaccacaattactggagctacagtaatgaaaacttagaactggcattatactatggagcc

SEQ ID NO: 155373 - DNA, 80 bp, synthetic construct
  source 1..80: mol_type = other DNA
ttcatggcttaaaaagtttactgagatgtgcaatgcagctagaggcttggagtggattggcaacaaaatatcaaagttta

SEQ ID NO: 155374 - DNA, 80 bp, synthetic construct
  source 1..80: mol_type = other DNA
tggctatggggcatccctgctacgcaagtactttgcccaagcccagggggaaataatatctaaacataaagttacctctg

SEQ ID NO: 155375 - DNA, 80 bp, synthetic construct
  source 1..80: mol_type = other DNA
tgatgctcaagtgtaagcagcccggggcccgcttcattcacggggccgtgcacctgccatcgggacagattgtcttccac

SEQ ID NO: 155376 - DNA, 80 bp, synthetic construct
  source 1..80: mol_type = other DNA
tatagaagatagtgatgaagataatgaagtgggagtctatgtaagacccaataggccactaagaccaatgacatataaat

SEQ ID NO: 155377 - DNA, 80 bp, synthetic construct
  source 1..80: mol_type = other DNA
tataactgcaatggtacactgttgggtaacataactatgttcccccatcagatgatcaatctgcgaacaaataactcagc

SEQ ID NO: 155378 - DNA, 80 bp, synthetic construct
  source 1..80: mol_type = other DNA
ttgaatcttgtcgggggccgtgtctcctgcctcccggaggctctgcggcagcgctacctgcgtttccaaacggcctttga

SEQ ID NO: 155379 - DNA, 80 bp, synthetic construct
  source 1..80: mol_type = other DNA
aatactctttgacgagtaccaaagacacttaaatttctggaccgttagcaaccaagacctagacctagccaggtacctgg

SEQ ID NO: 155380 - DNA, 80 bp, synthetic construct
  source 1..80: mol_type = other DNA
atgaagacgatgtgccaccaaaaggagcctcctatggaggcaacctcactaacctcaccttcactctagaaggactgtat

SEQ ID NO: 155381 - DNA, 80 bp, synthetic construct
  source 1..80: mol_type = other DNA
acagggaatcaaacacctcttcgagcaactagtcagaacccagcagggagtccacgtaaatccttcactcgtgtaggccc

SEQ ID NO: 155382 - DNA, 80 bp, synthetic construct
  source 1..80: mol_type = other DNA
acaatccaactctaccagttaccaaaccaaagggtgctttccctgtatcccaaagggaattcaagaatgaagcgccatat

SEQ ID NO: 155383 - DNA, 80 bp, synthetic construct
  source 1..80: mol_type = other DNA
tgtctacggctactacacacttaatgatatgggtcaactgtttgtaaggcatgtgaacgaggcaagtccgggcgcggtgt

SEQ ID NO: 155384 - DNA, 80 bp, synthetic construct
  source 1..80: mol_type = other DNA
ggaaaccagagcaggaaaatccctagcaggttggcgcccgaacagggacttgaagagtgagagtcttctgaaactcggct

SEQ ID NO: 155385 - DNA, 80 bp, synthetic construct
  source 1..80: mol_type = other DNA
gtgaacagggcctacctgttcgagcccgagggtcccaagcccatccagggccgcgaggcctgggcagacgagttccagac

SEQ ID NO: 155386 - DNA, 80 bp, synthetic construct
  source 1..80: mol_type = other DNA
aacactgaaacacaagccaacagtataaagacctttttacaagaagccttaaaggcaaaagacacaaaattaacctcttt

SEQ ID NO: 155387 - DNA, 80 bp, synthetic construct
  source 1..80: mol_type = other DNA
agcgaggttacaatcagccaatttattacacccttagtttacagtccaaaaccgcagggcggcgtgtgggggctgacgcg

SEQ ID NO: 155388 - DNA, 80 bp, synthetic construct
  source 1..80: mol_type = other DNA
atttttatgatggattttctcgggtgcccatcaaagatgagacatcagactcaggggatacttattatggtttagtatca

SEQ ID NO: 155389 - DNA, 80 bp, synthetic construct
  source 1..80: mol_type = other DNA
ttgaaatacaacacaggtgccaccccttcaatacccatcacgattacagttgcacccttgtgctcggagttcgccgggct

SEQ ID NO: 155390 - DNA, 80 bp, synthetic construct
  source 1..80: mol_type = other DNA
acccacgcacgcatcaccagatgagactattgtggttgatgggaaggaaataaagatcattgatgcacaagcactggtgg

SEQ ID NO: 155391 - DNA, 80 bp, synthetic construct
  source 1..80: mol_type = other DNA
gaaccatcctgccaagtgatgaaattggcatacttagatagaggtttttataaacattatggcattatagtaggagatag

SEQ ID NO: 155392 - DNA, 80 bp, synthetic construct
  source 1..80: mol_type = other DNA
caggagcagcagtggtttcgagcctgtatgcactctcacggggcctggtgcggttgtggtaactttattctgcatatgtc

SEQ ID NO: 155393 - DNA, 80 bp, synthetic construct
  source 1..80: mol_type = other DNA
ccagaagttcatgaaccggtggtcgtaccccaacactcaactagacctagccagatacaggggagtcaccttctggttct

SEQ ID NO: 155394 - DNA, 80 bp, synthetic construct
  source 1..80: mol_type = other DNA
acgtcttcggcatgcgacaaatcgtcacgcaagccggcgaacccattcacctggtcaccgattacggcaacgtagccttt

SEQ ID NO: 155395 - DNA, 80 bp, synthetic construct
  source 1..80: mol_type = other DNA
aaagaccctccgtttcaatggatgggctatgaactgtggccaactaagtggaagctgcagaaaatacaactgccccagaa

SEQ ID NO: 155396 - DNA, 80 bp, synthetic construct
  source 1..80: mol_type = other DNA
atgcattttcactggcacatcaacaacaacgtttaacagcacgcgctttaatttttcatgtctgagtaattacagcctcc

SEQ ID NO: 155397 - DNA, 80 bp, synthetic construct
  source 1..80: mol_type = other DNA
agttagagccaattctcctgcaccaaggagctccagtagaaagagattggtggcattttctgagccaccaaatgcacctc

SEQ ID NO: 155398 - DNA, 80 bp, synthetic construct
  source 1..80: mol_type = other DNA
aaacatacatatagcagtcgagcactacactgcacagctatacatgctagacataaatccagaacctatatccatggatc

SEQ ID NO: 155399 - DNA, 80 bp, synthetic construct
  source 1..80: mol_type = other DNA
agtaagctacacaaagtatagatatttgtgcttaatacagaaagctatgtacatgcattgtaagagagggtgcacttgcc

SEQ ID NO: 155400 - DNA, 80 bp, synthetic construct
  source 1..80: mol_type = other DNA
catcgcatatgtatgagctttcactgtccagcttcgcggcttggtggactatgcttaacgctctcattctcatgggagct

SEQ ID NO: 155401 - DNA, 80 bp, synthetic construct
  source 1..80: mol_type = other DNA
gaataaaacagtattaccaattactattatgtcagggctagtcttccactctcaaccaatcaatgaaagacccagacagg

SEQ ID NO: 155402 - DNA, 80 bp, synthetic construct
  source 1..80: mol_type = other DNA
accatgaccacattcgtacatcgatcccataattggcacaaccacggtaacagatggactttagacacgtgttattatgt

SEQ ID NO: 155403 - DNA, 80 bp, synthetic construct
  source 1..80: mol_type = other DNA
gcagacacttggtacagaggcacagcctacaacgacaaaataaaacaaataccacttaaggctagtgaactgtaccacac

SEQ ID NO: 155404 - DNA, 80 bp, synthetic construct
  source 1..80: mol_type = other DNA
gggggcacagcaccatgaggttctcgctcactgtcctgtacaatgactttctaagacacatgaacttctggacacgtagc

SEQ ID NO: 155405 - DNA, 80 bp, synthetic construct
  source 1..80: mol_type = other DNA
gggtctttgagagcatataactaacagcacttccgaatggctgagttttccacgcccgtccgcagcggcagcaccacgga

SEQ ID NO: 155406 - DNA, 80 bp, synthetic construct
  source 1..80: mol_type = other DNA
gcggcagtcagcgggtggtgcggcagcgcgtctacgagctcgtctccgagacgctctttggacagcgctgcgtacgcgtg

SEQ ID NO: 155407 - DNA, 80 bp, synthetic construct
  source 1..80: mol_type = other DNA
aacgccgtcggcgcacgcagcggtcgcaggacgggatatcccagaggaagcccatgtaggtctcggggtcctcgtcgtga

SEQ ID NO: 155408 - DNA, 80 bp, synthetic construct
  source 1..80: mol_type = other DNA
ccagtggttggagaaaaacaaagaacatgtgtgtagtattcttgattatgcttcagatatcattgtggaatcaaaagatc

SEQ ID NO: 155409 - DNA, 80 bp, synthetic construct
  source 1..80: mol_type = other DNA
gtgccaagcgacgtggttcaaaccagatgcgtgcaaaaccaccacaagcgttctgaatcatccatagagaatttcctttg

SEQ ID NO: 155410 - DNA, 80 bp, synthetic construct
  source 1..80: mol_type = other DNA
attagctaaaaagggaacagacacagtatttgatgacatgaaagccgaatttcaatctagatgcaaagaagggaaggtgg

SEQ ID NO: 155411 - DNA, 80 bp, synthetic construct
  source 1..80: mol_type = other DNA
gtcactgggtatgaaatacgcctttaagtgggtgtggggtggcaaccccgtatcccaacaggttgttagaaacccctgca

SEQ ID NO: 155412 - DNA, 80 bp, synthetic construct
  source 1..80: mol_type = other DNA
gcacattagcaatgcctgtggctcatgcatagtttccaaaagaggaggaggcagttttcagaagtgtctaaaataagctg

SEQ ID NO: 155413 - DNA, 80 bp, synthetic construct
  source 1..80: mol_type = other DNA
ataaacaccttcttgcgttgccgtcatattgcatatggttaacgatgtatgattgcatgcactgatacaaatagtaatat

SEQ ID NO: 155414 - DNA, 80 bp, synthetic construct
  source 1..80: mol_type = other DNA
caagttcatccaacacaaccgctcaacaacgccatatctatcagtgtccaaaaactatcttctatcctttgaaactataa

SEQ ID NO: 155415 - DNA, 80 bp, synthetic construct
  source 1..80: mol_type = other DNA
atcattctacagagtaacggcggagggaggcctgcgagcttccagttcccctcctccccaaccggcgccctattgcgatg

SEQ ID NO: 155416 - DNA, 80 bp, synthetic construct
  source 1..80: mol_type = other DNA
tctgcaggacatggccaggatcaggtctcccagttcccacatctgcattcggagacaggcccaccacgtcttcaactttc

SEQ ID NO: 155417 - DNA, 80 bp, synthetic construct
  source 1..80: mol_type = other DNA
cagcagcatatttttatcagcaggtagatctaactgggaagtacctggatattacacagacataagctacaaccctctaa

SEQ ID NO: 155418 - DNA, 80 bp, synthetic construct
  source 1..80: mol_type = other DNA
actccctgcaagactcaggagccgcgtattatggtgcagtgtccatcaatgactttggtcttcttgcagttcgagtggtc

SEQ ID NO: 155419 - DNA, 80 bp, synthetic construct
  source 1..80: mol_type = other DNA
aacaaagagaacagagaccgtggacgagcgaaagcgagagcgaagcagaagcccaagaagagacgcaggcgggctcggtc

SEQ ID NO: 155420 - DNA, 80 bp, synthetic construct
  source 1..80: mol_type = other DNA
cggccccgcacacccgtggaaacagccctgaacgcgcggacagcccgttaccggcgcgccgcgctcacggcccgcaaaac

SEQ ID NO: 155421 - DNA, 80 bp, synthetic construct
  source 1..80: mol_type = other DNA
cggtatcaaaaccagagaagggactgaaagtacaaaaaccattagttacacagtgaagtcttgtaaaggtatgtgtggtg

SEQ ID NO: 155422 - DNA, 80 bp, synthetic construct
  source 1..80: mol_type = other DNA
tatcctgctggcctacacagcagatctgcaagttgataacagtgaaactgagggtccagatcacatcccagattgtgact

SEQ ID NO: 155423 - DNA, 80 bp, synthetic construct
  source 1..80: mol_type = other DNA
cgtacctcaaagaatggggcattacagtggatgattatgatgtggtaatcgctaaattgatgcccatggtgtttgattaa

SEQ ID NO: 155424 - DNA, 80 bp, synthetic construct
  source 1..80: mol_type = other DNA
gctacaaacaactgctttctaaaagttagcagcctctggggagaccacgtatatgacaaagacaagttaataacagcgtg

SEQ ID NO: 155425 - DNA, 80 bp, synthetic construct
  source 1..80: mol_type = other DNA
aaagaccttgaaacacaaatgatagaagccaacacattttatacaaaagcaggaaaaaaactaattaaaggttttacacc

SEQ ID NO: 155426 - DNA, 80 bp, synthetic construct
  source 1..80: mol_type = other DNA
gcggggggaggttacgttggggacggggacagtttgcggcgcgcgcaggggagtcttttgcagcgggggactcctggggc

SEQ ID NO: 155427 - DNA, 80 bp, synthetic construct
  source 1..80: mol_type = other DNA
tatgatgtggaagtcacctttgtaatcactagttatcaagagcagggtacacaactggcacaagatatgccagtgttgac

SEQ ID NO: 155428 - DNA, 80 bp, synthetic construct
  source 1..80: mol_type = other DNA
gatcatcccagaggctagggacaaggtggagtacatcaccaagcttaggcaattaggcatgctggaaaaccaaatcaata

SEQ ID NO: 155429 - DNA, 80 bp, synthetic construct
  source 1..80: mol_type = other DNA
ggcgatactttgcagagcgaagccccgaaatcgtcctcctcctcgacactgtccagctccatcctggtcgcgccggtcgg

SEQ ID NO: 155430 - DNA, 80 bp, synthetic construct
  source 1..80: mol_type = other DNA
cttctacagagacaaagacacagactttattataacctatagctccgtgccaccttttaaaatagacaaatactcctcag

SEQ ID NO: 155431 - DNA, 80 bp, synthetic construct
  source 1..80: mol_type = other DNA
acaagtgttgcccgaatatacttcaaaccaaaacatgtgagggcttgggttccgcggccaccacgactgtgcccctacat

SEQ ID NO: 155432 - DNA, 80 bp, synthetic construct
  source 1..80: mol_type = other DNA
gtaggttcagcatactatatgttttatgatggttatgatcaaaccattgaaagcggaaacacctatgggatcacaaccac

SEQ ID NO: 155433 - DNA, 80 bp, synthetic construct
  source 1..80: mol_type = other DNA
atgacactacgagcatatctgaacccacagactcctacactagtgttaacaataaaagtacaacacaaacttttactaac

SEQ ID NO: 155434 - DNA, 80 bp, synthetic construct
  source 1..80: mol_type = other DNA
gtggtggaaaattgttgtgtaggcatggagtgataggtattgtaacagctgggggtgagggtcatgtggcttttattgat

SEQ ID NO: 155435 - DNA, 80 bp, synthetic construct
  source 1..80: mol_type = other DNA
aatatgaattcacacacccaggcgatcagggcattgacttgagtacagctgaggtgcaatttggacctgctaaagacgct

SEQ ID NO: 155436 - DNA, 80 bp, synthetic construct
  source 1..80: mol_type = other DNA
aaatcggttcacatttacctggacttggaaatgaaatccaaggcacagcaggtagtgcattagttgtatatgaaccaaaa

SEQ ID NO: 155437 - DNA, 80 bp, synthetic construct
  source 1..80: mol_type = other DNA
aagaaattgcagaaactggtgcaagatatggactgacaataaccccagcagataaatcaactgaattcagggaggttact

SEQ ID NO: 155438 - DNA, 80 bp, synthetic construct
  source 1..80: mol_type = other DNA
tgaagaaggagatgaaaccagagaccaggctgctaaacaaaccccccaccgtgctgactaggttggtgatggactgaccc

SEQ ID NO: 155439 - DNA, 80 bp, synthetic construct
  source 1..80: mol_type = other DNA
actgctttattctctaaatataaagggaatgttaattgtgaattgaatgatcatatgagagttgctatagcgcactactc

SEQ ID NO: 155440 - DNA, 80 bp, synthetic construct
  source 1..80: mol_type = other DNA
actataacactactcaaacactagctcagctaaaaccgtacatagataacacatccacaggaagcacaaataactggagc

SEQ ID NO: 155441 - DNA, 80 bp, synthetic construct
  source 1..80: mol_type = other DNA
tcaagtcaagcagttctgtttccccggcacccttgtatacgcttcacccgaggcgaaaaacgaggctgtcgttatccgca

SEQ ID NO: 155442 - DNA, 80 bp, synthetic construct
  source 1..80: mol_type = other DNA
gaaaacttaatgtgactgctgctttccaaccttgtgatgtcaatgtcaggattggtaatgcacgctgttgcccatttata

SEQ ID NO: 155443 - DNA, 80 bp, synthetic construct
  source 1..80: mol_type = other DNA
gttggtgactgctgttcttatggaaatattttactaagtggtaatcaaactgctaggatgattaaatataactatcccac

SEQ ID NO: 155444 - DNA, 80 bp, synthetic construct
  source 1..80: mol_type = other DNA
aagataaaggcagatgctttactagtgattacgtactggcaagtaccaacatgtcaacacttacaccaccaactgtgcaa

SEQ ID NO: 155445 - DNA, 80 bp, synthetic construct
  source 1..80: mol_type = other DNA
tactcacggtgccaccaaggcctacccgtcctaccactctgccacccacaccactaggtagatgatgtaattgttggtcg

SEQ ID NO: 155446 - DNA, 80 bp, synthetic construct
  source 1..80: mol_type = other DNA
aaaccaggcatgtggttaattacaaaacaagatccgagagcactctggagtctttcttcggcaggtcagcttgtgttact

SEQ ID NO: 155447 - DNA, 80 bp, synthetic construct
  source 1..80: mol_type = other DNA
agacctatagcatccaccttacatgcactaagaatatggtactttacacaaacaactacagtaaatgaaattcatggaga

SEQ ID NO: 155448 - DNA, 80 bp, synthetic construct
  source 1..80: mol_type = other DNA
tgtgtcacccttagattcccaagccacgggtaatgtacccataacaatctcaataagccctatgtgttctgaattttcgg

SEQ ID NO: 155449 - DNA, 80 bp, synthetic construct
  source 1..80: mol_type = other DNA
aaacacacacagaaagtgccttcattaactgccaatgaaactggagcaacattaccaacaacaccatctgatagtgttga

SEQ ID NO: 155450 - DNA, 80 bp, synthetic construct
  source 1..80: mol_type = other DNA
cccaaggagagattgtcaacagatgcaatgtaaaagatgtgggtctccactcaataaacacaccagaaaagacaaagtta

SEQ ID NO: 155451 - DNA, 80 bp, synthetic construct
  source 1..80: mol_type = other DNA
tatatctgttttatttacttttattggttggcactcgtcacggtcttttgtattatttttaagcgtagtgttccacattt

SEQ ID NO: 155452 - DNA, 80 bp, synthetic construct
  source 1..80: mol_type = other DNA
ctagtcctgttattcatttttctagtctggttgcacgttttaatctacaaggaagcccaccgccggacaatgactccccg

SEQ ID NO: 155453 - DNA, 80 bp, synthetic construct
  source 1..80: mol_type = other DNA
cccggagccatgatgcttcaaaaaaacaaaatactaataccaagcctacaaacaaaacccaaaggaaaaaaaacagtaac

SEQ ID NO: 155454 - DNA, 80 bp, synthetic construct
  source 1..80: mol_type = other DNA
agaaacatcagctgatagattttatacccttgatagtgttgattggtctgaaaactcaactggatggtggtggaaattgc

SEQ ID NO: 155455 - DNA, 80 bp, synthetic construct
  source 1..80: mol_type = other DNA
tctatagctaggtgtacatgcaatactggtgtgtactactgtgaatctaaaagaaaatattacccggtgtcatttgtagg

SEQ ID NO: 155456 - DNA, 80 bp, synthetic construct
  source 1..80: mol_type = other DNA
tcaaattgctcgtcacctaatagcacattgagtacgatgttacaagaatctgaaacactattgaacgcggcacaaggaga

SEQ ID NO: 155457 - DNA, 80 bp, synthetic construct
  source 1..80: mol_type = other DNA
acagtcactacttctaaaggtgaatttacagccctggggatttatgatagagtttgtgtggtacctacccactcacaacc

SEQ ID NO: 155458 - DNA, 80 bp, synthetic construct
  source 1..80: mol_type = other DNA
agggatggattaaacagtcaaagtactcaaagattgagcgtgatttcaactacgcacaatactgtatcaactgtgtgggt

SEQ ID NO: 155459 - DNA, 80 bp, synthetic construct
  source 1..80: mol_type = other DNA
cgcgcaagtgaagccgatacgagtgttgctgaatttgttcattctgccgactgttgctcacgagcgttcggaggcggtgc

SEQ ID NO: 155460 - DNA, 80 bp, synthetic construct
  source 1..80: mol_type = other DNA
ggccccccccgtcgtggatcgtcactgaccacgtgactcccacaggccaaccagagtctatgtcgtgcacttcctgggca

SEQ ID NO: 155461 - DNA, 80 bp, synthetic construct
  source 1..80: mol_type = other DNA
ttaacctacaggaaatggcccaaatcagaagaaaatttgaaatgttcacatacactaggtttgattctgaaattacaata

SEQ ID NO: 155462 - DNA, 80 bp, synthetic construct
  source 1..80: mol_type = other DNA
aatccactagaaccctcagataccgttcaaaccagacatgtaatccaaactaggtcacggagtgagagcacgatcgaatc

SEQ ID NO: 155463 - DNA, 80 bp, synthetic construct
  source 1..80: mol_type = other DNA
tgggacctggtcaaggtagaggaacctgtgtcacgtatgatagtgtgttcctgtccggtgcttaagaacctagtgcacta

SEQ ID NO: 155464 - DNA, 80 bp, synthetic construct
  source 1..80: mol_type = other DNA
gaggaaatcctctctcagctataccgccctcttaaggcatgcagtaatacatgctactgtaaaaaatgttcctaccattg

SEQ ID NO: 155465 - DNA, 80 bp, synthetic construct
  source 1..80: mol_type = other DNA
ctaaggatattactaaacttaaaatggcattggataaatatggtgttgatttacctatggttactttccttaaggatgaa

SEQ ID NO: 155466 - DNA, 80 bp, synthetic construct
  source 1..80: mol_type = other DNA
gataatgtactcaccaccaggtattgatcccccagaaagtgcaatagataagaaatgggataatgctacaaatcctagtg

SEQ ID NO: 155467 - DNA, 80 bp, synthetic construct
  source 1..80: mol_type = other DNA
gctgctgaaattggggcatcgtctaataccagcgatgagagtatgattgagacacgatgcgttcttaattcacacagcac

SEQ ID NO: 155468 - DNA, 80 bp, synthetic construct
  source 1..80: mol_type = other DNA
agggcttgctccattgattcaatccacgcctggtttggtatccatagtgttattggttggaaaaagccatcataatgggt

SEQ ID NO: 155469 - DNA, 80 bp, synthetic construct
  source 1..80: mol_type = other DNA
ttctgtgatttaaggtttcaaccatatattggagactatttaatcataaccaatcaagagaacattcttaacaatcatgt

SEQ ID NO: 155470 - DNA, 80 bp, synthetic construct
  source 1..80: mol_type = other DNA
gtgtcagtagtttatgataaaacccacccaggtgaggaaggtataaacctggatagtgaagcaaatgatggaccaatgac

SEQ ID NO: 155471 - DNA, 80 bp, synthetic construct
  source 1..80: mol_type = other DNA
gcatgtcgacctcatcgtgggggctgcggcggcttgctcagccatgtacgttggtgatctgtgtggagggattttcctag

SEQ ID NO: 155472 - DNA, 80 bp, synthetic construct
  source 1..80: mol_type = other DNA
gtgaatttaatgggttgagaaacatcaccctgcctcgactgcaggggctccccgtcatgaatacccccggtagcaaccaa

SEQ ID NO: 155473 - DNA, 80 bp, synthetic construct
  source 1..80: mol_type = other DNA
acggagccaaccttacaccaacatctgctagtagggctaacatcaccacagcaggagcttttggccaccaatccggcgca

SEQ ID NO: 155474 - DNA, 80 bp, synthetic construct
  source 1..80: mol_type = other DNA
aaaagaaagaccctcattataagaacctggcagcctcaaaacattagaaaatgtagaattagaggcatgctacccatact

SEQ ID NO: 155475 - DNA, 80 bp, synthetic construct
  source 1..80: mol_type = other DNA
gcatcagagcaccccacattgtagttctgatagtacaggactccctccacctcccacatcttacagcattccttctatga

SEQ ID NO: 155476 - DNA, 80 bp, synthetic construct
  source 1..80: mol_type = other DNA
agtggagagttccactaaagtttccaaaacaagggcatggatctttgtccctcctgtttgcatattttactggtgaattg

SEQ ID NO: 155477 - DNA, 80 bp, synthetic construct
  source 1..80: mol_type = other DNA
gtcaaggtctctctctttgtttccccaattgactcagctttctatggcctcagattccccatccctttccccactcccca

SEQ ID NO: 155478 - DNA, 80 bp, synthetic construct
  source 1..80: mol_type = other DNA
acacactaatcaccccgcctgcgattactccgcttttgcaagcaaactaaaggggcggactgtacttgtgatcggagaga

SEQ ID NO: 155479 - DNA, 80 bp, synthetic construct
  source 1..80: mol_type = other DNA
gggtctggtgatcctgcccctagttcccttagattatgccccgactgcctccactcaaatcccaataaccgtcacaattg

SEQ ID NO: 155480 - DNA, 80 bp, synthetic construct
  source 1..80: mol_type = other DNA
taacaccatggcagcctacccaataccattgcagcaaggtttggcgaataaggagcagtctatattctccttgagtctta

SEQ ID NO: 155481 - DNA, 80 bp, synthetic construct
  source 1..80: mol_type = other DNA
ataacactgacacctacatcaatagtgaaaatatgtattctgttgtattgcaatcatcaattaatgcaccagataagatc

SEQ ID NO: 155482 - DNA, 80 bp, synthetic construct
  source 1..80: mol_type = other DNA
cactcaaacctggattgtctggttccccttctttgccaataactatcacaatcgcacccaacaaatccgaattttcaggt

SEQ ID NO: 155483 - DNA, 80 bp, synthetic construct
  source 1..80: mol_type = other DNA
aggccgcgagaggatggcatcgaggatggcctccgcaatgtcagtgtttgaggccacaagggccttgatgacgacgggtg

SEQ ID NO: 155484 - DNA, 80 bp, synthetic construct
  source 1..80: mol_type = other DNA
acttaagaatttccccaattatgacagcagtaaggtggctaccagtgcacgagaccgctcgagcattaagcaagccaaca

SEQ ID NO: 155485 - DNA, 80 bp, synthetic construct
  source 1..80: mol_type = other DNA
gtcgcggttgttcccaccacgactatctacggatgtagtgctcttgtattccggtacacttgcacgccagttttgttacc

SEQ ID NO: 155486 - DNA, 80 bp, synthetic construct
  source 1..80: mol_type = other DNA
tggcgccggagatggccacgcaggagatggagacgccgcagaagagtatggcccagaagatctagatttgctgttcgccg

SEQ ID NO: 155487 - DNA, 80 bp, synthetic construct
  source 1..80: mol_type = other DNA
atagacactgtgcaaaacacagtagccagcggtcccacgcactcaaaggaggtcccagcactaacagctgtggagactgg

SEQ ID NO: 155488 - DNA, 80 bp, synthetic construct
  source 1..80: mol_type = other DNA
aaccagagcctcagaagatggtacatgccgatgaataaagccacattttcgacatagaggcgtagcgagggctgaaaact

SEQ ID NO: 155489 - DNA, 80 bp, synthetic construct
  source 1..80: mol_type = other DNA
aggagaaagggaggtgttttacaagtgattacatcctggctagcacgaacctatcacgtctcacaccaccaactgtacag

SEQ ID NO: 155490 - DNA, 80 bp, synthetic construct
  source 1..80: mol_type = other DNA
catcaatcctcaaccattgaccatggaacaggcggtctatggcatagaacatctggagccactagaccttaccaccagtg

SEQ ID NO: 155491 - DNA, 80 bp, synthetic construct
  source 1..80: mol_type = other DNA
tggaagtgccgcgttgggtgtggcagggctggaagaggtggcgcaacagcgagtccgggcgtcgatggagtgctgggtct

SEQ ID NO: 155492 - DNA, 80 bp, synthetic construct
  source 1..80: mol_type = other DNA
agccctatattcataggacccactagaagcaataaagtatttgccacagcatatcaagatgtcacttacaaccccctgaa

SEQ ID NO: 155493 - DNA, 80 bp, synthetic construct
  source 1..80: mol_type = other DNA
acaatgagacagatcttagaaccattcagaaaagcaaacccagatgtcattctcatccagtacgtggatgatattttggt

SEQ ID NO: 155494 - DNA, 80 bp, synthetic construct
  source 1..80: mol_type = other DNA
tctcctaatatattacctgagtattcccctaccaagatgatccacattccagggaggattgacaacattttgcatattgc

SEQ ID NO: 155495 - DNA, 80 bp, synthetic construct
  source 1..80: mol_type = other DNA
ccagaaaaaggccaaaaagagataccgatccccaggcgtccgagcaagaagaagactcgctttcaagactccgccagcag

SEQ ID NO: 155496 - DNA, 80 bp, synthetic construct
  source 1..80: mol_type = other DNA
gaatctaatctaactcagttttatgtacttaatgcaaaaaaaggcagtgatacaacacagcctttaactagcaatatgcc

SEQ ID NO: 155497 - DNA, 80 bp, synthetic construct
  source 1..80: mol_type = other DNA
cactagccaaaggcgatagggcaatgctcttcaccgaccaaaagcaaacagataagactaagattcaaagcgtggtgcac

SEQ ID NO: 155498 - DNA, 80 bp, synthetic construct
  source 1..80: mol_type = other DNA
ggtcgctccattgtcacacccagacaatagacctggcagatgaggctagacggaccccaccggtgacggtggtctagcct

SEQ ID NO: 155499 - DNA, 80 bp, synthetic construct
  source 1..80: mol_type = other DNA
ggtgtgcggggacggggggtgtgcggggacggccacgggagatctttttcagcggggaactcctgcagcggggacggagg

SEQ ID NO: 155500 - DNA, 80 bp, synthetic construct
  source 1..80: mol_type = other DNA
gacccttcagctacaaagacgaacttaaaaacacagtactgactgccaaatacaagtttaactttcgctgggggggcaat

SEQ ID NO: 155501 - DNA, 80 bp, synthetic construct
  source 1..80: mol_type = other DNA
ccctggtgagataaccaatgtcatgcacatggctagagttgactcgttcatgcctatcaacaacataagcacacaacaga

SEQ ID NO: 155502 - DNA, 80 bp, synthetic construct
  source 1..80: mol_type = other DNA
ttacgcccgacgtgatttacgaggtctgcatgttggtgccccaggatgaagccaagcgcatcctggtcaagggtcacggt

SEQ ID NO: 155503 - DNA, 80 bp, synthetic construct
  source 1..80: mol_type = other DNA
actctgtgctgctaaacgggtgcaagcactcagtggagaccctgtacgtggatgaagccttcgcgtgtcacgcggggact

SEQ ID NO: 155504 - DNA, 80 bp, synthetic construct
  source 1..80: mol_type = other DNA
ggcctatggctggtggcgccgaaagagaagacggtggcgcaggtggagacgcagaccatggaggcgccgctggaggacca

SEQ ID NO: 155505 - DNA, 80 bp, synthetic construct
  source 1..80: mol_type = other DNA
tgcttacagtcctcagcacagtcatcttccacacacaatgggtctgacaaatccattgtgtgtggaagatgactgtgctg

SEQ ID NO: 155506 - DNA, 80 bp, synthetic construct
  source 1..80: mol_type = other DNA
ccggtgtaactcccaaacgtgaatttcaaccagttgactatttatttgggtgtggtgtaatggcaggaaatgcgttcgta

SEQ ID NO: 155507 - DNA, 80 bp, synthetic construct
  source 1..80: mol_type = other DNA
tttcatctgcaacaattggaagaaacatgtacaacatgaatgcagcaggacaatacaacacaaatggaagcatatatagc

SEQ ID NO: 155508 - DNA, 80 bp, synthetic construct
  source 1..80: mol_type = other DNA
taacacccgtggttgataatcaggggcagcgtctctacgtcagatactcgtcagacacgatctctatattattgggcccc

SEQ ID NO: 155509 - DNA, 80 bp, synthetic construct
  source 1..80: mol_type = other DNA
cgtgatgtccaccatatccacggtgtgcgtcaccgggtgcccaccgatgttccactcgaaataggctccgcgctcatcat

SEQ ID NO: 155510 - DNA, 80 bp, synthetic construct
  source 1..80: mol_type = other DNA
agttattaaagatgcctatgagttagtaagagaagaataccaacaattatacaccacaactatgacatatccaccaccat

SEQ ID NO: 155511 - DNA, 80 bp, synthetic construct
  source 1..80: mol_type = other DNA
ttgctggcggttacaaccggctgcgtttggccggcaataacccgctgcccccgccgcccccgctgctcccgccgacgccg

SEQ ID NO: 155512 - DNA, 80 bp, synthetic construct
  source 1..80: mol_type = other DNA
gcccagtaaaagatcctgtttatagcatgaatggtactctgctaggtaacttgcttattttccctcaccaatttattaac

SEQ ID NO: 155513 - DNA, 80 bp, synthetic construct
  source 1..80: mol_type = other DNA
tgcgcaaaggctagtaactaactagatacttagtggtgtttcgctcagcagtaccccactgtagatcagggcaatgaggc

SEQ ID NO: 155514 - DNA, 80 bp, synthetic construct
  source 1..80: mol_type = other DNA
caacatatttgggagggcgtggtttgttgaagcacatgattttgagaatgatggtacttggaggaaatctctgaccttcc

SEQ ID NO: 155515 - DNA, 80 bp, synthetic construct
  source 1..80: mol_type = other DNA
gcaccacctttggggctgcaaattgcaaaaagtagagcgggtcggatcggtcaaatcccatgtcagggttgtggtaggtg

SEQ ID NO: 155516 - DNA, 80 bp, synthetic construct
  source 1..80: mol_type = other DNA
aaacacgcattgtagtacctgccagtaccccaaccaatatgtcaatgcttgcattcgtgagtgcttgcccggatttcagt

SEQ ID NO: 155517 - DNA, 80 bp, synthetic construct
  source 1..80: mol_type = other DNA
agacgcaggttttgtgacctgctggtaccaaacgagtgttgttgccccggctgatgcgcaaagtgcatgttatattctag

SEQ ID NO: 155518 - DNA, 80 bp, synthetic construct
  source 1..80: mol_type = other DNA
gatcacattgtgacccacccgcagtaccactctcagtctttttcatctgctgtttccaaaacggcgtggacgtggttaac

SEQ ID NO: 155519 - DNA, 80 bp, synthetic construct
  source 1..80: mol_type = other DNA
tacaatctactggaacgcacttggattgacaaattcatctaaagtttagcaatgtagaaatctacctgagtaggagtaga

SEQ ID NO: 155520 - DNA, 80 bp, synthetic construct
  source 1..80: mol_type = other DNA
gtatctttccagggtttcggtcagatctacctggttcagaaactgctccgccagaggacccgcaaaaagacatcgaggca

SEQ ID NO: 155521 - DNA, 80 bp, synthetic construct
  source 1..80: mol_type = other DNA
cggactagattcatcaggcaatttaaaaggcaggactatgaggtactatatgcatggaaagatagaggagattcctttgc

SEQ ID NO: 155522 - DNA, 80 bp, synthetic construct
  source 1..80: mol_type = other DNA
cgccgtggaaacacccgtagagacatccctcagcacgcccaaaaccccgtccccagcgccgtgccgctgacaaagaccgt

SEQ ID NO: 155523 - DNA, 80 bp, synthetic construct
  source 1..80: mol_type = other DNA
tacttatatcaggacgtgactcccacaggccaaccatatgctatgtcgtgcacttcctgggtggagtctacgtcctgata

SEQ ID NO: 155524 - DNA, 80 bp, synthetic construct
  source 1..80: mol_type = other DNA
aagtccgtcactaaccacgtgacccctttcgcccaatcagcgtcttcttcgtacacttcctgggaggtcttatccgcctc

SEQ ID NO: 155525 - DNA, 80 bp, synthetic construct
  source 1..80: mol_type = other DNA
tacaaagaacaggttaaggcattcagtaaggcaactgaagaagcccaaaatgagttaataaccaacataaacaaactaga

SEQ ID NO: 155526 - DNA, 80 bp, synthetic construct
  source 1..80: mol_type = other DNA
ttaatcatctggcagctactctgggtcgccctccgcgttctcggcaccccgggggccccggcactcctcagataagaaac

SEQ ID NO: 155527 - DNA, 80 bp, synthetic construct
  source 1..80: mol_type = other DNA
gtggagacggtaccgacggcgtccgcggctcaccttcgagcaaagagccccttctttttgcgcaaacgacggcaaaacag

SEQ ID NO: 155528 - DNA, 80 bp, synthetic construct
  source 1..80: mol_type = other DNA
gcgaagcggcacaccccgaggccgcgcacaccgccgacacaccccgccggcacacccgccacacggaagcgctcggcgcg

SEQ ID NO: 155529 - DNA, 80 bp, synthetic construct
  source 1..80: mol_type = other DNA
ggtatagatgaaattattgacactgccatcaagaatgcactaaaagtgtcgcagccaacaccagcccaatccacccaatc

SEQ ID NO: 155530 - DNA, 80 bp, synthetic construct
  source 1..80: mol_type = other DNA
tttacatatgttaggtttgatatggaagtcacagtggttacaaacaacacaggacttatgcagatcatgtatgtacctcc

SEQ ID NO: 155531 - DNA, 80 bp, synthetic construct
  source 1..80: mol_type = other DNA
agatttaacatgagaatactatatgatcaatttaaaagacaccttaacttctggacacacacgaaccaggacctagacct

SEQ ID NO: 155532 - DNA, 80 bp, synthetic construct
  source 1..80: mol_type = other DNA
gtaatcagaatattagtttgcctccccttaacaactcgtcgcttcaagacgacgtttttgaatggtacatggatagacca

SEQ ID NO: 155533 - DNA, 80 bp, synthetic construct
  source 1..80: mol_type = other DNA
tggataatacctgctgaatgtaaggtagaaagggatttaaatatagctaacactataataacaatcattgccaatattat

SEQ ID NO: 155534 - DNA, 80 bp, synthetic construct
  source 1..80: mol_type = other DNA
gtgacaccatgcagactaggcatgtgaaaaattaccactcccggtccgaatccactatagaaaacttcctgtgtagggcg

SEQ ID NO: 155535 - DNA, 80 bp, synthetic construct
  source 1..80: mol_type = other DNA
gaaagggaaaacacgggcaatagaggcagccagcatcaatgatacagtgcaatttcgcatgatatttggtaatctgtttt

SEQ ID NO: 155536 - DNA, 80 bp, synthetic construct
  source 1..80: mol_type = other DNA
ctcctacaaaccaaaaaaagatgaaatagtaaaagccagagactggttttggacacaactatcagctgaaaacgacctac

SEQ ID NO: 155537 - DNA, 80 bp, synthetic construct
  source 1..80: mol_type = other DNA
aaaactaaaagaagaacccacaatagttactaaagggtgcatggcccactgtcacctaacaggcatattctcaccacctt

SEQ ID NO: 155538 - DNA, 80 bp, synthetic construct
  source 1..80: mol_type = other DNA
cccgctcttcaagctgctgaaacaggatcgtcatccctagtctcggacaagaatatgattgagacaaggtgtgttataaa

SEQ ID NO: 155539 - DNA, 80 bp, synthetic construct
  source 1..80: mol_type = other DNA
gtcagagcagtattacacagtgtttggcaccagtatactagactcccctacaactaattcatcagctatatcaacatttg

SEQ ID NO: 155540 - DNA, 80 bp, synthetic construct
  source 1..80: mol_type = other DNA
cggactagacgcaggagacgacgaaaaaagataaaactgactcagtggaacccctccacagtaaagaggtgcacaataag

SEQ ID NO: 155541 - DNA, 80 bp, synthetic construct
  source 1..80: mol_type = other DNA
acggaaccagtatgtgtgttgattcatggcacgccagggtcagggaaatctctaaccacttctttgattggtagatctat

SEQ ID NO: 155542 - DNA, 80 bp, synthetic construct
  source 1..80: mol_type = other DNA
agaaattcacaacataggcatagtctgtgttattagcccctatactcaacctaaattaatgctaccaaacaaacctaact

SEQ ID NO: 155543 - DNA, 80 bp, synthetic construct
  source 1..80: mol_type = other DNA
gtttgccagtcatgttaactccagggtcagctcaattcctcacaactgatgacacgcaatcaccttcagctttaccgtat

SEQ ID NO: 155544 - DNA, 80 bp, synthetic construct
  source 1..80: mol_type = other DNA
ctatactaagcataagccccaactacctagcaaataactatataggtcttaaaaatcaccttagtacacattgggcacct

SEQ ID NO: 155545 - DNA, 80 bp, synthetic construct
  source 1..80: mol_type = other DNA
tacttaaaacactcatcaaaataatttccacgttagtgattattagcaggaattatgaggacactacaacagtgttagcc

SEQ ID NO: 155546 - DNA, 80 bp, synthetic construct
  source 1..80: mol_type = other DNA
atgctgtgggccggtgccggcaccggaggccacaactacgccgttcgctcggacgactataccatgagcggtttcgggtg

SEQ ID NO: 155547 - DNA, 80 bp, synthetic construct
  source 1..80: mol_type = other DNA
aaatagattctacacacttgatagtaaactctgggagaatggctcaaaaggttggtggtggaaacttccagatgctttga

SEQ ID NO: 155548 - DNA, 80 bp, synthetic construct
  source 1..80: mol_type = other DNA
cagggtacccatatgtagcacttggaattaagaagagagatatactaaataaaactactagggatgtgtccaaattgcaa

SEQ ID NO: 155549 - DNA, 80 bp, synthetic construct
  source 1..80: mol_type = other DNA
gacgtataagttcaaaggtcaccgcacttccgtgtttacacaaaatggcggccaactccttccgggtcaaaggtcggcgc

SEQ ID NO: 155550 - DNA, 80 bp, synthetic construct
  source 1..80: mol_type = other DNA
acaataactgttgataacaacagaccttacaatgagcacacttttgataaatggcaaataaccctgcaagaaatggccca

SEQ ID NO: 155551 - DNA, 80 bp, synthetic construct
  source 1..80: mol_type = other DNA
tggatttactccaatcacaccatttacattgcatttaattactcttgtgttgacaatcagaagatactaccacaatgggt

SEQ ID NO: 155552 - DNA, 80 bp, synthetic construct
  source 1..80: mol_type = other DNA
aagagatgttagtttggttttttatttggcaaaaacagcaattcatcattttcagagtcctcatcatattcgagcccctc

SEQ ID NO: 155553 - DNA, 80 bp, synthetic construct
  source 1..80: mol_type = other DNA
tgtggcaaggcagtggtgctacaaaacagaagaaccaaggctaattactcaattaatatggtggtggcgcaaatgagaga

SEQ ID NO: 155554 - DNA, 80 bp, synthetic construct
  source 1..80: mol_type = other DNA
tctcaccgggaaggcaaaattcaccaaaacgccacttactaatgattgggtcatagaagaagaatgtgaattagactatt

SEQ ID NO: 155555 - DNA, 80 bp, synthetic construct
  source 1..80: mol_type = other DNA
tataaaatcgtatatgttgttcaccatgggcgcacaagtgtcaagacaaaccactggttcgcatgaaagtactgtcaacg

SEQ ID NO: 155556 - DNA, 80 bp, synthetic construct
  source 1..80: mol_type = other DNA
tcacacaggatggtacatatgggtacacaaccctaaatgcaatggggaagttgtacatcagacacgtgaacaagaacagc

SEQ ID NO: 155557 - DNA, 80 bp, synthetic construct
  source 1..80: mol_type = other DNA
atatgcgtacaacgacgaaaaagtgcgaaagcgacgtggaggggggtagcagcaatgatacgtgtccgtggtgttataag

SEQ ID NO: 155558 - DNA, 80 bp, synthetic construct
  source 1..80: mol_type = other DNA
atcagtgaaaaggttacagaactgcagaacatgtcactaggttatttgaatactaaggttttgtctaaaatagtaaaaat

SEQ ID NO: 155559 - DNA, 80 bp, synthetic construct
  source 1..80: mol_type = other DNA
tgcatttgattttaaaaaagtaggttacactcattttaggccagactttatttgcagattaataatttatgtgattctcc

SEQ ID NO: 155560 - DNA, 80 bp, synthetic construct
  source 1..80: mol_type = other DNA
ggtgtgtgcacggtgtctgtgcgcagcttctgcgcggcgctccgcttttcgggccgtcgcggtggtttgtgggcgtgcgg

SEQ ID NO: 155561 - DNA, 80 bp, synthetic construct
  source 1..80: mol_type = other DNA
tgtcgagcactcccagaacaccgccgctacctgtgatccgtagagccctgccagcaccggcggctccggagccatggcgt

SEQ ID NO: 155562 - DNA, 80 bp, synthetic construct
  source 1..80: mol_type = other DNA
aggaggcggcgccctttggacgggtcagcgtcacgcggcatggcgcgacgctgctgtgtcgcgtggaccatctgacctgg

SEQ ID NO: 155563 - DNA, 80 bp, synthetic construct
  source 1..80: mol_type = other DNA
gtctttcacttaacatggttgtgtcacaactgagagaagagtcaaacactagaaagagaattcactccaacctgaatgcc

SEQ ID NO: 155564 - DNA, 80 bp, synthetic construct
  source 1..80: mol_type = other DNA
agcttaaaatacaataacataagcaacgacttaacaagatggggaacagtatggagtcaagcacaaacagcagcttcagg

SEQ ID NO: 155565 - DNA, 80 bp, synthetic construct
  source 1..80: mol_type = other DNA
aatgtattagtgatttgcttaaatcagttgattcagaggagcttagagagtattgcaaacagaaaaactggcttattcca

SEQ ID NO: 155566 - DNA, 80 bp, synthetic construct
  source 1..80: mol_type = other DNA
attcctgtcttcaaatggagtcatcacaatacctgctggtgaacaaatgactttatcagtacctttctactccaacaaac

SEQ ID NO: 155567 - DNA, 80 bp, synthetic construct
  source 1..80: mol_type = other DNA
gcctcggtggcagtgatgttctgtgcagtaaccttagtggtgacattgatggtggatgcgttggaagttgttggaactgg

SEQ ID NO: 155568 - DNA, 80 bp, synthetic construct
  source 1..80: mol_type = other DNA
gcttttgcgacccctctgatattaaggtggttattttgggccaggacccctatcacgggggtcaagcaaacggcctggca

SEQ ID NO: 155569 - DNA, 80 bp, synthetic construct
  source 1..80: mol_type = other DNA
aagaggtaccagcattaacagcagtggagacgggagctacgagcagtgtggtgcccgcagacctggttcaaactcgtcac

SEQ ID NO: 155570 - DNA, 80 bp, synthetic construct
  source 1..80: mol_type = other DNA
cgcaccacggtggtacaagcgcggtggatctggtctcgcaacctcaatcgccgctatcaccaccgactttcgctgcgctc

SEQ ID NO: 155571 - DNA, 80 bp, synthetic construct
  source 1..80: mol_type = other DNA
ccagacctccacgtgctgtagcatatcaacatacatatagtccaaactttgtacctcaggaaggtgatgttgaaactcac

SEQ ID NO: 155572 - DNA, 80 bp, synthetic construct
  source 1..80: mol_type = other DNA
tactactttgagcacctaacctcccagacggtgtgctgctccacgccctttatgcgctttgccggggtggaaaactccac

SEQ ID NO: 155573 - DNA, 80 bp, synthetic construct
  source 1..80: mol_type = other DNA
aacatgggctcacaagtgtctactcaacgcgccggctcgcatgaaaactctaactcagctactgagggttctaccataaa

SEQ ID NO: 155574 - DNA, 80 bp, synthetic construct
  source 1..80: mol_type = other DNA
attctttggtagggccgcttgtgtgacaattctctcccttacaaactcttcaggtagcggagacgcaaagaagcactaca

SEQ ID NO: 155575 - DNA, 80 bp, synthetic construct
  source 1..80: mol_type = other DNA
catcagcatactacatgttttatgatggatatgccacaacctccaatacaggaactaacacatatggaattgccccaaca

SEQ ID NO: 155576 - DNA, 80 bp, synthetic construct
  source 1..80: mol_type = other DNA
tcccggcaccgccggcacctgaaccgccgccacggcgtggtggagatatagaaggagaccgtggaggcgatggaggagac

SEQ ID NO: 155577 - DNA, 80 bp, synthetic construct
  source 1..80: mol_type = other DNA
cagatcttgatgccacttcagtagataaacccacacacccagaaacttcatcagacagattttatacccttactagtgta

SEQ ID NO: 155578 - DNA, 80 bp, synthetic construct
  source 1..80: mol_type = other DNA
catggaggtcacgtttgttattaccagctcccaagatacgagcacacaaacaaacactgatacaccggtactcacccacc

SEQ ID NO: 155579 - DNA, 80 bp, synthetic construct
  source 1..80: mol_type = other DNA
tactcttattctcccatatgttaatgctgtcccaatggattctatgcttagacataataattggagtttggtaattatac

SEQ ID NO: 155580 - DNA, 80 bp, synthetic construct
  source 1..80: mol_type = other DNA
tacagatagatacagcttctgagcctggctctgacattatccctgaatgtgattgtaatgaaggctgttactatagtgca

SEQ ID NO: 155581 - DNA, 80 bp, synthetic construct
  source 1..80: mol_type = other DNA
tcgtgcactattgtagtgccatggatatcctcaaatttctatcgtagaacaaagtctgacagttatacagaggcgggtta

SEQ ID NO: 155582 - DNA, 80 bp, synthetic construct
  source 1..80: mol_type = other DNA
aaagagcactatgacaggaacttatttaatcaagttcaactatacaacacctttcaaaccatagcccagcttaaagaaac

SEQ ID NO: 155583 - DNA, 80 bp, synthetic construct
  source 1..80: mol_type = other DNA
ctatcaaaagaattagagagcaaccgcttgactatgaagcttattcgttcatgccaaagagacctagattctttcctcca

SEQ ID NO: 155584 - DNA, 80 bp, synthetic construct
  source 1..80: mol_type = other DNA
ctcgtcgtcgggcgacacgtgctgcggccgcgcgggcgtgcgcggctcgccgacgctgcgctcgcggtccagccgcatca

SEQ ID NO: 155585 - DNA, 80 bp, synthetic construct
  source 1..80: mol_type = other DNA
tacctctagccccactaaactttgctaacgaatcatccccagagatcccgatcaccctgactatagcaccaatgtgttgt

SEQ ID NO: 155586 - DNA, 80 bp, synthetic construct
  source 1..80: mol_type = other DNA
aaagtgttgcccatttatatgtggaaaagctgtttcattcaaagaccgaaacacatgccagacttactcactcagccaaa

SEQ ID NO: 155587 - DNA, 80 bp, synthetic construct
  source 1..80: mol_type = other DNA
catgtatacaagtcagacattgttggggccatgagacaaaaccaacaaaagatgtatgaggctagagctaaccaaacata

SEQ ID NO: 155588 - DNA, 80 bp, synthetic construct
  source 1..80: mol_type = other DNA
tcaggacaagtttcacaatctgctgaagggtaaccagattacgacaattttcaatacctgtcttaaagatgaacttagga

SEQ ID NO: 155589 - DNA, 80 bp, synthetic construct
  source 1..80: mol_type = other DNA
gggtggatctggactccctccgtatgattgcgtacggagatgacgttattgcatcttacccacacaaaattgatgctggc

SEQ ID NO: 155590 - DNA, 80 bp, synthetic construct
  source 1..80: mol_type = other DNA
aacaactggggtttggtgatcatcccacttagtaagttgcaattccctgacacctctagcactgagatacccattacggt

SEQ ID NO: 155591 - DNA, 80 bp, synthetic construct
  source 1..80: mol_type = other DNA
cccccccaggccaaccagccgctactacgtacacttcctgggctgggcctttcccgagatataagtaagtgcacttccga

SEQ ID NO: 155592 - DNA, 80 bp, synthetic construct
  source 1..80: mol_type = other DNA
tacccaaccagggcccaacgggaaggaactctcttacccgtatgtattagatgcaggcatacctattagtcaactcctta

SEQ ID NO: 155593 - DNA, 80 bp, synthetic construct
  source 1..80: mol_type = other DNA
ttggcgcccgaacagggacccgagaagagtgagagtcttcggaacacagctgagtgaaggcagtaagggcggcaggaatc

SEQ ID NO: 155594 - DNA, 80 bp, synthetic construct
  source 1..80: mol_type = other DNA
tgtgtccatgtggttgagataaaaaacaaagaacctcaagatgaaaatcataagaaagaactcttgttcaatgattggaa

SEQ ID NO: 155595 - DNA, 80 bp, synthetic construct
  source 1..80: mol_type = other DNA
gagcccaatcctcaccctccaactagccaagactggcagatggaatatgaggcctgtaaaatatgggacaggcccgctag

SEQ ID NO: 155596 - DNA, 80 bp, synthetic construct
  source 1..80: mol_type = other DNA
taattatcaccacggtggctgtccaaccaacgtgagtggctacgtgggaattggtgcggttagaataacgtgaagacgag

SEQ ID NO: 155597 - DNA, 80 bp, synthetic construct
  source 1..80: mol_type = other DNA
agctgaaacaacacaagcagatttatgtatcccctacgtagcagacacaaactacgtcaaaacagattcgtctgacttag

SEQ ID NO: 155598 - DNA, 80 bp, synthetic construct
  source 1..80: mol_type = other DNA
gtatttttaatacaccctgtttattccatgagtgatgtatatgagtctattagatggacaaaagaccctaaaaatacaca

SEQ ID NO: 155599 - DNA, 80 bp, synthetic construct
  source 1..80: mol_type = other DNA
agtcaccttggacatttctcaaggagaagatctgtaagtggcttgaaatacctaaaccagcctccaggcaaagtgatagc

SEQ ID NO: 155600 - DNA, 80 bp, synthetic construct
  source 1..80: mol_type = other DNA
ctccgaacaacggccccagacgcgtagcgataggactggcgcatggtgccgcggcgtggagcggcacttggcagcctatt

SEQ ID NO: 155601 - DNA, 80 bp, synthetic construct
  source 1..80: mol_type = other DNA
acatcgcgatttatttgccgatgtttttcgccgtcctgtgaccgacgcggcttcttcgtcgtccgcgtcttcgtcgtcgt

SEQ ID NO: 155602 - DNA, 80 bp, synthetic construct
  source 1..80: mol_type = other DNA
gaatcacagcgtcagctacgggcaggtgtcggtgtttgcgctcggccgccgacgggtagtggtgcacgttgatgctggtg

SEQ ID NO: 155603 - DNA, 80 bp, synthetic construct
  source 1..80: mol_type = other DNA
gattagcaggaccggaccgtttagctacagagacgagcaccctagcgtgacactgactgcaaactacaagttctacttta

SEQ ID NO: 155604 - DNA, 80 bp, synthetic construct
  source 1..80: mol_type = other DNA
tggttctcccaagagcatgaatttgcggatgaagggcagtggagaactaaactagcatttccaaagaaaggtcatggcat

SEQ ID NO: 155605 - DNA, 80 bp, synthetic construct
  source 1..80: mol_type = other DNA
aaagtactgtatgacgaaaaccagaggggacttaacagatggacgtaccccaacgatcagctagacctcggccgctacaa

SEQ ID NO: 155606 - DNA, 80 bp, synthetic construct
  source 1..80: mol_type = other DNA
ccgaagtcaaggggcaattcgggctcgggactggccgggctctgggcaaggctcttaaaaaatgcacttttctaaaataa

SEQ ID NO: 155607 - DNA, 80 bp, synthetic construct
  source 1..80: mol_type = other DNA
gactgttttctatggcgtgcccgtgtggaagaatgcatccattcccctattctgtgcaactaaaaatagagatacttggg

SEQ ID NO: 155608 - DNA, 80 bp, synthetic construct
  source 1..80: mol_type = other DNA
agccttatctcgttcgaagagggtcaggagccgaaggcgcaggcagtacacctcaagctcctcaaacacctccgaaagca

SEQ ID NO: 155609 - DNA, 80 bp, synthetic construct
  source 1..80: mol_type = other DNA
ggacaacaaaccgccgaggcagaccccgctaccctacgcggccccgctgccccccttttcccaccaggcaatagccaccg

SEQ ID NO: 155610 - DNA, 80 bp, synthetic construct
  source 1..80: mol_type = other DNA
cctctatgatccatcagccaaagataccaaaaacaccacaaacacagaagctgctacaaacaaatacaatactataacaa

SEQ ID NO: 155611 - DNA, 80 bp, synthetic construct
  source 1..80: mol_type = other DNA
aagtgcgcctcgtccaccagcagcaagtggaagttttgtcctcggatgctctgtgtagagaggagacagaaaagggactc

SEQ ID NO: 155612 - DNA, 80 bp, synthetic construct
  source 1..80: mol_type = other DNA
tttacaaaatggccgacatacttccgcttttttgaaaaaaggcgcgaaaaaacggcggcggcggcgcgcgcgctgcgcgc

SEQ ID NO: 155613 - DNA, 80 bp, synthetic construct
  source 1..80: mol_type = other DNA
aatcaacagaaagtagtaataatggatgatgtgggacagaaccctgatgggcaggatatgggcttgttttgtcaaatggt

SEQ ID NO: 155614 - DNA, 80 bp, synthetic construct
  source 1..80: mol_type = other DNA
agggctggttagtgaacatctcgagtcaagtgcagttggagcgaaatatcaacagagccatgactattctccaggctgtt

SEQ ID NO: 155615 - DNA, 80 bp, synthetic construct
  source 1..80: mol_type = other DNA
ccatacaaaacacacaaaaacaatcagttcgttgggggtttttgacctcaccaactaatggttcgccgcactcgccacaa

SEQ ID NO: 155616 - DNA, 80 bp, synthetic construct
  source 1..80: mol_type = other DNA
cacccggtggagaaactactaacctcatattacaatacatgtatgcaccccctggggccccattgccaaccaagcgaaac

SEQ ID NO: 155617 - DNA, 80 bp, synthetic construct
  source 1..80: mol_type = other DNA
cgccgtggagaagatcctcaagaacttagtgaatatcatctctgctcttgttattgtcatcaggagtgactatgatatgg

SEQ ID NO: 155618 - DNA, 80 bp, synthetic construct
  source 1..80: mol_type = other DNA
atagaaaccctgtgtgaaaaaaccagacagaaatattttaaagccactaaaagtgcttttcctgcctatgctacacttgt

SEQ ID NO: 155619 - DNA, 80 bp, synthetic construct
  source 1..80: mol_type = other DNA
ctcgcaaggacgaaccaccgtctttaaaaccccggatggaggttgagttcctgaagagaaaaccaggttacttcccagag

SEQ ID NO: 155620 - DNA, 80 bp, synthetic construct
  source 1..80: mol_type = other DNA
gaatatacaaatgtagaaattgaagtactagggaagaaggtcagggccaccatcatgacaggggatacccctataaacat

SEQ ID NO: 155621 - DNA, 80 bp, synthetic construct
  source 1..80: mol_type = other DNA
tcgagaaatacctaaaggatcaggcacagctaaattcatgggggtgtgcatttagacaggtctgccatactactgtacca

SEQ ID NO: 155622 - DNA, 80 bp, synthetic construct
  source 1..80: mol_type = other DNA
ggagacaaatacatacccatagagttcaaagacaggtggtacccctgcctgctccaccaagaggagtggatagaggacat

SEQ ID NO: 155623 - DNA, 80 bp, synthetic construct
  source 1..80: mol_type = other DNA
aaagaaaagtttgaaggatatcattgagaacatactaataaaaaacatgattacataccatgaaaaactaagagagtttc

SEQ ID NO: 155624 - DNA, 80 bp, synthetic construct
  source 1..80: mol_type = other DNA
gtatcgatgctaacaacgtgaattacggcatatctgaaaccaatgacatggggaccttgtgcttccgtgcactggatgga

SEQ ID NO: 155625 - DNA, 80 bp, synthetic construct
  source 1..80: mol_type = other DNA
tcaccaacccccggcccgtctacggccggccccgtctgtagagtgacaccttcagcaacccctgacatttcaccaataca

SEQ ID NO: 155626 - DNA, 80 bp, synthetic construct
  source 1..80: mol_type = other DNA
ccggtcggcgcccagcacgcccgcaaaaccccctagctgcctcagcgcaaaacgccctcagcccggggccgcccacagat

SEQ ID NO: 155627 - DNA, 80 bp, synthetic construct
  source 1..80: mol_type = other DNA
gcagggcaggaccctttgcctacagagacgaactgcccagcaccacactgaccgcgcagtacaaattctactttaactgg

SEQ ID NO: 155628 - DNA, 80 bp, synthetic construct
  source 1..80: mol_type = other DNA
tcctaacatccttccccaaagtatattttgcggtaacgttagaagaagtgaactcagtgcaacaggaagtatcaccacca

SEQ ID NO: 155629 - DNA, 80 bp, synthetic construct
  source 1..80: mol_type = other DNA
agtgaggtccctgacgctgggcaattcgaccattaccacacaagaaagtgctaacgtggtcgttggctatggcaggtggc

SEQ ID NO: 155630 - DNA, 80 bp, synthetic construct
  source 1..80: mol_type = other DNA
gctatccaataacaaagaaaggaataaatacagctttgagcaaattgaagagtgttgtttctggggacattctttcttac

SEQ ID NO: 155631 - DNA, 80 bp, synthetic construct
  source 1..80: mol_type = other DNA
gacgagggcacaggcaacgtagtgtgcctgcagtacctaacaaaagaaaactcagagtacaagccacacggaggcagtaa

SEQ ID NO: 155632 - DNA, 80 bp, synthetic construct
  source 1..80: mol_type = other DNA
tctcatagcttattcgccaccaggggctggtgtacctggaagtaggaaagatgccatgcttggaacgcacgtcatatggg

SEQ ID NO: 155633 - DNA, 80 bp, synthetic construct
  source 1..80: mol_type = other DNA
gttttgaggacggcggcgcggcgcagcggctgagcctctcgtttcgtctcatcaccgagaccgcgggcacctacacctgc

SEQ ID NO: 155634 - DNA, 80 bp, synthetic construct
  source 1..80: mol_type = other DNA
tgatgactcaatagtagcaggaatagagttagaggacaattacactccaaaagtagtggggggaatagggggattcataa

SEQ ID NO: 155635 - DNA, 80 bp, synthetic construct
  source 1..80: mol_type = other DNA
tggaccgtttagttacaaagacactttgactcactgttcactgacgatgaaatactccttttactttacctggggcggca

SEQ ID NO: 155636 - DNA, 80 bp, synthetic construct
  source 1..80: mol_type = other DNA
acccttttccggcaccacgccggccgtggtttcctcgacctgatccgttcctggcgatgcgagtcgaagagttggcccgt

SEQ ID NO: 155637 - DNA, 80 bp, synthetic construct
  source 1..80: mol_type = other DNA
acctaggggagtcactgaggctcgaccctccatcaagttggagaaaccaagcactggtggtaggctggtgacaagaggtg

SEQ ID NO: 155638 - DNA, 80 bp, synthetic construct
  source 1..80: mol_type = other DNA
ccggggggcaagctgtgggaatgtggcggccaagtgcaacaggaaatggaaaggcagtgcggcaatcagaaggtggagtg

SEQ ID NO: 155639 - DNA, 80 bp, synthetic construct
  source 1..80: mol_type = other DNA
aatgggaaacttaatgtaacaatggcaactagtatttgtaaagattgtcaccaaccttccaatttcaaaaagtgttgccc

SEQ ID NO: 155640 - DNA, 80 bp, synthetic construct
  source 1..80: mol_type = other DNA
gggtcaacacaggcaccacaaacattacctattacaatatctattgcacctgacaaatcagaattttccggtgctagaca

SEQ ID NO: 155641 - DNA, 80 bp, synthetic construct
  source 1..80: mol_type = other DNA
tactaccaaaccaaccatactatcagcaatggagataggagcatcatcagatgccagaccagaggacatgattgaaacac

SEQ ID NO: 155642 - DNA, 80 bp, synthetic construct
  source 1..80: mol_type = other DNA
ttttgcgcggtttcttacgcgggctgagctcgggagtagcggatgccccggggagaggagtgttagtaaccgcgacgctg

SEQ ID NO: 155643 - DNA, 80 bp, synthetic construct
  source 1..80: mol_type = other DNA
cgtttgcggatcggctcgcgggtgtgtggaattcctaagaacataatcagctggtcgtctttctttgatgtgttgttgtc

SEQ ID NO: 155644 - DNA, 80 bp, synthetic construct
  source 1..80: mol_type = other DNA
atgaagatgttgactgggacccggtctttaataccaatgcgccccgcattttcgcttgggtccgtcattacgtagagcat

SEQ ID NO: 155645 - DNA, 80 bp, synthetic construct
  source 1..80: mol_type = other DNA
agagtaaagttccagaaagaagggtagtcacccagggcccagaagaggaatttggtcgttcactgcttaaacacaattgt

SEQ ID NO: 155646 - DNA, 80 bp, synthetic construct
  source 1..80: mol_type = other DNA
agtggttccaacttggagggtgccagggaggatggagaaatggcatagccttgtcaagtatctaaaatacagaacaggag

SEQ ID NO: 155647 - DNA, 80 bp, synthetic construct
  source 1..80: mol_type = other DNA
ttcagtgcccactagtcgcaaggatgccatgttaggcacgcatataatatgggacctggggctacaatccagttgtgtgt

SEQ ID NO: 155648 - DNA, 80 bp, synthetic construct
  source 1..80: mol_type = other DNA
aaaacccaagcgggcatacacatgaacccccgcgcatttcaagagctgtaaacaaggtttacatgttcactccacctagt

SEQ ID NO: 155649 - DNA, 80 bp, synthetic construct
  source 1..80: mol_type = other DNA
actatggctactgcacgtacaacccaaatggtagtactcagctagtagaaaaaattaaaggctatagaaaccaaagattt

SEQ ID NO: 155650 - DNA, 80 bp, synthetic construct
  source 1..80: mol_type = other DNA
ccatgggggttaaaaagagagacattctgaacagaaacacaagggatgttacaaagcttcaacacatgattgacacctat

SEQ ID NO: 155651 - DNA, 80 bp, synthetic construct
  source 1..80: mol_type = other DNA
acccacccatgctcaagtagaagactcaattctaattgatggtgttgaaaccaaagttttgaaacaaacaattgtcacag

SEQ ID NO: 155652 - DNA, 80 bp, synthetic construct
  source 1..80: mol_type = other DNA
tccgttgtagaaaggagaaatgtcaaccacatcacccgtggaagttgcgaaaaaatgatagggatacttggagcgcgcag

SEQ ID NO: 155653 - DNA, 80 bp, synthetic construct
  source 1..80: mol_type = other DNA
gctggttctggcaccaattaacaaagacaaactcagacacactaggacagtacgggcaggcctccattaaatacatggag

SEQ ID NO: 155654 - DNA, 80 bp, synthetic construct
  source 1..80: mol_type = other DNA
gccagacacattaccgtctggtgcagcaagatgagtatactagtgccggcaatgtcacttgttggtaccaaacaggcata

SEQ ID NO: 155655 - DNA, 80 bp, synthetic construct
  source 1..80: mol_type = other DNA
aaacctaaagatagtgagaagcaagttagtacctttatcaaacctagagctaatttgagagagatcaggacatttggacc

SEQ ID NO: 155656 - DNA, 80 bp, synthetic construct
  source 1..80: mol_type = other DNA
acacgctacaggccctgcgccgggagacgctgtcctacggccacaccggagtcggatactgcccccagcagggcccctgc

SEQ ID NO: 155657 - DNA, 80 bp, synthetic construct
  source 1..80: mol_type = other DNA
ctcaggccataccgctctttgtctacacaccagggtcctattggtaattacatcaaccagctgggcacggcatttgggga

SEQ ID NO: 155658 - DNA, 80 bp, synthetic construct
  source 1..80: mol_type = other DNA
accgtcgcaccgatgtgcgccgagtacaatggcctgaggttggccggacaccaaggcttgcctgtgatgaatacaccggg

SEQ ID NO: 155659 - DNA, 80 bp, synthetic construct
  source 1..80: mol_type = other DNA
tcaattattacaaagactcagctagctcaggtttgagtaaacaagatttttcccaagatccgtccaaatttactcaacca

SEQ ID NO: 155660 - DNA, 80 bp, synthetic construct
  source 1..80: mol_type = other DNA
cttctacccaaacctaagcatactaccagcagaaattgaaactcaagcacaatttttctatggtagtgctcacccaccac

SEQ ID NO: 155661 - DNA, 80 bp, synthetic construct
  source 1..80: mol_type = other DNA
atcatgtcagtggagaacttcaacgaaacatcaaaccaaagcagttcccaactttttgcaacatggaacatcacgtacac

SEQ ID NO: 155662 - DNA, 80 bp, synthetic construct
  source 1..80: mol_type = other DNA
cggtcccgataatagaacatcgagttgagcggaaaattttgctggcagtgtagcttttccttacccaggttgaggcagtg

SEQ ID NO: 155663 - DNA, 80 bp, synthetic construct
  source 1..80: mol_type = other DNA
cccgttacaggccctaacaataaaccctcagcaagtaacatgactacttataaccagtgggtaaaatctagctttaaagt

SEQ ID NO: 155664 - DNA, 80 bp, synthetic construct
  source 1..80: mol_type = other DNA
ggcgtacattggagcaggtgggactaatgtgagatatgaccaaacacaccctggtgaggcaggccacaccattacagcat

SEQ ID NO: 155665 - DNA, 80 bp, synthetic construct
  source 1..80: mol_type = other DNA
actcataacaccggtttaatgcaagtgatgtacacaccacctggaatttcagccccaacaagtgctgatggcaaggaatg

SEQ ID NO: 155666 - DNA, 80 bp, synthetic construct
  source 1..80: mol_type = other DNA
aaaagtttacagacgaaggctttccaacctcctggtatggaaacatagcaaactgccacctcacaggcatctactcaccc

SEQ ID NO: 155667 - DNA, 80 bp, synthetic construct
  source 1..80: mol_type = other DNA
gtgtcttctttgacgtgtttgatggtagcaaagagccagctgtgttatcagataaagacccacgccttgaaactgatttt

SEQ ID NO: 155668 - DNA, 80 bp, synthetic construct
  source 1..80: mol_type = other DNA
actaacctaaccgcagcacatagtctacgtcgtgcacttcctgggcatggtctacaacataatataagaaactgcacttc

SEQ ID NO: 155669 - DNA, 80 bp, synthetic construct
  source 1..80: mol_type = other DNA
aggtacagggaaatccattgctacttctattctagccagaatgttaactaatgaatcagatatttactcattaccaccat

SEQ ID NO: 155670 - DNA, 80 bp, synthetic construct
  source 1..80: mol_type = other DNA
tgcaccctgcatcgcagacacctgccatgagcttcagggcacccactctaaatgccggtcaacgagagcagctatggttc

SEQ ID NO: 155671 - DNA, 80 bp, synthetic construct
  source 1..80: mol_type = other DNA
gaaatgagtgagaacatacagattgcagtggagcattattcagctcagctgtttatgttggacattaacccagaacccat

SEQ ID NO: 155672 - DNA, 80 bp, synthetic construct
  source 1..80: mol_type = other DNA
cgcaaggaggctatgcttggggtacatgtcatatgggatctaggtctacaatcctcatgcaccatggttataccctggat

SEQ ID NO: 155673 - DNA, 80 bp, synthetic construct
  source 1..80: mol_type = other DNA
tggagtgggtgtccaataagatatccaaattcattagttggttgcaggataaaatcatcccacaagcgagagacaaatta

SEQ ID NO: 155674 - DNA, 80 bp, synthetic construct
  source 1..80: mol_type = other DNA
aatatcacaattgttttcagtgatggcagactcaacaactccatcagaaaatcatggggttgatgcaaaagggtacttca

SEQ ID NO: 155675 - DNA, 80 bp, synthetic construct
  source 1..80: mol_type = other DNA
gtgatgccaatgcaagacattcatgagtccattcgttggacgcgtgatcccagaaacactcaagaccacatacggtctct

SEQ ID NO: 155676 - DNA, 80 bp, synthetic construct
  source 1..80: mol_type = other DNA
ttcctgggtacgaaggtaactgagtcgatgtcgcgccacggggggaatgagacagacgactggcgcacgctgtaatcaca

SEQ ID NO: 155677 - DNA, 80 bp, synthetic construct
  source 1..80: mol_type = other DNA
aggatgagcttcgagctcctgcaaaaataaaagcagggaaaacaagagctatcgaagcagctagcatgaatgacacagcc

SEQ ID NO: 155678 - DNA, 80 bp, synthetic construct
  source 1..80: mol_type = other DNA
cctatggtcaccttcctcaaagatgaactcagaaaaagagagaagatttcctctggaaaaactcgcgtgattgaagccag

SEQ ID NO: 155679 - DNA, 80 bp, synthetic construct
  source 1..80: mol_type = other DNA
acatatccaccagactttactaacagacaatatctatcacatgactgtggcatttacagtccatactttttaacaccaca

SEQ ID NO: 155680 - DNA, 80 bp, synthetic construct
  source 1..80: mol_type = other DNA
taattgtgatggtacattattaggaaacataaccatattcccacatcagttcattaatttaagaagtaataattcagcca

SEQ ID NO: 155681 - DNA, 80 bp, synthetic construct
  source 1..80: mol_type = other DNA
tggccctgacctccctctgccacctgctgtgctactggtgttccgaatcgtaccggcgcctgaacaccgaagaggaaaac

SEQ ID NO: 155682 - DNA, 80 bp, synthetic construct
  source 1..80: mol_type = other DNA
agcagctaatgcaatagtggcttatgctgaatggcccagctttttaaaagatgatgatgctagtgatgtgaataagccca

SEQ ID NO: 155683 - DNA, 80 bp, synthetic construct
  source 1..80: mol_type = other DNA
tcgttatgggaccatagtgacaaatgatatgggcacactgtgctctagaattgtgactgaagagcaccaaactcaggtta

SEQ ID NO: 155684 - DNA, 80 bp, synthetic construct
  source 1..80: mol_type = other DNA
ggtcatttattgcagaagatcctgaatgtagtgaagctacactagtgattaattcaaataattttaaagatacaatcatt

SEQ ID NO: 155685 - DNA, 80 bp, synthetic construct
  source 1..80: mol_type = other DNA
aaacccttgcctggaagtttgactcctacctggcatatgactatgtagccttcaacaagttccctgaggagtttggatat

SEQ ID NO: 155686 - DNA, 80 bp, synthetic construct
  source 1..80: mol_type = other DNA
caccgtgacagtagcgccaatgtgtgcagagtacaacggattgagagtatccgcacaccaggggttaccatcacttctcg

SEQ ID NO: 155687 - DNA, 80 bp, synthetic construct
  source 1..80: mol_type = other DNA
caagatccaaagaagttcactcaaccggttttggattccatcagagagctgtctgcccccttgaattcaccatcagttga

SEQ ID NO: 155688 - DNA, 80 bp, synthetic construct
  source 1..80: mol_type = other DNA
acccaagggcaaaaagtataaaagggttaaaattcacccccctaagatgtttgaagacaagtggtactctcaacaggacc

SEQ ID NO: 155689 - DNA, 80 bp, synthetic construct
  source 1..80: mol_type = other DNA
agattatgaagagaggcaaaagaattataattgctggaagcagcaacttgaaaatcaaactttagatgatttagatgatg

SEQ ID NO: 155690 - DNA, 80 bp, synthetic construct
  source 1..80: mol_type = other DNA
agatcggttgagagagtggctgataccatagcaagtggacccactaactcagagagagtgccagcactaaccgccgttga

SEQ ID NO: 155691 - DNA, 80 bp, synthetic construct
  source 1..80: mol_type = other DNA
gatggaatcaaaactcaagttgatgatgcctatgacctgcataattcccaaggaattaaattagaaattactgtcctcaa

SEQ ID NO: 155692 - DNA, 80 bp, synthetic construct
  source 1..80: mol_type = other DNA
gctgtatcttcggtttgcccgccggagccggccctcactatataacgtcccgcccgggtctcctccatgtatgcaggtaa

SEQ ID NO: 155693 - DNA, 80 bp, synthetic construct
  source 1..80: mol_type = other DNA
gggcgctgcgcgggcgcagccatgcgtgaccgtgaggagaggggctggcgcgcgggtggcgtgtctggtgtgagcggaag

SEQ ID NO: 155694 - DNA, 80 bp, synthetic construct
  source 1..80: mol_type = other DNA
atacctaaagataagaacctgacaaaacttagacaggcaatggagaagtatggattagacttgcctatgattacattttt

SEQ ID NO: 155695 - DNA, 80 bp, synthetic construct
  source 1..80: mol_type = other DNA
cgtagacgtaggtaataaccggacaaatattacctttagtgcagaggtggcagaactgtaccgattagaattgggagatt

SEQ ID NO: 155696 - DNA, 80 bp, synthetic construct
  source 1..80: mol_type = other DNA
ctcaagtatcaaggcagaatgttggtacccactccacacaaaacacagttacaggaggatctagtcttaattattttaac

SEQ ID NO: 155697 - DNA, 80 bp, synthetic construct
  source 1..80: mol_type = other DNA
ggccgaggccaggggaaggcgccccctgtaggcgtctatcgtccttgccacagtgcggatctctcgcgagtcccgccgca

SEQ ID NO: 155698 - DNA, 80 bp, synthetic construct
  source 1..80: mol_type = other DNA
atcttggccagaatgaccgcgcttacgagcgcgcgctcgacgatctcggcatcgtggcgcacgtccgtatcgaattcggt

SEQ ID NO: 155699 - DNA, 80 bp, synthetic construct
  source 1..80: mol_type = other DNA
tgccaggaaactcttcggtgcactataatttctgcacatacaatcctaagtatactcatctaaatgtgctcagagagtac

SEQ ID NO: 155700 - DNA, 80 bp, synthetic construct
  source 1..80: mol_type = other DNA
gaagttcctgggcaacaaccactttgtcctcgctaacaactttttgcgtgagaaggggctcggtgagatagattggaggc

SEQ ID NO: 155701 - DNA, 80 bp, synthetic construct
  source 1..80: mol_type = other DNA
tttaggcactacaaatgaatccacttttatagaaaactttttaaaagttgcatttccagatgacaaacctaggcattcaa

SEQ ID NO: 155702 - DNA, 80 bp, synthetic construct
  source 1..80: mol_type = other DNA
aacaccagccagcaaaaggcgcagacgctcataaggatgaggcattgcacccagataaggatgtagatgcgcagcaggaa

SEQ ID NO: 155703 - DNA, 80 bp, synthetic construct
  source 1..80: mol_type = other DNA
gtggcggcgctcctacagacggtggaagagacgcagggggcgacgcagacataaaaagaaacttatactgactcagtggc

SEQ ID NO: 155704 - DNA, 80 bp, synthetic construct
  source 1..80: mol_type = other DNA
aaacagagcagtggttagggtagcagacaccatgccaagtggaccatccaattcgcaggcagtacctgccttgacagccg

SEQ ID NO: 155705 - DNA, 80 bp, synthetic construct
  source 1..80: mol_type = other DNA
ggacgtaagcgcggcgcggcgtgtgtggcgttctgtccacggcgcttactgcgcgacgccggtgcgtgccgtcccacggt

SEQ ID NO: 155706 - DNA, 80 bp, synthetic construct
  source 1..80: mol_type = other DNA
tttgtggataaatttgcggctgcaactgaagccacacgtaagttttgcccaattgactacctatttgggtgtggtgtgct

SEQ ID NO: 155707 - DNA, 80 bp, synthetic construct
  source 1..80: mol_type = other DNA
cgcagcgacttcttcgccggaggctgtggccagcgcctggtacttgacactgccgctaccgcgtccgcgaaagtagcgga

SEQ ID NO: 155708 - DNA, 80 bp, synthetic construct
  source 1..80: mol_type = other DNA
gtactctggtattatgtacctttgtacgcctgtgcttcctattgtaccctccctaaatttccaacccaagtaacgttaga

SEQ ID NO: 155709 - DNA, 80 bp, synthetic construct
  source 1..80: mol_type = other DNA
aagaactagtccataaatttgggattccacaattagtggcaagacaaatagtaaattcctgtgataaatgccaacaaaaa

SEQ ID NO: 155710 - DNA, 80 bp, synthetic construct
  source 1..80: mol_type = other DNA
tgagttaacattcttaaagagatctttcaatttggttgaagatagaatcaggcctgctattgctgagaaaaccatatggt

SEQ ID NO: 155711 - DNA, 80 bp, synthetic construct
  source 1..80: mol_type = other DNA
ggctatgtaattcaaagcacattttcaaggacacttattatgaagttgagggtggtgtgccatcaggttgttctggaact

SEQ ID NO: 155712 - DNA, 80 bp, synthetic construct
  source 1..80: mol_type = other DNA
atattacaacagctggacccagtgacatgtatgtccatgtcgataatctcatatacaggaatcttcatctatttaattca

SEQ ID NO: 155713 - DNA, 80 bp, synthetic construct
  source 1..80: mol_type = other DNA
tacagggagaggaattggcttcaggccgccgaaggatcccacagttctttttgtgactgtggtgattctattattcatct

SEQ ID NO: 155714 - DNA, 80 bp, synthetic construct
  source 1..80: mol_type = other DNA
acactacaaatacagatgagaccaagagatttgctaattggacaatcaacgcaaggcgcatggtacaaatgaggaggaag

SEQ ID NO: 155715 - DNA, 80 bp, synthetic construct
  source 1..80: mol_type = other DNA
cccccagggaatccataccttctataagcgtgggcaacgcgtacagctgcttttacgatggttggtcacacttctcgcag

SEQ ID NO: 155716 - DNA, 80 bp, synthetic construct
  source 1..80: mol_type = other DNA
ggacagttaatgacattcaaaagctagtaggagtgctgaactgggcagctcaaatatatccaggaattaagacaaaaaac

SEQ ID NO: 155717 - DNA, 80 bp, synthetic construct
  source 1..80: mol_type = other DNA
accggcccacaatgttgccggacaggagcagcagtggttccgagcgtgtctccacgcacacggagctttttgtggctgcg

SEQ ID NO: 155718 - DNA, 80 bp, synthetic construct
  source 1..80: mol_type = other DNA
gttctatgacgccctgtttggaaacggaaagaccccagacggacgcggacaggtagacgtgttctggcagcagcggtggt

SEQ ID NO: 155719 - DNA, 80 bp, synthetic construct
  source 1..80: mol_type = other DNA
gccaattggggtgatcctgtagcgccgcggtttcagcatcacaggttattttgcctgaagcttgctggtgcgtaaatccc

SEQ ID NO: 155720 - DNA, 80 bp, synthetic construct
  source 1..80: mol_type = other DNA
tagcattaagtataaatttactcaagcatgatggtttattagtatctaagataaacccttcagtgtcttttcccttgact

SEQ ID NO: 155721 - DNA, 80 bp, synthetic construct
  source 1..80: mol_type = other DNA
gagccaaaagcaggctgggtcccgtacaacaaaaactttggcatgggcaagtggatagacggaggtggatacgtgcccct

SEQ ID NO: 155722 - DNA, 80 bp, synthetic construct
  source 1..80: mol_type = other DNA
atggcaataacagactcaggtccaaaagccaacattatagtagactcacaatatgtaatgggaataatagcaggccaacc

SEQ ID NO: 155723 - DNA, 80 bp, synthetic construct
  source 1..80: mol_type = other DNA
actctcaccagtgctcggccggcactgggcagacggctccacgcttgcttgcttaaagacctcttaataaagctgccaat

SEQ ID NO: 155724 - DNA, 80 bp, synthetic construct
  source 1..80: mol_type = other DNA
aaggagtcccggtagagatgaaacccggaacgaaccaatttttgacaactgatgatgggacctcagcaccaatattaccc

SEQ ID NO: 155725 - DNA, 80 bp, synthetic construct
  source 1..80: mol_type = other DNA
ggcaattcgggctcgggactggccgggctatgggcaaggctcttaaaaagctatgtttctcggtaggtgctggagaaaga

SEQ ID NO: 155726 - DNA, 80 bp, synthetic construct
  source 1..80: mol_type = other DNA
agaacattcaaaagaagtacccgcgctaacggcagttgagacaggagctaccaacccactagaaccaggcgacactgtcc

SEQ ID NO: 155727 - DNA, 80 bp, synthetic construct
  source 1..80: mol_type = other DNA
tacaagcagtttgagcaaaggatacgcagtgtgagcgctggtcgcgcactgtatatccctccatatgatctgcttttgca

SEQ ID NO: 155728 - DNA, 80 bp, synthetic construct
  source 1..80: mol_type = other DNA
gttggctaatttctttgcttattactctggtgaactaaatgtgcatgttctattcttggcagaaagaggctttctaaggg

SEQ ID NO: 155729 - DNA, 80 bp, synthetic construct
  source 1..80: mol_type = other DNA
acccttgcgtcagcttcctcgttttgtcaaccgtctacaacaacttcctctctattgccccagacgaactgtccccagta

SEQ ID NO: 155730 - DNA, 80 bp, synthetic construct
  source 1..80: mol_type = other DNA
cgcatgggaaggctggacacgccgaccgagaggtcaccgagcccggacgccatctcttcttcctctccgtcgctgtcatt

SEQ ID NO: 155731 - DNA, 80 bp, synthetic construct
  source 1..80: mol_type = other DNA
ctccgaatttaaatcattttctaagacaagactcgataggactctattacacactgggcatttaggcccatcacattcaa

SEQ ID NO: 155732 - DNA, 80 bp, synthetic construct
  source 1..80: mol_type = other DNA
gggaattgagctagataaactaaaaattgtagcatatggtgatgatgtaatagcttcatacccagaggaacttgacccag

SEQ ID NO: 155733 - DNA, 80 bp, synthetic construct
  source 1..80: mol_type = other DNA
agtatgatgtctctgcccccttcaagctagacaaaaacagcagtcccagctaccatccagccaaactcatgcaggcaaaa

SEQ ID NO: 155734 - DNA, 80 bp, synthetic construct
  source 1..80: mol_type = other DNA
aaagccacgatctaatttgtggatgcaacaaacccattgatcatctgaacgacgttatcaatcaacaaaaatgcctccat

SEQ ID NO: 155735 - DNA, 80 bp, synthetic construct
  source 1..80: mol_type = other DNA
caactccagatgcttattcccaagctggttttataacttgctggtatcagacaaattttgtagttcctcctaatactcct

SEQ ID NO: 155736 - DNA, 80 bp, synthetic construct
  source 1..80: mol_type = other DNA
tggactcattagtaaaagaagtattcaaagaatgtcagaataccaaacagatgatgaacttctatcgccaggtcgcccaa

SEQ ID NO: 155737 - DNA, 80 bp, synthetic construct
  source 1..80: mol_type = other DNA
cagaaatcacattagttccatgtatagcagcacagaatcaaggtgtgggtcatgttgttatgcaatacatgtatgtccct

SEQ ID NO: 155738 - DNA, 80 bp, synthetic construct
  source 1..80: mol_type = other DNA
ttaaagagagggtttagacaggatgagagacacaactttctaatacaccctacatttccagtagaagaaatccaagagtc

SEQ ID NO: 155739 - DNA, 80 bp, synthetic construct
  source 1..80: mol_type = other DNA
gcaaattcagcccctgctttggatgcagctgaaactggacacaccagttcagtgcaacctgaggaccttatagagactag

SEQ ID NO: 155740 - DNA, 80 bp, synthetic construct
  source 1..80: mol_type = other DNA
atataagtaactgcacttccgaatggctgagttttccacgcccgtccgcagagaggagccacggcagaggatccgaacgt

SEQ ID NO: 155741 - DNA, 80 bp, synthetic construct
  source 1..80: mol_type = other DNA
gaggcacagctcaccatgttcttgtcagacacccacaaatttaaatctagtaatggttccacagcattaacaacagataa

SEQ ID NO: 155742 - DNA, 80 bp, synthetic construct
  source 1..80: mol_type = other DNA
aaagaggggacttgatggattagcaccactttatgcatcagaaaataaaactgtcacacaaatgcagaaagagatcaaac

SEQ ID NO: 155743 - DNA, 80 bp, synthetic construct
  source 1..80: mol_type = other DNA
cccagcaaagttaagagatgtttcatgataggctactttcccctcataatctgtggcaacgggcggtggtccgagaactt

SEQ ID NO: 155744 - DNA, 80 bp, synthetic construct
  source 1..80: mol_type = other DNA
ctcggtcatattaacagtaagactttgaactcgagtcgtattgatttgtgggtactttatgtaaggaataggttctagtt

SEQ ID NO: 155745 - DNA, 80 bp, synthetic construct
  source 1..80: mol_type = other DNA
accatacaacctgctagagcgtacttggattgataaattcatttgaatagcaatagcaatgtagaaatctacctgagtag

SEQ ID NO: 155746 - DNA, 80 bp, synthetic construct
  source 1..80: mol_type = other DNA
aaaacaacgtgtgtgtgtgtggggggggggtagctctattaagtatgcatgttgcggtaccggttaccgtatattggtgc

SEQ ID NO: 155747 - DNA, 80 bp, synthetic construct
  source 1..80: mol_type = other DNA
cacccacaccgtctacggacgtagtactcttgtatctcggtacatttgtacgccagttttccctccctccccccccttca

SEQ ID NO: 155748 - DNA, 80 bp, synthetic construct
  source 1..80: mol_type = other DNA
caaacaagcaaaacacaaccaacacaaccagcacaacaacaaccagcacacccaccacaacaaaggaaaaggaaattaag

SEQ ID NO: 155749 - DNA, 80 bp, synthetic construct
  source 1..80: mol_type = other DNA
gacgttgtaggtgtccagcgctctggtcgccccctctgcctccggccgccccgggcccgggaccgcgccctcctctgggc

SEQ ID NO: 155750 - DNA, 80 bp, synthetic construct
  source 1..80: mol_type = other DNA
ggtgattaagcgtgaaaacaccgtaagggggggggggcagacaggaagcttggtggcagtggccgttagatgcattacgt

SEQ ID NO: 155751 - DNA, 80 bp, synthetic construct
  source 1..80: mol_type = other DNA
agttcgcaagaccaatccacaagtgtagcccaggatgccccagtcttaacacatcaaataatgtacataccacctggagg

SEQ ID NO: 155752 - DNA, 80 bp, synthetic construct
  source 1..80: mol_type = other DNA
aaggagcaggcatttggcttcaaattacagccaggtgccgattctgtttttaaacacactttgttaggtgaaattttgaa

SEQ ID NO: 155753 - DNA, 80 bp, synthetic construct
  source 1..80: mol_type = other DNA
acgccaggcaacaccaacaagatggaagcataccccatcccgctcactcaaggcgctcctgtgaaggatcaagcaatatt

SEQ ID NO: 155754 - DNA, 80 bp, synthetic construct
  source 1..80: mol_type = other DNA
ctaagaagagatcaagagaagcagtatagtgagacctggtattctcgtgacatagtctgtgaacagagtaataatactga

SEQ ID NO: 155755 - DNA, 80 bp, synthetic construct
  source 1..80: mol_type = other DNA
gtgccagtataagaacagagcaaatgtgaattttgacgccacagccgtcactgaaacgcgtgaaaccattaatactgtcc

SEQ ID NO: 155756 - DNA, 80 bp, synthetic construct
  source 1..80: mol_type = other DNA
aatttcacagtggatgtctcctgattatggttgtccccgaacaccaattagcatatataggggcagaaggagttaaggtt

SEQ ID NO: 155757 - DNA, 80 bp, synthetic construct
  source 1..80: mol_type = other DNA
acggttcaggaatgtaccgttcttaccgctccaaattgcggcatcgtcaacaacgacggcgcggtctctgaaggccaaga

SEQ ID NO: 155758 - DNA, 80 bp, synthetic construct
  source 1..80: mol_type = other DNA
gttaggcatgtgaacggtccgtcaccactaccagtaaccagcacagttagagtgtatttcaaaccaaaacatgtgaaagc

SEQ ID NO: 155759 - DNA, 80 bp, synthetic construct
  source 1..80: mol_type = other DNA
gaaaactgttaatttcgtactctcctccgggtgcttccgttcccacctcacggaaggatgcaatgttgggcacacatata

SEQ ID NO: 155760 - DNA, 80 bp, synthetic construct
  source 1..80: mol_type = other DNA
gccatgttttgtcaaatggtgtccacaacagattttgtagtgcctatggcagctattgaggacaaaggcaagagctttac

SEQ ID NO: 155761 - DNA, 80 bp, synthetic construct
  source 1..80: mol_type = other DNA
tttgtttcacaatacatgccagcaagcaccatagaggaagcacgtagattcagtcccatcgactatctctttggctcggg

SEQ ID NO: 155762 - DNA, 80 bp, synthetic construct
  source 1..80: mol_type = other DNA
agccggaacgcctacgtcatgctcactaatgtgctttgtgtcagcttgcaatgacttctctgtccgattactgaaagata

SEQ ID NO: 155763 - DNA, 80 bp, synthetic construct
  source 1..80: mol_type = other DNA
gtacattcgtactgaaagggaacccccggtgatgtgcacattatactctttcattctggggtttcccaatgacgtaaaaa

SEQ ID NO: 155764 - DNA, 80 bp, synthetic construct
  source 1..80: mol_type = other DNA
tagcacctgcatgggcggtgacattttcaaatttaaccagatctgagaaaaatgcacaaacagaccccacacagcagcac

SEQ ID NO: 155765 - DNA, 80 bp, synthetic construct
  source 1..80: mol_type = other DNA
cccctgtatcgttgtaacaaacgggtctgtgcgacttcgttctcggaacacaagcttgttgtcgcggagacagagagaga

SEQ ID NO: 155766 - DNA, 80 bp, synthetic construct
  source 1..80: mol_type = other DNA
cttcaaagaaagctcggagggctatgagctggtcgcgcccggtacacaatgcccctggcatcgagagaaactggtatgag

SEQ ID NO: 155767 - DNA, 80 bp, synthetic construct
  source 1..80: mol_type = other DNA
ggaaaggaacagtatgaggaattcctcagaggagtgcgatcaactagtgttggtcgaaccttgtacctcccaccatatga

SEQ ID NO: 155768 - DNA, 80 bp, synthetic construct
  source 1..80: mol_type = other DNA
ccacccgctgatactttcggcgcttggttggcagaggaggtggcggcgaggggctcctctcctgctccggcggatagcgc

SEQ ID NO: 155769 - DNA, 80 bp, synthetic construct
  source 1..80: mol_type = other DNA
gttcctcaggtcctggatggctgcctcgatggctaggctcagggtgtccaggtcttcgggagtggtctcggtgggctgct

SEQ ID NO: 155770 - DNA, 80 bp, synthetic construct
  source 1..80: mol_type = other DNA
ccggccaccaggaaggatgccatgctaggaacccacatcatttgggaccttggtcttcaatcctcgtgcactatgctagc

SEQ ID NO: 155771 - DNA, 80 bp, synthetic construct
  source 1..80: mol_type = other DNA
ctacacctacaccggcaagcagcgcaacctctctgacgacgtgctggttgcgctagtcatggctcattttctcgcaacaa

SEQ ID NO: 155772 - DNA, 80 bp, synthetic construct
  source 1..80: mol_type = other DNA
taaatccaacgtagacctagaactcataagatacaggggatgctctttcaaactatatagacacgagaaatgcgactttt

SEQ ID NO: 155773 - DNA, 80 bp, synthetic construct
  source 1..80: mol_type = other DNA
agagctcctagacgtcctagaagacgcagagtaaggagatggcgtcgcaggcgcgggtgggctcgcagacggtacattag

SEQ ID NO: 155774 - DNA, 80 bp, synthetic construct
  source 1..80: mol_type = other DNA
gtacaaagtgaattgggaatacaagaagaaatacttaacattgccattatagtagtaatctgtccttacaccaaaccaaa

SEQ ID NO: 155775 - DNA, 80 bp, synthetic construct
  source 1..80: mol_type = other DNA
atgtcagcgtgtaccatgtacaagtcacaccaggagcaaaggataagatattggtcataccgttggatatgagcaatacc

SEQ ID NO: 155776 - DNA, 80 bp, synthetic construct
  source 1..80: mol_type = other DNA
cttcaacaggtggtcttttagcaacgaggacctagacctcgccctgtatttcgggtgcacttttactttttacagacaca

SEQ ID NO: 155777 - DNA, 80 bp, synthetic construct
  source 1..80: mol_type = other DNA
ctaaaccaaatgacaccaatgccaaacagctatttaagacatggagaatctcgtaccttgagacatatcagcttaggagg

SEQ ID NO: 155778 - DNA, 80 bp, synthetic construct
  source 1..80: mol_type = other DNA
aagtaggcggtgtggctgagaccatgctcagtggccgtctggcagggggccgggcgcgctccgtccttgtccaggagaca

SEQ ID NO: 155779 - DNA, 80 bp, synthetic construct
  source 1..80: mol_type = other DNA
ctactacgagtacttagacaatactgcagacaccaatagagacaacgaaagagataaaaaatggcagaccgtgatacaga

SEQ ID NO: 155780 - DNA, 80 bp, synthetic construct
  source 1..80: mol_type = other DNA
ggaaaagttgggtcaataatattacttcttataacactgtcagagtcgaatcgctgggaaatgaaacacggtgcatgctg

SEQ ID NO: 155781 - DNA, 80 bp, synthetic construct
  source 1..80: mol_type = other DNA
caatagaaaatttcatgggaagagcagcatgcgtgtatattgcacagtacgccaccgaaaaagcgagcgatgatctagac

SEQ ID NO: 155782 - DNA, 80 bp, synthetic construct
  source 1..80: mol_type = other DNA
tgctgcattagactatttacttgggtgtggagttctagctgggaatgccttgtttttaccaccatcgcataataaacttg

SEQ ID NO: 155783 - DNA, 80 bp, synthetic construct
  source 1..80: mol_type = other DNA
gtacgttagtaaactaaagcaattggagctcattgagaatcaaatgtcagttttacaccaatcatgtccatcacaggaac

SEQ ID NO: 155784 - DNA, 80 bp, synthetic construct
  source 1..80: mol_type = other DNA
tgatgccgtgttgaatcgaacgctacttggagagattatgaattactatacgcactggtcggggagtattaaactaacct

SEQ ID NO: 155785 - DNA, 80 bp, synthetic construct
  source 1..80: mol_type = other DNA
ttatgaaaatgagggagaacaactttaagctagagacaggacccaatgacaagtatggagactacacagcacagtaccaa

SEQ ID NO: 155786 - DNA, 80 bp, synthetic construct
  source 1..80: mol_type = other DNA
aaaccagacaaaacatcagatccttccacaagtatacctacttcagattactttcaaacactagatgcactatggggaga

SEQ ID NO: 155787 - DNA, 80 bp, synthetic construct
  source 1..80: mol_type = other DNA
aattctaatacctagctttgaaaccagaccaaagggcaagaaatacaaaagaattaaaatacaccccccaaaactctttg

SEQ ID NO: 155788 - DNA, 80 bp, synthetic construct
  source 1..80: mol_type = other DNA
tttcagtcatggctgattctgacacaccatccaccacacatgggcacgatgccaagggttatttcaaatggtctgctact

SEQ ID NO: 155789 - DNA, 80 bp, synthetic construct
  source 1..80: mol_type = other DNA
agaggagctaaccttcggggcggttgcctgtctggggacatttagtgctactgacggttggaggaggtctgccttcaatt

SEQ ID NO: 155790 - DNA, 80 bp, synthetic construct
  source 1..80: mol_type = other DNA
aaaggatggattgtaatacacccatcaaatgaactattagtagaaaaacacatcagcagagcttttattactttgcaagc

SEQ ID NO: 155791 - DNA, 80 bp, synthetic construct
  source 1..80: mol_type = other DNA
gcagtgaaaaattggatgactcagacgctgctgattcagaatgctaacccagactgcaaactcgtgttaaaaggtttggg

SEQ ID NO: 155792 - DNA, 80 bp, synthetic construct
  source 1..80: mol_type = other DNA
tctagactagagaaaatccaaaaagaatttgcaactgtgtacccacagctacctacacaaagacccacagacagcacact

SEQ ID NO: 155793 - DNA, 80 bp, synthetic construct
  source 1..80: mol_type = other DNA
tcacgcgtagcctcctccaccacggctgctgatcgccgtcactaaggaccgacacggaggatgacgaggagcttctcccc

SEQ ID NO: 155794 - DNA, 80 bp, synthetic construct
  source 1..80: mol_type = other DNA
gttatggagtttggccccactatctcacagcacaagatgccactgcaatagacaaaccatcacaacccgatacatcgtct

SEQ ID NO: 155795 - DNA, 80 bp, synthetic construct
  source 1..80: mol_type = other DNA
caagctgtgaggattttgtgttatggagatgatgttttggtggttttttccagagatattcagattgacaatcttgatca

SEQ ID NO: 155796 - DNA, 80 bp, synthetic construct
  source 1..80: mol_type = other DNA
gacggacaactcacccatggcggtagacagcctagagaagtacaaattgttgacccagtcaccatgggtccccgctgggt

SEQ ID NO: 155797 - DNA, 80 bp, synthetic construct
  source 1..80: mol_type = other DNA
tatgagagtctgagacgcaattggctcgaattgttttaaatgataatttgaattaatgttgattggcaaaacctttggtg

SEQ ID NO: 155798 - DNA, 80 bp, synthetic construct
  source 1..80: mol_type = other DNA
ccagatcacaatgaacaaagagtacaaatacaaaacaaactacacccaagttcacttaatcctgcagataacaaaggcct

SEQ ID NO: 155799 - DNA, 80 bp, synthetic construct
  source 1..80: mol_type = other DNA
cacagacgccacagccatgaccttacacccaggaatgatcatgttatctaaaaagagaataataatacccagcctaaaaa

SEQ ID NO: 155800 - DNA, 80 bp, synthetic construct
  source 1..80: mol_type = other DNA
ctcagcagccttccacaactcaaaaccaagatgctcaagttcttacccaccaaataatgtatgtgccaccaggtggtcca

SEQ ID NO: 155801 - DNA, 80 bp, synthetic construct
  source 1..80: mol_type = other DNA
cccccccccgaagtccgtcactaaccacgtgactcctctcgcccaatcagacagtatatcgtgcatttcctgggcatggt

SEQ ID NO: 155802 - DNA, 80 bp, synthetic construct
  source 1..80: mol_type = other DNA
cagcagaaaacacaaagtaaaagtaagagtagcaccccccaaactgtttgaagacaagtggtacccccagtcagagctct

SEQ ID NO: 155803 - DNA, 80 bp, synthetic construct
  source 1..80: mol_type = other DNA
agcagggatgctaaacaccgcacaagcacttcaggcatgtcaaaattgcccaaaacccaaacactataatcagtgttgcc

SEQ ID NO: 155804 - DNA, 80 bp, synthetic construct
  source 1..80: mol_type = other DNA
cacactaggaaaaacaatacctcagaactcgaggagaagcactacattaaaaccagagaaaccatcaaaacagcaggacc

SEQ ID NO: 155805 - DNA, 80 bp, synthetic construct
  source 1..80: mol_type = other DNA
ctggttgttctcatccctgagcatcaattggcttacgctggtggtacaaaggccaatgttggatacacccatactcatcc

SEQ ID NO: 155806 - DNA, 80 bp, synthetic construct
  source 1..80: mol_type = other DNA
ataattacactaaaaatgaatggggaaatgtattcttttacaaatatttaaacaatgatgaactaacatatgttagcaag

SEQ ID NO: 155807 - DNA, 80 bp, synthetic construct
  source 1..80: mol_type = other DNA
ttatcaatgactacagaaataaggttaaaattacagattcactagaggtcctattccagggaccagtgtacaaggacctg

SEQ ID NO: 155808 - DNA, 80 bp, synthetic construct
  source 1..80: mol_type = other DNA
aggtcattgaagatgaacacagaaagaagaagacagccagaacagagcaaccaagagccaagcctgattcccctgccccc

SEQ ID NO: 155809 - DNA, 80 bp, synthetic construct
  source 1..80: mol_type = other DNA
gcgctctggtttagtgggggtggtcaaccttaccgatggaggaacggacactactgggtatgccacttgggacatagaca

SEQ ID NO: 155810 - DNA, 80 bp, synthetic construct
  source 1..80: mol_type = other DNA
tggagaggcaaatagacacattgcatatgaaccaggttaatgataatgacagagaagtgttgtttaacaacatattgtgg

SEQ ID NO: 155811 - DNA, 80 bp, synthetic construct
  source 1..80: mol_type = other DNA
tactctaaatggtaaccatattatctgttgattaggagaaaaaataattttttcgcacgaaatcgatcctaagtgaggtg

SEQ ID NO: 155812 - DNA, 80 bp, synthetic construct
  source 1..80: mol_type = other DNA
atgggtatatgggcaagaactttgtcactgtcttctatggtatacccgcatggaaaaatgcatcaattcccctcttttgt

SEQ ID NO: 155813 - DNA, 80 bp, synthetic construct
  source 1..80: mol_type = other DNA
taatcttctggctgggcgttatggttttactgggggcccgccgccgccgggtggtcctcctccgggcaccccgcaggtga

SEQ ID NO: 155814 - DNA, 80 bp, synthetic construct
  source 1..80: mol_type = other DNA
ggcaacacacagtacagactgttgtctataatgctgggatgggtgtgggggttggaaaccttaccattttcccacatcaa

SEQ ID NO: 155815 - DNA, 80 bp, synthetic construct
  source 1..80: mol_type = other DNA
atactagtacaaaacatgaaatcatactaccaaaaatttaaagatgaaggctttccatcctcctggtatggaaacatggc

SEQ ID NO: 155816 - DNA, 80 bp, synthetic construct
  source 1..80: mol_type = other DNA
cgtctgaagcacgcaggattaaaaatttgtatattaaatgcaacaacatcatcaagggagggaagcgaaatgaaccagtt

SEQ ID NO: 155817 - DNA, 80 bp, synthetic construct
  source 1..80: mol_type = other DNA
atccatgggtacccccatataaacagtcatttagagtaagcttcaaacttggattcaaccaccaataaaaaagctaggcc

SEQ ID NO: 155818 - DNA, 80 bp, synthetic construct
  source 1..80: mol_type = other DNA
gcgcggcggcaaggcggcgccagcaagcgccgtgcacgtcgctgcctataaaagccaggtgcgtgtcgcccgcggcacac

SEQ ID NO: 155819 - DNA, 80 bp, synthetic construct
  source 1..80: mol_type = other DNA
cacatcagagtagcagcatcccactattcagcacaattaatgacattggacattgatccaaatccaatctcactagaaga

SEQ ID NO: 155820 - DNA, 80 bp, synthetic construct
  source 1..80: mol_type = other DNA
accaacaaccaggaaagaggcaatgttgggcacacatgtgatttgggacattggattacaatctagcgtgacactggtcg

SEQ ID NO: 155821 - DNA, 80 bp, synthetic construct
  source 1..80: mol_type = other DNA
ccgtctgggacgaaggagaagatgatggggagaggaggagagccccagaagccagagcgagaagggagacgacagacata

SEQ ID NO: 155822 - DNA, 80 bp, synthetic construct
  source 1..80: mol_type = other DNA
gcctccagtaatgacacctggtactatggtaacacatacaatcaaaaaatctcacaactagcagaaatagccagagacag

SEQ ID NO: 155823 - DNA, 80 bp, synthetic construct
  source 1..80: mol_type = other DNA
cgcgaccgccggtcccgcgagtccccgtcgtcgccgcaaaaggcccccgtccccgcaaacccgcgccacctccggccctc

SEQ ID NO: 155824 - DNA, 80 bp, synthetic construct
  source 1..80: mol_type = other DNA
ggtggcttcttagatgaggagcaggcataaaagtccaaacaggacacagagtaccaccaggagtagtcttagtctgctga

SEQ ID NO: 155825 - DNA, 80 bp, synthetic construct
  source 1..80: mol_type = other DNA
catacaagatgcaggggctgcgtactacggagcggtgtccatcaatgactttggcctccttgcagtccgggtggtcaacg

SEQ ID NO: 155826 - DNA, 80 bp, synthetic construct
  source 1..80: mol_type = other DNA
caattacagagaaattactcaagaacctgataaaactgattagtagcttggttataatcactagaaactacgaagacacc

SEQ ID NO: 155827 - DNA, 80 bp, synthetic construct
  source 1..80: mol_type = other DNA
cccctgggtccctaaacccactcccgagttccgggtctccttcaaactcggatttaaaccctaaataaaattttcaaggc

SEQ ID NO: 155828 - DNA, 80 bp, synthetic construct
  source 1..80: mol_type = other DNA
cgtgcaagcaacccaccttcccaataccccttggcggtggactccctcgcgatgtacaagtggagaacccgaaactactg

SEQ ID NO: 155829 - DNA, 80 bp, synthetic construct
  source 1..80: mol_type = other DNA
tcagagaaacatgctcgggcatgtttgatgcaattacatcaaaaacagtcaaatggctcgtccgtataatcagtgcttta

SEQ ID NO: 155830 - DNA, 80 bp, synthetic construct
  source 1..80: mol_type = other DNA
cagcaggggcggcaatatggtctcccaacagacaatcagagtgtatgtcgtgcacttcctgggcatggtctacgtcctaa

SEQ ID NO: 155831 - DNA, 80 bp, synthetic construct
  source 1..80: mol_type = other DNA
tccccgggcctacaagtgtttcagatcccacgcctccagaccggtgtctggcccggattaccctcccttggccgtgtttt

SEQ ID NO: 155832 - DNA, 80 bp, synthetic construct
  source 1..80: mol_type = other DNA
aaccaaccttgagaacagcaactgtacaaggtcctagcttagattttgctttgtcactcttgcgacgcaacattagacag

SEQ ID NO: 155833 - DNA, 80 bp, synthetic construct
  source 1..80: mol_type = other DNA
agggcagtaaaaccaacgaagctttaactaatgatataccaacacgagaagaatttatagccaaaaaaaacactaactac

SEQ ID NO: 155834 - DNA, 80 bp, synthetic construct
  source 1..80: mol_type = other DNA
ggaacccactctgggaaaatcgaagtttatttaagtctcaggtgtccaaatctattctttccatcaccagcacccaaaca

SEQ ID NO: 155835 - DNA, 80 bp, synthetic construct
  source 1..80: mol_type = other DNA
tggattcactccatcaaacacattcacttatagtatcatcttgacagtgattagaattagacagtcgtatcacaatgggc

SEQ ID NO: 155836 - DNA, 80 bp, synthetic construct
  source 1..80: mol_type = other DNA
actccaactatctcaacccaggcccagtacttcacaacagagcctacccaacaccaccagctcagaaccagtacactccc

SEQ ID NO: 155837 - DNA, 80 bp, synthetic construct
  source 1..80: mol_type = other DNA
gaccaaagagctatgactaacatacacagtgcatatggagtagcagacaaccacacatttgaacataaaacaggaatatt

SEQ ID NO: 155838 - DNA, 80 bp, synthetic construct
  source 1..80: mol_type = other DNA
cctagaactcataagatactttagatgctccttcaaattctatagagaccaagaaacagactatatagtacactacagca

SEQ ID NO: 155839 - DNA, 80 bp, synthetic construct
  source 1..80: mol_type = other DNA
aagcctgaccacttacgggtttggacaccaaaataaggcagtatacgtggcaggatacaagattatgaactaccacctgg

SEQ ID NO: 155840 - DNA, 80 bp, synthetic construct
  source 1..80: mol_type = other DNA
tatcaaacaccaattatagaaggtgtgttaaggatgactttactgagggtgggtacatttgtgctttttatcaaacagca

SEQ ID NO: 155841 - DNA, 80 bp, synthetic construct
  source 1..80: mol_type = other DNA
gctggctggcgctgggcgcggtgctgccgtcgcggtggctgcgctgcgcggcagggccggcgacagggacgacggcgtgg

SEQ ID NO: 155842 - DNA, 80 bp, synthetic construct
  source 1..80: mol_type = other DNA
gcggcgtctgcggcgtgctgcggccgacgctgcctgcgcatttcggcagtccgccacgcggtgtcccgcggtctttgtca

SEQ ID NO: 155843 - DNA, 80 bp, synthetic construct
  source 1..80: mol_type = other DNA
ccaactgtcagatcagctcgcaaaccggctccttcgtgggcatgctttcgcatgtgtcgccggcgcagacgtacacgctc

SEQ ID NO: 155844 - DNA, 80 bp, synthetic construct
  source 1..80: mol_type = other DNA
accaacaatgtaccgggccgggagctacagttctggcaggggtgcactaattttcattctagtttttgtggctgtggtga

SEQ ID NO: 155845 - DNA, 80 bp, synthetic construct
  source 1..80: mol_type = other DNA
aaagtgcttctgcaagatctgtcaactccaccgaaaaaacctgctatgagcgtgtggcttccacccatagacaatgttac

SEQ ID NO: 155846 - DNA, 80 bp, synthetic construct
  source 1..80: mol_type = other DNA
atgaaatacaagaatctgaatattacccaaaacacatacaatataatatattaattggagaagggccatgcactcctgga

SEQ ID NO: 155847 - DNA, 80 bp, synthetic construct
  source 1..80: mol_type = other DNA
caaccagaggatgttgtagaaaccagatatgtaattacagaccaaaccagagatgaaatgagtattgagagttttcttgg

SEQ ID NO: 155848 - DNA, 80 bp, synthetic construct
  source 1..80: mol_type = other DNA
ttgacatcgttaaacaattgggttcacaatcaacatcaccataaatttcccggatggaacttggacacatgttacagtct

SEQ ID NO: 155849 - DNA, 80 bp, synthetic construct
  source 1..80: mol_type = other DNA
cacgttggttttgaagccacagcagcggaaacaccgttacaaccaagcccacagcaccaacacgtggctacacacgccct

SEQ ID NO: 155850 - DNA, 80 bp, synthetic construct
  source 1..80: mol_type = other DNA
caggggatcgcagaataggtgcttgtggaagtcttgcggggtgcacatctgcagccaggcccttagcctggtgcatggca

SEQ ID NO: 155851 - DNA, 80 bp, synthetic construct
  source 1..80: mol_type = other DNA
ggtctcggccatcactctgttcttcttcttgctggccctacggatcccccagcgactgtgtcagcggctgcgcattcgcc

SEQ ID NO: 155852 - DNA, 80 bp, synthetic construct
  source 1..80: mol_type = other DNA
agtaaaacaaagctgtaccctagtgttttctatgacatcttccctggtgagaaagaaccagcagctttgcatgacaaaga

SEQ ID NO: 155853 - DNA, 80 bp, synthetic construct
  source 1..80: mol_type = other DNA
atcgcggtcagagtccagtgttgagtccttcttcgcacgcggtgcgtgtgttaccataatgacagtggacaattcggcct

SEQ ID NO: 155854 - DNA, 80 bp, synthetic construct
  source 1..80: mol_type = other DNA
actagacagtgttttcaaacacacactgcttggtgaaatattgaattattatgcccattggtcaggcagtgttaaactaa

SEQ ID NO: 155855 - DNA, 80 bp, synthetic construct
  source 1..80: mol_type = other DNA
atgtaccaagaataaaaagtgcgtctacgaccaaagcggtgtgtggacgctcgtcctctgtcttctccggttttttttta

SEQ ID NO: 155856 - DNA, 80 bp, synthetic construct
  source 1..80: mol_type = other DNA
tacaaatatcaacttgacatggaggcaattgctaaggaaggcactaagtatggattaacaataacacctgctgataaatc

SEQ ID NO: 155857 - DNA, 80 bp, synthetic construct
  source 1..80: mol_type = other DNA
gcacgctccaagttaccatcagtaacaagttgccactcaccattaactagcctctccactttcgctttttcgccatcgac

SEQ ID NO: 155858 - DNA, 80 bp, synthetic construct
  source 1..80: mol_type = other DNA
actgttcgccgccgccgacgaagaccagtgagtagaaagcgccgctacaggcgcagacgcagacgaaggggcagacggac

SEQ ID NO: 155859 - DNA, 80 bp, synthetic construct
  source 1..80: mol_type = other DNA
aaagaaactggttctcagacagtggcagcctgcctttatcagaaaatgcttcataataggctacatgcccctcatatact

SEQ ID NO: 155860 - DNA, 80 bp, synthetic construct
  source 1..80: mol_type = other DNA
tataaagacaacacccccaccacccgctatagcggacttgctccgatctattgacagcgatcaggtgcgagagtattgca

SEQ ID NO: 155861 - DNA, 80 bp, synthetic construct
  source 1..80: mol_type = other DNA
caggcgctgagctgagaaacccctggctcagatcaggcacacagagcccttgcataggattctctgtgctaaataactcc

SEQ ID NO: 155862 - DNA, 80 bp, synthetic construct
  source 1..80: mol_type = other DNA
tcgcgttggaaaacattagcgacatttacctggtgagcaatcagacatgcgacggctttagcctggcctccttaaattca

SEQ ID NO: 155863 - DNA, 80 bp, synthetic construct
  source 1..80: mol_type = other DNA
gccagacttcgccataaggcctttatcttcttgccattggatagtgtaaggggttgccataggcttcgggctccatttta

SEQ ID NO: 155864 - DNA, 80 bp, synthetic construct
  source 1..80: mol_type = other DNA
tgtgatccagaaacattctggtcgaaaatccctgtgatgctagacggagaatgcataatggcttttgattatacaaacta

SEQ ID NO: 155865 - DNA, 80 bp, synthetic construct
  source 1..80: mol_type = other DNA
gcgattgcggcgtgtttcgtccggcgctttgtgcgtttcggcagtgcggcacgcggtctccgtcgtttcgccagtacgac

SEQ ID NO: 155866 - DNA, 80 bp, synthetic construct
  source 1..80: mol_type = other DNA
aaatacaatacctattacagtttccattagtcctatgtttgctgagttttctggtgcacgagcacggaatcaaggtttgc

SEQ ID NO: 155867 - DNA, 80 bp, synthetic construct
  source 1..80: mol_type = other DNA
acttagtggagatgtgccaggttgatacactcatcccagtcaataatacagaaggtaatgtgagatctgcaaacatgtat

SEQ ID NO: 155868 - DNA, 80 bp, synthetic construct
  source 1..80: mol_type = other DNA
cttctcatgattggtatgaaattcaagaatcagaatactacccaaaacacatccaatacaatattttaattggagaggga

SEQ ID NO: 155869 - DNA, 80 bp, synthetic construct
  source 1..80: mol_type = other DNA
tcatcgtctggggtgtagaattgaaccgcgtccgaaataacaagcgggctacctgttgggtggtgattttttggatacta

SEQ ID NO: 155870 - DNA, 80 bp, synthetic construct
  source 1..80: mol_type = other DNA
tgtttgtcggcatgtcctgtgaagctggaatctcatcagagaacacaatgttggactgaatgcagtaatctcccccgctc

SEQ ID NO: 155871 - DNA, 80 bp, synthetic construct
  source 1..80: mol_type = other DNA
accggggcttggcgacccttccacgactgctgttgtcatctcggctcctccgtcttctcccggccacgggcggctaagtc

SEQ ID NO: 155872 - DNA, 80 bp, synthetic construct
  source 1..80: mol_type = other DNA
ggcgtggagatggtggtggcgccgccgcccccagaggcggtggaccaggaggagatggaggagactacgaacgcgaagac

SEQ ID NO: 155873 - DNA, 80 bp, synthetic construct
  source 1..80: mol_type = other DNA
gtgagagccctccttcctctgccggctgtgccccaagaggtggtcgagcgtaacccatggcctactggggctggtggcgc

SEQ ID NO: 155874 - DNA, 80 bp, synthetic construct
  source 1..80: mol_type = other DNA
ggacggccatcctccctctcatcgcaataataaaacaccagcagcgcacacgacgcgatcacggtgacccccatgactag

SEQ ID NO: 155875 - DNA, 80 bp, synthetic construct
  source 1..80: mol_type = other DNA
agacccttgtctggcagtttgactccctcctagcatatgactatgtggccttcagcaggttcccagaggagtttgggtat

SEQ ID NO: 155876 - DNA, 80 bp, synthetic construct
  source 1..80: mol_type = other DNA
gtttcttggtaaaatttacagacagaaaaggaaagtgccactgtacggcctgccagctccaaagaaaaaaccacctactg

SEQ ID NO: 155877 - DNA, 80 bp, synthetic construct
  source 1..80: mol_type = other DNA
ccggtgtttactattgctcatcacgcaacaagcactatccaattaccattactagaccaacttttcaatggatggaagct

SEQ ID NO: 155878 - DNA, 80 bp, synthetic construct
  source 1..80: mol_type = other DNA
attttaactggtcatcaaccacagctccccaaaatatggtccacagaaatatagttaccttggatcaattcccaaaccta

SEQ ID NO: 155879 - DNA, 80 bp, synthetic construct
  source 1..80: mol_type = other DNA
tcagcacatggtaatgagagacataatacagaccggaccgtttagctacaaggacgagagcaaaaactgtgtgcttacta

SEQ ID NO: 155880 - DNA, 80 bp, synthetic construct
  source 1..80: mol_type = other DNA
cgctgcgcgggaccgggaggcttttgcgctgcggagacgcgggtgttgattgcagcgtggacggtggtgtggacggaggc

SEQ ID NO: 155881 - DNA, 80 bp, synthetic construct
  source 1..80: mol_type = other DNA
taactacgagcacattagtaagggggaggtcgcctctaaattcacaaccaccacgacagcagaggaacatggcgtgcagg

SEQ ID NO: 155882 - DNA, 80 bp, synthetic construct
  source 1..80: mol_type = other DNA
ccggtataataaatttaagcaacacacccactgcgcgaatgattcgctatgatttccctaccagaacaggacagtgtggt

SEQ ID NO: 155883 - DNA, 80 bp, synthetic construct
  source 1..80: mol_type = other DNA
ccaaatttcgatggggccaaccttacaccaacatctgctagcagggccaacattaccacagcaggatgcttcgggcaaca

SEQ ID NO: 155884 - DNA, 80 bp, synthetic construct
  source 1..80: mol_type = other DNA
ctctgaatttagagaacaccaggaggaataccatggacatgtacagagtgaggttgagtgacagcgccaacctgagtgat

SEQ ID NO: 155885 - DNA, 80 bp, synthetic construct
  source 1..80: mol_type = other DNA
attggaagagggctactcgcagtcccgaggagaattaggcaagggctcgagctcgcgcttaactagggaaatacagggac

SEQ ID NO: 155886 - DNA, 80 bp, synthetic construct
  source 1..80: mol_type = other DNA
tgggaggataccacacaaccaacactgaccagacaaaattatttgcctcatggactattagtgcacgacgcatggttcaa

SEQ ID NO: 155887 - DNA, 80 bp, synthetic construct
  source 1..80: mol_type = other DNA
taaatttggggcacccaaactgtttgaagacaagtggtacccccagaacgagctctgtgatgtaactcttgtaactgtac

SEQ ID NO: 155888 - DNA, 80 bp, synthetic construct
  source 1..80: mol_type = other DNA
cactattcacagacaagtggtactttcaaaaggacttatgcaaagcaccgctgctaaccgtcggttgcagtatagggaac

SEQ ID NO: 155889 - DNA, 80 bp, synthetic construct
  source 1..80: mol_type = other DNA
gcaagtactgtttctagaaaaaatagaaccagctcaggaagaacatgagaaataccatagcaatgttaaagagctacagc

SEQ ID NO: 155890 - DNA, 80 bp, synthetic construct
  source 1..80: mol_type = other DNA
gctacgaagactatgttcagagaacactaggcccataccaagacatagaaacagtaggtatagtatgctttataagcccc

SEQ ID NO: 155891 - DNA, 80 bp, synthetic construct
  source 1..80: mol_type = other DNA
atggcatattctagcagccgcctgcttgttgcactcctacttataagtatctatggaattgtgtgtaaacaatatattac

SEQ ID NO: 155892 - DNA, 80 bp, synthetic construct
  source 1..80: mol_type = other DNA
tttattatcgggtacgaccctataattatctgtggcataaacaggaccacctttaactacactacacactcagaagactt

SEQ ID NO: 155893 - DNA, 80 bp, synthetic construct
  source 1..80: mol_type = other DNA
ttctatggcttatgacataacaaccggagacaaaaacccgaacaaattggttagattagcaacccaccaatggactccta

SEQ ID NO: 155894 - DNA, 80 bp, synthetic construct
  source 1..80: mol_type = other DNA
ctccttagtgcttccaaagacccgaaagtcatagagttctgtgagaaagagggatggatcaaacagtcaaaatactcaaa

SEQ ID NO: 155895 - DNA, 80 bp, synthetic construct
  source 1..80: mol_type = other DNA
accccgctgtaacccggaagtaggccccgacacgtgactacccacgtggtgcacacgtcacagccgccattttgttatac

SEQ ID NO: 155896 - DNA, 80 bp, synthetic construct
  source 1..80: mol_type = other DNA
gagaagcaagttgaaaatctcagagcagctgacaccaacacccaggaaaaaatcaagtgtgagatagatactctacatga

SEQ ID NO: 155897 - DNA, 80 bp, synthetic construct
  source 1..80: mol_type = other DNA
taccatgagattctcccttcagatactgtttgaagagcacttgaggggtctcaactactggtcttactctaacacagacc

SEQ ID NO: 155898 - DNA, 80 bp, synthetic construct
  source 1..80: mol_type = other DNA
aatacagcttctaaccccagtgtcttttaccaaccagggaatggttttccgcgattcaccatacccttcactggtttagg

SEQ ID NO: 155899 - DNA, 80 bp, synthetic construct
  source 1..80: mol_type = other DNA
caagtggtgcggtctctgactgctgcaaatacaacacctagcacacatcgcttagggacaggtcaggttccagcactcca

SEQ ID NO: 155900 - DNA, 80 bp, synthetic construct
  source 1..80: mol_type = other DNA
tttaatctacaaggaagcccaccgccggacaatgactccccgcagcacccgccggtcctgagggccctgccggcaccgag

SEQ ID NO: 155901 - DNA, 80 bp, synthetic construct
  source 1..80: mol_type = other DNA
atgcacctttaacagaaaaagccccctggggggcaaccttcttacaggacccagtctacacccgggagccgccatgctat

SEQ ID NO: 155902 - DNA, 80 bp, synthetic construct
  source 1..80: mol_type = other DNA
agggttttgccggtaacgtagagtggtatacacccacgtcgctaggtcccttaattgcgtggtcataatggacttcataa

SEQ ID NO: 155903 - DNA, 80 bp, synthetic construct
  source 1..80: mol_type = other DNA
acgggaattccaataagtcaagctcttatattcccacaccagtggatcaacttgcgcacaaacaattgcgctacggtgat

SEQ ID NO: 155904 - DNA, 80 bp, synthetic construct
  source 1..80: mol_type = other DNA
gacgccggagacctagacgacctgttcgccgccgtcgaagaagagcaacagtaaggaggcggaggtggagtggcagacgt

SEQ ID NO: 155905 - DNA, 80 bp, synthetic construct
  source 1..80: mol_type = other DNA
tagacctttcatctgtgaagatccagaaggcatggaagccacattagtaatacactctaataatttcacaaacaccatat

SEQ ID NO: 155906 - DNA, 80 bp, synthetic construct
  source 1..80: mol_type = other DNA
tctactcaaccaccctcgtgggaacaccgaactccgcacggacacccagagcctccgagccctccacatcaggttccacc

SEQ ID NO: 155907 - DNA, 80 bp, synthetic construct
  source 1..80: mol_type = other DNA
cgggagccatgagacagggaacatcgcgacagagggatccaccatcaactttaccaacataaattactacaaagactcgt

SEQ ID NO: 155908 - DNA, 80 bp, synthetic construct
  source 1..80: mol_type = other DNA
gattcgtgcggtttccagtatttatcacggcttcccgccacaggtaaaagttaacacttagggtcagcagcttggtcagg

SEQ ID NO: 155909 - DNA, 80 bp, synthetic construct
  source 1..80: mol_type = other DNA
attatctaggtttgatagtctgaaggctgggcagagaatgtttgtaatttttattcaccttctttaccccccacgagtat

SEQ ID NO: 155910 - DNA, 80 bp, synthetic construct
  source 1..80: mol_type = other DNA
cggagaactacggcgcggcggcacggcctttatagacactatcagcgttgacgtcagacgatccgatgaacgtcgttttt

SEQ ID NO: 155911 - DNA, 80 bp, synthetic construct
  source 1..80: mol_type = other DNA
gccaccggtggctggatttattcatttaacttgtttaaatatagtatacaatttgtttagaattagtataatataaaaaa

SEQ ID NO: 155912 - DNA, 80 bp, synthetic construct
  source 1..80: mol_type = other DNA
gattgattctaaatcaccagttaacgcgtcgatccagtgggttcacagtaaatatacaaaccctcaggccgtcaatgtct

SEQ ID NO: 155913 - DNA, 80 bp, synthetic construct
  source 1..80: mol_type = other DNA
tctaaacacaagatactagtaaaaagctataaaactaaacccaaaggaaagcccactgtaaaagtaactataaaaccccc

SEQ ID NO: 155914 - DNA, 80 bp, synthetic construct
  source 1..80: mol_type = other DNA
cgccgttgtattcctactccatctccagacaaggcagatctgcgagtggaatttccttcgttatctccgtgtgtcggcat

SEQ ID NO: 155915 - DNA, 80 bp, synthetic construct
  source 1..80: mol_type = other DNA
gcggcccatagaggacctcgcagcgtacaagcggttgacccgaaatacaataccccagaagtcacatggcactcgtggga

SEQ ID NO: 155916 - DNA, 80 bp, synthetic construct
  source 1..80: mol_type = other DNA
gctaaagagaagtatgaatttgtccagaaacttaagcaattgcctgtaattgagagtcagattaacacaattgagcatag

SEQ ID NO: 155917 - DNA, 80 bp, synthetic construct
  source 1..80: mol_type = other DNA
ttgaggttggtcgaacactaaacctaccgccttactcatatttgcatcacaggtggatagataatttcatttaattaagc

SEQ ID NO: 155918 - DNA, 80 bp, synthetic construct
  source 1..80: mol_type = other DNA
caaactcactatgacaacaatttatttaacaaaatagaactgtacaacacttttcaaaccatagcccaacttaaagacac

SEQ ID NO: 155919 - DNA, 80 bp, synthetic construct
  source 1..80: mol_type = other DNA
attacagctggtggtgatgaacatgtggctttcattgacctcagaaactatgcttcacttggtgaacatcagggaatctc

SEQ ID NO: 155920 - DNA, 80 bp, synthetic construct
  source 1..80: mol_type = other DNA
atgctagaattatttacttacctactggaaaagccagaacttttggtaaccaagggtgaggatatgaaagactacatgga

SEQ ID NO: 155921 - DNA, 80 bp, synthetic construct
  source 1..80: mol_type = other DNA
ctccgaaccagaatttaaagtgacttttaagcttggttttaaataaacaaggccgtgggaatttcacttgtcggtgtcta

SEQ ID NO: 155922 - DNA, 80 bp, synthetic construct
  source 1..80: mol_type = other DNA
gccagcgtgacgcggtgcaggttctgaatctgctccagaagatactcgatggggtcgtggctcagcttgatggtgtagga

SEQ ID NO: 155923 - DNA, 80 bp, synthetic construct
  source 1..80: mol_type = other DNA
tgcattgtaaccacatcaaatggaaaattcactggtttaggtatttatgacagaacactcataataccaacacatgctga

SEQ ID NO: 155924 - DNA, 80 bp, synthetic construct
  source 1..80: mol_type = other DNA
gagcacataatatcccaaatggcatatataactggctccaccacaggacatctcacacactgtgcaggctaccagcatga

SEQ ID NO: 155925 - DNA, 80 bp, synthetic construct
  source 1..80: mol_type = other DNA
cccgcccgacactgttgccaaggccctgaagatcaattggcctggcaccattgttgagcacctctgggcctacaggaaac

SEQ ID NO: 155926 - DNA, 80 bp, synthetic construct
  source 1..80: mol_type = other DNA
tgaaccaaggcaccccaaccaaggaccagtctatattttcgctgagcttgagcccagcctccgatgagaggttgtcgcgc

SEQ ID NO: 155927 - DNA, 80 bp, synthetic construct
  source 1..80: mol_type = other DNA
gccacgtgctgaaagtccaccccgaggccgcacatgtgggcattggtgcaggtcgggaggaaaacgtagtaaaagatctt

SEQ ID NO: 155928 - DNA, 80 bp, synthetic construct
  source 1..80: mol_type = other DNA
gacattcagaaattagtgggagtgctaaattgggcatctcaactttttccaggaattaagacaaggcacatatgcagatt

SEQ ID NO: 155929 - DNA, 80 bp, synthetic construct
  source 1..80: mol_type = other DNA
accagctagaccttgccagatacaagggctgcaaacttacattctacagaacaaaagacacagactacatagctcaatat

SEQ ID NO: 155930 - DNA, 80 bp, synthetic construct
  source 1..80: mol_type = other DNA
ggagaaggcccatgtgaaccaggtgactgtggagggaaattactgtgcaaacatggagtcatagggatagtgactgctgg

SEQ ID NO: 155931 - DNA, 80 bp, synthetic construct
  source 1..80: mol_type = other DNA
accaacccacgccaatccaggcgagacaatcgttatctctggcaaggaagttagaatcattgatgccaaaagactagtgg

SEQ ID NO: 155932 - DNA, 80 bp, synthetic construct
  source 1..80: mol_type = other DNA
gccctggagaaggaggcgccgctggaggcttcgcagacctcgcagacgaagagctacttaccgccgccgtcgaggccgcc

SEQ ID NO: 155933 - DNA, 80 bp, synthetic construct
  source 1..80: mol_type = other DNA
cctctgtaggtacctaggagtttcttttaaggcatacagacaccccaaagtagactacataatatgcttcagcagagtac

SEQ ID NO: 155934 - DNA, 80 bp, synthetic construct
  source 1..80: mol_type = other DNA
acggaaaatggattgacggacggggcaaaatagaaccctactggcaggtcagatggaggcccgaaatgttatttcaagag

SEQ ID NO: 155935 - DNA, 80 bp, synthetic construct
  source 1..80: mol_type = other DNA
ttctgatacacgccagctccttcaacaacgccgaggcaactggaacgccccttttccaattcaagcagagtgacccgttc

SEQ ID NO: 155936 - DNA, 80 bp, synthetic construct
  source 1..80: mol_type = other DNA
acccaacgcaaccaacgatgcaaacggtgtgcaggcagctgtatacaatgcaggcatgggtgttgcagtgggcaacctaa

SEQ ID NO: 155937 - DNA, 80 bp, synthetic construct
  source 1..80: mol_type = other DNA
gtggcagttgtcatacatggtgaacctagagctggaaagtccatgacaacaaatttcctagctagaatgataaccaatga

SEQ ID NO: 155938 - DNA, 80 bp, synthetic construct
  source 1..80: mol_type = other DNA
catccgccacccccgtccagcaggctcaggccgccgcatccgctgggaccggggccttggcatcatcagcgccgtccacg

SEQ ID NO: 155939 - DNA, 80 bp, synthetic construct
  source 1..80: mol_type = other DNA
ccgaaaacaccgccgtcgccgccccgaaacaccgtacaaacaccgtagagacacccgccgccaacctccgagcgctcgca

SEQ ID NO: 155940 - DNA, 80 bp, synthetic construct
  source 1..80: mol_type = other DNA
aaaaaggcgccaaaaaaccgtcggcggtggggccgcgcgctgcgcgcgcggcccccgagggaggcacagcctcgcccgcc

SEQ ID NO: 155941 - DNA, 80 bp, synthetic construct
  source 1..80: mol_type = other DNA
atggcctactcctactggtggcgccgccggaggtggccgtggagaggcagatggaggcgctggaggcgccgcagacgagt

SEQ ID NO: 155942 - DNA, 80 bp, synthetic construct
  source 1..80: mol_type = other DNA
tgccaattacagtgacaatcgctccgatgtgtgctgagtataatgggctgcggttggctggacaccaagggctcccaact

SEQ ID NO: 155943 - DNA, 80 bp, synthetic construct
  source 1..80: mol_type = other DNA
gggggcatgactactaccaagtttactctgagaatcctctacgacgagtttaccaggtttatgaactattggactgttag

SEQ ID NO: 155944 - DNA, 80 bp, synthetic construct
  source 1..80: mol_type = other DNA
ctgacatcatagcattttctaaattaatgagatgctggcttttaccaaatctctcaccattggttcggttttgacgaaga

SEQ ID NO: 155945 - DNA, 80 bp, synthetic construct
  source 1..80: mol_type = other DNA
gtgttaggtttcacccgaggccgaaactctgattgtcgttatccgcacaactactggacaaagcttagtaacatcttacg

SEQ ID NO: 155946 - DNA, 80 bp, synthetic construct
  source 1..80: mol_type = other DNA
tgccgcaacgccgcctcgatcagcacacgcggctccgagaagcgcagcgattgacaccatgacgtgtacacgtagtagaa

SEQ ID NO: 155947 - DNA, 80 bp, synthetic construct
  source 1..80: mol_type = other DNA
tctccgccgccggaggtggcggagacggagacgctggcccagaaggcgccgctggaggtggaggagacgacgtagacgac

SEQ ID NO: 155948 - DNA, 80 bp, synthetic construct
  source 1..80: mol_type = other DNA
gtcaaaacgacattaccgcgatccgctcccctcttttttctttttctcattcacgtgtattcttgatgataatgtaccat

SEQ ID NO: 155949 - DNA, 80 bp, synthetic construct
  source 1..80: mol_type = other DNA
ttacagacacgaggacactgactatatagtgtactactctagaaaggctccccttggaggtaaccttctaacagcaccca

SEQ ID NO: 155950 - DNA, 80 bp, synthetic construct
  source 1..80: mol_type = other DNA
caacaaaatgtaatgcatgacataacaatgtcaggcccttttagctacaaagatgaacttaaaaacacagtacttacatg

SEQ ID NO: 155951 - DNA, 80 bp, synthetic construct
  source 1..80: mol_type = other DNA
ccttacatgcacctgctataattaacttacaacaacagccagcaatatggacagcaaataatgcaaattctataagtact

SEQ ID NO: 155952 - DNA, 80 bp, synthetic construct
  source 1..80: mol_type = other DNA
ataggctttcctgggagtcttatgaaaaagctatgcaataccacccacatatacaaagatcaggtttatatggtggaggg

SEQ ID NO: 155953 - DNA, 80 bp, synthetic construct
  source 1..80: mol_type = other DNA
cggtagactaagccctgactatcctggaatatatatagaagtagtgtacaacccactactaggacaaggagaaggtaaca

SEQ ID NO: 155954 - DNA, 80 bp, synthetic construct
  source 1..80: mol_type = other DNA
ggaaatcccacctgtaggttgctgaaatacaactacccaactaaaccagggcaatgtggagctgtcatcggcagtactgg

SEQ ID NO: 155955 - DNA, 80 bp, synthetic construct
  source 1..80: mol_type = other DNA
ctgacgctacagccatgacactacacccaggcatgatgatgctagctaaaaagaaaatactaatccccagtcttaaaacc

SEQ ID NO: 155956 - DNA, 80 bp, synthetic construct
  source 1..80: mol_type = other DNA
ttgaatgggtaggaatcaaaatcagcaaattcatagactggctcaaagaaaaggtgttgccaacagttaaatcaaagaaa

SEQ ID NO: 155957 - DNA, 80 bp, synthetic construct
  source 1..80: mol_type = other DNA
cgcggctctgtcggtgccgcgggaggaacagaatgagcggagtcccgctgagcagatgccgcctcgtcccatggaaccgg

SEQ ID NO: 155958 - DNA, 80 bp, synthetic construct
  source 1..80: mol_type = other DNA
catgtatgaactacaaaaattaaatagctgggatatctttggcaactggtttgatttaacctcctgggtcaagtatattc

SEQ ID NO: 155959 - DNA, 80 bp, synthetic construct
  source 1..80: mol_type = other DNA
tttgtcatgcaagttccttccattatatgcaagtgaggcaaagagaataaaaattttacacaacaaatgtgatactataa

SEQ ID NO: 155960 - DNA, 80 bp, synthetic construct
  source 1..80: mol_type = other DNA
cccacgtgagtcgtcacgtgaccgctacgtcatcgccgccattttaagtcacaaaatggcggacttccttcctctttttt

SEQ ID NO: 155961 - DNA, 80 bp, synthetic construct
  source 1..80: mol_type = other DNA
catatgcaccagaggcctccacaacgatcccaatcacagtcacaatagcaccaatgtgcacggagttcaacgggttacgt

SEQ ID NO: 155962 - DNA, 80 bp, synthetic construct
  source 1..80: mol_type = other DNA
gggttgcgctgggaacggaggtgctgcttgcggcggagactactgtgcgggacaggagccgcgcgggactggtcgtggtg

SEQ ID NO: 155963 - DNA, 80 bp, synthetic construct
  source 1..80: mol_type = other DNA
acattgatatgaaacccacagagaacatgcttgtagcagtagaccactatgctggacaactgatgtcattagacattcct

SEQ ID NO: 155964 - DNA, 80 bp, synthetic construct
  source 1..80: mol_type = other DNA
gcattatcagagggttcgtgccgctgttccagtgcagcagaactgcctaccacaggaactttgtagaccacatggacgac

SEQ ID NO: 155965 - DNA, 80 bp, synthetic construct
  source 1..80: mol_type = other DNA
actggtgcactaaaaatgacagtacttggagagacgccccccaaaaactaccagtagtagatgtacccctctgggcagca

SEQ ID NO: 155966 - DNA, 80 bp, synthetic construct
  source 1..80: mol_type = other DNA
cgtgctcatggaccgggtgcgcaaacggtatctgcgtcaggagctcagggatctgggtcacagggtgcagacttactgcg

SEQ ID NO: 155967 - DNA, 80 bp, synthetic construct
  source 1..80: mol_type = other DNA
aacagcgcgaccattatactgccatggatgaattgtgctcccatggactttgcactacgacacaacaactggacgatcgg

SEQ ID NO: 155968 - DNA, 80 bp, synthetic construct
  source 1..80: mol_type = other DNA
tgccatgagtcaccatgggcctttctaaagggcaaggtatgcaaatggcttggtatcaacccacctgcaaagagacaggg

SEQ ID NO: 155969 - DNA, 80 bp, synthetic construct
  source 1..80: mol_type = other DNA
tggtgaagcaggttacgcagatccagttgggcgcgcacaaagcctagcgggtgttcgcggtaggcgtcgggcacgatgaa

SEQ ID NO: 155970 - DNA, 80 bp, synthetic construct
  source 1..80: mol_type = other DNA
caatttctcaagagagagcattaactgaagggcttgaggatgtgttagaagaagttatagttgataaagcaaaacagact

SEQ ID NO: 155971 - DNA, 80 bp, synthetic construct
  source 1..80: mol_type = other DNA
cagagctttggggggtcctttagcactaccacctggagcctaaaagtactgtttgatgagtatcagaagttccacaactt

SEQ ID NO: 155972 - DNA, 80 bp, synthetic construct
  source 1..80: mol_type = other DNA
cgtaacgtcacagccgccattttgagtcagcgcgggggggggtcacgtaaggttaaaggtcaccatcttccgggctgtca

SEQ ID NO: 155973 - DNA, 80 bp, synthetic construct
  source 1..80: mol_type = other DNA
tgacctgcggcaaggccctaattttgcagaacaaaagaacaaaggctagttattctattaacaccgtggtgcaacaactg

SEQ ID NO: 155974 - DNA, 80 bp, synthetic construct
  source 1..80: mol_type = other DNA
acagttatctagaacaacaatggttagataaattcatatgaataatataataaattgactgtgtaggttcaatatcttat

SEQ ID NO: 155975 - DNA, 80 bp, synthetic construct
  source 1..80: mol_type = other DNA
tatgttctagctaaaataccagccccgaaactatttgaagaccactggcacactcagccatacttatgcaaagttcctct

SEQ ID NO: 155976 - DNA, 80 bp, synthetic construct
  source 1..80: mol_type = other DNA
caaattgttgacccatactccatgggcccccaattctcgttccacaactgggactacagacatggcctttttggccaaga

SEQ ID NO: 155977 - DNA, 80 bp, synthetic construct
  source 1..80: mol_type = other DNA
caattcctccaagccaaaaattcaaaattaaaaaattttcgggtctatttcagagaaggcagagatcagttgtggaaagg

SEQ ID NO: 155978 - DNA, 80 bp, synthetic construct
  source 1..80: mol_type = other DNA
aatactccatgcaaatcaaagctttaccccagcgtattttatgatgttttcccaggcgagaaacagccagcagccctatc

SEQ ID NO: 155979 - DNA, 80 bp, synthetic construct
  source 1..80: mol_type = other DNA
aatgatgactatgacgaaatcgcgctgaatataacagaggcttttgatgcatgggataacacagtgacagaacaggcagt

SEQ ID NO: 155980 - DNA, 80 bp, synthetic construct
  source 1..80: mol_type = other DNA
aaacaaaaatccctgagagaagagtggtggctcaaggtccagaagaagaatttggaatgtctattatcagaaacaatact

SEQ ID NO: 155981 - DNA, 80 bp, synthetic construct
  source 1..80: mol_type = other DNA
ctaacagacatgaatgatacagacacagaaatcacactcctatggctagaccagaatgagaaatttagggatattagaag

SEQ ID NO: 155982 - DNA, 80 bp, synthetic construct
  source 1..80: mol_type = other DNA
tccccttggcagtggatcaagaaaaaggcgtgtgacattcttgagatcccttacgtcatgagacaaggtgacagttggtt

SEQ ID NO: 155983 - DNA, 80 bp, synthetic construct
  source 1..80: mol_type = other DNA
acggcgctggaggcttcgcagatctcgcagacgaggagctgctttccgccgccgtaaacgtcgcagaagagtaagaaaaa

SEQ ID NO: 155984 - DNA, 80 bp, synthetic construct
  source 1..80: mol_type = other DNA
ttgcagcagcccaacaaaggaggacaattaggtgttggaactgtgggaaggagggacactcggcgaaacagtgccgagca

SEQ ID NO: 155985 - DNA, 80 bp, synthetic construct
  source 1..80: mol_type = other DNA
gctctcagacgtatgctcctccaaccaggccctggcgagcttgctgttcccaggccaaagagacccttactatttgtacc

SEQ ID NO: 155986 - DNA, 80 bp, synthetic construct
  source 1..80: mol_type = other DNA
tgtagatcttcttagcgcttccaaagatccaaaagtcatagaattctgtgagaaagagggatggatcaaacaatccaagc

SEQ ID NO: 155987 - DNA, 80 bp, synthetic construct
  source 1..80: mol_type = other DNA
atataacaatttctatgatggctactcacatgacaacaaggacacagtctatggaataaatgtgctgaatcacatgggta

SEQ ID NO: 155988 - DNA, 80 bp, synthetic construct
  source 1..80: mol_type = other DNA
gagctcctcctccgaaagctccgagagcagcgagcactccagttccagctgcagcacttcgcagtccaactcgccaagac

SEQ ID NO: 155989 - DNA, 80 bp, synthetic construct
  source 1..80: mol_type = other DNA
cgagcgtgagaggagctggctctctagcttttttcagtctcacagagctttttgtgggtgtaatgatgctatctatcatc

SEQ ID NO: 155990 - DNA, 80 bp, synthetic construct
  source 1..80: mol_type = other DNA
tagaacaaatagaaaaaaatatgcaaaactacaacaaaaaactaaaacaagagttcccagcaatggtaggctcagcagca

SEQ ID NO: 155991 - DNA, 80 bp, synthetic construct
  source 1..80: mol_type = other DNA
attcacaagcacgtataaccccgctacagacactgccactggaagaacttttgcggcagttgactacctactgggatgcg

SEQ ID NO: 155992 - DNA, 80 bp, synthetic construct
  source 1..80: mol_type = other DNA
ctaatgttattagtatagcaggtatcatatatgtgatttacaaattgttttgcacattgcaagggccttactcaggagaa

SEQ ID NO: 155993 - DNA, 80 bp, synthetic construct
  source 1..80: mol_type = other DNA
aaagttatacaatgacaaaatagagggatatggctacgttcccataggctaccactttgcagacggcaaaatgccggacg

SEQ ID NO: 155994 - DNA, 80 bp, synthetic construct
  source 1..80: mol_type = other DNA
tactcggtactaaacacacttaatctcattttaacacttaacacaataaaaagaaaatgggagctcaagtgtcgacgcag

SEQ ID NO: 155995 - DNA, 80 bp, synthetic construct
  source 1..80: mol_type = other DNA
caaactcaatggagatgtaccgcatccccgtcaatgaccagggaggcaccacacccattttctgtatttcactctcccct

SEQ ID NO: 155996 - DNA, 80 bp, synthetic construct
  source 1..80: mol_type = other DNA
aacttcaccaactcaaacaacgggcatgctctaaaccaagtgtaccagataatgtatatccccccaggtgcccctacgcc

SEQ ID NO: 155997 - DNA, 80 bp, synthetic construct
  source 1..80: mol_type = other DNA
ttattgacaaggttgttaacaatgccctgctcctttcacaaccaactcgccctgcttctgcttctgacacgcctagcaca

SEQ ID NO: 155998 - DNA, 80 bp, synthetic construct
  source 1..80: mol_type = other DNA
aaattcaaaccgccgtcgggtgcgcgcctgctcgtcatcgccgcgcctcgtcggtcgatgaccccacggtgcttataacg

SEQ ID NO: 155999 - DNA, 80 bp, synthetic construct
  source 1..80: mol_type = other DNA
ccaaacagcacatatgactggcaaaactacagttcagaaacaaattataataacaccaaaaaaaaatgggatgaagccaa

SEQ ID NO: 156000 - DNA, 80 bp, synthetic construct
  source 1..80: mol_type = other DNA
ggagatgggttcacaagttctattagagaaacattagtatctgcatgtgatgtgtcagacaaactcactggaaaaatcat

SEQ ID NO: 156001 - DNA, 80 bp, synthetic construct
  source 1..80: mol_type = other DNA
cgtatgttccgatcacaatatcaattgctcctatgtgtgcagagtacaatggccttagaaatgcaataacccagggagtt

SEQ ID NO: 156002 - DNA, 80 bp, synthetic construct
  source 1..80: mol_type = other DNA
ttaaacacaactggcagtacagatcccatattttgcttaagtttgtcaccagcgtccgatcaaaggttgcagtacacaat

SEQ ID NO: 156003 - DNA, 80 bp, synthetic construct
  source 1..80: mol_type = other DNA
ccgggagcacagccaccgaccagtcgcaaggaggcaatgctcgggacgcacgtcatttgggacctgggcctacaatcctc

SEQ ID NO: 156004 - DNA, 80 bp, synthetic construct
  source 1..80: mol_type = other DNA
atagatttggataaacttaagatagttgcctatggtgatgatgtggtcatctcatacccagatatgctagatgcagcaca

SEQ ID NO: 156005 - DNA, 80 bp, synthetic construct
  source 1..80: mol_type = other DNA
aggacccttgttttagatgcatacaaaggcatagatctagataaacttaaggtaattgcatatggtgatgatttgattgt

SEQ ID NO: 156006 - DNA, 80 bp, synthetic construct
  source 1..80: mol_type = other DNA
ttctggtgtttcaggccgccaacgcccagaaggcctcgcgggtcatggatatgattagtgatatgtctcagcaactgtct

SEQ ID NO: 156007 - DNA, 80 bp, synthetic construct
  source 1..80: mol_type = other DNA
gggaccaaagaaccagcagtgttaaaccctaaagattccagattagaggtagatttagatacagctatattctctaagta

SEQ ID NO: 156008 - DNA, 80 bp, synthetic construct
  source 1..80: mol_type = other DNA
ctcaaatacaaaaagacaaaacacctataggtacagactactttaaaactaaagatggactatggggagacccaatattc

SEQ ID NO: 156009 - DNA, 80 bp, synthetic construct
  source 1..80: mol_type = other DNA
acggattgtgtcgcgccaccacctcggcgcgatgcgtgtaaaccgaaaagtgcagaaacacgctggtcggcgggtgcggt

SEQ ID NO: 156010 - DNA, 80 bp, synthetic construct
  source 1..80: mol_type = other DNA
ttgacctcccatacgtgacttatctaaaggatgagttgcgcgccccagaaaaaatcaaggccggcaaaaccaggataatt

SEQ ID NO: 156011 - DNA, 80 bp, synthetic construct
  source 1..80: mol_type = other DNA
tacgttcacaccaaggatgctatttacacatgtgctcacctaacaacacccaatgacaatacaatactactggcactgac

SEQ ID NO: 156012 - DNA, 80 bp, synthetic construct
  source 1..80: mol_type = other DNA
cacctactctctccccccggacccctctcactttgacggatacaaacaacaaggggttgtgatcatggatgacctcaatc

SEQ ID NO: 156013 - DNA, 80 bp, synthetic construct
  source 1..80: mol_type = other DNA
ggagtttttcacttacatcaggtttgacatggaggtgacgtttgtcatcactagttcccaagacactagcacgcaaacta

SEQ ID NO: 156014 - DNA, 80 bp, synthetic construct
  source 1..80: mol_type = other DNA
cctgttttcctcccctcccctttatcgcaacttagaagcttgagcaatcgcccaataggacatgaccactccatggttat

SEQ ID NO: 156015 - DNA, 80 bp, synthetic construct
  source 1..80: mol_type = other DNA
caccatcaccaccacgcatgcatctccctgtcttgcatgtgccagaccaatcaatgcaccctcttactcatcaaagcacc

SEQ ID NO: 156016 - DNA, 80 bp, synthetic construct
  source 1..80: mol_type = other DNA
acatcaattattttaaagatgctgcctctagcggagcttccaagctagaattttcacaggatccaagtaaattcactgat

SEQ ID NO: 156017 - DNA, 80 bp, synthetic construct
  source 1..80: mol_type = other DNA
ccaaatgatccagatagtccagaaccacggtccccgactgtattttataacattccacctatgccattacccccctcaca

SEQ ID NO: 156018 - DNA, 80 bp, synthetic construct
  source 1..80: mol_type = other DNA
acatactagtcaagttcaaccagaagatatggtagagaccaggtatgttgtcacagaccaaactagagatgaaatgagta

SEQ ID NO: 156019 - DNA, 80 bp, synthetic construct
  source 1..80: mol_type = other DNA
ctcacaaacagtgaacattgaacaaaatccagttgagaaatatactgaagcattgcttaatgaggtattggtcgtgccaa

SEQ ID NO: 156020 - DNA, 80 bp, synthetic construct
  source 1..80: mol_type = other DNA
atctgcctgaatacagcgtgctgagaaagcgctggttagacatgttctaatctggttaaaacaatgatatagacatttaa

SEQ ID NO: 156021 - DNA, 80 bp, synthetic construct
  source 1..80: mol_type = other DNA
gacccccctctgggaccgtttggacacccccgggggcccggcccggccaagagcgaagacgaggagtctgagcgtcgaga

SEQ ID NO: 156022 - DNA, 80 bp, synthetic construct
  source 1..80: mol_type = other DNA
agggtgtgtctagcctttcagaaccaagtgatgactgacatagccatgagcggaccgttcagctaccccgacgaactgaa

SEQ ID NO: 156023 - DNA, 80 bp, synthetic construct
  source 1..80: mol_type = other DNA
ggagtgtgtactggcaacattaaaataatgaactaccatctaatgtctcatgaggacactctcaaccttgtcacacctct

SEQ ID NO: 156024 - DNA, 80 bp, synthetic construct
  source 1..80: mol_type = other DNA
cacaaccagtggactttagctatcatcccagtggtccctctcaacaccagtggtgggacgactatggtaccaatcacagt

SEQ ID NO: 156025 - DNA, 80 bp, synthetic construct
  source 1..80: mol_type = other DNA
tgacaatgcaataaatgcttcttctggatctgttgttaaatattttaacataaattattacaaggatgctgctagttcag

SEQ ID NO: 156026 - DNA, 80 bp, synthetic construct
  source 1..80: mol_type = other DNA
ccagccaagaaggggagcaaaaagaaagcttacttttccccccagtcaagctcctcagacgagtccccccgtgggaagac

SEQ ID NO: 156027 - DNA, 80 bp, synthetic construct
  source 1..80: mol_type = other DNA
ttacacagaatggtggctacggatacaacaccctcaacaagatgggaaaaatttatgtcaggcatgtgaataagcaaaca

SEQ ID NO: 156028 - DNA, 80 bp, synthetic construct
  source 1..80: mol_type = other DNA
atgagttctacacgtccaacctcttctatataaattataacttcagtgacaacactcatttgctaacaaaacatataaga

SEQ ID NO: 156029 - DNA, 80 bp, synthetic construct
  source 1..80: mol_type = other DNA
cacggtgccaccaaggcctacccgtcctaccactctgccacccacaccactactcacggtactactttataacaccgaac

SEQ ID NO: 156030 - DNA, 80 bp, synthetic construct
  source 1..80: mol_type = other DNA
atcatctattgagaacttcctgtgtagggcggcatgcgtttacatcgcaacctacaaatcggccggcggtacccccacag

SEQ ID NO: 156031 - DNA, 80 bp, synthetic construct
  source 1..80: mol_type = other DNA
gcctactacatgttctatgatggttatgatgaaggaaggttagggagtttagaatatggtatttcagctactaatgacat

SEQ ID NO: 156032 - DNA, 80 bp, synthetic construct
  source 1..80: mol_type = other DNA
tggccagggtggcggatacaatcgccagtgggcctagcaactccaccagcattcctgctcttaccgcggtcgaaaccgtg

SEQ ID NO: 156033 - DNA, 80 bp, synthetic construct
  source 1..80: mol_type = other DNA
aaaaaaacaggataggtcagagctaattcagaaaatagttcacaatgccaagaatgtgttaacaaaagtaaaccaagaac

SEQ ID NO: 156034 - DNA, 80 bp, synthetic construct
  source 1..80: mol_type = other DNA
catttaagtcacagtacacaccgggcaccaccactgaagatgcaagaacattcagccccattgattacctgttcggatca

SEQ ID NO: 156035 - DNA, 80 bp, synthetic construct
  source 1..80: mol_type = other DNA
tgttgtgcaagcatggtgtcattggcattataacagctggtggtgatggacatgtagccttcacagatctaagaccttac

SEQ ID NO: 156036 - DNA, 80 bp, synthetic construct
  source 1..80: mol_type = other DNA
tgcattaactattatgattagaaattcaactgacactccaacagtccttgctaccttggcactccttggatgccacgggt

SEQ ID NO: 156037 - DNA, 80 bp, synthetic construct
  source 1..80: mol_type = other DNA
ttaccaaaaatgatggcaacaacctagcagtaaaacccacctggaccactcctaccactaactggtatgagtaccacgta

SEQ ID NO: 156038 - DNA, 80 bp, synthetic construct
  source 1..80: mol_type = other DNA
acaggccagtgtgggagggttctgtgttccaccggtaaaatctatggtatacatgtggagggaaatggaagacagggttt

SEQ ID NO: 156039 - DNA, 80 bp, synthetic construct
  source 1..80: mol_type = other DNA
cagaccaaaagagcttgagcaatggagagacagccaacacattcgagtcacagaacacaactgggcagacagccgtgcag

SEQ ID NO: 156040 - DNA, 80 bp, synthetic construct
  source 1..80: mol_type = other DNA
atgtctgcgttcccgggagcctgcatgacaacccgggagtacacgttaaacaggagaatcttctgcagcacctcctctgc

SEQ ID NO: 156041 - DNA, 80 bp, synthetic construct
  source 1..80: mol_type = other DNA
gaactttgccacccactcggacgatatgatagccaaaggaccgtgggggggggggcatgactactaccaagtttactctg

SEQ ID NO: 156042 - DNA, 80 bp, synthetic construct
  source 1..80: mol_type = other DNA
caattagggaatgcatttggggatgggttcaccagctccattagagaaactctggtatctgcctgtgatgtgtcagataa

SEQ ID NO: 156043 - DNA, 80 bp, synthetic construct
  source 1..80: mol_type = other DNA
gaagacaggtggtgtgcgggcgtctcgccggactatggcctcggcacgctcggcgtcgatggcgggtggctggaacaggc

SEQ ID NO: 156044 - DNA, 80 bp, synthetic construct
  source 1..80: mol_type = other DNA
tggactgggaccaaggtttggaggggtgtatacatccaatgtgaagataatgaatttccacttgatgacaccagaagatc

SEQ ID NO: 156045 - DNA, 80 bp, synthetic construct
  source 1..80: mol_type = other DNA
caaggaaagaaggccagaggaatgtggaaagatgagcgaggacaggtgtggaggttttgggctagctcttagtttctggg

SEQ ID NO: 156046 - DNA, 80 bp, synthetic construct
  source 1..80: mol_type = other DNA
caaaagtgcactggttcccttgggttccaccaacggcgtgcctgatacacagccgagcggtccagctcattccaaggaaa

SEQ ID NO: 156047 - DNA, 80 bp, synthetic construct
  source 1..80: mol_type = other DNA
cccaggatttacccccacgcccgtaattcacatacctggggaggtgcattccctgttagaattgtgcagggtagaaacta

SEQ ID NO: 156048 - DNA, 80 bp, synthetic construct
  source 1..80: mol_type = other DNA
gcaacaaagtatggctagacccccttaccaaaaaagacaacatatacactccaccacaaagcaaatgtttaatagctgac

SEQ ID NO: 156049 - DNA, 80 bp, synthetic construct
  source 1..80: mol_type = other DNA
cactgtccttactcaggaagaatattgtaaccatcacaacagagaaaggagagttcactggattgggaatatatgatcaa

SEQ ID NO: 156050 - DNA, 80 bp, synthetic construct
  source 1..80: mol_type = other DNA
agggacaactcttcctacagttccatctgacaatattgagactagaaccacttacatgcattatgatggtacagaaacaa

SEQ ID NO: 156051 - DNA, 80 bp, synthetic construct
  source 1..80: mol_type = other DNA
tggttccaagcgcaaaagctccccgtccccgcaagaggcctcgtcgccgccgcaagaggtgggttcccagcccaacctcc

SEQ ID NO: 156052 - DNA, 80 bp, synthetic construct
  source 1..80: mol_type = other DNA
tctttgcccccgatgtcggctgtcctgcaggccagctctgcgtacagcttcctatccttcctcagggaggccttgatgag

SEQ ID NO: 156053 - DNA, 80 bp, synthetic construct
  source 1..80: mol_type = other DNA
tacacctatgactgagcaaccacagaacaagctgcaaaacccagtggaagaatacattgaagacaccctaaaagaagtct

SEQ ID NO: 156054 - DNA, 80 bp, synthetic construct
  source 1..80: mol_type = other DNA
tcgagcagctagtcagaacccagcagggagtacacctacacccatccctagtgtaggcccaaaacaatatatgttccctg

SEQ ID NO: 156055 - DNA, 80 bp, synthetic construct
  source 1..80: mol_type = other DNA
acaaatattacctttagtgcagaggtggcagaactataccgattagaattgggggattataaattaatagaagtgacacc

SEQ ID NO: 156056 - DNA, 80 bp, synthetic construct
  source 1..80: mol_type = other DNA
ttcacatacatgagattcaacgcagagtttacatttgtcaccactactcatgaagggaagacacctgagtgtatgttaca

SEQ ID NO: 156057 - DNA, 80 bp, synthetic construct
  source 1..80: mol_type = other DNA
ccaggctttgcttttatgagatgcaatgattctaactattcaggctttatgcccaactgtagcaaggtagtagtatcctc

SEQ ID NO: 156058 - DNA, 80 bp, synthetic construct
  source 1..80: mol_type = other DNA
tcatgtagtgtgggatgttggtttgcaatctacaatatctatggtagttccttgggtcagtgctagccattttaggaata

SEQ ID NO: 156059 - DNA, 80 bp, synthetic construct
  source 1..80: mol_type = other DNA
gtcactgtctggcgtgcaccctacaccggagacacggcctagcatgagccaccactggcgcgagccctacgacaatgtcc

SEQ ID NO: 156060 - DNA, 80 bp, synthetic construct
  source 1..80: mol_type = other DNA
ttgttaatcatcttcttctactggctgctcgttatggctttcaggccggtccgccggcgccaggtggtcctcggcgtgca

SEQ ID NO: 156061 - DNA, 80 bp, synthetic construct
  source 1..80: mol_type = other DNA
attaaacccagcgctcaacaatcaggttttagtcctcaatggtccacaatagtcaacaacactacattaacacatgatgg

SEQ ID NO: 156062 - DNA, 80 bp, synthetic construct
  source 1..80: mol_type = other DNA
ttccaggtgaggtgcggaacatgatggaaatagctgaggtagattcacttataccaatgaacgcagtgtcaggtaaggca

SEQ ID NO: 156063 - DNA, 80 bp, synthetic construct
  source 1..80: mol_type = other DNA
ctgtacagcttggtggtgaacctgatcccacgaccccagttttcacaattagagttgatattgcatcacaaccactagcc

SEQ ID NO: 156064 - DNA, 80 bp, synthetic construct
  source 1..80: mol_type = other DNA
ccaccctgagccgcgaccagtagtcgtagtggtcgttgtacactgcgcgcaggacgctgatgatgagccgtacgtgcgtg

SEQ ID NO: 156065 - DNA, 80 bp, synthetic construct
  source 1..80: mol_type = other DNA
acactttgcgcacactacttctaatgtccctgcggcatcacaacagtctgcagaactaactttcactaattcgaatatag

SEQ ID NO: 156066 - DNA, 80 bp, synthetic construct
  source 1..80: mol_type = other DNA
gtggaacataagcgtgaaagacatggttcaaatgcgtagaaagtgtgagctcttcacttacctcaggttcgacatggagg

SEQ ID NO: 156067 - DNA, 80 bp, synthetic construct
  source 1..80: mol_type = other DNA
cgagaggtactactctggaaattcagcaaccacccgcaactacgtttaccaaatcatgtatgtgcctcctggtgccccag

SEQ ID NO: 156068 - DNA, 80 bp, synthetic construct
  source 1..80: mol_type = other DNA
cagacatgagaatgaagtcagaaggaaggtcaagcacaatttagaggcaattttccagggattaggtgactcaaccactc

SEQ ID NO: 156069 - DNA, 80 bp, synthetic construct
  source 1..80: mol_type = other DNA
ttgtgtcatttaatgtggcataatggtagacatgagtatcagagcttcgttgaccgtatacgcagtgtatccgctggtcg

SEQ ID NO: 156070 - DNA, 80 bp, synthetic construct
  source 1..80: mol_type = other DNA
ttacacacaaccctgatggttccacaggaggcacactgtcaaccctatcaacctataatgaatgggttacaggtacagga

SEQ ID NO: 156071 - DNA, 80 bp, synthetic construct
  source 1..80: mol_type = other DNA
ccatcacagagcaaggctgggagtacgtgtggggcaatcaccctccaaagagactgtgggcccaagagacggcgcccgtg

SEQ ID NO: 156072 - DNA, 80 bp, synthetic construct
  source 1..80: mol_type = other DNA
aagatacgctcgggaagccgaggtgcgcttccttcgtggtaaatggcagaggcggttccgaagaatctttgatttgatag

SEQ ID NO: 156073 - DNA, 80 bp, synthetic construct
  source 1..80: mol_type = other DNA
acgggacagggctgcgggagtgttgcgggacataagtaagcgcggcggtgtccggcgttgttttcgggcgtgctgggcgc

SEQ ID NO: 156074 - DNA, 80 bp, synthetic construct
  source 1..80: mol_type = other DNA
aagcatcagacagcaactcagaaccatgttccaccagcttgtcaagacgcaagcgggcctacacctaaacccccttttat

SEQ ID NO: 156075 - DNA, 80 bp, synthetic construct
  source 1..80: mol_type = other DNA
gaaattgaatagctgggatgtttttggtaattggttcgacctcacctcttggataaaatatatccatataggactatata

SEQ ID NO: 156076 - DNA, 80 bp, synthetic construct
  source 1..80: mol_type = other DNA
aagatcagtatatacaacataacagttgtacgtaaaaccaacaatggtggcttgatactcaccatacccttggaaatgaa

SEQ ID NO: 156077 - DNA, 80 bp, synthetic construct
  source 1..80: mol_type = other DNA
tggtatataatacaggaatccagttattacccaaaacacatccagtatgatatactgattggtgaagggccatgctcccc

SEQ ID NO: 156078 - DNA, 80 bp, synthetic construct
  source 1..80: mol_type = other DNA
cccacccaggtgagcaaggtagagaagtagtaccatcacggacatctagtgataataaaagacctagtgatgacagttgg

SEQ ID NO: 156079 - DNA, 80 bp, synthetic construct
  source 1..80: mol_type = other DNA
ctacaacccctttaatgacaagggcaaaggtaacataatctggtttcagtacctaacaaaaccagacacagagtttgacc

SEQ ID NO: 156080 - DNA, 80 bp, synthetic construct
  source 1..80: mol_type = other DNA
cccccatggattgccacacgagatggtggtgcattactaccacaggtaccccacgccaaccatcgtgggcttgacgctct

SEQ ID NO: 156081 - DNA, 80 bp, synthetic construct
  source 1..80: mol_type = other DNA
tctctctcgcgcccaaaaaaacctcgactgtttacagaatcagagtaccaagggcaagaagaaggctcgatttcaggggg

SEQ ID NO: 156082 - DNA, 80 bp, synthetic construct
  source 1..80: mol_type = other DNA
tgtgagagagggattaaagtgcttatgcgcaaagaatgtgtcaacaacaggtgttcctgcatctgctggcatgagttagg

SEQ ID NO: 156083 - DNA, 80 bp, synthetic construct
  source 1..80: mol_type = other DNA
atatgtattctatgacacaaactttggcaatggcaaatggatagatggaaaaggacacatagacacttactggctacaaa

SEQ ID NO: 156084 - DNA, 80 bp, synthetic construct
  source 1..80: mol_type = other DNA
cgctctgcggagaggctggcagatcgagccctgggaggttctctccagcactagcaggtagagcctgggtgttccctgct

SEQ ID NO: 156085 - DNA, 80 bp, synthetic construct
  source 1..80: mol_type = other DNA
gacgccgcagaagagtatggcccagaagatctagatttgctgttcgccgccgccgccgaggacgatatgtgagtaagagg

SEQ ID NO: 156086 - DNA, 80 bp, synthetic construct
  source 1..80: mol_type = other DNA
agggtgtggcaaatccctggcttccaaggtcattgctaggggtctcacaaatgaaagcaatgtttactccttaccacctg

SEQ ID NO: 156087 - DNA, 80 bp, synthetic construct
  source 1..80: mol_type = other DNA
gagctctggaaggccctcctcgcagtacactggcacactggtaaacgtgccccgatggctaggccgtccgggcagcatgc

SEQ ID NO: 156088 - DNA, 80 bp, synthetic construct
  source 1..80: mol_type = other DNA
gccaaccaagttgatgtaactatactgggtagcttattacaattagattttcaaaacccaagagtatttggccaagacgt

SEQ ID NO: 156089 - DNA, 80 bp, synthetic construct
  source 1..80: mol_type = other DNA
tcagaagaaatgcagaggagccaggagagccagcaaagcgaagaagaagagacctcgccgcagatcctccagcagcgact

SEQ ID NO: 156090 - DNA, 80 bp, synthetic construct
  source 1..80: mol_type = other DNA
ttaccaatgatatggggacactgtgttcaaggatagtaacaagtgagcaagtacataaggttaaagtagtaacaagaata

SEQ ID NO: 156091 - DNA, 80 bp, synthetic construct
  source 1..80: mol_type = other DNA
aaagatgaccttaaaagctttactataaatgccaggtacaaatttaaattcttatggggcggcactataatccccgaaca

SEQ ID NO: 156092 - DNA, 80 bp, synthetic construct
  source 1..80: mol_type = other DNA
tcaggtaccaatggcatataccacaaaaaaacagacagcaactacggctaccactcctttcaagtaaaagacaaaaaaca

SEQ ID NO: 156093 - DNA, 80 bp, synthetic construct
  source 1..80: mol_type = other DNA
agcaactaccaagctactaggcacaacattcacgggaggatccccctacctagaataccacgggggtctatactcctcca

SEQ ID NO: 156094 - DNA, 80 bp, synthetic construct
  source 1..80: mol_type = other DNA
gtgaagaacgcttccctgatcaggtctgaatttttatagatacgggagtaggaggtgggaataacaactgggatttcttg

SEQ ID NO: 156095 - DNA, 80 bp, synthetic construct
  source 1..80: mol_type = other DNA
attccaggtagagtacacaacatgctagagttagtgcaagtggaatcaatgatggaaataaacaatgttgctgatgcaag

SEQ ID NO: 156096 - DNA, 80 bp, synthetic construct
  source 1..80: mol_type = other DNA
tctgacgcgtgccgtcttgcgattagcgctcacagagatcggttgtcccgatttcctgctcgaagctttcatcgatcaac

SEQ ID NO: 156097 - DNA, 80 bp, synthetic construct
  source 1..80: mol_type = other DNA
gtagttgggtacggtgtgtggcctcactacttaacaccacaagatgccactgcaatagacaagcctactcaaccagatac

SEQ ID NO: 156098 - DNA, 80 bp, synthetic construct
  source 1..80: mol_type = other DNA
gccccagttctgtacactgcatagttcaaggcagattaggcaatgatgccaagttcttttgtccagcaggctctcttgtt

SEQ ID NO: 156099 - DNA, 80 bp, synthetic construct
  source 1..80: mol_type = other DNA
tcatgcacatccgagcagcaaaggcatacagtaaggctggaaagttgaatgtgagtcaggccatggcaacaatgtcaacc

SEQ ID NO: 156100 - DNA, 80 bp, synthetic construct
  source 1..80: mol_type = other DNA
ttcatagatgaaactttaaaagaagtcctagtggttccaaacactcaaccatctggccaggttcacaccactaaaccttc

SEQ ID NO: 156101 - DNA, 80 bp, synthetic construct
  source 1..80: mol_type = other DNA
gagatttggttttgatttagatatttgcttacacactactttcaccaaaaatggcaagttgaatgcagcaatggcaacta

SEQ ID NO: 156102 - DNA, 80 bp, synthetic construct
  source 1..80: mol_type = other DNA
gtgggtgtctgttggtggcagtggtgcctgaacatcagttggcatatatcggaggtactaacgcacaagtgaaatataag

SEQ ID NO: 156103 - DNA, 80 bp, synthetic construct
  source 1..80: mol_type = other DNA
gcctcggggggggtcgggggctttactaaacagactccgagttgccactggactcaggagctgtgaatcagtaacgaaag

SEQ ID NO: 156104 - DNA, 80 bp, synthetic construct
  source 1..80: mol_type = other DNA
aagagttattggttaaggttgaaaaactaaagaagggcttagacagtttagcacctttgtatgcagttgaaaataaaaga

SEQ ID NO: 156105 - DNA, 80 bp, synthetic construct
  source 1..80: mol_type = other DNA
aaagttcattgatcagactttagaggaagtactggtagtaccagacacacaggcatcagggccagttcacaccaccaaac

SEQ ID NO: 156106 - DNA, 80 bp, synthetic construct
  source 1..80: mol_type = other DNA
aatgggcgctcaagtttcaacgcaaaaatcgggttcccacgagactgggaatgttgcaactgagggatctacaataaact

SEQ ID NO: 156107 - DNA, 80 bp, synthetic construct
  source 1..80: mol_type = other DNA
gattgtacccaagctacttactactgtaaacataaaaatagatattttccaattactgtcacaagccatgattggtatga

SEQ ID NO: 156108 - DNA, 80 bp, synthetic construct
  source 1..80: mol_type = other DNA
ttgccaaatagattcaatgataccaataaacaacacccatgcctctaaaaattcagttaatatgtacacagtggaggtta

SEQ ID NO: 156109 - DNA, 80 bp, synthetic construct
  source 1..80: mol_type = other DNA
tggtgacctgcctggtggagatggccctggccgggcagcggggagtgaccatcactatgccggtggcctccgactacctc

SEQ ID NO: 156110 - DNA, 80 bp, synthetic construct
  source 1..80: mol_type = other DNA
tagtgccaacatggagaattgagggaaggttggaaagatggcactctatagtgaaatattataaacataaaacaggagag

SEQ ID NO: 156111 - DNA, 80 bp, synthetic construct
  source 1..80: mol_type = other DNA
gagcagctccagctccagaaacaccaccagcgagtcctcaaacgaggcctcaaactcctcctgggagacgtcctccgact

SEQ ID NO: 156112 - DNA, 80 bp, synthetic construct
  source 1..80: mol_type = other DNA
acagtttagagcagcctacatggatgtcacccacaacccaataaatgacaagggccacctaaacaaagtatggtttcaat

SEQ ID NO: 156113 - DNA, 80 bp, synthetic construct
  source 1..80: mol_type = other DNA
attaccacctgatccaaagtacttcgatggataccatcagcaaacagttgtgatcatggatgatgtgatgcagaatccaa

SEQ ID NO: 156114 - DNA, 80 bp, synthetic construct
  source 1..80: mol_type = other DNA
agttagcgaactaaataaaattagagaacagtactttaagtgggagacagatgaaggcccccaagctacgtcaaactatg

SEQ ID NO: 156115 - DNA, 80 bp, synthetic construct
  source 1..80: mol_type = other DNA
tgtcactgagacggtctgatggtggaagagggccaggtcctttggcaaagagacgtccaggcccacgtccccggggtact

SEQ ID NO: 156116 - DNA, 80 bp, synthetic construct
  source 1..80: mol_type = other DNA
cgccataaggcctttatcttctcgccatttgtccgtcgggaggggtcgctccaaacgcggaccccgttttcagcccttcc

SEQ ID NO: 156117 - DNA, 80 bp, synthetic construct
  source 1..80: mol_type = other DNA
catatggttatcccatggattagttctcacttcttcagaagaacaagaaaggacaattacacagaaggtgggtttgtgac

SEQ ID NO: 156118 - DNA, 80 bp, synthetic construct
  source 1..80: mol_type = other DNA
aagtctgttgcaacttgacttccagaaccccagagtttatgatacccaagtcgatatatatgacaacaataatgatgtga

SEQ ID NO: 156119 - DNA, 80 bp, synthetic construct
  source 1..80: mol_type = other DNA
ataaccctatctaagagaaccagtgaatgtaatcttcctagcatacataacccatgcaaaaccaaattacagcccagtgt

SEQ ID NO: 156120 - DNA, 80 bp, synthetic construct
  source 1..80: mol_type = other DNA
agaatggcagcagcacaagggctaccagttcttaacacaccagggagtaaccagttcctgacatcagatgactttcaatc

SEQ ID NO: 156121 - DNA, 80 bp, synthetic construct
  source 1..80: mol_type = other DNA
agtgttgggaatgcctacagcagcttctatgatggttggtcacacttcacacagaatggggtgtatggatatagcacctt

SEQ ID NO: 156122 - DNA, 80 bp, synthetic construct
  source 1..80: mol_type = other DNA
caaacagaaaacaacctacactcaaaatatggcaaagcatccttacagtgcatggagtaccacacaggcatatacagcag

SEQ ID NO: 156123 - DNA, 80 bp, synthetic construct
  source 1..80: mol_type = other DNA
acacattggacaggctcaatcagattttcatttatgttttgtggcacagcaaacaccaaggtgaaattattaattgctta

SEQ ID NO: 156124 - DNA, 80 bp, synthetic construct
  source 1..80: mol_type = other DNA
ggcagaaaaaaggagaataacagtactggatataggggatgcctacttcagcattcctctagatgtagatttcaggcagt

SEQ ID NO: 156125 - DNA, 80 bp, synthetic construct
  source 1..80: mol_type = other DNA
agacctggcagatgaggctagagattcccctccggcgacggagttctagcctgcgtggctgcctgcacaccctttgggtg

SEQ ID NO: 156126 - DNA, 80 bp, synthetic construct
  source 1..80: mol_type = other DNA
cattacatagagaccagaacaactgtcaagacagcaggccctagtgacatgtatgtacatactaaggaagccatttacaa

SEQ ID NO: 156127 - DNA, 80 bp, synthetic construct
  source 1..80: mol_type = other DNA
ccataggaaagttgattgtttattgttacaacagactaacttctccctccaatgtggcttctcatgttagagttaatgtt

SEQ ID NO: 156128 - DNA, 80 bp, synthetic construct
  source 1..80: mol_type = other DNA
ctttctctgctccatcattccccttgcccgctcaatctggcaatctcgagaggatacccctgagtcctctcaggcggcat

SEQ ID NO: 156129 - DNA, 80 bp, synthetic construct
  source 1..80: mol_type = other DNA
cgactcgtattcagaggaagagaagtcgccgcaattcaccgaagaaacgacggaagcgctacagctccagctccagcgcc

SEQ ID NO: 156130 - DNA, 80 bp, synthetic construct
  source 1..80: mol_type = other DNA
tcatggaaatcgctgaggttgactctgtggttccagtgaacaatgtagaagggaaattggatacaatggagatctaccga

SEQ ID NO: 156131 - DNA, 80 bp, synthetic construct
  source 1..80: mol_type = other DNA
tagaaataactccaattggctttgcacccacaaatgtaaagagatattcctctgtgacaccgaaaaataaaagaggtgta

SEQ ID NO: 156132 - DNA, 80 bp, synthetic construct
  source 1..80: mol_type = other DNA
cctgtgctggaaagagaggctggaagatgaggccctgctcatcctccacccgggcggcggacaagagtctgcggtctcgg

SEQ ID NO: 156133 - DNA, 80 bp, synthetic construct
  source 1..80: mol_type = other DNA
gacgccgccgctggcccaagcgccgctggaggtggcgccgacgacgaaggagacctagaccaaggagacgtcgccgagct

SEQ ID NO: 156134 - DNA, 80 bp, synthetic construct
  source 1..80: mol_type = other DNA
tctgttgcattagttggagagagagcattttatgatcccagaactgcaggcagcaaatcaagatttgacgatctcgtcaa

SEQ ID NO: 156135 - DNA, 80 bp, synthetic construct
  source 1..80: mol_type = other DNA
gggaatttaaaaatgaagcaccctatgatggacaattggaacacattatttctcagatggcctatataactggatcaaca

SEQ ID NO: 156136 - DNA, 80 bp, synthetic construct
  source 1..80: mol_type = other DNA
atcaagccgaaacacatatcagcatggtgcccgcgaccaccacgggccacacagtaccttcataaatatagtcctaatta

SEQ ID NO: 156137 - DNA, 80 bp, synthetic construct
  source 1..80: mol_type = other DNA
actcccaactctccacgtttatttgtgggagaaggttcaggggcaatgatgagtgtatacttcaaattactagggaaggc

SEQ ID NO: 156138 - DNA, 80 bp, synthetic construct
  source 1..80: mol_type = other DNA
gcgtctaaggcgcgagatccgtggagggacttttagatgtttgggcggcccgcggttctaacaggcttgattggtggaga

SEQ ID NO: 156139 - DNA, 80 bp, synthetic construct
  source 1..80: mol_type = other DNA
ctactaccagtttttagacaacactgcagaccccagtagagaccagcaaagagatgccaaatggaacaccatgataggca

SEQ ID NO: 156140 - DNA, 80 bp, synthetic construct
  source 1..80: mol_type = other DNA
gtgatgaatgacaacacaaatgctgaggctacagtagagaactttctgggtaggtctgccctatgggcaaatttcacact

SEQ ID NO: 156141 - DNA, 80 bp, synthetic construct
  source 1..80: mol_type = other DNA
gttgacctgcgactcaacagtgaccagcataattgctaacattgacgtagcaggcaaggaccagacaaatattaccttta

SEQ ID NO: 156142 - DNA, 80 bp, synthetic construct
  source 1..80: mol_type = other DNA
cagcaaatgtttaatagaaaaattacccatgtgggccgcggtatatggctacgcagaatactgtgccaagagcacaggag

SEQ ID NO: 156143 - DNA, 80 bp, synthetic construct
  source 1..80: mol_type = other DNA
ggcaattcgggctcgggactggccgggccctgggcaaggctcttaaaaaagctatgtttctgggtaaactttacagaaag

SEQ ID NO: 156144 - DNA, 80 bp, synthetic construct
  source 1..80: mol_type = other DNA
agggaagcagtcaaccatttgccccgagaacttattttccaggtctggcaaaggtcttgggcatattggcgtgatgatca

SEQ ID NO: 156145 - DNA, 80 bp, synthetic construct
  source 1..80: mol_type = other DNA
acaggcactaaggctgattccaacgccttcaataactggattatcactacgcgcaaagtcgcacagctaaggcgcaagct

SEQ ID NO: 156146 - DNA, 80 bp, synthetic construct
  source 1..80: mol_type = other DNA
acccagaccacccacgtggtgttgtacactgttatcccggtaactttgtacgccagttttaaactcccttacccctcttt

SEQ ID NO: 156147 - DNA, 80 bp, synthetic construct
  source 1..80: mol_type = other DNA
gtctatgtaataatataaagaacagcacttccgaatggctgagttttccacgcccgtccgcagcgaggagcagccgaagg

SEQ ID NO: 156148 - DNA, 80 bp, synthetic construct
  source 1..80: mol_type = other DNA
atggcatttatagtccttactttttaacaccccaaagatacagcccccaatggcacacagcatggacatatgtcagatac

SEQ ID NO: 156149 - DNA, 80 bp, synthetic construct
  source 1..80: mol_type = other DNA
actgggtgacggcccgggtcctctcggagaaggcaaaggccaccagcccgttcaccaaaacagtctgctctgtccgcttg

SEQ ID NO: 156150 - DNA, 80 bp, synthetic construct
  source 1..80: mol_type = other DNA
ctatcatttaatgactcatgaggatacattaaacttacaaacttcacttccagagagagatttagcagtaattagtataa

SEQ ID NO: 156151 - DNA, 80 bp, synthetic construct
  source 1..80: mol_type = other DNA
gaattcacctttgtggtaactgctaacttcaccaacaccaacaatggccatgccctcaaccaggtgtaccaaataatgta

SEQ ID NO: 156152 - DNA, 80 bp, synthetic construct
  source 1..80: mol_type = other DNA
caagcgatgtggtttgtgataatagcacagatcagaccacaaatgagaccacgtgttacatgaaccattgcaacacatca

SEQ ID NO: 156153 - DNA, 80 bp, synthetic construct
  source 1..80: mol_type = other DNA
atctgaggagcaacaattcagcaacacttatactaccatatatgaatgcagtaccaatggattccatgttaaggcataat

SEQ ID NO: 156154 - DNA, 80 bp, synthetic construct
  source 1..80: mol_type = other DNA
attaggacctagatttggtggaatccacacaggtaatgtaaaaatcatgaattaccacctaatgacccatgaagacaatt

SEQ ID NO: 156155 - DNA, 80 bp, synthetic construct
  source 1..80: mol_type = other DNA
ttgatggtacattaatgggcaatttgctaatattcccacaccagtttattaatttaaggagcaataattcagcaacactc

SEQ ID NO: 156156 - DNA, 80 bp, synthetic construct
  source 1..80: mol_type = other DNA
gctcctggatcaccttcaataaggggtccccagcccccagttcctctccgtcgagctctgccagctccggagcctccaca

SEQ ID NO: 156157 - DNA, 80 bp, synthetic construct
  source 1..80: mol_type = other DNA
gttattgagcagaccgcacctgatgcaataccttacgccttctccaaatccgaggcgggcgctgtggagcatgtccttca

SEQ ID NO: 156158 - DNA, 80 bp, synthetic construct
  source 1..80: mol_type = other DNA
gagagcgctaatgtggttgtggcatatggaaggtggccaaagtacttggaggatgatcaagctaccgctgaggaccaacc

SEQ ID NO: 156159 - DNA, 80 bp, synthetic construct
  source 1..80: mol_type = other DNA
ggctctttggcaaggcaagtattgagagaatgtcaagagaatcagaaactaatatctattctacaggcccaccaagaaaa

SEQ ID NO: 156160 - DNA, 80 bp, synthetic construct
  source 1..80: mol_type = other DNA
tgaggtgaataatacatctaaggcagtggagctcgaccggctgaggatacctgtgtctgcacagagcgccgtggacaccc

SEQ ID NO: 156161 - DNA, 80 bp, synthetic construct
  source 1..80: mol_type = other DNA
gccccgcttgcctggtcctggagctcatccggggatgctgcatccgctagtccgacctgggtgcgtgcggtccgctggcc

SEQ ID NO: 156162 - DNA, 80 bp, synthetic construct
  source 1..80: mol_type = other DNA
ttccacaaaacgcgccgtctcctcggccagcttgggtagatcctccatgtgacgcagcacaaaacggcgcaccgactcat

SEQ ID NO: 156163 - DNA, 80 bp, synthetic construct
  source 1..80: mol_type = other DNA
tcaaatagcccgatgcaactgtaaaacaggagtgtactactgtgagtcaagggacaagtactaccctataacaatcactt

SEQ ID NO: 156164 - DNA, 80 bp, synthetic construct
  source 1..80: mol_type = other DNA
gtgtcctcgacgcgggtctgtgcgcctgcctgccggtcccggcagactgggctgcggcttcctcgttttttttttccgcc

SEQ ID NO: 156165 - DNA, 80 bp, synthetic construct
  source 1..80: mol_type = other DNA
tcggccgtgtttttgagcgcgcgcagcaccgtgtgcatagcttccacgttgaggatcttgtccaggatggtgccttcgaa

SEQ ID NO: 156166 - DNA, 80 bp, synthetic construct
  source 1..80: mol_type = other DNA
actattgtaaaagccaaaattggattattcctgctgatatcagtattgagagagaattaaatctggtgaacctctcaata

SEQ ID NO: 156167 - DNA, 80 bp, synthetic construct
  source 1..80: mol_type = other DNA
catacagcacaataacaaaattgacaccaacatatttgactactacacaggcatgtactgcagtatatttctgtccagcg

SEQ ID NO: 156168 - DNA, 80 bp, synthetic construct
  source 1..80: mol_type = other DNA
agagaaactgtcacatagctactacagacagaggaggcttcaatctccttggtatttacgacaactgtgcagtaataccc

SEQ ID NO: 156169 - DNA, 80 bp, synthetic construct
  source 1..80: mol_type = other DNA
ctaaccttgaagataagggcagagcattcaccagtgattatgtaatagctagcacaaacatgactgtcctcacaccgccc

SEQ ID NO: 156170 - DNA, 80 bp, synthetic construct
  source 1..80: mol_type = other DNA
tatgaagaacactggggcctttggacagcagtccggggctatttatgtagggaactacagggtggtgaacaggcacctcg

SEQ ID NO: 156171 - DNA, 80 bp, synthetic construct
  source 1..80: mol_type = other DNA
aaaactatacactcaactctttctctctaaagactctggccactactggcaaacttttctcactaatcccatggtaaagt

SEQ ID NO: 156172 - DNA, 80 bp, synthetic construct
  source 1..80: mol_type = other DNA
aggaggcgttgaagtcttggaaactgtgccactaacagaggacacaatgtacaaagttgaagcagttctgctgccaaact

SEQ ID NO: 156173 - DNA, 80 bp, synthetic construct
  source 1..80: mol_type = other DNA
tagtgagttacaaaacacagggttcggaacaaactgacaagtatgccagctgggagatcaatactaggcaagtggcacag

SEQ ID NO: 156174 - DNA, 80 bp, synthetic construct
  source 1..80: mol_type = other DNA
taccagccacatagaggacaagatagccaagggaccctttgggggagggcacagcaccagcagatggtccatgaaggtgc

SEQ ID NO: 156175 - DNA, 80 bp, synthetic construct
  source 1..80: mol_type = other DNA
tggaatatgtcaataaattaaaacaattgggaatgctagaaaatcaaataaatactatacaccagtcttgccccagtcaa

SEQ ID NO: 156176 - DNA, 80 bp, synthetic construct
  source 1..80: mol_type = other DNA
aaccaacattagagagacctgttccgggatctttgataaaatcacgtccaaaactgtgaaatggctagtacgaatcatca

SEQ ID NO: 156177 - DNA, 80 bp, synthetic construct
  source 1..80: mol_type = other DNA
cgtggcttctttggccacaaagctatcaaaagaatgtaccaacaacaaaaatttgctgaatctgttacaggccctccaaa

SEQ ID NO: 156178 - DNA, 80 bp, synthetic construct
  source 1..80: mol_type = other DNA
acgaaggcacaaaaagagacttgtactgactcagtggcagccagcagtagttaaaaggtgtctcatagtgggctacgacc

SEQ ID NO: 156179 - DNA, 80 bp, synthetic construct
  source 1..80: mol_type = other DNA
acgagtacccccgtgggaaagctcgcaagggtcgcaaacagaaacagaaagccaaaaggagcaggagggcaccctctccc

SEQ ID NO: 156180 - DNA, 80 bp, synthetic construct
  source 1..80: mol_type = other DNA
aaacatttttgaacaaaaactactaccaacaacaacacaaaacaaagacaactggcaatacacatacactccactaatga

SEQ ID NO: 156181 - DNA, 80 bp, synthetic construct
  source 1..80: mol_type = other DNA
cctacacgacatacaaaaacgccaatccaggtgaagaagggggtgtgtttgtggatgcatttactgcatcagcacaagca

SEQ ID NO: 156182 - DNA, 80 bp, synthetic construct
  source 1..80: mol_type = other DNA
acgtttgtcatcaccagctcacaggatacaagtacgcagaccaacacagacacgcccgtgctaacccaccagatcatgta

SEQ ID NO: 156183 - DNA, 80 bp, synthetic construct
  source 1..80: mol_type = other DNA
atagttagaaacagcactgacacccccactgtcatagcaacacttgccctgttaggatgctccggttcaccatggcgcta

SEQ ID NO: 156184 - DNA, 80 bp, synthetic construct
  source 1..80: mol_type = other DNA
aagagagccagacggagagcctcccctcggaggaggacccggcggagacgacgagggagctcctcctccgaaagctccga

SEQ ID NO: 156185 - DNA, 80 bp, synthetic construct
  source 1..80: mol_type = other DNA
agccgaagtgagtctacagtggagtcgttctttgcacgtggtgcgtgcgtcaccatcatgtcggtggagaattacaacga

SEQ ID NO: 156186 - DNA, 80 bp, synthetic construct
  source 1..80: mol_type = other DNA
acaccaagaggcagttatggaagacatagttaaatcaggaccttttgccccaaaagtactaaagacaaacatgcagttaa

SEQ ID NO: 156187 - DNA, 80 bp, synthetic construct
  source 1..80: mol_type = other DNA
cagatcccatacaatggggtaccttctgggcatccttcagccccttgttgaatacgcttgaggagagccatttgactctt

SEQ ID NO: 156188 - DNA, 80 bp, synthetic construct
  source 1..80: mol_type = other DNA
gatcaagatggacattttacagacacccagaagtagactttatagtaacctgggagacctcagccccctttacagactct

SEQ ID NO: 156189 - DNA, 80 bp, synthetic construct
  source 1..80: mol_type = other DNA
cccccagaaaattccacacagacatccccttctacccctgggtccccccacccccagaccaaatcagggtctccttcaaa

SEQ ID NO: 156190 - DNA, 80 bp, synthetic construct
  source 1..80: mol_type = other DNA
tccatcttttgcgaggaattgctgaataaacgcgtggcttgaaagtaaactttattgcgtgttagtacctgtccattcac

SEQ ID NO: 156191 - DNA, 80 bp, synthetic construct
  source 1..80: mol_type = other DNA
tcgtcctccaccgcttccaccaccgcttgttcttcttcttccgttctctcttccgccttgccgtccgtcacttcgtcctc

SEQ ID NO: 156192 - DNA, 80 bp, synthetic construct
  source 1..80: mol_type = other DNA
tttcaccaatgaaggacagtggagagttagtttagagttcccaaaacaaggtcatggttcactttccctgctattcgcct

SEQ ID NO: 156193 - DNA, 80 bp, synthetic construct
  source 1..80: mol_type = other DNA
agtttgcgcttacggacatctttaagattccaggcctcatcctgcgtcaacagatagtcaccctccgagggcaaccgccc

SEQ ID NO: 156194 - DNA, 80 bp, synthetic construct
  source 1..80: mol_type = other DNA
ttatagtctgctacaacacagtacctccatttaaaattaacaagtacaccagtgccttcatgcacccaggactcatgatg

SEQ ID NO: 156195 - DNA, 80 bp, synthetic construct
  source 1..80: mol_type = other DNA
tgccggactggcggaacgacaagtgctgtggagccacacgcaccggcagcgcgcagaaagcgccgtggacaacacgccgc

SEQ ID NO: 156196 - DNA, 80 bp, synthetic construct
  source 1..80: mol_type = other DNA
cagacccagtaaaggatgtgcttgagaaaccaaccttgcaatcacccacagtagaggcttgtggatattctgatagaatc

SEQ ID NO: 156197 - DNA, 80 bp, synthetic construct
  source 1..80: mol_type = other DNA
cgggtggtccttttccgagggccccgcagataagagccagacacgccgccgccgcgtctgaccagccggccctaccatgg

SEQ ID NO: 156198 - DNA, 80 bp, synthetic construct
  source 1..80: mol_type = other DNA
tatatgacaaaatttaccaaactccatgttactattcagggcttgctgttggtatcaatccgtacagagattggcacttc

SEQ ID NO: 156199 - DNA, 80 bp, synthetic construct
  source 1..80: mol_type = other DNA
ttgatttagtatcctctggaaacaccctgtatgccatatggattgggctgggcacgagaaaccgagttgcatttgtcgag

SEQ ID NO: 156200 - DNA, 80 bp, synthetic construct
  source 1..80: mol_type = other DNA
ttgtaaagttgctatataatgagcagtttgctgtccagggtctactgagatatcatacatatgcaagatttggcattgag

SEQ ID NO: 156201 - DNA, 80 bp, synthetic construct
  source 1..80: mol_type = other DNA
gttttattcccccttcccccattgtaacttagaagcaaagcacacatgatcaataggagataacctgccaggttatttaa

SEQ ID NO: 156202 - DNA, 80 bp, synthetic construct
  source 1..80: mol_type = other DNA
ccaccaggtgcacccaaacccacccaacgtgattcctttgaatggcagacttcaactaatccttccatctttgtcaaggt

SEQ ID NO: 156203 - DNA, 80 bp, synthetic construct
  source 1..80: mol_type = other DNA
cgtagaagtcagcgaaataaagacaacacagcagccactcctctcgtctcgggccctaccactgcttgaagtagggcacc

SEQ ID NO: 156204 - DNA, 80 bp, synthetic construct
  source 1..80: mol_type = other DNA
cccaccacagctcacaaagaagccgcaccgtatggacaattatgttaatttgtgtagcctgtctgcttctattttttgga

SEQ ID NO: 156205 - DNA, 80 bp, synthetic construct
  source 1..80: mol_type = other DNA
gggtggtctgattctgattctgatcctgggtattggtcttggtctctcctcccccattggcatggattggcatagctggg

SEQ ID NO: 156206 - DNA, 80 bp, synthetic construct
  source 1..80: mol_type = other DNA
ctcagactttgggcgcgctagaaatcggcgctactgcagatgtggggccagaggcaatgatagaaactagatatgttatg

SEQ ID NO: 156207 - DNA, 80 bp, synthetic construct
  source 1..80: mol_type = other DNA
tatcctgtctttcagagcatccgggggcagacatttcacctcttgtttgtggacgaggctaactttatcaagaaggaggc

SEQ ID NO: 156208 - DNA, 80 bp, synthetic construct
  source 1..80: mol_type = other DNA
aaaaacacaaccaactagaggctacataccatactctacaaactttggatacggacgtatgccagggggcgacacaacaa

SEQ ID NO: 156209 - DNA, 80 bp, synthetic construct
  source 1..80: mol_type = other DNA
tgaagaaaacgagtattaccccgcccgttaccaaaccaatactttgctagcacatggtcccgttgaggcaggtgattgtg

SEQ ID NO: 156210 - DNA, 80 bp, synthetic construct
  source 1..80: mol_type = other DNA
actataattgccaatcttgttagtatagttggtgttatttatattatatacaaattattctgctcactgcaaggtccata

SEQ ID NO: 156211 - DNA, 80 bp, synthetic construct
  source 1..80: mol_type = other DNA
ggcatctatgacaattgtgcagtgctaccaacacatgctaattgtggagactctctactgttgaacggcatcaagacctc

SEQ ID NO: 156212 - DNA, 80 bp, synthetic construct
  source 1..80: mol_type = other DNA
catcttgccagctctgccggccccggcagaccctgaaccgccgccacggcgtggtggtggggcagatggaggcgccgctg

SEQ ID NO: 156213 - DNA, 80 bp, synthetic construct
  source 1..80: mol_type = other DNA
ctatttgtagataagtggtactttcaaaaggacatatgtgacttaagtctgtttaacctcaatgccacaatggccgactt

SEQ ID NO: 156214 - DNA, 80 bp, synthetic construct
  source 1..80: mol_type = other DNA
cagctaagatgctatgctttgtctcaggttgtaaagatttctgtttgagaatggcacgagatactaatctacacctgcaa

SEQ ID NO: 156215 - DNA, 80 bp, synthetic construct
  source 1..80: mol_type = other DNA
cagagtactaatggtaactccgtacacttacccaaaaatgtaccgagaagacaatcctctatttggctttgttccatact

SEQ ID NO: 156216 - DNA, 80 bp, synthetic construct
  source 1..80: mol_type = other DNA
ttactacggaaatcatgggtgctcaggtctcagctcagaacaatggtacacacgaaaacaagaacaccgctaccggtggt

SEQ ID NO: 156217 - DNA, 80 bp, synthetic construct
  source 1..80: mol_type = other DNA
agcatggatgcgtatcatattgaggtcaataccgggaaccaccaggtggaaaagatttttgcgttccaaatgcagccggg

SEQ ID NO: 156218 - DNA, 80 bp, synthetic construct
  source 1..80: mol_type = other DNA
cccaagcccatctgcggcagagaggcctgggcggacgagttcgccacggccgccgcctgggacaggcccgtccgctccta

SEQ ID NO: 156219 - DNA, 80 bp, synthetic construct
  source 1..80: mol_type = other DNA
tcagaaaacagagtaaacttcttgtcatccaatggtgttatcacaatcccagcaggagaacaaatgacattgtctgcacc

SEQ ID NO: 156220 - DNA, 80 bp, synthetic construct
  source 1..80: mol_type = other DNA
gcattgctatgtatcatctttattttaatcatgtacctcatttatatttattttaaacgtcgttgtattcctactccgtc

SEQ ID NO: 156221 - DNA, 80 bp, synthetic construct
  source 1..80: mol_type = other DNA
ccaccctcaccctccttgggtgcgacatctcaccgtggcagtggttaaagaagaaggcatgtgacatcctggaaattcca

SEQ ID NO: 156222 - DNA, 80 bp, synthetic construct
  source 1..80: mol_type = other DNA
gatatcccaaggatactatcgccatacaaaggcagataaatacactgaatctggatatgtcaccttgtggtatcagacaa

SEQ ID NO: 156223 - DNA, 80 bp, synthetic construct
  source 1..80: mol_type = other DNA
acttagaggaccgcgtagttaaacaagcctttgggggcggacacgcgaccaccaggtggtcacttaaagtactatacgag

SEQ ID NO: 156224 - DNA, 80 bp, synthetic construct
  source 1..80: mol_type = other DNA
aaggcgtcaccgatagtaggccttctataaaattggagaagtctagcagtggccacttacgtacaactgggaggtttggg

SEQ ID NO: 156225 - DNA, 80 bp, synthetic construct
  source 1..80: mol_type = other DNA
cgtatgtaggaattgcaaacgcatactcacacttctatgacgggtttgccaccgtccctattgaaggagagaccacagac

SEQ ID NO: 156226 - DNA, 80 bp, synthetic construct
  source 1..80: mol_type = other DNA
atctaggatagccgcacctacacaaatgagacacagacacaggtcatgaggatttaggcaacgcaggcttgtctttatag

SEQ ID NO: 156227 - DNA, 80 bp, synthetic construct
  source 1..80: mol_type = other DNA
ctttctacacatttaatacaagagcacggaaaccagatgtatgttacaatgttaccgtgcactcgacatatcaaacgtac

SEQ ID NO: 156228 - DNA, 80 bp, synthetic construct
  source 1..80: mol_type = other DNA
tcacagtgaccatagcgcccctcaattccgaatttggtgggctgcgccaagctgtcagccagggactccctaccgagtta

SEQ ID NO: 156229 - DNA, 80 bp, synthetic construct
  source 1..80: mol_type = other DNA
tctaaggagcgaagactatcccaaacaggggtctccctacggaggcagcttcagcactacaacctggaacctcagggtgc

SEQ ID NO: 156230 - DNA, 80 bp, synthetic construct
  source 1..80: mol_type = other DNA
ctttagttcctcaaaacaccaagaggtgttagaatggctgtaccaggagccctccttctggcagtctaatatagctaggt

SEQ ID NO: 156231 - DNA, 80 bp, synthetic construct
  source 1..80: mol_type = other DNA
caatagagggaccacatgatgttagatgggaatacacatatacaaacctaatgaaacctatctataactcaacagaacaa

SEQ ID NO: 156232 - DNA, 80 bp, synthetic construct
  source 1..80: mol_type = other DNA
catacagaggggaaggagtggacttaaaacaaggagctgtcacgccattaactccagtggctagcataacgacatatggg

SEQ ID NO: 156233 - DNA, 80 bp, synthetic construct
  source 1..80: mol_type = other DNA
tgccgatgatggccgatagcgcgtagacggacatcatgaggagacgactgtcggtggcgtccacgacaacgtcagttact

SEQ ID NO: 156234 - DNA, 80 bp, synthetic construct
  source 1..80: mol_type = other DNA
ttgcacttatatggttacaagcttgtgaatacagacttgtaatcatgggtgcacaggttagcagacagagtgttggatca

SEQ ID NO: 156235 - DNA, 80 bp, synthetic construct
  source 1..80: mol_type = other DNA
aacaggttcttgttgttccagacaccaagcccagcggaccaatgcacacaacaaaacctactgcattatccgcaatggaa

SEQ ID NO: 156236 - DNA, 80 bp, synthetic construct
  source 1..80: mol_type = other DNA
gaaaccactgtaatgataggcaattcaggtaataaaaaagccggagctccctttccggcacgtctcattgccgtatcact

SEQ ID NO: 156237 - DNA, 80 bp, synthetic construct
  source 1..80: mol_type = other DNA
actgcacttactgccccacagacacattagtacaaaaaataaaagcatacagaaagaaaagattcggctggctaactaca

SEQ ID NO: 156238 - DNA, 80 bp, synthetic construct
  source 1..80: mol_type = other DNA
tgccgagaaaggcaaggtccaaacagcagtgtgcaatgcgaccatgggtgttgcggttggaaacctcacaattttcccac

SEQ ID NO: 156239 - DNA, 80 bp, synthetic construct
  source 1..80: mol_type = other DNA
tatgacgtagcggcggtggtgcggcgcgcttcgcgcgccgcccactaggcggcgctgcgcgcccccccccgcgcatgcgc

SEQ ID NO: 156240 - DNA, 80 bp, synthetic construct
  source 1..80: mol_type = other DNA
ccccaaaccaaaagaccagaactaagaagggccacgaagcaaggcccagaacatgaatttatgtatgccctcattaaaag

SEQ ID NO: 156241 - DNA, 80 bp, synthetic construct
  source 1..80: mol_type = other DNA
tgaaggtaggctagcgttcgggtgaacgcaagacaaacttccaacaacaccgcgtcggctcggaaaggctgtatgacttc

SEQ ID NO: 156242 - DNA, 80 bp, synthetic construct
  source 1..80: mol_type = other DNA
taagactcacccaggagaaaatgggattgatttaggaagtgaagtcaaagatggaccaatgactgaccctatatataaca

SEQ ID NO: 156243 - DNA, 80 bp, synthetic construct
  source 1..80: mol_type = other DNA
ctccagactaccccaaaaataactatgagtcttttgttaaaaattatcttaaaaacgcacaaaattcttactcacaaaag

SEQ ID NO: 156244 - DNA, 80 bp, synthetic construct
  source 1..80: mol_type = other DNA
tccgaatggctgagttttccacgcccgtccgcggcgagatcgcgacggaggagcgatcgagcgtcccgagggcgtgtgcc

SEQ ID NO: 156245 - DNA, 80 bp, synthetic construct
  source 1..80: mol_type = other DNA
gcaccagcagctttaactatgcactgcacgcagacgactacctcaaacaacccctgtctttcgggggaggcatgagcacc

SEQ ID NO: 156246 - DNA, 80 bp, synthetic construct
  source 1..80: mol_type = other DNA
tcaacacaacaaaatgggggcacaagtgtccacgcagaaaactggagcacatgaaactggcatcacagcaaccaacaact

SEQ ID NO: 156247 - DNA, 80 bp, synthetic construct
  source 1..80: mol_type = other DNA
gcacacccgcgacacacccgacacacccacccagcgaagagaccagacgcggaaaagaggaagtccccggggacggtcgc

SEQ ID NO: 156248 - DNA, 80 bp, synthetic construct
  source 1..80: mol_type = other DNA
ggtacagacacactcacccaggtgagacaggccacaccattacaggtaacaccgcaaacagatcaagtggtgaaccagat

SEQ ID NO: 156249 - DNA, 80 bp, synthetic construct
  source 1..80: mol_type = other DNA
ctgtgaacacggaagtagctgacccacgtgatttgtcacgtgacgtgtgcgtcacagccgccattttgttttacaaaatg

SEQ ID NO: 156250 - DNA, 80 bp, synthetic construct
  source 1..80: mol_type = other DNA
ctacgcgaatgttagtagcatcctgtgttgcatttgggatttcgctccgcagaaaaccccatctgtagattagggcaatg

SEQ ID NO: 156251 - DNA, 80 bp, synthetic construct
  source 1..80: mol_type = other DNA
atccctgcccaagttcatgactggctcgagtttgctcatagacccgggctaatggcttccctcaactggactatggccga

SEQ ID NO: 156252 - DNA, 80 bp, synthetic construct
  source 1..80: mol_type = other DNA
ggaccagggtggaaggatcagggcctcctggacctaccccctagcccccggaggtcccggtagcacgccatggcctactg

SEQ ID NO: 156253 - DNA, 80 bp, synthetic construct
  source 1..80: mol_type = other DNA
tcacccccatcgtgacgcatcgagaggcaaaaatctcccggattaaaaaccggctctttaccctgctagagctacgcaat

SEQ ID NO: 156254 - DNA, 80 bp, synthetic construct
  source 1..80: mol_type = other DNA
aattttagaagagtgtttggtaacctctatgctggtttccatgcaaatccaggaattctcactggttccgccataggatg

SEQ ID NO: 156255 - DNA, 80 bp, synthetic construct
  source 1..80: mol_type = other DNA
cgaagaggcggccgccagtacggcctctgagccagaagataaaagtccccgggtgcaaccactgggcacaggactccaac

SEQ ID NO: 156256 - DNA, 80 bp, synthetic construct
  source 1..80: mol_type = other DNA
gaattaagttcagaccaataggaaaacgacaaaccagtcgtttaaggtcaagcacttctgtttccccggtcaatgctgat

SEQ ID NO: 156257 - DNA, 80 bp, synthetic construct
  source 1..80: mol_type = other DNA
gattagtgggggttgtgaacatgccagtacagggaaccagcaatacagaaggttttgcaaagtgggagatagacattatg

SEQ ID NO: 156258 - DNA, 80 bp, synthetic construct
  source 1..80: mol_type = other DNA
accgtctcctgtcccaccgttatgaggttcgaccagcggctgctggaagagggcgacgaggaggatgaagtgaccgtgat

SEQ ID NO: 156259 - DNA, 80 bp, synthetic construct
  source 1..80: mol_type = other DNA
gtggggcctactcacatttctatgatggattctccacagtgccacatgacagcattagcgctggagcaacaaacaagtat

SEQ ID NO: 156260 - DNA, 80 bp, synthetic construct
  source 1..80: mol_type = other DNA
tcgagtcagtagcccaaaatgctctccaaatctcccaaccaagaccaactcaaagaccagcgctcaccaacacaaccgcg

SEQ ID NO: 156261 - DNA, 80 bp, synthetic construct
  source 1..80: mol_type = other DNA
acagataataactgatctcaatgatgttgacacagaggtgacaattctgtggttggacagaaaggaaaaatttagggaca

SEQ ID NO: 156262 - DNA, 80 bp, synthetic construct
  source 1..80: mol_type = other DNA
ctgtacccattacaatatccatcagtcccatgtgtgctgagttttctggagcaagggctaggaatgttacacaaggtctt

SEQ ID NO: 156263 - DNA, 80 bp, synthetic construct
  source 1..80: mol_type = other DNA
acacagtatgtgtccagatatagtgtcaattacaacatacctaagacagggtctacaaccagtgaactagagcaaaaaca

SEQ ID NO: 156264 - DNA, 80 bp, synthetic construct
  source 1..80: mol_type = other DNA
tgggggcaatcctatctcacaacagactatcaaagacccttgccaacaacccgactggcaacttcccggttccggtagat

SEQ ID NO: 156265 - DNA, 80 bp, synthetic construct
  source 1..80: mol_type = other DNA
cacagccgaagatgttcacgaagccaaagcagccgccgacgaagcacgcgaggtgagagaggctgaagagctgagggctg

SEQ ID NO: 156266 - DNA, 80 bp, synthetic construct
  source 1..80: mol_type = other DNA
tggagagcagcttggaagaggaaattatgccatttcgcaatatgtcccacatcaggttctcagactgccccctggtcatg

SEQ ID NO: 156267 - DNA, 80 bp, synthetic construct
  source 1..80: mol_type = other DNA
taatgctgtggtggtgggatatggtacatggcctcatcatcatgcaggtagtcaggccatgtaccatatcccaccaccac

SEQ ID NO: 156268 - DNA, 80 bp, synthetic construct
  source 1..80: mol_type = other DNA
gacagaagattcgagtggctaactgaaataccacaaacaaacgtctgccacataaatcctacctacgcccgagcaaaaat

SEQ ID NO: 156269 - DNA, 80 bp, synthetic construct
  source 1..80: mol_type = other DNA
gatcagaatcgacagtggagaattttttgtgcagatctgcgtgtgtttactacactacatacaagaaccatggcactgat

SEQ ID NO: 156270 - DNA, 80 bp, synthetic construct
  source 1..80: mol_type = other DNA
gaaatttcgccatcctccataatacactcaatatctatctcattaccgagcatttctgtttttacgctgaaattcgagtc

SEQ ID NO: 156271 - DNA, 80 bp, synthetic construct
  source 1..80: mol_type = other DNA
tggaagtatacaccccatgtggtttcaagctcttaaagaagttttatctaacttatcttttgaggctagtttaatagata

SEQ ID NO: 156272 - DNA, 80 bp, synthetic construct
  source 1..80: mol_type = other DNA
taataacctacaacatgtttggggaacccaatcctcaccctccaactagccaagactggcaaacggagtacgaggcctgc

SEQ ID NO: 156273 - DNA, 80 bp, synthetic construct
  source 1..80: mol_type = other DNA
cataccccactggcgacagtggtgtagcccgcgtggtgccctgcctgggactgtgtcccaggactccacttgtttgacag

SEQ ID NO: 156274 - DNA, 80 bp, synthetic construct
  source 1..80: mol_type = other DNA
ctatgtcagtattttactcattgggcaggctctctacgcttatcattcatgtacactggtccagcactatctagtgctaa

SEQ ID NO: 156275 - DNA, 80 bp, synthetic construct
  source 1..80: mol_type = other DNA
atcatgaagacttagttactgttacagctactctagcattattagggtgtgacgggtcaccatggaggttcctaaagatg

SEQ ID NO: 156276 - DNA, 80 bp, synthetic construct
  source 1..80: mol_type = other DNA
aacattagacaacgttaaaactattataaccacaaacatgaaaaactggcacaaaaaagtagctgacgaaggcattagca

SEQ ID NO: 156277 - DNA, 80 bp, synthetic construct
  source 1..80: mol_type = other DNA
ggccaatcaccacaagaaaggtcgcacaattgcgtaggaagctggagtttttcacttacctgaggtttgacctcgaaatc

SEQ ID NO: 156278 - DNA, 80 bp, synthetic construct
  source 1..80: mol_type = other DNA
caatgaaatcacaacagcagggtctccccacacggagtccagcaggctcgcaacaatttatgactactgaggatgaacag

SEQ ID NO: 156279 - DNA, 80 bp, synthetic construct
  source 1..80: mol_type = other DNA
taaacagactccgaggtgccattggacacagaggtggcgaacagcaacgaaagtgagtggggccagacttcgccgtaggg

SEQ ID NO: 156280 - DNA, 80 bp, synthetic construct
  source 1..80: mol_type = other DNA
ggacattaggaagaattaggaaggaaatacttgcagtcccaagaagaatcagacagagggcagaaatcgccctcctgtga

SEQ ID NO: 156281 - DNA, 80 bp, synthetic construct
  source 1..80: mol_type = other DNA
accgagttaggtcgatgacgctcgggaattcaacgatcacaactcaagaatgcgcaaatgtaatcgttgcgtacggtagg

SEQ ID NO: 156282 - DNA, 80 bp, synthetic construct
  source 1..80: mol_type = other DNA
tcagcccctggaggtggaccactccttcactttccgcaccgatattaaggagctccaaactgcgggcccaagtgatcaat

SEQ ID NO: 156283 - DNA, 80 bp, synthetic construct
  source 1..80: mol_type = other DNA
agctcatggcccctatatactattcagcaaacagggccagcacctatgactgggaaaattacagcaaggaagcaaactat

SEQ ID NO: 156284 - DNA, 80 bp, synthetic construct
  source 1..80: mol_type = other DNA
attaaacccagtgctcaagaaagtagctttaatcctacatggcaaaattgtcaaaatactaccaaacttaacgactcagg

SEQ ID NO: 156285 - DNA, 80 bp, synthetic construct
  source 1..80: mol_type = other DNA
caattcctcttgagagtgctatgtatgggatggaggggttagaagcccttgacctaaccaccagcgctgggtacccatat

SEQ ID NO: 156286 - DNA, 80 bp, synthetic construct
  source 1..80: mol_type = other DNA
taagagttacttttgctctactcaaggagagataataaacaagtgtaaagtgtctgatgttggcttgaaacctgtaaaca

SEQ ID NO: 156287 - DNA, 80 bp, synthetic construct
  source 1..80: mol_type = other DNA
aaaccacgacggagtgctcctagaaaagcgcgggccaaggtaccaagggcggcgtgtggagcgggagtgaagaggcctcc

SEQ ID NO: 156288 - DNA, 80 bp, synthetic construct
  source 1..80: mol_type = other DNA
ttttcaaaaatcacatgggacaacttaacattcctaaaaaggtatttcaaatctgatgaacaatttccctttctggtcca

SEQ ID NO: 156289 - DNA, 80 bp, synthetic construct
  source 1..80: mol_type = other DNA
aatctaatcagagacaacccagtgatgataattggttaaactttgatggtacattactgggaaatttgacaatattccct

SEQ ID NO: 156290 - DNA, 80 bp, synthetic construct
  source 1..80: mol_type = other DNA
aatgccgcttccttcgcacgaatcgccatcggtaaaaccaatccccacggttgcacattgcgttctgcgcgagatcaagc

SEQ ID NO: 156291 - DNA, 80 bp, synthetic construct
  source 1..80: mol_type = other DNA
aagtgcttctgctggctgtgcgagctacacaggagacatcttccatgagtatctgggtctcttgaaagggtttgtaaagc

SEQ ID NO: 156292 - DNA, 80 bp, synthetic construct
  source 1..80: mol_type = other DNA
atggggtcattggtatgataactgcaggtggggacaatcacgtggccttcattgacctcagatgttacactgacctcgca

SEQ ID NO: 156293 - DNA, 80 bp, synthetic construct
  source 1..80: mol_type = other DNA
caccagccgtcaactacctgggacgagcattgcacaagatatgccaccattgacccaccaaatcatgtatataccaccag

SEQ ID NO: 156294 - DNA, 80 bp, synthetic construct
  source 1..80: mol_type = other DNA
caaaccgtggtctcctcgtcgtccgactcggtacccaggaggtggtaagtcttttgccgcacgtagaaagctttcaacgt

SEQ ID NO: 156295 - DNA, 80 bp, synthetic construct
  source 1..80: mol_type = other DNA
cgcagctcagcagagaggaggaggccgcgccaccaaaaccgccgcgcccatggtggctcgaggtcacggatgctcctccg

SEQ ID NO: 156296 - DNA, 80 bp, synthetic construct
  source 1..80: mol_type = other DNA
tacctcaactatttatacacacacaaccaacaaaaggatatataccatactcctcagactttggatggggcagaatgcca

SEQ ID NO: 156297 - DNA, 80 bp, synthetic construct
  source 1..80: mol_type = other DNA
ggagaggttgagtataataactttttgtctaagatcagatctgtttctgtgggtaggactttagagttgcccccttattc

SEQ ID NO: 156298 - DNA, 80 bp, synthetic construct
  source 1..80: mol_type = other DNA
cagaaagttgacactgtatgaagatcaagtaaaagcctaccctcactcttcagaacaatttcagaacgagctcaccacca

SEQ ID NO: 156299 - DNA, 80 bp, synthetic construct
  source 1..80: mol_type = other DNA
ggccggagcgttgcgggtacggtggttgcgctgcaacggggtgttgcgcggccggtgacgttcgcgccgcggacggtgga

SEQ ID NO: 156300 - DNA, 80 bp, synthetic construct
  source 1..80: mol_type = other DNA
ggacatcacaattgggtgaagaagaacagtttgaaagcaaacctcataaagtataccgcttcaaagcaccacaacgtgtc

SEQ ID NO: 156301 - DNA, 80 bp, synthetic construct
  source 1..80: mol_type = other DNA
gagctcgtgcaagagcagcagctaaccaaggattacctgttctacttacacctggatctggtcaatttttaacaacagat

SEQ ID NO: 156302 - DNA, 80 bp, synthetic construct
  source 1..80: mol_type = other DNA
gctaaatgcccaccagggcacacactcaagcggggtctcggagctcctaggtcagaccacgaaaggtcagcctgcaaggt

SEQ ID NO: 156303 - DNA, 80 bp, synthetic construct
  source 1..80: mol_type = other DNA
atgttttcactgttggaccttccagcatgtttgtacatgtgggtaatttaatttatagaaatctccatctttttaactct

SEQ ID NO: 156304 - DNA, 80 bp, synthetic construct
  source 1..80: mol_type = other DNA
tatcaaaaactaccactctaggtcggaatccagcatcgagaacttcctcagccggtcagcgtgcgtgtacatgggtgagt

SEQ ID NO: 156305 - DNA, 80 bp, synthetic construct
  source 1..80: mol_type = other DNA
ggaccgtggctgtgcgtattgtgaatgaacatgacccagttaaaatagaatcgaaggtacgagtctacttaaaacccaaa

SEQ ID NO: 156306 - DNA, 80 bp, synthetic construct
  source 1..80: mol_type = other DNA
tgactacatccctacatgtgattgcactcaagctacatattactgtagacacaaaaatagatactatccaattgaagtca

SEQ ID NO: 156307 - DNA, 80 bp, synthetic construct
  source 1..80: mol_type = other DNA
cccgctcccaaccagaattcaaagtgagttttaagctcgattttcaataaacaaggccgttggaacttcacttgtcggtg

SEQ ID NO: 156308 - DNA, 80 bp, synthetic construct
  source 1..80: mol_type = other DNA
aagacgctgctatatagtaggctacctgcccctcttaatatgcggagaaaacacctccggcagaaactttgctacccact

SEQ ID NO: 156309 - DNA, 80 bp, synthetic construct
  source 1..80: mol_type = other DNA
ccccagagggtcagatatagcaggaaccaccagcacagtagaggaacagatacagtggatgtacagggcacaaaatcctg

SEQ ID NO: 156310 - DNA, 80 bp, synthetic construct
  source 1..80: mol_type = other DNA
catcaaacgagtaagtatggcatatcttggcaatcagctgcttatcgcaaccttgctcttaagtacttatgggttctatt

SEQ ID NO: 156311 - DNA, 80 bp, synthetic construct
  source 1..80: mol_type = other DNA
cagaataaaacgcacgggtgttgggtcgtttgttcggatcgatccgtcgacctcgaggggtggcccggtacccagctttt

SEQ ID NO: 156312 - DNA, 80 bp, synthetic construct
  source 1..80: mol_type = other DNA
gaaagacaccttgcttgaatgcaagaagttgaccttgtatgaagaccaggtcagagcatttcctcagtctccagaggcct

SEQ ID NO: 156313 - DNA, 80 bp, synthetic construct
  source 1..80: mol_type = other DNA
ggactgcaactgggaaaattgaggtttatcttagtttaagatgccctaacttcttcttccctcttcctgctcctaaagtt

SEQ ID NO: 156314 - DNA, 80 bp, synthetic construct
  source 1..80: mol_type = other DNA
ttgtggtaaagctttgatactccagaacaagaggacaaaggccagttactctataaatacagtagtccaacagttaaggc

SEQ ID NO: 156315 - DNA, 80 bp, synthetic construct
  source 1..80: mol_type = other DNA
cttgagtattgtagtaaactgaaacaactggatattctagaaagacaaataactacaatgcatgtgtcaaacccttctca

SEQ ID NO: 156316 - DNA, 80 bp, synthetic construct
  source 1..80: mol_type = other DNA
atgcaacgtctgtggataagccaacccaccctgaaacctcagctgatagattctacacactacgtagtgtcaactggggc

SEQ ID NO: 156317 - DNA, 80 bp, synthetic construct
  source 1..80: mol_type = other DNA
gaagcaaccatcgaaacacgctatgtctacaatgacaacactaatgcagaagcagatgtggaaatgttcctgggtagatc

SEQ ID NO: 156318 - DNA, 80 bp, synthetic construct
  source 1..80: mol_type = other DNA
cggtcatattggacatgagccaatataaatgtacatattatgatatggatacaacgtatgcaatggccattagccaatat

SEQ ID NO: 156319 - DNA, 80 bp, synthetic construct
  source 1..80: mol_type = other DNA
actaacaatgatctgattagaatagaaccaattggagtatggattcagggtgaacctggtcaaggtaaatcatttttaac

SEQ ID NO: 156320 - DNA, 80 bp, synthetic construct
  source 1..80: mol_type = other DNA
taccatacagaggagaaggggtggatttgaaacaagggtctatcacgccattgactccaataaccagtataacaacatat

SEQ ID NO: 156321 - DNA, 80 bp, synthetic construct
  source 1..80: mol_type = other DNA
accgaccagggtcttgtactgggccaggggctcgaggaagacctcgcactccaccgggcaggtaaacatggtcaccccgc

SEQ ID NO: 156322 - DNA, 80 bp, synthetic construct
  source 1..80: mol_type = other DNA
atccttgtcacctgctctgcatgttcagacatggcagtgcgcatgctccgtgatactccaatgatcaaacaagttgcaga

SEQ ID NO: 156323 - DNA, 80 bp, synthetic construct
  source 1..80: mol_type = other DNA
catcccgatggctcagaagcagagtgcctcttggttgaaaaagtttaatgatgcggcgagtgccgctaaggggcttgagt

SEQ ID NO: 156324 - DNA, 80 bp, synthetic construct
  source 1..80: mol_type = other DNA
attagaatctacatgaggatgaaacatgtcagggcatggataccacgaccaatgcgcaaccagaattacctgttcaaaac

SEQ ID NO: 156325 - DNA, 80 bp, synthetic construct
  source 1..80: mol_type = other DNA
gtatgtagagcagacaacataaacaacattcaatctcttataaaatataaatttttttttaagtggggaggaacaccagc

SEQ ID NO: 156326 - DNA, 80 bp, synthetic construct
  source 1..80: mol_type = other DNA
ggctatgggcaaggctcttagggttttcgctcttaaaatgcgcctgtctcgcatatacaggacccctaaaccgaaaggtg

SEQ ID NO: 156327 - DNA, 80 bp, synthetic construct
  source 1..80: mol_type = other DNA
tataaatattcataacaggaaaccacaaaatttgaattgccgaccacaaactgccatatgtaaattaacttcttctttta

SEQ ID NO: 156328 - DNA, 80 bp, synthetic construct
  source 1..80: mol_type = other DNA
gtacaagataaatttcataacttgcttaagggccaccagattactacaattttcaacacttgtttaaaagatgaactgag

SEQ ID NO: 156329 - DNA, 80 bp, synthetic construct
  source 1..80: mol_type = other DNA
ttctatggcaaaagagctattgaaagactgcagggacaacaagatgatgttacatatattgcaggacctccaaaaaggcc

SEQ ID NO: 156330 - DNA, 80 bp, synthetic construct
  source 1..80: mol_type = other DNA
ccagacccctttggaggggctctcagcaccacctcctttaaccttaaagtgctgtacgaccagcaccagcggggtcttaa

SEQ ID NO: 156331 - DNA, 80 bp, synthetic construct
  source 1..80: mol_type = other DNA
aagctatcaagcgagtgtcagaaaaaccgacaaatgctgcaatatttacaaaccctttcaagcgaccgaggtatcttccc

SEQ ID NO: 156332 - DNA, 80 bp, synthetic construct
  source 1..80: mol_type = other DNA
tgagccgagagccgtccagcggatcgtcggtggccggagaggctgtcgtgggaggcagtgaggaggccagcacgtccagg

SEQ ID NO: 156333 - DNA, 80 bp, synthetic construct
  source 1..80: mol_type = other DNA
cccactggaggatattcactatatcctccagtgtttcccactggaggatatggtactgcggtatcacggtacccttgtac

SEQ ID NO: 156334 - DNA, 80 bp, synthetic construct
  source 1..80: mol_type = other DNA
atccaggaaaaacattgggacaaacctccacgccatatttcaagggctaggtgatggagacacaccaggatttatagttg

SEQ ID NO: 156335 - DNA, 80 bp, synthetic construct
  source 1..80: mol_type = other DNA
cttattttcaaacaacccaagtaatagcacaactgtaccccggatttagacctgcacaaagcggaggtacaaacaaaacc

SEQ ID NO: 156336 - DNA, 80 bp, synthetic construct
  source 1..80: mol_type = other DNA
ccaccaagagcagtcccatatcagaattccacagttgattttgctcaaaatgctaccgccatggggcaagtggcgtcaat

SEQ ID NO: 156337 - DNA, 80 bp, synthetic construct
  source 1..80: mol_type = other DNA
ttaatctacaagtacatcctagaaatgacacaaacgggacagatgtgaatccatggatatgcgaagaaccaaagcacgaa

SEQ ID NO: 156338 - DNA, 80 bp, synthetic construct
  source 1..80: mol_type = other DNA
ggtagcggtagacaccctagagcagtacaagtggttgacccgacgtccatgggaccccgttgggtattccactcctggga

SEQ ID NO: 156339 - DNA, 80 bp, synthetic construct
  source 1..80: mol_type = other DNA
acaataattgctaatatcattagtatttctggtataatctatgtcatttacaagcttttctgtacactacagggaccata

SEQ ID NO: 156340 - DNA, 80 bp, synthetic construct
  source 1..80: mol_type = other DNA
tcacaaaaactgacagcacagttaaaacaccaccaactcaaatgaaagaagcaaacaaagcctatgtaatagcagccaaa

SEQ ID NO: 156341 - DNA, 80 bp, synthetic construct
  source 1..80: mol_type = other DNA
ttatacacacacacgctcaaccaactatgtgccacaagatggtgaagttaagatcttcctcaaagagagagctagtttaa

SEQ ID NO: 156342 - DNA, 80 bp, synthetic construct
  source 1..80: mol_type = other DNA
gacgcctacgtcatgctcaataatgtgctttgtgtcagcttgcaatgacttctctgtccgattactgaaagacactccat

SEQ ID NO: 156343 - DNA, 80 bp, synthetic construct
  source 1..80: mol_type = other DNA
acgtgaacagcctggaagcctacagaataccggtgcattcagtgatggaaactggatcgcaggtctttggtttcacgcta

SEQ ID NO: 156344 - DNA, 80 bp, synthetic construct
  source 1..80: mol_type = other DNA
atacctacaatgccaaaacacatgcacaacaattagaacaattaagagaagcctactttaagcagctaacctctgagggg

SEQ ID NO: 156345 - DNA, 80 bp, synthetic construct
  source 1..80: mol_type = other DNA
acactactaccaggaagaaaaggagttagaagcaacagttcaaaaggatcaagacaatcagtggacatataagatacacc

SEQ ID NO: 156346 - DNA, 80 bp, synthetic construct
  source 1..80: mol_type = other DNA
ttgttgcgcgataccccctttattagtcaaacagcactcctacaaggggatgtggtggaggccattgaaggagcggtttc

SEQ ID NO: 156347 - DNA, 80 bp, synthetic construct
  source 1..80: mol_type = other DNA
cctttgaggccgtgtagtttctgtggtgcgggtgcattaggcggcgcaatgcgggatctgccggtcgctgttggcgtgca

SEQ ID NO: 156348 - DNA, 80 bp, synthetic construct
  source 1..80: mol_type = other DNA
accctggaaagttcaccgaacccatgaaagacattatgataaagtccctgccagctttaaactcgccatccgcagaggaa

SEQ ID NO: 156349 - DNA, 80 bp, synthetic construct
  source 1..80: mol_type = other DNA
gtgatatgatcgaaaattccatcaaccgaattaccagtgcaatttccactacccagacacaccagacagcagctgacact

SEQ ID NO: 156350 - DNA, 80 bp, synthetic construct
  source 1..80: mol_type = other DNA
acagtatggtgacctcagtaaagaaggcaaagtcctcatcaggtgtccctacaccaagccgccattagcagaccccaaag

SEQ ID NO: 156351 - DNA, 80 bp, synthetic construct
  source 1..80: mol_type = other DNA
gaggccttgttctccaagtacaagggaaatggcccatgtgagatgaatgatcatattaaggtagcaatttcccactattc

SEQ ID NO: 156352 - DNA, 80 bp, synthetic construct
  source 1..80: mol_type = other DNA
aggacgcccagagactcgagcgactcttcgcagcagatgagctgaccccagggcgtttctggcccgtcggtgacagccgc

SEQ ID NO: 156353 - DNA, 80 bp, synthetic construct
  source 1..80: mol_type = other DNA
tgacattgaaataaccatagtggtcactagctaccaacaaccaggaaccataacaacacaagacatgccggtgttaacac

SEQ ID NO: 156354 - DNA, 80 bp, synthetic construct
  source 1..80: mol_type = other DNA
ctatctacaagtgtgctcatctaaccaatcccaatgagaacacaatactgctagccatctcatcagatttgcagattgat

SEQ ID NO: 156355 - DNA, 80 bp, synthetic construct
  source 1..80: mol_type = other DNA
tcccacactctcagtcaacatcaggccattggcctaattggcacaattcttctaactgctggtttgatgtcaaccattaa

SEQ ID NO: 156356 - DNA, 80 bp, synthetic construct
  source 1..80: mol_type = other DNA
gtgtgtgggaaatcaactatactgacacagttcagctcaggagaaaattggagattttcacttactcacgctttgataca

SEQ ID NO: 156357 - DNA, 80 bp, synthetic construct
  source 1..80: mol_type = other DNA
ccccacactactaatagacaaatggtactttcagaaggacttttcagacgttacactgtttaacctcaatgttacggaag

SEQ ID NO: 156358 - DNA, 80 bp, synthetic construct
  source 1..80: mol_type = other DNA
gcaccgcagcaaagcgaggaagaagagaaccaggaggaggagcagcagctccagcagcgagagctccagctcaggctcca

SEQ ID NO: 156359 - DNA, 80 bp, synthetic construct
  source 1..80: mol_type = other DNA
gtaaccaagacacctttgacaaagtagttaacaactatttaattaaaaacatgacaacatattacaaaaaaatgcaagat

SEQ ID NO: 156360 - DNA, 80 bp, synthetic construct
  source 1..80: mol_type = other DNA
tcctctatgggccgcggaggagctggagttggagcagggattcctgacgacctgtttggatatagggtttccaccccact

SEQ ID NO: 156361 - DNA, 80 bp, synthetic construct
  source 1..80: mol_type = other DNA
attacacagcccaattatctactttagatatagaccccacaccactaagtctggaagaaagcgtgtatggcatagaaggt

SEQ ID NO: 156362 - DNA, 80 bp, synthetic construct
  source 1..80: mol_type = other DNA
actctgttcaaaatacacaacaaagcgccccggttcacagtcaagaagtaccggcactaacagcagtggaaactggagca

SEQ ID NO: 156363 - DNA, 80 bp, synthetic construct
  source 1..80: mol_type = other DNA
ctctaatacagctgttagtcaacaaattcactcctttgagacttggctatatgaatccagcacacactatcaaacatttc

SEQ ID NO: 156364 - DNA, 80 bp, synthetic construct
  source 1..80: mol_type = other DNA
gggccacagaatacctagcagctagagtatttgatagacccccaagaagcaacctcaaagacaccccttactacccttac

SEQ ID NO: 156365 - DNA, 80 bp, synthetic construct
  source 1..80: mol_type = other DNA
ctgcaggggggggtggttatgtgtgttttgcagacattaggcaattggattttattgctgaaacacagggtatcactgat

SEQ ID NO: 156366 - DNA, 80 bp, synthetic construct
  source 1..80: mol_type = other DNA
cgggcaatagagtccctcgatcagtacaaatcgttgacccgaagtacaacactcccgaacttgccatacatgcctgggac

SEQ ID NO: 156367 - DNA, 80 bp, synthetic construct
  source 1..80: mol_type = other DNA
ggcaattcgggctcgggactggccgggctatgggcaagattcttaaaaaattcccccgatccctctgtcgccaggacata

SEQ ID NO: 156368 - DNA, 80 bp, synthetic construct
  source 1..80: mol_type = other DNA
tgtgtagtgaccacctcaaatggtaaatttacaggattgggaatttatgataggacacttattataccaacacatgctga

SEQ ID NO: 156369 - DNA, 80 bp, synthetic construct
  source 1..80: mol_type = other DNA
agctactatcaggacgataagcaattgtagacgtggaaacccgccttgcggtggtagtaacactataagttgcgttagta

SEQ ID NO: 156370 - DNA, 80 bp, synthetic construct
  source 1..80: mol_type = other DNA
gacgataaagaatacaaagccgcggtgtcgtccggaggattacgcgaccagattgcaagatctccgcgtcacctttcatc

SEQ ID NO: 156371 - DNA, 80 bp, synthetic construct
  source 1..80: mol_type = other DNA
aaagctttaccccctcaagcactgcgcccgccaagaattcattcgccccagtagattggctgttggggtgcggtgtgatg

SEQ ID NO: 156372 - DNA, 80 bp, synthetic construct
  source 1..80: mol_type = other DNA
taagctagttttagaaaatctaggatttgaatctggcctaatagatagattatgtaaatcaaaacacatctttaaaaata

SEQ ID NO: 156373 - DNA, 80 bp, synthetic construct
  source 1..80: mol_type = other DNA
ggggacgtgcacgacgcagtggtcggagccatgacacgtgttgctgacaccatcagcagtgggcccagtaattcagagag

SEQ ID NO: 156374 - DNA, 80 bp, synthetic construct
  source 1..80: mol_type = other DNA
ctagcttagataataaaggaattcttttcactagcaactttgtccttgcttcaacaaattcaaacacacttagtcctcca

SEQ ID NO: 156375 - DNA, 80 bp, synthetic construct
  source 1..80: mol_type = other DNA
ggcaacaagaaacaaacaagtcgaatgtagttacagggtcctactcaatgcccagcaacaaagcagtaagctaccaccta

SEQ ID NO: 156376 - DNA, 80 bp, synthetic construct
  source 1..80: mol_type = other DNA
ttgaactagatatggcagaattagccaaagaaggtgataaatatggtttaacaattacacctgcagataaatctgacaag

SEQ ID NO: 156377 - DNA, 80 bp, synthetic construct
  source 1..80: mol_type = other DNA
tgatagccaaatacaagtttggcttcaagtggggtggcaatactgtacattcccagatcatcagaaacccctgccacgac

SEQ ID NO: 156378 - DNA, 80 bp, synthetic construct
  source 1..80: mol_type = other DNA
gacttctcagaaggagggtacatatgcgcattttaccaaacagcaattgttgtgccggcggtggctccaaagaacatgag

SEQ ID NO: 156379 - DNA, 80 bp, synthetic construct
  source 1..80: mol_type = other DNA
tggattcttttcattgactcaactcacgcttgatttgaaatccatagtgttattgagtagaaaaagctatcataatgggt

SEQ ID NO: 156380 - DNA, 80 bp, synthetic construct
  source 1..80: mol_type = other DNA
ccagagtctacgtcgtgcacttcctgggcatggtctacatcataatataagaaggcgcactccgaatggctgagttttcc

SEQ ID NO: 156381 - DNA, 80 bp, synthetic construct
  source 1..80: mol_type = other DNA
gaacactactctgcccaattgttcatgttggacatcaacccagaacccatatccctagaacaagctgtatatggaatgga

SEQ ID NO: 156382 - DNA, 80 bp, synthetic construct
  source 1..80: mol_type = other DNA
tacctgaaggatgaactacgcagtccagagaaaataaggctaggtaagaccagagcaattgaagcagctagcctaaatga

SEQ ID NO: 156383 - DNA, 80 bp, synthetic construct
  source 1..80: mol_type = other DNA
aaccaaaagacatgtcagcctacaacacttgggtgtcacagagaggtagtagtaactttatcccaggcaatacatcagta

SEQ ID NO: 156384 - DNA, 80 bp, synthetic construct
  source 1..80: mol_type = other DNA
atgcagacccaaaagcagggtatacccactcgtatgcccagtggagcacaacagtttatgacaactgaggatgagcaatc

SEQ ID NO: 156385 - DNA, 80 bp, synthetic construct
  source 1..80: mol_type = other DNA
ttcttagctagaatgataacaagtgatagtgacatctactctttaccacctgatcccaagtattttgatggttatgatca

SEQ ID NO: 156386 - DNA, 80 bp, synthetic construct
  source 1..80: mol_type = other DNA
agcaatggagcgtgtggtttcctgtggaccgttcatggtcagagaccaagaccgcaacagttgggacataactgtaggct

SEQ ID NO: 156387 - DNA, 80 bp, synthetic construct
  source 1..80: mol_type = other DNA
gagggggcatgactacagacaaattcaccctaagaatactctatgacgagtacaagaggtttatgaactactggacagcc

SEQ ID NO: 156388 - DNA, 80 bp, synthetic construct
  source 1..80: mol_type = other DNA
gatattaatagccattgtgtcagtaatagcactagtattgtcaattaaattaacagtaaaaggtaacgtggtaaggcagc

SEQ ID NO: 156389 - DNA, 80 bp, synthetic construct
  source 1..80: mol_type = other DNA
tccgttcttcactccatctacaacgacttcctctctatagtagatactggaaactataaaacacaatttgtgtcaaactt

SEQ ID NO: 156390 - DNA, 80 bp, synthetic construct
  source 1..80: mol_type = other DNA
ctttagtgttagattacttagggacaccacacacatttcccaaactgctctcattgcgtcaacccaagggatcgatgatg

SEQ ID NO: 156391 - DNA, 80 bp, synthetic construct
  source 1..80: mol_type = other DNA
agctcctccccaggttcagaggacaggctgcctctcctgtcttcactgcaggaagcccagagggcatttactactccagg

SEQ ID NO: 156392 - DNA, 80 bp, synthetic construct
  source 1..80: mol_type = other DNA
attgaagccacaattgacaacattacacaaaacgcactaaatacagtgcagaacacgacgctttcagggccaacccactc

SEQ ID NO: 156393 - DNA, 80 bp, synthetic construct
  source 1..80: mol_type = other DNA
atgatgacacgaaatgggatggcgcctccaaccccagcgtcttctaccaacccaagagtggcttcccacgtttcaccatc

SEQ ID NO: 156394 - DNA, 80 bp, synthetic construct
  source 1..80: mol_type = other DNA
tttacctatcttaggtttgacatagaggtcacatttgtgataactagctgccaagacccgagcacacgcttggatcagga

SEQ ID NO: 156395 - DNA, 80 bp, synthetic construct
  source 1..80: mol_type = other DNA
tggcgaagatatgtcactattctgtcaaatggtatcatcagtgccttttataccacctatggctgatctaccagataaag

SEQ ID NO: 156396 - DNA, 80 bp, synthetic construct
  source 1..80: mol_type = other DNA
ctggcatatataggaggaaccaaagccaatgtaagctatgaccatacacacccaggagaggttggacatgagatacgagg

SEQ ID NO: 156397 - DNA, 80 bp, synthetic construct
  source 1..80: mol_type = other DNA
catatataggagggacaaaagccaatgtaagctatggccatacacatccaggtgaaaatggtcacgagatacgtggacca

SEQ ID NO: 156398 - DNA, 80 bp, synthetic construct
  source 1..80: mol_type = other DNA
tcctctgagaccctccgggcccggacggccgccctcaccccagggcctccatctccaggggcagcaggctcaccaccaca

SEQ ID NO: 156399 - DNA, 80 bp, synthetic construct
  source 1..80: mol_type = other DNA
atcaaactaggaaagcagctaaagaagtagttgactggtttagcagtaaaattaggtcaatgttaagttttgttgagaga

SEQ ID NO: 156400 - DNA, 80 bp, synthetic construct
  source 1..80: mol_type = other DNA
cacatacaacaaagaccccttccccacagttcctactaaagacacgtttgctacttggaaaaaagctttcactgatacta

SEQ ID NO: 156401 - DNA, 80 bp, synthetic construct
  source 1..80: mol_type = other DNA
gggccgaccatctggcgcacatcccccgtcgcaacaccagccgcctccactgagacgcctgcctgctctcccggcacccc

SEQ ID NO: 156402 - DNA, 80 bp, synthetic construct
  source 1..80: mol_type = other DNA
gtgtaactttcttgaaaagaggtttcaagcaagatgataaatatcctttcttgattcatcctactttcccaatctctgaa

SEQ ID NO: 156403 - DNA, 80 bp, synthetic construct
  source 1..80: mol_type = other DNA
atgagctaactaccctgatcataaacgagagaaacaggcgatacagtattggcaattgcttggaagccctgtttcaaggc

SEQ ID NO: 156404 - DNA, 80 bp, synthetic construct
  source 1..80: mol_type = other DNA
aaggagctagaagcaacagtccaaaaagaccaagacaatcagtggacatataagatacatcagggagaaaaaattctaaa

SEQ ID NO: 156405 - DNA, 80 bp, synthetic construct
  source 1..80: mol_type = other DNA
acacaaattagtgaagatcgtagatgctgctgagttagtagacgaacaaggggttaacttagagctcacactggtaacgc

SEQ ID NO: 156406 - DNA, 80 bp, synthetic construct
  source 1..80: mol_type = other DNA
gaggactacactcctcaacctttccccttcggagggggaatgagcacagtgactttctctctgaaagccttgtatgacca

SEQ ID NO: 156407 - DNA, 80 bp, synthetic construct
  source 1..80: mol_type = other DNA
ttagcatttcggaaagacaagtcatggaaggcaccgtaccgcaagatgggggtctgaatgttattgttttagccgtatga

SEQ ID NO: 156408 - DNA, 80 bp, synthetic construct
  source 1..80: mol_type = other DNA
gccaggatttcaggcactatcagagggatgtaccccttatgatattaatcagatgctaaattgtgtaggagaacatcagg

SEQ ID NO: 156409 - DNA, 80 bp, synthetic construct
  source 1..80: mol_type = other DNA
gagccccagatagcaggaaaaatgcaatgctgggtacacacgtcatatgggatgttggattgcagtccagttgtgtgctc

SEQ ID NO: 156410 - DNA, 80 bp, synthetic construct
  source 1..80: mol_type = other DNA
tgcacgttggccgacgctatcaaatttctcaatcaccagtgtcgtgtatgccactttgacattacacccatgaacgtgct

SEQ ID NO: 156411 - DNA, 80 bp, synthetic construct
  source 1..80: mol_type = other DNA
atacgctatgtacaccgaactgtcgctgttgtataagaagaaaaaactctccatatttatatcgtctgaatttttgcttg

SEQ ID NO: 156412 - DNA, 80 bp, synthetic construct
  source 1..80: mol_type = other DNA
gaatttcagccagcatcttagcaccggcatctacacggaccgcgtccttcgtggccagggacggcaggcaggcctccagc

SEQ ID NO: 156413 - DNA, 80 bp, synthetic construct
  source 1..80: mol_type = other DNA
gggattaaagtgcttatgcgcaaagaatgtgtcaacgccaggtgttcatgcctctgcttgcatgagttaggtgtggcttg

SEQ ID NO: 156414 - DNA, 80 bp, synthetic construct
  source 1..80: mol_type = other DNA
gagagcagctccagcaccagctccaagagcagcttcaactccgaagagggctccagtgcctattcgagcagctagtcaga

SEQ ID NO: 156415 - DNA, 80 bp, synthetic construct
  source 1..80: mol_type = other DNA
atcacatgagagttgctatctcacactattcagcccaattaatgactctagatattgatccaacaaacatgtctctggag

SEQ ID NO: 156416 - DNA, 80 bp, synthetic construct
  source 1..80: mol_type = other DNA
tcctcggtgagaaaattctccacggcgaacagaccgttgcgactggccacgtacaacagcgtgtcgtgctccgtaactat

SEQ ID NO: 156417 - DNA, 80 bp, synthetic construct
  source 1..80: mol_type = other DNA
tgcggcgcttcatgacattgataacctcaggcttggttatcagaggccgcttggccagcatcacactagtctcctctaag

SEQ ID NO: 156418 - DNA, 80 bp, synthetic construct
  source 1..80: mol_type = other DNA
taggatatttactatgtcaacctatgcttacaggaacatcaagtggcaagattgaggtgtatctcagcttgaggtgtcca

SEQ ID NO: 156419 - DNA, 80 bp, synthetic construct
  source 1..80: mol_type = other DNA
caacatcatatacaaaaacggtgaaaaactattcaaagaacatgaagacttaataacctggatgacccaaactaacaata

SEQ ID NO: 156420 - DNA, 80 bp, synthetic construct
  source 1..80: mol_type = other DNA
gcgcggttgcgacgggtcaagttttagacatgagttccgggacactgcggaactttgatccgtgcgttaacctggtcccg

SEQ ID NO: 156421 - DNA, 80 bp, synthetic construct
  source 1..80: mol_type = other DNA
ggggcaagagagcagctcagaggaccaagaacaagcaccccaagaaaaagaggaccagaaggaagcgctcatggagcagc

SEQ ID NO: 156422 - DNA, 80 bp, synthetic construct
  source 1..80: mol_type = other DNA
ggttaacatacaacagttccagtccaaacaaggtacattgtataattcaaggtagacttggggaggatgctaggtttttc

SEQ ID NO: 156423 - DNA, 80 bp, synthetic construct
  source 1..80: mol_type = other DNA
catacaggccaagtacagatttgactttaaatggggcggcaatatgctttatcagcagaccatcagaaacccttgcaaag

SEQ ID NO: 156424 - DNA, 80 bp, synthetic construct
  source 1..80: mol_type = other DNA
tacagacagaagaagaggccactgccactgcttctggtgcgagctgaaccgaaggcactcgctactgatatgagctggcg

SEQ ID NO: 156425 - DNA, 80 bp, synthetic construct
  source 1..80: mol_type = other DNA
acgaacatggaagggacggatgcattccagattaaagttactgctggcaatgtgcaggacaaaaacgcaatattctcctt

SEQ ID NO: 156426 - DNA, 80 bp, synthetic construct
  source 1..80: mol_type = other DNA
atccgggtagcatatgctatcctaatctctatgtgggtagtatgtgctatcctgatctctatgtgggtagtatgtgctat

SEQ ID NO: 156427 - DNA, 80 bp, synthetic construct
  source 1..80: mol_type = other DNA
gggtctgacatagcaggaacaacaagcacagtagaagaacagatccaatggatgtttagggcacaaaatcccgtaccagt

SEQ ID NO: 156428 - DNA, 80 bp, synthetic construct
  source 1..80: mol_type = other DNA
caagatagggcccccccacttgtttcaacacaagtggtacactcagcaagacctctgttccgttagccttgtgcaattta

SEQ ID NO: 156429 - DNA, 80 bp, synthetic construct
  source 1..80: mol_type = other DNA
tgtgtgaggttgataccctcataccaataaacaacacttcagagaatctaaaaactacaaacatgtatactgtctatttg

SEQ ID NO: 156430 - DNA, 80 bp, synthetic construct
  source 1..80: mol_type = other DNA
aaactaggcatgtaatccagacaagatccagaagtgaatctactattgaatcattctttgcgcggggcgcttgtgtcacc

SEQ ID NO: 156431 - DNA, 80 bp, synthetic construct
  source 1..80: mol_type = other DNA
tatgtgtgtgccatatgcccctacacagacccccctatgtacaacaaacagaacccccagcaggggtacgtgttttatga

SEQ ID NO: 156432 - DNA, 80 bp, synthetic construct
  source 1..80: mol_type = other DNA
gtagattcttttatgccaatcaacaatattacagaccaaaagatagatgtacccatctatagtaggacagtgacggcacg

SEQ ID NO: 156433 - DNA, 80 bp, synthetic construct
  source 1..80: mol_type = other DNA
aaatatggcttgaccataacaccagcaaataaaactgaaaactttgaggacttgacttgggacaccatcactttcttaaa

SEQ ID NO: 156434 - DNA, 80 bp, synthetic construct
  source 1..80: mol_type = other DNA
tacacccagtacaagtggagtaaatagtcaggaagtgccagcactaacggccgtcgagactggagcttcaggtcaagcag

SEQ ID NO: 156435 - DNA, 80 bp, synthetic construct
  source 1..80: mol_type = other DNA
gatggcggcgacccagaaggcggtggagacgctggcgcgccagaaggagactaccgcgaagacgagctcgaagagctgtt

SEQ ID NO: 156436 - DNA, 80 bp, synthetic construct
  source 1..80: mol_type = other DNA
agcgggacgtgaaggtaagagaggccttcgggacagatagtccaaaagtttgtgtagctatagagctgttttcctaccct

SEQ ID NO: 156437 - DNA, 80 bp, synthetic construct
  source 1..80: mol_type = other DNA
aacatggggctccgaatccttgggctggtggtggaaaatacctgactgcctgaaggatatgggtttgtttggacaaaata

SEQ ID NO: 156438 - DNA, 80 bp, synthetic construct
  source 1..80: mol_type = other DNA
tggttacttcggtactaacagaaaaactccttaagaacttaattaagttgattagtagtctggttataataactaggaat

SEQ ID NO: 156439 - DNA, 80 bp, synthetic construct
  source 1..80: mol_type = other DNA
gtgttgctcgtgtatacttcaaacctaagcatgtgagagcatgggtaccgcgagcaccacggttgtgtccatatctatat

SEQ ID NO: 156440 - DNA, 80 bp, synthetic construct
  source 1..80: mol_type = other DNA
ccaacctgcccccaccagtgacctctcagatggtaaccccaccactgaccccgcccctcgtgacaactttgattaccgcc

SEQ ID NO: 156441 - DNA, 80 bp, synthetic construct
  source 1..80: mol_type = other DNA
gtctaacaaccatacaaatatcattttcagtgcagaggtggcagaactgtatcgattagaattgggggattataaattag

SEQ ID NO: 156442 - DNA, 80 bp, synthetic construct
  source 1..80: mol_type = other DNA
cgttggagagcgtggagtggcagtcaaactctcgtggttggtggtggaaactccccgacgcccttaaagatatgggtatg

SEQ ID NO: 156443 - DNA, 80 bp, synthetic construct
  source 1..80: mol_type = other DNA
aagatatgggcatctttggagaaaacatgttctatcattttcttggtaggactgggtatacaattcatgtacaatgcaat

SEQ ID NO: 156444 - DNA, 80 bp, synthetic construct
  source 1..80: mol_type = other DNA
ggcagccggggttcctggcgctccactgcacctggaatgcagggtgcgggcgtggtcccctggaccccagccccgccgat

SEQ ID NO: 156445 - DNA, 80 bp, synthetic construct
  source 1..80: mol_type = other DNA
tttgatgtagaagtcacatttgtcataactagtgtgcaggatgattcaactaggcagaataccgacacaccagcactcac

SEQ ID NO: 156446 - DNA, 80 bp, synthetic construct
  source 1..80: mol_type = other DNA
gatgacccagctgacactagagatggagtgggcattccagagcctcttcataatgttgacagtggaggaagccgaacata

SEQ ID NO: 156447 - DNA, 80 bp, synthetic construct
  source 1..80: mol_type = other DNA
ctgtatggaaggatgttattactgtcacagtcaagaccgttacttcccagtgaaagtcaaggcacatgaatggtatgaga

SEQ ID NO: 156448 - DNA, 80 bp, synthetic construct
  source 1..80: mol_type = other DNA
tttctctctaaaagtactgtacgaccagcacctcaggggtctcaacagatggagcacctctaatgacatacttgacctgg

SEQ ID NO: 156449 - DNA, 80 bp, synthetic construct
  source 1..80: mol_type = other DNA
ccgccggcgcactcggtgcctggtagagaaggccagttctacgcggcgacgtttcacgcgcacgctgctttctgcggttg

SEQ ID NO: 156450 - DNA, 80 bp, synthetic construct
  source 1..80: mol_type = other DNA
aaaagcatctaacaacgacggacaattctgtttcccataaacgaaaccattacccaagaacttcccaccgcagtgcctgg

SEQ ID NO: 156451 - DNA, 80 bp, synthetic construct
  source 1..80: mol_type = other DNA
gcaggcgaaggtcgcagataatatgatccggttgcgtggttagcagcggcgtgcgcatttgctcgccgtagatggcctcg

SEQ ID NO: 156452 - DNA, 80 bp, synthetic construct
  source 1..80: mol_type = other DNA
gcatcttcaggaggagcccgtgaatcccaggtgtcattcgcgcgtcatccccgcgcacccccagtcccattaacatagcg

SEQ ID NO: 156453 - DNA, 80 bp, synthetic construct
  source 1..80: mol_type = other DNA
ggaaagagttggaaccgaaagacaaaaaaaaaagcctagtcgtactcgggatctctgagcgagacggattgcgtagcaac

SEQ ID NO: 156454 - DNA, 80 bp, synthetic construct
  source 1..80: mol_type = other DNA
cagtaaacatcatgtgggacagggacctgatagtagtggagtccagggcacagggcattgactccattgccaggtgcaat

SEQ ID NO: 156455 - DNA, 80 bp, synthetic construct
  source 1..80: mol_type = other DNA
gtatccatgtgggtggtaatggggcacaagggtttgctgcaatgttgctcagaaattatttcaccgacaaacaaggagag

SEQ ID NO: 156456 - DNA, 80 bp, synthetic construct
  source 1..80: mol_type = other DNA
cgtatggagaagaagacctagaactgctgttcgccgccgccgaggaagacgatatgtgagtagaaggcgccgctacaggc

SEQ ID NO: 156457 - DNA, 80 bp, synthetic construct
  source 1..80: mol_type = other DNA
tggatttgcttcactaacacagctcacaatcaacttggtatatataataatagtgattagagaaaaataccataatgggc

SEQ ID NO: 156458 - DNA, 80 bp, synthetic construct
  source 1..80: mol_type = other DNA
gattgcactgatgctacttactattgtaaacataaagatagatattacccaatcaaagttactagtcatgattggtatga

SEQ ID NO: 156459 - DNA, 80 bp, synthetic construct
  source 1..80: mol_type = other DNA
acactccaaccacagcaaacctactctgtttcgtatccgcttgcaaggatttctgcttgcgaatggctcgggacactaat

SEQ ID NO: 156460 - DNA, 80 bp, synthetic construct
  source 1..80: mol_type = other DNA
aaaatcaaagctgcaccccagtgtattctataatgtttttccaggagataaagaaccagcagtgcttagtgataatgatc

SEQ ID NO: 156461 - DNA, 80 bp, synthetic construct
  source 1..80: mol_type = other DNA
actgccagatgaatgagtatgtattaactgcagcaaaacactatgcagcccagctattcccattggatatcaaccctgaa

SEQ ID NO: 156462 - DNA, 80 bp, synthetic construct
  source 1..80: mol_type = other DNA
caagctattagacccagagaacaccaacctggagttaaccatactagttctagatagaaatgagaaatttagggacataa

SEQ ID NO: 156463 - DNA, 80 bp, synthetic construct
  source 1..80: mol_type = other DNA
aacaatagatacagtgatcagtaatgctcttcaattatcacaacccaagccacagaagcaattaacagctcagtccacag

SEQ ID NO: 156464 - DNA, 80 bp, synthetic construct
  source 1..80: mol_type = other DNA
ttggggacacaaatgtttggaacgtcaccttgcagtgttaacttggctttcatgaatctctttgatcttccacaaggggt

SEQ ID NO: 156465 - DNA, 80 bp, synthetic construct
  source 1..80: mol_type = other DNA
aattaaccgtcggaaattcctcaattaccacccaagaggctgctaacattgttctggcttacggtgagtggcctgaatat

SEQ ID NO: 156466 - DNA, 80 bp, synthetic construct
  source 1..80: mol_type = other DNA
tgtaccatttgactataactttggagatggtaaaatgccagatggacaaccttacataccaatagaatacagatttaact

SEQ ID NO: 156467 - DNA, 80 bp, synthetic construct
  source 1..80: mol_type = other DNA
tccaggtaatataattcaaatagatgggataaatgtgaaaatttcagattcttacgacctgtataataagaatggtgtga

SEQ ID NO: 156468 - DNA, 80 bp, synthetic construct
  source 1..80: mol_type = other DNA
cccacactattccaccagcaggcagtaatggaagacatagcaaaagcaggcccctttgcaccaaagacaccaaaacccag

SEQ ID NO: 156469 - DNA, 80 bp, synthetic construct
  source 1..80: mol_type = other DNA
gagaacaaacaacagtgcgactatagtggtcccatacgttaactccttggtgatcgactgcatggcgaaacacaacaact

SEQ ID NO: 156470 - DNA, 80 bp, synthetic construct
  source 1..80: mol_type = other DNA
gctcaaacattaacaaaacttcaatagatgcatacaatacatggctagcacagtttaatacaggtgcaaatcaacactac

SEQ ID NO: 156471 - DNA, 80 bp, synthetic construct
  source 1..80: mol_type = other DNA
accaccaccgattttttttgttttaaccccgtatcgcgcggacgcctagtgtccgtttcccatcaccagggtcctctgtt

SEQ ID NO: 156472 - DNA, 80 bp, synthetic construct
  source 1..80: mol_type = other DNA
tgatttcagtgtgcgactgctgcgagacaccactcacatttcacaatctgcactcccacagggtattgaagatttgattt

SEQ ID NO: 156473 - DNA, 80 bp, synthetic construct
  source 1..80: mol_type = other DNA
gcacactgatcgttgcactgatacctgagcaccaaattgcaagcgcactccatggtgatgtaaatgttggctataaatac

SEQ ID NO: 156474 - DNA, 80 bp, synthetic construct
  source 1..80: mol_type = other DNA
catcacaagacattgctaatgcagttgttgcttacggtgtctggccacaatatctaacagatgctgatgccaatgctatt

SEQ ID NO: 156475 - DNA, 80 bp, synthetic construct
  source 1..80: mol_type = other DNA
gcccactgggcgctagcacactggttctgcgggacctttgtgcgcctgttttataacccttccctaagcagtaacttaga

SEQ ID NO: 156476 - DNA, 80 bp, synthetic construct
  source 1..80: mol_type = other DNA
tacaagccacagcatgcaccctatacaacccctggctcagagacaccacaaaaagcccagtcatagcttccagggtactt

SEQ ID NO: 156477 - DNA, 80 bp, synthetic construct
  source 1..80: mol_type = other DNA
tgtgggatcttggactgcagtcttcatgcacacttgttgcaccatggatgtctagtactttctaccgcaggactaagggt

SEQ ID NO: 156478 - DNA, 80 bp, synthetic construct
  source 1..80: mol_type = other DNA
cccccccccccccgtcccgcagcaccccggccgtgccggcgcttagcatgcccgaaaaccaccgtccccggcgcgaaagc

SEQ ID NO: 156479 - DNA, 80 bp, synthetic construct
  source 1..80: mol_type = other DNA
actttcagatgtatggattgtccagaaataggcaaagttttaaggcactgtgtgaacatggatcatgcctcggcactgga

SEQ ID NO: 156480 - DNA, 80 bp, synthetic construct
  source 1..80: mol_type = other DNA
acacacccaggtgaaactggtaggaatgttggcataaccatccgtgagcacccaaacaaacaacctagtgatgacaactg

SEQ ID NO: 156481 - DNA, 80 bp, synthetic construct
  source 1..80: mol_type = other DNA
ggacgatatcaccccccgaggagcgagctacggtggcaatttcaccaatgtcacatggagcctagagggtctctgggaac

SEQ ID NO: 156482 - DNA, 80 bp, synthetic construct
  source 1..80: mol_type = other DNA
ggaggaagatttgacattacattataaaaacaaagtcttcccaatagaacagccttctgtgactcaagtcacgttgggtg

SEQ ID NO: 156483 - DNA, 80 bp, synthetic construct
  source 1..80: mol_type = other DNA
atagagcaaagtggtaccccaacatactacaccagcaacaggtaatggaggatgtagccagagcaggcccctttgcacct

SEQ ID NO: 156484 - DNA, 80 bp, synthetic construct
  source 1..80: mol_type = other DNA
gctagatgagtaccaaacagcaggtgtgtgggataggccggtaagaacataccacacagacaccccctactacccctgga

SEQ ID NO: 156485 - DNA, 80 bp, synthetic construct
  source 1..80: mol_type = other DNA
caatccagttatgcaagtaatctggtggttcaagcaatgtatgtaccccctggagctccaaatccagacaaatggaatga

SEQ ID NO: 156486 - DNA, 80 bp, synthetic construct
  source 1..80: mol_type = other DNA
atagaagacagcacagaagactgcaaacagtctatttctccagatgagttgggcctcacatcggcacaagatgatggtcc

SEQ ID NO: 156487 - DNA, 80 bp, synthetic construct
  source 1..80: mol_type = other DNA
gacatactatcaaaaagctaaaaaagacacaataaaaaaacatttaggagctatggcacactgtcacttaacaggaatat

SEQ ID NO: 156488 - DNA, 80 bp, synthetic construct
  source 1..80: mol_type = other DNA
gaacatttggacacccaacattagaagctcttactgctgcagaaaaagttagaactcatatgcagaagcctaaaatactt

SEQ ID NO: 156489 - DNA, 80 bp, synthetic construct
  source 1..80: mol_type = other DNA
aacgaagacctagacctgtttggatatagggtttccaccccacttccagtgaaatctgtatttcatggacagtacagctg

SEQ ID NO: 156490 - DNA, 80 bp, synthetic construct
  source 1..80: mol_type = other DNA
acccaaagtgatcagacaaaagttcaaactgctatacacaatgcagggatgggcgtaggtgtagggaacctcactatcta

SEQ ID NO: 156491 - DNA, 80 bp, synthetic construct
  source 1..80: mol_type = other DNA
tccccctaaaagaaggagcatatctagagatccaaggatattggaacctgaccccggaaaggggattcctgagtgcctat

SEQ ID NO: 156492 - DNA, 80 bp, synthetic construct
  source 1..80: mol_type = other DNA
taaacctaaggtaatactatgtgtaagttgttttttttttctttttgtagtaaaatggtgatacgtgcaattaaaactgt

SEQ ID NO: 156493 - DNA, 80 bp, synthetic construct
  source 1..80: mol_type = other DNA
gtgacacagttaaatacactaaaacaatcctttccaaccagggtccttttaaaggttttaatgaggtatccacagcattt

SEQ ID NO: 156494 - DNA, 80 bp, synthetic construct
  source 1..80: mol_type = other DNA
ccaggggcatcccccccaaagaacagaaaggatgccatgctcggtactcacattatatgggatttagggttacagtctag

SEQ ID NO: 156495 - DNA, 80 bp, synthetic construct
  source 1..80: mol_type = other DNA
gctagctctaaaaaacaaattaaacagtcaatatgaagccactagtggcacaaaaactcccaaaagcggctatgccggca

SEQ ID NO: 156496 - DNA, 80 bp, synthetic construct
  source 1..80: mol_type = other DNA
gtgatagggatgcaaacccagtagatcaacccactgaaccagatgtatctgcgtgcagattttacactcttgacaccgtg

SEQ ID NO: 156497 - DNA, 80 bp, synthetic construct
  source 1..80: mol_type = other DNA
ctatcacttgtcatcattccaatggttgatttgcggtttggaacgaccggagtcactaccctacccataacaatttcaat

SEQ ID NO: 156498 - DNA, 80 bp, synthetic construct
  source 1..80: mol_type = other DNA
ttaaagaaaggattggatggtcttgcaccactttatgccagggaaaacaaattagtgactgatatgcaaaagcaactgaa

SEQ ID NO: 156499 - DNA, 80 bp, synthetic construct
  source 1..80: mol_type = other DNA
cccttctcctttcttcacccgcaacaccaatcttaccagactggagtgtatggacatcatcgatgttgatgaaaactacg

SEQ ID NO: 156500 - DNA, 80 bp, synthetic construct
  source 1..80: mol_type = other DNA
cctaggcctccaaggctgtgtcagtatgagaaagcaaaaaatgttaattttcaacccagtggtgtaacgacaaccagaca

SEQ ID NO: 156501 - DNA, 80 bp, synthetic construct
  source 1..80: mol_type = other DNA
atcgggcacgggtcgcgtcccgtacccgtagatggaggtcttggtggccggcgtgacagacacggcgtatggcgtccgcg

SEQ ID NO: 156502 - DNA, 80 bp, synthetic construct
  source 1..80: mol_type = other DNA
actttgattttctgcgtctgccacgcggtggcggtcaagtctggagcgtggtgcccagtctggttttttttcagcaaaag

SEQ ID NO: 156503 - DNA, 80 bp, synthetic construct
  source 1..80: mol_type = other DNA
gtgagcctcggtccagagattgaggtcagctggtttaaactgggcccaggagaggagcaggtgcttattgggcgcatgca

SEQ ID NO: 156504 - DNA, 80 bp, synthetic construct
  source 1..80: mol_type = other DNA
catcctgggccagaggacaccaaatcacacatgtagaattacccaaagtgttttgggacaatcaagacaaacctgcatat

SEQ ID NO: 156505 - DNA, 80 bp, synthetic construct
  source 1..80: mol_type = other DNA
attccgtttatcggcatcggcaacgcatacagcatgttttacgacggatgggccagttttcggcaatcaggtggatatgg

SEQ ID NO: 156506 - DNA, 80 bp, synthetic construct
  source 1..80: mol_type = other DNA
tccaggataaattccacaacctattgaagggtaatcaaataacaaccatttttaatacttgcttaaaggatgaactcagg

SEQ ID NO: 156507 - DNA, 80 bp, synthetic construct
  source 1..80: mol_type = other DNA
ccatacatcagtcttgcccgagccaagaacaacaagaggtgttgtttaacaatgttaggtggttggctgtgcagtctcgc

SEQ ID NO: 156508 - DNA, 80 bp, synthetic construct
  source 1..80: mol_type = other DNA
ctccatgccttactaccccggggtccctcctccctggcaagtaaaattcagcctaaagtttcaataaagtgcgttttcac

SEQ ID NO: 156509 - DNA, 80 bp, synthetic construct
  source 1..80: mol_type = other DNA
tcagatcgcccccttttccgcatcagagcaccccgccttctccatggttgagtccgtaaaacgagtccgggtcgatgagg

SEQ ID NO: 156510 - DNA, 80 bp, synthetic construct
  source 1..80: mol_type = other DNA
aacaacagaaagaggtgaattcaacttattaggaatctatggaaattgtgctgtgctacctacccatgcagagtgtggtg

SEQ ID NO: 156511 - DNA, 80 bp, synthetic construct
  source 1..80: mol_type = other DNA
aagccaaggcaccagcctcctctgtgatgtcatggtttgggacgtgctaaatttaggtgtgtctctgaggcacattagca

SEQ ID NO: 156512 - DNA, 80 bp, synthetic construct
  source 1..80: mol_type = other DNA
tggaacctacacggattaccaaacaagaagcccagtgttcctacaattagaacagcaaaagtgcaagggcccgggtttga

SEQ ID NO: 156513 - DNA, 80 bp, synthetic construct
  source 1..80: mol_type = other DNA
ccaatacaacgtcttgatcggagagggtccttgtaaaccaggtgactgcggaggtaaattcctctgcaaacatggggtca

SEQ ID NO: 156514 - DNA, 80 bp, synthetic construct
  source 1..80: mol_type = other DNA
attgagaacttcttgtgtcgatccgcctgtgtgtacttcactacttacaaaaatcagacaggagcgacttctcgatttgc

SEQ ID NO: 156515 - DNA, 80 bp, synthetic construct
  source 1..80: mol_type = other DNA
taaatacaaatttgacttcatgtggggtggaaacatgatctcctcacagatcatcaagaacccatgcaaagacacagaca

SEQ ID NO: 156516 - DNA, 80 bp, synthetic construct
  source 1..80: mol_type = other DNA
tagagttcttcacctattctagatttgacatggaatttacatttgtaatcactgcaaacttcacagaaacaaacaacggt

SEQ ID NO: 156517 - DNA, 80 bp, synthetic construct
  source 1..80: mol_type = other DNA
tggaggaggagagcagctgccagaagacgatctcgatggattgctcgccgcgctagacgacgaagagtaaggagaaaaag

SEQ ID NO: 156518 - DNA, 80 bp, synthetic construct
  source 1..80: mol_type = other DNA
gccaagttagagtacaccgagcaagcttccaactacgttcccattacggttaccgtggcgcccatgtgtgctgagtacaa

SEQ ID NO: 156519 - DNA, 80 bp, synthetic construct
  source 1..80: mol_type = other DNA
aaaaccactagggatactgttaggctgcaagaaatgctcgaccgttatggtgtggatctaccatacatcacatacctcaa

SEQ ID NO: 156520 - DNA, 80 bp, synthetic construct
  source 1..80: mol_type = other DNA
tttgtcatgcaaatttcttcccttgtatgccagtgaagccaaaaggataaaagtcttatacaacaagtgtaatgttatta

SEQ ID NO: 156521 - DNA, 80 bp, synthetic construct
  source 1..80: mol_type = other DNA
cgaccgaggagatgttgcgtgagctggcgcgcgttgagctgcccgacgtgagttcgctctgcgccgctgccgccgccacg

SEQ ID NO: 156522 - DNA, 80 bp, synthetic construct
  source 1..80: mol_type = other DNA
atccagcacttatgagccctagcatcgaagcttgtgggttttctgataggcttaaacagattactattggtaactccaca

SEQ ID NO: 156523 - DNA, 80 bp, synthetic construct
  source 1..80: mol_type = other DNA
tttatggtgacgatgtgatcttgtccctagacaaagagattgaacccaatgaactgcaacgtgtcatggcggattcattt

SEQ ID NO: 156524 - DNA, 80 bp, synthetic construct
  source 1..80: mol_type = other DNA
tatacgactcatttacacagaatgcaaagaatttatgggaagctagaaagaaacatacattattaggatcaaaggaacta

SEQ ID NO: 156525 - DNA, 80 bp, synthetic construct
  source 1..80: mol_type = other DNA
gcacagggacagataccatccgaatatttggaaagcccaaacacacacgtgcttggattccacgaccacccagagcaacg

SEQ ID NO: 156526 - DNA, 80 bp, synthetic construct
  source 1..80: mol_type = other DNA
taagtctaatagatataacgataattataataattatatatctaagtgtagtattattaccgatctatctaaattcaatc

SEQ ID NO: 156527 - DNA, 80 bp, synthetic construct
  source 1..80: mol_type = other DNA
agttatcataccacttgtgccattacgatcagggtcaacacaggcaccacaaacactacctattacaatatctattgccc

SEQ ID NO: 156528 - DNA, 80 bp, synthetic construct
  source 1..80: mol_type = other DNA
agcatggattccaagaccacccagagcaacagagtacacacacatgtatagtactaattacaacaagaagaaagttccaa

SEQ ID NO: 156529 - DNA, 80 bp, synthetic construct
  source 1..80: mol_type = other DNA
ttccaggtgaagtgtccaacctcatggagattgcagaagtggactccgtcgtcccagtgaacaatctagcagataaggtt

SEQ ID NO: 156530 - DNA, 80 bp, synthetic construct
  source 1..80: mol_type = other DNA
atacccttgttgataactgtctttttaatttggctatttgcttggacataatggttgactttaatttcctctacatcaaa

SEQ ID NO: 156531 - DNA, 80 bp, synthetic construct
  source 1..80: mol_type = other DNA
taacaaccatgcaacctgccacactcacacaaggaggcaaagagtggcagtatacatacactagactaatggcccccttt

SEQ ID NO: 156532 - DNA, 80 bp, synthetic construct
  source 1..80: mol_type = other DNA
taatactgaaaataacatcactaatgaaaacatgtattcggttgtgctgcaatcaacagttggagaaccagataaaatct

SEQ ID NO: 156533 - DNA, 80 bp, synthetic construct
  source 1..80: mol_type = other DNA
tggtttgtggtaaagctatcagtttagtagatagagccactaatgttagatacagtgttgatcagttaattactgcaatt

SEQ ID NO: 156534 - DNA, 80 bp, synthetic construct
  source 1..80: mol_type = other DNA
tcacaatcccataaactactatcaaaaaatgttagacgaaaaatttccaaacacatggctaggaaacccagcacacaccc

SEQ ID NO: 156535 - DNA, 80 bp, synthetic construct
  source 1..80: mol_type = other DNA
gcgtcagcagcgcagtgactgacatgagagtagccatcattagcccctacactgaaccagcacttatagggtcaagtcca

SEQ ID NO: 156536 - DNA, 80 bp, synthetic construct
  source 1..80: mol_type = other DNA
gagggaggcctgcgagcttccagttcccctcctccccaaccggcgccctattgcgatgcatagttgctgcggccctgctg

SEQ ID NO: 156537 - DNA, 80 bp, synthetic construct
  source 1..80: mol_type = other DNA
tactttaccaccttgaaacaatacctacgtaacctggcctttgcgtggcgctatcgcaaggtccggtcgtcatgaccagc

SEQ ID NO: 156538 - DNA, 80 bp, synthetic construct
  source 1..80: mol_type = other DNA
ccccgggcgtgtgaataggcctcaacaaggctgaagctgtagcgctcgttacccgcatttgtactacgcgacggctagta

SEQ ID NO: 156539 - DNA, 80 bp, synthetic construct
  source 1..80: mol_type = other DNA
acattttaaacacatttagaacagaaggatgcatgtctcacccccaactacaaaaatttaaaccaccaaacacaggacca

SEQ ID NO: 156540 - DNA, 80 bp, synthetic construct
  source 1..80: mol_type = other DNA
ctggttctgcagtaggatgtgatccagaaacattctggtcgaaaataccggtgatgttagatggagagtgcataatggct

SEQ ID NO: 156541 - DNA, 80 bp, synthetic construct
  source 1..80: mol_type = other DNA
gcgttcacgaaatttaagcgcgcgtccagggagggcagcaacagatcgtagacgcgcggcagcatcggctcgaactgtaa

SEQ ID NO: 156542 - DNA, 80 bp, synthetic construct
  source 1..80: mol_type = other DNA
cggcatgagccaccagctgagcacgctgagggcgacggtggcggtaagctggaaggcgacgaggacggaggcgcgcagcc

SEQ ID NO: 156543 - DNA, 80 bp, synthetic construct
  source 1..80: mol_type = other DNA
cccagctccaaaaaacacgccacgttcacaaagccgtgctcttcggggtgacatggctaatctgacaaaccaaagtcctt

SEQ ID NO: 156544 - DNA, 80 bp, synthetic construct
  source 1..80: mol_type = other DNA
caatgactgacccaatatacaatatggatggaacactacttggtaatgttcttatctttccccatcagttcatcaatctg

SEQ ID NO: 156545 - DNA, 80 bp, synthetic construct
  source 1..80: mol_type = other DNA
tacaaatacaatttggacatggaagtaattgcagctgaaggacttaaatatgggttaactataacacccgcagacaaatc

SEQ ID NO: 156546 - DNA, 80 bp, synthetic construct
  source 1..80: mol_type = other DNA
ctatgtaattaaatgcacaggtgtacaatcagcatggacagacatgagagtagccataagaagtccctacacagaaccac

SEQ ID NO: 156547 - DNA, 80 bp, synthetic construct
  source 1..80: mol_type = other DNA
agcctcgcgaagtacaaattgttgacccactcaccatgggaccccagtggaacttccacccctttgacatcagacggggc

SEQ ID NO: 156548 - DNA, 80 bp, synthetic construct
  source 1..80: mol_type = other DNA
agtctccattaaactacccccacctaagatgttcatagacaagtggtattcacaagaggacctctgttccgttaatcttg

SEQ ID NO: 156549 - DNA, 80 bp, synthetic construct
  source 1..80: mol_type = other DNA
ctactattcaaataagccccttagaacagttagagatagcaatagtcttgggtacctaatgtgtaaaccattccttacag

SEQ ID NO: 156550 - DNA, 80 bp, synthetic construct
  source 1..80: mol_type = other DNA
caccgtgggctttcttaaaaaataagatatgtcaatggttagacattccaaaacccccgtccaaacaaggggagtcatgg

SEQ ID NO: 156551 - DNA, 80 bp, synthetic construct
  source 1..80: mol_type = other DNA
tgggctgcaaactcatattttttaaacaccccccgaggtccgtcactaaccacgtgactcccgcaggccaaccagagtct

SEQ ID NO: 156552 - DNA, 80 bp, synthetic construct
  source 1..80: mol_type = other DNA
actgagacgaaagttcgagttatttacctacatgcgatttgacgtggaagttacatttgttatcaccagtagacagttac

SEQ ID NO: 156553 - DNA, 80 bp, synthetic construct
  source 1..80: mol_type = other DNA
agcatttcataaaaaccctggtaccttgactggttcagcaattggctgtgatccagacatattctggtcacaaatttact

SEQ ID NO: 156554 - DNA, 80 bp, synthetic construct
  source 1..80: mol_type = other DNA
attcgatgcaacacctagtatgaatataccaggagaggtaaaaaacttaatggagatggcagaagtggactctgttgtgc

SEQ ID NO: 156555 - DNA, 80 bp, synthetic construct
  source 1..80: mol_type = other DNA
tagacttttgtaaaagactcaaacagttagatatcttggagagacaaattgcaacaatgcatgtttctaacccaacccag

SEQ ID NO: 156556 - DNA, 80 bp, synthetic construct
  source 1..80: mol_type = other DNA
ttttagaatgtctacctacctgaaaccaactttatacagcaaaagaggtcttcaaaatcaatgggttaacattatctacc

SEQ ID NO: 156557 - DNA, 80 bp, synthetic construct
  source 1..80: mol_type = other DNA
tcccatcgcgacggtgacagtggatccatgagagaggcgccgcacgctgcatggctaaataccgtgaatcccctgacgtc

SEQ ID NO: 156558 - DNA, 80 bp, synthetic construct
  source 1..80: mol_type = other DNA
ttattcttatataatgggcccttaatgtgaaactgagctatcattttccgttcctttttcttatttccgtttttttttat

SEQ ID NO: 156559 - DNA, 80 bp, synthetic construct
  source 1..80: mol_type = other DNA
atggccagaatacttgaaagatgctgatgctagcgctgtagacaaacccacccacccggaaacatctacagatcgcttct

SEQ ID NO: 156560 - DNA, 80 bp, synthetic construct
  source 1..80: mol_type = other DNA
tatagcagatgttctcaccaacccagcactcatgtcgcctagcgtcgaggcttgtgggttttccgataggctcaagcaaa

SEQ ID NO: 156561 - DNA, 80 bp, synthetic construct
  source 1..80: mol_type = other DNA
aatatcagacctacctttatgggcagcagcatatggatatttagaattttgtgcaaaaagtacaggagaccaaaatatac

SEQ ID NO: 156562 - DNA, 80 bp, synthetic construct
  source 1..80: mol_type = other DNA
ggtggcaacatcctggtgcatggtggcagccactcgcgggtccccgtaaaacatatggaaaggaatggcgtgaaagagac

SEQ ID NO: 156563 - DNA, 80 bp, synthetic construct
  source 1..80: mol_type = other DNA
aagatcctaggctgcaagtagacctggaagaagcaatattttcaaaatacaagggaaataaagaaattaaaataactcaa

SEQ ID NO: 156564 - DNA, 80 bp, synthetic construct
  source 1..80: mol_type = other DNA
acaggtttgtcacggatgatgtgtatacagacgccggctttgtcacttgttggtatcagacaagtgtagtagcacctgct

SEQ ID NO: 156565 - DNA, 80 bp, synthetic construct
  source 1..80: mol_type = other DNA
ctctttgtagacaagtggtacactcaagaggacctctgtaacgttaatcttgtgtcacttgcggtttctgcggcttcctt

SEQ ID NO: 156566 - DNA, 80 bp, synthetic construct
  source 1..80: mol_type = other DNA
gggatttactcctataactgcatacacttatcatctcattacgatcacactattgattagatcctgttaccacaatggga

SEQ ID NO: 156567 - DNA, 80 bp, synthetic construct
  source 1..80: mol_type = other DNA
agcagctccgggagcagcttcagcagcagaagctcctcggcaagcagctcagggaaatgttcctacaactccacaaaatc

SEQ ID NO: 156568 - DNA, 80 bp, synthetic construct
  source 1..80: mol_type = other DNA
ccgcagcgagaacgccacggagggagatcctcgcgtcccgagggcgggtgccggaggtgagtttacacaccgcagtcaag

SEQ ID NO: 156569 - DNA, 80 bp, synthetic construct
  source 1..80: mol_type = other DNA
catcgtgttccccgcaattcatctgcataaacgaaactaaaggtctgcagttatataatgtaacattaaacgattcaggc

SEQ ID NO: 156570 - DNA, 80 bp, synthetic construct
  source 1..80: mol_type = other DNA
ttcgtcagggctttaattaaaagaaactgccatgtgataactacttcaaaaggggaattcaacatgcttggaatccatga

SEQ ID NO: 156571 - DNA, 80 bp, synthetic construct
  source 1..80: mol_type = other DNA
aggctccaacactacgagcagttgtaacccagggacctaatactgaatttgccttgtcactcctaaggaaaaatataatt

SEQ ID NO: 156572 - DNA, 80 bp, synthetic construct
  source 1..80: mol_type = other DNA
caggatgctacccaaaaacccaacaccgccaagcaccctacgtcagaggccacccagcctgggaagaagggtaaggcctt

SEQ ID NO: 156573 - DNA, 80 bp, synthetic construct
  source 1..80: mol_type = other DNA
gtgatgctgcaactctgctacgtctggggctggcttacggccccggagggatgtcattacgtgaagtcactgcatgggct

SEQ ID NO: 156574 - DNA, 80 bp, synthetic construct
  source 1..80: mol_type = other DNA
tgtacgccagttttgccacccttccctaatatgcaacttagaagtttgagcaacacgaccaataggtgataatcatccag

SEQ ID NO: 156575 - DNA, 80 bp, synthetic construct
  source 1..80: mol_type = other DNA
cactaggtcgggataatgggcatgttgttttacagtatatgtatgtaccaccaggggcaccaataccaaagactagagat

SEQ ID NO: 156576 - DNA, 80 bp, synthetic construct
  source 1..80: mol_type = other DNA
accgtggagaaccaggagacgtagaagacgacgcgctcctcgccgctttcgacctcgtcgaagagtaaggaggcgcaggg

SEQ ID NO: 156577 - DNA, 80 bp, synthetic construct
  source 1..80: mol_type = other DNA
gacagcgttgttacaaggtgatacagacgtggccatcaacaatgcagtggccagggtggcagacacaattgccagtggac

SEQ ID NO: 156578 - DNA, 80 bp, synthetic construct
  source 1..80: mol_type = other DNA
ggaggataccaggcaggctagagagatggcacagtctgatcaagtacctgaagtatagaacaagagagttgcaacaggtc

SEQ ID NO: 156579 - DNA, 80 bp, synthetic construct
  source 1..80: mol_type = other DNA
caatgctaggaactcacattatttgggacgtgggtttgcagtcatcctgcgttctatgcattccatggatcagccaaacg

SEQ ID NO: 156580 - DNA, 80 bp, synthetic construct
  source 1..80: mol_type = other DNA
ccacgccgccataatcggccttcggatcgaagacgaaccgactcatgttgcccacgatgctcccccgagcaaacaacttg

SEQ ID NO: 156581 - DNA, 80 bp, synthetic construct
  source 1..80: mol_type = other DNA
gccaattactaacgatcagaagaaattgatgtctaataacgtacaaatcgttagacagcaatcatattcaattatgtcaa

SEQ ID NO: 156582 - DNA, 80 bp, synthetic construct
  source 1..80: mol_type = other DNA
acaacacgggggcaacacccagcacaaccacaaccacatcccagagcatattaaatgaaagcgcttcatgcatagaaaat

SEQ ID NO: 156583 - DNA, 80 bp, synthetic construct
  source 1..80: mol_type = other DNA
gtttataataacagatacagcaacctaaacacacaagacgcttactctgccagaaaagctgcatacgatgaactaacaaa

SEQ ID NO: 156584 - DNA, 80 bp, synthetic construct
  source 1..80: mol_type = other DNA
ggttccttagtgacagagctctcaagagaatgttcgaaaaaccgctcgatcttgagggatttgcagcgactccaaaacga

SEQ ID NO: 156585 - DNA, 80 bp, synthetic construct
  source 1..80: mol_type = other DNA
agcgcggcacatgggcggcggaaagaacttgggcatgcgaaagcagcgttgtccatccacggtctgcgtggtttcatcat

SEQ ID NO: 156586 - DNA, 80 bp, synthetic construct
  source 1..80: mol_type = other DNA
taatgcagatcatgtttgttccaccaggcattagcgccccatctgatgctagtgataaaaagtggaatggtgccactaac

SEQ ID NO: 156587 - DNA, 80 bp, synthetic construct
  source 1..80: mol_type = other DNA
gtaattcctctttatctgtaaaggctttttgaagtgcatcacctgaccgggcagatagttcaccggggtgagaaaaaaga

SEQ ID NO: 156588 - DNA, 80 bp, synthetic construct
  source 1..80: mol_type = other DNA
ggtgttcatctaagtaacaagaccctggtctgttaggacccttcttgctttgggaaaccgaggcaggaaagtctctgtca

SEQ ID NO: 156589 - DNA, 80 bp, synthetic construct
  source 1..80: mol_type = other DNA
agctgttatttttagggatcgaaacacatgccaaacatacactctgtctcaagtttataatcagatccttgatgaagaca

SEQ ID NO: 156590 - DNA, 80 bp, synthetic construct
  source 1..80: mol_type = other DNA
tttattcgccgtcgccgtcctccgcaccacacgcaactattcgccgtccacacacgcaactccaattttcacccccccgc

SEQ ID NO: 156591 - DNA, 80 bp, synthetic construct
  source 1..80: mol_type = other DNA
atactgtgcaattaacaagccaaatggatttagctcaagaaatttttgcacttaaagtagatgtagcttctcaaccttta

SEQ ID NO: 156592 - DNA, 80 bp, synthetic construct
  source 1..80: mol_type = other DNA
ccagctcagggcataccagcgcacacacaggactgagccagtgtgtttgttaatacatggagacccagggtgtggtaaat

SEQ ID NO: 156593 - DNA, 80 bp, synthetic construct
  source 1..80: mol_type = other DNA
ggtggtaatcccataccacagcagacaattaaagacccctgcatgcaacccgactacgaaattcccggaggcggtgcaca

SEQ ID NO: 156594 - DNA, 80 bp, synthetic construct
  source 1..80: mol_type = other DNA
caactatatctataatagacatggaaacacccttgaaggcgccagagagctcattaaaatcctacaacgagccctctcca

SEQ ID NO: 156595 - DNA, 80 bp, synthetic construct
  source 1..80: mol_type = other DNA
agtcgagtccactggaaatgctttcgctaagaattttgtcgtaattcggcatgttccaaacggtgaccccgctcgcctcc

SEQ ID NO: 156596 - DNA, 80 bp, synthetic construct
  source 1..80: mol_type = other DNA
gaataatagcaggacagccaacagaaacagagtccccactagtaagtaaaatcatagaagaacttataaggaaagaagca

SEQ ID NO: 156597 - DNA, 80 bp, synthetic construct
  source 1..80: mol_type = other DNA
aagcttttcgaccttgtaatgttaacaccaaaattggcaatgcaaaatgttgtccatttgtatgtggtaaggcagtgaca

SEQ ID NO: 156598 - DNA, 80 bp, synthetic construct
  source 1..80: mol_type = other DNA
tcaccaacgaggccgtgctcttcggacgcctgcacccccaccacgtccaggaggtgaaactggccatctgccacgacaat

SEQ ID NO: 156599 - DNA, 80 bp, synthetic construct
  source 1..80: mol_type = other DNA
aatacatacaacgagaagatatgcgagttagcacaaataaccagaaacagatttaaaaatgcaaccaaaggagcactacc

SEQ ID NO: 156600 - DNA, 80 bp, synthetic construct
  source 1..80: mol_type = other DNA
tgcggctaatccaaccccatgcttactgcgcagaaaccactgggggagtagtctaaatgaccatttggggaaggaaacca

SEQ ID NO: 156601 - DNA, 80 bp, synthetic construct
  source 1..80: mol_type = other DNA
atgtcaatgctagcatttgttagtgcgtgtaatgacttctctgccaggttgcttaaagacaccccatttgtgagacagga

SEQ ID NO: 156602 - DNA, 80 bp, synthetic construct
  source 1..80: mol_type = other DNA
gacgtcacagttcaaaggtcatcctcagcggaacttacacaaaatggcggtcaatctcttccgggtcaaaggtcacgcct

SEQ ID NO: 156603 - DNA, 80 bp, synthetic construct
  source 1..80: mol_type = other DNA
gtccctacacccagccaccactcacagaccctgaaaacgtggacatgggcttcataccctatgactttaactttggaaat

SEQ ID NO: 156604 - DNA, 80 bp, synthetic construct
  source 1..80: mol_type = other DNA
tcagaatctatatgcggctaaaacatattcgtgggtggatacctaggcctatgcgtagccaggattacacagccagaaat

SEQ ID NO: 156605 - DNA, 80 bp, synthetic construct
  source 1..80: mol_type = other DNA
ttcgccataaggcctttatcttcttgccattagatcgtggggagggggtacgtaggcttcgacctcggttttaggccttc

SEQ ID NO: 156606 - DNA, 80 bp, synthetic construct
  source 1..80: mol_type = other DNA
tactatcctcctgtaaggacccaagagtggtagagtactgtgagaaagaggggttaatcaccaaggctaacaccaccctg

SEQ ID NO: 156607 - DNA, 80 bp, synthetic construct
  source 1..80: mol_type = other DNA
taagttcaaacaaaaataaatttagtacaggaagaagcagcctttttggctggaatatatatgatcctactaaaattgac

SEQ ID NO: 156608 - DNA, 80 bp, synthetic construct
  source 1..80: mol_type = other DNA
acacggggacaacatccggcacaaccacatccccgaacatgttaagtgaaaactcttcatgcataaaaaataacaactgc

SEQ ID NO: 156609 - DNA, 80 bp, synthetic construct
  source 1..80: mol_type = other DNA
cagagagaggtgagttcaacttactaggaatctatggaaattgtgctgtgctgcccacccacgcagagtgtggggaaaca

SEQ ID NO: 156610 - DNA, 80 bp, synthetic construct
  source 1..80: mol_type = other DNA
cccaattatcccccaacttccagccggccctacagccctcaagtactaatggtaacatacataagagtctaggagacgca

SEQ ID NO: 156611 - DNA, 80 bp, synthetic construct
  source 1..80: mol_type = other DNA
tccaggcaacgccatgctagctaaacacaaaatactaatacctagcctagaaaccagacctaaaggcaaaaaaacagtta

SEQ ID NO: 156612 - DNA, 80 bp, synthetic construct
  source 1..80: mol_type = other DNA
tcctcctttcccgacacgtcactatccgatggtttcattaaaaagtacgtctgcgtgtgtgtttcttaattattcctccg

SEQ ID NO: 156613 - DNA, 80 bp, synthetic construct
  source 1..80: mol_type = other DNA
caaggaaagatttacccttgataaaaacaccgataatcctgcgcggaaattctgcccagtcgattacctttttgggagtg

SEQ ID NO: 156614 - DNA, 80 bp, synthetic construct
  source 1..80: mol_type = other DNA
ttgcatagtatgcgctcgacgctagaatccatctacaaagacatgcggcaatgcgtaagtgtctctgtggcggcgctgtc

SEQ ID NO: 156615 - DNA, 80 bp, synthetic construct
  source 1..80: mol_type = other DNA
gcagggggatgtggaagaggccgtaaacagagccgtggcacgagtagctgacaccttaccaacgggaccaaggaactcag

SEQ ID NO: 156616 - DNA, 80 bp, synthetic construct
  source 1..80: mol_type = other DNA
ggtttagaaaaagggagttgtcgtgacaagggctgagggacctctgtctccatgtgtgtataaaaagcaaggcacgttca

SEQ ID NO: 156617 - DNA, 80 bp, synthetic construct
  source 1..80: mol_type = other DNA
cccagtacagccagacggcacaccataccccagtgactttataacaaaatggcgaaatgcctggaactcgttttacacaa

SEQ ID NO: 156618 - DNA, 80 bp, synthetic construct
  source 1..80: mol_type = other DNA
gtagaaacctactacacagatgggtcctgcaacagaacctcaaaggaaggaaaggcagggtatgtcacagacaggggaag

SEQ ID NO: 156619 - DNA, 80 bp, synthetic construct
  source 1..80: mol_type = other DNA
ttgaatttaattacaccttatgttaatagagacttggcagttgtgtttactggagcacatggcgcagagacaataccaca

SEQ ID NO: 156620 - DNA, 80 bp, synthetic construct
  source 1..80: mol_type = other DNA
aggcggacggtggcgtgagttgaaaggtcaccatcagcgtcacctactaagatggcggtcaatatcttccgggtcatagg

SEQ ID NO: 156621 - DNA, 80 bp, synthetic construct
  source 1..80: mol_type = other DNA
ccactgctgcatttcatctcctcggactcactctccgagtccgaagccgaactgcaggaggaggaagacgaagaggaact

SEQ ID NO: 156622 - DNA, 80 bp, synthetic construct
  source 1..80: mol_type = other DNA
atcattaatcaaacacaataccagaattgtaactacaaagaacggaaaatttactggattaggaatatatgacaatttaa

SEQ ID NO: 156623 - DNA, 80 bp, synthetic construct
  source 1..80: mol_type = other DNA
tttttaccccccccccaaatttgtaacattagaagtctgcactcttaacctggtcaataggaggtagcaatccatgctat

SEQ ID NO: 156624 - DNA, 80 bp, synthetic construct
  source 1..80: mol_type = other DNA
ccgctgccaccagtggtatgaggggtgctaccgtagtcatgctgctttttgtggttgtggcaattttattaatcaccttg

SEQ ID NO: 156625 - DNA, 80 bp, synthetic construct
  source 1..80: mol_type = other DNA
tgatggtcacaccagggtcaagccaatacctaacatctgatgatttccagtcaccatgtgcgctaccgaactttgatgtc

SEQ ID NO: 156626 - DNA, 80 bp, synthetic construct
  source 1..80: mol_type = other DNA
ctatgggcagccatacatggctacatggacttttgcaaaaagacatttaaagacaataatttagataaaaacaccagagt

SEQ ID NO: 156627 - DNA, 80 bp, synthetic construct
  source 1..80: mol_type = other DNA
ctccggtgcgcgtgcaaaaaaccaaggtttaccagtgctagttacaccaggttctggacaatttttgacaaccgatgact

SEQ ID NO: 156628 - DNA, 80 bp, synthetic construct
  source 1..80: mol_type = other DNA
ctctgcctgcaatgatttttccgtgcgaatgctcaaagacactccttttatagaacagactgcggaattacaaaatgatg

SEQ ID NO: 156629 - DNA, 80 bp, synthetic construct
  source 1..80: mol_type = other DNA
ttattccacaaatactactagcacaacagttattaacaatgtaagcacttcagaatcccttgacaccactactcgtacag

SEQ ID NO: 156630 - DNA, 80 bp, synthetic construct
  source 1..80: mol_type = other DNA
ggcctgctcgcacggacctatactattaccgccccaccgccgtcgtcgtcatgaacttcatcatcaccacccgagacttc

SEQ ID NO: 156631 - DNA, 80 bp, synthetic construct
  source 1..80: mol_type = other DNA
tgctggagcaacagcttgtcattctggaaggcgtagcgtatgtgtggacaggcctccatggtgatgatctaacagacagg

SEQ ID NO: 156632 - DNA, 80 bp, synthetic construct
  source 1..80: mol_type = other DNA
tgtggttcgtctctcccagctcggcgacgaagaattgtttgagaataaaccgcataaggtttaccgctttaaagcaccac

SEQ ID NO: 156633 - DNA, 80 bp, synthetic construct
  source 1..80: mol_type = other DNA
aatgccactggtggatttttcgattattattccactggtgtggtcaccatttggtaccagactaattttgtagtacctga

SEQ ID NO: 156634 - DNA, 80 bp, synthetic construct
  source 1..80: mol_type = other DNA
aatagctcaattgttttctgttatgtcagatagtaccacaccatcagctagccacggagtggacaaatttggttattttg

SEQ ID NO: 156635 - DNA, 80 bp, synthetic construct
  source 1..80: mol_type = other DNA
agaataatattattctacaacaagaacaagaggggagatactacaaggagggagagccacttgaagcaacagtggtaaaa

SEQ ID NO: 156636 - DNA, 80 bp, synthetic construct
  source 1..80: mol_type = other DNA
gtgtcacttttataccccccatggctgatctgcctgataaaggcaaaccttttgactcacgatttgtactctgtagcacc

SEQ ID NO: 156637 - DNA, 80 bp, synthetic construct
  source 1..80: mol_type = other DNA
ggagacggtacttgagacgcagaaagagacgaaagctagtactgactcaatggaaccccagcactgtcagacgctgcaat

SEQ ID NO: 156638 - DNA, 80 bp, synthetic construct
  source 1..80: mol_type = other DNA
caggatggcctccgcaatgtcagtgtttgaggccacaagggccttgatgacgacgggtgtggacattatttaagaccggg

SEQ ID NO: 156639 - DNA, 80 bp, synthetic construct
  source 1..80: mol_type = other DNA
tagcacggtgagaagagcccgctctccgtccccagggctagcccccgcaaaacctccccaatctctagggccgagcacag

SEQ ID NO: 156640 - DNA, 80 bp, synthetic construct
  source 1..80: mol_type = other DNA
aatgtcagaacaacaagaaacttctgagtttctattctcaggtccaaaaaaaccccgagtcgatttggacgcagtccaaa

SEQ ID NO: 156641 - DNA, 80 bp, synthetic construct
  source 1..80: mol_type = other DNA
ccaccgtctccgcggccttcgccaccaccggcggcgccatccccaccaggacatggcgccgccggtggtggcgaaggccg

SEQ ID NO: 156642 - DNA, 80 bp, synthetic construct
  source 1..80: mol_type = other DNA
agccccatattcctctcacacaagcgcagcaacataaactttgccacagcgtaccaggacgtcacctacaaccccaactg

SEQ ID NO: 156643 - DNA, 80 bp, synthetic construct
  source 1..80: mol_type = other DNA
tcccctccaggtagtgtacaaccgacttctagggagctagctatgctaggcactcatgtggtttgggattttggtctcca

SEQ ID NO: 156644 - DNA, 80 bp, synthetic construct
  source 1..80: mol_type = other DNA
aaagcctcaactaataggacctacacaacccaacaaagggtttgttccgtacgactacaactttggcagagcacacatgc

SEQ ID NO: 156645 - DNA, 80 bp, synthetic construct
  source 1..80: mol_type = other DNA
cgcttcgcgctcgcgccgggaggaggcacagcctccccccccccgcgcgcatgcgcgcggcgccccgcccctccggatgg

SEQ ID NO: 156646 - DNA, 80 bp, synthetic construct
  source 1..80: mol_type = other DNA
aaattgttgaagaacttaataaaaataatttcctcactagtcatcatcaccagaaactatgaggatactaccacagtatt

SEQ ID NO: 156647 - DNA, 80 bp, synthetic construct
  source 1..80: mol_type = other DNA
tggtttaaccataacccctccagacaaatcagaaagtttctcaaaaacaacatgggagaatgtaacatttttgaaaaggt

SEQ ID NO: 156648 - DNA, 80 bp, synthetic construct
  source 1..80: mol_type = other DNA
gtgctagcatcccagctagtcgcaccgacgcaatgcttggcacacacatcgtatgggacctgggcttgcagtcatcatgc

SEQ ID NO: 156649 - DNA, 80 bp, synthetic construct
  source 1..80: mol_type = other DNA
atgggcgcacaagtgtcaagacaaactactggttcgcatgaaagtgctatcaatgctacacatggtggtgttataaagta

SEQ ID NO: 156650 - DNA, 80 bp, synthetic construct
  source 1..80: mol_type = other DNA
gtgtactgtcatccagtggatcctaggggtgggaacaacccccaggctgttttatactcccttccccgcaactttagaag

SEQ ID NO: 156651 - DNA, 80 bp, synthetic construct
  source 1..80: mol_type = other DNA
cccagacacatccagtacaatctacttattggcagtggtccctgtcgacccggggattgtggcggtaaattgctctgcag

SEQ ID NO: 156652 - DNA, 80 bp, synthetic construct
  source 1..80: mol_type = other DNA
atggatacgacaaccaggacattcacctcattgacgatttgggacaaactaggaaagagaaagatatcgaaatgttgtgc

SEQ ID NO: 156653 - DNA, 80 bp, synthetic construct
  source 1..80: mol_type = other DNA
agcgtacttaggaggcgctggttggacctcttttaggttaacaatatagacacttaatttgagtagaagtaggagtttat

SEQ ID NO: 156654 - DNA, 80 bp, synthetic construct
  source 1..80: mol_type = other DNA
gacctgaaaccagaaaaatgagattggcttatttggatagagggttctacaaacactatggatatttgtttggagatagt

SEQ ID NO: 156655 - DNA, 80 bp, synthetic construct
  source 1..80: mol_type = other DNA
tacttagagacacaacacatataaagcaagatgctatgcctcaggggctcgaagagattattcagcaggttgccaccaac

SEQ ID NO: 156656 - DNA, 80 bp, synthetic construct
  source 1..80: mol_type = other DNA
atgcgaaggaaacttgaaatgtttacgtacgtccgctttgatgtagaggtcacatttgtaatcactagcaagcaagacca

SEQ ID NO: 156657 - DNA, 80 bp, synthetic construct
  source 1..80: mol_type = other DNA
aaccctgttgaggagtacattgatgagaccctcaaggaggtacttgttgtgccaaatactaaaccaacaggtcccaccca

SEQ ID NO: 156658 - DNA, 80 bp, synthetic construct
  source 1..80: mol_type = other DNA
ctcctggtccaacggggggcagtgtcgctccagccaactgatcttgctcaggttcatctgcagaaactcgtaagaggtgt

SEQ ID NO: 156659 - DNA, 80 bp, synthetic construct
  source 1..80: mol_type = other DNA
gatcagggtgcatacatatctctaaattagttgtacattatgaagattacaatgcagagacaagaaattttgtaaaatgg

SEQ ID NO: 156660 - DNA, 80 bp, synthetic construct
  source 1..80: mol_type = other DNA
tgggatagtggagatgaaaacagctattcttggcacatctcatgtgaattctatggatctaagcacatcagctggctata

SEQ ID NO: 156661 - DNA, 80 bp, synthetic construct
  source 1..80: mol_type = other DNA
cccagaagagtttgggtatcagtcaggattaccagagaaggaatggaaggctagactaaaagcaagaggcatacctacag

SEQ ID NO: 156662 - DNA, 80 bp, synthetic construct
  source 1..80: mol_type = other DNA
ggcaaagagacatatgaggattttcttaggaagataagatcaacttcagtgggtaggactctagctttaccaccatattc

SEQ ID NO: 156663 - DNA, 80 bp, synthetic construct
  source 1..80: mol_type = other DNA
tgcaggcctctgcgtccggagtggctcagtctaaggagcccaccacccccaaggccaagtctgtgtcagcccacctcaag

SEQ ID NO: 156664 - DNA, 80 bp, synthetic construct
  source 1..80: mol_type = other DNA
cttatgtcaactctgtagcaacagattgtatggcaaagcataacaactggggtctggtcatcatgccctttgtgcagctt

SEQ ID NO: 156665 - DNA, 80 bp, synthetic construct
  source 1..80: mol_type = other DNA
atacctggcaaaaaactcagttcctcacaaatgccagtcagcattataattactgtaattatgaacctaatcatacccat

SEQ ID NO: 156666 - DNA, 80 bp, synthetic construct
  source 1..80: mol_type = other DNA
ccaggggtctcaacagatggtccgccagtaacgagagcctagacctcgccagatacaatggctgtagattcactttttac

SEQ ID NO: 156667 - DNA, 80 bp, synthetic construct
  source 1..80: mol_type = other DNA
cacaaaagttacatcaaaggtgcgaatctacatgaagcccaagcacgtgagagtgtggtgcccacggcccccacgagcag

SEQ ID NO: 156668 - DNA, 80 bp, synthetic construct
  source 1..80: mol_type = other DNA
acctatgggtttggacatcagaatcgagcagtatacgttgctgggtacaagataattaactaccacttggctactgcaga

SEQ ID NO: 156669 - DNA, 80 bp, synthetic construct
  source 1..80: mol_type = other DNA
tatgtacactgtatcattaaccagtcaaacaaacacagcagaacaaatatttgcaatcaaagttgacattgcttcacaac

SEQ ID NO: 156670 - DNA, 80 bp, synthetic construct
  source 1..80: mol_type = other DNA
tatgttttgtttcagcttgtaatgacttctcggtgcgcctgttaagggatacaccatttatatctcaaaacgcacttctc

SEQ ID NO: 156671 - DNA, 80 bp, synthetic construct
  source 1..80: mol_type = other DNA
gccacgacatctgagccagaaaacaaggatgtagtacaggcgacaactactgttaacactacaaatttaacccagcatcc

SEQ ID NO: 156672 - DNA, 80 bp, synthetic construct
  source 1..80: mol_type = other DNA
ccattccatggcatatgacattaccactggagacaaaaaccctagtaaattggttagattagaaacacatgaatggacac

SEQ ID NO: 156673 - DNA, 80 bp, synthetic construct
  source 1..80: mol_type = other DNA
tagtggattcacccagcaaataggggacaaagtatcagagatagcaggtatggtgactagcaccattactgaaaagctgc

SEQ ID NO: 156674 - DNA, 80 bp, synthetic construct
  source 1..80: mol_type = other DNA
aaaaacgaccaaatcgttttcaggttagcactaacggttttatcatcaccggtctttacacgaacattagccattccctc

SEQ ID NO: 156675 - DNA, 80 bp, synthetic construct
  source 1..80: mol_type = other DNA
gacatctttggcactcacacattgagtcaacatcaagcaatcggcttagttggaaccatccttctaacagcagggctcat

SEQ ID NO: 156676 - DNA, 80 bp, synthetic construct
  source 1..80: mol_type = other DNA
agagaaactgtcacatagccacaacagatagaggagatttcaatctgctaggtgtgtatgacaattgtgcagtgataccc

SEQ ID NO: 156677 - DNA, 80 bp, synthetic construct
  source 1..80: mol_type = other DNA
ctacccatgatgatgactatcttggatgcaatcttgctttactggccaatcaggatgaaccaacaattttaagtgtagga

SEQ ID NO: 156678 - DNA, 80 bp, synthetic construct
  source 1..80: mol_type = other DNA
cagactaacatagtggtgccacccgacacaccgaccgaatgtaaaatcttgtgctttgtttctgcgtgctcagatttcac

SEQ ID NO: 156679 - DNA, 80 bp, synthetic construct
  source 1..80: mol_type = other DNA
gagatccacgtcgggcttttgcgtgagatggcgcagaaagttgaccagggctaccacatcgcgccgctgtagaccgataa

SEQ ID NO: 156680 - DNA, 80 bp, synthetic construct
  source 1..80: mol_type = other DNA
aaccaatactgggcctctcacttaactccattctttactacaggccttaaaaacccatacccaacaaacccctctacacc

SEQ ID NO: 156681 - DNA, 80 bp, synthetic construct
  source 1..80: mol_type = other DNA
acaaaggacattaagtaaagacagataaacgtagactaaaacgtggtcgcatcagggtgctggcttttcaagttccttaa

SEQ ID NO: 156682 - DNA, 80 bp, synthetic construct
  source 1..80: mol_type = other DNA
tgtatggaagggtgttactattgccacagtcaggatcgctactttcctgtaaaagttactgcacatgagtggtatgagat

SEQ ID NO: 156683 - DNA, 80 bp, synthetic construct
  source 1..80: mol_type = other DNA
accagcaaagtgttgttattatggatgacattatgcagaaccccagtggtgaggatatgtcacttttctgtcagatggtg

SEQ ID NO: 156684 - DNA, 80 bp, synthetic construct
  source 1..80: mol_type = other DNA
aaacagctcggtttactcattgccccccgacccgtcgcattttgatgggtataagcagcaagaggttgtcataatggacg

SEQ ID NO: 156685 - DNA, 80 bp, synthetic construct
  source 1..80: mol_type = other DNA
gcactcgctatgcctcatgggagatcaccacccgagaaatggtgcagctaaggcgtaaatgtgagctgttcacctacatg

SEQ ID NO: 156686 - DNA, 80 bp, synthetic construct
  source 1..80: mol_type = other DNA
agcatttttaatactatgataaataatgtcataatcagaactctagttttagatacatacaagcacataaacctagataa

SEQ ID NO: 156687 - DNA, 80 bp, synthetic construct
  source 1..80: mol_type = other DNA
aatacctattgtaacaaaacatctaagacacaacaaccgcacacctggtctccactggccgaaggcaactagcaataagg

SEQ ID NO: 156688 - DNA, 80 bp, synthetic construct
  source 1..80: mol_type = other DNA
aagttctgcaaaatttctataacagtgtcataggaaactccgttaacattagtgaccaaacataccagaaaatattccaa

SEQ ID NO: 156689 - DNA, 80 bp, synthetic construct
  source 1..80: mol_type = other DNA
ttctcgtctcttgtttcgggtaggggagtaaggccgtgccaggccgccatgctcagggccacggcgtgccagaggccctc

SEQ ID NO: 156690 - DNA, 80 bp, synthetic construct
  source 1..80: mol_type = other DNA
ttattccctcatactattataaaagaatcaggagaggcaagtttaagcagaactggatggttgaacttcaaacaaaagag

SEQ ID NO: 156691 - DNA, 80 bp, synthetic construct
  source 1..80: mol_type = other DNA
gtaccaccggcaccacatacaaaaactatggcagccacgcggctgactacaaaaaatatgaccccttcggaggtggctac

SEQ ID NO: 156692 - DNA, 80 bp, synthetic construct
  source 1..80: mol_type = other DNA
actggctgaactaccaaaaaaactacacacaaacaaaatgtaaatttgacgaagaaatgaaagcaaaactagatttaatt

SEQ ID NO: 156693 - DNA, 80 bp, synthetic construct
  source 1..80: mol_type = other DNA
acaatactgtgaagagaatggcctcatatcacatgcagagagtagtattgatagacacatcaattatacacaccacataa

SEQ ID NO: 156694 - DNA, 80 bp, synthetic construct
  source 1..80: mol_type = other DNA
tggtggtagtacagtgcccgtacacctttccccccatgtatgacaagaacagacccgacatggggtacgtgttctatgac

SEQ ID NO: 156695 - DNA, 80 bp, synthetic construct
  source 1..80: mol_type = other DNA
catgttaaattgcttaggtagtctaataattatcttaggaactgtatatgcattatacaagctgatgtgtatgactcaag

SEQ ID NO: 156696 - DNA, 80 bp, synthetic construct
  source 1..80: mol_type = other DNA
ttccaggtgttgagcaaacgtttcaacactatgctaagtatctccccagactacccaaagaaaaactatgacagttttgt

SEQ ID NO: 156697 - DNA, 80 bp, synthetic construct
  source 1..80: mol_type = other DNA
caaaaagctgactcccacaaagggagactgggaaacagagtatcaagcctgcgccgccttcaacaggcctccccgctcag

SEQ ID NO: 156698 - DNA, 80 bp, synthetic construct
  source 1..80: mol_type = other DNA
tatgtaccaagaagttgtttataacccctttaatgacagaggagtaggcaacaaagtatgggttcagtggtgcacaaacg

SEQ ID NO: 156699 - DNA, 80 bp, synthetic construct
  source 1..80: mol_type = other DNA
ggacgccgacggcgaatagttgcgtgtggtgcggtgtggtgcggtggggacggcggtcgccggcgaataaaagcgacgtg

SEQ ID NO: 156700 - DNA, 80 bp, synthetic construct
  source 1..80: mol_type = other DNA
gaatatgattacacagcaagcaccattagaaatgctaatcatcgacataaaacgaactatcgtgatagctctcatattac

SEQ ID NO: 156701 - DNA, 80 bp, synthetic construct
  source 1..80: mol_type = other DNA
gggtggcaacaaaaccataactactactgggatgccagaaatgaccagacttttagcgagtcaaaggccctcagtcacaa

SEQ ID NO: 156702 - DNA, 80 bp, synthetic construct
  source 1..80: mol_type = other DNA
actcatccagatgtttcatccaacagattttacacattggatagtaaggaatggactagtgattctaaaggctggtggtg

SEQ ID NO: 156703 - DNA, 80 bp, synthetic construct
  source 1..80: mol_type = other DNA
cagaaaggccccaatgggaggaaatgtactgacagctccaagcctacaccctggggcagccatgctaactaaacacaaaa

SEQ ID NO: 156704 - DNA, 80 bp, synthetic construct
  source 1..80: mol_type = other DNA
agcaggctgtcactatacaaaatggcggcgacagccttccgctttacacaaaatggtggttaatttcttccgggtcaaag

SEQ ID NO: 156705 - DNA, 80 bp, synthetic construct
  source 1..80: mol_type = other DNA
cggaagaataccacccgctctcatgcggcagtcgatcgacctcgacgaacgagacgcggcgacgcctctctacggccgac

SEQ ID NO: 156706 - DNA, 80 bp, synthetic construct
  source 1..80: mol_type = other DNA
agttcgacctaactgaaggattcaagaaatgggaaataagtttccaggagcaatcacacatcagaaagaaaattgagctg

SEQ ID NO: 156707 - DNA, 80 bp, synthetic construct
  source 1..80: mol_type = other DNA
cgaggagggcgaccctagaccaaggggcaactccctcgaagtccggcgctacgcgcttcgcgctgcgccggacatctcgg

SEQ ID NO: 156708 - DNA, 80 bp, synthetic construct
  source 1..80: mol_type = other DNA
aaataagttacaaggtgcgaaagcgccgcccaaaattaaaagtggtcgccgtaagacttttcggcgcccgaacaccgccc

SEQ ID NO: 156709 - DNA, 80 bp, synthetic construct
  source 1..80: mol_type = other DNA
attgagtggtgcatgtgttgaacaaacagctacactcacatgggggcgggttttcccgccctacggcttctcgcgaggcc

SEQ ID NO: 156710 - DNA, 80 bp, synthetic construct
  source 1..80: mol_type = other DNA
tcacagaatcttgatgtacaattttccaactagagcgggtcagtgtggtggcgtggttactaccactggcaaagtaattg

SEQ ID NO: 156711 - DNA, 80 bp, synthetic construct
  source 1..80: mol_type = other DNA
agcagctaagaaaaaaccaactgctatgagcttctggaaacctccggtacacaatgtcacggggatccaacgcatgtggt

SEQ ID NO: 156712 - DNA, 80 bp, synthetic construct
  source 1..80: mol_type = other DNA
ataatactatgccaaatttgagaaacatcaataaatacactgtgcagttaacaagccaaatggatttagctcaggaaatc

SEQ ID NO: 156713 - DNA, 80 bp, synthetic construct
  source 1..80: mol_type = other DNA
cgcgaagatcgcttccgcagcccttaagttgattgactaacggggtataaatctcttatttcaatatgaacaaccaacca

SEQ ID NO: 156714 - DNA, 80 bp, synthetic construct
  source 1..80: mol_type = other DNA
tcagtgccgagattgccaacaagatctcagaaatttcagctagtgtgcagagtgtaatcacagataagttactgaaaagt

SEQ ID NO: 156715 - DNA, 80 bp, synthetic construct
  source 1..80: mol_type = other DNA
aacaaacaccgcgggacgacacgcaccggcagcgcgcagaaagcgccggccacaggacgtcagaaaagtcacgacccgca

SEQ ID NO: 156716 - DNA, 80 bp, synthetic construct
  source 1..80: mol_type = other DNA
gagagtgccgccaggaaacagcggcgaagaaacaataggagaagcattcgaatggctagaaagaacaataacagagctca

SEQ ID NO: 156717 - DNA, 80 bp, synthetic construct
  source 1..80: mol_type = other DNA
ttgagcatagagaccgtgcggatctgtcgcctttgctcctttccaccacgcagtggcaagtacttccttgcagcttcacg

SEQ ID NO: 156718 - DNA, 80 bp, synthetic construct
  source 1..80: mol_type = other DNA
tcaagtctacaatcaaatacttgatgaagacaaaagacgtagacaggttgttgatgtgatggcagcaatatttcaaggcc

SEQ ID NO: 156719 - DNA, 80 bp, synthetic construct
  source 1..80: mol_type = other DNA
tgaatatagatggtagggacatcaaagtgcttaaacaacagattctcaccaacacagatgatatagatacagaaatcaca

SEQ ID NO: 156720 - DNA, 80 bp, synthetic construct
  source 1..80: mol_type = other DNA
gttaactcataagtttggcattcctcaattagtagcaaaacagatagtaaattcataccacagttgccaacagaaaggag

SEQ ID NO: 156721 - DNA, 80 bp, synthetic construct
  source 1..80: mol_type = other DNA
tgacttttgtgataactagtgtgatcgaaactacaaaagggaaagtaccggcaccagcagtcacacaccaagtaatgtac

SEQ ID NO: 156722 - DNA, 80 bp, synthetic construct
  source 1..80: mol_type = other DNA
ccggatgcccccggctccacggccccggcccctggccggtgtagcttcttacctgcgggatcctcgttggaggaaatgct

SEQ ID NO: 156723 - DNA, 80 bp, synthetic construct
  source 1..80: mol_type = other DNA
gacgccctcgtcgccgcgctcgaggaagacgagtaaggaggcgaaaatgggagcggcggaggtggagacgggtgtaccga

SEQ ID NO: 156724 - DNA, 80 bp, synthetic construct
  source 1..80: mol_type = other DNA
tcaccttcggcacccgccctcgggacgcgggcagcaccacggagggtgatccccgcgtcccgagtgcgggtgccgaaggt

SEQ ID NO: 156725 - DNA, 80 bp, synthetic construct
  source 1..80: mol_type = other DNA
catgattatacccacacatgcagatgcaggcacccaggtagagattgatggaattaagactaatgttgtagactcatatg

SEQ ID NO: 156726 - DNA, 80 bp, synthetic construct
  source 1..80: mol_type = other DNA
actgtctgttggagcgtgcatggatagacaagttcatataggctgagacctctttgtttttacacatatagatatatagt

SEQ ID NO: 156727 - DNA, 80 bp, synthetic construct
  source 1..80: mol_type = other DNA
catcctagagtctttaagaaattttgggactcaggcctattgtcacctcactatggaccttatttctataatcaggatac

SEQ ID NO: 156728 - DNA, 80 bp, synthetic construct
  source 1..80: mol_type = other DNA
aaattggcacggaaagcatgttaatttggatgactgaacaaggaattattactaaggaagtccaaagagtccaccactct

SEQ ID NO: 156729 - DNA, 80 bp, synthetic construct
  source 1..80: mol_type = other DNA
cagtcttccacacatgggacatcagacgtggactgtttagctcgacaagtcttaaaagagtgtcagaataccaaccgcct

SEQ ID NO: 156730 - DNA, 80 bp, synthetic construct
  source 1..80: mol_type = other DNA
tacgtcacaagtcacgtggggagggttggtcataaacccggaagcaatcctcccacgtggcctgtcacgtgactgctacg

SEQ ID NO: 156731 - DNA, 80 bp, synthetic construct
  source 1..80: mol_type = other DNA
cagcaccaaaaaatacaccacgttcgcaaagtcgtgctctacgaggtgatatggctaatttgacaaatcagagtccttat

SEQ ID NO: 156732 - DNA, 80 bp, synthetic construct
  source 1..80: mol_type = other DNA
accccgcagataaggagagccaggcctagtcccgccgcaccagagcaacccgctgccctaccatggcatggggatggtgg

SEQ ID NO: 156733 - DNA, 80 bp, synthetic construct
  source 1..80: mol_type = other DNA
taatgataagaaatggaatggagcctctaaccccagtgtattttatcaacctaaaagtgggtttccccggttcactatac

SEQ ID NO: 156734 - DNA, 80 bp, synthetic construct
  source 1..80: mol_type = other DNA
aaactctttgaagacaagtggtacccccaggctgacatctgtgacctaacactagcaacgatctatgcaaccgcatgtga

SEQ ID NO: 156735 - DNA, 80 bp, synthetic construct
  source 1..80: mol_type = other DNA
caaggggcccaaatcaaccccattttactatcccatgcctaggtaaaaacacctacaaccttacaaccccctttgaccta

SEQ ID NO: 156736 - DNA, 80 bp, synthetic construct
  source 1..80: mol_type = other DNA
tggagcacacgagaccagcttgaacgccagcgggagcgcaactatacattatactaacgtcaacttctacaaagacgcag

SEQ ID NO: 156737 - DNA, 80 bp, synthetic construct
  source 1..80: mol_type = other DNA
gtgaccgtgaggaggtgtgctggcgcgcgtggtgcgtgtctggtggtggcgggagcggggggcggcgcgggagcctgcac

SEQ ID NO: 156738 - DNA, 80 bp, synthetic construct
  source 1..80: mol_type = other DNA
tgtccagcacaatccgcgtgtacttcaaacctaagcacattagagtctgggtgccacgaccaccacgcctgtgcccctac

SEQ ID NO: 156739 - DNA, 80 bp, synthetic construct
  source 1..80: mol_type = other DNA
ctgtcccttactttggaccaggtgttgactataagggggatgcccttacacctttatcccgcaaggacttaacaacctat

SEQ ID NO: 156740 - DNA, 80 bp, synthetic construct
  source 1..80: mol_type = other DNA
ttttttttttttccgcggcccggcgccgggtacggggcgttgcgggcgctcggaggttgtcggcgtgtgtttctacggtg

SEQ ID NO: 156741 - DNA, 80 bp, synthetic construct
  source 1..80: mol_type = other DNA
caaaacctaggacaaactattatgacaaacaatgaagtatggtttaaaaaagcaaagacagcatggacaaacctacactc

SEQ ID NO: 156742 - DNA, 80 bp, synthetic construct
  source 1..80: mol_type = other DNA
tagagacaccacacatattggacaaacagtcatgtcagcacgcactcagggtattgaggatatcatagatagagttgctg

SEQ ID NO: 156743 - DNA, 80 bp, synthetic construct
  source 1..80: mol_type = other DNA
ctgcccgcggtccccggtgagggtcgagagaaccggccatggcctggtggggatggcgccggcgaaggtggttctggccg

SEQ ID NO: 156744 - DNA, 80 bp, synthetic construct
  source 1..80: mol_type = other DNA
gagaaacaaatggaacaccttagagttgctgattcaaaaactcaggagaaaatcaaacatgaggtagatactcttcatga

SEQ ID NO: 156745 - DNA, 80 bp, synthetic construct
  source 1..80: mol_type = other DNA
atcccaccaatggccaacttggacaataagggtatgctgttcaccagtagctttgttctagcctccacaaattcacaaac

SEQ ID NO: 156746 - DNA, 80 bp, synthetic construct
  source 1..80: mol_type = other DNA
gaagagtcagcttattaccccaaacacatccagtataacattctactaggagagggacattgccaacctggtgactgtgg

SEQ ID NO: 156747 - DNA, 80 bp, synthetic construct
  source 1..80: mol_type = other DNA
agactctcaccagcacttggccggtgctgggcagacggctccacgcttgcttgcttaaaaccctcttaataaactgccaa

SEQ ID NO: 156748 - DNA, 80 bp, synthetic construct
  source 1..80: mol_type = other DNA
accgtggcgatggaggcgccgccggtggaggggtcgccgccgacggagactacgaacccgaagagctagacgccctcttc

SEQ ID NO: 156749 - DNA, 80 bp, synthetic construct
  source 1..80: mol_type = other DNA
acacggtccaattaagacgcaagctagaattctttacttattccaggtttgatttagaaatgacttttgttgtgacagaa

SEQ ID NO: 156750 - DNA, 80 bp, synthetic construct
  source 1..80: mol_type = other DNA
aagacgtgactactttagcagacaaactattaaaagaatgtcagaacaacaagaaacttctgagtttctattctcaggtc

SEQ ID NO: 156751 - DNA, 80 bp, synthetic construct
  source 1..80: mol_type = other DNA
ggcaatcatttcctgcagccccttcatgccccgtgaccagggcatgaacggttgggatattacaataggttacaaaatgg

SEQ ID NO: 156752 - DNA, 80 bp, synthetic construct
  source 1..80: mol_type = other DNA
cagacaccaaaattttacgctcatggtgataccatttgtgccactggactatgctgacggggcatcgccttatgtgccaa

SEQ ID NO: 156753 - DNA, 80 bp, synthetic construct
  source 1..80: mol_type = other DNA
ggatgcgacaatataatctaaccacacatggagattatttcccaatacgatataaacgtcctgttaaaggtgccttgtat

SEQ ID NO: 156754 - DNA, 80 bp, synthetic construct
  source 1..80: mol_type = other DNA
ataccaacggtatctggatatgtccacgacctacaaaagacgaagcccaagaaaacaatcagggtgaagaaaaacatcta

SEQ ID NO: 156755 - DNA, 80 bp, synthetic construct
  source 1..80: mol_type = other DNA
aaaaaacctcagtgcaattttccaaggtttgggcgatgacgagaccccaggtttcattatagatctattaagagcttcca

SEQ ID NO: 156756 - DNA, 80 bp, synthetic construct
  source 1..80: mol_type = other DNA
tcttattccattgacagccaaccagcaaaacacccagatttttgggactaacttatttattggggatggtgtattcaaaa

SEQ ID NO: 156757 - DNA, 80 bp, synthetic construct
  source 1..80: mol_type = other DNA
acgagagccaagtgcaaacccagacagagagcgaagcccaagaagaggaggaggagaaaagcatacacctccacctcaga

SEQ ID NO: 156758 - DNA, 80 bp, synthetic construct
  source 1..80: mol_type = other DNA
ttgactgcggtgtgtaaactcccccaaccgcccacacgcccgccgtcccgcttgagaccccttcccgctctccccgcacc

SEQ ID NO: 156759 - DNA, 80 bp, synthetic construct
  source 1..80: mol_type = other DNA
atatagataccctcaaagtaatgcttgactcatcaaataagtttctgcctctttatgcttcagagaataagaggggtaaa

SEQ ID NO: 156760 - DNA, 80 bp, synthetic construct
  source 1..80: mol_type = other DNA
aatgacagggaagtattatttaacaacatcctatggttagaacaaatgtcccagaagtttgctccattatacgctgctga

SEQ ID NO: 156761 - DNA, 80 bp, synthetic construct
  source 1..80: mol_type = other DNA
tacagctcaatattcctatctccaggaagagcatactttgagacccccggagcataccaagacataatttacaatcccct

SEQ ID NO: 156762 - DNA, 80 bp, synthetic construct
  source 1..80: mol_type = other DNA
gtacaagagcagatttaactttggtggcaatcctatatctgaacaggttattagagacccctgcacacaaccaacctacg

SEQ ID NO: 156763 - DNA, 80 bp, synthetic construct
  source 1..80: mol_type = other DNA
tatctttgccagtgcagcggatatgcaatatccgttcggctcaccactaactgacactgtggttgtgggtttccaggttc

SEQ ID NO: 156764 - DNA, 80 bp, synthetic construct
  source 1..80: mol_type = other DNA
ttcataccatatgactataactttgcaaactcaaaaatgccagacggcaacggatacatacctctaaattacagatttca

SEQ ID NO: 156765 - DNA, 80 bp, synthetic construct
  source 1..80: mol_type = other DNA
tctgactgttgaccaagcctggagaggtaaaggagaaggtcttccagggatgtgtggtggggccttgatttcttccaatc

SEQ ID NO: 156766 - DNA, 80 bp, synthetic construct
  source 1..80: mol_type = other DNA
ataccacctaggaatatttagtcctatatttataggacccaccagagcacaaacaaaattccccacagcatatgtagatg

SEQ ID NO: 156767 - DNA, 80 bp, synthetic construct
  source 1..80: mol_type = other DNA
ggttcctagcagctctgggagccatgttcaggttgaaccacagctacagcgaaaccgagtccagtgaccggtaaccacgt

SEQ ID NO: 156768 - DNA, 80 bp, synthetic construct
  source 1..80: mol_type = other DNA
gagatcaccatcccatacaccttttcaacgtggatgaggaaaaccaacgggcatgctctaggattatttcaaattgaggt

SEQ ID NO: 156769 - DNA, 80 bp, synthetic construct
  source 1..80: mol_type = other DNA
agcccctttagctgccatttcgaaccggggtgtgcagatgcaggtctccgggtgggcaggcagtacgagatgtcacgttg

SEQ ID NO: 156770 - DNA, 80 bp, synthetic construct
  source 1..80: mol_type = other DNA
acatgaagctaaaaggattcaaaagctggagcataccataaataattatgtccaatttaaatccaagcaccgtatcgagc

SEQ ID NO: 156771 - DNA, 80 bp, synthetic construct
  source 1..80: mol_type = other DNA
ttgtggagctggattatgtgggaggtaccacgtacgtgcccattactgtcactgtggcgccaatgtgcgcagaatacaat

SEQ ID NO: 156772 - DNA, 80 bp, synthetic construct
  source 1..80: mol_type = other DNA
gagtagagacctactacacagatggatcctgtaacaggacctcgaaagaaggaaaggcaggatatgtcacagacagggga

SEQ ID NO: 156773 - DNA, 80 bp, synthetic construct
  source 1..80: mol_type = other DNA
gaatttcaggaaaacaaaattatcttagaacaagaacaggagggatcctactataaagagggaatacctctagaagcaac

SEQ ID NO: 156774 - DNA, 80 bp, synthetic construct
  source 1..80: mol_type = other DNA
gacttgaaaacatctgtcctatctaagtacaaaggaaatgtccaaattgagatgaatgaaaatattcagattgctgtgga

SEQ ID NO: 156775 - DNA, 80 bp, synthetic construct
  source 1..80: mol_type = other DNA
tcattgacccgagggttgtcgggccacacctcacattcaaaagctgggacattaggcgtgaccaatttagctcaaaaagt

SEQ ID NO: 156776 - DNA, 80 bp, synthetic construct
  source 1..80: mol_type = other DNA
gaataaggtggtaccccatactgttccatcagctagaatggctagaagaaatgattcagtctggaccgtttgcatacagg

SEQ ID NO: 156777 - DNA, 80 bp, synthetic construct
  source 1..80: mol_type = other DNA
caaacccttataaaacatcccaggtataaaggaaccaatgacacaaggaatattacctttacaaaaccaggaacaggctc

SEQ ID NO: 156778 - DNA, 80 bp, synthetic construct
  source 1..80: mol_type = other DNA
cagtagaccactatactgcacagctaatcatgttagatatagacccaacaccactaacattagaacaggcggtgtatggt

SEQ ID NO: 156779 - DNA, 80 bp, synthetic construct
  source 1..80: mol_type = other DNA
ccaacgctcacctgaccaatccgagtgaacacaccatcctattagccttaactgcagacttgcaagtggatgccatcaca

SEQ ID NO: 156780 - DNA, 80 bp, synthetic construct
  source 1..80: mol_type = other DNA
ccgttgattccgcggtatcagcgacggaagccgcgttctccgttacgttgtttatatccagcgtcggctcgaacgtgagt

SEQ ID NO: 156781 - DNA, 80 bp, synthetic construct
  source 1..80: mol_type = other DNA
cttacagaggagaaggagtggatttaaagcagggaagcatcacaccactaaccccagtaagtagcatcacaacatatggt

SEQ ID NO: 156782 - DNA, 80 bp, synthetic construct
  source 1..80: mol_type = other DNA
cagagaaccagggaatacctatggtatatcccccaccaatgatatgggcacactgtgtttccgagtcttagatggatcag

SEQ ID NO: 156783 - DNA, 80 bp, synthetic construct
  source 1..80: mol_type = other DNA
acccagttctcccccacctcatgcagagcagtgttagaagacaaacccctgtggtccatggcctacggctatgcagactt

SEQ ID NO: 156784 - DNA, 80 bp, synthetic construct
  source 1..80: mol_type = other DNA
tgggtacacatttagtctgggacattggtttacaatcaacagtagtcatgaacataccatggacatcaggatcacaattt

SEQ ID NO: 156785 - DNA, 80 bp, synthetic construct
  source 1..80: mol_type = other DNA
gaaaagatgccatgttaggaacacacattatttgggatctaggacttcagtctagttgtacaatggttgccccttggatt

SEQ ID NO: 156786 - DNA, 80 bp, synthetic construct
  source 1..80: mol_type = other DNA
acagagaacacaagcaagtactatgaggccagaaaaggcaatcacccattgttttccagcagtgcctacctaaatcacaa

SEQ ID NO: 156787 - DNA, 80 bp, synthetic construct
  source 1..80: mol_type = other DNA
cctcctgctccatcccataaccgggacccagtatggcctggtggtgatggaggagacgctggcggcgccgcccctggtgg

SEQ ID NO: 156788 - DNA, 80 bp, synthetic construct
  source 1..80: mol_type = other DNA
tagtaaccagttcttgacctccgacgattaccaatctcccactgctatgccgcaatttgatgtgacaccggaaatgagta

SEQ ID NO: 156789 - DNA, 80 bp, synthetic construct
  source 1..80: mol_type = other DNA
tatagtaaatgtaggacctagtgatatgtatgttcatgtaggtaacttaatatacagaaacctacatttgtttaactcag

SEQ ID NO: 156790 - DNA, 80 bp, synthetic construct
  source 1..80: mol_type = other DNA
gactggtaatgagactggaggagagattatcactaaagttgctgatgatgcatcaaatttattgggtccaaatagttatg

SEQ ID NO: 156791 - DNA, 80 bp, synthetic construct
  source 1..80: mol_type = other DNA
gcattgctaataccatcttactctgttcttagacgcagatggcttgatttgttctaaaatttccttctttagatatatag

SEQ ID NO: 156792 - DNA, 80 bp, synthetic construct
  source 1..80: mol_type = other DNA
ttaacgtgggaccaaagtgcatttaacagctttaaaacaaaagcagacagcaactatggctactgcacgtacaacccaaa

SEQ ID NO: 156793 - DNA, 80 bp, synthetic construct
  source 1..80: mol_type = other DNA
gctgttccgggttaaagggcatcctcggcggaacctatacaaaatggccgccaatttcttccgggtcaaaggtcacgcct

SEQ ID NO: 156794 - DNA, 80 bp, synthetic construct
  source 1..80: mol_type = other DNA
gattgccctactccagctaattttaaaaagtgctgcccactagtgtgcggcaaggccatacaactcatggataagataac

SEQ ID NO: 156795 - DNA, 80 bp, synthetic construct
  source 1..80: mol_type = other DNA
acaaaggtggctcttccacttctccaaaatccacatccaacggcaatgttgtccgtgggtcccgctactccaagtggtgg

SEQ ID NO: 156796 - DNA, 80 bp, synthetic construct
  source 1..80: mol_type = other DNA
gtcttcaagaatcgacaactgtggtccaagatttttttttggtctttttaggttctgcgagggacatcacgatggatcgt

SEQ ID NO: 156797 - DNA, 80 bp, synthetic construct
  source 1..80: mol_type = other DNA
ctgtcagcttcaagttgggtttcaaaccctgaataaaacatgcaaggccgtgcactgttcacctgtcggtgtctacctct

SEQ ID NO: 156798 - DNA, 80 bp, synthetic construct
  source 1..80: mol_type = other DNA
agaccctccgggcccggacggccgccctcagccccccagacagaccccagggtctccaggcagggtccggcatctccagg

SEQ ID NO: 156799 - DNA, 80 bp, synthetic construct
  source 1..80: mol_type = other DNA
atagaaagggaaattaataaggtacattacatacttaattgtttaggtagtttgatcttaattctaggcacactatatgc

SEQ ID NO: 156800 - DNA, 80 bp, synthetic construct
  source 1..80: mol_type = other DNA
ccaagcgccactgaaaacgggtttactcccaattggcaacaatgccaaaacaatgtaaaacttaatgaatcaggcagtaa

SEQ ID NO: 156801 - DNA, 80 bp, synthetic construct
  source 1..80: mol_type = other DNA
cagcagatttccatgtcccaatggcagcattagaggacaaagggaagtcattcaccagtaaatatgttcttgcatctact

SEQ ID NO: 156802 - DNA, 80 bp, synthetic construct
  source 1..80: mol_type = other DNA
tggatgcccttcgcgaggccgtaccgcccttgcagtcacctagtgctgaggcatgtggatatagtgatagagtagcacag

SEQ ID NO: 156803 - DNA, 80 bp, synthetic construct
  source 1..80: mol_type = other DNA
cattctatggcctatgacattacaacaggagacaagaatccaagtaaactaattcgattggatacgacaacatggcaaca

SEQ ID NO: 156804 - DNA, 80 bp, synthetic construct
  source 1..80: mol_type = other DNA
tgggcaaaccactcgccgtggacgatgagcacgatgacgatcgccgccgtgccctacacgaagagtcacaacgctggtgc

SEQ ID NO: 156805 - DNA, 80 bp, synthetic construct
  source 1..80: mol_type = other DNA
atggcctggggcttctggagaaggagaaggcggtggtggagacctagacctcggcgccgtcggtggaggagacggagagc

SEQ ID NO: 156806 - DNA, 80 bp, synthetic construct
  source 1..80: mol_type = other DNA
aagatcccagattacttgtagatctagatggtgccatattctctaagtataagggtaataagaatgttgagctgactgat

SEQ ID NO: 156807 - DNA, 80 bp, synthetic construct
  source 1..80: mol_type = other DNA
tggcctggcacaacggaaaagacgaatacaacatatttttggatcaagtgaggtctgtaccggtaggtcgagcgctactt

SEQ ID NO: 156808 - DNA, 80 bp, synthetic construct
  source 1..80: mol_type = other DNA
aatcttaggaactatttacgcactgtataagttgatgtgtctgacacaaggtgcttactctggaaatccaacaccagtgg

SEQ ID NO: 156809 - DNA, 80 bp, synthetic construct
  source 1..80: mol_type = other DNA
tacgccgaatgggtggtaacgccacgccaggccgcacagttgaggaggaaattggaattcttcacctatgtcaggttcga

SEQ ID NO: 156810 - DNA, 80 bp, synthetic construct
  source 1..80: mol_type = other DNA
ctatagtggcaggaatagaattaggagtaaattatcaccctaaaatagtaggaggaataggaggatttatcaataccaaa

SEQ ID NO: 156811 - DNA, 80 bp, synthetic construct
  source 1..80: mol_type = other DNA
tgcggaggttcggccgccgcgggccaggacctcatcagcgtcccccgcaacacctttatgacactgcttcagaccaacct

SEQ ID NO: 156812 - DNA, 80 bp, synthetic construct
  source 1..80: mol_type = other DNA
agtaccttaacccaaacagaacttttcagtcaccaagtgacacatttcagccgagtttaaaaacgtggctaggtgcaaac

SEQ ID NO: 156813 - DNA, 80 bp, synthetic construct
  source 1..80: mol_type = other DNA
aaattggcaatgcacgttgttgcccatttatatgtggaaaagcagtgatgtttaaggatagaaacacttgtcaatcttat

SEQ ID NO: 156814 - DNA, 80 bp, synthetic construct
  source 1..80: mol_type = other DNA
cccagaccccctagactttgtcagtatgagaaagcgaagaacgtaaacttccagcctagcggggtaacgaccaccaggca

SEQ ID NO: 156815 - DNA, 80 bp, synthetic construct
  source 1..80: mol_type = other DNA
gcacattaattggcaatagtctcatattcccacaccagttcataaatctgagaactaataacacagcaacaatagtaata

SEQ ID NO: 156816 - DNA, 80 bp, synthetic construct
  source 1..80: mol_type = other DNA
aatatcagagttgctgtagcccattattcagcacaattatccacacttgatataaacccagcgccattgtcattggagga

SEQ ID NO: 156817 - DNA, 80 bp, synthetic construct
  source 1..80: mol_type = other DNA
gtaaaagacagaccacaagaaggatttgtattctatgactcactgtttggacaaggaaaaatgccagacggaaccagcca

SEQ ID NO: 156818 - DNA, 80 bp, synthetic construct
  source 1..80: mol_type = other DNA
gttgggtgtgacccagatgttttctggtcacagcttcatgcgtctttgggtggtcatttgctagcttttgattacaccaa

SEQ ID NO: 156819 - DNA, 80 bp, synthetic construct
  source 1..80: mol_type = other DNA
cagaggctcagtttagagtacctactcattgtccagatggttctgaaaatacaaacaagacaaactggactgggatgtgg

SEQ ID NO: 156820 - DNA, 80 bp, synthetic construct
  source 1..80: mol_type = other DNA
gttcgagtccgtttggcgttcgcatgctgccttttgtagctgtggcgactgtattggccatcttcagcatctggctacta

SEQ ID NO: 156821 - DNA, 80 bp, synthetic construct
  source 1..80: mol_type = other DNA
gccaatgcatattcacatttttacgatggcttttgtcgggtgccattgaaggatgaagacacagactccggtgaaactta

SEQ ID NO: 156822 - DNA, 80 bp, synthetic construct
  source 1..80: mol_type = other DNA
attgaaaataatagcatatggagatgatgtcatattctcatataaatatcaattagacatggaagcaatagccaatgaag

SEQ ID NO: 156823 - DNA, 80 bp, synthetic construct
  source 1..80: mol_type = other DNA
cagaggcggaagcacaacagagtctaattttagaagttgcaaaattgaaaagaggtttagatgatttagctcctctttat

SEQ ID NO: 156824 - DNA, 80 bp, synthetic construct
  source 1..80: mol_type = other DNA
ctttaataattgggtgattaccacaagacgagtagctcagcttcgtaggaagttggaaatgttcacctatttgagatttg

SEQ ID NO: 156825 - DNA, 80 bp, synthetic construct
  source 1..80: mol_type = other DNA
gaaaaacaaatagaacacctcagagttgcagattcaaacactcaagaaaaaatcaagtgtgaaattgataccttacatga

SEQ ID NO: 156826 - DNA, 80 bp, synthetic construct
  source 1..80: mol_type = other DNA
cttgcgttttttggaggcttggtgccaatgcaccaactggggtgtgcgcgggtgcggccaagccggaccccagggcgtgt

SEQ ID NO: 156827 - DNA, 80 bp, synthetic construct
  source 1..80: mol_type = other DNA
aacccaccgaagaaagttggctaaattgtgatggtacacttttgggtaacatcacaatatatccacatcagtttatcaat

SEQ ID NO: 156828 - DNA, 80 bp, synthetic construct
  source 1..80: mol_type = other DNA
atatagatctgccccctttaaaggacccaacaaaatttgacgaaacaaaaggcaatcaaacaaatataacacatgtacaa

SEQ ID NO: 156829 - DNA, 80 bp, synthetic construct
  source 1..80: mol_type = other DNA
ggagtcggcggcggcggcgctgaggcgtgcggaagctacactggccagggttcttctcctcctctcttggtcatcctgcg

SEQ ID NO: 156830 - DNA, 80 bp, synthetic construct
  source 1..80: mol_type = other DNA
aacagtaaccagcataattgctaacattgacacagatggaaatcagaccaacattacctttagtgcagaggtggcagaac

SEQ ID NO: 156831 - DNA, 80 bp, synthetic construct
  source 1..80: mol_type = other DNA
cgctaaacaaattagggaccctctttgtaagacatgtgaataaggagacgccaaagcctgtcaccagcacagttagagtc

SEQ ID NO: 156832 - DNA, 80 bp, synthetic construct
  source 1..80: mol_type = other DNA
aggatgagcttcgtgctcccaacaaagtaaaagcaggaaaaacaagggctattgaagcagctagtatgaatgatacagca

SEQ ID NO: 156833 - DNA, 80 bp, synthetic construct
  source 1..80: mol_type = other DNA
ggtattatcgcaaggattaaagtcagtatcaaggtgtgttttctggtcagagacactggttgatgagacgagatcagcgt

SEQ ID NO: 156834 - DNA, 80 bp, synthetic construct
  source 1..80: mol_type = other DNA
ttactcttcctatcctcagagtacgcagggcccccagggcaagaaagcgtctcaggttcaccggccaaaaggttccgcat

SEQ ID NO: 156835 - DNA, 80 bp, synthetic construct
  source 1..80: mol_type = other DNA
ggtggagatggcgccgcaggccgcggtggaggagatggagacgctggagacgtcgcagacgaagacctgctagacgccgt

SEQ ID NO: 156836 - DNA, 80 bp, synthetic construct
  source 1..80: mol_type = other DNA
gcaggtggtggaggctatgtctgctttgcagacatcagacagttggagaatgttgcagaagagcagggtttgggtgacta

SEQ ID NO: 156837 - DNA, 80 bp, synthetic construct
  source 1..80: mol_type = other DNA
acagagtgtggtcataatggatgacataatgcaaaatccaagtggtgatgacatgactttattctgtcagatggtatcaa

SEQ ID NO: 156838 - DNA, 80 bp, synthetic construct
  source 1..80: mol_type = other DNA
gcagtaatgatacatgggccacctggtgctggcaagtccataacaactaatttcttggctagaatgataacaaatgagag

SEQ ID NO: 156839 - DNA, 80 bp, synthetic construct
  source 1..80: mol_type = other DNA
tggggagatgccattcacataacaaacgatcaagatttaaataaagttaaagacataattactgcaaatgcagaaaacta

SEQ ID NO: 156840 - DNA, 80 bp, synthetic construct
  source 1..80: mol_type = other DNA
aaagatccttaagaacctggtaaagctcatctctgcacttgttatcgtcgtcaggagtgactatgatatggtcacgttaa

SEQ ID NO: 156841 - DNA, 80 bp, synthetic construct
  source 1..80: mol_type = other DNA
ttgctgacactattagtagtgggcctagcaattcagagagtgtgccagctctaacagcagcggagaccgggcatacttca

SEQ ID NO: 156842 - DNA, 80 bp, synthetic construct
  source 1..80: mol_type = other DNA
tcctcattaacgttaccgcgcagtatagtactacctatcgtactatgacatcgctagacgattggcgtcaccaaaaacat

SEQ ID NO: 156843 - DNA, 80 bp, synthetic construct
  source 1..80: mol_type = other DNA
agggtgtggcaaatcactagcttccaaaatcatcgccagaggcctgaccaatgagagcaatgtctactcattgccacctg

SEQ ID NO: 156844 - DNA, 80 bp, synthetic construct
  source 1..80: mol_type = other DNA
atgacccagtgcaggttgacgctaaagtgagagtatacatgaaaccaaagcacatccgtgtgtggtgtcccaggccaccg

SEQ ID NO: 156845 - DNA, 80 bp, synthetic construct
  source 1..80: mol_type = other DNA
gatctggttgcatacacatatcacacttaaatgttaaatacactgattacaatgaaagtaacaatttcagatcatggcca

SEQ ID NO: 156846 - DNA, 80 bp, synthetic construct
  source 1..80: mol_type = other DNA
atcctgacatcttctggtcacaactatatgcttcaatggaaaaacacctgttagtgtttgattacacaaattatgatgga

SEQ ID NO: 156847 - DNA, 80 bp, synthetic construct
  source 1..80: mol_type = other DNA
aggaaattatacagagaagaaatatacaatttgactgggaaactaaatttaccaacaaggcaacacacataaacccaaca

SEQ ID NO: 156848 - DNA, 80 bp, synthetic construct
  source 1..80: mol_type = other DNA
gggtgtttgattactacactacaggattggttagcatatggtaccaaacgaattacgtggtccctattggagcgcctaac

SEQ ID NO: 156849 - DNA, 80 bp, synthetic construct
  source 1..80: mol_type = other DNA
gggctgctatcagcaccgggcgtccccgccgcctccccatcactggacacaagctcgggccccaccaggtcaaagccgct

SEQ ID NO: 156850 - DNA, 80 bp, synthetic construct
  source 1..80: mol_type = other DNA
taaacagcttagccattgactgcatggccaaacataataattgggggctggcaataataccactgagcgaactgaaattt

SEQ ID NO: 156851 - DNA, 80 bp, synthetic construct
  source 1..80: mol_type = other DNA
tcccaccttcaaaaagctcactcccaccaagggagactgggaaacagagtaccaggcctgcgccgccttcaacaggcctc

SEQ ID NO: 156852 - DNA, 80 bp, synthetic construct
  source 1..80: mol_type = other DNA
gaggttggagacgtggttccatacggagagatcaacctcagcggtaatcccacatgccgattactcaaatacaactatcc

SEQ ID NO: 156853 - DNA, 80 bp, synthetic construct
  source 1..80: mol_type = other DNA
ctgatgactcaatagtagcaggaatagaattaggaagcaattacaccccaaaaatagtaggagggataggagggttcata

SEQ ID NO: 156854 - DNA, 80 bp, synthetic construct
  source 1..80: mol_type = other DNA
aagcgcgccgctcctacagcagcagcagcagcagcgagacctctcactccagctcgcagagcagcagcgaatcggagtcc

SEQ ID NO: 156855 - DNA, 80 bp, synthetic construct
  source 1..80: mol_type = other DNA
cttacgtagggattgctaatgcctattcacacttctacgacggttttgcacgagtgccacttgagggtgagaatactgat

SEQ ID NO: 156856 - DNA, 80 bp, synthetic construct
  source 1..80: mol_type = other DNA
cgagccatggcgtggcgccggtggcgatggcggccgtggtggagacgccggaggcgccgccggtggagaaggagacggag

SEQ ID NO: 156857 - DNA, 80 bp, synthetic construct
  source 1..80: mol_type = other DNA
ctgtaccgacagtggatagatcagtttatttagaatataatacaatgtttgggtagaacttagtattataaaaaaaaaaa

SEQ ID NO: 156858 - DNA, 80 bp, synthetic construct
  source 1..80: mol_type = other DNA
taccaaaatgccttttcaaacctagcagactcagacccactagaaaaaagaaaagcagcatacaacgaactaacaaaaca

SEQ ID NO: 156859 - DNA, 80 bp, synthetic construct
  source 1..80: mol_type = other DNA
cgaccctgtacctagcacaagaaacagagtgcactggtacatcaccataacccaccagactgaagtgctagagtgcatct

SEQ ID NO: 156860 - DNA, 80 bp, synthetic construct
  source 1..80: mol_type = other DNA
ttagagttaagtaccttgagtctgctgttaactctgagcacattttctctgttgacaaaaattgtgaaacaatagcaaaa

SEQ ID NO: 156861 - DNA, 80 bp, synthetic construct
  source 1..80: mol_type = other DNA
gcaatcctcccacgtggttggtcacgtgactgctacgtcaccgccgccattttaagtcacaaaatggcggacttccttcc

SEQ ID NO: 156862 - DNA, 80 bp, synthetic construct
  source 1..80: mol_type = other DNA
actttccagaaggggctgtaccaggggagggatatgggaggagctggtgtggaacgccctcataccttctgtataaattc

SEQ ID NO: 156863 - DNA, 80 bp, synthetic construct
  source 1..80: mol_type = other DNA
acaaggtacagaccaaatcgcccggtgcgcatgccgaacaggcgtgtacttttgtgagtctagagggaaacactacccca

SEQ ID NO: 156864 - DNA, 80 bp, synthetic construct
  source 1..80: mol_type = other DNA
gctggctcaggcggcccatgcgcttctatccctcagacccccctcactacccgtggctaccccccaagcgagatatccca

SEQ ID NO: 156865 - DNA, 80 bp, synthetic construct
  source 1..80: mol_type = other DNA
ttagatttgactctgaggtcaccttagtaccatcaatagcagccaaaggtgatgacattggccatgttgtgatgcaatac

SEQ ID NO: 156866 - DNA, 80 bp, synthetic construct
  source 1..80: mol_type = other DNA
agcaggccgcaagagacccagaagggacacagaagtatatcagtccgaccaagaaaaggagcaaaaagaaagctcgcttt

SEQ ID NO: 156867 - DNA, 80 bp, synthetic construct
  source 1..80: mol_type = other DNA
gtgttggtcacgtgtagtggttgtccagacctctctgtcagaatgttaagagacacccccatgatgcaacatgtcaatga

SEQ ID NO: 156868 - DNA, 80 bp, synthetic construct
  source 1..80: mol_type = other DNA
gtaaatttaccctatatagacacccgacctgtgactactttgtaaaatataacagaaaactaccattccaagacagccag

SEQ ID NO: 156869 - DNA, 80 bp, synthetic construct
  source 1..80: mol_type = other DNA
tgggtttgctccattgacacaacttacgcctggtttggtgtccacagtgttatcataatgggtgctcaggtctcatctca

SEQ ID NO: 156870 - DNA, 80 bp, synthetic construct
  source 1..80: mol_type = other DNA
ccactattaccacacaggagagcgcgaacgttgtggttggctacggcaggtggccagagtacctgagagacgatgaggcc

SEQ ID NO: 156871 - DNA, 80 bp, synthetic construct
  source 1..80: mol_type = other DNA
tccaggttctgattgtcgggtacgacgtggttatcttcgtcgtcgtcgcgtggcatgggcggcggccgacggcggacgac

SEQ ID NO: 156872 - DNA, 80 bp, synthetic construct
  source 1..80: mol_type = other DNA
tttgtgttaggttagtatgggctgggtattcactagtgaaggcaactaacacagttagacgtgctagttgtgcccactgg

SEQ ID NO: 156873 - DNA, 80 bp, synthetic construct
  source 1..80: mol_type = other DNA
ccataagtgagaattctccatgcatacgcgcagacaactgctcaggactagaggaggaagagatggtcaagtgtcaattc

SEQ ID NO: 156874 - DNA, 80 bp, synthetic construct
  source 1..80: mol_type = other DNA
acacatggaaacaaaataatgctgcttggtggcaaaaagatgaaaaagcacacacaaatctacacagccagtacaataaa

SEQ ID NO: 156875 - DNA, 80 bp, synthetic construct
  source 1..80: mol_type = other DNA
tttgtggtaataagctacaactttgccagaggcagaatgccagacgggtcacactacataccaatacaaatgagacaccg

SEQ ID NO: 156876 - DNA, 80 bp, synthetic construct
  source 1..80: mol_type = other DNA
gtgcgcatgctacgtgacacaccattcattggacagacagcactgctgcaaggtgacacggaagaggtcatcaataacgc

SEQ ID NO: 156877 - DNA, 80 bp, synthetic construct
  source 1..80: mol_type = other DNA
agactacaacccagaagatctcgacgctctgttcgacgccctcgacgaagagtaaggagatggcacaggggaggcgcaga

SEQ ID NO: 156878 - DNA, 80 bp, synthetic construct
  source 1..80: mol_type = other DNA
gtgtgtttgattactacaccactggcgtggtgaccatatggtaccagactaactttgtagtgccccctgatactcctacc

SEQ ID NO: 156879 - DNA, 80 bp, synthetic construct
  source 1..80: mol_type = other DNA
cagatcctcattgtcctccacccttcacggatcacttagaattggatgaagttcctgatgagggaatattcattaggcat

SEQ ID NO: 156880 - DNA, 80 bp, synthetic construct
  source 1..80: mol_type = other DNA
acaatacacacctatgggtcaacctattactggagagtcattaactggtgtcaccattaacaaaaaccctaaagttacac

SEQ ID NO: 156881 - DNA, 80 bp, synthetic construct
  source 1..80: mol_type = other DNA
cccctgttatacacccagctgtaaaccaggtgtacatgtttccacctagcaggcccatacctataaccactagacagggg

SEQ ID NO: 156882 - DNA, 80 bp, synthetic construct
  source 1..80: mol_type = other DNA
gaggaagaaagcatccctatctcgccagaagagaaagcgccgaaccaggcactccaagtccacctccgaaagcagctcag

SEQ ID NO: 156883 - DNA, 80 bp, synthetic construct
  source 1..80: mol_type = other DNA
tggcgatcatgcaaaatccaacaatccaggggcgcgactgacctggcaccagactcggtaaccagcaagctccgcttcct

SEQ ID NO: 156884 - DNA, 80 bp, synthetic construct
  source 1..80: mol_type = other DNA
tcaaccaatcccagtatattctggactgagggtaatgccccagcaaggatgtccattcccttcatcagtgttgggaacgc

SEQ ID NO: 156885 - DNA, 80 bp, synthetic construct
  source 1..80: mol_type = other DNA
ttttgatggtgccaatctccaaatggctagtacctcaagaaccagcataacaactgcgggagcttttggccaacaatcag

SEQ ID NO: 156886 - DNA, 80 bp, synthetic construct
  source 1..80: mol_type = other DNA
ccctcctacatgtagagtaagtttcaaattaaagctcaatgactaaaattcaaggccgtgggtgtttcacttcatcggtg

SEQ ID NO: 156887 - DNA, 80 bp, synthetic construct
  source 1..80: mol_type = other DNA
tcttgtgtgtgcagtagcctcacaaggagataataatggacatgtggtactacaattcatgtttgttccacctggagccc

SEQ ID NO: 156888 - DNA, 80 bp, synthetic construct
  source 1..80: mol_type = other DNA
gacaccacacagaagactgtcaaagtgtacatcaagccgaaacacatatcagcatggtgcccgcgcccaccacgggctac

SEQ ID NO: 156889 - DNA, 80 bp, synthetic construct
  source 1..80: mol_type = other DNA
tattaagagagtgtcagaacaatacgaaacttctgaatttctattctcaggcccaaagaggccaaagatcgacctcccaa

SEQ ID NO: 156890 - DNA, 80 bp, synthetic construct
  source 1..80: mol_type = other DNA
caaaacaaagctccaccccagtgtgttttataatgtatttcctggaagtaaggaaccagctgtcctgcatcctgcagatg

SEQ ID NO: 156891 - DNA, 80 bp, synthetic construct
  source 1..80: mol_type = other DNA
gatacagaagaaggccctggaaacgctggaggagacgccggtggggcctaccgagaagaagatttagaagaacttttcgc

SEQ ID NO: 156892 - DNA, 80 bp, synthetic construct
  source 1..80: mol_type = other DNA
cccttcaaaatacactgtataaccaatgtacatactttgaaacaacacaagtactggctcaattatcccctaacttccag

SEQ ID NO: 156893 - DNA, 80 bp, synthetic construct
  source 1..80: mol_type = other DNA
gaaatatactaagagcattctatcaaatcaaggtccctttaaaggatttaatgaggtgtcaacagcatttaggcacattg

SEQ ID NO: 156894 - DNA, 80 bp, synthetic construct
  source 1..80: mol_type = other DNA
tgcaggtaaggtccactgatgagatgggtggtcaaatcttcgggtttcccctacaaccaggagcatcaagcgtgctgcag

SEQ ID NO: 156895 - DNA, 80 bp, synthetic construct
  source 1..80: mol_type = other DNA
ttcaagccagatgataggtatccttttcttatacacccaactttcccagaacaagagatctttgaatctataagatggac

SEQ ID NO: 156896 - DNA, 80 bp, synthetic construct
  source 1..80: mol_type = other DNA
tacgtggtctctaaaggtgctgtacgacgagtacctgaagcaccacaacttctggggctacccaaacacccagctagacc

SEQ ID NO: 156897 - DNA, 80 bp, synthetic construct
  source 1..80: mol_type = other DNA
caccggcggcagcagtagctcccaacgcctcgtaggcgagtttatggtgcgcgatccgctgttgcgcgacccgcgcgcca

SEQ ID NO: 156898 - DNA, 80 bp, synthetic construct
  source 1..80: mol_type = other DNA
aatgtgtggtgggctcctcatttctaaagttgaaggtaattttaaaatattgggcatgcacattgctggtaatggcgaaa

SEQ ID NO: 156899 - DNA, 80 bp, synthetic construct
  source 1..80: mol_type = other DNA
gcctcggatcttgactgttgttaccccggaaattattttagaacacagcatagacaaacccgaagattgcaataaatcag

SEQ ID NO: 156900 - DNA, 80 bp, synthetic construct
  source 1..80: mol_type = other DNA
ggtttaagtggtaccccatgatattacaccagaaggcagctttagaaaccatagtttcctgtggaccgtttatgcccaga

SEQ ID NO: 156901 - DNA, 80 bp, synthetic construct
  source 1..80: mol_type = other DNA
tgcactatctgatggcgaaagacccaagcactttacagctcagaaatctgtgacagaacatgatgtgcaaactgcggtgt

SEQ ID NO: 156902 - DNA, 80 bp, synthetic construct
  source 1..80: mol_type = other DNA
cctctcatactgtgtggagagaacagggccgcatttaactacgcctaccactcagaggactacacagagcagccattccc

SEQ ID NO: 156903 - DNA, 80 bp, synthetic construct
  source 1..80: mol_type = other DNA
taggcttggtggtgctccgcgtgcgggggagaagacgattaacaacaaaaaataagtggaagtggccggtgggtctttgt

SEQ ID NO: 156904 - DNA, 80 bp, synthetic construct
  source 1..80: mol_type = other DNA
ccaacccaggaattttaacggggtcagccgttgggtgtgatccagacattttctggtcacaacttcacgcctccctggtg

SEQ ID NO: 156905 - DNA, 80 bp, synthetic construct
  source 1..80: mol_type = other DNA
ccacgttaacagcaaatgaaaccggtgccaccatgcctactcaaccatcagacaatgttgagacaagaacaacctatatg

SEQ ID NO: 156906 - DNA, 80 bp, synthetic construct
  source 1..80: mol_type = other DNA
ttcctaacggcgtaacttaaagtgattaacgtatgatatttgttccccagagttatactatagtcatcatcctaaaattc

SEQ ID NO: 156907 - DNA, 80 bp, synthetic construct
  source 1..80: mol_type = other DNA
actgtgtagatcccggctttgctgtatatcgtgtatctagatcacgcttgaagctcgtgttgtcttttgtgtggttggtc

SEQ ID NO: 156908 - DNA, 80 bp, synthetic construct
  source 1..80: mol_type = other DNA
tgtcgtggaccataaatgccaggaggatggtgcaactgaggcgaaagttcgagttgtttacctacatgcggtttgacatg

SEQ ID NO: 156909 - DNA, 80 bp, synthetic construct
  source 1..80: mol_type = other DNA
tgaccacgtaccacaaaaaaataacagacgaacagttcccacagtcatggcaaggaaacaaagcattcactcaccttaca

SEQ ID NO: 156910 - DNA, 80 bp, synthetic construct
  source 1..80: mol_type = other DNA
ctctttacttcagactacgtccttgcctcgaccaactccggaagcattgtaccaccaacagtgtccagtgctgacgccct

SEQ ID NO: 156911 - DNA, 80 bp, synthetic construct
  source 1..80: mol_type = other DNA
tggatttacatctttaactccatacactttgaaccttattagagttgtgttgttaatacggtgtcactatcataatgggt

SEQ ID NO: 156912 - DNA, 80 bp, synthetic construct
  source 1..80: mol_type = other DNA
tctgtatcaggtatgtctctgtgctcaggaatgtccagagcagcatgttaatacgtgatcggtagatagaacagaaagct

SEQ ID NO: 156913 - DNA, 80 bp, synthetic construct
  source 1..80: mol_type = other DNA
agctactgagtatacccatgcatacagtacaaactatcactacaggaagaaaactgaaccagaacaaaatctaaggaata

SEQ ID NO: 156914 - DNA, 80 bp, synthetic construct
  source 1..80: mol_type = other DNA
ccgcgattcaattacagctcagcctgggactcatacgcgagtgtccacacatggggcctttggccaccaatcccggcgca

SEQ ID NO: 156915 - DNA, 80 bp, synthetic construct
  source 1..80: mol_type = other DNA
acgttgggctgcaatcatcttgtgttttgtgtgtcccgtggattagtcagacacactacaggctggtacaacaggatgag

SEQ ID NO: 156916 - DNA, 80 bp, synthetic construct
  source 1..80: mol_type = other DNA
tctttacagaccgttggtactttcaaaaggactttagtaacttccccctagtaactatcagtgcctctgcggctagcctg

SEQ ID NO: 156917 - DNA, 80 bp, synthetic construct
  source 1..80: mol_type = other DNA
gattgttagagacccctgcacgcagcccacctttgaaatccccggtggcggtaacctccctcgcagaatacaagttgtcg

SEQ ID NO: 156918 - DNA, 80 bp, synthetic construct
  source 1..80: mol_type = other DNA
gagacttctgcaaagttcctctagcttacttgggcgttagtttagggaacttgcggtttccgttctgccgaccacaaacg

SEQ ID NO: 156919 - DNA, 80 bp, synthetic construct
  source 1..80: mol_type = other DNA
agcaagaagaccaaaaagaaaagctcctacagcagctccgagtccagcgacagcaccagcgagtcctcagggagggaatc

SEQ ID NO: 156920 - DNA, 80 bp, synthetic construct
  source 1..80: mol_type = other DNA
ctgaccctattaatagtaccattggtaaatttgagaccagcaccaaatgcatcacccagtgtggcaataactatatctgt

SEQ ID NO: 156921 - DNA, 80 bp, synthetic construct
  source 1..80: mol_type = other DNA
caccgtctgcggaagaatgtggttatagtgaccgtgttagatccatcacaataggaaattccacaataaccactcaggaa

SEQ ID NO: 156922 - DNA, 80 bp, synthetic construct
  source 1..80: mol_type = other DNA
cttactttatatatgggttggtcgctcagtcagttaccccctgatagacctggcagatgaggctggaaacaccccactgg

SEQ ID NO: 156923 - DNA, 80 bp, synthetic construct
  source 1..80: mol_type = other DNA
gtcaaaaaaaccaacagatgatgaatactattacccagttccaaaaaaacctagactgttccctccaacagaagaccaag

SEQ ID NO: 156924 - DNA, 80 bp, synthetic construct
  source 1..80: mol_type = other DNA
ggttcccaaaatgcctcctcagtttcatgtatctttcaaactcggctggaaataaaaatacaaggcctttcactgttcac

SEQ ID NO: 156925 - DNA, 80 bp, synthetic construct
  source 1..80: mol_type = other DNA
tgccaagagcccctccataggcctctgccgggaggtgctgggtcgcctgaccctcttgcactccaagtgcaacaatctgg

SEQ ID NO: 156926 - DNA, 80 bp, synthetic construct
  source 1..80: mol_type = other DNA
tactctgggtcgtcctccacgtcctgggcccccgggcggaccccgcacgccacaaataagaaacctgccagcgctcccgg

SEQ ID NO: 156927 - DNA, 80 bp, synthetic construct
  source 1..80: mol_type = other DNA
cggacattatttaagaccgggaggccccaacggcgggctaaacagaacgatggccttctatctcccagactggtcgtgct

SEQ ID NO: 156928 - DNA, 80 bp, synthetic construct
  source 1..80: mol_type = other DNA
gaggtctatcttagtttgagatgtccaaatttcttctttcctcttcctgcacctaaggtttcaactagccgtgccttgcg

SEQ ID NO: 156929 - DNA, 80 bp, synthetic construct
  source 1..80: mol_type = other DNA
ataactctattagtgagataccacgcttgtggaccttatgctcacacagccatcctctagtaagcttgcaaggcgtctaa

SEQ ID NO: 156930 - DNA, 80 bp, synthetic construct
  source 1..80: mol_type = other DNA
tggttggctgcgctgctgctatctttagaggggaaaagaggaataagcccccagacaggggagtgggcttgtttgtgact

SEQ ID NO: 156931 - DNA, 80 bp, synthetic construct
  source 1..80: mol_type = other DNA
tggaagtctaaatcctatatggttcaagtgccttaaaatgcttctggaggacattggtttcccctctcaattaattgacc

SEQ ID NO: 156932 - DNA, 80 bp, synthetic construct
  source 1..80: mol_type = other DNA
ctcagcacaagatgatggacccctcggagtagagaaaccgaactattttctaaattttagagcaatcaatgtagacatct

SEQ ID NO: 156933 - DNA, 80 bp, synthetic construct
  source 1..80: mol_type = other DNA
agaaccatggtgcctatggccaacagtctggggcgatttacgtgggtaactacaggatagtcaataggcacttagccaca

SEQ ID NO: 156934 - DNA, 80 bp, synthetic construct
  source 1..80: mol_type = other DNA
gtgggggtaaattactatgcaaacatggggtcataggcatgattacagctggtggtgatggtcatgttgctttcattgac

SEQ ID NO: 156935 - DNA, 80 bp, synthetic construct
  source 1..80: mol_type = other DNA
gcaactgtatttcttctgtaccatttatagtaccaatggcacatcttgaagaaaaaggaaaattctataccagtaagttg

SEQ ID NO: 156936 - DNA, 80 bp, synthetic construct
  source 1..80: mol_type = other DNA
gtacacaactttggcatagtatgcttccagtgcccctacacctttcccccctgttatgacaaaaccaacccaaacaaagg

SEQ ID NO: 156937 - DNA, 80 bp, synthetic construct
  source 1..80: mol_type = other DNA
acaaaagacatatgtagcatgggcctattccaactacaggccacagcatgcactctaaacaacccctggttaagagacag

SEQ ID NO: 156938 - DNA, 80 bp, synthetic construct
  source 1..80: mol_type = other DNA
gcacactccacagaaaacttgcaagtttctgagtgctatgtggagacccccggtacacaatgtccgcggccaggagagac

SEQ ID NO: 156939 - DNA, 80 bp, synthetic construct
  source 1..80: mol_type = other DNA
gcaacaagatgaatacactagcgccggcaatgttacgtgttggtatcaaacgggcatagtgttcccacccggcacgccta

SEQ ID NO: 156940 - DNA, 80 bp, synthetic construct
  source 1..80: mol_type = other DNA
ggggaaaataccgaggcgccgccatcatcatgtggggcgtctcgagtttggactacgacgacgatgaggagctcacccgg

SEQ ID NO: 156941 - DNA, 80 bp, synthetic construct
  source 1..80: mol_type = other DNA
aaacagctcacggcacaatccactgcaccatctggtggtgtcaacacacaagaggtgcctgcgctgactgcagttgagac

SEQ ID NO: 156942 - DNA, 80 bp, synthetic construct
  source 1..80: mol_type = other DNA
agtttgtgatcgccggtagaggagctaacacgaagcctaacgaagcaccccatccagggttcaccacaacttttcccggg

SEQ ID NO: 156943 - DNA, 80 bp, synthetic construct
  source 1..80: mol_type = other DNA
aacagttgccagtaatgcactagctcttagccaacccaaaccagtggataactctgttcaaaatacacaacaaagtaccc

SEQ ID NO: 156944 - DNA, 80 bp, synthetic construct
  source 1..80: mol_type = other DNA
aaaacctggccaatgtggtggggttattgccaacacaggcaatattgttgctatccatgttggtggcaatgggcgtgtcg

SEQ ID NO: 156945 - DNA, 80 bp, synthetic construct
  source 1..80: mol_type = other DNA
gtgtttcatcatgtgcatggtatcagcgtgtaatgatttttccgttcgcttactgaaagatacaccgttcattgagcaac

SEQ ID NO: 156946 - DNA, 80 bp, synthetic construct
  source 1..80: mol_type = other DNA
agggggcggagatccacccgggcctcgtataattcctgggccccaaaacccttacctgctattcccggaacaagctcctc

SEQ ID NO: 156947 - DNA, 80 bp, synthetic construct
  source 1..80: mol_type = other DNA
tcccatatattaatgccttaccttttgattctgcaataaaccattccaatttctcactagcagtgataccggtttgtcca

SEQ ID NO: 156948 - DNA, 80 bp, synthetic construct
  source 1..80: mol_type = other DNA
aagctagattcaccttctacagacacaaaaagactgacttcatagtatactttaacagaaagccccccttcaaactcaat

SEQ ID NO: 156949 - DNA, 80 bp, synthetic construct
  source 1..80: mol_type = other DNA
tgcaaccaatgtcagtaagttcccaatgctagatgtagaggtagggaatgtggtaccttatggtcaacttaacctcagtg

SEQ ID NO: 156950 - DNA, 80 bp, synthetic construct
  source 1..80: mol_type = other DNA
tgaacgaggcagagaggttggtagcgatcgtgttgctcatgctaaccttccaagtgatgataattggcttaattttgatg

SEQ ID NO: 156951 - DNA, 80 bp, synthetic construct
  source 1..80: mol_type = other DNA
ctgcgcgccccacggtctctgtcgtttcggtggtttctgcgctgggtacggggtgttgcgtggacggtggttgcgactcg

SEQ ID NO: 156952 - DNA, 80 bp, synthetic construct
  source 1..80: mol_type = other DNA
aaaaagacttcggttcgagagtccaaagagaaccgaacccgtgggagtcggagcaggaaatggaaacagaaacagaaaca

SEQ ID NO: 156953 - DNA, 80 bp, synthetic construct
  source 1..80: mol_type = other DNA
agtacacaactgactgccaagtacaaatttgacttcatgtggggtggaaacatgatctcctcacagatcatcaagaaccc

SEQ ID NO: 156954 - DNA, 80 bp, synthetic construct
  source 1..80: mol_type = other DNA
attgcagcacagagtggctcggtagtcaggtattttaacatcaactactacaaagatgctgccagttcagggctctctaa

SEQ ID NO: 156955 - DNA, 80 bp, synthetic construct
  source 1..80: mol_type = other DNA
caaaaccaaacactgactacgaccctacaaagtgccgctatgtcctcagagacattcccttgtggtccatggcacacggg

SEQ ID NO: 156956 - DNA, 80 bp, synthetic construct
  source 1..80: mol_type = other DNA
aaacgcaagaaaatgggagcccaagtgtcaactcagaagtccgggtctcatgaaaccggcaatgtggccactggcggatc

SEQ ID NO: 156957 - DNA, 80 bp, synthetic construct
  source 1..80: mol_type = other DNA
acacatttaaaactcaagagcacttgcaacaacctaatgcagaatcacaaaaaaaaactactccagtaaatccacctttt

SEQ ID NO: 156958 - DNA, 80 bp, synthetic construct
  source 1..80: mol_type = other DNA
gacgtgaaggttaaaggtcatcctcggcggaagctacacaaaatggtggacaacatcttccgggtcaaaggtcgtgcaca

SEQ ID NO: 156959 - DNA, 80 bp, synthetic construct
  source 1..80: mol_type = other DNA
cgtgcgcttgctcaaagacacaccattcgtcagacaggaccagtatgtcaacacacaggggattgaagatacaattgaaa

SEQ ID NO: 156960 - DNA, 80 bp, synthetic construct
  source 1..80: mol_type = other DNA
tcaggcacaacaagtagagaacagcagacaccacaaaaaattagagaaaaaattttacaaaacatgaaatcttactttaa

SEQ ID NO: 156961 - DNA, 80 bp, synthetic construct
  source 1..80: mol_type = other DNA
taatgtccttggataactacaatgagaatacaaccactacgccaagcactctgtttgcaaaatggaacatcacgtacaca

SEQ ID NO: 156962 - DNA, 80 bp, synthetic construct
  source 1..80: mol_type = other DNA
agacatttcaaactgagcaaatgttcagacctagaccaaaaaatgcagatgggactccaaataaccaataccaaaactta

SEQ ID NO: 156963 - DNA, 80 bp, synthetic construct
  source 1..80: mol_type = other DNA
ctggcattaaacatggtagtctcacagctcagggaagaatcagcctcacgccgaaggattcacaccaatttgaacgccat

SEQ ID NO: 156964 - DNA, 80 bp, synthetic construct
  source 1..80: mol_type = other DNA
caatcccccttgagagtgccatgtatggtatggatggactagaggctcttgacctaactaccagtgctggctacccatac

SEQ ID NO: 156965 - DNA, 80 bp, synthetic construct
  source 1..80: mol_type = other DNA
cattatataaattaatgtgcctgacccagggagcctactccggagtgccaaaccccacacctaaaaaacctgaacttagg

SEQ ID NO: 156966 - DNA, 80 bp, synthetic construct
  source 1..80: mol_type = other DNA
tgttctagcctgcgtggctgcctgcgtgtcccaacggacacgaagccatatacttgacaaggtgtgaagagccccgtgtg

SEQ ID NO: 156967 - DNA, 80 bp, synthetic construct
  source 1..80: mol_type = other DNA
cttttatgtatttgtggtccattattaccgtttgtcgttatgaacactttgtaccacgagttgctgttttgtccatcaag

SEQ ID NO: 156968 - DNA, 80 bp, synthetic construct
  source 1..80: mol_type = other DNA
aacactattcagctcagttgtttatgctagacatcaacccagaacctataaccttggaacaagccgtgtatggtatgcag

SEQ ID NO: 156969 - DNA, 80 bp, synthetic construct
  source 1..80: mol_type = other DNA
aaggcttgtgatattctggagctgccctatgtatgcaggcaaggagactcttggctgaagaaatttactgaagcttgcaa

SEQ ID NO: 156970 - DNA, 80 bp, synthetic construct
  source 1..80: mol_type = other DNA
agttacaaacacactcacccaggtgagaatggtcatgagattggaaagaacacagacagaagtgggaatcagcctgatga

SEQ ID NO: 156971 - DNA, 80 bp, synthetic construct
  source 1..80: mol_type = other DNA
ccaacctaggacccagtgacatgtatgttcacacaaaagaagccatctacaagtgtgcgcacctaactgaacctaatgaa

SEQ ID NO: 156972 - DNA, 80 bp, synthetic construct
  source 1..80: mol_type = other DNA
atttgtgttattcccacacatgctcaaccaggtgatagtgtgttagttaatggacagaaaatacaggtcagagacaaata

SEQ ID NO: 156973 - DNA, 80 bp, synthetic construct
  source 1..80: mol_type = other DNA
ccttttcccttagatgcaaaggagctctctgtaacagcaaagaagtatggacttactattacccccccagataagtcatc

SEQ ID NO: 156974 - DNA, 80 bp, synthetic construct
  source 1..80: mol_type = other DNA
attactgaaagataccccatttattgaacagagcgcgttactccaaggagacgcagtggaggcaattgagagtgcagttg

SEQ ID NO: 156975 - DNA, 80 bp, synthetic construct
  source 1..80: mol_type = other DNA
acattaaggaaagcaaaccatcaacatcaaattcagcaccagccttagatgcagcagaaactggacatacaagcaatgtg

SEQ ID NO: 156976 - DNA, 80 bp, synthetic construct
  source 1..80: mol_type = other DNA
agaatacacaggaccatgttagatcactgtgcttactagcttggcacaatggaaaagagaagtatgaggaatttttaaca

SEQ ID NO: 156977 - DNA, 80 bp, synthetic construct
  source 1..80: mol_type = other DNA
gtatacttcaaacccaaacacgtacgtgcgtgggtacctaggccgcccagactatgcccttatgttaagagttcaaatgt

SEQ ID NO: 156978 - DNA, 80 bp, synthetic construct
  source 1..80: mol_type = other DNA
cccaacacccatcagcacctacaatgcccttttcaccagatttctccaatgttgacaacttccattccatggcttacgat

SEQ ID NO: 156979 - DNA, 80 bp, synthetic construct
  source 1..80: mol_type = other DNA
tcaccctgacacttcatcaaataggttttacactttggagagtaaaacatggagtaatgaatccaagggctggtggtgga

SEQ ID NO: 156980 - DNA, 80 bp, synthetic construct
  source 1..80: mol_type = other DNA
aacactgctgccccttactatgcgggaaggcagtggtcatggtcaacagaaggacacaagccagctattcagtcaacatg

SEQ ID NO: 156981 - DNA, 80 bp, synthetic construct
  source 1..80: mol_type = other DNA
cttaaatcagaatcctgacggccaggacattagtatgttctgccaaatggtttcgtcagtcgacttcataccacccatgg

SEQ ID NO: 156982 - DNA, 80 bp, synthetic construct
  source 1..80: mol_type = other DNA
gtgaggttggtaggcacgtgagtagagctgggtagacctgtcgttgtattgggagcagcaaatccagttgtattcaaggt

SEQ ID NO: 156983 - DNA, 80 bp, synthetic construct
  source 1..80: mol_type = other DNA
ggctagaagcagcttatttcagctatgggttccgctggctccaagaagcgtgcaccgcagcaactagggctgcgcaagag

SEQ ID NO: 156984 - DNA, 80 bp, synthetic construct
  source 1..80: mol_type = other DNA
agacacacagcttatagttagtgcaccatctccatgtaaggcacacattgaagacatacccctatgggcagccttctatg

SEQ ID NO: 156985 - DNA, 80 bp, synthetic construct
  source 1..80: mol_type = other DNA
caaaagtactaatagaagacctacccctatgggcaaccctatttggctacacagaattcgcggccaaatacacaggagac

SEQ ID NO: 156986 - DNA, 80 bp, synthetic construct
  source 1..80: mol_type = other DNA
gaagcaataaagtatttgccacagcatatcaagatgtcacttacaaccccctgaacgacaagggaataggcaaccacatc

SEQ ID NO: 156987 - DNA, 80 bp, synthetic construct
  source 1..80: mol_type = other DNA
gtgttaggccttccggactacaaaaatcgccattttggtgacgtcacggccgccaccttaagtagttgaggcggacggtg

SEQ ID NO: 156988 - DNA, 80 bp, synthetic construct
  source 1..80: mol_type = other DNA
aagtccgtcactgaccacgtgactcccgcaggccaaccatagtctacgtcgtgcacttcctgggcatggtctacaacata

SEQ ID NO: 156989 - DNA, 80 bp, synthetic construct
  source 1..80: mol_type = other DNA
gcctacctaatttgacactgcaggctatgtttgtcccagtgggagctccaaccccaaaatcacaggattcctacgagtgg

SEQ ID NO: 156990 - DNA, 80 bp, synthetic construct
  source 1..80: mol_type = other DNA
ttagtgacaattctgagatctccgtgttcccaaaagatgcaaagcagactgactatgatgcatccactgaaagtgagcta

SEQ ID NO: 156991 - DNA, 80 bp, synthetic construct
  source 1..80: mol_type = other DNA
ggccttctgtatcacccccacccaatggcccgccatgcagctcaataaactgttttgggaaaataaactggtacagcaac

SEQ ID NO: 156992 - DNA, 80 bp, synthetic construct
  source 1..80: mol_type = other DNA
ttacggctacaatacattaaaccacatggggcagctatacatgcgccacgtgaacggaccatcaccactgccaatgacca

SEQ ID NO: 156993 - DNA, 80 bp, synthetic construct
  source 1..80: mol_type = other DNA
tccaacaccagtgatgagagtatgattgagaccagagcagttgtcaataagcacagtgttgctgagaccagtgtggaaca

SEQ ID NO: 156994 - DNA, 80 bp, synthetic construct
  source 1..80: mol_type = other DNA
ggtagatgggatggtcaacatgtctctagacacagtccaaaacacaatggccagtggttctgtgcactcgaaggaagtcc

SEQ ID NO: 156995 - DNA, 80 bp, synthetic construct
  source 1..80: mol_type = other DNA
agtagccatcagatgtccttacactgaccctccactcacagggtccacaacagacacaatgttcataccactatctacct

SEQ ID NO: 156996 - DNA, 80 bp, synthetic construct
  source 1..80: mol_type = other DNA
agcaacaccgaggaataaaaggggagtgtttgtgcttgggttcttgggttttctcgctacggcaggtactgcaatgggca

SEQ ID NO: 156997 - DNA, 80 bp, synthetic construct
  source 1..80: mol_type = other DNA
tgtggcgtgtgcggcatcgtctgcgtgatgagctgctggcccgctaacacggtgacgttgtgcaacttgagcagggcact

SEQ ID NO: 156998 - DNA, 80 bp, synthetic construct
  source 1..80: mol_type = other DNA
aacaaaagaattggaacaggtcacttatgttcctcaccataaggtaggatgggcttggtggacctgcagtagagtaatat

SEQ ID NO: 156999 - DNA, 80 bp, synthetic construct
  source 1..80: mol_type = other DNA
ctataatagcacatggcctaactaatgaggcaaacatatactcactcccacctgatccaaaacactttgatgggtacaac

SEQ ID NO: 157000 - DNA, 80 bp, synthetic construct
  source 1..80: mol_type = other DNA
tctgatgaaagattatcctatactatgttgggggagattttgaactattacactcactgggcaggatcaatcaaatacac

SEQ ID NO: 157001 - DNA, 80 bp, synthetic construct
  source 1..80: mol_type = other DNA
gagtctgctctaggctttttgttgtgtaaaccactcatccctactggtgctagtactaaagcagaaatatatatcagcct

SEQ ID NO: 157002 - DNA, 80 bp, synthetic construct
  source 1..80: mol_type = other DNA
catttggatgtggattcaccaaccagatcagtgagaaaattaacgagattacatcaatggtaagcaatgttattacagag

SEQ ID NO: 157003 - DNA, 80 bp, synthetic construct
  source 1..80: mol_type = other DNA
gtcactaaccatatgggaacgctatgctcaagaatagtcaccaacaagcagcagcatgaagttgagattaccacacgtat

SEQ ID NO: 157004 - DNA, 80 bp, synthetic construct
  source 1..80: mol_type = other DNA
taccaaatatacaggaaagccacccaaccacctcaaatgctgctccagcattagatgcagcagagactggacatacaagc

SEQ ID NO: 157005 - DNA, 80 bp, synthetic construct
  source 1..80: mol_type = other DNA
tgagagatcatggctacagctcaataaacactcccactaaaacaaaactccaacccagcgtcttttatgacgtgtttcca

SEQ ID NO: 157006 - DNA, 80 bp, synthetic construct
  source 1..80: mol_type = other DNA
cccttgatacaccaaattatgtacatccctcctggtgggcctatccccaagttagtgactgactacacatggcagacctc

SEQ ID NO: 157007 - DNA, 80 bp, synthetic construct
  source 1..80: mol_type = other DNA
atcaagcttatcaccaatacacttcttaacataagaacaatcggttccagccaataaaggaagacattcggacccgcgta

SEQ ID NO: 157008 - DNA, 80 bp, synthetic construct
  source 1..80: mol_type = other DNA
ggtggagacgatggagagcgcggcgcagacggtggagaccccgcagacgtaggagacgacgccctgctcgccgctttcga

SEQ ID NO: 157009 - DNA, 80 bp, synthetic construct
  source 1..80: mol_type = other DNA
tgttagacatcaacccagaacccatatccttagaacaagctgtgtatggaatggagaacctggaaccactcgatcttacc

SEQ ID NO: 157010 - DNA, 80 bp, synthetic construct
  source 1..80: mol_type = other DNA
gctgcgagataccccgtttatagagcaagaaacagagttgcaaggcgaaccacaaccgccacagacaagcaactccaagg

SEQ ID NO: 157011 - DNA, 80 bp, synthetic construct
  source 1..80: mol_type = other DNA
caattcatcagtttactccctgccacccgatcccaaacactttgatggttaccagcaacaagaggtagtcataatggatg

SEQ ID NO: 157012 - DNA, 80 bp, synthetic construct
  source 1..80: mol_type = other DNA
ttatcgccgccctcgacgacgaacagtaaggaggcgcagacggaggaggagggggagacgaaaattcagacggtacagag

SEQ ID NO: 157013 - DNA, 80 bp, synthetic construct
  source 1..80: mol_type = other DNA
atgatatggggacattatgctttagggcgttagatgattcaaccaataaccacattaaggtatatattaagccaaagcac

SEQ ID NO: 157014 - DNA, 80 bp, synthetic construct
  source 1..80: mol_type = other DNA
taatacatcctacttttccaatttctgagatacacaattcaattagatggaccagaagccctcggaacatgcaagagcat

SEQ ID NO: 157015 - DNA, 80 bp, synthetic construct
  source 1..80: mol_type = other DNA
gacatatttggaacacatacactaagccaacatcaggctattggcttggtcgggactattcttttgactgctggacttat

SEQ ID NO: 157016 - DNA, 80 bp, synthetic construct
  source 1..80: mol_type = other DNA
tgcccaactaatgacacttgatatagattcaaacaatatgagcttggaagatagtgtgtttggctcggatgggctagagg

SEQ ID NO: 157017 - DNA, 80 bp, synthetic construct
  source 1..80: mol_type = other DNA
ccacccgggggcgtcatagagctccgtctggctggcgtagcggcgcaccccgttggccaggcccccggtgggctttaggt

SEQ ID NO: 157018 - DNA, 80 bp, synthetic construct
  source 1..80: mol_type = other DNA
actggccgggctatgggcaagactcttaaaaaagccatgtttctcggtaaactttacagaaagaaaagggcactgctact

SEQ ID NO: 157019 - DNA, 80 bp, synthetic construct
  source 1..80: mol_type = other DNA
gtaataaaatggctactcagaatagtctcggccatgattataatgattagaaatagttcagaccctcaaactatagttgc

SEQ ID NO: 157020 - DNA, 80 bp, synthetic construct
  source 1..80: mol_type = other DNA
gtacataatgctggtatgggtgtcgccgctggcaatttaactatatacccacaccaatggatcaatttgaggacgaacaa

SEQ ID NO: 157021 - DNA, 80 bp, synthetic construct
  source 1..80: mol_type = other DNA
ggcacaaacagcccagtaataggattctatgtatgtaaaaacagcatctaccaaaacagctactctaacatagcaacaga

SEQ ID NO: 157022 - DNA, 80 bp, synthetic construct
  source 1..80: mol_type = other DNA
acacaaaaaaaaaagaaattttccaactacgactggtcatgcgagtacgagctggccaaatggatggatcgtcctttgcg

SEQ ID NO: 157023 - DNA, 80 bp, synthetic construct
  source 1..80: mol_type = other DNA
ccaggtctattacagagaaggcagagatcaactctggaagggacctggtgaactattgtggaagggggaaggagcagtca

SEQ ID NO: 157024 - DNA, 80 bp, synthetic construct
  source 1..80: mol_type = other DNA
gttctcttaggttcacgttcttgttctgtggcagcatgatggcaactggaaagttaatactgacatattcacccccagga

SEQ ID NO: 157025 - DNA, 80 bp, synthetic construct
  source 1..80: mol_type = other DNA
cctcccagtaacagaaactcatggcctggtactggtggagacgccgccggaggagaggctggtggaagccgaggcgcagg

SEQ ID NO: 157026 - DNA, 80 bp, synthetic construct
  source 1..80: mol_type = other DNA
ggagtacctaatgtgtaagatatttgacaggccacccagaagcaacgcgcgctacgccttcggctgcgcgcggcacctca

SEQ ID NO: 157027 - DNA, 80 bp, synthetic construct
  source 1..80: mol_type = other DNA
tcattataacaatgggagcacaggtatcatcacagaaagtgggtgcacatgaaaacaccaacgtggcaacaggtggctct

SEQ ID NO: 157028 - DNA, 80 bp, synthetic construct
  source 1..80: mol_type = other DNA
tatattatcactcaatgggtagagcaggttacatcatacacacacagtgtaacgctaccaaattccacagtggtgcacta

SEQ ID NO: 157029 - DNA, 80 bp, synthetic construct
  source 1..80: mol_type = other DNA
ccgagtcaacgatcgagaacttcttgtgcagatcagcctgcgtttacttcactgagtatgaaaattctgggtctaagcgt

SEQ ID NO: 157030 - DNA, 80 bp, synthetic construct
  source 1..80: mol_type = other DNA
gacgcacggtgcttttggtcaacagtccggtgctgcgtatgtgggcaattatagagtggtaaacagacacttggcaacac

SEQ ID NO: 157031 - DNA, 80 bp, synthetic construct
  source 1..80: mol_type = other DNA
aaaccgcccggtctctttcctctctaaactctggtcgtggcgagctcctatcttcgccgcttcctccttcctctccctca

SEQ ID NO: 157032 - DNA, 80 bp, synthetic construct
  source 1..80: mol_type = other DNA
ctccgccggcaaccgcgtcgtcgttgctatcgtcgccggtttcgggcgatgacagcgccggcggcgcgggtctcgtctcg

SEQ ID NO: 157033 - DNA, 80 bp, synthetic construct
  source 1..80: mol_type = other DNA
tggatgctctacgtgaggccgtaccacctttgcagtcacctagtgctgaagcatgtggatatagtgacagagcaacgcag

SEQ ID NO: 157034 - DNA, 80 bp, synthetic construct
  source 1..80: mol_type = other DNA
agagttagtacacacaggttaggcacgggggaggtgccagctttacaagcagcagagacaggtgccacctccaacgcaac

SEQ ID NO: 157035 - DNA, 80 bp, synthetic construct
  source 1..80: mol_type = other DNA
ggcgtcgcgggatggcggggacggagacggaggcgtttgcggcggagacggtggcctttcgcggcggacacggagaacac

SEQ ID NO: 157036 - DNA, 80 bp, synthetic construct
  source 1..80: mol_type = other DNA
gagagacgttcagacttagcacaggaaatatttgcaataagagtggatattgcttcacagcccttagcaaccacattaat

SEQ ID NO: 157037 - DNA, 80 bp, synthetic construct
  source 1..80: mol_type = other DNA
tcgtgaggcaccccatccgcaggcaccggacacgcgagactcgccgtatgcgcgggagccattcacgggtggaacacgtg

SEQ ID NO: 157038 - DNA, 80 bp, synthetic construct
  source 1..80: mol_type = other DNA
agcgagacgcagacgcagtcctcggaggggccggcggagacgacgagggagctcctcgagcgaaagctcagagagcagcg

SEQ ID NO: 157039 - DNA, 80 bp, synthetic construct
  source 1..80: mol_type = other DNA
gagagtagggctatttagcccaatatttctcagtcccagcagactaaacccacaagagccaggggcctacacagaaatag

SEQ ID NO: 157040 - DNA, 80 bp, synthetic construct
  source 1..80: mol_type = other DNA
ggattgggtaagtacatcaaaaggctggtggtggaagcttccagatgcactcaaagacatgggcatatttggacagaact

SEQ ID NO: 157041 - DNA, 80 bp, synthetic construct
  source 1..80: mol_type = other DNA
ttaccttcctcaaaaggaaatttcgccccgatgaccgttacaaattcctcatacaccctgtgtacagcatggaggatgtt

SEQ ID NO: 157042 - DNA, 80 bp, synthetic construct
  source 1..80: mol_type = other DNA
ctggcctcagccctatttatgattctggaggcgggcacgctgatggagaaatgggcggtcggttgattggccccacagcg

SEQ ID NO: 157043 - DNA, 80 bp, synthetic construct
  source 1..80: mol_type = other DNA
actcgcgctgccgtccctttgggacttcttcctcttttttccccggggatgcaaacacacacaagacagacgcgcgtctg

SEQ ID NO: 157044 - DNA, 80 bp, synthetic construct
  source 1..80: mol_type = other DNA
cacctcgataaccggctcgtggctcgtacagacgattgtttggctctgtaacttgccagggacggctgacgatgtgttta

SEQ ID NO: 157045 - DNA, 80 bp, synthetic construct
  source 1..80: mol_type = other DNA
gtatggcacagatggcttggaaccaatagatgtcaacactagtgctggttacccatatgttagtttaggaattaggaaga

SEQ ID NO: 157046 - DNA, 80 bp, synthetic construct
  source 1..80: mol_type = other DNA
ttgaagagtatttcacaaaggaccaagacagtgccaacagatacatgtcgtggaccataaatgccagaaggatggtgcag

SEQ ID NO: 157047 - DNA, 80 bp, synthetic construct
  source 1..80: mol_type = other DNA
gcaggccgacgcggcccggaaagcgctcagcgacgaggccgatctgctgaatcagaaagtacagacgcagttgcgacaac

SEQ ID NO: 157048 - DNA, 80 bp, synthetic construct
  source 1..80: mol_type = other DNA
gagtacttataagaagcccatacactgttccaaaactatacaatgaagcagacccctcatacggatgggtcccattctcc

SEQ ID NO: 157049 - DNA, 80 bp, synthetic construct
  source 1..80: mol_type = other DNA
ctctgcctctccatcatagacatcttccttgaatctcattctctcaccgcatacctcgctcttcatccaggagggggcca

SEQ ID NO: 157050 - DNA, 80 bp, synthetic construct
  source 1..80: mol_type = other DNA
tgtagacagcataaaacaacaggtagattttattaaccccaccagtaagattggttcaaaggtaattaaatggctattga

SEQ ID NO: 157051 - DNA, 80 bp, synthetic construct
  source 1..80: mol_type = other DNA
acaaagagcagggaagagaggagcagtgacatgctggaactgtggcaaaataggacacacagccaggcaatgtaaagccc

SEQ ID NO: 157052 - DNA, 80 bp, synthetic construct
  source 1..80: mol_type = other DNA
tagttgaggcggacggtggcgtcaggtcaaaggtcactgtcagcgtcagctactcaaaatggaggttaacttcttccggg

SEQ ID NO: 157053 - DNA, 80 bp, synthetic construct
  source 1..80: mol_type = other DNA
tggagaccacctgacaaatacacaaacaaccaaccatacccatttgaatactacacaggactatatagcagcatattttt

SEQ ID NO: 157054 - DNA, 80 bp, synthetic construct
  source 1..80: mol_type = other DNA
tgaagtggtaacacctgatcagcgtgttacatttatggaattcctgggctttttgcaacgcacggagttggtctacgtca

SEQ ID NO: 157055 - DNA, 80 bp, synthetic construct
  source 1..80: mol_type = other DNA
aacttccacaacataacacgaggcaataaagctttctgtcacctgacaggcatatacagcggcccttacttatcacaagg

SEQ ID NO: 157056 - DNA, 80 bp, synthetic construct
  source 1..80: mol_type = other DNA
catcaaagttcactgagccactaaaagacgtgctcataaaaacggctccagcgctcaactcgccaaatgtggaagcgtgc

SEQ ID NO: 157057 - DNA, 80 bp, synthetic construct
  source 1..80: mol_type = other DNA
actcacagaccctacaaatgcagacgcaggatttataccatatgactacaacttcggcgatggaaagatgccagatggag

SEQ ID NO: 157058 - DNA, 80 bp, synthetic construct
  source 1..80: mol_type = other DNA
aaaaaaaattgtaataacacagtggaacccatccactgtaaaaaaatgcgtggtaaaaggttacctgccgctcctaatct

SEQ ID NO: 157059 - DNA, 80 bp, synthetic construct
  source 1..80: mol_type = other DNA
aacaacaagaatttgatgagtcttttacagtcaaacctaagcgacccaaactttctacagccgcccacgtcgagcagcaa

SEQ ID NO: 157060 - DNA, 80 bp, synthetic construct
  source 1..80: mol_type = other DNA
gccccgaacccgaaataaaagtgagctttaagctcggtttcaaataaacaaggccgtgggagtttcactgctcggtgtct

SEQ ID NO: 157061 - DNA, 80 bp, synthetic construct
  source 1..80: mol_type = other DNA
caaattttttcttccctctaccagccccaaaacccgcaaccagtaagcgaagaggagacttagcaaccttatctgatcaa

SEQ ID NO: 157062 - DNA, 80 bp, synthetic construct
  source 1..80: mol_type = other DNA
ttggtgccgctttcgggagtggcttcaccagtcagataggtgagaagattaatgaaattacttccatggttaactcagtc

SEQ ID NO: 157063 - DNA, 80 bp, synthetic construct
  source 1..80: mol_type = other DNA
gaaaaatttttatatgaaaaatgcacacactatcaaacatttgccacagacaccagactaaacccccaacgacccgtgtc

SEQ ID NO: 157064 - DNA, 80 bp, synthetic construct
  source 1..80: mol_type = other DNA
tcttagtgaaaatttttctaaaattggcaatgattcaggtggggcaattctatcacgagtggctgatgatgcgtcaaatg

SEQ ID NO: 157065 - DNA, 80 bp, synthetic construct
  source 1..80: mol_type = other DNA
aacagtcaccatagctccagacaagtccgaattctctggtgccatgcaacaacaaacacagggattgccaaccagattac

SEQ ID NO: 157066 - DNA, 80 bp, synthetic construct
  source 1..80: mol_type = other DNA
ccaattgtcgcctgccttcccctgcttccccttgttaacttatagcatgataggtaggtcacctaacgtggaagcctggt

SEQ ID NO: 157067 - DNA, 80 bp, synthetic construct
  source 1..80: mol_type = other DNA
gagctcctcgtccatcctgtcggctccggacacgaggataggagtttccactgccttggacttggttgacagcaggcacg

SEQ ID NO: 157068 - DNA, 80 bp, synthetic construct
  source 1..80: mol_type = other DNA
gtggttccgatcctgcctccactcgcacggagctttttgtggctgcggcaattttatccttcatctttctagtctggctg

SEQ ID NO: 157069 - DNA, 80 bp, synthetic construct
  source 1..80: mol_type = other DNA
tggtcttaaacgaatgcaagaacaacagccttatgatgagatctcttatacaggccctaaaaggccaaaactgtctgttc

SEQ ID NO: 157070 - DNA, 80 bp, synthetic construct
  source 1..80: mol_type = other DNA
tgtaattccaagcacatatataaaactacctattatgaggttgagggtggaatgccatcaggatgtgctgggaccagtat

SEQ ID NO: 157071 - DNA, 80 bp, synthetic construct
  source 1..80: mol_type = other DNA
acaaagagaacaagggccgtggacgagcgagagcgaaagcgaagcagaagcccaagaagaaacgccggaggggtcgatcc

SEQ ID NO: 157072 - DNA, 80 bp, synthetic construct
  source 1..80: mol_type = other DNA
atgggtgctcaagtatctagacagagtgttggaagccatgagacaatgatccatgctgggactggggctgtggtcaaata

SEQ ID NO: 157073 - DNA, 80 bp, synthetic construct
  source 1..80: mol_type = other DNA
ccagaagttttaaacactctagctactccgttctgttttaaatttccctcatttccaaaaattcaaggacaggataatca

SEQ ID NO: 157074 - DNA, 80 bp, synthetic construct
  source 1..80: mol_type = other DNA
cacaagtttcgtctcaaaaagttggggcccatgagaattcaaacagggcatatggtggttctaccatcaattacaccaca

SEQ ID NO: 157075 - DNA, 80 bp, synthetic construct
  source 1..80: mol_type = other DNA
agcagctggctaaaccaaggcagaatgagccctgaaatactaggcctatacacagaagttatatataatccatactgtga

SEQ ID NO: 157076 - DNA, 80 bp, synthetic construct
  source 1..80: mol_type = other DNA
ctccatatgctgcaacttccaggttttagacagtaactatgataacattttaactgtgttagaaaccacaaatgaggcca

SEQ ID NO: 157077 - DNA, 80 bp, synthetic construct
  source 1..80: mol_type = other DNA
tggatatgtacagagttccagtcaccactagtgcaaacctagatgaccccattttgtgtttatcactgtccccagcctcg

SEQ ID NO: 157078 - DNA, 80 bp, synthetic construct
  source 1..80: mol_type = other DNA
aaaagcgttttactggcgtcagggagatacagtccacctcaatggtagtgacaatccctgcaattattccagcttttggt

SEQ ID NO: 157079 - DNA, 80 bp, synthetic construct
  source 1..80: mol_type = other DNA
aatcaccacttctaaatcagtaactgaacttggtttacccagtatccatacaccaagtaaaaccaaattacaacctagta

SEQ ID NO: 157080 - DNA, 80 bp, synthetic construct
  source 1..80: mol_type = other DNA
ttctgtaaacgcgcattcaatcctaaagatattaaaaattatatagtcaccgatggcatgaaggtccgcaagctcctcga

SEQ ID NO: 157081 - DNA, 80 bp, synthetic construct
  source 1..80: mol_type = other DNA
tgtgtagttaccactgataatggcaaatttacaggattaggtatatatgataggtatatgattgtacctacacactctga

SEQ ID NO: 157082 - DNA, 80 bp, synthetic construct
  source 1..80: mol_type = other DNA
tgatcgcatactcccctcctggtgctggtatccctgctaaccgcaaggatgctatgttaggcacccacattgtctgggac

SEQ ID NO: 157083 - DNA, 80 bp, synthetic construct
  source 1..80: mol_type = other DNA
tcctgcatttaatcctgatggcactaaaaacactaaacagcagtcgtggcaagataactggagcaaaaaaaattcaccat

SEQ ID NO: 157084 - DNA, 80 bp, synthetic construct
  source 1..80: mol_type = other DNA
tcgctcagcacccagaggcactccttgttgaggaacttgcgaagctgttcccggctactgttcgcggcggatgccatgac

SEQ ID NO: 157085 - DNA, 80 bp, synthetic construct
  source 1..80: mol_type = other DNA
tagtgtttttggtactgatggattagaagctcttgatctaaacactagtgcaggattcccttatatcacaatgggtataa

SEQ ID NO: 157086 - DNA, 80 bp, synthetic construct
  source 1..80: mol_type = other DNA
taaaagatacccccttcatctcgcaggacaacttctaccaaggggaagtgcatgatgctgtggtcggggccatgacgcgt

SEQ ID NO: 157087 - DNA, 80 bp, synthetic construct
  source 1..80: mol_type = other DNA
caagtatagaggaaatgtggaaattgaaatgagtgaaaatatacagattgctgtagagcactattctgcccaattgttca

SEQ ID NO: 157088 - DNA, 80 bp, synthetic construct
  source 1..80: mol_type = other DNA
agcaactacggccactgcacatactacgtaaaccaaagcattttcaccaactacattaaagacagaagacaatcaaactt

SEQ ID NO: 157089 - DNA, 80 bp, synthetic construct
  source 1..80: mol_type = other DNA
acctagcaaaaccaaattacagcccagtgtgttttatgatgtcttccctggaagcaaagagccagctgtactttcagagc

SEQ ID NO: 157090 - DNA, 80 bp, synthetic construct
  source 1..80: mol_type = other DNA
aatcaggaattataacgcagaacccagtagaaagctatatagatggaattttaaatgaagtccttgtagttccaaacatt

SEQ ID NO: 157091 - DNA, 80 bp, synthetic construct
  source 1..80: mol_type = other DNA
tcacaacacggaagtaaccctactcacgtgtcttgtcacgtggcgtgacgtagcagccgccattttgaatcacaaaatgg

SEQ ID NO: 157092 - DNA, 80 bp, synthetic construct
  source 1..80: mol_type = other DNA
tgcgctcgacgtttcgcgaggacaaggctccgaaaccgagcaagcggtcaaaaaagaaaaagaaaccctcaaaacatcac

SEQ ID NO: 157093 - DNA, 80 bp, synthetic construct
  source 1..80: mol_type = other DNA
tccactctgttgataatggatgtcacatcttcatctgtattatcaccttcctgcaaagctcttatgcagtgtcttatgga

SEQ ID NO: 157094 - DNA, 80 bp, synthetic construct
  source 1..80: mol_type = other DNA
cgttcgcaccagaagcgtccactatgataccaattacggtgaccatagcaccaatgtttacagagttcaatggtttgaga

SEQ ID NO: 157095 - DNA, 80 bp, synthetic construct
  source 1..80: mol_type = other DNA
gtaatcagggttagggcctatgattggtatgaagttcaagaaaccatctactaccccaaacacatccaatacaacatgct

SEQ ID NO: 157096 - DNA, 80 bp, synthetic construct
  source 1..80: mol_type = other DNA
caacaatcttgaatccagaagcactagccagaagatttgggtttgatctagatatctgcttgcatagtacatatacaaag

SEQ ID NO: 157097 - DNA, 80 bp, synthetic construct
  source 1..80: mol_type = other DNA
ttctataattcaaaaactctcaaaagaatgcttgaaaaatcagataatgatgcagaatattcaacaggcccaaaagtacc

SEQ ID NO: 157098 - DNA, 80 bp, synthetic construct
  source 1..80: mol_type = other DNA
ggactgttctgggcgacactatgtgtatcagataatgtacataccaccaggcgcccccaaaccaaccaaatgggatgact

SEQ ID NO: 157099 - DNA, 80 bp, synthetic construct
  source 1..80: mol_type = other DNA
ggtctgagtctacagtggagaatttcctgtgtagatctgcgtgtgtatactacaccacttataagaaccacggtactgac

SEQ ID NO: 157100 - DNA, 80 bp, synthetic construct
  source 1..80: mol_type = other DNA
gagtggggccagacttcgccataaggcctttatcttcttgccatttgtccgtgtagagggtcgccataggcttcggaccc

SEQ ID NO: 157101 - DNA, 80 bp, synthetic construct
  source 1..80: mol_type = other DNA
gtggaccttggagaccagagccaaacacctccagtcctagcatgcctgaactaagtccagtcctcggtcttcatcaggga

SEQ ID NO: 157102 - DNA, 80 bp, synthetic construct
  source 1..80: mol_type = other DNA
atggaaccatagggatggtgacagcaggtggagagaaccatgttgcattcatagacttgagaaactacagctcacttagt

SEQ ID NO: 157103 - DNA, 80 bp, synthetic construct
  source 1..80: mol_type = other DNA
cgagcagataccatttaaccacccacataaatacattgtttaagggaacaaaggaaatgcaagactcaaaagaagcaggc

SEQ ID NO: 157104 - DNA, 80 bp, synthetic construct
  source 1..80: mol_type = other DNA
gctgtcccctaatatgtggcaaagccatacaattaatggataaacacaccagacaaaggttcactttagatgaaataact

SEQ ID NO: 157105 - DNA, 80 bp, synthetic construct
  source 1..80: mol_type = other DNA
atcgccgtactggctaacgtggtagagttggcctacagcgatcggcgtgaccacgtctggtcctacgtgggtcgtgtctg

SEQ ID NO: 157106 - DNA, 80 bp, synthetic construct
  source 1..80: mol_type = other DNA
ttcaggtatcagatctagagctatagtaccacagggcttaccaacattaactaccccggggtctggacaatttttgacca

SEQ ID NO: 157107 - DNA, 80 bp, synthetic construct
  source 1..80: mol_type = other DNA
aagatgtagcacttgctcaaaaggcagaggggcttataggtgtccttggctatagaaaatggttccctctggcaatagag

SEQ ID NO: 157108 - DNA, 80 bp, synthetic construct
  source 1..80: mol_type = other DNA
tggacagtttggcaccactctacgcaaaggaaaacaaattagtgagtgatatgcaaaagcaactcaaacagatgttctca

SEQ ID NO: 157109 - DNA, 80 bp, synthetic construct
  source 1..80: mol_type = other DNA
acaagctgctgatgcccatggtggattaatcttagccataccattggatatgactaataccatgttctccacaacactgc

SEQ ID NO: 157110 - DNA, 80 bp, synthetic construct
  source 1..80: mol_type = other DNA
tagttaaaattttagttagaattttgtgctacatggttctctactgtcataagcctaatatccttacaactgcttgctta

SEQ ID NO: 157111 - DNA, 80 bp, synthetic construct
  source 1..80: mol_type = other DNA
cttacagacttggtgcggtctgtatgtaactgttttctatggagtacccgcatggaagaatgcgacggtacccctctttt

SEQ ID NO: 157112 - DNA, 80 bp, synthetic construct
  source 1..80: mol_type = other DNA
atattttatggctatgtagattggataataaaatccacaggcgtcagcagcgcagtgactgacatgagagtagccatcat

SEQ ID NO: 157113 - DNA, 80 bp, synthetic construct
  source 1..80: mol_type = other DNA
ttacaatcctgatgaaaatgatgttaaaatctttattaagcatagagatagtccaaaggttgttacagcaggaccaagtg

SEQ ID NO: 157114 - DNA, 80 bp, synthetic construct
  source 1..80: mol_type = other DNA
ggaccaccactcctaaaggcactcccatacaaaatgacccagttaccggtacaacaacatggaactctaccagtacacaa

SEQ ID NO: 157115 - DNA, 80 bp, synthetic construct
  source 1..80: mol_type = other DNA
gacaattatgtttaccaattagattcagatgatatcttcaaaactgctcttactggtaaagccaaatttacaaagactaa

SEQ ID NO: 157116 - DNA, 80 bp, synthetic construct
  source 1..80: mol_type = other DNA
tatgccagtacgagaagcaaggcagtgtcgacttcaaagtccaaggtgtaaccgatgcacgcacatcactcaccacaacg

SEQ ID NO: 157117 - DNA, 80 bp, synthetic construct
  source 1..80: mol_type = other DNA
cccagaaactaaaaaaaaagaagtacttgaacaactatataaacaaaatgcctactgggcctctcacttaactccttact

SEQ ID NO: 157118 - DNA, 80 bp, synthetic construct
  source 1..80: mol_type = other DNA
agggaaaagaattagggatctcaaaaataaaatgttaaattacatacaattcaaatcaaaacaaagaactgaaccagttt

SEQ ID NO: 157119 - DNA, 80 bp, synthetic construct
  source 1..80: mol_type = other DNA
ttactatgcaaattggtctggcagtataaagctcacctttatgttttgtggttcagcgatgacaaccggaaagttaatcc

SEQ ID NO: 157120 - DNA, 80 bp, synthetic construct
  source 1..80: mol_type = other DNA
ggagatgatgatactcgcagtacacaagatccaactgtgaagaatacacaaaagagtgggccaacaaacactgagcaggt

SEQ ID NO: 157121 - DNA, 80 bp, synthetic construct
  source 1..80: mol_type = other DNA
gctcaccactaacgaacaacccttgtgtaaccttccaggtacttgacacaatatactattccgtaataggttacggttcc

SEQ ID NO: 157122 - DNA, 80 bp, synthetic construct
  source 1..80: mol_type = other DNA
ctgtaatacatagaaatgtagtcaagttaaatcaatttccaaatttgaatatgtttgtgaatgcctactcttattttaga

SEQ ID NO: 157123 - DNA, 80 bp, synthetic construct
  source 1..80: mol_type = other DNA
tgggaggtgattctctagacttaacgggaggaaacaggaggaggagtgggacaagagcacaaaagtggttcagtggacac

SEQ ID NO: 157124 - DNA, 80 bp, synthetic construct
  source 1..80: mol_type = other DNA
ttcagtgcagagatagctaacaaagtttcagaaatcacagccagtgtgcaaaatgtgatcactgataagttgctgaaaaa

SEQ ID NO: 157125 - DNA, 80 bp, synthetic construct
  source 1..80: mol_type = other DNA
gcagcagcaactcctcagaaaaggaatcagacacctcctcggggacgtcctccgactcagacggggagtccactgggacc

SEQ ID NO: 157126 - DNA, 80 bp, synthetic construct
  source 1..80: mol_type = other DNA
tatcctttttagtgcaaaaatgtggtacatttttctcttcagctgccactgaaatcctggacaatgaatttgaccaaatc

SEQ ID NO: 157127 - DNA, 80 bp, synthetic construct
  source 1..80: mol_type = other DNA
tgatggaatactgcatggaacaaggttggatgggaaaggcacactccacaatagagagagatttcaattatgtacattat

SEQ ID NO: 157128 - DNA, 80 bp, synthetic construct
  source 1..80: mol_type = other DNA
acacccagcacagctaaagaggcaccaataagtgacaattctccttgcatacgcacaaacaactgctcaggattagagga

SEQ ID NO: 157129 - DNA, 80 bp, synthetic construct
  source 1..80: mol_type = other DNA
caaaaacagatgtttcttcttctgtgatcacttctttgggtgcgattgtttcctgctatggaaaaacaaaatgtacagcc

SEQ ID NO: 157130 - DNA, 80 bp, synthetic construct
  source 1..80: mol_type = other DNA
taagattccaggcctcatcctgcgtcaacagatagtcaccctccgagggcaaccgcccatccgggacgtactccacggta

SEQ ID NO: 157131 - DNA, 80 bp, synthetic construct
  source 1..80: mol_type = other DNA
tctaacccacgagatctaccgcctcagacaagaattgacccgactcaaagaatactcattcgaaaaccagacagataccc

SEQ ID NO: 157132 - DNA, 80 bp, synthetic construct
  source 1..80: mol_type = other DNA
gacgaacacctactccacagaaacaggtggtccagatcaaactttgatctagacctcagcagatacctctacactataat

SEQ ID NO: 157133 - DNA, 80 bp, synthetic construct
  source 1..80: mol_type = other DNA
accactccctatgactagcactgttagaatgtacttcaagccgaagcatgttaaagcatgggtcccgcggcctcctaggc

SEQ ID NO: 157134 - DNA, 80 bp, synthetic construct
  source 1..80: mol_type = other DNA
tcagagatttgaccgatacaaacttggagattaccatagtcaaaatggaccgtaaccaaaagtttagagacatcagacac

SEQ ID NO: 157135 - DNA, 80 bp, synthetic construct
  source 1..80: mol_type = other DNA
gaatacaacaagtttgtggatggaattaggagtactgacattgggaaagcgttgctaataccatcttactctgttcttag

SEQ ID NO: 157136 - DNA, 80 bp, synthetic construct
  source 1..80: mol_type = other DNA
cggttggccgtgcgctactattgcctgagtattcaactctgcgccgtcgctggctagactcattttgattgaccatgccc

SEQ ID NO: 157137 - DNA, 80 bp, synthetic construct
  source 1..80: mol_type = other DNA
gactttgttggccatcttaatgctctggctcgtcggtacgggtttgttccgggtccgccaccgccgggtggtcctcggcc

SEQ ID NO: 157138 - DNA, 80 bp, synthetic construct
  source 1..80: mol_type = other DNA
atccacgtactcgctcacgatggccgtcagggcagcctcggctgatcgtcttttttccagaagcccggccagcccccgct

SEQ ID NO: 157139 - DNA, 80 bp, synthetic construct
  source 1..80: mol_type = other DNA
accagagtgatagaagcaagtagtttgaatgataccattcacatgagaatgctttttggaaatctattcaaaactttcca

SEQ ID NO: 157140 - DNA, 80 bp, synthetic construct
  source 1..80: mol_type = other DNA
ttcttgttttgtggcagtatgatggcaaccggtaagctgatactcacatactccccaccgggggcagccccaccaaagaa

SEQ ID NO: 157141 - DNA, 80 bp, synthetic construct
  source 1..80: mol_type = other DNA
tgtcagacacaactagcccttcatctagtagtggagtggataaatatggatattttaattggtcatcaaccacagcaccc

SEQ ID NO: 157142 - DNA, 80 bp, synthetic construct
  source 1..80: mol_type = other DNA
aatccatgtatgatgaaaacattagcatattaccagaccaaaagacacaaagagagaaactacttactagcatatcaaac

SEQ ID NO: 157143 - DNA, 80 bp, synthetic construct
  source 1..80: mol_type = other DNA
atgctacaaagtttcacagtggatgcctcatggttaccgttatacctgaacatcagatggcgtacattggagcaggtggg

SEQ ID NO: 157144 - DNA, 80 bp, synthetic construct
  source 1..80: mol_type = other DNA
acacattggaagcctaccgcgttgcggtggcatcaatgacgaattccgggcagcaggtgtttggattccagctacaacct

SEQ ID NO: 157145 - DNA, 80 bp, synthetic construct
  source 1..80: mol_type = other DNA
aattgcgagggggaccgtgggggcgagggatagagaaaaggacagtaaaacgtcgccgcgtcatgcggtttggaatacgt

SEQ ID NO: 157146 - DNA, 80 bp, synthetic construct
  source 1..80: mol_type = other DNA
ctctgcccgctctgcccgctcccgagtcccgcggcaacccaccgagaccatgccgtggtggcgatggcgccgagggtgga

SEQ ID NO: 157147 - DNA, 80 bp, synthetic construct
  source 1..80: mol_type = other DNA
actcaacgtgcgccttccagtccatacagcaacaccataggtcgtgcgagtcgtcggctacccgccgccaggccagttcc

SEQ ID NO: 157148 - DNA, 80 bp, synthetic construct
  source 1..80: mol_type = other DNA
cgacagctgtcgagactgctattacccgagtggcagacaccattgcaagcgggccagagaactcgactaggataccagca

SEQ ID NO: 157149 - DNA, 80 bp, synthetic construct
  source 1..80: mol_type = other DNA
acactcagtttacagttccaagttgtaccttcgtcctagaagacaaaccactatggtcaatgtgttttggatacagagac

SEQ ID NO: 157150 - DNA, 80 bp, synthetic construct
  source 1..80: mol_type = other DNA
ttgtgcacaaatggtactttcaaaaagacatatgtgacttaacactgttcaacttgaacgttattgcggctgacttgcgg

SEQ ID NO: 157151 - DNA, 80 bp, synthetic construct
  source 1..80: mol_type = other DNA
agatgtaggggatgcttacttctccatacccctacatgaagattttagacagtatactgcatttaccctaccatcaataa

SEQ ID NO: 157152 - DNA, 80 bp, synthetic construct
  source 1..80: mol_type = other DNA
attaacgatgtaggcgcacttcaatcaccagagttcaccactcacggtgcttttggtcagcaatcaggagcgatttacgt

SEQ ID NO: 157153 - DNA, 80 bp, synthetic construct
  source 1..80: mol_type = other DNA
acagagacagggtcttcccacacgaatgcctagtggggcacagcaatttatgacaacagaggatgaacaatcagcaaaca

SEQ ID NO: 157154 - DNA, 80 bp, synthetic construct
  source 1..80: mol_type = other DNA
agtttaaaaacaaaacccagaggcaaaagatacataaaagtaaaaataaagcctccaaaactaatgctaaacaagtggta

SEQ ID NO: 157155 - DNA, 80 bp, synthetic construct
  source 1..80: mol_type = other DNA
gtagggacagacataaaggttgtacccagaagaaaagcaaaagtaattaaagactatggaggaggaaaagaggtggatag

SEQ ID NO: 157156 - DNA, 80 bp, synthetic construct
  source 1..80: mol_type = other DNA
ggcccctaaattatttgaagacaagtggtacccacagagtgacctctgtgatgttcctcttctaaccgtccatgcaaccg

SEQ ID NO: 157157 - DNA, 80 bp, synthetic construct
  source 1..80: mol_type = other DNA
accaagcaaaactaaacttcagcctagtgtgttctttgatgtgtttccaggtactaaagaaccagctgttctttcaaata

SEQ ID NO: 157158 - DNA, 80 bp, synthetic construct
  source 1..80: mol_type = other DNA
taccatacagaggagaaggggtggatctaaagcaagggactattgcaccactgaccccagtaacaagcatcacaacatat

SEQ ID NO: 157159 - DNA, 80 bp, synthetic construct
  source 1..80: mol_type = other DNA
cattgaggacagtcagggattcaactgcacttggttatatcatgtgtcaacccatgctccaaggtacagaaagttcacac

SEQ ID NO: 157160 - DNA, 80 bp, synthetic construct
  source 1..80: mol_type = other DNA
ggcgactttgtttagggacagaccctgggccttggctatggtcatggccagctttgagctaatgccatagtcacggatgc

SEQ ID NO: 157161 - DNA, 80 bp, synthetic construct
  source 1..80: mol_type = other DNA
ggcccgatctacaccttccacacatgggactggcgacgggggctttttggtgcagatgctatccagagagtgtcacaaaa

SEQ ID NO: 157162 - DNA, 80 bp, synthetic construct
  source 1..80: mol_type = other DNA
ggggtgtgcagatgcaggtctccgggtgtgcaggcagtacgagatgtcacgttgtgttgtctttcctcccacccctgtcc

SEQ ID NO: 157163 - DNA, 80 bp, synthetic construct
  source 1..80: mol_type = other DNA
aactgtatttcatctgttccctttatagtaccaatggcacaccttgaggaaaaaggaaagttctacactagtaagttagt

SEQ ID NO: 157164 - DNA, 80 bp, synthetic construct
  source 1..80: mol_type = other DNA
attacagtggataacagtttggaatatgatgaccaccactttgataagtggcagataaccatacaagagatgtcacaaat

SEQ ID NO: 157165 - DNA, 80 bp, synthetic construct
  source 1..80: mol_type = other DNA
aacccacaaagccagggagtagtagaagcaatgaatcaccacctaaagaatcagataagtagaattagagaacaggctaa

SEQ ID NO: 157166 - DNA, 80 bp, synthetic construct
  source 1..80: mol_type = other DNA
aaatgactatacaaagtttgacccctttggaggtgggtttagtactttaatgtttaacctaagaatactatttgatgaat

SEQ ID NO: 157167 - DNA, 80 bp, synthetic construct
  source 1..80: mol_type = other DNA
ccaccaagactgtttacagaccactggtattttcaggcagacttctacaaacttcctcttttaactctaagtgcaactgc

SEQ ID NO: 157168 - DNA, 80 bp, synthetic construct
  source 1..80: mol_type = other DNA
cccatctgagatgtattccagttggaaggttactaccagacaagtcgcacagcttagaaggaagatggagatgttcacgt

SEQ ID NO: 157169 - DNA, 80 bp, synthetic construct
  source 1..80: mol_type = other DNA
gaaaagcagattgatggtttaccttatgcaacagttaaacaacaagaagattatcttaaagaaatggaagagatgttaga

SEQ ID NO: 157170 - DNA, 80 bp, synthetic construct
  source 1..80: mol_type = other DNA
cttgagagtaatgctgatattaaacaagctgtgtttgcaatgagagtagatattacctcacaacccttagctacaacatt

SEQ ID NO: 157171 - DNA, 80 bp, synthetic construct
  source 1..80: mol_type = other DNA
ctgggccgtgcttccgtaaaacgagagattacccttctcctggcccacctgcgcaaaaagacagcccccatccactgccg

SEQ ID NO: 157172 - DNA, 80 bp, synthetic construct
  source 1..80: mol_type = other DNA
cagtcacaaaaaaaacaacagacctagattcacaatgcaaatgcttactagaagacatacctatatgggccatggccaca

SEQ ID NO: 157173 - DNA, 80 bp, synthetic construct
  source 1..80: mol_type = other DNA
atctgccagaaaatgaggatgactacccagactgtagcttggccctgtcggctaaccaacctgaaactactataatcaat

SEQ ID NO: 157174 - DNA, 80 bp, synthetic construct
  source 1..80: mol_type = other DNA
gacacagcagagtcttatgcaaccaggtgtaagtagaagccaggacgctgaccatcaccgtcaaaagtgtggaggtaaaa

SEQ ID NO: 157175 - DNA, 80 bp, synthetic construct
  source 1..80: mol_type = other DNA
cagacagcattgctgcagggagacacggaagtggctgtcaataatgcagtggctagggtggctgacacgattgctagcgg

SEQ ID NO: 157176 - DNA, 80 bp, synthetic construct
  source 1..80: mol_type = other DNA
ttcagcactagatgccacatcagtagacaaacccactcatccagagacttctgcagatcgcttctacacattaaagagtg

SEQ ID NO: 157177 - DNA, 80 bp, synthetic construct
  source 1..80: mol_type = other DNA
cccgatgcccagttatgggtacgtagtcgttgttcagggccgtgcatggtagcagacaaggacaggtgccagatgtgcct

SEQ ID NO: 157178 - DNA, 80 bp, synthetic construct
  source 1..80: mol_type = other DNA
atcaacacaacaaaaacaaatattatcaccaccctgctcaccagcaacacaactggaaatccagaattaacatcacaaat

SEQ ID NO: 157179 - DNA, 80 bp, synthetic construct
  source 1..80: mol_type = other DNA
ctatcaatagacaaggtgtgaagagcctactgtgctcactttgattcctccggcccctgaatgtggctaatcctaacccc

SEQ ID NO: 157180 - DNA, 80 bp, synthetic construct
  source 1..80: mol_type = other DNA
aagggataattgcagattggcagaactatactagtgggccaggagtaagatacccaatgttctttgggtggctatggaag

SEQ ID NO: 157181 - DNA, 80 bp, synthetic construct
  source 1..80: mol_type = other DNA
ggtatcagactggaattgtcgtaccagctgggacgcccacgtcatgctcaattatgtgctttgtatcagcatgtaatgac

SEQ ID NO: 157182 - DNA, 80 bp, synthetic construct
  source 1..80: mol_type = other DNA
tagtttaggtttatgttaaggtaactaatactagaattaaaatagtatataataatgtagtatagatagccaattagcat

SEQ ID NO: 157183 - DNA, 80 bp, synthetic construct
  source 1..80: mol_type = other DNA
acatccaaaatgtgactttatattcagatacaacagaaaacccccctttaaggacactcaaataacaggccctagtctac

SEQ ID NO: 157184 - DNA, 80 bp, synthetic construct
  source 1..80: mol_type = other DNA
tggagacgttaagaaattggcagaaatagtggctgagtcgatgtcaaacacggatgacgatgaaatcaaagagcaaattt

SEQ ID NO: 157185 - DNA, 80 bp, synthetic construct
  source 1..80: mol_type = other DNA
acctaagagctagaaggagggttaaaagaagaaagaaaataaaactaacacagtggaatcccacagtggtaaaaaaatgc

SEQ ID NO: 157186 - DNA, 80 bp, synthetic construct
  source 1..80: mol_type = other DNA
ccgccccccggcccccccgtcattatacgtcagtaaccacgtgactctccgcagccaaccactgtgctacgtgattcatt

SEQ ID NO: 157187 - DNA, 80 bp, synthetic construct
  source 1..80: mol_type = other DNA
cggccgccattttgcgctgtccgccatcttgtgacttccttccgctttttcaaaaaaaaagaggaaggaagtcacaagat

SEQ ID NO: 157188 - DNA, 80 bp, synthetic construct
  source 1..80: mol_type = other DNA
acctgtacctggggtgccttgccctggagacgctggtcttctcgctcagcgtgttcctggccctgggcaacagcttttac

SEQ ID NO: 157189 - DNA, 80 bp, synthetic construct
  source 1..80: mol_type = other DNA
aacgcctgtatagtctgtgtacagtgcccttatacgtctccccccatgtatgacaagaaaaacccaaataaggggtacgt

SEQ ID NO: 157190 - DNA, 80 bp, synthetic construct
  source 1..80: mol_type = other DNA
tgtgttgttacaacagaaaatggtaaattcacaggtcttggtatacatgataggatcatgattgtaccaacacatgccga

SEQ ID NO: 157191 - DNA, 80 bp, synthetic construct
  source 1..80: mol_type = other DNA
aaagtaccttcttagaactgcctttgctgtaccctgtaagttttgggttgttgcattttcatgttcatttatctctacat

SEQ ID NO: 157192 - DNA, 80 bp, synthetic construct
  source 1..80: mol_type = other DNA
ggagcaatggaagcgcagaggcagggcctccctacacgaatgcctagtggagcacaacaattcatgacaacagaggatga

SEQ ID NO: 157193 - DNA, 80 bp, synthetic construct
  source 1..80: mol_type = other DNA
gaggcagttataaatgacatagtaatatcaggcccattcacaccaaaagacacaaaaccagtaatgcaattaaacatgaa

SEQ ID NO: 157194 - DNA, 80 bp, synthetic construct
  source 1..80: mol_type = other DNA
acagccgcatgttgcagactgagaaagagagctttattatgagacatcatacacatagtataggcgaggtaatggggcgg

SEQ ID NO: 157195 - DNA, 80 bp, synthetic construct
  source 1..80: mol_type = other DNA
tagatgcatataaaaatatagatttagataaacttaagattttagcatatggagatgatgttatattctcttacaacttc

SEQ ID NO: 157196 - DNA, 80 bp, synthetic construct
  source 1..80: mol_type = other DNA
agtactttgcagcagttcagggtgagataacatcaaggaaaactgttaaggatgttggcatagcaccaatcaatacaccc

SEQ ID NO: 157197 - DNA, 80 bp, synthetic construct
  source 1..80: mol_type = other DNA
tactacacacaaataaaatccaaatgggaagaacttaataaaaaggcttatgaattagtaaaagaagaatacaaccaagt

SEQ ID NO: 157198 - DNA, 80 bp, synthetic construct
  source 1..80: mol_type = other DNA
atgccaagtggacccagtaactcagagagcattccagcactcaccgcagctgagacaggtcacacatcgcaagtggttcc

SEQ ID NO: 157199 - DNA, 80 bp, synthetic construct
  source 1..80: mol_type = other DNA
cccctaagggggggactaaggtcccactacaaaaactctgtgttctgctgcaaattttagataagatggcatagagacaa

SEQ ID NO: 157200 - DNA, 80 bp, synthetic construct
  source 1..80: mol_type = other DNA
ctcctactggcttgctggatgtggctaaagcattgcaaccttgcacgaaatgtcccaaacccatgcattacaaacagtgc

SEQ ID NO: 157201 - DNA, 80 bp, synthetic construct
  source 1..80: mol_type = other DNA
tggatgtggagataggacatgtaataccatatggccagcttaaccttagtggtaatcctacatgtagactgatgaaatat

SEQ ID NO: 157202 - DNA, 80 bp, synthetic construct
  source 1..80: mol_type = other DNA
gaatatgtaaaaaagttaaaattagacctccaactctatttaatgataagtggtactttcaaaaggacttctgcaaagtg

SEQ ID NO: 157203 - DNA, 80 bp, synthetic construct
  source 1..80: mol_type = other DNA
gacgctattaagcgagtgtcagaaaaaccgacagatcctgactactttacaacaccttacaaaaaaccaagatttttccc

SEQ ID NO: 157204 - DNA, 80 bp, synthetic construct
  source 1..80: mol_type = other DNA
atcaaaaggtgaagcaccctgcacttttacaaaagttaaatcttcggagcaaaacggggtgcaaaccatagtgtgtaacg

SEQ ID NO: 157205 - DNA, 80 bp, synthetic construct
  source 1..80: mol_type = other DNA
atctgggggggcattggcacggggggccaaaactacgcggtccgatcagatgactttttagtagacaagggcttcggggg

SEQ ID NO: 157206 - DNA, 80 bp, synthetic construct
  source 1..80: mol_type = other DNA
aaaccactagagacacaaacaaattacagttaatgctggacatgtatggacttgacctcccgtatgtcacctacctgaaa

SEQ ID NO: 157207 - DNA, 80 bp, synthetic construct
  source 1..80: mol_type = other DNA
atgaggacggtcgaggaacccagggtagttgtaattgggggcgacattcgtactgtccagaagacaattgcacgggtttc

SEQ ID NO: 157208 - DNA, 80 bp, synthetic construct
  source 1..80: mol_type = other DNA
tttaacgcagctaaacaggctagaaaagcatacacaatagctgcccgtaaaataattacaccttggatttttggtactgt

SEQ ID NO: 157209 - DNA, 80 bp, synthetic construct
  source 1..80: mol_type = other DNA
ctaggcacaacaataatattttttaaacaccccacagtagattttgtagccagaataagaactatgcccccttttgatga

SEQ ID NO: 157210 - DNA, 80 bp, synthetic construct
  source 1..80: mol_type = other DNA
attacataccatccaatggtgaggccacaactcagattaaaaccagacctgatgtttttaccgttacaaacgtcggacca

SEQ ID NO: 157211 - DNA, 80 bp, synthetic construct
  source 1..80: mol_type = other DNA
cctgactgtgaaattccggtagcagggagtgctgcttccaaccacgccgactctgacgcctgtggtccgttcacctgctg

SEQ ID NO: 157212 - DNA, 80 bp, synthetic construct
  source 1..80: mol_type = other DNA
aggcatttagatacgaaactagttgtatatgctcagacgtattagacgaattacacggagtgcaatctttgtttagttgg

SEQ ID NO: 157213 - DNA, 80 bp, synthetic construct
  source 1..80: mol_type = other DNA
gcaactccactagtatacctgcccttaccgcagtcgaaaccgggcacacattgcaggtggagccgagcgatacaatgcaa

SEQ ID NO: 157214 - DNA, 80 bp, synthetic construct
  source 1..80: mol_type = other DNA
agcgctgttgctgatgcaacacaacaagtgcccataacagtgaccatagccccgatgtgttgtgagttcaatggtctcag

SEQ ID NO: 157215 - DNA, 80 bp, synthetic construct
  source 1..80: mol_type = other DNA
catacatagcaaagaaagatgttagcgctgagaaagctaggatctactttgagagacttaggacaaaccttgatgcttta

SEQ ID NO: 157216 - DNA, 80 bp, synthetic construct
  source 1..80: mol_type = other DNA
taccatgacaagccccttctcctaccacgacgagctagtaagcacacaactgactgccaagtacacctttgactttatgt

SEQ ID NO: 157217 - DNA, 80 bp, synthetic construct
  source 1..80: mol_type = other DNA
cttttagaaatcatacaggttgacactctaatccccatgaacaacacaggtgctagagacactatggatgagtaccggat

SEQ ID NO: 157218 - DNA, 80 bp, synthetic construct
  source 1..80: mol_type = other DNA
tccacacagcccgggcctgatggtgctgaactgcaatatccttatgtgctagactgtggagtccccataagccagctcct

SEQ ID NO: 157219 - DNA, 80 bp, synthetic construct
  source 1..80: mol_type = other DNA
aacagaagcaagacatcaatgacttaattgaaaaaataattaaaaatgccaaaaatgtactaacaaaagtaaatcaagaa

SEQ ID NO: 157220 - DNA, 80 bp, synthetic construct
  source 1..80: mol_type = other DNA
atccggtaatgcccctcaaactctaccagttaccatttccattgcaccagataaatcagaattctctggagctagacaat

SEQ ID NO: 157221 - DNA, 80 bp, synthetic construct
  source 1..80: mol_type = other DNA
actaccaccagagacaagataacactagataagattacgcatgtcctgtccgctcgaacgacgggagctttcggccacca

SEQ ID NO: 157222 - DNA, 80 bp, synthetic construct
  source 1..80: mol_type = other DNA
aagcctgacgagagcgttcatcggggcatgaagtacgcattacacaaactccatatatttgttacgatagaatacggaac

SEQ ID NO: 157223 - DNA, 80 bp, synthetic construct
  source 1..80: mol_type = other DNA
cagatgtgactaccatacgcacatccatcacggaggttcccagcctcagaccatcagtgcgaaacaccggggctttcggc

SEQ ID NO: 157224 - DNA, 80 bp, synthetic construct
  source 1..80: mol_type = other DNA
aatccggtagaagagtatattgaggacaccctgaaggaagtcttggttgtaccaaacacccaaccctcaggtcaggtgca

SEQ ID NO: 157225 - DNA, 80 bp, synthetic construct
  source 1..80: mol_type = other DNA
aaagtgcagatacgtgctcagagacatgcccatgtgggccatgtgccaaggatacgcagactacatagactcccagctag

SEQ ID NO: 157226 - DNA, 80 bp, synthetic construct
  source 1..80: mol_type = other DNA
cttctgagaataagcgtattaatgatcttcttaaaagaagtgagatggtactactaacagctaaaagaacagaacccgtg

SEQ ID NO: 157227 - DNA, 80 bp, synthetic construct
  source 1..80: mol_type = other DNA
caataagtttgtcgatggcatcagaagcacagacatcggcagagtattgctaataccctcttattctgtccttagacgta

SEQ ID NO: 157228 - DNA, 80 bp, synthetic construct
  source 1..80: mol_type = other DNA
tcaagtaacaccaacgacgtacagcaggcagtgttcaatgctggcatgggtgtggcagtgggaaacctaaccattttccc

SEQ ID NO: 157229 - DNA, 80 bp, synthetic construct
  source 1..80: mol_type = other DNA
tctatcagaggaaagttgaacatggccactgcaacacagctctgcaaggaatgtccaccaccagctaatttcaagaagtg

SEQ ID NO: 157230 - DNA, 80 bp, synthetic construct
  source 1..80: mol_type = other DNA
gtactttccaggctcggatttaagcactccaatttaatccagacaatatgtaacacacaccacatattcagagatcagat

SEQ ID NO: 157231 - DNA, 80 bp, synthetic construct
  source 1..80: mol_type = other DNA
tgtaatggccaccaatactgaaacgaaaacatcgtacgtttcatatgtgaatgcaaaccccggggaaagtggtggcacat

SEQ ID NO: 157232 - DNA, 80 bp, synthetic construct
  source 1..80: mol_type = other DNA
gttatggagccgcattgctccgtaaatacttctgtgaacagcagggtgctataaccaacattgttgatgtgagagaatta

SEQ ID NO: 157233 - DNA, 80 bp, synthetic construct
  source 1..80: mol_type = other DNA
aatcacagcaacaactggtacagccccctccataccagtgactgtgactattgctccaatgtttttagagttgtctggca

SEQ ID NO: 157234 - DNA, 80 bp, synthetic construct
  source 1..80: mol_type = other DNA
ccccggagccttgcgtgccaaaccagaggcattcaggtcgtaaaggagcaattattgggatgggaccagactactttggg

SEQ ID NO: 157235 - DNA, 80 bp, synthetic construct
  source 1..80: mol_type = other DNA
cctcaagcgttgacagggcattttctaatccgcgggtagccgtggaggcgtgcaatgttatgctgaaggaaaattttcca

SEQ ID NO: 157236 - DNA, 80 bp, synthetic construct
  source 1..80: mol_type = other DNA
acacgtgcttggattccacgccctcccagagctacagaatacacacacaaaaccagtacaaactacattagaaagctgac

SEQ ID NO: 157237 - DNA, 80 bp, synthetic construct
  source 1..80: mol_type = other DNA
aattagattataccaattacaatcaagaaaataataatttcaaaacttggcaaataaacttgaaagaaatggcacagatt

SEQ ID NO: 157238 - DNA, 80 bp, synthetic construct
  source 1..80: mol_type = other DNA
tccactattaaaaccccagtgaatgcaactacaatcaaagaattcttcaaccatgccgttgatggtgatgatcaaggttt

SEQ ID NO: 157239 - DNA, 80 bp, synthetic construct
  source 1..80: mol_type = other DNA
ccgtggctcagagaaggggccctaagccccacagtaggcttctttgccctaaaaccagacttctatcccaataacagcat

SEQ ID NO: 157240 - DNA, 80 bp, synthetic construct
  source 1..80: mol_type = other DNA
tacttttacagacaccaagatgtagactttatagtgtactttaacagaaaaagccctatgggaggcagcatatacacagc

SEQ ID NO: 157241 - DNA, 80 bp, synthetic construct
  source 1..80: mol_type = other DNA
gtcgtctgtggagaatttcctcagtagatctgcttgtgtctacattgtagagtacaaaacaagagatgataccccggaca

SEQ ID NO: 157242 - DNA, 80 bp, synthetic construct
  source 1..80: mol_type = other DNA
tgggttagtgtgcttcatatgcccctacacatttcccccatgctataacaaaaccaaacctgagcaaggatatgtatttt

SEQ ID NO: 157243 - DNA, 80 bp, synthetic construct
  source 1..80: mol_type = other DNA
tctgaaggcggcaaagacggtcgtccagggcaggtgccagaggttgggactgagcacgatcagcgtgattttaaacatgg

SEQ ID NO: 157244 - DNA, 80 bp, synthetic construct
  source 1..80: mol_type = other DNA
cctggtatgattactaatgtgttgcacatggctagggtggattcatttatgcctatacacaatatatcaacaaatattgg

SEQ ID NO: 157245 - DNA, 80 bp, synthetic construct
  source 1..80: mol_type = other DNA
gggattgtcaaaaggcgaaatccccattgaatttgagaggacaagcactactgcagaggtaggggtggtgcaaaaagcag

SEQ ID NO: 157246 - DNA, 80 bp, synthetic construct
  source 1..80: mol_type = other DNA
ggcgggaccgggctgagggagtttccacggtacttgtctgcggccggcgctttgcgcgcgcagccggtgcgtgtcgtttc

SEQ ID NO: 157247 - DNA, 80 bp, synthetic construct
  source 1..80: mol_type = other DNA
ggcaattcgggctggagactggccgggcatcgggcaaggctcttagggtcttcattcttaatatgtttttcggcagggcc

SEQ ID NO: 157248 - DNA, 80 bp, synthetic construct
  source 1..80: mol_type = other DNA
gataaccgaggtggcgcaaaatgctttagctctctcactccccaagccacaaaacagtctccccgacacaaaggccagtg

SEQ ID NO: 157249 - DNA, 80 bp, synthetic construct
  source 1..80: mol_type = other DNA
ctttactagcacccccaacaatcacctctcttcctgccatgaatagacgatttttccttgatttggacataatagttcat

SEQ ID NO: 157250 - DNA, 80 bp, synthetic construct
  source 1..80: mol_type = other DNA
caagtgaagccaagagaataaaggtattgtacaataagtgtaacaacataattaaacagaaaagaaggagtgaaccagtt

SEQ ID NO: 157251 - DNA, 80 bp, synthetic construct
  source 1..80: mol_type = other DNA
tgctaaaaagactactaatggttctggttctacagctgcaacactaggagacgcagtaactgaacttaaaaacccaaatg

SEQ ID NO: 157252 - DNA, 80 bp, synthetic construct
  source 1..80: mol_type = other DNA
cccagcaggccttctgcctcgcgggtcccatgtttgtgggattaggtttccccctctgtctcggcaggcgtgggctcaag

SEQ ID NO: 157253 - DNA, 80 bp, synthetic construct
  source 1..80: mol_type = other DNA
gtagaacgatatgtagatgaagttctaaatgaggtcttagtagtccctaacatcaatgaaagtcatcctacaacatccaa

SEQ ID NO: 157254 - DNA, 80 bp, synthetic construct
  source 1..80: mol_type = other DNA
gcacaccacaaaacccagtgcactgagtgccatggaaataggtgcttcaagcacggctacaccagaatcaacaatggaaa

SEQ ID NO: 157255 - DNA, 80 bp, synthetic construct
  source 1..80: mol_type = other DNA
atggtgcatggtatacgggtacgcagactactgcagaaaggccacaggagactcagccatactactagactgcagagtag

SEQ ID NO: 157256 - DNA, 80 bp, synthetic construct
  source 1..80: mol_type = other DNA
acctgtacgtaatgtatgccatggccattcgacaggccattagagatcgtcggaggaatccagcttctcgtagaagtcag

SEQ ID NO: 157257 - DNA, 80 bp, synthetic construct
  source 1..80: mol_type = other DNA
aagaccacccactctttttacagacaagtggtattttcaaaaagacttatgccagctgccactgctaaccgtcagtgcct

SEQ ID NO: 157258 - DNA, 80 bp, synthetic construct
  source 1..80: mol_type = other DNA
gactcagaccccctactgggccacagccagatggcactgcatatgaaagtgattttctatcaaagtggaaatcagcatgg

SEQ ID NO: 157259 - DNA, 80 bp, synthetic construct
  source 1..80: mol_type = other DNA
caggcacgcacgaggcatcccttcgtgcatctggcaactccgtgatacactacaccaatatcaattactacaaggatgct

SEQ ID NO: 157260 - DNA, 80 bp, synthetic construct
  source 1..80: mol_type = other DNA
tctgatttcaaggacgcaacatggcaggatggaggattgttaaaatcgattgatgccgagttagatgaacaaggatatat

SEQ ID NO: 157261 - DNA, 80 bp, synthetic construct
  source 1..80: mol_type = other DNA
gggctagttggttggatacaactactcacctcaacagaaaataaccatggttttaagagctgggatgtagatgtgatggg

SEQ ID NO: 157262 - DNA, 80 bp, synthetic construct
  source 1..80: mol_type = other DNA
actcaccagacattggcttctgtgaagagtgattcaaaacacactcagaaagtacctgcactcacagcaaatgagactgg

SEQ ID NO: 157263 - DNA, 80 bp, synthetic construct
  source 1..80: mol_type = other DNA
acacaatgattccaataaataatgttacagaattagatactatagataaatacagagtgccattaattcaaggccaacag

SEQ ID NO: 157264 - DNA, 80 bp, synthetic construct
  source 1..80: mol_type = other DNA
gtgtcgactgacgtcactacggcgatcagtatcgacgtcgtgtatacataacggtgcccggtgtttttattcggggcgtt

SEQ ID NO: 157265 - DNA, 80 bp, synthetic construct
  source 1..80: mol_type = other DNA
gtatgaccacttatggatttggacaccaaagtaaagctgtctacgttgctgggtacaaaatctgcaattatcaccttgca

SEQ ID NO: 157266 - DNA, 80 bp, synthetic construct
  source 1..80: mol_type = other DNA
ggcggggactcgcgggaccgggctgagacacgatagtggggacgggggcgcttttgctctggggggactggctgagggac

SEQ ID NO: 157267 - DNA, 80 bp, synthetic construct
  source 1..80: mol_type = other DNA
gtgttagtgctatgtaatgtgttgccgccaggtggcagcttgtttgtagatgtgcagcgccccttaatggtaggtctgct

SEQ ID NO: 157268 - DNA, 80 bp, synthetic construct
  source 1..80: mol_type = other DNA
ggggaggctttggagggggccacagcaccatgaggttctcactaaaggtgttctatgaggagcacttaaggagacttaac

SEQ ID NO: 157269 - DNA, 80 bp, synthetic construct
  source 1..80: mol_type = other DNA
aaagctttatttatgcattgcaaaaagggatgtcaatgcttgggggaaggccatggaccaggaggatggagatcagggcc

SEQ ID NO: 157270 - DNA, 80 bp, synthetic construct
  source 1..80: mol_type = other DNA
gaagcgaagcagctccgccctcacgggccatctccgtgagttgttaaccaccctggagactctttacggttcattctcag

SEQ ID NO: 157271 - DNA, 80 bp, synthetic construct
  source 1..80: mol_type = other DNA
ttgttacccaaatgcagaaggaacttaaacaactccagtgttataaaaggactcacagagtagaaccagtctgtatatta

SEQ ID NO: 157272 - DNA, 80 bp, synthetic construct
  source 1..80: mol_type = other DNA
ccctcaggtttacattcctgttctgtggtagcatgatggcaacaggaaagttgatactcacatactcccctccaggagca

SEQ ID NO: 157273 - DNA, 80 bp, synthetic construct
  source 1..80: mol_type = other DNA
ttgtacctcttgacttcagcgcaggtgcatccacgtatgtgcctataacggtgacagttgcccccatgtgcgctgagtac

SEQ ID NO: 157274 - DNA, 80 bp, synthetic construct
  source 1..80: mol_type = other DNA
taaaattctctacacccctccttactcattgttatacaggcaatggatagatcaattcatataaacaaataatataatac

SEQ ID NO: 157275 - DNA, 80 bp, synthetic construct
  source 1..80: mol_type = other DNA
actggccgggctatgggcaaggctcttagggtattcattcttaaaatgtttctcggcagagtataccgccaaaagaaaag

SEQ ID NO: 157276 - DNA, 80 bp, synthetic construct
  source 1..80: mol_type = other DNA
ttaagaaacaatattttgttcaaaagcaaggacaaataatcagtaaaaagtgtgtaagtgaattaggtatcaaaccaata

SEQ ID NO: 157277 - DNA, 80 bp, synthetic construct
  source 1..80: mol_type = other DNA
ctgagagtaggactgactatgcatggcaatctggaacaaacgcgtctgttttctggcagcatggacaaacatatccaaga

SEQ ID NO: 157278 - DNA, 80 bp, synthetic construct
  source 1..80: mol_type = other DNA
cagccactaggaagcaggcaatgcttgggacacacattatttgggatataggactgcagtctagctgtgtattgtgtatc

SEQ ID NO: 157279 - DNA, 80 bp, synthetic construct
  source 1..80: mol_type = other DNA
cctgcgtaacttagaagctatgcacaagaccaataggtggtaacaatccatgttactaaaggtcaagtacttctgtttcc

SEQ ID NO: 157280 - DNA, 80 bp, synthetic construct
  source 1..80: mol_type = other DNA
tagtataagtgagggtgagactgcaaagaagtttagtgcaactgcatccaatggaactcacacggttcaaagcatagtaa

SEQ ID NO: 157281 - DNA, 80 bp, synthetic construct
  source 1..80: mol_type = other DNA
taccagagatcacatagggtggaacccgtatgtgtactcatacatgggagtccaggttccggtaaatctttaaccacaac

SEQ ID NO: 157282 - DNA, 80 bp, synthetic construct
  source 1..80: mol_type = other DNA
ggcctacagagacatatcctacaatcccctcaatgacaaaggagtaggtaacagactctggtaccaatccattacaaaag

SEQ ID NO: 157283 - DNA, 80 bp, synthetic construct
  source 1..80: mol_type = other DNA
gtacggtggtttcgctgggacggcaacgatagccatctcatttgcttttacaaacgtggagagggtctttctacgcccta

SEQ ID NO: 157284 - DNA, 80 bp, synthetic construct
  source 1..80: mol_type = other DNA
gcccactatgaaacaaatttatacaatgaaaaatattactatgatacattccagactatagcacaactaaaacccacagg

SEQ ID NO: 157285 - DNA, 80 bp, synthetic construct
  source 1..80: mol_type = other DNA
tactagaagtggaaaattttaatgcgacagaagcgacggacaaaaagaaacaatttactgtgtggcccatcacatacaca

SEQ ID NO: 157286 - DNA, 80 bp, synthetic construct
  source 1..80: mol_type = other DNA
ccatcccataataagctcaagcctcccagcttacgaccagttgtggtgcaaggtcctaacactgaatttgcattgtccct

SEQ ID NO: 157287 - DNA, 80 bp, synthetic construct
  source 1..80: mol_type = other DNA
gaccccgatagacaccctcgcatgttacaagtctctgacccgacaaagctcggaccgaagacagtttttcacaaatggga

SEQ ID NO: 157288 - DNA, 80 bp, synthetic construct
  source 1..80: mol_type = other DNA
ccagagtactcatggtatgtccctacacttacccaaaactataccatgaaatacagccattatatggctttgtagtatac

SEQ ID NO: 157289 - DNA, 80 bp, synthetic construct
  source 1..80: mol_type = other DNA
gcactcacagaaggtgagcgcgcaaaggagttcacgtcagggaacgctaccaaagaaaatgggaaggtgcaaacggcagt

SEQ ID NO: 157290 - DNA, 80 bp, synthetic construct
  source 1..80: mol_type = other DNA
aatgctctcaacacatttagaacagaagggtgcatgtctcatccgaaaatatacaagtttaaaccagacaacccagagtc

SEQ ID NO: 157291 - DNA, 80 bp, synthetic construct
  source 1..80: mol_type = other DNA
agagacacccctttctacccctacgttaagcaccagtacaatgtctactttggcctaaactatcaataaagctcagctca

SEQ ID NO: 157292 - DNA, 80 bp, synthetic construct
  source 1..80: mol_type = other DNA
ttcactccggaccgaaaaactattcggcttggtgtgagaaaatcaaggccaagattcgagagaacggctgtgacgccacc

SEQ ID NO: 157293 - DNA, 80 bp, synthetic construct
  source 1..80: mol_type = other DNA
attggtggatacatacactgttgaaaatcaaagatatggtgctcagtgtcttcaagccaagcatggagagcaaagccata

SEQ ID NO: 157294 - DNA, 80 bp, synthetic construct
  source 1..80: mol_type = other DNA
tgtttgcccttgactacaaaaacttcgatgcaactgtccctgaaatttgctttgatttggttgcaaaagaactctcacag

SEQ ID NO: 157295 - DNA, 80 bp, synthetic construct
  source 1..80: mol_type = other DNA
ccagcccacaacaaactcaaagcccctacattaagaccaattgtagtacaaggtcccaatactgagtttgctttgtcttt

SEQ ID NO: 157296 - DNA, 80 bp, synthetic construct
  source 1..80: mol_type = other DNA
agtaactacaactggtacccccttaaccctaccaacaatggacctgcaacatcaggcactaataacatagacaaaataaa

SEQ ID NO: 157297 - DNA, 80 bp, synthetic construct
  source 1..80: mol_type = other DNA
cctttataatactacctgcgtcatttggtgcttgcacgcagaagagaaagtgaaacatactgaggaagcaaaacaactag

SEQ ID NO: 157298 - DNA, 80 bp, synthetic construct
  source 1..80: mol_type = other DNA
tgaaggtggcatgccatctggatgtgcaggcacaagtatttttaatactatgatcaataatattataataagggttctgg

SEQ ID NO: 157299 - DNA, 80 bp, synthetic construct
  source 1..80: mol_type = other DNA
gtgagccatggcctggcgatggtggtggcagagaagatggcgccgccgcccgtggccccgcagacggtggagacgcctac

SEQ ID NO: 157300 - DNA, 80 bp, synthetic construct
  source 1..80: mol_type = other DNA
cttacccctccacaaccactcatgatgccaccaaggcctacccctcctacccctctgccacctgcaacactaacggtgcc

SEQ ID NO: 157301 - DNA, 80 bp, synthetic construct
  source 1..80: mol_type = other DNA
aaccggttctacaccttagaaagtaagcgttgggagaatgactctaaaggatggtggtggaaattgccagatgcattgaa

SEQ ID NO: 157302 - DNA, 80 bp, synthetic construct
  source 1..80: mol_type = other DNA
gattgggatgcttcttcgagtggatggtggtggaagcttccagacgctctaaaagacatgggaatttttggccaaaactt

SEQ ID NO: 157303 - DNA, 80 bp, synthetic construct
  source 1..80: mol_type = other DNA
tagccacttacaaagcaaaaggtgatgctggggatactaaccgctacgacagttgggacataaatattaaggagctagtg

SEQ ID NO: 157304 - DNA, 80 bp, synthetic construct
  source 1..80: mol_type = other DNA
ccttcagctacaggtttggagaaggtaaaatgccagacggctcactgtacgttcctatacaatttagaatgaaatggtac

SEQ ID NO: 157305 - DNA, 80 bp, synthetic construct
  source 1..80: mol_type = other DNA
agagtgctactagtccaggccaagcacttcacaaacaaatatcagaatacataccatactacaacaccacagaaacaata

SEQ ID NO: 157306 - DNA, 80 bp, synthetic construct
  source 1..80: mol_type = other DNA
tacaaccaggggctgactcagtatttaagagaaccttactgggggaagttctgaattactacgccaactggtcgggtagc

SEQ ID NO: 157307 - DNA, 80 bp, synthetic construct
  source 1..80: mol_type = other DNA
tggatttactccaatcaattccttcacttatcagctcatcactataactctgttgattagaagcatataccacaatgggt

SEQ ID NO: 157308 - DNA, 80 bp, synthetic construct
  source 1..80: mol_type = other DNA
aaaacaacggccagagacaagacgcggaaaagaggaaagaacagacacacgggcgcagggggggggggagtcgcaggccc

SEQ ID NO: 157309 - DNA, 80 bp, synthetic construct
  source 1..80: mol_type = other DNA
cgtgctcatctgtggcaacaatactgtttgcagaaactatgccacacactcagatgactcttacctgccgggaccctttg

SEQ ID NO: 157310 - DNA, 80 bp, synthetic construct
  source 1..80: mol_type = other DNA
ctgtgaacttcgagccaacagacatcactgagtcacgcactgacatcaaccatgttccagacaccgtgaagccagatctc

SEQ ID NO: 157311 - DNA, 80 bp, synthetic construct
  source 1..80: mol_type = other DNA
taggagagccaacattgggaactgcatggaagcactatttcagggaccactacaatacaaggatcttaaaattgacatca

SEQ ID NO: 157312 - DNA, 80 bp, synthetic construct
  source 1..80: mol_type = other DNA
atcactaaagcaagaaaagcatactggactgcgttaaaccaacctaatgacctggctgttaacatagcacaggcaaaggc

SEQ ID NO: 157313 - DNA, 80 bp, synthetic construct
  source 1..80: mol_type = other DNA
cacacctggaagtgaccaattcctcacttcagacgattaccaatctccttgcgcaatgcctgaatacgatgtgacacccg

SEQ ID NO: 157314 - DNA, 80 bp, synthetic construct
  source 1..80: mol_type = other DNA
caggttttgccctactaagatgcaatgataccaattattcaggctttgagcccaattgttctaaagtagtggctactaca

SEQ ID NO: 157315 - DNA, 80 bp, synthetic construct
  source 1..80: mol_type = other DNA
cgatctctatattattgggccccttcacctatctggtggcagagctttcaccggtggaactcgtgacagatgtctacgcc

SEQ ID NO: 157316 - DNA, 80 bp, synthetic construct
  source 1..80: mol_type = other DNA
tttacggtgctgcttccctgaatgactttggcatcttggctgtgagggtggttaacgaccataatccaaccaaggtcact

SEQ ID NO: 157317 - DNA, 80 bp, synthetic construct
  source 1..80: mol_type = other DNA
gttaaaattcaaacaagaattcccctctaccacacagctacacggggccttctctcacaaaacaggcatctactcctcca

SEQ ID NO: 157318 - DNA, 80 bp, synthetic construct
  source 1..80: mol_type = other DNA
cgctgcaactgtcacaacccacacgaccggcgctcccaccatcggaacagagcgtacccaacaccgtacaaagcacacca

SEQ ID NO: 157319 - DNA, 80 bp, synthetic construct
  source 1..80: mol_type = other DNA
gctgaagggcctcggtggcgaagcaccggcgtgcgaggagcagcatgcaggctcgggcgcgggccgtactttggttgtgg

SEQ ID NO: 157320 - DNA, 80 bp, synthetic construct
  source 1..80: mol_type = other DNA
atgccatcgctggcaaaaacgcagatagcaacaaaaatcaagcatacaaaacccaccttaacaacgtatgggacacaata

SEQ ID NO: 157321 - DNA, 80 bp, synthetic construct
  source 1..80: mol_type = other DNA
aactttgctcaaacaaaaatgccagacggaggagggtacattccagaatattacagatttaggtggtatccaagcgcata

SEQ ID NO: 157322 - DNA, 80 bp, synthetic construct
  source 1..80: mol_type = other DNA
tggagaaccccagcaatggaaggacagaaagagtcatacaagcagcaaaatatggatgatgtagattctgatgataatga

SEQ ID NO: 157323 - DNA, 80 bp, synthetic construct
  source 1..80: mol_type = other DNA
gcaacccacaggctgttttatacaccctccccgaatgtaacttagaagctttgccaagatggtcaatagaaggtccagca

SEQ ID NO: 157324 - DNA, 80 bp, synthetic construct
  source 1..80: mol_type = other DNA
ctggtgctagtagggacgtttgtgctgctggtcatatttgtagcgtcgctgaagtccatgtgaagcagcaacccgaacgc

SEQ ID NO: 157325 - DNA, 80 bp, synthetic construct
  source 1..80: mol_type = other DNA
tccaccacatcagatacaacccgatggcagacaaaggcctaggaaacatgatttgggtcgactggtgttccagaaaagaa

SEQ ID NO: 157326 - DNA, 80 bp, synthetic construct
  source 1..80: mol_type = other DNA
ggaggcgccgccgttggaaacccaggcgccgccgctggagacgcctacgacggagacgacctagacgccctcttcgccgc

SEQ ID NO: 157327 - DNA, 80 bp, synthetic construct
  source 1..80: mol_type = other DNA
acaaaacagatacctttgatactgtcacctgggataatgtgtcattcctgaagagaaaattcaaacaagaccaggagttc

SEQ ID NO: 157328 - DNA, 80 bp, synthetic construct
  source 1..80: mol_type = other DNA
gtactcggctagcctgactaagggtgaggctataacgcaggtcctgttccggtgcggcggtggatagagaggaggtggat

SEQ ID NO: 157329 - DNA, 80 bp, synthetic construct
  source 1..80: mol_type = other DNA
ccagtttccaaaagcctacccaaacaaactattatacaacccaagacgcagcaaaatttgtcagtgcagcagatagcaac

SEQ ID NO: 157330 - DNA, 80 bp, synthetic construct
  source 1..80: mol_type = other DNA
tgctatatcatagggtacatggccgccctcataagtggcaacgggacatttgccataaactacagtagccacttagagga

SEQ ID NO: 157331 - DNA, 80 bp, synthetic construct
  source 1..80: mol_type = other DNA
caatcccatgatggggtacgtattctatgacagaaactttggtgacggaaaatggattgacggacggggcaaaatagaac

SEQ ID NO: 157332 - DNA, 80 bp, synthetic construct
  source 1..80: mol_type = other DNA
tgatcaccggtaccacggtgatcgccgcgcagaacctcagcgcgatcctcaaccgcactcgctcggcgcaggtcaagacc

SEQ ID NO: 157333 - DNA, 80 bp, synthetic construct
  source 1..80: mol_type = other DNA
catagctgacgtactgactaatcctgcacttatgtcacctactgttgaggcatgtggattctctgataggctaaagcaaa

SEQ ID NO: 157334 - DNA, 80 bp, synthetic construct
  source 1..80: mol_type = other DNA
tacacactggtcaagctttattacctgctgcgcatctaaaggaaaaacataacaatcttgtggaccagaaagatacccag

SEQ ID NO: 157335 - DNA, 80 bp, synthetic construct
  source 1..80: mol_type = other DNA
cgaacgcaaagcatcactgactataaaatacaagtttagatggaaatggggtggaaaccctatatttcaacagatggtca

SEQ ID NO: 157336 - DNA, 80 bp, synthetic construct
  source 1..80: mol_type = other DNA
acattatttgtagctgccattccagagtatatgatggcaagtaattcaggcaccaatactgggggcatcatttacgaatt

SEQ ID NO: 157337 - DNA, 80 bp, synthetic construct
  source 1..80: mol_type = other DNA
ccacgcggtgtcctgatgtatacgtccaactgtccgggagactcagagtgcctctgagcatgggggcatgtctgttcccc

SEQ ID NO: 157338 - DNA, 80 bp, synthetic construct
  source 1..80: mol_type = other DNA
aacgcccgacgagaatttcttgttggtcactaacgtaattccgcgcgagtcggccgaggtgccggtgttggatagcagta

SEQ ID NO: 157339 - DNA, 80 bp, synthetic construct
  source 1..80: mol_type = other DNA
gatttcagtgtgcgattgttaagagacactacccacatttcacaaggtgccctgtttgcaagaacacagggtattgaaga

SEQ ID NO: 157340 - DNA, 80 bp, synthetic construct
  source 1..80: mol_type = other DNA
ggtggtactgctcaccggacacctgcagtctgtccatgtaagattgagagacgatacccacgttcacaaagtgtttctcg

SEQ ID NO: 157341 - DNA, 80 bp, synthetic construct
  source 1..80: mol_type = other DNA
cttataaaagttttgtagagaggattcgcagtgttagcgctggacgtgcattgtacatacctccctatgatctgctcttg

SEQ ID NO: 157342 - DNA, 80 bp, synthetic construct
  source 1..80: mol_type = other DNA
gggacattggactacagtccagtgcaacattagtagccccgtggatttcaaatgtcaattatcgcagatgtatcaaggat

SEQ ID NO: 157343 - DNA, 80 bp, synthetic construct
  source 1..80: mol_type = other DNA
cccaggaaaggaagttcaaattgatggcataaccacaagagtgactgactcatatgatttatacaataaagatgcatcaa

SEQ ID NO: 157344 - DNA, 80 bp, synthetic construct
  source 1..80: mol_type = other DNA
ttgactacatactagcatacacaagaacacctccatttcaagcaacagaacttagctacatgtcctgccatccactactc

SEQ ID NO: 157345 - DNA, 80 bp, synthetic construct
  source 1..80: mol_type = other DNA
ctgggcagagttcggggtccaggaggtagaagatgggcttggtgcctctgtggttggcgtagcaggaggcatagatactg

SEQ ID NO: 157346 - DNA, 80 bp, synthetic construct
  source 1..80: mol_type = other DNA
gttgattccccgacgtgtgtctgtgtctgtgtgattccccggggaaaagaggaagttcccaggggacggccagagacgcg

SEQ ID NO: 157347 - DNA, 80 bp, synthetic construct
  source 1..80: mol_type = other DNA
aatcactagctcaagaaatgttaaggatcttggatacccgactatacacacccctaacaagactaaactacacccaagtg

SEQ ID NO: 157348 - DNA, 80 bp, synthetic construct
  source 1..80: mol_type = other DNA
tgtaatgtgacccagtggggacgttacgagaatgaaagcacacccgtattatggtgcactttatggggatcacgcatgcg

SEQ ID NO: 157349 - DNA, 80 bp, synthetic construct
  source 1..80: mol_type = other DNA
cacagattatcaaaaacccctgcccaagctcagccgttggccccggtccccgtagacagcctcgcgacgtacaagtcgtt

SEQ ID NO: 157350 - DNA, 80 bp, synthetic construct
  source 1..80: mol_type = other DNA
atatagcgaccactaagagagcaaaagtccatttccagccgttgtcaaagtacgcccccgtggtgggatgcatggtggcg

SEQ ID NO: 157351 - DNA, 80 bp, synthetic construct
  source 1..80: mol_type = other DNA
aacaaggccttccggtggtactcaatcctggttcaaatcaatttctaaccactagtgacaggagtgcccccccaatctta

SEQ ID NO: 157352 - DNA, 80 bp, synthetic construct
  source 1..80: mol_type = other DNA
tatcttacttgccataacagcagacctgcaagttgatgcggcacatgaacctgggcctgaccacatcccggattgtgatt

SEQ ID NO: 157353 - DNA, 80 bp, synthetic construct
  source 1..80: mol_type = other DNA
gaattaaatattcacatcttatacatggctgaacaaggattcctcagagtggcacatacttatgacactgataagaaaag

SEQ ID NO: 157354 - DNA, 80 bp, synthetic construct
  source 1..80: mol_type = other DNA
aatggaccagaaataagattgatattgctgaaggtccaggagctatgaatatggctaatgtgctcagtacaactggtgct

SEQ ID NO: 157355 - DNA, 80 bp, synthetic construct
  source 1..80: mol_type = other DNA
gctcgactccagccaagaagtacaagcactccaaaaccagcaaaaagagcaagaagaagcgcagagtctccaggagagac

SEQ ID NO: 157356 - DNA, 80 bp, synthetic construct
  source 1..80: mol_type = other DNA
agaattaacttttctcaagaggtcctttaatctggtagaggacagggttagaccagctatttctgagaagacaatctggt

SEQ ID NO: 157357 - DNA, 80 bp, synthetic construct
  source 1..80: mol_type = other DNA
cttctgtcttagcaaggatgttaaccagtgactctgacatatattctctgccaccagctcctaaatactttgatggttat

SEQ ID NO: 157358 - DNA, 80 bp, synthetic construct
  source 1..80: mol_type = other DNA
ctggttctgcagtggggtgtgatccagaaaccttttggtcaaaaataccagtaatgttagatggtgaatgcataatggca

SEQ ID NO: 157359 - DNA, 80 bp, synthetic construct
  source 1..80: mol_type = other DNA
catctaatgtgctcggctcaaattgttttgcaactactgctgaacctgaaaacaagaatgtagtccaagccaccaccaca

SEQ ID NO: 157360 - DNA, 80 bp, synthetic construct
  source 1..80: mol_type = other DNA
agcgggaggccgaaagggccaggtcggagcggtgggacaggtgtgcccaggtgctcaaaaataggctgctccgcgtggag

SEQ ID NO: 157361 - DNA, 80 bp, synthetic construct
  source 1..80: mol_type = other DNA
tctgtccaccgtgtcctttaaccttaaagtactgtatgacgaaaaccagaggggacttaacagatggacgtaccccaacg

SEQ ID NO: 157362 - DNA, 80 bp, synthetic construct
  source 1..80: mol_type = other DNA
atttcagataacatgaaagtggccattgatcactatgctggacaactcctatcactagacatcccaactcaggaactcag

SEQ ID NO: 157363 - DNA, 80 bp, synthetic construct
  source 1..80: mol_type = other DNA
tatccaaccacagctacattcccaccagagtggtcaaacagacaatatctagaacatgactatggcttattcagccctta

SEQ ID NO: 157364 - DNA, 80 bp, synthetic construct
  source 1..80: mol_type = other DNA
aaactgaatcatggttgttcccaccatgattacccacgtggtgcagtggtcttgtattacggtacacttccataccagtt

SEQ ID NO: 157365 - DNA, 80 bp, synthetic construct
  source 1..80: mol_type = other DNA
cttccagtcgtgctttgcggggcgacatggcacacttttcagatcaaagtccatatgaccaacagccccaagcgcaaaca

SEQ ID NO: 157366 - DNA, 80 bp, synthetic construct
  source 1..80: mol_type = other DNA
aaacccggatggcaaggatcttagcatgttttgccaaatggtatcgactactgagttcattgtacctatggctagcattg

SEQ ID NO: 157367 - DNA, 80 bp, synthetic construct
  source 1..80: mol_type = other DNA
cgcaactatcactccagaactgaatctacactagaaaattttcttggaagatcagcgtgtgtccacattgacacgtacaa

SEQ ID NO: 157368 - DNA, 80 bp, synthetic construct
  source 1..80: mol_type = other DNA
ttttgacccgaccaacctaactgactcaagatcaagcataacatacgtgcccgatactatccgtccagaggttcgcacaa

SEQ ID NO: 157369 - DNA, 80 bp, synthetic construct
  source 1..80: mol_type = other DNA
aaatttactgagtgctgcaatgcagctaaaggccttgaatggatagggattaaaattagtaaatttattgactggctaaa

SEQ ID NO: 157370 - DNA, 80 bp, synthetic construct
  source 1..80: mol_type = other DNA
ccaacctggtgaacgtttggccatcattccagtctccccaagcgccattgctggaactggcgctcccatttcctatgtcc

SEQ ID NO: 157371 - DNA, 80 bp, synthetic construct
  source 1..80: mol_type = other DNA
attaaattagagattactgtacttaagttaaagagaaatgaaaagttcaaagacattaggaaatatataccagagaatga

SEQ ID NO: 157372 - DNA, 80 bp, synthetic construct
  source 1..80: mol_type = other DNA
caacggagacatgccgtttcttgctccatacatccctgtgggctggtggatcaaatggtaccccatgattgcacaccaaa

SEQ ID NO: 157373 - DNA, 80 bp, synthetic construct
  source 1..80: mol_type = other DNA
gacgtagtcagaccctgtaagataacaggatggatgccccttataatctgtgggtcaggaagcactcagtttaactttat

SEQ ID NO: 157374 - DNA, 80 bp, synthetic construct
  source 1..80: mol_type = other DNA
tcaagatgcaagagcttctagacaaatatggtgtggatctaccatatgtaacatatcttaaagatgagctgagggcacct

SEQ ID NO: 157375 - DNA, 80 bp, synthetic construct
  source 1..80: mol_type = other DNA
tatccttattagtgcaaaaatgtaccacttttttctcttcagctgccactgaaatcctggacaatgatttggttaaattc

SEQ ID NO: 157376 - DNA, 80 bp, synthetic construct
  source 1..80: mol_type = other DNA
ctcagatgacagtacaaaacaaggggagccttttggaggctccctgagcaccacctcctttaacttaaaagtactgtttg

SEQ ID NO: 157377 - DNA, 80 bp, synthetic construct
  source 1..80: mol_type = other DNA
tcaggagtgcaagcacctgtgggagctattacaacaattgaggatccagttttaacaaagaaagtacctgagacatttcc

SEQ ID NO: 157378 - DNA, 80 bp, synthetic construct
  source 1..80: mol_type = other DNA
ctacgggctccaacaacagctccccaaaccctaccgattacaatatctattgcccccatcaaatctgagttctctggcgc

SEQ ID NO: 157379 - DNA, 80 bp, synthetic construct
  source 1..80: mol_type = other DNA
tcttagaccatgatgagaaccaatataatgcacttgggaagaacttttctcaatggaaaattacaatcaaggaaatggct

SEQ ID NO: 157380 - DNA, 80 bp, synthetic construct
  source 1..80: mol_type = other DNA
cgtatatctaattatactggctcagaacaaaaccctggctctaccccgaagccccaaccacccctgatccgtagagcgct

SEQ ID NO: 157381 - DNA, 80 bp, synthetic construct
  source 1..80: mol_type = other DNA
agaacaaacaccaatagcgaaaacgacctatctaatacatacaaaaacaatacacatcataaacgcaatcgccatcataa

SEQ ID NO: 157382 - DNA, 80 bp, synthetic construct
  source 1..80: mol_type = other DNA
gttttatgcatcccttggatcagccaaacccactaccgatttgtgcagcatgacgtctacactgatgctgggtacataac

SEQ ID NO: 157383 - DNA, 80 bp, synthetic construct
  source 1..80: mol_type = other DNA
tagcacgtcacagccgccattttgtgtcacaaaatggccgacttccttcctcttttttaaaaaaggcgcgaaaaaacggc

SEQ ID NO: 157384 - DNA, 80 bp, synthetic construct
  source 1..80: mol_type = other DNA
agaccccagagtcaggctgtggccgaagggagacaggcgaaggcagcgcccggtggagagagtgcacagtgacagtggga

SEQ ID NO: 157385 - DNA, 80 bp, synthetic construct
  source 1..80: mol_type = other DNA
aatttagttaccggttcctatcagatacctactaacaaatcagtaagctaccatctaggaaaatacagccccatattttt

SEQ ID NO: 157386 - DNA, 80 bp, synthetic construct
  source 1..80: mol_type = other DNA
aaaactttttcaggacaagtggtactctcaggcagacctgtgtggggtgccccttgttagtttgaggttaaccgcagcaa

SEQ ID NO: 157387 - DNA, 80 bp, synthetic construct
  source 1..80: mol_type = other DNA
cacataaaagacccaggaatagtaccatctaccagtgaaagtgccccaacaaacgcaaacaaatactatgtatctaaacc

SEQ ID NO: 157388 - DNA, 80 bp, synthetic construct
  source 1..80: mol_type = other DNA
aaatctaaaaagaaactttatgtcagaaagaagaagttgatgacaatgtctactaagtacaagtggacaagaaccaaagt

SEQ ID NO: 157389 - DNA, 80 bp, synthetic construct
  source 1..80: mol_type = other DNA
gcagcacgggctgcaaaatatcaatagaatatattttaaaagatttaaaaataaaagatcccaactgtattgcttttatt

SEQ ID NO: 157390 - DNA, 80 bp, synthetic construct
  source 1..80: mol_type = other DNA
cacacagcaagctatctacagaaatgctcatctcactaccccttcagacaagactatcttgcttgcctacacagcagact

SEQ ID NO: 157391 - DNA, 80 bp, synthetic construct
  source 1..80: mol_type = other DNA
agagcgagcataggggtgatttggacattaacaccgtgaccaccatagagcagagcgagcataggggtgttttggccaca

SEQ ID NO: 157392 - DNA, 80 bp, synthetic construct
  source 1..80: mol_type = other DNA
gcacctcagacccccgctcgtgctgacacgcttgcgcgtgtcagaccacttcgggctcgcggtggtcgggaattttgcta

SEQ ID NO: 157393 - DNA, 80 bp, synthetic construct
  source 1..80: mol_type = other DNA
aaaactctcaaacttttaaaaggtatgtggagtcctcccaccaacgatgaacgtgtccgcgagcgaaaatggttcctcgc

SEQ ID NO: 157394 - DNA, 80 bp, synthetic construct
  source 1..80: mol_type = other DNA
gtacgagcggaaagccaacgtagatttcaaagtcactcctgttacaaaagtgagatcaagcatcaatgacaccacccacg

SEQ ID NO: 157395 - DNA, 80 bp, synthetic construct
  source 1..80: mol_type = other DNA
ggcttcctcttcgtcctccccccacggcctgccccatgtctaacaccgcgccgggacccacggtggccaacaagcgggac

SEQ ID NO: 157396 - DNA, 80 bp, synthetic construct
  source 1..80: mol_type = other DNA
gcggccgtctgaccgagaacctaagaaacgcccttcagcaggacagcaccacgcaaggctgcctgggtgccgagaccccg

SEQ ID NO: 157397 - DNA, 80 bp, synthetic construct
  source 1..80: mol_type = other DNA
attaatagtagtcatcccacaacatcaaattctgccccagcactagatgccgcagaaacaggacatactagtaatgtgca

SEQ ID NO: 157398 - DNA, 80 bp, synthetic construct
  source 1..80: mol_type = other DNA
actgaggcgtaagtttgagttattcacttacatacgctttgatgtggaagtgacctttgtgataacatcacatcaagatc

SEQ ID NO: 157399 - DNA, 80 bp, synthetic construct
  source 1..80: mol_type = other DNA
ctggagatgacgttcgtcttcacagaaaactacccaagcacagctagtggagaagtacgaaatcaggtctaccaaatcat

SEQ ID NO: 157400 - DNA, 80 bp, synthetic construct
  source 1..80: mol_type = other DNA
agaactacggggcctttggccagcagtccggggcggtttatgtgggtaattacaggatagtcaataggcacttagccacg

SEQ ID NO: 157401 - DNA, 80 bp, synthetic construct
  source 1..80: mol_type = other DNA
tcattcccatctcagagacattcatgaagggagacatgccagtgctggccccctacataccgttgagctggttttgcaag

SEQ ID NO: 157402 - DNA, 80 bp, synthetic construct
  source 1..80: mol_type = other DNA
tcgttaacaccatggctgaccgtttgggaagaagttacgcgttgagagactgaaccggatcgagagtgagcagcagacgt

SEQ ID NO: 157403 - DNA, 80 bp, synthetic construct
  source 1..80: mol_type = other DNA
ctcgggggtgagtgccaattggcctttaataacaaagcccccaggcagcaccaaaaatgcctgcccgtccgatgtggtgg

SEQ ID NO: 157404 - DNA, 80 bp, synthetic construct
  source 1..80: mol_type = other DNA
acccacacccccctccggcctactttggcttgccgggcctctttggcccccctccacccgtgcctccttactacggatcc

SEQ ID NO: 157405 - DNA, 80 bp, synthetic construct
  source 1..80: mol_type = other DNA
gcaactgagccgaacgcacctcagcagacgagaggatgtcgtcgcggcgtcgcagctcgtcacgtcgctctggcgaaccc

SEQ ID NO: 157406 - DNA, 80 bp, synthetic construct
  source 1..80: mol_type = other DNA
ccccccatgtatgacaagactaagccaaacagtggctacgtagcatatgacacaaactttggaaatggaaaaatgccctc

SEQ ID NO: 157407 - DNA, 80 bp, synthetic construct
  source 1..80: mol_type = other DNA
caagagtggattcatttatgcctattaacaatataaaaactcaggaaggcagtgtgaacatgtatcatataacagttact

SEQ ID NO: 157408 - DNA, 80 bp, synthetic construct
  source 1..80: mol_type = other DNA
tctaactggcaaagccaagttcacaaagactaaattaaccagtgattgggttgtggaagaagagtgtgaattggattact

SEQ ID NO: 157409 - DNA, 80 bp, synthetic construct
  source 1..80: mol_type = other DNA
tgcttaggaagtttagtgcttatccttggaacaatatatgccctttacaaattaatgtgtttgacccaaggcccctattc

SEQ ID NO: 157410 - DNA, 80 bp, synthetic construct
  source 1..80: mol_type = other DNA
ttcttcaagattcctcaaagactccgagagaaatgggacaccaagggatacctttacaaagggaccgatggcctgcccac

SEQ ID NO: 157411 - DNA, 80 bp, synthetic construct
  source 1..80: mol_type = other DNA
gcaatatgattcccgaacaggttatcagaaacccttgtaaaacagaaggacacgatctccctcacaccagtagactccat

SEQ ID NO: 157412 - DNA, 80 bp, synthetic construct
  source 1..80: mol_type = other DNA
aggacaccggtgtttcctcgggcaatagagtccctcgatcagtacaaatcgttgacccgaagtacaacactccagaactt

SEQ ID NO: 157413 - DNA, 80 bp, synthetic construct
  source 1..80: mol_type = other DNA
ctttctttctaaatttactggaacacaaccatctaaatgatctcttaggttgtcaaggttggccatacccacacctgcag

SEQ ID NO: 157414 - DNA, 80 bp, synthetic construct
  source 1..80: mol_type = other DNA
gccatataaacaacacttagaaaaagtctgggaaaccctagtatcagatggctcctactggaatagcttccatgtactag

SEQ ID NO: 157415 - DNA, 80 bp, synthetic construct
  source 1..80: mol_type = other DNA
gggtgccacatctgagattcccatcacagttactatagcccctatgtgcgcagagttcgcaggtctccgccaggcagtga

SEQ ID NO: 157416 - DNA, 80 bp, synthetic construct
  source 1..80: mol_type = other DNA
aaacacatttagaacagaaggcaatgaaagccatccacaactacaaaaaccagataccactaaaaacaaacccaatacaa

SEQ ID NO: 157417 - DNA, 80 bp, synthetic construct
  source 1..80: mol_type = other DNA
catacacagactggatttgtagtgtatgacagcctatttggaaatggaaaatggttggacggcagcgggttcatccccgt

SEQ ID NO: 157418 - DNA, 80 bp, synthetic construct
  source 1..80: mol_type = other DNA
gatggtggcgcctggggccgaggccacaccggccaggcccaacattgcctcgatgtcgtccaggatggtgcggaggcgct

SEQ ID NO: 157419 - DNA, 80 bp, synthetic construct
  source 1..80: mol_type = other DNA
ggctaggctgtcagatccctatacagtatgccgcggtggacctcaccatcaagatgtggtttttgctgggagcgcccatg

SEQ ID NO: 157420 - DNA, 80 bp, synthetic construct
  source 1..80: mol_type = other DNA
cctctcacgtgaccaatcacgtggtgtgtgcgtcacggccgccattttgttttacaaaatggccgacttccttccgcttt

SEQ ID NO: 157421 - DNA, 80 bp, synthetic construct
  source 1..80: mol_type = other DNA
agatgcctacgcaaagcctagtatcatcttcgattctatttggttggtcgctcggctacaaacccagtagtagacctggc

SEQ ID NO: 157422 - DNA, 80 bp, synthetic construct
  source 1..80: mol_type = other DNA
tcagatctgtgcaggtgactacagggttacccctaatctccacaggcaccgcctcacccactgcatctgagaatacccca

SEQ ID NO: 157423 - DNA, 80 bp, synthetic construct
  source 1..80: mol_type = other DNA
ccaccaggcacactgtgcgttgtgcactggaatctcggttcctttgcacgcctgttttcccaccctcatgtttgtttgtc

SEQ ID NO: 157424 - DNA, 80 bp, synthetic construct
  source 1..80: mol_type = other DNA
aacttcaaagaatattatgtatgtaattcttttgccccaaactgggcttcagatgccttctattgcactctcacaaaaac

SEQ ID NO: 157425 - DNA, 80 bp, synthetic construct
  source 1..80: mol_type = other DNA
agacaatttcaccgcgggtggttatatctctctgtggtaccagacagattttgtaccttctactgcaagcacaataggca

SEQ ID NO: 157426 - DNA, 80 bp, synthetic construct
  source 1..80: mol_type = other DNA
tactcgagactcatttgtagctaatgtaaatacaaactacaattggtatagctttaaggcaaaaagcaataaagacaaac

SEQ ID NO: 157427 - DNA, 80 bp, synthetic construct
  source 1..80: mol_type = other DNA
aaatcagaattctctggagccagacagtctgttgagccccaaggtttaccagtgagaatgcctagtggatccaaccaatt

SEQ ID NO: 157428 - DNA, 80 bp, synthetic construct
  source 1..80: mol_type = other DNA
cactcagggaaatgtgcagacagcagtgtgcaatgcggctatgggtgtgggcgtcggtaatctgacaatataccctcacc

SEQ ID NO: 157429 - DNA, 80 bp, synthetic construct
  source 1..80: mol_type = other DNA
atacacatacctggaaagatcacaagtgtacttcatatggccagagttgattctttcatgccaatcaacaatgtggaatc

SEQ ID NO: 157430 - DNA, 80 bp, synthetic construct
  source 1..80: mol_type = other DNA
agtggttgggcattgcatatttttgccgcggtgctgttgggccttggactcggggtgatcatccgtaccatcacccgcac

SEQ ID NO: 157431 - DNA, 80 bp, synthetic construct
  source 1..80: mol_type = other DNA
caaaatacaaattcaaattcttattcgggggcaatcctattccacagcaaactatcaaagaccccagtaaacaaccagac

SEQ ID NO: 157432 - DNA, 80 bp, synthetic construct
  source 1..80: mol_type = other DNA
gaatcgtttaacttacaacagttctagtccaaataaagtacactgtatcgtgcaaggaagattaggtgatgatgccaaat

SEQ ID NO: 157433 - DNA, 80 bp, synthetic construct
  source 1..80: mol_type = other DNA
aaaccaggtatgttatgaacagcaacaccaatgctgaagcagcggtagaaaactttttaggtagatcagccttatgggcc

SEQ ID NO: 157434 - DNA, 80 bp, synthetic construct
  source 1..80: mol_type = other DNA
aaatggatctaacagacccactgtgtattgaagacaatactgagaattgtaaacagtccatatcaccaaatgagttgggt

SEQ ID NO: 157435 - DNA, 80 bp, synthetic construct
  source 1..80: mol_type = other DNA
tgggcaaggctctgaaaaatgcacttttctaggtgtagcagaaagaaaaggacactgtcactgctaccagtgcacccttc

SEQ ID NO: 157436 - DNA, 80 bp, synthetic construct
  source 1..80: mol_type = other DNA
cagggtgtagtgattatggatgatcttaatcaaaacccggatggagaagatatgaagctgttttgccaaatggtatccac

SEQ ID NO: 157437 - DNA, 80 bp, synthetic construct
  source 1..80: mol_type = other DNA
tagtagtgtgaatgatactgtattatttaggacaacatttgggaatctcttttcgaaatttcatttaaaccctggaattg

SEQ ID NO: 157438 - DNA, 80 bp, synthetic construct
  source 1..80: mol_type = other DNA
acctcagaaagatggacgtataccgagtgcaggtatcctctcaaacaagccaaggggcgcaagtatttggcttctcattg

SEQ ID NO: 157439 - DNA, 80 bp, synthetic construct
  source 1..80: mol_type = other DNA
cgtcatgttcctgtagggtgccatcagattttctgatctggtcaacgaacagatacagcatacgtttttgatcccgggag

SEQ ID NO: 157440 - DNA, 80 bp, synthetic construct
  source 1..80: mol_type = other DNA
cgatacacaagttaacgcagactaccaggcaccagatcctggattccatgttcgtcgcgggccaaatccagcagcgatga

SEQ ID NO: 157441 - DNA, 80 bp, synthetic construct
  source 1..80: mol_type = other DNA
cgccaccgccggtcccgcgagtccccgtccccaacgtaacccccgtcctcgccccgtccccgccgcaacacacccgccac

SEQ ID NO: 157442 - DNA, 80 bp, synthetic construct
  source 1..80: mol_type = other DNA
caatcaattgatatatctaaaccgatacggttaatggagggacaaacacacgctcaagccgattacttactcgcacttaa

SEQ ID NO: 157443 - DNA, 80 bp, synthetic construct
  source 1..80: mol_type = other DNA
acaacggcagtggcaccagcggggggttcagcgagagcacgctaaagaagaacgtgggtcccatttacctatgtcccgta

SEQ ID NO: 157444 - DNA, 80 bp, synthetic construct
  source 1..80: mol_type = other DNA
gaatcatatcagctatgacaatcattattagaaatagtgcagatccccatacaattattgccactcttgctttgataggt

SEQ ID NO: 157445 - DNA, 80 bp, synthetic construct
  source 1..80: mol_type = other DNA
tattacaggcaaggcaaaaaggcccaaaaaagacacggggccagcactacaacaagaagagcaaagagaagactcgcctt

SEQ ID NO: 157446 - DNA, 80 bp, synthetic construct
  source 1..80: mol_type = other DNA
aaattccaagtaaacaatgaattatggcaaggtgtaaaagcctgtgtcaaatcaaagtttagggaaatatttggaatcaa

SEQ ID NO: 157447 - DNA, 80 bp, synthetic construct
  source 1..80: mol_type = other DNA
tgactttacccaagatcctggcaagtttacgcaacctgtgctggatgctctacgcgaagcggtgccaccattgcagtcac

SEQ ID NO: 157448 - DNA, 80 bp, synthetic construct
  source 1..80: mol_type = other DNA
tggagatcacatttgtcatcactagcagacagttgcctggaactagcattgcacaagacatgccaccactaacacaccaa

SEQ ID NO: 157449 - DNA, 80 bp, synthetic construct
  source 1..80: mol_type = other DNA
aatcaaacagctaggatgattaagtacaattacccaacaaaatcaggattttgtggtggtgtcttatacaaaataggatt

SEQ ID NO: 157450 - DNA, 80 bp, synthetic construct
  source 1..80: mol_type = other DNA
ctgtgctgctctactacgcaagtactttgcatctgcacaaggagctataacaactatgaacagtgttagagaccataaca

SEQ ID NO: 157451 - DNA, 80 bp, synthetic construct
  source 1..80: mol_type = other DNA
tgccaccttcttgaagagaggtttcaaggttgatgaaaaatattccttccttatccatccaacatttcctgaaagtgaaa

SEQ ID NO: 157452 - DNA, 80 bp, synthetic construct
  source 1..80: mol_type = other DNA
ctaggccaggatatgccaccattgacacatcaaatcatgtacataccacccggtggtcccataccaaaatccgtgacaga

SEQ ID NO: 157453 - DNA, 80 bp, synthetic construct
  source 1..80: mol_type = other DNA
tacatgaggtttgacatggaggtcacaatcgttataacatcataccagggccaaggaactgatcatagccaggatgcccc

SEQ ID NO: 157454 - DNA, 80 bp, synthetic construct
  source 1..80: mol_type = other DNA
ctaccgtgagcaaccacaagataggcaccggagatgttccagctctccaggctgcggagacaggtgctacttctaacgcc

SEQ ID NO: 157455 - DNA, 80 bp, synthetic construct
  source 1..80: mol_type = other DNA
agatacatttaaagatctagatttaagtacagcaacttttctgaaaagaggctttaaacctgattcaaaacacccatttc

SEQ ID NO: 157456 - DNA, 80 bp, synthetic construct
  source 1..80: mol_type = other DNA
aaattgcacctgatcaaatgaaagaagcaaacaaagcatatatacaagcagccaaagttaatttacctaactggaacatt

SEQ ID NO: 157457 - DNA, 80 bp, synthetic construct
  source 1..80: mol_type = other DNA
tgacttgtgcgacgttaatcttttgtcatttgcggttactgcggctagctttacacatccgttctgcccaccacaaactg

SEQ ID NO: 157458 - DNA, 80 bp, synthetic construct
  source 1..80: mol_type = other DNA
cctcctcgcagtccgcgttttgatgacattatacagtcattgaccaaaatgctcaatgattgtaaggagaaaagattgtg

SEQ ID NO: 157459 - DNA, 80 bp, synthetic construct
  source 1..80: mol_type = other DNA
cttgagcaacgtctcctgactggccgtaccgccggcgctgggatgccgcgccgacgactggagatacaccagcctgtgct

SEQ ID NO: 157460 - DNA, 80 bp, synthetic construct
  source 1..80: mol_type = other DNA
gcgcctgctggaagatggcgattagcggccgcgactctagatcataatcagccataccacatttgtagaggttttacttg

SEQ ID NO: 157461 - DNA, 80 bp, synthetic construct
  source 1..80: mol_type = other DNA
taggtgctgatgataatataaacagtcttataaccgagttcttactggttgatgtcaatctacttagcatatacctcggt

SEQ ID NO: 157462 - DNA, 80 bp, synthetic construct
  source 1..80: mol_type = other DNA
aaatggacaaacactgtaaaagatgcctatcaactagtttcagacgaatacaaacaaatatataccaccacactcacata

SEQ ID NO: 157463 - DNA, 80 bp, synthetic construct
  source 1..80: mol_type = other DNA
gcataaaaaatgacagctgcacaggactaggagaagaggaaataatgcaatgtaattttagtatgacgggactaagaaga

SEQ ID NO: 157464 - DNA, 80 bp, synthetic construct
  source 1..80: mol_type = other DNA
aaaatgtctaaacgagaaggcttagtactagattgcatgaatagagcaattgaatctgactgcttaacatacgaacaatt

SEQ ID NO: 157465 - DNA, 80 bp, synthetic construct
  source 1..80: mol_type = other DNA
agtatatggatgacattcttatagccagtgatagaaatgatttagagcatgatcagttagtttcacagctcaaggagcta

SEQ ID NO: 157466 - DNA, 80 bp, synthetic construct
  source 1..80: mol_type = other DNA
agtaatcagaggttgtggtcataatttggtttatccgaacatgacagacatagtgtcttcattttcaaaatgaaacatca

SEQ ID NO: 157467 - DNA, 80 bp, synthetic construct
  source 1..80: mol_type = other DNA
acaattgtccaaccaacctaagatggctgaggaaatctttgccattaaagtggacattgcatcacagcctttatcaagca

SEQ ID NO: 157468 - DNA, 80 bp, synthetic construct
  source 1..80: mol_type = other DNA
atgataagccacgaaaaccgtgcctgctataacgcggctgtaggaactgtagcactgactgtggctgttgatatgatgaa

SEQ ID NO: 157469 - DNA, 80 bp, synthetic construct
  source 1..80: mol_type = other DNA
gtatacaccaccaggaatcccagttcccacacgtgccaatggaaaggaatgggatacagcatcaaatcctagtgtcttct

SEQ ID NO: 157470 - DNA, 80 bp, synthetic construct
  source 1..80: mol_type = other DNA
gggagtcagcaatgcttggtacgcatatcgtgtgggattttgggttgcaatccagcataacattggtcatcccttggata

SEQ ID NO: 157471 - DNA, 80 bp, synthetic construct
  source 1..80: mol_type = other DNA
taaccaaaggctgcaaagcacactgtcacctaacaggcatattttcaccaccattcctaaacataggcagaatagccaga

SEQ ID NO: 157472 - DNA, 80 bp, synthetic construct
  source 1..80: mol_type = other DNA
gttttaggccttccggactacaaaaatggcgcatttggtgacgtcacggcggccattttaagtaagcaccgcctaggagc

SEQ ID NO: 157473 - DNA, 80 bp, synthetic construct
  source 1..80: mol_type = other DNA
tagttgttcaattctgtgtttcgcatcagcttgtaacgacttctctgttcgattgctgcgagacaccccattcatcagcc

SEQ ID NO: 157474 - DNA, 80 bp, synthetic construct
  source 1..80: mol_type = other DNA
aaaaactaccaaaatggccgtttcagtgacgtcacggccgccattttaagtaagcatggcgggcggtgacgtatagtgtg

SEQ ID NO: 157475 - DNA, 80 bp, synthetic construct
  source 1..80: mol_type = other DNA
gcgtgtgcgtgaagcggtatcaaattcgagggactgaggggtcaacggacagatacgctagctggagaatttcagtccgc

SEQ ID NO: 157476 - DNA, 80 bp, synthetic construct
  source 1..80: mol_type = other DNA
aaggaggtgacggaagacttactgcacctcgagcagggagagacacctcgcagagaggcgacagaggacttgctgcacct

SEQ ID NO: 157477 - DNA, 80 bp, synthetic construct
  source 1..80: mol_type = other DNA
gtaaatgcagcggcgttgtccgagggagagcaagcaaaggagttcaaagaggcttccaccactggtcccaatgatgttca

SEQ ID NO: 157478 - DNA, 80 bp, synthetic construct
  source 1..80: mol_type = other DNA
gtttacatgttcactccacctagtcccaagaggttcaagacctctcaggactggcagcaagagtacgaggcctgctcagt

SEQ ID NO: 157479 - DNA, 80 bp, synthetic construct
  source 1..80: mol_type = other DNA
ttaattaagattgtctcagcattggtgattgtggcaagaaactatgaggactctatcacggttatggctacgttaagttt

SEQ ID NO: 157480 - DNA, 80 bp, synthetic construct
  source 1..80: mol_type = other DNA
gctgtgtaaaaagaaacggccgccctgcgccgtgggcaacttgcagaagcgctgcgagtccaccttatacaggtactcga

SEQ ID NO: 157481 - DNA, 80 bp, synthetic construct
  source 1..80: mol_type = other DNA
atagtgaacgtggaggttgtcaaaatcaaagtagttggagctcaagatggagttttggacttcctgggaggtgatgtagg

SEQ ID NO: 157482 - DNA, 80 bp, synthetic construct
  source 1..80: mol_type = other DNA
ctcacccctcagccagacccttacgggggagctctaagtactgttacttttagtttaaaggtgctatttgaccagcacac

SEQ ID NO: 157483 - DNA, 80 bp, synthetic construct
  source 1..80: mol_type = other DNA
ggggatgattctctggcccgaggtcccaactttcattttgaccatgaacgaatgacccattacataaacacatgtggtta

SEQ ID NO: 157484 - DNA, 80 bp, synthetic construct
  source 1..80: mol_type = other DNA
tgaggtgaacaaatggataattcctgcagagtgtaaaatagaaaaagaacttaatttagctaatacaatcattacaataa

SEQ ID NO: 157485 - DNA, 80 bp, synthetic construct
  source 1..80: mol_type = other DNA
aaatgtgtggtcttgtgtttcgtttcggcctgtaatgacttttcagtgcgcatgctgcgcgacacaccattcatcggcca

SEQ ID NO: 157486 - DNA, 80 bp, synthetic construct
  source 1..80: mol_type = other DNA
cggcattcgtgagcagggcttcgtccaggggcttgttcttggtggacatcattagcccagctgcaaatatcagaattagc

SEQ ID NO: 157487 - DNA, 80 bp, synthetic construct
  source 1..80: mol_type = other DNA
tcaaagtttaatctaactggtaaatttgccaagtgggacattagtttccaggaacaggctagcattaggaaaaagtttga

SEQ ID NO: 157488 - DNA, 80 bp, synthetic construct
  source 1..80: mol_type = other DNA
ttggatttactccgttaaataccagaacatatcacttgatacaagcggtattactaattaggaacttctatcacaatggg

SEQ ID NO: 157489 - DNA, 80 bp, synthetic construct
  source 1..80: mol_type = other DNA
aaagactaagtccagactatccaggcctatacatgactgtaatatacaacccagcgaacgacaaaggagtaggcaacaaa

SEQ ID NO: 157490 - DNA, 80 bp, synthetic construct
  source 1..80: mol_type = other DNA
actacaaactcaccacaaataactaacacagacctaggaatgacacacgcttggactaatgctacagtaccagaatatga

SEQ ID NO: 157491 - DNA, 80 bp, synthetic construct
  source 1..80: mol_type = other DNA
agtgtcaacacagcgaaccgggtcacacgagaccagcaacgttgtcaaagatgggtctacattaaatttcacaaacatca

SEQ ID NO: 157492 - DNA, 80 bp, synthetic construct
  source 1..80: mol_type = other DNA
caggagaaggcaacaaagtatgggtagactggtgcagcaaagacgacactatgtggaacgacaggcccagcagactaacc

SEQ ID NO: 157493 - DNA, 80 bp, synthetic construct
  source 1..80: mol_type = other DNA
aatacctgaatcctaaaaactcgagttcagtaatatcgtaagtgataacgagaggatctaattcaatgccaaatagggca

SEQ ID NO: 157494 - DNA, 80 bp, synthetic construct
  source 1..80: mol_type = other DNA
aatttagaatgatatttgggaatctgttctctacatttcacgccaatcctggcatccttacagggtcggctgtcggatgt

SEQ ID NO: 157495 - DNA, 80 bp, synthetic construct
  source 1..80: mol_type = other DNA
aggatgcaatctattggctttacacaaagttgaaggatttttatgacatgaattatggtaaaaagaaagatgttcttaat

SEQ ID NO: 157496 - DNA, 80 bp, synthetic construct
  source 1..80: mol_type = other DNA
tcagaactctgccaacaaccctacaactcaaacacgcagcaaaattatagaaattttaaaaaaaaacatgtctacatact

SEQ ID NO: 157497 - DNA, 80 bp, synthetic construct
  source 1..80: mol_type = other DNA
gcgaaagttctgccccgttgactacctattcgggtgtggtgtgctaacagggaatgcatttgtcttcccccatcagataa

SEQ ID NO: 157498 - DNA, 80 bp, synthetic construct
  source 1..80: mol_type = other DNA
cctgggtgcctaggcccatcagaagtcagccatatttgctgaagaactatccaaacttcgataaggcaaacatagtagat

SEQ ID NO: 157499 - DNA, 80 bp, synthetic construct
  source 1..80: mol_type = other DNA
cttactgacttgtcacctttgcacatttggtcagctgaccgatgctcgccacttcctgggtcatgacctggcctgtgcct

SEQ ID NO: 157500 - DNA, 80 bp, synthetic construct
  source 1..80: mol_type = other DNA
cacacagggacccattgaagaaataatctccactgtggcgagcaatgcactggccttaagtcagccaaaaccggtggaca

SEQ ID NO: 157501 - DNA, 80 bp, synthetic construct
  source 1..80: mol_type = other DNA
aggtcaacattatagtagactcacagtatgtaatgggaatagtggcagggcaaccaacagagtcagagagtaaaatagta

SEQ ID NO: 157502 - DNA, 80 bp, synthetic construct
  source 1..80: mol_type = other DNA
gaggcatgttgctgagcgagctcgtcgatcccggggtagagcatctgcaccggctgctgcgacatctggcgcgtgcgcct

SEQ ID NO: 157503 - DNA, 80 bp, synthetic construct
  source 1..80: mol_type = other DNA
caaccaggactagatagtgtgttcaaacacacgttgctcggtgagatactgaattattatgcccactggtcaggcagtgt

SEQ ID NO: 157504 - DNA, 80 bp, synthetic construct
  source 1..80: mol_type = other DNA
tgaacaaaattagtgctaaggtcatcaaatggttgattagagtaatatcagctttagttattgcagtacgtagtcaaggg

SEQ ID NO: 157505 - DNA, 80 bp, synthetic construct
  source 1..80: mol_type = other DNA
ccgcagcgagaacgccacggagggagatcctccaccaatgtcaattacaaaaaacccagagaatcagccaaaatacatta

SEQ ID NO: 157506 - DNA, 80 bp, synthetic construct
  source 1..80: mol_type = other DNA
aaaagtatctacagaaggcattagcaaactacatcactcagtatttgcccacaatgtaggaatatttagcagcagtttct

SEQ ID NO: 157507 - DNA, 80 bp, synthetic construct
  source 1..80: mol_type = other DNA
cgacacgctagcgaccgccctgcggcattgcgccgacgaagaagacggacctctagccagccagaccgctgtgcgggtcg

SEQ ID NO: 157508 - DNA, 80 bp, synthetic construct
  source 1..80: mol_type = other DNA
ttaaacccagcgcccaagaaaatgactttagtcctacttggcaagcttgtcaaaatttaaagaaacttaactcagcaggc

SEQ ID NO: 157509 - DNA, 80 bp, synthetic construct
  source 1..80: mol_type = other DNA
aaccccaggctttgggtgcactggagatcggtgccactgcaagtgtgggaccagaggcaatgatagaaaccaggtatgtc

SEQ ID NO: 157510 - DNA, 80 bp, synthetic construct
  source 1..80: mol_type = other DNA
aactggttagattaaagactgcttattggggtgttgctgacaaaagaaggcatgaaatagcgtatgtaggtttaccaaat

SEQ ID NO: 157511 - DNA, 80 bp, synthetic construct
  source 1..80: mol_type = other DNA
ttttaagtaagcaccgcccaggatcgacgtcacagttcaaaggtcatcctcgacggaacttgcacaaaatggcggtcaac

SEQ ID NO: 157512 - DNA, 80 bp, synthetic construct
  source 1..80: mol_type = other DNA
ctgaaaagcggccacgggggctgcgactgttgctgctgttgttgcgatgctcgtggctgcggcggccgttgtcgcggcgt

SEQ ID NO: 157513 - DNA, 80 bp, synthetic construct
  source 1..80: mol_type = other DNA
caaattccatacagcttactttgactgtacatataatcctctcctagacaagggagtaggcaactacgtgtggtaccagt

SEQ ID NO: 157514 - DNA, 80 bp, synthetic construct
  source 1..80: mol_type = other DNA
ttgagtatgcatcaacggcatccacatatgtcccgatcaccgtaaccgtggccccaatgtgcgcagaatacaacggtttg

SEQ ID NO: 157515 - DNA, 80 bp, synthetic construct
  source 1..80: mol_type = other DNA
gggttgcacacacttatgacacagacaccactagagatgatttcctttcgtctaatggtgtgattacaatcccagctggt

SEQ ID NO: 157516 - DNA, 80 bp, synthetic construct
  source 1..80: mol_type = other DNA
caaacagaaaaggaaagtgccactgcttctggtgcaccctacacagaaaaaacaacttgtgatgagccagtggagaccca

SEQ ID NO: 157517 - DNA, 80 bp, synthetic construct
  source 1..80: mol_type = other DNA
ttctcatgctgctaaacaaacaccacatagtggtgcccagcctaaagactaagcccaggggcagaaaggccataaaagtc

SEQ ID NO: 157518 - DNA, 80 bp, synthetic construct
  source 1..80: mol_type = other DNA
tatttggtcgcgcctggtttgtgacaagccatgattttaacaatgagggacaatggcccttaaatttgacttttccattt

SEQ ID NO: 157519 - DNA, 80 bp, synthetic construct
  source 1..80: mol_type = other DNA
agctactcagtcctaactgttgtggagcaactgcgtcaagagaggaagaatcgccaaagtgtgcaggttgatttgagtgc

SEQ ID NO: 157520 - DNA, 80 bp, synthetic construct
  source 1..80: mol_type = other DNA
ggggcatgactaccacaaaatttactctcagaatactgtacgacgaatttaccaggtttatgaacttttggactgtcagt

SEQ ID NO: 157521 - DNA, 80 bp, synthetic construct
  source 1..80: mol_type = other DNA
ggaattgttaatggtcttgggctgaaacgacttgtcagtgatgtagagacatgagctgttaaaagtgatttttgacacgc

SEQ ID NO: 157522 - DNA, 80 bp, synthetic construct
  source 1..80: mol_type = other DNA
tttattactcaaggtactacaacaaattttaccctgtagtttgtgaaaaaccaacatgtttatggattgaaggtaacaac

SEQ ID NO: 157523 - DNA, 80 bp, synthetic construct
  source 1..80: mol_type = other DNA
tgggtgtggatacccatgtcagtagtgatggccgccaccctggccggcgtcatggtcgagctataactaagcccggtgtc

SEQ ID NO: 157524 - DNA, 80 bp, synthetic construct
  source 1..80: mol_type = other DNA
acatcaattattttaaagatgcagcctccagtggtgcttctcgattggacttttctcaagatcctagtaagttcacagac

SEQ ID NO: 157525 - DNA, 80 bp, synthetic construct
  source 1..80: mol_type = other DNA
gatgcagccaatcctctgttgcatcttggcaatctcatcggtatacagacgagaggagagagacactaccactttcaaat

SEQ ID NO: 157526 - DNA, 80 bp, synthetic construct
  source 1..80: mol_type = other DNA
gaaactgtaaagctccacttttccaatccatcatgaagaatcgcaataaactacttatgtgtatcatttttatttttacc

SEQ ID NO: 157527 - DNA, 80 bp, synthetic construct
  source 1..80: mol_type = other DNA
aacacacttacacacagacaatggtgccaacttcacttcacaggaggtgaagatggtggcatggtgggtaggtatagaac

SEQ ID NO: 157528 - DNA, 80 bp, synthetic construct
  source 1..80: mol_type = other DNA
actccaactcgtgtggcactcgtgggacttcagaagaggcctctttggccaggcaggtattaagagaatgcaacaagaat

SEQ ID NO: 157529 - DNA, 80 bp, synthetic construct
  source 1..80: mol_type = other DNA
ttaaaattgagttgtggttgatcccaccacaactgcccactgggcgtagtgctctcatattccggtatgcttgcacgcca

SEQ ID NO: 157530 - DNA, 80 bp, synthetic construct
  source 1..80: mol_type = other DNA
acaatgcctgttcttccatcagacagcatagaaaccagaactacctacatgcactttaatggttcagaaactgatgtaga

SEQ ID NO: 157531 - DNA, 80 bp, synthetic construct
  source 1..80: mol_type = other DNA
ccctccatgacggccacgcacaacctctcccaccagctcttgatggcgtccgggcccagtgaggaaccgtgcgcctggcg

SEQ ID NO: 157532 - DNA, 80 bp, synthetic construct
  source 1..80: mol_type = other DNA
gcgtgtgctgtggaggacggtgacggtgctgcggtgcggttgggacggcggcggcgaataaaagcgaaaagcagacgcgt

SEQ ID NO: 157533 - DNA, 80 bp, synthetic construct
  source 1..80: mol_type = other DNA
gctccaagacatgccactgtttatcatgctgtatggctacatagactgggccatcaagtgcacaggagtgtccagcctag

SEQ ID NO: 157534 - DNA, 80 bp, synthetic construct
  source 1..80: mol_type = other DNA
aaagtattaagagagtgtcagaacaaccgcttgatgctgaattttctgcagacaggagcaagcgaccccggaaagatacc

SEQ ID NO: 157535 - DNA, 80 bp, synthetic construct
  source 1..80: mol_type = other DNA
acactgacacaccagtgctcactcaccagataatgtatgtaccacctggaggaccagtaccaacgtcagccaccgattac

SEQ ID NO: 157536 - DNA, 80 bp, synthetic construct
  source 1..80: mol_type = other DNA
cgtacgtggggatcgctaacgcatattctcatttttatgatggatttgctactgtccccatcgaaggagaggccacggat

SEQ ID NO: 157537 - DNA, 80 bp, synthetic construct
  source 1..80: mol_type = other DNA
gtgtacatgaagctcaaacatgtaagagcatgggttcctaggccgattaggtcacagccatatttacttaagaacttccc

SEQ ID NO: 157538 - DNA, 80 bp, synthetic construct
  source 1..80: mol_type = other DNA
attcctatatccgagtatctgttttctcgtaaggacggtaatcttctttggtgtaagtacatctaaaagctgcaaactat

SEQ ID NO: 157539 - DNA, 80 bp, synthetic construct
  source 1..80: mol_type = other DNA
cagacaacgcaactaccatctcatctttcaccaccgtaacgccaaatgctacatcttataacacaactattactgcgtca

SEQ ID NO: 157540 - DNA, 80 bp, synthetic construct
  source 1..80: mol_type = other DNA
ttagtcccctggtccctatctccacccgccaggcatgtgtgtcagtttgcagggccatcctcgcgctcaggtggactggc

SEQ ID NO: 157541 - DNA, 80 bp, synthetic construct
  source 1..80: mol_type = other DNA
gcacccagactcaaaaagtgcagctacatggagggcagccgcctcaaatccaccatgacccccaaggctgtccgtgttgt

SEQ ID NO: 157542 - DNA, 80 bp, synthetic construct
  source 1..80: mol_type = other DNA
ttctattaccccataataggctactctgcagcagagacaaaagtgtcatctgtcttctcaaatatactttacaaacactg

SEQ ID NO: 157543 - DNA, 80 bp, synthetic construct
  source 1..80: mol_type = other DNA
tggcagtcttcacccgatctggtttgagttacttaaaaagattttggatgaactagggttcccaggggatatggttagga

SEQ ID NO: 157544 - DNA, 80 bp, synthetic construct
  source 1..80: mol_type = other DNA
ctgtttgttcctcttttgctttgcccaagtatcgtattacgggtgtgcaaaaaattcaatgttccacccctatactgttt

SEQ ID NO: 157545 - DNA, 80 bp, synthetic construct
  source 1..80: mol_type = other DNA
cttggtgaaatattgaattattatgcccactggtcaggcagtgttaaactaacctttgtgttttgtggttcagccatggc

SEQ ID NO: 157546 - DNA, 80 bp, synthetic construct
  source 1..80: mol_type = other DNA
gacatgttgtgatgccatatatgtatgtcccaccatgtgctccaattccaaagactagggaggattttgcttggcaatca

SEQ ID NO: 157547 - DNA, 80 bp, synthetic construct
  source 1..80: mol_type = other DNA
gccggcattctcagcccgtcttcttaccctgttgtttcggagaatggcccaaaaattgcagatgttgagcgtggccatta

SEQ ID NO: 157548 - DNA, 80 bp, synthetic construct
  source 1..80: mol_type = other DNA
gcggccacggtggttgcgctggggacggtgtgttgactgcggcagggacggagacagggtgttgcttgcggcgtggacgg

SEQ ID NO: 157549 - DNA, 80 bp, synthetic construct
  source 1..80: mol_type = other DNA
acgggtatgataatcaagatatacacttgatagatgatttgggtcaaacaagaaaagagagggacatagaaatgctttgt

SEQ ID NO: 157550 - DNA, 80 bp, synthetic construct
  source 1..80: mol_type = other DNA
taccgctgaaataatgcgaaaagctagaacatggttttggaacaacctacaagttaagaatgacttacattccacctatg

SEQ ID NO: 157551 - DNA, 80 bp, synthetic construct
  source 1..80: mol_type = other DNA
ctgtaaggaaaccgaggacactgccgtggcctacacccaagacgcacccagtgaagcgcacaattgttaagacctcctat

SEQ ID NO: 157552 - DNA, 80 bp, synthetic construct
  source 1..80: mol_type = other DNA
tgttactagccgtactaatagcgattgcgatcatcctaaccttacaaatcgtgttctccacgtttcacatgctttaacga

SEQ ID NO: 157553 - DNA, 80 bp, synthetic construct
  source 1..80: mol_type = other DNA
gtggaggtcacttttgtgattacaagttctcaggacccatcgaccaacgtaagccaggatgctcctgtactcacacatca

SEQ ID NO: 157554 - DNA, 80 bp, synthetic construct
  source 1..80: mol_type = other DNA
tggaagtcactgctaatgatgatgtaaaagtcttcattaagccaaagcacacatcggcatggtgccccagaccacccaga

SEQ ID NO: 157555 - DNA, 80 bp, synthetic construct
  source 1..80: mol_type = other DNA
ttatgtgccatgccatatcagacaaataataaacacgtggcgcaaggttggaaaaaatatatatttgcctccaagagcag

SEQ ID NO: 157556 - DNA, 80 bp, synthetic construct
  source 1..80: mol_type = other DNA
cttccatggaagatgtgaatttgctgctagctatatgggtggtgctatgggctccctagggactcatgtagtggtgcttt

SEQ ID NO: 157557 - DNA, 80 bp, synthetic construct
  source 1..80: mol_type = other DNA
atggtgatgtcaagaagttggctgaagtcgtagcagaatcaatgtctaacactgatgatgatgaaattaaggaacaaatt

SEQ ID NO: 157558 - DNA, 80 bp, synthetic construct
  source 1..80: mol_type = other DNA
gcacaaaacccagtggaaaagttcattgatcagactctagaagaagtactggtggtgccagacacacaggcatcaggacc

SEQ ID NO: 157559 - DNA, 80 bp, synthetic construct
  source 1..80: mol_type = other DNA
gcgggccaattcgtagagccaccaagtggcatcagcctcaaggatggctgtggcctccgcgcgcccgaccaccgtcgtct

SEQ ID NO: 157560 - DNA, 80 bp, synthetic construct
  source 1..80: mol_type = other DNA
gctccagcgtcagccggttgcccatctcgaatgtgtgcagggcctctgagaccatggggtccaggatgcggtcaatgcca

SEQ ID NO: 157561 - DNA, 80 bp, synthetic construct
  source 1..80: mol_type = other DNA
cgtccaccgtgtgattacctacccgcccgtgtccacgactggctggagttcgcctccaggcccgggtactatggtccgat

SEQ ID NO: 157562 - DNA, 80 bp, synthetic construct
  source 1..80: mol_type = other DNA
cgcgaaaggacgaaccaccatcactgaaacctagaatggaggttgaattccttaaacgcaagcctggttatttcccagag

SEQ ID NO: 157563 - DNA, 80 bp, synthetic construct
  source 1..80: mol_type = other DNA
acagatcgcagctgctggatagccgtcttgtacggcttcagccgcagcgccagcgtcggcggctccgagaggcgcgtctt

SEQ ID NO: 157564 - DNA, 80 bp, synthetic construct
  source 1..80: mol_type = other DNA
gcttgatgattaacttgcaaggccgtgggagtttcacttgtcggtgtctacctcttaaggtcactaagcactccgagcgt

SEQ ID NO: 157565 - DNA, 80 bp, synthetic construct
  source 1..80: mol_type = other DNA
gtagtaatattagtacgtctatagccaaggctattgagaatggtctatctaaagatatagggtactctcttaatgtcctt

SEQ ID NO: 157566 - DNA, 80 bp, synthetic construct
  source 1..80: mol_type = other DNA
gcactgctcgtagagccattaatggtgctacgagcgtcgaatctgcagccaacaccgtcccgagttcacatcgattggag

SEQ ID NO: 157567 - DNA, 80 bp, synthetic construct
  source 1..80: mol_type = other DNA
tatcgagagcgtagcacaaaatgccctgcagttgtctcagcccaaaccctcacagcgcccagcaatcaccaacactgtgg

SEQ ID NO: 157568 - DNA, 80 bp, synthetic construct
  source 1..80: mol_type = other DNA
tttacatgcaccagctataataaatgctacacaacaaccagcaatacatggcactcaacaaattactgcagttaatggtg

SEQ ID NO: 157569 - DNA, 80 bp, synthetic construct
  source 1..80: mol_type = other DNA
aaaaagaacacatttgcccccgttgactggctgttgggttgcggtgtgatggcaggtaacattactgtttttccgcacca

SEQ ID NO: 157570 - DNA, 80 bp, synthetic construct
  source 1..80: mol_type = other DNA
gtacctcccaccatatgaatttttggagagaagatggattgacaagttcatttgaataattaaatatacatatatggtac

SEQ ID NO: 157571 - DNA, 80 bp, synthetic construct
  source 1..80: mol_type = other DNA
tgagtatactgggaccaattacatatcagagacagctaattatggtcagataaggaattatagtagatcacctcaagtta

SEQ ID NO: 157572 - DNA, 80 bp, synthetic construct
  source 1..80: mol_type = other DNA
tctcccatctggtcgggttcggggatggggacctgtttcagcgtgtgtccgcgggcgtgcatggcttttgctcgccggcc

SEQ ID NO: 157573 - DNA, 80 bp, synthetic construct
  source 1..80: mol_type = other DNA
tggttcatactcatgctgctttttgtggctgcggcaacgctggcacgcacttcgctgccctggctgaccgctacggctac

SEQ ID NO: 157574 - DNA, 80 bp, synthetic construct
  source 1..80: mol_type = other DNA
cgccattttaagtcagctctggggaggcgtgacttccagttcaaaggtcatcctcaccataactggcacaaaatggccgc

SEQ ID NO: 157575 - DNA, 80 bp, synthetic construct
  source 1..80: mol_type = other DNA
ctccgctcccctctgagccccgttaaacctaaagaatgtctgaggggagccaccctcggggcccaggccccagagtccag

SEQ ID NO: 157576 - DNA, 80 bp, synthetic construct
  source 1..80: mol_type = other DNA
aaggattaggtgatcaggaaacgcctgggttcattatagatttgctcagatcttcaaaagaccccaaagtcattcaatat

SEQ ID NO: 157577 - DNA, 80 bp, synthetic construct
  source 1..80: mol_type = other DNA
acaggcccctcttattgacgttggtgtagccccccatagtcttcctgggcccctgggaggtacatgtcccccagcattgg

SEQ ID NO: 157578 - DNA, 80 bp, synthetic construct
  source 1..80: mol_type = other DNA
gtggcttttattgatctcagacatttccattgcgctgaagaacagggcataactgattatgttcacatgcttggtgaggc

SEQ ID NO: 157579 - DNA, 80 bp, synthetic construct
  source 1..80: mol_type = other DNA
ctaaacttatactagcttacacaccacctggagctcctggacctagtaacaggaaagatgccatgctcggtacacatgta

SEQ ID NO: 157580 - DNA, 80 bp, synthetic construct
  source 1..80: mol_type = other DNA
gtttctgcggctacactgacacatccgttctgcccaccactaacgaacaacccttgcatcaccttccaggttttgaaaga

SEQ ID NO: 157581 - DNA, 80 bp, synthetic construct
  source 1..80: mol_type = other DNA
cgggggggtggccggctgcagccgggtccgaggttccgaccctggagctcgtgggcgggtgcgctcccaggccggaccct

SEQ ID NO: 157582 - DNA, 80 bp, synthetic construct
  source 1..80: mol_type = other DNA
caaatgcctactcacacttctatgacgggttttccaaaataccgttgaaagatcagtcagctgaattgggtgactcgctt

SEQ ID NO: 157583 - DNA, 80 bp, synthetic construct
  source 1..80: mol_type = other DNA
ggtaccctaacctactaaatcaacaggcagtactagaagacataagcagatcagggccctttgcatacacagaaaagaca

SEQ ID NO: 157584 - DNA, 80 bp, synthetic construct
  source 1..80: mol_type = other DNA
ggcgctttttgggcgcgctggggaccgggctgcgggttttcgggcgtgctggccgccggcgaggacggcgtgttgcggtg

SEQ ID NO: 157585 - DNA, 80 bp, synthetic construct
  source 1..80: mol_type = other DNA
ttcatggcttaaaaaatttactgaagcatgtaatgcagcacgtggattagaatggattggacaaaaaatatctaaattca

SEQ ID NO: 157586 - DNA, 80 bp, synthetic construct
  source 1..80: mol_type = other DNA
aaacctgtacttttttagacacccagaagtagactttatcataaaaataaataccatgcctccttttctagacacagaac

SEQ ID NO: 157587 - DNA, 80 bp, synthetic construct
  source 1..80: mol_type = other DNA
gcaccttcggcggtatgaagaacggttacggaaaaaccgcgcacggcgtcggcagtcttttccgtgacttggggcgatgg

SEQ ID NO: 157588 - DNA, 80 bp, synthetic construct
  source 1..80: mol_type = other DNA
ctacactggccagggttcttctcctcctctcttggtcatcctgcgggggaccaatagcttggtggcgtccggctgtggtc

SEQ ID NO: 157589 - DNA, 80 bp, synthetic construct
  source 1..80: mol_type = other DNA
tggtcaaggtcgtagactggtttgtgctaggacccgatgccgatggtgatggtgtagtcacagccgttgtgcctgtcacg

SEQ ID NO: 157590 - DNA, 80 bp, synthetic construct
  source 1..80: mol_type = other DNA
caggagaacaaagagagatgattacacagatggaggttatgtaacattgtggcttcaaacagcttttgtgtctaatgaca

SEQ ID NO: 157591 - DNA, 80 bp, synthetic construct
  source 1..80: mol_type = other DNA
cactgggacgcccctctaaactacagactactactagtatctccatacacataccccaaaatgtaccatgataacaatcc

SEQ ID NO: 157592 - DNA, 80 bp, synthetic construct
  source 1..80: mol_type = other DNA
acattggcatcggaaatgcgtatagcagtttttatgatgggtggtccagtttcaacaatacgggggtgtacggttatacg

SEQ ID NO: 157593 - DNA, 80 bp, synthetic construct
  source 1..80: mol_type = other DNA
catccaggaagcaagcaatgttgggcccacatgtggtatgggatctaggcctacaatccagttgtagcatggtagcacct

SEQ ID NO: 157594 - DNA, 80 bp, synthetic construct
  source 1..80: mol_type = other DNA
gacgcagatacgtagttagaagaaaaagaaaaaagctcataatcaaacagtggcagcccgcaaacataagaaaatgcaga

SEQ ID NO: 157595 - DNA, 80 bp, synthetic construct
  source 1..80: mol_type = other DNA
tacaaaacagaagaaccaaggctaattactcaattaatatggtggtggcacaaatgagagaagaactccagcacagaaag

SEQ ID NO: 157596 - DNA, 80 bp, synthetic construct
  source 1..80: mol_type = other DNA
cagccccatattcctcagctccgggaggtccaacacccagatgtggaccgcctacagagacatagtttacaacccactac

SEQ ID NO: 157597 - DNA, 80 bp, synthetic construct
  source 1..80: mol_type = other DNA
gaccgcgctggagacggaggcgccggtggacccgccgcagacgccgagtaccggcccgaagacctcgacgacctgttcgc

SEQ ID NO: 157598 - DNA, 80 bp, synthetic construct
  source 1..80: mol_type = other DNA
aggacgggataggtgaacacccacttgcaaaaggccttgaacttggagcttaggaggccttccttctccatcctgttcag

SEQ ID NO: 157599 - DNA, 80 bp, synthetic construct
  source 1..80: mol_type = other DNA
agcagcagctccaactcctgctcctccaaatattcaaaacacaagcaaatattcacatgaacccacgttttataagcccg

SEQ ID NO: 157600 - DNA, 80 bp, synthetic construct
  source 1..80: mol_type = other DNA
gatcaacttctgttggcaaatctttggtcctaccaccttatacacagttgaggcaacagtggcttgataactttatataa

SEQ ID NO: 157601 - DNA, 80 bp, synthetic construct
  source 1..80: mol_type = other DNA
catacgtcacaatgggggttaaaaagagggacctggtgaacaaaacaacacgtgatgtgactaaactccagaaaatgata

SEQ ID NO: 157602 - DNA, 80 bp, synthetic construct
  source 1..80: mol_type = other DNA
caaactacaaacaaagcccccagaaccctattaaaaccagaaaaactattagtacatacggattaggacccagatttggt

SEQ ID NO: 157603 - DNA, 80 bp, synthetic construct
  source 1..80: mol_type = other DNA
aaagtactgtttgatgaataccaaaagttccacaacaggtggtcctaccctaacacacaactggacctcgccagatacaa

SEQ ID NO: 157604 - DNA, 80 bp, synthetic construct
  source 1..80: mol_type = other DNA
tgatgcgggcgcctcaaataaatatggttattcatcagtaaatgacttcggcactatagctgtgaggatagttaatgagt

SEQ ID NO: 157605 - DNA, 80 bp, synthetic construct
  source 1..80: mol_type = other DNA
aaacttgaataaagtcactataggagagaagctggctccggagcagcattagagggaaaaccacggaggccgacagcaaa

SEQ ID NO: 157606 - DNA, 80 bp, synthetic construct
  source 1..80: mol_type = other DNA
tagctggatgtacagctacaccgatccccaggtgactgccacgatcatacatctgcaggcgactcttgggtgcgcaagtg

SEQ ID NO: 157607 - DNA, 80 bp, synthetic construct
  source 1..80: mol_type = other DNA
ttatatgtttgagcctaagggcccaaaacccatacagggctaccaggcctggctggatgagtatcagacagccggggcct

SEQ ID NO: 157608 - DNA, 80 bp, synthetic construct
  source 1..80: mol_type = other DNA
catgcgcggtgcccccccccggaggggctccgcccccccggcccccccccgtgctaaacccaccgcgcatgcccgaccac

SEQ ID NO: 157609 - DNA, 80 bp, synthetic construct
  source 1..80: mol_type = other DNA
ggccgccattttaagtagttgaggcggacggtggcgtgagttcaaaggtcattgtctgcgtcagctactcgaaatggcgg

SEQ ID NO: 157610 - DNA, 80 bp, synthetic construct
  source 1..80: mol_type = other DNA
ggagacgaaggtggcgccgccggaggtggccgcgacggaggagatggaggacccgccgccgcagaagaagacgacctaga

SEQ ID NO: 157611 - DNA, 80 bp, synthetic construct
  source 1..80: mol_type = other DNA
caccgccctgcggtctgggtgacattataaaaggtaaccgagctgacccgggccctgacgctctccgcgggtgtttccat

SEQ ID NO: 157612 - DNA, 80 bp, synthetic construct
  source 1..80: mol_type = other DNA
gcatgtatggatggtgagttgcttgcttttgattatacaaactatgatggcagtttgcacccaatctggttcaaagcact

SEQ ID NO: 157613 - DNA, 80 bp, synthetic construct
  source 1..80: mol_type = other DNA
cagatactgtaaaataactggatggatgcctctaataatttgtggcacaggcagagcacaagacaattttattgtgcact

SEQ ID NO: 157614 - DNA, 80 bp, synthetic construct
  source 1..80: mol_type = other DNA
tggcagagacgaaggagatggtggccacggaggagacgccgctggagacgcctacgcaccagacgacctcgacgccctgt

SEQ ID NO: 157615 - DNA, 80 bp, synthetic construct
  source 1..80: mol_type = other DNA
aactggggaaaacaagagcaattgaagcagccagtcttaatgatactgtgcagttcagaatgatctttgggaatttgttt

SEQ ID NO: 157616 - DNA, 80 bp, synthetic construct
  source 1..80: mol_type = other DNA
tgtattgtgacaacacaaaatggtaagtttacaggtttaggaatttatgatagggtattaattataccaacacatgcaga

SEQ ID NO: 157617 - DNA, 80 bp, synthetic construct
  source 1..80: mol_type = other DNA
tatacagcctctgaccaaaattgactccatcaccacattcggctttggtcaccaaaacaaagcagtgtacgtggctgggt

SEQ ID NO: 157618 - DNA, 80 bp, synthetic construct
  source 1..80: mol_type = other DNA
ataaggggttttacaagcactatggcattatagttggagagaatgtataccagttggagtcagatgacattttcaaaaca

SEQ ID NO: 157619 - DNA, 80 bp, synthetic construct
  source 1..80: mol_type = other DNA
acttggccactcaggaagatatgcagaatgcagttgcagtgatgtgggatcgcgacttgttggttgctgaaagcagggca

SEQ ID NO: 157620 - DNA, 80 bp, synthetic construct
  source 1..80: mol_type = other DNA
tgtcttttataatgtgttcccaggcagtaaggagcctgcagttcttaatgaaaatgacccaagacttgaagtcaaattgg

SEQ ID NO: 157621 - DNA, 80 bp, synthetic construct
  source 1..80: mol_type = other DNA
gcaccatggatatccaatgtcaattatagaagatgtgtgagagatgatttcaccgaaggaggttacatttgtgcatttta

SEQ ID NO: 157622 - DNA, 80 bp, synthetic construct
  source 1..80: mol_type = other DNA
ctattgaaaactttctctgtcgctcggcatgtgtgtattataccacatatgacacacacggggatgctgcggatgacaag

SEQ ID NO: 157623 - DNA, 80 bp, synthetic construct
  source 1..80: mol_type = other DNA
ccaaattgacggttggcggatgcgtccccgcagatgagcttacagacaatgtccttgaccgtgtcctcacaccgcaggcc

SEQ ID NO: 157624 - DNA, 80 bp, synthetic construct
  source 1..80: mol_type = other DNA
taaactattataaggacagcgccagtaatgcagcaagtaagcaagacttctcccaagacccctcaaaattcactgagcca

SEQ ID NO: 157625 - DNA, 80 bp, synthetic construct
  source 1..80: mol_type = other DNA
cacaaagaacaaaaattatacaatgattggaaaataaacctgtcgagcctagtgcagttgagaagaaagctggaaatgtt

SEQ ID NO: 157626 - DNA, 80 bp, synthetic construct
  source 1..80: mol_type = other DNA
ggctcactcacaggaagttccagctttaacagcggttgagacaggggctaccaacccattaaccccatctgacactgtac

SEQ ID NO: 157627 - DNA, 80 bp, synthetic construct
  source 1..80: mol_type = other DNA
cgcaggtcgtgcactgtatatcccgccttatgagctgttgcagcatgagtggtatgaaaaattttaattattacatatag

SEQ ID NO: 157628 - DNA, 80 bp, synthetic construct
  source 1..80: mol_type = other DNA
cgttcaatacaagtctatgacccgaaataccaggccccggagtacctgttccacaagtgggacttcaggaggggactctt

SEQ ID NO: 157629 - DNA, 80 bp, synthetic construct
  source 1..80: mol_type = other DNA
actttgaacaggctcttttctccaaatatgtgggaaacacgctccacgagcctgacgagtttgtcaaggaggcagcctta

SEQ ID NO: 157630 - DNA, 80 bp, synthetic construct
  source 1..80: mol_type = other DNA
cagggggcgacgaaagaagagacagaccctagtactcaaacaatggcaacccgacgttaacagactgtgcagaatcacag

SEQ ID NO: 157631 - DNA, 80 bp, synthetic construct
  source 1..80: mol_type = other DNA
cgtgagtggaagccaggggtaagatgcagccaatcctctgttgcatcttggcaatctcatcggtatacagacgagaggag

SEQ ID NO: 157632 - DNA, 80 bp, synthetic construct
  source 1..80: mol_type = other DNA
attggtaaatacagcagcaattcaaccaaacaagatgaacagtacatgtcatggacaatcaacacacgacaaatggtgca

SEQ ID NO: 157633 - DNA, 80 bp, synthetic construct
  source 1..80: mol_type = other DNA
ctttagatgataatgcattactaggaggcagactgaggttttgaccttcatatcccgttttctgaatgcatgacgttgta

SEQ ID NO: 157634 - DNA, 80 bp, synthetic construct
  source 1..80: mol_type = other DNA
aagtcccggaaaacctacaagaacaactcctccagcagctccgagagcagcagcagctcaggctccatctccagtccctc

SEQ ID NO: 157635 - DNA, 80 bp, synthetic construct
  source 1..80: mol_type = other DNA
tacctgtaatgttaaccccaggttcagcacaattcctgactacagatgatgctcaatcaccatcagccctgccctatttc

SEQ ID NO: 157636 - DNA, 80 bp, synthetic construct
  source 1..80: mol_type = other DNA
atacaggcaatctcaagtgcattcaatggaaattttgatgagttgttgaaatcgatgggttatactagtaatgacttgta

SEQ ID NO: 157637 - DNA, 80 bp, synthetic construct
  source 1..80: mol_type = other DNA
tccagccctggctcgactcgagcgaccaggaagggagcgagacagaagccccagaagaagaagcgacctcgccgccgtcg

SEQ ID NO: 157638 - DNA, 80 bp, synthetic construct
  source 1..80: mol_type = other DNA
ggaagtaggccccgtcacgtgatttgtcacgtgtgtacacgtcacagccgccattttgttttacaaaatggctgacttcc

SEQ ID NO: 157639 - DNA, 80 bp, synthetic construct
  source 1..80: mol_type = other DNA
cttgtctctgattatgtaacacagcttggtggtgcttttggggaaggtttcacagcaaacttaaaagacagcttctcctc

SEQ ID NO: 157640 - DNA, 80 bp, synthetic construct
  source 1..80: mol_type = other DNA
ctgcactacagggacatatttctgtaagagtatggatagatattacccagtgagctttaaacaccacagttggtatgaga

SEQ ID NO: 157641 - DNA, 80 bp, synthetic construct
  source 1..80: mol_type = other DNA
tgccgaaacgcacaaagcgccggacgaaacacgccgcaatcgcggaggcacgctgcgggtcccgcgaacaaagaccgtgg

SEQ ID NO: 157642 - DNA, 80 bp, synthetic construct
  source 1..80: mol_type = other DNA
gcgacacaccattcattacgcaacaggccctgtaccaaaacgaccctgagggtgcactcaatagggcggtaggtagggtg

SEQ ID NO: 157643 - DNA, 80 bp, synthetic construct
  source 1..80: mol_type = other DNA
gtcaaaggttaattttcctcatggaatgctagatttggaagaaattgctgcaaatgcaaaagaatttccgaatatgtcag

SEQ ID NO: 157644 - DNA, 80 bp, synthetic construct
  source 1..80: mol_type = other DNA
aagcggtaggagagttcaaagtggtgcaacgagcccgtccgagctcgcagcttctggcgaacaccctccacgtcatcggt

SEQ ID NO: 157645 - DNA, 80 bp, synthetic construct
  source 1..80: mol_type = other DNA
gccaggggcagtgaggccaccacgctggaaagtgactcggggcggtgaaagagaccgccaccgccgctttcttcaccctc

SEQ ID NO: 157646 - DNA, 80 bp, synthetic construct
  source 1..80: mol_type = other DNA
acagagtgttgttatcatggatgacattatgcaaaatcccaatggtgaagatatgacactattttgccagatggtctcaa

SEQ ID NO: 157647 - DNA, 80 bp, synthetic construct
  source 1..80: mol_type = other DNA
ccacggcacgacatatgttttgactgcaacgacacctccctaactatctacaacttaaccacaaaaaacgctggaaaata

SEQ ID NO: 157648 - DNA, 80 bp, synthetic construct
  source 1..80: mol_type = other DNA
agaggaagccgccgcagccagtgtcgaggacacacgcagcctcgaagggacagaaagaggaaggtccccggggacggccg

SEQ ID NO: 157649 - DNA, 80 bp, synthetic construct
  source 1..80: mol_type = other DNA
tgagtaatggagagacagccaacctattcgaatcccaaaattcctccgggcaaacggccgtacaagccaatgtgattaat

SEQ ID NO: 157650 - DNA, 80 bp, synthetic construct
  source 1..80: mol_type = other DNA
gtgaccatgaatttactaatggtaacctctggagaagtcaattaaccttcccaaaacaaggtcacggtatgttatcacaa

SEQ ID NO: 157651 - DNA, 80 bp, synthetic construct
  source 1..80: mol_type = other DNA
ttggtgggggtctctgcacagcccaatactccctcagaattctcttccaagacaaactagcacaacacaacttctggacc

SEQ ID NO: 157652 - DNA, 80 bp, synthetic construct
  source 1..80: mol_type = other DNA
cgtcctgcagaccgaggcgctggacgccattatggaagagggcgcgcgtctggacgcgcggctagagcgcgagttgcaaa

SEQ ID NO: 157653 - DNA, 80 bp, synthetic construct
  source 1..80: mol_type = other DNA
ccaaatactaccacgacagaggactacacaaagaagtaagaataacaattcagtgcccctacactgaccctccgctgtat

SEQ ID NO: 157654 - DNA, 80 bp, synthetic construct
  source 1..80: mol_type = other DNA
tattgaaagtttagtttaaaggttaccttaacttggtcttggggttttggtacccaggggtagaagggaaggtctgagtg

SEQ ID NO: 157655 - DNA, 80 bp, synthetic construct
  source 1..80: mol_type = other DNA
cttccaggtccttaattccgtttacaacaactacctcagtattaatacctttaataatgacaactcagactcaaagttaa

SEQ ID NO: 157656 - DNA, 80 bp, synthetic construct
  source 1..80: mol_type = other DNA
ggaggaaacacttacattccagcaagatggagaggaaggtggtacccagcactatggaaccaacaacaagtactagaaga

SEQ ID NO: 157657 - DNA, 80 bp, synthetic construct
  source 1..80: mol_type = other DNA
catagctacaacaaataaatctgatttctccagtaccgtacttcaagattctggtgcacttaagaggagattcccataca

SEQ ID NO: 157658 - DNA, 80 bp, synthetic construct
  source 1..80: mol_type = other DNA
tgttaagtacaaatacacccatccaggtgaacaaggtatagatctgaatagtacagctgaagaagggggagcatcacatg

SEQ ID NO: 157659 - DNA, 80 bp, synthetic construct
  source 1..80: mol_type = other DNA
acaaccttccaggtgttgcgagatcccttttataaagcaataggctttggcagcactaaagataagcagattgaagtact

SEQ ID NO: 157660 - DNA, 80 bp, synthetic construct
  source 1..80: mol_type = other DNA
ggtttgtgaggtgggagataaacaacaaggaattggttcagctcagaaggaagtgtgaaatgttcacgtaccttcgctac

SEQ ID NO: 157661 - DNA, 80 bp, synthetic construct
  source 1..80: mol_type = other DNA
agcccacaagatccctcgcacgcgcctcaaagtgttagtcgaggtgctgggcgcgttgcagagtatcagcggtacgccgc

SEQ ID NO: 157662 - DNA, 80 bp, synthetic construct
  source 1..80: mol_type = other DNA
ctgcggccagtgaggatgatcctcaatctgggccagtggaagagaatttagatgccgctgcaagagaggaagaggaacct

SEQ ID NO: 157663 - DNA, 80 bp, synthetic construct
  source 1..80: mol_type = other DNA
cctttcctattccctttgttttgtttgtaaatattaattcctgcaggttcagggttcttaaatctgtttctctataaaaa

SEQ ID NO: 157664 - DNA, 80 bp, synthetic construct
  source 1..80: mol_type = other DNA
ctcccgaggtcgtggggccggagccttataaaagacttccaccctctccccgctggccaagacacgccgctcgtggacca

SEQ ID NO: 157665 - DNA, 80 bp, synthetic construct
  source 1..80: mol_type = other DNA
gttgactttgcggtgacgcccattactgattataggacagacatcaacactgtgacaaacctgacttcccatggagcttt

SEQ ID NO: 157666 - DNA, 80 bp, synthetic construct
  source 1..80: mol_type = other DNA
caagcacagacaccccagtgctcacacatcaagtgatgtatgtgccacccggaggccccatacctgcgtcatatgaagac

SEQ ID NO: 157667 - DNA, 80 bp, synthetic construct
  source 1..80: mol_type = other DNA
gtacgcggagacaactgctcaggattaagagaggaggagatagtcatatgtcagttcaatatgacaggattaataagaga

SEQ ID NO: 157668 - DNA, 80 bp, synthetic construct
  source 1..80: mol_type = other DNA
actcaactggagttgtcaccctgtggtaccaaacaaatttcgtagtgcctgatggagctcccacaaccgcaaacattata

SEQ ID NO: 157669 - DNA, 80 bp, synthetic construct
  source 1..80: mol_type = other DNA
tattggaactggatcggctgttggctgtgatccagatgtgttttggtcccagatatatgccaacatggatgggtgtctga

SEQ ID NO: 157670 - DNA, 80 bp, synthetic construct
  source 1..80: mol_type = other DNA
aagcacaaggaacacaaccacaaacgccaccgcagccacaaccacaatcagagccacaaccatagcaccaaggaacacaa

SEQ ID NO: 157671 - DNA, 80 bp, synthetic construct
  source 1..80: mol_type = other DNA
caccctttatatcgcagcaaagttttcttcaaggtccggttgaagatgcaataacggccgcaattggcagggttgccgat

SEQ ID NO: 157672 - DNA, 80 bp, synthetic construct
  source 1..80: mol_type = other DNA
agcatacaatacaaacaaccttttaaatgttgctaaggctttgctaccatgtactgactgtccaaaaccagagttttaca

SEQ ID NO: 157673 - DNA, 80 bp, synthetic construct
  source 1..80: mol_type = other DNA
ggatctcagacgtggtctctatggcgagaaagctatcaaaagaatgcgagaacaaccgatccctcctgaattttttgcag

SEQ ID NO: 157674 - DNA, 80 bp, synthetic construct
  source 1..80: mol_type = other DNA
cagaatgccgctgggaaatagaagacatgcccctgtgggccctctgcaacgggtacgtagagtacctagagagtcagata

SEQ ID NO: 157675 - DNA, 80 bp, synthetic construct
  source 1..80: mol_type = other DNA
caaccaacagcatatttaacacttcaaaaaacattatacactacctgcacattctttgaaacaacacaagtactagccca

SEQ ID NO: 157676 - DNA, 80 bp, synthetic construct
  source 1..80: mol_type = other DNA
aagcagagtacttataccactacccaaacaatgtcacacaggtagacttcatagatgaccccacactcacacatgacttt

SEQ ID NO: 157677 - DNA, 80 bp, synthetic construct
  source 1..80: mol_type = other DNA
cgtttgtgattacaagtcgccaggagcaagggaccaaactgtcgcagaacatgccagtattaacacatcagatcatgtat

SEQ ID NO: 157678 - DNA, 80 bp, synthetic construct
  source 1..80: mol_type = other DNA
attttactggtgagttaaacatacatgtcttgttcctaagtgaaagaggttttttgagggttgcacatacctatgacact

SEQ ID NO: 157679 - DNA, 80 bp, synthetic construct
  source 1..80: mol_type = other DNA
aatatttaatggcacctctacaacactatctacttggctcacaggaaagggcaacagtaaattccaaactggagacagca

SEQ ID NO: 157680 - DNA, 80 bp, synthetic construct
  source 1..80: mol_type = other DNA
tcaatggttgtcccatggattagtgctagtcactacaggaataccacaccagataagtactccttagcaggttacataac

SEQ ID NO: 157681 - DNA, 80 bp, synthetic construct
  source 1..80: mol_type = other DNA
tccaaagagccaacggactaccatgagctggtccagacccgtgcaaaatgtttctatttgtgagcaacactgctttaagt

SEQ ID NO: 157682 - DNA, 80 bp, synthetic construct
  source 1..80: mol_type = other DNA
cctgacacatactcattagctggatttataacatgttggtatcagactaatcttgttgttcctccagacactccatctac

SEQ ID NO: 157683 - DNA, 80 bp, synthetic construct
  source 1..80: mol_type = other DNA
cgcggcgtgtgtggcgttatgtccacggcgcttagtgttgcggccgacgcgttgtgcctttgtgcgcactgccggtgcgt

SEQ ID NO: 157684 - DNA, 80 bp, synthetic construct
  source 1..80: mol_type = other DNA
aacaccagcacgtactgcagaacccatcccctgtgagaacccccaacagcctccgtagagccagggctctgcccgcggct

SEQ ID NO: 157685 - DNA, 80 bp, synthetic construct
  source 1..80: mol_type = other DNA
taatgaagccaatccagtagatgcacccacggaaccagacgcctcagccaatagattttataccttagagagcgtcaact

SEQ ID NO: 157686 - DNA, 80 bp, synthetic construct
  source 1..80: mol_type = other DNA
ttcgttgacaagttcgtggctagcgcccagaccagcccttcgcgcaaattctgtgctgtagattacctcttaggatgtgg

SEQ ID NO: 157687 - DNA, 80 bp, synthetic construct
  source 1..80: mol_type = other DNA
cccagggggggtggtaccgcgcagtgtggatgactatagttggcagacttccaccaatcccagcatcttctggacagaag

SEQ ID NO: 157688 - DNA, 80 bp, synthetic construct
  source 1..80: mol_type = other DNA
gccaaagcaatgacacttggtactatggtaacacatacaaagacaacatatcacaactcacagaaaaaaccagacagcga

SEQ ID NO: 157689 - DNA, 80 bp, synthetic construct
  source 1..80: mol_type = other DNA
aagaacagacacttcatgaaattcagggaagagattaagacaacatatccactcgtttcagcagggcctagtgatttgtg

SEQ ID NO: 157690 - DNA, 80 bp, synthetic construct
  source 1..80: mol_type = other DNA
aacatgagacagaggtctgaagcatctgttgaatcattctttggccgttccgcatgtgtagcaatacttggattatcaaa

SEQ ID NO: 157691 - DNA, 80 bp, synthetic construct
  source 1..80: mol_type = other DNA
aagagggcactgtcactgcgcggcctgcgaactccagaggcaaaaccacctgctatgagttggaggcccccggtgcacaa

SEQ ID NO: 157692 - DNA, 80 bp, synthetic construct
  source 1..80: mol_type = other DNA
gagacaattgaaacagtcatcagcaatgccctacaactgtctcaacccaaaccacaaaagcagcccattgctcagtcaac

SEQ ID NO: 157693 - DNA, 80 bp, synthetic construct
  source 1..80: mol_type = other DNA
gttaccccggagcggagtatagatggccaccgctgtcaaaagctcttaaccgttacccgccagttaactacgcaacggct

SEQ ID NO: 157694 - DNA, 80 bp, synthetic construct
  source 1..80: mol_type = other DNA
gtgggcgcgcgagccgcacgggcagtgggagttcatgtttcgcgaacaacgcggtgaccccataaatgatcccgtcgcat

SEQ ID NO: 157695 - DNA, 80 bp, synthetic construct
  source 1..80: mol_type = other DNA
atatatagttgagggcgggatgccctctggttgttcaggaaccagtatatttaactccatgatcaataacataatcataa

SEQ ID NO: 157696 - DNA, 80 bp, synthetic construct
  source 1..80: mol_type = other DNA
gggcattacccattgcgccaagttggtggtggaatgcggtcagttggggagtagtaggctacggtggcgcgacggtgatg

SEQ ID NO: 157697 - DNA, 80 bp, synthetic construct
  source 1..80: mol_type = other DNA
aacgaaacacagtgcaaatgtgtactaactgacctgcccctgtggtccctgttttatggatacgtagactttatagagtc

SEQ ID NO: 157698 - DNA, 80 bp, synthetic construct
  source 1..80: mol_type = other DNA
tgttggatagcgtaatggatgcagtactgttagcagtactgttgcatgtaactttatgcaacatacaaaatactataatt

SEQ ID NO: 157699 - DNA, 80 bp, synthetic construct
  source 1..80: mol_type = other DNA
ctgtgccatttataccacctatggctgacctaccagacaaaggaaaaccattttcatcagactatgtgcttgcaagcact

SEQ ID NO: 157700 - DNA, 80 bp, synthetic construct
  source 1..80: mol_type = other DNA
aagcacaattcctatcactatttctattagtcccatgtttgctgagttttcgggtgcacgagcaaaaagtcaaggactgc

SEQ ID NO: 157701 - DNA, 80 bp, synthetic construct
  source 1..80: mol_type = other DNA
gtcgcgcgccttgcgcacggcctccaacacgggcaggtggtagagttcggcgtcgcgcgcgcccaggctcatggagtcct

SEQ ID NO: 157702 - DNA, 80 bp, synthetic construct
  source 1..80: mol_type = other DNA
attatgctgctcaactcagtgttttaaatatttccccagaaccattatcattagagcaggctgtatgtggcattaaaaat

SEQ ID NO: 157703 - DNA, 80 bp, synthetic construct
  source 1..80: mol_type = other DNA
tgtcaagtggatagcttagtaccaataaacaatactgaaaataacatcaccaacggggacatgtattcagtcatattgca

SEQ ID NO: 157704 - DNA, 80 bp, synthetic construct
  source 1..80: mol_type = other DNA
aaaggaccctccattccagtggatgggttatgagctctggccaaagaagtggaagctgcaaaaaatacaaataccagaaa

SEQ ID NO: 157705 - DNA, 80 bp, synthetic construct
  source 1..80: mol_type = other DNA
acaatactaaacagaaacccctgggacaaaacccccacggtggcggcatgtccaccaccaccttctcactagaggtgctg

SEQ ID NO: 157706 - DNA, 80 bp, synthetic construct
  source 1..80: mol_type = other DNA
tatccagaaatgagaaatttagagatattaggaaatacataccaaactcagaagatgattataccaactgcaacttagct

SEQ ID NO: 157707 - DNA, 80 bp, synthetic construct
  source 1..80: mol_type = other DNA
tcacctcaaactacattgatgcaaataacggacatgcattgaaccaagtttatcagataatgtatataccacccggagca

SEQ ID NO: 157708 - DNA, 80 bp, synthetic construct
  source 1..80: mol_type = other DNA
gatgctggccgtttgtatgcttattcagtgtcacatgctgacccgaacactaataggcctgccccctggggcattaagga

SEQ ID NO: 157709 - DNA, 80 bp, synthetic construct
  source 1..80: mol_type = other DNA
gctgataaatctagtacatttgtaaaattggactacagcaatgtcactttcctgaaaagagggtttaaacaagatgaaaa

SEQ ID NO: 157710 - DNA, 80 bp, synthetic construct
  source 1..80: mol_type = other DNA
aaggaccaggctgcctacactggcctcaaaccagttcccaaaccccgctccaaactctttggtggcaaacctggcggacc

SEQ ID NO: 157711 - DNA, 80 bp, synthetic construct
  source 1..80: mol_type = other DNA
tgaccaaagttgcagatgatgcatctaatatattgggaccaaattgctttgccacaactgctgcaccagagtacaaaaat

SEQ ID NO: 157712 - DNA, 80 bp, synthetic construct
  source 1..80: mol_type = other DNA
ctgaatgttgtttggctggagattccaacacaaaaactaactatacaacttatgtaaatgcaaaccctggggaagctggg

SEQ ID NO: 157713 - DNA, 80 bp, synthetic construct
  source 1..80: mol_type = other DNA
tatcccgtaccctgagtgcaatagcaacttgttctatatccaagacagttctcttaccacatgtctaaatgaaatattga

SEQ ID NO: 157714 - DNA, 80 bp, synthetic construct
  source 1..80: mol_type = other DNA
aaaactatacaacgatgcaaacccaaactacgggtacgtgtgcttctcctaccagttcggggcgggacagatgcctgacg

SEQ ID NO: 157715 - DNA, 80 bp, synthetic construct
  source 1..80: mol_type = other DNA
aggcctcattcgcctctcgcgctcgccgctcccgcctctccttgtcttcctgttctcggagcttctccttttccttgcgc

SEQ ID NO: 157716 - DNA, 80 bp, synthetic construct
  source 1..80: mol_type = other DNA
aattcaacccaaccagggtcactgccaaggtaagagtttacatgaaaccaaagcacattcgttgctggtgtccacgccca

SEQ ID NO: 157717 - DNA, 80 bp, synthetic construct
  source 1..80: mol_type = other DNA
agctcgagcgccgaccagttctccatcgcggcggcggcgtgagcgcgaggcgtcggagctcggggaaagcagcgcgaccc

SEQ ID NO: 157718 - DNA, 80 bp, synthetic construct
  source 1..80: mol_type = other DNA
ccagcccctgcgtatgtaccagtccaagcacgtccggtcattgttctacacaggaaatctaactaggtcaacgtaatttt

SEQ ID NO: 157719 - DNA, 80 bp, synthetic construct
  source 1..80: mol_type = other DNA
aagagggccattaaaattaaaataaagccacctaaactaatgctaaacaaatggtactttgcaagagacacgtgtagaat

SEQ ID NO: 157720 - DNA, 80 bp, synthetic construct
  source 1..80: mol_type = other DNA
gcggctgctgtgaaaatgagcgcggttttataggcattaggacttcccgatcgtactggcggctgtcaaagtcccgttgt

SEQ ID NO: 157721 - DNA, 80 bp, synthetic construct
  source 1..80: mol_type = other DNA
ccgcgcctgtaaccgaaaccaggaagaaaattgatgaagtacctggcgtcactcattcgcgtcttagcagtcatggtgct

SEQ ID NO: 157722 - DNA, 80 bp, synthetic construct
  source 1..80: mol_type = other DNA
cgatgagcagcgccagccccacgcgcacgaagcccctgaggtcgcgcgccagccgcaccaacttatcctgccccaccagc

SEQ ID NO: 157723 - DNA, 80 bp, synthetic construct
  source 1..80: mol_type = other DNA
tggggtggcaccaccgtccattcgcagatcatcaggaacccctgcacggacaaccagctatctcccgacccccgtagacg

SEQ ID NO: 157724 - DNA, 80 bp, synthetic construct
  source 1..80: mol_type = other DNA
acacaacccgatgtggccacgtgtaggttctatacattggaatcagtgacttgggagagggactcaccaggatggtggtg

SEQ ID NO: 157725 - DNA, 80 bp, synthetic construct
  source 1..80: mol_type = other DNA
gctactagagaccaagaaagacataagaaatggatagaaatgtatcatacaaccagataccatctcaccacccacataaa

SEQ ID NO: 157726 - DNA, 80 bp, synthetic construct
  source 1..80: mol_type = other DNA
tttattaaacggactccgaagtgctcttggacactgagggggtgaacagcaacgaaagtgagtggggccagacttcgcca

SEQ ID NO: 157727 - DNA, 80 bp, synthetic construct
  source 1..80: mol_type = other DNA
gaagaacacctaagaaaactaaggctcatccgtctcctgcatcagacaagtgagtaaaaatgtgtggtaagaatctattg

SEQ ID NO: 157728 - DNA, 80 bp, synthetic construct
  source 1..80: mol_type = other DNA
agctccacctagtggaggaaattatccagtgcagcaagtaggtggaaattatgtccacttaccattaagccccagaactt

SEQ ID NO: 157729 - DNA, 80 bp, synthetic construct
  source 1..80: mol_type = other DNA
aaagtagactttataatgacattcaacaccatccctccaatgcaaatgaacgaactgacagctccaaatacacacccggg

SEQ ID NO: 157730 - DNA, 80 bp, synthetic construct
  source 1..80: mol_type = other DNA
tgatgtagattcagatgatgaaaacatggtaggggtccctgttacatcaagagtaccattaagagcaatgacacatagat

SEQ ID NO: 157731 - DNA, 80 bp, synthetic construct
  source 1..80: mol_type = other DNA
gtcagcacagccagagatgcccactgcagtactagcatggagaggtttgagaatctgggctgggacgttggcgtgacagg

SEQ ID NO: 157732 - DNA, 80 bp, synthetic construct
  source 1..80: mol_type = other DNA
tcataacaaccagggaaagtatcaagaatgtgggacccagtgatatgtacgtccatacccaagatgcaaggtacatgtgt

SEQ ID NO: 157733 - DNA, 80 bp, synthetic construct
  source 1..80: mol_type = other DNA
aaacacatcagcctctcccccaacctctccaaccacagaagggctgataaatgaaacttctccatgcatacgaaataaca

SEQ ID NO: 157734 - DNA, 80 bp, synthetic construct
  source 1..80: mol_type = other DNA
aattagtagcagaagaataccgcacagtatatactacaagtgccacatacccaccaacatggcaaaatagacaataccta

SEQ ID NO: 157735 - DNA, 80 bp, synthetic construct
  source 1..80: mol_type = other DNA
gtaatattagatgattggcgcaagtaaaggagaatttgcccgtgcggacccgcgggacggcggggttctcttcgtcgcgg

SEQ ID NO: 157736 - DNA, 80 bp, synthetic construct
  source 1..80: mol_type = other DNA
actgcatttatggttacaagcttgtaaatacagacttgtaatcatgggtgcccaggtcagcaaacagagtgttggagcgc

SEQ ID NO: 157737 - DNA, 80 bp, synthetic construct
  source 1..80: mol_type = other DNA
ccaattctaaactatttgccaagtggaacattacatacaccgatacggtacaattgagaaggaaattagagatgttcaca

SEQ ID NO: 157738 - DNA, 80 bp, synthetic construct
  source 1..80: mol_type = other DNA
agaaaagagacttgatcaacaagcaaacaaaagacatcaccaaactcaagatagccctagataaatatggtgttgatctg

SEQ ID NO: 157739 - DNA, 80 bp, synthetic construct
  source 1..80: mol_type = other DNA
gatgggaccaactactttgggtgtccgtgtttccttttattcttacaattttccctatggttacaagcttatggtcatag

SEQ ID NO: 157740 - DNA, 80 bp, synthetic construct
  source 1..80: mol_type = other DNA
ggatctcttagaatctctctgatgtacactggcccagctttatctagtgccaaactcatcttggcatatacacctccagg

SEQ ID NO: 157741 - DNA, 80 bp, synthetic construct
  source 1..80: mol_type = other DNA
ctcacgaaaatgcaatcaatgcaaacagtggctctatagttaaatatttcaacattaactactacaaagatgcagccagt

SEQ ID NO: 157742 - DNA, 80 bp, synthetic construct
  source 1..80: mol_type = other DNA
aagcatgtcaaagcatggtgtccacgacctccaagggctgttggatatacacacacacatgtcaccaattacaaaccatc

SEQ ID NO: 157743 - DNA, 80 bp, synthetic construct
  source 1..80: mol_type = other DNA
attcccagctacgacactaaccccaggggtcgccaaaaagtagtagttaagattcccccccccaaactgttcgttgataa

SEQ ID NO: 157744 - DNA, 80 bp, synthetic construct
  source 1..80: mol_type = other DNA
ttgcacccgacaaatcagagttctcaggtgcacgccagagcaaccgaactcaaggattacctgttagattggcaagtggt

SEQ ID NO: 157745 - DNA, 80 bp, synthetic construct
  source 1..80: mol_type = other DNA
tggcaaccgaaacgcccccgaatctttacagagccccagctcccagagctcgtcgccgtctccggttcgagggaagaaaa

SEQ ID NO: 157746 - DNA, 80 bp, synthetic construct
  source 1..80: mol_type = other DNA
aaataatgtcagtatgtacaccgtcatgctatcaacccagacacaaactgctcaggagatattcgctatcccagttgata

SEQ ID NO: 157747 - DNA, 80 bp, synthetic construct
  source 1..80: mol_type = other DNA
tagcttattacaattggattttcaaaatccacgcccttatggtgaagatgtggaaatttatgataatggaccaaataagg

SEQ ID NO: 157748 - DNA, 80 bp, synthetic construct
  source 1..80: mol_type = other DNA
tgttttttacgccgtggaaactgacgcggttattggccgtgaattccagctcgctgccgttggtcaggatgaatttgatg

SEQ ID NO: 157749 - DNA, 80 bp, synthetic construct
  source 1..80: mol_type = other DNA
ggaccgtggccgtgcgcattgtgaatgagcatgatccagtcaaaatagagtcaaaagtaagggtctacttaaagcctaaa

SEQ ID NO: 157750 - DNA, 80 bp, synthetic construct
  source 1..80: mol_type = other DNA
tcaccaaagagggagtttcaaccagtggactatttgtttggatgtggtgtgctaaccgggaacgcctttgtcttcccaca

SEQ ID NO: 157751 - DNA, 80 bp, synthetic construct
  source 1..80: mol_type = other DNA
tagcttcctatccctttccattagatgctagagaactttctataacaggtaagaagtatggactcaccataactccacct

SEQ ID NO: 157752 - DNA, 80 bp, synthetic construct
  source 1..80: mol_type = other DNA
actgtacctactgtcccacaaattccttagtatcaaaaataaaagaatacagaaaaaaaagatttcagtggctaacaacc

SEQ ID NO: 157753 - DNA, 80 bp, synthetic construct
  source 1..80: mol_type = other DNA
ctacaacgggtttgcagtcctcagagcagaaaatggacatcaacacctttccatctcctttgaaaccgataaacaaatat

SEQ ID NO: 157754 - DNA, 80 bp, synthetic construct
  source 1..80: mol_type = other DNA
cccgcgacacacccgccacacccagccgcacccggcacacacccacccagccgcacccccgccacacccagaccgacgcc

SEQ ID NO: 157755 - DNA, 80 bp, synthetic construct
  source 1..80: mol_type = other DNA
gggagttcaagaatgaagcaccttatgatggacaactggagcacattatttcccagatggcttatattactggttcaacc

SEQ ID NO: 157756 - DNA, 80 bp, synthetic construct
  source 1..80: mol_type = other DNA
tctctcaaaggtggggagggaggagctctccacaacaatgttccctggcagcgtgagcgcgcagccctgccgttggatgt

SEQ ID NO: 157757 - DNA, 80 bp, synthetic construct
  source 1..80: mol_type = other DNA
tgatgactcggttgatagtcacatcaaagtctatattaaaccaaagcatataacagcctggatacccagaccaccaaggg

SEQ ID NO: 157758 - DNA, 80 bp, synthetic construct
  source 1..80: mol_type = other DNA
gccggtgggtggaccggcgatgcggtggcgtgtgaggcggcgcgcgtcttccccgtcgttgctgccgcgtgtggttgagg

SEQ ID NO: 157759 - DNA, 80 bp, synthetic construct
  source 1..80: mol_type = other DNA
gatcccacgagaatggaaacatcgcgacagggggttctacaataaactacaccaacatcaactattatagagattcctat

SEQ ID NO: 157760 - DNA, 80 bp, synthetic construct
  source 1..80: mol_type = other DNA
agtacaacccaacgcgagtcacagccaaagtgagggtttacatgaagccaaagcacatccgttgctggtgcccgcgccca

SEQ ID NO: 157761 - DNA, 80 bp, synthetic construct
  source 1..80: mol_type = other DNA
aagattatcaagagaggcagaaaaactacgattcctggaaacaacagttggaaaaccagactttagacgatttggatgat

SEQ ID NO: 157762 - DNA, 80 bp, synthetic construct
  source 1..80: mol_type = other DNA
ttcagcaacaagcaacgtcacgtcacatgtcacagacatgaaagtaacaacagtcaccataactccgaccgtagtaacaa

SEQ ID NO: 157763 - DNA, 80 bp, synthetic construct
  source 1..80: mol_type = other DNA
aaaggaaactgcttctgcaggctgtgcgtgctccacagacgccaccttccatgagccgctgctggtgtccgcctcggggt

SEQ ID NO: 157764 - DNA, 80 bp, synthetic construct
  source 1..80: mol_type = other DNA
ggcagacttcatcaaatccttcaatattttacacatatggcacagctccggcccgcatatcagttccatatgttggtatc

SEQ ID NO: 157765 - DNA, 80 bp, synthetic construct
  source 1..80: mol_type = other DNA
gtacaggtgttggccgttgtgcccggacgggagatcgagtcccgtgatcggatcgccaagatatgcgacaattttgctat

SEQ ID NO: 157766 - DNA, 80 bp, synthetic construct
  source 1..80: mol_type = other DNA
gtaaacctatggatttggccatcctcaagtgcaaactaccttttaggttcaagaagaattccaaatactataccaataaa

SEQ ID NO: 157767 - DNA, 80 bp, synthetic construct
  source 1..80: mol_type = other DNA
gatttccgtgccttccggactacaaaaatggccgttccgtaacgtcacagccgccattttgagtcagcgcgggggggggt

SEQ ID NO: 157768 - DNA, 80 bp, synthetic construct
  source 1..80: mol_type = other DNA
cagttgtacaggggccccaacacgaatttgttacctcattaattcgtagaaactgccatgtagtcacaaccagtagaggt

SEQ ID NO: 157769 - DNA, 80 bp, synthetic construct
  source 1..80: mol_type = other DNA
ggactgttaaacactgctaaagcactacagaggtgtgatgggtgtccaacccctccttactataaatcctgctgtcctat

SEQ ID NO: 157770 - DNA, 80 bp, synthetic construct
  source 1..80: mol_type = other DNA
gtaaggtgaacaacgcggccgagatgaccaacgtaccgtccaggcagagacatatcacgatcaacggcggcacgtgaagc

SEQ ID NO: 157771 - DNA, 80 bp, synthetic construct
  source 1..80: mol_type = other DNA
accactagagatgtaccagaaagaaacaagtatggcatttctccaacaaatgacatgggaaccctgtgttttcgagctct

SEQ ID NO: 157772 - DNA, 80 bp, synthetic construct
  source 1..80: mol_type = other DNA
agggtcggcatctttgaggagctatgtaaggcagttgaatcaaggtacgaggtagtcggtacatcggtcattataatggc

SEQ ID NO: 157773 - DNA, 80 bp, synthetic construct
  source 1..80: mol_type = other DNA
gctagagcagcctaaccccccgcagcagggcccggccgggcccggagggccgcccgccatcttggcgctgccggctccgc

SEQ ID NO: 157774 - DNA, 80 bp, synthetic construct
  source 1..80: mol_type = other DNA
aagcaagtgcctagtagcagacctaccactgtgggcagcagcatatgggtatttagaattctgctctaaaagcacaggag

SEQ ID NO: 157775 - DNA, 80 bp, synthetic construct
  source 1..80: mol_type = other DNA
aacgcagagtaaggaggagacggtggggaaggagacgagggcgacggacattttacagacgcaggcttagaaagagacgc

SEQ ID NO: 157776 - DNA, 80 bp, synthetic construct
  source 1..80: mol_type = other DNA
attctgcttcaaaccctagcgtgttttaccaaccacactctggattccccagatttaccattcctttcaccggtattgct

SEQ ID NO: 157777 - DNA, 80 bp, synthetic construct
  source 1..80: mol_type = other DNA
aatgacccagcacaagcaatacagagtgcagtgggtcgtgttgcggacacgatagcaagtgggccgtcaaactcggagag

SEQ ID NO: 157778 - DNA, 80 bp, synthetic construct
  source 1..80: mol_type = other DNA
attccaccgttacgcagaatactaacaaaaaactacacaaatgtaacggattacacataatttattacgtgaaaactgta

SEQ ID NO: 157779 - DNA, 80 bp, synthetic construct
  source 1..80: mol_type = other DNA
cagcccatagaggacaggtaccaagtttacagtttctagccctaagggttgtgcaagaaggaggaaatggaccccaggga

SEQ ID NO: 157780 - DNA, 80 bp, synthetic construct
  source 1..80: mol_type = other DNA
actatcataacagtgccatggccaacagtgcaccatatcggtccagtatcaaccaagccaacatggggaaatttggccac

SEQ ID NO: 157781 - DNA, 80 bp, synthetic construct
  source 1..80: mol_type = other DNA
gagtgcatcctcggcggaacctgcacaaaatggcggtcaatatcttccgggtcaaaggtcacacctacgtcataagtcac

SEQ ID NO: 157782 - DNA, 80 bp, synthetic construct
  source 1..80: mol_type = other DNA
ccctcgatgcgcgcggggcccccccccactgccgccccccggccccccccccgaagtacgtcactaaccacgtgaatctc

SEQ ID NO: 157783 - DNA, 80 bp, synthetic construct
  source 1..80: mol_type = other DNA
cgacccccgcgtcccgaggacgggtgccgaaggtgagtttacacaccgaagtcaaggggcaattcgggctcgggactggc

SEQ ID NO: 157784 - DNA, 80 bp, synthetic construct
  source 1..80: mol_type = other DNA
gggagagactcttgcgagtgcggtggagacagtctgggaagccctcaggagaacggcaagagcgatcatcgcgatcccca

SEQ ID NO: 157785 - DNA, 80 bp, synthetic construct
  source 1..80: mol_type = other DNA
ggatatttatgacaacaacaatgacaccaaggctagacaacttaggaaaaagaaatggttaactatgtctacaaaatata

SEQ ID NO: 157786 - DNA, 80 bp, synthetic construct
  source 1..80: mol_type = other DNA
agtccacaccacccccagaatgcattaacgatttgctgcaggctgtggacagtcaagaagttagaaattactgtgagaag

SEQ ID NO: 157787 - DNA, 80 bp, synthetic construct
  source 1..80: mol_type = other DNA
acggagcgtcgcgcggggggccttttgcggcggggacttgcggacttttgagtcggggacagtagtgaggacggggacgg

SEQ ID NO: 157788 - DNA, 80 bp, synthetic construct
  source 1..80: mol_type = other DNA
cactaattctaccttatgttaatgcagtgcccatggattccatgataagacataacaattggagtattgttataatacca

SEQ ID NO: 157789 - DNA, 80 bp, synthetic construct
  source 1..80: mol_type = other DNA
cccaggaggttactacgccgggcccgcgggcgtggacccgggtgccttcttggcgatggacgctcacacctaccaccccc

SEQ ID NO: 157790 - DNA, 80 bp, synthetic construct
  source 1..80: mol_type = other DNA
caaccggcaaactaatcttaacatactctccaccaggagccagtccacccaagaccagaaaagacgctatgctgggaaca

SEQ ID NO: 157791 - DNA, 80 bp, synthetic construct
  source 1..80: mol_type = other DNA
tgcaaacactgggatagaccccctcgtaagttccacacagacactcctttctatccctgggcccctaaaccccatcctta

SEQ ID NO: 157792 - DNA, 80 bp, synthetic construct
  source 1..80: mol_type = other DNA
cagagtatactataatagctaccagttcccaaccagatgatgcaaattattcaagtaatcttactgtccaagcaatgttt

SEQ ID NO: 157793 - DNA, 80 bp, synthetic construct
  source 1..80: mol_type = other DNA
caaacgccacacttggactaagcccaccaatgactactacgaataccacctaggcctgtttagccctatattcataggac

SEQ ID NO: 157794 - DNA, 80 bp, synthetic construct
  source 1..80: mol_type = other DNA
gataaggttatcaataacgctctgcaactttctcaacccactcgactcaccaccacgacagacacgcctagtacaagtgg

SEQ ID NO: 157795 - DNA, 80 bp, synthetic construct
  source 1..80: mol_type = other DNA
actgaccagctactttattgaccactacatttacaacaacagtaatttttgaaatgcttctagttaatatataccataat

SEQ ID NO: 157796 - DNA, 80 bp, synthetic construct
  source 1..80: mol_type = other DNA
tccaggttctgaaattttagtggatggggtgaaagttaaaatttctgactcttatgacctgcacaaccatgagggtgtta

SEQ ID NO: 157797 - DNA, 80 bp, synthetic construct
  source 1..80: mol_type = other DNA
aggactagtaacaaacggaacaggctcacaaaatttgtggcaaaaagtacaaaacgcaactgcactatcaccacaaggta

SEQ ID NO: 157798 - DNA, 80 bp, synthetic construct
  source 1..80: mol_type = other DNA
cgatgaacccgcgacttttttctgtgagagcgatgacgccaagtacctatgcgccgtaggttctaagaccgcggcgcagg

SEQ ID NO: 157799 - DNA, 80 bp, synthetic construct
  source 1..80: mol_type = other DNA
accagatcatgtatgtaccacctggcggccccatcccaaacaaggtggacgattactgttggcagacatcaacaaatcct

SEQ ID NO: 157800 - DNA, 80 bp, synthetic construct
  source 1..80: mol_type = other DNA
aggtttaatgcagattatgtttgtacccccagggattcaaataccagaagacaagaatagtagattgtgggattcagcgt

SEQ ID NO: 157801 - DNA, 80 bp, synthetic construct
  source 1..80: mol_type = other DNA
gcctgcctgtgcttcccagacactcccaaccaggaaggaccatctggattgagcacaaactagtgaagatcgtagatgct

SEQ ID NO: 157802 - DNA, 80 bp, synthetic construct
  source 1..80: mol_type = other DNA
cataccattgtatgacaattcatcacctaaacaagacacaaacatttttgactactatacaggaatgtactctagcatct

SEQ ID NO: 157803 - DNA, 80 bp, synthetic construct
  source 1..80: mol_type = other DNA
tgcggcacactggtggtggtgggcatcgtgctgtgcctaagtctggcctccactgttaggagcaaggagctgccgagcga

SEQ ID NO: 157804 - DNA, 80 bp, synthetic construct
  source 1..80: mol_type = other DNA
cccccccccctcctttaatgtaatttagaagcttgaacaaacgcccaataggatatgaccactccatggtcgtaaagggc

SEQ ID NO: 157805 - DNA, 80 bp, synthetic construct
  source 1..80: mol_type = other DNA
cttgcgtccgtctcgcggcgcggccggcgcggcctcgcctttgcctccgcttgacggcgtcacacgctccgacatcttac

SEQ ID NO: 157806 - DNA, 80 bp, synthetic construct
  source 1..80: mol_type = other DNA
tataacccacacttcctcaacaagtgacaatatcataaatgagtttttaaaactagcaataccagatgaacctaaacaaa

SEQ ID NO: 157807 - DNA, 80 bp, synthetic construct
  source 1..80: mol_type = other DNA
aatgcattcgtttttcctcaccagataattaatctcaggaccaacaactcagcaacgttggtgctaccttatgtgaactc

SEQ ID NO: 157808 - DNA, 80 bp, synthetic construct
  source 1..80: mol_type = other DNA
cagcccaccgggtggcctggagtcgatcaccttaccccaggccgaggccccttcctcatacagcgggtggctatctatcc

SEQ ID NO: 157809 - DNA, 80 bp, synthetic construct
  source 1..80: mol_type = other DNA
ccactacgcagcccagctctatgtattggacataaacccagaacccatcaccatggagcaggctgtgtatggtgtgacca

SEQ ID NO: 157810 - DNA, 80 bp, synthetic construct
  source 1..80: mol_type = other DNA
caacaccaaagtacagcaaggcaagaatggcaaagaaaatcctgactatgtccacaaagtataagtggacaaggaataaa

SEQ ID NO: 157811 - DNA, 80 bp, synthetic construct
  source 1..80: mol_type = other DNA
atgacggaacatcattggcttgtgcgacgatatttccacatcagtggataaatctgagaactaacaattcagcaacaatt

SEQ ID NO: 157812 - DNA, 80 bp, synthetic construct
  source 1..80: mol_type = other DNA
ggtcaagcacttctgtttccccggtcaatgaggatatgctttacccaaggcagaaaccttaaagatcgttatccgcacat

SEQ ID NO: 157813 - DNA, 80 bp, synthetic construct
  source 1..80: mol_type = other DNA
aaacgagactgacatcagattggatagttgaagaagagtgtgagctggattactttagaattaaatatcttgagtcagct

SEQ ID NO: 157814 - DNA, 80 bp, synthetic construct
  source 1..80: mol_type = other DNA
aaggtttgtttccacattcacaccagacactagtgatacaccgaaaagggagttccaaccagttgattacctgtttgggt

SEQ ID NO: 157815 - DNA, 80 bp, synthetic construct
  source 1..80: mol_type = other DNA
aaaaaacttatgggaagcaagaaaaaaccacacactgctaggtgcaaaagaattaaactttaaaactggaatgtactctg

SEQ ID NO: 157816 - DNA, 80 bp, synthetic construct
  source 1..80: mol_type = other DNA
gccagcaggacagcttagggacccaagagggtcagacatagcaggaaccactagcacagtggaggagcagatacagtgga

SEQ ID NO: 157817 - DNA, 80 bp, synthetic construct
  source 1..80: mol_type = other DNA
aataagacccccaactctctttgtagataagtggtacttccaaaaagacttaagcaccatccccctactaacggttggtg

SEQ ID NO: 157818 - DNA, 80 bp, synthetic construct
  source 1..80: mol_type = other DNA
cacgtgacagtgcgtcacagccgccattttgtataacaaaatggccgacttccttcctgtttttcaaaaaaataccggaa

SEQ ID NO: 157819 - DNA, 80 bp, synthetic construct
  source 1..80: mol_type = other DNA
gccatatttatgacgtcacggccgccattttaagtaaggcggaagtgggctgtctctatacaaaatggcggcgacagcct

SEQ ID NO: 157820 - DNA, 80 bp, synthetic construct
  source 1..80: mol_type = other DNA
taatcttactaactcctccaacgcctgtcacacgaagactgaaattatacgttttaaagaaaccaacgcaacaggaatag

SEQ ID NO: 157821 - DNA, 80 bp, synthetic construct
  source 1..80: mol_type = other DNA
atcaattactacaaagattcagccagttctggtctcaccaagcaggatttctcccaagatccttcaaagttcacacagcc

SEQ ID NO: 157822 - DNA, 80 bp, synthetic construct
  source 1..80: mol_type = other DNA
tacttccacaatcactgaaaaactattgaaaaacctagtcaaactgattagtagtttagtgatcatcacaaggaattatg

SEQ ID NO: 157823 - DNA, 80 bp, synthetic construct
  source 1..80: mol_type = other DNA
tcttttcttacccctatgaattatcaatggaggacattgctttggccggtcaaaaatacggtctaaacattacacctgca

SEQ ID NO: 157824 - DNA, 80 bp, synthetic construct
  source 1..80: mol_type = other DNA
tgatgtaacgtgtgacgtgagtctgatccaacactgaacgctttcgtcgtgtttttcatgcagcttttacagaccatgac

SEQ ID NO: 157825 - DNA, 80 bp, synthetic construct
  source 1..80: mol_type = other DNA
tcaacacaagtgtcactgactcatatgatttgtataataaagatggaatcaaacttgagatcactgttgttaaattggac

SEQ ID NO: 157826 - DNA, 80 bp, synthetic construct
  source 1..80: mol_type = other DNA
ccgttgcgggcactgggtctgcacgacgagacgcgcggaggaggctcgacggcggcagctgcggcggtaggacacgcagg

SEQ ID NO: 157827 - DNA, 80 bp, synthetic construct
  source 1..80: mol_type = other DNA
acagctgcacagggttgggagaggaagagatggtccagtgtcagtttgacatgataggattagagagagataagaaaaaa

SEQ ID NO: 157828 - DNA, 80 bp, synthetic construct
  source 1..80: mol_type = other DNA
tatgatgttaatctatgacaaaatttatcagaccccttgttattattcaggattggctgtaggaattaacccttacaagg

SEQ ID NO: 157829 - DNA, 80 bp, synthetic construct
  source 1..80: mol_type = other DNA
ggatctcacagggttactatcgacgcaccaaagcagacaagtacacagaggctggatttgtgactctatggtaccaaact

SEQ ID NO: 157830 - DNA, 80 bp, synthetic construct
  source 1..80: mol_type = other DNA
cacacccaggagaaagtggcattgatttgagcacacagttagatgaggacggtccagtaaaagaccccgtctatagtatg

SEQ ID NO: 157831 - DNA, 80 bp, synthetic construct
  source 1..80: mol_type = other DNA
caaggcccctacagcaacacaaagcaattatggcatgccaaacacacatcctacacccactacagaccactatgaatacc

SEQ ID NO: 157832 - DNA, 80 bp, synthetic construct
  source 1..80: mol_type = other DNA
ccttccccctctcgtaactttagaagcttgtacttaatctgaccaataggcagtagtaatccatactacttacggtcaag

SEQ ID NO: 157833 - DNA, 80 bp, synthetic construct
  source 1..80: mol_type = other DNA
ggaacacaggttcatgtcacaacaagaatatatcacaaagcaaagcatgtcaaggcttggtgcccaagacctccaagagc

SEQ ID NO: 157834 - DNA, 80 bp, synthetic construct
  source 1..80: mol_type = other DNA
cctccggcccctgaatgcggctaatccaaccctgcagccattgcatggaaaccaccatgtagatggtcgtaatgagcaat

SEQ ID NO: 157835 - DNA, 80 bp, synthetic construct
  source 1..80: mol_type = other DNA
gaggcacagcctcccccccccgcgcgcatgcgcgcgggtccccccccctccgggtggctccgcccaccggctccgcccgt

SEQ ID NO: 157836 - DNA, 80 bp, synthetic construct
  source 1..80: mol_type = other DNA
aaggctcttaaaaatgcgcttctctcgaatttatcgcagaaagaagaggccactgccactgcccagcttgcgagctaaac

SEQ ID NO: 157837 - DNA, 80 bp, synthetic construct
  source 1..80: mol_type = other DNA
cgagtaccagcactccaggctgccgagaccggagctacgtccaacgcctctgatgagaatttgatagaaacaaggtgtgt

SEQ ID NO: 157838 - DNA, 80 bp, synthetic construct
  source 1..80: mol_type = other DNA
tgatagagtctttcataccaatcaataatatcccagaccatataggtaaagttcctatatactccattcagataactagg

SEQ ID NO: 157839 - DNA, 80 bp, synthetic construct
  source 1..80: mol_type = other DNA
gcgttcgctggtggtggacgcacgcagcggtcaggtgttacacaacgacgccagctgttacatcgccggcgggcgctggc

SEQ ID NO: 157840 - DNA, 80 bp, synthetic construct
  source 1..80: mol_type = other DNA
ctgtctctaacagttcacttcctctgcttttctcctcagtctttgcaatttgcctaacatggaggattgaagacccacct

SEQ ID NO: 157841 - DNA, 80 bp, synthetic construct
  source 1..80: mol_type = other DNA
ataaactgtgtgccaatggacagcatgttacggcacaataatgtatcattagttatcataccaatatgccctctacgcac

SEQ ID NO: 157842 - DNA, 80 bp, synthetic construct
  source 1..80: mol_type = other DNA
ttttcagggcctagaaataaggttgtatttaatcaaggcttgcctgttatgcttacacctggatctggtcagttcttaac

SEQ ID NO: 157843 - DNA, 80 bp, synthetic construct
  source 1..80: mol_type = other DNA
tgttccaccattcaatgggtagatctgggtatctgatacatgttcaatgtaatgctaccaaatttcatagtggttgcctt

SEQ ID NO: 157844 - DNA, 80 bp, synthetic construct
  source 1..80: mol_type = other DNA
gagcgtctgttccgaagtcccgcagggacgccatgttggggacccatgtgatttgggatgtgggcctgcaatcaagctgt

SEQ ID NO: 157845 - DNA, 80 bp, synthetic construct
  source 1..80: mol_type = other DNA
aatacaagaaagtgagtattatcccaaacacattcaatataaccttttgattggagagggaccatgtgaaccaggagact

SEQ ID NO: 157846 - DNA, 80 bp, synthetic construct
  source 1..80: mol_type = other DNA
ctacaagtgtagatgataaattctacagatgttaatatagaagcacgtaataaattgacgacgttatgactatctatata

SEQ ID NO: 157847 - DNA, 80 bp, synthetic construct
  source 1..80: mol_type = other DNA
tatgtaccacaacaagttatacatcgtaatgttgtgaaattgagtcaattctccaaccttaaaccttttgttaatgcata

SEQ ID NO: 157848 - DNA, 80 bp, synthetic construct
  source 1..80: mol_type = other DNA
accagaatgagactgcactggtaccccatgctgctacaccaaatagaggtgctagagtgccttgcacagagcggaccgtt

SEQ ID NO: 157849 - DNA, 80 bp, synthetic construct
  source 1..80: mol_type = other DNA
ctaaaattagaacaacagacataggaaagtgcttgaacttgcctgagtatagtgtacttagaagaagatggttagacatg

SEQ ID NO: 157850 - DNA, 80 bp, synthetic construct
  source 1..80: mol_type = other DNA
agctaagagaatcagagaactcaagaacaaaatacttaattatatgcagttcaaaaataaacagagaacagaaccagtgt

SEQ ID NO: 157851 - DNA, 80 bp, synthetic construct
  source 1..80: mol_type = other DNA
ctaggtgtaatattgagtatagtgatgaattattaatacaaataagatttatctagatatagacagtatatgtgagtact

SEQ ID NO: 157852 - DNA, 80 bp, synthetic construct
  source 1..80: mol_type = other DNA
gaatagtttcagccatgataataatggttaggaatagttctgaccctcaaaccatagttgctaccctaaccctactaggc

SEQ ID NO: 157853 - DNA, 80 bp, synthetic construct
  source 1..80: mol_type = other DNA
atgctacaactactcaaactactatgtcaggttataagaactggagaaaatggtggactacagacttttatgccaccaaa

SEQ ID NO: 157854 - DNA, 80 bp, synthetic construct
  source 1..80: mol_type = other DNA
acagccagcgcgtcctccagcgtacgttccttcatctcgtcgttgatgctctggcggcgccgccggatttcgtcgaaacg

SEQ ID NO: 157855 - DNA, 80 bp, synthetic construct
  source 1..80: mol_type = other DNA
aatggcccttgacaaaagaaaaaatagaagcactaaaagagatctgtgaaaaaatggaaaaagaaggccagctagaggaa

SEQ ID NO: 157856 - DNA, 80 bp, synthetic construct
  source 1..80: mol_type = other DNA
gtagccggacgcctagcctcctccctctacgtgtacgttgatccggcctataccaacaacacatccgcatcaggcaccgg

SEQ ID NO: 157857 - DNA, 80 bp, synthetic construct
  source 1..80: mol_type = other DNA
atcagcctactacatgttctatgatggatatgatgtggctgatcatgctgatggtatatatggcatcactaaaactaatg

SEQ ID NO: 157858 - DNA, 80 bp, synthetic construct
  source 1..80: mol_type = other DNA
ttagagcactcccctcaggcctcaacctatgtgccgattaccgttactgtggctcccatgtgcgccgaatataacgggct

SEQ ID NO: 157859 - DNA, 80 bp, synthetic construct
  source 1..80: mol_type = other DNA
tctcaatttatgaccacagatgatcattcttcagctcctgcttttccagatttttctccaactcctgagatccatatacc

SEQ ID NO: 157860 - DNA, 80 bp, synthetic construct
  source 1..80: mol_type = other DNA
gagatgttggtgtcctcgaccaccccgagtggtaccatatcgtggggaaggagtggatcttgaacaaaactcaattacac

SEQ ID NO: 157861 - DNA, 80 bp, synthetic construct
  source 1..80: mol_type = other DNA
tgtgtcaaatggaacagttggagcaataatggttacctgctcagcatgtccggacatggccgtccgcatgatgagggaca

SEQ ID NO: 157862 - DNA, 80 bp, synthetic construct
  source 1..80: mol_type = other DNA
tggagcaagatacctgtccttcttgatggccatttatttgcctttgattacactagttatgatgcttccctctcacccgc

SEQ ID NO: 157863 - DNA, 80 bp, synthetic construct
  source 1..80: mol_type = other DNA
cgattgccagacagttcaaattcacccgagtttgtaagccgaaggtatctctagaagagacagaggtactttttgtgttt

SEQ ID NO: 157864 - DNA, 80 bp, synthetic construct
  source 1..80: mol_type = other DNA
ccacatcagaaagcaacaaaccatctagtactccccaagaatactttaacaaactagatggctattggggagatcccatc

SEQ ID NO: 157865 - DNA, 80 bp, synthetic construct
  source 1..80: mol_type = other DNA
caaataacctccagacaaaaacttaaagatttaaatttaaatccaataaacaccccatcaaaaactaagctacatcccag

SEQ ID NO: 157866 - DNA, 80 bp, synthetic construct
  source 1..80: mol_type = other DNA
gattttacacactccaatccaagaaatgggagagtgctagtaagggatggtggtggaaattacctgacgcattgaatcag

SEQ ID NO: 157867 - DNA, 80 bp, synthetic construct
  source 1..80: mol_type = other DNA
gattatgacaattatgatgactcccctaagaattttaaggtgtggaaaataaatctacaagaaatggctcaaattcgcag

SEQ ID NO: 157868 - DNA, 80 bp, synthetic construct
  source 1..80: mol_type = other DNA
tttaaagcacaatacacacccggaactactactgaggatgcaagagagtttagtcctatcgactacttgttcgggtcggg

SEQ ID NO: 157869 - DNA, 80 bp, synthetic construct
  source 1..80: mol_type = other DNA
catccctgctcttacagcagtcgagactggtcacacatcacaggtagaaccgagtgatacaatgcaaactcggcatgtga

SEQ ID NO: 157870 - DNA, 80 bp, synthetic construct
  source 1..80: mol_type = other DNA
tttcgagcaactgataacaactcagcagggggtccacaaaaacccattgttagagtaggccccgagcagtggctgtttcc

SEQ ID NO: 157871 - DNA, 80 bp, synthetic construct
  source 1..80: mol_type = other DNA
agacatcaccgtggcaaatacccaacctagtggggcgtcaaactcagtcagtgtgccaatgctaacagcggcagagacag

SEQ ID NO: 157872 - DNA, 80 bp, synthetic construct
  source 1..80: mol_type = other DNA
cgccgtgagaaggcgacggcgtcatcaagttaagctcaccacggtgactccggacaccggcgaggggccccggtggactg

SEQ ID NO: 157873 - DNA, 80 bp, synthetic construct
  source 1..80: mol_type = other DNA
gatagctctaaaaaataaattaaatactcaatatgaggccactactggcaccaaaactcctaaaaggggctatgctggca

SEQ ID NO: 157874 - DNA, 80 bp, synthetic construct
  source 1..80: mol_type = other DNA
gcgatagtgcgcaaacaaccgccatcttcacattccagctagacccaggccacagccctgtgttgagaaggaccctattg

SEQ ID NO: 157875 - DNA, 80 bp, synthetic construct
  source 1..80: mol_type = other DNA
tttggggtcacatttaccttttacagacaccccacagaggactttataataacatacaacagaaaaaccccactgggagg

SEQ ID NO: 157876 - DNA, 80 bp, synthetic construct
  source 1..80: mol_type = other DNA
tttatcttcttgccatttgtcagtataaggggttgccataggcttcggcctccattttaggccttccggactacaaaaat

SEQ ID NO: 157877 - DNA, 80 bp, synthetic construct
  source 1..80: mol_type = other DNA
ctggtgaggtgaaaaacatgatggagttggcagagatagacactctcataccaatgaatgcaattgcaaagaaagtagac

SEQ ID NO: 157878 - DNA, 80 bp, synthetic construct
  source 1..80: mol_type = other DNA
gtgtggctgcaaagcagatggtaccccagacttatttttcaagcccaggtacttcatgacctatacctaacaggtccatt

SEQ ID NO: 157879 - DNA, 80 bp, synthetic construct
  source 1..80: mol_type = other DNA
atgactataagccccagctacaaagttttggggggtcttttagcactactacctggagtcttaaagtactgtatgatgag

SEQ ID NO: 157880 - DNA, 80 bp, synthetic construct
  source 1..80: mol_type = other DNA
caatttactgaatgtctccaaagctctcctcccatgcaccgattgtcaaaaacctgaacactacaaacagtgttgcccac

SEQ ID NO: 157881 - DNA, 80 bp, synthetic construct
  source 1..80: mol_type = other DNA
tgtccccttagagtatgcttcgacagcgtccacgtatgtgcccatcacagtgaccgtggctccgatgtgtgcagagtaca

SEQ ID NO: 157882 - DNA, 80 bp, synthetic construct
  source 1..80: mol_type = other DNA
gtctgtgtcgtgccaacacactcccaacccggtgatgaagtgctagtcaatggacaaccaattaaattgaaggacaaata

SEQ ID NO: 157883 - DNA, 80 bp, synthetic construct
  source 1..80: mol_type = other DNA
catgttgcgcgatacaccgttcataacgcagagtgccaacttacaaggagacgaaccaccgcaagtaaaacccggtactg

SEQ ID NO: 157884 - DNA, 80 bp, synthetic construct
  source 1..80: mol_type = other DNA
cttagcagatgaatcaaatgagaatagaaggcgagcaatattaaaacatttacatccaccaacactaacaggcacaccac

SEQ ID NO: 157885 - DNA, 80 bp, synthetic construct
  source 1..80: mol_type = other DNA
tacatcagtacagccacataccctccacaatggaattcaagaaactaccttagccatgactatggcatttatagtcctta

SEQ ID NO: 157886 - DNA, 80 bp, synthetic construct
  source 1..80: mol_type = other DNA
atggttacacaactttgaataacatgggacaattatacatgcggcatgtcaacaaacagagtcccacgcagatcaccagt

SEQ ID NO: 157887 - DNA, 80 bp, synthetic construct
  source 1..80: mol_type = other DNA
tcgccataggctttggcctccgttttaggccttccggactaccaaaatggccgatttcgtgacgtcatggcggccatttt

SEQ ID NO: 157888 - DNA, 80 bp, synthetic construct
  source 1..80: mol_type = other DNA
acttttagttataatcatcatattgtatattaaacttgtgatattcattgtacttgctctacgaggaatcaattgcatct

SEQ ID NO: 157889 - DNA, 80 bp, synthetic construct
  source 1..80: mol_type = other DNA
ttgggtaccaagggcgccaagattgtgtcagtatgcaaatgcctctactgttaactttgaaccaaccaacataacagagt

SEQ ID NO: 157890 - DNA, 80 bp, synthetic construct
  source 1..80: mol_type = other DNA
tttgaaaacagttactcatactttagaggctctctaatcataagattaagtgtgtatgctagtacatttaataggggccg

SEQ ID NO: 157891 - DNA, 80 bp, synthetic construct
  source 1..80: mol_type = other DNA
cagatggtccagaagtaaccatgacctggacctctgcagataccaaggagtagtttttaaggcctatagacaccccaaag

SEQ ID NO: 157892 - DNA, 80 bp, synthetic construct
  source 1..80: mol_type = other DNA
ggtggtctaggtccaacgtagatctagaactcattagatacaagggctgcaaattcaccctgtacagacacccggaggta

SEQ ID NO: 157893 - DNA, 80 bp, synthetic construct
  source 1..80: mol_type = other DNA
gggtaaatttgttatacaaaaatataagcaaaagtaaacagggagccaaagtaggcaaactttgtgaaccttatgacgat

SEQ ID NO: 157894 - DNA, 80 bp, synthetic construct
  source 1..80: mol_type = other DNA
cccctagatacaacctgtcctctcctcctttttaccccagctgcccttcaaaattctgtgtaaaattcagccttggcttt

SEQ ID NO: 157895 - DNA, 80 bp, synthetic construct
  source 1..80: mol_type = other DNA
cattgcagctgcacttcaggtgtttactattcccagtattatggtaagtactatccaataatatgtgaaaaatccacaaa

SEQ ID NO: 157896 - DNA, 80 bp, synthetic construct
  source 1..80: mol_type = other DNA
agtaaggagatgtaacataaagggagggctacctctgctgctgtgtggagaaaacaggtccgcatttaactatgcatacc

SEQ ID NO: 157897 - DNA, 80 bp, synthetic construct
  source 1..80: mol_type = other DNA
gggcaacaatctggggcggtttatgtaggaaactacagagtggttaacaggcatttagccacgtatgccgactggcaaaa

SEQ ID NO: 157898 - DNA, 80 bp, synthetic construct
  source 1..80: mol_type = other DNA
caagtggccggggcactggggctggcgttagggatccgaccggttcatggacaggtcctgtgggtgtgtgagccaaagag

SEQ ID NO: 157899 - DNA, 80 bp, synthetic construct
  source 1..80: mol_type = other DNA
gaatacctgtgcactcggtgacagagaccggttcacaagtttttgggttcacattgcaacctggggcggacacagtgatg

SEQ ID NO: 157900 - DNA, 80 bp, synthetic construct
  source 1..80: mol_type = other DNA
cagaatcttaagcaacttacagcttatctaaaaacccataggcatgaaccagtatgtgttttattgcatggcaaccctgg

SEQ ID NO: 157901 - DNA, 80 bp, synthetic construct
  source 1..80: mol_type = other DNA
atcttcacaaacatttgacaaaaccaaatttattaccacgtatttaataggtaacatgacatcatattggcaaaaattta

SEQ ID NO: 157902 - DNA, 80 bp, synthetic construct
  source 1..80: mol_type = other DNA
tcacatttctgaagagaggtttccgtccagatgatcgatataaatttctcatacaccccatatacagcatggtagatgta

SEQ ID NO: 157903 - DNA, 80 bp, synthetic construct
  source 1..80: mol_type = other DNA
tgtaccttacacacacagtcatgtaactaattataaaccagaagcaggtgatgtgagaacagccatagtccgcagaaatg

SEQ ID NO: 157904 - DNA, 80 bp, synthetic construct
  source 1..80: mol_type = other DNA
gggccaattattcttcagacacgtaaacaaggggacagtgcacaactactccagtgtggcgcgaatgtacttcaagccta

SEQ ID NO: 157905 - DNA, 80 bp, synthetic construct
  source 1..80: mol_type = other DNA
atgaatggcagaaattcgatgataagctgtcaaacatgagaattggtcgacggcccgggtcgacagttagggtgtggaaa

SEQ ID NO: 157906 - DNA, 80 bp, synthetic construct
  source 1..80: mol_type = other DNA
cgcgcggcgccactcgtccctggggaccgcgggagaaataacggccgcgaggtacggcacaacccgcgtcgaggacagac

SEQ ID NO: 157907 - DNA, 80 bp, synthetic construct
  source 1..80: mol_type = other DNA
ccatgagcctaaaagtgctatacgacgaatacaccaggtgcctaaacaggtggtcctacggcaatgaccagctagacctg

SEQ ID NO: 157908 - DNA, 80 bp, synthetic construct
  source 1..80: mol_type = other DNA
tggcggaatttactactttgagtgtttctacatgtttaatacgaaagtatggaaaccaaatgtatgctacaatgtcaccg

SEQ ID NO: 157909 - DNA, 80 bp, synthetic construct
  source 1..80: mol_type = other DNA
ccctcccgttcaccatgcggcaggaatcgagcgacagttctttgagggctgctttcgattacacgctgcctgttgcgggt

SEQ ID NO: 157910 - DNA, 80 bp, synthetic construct
  source 1..80: mol_type = other DNA
agttgcgatgtattgtgctttgcgtctgcctgcaacgacttctcggtacgtttgttgagagatacacccttcatggcaca

SEQ ID NO: 157911 - DNA, 80 bp, synthetic construct
  source 1..80: mol_type = other DNA
tcaccagataatgtatgtgccaccagggggcccaatcccgcaggctgtagatgactataattggcaaacatccacaaatc

SEQ ID NO: 157912 - DNA, 80 bp, synthetic construct
  source 1..80: mol_type = other DNA
actgtgagatcctgtgtttcatttcagcgtgcaatgacttttcagtacgaatgttgagagatacgcccttcatagagcaa

SEQ ID NO: 157913 - DNA, 80 bp, synthetic construct
  source 1..80: mol_type = other DNA
acatttgtaataaccagttaccaacatcaagggaccatcaaccaagacatgcccccaatgactcaccaaataatgtacat

SEQ ID NO: 157914 - DNA, 80 bp, synthetic construct
  source 1..80: mol_type = other DNA
gctgttagacgtggtcaagagacaacaagaattgttgcgactgaccgtctggggaacaaaaattctccaggcaagagtca

SEQ ID NO: 157915 - DNA, 80 bp, synthetic construct
  source 1..80: mol_type = other DNA
acgcaagtgcctcgggagtgacacggtctcaaaaataattccctagaataaactgagaacagtcatcagtaaatctgtct

SEQ ID NO: 157916 - DNA, 80 bp, synthetic construct
  source 1..80: mol_type = other DNA
aatcaatactattcacccaaagacgcacagtggggagaccccattcatataatcgaacaatcagaaactacaggcaatca

SEQ ID NO: 157917 - DNA, 80 bp, synthetic construct
  source 1..80: mol_type = other DNA
ggaataaatatggcttgacaatcacaccagctgataagtcagatgtgtttaagaaactagactttaacaatgctaccttt

SEQ ID NO: 157918 - DNA, 80 bp, synthetic construct
  source 1..80: mol_type = other DNA
aggtccgcagagaaacgcgcacagaaaacccgggcgcctccggtgagccatggcctggcgatggtggtggcagagaagat

SEQ ID NO: 157919 - DNA, 80 bp, synthetic construct
  source 1..80: mol_type = other DNA
ggtgatataaagaacagcacttccgaatggctgagtttttcacgcccgtccgcagcgaggagcaccggcagggagatccg

SEQ ID NO: 157920 - DNA, 80 bp, synthetic construct
  source 1..80: mol_type = other DNA
cgtgggatggcggggccttgtctgcctcgggtctcgccgctagttggtccagggtccaggagaaggcttcgtgccagacc

SEQ ID NO: 157921 - DNA, 80 bp, synthetic construct
  source 1..80: mol_type = other DNA
cccgggatgttttccgggaaaaagatggtgtcgtgagtctgattggtttcgaaagcattctggatctgcacgatgtactc

SEQ ID NO: 157922 - DNA, 80 bp, synthetic construct
  source 1..80: mol_type = other DNA
ccaggggcagacaaaagataatagtaaaaattccccccccagacctcttcgtagacaagtggtacactcaggaagacctg

SEQ ID NO: 157923 - DNA, 80 bp, synthetic construct
  source 1..80: mol_type = other DNA
ccctgtctttcgggggaggcatgagcaccataaccatatccctgcaagtactgtatgatgagtttaccagacacttaaac

SEQ ID NO: 157924 - DNA, 80 bp, synthetic construct
  source 1..80: mol_type = other DNA
atattggcatggtagagataataggactattataagcttaaatacgcattataaattaaaaatacattgcagaaggccag

SEQ ID NO: 157925 - DNA, 80 bp, synthetic construct
  source 1..80: mol_type = other DNA
ccctgcctttgcccaccttgtccagcgacaagggctgcggcggcaaggcaattccaccaccaacatctacggcaatggca

SEQ ID NO: 157926 - DNA, 80 bp, synthetic construct
  source 1..80: mol_type = other DNA
agtgcattatccgcggacttatgcccgttatctgggcgggtatgggcactggaggccaaaactatgccgtccgctcagat

SEQ ID NO: 157927 - DNA, 80 bp, synthetic construct
  source 1..80: mol_type = other DNA
agtacttataagaagcccatatactgtcccaaaactataccatgaaaacgaccctgactatggatgggtacctatttctt

SEQ ID NO: 157928 - DNA, 80 bp, synthetic construct
  source 1..80: mol_type = other DNA
tcatcctatccgtgactgcgcgtgtggcagagaggatgccttataacatgtattttgaaaaattgccaacagctataatt

SEQ ID NO: 157929 - DNA, 80 bp, synthetic construct
  source 1..80: mol_type = other DNA
agccaagtacccataagaatgagagccaagtggtacccctgtcttttccaccaaaaagaagtactagaggccttaggcca

SEQ ID NO: 157930 - DNA, 80 bp, synthetic construct
  source 1..80: mol_type = other DNA
tgcaacgatttctccgtccgactactgaaggatactccatttataacacaacagaactttttccaaggagacacccaaac

SEQ ID NO: 157931 - DNA, 80 bp, synthetic construct
  source 1..80: mol_type = other DNA
ggaacttacacaaaatggtggtcaacttcttccgggtcaaaggtcactgctacgtcataggtgacgtagctggtgtctgc

SEQ ID NO: 157932 - DNA, 80 bp, synthetic construct
  source 1..80: mol_type = other DNA
acctgctgacagcggtgggtttttcttcccttgagtgcttcaagtagtgtgtgcccgtcctccaagtattcgccccagct

SEQ ID NO: 157933 - DNA, 80 bp, synthetic construct
  source 1..80: mol_type = other DNA
tacaaagaagtcaaaacccttcacttgatcttgttattcaatacaacaaaatgggagctcaagtgtcaacacagaaaact

SEQ ID NO: 157934 - DNA, 80 bp, synthetic construct
  source 1..80: mol_type = other DNA
agtggtacctagtgacacaatgcaaacccgacacgtggtcaacttccatactagatcagagtcatcgttagagaacttca

SEQ ID NO: 157935 - DNA, 80 bp, synthetic construct
  source 1..80: mol_type = other DNA
cttatacaccaacaaaatgtattagaagacctgtcacgcagcgggccctttgcacctaaaaaagacatacccagcacaca

SEQ ID NO: 157936 - DNA, 80 bp, synthetic construct
  source 1..80: mol_type = other DNA
ccattttgtgtaaggcggaacaggctgacaccccgtgtcaaaggtcaggggtcagcctccgctttgcaccaaatggtgga

SEQ ID NO: 157937 - DNA, 80 bp, synthetic construct
  source 1..80: mol_type = other DNA
ggaggacctactaagcatcatcagccaccagccttgtctcatgatgcagaactacaagtgtttattagtaaagagctaca

SEQ ID NO: 157938 - DNA, 80 bp, synthetic construct
  source 1..80: mol_type = other DNA
gtacagaaagaaaaggaatctgctactgccgcaactgcacccttcaaagaaagctcggagggctatgagctggtcgcgcc

SEQ ID NO: 157939 - DNA, 80 bp, synthetic construct
  source 1..80: mol_type = other DNA
gaatcatatctgcaatggtgataatcattagaaattcatctgatccacagacaattatagcaaccttaactttaattggg

SEQ ID NO: 157940 - DNA, 80 bp, synthetic construct
  source 1..80: mol_type = other DNA
tcccttgttgctcattaaaatatgatctcagaatcattgcagaaaacttatatagtatacatactccaacaaagacaaaa

SEQ ID NO: 157941 - DNA, 80 bp, synthetic construct
  source 1..80: mol_type = other DNA
atgtcacctggtagatattccactatggtccgctttccatggctacattgactttgtacaaagtgaattaggaatacaag

SEQ ID NO: 157942 - DNA, 80 bp, synthetic construct
  source 1..80: mol_type = other DNA
aggagaggcaggagcaggaggggcaggagcaggagaggcaggagcaagagaggcaggagcaggaggtgcaggagcaggag

SEQ ID NO: 157943 - DNA, 80 bp, synthetic construct
  source 1..80: mol_type = other DNA
cattgaatgcatcaactatggataacactacgtccaaccctagaacatcatttgctgttaattacaccattacaatcaac

SEQ ID NO: 157944 - DNA, 80 bp, synthetic construct
  source 1..80: mol_type = other DNA
ataaagagattgaaccagagaaactgcagagtatcaattcctgggctaatttatttgtagctgaagtaactggttcccgg

SEQ ID NO: 157945 - DNA, 80 bp, synthetic construct
  source 1..80: mol_type = other DNA
ctatcagagggattggaggaatatgcgcttactaacaaatgtgtcaaaattccctatgcttgatgtagaagttggagatg

SEQ ID NO: 157946 - DNA, 80 bp, synthetic construct
  source 1..80: mol_type = other DNA
aatagatgtagacatatttactgttagtcacactaaggtggacaacatctttggtagagcatggcttgcacatgagcaca

SEQ ID NO: 157947 - DNA, 80 bp, synthetic construct
  source 1..80: mol_type = other DNA
accaccggggcatgctccggctgctttcggtcgaagagatatgcgaagagcacacgctcaacgatctggcgttcctagta

SEQ ID NO: 157948 - DNA, 80 bp, synthetic construct
  source 1..80: mol_type = other DNA
gaaactcatttgaagatgagagtccatatcctagtatggaaccaacaaccatgaagttagcttatttggatagaggcttt

SEQ ID NO: 157949 - DNA, 80 bp, synthetic construct
  source 1..80: mol_type = other DNA
tctatatacgaacctagtcattttaggacagccgccggagaagccgacgagggatcgggcgggtgcagccagaacctcac

SEQ ID NO: 157950 - DNA, 80 bp, synthetic construct
  source 1..80: mol_type = other DNA
actggacagggctgagggagtgttgcgggacataagtaagcgcggcggaccggcgccggggacgcggtgttgcgtgcgct

SEQ ID NO: 157951 - DNA, 80 bp, synthetic construct
  source 1..80: mol_type = other DNA
aaactcagaggctaccaaaacaacactaggaaactatgaaccaaacctaaaaaccacaggtaatttttacacaagtaaca

SEQ ID NO: 157952 - DNA, 80 bp, synthetic construct
  source 1..80: mol_type = other DNA
taatttatctatcaacctaacaatttctgcccctttcacctatctctatgcaaatctgtctattaacctaacaatttctg

SEQ ID NO: 157953 - DNA, 80 bp, synthetic construct
  source 1..80: mol_type = other DNA
ctgtcatcaagctacacaaagtatagatatttgtgcctaatgcaaaaggctatgtttatacatctcaagaaagggtgcac

SEQ ID NO: 157954 - DNA, 80 bp, synthetic construct
  source 1..80: mol_type = other DNA
tgtgttgttaccacagataatggaaaatttacaggcttaggtatacatgataaaaccatgatcataccaacacatgctga

SEQ ID NO: 157955 - DNA, 80 bp, synthetic construct
  source 1..80: mol_type = other DNA
ggatttatagtggaccttctgtcatcctctaaggatccaaaagttattaagtactgtgaaggtaatggcctactaaagaa

SEQ ID NO: 157956 - DNA, 80 bp, synthetic construct
  source 1..80: mol_type = other DNA
ggtggtggaggacctggtggtgacattgctagtcacacccgtggaggttcctgttccggcctcggtggcagtgatgttct

SEQ ID NO: 157957 - DNA, 80 bp, synthetic construct
  source 1..80: mol_type = other DNA
cctacatgagatttgatgctgaattcacttttgtcaccaccaatgccaaaggggaagctccgaataccatgttacagtac

SEQ ID NO: 157958 - DNA, 80 bp, synthetic construct
  source 1..80: mol_type = other DNA
cgttaaacaacatgggtaaattgtacgcacgccacgtgaacaaggacacaccatatcaaatgtccagcacaattcgcgtg

SEQ ID NO: 157959 - DNA, 80 bp, synthetic construct
  source 1..80: mol_type = other DNA
cccacaacagacagttatgaatatcacttaggcatgtttagcccaatatttctagccccagacagacctgtgccccgctt

SEQ ID NO: 157960 - DNA, 80 bp, synthetic construct
  source 1..80: mol_type = other DNA
tggtgtctttggcacagaaggactggaagctttagacttaaacaccagtgctgggtttccttatatcacaatgggtatca

SEQ ID NO: 157961 - DNA, 80 bp, synthetic construct
  source 1..80: mol_type = other DNA
tataccctcagcgggttcgggggctctttcggcacagagacctttagtctcaaggtactgtatgaccagtacgagaggtg

SEQ ID NO: 157962 - DNA, 80 bp, synthetic construct
  source 1..80: mol_type = other DNA
agcttactacaattagattttcaaaatccaagggcatatggtgaggatataaacatctatgataatggtataggaacaaa

SEQ ID NO: 157963 - DNA, 80 bp, synthetic construct
  source 1..80: mol_type = other DNA
gatgcgggaacgcgcgtccaccaagtcgagagcctcgtgttcgtcgcagttgcgcacccgtaagccgttctcgccgccgt

SEQ ID NO: 157964 - DNA, 80 bp, synthetic construct
  source 1..80: mol_type = other DNA
ctagacttaacaaaattcaaaaagaatttgaagctgtgtatccacaactacctacacaacgccccacagacagcacactt

SEQ ID NO: 157965 - DNA, 80 bp, synthetic construct
  source 1..80: mol_type = other DNA
agagcgagcacaggggtgatctggctgcactaaacacacacggtgcgtttggacatcagtcaggtgctgtgtatgtaggg

SEQ ID NO: 157966 - DNA, 80 bp, synthetic construct
  source 1..80: mol_type = other DNA
tgccggctccggagcccccggctgaccgagcgccatggcctatggctggtggaggagacgaaggtggcgccgccggaggt

SEQ ID NO: 157967 - DNA, 80 bp, synthetic construct
  source 1..80: mol_type = other DNA
acagtgtacagacacccagaccaggacttcttaatagtatacaacagaaagagccccctgggaggaaacatatacacagc

SEQ ID NO: 157968 - DNA, 80 bp, synthetic construct
  source 1..80: mol_type = other DNA
gcctagagcagtacaagtctttgacccgaaataccaagcaccagagtggatgtttcacgcatgggacatcagacgtggcc

SEQ ID NO: 157969 - DNA, 80 bp, synthetic construct
  source 1..80: mol_type = other DNA
ctggatacgctttaaccaaggcgaaaaccgggctcatcgttatccgcaaagtgcctacgagaagcctattagcactctga

SEQ ID NO: 157970 - DNA, 80 bp, synthetic construct
  source 1..80: mol_type = other DNA
gaggtaattaacgtaacagcgtatgtcggtggatacgtcactctgcaaaattgcactagaacggatacatggtatgatgt

SEQ ID NO: 157971 - DNA, 80 bp, synthetic construct
  source 1..80: mol_type = other DNA
cgttagtgccagtgaacaacacctcgcggctaacccgatccatagaagcatatggtatacccgtgaggacgggcctagtg

SEQ ID NO: 157972 - DNA, 80 bp, synthetic construct
  source 1..80: mol_type = other DNA
ggtacgtgtgtatgttccaccaacaaaactttatgaatgacatagtgcagtgcggaccgttcgcttacccgggcgaccag

SEQ ID NO: 157973 - DNA, 80 bp, synthetic construct
  source 1..80: mol_type = other DNA
cactatcgcaaggtgctcgtgcaaaacaggagtttactactgtgaatccaggcacaagcactacccaatcaccataactt

SEQ ID NO: 157974 - DNA, 80 bp, synthetic construct
  source 1..80: mol_type = other DNA
aatggtgccaactttacttcacaagatgtaaagatggtggcttggtgggtaggaatagaacaaacctttggagtacccta

SEQ ID NO: 157975 - DNA, 80 bp, synthetic construct
  source 1..80: mol_type = other DNA
ggattttggactgagacacgaatgcctgcacatggacaatcacggtattttggtgccgtcaggtgtggtttccatttcca

SEQ ID NO: 157976 - DNA, 80 bp, synthetic construct
  source 1..80: mol_type = other DNA
ttactctgagaatcctctacgacgagtttaccaggtttatgaacttttggactgttagtaacgaagacctagacctgtgt

SEQ ID NO: 157977 - DNA, 80 bp, synthetic construct
  source 1..80: mol_type = other DNA
agccctagtggatcaggccggtaccaacttagaaatcactgtgataaaattacagcgtaatgagaagttcagagatatta

SEQ ID NO: 157978 - DNA, 80 bp, synthetic construct
  source 1..80: mol_type = other DNA
tgcccgatgagcacgatgagttggtagcgcataaagcccggaccctcgacgaagccaaaggggtgcaggtattcctgaca

SEQ ID NO: 157979 - DNA, 80 bp, synthetic construct
  source 1..80: mol_type = other DNA
gcaatccagttgcactatggtggccccctggatctccaacactgtgtacaggagatgcgtgaaagatgattttacagaag

SEQ ID NO: 157980 - DNA, 80 bp, synthetic construct
  source 1..80: mol_type = other DNA
ttatacagatgtaactcctgatgtagcagaccgattactgcatgggtcttatttctcttcgtttacagctaatgaagtaa

SEQ ID NO: 157981 - DNA, 80 bp, synthetic construct
  source 1..80: mol_type = other DNA
cgtgtgtgtactatactaagtacaagacaaaagacacagacccatcagagatgtattccagttggaaggtcaccaccaga

SEQ ID NO: 157982 - DNA, 80 bp, synthetic construct
  source 1..80: mol_type = other DNA
atgtatcgcagatgtgtgaaagatgactttacagaagggggctacatctctatgttttatcagaccaaaatagttgtccc

SEQ ID NO: 157983 - DNA, 80 bp, synthetic construct
  source 1..80: mol_type = other DNA
aattgcatatcttcagtcccatttattgtaccaatggcacatctagaggagaaaggtaaattttatactagtaaattagt

SEQ ID NO: 157984 - DNA, 80 bp, synthetic construct
  source 1..80: mol_type = other DNA
cattacatatgacaaagccaacccaggagaagttggaggagaatttcagaaaactgcaactctaactgcgggggatggga

SEQ ID NO: 157985 - DNA, 80 bp, synthetic construct
  source 1..80: mol_type = other DNA
ccgccgcttcgcggctcatttggcgccggcgcgccttctcgcggctgcaaatcagctccacgtatcggcaaaacttgctg

SEQ ID NO: 157986 - DNA, 80 bp, synthetic construct
  source 1..80: mol_type = other DNA
acttccgatctgtagagactggcgggttgcgggattattacgcaacggggattgtcactatgtggtaccaaactaacttt

SEQ ID NO: 157987 - DNA, 80 bp, synthetic construct
  source 1..80: mol_type = other DNA
atcagtgatagaaaccaggtatgtgtataatacaaacactaatgcagaagctgatattgaaatgtttctgggtagatcac

SEQ ID NO: 157988 - DNA, 80 bp, synthetic construct
  source 1..80: mol_type = other DNA
cacacaacaggggccaataactgattacttaacacaacttggtaacgcatttggtgaaggcttcacacaaaacatcaaag

SEQ ID NO: 157989 - DNA, 80 bp, synthetic construct
  source 1..80: mol_type = other DNA
cttccaggccttgcgcgagcaatataacgacatgataggcttcccttttaactataacccacaaaacaatgagcaatgtg

SEQ ID NO: 157990 - DNA, 80 bp, synthetic construct
  source 1..80: mol_type = other DNA
tggtagcctggtgggtaggcatcgagcaagcatttggagtaccatacaacccccagagtcaaggggtagtagaatcaatg

SEQ ID NO: 157991 - DNA, 80 bp, synthetic construct
  source 1..80: mol_type = other DNA
ttgtgcgggaccgggggacacgggtgtgaggacggggattgcagtggagacggggacgaggacagggtgttgcgggaccc

SEQ ID NO: 157992 - DNA, 80 bp, synthetic construct
  source 1..80: mol_type = other DNA
ataaaggaaaacgatacatgcatacgagaaaacaactgcaacagattaaaggcagaagatatggtcagttgtgagttcaa

SEQ ID NO: 157993 - DNA, 80 bp, synthetic construct
  source 1..80: mol_type = other DNA
taggcttccaataaaacaaggccgtgggagtttcacttgtcggtgtctgcttattaaggtcaccaagcactccgagcgta

SEQ ID NO: 157994 - DNA, 80 bp, synthetic construct
  source 1..80: mol_type = other DNA
ccaaagttgtaaatgtgtagtagaagacctacctttgtgggctatggcaaatggctacctagaattctgtgactcagaac

SEQ ID NO: 157995 - DNA, 80 bp, synthetic construct
  source 1..80: mol_type = other DNA
ggtgaccctgtggaggatataatccatgacgctctgggaaacacagcgcgcagagctattagcagtgctacaaatgttga

SEQ ID NO: 157996 - DNA, 80 bp, synthetic construct
  source 1..80: mol_type = other DNA
caccgctcagctatacatgttagatatcaacccagaacctattactatcaaccaggcaatctatggcatggagcatttgg

SEQ ID NO: 157997 - DNA, 80 bp, synthetic construct
  source 1..80: mol_type = other DNA
gatcgccggcgccgcctggaacagacactgcgtcgccttaccctcctcctggtgctgctccaaccacgcgtaattcacca

SEQ ID NO: 157998 - DNA, 80 bp, synthetic construct
  source 1..80: mol_type = other DNA
agtgccggcgccagcagggacgttaactccggcgccgaacgtcaacgtcggttgctcgaacttgtacgcggtggtgacgg

SEQ ID NO: 157999 - DNA, 80 bp, synthetic construct
  source 1..80: mol_type = other DNA
gtaacagagcaagcagtggaagatgtctggagtctttttgagacatctataaaaccatgtgtaaagttgacacccctttg

SEQ ID NO: 158000 - DNA, 80 bp, synthetic construct
  source 1..80: mol_type = other DNA
tgattttattaatcatgttattcgcctacaaaaccttcacggcaatttacaccagcccaccgggccgtccacacctccag

SEQ ID NO: 158001 - DNA, 80 bp, synthetic construct
  source 1..80: mol_type = other DNA
tggtacccctgcctgctccaccaagaggagtggatagaggacattgtcaggtcgggacccttcgttccaaaagacatgcc

SEQ ID NO: 158002 - DNA, 80 bp, synthetic construct
  source 1..80: mol_type = other DNA
ccgcagtcaaggggcaattcgggctcgggactggccgggctatgggcaaggctcttagtgttatcgctctgaaaaatgtt

SEQ ID NO: 158003 - DNA, 80 bp, synthetic construct
  source 1..80: mol_type = other DNA
gtccatcaacacatttggaggctttggtcaccaaaatatggctgtatatgtagcaggctataagatatgtaattaccatc

SEQ ID NO: 158004 - DNA, 80 bp, synthetic construct
  source 1..80: mol_type = other DNA
gacccgcgcttccagcgcctgagccggaccccgagggtcctgagcctcagccatggcgtggagctggtggtggcaacgat

SEQ ID NO: 158005 - DNA, 80 bp, synthetic construct
  source 1..80: mol_type = other DNA
gtgtattcccccgcactaaagaataaatccccagtagacatcatgcgtgctgttggtgtatttctggccacctgtcttgt

SEQ ID NO: 158006 - DNA, 80 bp, synthetic construct
  source 1..80: mol_type = other DNA
caaatgcctactcacacttttatgacgggttttctaaagtaccgttgagagatcaatcagcggagcttggtgactcactt

SEQ ID NO: 158007 - DNA, 80 bp, synthetic construct
  source 1..80: mol_type = other DNA
ctcacgtgacttgtcacgtggtgtctgcgtcaccgccgccattttgtttaacaaaatggccgacttccttccgctttttt

SEQ ID NO: 158008 - DNA, 80 bp, synthetic construct
  source 1..80: mol_type = other DNA
ggtcgcgcaaaaagaaatgctctaggccgtaaatgagaaactggtgtcggtaggcgcctacggccgccacgcccgtgccc

SEQ ID NO: 158009 - DNA, 80 bp, synthetic construct
  source 1..80: mol_type = other DNA
tccttattttcttgctggactaaaaaaaccattccctaaatcagacagtttgtttacagtaccagcaggaccagcagacc

SEQ ID NO: 158010 - DNA, 80 bp, synthetic construct
  source 1..80: mol_type = other DNA
tcaagagagtgtcggaaaaacctctcgactatgaggcatattttacaaaatcaaaaagacctagaatattccctcataca

SEQ ID NO: 158011 - DNA, 80 bp, synthetic construct
  source 1..80: mol_type = other DNA
aatgcagtcactatcaaacatttgccacagacaccagactagctccagaaaaaaatacgtcaccctcaggagagtctaat

SEQ ID NO: 158012 - DNA, 80 bp, synthetic construct
  source 1..80: mol_type = other DNA
gacacctcgcggtccaactcgccaaaacccaagcgggcctccatgtaaacccgctcctgttatctaccctgccacaaaca

SEQ ID NO: 158013 - DNA, 80 bp, synthetic construct
  source 1..80: mol_type = other DNA
aaccagggggcaaacttaagatcagagtcagagtgaggccccccaccttgcttgaggataagtggtatacgcaacaggac

SEQ ID NO: 158014 - DNA, 80 bp, synthetic construct
  source 1..80: mol_type = other DNA
atcaattattttaaagatgcagcatctagcggagcatctagattggatttctctcaagacccaagcaaattcactgatcc

SEQ ID NO: 158015 - DNA, 80 bp, synthetic construct
  source 1..80: mol_type = other DNA
tactaaataaaaaaaatgacataacttcagactatggcaaaccacagggcaacgaagcaaaatactttaactaccaccta

SEQ ID NO: 158016 - DNA, 80 bp, synthetic construct
  source 1..80: mol_type = other DNA
cagtgacaccgcacaaatgttaacacccaccattacagacacacagttcagaaagaaagttaacaccaactacaattggt

SEQ ID NO: 158017 - DNA, 80 bp, synthetic construct
  source 1..80: mol_type = other DNA
gtacactgacattgtaacacagggtattgtattttgctattgttactccaagggtttcaaaagaattaaaatagtaattt

SEQ ID NO: 158018 - DNA, 80 bp, synthetic construct
  source 1..80: mol_type = other DNA
ctccatctccgccttcgggttctctctgaaaaccgccccttctctcttgctcatgccttggagtctactgacttcattgg

SEQ ID NO: 158019 - DNA, 80 bp, synthetic construct
  source 1..80: mol_type = other DNA
gaagcaaagcagttggtacagagacatctagtggcagaaactaaaactgcagaaaaaataccagcaaaaagtagaccaac

SEQ ID NO: 158020 - DNA, 80 bp, synthetic construct
  source 1..80: mol_type = other DNA
aaacccaaacagaacatttgaatcaccaactgataagtttgatggcaccctacaaacgtggctaggagcaaacaataaca

SEQ ID NO: 158021 - DNA, 80 bp, synthetic construct
  source 1..80: mol_type = other DNA
cagaggcaaggccacagtgaaagttaccattaagccccccactctactagtagataagtggtactttcagcacgacattt

SEQ ID NO: 158022 - DNA, 80 bp, synthetic construct
  source 1..80: mol_type = other DNA
tgggtgcacaagtttcaagccagaaagttggagcccacgaaaattcaaacagagcctatggcgggtccaccatcaattac

SEQ ID NO: 158023 - DNA, 80 bp, synthetic construct
  source 1..80: mol_type = other DNA
gtcgtcaatgcccaggggttgtctaaaggcgaagccccaattgaatttgaaaggacgagcacaacatcagagattggggt

SEQ ID NO: 158024 - DNA, 80 bp, synthetic construct
  source 1..80: mol_type = other DNA
aaggcaaagtccttatcagatgcccttacactaagccaccattagtagacaagaacgatgacacagcaggcttcgtagtc

SEQ ID NO: 158025 - DNA, 80 bp, synthetic construct
  source 1..80: mol_type = other DNA
cagccatatgggataaacaaccaaacacagacttccacacaacactgtcatcctcagatggaacaattccaatgaaacac

SEQ ID NO: 158026 - DNA, 80 bp, synthetic construct
  source 1..80: mol_type = other DNA
acgattgaatattgcaacaactggagtatttggccaacaatcaggagcagtgtttgtaggcaattatagggtggtcaaca

SEQ ID NO: 158027 - DNA, 80 bp, synthetic construct
  source 1..80: mol_type = other DNA
ttagatggtctctggggagaccctatatattctaacacaaacaacacacctaatacaaccacacaagatggtcttatttc

SEQ ID NO: 158028 - DNA, 80 bp, synthetic construct
  source 1..80: mol_type = other DNA
tcaggagttgccataatagtattagtaacactgtatataggcttttccaagaattagctaggataccttctagaattagc

SEQ ID NO: 158029 - DNA, 80 bp, synthetic construct
  source 1..80: mol_type = other DNA
atccacactgggactcactgtatggaggtctagcctatggtttttcaagaaactctcctacagaaaacacaaaccaagca

SEQ ID NO: 158030 - DNA, 80 bp, synthetic construct
  source 1..80: mol_type = other DNA
gcagctcctggcacttgacgagcagcatggagctgtcctctagcgccaacttgcgcacgtaggtcatggtcagctccgag

SEQ ID NO: 158031 - DNA, 80 bp, synthetic construct
  source 1..80: mol_type = other DNA
acaatggaataatatgacatggcaagaatgggaaaagcagatcaactttttggaggacaacatcacacggctattagaag

SEQ ID NO: 158032 - DNA, 80 bp, synthetic construct
  source 1..80: mol_type = other DNA
atagcatacacacctccaggcgctggtattccggaaacgcgacgtgatgccatgcttggtgtgcacgttgtgtgggattt

SEQ ID NO: 158033 - DNA, 80 bp, synthetic construct
  source 1..80: mol_type = other DNA
tgatgatgccctaggctatctaatgtgtaaaccattcctaactggcacaacaatgggaaaaatcgaggtttatttaagtt

SEQ ID NO: 158034 - DNA, 80 bp, synthetic construct
  source 1..80: mol_type = other DNA
gttgggggagcagatgtaagccccgtgtgtgcccctcgccatcagaaccatacacatgaggtggaaaaggacaagtatcc

SEQ ID NO: 158035 - DNA, 80 bp, synthetic construct
  source 1..80: mol_type = other DNA
tagtaacctgccagaccacgacggtgccagacaggctatcaaaaaaagactacacccagagtcactcacaggctcatctc

SEQ ID NO: 158036 - DNA, 80 bp, synthetic construct
  source 1..80: mol_type = other DNA
atacacatcctacaacttttcaggtgacaaaggctatacatatgttacacaaattagacagtggtactggactcaactaa

SEQ ID NO: 158037 - DNA, 80 bp, synthetic construct
  source 1..80: mol_type = other DNA
caggcaaaactcaacttcaaagttttataagtactaatgtaacagaaaactcaaatgtaggcaacacattagctacacca

SEQ ID NO: 158038 - DNA, 80 bp, synthetic construct
  source 1..80: mol_type = other DNA
atgaacaccccaggaagttgccagttcctaacatcagatgattttcaatcgccctccgcgatgccacagtatgatgtgac

SEQ ID NO: 158039 - DNA, 80 bp, synthetic construct
  source 1..80: mol_type = other DNA
gatgcctcttgaacatggcaatgaggtcagacttgacagtcttggagaaccccctctcagtgaaggtgggatccgccagg

SEQ ID NO: 158040 - DNA, 80 bp, synthetic construct
  source 1..80: mol_type = other DNA
gaaaaaagcttccactaactcagtggaaccccagcaccataagaaggtgcattatcaagggaatgattcccatgataata

SEQ ID NO: 158041 - DNA, 80 bp, synthetic construct
  source 1..80: mol_type = other DNA
acagcagcagctccaacagcagctccgagaacaaaagcagctcagacagggaatcaactgcctcttcgagcagctgataa

SEQ ID NO: 158042 - DNA, 80 bp, synthetic construct
  source 1..80: mol_type = other DNA
ctcagcagcgggggcgggggccttttgcgctgcgcacggactgagtgaagagggtgttgattgcggcgaggacggggggg

SEQ ID NO: 158043 - DNA, 80 bp, synthetic construct
  source 1..80: mol_type = other DNA
actcaggagacgaaacagtggaagaagccttcgaatggctagagtcaacagtcacagccataaaccaagaggcagtaaat

SEQ ID NO: 158044 - DNA, 80 bp, synthetic construct
  source 1..80: mol_type = other DNA
acaaaaattttactgaaaagattagatccaccaacattggtaaatgtctgttaataccagaatatagtgtcctacgccga

SEQ ID NO: 158045 - DNA, 80 bp, synthetic construct
  source 1..80: mol_type = other DNA
tgtatgataaaacacacccaggagagaaaggcatagaccttaatgaagaagattcgaaaggtccaatgaaagatcccctt

SEQ ID NO: 158046 - DNA, 80 bp, synthetic construct
  source 1..80: mol_type = other DNA
attcgtctactctaggacagggtacggaataagtgggagatgggcgcgagaggctccgtcttgtcagggaagaagacaga

SEQ ID NO: 158047 - DNA, 80 bp, synthetic construct
  source 1..80: mol_type = other DNA
aacaaacttgattgtgcccaaagaggcggctacttcaacatatataattggttttgcggccgccaagaatgatttctcac

SEQ ID NO: 158048 - DNA, 80 bp, synthetic construct
  source 1..80: mol_type = other DNA
atatctatgattgccaatgtcattagtatcctaggtgttatttatatcatatataaattgttttgctctttacaaggtcc

SEQ ID NO: 158049 - DNA, 80 bp, synthetic construct
  source 1..80: mol_type = other DNA
taacaccaagccaataccacgcaaacccgagctaaggagagcagtagtacaaggaccaaaccatgaattcttgtgctcac

SEQ ID NO: 158050 - DNA, 80 bp, synthetic construct
  source 1..80: mol_type = other DNA
agttgaatacaggcacacacatgttaataattacaagccagaccaaggggaagtaacaaccatgatcccaaccagaacca

SEQ ID NO: 158051 - DNA, 80 bp, synthetic construct
  source 1..80: mol_type = other DNA
cttccgggttcttatggaggtcgccattttaacttcgacctccattttaggccctagcgggcacccgtaggcgcatatta

SEQ ID NO: 158052 - DNA, 80 bp, synthetic construct
  source 1..80: mol_type = other DNA
tcgttgtacagggacctacaacagaatttggccttagtttaattaaacacaatacatgtgttgtggaaacagaaaatggc

SEQ ID NO: 158053 - DNA, 80 bp, synthetic construct
  source 1..80: mol_type = other DNA
gtccaaacaacatgatgggtacctttgcagtgcgtgtcgttagcagagtggccagccagcttaaactacaaactagagtc

SEQ ID NO: 158054 - DNA, 80 bp, synthetic construct
  source 1..80: mol_type = other DNA
agggtgggtccacctagactgtttcaagacaagtggtacccccagtcagacctctgtgacacagttttgctttccgtgtt

SEQ ID NO: 158055 - DNA, 80 bp, synthetic construct
  source 1..80: mol_type = other DNA
cgcgccggaccccgacccccaggcgcccaaccgtgagccatggcgtggagctggtggtggcaacgatggagaaggcgccg

SEQ ID NO: 158056 - DNA, 80 bp, synthetic construct
  source 1..80: mol_type = other DNA
gtgctgagtacctctatcttggtgactcagttaaaaagcgtctagtgggccaaacccgggggggatccctggtttctttt

SEQ ID NO: 158057 - DNA, 80 bp, synthetic construct
  source 1..80: mol_type = other DNA
atttctccaatgtggacacattccactcaatggcatatgatatcaccactggagagaagaaccccagtaaattggttaga

SEQ ID NO: 158058 - DNA, 80 bp, synthetic construct
  source 1..80: mol_type = other DNA
cccatcgacgacccctgccaaaaaaccacacacgaactacccgaccccgataagcaccctccaagaatacaaatatcaga

SEQ ID NO: 158059 - DNA, 80 bp, synthetic construct
  source 1..80: mol_type = other DNA
atatgtacagagtcgaactgaatgatgcggctcactctgacacaccaatattgtgtctctcactgtctccagcatcagat

SEQ ID NO: 158060 - DNA, 80 bp, synthetic construct
  source 1..80: mol_type = other DNA
ttcaacccacaccatcaccacaaagcatgcatctccctgtcttgcatgtgccagaccaatcaatgcaccctcttactcat

SEQ ID NO: 158061 - DNA, 80 bp, synthetic construct
  source 1..80: mol_type = other DNA
atttgtggatcatacactacaaaaggtaatggctgtcccagacacacaagcttcaggacctgcccacaccaacaagccac

SEQ ID NO: 158062 - DNA, 80 bp, synthetic construct
  source 1..80: mol_type = other DNA
agttccagcactgacagcagtggaaacaggtgcaaccagtcaagtcacccctgaagatttgatcgaaaccaggcatgtta

SEQ ID NO: 158063 - DNA, 80 bp, synthetic construct
  source 1..80: mol_type = other DNA
cttaccacggggacgaacacaaggctgtactgactatgaaatacaaatttagatggaactggggtggaaaccccgtgttt

SEQ ID NO: 158064 - DNA, 80 bp, synthetic construct
  source 1..80: mol_type = other DNA
actggcactgcttggttgttctggatctccgtggcgatacctaaaagacaaagtttgtagatggttgggtatcgatccac

SEQ ID NO: 158065 - DNA, 80 bp, synthetic construct
  source 1..80: mol_type = other DNA
aatcaatacaactaagactaatataatcacaaccttactgacatctaacacaaccggaaatcccgaactgacatcccaaa

SEQ ID NO: 158066 - DNA, 80 bp, synthetic construct
  source 1..80: mol_type = other DNA
caacacgccgtccatcaagcgcagttcatcgagaagtgtcaacagggcgatccaactacagccatcacgggcagcgagtt

SEQ ID NO: 158067 - DNA, 80 bp, synthetic construct
  source 1..80: mol_type = other DNA
accacataggccttttcagtcccatctttctcagtccctttagatccagcagcctagagtttcccagagcataccaagac

SEQ ID NO: 158068 - DNA, 80 bp, synthetic construct
  source 1..80: mol_type = other DNA
cctggcaacctggacactttaaacaatacgagtatcactttgggtggtttagccccatatttataggcccaaacagatac

SEQ ID NO: 158069 - DNA, 80 bp, synthetic construct
  source 1..80: mol_type = other DNA
tctgccctttacggtgctgcgtttgtcttacgcctaccgcatcttcgccaagatgctgcgggcccacggtacgccagtag

SEQ ID NO: 158070 - DNA, 80 bp, synthetic construct
  source 1..80: mol_type = other DNA
ggagcagatgcgggagcaggaggagcagatgctgaagcagaaggagcagacagagcaggaggagcagacggtggagcagg

SEQ ID NO: 158071 - DNA, 80 bp, synthetic construct
  source 1..80: mol_type = other DNA
ccgacaacatacccacctgtgactgcactacaggcacttattattgcagaagcaaagacagatacttcccaataaacctc

SEQ ID NO: 158072 - DNA, 80 bp, synthetic construct
  source 1..80: mol_type = other DNA
agaagaggaaattacccagtacagcaagtgggaggcaattatgtacatctgcctctgagtcctcggactctcaatgcttg

SEQ ID NO: 158073 - DNA, 80 bp, synthetic construct
  source 1..80: mol_type = other DNA
gtgcttacacgcagaaaagaaagtgaaagataccgaggaagcaaaaaagctagcacagagccatctagtggtagacactg

SEQ ID NO: 158074 - DNA, 80 bp, synthetic construct
  source 1..80: mol_type = other DNA
taagagggctcccggcactcccggcacctcccagtaacagaaactcatggcctggtactggtggagacgccgccggagga

SEQ ID NO: 158075 - DNA, 80 bp, synthetic construct
  source 1..80: mol_type = other DNA
acacactttgttaggggaaattttgaattattatgctcactggtctggcagtattaaattgacctttgtattctgtgggt

SEQ ID NO: 158076 - DNA, 80 bp, synthetic construct
  source 1..80: mol_type = other DNA
tcaagtcatgtatgtgccacctggtggagcggtccctgctagcgtggatgattacgcgtggcaaacatccacaaatccaa

SEQ ID NO: 158077 - DNA, 80 bp, synthetic construct
  source 1..80: mol_type = other DNA
tggtagtatacatccaatgtggtttgaagctttaaaaatggtgttaagtaacttgcaatttgaacccaggctaattgata

SEQ ID NO: 158078 - DNA, 80 bp, synthetic construct
  source 1..80: mol_type = other DNA
tcttaaagcaacattacaacatggtaataggtatacttaatacttatgacaaccaaaacgcaggtaataacaaaaactat

SEQ ID NO: 158079 - DNA, 80 bp, synthetic construct
  source 1..80: mol_type = other DNA
aaccgaccgccgtcacaactgaacgaaaagacatcaatgacgtgggtgtgatgcgaccagccggattagctacttatggt

SEQ ID NO: 158080 - DNA, 80 bp, synthetic construct
  source 1..80: mol_type = other DNA
ggttgtagggtgcttagtcatgaatcagggtcatatattcagattttaggtgcacataatgtttgctacatatagcaatc

SEQ ID NO: 158081 - DNA, 80 bp, synthetic construct
  source 1..80: mol_type = other DNA
gtctcttaaaactctacaagaaaaattatactccacgggttcctactggaactcctttcacacagcagaatattttaacc

SEQ ID NO: 158082 - DNA, 80 bp, synthetic construct
  source 1..80: mol_type = other DNA
aacttacccttaaggaggcactttatggaacagatggactagagccaatagacttaaacactagtgctggatatccatat

SEQ ID NO: 158083 - DNA, 80 bp, synthetic construct
  source 1..80: mol_type = other DNA
cgtgcaattgcccgtgtagccgataccataagtagtggtcctgttaactcggaatcaataccagcactaacggcagcgga

SEQ ID NO: 158084 - DNA, 80 bp, synthetic construct
  source 1..80: mol_type = other DNA
ccaaatataggtacctgcttctaatgcaaaaagcaatgtatgtacataatgcaaagggctgtacatgccggcgggaaggc

SEQ ID NO: 158085 - DNA, 80 bp, synthetic construct
  source 1..80: mol_type = other DNA
ctaccggggaagttgtcccacaattgctccaatatatgtttgtgccacctggagcccctaagccagattctagggaatcc

SEQ ID NO: 158086 - DNA, 80 bp, synthetic construct
  source 1..80: mol_type = other DNA
tactgctcttttactccaaaagatgacaaaggcattaaaaacattacaaatataagggactcaaactttaaattcttaac

SEQ ID NO: 158087 - DNA, 80 bp, synthetic construct
  source 1..80: mol_type = other DNA
aagagggttggattaagcagtccaaatattcaaagatagagcgtgactttaattacgctcaatactgtataaattgtgta

SEQ ID NO: 158088 - DNA, 80 bp, synthetic construct
  source 1..80: mol_type = other DNA
gagttggtgagaagaatgggtgtgttagatgggtcatgaatgctttaggaattaaggatgattggctattagtaccctct

SEQ ID NO: 158089 - DNA, 80 bp, synthetic construct
  source 1..80: mol_type = other DNA
taaatatgatggttacaatgatgctggtaacaatttccaatcatggcaaatcactttaaaagaaatggcacaaataagaa

SEQ ID NO: 158090 - DNA, 80 bp, synthetic construct
  source 1..80: mol_type = other DNA
aagatcacacttcgtctgcagcacaagcagataagaactttttcaaatggacaattaacactaggtcctttgtacagcta

SEQ ID NO: 158091 - DNA, 80 bp, synthetic construct
  source 1..80: mol_type = other DNA
gcgctgcgccggacatctcggaccccccctccacccgaccttcggcgtcggggtggtcgggagctttactaaacagactc

SEQ ID NO: 158092 - DNA, 80 bp, synthetic construct
  source 1..80: mol_type = other DNA
aaatcctaccactacaacactaggaaactatgaaccaaacctaaaatccacaggttcatttcacacaggtaacaatccag

SEQ ID NO: 158093 - DNA, 80 bp, synthetic construct
  source 1..80: mol_type = other DNA
tttatctaaactgggttttaaatgtgcatcccttattcaaactatttgtaacacacatcacatctttaaagatgagatat

SEQ ID NO: 158094 - DNA, 80 bp, synthetic construct
  source 1..80: mol_type = other DNA
aaaaaatgacaactgcgcaggactaggaaatgaaactcttaggcaatgtcaatttactatggcaggactaaaaagagatg

SEQ ID NO: 158095 - DNA, 80 bp, synthetic construct
  source 1..80: mol_type = other DNA
ctgtagagcactattctgcccagttgttcatgttagacatcaatccagaacccatatccttagagcaagctgtgtatgga

SEQ ID NO: 158096 - DNA, 80 bp, synthetic construct
  source 1..80: mol_type = other DNA
ctgcgctaattgccctaaaccagcttgctttaagcaatgttgccccctgctgtgtggtcaagcagttgtcttacaagata

SEQ ID NO: 158097 - DNA, 80 bp, synthetic construct
  source 1..80: mol_type = other DNA
agatgtagactacatagtcacctacagcagaacgggaccctttgagatcagccacatgacctacctcagcactcaccccc

SEQ ID NO: 158098 - DNA, 80 bp, synthetic construct
  source 1..80: mol_type = other DNA
cctcatatgcaactaaagactttaaaacagactcaacactcacacatgactatggaatatacagtccctactacctgaca

SEQ ID NO: 158099 - DNA, 80 bp, synthetic construct
  source 1..80: mol_type = other DNA
tatagcaacaaccaacaagtctgatttttctagcacagtgcttcaagactctggtgccttgaagaggagatttccataca

SEQ ID NO: 158100 - DNA, 80 bp, synthetic construct
  source 1..80: mol_type = other DNA
aaaaaaatactgggacacattaattgcaaacaatgacctacacagcaactatggcaaggcccaatctgaacaattcgaat

SEQ ID NO: 158101 - DNA, 80 bp, synthetic construct
  source 1..80: mol_type = other DNA
ttatttgaatgttcatcatggagacaattaagggtattgcggacatggcaacggcagcagttaatggaattgattccaca

SEQ ID NO: 158102 - DNA, 80 bp, synthetic construct
  source 1..80: mol_type = other DNA
aaacggggaccggcaacgacggcggtggcggcgaccagattatggaggaaaaacccacgcttgtaaccctgttgaccgtc

SEQ ID NO: 158103 - DNA, 80 bp, synthetic construct
  source 1..80: mol_type = other DNA
ctaatattgtagtagattcccaatatgtcatgggaataatagcaggacagcccacagaaacagaatcaccactggtaaac

SEQ ID NO: 158104 - DNA, 80 bp, synthetic construct
  source 1..80: mol_type = other DNA
aatgcggtgggcaagtgcaacaggaaatggaaaggcagtgcggcaatcagaaggtggagtgcgtagtgttgtgggaagcg

SEQ ID NO: 158105 - DNA, 80 bp, synthetic construct
  source 1..80: mol_type = other DNA
ttcccctctcccctcacagcctatcgacgacccctgccagcagggaacccacccgattcccgaccccgataagcaccctc

SEQ ID NO: 158106 - DNA, 80 bp, synthetic construct
  source 1..80: mol_type = other DNA
cttgaaggataaagtttgtaagtggcttggcattgacccaccacccagtagacagggtgactcatggctgaagaagttca

SEQ ID NO: 158107 - DNA, 80 bp, synthetic construct
  source 1..80: mol_type = other DNA
tcacaacctgatacatccgtatgtagattctataccctagaaagtaaaacatggcaaacaacttcaaagggctggtggtg

SEQ ID NO: 158108 - DNA, 80 bp, synthetic construct
  source 1..80: mol_type = other DNA
attggacaggcagtctacgcttcagtttcatgttttgtggatctgcaggcacaacactcaagttgctcattgcttatact

SEQ ID NO: 158109 - DNA, 80 bp, synthetic construct
  source 1..80: mol_type = other DNA
tgttagatgcatacaaaaacatagacttagacaaattaaaaattctggcatatggagatgatgtaatcttttcttataat

SEQ ID NO: 158110 - DNA, 80 bp, synthetic construct
  source 1..80: mol_type = other DNA
accggcacataccttcacaatgtcctcgggggcaaaatactgtgttaggagccaggcacagtaaacggcgtgatatgcat

SEQ ID NO: 158111 - DNA, 80 bp, synthetic construct
  source 1..80: mol_type = other DNA
ccacgatgtcatctttatagagtggcctttcaggggcttctttgatatccacagaagtgccaacaccttctttttagtag

SEQ ID NO: 158112 - DNA, 80 bp, synthetic construct
  source 1..80: mol_type = other DNA
cttagtctttaccagcgtagactcgacttacatgtcatcagcaaggccatcgaacacatggatgatatcaaagattcttt

SEQ ID NO: 158113 - DNA, 80 bp, synthetic construct
  source 1..80: mol_type = other DNA
actgtacccgatggcttatggggagacgctgtatttaatgcagaggcaagcaatataattactaaaaacatggagtcata

SEQ ID NO: 158114 - DNA, 80 bp, synthetic construct
  source 1..80: mol_type = other DNA
tatacagctctcctaacacgcacccaggcatcctcatgcaacagaaacacagagtactaatacccagctggctcaccttt

SEQ ID NO: 158115 - DNA, 80 bp, synthetic construct
  source 1..80: mol_type = other DNA
atttcaagcaacagaacttagctacatgtcctgccatccactactcatgctgacagcaaaacacaggatagtagtaaaga

SEQ ID NO: 158116 - DNA, 80 bp, synthetic construct
  source 1..80: mol_type = other DNA
agtgtgaacatgattgtggaacagctcaaaaatgagtatgagaataggaaaggtgtcaagacaaacctagcagcaatatt

SEQ ID NO: 158117 - DNA, 80 bp, synthetic construct
  source 1..80: mol_type = other DNA
tctcacgctagcagttgcggctgtggaaattttattggccatcttaatactctggctactcgctacggctttactcctgg

SEQ ID NO: 158118 - DNA, 80 bp, synthetic construct
  source 1..80: mol_type = other DNA
tggcgccgctggagacgccgccgacgaccgtggtggcgccgctggagacggaggagacgtcgcagacgcagaccttatag

SEQ ID NO: 158119 - DNA, 80 bp, synthetic construct
  source 1..80: mol_type = other DNA
cgaccccttcggaggaggggtcagtaccatgcagttcaccttccagaacctgtacgaggaatatgagaagcaccacaaca

SEQ ID NO: 158120 - DNA, 80 bp, synthetic construct
  source 1..80: mol_type = other DNA
agtggtataggcgttatactagctacatgctcaggatgcaaagatttgtctgtgagaatgttaagagacacaccgatgat

SEQ ID NO: 158121 - DNA, 80 bp, synthetic construct
  source 1..80: mol_type = other DNA
cagtctccatgtgcattaccttggtatcatccaacaaaagagatctttataccaggggaggttaagaacttgattgagat

SEQ ID NO: 158122 - DNA, 80 bp, synthetic construct
  source 1..80: mol_type = other DNA
cttcacgttattctaaacacaccgagttccacgtaaccactcacgttggttttgtgactgccgcggtgacggtgattata

SEQ ID NO: 158123 - DNA, 80 bp, synthetic construct
  source 1..80: mol_type = other DNA
tctgacaaagggtgagacggcacacaagtttgagccaaccaaaaccacaggcgagcatactgtgcaatcaatagtgtgta

SEQ ID NO: 158124 - DNA, 80 bp, synthetic construct
  source 1..80: mol_type = other DNA
tgttcgccagcttatttccccagtccccacgtactggggcctgtggacacctaagggagcggccgttggtgggcatgtgt

SEQ ID NO: 158125 - DNA, 80 bp, synthetic construct
  source 1..80: mol_type = other DNA
cttttgcgcgacccccggtctttgtcgtttcggtggttcttgggcgtgctaaacgccggaggcgaccacggggcttgcga

SEQ ID NO: 158126 - DNA, 80 bp, synthetic construct
  source 1..80: mol_type = other DNA
agctcaagctccaactcaagcagcagcagcgactcggacagcagctccaactcgtccagcaacaactgctcaaaacgcaa

SEQ ID NO: 158127 - DNA, 80 bp, synthetic construct
  source 1..80: mol_type = other DNA
ttggctctagcaaagcattaaacaataactgcactgtttactgcttaaatacagacttttttagacacccacactttcaa

SEQ ID NO: 158128 - DNA, 80 bp, synthetic construct
  source 1..80: mol_type = other DNA
gttgggcaacttaaccattttcccccaccagctcataaacctgaggacaaataactccagcaccatagttgtaccttaca

SEQ ID NO: 158129 - DNA, 80 bp, synthetic construct
  source 1..80: mol_type = other DNA
tgactgatccattatgtctagaagaatctgcagaggaatgcaaacagaccatatcaccaaatgaattgggcttaacatca

SEQ ID NO: 158130 - DNA, 80 bp, synthetic construct
  source 1..80: mol_type = other DNA
cattcatcggccagacagcacttttgcagggcgacacggaggtggctgtcaacaatgccgtggccagggtggctgacaca

SEQ ID NO: 158131 - DNA, 80 bp, synthetic construct
  source 1..80: mol_type = other DNA
tcctgtggcagttaaatgcaaccaatgggcataggggcaataaaaatgtgatccataagtatatcaaagtaattgaataa

SEQ ID NO: 158132 - DNA, 80 bp, synthetic construct
  source 1..80: mol_type = other DNA
agcgctggacgtgcactgtacattcctccctatgatttgctcttgcatgaatggtatgagaaattttaactaatcaattg

SEQ ID NO: 158133 - DNA, 80 bp, synthetic construct
  source 1..80: mol_type = other DNA
tgattcacccaacctttcctattcaggaaatacatgaatctattagatggactaagaaaccctcacaaatgcaggaacat

SEQ ID NO: 158134 - DNA, 80 bp, synthetic construct
  source 1..80: mol_type = other DNA
agcttttggcaacaacagctgcaggcccaatgcagacaaaattaaaaaagccagaaagacatactggaacgccctaatag

SEQ ID NO: 158135 - DNA, 80 bp, synthetic construct
  source 1..80: mol_type = other DNA
tcaaacccactgatgtgacaacatcgcgcgcgtcgatcacggaagtccctagtctcaggccatcaatggcaaacacgggc

SEQ ID NO: 158136 - DNA, 80 bp, synthetic construct
  source 1..80: mol_type = other DNA
tgacaatatacccacttgtgattgcactacaggcacttactactgcaagagtagagacagatacttcccaataaacctca

SEQ ID NO: 158137 - DNA, 80 bp, synthetic construct
  source 1..80: mol_type = other DNA
tgatagccaccaccaacaaagccgacttctccagtacagtcttaatggattctggtgcacttaaaaggcgcttcccatac

SEQ ID NO: 158138 - DNA, 80 bp, synthetic construct
  source 1..80: mol_type = other DNA
tgagacctctcggacggcgtccatgatcctaaggactgcgtcgtgggacgacagcccccaggggcccccgccctcttcgt

SEQ ID NO: 158139 - DNA, 80 bp, synthetic construct
  source 1..80: mol_type = other DNA
agttaaaggagcacaatacaacgataagataccacaaacagagtggctatccggacaaggaccccaaaaatttacaactg

SEQ ID NO: 158140 - DNA, 80 bp, synthetic construct
  source 1..80: mol_type = other DNA
ccttgtggtcaaagtttaatctaactggtaaatttgccaagtgggacattagtttccaagaacaggctagcattaggaaa

SEQ ID NO: 158141 - DNA, 80 bp, synthetic construct
  source 1..80: mol_type = other DNA
agtaatgtcagaatacagaatatgtcttagaagcccatacacatggcctatgctaaccaaagcctcaaatgacaaatggg

SEQ ID NO: 158142 - DNA, 80 bp, synthetic construct
  source 1..80: mol_type = other DNA
tagcacacagataccagccagatggagactcagatggtaccccatgcttgctaatcaacaaccagttttagaggacttat

SEQ ID NO: 158143 - DNA, 80 bp, synthetic construct
  source 1..80: mol_type = other DNA
atgactacctaaaaactgtaggcacaacaaactcatttcaaacaggcaacaatagcatttatggacaacctaactacaat

SEQ ID NO: 158144 - DNA, 80 bp, synthetic construct
  source 1..80: mol_type = other DNA
tgagaattataatgagactaatgtggctaagagcaaattgtttgctaagtggaacattacttacacagacaccgtgcagt

SEQ ID NO: 158145 - DNA, 80 bp, synthetic construct
  source 1..80: mol_type = other DNA
aggtaagatctatggaactgcagttaccaatgatatgggaacaatatgtgtcagaattgtcactgaacaacaaagacaca

SEQ ID NO: 158146 - DNA, 80 bp, synthetic construct
  source 1..80: mol_type = other DNA
caactatgccatccactcggatgactatgtaacgagcagattctctttcgggggtggtctcagcaccacctcttactctc

SEQ ID NO: 158147 - DNA, 80 bp, synthetic construct
  source 1..80: mol_type = other DNA
gcctcactgtgcaagacatacccttgtgggcagccttctatggttatgcagactactgtaaaaaatattacaacgacccc

SEQ ID NO: 158148 - DNA, 80 bp, synthetic construct
  source 1..80: mol_type = other DNA
aggtatagttggtggatggcagaactacacatatgggccagggataagatacccaaaacactttggctggctgtggaaac

SEQ ID NO: 158149 - DNA, 80 bp, synthetic construct
  source 1..80: mol_type = other DNA
gaaaagcaagttgaaagtcttagaatagcagatgtaagaacacaagaaaagatcaagatggaaattgacactttacatga

SEQ ID NO: 158150 - DNA, 80 bp, synthetic construct
  source 1..80: mol_type = other DNA
gagaatggccttcatacctctctgacctagatgccacctcagttgataaaccatcacacccagaaacctcctcagaccga

SEQ ID NO: 158151 - DNA, 80 bp, synthetic construct
  source 1..80: mol_type = other DNA
atttagaacacagggatgcctaagccaccctcaagtacatacagccaacaactcaagtaaccctagtaatcaaatacctg

SEQ ID NO: 158152 - DNA, 80 bp, synthetic construct
  source 1..80: mol_type = other DNA
cacttgaaaacaaacgaatcaaggaactactcaaaagaggccagatgattctccgtacatccaagagaactgaaccagtt

SEQ ID NO: 158153 - DNA, 80 bp, synthetic construct
  source 1..80: mol_type = other DNA
gccgagcggtccagcccactccaaggagatacctgcattgacagccgtggagacaggggctaccaatccgttggtgcctt

SEQ ID NO: 158154 - DNA, 80 bp, synthetic construct
  source 1..80: mol_type = other DNA
ttacagtatataacaccacagaaacagcagcacaactaaacaagtttttacctactataaatacaaatccactaacctca

SEQ ID NO: 158155 - DNA, 80 bp, synthetic construct
  source 1..80: mol_type = other DNA
agaaacagggggcaatcaccaccaggaaaaatgttagggaagtgggattgaaacctatcaacactcccactaagacaaag

SEQ ID NO: 158156 - DNA, 80 bp, synthetic construct
  source 1..80: mol_type = other DNA
tacctctataagtcactaagcactccgagcgccagcgaggagtgcgaccctagggggggactcaacgccttcggagccgc

SEQ ID NO: 158157 - DNA, 80 bp, synthetic construct
  source 1..80: mol_type = other DNA
ccgtatgtcaccatgggtataaaaaagagagacataataaataaagtgactaaggatgtaacaaaactgcaagacatgat

SEQ ID NO: 158158 - DNA, 80 bp, synthetic construct
  source 1..80: mol_type = other DNA
ggttaccaccaggcaggttgctcagcttagaagaaaaatggagatgttcacgtacttgcgctttgatgtggaggttacgt

SEQ ID NO: 158159 - DNA, 80 bp, synthetic construct
  source 1..80: mol_type = other DNA
gcaaccctgaaacgcaaactacgaactagaaacaacgctacccacataccgtgattacaaagtacccacactagttcatt

SEQ ID NO: 158160 - DNA, 80 bp, synthetic construct
  source 1..80: mol_type = other DNA
aaatctgtacctaccatcttatgacgttttgttatatgagtggtacgaaaagtttaatatatacattagttatctgggta

SEQ ID NO: 158161 - DNA, 80 bp, synthetic construct
  source 1..80: mol_type = other DNA
gaatttttaatgcacagaaacaaatggtccagaagcaaccatgacctggacctctgtaggtacctaggagtttcttttaa

SEQ ID NO: 158162 - DNA, 80 bp, synthetic construct
  source 1..80: mol_type = other DNA
agaatatgattgaaactcgatgtgttgtcaacaggaatggagtattggaagcctctgttaaccacttcttttctcgctct

SEQ ID NO: 158163 - DNA, 80 bp, synthetic construct
  source 1..80: mol_type = other DNA
ccatatcgggactcaagcacggcggcaggcacacgctgtcggccataatcgagtacttgactacgtgatggacaaagacc

SEQ ID NO: 158164 - DNA, 80 bp, synthetic construct
  source 1..80: mol_type = other DNA
atactgtcacctttctcaaaagggggtttagaaatgactcaaaatatcctttcttagttcacccagtatatccaatggag

SEQ ID NO: 158165 - DNA, 80 bp, synthetic construct
  source 1..80: mol_type = other DNA
caatgacatttcctttaaataataagaacccaacacacagagacaccctgtacgggggcagtccatacactagcaacata

SEQ ID NO: 158166 - DNA, 80 bp, synthetic construct
  source 1..80: mol_type = other DNA
atcattaactgcatctgaaattagaataggtggagatactgcatatcaatggtatccatataacatgaaagctaaagaaa

SEQ ID NO: 158167 - DNA, 80 bp, synthetic construct
  source 1..80: mol_type = other DNA
tttagacaagctgcgtatcatcgcatatggtgatgatgtggtagcttcatacccagatgaattggacccaaaggaaattg

SEQ ID NO: 158168 - DNA, 80 bp, synthetic construct
  source 1..80: mol_type = other DNA
gcataccgaccactagacaacgcagcacaccagctgcgtattggtcaagcactcctgttgccccggactgagtatcaata

SEQ ID NO: 158169 - DNA, 80 bp, synthetic construct
  source 1..80: mol_type = other DNA
attccgtgacgtcatggccgccattttaagtaaggcggaagcaggcttccactatacaaaatggcggtggagcacttccg

SEQ ID NO: 158170 - DNA, 80 bp, synthetic construct
  source 1..80: mol_type = other DNA
ttgatcctagactagaggttgatctcaaggagagtgtcctgtccaaatacaaaggtaacaaaggatgtgagatgaatgag

SEQ ID NO: 158171 - DNA, 80 bp, synthetic construct
  source 1..80: mol_type = other DNA
atgacattacggatcagtttgggattaataaatgtcatgatcaagagtagatctcagattaattcatggtatcaggtggt

SEQ ID NO: 158172 - DNA, 80 bp, synthetic construct
  source 1..80: mol_type = other DNA
gcactgtgcggcgggccataactagtggtcaagatgtcaacacagcggccggtaccgctcctagctctcacaggttggag

SEQ ID NO: 158173 - DNA, 80 bp, synthetic construct
  source 1..80: mol_type = other DNA
gcccacgaggcagccggtgatcgagcaccatggcctatgggtggtggaggagacgccggaggcgctggcgcaggtggaga

SEQ ID NO: 158174 - DNA, 80 bp, synthetic construct
  source 1..80: mol_type = other DNA
gctttgttgattcaattgattctactgttaatgcagttaatgaaagagttgagaactttggcaacaccaacgcatcagga

SEQ ID NO: 158175 - DNA, 80 bp, synthetic construct
  source 1..80: mol_type = other DNA
atcgctcacagtgccgacactacagggtctgcccactatgtccactcctgggtcaaatcaatttttgacttcagatgatt

SEQ ID NO: 158176 - DNA, 80 bp, synthetic construct
  source 1..80: mol_type = other DNA
accaaccaacatgtctatgcttgcttttgtcagcgcatgcaacgatttctcagtgcgcttgttaagagatactcctcatg

SEQ ID NO: 158177 - DNA, 80 bp, synthetic construct
  source 1..80: mol_type = other DNA
gccccacaaactcagaacaagtgccagcactcaccgcagctgagacaggccacacatctcaagtggtgcctggtgataca

SEQ ID NO: 158178 - DNA, 80 bp, synthetic construct
  source 1..80: mol_type = other DNA
ctaaacacgagaaaatgggagcgcaggtgtctactcaaaaaactggagctcatgaaaccagcctgaatacaggaaatagt

SEQ ID NO: 158179 - DNA, 80 bp, synthetic construct
  source 1..80: mol_type = other DNA
cctcacaaagggagaaacagcacatgagtttgcatcgactaagacaacgggtgagcacacagtacaatcgatagtatgca

SEQ ID NO: 158180 - DNA, 80 bp, synthetic construct
  source 1..80: mol_type = other DNA
gtggtgcgggcacctggtctcacaactacaccagccacctgttagacattatccccaaaggaccctttggaggagggcac

SEQ ID NO: 158181 - DNA, 80 bp, synthetic construct
  source 1..80: mol_type = other DNA
ttacaaaatgatccagcgaccgccatcgagggtgcagtacgacgtgttgcagacaccattcagagtggacctagcaactc

SEQ ID NO: 158182 - DNA, 80 bp, synthetic construct
  source 1..80: mol_type = other DNA
cgcgcaggcgaagaagagtaccggcccgaagacctagacgagctgttcggcgctatcgaacaagaacagtaaggagacgg

SEQ ID NO: 158183 - DNA, 80 bp, synthetic construct
  source 1..80: mol_type = other DNA
tgtctgtgtgattccccggggaaaagaggaagtccccaggtggacggccgcgcgcggaaaagaaaaagcgcgcggcgcga

SEQ ID NO: 158184 - DNA, 80 bp, synthetic construct
  source 1..80: mol_type = other DNA
aacctctgtataaatgtacccgctttctacattgtaaccagtcgctctgcggagaggctggcagatcgagccctgggagg

SEQ ID NO: 158185 - DNA, 80 bp, synthetic construct
  source 1..80: mol_type = other DNA
gcactgtgcgcagagccattaatagtgccacaagcatcgaatctgcagctaacaccgccccaagttctcaccgattagaa

SEQ ID NO: 158186 - DNA, 80 bp, synthetic construct
  source 1..80: mol_type = other DNA
aggatggataggtaaagcaaactcaaccatagagagggattttaattatgtgcattacatgctgaattgcttgggtagcc

SEQ ID NO: 158187 - DNA, 80 bp, synthetic construct
  source 1..80: mol_type = other DNA
accggctttgcgacgcgctttacttttgttacacgcaagcccccgagacgcggcagactttcgtcacgctggtgcgtggg

SEQ ID NO: 158188 - DNA, 80 bp, synthetic construct
  source 1..80: mol_type = other DNA
atgatgacatattaaccatcctccacggcacagacaaagcaagaaagagagacgagagatatatgaacatgataaatatt

SEQ ID NO: 158189 - DNA, 80 bp, synthetic construct
  source 1..80: mol_type = other DNA
aagcggtgtcagcgcctacgggccagaatacccgggtaagcagccaccagttggacactggaagggtcccagcactccaa

SEQ ID NO: 158190 - DNA, 80 bp, synthetic construct
  source 1..80: mol_type = other DNA
tacatttctaaagagaggtttccgtgtagatggaaaacacagtttccttgttcacccagttttcccagagaaggaaatct

SEQ ID NO: 158191 - DNA, 80 bp, synthetic construct
  source 1..80: mol_type = other DNA
gtacgcgacggtgaagcgattgcacattttgaaatcgtaacagcgttccggcgggtggttgacgtttatgaattcgcaac

SEQ ID NO: 158192 - DNA, 80 bp, synthetic construct
  source 1..80: mol_type = other DNA
acactacaccaacaaccagtactagaagatatagctagatcaggccccttctcactaaaacaaaacatgcctagcgctac

SEQ ID NO: 158193 - DNA, 80 bp, synthetic construct
  source 1..80: mol_type = other DNA
caaaaaatacagacactactaaccatggaatcgggaaacatattattgaaactattaaaaaagccaacattcccctgggg

SEQ ID NO: 158194 - DNA, 80 bp, synthetic construct
  source 1..80: mol_type = other DNA
aaccacctagtgatatgagctactggagacccccagtacacaatgtcccggggctcgaacacctctggtacgagtccgtg

SEQ ID NO: 158195 - DNA, 80 bp, synthetic construct
  source 1..80: mol_type = other DNA
aatgccatgcataaacaaagtttttattttccctgagagggaacccaagccccctccttccagcaaagactggcaggagg

SEQ ID NO: 158196 - DNA, 80 bp, synthetic construct
  source 1..80: mol_type = other DNA
atccgtgggactaatcataaagccaaattgacggttggcagatgcgtccccgcagatgagcttacagacaatgtccttga

SEQ ID NO: 158197 - DNA, 80 bp, synthetic construct
  source 1..80: mol_type = other DNA
agcgcagagtcggacatgttcacctcttgcttcttagataagaaagtggcggtcattttggcagaagaaaagtgatacga

SEQ ID NO: 158198 - DNA, 80 bp, synthetic construct
  source 1..80: mol_type = other DNA
caaaacaatgatgatgtggatgatgataatgatgacttagtaggagtaccagtatggcctagagcccccttaagggctat

SEQ ID NO: 158199 - DNA, 80 bp, synthetic construct
  source 1..80: mol_type = other DNA
ctatcatgattaggaactcaagtgacacagcaactgtcttagccactctcgccttactgggatgtcatgggtcaccatgg

SEQ ID NO: 158200 - DNA, 80 bp, synthetic construct
  source 1..80: mol_type = other DNA
atagctaatgtagtttcaatagtgggtatcatttatataatttataaattattctgtactctacaaggcccatactcagg

SEQ ID NO: 158201 - DNA, 80 bp, synthetic construct
  source 1..80: mol_type = other DNA
cgagcatggcgccgcgctggtgtcgcacacgctgcgctttgtggaggccaagatgtcctcgtgtcgcgtacgcgcctttc

SEQ ID NO: 158202 - DNA, 80 bp, synthetic construct
  source 1..80: mol_type = other DNA
gtatttacataaattcagcaccaattataacaaaccaaagacaaggggcagcaatgagttggaacccaagcatttcctta

SEQ ID NO: 158203 - DNA, 80 bp, synthetic construct
  source 1..80: mol_type = other DNA
agcagttcatgactacagaagatgagcaatcagcaaatatgttaccaggtttccattcaagtaaaaagatacacatccca

SEQ ID NO: 158204 - DNA, 80 bp, synthetic construct
  source 1..80: mol_type = other DNA
actgaagccaacccagtggatgcacccaccgaaccagacgcctcagccaatagattctacaccttagagagtgttaactg

SEQ ID NO: 158205 - DNA, 80 bp, synthetic construct
  source 1..80: mol_type = other DNA
tctttgctgtagcggggtcgtcgtgcggggacgcagggtcggtgatgatgcgaggcggcgccgacggtatcttccgcgag

SEQ ID NO: 158206 - DNA, 80 bp, synthetic construct
  source 1..80: mol_type = other DNA
gcgactcgcatcggccgtgctggagacgatcagccccccagacctcaaaggcctcctgcaataagatccatgagagctct

SEQ ID NO: 158207 - DNA, 80 bp, synthetic construct
  source 1..80: mol_type = other DNA
gtaaaccgagaaagaacggggtcgcggcccgcagcagccaaagtcccagcgccgtagcgcagagcagagacaggaccgac

SEQ ID NO: 158208 - DNA, 80 bp, synthetic construct
  source 1..80: mol_type = other DNA
attaaaaatcttaaacagcttcctctattagagaaagagattgatggattacgattggcctcccagaagcaacaacaaga

SEQ ID NO: 158209 - DNA, 80 bp, synthetic construct
  source 1..80: mol_type = other DNA
ctctttgtagataagtggtactttcaaaaggacatctgtgacctaacactgtttaacctcaatgccgttgcggttgacct

SEQ ID NO: 158210 - DNA, 80 bp, synthetic construct
  source 1..80: mol_type = other DNA
ggaaaagagcgtgcaagacataataaacaccctagtgatgacaattggttgaattttgatggcacacttttaggtaatgc

SEQ ID NO: 158211 - DNA, 80 bp, synthetic construct
  source 1..80: mol_type = other DNA
cgtaccccacgcgcaaaagcgcaacccaaaccaaaaccgaatcgtcagagacggaaccgtcgtccggccgtggttcgcaa

SEQ ID NO: 158212 - DNA, 80 bp, synthetic construct
  source 1..80: mol_type = other DNA
ccagacactcaagcttcaggacctgttcataccaccaaaccacaagctctgggtgctgtagaaataggagcaactgctga

SEQ ID NO: 158213 - DNA, 80 bp, synthetic construct
  source 1..80: mol_type = other DNA
cttcatattactaatttggctgcacgctttgctcttcaggggcccccgccggagggtggtccgcctcggccgaggccgcc

SEQ ID NO: 158214 - DNA, 80 bp, synthetic construct
  source 1..80: mol_type = other DNA
tgggcccggtgtggactacaagggagacagcttgaccccactctcgacaaagaccttaacaacatatggacttggacatc

SEQ ID NO: 158215 - DNA, 80 bp, synthetic construct
  source 1..80: mol_type = other DNA
ggaaaagaggaagttcccaggggacggcagggacacacgaagagccacggccaggtgggacgacggccagagacgcggaa

SEQ ID NO: 158216 - DNA, 80 bp, synthetic construct
  source 1..80: mol_type = other DNA
aacctgaacttaggaaagctaccctgcagggtccagagcatgagtttattcgggcacttgtcaaaagaaactgccatgtc

SEQ ID NO: 158217 - DNA, 80 bp, synthetic construct
  source 1..80: mol_type = other DNA
gccccagtacaaaaaaaaccttagtattagctccactatggacagtactaacaaaactcattatgagaataatcttttta

SEQ ID NO: 158218 - DNA, 80 bp, synthetic construct
  source 1..80: mol_type = other DNA
aagacgcgaaagcaacgtgtatggggggggggggggataatattgctaatcatgtgtcttgcagtacagatagccgctgt

SEQ ID NO: 158219 - DNA, 80 bp, synthetic construct
  source 1..80: mol_type = other DNA
aaactttacagaaagaaaaggtcactgctactgcctggcctgcgaactccaaagaaaaaaccacctactaatatgagcta

SEQ ID NO: 158220 - DNA, 80 bp, synthetic construct
  source 1..80: mol_type = other DNA
gtctaaagttaaaactcaagatttctaccagagatattctgattgcctagctaaattcaaaccaataatggccatgtgct

SEQ ID NO: 158221 - DNA, 80 bp, synthetic construct
  source 1..80: mol_type = other DNA
gcactccgagcgtcagcgaggagtgcgaccctaggggggactcaacgccttcggagccgcgcgctacgccttcggctgcg

SEQ ID NO: 158222 - DNA, 80 bp, synthetic construct
  source 1..80: mol_type = other DNA
ttgttccccgagagaaagccaaagccaggtccctcgtcccaagactgggcgatggagtacctagcctgcaaaatatttaa

SEQ ID NO: 158223 - DNA, 80 bp, synthetic construct
  source 1..80: mol_type = other DNA
atctacgccaacctccgtaaccccggagtcttctcgaggcaggtgtttacccatttgtttaaacgagccatctctcattg

SEQ ID NO: 158224 - DNA, 80 bp, synthetic construct
  source 1..80: mol_type = other DNA
aaacttataaaggcatagatttagataaactcaagatggtagcttatggagatgatgtattagcttcctaccccttctcc

SEQ ID NO: 158225 - DNA, 80 bp, synthetic construct
  source 1..80: mol_type = other DNA
ttgttgaacacaataaaatggtggcgcaagtgtcaaccacaaaaactggatctcatgagaatgggaatatcgcaacaggg

SEQ ID NO: 158226 - DNA, 80 bp, synthetic construct
  source 1..80: mol_type = other DNA
aagcaacacatggtataactggcagtacacttatctaaaaccaatgaaacagatatactatcaaacagcagctgacaatg

SEQ ID NO: 158227 - DNA, 80 bp, synthetic construct
  source 1..80: mol_type = other DNA
gtgaaccagaaaatctaaatgattctattctaatcagttactctagtgaccttgtcatttaccgcacaaacactacaggt

SEQ ID NO: 158228 - DNA, 80 bp, synthetic construct
  source 1..80: mol_type = other DNA
acgctaagattcaccgttcggcctcgcacctgacggcctacgaatcgtacttggtgtccatcaccgagcagtacaacacg

SEQ ID NO: 158229 - DNA, 80 bp, synthetic construct
  source 1..80: mol_type = other DNA
cagcaggtaatgcctccgaatcattacaaacaggaataggcactaacggaagtaacaaaagtagctcaataactattgca

SEQ ID NO: 158230 - DNA, 80 bp, synthetic construct
  source 1..80: mol_type = other DNA
accctcagaaaaagttctcattaacggatttgccacaaatgttaaagataaatggaaattagtggatccagacaatttaa

SEQ ID NO: 158231 - DNA, 80 bp, synthetic construct
  source 1..80: mol_type = other DNA
gggaaaccaacttgtgaatggatagaaggaaatgcatattaccctagtagataccaacaaggtgtaatgaaaggagttgg

SEQ ID NO: 158232 - DNA, 80 bp, synthetic construct
  source 1..80: mol_type = other DNA
atgtatacacaaagtgggattcaataaacaaagaagcatacaatttagttaaagctgaatacaatgaagtatataaagta

SEQ ID NO: 158233 - DNA, 80 bp, synthetic construct
  source 1..80: mol_type = other DNA
agtaaatcctaacctagagccctggtacctcccacgaagtcaccctcaaactccttgtaataattattttggtaaaaaat

SEQ ID NO: 158234 - DNA, 80 bp, synthetic construct
  source 1..80: mol_type = other DNA
tcagtggcagcctggctctgtcagaagagcctttgtaataggctactttcctatggttatatgtggtccgggaagatggt

SEQ ID NO: 158235 - DNA, 80 bp, synthetic construct
  source 1..80: mol_type = other DNA
cctttaacgtaacttagaagcttgaacaaacgcccaataggatatgatcactccatggtcgtaaagggcaagcacttctg

SEQ ID NO: 158236 - DNA, 80 bp, synthetic construct
  source 1..80: mol_type = other DNA
actactgggcaccttactcattgtgctggttaccaacatgatgaaattatactacatggccattccatcaaatacttgga

SEQ ID NO: 158237 - DNA, 80 bp, synthetic construct
  source 1..80: mol_type = other DNA
caatagtaaagacaatagttgaagaaatgatcaaaaaggaagcaatatacgtaggatgggtgccagctcataaaggactg

SEQ ID NO: 158238 - DNA, 80 bp, synthetic construct
  source 1..80: mol_type = other DNA
ggcaagaaagggccactgccactgccaaatctgcaacctgcacaggagaaacgggctggtggtccgtccttgatggcctc

SEQ ID NO: 158239 - DNA, 80 bp, synthetic construct
  source 1..80: mol_type = other DNA
aagcaggagcagagattgtggcttctgtcagacctagagacaatgttagacaagtaagaaattatggacccagtgacatg

SEQ ID NO: 158240 - DNA, 80 bp, synthetic construct
  source 1..80: mol_type = other DNA
cctgagtatttgtctgaccttgatgccacttccgtggataagcccacccaccctgagacatcttcagaccgtttctatac

SEQ ID NO: 158241 - DNA, 80 bp, synthetic construct
  source 1..80: mol_type = other DNA
catgtagagtgtcctttaaaataaagctggatgattaactttcaaggccgtgggagtttcacttgtcggtgtctacctct

SEQ ID NO: 158242 - DNA, 80 bp, synthetic construct
  source 1..80: mol_type = other DNA
ggtaaagacgcatatgatgcgttccttgaacaggttcgtagttgcgccgtagggcggcgtctacaacttcccccttactc

SEQ ID NO: 158243 - DNA, 80 bp, synthetic construct
  source 1..80: mol_type = other DNA
gtagagtttgttactaagttgaaacagctaggaatgctagaaaatcagattaacaccatacatcaatcctgtccaagcca

SEQ ID NO: 158244 - DNA, 80 bp, synthetic construct
  source 1..80: mol_type = other DNA
acttagacaacaattatactgcctttaaaaatcatcttaagactacctacaatgctgccgctggcacaagaaaacccgaa

SEQ ID NO: 158245 - DNA, 80 bp, synthetic construct
  source 1..80: mol_type = other DNA
ttgggtgactcgctttatggtgcagcctctctaaatgactttggcatcttggccgtgagggtggttaatgatcataatcc

SEQ ID NO: 158246 - DNA, 80 bp, synthetic construct
  source 1..80: mol_type = other DNA
ttatctaatagtgaaaacccaattgagtttgagaggactagcacaaccgcagaggttggagtggtacagaaggcggtgta

SEQ ID NO: 158247 - DNA, 80 bp, synthetic construct
  source 1..80: mol_type = other DNA
ccagaggtggtgggttcctcagcaccatcctcttcttcctctgaggcaacttcccctatctcagacactggctcagactt

SEQ ID NO: 158248 - DNA, 80 bp, synthetic construct
  source 1..80: mol_type = other DNA
tcaaaggtcaggggtcagccttccgctttgcacaaaatggtggtgtttatcttccgggtcaaagttcaccgctacgtcac

SEQ ID NO: 158249 - DNA, 80 bp, synthetic construct
  source 1..80: mol_type = other DNA
atgttctatgacgggtgggctagattcgataagcaagggactttacgtataaacaccttgaacaacatgggcactctgta

SEQ ID NO: 158250 - DNA, 80 bp, synthetic construct
  source 1..80: mol_type = other DNA
tactaggtgaaggaccatcagaaccaggagactgtggaggaaaattattgtgtaagcatggtgtcattggaatggtaaca

SEQ ID NO: 158251 - DNA, 80 bp, synthetic construct
  source 1..80: mol_type = other DNA
agggaaggtctgagtgtagctttctgggcatggtctacatcataatataataaggcgcacttccgaatggctgagttttc

SEQ ID NO: 158252 - DNA, 80 bp, synthetic construct
  source 1..80: mol_type = other DNA
ataccatcatcacaaggtggacagggagccatcttggttacctgtagtggatgtccagacttatcagtaagattgttaag

SEQ ID NO: 158253 - DNA, 80 bp, synthetic construct
  source 1..80: mol_type = other DNA
atcctggcacatccgtacactacaacttctgtacatacatccctcaggcaaaacaactaaaaatattaagacaatactac

SEQ ID NO: 158254 - DNA, 80 bp, synthetic construct
  source 1..80: mol_type = other DNA
aacaccatactcctggccatatcatcagatctccaagttgacagcacaagtatccctggccctgacaacatacccacctg

SEQ ID NO: 158255 - DNA, 80 bp, synthetic construct
  source 1..80: mol_type = other DNA
ctacgggtgtctctacggcgcttctgcgcggcgcttcgctgtggacgggtggtgtgcgggacggcggtggtgccggtgcg

SEQ ID NO: 158256 - DNA, 80 bp, synthetic construct
  source 1..80: mol_type = other DNA
cagcttctgaggcggctgtggcctctacgccaggctcgcttttccgaagccactcgtccgcctactggttgtcggaggtg

SEQ ID NO: 158257 - DNA, 80 bp, synthetic construct
  source 1..80: mol_type = other DNA
aatggccgcagtttctcaacccaaacgacgccaacccagtggatgcaccaaccttacccgactcttcgagtaatcgattt

SEQ ID NO: 158258 - DNA, 80 bp, synthetic construct
  source 1..80: mol_type = other DNA
catgggttctttggcaaaaaagctattaagcgaatgcaggagcaaccaatacctcatgacactttttcagcagggttcaa

SEQ ID NO: 158259 - DNA, 80 bp, synthetic construct
  source 1..80: mol_type = other DNA
atcagtaacgaaagtgagtggggccagacttcgccataaggcctttatcttcttgccatttgtcagtgtaggtggtcgcc

SEQ ID NO: 158260 - DNA, 80 bp, synthetic construct
  source 1..80: mol_type = other DNA
aggtaatggaggacataagcaggagcgggccctttgcacctaaggtagaaaaaccaggcactcagctggtaatgaagtac

SEQ ID NO: 158261 - DNA, 80 bp, synthetic construct
  source 1..80: mol_type = other DNA
cctgaggatatggttgagaccagatatgtacaaacatcacaaactcttgatgagatgagtatggaaagcttcctaggtag

SEQ ID NO: 158262 - DNA, 80 bp, synthetic construct
  source 1..80: mol_type = other DNA
gactatccagattgtaatttagctctttctgctaatcaaccagaaaccactataattaatgtaggggatgtggtatccta

SEQ ID NO: 158263 - DNA, 80 bp, synthetic construct
  source 1..80: mol_type = other DNA
ccaccactaacaacacaaccaccactaacaacacaaccaccactaacaacacaaccacaacaaagttagagataaatgaa

SEQ ID NO: 158264 - DNA, 80 bp, synthetic construct
  source 1..80: mol_type = other DNA
tttcggacgagcggcatgtgttgccatcctagaagtgactaattcagcacaaacaaccgaaaactccaaacatcaaacaa

SEQ ID NO: 158265 - DNA, 80 bp, synthetic construct
  source 1..80: mol_type = other DNA
ggcctccacgaaggccttggcccgctccaacatcgtgcggccctgcagcgtcaccgtctcggcgatggagaggcagggaa

SEQ ID NO: 158266 - DNA, 80 bp, synthetic construct
  source 1..80: mol_type = other DNA
aattagatggaccaaaaaccccagaaacatgcaagagcatgtgttatccttgtgtcatctcatgtggcataatggaaaag

SEQ ID NO: 158267 - DNA, 80 bp, synthetic construct
  source 1..80: mol_type = other DNA
agactggtactgactcaatggcacccagctaaagttaggagactgagaatagccggtgtgctgcccatgatcctctgtgg

SEQ ID NO: 158268 - DNA, 80 bp, synthetic construct
  source 1..80: mol_type = other DNA
tggccgaaatgggaggaaccacttatgtacccatcaccgtgaccgtggcaccgatgtgtgctgaatacaatggcttgcga

SEQ ID NO: 158269 - DNA, 80 bp, synthetic construct
  source 1..80: mol_type = other DNA
agactgggcaaaaaaagaaagaaacaactggggcttagctacacaatacagactactactaacatgtccctacacattcc

SEQ ID NO: 158270 - DNA, 80 bp, synthetic construct
  source 1..80: mol_type = other DNA
acagtgagaaattaaaaatacttagacaatactactttgaatgggaaactgcacagtccacaaaccatagttttaatgta

SEQ ID NO: 158271 - DNA, 80 bp, synthetic construct
  source 1..80: mol_type = other DNA
gcctccagcacagccactcctgaatccacactagagactaggtacgtggtaaatgataacacaaatgaagaagctgaaat

SEQ ID NO: 158272 - DNA, 80 bp, synthetic construct
  source 1..80: mol_type = other DNA
accaactagccagtgcaaacaagggcaatgtcacagcaggatacaattacactcatcctggtgaggctggcagagatgtg

SEQ ID NO: 158273 - DNA, 80 bp, synthetic construct
  source 1..80: mol_type = other DNA
ttgggaatgccaaatgctgtccatttgtatgtggtaaagcaataacatttagagataggaatagttgtgaaaagtatact

SEQ ID NO: 158274 - DNA, 80 bp, synthetic construct
  source 1..80: mol_type = other DNA
aaggtgtagatcgggcccatggttgatgggtcaacaacttgtaggtcgcgacgttgtctatcgggataggaagcgaggga

SEQ ID NO: 158275 - DNA, 80 bp, synthetic construct
  source 1..80: mol_type = other DNA
cacactcagtgcccagaactatgccatacactccgacgactacatactacagagattccccatggggggaggactgtcca

SEQ ID NO: 158276 - DNA, 80 bp, synthetic construct
  source 1..80: mol_type = other DNA
ttactgatagctacaacccatctaaggagactgatcaaggaaggacatttgcagctgttgactacttgcttggatgtggt

SEQ ID NO: 158277 - DNA, 80 bp, synthetic construct
  source 1..80: mol_type = other DNA
cagcagacgccaagtacgccagctggaccatcacaacacgcaaagtcgcacaattaaggagaaaactagaaatgtttaca

SEQ ID NO: 158278 - DNA, 80 bp, synthetic construct
  source 1..80: mol_type = other DNA
ccaacaactagaaaagattatgcatggcaatctggaacaaatgcatctgtattttggcaacatggacaaacatttccaag

SEQ ID NO: 158279 - DNA, 80 bp, synthetic construct
  source 1..80: mol_type = other DNA
gcggctgactttcgccacccatgggtttcgccagagagcaacacctcagtaacgacatttcaggtgttgaaagagttcta

SEQ ID NO: 158280 - DNA, 80 bp, synthetic construct
  source 1..80: mol_type = other DNA
ctcataccttagatccaggtggctggataaattcatttaaattttttagtccaaatacaatatagcacattatttacagt

SEQ ID NO: 158281 - DNA, 80 bp, synthetic construct
  source 1..80: mol_type = other DNA
ccgggtaaatagcttatgaagttggacaagagaataagatatcctgaatcacccacgccattcaagagcgtactaatgcc

SEQ ID NO: 158282 - DNA, 80 bp, synthetic construct
  source 1..80: mol_type = other DNA
tgagactgtccatgagaagtccatacacagaaccaaagctaacaggctccacctcagacatagggttcatacccatagga

SEQ ID NO: 158283 - DNA, 80 bp, synthetic construct
  source 1..80: mol_type = other DNA
gagcttctagcccaggctggaaagggatatggtttaacaattacacctccagacaagtctgaaaaattttcaaaaacaac

SEQ ID NO: 158284 - DNA, 80 bp, synthetic construct
  source 1..80: mol_type = other DNA
atttgctcagatctactagaaatgaggaagttattaattattgcaaaaatcaaaactggatcattcctgctgatgttagt

SEQ ID NO: 158285 - DNA, 80 bp, synthetic construct
  source 1..80: mol_type = other DNA
aggttcgaatcagttcttgacctctgatgattttcaatcaccgtgcgcgctgcccaactttgatgtgacacccccgattc

SEQ ID NO: 158286 - DNA, 80 bp, synthetic construct
  source 1..80: mol_type = other DNA
atgcggtggaagccaaacaggtcagggaaattcagatagagattagaagaatgatgtgtttcaagaagagccaccgtgca

SEQ ID NO: 158287 - DNA, 80 bp, synthetic construct
  source 1..80: mol_type = other DNA
cccatgttgtttgggatgttggtctgcaatcgaccatatcaatgattgtgccctgggttagtgctagtcatttcagaaac

SEQ ID NO: 158288 - DNA, 80 bp, synthetic construct
  source 1..80: mol_type = other DNA
gccttactgttctaggccgtgggagtttcacttgtcggtgtctacctctaaaagtcactaggcactccgagcgccagcga

SEQ ID NO: 158289 - DNA, 80 bp, synthetic construct
  source 1..80: mol_type = other DNA
agcattattcagctcagctatttatgttagacattaacccagaacccatatctttggaacaggctgtgtatggtatggaa

SEQ ID NO: 158290 - DNA, 80 bp, synthetic construct
  source 1..80: mol_type = other DNA
tacggcaacgctttacgcgtggattttgggcgcggcaactgcacggcgccgaaacgcacctaccctcggcgcctggaact

SEQ ID NO: 158291 - DNA, 80 bp, synthetic construct
  source 1..80: mol_type = other DNA
cacgcagatgctctgtccaggagatttgcgtttgacatggatgtgtatactatgtcagaacactcagtaaagggaaagct

SEQ ID NO: 158292 - DNA, 80 bp, synthetic construct
  source 1..80: mol_type = other DNA
tggtaacatattgttgagtggtaccaacactgcacgaatgatcaagtaccattacccaacaaaagctggatattgtgggg

SEQ ID NO: 158293 - DNA, 80 bp, synthetic construct
  source 1..80: mol_type = other DNA
ccaccttccagatgcccggtaccagtggactgcctcgcgacgtacaaatcgaggacccgcaactcctccacgagggatac

SEQ ID NO: 158294 - DNA, 80 bp, synthetic construct
  source 1..80: mol_type = other DNA
agaggttaggataaccatccagtgcccttacactaacccgccactgtatgacaaagacaacacggacatggggttcgtgc

SEQ ID NO: 158295 - DNA, 80 bp, synthetic construct
  source 1..80: mol_type = other DNA
ccgtagagccctgccggcaccgccggcggaggctccggagcaccaacagggcaacaacaacaacaacgggcagctgcaaa

SEQ ID NO: 158296 - DNA, 80 bp, synthetic construct
  source 1..80: mol_type = other DNA
gactacaaaggacgtaaccaagttacaggaaatgattgacacatatggtcttgacttgccatatgttacatacttgaagg

SEQ ID NO: 158297 - DNA, 80 bp, synthetic construct
  source 1..80: mol_type = other DNA
gtcttttacaccacgggtaatgcaccgccaagggtctcagtaccatttatgggcatcagcggggcatactcacacttcta

SEQ ID NO: 158298 - DNA, 80 bp, synthetic construct
  source 1..80: mol_type = other DNA
cccacttgaagtcaacaaagtgaatgaacaaatattcggtactagattatttataggagatggggtattcaaaaccacat

SEQ ID NO: 158299 - DNA, 80 bp, synthetic construct
  source 1..80: mol_type = other DNA
ccccggcattagagtgttaagcttctcacgaggctgaagcttgatatgtcgttatccgcacagttactaagcagagccta

SEQ ID NO: 158300 - DNA, 80 bp, synthetic construct
  source 1..80: mol_type = other DNA
cagcttatacaggcaatggatagatgaatttatttgaataatatagtgttatgtttgcagtagaactatatactataaaa

SEQ ID NO: 158301 - DNA, 80 bp, synthetic construct
  source 1..80: mol_type = other DNA
caatgtaatgcaagtaaatttcatcaaggcacactactagtcgccatggtaccagaacatcaattggccagtgctagccg

SEQ ID NO: 158302 - DNA, 80 bp, synthetic construct
  source 1..80: mol_type = other DNA
ccggtaatgggagtgccataaggcataagatttctcagggcccggccggtaacggtgccgtaggaagacggggtttcgcg

SEQ ID NO: 158303 - DNA, 80 bp, synthetic construct
  source 1..80: mol_type = other DNA
tcagaagttgccataatagcattagcaacacagtatatagactgtttcaagaactagccagaattccaaatcgaattagc

SEQ ID NO: 158304 - DNA, 80 bp, synthetic construct
  source 1..80: mol_type = other DNA
cgatgccgcgggcatcgagcgcaagtggtatgactgcgtttggagtagccatgctgcttgctgtggttgtggcgatcctg

SEQ ID NO: 158305 - DNA, 80 bp, synthetic construct
  source 1..80: mol_type = other DNA
aagtgggaaaaagtaactaaagaagcctatgagttagtatcagaagaatacagacaaatatacaccacaactgttacata

SEQ ID NO: 158306 - DNA, 80 bp, synthetic construct
  source 1..80: mol_type = other DNA
ggactgttgaacactgctaaggcgctacaaaagtgtgatgggtgtccaaccccccccttattaaaatcctgctgtcccat

SEQ ID NO: 158307 - DNA, 80 bp, synthetic construct
  source 1..80: mol_type = other DNA
gatcccagcactgtggagctggaagacaggcaggcctgggcagatctaccgggtagacacgaggcttcactttccctcac

SEQ ID NO: 158308 - DNA, 80 bp, synthetic construct
  source 1..80: mol_type = other DNA
acgtgtggcagatacaattggtagtgggccgtcaaattcgcaagcagtgcctgctttaacagcagttgagacagggcaca

SEQ ID NO: 158309 - DNA, 80 bp, synthetic construct
  source 1..80: mol_type = other DNA
aggcccgcggcagtgagagctctgcctcagccgcccgctgacaacccgaggcccgctctgccatggcgtgaggatggtgg

SEQ ID NO: 158310 - DNA, 80 bp, synthetic construct
  source 1..80: mol_type = other DNA
ctgttacagagaggggcgaaggggtccagcagcaagaaggagactccagttcagaggaagaaaagctcccgtgctttaca

SEQ ID NO: 158311 - DNA, 80 bp, synthetic construct
  source 1..80: mol_type = other DNA
tggagggtaggagtgtgaattttctaatggcagagcagtcagtagaggcaatcgacatgagaatacagactgtccaagcc

SEQ ID NO: 158312 - DNA, 80 bp, synthetic construct
  source 1..80: mol_type = other DNA
ccgacaccagtgactgaaaagcgaaaggacctaataaccacgggcccttatggacaacaatcaggggcagtgtatgtggg

SEQ ID NO: 158313 - DNA, 80 bp, synthetic construct
  source 1..80: mol_type = other DNA
tccgctacctagaggcaaatatcagtgtacaattagaacaggcacaaattcagcaagaaaagaacatgtatgaactacaa

SEQ ID NO: 158314 - DNA, 80 bp, synthetic construct
  source 1..80: mol_type = other DNA
aagaatggaatataacagtggatgattatgatagagtccacttttatagtaggaaaattggacactgaaaatatgataca

SEQ ID NO: 158315 - DNA, 80 bp, synthetic construct
  source 1..80: mol_type = other DNA
gttttacacgtccccgtgcacgttcgcgcctgcaacctcacccaagagctatcgacgggcgaggacgcccgcttctgtcg

SEQ ID NO: 158316 - DNA, 80 bp, synthetic construct
  source 1..80: mol_type = other DNA
aaagttaaatactcacaaactcaccccggtgagcaaggccatatcatccgggcatcagatcagcgtggacagaacaaccc

SEQ ID NO: 158317 - DNA, 80 bp, synthetic construct
  source 1..80: mol_type = other DNA
actgtttcatcacccgaagctatagatagaagatttttcttagattgtgatgttaaaatcatgccagcatacaatacaaa

SEQ ID NO: 158318 - DNA, 80 bp, synthetic construct
  source 1..80: mol_type = other DNA
cataaatccccgtgtccttggccatgcataaataaagtgtacatgtttcccccagaaaaacccatgcccatacacggtta

SEQ ID NO: 158319 - DNA, 80 bp, synthetic construct
  source 1..80: mol_type = other DNA
catacacgcagataagctaccaacacaatatcaagcatttataaaatatctacaagaccactggatagaaacaaataaac

SEQ ID NO: 158320 - DNA, 80 bp, synthetic construct
  source 1..80: mol_type = other DNA
aatgtaacattaaacgattcaggcgcttatactgaacacgtttacgaatgtgacctttcatgtaacattactacttataa

SEQ ID NO: 158321 - DNA, 80 bp, synthetic construct
  source 1..80: mol_type = other DNA
gcagaaaggccataatctctcgaaagtaggcggtggggctgagaccatgctcagtggccgtctggcaggtggccgggtgc

SEQ ID NO: 158322 - DNA, 80 bp, synthetic construct
  source 1..80: mol_type = other DNA
gaactgtggcaaggaaggacactcagcaaggcagtgccgcgcacccagaagacaggggtgttggaagtgtggcaagccag

SEQ ID NO: 158323 - DNA, 80 bp, synthetic construct
  source 1..80: mol_type = other DNA
ctgatggagacaatttcgcctactgggtaatcaacacaagacaggtcgcgcagttgcgccgcaaattagaaatgttcacg

SEQ ID NO: 158324 - DNA, 80 bp, synthetic construct
  source 1..80: mol_type = other DNA
agagacattaaagaggtcagcaactatggtccttctgacttgcatgtacatatgggtaatctagtatacagaaatttaca

SEQ ID NO: 158325 - DNA, 80 bp, synthetic construct
  source 1..80: mol_type = other DNA
ccatgatgatatgcgggcacactaactggaaccgaaactacgccctccacagcgaggactacccagagcagggcaggtat

SEQ ID NO: 158326 - DNA, 80 bp, synthetic construct
  source 1..80: mol_type = other DNA
taaaaaaggctgggaatacacatacaccagacttatggcctccatatactatcaagcagtgccaaacagcacatacaact

SEQ ID NO: 158327 - DNA, 80 bp, synthetic construct
  source 1..80: mol_type = other DNA
gaaaggcactcatcctacaaaacaagaggacaaaggccagctactccataaacactgtggtacagcaattgcgtcaggaa

SEQ ID NO: 158328 - DNA, 80 bp, synthetic construct
  source 1..80: mol_type = other DNA
accctgtgtcaaaggtcaagggacggccttccggcttacacaaaatggaggtcaattactaccgggtcaaaggtcacagc

SEQ ID NO: 158329 - DNA, 80 bp, synthetic construct
  source 1..80: mol_type = other DNA
ggtacaagggcagaaaataggacatatatgtattggcatagtaaagataataggactattataagcttgaataagtatta

SEQ ID NO: 158330 - DNA, 80 bp, synthetic construct
  source 1..80: mol_type = other DNA
actcaatggcctatgacattacaactggagacaaaaatcccagtaaacttgtgagattagatacagccacatggcaaagt

SEQ ID NO: 158331 - DNA, 80 bp, synthetic construct
  source 1..80: mol_type = other DNA
atttacctggtgagcaatcagacatgcgacggctttagcctggcctccttaaattcacctaagaatgggagcaaccagct

SEQ ID NO: 158332 - DNA, 80 bp, synthetic construct
  source 1..80: mol_type = other DNA
aggtagcagttgaccactacgctgcacaactatccgttctggagatcaatacagaagccttaactctagagcaagcagtt

SEQ ID NO: 158333 - DNA, 80 bp, synthetic construct
  source 1..80: mol_type = other DNA
ccttcgtaagccaaactgccttttaccagaacgatgtgcaaaatgcaatcgaccgagctgtggttcgtgtggctgacacg

SEQ ID NO: 158334 - DNA, 80 bp, synthetic construct
  source 1..80: mol_type = other DNA
ctatcgtgcctctagcacacccaacaggaatgactacaacaataccaatcacagtaactatagcacccatgtgtactgag

SEQ ID NO: 158335 - DNA, 80 bp, synthetic construct
  source 1..80: mol_type = other DNA
cagttttgctagccctcacagcagacttgcaaattgattacactgaagagagaggacctgataccgtcccacaatgtgac

SEQ ID NO: 158336 - DNA, 80 bp, synthetic construct
  source 1..80: mol_type = other DNA
gtaaattacatgaaattagaaagcaatactttgactggcttacaacaaaactaccacaaccaacacaaactgactatgga

SEQ ID NO: 158337 - DNA, 80 bp, synthetic construct
  source 1..80: mol_type = other DNA
gacgtcaggtcaaaggtcattgtctgcgtcagctactcgaaatggcggtatattccttccgggtcaaaggtcgccgctac

SEQ ID NO: 158338 - DNA, 80 bp, synthetic construct
  source 1..80: mol_type = other DNA
cgcgtccccggccgcggcagccaagcccccaaggggtgcggggagcggccaatggagcgtgacgaagtgccccaggtctg

SEQ ID NO: 158339 - DNA, 80 bp, synthetic construct
  source 1..80: mol_type = other DNA
acgtcattcgtgacgtggggaggcctgctgcgtcatatgcggaagtaggccccgctacgtcacggtcacgtgggtgatgc

SEQ ID NO: 158340 - DNA, 80 bp, synthetic construct
  source 1..80: mol_type = other DNA
catagtttgtgaacagaatactagtgaaagtgaaagtaaatgttacatgaaccactgcaacacctctgttatccaagagt

SEQ ID NO: 158341 - DNA, 80 bp, synthetic construct
  source 1..80: mol_type = other DNA
accttagcgaggcagctctcaagcgagttagacaacaaccgctcgattatgaggcttatcacttcctgccaaaaagacct

SEQ ID NO: 158342 - DNA, 80 bp, synthetic construct
  source 1..80: mol_type = other DNA
ttctccgagaggatgatcctgtacaaacccaacaatgtgaaccttatggagatgtgcgccctgctctcgatgattgagaa

SEQ ID NO: 158343 - DNA, 80 bp, synthetic construct
  source 1..80: mol_type = other DNA
actttcctgcgtttggcagggaaaagccttcgccctgcaatggcagttttttggttcactccaacccaatgatttaaccg

SEQ ID NO: 158344 - DNA, 80 bp, synthetic construct
  source 1..80: mol_type = other DNA
actctcaggaacagttttccgagttagcggtgcttttggttttcgtgggggttttggagttggacgttgagtctcaggaa

SEQ ID NO: 158345 - DNA, 80 bp, synthetic construct
  source 1..80: mol_type = other DNA
ccggatgtagcggtcgtcgcgcacgtcgcaggcgtagacggccccggtataggcgacgacgatggggataaggtcgacgg

SEQ ID NO: 158346 - DNA, 80 bp, synthetic construct
  source 1..80: mol_type = other DNA
gtgcaaaaaagaaactggaaactggggcataccagactgggccagagtaattataaagtgcccctacacctttccaaaac

SEQ ID NO: 158347 - DNA, 80 bp, synthetic construct
  source 1..80: mol_type = other DNA
caggagacgaaagagactagtactcactcagtggcatccagccgtcagacgcaaatgtagaattactggctacttaccca

SEQ ID NO: 158348 - DNA, 80 bp, synthetic construct
  source 1..80: mol_type = other DNA
agaggaggaaatcctctcgcagctgtaccgccctctagaaacgtgttataataaatgctactgcaaaaagtgctgctatc

SEQ ID NO: 158349 - DNA, 80 bp, synthetic construct
  source 1..80: mol_type = other DNA
cgtgcaatgatttttcagcgagacttctacgtgactccccctttgtgcgacagcttgagacagcgtggaaacaaggtgta

SEQ ID NO: 158350 - DNA, 80 bp, synthetic construct
  source 1..80: mol_type = other DNA
gtgtacatgttgttgaaattgtgaacaagcgccccacagatacagaggaacacagaatgcaactcttgtttaataattgg

SEQ ID NO: 158351 - DNA, 80 bp, synthetic construct
  source 1..80: mol_type = other DNA
acgccttcggctgcgcgcggcacctcagaccccccctccacccgaaacgcttgcgcgtttcggaccttcggcgtcgggtg

SEQ ID NO: 158352 - DNA, 80 bp, synthetic construct
  source 1..80: mol_type = other DNA
accctttgtttcagggcactggaggaaagagacggaacagatatcaaagtcttcatcaagcctaagcacactagggcgtg

SEQ ID NO: 158353 - DNA, 80 bp, synthetic construct
  source 1..80: mol_type = other DNA
aggaaacacagcaggcattacacctacttggaatcaggtacaaaataccacagtattagatagttcaggcagcaatgcca

SEQ ID NO: 158354 - DNA, 80 bp, synthetic construct
  source 1..80: mol_type = other DNA
gacaggggcgacttctaacaccaccccggaggaggcaattcaaaccagggccgtgatcaaccaacatggtaccagtgaaa

SEQ ID NO: 158355 - DNA, 80 bp, synthetic construct
  source 1..80: mol_type = other DNA
catcctgcaattgaattcgagaaaatgggagcgcaagtctcaacacaaaagtctggtagccatgagaccggtaacatagc

SEQ ID NO: 158356 - DNA, 80 bp, synthetic construct
  source 1..80: mol_type = other DNA
tgcggtttcgatgaggaaatcttcttcgattacaatgtcgagacacttccagaaattgaacccacagctaatgaaatcct

SEQ ID NO: 158357 - DNA, 80 bp, synthetic construct
  source 1..80: mol_type = other DNA
ggaagaggaaacaggagattggtgtgaaaggagaaaatctgcttctccccgacttatggctagatttcctacaactcagc

SEQ ID NO: 158358 - DNA, 80 bp, synthetic construct
  source 1..80: mol_type = other DNA
cagcacatatgactgggaaaattacagtaatgatgacaactatagtaaaacatatacaaaatggaacgaagacagacaga

SEQ ID NO: 158359 - DNA, 80 bp, synthetic construct
  source 1..80: mol_type = other DNA
acgtacccgagattcgcgtggagatcccacgctatgtttaataaaaactgcgggcactggggacggtggtgttgtatatg

SEQ ID NO: 158360 - DNA, 80 bp, synthetic construct
  source 1..80: mol_type = other DNA
tagccggataaggggagcaacaaccgtcggcgaaagccgtcccgctcattcagtccgggtttcgcgtctagtcggaggtg

SEQ ID NO: 158361 - DNA, 80 bp, synthetic construct
  source 1..80: mol_type = other DNA
gttggagtcgcgacctgtcccgcaagacgaacctaccgatatgggtgccgaactctgcaaacgaatatgttgtgagttcg

SEQ ID NO: 158362 - DNA, 80 bp, synthetic construct
  source 1..80: mol_type = other DNA
tggcttatattggtgccggtggcgtccaagtcaggtatgatcacactcatccaggtgaacaagggcacactttgcaggcg

SEQ ID NO: 158363 - DNA, 80 bp, synthetic construct
  source 1..80: mol_type = other DNA
agggggctggtgcggacgcctgtgtttagtctatgccaatgtttacctgccttgggttactattccaaacgaccacacct

SEQ ID NO: 158364 - DNA, 80 bp, synthetic construct
  source 1..80: mol_type = other DNA
ggtcgccgctttaaaaagaaactagtactgactcagtggcaccctagtaccatgagacgctgcttaatcaagggcatagt

SEQ ID NO: 158365 - DNA, 80 bp, synthetic construct
  source 1..80: mol_type = other DNA
atttttgctaaacccaaacatacatctgcatggataccacgccctcccagagctacacagtacctgcacaaattcagcac

SEQ ID NO: 158366 - DNA, 80 bp, synthetic construct
  source 1..80: mol_type = other DNA
ccactatggatggtatcctttggatacgtagactgggtaaaaaaagagactggcaactggggtattccactatgggccag

SEQ ID NO: 158367 - DNA, 80 bp, synthetic construct
  source 1..80: mol_type = other DNA
gacagccgcaaaatagatcgtggagcatgtctcgccaactgtcctggtgataatatcttaagtacgcgatgagcgcgccg

SEQ ID NO: 158368 - DNA, 80 bp, synthetic construct
  source 1..80: mol_type = other DNA
aaaaacacaggttcacctccacgcacccattatcccctcataggcccaaaagcctgcctatttccagacaggctgccaaa

SEQ ID NO: 158369 - DNA, 80 bp, synthetic construct
  source 1..80: mol_type = other DNA
taacaagggactcggagtatgttatgagcaacctagaagaagaagaactccgaaaaagactaaggctaattcattttctg

SEQ ID NO: 158370 - DNA, 80 bp, synthetic construct
  source 1..80: mol_type = other DNA
cagtgggtgccattatggttacatgttcagcgtgtcccgacatggccgtgcgcatgcttcgggatacaccaatgatgaaa

SEQ ID NO: 158371 - DNA, 80 bp, synthetic construct
  source 1..80: mol_type = other DNA
attgctacgtaagtacttcgcacagtctcaaggtgagatcactgccaaacatgatgtcagtgatgtgggcttacatccaa

SEQ ID NO: 158372 - DNA, 80 bp, synthetic construct
  source 1..80: mol_type = other DNA
acaaaactaatccaaagcaaggctatgtgttttatgacactctgtttggagatggaaaaatgcctacaggaacaggcctt

SEQ ID NO: 158373 - DNA, 80 bp, synthetic construct
  source 1..80: mol_type = other DNA
ataacccataataacacatggtacagaggcaatgcatacaatgacaaaattacagacctacctgaaatagtaaaaaaaag

SEQ ID NO: 158374 - DNA, 80 bp, synthetic construct
  source 1..80: mol_type = other DNA
aacaaaagatgactcagtatatagcaaacaacaaagtaaatgtttaatagcagacatgcccctgtgggcctcagtatatg

SEQ ID NO: 158375 - DNA, 80 bp, synthetic construct
  source 1..80: mol_type = other DNA
agtgattatattgtgtatgcgccgcgcggcatgccctagaagattataacacgaaacgttgtaataacaggaaatatggc

SEQ ID NO: 158376 - DNA, 80 bp, synthetic construct
  source 1..80: mol_type = other DNA
gactaccccacacgtcccggacagtgtggaggggttatcttgaacacaggaaatgtggttgctattcatgtgggaggcaa

SEQ ID NO: 158377 - DNA, 80 bp, synthetic construct
  source 1..80: mol_type = other DNA
caagcagataccacctcacaacacatgtaaacaccctgtttgacagcaccaaaaccatgcaagaggcgaaagagattggc

SEQ ID NO: 158378 - DNA, 80 bp, synthetic construct
  source 1..80: mol_type = other DNA
ggatcagaaatcaaggtcgaagaatggtgcaatccgatctgctccaaggttaaatcagaaccatcaagggaaaagtgtac

SEQ ID NO: 158379 - DNA, 80 bp, synthetic construct
  source 1..80: mol_type = other DNA
ccgccccagcagatactcgcaggtaatggggaggtgatcacagcgcgtcatgttctccggcagctttacatagagggtct

SEQ ID NO: 158380 - DNA, 80 bp, synthetic construct
  source 1..80: mol_type = other DNA
tatcacaatggggtacttgaatacaaaagttctttctaaggtgattaaaatagtatcagctttagttattatatgtagaa

SEQ ID NO: 158381 - DNA, 80 bp, synthetic construct
  source 1..80: mol_type = other DNA
atgagtcttccaacacatgttccttaatagggttcgtggcggcaaaagatgacttctccctcaggttaatgagagatagt

SEQ ID NO: 158382 - DNA, 80 bp, synthetic construct
  source 1..80: mol_type = other DNA
agtgtgcgttgtacactgcgatcttggtcgctttgtatgcctgtttttaccacccaccccaactttactgtcttcttcac

SEQ ID NO: 158383 - DNA, 80 bp, synthetic construct
  source 1..80: mol_type = other DNA
tgtattacccacaggtcgttaaaaacccctgtggagactccggaatcgttcccggttccggtagattcactcgagaagta

SEQ ID NO: 158384 - DNA, 80 bp, synthetic construct
  source 1..80: mol_type = other DNA
gtagcttgctcaaacataatgcttgtattgttacaactgataatggcaaatttacaggtttgggtatctatgataatgtc

SEQ ID NO: 158385 - DNA, 80 bp, synthetic construct
  source 1..80: mol_type = other DNA
aataggttaacctacaatagttcaagccccaatgaagttttctgcatagtacaagggcgtctgggtgatgacgctaaatt

SEQ ID NO: 158386 - DNA, 80 bp, synthetic construct
  source 1..80: mol_type = other DNA
caaactgctgcccccgggcctcttggaatgcagctggggccaggggagtcggcaggttacccaccattagccggtgcacg

SEQ ID NO: 158387 - DNA, 80 bp, synthetic construct
  source 1..80: mol_type = other DNA
ggtttcgcccactcagatgctgatgcccaacaacagttattggtggaagtgtcaaagttaaagagagggttggacgatct

SEQ ID NO: 158388 - DNA, 80 bp, synthetic construct
  source 1..80: mol_type = other DNA
gatttagggagtgaagaggtagtcgattgtcggttcaatatgacaggactacaactagataagccacagcaatatagtga

SEQ ID NO: 158389 - DNA, 80 bp, synthetic construct
  source 1..80: mol_type = other DNA
gccagccagcagaaaacaggcaatgcttggaacccacataatttgggacataggactacaatctagttgtgttttgtgca

SEQ ID NO: 158390 - DNA, 80 bp, synthetic construct
  source 1..80: mol_type = other DNA
ggcgaaaatgcgagatgttcacatacatgagatttgacttggaagttacctttgtggtgacgagctaccagcaatatagc

SEQ ID NO: 158391 - DNA, 80 bp, synthetic construct
  source 1..80: mol_type = other DNA
cagagccgaggcctaggccctcgcgcacgccatcacccgggcgcaaccgccgccgctcttctacgtcctcatcttcctcc

SEQ ID NO: 158392 - DNA, 80 bp, synthetic construct
  source 1..80: mol_type = other DNA
attggcaaaactaccaaacaaactatgctacagtataccaaaaattcaaagacaaacaatcaaccaacttaaatcttatt

SEQ ID NO: 158393 - DNA, 80 bp, synthetic construct
  source 1..80: mol_type = other DNA
tgtcagaaagctgcaaccaaacctgtccttgtctatgttcctgtaatactaccgccagttattccactaatagcactgag

SEQ ID NO: 158394 - DNA, 80 bp, synthetic construct
  source 1..80: mol_type = other DNA
tttacacagtcaaaggaggaatgccatctggttgctctggaactagtatctttaattcaatgataaataatataatcatt

SEQ ID NO: 158395 - DNA, 80 bp, synthetic construct
  source 1..80: mol_type = other DNA
acaaagacatgaccattgatgtttatgataaacctccacctgattgtatagtggacctactcaaatcagttgatagtgta

SEQ ID NO: 158396 - DNA, 80 bp, synthetic construct
  source 1..80: mol_type = other DNA
gagctagaagaacttttccgcgccgccgccgaggacgatatgtgagtaggcgatggcgccgacgatacaggcgcagacct

SEQ ID NO: 158397 - DNA, 80 bp, synthetic construct
  source 1..80: mol_type = other DNA
tgactccatcagcaccaccgatggacccagcagtagacctactgaagaattacatgcaactggggaggaagcaaaaggag

SEQ ID NO: 158398 - DNA, 80 bp, synthetic construct
  source 1..80: mol_type = other DNA
tgtgagatttcattaccataatgggtgcacaagtttcatcacagaaggtgggagcgcatgaaaacactaatgtagctaca

SEQ ID NO: 158399 - DNA, 80 bp, synthetic construct
  source 1..80: mol_type = other DNA
acgggtccatttagctacaaggatgacctaaaatcatttagccttaatgctaaatacaagtttagcttcttatggggcgg

SEQ ID NO: 158400 - DNA, 80 bp, synthetic construct
  source 1..80: mol_type = other DNA
ggaggcggtatactagacggtggcgactgagactgagacgcagacgcagacgcaggggtaaaatatacctagcgcagtgg

SEQ ID NO: 158401 - DNA, 80 bp, synthetic construct
  source 1..80: mol_type = other DNA
gatctggaagtaacgtttgtcataacgagcgcgcaggtgacctccacgaaccaaagccaggacgcacccgttctcaccca

SEQ ID NO: 158402 - DNA, 80 bp, synthetic construct
  source 1..80: mol_type = other DNA
agaaaccgctgcaaggacaccggtgtttcctcgggcaatagagtccctcgatcagtacaaaccgttgacccgaagtacaa

SEQ ID NO: 158403 - DNA, 80 bp, synthetic construct
  source 1..80: mol_type = other DNA
cagggtgtggcaaatccttggcttctaaaatcattgctagagggctaaccaatgaaagcaatgtctactcattaccacct

SEQ ID NO: 158404 - DNA, 80 bp, synthetic construct
  source 1..80: mol_type = other DNA
tccctgtcaaacggtgatgtaccaatgaagttttccaaccaaaaggagacttccgccaacaaagtgcaaaacgcagtgtg

SEQ ID NO: 158405 - DNA, 80 bp, synthetic construct
  source 1..80: mol_type = other DNA
gtaacagacccagcaatgaccaatattttgccacaaacgatagtctctggggagatgctatttttgtaaatagtgctcaa

SEQ ID NO: 158406 - DNA, 80 bp, synthetic construct
  source 1..80: mol_type = other DNA
aggtgtggttcctataactgtatccataagtccaatgtttgctgaattttctggagctcgtgcaagaagtcaaggtttac

SEQ ID NO: 158407 - DNA, 80 bp, synthetic construct
  source 1..80: mol_type = other DNA
ccagggtttcaggaaatgggagataaacttccaagaatatgcccaagttaggaaaaagtttgagatgtttacatatgtta

SEQ ID NO: 158408 - DNA, 80 bp, synthetic construct
  source 1..80: mol_type = other DNA
acagttctagtccaaataaggtgcattgtatagtgcagggaaggctgggtgatgatgctaaatttttctgccccactggc

SEQ ID NO: 158409 - DNA, 80 bp, synthetic construct
  source 1..80: mol_type = other DNA
gtagtaccagacacccaaagaactggaccaatacacacaaccaaacccacctcactaagtgcaatggaaataggtgccac

SEQ ID NO: 158410 - DNA, 80 bp, synthetic construct
  source 1..80: mol_type = other DNA
tagtatgaatgatacagcaaacttcagaagagtatttggcaacttgtatgctggttttcatgcaaacccaggcattctaa

SEQ ID NO: 158411 - DNA, 80 bp, synthetic construct
  source 1..80: mol_type = other DNA
gacaaccaagagcaagaaggcgtctcagatacagagacgacaagctcgcagtcctcgcaagaagaagccgctcaagaagc

SEQ ID NO: 158412 - DNA, 80 bp, synthetic construct
  source 1..80: mol_type = other DNA
atggatatgataatcaagatatacatttgattgatgatctaggccagactaaaaaggaaaaggatattgaaatgttatgt

SEQ ID NO: 158413 - DNA, 80 bp, synthetic construct
  source 1..80: mol_type = other DNA
atgggtgcacaagtgtcatcacaaaaagtgggagcacatgagaatacaaatgtggcaacgggtggttccaccgtgaacta

SEQ ID NO: 158414 - DNA, 80 bp, synthetic construct
  source 1..80: mol_type = other DNA
ctggcaggctttacaacaagaaaatgacttgcactcccaatacggcaaggcccaatgtgaagaatttgagtaccacctag

SEQ ID NO: 158415 - DNA, 80 bp, synthetic construct
  source 1..80: mol_type = other DNA
aaacacaagataataattcccagctttcaaacaagacctgggggcagacgctttgttaaaataagacttaatccccccaa

SEQ ID NO: 158416 - DNA, 80 bp, synthetic construct
  source 1..80: mol_type = other DNA
gagtatggtattgacttgccgtacgtcacctatctaaaagatgaacttagaactccagagaaaattaaggcaggcaagac

SEQ ID NO: 158417 - DNA, 80 bp, synthetic construct
  source 1..80: mol_type = other DNA
cccagcagacttactgtggaagggagaaggagcggtccttattaaggtagggacagacattaaggtaatacccaggagaa

SEQ ID NO: 158418 - DNA, 80 bp, synthetic construct
  source 1..80: mol_type = other DNA
cggagcaggcacctccaaaggtccctatttttgacccttttggccaaaaaacggagctagagctgtgcggctgcttcgac

SEQ ID NO: 158419 - DNA, 80 bp, synthetic construct
  source 1..80: mol_type = other DNA
agtttacagaatggtgcaatgcggctaaaggattagagtggattggatacaagatcagcaaatttattgattggctaaaa

SEQ ID NO: 158420 - DNA, 80 bp, synthetic construct
  source 1..80: mol_type = other DNA
ggccatctccgtctttctcgcccccttcactccccccttgggctccacaaagacgtactggatgcggtcgtggatctggg

SEQ ID NO: 158421 - DNA, 80 bp, synthetic construct
  source 1..80: mol_type = other DNA
gtcagttcgtgggatgttagaagccagcgaaggcctggatggttggattcatcaacagggcggctggtctacattaattg

SEQ ID NO: 158422 - DNA, 80 bp, synthetic construct
  source 1..80: mol_type = other DNA
ccccaggaggccactggggcgctagcactccgattctgcggaatctttgtgcgcctgttttataaccctcccccgaaact

SEQ ID NO: 158423 - DNA, 80 bp, synthetic construct
  source 1..80: mol_type = other DNA
aaaccagacacgtcatccagaccagatcgcggagtgagagtactatcgaatctttcttcgcacgaggtgcctgcgtaaca

SEQ ID NO: 158424 - DNA, 80 bp, synthetic construct
  source 1..80: mol_type = other DNA
tgcgatgtgtttatttttttcttctgtgtctcctccccgtatgctgtcagcgccgctcagacgaattctcgaaagtctcc

SEQ ID NO: 158425 - DNA, 80 bp, synthetic construct
  source 1..80: mol_type = other DNA
aagagtcttgcatcaggttatgacacagactccgggagatgctagcttcttagactgggcaagcgacccatattcatcaa

SEQ ID NO: 158426 - DNA, 80 bp, synthetic construct
  source 1..80: mol_type = other DNA
cgaaggcacctgccatgagcttcaccacacctactattaatgccgggatccgagagcagcaatggttcgagtccaccctt

SEQ ID NO: 158427 - DNA, 80 bp, synthetic construct
  source 1..80: mol_type = other DNA
tggatgtggattcacaaaccagataagtgaaaaagttgctgaaatcacttcaatggtgagtagtgttataacagagaaat

SEQ ID NO: 158428 - DNA, 80 bp, synthetic construct
  source 1..80: mol_type = other DNA
atcattacagattctagggatgttgatacagaaattactataatttggctagataggaatgaaaagttcagagacatcag

SEQ ID NO: 158429 - DNA, 80 bp, synthetic construct
  source 1..80: mol_type = other DNA
gagcaccataaccatgagcctaaaagtactatacgacgaatacacaaggtgcttaaacaggtggtcctatggcaatgacc

SEQ ID NO: 158430 - DNA, 80 bp, synthetic construct
  source 1..80: mol_type = other DNA
cttttggtggttttggtcatcaaaacaaggctgtttacgttgcaggatacaaaatttgcaactatcacctagccacccca

SEQ ID NO: 158431 - DNA, 80 bp, synthetic construct
  source 1..80: mol_type = other DNA
agatggtaccccatactcaaaagacaaaaacaagtaatgaatgacatctgcaagactggacctttcagctacagagacga

SEQ ID NO: 158432 - DNA, 80 bp, synthetic construct
  source 1..80: mol_type = other DNA
gcaactgtatatcatctgtcccctttattgtaccaatggcacaccttgaggaaaaaggaaaattttatactagtaaactg

SEQ ID NO: 158433 - DNA, 80 bp, synthetic construct
  source 1..80: mol_type = other DNA
tgccaaacctgcgttatcagcagactcaaccacctcaccacatgagccactggagaccaccgcctacgtcgtcaacttcc

SEQ ID NO: 158434 - DNA, 80 bp, synthetic construct
  source 1..80: mol_type = other DNA
ttcgccgctttggattacctcttgggctcaggtgtattggctgggaatgcctttgtatacccccaccagatcatcaacct

SEQ ID NO: 158435 - DNA, 80 bp, synthetic construct
  source 1..80: mol_type = other DNA
gctcaaaaatttccaaagcatctaaggaagttgttgattggttctcagacaagattaagtccatgcttaattttgtggaa

SEQ ID NO: 158436 - DNA, 80 bp, synthetic construct
  source 1..80: mol_type = other DNA
acatactccccagcttccattcaaccaaacaaattcacatacctggtgaaatcaagacaattatggatatggctcgcgta

SEQ ID NO: 158437 - DNA, 80 bp, synthetic construct
  source 1..80: mol_type = other DNA
cgtctcgcgcagatacgtgaggcaggctgcgctgagctcaaaggggatggtgatgggggatttttcactgtatttggtga

SEQ ID NO: 158438 - DNA, 80 bp, synthetic construct
  source 1..80: mol_type = other DNA
agggcaacatggtgtggtttcagtaccacacaaagacagacaacaagtttaaaaaaccagagtgccactgggaaatcaaa

SEQ ID NO: 158439 - DNA, 80 bp, synthetic construct
  source 1..80: mol_type = other DNA
atgaatgacaacacaaatgctgaagcagcagtggagaacttcctgggaagatctgctttgtgggcaaacctaagattgga

SEQ ID NO: 158440 - DNA, 80 bp, synthetic construct
  source 1..80: mol_type = other DNA
ttgctaactgcgcttggtaactatatctatgataggcatggagacaccctcgagggagcaggagaactcattaaaatcct

SEQ ID NO: 158441 - DNA, 80 bp, synthetic construct
  source 1..80: mol_type = other DNA
catatggcgtgtggccacagtatttgacccctgatcatgctagtgcaattgacaagccaacacacccagatatatcctca

SEQ ID NO: 158442 - DNA, 80 bp, synthetic construct
  source 1..80: mol_type = other DNA
ctaaggctgcccctacctcgggggactgggaaacagaatactttgcttgtaaaatgatgaatagaccacctagaaaattc

SEQ ID NO: 158443 - DNA, 80 bp, synthetic construct
  source 1..80: mol_type = other DNA
tgtgttaccataatgacagtggacaattcggcctccaccacgtcaaaagacaagttattttctgtgtggaaaatcacgta

SEQ ID NO: 158444 - DNA, 80 bp, synthetic construct
  source 1..80: mol_type = other DNA
ctgtcaccccgtgtcaaagttcaggggtcagccttccgctttgcacaaaatggcggtcaaacacatccgggtcaaagttc

SEQ ID NO: 158445 - DNA, 80 bp, synthetic construct
  source 1..80: mol_type = other DNA
gatttgatgagtgaagttttcgctataaatgtagatatagcttcccaccccttggcaaccactatgctaggtgaaattgc

SEQ ID NO: 158446 - DNA, 80 bp, synthetic construct
  source 1..80: mol_type = other DNA
tgtctcgtcgacgtcatcgtctaccggcgagggtgtccgttgcagcaacgcgtgctcgggcgtgtgggtgaaaccgatgt

SEQ ID NO: 158447 - DNA, 80 bp, synthetic construct
  source 1..80: mol_type = other DNA
tcgttggatttgctccttcgacaagctacattctagatatcattttcattgtattcttgatcagaaagtaatatcataat

SEQ ID NO: 158448 - DNA, 80 bp, synthetic construct
  source 1..80: mol_type = other DNA
tcatgggagcacaggtttcaagacaaaaggttggttcgcatgacaatgcaataaatgcttcttctggatcggttgttaag

SEQ ID NO: 158449 - DNA, 80 bp, synthetic construct
  source 1..80: mol_type = other DNA
ctatagcaccctaaaccatatgggacaaattttcgtgcggcacgtgaacgcaacactaccgaacgttgtcagcaccgtgc

SEQ ID NO: 158450 - DNA, 80 bp, synthetic construct
  source 1..80: mol_type = other DNA
cctctttttcgccgcctgcaagcattggtgcgcaaagtcctcacccagctgtttccagctatcatctgcatctgtgcagt

SEQ ID NO: 158451 - DNA, 80 bp, synthetic construct
  source 1..80: mol_type = other DNA
acggcctcttaagtaatttaccagatagcttaaaaactaacaccgagcaaattaaacaaaatatttatgaaaaactgcag

SEQ ID NO: 158452 - DNA, 80 bp, synthetic construct
  source 1..80: mol_type = other DNA
gttgcttgttggtggttgtggtgccagaacatcagttggcatcacgtactgaaggaaatgtatctgtaaactacaagtac

SEQ ID NO: 158453 - DNA, 80 bp, synthetic construct
  source 1..80: mol_type = other DNA
cacagacaagacgcggaaagaacagacacacgcagagccgcggaaaacacgcgaaaaagaggaagtccccagggggacgg

SEQ ID NO: 158454 - DNA, 80 bp, synthetic construct
  source 1..80: mol_type = other DNA
ttatattaccaagttaaaaggcccaaaagccgcggccctatatgctaagacccacaatctcgcaatgctgcaagatattc

SEQ ID NO: 158455 - DNA, 80 bp, synthetic construct
  source 1..80: mol_type = other DNA
ctgctttccatatttgcgcattgctcatcggtgggatgaatttggtctcctccccgctgttgtccgccggcagtggcgtg

SEQ ID NO: 158456 - DNA, 80 bp, synthetic construct
  source 1..80: mol_type = other DNA
ttgagaaattcagtgatgctctcggccacaaaggtcaacgagtcagagtagatgtggtcggtccacaggtacatggcgcc

SEQ ID NO: 158457 - DNA, 80 bp, synthetic construct
  source 1..80: mol_type = other DNA
agattgtaacgatcatagtctaccaatcgaattccttagattgtataacggtcatataaacatagattacggcgaaaact

SEQ ID NO: 158458 - DNA, 80 bp, synthetic construct
  source 1..80: mol_type = other DNA
gaggacagaatcttaaagggtccctatgggggaggacacagcaccttgagattctccctgtatgtactctaccaggactt

SEQ ID NO: 158459 - DNA, 80 bp, synthetic construct
  source 1..80: mol_type = other DNA
agttgatggacaaaaacaccagacagcgctttactttggacgaaatcaccactttgataatcaatgaaaagaacaggaga

SEQ ID NO: 158460 - DNA, 80 bp, synthetic construct
  source 1..80: mol_type = other DNA
tattggcacatctgttacacttcctgattcctactttgaaggaatatttagaaattacctttataaagaagcctctttct

SEQ ID NO: 158461 - DNA, 80 bp, synthetic construct
  source 1..80: mol_type = other DNA
gttgcacacggccgacggtggtttccgcgccctcttctttgccggctctcctcctctcctgttgctctcctctaccccgc

SEQ ID NO: 158462 - DNA, 80 bp, synthetic construct
  source 1..80: mol_type = other DNA
ctaatctaccaataactgtcacaattgctccaaacaaatcagagttttcaggtgccatgcagaaacagcaagggttgcct

SEQ ID NO: 158463 - DNA, 80 bp, synthetic construct
  source 1..80: mol_type = other DNA
ccccatggccaagcaaccagataacattaagcaaaatcctgtggaagatttcatagactcgacccttcaggaggtcttgg

SEQ ID NO: 158464 - DNA, 80 bp, synthetic construct
  source 1..80: mol_type = other DNA
aaacacaccaacctctccaaacatagaagggcccacactgataaatgaaacttctccatgcatacgaaataacagctgca

SEQ ID NO: 158465 - DNA, 80 bp, synthetic construct
  source 1..80: mol_type = other DNA
tacagagacgagcacctaagcaccaccctgacaatgggctacacctttaaatttaactgggggggcgacatgatgtttcc

SEQ ID NO: 158466 - DNA, 80 bp, synthetic construct
  source 1..80: mol_type = other DNA
cgtgcgttaacaaaaacgaagggaaaaagaactggggctacgtgttttatgacactaactttggaaacggcaagacccca

SEQ ID NO: 158467 - DNA, 80 bp, synthetic construct
  source 1..80: mol_type = other DNA
tctagcgggagatgttatccacaccatcccaattcacatctcagggacaacaggtcaaagttctttgttgacacccccag

SEQ ID NO: 158468 - DNA, 80 bp, synthetic construct
  source 1..80: mol_type = other DNA
agtattgtgaagacaataggtggataataccagcagaatgtaagatagagaaggagttaaatttagctaatacaatcata

SEQ ID NO: 158469 - DNA, 80 bp, synthetic construct
  source 1..80: mol_type = other DNA
tgggatgatccccatggggagactcttgtctggcagtttgatcccgtcctggcatattcagatgaggccttcaacaggtt

SEQ ID NO: 158470 - DNA, 80 bp, synthetic construct
  source 1..80: mol_type = other DNA
ccccagcctgttgtctggccacggccgttcgggcggcctccgccagggataggaggcgcttccagctctcgtcgtccagg

SEQ ID NO: 158471 - DNA, 80 bp, synthetic construct
  source 1..80: mol_type = other DNA
agactgggaaacagaatatcaggcctgtaaattttgggacaggcctcccagaaagttccttaccgatacacccttctacc

SEQ ID NO: 158472 - DNA, 80 bp, synthetic construct
  source 1..80: mol_type = other DNA
gatcttgaattctatccaatcgctccaaagagacctagactgttccccccaacagaagcagaaggagaggaaaagcaaga

SEQ ID NO: 158473 - DNA, 80 bp, synthetic construct
  source 1..80: mol_type = other DNA
gaagatgagattagaagaactgaagcacaaatgttagggttgttagatgcagatatgagacaagcatttggaaacatgtc

SEQ ID NO: 158474 - DNA, 80 bp, synthetic construct
  source 1..80: mol_type = other DNA
ccaatcgaagtttttcatgtcttacaaatcacagtctccttctcatcaatgtaacggaagaatatactgattactatcgc

SEQ ID NO: 158475 - DNA, 80 bp, synthetic construct
  source 1..80: mol_type = other DNA
gagtcagagtactacccaaaacacatccagtacaacttactcattggcaaaggacactgccaaccaggggattgtggagg

SEQ ID NO: 158476 - DNA, 80 bp, synthetic construct
  source 1..80: mol_type = other DNA
gacgcgatgcgttctcaattcgcacagcacggcagaaaccaccttggacagcttcttcagtagagcaggcctagtagggg

SEQ ID NO: 158477 - DNA, 80 bp, synthetic construct
  source 1..80: mol_type = other DNA
aacagcacctatgacttccaaaactatagtacacctactaactataaatcaacatatactaaatggtcagaggaaagaag

SEQ ID NO: 158478 - DNA, 80 bp, synthetic construct
  source 1..80: mol_type = other DNA
gctagatgagtaccagacggccgcggtgtgggatagaccagtaagaagctaccacacagacacccccttttacccctgga

SEQ ID NO: 158479 - DNA, 80 bp, synthetic construct
  source 1..80: mol_type = other DNA
gtcaaaggtcacagctacgtcataagtcacgtgggagggcacgctgtgaacccggaagcggcccacacacgtgactggtc

SEQ ID NO: 158480 - DNA, 80 bp, synthetic construct
  source 1..80: mol_type = other DNA
ggcattggttaaaagagaaagtttgcaacatactaggtattccatatgcaataaaacagggtgattcctggatgaagaaa

SEQ ID NO: 158481 - DNA, 80 bp, synthetic construct
  source 1..80: mol_type = other DNA
gaaattgcgttgggttaccggtcacagagcgtgctgacgtggacgcacgagtgtaataccacggaaaacggtagttttgt

SEQ ID NO: 158482 - DNA, 80 bp, synthetic construct
  source 1..80: mol_type = other DNA
agagcagtggctgtttccagagagaaagcccaagccggctcctaccagccaagactgggccatggagtacctagcttgca

SEQ ID NO: 158483 - DNA, 80 bp, synthetic construct
  source 1..80: mol_type = other DNA
cgctccactggggatctttgccagccttcatactagattcagcgatcccccggttgggaatcttcgccagccccccgtcc

SEQ ID NO: 158484 - DNA, 80 bp, synthetic construct
  source 1..80: mol_type = other DNA
tcatgatggcaagtaattcggcagatcagactggtggaatcacctacgaaaaggccaaccctggagaggctggtggcaaa

SEQ ID NO: 158485 - DNA, 80 bp, synthetic construct
  source 1..80: mol_type = other DNA
cttaggaatacatgacaactgtgctgtcctccccacacacgcaaactgtgaaggtacaattctattagatggtgtagaaa

SEQ ID NO: 158486 - DNA, 80 bp, synthetic construct
  source 1..80: mol_type = other DNA
ggatacaccaatgatgaagcagaccaacaaactacagaataatgatccaattgatacttatgtgcatgatgtcctcaatg

SEQ ID NO: 158487 - DNA, 80 bp, synthetic construct
  source 1..80: mol_type = other DNA
aaaaagcaagtgtatactgaaagacctgcctttatggtgcatgttctatggctacatagactgggtaataaagagcacag

SEQ ID NO: 158488 - DNA, 80 bp, synthetic construct
  source 1..80: mol_type = other DNA
caacattaacaatgccagcacatatcataaaatatttgaggactatctatacaaagaggctagcttttatcagcaagtac

SEQ ID NO: 158489 - DNA, 80 bp, synthetic construct
  source 1..80: mol_type = other DNA
gagtgattccaagcacacccaaaaggttccagcattaaccgcaaatgaaaccggagcaactatgcccactactccatcag

SEQ ID NO: 158490 - DNA, 80 bp, synthetic construct
  source 1..80: mol_type = other DNA
agacatttcaaactgagcaaatgttcagacctagaccaaaaaatccagatggcagtattaatacagaataccaaaactta

SEQ ID NO: 158491 - DNA, 80 bp, synthetic construct
  source 1..80: mol_type = other DNA
gaggataccggtagacagggttcggatgtggagctagagtcatcggacgatgagctgccatatatcgatcccaacatgga

SEQ ID NO: 158492 - DNA, 80 bp, synthetic construct
  source 1..80: mol_type = other DNA
gatacagtctttttccgcatggtcttcggcaacttgtacactactttccataaaaacccgggggttctcacaggttcagc

SEQ ID NO: 158493 - DNA, 80 bp, synthetic construct
  source 1..80: mol_type = other DNA
taactatctgcctacttccaatctcgctctggacccgcccggcccaagcccgtcgcgccgcggcaatctcagacgcctcc

SEQ ID NO: 158494 - DNA, 80 bp, synthetic construct
  source 1..80: mol_type = other DNA
atttctcaacatgttgcccccttgtgtgcggtaaggcaattcagttgatggacaaaaccacccgcgctagatacactttg

SEQ ID NO: 158495 - DNA, 80 bp, synthetic construct
  source 1..80: mol_type = other DNA
gcataaaaaatgaagccagaatagttatgagatgtccctacacatacccccagctagtaaaacacaacaacgacaacttc

SEQ ID NO: 158496 - DNA, 80 bp, synthetic construct
  source 1..80: mol_type = other DNA
cggtctgggctctcggaagccctcgtttcggccccgaaatagggccttgccatcaatcggtggcctgggagagtgatggg

SEQ ID NO: 158497 - DNA, 80 bp, synthetic construct
  source 1..80: mol_type = other DNA
gttgtgtcttttgccagtttttggtttcctttcaacctggcgctatttttagaatccatccgtcttctggcgggagtgta

SEQ ID NO: 158498 - DNA, 80 bp, synthetic construct
  source 1..80: mol_type = other DNA
acgtttgtcattaccagctctcaagacactagcacgcaaaccaataccgatacaccagtgctcactcaccagataatgta

SEQ ID NO: 158499 - DNA, 80 bp, synthetic construct
  source 1..80: mol_type = other DNA
attttactgaagcatcctcaacggaggtacccatcaccatcacaattgcaccaatgtgctgtgaattcaacgggctgcgc

SEQ ID NO: 158500 - DNA, 80 bp, synthetic construct
  source 1..80: mol_type = other DNA
ctactgtgacaataccagaagcaattagcagaagattctacttggatgctgacctacaagttacaagcaaattcaaagcg

SEQ ID NO: 158501 - DNA, 80 bp, synthetic construct
  source 1..80: mol_type = other DNA
tccaataatatgtgaaaagcctaccaacatttggatagagggtggaccatattaccctagcagataccaatcaggtgtta

SEQ ID NO: 158502 - DNA, 80 bp, synthetic construct
  source 1..80: mol_type = other DNA
ggtctaccactgtgggcggcagtctatggatacgcagaatactgcagcaaggccacaggagacacaaacatagagcaaaa

SEQ ID NO: 158503 - DNA, 80 bp, synthetic construct
  source 1..80: mol_type = other DNA
tatccctggatgcccagaaataacccacacttcagagtttcctttaaactaggctttcagccataataaaatttcaaggc

SEQ ID NO: 158504 - DNA, 80 bp, synthetic construct
  source 1..80: mol_type = other DNA
tctcactggtaaagctagattcactaaaacaagcctaacaaaagactgggttgtggaagaggagtgtgagcttgactact

SEQ ID NO: 158505 - DNA, 80 bp, synthetic construct
  source 1..80: mol_type = other DNA
tggattcactccattaacacctaaccacccagcacttattaaattagtcctgttaataagatattaccatcacaatgggc

SEQ ID NO: 158506 - DNA, 80 bp, synthetic construct
  source 1..80: mol_type = other DNA
ggagcaacttcaaacgccaccgacgagagcatgattgaaactaggtgtgtggtcaacaggcatggagttatggaaacaag

SEQ ID NO: 158507 - DNA, 80 bp, synthetic construct
  source 1..80: mol_type = other DNA
atacaatgggcaacctgtgtatacgtgtggtgaatgcataccaaccagttcagtacacaataacaataagaatatatctg

SEQ ID NO: 158508 - DNA, 80 bp, synthetic construct
  source 1..80: mol_type = other DNA
cccccaggatacacattccaggacaagttaaaaatctgttggaaataattcaggttgataccttaatacccatgaataat

SEQ ID NO: 158509 - DNA, 80 bp, synthetic construct
  source 1..80: mol_type = other DNA
acatcctggagaagctggtagagaggtggggactcaagttgaaaacgaaaagcaacctagtgatgataattggctaaatt

SEQ ID NO: 158510 - DNA, 80 bp, synthetic construct
  source 1..80: mol_type = other DNA
atgttggtaccgctcagttcgagagagccacgatgctttttgtggctgtcgtgatcctgtttttcatctttctcgtctgg

SEQ ID NO: 158511 - DNA, 80 bp, synthetic construct
  source 1..80: mol_type = other DNA
acgaaaacggtaggctgggcggtctcgtaaaaagccaggaaactctgcttggccgaggcatagcgcagcagcttgtcctt

SEQ ID NO: 158512 - DNA, 80 bp, synthetic construct
  source 1..80: mol_type = other DNA
acatagaaagccagctaggtccctttcaagaccacgaaacaataggcatagtgtgttttgtgtgcccctacactcagcct

SEQ ID NO: 158513 - DNA, 80 bp, synthetic construct
  source 1..80: mol_type = other DNA
ccgacgaaagcaccaggtcctcgacacgcacacggtgcaggtacagatcgtcgcgggcctgcaccaggcggcgcaagata

SEQ ID NO: 158514 - DNA, 80 bp, synthetic construct
  source 1..80: mol_type = other DNA
acgtggcggtccagtggcaggcccgggttcgcgattctcacgatcgctggtgtctctgcaacgcctggcgtgatcacgct

SEQ ID NO: 158515 - DNA, 80 bp, synthetic construct
  source 1..80: mol_type = other DNA
ctatactaaaatcactatctatgttgtttgcttacctaattattatcctacatgacgaagctacctcccaacgtaaggta

SEQ ID NO: 158516 - DNA, 80 bp, synthetic construct
  source 1..80: mol_type = other DNA
tcttgttcacccaacatttcctgtgaaagaaattcatgaatcaattaggtggacaaagaaaccatctcagatgcaagaac

SEQ ID NO: 158517 - DNA, 80 bp, synthetic construct
  source 1..80: mol_type = other DNA
ccaacagacgatcaaaaacccgtgcaagacggacggacggcccaccgactccgatagacaccctagaggaatacaagtgg

SEQ ID NO: 158518 - DNA, 80 bp, synthetic construct
  source 1..80: mol_type = other DNA
catgcgaggaatagacctttccaagggttgaagccacaagtgtcgttacccacattggtactacacagagcctagtatcg

SEQ ID NO: 158519 - DNA, 80 bp, synthetic construct
  source 1..80: mol_type = other DNA
tggcagaattatactcatgggccaggagtgaggtacccaatgtgcttcgggtggctgtggaaactagtaccagtaaacat

SEQ ID NO: 158520 - DNA, 80 bp, synthetic construct
  source 1..80: mol_type = other DNA
agacttgccttatgtcacctatctaaaagatgaattgagagctcctgagaaaatcaagaaagggaaaacgagagcaatag

SEQ ID NO: 158521 - DNA, 80 bp, synthetic construct
  source 1..80: mol_type = other DNA
gaccaggttgagaccgctcatttcgcgggccgtcttggccacggccgcagcgtcagtggggtcggtgcagaggaattttt

SEQ ID NO: 158522 - DNA, 80 bp, synthetic construct
  source 1..80: mol_type = other DNA
gttacaaaccacatggggacactctgttcaagaattgtgacaaataaacaacttcatcctgttgaagtcacaactcgtgt

SEQ ID NO: 158523 - DNA, 80 bp, synthetic construct
  source 1..80: mol_type = other DNA
aacacaaggacaagatactaaagaaataactgaggtgagtgtgggaagatgggactactatgtgttatgttaacgggtga

SEQ ID NO: 158524 - DNA, 80 bp, synthetic construct
  source 1..80: mol_type = other DNA
attatgtttaccaattagattcggatgacatcttcaaaaccgcactaacgggcaaagcaaagttcacaaagactaaattg

SEQ ID NO: 158525 - DNA, 80 bp, synthetic construct
  source 1..80: mol_type = other DNA
aaaagaaaaagggggactggaagggctgttttacagtgaaagaagacatagaatcctggatatatacttagaaaaagaag

SEQ ID NO: 158526 - DNA, 80 bp, synthetic construct
  source 1..80: mol_type = other DNA
agctgttcggcgctatcgaacaagaacagtaaggagacggaggcgagggtggcggaggggctacaggcgccggtacagac

SEQ ID NO: 158527 - DNA, 80 bp, synthetic construct
  source 1..80: mol_type = other DNA
ggtgctcaagtgtcttcacagaaggtaagtgctcaggaaaacaccaacgtggctactggaggatcaacagtcgattacac

SEQ ID NO: 158528 - DNA, 80 bp, synthetic construct
  source 1..80: mol_type = other DNA
ggacacaattgcacgctgccagtgtagaaccggagtatactactgtgagtcacaaagaaaatactacccagttacagtca

SEQ ID NO: 158529 - DNA, 80 bp, synthetic construct
  source 1..80: mol_type = other DNA
gccaacattggtaattgcatggaggctttattccaagggccaattcagtataaggacatcaagattgacattaaagaaac

SEQ ID NO: 158530 - DNA, 80 bp, synthetic construct
  source 1..80: mol_type = other DNA
gcatcacagccgccattttgtaaaacaaaatggccgacttccttcctcttttttaacaaaaaagcggaagtaccccgcag

SEQ ID NO: 158531 - DNA, 80 bp, synthetic construct
  source 1..80: mol_type = other DNA
tgattgcactacaggcacctactattgcaaaagcagggacagatactacccaataaacctaacacaccacagttggtata

SEQ ID NO: 158532 - DNA, 80 bp, synthetic construct
  source 1..80: mol_type = other DNA
cagcagcgtcacctgcatgatgaggtacagctctctttttaactggggcggtaatataatccaagaacaggccgtggaag

SEQ ID NO: 158533 - DNA, 80 bp, synthetic construct
  source 1..80: mol_type = other DNA
agaagcccaggaagaagtccagcagacgccggagatccagctccacctccagcgaaacatcagagaacagctgctcatca

SEQ ID NO: 158534 - DNA, 80 bp, synthetic construct
  source 1..80: mol_type = other DNA
gcaaaagagaaaaatcctggtccccagcttattgaccagaccaaaaggcagaaaaaaaattaaattcaccattaagcccc

SEQ ID NO: 158535 - DNA, 80 bp, synthetic construct
  source 1..80: mol_type = other DNA
ctggttctgcagttgggtgtgaccctgaaactttttggtcaaagatacctgtaatgttagatggagattgtataatggct

SEQ ID NO: 158536 - DNA, 80 bp, synthetic construct
  source 1..80: mol_type = other DNA
actcggccaccctcgttgtaacaccggactccacaggaacacccatagcctccgagccctccacatcagtttccaaccaa

SEQ ID NO: 158537 - DNA, 80 bp, synthetic construct
  source 1..80: mol_type = other DNA
caaccagaggatatggttgaaaccagatatgttcagacatcacaaacacgggatgaaacaagtatcgaaagcttcttagg

SEQ ID NO: 158538 - DNA, 80 bp, synthetic construct
  source 1..80: mol_type = other DNA
agccgaagcccaagaaaaactaccagtacagctccagctccgaaaccaactccgacaacaacagcagctccgagtccact

SEQ ID NO: 158539 - DNA, 80 bp, synthetic construct
  source 1..80: mol_type = other DNA
tcggacatgtttgacggtgtggtggccagcgcttatcaccgtttgcgaatgagtaatattccgcgttcatccgcccgtct

SEQ ID NO: 158540 - DNA, 80 bp, synthetic construct
  source 1..80: mol_type = other DNA
gagtatgggcatatttggtgagaatatgttttaccaccacttaggtagggctggttataccatacatgtacaatgcaatg

SEQ ID NO: 158541 - DNA, 80 bp, synthetic construct
  source 1..80: mol_type = other DNA
tatcttcttgccatttgtccgtgtagagggtcgccataggcttcggacccgatttccgggccttccggactacaaaaatg

SEQ ID NO: 158542 - DNA, 80 bp, synthetic construct
  source 1..80: mol_type = other DNA
tggcttatggagaatggccctcttacctggatgacaaagaagcaaatcctgtggatgcgcccactgaaccagacgtcagc

SEQ ID NO: 158543 - DNA, 80 bp, synthetic construct
  source 1..80: mol_type = other DNA
aattggattgcagtgccaacatggaggataccgggcaggctagagaaatggcacagcctagtcaaatatctgaaacatag

SEQ ID NO: 158544 - DNA, 80 bp, synthetic construct
  source 1..80: mol_type = other DNA
taagccccccagactacttactgataaatggtactttcaaccggacttctgcggggttcctctttttaaactgtacgtta

SEQ ID NO: 158545 - DNA, 80 bp, synthetic construct
  source 1..80: mol_type = other DNA
tacggactaattatcgtgagcggacggatatgtccggtttcaaactcactgtttgaatatagggacagtccctacggaac

SEQ ID NO: 158546 - DNA, 80 bp, synthetic construct
  source 1..80: mol_type = other DNA
agagatacattgacggtgtgttgaatgaagtgttagttgttccaaacacaaatgaaagccaccccagtacatcaaatgct

SEQ ID NO: 158547 - DNA, 80 bp, synthetic construct
  source 1..80: mol_type = other DNA
ggcatacagacaccccaaagtagactacataatatgcttcagcagagtaccaccttttcaagtatcagaacttagctacc

SEQ ID NO: 158548 - DNA, 80 bp, synthetic construct
  source 1..80: mol_type = other DNA
tgctgcaccttttttcgaaggcccaaaaaggccccgcatcgacctcggtccccaaatccaagaagaagaagactcacgtt

SEQ ID NO: 158549 - DNA, 80 bp, synthetic construct
  source 1..80: mol_type = other DNA
tcccgccgcttgcgataagctcgccaagaaactattctccaagattaaggacgagttcaattggcaaatgcctgaaaact

SEQ ID NO: 158550 - DNA, 80 bp, synthetic construct
  source 1..80: mol_type = other DNA
tccacgacccaggatatataaaagaagctagacttactataatatgcccatacacacaacctcctctaacaaacacagaa

SEQ ID NO: 158551 - DNA, 80 bp, synthetic construct
  source 1..80: mol_type = other DNA
atgccaacccaggtgaaaaaggtggaacgttcgtcaccacgtttacaccagacacttccagtgaaccaaaaagagagttt

SEQ ID NO: 158552 - DNA, 80 bp, synthetic construct
  source 1..80: mol_type = other DNA
tgctttgctaagatgcaatgatactaaatattcaggcttcatgcccaactgtagtaaggtagtagtatctctgtacagaa

SEQ ID NO: 158553 - DNA, 80 bp, synthetic construct
  source 1..80: mol_type = other DNA
taactttatcacacatgagaatgacatacccccaaggggagcctcctatgggggcaacctcaccaacataaccttcaccc

SEQ ID NO: 158554 - DNA, 80 bp, synthetic construct
  source 1..80: mol_type = other DNA
gcttcagacgcactggccaggcgctttgcgtttgatgtggacattgaggtgatgtcacagtacaacaacaggggacattt

SEQ ID NO: 158555 - DNA, 80 bp, synthetic construct
  source 1..80: mol_type = other DNA
gagacgcaggcgcaggggtcggtacaagaccaactactccaccagctccgagagcagcgagtactccgactccagctcca

SEQ ID NO: 158556 - DNA, 80 bp, synthetic construct
  source 1..80: mol_type = other DNA
ccagaagtattaaacactttagctactccttactgctttaaatttcctacctttacaaaattacaaggtcaggacaatgc

SEQ ID NO: 158557 - DNA, 80 bp, synthetic construct
  source 1..80: mol_type = other DNA
ggaagactcaaaggatgagagagcttataacccaacactccctgttgctaaaacaaaaggagccttcccggtcacacaga

SEQ ID NO: 158558 - DNA, 80 bp, synthetic construct
  source 1..80: mol_type = other DNA
atctatcatcttagctctctggctgctcgctttaatatgcaaccagggccgtcgccgggtggtgatcctaggccgccgcg

SEQ ID NO: 158559 - DNA, 80 bp, synthetic construct
  source 1..80: mol_type = other DNA
tcttaaagcaacagtacaacatggtcataggtgttctaaccaactatcacaaccaaaaagcaggcaataaccaagactat

SEQ ID NO: 158560 - DNA, 80 bp, synthetic construct
  source 1..80: mol_type = other DNA
gcgggctctggctctttggccggcccaggaatagatacagccagctccctgaggagccggagacctttgagtgcccggac

SEQ ID NO: 158561 - DNA, 80 bp, synthetic construct
  source 1..80: mol_type = other DNA
gggcttcagagcccagggtgtcccccagaagggaccctaggcgtcccctctcctcccctccaggcccgagcctctccctc

SEQ ID NO: 158562 - DNA, 80 bp, synthetic construct
  source 1..80: mol_type = other DNA
caacttcaccaacataacctttagtttagctgccctatttgagcagtacatgctccacagaaacaggtggtcccgctcca

SEQ ID NO: 158563 - DNA, 80 bp, synthetic construct
  source 1..80: mol_type = other DNA
gttaatgtacgtaccccccgggggtccagtgcccaaaaattcaagagactatgcatggcaaacatccaccaacccgagtg

SEQ ID NO: 158564 - DNA, 80 bp, synthetic construct
  source 1..80: mol_type = other DNA
gaaaaacaaatagaacaccttagagttgcagattctcaaacacaagagaagattaaacatgaaattgacactctccatga

SEQ ID NO: 158565 - DNA, 80 bp, synthetic construct
  source 1..80: mol_type = other DNA
gtcctcgtccctggtaaaatgatggctgaaggctggcccgttgtaggccagggtctgggccacgtgctgaaagtccaccc

SEQ ID NO: 158566 - DNA, 80 bp, synthetic construct
  source 1..80: mol_type = other DNA
tgccgaaacgcacaaagcgccggacgaaacacgcgcaaaagaaccgtgggacgacgtcccgcaaacctccctcagccccg

SEQ ID NO: 158567 - DNA, 80 bp, synthetic construct
  source 1..80: mol_type = other DNA
catatagccagagtggattctttcattccattgaataatattgagggccaagttgggagggtcagtatgtattatgtacc

SEQ ID NO: 158568 - DNA, 80 bp, synthetic construct
  source 1..80: mol_type = other DNA
aataatatgggtcaactgttcttcagacacgttaacaagcctaacccggctgccattaccagtgtagcacgcatatattt

SEQ ID NO: 158569 - DNA, 80 bp, synthetic construct
  source 1..80: mol_type = other DNA
gcagatactgtagccagtgggcccgttaacactgaacaaatacccgcattaacggcagtggagacagggcacacctcaca

SEQ ID NO: 158570 - DNA, 80 bp, synthetic construct
  source 1..80: mol_type = other DNA
ccactcacagggcccactgggcgctagcactctggtaatacgttacctttgtgcgcctgttttatctccccctaccctgg

SEQ ID NO: 158571 - DNA, 80 bp, synthetic construct
  source 1..80: mol_type = other DNA
atgtaataaaacagaactacgcctttacgatttaaacaccaccaattctggtagatatagccgacggtgttacaaacagt

SEQ ID NO: 158572 - DNA, 80 bp, synthetic construct
  source 1..80: mol_type = other DNA
gacaacatttgcagctgtggcgggcgtggtttacgtcatgtacagattgttcgccggtcagcagggagcatacactggtt

SEQ ID NO: 158573 - DNA, 80 bp, synthetic construct
  source 1..80: mol_type = other DNA
accacacactacatagaatgccaggcaaaatgcactatcaaagacatagccctatatgctgctttttatggctacgaaga

SEQ ID NO: 158574 - DNA, 80 bp, synthetic construct
  source 1..80: mol_type = other DNA
aagtcaggtacaatctttgcagtttctggccttaaaggcttggcagaatggatcccagggaaagggcccctccaggaaac

SEQ ID NO: 158575 - DNA, 80 bp, synthetic construct
  source 1..80: mol_type = other DNA
gtgttggaatctaaaactagggctattgattcttgtcctcttgactatacaattttgtgtagaatgtactggggtccagc

SEQ ID NO: 158576 - DNA, 80 bp, synthetic construct
  source 1..80: mol_type = other DNA
gctcccacaactctctaaggctggtgcccaatccggacttgctgcctctccagcatttgtacctcaagcacgtagtgcta

SEQ ID NO: 158577 - DNA, 80 bp, synthetic construct
  source 1..80: mol_type = other DNA
gctgcgtgatacacccttcatcacccaaacagcgttcttccaaaatgaacctgacaatgctattgggagagcacttgtgc

SEQ ID NO: 158578 - DNA, 80 bp, synthetic construct
  source 1..80: mol_type = other DNA
ttatgaaaaagtgctttattactgggtggctacctctaataatctgtggatctggaaacacccagtttaactttgtgact

SEQ ID NO: 158579 - DNA, 80 bp, synthetic construct
  source 1..80: mol_type = other DNA
aaccagaacagggcaatgtggaggagtactgtgtaccactgggaagatctttggaatacatgttggaggtaatggaagac

SEQ ID NO: 158580 - DNA, 80 bp, synthetic construct
  source 1..80: mol_type = other DNA
ctaaagactatactttttcatggtataaagattcacttaactccgttaacatgctatgtttttataacgaaaaatatgaa

SEQ ID NO: 158581 - DNA, 80 bp, synthetic construct
  source 1..80: mol_type = other DNA
actttaacacctttaaaacagaggaacacatatttcaaccaaactggtctacacataaacaagacagcagcaaatttaac

SEQ ID NO: 158582 - DNA, 80 bp, synthetic construct
  source 1..80: mol_type = other DNA
cgaccagctgtttgtcatgtactcttacaactttggacacggacgcatgccggggggcgacaagtacgtgcccatggagt

SEQ ID NO: 158583 - DNA, 80 bp, synthetic construct
  source 1..80: mol_type = other DNA
tcggcacaggacgacgggcctcttggaacagaaaaaccaaattacttccttaatttcagggccatgaatgttgacatctt

SEQ ID NO: 158584 - DNA, 80 bp, synthetic construct
  source 1..80: mol_type = other DNA
gtaaatttatttagatttaatatgtttacaacagcttacctctggtcttcctgtgtttaaaagaattactgtaaagttac

SEQ ID NO: 158585 - DNA, 80 bp, synthetic construct
  source 1..80: mol_type = other DNA
ccttaggccagtcaggccccttcgcttatcacagcgatcagaaaaaagcagttttaggcctaaaatacagatttcactgg

SEQ ID NO: 158586 - DNA, 80 bp, synthetic construct
  source 1..80: mol_type = other DNA
caggtaagatcggtcgcggtcggccgtgcattactcctgccggagtactcaacactgcgccgacgttggctagactcttt

SEQ ID NO: 158587 - DNA, 80 bp, synthetic construct
  source 1..80: mol_type = other DNA
aaggccggtgccactaagctctccaacaagcttactggctctcaaaccacggccctccttgcccttcctggcaacatcgc

SEQ ID NO: 158588 - DNA, 80 bp, synthetic construct
  source 1..80: mol_type = other DNA
aacagcacctatgacttccaaaactatagtacaccacagaactataaaaatacatatgacaaatggtcagaggaaagaaa

SEQ ID NO: 158589 - DNA, 80 bp, synthetic construct
  source 1..80: mol_type = other DNA
tgtgggtttaagcttaagttgtgcggctaaccagatcaccatcttcaacctcacgttaaacgactccggtcgttacggag

SEQ ID NO: 158590 - DNA, 80 bp, synthetic construct
  source 1..80: mol_type = other DNA
gcctaccgcctagcaggcctgatccgatgagctggcgtccacctgcccacgatgtcccaggacaagagggcctgtggtac

SEQ ID NO: 158591 - DNA, 80 bp, synthetic construct
  source 1..80: mol_type = other DNA
aacattatagacagaagaaatcaacaatttaactgggaaactaaatttactgacaaggcaacacacattaacccaacatt

SEQ ID NO: 158592 - DNA, 80 bp, synthetic construct
  source 1..80: mol_type = other DNA
ggcgtggacctggtggtggcagaggaggcgccgaaggtggccgtggagaaggagaaggtggagaagactacgcacaagaa

SEQ ID NO: 158593 - DNA, 80 bp, synthetic construct
  source 1..80: mol_type = other DNA
tatagctggcaaacttcgacaaaccccagcgttttctggacagaggggaatgctccggctcgcatgtcaataccctttat

SEQ ID NO: 158594 - DNA, 80 bp, synthetic construct
  source 1..80: mol_type = other DNA
tgttccccggagctggatataaactgctaacgtggttgaaagtccttaaccgttatccgccagttaactgcgagaagact

SEQ ID NO: 158595 - DNA, 80 bp, synthetic construct
  source 1..80: mol_type = other DNA
taaacaaaaaatgaacaacaacttaacactaatacaacaagaatacatgtaccactacccaaacagtgttacaacagaca

SEQ ID NO: 158596 - DNA, 80 bp, synthetic construct
  source 1..80: mol_type = other DNA
gcgggtcgatatccagggcgatcatgctgtcgacggtggagatactgctgaggtcaatcatgcgtttgaagaggtagtcc

SEQ ID NO: 158597 - DNA, 80 bp, synthetic construct
  source 1..80: mol_type = other DNA
ggaatgatttttctgtgcgtttgctgagggatacgccttttatggcacaaccaggtaaattgcaaggggacaaccaggat

SEQ ID NO: 158598 - DNA, 80 bp, synthetic construct
  source 1..80: mol_type = other DNA
tggcagccccagaatatcagatactgtgccataaaaggcctctttcccatcctcatctgcgggcacggaaagagcgccgg

SEQ ID NO: 158599 - DNA, 80 bp, synthetic construct
  source 1..80: mol_type = other DNA
ctacctgagtgaaggggatacagctaaagagttttcagaaacctccgttaccacgtcgcacggggtacaaacggcggtgc

SEQ ID NO: 158600 - DNA, 80 bp, synthetic construct
  source 1..80: mol_type = other DNA
agatctagctttaactatgccatccactctgacgactaccagctacaggtcctgcccttcgggggaggaatgagcactat

SEQ ID NO: 158601 - DNA, 80 bp, synthetic construct
  source 1..80: mol_type = other DNA
acctccatttaaactgaacaaatacagtagtagcatgatacacccaggcatgctaatgcagcagaaaaaaaaaatattag

SEQ ID NO: 158602 - DNA, 80 bp, synthetic construct
  source 1..80: mol_type = other DNA
cctgattctttagacccagcagaattggctaaaacaggctctgaatatggtttaacaatcaccccagccgataagagtgc

SEQ ID NO: 158603 - DNA, 80 bp, synthetic construct
  source 1..80: mol_type = other DNA
ctcaaacactgctgatacagaatgccaacccagattgtaagctagtactaaagggactaggaatgaatcctaccttagaa

SEQ ID NO: 158604 - DNA, 80 bp, synthetic construct
  source 1..80: mol_type = other DNA
tatatcaacttaaggactaacaactcagccactctcattttaccttatgtcaatgctgtgccaatggattctatgcttag

SEQ ID NO: 158605 - DNA, 80 bp, synthetic construct
  source 1..80: mol_type = other DNA
gaaaaacagatagaacacctccgagctgcagattctgctacgcaggaaaaaattaagtgtgaaatagatacgctgcatga

SEQ ID NO: 158606 - DNA, 80 bp, synthetic construct
  source 1..80: mol_type = other DNA
ctaggtgaagtcttgaactacttttcaaactggtcaggcagtattaagataacatttatgtgtgtgtgtgatgcttttag

SEQ ID NO: 158607 - DNA, 80 bp, synthetic construct
  source 1..80: mol_type = other DNA
aaccctctgcttttgcgggcaagcgcgctttcggtgacagggtgtatcgtacgtagccgcgggtcaggcgcgcgttgtag

SEQ ID NO: 158608 - DNA, 80 bp, synthetic construct
  source 1..80: mol_type = other DNA
aggcggtaaaccacctgccccgagagctcattttccaggtgtggcaaaggtcctggagatactggcatgatgaacaaggg

SEQ ID NO: 158609 - DNA, 80 bp, synthetic construct
  source 1..80: mol_type = other DNA
acatcatgatagtggagtccaaggcacaaggaaaggatcaaattgccaggtgcgaatgtcgaacaggagtgtactactgt

SEQ ID NO: 158610 - DNA, 80 bp, synthetic construct
  source 1..80: mol_type = other DNA
ctactaagcaaccacagaagcaacttaaactttgccagggcctaccaagacgttacttacaaccctaactgtgacagagg

SEQ ID NO: 158611 - DNA, 80 bp, synthetic construct
  source 1..80: mol_type = other DNA
agacttcgccatagggcctttatcttcctgccattggatagtggcttccgggtcggcctgggggccgccattttagcttc

SEQ ID NO: 158612 - DNA, 80 bp, synthetic construct
  source 1..80: mol_type = other DNA
ggtcacacaattggatcaaactcagataggggtaacaaccaaccagatgagaatcccttcttcaactgtaatggtacact

SEQ ID NO: 158613 - DNA, 80 bp, synthetic construct
  source 1..80: mol_type = other DNA
aacaacaacatacccaccagacttcaataatagaacctacctatctcatgactatggaatttacagcccatactttctta

SEQ ID NO: 158614 - DNA, 80 bp, synthetic construct
  source 1..80: mol_type = other DNA
ggtggtggagtccagagcacagggtgtagaccaaattgctagatgttcatgcgtgactggtgtctactactgtctgtcac

SEQ ID NO: 158615 - DNA, 80 bp, synthetic construct
  source 1..80: mol_type = other DNA
ctatcgctgtcaacagcgccaaaaagcggacgtcctcctcatctaccccagcctgttgtctggccacggccgttcgggcg

SEQ ID NO: 158616 - DNA, 80 bp, synthetic construct
  source 1..80: mol_type = other DNA
ccttgaaatttgagcaccttgcgcgcgtcgttgtagacgtcttcgcaggccgccgacaacccgttggtgaactgaatagc

SEQ ID NO: 158617 - DNA, 80 bp, synthetic construct
  source 1..80: mol_type = other DNA
agctggacacgttgttaagcggcggaaagcgaaactgacgtgccggcggagccacatagttcggttcaccgtgttgtcgc

SEQ ID NO: 158618 - DNA, 80 bp, synthetic construct
  source 1..80: mol_type = other DNA
gaatgcgaccttttatgcaacactgccgactgcacctactaccataaacagcaccaattatattattaccgtattgtctc

SEQ ID NO: 158619 - DNA, 80 bp, synthetic construct
  source 1..80: mol_type = other DNA
ataaatgcaaatgaaaacgtcactacaccgcttccaacttgctcatcgcctaacagtacaaataatacgatatcaaaaga

SEQ ID NO: 158620 - DNA, 80 bp, synthetic construct
  source 1..80: mol_type = other DNA
ttgtggacagggtacctctgccatgaactatgcatctcactgcgatgacatagagtaccctggacccctaggagtgggac

SEQ ID NO: 158621 - DNA, 80 bp, synthetic construct
  source 1..80: mol_type = other DNA
ccgttataggctttagttcctcttctgaaaaacaaaagacagtactagaatccatgtacttaagaagctcctattgggcc

SEQ ID NO: 158622 - DNA, 80 bp, synthetic construct
  source 1..80: mol_type = other DNA
tgcccttatacctttccaaaattgtacaatgaaaaggtaaaagactatgggtacatcccgtactcctacaaattcggagc

SEQ ID NO: 158623 - DNA, 80 bp, synthetic construct
  source 1..80: mol_type = other DNA
cgacgacgtaccactcgcagcacaagcgttgacgaataaagttcagaagatcgcgaaagtccgcggccggcatgtggtca

SEQ ID NO: 158624 - DNA, 80 bp, synthetic construct
  source 1..80: mol_type = other DNA
tagatacagcaacctaaacacaccagaggcacacacagccagacaacaagcatggaatgaactaacccaacaatgcacta

SEQ ID NO: 158625 - DNA, 80 bp, synthetic construct
  source 1..80: mol_type = other DNA
tatccccctcagtaagctgcagtttccggacgcatccagcacagagatcccgatcactatcacaatcgctccaatgtgtt

SEQ ID NO: 158626 - DNA, 80 bp, synthetic construct
  source 1..80: mol_type = other DNA
aacgcgggtatgggcatcggcgtggggaacctcaccatctaccctcaccagtggatcaacttgcgcactaataactgcgc

SEQ ID NO: 158627 - DNA, 80 bp, synthetic construct
  source 1..80: mol_type = other DNA
aagctcttggaagagttctagacaaattgggcttcccaggggatatgatgcaaaaattgagcaaaactacccatatatac

SEQ ID NO: 158628 - DNA, 80 bp, synthetic construct
  source 1..80: mol_type = other DNA
cagcctctgtcggcctccgccaaaagcagagcctgagacgaggatgtggcttcatgggctctatttaggaggggagctcg

SEQ ID NO: 158629 - DNA, 80 bp, synthetic construct
  source 1..80: mol_type = other DNA
gagtgagggcagtaagggcggcaggaacaaaccacgacggagtgctcctgtaaaggcgcaggctggtaccaagcagcgtg

SEQ ID NO: 158630 - DNA, 80 bp, synthetic construct
  source 1..80: mol_type = other DNA
ccaacatcaattactacaaggattcttacgcagcttcggcgagtaaacaggacttcactcaagacccgaagaaattcacg

SEQ ID NO: 158631 - DNA, 80 bp, synthetic construct
  source 1..80: mol_type = other DNA
gcacgtactcgacgctggatcgcgcactgctggagaagatgcaagtcgtcttcgatccctacggacgtcagcacggcccg

SEQ ID NO: 158632 - DNA, 80 bp, synthetic construct
  source 1..80: mol_type = other DNA
aacattttaaatacatttagaacagaaggatgcttttcgcatccgcaattagtaaaattcaaaccacctaccactgggcc

SEQ ID NO: 158633 - DNA, 80 bp, synthetic construct
  source 1..80: mol_type = other DNA
ggctctgagcagttcttaaccacagatgatagacaatctccttcagctctaccaaattatgaaccaactccactcataca

SEQ ID NO: 158634 - DNA, 80 bp, synthetic construct
  source 1..80: mol_type = other DNA
ctcattcacaaagtcaggtaagttgaacgctgccatggcgtgtgaattatgcaaggattgccacaaacctacaaatttca

SEQ ID NO: 158635 - DNA, 80 bp, synthetic construct
  source 1..80: mol_type = other DNA
agaaggagactaccgagaagaagaactagacgagctgttcgcggccttggaagaagacgcaaaccaagggtaaggaggcg

SEQ ID NO: 158636 - DNA, 80 bp, synthetic construct
  source 1..80: mol_type = other DNA
gactaccctgaatgtaatttggctctgtctgcaaaccaacctgaaacaaccattcttagtgttggtgatgtagtatccta

SEQ ID NO: 158637 - DNA, 80 bp, synthetic construct
  source 1..80: mol_type = other DNA
catcatcgaggaggctttcactttgcccatcgcatacattaatttcgtggcaaaacgctttaaaacccttctcgtcggtg

SEQ ID NO: 158638 - DNA, 80 bp, synthetic construct
  source 1..80: mol_type = other DNA
ccaccttgagggtcgccgccgtgtctgctggtccggtgcacctggaaggcaggggggggggggcagtaagggagaagcgt

SEQ ID NO: 158639 - DNA, 80 bp, synthetic construct
  source 1..80: mol_type = other DNA
caagatcgagcattacatacgtacccgacaccatccgcccagaagttcgcacagctggtgcatttgggcaacaatctggt

SEQ ID NO: 158640 - DNA, 80 bp, synthetic construct
  source 1..80: mol_type = other DNA
atgccgccccctatgcccgcatcttttacgacatcgggcgacaggtgcccaagctgggcaatgcccccgccgcgcaggtc

SEQ ID NO: 158641 - DNA, 80 bp, synthetic construct
  source 1..80: mol_type = other DNA
aaacaacattatgaaacacatcttttcaatcaaattgcactatacaatacttttcaaacaatagctcagcttaaagaaac

SEQ ID NO: 158642 - DNA, 80 bp, synthetic construct
  source 1..80: mol_type = other DNA
agccaattgtcagttctagggagggggaccactgcccctggtataaagtggtcctgcagctatttctggtcgcatcagag

SEQ ID NO: 158643 - DNA, 80 bp, synthetic construct
  source 1..80: mol_type = other DNA
cggaggaggagaatgattccaccactccagtctctaactgccgtgttcctccgaattcgcaggaatccgcggcgcctcag

SEQ ID NO: 158644 - DNA, 80 bp, synthetic construct
  source 1..80: mol_type = other DNA
tctcttctgtgcaaccacaaacagggatacctggggaactgtacagtgcctcccagacaatggtgattataccgagatca

SEQ ID NO: 158645 - DNA, 80 bp, synthetic construct
  source 1..80: mol_type = other DNA
gctgaagtgtatttgagtctaaggtgtccaaatttctttttcccagtcccagccccaaaaccggtaaatactaggagtgt

SEQ ID NO: 158646 - DNA, 80 bp, synthetic construct
  source 1..80: mol_type = other DNA
tattccgggtgaggtgagaaacatgatggagctagcggagattgacaccttgatacccatgaattccgtgtcagggaaag

SEQ ID NO: 158647 - DNA, 80 bp, synthetic construct
  source 1..80: mol_type = other DNA
caatgctgttgtctgctatgcagaatggccggaatatttatcagataatgatgcaagtgatgtgaacaaaacttccaaac

SEQ ID NO: 158648 - DNA, 80 bp, synthetic construct
  source 1..80: mol_type = other DNA
cacactattccacaggacaactcctacaaaaactggggaaactggtggaaatatgacttctatgccaccaaggcagacag

SEQ ID NO: 158649 - DNA, 80 bp, synthetic construct
  source 1..80: mol_type = other DNA
gtatatgcactctataagctaatgtgcatagcacaagggccatacacagggttcacacagccatcatccaagaagccaga

SEQ ID NO: 158650 - DNA, 80 bp, synthetic construct
  source 1..80: mol_type = other DNA
gcttttgagtttacaaacccttacaaaagaccaagatatctccctcctacagaccaagaagaagcagagcaagaaaaaga

SEQ ID NO: 158651 - DNA, 80 bp, synthetic construct
  source 1..80: mol_type = other DNA
gaatagaaggaggagaacgaccccagggccagaatgcccacagtgtacatggcccaggtctccagaccgaacgtggcgtg

SEQ ID NO: 158652 - DNA, 80 bp, synthetic construct
  source 1..80: mol_type = other DNA
gccaataaccggcccggtgcggctgccccgtgacccgtgggccttaccttcctggccatcgggagaccctggtgctaggg

SEQ ID NO: 158653 - DNA, 80 bp, synthetic construct
  source 1..80: mol_type = other DNA
ctaacaccatgtggcctgtacgcacgaaaaagttgtttccgaagccgtagcacagggccatggctaccacggtggtgttg

SEQ ID NO: 158654 - DNA, 80 bp, synthetic construct
  source 1..80: mol_type = other DNA
ggacaccttttagcttttgattacaccaattatgatggcagtctacacccaatctggtttttatgtttagaaaaagtatt

SEQ ID NO: 158655 - DNA, 80 bp, synthetic construct
  source 1..80: mol_type = other DNA
atgcgccaccacggatgtccatcccgtacattggcatcgggaatgcgtatagtagcttctacgatgggtggtctagtttc

SEQ ID NO: 158656 - DNA, 80 bp, synthetic construct
  source 1..80: mol_type = other DNA
ggtgtgtgtactggaaatgttaaaataatgaattaccatctaatgacccatgaagataatctcaatctcataacaccact

SEQ ID NO: 158657 - DNA, 80 bp, synthetic construct
  source 1..80: mol_type = other DNA
gacaccaacaaccggtccgtcaatgacatcccacggggcctttggtcaccagtccggagccgtctacgtaggcaactaca

SEQ ID NO: 158658 - DNA, 80 bp, synthetic construct
  source 1..80: mol_type = other DNA
cccacggcgccacaaaggctcacactagggcatcaactaagtctaccaccgcatcctcccccgcatcagagcaccccaca

SEQ ID NO: 158659 - DNA, 80 bp, synthetic construct
  source 1..80: mol_type = other DNA
gcccagaaataccaggcctctacacagaaatactatacaatccatacacagacaaaggcaaaggaaacaaagtatggata

SEQ ID NO: 158660 - DNA, 80 bp, synthetic construct
  source 1..80: mol_type = other DNA
ctagtttgtgttatttgcccatacacctttccacctatgtacaacaaaacaaagcctacctggggatatgtattttatga

SEQ ID NO: 158661 - DNA, 80 bp, synthetic construct
  source 1..80: mol_type = other DNA
acgagaacaactgagctacctcatgacgggcactgtgcgcgacaacgtaccgctactgcaagagatcctgcagctgcgac

SEQ ID NO: 158662 - DNA, 80 bp, synthetic construct
  source 1..80: mol_type = other DNA
gcccattagcccattagattttgaccaaggggcaactccggttatccctattacaatcactctagctccaatgtgctctg

SEQ ID NO: 158663 - DNA, 80 bp, synthetic construct
  source 1..80: mol_type = other DNA
cagtgacatgtatgtacatgttggaaatttaatatatagaaatttgcacttgtttaattcagaagcacatgattctatat

SEQ ID NO: 158664 - DNA, 80 bp, synthetic construct
  source 1..80: mol_type = other DNA
aaaagaatccaaagatgaaagggcttataatccaacacttccagttgctaaaccaaaaggtacattcccagtgtcacaaa

SEQ ID NO: 158665 - DNA, 80 bp, synthetic construct
  source 1..80: mol_type = other DNA
tgtgtcagtccagcggcaacaacctatacgaggaggccacgtcatcctacgcgatacggtctcccctaaccgcgtcgccg

SEQ ID NO: 158666 - DNA, 80 bp, synthetic construct
  source 1..80: mol_type = other DNA
gggataaattggaatacgtcactaaattgaaacaattggagttaattgaaaaccaaatgtctacattgcaccaatcgtgc

SEQ ID NO: 158667 - DNA, 80 bp, synthetic construct
  source 1..80: mol_type = other DNA
acaccaggaagatttttccgggtttcaaacagagcaagtatgctggggggtggtttcactggcacgattgggcaggaaca

SEQ ID NO: 158668 - DNA, 80 bp, synthetic construct
  source 1..80: mol_type = other DNA
gggaaagccaataggggaaagatggatatttcaggagtgcaagcacctgtgggagctatcacaacaattgaggatccagt

SEQ ID NO: 158669 - DNA, 80 bp, synthetic construct
  source 1..80: mol_type = other DNA
cagacggagaagactaccgacaagaagaagacttcgctttacaggaaaaaagaaggcgcacatccacagaagaagtccag

SEQ ID NO: 158670 - DNA, 80 bp, synthetic construct
  source 1..80: mol_type = other DNA
gaacaatggctatatggaaaatgcacccactatcaaacatttgccacagatacaagacttaatccacagagacctgcatc

SEQ ID NO: 158671 - DNA, 80 bp, synthetic construct
  source 1..80: mol_type = other DNA
aaggtgctccagcattgaattcaccaaatgttgaggcatgtggctacagtgatagagttcagcagatcacgcttggaaat

SEQ ID NO: 158672 - DNA, 80 bp, synthetic construct
  source 1..80: mol_type = other DNA
tgatccagttaccatagacgcgaaggttagagtctacctcaagcccaagcatgtaaaggtatggtgtcccagacctccta

SEQ ID NO: 158673 - DNA, 80 bp, synthetic construct
  source 1..80: mol_type = other DNA
tggctttaactcttacaatccgaaagccaaaagccaagaaattgaacagcttagagatgagtactggaaaatcctacaaa

SEQ ID NO: 158674 - DNA, 80 bp, synthetic construct
  source 1..80: mol_type = other DNA
ataaaagtcaagagtttaaaccagtgacctgggacaatgtcaccttcctgaaaagacactttgtacctgataaagaattt

SEQ ID NO: 158675 - DNA, 80 bp, synthetic construct
  source 1..80: mol_type = other DNA
tcccaggccaaagagacccttactatttgtacccccagaataccaagaccccgcaggtgcaggaagcgactcaggttcac

SEQ ID NO: 158676 - DNA, 80 bp, synthetic construct
  source 1..80: mol_type = other DNA
cgttgcattcaccacattatcccaaattacacccacgttgatatatatagtgttgcagactagacaaaatcaccacaatg

SEQ ID NO: 158677 - DNA, 80 bp, synthetic construct
  source 1..80: mol_type = other DNA
gggcgacgaaaagatgtgtgtattagccataaaatataacttcagatggaaatggggaggtaaccctgtttctcaccaga

SEQ ID NO: 158678 - DNA, 80 bp, synthetic construct
  source 1..80: mol_type = other DNA
cgcgctcacggcccaaaaacctccgtccgcgccggcgccgccccgaaaagcgaagcgccgcgcaaaagctgcgtggaaac

SEQ ID NO: 158679 - DNA, 80 bp, synthetic construct
  source 1..80: mol_type = other DNA
ctataatctccccttacacacaaccaccattaacagacaaagaaaacacagacatgggattcatcccttatgactttaac

SEQ ID NO: 158680 - DNA, 80 bp, synthetic construct
  source 1..80: mol_type = other DNA
ctgtttacgtctgactatgtcttagcctcaaccaactcacacaccattaccccccctacaatatcagcttcagatgcatt

SEQ ID NO: 158681 - DNA, 80 bp, synthetic construct
  source 1..80: mol_type = other DNA
atgttctatcactgtgtcacttaatgtggcataatggtagagatgtgtataagcaatttgagcagaggatacgcagtgtt

SEQ ID NO: 158682 - DNA, 80 bp, synthetic construct
  source 1..80: mol_type = other DNA
ccacggcggcagcagtagaggcgcgcgaagttcgcgaagccgaggaattgcgtgcagcactaccacccttagcaccagat

SEQ ID NO: 158683 - DNA, 80 bp, synthetic construct
  source 1..80: mol_type = other DNA
gccatgtgaatggaccgtctccactaccaatgaccagtacagtaagagtgtattttaaaccaaagcacgtgaaagcgtgg

SEQ ID NO: 158684 - DNA, 80 bp, synthetic construct
  source 1..80: mol_type = other DNA
tcgccttcctcggcgacggcgtgttgcgggtacggagggcttctgcgctgggaacggggatgtttgcggccgcggcgaca

SEQ ID NO: 158685 - DNA, 80 bp, synthetic construct
  source 1..80: mol_type = other DNA
tcaactcatatgcaccagacaacaataaactaacctcattactagaatggtactggcaacaattaacaacagaagatgac

SEQ ID NO: 158686 - DNA, 80 bp, synthetic construct
  source 1..80: mol_type = other DNA
tcccaaaatgccaagaaaaaacaatgcagatacttcaaaagaccctgaaaacctaactaaaagcaatgtaacctcacaat

SEQ ID NO: 158687 - DNA, 80 bp, synthetic construct
  source 1..80: mol_type = other DNA
ccacactttgtccaggcaactacaaaagtcatgcaaactcaatggtgtcttcaccaacccaactgccagtgaatttatgg

SEQ ID NO: 158688 - DNA, 80 bp, synthetic construct
  source 1..80: mol_type = other DNA
aacaaacacctagaataccacctaggaatatacagtccaatatatttatcaccacacagaagcaatctacaatttcccac

SEQ ID NO: 158689 - DNA, 80 bp, synthetic construct
  source 1..80: mol_type = other DNA
tgcaccagtcaagtcagaattttctggtgctcgccagagtaggactcaaggtttgcctgtcagattggcaagcggcactc

SEQ ID NO: 158690 - DNA, 80 bp, synthetic construct
  source 1..80: mol_type = other DNA
atagtctggaagcatacaggattccagtgcattcggttacggaaactggaacacaggtgtttggtttcacactgcaaccc

SEQ ID NO: 158691 - DNA, 80 bp, synthetic construct
  source 1..80: mol_type = other DNA
aacactatcttaatgtttgtgagtaccttagggattctttatgtaatatacaagctctttgcacaaacacagggtcctta

SEQ ID NO: 158692 - DNA, 80 bp, synthetic construct
  source 1..80: mol_type = other DNA
gactggtgcaaaaaagagacgggtaactgggcgctacccgcctgggccagagtactaataatctgcccctacacttttcc

SEQ ID NO: 158693 - DNA, 80 bp, synthetic construct
  source 1..80: mol_type = other DNA
atcagaaggaaatgtgagctcttcacatatcttagatttgattctgagatcacaatagtagcaacagtcgctgcactggg

SEQ ID NO: 158694 - DNA, 80 bp, synthetic construct
  source 1..80: mol_type = other DNA
aaatgcagctaacagcaaagacacttggtacaaaggcaacacatacaaccacaagattaaagacttagcagaaaaaacca

SEQ ID NO: 158695 - DNA, 80 bp, synthetic construct
  source 1..80: mol_type = other DNA
cccctgcaaacatccacaaggacccagtccccatagacagcctcgtgagctacaaatcgctgacccgaagtaccagaccc

SEQ ID NO: 158696 - DNA, 80 bp, synthetic construct
  source 1..80: mol_type = other DNA
caggctgtgctgtgggctgcgaccctgaggtgttttggtccaaaattccaccaatgttgggtgatggaagtgttatggct

SEQ ID NO: 158697 - DNA, 80 bp, synthetic construct
  source 1..80: mol_type = other DNA
caaacctccctcagccccgtcccgcgagcaaatactgtgggaggaaacgcaccggcagtgcgcagagaggcacgtagtgg

SEQ ID NO: 158698 - DNA, 80 bp, synthetic construct
  source 1..80: mol_type = other DNA
tccgcgttatcagaaagctgcaatcaaacctgttcctgtcaatgtccctgtagtactaccgttaactattccactagtac

SEQ ID NO: 158699 - DNA, 80 bp, synthetic construct
  source 1..80: mol_type = other DNA
ctcgcgcgtgtcagaccacttcgggctcgcgggggtcgggaattttgctaaacagactccggtatgccattggacactga

SEQ ID NO: 158700 - DNA, 80 bp, synthetic construct
  source 1..80: mol_type = other DNA
ttggcaaagttttagtgataccatcttactccgtcttaaggcgcaggtggttagatttgttctaattctttcttgcatat

SEQ ID NO: 158701 - DNA, 80 bp, synthetic construct
  source 1..80: mol_type = other DNA
tacccttatgacttggacatgaaagaattagcagatgaggggtctaaatatggactaactataactcctgctgataaatc

SEQ ID NO: 158702 - DNA, 80 bp, synthetic construct
  source 1..80: mol_type = other DNA
cttagtgtttgactacactaattatgacggaagtcttaacccaatctggttccaagcattagagcaactcttaaacaacc

SEQ ID NO: 158703 - DNA, 80 bp, synthetic construct
  source 1..80: mol_type = other DNA
ctaggcggggcatcttaaaacctataaaacccggcgtacccgccgccccccggcgcagtccgcggcagggttccggccgt

SEQ ID NO: 158704 - DNA, 80 bp, synthetic construct
  source 1..80: mol_type = other DNA
cgaaaggaagcctaagccaccgccctcagcccaggactgggccgaggaatacactgcatgtaaatactgggacagaccac

SEQ ID NO: 158705 - DNA, 80 bp, synthetic construct
  source 1..80: mol_type = other DNA
tgttgtacactgttattacggtaactttgtatgccagtttttaccacccttccccgtaacgtaaattagaagtttgtaca

SEQ ID NO: 158706 - DNA, 80 bp, synthetic construct
  source 1..80: mol_type = other DNA
ctaccacttaatgacacaagaagacagtctcaacctacaaacacctttaccagagagagacttagcaataatcaacctaa

SEQ ID NO: 158707 - DNA, 80 bp, synthetic construct
  source 1..80: mol_type = other DNA
tggtcttagaaacatatagaggtattgatctggataaacttaagatggtagcttatggtgatgatgttttagcctcctac

SEQ ID NO: 158708 - DNA, 80 bp, synthetic construct
  source 1..80: mol_type = other DNA
caaaccccagtgtcttcttcaatgttggtaagtcagcacgttttagtgtcccctatctaggtattgcctcagcctataat

SEQ ID NO: 158709 - DNA, 80 bp, synthetic construct
  source 1..80: mol_type = other DNA
tcccgtgctttttgccaggcctgtcattgaggtaaaaagcgggcctgagtccaacattaaagcctcctcgcaacttatga

SEQ ID NO: 158710 - DNA, 80 bp, synthetic construct
  source 1..80: mol_type = other DNA
aacagaccccacacagcagcacaatagaagcactaaatgagtcattcctaaactgtcagttttaaaactccctgcttctc

SEQ ID NO: 158711 - DNA, 80 bp, synthetic construct
  source 1..80: mol_type = other DNA
aagatacaactgcctcaaaaagaaatatggacagtcaatgacatccaaaagctggtgggtgtcctaaattgggcagcaca

SEQ ID NO: 158712 - DNA, 80 bp, synthetic construct
  source 1..80: mol_type = other DNA
tcaaacatctacacaaggagacacatttatagataactttttaaaagtagctataccagacaacaaagaaagacactgga

SEQ ID NO: 158713 - DNA, 80 bp, synthetic construct
  source 1..80: mol_type = other DNA
agaagcatgctacaatctcacggtaatttatgccaacacgacagccatagttaccaacaggacgtgtgatagaagacaaa

SEQ ID NO: 158714 - DNA, 80 bp, synthetic construct
  source 1..80: mol_type = other DNA
ggccagaatatgtattaccattcaatgggcaggacaggttatatcatccatgtacaatgcaatgctacaaagtttcacag

SEQ ID NO: 158715 - DNA, 80 bp, synthetic construct
  source 1..80: mol_type = other DNA
ggactccaaatcgtaaaagaaagtagttaacaacttatccttagggaacttgggaatatacgaaccgcattcgtgtttac

SEQ ID NO: 158716 - DNA, 80 bp, synthetic construct
  source 1..80: mol_type = other DNA
aattactcctgctgataaatctgatgttttccaagagctaacttacaaaaatgtgacttttctcaaaagaggattcagag

SEQ ID NO: 158717 - DNA, 80 bp, synthetic construct
  source 1..80: mol_type = other DNA
aaaccaaagttccagaaaggcgtgttgtagcgcaaggaccagaggaagaatttggaatgtccttaatcaaacacaattca

SEQ ID NO: 158718 - DNA, 80 bp, synthetic construct
  source 1..80: mol_type = other DNA
atcaggatctatatgcgattaaagcacatcagagggtggatacccaggcccatgcgtagtcaggattacacggctaggaa

SEQ ID NO: 158719 - DNA, 80 bp, synthetic construct
  source 1..80: mol_type = other DNA
tgtaatgtcatgccatccatatttatacacaggacatctatcactgtgacattccgtgtaatatcaacgacgaacgtaaa

SEQ ID NO: 158720 - DNA, 80 bp, synthetic construct
  source 1..80: mol_type = other DNA
tacgaccactggaaatcaaacaatgatgcctggttccaaaaagcacaagcagcttacgacaatgtacacagtcagtatgg

SEQ ID NO: 158721 - DNA, 80 bp, synthetic construct
  source 1..80: mol_type = other DNA
ccaactgcttctgggtcaaaggtcggcggctacgtcataagtcacgtgggagggctgcgtcaccaacgcggaagtggctg

SEQ ID NO: 158722 - DNA, 80 bp, synthetic construct
  source 1..80: mol_type = other DNA
gataaatctgataaatttactaaaattgacttttctaatgcaacttttttaaagagaggctttaaaatggattccaaaca

SEQ ID NO: 158723 - DNA, 80 bp, synthetic construct
  source 1..80: mol_type = other DNA
accagagcaccaattagcatacgttggtggcacatatgctaatgttggatatgaccatacccaccctggtgaaaggggtc

SEQ ID NO: 158724 - DNA, 80 bp, synthetic construct
  source 1..80: mol_type = other DNA
aattcaagagtcagagtattacccaaaacacattcagtataatctcctaattggagagggaccttgtgaaccaggtgact

SEQ ID NO: 158725 - DNA, 80 bp, synthetic construct
  source 1..80: mol_type = other DNA
ccgtggtggagacgccggaggcgccgccggtggagaaggagacggaggagacccagacgacgccgcacttatcgacgccg

SEQ ID NO: 158726 - DNA, 80 bp, synthetic construct
  source 1..80: mol_type = other DNA
aaggcggaacaggctgtcaccccgtgtcaaaggtcaggggtcagccttccgctttgcacaaaatggtggtgtttatcttc

SEQ ID NO: 158727 - DNA, 80 bp, synthetic construct
  source 1..80: mol_type = other DNA
tccagtcgccatgtgcgttgccaaactttgatgtcacgccagaaatccatatacctggtgaggttaagaacataatggaa

SEQ ID NO: 158728 - DNA, 80 bp, synthetic construct
  source 1..80: mol_type = other DNA
acaattgttgtgtacagttgttaccatagtttgcattcagaaataaacttaacactttccaattatttgttacaatgggt

SEQ ID NO: 158729 - DNA, 80 bp, synthetic construct
  source 1..80: mol_type = other DNA
aggcagctagcataaatgacacaacccacttccgcatggtgtttggaaatctcttctcaacctttcatgccaacccaggt

SEQ ID NO: 158730 - DNA, 80 bp, synthetic construct
  source 1..80: mol_type = other DNA
taacaactcatccacgatagttgttccttatataaattgcgtgcccatggataatatgttaaaacacaacaaccttacac

SEQ ID NO: 158731 - DNA, 80 bp, synthetic construct
  source 1..80: mol_type = other DNA
acccctgtaagaaaggcaccttcgtcgttcccggaaccagtggcatcgctcgcatactacaagtcagcaacccggccaag

SEQ ID NO: 158732 - DNA, 80 bp, synthetic construct
  source 1..80: mol_type = other DNA
cagtacatgttccccgagagggcccccaagccagctccgaccagcggggactgggagatggagtacctgatgtgtaagat

SEQ ID NO: 158733 - DNA, 80 bp, synthetic construct
  source 1..80: mol_type = other DNA
gtagaatggttctctgataaaattaaatctatgttgagctttgtggaaagaaataaggcctggttaacagttgtttcagc

SEQ ID NO: 158734 - DNA, 80 bp, synthetic construct
  source 1..80: mol_type = other DNA
tccgcacatccaaaagaactgaaccagttggagtcattttccatggtgagccaggtacagggaaatcaatcacaacatct

SEQ ID NO: 158735 - DNA, 80 bp, synthetic construct
  source 1..80: mol_type = other DNA
ctggggacacacgaaaagcaacgcccgggtggcgagggacgacggccccaggaggacggccgcgcgcggcgccactcgtc

SEQ ID NO: 158736 - DNA, 80 bp, synthetic construct
  source 1..80: mol_type = other DNA
aaagagattgaagtagatggtatcaatactaaagttctagatgcttatgatcttcacaataaacaaggcacaaaacttga

SEQ ID NO: 158737 - DNA, 80 bp, synthetic construct
  source 1..80: mol_type = other DNA
atacctttcgtgccactggattatgcagagggtgcctccccatacgttccaatcacagtgacagtagcaccgatgagtgc

SEQ ID NO: 158738 - DNA, 80 bp, synthetic construct
  source 1..80: mol_type = other DNA
gtggctaaggctttacaaccttgtaccaagtgccctaaacctgtgcattataaacagtgttgcccacttctgtgcggtca

SEQ ID NO: 158739 - DNA, 80 bp, synthetic construct
  source 1..80: mol_type = other DNA
cctgttaataagacgatatcatcacgatgggtgctcaggtttcatcacagaaagtgggcgcacacgaaaactcaaataga

SEQ ID NO: 158740 - DNA, 80 bp, synthetic construct
  source 1..80: mol_type = other DNA
gtcaaggggcaattcgggcacgggactggccgggctatgggcaagactcttaaaaaattcccccgctctgttctccggca

SEQ ID NO: 158741 - DNA, 80 bp, synthetic construct
  source 1..80: mol_type = other DNA
aactgccagatgcgctatcgcaaatgggattatttgggcagaacatgcagtatcactacctcggtaggacagggtacacc

SEQ ID NO: 158742 - DNA, 80 bp, synthetic construct
  source 1..80: mol_type = other DNA
tctccacacagatcatcaagaacccctgcaaagacagtggactggaacccgcctaccccggtagacagcgtcacgactta

SEQ ID NO: 158743 - DNA, 80 bp, synthetic construct
  source 1..80: mol_type = other DNA
ttgacctgcgagactttcatgtagctgacgaacaaggaatttcagattacatcacaaatttaggggaagcttttggccaa

SEQ ID NO: 158744 - DNA, 80 bp, synthetic construct
  source 1..80: mol_type = other DNA
caaaaacatccgggtcagaggtcgccgtgacgtcataagtcacgtggggatggctgctgttaacccggaagtagctgacc

SEQ ID NO: 158745 - DNA, 80 bp, synthetic construct
  source 1..80: mol_type = other DNA
gtggggtgatggctggcaacgtcacggtgtttccccaccagattatcaacttgcgcaccaacaactgcgcaacgctagtg

SEQ ID NO: 158746 - DNA, 80 bp, synthetic construct
  source 1..80: mol_type = other DNA
ataccaatcaatcacacaacacacaggtttaaaaatcgatcacacgtcaattaggtttcaaaatcgatactgtttattat

SEQ ID NO: 158747 - DNA, 80 bp, synthetic construct
  source 1..80: mol_type = other DNA
atgctgcacgtgggctggagtggattggagacaagttgtccaaattcattgattggctaaaaggaaaaatcctgcccaca

SEQ ID NO: 158748 - DNA, 80 bp, synthetic construct
  source 1..80: mol_type = other DNA
ttaaacattccaggagaagtgagaaacttgatggaaatagcagaagtagactcagtggtccctgtgaataatgtagaagg

SEQ ID NO: 158749 - DNA, 80 bp, synthetic construct
  source 1..80: mol_type = other DNA
gtgatggcaggtaacattactgtttttccgcatcaaattataaacttgcgcacaaacaactgcgccacgctggtgctgcc

SEQ ID NO: 158750 - DNA, 80 bp, synthetic construct
  source 1..80: mol_type = other DNA
ctcctggtgtagcaaagcctaagtctaggaaagaagccatgcttggtactcatctggtgtgggatgttggcctacaatcc

SEQ ID NO: 158751 - DNA, 80 bp, synthetic construct
  source 1..80: mol_type = other DNA
acattggttcagcggttaacacgctagaagcttaccgcgtggccgtggcatcaatggcctcgtcagggcaacaagtattt

SEQ ID NO: 158752 - DNA, 80 bp, synthetic construct
  source 1..80: mol_type = other DNA
cctagtaatgagcggaccgtttgcatacaagggcgacgaaaaatcctgctgcttgggaataaaatacaaattcaggttca

SEQ ID NO: 158753 - DNA, 80 bp, synthetic construct
  source 1..80: mol_type = other DNA
gataggtgcaaaaacctgagctcgtcctcgcgcagagcgcaaagcggccagttctttagcatcttcaggaggagcccgtg

SEQ ID NO: 158754 - DNA, 80 bp, synthetic construct
  source 1..80: mol_type = other DNA
aaacttaaacagtctaataaacaaactagcaaacaatgcaaaaaactattttcaaaaaatgttagacgagaaattcccaa

SEQ ID NO: 158755 - DNA, 80 bp, synthetic construct
  source 1..80: mol_type = other DNA
aaactgtatgataccttattcacacaaaactcctcaggtcactactggcaaacattcatcacaaattccatggtaaaaga

SEQ ID NO: 158756 - DNA, 80 bp, synthetic construct
  source 1..80: mol_type = other DNA
gaacggaagatacgcagtgttagcgccggacgcgcactgtatatccctccctatgaagtgcttttgcatgagtggtatga

SEQ ID NO: 158757 - DNA, 80 bp, synthetic construct
  source 1..80: mol_type = other DNA
tttcacagagggtgggtttgtgacgctgtggcaccaaaccgcattcgtttccaatggtcaggtgtggtctattatggtca

SEQ ID NO: 158758 - DNA, 80 bp, synthetic construct
  source 1..80: mol_type = other DNA
ccttctattaaagtatttaatggctctaacagacccaccgctgaccaatattttgctacaaatgatagtctctggggaga

SEQ ID NO: 158759 - DNA, 80 bp, synthetic construct
  source 1..80: mol_type = other DNA
ctgcctactgccaacccgcctgtgggacccccccaaccgcccacacgccccccgccgcgcctaagagcactgcccgctct

SEQ ID NO: 158760 - DNA, 80 bp, synthetic construct
  source 1..80: mol_type = other DNA
gcaaaagaactaaactttaaaacaggcatgtactctgccatatttttaacaaacggaagactaagtcccgactaccctgg

SEQ ID NO: 158761 - DNA, 80 bp, synthetic construct
  source 1..80: mol_type = other DNA
aaccagccccgccatcgccgccgccgcttcatgaggtgggcaggcgaaagctggtgaattcgttgtacagcggcaagtgg

SEQ ID NO: 158762 - DNA, 80 bp, synthetic construct
  source 1..80: mol_type = other DNA
tgaacagtacctactacacagaaacagatggtccaaatcaaactttgacctagaactagccagatacaaaggcaccacta

SEQ ID NO: 158763 - DNA, 80 bp, synthetic construct
  source 1..80: mol_type = other DNA
aacccaagcatgtgagagcatgggtgccgcgagcaccacggttgtgtccatacctttatgcaaagaacgtcaactttgac

SEQ ID NO: 158764 - DNA, 80 bp, synthetic construct
  source 1..80: mol_type = other DNA
cgaccacctgtggaacaacaaccagcaaatgttctgggtccagctgctgttacctctagctgcactcatcgtactagcaa

SEQ ID NO: 158765 - DNA, 80 bp, synthetic construct
  source 1..80: mol_type = other DNA
caggaaacagtggcgaggaaaccgtcggagaggccttcgaatggctaaacaggacggtggaagccataaacagagaggcg

SEQ ID NO: 158766 - DNA, 80 bp, synthetic construct
  source 1..80: mol_type = other DNA
tcaacattgatgggaggatggttaaagtactcaagcagcaaatattaaccgacaccaatgatattgacactgaaattacc

SEQ ID NO: 158767 - DNA, 80 bp, synthetic construct
  source 1..80: mol_type = other DNA
tcgccctcttgtgaaggacgcaatgccccaggggcagaagggggagagcaacaagatatagatgatagtgatgaggatga

SEQ ID NO: 158768 - DNA, 80 bp, synthetic construct
  source 1..80: mol_type = other DNA
tttgattcagaaataactatagtgcccacagtagccggacaagggaatgacaccgggcatgtggtgcttcaatacatgta

SEQ ID NO: 158769 - DNA, 80 bp, synthetic construct
  source 1..80: mol_type = other DNA
acttccagattttggggccccagtacaaaaagcaccttagtattagctccacttcctgggcatggtctacatcataatat

SEQ ID NO: 158770 - DNA, 80 bp, synthetic construct
  source 1..80: mol_type = other DNA
atgatgtcttccctggtgaaaaagaacccgctgtgctaagcaataatgatcccagattgaatgcaaaccttaaggaggct

SEQ ID NO: 158771 - DNA, 80 bp, synthetic construct
  source 1..80: mol_type = other DNA
cgacaccacaaggaatgatgtgaaaatatttgccaaacccaaacacacatctgcgtggataccacgaccccccagagcta

SEQ ID NO: 158772 - DNA, 80 bp, synthetic construct
  source 1..80: mol_type = other DNA
gtgtgtgactcatttagcactggtaaattcttgcttgcttacaccccccccggcggtagagtacccagggacagaagaga

SEQ ID NO: 158773 - DNA, 80 bp, synthetic construct
  source 1..80: mol_type = other DNA
aagttgtcgacccgcagaccgttggacccccgtgggtcttccactccttcgaccagagacgaggaatgtttactgaaaca

SEQ ID NO: 158774 - DNA, 80 bp, synthetic construct
  source 1..80: mol_type = other DNA
ctttgtagatcagcttgtgtttacctcggggaataccgggccacaggggtggaagaaggggacacggagcagtttgcagt

SEQ ID NO: 158775 - DNA, 80 bp, synthetic construct
  source 1..80: mol_type = other DNA
tactgtgcaccaccgggttttgctttgctaagatgcaatgatactaattattcaggctttgagcccaattgctctaaagt

SEQ ID NO: 158776 - DNA, 80 bp, synthetic construct
  source 1..80: mol_type = other DNA
agaagccatggagcaaggagtccagtcatacatcgaatccctcggagcagcgtttgggagtggttttacaaaccaaatta

SEQ ID NO: 158777 - DNA, 80 bp, synthetic construct
  source 1..80: mol_type = other DNA
agggaatgccagtagtactaccaccactaagcctactaccacctctcgtgggctgaaaacgattaacgaaacagacccat

SEQ ID NO: 158778 - DNA, 80 bp, synthetic construct
  source 1..80: mol_type = other DNA
ccagcttagtacaattaaggagaaaattagatatgttcacttatgtaagatttgattcagagtatactataattgctaca

SEQ ID NO: 158779 - DNA, 80 bp, synthetic construct
  source 1..80: mol_type = other DNA
ttaagcagaagaaaaggagtgaaccagttgccgtgatgatacacggcccacctggtacaggaaaatccataaccactagt

SEQ ID NO: 158780 - DNA, 80 bp, synthetic construct
  source 1..80: mol_type = other DNA
ctgaacttaaaagaactcaggcaaaatgcctaatagaagacctgcctctatacgcagccttttttggctacgaagactat

SEQ ID NO: 158781 - DNA, 80 bp, synthetic construct
  source 1..80: mol_type = other DNA
tctaatgctactgatgagagtatgatcgaaacgagatgcgttgtcaacaagcatggaataatggaaacaagcgtggagca

SEQ ID NO: 158782 - DNA, 80 bp, synthetic construct
  source 1..80: mol_type = other DNA
cgaagaaaccagaattgaggagggccacactccaaggaccagagcatgagtttctccacgcactcatcaaacgaaactgc

SEQ ID NO: 158783 - DNA, 80 bp, synthetic construct
  source 1..80: mol_type = other DNA
agactcgaatagtggaagcagctagcttgaatgacactacccactttcgaatggtttttggcaatctctttagcactttt

SEQ ID NO: 158784 - DNA, 80 bp, synthetic construct
  source 1..80: mol_type = other DNA
cataaaaggcgatagaatgtggggacgaaacatatccagatacacagttttgttattcgaacaaaacccgtgtgatgcag

SEQ ID NO: 158785 - DNA, 80 bp, synthetic construct
  source 1..80: mol_type = other DNA
ggccgggctatgggcaaggctcttaaagaatgcgtttttctcgaatttatcgcagaaagaagaggctcctgccactgctt

SEQ ID NO: 158786 - DNA, 80 bp, synthetic construct
  source 1..80: mol_type = other DNA
gctaaagcatactctccttggcgagatattgaattactacgccaactggtcaggaagcatgaagttaacctttatgtttt

SEQ ID NO: 158787 - DNA, 80 bp, synthetic construct
  source 1..80: mol_type = other DNA
tgatcctgttagccatcttgctgctctggctgctacattcggttttcagccggggccgccgccgagtggtggtcctaggg

SEQ ID NO: 158788 - DNA, 80 bp, synthetic construct
  source 1..80: mol_type = other DNA
tagtagtgcccagccttaagaccaagccacacggacgcagggccataaaaataaggataaaacccccaaaactcatgctt

SEQ ID NO: 158789 - DNA, 80 bp, synthetic construct
  source 1..80: mol_type = other DNA
gtaattgcaaccaccaacaagtctgatttctctagtactgttctccaggactctggagcattaaagaggagattccccta

SEQ ID NO: 158790 - DNA, 80 bp, synthetic construct
  source 1..80: mol_type = other DNA
actatggtttaacaataactcctccagataaaacagagaaattttccaagataacatgggacaatttaacatttctaaaa

SEQ ID NO: 158791 - DNA, 80 bp, synthetic construct
  source 1..80: mol_type = other DNA
aggaagtatcaccaccagtgatataacgcacaagcaattcttgttccccggagctggatatagactgctaacgtggtcaa

SEQ ID NO: 158792 - DNA, 80 bp, synthetic construct
  source 1..80: mol_type = other DNA
gttaaacagatattgagaggagacaaagagagttaggggccgaccgaggaaggccgccgccacggccgcctcaaaaacgg

SEQ ID NO: 158793 - DNA, 80 bp, synthetic construct
  source 1..80: mol_type = other DNA
aggaccgggctacagccatgttgggcacacacgtcatctgggatttcggattgcaatcatccgtcactctagtgatacca

SEQ ID NO: 158794 - DNA, 80 bp, synthetic construct
  source 1..80: mol_type = other DNA
ccactcaggctcccgctcgcatacctccagtatggggtcgactggttccaagaagcactccgagcagcagcaagggctac

SEQ ID NO: 158795 - DNA, 80 bp, synthetic construct
  source 1..80: mol_type = other DNA
tggatatccagcaccttcttccgtaggacaaactcagacaactactcatcgggtggctatatcactctgtggtatcagac

SEQ ID NO: 158796 - DNA, 80 bp, synthetic construct
  source 1..80: mol_type = other DNA
cctcaagggctaccagtttatgtgacaccagggtctggtcaatttatgacaacggatgacttacaatcaccctctgcatt

SEQ ID NO: 158797 - DNA, 80 bp, synthetic construct
  source 1..80: mol_type = other DNA
gggtgcccaggtctcgtctcaaaaagttggagcccatgaaaatacaaatgttgccactggtggatccactgtcaattaca

SEQ ID NO: 158798 - DNA, 80 bp, synthetic construct
  source 1..80: mol_type = other DNA
caactgtgcaggggccgagcttggacttcgctctatctctacttaggaggaacattagtcagggccaaaccgaccagtgc

SEQ ID NO: 158799 - DNA, 80 bp, synthetic construct
  source 1..80: mol_type = other DNA
accaagggcagccaagggacgcgtgttatcccaggctgcccaccctgaggatttccccccaaaatcctcctaccctctct

SEQ ID NO: 158800 - DNA, 80 bp, synthetic construct
  source 1..80: mol_type = other DNA
gacagcgcaagcgacttcgacgccgactgctggtgcatgtggggacgcttcggaaccatgggccgccaacctgtcgtgac

SEQ ID NO: 158801 - DNA, 80 bp, synthetic construct
  source 1..80: mol_type = other DNA
cttgtggccccgtggatctcgaacaccgactatcgacgcagcgccaaggatgacttcactgaaggaggatacatcaccgc

SEQ ID NO: 158802 - DNA, 80 bp, synthetic construct
  source 1..80: mol_type = other DNA
accccagtgtgttctatgacatattccctggtgaaaaggaacccgctgtgctgactcaaaaagaccccagattggaaact

SEQ ID NO: 158803 - DNA, 80 bp, synthetic construct
  source 1..80: mol_type = other DNA
cctgcgtcccaggtgactgcggtggaaagctgctctgtgcccatggagtcattggcataataacagcaggtggagagggt

SEQ ID NO: 158804 - DNA, 80 bp, synthetic construct
  source 1..80: mol_type = other DNA
cagtgactttctctctgaaagccttgtatgaccagtacctgaaacaccaaaacaggtggactttctcaaacgaccagcta

SEQ ID NO: 158805 - DNA, 80 bp, synthetic construct
  source 1..80: mol_type = other DNA
gtgggtcgaagactttacctcccaccatattgcctattggagcgtgcatggattgataagttcatatagattataatttc

SEQ ID NO: 158806 - DNA, 80 bp, synthetic construct
  source 1..80: mol_type = other DNA
accccgagcggtaccgtatcgtggggaaggagtggatttcagttcaaactcaatcacgccactgaccgcagtaaattcca

SEQ ID NO: 158807 - DNA, 80 bp, synthetic construct
  source 1..80: mol_type = other DNA
accaaagggagttactgatgcccgaacatccatcaaactggagaagccaagcactggcggtagactggtaacaaatgggg

SEQ ID NO: 158808 - DNA, 80 bp, synthetic construct
  source 1..80: mol_type = other DNA
ctcatcccagcttgctgctacaggccaaacacagacgcaaaatccccagttttaaaaccaggccttttggtaaaaaggca

SEQ ID NO: 158809 - DNA, 80 bp, synthetic construct
  source 1..80: mol_type = other DNA
ggaataaaaaaaccatcgcaggccagaggctaagccgaaaccgtccggggaagcgggcgcgagttttccgacttagtctc

SEQ ID NO: 158810 - DNA, 80 bp, synthetic construct
  source 1..80: mol_type = other DNA
attcaatgaaaaaagaacatctagactagaaacaattaaaaaagaatggcaagtattatacccacaattagtcactcagg

SEQ ID NO: 158811 - DNA, 80 bp, synthetic construct
  source 1..80: mol_type = other DNA
ggtctactggatactggtaaggcattgaccccatgcaccacatgtccaaagccaccctactataagtcctgctgtccgct

SEQ ID NO: 158812 - DNA, 80 bp, synthetic construct
  source 1..80: mol_type = other DNA
ctgtcccctactttggaccaggggttgactacaagggagatgccctcacaccgttatcgcgcaaagacttaaccacctat

SEQ ID NO: 158813 - DNA, 80 bp, synthetic construct
  source 1..80: mol_type = other DNA
cctctgaggccccccgctcccgcgggtccgggcggtccccccggctaccttcccgctctcccggctccggcaccggagcc

SEQ ID NO: 158814 - DNA, 80 bp, synthetic construct
  source 1..80: mol_type = other DNA
caaacgtaatggatacacacaacaataaaatatttaactcaagtaactcagacttaacaacatggctgcaaggaaaagga

SEQ ID NO: 158815 - DNA, 80 bp, synthetic construct
  source 1..80: mol_type = other DNA
ctctatacatgttacaatgtcactgtatattccatatatcaaacacacatccacacaactatattgctctatccgcctac

SEQ ID NO: 158816 - DNA, 80 bp, synthetic construct
  source 1..80: mol_type = other DNA
cccaaaccttacaacccttccagtaatgactggaaagaggaatatcaggcctgtagaatatgggacagacccccaagaag

SEQ ID NO: 158817 - DNA, 80 bp, synthetic construct
  source 1..80: mol_type = other DNA
agcaggtccgtcccctgccacgtacctaatagtagtccacagtagtcggccttggttgtaatttcaggagagagtcctcc

SEQ ID NO: 158818 - DNA, 80 bp, synthetic construct
  source 1..80: mol_type = other DNA
ctcaaatgcagattcagacaccatattagtacacaaaacaaatgctacacaaggaaatacatttacctactggtcaacaa

SEQ ID NO: 158819 - DNA, 80 bp, synthetic construct
  source 1..80: mol_type = other DNA
aatgtataataagaggcatgatgccagtactgtgggccggcatgggtacggggggcagaaactatgcagtgagatcagat

SEQ ID NO: 158820 - DNA, 80 bp, synthetic construct
  source 1..80: mol_type = other DNA
ccgcgaccccctcaccttcagtcaccccagcccttacccccgtcacgtcccccataaccccgttgtgtatttaacgtcac

SEQ ID NO: 158821 - DNA, 80 bp, synthetic construct
  source 1..80: mol_type = other DNA
acatctgtgcaatctgtccctacacagatccccccatgcacaacaaacaaaatcccttgcaaggctacgtgttttatgac

SEQ ID NO: 158822 - DNA, 80 bp, synthetic construct
  source 1..80: mol_type = other DNA
taacgtgccagttcatccaagttgtgcgatactaacaccatgtacttttcacgagtgtcgtaggcgtagacgcgagaaaa

SEQ ID NO: 158823 - DNA, 80 bp, synthetic construct
  source 1..80: mol_type = other DNA
acaatatgtaaagattgccatcagccctcaaatttcaagaagtgttgtcctctagtgtgtggtaaagctataagccttgt

SEQ ID NO: 158824 - DNA, 80 bp, synthetic construct
  source 1..80: mol_type = other DNA
tacaacgctctgaacaatatgggcaagttatacgcaaggcatgtgaataaagacacaccatatcaaatggctagtacaat

SEQ ID NO: 158825 - DNA, 80 bp, synthetic construct
  source 1..80: mol_type = other DNA
gggcaatgaatgttgacatctttactgccagtcacaccaaggttgataatatttttggacgtgcttggtataattcacgg

SEQ ID NO: 158826 - DNA, 80 bp, synthetic construct
  source 1..80: mol_type = other DNA
cctggggcagaacccccacgggggcagtatgagcacagtgacttttagcctacaagtactatttgaccagtatcagaggt

SEQ ID NO: 158827 - DNA, 80 bp, synthetic construct
  source 1..80: mol_type = other DNA
attttggcaacctgttcaggatgtccagatctgtccgtacgcatgctaagggatacaccacttatcagttacgcacaaag

SEQ ID NO: 158828 - DNA, 80 bp, synthetic construct
  source 1..80: mol_type = other DNA
acccacccaggtgagagaggaataaatttagatgatatagaaaaagaaggaggagcaacacataacccagtgtattcaat

SEQ ID NO: 158829 - DNA, 80 bp, synthetic construct
  source 1..80: mol_type = other DNA
tgttgggcatcttcatcgcgtttatactcgccagcagagcggcggaccgagtccccctcgtactcccaccggggcaccgg

SEQ ID NO: 158830 - DNA, 80 bp, synthetic construct
  source 1..80: mol_type = other DNA
ctggcggttttgcagtcgacgggaacggcgagaggacgatcttcgcacgcgggctgagccggaccgcgtggtgttccagt

SEQ ID NO: 158831 - DNA, 80 bp, synthetic construct
  source 1..80: mol_type = other DNA
gatttggtgcagctaagacgcaagtgtgaaatgttcacttacatgaggtttgacctcgaagtgacttttgtaataaccag

SEQ ID NO: 158832 - DNA, 80 bp, synthetic construct
  source 1..80: mol_type = other DNA
agcccagggccctgccatggcgtggggatggtggagacgcagacgctggcccacctaccgaaggtggcgccgctggagac

SEQ ID NO: 158833 - DNA, 80 bp, synthetic construct
  source 1..80: mol_type = other DNA
attcttctgcgcgtacccgcggcacgcggctgtgacccagtagcaaccacaacgtcgtcaagaacggcgtcaggtctttg

SEQ ID NO: 158834 - DNA, 80 bp, synthetic construct
  source 1..80: mol_type = other DNA
tgggtaacattaatgcccaggtttatcctaacacgtaccaccctattatctaacattgatataacaaaatgcacagttac

SEQ ID NO: 158835 - DNA, 80 bp, synthetic construct
  source 1..80: mol_type = other DNA
agagggggggtgtgcgggacggtgttggggccggggactgtgtttgcgctgaggccggggctgttcgcgccgcgtcgggg

SEQ ID NO: 158836 - DNA, 80 bp, synthetic construct
  source 1..80: mol_type = other DNA
ctacacagtgccacaactgttagatcacaacaaccccctgaggggatacgtaccgtacagttttaactttggaaatggaa

SEQ ID NO: 158837 - DNA, 80 bp, synthetic construct
  source 1..80: mol_type = other DNA
acattatcggagtgtaagaagatcccactttatcaagagcaaattaaaggttatcccatggccacacaagaagcccagaa

SEQ ID NO: 158838 - DNA, 80 bp, synthetic construct
  source 1..80: mol_type = other DNA
aacagaactatcatcagtttaaacaagcattataacctctctatgtattgtaggaggccaggaaataagacagtggtgcc

SEQ ID NO: 158839 - DNA, 80 bp, synthetic construct
  source 1..80: mol_type = other DNA
gccatgctgcaccccggcatgatgatgcagcaaaaatataagttattgatacccagctgggacaccaaaccaaaaggcag

SEQ ID NO: 158840 - DNA, 80 bp, synthetic construct
  source 1..80: mol_type = other DNA
tcgtgcgcgcacaccacgtgccgcagtgccacgtccttggtgggaaacacgaacgctgacgtgtagtagacgtcgggctc

SEQ ID NO: 158841 - DNA, 80 bp, synthetic construct
  source 1..80: mol_type = other DNA
gaactttgccagattgacactttgattccaataaacagtgtaactggtaacactaacaacactagcatatatactgtaac

SEQ ID NO: 158842 - DNA, 80 bp, synthetic construct
  source 1..80: mol_type = other DNA
aaggagatgagattgtcgatctcattgagagtgctgcacagaataccactaaagctattactagctcaattgacaccaag

SEQ ID NO: 158843 - DNA, 80 bp, synthetic construct
  source 1..80: mol_type = other DNA
tcactataattattgtcagtacaaccctaacaatgcacaactaactaccctcagacagtactactttttctgggaaacat

SEQ ID NO: 158844 - DNA, 80 bp, synthetic construct
  source 1..80: mol_type = other DNA
aaacccctgggtcagagaaggcacaaacagccccatagtggggttttatgttttaaaaccctcactatataatggcaaca

SEQ ID NO: 158845 - DNA, 80 bp, synthetic construct
  source 1..80: mol_type = other DNA
ataaataacatcccaagtatgatcaacaatggagacataggggcttacaacatccctataacaggtggacatgacgacag

SEQ ID NO: 158846 - DNA, 80 bp, synthetic construct
  source 1..80: mol_type = other DNA
cgccgtcctgcccattcgcccctccccctaccgctttcttgcctcctccacgggcccggccgccgccaccgttattcctc

SEQ ID NO: 158847 - DNA, 80 bp, synthetic construct
  source 1..80: mol_type = other DNA
tgatgatgcagtacaaaaaaaaaatactagtgcccagctggcagactaaaccaaaaggcaaaggcagaattagtattttt

SEQ ID NO: 158848 - DNA, 80 bp, synthetic construct
  source 1..80: mol_type = other DNA
ctattccaaaaactatatccaacctcaaacagcaaagatgaatggcaatacacatacaacaaacccatgcaaaaaatata

SEQ ID NO: 158849 - DNA, 80 bp, synthetic construct
  source 1..80: mol_type = other DNA
ggctacccggagagtttccagtattagatgtcacggcagcctgggtccggcacggcaccctctccccagacagtccggtc

SEQ ID NO: 158850 - DNA, 80 bp, synthetic construct
  source 1..80: mol_type = other DNA
gcacacccgaaagggtgtgaagccttttcaaagacagggtgcgaagagtctactgtgctcaccttgattcctccggcccc

SEQ ID NO: 158851 - DNA, 80 bp, synthetic construct
  source 1..80: mol_type = other DNA
acgaggccatcttttacaagaccgacgctccggatcacaacctttaccatacccagatcaaagttaaacgctcttttgga

SEQ ID NO: 158852 - DNA, 80 bp, synthetic construct
  source 1..80: mol_type = other DNA
ccaacccatgcacaagtgagtgattctatcagtattgatgggaaggaagttaaagttcttaagcaacaggtgataacaga

SEQ ID NO: 158853 - DNA, 80 bp, synthetic construct
  source 1..80: mol_type = other DNA
ttcgggcacgggactggccgggctatgggcaaggctcttaaaaagctatgttcttcggcaggtgctggagaaagaaaagg

SEQ ID NO: 158854 - DNA, 80 bp, synthetic construct
  source 1..80: mol_type = other DNA
ttcatggctcaaaaaattcacggaaatgtgcaatgcagctagaggtcttgaatggattggtaacaaaatatctaaattta

SEQ ID NO: 158855 - DNA, 80 bp, synthetic construct
  source 1..80: mol_type = other DNA
ttcccccgctgtgttctacgccaggccaatcagcatctactacgtgcacttcctggggcgtgtcttcccagtctatataa

SEQ ID NO: 158856 - DNA, 80 bp, synthetic construct
  source 1..80: mol_type = other DNA
gagcaaacacccggcgcaccatccgggatattctggagatccccgtgactgtgctctcatccctgcaactgtctcccacc

SEQ ID NO: 158857 - DNA, 80 bp, synthetic construct
  source 1..80: mol_type = other DNA
gagacaagtaagaccacaaatggaaccacaaaaaatgagacaagatgctacatgaaccattgtaacacatcagtcatcac

SEQ ID NO: 158858 - DNA, 80 bp, synthetic construct
  source 1..80: mol_type = other DNA
ggtacggtaccgctgggatgggtgttttttattctttgcttatctgcctcttccccgtgtgctgttgacctgggtagcaa

SEQ ID NO: 158859 - DNA, 80 bp, synthetic construct
  source 1..80: mol_type = other DNA
ccagtggttgggtcttagatatgtgcacaaagaatcagatggctggatcaaaaaattcacagagatgtgtaatgcagcta

SEQ ID NO: 158860 - DNA, 80 bp, synthetic construct
  source 1..80: mol_type = other DNA
agccatattccagggtttgggtgataccactcctcccgggtttatagttgatctcctctccagttctaaagacccaaaag

SEQ ID NO: 158861 - DNA, 80 bp, synthetic construct
  source 1..80: mol_type = other DNA
gcaagaagaagactggactttccaggtcgagaagcgaggggtcgtcgtcagaagagagcgatcaagaagcccaagaagag

SEQ ID NO: 158862 - DNA, 80 bp, synthetic construct
  source 1..80: mol_type = other DNA
gtgcagagggactgcctatatatacaacaccaggttcgggtcagttcatgacaactgacgattttcaatcaccctcagct

SEQ ID NO: 158863 - DNA, 80 bp, synthetic construct
  source 1..80: mol_type = other DNA
tatacatgtcctattcttgagtgagactgggtttttaagggtggcacacacctatgacagtgacacaaatagatctgatt

SEQ ID NO: 158864 - DNA, 80 bp, synthetic construct
  source 1..80: mol_type = other DNA
gttgcgcgttgcaggcgctctggggttggcggcgggtgtttctacggtgtttctgcggcgtttctacgcagcttcggccg

SEQ ID NO: 158865 - DNA, 80 bp, synthetic construct
  source 1..80: mol_type = other DNA
ggctgacaccccgtgtcaaaggtcagggttcagcttccgccttacacaaaatggaggtcaaaaacatccgggtcagaggt

SEQ ID NO: 158866 - DNA, 80 bp, synthetic construct
  source 1..80: mol_type = other DNA
tagcagtagtaacacacggtatggaatctcacagaccaatgatatgggaaccttgtgcatacgtgcactagatgacacca

SEQ ID NO: 158867 - DNA, 80 bp, synthetic construct
  source 1..80: mol_type = other DNA
ggatgtgcgagccataaagcagtttctggaggccacggccgatcgcatcctgggtgacattggtcaggctcccttgtatg

SEQ ID NO: 158868 - DNA, 80 bp, synthetic construct
  source 1..80: mol_type = other DNA
gactcaaggcctttcgacgccgccatttatttccaacgtccaagtcccacgtcatttctggcatctccacgcccttgact

SEQ ID NO: 158869 - DNA, 80 bp, synthetic construct
  source 1..80: mol_type = other DNA
ggacatctcatgtgaattctatggatctgagtacttcagctggatacagctttgtcaaatcaggttacaaaaagaaggat

SEQ ID NO: 158870 - DNA, 80 bp, synthetic construct
  source 1..80: mol_type = other DNA
cgagctcaacgccctgttcgacgccgtcgaagaagagtaaggagaaggcgatgggggaggcggaggtggagacggtggta

SEQ ID NO: 158871 - DNA, 80 bp, synthetic construct
  source 1..80: mol_type = other DNA
tactagcttatgaatccagacaaacagagcatgctatattcactcactggacaggcatattcggacccccattcctagac

SEQ ID NO: 158872 - DNA, 80 bp, synthetic construct
  source 1..80: mol_type = other DNA
attggatgttcagttatctcatgtggcaaagtgttttcaaaaatgttagagacagtttttaattggcagatggattccag

SEQ ID NO: 158873 - DNA, 80 bp, synthetic construct
  source 1..80: mol_type = other DNA
cgtgacgtcatggccgccattttgtgtaaggcggaacaggctgtgaccccgtgtcaaaggtcagggttcagcctttcgcc

SEQ ID NO: 158874 - DNA, 80 bp, synthetic construct
  source 1..80: mol_type = other DNA
tatggccatatgttttagaagttgccacaatagcattagcaacactgtttacagactcttccaggaacttgctagaattc

SEQ ID NO: 158875 - DNA, 80 bp, synthetic construct
  source 1..80: mol_type = other DNA
gcaaatgctctaaatacatttagaacagaaggctgtatgtcacacccaaaagcaaaaaaattcataccagacaacccatc

SEQ ID NO: 158876 - DNA, 80 bp, synthetic construct
  source 1..80: mol_type = other DNA
cggacgcgacggtgacggcattatgagcggcggcgctgtacgccagcggggagaaaagtggcagataaatcacgtcaggt

SEQ ID NO: 158877 - DNA, 80 bp, synthetic construct
  source 1..80: mol_type = other DNA
gcattgtggatatgaagacagccatcctagggacttcacatgttaattcaatggacttgagtacttcagctgggtatagt

SEQ ID NO: 158878 - DNA, 80 bp, synthetic construct
  source 1..80: mol_type = other DNA
catggacaaagacacgactaaagaaattgacaacgctatatacaccatttgtgacattggctcagacaacagttttgaac

SEQ ID NO: 158879 - DNA, 80 bp, synthetic construct
  source 1..80: mol_type = other DNA
ggtatcacaaattacattgagtcattgggagccgcgtttggtgccgggtttacacaccaaattggagaaaaggttagtga

SEQ ID NO: 158880 - DNA, 80 bp, synthetic construct
  source 1..80: mol_type = other DNA
gacttgatacctcaccgccgtttgcctaggctataggctaaatttccctttcccctttccctttattgttgtaaatatta

SEQ ID NO: 158881 - DNA, 80 bp, synthetic construct
  source 1..80: mol_type = other DNA
aacaaccctgcgcaatacccagccttctcagtgaccaacccaggaaagaatggaagagaatttgtagacccttatgtttt

SEQ ID NO: 158882 - DNA, 80 bp, synthetic construct
  source 1..80: mol_type = other DNA
tagttaatcgcatgggtgcactatgcatgagagttgtcactaacaaacaagctcataaagttgaaatcacaaccaatatt

SEQ ID NO: 158883 - DNA, 80 bp, synthetic construct
  source 1..80: mol_type = other DNA
cacaacctatgagccactggagaccaccggtacacaatgtaccgggacaagaaaggcagttctacgagggctgtttccgc

SEQ ID NO: 158884 - DNA, 80 bp, synthetic construct
  source 1..80: mol_type = other DNA
aggccagggcctggtaggagggccaggagctgtcttcacgccggaccgagaggtcgcccacctcacagtcgtactcgagc

SEQ ID NO: 158885 - DNA, 80 bp, synthetic construct
  source 1..80: mol_type = other DNA
tacagacacgacagtgtagactacatagtcagctacaccagaacaggaccttttcaaatggggcacctcactcacctcag

SEQ ID NO: 158886 - DNA, 80 bp, synthetic construct
  source 1..80: mol_type = other DNA
acgccgtatttttaagatggaagccaccatcaacaattacatacagttcaagaccaaacaccgcattgaaccagtttgtt

SEQ ID NO: 158887 - DNA, 80 bp, synthetic construct
  source 1..80: mol_type = other DNA
gagctgaagttgatggatgggcaggctccctcccattatgccataaacctgaccggacaaaagtttgacaccctctttga

SEQ ID NO: 158888 - DNA, 80 bp, synthetic construct
  source 1..80: mol_type = other DNA
cagcccggtgcagcgcctctaccagaacattttcatgtgctaccgcacgctggagcatgccaagatctgccagctcctga

SEQ ID NO: 158889 - DNA, 80 bp, synthetic construct
  source 1..80: mol_type = other DNA
aaagcaaaacatgggcctccaactcaaagggctggtggtggaaactaccggatgctctcaaggacatgggagtatttggt

SEQ ID NO: 158890 - DNA, 80 bp, synthetic construct
  source 1..80: mol_type = other DNA
agcaaatcaggcaagctaaacgttagccaaaccatgcccataatggctacaggtgagtgctgggaagtgtctaagaatgg

SEQ ID NO: 158891 - DNA, 80 bp, synthetic construct
  source 1..80: mol_type = other DNA
ccagagagggctgggcagatgagtaccacactgcctctgtgtggggcagacccgtccgttcctactacacggacaccccc

SEQ ID NO: 158892 - DNA, 80 bp, synthetic construct
  source 1..80: mol_type = other DNA
cactaatcctcccatatgttaatgctgtgcccatggactctatgcttagacacaataattggagtttagtaataatccca

SEQ ID NO: 158893 - DNA, 80 bp, synthetic construct
  source 1..80: mol_type = other DNA
tcgtattatgtgtgtactatacagcgaacatgacaacatcagtgtagcgtgaagcaagtgtgggaacaatgccagtgaag

SEQ ID NO: 158894 - DNA, 80 bp, synthetic construct
  source 1..80: mol_type = other DNA
gttctaaacacaccagggagcaatcagttcttaacatcggatgattttcaatctccctcggccatgccacaattcgacgt

SEQ ID NO: 158895 - DNA, 80 bp, synthetic construct
  source 1..80: mol_type = other DNA
agtatagagatgatatcacaaatattactaccctaggacccagtgacatgtatgttcacacaaaggaagccatctacaag

SEQ ID NO: 158896 - DNA, 80 bp, synthetic construct
  source 1..80: mol_type = other DNA
atataaatgaaagcacttccgaatggctgagtttatgctgtccgtccgcagcgaggaacgaccacggagggcgatccgcg

SEQ ID NO: 158897 - DNA, 80 bp, synthetic construct
  source 1..80: mol_type = other DNA
tgcccagttaatgacacttgatattgatccaagaaacatgacccttgaagatagtgtgtttggagctgatggtcttgagg

SEQ ID NO: 158898 - DNA, 80 bp, synthetic construct
  source 1..80: mol_type = other DNA
gaattaattcaacaaatttgcaccactcatcatatatttagagaccaaatctacacagtagaaggtggaatgccttcagg

SEQ ID NO: 158899 - DNA, 80 bp, synthetic construct
  source 1..80: mol_type = other DNA
accctaaacaaagtatcctactaatggcagacatgccactgtatataatgctaaatggctacatagactgggcaaaaaaa

SEQ ID NO: 158900 - DNA, 80 bp, synthetic construct
  source 1..80: mol_type = other DNA
ggcttcacatttaacctgttttatcaagattctttattgaccaagcatttccagtgccagaccgtcctccagaccttgag

SEQ ID NO: 158901 - DNA, 80 bp, synthetic construct
  source 1..80: mol_type = other DNA
ctgggtcaaaccagttcctgacatctgacaactttcaatcaccgtgtgcattgcctgagtttgacgtgacgccccccata

SEQ ID NO: 158902 - DNA, 80 bp, synthetic construct
  source 1..80: mol_type = other DNA
agactagaattgttgtcccattgggcactccaacctccatgttcatgttagcgttcgtaagtgcttgccctgatttcagc

SEQ ID NO: 158903 - DNA, 80 bp, synthetic construct
  source 1..80: mol_type = other DNA
catatacaaaccaggacaaagcaaatgcctgttagaaaacatgcccctatggtgcatgtgctttggctacacagactggt

SEQ ID NO: 158904 - DNA, 80 bp, synthetic construct
  source 1..80: mol_type = other DNA
gccgtcggcgtcgcgtcgcaggcccgagcggttgccgtgacgcagtcggccctgcgcggcgcgctccacgtcttcaaagt

SEQ ID NO: 158905 - DNA, 80 bp, synthetic construct
  source 1..80: mol_type = other DNA
cagacatctccacaaatccctcctcaggcacaacaacatatcctaacatgacttcgtacaacacatgggtagctaacttt

SEQ ID NO: 158906 - DNA, 80 bp, synthetic construct
  source 1..80: mol_type = other DNA
ttgtttcccgtccctcagcccggtcctgcgagtccccaccaccggtccagcgcaacccccgttcccaccgccgtcccgcc

SEQ ID NO: 158907 - DNA, 80 bp, synthetic construct
  source 1..80: mol_type = other DNA
ggctaccaaaaaagccagttacccacactacctatagagtgtcttttcaacttaaagccccccaataaagtttcaaggcc

SEQ ID NO: 158908 - DNA, 80 bp, synthetic construct
  source 1..80: mol_type = other DNA
caggtcacacttcccaggtaaaccccagtgacactatgcaaacgcggcacgtgaggaattaccactcacgatctgagtct

SEQ ID NO: 158909 - DNA, 80 bp, synthetic construct
  source 1..80: mol_type = other DNA
acaccattcgatgccacatccacgcagattgaaccgcatgaatgattaccagtttcaatatcataaccgaacgcggaatg

SEQ ID NO: 158910 - DNA, 80 bp, synthetic construct
  source 1..80: mol_type = other DNA
attccgtctgggacggcggctcctacatctatcaatctttcctcaaggatgagttgcgccccacggcaaaagccagagct

SEQ ID NO: 158911 - DNA, 80 bp, synthetic construct
  source 1..80: mol_type = other DNA
atcaccactcaggatgcactcaacacagtggtagcttacggagagtggccacagtatttgagtgacatggatgccagtgc

SEQ ID NO: 158912 - DNA, 80 bp, synthetic construct
  source 1..80: mol_type = other DNA
atgcaagtttagacagagtgggtactcataccacagcacaaaataccaggcctagctcccatcagattggcacaggtgaa

SEQ ID NO: 158913 - DNA, 80 bp, synthetic construct
  source 1..80: mol_type = other DNA
tcgcagttcaaaggtcaccgcgcttccgtgtttacacaaaatggtggccaacttcgtccgggtgaaaggtcagaggctac

SEQ ID NO: 158914 - DNA, 80 bp, synthetic construct
  source 1..80: mol_type = other DNA
gtcccaccacgccgggtccacccggaccacgcgcgggtagtagacggttttggtccaccagcgaggtggtcaggtcctgc

SEQ ID NO: 158915 - DNA, 80 bp, synthetic construct
  source 1..80: mol_type = other DNA
actcaaccagacgttgccacctgtagattctacaccctggaatctgttatgtgggagaagtcttcggcgggctggtggtg

SEQ ID NO: 158916 - DNA, 80 bp, synthetic construct
  source 1..80: mol_type = other DNA
gtggcactcaaaagggattcgaggtgtgggacatagatgtgatgggatttgttcaacttaggaggaaattggaaatgttc

SEQ ID NO: 158917 - DNA, 80 bp, synthetic construct
  source 1..80: mol_type = other DNA
ggacgtggggtgcggtaaactgctcgctgacgtgcggctcgtagtgttgcgtgaggtgctcgagcagcggcggccacacg

SEQ ID NO: 158918 - DNA, 80 bp, synthetic construct
  source 1..80: mol_type = other DNA
attttatatgaacgagcgtcctactggaactcgttccacgccacagagtacgtaaacccaaacattatttacaaaaatgg

SEQ ID NO: 158919 - DNA, 80 bp, synthetic construct
  source 1..80: mol_type = other DNA
agggctcgttgggagtatttgccataccagaattttgcctggctggggatagtgataagcaaagatataccagctacgca

SEQ ID NO: 158920 - DNA, 80 bp, synthetic construct
  source 1..80: mol_type = other DNA
ctgaaggaccaggttccatgaatctagcaaatgtgctcagcacgactggtgcccagtcgttggccctagttggagaaaga

SEQ ID NO: 158921 - DNA, 80 bp, synthetic construct
  source 1..80: mol_type = other DNA
gctcgaagaagactcgtcttcagaagaagaaaaatacccatcctccaaagaagaaaccccgcagacgaagatacagcgac

SEQ ID NO: 158922 - DNA, 80 bp, synthetic construct
  source 1..80: mol_type = other DNA
ctgagtatacaatactagcaactgcttcccagcctaacacagcccagtatgccagcaacttaacagtacaagcaatgtat

SEQ ID NO: 158923 - DNA, 80 bp, synthetic construct
  source 1..80: mol_type = other DNA
tttaaacgcttctaaggttgtttacattgggggaggggagataaaaaccatattctgtggtcttcggtacctttgtacgc

SEQ ID NO: 158924 - DNA, 80 bp, synthetic construct
  source 1..80: mol_type = other DNA
caaccagattactacaatattcaacacatgcctcaaggatgaacttagaaaattggaaaaaattgccgctggcaaaacta

SEQ ID NO: 158925 - DNA, 80 bp, synthetic construct
  source 1..80: mol_type = other DNA
aataatgaaaggccccttcgggggaggacacagcactatgaggttcagcctctacattttgtttgaggagcgcctcagac

SEQ ID NO: 158926 - DNA, 80 bp, synthetic construct
  source 1..80: mol_type = other DNA
tgctctggatcaccatggcgattccttaaggagaagttttgtaaatggacacaactgacttatatccataaggaatcaga

SEQ ID NO: 158927 - DNA, 80 bp, synthetic construct
  source 1..80: mol_type = other DNA
cagcactggaccaccccctccacaaacgcctacgaatatcacttaggaatgtttagtgcaatatttctagccccagacag

SEQ ID NO: 158928 - DNA, 80 bp, synthetic construct
  source 1..80: mol_type = other DNA
ctggaccctttaaaacatccggtcacgccctttgcaaattatttaaaaggtgaatgctcaactgagaccatcgcaatcat

SEQ ID NO: 158929 - DNA, 80 bp, synthetic construct
  source 1..80: mol_type = other DNA
atgctgctgaaactggagcaacatctaacactagcacagaggaagctatacaaaccagaactgtcatcaatttgcatggt

SEQ ID NO: 158930 - DNA, 80 bp, synthetic construct
  source 1..80: mol_type = other DNA
cgtcatcaggccttccggactacaaaaatggcggattcgtgacgtcacggccgccattttaagtaggtgacgtccaggac

SEQ ID NO: 158931 - DNA, 80 bp, synthetic construct
  source 1..80: mol_type = other DNA
ataagatcgaggactgtaattcaaggcctccccacagtactaacacctggttcagaacaatttctcacaacagatgatag

SEQ ID NO: 158932 - DNA, 80 bp, synthetic construct
  source 1..80: mol_type = other DNA
aaaacaggctttataccattagctgaaagcttcatgaacggagacatgccctggccccaaaactacattccgttaaagtt

SEQ ID NO: 158933 - DNA, 80 bp, synthetic construct
  source 1..80: mol_type = other DNA
atctggcactgtattccagcgaacgttgatgggagagatcttaaattattacacacattggtctgggagtataaaattaa

SEQ ID NO: 158934 - DNA, 80 bp, synthetic construct
  source 1..80: mol_type = other DNA
aagagacgaaagcctaagatagtacttaaacaatggcagccggacactgtaaaacgctgccgcataataggctacattcc

SEQ ID NO: 158935 - DNA, 80 bp, synthetic construct
  source 1..80: mol_type = other DNA
ggaagatcagccgactcagcccgacgtggcgacgtgtaggttttataccttagagtcagttacatgggagaagaactcgg

SEQ ID NO: 158936 - DNA, 80 bp, synthetic construct
  source 1..80: mol_type = other DNA
acatacatgtattatttttgtgtgaaaagggatttcttcgggtggctcatacatatgatagtgatgaagacagggatgac

SEQ ID NO: 158937 - DNA, 80 bp, synthetic construct
  source 1..80: mol_type = other DNA
tttgaaaggggtctcctagagagcttggccgtcgggccttataccccgacttgctgacatcttacaaacctactagagga

SEQ ID NO: 158938 - DNA, 80 bp, synthetic construct
  source 1..80: mol_type = other DNA
tgccccaactcttggtaaattaaggaaatatatgactatgagtaccaagtacaagtggaccagatcaaagattgatattg

SEQ ID NO: 158939 - DNA, 80 bp, synthetic construct
  source 1..80: mol_type = other DNA
taagatgtggttaattaaccattttcctgtctgacaccactgcatgggcaaccgggttccatggcacatttagagataaa

SEQ ID NO: 158940 - DNA, 80 bp, synthetic construct
  source 1..80: mol_type = other DNA
caaatttacaggagatggattcagctaggattacaaaaatgtgtaagaatgtacaatcccactaacattctagacgtaaa

SEQ ID NO: 158941 - DNA, 80 bp, synthetic construct
  source 1..80: mol_type = other DNA
gcaacaacacagcaaggcactagtgcattctatcacttagtaggtatatatggcagcagctggctaaaccaaggtagaat

SEQ ID NO: 158942 - DNA, 80 bp, synthetic construct
  source 1..80: mol_type = other DNA
gagcagctccaacagcagctcaaagagcaacgacagctcagatgcggaatccagtacatgttccagcaattaacaaaaac

SEQ ID NO: 158943 - DNA, 80 bp, synthetic construct
  source 1..80: mol_type = other DNA
cggcgccgccaggtggtcctcggccggcgccccaagtgaggcccgcgcttcccgcgccggagcccgacgccccgggcgct

SEQ ID NO: 158944 - DNA, 80 bp, synthetic construct
  source 1..80: mol_type = other DNA
gctccccagcaggcagaagtatgcaaagcatgcatctcaattagtcagcaaccatagtcccgcccctaactccgcccatc

SEQ ID NO: 158945 - DNA, 80 bp, synthetic construct
  source 1..80: mol_type = other DNA
atagaaccacaaatattagatatagtgttgatcaattggtaacagccatcatcaatgactacaagagtaaaattaagatc

SEQ ID NO: 158946 - DNA, 80 bp, synthetic construct
  source 1..80: mol_type = other DNA
ttgtgaactcaccgtcggctcgcacggaggtttgttcttcggtctacccctcggtttgtctttcgccctacctttcttcg

SEQ ID NO: 158947 - DNA, 80 bp, synthetic construct
  source 1..80: mol_type = other DNA
tactattgcaaaagcaaggacagatactacccaatcaatctcacgcatcatagttggtacataatacaagaatccagtta

SEQ ID NO: 158948 - DNA, 80 bp, synthetic construct
  source 1..80: mol_type = other DNA
aacaccttgttattactctggattggcagttggtatcaacccatataaagattggcactttatgatcaatgcattgaatg

SEQ ID NO: 158949 - DNA, 80 bp, synthetic construct
  source 1..80: mol_type = other DNA
ctgaggtggactccgtagtcccagtgaataacacccccaccgcagtcacaagcatggaagcgtaccgcatacccgtgcaa

SEQ ID NO: 158950 - DNA, 80 bp, synthetic construct
  source 1..80: mol_type = other DNA
acctctcgcccctcgaacacgtcagatatggcactgcccgcttccggctttggcaggaacataccttcccggctatccct

SEQ ID NO: 158951 - DNA, 80 bp, synthetic construct
  source 1..80: mol_type = other DNA
gaaaataatgaaaaacaacccagtgatgacaattggcttaactttgatggaaccttactaggaaatataacaatctttcc

SEQ ID NO: 158952 - DNA, 80 bp, synthetic construct
  source 1..80: mol_type = other DNA
acaccagtgcgggatatgtcacctgctggtaccagaccagtttggtggtaccccctggagctccatcaacatgcggtatc

SEQ ID NO: 158953 - DNA, 80 bp, synthetic construct
  source 1..80: mol_type = other DNA
gacctggaatgcagcagtttgtcgacagctacttcctcaaccccgcctgttccaacgtcttcattacagtgaggcagcga

SEQ ID NO: 158954 - DNA, 80 bp, synthetic construct
  source 1..80: mol_type = other DNA
ggtgccttacaacaagcctcggcgccacccgcaacagaagcaaaaaaacaacccttatcacgtcgaagtgccgcaagaac

SEQ ID NO: 158955 - DNA, 80 bp, synthetic construct
  source 1..80: mol_type = other DNA
atgaaaaatgcacacactatcaaacatttgccacagacaccagactaaaccctcagcgacccgtgtcatctacaaatact

SEQ ID NO: 158956 - DNA, 80 bp, synthetic construct
  source 1..80: mol_type = other DNA
aaagtgtgcccgctttgacggcagtagagactggtcacacctcacaggtggttcccggcgacacgatgcaaacgaggcat

SEQ ID NO: 158957 - DNA, 80 bp, synthetic construct
  source 1..80: mol_type = other DNA
caaccaggattggacagcgtattcaaacatacgctgttgggggagatattaaattactatgcccactggtcaggcagtgt

SEQ ID NO: 158958 - DNA, 80 bp, synthetic construct
  source 1..80: mol_type = other DNA
ggcatcaccaattacatggaatcattgggagcagcatttgggtgtggatttaccaatcagataagtgaaaaggtcacaga

SEQ ID NO: 158959 - DNA, 80 bp, synthetic construct
  source 1..80: mol_type = other DNA
cagtggttggaaaggaataaagagcatgtgtgtgctatcttggactatgcttccgatattattgtggaatcaaaagatca

SEQ ID NO: 158960 - DNA, 80 bp, synthetic construct
  source 1..80: mol_type = other DNA
gtagacgaaagacttttagacgaaggagacgttttaggagacgcagacgaaagcaaaagataattataaaacaatggcaa

SEQ ID NO: 158961 - DNA, 80 bp, synthetic construct
  source 1..80: mol_type = other DNA
gtgaatagcattacaacatatgggtttggacaccagagtcgagcagtttatgttgctggttacaaaataatcaattacca

SEQ ID NO: 158962 - DNA, 80 bp, synthetic construct
  source 1..80: mol_type = other DNA
tcatgtctattcactatgtctcttaatgtggcataatggagaaaagccttacagagaatttatagacaggatcaggagga

SEQ ID NO: 158963 - DNA, 80 bp, synthetic construct
  source 1..80: mol_type = other DNA
ttgataaaccaactcgccctgacacatcatctaatagattttataccttggagagcaaaatttggatgaatgactcaaaa

SEQ ID NO: 158964 - DNA, 80 bp, synthetic construct
  source 1..80: mol_type = other DNA
catccaagtgtgtttttccacgtgttccctggagagaaagaacctgccgccctcacccaaaaagaccccagactagagac

SEQ ID NO: 158965 - DNA, 80 bp, synthetic construct
  source 1..80: mol_type = other DNA
gagtccggcgctacgccttcggctgcgccggacacctcggaccccccctccacccgaaacgcttgcgcgtttcggacctt

SEQ ID NO: 158966 - DNA, 80 bp, synthetic construct
  source 1..80: mol_type = other DNA
gggcctccccagtttaaagaaattaagatctcagtagcacctgaaactcctgctccagatgccattaatgaccttctcag

SEQ ID NO: 158967 - DNA, 80 bp, synthetic construct
  source 1..80: mol_type = other DNA
cactatcaaacatttcaaacagagcaaatgtttagaccaaaacaatacaatgcagatggcacacagtggaaccaatacca

SEQ ID NO: 158968 - DNA, 80 bp, synthetic construct
  source 1..80: mol_type = other DNA
gggaagattacaacagagacctgttggtcactagtgtaggagcacaaggttgtgacaccattgcgcgttgctcatgcaag

SEQ ID NO: 158969 - DNA, 80 bp, synthetic construct
  source 1..80: mol_type = other DNA
ggagctccgggcctcgtgccagggcctgttgtcctgggggaggatattggacacgagcaggaagctcttgagtggcgtct

SEQ ID NO: 158970 - DNA, 80 bp, synthetic construct
  source 1..80: mol_type = other DNA
tacagagctcaaagatttaaatggctcactacctacagtggaaataaccacattaacagcacattcgccaaaggcaaata

SEQ ID NO: 158971 - DNA, 80 bp, synthetic construct
  source 1..80: mol_type = other DNA
gcgccacactcacagcaaaatacaaatttcgctttctgtttggcggcaaccccgctaccgaacaggttgttagagacccc

SEQ ID NO: 158972 - DNA, 80 bp, synthetic construct
  source 1..80: mol_type = other DNA
ccaacacactccacccagcacaccctcaaacaccctccgtagagcccgggccctgcccgcggctccggagccagctccat

SEQ ID NO: 158973 - DNA, 80 bp, synthetic construct
  source 1..80: mol_type = other DNA
aaaaacatggataacagacacatttaacacaggaaacaacagcacattcggatttaattcatacaaaccagacaacacac

SEQ ID NO: 158974 - DNA, 80 bp, synthetic construct
  source 1..80: mol_type = other DNA
caacacactcttttccaccactctattaggtgaggtactaaattacttcaccaactggtcaggcagtatcactctaacat

SEQ ID NO: 158975 - DNA, 80 bp, synthetic construct
  source 1..80: mol_type = other DNA
ggtacggccgccgaaggcgccgctggccatggagatggcgcagacgccgccgcagactatggagaagaagacctagagct

SEQ ID NO: 158976 - DNA, 80 bp, synthetic construct
  source 1..80: mol_type = other DNA
aacccggtttggactcagtattcaagagaacgttactaggggaagtgctcaattattatgcacactggtcgggaagcatc

SEQ ID NO: 158977 - DNA, 80 bp, synthetic construct
  source 1..80: mol_type = other DNA
ataccaggcttggtaactaacattatgcatatagctagagtagattcattcattcccttaaataatgttggagaccaagt

SEQ ID NO: 158978 - DNA, 80 bp, synthetic construct
  source 1..80: mol_type = other DNA
atccgcgtgtactttaagcccaagcacatcagagtctgggtgccgcgaccaccgcgcttgtgtccttatattaagtctag

SEQ ID NO: 158979 - DNA, 80 bp, synthetic construct
  source 1..80: mol_type = other DNA
cttataacaactgctgtcaccactgaacgaaaagacattaatgatgtgggtgcaatacaccctgcggggtacaccaccca

SEQ ID NO: 158980 - DNA, 80 bp, synthetic construct
  source 1..80: mol_type = other DNA
ggacatcggactacagtccagctgcagcatggtggctccatggatttccaacaccgtgtacaggaggtgcaccaaagatg

SEQ ID NO: 158981 - DNA, 80 bp, synthetic construct
  source 1..80: mol_type = other DNA
tactgtaaagagatgcagaatagtgggtttcatgcctgcagtaatatgtggacaaggctcctacaacagaaactttacca

SEQ ID NO: 158982 - DNA, 80 bp, synthetic construct
  source 1..80: mol_type = other DNA
acaccccggcatgctcatgcgcgccaagtacaaggtgctcatccctagcaggaaaacgagacccagggggcgcaagtaca

SEQ ID NO: 158983 - DNA, 80 bp, synthetic construct
  source 1..80: mol_type = other DNA
ttttggagcaatcgcccttagagtggttaatgagcataacccagcgcgaattacatcacgcatgaggatatatatgaaac

SEQ ID NO: 158984 - DNA, 80 bp, synthetic construct
  source 1..80: mol_type = other DNA
aagtaattatagtccaaaaatagtaggaggaataggaggatttattaataccaaagaatacaaaaatgtagaaattaaag

SEQ ID NO: 158985 - DNA, 80 bp, synthetic construct
  source 1..80: mol_type = other DNA
tggcaatatcttgctcagtggcaatcagacggcaaggatgcttaaatacaattatcctacaaaatcagggtactgtggtg

SEQ ID NO: 158986 - DNA, 80 bp, synthetic construct
  source 1..80: mol_type = other DNA
caaacctaggcagagcattcggagttggtttcactgaccagatatcagcaaaagtaacagaactacaagatgtagcaaag

SEQ ID NO: 158987 - DNA, 80 bp, synthetic construct
  source 1..80: mol_type = other DNA
cagtttagaccatggcggggacggattctggttcgccgttagcgtcgaccacgaagacgccagacagggcgttgcccaaa

SEQ ID NO: 158988 - DNA, 80 bp, synthetic construct
  source 1..80: mol_type = other DNA
gggcgctgcgcgcccccccccgcgcatgcgcggggaccccccccccccgttctatatccaccgcgcatgctcggccacgc

SEQ ID NO: 158989 - DNA, 80 bp, synthetic construct
  source 1..80: mol_type = other DNA
actcacagatccattcaaggcaatcaaattgtggttctgtgtcaaattaggcctcaacgtcagcacggaggataccaccg

SEQ ID NO: 158990 - DNA, 80 bp, synthetic construct
  source 1..80: mol_type = other DNA
tctttggagacgaccagtagtcactgcacacatagagggtcagccggtagaagtattattagacacaggggctgacgatt

SEQ ID NO: 158991 - DNA, 80 bp, synthetic construct
  source 1..80: mol_type = other DNA
attctcccccgtgaagaccaccctgttcttgatcttgatgttcctggggcacagcatcagcaccttggacatgcgcacag

SEQ ID NO: 158992 - DNA, 80 bp, synthetic construct
  source 1..80: mol_type = other DNA
agacgccttcccgcgctcccgggtcccagagaccctcctagcgacaccagcaaccgcagatcatggcctactggggatgg

SEQ ID NO: 158993 - DNA, 80 bp, synthetic construct
  source 1..80: mol_type = other DNA
attcaggcacattgattggtggattcacacgctcctaaagatcaaggatatggtgctcagtgtgttcaaaccaagtattg

SEQ ID NO: 158994 - DNA, 80 bp, synthetic construct
  source 1..80: mol_type = other DNA
tagacctagccaggtatattaacacaaaactaaaactatacagacatgacacagtagactacatagtcacctacaacaga

SEQ ID NO: 158995 - DNA, 80 bp, synthetic construct
  source 1..80: mol_type = other DNA
gccgctgtggctgccgctactgatcgcctggagcgagtggggcaactgctgcctcgatgcgcctccggtggtgcgttcgc

SEQ ID NO: 158996 - DNA, 80 bp, synthetic construct
  source 1..80: mol_type = other DNA
cccgaaacatagaagaaatgcacacaccgaccaacaggaggtggtcaaccagaccactaaaggtcaagtacttctgtttc

SEQ ID NO: 158997 - DNA, 80 bp, synthetic construct
  source 1..80: mol_type = other DNA
actttgactactgtgacaaagtgttagaacacattaatatagactttgaatacagacttgtaataagaagcccctacaca

SEQ ID NO: 158998 - DNA, 80 bp, synthetic construct
  source 1..80: mol_type = other DNA
acgtacaaacggctgtttgtaatgctgctatgggtgtgggtgttggcaacttaacgatctacccccatcagtggatcaaa

SEQ ID NO: 158999 - DNA, 80 bp, synthetic construct
  source 1..80: mol_type = other DNA
aaatgtagctaaggcactcctcccatgcactgactgccccaagccagagttctacaagcaatgctgtcctctgatttgtg

SEQ ID NO: 159000 - DNA, 80 bp, synthetic construct
  source 1..80: mol_type = other DNA
tgcagggaccgagcttggactttgctttgtccttacttagaaggaacatcagacaggtccagactgatcggggccatttt

SEQ ID NO: 159001 - DNA, 80 bp, synthetic construct
  source 1..80: mol_type = other DNA
cataagaaggcgcaggcgaagcttccgtagaaaaaaaattaaaataactcagtggaaccccgctgttactaaaaaatgta

SEQ ID NO: 159002 - DNA, 80 bp, synthetic construct
  source 1..80: mol_type = other DNA
tggatggtagattagtgaaagtgttgaaacaacagattttaacagatatggatgatgtggacactgaaattactttaatt

SEQ ID NO: 159003 - DNA, 80 bp, synthetic construct
  source 1..80: mol_type = other DNA
gcatatggtgtttggccacactatctatcctctaaagatgcttctgcaattgataagccatcccgcccagacacatcttc

SEQ ID NO: 159004 - DNA, 80 bp, synthetic construct
  source 1..80: mol_type = other DNA
agaaagaagactcaaaagatgaaagagcatacaacccgacccttcctatgacaaaaccaaagggtgcattcccagtgtca

SEQ ID NO: 159005 - DNA, 80 bp, synthetic construct
  source 1..80: mol_type = other DNA
caatataatacccgttataaatcaattgagctgtgacacaattgggctcagtgtaggtataagactcactcagtactact

SEQ ID NO: 159006 - DNA, 80 bp, synthetic construct
  source 1..80: mol_type = other DNA
gcccggccagtcccgagcccgaattgccccttgactgcggtgagtttacacaccgcagtcaaggggcaattcgggctcgg

SEQ ID NO: 159007 - DNA, 80 bp, synthetic construct
  source 1..80: mol_type = other DNA
aaaacaaagacacattaaataaaataagacagcaatactttgaatggctaactacacaggcaccaacagcaacacaaagt

SEQ ID NO: 159008 - DNA, 80 bp, synthetic construct
  source 1..80: mol_type = other DNA
ccccctatatctgtcgcgcgctcaaagacaaacgcaccacgcttattttttgacacaacaccgtgtaagcaaaacgtgac

SEQ ID NO: 159009 - DNA, 80 bp, synthetic construct
  source 1..80: mol_type = other DNA
ccgcccgttcacaatggcaccggaatcgaacacctgtggtttgagtctactgtgcgcgggcattctgctgcttgtggttg

SEQ ID NO: 159010 - DNA, 80 bp, synthetic construct
  source 1..80: mol_type = other DNA
ctacatattttatgacagcatgtttggagatggcaaaatgccctccggcacaggcctagtccccttctactaccaaacaa

SEQ ID NO: 159011 - DNA, 80 bp, synthetic construct
  source 1..80: mol_type = other DNA
ctgcaacctttagaagacacgtactttcagaccaataggtggcggccatccaggtcgtcgacggtcaagcacttctgtct

SEQ ID NO: 159012 - DNA, 80 bp, synthetic construct
  source 1..80: mol_type = other DNA
gtagttccacccggcacacccaataagtgtgtggtgctgtgttttgtatcggcttgcaacgacttttctgtacgcatgct

SEQ ID NO: 159013 - DNA, 80 bp, synthetic construct
  source 1..80: mol_type = other DNA
tttaccatggcatggggatactggtggagaaggcgcttctgcgaccgaggagacgctggaagaaggtggcggcgccgccg

SEQ ID NO: 159014 - DNA, 80 bp, synthetic construct
  source 1..80: mol_type = other DNA
agaccggtgcacgatgccagggggatcgaacgcaactggtacgagtgcaccttcagatctcacgctgcttgttgcgggtg

SEQ ID NO: 159015 - DNA, 80 bp, synthetic construct
  source 1..80: mol_type = other DNA
attgaacacattaaaatgggagcgcaggtttcaacccagaagaccggtgcgcacgagactctccttgaggcggctcaggg

SEQ ID NO: 159016 - DNA, 80 bp, synthetic construct
  source 1..80: mol_type = other DNA
atgtgtggtggactcctgatctctaaggttgaaggcaactttaagattttaggcatgcacatagctggtaatggcgaaat

SEQ ID NO: 159017 - DNA, 80 bp, synthetic construct
  source 1..80: mol_type = other DNA
tatgttaggtacacacatagtctgggatattggtctgcaatccacggttgtaatgaatataccttggacagcaggcgcac

SEQ ID NO: 159018 - DNA, 80 bp, synthetic construct
  source 1..80: mol_type = other DNA
gacggcaactactggaacagcttccatgtaatggaagtgttttcttccaacctggctggtgtcgatggaaaagataccat

SEQ ID NO: 159019 - DNA, 80 bp, synthetic construct
  source 1..80: mol_type = other DNA
ggccaccacgggcgcacggggtggggaggcgggtggcggagagccgaatctccgcggcttcttctcggcccgcctgctgt

SEQ ID NO: 159020 - DNA, 80 bp, synthetic construct
  source 1..80: mol_type = other DNA
ggtttgcaatcatcctgtcacctcgttattccatggatcagttcccactactatagaaggacaaagaaagacagctacac

SEQ ID NO: 159021 - DNA, 80 bp, synthetic construct
  source 1..80: mol_type = other DNA
acccacagccgtcgcggcgggggcggcggcgggcgtagaggtgccgctggtgcgccggtctcgtctgtccacggcctcgt

SEQ ID NO: 159022 - DNA, 80 bp, synthetic construct
  source 1..80: mol_type = other DNA
ttaagtacaccaagaccattttatcaaaccaagggcccttcaagggctttaatgaagtctctactgctttcaggcacatt

SEQ ID NO: 159023 - DNA, 80 bp, synthetic construct
  source 1..80: mol_type = other DNA
ctccacctcggacccgaagccatcaccaggtgggggttgttggtcccgcccatcatcccccgagcagctttggcagacca

SEQ ID NO: 159024 - DNA, 80 bp, synthetic construct
  source 1..80: mol_type = other DNA
acacctcttcggagacgtcctccgactcagaaaaggagtccactccaacccagacctattataataccagcagaggaaat

SEQ ID NO: 159025 - DNA, 80 bp, synthetic construct
  source 1..80: mol_type = other DNA
ggctggtctttacaggtgcaaaaactcctcacatcgtcagaagagacagaagcgaaagcccagacggaggagcagcagca

SEQ ID NO: 159026 - DNA, 80 bp, synthetic construct
  source 1..80: mol_type = other DNA
ccataccctagatttactatcccattcatgagtatagcctcagcatattacatgttttatgatggttatgaaagtgataa

SEQ ID NO: 159027 - DNA, 80 bp, synthetic construct
  source 1..80: mol_type = other DNA
atgtgtgttcgggatagatggacttgaagccctcgatttgcacaccagtgcaggctacccctacactactatgggaatca

SEQ ID NO: 159028 - DNA, 80 bp, synthetic construct
  source 1..80: mol_type = other DNA
ctcttcatccaggagggggccatggctgccattctaccagttaacgaggagagagagagtaggtccgcggaaattggtgc

SEQ ID NO: 159029 - DNA, 80 bp, synthetic construct
  source 1..80: mol_type = other DNA
acactgacaaacagctttgttgcatgggatataaatttccaggagcacgctcaggtcagaaagaagtttgaaatgtttac

SEQ ID NO: 159030 - DNA, 80 bp, synthetic construct
  source 1..80: mol_type = other DNA
tgtgaatcagtaacgaaagtgagtggggccagactttgccataaggcctttatcttcttgccatttgtccgtgtacggag

SEQ ID NO: 159031 - DNA, 80 bp, synthetic construct
  source 1..80: mol_type = other DNA
acagagtgtggttattatggatgatgtaatgcagaacccaagtggggaggacatgaccttattttgccaaatggtatcaa

SEQ ID NO: 159032 - DNA, 80 bp, synthetic construct
  source 1..80: mol_type = other DNA
tcaagagtgtaacataaaacctgtaaacactccctctaaaactaaattactacccagtgtgttttatgatgttttccctg

SEQ ID NO: 159033 - DNA, 80 bp, synthetic construct
  source 1..80: mol_type = other DNA
caggagggatataactccaggtccagggaaagcgaccagatatcccaagtaaaaagaaaaggaagggaaccgagggaccc

SEQ ID NO: 159034 - DNA, 80 bp, synthetic construct
  source 1..80: mol_type = other DNA
cacctcaatggtagtgacaatccctgcaattattccagcttttggtaccacggtaactgcgaactttgtgggtggaacag

SEQ ID NO: 159035 - DNA, 80 bp, synthetic construct
  source 1..80: mol_type = other DNA
caacatcacaaaacatgtggaacgaagtgcaaaacacaactgcactgtcacaaaatggttcaaatgcacctcaaagcaaa

SEQ ID NO: 159036 - DNA, 80 bp, synthetic construct
  source 1..80: mol_type = other DNA
ttcgatgttattgtgggaagcagtggaggtcttggcttactgtcacgattcacctgatcttgtcatgcaattacataaac

SEQ ID NO: 159037 - DNA, 80 bp, synthetic construct
  source 1..80: mol_type = other DNA
tagtaattacacttctggtgggtatattactctatggtatcagacaaactttgtgcccacaacaactgccggtactggaa

SEQ ID NO: 159038 - DNA, 80 bp, synthetic construct
  source 1..80: mol_type = other DNA
ccaccgacattggaaagtgtctgaatttgcctgagtacagtgtcctcagaaagcgctggctggatatgttttaaatcaat

SEQ ID NO: 159039 - DNA, 80 bp, synthetic construct
  source 1..80: mol_type = other DNA
gaaaaacagattgatggcttaagactggccccccaaaagcaacagcaagaatatatagacaccctgagaataatgttaga

SEQ ID NO: 159040 - DNA, 80 bp, synthetic construct
  source 1..80: mol_type = other DNA
atatttccaacatcaggcccaacctaccctccaactgataaaccagacgatgataccacagatgatgacaaagtggacac

SEQ ID NO: 159041 - DNA, 80 bp, synthetic construct
  source 1..80: mol_type = other DNA
tgatacacccaggcatgctaatgcagcagaaaaaaaaaatattagtacctagctaccaaaccagacctaaaggcaaagac

SEQ ID NO: 159042 - DNA, 80 bp, synthetic construct
  source 1..80: mol_type = other DNA
tattagggtgtcagagttccccatggaacttccttaaaaataagatatgccaatggctagacatacccaaacccccttcc

SEQ ID NO: 159043 - DNA, 80 bp, synthetic construct
  source 1..80: mol_type = other DNA
cgccagaaactgacagttgcgcaatccgaactcgagcatgtcggcgcgcagcgcttcccagcgcgcgctggcgatagaga

SEQ ID NO: 159044 - DNA, 80 bp, synthetic construct
  source 1..80: mol_type = other DNA
gacacaagacttacgcctgtaacatcaaacggtgaacaatactataaggattttttaaatgctgcttttaaaaaagacag

SEQ ID NO: 159045 - DNA, 80 bp, synthetic construct
  source 1..80: mol_type = other DNA
caaacaggcaagagttgcaacaagatcccggtaagttcactgaccctgtgaaagatttgatggtgaaaaccctacctgcc

SEQ ID NO: 159046 - DNA, 80 bp, synthetic construct
  source 1..80: mol_type = other DNA
acagctcgcaacagcggatcagccagcggtagctcaaaaacatgcgcaccagtttgaaggtgtcgtgccaatggtaagct

SEQ ID NO: 159047 - DNA, 80 bp, synthetic construct
  source 1..80: mol_type = other DNA
atgatcctagattaaaagtggatttcaaagaagctctattttcaaaatacaaaggcaataatcagtgtagtatgaatgat

SEQ ID NO: 159048 - DNA, 80 bp, synthetic construct
  source 1..80: mol_type = other DNA
gcaatgggtacatacccatagactttagatttaactggtacccttgcatatttcaccaaacaaactggataaatgacatg

SEQ ID NO: 159049 - DNA, 80 bp, synthetic construct
  source 1..80: mol_type = other DNA
caggtacttgacacaatatactattccgtaataggttacggttcctcagatgaaaaaaaaaaagaagtacttgaaactct

SEQ ID NO: 159050 - DNA, 80 bp, synthetic construct
  source 1..80: mol_type = other DNA
caagaagccctccaagaagtccaagaggcgtcgttacagcagcacctcctccagcagtaccgagagcagcgaagaatcgg

SEQ ID NO: 159051 - DNA, 80 bp, synthetic construct
  source 1..80: mol_type = other DNA
agtgcaacacaagtttttggattcaagttgcaaccaggggatgatagtgtattcaagaggacactattaggagaaatctt

SEQ ID NO: 159052 - DNA, 80 bp, synthetic construct
  source 1..80: mol_type = other DNA
tagagagaaaggattaccacaaattaacacacccaacaaaacaaaattacaacccagtgtattttatgatgtttttccag

SEQ ID NO: 159053 - DNA, 80 bp, synthetic construct
  source 1..80: mol_type = other DNA
tggagacggaggagagcgcgccgcccgagacgagtaccgcgaggacgatatcgaagacctgctcgccgctatcgagcaag

SEQ ID NO: 159054 - DNA, 80 bp, synthetic construct
  source 1..80: mol_type = other DNA
ttatgctaaacggatacatagactgggccaaaaaagaactaaacaactggcaactgcaaaccatgtacagagtaatgata

SEQ ID NO: 159055 - DNA, 80 bp, synthetic construct
  source 1..80: mol_type = other DNA
tgcccataacagtgacagtcgctccaatgtgtgctgagtataatggtttgaggctctcaacctcattgcaaggattacct

SEQ ID NO: 159056 - DNA, 80 bp, synthetic construct
  source 1..80: mol_type = other DNA
caggggaagtacactccttattagaactatgtagggtagagactattttggaggtgaacaacaccacagaagcaactggg

SEQ ID NO: 159057 - DNA, 80 bp, synthetic construct
  source 1..80: mol_type = other DNA
tgtgaaggagcctgctgcactctctaactttgaccctagactagaagttaatcttaaggaaagtgttttatctaaataca

SEQ ID NO: 159058 - DNA, 80 bp, synthetic construct
  source 1..80: mol_type = other DNA
aaatgtgttataatatgaagtctgccacagtgactgtgggtaatgccaaaaatatcacaatcaggaggtattaaagttta

SEQ ID NO: 159059 - DNA, 80 bp, synthetic construct
  source 1..80: mol_type = other DNA
tgaataaaaataaaaggaaaccagggtcccccctggatttggtaaccgtgcttatactagttgtaaggcccacgaaggat

SEQ ID NO: 159060 - DNA, 80 bp, synthetic construct
  source 1..80: mol_type = other DNA
tagatagattctacaagagtctgagagcagaacaaactgatccagcagtaaaaaattggatgacacagacactactgatt

SEQ ID NO: 159061 - DNA, 80 bp, synthetic construct
  source 1..80: mol_type = other DNA
gcaaagccaacaccatggaaatgtatagaatccctctgaacaccaccggtggtacagacccaatcttttgcttgagcctt

SEQ ID NO: 159062 - DNA, 80 bp, synthetic construct
  source 1..80: mol_type = other DNA
ctattaacagccaaaagaacagaacccgtgggtgtcctattccatggagagccaggaactggcaaatctattgcaacctc

SEQ ID NO: 159063 - DNA, 80 bp, synthetic construct
  source 1..80: mol_type = other DNA
taacacctggaagaatatcaccagaaacacctggactttacacagacgtgacttacaacccatacgcagacaaagcaata

SEQ ID NO: 159064 - DNA, 80 bp, synthetic construct
  source 1..80: mol_type = other DNA
ctgccaacttcttaacatcaccatccataaggcactcatggtgtcttatggatggtgatgttaagaagttggcagaggtt

SEQ ID NO: 159065 - DNA, 80 bp, synthetic construct
  source 1..80: mol_type = other DNA
tctgtggttgacctgtggttgtaccagaacgatacggtgatccgcaatttcagcgacatcaccaccaacatcttgcaaga

SEQ ID NO: 159066 - DNA, 80 bp, synthetic construct
  source 1..80: mol_type = other DNA
atttccaggaacacgcacatgttaggaaaaagtttgagatgttcacttacctcagatttgacatggaagtaaccattgtc

SEQ ID NO: 159067 - DNA, 80 bp, synthetic construct
  source 1..80: mol_type = other DNA
ttaaacctagtgccacagaacctgaatttacgcccacttggcaaaactgtcaaaattcaattaaacttaaccactcaggc

SEQ ID NO: 159068 - DNA, 80 bp, synthetic construct
  source 1..80: mol_type = other DNA
gaatttccacaatcatacaaaggaaacaaggccttctgtcacctgacaggcatatacagcccaccataccttaaccaagg

SEQ ID NO: 159069 - DNA, 80 bp, synthetic construct
  source 1..80: mol_type = other DNA
cggcgctttttgggcgcgctggggaccgggctgcgggacggtggtttttgtacgtgctggccgccggcgaggacggcgtg

SEQ ID NO: 159070 - DNA, 80 bp, synthetic construct
  source 1..80: mol_type = other DNA
tcctcatgtgtagaccaatgatgactcatggcgcactgttcttaatggtttgtttgagcaaatggccactctcagtaccc

SEQ ID NO: 159071 - DNA, 80 bp, synthetic construct
  source 1..80: mol_type = other DNA
ttcagcacaattgaagaagcagtattttgtgcaaaaacaaggtgaaattattcaaagaaagaatgttagagaactaaaca

SEQ ID NO: 159072 - DNA, 80 bp, synthetic construct
  source 1..80: mol_type = other DNA
ccccgtccgcgcacaaggctccgtgcaaacacccgcagaaagatgtgtgagtgcggcgcagcgtcccgcgcagaagctcc

SEQ ID NO: 159073 - DNA, 80 bp, synthetic construct
  source 1..80: mol_type = other DNA
tacattgacggtaaaaaggaaaactactatctaactgtattatggggaaccacaacatcgtctcctatacctgacaaatg

SEQ ID NO: 159074 - DNA, 80 bp, synthetic construct
  source 1..80: mol_type = other DNA
tcagaagattcatcccagaacatcaacaggagtggtcacatatgcatttggccaccaatgtcacaaaattcccaatgctg

SEQ ID NO: 159075 - DNA, 80 bp, synthetic construct
  source 1..80: mol_type = other DNA
cagtcccacctgaccccccagtttgtcaggatgcccaccaaaaatcctgacaatactgtcaactcaaaagctactgcctt

SEQ ID NO: 159076 - DNA, 80 bp, synthetic construct
  source 1..80: mol_type = other DNA
ggttcgtcctcgggaccctacatgttagacagggtgtgaagacactagtgtgctagtcatgagtcctccggcccctgaat

SEQ ID NO: 159077 - DNA, 80 bp, synthetic construct
  source 1..80: mol_type = other DNA
tgtacaatcctactaatatactagatgtaaaacaagggccaaaagaacccttccaaagctatgtggatagattctacaag

SEQ ID NO: 159078 - DNA, 80 bp, synthetic construct
  source 1..80: mol_type = other DNA
agcgaggcctcaaactcctcctcggagacgttctccgactccgcagaggagtccactgggaccccctcctgtcataattc

SEQ ID NO: 159079 - DNA, 80 bp, synthetic construct
  source 1..80: mol_type = other DNA
ggacttggagatgatgaaacacctggtttcataatagacctactatcatcatccaaggatccaagagttatccaatactg

SEQ ID NO: 159080 - DNA, 80 bp, synthetic construct
  source 1..80: mol_type = other DNA
acaaaataatcaattaccacttggccactgcagctgattaccagaattgtgtgagaagtctctgggaaagggatttaatg

SEQ ID NO: 159081 - DNA, 80 bp, synthetic construct
  source 1..80: mol_type = other DNA
caatcaattcctaacaacggacaactttcaatcaccgtgcatagttcccaattatgatgttaccgcaccaatacacatac

SEQ ID NO: 159082 - DNA, 80 bp, synthetic construct
  source 1..80: mol_type = other DNA
tagttttcatactggcaacaacagtacctttggctgctgcacatataaacctactaaagacataggtaagaaagctaatt

SEQ ID NO: 159083 - DNA, 80 bp, synthetic construct
  source 1..80: mol_type = other DNA
tttctagctaggatgataacaaatgatagtgacatatactcattacctcctgaccccaaatattttgatggttatgacca

SEQ ID NO: 159084 - DNA, 80 bp, synthetic construct
  source 1..80: mol_type = other DNA
gcgcacttgaaatcggagcgtcttccacggctacgccagaaacaaccatagagactaggtatgtgatcaacaaccatgtg

SEQ ID NO: 159085 - DNA, 80 bp, synthetic construct
  source 1..80: mol_type = other DNA
tcaggtagccaaaagcaaacttatgctcccagtggcaatttagaacccatagtctggggacaagaagactggcaaagatt

SEQ ID NO: 159086 - DNA, 80 bp, synthetic construct
  source 1..80: mol_type = other DNA
cgcatatctccagagatatttggcctatataaagagatactttacaatccatacacagacaaaggcaaaggcaacatgct

SEQ ID NO: 159087 - DNA, 80 bp, synthetic construct
  source 1..80: mol_type = other DNA
agcatggaagacatggccgcccgcctggctcgcctggagtctgagaataaggctctgaagcaacaggtcctcagggggtg

SEQ ID NO: 159088 - DNA, 80 bp, synthetic construct
  source 1..80: mol_type = other DNA
tgggctacagagactatgttactaaggctctccacgaccccggactcagtaaagaggtcagagtaactattatatgccca

SEQ ID NO: 159089 - DNA, 80 bp, synthetic construct
  source 1..80: mol_type = other DNA
ttgtaaggcaaaagagtcatatcaggttcactaaaaatccatttttctttaggaggcaaagcgattcttgtttttccatc

SEQ ID NO: 159090 - DNA, 80 bp, synthetic construct
  source 1..80: mol_type = other DNA
tgtgtttcgtatcagcgtgcaaagatttctgtctgcgcatggccagagacacagatatgcacatacagaatgatgccatt

SEQ ID NO: 159091 - DNA, 80 bp, synthetic construct
  source 1..80: mol_type = other DNA
acatcaccaataaccccagaggatgtgattgagactcgatatgtgatcaacaatcatgtaaacagtgaagctctaattga

SEQ ID NO: 159092 - DNA, 80 bp, synthetic construct
  source 1..80: mol_type = other DNA
ttgagaaaatttcaatgtgctgaagaacaaggaatatctgactacgtagaacacctcggtcaggttttcggtgttggttt

SEQ ID NO: 159093 - DNA, 80 bp, synthetic construct
  source 1..80: mol_type = other DNA
caccaacgctgggtttgtaacatgttggtaccaaaccagtgtggtgtctcccgcaagtaaccaaccgaaatgttacatga

SEQ ID NO: 159094 - DNA, 80 bp, synthetic construct
  source 1..80: mol_type = other DNA
gccgacgcgcttacttatgtcacgcaacactccctcagccctgtccagtgtcggactggcggaacgacaagtgctgtgga

SEQ ID NO: 159095 - DNA, 80 bp, synthetic construct
  source 1..80: mol_type = other DNA
attggacatacgtcgcaggtggtcccaagtgacaccatacagaccagaaacgtccataactatcatagcagaactgagtc

SEQ ID NO: 159096 - DNA, 80 bp, synthetic construct
  source 1..80: mol_type = other DNA
catttgtgacctttcatgatttgtttaaacaaattttcttactctttctgaggtttgtttatttcttttgtccgctaact

SEQ ID NO: 159097 - DNA, 80 bp, synthetic construct
  source 1..80: mol_type = other DNA
ggcatgtgaacaagttgtgtcccaaccagatagtgagcaccgcacgagtgtacttgaaaccaaaacatgttaaagcatgg

SEQ ID NO: 159098 - DNA, 80 bp, synthetic construct
  source 1..80: mol_type = other DNA
acacaacaattggagtttgttaattattcctgtgagttctctaaaaagtgatcaggcaaccattagagtaccaataacaa

SEQ ID NO: 159099 - DNA, 80 bp, synthetic construct
  source 1..80: mol_type = other DNA
atcaggctggcacaaatttagaaatcaccataattagattacagcgcaatgaaaagtttagggacattagaccgcacatc

SEQ ID NO: 159100 - DNA, 80 bp, synthetic construct
  source 1..80: mol_type = other DNA
aaaggaccctcgattaactactgatttcaataaagctctattttctaagtataagggcaacatagaatgtagcatgactg

SEQ ID NO: 159101 - DNA, 80 bp, synthetic construct
  source 1..80: mol_type = other DNA
tggtgtttgcacgccgaacagaaagtaaaacatactgaagaagcaaaacaagtagtgcagagacatctagtggtagaaac

SEQ ID NO: 159102 - DNA, 80 bp, synthetic construct
  source 1..80: mol_type = other DNA
actggctcatccaacaacagaatattggctatacctttggacatgagtaatacgctgttctccaccacgctgatgggtga

SEQ ID NO: 159103 - DNA, 80 bp, synthetic construct
  source 1..80: mol_type = other DNA
cgcgatacgcgtcatgggaaatcacaacccgtgagatggttcagcttcggaggaaatgcgagctgtttacctacatgcgg

SEQ ID NO: 159104 - DNA, 80 bp, synthetic construct
  source 1..80: mol_type = other DNA
acatctttattctctaaatacaaaggtaatgtagaatgtgaattgaacgaccatatgaaagtagctatagcacattattc

SEQ ID NO: 159105 - DNA, 80 bp, synthetic construct
  source 1..80: mol_type = other DNA
aaagcactccgagcgccagcgaggagtgcgaccctcccccctggaacaagttcctcagagccgcgcgctacgccttcggc

SEQ ID NO: 159106 - DNA, 80 bp, synthetic construct
  source 1..80: mol_type = other DNA
gcaatgtgctcttaaaccttgtaatgaagggaaaattggaaatgccagatgttgccctttgatttgtggaaaagcattac

SEQ ID NO: 159107 - DNA, 80 bp, synthetic construct
  source 1..80: mol_type = other DNA
gcccctagactacactgcccaggcatctgagtatgtgcccgtcacggttacaatagctccaatgtgcgctgagtacaacg

SEQ ID NO: 159108 - DNA, 80 bp, synthetic construct
  source 1..80: mol_type = other DNA
actatgataacattttaactgtgttagaaaccacaaatgaggccattaaaagaaacgaaacctacaagtctttactaaat

SEQ ID NO: 159109 - DNA, 80 bp, synthetic construct
  source 1..80: mol_type = other DNA
actcaagtatgactaccccacacgccctggtcaatgtgggggtgtcattggtaatacaggtcatattataggaatacatg

SEQ ID NO: 159110 - DNA, 80 bp, synthetic construct
  source 1..80: mol_type = other DNA
ttctatccctggatcccaaaacccccaccacaatttagagtttccttcaagcttggctacaaaccctaaataaaattaca

SEQ ID NO: 159111 - DNA, 80 bp, synthetic construct
  source 1..80: mol_type = other DNA
ggcggcccggtgtcagttccccctgcagccgcccagtctctgcctccaggcaagggcgccagcttttctccccccagcct

SEQ ID NO: 159112 - DNA, 80 bp, synthetic construct
  source 1..80: mol_type = other DNA
ccggcgagggtccccaggctagatggcctggtggagatggagaaggcgctggtgacgcccgcggaggcgctggagatggc

SEQ ID NO: 159113 - DNA, 80 bp, synthetic construct
  source 1..80: mol_type = other DNA
ccctaagacctgttatagttcaaggacccaatacagagtttgccctatcattattgaggaaaaatatagtgactatcact

SEQ ID NO: 159114 - DNA, 80 bp, synthetic construct
  source 1..80: mol_type = other DNA
tgtctaaatgggtggcaaaattgtgacgcacaatctcttgttgctgtgtccaaccactcactttatgacatccctttcca

SEQ ID NO: 159115 - DNA, 80 bp, synthetic construct
  source 1..80: mol_type = other DNA
tatatgaaactcaagcatgtgagagcctgggtcccgaggccaattagatctcagccatacctactcaaaaacttccctaa

SEQ ID NO: 159116 - DNA, 80 bp, synthetic construct
  source 1..80: mol_type = other DNA
gaattaccacttaatgacacatgaagatcacctaaaccttctgaccccctactataatagagacctggcagtggtagcaa

SEQ ID NO: 159117 - DNA, 80 bp, synthetic construct
  source 1..80: mol_type = other DNA
cccctgagggcagaccagccctgccatggcatggtggtggaggagacggggatggtggcgccccagacgccgctggaggt

SEQ ID NO: 159118 - DNA, 80 bp, synthetic construct
  source 1..80: mol_type = other DNA
gactccacgtacgagcagagaacagtcctctgctcgtcggtggcctcctgtagcccccagtaaatggatttcagggagtg

SEQ ID NO: 159119 - DNA, 80 bp, synthetic construct
  source 1..80: mol_type = other DNA
agcaactagtaaagtggtcccatccgacctcattgagacccggcacgttataaataagagacaaaggtcagagtgcacgg

SEQ ID NO: 159120 - DNA, 80 bp, synthetic construct
  source 1..80: mol_type = other DNA
acccaggcaagcatggtgctggttcaaaggccagtggaagaaagccatggaagaggtaaagcaaaccattgcaaaacatc

SEQ ID NO: 159121 - DNA, 80 bp, synthetic construct
  source 1..80: mol_type = other DNA
tagtgccagtggaagtggcagcagtaacccgggaggaagaggagacccattgtctagtgcacccagcacagaccgccgca

SEQ ID NO: 159122 - DNA, 80 bp, synthetic construct
  source 1..80: mol_type = other DNA
gaatagtggcaggccaaccaacagagtcagaaaatagaatagtaaatcaaatcatagaagaaatgataaaaaaggaagca

SEQ ID NO: 159123 - DNA, 80 bp, synthetic construct
  source 1..80: mol_type = other DNA
aagatggaaaagaatggaatgccgcctcaaaccctagtgtattcttccaaccacactccggttttccaagatttacaata

SEQ ID NO: 159124 - DNA, 80 bp, synthetic construct
  source 1..80: mol_type = other DNA
cacaaccacatccccgagcccagggagcacactcaaacccctgataaatgagagcgatccatgcataaaggcagacaact

SEQ ID NO: 159125 - DNA, 80 bp, synthetic construct
  source 1..80: mol_type = other DNA
acagggaactgaccagatcgcgcgatgtgcgtgcaaaacaggtgtgtatttttgtgaatctagaggcaaacattatccta

SEQ ID NO: 159126 - DNA, 80 bp, synthetic construct
  source 1..80: mol_type = other DNA
atgacaacatattaaccgtccttgagggaaccactgaggctaaccaaagaaactcaacttatgaaagccttttaaatatt

SEQ ID NO: 159127 - DNA, 80 bp, synthetic construct
  source 1..80: mol_type = other DNA
ctccattcattgaacagagagcagaattgcaaggggatgagacgcgcaccaccaagggaacagtagccaacactgcgcca

SEQ ID NO: 159128 - DNA, 80 bp, synthetic construct
  source 1..80: mol_type = other DNA
atcagactggaattgtcgtaccagctggaacacctacgtcatgttcaattatgtgctttgtgtcagcttgcaatgacttc

SEQ ID NO: 159129 - DNA, 80 bp, synthetic construct
  source 1..80: mol_type = other DNA
cactgcagtcaagacgctttgcgccgttgtacgctgttgaagcgcgcagaatacaaaaattggagaacaccataaacaac

SEQ ID NO: 159130 - DNA, 80 bp, synthetic construct
  source 1..80: mol_type = other DNA
tggcttctcggcaatgttgcttagaagttatttcacaaactttcaaggtgtcattactatgcaagatgatgtcagaaatc

SEQ ID NO: 159131 - DNA, 80 bp, synthetic construct
  source 1..80: mol_type = other DNA
ttgaggacccaccttttaattctcttctgtttgcattgctggccgcagctggcggactacaaggcatttacgttctggtg

SEQ ID NO: 159132 - DNA, 80 bp, synthetic construct
  source 1..80: mol_type = other DNA
actacgtacacttcctgggctgggtcttccccgagatataaagcgcagcacttccgaatggctgagttttccacgcccgt

SEQ ID NO: 159133 - DNA, 80 bp, synthetic construct
  source 1..80: mol_type = other DNA
gtgcttgccgcgcagctgcgcctccagccgctccgagcgcaccttcttgaagacgcgtacctcgggcgcgttggctacgc

SEQ ID NO: 159134 - DNA, 80 bp, synthetic construct
  source 1..80: mol_type = other DNA
aagtacatgagagtcaggctgtgtggcccctggactgccttagtgaagagaacctcgggcctggccacggtggctagggt

SEQ ID NO: 159135 - DNA, 80 bp, synthetic construct
  source 1..80: mol_type = other DNA
aacttagggagcaagattagacagaccatcccgccacaaaacacgcaaacccacgccaggatgcaaaacagaagaaccag

SEQ ID NO: 159136 - DNA, 80 bp, synthetic construct
  source 1..80: mol_type = other DNA
cctcccggttgtgaaaaagatcaatattatttaaaacctcccaaaggtaaagctgtatgcttaggtccacatcatcattt

SEQ ID NO: 159137 - DNA, 80 bp, synthetic construct
  source 1..80: mol_type = other DNA
tttatgacaaaatctaccaaactccatgctactactctggacttgctgttggaataaacccttacaaagattggcatttt

SEQ ID NO: 159138 - DNA, 80 bp, synthetic construct
  source 1..80: mol_type = other DNA
gcgttgccgccgttggtagccacggcgggcgcagcggccgcggaggccggcgtaaacagcgtcagcggccggtggtggct

SEQ ID NO: 159139 - DNA, 80 bp, synthetic construct
  source 1..80: mol_type = other DNA
gaaaaacaagtggatggattgagacttgcaacacaaaaacaacaacaggaatacatagacactctcactctaatgctgga

SEQ ID NO: 159140 - DNA, 80 bp, synthetic construct
  source 1..80: mol_type = other DNA
gaggagacggcgaaggaggtggaagaggtggagacgcagacggtggagacgccgctggaggacccgccgacgcagacctg

SEQ ID NO: 159141 - DNA, 80 bp, synthetic construct
  source 1..80: mol_type = other DNA
cgttggctcgactctttctagtaaccctacaacagtatgacccaatccaattcgactgaggtagggttactagaaagagt

SEQ ID NO: 159142 - DNA, 80 bp, synthetic construct
  source 1..80: mol_type = other DNA
acctccaaatttccaaacatgtatattccagtgggacaagctctcaattatggttttctcaatctcggtggaacccctac

SEQ ID NO: 159143 - DNA, 80 bp, synthetic construct
  source 1..80: mol_type = other DNA
accggaccgagcgcactgccggtgcgtgccttcgtgcgcactgccgctgcgtgtcgttccacagcatttgttggcgggcc

SEQ ID NO: 159144 - DNA, 80 bp, synthetic construct
  source 1..80: mol_type = other DNA
ctcaatatagatcttcctgaaacagaaaaagattcattaactaaacttaaaaactcatcaactgatgagtatagtaaaaa

SEQ ID NO: 159145 - DNA, 80 bp, synthetic construct
  source 1..80: mol_type = other DNA
gtacaacagaaagctgccctttaatgacactcagctaacgggtccagagatgcagccgggaatagccatgtgcagcagga

SEQ ID NO: 159146 - DNA, 80 bp, synthetic construct
  source 1..80: mol_type = other DNA
agggaatgagatatgggttgatatgtacactgtaaagccctctggatggactgtgcgcacgtttgataaaccaaggaaaa

SEQ ID NO: 159147 - DNA, 80 bp, synthetic construct
  source 1..80: mol_type = other DNA
ggacatcacgaagatgaaaatttctacctattagtaacaccaaaaaatcatactgaagctattaatgctactttcgtttg

SEQ ID NO: 159148 - DNA, 80 bp, synthetic construct
  source 1..80: mol_type = other DNA
caatcaacccaattaatagtatcagtaagaagattataaaatggcttttgagaattatatcagcaatggtaatcataata

SEQ ID NO: 159149 - DNA, 80 bp, synthetic construct
  source 1..80: mol_type = other DNA
ctgttcgccgccgccgccgaggacgatatgtgagtaacaaacgccgcttcaggcgcagacgcagacgaagggggcgacgc

SEQ ID NO: 159150 - DNA, 80 bp, synthetic construct
  source 1..80: mol_type = other DNA
gctggagcactgcgtggggctggcgggtgctaagaagctgctcttgctcgacgtgccgcgtctggagaactattttcttt

SEQ ID NO: 159151 - DNA, 80 bp, synthetic construct
  source 1..80: mol_type = other DNA
ggaaaactggaaaccaaactggcaagaaaaacgccaaggcgaagaataagccaggcaagaggcagcgaatggtcatgaaa

SEQ ID NO: 159152 - DNA, 80 bp, synthetic construct
  source 1..80: mol_type = other DNA
acgatgccgcagggatcgagcgtcagttttttgaatccacctttcgatcccacgccggttgttgtggctgtggcaatttt

SEQ ID NO: 159153 - DNA, 80 bp, synthetic construct
  source 1..80: mol_type = other DNA
gtgaacataaccaaattagagaaaggtcttcaagatttagcaccactctatgcaagtgaggccaagcaagtgcgcgaaat

SEQ ID NO: 159154 - DNA, 80 bp, synthetic construct
  source 1..80: mol_type = other DNA
tacgacaatgcctagagaatcgcacattgtctcttattaatttaacgagtcactatagtgggacttactattttgaatct

SEQ ID NO: 159155 - DNA, 80 bp, synthetic construct
  source 1..80: mol_type = other DNA
acaggagctcactgatgaagagctgctagccgctgttcaggaaactgaactaaatgaccaatgaattattgaattgatgt

SEQ ID NO: 159156 - DNA, 80 bp, synthetic construct
  source 1..80: mol_type = other DNA
atctattctttccttcccctgcacccaaagagaaaacctctaaagctttgcggggtgatatagcaaatctcacaaaccag

SEQ ID NO: 159157 - DNA, 80 bp, synthetic construct
  source 1..80: mol_type = other DNA
agagtaccaggcctgcagggcctttgacaggccccccagaaattacctctccgacaagcccatctacccctggctccctc

SEQ ID NO: 159158 - DNA, 80 bp, synthetic construct
  source 1..80: mol_type = other DNA
aatgacttttccgttcggctgctaaaagacaccccattcatcgaacagagtgcactactccaaggtgacgtgatggaagc

SEQ ID NO: 159159 - DNA, 80 bp, synthetic construct
  source 1..80: mol_type = other DNA
atcaactggcatacataggcggaaccaacgcccaagtcagttacgaacacacccacccaggcgaacgaggtcatgaaatt

SEQ ID NO: 159160 - DNA, 80 bp, synthetic construct
  source 1..80: mol_type = other DNA
atgagcaacagggccaaacaggcggcgtggcctgggtagtagcgggcaacgagagactctgtgcaatcaaaccccaggct

SEQ ID NO: 159161 - DNA, 80 bp, synthetic construct
  source 1..80: mol_type = other DNA
gataatggaaactagcgtggagcacttcttctcacgctcagggctggcgggtattcttatcatcgaggactccggcacta

SEQ ID NO: 159162 - DNA, 80 bp, synthetic construct
  source 1..80: mol_type = other DNA
tggtggaaactacctgactgtctgaaggatatgggaatcttcggacaaaacatgtactatcactcttttggtagatctgg

SEQ ID NO: 159163 - DNA, 80 bp, synthetic construct
  source 1..80: mol_type = other DNA
tctaatggcctacaccccaccaggtggtaaactgccaacttccagaaaggaggcaatgcttggtgttcatgttatctggg

SEQ ID NO: 159164 - DNA, 80 bp, synthetic construct
  source 1..80: mol_type = other DNA
gccgcgagtccgagcacttttgcgtttgtaggcagaaataaacacgtcgcgagacctggtgtttgaccagcagggggaag

SEQ ID NO: 159165 - DNA, 80 bp, synthetic construct
  source 1..80: mol_type = other DNA
agggtgcaatcttgacaacccaacatgtcagtgaagtgggtatcaaccctattaacacaccaaatacatctaaattgaga

SEQ ID NO: 159166 - DNA, 80 bp, synthetic construct
  source 1..80: mol_type = other DNA
caaaaacagcagatcaggaaatgatattggccatccccttgcaaatggacaatacactctttgccactactttagttggt

SEQ ID NO: 159167 - DNA, 80 bp, synthetic construct
  source 1..80: mol_type = other DNA
tgggctgcagtcgggtggtggcggcggtggcgtggaaaccgtcgtcgggcacagacccatggcctgctcgtaggttggtg

SEQ ID NO: 159168 - DNA, 80 bp, synthetic construct
  source 1..80: mol_type = other DNA
aggttctttggactggatcttgactcgggtctattctcagccccgacagtcccgttgtcaattaggaataaccactggga

SEQ ID NO: 159169 - DNA, 80 bp, synthetic construct
  source 1..80: mol_type = other DNA
gaactacattctggttttacagagataaactcacagattacattgttacttttaatatagtgcctcctttcaaactaaac

SEQ ID NO: 159170 - DNA, 80 bp, synthetic construct
  source 1..80: mol_type = other DNA
atatactaaacaaaactaccaaagataccaccaaattggcaaaactgatggaagagtacggtatcgatttgccatacgtt

SEQ ID NO: 159171 - DNA, 80 bp, synthetic construct
  source 1..80: mol_type = other DNA
gccacattgatccccagcttccggctgctctagatttagggccagagcagccccggttcccacaagatccatatgtgtat

SEQ ID NO: 159172 - DNA, 80 bp, synthetic construct
  source 1..80: mol_type = other DNA
attgcaaaaagaaaaattggataataccacaaattccaacaaacatagaaagggcagtaaaccaggctagtatgattatc

SEQ ID NO: 159173 - DNA, 80 bp, synthetic construct
  source 1..80: mol_type = other DNA
gccgtacctgtcggcggagcgcacggtgcgctggatgctggcctttctggaggaagcccttgcgcaaatcaccgcggacc

SEQ ID NO: 159174 - DNA, 80 bp, synthetic construct
  source 1..80: mol_type = other DNA
tggtcttcaccgaggaccacatgttggtctttgatccgcacagctccgcggaatgtcacaacgccgccgtgtatcactgc

SEQ ID NO: 159175 - DNA, 80 bp, synthetic construct
  source 1..80: mol_type = other DNA
gtccccaccactgtccccggtcccgcaacgcgccgtccccaccgccgtcgccgccccgaaaagcgaagcgccgcgcaaaa

SEQ ID NO: 159176 - DNA, 80 bp, synthetic construct
  source 1..80: mol_type = other DNA
tatgtcgtgatgcagtgtcactcgcacagacagcagaatttcagggtgaccctatagcagacatggtagaaacccatgta

SEQ ID NO: 159177 - DNA, 80 bp, synthetic construct
  source 1..80: mol_type = other DNA
tcacatcaggggtcatgatggagattgcaaactgcgttaccaaaccgggatgttccttcaaaactttataaacatccttt

SEQ ID NO: 159178 - DNA, 80 bp, synthetic construct
  source 1..80: mol_type = other DNA
acttaaagcagttaccggtgcaaccaacacagtacccattacagtcactatagcaccaatgtgctgtgagtttaatggac

SEQ ID NO: 159179 - DNA, 80 bp, synthetic construct
  source 1..80: mol_type = other DNA
gcgacgtaccagctgtccatagtgcgccaagctatgcagcacgccggattccaagtcagagcggcgtcggtcatgacacg

SEQ ID NO: 159180 - DNA, 80 bp, synthetic construct
  source 1..80: mol_type = other DNA
cacacaaccagacgtggctacatgtcgattctatacgctggaatccgtcgactggggagctaactccatgggatggtggt

SEQ ID NO: 159181 - DNA, 80 bp, synthetic construct
  source 1..80: mol_type = other DNA
atgaccagaagaaactaatgagcaacaatgtacaaatagtaagacaacaaagctacagcatcatgtccatcatcaaggag

SEQ ID NO: 159182 - DNA, 80 bp, synthetic construct
  source 1..80: mol_type = other DNA
tttatgacaaaatttaccaaactccttgctactattctggattggctgttgggattaacccatacaaagattggcacttc

SEQ ID NO: 159183 - DNA, 80 bp, synthetic construct
  source 1..80: mol_type = other DNA
accacaactacctccacaccagaaaaagacaaaaaaatatttaatgaccaattatactccaacgctaacttttatcaatc

SEQ ID NO: 159184 - DNA, 80 bp, synthetic construct
  source 1..80: mol_type = other DNA
gtaccaaatatgtcactgttttttatggcatacccgcatggaggaacgcgagcgtacctctcttctgtgcaaccaaaaat

SEQ ID NO: 159185 - DNA, 80 bp, synthetic construct
  source 1..80: mol_type = other DNA
gtgcgacctgtcgaaaaagactctttacaccaagaaagagaacaaagaccctgggagacgagccagagcgaagaagagac

SEQ ID NO: 159186 - DNA, 80 bp, synthetic construct
  source 1..80: mol_type = other DNA
tccagggaaagaggtccaaattgatggaataactactaaggtagaagactcatatgacttgtttaacaaagatggagtta

SEQ ID NO: 159187 - DNA, 80 bp, synthetic construct
  source 1..80: mol_type = other DNA
gcatctggggcaggcccgtccgcaccttctacacagacacccccttctaccccgaggttcccaaaatgcctcctcagttt

SEQ ID NO: 159188 - DNA, 80 bp, synthetic construct
  source 1..80: mol_type = other DNA
agacgtagtacctgatggggtcctcctcattgtccgagaggtgagattcgatggtcaaaggcgagcctctcccataattg

SEQ ID NO: 159189 - DNA, 80 bp, synthetic construct
  source 1..80: mol_type = other DNA
ccgctccccatcccaggcaacctccagcggcagttcacccagctccatcccagcagtcacctccggatcccacgtacgcc

SEQ ID NO: 159190 - DNA, 80 bp, synthetic construct
  source 1..80: mol_type = other DNA
gacagcacccagcatgcatccaggggtagccatgctcagcaaacacaaggttatagtgcccagctttctcaccaggccgg

SEQ ID NO: 159191 - DNA, 80 bp, synthetic construct
  source 1..80: mol_type = other DNA
ccaagggcccacgtggcggctagtactctggtacttcggtacctttgtacgcctgttttatctcccttcccaatgtcaat

SEQ ID NO: 159192 - DNA, 80 bp, synthetic construct
  source 1..80: mol_type = other DNA
tgcggcacgcggtctccgtcgtttcgccgcgctccgggatctctgtactggtgtctgtccggcgtttgtgcggagctttg

SEQ ID NO: 159193 - DNA, 80 bp, synthetic construct
  source 1..80: mol_type = other DNA
aataaccaacctgaatgtaatgacacctggtactatggaaacacttacacaccttcaatatcagatgcagcaaaaaaaat

SEQ ID NO: 159194 - DNA, 80 bp, synthetic construct
  source 1..80: mol_type = other DNA
cagagtaaaatacctagaatctgctgttaactcagaacacattttctctgttgacaaaaattgtgaaaccattgccaaag

SEQ ID NO: 159195 - DNA, 80 bp, synthetic construct
  source 1..80: mol_type = other DNA
gtcttgtctttgtgtcacttaatgtggcacaatggtcctgagatttataaggactttgaagcaaagatacgcagtgttag

SEQ ID NO: 159196 - DNA, 80 bp, synthetic construct
  source 1..80: mol_type = other DNA
taattccaagatggtttttctttgttagtcttttgttgacttgctggttcctaaaagttctcaaaaacgattgtgtgaag

SEQ ID NO: 159197 - DNA, 80 bp, synthetic construct
  source 1..80: mol_type = other DNA
acagaacacggacacccaaagtagtcggttccgctgcggaatctttgtgtgcctgttttatagcccctccccccgatttg

SEQ ID NO: 159198 - DNA, 80 bp, synthetic construct
  source 1..80: mol_type = other DNA
gagggcctaggacgagtacacccatactggatgcaaagatggagggtctactctcaatttcaaaaagaaaccatgaacag

SEQ ID NO: 159199 - DNA, 80 bp, synthetic construct
  source 1..80: mol_type = other DNA
aagaaatagcaatcacagcctccagatatggattaaccatcaccccagcagataaaagtcaagattttaaaccagtgact

SEQ ID NO: 159200 - DNA, 80 bp, synthetic construct
  source 1..80: mol_type = other DNA
agatgacaacactaactcaagaaatgacatgggcatttcagatgatacactccatgctattggcggaagagctcgtactt

SEQ ID NO: 159201 - DNA, 80 bp, synthetic construct
  source 1..80: mol_type = other DNA
tctaaatgtatcaaagcatatggaggcaattttccaaggtccaatcaacatgcaatcacctccacctccagctatagttg

SEQ ID NO: 159202 - DNA, 80 bp, synthetic construct
  source 1..80: mol_type = other DNA
cagctggtacggccttctggaggcctcggtgcctatcgtacaatgtctgtttttggatctgggtggcggccgtgccgagc

SEQ ID NO: 159203 - DNA, 80 bp, synthetic construct
  source 1..80: mol_type = other DNA
cacaggagacgaatctctagaagacaacgcccgactgacgctgatatgtccctactgcaagcccatgctctataactggc

SEQ ID NO: 159204 - DNA, 80 bp, synthetic construct
  source 1..80: mol_type = other DNA
acacttttgaggtaatactgtaactagtttaagattaatatactgatttcaatggtgctaatatggtcttatccgtaatc

SEQ ID NO: 159205 - DNA, 80 bp, synthetic construct
  source 1..80: mol_type = other DNA
ccattcacaccacatctatggcaaccggatgtacgacatgatcggggggaacccctctggttgtgtggccacctccatcc

SEQ ID NO: 159206 - DNA, 80 bp, synthetic construct
  source 1..80: mol_type = other DNA
cagattctggagacacgttctatggcctagtcaccatcaatgattttgggactctggcagtgagagtagtgaatgagttt

SEQ ID NO: 159207 - DNA, 80 bp, synthetic construct
  source 1..80: mol_type = other DNA
ccaaatgcattgggttatttaatgtgtaaaccatttctcacgggcacagatcgagggaaaattgaggtttaccttagcct

SEQ ID NO: 159208 - DNA, 80 bp, synthetic construct
  source 1..80: mol_type = other DNA
tggcacttccaacaacagaatactagctatacccttggatatgagtaatacactgttttctactacactgatgggtgaag

SEQ ID NO: 159209 - DNA, 80 bp, synthetic construct
  source 1..80: mol_type = other DNA
gagcgtgctgtaacgcaaaatatcgaactcttcgcggctctggtccgtgatgagcacggtgttctgcgagattttattgg

SEQ ID NO: 159210 - DNA, 80 bp, synthetic construct
  source 1..80: mol_type = other DNA
gctatcaggtgccaggtacgctgcaaacacaagacatgccagtgttaacacaccagatcatgtatgtaccacccgggggc

SEQ ID NO: 159211 - DNA, 80 bp, synthetic construct
  source 1..80: mol_type = other DNA
ccctcctcagaaaactctgcatggagaagctggacgtgaacctcccccccagacctgtgtgctgtatttacaaacactac

SEQ ID NO: 159212 - DNA, 80 bp, synthetic construct
  source 1..80: mol_type = other DNA
ccgtcgtcctccttatcgatgaagttgagaaagttgcccaaaaagtccgtctcgttgtaggagcccgaggcccccgagat

SEQ ID NO: 159213 - DNA, 80 bp, synthetic construct
  source 1..80: mol_type = other DNA
ttccccggccacccagactgtgtcagtacaagaatgcatcaacagttaatttcactcccaccaatattactgagaagaga

SEQ ID NO: 159214 - DNA, 80 bp, synthetic construct
  source 1..80: mol_type = other DNA
tgggtttgccgcagtaccacatgacagcattagcgctggagcgacaaacaagtacggttacaacaccattaatgactttg

SEQ ID NO: 159215 - DNA, 80 bp, synthetic construct
  source 1..80: mol_type = other DNA
cgcaagtttccaagcagagtgttggagcacatgaaaccactgtacacgcggggagtggagcggtggttaagtatttcaat

SEQ ID NO: 159216 - DNA, 80 bp, synthetic construct
  source 1..80: mol_type = other DNA
atgaagtgcttgttgtgccaaacatcaaccctagtaatgcacaaactacaaatgcagctcccgctctcgatgccgctgag

SEQ ID NO: 159217 - DNA, 80 bp, synthetic construct
  source 1..80: mol_type = other DNA
caggatgtggtaaatctttggcttccaaagttattgctaggggcctcactagtgagagcaatgtttactccttaccacct

SEQ ID NO: 159218 - DNA, 80 bp, synthetic construct
  source 1..80: mol_type = other DNA
gaagtacaggccattcttgagcaggacgccacggaaggtgaacgctttggtggtaacgattggacgcaatttgactcgaa

SEQ ID NO: 159219 - DNA, 80 bp, synthetic construct
  source 1..80: mol_type = other DNA
acaattgtataacgaccattatgaacagaacttatataacaatatacaactatatcaaacatttcaaacaatagctcaaa

SEQ ID NO: 159220 - DNA, 80 bp, synthetic construct
  source 1..80: mol_type = other DNA
ctctcaaacccctggctaagatcaggcacagacagcccctgcatttcattctatgtattaaaaaaccaagtataccaagg

SEQ ID NO: 159221 - DNA, 80 bp, synthetic construct
  source 1..80: mol_type = other DNA
actcaaagattgagcgtgattttaattacgcacaatattgtatcaattgtgtgggtagtatagtattaattctaggaact

SEQ ID NO: 159222 - DNA, 80 bp, synthetic construct
  source 1..80: mol_type = other DNA
tgatccttttgggggaggtataagtacaatgcaatttagtctagaggtactgtatgatgaatatgtaaaacacagatgta

SEQ ID NO: 159223 - DNA, 80 bp, synthetic construct
  source 1..80: mol_type = other DNA
tcccttactgaaggggagcgtgcgaaagaatttacaccaggaaatgcaaccaaggaaaatggcaaagttcagaccgcaat

SEQ ID NO: 159224 - DNA, 80 bp, synthetic construct
  source 1..80: mol_type = other DNA
tgcttgcacgcagaagagaaagtgaaagatactgaagaggcaaaaaaactagtacagagacatctagtggcagaaacagg

SEQ ID NO: 159225 - DNA, 80 bp, synthetic construct
  source 1..80: mol_type = other DNA
aacactcctgcgacctctggtgtgaactcgcaagaagttccagccctaactgcagtggaaactggagctagtggtcaggc

SEQ ID NO: 159226 - DNA, 80 bp, synthetic construct
  source 1..80: mol_type = other DNA
tctcccgggtgaagtaggtgcgcatgtgctccgcaaagcccctgtccaggagcgaggggagcacgacgccccccgaaggc

SEQ ID NO: 159227 - DNA, 80 bp, synthetic construct
  source 1..80: mol_type = other DNA
tgtatgacaagacacatccaggagagaaaggcatagaccttaatgatgaagatccaaaaggcccaatgaaagatcctctc

SEQ ID NO: 159228 - DNA, 80 bp, synthetic construct
  source 1..80: mol_type = other DNA
tagggagggcggcgttagtttgtatgcaaagcattgaatacaaaaaccacgctaccagcacttcaaccacacagaaaaac

SEQ ID NO: 159229 - DNA, 80 bp, synthetic construct
  source 1..80: mol_type = other DNA
gtagcaataacagcacatacatgggacttcctgacttgacacttcaagcaatgtacatccccccaggtggtccagtaata

SEQ ID NO: 159230 - DNA, 80 bp, synthetic construct
  source 1..80: mol_type = other DNA
ggtgagaggggcggtgagtttacaaacatctataatccatcaaatacagatgctagtgagggcagacaattcgcagcact

SEQ ID NO: 159231 - DNA, 80 bp, synthetic construct
  source 1..80: mol_type = other DNA
atgtcgtgcgcataggtgctgactctgacatgggcgggggtgcccggggccgcatccttctggcagtggtggtcaaacaa

SEQ ID NO: 159232 - DNA, 80 bp, synthetic construct
  source 1..80: mol_type = other DNA
aacatcacagtgcctgccactcagggcttgccagtgctagttaccccagggtcgtcacaatacctcacctctgacgactt

SEQ ID NO: 159233 - DNA, 80 bp, synthetic construct
  source 1..80: mol_type = other DNA
aaattatgatgattataatgggacaggcaaaaattttacccaatggccaatcaacttgcaagaaatggcacaaattagaa

SEQ ID NO: 159234 - DNA, 80 bp, synthetic construct
  source 1..80: mol_type = other DNA
gccggcggaccggcgtgcaccagaatctgcacggtgcccgtagggcagggcgcttttttaacgttacgcttgacgcgggt

SEQ ID NO: 159235 - DNA, 80 bp, synthetic construct
  source 1..80: mol_type = other DNA
ctaaagaaagctacatgctccttggagcggaatattgattacatccaatacacattgaattgtcttggtagtttagtaat

SEQ ID NO: 159236 - DNA, 80 bp, synthetic construct
  source 1..80: mol_type = other DNA
tctctgcaatctccctggttggcacaccggggacgcggccagaaccactggtcgtctacctctatggcccaccaggcact

SEQ ID NO: 159237 - DNA, 80 bp, synthetic construct
  source 1..80: mol_type = other DNA
taaaagaagccttatatgggaccgatggtctagaaccaattgatctcaacaccagtgcaggatacccatatgttagttta

SEQ ID NO: 159238 - DNA, 80 bp, synthetic construct
  source 1..80: mol_type = other DNA
agctcgtcgaagagtaaggaggcgcggggggcggtggcgcagacgctacagaaaatggcgagaagataaaggccctatgg

SEQ ID NO: 159239 - DNA, 80 bp, synthetic construct
  source 1..80: mol_type = other DNA
atattttcccccaacagacaggacagagctccaagggcaagaagaagactggagtttccaggtcgaaagcgaggggtcgt

SEQ ID NO: 159240 - DNA, 80 bp, synthetic construct
  source 1..80: mol_type = other DNA
acagtattgacaggcaaagctaagttcacaaagactaaactcacaccagattggattgtggaggaggagtgtgaattaga

SEQ ID NO: 159241 - DNA, 80 bp, synthetic construct
  source 1..80: mol_type = other DNA
cattctattcttcaaaaccacttaggactattagagatactggggcattaggcaaactcatttgcaagccgcttttgtct

SEQ ID NO: 159242 - DNA, 80 bp, synthetic construct
  source 1..80: mol_type = other DNA
ttctagctccaccaactattacatcactctcagcaatgaataggagattcttcctggacttagatatcatggttcacgac

SEQ ID NO: 159243 - DNA, 80 bp, synthetic construct
  source 1..80: mol_type = other DNA
acaatgtaggtacaaatgtaaagaatgtgaacatgtacacagtgctcttagagagacaaaatgacttagctcaggaaatt

SEQ ID NO: 159244 - DNA, 80 bp, synthetic construct
  source 1..80: mol_type = other DNA
cgagcgacctattaaactggtacatcgtccccgtaagccaggcgcagcaggacatcttgtcttcgatcgacccgcccgcc

SEQ ID NO: 159245 - DNA, 80 bp, synthetic construct
  source 1..80: mol_type = other DNA
ctgacacaactgattccggagcagcatactatggggctgtttcaataaatgattttggtctacttgcggtaagagtggtt

SEQ ID NO: 159246 - DNA, 80 bp, synthetic construct
  source 1..80: mol_type = other DNA
ccacccccgtccctcagcccgggcacgcgagtccccgtccccggcgaaacccccgtcgccacacccgtgtccaccggtcc

SEQ ID NO: 159247 - DNA, 80 bp, synthetic construct
  source 1..80: mol_type = other DNA
accccagattcacaattcctttcattagcattgcttcagcatattacatgttttatgatggatatgctgatgacaaccca

SEQ ID NO: 159248 - DNA, 80 bp, synthetic construct
  source 1..80: mol_type = other DNA
ttaaaaaacagacagacagcaactatggctactgcacatactgcccttcaaatggctccaatggaacaatagataaaatt

SEQ ID NO: 159249 - DNA, 80 bp, synthetic construct
  source 1..80: mol_type = other DNA
aaggtgcaattttaacaacccaacatgtcagtgaagtagacattaaccccatcaacacaccaaatacatccaagctaaga

SEQ ID NO: 159250 - DNA, 80 bp, synthetic construct
  source 1..80: mol_type = other DNA
gggtaattacttcacatcaaatggggttattactatcccagctggtgaacaaatgacattgtcagtccccttttactcaa

SEQ ID NO: 159251 - DNA, 80 bp, synthetic construct
  source 1..80: mol_type = other DNA
actggataaaaaaagagctagacaactgggaggcaccctttgactacagaatactctttatatgtccgtacacataccca

SEQ ID NO: 159252 - DNA, 80 bp, synthetic construct
  source 1..80: mol_type = other DNA
cccccagggatatcataccttttctaagcgtgggtaatgcctacagctgtttttacgatggttggtcacacttctcacag

SEQ ID NO: 159253 - DNA, 80 bp, synthetic construct
  source 1..80: mol_type = other DNA
cggtagttccggtcaacaatgtgaatgagaatgtcaatagcctggaggcttatagaataccagtacattctgtgactgaa

SEQ ID NO: 159254 - DNA, 80 bp, synthetic construct
  source 1..80: mol_type = other DNA
catgtggcatcttttgagccgttctagagtacaattccatagcaacagggtcataattaggggaaggattagtgagaagg

SEQ ID NO: 159255 - DNA, 80 bp, synthetic construct
  source 1..80: mol_type = other DNA
aaaaaatatgaccccttcggaggtggctacagcaccatgcaattcaccttagagactctctttgacgagtgggtaaaaca

SEQ ID NO: 159256 - DNA, 80 bp, synthetic construct
  source 1..80: mol_type = other DNA
ggctggtcacatttcagccaatcaggggtgtacggctacacaaccttaaacaacatcggttccctgttcttcaggcacgt

SEQ ID NO: 159257 - DNA, 80 bp, synthetic construct
  source 1..80: mol_type = other DNA
catttagaacagaaggctgctactctcaccctaaattacccaaaaaggcagtaacacctggaaatgacaaaacatacttt

SEQ ID NO: 159258 - DNA, 80 bp, synthetic construct
  source 1..80: mol_type = other DNA
cgcacctccgaaacgaaacccagggcctcgtcgtccacaaacttgttgagcgccgaaaagacggccacaaagtcgctttt

SEQ ID NO: 159259 - DNA, 80 bp, synthetic construct
  source 1..80: mol_type = other DNA
tacaagaaatgattttgtagctaatgtaaatacaaactacaactggtatagcttcaaagcaaagtcacacaaaacgcaac

SEQ ID NO: 159260 - DNA, 80 bp, synthetic construct
  source 1..80: mol_type = other DNA
tacaagactcacaaaactacaaaaccaatgggagaaagtatacccacaactaaaaacacaaaaacccacagacacaacac

SEQ ID NO: 159261 - DNA, 80 bp, synthetic construct
  source 1..80: mol_type = other DNA
acagcaaaagagagttaatcctgactaccttgtctctaaccgctggattactgctatgaggtcattgatttcaatggatt

SEQ ID NO: 159262 - DNA, 80 bp, synthetic construct
  source 1..80: mol_type = other DNA
ttttaatttcagtccttttttctacttttggtttattatcatctccgttttttattataactttataccatgaattacta

SEQ ID NO: 159263 - DNA, 80 bp, synthetic construct
  source 1..80: mol_type = other DNA
ggccgaggccggcagtaccagtagccgaagctagacccgcgctgccatggcgtggtggtggcgcacccggtggcgatggc

SEQ ID NO: 159264 - DNA, 80 bp, synthetic construct
  source 1..80: mol_type = other DNA
gctcagacagggaatccagtgtctcttccagcaattaatcaaaacccagcagggagttcatttagatccatccctcttgt

SEQ ID NO: 159265 - DNA, 80 bp, synthetic construct
  source 1..80: mol_type = other DNA
ttaggaggttcttaataattagactctctatttatgctagcactttcaatagagggaggctgagaatgggatttttccca

SEQ ID NO: 159266 - DNA, 80 bp, synthetic construct
  source 1..80: mol_type = other DNA
cgcagcgtcttcgttgaagagaatgtcccgcttgtggtctacggcacgctcgtggtggtgcgggcacagatgacggtgtt

SEQ ID NO: 159267 - DNA, 80 bp, synthetic construct
  source 1..80: mol_type = other DNA
atacctgaagctctagaccgcaggtttttcctagatatggacctcaaaataatgccaaattatgtgagtaatggcttgct

SEQ ID NO: 159268 - DNA, 80 bp, synthetic construct
  source 1..80: mol_type = other DNA
cagttgataagccgacacaccctgagacctcatcagatcggttttatacattagagagtgttacatggaatggctcttcc

SEQ ID NO: 159269 - DNA, 80 bp, synthetic construct
  source 1..80: mol_type = other DNA
gatcatgtacatcccacccggcggcccaatccctaaatctactacagattatgcatggcaaacatcaactaatcctagca

SEQ ID NO: 159270 - DNA, 80 bp, synthetic construct
  source 1..80: mol_type = other DNA
atttaagtttgagatgcccaaatttgtttttccctatgcccgctccaaaaccagtgcagtccagaagcttatctgacgag

SEQ ID NO: 159271 - DNA, 80 bp, synthetic construct
  source 1..80: mol_type = other DNA
agtgttgcttggcaggagattccaacatgaaaacaaattacacttcatacgtgaatgcaaatccaggcgagaaggggggc

SEQ ID NO: 159272 - DNA, 80 bp, synthetic construct
  source 1..80: mol_type = other DNA
atgtactattgtcgcattgagaaggccgccgatctgggggtgatggagtgtaaggccagcgcggctctgtcggtgccgcg

SEQ ID NO: 159273 - DNA, 80 bp, synthetic construct
  source 1..80: mol_type = other DNA
cactcttaaaacacaattcatgtgtggtaacaacacaaaatggcaaatttacaggtttaggtatttatgatagagtattg

SEQ ID NO: 159274 - DNA, 80 bp, synthetic construct
  source 1..80: mol_type = other DNA
atctttttactcttaaatcagctggtccctctagcatgtatgtacacgtaggtaatctaatatatagaaacctccatctg

SEQ ID NO: 159275 - DNA, 80 bp, synthetic construct
  source 1..80: mol_type = other DNA
ttacacaaccaacgatgacacttccaagctgtttgcttcgtggaccatcaacgcaaggcgtatggtgcaaatgaggcgta

SEQ ID NO: 159276 - DNA, 80 bp, synthetic construct
  source 1..80: mol_type = other DNA
tctctcaaattagtcaatcaatatctgataaattgacaaggaaagtcatcaagtggcttgtacgcatcatcagtgcactc

SEQ ID NO: 159277 - DNA, 80 bp, synthetic construct
  source 1..80: mol_type = other DNA
ttggcgtgttggctgtgagagctgtcaaccgcagcagcccacatgctattcatacatcggtgagagtctacatgaaacct

SEQ ID NO: 159278 - DNA, 80 bp, synthetic construct
  source 1..80: mol_type = other DNA
agaagagaggcttcccgcctagagcatttgcaagtcaggattctctaatccctctgggagaagggtattcggcttgtccg

SEQ ID NO: 159279 - DNA, 80 bp, synthetic construct
  source 1..80: mol_type = other DNA
aggctatatttagctttgagttagatcctggcaacgggaccgtactaagcaagacattgttgggagagatactgaattac

SEQ ID NO: 159280 - DNA, 80 bp, synthetic construct
  source 1..80: mol_type = other DNA
cctggacaggggctttgggcgcggaggggagcaggctccggagttcatcgtcggaggcttcgtcgcgtgacctggagatg

SEQ ID NO: 159281 - DNA, 80 bp, synthetic construct
  source 1..80: mol_type = other DNA
tcttagaccatacatacttgatgaacaccagggatttgtctcagactatgttacccagcttggcagtgcttttggggagg

SEQ ID NO: 159282 - DNA, 80 bp, synthetic construct
  source 1..80: mol_type = other DNA
ttccatttgcgatagctgaagtgctgttagcatcggtgacagagttagaagaatttgtgatagtggaggcggtggaggta

SEQ ID NO: 159283 - DNA, 80 bp, synthetic construct
  source 1..80: mol_type = other DNA
gctcttatcaaaagaaactgccatattgctaccacagatcgtggtgagttcaacatgctgggcatatatgaccactgtgc

SEQ ID NO: 159284 - DNA, 80 bp, synthetic construct
  source 1..80: mol_type = other DNA
ccatgcttggcaccaacattatctgggacgtaggcctacagtccagttgtgtactctgtgtaccatggatcagccagact

SEQ ID NO: 159285 - DNA, 80 bp, synthetic construct
  source 1..80: mol_type = other DNA
acgcaaggacgaaccaccatcattgaaaccaaggatggaggttgaattccttaagcgcaagccaggttactttccagagt

SEQ ID NO: 159286 - DNA, 80 bp, synthetic construct
  source 1..80: mol_type = other DNA
ttccagatcctggggccccagtacaaaaaacaccttagtattagctccactatggatgatactaacaaacagcactataa

SEQ ID NO: 159287 - DNA, 80 bp, synthetic construct
  source 1..80: mol_type = other DNA
aggctcttagagctttcattcttaaaatgtttctcggcaggcattacagacagaagaaaaggaaagtgcttctgcccgat

SEQ ID NO: 159288 - DNA, 80 bp, synthetic construct
  source 1..80: mol_type = other DNA
catcaagtggacaatcagattaatcagtgctctatcaatcatagtcagaaacagcactgacacccccaccattatagcta

SEQ ID NO: 159289 - DNA, 80 bp, synthetic construct
  source 1..80: mol_type = other DNA
ccagaacaagtataacttatgttcctgataccatccgtcctgaggctcgcacacacggcaggtttggacagcagtcaggg

SEQ ID NO: 159290 - DNA, 80 bp, synthetic construct
  source 1..80: mol_type = other DNA
ctggatcccagaatgggattttgtctcaacaccacctttgataagactagcctataacctagtcaaagaccccctggagg

SEQ ID NO: 159291 - DNA, 80 bp, synthetic construct
  source 1..80: mol_type = other DNA
tatcaactatatataatagaataacagaagaaagtagaaatagaaaagagttaaatacctcattacaggctatcttccaa

SEQ ID NO: 159292 - DNA, 80 bp, synthetic construct
  source 1..80: mol_type = other DNA
accgtggctctagcctccccgtggtggagattgacagcttttattccaacgtctctgactgggaggtgattctctagact

SEQ ID NO: 159293 - DNA, 80 bp, synthetic construct
  source 1..80: mol_type = other DNA
ggacaaaataactgcgggaccgtacggtgggggacacagcactatgagattctccctacaggtgctctacgaggagcacc

SEQ ID NO: 159294 - DNA, 80 bp, synthetic construct
  source 1..80: mol_type = other DNA
tatatcctcaaacacaactagtgtcaacatgtactctctagtgttgacaaaagatgatccagggcacgaggtttttgcaa

SEQ ID NO: 159295 - DNA, 80 bp, synthetic construct
  source 1..80: mol_type = other DNA
gggggggggcagtgaaggaggggcgtggtcctgggaccgcgcgccgactggcaggaggtccccatggcacaggcttgggg

SEQ ID NO: 159296 - DNA, 80 bp, synthetic construct
  source 1..80: mol_type = other DNA
gacaatgtcacatttctgaagagatctttccgcccagataataagtaccctttcttgatacacccagtgtacaacatgac

SEQ ID NO: 159297 - DNA, 80 bp, synthetic construct
  source 1..80: mol_type = other DNA
gtcctaatataagcaagtgcacttccgaatggctgagttttccacgcccgtccgcagcggtggagcagcaaagcagcgac

SEQ ID NO: 159298 - DNA, 80 bp, synthetic construct
  source 1..80: mol_type = other DNA
ccacaaaatggaccctggcttgagagaaactggtatgagtctgtgtatcgttcgcatgctgccttttgtagctgtggtga

SEQ ID NO: 159299 - DNA, 80 bp, synthetic construct
  source 1..80: mol_type = other DNA
ccttggagcaggcagtgtatgggatgaaaaacttagagccattagatctcaccactagtgcaggattcccatatgttaca

SEQ ID NO: 159300 - DNA, 80 bp, synthetic construct
  source 1..80: mol_type = other DNA
ttgccccaactcagagcagcagcaggcactcttcaataatgtccaatactattcacactattgtaagaaatatgcccctc

SEQ ID NO: 159301 - DNA, 80 bp, synthetic construct
  source 1..80: mol_type = other DNA
gcagaaagaaaaggaaactgctactgctacctgtgcgagctaaaccgaaagcacagactcgtagtatgagcttctggcgt

SEQ ID NO: 159302 - DNA, 80 bp, synthetic construct
  source 1..80: mol_type = other DNA
ccctgccagtgctcccgctcgagcaccaccccgcatctcccaacctttttccaataaacgaaaccgacatgacacacgta

SEQ ID NO: 159303 - DNA, 80 bp, synthetic construct
  source 1..80: mol_type = other DNA
tatgacggcagcttacaccctgtttggtttcaagctcttgggagagttctagacaaattgggtttcccaggggatatgat

SEQ ID NO: 159304 - DNA, 80 bp, synthetic construct
  source 1..80: mol_type = other DNA
ggatcccagaatgggactttgtctcaaccccaccattggtaaggctagcctacaacctagtcaaggaccccctagaaaag

SEQ ID NO: 159305 - DNA, 80 bp, synthetic construct
  source 1..80: mol_type = other DNA
ggtgagtgctgggaagtctcaaagaatgggagagattgggaaaccttaaaattgaaggatctggtggacaaaataacatt

SEQ ID NO: 159306 - DNA, 80 bp, synthetic construct
  source 1..80: mol_type = other DNA
gtcgccggtgtgttcgtatatggaggtagtaagacctccctttacaacctcaggcgaggaattggccttgctattccaca

SEQ ID NO: 159307 - DNA, 80 bp, synthetic construct
  source 1..80: mol_type = other DNA
agggtttgtcccgttggatctgagagctttaaaaacccttaatttggtactactattaaacagtgtaaaatgggagctca

SEQ ID NO: 159308 - DNA, 80 bp, synthetic construct
  source 1..80: mol_type = other DNA
aacagctttattctccaagtacaagggaaacaacacatgccagatgaatgatcacattagagttgctgttgcacattact

SEQ ID NO: 159309 - DNA, 80 bp, synthetic construct
  source 1..80: mol_type = other DNA
ggtatggaatctcacagaccaatgacatgggaaccttgtgcatacgtgcactagatgacaccaagagaaatgatgtaaaa

SEQ ID NO: 159310 - DNA, 80 bp, synthetic construct
  source 1..80: mol_type = other DNA
tctcaagcttttaatagcatatacaccaccaggcataatcaagcccaggaacaggaaagaagcaatgctagggacacaca

SEQ ID NO: 159311 - DNA, 80 bp, synthetic construct
  source 1..80: mol_type = other DNA
gtggtgggaaattattatgtaaacatggtgttattggcatagtaacagctggtggtgacaatcatgtggccttcatcgat

SEQ ID NO: 159312 - DNA, 80 bp, synthetic construct
  source 1..80: mol_type = other DNA
gagtaaaacctacgttggtaggtcacgtaggtacggtttattgcgacggtctttcttttccgcgtgtcgggtgacgtagt

SEQ ID NO: 159313 - DNA, 80 bp, synthetic construct
  source 1..80: mol_type = other DNA
ccacaaaggacatatggtaggataggccaacagtccgggggtatttatgtaggtaacttcagagtggtaaccagacatct

SEQ ID NO: 159314 - DNA, 80 bp, synthetic construct
  source 1..80: mol_type = other DNA
caatgggaagaacaaatccgctacctagaggcaaatatcagtgcgagcttagaacaagcacaaattcagcaagagaagaa

SEQ ID NO: 159315 - DNA, 80 bp, synthetic construct
  source 1..80: mol_type = other DNA
cattgtggcgcgcaattatgaagactccattaccgtgttagccaccctcagccttttgggatgtgatgcttcgccatggc

SEQ ID NO: 159316 - DNA, 80 bp, synthetic construct
  source 1..80: mol_type = other DNA
gtggtagatacatttgttaagttcaaagctaaacataatacagaaatgtcattttgtgggtttcattggcactcatggag

SEQ ID NO: 159317 - DNA, 80 bp, synthetic construct
  source 1..80: mol_type = other DNA
ctgtacccaataccaatcaaacttccccagagcactcgaaggaggtccctgcacttacagcagtggaaactggagctacc

SEQ ID NO: 159318 - DNA, 80 bp, synthetic construct
  source 1..80: mol_type = other DNA
tttgctaaacccaaacacacctcagcctggataccacgcccacctcgagccgtgcaatacctacacagatttagcactaa

SEQ ID NO: 159319 - DNA, 80 bp, synthetic construct
  source 1..80: mol_type = other DNA
agtttagggataggaatagtggtgattacttatccttagccacagtatataatagaattacccaagaaagcaaaaacagg

SEQ ID NO: 159320 - DNA, 80 bp, synthetic construct
  source 1..80: mol_type = other DNA
ggtctgagtcttcaatagagaactttctgtgtcgagcagcgtgtgccaccattgtcacctataacactaacatcaatgac

SEQ ID NO: 159321 - DNA, 80 bp, synthetic construct
  source 1..80: mol_type = other DNA
ctaatgacgccaccttggttatcaatactgaacacatgcctagcatgtttgtgccagttggtgatgtggttcaatacggg

SEQ ID NO: 159322 - DNA, 80 bp, synthetic construct
  source 1..80: mol_type = other DNA
aggttgactcggtaatgcctatcaacaacataggcgaagcagtaaaccgcatggatgcatacagagtggagattaccaac

SEQ ID NO: 159323 - DNA, 80 bp, synthetic construct
  source 1..80: mol_type = other DNA
ggatgcagcagaaactggacacactagtggaatacagcctgaggatactatagaaacaagatatgtgcagacttcacaaa

SEQ ID NO: 159324 - DNA, 80 bp, synthetic construct
  source 1..80: mol_type = other DNA
ctgtttaagagaaagagacgctttaagagacgcagacgaaaagctaagataaaaataactcagtggcagcctagctcagt

SEQ ID NO: 159325 - DNA, 80 bp, synthetic construct
  source 1..80: mol_type = other DNA
gaggcttctataaacactatggcttaatcgtaggtgattttgtctatcaattagactcagatgacatctttaagacagct

SEQ ID NO: 159326 - DNA, 80 bp, synthetic construct
  source 1..80: mol_type = other DNA
agtcaaagatgttttagaaaagggaattccaacactacaatcaccatctgttgaagcctgtggttattcagataggatta

SEQ ID NO: 159327 - DNA, 80 bp, synthetic construct
  source 1..80: mol_type = other DNA
acagattaatgtttcagactttacagaacagcctaaaatcccccgacttttccccccagtcgaactcaaagaaagggaag

SEQ ID NO: 159328 - DNA, 80 bp, synthetic construct
  source 1..80: mol_type = other DNA
atttacttgctatcacacgaaatgattatcttttgctgctaacgtactgaattttttaacagaattgcttctccgtaact

SEQ ID NO: 159329 - DNA, 80 bp, synthetic construct
  source 1..80: mol_type = other DNA
aagaaaaacagaaagtgtgtagagcacaatctcactgccatatttcagggattgggagatgattcaacaccaggattcat

SEQ ID NO: 159330 - DNA, 80 bp, synthetic construct
  source 1..80: mol_type = other DNA
ccagggaatagccccgtgcttaaccgtaccctgcttggtgagattataaactattatgcacactggtcaggtagtataaa

SEQ ID NO: 159331 - DNA, 80 bp, synthetic construct
  source 1..80: mol_type = other DNA
gataaaagtagcccaattgttctctgtcatgtcagacactaccacaccttctgctagccatggagtagataaatacggtt

SEQ ID NO: 159332 - DNA, 80 bp, synthetic construct
  source 1..80: mol_type = other DNA
aagacccaaaagttatacagtattgtgaagaccaaggcctaattgttcaaaccacctcaaccatagaaaggcacatagat

SEQ ID NO: 159333 - DNA, 80 bp, synthetic construct
  source 1..80: mol_type = other DNA
taagttcttgatggcatacacccctccaggaggtggattgcccacaactaggaaagaggctatgctaggcgtccatgttg

SEQ ID NO: 159334 - DNA, 80 bp, synthetic construct
  source 1..80: mol_type = other DNA
accttaaacccggatccatgctatgcaaaccagcatagttatggtcgtaatgggcaactctgggatgggaccgactactt

SEQ ID NO: 159335 - DNA, 80 bp, synthetic construct
  source 1..80: mol_type = other DNA
gttgcacactatgcagcgcaattatcaacactggatataaatcctcagcccctttcattagaagagagtgtgtttggcat

SEQ ID NO: 159336 - DNA, 80 bp, synthetic construct
  source 1..80: mol_type = other DNA
tgcttgcatggcacaatggtgaggaggtgtatgaggattttcgctcgaaaattagatcaacacctattgggcggtcctta

SEQ ID NO: 159337 - DNA, 80 bp, synthetic construct
  source 1..80: mol_type = other DNA
cttaaatgccagtggaaactcagttatacattacacaaatatcaattattacaaagattcagcctctaattcgttgaacc

SEQ ID NO: 159338 - DNA, 80 bp, synthetic construct
  source 1..80: mol_type = other DNA
gtttacccttaatcttaccggggacctcgttgtcctctcccccttcttcctcggacaccgggcttcatgctgacgtaggt

SEQ ID NO: 159339 - DNA, 80 bp, synthetic construct
  source 1..80: mol_type = other DNA
aagcatgtgtgaaccccgccaataaaccactgctgctacactgattcttaggccgtgggagtctcactggtcggtgtcta

SEQ ID NO: 159340 - DNA, 80 bp, synthetic construct
  source 1..80: mol_type = other DNA
agtgccatatatgaacacactaccttttgactccgccttgaaccattgtaattttgggttgttggtagtacccatcagcc

SEQ ID NO: 159341 - DNA, 80 bp, synthetic construct
  source 1..80: mol_type = other DNA
agtggctgtctcccgagagaaagccagcccctgcccctagctctggagactgggccacagagtacctagcagctagagtg

SEQ ID NO: 159342 - DNA, 80 bp, synthetic construct
  source 1..80: mol_type = other DNA
tttgttattaccagtattcaagaacaagggactgccttaacacaggacatgcccgtactgactcaccaaatcatgtatgt

SEQ ID NO: 159343 - DNA, 80 bp, synthetic construct
  source 1..80: mol_type = other DNA
aagatgctcgactccaggtcgattttaatgaagcactgttttccaaatacaaaggaaacacgaactgctctatgaatgat

SEQ ID NO: 159344 - DNA, 80 bp, synthetic construct
  source 1..80: mol_type = other DNA
ccacaattattgtcccctatgtaaatgcagttcctatggattcgatggttaggcataataactggagtcttgttataata

SEQ ID NO: 159345 - DNA, 80 bp, synthetic construct
  source 1..80: mol_type = other DNA
gggagatacaatttgctttaacgttagtaacaacccctgcaacttttccagttattggaatcacaataattgtgaacttt

SEQ ID NO: 159346 - DNA, 80 bp, synthetic construct
  source 1..80: mol_type = other DNA
gacaaagacagaattggcactgtatttaatacatttaaaacagaagaacacattaaacagccaccaattgtacagcaaaa

SEQ ID NO: 159347 - DNA, 80 bp, synthetic construct
  source 1..80: mol_type = other DNA
gccagctgcaccgaagaaacggcctgcgagtgctatgacctggagaccccccgtacacaacccagatgggatccagagaa

SEQ ID NO: 159348 - DNA, 80 bp, synthetic construct
  source 1..80: mol_type = other DNA
gtcttgaccggtaaggcggaaaaagaagcgtgctaccagctgcaggcaggtatgccgcgtctgctggaagagcacgaagg

SEQ ID NO: 159349 - DNA, 80 bp, synthetic construct
  source 1..80: mol_type = other DNA
atgtgtggaggtttactcatctccaaggtagaaggaaatttcaaaattttgggaatgcacattgcaggaaacggagaaat

SEQ ID NO: 159350 - DNA, 80 bp, synthetic construct
  source 1..80: mol_type = other DNA
agaaacaaggccaagtaatagctagacataaggttagggagtttaacataaatccagtcaacacgccaaccaagtcaaaa

SEQ ID NO: 159351 - DNA, 80 bp, synthetic construct
  source 1..80: mol_type = other DNA
gacaatcctgtcgtacaaccagcacaaacactagctgaagcaaaaactatactaattaaaaacatggaaaactggcacca

SEQ ID NO: 159352 - DNA, 80 bp, synthetic construct
  source 1..80: mol_type = other DNA
gcgctctagcatgtcgcgaccgatgcgcgtgatgctggcggcgatgggcagacacggcatcatgccgttgaccacgccgg

SEQ ID NO: 159353 - DNA, 80 bp, synthetic construct
  source 1..80: mol_type = other DNA
cggcttttgcggcgtcggcgttttcgggaagggcctgggcgtcaccggcggtgtccagccgaccggcttgggtttcgtgg

SEQ ID NO: 159354 - DNA, 80 bp, synthetic construct
  source 1..80: mol_type = other DNA
aatggcggcgacagccttccgctttgcacaaaatggcggtgtttatcttccgggtcaaaggtcacgcctacgtcataagt

SEQ ID NO: 159355 - DNA, 80 bp, synthetic construct
  source 1..80: mol_type = other DNA
acaaatcacagtttattacacccaccaactataacatgcacaccagctatgaataggagattctttttagatctggatat

SEQ ID NO: 159356 - DNA, 80 bp, synthetic construct
  source 1..80: mol_type = other DNA
cctaagaggtcaaaacttctggactaaaagcaacgaagacttagaccttgctagattcaaatacagtagatggaaattct

SEQ ID NO: 159357 - DNA, 80 bp, synthetic construct
  source 1..80: mol_type = other DNA
agactgagacgcagacgtaggtacaggaaaaagagaatagtactgactcagtggaacccccagactgtaagaaagtgtat

SEQ ID NO: 159358 - DNA, 80 bp, synthetic construct
  source 1..80: mol_type = other DNA
ctggtctcgccacagagggcctcgagacccggcccctcaaagatggggggaaccatatgggcattgtggaacacgtagat

SEQ ID NO: 159359 - DNA, 80 bp, synthetic construct
  source 1..80: mol_type = other DNA
tgaacagtcaagaggtaccagctcttaccgcggttgaaaccggcgcttcaggacaggctgttccgtctgacgtggttgag

SEQ ID NO: 159360 - DNA, 80 bp, synthetic construct
  source 1..80: mol_type = other DNA
tttggaaacgaagctgccggagaaccacgagaggtgcccgggcatctttacggggctctttgtccccgagctcttcttca

SEQ ID NO: 159361 - DNA, 80 bp, synthetic construct
  source 1..80: mol_type = other DNA
caaaggtcatcctcgggcggaacttacactaaatggcggacaatctcttccgggtcaaaggtcacacctacgtcataagt

SEQ ID NO: 159362 - DNA, 80 bp, synthetic construct
  source 1..80: mol_type = other DNA
ccaaagtaaaatagacacctttgaaaagtggctatatggcaaatgctcacactatcaagcttttgccactgaagcccacc

SEQ ID NO: 159363 - DNA, 80 bp, synthetic construct
  source 1..80: mol_type = other DNA
gccatctctggattgaagtacgggttgacaataacccctgcagataagtccagccagtttacaaaaattgactggactaa

SEQ ID NO: 159364 - DNA, 80 bp, synthetic construct
  source 1..80: mol_type = other DNA
agagtgactaatttgttagaattaatacaggtggacaccatgatgccaataaataatttgacagatacagatgatgttaa

SEQ ID NO: 159365 - DNA, 80 bp, synthetic construct
  source 1..80: mol_type = other DNA
tggctaactaaaaatgactcatcctactcaaaaacaagtagcaagtgcctcatagaaaacttacccctgtgggcctcagt

SEQ ID NO: 159366 - DNA, 80 bp, synthetic construct
  source 1..80: mol_type = other DNA
acaacgcatgcagatgtgtaatagaagacatgccattatgggctatggtaaatggctacttagaattctgtgactcagag

SEQ ID NO: 159367 - DNA, 80 bp, synthetic construct
  source 1..80: mol_type = other DNA
ttcctagtaagagtaaggacctcaccaccctttacagacacagacatgacagcactaacactacatccaggcatgatgat

SEQ ID NO: 159368 - DNA, 80 bp, synthetic construct
  source 1..80: mol_type = other DNA
caatcccacctgaccccccagtttgtcagaatgcccaccaaaaatcctgacaatactgacaacacggaagctactaattt

SEQ ID NO: 159369 - DNA, 80 bp, synthetic construct
  source 1..80: mol_type = other DNA
cttaaacaatggaaactctacaacatcaaaaccaacatcagtagaacccatcattaaaatactagtagaaaatatgaaaa

SEQ ID NO: 159370 - DNA, 80 bp, synthetic construct
  source 1..80: mol_type = other DNA
ttcaccccaccaaacagatccatatacctggtgaaatcaagacaatcatggatatagcccgggtggattcgtttatgcct

SEQ ID NO: 159371 - DNA, 80 bp, synthetic construct
  source 1..80: mol_type = other DNA
gtacagctgtcccaactaccacccgggtaacctcatcaaggcaaaacacaaatttttaatccccagctatgacactaatc

SEQ ID NO: 159372 - DNA, 80 bp, synthetic construct
  source 1..80: mol_type = other DNA
ccccttggtagaaactttcttgcgagataaaaggagtgtcctttagtagacgtaccgaaaagtcgttgcatgcagaaacc

SEQ ID NO: 159373 - DNA, 80 bp, synthetic construct
  source 1..80: mol_type = other DNA
gtgcttgtgtcccgcaacactccctcagccctgtcccgtgccggaccggcggaacgaaaaataccgtcggacgacacgcc

SEQ ID NO: 159374 - DNA, 80 bp, synthetic construct
  source 1..80: mol_type = other DNA
tgcgtaccatggatcagccaaaccaattataggtacgtcactagtgatgcctacaccgacgctggctatgtcacctgctg

SEQ ID NO: 159375 - DNA, 80 bp, synthetic construct
  source 1..80: mol_type = other DNA
gtactttagacactccagctccatggcgtattcgttgcatttcgaacacactacgcatagtttctgtaacaaattcatct

SEQ ID NO: 159376 - DNA, 80 bp, synthetic construct
  source 1..80: mol_type = other DNA
cgatgcaggagcgtctaacaaatatggttactcatcaatcaatgactttggcacgttagcagtgagaattgtaaatgaat

SEQ ID NO: 159377 - DNA, 80 bp, synthetic construct
  source 1..80: mol_type = other DNA
gagaatttaaatcacaatatataccaggtggaactactgaagatgcgcggatgtttagtcccattgactatttgtttgga

SEQ ID NO: 159378 - DNA, 80 bp, synthetic construct
  source 1..80: mol_type = other DNA
cagattgcaagtgccttacatggcaatgtgaatgttggttacaactacacacacccaggtgaaacaggcagggaagttaa

SEQ ID NO: 159379 - DNA, 80 bp, synthetic construct
  source 1..80: mol_type = other DNA
tattgtggatttgctggcctcatctaaagaccccaaggtgattaaatactgtgaggaaaatggcctcatatcccaggcaa

SEQ ID NO: 159380 - DNA, 80 bp, synthetic construct
  source 1..80: mol_type = other DNA
ttcaggccatgagtgaaagtgccaccattgtctacaacgaaagagagtttgtgaacaggtacttgcaccacatcgctgtg

SEQ ID NO: 159381 - DNA, 80 bp, synthetic construct
  source 1..80: mol_type = other DNA
agctcagaaggaaaatggaaatgttcacgtatctgcgctttgatgtggaggtcacgtttgcgatcactagttcgcaagat

SEQ ID NO: 159382 - DNA, 80 bp, synthetic construct
  source 1..80: mol_type = other DNA
aagctttagactaggttttaaaccccaataaaaattcaaggccgtgggatattcacttgtcggtgtctgcttattaaggt

SEQ ID NO: 159383 - DNA, 80 bp, synthetic construct
  source 1..80: mol_type = other DNA
cacgtggcttccagagaggcgcagcccagccctccgcagccgctgaagccaggctcgcggaagagcccaaaacctgtttc

SEQ ID NO: 159384 - DNA, 80 bp, synthetic construct
  source 1..80: mol_type = other DNA
tgctgcaccgttttcatcagccgcataatcaccgtaccgtaacccggtgtatgcaacttcacgtcgcaacccaggattcg

SEQ ID NO: 159385 - DNA, 80 bp, synthetic construct
  source 1..80: mol_type = other DNA
tctcctctccagaggccatagacagaagattctttctagattgtgatgtgaagattatgccagcatttaacactaatagt

SEQ ID NO: 159386 - DNA, 80 bp, synthetic construct
  source 1..80: mol_type = other DNA
ctatggaaacccaaaaacaccaggggctaccgcacatggctagggtggattcattcatgccaatacataatatatcaaca

SEQ ID NO: 159387 - DNA, 80 bp, synthetic construct
  source 1..80: mol_type = other DNA
gaagaaaattagaaatgttcacatacttaagatttgacttggaagtgacatttgtcatcacaagtgctcaggtcacctcc

SEQ ID NO: 159388 - DNA, 80 bp, synthetic construct
  source 1..80: mol_type = other DNA
gtagtcgtgcgcatccgagaggatggcacggtccagaagcagatagccggccaggcagaggaaggccacgaagaggtggc

SEQ ID NO: 159389 - DNA, 80 bp, synthetic construct
  source 1..80: mol_type = other DNA
tgttcctgcataagtggtacacccagcaggacctctgcccagttccgttaatccaactgaacgtgaccgcagcggatatg

SEQ ID NO: 159390 - DNA, 80 bp, synthetic construct
  source 1..80: mol_type = other DNA
ttcacaacattggcgagggcgcagcgctcggctaccccgtcccccgcgcggaaatccgccgtggcggtggcgactgggcc

SEQ ID NO: 159391 - DNA, 80 bp, synthetic construct
  source 1..80: mol_type = other DNA
acaagacccggtcagtgtggtggagtgattgtcaatacaggaaacattgttgccatacatgtgggggggaatgggcgtgt

SEQ ID NO: 159392 - DNA, 80 bp, synthetic construct
  source 1..80: mol_type = other DNA
atcaatgagagtcaccctagtacttcaaattcagctcctgcattggacgctgcagagacaggacacacaagtactgttca

SEQ ID NO: 159393 - DNA, 80 bp, synthetic construct
  source 1..80: mol_type = other DNA
ggccttccggcttacacaaaatggaggtcaattactaccgggtcaaaggtcacagctacgtcacgaatcacgtggggagg

SEQ ID NO: 159394 - DNA, 80 bp, synthetic construct
  source 1..80: mol_type = other DNA
ggagtacaacggccttcgcttaggcgggcaccaagggctgccgaccatgaacaccccaggtagcacgcagttcttaacct

SEQ ID NO: 159395 - DNA, 80 bp, synthetic construct
  source 1..80: mol_type = other DNA
ggccctgctgtggctgctgtactgtggaccgcgaagcttttgcgcgcgtgacacctgtttcggtcgcgaaaagaacggct

SEQ ID NO: 159396 - DNA, 80 bp, synthetic construct
  source 1..80: mol_type = other DNA
ccgagaacccgccggctctaagacgtctggtgcctctgcccgcgctacccccggccgataaccagccatggcctggttgg

SEQ ID NO: 159397 - DNA, 80 bp, synthetic construct
  source 1..80: mol_type = other DNA
caccgcgcctatgtgattacaaacacaagaaaaacgttgatttcacgcccacaggagtgaccaccacaagagagaaaata

SEQ ID NO: 159398 - DNA, 80 bp, synthetic construct
  source 1..80: mol_type = other DNA
gagtaccatacgactaatagtgaccaaaccaaactgtttgcatcgtggaccataagcgcacggcgcatggttcagatgag

SEQ ID NO: 159399 - DNA, 80 bp, synthetic construct
  source 1..80: mol_type = other DNA
cagctaaacaacactttacaactaatttattttcaatattacaatactatgacacctttcaaaccatagctcaaattaaa

SEQ ID NO: 159400 - DNA, 80 bp, synthetic construct
  source 1..80: mol_type = other DNA
aggactagtaacaaacggaacaggcacacaaaatttatggcaacaagtacaaaacacaactgcactgtcatcaattggta

SEQ ID NO: 159401 - DNA, 80 bp, synthetic construct
  source 1..80: mol_type = other DNA
caaaagtaaaacttagtaaatcaaggttcactaagaaaattctgtccatgtcaactaaatacaaatggactaggaacaaa

SEQ ID NO: 159402 - DNA, 80 bp, synthetic construct
  source 1..80: mol_type = other DNA
gggccagacgcagacgcagacccagaaagaaactgctactgtctatgtggcagccccagactataaggagatgcactata

SEQ ID NO: 159403 - DNA, 80 bp, synthetic construct
  source 1..80: mol_type = other DNA
gcccgtgtggctacagagcagatggtaccccagactagtgtttcagcagcaggtgctacacgatatctacctcacaggtc

SEQ ID NO: 159404 - DNA, 80 bp, synthetic construct
  source 1..80: mol_type = other DNA
tggaaattttattcatcacattaatactctggctactcgctacggctttgtacctggcgccccgccgcctggtggtccaa

SEQ ID NO: 159405 - DNA, 80 bp, synthetic construct
  source 1..80: mol_type = other DNA
gcagagtggtcccataacacaaaacccagttgaaaattatgtggatgagatattaaatgaggttcttgtagtgccaaaca

SEQ ID NO: 159406 - DNA, 80 bp, synthetic construct
  source 1..80: mol_type = other DNA
aatcctagtactgaagagtcagagggaaggaagtttgcagccctcgactatctgcttggttgtggggtcttggcgtggaa

SEQ ID NO: 159407 - DNA, 80 bp, synthetic construct
  source 1..80: mol_type = other DNA
gataagtccctacacatttcccatgatgtacaaacagtcagaccccacgtacgggtacgtgccagtaagctacagattca

SEQ ID NO: 159408 - DNA, 80 bp, synthetic construct
  source 1..80: mol_type = other DNA
gatccaagagagtgaatattaccctaaacatatacaatacaatttattaataggggaaggtccatgtgagcctggtgact

SEQ ID NO: 159409 - DNA, 80 bp, synthetic construct
  source 1..80: mol_type = other DNA
acttcgggctcgcggggtcagtgtcggtggtcgccataggcttcgacctccattttaccctgtaaaaactaccaaaatgg

SEQ ID NO: 159410 - DNA, 80 bp, synthetic construct
  source 1..80: mol_type = other DNA
ttatgcacatcagagctgctaaagcttatagtaaggcaggaaaacttaatgtgagtcaagctatggctaccatgtcaact

SEQ ID NO: 159411 - DNA, 80 bp, synthetic construct
  source 1..80: mol_type = other DNA
aacgaagatcagccaaaacctctgaggtctgttcttaaaacggcgtatgatgaattgattaaacccggtaataaacccga

SEQ ID NO: 159412 - DNA, 80 bp, synthetic construct
  source 1..80: mol_type = other DNA
tagattttcattaccattccttagtatagcatctgcatattacatgttttatgatggatatgatggtgactctacacaat

SEQ ID NO: 159413 - DNA, 80 bp, synthetic construct
  source 1..80: mol_type = other DNA
tacactcagcaggacctgtgtgaggttaatctgttgcaactgtccgttactgcggctgactttcgccacccatggatttc

SEQ ID NO: 159414 - DNA, 80 bp, synthetic construct
  source 1..80: mol_type = other DNA
accaaccaggattttagatatggtatctgtcccaacaacctcatggggaccttctgtgttaggatacttggatcagactc

SEQ ID NO: 159415 - DNA, 80 bp, synthetic construct
  source 1..80: mol_type = other DNA
atgggcgcccaagtttcaacagaaaaatctgggtcgcacgagacaaagaatgtagcgaccgaagggtctactatcaactt

SEQ ID NO: 159416 - DNA, 80 bp, synthetic construct
  source 1..80: mol_type = other DNA
caataatagttccttatgttaatgctgttccaatggactcaatgttaagacacaacaactggagtctagttataattcca

SEQ ID NO: 159417 - DNA, 80 bp, synthetic construct
  source 1..80: mol_type = other DNA
tttcaatttggttgaagatagaattaggcctgctattgctgagaaaaccatatggtcattagttgcatggcaaaggaaca

SEQ ID NO: 159418 - DNA, 80 bp, synthetic construct
  source 1..80: mol_type = other DNA
tagaggaccgtgtagctaaatatccctttgggggcggacacgcgaccaccaggtggtcactaaaagttctgtacgaagag

SEQ ID NO: 159419 - DNA, 80 bp, synthetic construct
  source 1..80: mol_type = other DNA
gcacaagtctcgtctcagaaggtaggagcccatgaaaacaccaatgtggccactggtggctccacggtgaattacacaac

SEQ ID NO: 159420 - DNA, 80 bp, synthetic construct
  source 1..80: mol_type = other DNA
cctcagcatctccgaattctgtttcgctgccgtctgccaggtcgtcatccacacgaaccaccacgcccgcgtccacgtac

SEQ ID NO: 159421 - DNA, 80 bp, synthetic construct
  source 1..80: mol_type = other DNA
aaggtgctccggcattgaactcacctaatgtcgaggcgtgtggatacagtgatagggtacaacaaataactttgggcaat

SEQ ID NO: 159422 - DNA, 80 bp, synthetic construct
  source 1..80: mol_type = other DNA
tatactttaaaccaaagcacatcagagcatgggtgcccagaccacctaggctgtgtcaatatgagaaacagggaagtgtc

SEQ ID NO: 159423 - DNA, 80 bp, synthetic construct
  source 1..80: mol_type = other DNA
acatgatgggaagcaacactacagatggaaagggaaccatagtttacaaaaatgccaatccgggtgagacaggaggtacg

SEQ ID NO: 159424 - DNA, 80 bp, synthetic construct
  source 1..80: mol_type = other DNA
cagtttgtgcacacccaggaatatgtttatagaaatgcccatctagccacccctggcgataaaactgtattgttatcata

SEQ ID NO: 159425 - DNA, 80 bp, synthetic construct
  source 1..80: mol_type = other DNA
atccgttctgccgaccactaactgaaaacccttgcgtcaccttccaagttctgcaaaatttctataacaatgttataggc

SEQ ID NO: 159426 - DNA, 80 bp, synthetic construct
  source 1..80: mol_type = other DNA
ttttggaaaacgtacgtgatcacggacacgacgagcacggggtttctcatagacgtactttattaggtcagggatgacgg

SEQ ID NO: 159427 - DNA, 80 bp, synthetic construct
  source 1..80: mol_type = other DNA
gttgttcccacctggacttcctatgtggagttgtacactgttatcccggtaaccttgtacgccagttttatacacccttc

SEQ ID NO: 159428 - DNA, 80 bp, synthetic construct
  source 1..80: mol_type = other DNA
ttgcccccctggcggcccagcccgacccccgggcgcccccaaactttgtccagatgtccagtggtccccgagggcgaggc

SEQ ID NO: 159429 - DNA, 80 bp, synthetic construct
  source 1..80: mol_type = other DNA
ttgagacgcagacgcagactaaaacgaaagaaaaaaattaatattactcagtggaacccctccactgttaaaaaatgtgt

SEQ ID NO: 159430 - DNA, 80 bp, synthetic construct
  source 1..80: mol_type = other DNA
tggagtacttgctggaaatataacagtgtttccacatcagatcataaatctgagaactaacaactgtgctacattagttt

SEQ ID NO: 159431 - DNA, 80 bp, synthetic construct
  source 1..80: mol_type = other DNA
ggcgtgtggcggtgtgaggggcggcatgccgttggcggcgccgggaataatgtgccgtcgaccgacgtcgcacaccttga

SEQ ID NO: 159432 - DNA, 80 bp, synthetic construct
  source 1..80: mol_type = other DNA
agaaaggggacaatgatctcattgtagtcatcccactgcagatggataatacattgtttgccacaaccctccttggtgag

SEQ ID NO: 159433 - DNA, 80 bp, synthetic construct
  source 1..80: mol_type = other DNA
accaccacagtaaatgaaatacatggcacatatggaaagcctacttacaatgcagtagaataccacctaggaaagtacag

SEQ ID NO: 159434 - DNA, 80 bp, synthetic construct
  source 1..80: mol_type = other DNA
tggctaaatatgagacaaagggcaaccccgagagcactgatcgctttgatgcgtgggagataagcatacgcgacatggtc

SEQ ID NO: 159435 - DNA, 80 bp, synthetic construct
  source 1..80: mol_type = other DNA
ccaaaactccattcaatgtaacctttaagctaggcttcaaataaacaaggccgtgggagtttcacttgtcggtgtctgct

SEQ ID NO: 159436 - DNA, 80 bp, synthetic construct
  source 1..80: mol_type = other DNA
aatatgtgactggttgggtatacaacgacccccaaaaagacagggtgattcatggctacgaaaatttacagagtgctgta

SEQ ID NO: 159437 - DNA, 80 bp, synthetic construct
  source 1..80: mol_type = other DNA
tggttatagtaccactggtcccactacggtttgggaatagtggtgccaatacactaccaatcacaatatctattgcacca

SEQ ID NO: 159438 - DNA, 80 bp, synthetic construct
  source 1..80: mol_type = other DNA
ttgagtggatgaaatctatgttaccccaagctcaattgaaagtcaaatacttgagtgaattgaagaagttgaatttcttg

SEQ ID NO: 159439 - DNA, 80 bp, synthetic construct
  source 1..80: mol_type = other DNA
agttttaggcatacatgttgggggaaatggtagggatggattttctgcaatgttactaaggtcatattttactgaacaac

SEQ ID NO: 159440 - DNA, 80 bp, synthetic construct
  source 1..80: mol_type = other DNA
gtcgcgtcttgatgtaatgtaacctgaaaccgccgtgtccaagaatgcggaagccagcgtgtaatcataacggggttttg

SEQ ID NO: 159441 - DNA, 80 bp, synthetic construct
  source 1..80: mol_type = other DNA
ggcagcttaaagtatatgtgtggacaccattatcagttccaagtggagcctccagtgatgtggatgttacagtattgggc

SEQ ID NO: 159442 - DNA, 80 bp, synthetic construct
  source 1..80: mol_type = other DNA
ggtatacatgtttaacaccagcactcctaaaaaaatatcaggctatgaggcctggaaagatgaatatgagtgctgcaaac

SEQ ID NO: 159443 - DNA, 80 bp, synthetic construct
  source 1..80: mol_type = other DNA
gttggtgttagaacaaacttggcagaggaagtgtttgctataccagtagatgtagcagcgcaaccactggcaacaacttt

SEQ ID NO: 159444 - DNA, 80 bp, synthetic construct
  source 1..80: mol_type = other DNA
aaagactcaggttcgcagacggagagcatcagcagctcccaagaaaaagaagcacaaaagcaagcggcgctaccagtcca

SEQ ID NO: 159445 - DNA, 80 bp, synthetic construct
  source 1..80: mol_type = other DNA
taacaccgtatatggacattcccggcgaggtgcacaacttgatggagatcgcggaggtggattcggttgttcctgtaaac

SEQ ID NO: 159446 - DNA, 80 bp, synthetic construct
  source 1..80: mol_type = other DNA
actgtaaaaagaaaaactggattattccccagatccccactaatatcgagagggctgtgaaccaggctagcatgataatt

SEQ ID NO: 159447 - DNA, 80 bp, synthetic construct
  source 1..80: mol_type = other DNA
gacaattcaataaggtgtggttccaatacagcacaaaacccaccacagagttcaacaccactcaatgcaaatgtgttata

SEQ ID NO: 159448 - DNA, 80 bp, synthetic construct
  source 1..80: mol_type = other DNA
ggtctgagtggtctattagcatggtctacatcataatataataaggcgcacttccgaatggctgagttttccacgcccgt

SEQ ID NO: 159449 - DNA, 80 bp, synthetic construct
  source 1..80: mol_type = other DNA
gcagactgcaacttcaatgagacacagtccaaaggagtaataaaagacattccactgtgggcagcactgtttggctatgt

SEQ ID NO: 159450 - DNA, 80 bp, synthetic construct
  source 1..80: mol_type = other DNA
aaagtcactaagcactccgagcgtcagcgaggagtgcgacccttccccctgactcaacttcttcggagccgcgcgctacg

SEQ ID NO: 159451 - DNA, 80 bp, synthetic construct
  source 1..80: mol_type = other DNA
cactttcctgaaaaggaaatttaaagttgaccatgaatttaaatttctgatacacccagtttacagtatggatgatgtgt

SEQ ID NO: 159452 - DNA, 80 bp, synthetic construct
  source 1..80: mol_type = other DNA
aattaccacccagtcataggcacttcctcaaaagacttagaaaatgtcactccatttgaaaactggctatatacaaatcc

SEQ ID NO: 159453 - DNA, 80 bp, synthetic construct
  source 1..80: mol_type = other DNA
acttctgtttccccgggcgtgtgaatagactccaacagggttgaagctgtagcgctcgttatccgcacaactactacgcg

SEQ ID NO: 159454 - DNA, 80 bp, synthetic construct
  source 1..80: mol_type = other DNA
acacagcacgcaaggccatcaacagtgctgcaaacattgagtccgcggccaacactgtcccaagttcacatcggttggag

SEQ ID NO: 159455 - DNA, 80 bp, synthetic construct
  source 1..80: mol_type = other DNA
cgcacagctccgaagcgtaacacagtggcgtgcggctttcacgcgcccagttggctttgaaataaaagcgacccaacagc

SEQ ID NO: 159456 - DNA, 80 bp, synthetic construct
  source 1..80: mol_type = other DNA
taccctaccttaaggtgcgccacccttcctccttccgttttaatggtagaataacctataggttattaacctagtggtgg

SEQ ID NO: 159457 - DNA, 80 bp, synthetic construct
  source 1..80: mol_type = other DNA
cacagctgacatacgcacctacggatttggtcaccagaacaaggccgtgtatgttgccgggtacaaaatatgtaattacc

SEQ ID NO: 159458 - DNA, 80 bp, synthetic construct
  source 1..80: mol_type = other DNA
gattgtacagaagccacatattattgcagacataagaatagatactacccaattaaagtaactagtcatgattggtatga

SEQ ID NO: 159459 - DNA, 80 bp, synthetic construct
  source 1..80: mol_type = other DNA
cttctggtggccgggccagagaccgctgacacgaggccggacctccgcaagctgaatgagtgggtgtttggtggcagggc

SEQ ID NO: 159460 - DNA, 80 bp, synthetic construct
  source 1..80: mol_type = other DNA
gacctgttcaaagaatacaagctgactaagccgtacatggcaacgtgtgcacggtgcgccgtaggtagctgccagagccc

SEQ ID NO: 159461 - DNA, 80 bp, synthetic construct
  source 1..80: mol_type = other DNA
aaattccaagttaacaatgaactatggcagggagtcaaagcatgtgttaagtccaaattcagagaaatttttggcatgaa

SEQ ID NO: 159462 - DNA, 80 bp, synthetic construct
  source 1..80: mol_type = other DNA
aacaccgcgggacggcacgcaccggaagcgcgcagaaagcgccgtcggcaacacgccgcaaaagcgctgaagacggcggc

SEQ ID NO: 159463 - DNA, 80 bp, synthetic construct
  source 1..80: mol_type = other DNA
atcaaaaccaaacacagactacgaccccacaaaatgcagatacgtgctcagagacatgcccctgtgggccatgttccaag

SEQ ID NO: 159464 - DNA, 80 bp, synthetic construct
  source 1..80: mol_type = other DNA
cactagtctcaaattactaatagcatatacccctccaggtgtccctaaacctactagtagaaaagaagcaatgcttggaa

SEQ ID NO: 159465 - DNA, 80 bp, synthetic construct
  source 1..80: mol_type = other DNA
taccatacagaggagagggggtagatttgaagaacggcgctattgcaccactaaccccagttaattccattatcacgtac

SEQ ID NO: 159466 - DNA, 80 bp, synthetic construct
  source 1..80: mol_type = other DNA
aaggcaaggcaaatatcaacacatcagaatataaaacaaaaaactacacacaaacagaagccaacaaatttgttagcatg

SEQ ID NO: 159467 - DNA, 80 bp, synthetic construct
  source 1..80: mol_type = other DNA
taccgggtagcaatcaattcctaacgtcagacgatttccaatccccatcagccatgccccaatttgatgtgaccccgcat

SEQ ID NO: 159468 - DNA, 80 bp, synthetic construct
  source 1..80: mol_type = other DNA
aacatacaacagaaaaaccccactgggaggaaacatactcacagcaccatcactacacccgggcaactgcatgctcagca

SEQ ID NO: 159469 - DNA, 80 bp, synthetic construct
  source 1..80: mol_type = other DNA
cctcctttacccgggcatccgccagcaccaggtcgagcacgcgccggcagcgtgtctgcacaaacttgcaggccgtcttc

SEQ ID NO: 159470 - DNA, 80 bp, synthetic construct
  source 1..80: mol_type = other DNA
ccacacaggtatttacagctccatattcctaagtcctcaaaggtctctagaattcccagcagcataccaagatgtcacat

SEQ ID NO: 159471 - DNA, 80 bp, synthetic construct
  source 1..80: mol_type = other DNA
ggcgcggtctggacgaggtgcgcatgggcacggaggcgttgctctttaagcacgccggcgcggcctgccgcgcgttggag

SEQ ID NO: 159472 - DNA, 80 bp, synthetic construct
  source 1..80: mol_type = other DNA
gaggagttctagtttgaactttactccagaataccgaacgtatatcatcccagtcataattaactgattgcccaccttcc

SEQ ID NO: 159473 - DNA, 80 bp, synthetic construct
  source 1..80: mol_type = other DNA
accaagagtcagttataaatgacatagttatgtcaggccctttcgcaccaaaagacacaaagccagtaatgcaactaaac

SEQ ID NO: 159474 - DNA, 80 bp, synthetic construct
  source 1..80: mol_type = other DNA
tgggctcactttgtttttaccatatacactcaatcctactcgaggtatacggctgttaaaacatcaccaccacaatggga

SEQ ID NO: 159475 - DNA, 80 bp, synthetic construct
  source 1..80: mol_type = other DNA
aaagagaaagaaactgactcttaagatctggcagccccagaatgtcagaaaatgtagaatactgggcctcctgcccatcc

SEQ ID NO: 159476 - DNA, 80 bp, synthetic construct
  source 1..80: mol_type = other DNA
caaagaaactgtcttagagaaatatcctgcctatatatgcatctgttagtctaaatattagagtggtctttacactattg

SEQ ID NO: 159477 - DNA, 80 bp, synthetic construct
  source 1..80: mol_type = other DNA
gaacctgtctgcatactattgcatggacaaccaggatgtggtaagtccttggcctccaaagttatcgctagaggccttac

SEQ ID NO: 159478 - DNA, 80 bp, synthetic construct
  source 1..80: mol_type = other DNA
gtctttcgtcccgaacgcgtcatgttgggggcgaggcgtaaaccgtcgaggttgaaaaaccgcgtatctgcgacccgtcc

SEQ ID NO: 159479 - DNA, 80 bp, synthetic construct
  source 1..80: mol_type = other DNA
atagttaggaacagtacagatactcccacagtcatagccacgttggcgttgcttgggtgttctgggtcaccgtggcgtta

SEQ ID NO: 159480 - DNA, 80 bp, synthetic construct
  source 1..80: mol_type = other DNA
attaaacccagtgcccaagaatctgatttttctcctacatggcaaagttgtcaaaataataaaaaacttaacccaacagg

SEQ ID NO: 159481 - DNA, 80 bp, synthetic construct
  source 1..80: mol_type = other DNA
agcaggctgtcactatcacaaaatggcggcgacagccttccgctttacacaaaatggacgccaaaaacatccgggtcaaa

SEQ ID NO: 159482 - DNA, 80 bp, synthetic construct
  source 1..80: mol_type = other DNA
aacggcgtgttgcggggacggtggttgcgctggcccggggtgttgcacggacggaggtggcgttggtgtttgcggcaaag

SEQ ID NO: 159483 - DNA, 80 bp, synthetic construct
  source 1..80: mol_type = other DNA
tgacggcactgttttcaagcgcacacttttgggagaaatcctgaattattatgccaactggtcgggtagtataaaattga

SEQ ID NO: 159484 - DNA, 80 bp, synthetic construct
  source 1..80: mol_type = other DNA
ttttagcaaaagaagtattgaaagaatgtcagaatacaaaggaactgatgacttattttcaccaggtcgcccaaagcgcc

SEQ ID NO: 159485 - DNA, 80 bp, synthetic construct
  source 1..80: mol_type = other DNA
cctagttataaaacaatggcaaccggacgttaacagactgtgcagaataacaggatggctccccctaatagtctgtggca

SEQ ID NO: 159486 - DNA, 80 bp, synthetic construct
  source 1..80: mol_type = other DNA
ccttgttgaggaacttgcgaagctgttcccggctactgttcgcggcggatgccatgacgtgccagaatatatcccctctc

SEQ ID NO: 159487 - DNA, 80 bp, synthetic construct
  source 1..80: mol_type = other DNA
aagtcgaaaacttcaatgctacacaatacacagacaagaagaaacaattcacagtgtggcccatcacttacacaaacaca

SEQ ID NO: 159488 - DNA, 80 bp, synthetic construct
  source 1..80: mol_type = other DNA
cggggccacactgacggctttccagaagctgttgcagaccctgcgcgagatccagaccgtaatagccgaacagagcggcg

SEQ ID NO: 159489 - DNA, 80 bp, synthetic construct
  source 1..80: mol_type = other DNA
ggtgggtgaaattttaaactattacacccactggacaggatcactaagattcacattcctattctgtggtagcatgatgg

SEQ ID NO: 159490 - DNA, 80 bp, synthetic construct
  source 1..80: mol_type = other DNA
cctacaaactagacaaatacagctctccgagctaccaccccggatacatgatgctccagaccaaacacaagatcctcatc

SEQ ID NO: 159491 - DNA, 80 bp, synthetic construct
  source 1..80: mol_type = other DNA
accaagacatctttaataactacctctataaaaatgccaacttctggcaaagtttacatgcaccagctcaagtcaattta

SEQ ID NO: 159492 - DNA, 80 bp, synthetic construct
  source 1..80: mol_type = other DNA
cggtgtcaaaagtattgtctgcgtacgctttccaggagccagccgcggtgctcaaggtcttacggatgacagagtccggc

SEQ ID NO: 159493 - DNA, 80 bp, synthetic construct
  source 1..80: mol_type = other DNA
aatcaaatgcttaactgtgtgggcgaccatcaagcagctatgcaaataatcagagaaatcattaatgaagaggcagcaga

SEQ ID NO: 159494 - DNA, 80 bp, synthetic construct
  source 1..80: mol_type = other DNA
tcctcgacgacgcagagtaaggagactgaggcggaggaggggatgggtgcgccgaactgttattagacgcaggaggagat

SEQ ID NO: 159495 - DNA, 80 bp, synthetic construct
  source 1..80: mol_type = other DNA
ttacactgttgagggagggatgccatctggttgctctggcaccagcatattcaattctatgattaataacataattatta

SEQ ID NO: 159496 - DNA, 80 bp, synthetic construct
  source 1..80: mol_type = other DNA
gaaaaggtaacaaaatatggctagacagcttaacaaaaacaaacaacatatatgaccccaaacaaagcattctactaatg

SEQ ID NO: 159497 - DNA, 80 bp, synthetic construct
  source 1..80: mol_type = other DNA
ctgaacatctggctggggcattaactaagcttatgagcgattttatcacaggacaagatgtcactctttctggaggaaat

SEQ ID NO: 159498 - DNA, 80 bp, synthetic construct
  source 1..80: mol_type = other DNA
aattacaaggatggtcaaggtaaattggatgttccaaaatcattcaaaccatgtgatgtagacaacaaaataggtaatgc

SEQ ID NO: 159499 - DNA, 80 bp, synthetic construct
  source 1..80: mol_type = other DNA
ctccgcttgctgcgaagcccgttcttccgagtcgtgtcgctgcgtccagcgtcgcgcccaagatgggaatttgggtctct

SEQ ID NO: 159500 - DNA, 80 bp, synthetic construct
  source 1..80: mol_type = other DNA
tcaaccacaaaaccaaaagaaaacaccaccagaacaaatgaaagaagcaaacaacgcatatataaatgcagccaaaaaaa

SEQ ID NO: 159501 - DNA, 80 bp, synthetic construct
  source 1..80: mol_type = other DNA
tgcagcaaaaggactagagtggattagtaataagttgtccaaatttattgattggctcaagaccaaaataataccagaag

SEQ ID NO: 159502 - DNA, 80 bp, synthetic construct
  source 1..80: mol_type = other DNA
caatctacaggaaatggctcaaattagaaggaaatatgaattatttacatatcttagatttgattcagaggttactctgg

SEQ ID NO: 159503 - DNA, 80 bp, synthetic construct
  source 1..80: mol_type = other DNA
atgcatctaagtttcaccagggctgcttgctggtagtgtgtgttccagaggccgagatggggtgttcaaaaacggatggt

SEQ ID NO: 159504 - DNA, 80 bp, synthetic construct
  source 1..80: mol_type = other DNA
attaaacaacatgggtaagctgtatgcacgacatgtgaataaagacacaccgtatcagatgtcaagcaccatccgtgtgt

SEQ ID NO: 159505 - DNA, 80 bp, synthetic construct
  source 1..80: mol_type = other DNA
attgggtatgtgcgttcttacgatgacctagatgatgtccgtgtgtggatcgattgtaatgtcgtatccaggcgactgaa

SEQ ID NO: 159506 - DNA, 80 bp, synthetic construct
  source 1..80: mol_type = other DNA
gccacggggtcgttgtaataacccacctcgggctcaaacaccgtggcaccctggtacgaaaccgccgcagtaccgccggc

SEQ ID NO: 159507 - DNA, 80 bp, synthetic construct
  source 1..80: mol_type = other DNA
aggaatcaactgcctcttcgagcagctagtgaaaacccagcagggggtccacctagatccttccctcttgtaggccccag

SEQ ID NO: 159508 - DNA, 80 bp, synthetic construct
  source 1..80: mol_type = other DNA
ccctaaaatgcccacaaaaaacaatgcagagacctctaaagaacctacaaaactaacaaaaagtggtgtacaaagcacat

SEQ ID NO: 159509 - DNA, 80 bp, synthetic construct
  source 1..80: mol_type = other DNA
actggctaaattaccaagataattatgtagccacctatacaaaatttaaaacaaaaatgacagaaaacttacaactaata

SEQ ID NO: 159510 - DNA, 80 bp, synthetic construct
  source 1..80: mol_type = other DNA
cgctagaccgtcgcctgcacattcgccttaatgtgacggcacgtgatgacgttgctttctcagcagcagctgctctcaag

SEQ ID NO: 159511 - DNA, 80 bp, synthetic construct
  source 1..80: mol_type = other DNA
gcaatcagcaaacatactacctggattccacccaagcaagaaaatacacattcctgggcaaataaccaacattatgcaca

SEQ ID NO: 159512 - DNA, 80 bp, synthetic construct
  source 1..80: mol_type = other DNA
gtgcgactattgagagacactgcccacatctcacaaactactctagttgcacgcacacagggaattgaagaaaccattga

SEQ ID NO: 159513 - DNA, 80 bp, synthetic construct
  source 1..80: mol_type = other DNA
ctgactcagtggaatcccccctttgtaagacgctgctatataaaaggactcatgccggtagttatctgtggccagggaaa

SEQ ID NO: 159514 - DNA, 80 bp, synthetic construct
  source 1..80: mol_type = other DNA
cactattatggttaggaatagtgcagacacacccactgtactagccactctagcccttctgggctgcagtaaatcaccat

SEQ ID NO: 159515 - DNA, 80 bp, synthetic construct
  source 1..80: mol_type = other DNA
acttggcccttataacagcacagtgcgtgtctacttcaaaccaaagcacatcaaagcatgggtgcccagaccaccgcgtc

SEQ ID NO: 159516 - DNA, 80 bp, synthetic construct
  source 1..80: mol_type = other DNA
ggtcgtgcttgtctttatcatcttttggctgccgtaccacctgacgctgtttgtggacacgttgaaactgctcaaatgga

SEQ ID NO: 159517 - DNA, 80 bp, synthetic construct
  source 1..80: mol_type = other DNA
ttgcgagcgcggcgaggacctcgtggggagtcctcaggagagcggcaggagagatcattgcaatacccaggaggatcaga

SEQ ID NO: 159518 - DNA, 80 bp, synthetic construct
  source 1..80: mol_type = other DNA
gcagcttaacctcgctgaggctggcagcccccacctcccatagcaacaccaggcaaaaaacacagagcaactgcatccta

SEQ ID NO: 159519 - DNA, 80 bp, synthetic construct
  source 1..80: mol_type = other DNA
caatgtattaggtcccaactgttatgctacaacatcagaaccagagaataaaaatgttgtacaggccacgacaactgtta

SEQ ID NO: 159520 - DNA, 80 bp, synthetic construct
  source 1..80: mol_type = other DNA
atatctaacacctgatgatgctactgctattgataaaccaacacaaccagacacttcatctaacagattctatactttag

SEQ ID NO: 159521 - DNA, 80 bp, synthetic construct
  source 1..80: mol_type = other DNA
cacctgtccctgggggcctgtgtcttctgtctcggcctcctggccagcacccccttcatttggtgctttgtctttgccaa

SEQ ID NO: 159522 - DNA, 80 bp, synthetic construct
  source 1..80: mol_type = other DNA
ctaaagctaagtaggaacgaaaagttcagagacatcagaggcttcctggcaagagaggaggccgaggttaacgaagccgt

SEQ ID NO: 159523 - DNA, 80 bp, synthetic construct
  source 1..80: mol_type = other DNA
accacacagacgtgcgcgtctcccaatggctaggcgttctttttaggtagtaattttttgatcttttttttttcttaaca

SEQ ID NO: 159524 - DNA, 80 bp, synthetic construct
  source 1..80: mol_type = other DNA
gtgactcaagacttcacagaaattcagttaggaattccacacccagcaggattagccaaaaagaggcgaatcactgtact

SEQ ID NO: 159525 - DNA, 80 bp, synthetic construct
  source 1..80: mol_type = other DNA
ttatgatggttatgattcagatggtttagatgctatctatggtattcctgtgacaaatcacatgggcacaatatgtgtga

SEQ ID NO: 159526 - DNA, 80 bp, synthetic construct
  source 1..80: mol_type = other DNA
aaatcacaaacagacccgattttatgtcttagcttgagcccagccagcgaacagcgactgggatacaccatgctggggga

SEQ ID NO: 159527 - DNA, 80 bp, synthetic construct
  source 1..80: mol_type = other DNA
tagtgtttttggtacagatggtctagaagctcttgatctaaatactagtgcggggttcccatacatcacaatggggatta

SEQ ID NO: 159528 - DNA, 80 bp, synthetic construct
  source 1..80: mol_type = other DNA
gtggaaaaatacacagaagctgtcttaaatgaagttcttgtagttccaaacatcacacccagtaactcccaaacatcaaa

SEQ ID NO: 159529 - DNA, 80 bp, synthetic construct
  source 1..80: mol_type = other DNA
tgatttcactcaagaccctgggaaatttacccaacctgtattggatgctctacgtgaggccgtaccacccttgcaatcac

SEQ ID NO: 159530 - DNA, 80 bp, synthetic construct
  source 1..80: mol_type = other DNA
gatgctctttacattcctgcaggaccattcaaaaggcctcgcagggacaccaacgcccaagacccagaagagcaaaacga

SEQ ID NO: 159531 - DNA, 80 bp, synthetic construct
  source 1..80: mol_type = other DNA
gcgtggacggaggttccgttggggacggggactcaagggaccggcggtagcgtggaccgcgctgagagacggagagcaga

SEQ ID NO: 159532 - DNA, 80 bp, synthetic construct
  source 1..80: mol_type = other DNA
aacacctcttcgagcagctagtcagaacccagcagggagtccacgtaaatccttccctcgtgtaggcccagagcagtggc

SEQ ID NO: 159533 - DNA, 80 bp, synthetic construct
  source 1..80: mol_type = other DNA
gtcttggaaggcctcaacctcctagaccacctggcggcccaccgggccctgcaataagggttctgcccgctctgccgcct

SEQ ID NO: 159534 - DNA, 80 bp, synthetic construct
  source 1..80: mol_type = other DNA
gagaagagagaacagctctttaacaacattctatggttggaacaaatgtcccagaaatttgcaccattatatgcagtgga

SEQ ID NO: 159535 - DNA, 80 bp, synthetic construct
  source 1..80: mol_type = other DNA
catggatacctagaccgcccagagccacggaatacacacacaaatacagcacaaattatcacgttccagactctaatgag

SEQ ID NO: 159536 - DNA, 80 bp, synthetic construct
  source 1..80: mol_type = other DNA
agcaacacctccacgcccccattatccactagtggggggttcccaatacctgtttccagaaatgctgcccaaacgttaca

SEQ ID NO: 159537 - DNA, 80 bp, synthetic construct
  source 1..80: mol_type = other DNA
cccggaggtagcaatgaagtaccaataagaatgagagcaaaatggtacccctgcatccttcaccaaaaagaggtgctaga

SEQ ID NO: 159538 - DNA, 80 bp, synthetic construct
  source 1..80: mol_type = other DNA
atctggatagactggctgtcaaaacctgactccagatacgaccccaacaagagcaaatgcttattaaaagactttcccct

SEQ ID NO: 159539 - DNA, 80 bp, synthetic construct
  source 1..80: mol_type = other DNA
gtccctcttgtccctttcagtggtcaccggtggtgggtgtggagccgtggccttttgcaacgcctttttcctagcttatt

SEQ ID NO: 159540 - DNA, 80 bp, synthetic construct
  source 1..80: mol_type = other DNA
catttgtgacctttcatgatttgtttaaatgaactttcttaaaatttctgaggtttgtttatttcttttatcagtaaata

SEQ ID NO: 159541 - DNA, 80 bp, synthetic construct
  source 1..80: mol_type = other DNA
cccttctgagctttgggaatgcttacagctcattttatgacggttggttcgatacttcaagcgaaaggagtgacggtctg

SEQ ID NO: 159542 - DNA, 80 bp, synthetic construct
  source 1..80: mol_type = other DNA
gacggaggagggggcgacgtagaaggggacgcagacggagacacagacagactctaatactaagacaatggcaaccagac

SEQ ID NO: 159543 - DNA, 80 bp, synthetic construct
  source 1..80: mol_type = other DNA
gaccgggttggaggagtgggacacgacaacggccgtaatcttggagctcagggtggcctcgtaggtgttgttgtattcca

SEQ ID NO: 159544 - DNA, 80 bp, synthetic construct
  source 1..80: mol_type = other DNA
acaagttggtcaaaacttccctgcgagtgcccttacaaaaggagaaagggcaagtgtgttcacttcaggtgagcaccaat

SEQ ID NO: 159545 - DNA, 80 bp, synthetic construct
  source 1..80: mol_type = other DNA
ggtcatgagattagggaacctaccggtagagatgacaagaaacctgatgaagacccgcttttcaactgcaatggcactct

SEQ ID NO: 159546 - DNA, 80 bp, synthetic construct
  source 1..80: mol_type = other DNA
cagcatctacacagacctcagtaccctagcagaccacaacgcacaaagagtagccatacaaggaaaactacacccagaca

SEQ ID NO: 159547 - DNA, 80 bp, synthetic construct
  source 1..80: mol_type = other DNA
gttgcagcactccgggatgaaagcccctatgtaccaactgacaacaggaaaatgcagttggcttatttagataggggatt

SEQ ID NO: 159548 - DNA, 80 bp, synthetic construct
  source 1..80: mol_type = other DNA
atcagatgatgaaaatttttcgccaggtccttcaaagcgcccagctctcgacaccagacccgagggcctggccggagagc

SEQ ID NO: 159549 - DNA, 80 bp, synthetic construct
  source 1..80: mol_type = other DNA
ggctgaagacacaattttaattgatggtgttgagacaaaaatcttgaaacaaacaattgttacagatgaaaatgatgtgg

SEQ ID NO: 159550 - DNA, 80 bp, synthetic construct
  source 1..80: mol_type = other DNA
gaggcgtccggcggccatggcccagcgcaacggcatgtcgccgcgccccccgcccctcggtcgcggccgcggagccggag

SEQ ID NO: 159551 - DNA, 80 bp, synthetic construct
  source 1..80: mol_type = other DNA
cctgcacaggggtgagcgatgcagcgtgaccgtcttgtcctgtaggtcccacttctttctgggaatcacaaacgatgccg

SEQ ID NO: 159552 - DNA, 80 bp, synthetic construct
  source 1..80: mol_type = other DNA
caaggctcttaaaaaagctatccccctccaatatgttcctcggtaggccttacagacaaaagaaaaggaaagtgctactg

SEQ ID NO: 159553 - DNA, 80 bp, synthetic construct
  source 1..80: mol_type = other DNA
ttctgcgtcgtggctatcacggaggtggaggcggacgaggtagaggtttgtaccgtggtggtgacagcagaagtgacgtt

SEQ ID NO: 159554 - DNA, 80 bp, synthetic construct
  source 1..80: mol_type = other DNA
cggggttatattaaatcctatttcatcatggatacctccaaatatatcgaattcttcaacaccctcgccagtcgagacat

SEQ ID NO: 159555 - DNA, 80 bp, synthetic construct
  source 1..80: mol_type = other DNA
acctttcagaaaagcaaacccagatgtcatcctcatccagtacatggatgatatcttaatagctagtgacagaacgggtt

SEQ ID NO: 159556 - DNA, 80 bp, synthetic construct
  source 1..80: mol_type = other DNA
atacttatggtgtagacttgccaatgataacatatttaaaagatgagctcagagcaccagaaaaaataaagctgggtaaa

SEQ ID NO: 159557 - DNA, 80 bp, synthetic construct
  source 1..80: mol_type = other DNA
atacaaggtgtcaccgactcccggcctaaaattaccctggaccgtacaaaccacggtgctatgaagaacactggggcctt

SEQ ID NO: 159558 - DNA, 80 bp, synthetic construct
  source 1..80: mol_type = other DNA
cacacacgtcaggtacaaccccctcgtagacaagggctttggaaacagaatatacatccagtggtgctcagaggcagatg

SEQ ID NO: 159559 - DNA, 80 bp, synthetic construct
  source 1..80: mol_type = other DNA
ttataaatgattataacaacaagattaaaataacagattctcttgaaactcttttccagggacccgtatacaaagacatt

SEQ ID NO: 159560 - DNA, 80 bp, synthetic construct
  source 1..80: mol_type = other DNA
attgcctggccggagattccaacactaagacaaattataccagctatgtgaatgcaaaccctggggagaaagggggcgag

SEQ ID NO: 159561 - DNA, 80 bp, synthetic construct
  source 1..80: mol_type = other DNA
agcatacagacaccccactgcagactttatcataacctggaacagaaagacacctctagggggcaacatactaacagcac

SEQ ID NO: 159562 - DNA, 80 bp, synthetic construct
  source 1..80: mol_type = other DNA
ataattatacacatgctggctacgtttcactatggtaccaaacagacttcattccatcttcaacacaagtaacccagggg

SEQ ID NO: 159563 - DNA, 80 bp, synthetic construct
  source 1..80: mol_type = other DNA
caccaatttaccacatgttttaatgaacttggcagaaacgacacaagctgatttgtgcatcccctatgtagcagacacaa

SEQ ID NO: 159564 - DNA, 80 bp, synthetic construct
  source 1..80: mol_type = other DNA
gcctcgctcaatacaaatcattgacccgaagtacaacacaccagagcttaccatccacgcgtgggatttcagacgtggct

SEQ ID NO: 159565 - DNA, 80 bp, synthetic construct
  source 1..80: mol_type = other DNA
tgcggggttttggcagggaatgcgtttgtgtaccctcatcagattattaatcttaggacaaataattcggcaacccttgt

SEQ ID NO: 159566 - DNA, 80 bp, synthetic construct
  source 1..80: mol_type = other DNA
gtcctgacaacattccccgcaaacatgacatgagttaatttaaacatgttttgtttgcttgggaatgctcttagggcctg

SEQ ID NO: 159567 - DNA, 80 bp, synthetic construct
  source 1..80: mol_type = other DNA
aactagaaatgactttgtagctaataaaagcacaaactataattggtacacatacaaagccagttcagtaactgaaaaat

SEQ ID NO: 159568 - DNA, 80 bp, synthetic construct
  source 1..80: mol_type = other DNA
gaaaccccacatgtagattgatgaagtatgattatccaacacgcccaggacagtgtggtggggtcatactcaacacagga

SEQ ID NO: 159569 - DNA, 80 bp, synthetic construct
  source 1..80: mol_type = other DNA
tacaagttcagatcaatcctacaccatttcaacaaggtggtttgatatgtgccatggtgccaggagatcagagttatgga

SEQ ID NO: 159570 - DNA, 80 bp, synthetic construct
  source 1..80: mol_type = other DNA
taaaaccaagcgccactgaaaacgggtttaaccccagttggcaagactgccaaaacactactaaacttaatgcatcaggc

SEQ ID NO: 159571 - DNA, 80 bp, synthetic construct
  source 1..80: mol_type = other DNA
ggccaccacgattgtgtgattataaacacaagaagaatgttgatttttcacccacaggagtcaccaccaccagagataag

SEQ ID NO: 159572 - DNA, 80 bp, synthetic construct
  source 1..80: mol_type = other DNA
acaactttggcttctactgcggcatgttcatcgcctccatcatcctgatcctgcccttggtcaggtacgaggccgtcttt

SEQ ID NO: 159573 - DNA, 80 bp, synthetic construct
  source 1..80: mol_type = other DNA
acaaggtattcccaattgaaagtccatccgtaacacgggttacattgggtggtaaaccaatggatttagccattctgaaa

SEQ ID NO: 159574 - DNA, 80 bp, synthetic construct
  source 1..80: mol_type = other DNA
catgctagcgttcatcagtgcatgcaatgatttctcagcccggttgttgaaagatacaccatttgttagacaactgggtc

SEQ ID NO: 159575 - DNA, 80 bp, synthetic construct
  source 1..80: mol_type = other DNA
cgggagtggccggcagcccccggcggctccgccccccggcccccccccccgaagatcgtcactaaccacgtgactcccgc

SEQ ID NO: 159576 - DNA, 80 bp, synthetic construct
  source 1..80: mol_type = other DNA
tgctcaaggatactccattcatagaacaagctgcagagctgcagaacgacgtgcggcaagcggtggagggggcgattggt

SEQ ID NO: 159577 - DNA, 80 bp, synthetic construct
  source 1..80: mol_type = other DNA
ctcccgtatgtgaactcaacttccacggattccatggccaagcacaacaattggggaattgttatactaccttttgttcc

SEQ ID NO: 159578 - DNA, 80 bp, synthetic construct
  source 1..80: mol_type = other DNA
tatacgatctgaatactaccaattccggcagatatagcagacgttgttttaaagaagagcatttaaaaggacatcacgaa

SEQ ID NO: 159579 - DNA, 80 bp, synthetic construct
  source 1..80: mol_type = other DNA
gctcttgatgattccatccttgtgtcttattccagtgatctagtcatataccgaacaaacactgaaggtgatgatgtgat

SEQ ID NO: 159580 - DNA, 80 bp, synthetic construct
  source 1..80: mol_type = other DNA
aaagaacaagacataacagacaaaactaagttacaaggcacacagttaaaccctactaacagcacagacaaatttagcac

SEQ ID NO: 159581 - DNA, 80 bp, synthetic construct
  source 1..80: mol_type = other DNA
atagggatccgctaggatatgacgtcgggcatggacctctagcatctgctatgcgaatgctttggatggctaattatatt

SEQ ID NO: 159582 - DNA, 80 bp, synthetic construct
  source 1..80: mol_type = other DNA
actaatgcttaacaaatggtacttcacaaaagacttttgcaaagtacccctattcagcatgtgggcaacagcctgtgaac

SEQ ID NO: 159583 - DNA, 80 bp, synthetic construct
  source 1..80: mol_type = other DNA
gatgctatacagaatacagtcacttctaccatacagagggttgcaaccaatgctgtcgggcaagatgcgacagcagctaa

SEQ ID NO: 159584 - DNA, 80 bp, synthetic construct
  source 1..80: mol_type = other DNA
aagctagtaattacatagctcggcacctcaactctcaaaccaacctctggaatagcagcatctacaaacggggccacctt

SEQ ID NO: 159585 - DNA, 80 bp, synthetic construct
  source 1..80: mol_type = other DNA
agacattggcaagtgtctcaatctacctgaatacagtgtcctgcgaaggcgctggctggatttattttaaagaaatagat

SEQ ID NO: 159586 - DNA, 80 bp, synthetic construct
  source 1..80: mol_type = other DNA
tcagtagtgaggaaatgcgtggtgagaggctacatacccctcctaatatgtggaacgggtaccaccggcaccacttacag

SEQ ID NO: 159587 - DNA, 80 bp, synthetic construct
  source 1..80: mol_type = other DNA
atgccgagtggaccgagcaactctgaaagtattccagcacttactgcagcagataccgggcatacctctcaggttgtgcc

SEQ ID NO: 159588 - DNA, 80 bp, synthetic construct
  source 1..80: mol_type = other DNA
acaaccaaaaccaagaaaaccagaactgagaaaggcagtgattcaaggaccagaacacgaatttggtatggctctgatta

SEQ ID NO: 159589 - DNA, 80 bp, synthetic construct
  source 1..80: mol_type = other DNA
taggcatggtgcttaacaaactaggatttccaggggccatgatggacaaacttagcagcacaacccacatttacagggac

SEQ ID NO: 159590 - DNA, 80 bp, synthetic construct
  source 1..80: mol_type = other DNA
tagaaattttatataagaaaaacacatactggcaaagtaacattacctcttggtttttaactaatgttaaacagccaaca

SEQ ID NO: 159591 - DNA, 80 bp, synthetic construct
  source 1..80: mol_type = other DNA
agagacaaaaatactgactttatagtgacctatgacacctcagccccctacaaactagacaagtacagctctcccagcta

SEQ ID NO: 159592 - DNA, 80 bp, synthetic construct
  source 1..80: mol_type = other DNA
aactgacactgtggttgtgaacttccaggttctgcaatccatgtatgatgaaaacattagcatattaccagaccaaaaga

SEQ ID NO: 159593 - DNA, 80 bp, synthetic construct
  source 1..80: mol_type = other DNA
aaactaggcacgtgcacaactttcacactaggtctgaatctagcatcgagaactttctcagcagggcagcttgtgtgtac

SEQ ID NO: 159594 - DNA, 80 bp, synthetic construct
  source 1..80: mol_type = other DNA
cacacccagcacaagtggggtaaacagtcaagaagtgccagcacttacagcagttgaaactggtgcctcaggacaagcgg

SEQ ID NO: 159595 - DNA, 80 bp, synthetic construct
  source 1..80: mol_type = other DNA
agtcaaggatgttctgacaaaaggaataccaacactacaatcaccatcagtagaggcatgtggatattcagatagaatta

SEQ ID NO: 159596 - DNA, 80 bp, synthetic construct
  source 1..80: mol_type = other DNA
cacttccggcttgcccaaaatggcggacaagctcttccaggttaaagttcagcaactacgtcacgagtcacctgactggg

SEQ ID NO: 159597 - DNA, 80 bp, synthetic construct
  source 1..80: mol_type = other DNA
tggttctatgacggataccccacgttcggtgagcacaagcaggagaaagatcttgaatatggggcatgtccaaacaatat

SEQ ID NO: 159598 - DNA, 80 bp, synthetic construct
  source 1..80: mol_type = other DNA
atgtcaattttgatccaactaacctaactgaaaaaagggaaagcataacatatgtgcctgacactatccgcccagacgtc

SEQ ID NO: 159599 - DNA, 80 bp, synthetic construct
  source 1..80: mol_type = other DNA
tagcagacctaccactgtggatggctgtgtatggcatagtagactggctaaaaaaagacaccggcaactggggcattccc

SEQ ID NO: 159600 - DNA, 80 bp, synthetic construct
  source 1..80: mol_type = other DNA
gggaccttgttgggaaacttaactatcttcccacatcaactcataaacttgaggacaaacaactcgagcaccattgttgt

SEQ ID NO: 159601 - DNA, 80 bp, synthetic construct
  source 1..80: mol_type = other DNA
tagtaagtttgtaagacgtccgatgaagtgtgggaacttgttggaaatagcagtttgctgcaaagcatcccattgccagc

SEQ ID NO: 159602 - DNA, 80 bp, synthetic construct
  source 1..80: mol_type = other DNA
tagccagatgcaactgcaaggttggagtgtactattgcaaatcaaggagaaagtattacccagtgactgtcactgaaccc

SEQ ID NO: 159603 - DNA, 80 bp, synthetic construct
  source 1..80: mol_type = other DNA
ggaaggccatacaattaatggataggcacaccagagtgaggtattcagtagatcaactcactaccatgatgatcaatgag

SEQ ID NO: 159604 - DNA, 80 bp, synthetic construct
  source 1..80: mol_type = other DNA
agctcctccagctgcagctccagcggctcacagtcagcctcgccaagacccaagcgggtctccacataaacccccttttg

SEQ ID NO: 159605 - DNA, 80 bp, synthetic construct
  source 1..80: mol_type = other DNA
caggcccagcagaaaacacagagtggtcgtcagggtagtttggtagtgctgcctttgttgcagcttggaatctctgtctg

SEQ ID NO: 159606 - DNA, 80 bp, synthetic construct
  source 1..80: mol_type = other DNA
tttagtaatttgtgtttggataacttcatttgaaaatcttaaacttatttgtaaagatgggagctcaagttactagacag

SEQ ID NO: 159607 - DNA, 80 bp, synthetic construct
  source 1..80: mol_type = other DNA
tttgcctttcaactagatcccgggcatggtagtgttttgaatagaacactccttggtgagatccttaattactacgcaca

SEQ ID NO: 159608 - DNA, 80 bp, synthetic construct
  source 1..80: mol_type = other DNA
agaaggaaattggagttcttcacgtattctagatttgacatggaattcacctttgtaatcactgccaacttcactgaaac

SEQ ID NO: 159609 - DNA, 80 bp, synthetic construct
  source 1..80: mol_type = other DNA
agtacctgcataaatttagtactaattacaacaagcaaaagccagatagtggaggtcaagttgagcccaaacatttcctt

SEQ ID NO: 159610 - DNA, 80 bp, synthetic construct
  source 1..80: mol_type = other DNA
gcaatggagtcagttgttgccacaggaccgtttatggttagagaccaagaccgcaacagttgggacattacaatgggcta

SEQ ID NO: 159611 - DNA, 80 bp, synthetic construct
  source 1..80: mol_type = other DNA
ctcagactcctgttcaaccaagtccaaaaaatccaacaaaatcaagatatcaaccctaccttgttaccaaggggggggga

SEQ ID NO: 159612 - DNA, 80 bp, synthetic construct
  source 1..80: mol_type = other DNA
cacaaaaatggatttttctcaagacccgtctaagttcacggaaccggtgaaggacgtgatgatcaaaacagcacctgcgc

SEQ ID NO: 159613 - DNA, 80 bp, synthetic construct
  source 1..80: mol_type = other DNA
agactattaacaccgtccctgtgtcgagccacggtggagatcgccgtggagatctggccacgctaaatacacacggtgcg

SEQ ID NO: 159614 - DNA, 80 bp, synthetic construct
  source 1..80: mol_type = other DNA
cttaattctaccttatgtcaatgctgttcccatggattcaatggttaggcataataactggagtattgtgataatacccg

SEQ ID NO: 159615 - DNA, 80 bp, synthetic construct
  source 1..80: mol_type = other DNA
gtttccctggagagatgatgcagaagctgtgtaagaccacgcacatctataaaaacaccatctacactgtagaaggtggg

SEQ ID NO: 159616 - DNA, 80 bp, synthetic construct
  source 1..80: mol_type = other DNA
actaactggaaccgaaactacgccctccacagcgaggactacccagagcagggcaggtttcccttcggggggtcgctcac

SEQ ID NO: 159617 - DNA, 80 bp, synthetic construct
  source 1..80: mol_type = other DNA
actttatagctcagtatgacaacgttcctcctatgaaaatggacgagttcactgcccctaacactcatccctcattcatg

SEQ ID NO: 159618 - DNA, 80 bp, synthetic construct
  source 1..80: mol_type = other DNA
ttaccatcccagcaactcagggtttacctaccatgctaactcctggatcgtctcaatttttgacgtcagatgactttcaa

SEQ ID NO: 159619 - DNA, 80 bp, synthetic construct
  source 1..80: mol_type = other DNA
ggtggtaatcaagaagtagaccacctagtgagtcaaggaatcagacacatcctgtttctagaaaatatagaaccagccca

SEQ ID NO: 159620 - DNA, 80 bp, synthetic construct
  source 1..80: mol_type = other DNA
cccgggaataagactcaactgcctcatgtgcataaggtgtccctacacaaggccaaaactgtacaaccccagagacaaca

SEQ ID NO: 159621 - DNA, 80 bp, synthetic construct
  source 1..80: mol_type = other DNA
ccattccgggccgcgtgctgggtccccgaggggcgggggggtgttttttgcgtggaggtgaaaattggagttgcgtatag

SEQ ID NO: 159622 - DNA, 80 bp, synthetic construct
  source 1..80: mol_type = other DNA
gctccacatggccagagttgactcttttatgcccattaacaatatagatagacatataggacaggtatcaatatacaatg

SEQ ID NO: 159623 - DNA, 80 bp, synthetic construct
  source 1..80: mol_type = other DNA
gtaatgacagcagttgctgatattagaacttatggatttggacaccagaacaaggccgtttacacggcaggttacaaaat

SEQ ID NO: 159624 - DNA, 80 bp, synthetic construct
  source 1..80: mol_type = other DNA
caaaactgtacaacgagaaagtagaggggtacgggtacgtcccaataggctaccacttcgcagacggcaagatgccggac

SEQ ID NO: 159625 - DNA, 80 bp, synthetic construct
  source 1..80: mol_type = other DNA
acagaagaggtacaatggacagaattagcagaagcagaactagaagaaaacagaattatcttaagccaagaacaagaggg

SEQ ID NO: 159626 - DNA, 80 bp, synthetic construct
  source 1..80: mol_type = other DNA
gcagcagattgggacatacagaatcctcaacctggcccactaccagcagggcagcttagagaacctagggggtcagacat

SEQ ID NO: 159627 - DNA, 80 bp, synthetic construct
  source 1..80: mol_type = other DNA
gtcattcaaacacggagtagaagtgagtccacagtggagtctttctttgcgaggggggcgtgtgtgaccattatgtctgt

SEQ ID NO: 159628 - DNA, 80 bp, synthetic construct
  source 1..80: mol_type = other DNA
aaacatacaggtttacctcgaggaggcaatagataatgttgaggtttgtcacactcaggaggattgggagggtcacgacc

SEQ ID NO: 159629 - DNA, 80 bp, synthetic construct
  source 1..80: mol_type = other DNA
cgctcccaacaccccggttgagcgcaggcacacccgcacagagaacccatcatggcctggagatggtggtggagacgcag

SEQ ID NO: 159630 - DNA, 80 bp, synthetic construct
  source 1..80: mol_type = other DNA
tggagatgttcacgtacctgcgctttgatgtagaagtcacatttgtgatcactagtgcgcaagaccaatccacaagtgag

SEQ ID NO: 159631 - DNA, 80 bp, synthetic construct
  source 1..80: mol_type = other DNA
actatacaatgacattatatacaacccatggacagacaaaggctcaggcaacaaagtatggctagacagcttaacaaaaa

SEQ ID NO: 159632 - DNA, 80 bp, synthetic construct
  source 1..80: mol_type = other DNA
caccgctgaatctacaagcttgactacagatctttcatctacatatcaaatatcatctgcatcaacttcaacacctattt

SEQ ID NO: 159633 - DNA, 80 bp, synthetic construct
  source 1..80: mol_type = other DNA
cgggttcaaataaacaaggccgtgcactgttcacttgtcggtgtctacctcttaaggtcaccaagcactccgagcgtaag

SEQ ID NO: 159634 - DNA, 80 bp, synthetic construct
  source 1..80: mol_type = other DNA
atgccaggcgctaatggtggtactttcgaaaatccctacattatggatatgggggtccccttgagccaagctttggtgtt

SEQ ID NO: 159635 - DNA, 80 bp, synthetic construct
  source 1..80: mol_type = other DNA
gagctccaacacagaaagagtgttaaaaacaacttacaggcaattttccaagggttgggtgatgatactacacctgggtt

SEQ ID NO: 159636 - DNA, 80 bp, synthetic construct
  source 1..80: mol_type = other DNA
ggcaacagggtgtggatagactggtgcacaaaaaacgactcgcagttcagagacctccccggcagactgcctatagtaga

SEQ ID NO: 159637 - DNA, 80 bp, synthetic construct
  source 1..80: mol_type = other DNA
aactaaaaatctccaggcaagagtcactgctatcgagaaatacttaaaggaccaggcgcagctaaattcatggggatgtg

SEQ ID NO: 159638 - DNA, 80 bp, synthetic construct
  source 1..80: mol_type = other DNA
tatgttaggtacacatgttgtttgggattttggattacaatccagtgttaccctagtaataccttggattagtggttccc

SEQ ID NO: 159639 - DNA, 80 bp, synthetic construct
  source 1..80: mol_type = other DNA
acaacacaaattgcaaatgtgtgctcacagacctgccgctgtggagcatgttttatggctacgtagactttatagagagt

SEQ ID NO: 159640 - DNA, 80 bp, synthetic construct
  source 1..80: mol_type = other DNA
cttgtgacaaacattattgggatgccataagatttaggtattgtgcaccgccaggctatgctctgttaagatgtaatgat

SEQ ID NO: 159641 - DNA, 80 bp, synthetic construct
  source 1..80: mol_type = other DNA
gaaacgcgtatagtaacttttatgatggatggtcccacttcactcaggagggcgtgtatgggtttaactcgctgaacaac

SEQ ID NO: 159642 - DNA, 80 bp, synthetic construct
  source 1..80: mol_type = other DNA
cgggctggttttgctggccctggagctgaagttgatggatgggcaggctccctcccattatgccataaacctgaccggac

SEQ ID NO: 159643 - DNA, 80 bp, synthetic construct
  source 1..80: mol_type = other DNA
tgtgtggtcaccactgacaatggcaaattcacaggactaggtatatatgatagatacatgattgtacccacgcattctga

SEQ ID NO: 159644 - DNA, 80 bp, synthetic construct
  source 1..80: mol_type = other DNA
ctaaggcattttcaatgtgctgaagagcaaggcataacagactacatccatatgcttggtgaagcatttggcacaggttt

SEQ ID NO: 159645 - DNA, 80 bp, synthetic construct
  source 1..80: mol_type = other DNA
acaacaactgggggattgcaatcattcctctgtccaagttagactttgcaccagatgcctcagtagagctaccaataacg

SEQ ID NO: 159646 - DNA, 80 bp, synthetic construct
  source 1..80: mol_type = other DNA
gatgatgtggtttgtgacagcacaaacaagacaggcacaaacacgacatgttacatgagacattgtaacacatcagtcat

SEQ ID NO: 159647 - DNA, 80 bp, synthetic construct
  source 1..80: mol_type = other DNA
cactgttttatacagaggatcatgaaataatgaagttttcttggaagggaattactgctgacactagagctctgaggaga

SEQ ID NO: 159648 - DNA, 80 bp, synthetic construct
  source 1..80: mol_type = other DNA
cgattggaactgggtgattacaaactagtagagataacaccaattggctttgctcccacaagtgtgaaaagatattcctc

SEQ ID NO: 159649 - DNA, 80 bp, synthetic construct
  source 1..80: mol_type = other DNA
tccgggagagcaaaatgtgggtactaccacccccgttgcctccacgacctccccacttaatagaattcccgccgtctcct

SEQ ID NO: 159650 - DNA, 80 bp, synthetic construct
  source 1..80: mol_type = other DNA
taacgatggaatggccaccaggtttccgctgtagagtcgctccttgaaggcctcggttattgccaccgccccaaggtagg

SEQ ID NO: 159651 - DNA, 80 bp, synthetic construct
  source 1..80: mol_type = other DNA
tcagtctggaccgtttgcataccggggcgacgaaaaaagctgtgtgttagccataaagtacattttcagatggaaatggg

SEQ ID NO: 159652 - DNA, 80 bp, synthetic construct
  source 1..80: mol_type = other DNA
accacgggctgtaccatacaggggagaggtggtagatctagtgagtggatccatatctcccttgacctcagtggcaacca

SEQ ID NO: 159653 - DNA, 80 bp, synthetic construct
  source 1..80: mol_type = other DNA
ggattttatgtacttaaaaactcctactatgacacctacatgtcaaacttagcaggcacagacagagacaatcaaagaaa

SEQ ID NO: 159654 - DNA, 80 bp, synthetic construct
  source 1..80: mol_type = other DNA
acagcaccagcactacacccaggcaacctaatgctgcaaaagagaaaaatcctggtccccagcttattgaccagaccaaa

SEQ ID NO: 159655 - DNA, 80 bp, synthetic construct
  source 1..80: mol_type = other DNA
aaaggtgtgctcttatttgggtattccttatgtaattaaacagggtgactcatggttaaagaaattcaccgaagcctgca

SEQ ID NO: 159656 - DNA, 80 bp, synthetic construct
  source 1..80: mol_type = other DNA
cctgtgttacaatattggaggttgaaaactttaacgctaccactgaagcagacaagaaaaagcaattcaccagatggcct

SEQ ID NO: 159657 - DNA, 80 bp, synthetic construct
  source 1..80: mol_type = other DNA
taccacagctattcactcacacacaaccaaacaaaggctatgtaccctatggaaatgactttggctggggaagaatgcca

SEQ ID NO: 159658 - DNA, 80 bp, synthetic construct
  source 1..80: mol_type = other DNA
gcgcccgttctcacccatcaagtcatgtacgtaccaccaggtggggcggttcccgccagcgtggatgactacgcatggca

SEQ ID NO: 159659 - DNA, 80 bp, synthetic construct
  source 1..80: mol_type = other DNA
tggctacccttggacgacgcagggccggtcccgccggtccctgttcaacgaggatggcactcctgtccctgaactccagg

SEQ ID NO: 159660 - DNA, 80 bp, synthetic construct
  source 1..80: mol_type = other DNA
acaaatttcatagtaatgtaaaagagctagtcttcaaatttggcataccaagattagtggcaaaacaaatagtggatact

SEQ ID NO: 159661 - DNA, 80 bp, synthetic construct
  source 1..80: mol_type = other DNA
gtactgggacagaccccccagaaagttccacacagacaccccctactacccctgggctccgccacccaaacctgcctttt

SEQ ID NO: 159662 - DNA, 80 bp, synthetic construct
  source 1..80: mol_type = other DNA
caacaacatatcctaatatgacttcatacaacacatgggtagctaactttaaaaagccaaatgtaaatgtacatttcaac

SEQ ID NO: 159663 - DNA, 80 bp, synthetic construct
  source 1..80: mol_type = other DNA
cagacagcggtgcataatgctgcaatgggggttgccgcaggtaacttgacaatatatccccatcaatgggtgaatttaag

SEQ ID NO: 159664 - DNA, 80 bp, synthetic construct
  source 1..80: mol_type = other DNA
ccaaacacgtgcgtgcatgggtccccagaccaccgcgcttgtgtaagtatttacatgctggaaatatgaactttgaggtg

SEQ ID NO: 159665 - DNA, 80 bp, synthetic construct
  source 1..80: mol_type = other DNA
ttgcgctggggacgtggtgttgattgcggcgggcacgcggtgttgcttgcggcagggaggcttttgcgctgcgtggactc

SEQ ID NO: 159666 - DNA, 80 bp, synthetic construct
  source 1..80: mol_type = other DNA
aggaaaatacagtcctatatttttaagtccatacagaaccaacacacaatttcccactgcatacacagatgtaacctata

SEQ ID NO: 159667 - DNA, 80 bp, synthetic construct
  source 1..80: mol_type = other DNA
ttcttggcttaagaaattcactgaaatgtgtaatgcagcacggggattagaatggattggcaacaagatttcaaaattca

SEQ ID NO: 159668 - DNA, 80 bp, synthetic construct
  source 1..80: mol_type = other DNA
agactcagaacacaagctacactttactaaccacctttttaacaaaatagcttactataatacatttgaaaccatagctc

SEQ ID NO: 159669 - DNA, 80 bp, synthetic construct
  source 1..80: mol_type = other DNA
ctatggcaaacttggaagataagggtagagccttcactagtgattatgtcattgctagcaccaacatagccatgttgacc

SEQ ID NO: 159670 - DNA, 80 bp, synthetic construct
  source 1..80: mol_type = other DNA
gtggtggtggaaattaccagatgcactcaaagacatgggcatatttggagagaacatgtattatcattaccttggtagga

SEQ ID NO: 159671 - DNA, 80 bp, synthetic construct
  source 1..80: mol_type = other DNA
ttatgtaacacaacccacatatataaagatgaagtatacacagtgaaagggggtatgccatcaggaatttcagggacttc

SEQ ID NO: 159672 - DNA, 80 bp, synthetic construct
  source 1..80: mol_type = other DNA
ttgtaccatatggggacataaacctaagtggcaatccaacaaccaggctactaaagtataactacccaactaaaccagga

SEQ ID NO: 159673 - DNA, 80 bp, synthetic construct
  source 1..80: mol_type = other DNA
tggattaggaccaagatttggaggggtgtacacatctaatgcgaaaataatgaactttcatttgatgacaccagaagatc

SEQ ID NO: 159674 - DNA, 80 bp, synthetic construct
  source 1..80: mol_type = other DNA
acttttctgtgcgcctactcaaggacacaccatttgttaggcaagatcagtacgtcaacacacaaggaattgaagataca

SEQ ID NO: 159675 - DNA, 80 bp, synthetic construct
  source 1..80: mol_type = other DNA
gcagtgtaatctgcacaaagaggcgtggggcgcgcaacgttgggaggtcgttggcggcaggcgtgaggccgtgctttagg

SEQ ID NO: 159676 - DNA, 80 bp, synthetic construct
  source 1..80: mol_type = other DNA
aattagcttatttggataggggcttttacaaacactatggtatcattgtgggtgataaagtttaccagttagattctgat

SEQ ID NO: 159677 - DNA, 80 bp, synthetic construct
  source 1..80: mol_type = other DNA
cagttttatgatcccccaccccaaatgtaacttagaagcatgtacacaatgatcaacagggtggtggctatccaagtcac

SEQ ID NO: 159678 - DNA, 80 bp, synthetic construct
  source 1..80: mol_type = other DNA
gaaacaatagacacagtaaaatcaaaaaaagaccaacaaataaccacaggatttacattaaaagaccaaccatattacta

SEQ ID NO: 159679 - DNA, 80 bp, synthetic construct
  source 1..80: mol_type = other DNA
gacgaccatgataatgcagtaagtgttatgtggagcagagaccttatggtggttaacagtagggcacaagggactgatac

SEQ ID NO: 159680 - DNA, 80 bp, synthetic construct
  source 1..80: mol_type = other DNA
ttgtggcaattttattaatcatttgtcttatctgggtgagcgttatggcttccgaccgggccctagggctcctggagcac

SEQ ID NO: 159681 - DNA, 80 bp, synthetic construct
  source 1..80: mol_type = other DNA
gtcgctgctacgtcataagtcacgtggggatggctgcgtcacaacccggaagctgtactcctcacgtgacttgtcacgtg

SEQ ID NO: 159682 - DNA, 80 bp, synthetic construct
  source 1..80: mol_type = other DNA
cgaacgcctactcacacttctatgacgggttctccaaaataccgttaaaagaccagaaggcagcattgggtgattcgctt

SEQ ID NO: 159683 - DNA, 80 bp, synthetic construct
  source 1..80: mol_type = other DNA
gtgaatgcaactcctatggattccatgttgagacacaacaattggtcactactaatagtgcctatatcagaattaagagg

SEQ ID NO: 159684 - DNA, 80 bp, synthetic construct
  source 1..80: mol_type = other DNA
agggaaatttattgactggttgaaagaaaaactaatccccacagtacagcggaaaaaggaaacactggaacaatgcaaga

SEQ ID NO: 159685 - DNA, 80 bp, synthetic construct
  source 1..80: mol_type = other DNA
accttgaacatgagaaagatggtgcagatgtttacaataaagaagggaacaatttctcaaaatggaaaattacgttaaag

SEQ ID NO: 159686 - DNA, 80 bp, synthetic construct
  source 1..80: mol_type = other DNA
cgaaacaatgatccacgctggaacaggagctgtagtgaaatattttaatgtcaactactacaaggatgcagcaagttccg

SEQ ID NO: 159687 - DNA, 80 bp, synthetic construct
  source 1..80: mol_type = other DNA
gtaaggagaaaaacatgggggaggcggaggagacgcagacgcacttacagacgcaggcggactgtcagactcagacgcag

SEQ ID NO: 159688 - DNA, 80 bp, synthetic construct
  source 1..80: mol_type = other DNA
cagggtcatgattctcagcaccatcagcagagtgaaaaccaggctgagaaacaccttgacggccgccaaaagcgcgcgtt

SEQ ID NO: 159689 - DNA, 80 bp, synthetic construct
  source 1..80: mol_type = other DNA
tatatcggtttctatcagattaggaaacctccttggctcatggaacaacctccacccccatctcgccaaaccaaaccgga

SEQ ID NO: 159690 - DNA, 80 bp, synthetic construct
  source 1..80: mol_type = other DNA
actcagatgatgatgacctagtaggggtacctgtcacaccaagaacaccattgagaacaatgacatacaagatggcaata

SEQ ID NO: 159691 - DNA, 80 bp, synthetic construct
  source 1..80: mol_type = other DNA
cagcaattggcaggctgtatagagttttattagattttgtgtataattgtttagcagcaattggcaagctgcttttaaaa

SEQ ID NO: 159692 - DNA, 80 bp, synthetic construct
  source 1..80: mol_type = other DNA
agacgcgcattgtagttccagccagtactccaaccaacatggccatgctcgcctttgtcagtgcttgtcccgattttagt

SEQ ID NO: 159693 - DNA, 80 bp, synthetic construct
  source 1..80: mol_type = other DNA
ccaacagaaaaaggagaccaaaatcaagaagaaggctggtctttacaggcgcaaagacccctcacatcgtcagaagagac

SEQ ID NO: 159694 - DNA, 80 bp, synthetic construct
  source 1..80: mol_type = other DNA
agcctttatggctacagctcctttacacccaaagatgcagatggaattaagaacataactataataagaaatgcaaactt

SEQ ID NO: 159695 - DNA, 80 bp, synthetic construct
  source 1..80: mol_type = other DNA
actaatgacgtagatgtgactgttttaggcagcctgcttcagcttgattttcaaaatccaaggacatatgatacagatgt

SEQ ID NO: 159696 - DNA, 80 bp, synthetic construct
  source 1..80: mol_type = other DNA
ggctggctccacggtggaaagagatttcaactatgtccattacatactgaattgcctgggtagtctcatcatcatactag

SEQ ID NO: 159697 - DNA, 80 bp, synthetic construct
  source 1..80: mol_type = other DNA
aaagagaatttaagaatgaagcaccctatgatggccaattggagcacattatatcccaaatggcttacataactggatca

SEQ ID NO: 159698 - DNA, 80 bp, synthetic construct
  source 1..80: mol_type = other DNA
agctaggttttcaaccctaaataaaatgcaaggccgtgggagtttcacttgtcggtgtctgcttattaaggtcaccaagc

SEQ ID NO: 159699 - DNA, 80 bp, synthetic construct
  source 1..80: mol_type = other DNA
agaaatttgccaagtggattctatgatacctgtaaacaatgttgaattgaataaaaactctgtgaatatgtactctgttg

SEQ ID NO: 159700 - DNA, 80 bp, synthetic construct
  source 1..80: mol_type = other DNA
ctaccgcgtggtgttgtatatgttacgatgcggtgtgtctgtcggtgtaattggatgtctgttacttatcactggcgtcg

SEQ ID NO: 159701 - DNA, 80 bp, synthetic construct
  source 1..80: mol_type = other DNA
caggtttgttgcggacgacgtttacacagatgcaggcttcgtaacctgttggtatcaaacaagtgttgttgcgccagctg

SEQ ID NO: 159702 - DNA, 80 bp, synthetic construct
  source 1..80: mol_type = other DNA
gcatggtgctgccaggccgcacctgcaggaaccagttgtgcggaatgccgagcgacaacacctggtcgacgtggttacgg

SEQ ID NO: 159703 - DNA, 80 bp, synthetic construct
  source 1..80: mol_type = other DNA
ttccagatttgatttggagatgacttttgtaattactgagagatattataccagtagttcaggacatgcccgaaaccagg

SEQ ID NO: 159704 - DNA, 80 bp, synthetic construct
  source 1..80: mol_type = other DNA
ctacagtacccataacaatatctatcagccctatgtatgcagagttttcaggagcacgtgcaagaagtcagggattacca

SEQ ID NO: 159705 - DNA, 80 bp, synthetic construct
  source 1..80: mol_type = other DNA
acaaagtgtagttatcatggatgatgtgatgcaaaatccaagtggagatgacatgactctattctgtcagatggtctcta

SEQ ID NO: 159706 - DNA, 80 bp, synthetic construct
  source 1..80: mol_type = other DNA
ttgtgctgtccaggcctgcatggccagtttttccctgaagctagcagaaattctgagggccactgaaatgaggaagcgaa

SEQ ID NO: 159707 - DNA, 80 bp, synthetic construct
  source 1..80: mol_type = other DNA
cgggagccagatggtgggtcgaatgatgagatccgattgactaaactggcgcacgcccactatgagggcgcagataccgg

SEQ ID NO: 159708 - DNA, 80 bp, synthetic construct
  source 1..80: mol_type = other DNA
gtgttttctttgatgtttttgagggaactaaagagcctgctgtgttgaccgaaaaggatccccgtctaacaactgatttc

SEQ ID NO: 159709 - DNA, 80 bp, synthetic construct
  source 1..80: mol_type = other DNA
aaacacacgtagtgatgggagaatactggccataccattggacatgagcaatacattgttctccacgacactcttggtgg

SEQ ID NO: 159710 - DNA, 80 bp, synthetic construct
  source 1..80: mol_type = other DNA
tgtaatgatttttctgctagactgcttaaggatactccatttgtcagacaagaagcctacgcgaacacacaaggtataga

SEQ ID NO: 159711 - DNA, 80 bp, synthetic construct
  source 1..80: mol_type = other DNA
ggcgtcagctggtatgccgggcgcctatccagtccagacgcttttccgccatggggagctcttccgcttcatctgggccc

SEQ ID NO: 159712 - DNA, 80 bp, synthetic construct
  source 1..80: mol_type = other DNA
tagtaattagaaatcaccacttcagtcatgggagctcaagtatccactcaaaagactggggcccacgaaaaccagaatgt

SEQ ID NO: 159713 - DNA, 80 bp, synthetic construct
  source 1..80: mol_type = other DNA
tctccagagaacactaggtccttttcaagacgtagagacagtgggcataatctgctttatatgcccttacacagacccgc

SEQ ID NO: 159714 - DNA, 80 bp, synthetic construct
  source 1..80: mol_type = other DNA
catctaccaaaggagggttccaatgatttgactgagaaacactacttgagctccagaaatgacattacgtctgtgaccac

SEQ ID NO: 159715 - DNA, 80 bp, synthetic construct
  source 1..80: mol_type = other DNA
gcaggcaatatcagcttttgcagttacagctggaatggtgtacgtcgtgtacaagctctttgcaggtttccaaggggcat

SEQ ID NO: 159716 - DNA, 80 bp, synthetic construct
  source 1..80: mol_type = other DNA
aaaccccgtgtccgccccttttttccccgtgcccgatatacacgatattaaacccacgaccatttccgttcgattagcga

SEQ ID NO: 159717 - DNA, 80 bp, synthetic construct
  source 1..80: mol_type = other DNA
ctacaacagctatcgttatcaaacttatactcacaaaactgtgacttaatgaactggtggactaaatcaaataaccattt

SEQ ID NO: 159718 - DNA, 80 bp, synthetic construct
  source 1..80: mol_type = other DNA
tcttgggttttctcacaacagcaggagctgcaatgggtgcggcgtccttgacgctgtcggctcagtctcggactttattg

SEQ ID NO: 159719 - DNA, 80 bp, synthetic construct
  source 1..80: mol_type = other DNA
tcccacaaccaggaaggaggctatgttaggtacccatgtcatctgggaccttggactacagtctagtgtgacacttgtcg

SEQ ID NO: 159720 - DNA, 80 bp, synthetic construct
  source 1..80: mol_type = other DNA
gctgcctcgcagggtggtcctaggaatccgcccccgctgaggcgcctgcccgcgctgcccccggctcccagcacccctag

SEQ ID NO: 159721 - DNA, 80 bp, synthetic construct
  source 1..80: mol_type = other DNA
tgcgccaggcaggactgcagcttggccagaccctcggtggccacctggcgcaggtactgctccttgcgcttgagcgcgtc

SEQ ID NO: 159722 - DNA, 80 bp, synthetic construct
  source 1..80: mol_type = other DNA
atcttggctaccctcgccttattaggttgcagcaaatcaccatggacattcttgaaggaaaaaatctgtttgtggcttgg

SEQ ID NO: 159723 - DNA, 80 bp, synthetic construct
  source 1..80: mol_type = other DNA
acaaccccagcacagaagcttcagaagggagaaaatttgcagccttagattatctattgggttgtggtgtgctagctggg

SEQ ID NO: 159724 - DNA, 80 bp, synthetic construct
  source 1..80: mol_type = other DNA
cggagcattcggtcagcaatcgggagccgcgtacgtggggaattacagactggtcaacagacatctagccactcaccatg

SEQ ID NO: 159725 - DNA, 80 bp, synthetic construct
  source 1..80: mol_type = other DNA
accgtggggagggggcatgactacaaccaggttcactcttagaatcctgtacgacgagtttaccaggtttatgaacttct

SEQ ID NO: 159726 - DNA, 80 bp, synthetic construct
  source 1..80: mol_type = other DNA
aggctacacataccccactggcgacagtggtgtagcctgcgtggtgccctacccaggccttcttggcctgggattccact

SEQ ID NO: 159727 - DNA, 80 bp, synthetic construct
  source 1..80: mol_type = other DNA
gcggacgggcgtggaaaactcagccattcggaagtgcacttcctgggctgggtcttcgagtccatataactaagcgcact

SEQ ID NO: 159728 - DNA, 80 bp, synthetic construct
  source 1..80: mol_type = other DNA
cttcagaccagcctacatagacatcacctacaatcccatcactgacaaaggagagggcaacattatctggttccagtacc

SEQ ID NO: 159729 - DNA, 80 bp, synthetic construct
  source 1..80: mol_type = other DNA
gtgaattcaaaagaagtgcccgcactaactgctgttgagactggagcgactagccaggttgacccatcagacttaataga

SEQ ID NO: 159730 - DNA, 80 bp, synthetic construct
  source 1..80: mol_type = other DNA
tgtcacaaagaaggttaatgatgagaggattctagtgttgcccttggaaatgaacaacactttgttttccacaactttac

SEQ ID NO: 159731 - DNA, 80 bp, synthetic construct
  source 1..80: mol_type = other DNA
tcaatgaatgccccaccacctccagcaatagcagacctgttacaatcagttagaaccccagaagttataaaatattgtga

SEQ ID NO: 159732 - DNA, 80 bp, synthetic construct
  source 1..80: mol_type = other DNA
tagaaagtcacggtcatcataaggaagacgatggcgccgtagccgtagagtagaatacgctgatgatggaacacggtctg

SEQ ID NO: 159733 - DNA, 80 bp, synthetic construct
  source 1..80: mol_type = other DNA
ataagcactacccggtggtgttcgaggggccgggtatggtggaagtccaagaaagtgaatactaccccaaggagtatcaa

SEQ ID NO: 159734 - DNA, 80 bp, synthetic construct
  source 1..80: mol_type = other DNA
tgggatatggtgctgctcttcttaggaaatatttcgtggaatcgcagggtgaaataatctcaaagaagtctgtgaccgag

SEQ ID NO: 159735 - DNA, 80 bp, synthetic construct
  source 1..80: mol_type = other DNA
gaggtgttctttggactctctagatacctgcccctctttctctgtggggcgatggcctccgggaggctgtacctgggcca

SEQ ID NO: 159736 - DNA, 80 bp, synthetic construct
  source 1..80: mol_type = other DNA
ttcgcaggtttattccagaacatgtgaaagaatggagcaatatgcgcttaatcacaaatgtcagcaaatttccaatgtta

SEQ ID NO: 159737 - DNA, 80 bp, synthetic construct
  source 1..80: mol_type = other DNA
taaagccatacaatggttggaaagaaacaaggaacatgtgtgtggggtactggattatgcttctgatatcattgttgagt

SEQ ID NO: 159738 - DNA, 80 bp, synthetic construct
  source 1..80: mol_type = other DNA
tgggttcaccccgttgtcgtataaatccttaagcactttgttctttatcctgaacttaaatacaagaaaatgggggctca

SEQ ID NO: 159739 - DNA, 80 bp, synthetic construct
  source 1..80: mol_type = other DNA
tttggtatcaaaccaactttgtcgtgcccactggggcacccactagtgcctacattatagctcttggggcagctcagaag

SEQ ID NO: 159740 - DNA, 80 bp, synthetic construct
  source 1..80: mol_type = other DNA
ctagaaaaggtacaaataatggactgatactcacaataccgctagagatgagcaataccctcttttccactaccttgctg

SEQ ID NO: 159741 - DNA, 80 bp, synthetic construct
  source 1..80: mol_type = other DNA
agactggctgacaggaagaagccaaccacaaagtaagatggcggacagaaaggaaactagctgagatagcagggactttc

SEQ ID NO: 159742 - DNA, 80 bp, synthetic construct
  source 1..80: mol_type = other DNA
ccgcagcgagaacgccacggagggagatcctccagctattagacatacaaaatacataataaaacaaagtactgtaaaaa

SEQ ID NO: 159743 - DNA, 80 bp, synthetic construct
  source 1..80: mol_type = other DNA
actaaacaaagacaccaaggatacatcaaaaatggaagagtgcctaagtaaatatggaattgacttgccattagtgacat

SEQ ID NO: 159744 - DNA, 80 bp, synthetic construct
  source 1..80: mol_type = other DNA
taatgataagtggtactttcaaaaggacttctgcaaagtgccactagtacaaattggggcctcaatagggaacttgcggt

SEQ ID NO: 159745 - DNA, 80 bp, synthetic construct
  source 1..80: mol_type = other DNA
acagacggtcgaacattggtaactgtatggaggcattgttccaagggcccattcaatataaagatcttaggatagacatt

SEQ ID NO: 159746 - DNA, 80 bp, synthetic construct
  source 1..80: mol_type = other DNA
atactcctttttacccttacatacccagaaacccaggctttagagtgtcctttaagctagggtttaaaccctaataaaat

SEQ ID NO: 159747 - DNA, 80 bp, synthetic construct
  source 1..80: mol_type = other DNA
cacatcagtgtgtagattttacaccttagatagtaaaacttggaataatacatcaaaagggtggtgttggaaactgccag

SEQ ID NO: 159748 - DNA, 80 bp, synthetic construct
  source 1..80: mol_type = other DNA
gcgatggacaccatcatccacaactcggtgagcgtcccacccaaagggagggggggtagtttaatagcggagacggatac

SEQ ID NO: 159749 - DNA, 80 bp, synthetic construct
  source 1..80: mol_type = other DNA
aacgatatgctagctggaggatcaacacccgacaaatggtgcaattgagaagaaaattcgaactatttacatacttacgg

SEQ ID NO: 159750 - DNA, 80 bp, synthetic construct
  source 1..80: mol_type = other DNA
ttgtcggccgacatgccgatggtatgggcggcggcggcagtggccgcggcagcggagaggagaggagagagaagaggagc

SEQ ID NO: 159751 - DNA, 80 bp, synthetic construct
  source 1..80: mol_type = other DNA
agtatgtcctacgcaaccgtcctgatggacaggaggaatactattacttgacagtatcaactggaggagtaaccccggtg

SEQ ID NO: 159752 - DNA, 80 bp, synthetic construct
  source 1..80: mol_type = other DNA
taccatccaggcatgctcatgcaaaccagacacaagatactggttcccagctttgacactagacccaagggacgagcaaa

SEQ ID NO: 159753 - DNA, 80 bp, synthetic construct
  source 1..80: mol_type = other DNA
aattcaaccgctgtgatcacatcaacgtcaaaaggcacgcaaatatccacaagcaaagatgtaacgtcaattagcacacg

SEQ ID NO: 159754 - DNA, 80 bp, synthetic construct
  source 1..80: mol_type = other DNA
agctgtacgccgccctcgaaggagacgagtaaggaggcgccgcggtcgggggtggtacagagggcgacgctactctcgca

SEQ ID NO: 159755 - DNA, 80 bp, synthetic construct
  source 1..80: mol_type = other DNA
gatcagatatcagctaaggttactgaactgcaagatgtggccaaggatttccttactacaaaagttctctccaaagtggt

SEQ ID NO: 159756 - DNA, 80 bp, synthetic construct
  source 1..80: mol_type = other DNA
ggaagatgaaagacccctagggctgagagatcgccaattggtgatgggttgctgctgggctttcaaaaaacacaaagtca

SEQ ID NO: 159757 - DNA, 80 bp, synthetic construct
  source 1..80: mol_type = other DNA
tgagcaggtcggcctcggaccacgcgatctcaaacaggcgtgtggtgtcaaagaccgtaacgaccagcatgaagctgagc

SEQ ID NO: 159758 - DNA, 80 bp, synthetic construct
  source 1..80: mol_type = other DNA
tcggcagcgtcatcgacctgccgctctggtgtctgtgtcgactcaagtgcgagcgccatctggacgcgcgctcgctggtg

SEQ ID NO: 159759 - DNA, 80 bp, synthetic construct
  source 1..80: mol_type = other DNA
ctgtaagcaatgtccaatcatgtgccaagacgagcactgtaccaaaattgaatatgaatgaacaacaatctgggcatgac

SEQ ID NO: 159760 - DNA, 80 bp, synthetic construct
  source 1..80: mol_type = other DNA
aaataataaaaacagagaatgttagagatagagatctcccaactatacatacaccaagcaagacaaaactgcaacccagt

SEQ ID NO: 159761 - DNA, 80 bp, synthetic construct
  source 1..80: mol_type = other DNA
tacacaacttacaaaaacgccaacccaggtgaaacaggtggggtatttgtggatagcttcacagcaagtactcaggcctc

SEQ ID NO: 159762 - DNA, 80 bp, synthetic construct
  source 1..80: mol_type = other DNA
tctggctgtagtggtttccttgtacgtcgtgccggggcagccgctggtgcaggctgtggagcaccaatgtctgctagctg

SEQ ID NO: 159763 - DNA, 80 bp, synthetic construct
  source 1..80: mol_type = other DNA
cagaacataagagatggattcaacgatgttagcaaagctgtgacagataaattaacatcaaaagtgttcaaatggttggt

SEQ ID NO: 159764 - DNA, 80 bp, synthetic construct
  source 1..80: mol_type = other DNA
cgcgtctccgtctatttaatacgatgtcattggccgctgcgaagggagaagaggggacacgcgaataagccatgccgtcc

SEQ ID NO: 159765 - DNA, 80 bp, synthetic construct
  source 1..80: mol_type = other DNA
cgcaggagaaggagcaacagcctgcggaggttcggccgccgcgggccaggacctcatcagcgtcccccgcaacaccttta

SEQ ID NO: 159766 - DNA, 80 bp, synthetic construct
  source 1..80: mol_type = other DNA
actgggcaccttacacactgtgccgggtaccaacacgatgagattattctacatggacactcaatcaaataccttgaaca

SEQ ID NO: 159767 - DNA, 80 bp, synthetic construct
  source 1..80: mol_type = other DNA
cggcacaataacatcagtttagttataataccaattgtccaactgagatcaagtaatggtactgtgaatacattaccaat

SEQ ID NO: 159768 - DNA, 80 bp, synthetic construct
  source 1..80: mol_type = other DNA
ctaccaatcaccatatctattgctcctatcaaatcagagttttcaggggctagacaggccattaaagctactgttcaggg

SEQ ID NO: 159769 - DNA, 80 bp, synthetic construct
  source 1..80: mol_type = other DNA
caacgtgggtaccgacagccgcgagagcttgatctccatgggcaccacggcgtacgtgccctgcgcgtacagcctaaagt

SEQ ID NO: 159770 - DNA, 80 bp, synthetic construct
  source 1..80: mol_type = other DNA
gggacggtgtttccgcgcgctgccggtgcgttccacggtccctgtctgtgtcgtttcggcgctgcgcttctcggtggttt

SEQ ID NO: 159771 - DNA, 80 bp, synthetic construct
  source 1..80: mol_type = other DNA
aggcgcaaacggatcagggccatttcacaatgctcggtgttcgcgaccgattagccatcttgccgcgacacgcacaacca

SEQ ID NO: 159772 - DNA, 80 bp, synthetic construct
  source 1..80: mol_type = other DNA
cggcctgagggacggtggtggggacggggggctgcttgcagcggggacttgcgaagacgggtgtgttgattgcagcgggg

SEQ ID NO: 159773 - DNA, 80 bp, synthetic construct
  source 1..80: mol_type = other DNA
agccggtgtccgaggagtcgtcgtcttcctcctcgctgtcttcgaccggtgactctgcagtttggtcccttaaagcccaa

SEQ ID NO: 159774 - DNA, 80 bp, synthetic construct
  source 1..80: mol_type = other DNA
aagcaacactgcaagggccagagcatgagttcatacaagcactagtcagaagaaattgccatgtgttaacaacaaaaaga

SEQ ID NO: 159775 - DNA, 80 bp, synthetic construct
  source 1..80: mol_type = other DNA
cgcgagaccatgagagcgtcgacctcaagggatgctctcccgaatactgaatccagtggaccagcgcactccaaagagat

SEQ ID NO: 159776 - DNA, 80 bp, synthetic construct
  source 1..80: mol_type = other DNA
catacgacgccaagacgggacgtgtctcacaaacatatcccgcaacgtcttgcgcgctgtgtgtgtccacagcaatgctg

SEQ ID NO: 159777 - DNA, 80 bp, synthetic construct
  source 1..80: mol_type = other DNA
gctcttaaaaaagccatgtttctcggtaaactacacagaaggaagagggcactgtcactgcgcggcctgccaactccaaa

SEQ ID NO: 159778 - DNA, 80 bp, synthetic construct
  source 1..80: mol_type = other DNA
tggaaacagaatatacatccagtggtgctcagaggcagatgttagctacaacaggaccaagtccaagtgtctcctacagg

SEQ ID NO: 159779 - DNA, 80 bp, synthetic construct
  source 1..80: mol_type = other DNA
cagtctgctgcagcgagcctggatcgataaatttatctaatgtcttaatgtagaaacctatctgtgtaggagtaggattt

SEQ ID NO: 159780 - DNA, 80 bp, synthetic construct
  source 1..80: mol_type = other DNA
tttacagacgtagatttaaaaagagacgcaggagacgcagaaaactgactcttaaaatgtggaatccatccacaattaga

SEQ ID NO: 159781 - DNA, 80 bp, synthetic construct
  source 1..80: mol_type = other DNA
cgaattgtgatatttctctgcaggaaatagaacagcctggtacctataaaacggacaatgcagtactgtagcagcgtaac

SEQ ID NO: 159782 - DNA, 80 bp, synthetic construct
  source 1..80: mol_type = other DNA
gccctgggcaaggctcttaaaaaagctatgtttctgggtaaactttacagaaagaagagggcactgtcactgcgcggcct

SEQ ID NO: 159783 - DNA, 80 bp, synthetic construct
  source 1..80: mol_type = other DNA
gctagctctactttaaagctattaattgcatacacacctcctggtgttggaaagcccagatccaggagagaagccatgct

SEQ ID NO: 159784 - DNA, 80 bp, synthetic construct
  source 1..80: mol_type = other DNA
aaacatctaagacataacaaccgcacacctggtctccactggccgaaggcaactagcaataaggtaggtgggttcagacg

SEQ ID NO: 159785 - DNA, 80 bp, synthetic construct
  source 1..80: mol_type = other DNA
gtaaggtcagaatatatttcaaacccaaacacgtgaaggcatgggtacccagaccgccgagattgtgtgaatacacccac

SEQ ID NO: 159786 - DNA, 80 bp, synthetic construct
  source 1..80: mol_type = other DNA
atcatcagtcactctagttgtcccctggatatcaaacacccacttcaggacacaggccactggtaactattatgattact

SEQ ID NO: 159787 - DNA, 80 bp, synthetic construct
  source 1..80: mol_type = other DNA
agagacgaccacatgccttcaatggtaagccacggtgctttcggtcagcagtctggcgccatttacgtgggtaactacag

SEQ ID NO: 159788 - DNA, 80 bp, synthetic construct
  source 1..80: mol_type = other DNA
agatcccccccaaatttcaagtgtctttcaaactgggctggaaataaataaacaaggcctttcactgttcacttgtcggt

SEQ ID NO: 159789 - DNA, 80 bp, synthetic construct
  source 1..80: mol_type = other DNA
tgtcagaatatagagtagttatgagaagtccctatacctggccactaatgacaaaagcttcagatgacaaatggggattt

SEQ ID NO: 159790 - DNA, 80 bp, synthetic construct
  source 1..80: mol_type = other DNA
tggatccaatcccgaaacgttaaacgttttactctttaacttattgaaattgtttgaagacaggatttcagtgtcacaat

SEQ ID NO: 159791 - DNA, 80 bp, synthetic construct
  source 1..80: mol_type = other DNA
agcatttaataccaatagtctcctgaatgtagccaaagcgcttctcccatgtacagattgccccaagcctgagcactaca

SEQ ID NO: 159792 - DNA, 80 bp, synthetic construct
  source 1..80: mol_type = other DNA
tcgataacagggaagaaggtacaggcggcggtgtgtaatgcaggaatggaggttggcgtgggcaatctgacgatattccc

SEQ ID NO: 159793 - DNA, 80 bp, synthetic construct
  source 1..80: mol_type = other DNA
aagcaaagatcatcagagattatggaggaggaaaagaattggatagtagttccaacttggagggtgccgagaaggttaga

SEQ ID NO: 159794 - DNA, 80 bp, synthetic construct
  source 1..80: mol_type = other DNA
gactttactaaacagaaaccaaacaaccagaacccccacggcgggggcatgtccacagtgacctttaacctaaaggtgct

SEQ ID NO: 159795 - DNA, 80 bp, synthetic construct
  source 1..80: mol_type = other DNA
atataagtaacagcacttccgaatggctgagttttctacgcccgtccgcagcggcagcaccacggagggtgatccccgcg

SEQ ID NO: 159796 - DNA, 80 bp, synthetic construct
  source 1..80: mol_type = other DNA
taagaactaccattccaggacggagtcgtctattgagaatttcctttgcagagctgcatgtgtgtacataacaacataca

SEQ ID NO: 159797 - DNA, 80 bp, synthetic construct
  source 1..80: mol_type = other DNA
gtagacttgccactatggatgtgtttcctaggatacacagactatatagcaaaagcaacaaaaagtgcaggatactggaa

SEQ ID NO: 159798 - DNA, 80 bp, synthetic construct
  source 1..80: mol_type = other DNA
gagggggagtttcggggacggagtgttgcggggacgcggtgttgcagggacggaggttacgttggggacggaggtggcgg

SEQ ID NO: 159799 - DNA, 80 bp, synthetic construct
  source 1..80: mol_type = other DNA
gcaattagactaagaatagcaccccccacactctttacagacaagtggtactttcaaaaggacatagccgacctcaccct

SEQ ID NO: 159800 - DNA, 80 bp, synthetic construct
  source 1..80: mol_type = other DNA
gccgtacacaatgccggtatgggtattgcagcagggaacctcactatttatccacaccaatgggtcaacttgagaaccaa

SEQ ID NO: 159801 - DNA, 80 bp, synthetic construct
  source 1..80: mol_type = other DNA
tcgttttatcaggagcttatacaggatacatatccatactccctaacaatgcaacagacacaaaactattcgaatttgta

SEQ ID NO: 159802 - DNA, 80 bp, synthetic construct
  source 1..80: mol_type = other DNA
taaaaatagaccaggtaaaaaacactatataaaaattagagtaggggctcctaaaatgttcacagataaatggtaccctc

SEQ ID NO: 159803 - DNA, 80 bp, synthetic construct
  source 1..80: mol_type = other DNA
attttgaatgggtcccgctaaaatgtaataccgtggaaactcggtcatgttcatagtcagatttttaatgtgttgtctgg

SEQ ID NO: 159804 - DNA, 80 bp, synthetic construct
  source 1..80: mol_type = other DNA
gtatagtccaataaatactccagccaagactaaacttctacccagtgtcttttataatatttttcctggggttaaagaac

SEQ ID NO: 159805 - DNA, 80 bp, synthetic construct
  source 1..80: mol_type = other DNA
agtggaggagtttgtggaccacacactgcaaaaggtcatggctgtcccagatacacaagcttcaggacccacccatacta

SEQ ID NO: 159806 - DNA, 80 bp, synthetic construct
  source 1..80: mol_type = other DNA
gcaaggctcttaaaaaagctcccaaattatgtttttcggcaggccttacagacacaagaaaaggaaagtgctactgtccc

SEQ ID NO: 159807 - DNA, 80 bp, synthetic construct
  source 1..80: mol_type = other DNA
cataagcttgagtccagcagcagaccccagattatcttatacaatgttaggtgaaatcttaaactacttcactcattggt

SEQ ID NO: 159808 - DNA, 80 bp, synthetic construct
  source 1..80: mol_type = other DNA
tggcggcggccacggcctgcgggcaggcgggttgcagcttttgcacggatcacgagggacatgtagatcccactggcaat

SEQ ID NO: 159809 - DNA, 80 bp, synthetic construct
  source 1..80: mol_type = other DNA
atcttcttgccattggatagtattaggggtcgccataggcttcgacctccattttaggccttccggactacaaaaacggc

SEQ ID NO: 159810 - DNA, 80 bp, synthetic construct
  source 1..80: mol_type = other DNA
gctttagggagcaccgttcgtagagctattaataacgccacgagcgtcgaatctgcagccaacaccgtcccgagttcaca

SEQ ID NO: 159811 - DNA, 80 bp, synthetic construct
  source 1..80: mol_type = other DNA
caggcagcggccgatgagttcgcgctcctcgggctccagaaacaggcacagggtgccgtccaggcgcaggtacagctcct

SEQ ID NO: 159812 - DNA, 80 bp, synthetic construct
  source 1..80: mol_type = other DNA
cctttttccttctactaaaaaaaaaaagaaattttcaaaattagattgggagaacgaggctcaattagctgcctggttag

SEQ ID NO: 159813 - DNA, 80 bp, synthetic construct
  source 1..80: mol_type = other DNA
agatttaatagacagggtcgcaagtaatgctttacagttatctcagcccaaacccagcactagccaacaaagtttgccaa

SEQ ID NO: 159814 - DNA, 80 bp, synthetic construct
  source 1..80: mol_type = other DNA
aagcaagtgtctcatagaaaacctacccctatgggcctcagtatacggatacaaagaatactgcagcaaagtaacaggag

SEQ ID NO: 159815 - DNA, 80 bp, synthetic construct
  source 1..80: mol_type = other DNA
gccgccggccgcggccacggacgcgtagcggttacacaatgtttggttgagcgttttgtttcatcgtcgtggtggtggtt

SEQ ID NO: 159816 - DNA, 80 bp, synthetic construct
  source 1..80: mol_type = other DNA
atgggtgcccaggtcagcaaacagagtgttggagcgcacgagaacagcataactgctaacaaaggctctattgttaaata

SEQ ID NO: 159817 - DNA, 80 bp, synthetic construct
  source 1..80: mol_type = other DNA
aaactggacacagtactcagtttggtcacaactcttataaacctaccaaagacaatattgaaaaagcattaaatgcttac

SEQ ID NO: 159818 - DNA, 80 bp, synthetic construct
  source 1..80: mol_type = other DNA
ttcaaatggatccgggtagtagcacggtcatgaggcacactctaacaggtgagatgctgaactattacgcacactggtca

SEQ ID NO: 159819 - DNA, 80 bp, synthetic construct
  source 1..80: mol_type = other DNA
agccctgggaggttctctccagcactggcaggtagagcctgggtgttccctgctagactctcaccagtacttggccggta

SEQ ID NO: 159820 - DNA, 80 bp, synthetic construct
  source 1..80: mol_type = other DNA
cgatgctctgtcgcggcggtttgcttttgatatggaagtgtttgtgatgtcagagcactcaattagaggaaaactaaaca

SEQ ID NO: 159821 - DNA, 80 bp, synthetic construct
  source 1..80: mol_type = other DNA
ttgttttccacaacattacttggggaggtcctgaactactactccaactggtcaggttcaattaagcttagttttatgtg

SEQ ID NO: 159822 - DNA, 80 bp, synthetic construct
  source 1..80: mol_type = other DNA
ctttgttctttatcctgaacttaaatacaagaaaatgggagctcaagtgtcaacccaaaaatctggatctcacgaaactg

SEQ ID NO: 159823 - DNA, 80 bp, synthetic construct
  source 1..80: mol_type = other DNA
gtagatgtcacctataatgcactcttagacaagggtgtgggcaacctagtgtggttccagtacaactccaaagcagacac

SEQ ID NO: 159824 - DNA, 80 bp, synthetic construct
  source 1..80: mol_type = other DNA
cgaaataacctacgtccgtgagtgacgcggtttcgtgttgaaacccgcgcccgcttctcacggtggtttatgatgaaacc

SEQ ID NO: 159825 - DNA, 80 bp, synthetic construct
  source 1..80: mol_type = other DNA
agtggtcagccacaacagccccacaaagtattgttcacagaaatattgtttacttgaaactattcccaaatctgaatgtt

SEQ ID NO: 159826 - DNA, 80 bp, synthetic construct
  source 1..80: mol_type = other DNA
cgaaaagacggccaatggcctttatggcatcaacccggctaatacaatgggcaatttgtgcataagggtagtgaatgcat

SEQ ID NO: 159827 - DNA, 80 bp, synthetic construct
  source 1..80: mol_type = other DNA
cataaggtcagcaccatctttaaattcattagctagtagtgccaatcaatcgcaggccagttcgagagctagcgcaagta

SEQ ID NO: 159828 - DNA, 80 bp, synthetic construct
  source 1..80: mol_type = other DNA
gtggtagcttcatggctacgggcaaagttatcttgtgctacacaccgccaggaggctcatgtccaactgatcgggaatca

SEQ ID NO: 159829 - DNA, 80 bp, synthetic construct
  source 1..80: mol_type = other DNA
tgaccttgacggaagaagtacagtggacagaattggcagaagcagaattgcaagaaaacaagattatcctagaacaggag

SEQ ID NO: 159830 - DNA, 80 bp, synthetic construct
  source 1..80: mol_type = other DNA
agcgaaggttagtggtcactctgcagtgcctggtgctgctttacctggcacctgagtgtggaggtacagaccaatgtgac

SEQ ID NO: 159831 - DNA, 80 bp, synthetic construct
  source 1..80: mol_type = other DNA
ctcaggcgcaatggaaacacggtttcagggtttgcctactcgcatacctagcggtggtcaacaatttatgaccaccgaag

SEQ ID NO: 159832 - DNA, 80 bp, synthetic construct
  source 1..80: mol_type = other DNA
aaacatggtagtcagcgtttccgtgtccagttctggctcccggcagcctcccttcatctccagcaggaccagtttctgga

SEQ ID NO: 159833 - DNA, 80 bp, synthetic construct
  source 1..80: mol_type = other DNA
tctacaaagacaaaagggaaacttctaatagctatgtggactcccccacgcaatgatcaacaataccttaactggcaatg

SEQ ID NO: 159834 - DNA, 80 bp, synthetic construct
  source 1..80: mol_type = other DNA
tcccagttacagtgacaatagccccaatgtatgcggagtacaacgggttaaggttggcatcaacacagggcataccagtt

SEQ ID NO: 159835 - DNA, 80 bp, synthetic construct
  source 1..80: mol_type = other DNA
ccacccggggtccatgatgctcatgacaaaacacaagatcctcattccaagcttcaacacaaaacctaagggtccctcca

SEQ ID NO: 159836 - DNA, 80 bp, synthetic construct
  source 1..80: mol_type = other DNA
cccggcctcacccaggaagagcagcggcagggacagcataaaccaggagaaggcgcaaatgagtccggtgaaggtgacgt

SEQ ID NO: 159837 - DNA, 80 bp, synthetic construct
  source 1..80: mol_type = other DNA
tgctagtaatggctctgtaattaagtattttaacatcaattactataaagactctgccagctctggattgactaaacaag

SEQ ID NO: 159838 - DNA, 80 bp, synthetic construct
  source 1..80: mol_type = other DNA
ctaccaccagtgaggagagcgctgcccgcccccgcggcaccggagcccaaccccggtgagccatggcgtggagctggtgg

SEQ ID NO: 159839 - DNA, 80 bp, synthetic construct
  source 1..80: mol_type = other DNA
gtcaacaatcaaaacacctgttactgcttcaactattaaagaattctttaatcatgcagttgatggtgatgaacaaggtt

SEQ ID NO: 159840 - DNA, 80 bp, synthetic construct
  source 1..80: mol_type = other DNA
ttatcctctttttggggtctctgtgtaatactttaaggtttgctcaggagtgggggcttcttattggttaattcaggtgt

SEQ ID NO: 159841 - DNA, 80 bp, synthetic construct
  source 1..80: mol_type = other DNA
gctgaaaatggaggtgcctgtcacaatgtagaagaggatagccagcactttcatgatttcgtcattgcgcgcgtcgtgaa

SEQ ID NO: 159842 - DNA, 80 bp, synthetic construct
  source 1..80: mol_type = other DNA
acaaaaccagtcagaagcaaatgacacctggtacttaggcaaagcttacaacaatgaaatatcacaagcagcacaaaaaa

SEQ ID NO: 159843 - DNA, 80 bp, synthetic construct
  source 1..80: mol_type = other DNA
gagtgtgtttggaattgatggcctggaggccttagatctgaatacaagtgcaggattcccatatattagcatgggtatca

SEQ ID NO: 159844 - DNA, 80 bp, synthetic construct
  source 1..80: mol_type = other DNA
atacaaattgctttgcatgacccagggagcatacacaggaaatgcaaatcctgtacctaggaaacctgaactgaggaagg

SEQ ID NO: 159845 - DNA, 80 bp, synthetic construct
  source 1..80: mol_type = other DNA
cttattttccaggtctggcagaagtcttgggcatattggcgtgaggaacagggcatgtcaattagttataccaaatatag

SEQ ID NO: 159846 - DNA, 80 bp, synthetic construct
  source 1..80: mol_type = other DNA
gaggggaaaagttattgtcctgctgcaaatatccccgagcccatagatcccaggtaccatcacttcaatttctggcctta

SEQ ID NO: 159847 - DNA, 80 bp, synthetic construct
  source 1..80: mol_type = other DNA
gatggccactggcaagattcttattagttactctccacctggtgccgctcccccgacaactagaaaggatgccatgcttg

SEQ ID NO: 159848 - DNA, 80 bp, synthetic construct
  source 1..80: mol_type = other DNA
ttccttttattcttatcattctgcttatggtgacaatactgtgaaatagtgttgttaccatgggcgctcaagtgagtaaa

SEQ ID NO: 159849 - DNA, 80 bp, synthetic construct
  source 1..80: mol_type = other DNA
tgcttgaattgtctaggaagcctagtgttgattttaggcactgtttatgcagtctataaacttatgtgtttagcccaggg

SEQ ID NO: 159850 - DNA, 80 bp, synthetic construct
  source 1..80: mol_type = other DNA
ggatactactgtacccataactatatccatcagtcccatgtatgccgagttttctggagctcgtgcaagaagccaaggtc

SEQ ID NO: 159851 - DNA, 80 bp, synthetic construct
  source 1..80: mol_type = other DNA
tacaaggtgaaggtgcaaataaactaagaacaggaaacaacagcatatatggccagccaaactatgctcctaactatgag

SEQ ID NO: 159852 - DNA, 80 bp, synthetic construct
  source 1..80: mol_type = other DNA
gccaaataccgcttcagctttatatggggaggtaacactgtccactctcaggtcatcagaaacccgtgcaaagacaacca

SEQ ID NO: 159853 - DNA, 80 bp, synthetic construct
  source 1..80: mol_type = other DNA
tacatcgacgtttccacacagacatgtttcatcacgaccagtggaagctggcgtgcatcgacagctaccgacgtgccttt

SEQ ID NO: 159854 - DNA, 80 bp, synthetic construct
  source 1..80: mol_type = other DNA
caacacccgcgtacccgcagcgcaaaagccccccggtcccgcgcagcgcccgtgtccccgcaacacgcccccgcagcccg

SEQ ID NO: 159855 - DNA, 80 bp, synthetic construct
  source 1..80: mol_type = other DNA
ccctttatccaaatgtagccaccacagtaccatcaggaccaataggcactgtatttaacacatttaaaacccaagaacac

SEQ ID NO: 159856 - DNA, 80 bp, synthetic construct
  source 1..80: mol_type = other DNA
cgtgtcattgttgatcatccccatttgtcctttaagaacatctaatggtgcgcctacaactctgcccattactgtgtcca

SEQ ID NO: 159857 - DNA, 80 bp, synthetic construct
  source 1..80: mol_type = other DNA
atatacagactagtaatggtatgtccttacacttacccaaaactataccatgacactaacccagactatggctttatacc

SEQ ID NO: 159858 - DNA, 80 bp, synthetic construct
  source 1..80: mol_type = other DNA
attgaggaaagctacccttcagggcccagagcatgaattcatgtatgctttagttaaaagaaattgccacatagcaacaa

SEQ ID NO: 159859 - DNA, 80 bp, synthetic construct
  source 1..80: mol_type = other DNA
actattccagcacaagtggtacactcagtcagacctgtgttccgttagtctggtgcaacttaacctgaccgcagcagact

SEQ ID NO: 159860 - DNA, 80 bp, synthetic construct
  source 1..80: mol_type = other DNA
gagggggacggaggtggcgcgccggagaaggagacgttgcgggatggcgggctgttgcgtggcggggacaggggacactt

SEQ ID NO: 159861 - DNA, 80 bp, synthetic construct
  source 1..80: mol_type = other DNA
ccgctggtggtggaaacgacgctggacccgtggccgacttcgcggacgacgggctagaccagctggtcgccgccctcgac

SEQ ID NO: 159862 - DNA, 80 bp, synthetic construct
  source 1..80: mol_type = other DNA
aaggaagtacctatggtctgaccattacaccaccagataaatcaccagaatttactaaaatgaattggaacaatgtaact

SEQ ID NO: 159863 - DNA, 80 bp, synthetic construct
  source 1..80: mol_type = other DNA
ttgctaacgcttactctcatttttacgatgggtacgcagtggtaccgctcaaggactccacactagattcaggtgctgca

SEQ ID NO: 159864 - DNA, 80 bp, synthetic construct
  source 1..80: mol_type = other DNA
tttcttatggccgagtggctcgccttggtgaaactggatctgtaccatgacgggtgctcgacgaacagtcgtcggggctt

SEQ ID NO: 159865 - DNA, 80 bp, synthetic construct
  source 1..80: mol_type = other DNA
tgttctggctcaccttggcgattccttaaggagaaattttgcaaatggacccaattgaattatatacataaggaatcaga

SEQ ID NO: 159866 - DNA, 80 bp, synthetic construct
  source 1..80: mol_type = other DNA
gaaggcattgtatctggatggcaaaactatacacatgggccagggataaggtatccaatgacctttgggtggctgtggaa

SEQ ID NO: 159867 - DNA, 80 bp, synthetic construct
  source 1..80: mol_type = other DNA
tggttgcctggtccttttcgccactcccgagggcattgacaactatgccctcggaacagctgccacctcttttatctatc

SEQ ID NO: 159868 - DNA, 80 bp, synthetic construct
  source 1..80: mol_type = other DNA
cagacttgcaatatccgttcggctcaccactaacgaacagcatctgttgcaacttccaggttcttaacagcaactatgac

SEQ ID NO: 159869 - DNA, 80 bp, synthetic construct
  source 1..80: mol_type = other DNA
aaccataatatactaacacccccaacaatatcctctttacctgccatgaatagaagattctttctggatctggacattga

SEQ ID NO: 159870 - DNA, 80 bp, synthetic construct
  source 1..80: mol_type = other DNA
ggaagaaaagtcgtcgccctgcatcgaagaaaccccacaaacgaagatacagcgacagctcagacagcagctcaaacagc

SEQ ID NO: 159871 - DNA, 80 bp, synthetic construct
  source 1..80: mol_type = other DNA
agttggagtgtagtcggatgttacatccccgttgttggaggtggtagaagttgcggccggtgtcgcggtggtaagtatgg

SEQ ID NO: 159872 - DNA, 80 bp, synthetic construct
  source 1..80: mol_type = other DNA
gagcttatactggtctaccaaataaaaagcctaacttgcccactatcagaatggctaaggtacaagggccggggtttgac

SEQ ID NO: 159873 - DNA, 80 bp, synthetic construct
  source 1..80: mol_type = other DNA
cattgttctatacagaagatcatgaaattatgaaattttcctggaaaggaattactgctgatactagagctttgaggaga

SEQ ID NO: 159874 - DNA, 80 bp, synthetic construct
  source 1..80: mol_type = other DNA
caccatcagactatgacctattacaggagtttggcctatacagtccatactacctgtacccacaaagaataaacctagac

SEQ ID NO: 159875 - DNA, 80 bp, synthetic construct
  source 1..80: mol_type = other DNA
aaggcatcttctcaccaacaagttctctctcagactgtcaagaactactgcgaggtctccaagcagatctcgtgtggaag

SEQ ID NO: 159876 - DNA, 80 bp, synthetic construct
  source 1..80: mol_type = other DNA
ctctcgggtgcatgtcgcccaagagcgcaactacgagcgcgatcgccagcacggaacacatgttgccgtgtgacgagacg

SEQ ID NO: 159877 - DNA, 80 bp, synthetic construct
  source 1..80: mol_type = other DNA
tacaacacgctgaaccatatggggcaactgtacgtgcggcatgttaacggcccttcaccattaccagtgacaagcacagt

SEQ ID NO: 159878 - DNA, 80 bp, synthetic construct
  source 1..80: mol_type = other DNA
agtgaagacttttatcctcaaatacaaagctttggtgggtcatttagtacaactacatggagccttagagtactgtttga

SEQ ID NO: 159879 - DNA, 80 bp, synthetic construct
  source 1..80: mol_type = other DNA
gctacggctttcaggccggcccggcgccgccaggtggtcctcggccgggagcggcggtgagagcgctgcccgctcccccg

SEQ ID NO: 159880 - DNA, 80 bp, synthetic construct
  source 1..80: mol_type = other DNA
cgtcactaaccacgtgattatcgcaggccaatccagagatactacgtacacttcctggggtggagcttcgccgagatata

SEQ ID NO: 159881 - DNA, 80 bp, synthetic construct
  source 1..80: mol_type = other DNA
acagggtgcgctctatcacgctaggcaattctaccataacaacgcaagagtgtgctaatgtagtggtaggttacggtgtg

SEQ ID NO: 159882 - DNA, 80 bp, synthetic construct
  source 1..80: mol_type = other DNA
acgcaagttttgcccagttgattacctattcgggtgtggtgtgctcactggcaacgcgtttgtatttccacaccagatta

SEQ ID NO: 159883 - DNA, 80 bp, synthetic construct
  source 1..80: mol_type = other DNA
aatagatgtgtgtaacacaccaccaccagagtgtattaatgatttactcaaatcagttgattctgaagaggttagggatt

SEQ ID NO: 159884 - DNA, 80 bp, synthetic construct
  source 1..80: mol_type = other DNA
tttgttatgggctttacattaaaacactaatccgattagaacactaatttggaatattggacctgcccaaaaaaaaaaaa

SEQ ID NO: 159885 - DNA, 80 bp, synthetic construct
  source 1..80: mol_type = other DNA
gaaagcaagagggataccatttagttaaaaacaggaacagctatacttggtcagggcaggaagtaactagcaaaacagct

SEQ ID NO: 159886 - DNA, 80 bp, synthetic construct
  source 1..80: mol_type = other DNA
gacacatcatggcgaaatgcccagaaagacaggcgggttttttagggtttggcccatggggaaagaagcctcgcaacttc

SEQ ID NO: 159887 - DNA, 80 bp, synthetic construct
  source 1..80: mol_type = other DNA
gaaacaacgagggctacagatcttggccctggcagatcgaatacatccacttcccgattcgccaactgagggacctcttg

SEQ ID NO: 159888 - DNA, 80 bp, synthetic construct
  source 1..80: mol_type = other DNA
agtccaaggcctttgagaggctcatctacgcagtgaacacggccagcctttctgccagtcaggtcaccgtctccaacacc

SEQ ID NO: 159889 - DNA, 80 bp, synthetic construct
  source 1..80: mol_type = other DNA
tcacagacagatacaaccccgccacagacgctgccactggaagaacctttgcggcagttgactacctactgggatgtggt

SEQ ID NO: 159890 - DNA, 80 bp, synthetic construct
  source 1..80: mol_type = other DNA
agattatgtacataccaccaggcgcgcccataccacaagcttgggatgatttcacgtggcagacctcaaccaatccctca

SEQ ID NO: 159891 - DNA, 80 bp, synthetic construct
  source 1..80: mol_type = other DNA
tcacactttgtccagacaattacagaaatcatgcaagctcaatggcgtcttcaccaacccaacagctagtgaattcatgg

SEQ ID NO: 159892 - DNA, 80 bp, synthetic construct
  source 1..80: mol_type = other DNA
aaagacccccggggggcatcggggggtggtgtcgggcccgcgcattcctggaaaaagtggagttggcgtggccttgccct

SEQ ID NO: 159893 - DNA, 80 bp, synthetic construct
  source 1..80: mol_type = other DNA
ccaagaagaaagcgaagaagtacaacagcagcaactcctccagctcagactctcacagcagctcagaatcagagagcagc

SEQ ID NO: 159894 - DNA, 80 bp, synthetic construct
  source 1..80: mol_type = other DNA
aagtaactcacaaataagagacaaaattaagaaaaacatggacagttactaccaaaaaattttagacgaatcaacaataa

SEQ ID NO: 159895 - DNA, 80 bp, synthetic construct
  source 1..80: mol_type = other DNA
tcgtccagcgcgcggtagggaaacagcgccgcgtgtaacttccactcctcggccacgcgccgcaccgtgatggtgtcaaa

SEQ ID NO: 159896 - DNA, 80 bp, synthetic construct
  source 1..80: mol_type = other DNA
ctttatatctcaacaaaccttcctccaaggcccggttgaggatgccattacatcagcgattggcagggttgctgacaccg

SEQ ID NO: 159897 - DNA, 80 bp, synthetic construct
  source 1..80: mol_type = other DNA
tggccttttgggtcctctggctgctgctgcgtgtgtgctttggcagacgcggtggcaatttgcggtctgcggtaagtgag

SEQ ID NO: 159898 - DNA, 80 bp, synthetic construct
  source 1..80: mol_type = other DNA
cctagcagattggcgcccgaacagggacttgaaggagagtgagaggctcctgaacacggctgagtgaaggcagtaagggc

SEQ ID NO: 159899 - DNA, 80 bp, synthetic construct
  source 1..80: mol_type = other DNA
ttttatgacccaaggtcagctggaagtaggtcacgatttgatgatttggtcaaaataacacaattattttcagtcatggc

SEQ ID NO: 159900 - DNA, 80 bp, synthetic construct
  source 1..80: mol_type = other DNA
ccttaaccccgtagctgtggtatgcatgccagcataaacacagtcgtaatgggcaactacgggatgggaccgactacttt

SEQ ID NO: 159901 - DNA, 80 bp, synthetic construct
  source 1..80: mol_type = other DNA
tccgtctccagataagatagatctgcgagtggaatttccctcgttacccccatgtgtcggcatacagtgcgctgcatgga

SEQ ID NO: 159902 - DNA, 80 bp, synthetic construct
  source 1..80: mol_type = other DNA
ggcatacatcggaggtactaacgcacaagtgaaatataaacatacacacccaggtgagcagggacacaggattggtagta

SEQ ID NO: 159903 - DNA, 80 bp, synthetic construct
  source 1..80: mol_type = other DNA
aggtggcccagacgacgcaggaccacctggagacggagacctcgccccagaagacgtagaagaactgctagaactcgtcg

SEQ ID NO: 159904 - DNA, 80 bp, synthetic construct
  source 1..80: mol_type = other DNA
catccctattctctaaatacaaaggtaatgtggaatgtgaactaaatgaccatatgaaagtggccatagcacattattct

SEQ ID NO: 159905 - DNA, 80 bp, synthetic construct
  source 1..80: mol_type = other DNA
tacagagacatctagtggtagaaactggaactgcagacaaaatgccagccacaagtaggccaacagcaccacctagtggc

SEQ ID NO: 159906 - DNA, 80 bp, synthetic construct
  source 1..80: mol_type = other DNA
ttcatacctggacaagttagaaatttaatagaaatgtgtcaagttgatacactcatccccattaacaacactacagcaga

SEQ ID NO: 159907 - DNA, 80 bp, synthetic construct
  source 1..80: mol_type = other DNA
aggaaacttgagttgtttacttactcaagatttgacctggagttgacatttgtcatcacagagcggtacttctcagggac

SEQ ID NO: 159908 - DNA, 80 bp, synthetic construct
  source 1..80: mol_type = other DNA
acgggagtgtggacggcgcgttgcgaggccagggagtcgcgggatggcgggctgttgcgcggcgtggacggtgacgcggt

SEQ ID NO: 159909 - DNA, 80 bp, synthetic construct
  source 1..80: mol_type = other DNA
gaactatacagtgcttgccagacaatgatgactatcaggaaatacctttaaatgtaacagaggcttttgatgcatgggat

SEQ ID NO: 159910 - DNA, 80 bp, synthetic construct
  source 1..80: mol_type = other DNA
tgtgcccattactatctctataagccccatgtgcgctgagttttctggtgcccgtgctgctgcaagaaatcaaggtttgc

SEQ ID NO: 159911 - DNA, 80 bp, synthetic construct
  source 1..80: mol_type = other DNA
gatacgcagactacatagactcccaaataggagacacccaagaccacgagactataggcatagtagtggtcatctgtcct

SEQ ID NO: 159912 - DNA, 80 bp, synthetic construct
  source 1..80: mol_type = other DNA
aatatggattgacaataacacctgctgacaagtctgatcaatttgtgaaagtcaactgggataatgctacgttcctgaag

SEQ ID NO: 159913 - DNA, 80 bp, synthetic construct
  source 1..80: mol_type = other DNA
atattgggcatattaacagccttgctcctcgctttcctaacaaccaaggacccccgcatccgcctgccttaaacaggcaa

SEQ ID NO: 159914 - DNA, 80 bp, synthetic construct
  source 1..80: mol_type = other DNA
agttcccaagatcaatccacatcacaaaaccaaaatgcgcctgtcctaacccaccaaatcatgtatatcccccccggcgg

SEQ ID NO: 159915 - DNA, 80 bp, synthetic construct
  source 1..80: mol_type = other DNA
gtcaacacggtgttgtcggtattgtgtctaccggtggtaatgggcttgttggcttcgcagtgttcccacccacagggccc

SEQ ID NO: 159916 - DNA, 80 bp, synthetic construct
  source 1..80: mol_type = other DNA
cctctcatgaacgacgtgtctggtttttcagtgggccgcaggcggcggaggctgttcctgaacgacgagcgccgggacgc

SEQ ID NO: 159917 - DNA, 80 bp, synthetic construct
  source 1..80: mol_type = other DNA
tccggatcccccggcaggtaaccaggctccggcgctgccatggcatggagatggtggaaacgaaagcggcgctggtggtg

SEQ ID NO: 159918 - DNA, 80 bp, synthetic construct
  source 1..80: mol_type = other DNA
attgagtcagtactttacacattgggcaggttctttacgactatcctttatgtatactgggcctgcattatcaagtgcta

SEQ ID NO: 159919 - DNA, 80 bp, synthetic construct
  source 1..80: mol_type = other DNA
taaccctattatagataaagacttgagaaaattaaggacgcaggcttggtatgcatcagatgttgacttctccaactgga

SEQ ID NO: 159920 - DNA, 80 bp, synthetic construct
  source 1..80: mol_type = other DNA
tggtttttctccactaacaccacaaacacttaaaattattgaaatagtgctgctaattagataccactatcataatggga

SEQ ID NO: 159921 - DNA, 80 bp, synthetic construct
  source 1..80: mol_type = other DNA
aaaaaagatgcctttttacccatggatgcctcctactcacaaggtgtgttttaagcttaactttcaataaatgttggccg

SEQ ID NO: 159922 - DNA, 80 bp, synthetic construct
  source 1..80: mol_type = other DNA
aatgggggcacaggtatcaacacagaaatccggcagccacgagacaggcaacatagctactggagggtcaactataaact

SEQ ID NO: 159923 - DNA, 80 bp, synthetic construct
  source 1..80: mol_type = other DNA
tgggttgtgccacaacagatagggttgtcaacgaggctagtctgagcggtggcgagcaagccaagacattctcaaacacc

SEQ ID NO: 159924 - DNA, 80 bp, synthetic construct
  source 1..80: mol_type = other DNA
agcaagtgcgttattactgacctacctctgtgggccgctctatactgctaccacaactttgtagaggaggagctaggcat

SEQ ID NO: 159925 - DNA, 80 bp, synthetic construct
  source 1..80: mol_type = other DNA
agcatccgtgcccaagagccgcaaggatgccatgttggggacgcacgtgatttgggatcttgggttacagtccagttgtg

SEQ ID NO: 159926 - DNA, 80 bp, synthetic construct
  source 1..80: mol_type = other DNA
acatgcatacaaaacaacagctgcgcaggattgggaaaagaagacatagtcacctgccagttcaatatgacagggttaga

SEQ ID NO: 159927 - DNA, 80 bp, synthetic construct
  source 1..80: mol_type = other DNA
cctcggggcaggggtggctaggcctggtctccgtagaagagccgggcaggccgcaggcagaggactgctgctctagcaaa

SEQ ID NO: 159928 - DNA, 80 bp, synthetic construct
  source 1..80: mol_type = other DNA
agaagaacaggaaatattcagattaggttgccttggtactcctacctgtatgctgtttcaggagcattggatggcttagg

SEQ ID NO: 159929 - DNA, 80 bp, synthetic construct
  source 1..80: mol_type = other DNA
cggactgttagacgcaggcgacgcaaaaaactttacctgactcagtggaacccgccggtaaccagacgctgctatattaa

SEQ ID NO: 159930 - DNA, 80 bp, synthetic construct
  source 1..80: mol_type = other DNA
caaaaccttatctcaaaataggtaggactaactatactggatcagataacataattcctaaaagaaaaggtatttcaact

SEQ ID NO: 159931 - DNA, 80 bp, synthetic construct
  source 1..80: mol_type = other DNA
tattggctttagttcaaagcagcaccaagtagtacttaaccatttatatactcacaatacttattgggcctcacacttaa

SEQ ID NO: 159932 - DNA, 80 bp, synthetic construct
  source 1..80: mol_type = other DNA
tttggattgaaggtagttcttattatccaagcaggtaccaagttggggtcttaaaaggggtgggaccagcagaaccagga

SEQ ID NO: 159933 - DNA, 80 bp, synthetic construct
  source 1..80: mol_type = other DNA
attttaagtaaggcggggctcggctgtcactgtaacaaaatggcggtgacagccttccgctttacacaaaatggtggtgt

SEQ ID NO: 159934 - DNA, 80 bp, synthetic construct
  source 1..80: mol_type = other DNA
caatttcgcttgagggaccaccaccagcagcaataagtgaccttttgcaatcagttaggaccccagaagtaattaaatat

SEQ ID NO: 159935 - DNA, 80 bp, synthetic construct
  source 1..80: mol_type = other DNA
aaggagcggcctttacattactccaaccaactcaagcagttagatatcaagaccaccaagatgagcatggaggatgcatg

SEQ ID NO: 159936 - DNA, 80 bp, synthetic construct
  source 1..80: mol_type = other DNA
ggccaagcaatcccaagtgatgtggtagaaactcgccacgtggtgaactataagacaagatcagagtcctgccttgaatc

SEQ ID NO: 159937 - DNA, 80 bp, synthetic construct
  source 1..80: mol_type = other DNA
acctagtgagaaacccaagtcatcattcagaatgaatcccaatgctcaagagtacattccacgagatttgactccattga

SEQ ID NO: 159938 - DNA, 80 bp, synthetic construct
  source 1..80: mol_type = other DNA
acgctttcaacaccaaccgcgttatcaatatgaaggccgcgctctcgtccatcgccgcgtcgggtctcggcgtgcgcgcg

SEQ ID NO: 159939 - DNA, 80 bp, synthetic construct
  source 1..80: mol_type = other DNA
tcaccccacttcctaccaagagcctaacaacctacggttttggacatcaactcaaggcagtgtacgtggctggctataag

SEQ ID NO: 159940 - DNA, 80 bp, synthetic construct
  source 1..80: mol_type = other DNA
ctgggcaccaaaacccctagaccaagtaagggtctcttttaaacttaacttccaataaaacttcaaggccgtgggagttt

SEQ ID NO: 159941 - DNA, 80 bp, synthetic construct
  source 1..80: mol_type = other DNA
ctatgacagcagtaaggtaaccaccagtgcacgagaccgctccagcattaagcaagccaacatggggaagttcggacagc

SEQ ID NO: 159942 - DNA, 80 bp, synthetic construct
  source 1..80: mol_type = other DNA
attatcccacaaaaccagggcaatgtggtggtgtcattgcaaacacaggaaacatagtagcgattcatgttggtggaaat

SEQ ID NO: 159943 - DNA, 80 bp, synthetic construct
  source 1..80: mol_type = other DNA
tagaacatttagaaccattagatttaacaacaagtgcaggatatccatacgcaaccatgggtattcgaaagaaagatatt

SEQ ID NO: 159944 - DNA, 80 bp, synthetic construct
  source 1..80: mol_type = other DNA
aatgacatcacgtctgtgaccaccgcaggccccagtgatttgcacgtgcacgcggggcactacaaatatacaaatgcaca

SEQ ID NO: 159945 - DNA, 80 bp, synthetic construct
  source 1..80: mol_type = other DNA
caaggaccagtaacagattacctcaaccaactgggaagtgcctttggagaaggctttaccacaaatattaaacagcaatt

SEQ ID NO: 159946 - DNA, 80 bp, synthetic construct
  source 1..80: mol_type = other DNA
tgcggggatgggagtgggtgttggaaacctcaccatttttccacaccagtggatcaatttgcgcacgaacaatagtgcga

SEQ ID NO: 159947 - DNA, 80 bp, synthetic construct
  source 1..80: mol_type = other DNA
ctttctctattggtacaaaaatgcaccacatttttctcctcagcagctactgaaatcttggataatgatttggtcaaatt

SEQ ID NO: 159948 - DNA, 80 bp, synthetic construct
  source 1..80: mol_type = other DNA
ggaaaagggtactttatacaccagccccttcttgattgctacaacaaatgccggtgccattcatgcccccactgtctcag

SEQ ID NO: 159949 - DNA, 80 bp, synthetic construct
  source 1..80: mol_type = other DNA
ggccgggctatgggcaagactcttaaaaaattccccctagactgcggtgtgtaaactcacctccggctcccgccacgggt

SEQ ID NO: 159950 - DNA, 80 bp, synthetic construct
  source 1..80: mol_type = other DNA
caaagatactgacaatagtgtaaataaataccccagcacagccactaaacagccctacaaagacagtcagtacatgcaaa

SEQ ID NO: 159951 - DNA, 80 bp, synthetic construct
  source 1..80: mol_type = other DNA
gatgctgtcaaagatgccacgcagagtgtacccatcactgtcaccatagcaccaatgtgttgtgaattcaatggacttag

SEQ ID NO: 159952 - DNA, 80 bp, synthetic construct
  source 1..80: mol_type = other DNA
gcgaggaacgtcaactttaatgtgcaaggggtgaccgagtcccgggataaaattactcttgaccgatcagcccacaatcc

SEQ ID NO: 159953 - DNA, 80 bp, synthetic construct
  source 1..80: mol_type = other DNA
ggatgacggagtctcagggcaggtggtggaagttcactgatgaccggagagacatgggattgtttggacaaaacatgcaa

SEQ ID NO: 159954 - DNA, 80 bp, synthetic construct
  source 1..80: mol_type = other DNA
ctccagagcagggctagtgggggtaatcgaccttcccctacaagggacagttaataccggaggtttcgcatcctgggata

SEQ ID NO: 159955 - DNA, 80 bp, synthetic construct
  source 1..80: mol_type = other DNA
tataaagattcacttaaagcccttaacatgttatgttattatactgaaaaacttgaagaaatagatagcaagccagatac

SEQ ID NO: 159956 - DNA, 80 bp, synthetic construct
  source 1..80: mol_type = other DNA
atcaattattttaaagatgctgcatcatcaggggcatctagacttgacttttcccaagaccctagcaaatttactgaccc

SEQ ID NO: 159957 - DNA, 80 bp, synthetic construct
  source 1..80: mol_type = other DNA
aatacaaaactactgacaacgatgtcaacaaaaggtttgttgcttggcctatcaatacaaagcaaatggtccagatgcgt

SEQ ID NO: 159958 - DNA, 80 bp, synthetic construct
  source 1..80: mol_type = other DNA
aaacatggcaactgctactaaggcatgcacagactgtcataaaccagcgaatttctccagctgttgccctttagtgtgcg

SEQ ID NO: 159959 - DNA, 80 bp, synthetic construct
  source 1..80: mol_type = other DNA
agatggcctggggatggtggaaacgcagacggcgccgatggtggagaggcctctggaggagacgccgctttgccagaaga

SEQ ID NO: 159960 - DNA, 80 bp, synthetic construct
  source 1..80: mol_type = other DNA
caggtgaacaaggacacaccctacaggcgtctgatgaccgctcagacaataaaccagatgaagatcctttttacttgtgt

SEQ ID NO: 159961 - DNA, 80 bp, synthetic construct
  source 1..80: mol_type = other DNA
ggaagtttgagttatttacttatgttagatttgattcagagataactttagtaccttgcatatcatcccagagtgccaac

SEQ ID NO: 159962 - DNA, 80 bp, synthetic construct
  source 1..80: mol_type = other DNA
gggcgggctggggacgtgttgcgggaccggactgagagacggggggtgtgcgctgggcccggggggtgcgggaacggagg

SEQ ID NO: 159963 - DNA, 80 bp, synthetic construct
  source 1..80: mol_type = other DNA
tgggttacctattgatgaggatgagagtggcgagaggtccgatacctccgagccgtatgaagctcttgatttgtcaatcc

SEQ ID NO: 159964 - DNA, 80 bp, synthetic construct
  source 1..80: mol_type = other DNA
cgagatatcacctcgacttacaatggttttgcagtactcactgctgagaatggacatcaacacatttccatctcttttga

SEQ ID NO: 159965 - DNA, 80 bp, synthetic construct
  source 1..80: mol_type = other DNA
gtttctgatgagaatatgatagaaaccagatgtgttgtaaatagccacagtactgaggagaccactataggacacttctt

SEQ ID NO: 159966 - DNA, 80 bp, synthetic construct
  source 1..80: mol_type = other DNA
atcccagtcagtcctcttgatgcagatacatctgctactgctattgtcccaattactgtatcaatcagccccatgttttc

SEQ ID NO: 159967 - DNA, 80 bp, synthetic construct
  source 1..80: mol_type = other DNA
ctaccggccctaccggcaccccaagaccctgagcagccgccaccacggcctggtaccggtacagaagaaggccctggcgc

SEQ ID NO: 159968 - DNA, 80 bp, synthetic construct
  source 1..80: mol_type = other DNA
agataaaggaagcattacaagctggattatagccattgaagttctgcagtgctaataataagcgtaaggtattaattaac

SEQ ID NO: 159969 - DNA, 80 bp, synthetic construct
  source 1..80: mol_type = other DNA
ctacgtaacagggacaacaaacacaatgtacaacaaagctgactttcctacaaagccacgcaaaaacaaattctctgaat

SEQ ID NO: 159970 - DNA, 80 bp, synthetic construct
  source 1..80: mol_type = other DNA
tcagcgcccattttgccaaactttcaccccactccatgcatccatatacctggtgaagttaggaatctgttagagttgtg

SEQ ID NO: 159971 - DNA, 80 bp, synthetic construct
  source 1..80: mol_type = other DNA
caacagcctgtgaacttcaaaacccctggcttagagaatccaccctgtctccagtggtgggattctatgccctaaaacca

SEQ ID NO: 159972 - DNA, 80 bp, synthetic construct
  source 1..80: mol_type = other DNA
atgggtatgataaccaggacatccacttaattgatgacttggggcagactagaaaagagaaagacattgaaatgttatgc

SEQ ID NO: 159973 - DNA, 80 bp, synthetic construct
  source 1..80: mol_type = other DNA
acagcagtctggagctgtgtatgtaggcaactacaaaattttaaatagacacttagcaacaagtattgattggcaaaatt

SEQ ID NO: 159974 - DNA, 80 bp, synthetic construct
  source 1..80: mol_type = other DNA
agcagagcaactgaagaagcacaaaatgaattaattgtgaatattaacaaactagaaaaaggtttgcaggaattggctcc

SEQ ID NO: 159975 - DNA, 80 bp, synthetic construct
  source 1..80: mol_type = other DNA
aggagacccagtggaagatctaatagcgagtacagtggcgaggacgcttgagcgaatctcctcgccgaaccactccacca

SEQ ID NO: 159976 - DNA, 80 bp, synthetic construct
  source 1..80: mol_type = other DNA
gaacttattttccatgttccatgcaaaccctggtatccaaactggctcagctgtagggtgcaacccagacacattttggt

SEQ ID NO: 159977 - DNA, 80 bp, synthetic construct
  source 1..80: mol_type = other DNA
ttagctgaaactggctctagatatggtttgactataacacctgctgataaaagtgctgaattcaagcaaattacctggga

SEQ ID NO: 159978 - DNA, 80 bp, synthetic construct
  source 1..80: mol_type = other DNA
acactagttgttcattcaaataactatactaacacaatacttgaagttggcccagtaacaatggcaggcctcatcaatct

SEQ ID NO: 159979 - DNA, 80 bp, synthetic construct
  source 1..80: mol_type = other DNA
ggagacccacggcttgaggttgacctcggtgcatctgtgttaagtaagtacaaaggtaacacacaagtggaatggaatga

SEQ ID NO: 159980 - DNA, 80 bp, synthetic construct
  source 1..80: mol_type = other DNA
agaacattagtgttggacacttacaaaggaattgaattggacaaactcaaaatagtagcatatggagatgatgtcatagc

SEQ ID NO: 159981 - DNA, 80 bp, synthetic construct
  source 1..80: mol_type = other DNA
ttgctattgagacatacaaaaatgtagacttagatagactcaagataatagcttatggtgatgatgtggttatttcttat

SEQ ID NO: 159982 - DNA, 80 bp, synthetic construct
  source 1..80: mol_type = other DNA
ggcgtcgggggtaatgcgcatcttgccggtgccgatgagataaaagtaccacattttttgacagatgatgcgaatcaagg

SEQ ID NO: 159983 - DNA, 80 bp, synthetic construct
  source 1..80: mol_type = other DNA
ccagctacagtgattcaatatatgtttgtcccacctggtgctccaaaacccactcagagagactcatttgaatggcagac

SEQ ID NO: 159984 - DNA, 80 bp, synthetic construct
  source 1..80: mol_type = other DNA
gaccccctcctgtcataattcagggtccctctatcccagacctgcttttccctaacacacaaaaaaaaagacgattttcc

SEQ ID NO: 159985 - DNA, 80 bp, synthetic construct
  source 1..80: mol_type = other DNA
gcttggccttgcataaataaagtgtacatgtttccccccgaaaagccgatgcccatacacgggtaccacggttgggagac

SEQ ID NO: 159986 - DNA, 80 bp, synthetic construct
  source 1..80: mol_type = other DNA
taggaatgaaccccgccttagaagaaatgctaaccgcctgtcagggagtgggaagaccaggtcagaaagccagaataatg

SEQ ID NO: 159987 - DNA, 80 bp, synthetic construct
  source 1..80: mol_type = other DNA
ctaaaggaaaaattaaagaatgggagtaccacctaggctggtactcaaacatatttataggaaacctaagacacaattta

SEQ ID NO: 159988 - DNA, 80 bp, synthetic construct
  source 1..80: mol_type = other DNA
ttcacagataaatacaaccctagtaatgactccacggaagggaggaggttcgctgccgtcgattacttgctaggttgcgg

SEQ ID NO: 159989 - DNA, 80 bp, synthetic construct
  source 1..80: mol_type = other DNA
tggggatgttaagaaattagctgaagtagttgcagagtcaatgtctaatacagatgatgatgagataaaagagcaaattt

SEQ ID NO: 159990 - DNA, 80 bp, synthetic construct
  source 1..80: mol_type = other DNA
gagtgttgtgtcaggtatacaactgtttgttggaaccactgtgttagctttacttctcatttaaccaattaatcaaaaac

SEQ ID NO: 159991 - DNA, 80 bp, synthetic construct
  source 1..80: mol_type = other DNA
ttcaggtggaagtcagggctaccagaagcagtatggaaagagaaactaaaacagagaggactgcctatagaataagcaga

SEQ ID NO: 159992 - DNA, 80 bp, synthetic construct
  source 1..80: mol_type = other DNA
ggccagagccaacctcagctcctccatgccatccatggagttctgggccatgccctcgacttccaggagccgtgttagct

SEQ ID NO: 159993 - DNA, 80 bp, synthetic construct
  source 1..80: mol_type = other DNA
atttcaaagtcagcttcaaacttggttttaaaccctaaataaaaaaagcaaggccgtacactgttcacttgtcggtgtct

SEQ ID NO: 159994 - DNA, 80 bp, synthetic construct
  source 1..80: mol_type = other DNA
gtttgaatggcaatcagcatgtaatccaagtgtcttctttaagattgatgatccaccggccaggatgactatcccattta

SEQ ID NO: 159995 - DNA, 80 bp, synthetic construct
  source 1..80: mol_type = other DNA
gaaactaaatttactgagaaggcaacacacattaaccctacatggcaaccgggccactttaaacagtatgaatatcacct

SEQ ID NO: 159996 - DNA, 80 bp, synthetic construct
  source 1..80: mol_type = other DNA
tgtggaagcttcacaggtcgagttccctcaaccatctcatcaagaagagctcttgaaatataaaaaggcttcagagaagg

SEQ ID NO: 159997 - DNA, 80 bp, synthetic construct
  source 1..80: mol_type = other DNA
tgtggacacagaaataactaagatatggttagatagaaaagagaaattcagagacatacgcagattcatacctgatcatg

SEQ ID NO: 159998 - DNA, 80 bp, synthetic construct
  source 1..80: mol_type = other DNA
aggacacaatatttaaagacctaccaggcagagttcctgtggtagatttaccattgtggtgcgcgttaatgggctactca

SEQ ID NO: 159999 - DNA, 80 bp, synthetic construct
  source 1..80: mol_type = other DNA
cacctggaccatggcagatgaaactggggaccgccttcttctcctacctctcacctgcacatctcttgctgctcttgaca

SEQ ID NO: 160000 - DNA, 80 bp, synthetic construct
  source 1..80: mol_type = other DNA
ccaacaaaacttcatgaactccatagtacagagcggaccctttgcataccagggagacgagaaatccgtagtgctaactg

SEQ ID NO: 160001 - DNA, 80 bp, synthetic construct
  source 1..80: mol_type = other DNA
tagccttacaagtagtgcaaaaaggacatggatccaagggagagagtcccaccagaaaacagcgacgaggagacaatcgg

SEQ ID NO: 160002 - DNA, 80 bp, synthetic construct
  source 1..80: mol_type = other DNA
ctcaatccgctgctgtacgtcttcgtgggcaccaagtttcggcaagaactgcactgtctgctggccgagtttcgccagcg

SEQ ID NO: 160003 - DNA, 80 bp, synthetic construct
  source 1..80: mol_type = other DNA
cagaggtctcagcagccgccttggtctcggccccggccctaagtctgagccccaggcaaagggccggactcccagcgtgg

SEQ ID NO: 160004 - DNA, 80 bp, synthetic construct
  source 1..80: mol_type = other DNA
ttcatccaatctattcaatgtcagatatatatgaatcaatcaggtggactaaagatccaaagaacacacaagatcatgtt

SEQ ID NO: 160005 - DNA, 80 bp, synthetic construct
  source 1..80: mol_type = other DNA
caacaactgggggttagttatactaccgctctgcaaattggattatgcgtctagctcatctacagaaatacctattacag

SEQ ID NO: 160006 - DNA, 80 bp, synthetic construct
  source 1..80: mol_type = other DNA
agtccaaagtgaaaacacaagacttctaccagagatattctgactgtctatccaaatttaaaccaattatggctatttgc

SEQ ID NO: 160007 - DNA, 80 bp, synthetic construct
  source 1..80: mol_type = other DNA
gaccgctgcagagacaggacacacatcacaagtagtacccagtgacactatgcaaacaaggcacgtgcacaatttccaca

SEQ ID NO: 160008 - DNA, 80 bp, synthetic construct
  source 1..80: mol_type = other DNA
atgagtcggtctgcgtgtgtttattacaccaagtataagacaaaagatacggacccatcagaaatgtactccagttggaa

SEQ ID NO: 160009 - DNA, 80 bp, synthetic construct
  source 1..80: mol_type = other DNA
cccatggttactttcctcaaggatgagcttaggaaaaaggagaaaatttctgctgggaagactagggtcatagaagctag

SEQ ID NO: 160010 - DNA, 80 bp, synthetic construct
  source 1..80: mol_type = other DNA
tcaacctagcacaccatagttggtacataatacaagaatctagttattatccaaaacacattcagtatgacatactgata

SEQ ID NO: 160011 - DNA, 80 bp, synthetic construct
  source 1..80: mol_type = other DNA
tactagaaagaaggcaatgctaggaacacatcttgtatgggatgttggcttgcaatcaacagtgtctctagttgtacctt

SEQ ID NO: 160012 - DNA, 80 bp, synthetic construct
  source 1..80: mol_type = other DNA
gtcggctttggtctgcacgcaggaagaacaagactttttggaaacggcaaactggccgtctgaaacgttttaccgattgt

SEQ ID NO: 160013 - DNA, 80 bp, synthetic construct
  source 1..80: mol_type = other DNA
aattagaaataacagttcttaaattaaagagaaatgaaaaatttagggacattaggaaatacataccagagagtgaagat

SEQ ID NO: 160014 - DNA, 80 bp, synthetic construct
  source 1..80: mol_type = other DNA
ttacttaccaatttgcattttgataaccttgatttgaaaactttcataatgggagctcaggtcactagacaacaaactgg

SEQ ID NO: 160015 - DNA, 80 bp, synthetic construct
  source 1..80: mol_type = other DNA
aagtaacacagcctacaggcgcaccgtcaaagatgatttcactgagggtggctacatctctatgttttaccaaaccaaaa

SEQ ID NO: 160016 - DNA, 80 bp, synthetic construct
  source 1..80: mol_type = other DNA
tgaggtccttatgtatgttagcatggcactctggtgagaaagaatatgatgagtttgtacgtggcatccgcagtacggac

SEQ ID NO: 160017 - DNA, 80 bp, synthetic construct
  source 1..80: mol_type = other DNA
tacaagaacaggacaatgtggaggtgttttatgttctactggtaaaatctatggtattcatgttggtggcaacggacggc

SEQ ID NO: 160018 - DNA, 80 bp, synthetic construct
  source 1..80: mol_type = other DNA
attttgtgggtggagtcagcgaggtgcatgataccatagagcagcgagtagccgagcgactgcagatccaggcgaagggc

SEQ ID NO: 160019 - DNA, 80 bp, synthetic construct
  source 1..80: mol_type = other DNA
ggggcggaaatatgatctccacacagatcatcaaggacccctgcaaagacagtggactggaacccgcctatcccggtaga

SEQ ID NO: 160020 - DNA, 80 bp, synthetic construct
  source 1..80: mol_type = other DNA
atttcaaacccaaacacgttaaggcctgggtcggaagaccgcccagactgtgcccgtatgtcaaaagttcgaacgtgaat

SEQ ID NO: 160021 - DNA, 80 bp, synthetic construct
  source 1..80: mol_type = other DNA
cattttagaaatacaactcctgatacatactcactagctggatacataacatgctggtatcagacaaacctcattgctcc

SEQ ID NO: 160022 - DNA, 80 bp, synthetic construct
  source 1..80: mol_type = other DNA
cgtatcgaggagacggggtggacataaaacagggttccatcacgcctctaaccccagtcagcaaaatcacaacgtacgga

SEQ ID NO: 160023 - DNA, 80 bp, synthetic construct
  source 1..80: mol_type = other DNA
ttctaaagaacttaattaagattgtctcagcattggtgattgtggcaagaaactatgaggattctatcacggttatggct

SEQ ID NO: 160024 - DNA, 80 bp, synthetic construct
  source 1..80: mol_type = other DNA
acagagccagcacctatgactgggaaaattacagcaacgaaacaaactataacaatacctatgtaaaattccatcagaaa

SEQ ID NO: 160025 - DNA, 80 bp, synthetic construct
  source 1..80: mol_type = other DNA
agttagacacaatggacattttccgcattcctgttcagagcgggaaccaccagagcacacaggtttttggcttccaggtt

SEQ ID NO: 160026 - DNA, 80 bp, synthetic construct
  source 1..80: mol_type = other DNA
agaattagaagcctttgctatggccttagaagattcaggaccaaaagtaaacattgtgacagattcacaatatataatgg

SEQ ID NO: 160027 - DNA, 80 bp, synthetic construct
  source 1..80: mol_type = other DNA
tgacactgcttcagaccaacctggacaacaaaccgccgaggcagaccccgctaccctacgcggccccgctgccccccttt

SEQ ID NO: 160028 - DNA, 80 bp, synthetic construct
  source 1..80: mol_type = other DNA
gccggaggccgtggtggaggagacgcaggcgctggagacgtcgcagacgaagacctgctagacgccgtcgatttcgcaga

SEQ ID NO: 160029 - DNA, 80 bp, synthetic construct
  source 1..80: mol_type = other DNA
ggcataactgactatgttcatatgctcggtgaggcctttggtttgggtttcgtggacagtgttaaagaccaaataaatgc

SEQ ID NO: 160030 - DNA, 80 bp, synthetic construct
  source 1..80: mol_type = other DNA
gcgaatcgccgtcaccggccgacgcgcgcccgcgcctcacgctgcacgacctgcacgacatcttccgcgagcaccccgaa

SEQ ID NO: 160031 - DNA, 80 bp, synthetic construct
  source 1..80: mol_type = other DNA
ccatgtttttgtcagacaaccataaatttaaatcctcaaatggctccacagctttaacaatacagagtgcacaaaacata

SEQ ID NO: 160032 - DNA, 80 bp, synthetic construct
  source 1..80: mol_type = other DNA
aaaaacacccgagaaacgccgcaaggacctcagcggtagcaaacacggaggcaaaaagaaacccccgtccacgacgtcca

SEQ ID NO: 160033 - DNA, 80 bp, synthetic construct
  source 1..80: mol_type = other DNA
acttctagccatctcatcagatttgcaagttgatagtgtcagtacaccaggggatgatgtaatcccaacatgtgattgca

SEQ ID NO: 160034 - DNA, 80 bp, synthetic construct
  source 1..80: mol_type = other DNA
ggctagcatagaagataagggtagagctttcaccagtcaatatgtcttggctagcacgaacttagattcactttcccccc

SEQ ID NO: 160035 - DNA, 80 bp, synthetic construct
  source 1..80: mol_type = other DNA
gacacagcaagagacccaagaaagatacaggggccagggtcgaggaccaagaagagcaaaaagaaagcttacatttcaga

SEQ ID NO: 160036 - DNA, 80 bp, synthetic construct
  source 1..80: mol_type = other DNA
cagctccttttaaacagtattcactcaccagcattcatattttactcttgagttattaacaaatagtcaaaaatgggtgc

SEQ ID NO: 160037 - DNA, 80 bp, synthetic construct
  source 1..80: mol_type = other DNA
tccgggggccaattgtcttcatgtccaggttatgcaggtccctggccctcgaggcctcaacatccaagatataggcacac

SEQ ID NO: 160038 - DNA, 80 bp, synthetic construct
  source 1..80: mol_type = other DNA
agggcgacaagacggatgtgaacaggtttgatagatgggagatcaacattcgtgagatggtgcagttacgcaggaaatgt

SEQ ID NO: 160039 - DNA, 80 bp, synthetic construct
  source 1..80: mol_type = other DNA
atttcaaagataagaaaccaatactggcaggcactacaacaacagaatgacttacactctacatatggtaaagccgacgc

SEQ ID NO: 160040 - DNA, 80 bp, synthetic construct
  source 1..80: mol_type = other DNA
ttggggacgggttcacaaactccattagggacacgctggtaggtgcttgtgatgtatcagataaattaactgggaaaatc

SEQ ID NO: 160041 - DNA, 80 bp, synthetic construct
  source 1..80: mol_type = other DNA
gttacataacatgctggtatcagacaaacctcattgttgcaccaaatacaccaccaacagccaggatgatttgctttgtg

SEQ ID NO: 160042 - DNA, 80 bp, synthetic construct
  source 1..80: mol_type = other DNA
atgtttaacctaaaagttccgtacgaacagtttcaactgcaccagaacttctggacgcgatccaacatagacctagactt

SEQ ID NO: 160043 - DNA, 80 bp, synthetic construct
  source 1..80: mol_type = other DNA
gctgctgaaattggcgcgtcgtcaaacgccagtgatgaaagcatgattgaaacccggtgcgttctcaactcgcacagcac

SEQ ID NO: 160044 - DNA, 80 bp, synthetic construct
  source 1..80: mol_type = other DNA
tgagcaacaagggcaaatagtatctagggcagatgttagggagaaaaatctcttcagtatacatactcctaccaagacaa

SEQ ID NO: 160045 - DNA, 80 bp, synthetic construct
  source 1..80: mol_type = other DNA
gagcgcaaccaccgaccagccgtaaggaggctatgctaggaacacatgttatctgggacttgggtttgcagtcgtcatgc

SEQ ID NO: 160046 - DNA, 80 bp, synthetic construct
  source 1..80: mol_type = other DNA
tctactcaaccaccctcgtgggcgcgccggactccccacggacgcccctagcctccgagccctccacatcaaattccacc

SEQ ID NO: 160047 - DNA, 80 bp, synthetic construct
  source 1..80: mol_type = other DNA
ggccgccattttgtgctgtccgccattttgtgacttccttccgctttttcaaaaaaaaagaggaagtgtgacgtagcggc

SEQ ID NO: 160048 - DNA, 80 bp, synthetic construct
  source 1..80: mol_type = other DNA
gatcccagaatgggacttcgtatctaccccaccactggtcaggttgacatttaacctagtaggagatcctataccaggca

SEQ ID NO: 160049 - DNA, 80 bp, synthetic construct
  source 1..80: mol_type = other DNA
cccacactctctccagacagttgcaaaagtcatgcaagctaaacggtgttttcacaaacccaacagccagtggattcatg

SEQ ID NO: 160050 - DNA, 80 bp, synthetic construct
  source 1..80: mol_type = other DNA
gcgtcggttcgcccacgcagaccgaggcgctggagagccgctacgaccactacacgcaaaacaagagcgtgcgcaagggc

SEQ ID NO: 160051 - DNA, 80 bp, synthetic construct
  source 1..80: mol_type = other DNA
cattacagactagtgcaccaagatgaatacaccagtgctggtaacgtgacgtgctggtatcagactgggattgttgtgcc

SEQ ID NO: 160052 - DNA, 80 bp, synthetic construct
  source 1..80: mol_type = other DNA
tctatacaattcacatggtgtaaagttggaaattacagtagttaaattaaataggaatgaaaaatttagagatattagga

SEQ ID NO: 160053 - DNA, 80 bp, synthetic construct
  source 1..80: mol_type = other DNA
gtcactaaccacgtgtgtcccacaggccaatcgtgtgctatgtcgtccacttcctggggtgtgtctacgtgctcatataa

SEQ ID NO: 160054 - DNA, 80 bp, synthetic construct
  source 1..80: mol_type = other DNA
gtgtcacatttctgaagagaggttttaaacaagattccaaatatcccttcttgatacacccaacatttccagtaaatgag

SEQ ID NO: 160055 - DNA, 80 bp, synthetic construct
  source 1..80: mol_type = other DNA
agcggaccgtacgcatacagagacgaactgaaaaactgttgcctgactgtatactacaactttatttttaactggggggg

SEQ ID NO: 160056 - DNA, 80 bp, synthetic construct
  source 1..80: mol_type = other DNA
atttgtgtaactcacaaggtgtcaagcttgaaataacagtccttaaacttaaaaggaatgaaaaatttagagacattaga

SEQ ID NO: 160057 - DNA, 80 bp, synthetic construct
  source 1..80: mol_type = other DNA
cagataaatctcaaagaaatggctcaaattagaaggaaatttgaattgtttacatatgtgaggtttgattcagagataac

SEQ ID NO: 160058 - DNA, 80 bp, synthetic construct
  source 1..80: mol_type = other DNA
aaaggaaagtgcttctgcaagctgtgtcaactccagcgaaaaaacctgctatgagcgcctgggtaccgcctctagataat

SEQ ID NO: 160059 - DNA, 80 bp, synthetic construct
  source 1..80: mol_type = other DNA
atcagatcgcggtgatcggttgcgttggtcactaaaggccactcggaaaagagcatagactcggcaggttggtaggccga

SEQ ID NO: 160060 - DNA, 80 bp, synthetic construct
  source 1..80: mol_type = other DNA
ctgtggttgcccaaagggcgtggtggtcttgtattacggtacatttccatgccagttttatcccccctcccgaaacgtag

SEQ ID NO: 160061 - DNA, 80 bp, synthetic construct
  source 1..80: mol_type = other DNA
gcgagaagaggcccatgatgagtagtcgctggttgatttccagcgccagtggcatgggtacgatccagggcagcaccagc

SEQ ID NO: 160062 - DNA, 80 bp, synthetic construct
  source 1..80: mol_type = other DNA
tccttaaagacaattactacccagttataggcattttaacaaactatacagacaactcaggcaacaaaaaaagttataca

SEQ ID NO: 160063 - DNA, 80 bp, synthetic construct
  source 1..80: mol_type = other DNA
aggtgaacagggtagagaaatatctgcaaaccgcagaactggtgatgatagaagacccagtgatgatagttggctaaatt

SEQ ID NO: 160064 - DNA, 80 bp, synthetic construct
  source 1..80: mol_type = other DNA
gaggagcagatgcggaaaaaagaggagcatatgggggagcaagaagagcatatgggggagcaggaggagcaaatggggga

SEQ ID NO: 160065 - DNA, 80 bp, synthetic construct
  source 1..80: mol_type = other DNA
ataactgatttcaataataaattaaagattacagattccttagaagttttgtttcaaggtcctgtttacaaagatttaga

SEQ ID NO: 160066 - DNA, 80 bp, synthetic construct
  source 1..80: mol_type = other DNA
tggagacgcctacgacgccggagagctagacgacctgttcgccgccgtagaagaagagcaacagtaaggaggcggaggtg

SEQ ID NO: 160067 - DNA, 80 bp, synthetic construct
  source 1..80: mol_type = other DNA
cataagtgaaagcgggccttttgcatacagagaaaagacaaactctgccaacataaatgtaaaatacaaattcaggttcc

SEQ ID NO: 160068 - DNA, 80 bp, synthetic construct
  source 1..80: mol_type = other DNA
cattgagcggcaaccccacatgtaggcttctcaaatatgattatcccactaaaccaggtcagtgtggtggggtgctggga

SEQ ID NO: 160069 - DNA, 80 bp, synthetic construct
  source 1..80: mol_type = other DNA
ggccaggggttaccgaggcctcgtgaagaggttcttggcattcgtgtttgagcgtagtagctatgacccccccttgttga

SEQ ID NO: 160070 - DNA, 80 bp, synthetic construct
  source 1..80: mol_type = other DNA
ctgtcgcttgagctctttgttggtggcagtgtccagaaaggcctcgagctgttcctcggtggcgggcttaaagccttcgg

SEQ ID NO: 160071 - DNA, 80 bp, synthetic construct
  source 1..80: mol_type = other DNA
acacaaaagaaacttacaattcagttaatgataaaactacatgtaagacatactatgaatttatggagatattagtaaac

SEQ ID NO: 160072 - DNA, 80 bp, synthetic construct
  source 1..80: mol_type = other DNA
gggtatttttgggcaaaatatgtactaccactcaatgggaagggcagggtatataatacacacccagtgcaatgccacca

SEQ ID NO: 160073 - DNA, 80 bp, synthetic construct
  source 1..80: mol_type = other DNA
gtgtgggaacttgtgggaatcaatattttgctttaaagcatccattagccagcggataaaacacctggtaacaggtgcct

SEQ ID NO: 160074 - DNA, 80 bp, synthetic construct
  source 1..80: mol_type = other DNA
gtcctctttccaggtgtcttcaacgacgtggggcttaccttgcgaacagacggtgcccatcttgcccacgaagggcccca

SEQ ID NO: 160075 - DNA, 80 bp, synthetic construct
  source 1..80: mol_type = other DNA
gcacatccgccgacgtctgggcctgggccgtgcttccgtaaaacgagagattacccttctcctggcccacctgcgcaaaa

SEQ ID NO: 160076 - DNA, 80 bp, synthetic construct
  source 1..80: mol_type = other DNA
ccttcggaccctggtacaggaccatgtcggctaatgccatgcagcggcgcgtgttccctaagcagctgaggggcaacctg

SEQ ID NO: 160077 - DNA, 80 bp, synthetic construct
  source 1..80: mol_type = other DNA
ccacggtattgtgtaaggagtgccccagaccagcaaactttaagaaatgctgtcccttgatttgcgggaaggctatacag

SEQ ID NO: 160078 - DNA, 80 bp, synthetic construct
  source 1..80: mol_type = other DNA
tatccctgacttttatgtgtgtgtgtgactctttttcaactggtaagttcctattagcatatacacccccaggcggtggg

SEQ ID NO: 160079 - DNA, 80 bp, synthetic construct
  source 1..80: mol_type = other DNA
ttcccaggcccccccgcctgtgtgagtacgagaaatcaggtaatgtaaacttcaaaccgaaaggagtcactgaagttcgg

SEQ ID NO: 160080 - DNA, 80 bp, synthetic construct
  source 1..80: mol_type = other DNA
cctcactaaacgcattaaacacattcagaacagagggatgtgctagccatccacaactacaaaagccatccagaacaagc

SEQ ID NO: 160081 - DNA, 80 bp, synthetic construct
  source 1..80: mol_type = other DNA
attttaggccttccggactacaaaaatggccgttccagtaacgtcacggccgccattttaagtaggtgccgtccagcact

SEQ ID NO: 160082 - DNA, 80 bp, synthetic construct
  source 1..80: mol_type = other DNA
agatatgatttggaaatgacctttgtgataactgagaggtattattcaggtgctggagccactactagaaactatgtata

SEQ ID NO: 160083 - DNA, 80 bp, synthetic construct
  source 1..80: mol_type = other DNA
ctactgcgatcactgcgagctccacaggcgcctcgcagggctatgagctggcgtcccccggtacacgatgcgcccggcat

SEQ ID NO: 160084 - DNA, 80 bp, synthetic construct
  source 1..80: mol_type = other DNA
gactccacagcagactcaggggctgcttactatggcgcagtgtccatcaatgattttggtttgcttgcagttcgagtggt

SEQ ID NO: 160085 - DNA, 80 bp, synthetic construct
  source 1..80: mol_type = other DNA
tggtagtcgggacggaggagagacgatgcatacatacacgcgtgcatgctgcatgggtggatggtccgaccgggagacgc

SEQ ID NO: 160086 - DNA, 80 bp, synthetic construct
  source 1..80: mol_type = other DNA
cgcaggttatcaaaaacccctgcagtaactcaggactggtaccctcgaccggtagacagcgtcgcgacgtacaagtcatt

SEQ ID NO: 160087 - DNA, 80 bp, synthetic construct
  source 1..80: mol_type = other DNA
gtttgccacccctcacccgtcgtaacttagaagctaacaactcgaccaacaggcggtggtaaaccataccacttacggtc

SEQ ID NO: 160088 - DNA, 80 bp, synthetic construct
  source 1..80: mol_type = other DNA
tgcaaaatggcagaggaagaccggtagccgctgcacccttcgaaggacggtgggtgggaggaattgttccttgggattcc

SEQ ID NO: 160089 - DNA, 80 bp, synthetic construct
  source 1..80: mol_type = other DNA
tgtcctggccgggcgcctgctccaccgccttaaggccgagtcagttacacacacagtagccgaatatctggaggtcttct

SEQ ID NO: 160090 - DNA, 80 bp, synthetic construct
  source 1..80: mol_type = other DNA
gaggaagaagagagacccctccgagagcagctgcagctccagctcaaggagcagcagcacctcagacggggaatccagtg

SEQ ID NO: 160091 - DNA, 80 bp, synthetic construct
  source 1..80: mol_type = other DNA
tcggcgacgcattcatacaaatttaaatgccatatttcagggtttaggatcaaaagaaacaccaggctttatcattgacc

SEQ ID NO: 160092 - DNA, 80 bp, synthetic construct
  source 1..80: mol_type = other DNA
acccacatactatcatagccaccctagctttgttaggatgttcaggttcaccctggagatttatcaaagaaaaagtgtgc

SEQ ID NO: 160093 - DNA, 80 bp, synthetic construct
  source 1..80: mol_type = other DNA
aatacacaagtagatgtcacagtgttaggtagtctattgcaattggatttccaaaaccccagaccttatgggaaaaatgt

SEQ ID NO: 160094 - DNA, 80 bp, synthetic construct
  source 1..80: mol_type = other DNA
tgcacttggtgctgcccagaagaatttttctttacgtctgccaaaagatacaggagatatttcacagactgctatcctcc

SEQ ID NO: 160095 - DNA, 80 bp, synthetic construct
  source 1..80: mol_type = other DNA
gatgcggccccatggggtagtgggtttccactggggctagcactccgattctgcggaatctttgtgcgcctgttttacaa

SEQ ID NO: 160096 - DNA, 80 bp, synthetic construct
  source 1..80: mol_type = other DNA
ccgtctccaccattacaaatccctctagctctgtcaccaacgctactagtacctcagttatcacaactgaaaccacgcag

SEQ ID NO: 160097 - DNA, 80 bp, synthetic construct
  source 1..80: mol_type = other DNA
tttctactgcaacatgacctggttcctcaattgggtagaaaataaacctaatacgacaaagcgcaattatgcaccatgcc

SEQ ID NO: 160098 - DNA, 80 bp, synthetic construct
  source 1..80: mol_type = other DNA
tcaatatagcaaaatgggggctcaggtgtcgacgcaaaagaccggagcacatgaaaccgggctaaacgccagcggcaact

SEQ ID NO: 160099 - DNA, 80 bp, synthetic construct
  source 1..80: mol_type = other DNA
ctgaggctcagtttagagtacccgcatactgtccagatggtactgacaataacaacaaagacttatggacacaaatgtgg

SEQ ID NO: 160100 - DNA, 80 bp, synthetic construct
  source 1..80: mol_type = other DNA
tggcggccaactccttccgggtcaaaggtcggcgcctacgtcataagtcacgtggagagggctgcatcacaacccggaag

SEQ ID NO: 160101 - DNA, 80 bp, synthetic construct
  source 1..80: mol_type = other DNA
gtgtaaagtatactataaagtctgtaactctgtgtcgatagaaagtgaaactacaccgcagtcaaggggcaattcgggct

SEQ ID NO: 160102 - DNA, 80 bp, synthetic construct
  source 1..80: mol_type = other DNA
caataataacatctataacaccttactatatatcatccatttgaacacaagaaaatgggagcacaagtgtcaacacagaa

SEQ ID NO: 160103 - DNA, 80 bp, synthetic construct
  source 1..80: mol_type = other DNA
taagggcacagtccccctggtgatatgcggacacaccaggtggaactggaactacgccctacatagcgaggactatactg

SEQ ID NO: 160104 - DNA, 80 bp, synthetic construct
  source 1..80: mol_type = other DNA
acttatggacttggatccaggtatggcggtgtctttacaagtaatgtcaagatcatgaattaccacttaatgaccccaga

SEQ ID NO: 160105 - DNA, 80 bp, synthetic construct
  source 1..80: mol_type = other DNA
ggtgtgtggtcaacagacatagcacagcagagactaccttgacacacttctattccagatcgggactggtaggagtaatt

SEQ ID NO: 160106 - DNA, 80 bp, synthetic construct
  source 1..80: mol_type = other DNA
ctaaacagactccaggttgccattggatactggagctgtgaatcagtaacgaaagtgagtggggccagacttcgccatag

SEQ ID NO: 160107 - DNA, 80 bp, synthetic construct
  source 1..80: mol_type = other DNA
tgtggcggacactatagcaagtggaccagccaactcaactagcataccagcgttgaccgccgcggaaactgggcacacct

SEQ ID NO: 160108 - DNA, 80 bp, synthetic construct
  source 1..80: mol_type = other DNA
tggcctggagagcatgcaggtcaggtccccctccacgggaggtcgctctgcgccagccccgccctccccatccccagccc

SEQ ID NO: 160109 - DNA, 80 bp, synthetic construct
  source 1..80: mol_type = other DNA
tgcatattttactggtgaagttaacatacacattttatatatggctgaaagagggtttcttagggtagcacactcttatg

SEQ ID NO: 160110 - DNA, 80 bp, synthetic construct
  source 1..80: mol_type = other DNA
gacaagacgatcttaaagcaccaggaccaaccacgcctcaagatgaccaccacgattgccgtgaaggtcaacgtgatcaa

SEQ ID NO: 160111 - DNA, 80 bp, synthetic construct
  source 1..80: mol_type = other DNA
atgaggcgtatacaatcactccaaagagacctagactattcccccctacagagcccgcaggggcccaaaggcaagaaaga

SEQ ID NO: 160112 - DNA, 80 bp, synthetic construct
  source 1..80: mol_type = other DNA
ttgagctttcgggtatcagatctatggctgttgtcacacagggtctcccaacaacttcaactcctgggtcaaatcagttt

SEQ ID NO: 160113 - DNA, 80 bp, synthetic construct
  source 1..80: mol_type = other DNA
gctacgtcataggtgacgtgggtggggtcttacttaaacacggaagtaggccccgacacgtcactgtcacgtgacagtgc

SEQ ID NO: 160114 - DNA, 80 bp, synthetic construct
  source 1..80: mol_type = other DNA
ctacaataatagtcccttatgtaaatgcagtacctatggactcaatgcttagacacaataactggagtctagtgataata

SEQ ID NO: 160115 - DNA, 80 bp, synthetic construct
  source 1..80: mol_type = other DNA
agtgtttaagaggacactactgggggaggtgctcaattattatgcgcattggtcgggaagcataaagctgactttcacat

SEQ ID NO: 160116 - DNA, 80 bp, synthetic construct
  source 1..80: mol_type = other DNA
cagggaacaaggaaccagcagcattgagtccaagagaccaccgattagaggtggacctagatactgcagtgttttcaaaa

SEQ ID NO: 160117 - DNA, 80 bp, synthetic construct
  source 1..80: mol_type = other DNA
acacactaaccagtgttgaatggcacggctcatcaaagggttggtggtggaaagttccagattgtcttaaggacatgggt

SEQ ID NO: 160118 - DNA, 80 bp, synthetic construct
  source 1..80: mol_type = other DNA
tcaagtcgagactattctcgaagtcaacaacgtacccaccaacgctactagcttgatggagagactacggtttccagtat

SEQ ID NO: 160119 - DNA, 80 bp, synthetic construct
  source 1..80: mol_type = other DNA
tttgttaatcatattcttttactggctgatcgctacggctttcaggccggcccggcgccgccaggtggtcctcggccggg

SEQ ID NO: 160120 - DNA, 80 bp, synthetic construct
  source 1..80: mol_type = other DNA
atcatctggcgtctcgttttggacgtcctcctgctacctcaactccccgaggaccacagacaccttcagtgaccccgttc

SEQ ID NO: 160121 - DNA, 80 bp, synthetic construct
  source 1..80: mol_type = other DNA
agttccaagctttaaaacaaggcccaaaggaaagagatccaaaacaatacttattaagcctccaaaactcatgataaaca

SEQ ID NO: 160122 - DNA, 80 bp, synthetic construct
  source 1..80: mol_type = other DNA
aaaaaacacccccccgcccctcggggactgcatgttccacatgtacgcgctagacgtgtaatccactcgcagttcgggga

SEQ ID NO: 160123 - DNA, 80 bp, synthetic construct
  source 1..80: mol_type = other DNA
atatgcgtcacgtgaatgatgggagtccaggtccaattgtaagcactgtgcgcatttactttaaacccaaacacgtgaag

SEQ ID NO: 160124 - DNA, 80 bp, synthetic construct
  source 1..80: mol_type = other DNA
agaaacaggtgaggcacagacagttatacctgtcagagcagatgttagaacaattaggaatgtgggacccagtgatttgt

SEQ ID NO: 160125 - DNA, 80 bp, synthetic construct
  source 1..80: mol_type = other DNA
ctacactaacagctaatgaaacaggtgccaccatgccaactaacccttcagacaatgtagaaactagaacaacatatatg

SEQ ID NO: 160126 - DNA, 80 bp, synthetic construct
  source 1..80: mol_type = other DNA
caacaccagcgagtcctcaaacgaggactccgagtcctgttcggagacgtactcaaactgaggaggggtctccacataga

SEQ ID NO: 160127 - DNA, 80 bp, synthetic construct
  source 1..80: mol_type = other DNA
tttgcgctgaggcagctcggaagtcttgcggggcgtaagcgcgccgaccgggctgcgggtgttcgcacggagcttttgcg

SEQ ID NO: 160128 - DNA, 80 bp, synthetic construct
  source 1..80: mol_type = other DNA
aataccactgtggatggttcagcaacatattcataggccccaacagatacaacctacagtttcaaacagcatatgtagac

SEQ ID NO: 160129 - DNA, 80 bp, synthetic construct
  source 1..80: mol_type = other DNA
gtagagaagtatacacaagccatcttgaatgaagtattggtggtcccaaatatcagtgcaagcagtccccagacttcaaa

SEQ ID NO: 160130 - DNA, 80 bp, synthetic construct
  source 1..80: mol_type = other DNA
gaccaacagtattagcaacactggctctacttggttgcaattcctcaccgtggtctttccttaaagccagggtgtgtgcg

SEQ ID NO: 160131 - DNA, 80 bp, synthetic construct
  source 1..80: mol_type = other DNA
ccacgtatatgcatttcagtggttcagaaactaccctggagaactttttgggtagatctgcatgtgtacacataactgaa

SEQ ID NO: 160132 - DNA, 80 bp, synthetic construct
  source 1..80: mol_type = other DNA
gataaatctgctgagtttaagagcatgtcctgggaaactgtcactttcctaaaaagaggctttcgcccagatgagcgata

SEQ ID NO: 160133 - DNA, 80 bp, synthetic construct
  source 1..80: mol_type = other DNA
gctcgcccccgaccacgtagatgcactgcgagggccagcccagcgacacgcacgagccctcgaagcgccgcaagtaacgc

SEQ ID NO: 160134 - DNA, 80 bp, synthetic construct
  source 1..80: mol_type = other DNA
gtattccactcgtgggactggcgacgtgggtggcttaatgacagaactctcaaacgcttgtttcaaaaaccgctcgattt

SEQ ID NO: 160135 - DNA, 80 bp, synthetic construct
  source 1..80: mol_type = other DNA
gcctgtgcgtgccgtcccgcggtatttgctcgcgggacggcgcctgcggcgtgttgcggccggcgcgttctgcatttcgg

SEQ ID NO: 160136 - DNA, 80 bp, synthetic construct
  source 1..80: mol_type = other DNA
atacacacaccctatgatgaccaaggcctcagacccgctatggggctttgtgccctacagctacaactttggaaagggca

SEQ ID NO: 160137 - DNA, 80 bp, synthetic construct
  source 1..80: mol_type = other DNA
atactaaattaaaaacgtataaaaggcagagacatacacgagttgctaggcacggatgcatgtgtatgttggccaaggga

SEQ ID NO: 160138 - DNA, 80 bp, synthetic construct
  source 1..80: mol_type = other DNA
gacaccactcacatagagcaaaaagcattaacacagggtttgggacagatgctggagagtatgatagatggcacagttcg

SEQ ID NO: 160139 - DNA, 80 bp, synthetic construct
  source 1..80: mol_type = other DNA
gaagagcaagtaaatggattcagctctgctagctcagaagcacaacaacagcttattgtagaggtagatactctaaagaa

SEQ ID NO: 160140 - DNA, 80 bp, synthetic construct
  source 1..80: mol_type = other DNA
gtcaatatcagtggcacctatctgagcttcctattggccatgacgtcactgcggtgcttcctgcctgtagaggctattta

SEQ ID NO: 160141 - DNA, 80 bp, synthetic construct
  source 1..80: mol_type = other DNA
ataacacttctcaaaatctgcgtaacattaataagtacactgttcaattaactagtcaagtaaatttagctcaggaaatc

SEQ ID NO: 160142 - DNA, 80 bp, synthetic construct
  source 1..80: mol_type = other DNA
gccgggcagctgttatcattagacattcctaccagtgaactaacacttaaggaagcactttatggagtagatggtctgga

SEQ ID NO: 160143 - DNA, 80 bp, synthetic construct
  source 1..80: mol_type = other DNA
tgaaggacgcaagaacgtggcacgtgatgcaccagctgctgctggaggaccgccgacgtctgcgccgcaaactgcgccgg

SEQ ID NO: 160144 - DNA, 80 bp, synthetic construct
  source 1..80: mol_type = other DNA
acattgagtcacttggcgctgcattcggtagcgggttcacccagcaaataggggataagatatcagaactaactagcatg

SEQ ID NO: 160145 - DNA, 80 bp, synthetic construct
  source 1..80: mol_type = other DNA
tatcaataccatatttttgaaaaagccgtttctgtaatgaaggagaaaactcaccgaggcagttccataggatggcaaga

SEQ ID NO: 160146 - DNA, 80 bp, synthetic construct
  source 1..80: mol_type = other DNA
tgtaatggaactttattaggaaatctaactatcttcccccaccagcttatcaacctgagaacaaacaattccagtacaat

SEQ ID NO: 160147 - DNA, 80 bp, synthetic construct
  source 1..80: mol_type = other DNA
ctgaggaaggtatcgtactgcacgatggggtagatgaggccgcagagtccaaagaaggcgcccaggtggtagccgaattg

SEQ ID NO: 160148 - DNA, 80 bp, synthetic construct
  source 1..80: mol_type = other DNA
atgatcataccaactcatgctgaagttggtaagagtgtagaaatagatggaatacaagttaaagtctctgattcatatga

SEQ ID NO: 160149 - DNA, 80 bp, synthetic construct
  source 1..80: mol_type = other DNA
aagagggtcgctatgcccacggggggtccctcagcaccactacgtggtcgcttaaggtgctgtacgacgaattcttaaag

SEQ ID NO: 160150 - DNA, 80 bp, synthetic construct
  source 1..80: mol_type = other DNA
acgtcatgttaacaaggacacaccataccagatgtcaagcacaatccgagtgtatttcaaacccaagcacatccgagtat

SEQ ID NO: 160151 - DNA, 80 bp, synthetic construct
  source 1..80: mol_type = other DNA
attatagcatatggtgatgatgtgctaatttcatacccagatgatttggatccagcagaattggcaaacacaggaaagaa

SEQ ID NO: 160152 - DNA, 80 bp, synthetic construct
  source 1..80: mol_type = other DNA
cagacatgaatacatagactacatagtgagctataacagaacaggcccctttcagatcagtgacatgacctacctcagca

SEQ ID NO: 160153 - DNA, 80 bp, synthetic construct
  source 1..80: mol_type = other DNA
cagccggacccctttgggggcgcgctgagcactaccccatttaacctaaaggtgctgtacgaccagcaccagagaggact

SEQ ID NO: 160154 - DNA, 80 bp, synthetic construct
  source 1..80: mol_type = other DNA
gaatgtggctaaccttaaccctgcagccattgcccataatccaatgggttggtggtcgtaatgcgcaagtgcgggatggg

SEQ ID NO: 160155 - DNA, 80 bp, synthetic construct
  source 1..80: mol_type = other DNA
acaacacttgcatcactttccaagtgttaaaagacttctattaccccaacatgagcatctcaccacaaaatgacacacaa

SEQ ID NO: 160156 - DNA, 80 bp, synthetic construct
  source 1..80: mol_type = other DNA
tggcgccggtggagacgccgccggaggccgtggtggaagagacgcaggcgctggagacgtcgcagacgaagacctgctag

SEQ ID NO: 160157 - DNA, 80 bp, synthetic construct
  source 1..80: mol_type = other DNA
agtgcgtatgctacgtgacaccccattcattggacaaacggcactattgcaaggtgatacagatgtggccattaacaacg

SEQ ID NO: 160158 - DNA, 80 bp, synthetic construct
  source 1..80: mol_type = other DNA
cgtatgtgggaattgctaatgcatattcgcatttttatgacggatttgccactgttcctattgaaggagaaaccaaggat

SEQ ID NO: 160159 - DNA, 80 bp, synthetic construct
  source 1..80: mol_type = other DNA
aagacctagtgttcttgaagattttgctactaaggtagccactcaaacaagaaaagctgccaaagaagttgtggagtggt

SEQ ID NO: 160160 - DNA, 80 bp, synthetic construct
  source 1..80: mol_type = other DNA
atgatggcatttggctacatagactggataaaaaaagacctaaaccagtgggacgctcccttaaactacagagtaatgat

SEQ ID NO: 160161 - DNA, 80 bp, synthetic construct
  source 1..80: mol_type = other DNA
aatccggtagagcattttattgatcaaaccctagaggaagtgttggttgtcccagacacacaagcgtcaggtccaataca

SEQ ID NO: 160162 - DNA, 80 bp, synthetic construct
  source 1..80: mol_type = other DNA
ggcattgaagatttgatttctgaagttgcacagggcgccctaactttgtcactcccgaagcaacaggatagcttacctga

SEQ ID NO: 160163 - DNA, 80 bp, synthetic construct
  source 1..80: mol_type = other DNA
cacaactggtaccagtcctgctttagatcccatgctgcctcttgtggctgtggtaattttgttgctcatctgcttctact

SEQ ID NO: 160164 - DNA, 80 bp, synthetic construct
  source 1..80: mol_type = other DNA
cacgtacgatgacgtgctacatgactggaacaagttcgaggcctgcatccagaagcgatggccgagcgatgactcgtgtg

SEQ ID NO: 160165 - DNA, 80 bp, synthetic construct
  source 1..80: mol_type = other DNA
tccaatgaagctggggccgtccaaaatgtagtgcacaatgctggaatgggtgttggagtaggcaacttgaccatttaccc

SEQ ID NO: 160166 - DNA, 80 bp, synthetic construct
  source 1..80: mol_type = other DNA
ttgattacacaaattatgatggaagcctacatccagtatggtttcaagcacttgagcaactcctgaacaacttgggcttc

SEQ ID NO: 160167 - DNA, 80 bp, synthetic construct
  source 1..80: mol_type = other DNA
cagtgaagattaattgtaacgaaactaaattctatctattatctagtctatctatgcttagaggcgcattcatatataga

SEQ ID NO: 160168 - DNA, 80 bp, synthetic construct
  source 1..80: mol_type = other DNA
gactgtggaggaaaattgctatgtaagcatggagttatcggcatagtcactgcaggtggagagaatcatgtagcatttat

SEQ ID NO: 160169 - DNA, 80 bp, synthetic construct
  source 1..80: mol_type = other DNA
aagactcattgaagccgctagtcttaatgacacagttcattatagaatggtttttggcaacctcttttctacccttcatg

SEQ ID NO: 160170 - DNA, 80 bp, synthetic construct
  source 1..80: mol_type = other DNA
tagattatgatgcttatgatgattctgttaataattttgtgaaatggaaaataagtttgcaagaaatggcccaagtgcga

SEQ ID NO: 160171 - DNA, 80 bp, synthetic construct
  source 1..80: mol_type = other DNA
caagggcgccagcttttctccccccagcctgaggcccaggctcctgtgcactgtctgtaaagtccagcctcccacgcccg

SEQ ID NO: 160172 - DNA, 80 bp, synthetic construct
  source 1..80: mol_type = other DNA
aattagatagtatggatattttcaggataccagtcaaaagcggcaaccaccagagtgaacaggttttcggtttccagatg

SEQ ID NO: 160173 - DNA, 80 bp, synthetic construct
  source 1..80: mol_type = other DNA
tcgacggtgatttatatcccctcgagcaacgaggacacgccggcggatgaggaggcggaggacagcgttttcacgagcac

SEQ ID NO: 160174 - DNA, 80 bp, synthetic construct
  source 1..80: mol_type = other DNA
atggtgaggagatgccgcatagtgggctacgaccccataattatatgtggccacaacagaaccagcacaaactttagcag

SEQ ID NO: 160175 - DNA, 80 bp, synthetic construct
  source 1..80: mol_type = other DNA
aaggaaacattagccaccctaaactaaacaaacctaacccacaacaaaacaaaccatcagacaatcaatactttgcaccc

SEQ ID NO: 160176 - DNA, 80 bp, synthetic construct
  source 1..80: mol_type = other DNA
taaacccaagggcaggccaaagataacagttagaataaagccccccactctgttagaggacaagtggtacacccagcagg

SEQ ID NO: 160177 - DNA, 80 bp, synthetic construct
  source 1..80: mol_type = other DNA
cttcatgaacggggacctcccctggccaaccacaagcatacccgttaatatgtggtttaagtggtaccccatgatcatgc

SEQ ID NO: 160178 - DNA, 80 bp, synthetic construct
  source 1..80: mol_type = other DNA
aggccacaaaattggtagcaactcagaaagaggtgataatcaaccagatgaaaaccctttctttaactgcaatggaactt

SEQ ID NO: 160179 - DNA, 80 bp, synthetic construct
  source 1..80: mol_type = other DNA
ccctggccaaccacaaacattccgttaaagatgtggtttaagtggtatcccatgatcatgcaccagagggcctgtttaga

SEQ ID NO: 160180 - DNA, 80 bp, synthetic construct
  source 1..80: mol_type = other DNA
tcccaaacagcctccctcagggtcctgttctcgtcttatgcccgactggggctcttgctgataaatatcgcattgaactt

SEQ ID NO: 160181 - DNA, 80 bp, synthetic construct
  source 1..80: mol_type = other DNA
taagtgggtgtggggtggcaaccccgtgtcccaacaggttgttaggaacccctgcaagaccacccaaggttcctcgggca

SEQ ID NO: 160182 - DNA, 80 bp, synthetic construct
  source 1..80: mol_type = other DNA
gccattttatgtaaggcggaacaggctgttaccttgtgtgaaagttcaaaggtcagccttccgctttgcacaaaatggta

SEQ ID NO: 160183 - DNA, 80 bp, synthetic construct
  source 1..80: mol_type = other DNA
ggcccgcggccattgggcccagattgagagaccagtccaggggcccgaggttggagccagcgggcacccgaggtcccagc

SEQ ID NO: 160184 - DNA, 80 bp, synthetic construct
  source 1..80: mol_type = other DNA
ggtggagaaaaaagagaatagtactgactcagtggaacccccagactactagaaaatgcatgataaggggcatgatgccc

SEQ ID NO: 160185 - DNA, 80 bp, synthetic construct
  source 1..80: mol_type = other DNA
acaaaaacatgatagagactagatgcgtgattaacaagcatagtactgctgagaccaccttaacacacttctattcaaga

SEQ ID NO: 160186 - DNA, 80 bp, synthetic construct
  source 1..80: mol_type = other DNA
tccacagtgtcacacgcgttcgccacctcacagacgtcaaccattggcaacatgaccaacgttacctctggcttaagtac

SEQ ID NO: 160187 - DNA, 80 bp, synthetic construct
  source 1..80: mol_type = other DNA
aaaaacacacaccacacgtcacgacaccgatcgattttctttattcttagtgtgatgataggtaagggcactcgtgagga

SEQ ID NO: 160188 - DNA, 80 bp, synthetic construct
  source 1..80: mol_type = other DNA
cttctagaagacatgcccctgtgggcaatgtgctttggatacactgactatgtagaaactcaattaggcccaaatgtaga

SEQ ID NO: 160189 - DNA, 80 bp, synthetic construct
  source 1..80: mol_type = other DNA
ctgcgtacacctccgaactcaccagctcgcatgagtctgtggagaccgcctgcccacaatgtccccggccaggagcagca

SEQ ID NO: 160190 - DNA, 80 bp, synthetic construct
  source 1..80: mol_type = other DNA
acacgcaaacgtactaaacacatttagaacagaaggctgcttctcacacccacaactaaaaaagtacaacagtaatttag

SEQ ID NO: 160191 - DNA, 80 bp, synthetic construct
  source 1..80: mol_type = other DNA
tccactacttctacatgacctcccttaaggacgagctccgtccgcttgggaaagtggctgatggcaagacccgtgtcatc

SEQ ID NO: 160192 - DNA, 80 bp, synthetic construct
  source 1..80: mol_type = other DNA
tttcctcggatgccaaagaagacgttgagatgcgtgtagcccagaagcgtgtagttctcggtggtggaggcgtagtccag

SEQ ID NO: 160193 - DNA, 80 bp, synthetic construct
  source 1..80: mol_type = other DNA
aaacagtaaacattacacaaaatccaattgagaaatacacagaagcactacttaatgaagtgttagtggttccaaacata

SEQ ID NO: 160194 - DNA, 80 bp, synthetic construct
  source 1..80: mol_type = other DNA
cgttcagcgtctctgctgtcggttagctcaaaatcagtgaactgacaggtatgaggatcatatcccatatgtagtcgcca

SEQ ID NO: 160195 - DNA, 80 bp, synthetic construct
  source 1..80: mol_type = other DNA
acgcaaagatgaacctccctcactcaaaccacggatggaggttgaattcttaaagcgcaaacctggctacttcccagagt

SEQ ID NO: 160196 - DNA, 80 bp, synthetic construct
  source 1..80: mol_type = other DNA
gtagataaaggaataggaaacaaagtatggttagaccccttaaacaaagaagacgcggtactagacacaaaaaaagccaa

SEQ ID NO: 160197 - DNA, 80 bp, synthetic construct
  source 1..80: mol_type = other DNA
ccaacacacagactatcttgtacactacagcagaaaaacacccctgggaggcaacagactgacagcacctagccttcacc

SEQ ID NO: 160198 - DNA, 80 bp, synthetic construct
  source 1..80: mol_type = other DNA
acaaggaattcatagacaagatcagaaagacggaagtgggccgtaggttgtatctcccaccatacaatctactggagcgt

SEQ ID NO: 160199 - DNA, 80 bp, synthetic construct
  source 1..80: mol_type = other DNA
tacttgagtgaccgtgaggccaccgcagtggatcaaccaacgcaacctgatgtggcgacatgccgcttctacaccctgga

SEQ ID NO: 160200 - DNA, 80 bp, synthetic construct
  source 1..80: mol_type = other DNA
tacaacaacaagtactaaatgacatccacaactgcggaccgtgggcctacagagacgagcacctaagcaccaccctgaca

SEQ ID NO: 160201 - DNA, 80 bp, synthetic construct
  source 1..80: mol_type = other DNA
tctactttaagcctaaacatgttagagcatgggtcccaagaccgccacgactgtgtcaatacatgaacaaggccaatgtg

SEQ ID NO: 160202 - DNA, 80 bp, synthetic construct
  source 1..80: mol_type = other DNA
aaatgccttctaaaagactttccaatgtgggccatggtatacgggtacgcagactactgcaaaaaagtcacaggagacac

SEQ ID NO: 160203 - DNA, 80 bp, synthetic construct
  source 1..80: mol_type = other DNA
cgtcaattttgaaccaacgggggtgacagagtcccgtactgaaattacagcaatgcaaaccaccggtccacgtggacaac

SEQ ID NO: 160204 - DNA, 80 bp, synthetic construct
  source 1..80: mol_type = other DNA
gataaaagttagattgcaaaatctgtttgacaatgatgaagtagcattgttaaaaataacatgctatactgacaaatggg

SEQ ID NO: 160205 - DNA, 80 bp, synthetic construct
  source 1..80: mol_type = other DNA
ttcattagcataaccgcacaaccgttacttacagccacaggctgggaaacctactttaaaagttttttaaatgcagcctt

SEQ ID NO: 160206 - DNA, 80 bp, synthetic construct
  source 1..80: mol_type = other DNA
aagtggaaaatctttggttacatctgtgatttcacgtgggctcaccacagaagctggcgtgtattcactccccccagacc

SEQ ID NO: 160207 - DNA, 80 bp, synthetic construct
  source 1..80: mol_type = other DNA
cataaagcctcccatgaaaatgaacgagactacctcacccaacgcacacccgggcatgctaatgcagatgaaacacaaga

SEQ ID NO: 160208 - DNA, 80 bp, synthetic construct
  source 1..80: mol_type = other DNA
ggttgcaatcccgatatattttggtcacaactctatgcaactttagatggacacctacttgcatttgattacaccaatta

SEQ ID NO: 160209 - DNA, 80 bp, synthetic construct
  source 1..80: mol_type = other DNA
tgagttgcattgttgccatctgcacttcttttggttctactatgagtaagattcagactggagcggttggccaaacgttc

SEQ ID NO: 160210 - DNA, 80 bp, synthetic construct
  source 1..80: mol_type = other DNA
actcacagccagaaaatgaaatccttcttaacggttacagcaccaaagtcaaggataagtggagattggtggatccagac

SEQ ID NO: 160211 - DNA, 80 bp, synthetic construct
  source 1..80: mol_type = other DNA
tccaggtaaagaagtgcaaatagatggcatcacaaccaaagttgaagattcatatgacttatacaacaaagatggagtta

SEQ ID NO: 160212 - DNA, 80 bp, synthetic construct
  source 1..80: mol_type = other DNA
ctgtgccatggataaacgacacattaacacctaattgggataatatgacgtggcaagaatgggaggaaaaggtgaactac

SEQ ID NO: 160213 - DNA, 80 bp, synthetic construct
  source 1..80: mol_type = other DNA
gctttacccaactacagaaaaatcaacttcaaaatttcgccaaagtcaacgcatacacagtccacgaatgtcagggccaa

SEQ ID NO: 160214 - DNA, 80 bp, synthetic construct
  source 1..80: mol_type = other DNA
caacaactggtgcagccccctccataccagtaactgtaactattgctccaatgtttttagagttatctggcatacgatca

SEQ ID NO: 160215 - DNA, 80 bp, synthetic construct
  source 1..80: mol_type = other DNA
agtcaggagaactgcaggagcaaccgaaaaaatagttatgggagccaaagggactcttggatgcctgtcaccttgggcac

SEQ ID NO: 160216 - DNA, 80 bp, synthetic construct
  source 1..80: mol_type = other DNA
caccttgacgtattgaaaaaagacggcctcgatcagtaaaaagtagatgatggagatgatagcgtagaccacgaagacgg

SEQ ID NO: 160217 - DNA, 80 bp, synthetic construct
  source 1..80: mol_type = other DNA
taaggctgttcagtggttagaaagaaataaggaacatgtgtgtggcatactagattatgcatctgacatcattgtggagt

SEQ ID NO: 160218 - DNA, 80 bp, synthetic construct
  source 1..80: mol_type = other DNA
gcatgattgacaacacagttcgtgaaacgatgggggcctcgacctcaagggatgctctcccgaataccgagcccagtggt

SEQ ID NO: 160219 - DNA, 80 bp, synthetic construct
  source 1..80: mol_type = other DNA
gctcgggcactagttcgcccacgctggcaatgacctcacgcagcctatcggtgtcgctgtactcacagtaaaagtagctg

SEQ ID NO: 160220 - DNA, 80 bp, synthetic construct
  source 1..80: mol_type = other DNA
catttgtagatgcaggaggacacacaacaggctcaacaacaactacatggggacaactattaaacacaactaaatttacc

SEQ ID NO: 160221 - DNA, 80 bp, synthetic construct
  source 1..80: mol_type = other DNA
catatttttcatatgtttgattgtatgaagtattgaaaatctgctgtaacttatttatggcctcatcacgtacgcagtcc

SEQ ID NO: 160222 - DNA, 80 bp, synthetic construct
  source 1..80: mol_type = other DNA
ccagggcgaaaaagatacaggcgagacacagaagctctactccccagccaagaagagcagcaaaaagaaaacttattttt

SEQ ID NO: 160223 - DNA, 80 bp, synthetic construct
  source 1..80: mol_type = other DNA
cattgaaggaaattctaaaagaattaaaatttgagcataggttaatagataggttgtgtaattctagacatatatttaga

SEQ ID NO: 160224 - DNA, 80 bp, synthetic construct
  source 1..80: mol_type = other DNA
aaagcaaaacatattagtgcgtggtgtccaagagctccaagagcagtgccctaccagcacaccagaagtacaaacttagt

SEQ ID NO: 160225 - DNA, 80 bp, synthetic construct
  source 1..80: mol_type = other DNA
caaatagtctcaagacaaaagttgaaagaccttaacctgtcaccagtcaacacccctaccaaaacaaaactacatccaag

SEQ ID NO: 160226 - DNA, 80 bp, synthetic construct
  source 1..80: mol_type = other DNA
acgggttccttgaacagatccggagctgcgccgtgggtaggcgcttgcagcttccaccatactccagtctgtacaggcag

SEQ ID NO: 160227 - DNA, 80 bp, synthetic construct
  source 1..80: mol_type = other DNA
acaaaaagaataccattaccactatcccaacaatgtcaccacagaccttgtagacaaaaacaccctaacacacgactggg

SEQ ID NO: 160228 - DNA, 80 bp, synthetic construct
  source 1..80: mol_type = other DNA
actgtggccaacacagtggagagtgagatcagggctgagctcggtgtgatacctagtctaaatgctgctgagacaggagc

SEQ ID NO: 160229 - DNA, 80 bp, synthetic construct
  source 1..80: mol_type = other DNA
ccctattgtgtgcaaagccctcaacaaattatgaaattggcatacttagatagagggttctataaacattatggcttaat

SEQ ID NO: 160230 - DNA, 80 bp, synthetic construct
  source 1..80: mol_type = other DNA
acaaggaccaggaacagccagccaacgaagaaacagaagaaggaggtggaaacgacgggggctacagatcttggccctgg

SEQ ID NO: 160231 - DNA, 80 bp, synthetic construct
  source 1..80: mol_type = other DNA
aaaaccattgtcccacagggtttgccaactaccactctgccaggttcaggacaatttcttactacagacgatagacaatc

SEQ ID NO: 160232 - DNA, 80 bp, synthetic construct
  source 1..80: mol_type = other DNA
acaggtggccattcgtgggacagtatccctgacagcctacaaaacgcaattgaagaacgcgaggcatcgtcttaacgagg

SEQ ID NO: 160233 - DNA, 80 bp, synthetic construct
  source 1..80: mol_type = other DNA
tgaaagccacacacactctagagaaaaatttggagtacacacaatattgtctaaattgcttgggcagtttaatacttatt

SEQ ID NO: 160234 - DNA, 80 bp, synthetic construct
  source 1..80: mol_type = other DNA
tatggaaatcacgtttgtaatcacaagtagacaactacctgggactagcatagcacaagatatgccgccactcacccacc

SEQ ID NO: 160235 - DNA, 80 bp, synthetic construct
  source 1..80: mol_type = other DNA
cgtgctggtatcaaaccagcctggtcgtcccagcagagaccccacaacagtgcaccatcctatgctttgtgtcagcatgc

SEQ ID NO: 160236 - DNA, 80 bp, synthetic construct
  source 1..80: mol_type = other DNA
acaacaaccatatgatgaactgtcttatacgggccctaaaaagccaaaactgtcccttcccgcagggcccgccgtccccg

SEQ ID NO: 160237 - DNA, 80 bp, synthetic construct
  source 1..80: mol_type = other DNA
aaagctctaaatactgcaggctttactgtactaaatacatttagaacagaaggtatatactcacacccacaactaaaaaa

SEQ ID NO: 160238 - DNA, 80 bp, synthetic construct
  source 1..80: mol_type = other DNA
ccaaaaaacaacagctacgtgtttcatttgttttaatctaccgaagtaaaaaaaaaaaagatgattagctatccagaacc

SEQ ID NO: 160239 - DNA, 80 bp, synthetic construct
  source 1..80: mol_type = other DNA
gaggacgagcgcgaactgtgcgtgcccttcatcagccatagcatcgccgacaacaactgcagccgccggcatcgagtaga

SEQ ID NO: 160240 - DNA, 80 bp, synthetic construct
  source 1..80: mol_type = other DNA
agtaagggtgtttcaaataatcatagacaggttttcgatccattttcagaactgatttttctatacgatcacgagtcggt

SEQ ID NO: 160241 - DNA, 80 bp, synthetic construct
  source 1..80: mol_type = other DNA
gtgcagccaatatcaacgaaaaaatcaatagagagcatttgagtaatggtgaggtggccaatacattcacaggcaccaag

SEQ ID NO: 160242 - DNA, 80 bp, synthetic construct
  source 1..80: mol_type = other DNA
gcagggggcgactcagactgcgcaggcgccgcaggcgccgcaaaaagataatactgactcagtggaacccccagactact

SEQ ID NO: 160243 - DNA, 80 bp, synthetic construct
  source 1..80: mol_type = other DNA
tgcaccccccgagcgtctggacgacgctggcgagccgggccggctcgccttcttttatcctctttttggggtctctgtgt

SEQ ID NO: 160244 - DNA, 80 bp, synthetic construct
  source 1..80: mol_type = other DNA
ggtcaaggcccaggacaactctattccccaggacaccttcttgtggtgggtggtcttctacctgaagcccatagttacaa

SEQ ID NO: 160245 - DNA, 80 bp, synthetic construct
  source 1..80: mol_type = other DNA
gctatgtttctcggcagggtgtggaggaagcactttccttttctgcttcctccacaccctcccgagggcgggtgccggag

SEQ ID NO: 160246 - DNA, 80 bp, synthetic construct
  source 1..80: mol_type = other DNA
gacactaatcagagtaaatataaggatttacaaaacaaattatatagtacatgcacatattttgaaactgggcaagtatt

SEQ ID NO: 160247 - DNA, 80 bp, synthetic construct
  source 1..80: mol_type = other DNA
caaccaatgagattcaaaaccctgttgaagattttgtggagggaaccttaaaagaagttttggtggtaccaaacacacaa

SEQ ID NO: 160248 - DNA, 80 bp, synthetic construct
  source 1..80: mol_type = other DNA
ggcttggttgaagaagaaggcatgcgacatcctagaaatcccatatgctatcaaacagggagactcgtggcttaaaaagt

SEQ ID NO: 160249 - DNA, 80 bp, synthetic construct
  source 1..80: mol_type = other DNA
ttggcacctacaatgctaaaggcacgcgagagggagacacggaccagtttgctgtttggaccatcagcgtcaaggacatg

SEQ ID NO: 160250 - DNA, 80 bp, synthetic construct
  source 1..80: mol_type = other DNA
aagatgaaacaaacgcaagctttaaaacaaagccatataactgggaaaattacaaagacaactaccaagcagtaaacaag

SEQ ID NO: 160251 - DNA, 80 bp, synthetic construct
  source 1..80: mol_type = other DNA
aaaggaactgtcacgtagctgtgactgcaaggggagagttcaacttgcttggaattcatgataactgtgctgtgattcct

SEQ ID NO: 160252 - DNA, 80 bp, synthetic construct
  source 1..80: mol_type = other DNA
tacaggtgaggtccacggatgagatgggtggtcaaatatttggatttcctttgcaaccaggggcatcaagtgtgttgcag

SEQ ID NO: 160253 - DNA, 80 bp, synthetic construct
  source 1..80: mol_type = other DNA
cacggagaagttgctaaagaacctcataaaactcgtcagcagcctggtgatcatcacaagaaactatgaagacaccacaa

SEQ ID NO: 160254 - DNA, 80 bp, synthetic construct
  source 1..80: mol_type = other DNA
ggggtcatgaaattggtaagaacaccgaaagaaatgacaaacagcctgatgaagacccacttttcaattgcaatggaact

SEQ ID NO: 160255 - DNA, 80 bp, synthetic construct
  source 1..80: mol_type = other DNA
tattggaaaatattttaaagagaatggaatggtcaaagatgagcacgaactgctcaagagcttgcatcaattatctgcat

SEQ ID NO: 160256 - DNA, 80 bp, synthetic construct
  source 1..80: mol_type = other DNA
gaccccccgcctggtgctggaagttaaccgccataacgccatctgcgtggccaccaacgtccctgagttctacaatgcca

SEQ ID NO: 160257 - DNA, 80 bp, synthetic construct
  source 1..80: mol_type = other DNA
ttagatgattctgtcaatagtcacatcaaggtgtacatcaaaccaaagcacataactgcttggatccctagaccacccag

SEQ ID NO: 160258 - DNA, 80 bp, synthetic construct
  source 1..80: mol_type = other DNA
gttttggagtccaaaactagggctattgactcttgtccgcttgattatacaattttgtgtagaatgtattggggccctgc

SEQ ID NO: 160259 - DNA, 80 bp, synthetic construct
  source 1..80: mol_type = other DNA
aggcccagcagaaaacacagagtggtcgtcagggtggcccacccagactttttcaagacaagtggtacccccagtcagac

SEQ ID NO: 160260 - DNA, 80 bp, synthetic construct
  source 1..80: mol_type = other DNA
aaatcgaagtttctcatgtcttaaaaatcacagtctcgttctcataaatgtaacagaacaatacaccgattactatcgca

SEQ ID NO: 160261 - DNA, 80 bp, synthetic construct
  source 1..80: mol_type = other DNA
tatactggactaccccataccacccccaagaaacctgaactcagaagagctgtacatcagggacctgaacatgagtttct

SEQ ID NO: 160262 - DNA, 80 bp, synthetic construct
  source 1..80: mol_type = other DNA
aacagtaacttttcagttcaaaacataaaaaacaggccaacaggaggaccggtgggtacagtattcaacacatttaaaac

SEQ ID NO: 160263 - DNA, 80 bp, synthetic construct
  source 1..80: mol_type = other DNA
aggcaacagattcaggggatacatactatggattagtgtccatcaatgacttcggcactttggccattagagtagtgaat

SEQ ID NO: 160264 - DNA, 80 bp, synthetic construct
  source 1..80: mol_type = other DNA
gcatggatatccctggtgaggtgcataatttaatggagatcgcggaagttgactcagttgtccctgttaataacaccacc

SEQ ID NO: 160265 - DNA, 80 bp, synthetic construct
  source 1..80: mol_type = other DNA
atcctggaccttgactatgaaacaattcttaaaaaatgcatcatagtccagtgtccagggacagtgcactcggaagtctc

SEQ ID NO: 160266 - DNA, 80 bp, synthetic construct
  source 1..80: mol_type = other DNA
gcatttgattacacaaattatgatggtagtattcatccagtgtggtttcaagctctaaaagaaatattatctaatttggg

SEQ ID NO: 160267 - DNA, 80 bp, synthetic construct
  source 1..80: mol_type = other DNA
caaggaacatcagcagtagtagcacaaaaccctacacaaataagagacaaacttagtcgaaacatgacctcttactttaa

SEQ ID NO: 160268 - DNA, 80 bp, synthetic construct
  source 1..80: mol_type = other DNA
tcgttcgacatcagacgtggatactttagcgcgacgagtattaaaagagtgtcagaacaatcagaaactactgagtttct

SEQ ID NO: 160269 - DNA, 80 bp, synthetic construct
  source 1..80: mol_type = other DNA
gaatgtttatggtgacaattgtttgattcagttgttaccatttaccacattcatcaacctagtgtcaaaccgattaaact

SEQ ID NO: 160270 - DNA, 80 bp, synthetic construct
  source 1..80: mol_type = other DNA
gcctgtacagctctatgtttttatcaagtagcagactaagccctgacttcccaggcctttacaaagaagttatatacaat

SEQ ID NO: 160271 - DNA, 80 bp, synthetic construct
  source 1..80: mol_type = other DNA
tttgaatttacctgaatacagcgtcctcaggagacgctggttggacttgttttaaattacatatatatagacctctaatt

SEQ ID NO: 160272 - DNA, 80 bp, synthetic construct
  source 1..80: mol_type = other DNA
gttaacagccaagagaacagaacctgttggagttttatttcatggagaaccaggtactggcaaatctattgcaacctcaa

SEQ ID NO: 160273 - DNA, 80 bp, synthetic construct
  source 1..80: mol_type = other DNA
gcatcagataacaagttaatagtggctatacccttacagatggacaatactttgtttgctactactttattaggtgaggt

SEQ ID NO: 160274 - DNA, 80 bp, synthetic construct
  source 1..80: mol_type = other DNA
aaaatatctaagtttattgattggatcaaagataaggtcatcccagaagcgagagacaaattggagtacgtaaataaatt

SEQ ID NO: 160275 - DNA, 80 bp, synthetic construct
  source 1..80: mol_type = other DNA
ttctcgggtattcgatcaaaagcagtagcaatacagggtttaccaacactaactactccggggtctggccaatttttaac

SEQ ID NO: 160276 - DNA, 80 bp, synthetic construct
  source 1..80: mol_type = other DNA
cttggtaaaaattatggacttgtgattaccccaccagataaatcagaaaagttcacaaaaatgacatgggataatttaac

SEQ ID NO: 160277 - DNA, 80 bp, synthetic construct
  source 1..80: mol_type = other DNA
caaatgtgagcagtgagaggaaaatactggctataccattagatatgagtaatacacttttctctacaacacttatgggg

SEQ ID NO: 160278 - DNA, 80 bp, synthetic construct
  source 1..80: mol_type = other DNA
gaccaacaaacagttgtcatcatggatgacattatgcaaaatcccagtggagaagatatgacactcttttgtcaaatggt

SEQ ID NO: 160279 - DNA, 80 bp, synthetic construct
  source 1..80: mol_type = other DNA
agatggtaaccctaccactgaccccgcccctcgcgacaactttgactacccccaccaccctgttgatccttccactgatc

SEQ ID NO: 160280 - DNA, 80 bp, synthetic construct
  source 1..80: mol_type = other DNA
gcaaacattggaaactgtatggaggcgttgttccaggggcctattcaatacagagatgtgaaaattgatatcaaagaaac

SEQ ID NO: 160281 - DNA, 80 bp, synthetic construct
  source 1..80: mol_type = other DNA
ttaagacggccatgagcaacacggccaacccgcaaagcgttactcgcaaggcacagaggctagagggcaccgcccagttg

SEQ ID NO: 160282 - DNA, 80 bp, synthetic construct
  source 1..80: mol_type = other DNA
cccccctggccgtggctcttcgtgtgtccccggggacttcctcttttccgcgtcgctggcccctgggaggcgttcttcgt

SEQ ID NO: 160283 - DNA, 80 bp, synthetic construct
  source 1..80: mol_type = other DNA
tggttcctcaattgggtagaaaacaggagcatggagggacaaacgtcaagggagagacataaaaggaactatgtgccttg

SEQ ID NO: 160284 - DNA, 80 bp, synthetic construct
  source 1..80: mol_type = other DNA
gacaaagaagggagagtttaatctattaggtatccattccaattgtgcagtaattcccacccatgctgaatgtgatgaag

SEQ ID NO: 160285 - DNA, 80 bp, synthetic construct
  source 1..80: mol_type = other DNA
tctactcgaccaccctcgtgagcccaccaaactccacagggacacccctagcctccgagccctccacatcaggttccacc

SEQ ID NO: 160286 - DNA, 80 bp, synthetic construct
  source 1..80: mol_type = other DNA
catttgccacagaagctcaactaggtagaataccacagtttaatccagatggcaccaaaaactcacagaaagaagagtgg

SEQ ID NO: 160287 - DNA, 80 bp, synthetic construct
  source 1..80: mol_type = other DNA
gaagaaagcagccttacctcgctcgaagaagtcccggaagagacgcagctacgagtccacctccgaaagcagctcagaga

SEQ ID NO: 160288 - DNA, 80 bp, synthetic construct
  source 1..80: mol_type = other DNA
ccaagaagataaggttaaaaaatattatggagtggaaactgctgagaaggttgccgacagcataagtggtaataaggtat

SEQ ID NO: 160289 - DNA, 80 bp, synthetic construct
  source 1..80: mol_type = other DNA
gggtcacagatgctcgaacatccatcaaattggaaaaaccaagtgttggcggtagactggtaacaagtggggctttcggg

SEQ ID NO: 160290 - DNA, 80 bp, synthetic construct
  source 1..80: mol_type = other DNA
gaatacatcaccaaactcaaacagttaggcatgcttgaaaatcagatcagcaccatacaccaatcctgccccagtcaaga

SEQ ID NO: 160291 - DNA, 80 bp, synthetic construct
  source 1..80: mol_type = other DNA
ccccgggccgtgccctatagaggagagggtgttgacataaagcagggcacaataacaccactaaccccagtgagcaagat

SEQ ID NO: 160292 - DNA, 80 bp, synthetic construct
  source 1..80: mol_type = other DNA
tctttgggcgagcgtggcttgcgcatgagcacacatctgctgatgatggaacttggagagtcaacttagatttcccaact

SEQ ID NO: 160293 - DNA, 80 bp, synthetic construct
  source 1..80: mol_type = other DNA
cctaaagatggacgaggggcgtgtgcaccggtacccgccctggccgggcctattgtccggccctgggagtcatccctgtt

SEQ ID NO: 160294 - DNA, 80 bp, synthetic construct
  source 1..80: mol_type = other DNA
gatgtaactggagcaggagtaatgataatctagaacttattagatacaagggctgcactatgaaactgtacagacaccca

SEQ ID NO: 160295 - DNA, 80 bp, synthetic construct
  source 1..80: mol_type = other DNA
tggtacacccagcaggacctctgcccagttccgttagtccaactgaacgtaaccgcagcggatctgcaacatccgttcgg

SEQ ID NO: 160296 - DNA, 80 bp, synthetic construct
  source 1..80: mol_type = other DNA
tatgagacctgcaaaatttgggacaggcccgctagacaaaacctaaaagacacccctttttatccctggatgcctaaggc

SEQ ID NO: 160297 - DNA, 80 bp, synthetic construct
  source 1..80: mol_type = other DNA
tttacaacccctacacagacaaaggaaaaggcaacagaatatgggtagactactgcacaaaagcagacaacatatacaag

SEQ ID NO: 160298 - DNA, 80 bp, synthetic construct
  source 1..80: mol_type = other DNA
tggggtatgtattttatgacacatactttggagatggaaaaatgccctcaggcacaggcctagtacccttttggtaccaa

SEQ ID NO: 160299 - DNA, 80 bp, synthetic construct
  source 1..80: mol_type = other DNA
ggataaacaaagtgagtattatacaaaaacttatggcagctatgccacccagtactttactggtaaaacgtactgggact

SEQ ID NO: 160300 - DNA, 80 bp, synthetic construct
  source 1..80: mol_type = other DNA
aaacttatttaacaaactactgccacactcactatcaaaaccaaatgaagacaactggcaatacacatacacacaactaa

SEQ ID NO: 160301 - DNA, 80 bp, synthetic construct
  source 1..80: mol_type = other DNA
ctacggttgtctctacggcgctttttgggcgcgctggggaccgggctgcgggacgggtggtgtgcgggacggcgatggtg

SEQ ID NO: 160302 - DNA, 80 bp, synthetic construct
  source 1..80: mol_type = other DNA
cgcatggatgcctacagggtggagatcactaatagtaccactgcaggaacacaggtttttggctttcaactaaatccggg

SEQ ID NO: 160303 - DNA, 80 bp, synthetic construct
  source 1..80: mol_type = other DNA
atacggaaactcccgaaacgaagcaaagaacaacacatcaggtgtaattaaaataattaaagagaacatgatatcctact

SEQ ID NO: 160304 - DNA, 80 bp, synthetic construct
  source 1..80: mol_type = other DNA
cttttcgacgagcaccaaaaacaccacaatacgtggagctatccaagcaatcaactagacctagccagatttagaggcag

SEQ ID NO: 160305 - DNA, 80 bp, synthetic construct
  source 1..80: mol_type = other DNA
ggaccctttggagggggactaagcagcatgagatttaacatgagaatactatatgatcaatttaaaagacaccttaactt

SEQ ID NO: 160306 - DNA, 80 bp, synthetic construct
  source 1..80: mol_type = other DNA
ccatataactatagaatgctagtaatatctccatacacatatcctgctctaaaacaaccagacaatgacaactacgggtt

SEQ ID NO: 160307 - DNA, 80 bp, synthetic construct
  source 1..80: mol_type = other DNA
tgcacaccttatgatattaatcagatgctaaattgtgtaggggaacatcaagcggctatgcaaataattagagaaattat

SEQ ID NO: 160308 - DNA, 80 bp, synthetic construct
  source 1..80: mol_type = other DNA
tacaacacacacatgccgcacaatcatgccagccacagacacaaacagcacccacaccacgccgcttcacccagaggacc

SEQ ID NO: 160309 - DNA, 80 bp, synthetic construct
  source 1..80: mol_type = other DNA
ctttgtggtatcaaacagatttcataaccacctcaaacagtgtgggagaggtgctggtcacgtgtagtggctgcccagac

SEQ ID NO: 160310 - DNA, 80 bp, synthetic construct
  source 1..80: mol_type = other DNA
ctttctccacccattcggctcaccacaaactgccaacatttgcacaaccttccaggttctgcaaccgttctactatcaag

SEQ ID NO: 160311 - DNA, 80 bp, synthetic construct
  source 1..80: mol_type = other DNA
agatgttcctaggaaggtcagccttgtggagcaaattctctctcactgaaaaacatgccaaatgggagattaacttccag

SEQ ID NO: 160312 - DNA, 80 bp, synthetic construct
  source 1..80: mol_type = other DNA
gcgcgtagcaggtactcgtcgatggttttgaagagcgttttgttggccgcgataatctcttccgtgttaaagtactgcgc

SEQ ID NO: 160313 - DNA, 80 bp, synthetic construct
  source 1..80: mol_type = other DNA
accagttagcaaatgcaaatgctaccaatgcagacgccggatacaattatacccatcctggtgaacgaggcagagaggtt

SEQ ID NO: 160314 - DNA, 80 bp, synthetic construct
  source 1..80: mol_type = other DNA
cacacgtgacctaaatagccctcagaaatctcatgatcaatcacaagcagtcagacagacaccgatgaatcagaatgctc

SEQ ID NO: 160315 - DNA, 80 bp, synthetic construct
  source 1..80: mol_type = other DNA
tacgaaggaagtggctgaactctttctaaaattagagcataattagtaaatcataattggcttaaccctaccaccgatat

SEQ ID NO: 160316 - DNA, 80 bp, synthetic construct
  source 1..80: mol_type = other DNA
cccgcctagaagcattccagaaacaagtagtgttacattctttttattttctgatctcaatcaaatctttagagattaca

SEQ ID NO: 160317 - DNA, 80 bp, synthetic construct
  source 1..80: mol_type = other DNA
tggaaaagccctgagtttagttgatagacacacaaatgttaggtacagtatagatcaattggttacagcaataatcaatg

SEQ ID NO: 160318 - DNA, 80 bp, synthetic construct
  source 1..80: mol_type = other DNA
gatggagattgctgaggtggattctgtagtacctgtcaacaacactgcagatgctatcaattccatgggagcgtacagag

SEQ ID NO: 160319 - DNA, 80 bp, synthetic construct
  source 1..80: mol_type = other DNA
caacccagcatttgcagagacgccaattcattgacatgctgtgaagactcgcgtgtgcttagctgtgagtcctccggccc

SEQ ID NO: 160320 - DNA, 80 bp, synthetic construct
  source 1..80: mol_type = other DNA
attcttgttttgcggcagcatgatggcgactggtaagctgattctgacatactcgccaccaggggcgtcacctccaaaaa

SEQ ID NO: 160321 - DNA, 80 bp, synthetic construct
  source 1..80: mol_type = other DNA
cccccacctaacaaatccaagtaacttagaagatttgaacactgcacaatagggactattgtagccaacaatggtcagtg

SEQ ID NO: 160322 - DNA, 80 bp, synthetic construct
  source 1..80: mol_type = other DNA
gttcagatgcacaaagccttctgtgggtgtgacaactttcttacccacctgcaacgcataacaacatacatctctgctaa

SEQ ID NO: 160323 - DNA, 80 bp, synthetic construct
  source 1..80: mol_type = other DNA
gactggctatacaaaaaatgcactcactatcaaacatttgccacagacactagactagccccagaaaaatccaatacacc

SEQ ID NO: 160324 - DNA, 80 bp, synthetic construct
  source 1..80: mol_type = other DNA
tatcaaatcagggaccattcaaaggttttaatgaggtttccactgcatttaggcatatagattggtggatccatactttg

SEQ ID NO: 160325 - DNA, 80 bp, synthetic construct
  source 1..80: mol_type = other DNA
caagagaaaaagttgaaaaaggaaagtcacgcttaattgaagccagttccttgaatgactcagttgctatgagggttgct

SEQ ID NO: 160326 - DNA, 80 bp, synthetic construct
  source 1..80: mol_type = other DNA
cagacctactacaaaagcactagaatgcaaaacaggcatatacagcccaatatttttaagtccacaaagacttaacccac

SEQ ID NO: 160327 - DNA, 80 bp, synthetic construct
  source 1..80: mol_type = other DNA
gttgaatgataatcttagcaccgagcctatattttgcctgtcgttgtcaccagcatccgacaggcgattgagccacacaa

SEQ ID NO: 160328 - DNA, 80 bp, synthetic construct
  source 1..80: mol_type = other DNA
gatgcttaaacttggcccggcattttctggaagccacccgattcttgtatcgctttatatctagttcagaatcacattcc

SEQ ID NO: 160329 - DNA, 80 bp, synthetic construct
  source 1..80: mol_type = other DNA
taccaactcatgcacaaccagacaataaagtcctactcaatggtcagactatacagataaaggataaatacaaattagtg

SEQ ID NO: 160330 - DNA, 80 bp, synthetic construct
  source 1..80: mol_type = other DNA
ccccccaaacacaaggtaaagtatacctgctttcttttattagtgcatgctcagattttaaattgagattaatgaaagac

SEQ ID NO: 160331 - DNA, 80 bp, synthetic construct
  source 1..80: mol_type = other DNA
gaaacctactgacagcacccagcctgcaccccggggcagccatgcttagcaaacacaaaataatagtacctagctttaaa

SEQ ID NO: 160332 - DNA, 80 bp, synthetic construct
  source 1..80: mol_type = other DNA
tccgtccggcatggacactcaagcttttgtggctgcggtaattttgttcaccatcttgctgtacttgctgctcgctatca

SEQ ID NO: 160333 - DNA, 80 bp, synthetic construct
  source 1..80: mol_type = other DNA
caacatacatgcatttcaatggttctgaaacagatattgaaagttttctggggcgtgccgcttgtgtgcatgtaactgaa

SEQ ID NO: 160334 - DNA, 80 bp, synthetic construct
  source 1..80: mol_type = other DNA
aaacaaaaattccagaaagaagagtagtagcacaagggcctgaagaggagtttgggcgctccttaattaaacataatacc

SEQ ID NO: 160335 - DNA, 80 bp, synthetic construct
  source 1..80: mol_type = other DNA
acgcctgttgaaggatacaccattcataacacaacagactttcttccaaggtgatgacctgacagacatcaccgtggcaa

SEQ ID NO: 160336 - DNA, 80 bp, synthetic construct
  source 1..80: mol_type = other DNA
cgcaactcaaaattaagtacctcgcagaacttaaaaaattaaattttctggaaaaacaaattgaacacttgagagttgca

SEQ ID NO: 160337 - DNA, 80 bp, synthetic construct
  source 1..80: mol_type = other DNA
atctcatcacatattcatttaattgcttgattgcataatgggagcccaagtttctacacagaagtctggctcacatgaga

SEQ ID NO: 160338 - DNA, 80 bp, synthetic construct
  source 1..80: mol_type = other DNA
ggcatttactccacttaatacatatacaccaagtttaattaggatcatcttgttaattagatcagcttatcacaatgggt

SEQ ID NO: 160339 - DNA, 80 bp, synthetic construct
  source 1..80: mol_type = other DNA
gggcgaccaaaagagctgtgtacttgctttaaaatacatcttcagatggaaatggggaggtaaccctgtgtctcaccaga

SEQ ID NO: 160340 - DNA, 80 bp, synthetic construct
  source 1..80: mol_type = other DNA
gataattcaaatgtacaacccactcaaactttagaaaattgcaaaactattattcaaaacaacatggttaactggcacaa

SEQ ID NO: 160341 - DNA, 80 bp, synthetic construct
  source 1..80: mol_type = other DNA
tatgggccacctatgtattagagcacttaacaacacagataaggataaagtgaaaatctttgcaaagcccaagcatataa

SEQ ID NO: 160342 - DNA, 80 bp, synthetic construct
  source 1..80: mol_type = other DNA
gattaccccgattgcaatttagcccttgtagcaaaccaagtagagccaactataataagtgtaggtgatgtaatctcata

SEQ ID NO: 160343 - DNA, 80 bp, synthetic construct
  source 1..80: mol_type = other DNA
cattcttaatccacccaatcttccctatgagtgaagtgtttgaatcaattagatggactaaagatccaaagaacacacag

SEQ ID NO: 160344 - DNA, 80 bp, synthetic construct
  source 1..80: mol_type = other DNA
tgtagacagtgttaaggatcaaattaatgcaataaatcctataaacaatattagcaaaaaactagtcaagtggattctta

SEQ ID NO: 160345 - DNA, 80 bp, synthetic construct
  source 1..80: mol_type = other DNA
gtaaacacggaagtagctgacccacgtgacttatcacgtgactagcacgtcacagccgccattttgttttacaaaatggc

SEQ ID NO: 160346 - DNA, 80 bp, synthetic construct
  source 1..80: mol_type = other DNA
accagtaactttgttcttgcatcaaccaactctaatacacttagccccccaacaatactaaaccctgaagcactagctag

SEQ ID NO: 160347 - DNA, 80 bp, synthetic construct
  source 1..80: mol_type = other DNA
cccccccccgggaaaggtgggtttccccctttgggagggttttgcccccccggccccgccccgtgctgaatccaccctgc

SEQ ID NO: 160348 - DNA, 80 bp, synthetic construct
  source 1..80: mol_type = other DNA
atgtgtcaagggcgtttcaaccatgtgatactaatttgaaaattgggaatgcaaaatgctgtccatttgtgtgcggtaaa

SEQ ID NO: 160349 - DNA, 80 bp, synthetic construct
  source 1..80: mol_type = other DNA
cggggccgggctgaggaacggggacgggacgttgtgtggacggggggcttttgcgctgcggggcctggcgggaccgggct

SEQ ID NO: 160350 - DNA, 80 bp, synthetic construct
  source 1..80: mol_type = other DNA
caaacatattaaacacatttctaacagaaggatcatacagacgaccacaagtagacaaatataaaaagccaccaggtacc

SEQ ID NO: 160351 - DNA, 80 bp, synthetic construct
  source 1..80: mol_type = other DNA
ctaggcatgtctctaaattttccaattgcaaaggtagagccagtaaaagtaaggctaaaacctggcatggatgggccaaa

SEQ ID NO: 160352 - DNA, 80 bp, synthetic construct
  source 1..80: mol_type = other DNA
ccattttaggccctagcgggcctccgtaggcgcgttttaatgacgtcaaggcagccattttgactgtgacgtcaaagtca

SEQ ID NO: 160353 - DNA, 80 bp, synthetic construct
  source 1..80: mol_type = other DNA
cgtacagcagtacgtgaatgccgccgtgcgcgtccataaatacggctttgtttacgggttccatccatccgatgactaca

SEQ ID NO: 160354 - DNA, 80 bp, synthetic construct
  source 1..80: mol_type = other DNA
cggagacactgtacttattgatggaaaagaaacaaaggtcctcaaacaatctattataacagattctaatgatgttgata

SEQ ID NO: 160355 - DNA, 80 bp, synthetic construct
  source 1..80: mol_type = other DNA
tctttcttgaggcgtttaaagaagagaatagtggccagggcctcggtggggtccagcgtgaggtcttatttttgaaaagg

SEQ ID NO: 160356 - DNA, 80 bp, synthetic construct
  source 1..80: mol_type = other DNA
acggttttgcagccgctctcaagaggtcttatttcacagaacaacaaggagaaatccagtggatgagatcaagcaaagat

SEQ ID NO: 160357 - DNA, 80 bp, synthetic construct
  source 1..80: mol_type = other DNA
cttataactgggaaaactacggcacaccagcggactatggcagcacatacacaacattttcaacacacagaagtacaaga

SEQ ID NO: 160358 - DNA, 80 bp, synthetic construct
  source 1..80: mol_type = other DNA
aggcgctctaaaaaagaagatctaaaaactataaaaaaaataattataaaaatatccccgtggataagtggataacccca

SEQ ID NO: 160359 - DNA, 80 bp, synthetic construct
  source 1..80: mol_type = other DNA
atgacatttgttttcaccgaaaactatccaagcactagtagtggtgaggttagaaatcaggtttatcaaatcatgtatgt

SEQ ID NO: 160360 - DNA, 80 bp, synthetic construct
  source 1..80: mol_type = other DNA
agaaagacatattgaatcgcaacaccaaagacttgtctaaactacaacacatgatggacttgtatggtattgatttacca

SEQ ID NO: 160361 - DNA, 80 bp, synthetic construct
  source 1..80: mol_type = other DNA
tgacgtaagatcgtgttttagatttgtattttcaccagcctttatactagaacttttaaaactttcaacttcaaggcata

SEQ ID NO: 160362 - DNA, 80 bp, synthetic construct
  source 1..80: mol_type = other DNA
tgcggacaccgtcagcacgagtgctactaattctgagcaggttccgaacctaactgcagtggaaactggccatacctcgc

SEQ ID NO: 160363 - DNA, 80 bp, synthetic construct
  source 1..80: mol_type = other DNA
cttccccgacgttccgctgtcccagaccagtccagtaatggacgggccagtgtgcgtagtcgcgttccggtttctccggc

SEQ ID NO: 160364 - DNA, 80 bp, synthetic construct
  source 1..80: mol_type = other DNA
acttcttcttcccactcccagctcctaaggttacttctagccggactttaaggggtgacatggcaaccttctcagatcag

SEQ ID NO: 160365 - DNA, 80 bp, synthetic construct
  source 1..80: mol_type = other DNA
gatcactcaccgctcccagtgcgcaggggttaccaaccatggccacaccaggttcaaaccagttcctcacctcagataac

SEQ ID NO: 160366 - DNA, 80 bp, synthetic construct
  source 1..80: mol_type = other DNA
accaaggggcattaggagttttcctgataccagagtttgtcatggcctgcaacactgagagcaaaacatcatacgtttca

SEQ ID NO: 160367 - DNA, 80 bp, synthetic construct
  source 1..80: mol_type = other DNA
tgagacagctaggcttaatacagccccaggggattgaagacaccattgccaaagtggttgatgctgctttgagtacttca

SEQ ID NO: 160368 - DNA, 80 bp, synthetic construct
  source 1..80: mol_type = other DNA
taactttcggttcgggggcaatcttctccacgaacagacgatcagaaacccatgccccacggacggacatccctcaaccg

SEQ ID NO: 160369 - DNA, 80 bp, synthetic construct
  source 1..80: mol_type = other DNA
ggcctcgattcttccctccaacagacacacagtcagagccagaaaaagacttcggtttcacaccggagagccaagagcta

SEQ ID NO: 160370 - DNA, 80 bp, synthetic construct
  source 1..80: mol_type = other DNA
gccgcagatggaggagactacgaacccgcagatctagacgccctgtacgacgccgtcgccgcagaccaagagtaaggaga

SEQ ID NO: 160371 - DNA, 80 bp, synthetic construct
  source 1..80: mol_type = other DNA
atttcttttcaagagctgggctggttggaatgttggatctactcacttcagatgagaccactatgggttttaccacttgg

SEQ ID NO: 160372 - DNA, 80 bp, synthetic construct
  source 1..80: mol_type = other DNA
tattctttccgtaggtaatactactatggcagggatcataaacttaagcagcacacccacagcaagaatgattaggtatg

SEQ ID NO: 160373 - DNA, 80 bp, synthetic construct
  source 1..80: mol_type = other DNA
cccagtaataggcacttctgctttagaagacggtacaaaccacaacgaaacagctataaaagccttagaaaaatttttat

SEQ ID NO: 160374 - DNA, 80 bp, synthetic construct
  source 1..80: mol_type = other DNA
gggcgctaggtgtttttgctatcccagagtttgtcatggcatgtaacacagaaacaaagacatcctatgtctcatacgtc

SEQ ID NO: 160375 - DNA, 80 bp, synthetic construct
  source 1..80: mol_type = other DNA
tacataacaaacttggggaaagcatttggtgtgggctttacagaccagatatcagcaaaagtctcagaacttcaagacag

SEQ ID NO: 160376 - DNA, 80 bp, synthetic construct
  source 1..80: mol_type = other DNA
tcgatttaaacacagcaagatgggagcacaggtgtcaacacagaagactggcgcccacgagaccgggttgcatgccagtg

SEQ ID NO: 160377 - DNA, 80 bp, synthetic construct
  source 1..80: mol_type = other DNA
ttacccaaaatgaaggccaatatcttccgggtcataggtcacacctacgtcacaagtcacgtggggagggttggcgtata

SEQ ID NO: 160378 - DNA, 80 bp, synthetic construct
  source 1..80: mol_type = other DNA
aggaggctgcgaacgtgatagtggcgtatggagaatggccagagtattgtagcgacactgacgccactgcagttgacaag

SEQ ID NO: 160379 - DNA, 80 bp, synthetic construct
  source 1..80: mol_type = other DNA
agcccgtaacaaacaaaagaaatgatatcaactgggtgccacaaactaaccaccaagtgcacacatacggtgcttttggg

SEQ ID NO: 160380 - DNA, 80 bp, synthetic construct
  source 1..80: mol_type = other DNA
tcgcagcttcagatggtaggccacccgctccgagagttgtgaatgctcgttcaggcaacaggactgcaggtgggtgagcc

SEQ ID NO: 160381 - DNA, 80 bp, synthetic construct
  source 1..80: mol_type = other DNA
acttgagaactaataactcagccactcttatcctcccatatgttaatgcagttccaatggattcaatgcttagacataac

SEQ ID NO: 160382 - DNA, 80 bp, synthetic construct
  source 1..80: mol_type = other DNA
aaacttatctttcctcccagtcaagcagctccgaccaagccccccttggaggagtcggaccaaagccaaagcgaggaaga

SEQ ID NO: 160383 - DNA, 80 bp, synthetic construct
  source 1..80: mol_type = other DNA
cggctgcgcagggcctaaagaaaaaggtctccaacacggtggtcaagtgtctgactgatcagataaacgagcaatttgac

SEQ ID NO: 160384 - DNA, 80 bp, synthetic construct
  source 1..80: mol_type = other DNA
tgtcaggtataatccactcacagacaagggcataggtaacagagtgtacctgcagtggtgctcagagagcagctgcaagt

SEQ ID NO: 160385 - DNA, 80 bp, synthetic construct
  source 1..80: mol_type = other DNA
actggaagtagaaaatttcaatgcaaccgaagccgcagataaaaggaaacagttcaccgtgtggcctattacatatacaa

SEQ ID NO: 160386 - DNA, 80 bp, synthetic construct
  source 1..80: mol_type = other DNA
cgactatctacggatgtagtgctcctgtattccggtacacttgcacgccagttttgttaccctccccatattgtaactta

SEQ ID NO: 160387 - DNA, 80 bp, synthetic construct
  source 1..80: mol_type = other DNA
agttagaatgttaagagatacaccaatgatgaaacaagatgatgatgtgttgcagaacaatgacccaatagagcaatttg

SEQ ID NO: 160388 - DNA, 80 bp, synthetic construct
  source 1..80: mol_type = other DNA
acaaccagaaaggatgccatgcttggaacacatgtcatctgggacataggattgcagtctagtgtcacactagtagcgcc

SEQ ID NO: 160389 - DNA, 80 bp, synthetic construct
  source 1..80: mol_type = other DNA
gactatgactcaggcgcgactccgaacgtgcccattacagtcacaattgccccaatgtgctgcgaattcaatgggctacg

SEQ ID NO: 160390 - DNA, 80 bp, synthetic construct
  source 1..80: mol_type = other DNA
agctgtgtactgtgcattccctggatcagccaaacacactataggtttgtcaaggatgatccgtattctaatgcaggtta

SEQ ID NO: 160391 - DNA, 80 bp, synthetic construct
  source 1..80: mol_type = other DNA
cgtgtctttattaattatacctatttcccctttaactgctcccacaaattccccaaacacattaccagtgactgtgacta

SEQ ID NO: 160392 - DNA, 80 bp, synthetic construct
  source 1..80: mol_type = other DNA
ccagcttgaatgacacaacacacttcagacaggtctttggtaatctattcaaaactttccatgcaaatccaggcattctt

SEQ ID NO: 160393 - DNA, 80 bp, synthetic construct
  source 1..80: mol_type = other DNA
aaatcaccacatcaaagaaggttcatgagtgtggttatccaactatacacacccctgcaaaaacaaagttacaacccagt

SEQ ID NO: 160394 - DNA, 80 bp, synthetic construct
  source 1..80: mol_type = other DNA
cttcgttctcccgaccacgcacccgggcacctccgaggccgccggctcccgcgccggtcaggggacaggcctcagcacct

SEQ ID NO: 160395 - DNA, 80 bp, synthetic construct
  source 1..80: mol_type = other DNA
cccagcagaagccatgctgagcaaaaacaaaatactaatacccagtctgctaacaaaacctaaaggcaaaaagactgtaa

SEQ ID NO: 160396 - DNA, 80 bp, synthetic construct
  source 1..80: mol_type = other DNA
agtttttgcaatgaaagttgacatagcgtcacaacctttagcaacaacaataattggagagttatctaactatttcacac

SEQ ID NO: 160397 - DNA, 80 bp, synthetic construct
  source 1..80: mol_type = other DNA
atggagaagatatgagtacattctgccaaatggtgtcatcagttaattatgtggttcccatggctgacctaccagataaa

SEQ ID NO: 160398 - DNA, 80 bp, synthetic construct
  source 1..80: mol_type = other DNA
cagaaaaacggaaatccagaaagtacatcccaaaaactttcagaccagatgtgagaaccatgggaccccatggccagcag

SEQ ID NO: 160399 - DNA, 80 bp, synthetic construct
  source 1..80: mol_type = other DNA
aacaaagaatatcactaccactatccctcatatgtaactaaagactttaaaacaaaccatacactcacacatgactatgg

SEQ ID NO: 160400 - DNA, 80 bp, synthetic construct
  source 1..80: mol_type = other DNA
gataggtgagatagctagctattatactcattggacagggagcctccggtttagtttcatgttttgtggttccgcgttct

SEQ ID NO: 160401 - DNA, 80 bp, synthetic construct
  source 1..80: mol_type = other DNA
tgtgttctaatacacggtacacccggttctggaaaatctctgactacatcaattgtagggcgcgcattggctgaacattt

SEQ ID NO: 160402 - DNA, 80 bp, synthetic construct
  source 1..80: mol_type = other DNA
agtgtaccagctttgacagcagtagaaacaggtcacacttcccaggtcgtaccaggcgatacaatgcagaccagacatgt

SEQ ID NO: 160403 - DNA, 80 bp, synthetic construct
  source 1..80: mol_type = other DNA
cgtcacatcaaatgtcacagagataaaagtaacaacagtcaccataattccaaccgtaataacaaatacaactatcagta

SEQ ID NO: 160404 - DNA, 80 bp, synthetic construct
  source 1..80: mol_type = other DNA
catcctacccccgtaacttagaagcaagatcacccgatcaccaggaaatgtggcaaaccagtcacattctgatcaagcac

SEQ ID NO: 160405 - DNA, 80 bp, synthetic construct
  source 1..80: mol_type = other DNA
tttgtccctcaaattcttaccactgtatgcttctgaagcacgtaggataaagaatctgtatattaaatgtaacaacatta

SEQ ID NO: 160406 - DNA, 80 bp, synthetic construct
  source 1..80: mol_type = other DNA
ttgttggtaccaaacttcacttatactcccaccacaaacagcaggtacagtgtatctgttatctttcattagtgcatgcc

SEQ ID NO: 160407 - DNA, 80 bp, synthetic construct
  source 1..80: mol_type = other DNA
ttgcatatacttccaggtgctacatcccttttttaataatatacttagcataaccccacaatatcttccaaataactatt

SEQ ID NO: 160408 - DNA, 80 bp, synthetic construct
  source 1..80: mol_type = other DNA
gactaaccttgggttcccaggcgaactaatggggaaattgagcaactccaaacacatatataagaatgccttttacacaa

SEQ ID NO: 160409 - DNA, 80 bp, synthetic construct
  source 1..80: mol_type = other DNA
caccgcggccatgctgctttttgtggttgtggggatcctatacttcacattactgcacttgctgaaacatatggccatcc

SEQ ID NO: 160410 - DNA, 80 bp, synthetic construct
  source 1..80: mol_type = other DNA
aacgataaaggtgatgattatatcccagattgtgattgcacagattgctgttactactgtgctcacaaaagcagatacat

SEQ ID NO: 160411 - DNA, 80 bp, synthetic construct
  source 1..80: mol_type = other DNA
actggcgggtcacggttacgtggacgatactaatatccacgttgtcagaaagctgtaaaccaacgtgtccttgtcaatgc

SEQ ID NO: 160412 - DNA, 80 bp, synthetic construct
  source 1..80: mol_type = other DNA
ataataccaacacatgctgatgcaggccaggaagtggagatagatggaattaaaactaaagttagtgatgcatatgacct

SEQ ID NO: 160413 - DNA, 80 bp, synthetic construct
  source 1..80: mol_type = other DNA
aaattatagtacaaaggataactatgaaagcacatatagaaaatggaatgaagacagaaccaaaagacttctaaaaatcc

SEQ ID NO: 160414 - DNA, 80 bp, synthetic construct
  source 1..80: mol_type = other DNA
acttctttattctccaaatacaaaggcaatgtagattgtacgctaaataaacacatgagagtagccatagcacattactc

SEQ ID NO: 160415 - DNA, 80 bp, synthetic construct
  source 1..80: mol_type = other DNA
tctgtctagcaggtgattctgatgttaaaaactcttacacttcatatgtaaacgccaacccgggagagaagggtggaata

SEQ ID NO: 160416 - DNA, 80 bp, synthetic construct
  source 1..80: mol_type = other DNA
gctcagggagcaaaagcagctcagacagggaatcgagtgcctcttccagcagctgataaaaacccagcaggaggtccacc

SEQ ID NO: 160417 - DNA, 80 bp, synthetic construct
  source 1..80: mol_type = other DNA
aattttccttaagcatagggacaccctcacaacagctgggcctagtgacatgtatgtgcatgttggtaacttgatatata

SEQ ID NO: 160418 - DNA, 80 bp, synthetic construct
  source 1..80: mol_type = other DNA
tcaccagtttgacgcagtgcatcaggttctcggtgatggcgtcgtacaggcgactctcagcctcctcgtgcgtcatcacg

SEQ ID NO: 160419 - DNA, 80 bp, synthetic construct
  source 1..80: mol_type = other DNA
cagttaacataaactgcagagtagttgtgaggtgcccctacacatctcccatgctaatagacaacaaaaacccagagcag

SEQ ID NO: 160420 - DNA, 80 bp, synthetic construct
  source 1..80: mol_type = other DNA
acaggcatagtagtcccccccggcacacctaacaagtgtgtggtactgtgctttgtatcagcatgcaatgatttttccgt

SEQ ID NO: 160421 - DNA, 80 bp, synthetic construct
  source 1..80: mol_type = other DNA
tggagacggaaaaatgccaaacggtagcacatacattccttttctgtacagaaacaagtggtaccccataattctacacc

SEQ ID NO: 160422 - DNA, 80 bp, synthetic construct
  source 1..80: mol_type = other DNA
gtggggccggagacgccggtggcgccgctggaggaggcgccggcgtcctctccgccgccgccggcggttgcggagaaggc

SEQ ID NO: 160423 - DNA, 80 bp, synthetic construct
  source 1..80: mol_type = other DNA
gatgccgcagaaactggacatactagttctgttcaacctgaagacatgattgaaacaaggtatgttataacagaccaaac

SEQ ID NO: 160424 - DNA, 80 bp, synthetic construct
  source 1..80: mol_type = other DNA
cagctccccgacaaactcccagtcctttctcaggaagatgccattcgtggtcttgaccacatggatgccatcgacctttc

SEQ ID NO: 160425 - DNA, 80 bp, synthetic construct
  source 1..80: mol_type = other DNA
ggaatgtgtttattgtccaaacactgaggaaggagatgtgggccaagtcggaaaattccttatcacaccgggtgcgggtt

SEQ ID NO: 160426 - DNA, 80 bp, synthetic construct
  source 1..80: mol_type = other DNA
gcgccactaacaacgcaaccaccgctcgcagcacaaccaccaccagtaaagcaaccacagcaaagcccacaatagactcg

SEQ ID NO: 160427 - DNA, 80 bp, synthetic construct
  source 1..80: mol_type = other DNA
tattggcatgggagagacaataggactataataagtttaaataagtattataatttaacaataagatgtaggagaccagg

SEQ ID NO: 160428 - DNA, 80 bp, synthetic construct
  source 1..80: mol_type = other DNA
tggcggtgtccagtgtgatgggggacgtgggggcactggatcccgattccaggctgttggagaacacttcatcttcaaac

SEQ ID NO: 160429 - DNA, 80 bp, synthetic construct
  source 1..80: mol_type = other DNA
agagcaacccaatacctacacaagtttagtaccaattataacaagccaaagacaagtggcagcactgagttggaaccaaa

SEQ ID NO: 160430 - DNA, 80 bp, synthetic construct
  source 1..80: mol_type = other DNA
ttgataaggctggagacaggtgattggactttaactgcaaaaagatcagacaaaattatgcatgtagagttacctaaagc

SEQ ID NO: 160431 - DNA, 80 bp, synthetic construct
  source 1..80: mol_type = other DNA
tggacaactcggcatctactacgtccaaggacaagttattctcagtgtggaaaataacatataaagacacggtacagttg

SEQ ID NO: 160432 - DNA, 80 bp, synthetic construct
  source 1..80: mol_type = other DNA
cagaaaatttaaagagtttgtataatactgtctgcgtagtttggtgtttgcacgcagaagagaaagtgaaacacacagag

SEQ ID NO: 160433 - DNA, 80 bp, synthetic construct
  source 1..80: mol_type = other DNA
actaagaaactactaggaacaacattcacgggagggtccccctacctagaataccacggaggtctgtactcctccatctg

SEQ ID NO: 160434 - DNA, 80 bp, synthetic construct
  source 1..80: mol_type = other DNA
tttatagatgtggatttagtcattattagtaagtttagaaattctagtggtcttttagatacagcaaaggcactccaacc

SEQ ID NO: 160435 - DNA, 80 bp, synthetic construct
  source 1..80: mol_type = other DNA
agcgggaactccaacatcgtgttcgattatgtgtcttgtgtccgcgtgcaacgacttttccgtgaggttgttaaaagaca

SEQ ID NO: 160436 - DNA, 80 bp, synthetic construct
  source 1..80: mol_type = other DNA
ggtgagaaagaggaggatgggagggaccggggtggtggtgctgctgctgttgtgggtgtggacggtgcgtatgccgtgac

SEQ ID NO: 160437 - DNA, 80 bp, synthetic construct
  source 1..80: mol_type = other DNA
accacccaatgggtgttgtactctgttattccggtaactttgtacgccagtttttccctcccctccccatccttttacgt

SEQ ID NO: 160438 - DNA, 80 bp, synthetic construct
  source 1..80: mol_type = other DNA
acctcaaccccaccagaaatctggtcgtgaacatgactggtgggggtaaatttgttataaccagctattctggttataac

SEQ ID NO: 160439 - DNA, 80 bp, synthetic construct
  source 1..80: mol_type = other DNA
cagcacccgccggtcctgagggccctgccggcaccgagcccccgcagacacacccgcaccgagaacccctccggtgagcc

SEQ ID NO: 160440 - DNA, 80 bp, synthetic construct
  source 1..80: mol_type = other DNA
tgaagttctacagacacgactccgtagactacatagtcagctacaccaggacggggcctttccagatggggcacctcact

SEQ ID NO: 160441 - DNA, 80 bp, synthetic construct
  source 1..80: mol_type = other DNA
atggacgactttcctcccacgggctactcctacgggggcaactttacaaacctaaccttctccttagagggcatatatga

SEQ ID NO: 160442 - DNA, 80 bp, synthetic construct
  source 1..80: mol_type = other DNA
agctgctgaaactggtcatacatctcaagtcatgcctaccgacaccatgcaaaccagacacgttaataactttcacacaa

SEQ ID NO: 160443 - DNA, 80 bp, synthetic construct
  source 1..80: mol_type = other DNA
gccggtggccaagacgacgcaggaccacctggagacggcgacctcgcccccgaagacgtcgaagaactactcgaactcgt

SEQ ID NO: 160444 - DNA, 80 bp, synthetic construct
  source 1..80: mol_type = other DNA
ttgcgggggggagtttctgggcgtactgaggacggggagtgtgcgtggacggccacgggggccttgtgcggcgggaacgg

SEQ ID NO: 160445 - DNA, 80 bp, synthetic construct
  source 1..80: mol_type = other DNA
caccgaaagcttaattggcaagataaaaggttacagagacgaaagatttaagtggctaacctcctacacaggagagaacc

SEQ ID NO: 160446 - DNA, 80 bp, synthetic construct
  source 1..80: mol_type = other DNA
agactattgaagcataccaaataccagtgagtgtagggacaactgtgcgtggggaagctatattttcattccaactaaat

SEQ ID NO: 160447 - DNA, 80 bp, synthetic construct
  source 1..80: mol_type = other DNA
caaattcaaacccaaccaacattcttccggatcttttgtttcttttctcgttaaccagcaaggtgtcgcttttgatcttc

SEQ ID NO: 160448 - DNA, 80 bp, synthetic construct
  source 1..80: mol_type = other DNA
ccggaggaccagtttgtacggtggccaatatcatacaggcaagttgcccagctccgcaggaagatggaaatgttcacata

SEQ ID NO: 160449 - DNA, 80 bp, synthetic construct
  source 1..80: mol_type = other DNA
atatctttggcactcatactcttagtcaacaccaggctattggcttaataggcacaattcttttaactgctggactgatg

SEQ ID NO: 160450 - DNA, 80 bp, synthetic construct
  source 1..80: mol_type = other DNA
ctttaatattaattattataaggatgcagcaagttctggactgacgaaacaggatttttcacaagatccaagtaaattta

SEQ ID NO: 160451 - DNA, 80 bp, synthetic construct
  source 1..80: mol_type = other DNA
taccgccgatgatctcgtccatgaaagcgcccggcataaacatgttggccgtcttgcgcacctgcgagttgaggctgatg

SEQ ID NO: 160452 - DNA, 80 bp, synthetic construct
  source 1..80: mol_type = other DNA
tatttacccatgcataaacaagctgtacatgtttccagagagggcccctaaaccatctcccaccccgggagactggcaaa

SEQ ID NO: 160453 - DNA, 80 bp, synthetic construct
  source 1..80: mol_type = other DNA
tacattggtaccccagtgtacaccaccaaagagaagtagcagaatgcatatgccagactggaccgtttgcttataaaagt

SEQ ID NO: 160454 - DNA, 80 bp, synthetic construct
  source 1..80: mol_type = other DNA
tcatcctgctctttccattgacgtttggctcagcgtggtatcctccacgtagatcagggcaatgaggctacatatacccc

SEQ ID NO: 160455 - DNA, 80 bp, synthetic construct
  source 1..80: mol_type = other DNA
ctccctttcctcctccgtgtcctcccgctctgtgtcctccgttacgctctcctccccggcctcggccaagagcgcagcca

SEQ ID NO: 160456 - DNA, 80 bp, synthetic construct
  source 1..80: mol_type = other DNA
tgttgtaggagcagcgagccgcgtcgttgccctgaccgcgcgtcgaggcccaggagggcgtctgccaggggcgtcccaga

SEQ ID NO: 160457 - DNA, 80 bp, synthetic construct
  source 1..80: mol_type = other DNA
ccttcgtgtccagggagtcgactactgcaacgctgattgattaaaagatggtctccgatgatgatgttgttattgatcga

SEQ ID NO: 160458 - DNA, 80 bp, synthetic construct
  source 1..80: mol_type = other DNA
acctatgtcaggtttgacttagaaatcaccattgtgacaaacaatgcaggtttaatgcagatcatgttcatgcccccagg

SEQ ID NO: 160459 - DNA, 80 bp, synthetic construct
  source 1..80: mol_type = other DNA
cgttggtctcaagttatgtttgcgttgtgagttctatatcatataccttctaatcatatcttagttatttcgaaaacatt

SEQ ID NO: 160460 - DNA, 80 bp, synthetic construct
  source 1..80: mol_type = other DNA
ggtgcttccaaacttgaattctcacaagatccaagcaaatttacagaccctgtaaaagatgtattggagaaaggcatccc

SEQ ID NO: 160461 - DNA, 80 bp, synthetic construct
  source 1..80: mol_type = other DNA
gagctcagaggcaaagataaaattagactagggaagagtagattaattgaagcatccagtctaaatgattcagttaacat

SEQ ID NO: 160462 - DNA, 80 bp, synthetic construct
  source 1..80: mol_type = other DNA
cccgctccagccctggaggtgcatgggcaggaggggcagccggagcggccacccttagctgaatcagagcccgaggaaca

SEQ ID NO: 160463 - DNA, 80 bp, synthetic construct
  source 1..80: mol_type = other DNA
actctaaacctaattcacaggacctacaaaaactatacaaagaattattcacaaaacccacatcaggccactactggcaa

SEQ ID NO: 160464 - DNA, 80 bp, synthetic construct
  source 1..80: mol_type = other DNA
ttctcagacaaaatcaagtctatgctgagctttgttgagagaaacaaagcgtggttgactgtggtttctgctgtcaccag

SEQ ID NO: 160465 - DNA, 80 bp, synthetic construct
  source 1..80: mol_type = other DNA
ctgaaaagaggctttaagcaagatgaaagatactcattcttaatccatccaacctttccgattgatgagatacatgaatc

SEQ ID NO: 160466 - DNA, 80 bp, synthetic construct
  source 1..80: mol_type = other DNA
aggtagacaatatttttggtagggcttggtttgcttatgaccacacttatagagatgagggaacttggaggcaagccctt

SEQ ID NO: 160467 - DNA, 80 bp, synthetic construct
  source 1..80: mol_type = other DNA
tgacttagccacgggaaaaaacgatgtctacggagacaacaaggctcaatacaggtccagcacacacctcttagagtacc

SEQ ID NO: 160468 - DNA, 80 bp, synthetic construct
  source 1..80: mol_type = other DNA
gccagcttacatagatgtaacttacaaccccataactgacaaaggtcaaggaaacaaagtgtggttccaatatctaacac

SEQ ID NO: 160469 - DNA, 80 bp, synthetic construct
  source 1..80: mol_type = other DNA
gcagcaatctcggctgtctgtacttcttctctgctcgttaaaccaatagcatgtcagctccacgcaaagtcagattgcct

SEQ ID NO: 160470 - DNA, 80 bp, synthetic construct
  source 1..80: mol_type = other DNA
tcaaataactacggtagaattaccaaaatctttctggaatgacaccagaaaacctgcatatggccaagcaaagtattttg

SEQ ID NO: 160471 - DNA, 80 bp, synthetic construct
  source 1..80: mol_type = other DNA
ctagagagtcagataaagtacggagacatcctagtagaaggcaaagtcctcatcagatgtccctacaccaagcctgccct

SEQ ID NO: 160472 - DNA, 80 bp, synthetic construct
  source 1..80: mol_type = other DNA
atgacatcatagacaatgttgtgactaacgctttgaaagtatccatgccacaagtccaagacacacaacccagcggacca

SEQ ID NO: 160473 - DNA, 80 bp, synthetic construct
  source 1..80: mol_type = other DNA
tctcatccatatcccaggccgggttactaatctcctggaaataatacaagtagattcaatgattccaataaacaacacag

SEQ ID NO: 160474 - DNA, 80 bp, synthetic construct
  source 1..80: mol_type = other DNA
acaaggtggttaataatgcactacagctctcacaacctacacacccacccactgcatcggacacacccagcactagtggg

SEQ ID NO: 160475 - DNA, 80 bp, synthetic construct
  source 1..80: mol_type = other DNA
gaactactttgcaaactggtctggaagtatcaaactgacattcacatactgtggtgcagcgatgaatactggtaaattcc

SEQ ID NO: 160476 - DNA, 80 bp, synthetic construct
  source 1..80: mol_type = other DNA
ttggcatggtgacagctggaggggaagggcatgtagctttcattgatttgaggaagtatagaatgatagaagctgaagaa

SEQ ID NO: 160477 - DNA, 80 bp, synthetic construct
  source 1..80: mol_type = other DNA
taccaccaaacctcaggccttgggcgcactggaaatcggcgctactgcagatgtaggaccagaggcaatgatagaaacca

SEQ ID NO: 160478 - DNA, 80 bp, synthetic construct
  source 1..80: mol_type = other DNA
aaagctcatggcccccacatactacaaatcacaaccaaacagcacatataactggcttaattatcaaactaactatgccc

SEQ ID NO: 160479 - DNA, 80 bp, synthetic construct
  source 1..80: mol_type = other DNA
aatgtttaatggcttttgattattcaaactatgatggtagcttacaccctatctggttcaagtgtttaaaaatgctcctg

SEQ ID NO: 160480 - DNA, 80 bp, synthetic construct
  source 1..80: mol_type = other DNA
gtgcttggctggggacagcgccaccacgaccacatatacgagttatcagaacgccaacccaggtgagagaggcggtacct

SEQ ID NO: 160481 - DNA, 80 bp, synthetic construct
  source 1..80: mol_type = other DNA
ggcgacaattttgcctattgggtgattaatacaagacaggttgcgcagctacgccgcaaattggaaatgttcacatatgc

SEQ ID NO: 160482 - DNA, 80 bp, synthetic construct
  source 1..80: mol_type = other DNA
ccgtgaacaaccttagtgataacgtgaaaacaataaaagcctaccaaatccctgtgagtgcaggagattcttcgagacca

SEQ ID NO: 160483 - DNA, 80 bp, synthetic construct
  source 1..80: mol_type = other DNA
aaaaaaggcattgactcccccagttcccactaacagtctgcccgacacaaaaccgagtggtccagcccattccagggaga

SEQ ID NO: 160484 - DNA, 80 bp, synthetic construct
  source 1..80: mol_type = other DNA
atggaagaatgtttgagcaaatatggcattgatttaccattagttacatacattaaagatgaacttaggggaagggacaa

SEQ ID NO: 160485 - DNA, 80 bp, synthetic construct
  source 1..80: mol_type = other DNA
ttcaaactgtacagacacccaacagtagatttctttataaaatacaacagaaaagaaccattcactgacagtcaactaac

SEQ ID NO: 160486 - DNA, 80 bp, synthetic construct
  source 1..80: mol_type = other DNA
atactatgtgttatgttaacgggtgagagcctatactgcagcccagactcggggggaggaggaaatggtaagagttatac

SEQ ID NO: 160487 - DNA, 80 bp, synthetic construct
  source 1..80: mol_type = other DNA
atataaaagatgaactcagaggcaaagataaaattaggctaggaaagagtagattaattgaggcatccagtctaaatgat

SEQ ID NO: 160488 - DNA, 80 bp, synthetic construct
  source 1..80: mol_type = other DNA
agaacctgcccctgtgggcggccttctactgctaccacaactttgtagaagaggagctaggcatttcttctgagatctac

SEQ ID NO: 160489 - DNA, 80 bp, synthetic construct
  source 1..80: mol_type = other DNA
ccagcaggacaacttagggaccccagaggatcagatatagcgggaaccaccagcacagtagaggaacagatacagtggat

SEQ ID NO: 160490 - DNA, 80 bp, synthetic construct
  source 1..80: mol_type = other DNA
ggcgaaaaggacgtcgtccgagtcgtgcatgtacatgatgttgatgacgccttgcgtgtcgtcgtattctagcagggcgc

SEQ ID NO: 160491 - DNA, 80 bp, synthetic construct
  source 1..80: mol_type = other DNA
tcctcgaacaaactgccccagacgcagttccctacgctttttctaaatccgaagtgggcgctgttgaacttgtcctccag

SEQ ID NO: 160492 - DNA, 80 bp, synthetic construct
  source 1..80: mol_type = other DNA
catatgttaactcactggctattgattgtatggctagacacaataactggggtatagtcataattccagtggtccctctt

SEQ ID NO: 160493 - DNA, 80 bp, synthetic construct
  source 1..80: mol_type = other DNA
cacaccgtgaagacgacctgttcgcggatgaggtcatccagctgtcgcagcatgacgaaaagcgccgacagccgcgcgat

SEQ ID NO: 160494 - DNA, 80 bp, synthetic construct
  source 1..80: mol_type = other DNA
gcattttgataactcttttgaaaactctaatttgaagattcaataatgggagctcaggttactagacaacaaactggcac

SEQ ID NO: 160495 - DNA, 80 bp, synthetic construct
  source 1..80: mol_type = other DNA
cttctcttcaccggggcaaagactccggtactcgccagaagagaaccaggagacgagcccgccgcaaagcgagcagctcc

SEQ ID NO: 160496 - DNA, 80 bp, synthetic construct
  source 1..80: mol_type = other DNA
ctgcatgtttcatcaacaaaactttatgaatgacattgtacagtgcggaccgtttgcataccacggaactgaaaaatctg

SEQ ID NO: 160497 - DNA, 80 bp, synthetic construct
  source 1..80: mol_type = other DNA
ttttcatgatgtatttaaaggcaccaaagagcccgcagtcttatcagataaagacccacgtttagagactgactttaaaa

SEQ ID NO: 160498 - DNA, 80 bp, synthetic construct
  source 1..80: mol_type = other DNA
tcctcctcctcccccaccaggattgatctaatggcagaaatacctccagaggacggggccccacaaagagagcctggtga

SEQ ID NO: 160499 - DNA, 80 bp, synthetic construct
  source 1..80: mol_type = other DNA
aaggatggattaagcaatctagatgctcaaaaattgagcgtgacttcaattatgcacaatactgcattaactgtgtgggt

SEQ ID NO: 160500 - DNA, 80 bp, synthetic construct
  source 1..80: mol_type = other DNA
atacaaccccctattagacaaaggagtaggcaacatcatatggtttcaatacaacacaaaagcagacactcaactcactc

SEQ ID NO: 160501 - DNA, 80 bp, synthetic construct
  source 1..80: mol_type = other DNA
atgatcctagtaataatgcaatgaaaggccaaacatataactggaaaaactacaaaacctactttgcaaacacacaaaat

SEQ ID NO: 160502 - DNA, 80 bp, synthetic construct
  source 1..80: mol_type = other DNA
ttgcgctcgcgctttgcgccgccgcgtcatggatctgcctactaccgtcgtgcgaaaatactggacttttacgaatccta

SEQ ID NO: 160503 - DNA, 80 bp, synthetic construct
  source 1..80: mol_type = other DNA
acacacactatccagacagttgcaaaaatcctgtagattaaatggtgtgtacaccaacccaacggctagtgagtttatgg

SEQ ID NO: 160504 - DNA, 80 bp, synthetic construct
  source 1..80: mol_type = other DNA
aaattactacgtaacggtattatctaaaggcgcaacgccctcaactcctggcacgtgccctgtgaaatatagagtaaaat

SEQ ID NO: 160505 - DNA, 80 bp, synthetic construct
  source 1..80: mol_type = other DNA
cacttatgcaggctaatcagaggaaaaatgacactcacagaagaggtacagtggacagagttagcagaggcagagctaga

SEQ ID NO: 160506 - DNA, 80 bp, synthetic construct
  source 1..80: mol_type = other DNA
aggcagggttcacaatatgttggaattagtacaggtggagtcaatgatggagataaacaatgtcgctggttctagcggta

SEQ ID NO: 160507 - DNA, 80 bp, synthetic construct
  source 1..80: mol_type = other DNA
ctatttcaaactgggtcaaaatgctgcgagaaagaatgcaggatctatagatagaaaattagccgaagaactaggcatat

SEQ ID NO: 160508 - DNA, 80 bp, synthetic construct
  source 1..80: mol_type = other DNA
gagataggcatctcagcagagatccacaacataggcctaatagtagtacagtgcccctacacttttccccccatgtacaa

SEQ ID NO: 160509 - DNA, 80 bp, synthetic construct
  source 1..80: mol_type = other DNA
ttttacagataagtacaatccctccactgaggccagtgatggaagatcttttgcagcagttgattatttactggggtgtg

SEQ ID NO: 160510 - DNA, 80 bp, synthetic construct
  source 1..80: mol_type = other DNA
ctgtggcaaagccttgatactccagaacaaaagaactaaggccagctattctataaatacagtggtccaacaactaaggc

SEQ ID NO: 160511 - DNA, 80 bp, synthetic construct
  source 1..80: mol_type = other DNA
tgcaaaaaaacctgtagcaggaaacaccgactcaaccaccacaacactaggtaacaaagtaacagcactaaaggcaaatg

SEQ ID NO: 160512 - DNA, 80 bp, synthetic construct
  source 1..80: mol_type = other DNA
acatggaaattacgtttgtcatcaccagcaggcaactgcccgggaccagtattgcgcaggatatgccaccgttgacgcat

SEQ ID NO: 160513 - DNA, 80 bp, synthetic construct
  source 1..80: mol_type = other DNA
aagatagtgaaaaacaagttaccactttcatcaaacctagagctaacttaagagagattagaacatttgggcccagtgac

SEQ ID NO: 160514 - DNA, 80 bp, synthetic construct
  source 1..80: mol_type = other DNA
tctgtgcagaatcataagtttatgatgaataaaaacggggaaagggaatctgcttttagggacccgggtctggtccgtcg

SEQ ID NO: 160515 - DNA, 80 bp, synthetic construct
  source 1..80: mol_type = other DNA
aactatagggaattcaaccatcacaactcaggaggctgctaacgcagttgtagcatatgctgaatggcctagctttctca

SEQ ID NO: 160516 - DNA, 80 bp, synthetic construct
  source 1..80: mol_type = other DNA
cccacaccctatctcgacaactgcagaaatcatgcaaacttaatggtgttttcactaatccaactgctagtgaattcatg

SEQ ID NO: 160517 - DNA, 80 bp, synthetic construct
  source 1..80: mol_type = other DNA
tcaacgcctgggacatcagacgtgggctatttggcttctcagctattaaaagaatgcaaaaccaacaaatccctactaaa

SEQ ID NO: 160518 - DNA, 80 bp, synthetic construct
  source 1..80: mol_type = other DNA
cttggaactgactatcctggaccttaataggaatgaaaaatttagagatatcagagcattcatatcagaagactttgaag

SEQ ID NO: 160519 - DNA, 80 bp, synthetic construct
  source 1..80: mol_type = other DNA
gtatatatacaaacaatagttgaagcattctttaaaaatgcagacaatatgtggactgctagaaaaaacaaaacattttc

SEQ ID NO: 160520 - DNA, 80 bp, synthetic construct
  source 1..80: mol_type = other DNA
tttccagacagggccccaaaacccgtacccagcagccaagactggcagcaggagtacgaggccgccgccttctgggacag

SEQ ID NO: 160521 - DNA, 80 bp, synthetic construct
  source 1..80: mol_type = other DNA
tcagaagccaaaagcctaaatcacaaaactggcttctacagctccatctttctctcccgagaaagactgagcccagactt

SEQ ID NO: 160522 - DNA, 80 bp, synthetic construct
  source 1..80: mol_type = other DNA
gtgatataacgcacaagcaattcttgttccccggagctggatatagactgctaacgtggttgaaagtccttaaccgttat

SEQ ID NO: 160523 - DNA, 80 bp, synthetic construct
  source 1..80: mol_type = other DNA
aaattgaaacccagtgtattctatgatgtgttccctggaaagaaagagccagctgttctgaatccacgtgacccacggtt

SEQ ID NO: 160524 - DNA, 80 bp, synthetic construct
  source 1..80: mol_type = other DNA
aagagtttacagatattaattgggacaatttatcattcctcaaaaggaagttcagaccagaccctcaatatcctttcctt

SEQ ID NO: 160525 - DNA, 80 bp, synthetic construct
  source 1..80: mol_type = other DNA
aatgtattctcactgacacgaatgacacagacaccgaaataacgctcctctggttggatcagaatgaaaaatttagggac

SEQ ID NO: 160526 - DNA, 80 bp, synthetic construct
  source 1..80: mol_type = other DNA
agatgatattataccagattgtgattgcaccacaggcacatattactgtaagagcaaggaccgctactatcctgtgagtg

SEQ ID NO: 160527 - DNA, 80 bp, synthetic construct
  source 1..80: mol_type = other DNA
acccgcaaaggctcaaatagcgggctcttgctcaccataccgctagagatgagcaacacactcttttccactactctact

SEQ ID NO: 160528 - DNA, 80 bp, synthetic construct
  source 1..80: mol_type = other DNA
agggttggattgttaatatctcaagtgatgtgtcagttgaaaggaacttaaatcgagccatgatcattttgcaagcgttg

SEQ ID NO: 160529 - DNA, 80 bp, synthetic construct
  source 1..80: mol_type = other DNA
cggcagcagccaggtacccattagaatgagagcaaagtggtaccctaccctctttcaccaaaaagaagtactagaagcct

SEQ ID NO: 160530 - DNA, 80 bp, synthetic construct
  source 1..80: mol_type = other DNA
ggcggaggtcccgcagctccagccagagcagcacctccagctccaagtccagctcctccagcagcagcagctcgggaaca

SEQ ID NO: 160531 - DNA, 80 bp, synthetic construct
  source 1..80: mol_type = other DNA
acactcatccaggtgagcaggggcacaggatcggtagtaactcagaaagaaatgagaatcagccagatgaaaacccgttt

SEQ ID NO: 160532 - DNA, 80 bp, synthetic construct
  source 1..80: mol_type = other DNA
gcacaaactacaatgtcatcaagaaaggtacaacaagtgatcttgagcagaaacacttcttgacttataggacagacata

SEQ ID NO: 160533 - DNA, 80 bp, synthetic construct
  source 1..80: mol_type = other DNA
tcattttttggcaatggcaagtggatagacggacggggacacgtagagccttactggctgtgccgctggaggccagagat

SEQ ID NO: 160534 - DNA, 80 bp, synthetic construct
  source 1..80: mol_type = other DNA
atgttaatggcatggatgcttatcgtattccagttcaggttagcaaggtgggagagcaagtgtttgggtttcagctcgag

SEQ ID NO: 160535 - DNA, 80 bp, synthetic construct
  source 1..80: mol_type = other DNA
gggaaactacaaaagcaccacaggctacctcaaccaatggcatgcaccacacatggacaacacccacaacagacagctat

SEQ ID NO: 160536 - DNA, 80 bp, synthetic construct
  source 1..80: mol_type = other DNA
tccgacaccgtataattgttcgtacccacgacattacacacggttacgtcagaaccagtgccgttaaagaatgtccacgt

SEQ ID NO: 160537 - DNA, 80 bp, synthetic construct
  source 1..80: mol_type = other DNA
cggcagccatattggttgtgacgttactctcacgtgatgggggcgtgctctaacccggaagcatcctcgaccacgtgact

SEQ ID NO: 160538 - DNA, 80 bp, synthetic construct
  source 1..80: mol_type = other DNA
actatgtcaagaccgattcgtctgatttagggcagcttaaggtttatgtttggacgcccctcagtataccaactggatca

SEQ ID NO: 160539 - DNA, 80 bp, synthetic construct
  source 1..80: mol_type = other DNA
tcagtctccatgtgccttaccgaattttgatgtcaccccacccatcgatattcctggtgaggtcaaaaatatgatggaac

SEQ ID NO: 160540 - DNA, 80 bp, synthetic construct
  source 1..80: mol_type = other DNA
aatttacttttcttttcggtggcaatcccatcgcccagcaaactcttaaagacccgggaacccagcccaccttcgaaatt

SEQ ID NO: 160541 - DNA, 80 bp, synthetic construct
  source 1..80: mol_type = other DNA
cagaaaatagtcaggttagtgtcattatgctcatacatataagccacgctaacctggggctcataccacccaatcgcaac

SEQ ID NO: 160542 - DNA, 80 bp, synthetic construct
  source 1..80: mol_type = other DNA
gggatggcgccggcgaaggtggttctggccgagaaggaggcgatggaggacccgccgtcgcagacgagtaccgacccgaa

SEQ ID NO: 160543 - DNA, 80 bp, synthetic construct
  source 1..80: mol_type = other DNA
tcccggtacagagtggtaaccaccagagttctcaggtctttggcttccagattcagcctggattggacggtgtcttcaaa

SEQ ID NO: 160544 - DNA, 80 bp, synthetic construct
  source 1..80: mol_type = other DNA
tttcacaataagggtagatattgcatcacaacctttggcaactacattgattggtgagattgctagctattacacacact

SEQ ID NO: 160545 - DNA, 80 bp, synthetic construct
  source 1..80: mol_type = other DNA
ttcagttaacatgtacactgtagaggttaggagtcaagcatcattagcagctgaagtcttcgcaatcccagtagatattg

SEQ ID NO: 160546 - DNA, 80 bp, synthetic construct
  source 1..80: mol_type = other DNA
cagcacagtaccagggtacggatacgtgccatacagctatcagtttggtgcaggccaaatgccagacggcagctcatacg

SEQ ID NO: 160547 - DNA, 80 bp, synthetic construct
  source 1..80: mol_type = other DNA
agacggaggaggagggggagacgaaaattcagacggtacagatttaaaagacgctaccgcagacgtaaaaagacccaaaa

SEQ ID NO: 160548 - DNA, 80 bp, synthetic construct
  source 1..80: mol_type = other DNA
acacatgcccaagtagaggacacaattctgattgatggtgttgaaaccaaagttctaaaacaaacaattgtcacagatga

SEQ ID NO: 160549 - DNA, 80 bp, synthetic construct
  source 1..80: mol_type = other DNA
ctgtatttaatacattttatacacaagaacacatcagagacccagatagcaagactgccaaacgcacagactcacaaaca

SEQ ID NO: 160550 - DNA, 80 bp, synthetic construct
  source 1..80: mol_type = other DNA
attgggagacctctacaacgagtgtctcaacattgacctccccaaattaagtaactttactaaggatgggcctcaatatg

SEQ ID NO: 160551 - DNA, 80 bp, synthetic construct
  source 1..80: mol_type = other DNA
caaccacagcaagcttagtaacgcggagaacgccaacctattcacaaaggagaaaaatactacagaccatgaggtccaaa

SEQ ID NO: 160552 - DNA, 80 bp, synthetic construct
  source 1..80: mol_type = other DNA
ctcggcgctgttctggatgtatatgattctggaaaagcctccgacgagctcgcggcgcgtagaaagccaagcggcgcaag

SEQ ID NO: 160553 - DNA, 80 bp, synthetic construct
  source 1..80: mol_type = other DNA
ttggtgagatatctaattacttcacacactggacagggagtttacgcttcagctttatgttttgtggcactgcaaacacc

SEQ ID NO: 160554 - DNA, 80 bp, synthetic construct
  source 1..80: mol_type = other DNA
ggcgccgctggaggtggcgccgcaggagacgacggcctgtccgccgaagatatcgtcgacctgctggacgccgtcgaaag

SEQ ID NO: 160555 - DNA, 80 bp, synthetic construct
  source 1..80: mol_type = other DNA
tacctggagtcttaaagtactgtatgatgagcaccagaggttccacaacaggtggagctaccccaacactcagctagacc

SEQ ID NO: 160556 - DNA, 80 bp, synthetic construct
  source 1..80: mol_type = other DNA
gccggcgatgttttgcgcctggaagttgtactcccggaagatgccctccaggtcaaagacgttggaggcacgctgttcgt

SEQ ID NO: 160557 - DNA, 80 bp, synthetic construct
  source 1..80: mol_type = other DNA
ggtacttgatgtgtataaaggcattgatttggactccttaaagatcatagcatatggtgatgatgttattatctcatacc

SEQ ID NO: 160558 - DNA, 80 bp, synthetic construct
  source 1..80: mol_type = other DNA
tgtgtgatatgtccctatactataccacccttatttgatgacaaaaaccccctaatgggctatgtattttatgacacaaa

SEQ ID NO: 160559 - DNA, 80 bp, synthetic construct
  source 1..80: mol_type = other DNA
gacacctggtacagaggcacggcctacaaccagtcaattacacacattccattgaaggcagccaaactatatcaagacac

SEQ ID NO: 160560 - DNA, 80 bp, synthetic construct
  source 1..80: mol_type = other DNA
acaaggattctcagcccagcttagaaagcaatattttgtagaaaaacagggtgaaattgtgtcaaaacagaaagtgaagg

SEQ ID NO: 160561 - DNA, 80 bp, synthetic construct
  source 1..80: mol_type = other DNA
tttatcctgtaagtttcttcccttatatgccagtgaagctaaaagaattaaagtgttatataataagtgtaatactataa

SEQ ID NO: 160562 - DNA, 80 bp, synthetic construct
  source 1..80: mol_type = other DNA
actaacgtagacggcatgcagagactcctgataccaatatctgctcagaccgaagcagataaattgtgtgcttcattcag

SEQ ID NO: 160563 - DNA, 80 bp, synthetic construct
  source 1..80: mol_type = other DNA
gccgggatcactctcggcatggacgagctgtacaaggccattactacccttggctcacaagtgtctactcagcgatccgg

SEQ ID NO: 160564 - DNA, 80 bp, synthetic construct
  source 1..80: mol_type = other DNA
gattactcatagcttacacacccccaggtgcacagggaccaacaaaacgcaaagacgcaatgttaggtacacatgtagtt

SEQ ID NO: 160565 - DNA, 80 bp, synthetic construct
  source 1..80: mol_type = other DNA
tgagtgccagtgcaatagataagccaacacacccagagacatcaactgaccggttttacacactaaccagtgttgagtgg

SEQ ID NO: 160566 - DNA, 80 bp, synthetic construct
  source 1..80: mol_type = other DNA
ggagatctatgataatagtccaagtaaagctagtactagtaaatttaacaaaagaaaattccttacagcctcaacaaaat

SEQ ID NO: 160567 - DNA, 80 bp, synthetic construct
  source 1..80: mol_type = other DNA
ttctatgacatctttccaggtaacaaggaaccagctgcactcagctctcgggatgggaggttggaagtggatctagacac

SEQ ID NO: 160568 - DNA, 80 bp, synthetic construct
  source 1..80: mol_type = other DNA
aatgatttcggtatgttggcagtcagagtggtcaatgagtacaacccagctaggattacttcgaaggtgagggtttatat

SEQ ID NO: 160569 - DNA, 80 bp, synthetic construct
  source 1..80: mol_type = other DNA
gatctacccacccagtcaaccaaaccagtgggcttcgcctcatggacaatagatgtgatgggatatgtgcagatgcgcag

SEQ ID NO: 160570 - DNA, 80 bp, synthetic construct
  source 1..80: mol_type = other DNA
agccagcgtgtttcttatccccaggcgccacggcaagacctggatagtcgtggccatcatcagcctcatcctctcgaatc

SEQ ID NO: 160571 - DNA, 80 bp, synthetic construct
  source 1..80: mol_type = other DNA
agcttgcacaatgcggcccccactgttcaaaacaccaacgacctctttgccacgtggaagattagttaccactacgcata

SEQ ID NO: 160572 - DNA, 80 bp, synthetic construct
  source 1..80: mol_type = other DNA
ggggggcaggaagtttggtggcgatgttcgttaaatgtattgcgtatctttgttggtacttttgtgaatcgtccactgtg

SEQ ID NO: 160573 - DNA, 80 bp, synthetic construct
  source 1..80: mol_type = other DNA
tcgcggcacgatctgcaaaaactgtttctgtggcggccgcttgcccgagccctgcgcggagccgggctgcgaacgctgac

SEQ ID NO: 160574 - DNA, 80 bp, synthetic construct
  source 1..80: mol_type = other DNA
gcacagacatgtcagacggcaacataaaatgtcacatccaggacctgcccctgtggtgcatattctttggctactcagac

SEQ ID NO: 160575 - DNA, 80 bp, synthetic construct
  source 1..80: mol_type = other DNA
ccagttaaagatgttctaacaaaaggaatcccaacattgcagtccccatctgttgaggcttgtggatattcagacaggat

SEQ ID NO: 160576 - DNA, 80 bp, synthetic construct
  source 1..80: mol_type = other DNA
actaattggtccaaaagctctcctatttccagagttggcttctaaaatagctaccagccaagactggaaatatgaatacg

SEQ ID NO: 160577 - DNA, 80 bp, synthetic construct
  source 1..80: mol_type = other DNA
tagggcgggccattgctaaacaagccaacacaagcacatactccctaccgcccgacccgtcgcactttgatgggtacaag

SEQ ID NO: 160578 - DNA, 80 bp, synthetic construct
  source 1..80: mol_type = other DNA
gtcgtaccctacataaattgcctcccaatggacaacatgcttagacataacaatgtaacacttggcataataccattggt

SEQ ID NO: 160579 - DNA, 80 bp, synthetic construct
  source 1..80: mol_type = other DNA
gaaggtacatgatttgggcctaaaaccaataaatacaccaagtaaaacaaaattactccccagtgtcttttataatgtgt

SEQ ID NO: 160580 - DNA, 80 bp, synthetic construct
  source 1..80: mol_type = other DNA
cttattcgatccctcagcaaaagacaccaagaacacaaatactactactgcaaataagtatacaaatgtaacaagtctct

SEQ ID NO: 160581 - DNA, 80 bp, synthetic construct
  source 1..80: mol_type = other DNA
gctagaggccatagctcaagggggccccttcgcgtaccacagtgatcaaatgaaagtgtcactaggtatgaaatacgcct

SEQ ID NO: 160582 - DNA, 80 bp, synthetic construct
  source 1..80: mol_type = other DNA
ttaggaagacagaagtaggccgtaggttgtatcttccaccatacaacctgctagagcgtacttggattgataagttcatt

SEQ ID NO: 160583 - DNA, 80 bp, synthetic construct
  source 1..80: mol_type = other DNA
cccatcttccagcgcaagcttgctgccgttattgcctgtgtccgacgcctgcggactcaggccaccgtctacccggagga

SEQ ID NO: 160584 - DNA, 80 bp, synthetic construct
  source 1..80: mol_type = other DNA
gtataatggtctaaggttggcataccaacaaggactgccggtactaaacacaccagggagtaaccaatttttgacgtcag

SEQ ID NO: 160585 - DNA, 80 bp, synthetic construct
  source 1..80: mol_type = other DNA
attacactcttaaagatacagatataattgtgcaacctagacaacacttaacaacggctggaccaagtgacatgtatgtc

SEQ ID NO: 160586 - DNA, 80 bp, synthetic construct
  source 1..80: mol_type = other DNA
atgtacactgttgatttacgcactcaaactgagttagcaaaagaagtcttttctataccagtggatgttgcctcacaacc

SEQ ID NO: 160587 - DNA, 80 bp, synthetic construct
  source 1..80: mol_type = other DNA
atcgtggcaacatgctctggatgtccagacatctccgtccggatgttgcgagacactcccatgatacaacaccccgggtc

SEQ ID NO: 160588 - DNA, 80 bp, synthetic construct
  source 1..80: mol_type = other DNA
atccacaccagcaaccagtggggtcaatacacaagaagtcccagccctgacagcagtcgagacaggagcgtcaggacagg

SEQ ID NO: 160589 - DNA, 80 bp, synthetic construct
  source 1..80: mol_type = other DNA
acttcgacccgccggcacctccgcccggtggtcccccaccggggccaaggccagcactgagggccctgcctcccgttccc

SEQ ID NO: 160590 - DNA, 80 bp, synthetic construct
  source 1..80: mol_type = other DNA
cggggacgccccattggcattggcacgaaggatcttgcacatcgcaacccatcgctactgcgttctcccacaaacgccat

SEQ ID NO: 160591 - DNA, 80 bp, synthetic construct
  source 1..80: mol_type = other DNA
ctctaatgactatgtaaaatatgacccctttgggggaggcttcagtactatgatgtttaccttgcaaaacctatttgagg

SEQ ID NO: 160592 - DNA, 80 bp, synthetic construct
  source 1..80: mol_type = other DNA
gggtttgcccgagtcccattgaaagatggaaccacagactctggagacactttctacggccaagtagccatcaacgactt

SEQ ID NO: 160593 - DNA, 80 bp, synthetic construct
  source 1..80: mol_type = other DNA
tcagagtaaaatatttggaatctgctgtcaactcagaacatatcttttctgttgacaaaaattgtgaaacaattgccaaa

SEQ ID NO: 160594 - DNA, 80 bp, synthetic construct
  source 1..80: mol_type = other DNA
taccgcggatttgattgacgtcacgagtgtggtcaaaccgtggcggcaccctgtatccgacccgtcgtcatgggctccac

SEQ ID NO: 160595 - DNA, 80 bp, synthetic construct
  source 1..80: mol_type = other DNA
tacctcttaaggtcactaagcactccgagcgttagcgaggagtgcgaccctaccccctgggcccacttcttcggagccgc

SEQ ID NO: 160596 - DNA, 80 bp, synthetic construct
  source 1..80: mol_type = other DNA
tccctacaaaatatcactcagggagattattattttgttttgttcctggaaatgaattgattgatgtttcccatataaca

SEQ ID NO: 160597 - DNA, 80 bp, synthetic construct
  source 1..80: mol_type = other DNA
cagcccagcctgaggggaccccccccgccgtctccccagtatgccccatcgcttccccagcggcctccaggtccaagcag

SEQ ID NO: 160598 - DNA, 80 bp, synthetic construct
  source 1..80: mol_type = other DNA
taccattacaaagcacccggtaatgcacaggagctaaaggacagacactttatgcaatttaggaaacagattaagaacgt

SEQ ID NO: 160599 - DNA, 80 bp, synthetic construct
  source 1..80: mol_type = other DNA
tcgggcctaaacacatgataaacaaagtcataagcacatgggtcacatacaggaaatatgtatataacattaaagatata

SEQ ID NO: 160600 - DNA, 80 bp, synthetic construct
  source 1..80: mol_type = other DNA
ctttaacaattgggttatcaccacacgcaaggttgcacaattgaggcggaagttggaaatgttcacttatttgagatttg

SEQ ID NO: 160601 - DNA, 80 bp, synthetic construct
  source 1..80: mol_type = other DNA
gcgggtcgacatggtccaggcggtggaagcggtctggcagcgactggaacccggacgcgtagccggcggcgccgcgcgtc

SEQ ID NO: 160602 - DNA, 80 bp, synthetic construct
  source 1..80: mol_type = other DNA
tcacgtgaaatatgcggccatacatacacacacaatcttctacactcatatgacttatgcatctcgtgcgacaacggaac

SEQ ID NO: 160603 - DNA, 80 bp, synthetic construct
  source 1..80: mol_type = other DNA
tggttttcttttgctatggactttataattaggacattaatttgatgataacactaattcggaatattggtggccagtta

SEQ ID NO: 160604 - DNA, 80 bp, synthetic construct
  source 1..80: mol_type = other DNA
atcagtttccaggtacttagttcctcttacaactcttacttaagcataactgcctttgacactaatactgaacaaacaat

SEQ ID NO: 160605 - DNA, 80 bp, synthetic construct
  source 1..80: mol_type = other DNA
caacaggccatttaacccattgtgctggatatcaacatgatgagataatcttacatggccactccatcaagtaccttgag

SEQ ID NO: 160606 - DNA, 80 bp, synthetic construct
  source 1..80: mol_type = other DNA
gacaagcccacacaaccagacacttctgcgaataggttttacacactggagagtaaggattggaccccagatagtaaagg

SEQ ID NO: 160607 - DNA, 80 bp, synthetic construct
  source 1..80: mol_type = other DNA
tgcacccagtccacgttcgaaatacccggtaccggtaacatccctcgaagagtacaagtcatcgacccgagtatcctggg

SEQ ID NO: 160608 - DNA, 80 bp, synthetic construct
  source 1..80: mol_type = other DNA
aaactgctctaaggtagtagcttcctcttgtacaagaatgatggaaacacagacttctacctggtttggtcttaatggca

SEQ ID NO: 160609 - DNA, 80 bp, synthetic construct
  source 1..80: mol_type = other DNA
acaaacggtacctggtggacagttcagcatgtcggaatgctggctgctggtggatggtcgtgctttatactactattgat

SEQ ID NO: 160610 - DNA, 80 bp, synthetic construct
  source 1..80: mol_type = other DNA
actggtacatgatttgtcaggtgggtcacaattggaacccgcgtgctctccttcctctgagccttggcctggcgggtgtc

SEQ ID NO: 160611 - DNA, 80 bp, synthetic construct
  source 1..80: mol_type = other DNA
atgtgatggcaactaacaccgagagcaagacatcttatgtctcgtatatcaatgccaatccgggagaagcaggtggcatt

SEQ ID NO: 160612 - DNA, 80 bp, synthetic construct
  source 1..80: mol_type = other DNA
gacaaatctgaattttcaggagcaagacagagtagcaacaaagtgcaaggattaccagttagaatgcccagtggagctca

SEQ ID NO: 160613 - DNA, 80 bp, synthetic construct
  source 1..80: mol_type = other DNA
actgaacaagtacagcagtgccatgtaccacccaggcatgatgatgcaggccaaaaagaaactagttgtacctagtttcc

SEQ ID NO: 160614 - DNA, 80 bp, synthetic construct
  source 1..80: mol_type = other DNA
gccgctggcgaaggagaaggaggcgccgccgaccactatggagacgccgagctcgacgccctcttcgccgccgtcgaaga

SEQ ID NO: 160615 - DNA, 80 bp, synthetic construct
  source 1..80: mol_type = other DNA
gcaccctagtgtgttctatgatatattccctggtgagaaggaacctgctgtgttaacacaaaaagatcccagactggaaa

SEQ ID NO: 160616 - DNA, 80 bp, synthetic construct
  source 1..80: mol_type = other DNA
agaagaatcttcagtctagagaataaaatcaacaactacatacagttcaagaccaagcaccgcattgaaccagtatgtgt

SEQ ID NO: 160617 - DNA, 80 bp, synthetic construct
  source 1..80: mol_type = other DNA
agtattctttgctctttattatttgaatcactatatggttacacagctcattgtgcaatgcttcatgaaccgcaccccta

SEQ ID NO: 160618 - DNA, 80 bp, synthetic construct
  source 1..80: mol_type = other DNA
gtatcttgtacaaaataggtctgatcctaggtatccatgttgggggcaatggtagaaatggtttctctgctatgttatta

SEQ ID NO: 160619 - DNA, 80 bp, synthetic construct
  source 1..80: mol_type = other DNA
ttgatgtgcagggggtaactgaatctcggagcaaaattactctcgaccgatcaacacacaaccctctgtcaaacactggt

SEQ ID NO: 160620 - DNA, 80 bp, synthetic construct
  source 1..80: mol_type = other DNA
aggaggcctccagcggtcgagcagattgagaaaacagtccttgattaccgacatcgcggtcgcgcgtcggtggacaaaaa

SEQ ID NO: 160621 - DNA, 80 bp, synthetic construct
  source 1..80: mol_type = other DNA
gttcgctggcggttgacgcgcaacacgctgctaagcgggtggcttccgagggcctgcggtttttccggctcaacgcttaa

SEQ ID NO: 160622 - DNA, 80 bp, synthetic construct
  source 1..80: mol_type = other DNA
cattgggagcttggtggttatcctagggacaatctatgcactgtacaaattaatgagtatgactcagggagcatacacag

SEQ ID NO: 160623 - DNA, 80 bp, synthetic construct
  source 1..80: mol_type = other DNA
cacttacttatattaggacgtagactcctcccacagaccaaccacagtgtatgtcgtccatttcctgggaggagtctacg

SEQ ID NO: 160624 - DNA, 80 bp, synthetic construct
  source 1..80: mol_type = other DNA
tctgacatgtcggttcgcatgttgcgtgacacacctatgatgcaacaagatgaaaacataacccaaaacccagtagagga

SEQ ID NO: 160625 - DNA, 80 bp, synthetic construct
  source 1..80: mol_type = other DNA
tttcaaggaggacctcctcaccatcgtcagccaccagccggtgctgatgatgcagaactacaagtgcatactagtaaaga

SEQ ID NO: 160626 - DNA, 80 bp, synthetic construct
  source 1..80: mol_type = other DNA
ccctcaatgtaaacagttttgagacagggggagataaagtccacccactccttgtgactgctacgctaggatgtgaagag

SEQ ID NO: 160627 - DNA, 80 bp, synthetic construct
  source 1..80: mol_type = other DNA
agcaccagttttagatgctgctgaaacaggccacactagcagtgttcaaccagaggatatgattgaaacacggtatgttc

SEQ ID NO: 160628 - DNA, 80 bp, synthetic construct
  source 1..80: mol_type = other DNA
cacctcggaccccccctccacccgaaacgcttgcgcgtttcggaccttcggcgtcggggtggtcggtggctttgctaaac

SEQ ID NO: 160629 - DNA, 80 bp, synthetic construct
  source 1..80: mol_type = other DNA
caaacaaaactgacatgcagggcaaaacctataactggcaaaactacaaaaattactttaacaaagtaaaaactaaatgg

SEQ ID NO: 160630 - DNA, 80 bp, synthetic construct
  source 1..80: mol_type = other DNA
tcaacttcagttggaaagaccttggctttaccaccattcacacagctaaggcagcagtggcttgataatttcatataaat

SEQ ID NO: 160631 - DNA, 80 bp, synthetic construct
  source 1..80: mol_type = other DNA
gacagttgggtagcattgtgcgcctgttttatacaccctttcccacaatgcaacttagaattataactaaaccggccaat

SEQ ID NO: 160632 - DNA, 80 bp, synthetic construct
  source 1..80: mol_type = other DNA
cttctacaacggttacataggttacaacattaacaacgcttccacatacagcaaaatatttgaaaattacttatatagag

SEQ ID NO: 160633 - DNA, 80 bp, synthetic construct
  source 1..80: mol_type = other DNA
caacaagagatactgttcaacaatgtcagatggttggcaatccaatcacgacgcttcgcaccactatacgctgtggaagc

SEQ ID NO: 160634 - DNA, 80 bp, synthetic construct
  source 1..80: mol_type = other DNA
tctgtctcttatggtgattccaattgtaaacatcactgcaacaagtggtgcagctccatctatacctattacagtgacaa

SEQ ID NO: 160635 - DNA, 80 bp, synthetic construct
  source 1..80: mol_type = other DNA
ctgttttatactccctcccccgtaacttagaagaaataaaccaagttcactaggaggggtacgaaccagtaccaccacga

SEQ ID NO: 160636 - DNA, 80 bp, synthetic construct
  source 1..80: mol_type = other DNA
accaacgctaaaagatggaaaagagtggaatactgcctcaaaccctagtgtgttcttccagccacattctggcttcccaa

SEQ ID NO: 160637 - DNA, 80 bp, synthetic construct
  source 1..80: mol_type = other DNA
atcaatacctagtaaagcaagacactcagtggcacccccaggcatccatattcaccctagaagacatgcccctatacgct

SEQ ID NO: 160638 - DNA, 80 bp, synthetic construct
  source 1..80: mol_type = other DNA
aagttactaaatgggtggagttatgaactgtataaaagacgagaacaccagttctcttcctctttcttcgcactcgcaga

SEQ ID NO: 160639 - DNA, 80 bp, synthetic construct
  source 1..80: mol_type = other DNA
ggcacagcaagtattaaaagaatgcaagaagaatcaacagctgctgtctatcctacaggaccaccgagaaagcggccaaa

SEQ ID NO: 160640 - DNA, 80 bp, synthetic construct
  source 1..80: mol_type = other DNA
tgtctggcacaaaacccacatcactaaatgccctaaacacatttagaacagagggatgctttagccatccacaacttaaa

SEQ ID NO: 160641 - DNA, 80 bp, synthetic construct
  source 1..80: mol_type = other DNA
cctagaagacagggctgctggaaatgtggcaagccaggacacatcatggcaaattgcccggacagacaggcgggtttttt

SEQ ID NO: 160642 - DNA, 80 bp, synthetic construct
  source 1..80: mol_type = other DNA
gccgccattttgagtaaggcggaaaaggctgacaccctgtgtcaaaggtcaagggtcagcttccgctttgcacaaaatgg

SEQ ID NO: 160643 - DNA, 80 bp, synthetic construct
  source 1..80: mol_type = other DNA
cagccatgcaagtcattagggaaataatcaatgaggaggcggcagactgggaccagcagcacccggtgccaggtccactg

SEQ ID NO: 160644 - DNA, 80 bp, synthetic construct
  source 1..80: mol_type = other DNA
ttgaaccacaaggtgtcactgaatccagggaaaagattacattagacagagacactcacgtgcctgtgcgcacctgcggg

SEQ ID NO: 160645 - DNA, 80 bp, synthetic construct
  source 1..80: mol_type = other DNA
cctgggcttttacagccccatattcctctcagatggcaggtctaatatagaattcttcactgcttacagagacatagtat

SEQ ID NO: 160646 - DNA, 80 bp, synthetic construct
  source 1..80: mol_type = other DNA
gtgcagtgtaatgcaaccaaatttcacagtggttgtctgatggtagcggctataccagaacatcagctagcatacattgg

SEQ ID NO: 160647 - DNA, 80 bp, synthetic construct
  source 1..80: mol_type = other DNA
caccgccaatacacatcccgggtgaagttaaaaatattatggaactggcagagattgacacagtcataccaatgaatgca

SEQ ID NO: 160648 - DNA, 80 bp, synthetic construct
  source 1..80: mol_type = other DNA
gaagttaccagatgcattaaaggatatgggtctgttcgggcaaaacatgtactatcattacttaggacgctctggttata

SEQ ID NO: 160649 - DNA, 80 bp, synthetic construct
  source 1..80: mol_type = other DNA
gacagttctcctcctcaagcgacgactcagagagcaacagcagctccagcagcagctccaattcctcacccgagaaatgt

SEQ ID NO: 160650 - DNA, 80 bp, synthetic construct
  source 1..80: mol_type = other DNA
tttaacacactatgaaacagctttattctctaaaacagcctactacaacacctttgaaactatagcacaattaaaaccca

SEQ ID NO: 160651 - DNA, 80 bp, synthetic construct
  source 1..80: mol_type = other DNA
caacgtccctgtgctcggtggaacggatggtcgagctgtcggcgcagtctccggccgccgatttctcggtctccgaggct

SEQ ID NO: 160652 - DNA, 80 bp, synthetic construct
  source 1..80: mol_type = other DNA
aaaagaataccattataccaggaacaagtaagaggttttccttatgctagtgaggagtcacagaatgagctcatgatcaa

SEQ ID NO: 160653 - DNA, 80 bp, synthetic construct
  source 1..80: mol_type = other DNA
aaggtgacccctggaactaaacatactgaggagagaccgaaggtacaggtaatacaagctgccgaccccttggccacggc

SEQ ID NO: 160654 - DNA, 80 bp, synthetic construct
  source 1..80: mol_type = other DNA
gccaccgactggaatgaccgccacacaaacatggtcaagtcgttcctcaaagcccaacaaaaaccttgcatgggtaagaa

SEQ ID NO: 160655 - DNA, 80 bp, synthetic construct
  source 1..80: mol_type = other DNA
atgctgctaatagtaggtggcaaccaggaggaggggtttgcggggccctctataagaaattcccggagagcttcgatctg

SEQ ID NO: 160656 - DNA, 80 bp, synthetic construct
  source 1..80: mol_type = other DNA
cttcacgtggcaaagtgcttctaatccaagtgtattcttcaaagtgggtgatacagctagatttagtgtaccttttgtgg

SEQ ID NO: 160657 - DNA, 80 bp, synthetic construct
  source 1..80: mol_type = other DNA
gttagacgcagcggagactggacacacaagctcagtgcaacctgaagatcttatagagactaggtatgtaattacagatc

SEQ ID NO: 160658 - DNA, 80 bp, synthetic construct
  source 1..80: mol_type = other DNA
ttaacagttggcaactcaaccatcacaactcaagaggctgctaatataatagtatcctatgctgaatggcctgaatactg

SEQ ID NO: 160659 - DNA, 80 bp, synthetic construct
  source 1..80: mol_type = other DNA
gtgactgcaccacagggacatatttctgcaaaagcatggacaggtactacccagtaaaattcagacaccataactggtat

SEQ ID NO: 160660 - DNA, 80 bp, synthetic construct
  source 1..80: mol_type = other DNA
cgtgtacctgcactacaagctgctgaaacaggtgctacttccaatgctactgatgaaaacctgatagaaacaaggtgtgt

SEQ ID NO: 160661 - DNA, 80 bp, synthetic construct
  source 1..80: mol_type = other DNA
ccacttttaaattctgttgcagcagatagctgatacccaatgttatcttttgcggcagaaattgaaagtgctggccatat

SEQ ID NO: 160662 - DNA, 80 bp, synthetic construct
  source 1..80: mol_type = other DNA
ctcctggtgcaaaaccccccactacccgaaaggaagctatgctgggcacgcatatgatatgggatattggattgcaatcc

SEQ ID NO: 160663 - DNA, 80 bp, synthetic construct
  source 1..80: mol_type = other DNA
ttgccagttagaagttgtgggaggtgtatcaaatacagtaccaataaccatatcaattagtcccatgtttgcagaattct

SEQ ID NO: 160664 - DNA, 80 bp, synthetic construct
  source 1..80: mol_type = other DNA
ccaggggtcgcaagtcagtgtccattagggtgaagccccccaagctatttcaagacaagtggtacacccagcatccgttc

SEQ ID NO: 160665 - DNA, 80 bp, synthetic construct
  source 1..80: mol_type = other DNA
ttggcaatgcacgttgttgtccatttatatgtggtaaagcagtaatgtttaaagatagaaatacttgtcaaacttatacc

SEQ ID NO: 160666 - DNA, 80 bp, synthetic construct
  source 1..80: mol_type = other DNA
agtcctaccagaggaggccaagaacccagacgagtccgtagaagggtcctcgtccagcaagaagaggaggtggtaagcgg

SEQ ID NO: 160667 - DNA, 80 bp, synthetic construct
  source 1..80: mol_type = other DNA
ctttcaggctgtaccataaatatgtttccagaccctaaaccttactgcccctccagcaatgactggaaagaagagtatga

SEQ ID NO: 160668 - DNA, 80 bp, synthetic construct
  source 1..80: mol_type = other DNA
ggttacaagatttgcaattatcacctagctacaccagaggaccatttgaacgcaattagtataatgtgggatagagacct

SEQ ID NO: 160669 - DNA, 80 bp, synthetic construct
  source 1..80: mol_type = other DNA
agccgtgttgagtgcgatcggtcgtgtcgctgacaccgtcgctagcgggccatcgaattcagagagagttccagttctaa

SEQ ID NO: 160670 - DNA, 80 bp, synthetic construct
  source 1..80: mol_type = other DNA
gcaaggtgatgtagtagaggcggtcgaaaacgccgttgcgcgcgtggcggacaccatcagcagtggaccatcaaactctc

SEQ ID NO: 160671 - DNA, 80 bp, synthetic construct
  source 1..80: mol_type = other DNA
tcatgcatatcagagcagctaaagcatacagtaaggctggaaaacttaatattagtcaagctatgtccaccatggccact

SEQ ID NO: 160672 - DNA, 80 bp, synthetic construct
  source 1..80: mol_type = other DNA
ccgcgcgctgctcgtcaccggcacggcgggcgccggcaagacttccagcatccaggtgctggcggccaatctagattgcg

SEQ ID NO: 160673 - DNA, 80 bp, synthetic construct
  source 1..80: mol_type = other DNA
tcgctggcgatgctgacattgccacatcctctcaagccattgcctcctctatcaactccctttccaattccattgatggt

SEQ ID NO: 160674 - DNA, 80 bp, synthetic construct
  source 1..80: mol_type = other DNA
gctctcgcaagagctacaaaaacaactcaagcagcagcagctcatgggaaagcagctccgagagctcagtctccaactcg

SEQ ID NO: 160675 - DNA, 80 bp, synthetic construct
  source 1..80: mol_type = other DNA
agaataccctgcatggccaggcccgacctgccaaagattgtcggcctgtggtgagggatagaaggtggtggcacggtgag

SEQ ID NO: 160676 - DNA, 80 bp, synthetic construct
  source 1..80: mol_type = other DNA
gtggacatatccagatgtcgttggtataattagtattatttctaggatttataatcaaattaaagtttttgtcctcatgt

SEQ ID NO: 160677 - DNA, 80 bp, synthetic construct
  source 1..80: mol_type = other DNA
ctggagtatacaaagacataatctacaaccccatgacagacaaaggcataggtaacgcagtgtggatagactactgcagc

SEQ ID NO: 160678 - DNA, 80 bp, synthetic construct
  source 1..80: mol_type = other DNA
tggttcagaggctatcaaaagagtgtctgaacaacaagtacatgatgaactgtattacccaccttcaaagaaacctcgat

SEQ ID NO: 160679 - DNA, 80 bp, synthetic construct
  source 1..80: mol_type = other DNA
acgccagaacacagattcaactggttctataataaaagtacggatttttccatcggttacgtattcggcaaagggtaatt

SEQ ID NO: 160680 - DNA, 80 bp, synthetic construct
  source 1..80: mol_type = other DNA
catcaggcttctaccgtaggacaaaatctgatcagtacactcatgcggggtatgtctcactttggtaccagactgacttc

SEQ ID NO: 160681 - DNA, 80 bp, synthetic construct
  source 1..80: mol_type = other DNA
cgggttcactcgtatcatttcaaaactcttggggttcacagatggatttgactgacccgctgtgtattgaagatgacaca

SEQ ID NO: 160682 - DNA, 80 bp, synthetic construct
  source 1..80: mol_type = other DNA
gctctctgcaggcagatcatactttgaaacaaaaggcacatacacagatgttacctacaatccattcacagacagaggag

SEQ ID NO: 160683 - DNA, 80 bp, synthetic construct
  source 1..80: mol_type = other DNA
ataatatttagaatgataatacagatcatcataataagatataggagaatcaatttaccaatttatagtggattataaaa

SEQ ID NO: 160684 - DNA, 80 bp, synthetic construct
  source 1..80: mol_type = other DNA
gagtatagaaagctttctaggtagatccagttgtattgcaataattcacactgatattacacatgaaacagaaaaatata

SEQ ID NO: 160685 - DNA, 80 bp, synthetic construct
  source 1..80: mol_type = other DNA
aaactactacctaacacaagaatttggcttctacagcccttactatctaacacccacaagaattagcctagactggcaca

SEQ ID NO: 160686 - DNA, 80 bp, synthetic construct
  source 1..80: mol_type = other DNA
ttaccgctacgtcataagtcacgtggggacggctgctgtaaacgcggaagtagctgacccacgtaacttgtcacgtgacg

SEQ ID NO: 160687 - DNA, 80 bp, synthetic construct
  source 1..80: mol_type = other DNA
ggatatgtgttttactcttacaactttggcaaaggcaagatgcccggaggcagttcccaggtacctataagaatgaggtg

SEQ ID NO: 160688 - DNA, 80 bp, synthetic construct
  source 1..80: mol_type = other DNA
aaacaggggaaagcaggctatgtgacagatagaggaaaagacagagtaaaacctttagaacagaccaccaaccaacaagc

SEQ ID NO: 160689 - DNA, 80 bp, synthetic construct
  source 1..80: mol_type = other DNA
aaaagatatcaccaaattaaaagtggcccttgataaatatggagttgatctacccatggtgacatttcttaaggatgagc

SEQ ID NO: 160690 - DNA, 80 bp, synthetic construct
  source 1..80: mol_type = other DNA
tctgatcttgacgccacatctgtagacaaacccacccatccagaaacatcttctgaccgtttttacactctggaaagtgt

SEQ ID NO: 160691 - DNA, 80 bp, synthetic construct
  source 1..80: mol_type = other DNA
tgtaatgattttacagtgaggttactcaaggactccccccatgtgatgcagacaaatgcagtggtccaaggaataggtga

SEQ ID NO: 160692 - DNA, 80 bp, synthetic construct
  source 1..80: mol_type = other DNA
aaattactctaagtgtgcatcatgccgacatgctgatcatgtctgtggttcaatgccttctgggtctccttgtacagctt

SEQ ID NO: 160693 - DNA, 80 bp, synthetic construct
  source 1..80: mol_type = other DNA
cgatccagtaactattgaggccaaagttagggtctacatgaagccaaaacatatcaaagtgtggtgtcctagaccaccaa

SEQ ID NO: 160694 - DNA, 80 bp, synthetic construct
  source 1..80: mol_type = other DNA
aaatgcaaacaaatactggaactctagaaaaggaacacagtttacagctagtaaatttctgaaccacaaaacaggcctat

SEQ ID NO: 160695 - DNA, 80 bp, synthetic construct
  source 1..80: mol_type = other DNA
aagagggcactgccactgtgctgcctgccagcttcaaagaagaaaccacctcctgacatgacctggagacccccggtaca

SEQ ID NO: 160696 - DNA, 80 bp, synthetic construct
  source 1..80: mol_type = other DNA
gagttcccagcaatggtaggctcagcagcacacacacacctcacaggcatatttggcagcagctggctaaactctggcag

SEQ ID NO: 160697 - DNA, 80 bp, synthetic construct
  source 1..80: mol_type = other DNA
acctcgattggaaatcccagccttccaagaagggcaagaagaaagcttacttttcaggaaaagaaaacacaaggcgtacg

SEQ ID NO: 160698 - DNA, 80 bp, synthetic construct
  source 1..80: mol_type = other DNA
agtaaacacacttaataacataagaaaacagtactttcaatgggaaacagaccagggcccccaagctacctcagactatg

SEQ ID NO: 160699 - DNA, 80 bp, synthetic construct
  source 1..80: mol_type = other DNA
aaaagagctttaagagctggaaaataaacttccaggagcacgctcaaatcagaaagaaatttgaattgttcacctatgtt

SEQ ID NO: 160700 - DNA, 80 bp, synthetic construct
  source 1..80: mol_type = other DNA
cacgtttgcttgatatgtataggtaggtgtactgtttgtgaggtcgcaagtgtgattttcttgcagagattttatccatc

SEQ ID NO: 160701 - DNA, 80 bp, synthetic construct
  source 1..80: mol_type = other DNA
ggctcctaaacctcaagaccaatttcgtgtaacctttaagcttggctttcattaaaatttctaggccgtggaactttcac

SEQ ID NO: 160702 - DNA, 80 bp, synthetic construct
  source 1..80: mol_type = other DNA
tacattccaaacaatagcacacctcagagaaacaggcaaacaaaacaatgcaaaccccacctgggatacatgtagaaacc

SEQ ID NO: 160703 - DNA, 80 bp, synthetic construct
  source 1..80: mol_type = other DNA
attatgagtctgcacaatgcagctcccactgaccaaaatgctgatgacctatttgccacatggaagattagttactacta

SEQ ID NO: 160704 - DNA, 80 bp, synthetic construct
  source 1..80: mol_type = other DNA
ccatgaaaatgaacgaactgacgggcccaaacacacacccgggcatgctaatgctgcaaaaacaaaaaatactgattccc

SEQ ID NO: 160705 - DNA, 80 bp, synthetic construct
  source 1..80: mol_type = other DNA
gccattttaagtaaggcggaagcagctccactatacacaaaatggcggcggagcacttccggcttgcccaaaatggcggc

SEQ ID NO: 160706 - DNA, 80 bp, synthetic construct
  source 1..80: mol_type = other DNA
ccgggggctgcgggcggtggacggcggcgagagttcagagagtggggtggtcggggggcgctgcgcgggcgcagccatgc

SEQ ID NO: 160707 - DNA, 80 bp, synthetic construct
  source 1..80: mol_type = other DNA
ctgcgaaaagtggccggcaaagataaggcccaccgtgctgtagaagcccaaaagcagccgcaggggccaagtccagggcc

SEQ ID NO: 160708 - DNA, 80 bp, synthetic construct
  source 1..80: mol_type = other DNA
ccagagacccgggcttcaggccctgcctctcctgttacccttttagaaccacagcctggacacatgtgccagacgcctgg

SEQ ID NO: 160709 - DNA, 80 bp, synthetic construct
  source 1..80: mol_type = other DNA
cacagtcgtctcggacgcctgacagcccaccgccgcgcacaacgccgacagatcggtaggcacgcgatccgcctcgggcg

SEQ ID NO: 160710 - DNA, 80 bp, synthetic construct
  source 1..80: mol_type = other DNA
ctgctcaattaatgactttagatatagaccctagcaatataaccctagaggagagtgtgtttggcactgaaggtttggaa

SEQ ID NO: 160711 - DNA, 80 bp, synthetic construct
  source 1..80: mol_type = other DNA
tcaatacatccccccttcgcgggaaatgactaaggatctgactgaactttgggaaagcgagctgtttaacaccttcaagt

SEQ ID NO: 160712 - DNA, 80 bp, synthetic construct
  source 1..80: mol_type = other DNA
aggcgaagtgaataagataaaatccgcactattatcaactaataaggcagtcgttagcctatctaacggagtcagcgtat

SEQ ID NO: 160713 - DNA, 80 bp, synthetic construct
  source 1..80: mol_type = other DNA
acaaatactcatctggtggctatataaccctatggagacaaacagactttgtgcctggatcaaataatggtatcgggtat

SEQ ID NO: 160714 - DNA, 80 bp, synthetic construct
  source 1..80: mol_type = other DNA
tcttaatacaccttaacaataagaaatgggggcgcaattctccacacagcgttccgggtctcatgaaacgagcaacatag

SEQ ID NO: 160715 - DNA, 80 bp, synthetic construct
  source 1..80: mol_type = other DNA
atgctcatggttcagaaactgtccctcaatgcagctgtacaggtggtgtttactactccagatactataacaaatattac

SEQ ID NO: 160716 - DNA, 80 bp, synthetic construct
  source 1..80: mol_type = other DNA
gttaaaggaaaaattaatacctaccgtccagaggaagaaggacaccttagaacagtgcaagaaaatagccttgtacgaac

SEQ ID NO: 160717 - DNA, 80 bp, synthetic construct
  source 1..80: mol_type = other DNA
cagcagtcccatggcccatccgggcatgatgatgctagacaagatgaaaatactggttcccagcttcgacactaggcccg

SEQ ID NO: 160718 - DNA, 80 bp, synthetic construct
  source 1..80: mol_type = other DNA
ttggtagagcatggttagctttagaacatacttttgctgatgatggtacatggcgggctgatttgaattttcccacacaa

SEQ ID NO: 160719 - DNA, 80 bp, synthetic construct
  source 1..80: mol_type = other DNA
ccttagtagtacactctaatcactttaccaatactatacttgaggttgggccaataaccatggcaggtctcattaatcta

SEQ ID NO: 160720 - DNA, 80 bp, synthetic construct
  source 1..80: mol_type = other DNA
accgactcaaaatgtacccaccagagaagaggactgggcccgaggggtttattacagccatagagctttttgtggctgta

SEQ ID NO: 160721 - DNA, 80 bp, synthetic construct
  source 1..80: mol_type = other DNA
agggccgaacttttacgagcaaatacgtgctggccagtacaaatctttgcaatttaacaccacccacaatcactatacca

SEQ ID NO: 160722 - DNA, 80 bp, synthetic construct
  source 1..80: mol_type = other DNA
tattagcccaatgttttcagaattctctggggcgagaaacaatgtccctcaaggtttaccagttatgttaacaccaggat

SEQ ID NO: 160723 - DNA, 80 bp, synthetic construct
  source 1..80: mol_type = other DNA
ggggagaccacgtctataaaaatgaatccaactcaagtatattaactggcatgaaagagaatgccaccaaaatgtatgag

SEQ ID NO: 160724 - DNA, 80 bp, synthetic construct
  source 1..80: mol_type = other DNA
tttgaaacaacacaagtactagcacaactatccccacactttcaacctgccttaaaagccatccatacaacatcaaacac

SEQ ID NO: 160725 - DNA, 80 bp, synthetic construct
  source 1..80: mol_type = other DNA
ttcgaccagagacgaggaatgtttactgagacagctctcagacgtatgctactccaaccaggccctggcgaacttgctgt

SEQ ID NO: 160726 - DNA, 80 bp, synthetic construct
  source 1..80: mol_type = other DNA
tacctgaaccaagaagacacgtccagagagagaacccgggatgtggtggtggagacgccgcagatggagggccccatgga

SEQ ID NO: 160727 - DNA, 80 bp, synthetic construct
  source 1..80: mol_type = other DNA
tggtttaaccattacaccaccagacaagtcacccaaatttacaaaaatggattggaatactgtaacattcttgaaaagac

SEQ ID NO: 160728 - DNA, 80 bp, synthetic construct
  source 1..80: mol_type = other DNA
caaaacaaagctataccccagtgttttctatgacacctttcctggtaagaaggaaccagctgctttaagtgataaagatc

SEQ ID NO: 160729 - DNA, 80 bp, synthetic construct
  source 1..80: mol_type = other DNA
gatggctacctcttatagtttgtggcaccggcagggcccaggacaactttatagtacactcagaggacataaccccccga

SEQ ID NO: 160730 - DNA, 80 bp, synthetic construct
  source 1..80: mol_type = other DNA
ggctgtcacggccgtggccctgctcctgatgtttctgaggtggacctgacgttgcaggcccttggggagcggtggttctc

SEQ ID NO: 160731 - DNA, 80 bp, synthetic construct
  source 1..80: mol_type = other DNA
ttacacttctataggaaggaccaactttccaaccagccatagcaaggtcatagccacaagagaaagcatcaccacttatg

SEQ ID NO: 160732 - DNA, 80 bp, synthetic construct
  source 1..80: mol_type = other DNA
aataccacttagggtggtactctcccatatttctcaccagacacagaagcaacttagagtttcccacagcataccaagat

SEQ ID NO: 160733 - DNA, 80 bp, synthetic construct
  source 1..80: mol_type = other DNA
gacctccaagggcagtcaaatattatggacctggagttgactacaaaagtggaacacttgagcccctaccagccaagaac

SEQ ID NO: 160734 - DNA, 80 bp, synthetic construct
  source 1..80: mol_type = other DNA
ttagacaaactactaaaacaactgtaccttaatggccagtactggcagacctttatcacaggtccctttgttaaagatat

SEQ ID NO: 160735 - DNA, 80 bp, synthetic construct
  source 1..80: mol_type = other DNA
actgtactattctgtgctttgtgtccgcttgcaatgacttctctgttaggttgttaaaagacaccccgttcgttgaacag

SEQ ID NO: 160736 - DNA, 80 bp, synthetic construct
  source 1..80: mol_type = other DNA
ctgttaaagatgtgctagaaaaaggtatcccaacactccaatcaccaacagttgaagcttgtggttattcagataggtta

SEQ ID NO: 160737 - DNA, 80 bp, synthetic construct
  source 1..80: mol_type = other DNA
gggatttgggtttacaatcatcttgtactatggtggcaccctggatatcaagcactttctttcgaagaaccagagctgat

SEQ ID NO: 160738 - DNA, 80 bp, synthetic construct
  source 1..80: mol_type = other DNA
gaaagtgtatttggtactgaaggcttggaggcccttgatttaaatacaagtgctggctttccatatataagtatgggaat

SEQ ID NO: 160739 - DNA, 80 bp, synthetic construct
  source 1..80: mol_type = other DNA
ctgtttctcttgacggcgacatgtgtttgcgtctgtgcggcgcggcgacggccgcaagcggacgacgccgcctgccacca

SEQ ID NO: 160740 - DNA, 80 bp, synthetic construct
  source 1..80: mol_type = other DNA
ctgatgaactgtgcgccgcattcatggtggatccgggccgaatcggaccttggcaatccaccttagtcgggcagatctgt

SEQ ID NO: 160741 - DNA, 80 bp, synthetic construct
  source 1..80: mol_type = other DNA
tgcagatacctggtatagaggcacagcatacaccgataacataacaggtatccccttaaaggctgcacaactatatgaag

SEQ ID NO: 160742 - DNA, 80 bp, synthetic construct
  source 1..80: mol_type = other DNA
agtccttgcaggaaacgcctttgtgtttccccatcaaattatcaacctgagaactaataacagtgctaccctagttttac

SEQ ID NO: 160743 - DNA, 80 bp, synthetic construct
  source 1..80: mol_type = other DNA
aaattaggagtgtgccaatcggaagagctttattgctcccagagtactcaacattgtaccgccgttggcttgactcattt

SEQ ID NO: 160744 - DNA, 80 bp, synthetic construct
  source 1..80: mol_type = other DNA
ccccatatacgccaactcctcaaacgagtcaaaagacaacacagatggagacgaaggatatccacaacagtggctaggca

SEQ ID NO: 160745 - DNA, 80 bp, synthetic construct
  source 1..80: mol_type = other DNA
ccaaacaataaaaaaagaatatgaaaaagtatacccaacattaacaacacaaacacctaccaacttttttctaacacaag

SEQ ID NO: 160746 - DNA, 80 bp, synthetic construct
  source 1..80: mol_type = other DNA
taggcccctttgtggactcagagactgtgggcctagtgtgtgttatctgtccctacacgcagccccctatgagaaacaaa

SEQ ID NO: 160747 - DNA, 80 bp, synthetic construct
  source 1..80: mol_type = other DNA
ccagttcagaggatcagcaggcactaatcattgaagtggacaagttaaagaagggactggatgagctagccccactctat

SEQ ID NO: 160748 - DNA, 80 bp, synthetic construct
  source 1..80: mol_type = other DNA
gtgacaaatgacatgggtgcattgtgttttaggatagtaactgaacaacatacaaaccaggttaaaatcacaactaggat

SEQ ID NO: 160749 - DNA, 80 bp, synthetic construct
  source 1..80: mol_type = other DNA
catgtggagtagtactctattattccggtaattttgtacgccagttttataacccctaccccaagcaacttagaagataa

SEQ ID NO: 160750 - DNA, 80 bp, synthetic construct
  source 1..80: mol_type = other DNA
ttttctgtcatcaaatggtgtaataaccataccagctggggagcaaatgacactctctgtcccctattattcaaataaac

SEQ ID NO: 160751 - DNA, 80 bp, synthetic construct
  source 1..80: mol_type = other DNA
actttagacacggactctttagcaagacaggtattaaaagagtgtcagaacaaccgctttatgatgagttttctacagac

SEQ ID NO: 160752 - DNA, 80 bp, synthetic construct
  source 1..80: mol_type = other DNA
agtttatgccgcccgtccgcagcgagatcgcgacgaaggagcgatcagagcgtcccgagggcgggtgccggaggtgagtt

SEQ ID NO: 160753 - DNA, 80 bp, synthetic construct
  source 1..80: mol_type = other DNA
tatactctagatagtgtagactgggagaagacctccagggtgtggtggtggaagctaccagatgcactgaaggatatggg

SEQ ID NO: 160754 - DNA, 80 bp, synthetic construct
  source 1..80: mol_type = other DNA
ctgtcccttactttggaccgggcgtcgactataagggtgatgccctcacaccattatcacacaaggatttgacaacctat

SEQ ID NO: 160755 - DNA, 80 bp, synthetic construct
  source 1..80: mol_type = other DNA
acatgcgtcacgtaaatgacgggagtcctggcccaatcgtgagcactgtgcgcatttactttaaacccaagcacgtgaaa

SEQ ID NO: 160756 - DNA, 80 bp, synthetic construct
  source 1..80: mol_type = other DNA
ccaaaacagctgagatcgttatccgcaaagtgcctacgcaaagcctagtaacattttcgaagttatatggttggtcgttc

SEQ ID NO: 160757 - DNA, 80 bp, synthetic construct
  source 1..80: mol_type = other DNA
aagttggagatgctgtctcttatggaaacatcctgttaagtggtaatgaaactgcaagaatgattaagtataattatcca

SEQ ID NO: 160758 - DNA, 80 bp, synthetic construct
  source 1..80: mol_type = other DNA
attggtgcttccagtgatgcaacaccagaaactactattgagacccgctatgtctataatgacaacactaatgcagaggc

SEQ ID NO: 160759 - DNA, 80 bp, synthetic construct
  source 1..80: mol_type = other DNA
ccacctttcctgtggctgaaatctatgattctataagatggaccaaaaacccttcatgcatgcaagagcatgtgttatca

SEQ ID NO: 160760 - DNA, 80 bp, synthetic construct
  source 1..80: mol_type = other DNA
taggtcgctcactgttccatacacacagggcttgccaacaatggccacgccaggatctaatcaatttctcacttcagatg

SEQ ID NO: 160761 - DNA, 80 bp, synthetic construct
  source 1..80: mol_type = other DNA
gtgcaagagaaattccacaatcttttgaaaggcaatcagattacaacaatcttcaacacttgtctcaaggacgagctcag

SEQ ID NO: 160762 - DNA, 80 bp, synthetic construct
  source 1..80: mol_type = other DNA
aaagtgagcatgtactacatcccagtggttaaaaagacaacaacagaaaagatccttgttctgcctttggaaatgagtaa

SEQ ID NO: 160763 - DNA, 80 bp, synthetic construct
  source 1..80: mol_type = other DNA
tcaatgctaacagatttaacacaaaaaaattcctgactgcttccacgaaatataaatggacacgaacaaaggtggacatt

SEQ ID NO: 160764 - DNA, 80 bp, synthetic construct
  source 1..80: mol_type = other DNA
cagcaactatgggtactgcacatactgccccactactaccttagttgagaaaataaaaaaatacagaaagaaaagatttg

SEQ ID NO: 160765 - DNA, 80 bp, synthetic construct
  source 1..80: mol_type = other DNA
cgtgggatgcaaccccgacgttcactggactgagttcttctacaaattcagtgagttctctcaggtgtatgatctggact

SEQ ID NO: 160766 - DNA, 80 bp, synthetic construct
  source 1..80: mol_type = other DNA
ccacagaccaagccgcccaagaagcaagaaaaagacttcagtttcctcaaaacagcaccgtcgaactcagaagagagcga

SEQ ID NO: 160767 - DNA, 80 bp, synthetic construct
  source 1..80: mol_type = other DNA
taattcaccctacttttcctgaagacgagatacttgaatcaattagatggacaaagaaaccctcacaaatgcatgagcat

SEQ ID NO: 160768 - DNA, 80 bp, synthetic construct
  source 1..80: mol_type = other DNA
caacattggaccactcccacaacagacagttatgaataccacctaggtatgtttagtacaatatttttagccccagacag

SEQ ID NO: 160769 - DNA, 80 bp, synthetic construct
  source 1..80: mol_type = other DNA
tgttttgtacgtcactaaccacgtgactcccacaggccaaccagagtctacgtcgtgcacttcctgggcatggtctacat

SEQ ID NO: 160770 - DNA, 80 bp, synthetic construct
  source 1..80: mol_type = other DNA
gtctgggggggcgagcctgctgtctcaagaggggcctggctccgccgggtggccctagagtaagtctgggagggagaggg

SEQ ID NO: 160771 - DNA, 80 bp, synthetic construct
  source 1..80: mol_type = other DNA
ggacattgcagtttcttccccttcctcttctgaaacatcgaatgatgagtgatttcaaccacgtaacaagaactgggatg

SEQ ID NO: 160772 - DNA, 80 bp, synthetic construct
  source 1..80: mol_type = other DNA
atgacccaacaccgattgaagccaaggtaagagtgtatctgaaacccaagcatattagggtttggtgtccccggcccccg

SEQ ID NO: 160773 - DNA, 80 bp, synthetic construct
  source 1..80: mol_type = other DNA
tcacacgtcgttagccagcgtcggcatatgaagggcgcgggcggccagtacggcctctgggctgagacaggacgaggcag

SEQ ID NO: 160774 - DNA, 80 bp, synthetic construct
  source 1..80: mol_type = other DNA
tgcgtaagcttccaggtgctttcaccagtttacaacacatatcttagcataaatagctggacaaacaaccactcaataga

SEQ ID NO: 160775 - DNA, 80 bp, synthetic construct
  source 1..80: mol_type = other DNA
tgtaggcctccaacgcgtacttctggcgggcgtcctcgcacaaccgatgcacgtctccgtgatcctcggtaaaagccacg

SEQ ID NO: 160776 - DNA, 80 bp, synthetic construct
  source 1..80: mol_type = other DNA
atctcgtggtttgtccgttggtaccccaactttgcacaccaaagggaagttttagaaagagtggtttcctgtggaccgtt

SEQ ID NO: 160777 - DNA, 80 bp, synthetic construct
  source 1..80: mol_type = other DNA
gtaccagccattgtagatgagaatgttggtcactatcttggtgtaggagcggaccttaaacgagtagggaataatgttgt

SEQ ID NO: 160778 - DNA, 80 bp, synthetic construct
  source 1..80: mol_type = other DNA
agttagcctcagaaagtcttccaagccatcctttttaggcctcatggctagtagtaacagaggaaatgcccgaccattaa

SEQ ID NO: 160779 - DNA, 80 bp, synthetic construct
  source 1..80: mol_type = other DNA
ttatacctatcaataacttagaaaataatttaaggaaagttaatttatacactgttgaactaaccaatcagacaacacca

SEQ ID NO: 160780 - DNA, 80 bp, synthetic construct
  source 1..80: mol_type = other DNA
agaaggatcagacagggagcagaactcgctctcctgtgagggacagcgatatcagcagggggactttatgaataccccat

SEQ ID NO: 160781 - DNA, 80 bp, synthetic construct
  source 1..80: mol_type = other DNA
aatacagactactaatagtatgtccctacacataccccagactgtatgtagaaaaaaatccaaactatggctacgtgcca

SEQ ID NO: 160782 - DNA, 80 bp, synthetic construct
  source 1..80: mol_type = other DNA
accaaagattgggtagtagaagaggaatgtgagttagattattttaggattaagtaccttgaatcttcagtcaactcgga

SEQ ID NO: 160783 - DNA, 80 bp, synthetic construct
  source 1..80: mol_type = other DNA
gacgacccctgccagaagcccacccacgagctacccgaccccgatagacaccctcgcatgttacaagtctctgacccgac

SEQ ID NO: 160784 - DNA, 80 bp, synthetic construct
  source 1..80: mol_type = other DNA
gtttctaccaaacaaaggttgttgtacccctgtctaccccaactaaaatggacatgttagcctttgtgagcgcctgccct

SEQ ID NO: 160785 - DNA, 80 bp, synthetic construct
  source 1..80: mol_type = other DNA
tcagaaatatacagcgtaggtctggtagtagtgcagtgtccttacaccttcccccccatgtacgacaagaagagaccaga

SEQ ID NO: 160786 - DNA, 80 bp, synthetic construct
  source 1..80: mol_type = other DNA
cgaatcggactagcaatcataccgagagtactggcaattgtacccaaattatcatgagtgcagaagtgggagaactgtat

SEQ ID NO: 160787 - DNA, 80 bp, synthetic construct
  source 1..80: mol_type = other DNA
cttgttggtatcaaacatccctcattttaccacctgacacagcaggaactgtttaccttttagcattcattagtgcatgt

SEQ ID NO: 160788 - DNA, 80 bp, synthetic construct
  source 1..80: mol_type = other DNA
aacctggtatacaaggggattctggtcggacgtaacgcccgattatgcagatcagctattacatgggacttatttctctt

SEQ ID NO: 160789 - DNA, 80 bp, synthetic construct
  source 1..80: mol_type = other DNA
ggagccacgagtcgtagttgaggctggccggggtctcgtgcgaggcctccagcatggcgggcgcgtagctcaccgccagc

SEQ ID NO: 160790 - DNA, 80 bp, synthetic construct
  source 1..80: mol_type = other DNA
cttctgctggctctgccgcctacaccgccgccatctcccatgagtctgtggcgacccccggcacacaatgttgccggtca

SEQ ID NO: 160791 - DNA, 80 bp, synthetic construct
  source 1..80: mol_type = other DNA
gtaacaatttataacactactcaaacagcagcacaattatctaaattcatgccagccacaaacacaaacccactaacaac

SEQ ID NO: 160792 - DNA, 80 bp, synthetic construct
  source 1..80: mol_type = other DNA
gacaaaaatgaaatcacaggaattttaccagaaatacactgattgtttgtccaaatttaagccaatcatggctatctgct

SEQ ID NO: 160793 - DNA, 80 bp, synthetic construct
  source 1..80: mol_type = other DNA
gcgaagaggagggctacggtggacggcacgggcgggtacgtaactttgagtttctggtgcagtactacatcgtgccgtgg

SEQ ID NO: 160794 - DNA, 80 bp, synthetic construct
  source 1..80: mol_type = other DNA
caagactcttaaaaatgcacttttctaggatacacagaaagaaaaggctactgctactgcaaacagtgcgaactccacag

SEQ ID NO: 160795 - DNA, 80 bp, synthetic construct
  source 1..80: mol_type = other DNA
aagaaacgtactaccctgtaataggcacttctgctttagatgaacaaactactaactacaataaaactaatataactcaa

SEQ ID NO: 160796 - DNA, 80 bp, synthetic construct
  source 1..80: mol_type = other DNA
gggcatgagataggtcttaacacaagcagaggtgacaaccggccagatgaggaccccttttttaattgcaacggaacatt

SEQ ID NO: 160797 - DNA, 80 bp, synthetic construct
  source 1..80: mol_type = other DNA
tattaacaatattattgctaacaaaaattcaataaatctgtatacagtaagagttgaagtacaaactggtaacctggcaa

SEQ ID NO: 160798 - DNA, 80 bp, synthetic construct
  source 1..80: mol_type = other DNA
tcagatcgcctggagacgccatccacgctgttttgacctccatagaagacaccgggaccgatccagcctccgcggccggg

SEQ ID NO: 160799 - DNA, 80 bp, synthetic construct
  source 1..80: mol_type = other DNA
gcggcggagacgggtgctacaagtgatgtagtcccggcagatttggtgcaaacaaggcatgttatcaatgtgaagtcacg

SEQ ID NO: 160800 - DNA, 80 bp, synthetic construct
  source 1..80: mol_type = other DNA
acagcacatatgactgggaaaactacagtacggacactaattataaaaacaccaaaagcaaatggagtgacgctaaacaa

SEQ ID NO: 160801 - DNA, 80 bp, synthetic construct
  source 1..80: mol_type = other DNA
cccagcatcttcgcgcagttggtggtggtaactgaattttcggagatctttggtatcccgcagggcctgtttcaagccgt

SEQ ID NO: 160802 - DNA, 80 bp, synthetic construct
  source 1..80: mol_type = other DNA
gtaaagacttctgcttgcgcatggctcgggacacgagtctacacatgcaaaaaggtgtgatagaacaaaacccggttgaa

SEQ ID NO: 160803 - DNA, 80 bp, synthetic construct
  source 1..80: mol_type = other DNA
tgggagctcaagtgtcaacacagaaaacaggtgcccacgagactctgctcgaggctgcccatggtgccaccataagttat

SEQ ID NO: 160804 - DNA, 80 bp, synthetic construct
  source 1..80: mol_type = other DNA
acagtaccccacattaactccacctttgccaatgccatacacccagagtttgaataccacgcgggctggtactcaaacat

SEQ ID NO: 160805 - DNA, 80 bp, synthetic construct
  source 1..80: mol_type = other DNA
taaatctgtggtggtttgttatggcagcaatagaatactaacacagatgtggcttacacctctgatctcagcactttggg

SEQ ID NO: 160806 - DNA, 80 bp, synthetic construct
  source 1..80: mol_type = other DNA
caactttaatagttccttatgtaaatgctgttccaatggattccatgctaagacacaataattggagcttggttattata

SEQ ID NO: 160807 - DNA, 80 bp, synthetic construct
  source 1..80: mol_type = other DNA
cggcccccgaggtccgcagggagacgcgcacggagaacccaggcgcctccggtgaggcatggcctggcgatggtggtggc

SEQ ID NO: 160808 - DNA, 80 bp, synthetic construct
  source 1..80: mol_type = other DNA
aactagagttattcacctatgtcagatttgacttggagatcacaattataactagtagctctgatttgatacaaattatg

SEQ ID NO: 160809 - DNA, 80 bp, synthetic construct
  source 1..80: mol_type = other DNA
tagtaatgtgttttttatcagggagaaggttttgtaccaacaatgactacatcggggctatctgtgtcggaaaattatga

SEQ ID NO: 160810 - DNA, 80 bp, synthetic construct
  source 1..80: mol_type = other DNA
ttactatcggaaactccacaataactactcaagatgcacttaatacagtcttagcatatggtgaatggccagaatactta

SEQ ID NO: 160811 - DNA, 80 bp, synthetic construct
  source 1..80: mol_type = other DNA
gcggcggtgttttcttggtgagcggcgtgctcaggttcttacgcggcgcgggtatcggcgtcggtggcctgtgcgacgac

SEQ ID NO: 160812 - DNA, 80 bp, synthetic construct
  source 1..80: mol_type = other DNA
ctgcgctgccccgagcgcgtgcttcggcggttgctggaggacgcggcggtggcaacgcgcggcggtggctggcgcgagga

SEQ ID NO: 160813 - DNA, 80 bp, synthetic construct
  source 1..80: mol_type = other DNA
cccgtatctgaataagagggatgtcaactttgaagtgcaacccgttacgagcaagagagacagtattaactgggtgccac

SEQ ID NO: 160814 - DNA, 80 bp, synthetic construct
  source 1..80: mol_type = other DNA
caacactatggtcgtgttgttgtgtgcttcacaccacctgcaccaaatcccccctccaccatggaggaggcgatggacgg

SEQ ID NO: 160815 - DNA, 80 bp, synthetic construct
  source 1..80: mol_type = other DNA
gttctgcacaactcgacaggacattgaatcacaccaagcttagcaacacagaacacgccagcacattcgggtccatgaac

SEQ ID NO: 160816 - DNA, 80 bp, synthetic construct
  source 1..80: mol_type = other DNA
gttactcattgcttatacacctccaggagcacaaggcccaacaaagcgtaaagaagcaatgttgggaacacatgtagttt

SEQ ID NO: 160817 - DNA, 80 bp, synthetic construct
  source 1..80: mol_type = other DNA
cctggagccccagtaccaaccaaaagagatgactttgcttggcaatcaggaacaaatgcatcagttttctggcagcatgg

SEQ ID NO: 160818 - DNA, 80 bp, synthetic construct
  source 1..80: mol_type = other DNA
cagcaggcacgcgggaagcacgccgctcacgtagctcctctgtccggcgtggctggagtaggaggcccggggcagtgtct

SEQ ID NO: 160819 - DNA, 80 bp, synthetic construct
  source 1..80: mol_type = other DNA
gcgtggtaagaatatacttcaaacccaaacacataaaagcatgggtgccaaggccaccaaggttatgccaatacgtcaat

SEQ ID NO: 160820 - DNA, 80 bp, synthetic construct
  source 1..80: mol_type = other DNA
ctgtatggagcggcttcattgaatgacttcggatcactggctgttcgagtggtgaatgaccacaaccctacgaaactcac

SEQ ID NO: 160821 - DNA, 80 bp, synthetic construct
  source 1..80: mol_type = other DNA
aagaaccaccgaacagaaccagtgtgtgtattattacatggtagtccaggctgtgggaaatctctggcaaccactattat

SEQ ID NO: 160822 - DNA, 80 bp, synthetic construct
  source 1..80: mol_type = other DNA
gagaaacttctaccaacagttcaaaggaagaaggagaccctacaagagtgtggcaagttgtccctatatgaagatcaggt

SEQ ID NO: 160823 - DNA, 80 bp, synthetic construct
  source 1..80: mol_type = other DNA
cactctatttgcagacaggtggtacttccagaaagactttgcaaaggttccgctcgttaacatcggtgccagtataggga

SEQ ID NO: 160824 - DNA, 80 bp, synthetic construct
  source 1..80: mol_type = other DNA
agcactgatagtcctggaccagattacatacccacatgcagctgcacaaatggtacatattactgtaaaagtagagatag

SEQ ID NO: 160825 - DNA, 80 bp, synthetic construct
  source 1..80: mol_type = other DNA
tcataggccactccatatatttaactgatgaaaaagttaataaagtatttgaagaacatttatacaaagaagcaggctac

SEQ ID NO: 160826 - DNA, 80 bp, synthetic construct
  source 1..80: mol_type = other DNA
ccagtacagagatcccggagcgcggcgaaacgacggagaccgcgtgccgcacaaagcgccggacgaaacacgcgcaaaag

SEQ ID NO: 160827 - DNA, 80 bp, synthetic construct
  source 1..80: mol_type = other DNA
tgaaaataagggtgtttcacagggctaaacacatcagagcttgggtaccgcgaccacccagagcactaccgtatacatct

SEQ ID NO: 160828 - DNA, 80 bp, synthetic construct
  source 1..80: mol_type = other DNA
acgttaccgccaccaattggaatgaacgctacgttaacatggtcaaatcttttatgaaagctcaacaaaaaccatgcatg

SEQ ID NO: 160829 - DNA, 80 bp, synthetic construct
  source 1..80: mol_type = other DNA
tcctgcacctcagggtcaaggaccggcaagtcacgatagaggtggtctatgctctcctcgaaggaggcaatgtagttatc

SEQ ID NO: 160830 - DNA, 80 bp, synthetic construct
  source 1..80: mol_type = other DNA
gcatacatagaaagtcagccagtagaagtactattagacacaggggctgatgactctatagtagcaggaatagaattagg

SEQ ID NO: 160831 - DNA, 80 bp, synthetic construct
  source 1..80: mol_type = other DNA
aacgaccagctagacctggccagatacaggggttgcaaatttaaattctacagagacacaaacactgactttatagtctc

SEQ ID NO: 160832 - DNA, 80 bp, synthetic construct
  source 1..80: mol_type = other DNA
cacttgcggtttctgcggcttcctttacacatccgttcggctcaccactaacgaacaacccttgtgtaaccttccaggtg

SEQ ID NO: 160833 - DNA, 80 bp, synthetic construct
  source 1..80: mol_type = other DNA
tacagagagtttgtagacaggatcaggaggactgacgttggccgtaggctgtatcttccaccatacagtctgctgcagcg

SEQ ID NO: 160834 - DNA, 80 bp, synthetic construct
  source 1..80: mol_type = other DNA
gctacgtcataagtcacgtgacagggaggagcgacatacccggaagtcatcctcacccacgtgacttaacacgtggtgtg

SEQ ID NO: 160835 - DNA, 80 bp, synthetic construct
  source 1..80: mol_type = other DNA
aatatatccctgacacagaagatgattacccagagtgctgtctagctttactagccaatcaaccagaaccaacaataata

SEQ ID NO: 160836 - DNA, 80 bp, synthetic construct
  source 1..80: mol_type = other DNA
ccattatcattgttgatgggcatggagtcgaattgagcaccaatactaatgctgggacccaagtttttgggtttcaacta

SEQ ID NO: 160837 - DNA, 80 bp, synthetic construct
  source 1..80: mol_type = other DNA
aggcggaagcagccccactttcttacaaaatggcggcggagcacttccggcttgcccaaaatggcgggcaagctcttccg

SEQ ID NO: 160838 - DNA, 80 bp, synthetic construct
  source 1..80: mol_type = other DNA
ccccggtcaacgttgatacgctctcccagggcgaaaacaactgagatcgttatccgcaagacgcctacgcaaaacttagt

SEQ ID NO: 160839 - DNA, 80 bp, synthetic construct
  source 1..80: mol_type = other DNA
ctcaaccgcacgctgctaggagaggtcattaactattatgcccactggtccggtagcattaaactcacattcttgttttg

SEQ ID NO: 160840 - DNA, 80 bp, synthetic construct
  source 1..80: mol_type = other DNA
actctattttaatttcctattcttctgatttagtcatataccgcacaaacacaataggagatgactatattccaacatgt

SEQ ID NO: 160841 - DNA, 80 bp, synthetic construct
  source 1..80: mol_type = other DNA
cacaatatggcatacccacatctcaaggcctagaataccacacaggatttttcagtgccatattcctatctccagtaaga

SEQ ID NO: 160842 - DNA, 80 bp, synthetic construct
  source 1..80: mol_type = other DNA
ttgaatggatgaagtccatgttacctcaggcccaattgaaagtcaagtaccttaatgaactgaaaaaattgagtttgttg

SEQ ID NO: 160843 - DNA, 80 bp, synthetic construct
  source 1..80: mol_type = other DNA
gaggactgagaagccctggaacacggctgagtgaaggcagtaagggcggcaggaacaaaccacgacggagtgctcctaga

SEQ ID NO: 160844 - DNA, 80 bp, synthetic construct
  source 1..80: mol_type = other DNA
ttggaggaggttttagcacaatgcaatttactctacaaagcttatttgaagaatatacaaagcaccataatacatggagc

SEQ ID NO: 160845 - DNA, 80 bp, synthetic construct
  source 1..80: mol_type = other DNA
ggaattaagaaaaaatcaatattgaataaggagactaaagatacagttaagatggaggaatgcttaaataaatatggtat

SEQ ID NO: 160846 - DNA, 80 bp, synthetic construct
  source 1..80: mol_type = other DNA
aaatcctggaagagtgtaaaaagattaacttgtaccaggagcaggtaaacggttacccacaagcaagtgaggatgcccag

SEQ ID NO: 160847 - DNA, 80 bp, synthetic construct
  source 1..80: mol_type = other DNA
gctgagcgtgatttacgcgtgaggatctatatgaaactcaagcatgtgcgggcgtgggttcctaggcccataagatcaca

SEQ ID NO: 160848 - DNA, 80 bp, synthetic construct
  source 1..80: mol_type = other DNA
acggcgaagatcttttccaccaccagcttgcgcagcaacggttcctccagccaatcgaactgttgacggatgtgcaacag

SEQ ID NO: 160849 - DNA, 80 bp, synthetic construct
  source 1..80: mol_type = other DNA
tcggccatcttccgcgagcgcgaggaaagcgaactgggctgcgagttgctggccggcggtcgcgttttccactgcgacca

SEQ ID NO: 160850 - DNA, 80 bp, synthetic construct
  source 1..80: mol_type = other DNA
gagtaataatctatgtagtacaattgttaagtaggcttaggaaagggtataggccagtgttctcctcccctcccttgtat

SEQ ID NO: 160851 - DNA, 80 bp, synthetic construct
  source 1..80: mol_type = other DNA
tgtcaactgataaccagcacaataaaccctgaaattaatatcaattgatggtggtttatcgttgatgtatacagtaatca

SEQ ID NO: 160852 - DNA, 80 bp, synthetic construct
  source 1..80: mol_type = other DNA
gctaccaccaaaaattcatagatgaaggctttccaacctcctggtatggaaacatagcaaactgccacctaacaggcatt

SEQ ID NO: 160853 - DNA, 80 bp, synthetic construct
  source 1..80: mol_type = other DNA
accccaagaaacaggaagacagacagctctcttcctgttaaaactggccagcagatggcctatcacacacctacacacag

SEQ ID NO: 160854 - DNA, 80 bp, synthetic construct
  source 1..80: mol_type = other DNA
ctgggcattcacgataatgtggctatcctaccaactcatgcatcaccgggcgagagcatagtcatcgatggcaaggaggt

SEQ ID NO: 160855 - DNA, 80 bp, synthetic construct
  source 1..80: mol_type = other DNA
catgtgcacttagagacttgactgatacaaacttagagattaccatagtcaaattagaccgtaatcaaaagtttagagac

SEQ ID NO: 160856 - DNA, 80 bp, synthetic construct
  source 1..80: mol_type = other DNA
ggataatatctgcaatggtcataataataaggaactcctctgatccacaaactatattagcaacactcacattgattgga

SEQ ID NO: 160857 - DNA, 80 bp, synthetic construct
  source 1..80: mol_type = other DNA
aaatactaacagtacacaaacatatgccccttctggctcccaagaatctatagtttggggacaatcagactggcaggcct

SEQ ID NO: 160858 - DNA, 80 bp, synthetic construct
  source 1..80: mol_type = other DNA
tgtggggtgtactactgtgagtctatgagaaaatactacccaatcactgtgaccggacccacattccgctacatggaagc

SEQ ID NO: 160859 - DNA, 80 bp, synthetic construct
  source 1..80: mol_type = other DNA
cgggccagaggtaagtggactttaattttttctgctaagcccaacactccaccacacccaggcacacactacacacaccc

SEQ ID NO: 160860 - DNA, 80 bp, synthetic construct
  source 1..80: mol_type = other DNA
aactacgcaatggaggtatggggagtacaaccctgccaataacagttacaatagcaccatgcaaatcagagttttctggc

SEQ ID NO: 160861 - DNA, 80 bp, synthetic construct
  source 1..80: mol_type = other DNA
tctgtcatgtaaatttcttcctttatatgccagtgaagctaaaagaatcaaagccctatacaacaaatgcaatgtaatca

SEQ ID NO: 160862 - DNA, 80 bp, synthetic construct
  source 1..80: mol_type = other DNA
cattgttggtattcatgttggtgggaatggacgcgtgggttactgtgcagccttactccgaaaatacttctgtgaaactc

SEQ ID NO: 160863 - DNA, 80 bp, synthetic construct
  source 1..80: mol_type = other DNA
ggagatggaggcgccgccgcagacgacctctcgcccgcagacgtcgaagacctgctcgactggctagacgccccagagta

SEQ ID NO: 160864 - DNA, 80 bp, synthetic construct
  source 1..80: mol_type = other DNA
ccctctcgtatcctggaatgataacatccaaatagcagtggaccattactcagcccagttgtacatgctagacattaatc

SEQ ID NO: 160865 - DNA, 80 bp, synthetic construct
  source 1..80: mol_type = other DNA
gtcttccacacgtgtggcgacgatagacgccaccaaggtagctaccagaagcagctggatccgcatggcattaccgtatg

SEQ ID NO: 160866 - DNA, 80 bp, synthetic construct
  source 1..80: mol_type = other DNA
ttgccctgccactgccgcctgtgtcagcaacaccggctaaacggcctaagagtgatatgagctggagaccacccgttcac

SEQ ID NO: 160867 - DNA, 80 bp, synthetic construct
  source 1..80: mol_type = other DNA
aaatgtgtggtactgtgctttgtatcagcatgcaatgacttttccgtgcgcatgctacgtgataccccattcatcgggca

SEQ ID NO: 160868 - DNA, 80 bp, synthetic construct
  source 1..80: mol_type = other DNA
acacccgtgcttgggtgccgcgaccacctagggccacagagtatacacacaagaatagtactaactacaacaggaaggtg

SEQ ID NO: 160869 - DNA, 80 bp, synthetic construct
  source 1..80: mol_type = other DNA
ggtcagcagctctgagaagaagtcccccgtggcctggaggagatcgtcccgctctcgccttgtcagcagctggggcttct

SEQ ID NO: 160870 - DNA, 80 bp, synthetic construct
  source 1..80: mol_type = other DNA
gaggtggaggagacgatacagacgctggcgcagacgcggggggcgacgcagacacagaaaaaaactaataattaaacagt

SEQ ID NO: 160871 - DNA, 80 bp, synthetic construct
  source 1..80: mol_type = other DNA
attgaggaatattttactaaagatcaggacgacgccaacagatacatgtcatggaccataaatgccaggagaatggtaca

SEQ ID NO: 160872 - DNA, 80 bp, synthetic construct
  source 1..80: mol_type = other DNA
ctacatcttctgcaccaaacgagtgagtatggcacatgttaataattacctacttgttacactcctgcttataagtatct

SEQ ID NO: 160873 - DNA, 80 bp, synthetic construct
  source 1..80: mol_type = other DNA
caaccagggttggactcagtattcaagaggacgcttttgggtgaggtgcttaactattacgcacactggtcgggaagcat

SEQ ID NO: 160874 - DNA, 80 bp, synthetic construct
  source 1..80: mol_type = other DNA
cacgacactattgggtgaggtcttgaactacttctcaaattggtcgggttctgttaagcttacgttcttttgtgtttgca

SEQ ID NO: 160875 - DNA, 80 bp, synthetic construct
  source 1..80: mol_type = other DNA
atcgacaccctttcttggtctgagacaattgcacccctcactgttttctctggacccaaggccctcacccctggtgtcta

SEQ ID NO: 160876 - DNA, 80 bp, synthetic construct
  source 1..80: mol_type = other DNA
tccgcaaaaccaggcagaaagtgccactgccactgcaggatctgctgcctgcacaggaaaaacgggcttgtcgttcaccg

SEQ ID NO: 160877 - DNA, 80 bp, synthetic construct
  source 1..80: mol_type = other DNA
ttcctttatttcccccccccccatccccggtcgcttatgcgtgtcaaacactaccaataaagataatctgccaatagcac

SEQ ID NO: 160878 - DNA, 80 bp, synthetic construct
  source 1..80: mol_type = other DNA
aacgagctattaacaaatgtagggaaactgaagaaagggttagatacactggctcccttatatgctgcagagaacaagaa

SEQ ID NO: 160879 - DNA, 80 bp, synthetic construct
  source 1..80: mol_type = other DNA
tacttggtttggatttaatggcactagatcagaaaatagaacttatatatactggcatggtagagacaatagaacaataa

SEQ ID NO: 160880 - DNA, 80 bp, synthetic construct
  source 1..80: mol_type = other DNA
cgcgggtgtgcggggacgggggaagcagacggggtgttgcgggagtgtgcagagaaggtagcggggacgagggtggcggc

SEQ ID NO: 160881 - DNA, 80 bp, synthetic construct
  source 1..80: mol_type = other DNA
ggcgctgcacctcagagacctcctgctcaaagaggcctcccaccgccacgtagacgcgggccaccgtccggggaaggtca

SEQ ID NO: 160882 - DNA, 80 bp, synthetic construct
  source 1..80: mol_type = other DNA
caagtatacagattacaatgaaaagaataactttagatcttggtcaataagtataaaggagatggcacaaataagaagaa

SEQ ID NO: 160883 - DNA, 80 bp, synthetic construct
  source 1..80: mol_type = other DNA
aagttcaatagaagggggtacaaaccagtaccactacgaacaagcacttctgtttccccggtgacattgcatagactgct

SEQ ID NO: 160884 - DNA, 80 bp, synthetic construct
  source 1..80: mol_type = other DNA
gtctgtttgggtttgttggttcacgtggtgctaacttgaattttttggttttctagttccctcttaattacatttgtgcc

SEQ ID NO: 160885 - DNA, 80 bp, synthetic construct
  source 1..80: mol_type = other DNA
ggtttgccaaccagaatgcccagtggtgccaatcagttcatgacaacagaggatgagcagtcaggcaatatattacccaa

SEQ ID NO: 160886 - DNA, 80 bp, synthetic construct
  source 1..80: mol_type = other DNA
tttctacgcagggctcaccagaaaaggaaactgctactgcaaattgtgccagctacaccgcaggcacctgccatgagctt

SEQ ID NO: 160887 - DNA, 80 bp, synthetic construct
  source 1..80: mol_type = other DNA
atatacacctgtgctcacctcactcatcccaatgacaaaacaatcctgttggcattgactgcagatttacaagttgatgc

SEQ ID NO: 160888 - DNA, 80 bp, synthetic construct
  source 1..80: mol_type = other DNA
tcgagtgcctagaggactacaagcggttgacccgaaacacgtcgcgcccccgctcgtgttccacacctgggattacagaa

SEQ ID NO: 160889 - DNA, 80 bp, synthetic construct
  source 1..80: mol_type = other DNA
gtcacggagaagggttgggaattcgtttggggaaatcatccacccaaacgttactgggcccaggagacagctccgggcga

SEQ ID NO: 160890 - DNA, 80 bp, synthetic construct
  source 1..80: mol_type = other DNA
tgcaggagtcgcgtctcgtgcggcagcaccggcgtgtcgccgcgactaaacacggctttcagcacgtgccccgaaatggg

SEQ ID NO: 160891 - DNA, 80 bp, synthetic construct
  source 1..80: mol_type = other DNA
aaagcgggtgcagtaacaggtaatctctggtagtgatttggacccgaaatctgacactttagagctctggaggactttaa

SEQ ID NO: 160892 - DNA, 80 bp, synthetic construct
  source 1..80: mol_type = other DNA
gcttccttcactaacgcactttctcctctttccccagtcaccctcctactcatcgctctctggaatttgcacggacaggc

SEQ ID NO: 160893 - DNA, 80 bp, synthetic construct
  source 1..80: mol_type = other DNA
ctattccctaacacacagaaaaaaaaaaagttctccaagttcgactgggagacagaggcgcagctagctgcctgcttcga

SEQ ID NO: 160894 - DNA, 80 bp, synthetic construct
  source 1..80: mol_type = other DNA
cccgagcacgaagatgtcctccacgtcctccccgtacagatggcgactgatgccgttcatgagcgcccggcacagctggt

SEQ ID NO: 160895 - DNA, 80 bp, synthetic construct
  source 1..80: mol_type = other DNA
ttggagatgggttcactagctctattagagaaactctggtgtctgcctgtgatgtatcagataaactcaccgggaaaatc

SEQ ID NO: 160896 - DNA, 80 bp, synthetic construct
  source 1..80: mol_type = other DNA
gccggcggagacgctggagaaaactacgcgcccgaagacctagacgccctgttcgccgccgtcgcaggagacgtcgaaga

SEQ ID NO: 160897 - DNA, 80 bp, synthetic construct
  source 1..80: mol_type = other DNA
atcccaaagtggtaactgcaggaccaagtgacatgtatgttcatgttggtaacttaatttatagaaacctacacctcttt

SEQ ID NO: 160898 - DNA, 80 bp, synthetic construct
  source 1..80: mol_type = other DNA
tgaaccttacgaagggagaaacagcacacgagtttgcggcaactaagactacaggtgagcatacagtgcaatcaatagtg

SEQ ID NO: 160899 - DNA, 80 bp, synthetic construct
  source 1..80: mol_type = other DNA
actgtggtgcagcaactgcgccaggagaagaagaacagaaagtgcgtggaacacaacctcacagccatattccaaggctt

SEQ ID NO: 160900 - DNA, 80 bp, synthetic construct
  source 1..80: mol_type = other DNA
catcgtcaggtcctcttccacgtcagagcccagcgtgacgtgcataaagagcttgccggagggcacgtcctcgcagaagg

SEQ ID NO: 160901 - DNA, 80 bp, synthetic construct
  source 1..80: mol_type = other DNA
atatccgatggcctttccctgtcttcctcgtatgctccttctcctcctcctcccggcacgcccctgagatctgcctcccc

SEQ ID NO: 160902 - DNA, 80 bp, synthetic construct
  source 1..80: mol_type = other DNA
ttaccaaagagaacaacggaggccaagaatttaaaacaggcaaaagtaccagatttggctttaactcttacaatccgaaa

SEQ ID NO: 160903 - DNA, 80 bp, synthetic construct
  source 1..80: mol_type = other DNA
gaaagtcattccagcacatcaaattcagcacctgcattggatgctgctgaaactgggcacactagcaatgtacagcctga

SEQ ID NO: 160904 - DNA, 80 bp, synthetic construct
  source 1..80: mol_type = other DNA
ccgggtctgatctcgcgtctgttgagtgaggaagtttcgccacgcgccaacctagacgcttacgcgcgcgtgtgcgatcg

SEQ ID NO: 160905 - DNA, 80 bp, synthetic construct
  source 1..80: mol_type = other DNA
agtatcaagcaagctaatatgggtaaatttgggcaacaatctgacagggcccactgggcgctagcactctgattctacgg

SEQ ID NO: 160906 - DNA, 80 bp, synthetic construct
  source 1..80: mol_type = other DNA
aaaaatcctgacaatactaacaatgaagacgcttccgactttaataactgggttgaaaaaaccttcaaaacaggcaagtt

SEQ ID NO: 160907 - DNA, 80 bp, synthetic construct
  source 1..80: mol_type = other DNA
atcagggctttgggcgcagagacgtattcccgaagcagctccccggcgttggactccacgtcgggccaggtgtcccagta

SEQ ID NO: 160908 - DNA, 80 bp, synthetic construct
  source 1..80: mol_type = other DNA
atggcacccctggaacgaaaccagcgaggaggaagaagaccagaaagaagactccccctcgccgcaaacgaaggcaccat

SEQ ID NO: 160909 - DNA, 80 bp, synthetic construct
  source 1..80: mol_type = other DNA
cgagttgtgtgctgtgtgtaccgtggattagccagacacactacaggtatgtgcagagtgacacctacaccgacgccgga

SEQ ID NO: 160910 - DNA, 80 bp, synthetic construct
  source 1..80: mol_type = other DNA
cgcctaggttatgccagtatgtaaatgcatcaactgtgaactttgaaccagccaacataacggagtcacgcgccgacatc

SEQ ID NO: 160911 - DNA, 80 bp, synthetic construct
  source 1..80: mol_type = other DNA
tttgcggttccatgatggcaactggaaagctgttggtgtcctatgctcccccaggtgctgacccgccaaagaagcgaaaa

SEQ ID NO: 160912 - DNA, 80 bp, synthetic construct
  source 1..80: mol_type = other DNA
ttctacacatttgatacgggattatggaaaccagatgtatgttacaatgtcactgtgcactcgacatatcaaacatacat

SEQ ID NO: 160913 - DNA, 80 bp, synthetic construct
  source 1..80: mol_type = other DNA
agatccgcatgcgtcaccttattagaagtggagaatttcaatgccaccgaagcagctgataagaagaaacaattcaccgt

SEQ ID NO: 160914 - DNA, 80 bp, synthetic construct
  source 1..80: mol_type = other DNA
ggccagtgtggtggtgtgttgtgtacaactggtaagatctttggaatacatgtgggtggcaatggaagacagggtttctc

SEQ ID NO: 160915 - DNA, 80 bp, synthetic construct
  source 1..80: mol_type = other DNA
caacccggttcaagttcggtactcatgagaacattgctgggtgagattttaaactactacacccattggagtggtagcat

SEQ ID NO: 160916 - DNA, 80 bp, synthetic construct
  source 1..80: mol_type = other DNA
acggcctgacgacttgcggggacgggggggcttttgcgctagggacttgcgtggacggttggcttttgcgctgaactggt

SEQ ID NO: 160917 - DNA, 80 bp, synthetic construct
  source 1..80: mol_type = other DNA
acagacactttatcaaaaccagacctctcatcagctcagcgggaccgagtgacatgtttgtgcacacaagagatgcaatt

SEQ ID NO: 160918 - DNA, 80 bp, synthetic construct
  source 1..80: mol_type = other DNA
gaacaatactgtctcagaagacaaaggatggaacattaacatacaaacacaaagagacagcaactacaattggtatccac

SEQ ID NO: 160919 - DNA, 80 bp, synthetic construct
  source 1..80: mol_type = other DNA
aaaaacagactctagatatgacaaaacacgcagcaaatgccttatagaaaaactacctctctgggcggcagtatacgggt

SEQ ID NO: 160920 - DNA, 80 bp, synthetic construct
  source 1..80: mol_type = other DNA
actcctgttgtaaccttccaagtattgcgcagcatgtacaacgacgcccttagcatacttccctctaactttgaaaaaga

SEQ ID NO: 160921 - DNA, 80 bp, synthetic construct
  source 1..80: mol_type = other DNA
gcaaccaccctgcttggtgaggtgctgaactactttggaaattggtcaggtagtattaaagtgacattcatgtgtgtgtg

SEQ ID NO: 160922 - DNA, 80 bp, synthetic construct
  source 1..80: mol_type = other DNA
cgtgagactgttgaaagacactccattcattgagcaaaagactgatctacagggggatgacgtggcaacggtgagtaaca

SEQ ID NO: 160923 - DNA, 80 bp, synthetic construct
  source 1..80: mol_type = other DNA
cagcacccaccattttgtcacctctgtcacaaccgaggcttacccctccacaaccactcatgatgccaccaaggcctacc

SEQ ID NO: 160924 - DNA, 80 bp, synthetic construct
  source 1..80: mol_type = other DNA
caaagaaacagggtgactcatggcttcggaaatttactgaatgctgcaatgctgcaaaaggtttagagtggatcagtatg

SEQ ID NO: 160925 - DNA, 80 bp, synthetic construct
  source 1..80: mol_type = other DNA
gcatcaggtctaaatgtccagtggaggagtcagaggcgtctatgccgccaacgacgcttccttgtttgtgcatacatgct

SEQ ID NO: 160926 - DNA, 80 bp, synthetic construct
  source 1..80: mol_type = other DNA
acggggcatacatcacaagcagtgcctagcgatactattcagacaaggtgtgtgctgaatcgtcacaagcgttcagagtc

SEQ ID NO: 160927 - DNA, 80 bp, synthetic construct
  source 1..80: mol_type = other DNA
cccccccccgggaatggtggggttccccctttgggatggttttgcccccccggcccgccaccgtgctaaatccaccgccc

SEQ ID NO: 160928 - DNA, 80 bp, synthetic construct
  source 1..80: mol_type = other DNA
tatgaagcaataggtaagacaaattatcctaaagtgattactccagtgattaagaaaagagatgacataataacatatgg

SEQ ID NO: 160929 - DNA, 80 bp, synthetic construct
  source 1..80: mol_type = other DNA
gccggcctcttcttgtcgggctgctgcgaacagtgctaatgcgtaggcgaaggccatttctaccgtgcggcggtccagca

SEQ ID NO: 160930 - DNA, 80 bp, synthetic construct
  source 1..80: mol_type = other DNA
taacgagagcctatctataacagagcctgctaataatgaagaaacatttttagacaacttttttaaaaatgcattcccag

SEQ ID NO: 160931 - DNA, 80 bp, synthetic construct
  source 1..80: mol_type = other DNA
cctacacacgcacaggcagacgacacaattctgattgatggtgttgagacaaaaatcttaaagcaaacagttgtcacaga

SEQ ID NO: 160932 - DNA, 80 bp, synthetic construct
  source 1..80: mol_type = other DNA
cacgccgcccgcggcgttaggtggctgttgctgcgcggccggtggcgactggctctcggccgtgggtcatgttctgggcc

SEQ ID NO: 160933 - DNA, 80 bp, synthetic construct
  source 1..80: mol_type = other DNA
ggcacctttgtatccacttacacaccagacaccagctctgttccaaagcgagaatttcagccggttgactatctgtttgg

SEQ ID NO: 160934 - DNA, 80 bp, synthetic construct
  source 1..80: mol_type = other DNA
tcttaaaaaagtacaggacgaatacaaaggacaaccaaatttaaaaaacctaatacatccagtattctgtcaatacgtag

SEQ ID NO: 160935 - DNA, 80 bp, synthetic construct
  source 1..80: mol_type = other DNA
agctttgcaatgggggtaggcacaacactggatagatcaatgggtgcactcaacatcaatagatcctacctagagcctat

SEQ ID NO: 160936 - DNA, 80 bp, synthetic construct
  source 1..80: mol_type = other DNA
aatacaggaaaccaccagggtgacaagatatttgctttccaaatacaaccagggttggattcagtgttcaagagaacact

SEQ ID NO: 160937 - DNA, 80 bp, synthetic construct
  source 1..80: mol_type = other DNA
accacagcacaaaacaaaaagatacaataaaaacaactttgctaaagaaactaatgtgttccatgcaacatcctccttcc

SEQ ID NO: 160938 - DNA, 80 bp, synthetic construct
  source 1..80: mol_type = other DNA
tctcctcaccagaggccatagataggagatttttcctggactgtgatgtgaagattatgccagcattcaataccaatagt

SEQ ID NO: 160939 - DNA, 80 bp, synthetic construct
  source 1..80: mol_type = other DNA
atagagaattttctcagtcggtccgcttgcgtttatatcgaagaatactacaccaaggacttagaccagaagaacaggta

SEQ ID NO: 160940 - DNA, 80 bp, synthetic construct
  source 1..80: mol_type = other DNA
aatcattcactcttggcacccccaaccatatcatcacttccagcaatgaataggaggttctacttggatttggatattct

SEQ ID NO: 160941 - DNA, 80 bp, synthetic construct
  source 1..80: mol_type = other DNA
ggcatgctcatgcgcagcaaatacaaagtattgatccccagctggcagaccaaacccaagggtcgcaagacagttaaggt

SEQ ID NO: 160942 - DNA, 80 bp, synthetic construct
  source 1..80: mol_type = other DNA
tggcctgggtcattagtggcttcgggtagcgtccgatccacgtactcgctcacgatggccgtcagggcagcctcggctga

SEQ ID NO: 160943 - DNA, 80 bp, synthetic construct
  source 1..80: mol_type = other DNA
aactatggaatctcattaacaaatgacatgggaactttatgtttccgtgctttagatggaacaggagcgagtgatatcaa

SEQ ID NO: 160944 - DNA, 80 bp, synthetic construct
  source 1..80: mol_type = other DNA
ttagggagagtcaggccactacatcaaatgcagcacctgccctggatgcagccgagactgggcacacaagcagtgttcaa

SEQ ID NO: 160945 - DNA, 80 bp, synthetic construct
  source 1..80: mol_type = other DNA
tcctggagactgcatctgaactggggcataaacagggcgtggcaggacgtgcaggccgacaggtagtccaccagggcctt

SEQ ID NO: 160946 - DNA, 80 bp, synthetic construct
  source 1..80: mol_type = other DNA
actacgttaaaacagattcatctgacttagggcaattgaaagtgtacgtgtggacgcccctcagtattccttcaggttct

SEQ ID NO: 160947 - DNA, 80 bp, synthetic construct
  source 1..80: mol_type = other DNA
gggccctgccggcacccacaggacaaaacacacaggtgagcagtcatcggctagacactggtgaagttccagcgctccaa

SEQ ID NO: 160948 - DNA, 80 bp, synthetic construct
  source 1..80: mol_type = other DNA
gtccactttaattgaacagatggaggctttcatcgagccaagacctagtgtctttaaatgttttgccaacaaggtagcca

SEQ ID NO: 160949 - DNA, 80 bp, synthetic construct
  source 1..80: mol_type = other DNA
gcagtcactgaccagcgtggcgatcaccggttgagtaaggatgatcaccttccggaaatgcacaccaccggagcctttgg

SEQ ID NO: 160950 - DNA, 80 bp, synthetic construct
  source 1..80: mol_type = other DNA
atgcactttcgcagagtctcagcgaaaaggaaactgctactgctacctctgcaccctgcatcgcagacacctgccatgag

SEQ ID NO: 160951 - DNA, 80 bp, synthetic construct
  source 1..80: mol_type = other DNA
ggtattggaacttgacccctgaaaagggatggttaagccagtatgcagtaagattaacctggtacacaagaaaattttat

SEQ ID NO: 160952 - DNA, 80 bp, synthetic construct
  source 1..80: mol_type = other DNA
gatttgcccgaacgcccataaaagatgaagacacagattcaggagatacatactacggccaaacctctataaacgatttt

SEQ ID NO: 160953 - DNA, 80 bp, synthetic construct
  source 1..80: mol_type = other DNA
catatcaaacttaggaaaagctttcggtgctggtttcaccgaccaaattacaagcaaaattggggaattgcaagatacag

SEQ ID NO: 160954 - DNA, 80 bp, synthetic construct
  source 1..80: mol_type = other DNA
cgtctaagttcaaaggtcaggccctcggcgtcatcacaaaatggctgacaatctcttccgggtaaaaggtcatacatacg

SEQ ID NO: 160955 - DNA, 80 bp, synthetic construct
  source 1..80: mol_type = other DNA
aggtgtgtgaaagatgatttcacagagggaggttacatttgtgccttttatcaaactgccatcatagttcccccaaatac

SEQ ID NO: 160956 - DNA, 80 bp, synthetic construct
  source 1..80: mol_type = other DNA
ccagggccaggcgacgctcccgggcaaacagggcagagaggcgggaatggccgccaccctccccctgccccgttgcaccg

SEQ ID NO: 160957 - DNA, 80 bp, synthetic construct
  source 1..80: mol_type = other DNA
gccggacgggccgggctctcgtgccccagccggccgtggcacctccgggctctcccgggacgcctcctcctcgcctcggc

SEQ ID NO: 160958 - DNA, 80 bp, synthetic construct
  source 1..80: mol_type = other DNA
catagatctaccccctttaaaagatgaaaacaccttagataccactaagggaaaccaaactaacaaagaagcagtacaaa

SEQ ID NO: 160959 - DNA, 80 bp, synthetic construct
  source 1..80: mol_type = other DNA
tcccgcggccgtgtcaaactggaactcgactctagatctccatgggctggaaaatcagagcctagtcagagagaaccgaa

SEQ ID NO: 160960 - DNA, 80 bp, synthetic construct
  source 1..80: mol_type = other DNA
acaaaagcaaatgtgagatatttgacctaccgctgtgggccaccttcacaggatactcagagttctgttcaaaagttaca

SEQ ID NO: 160961 - DNA, 80 bp, synthetic construct
  source 1..80: mol_type = other DNA
ccccggacgtgtgaataggcctcaccaaggctgaagctgtagcgttcgttatccgctcacctactgcgcaaagattagta

SEQ ID NO: 160962 - DNA, 80 bp, synthetic construct
  source 1..80: mol_type = other DNA
tcgcagcgcaaaccgcacgaaaagcggagcgccgcgcaaacacccgcagaaggatcccctcagcccggtcccgcgaacag

SEQ ID NO: 160963 - DNA, 80 bp, synthetic construct
  source 1..80: mol_type = other DNA
ctatgaatacagactgggctggttcagcaacatattcgtgggccccaacagatacaacactcaatttcaaaccgcatata

SEQ ID NO: 160964 - DNA, 80 bp, synthetic construct
  source 1..80: mol_type = other DNA
tgagcgcggcgctgcttctcttgctggctctatcaacaatgcttctgcttccctcaacaacctcaaccaaaccttcaatg

SEQ ID NO: 160965 - DNA, 80 bp, synthetic construct
  source 1..80: mol_type = other DNA
agagtggtaaacagacacttagctacatgtgaggattggcagaggtgcgtgtgggaggattataatagagatctccttgt

SEQ ID NO: 160966 - DNA, 80 bp, synthetic construct
  source 1..80: mol_type = other DNA
tgacagaatatgtgtagtccctacacattctcaaccagaagatgaggtgctagttaatggttttaaagtcaaagtcaagg

SEQ ID NO: 160967 - DNA, 80 bp, synthetic construct
  source 1..80: mol_type = other DNA
cacagacaagtggtactttcaaaaggacttatgcaaattacccctgctaacggtttccgcctctgcggctaacctgcggt

SEQ ID NO: 160968 - DNA, 80 bp, synthetic construct
  source 1..80: mol_type = other DNA
cattactccattgcaactcatgacatttgtgggcctttactccttttttacacttctgacacagtgaaggttctgcagca

SEQ ID NO: 160969 - DNA, 80 bp, synthetic construct
  source 1..80: mol_type = other DNA
caagctgcagtatactgtgttttgtctcagcatgcaatgacttttccgttaggatgcttagggataccaagtttatcagt

SEQ ID NO: 160970 - DNA, 80 bp, synthetic construct
  source 1..80: mol_type = other DNA
gtctacgtgataatataaatgagtgcacttccgaatggctgagtttatgctgcccgtccgcggagaggagccacggcaga

SEQ ID NO: 160971 - DNA, 80 bp, synthetic construct
  source 1..80: mol_type = other DNA
tgaagcccaagcacgtgaaagcttggatcccaaggcccccgagactttgtgattacgaaaaatcaggtaataccaatttc

SEQ ID NO: 160972 - DNA, 80 bp, synthetic construct
  source 1..80: mol_type = other DNA
ataatattgcatttagtaactgaataaaaatagcacctaatcatattcttacaatggtttgctatttgaccatagatcgg

SEQ ID NO: 160973 - DNA, 80 bp, synthetic construct
  source 1..80: mol_type = other DNA
ccatggacagcatgttgcgacacaacaatgtgtcacttgtcattatacccatttgccccctgcgggctcccactggatcc

SEQ ID NO: 160974 - DNA, 80 bp, synthetic construct
  source 1..80: mol_type = other DNA
agacgacctcgacgccctgttcgccgccgtcgaagaagagcaacagtaaggagaaggaggtgggggcgcagacggtggcg

SEQ ID NO: 160975 - DNA, 80 bp, synthetic construct
  source 1..80: mol_type = other DNA
tggagaacaataaagcgttgatttctcaagttccgctctggttttggtttcgttttcaaagggagccccatcatggccca

SEQ ID NO: 160976 - DNA, 80 bp, synthetic construct
  source 1..80: mol_type = other DNA
ttgtggttggaacaaatgtcgcaaaagtttgccccacattatgccgttgaatcaaaaagaatcagggaactcaagaacaa

SEQ ID NO: 160977 - DNA, 80 bp, synthetic construct
  source 1..80: mol_type = other DNA
atggcgtctaacttccgcttttttgaaaaaaggcgcgaaaaaacggcggcggcggtatagaaaatggcgacggggcagac

SEQ ID NO: 160978 - DNA, 80 bp, synthetic construct
  source 1..80: mol_type = other DNA
agattcaagtggctaacagagctaaactcaaactcaaacacacaccacataaacagcacctacgcagcaggcaaaattaa

SEQ ID NO: 160979 - DNA, 80 bp, synthetic construct
  source 1..80: mol_type = other DNA
ctatccttgtctccagctagtgatccaagattggcatttaccatgttgggagagattttaaactattacacacactgggc

SEQ ID NO: 160980 - DNA, 80 bp, synthetic construct
  source 1..80: mol_type = other DNA
gtcatatgggacattgggttacaatctagttgtgtgttgtgtgtgccttggataagtcaaacacattacaggtacgttat

SEQ ID NO: 160981 - DNA, 80 bp, synthetic construct
  source 1..80: mol_type = other DNA
gaggctcagtttagagtaccctcatataagccagatggtacagacaacgacaacaaaagtacgtggaccaatatgtggtc

SEQ ID NO: 160982 - DNA, 80 bp, synthetic construct
  source 1..80: mol_type = other DNA
aaaaagcgaaatgtaaatgtacatttcaactactgcacatatagtccagacaaagacaaactagaaactttaagaaaata

SEQ ID NO: 160983 - DNA, 80 bp, synthetic construct
  source 1..80: mol_type = other DNA
gtgatcggcgtggtagaggtagcgcaccgatatagtatttacctcgcgtttggctttgagcgccgtcactagttcattgt

SEQ ID NO: 160984 - DNA, 80 bp, synthetic construct
  source 1..80: mol_type = other DNA
gtcgccactgggacaggcctgccagaaagtacctgtcagacagcccctactacccctgtcgggctcgcggtggtcgggaa

SEQ ID NO: 160985 - DNA, 80 bp, synthetic construct
  source 1..80: mol_type = other DNA
ggcaagtagtttctagacagaagttaaaagaccttaatttgtccccagtcaacactcccactaagacaaagttacaccca

SEQ ID NO: 160986 - DNA, 80 bp, synthetic construct
  source 1..80: mol_type = other DNA
acatttagaacacaatccaacttttcacacccacaattaacattaccacaagcatccacaaacacaaccaatgaccaata

SEQ ID NO: 160987 - DNA, 80 bp, synthetic construct
  source 1..80: mol_type = other DNA
gggtgtttttgcacggagcttttgcgcggcgccgcgtttgcggcggccacggtggtttttggccgcgctgaacgccggcg

SEQ ID NO: 160988 - DNA, 80 bp, synthetic construct
  source 1..80: mol_type = other DNA
tttcacagaaaagctactgaagaaccttataaaactcattagcagcttggtgatcattactagaaactatgaagacacca

SEQ ID NO: 160989 - DNA, 80 bp, synthetic construct
  source 1..80: mol_type = other DNA
cccggagaagacggtgttctctcgggcggtacgctctctggatctataatatctatagtagctaaacgagactgtgagta

SEQ ID NO: 160990 - DNA, 80 bp, synthetic construct
  source 1..80: mol_type = other DNA
tgaagagagggtttcgagtggataagaggtataacttccttattcacccagttttcccggagaaagaaatttttgaatca

SEQ ID NO: 160991 - DNA, 80 bp, synthetic construct
  source 1..80: mol_type = other DNA
catatgagaattgcatcatcacattatgcagcacaattgattactcttgacatcaacccaaaccctattacgcttgaaga

SEQ ID NO: 160992 - DNA, 80 bp, synthetic construct
  source 1..80: mol_type = other DNA
atttgacattgaactcacttttgtcatcactgagcgctttgcagctagtggcgatggttccagcaggcactatgtgtacc

SEQ ID NO: 160993 - DNA, 80 bp, synthetic construct
  source 1..80: mol_type = other DNA
tgcagggcctctgagaccatggggtccaggatgcggtcaatgccatcctgcacctcagggtcaaggaccggcaagtcacg

SEQ ID NO: 160994 - DNA, 80 bp, synthetic construct
  source 1..80: mol_type = other DNA
ttgtcaggggcttcaacaggtggtcccacactaacgaggacctagacctggcccgctacaggggctgcaaatggactttt

SEQ ID NO: 160995 - DNA, 80 bp, synthetic construct
  source 1..80: mol_type = other DNA
gggggacacaatgcaaactcgacacgtcatgaactttcacaccagatctgaatcctcattggagaacttcctggtgcgtg

SEQ ID NO: 160996 - DNA, 80 bp, synthetic construct
  source 1..80: mol_type = other DNA
aatgcaaaaagatcccgttgtacaaggaacaagtgagagcgtttgctacagcctcagaagatgcacaggatgaactgatg

SEQ ID NO: 160997 - DNA, 80 bp, synthetic construct
  source 1..80: mol_type = other DNA
agaaaagggatttaattgacaagaataccaaagatatatctaaacttaaaatcgcattagataaatatggagtggattta

SEQ ID NO: 160998 - DNA, 80 bp, synthetic construct
  source 1..80: mol_type = other DNA
atttgcacaaatacagtaccaattacaacaaacccaagacaaaaggcagcaatgagttagaacccaagcatttccttaag

SEQ ID NO: 160999 - DNA, 80 bp, synthetic construct
  source 1..80: mol_type = other DNA
actacatctctacggtgtaaacacaactcattcaggtagatatactgcacgttgtcatatctatgaacataatgatcacg

SEQ ID NO: 161000 - DNA, 80 bp, synthetic construct
  source 1..80: mol_type = other DNA
gtgctttggcaggtaagcatcctgatcccccgcggaagctgctcacgtggcaactgtggggacccagacaggttatcaaa

SEQ ID NO: 161001 - DNA, 80 bp, synthetic construct
  source 1..80: mol_type = other DNA
gaataatatcagcaatggttataataattagaaataactctgacccacaaacaatcattgctactctaaccttgattggc

SEQ ID NO: 161002 - DNA, 80 bp, synthetic construct
  source 1..80: mol_type = other DNA
atcaatggcaaacagccaccaacccttcaatattcgcaaagttgagtgacccaccgccccaagtgtctgtcccattcatg

SEQ ID NO: 161003 - DNA, 80 bp, synthetic construct
  source 1..80: mol_type = other DNA
gacctataggaatccaagataattgctaccaacatgttaattccttatggggagactcagtttactacacagacagtact

SEQ ID NO: 161004 - DNA, 80 bp, synthetic construct
  source 1..80: mol_type = other DNA
ctgactaatttatcttttgaagccagtttaatagatagattatgtaaatcaaaacacattttcaaaaacatatgttatga

SEQ ID NO: 161005 - DNA, 80 bp, synthetic construct
  source 1..80: mol_type = other DNA
caactcgtagtggtgccccaggtatgaaacagagccaagatgcatgtgtacatcgagcatgtctgcgttcccgggagcct

SEQ ID NO: 161006 - DNA, 80 bp, synthetic construct
  source 1..80: mol_type = other DNA
tgccaaaatggggcactagctataaacaccttctccgccaccgtgtggataccaccccctgctggaccaagagagcaaga

SEQ ID NO: 161007 - DNA, 80 bp, synthetic construct
  source 1..80: mol_type = other DNA
tcccgtcgccgttccttatgacgatccgttaacaagtgaggagactgacctggcctatgcccgtggactggccatgagta

SEQ ID NO: 161008 - DNA, 80 bp, synthetic construct
  source 1..80: mol_type = other DNA
gttacaaatatacacatcctggagaacaaggcagagaaatagggacttttggggagaatagcgtattagacagacaaccc

SEQ ID NO: 161009 - DNA, 80 bp, synthetic construct
  source 1..80: mol_type = other DNA
agcacctacaagttcagatttaactggggtggcgacatgatgtttccccaggttgtcaaaaacccctgcgggtcctccgc

SEQ ID NO: 161010 - DNA, 80 bp, synthetic construct
  source 1..80: mol_type = other DNA
atatgagacatgtgaacgatggaagccctggacctattgtaagcacagtacggatttacttcaaaccaaaacatgtcaaa

SEQ ID NO: 161011 - DNA, 80 bp, synthetic construct
  source 1..80: mol_type = other DNA
tccagtaaattagacaccacaaagagcaagtgcatactaagagacttcccaccgtgggccatggcctatggctactgtga

SEQ ID NO: 161012 - DNA, 80 bp, synthetic construct
  source 1..80: mol_type = other DNA
aaaggaatattaatgcccattgagcgagaactaatattgcaatggactggcgatttacggttatgtggacgatactaata

SEQ ID NO: 161013 - DNA, 80 bp, synthetic construct
  source 1..80: mol_type = other DNA
tgagccagtgggtccctcctgtgcacaacataaatggccgctgccaccagtggtatgaggggtgctaccgtactcatgct

SEQ ID NO: 161014 - DNA, 80 bp, synthetic construct
  source 1..80: mol_type = other DNA
ctccgcccacctgcggagactgggccacagagtacgcggccgccgccgccttcgatagacctcccagaggcaatctctca

SEQ ID NO: 161015 - DNA, 80 bp, synthetic construct
  source 1..80: mol_type = other DNA
actcaaaagaggtgccagctctcacagctgttgaaacaggtgcaactagtcaggtcacccctagcgatttaattgaaact

SEQ ID NO: 161016 - DNA, 80 bp, synthetic construct
  source 1..80: mol_type = other DNA
aggggggtggtgattggtgagggatggagattactagagggggaagacgagctgctgaaggggggcgatagggcggaacg

SEQ ID NO: 161017 - DNA, 80 bp, synthetic construct
  source 1..80: mol_type = other DNA
gccaccgatgagagcatgattgaaaccaggtgtgtggtcaacaggcatggggttatggaaacaagtgttgaacacttctt

SEQ ID NO: 161018 - DNA, 80 bp, synthetic construct
  source 1..80: mol_type = other DNA
ctctgccgggaagcccacccgggccagggcccggtaaagcaggtaccagtattcatccggcaccttgcgcgccagcacac

SEQ ID NO: 161019 - DNA, 80 bp, synthetic construct
  source 1..80: mol_type = other DNA
atcagtccgttttacgtataccgggtgctaggcgacgccccgtaggggcggagcctagcttccacccctaggatgcatac

SEQ ID NO: 161020 - DNA, 80 bp, synthetic construct
  source 1..80: mol_type = other DNA
acatagatgtcacatacaatcccaccgtagacaaaggcaaaggcaacgtagtgtggttccaatacctgacaaaacccaac

SEQ ID NO: 161021 - DNA, 80 bp, synthetic construct
  source 1..80: mol_type = other DNA
tgattgcatactcacccccggtagcaggggtgcccaccacaagaaaggaagctatgctggggactcacattatatgggac

SEQ ID NO: 161022 - DNA, 80 bp, synthetic construct
  source 1..80: mol_type = other DNA
aatgggagcacaggtgtcgacgcaaaagtccggttcgcatgagacaggaattgcagcaaccgagggctccactataaact

SEQ ID NO: 161023 - DNA, 80 bp, synthetic construct
  source 1..80: mol_type = other DNA
ccagttaaggatgtattggagaaaggcatacccacgttgcaatctccaagtgtagaggcttgtggatactcagacagaat

SEQ ID NO: 161024 - DNA, 80 bp, synthetic construct
  source 1..80: mol_type = other DNA
ctactacaacaaaatactgtctgaaaactacccagcagactggagaggcagtaaagcactaactcacctaacaggcatat

SEQ ID NO: 161025 - DNA, 80 bp, synthetic construct
  source 1..80: mol_type = other DNA
tcgaacctgcccagtgggtcgacgcatacaacttccaccatattccagcttgtacaggcaatggatagatgaatttattt

SEQ ID NO: 161026 - DNA, 80 bp, synthetic construct
  source 1..80: mol_type = other DNA
ctggcgtcctcccgttcacgatgcaccgggcatcgagcgcaacttctatgaggcttgttaccgagcacacgctggatgct

SEQ ID NO: 161027 - DNA, 80 bp, synthetic construct
  source 1..80: mol_type = other DNA
gggccagacttcgccatagggcctttatcttctcgccattagatagtgtccggggtcgccgtaggcttcggcctcgtttt

SEQ ID NO: 161028 - DNA, 80 bp, synthetic construct
  source 1..80: mol_type = other DNA
atgtacgatggttgtaccgtggatcagcaatgtaacgtacagacagactacacaggacagttttactgaaggggggtaca

SEQ ID NO: 161029 - DNA, 80 bp, synthetic construct
  source 1..80: mol_type = other DNA
atcaattggccactgctgctggtggaagtgtctctgcaggatataagtatacacatcctggtgagggaggtagggatgtt

SEQ ID NO: 161030 - DNA, 80 bp, synthetic construct
  source 1..80: mol_type = other DNA
gagggctacaccagcgacaacgtgctcagtctgcccagtgaccgccaccgcatccaccccgaggtggtgcagcgcggtct

SEQ ID NO: 161031 - DNA, 80 bp, synthetic construct
  source 1..80: mol_type = other DNA
gaggaacccaaggcacgaggcaccggggttcgcactctacataataagtttggcattggtggcaggtggaaaagtagaac

SEQ ID NO: 161032 - DNA, 80 bp, synthetic construct
  source 1..80: mol_type = other DNA
agcatcatcttaatcttggggactgtctatgcactatataagctgatgtgcattgcccaaggaccttacactggtttacc

SEQ ID NO: 161033 - DNA, 80 bp, synthetic construct
  source 1..80: mol_type = other DNA
cgttggctgcgcacccgctacgggaacgccagcgcctgcgtgacgggcacccaatggagcaccaacttttttttctctca

SEQ ID NO: 161034 - DNA, 80 bp, synthetic construct
  source 1..80: mol_type = other DNA
cacgtaagagaccacgttgagcatgtcaaagggcgcattgttgaggcgcgtcaagaaacacgtggcgtcactggtagtgt

SEQ ID NO: 161035 - DNA, 80 bp, synthetic construct
  source 1..80: mol_type = other DNA
aaacagatggagcagatccaaccatgacctagacctctgcagatacctaggatgtacatttaaggcctacagacacccca

SEQ ID NO: 161036 - DNA, 80 bp, synthetic construct
  source 1..80: mol_type = other DNA
gtgggagtttcactagtcggtgtctacctcttaaggtcactaagcactccgagcgcagcgaggagtgcgacccttctctc

SEQ ID NO: 161037 - DNA, 80 bp, synthetic construct
  source 1..80: mol_type = other DNA
atatctgaaggttgcaatgacacgtgctcctgtccgtgcaattgccttacctccaccgcctccactatcacaaattcttc

SEQ ID NO: 161038 - DNA, 80 bp, synthetic construct
  source 1..80: mol_type = other DNA
cacacctactctaaatggagggtaattccttccgggtcaaaggtcactaccgccatattgagtcacgtgacctgcatacg

SEQ ID NO: 161039 - DNA, 80 bp, synthetic construct
  source 1..80: mol_type = other DNA
catttagaacagaaggctgctactcacaccctaagctacctaaaaaacctgtaactgctgcaaatgacagcacatatttc

SEQ ID NO: 161040 - DNA, 80 bp, synthetic construct
  source 1..80: mol_type = other DNA
tcatcattcacctcaaccaacttcacacatgccgcggtccatcatgccgccagtaacattgaagcacaacacgatactgc

SEQ ID NO: 161041 - DNA, 80 bp, synthetic construct
  source 1..80: mol_type = other DNA
actaaacaactgggtggtagcggcacaggccagagtactattagtgtcaccatacacagtcccaaaactataccatgaga

SEQ ID NO: 161042 - DNA, 80 bp, synthetic construct
  source 1..80: mol_type = other DNA
cagagatgctcttccagcacatggtcatgagagacatagtgcagaccggaccgtttagctacaaggacgagagcaaaaac

SEQ ID NO: 161043 - DNA, 80 bp, synthetic construct
  source 1..80: mol_type = other DNA
tcaaaatattaactggctacttactgcatgcttaatgccggcatctttaggaggatttaattatttgaacttgtccagat

SEQ ID NO: 161044 - DNA, 80 bp, synthetic construct
  source 1..80: mol_type = other DNA
ctggttccagtacggaaccaagcccactacacagttcgacgaaaagcagtgcaagtgcgtactcacagacctgccgctgt

SEQ ID NO: 161045 - DNA, 80 bp, synthetic construct
  source 1..80: mol_type = other DNA
ctgctcaacaagctcaacggctcatcgctagtctataggctggaagacattcctagcgtgcttccgccaacgcacgagac

SEQ ID NO: 161046 - DNA, 80 bp, synthetic construct
  source 1..80: mol_type = other DNA
atcacagaaaaattgctcaaaaacttgatcaaactagtgagcagtctggtgataattgtcagaaattatgaggacaccac

SEQ ID NO: 161047 - DNA, 80 bp, synthetic construct
  source 1..80: mol_type = other DNA
tatacgacgatgttttttgaatcatacattgtttcttattactgtatattccatatatcaaacacacatccacacaacta

SEQ ID NO: 161048 - DNA, 80 bp, synthetic construct
  source 1..80: mol_type = other DNA
ccagtaatctgtgaaaaacccacatgcatatggattgagggtaataactactaccctagcaggtaccagcaaggagtaat

SEQ ID NO: 161049 - DNA, 80 bp, synthetic construct
  source 1..80: mol_type = other DNA
cacagaaggaggaatgccatctggcatctgtggtacatccatattcaataccatgataaataatattataattaggacac

SEQ ID NO: 161050 - DNA, 80 bp, synthetic construct
  source 1..80: mol_type = other DNA
cccataaaaacgaaagtgtcgtcgtcgcgacccgccacagccgccatgaactcgttgctggcggaactcaaccgactggg

SEQ ID NO: 161051 - DNA, 80 bp, synthetic construct
  source 1..80: mol_type = other DNA
gtgagccgttccgaccgccccacttccgaggaactcgaaacaataaaatgttaaactcaaaacaaaacactcttacccac

SEQ ID NO: 161052 - DNA, 80 bp, synthetic construct
  source 1..80: mol_type = other DNA
atgtgatggcaacaaacactgagaccaagacatcatacgtctcttatgtcaacgccaatcccggagaggctggtggcacc

SEQ ID NO: 161053 - DNA, 80 bp, synthetic construct
  source 1..80: mol_type = other DNA
caagctgttcgaagacagatggtacccccaggtggacctctgtgacgttacactggcagttgtaaccgcaaccgcagcag

SEQ ID NO: 161054 - DNA, 80 bp, synthetic construct
  source 1..80: mol_type = other DNA
ggtatctgcccatactgtggtgcgggtacctgaggtccgccaataactacgcctaccactcggacgatagcactaagcag

SEQ ID NO: 161055 - DNA, 80 bp, synthetic construct
  source 1..80: mol_type = other DNA
atgttgggggaaatcctcaactactacacacactggactggatcactcagattcacatttttgttctgtgggagtatgat

SEQ ID NO: 161056 - DNA, 80 bp, synthetic construct
  source 1..80: mol_type = other DNA
ccaacccgggagaggcggggggacagttcgtgtcaaatttcaatccagacactagcactacacctcaacgcaaatttcaa

SEQ ID NO: 161057 - DNA, 80 bp, synthetic construct
  source 1..80: mol_type = other DNA
ttggcccggcattttctggaagccacccgattcttgtatcgctttatatctagttcagaatcgcattcctccagctgcga

SEQ ID NO: 161058 - DNA, 80 bp, synthetic construct
  source 1..80: mol_type = other DNA
agaaagtactacacagacacaccttactacccctgggcccccagaactcccccaaaattccgtgtctcttttaaacttgg

SEQ ID NO: 161059 - DNA, 80 bp, synthetic construct
  source 1..80: mol_type = other DNA
aacagactccgagttgccattagacactgtagctgtaaatcagtaacgaaagtgagtggggccagaaagggcgatcagca

SEQ ID NO: 161060 - DNA, 80 bp, synthetic construct
  source 1..80: mol_type = other DNA
gaccagtagtcaaagcaaatattgagggtcagccagtagaagtgttactagacacaggggctgatgattcaatagtagca

SEQ ID NO: 161061 - DNA, 80 bp, synthetic construct
  source 1..80: mol_type = other DNA
atcaggcaataggctttagtgcaacagaggaaaaaatacaaaatgtttttaacatattatacgaaaacaactcatactgg

SEQ ID NO: 161062 - DNA, 80 bp, synthetic construct
  source 1..80: mol_type = other DNA
tatggacagacatcaattaatgactttggagcaattgcactaagagtcgtcaatgagcataatccagctaggatcacatc

SEQ ID NO: 161063 - DNA, 80 bp, synthetic construct
  source 1..80: mol_type = other DNA
ggggatgaaaacgttaataaagaatagcggtggttctgatagggcaaccgctgaggcgagctgcgtgagcgtgtgcgtgt

SEQ ID NO: 161064 - DNA, 80 bp, synthetic construct
  source 1..80: mol_type = other DNA
gtggcaaccaaactttataagacactgctttatagtgggctttatgccacttatattctgtggagagaacacaacctccc

SEQ ID NO: 161065 - DNA, 80 bp, synthetic construct
  source 1..80: mol_type = other DNA
ggagcagttcatcgatcaaactctagaagaggtgttggttgtcccggacacgcaagcgtcaggcccaatccacaccacca

SEQ ID NO: 161066 - DNA, 80 bp, synthetic construct
  source 1..80: mol_type = other DNA
cggctgggatccctcacgtcgcgaggacagcgccggaggtggcgacggcggcggcgccgtgctcatgcagctcagcaaga

SEQ ID NO: 161067 - DNA, 80 bp, synthetic construct
  source 1..80: mol_type = other DNA
cgtgaaacaataggagcttcgacctcaagggatgctctcccgaataccgagcccagtggtccagcacactctaaagagat

SEQ ID NO: 161068 - DNA, 80 bp, synthetic construct
  source 1..80: mol_type = other DNA
caggacaaatacaagcacaaaacagtgaatggggatggaatacagtacaaaatacatcacaacttacaatagacggtagt

SEQ ID NO: 161069 - DNA, 80 bp, synthetic construct
  source 1..80: mol_type = other DNA
cagcatgtgtctacttcacctcatacaaaacacttgatcaaaaacaagagaacaggtactctagttggatcataacgacc

SEQ ID NO: 161070 - DNA, 80 bp, synthetic construct
  source 1..80: mol_type = other DNA
ctcaagttgcatcagccagggcttcatgccctcctcagttccctagtccccgggcttcaggccccctccgtccccgtcct

SEQ ID NO: 161071 - DNA, 80 bp, synthetic construct
  source 1..80: mol_type = other DNA
ctgcacgggtgtcttcttttgtgcttcaaggaacaggcattacccagttagctttgaagggccaggcctagtggaagtcc

SEQ ID NO: 161072 - DNA, 80 bp, synthetic construct
  source 1..80: mol_type = other DNA
gttctgtcactgtgccatctaatgtggcataatggtagagatgtgtacaaacagtttgagaagcggatacgcagtgttgg

SEQ ID NO: 161073 - DNA, 80 bp, synthetic construct
  source 1..80: mol_type = other DNA
acgcgcctggtcatttaaatatgaaactgaaaatccaatcagtaaaaaaatctggccacagcccactaccacaaaaccaa

SEQ ID NO: 161074 - DNA, 80 bp, synthetic construct
  source 1..80: mol_type = other DNA
acatacgagcaattaaaacagttggtcccagtgatatgtatgtacatgtagggaatttaatatatagaaatttgcactta

SEQ ID NO: 161075 - DNA, 80 bp, synthetic construct
  source 1..80: mol_type = other DNA
cagtcactaatcataaatgggttgcagttggggctgctgtgggggttcttggtgttttggttggtggctggtatgtctat

SEQ ID NO: 161076 - DNA, 80 bp, synthetic construct
  source 1..80: mol_type = other DNA
caccagatacatcaggtgaggtctacttactagcatttgttagtgcatgtccagactttaagttgagacttatgaaagat

SEQ ID NO: 161077 - DNA, 80 bp, synthetic construct
  source 1..80: mol_type = other DNA
cgttggcagatgaattagattccaggtggtaacgataggataatgaccgttcgctcccaacggatgacacaaagtatccg

SEQ ID NO: 161078 - DNA, 80 bp, synthetic construct
  source 1..80: mol_type = other DNA
tgctcgcccacgaattgcacggccaaaaacagttcacgacaggcctgcagcagcggcgtgtgcgcgtcggtggcgacgtc

SEQ ID NO: 161079 - DNA, 80 bp, synthetic construct
  source 1..80: mol_type = other DNA
agatgttgaggttggtagagttataccatatggtgaaatcaatttaagtggcaaccctacttgcagattactaaagtaca

SEQ ID NO: 161080 - DNA, 80 bp, synthetic construct
  source 1..80: mol_type = other DNA
tccaagagctgggggacatcggggacggaaacactgacataagggaaacatggctagggacggcatgtccgttatatttt

SEQ ID NO: 161081 - DNA, 80 bp, synthetic construct
  source 1..80: mol_type = other DNA
catgaaagcagacagctatgacgcgtacataagtgaattaggcacgggaaccaacaatataacaaaacacaaaacaaaca

SEQ ID NO: 161082 - DNA, 80 bp, synthetic construct
  source 1..80: mol_type = other DNA
aagggtggattaaacaatctaaacactccaagatagagcgtgatttcaactttgcacaatactgcatcaattgtgtgggc

SEQ ID NO: 161083 - DNA, 80 bp, synthetic construct
  source 1..80: mol_type = other DNA
actaacattcacattctgtggatcagcaatggccacggggaagctattactagcttactccccacctggtgccgacgtac

SEQ ID NO: 161084 - DNA, 80 bp, synthetic construct
  source 1..80: mol_type = other DNA
acagaggaatctacaatcataacaaaaggccacaaagctttttgtcacctaacaggcattttctcaccaccctggctaaa

SEQ ID NO: 161085 - DNA, 80 bp, synthetic construct
  source 1..80: mol_type = other DNA
gctggactgctggtggggacgggggtgttgattgcagcggggacgaggacagagacggggggggggatgtgcggtcgcag

SEQ ID NO: 161086 - DNA, 80 bp, synthetic construct
  source 1..80: mol_type = other DNA
cgcaggtgaacataaccacgtcctcggccaaacggtagacggcgtccatggcggggtcgtagccgtagacgacgccgaaa

SEQ ID NO: 161087 - DNA, 80 bp, synthetic construct
  source 1..80: mol_type = other DNA
cagacactttcaaaaaacttgactatgacagtgtgacttttcttaaaagaggctttaggcaagatgtcaaatatccattc

SEQ ID NO: 161088 - DNA, 80 bp, synthetic construct
  source 1..80: mol_type = other DNA
gcccatactcaagtctctccactcaccagggaattgtatcagattacttcacccaattgggcgacgcctttggtgagggc

SEQ ID NO: 161089 - DNA, 80 bp, synthetic construct
  source 1..80: mol_type = other DNA
cctcctccgccggcaggtgcagcgtcagaaccaggccgcagcggctctgtgaggtcagccgcttcttgggcaggtgaagc

SEQ ID NO: 161090 - DNA, 80 bp, synthetic construct
  source 1..80: mol_type = other DNA
ctacatttcaggtgttgcaaagaaattacaacagtgtcataggacaccctattaaccatgacactaccacaaccagtaca

SEQ ID NO: 161091 - DNA, 80 bp, synthetic construct
  source 1..80: mol_type = other DNA
cgctggacgtgcactgtatatacctccttatgacctccttttgcatgagtggtatgaaaaattttaaacatatatataga

SEQ ID NO: 161092 - DNA, 80 bp, synthetic construct
  source 1..80: mol_type = other DNA
gcacagtagttactagcacccaatacctgaatcacaagacaggactattcagccccatattcctatctaacagcagactt

SEQ ID NO: 161093 - DNA, 80 bp, synthetic construct
  source 1..80: mol_type = other DNA
actccgttttagtttcttactcatcagacttagtcatataccgaacaaacactcaaggtgatgactatattcccacctgt

SEQ ID NO: 161094 - DNA, 80 bp, synthetic construct
  source 1..80: mol_type = other DNA
tgtttcccgagagaaagccaaaaccacctcccaccgcccaggactgggcggaggagtacactgcctgtaaatactggtgt

SEQ ID NO: 161095 - DNA, 80 bp, synthetic construct
  source 1..80: mol_type = other DNA
gccggcgcaggacgtggtgacctcgtggatcgaagcgctacgcgacgcggaccgcgataactacggtcgctgcgtgcgcc

SEQ ID NO: 161096 - DNA, 80 bp, synthetic construct
  source 1..80: mol_type = other DNA
gagcacttgtgatgtatctgataagttaacagggaaaatcatcaaatggaccatcagattagtcagtgctctggctatta

SEQ ID NO: 161097 - DNA, 80 bp, synthetic construct
  source 1..80: mol_type = other DNA
aagaaactgtttgccacatggaacatcacatacaccgacactgtgcaacttagaagaaaactggagatgtttacatactc

SEQ ID NO: 161098 - DNA, 80 bp, synthetic construct
  source 1..80: mol_type = other DNA
tgcgatcagcggcatgccgacgccgacccggggatcttggattcaccgttttctctcttctctctctacatacagaccgg

SEQ ID NO: 161099 - DNA, 80 bp, synthetic construct
  source 1..80: mol_type = other DNA
taaagagcactattagaatttattttaaaccaaaacacgttaaagcatggatacccaggcctcccagattatgccagtat

SEQ ID NO: 161100 - DNA, 80 bp, synthetic construct
  source 1..80: mol_type = other DNA
atacctgtgcaaagcggcaaccatcagagttcacaggtatttggattccaagtgcaacccgggttggataatgtattcaa

SEQ ID NO: 161101 - DNA, 80 bp, synthetic construct
  source 1..80: mol_type = other DNA
gacttgacagcctcttacacattcagatttaactgggggggcgacttactctaccaccaggtcatcaaaaacccgtgcga

SEQ ID NO: 161102 - DNA, 80 bp, synthetic construct
  source 1..80: mol_type = other DNA
ttacgttagttgtagatgtttgggtagatatggtggaaatagttgaggtcacgtctgtgccttttacagagcttgcagtg

SEQ ID NO: 161103 - DNA, 80 bp, synthetic construct
  source 1..80: mol_type = other DNA
cccagacagtcagaaactgctccatcaggggcatagtccctatggttatatgcggacacacaaagggtggtagaaactat

SEQ ID NO: 161104 - DNA, 80 bp, synthetic construct
  source 1..80: mol_type = other DNA
actacgcctggcattcagatgactgtataaaacagccctggccctttggagggtctctgtccaccgtgtcctttaacctt

SEQ ID NO: 161105 - DNA, 80 bp, synthetic construct
  source 1..80: mol_type = other DNA
gcacacacgagtgatgcaaaagggttcctgaggcagcaggcagagctgttttgccattttattcaggcggctaacgtcaa

SEQ ID NO: 161106 - DNA, 80 bp, synthetic construct
  source 1..80: mol_type = other DNA
aatatttagtgaacacttatataaaaaccctgaatactggcaatcacaccacactgctgctagactttctacgtctcaaa

SEQ ID NO: 161107 - DNA, 80 bp, synthetic construct
  source 1..80: mol_type = other DNA
gggtagatcattcacaagccagtatgttttagcaagtaccaacctagattcactatccccacctaccatatccataccag

SEQ ID NO: 161108 - DNA, 80 bp, synthetic construct
  source 1..80: mol_type = other DNA
gaaatctgccaggtagattcaataataccaattaacaatgttgaagccagaaagaactctataagtatgtacacagtaga

SEQ ID NO: 161109 - DNA, 80 bp, synthetic construct
  source 1..80: mol_type = other DNA
ttgattggatgaaatcaatgttacctcaggcacaactaaaagtcaaatatttaagtgaacttaagaaacttaactttctg

SEQ ID NO: 161110 - DNA, 80 bp, synthetic construct
  source 1..80: mol_type = other DNA
ggcatcgggtggtgttggtgaggccatgggccgcgcattcctggaaaaagtggagggagcgtggcctgcaccccgcggcc

SEQ ID NO: 161111 - DNA, 80 bp, synthetic construct
  source 1..80: mol_type = other DNA
ggtaacttagaagcttgtactttatgaaggccaataggcgggtagtcaaccacactactcacggtcaagcacttctgttt

SEQ ID NO: 161112 - DNA, 80 bp, synthetic construct
  source 1..80: mol_type = other DNA
acagcagtggagattggacacacgtcacaagcagtacctagtgacacaatacagaccaggtgtgtcatgaaccgccacaa

SEQ ID NO: 161113 - DNA, 80 bp, synthetic construct
  source 1..80: mol_type = other DNA
ctggacagatatgagagtggccatcagaagcccctacacagagccaaaactaataggcagctcagacaaatccatgtata

SEQ ID NO: 161114 - DNA, 80 bp, synthetic construct
  source 1..80: mol_type = other DNA
tcgcggtgcaagttgctgcgttttacgtgtattgttacacgggttgcgtatcggtataatcggatgtgtgttactcattc

SEQ ID NO: 161115 - DNA, 80 bp, synthetic construct
  source 1..80: mol_type = other DNA
acgacttgaggtcaattttgaggagtccctattctcaaaatacaaaggcaatatcaacatggaaatcacagaaaacatga

SEQ ID NO: 161116 - DNA, 80 bp, synthetic construct
  source 1..80: mol_type = other DNA
gcatctatttcaagccaaaacatatcagggcatgggtacctaggccacctaggctatgtcaatatgtgtacagagccaaa

SEQ ID NO: 161117 - DNA, 80 bp, synthetic construct
  source 1..80: mol_type = other DNA
atgtacctataaccagaccgttcagctggatattacggcctttttaaagaccgtaaagaaaaataagcacaagttttatc

SEQ ID NO: 161118 - DNA, 80 bp, synthetic construct
  source 1..80: mol_type = other DNA
tgtaccgctcacccacagcagactttatatttcagtacaacagaaaggccccgtttaatgacactcagctaacgtgtccg

SEQ ID NO: 161119 - DNA, 80 bp, synthetic construct
  source 1..80: mol_type = other DNA
ttaacacgtcttttgataccagtgtcctcacagaataaggctgatgaactgtgtgccgcattcatggtggatccgggtcg

SEQ ID NO: 161120 - DNA, 80 bp, synthetic construct
  source 1..80: mol_type = other DNA
acagctactccaaggagatgtggaggaggccgtgaacagagccgttgcacgggtggcggatacactacccacagggccga

SEQ ID NO: 161121 - DNA, 80 bp, synthetic construct
  source 1..80: mol_type = other DNA
cagtaaggggtggtattggaagtttccagatgtactcacagaagtgggtgtgtttggtcaaaattgtcaattccattacc

SEQ ID NO: 161122 - DNA, 80 bp, synthetic construct
  source 1..80: mol_type = other DNA
attctttgcacgtggagcgtgcgttgccattattgaggtggacaatgagcaaccaactgcccggacgcagaaactgtttg

SEQ ID NO: 161123 - DNA, 80 bp, synthetic construct
  source 1..80: mol_type = other DNA
aatcatactttactccaccctccaacaatcacgtgcacaacagcaatgaacaggagattcttcctggatttagatatcat

SEQ ID NO: 161124 - DNA, 80 bp, synthetic construct
  source 1..80: mol_type = other DNA
gatttagataccgcagtattttcaaaatacaaaggtaatatcaatgtggaatggaatgaacacctacaaacagcagtgga

SEQ ID NO: 161125 - DNA, 80 bp, synthetic construct
  source 1..80: mol_type = other DNA
attcactgatgaagggcagtggcgaataccgctggagtttccaaaacaaggccatggatccttatcactcttatttgctt

SEQ ID NO: 161126 - DNA, 80 bp, synthetic construct
  source 1..80: mol_type = other DNA
taagtgatgttctggacccaagcatacggtcttgccttggggaggtttcaaaaaaaattgatctctctcacaaacgggag

SEQ ID NO: 161127 - DNA, 80 bp, synthetic construct
  source 1..80: mol_type = other DNA
tactgttatcagtaatgctttgcaactatcccaacctaaaccacagaagcaactcaccgctcaatcaacaccagctacca

SEQ ID NO: 161128 - DNA, 80 bp, synthetic construct
  source 1..80: mol_type = other DNA
tggatttactccactatcaacctacacaccagagctcatacgcattgttatagtactaagaaatatacatcacaatgggt

SEQ ID NO: 161129 - DNA, 80 bp, synthetic construct
  source 1..80: mol_type = other DNA
atattcatctgacacaaaatggtataactggcagtatacatacaataaagtaatgaaacctatttactatgcagcttcca

SEQ ID NO: 161130 - DNA, 80 bp, synthetic construct
  source 1..80: mol_type = other DNA
aatcttaggaaccatatatgctttatataagctaatgtgcttgacacaaggagcatactcaggagtgcccacaccagtag

SEQ ID NO: 161131 - DNA, 80 bp, synthetic construct
  source 1..80: mol_type = other DNA
ttgatcactatgctggccaactcctatcacttgacatacccacacaagagcttaccctaaaagaggccctctatggtaca

SEQ ID NO: 161132 - DNA, 80 bp, synthetic construct
  source 1..80: mol_type = other DNA
ggtgcctctgaacacagtggatgctggagctagtaacaagtatggatactcctcaataaatgattttgggactctagctg

SEQ ID NO: 161133 - DNA, 80 bp, synthetic construct
  source 1..80: mol_type = other DNA
tggtattggtgccgcctatgctcacttttatgacgggttcagtgtggtaccattcaatcaaatagatgcaggagcatcca

SEQ ID NO: 161134 - DNA, 80 bp, synthetic construct
  source 1..80: mol_type = other DNA
acaaatgctttctgattggactacaaaaatttaccacagaaaaacagacagtaactatggatattcctcctatgacttta

SEQ ID NO: 161135 - DNA, 80 bp, synthetic construct
  source 1..80: mol_type = other DNA
tgactgacatgaatgatgtggacactgagattacactcatatggttagaccagaatgaaaagttcagggacatcagacgg

SEQ ID NO: 161136 - DNA, 80 bp, synthetic construct
  source 1..80: mol_type = other DNA
ttagacgagccaggagacgacgtgctcctcgccgctttcgagctcgccgaagagtaagtaggcgccgggtgcggtggact

SEQ ID NO: 161137 - DNA, 80 bp, synthetic construct
  source 1..80: mol_type = other DNA
aatgaaaacaaaaatacattagaaaaatggctatacagtacaggagccctgtaccacacttttcacacacaggagtacct

SEQ ID NO: 161138 - DNA, 80 bp, synthetic construct
  source 1..80: mol_type = other DNA
tactaggttgcgatgcctcaccatggcggtggcttaaacagaaagtgtgtgacatgctggaaatcccatacgtttataag

SEQ ID NO: 161139 - DNA, 80 bp, synthetic construct
  source 1..80: mol_type = other DNA
tcatcccgccaatggcaaatttagacaataaaggcatgctattcaccagtagttttgtgttagcttcaactaactcccaa

SEQ ID NO: 161140 - DNA, 80 bp, synthetic construct
  source 1..80: mol_type = other DNA
gaagggatggattgtaaatgttaacagcgaagttcaattggagcgcaatctaaacagagctatgactatcttacaagcaa

SEQ ID NO: 161141 - DNA, 80 bp, synthetic construct
  source 1..80: mol_type = other DNA
ccatgtaccacccaggcatgatgatgcaggccaaaaagaaactagttatacctagcttccagacaagacccaagggcaga

SEQ ID NO: 161142 - DNA, 80 bp, synthetic construct
  source 1..80: mol_type = other DNA
aacaccaaacctttctgcacagctccttggcgcgggatttcttacaacacccgtaagccgattctcgatgacgacccatc

SEQ ID NO: 161143 - DNA, 80 bp, synthetic construct
  source 1..80: mol_type = other DNA
ctggtgctgacgtaccagccagcaggaaacaggcaatgcttgggactcacatcatttgggacatagggttgcaatctagt

SEQ ID NO: 161144 - DNA, 80 bp, synthetic construct
  source 1..80: mol_type = other DNA
tgtgttcccatctcttctagtcgccgcctggtcattcggtgtcctggctcgaggtctcggtatcaagtccctggaactgt

SEQ ID NO: 161145 - DNA, 80 bp, synthetic construct
  source 1..80: mol_type = other DNA
atggaaaatacacccattcaaaaataaaaaatggaagatattataactattcattaaaaattcttcattcgcgtacacta

SEQ ID NO: 161146 - DNA, 80 bp, synthetic construct
  source 1..80: mol_type = other DNA
taatgacgcatactggaatgcactaacaaagcaaaacgaccaggccacacaaataggccaagcacgaagcaaagaattcg

SEQ ID NO: 161147 - DNA, 80 bp, synthetic construct
  source 1..80: mol_type = other DNA
gtcaatgacgggcaaaaagcccacaggtagcccttgtgtaaatgactcttggaagggccggtgggagaggaggctggccg

SEQ ID NO: 161148 - DNA, 80 bp, synthetic construct
  source 1..80: mol_type = other DNA
ctcaggaggacggcgaggggaatcatcgcagtccccagaagaatcagacaggggcttgaactcgccctcctgtgagggac

SEQ ID NO: 161149 - DNA, 80 bp, synthetic construct
  source 1..80: mol_type = other DNA
gggcgacgcagatactcccgacgctatggtaggagactgactgtgagacgaaagaaaaagaaactgactcttaaggtctg

SEQ ID NO: 161150 - DNA, 80 bp, synthetic construct
  source 1..80: mol_type = other DNA
aatcattacttctaagccagtgactgaacttggtttacctagcattcacacaccaagtaaaaccaaattgcagcccagtg

SEQ ID NO: 161151 - DNA, 80 bp, synthetic construct
  source 1..80: mol_type = other DNA
tgagaggatcttatgtagaaatgcatatgccagggtccgaggttgacagctccctgctgtcaatgagtggatcatctgtg

SEQ ID NO: 161152 - DNA, 80 bp, synthetic construct
  source 1..80: mol_type = other DNA
tgattcatcccactttccctgttgaagaaattcaagagtccattcgttggacaaagaaaccatcacaaatgcaagagcat

SEQ ID NO: 161153 - DNA, 80 bp, synthetic construct
  source 1..80: mol_type = other DNA
cacgcgccaaaatctcacgctgtacaatcttacgattaaagatacgggagtctatcttctacaggatcagtgtaccggcg

SEQ ID NO: 161154 - DNA, 80 bp, synthetic construct
  source 1..80: mol_type = other DNA
tgtaaggtgatgaccacctctacaaataatcaaaccttaacacaggtgagcaacatgacaaaccacaccttaaacagcac

SEQ ID NO: 161155 - DNA, 80 bp, synthetic construct
  source 1..80: mol_type = other DNA
agtcggtatgcggaatcacaacactgcttacatcaaagcatttatccattttccaacggaaatccttgatgttgacgaat

SEQ ID NO: 161156 - DNA, 80 bp, synthetic construct
  source 1..80: mol_type = other DNA
cacgtaccagatttgggatatctcaggcaagtccagtcttctcttcactatccctttcatctctcaatcctactggaaga

SEQ ID NO: 161157 - DNA, 80 bp, synthetic construct
  source 1..80: mol_type = other DNA
acagtttgaaacagcctaccaagacaccacatacaatccaaacacagacaaaggcttaggaaataaaatgtggatacaat

SEQ ID NO: 161158 - DNA, 80 bp, synthetic construct
  source 1..80: mol_type = other DNA
gttagtaaatcatggtaaacctcatattatatcaatagttcacattatcctattgtttgaattataaaaaacttagggtt

SEQ ID NO: 161159 - DNA, 80 bp, synthetic construct
  source 1..80: mol_type = other DNA
tttacagacaagtacaatccctcaacagatgctgccgatggaagaacttttgcagcagttgattatctcttaggatgtgg

SEQ ID NO: 161160 - DNA, 80 bp, synthetic construct
  source 1..80: mol_type = other DNA
ggctcgacatcggtgtccctgccgccggcctcgccatgaaagtcacgcaggccagctgccaccagggcgacatcgctcgc

SEQ ID NO: 161161 - DNA, 80 bp, synthetic construct
  source 1..80: mol_type = other DNA
aaggtccgtactacttctgtgggccgaaccttgtacttaccaccctatgagtatttggaaaggaggtggatagacaaatt

SEQ ID NO: 161162 - DNA, 80 bp, synthetic construct
  source 1..80: mol_type = other DNA
ataaatcccactaacgaaacagacgataccgcaggcaataaacctaattatcaacggaaacccttagtgtcattcaaaga

SEQ ID NO: 161163 - DNA, 80 bp, synthetic construct
  source 1..80: mol_type = other DNA
tctcttagacaaaggccaaggaaacatgatctggttccaatatcacactaaaacagacaacatattctcaaaacccagct

SEQ ID NO: 161164 - DNA, 80 bp, synthetic construct
  source 1..80: mol_type = other DNA
cttctatgacggttggtcacatttcacacagaacggcgtgtacggtttcaacacactgaataatatgggaaggttgtatt

SEQ ID NO: 161165 - DNA, 80 bp, synthetic construct
  source 1..80: mol_type = other DNA
aaatgggggctcaagtctcaactcaaaagaccggtgcgcacgagaatcaaaacgtggccgctaatggatccaccattaat

SEQ ID NO: 161166 - DNA, 80 bp, synthetic construct
  source 1..80: mol_type = other DNA
acctcaaagggagagttcacagggttaggcatacatgatcgtgtctgtgtgatacccacacacgcacagcctggtgatga

SEQ ID NO: 161167 - DNA, 80 bp, synthetic construct
  source 1..80: mol_type = other DNA
cttatcatgtaaatttctgccactgtatgcaagtgaagcaaagagaataaagacactacacatcaagtgtgacaacatta

SEQ ID NO: 161168 - DNA, 80 bp, synthetic construct
  source 1..80: mol_type = other DNA
cccagcctatcaataaaagacctaggcaagcatggtgctggttcaaaggcgagtggagggaagccatgcaggaggtgaaa

SEQ ID NO: 161169 - DNA, 80 bp, synthetic construct
  source 1..80: mol_type = other DNA
tatattgtggtcactgattttttttttacaataaagagatagacatcacagttcaccatcttgtctccccggtgtgtcta

SEQ ID NO: 161170 - DNA, 80 bp, synthetic construct
  source 1..80: mol_type = other DNA
ccattccggcccccgtgctgggtccccgaggggcgggggggtgttttcggcgtggtggtgcaatttggagttgcgtgtgc

SEQ ID NO: 161171 - DNA, 80 bp, synthetic construct
  source 1..80: mol_type = other DNA
acagaatgttggtgagaaggtgaacaccatggaggcataccaaatacccgtgagatcaaaccaagggtcgggtacgcaag

SEQ ID NO: 161172 - DNA, 80 bp, synthetic construct
  source 1..80: mol_type = other DNA
aatatggccgttccagtgacgtcacggccgccattttgagtaggtgccgtccaggactgccgttccgggtcaaagggcat

SEQ ID NO: 161173 - DNA, 80 bp, synthetic construct
  source 1..80: mol_type = other DNA
gactaacagagatcttgcatacctgtttgttggttttactaaactagatatagttacatttaaaactcttctttatatca

SEQ ID NO: 161174 - DNA, 80 bp, synthetic construct
  source 1..80: mol_type = other DNA
tatgcaaacttagatgtcagggtatttccccagttgtgcctattacaatatctataagccctatgtgtgctgagttttct

SEQ ID NO: 161175 - DNA, 80 bp, synthetic construct
  source 1..80: mol_type = other DNA
gcaaacctatggacttggctatcctcaaatgtaaattaccttttaggttcaagaaaaactcaaaatactacaccaataaa

SEQ ID NO: 161176 - DNA, 80 bp, synthetic construct
  source 1..80: mol_type = other DNA
caccacacccagaacatagtgtcctggcaacgcatggcgccttcggacaacaatcaggggctgtgtatgttggcaattat

SEQ ID NO: 161177 - DNA, 80 bp, synthetic construct
  source 1..80: mol_type = other DNA
cacttgcgtcagtttccaggtacttagttccgtttacaacaactacattagtattacaaactggaacgaaacaggcatgg

SEQ ID NO: 161178 - DNA, 80 bp, synthetic construct
  source 1..80: mol_type = other DNA
ctgagccaccaaatgcacctcgaggttggtagacagcctttgtatggggtgtcagcaggccaaagtcaagattaagttta

SEQ ID NO: 161179 - DNA, 80 bp, synthetic construct
  source 1..80: mol_type = other DNA
cgtcctgcgcgagctgtaccgccgcgtcgtctcgtactgtcagaacaatgtgaagatggtggaccgcattcaactggtat

SEQ ID NO: 161180 - DNA, 80 bp, synthetic construct
  source 1..80: mol_type = other DNA
ttgggtgcctagaccaccgcgcttgtgtccatacatcaatagcacgaatgtcaactttgaacccaagccagtgactgaag

SEQ ID NO: 161181 - DNA, 80 bp, synthetic construct
  source 1..80: mol_type = other DNA
cccttgatataaatcctagcaatataactatagaagatagtgtgtttggaactgatggactagaggctttagatttaaac

SEQ ID NO: 161182 - DNA, 80 bp, synthetic construct
  source 1..80: mol_type = other DNA
cactctatggtatcagacaaacttcgttgttcccgatggagcccccacaactgcaaacatcatagttcttgggtctgcac

SEQ ID NO: 161183 - DNA, 80 bp, synthetic construct
  source 1..80: mol_type = other DNA
caattatcgtattgtgcatgtgtcgttcataacagagtttagtatactaatatgaagcgtcgcgagtgttaaagcaattg

SEQ ID NO: 161184 - DNA, 80 bp, synthetic construct
  source 1..80: mol_type = other DNA
tacccacagcagcccactgcactgccagactcctatgacctactacaggagtatggcctctacagtccatactaccttaa

SEQ ID NO: 161185 - DNA, 80 bp, synthetic construct
  source 1..80: mol_type = other DNA
ccacagcacacaaacgatgataaaggctacgccagtcagtggaccaccccaagcacagatgcctacgagtaccacctggg

SEQ ID NO: 161186 - DNA, 80 bp, synthetic construct
  source 1..80: mol_type = other DNA
gacggtacggtagaaggccgcccggtccggctggcgcgagtaggccatcagcgcccgatccagcaaagccgtatcctcgt

SEQ ID NO: 161187 - DNA, 80 bp, synthetic construct
  source 1..80: mol_type = other DNA
aaacacacgaagatgggagctcaagtgtcaactcaaaagtctggatctcatgaaactggtaacgtggccactggggggtc

SEQ ID NO: 161188 - DNA, 80 bp, synthetic construct
  source 1..80: mol_type = other DNA
cccagagcaaacgtcgccgacgcaagcgatacaactccagctccagcgacagctccagcagcaaagaaagctcggacgaa

SEQ ID NO: 161189 - DNA, 80 bp, synthetic construct
  source 1..80: mol_type = other DNA
gcgctccaactgtcccagcctaggcccagcacttcacagcagagcttacccaacactaacagctcagaaccagtgcattc

SEQ ID NO: 161190 - DNA, 80 bp, synthetic construct
  source 1..80: mol_type = other DNA
gggaaatactgaactactacgcccactggtctggtagtctgaagttcacttttttattctgtggatccgcaatggcaact

SEQ ID NO: 161191 - DNA, 80 bp, synthetic construct
  source 1..80: mol_type = other DNA
tgagtactataaaaatcaaaccacagataggttatactataattctgaatggggcccgctaaaatgtagtattgtggaaa

SEQ ID NO: 161192 - DNA, 80 bp, synthetic construct
  source 1..80: mol_type = other DNA
ctgtgaagagcacaattcgcttttacatgaaacccaaacatgtgaaggcgtggattcccaggcctcctcgcctctgtgaa

SEQ ID NO: 161193 - DNA, 80 bp, synthetic construct
  source 1..80: mol_type = other DNA
aaacaaggtgattcatggattaagaaatttacagaatgttgtaatgcagctaagggcttagaatgggttgccatcaaaat

SEQ ID NO: 161194 - DNA, 80 bp, synthetic construct
  source 1..80: mol_type = other DNA
cccttcctcctggaccctcgctgagcttcaactcggcgacacctgggactacagtgcgagtaacaactgcacgcactttg

SEQ ID NO: 161195 - DNA, 80 bp, synthetic construct
  source 1..80: mol_type = other DNA
gagatgcacaataaggggcataataccccttatcatgtgcggtgcaaacactgccagttttaattatggcatgcacagcg

SEQ ID NO: 161196 - DNA, 80 bp, synthetic construct
  source 1..80: mol_type = other DNA
aggtggttccaagcgataccatacaaaccagacatgttcacaattaccatagtagaactgaatccaccctggagaacttc

SEQ ID NO: 161197 - DNA, 80 bp, synthetic construct
  source 1..80: mol_type = other DNA
acagtacagagcagcactcaccaaacatacagtgcagtacatgtgcccacacacagcacaaagcccaccaaagacgtatg

SEQ ID NO: 161198 - DNA, 80 bp, synthetic construct
  source 1..80: mol_type = other DNA
aataaactacaataaagacagcgccagtaacgcggcgtccaagttagatttttctcaggacccctccaaatttactgaac

SEQ ID NO: 161199 - DNA, 80 bp, synthetic construct
  source 1..80: mol_type = other DNA
aacaatacacatcataaacgcaatcgccatcataattcacaaagaagccgtaccatatggaccattgtattaatttgtat

SEQ ID NO: 161200 - DNA, 80 bp, synthetic construct
  source 1..80: mol_type = other DNA
aggagtattacaacgtctttggcaactctgaactgtatgatgaagcagtccatgataatggcaaaatatcacactttgaa

SEQ ID NO: 161201 - DNA, 80 bp, synthetic construct
  source 1..80: mol_type = other DNA
gttgtagagccccctgttgttgcgcagaagctcctccttgttgaaaaatgcccggcaggggctgtagaggcccgggacgg

SEQ ID NO: 161202 - DNA, 80 bp, synthetic construct
  source 1..80: mol_type = other DNA
tattgtttacctgtttattggatacgtccctctcaacctcaaggccatcaaaactcttgattatatattacttctcaact

SEQ ID NO: 161203 - DNA, 80 bp, synthetic construct
  source 1..80: mol_type = other DNA
ctcttacagtaccaactggagcaactccctcactccctataacagtcacaatagcacctatgtgcactgagttctctggg

SEQ ID NO: 161204 - DNA, 80 bp, synthetic construct
  source 1..80: mol_type = other DNA
ggtgagaatggccataagattgagaagcgcggttttgatgacaacaagccagatgaagaccccttcttcaactgtaacgg

SEQ ID NO: 161205 - DNA, 80 bp, synthetic construct
  source 1..80: mol_type = other DNA
ggcgctttgtgcgcactgccggtgcgtgagggagttctgcggtgtttgttcggcggcgacggcggtgttttcgggcgtgc

SEQ ID NO: 161206 - DNA, 80 bp, synthetic construct
  source 1..80: mol_type = other DNA
ataatactgggacaaatactacaagcattaatatgtatacagtgcaattgcagagacaggctgaacttatgcaagaaatc

SEQ ID NO: 161207 - DNA, 80 bp, synthetic construct
  source 1..80: mol_type = other DNA
tccaagcttcaacacaaaacctaagggtccctccaagataagcgtcagaattaagccccccaagatgttcttagacaagt

SEQ ID NO: 161208 - DNA, 80 bp, synthetic construct
  source 1..80: mol_type = other DNA
ggtctgttaggaccctttctgctttgggaaaccaaggcaggaaaatccctagcagattggcgcccgaacagggacttgaa

SEQ ID NO: 161209 - DNA, 80 bp, synthetic construct
  source 1..80: mol_type = other DNA
gcgcgttttcaaccgccgtgacacatcaggtccatcttgagctggcgccgggcctcgcgcaggtgtcgcacgcgttgtga

SEQ ID NO: 161210 - DNA, 80 bp, synthetic construct
  source 1..80: mol_type = other DNA
ggattataatgagagggtgaataattataatgcttggaaactgcaattggagaatcaaacccttgatgatttagatgatg

SEQ ID NO: 161211 - DNA, 80 bp, synthetic construct
  source 1..80: mol_type = other DNA
taaactgtgttcccatggatagcatgctcaagcataataatatttcactagttatcataccacttgtgccattacgatca

SEQ ID NO: 161212 - DNA, 80 bp, synthetic construct
  source 1..80: mol_type = other DNA
tcctaaccactgatcctgtgagcacacgccagtgcccagcaggtcgtaatgcgcaagtcggtggcggaaccaactacttt

SEQ ID NO: 161213 - DNA, 80 bp, synthetic construct
  source 1..80: mol_type = other DNA
agtggtcagccacaacagccccgcaaagtattgttcacagaaacattgattacttgaaactattacctctgttgaatgtt

SEQ ID NO: 161214 - DNA, 80 bp, synthetic construct
  source 1..80: mol_type = other DNA
ggcaacccaactacaagactgctcaaatatgactatcccacaaaacctggtcagtgcggaggcgtcattctgaatacagg

SEQ ID NO: 161215 - DNA, 80 bp, synthetic construct
  source 1..80: mol_type = other DNA
taggtaggtggatagacggtccgcggtgagcggcgtgaggccgcgcaggaaggggaaggcctcctccgccggcaggcgca

SEQ ID NO: 161216 - DNA, 80 bp, synthetic construct
  source 1..80: mol_type = other DNA
ggagaaaagaggaagaagaaggggagtccctggggacggcagcgcgagtccctggggacgcgcagagcaactcccggttg

SEQ ID NO: 161217 - DNA, 80 bp, synthetic construct
  source 1..80: mol_type = other DNA
ggactgcagtcgagctgtgttctgtgtgtaccgtggataagccaaacccactaccgctttgtacatgaagatgtgtacac

SEQ ID NO: 161218 - DNA, 80 bp, synthetic construct
  source 1..80: mol_type = other DNA
atggagccccctcctaccaccctttctccgagattaagtcttggggccacaccgtccccggtgtgattgagcatgagcct

SEQ ID NO: 161219 - DNA, 80 bp, synthetic construct
  source 1..80: mol_type = other DNA
ctaccaccttcatgcaaaacttcttctctggcctcgcccaaagaaaccccacttcccttttccagcacctctttgctaag

SEQ ID NO: 161220 - DNA, 80 bp, synthetic construct
  source 1..80: mol_type = other DNA
ttggtcagctgaccgatgctcgccacttcctgggtcatgacctggcctgtgccttgtcccgtggacaatgtccctccaac

SEQ ID NO: 161221 - DNA, 80 bp, synthetic construct
  source 1..80: mol_type = other DNA
gcaaccagccaccagacgcagatgtaccataactgggtacctgcccatagtgttctgcggccacactaggggcaataaaa

SEQ ID NO: 161222 - DNA, 80 bp, synthetic construct
  source 1..80: mol_type = other DNA
gagtacacacataagtacagtacaaattaccacttcaaggatactgacgagagtgatgggctaaaggagaagcactttat

SEQ ID NO: 161223 - DNA, 80 bp, synthetic construct
  source 1..80: mol_type = other DNA
ccaaatactgtggatataaccataatgggtagtttactgcaattagattttcaaaacccaagggccttttctgaagacgt

SEQ ID NO: 161224 - DNA, 80 bp, synthetic construct
  source 1..80: mol_type = other DNA
gatgcccgcgggacggcagcgtggacgggtgtggcggcggccacgggtggtgacgttgaggctgcggacggagagctttg

SEQ ID NO: 161225 - DNA, 80 bp, synthetic construct
  source 1..80: mol_type = other DNA
tctgtgaggtaacccttctaacgatccatgccacagcatgtgacctgcggtttccgttctgctcaccacaaacgaacact

SEQ ID NO: 161226 - DNA, 80 bp, synthetic construct
  source 1..80: mol_type = other DNA
acgctggtggcgaccgcggtggagacggaggcgccgctggacccgccgccgacgccgactaccgacccgaagacctcgac

SEQ ID NO: 161227 - DNA, 80 bp, synthetic construct
  source 1..80: mol_type = other DNA
cagtgtctttggtgtggaaggattagaagcacttgaccttaacaccagtgcagggttcccatacgtaaccatgggtgtta

SEQ ID NO: 161228 - DNA, 80 bp, synthetic construct
  source 1..80: mol_type = other DNA
ccgccggtgcatagtgtccaggggcgagaggatcagtggttcgcgagcttttttcacggccacgcttcattttgcggttg

SEQ ID NO: 161229 - DNA, 80 bp, synthetic construct
  source 1..80: mol_type = other DNA
ccatattataaacaggagaaacaaacaatttgagtgggaaactaaattcacaaacaacgcaacacacattaaccctacat

SEQ ID NO: 161230 - DNA, 80 bp, synthetic construct
  source 1..80: mol_type = other DNA
cacccccagatgcatcttccccaaaggagggctgctgcccgaagggaggtgatggggatatctccgttccagccctgtca

SEQ ID NO: 161231 - DNA, 80 bp, synthetic construct
  source 1..80: mol_type = other DNA
gtgctacatccaccgcgcatgcgcggccacgcccccgccgccattttgtgcagcccgccaatttctgttcaaacaggcca

SEQ ID NO: 161232 - DNA, 80 bp, synthetic construct
  source 1..80: mol_type = other DNA
gccacacttcacaaacagtgccaagcgacgtggtgcaaaccagatgtgtgctaaaccatcacaaacgctctgagtcatct

SEQ ID NO: 161233 - DNA, 80 bp, synthetic construct
  source 1..80: mol_type = other DNA
agaagcttcgaattcgagctcccgggtaccatggcatgcatcgatagatcgcagccttaattaaggatgcatgtttaaac

SEQ ID NO: 161234 - DNA, 80 bp, synthetic construct
  source 1..80: mol_type = other DNA
aacactccatgtaaaaccaaattattaccaagtgtgtttcatgatgtcttccctggaaccaaagagccagcggtgcttca

SEQ ID NO: 161235 - DNA, 80 bp, synthetic construct
  source 1..80: mol_type = other DNA
cttcttggcctgggattccacttacaagacagggtgtgaaggcactagtgtgctagttgtgagtcctccggcccctgaat

SEQ ID NO: 161236 - DNA, 80 bp, synthetic construct
  source 1..80: mol_type = other DNA
tcaaacccactgctgtgacaactgagcggaaggacataaatgatgtggggacactccgccccatgggttacactaaccat

SEQ ID NO: 161237 - DNA, 80 bp, synthetic construct
  source 1..80: mol_type = other DNA
aatggcactttattagggaatttgctcattttccctcaccaatttatcaatttaagaactaataatacagctacaatagt

SEQ ID NO: 161238 - DNA, 80 bp, synthetic construct
  source 1..80: mol_type = other DNA
ccttcatctttctagtctggctgcacgtcttaattttcagggcggtcctcccccgccgggtggtcctcgggcggagcgac

SEQ ID NO: 161239 - DNA, 80 bp, synthetic construct
  source 1..80: mol_type = other DNA
gctccgaaagcagctccgcgaccagcgagagctacgagtccagctcaagcacctcttccaccaagtcctcaaaacccagg

SEQ ID NO: 161240 - DNA, 80 bp, synthetic construct
  source 1..80: mol_type = other DNA
gccgggcgccttctcggggccagccgccggggttggttctgcccctctctctgtccttcagaggaaccagggacctcgtg

SEQ ID NO: 161241 - DNA, 80 bp, synthetic construct
  source 1..80: mol_type = other DNA
cttaatgtggatggtagggaagtcaaagtaatcaagaggcaaattttaactgacatgaatgatactgatactgaaattac

SEQ ID NO: 161242 - DNA, 80 bp, synthetic construct
  source 1..80: mol_type = other DNA
gtctaccaaaggataggatgacggcaatgcttggcactcacgtcatctgggactttggcttacagtcatcagtcacccta

SEQ ID NO: 161243 - DNA, 80 bp, synthetic construct
  source 1..80: mol_type = other DNA
gctgtatctgcccctacacggacccccccatgcacaacaaacagaatccacagcagggatacgtattttatgaccagttt

SEQ ID NO: 161244 - DNA, 80 bp, synthetic construct
  source 1..80: mol_type = other DNA
attcatggacaatatggaaatgcaacaaacaaacacttagagtaccacctaggactatacagtgctatattcctaagtcc

SEQ ID NO: 161245 - DNA, 80 bp, synthetic construct
  source 1..80: mol_type = other DNA
caggatgtggtaagtccttggcctctaaagttatcgctagaggcctcactagtgagagcaatgtttactctctgccacct

SEQ ID NO: 161246 - DNA, 80 bp, synthetic construct
  source 1..80: mol_type = other DNA
actcaaggataccccgtttgtgagacaggacgcctatgcaaacacacaaggcatagaagacacaattgagaaagtcgtag

SEQ ID NO: 161247 - DNA, 80 bp, synthetic construct
  source 1..80: mol_type = other DNA
gcctatcaacacaccagaacactccaaactacaccccagtgtgttctatgacatatttcctggagaaaaagaaccggctg

SEQ ID NO: 161248 - DNA, 80 bp, synthetic construct
  source 1..80: mol_type = other DNA
gattgaggtctatttgagtcttagatgccctaatctattctttccttcccctgcacccaaagagaaaacctctaaagctt

SEQ ID NO: 161249 - DNA, 80 bp, synthetic construct
  source 1..80: mol_type = other DNA
aatcctttggagtgccttacaatccacaaagtcagggagtggtagaagcaatgaatcaccacctaaaaaatcagataaat

SEQ ID NO: 161250 - DNA, 80 bp, synthetic construct
  source 1..80: mol_type = other DNA
gcacaaaaagagacttgtactgactcagtggcagccagcagtagttaaaaggtgctacataatagggtacgaccccataa

SEQ ID NO: 161251 - DNA, 80 bp, synthetic construct
  source 1..80: mol_type = other DNA
gcccaccaagaggaagagacggagccggaggagggagtccagctccagcagctgtgggagcagcaactcctgcaaaagcg

SEQ ID NO: 161252 - DNA, 80 bp, synthetic construct
  source 1..80: mol_type = other DNA
ggctttcttaggatagcccatacatatgacacatcagagaatagagtaaattttctatcttccaatggtgtaatcacaat

SEQ ID NO: 161253 - DNA, 80 bp, synthetic construct
  source 1..80: mol_type = other DNA
aaacaaccagcaacaaacatataatcctagtggaagtgctgaaacaattatatggagtcaaagtgactttaccgaactta

SEQ ID NO: 161254 - DNA, 80 bp, synthetic construct
  source 1..80: mol_type = other DNA
aggccattatgaaaaagaatacagtcataggcagaacaggaaaaggggagtttacaatgttaggtgtgtatgatagaatt

SEQ ID NO: 161255 - DNA, 80 bp, synthetic construct
  source 1..80: mol_type = other DNA
gtacaatggcctgcgcttagcaacatccttacagggtctgccagtaatgaacacacctggtagtaaccaattcctcacct

SEQ ID NO: 161256 - DNA, 80 bp, synthetic construct
  source 1..80: mol_type = other DNA
tggttgctctggttcaccatggagatttattaaagaaaaagtgtgtaattggttacaattatcatacatacataaagaat

SEQ ID NO: 161257 - DNA, 80 bp, synthetic construct
  source 1..80: mol_type = other DNA
ccctaacagaactttcaaatcacccagcgacaaatttagctctactttaataacctggctaggagcaaacaataataatt

SEQ ID NO: 161258 - DNA, 80 bp, synthetic construct
  source 1..80: mol_type = other DNA
ttaaaaaaacttggggggtttttccccccccggggttccccgggagtccgtaccccggcatcctggtgcccttgtaagcc

SEQ ID NO: 161259 - DNA, 80 bp, synthetic construct
  source 1..80: mol_type = other DNA
cgacgccggtgctaccaacaaatatggttattcctcaattaatgactttggaactattgctgttcgcatagtcaatgaac

SEQ ID NO: 161260 - DNA, 80 bp, synthetic construct
  source 1..80: mol_type = other DNA
acaccgggggcataacactgaggctcccggtcccatgccactggaaaaagggctggtacttgttcttaatggcgtaggtc

SEQ ID NO: 161261 - DNA, 80 bp, synthetic construct
  source 1..80: mol_type = other DNA
acccggtaccggtgacatccctagaagaatacaagtcatcgacccgcgggtcctgggaccgcactactcgttccggtcat

SEQ ID NO: 161262 - DNA, 80 bp, synthetic construct
  source 1..80: mol_type = other DNA
acttagttatgacaatgttacatttctcaagagaggcttcaagcaggatacaaaatattccttcttggtacacccaacat

SEQ ID NO: 161263 - DNA, 80 bp, synthetic construct
  source 1..80: mol_type = other DNA
tgctcagggacactacacatataaagcaggatgctatgccccagggaatcgaggagatcattcagcaggttgctagcaat

SEQ ID NO: 161264 - DNA, 80 bp, synthetic construct
  source 1..80: mol_type = other DNA
agacacaattgagaaagtcgtaggagatgctcttgctatttcaatgccaaaagtggccgacactaaaccatctggaccag

SEQ ID NO: 161265 - DNA, 80 bp, synthetic construct
  source 1..80: mol_type = other DNA
attgcatgaaaactattacccagtcataggcacttcctctttagaaaacggtacaaaccacaatgcctctgctataacta

SEQ ID NO: 161266 - DNA, 80 bp, synthetic construct
  source 1..80: mol_type = other DNA
gaggcgtcaggatgagtctgttgcacaccttttggcggctacccgtcgccgtcttcttcgagccgcacgaggaaaacgtg

SEQ ID NO: 161267 - DNA, 80 bp, synthetic construct
  source 1..80: mol_type = other DNA
aaaactatacaacaaatcattgtatcactcaaattttctattaatgagacaatgacacctgatgtcaccaatcccttgat

SEQ ID NO: 161268 - DNA, 80 bp, synthetic construct
  source 1..80: mol_type = other DNA
gctgtattgtgcaacaatgaccccaggttgagtgcaaacctcaaagaagctgtaatgtcaaagtacaaaggcaataaaaa

SEQ ID NO: 161269 - DNA, 80 bp, synthetic construct
  source 1..80: mol_type = other DNA
ctgatgcaactgaccccggggcggcgtactatggggccgtttcaataaatgactttggtctccttgcagtaagagtggtc

SEQ ID NO: 161270 - DNA, 80 bp, synthetic construct
  source 1..80: mol_type = other DNA
ttcccagtaggtgttgatgcacagggacaccaaaggcacgttcatgacaaacttttcctcaaacccgtggatcatagcct

SEQ ID NO: 161271 - DNA, 80 bp, synthetic construct
  source 1..80: mol_type = other DNA
tgatataaagcggtgcacttccgaatggctgagtttttcacgcccgtccgcagcgagagagccacggaggggatcccgcg

SEQ ID NO: 161272 - DNA, 80 bp, synthetic construct
  source 1..80: mol_type = other DNA
ttcgcgctcgcgccggtgggctgcgcccccccccgcgcatgcgtggtgcccccccccccgcgggtggctccgccctccgg

SEQ ID NO: 161273 - DNA, 80 bp, synthetic construct
  source 1..80: mol_type = other DNA
ggcctcgagaacccaggcatgggcactctcagggcccatggaaaccctggtcagcacatctcccacctcagtgggatgga

SEQ ID NO: 161274 - DNA, 80 bp, synthetic construct
  source 1..80: mol_type = other DNA
tggtagtcccagatttggagctatttacacatgtaattataagataatgaactaccatttgatgactccagaagaccact

SEQ ID NO: 161275 - DNA, 80 bp, synthetic construct
  source 1..80: mol_type = other DNA
gaacggacacttacacaatttaaaaaaatagcacacaaatacattgtgttccccgaaatttacctgcataaacgaaacta

SEQ ID NO: 161276 - DNA, 80 bp, synthetic construct
  source 1..80: mol_type = other DNA
cattatccgaaaaacgttatcatcatggactggcaacttacggttatatggacgatactgatgttcacgttgttagaagg

SEQ ID NO: 161277 - DNA, 80 bp, synthetic construct
  source 1..80: mol_type = other DNA
ctggcgacgtggcttccttagcgacaaagctctcagacgcttgcaagagaaaccactcgattatgaagagtatagccaaa

SEQ ID NO: 161278 - DNA, 80 bp, synthetic construct
  source 1..80: mol_type = other DNA
gtacaactcggtggtgagcctgaccccacaaccccagtttttacaattagagttgatattgcatcacaaccactagctac

SEQ ID NO: 161279 - DNA, 80 bp, synthetic construct
  source 1..80: mol_type = other DNA
gcgttttgacttactttaacgttccggcaaccctgaaacgcaaactacgaactagaaacaacgctacccacataccgtga

SEQ ID NO: 161280 - DNA, 80 bp, synthetic construct
  source 1..80: mol_type = other DNA
agtcaagattactagtagaatataccacaaagcaaaacacatcagtgcctggggtcccagaccaccaagagctgtaccat

SEQ ID NO: 161281 - DNA, 80 bp, synthetic construct
  source 1..80: mol_type = other DNA
aagacagaccaaaaggaggaccagtaggcacagtattcaacacgttcaaaactcaggaacacatagttgatcccaaatat

SEQ ID NO: 161282 - DNA, 80 bp, synthetic construct
  source 1..80: mol_type = other DNA
aggagacatttcacagactgctattctccaaggagaccctatggagcaagcaattgagaatactgtaaacaggactctca

SEQ ID NO: 161283 - DNA, 80 bp, synthetic construct
  source 1..80: mol_type = other DNA
acgtgctcgcctccactaactcacattccataacaccccccaccgtcgctcacagtgatgccttgtcccgtcgcttcgct

SEQ ID NO: 161284 - DNA, 80 bp, synthetic construct
  source 1..80: mol_type = other DNA
ctgtccctactgtgcagagtcttgcagaactttctttcttcacccacactgctacccctctcaaccagactgcatcaacc

SEQ ID NO: 161285 - DNA, 80 bp, synthetic construct
  source 1..80: mol_type = other DNA
aaataaccttgtctaaaagaaccagtgagtgtaatcttcccagcatacataacccgtgtaaaaccaaattacaacctagt

SEQ ID NO: 161286 - DNA, 80 bp, synthetic construct
  source 1..80: mol_type = other DNA
aagtgcgtggtgctgtgttttgtgtcagcatgcaatgacttttctgtgcgcatgctacgtgacacaccattcattggaca

SEQ ID NO: 161287 - DNA, 80 bp, synthetic construct
  source 1..80: mol_type = other DNA
tagatgagatccagggtctcgtaaataagcacggccgaagcggcggtcaccaccaggacgtagagtccgctgtagatctt

SEQ ID NO: 161288 - DNA, 80 bp, synthetic construct
  source 1..80: mol_type = other DNA
tggttttactccatttgactaattcacttacaagcttattgctataatttttattgactaaacaacaataccacaatggg

SEQ ID NO: 161289 - DNA, 80 bp, synthetic construct
  source 1..80: mol_type = other DNA
cctgtgtagatctgcttgtgcgcacatgtcttcatatgaggcattcccaaccgagtctcaggacgggacacagagattcg

SEQ ID NO: 161290 - DNA, 80 bp, synthetic construct
  source 1..80: mol_type = other DNA
ttgtccactgatttgcggtaaagccttacagttgatggacaaaaataccagacagcggttcactctggatgagatcacaa

SEQ ID NO: 161291 - DNA, 80 bp, synthetic construct
  source 1..80: mol_type = other DNA
accacataaacattaaccatgagtacagactactcataaaatgtccatacacacaccccatgatgaccaaacacgaccgt

SEQ ID NO: 161292 - DNA, 80 bp, synthetic construct
  source 1..80: mol_type = other DNA
tttccgcttccattgatgcccaaatgtcagtattaaatacattatacacacaaaacgcatactgggaatctaacctaact

SEQ ID NO: 161293 - DNA, 80 bp, synthetic construct
  source 1..80: mol_type = other DNA
ggaaaagccctacaattcagagacagaaatactggtgaacacttgtccctggccactgtgtacaatagaattactcagga

SEQ ID NO: 161294 - DNA, 80 bp, synthetic construct
  source 1..80: mol_type = other DNA
cgctacccaggccacaaaatgtatccctctgtccacactctattccctgatgtttcacctctcaagatcccccaatctgt

SEQ ID NO: 161295 - DNA, 80 bp, synthetic construct
  source 1..80: mol_type = other DNA
gggttaagtggtaccccaacattgcacatcaaaaggaagtgtttgaggcaatagttgactgtggaccgtttgtacccaga

SEQ ID NO: 161296 - DNA, 80 bp, synthetic construct
  source 1..80: mol_type = other DNA
cggtccaggccttcctgaatgtaactgtaggagggcgtttcaccactgtggcggtgtacgtgaatggagagacccctatt

SEQ ID NO: 161297 - DNA, 80 bp, synthetic construct
  source 1..80: mol_type = other DNA
aagggttgaaatctcagtacagacagatatggatgcacttctcttcaatattccacttgacattcaattggatgggcctc

SEQ ID NO: 161298 - DNA, 80 bp, synthetic construct
  source 1..80: mol_type = other DNA
gagttggaggaggagaaggagccggggcggctgattgcggtggctgctgctgagttggaggaggagaaagagtcgtggcg

SEQ ID NO: 161299 - DNA, 80 bp, synthetic construct
  source 1..80: mol_type = other DNA
gcagcgaggcggtgacaccgtccaacaacgcgtgcagccgctcgggcgggtagagccgcagacggcgcagcaggtagtcg

SEQ ID NO: 161300 - DNA, 80 bp, synthetic construct
  source 1..80: mol_type = other DNA
tagtgtggatagactacctctcaaagtcagacgctgtctggaaaccccctcaaagcaaatgcaccattaaagaccaaccc

SEQ ID NO: 161301 - DNA, 80 bp, synthetic construct
  source 1..80: mol_type = other DNA
tccatttatagagcaggccgcagaactgcagaatgaagtgcgacaagcggtagagggagcgataggtagggttgctgaca

SEQ ID NO: 161302 - DNA, 80 bp, synthetic construct
  source 1..80: mol_type = other DNA
tatttataggcccaaacagatacaatttacaatttcaaacagcatacgtagacaccacatataacccactcatggacaaa

SEQ ID NO: 161303 - DNA, 80 bp, synthetic construct
  source 1..80: mol_type = other DNA
tgttgagaatactaaccccagtggtccgagcaactcactggaagtcccgatgttaacagctgtggagactggtcacacat

SEQ ID NO: 161304 - DNA, 80 bp, synthetic construct
  source 1..80: mol_type = other DNA
gatcgccacctgcgtcgtggccctcgtctcctcgatcgtcaccctgcacccccacttggaggaggtgaaggtagccgtgg

SEQ ID NO: 161305 - DNA, 80 bp, synthetic construct
  source 1..80: mol_type = other DNA
aacagtactttgagtgggaaacagataaaggcccacaggccacatctaagtatggcaaacgccacacttggactaagccc

SEQ ID NO: 161306 - DNA, 80 bp, synthetic construct
  source 1..80: mol_type = other DNA
gcctagagacgtacaagtatctgacccgagcaccattgggccgccgtgggtgttccacgagtgggaccaacgacgtggac

SEQ ID NO: 161307 - DNA, 80 bp, synthetic construct
  source 1..80: mol_type = other DNA
gtcaggaccattcagctaccccgacgaacttaagaacactgtactgactgccaaatacagatttgactttaagtggggtg

SEQ ID NO: 161308 - DNA, 80 bp, synthetic construct
  source 1..80: mol_type = other DNA
gttctaccaaatccaaagaatccaacaaaatcaagatatcaaccctaccttgttaccaagggggggggatctagcatcct

SEQ ID NO: 161309 - DNA, 80 bp, synthetic construct
  source 1..80: mol_type = other DNA
gacgcgtgtctgtgtctgcgtcattccccggggaaaagaggacggcagcgcgggtccctggggacacacgaagagcaacg

SEQ ID NO: 161310 - DNA, 80 bp, synthetic construct
  source 1..80: mol_type = other DNA
caagccatagaggtcggcaaggcacgacttgttaaaaacggggcgaagcacatcatccacgccgtcgggcccaatttcaa

SEQ ID NO: 161311 - DNA, 80 bp, synthetic construct
  source 1..80: mol_type = other DNA
acactcagcaagacttgtgtccggtaaacctggcgcaagttgtggttactgcggctgactttcaacatccgttctgctca

SEQ ID NO: 161312 - DNA, 80 bp, synthetic construct
  source 1..80: mol_type = other DNA
ttgatacgaggaccacctgggtgtggtaagtccttggtaacatctataatagcacacggattaactaatgaggccaatat

SEQ ID NO: 161313 - DNA, 80 bp, synthetic construct
  source 1..80: mol_type = other DNA
aggccaacaactggttctggacacaattacaaactaagaatgacttacattcagagtatggcaaagcaaacttacaatgc

SEQ ID NO: 161314 - DNA, 80 bp, synthetic construct
  source 1..80: mol_type = other DNA
tattagaagtcaacaatttgactagcaacaacagtgctgccaatgtcatggagcggttattaataccagttcaagctcaa

SEQ ID NO: 161315 - DNA, 80 bp, synthetic construct
  source 1..80: mol_type = other DNA
atcccccccaaaaacgagaaaggatgcgatgcttggcactcatattatttgggatctaggtttgcaatctagttgcacca

SEQ ID NO: 161316 - DNA, 80 bp, synthetic construct
  source 1..80: mol_type = other DNA
agctaggacccactcaagaccacgaaacagtgggtctagtttgtgttatatgcccttacacagaacctaaactatttgta

SEQ ID NO: 161317 - DNA, 80 bp, synthetic construct
  source 1..80: mol_type = other DNA
caccatcagcaaagctccattatgcaggagacggacgacctagacgaagaggacacctcaatttacctgtccccgccccc

SEQ ID NO: 161318 - DNA, 80 bp, synthetic construct
  source 1..80: mol_type = other DNA
ggggaaatccttgaccacttccattgtggggagggcattggcagaacaattcaactcagcagtttattcactaccaccag

SEQ ID NO: 161319 - DNA, 80 bp, synthetic construct
  source 1..80: mol_type = other DNA
aatgtttacatacttgagatttgatgtggaggtgacctttgtgataaccagtgtcatcaaaaccgctaatggggaagtcc

SEQ ID NO: 161320 - DNA, 80 bp, synthetic construct
  source 1..80: mol_type = other DNA
caggtggagaccattttggaagtcaacaacaccaccggcacgaccggtataacccggttgctcataccagtttcagcaca

SEQ ID NO: 161321 - DNA, 80 bp, synthetic construct
  source 1..80: mol_type = other DNA
aagaatacgcaattacaattttgcatgacactgttataaaaattatcaaacgaagtcgtaaaagatatatgtgaataaaa

SEQ ID NO: 161322 - DNA, 80 bp, synthetic construct
  source 1..80: mol_type = other DNA
ggggaatgaccgcagacaaatttactctaagaattctatatgatgaatacaagagatttatgaattactggacagcctca

SEQ ID NO: 161323 - DNA, 80 bp, synthetic construct
  source 1..80: mol_type = other DNA
gggcccagtgatatgtatgtccacactcaggatgcaaaatatatgtgtgcccacctaacaaaacctggagctgaaaccat

SEQ ID NO: 161324 - DNA, 80 bp, synthetic construct
  source 1..80: mol_type = other DNA
cctagcctggcgctgctttctttcgaggagacggtgcacatgtacactaccttccgcgacatttttctcaagcgctacca

SEQ ID NO: 161325 - DNA, 80 bp, synthetic construct
  source 1..80: mol_type = other DNA
gctcaattgatgacccttgatataaatcccagcaatataactatagaagatagtgtgtttggaactgatggactagaggc

SEQ ID NO: 161326 - DNA, 80 bp, synthetic construct
  source 1..80: mol_type = other DNA
tgcaaggtgatgtggtggaagcagtcgagaacgcggtggcaagagtggctgacacaatcggtagtggtccgtcaaactca

SEQ ID NO: 161327 - DNA, 80 bp, synthetic construct
  source 1..80: mol_type = other DNA
tcaggtacacaaggaatttatattaaaaaaacagacagtaactacgggtaccactcctttcaagttaaaaacaaaagaca

SEQ ID NO: 161328 - DNA, 80 bp, synthetic construct
  source 1..80: mol_type = other DNA
attttgatgatacctgagcaccagttggcaaatgcaaatgctaccaatgcagacgctggatacaattatacccatcctgg

SEQ ID NO: 161329 - DNA, 80 bp, synthetic construct
  source 1..80: mol_type = other DNA
aggcaaatttctcttagcctatacacctccaggtggtgaacaccccaccacaaggaaaaaagcaatgcttggtgtgcatg

SEQ ID NO: 161330 - DNA, 80 bp, synthetic construct
  source 1..80: mol_type = other DNA
atacacctacgagggcaactttgtaaatgtaactttcagtctagaggccatctatgaacaattcctgtaccacagaaaca

SEQ ID NO: 161331 - DNA, 80 bp, synthetic construct
  source 1..80: mol_type = other DNA
tagggatcagactgaaaaaactgcaattaaaaccagaaaagccattacaacggctggcccaagtgacatgtatgtacacg

SEQ ID NO: 161332 - DNA, 80 bp, synthetic construct
  source 1..80: mol_type = other DNA
aaagatagtttcagtcaaataacaagtggtatccaagatcaactcacaagcaaaatcctcaaatggtttgtccgcattat

SEQ ID NO: 161333 - DNA, 80 bp, synthetic construct
  source 1..80: mol_type = other DNA
tttattgagcagggtaaaaaccacgtacaagaaccacgttgtctatccccccaaaaaaaaacacaccgtcagggaacaca

SEQ ID NO: 161334 - DNA, 80 bp, synthetic construct
  source 1..80: mol_type = other DNA
cggtgtttttattttttttcgcgcgacggggacggtggtgaggacggcgcgttgcggacgctcggtggttggcagcgggt

SEQ ID NO: 161335 - DNA, 80 bp, synthetic construct
  source 1..80: mol_type = other DNA
ggacggcgaataaaagcgacgtgcgcgtctgtcttgcgtgtgtagtccccaggggacggccgcgcaagtccccggtgacg

SEQ ID NO: 161336 - DNA, 80 bp, synthetic construct
  source 1..80: mol_type = other DNA
aggttcaatgctgagttcacgttcgtggcaactggacttaatggcactgcaccacagaccatgctccaatacatgtacat

SEQ ID NO: 161337 - DNA, 80 bp, synthetic construct
  source 1..80: mol_type = other DNA
gctgcacccttaaggtgtacagagacagacacgtagactacataatgacctttgacactatacctcccatgaaaatgaac

SEQ ID NO: 161338 - DNA, 80 bp, synthetic construct
  source 1..80: mol_type = other DNA
ctgctcttgcacgagtggtatgaaaaattttaaatgtttatatatatagaagtaataaacacttagttttttagttttat

SEQ ID NO: 161339 - DNA, 80 bp, synthetic construct
  source 1..80: mol_type = other DNA
cacaatacctgaagccattaaaaggcgattcttcattgatgcagatcttgttgtaatgtccaaatacagaaataatattg

SEQ ID NO: 161340 - DNA, 80 bp, synthetic construct
  source 1..80: mol_type = other DNA
gcacaagtttcatctcagaaagtaggtgctcatgaaaacaccaacgtggccactggcgggtcaacggtgaactacacgac

SEQ ID NO: 161341 - DNA, 80 bp, synthetic construct
  source 1..80: mol_type = other DNA
atgatcagataagcatacagtgggctgttcacctaatttcatcaaaacgtctcctcttggacaatgtggacctgggggtc

SEQ ID NO: 161342 - DNA, 80 bp, synthetic construct
  source 1..80: mol_type = other DNA
ccaggggctcgaggaagacctcgcactccaccgggcaggtaaacatggtcaccccgcccccatctcccccagttccccgc

SEQ ID NO: 161343 - DNA, 80 bp, synthetic construct
  source 1..80: mol_type = other DNA
ggtggtataaaaaccagggagggcactgaaagtactaaaaccatcagctacactgtcaagtcctgtaaaggaatgtgtgg

SEQ ID NO: 161344 - DNA, 80 bp, synthetic construct
  source 1..80: mol_type = other DNA
gtaccacgcccggtgagcccctgaaagatgctctgggtcgccaggtgtctctacgctcctacgacaacatccctccgact

SEQ ID NO: 161345 - DNA, 80 bp, synthetic construct
  source 1..80: mol_type = other DNA
gaatgacatacagtatgagaggtaaggatgcgtaaccaataccaagattgggtatgtgcgttcttacgatgacctagatg

SEQ ID NO: 161346 - DNA, 80 bp, synthetic construct
  source 1..80: mol_type = other DNA
aggacccccgtctccccgaagccaccgatctgcgacgccatcactcttgccaagcatgacaagggcgacatcccgacgcc

SEQ ID NO: 161347 - DNA, 80 bp, synthetic construct
  source 1..80: mol_type = other DNA
gaacattgtgtttcagagcactagacaacaccactagcaataataacatccaggtatatgccaaacccaaacacacccgt

SEQ ID NO: 161348 - DNA, 80 bp, synthetic construct
  source 1..80: mol_type = other DNA
gacttgctccatattgtgttttgcatcagcatgcaacgacttttcagtgaggttgttgcgtgacaccccttttataagcc

SEQ ID NO: 161349 - DNA, 80 bp, synthetic construct
  source 1..80: mol_type = other DNA
ggaattaagaaaagatcaatattgaataaagaaaccaaggatactgctaaaatggaagagtgcctaagtaaatatggtat

SEQ ID NO: 161350 - DNA, 80 bp, synthetic construct
  source 1..80: mol_type = other DNA
gtaagacaatcacggggtgaccggggccttattttgccacaaggcccacaaacagcccctcaggccgtgttggtacagcc

SEQ ID NO: 161351 - DNA, 80 bp, synthetic construct
  source 1..80: mol_type = other DNA
ttagcagccgctatagggagggttgcagacacagtgggaactggaccgaccaactcagaggcaattccagcgcttactgc

SEQ ID NO: 161352 - DNA, 80 bp, synthetic construct
  source 1..80: mol_type = other DNA
caaaaagacgtgtttcatgacatagtgacgtgcggcccctgggcctacagagacgacgaaaaaaactcccaacttatagc

SEQ ID NO: 161353 - DNA, 80 bp, synthetic construct
  source 1..80: mol_type = other DNA
tgagcctaaacccaaagcaagagctcctgaaagaagagtcgtgactcaaggcccagaagaagagtttggtcgttcgttaa

SEQ ID NO: 161354 - DNA, 80 bp, synthetic construct
  source 1..80: mol_type = other DNA
ggtcgctataggcttcggcctcgcttttaggccttccggactacaaatatggcgcattccgtgacgtcatggccgccatt

SEQ ID NO: 161355 - DNA, 80 bp, synthetic construct
  source 1..80: mol_type = other DNA
acttcacatgcttcaatggtaatcaacttcacatgcttcaatgctattgtgggaggctgtggaataaatccttacaagga

SEQ ID NO: 161356 - DNA, 80 bp, synthetic construct
  source 1..80: mol_type = other DNA
tgtttacacatccactccttatgctattaaacaaacaccatgtagtagtccccagcctcagaacaaaaccaaagggcaaa

SEQ ID NO: 161357 - DNA, 80 bp, synthetic construct
  source 1..80: mol_type = other DNA
gtccacactgatagagcaaatggaagccttcattgaaccacgacctagtgtgttcaaatgctttgttaccaaggctgcaa

SEQ ID NO: 161358 - DNA, 80 bp, synthetic construct
  source 1..80: mol_type = other DNA
ttggatataaaacaagggccgaaggagcccttccaaagctatgtagataggttctacaaaagtctaagggctgagcaaac

SEQ ID NO: 161359 - DNA, 80 bp, synthetic construct
  source 1..80: mol_type = other DNA
ttctgcctatacctgccgtctctgagggggggagaaagacggacggtagcgtaggggaggatctcgtggaggccgtgggg

SEQ ID NO: 161360 - DNA, 80 bp, synthetic construct
  source 1..80: mol_type = other DNA
tacagctaatattatatgttttgtttcaggatgcaaagatttctgccttagaatggccagagatacaaacctacattccc

SEQ ID NO: 161361 - DNA, 80 bp, synthetic construct
  source 1..80: mol_type = other DNA
gtctatgggttcaatacattaaataacatgggcacactgtatgctagacatgtcaatggagcaagtcctggacctgtgat

SEQ ID NO: 161362 - DNA, 80 bp, synthetic construct
  source 1..80: mol_type = other DNA
acacaatcaccttcagccttaccatatttccactcaacaaaagagatattcataccaggaaaagtcagtaatttatcaga

SEQ ID NO: 161363 - DNA, 80 bp, synthetic construct
  source 1..80: mol_type = other DNA
tatttacatattggcagaacaaattatcacccagaatctaagaaccctattaaaaccagaaaaaccatttcgacatatgg

SEQ ID NO: 161364 - DNA, 80 bp, synthetic construct
  source 1..80: mol_type = other DNA
acatcacaggcggtgcctagtgatactattcagacaaggtgtgtgatgaatcgtcacaagcgatcagagtcgtctatcga

SEQ ID NO: 161365 - DNA, 80 bp, synthetic construct
  source 1..80: mol_type = other DNA
acaaaagacgacgccaagtggtggacgtcatggcagccattttccaaggcccaataactcttgaaggcccaccaccagct

SEQ ID NO: 161366 - DNA, 80 bp, synthetic construct
  source 1..80: mol_type = other DNA
ggccgtcatatctaaaggatgatgaagcagtgtcggaggaccaacccacccaacctgacgtggctacctgcaggttctac

SEQ ID NO: 161367 - DNA, 80 bp, synthetic construct
  source 1..80: mol_type = other DNA
tgcaggacgattccacaagacagaacactgacaccccggtcctgacccatcaaattatgtacgtaccgccagggaggccc

SEQ ID NO: 161368 - DNA, 80 bp, synthetic construct
  source 1..80: mol_type = other DNA
acaggttagcaagcaaaatgttggttcacatgagaatgttgtctctgctaataatggctcagttattaaatatttcaaca

SEQ ID NO: 161369 - DNA, 80 bp, synthetic construct
  source 1..80: mol_type = other DNA
agatgtacgatagctgggttatcaacaccagacaagtggctcagctgcgcaggaagctagagttcttcacatatgtgagg

SEQ ID NO: 161370 - DNA, 80 bp, synthetic construct
  source 1..80: mol_type = other DNA
atgtcactttcttgaaaagaggatttaagcaagatgagaaacaccagtttttaatacacccaacattcccagttgaagag

SEQ ID NO: 161371 - DNA, 80 bp, synthetic construct
  source 1..80: mol_type = other DNA
tatttactggagatgtagatattcataaattaaaacaggtaatacagaagcaacatatgtttcttcctgataaaatatct

SEQ ID NO: 161372 - DNA, 80 bp, synthetic construct
  source 1..80: mol_type = other DNA
gaatacgagtaccacctaggctggtactctaacatttttataggcaacctaagacataacctagcatttaggccagctta

SEQ ID NO: 161373 - DNA, 80 bp, synthetic construct
  source 1..80: mol_type = other DNA
ctaagaaggatgaacctccaacattaaaaccaagaatggaggttgaattcctaaaaaggaaacctggatacttcccagag

SEQ ID NO: 161374 - DNA, 80 bp, synthetic construct
  source 1..80: mol_type = other DNA
aaggaaacgcctgctccagagtacattaatgacttgttgcaagcagttgacagtcaggaggtgagggactactgtgagag

SEQ ID NO: 161375 - DNA, 80 bp, synthetic construct
  source 1..80: mol_type = other DNA
ggtagtttaatcttgatattgggcactctttatgcactttacaaattgatgtgtattgcacaaggaccttattcaggaat

SEQ ID NO: 161376 - DNA, 80 bp, synthetic construct
  source 1..80: mol_type = other DNA
taattgtaatggcactctgttgggcaaccttacaatcttcccccatcaactaatcaatttaagaacaaacaactccagta

SEQ ID NO: 161377 - DNA, 80 bp, synthetic construct
  source 1..80: mol_type = other DNA
tgagagatcgcattaagaagatgctcgcggaccgaaaggagaccgcgccgctgattacagctgatgacattgaggaggcc

SEQ ID NO: 161378 - DNA, 80 bp, synthetic construct
  source 1..80: mol_type = other DNA
tgctcaggtatctaaacaaaacactggttcgcatgaaagcgcaattaatgctaataatgggggggtaatcaaatatttta

SEQ ID NO: 161379 - DNA, 80 bp, synthetic construct
  source 1..80: mol_type = other DNA
ccgacagcccctccagcggacccagcagtggatctgctaaagagctacatgcaacagggcaagaaacaaaaggagaacag

SEQ ID NO: 161380 - DNA, 80 bp, synthetic construct
  source 1..80: mol_type = other DNA
acgacaagtggcacagctccgcaggaagatcgagttgttcacatacaccagatttgacgtagagattacttttgttataa

SEQ ID NO: 161381 - DNA, 80 bp, synthetic construct
  source 1..80: mol_type = other DNA
ggcctgtcggagatggccgtgaggcatcacgtacggcagctgaggagaaacggagaagaaaggaaaattaccgtcagggg

SEQ ID NO: 161382 - DNA, 80 bp, synthetic construct
  source 1..80: mol_type = other DNA
actgcactcactagacctcaagttgtggccacagcagagaacacccgtcctagccaacatcaaattggaactggtgaggt

SEQ ID NO: 161383 - DNA, 80 bp, synthetic construct
  source 1..80: mol_type = other DNA
ttatccgcatgattactaacaagcctaaagatcttactttattatactttggttctctgtttttaccccctgattgacct

SEQ ID NO: 161384 - DNA, 80 bp, synthetic construct
  source 1..80: mol_type = other DNA
cgtcggtagcaacgtcactctgaaaaaatgtaatgatacagcatggtacaatgtggactggattaaatacgaagaacctt

SEQ ID NO: 161385 - DNA, 80 bp, synthetic construct
  source 1..80: mol_type = other DNA
cgcctgggactatgagctggcgccctccggtccacaatgccgctggaatcgaccgtaactggttcaaatcctgtttcaga

SEQ ID NO: 161386 - DNA, 80 bp, synthetic construct
  source 1..80: mol_type = other DNA
aaacaacggccagaggaagctcggaggcacaagggagggggggctagacgcggaaaagaggcagacgaagtacggcacaa

SEQ ID NO: 161387 - DNA, 80 bp, synthetic construct
  source 1..80: mol_type = other DNA
cgtcgctgggtatcaaccccgcggctgaccgtcgtccggtaaaggaacaacccgtcgtcgcaagccgggttcgaccaaga

SEQ ID NO: 161388 - DNA, 80 bp, synthetic construct
  source 1..80: mol_type = other DNA
gtaccttctttagcatcacaaccacataaaagaaagccatacaaaagaaaatttataagaccaccaaaattaatgaaaaa

SEQ ID NO: 161389 - DNA, 80 bp, synthetic construct
  source 1..80: mol_type = other DNA
gaccagggccctggactcacgaatggcccgacgggtcttagagaaagaaacaggcaccctcgagggtgcccccgacccga

SEQ ID NO: 161390 - DNA, 80 bp, synthetic construct
  source 1..80: mol_type = other DNA
gggtaatgctaagtgttgccccctcatatgtgggaaagcagtggtctttagagatagaaatacaggggattacctttcct

SEQ ID NO: 161391 - DNA, 80 bp, synthetic construct
  source 1..80: mol_type = other DNA
ttccctccctcaggcaccattatgagaaatgtcagattcgccacccccatcgtccggctcttgtgccaaggggctgagct

SEQ ID NO: 161392 - DNA, 80 bp, synthetic construct
  source 1..80: mol_type = other DNA
agatttccatgttcccatggccgccctagaggacaaggggagatgcttcactagtgattatgttttggcaagcacaaacc

SEQ ID NO: 161393 - DNA, 80 bp, synthetic construct
  source 1..80: mol_type = other DNA
ctgaacctacagtgtgctcttaaaccatgcaaagatgggaagataggtaatgccagatgttgccctttgatatgtggcaa

SEQ ID NO: 161394 - DNA, 80 bp, synthetic construct
  source 1..80: mol_type = other DNA
tcaaagagagccaacaggaagatatttattaatattccattagtaaacgaggcgtgaagcaggcgtggtttcaataacgg

SEQ ID NO: 161395 - DNA, 80 bp, synthetic construct
  source 1..80: mol_type = other DNA
ttgccaacgcctactcccacttttacgatggctttgcaaaggtgccgattgaaggtgagaccacagattcgggtgatgca

SEQ ID NO: 161396 - DNA, 80 bp, synthetic construct
  source 1..80: mol_type = other DNA
tttactaacagactccgagtcgctcttggactctgggggggcatacagcaacgaaagtgagtgaggccagacttcgccat

SEQ ID NO: 161397 - DNA, 80 bp, synthetic construct
  source 1..80: mol_type = other DNA
aactcagaaacttctaacacaaagtggtacaattggcaatatacatacaataaagttatgaagccaatttactacgcagc

SEQ ID NO: 161398 - DNA, 80 bp, synthetic construct
  source 1..80: mol_type = other DNA
gaagattatacttgcagagtgtaaaaagattcccttgtatcaagaacaggtgaaaggttatccaatggcagatgaaaagg

SEQ ID NO: 161399 - DNA, 80 bp, synthetic construct
  source 1..80: mol_type = other DNA
ggccgcgaacgggtccacaatcaattatacaaccatcaactactataaggacagtgcaagcaattcggcgactcggcagg

SEQ ID NO: 161400 - DNA, 80 bp, synthetic construct
  source 1..80: mol_type = other DNA
gaaaacaaactctgccaacataaatgtaaaatacaaattcaggttccattttgggggaaaccctgtgtccgaacagattg

SEQ ID NO: 161401 - DNA, 80 bp, synthetic construct
  source 1..80: mol_type = other DNA
cggttggtacgcgtggcttcgttgcgtatggccaccaccacgttaaagagagacggtggcaccagctcgaagcctaacac

SEQ ID NO: 161402 - DNA, 80 bp, synthetic construct
  source 1..80: mol_type = other DNA
gtctctcaggacctcaaaggcggggccagagactcccgagtatagccccctgggcttggttcgcctgaactcggcggcaa

SEQ ID NO: 161403 - DNA, 80 bp, synthetic construct
  source 1..80: mol_type = other DNA
ctatttcctcaaattgtgaaactattgcaaaggacatctttggcactcatacacttagccagcaccaagctattggacta

SEQ ID NO: 161404 - DNA, 80 bp, synthetic construct
  source 1..80: mol_type = other DNA
ccaatcaatgaaagacccaagcaagcctggtgttggtttggtgggagttggaaagaggcaatccaggaggtaaaggaaac

SEQ ID NO: 161405 - DNA, 80 bp, synthetic construct
  source 1..80: mol_type = other DNA
acgtttccgacaacctacagagcacgcgcgtttaccagatcccagttagtgcagcgaacagctcacaaacagagtcagta

SEQ ID NO: 161406 - DNA, 80 bp, synthetic construct
  source 1..80: mol_type = other DNA
ttgttgatggtcactggcagcgtgacaaccggacgggccttgcagacctggctaagacagtctgtggccgcgcagaccac

SEQ ID NO: 161407 - DNA, 80 bp, synthetic construct
  source 1..80: mol_type = other DNA
cagatccagtggatgtataggcagcaaaatcccgtgccggtagggaacatctacagaagatggatccagatagggctgca

SEQ ID NO: 161408 - DNA, 80 bp, synthetic construct
  source 1..80: mol_type = other DNA
aactatgcatctcactgcgatgacatagagtaccctggacccctaggagggggactcacctctatgaggtttactttaag

SEQ ID NO: 161409 - DNA, 80 bp, synthetic construct
  source 1..80: mol_type = other DNA
gcaccataaacatgtttggagaccccaaaccttacaacccttccagtaatgactggaaagaggaatatcaggcctgtaga

SEQ ID NO: 161410 - DNA, 80 bp, synthetic construct
  source 1..80: mol_type = other DNA
agctgctgagatcggggcatcatcgaatactagtgatgagagtatgattgagacacgatgcgtccttaactcacacagta

SEQ ID NO: 161411 - DNA, 80 bp, synthetic construct
  source 1..80: mol_type = other DNA
acatgtggcaaggctttgattctgcaaaacaaaagaacaaaagctagttactccatcaacactgtggtgcaacagctacg

SEQ ID NO: 161412 - DNA, 80 bp, synthetic construct
  source 1..80: mol_type = other DNA
tatttaattatgggggcaatatataggttatatataggcaccatgggtgctcaggtatttagacagaatggtggtactca

SEQ ID NO: 161413 - DNA, 80 bp, synthetic construct
  source 1..80: mol_type = other DNA
agtgataaagatgaacatgataaaattggtaagggatttaaaacatggaaaattagtcttcaagaaatggcacaaatcag

SEQ ID NO: 161414 - DNA, 80 bp, synthetic construct
  source 1..80: mol_type = other DNA
tggcgacggagacacgggcgttgattgcggcggggacgatggtgaggacggaggcctttcgtgctgcgcacggactgagg

SEQ ID NO: 161415 - DNA, 80 bp, synthetic construct
  source 1..80: mol_type = other DNA
ggtacaaacatactcatccaggggagacaggccacgaaattgggagcaacgccggccgagatgacaaacaacctgctgaa

SEQ ID NO: 161416 - DNA, 80 bp, synthetic construct
  source 1..80: mol_type = other DNA
gatttatacctgaacacatcaatgactggcggaacatgcgattggccaccaatgttcctaagttcccaatgctggatgtt

SEQ ID NO: 161417 - DNA, 80 bp, synthetic construct
  source 1..80: mol_type = other DNA
ttccagtttctggaactacggcagttgcgaactttgtggatggaacggatacatacataaacagtaccacgaaaacaaat

SEQ ID NO: 161418 - DNA, 80 bp, synthetic construct
  source 1..80: mol_type = other DNA
cgcggatcccaactgacatcggcggtgccagagacttcgtccagactgttacgcatagagcaccagtcgggtcggacgat

SEQ ID NO: 161419 - DNA, 80 bp, synthetic construct
  source 1..80: mol_type = other DNA
agagtcctccggcccctgaatgtggataatcctaaccactgatacctacgaacgcaagccagcgtgtagtgggtcgtaac

SEQ ID NO: 161420 - DNA, 80 bp, synthetic construct
  source 1..80: mol_type = other DNA
tatgacactataggcatagttgacacaaaggaaaactacacttcagttaacaataagtctacatcaaatacgtacactca

SEQ ID NO: 161421 - DNA, 80 bp, synthetic construct
  source 1..80: mol_type = other DNA
aaatttgaactgtttacttacattagatttgatatggaagtcacaatagtaacaaacaacacaggattgatgcagatcat

SEQ ID NO: 161422 - DNA, 80 bp, synthetic construct
  source 1..80: mol_type = other DNA
aacgccctgtatgagctgtttcgacgtcggttaccgcgtgcccccgtcaacacggtcatgtttctcacgcgacgcactcg

SEQ ID NO: 161423 - DNA, 80 bp, synthetic construct
  source 1..80: mol_type = other DNA
tctttgaatcgattagatggactagagatccaaaaaacacccaagatcatgtctactctctatgtctcctaatgtggcat

SEQ ID NO: 161424 - DNA, 80 bp, synthetic construct
  source 1..80: mol_type = other DNA
ttgtcctcgctaacaactttttgcgtgagaaggggctcggtgagatagattggaggctgtagaggggtcatcactatggc

SEQ ID NO: 161425 - DNA, 80 bp, synthetic construct
  source 1..80: mol_type = other DNA
agttaaagatgtgttggaaaaaggtattcctaccctccaatctccgacagttgaagcatgtggatattccgacagaatca

SEQ ID NO: 161426 - DNA, 80 bp, synthetic construct
  source 1..80: mol_type = other DNA
cggtcatcgagcatagctgccgcaagtaatgggtgcgcgtcccaaaggtcttgtaatcgagcaacgtgcacaccacgtat

SEQ ID NO: 161427 - DNA, 80 bp, synthetic construct
  source 1..80: mol_type = other DNA
tcatacaggtggacacactaattccaatgaataatgtgcatagtagtgatgaggtaaacagttatctcatacctttgaca

SEQ ID NO: 161428 - DNA, 80 bp, synthetic construct
  source 1..80: mol_type = other DNA
atagaaaccagatatgtgattaataatcatgtaaacaatgaagcattggtggaaaatttcttaggtagatcatcgctctg

SEQ ID NO: 161429 - DNA, 80 bp, synthetic construct
  source 1..80: mol_type = other DNA
ggcgtggtccgcttgctctgctggcccggtacgcctggattgccggctgggagctggggtcccgggacgccccctccctg

SEQ ID NO: 161430 - DNA, 80 bp, synthetic construct
  source 1..80: mol_type = other DNA
tttcacctgccttacatagagagacaatcaaatgatttgtggtttaaaaagtttaatgacatgtgcaatgctgccaaggg

SEQ ID NO: 161431 - DNA, 80 bp, synthetic construct
  source 1..80: mol_type = other DNA
tcaaaatatattagcaactctccagctggacaattgcctgaaggtggatagcattctaaccaatgatgttttgtaggcca

SEQ ID NO: 161432 - DNA, 80 bp, synthetic construct
  source 1..80: mol_type = other DNA
tataccgtatgtcggtatcgcaaatgcatactctcttttttatgatgggtttgcacgagtaccactgaaggacgaaacag

SEQ ID NO: 161433 - DNA, 80 bp, synthetic construct
  source 1..80: mol_type = other DNA
cggcccccggacaacctcttctcaatattgccgaatcctattcccgtcgcggcgagtccatcaaactccagttggattcc

SEQ ID NO: 161434 - DNA, 80 bp, synthetic construct
  source 1..80: mol_type = other DNA
gcaccgtgcgtaaggccatcaataatgccacgaatattgagtctgcagctaacactgccccaagctcacaccggctagaa

SEQ ID NO: 161435 - DNA, 80 bp, synthetic construct
  source 1..80: mol_type = other DNA
tcgagactgcaccagtgactgagactaggaacaaaatcgatgaagttcctggtattgcccactcacgccttagtagtcat

SEQ ID NO: 161436 - DNA, 80 bp, synthetic construct
  source 1..80: mol_type = other DNA
gtacactcccaagaagtaccagcattaacagcagtggaaacgggagccacgagtagtgtggtgcccgcagatctggtcca

SEQ ID NO: 161437 - DNA, 80 bp, synthetic construct
  source 1..80: mol_type = other DNA
tctgcaagtggttacaaataccacgacccccatccaaacaaagcgattcttggttaagaaagtttacagaatgctgtaat

SEQ ID NO: 161438 - DNA, 80 bp, synthetic construct
  source 1..80: mol_type = other DNA
ataacaaagactacaaatgtgaaagaacatgggctccctactatacacacacctagcaaaaccaaattacaacccagtgt

SEQ ID NO: 161439 - DNA, 80 bp, synthetic construct
  source 1..80: mol_type = other DNA
tgttgggccctcagatttatatgtacatgttggaaatttaatatatagaaacttacacttatgtactaatgaaaatctta

SEQ ID NO: 161440 - DNA, 80 bp, synthetic construct
  source 1..80: mol_type = other DNA
gcgcagatttgccagaagacgacttggacggcctgctcgccgctatagacgacgaagagtaaggagaaagagacgttgga

SEQ ID NO: 161441 - DNA, 80 bp, synthetic construct
  source 1..80: mol_type = other DNA
accattctggtggcattaagactagagagggtaccgaaagcaccaaaactatcagctacactgtcaaatcttgtaaagga

SEQ ID NO: 161442 - DNA, 80 bp, synthetic construct
  source 1..80: mol_type = other DNA
ccaaatacaaccaaacttcatcccagtgttttctataatgtgttccctggaagtaaagaaccagcagttctacatcctgc

SEQ ID NO: 161443 - DNA, 80 bp, synthetic construct
  source 1..80: mol_type = other DNA
accaacaattgtgcaactttggtactaccatatgttaattctctcgccattgattgtatggcgaaacacaacaactgggg

SEQ ID NO: 161444 - DNA, 80 bp, synthetic construct
  source 1..80: mol_type = other DNA
tcagcttgcgtgtacatcgtggagtacaaaacccgggacacgactcccgacaagatgtatgatagctggattatcaatac

SEQ ID NO: 161445 - DNA, 80 bp, synthetic construct
  source 1..80: mol_type = other DNA
gatacggtgtctggccacactatctaacagcacaggatgccacggccatagataaacccacacaacctgacacatcatcc

SEQ ID NO: 161446 - DNA, 80 bp, synthetic construct
  source 1..80: mol_type = other DNA
ctaaaccaagtgacaccaacgctaagcagctatttaagacatggagaatctcgtatcttgggacatatcagctaagaaga

SEQ ID NO: 161447 - DNA, 80 bp, synthetic construct
  source 1..80: mol_type = other DNA
gaccaaacaccgcattgaaccggtatgtttgttgattcatggggaccctggtacgggcaagtcgatcgccaccggtctca

SEQ ID NO: 161448 - DNA, 80 bp, synthetic construct
  source 1..80: mol_type = other DNA
agacaactgcaaaggattagaggcagaagatatggtcagttgtaagttcaatatgacaggattagagagagataagaaaa

SEQ ID NO: 161449 - DNA, 80 bp, synthetic construct
  source 1..80: mol_type = other DNA
agtaaaagatgtcttggaaaagggaatccctacactacaatcaccaacagtagaagcatgtggatattctgatagaataa

SEQ ID NO: 161450 - DNA, 80 bp, synthetic construct
  source 1..80: mol_type = other DNA
tggtcagttcagttgattcaactatcaatgcagttaatgagagagtagaaaatgtaggtaatgaaatcggaggtaattta

SEQ ID NO: 161451 - DNA, 80 bp, synthetic construct
  source 1..80: mol_type = other DNA
tagtacaagcaatgtatgttcccccaggtgcaccaaatcctattgagtggaatgattatacatggcagagtgcctcaaac

SEQ ID NO: 161452 - DNA, 80 bp, synthetic construct
  source 1..80: mol_type = other DNA
tatgcccaaaaatcacttttggaaaaatggcgatatcagttacacagagactcacatcggcgacattttcaatatgccat

SEQ ID NO: 161453 - DNA, 80 bp, synthetic construct
  source 1..80: mol_type = other DNA
tactactaggaaacggcgagcagggtgaacacttgggcacggagagtgccctggaggcctcaggcaacaactatgtgtat

SEQ ID NO: 161454 - DNA, 80 bp, synthetic construct
  source 1..80: mol_type = other DNA
gcctacactttactcaaagcactccaaaaagagcaagagagcagcagctcggaagaagaactcccacaagaagagcaaga

SEQ ID NO: 161455 - DNA, 80 bp, synthetic construct
  source 1..80: mol_type = other DNA
aaacccaacaatgaagttaccactttcatcaaacctagagaaaacctaagggatatcagaaattttggacccagtgacat

SEQ ID NO: 161456 - DNA, 80 bp, synthetic construct
  source 1..80: mol_type = other DNA
cccccgggcccgcacaccccccggccccgtccccagcgtaacacagcacgcccgaaaacaccgccggcgccgcaccgaaa

SEQ ID NO: 161457 - DNA, 80 bp, synthetic construct
  source 1..80: mol_type = other DNA
gtatactttacaagattggacaggttttgggaattcatgtgggtggcaatggtagagatggattttcagctatgttgctt

SEQ ID NO: 161458 - DNA, 80 bp, synthetic construct
  source 1..80: mol_type = other DNA
agaccaatcaatacaccgcccccctcactcatcctggcatgctcatgcgcagcaaatacaaagtattgatccccagctgg

SEQ ID NO: 161459 - DNA, 80 bp, synthetic construct
  source 1..80: mol_type = other DNA
agattggaaatgattctggtggggaaatacttactaaggtggctgatgacgcttcaagtctccttggacctaactgtata

SEQ ID NO: 161460 - DNA, 80 bp, synthetic construct
  source 1..80: mol_type = other DNA
tggcagaactatactcatggaccaggagtaaggtatccaaagttctttgggtggctatggaagctagtaccagtagatgt

SEQ ID NO: 161461 - DNA, 80 bp, synthetic construct
  source 1..80: mol_type = other DNA
agttactcttagatggtattcccacaaagatcttaaagcaacagataataactgatgctaatgatatagacacagaggta

SEQ ID NO: 161462 - DNA, 80 bp, synthetic construct
  source 1..80: mol_type = other DNA
acaatgctatctacactatctgtgacattggtagtgacaatagcttcgaaataacaataccctattccttttctacttgg

SEQ ID NO: 161463 - DNA, 80 bp, synthetic construct
  source 1..80: mol_type = other DNA
caaaactttcactcaaggacagaatccaccctagagaactttttcggacgagcagcttgtgtagagtttaggacgtacaa

SEQ ID NO: 161464 - DNA, 80 bp, synthetic construct
  source 1..80: mol_type = other DNA
catatggggaccttatgctctagaattgtgacaaatagccaagaacatccagttgaagtgactacacgtgtatatcacaa

SEQ ID NO: 161465 - DNA, 80 bp, synthetic construct
  source 1..80: mol_type = other DNA
gacacagcctttgtcagcaacgctgacagcaattatctatacgccacataccatccagaaaacattgaaaccaaattata

SEQ ID NO: 161466 - DNA, 80 bp, synthetic construct
  source 1..80: mol_type = other DNA
agccagggtataccagctgaacttagacctggaactaatcaatttttaaccacagatgatgataccgccgcgcccatact

SEQ ID NO: 161467 - DNA, 80 bp, synthetic construct
  source 1..80: mol_type = other DNA
atagaccagaaacaggtgaggctcaaacggttatacctgttagagcagatgttagaacaattagaaatgtaggtcctagt

SEQ ID NO: 161468 - DNA, 80 bp, synthetic construct
  source 1..80: mol_type = other DNA
attctactaccaaagtagatggtaccccagacttagattccaactgcaagtactacatgatatgtatatatgtggtccct

SEQ ID NO: 161469 - DNA, 80 bp, synthetic construct
  source 1..80: mol_type = other DNA
tgccattagccccgctgaattttgcaagcgaatcatccccagaaattcccatcactctaacaatagcaccaatgtgctgt

SEQ ID NO: 161470 - DNA, 80 bp, synthetic construct
  source 1..80: mol_type = other DNA
ctggtacaagagctatagcttttcatgatgagagtccttatgcagcacctgtcactaagaaaatgaaactagcttactta

SEQ ID NO: 161471 - DNA, 80 bp, synthetic construct
  source 1..80: mol_type = other DNA
acacttggacaggacatgccagtgctgacacatcaaataatgtacataccgccaggtggaccaataccaacaaaggtgga

SEQ ID NO: 161472 - DNA, 80 bp, synthetic construct
  source 1..80: mol_type = other DNA
aataaccaggcattagcaaatgacacctggtacctaggcaatgcatataatgccacaaatgcaaaattagcagctgaagc

SEQ ID NO: 161473 - DNA, 80 bp, synthetic construct
  source 1..80: mol_type = other DNA
tgtcaactattaaaacacctgtgaatgcaactacaattagagaattcttcaaccacgcaattgatggggatgaacaaggt

SEQ ID NO: 161474 - DNA, 80 bp, synthetic construct
  source 1..80: mol_type = other DNA
tccgcctcatgaaggatacctcatcaatctcgcaatcagaggcacttactgaaggactaggtgcagaacttgaagaagta

SEQ ID NO: 161475 - DNA, 80 bp, synthetic construct
  source 1..80: mol_type = other DNA
cgagggagccaggggatgaatgggtaatagaaatcctgagagacataaaagaagaagccctaaagcactttgaccctcgc

SEQ ID NO: 161476 - DNA, 80 bp, synthetic construct
  source 1..80: mol_type = other DNA
cctggggctcctgtaccaagtgatagaaaccattttgcatggcaatcaggaactaatgcatcaatattctggcaacatgg

SEQ ID NO: 161477 - DNA, 80 bp, synthetic construct
  source 1..80: mol_type = other DNA
gctagacctagccaggtacaaaggctgcaggttcaccttttacagacacaaaaaaacttactttatagtgacctggagcc

SEQ ID NO: 161478 - DNA, 80 bp, synthetic construct
  source 1..80: mol_type = other DNA
tttatctctttgtccccatactcctgctcggccgtcttgttaaagttaaccggcggtggaggatccaccggccagacctc

SEQ ID NO: 161479 - DNA, 80 bp, synthetic construct
  source 1..80: mol_type = other DNA
gcctgccttgtctctggcgtgtgccatcgcgtctggacgcagaaggcctcccggcctcttttatagctagtctccacacc

SEQ ID NO: 161480 - DNA, 80 bp, synthetic construct
  source 1..80: mol_type = other DNA
tggatttaccaaaatcaaccacagaacaccagttttaattcgtattgtgttactaattagatttcactactacaatggga

SEQ ID NO: 161481 - DNA, 80 bp, synthetic construct
  source 1..80: mol_type = other DNA
ggttcggaggatgaggaattttcagacctggatctgtctgacagcgaccatgaagaggatgagagtgggggggctgttgg

SEQ ID NO: 161482 - DNA, 80 bp, synthetic construct
  source 1..80: mol_type = other DNA
tggagaaatagctagctattacacacactggacaggttctattagattctctttcatgttttgtggtacagctaatacca

SEQ ID NO: 161483 - DNA, 80 bp, synthetic construct
  source 1..80: mol_type = other DNA
aggcgccgctggtggtggagacgccgcttcgccggagggaggtttcgaagacgatggactagacgccctcgtcgccgccc

SEQ ID NO: 161484 - DNA, 80 bp, synthetic construct
  source 1..80: mol_type = other DNA
aagtagacatctacagattccaggcttacttgttgctcctctccggcggtgatgttaattggaagcttcttagaccgcat

SEQ ID NO: 161485 - DNA, 80 bp, synthetic construct
  source 1..80: mol_type = other DNA
gggcgacgcacatacacccgacgcgcggtcagacgcagacgcagacccagaaagagactggtacttactcagtggagccc

SEQ ID NO: 161486 - DNA, 80 bp, synthetic construct
  source 1..80: mol_type = other DNA
atgtatgtggtcccccgctggtatgccagtaccctgtggaagtaaggggcctcatctgcccggtagttgtgttgtgcaga

SEQ ID NO: 161487 - DNA, 80 bp, synthetic construct
  source 1..80: mol_type = other DNA
caccgctcgttccctcgaccgtcgtgtcgtcctcgttttcgctattacacggggtttctggagtatcgcctatacggttg

SEQ ID NO: 161488 - DNA, 80 bp, synthetic construct
  source 1..80: mol_type = other DNA
ggacggcgacggcgaatagttgcgtgtgctgcggtgcggtgtggtgcggtagcgacggcgaataaaagcgacgtgcggcg

SEQ ID NO: 161489 - DNA, 80 bp, synthetic construct
  source 1..80: mol_type = other DNA
ttcctagcaagaatgataacaaatgaaagtgacatatattccttgccacctgatcctaagtacttcgatggatatgacca

SEQ ID NO: 161490 - DNA, 80 bp, synthetic construct
  source 1..80: mol_type = other DNA
accaagccctactttgtgtttctcgcttacgtctacagcatggactgtctgcacaccgtggccgtccgcacgatggcctt

SEQ ID NO: 161491 - DNA, 80 bp, synthetic construct
  source 1..80: mol_type = other DNA
cgcaccatgacctgtttgggaaacttttgcatcaggggcaggcacaggttgagagcgcccaacaggtccacgggtgtggc

SEQ ID NO: 161492 - DNA, 80 bp, synthetic construct
  source 1..80: mol_type = other DNA
aattagatgaaagttgggagtgcatttttgaaacaacagaatctcatagctctgatgaagagaatgtaggggggcctagt

SEQ ID NO: 161493 - DNA, 80 bp, synthetic construct
  source 1..80: mol_type = other DNA
aggataagggtcgggcattcaccagtgactatgttattgctagtaccaacatgactgttctcactccacccaccgtttca

SEQ ID NO: 161494 - DNA, 80 bp, synthetic construct
  source 1..80: mol_type = other DNA
atggcactaatacagttcaatctatagtgaccaatgctggtatgggtgtaggtgttggtaacctgacaatttacccacac

SEQ ID NO: 161495 - DNA, 80 bp, synthetic construct
  source 1..80: mol_type = other DNA
catcaacatatgtaccgatcacagtcaccgtggcaccaatgtgcgcagaatataatggactcaggttggctggacaccag

SEQ ID NO: 161496 - DNA, 80 bp, synthetic construct
  source 1..80: mol_type = other DNA
cacttggtagtgagaaaccaaactatttcttgaacttcagatctatgaatgttgatatattcacagttagccatactaaa

SEQ ID NO: 161497 - DNA, 80 bp, synthetic construct
  source 1..80: mol_type = other DNA
acaaattcgctagattttagttagaattgcctgattccacacccttcttagtttttttcaatgagatgtatagtttatag

SEQ ID NO: 161498 - DNA, 80 bp, synthetic construct
  source 1..80: mol_type = other DNA
aaacgatgcctactggacagcactcacaaaaccaaataaccaagctacacaaataggacaagcacgcgacaaacactttg

SEQ ID NO: 161499 - DNA, 80 bp, synthetic construct
  source 1..80: mol_type = other DNA
cccaataatatgtgaaaaacccacaaacatatggattgaaggtgggaactattaccctagcagattccagtcaggagtta

SEQ ID NO: 161500 - DNA, 80 bp, synthetic construct
  source 1..80: mol_type = other DNA
taaccacagaaaacgctggaaaatacacaaggcgttgccgtaacaacggtcaagaagaaaattactacgtgacagtgtta

SEQ ID NO: 161501 - DNA, 80 bp, synthetic construct
  source 1..80: mol_type = other DNA
aaagacagtcagtttagagaaaacatctggaaaacagctgaggttgttaaaattattaaagatatagcctcaaaaaacat

SEQ ID NO: 161502 - DNA, 80 bp, synthetic construct
  source 1..80: mol_type = other DNA
ctcaaatcagttcctgacatcagataacttccagtcgccctgtgcactaccagagtttgatgtgacccctcctatccaca

SEQ ID NO: 161503 - DNA, 80 bp, synthetic construct
  source 1..80: mol_type = other DNA
tcacagccgccattttgttttataaaatggccgacttccttccgcttttttgaaaaaaggcgccaaaaaacggccgcggc

SEQ ID NO: 161504 - DNA, 80 bp, synthetic construct
  source 1..80: mol_type = other DNA
atgacaccaactttggaaatggaaaatggctggacggatcaggactggtaccagtagaaatgcaaagcagatggagaccg

SEQ ID NO: 161505 - DNA, 80 bp, synthetic construct
  source 1..80: mol_type = other DNA
gccaggggtttagcatcagagggggatatttactctctacccccagatcccaaacactttgacggttacaaccagcaaaa

SEQ ID NO: 161506 - DNA, 80 bp, synthetic construct
  source 1..80: mol_type = other DNA
atcagtaagcgcgtaaccacgtacggacacaaaaaaattacgcgctacctcgcgcagttccgcggcacgatggacgacga

SEQ ID NO: 161507 - DNA, 80 bp, synthetic construct
  source 1..80: mol_type = other DNA
atcaactcttctgattatggatgtcacttcttcttcagttttatccccgtcttgcaaagcacttatgcaatgcttgatgg

SEQ ID NO: 161508 - DNA, 80 bp, synthetic construct
  source 1..80: mol_type = other DNA
actattgagaatttcctcgctaggtcagcatgtgttttcttcctggaatacaaaaccgggactaaggaagattctaatag

SEQ ID NO: 161509 - DNA, 80 bp, synthetic construct
  source 1..80: mol_type = other DNA
gccctcccggcaccggtaccggcaccgccacggcgtggtacagaagaagaaggtggagaccgtggagaaggcgccgcaga

SEQ ID NO: 161510 - DNA, 80 bp, synthetic construct
  source 1..80: mol_type = other DNA
cactattaggctacagggactactgcacaaaacacttcaaaaccccaggattctcaaaagaagccagactaaccataatc

SEQ ID NO: 161511 - DNA, 80 bp, synthetic construct
  source 1..80: mol_type = other DNA
tgacgtcggggacggggacgggggtgtgcggggacagtagtgtggttgtcggcggggacaggggcctttctcggccgaga

SEQ ID NO: 161512 - DNA, 80 bp, synthetic construct
  source 1..80: mol_type = other DNA
gagggataccccgtttataactcagagcaacttgtatcaaaatgacccggcgcaagccttggagtcagcaatcacacgcg

SEQ ID NO: 161513 - DNA, 80 bp, synthetic construct
  source 1..80: mol_type = other DNA
acacatcatacaacttttcaggagataacggctataaatatgtaacaacaattagacagtggtactggacacaactaaca

SEQ ID NO: 161514 - DNA, 80 bp, synthetic construct
  source 1..80: mol_type = other DNA
cgatgctggttggcgttcccggagtggatacgtcggggatctcgaaccgcgccggaggaaactcgggtttatctatcggc

SEQ ID NO: 161515 - DNA, 80 bp, synthetic construct
  source 1..80: mol_type = other DNA
cgcagaggagctgctcgccgccctagaagacgcagagtaaggagatggcgacggaggaggagggcgtggggtaggagacg

SEQ ID NO: 161516 - DNA, 80 bp, synthetic construct
  source 1..80: mol_type = other DNA
agtacctgactgccaaatactgggacaggccagtcagaaagtactacacagacaccccttactacccctggatgcctaag

SEQ ID NO: 161517 - DNA, 80 bp, synthetic construct
  source 1..80: mol_type = other DNA
ctactaaacaaacatcacagagtaatacccagcttaaaaacaaagccaaaaggaaaaagatcagttagaatccacattaa

SEQ ID NO: 161518 - DNA, 80 bp, synthetic construct
  source 1..80: mol_type = other DNA
cagacggtggataaaggtaaagatatcaccaccaaaactaatgctaaacaagtggtactttgcccatgacttttctaaaa

SEQ ID NO: 161519 - DNA, 80 bp, synthetic construct
  source 1..80: mol_type = other DNA
acagagtagctgtcaatcatctgcccagggaacttattttccaggtctggcagaggtcttgggcatattggcacgaggaa

SEQ ID NO: 161520 - DNA, 80 bp, synthetic construct
  source 1..80: mol_type = other DNA
atcctatccctttgagttagatcctggagtattggctaatctaggtaagaactatggactgacaatcactccacctgaca

SEQ ID NO: 161521 - DNA, 80 bp, synthetic construct
  source 1..80: mol_type = other DNA
gcatatggtggttccaccattaattacaccactatcaattattacaaggattcagcaagtaatgccgcatctaagcaaga

SEQ ID NO: 161522 - DNA, 80 bp, synthetic construct
  source 1..80: mol_type = other DNA
caactaaattcatggggatgtgcgtttaggcaagtctgccacactactgtaccatgggtaaatgacagcttgacacctga

SEQ ID NO: 161523 - DNA, 80 bp, synthetic construct
  source 1..80: mol_type = other DNA
tccacttttatagtaggaaaattggacactgaaaatatgatacaacatttaatgtggatgaaaaacttcggcacattcaa

SEQ ID NO: 161524 - DNA, 80 bp, synthetic construct
  source 1..80: mol_type = other DNA
atagcatatggtgatgatgttatcatttcttatccctttcctctagatccagagaaaattgcacagcagggagtcacata

SEQ ID NO: 161525 - DNA, 80 bp, synthetic construct
  source 1..80: mol_type = other DNA
attttgaagttactagcgttacaactgctagaactaacctaaatgatgtcccgacacccagccacagtagcagtgtacat

SEQ ID NO: 161526 - DNA, 80 bp, synthetic construct
  source 1..80: mol_type = other DNA
aacacacgttacccgtacaccacagtaacacacaaccgcaagtccaaacctcggacaaacgcgccgccgaagaccaccgc

SEQ ID NO: 161527 - DNA, 80 bp, synthetic construct
  source 1..80: mol_type = other DNA
atagtgaatgagcaccagccagttggtttcacagtaaccgtcagggtttacatgaaacctaaacacataaaagcgtgggc

SEQ ID NO: 161528 - DNA, 80 bp, synthetic construct
  source 1..80: mol_type = other DNA
ttcaaatgtgttatggaccaaattgttttgctacaacatcaacaccagaaaataaagatgtagttcaggcaaccaccact

SEQ ID NO: 161529 - DNA, 80 bp, synthetic construct
  source 1..80: mol_type = other DNA
tgtgcacacttaactgagcctaatgagaacactatacttctggccatatcatcagatcttcaagtcgacagtacaaatgt

SEQ ID NO: 161530 - DNA, 80 bp, synthetic construct
  source 1..80: mol_type = other DNA
gaacgtcacatgtcaactcaatggacttaagtacctcagctgggtatagctttgtaaaatcaggctacaagaagaaggac

SEQ ID NO: 161531 - DNA, 80 bp, synthetic construct
  source 1..80: mol_type = other DNA
cgtccgcatttctgacaacagaattgtaaacctggacttccctggggttgtcgtctgtccgcaggcgtacggataccgtg

SEQ ID NO: 161532 - DNA, 80 bp, synthetic construct
  source 1..80: mol_type = other DNA
atgtagggcccgttgatgatgtagttctccctcctggtagtggacttgatgaagctgttctggagggcggcattctcccc

SEQ ID NO: 161533 - DNA, 80 bp, synthetic construct
  source 1..80: mol_type = other DNA
aactcgcgggaccgggctcagggacggtgacggccgctgcgcgggaccgggaggcttttgcgctgcggagacgctggtgt

SEQ ID NO: 161534 - DNA, 80 bp, synthetic construct
  source 1..80: mol_type = other DNA
ataacctaaccaacggtgaacaggcatctgaattcacccgcgacgccgccaccgctgcacctggcaaagtacagaccgcg

SEQ ID NO: 161535 - DNA, 80 bp, synthetic construct
  source 1..80: mol_type = other DNA
ggctagaatgttatgttttgtttcaggttgcaaagatttttgtttacgcatggctagagatacaaacttacataaacaat

SEQ ID NO: 161536 - DNA, 80 bp, synthetic construct
  source 1..80: mol_type = other DNA
actcatccagatacgtcttcaaacagattctatacattagacagtaaagagtggaaaaatgactctaagggctggtggtg

SEQ ID NO: 161537 - DNA, 80 bp, synthetic construct
  source 1..80: mol_type = other DNA
gcacaaattacaatgtggttaagaaaggtacaacaagtgaacttgaacagaagcactttttaacttatagaacagacata

SEQ ID NO: 161538 - DNA, 80 bp, synthetic construct
  source 1..80: mol_type = other DNA
cggtacacaatgcccctggcatcgagagaaactggtatgagtcagttttcagatctcatgcagggtgttgtggctgtggt

SEQ ID NO: 161539 - DNA, 80 bp, synthetic construct
  source 1..80: mol_type = other DNA
tcggtgatggattcacaagttctataaggcaaacactcatgggtgcttgtgatgtatctgatagattgaccagcaaaata

SEQ ID NO: 161540 - DNA, 80 bp, synthetic construct
  source 1..80: mol_type = other DNA
tgcccacttgacacaaccaggagccaataccattcttctggccatttcatctgatctacaggtcgatagcgtcgacacac

SEQ ID NO: 161541 - DNA, 80 bp, synthetic construct
  source 1..80: mol_type = other DNA
caacggagaaacagaagaaggcgttggagaactcgttggagacagctcctggccttggccgataggatatttacatttcc

SEQ ID NO: 161542 - DNA, 80 bp, synthetic construct
  source 1..80: mol_type = other DNA
gtccaggggcttgttcttggcggacatcattagcccagccgcaaatatcagaattagcatcagaaaagtgagccccacaa

SEQ ID NO: 161543 - DNA, 80 bp, synthetic construct
  source 1..80: mol_type = other DNA
taaaacagaaggcaactacagccaccctcaaatacctaaagccacagcacaacagtctagacctcaaaacaacgaaacag

SEQ ID NO: 161544 - DNA, 80 bp, synthetic construct
  source 1..80: mol_type = other DNA
cggagaccgaagtgttggcgtggaagtttgaccctacattagcctatgactacagggcatttatattgcatcctgaggag

SEQ ID NO: 161545 - DNA, 80 bp, synthetic construct
  source 1..80: mol_type = other DNA
accaggagaagttcgtaacatcatggagattgccgaagtggactccgtggtccctgtgaataatacaagtgacaaagtta

SEQ ID NO: 161546 - DNA, 80 bp, synthetic construct
  source 1..80: mol_type = other DNA
tgctgggcgccggcgccggtaacgggagttacgctgggcttgacggcgtggtgtgcgtggccgggaggtgtgcgtgcgtg

SEQ ID NO: 161547 - DNA, 80 bp, synthetic construct
  source 1..80: mol_type = other DNA
aagaataggagacacaacataggatcctgccttgaagctttattccagggaccactcgagttcaaagacttgaaaataga

SEQ ID NO: 161548 - DNA, 80 bp, synthetic construct
  source 1..80: mol_type = other DNA
ttctggaggtgaacaacactacagaggccacgggtctatcaaggcttttgataccagtatcctcgcagaacaaggctgac

SEQ ID NO: 161549 - DNA, 80 bp, synthetic construct
  source 1..80: mol_type = other DNA
cagtggactacttgttcgggtgtggtgtgctagctggaaacgcctttgtctttccgcatcaaataataaacttgcgcaca

SEQ ID NO: 161550 - DNA, 80 bp, synthetic construct
  source 1..80: mol_type = other DNA
cgtatgcaattacgagcacagtcagagtctatttcaaaccaaaacacgtgcgggcctgggtgccaagaccacctaggctt

SEQ ID NO: 161551 - DNA, 80 bp, synthetic construct
  source 1..80: mol_type = other DNA
gtgggggtcggcttgttaagaggggcgctgctaacgctgcaagagtgggttgtcagcgtgtggccggtgctactggaatc

SEQ ID NO: 161552 - DNA, 80 bp, synthetic construct
  source 1..80: mol_type = other DNA
ggaaaaaatgtgtatttgcctcctagggaaggacaattgacctgcaactcaacagtgaccagcttgattgctaacattga

SEQ ID NO: 161553 - DNA, 80 bp, synthetic construct
  source 1..80: mol_type = other DNA
gaaccagcagcaaacaaaaccaactggcagtacacatacacaagactaatggccccttactactacaaagccaacgcaaa

SEQ ID NO: 161554 - DNA, 80 bp, synthetic construct
  source 1..80: mol_type = other DNA
gttctttaatgaaaagactctgtaacaccacacatatatacagggatcaggtgtatcatgtagagggtgggatgccttct

SEQ ID NO: 161555 - DNA, 80 bp, synthetic construct
  source 1..80: mol_type = other DNA
cactggcgtcgtcatgatgctgcaattttataacagccaattttcgtctcatgcgtcgcttttggttcttactaaggggt

SEQ ID NO: 161556 - DNA, 80 bp, synthetic construct
  source 1..80: mol_type = other DNA
cactatggcaccaaactgcttttgttagcggagacactaccaacgtgggtactatactagccacatgttctggatgtccc

SEQ ID NO: 161557 - DNA, 80 bp, synthetic construct
  source 1..80: mol_type = other DNA
acgtgatcaacaggcgtcaacgaacagaatgcactgttgaatcatttctgggcagggctgcatgtgttgccattattagt

SEQ ID NO: 161558 - DNA, 80 bp, synthetic construct
  source 1..80: mol_type = other DNA
ctcaggagagcctaagcctaaaaccaaaatgccagagagaagggtcgtggctcaaggaccagaggaggagtttggcagat

SEQ ID NO: 161559 - DNA, 80 bp, synthetic construct
  source 1..80: mol_type = other DNA
gaggaaatatggtgcattgctgtgagtgaggggaaaagaactaaaggaagcgctcaaaggatatttgcacattcatacag

SEQ ID NO: 161560 - DNA, 80 bp, synthetic construct
  source 1..80: mol_type = other DNA
accaaaaccaaagatgaagttgacagctacctcataccattgacacagggtcttaaaaatgcccagatctttggaacaaa

SEQ ID NO: 161561 - DNA, 80 bp, synthetic construct
  source 1..80: mol_type = other DNA
atgccaaagactgtaggtaggtcatcatcacacgcatgcgtgataaatcatccgccactgacaggtcatccaggtctatc

SEQ ID NO: 161562 - DNA, 80 bp, synthetic construct
  source 1..80: mol_type = other DNA
gtcctgcccatcctcggccgtggccttcccaatctgaatcatgtcacacaccatgagctcgtgatacagctccgtcacag

SEQ ID NO: 161563 - DNA, 80 bp, synthetic construct
  source 1..80: mol_type = other DNA
ataatagttttaagaatagtaatatatgtagtacaaatgctaagtaggcttagaaagggctataggcctgttttctcctc

SEQ ID NO: 161564 - DNA, 80 bp, synthetic construct
  source 1..80: mol_type = other DNA
ttgggcatctgtacgctaaatttcatcaaaatcccggaatagtaactggtagtgctgtagggtgcgaccctgacattttc

SEQ ID NO: 161565 - DNA, 80 bp, synthetic construct
  source 1..80: mol_type = other DNA
aaatataatagaagacagccattttcagacagccaacttacaggacctagcttacacccaggcataataatgaaacaaaa

SEQ ID NO: 161566 - DNA, 80 bp, synthetic construct
  source 1..80: mol_type = other DNA
gttggtgtagcctcccatagtcttcctgggcccctgggaggtacatgtcccccagcattggtgtaagagcttcaaccaag

SEQ ID NO: 161567 - DNA, 80 bp, synthetic construct
  source 1..80: mol_type = other DNA
ataagtgtctatgggtttatgtgtaagcaatatgtcactgtcttctatggcatacctgcatggaggaacgcatcgattcc

SEQ ID NO: 161568 - DNA, 80 bp, synthetic construct
  source 1..80: mol_type = other DNA
tggctacgaagactacctccagagaacactaggcccctaccaagatgtagagaccctaggtataatctgtgttaaatgtc

SEQ ID NO: 161569 - DNA, 80 bp, synthetic construct
  source 1..80: mol_type = other DNA
cccaattatcccctaatttccagccggccctcaaaccctcaggtacttcaagtaacacacaaatgaccctaggagacgca

SEQ ID NO: 161570 - DNA, 80 bp, synthetic construct
  source 1..80: mol_type = other DNA
tgtaagctttaaactaggctggcaataaaataaccctgctttactgtacaaggccgtgggagtttcactcgtcggtgtct

SEQ ID NO: 161571 - DNA, 80 bp, synthetic construct
  source 1..80: mol_type = other DNA
ttatttattcaaaacatttattgtacaattgttgttatcatgtgtacggatcaatgccatcagggtctccttgtacagct

SEQ ID NO: 161572 - DNA, 80 bp, synthetic construct
  source 1..80: mol_type = other DNA
aaagacactagatgcatcaacatactttcacactccagacggcctatggggagatccaatatacatttacagtgaacatg

SEQ ID NO: 161573 - DNA, 80 bp, synthetic construct
  source 1..80: mol_type = other DNA
ttagacgccctcgtcgccgcactcgacgaagaacagtaaggaggcgcagacaatggaggagggggcgacccagacgcaga

SEQ ID NO: 161574 - DNA, 80 bp, synthetic construct
  source 1..80: mol_type = other DNA
agagatggcctggggatggtggaagcgaaggcgccgcgggtggctccgaagcatatggagacgcagagcggctgcccgaa

SEQ ID NO: 161575 - DNA, 80 bp, synthetic construct
  source 1..80: mol_type = other DNA
ctttgacagcagagactcactattcctatttgccacctatcacccagcaaacatcaaaaagacaattaaagcaatgagag

SEQ ID NO: 161576 - DNA, 80 bp, synthetic construct
  source 1..80: mol_type = other DNA
ctgtgtcactttttttgtctgttttttttttcttctcctggttcagacgttctcttcttcgtcagagtctttcaagtgtc

SEQ ID NO: 161577 - DNA, 80 bp, synthetic construct
  source 1..80: mol_type = other DNA
gcattggaggctagcccccattggggcgtagcacttccactgggggctagcactccgattctgcggaatctttgtgcgcc

SEQ ID NO: 161578 - DNA, 80 bp, synthetic construct
  source 1..80: mol_type = other DNA
gcgtccccgcagcggggctcccaacacgggttcccaaagagggtaaaagaggaggccataaagcccagggtgtaaaacac

SEQ ID NO: 161579 - DNA, 80 bp, synthetic construct
  source 1..80: mol_type = other DNA
acctagagctaaccagatacttgggggcttcagtaaaaatatacaggcacccagaccaagactttatagtaatatacaac

SEQ ID NO: 161580 - DNA, 80 bp, synthetic construct
  source 1..80: mol_type = other DNA
accactgataagggggagtttacaggactgggagtatacgacagactgctggtcattccaacacatgcacaaccgggtga

SEQ ID NO: 161581 - DNA, 80 bp, synthetic construct
  source 1..80: mol_type = other DNA
atcattcactacactaacatcaactattataaggacgctgcctccaactctgcgaaccggcaagacttcacacaagaccc

SEQ ID NO: 161582 - DNA, 80 bp, synthetic construct
  source 1..80: mol_type = other DNA
aaaggacaattacacagagggtgggtttgtgacgctgtggcaccaaaccgcattcgtttccaatggtcaggtgtggtcta

SEQ ID NO: 161583 - DNA, 80 bp, synthetic construct
  source 1..80: mol_type = other DNA
tgcactcaccattatgattaggaacaattcagatctcccaactgtactggcaaccttggccttactgggatgtagctcct

SEQ ID NO: 161584 - DNA, 80 bp, synthetic construct
  source 1..80: mol_type = other DNA
aatacaggaaagtgaatactatcccaaacatatacagtacaatttgctaattggtgagggtccttgtgaaccaggtgatt

SEQ ID NO: 161585 - DNA, 80 bp, synthetic construct
  source 1..80: mol_type = other DNA
tgtggattctccgataggcttaaacaaatcactatcggtagctccacaatcacaacacaggacactctcaatacaattgt

SEQ ID NO: 161586 - DNA, 80 bp, synthetic construct
  source 1..80: mol_type = other DNA
cctacacttagagcagttgtgacacaaggacctaacacagaatttgctttatctttgcttaggaagaatatagtaacagt

SEQ ID NO: 161587 - DNA, 80 bp, synthetic construct
  source 1..80: mol_type = other DNA
cgtagagcgggtttccgcagggtaccttcccagcgtgccggcgcaaggctgcgatgaggccccgcagctgcggcgaccgc

SEQ ID NO: 161588 - DNA, 80 bp, synthetic construct
  source 1..80: mol_type = other DNA
ttaatataggttacgcagctgtaattcggcatgtacccggaatcatttaaagaatttgattaaataaaacttaggtgaca

SEQ ID NO: 161589 - DNA, 80 bp, synthetic construct
  source 1..80: mol_type = other DNA
tttgcgacgtgcgcggcgcacgtcgcttttattcgccgtcgccgtccacgcccgcgactcccccccccccccggccctgg

SEQ ID NO: 161590 - DNA, 80 bp, synthetic construct
  source 1..80: mol_type = other DNA
gagaaacccagcaggagaaggggaaaagctaaaatatagacaacagaacatggatgatgtagatagtgatgatgatgact

SEQ ID NO: 161591 - DNA, 80 bp, synthetic construct
  source 1..80: mol_type = other DNA
gagtgttccacagtaatgttgtctggtcgctagatggcgcgggtgaggccacgctttgcgaaaacgaaagtgcttcaaaa

SEQ ID NO: 161592 - DNA, 80 bp, synthetic construct
  source 1..80: mol_type = other DNA
ataacagcttggatccccagaccaccaagggcaacagaatacactcatgcatatagcactaattaccactataaagcacc

SEQ ID NO: 161593 - DNA, 80 bp, synthetic construct
  source 1..80: mol_type = other DNA
aatgtgtcctgggactacgatcgacgtttcggccgagagttcctccgtcctctgcaccgacggcgaaaacaccgtcgcgt

SEQ ID NO: 161594 - DNA, 80 bp, synthetic construct
  source 1..80: mol_type = other DNA
gaaagttggagctcacgaaaactcaaacagagcgtatggtggttccactatcaactacaccactattaattattatagag

SEQ ID NO: 161595 - DNA, 80 bp, synthetic construct
  source 1..80: mol_type = other DNA
aacaggaacagtagcaacaacaacaagtccaacaaacacaacagcaaacataacaggaagatcagaagaaataaatggaa

SEQ ID NO: 161596 - DNA, 80 bp, synthetic construct
  source 1..80: mol_type = other DNA
tactttcagcaagaaaccacagataacacaatacatggacaatatggaaaaccaacatacaacagtgtagattaccacct

SEQ ID NO: 161597 - DNA, 80 bp, synthetic construct
  source 1..80: mol_type = other DNA
gactttatagtaacatactgtagaaaatctcccatgggaggcagcataatgactgccccttcactacatccaggcaacgc

SEQ ID NO: 161598 - DNA, 80 bp, synthetic construct
  source 1..80: mol_type = other DNA
cacgctgaaccacatggggcaattgtatgtgagacatgtaaatggcccctcaccacttccagtaaccagcactgtgagag

SEQ ID NO: 161599 - DNA, 80 bp, synthetic construct
  source 1..80: mol_type = other DNA
cccaggaaagacccccggggggcatcggggggtgttggtgaggccatgggaggtcggatttcgcccttattgctctgttt

SEQ ID NO: 161600 - DNA, 80 bp, synthetic construct
  source 1..80: mol_type = other DNA
cagaaagatctctgagcaaacaaagaccgtgctgcctcagcgcaaaactccctcagcccggtcggcgcgctgacgccacg

SEQ ID NO: 161601 - DNA, 80 bp, synthetic construct
  source 1..80: mol_type = other DNA
ctggatcccgattccaggctgttggagaacacttcatcttcgaacatgtcttcatcctctgtggtggggatatcggaggc

SEQ ID NO: 161602 - DNA, 80 bp, synthetic construct
  source 1..80: mol_type = other DNA
aaatgcactagacacatactggaaatggataactacagagtccccacaaataacaaacacatcacttggactcacacacg

SEQ ID NO: 161603 - DNA, 80 bp, synthetic construct
  source 1..80: mol_type = other DNA
tgcttattaacagcttctgactcatattgaataaccttatcatcatcaatctctttcttagagagttgaggtggtaatac

SEQ ID NO: 161604 - DNA, 80 bp, synthetic construct
  source 1..80: mol_type = other DNA
gaacgctacgccatggcctgcctgccgcgcgacctcagcctgcacctggacgactatccttacctgatggtggaaatcgg

SEQ ID NO: 161605 - DNA, 80 bp, synthetic construct
  source 1..80: mol_type = other DNA
cggtcttttctggagatccgctttctgacctaccaaaggtaagaaaagcacaatgggaaaaaacggcgcaaccgggagga

SEQ ID NO: 161606 - DNA, 80 bp, synthetic construct
  source 1..80: mol_type = other DNA
atgcagcctcggcagcgcgacaagatttcacacaagatcccaccaaatttacgagcccagttctagacatgctaagggaa

SEQ ID NO: 161607 - DNA, 80 bp, synthetic construct
  source 1..80: mol_type = other DNA
cccagagggagtaaatttagaaattaccatagtggagcttgatagaaatgaaaagttcagagatataagaacacacatcc

SEQ ID NO: 161608 - DNA, 80 bp, synthetic construct
  source 1..80: mol_type = other DNA
tcgtgtccgcgtctggggacttcctcttttccgcgtcgtgtccgcgtcgctggcccctgggagtcgtccgttcttcgtgt

SEQ ID NO: 161609 - DNA, 80 bp, synthetic construct
  source 1..80: mol_type = other DNA
ccattccgtgccgtgtggtgggtccccgaggggcgggggggtgtttttcgcgtggaggtgaaatttggagtcttggagtc

SEQ ID NO: 161610 - DNA, 80 bp, synthetic construct
  source 1..80: mol_type = other DNA
acactgatagtggcaatgataccagaacaccaattagcagcagcagaaaagggaaatgtaactgctggttacaatttgac

SEQ ID NO: 161611 - DNA, 80 bp, synthetic construct
  source 1..80: mol_type = other DNA
ttcaaaattttggacccagtgacatgtatgtgcatgtcggtaacctaatatatagaaatttacacttattcaactcagag

SEQ ID NO: 161612 - DNA, 80 bp, synthetic construct
  source 1..80: mol_type = other DNA
gacataggtatgccaaacccacatcctacacctacaaataactactatgaatatcatttaggcctattcagtcctatatt

SEQ ID NO: 161613 - DNA, 80 bp, synthetic construct
  source 1..80: mol_type = other DNA
gaatactatatgaccaatatttacgaggacaaaacttctggactaagtctaacgaagacttagacctagcaagatttaaa

SEQ ID NO: 161614 - DNA, 80 bp, synthetic construct
  source 1..80: mol_type = other DNA
gttgttgagtttgttgaagagcagctgacgcatgccgcccaccgtctccagatagggatcgtgcgggttgacgggtagcc

SEQ ID NO: 161615 - DNA, 80 bp, synthetic construct
  source 1..80: mol_type = other DNA
gattctataccttgaaatcggttaaatgggaaactgaaagcacaggatggtggtggaaattacctgatgcactaaacaac

SEQ ID NO: 161616 - DNA, 80 bp, synthetic construct
  source 1..80: mol_type = other DNA
ttaaacaaaggaaaagatgtgaacctgtagcagttgtaatacacggtgaacctgggactggcaaatcaatgaccacaaac

SEQ ID NO: 161617 - DNA, 80 bp, synthetic construct
  source 1..80: mol_type = other DNA
ccctggccctgctccgggcaaggggagaatccgggcctcctggacctaccccgcagcccccggaggccccggtagctcgc

SEQ ID NO: 161618 - DNA, 80 bp, synthetic construct
  source 1..80: mol_type = other DNA
tacaaatatccattagaaatggaggccattgcaaaggaaggaattaagtatggtttaacaatcacacctgctgataaatc

SEQ ID NO: 161619 - DNA, 80 bp, synthetic construct
  source 1..80: mol_type = other DNA
aggtaggggttatgaccacgctggagggctgtgcaggtatggcgtgggccggagttggatcttcatcctcctcctctgag

SEQ ID NO: 161620 - DNA, 80 bp, synthetic construct
  source 1..80: mol_type = other DNA
cccaagggaccgtttggagggggacacagcaccatgagattctccctaaaagtgctcttcgaagagcacctgagacacct

SEQ ID NO: 161621 - DNA, 80 bp, synthetic construct
  source 1..80: mol_type = other DNA
tacatgcgtttcgacattgaagtgacatttgttataaccagcaggcaagacccaggaacaaatttggagcaagacatgcc

SEQ ID NO: 161622 - DNA, 80 bp, synthetic construct
  source 1..80: mol_type = other DNA
gaggcggtgttcaagtttcaactagacccaggtagtgactcagttctaaaacacacactgctgggggaaatcataaacta

SEQ ID NO: 161623 - DNA, 80 bp, synthetic construct
  source 1..80: mol_type = other DNA
taatgacaggtgacaccccaatcaatatttttggcagaaacattctgacagccttaggcatgtcattaaacctaccaatt

SEQ ID NO: 161624 - DNA, 80 bp, synthetic construct
  source 1..80: mol_type = other DNA
gatttcacacatccgttcggctcaccactaactgaaactccttgcgtagagttccaggtgctgggtgacttgtacaatac

SEQ ID NO: 161625 - DNA, 80 bp, synthetic construct
  source 1..80: mol_type = other DNA
ccggtaacggtgccgtaggaagacggggtttcgcggaggacctcgagtccctccgccctggggagctcttctccgcgtgt

SEQ ID NO: 161626 - DNA, 80 bp, synthetic construct
  source 1..80: mol_type = other DNA
ccgttccctactttggacctggtgtcgactataaaggtgatagtttaaccccactttctaccaaggctttgacaacatat

SEQ ID NO: 161627 - DNA, 80 bp, synthetic construct
  source 1..80: mol_type = other DNA
acacccaaaaaaaaaaaaaattttccaacttcgattgggctacagaataccagcttgctaccgctttcgaccgccctctc

SEQ ID NO: 161628 - DNA, 80 bp, synthetic construct
  source 1..80: mol_type = other DNA
cgcaaggcttaccaacatttataacaccaggttcaggacagtttatgacaactgatgacttccaatcaccttcagcctta

SEQ ID NO: 161629 - DNA, 80 bp, synthetic construct
  source 1..80: mol_type = other DNA
cgagaatttcctggcacgttcagcatgcgtgtactaccttgattaccaaacgggagaagggcccggcgatcagtattttg

SEQ ID NO: 161630 - DNA, 80 bp, synthetic construct
  source 1..80: mol_type = other DNA
acgtcgtacgcgggcgatgtatggctgctcaccggtttcgcggcgacggttgcgctcgagtccaacggcgagaagcaaaa

SEQ ID NO: 161631 - DNA, 80 bp, synthetic construct
  source 1..80: mol_type = other DNA
gcagttgaaaacgcagtcgtgagagtggctgatacaattagaagtggtccatcaaactcacaagcagtacccgccctaac

SEQ ID NO: 161632 - DNA, 80 bp, synthetic construct
  source 1..80: mol_type = other DNA
caaaggttagagtatatttgaagccaaagcacattagagtgtggtgcccgcgcccaccccgagcggtagcatattacggc

SEQ ID NO: 161633 - DNA, 80 bp, synthetic construct
  source 1..80: mol_type = other DNA
acgcattccaaatcaaggtcaccgctgggaacacgcaggacaagagtgcgattttctccttccagctgaacccaggtaat

SEQ ID NO: 161634 - DNA, 80 bp, synthetic construct
  source 1..80: mol_type = other DNA
gttagagtttgtgacaaagttgaaacagctagatttccttgaaaaccagatcagtgccattcaccagtcatgccccagtc

SEQ ID NO: 161635 - DNA, 80 bp, synthetic construct
  source 1..80: mol_type = other DNA
aaattgacattaaggaaacacccgctccggaatgcatcaatgacctcctcaaatcagtggacagccaagaggtgagggac

SEQ ID NO: 161636 - DNA, 80 bp, synthetic construct
  source 1..80: mol_type = other DNA
cctctgtgttgctggtggctgggtgccctccaagtcgctggctgtactcgttgaccatgttgtagagtcccctgttgttg

SEQ ID NO: 161637 - DNA, 80 bp, synthetic construct
  source 1..80: mol_type = other DNA
atttgacagatcctctttgcctcgaggatgatacagaaaattgtaaacaaacaatgtcaccaaatgaactgggtcttact

SEQ ID NO: 161638 - DNA, 80 bp, synthetic construct
  source 1..80: mol_type = other DNA
actatcctaccaaacccgggcagtgtgggggtgtgattgtcaacactggaaatgtgattgccatccatgttggcggcaat

SEQ ID NO: 161639 - DNA, 80 bp, synthetic construct
  source 1..80: mol_type = other DNA
gtatctgactaccagacacctgacaggagatccagggtatactcatgagcttatttcggagcctaccgttaaaaacttta

SEQ ID NO: 161640 - DNA, 80 bp, synthetic construct
  source 1..80: mol_type = other DNA
atatgggtatttttggacaaaacatgttttatcactcacagggaagaaccggatataccatccatgttcagtgtaatgca

SEQ ID NO: 161641 - DNA, 80 bp, synthetic construct
  source 1..80: mol_type = other DNA
tggtgcctgagcatcaactagcatatataggtggagataatacacaggttaattatgaacacacacaccctggtgagagg

SEQ ID NO: 161642 - DNA, 80 bp, synthetic construct
  source 1..80: mol_type = other DNA
tttgaaaaattagactatgaaaatgccacttttctaaagcgagggtttaaacaggacagtagatacaagtttctaataca

SEQ ID NO: 161643 - DNA, 80 bp, synthetic construct
  source 1..80: mol_type = other DNA
gcactgtgcaatggggacactgcaatgaacttcaccaaaacacgtgcgaacactacaaacggtgtccaaacggccatcca

SEQ ID NO: 161644 - DNA, 80 bp, synthetic construct
  source 1..80: mol_type = other DNA
ccacaaataaagatttagaaggcctaaacttctttgactactacacaggcatgtatagcagcatatttttagccagcggc

SEQ ID NO: 161645 - DNA, 80 bp, synthetic construct
  source 1..80: mol_type = other DNA
agtccgtcgtcgcaatttcctggggcggagctacattcttatataaatgactgcacttccgaatggctgagttttccacg

SEQ ID NO: 161646 - DNA, 80 bp, synthetic construct
  source 1..80: mol_type = other DNA
tttttaaaaccacattgctcggagaaatcacccagtactacacacattggtctggctctctaaaaatctcactaatgtac

SEQ ID NO: 161647 - DNA, 80 bp, synthetic construct
  source 1..80: mol_type = other DNA
tggcaaaccttatgactcaactaaattaaataaatggaggagtgcatggcaagccttttatacaaaaagagacagtaact

SEQ ID NO: 161648 - DNA, 80 bp, synthetic construct
  source 1..80: mol_type = other DNA
taccataaggccaaacatgtaaaggcatggtgtcctaggccacctagagcagttccatacaggtatgttggatcaacaaa

SEQ ID NO: 161649 - DNA, 80 bp, synthetic construct
  source 1..80: mol_type = other DNA
attttgtgctgcatcttactactctggctgatcgctacgggtttgttccggggccagcgccgccgggtggtcctgggccg

SEQ ID NO: 161650 - DNA, 80 bp, synthetic construct
  source 1..80: mol_type = other DNA
tggtgagaagcagaagaaccccttacttaaacctgtgataggtcgtgcaaatatgaaagtagaagaggttattgatgtca

SEQ ID NO: 161651 - DNA, 80 bp, synthetic construct
  source 1..80: mol_type = other DNA
tggaaaggggttctcaaactgggatattgacattatggcgtttgtacaactgcgccgcaagcttgaggcattcacatata

SEQ ID NO: 161652 - DNA, 80 bp, synthetic construct
  source 1..80: mol_type = other DNA
aggtggacaagttaaagaagggactggatgagctggctccactctatgcagtagaaaacaaaagagttacaaagatccag

SEQ ID NO: 161653 - DNA, 80 bp, synthetic construct
  source 1..80: mol_type = other DNA
accaattagcatacataggtgcagatgcacgagtgagttatgagcacacccaccctggtgagcgaggccatacaattggt

SEQ ID NO: 161654 - DNA, 80 bp, synthetic construct
  source 1..80: mol_type = other DNA
agatacaatggctgtagattcactttttacagagacaaaaatactgactttatagtgacctatgacacctcagcccccta

SEQ ID NO: 161655 - DNA, 80 bp, synthetic construct
  source 1..80: mol_type = other DNA
gccctgtgtttcctgccttcatgcaaatatcctacctcccccggcctggtgcaaaatgtctgcctcagaatactaacagc

SEQ ID NO: 161656 - DNA, 80 bp, synthetic construct
  source 1..80: mol_type = other DNA
ctacatactcaacttgggaaaagcatttggaactgggtttacagatcatatcagtgagaaagtcaatgaactccagaaca

SEQ ID NO: 161657 - DNA, 80 bp, synthetic construct
  source 1..80: mol_type = other DNA
gttattcaaacccggagcaggagtgagtccacgatagagtctttctttgcaagaggggcgtgtgtcaccatcatgtctgt

SEQ ID NO: 161658 - DNA, 80 bp, synthetic construct
  source 1..80: mol_type = other DNA
tggacagttaatgatattcagaaactggtaggagttcttaattgggcagctcagatatatccaggaataaagacaaagca

SEQ ID NO: 161659 - DNA, 80 bp, synthetic construct
  source 1..80: mol_type = other DNA
gcttcatcatctaataacagtcagacatataaccccagtggcacattagaagacataacttggggacaatcagactggca

SEQ ID NO: 161660 - DNA, 80 bp, synthetic construct
  source 1..80: mol_type = other DNA
caaaaagagttagattcaagccccccactctgtatacagacaaatggtacttccaaaaagatatctgcaacctgccgctc

SEQ ID NO: 161661 - DNA, 80 bp, synthetic construct
  source 1..80: mol_type = other DNA
tcaggtgaaaatggcatttatcaaaaaagaacagatagtaactatggctaccactcctttcaagttaaaggcaaaaagtc

SEQ ID NO: 161662 - DNA, 80 bp, synthetic construct
  source 1..80: mol_type = other DNA
gcaccgtacgtagggccataaacaacactacaaatgtagagtccgcagcaaatactgctcctagttcacatcgcctggaa

SEQ ID NO: 161663 - DNA, 80 bp, synthetic construct
  source 1..80: mol_type = other DNA
gagacagcgaaaatcccgcgtgcgcgcgccgtcgcgccgcttgacggccacgcagcaggcgccgtggggctgaaagagga

SEQ ID NO: 161664 - DNA, 80 bp, synthetic construct
  source 1..80: mol_type = other DNA
gtggatcaacttaaggaccaacaattgtgcaacaataatagtaccttatatcaatgctgtcccctttgattcagccatca

SEQ ID NO: 161665 - DNA, 80 bp, synthetic construct
  source 1..80: mol_type = other DNA
agtttttaattagaaatgacacctcctactacaactgggacaactggtggagatatgacttctactcctccaaagcagac

SEQ ID NO: 161666 - DNA, 80 bp, synthetic construct
  source 1..80: mol_type = other DNA
tttgtagcaacatacgatccacattcactagaatacttctcatagaaatacaaagaaacttgaccagaatagagcgcatc

SEQ ID NO: 161667 - DNA, 80 bp, synthetic construct
  source 1..80: mol_type = other DNA
cagggaatcaaagtcctcttcgagcagttagtaagaacccaacagggagtccacgtaaacccatgcctacagtaggtccc

SEQ ID NO: 161668 - DNA, 80 bp, synthetic construct
  source 1..80: mol_type = other DNA
tagaagctcgtcgcaccatcaaaccaccacgcctataaactgttgtgggattttggtctatttgatagttattcggacga

SEQ ID NO: 161669 - DNA, 80 bp, synthetic construct
  source 1..80: mol_type = other DNA
acatctgctagactactacctgggcttctacagtcccatattcctacacccaggcaggtcaaacgtagaattcttcacag

SEQ ID NO: 161670 - DNA, 80 bp, synthetic construct
  source 1..80: mol_type = other DNA
tcaccgatttccaagcgttaagtgaaagcgctaccatcgtgtacaacgaacgagaattcgtgaacaggtacctacaccac

SEQ ID NO: 161671 - DNA, 80 bp, synthetic construct
  source 1..80: mol_type = other DNA
catgagccccgcctttaggaagcaccacgtcccggggacggaagctggattttggccagtcttcaattttggggagtggt

SEQ ID NO: 161672 - DNA, 80 bp, synthetic construct
  source 1..80: mol_type = other DNA
ctcagtggactacaaaaatttaccacagaaaaacagacagtaactatggatattcctcctatgactttagtaacaatgca

SEQ ID NO: 161673 - DNA, 80 bp, synthetic construct
  source 1..80: mol_type = other DNA
gcaacgggcggtggtccgagaactttaccagccacatagaggacaagatagccaagggaccctttgggtgagggcacagc

SEQ ID NO: 161674 - DNA, 80 bp, synthetic construct
  source 1..80: mol_type = other DNA
ggttattcacatgacaacaaatccacagtatatggaattaatgtcctcaatcacatgggtagtattgcattcagaatagt

SEQ ID NO: 161675 - DNA, 80 bp, synthetic construct
  source 1..80: mol_type = other DNA
gacataacctacaatcctaatgtagacaaaggtaaaggcaacaaaatatggcttcaaagcacaacaaaaaaaacatcaga

SEQ ID NO: 161676 - DNA, 80 bp, synthetic construct
  source 1..80: mol_type = other DNA
aacttccttggtgattataccttgttcagtcatccatattacatactttcaaaatattacaccaacaaaattgggactga

SEQ ID NO: 161677 - DNA, 80 bp, synthetic construct
  source 1..80: mol_type = other DNA
taaggaagtacctgcattaacagcagttgaaacaggtgctaccagtcaagtcacccctgaggacctgatcgaaactagac

SEQ ID NO: 161678 - DNA, 80 bp, synthetic construct
  source 1..80: mol_type = other DNA
cagaatacacaatccttgctacagcttcgcaaccaactcaatctagttattctagtaatcttactgtccaggctatgtat

SEQ ID NO: 161679 - DNA, 80 bp, synthetic construct
  source 1..80: mol_type = other DNA
gacagtagcggcgggagggcggccgcgttcgcgcgccgcccaccagagggtgctgcgcgacccccaccgcgcttgcggtg

SEQ ID NO: 161680 - DNA, 80 bp, synthetic construct
  source 1..80: mol_type = other DNA
ggtcagaatctacagtggagaacttcttgtgtagatccgcatgtgtttactacaccacatacaaaaatcatggcactgac

SEQ ID NO: 161681 - DNA, 80 bp, synthetic construct
  source 1..80: mol_type = other DNA
acaatgcgggcatgggtgttgcagtcggaaacttgacgatatacccccaccaatggataaatctacgtaccaataatagt

SEQ ID NO: 161682 - DNA, 80 bp, synthetic construct
  source 1..80: mol_type = other DNA
ggaaagatgcgatgctcgggacacatattatctgggatctaggcttacaatctagctgtactatggtggctccatggatt

SEQ ID NO: 161683 - DNA, 80 bp, synthetic construct
  source 1..80: mol_type = other DNA
agttcgcacttcctatacagtgttaaagccttgtatcggaagtttgggcttcgtcccagtgtactcgataatgttgactg

SEQ ID NO: 161684 - DNA, 80 bp, synthetic construct
  source 1..80: mol_type = other DNA
taaagcctttccacactcgtcagaagattttcagaaggagttgatgacaaaactgcaagtattgaagaaaaaccttgatg

SEQ ID NO: 161685 - DNA, 80 bp, synthetic construct
  source 1..80: mol_type = other DNA
gatggattcagtcgggtgccactagaaggtgaaacaacagattctggtgatacgtactacggcctcacctcgatcaatga

SEQ ID NO: 161686 - DNA, 80 bp, synthetic construct
  source 1..80: mol_type = other DNA
cacactatttgctacaactcttttaggtgaagttctgaactattatgccaactggtcagggagcatcaccatcaccttca

SEQ ID NO: 161687 - DNA, 80 bp, synthetic construct
  source 1..80: mol_type = other DNA
acccttgtggccccgtggatctccaatactgactatcggcgcagcgccaaggatgactttaccgagggaggatacatcac

SEQ ID NO: 161688 - DNA, 80 bp, synthetic construct
  source 1..80: mol_type = other DNA
gtattaaaagaatgcaacaagaatcagatgctctttacattcctacaggaccactcaagaggcccaggagagatacgaac

SEQ ID NO: 161689 - DNA, 80 bp, synthetic construct
  source 1..80: mol_type = other DNA
catgtcggctaatgccatgcagcggcgcgtgttccctaagcagctgaggggcaacctgaactttaccaactccgtctccc

SEQ ID NO: 161690 - DNA, 80 bp, synthetic construct
  source 1..80: mol_type = other DNA
tgggacctggagccgtagaagagggcccacatccaagggagtgggtcttcaggcaccagggaggtccaggtatggtagtg

SEQ ID NO: 161691 - DNA, 80 bp, synthetic construct
  source 1..80: mol_type = other DNA
agtgaatgacaaatacaaagattcccaaggtaagttaaatgtatctgctgcctttcaaccctgtgatgttaatgcaaaaa

SEQ ID NO: 161692 - DNA, 80 bp, synthetic construct
  source 1..80: mol_type = other DNA
tcgctgaggtggattcagttgttcctgtcaacaacacttctacgcacatggaaggaaccgatgcatttcagatcaaggtc

SEQ ID NO: 161693 - DNA, 80 bp, synthetic construct
  source 1..80: mol_type = other DNA
cttgagcaaaacctgaacatcgaagagtttatatggatgtgcatgacagtgcgtcacagatgtcaggccatcagacaaaa

SEQ ID NO: 161694 - DNA, 80 bp, synthetic construct
  source 1..80: mol_type = other DNA
tgactcctctcgcccaatcagagtctatgtcgtccatttcctgggctgggcctaccgcctgatataagtaagtgcacttc

SEQ ID NO: 161695 - DNA, 80 bp, synthetic construct
  source 1..80: mol_type = other DNA
tagaagattgcacttaatctcgaccaataggcagtagtgatccacactacttacggtcaagcacttctgttaccccggta

SEQ ID NO: 161696 - DNA, 80 bp, synthetic construct
  source 1..80: mol_type = other DNA
ggaaaatccctagcaggttggcgcccgaacagggacttgaagaagactgaaaagccttggaacacggctgagtgagggca

SEQ ID NO: 161697 - DNA, 80 bp, synthetic construct
  source 1..80: mol_type = other DNA
gagctagttagcacccaactaacagccacctacaagtttgacttcatgtgggggggtaacatgatctccgaacagatcat

SEQ ID NO: 161698 - DNA, 80 bp, synthetic construct
  source 1..80: mol_type = other DNA
acccgcattgttgttcctgccagtacaccaacaaacatggcaatgcttgcgtttgtcagtgcgtgcccagatttcagtgt

SEQ ID NO: 161699 - DNA, 80 bp, synthetic construct
  source 1..80: mol_type = other DNA
ccctgggcaccaaaaccccaagaccaagtcagggtaacctttaaactcaactttcaataaaaattctaggccgtgggact

SEQ ID NO: 161700 - DNA, 80 bp, synthetic construct
  source 1..80: mol_type = other DNA
cgaacaccccgaccacaaccttccaggcgttgaaagacatctattatgacactacgagcatatctgaacccacagactcc

SEQ ID NO: 161701 - DNA, 80 bp, synthetic construct
  source 1..80: mol_type = other DNA
gtagagggtggtatgccatcagggtgttcgggaacatctatcttcaactctatgattaacaatataattattaggacttt

SEQ ID NO: 161702 - DNA, 80 bp, synthetic construct
  source 1..80: mol_type = other DNA
atgattttgtgcgaagaatacgtagcgtcagcgctggacgcgcgctatatattcctccttatgaaatgctactgcatgag

SEQ ID NO: 161703 - DNA, 80 bp, synthetic construct
  source 1..80: mol_type = other DNA
gaagcagcaaactactgttgcgcttatggtgaatggcccaattatttaccaaatcatgaggcagtatctattgataaacc

SEQ ID NO: 161704 - DNA, 80 bp, synthetic construct
  source 1..80: mol_type = other DNA
aggacaggctacgacaaatggtacaaaccaaccaaacatgtggtccaacgtacaaaacacaacttcactgtcacaaaatg

SEQ ID NO: 161705 - DNA, 80 bp, synthetic construct
  source 1..80: mol_type = other DNA
cacctacatcaggatgtgatacacgcggtagtcaataacacacacaaaatgccccccgaccacctccccgaacaggtcaa

SEQ ID NO: 161706 - DNA, 80 bp, synthetic construct
  source 1..80: mol_type = other DNA
aggaagtgtatgaagagttcaggaagaaaatcagatcagttcctctagggaggatgctctacacaccaccatattccttg

SEQ ID NO: 161707 - DNA, 80 bp, synthetic construct
  source 1..80: mol_type = other DNA
attggtcctaatgccgcttcctttgcacgaatcgccatcggtaaaaccaatccccacggttgcacattgcgctctgcgcg

SEQ ID NO: 161708 - DNA, 80 bp, synthetic construct
  source 1..80: mol_type = other DNA
aacaatgttgccctttgacatgtggtaaggctttgattctgcaaaacaaaaggacaaaggctagttactccatcaacacc

SEQ ID NO: 161709 - DNA, 80 bp, synthetic construct
  source 1..80: mol_type = other DNA
cctacaatccatggactgacgagggtacaggcaacatactgtgcatacagtacctaacaaaaaaagacagtcactacaaa

SEQ ID NO: 161710 - DNA, 80 bp, synthetic construct
  source 1..80: mol_type = other DNA
aatgacagcatacgtaccactaagtgaagcatttatacatggccaaggcccatactttgtagacagatcagaaataaaag

SEQ ID NO: 161711 - DNA, 80 bp, synthetic construct
  source 1..80: mol_type = other DNA
tgttagagaaagggacctcccgaccatacatactccaagcaaaacaaaattacaacccagtgctttctttgatgtgtttg

SEQ ID NO: 161712 - DNA, 80 bp, synthetic construct
  source 1..80: mol_type = other DNA
gaatgtttactgagacagctatcagacgtctgctcagacaaccactacctggcgagtatgctcctccagcactcagggtc

SEQ ID NO: 161713 - DNA, 80 bp, synthetic construct
  source 1..80: mol_type = other DNA
accagagagatgaaaaggatgttggataaggatggcataaacctacctttagtgacctatgtgaaggatgagttaagacc

SEQ ID NO: 161714 - DNA, 80 bp, synthetic construct
  source 1..80: mol_type = other DNA
gggtggtggtggaagttgcctgatgcattgaaagacatgggattatttggacaaaatatgtattaccactatctgggtag

SEQ ID NO: 161715 - DNA, 80 bp, synthetic construct
  source 1..80: mol_type = other DNA
acccaagtggtgtagtactcttgtatttcggtacacttgtacgccagtttgccaccccttccccagttgaacgtagaagc

SEQ ID NO: 161716 - DNA, 80 bp, synthetic construct
  source 1..80: mol_type = other DNA
gggtgtgactgattacatccatacactaggtgaggcatttggtgctggcttcattgacaacatcaaggaccagattcaat

SEQ ID NO: 161717 - DNA, 80 bp, synthetic construct
  source 1..80: mol_type = other DNA
gtaacgaaagtgagtggggccagacttcgccataaggcctttatcttcttgccattggatagtgtaggcgatcgccatag

SEQ ID NO: 161718 - DNA, 80 bp, synthetic construct
  source 1..80: mol_type = other DNA
gaggatcgaccatcaacttcaccaatataaattattacaaggattcatatgcagcttctgctagtcgtcaggacttcaca

SEQ ID NO: 161719 - DNA, 80 bp, synthetic construct
  source 1..80: mol_type = other DNA
gccacagccagacggtactccatatgattcatccgtgctagacaagtggaaacgagcctggcaatccttttacacaaaaa

SEQ ID NO: 161720 - DNA, 80 bp, synthetic construct
  source 1..80: mol_type = other DNA
gggagcaacccccaccattccgatcactctcacagtagcacccatgtgctcagagtttggaggtctaagacaagcggtca

SEQ ID NO: 161721 - DNA, 80 bp, synthetic construct
  source 1..80: mol_type = other DNA
cctcctgacattttcgccagccgccgggcgggccggcctcctttcctggaaatccagccatggatcccacccgaggtctg

SEQ ID NO: 161722 - DNA, 80 bp, synthetic construct
  source 1..80: mol_type = other DNA
ttcaagccaaaacatgttaaagcgtgggtgccacgacccccgcgtttgtgttcatatatgtttgccaataacgtggactt

SEQ ID NO: 161723 - DNA, 80 bp, synthetic construct
  source 1..80: mol_type = other DNA
taatggagatcgcagaggttgactctgtggttccagtcaacaacactgatggcaaagtattatcgattgaagcataccaa

SEQ ID NO: 161724 - DNA, 80 bp, synthetic construct
  source 1..80: mol_type = other DNA
ccatgctaggtacacatattgtttgggattttggattgcaatctagtgttaccttggtaataccttggattagtggatct

SEQ ID NO: 161725 - DNA, 80 bp, synthetic construct
  source 1..80: mol_type = other DNA
ccctcttattggtccgccagtaaacagggtgtacatgtttccccccgagggtcccaggcccatctgcacctcccagggct

SEQ ID NO: 161726 - DNA, 80 bp, synthetic construct
  source 1..80: mol_type = other DNA
aacttaggaaaccagagaaaatcaaggctgggaaaactagaataatagaagctagtagcttaaatgacacagtacaattt

SEQ ID NO: 161727 - DNA, 80 bp, synthetic construct
  source 1..80: mol_type = other DNA
gaaaggtcccccgccacctgctcatactcggccgcgtgaggagggacgatgaagatgcgcagaggggttacggcgtccca

SEQ ID NO: 161728 - DNA, 80 bp, synthetic construct
  source 1..80: mol_type = other DNA
acgaaaaaaaagcagtactaggcataaaatataagttcgactggaaatggggaggaaatcctatctcccaacagatcgtc

SEQ ID NO: 161729 - DNA, 80 bp, synthetic construct
  source 1..80: mol_type = other DNA
agccccgttgattacctgtttgggtcgggtgttttatttgggaatgcattcatatacccacaccaaataatcaatctcag

SEQ ID NO: 161730 - DNA, 80 bp, synthetic construct
  source 1..80: mol_type = other DNA
agtatggatacaatggtgttcaaaaccaacaacagaatttatagataatcaatgttactgtgtattagaacatgtaccat

SEQ ID NO: 161731 - DNA, 80 bp, synthetic construct
  source 1..80: mol_type = other DNA
cccttagtggacactttgacaaacccagcactcatgtctccatcagtgggagcatgtggattttccgataggcttaaaca

SEQ ID NO: 161732 - DNA, 80 bp, synthetic construct
  source 1..80: mol_type = other DNA
ctttgtttggctttaacacatacaaccctaaccaagaaaaactaacattagccagaaaaaaatactgggacacattaatt

SEQ ID NO: 161733 - DNA, 80 bp, synthetic construct
  source 1..80: mol_type = other DNA
cacaagacaaatacttttttaccccagacggactgtggggtgaccccatatatgtgtattccaatggcacacaaacacaa

SEQ ID NO: 161734 - DNA, 80 bp, synthetic construct
  source 1..80: mol_type = other DNA
acggcgctttccacacaggcaataatccagtatttggcatgtgttcttataaacccactaaacaaattatggagtccgca

SEQ ID NO: 161735 - DNA, 80 bp, synthetic construct
  source 1..80: mol_type = other DNA
tcaagccttaaataaaacatgtgctgcttcactatacgttggccgtgggagtttcacttagcggagtctacctcttaagg

SEQ ID NO: 161736 - DNA, 80 bp, synthetic construct
  source 1..80: mol_type = other DNA
ctccgggaaagaactctgacaggtgatcagggacagatcgtgaattagcatcagcgtcaccgtcaacagcgtcgtcgcgt

SEQ ID NO: 161737 - DNA, 80 bp, synthetic construct
  source 1..80: mol_type = other DNA
ttcaggttttttaactaaaaacaacactgcatttggtaacaacagttataggccaaataaagagaaaattacaaaagcaa

SEQ ID NO: 161738 - DNA, 80 bp, synthetic construct
  source 1..80: mol_type = other DNA
gcgatacttataagcaaccaaaccccacagatgcaaataataataagtactatcaagtatccagcctatggggagaccat

SEQ ID NO: 161739 - DNA, 80 bp, synthetic construct
  source 1..80: mol_type = other DNA
tgcaatagcatcatcgctgggctggtactaccagaccgccaccggccccggagcagatgccagggcggcagcccggcgcc

SEQ ID NO: 161740 - DNA, 80 bp, synthetic construct
  source 1..80: mol_type = other DNA
ctttttcaccaactggagtggatagaagtaatagttgagagcggaccgtttgcatacaagggcgacgaaaaatcagctgt

SEQ ID NO: 161741 - DNA, 80 bp, synthetic construct
  source 1..80: mol_type = other DNA
ccgtggactaaaccccccatgactgaccccaaagatccacaaaaaggatacgtagtgtacaacagaaactttggcatggg

SEQ ID NO: 161742 - DNA, 80 bp, synthetic construct
  source 1..80: mol_type = other DNA
agcacagttgcacacattagatattgatcctaagtctataactgtagaagatagtgtctttggtatagagggtctagaag

SEQ ID NO: 161743 - DNA, 80 bp, synthetic construct
  source 1..80: mol_type = other DNA
tccagaccccatacacagtaccagcactatacagtgactctgaaaccaccaaaaacagaggctacattcccataggcaca

SEQ ID NO: 161744 - DNA, 80 bp, synthetic construct
  source 1..80: mol_type = other DNA
gaatcatcgcatatggtgatgatataatagcctcgtatccagataagctagacccaaaagagttagctacaacaggaacc

SEQ ID NO: 161745 - DNA, 80 bp, synthetic construct
  source 1..80: mol_type = other DNA
ttagaagttgccacaatagcattagcaacacagtttacaggttgtttcaagaactagccagaattccatctaggatggcc

SEQ ID NO: 161746 - DNA, 80 bp, synthetic construct
  source 1..80: mol_type = other DNA
ccttctattcatgtatcatctaaaactcgtctgcaacccagtgtgtttcatgatgttttccctggaacaaaagaacctgc

SEQ ID NO: 161747 - DNA, 80 bp, synthetic construct
  source 1..80: mol_type = other DNA
gggactcaatgcttgtttctacatctgtctttttgccggcgtttgttttctcatcaacctgtcgatggatcgctactgcg

SEQ ID NO: 161748 - DNA, 80 bp, synthetic construct
  source 1..80: mol_type = other DNA
attttcaaactaagaaatccagcttatatggatttaacacatacaaacccgatgtagaaaaacttaaatcctgtagaaac

SEQ ID NO: 161749 - DNA, 80 bp, synthetic construct
  source 1..80: mol_type = other DNA
ccagtccctcagcaaacaggacacacagtacagcaccaccagcagcatctacctgctagaagacaaaccactgtgggcca

SEQ ID NO: 161750 - DNA, 80 bp, synthetic construct
  source 1..80: mol_type = other DNA
cttaggagggggcatatcctccatgagatttaaccttagaatactatatgatcaatactgtagaggcctaaacttctgga

SEQ ID NO: 161751 - DNA, 80 bp, synthetic construct
  source 1..80: mol_type = other DNA
gcaagaaaatatctctcctagaggagcaagccaacggcttcagttcagctagttcagaggaccagcaagcattgatcatt

SEQ ID NO: 161752 - DNA, 80 bp, synthetic construct
  source 1..80: mol_type = other DNA
gctggtaccagacaaatataattgtgcccccagagacaccatctgacagtgtagtgttgtgcttcgcatctgcttgtaac

SEQ ID NO: 161753 - DNA, 80 bp, synthetic construct
  source 1..80: mol_type = other DNA
atgtatattgtccatagaaatatagtgtatctgaggctctttccaaacatcaataattttgtaaacagtttctcatattt

SEQ ID NO: 161754 - DNA, 80 bp, synthetic construct
  source 1..80: mol_type = other DNA
cacttattaagcacaattcatgtgttgtaactacacaaaatggtaaatttactggtttaggcatatatgacagagttatt

SEQ ID NO: 161755 - DNA, 80 bp, synthetic construct
  source 1..80: mol_type = other DNA
cagcactattaaggaaatattttaatgatacccagggtgccatcacaaatatgcaagatgtcagtgaaagggacttgcac

SEQ ID NO: 161756 - DNA, 80 bp, synthetic construct
  source 1..80: mol_type = other DNA
taataatcaaacagtggcagccagctaacatcagacgctgccgcatcaggggtctcttacccatagttatctgtggacac

SEQ ID NO: 161757 - DNA, 80 bp, synthetic construct
  source 1..80: mol_type = other DNA
aaagtacaaaaaaatcagaatcaagcccccaaaactaatgctaaacaagtggtacttcaccaaagacatctgtgacctgg

SEQ ID NO: 161758 - DNA, 80 bp, synthetic construct
  source 1..80: mol_type = other DNA
cattcggaggctttggtcaccagaacatggctgtgtatgtggcaggctataagatatgcaattaccatttagccactcag

SEQ ID NO: 161759 - DNA, 80 bp, synthetic construct
  source 1..80: mol_type = other DNA
gtccgtcactaaccacgtgactcccgcaggccaatcacccgctactacgtacacttcctgggctgggtctacccgtgcat

SEQ ID NO: 161760 - DNA, 80 bp, synthetic construct
  source 1..80: mol_type = other DNA
tcttcgctatgacgtggaagtaacgttcgtgatcacaagccagcaagaccagggcaccgatctatcgcaagacatgccag

SEQ ID NO: 161761 - DNA, 80 bp, synthetic construct
  source 1..80: mol_type = other DNA
acacccagctagcagaaagcaagctatgttaggggtacatgttgtttgggacctgggtttacaatcatcatgtactatgg

SEQ ID NO: 161762 - DNA, 80 bp, synthetic construct
  source 1..80: mol_type = other DNA
taaaacagggaccaaaggagtcattccaaagctatgtagatagattctacaaaagcttgagggcagaacaaacagatcca

SEQ ID NO: 161763 - DNA, 80 bp, synthetic construct
  source 1..80: mol_type = other DNA
cacgggatctgcagtagggtgcgaccctgaaactttttggtcaaagataccagtaatgctggatggggagtgtataatgg

SEQ ID NO: 161764 - DNA, 80 bp, synthetic construct
  source 1..80: mol_type = other DNA
accaagtaagactaaactccaacctagtgtattctttgatgtatttccaggtactaaagagccagctgttctcacaaata

SEQ ID NO: 161765 - DNA, 80 bp, synthetic construct
  source 1..80: mol_type = other DNA
tggaaccctaatcaaaaccctaaaatgccagacatcagcaatgcagactcttctaaaaaacctgacgacttaactaaaaa

SEQ ID NO: 161766 - DNA, 80 bp, synthetic construct
  source 1..80: mol_type = other DNA
ctgccttttagtggtgtgcgttcctgaggccgaaatgggatgtgctgatgtgaagagtgttgtcaccgccctaaacctta

SEQ ID NO: 161767 - DNA, 80 bp, synthetic construct
  source 1..80: mol_type = other DNA
agtatgcccgtacacctttccttcactgtatcacactacaaataaaaactatggattcataccatactccaccacttttg

SEQ ID NO: 161768 - DNA, 80 bp, synthetic construct
  source 1..80: mol_type = other DNA
atatcccagtcgggcaagtcaccaattatggctttctaaacctaggtggcacaccaacacaccgcatcttgatgtacaac

SEQ ID NO: 161769 - DNA, 80 bp, synthetic construct
  source 1..80: mol_type = other DNA
ataatcttgaagggaacataactagtgaggctatgtactcaatagaattacaatcatcaactgaacaaagcaagatattt

SEQ ID NO: 161770 - DNA, 80 bp, synthetic construct
  source 1..80: mol_type = other DNA
gggtgcggccgggtggcccaccgggtccgctgggtccgctgccccgctccggcagggtgtggccggctgcagccgggtcc

SEQ ID NO: 161771 - DNA, 80 bp, synthetic construct
  source 1..80: mol_type = other DNA
caagaacaccctacaaaaccctgtggagcagtttgtggataatgtcttagaggaagtcttggttgtacctaacacacaac

SEQ ID NO: 161772 - DNA, 80 bp, synthetic construct
  source 1..80: mol_type = other DNA
attgtgaggatgaaggattaatagttaagagttccaccacactagaaaaacacattgatagggtgcaacaggccataaat

SEQ ID NO: 161773 - DNA, 80 bp, synthetic construct
  source 1..80: mol_type = other DNA
attataatcagtatatagaaaccgctgtagatcactatacagcacagttatacattttagatattgaaccaaaaccactt

SEQ ID NO: 161774 - DNA, 80 bp, synthetic construct
  source 1..80: mol_type = other DNA
tttggatacttataaacacattaacctggacaaacttaagatacttgcatatggggatgatgttttgttttcataccctt

SEQ ID NO: 161775 - DNA, 80 bp, synthetic construct
  source 1..80: mol_type = other DNA
cacttgatatgggacataggactccaatcgagttgtgtactatgcgtgccgtggattagccaaacccactatagactggt

SEQ ID NO: 161776 - DNA, 80 bp, synthetic construct
  source 1..80: mol_type = other DNA
tttgaagaccactggtacactcagccagacttatgcaaagttcctcttgtaactttgcggtcaactgccgctgactttca

SEQ ID NO: 161777 - DNA, 80 bp, synthetic construct
  source 1..80: mol_type = other DNA
acacgtttacgaatgtgagctttcatgtaacattactaataacaaatatgaaatactaaattattttgataactgtacct

SEQ ID NO: 161778 - DNA, 80 bp, synthetic construct
  source 1..80: mol_type = other DNA
ggtcgccgggtctagaggcgaccgttttcgaagaggtcatttatcagatttatcaattctatagctcgtcctaccgtgga

SEQ ID NO: 161779 - DNA, 80 bp, synthetic construct
  source 1..80: mol_type = other DNA
cagaaactttgccacccactcagacgacctcatatccaacggaccttacggggggggtatgacaaccaccaaatttactt

SEQ ID NO: 161780 - DNA, 80 bp, synthetic construct
  source 1..80: mol_type = other DNA
ctaggagaaactgttacttggctaaaacaagaaggacaacaaggctttaaaaccaacaacaacccagtctttggattttg

SEQ ID NO: 161781 - DNA, 80 bp, synthetic construct
  source 1..80: mol_type = other DNA
ttgcacaaaatggccgccaattacttccggggtcaaaggttgctgctacgtcatcgagacacgtggtgccagcagctgta

SEQ ID NO: 161782 - DNA, 80 bp, synthetic construct
  source 1..80: mol_type = other DNA
tcatgccatatggtcatcccgtggatcagctcccactttttccggagaacaaggaaagacaactacacagaaggtgggtt

SEQ ID NO: 161783 - DNA, 80 bp, synthetic construct
  source 1..80: mol_type = other DNA
actgtttacgctgcgagaacggtacgatgaaaataatcgagcgcctccacgtccgattgggctcgctatatccgagaccg

SEQ ID NO: 161784 - DNA, 80 bp, synthetic construct
  source 1..80: mol_type = other DNA
tcaattctctctttggagaagaccagtagtccaagcatatatcgagggtcagccagtagaagtgttactagacacagggg

SEQ ID NO: 161785 - DNA, 80 bp, synthetic construct
  source 1..80: mol_type = other DNA
caccattaataaggttagcctataacctggtcaaagaccccctagaaggagtagaaacttactacacagatggatcctgt

SEQ ID NO: 161786 - DNA, 80 bp, synthetic construct
  source 1..80: mol_type = other DNA
cctcgcgggcctgcatctcctggagtaggaggtcctcctcctcccctccgtcgagcgctgccggcaccaccgggcgctcc

SEQ ID NO: 161787 - DNA, 80 bp, synthetic construct
  source 1..80: mol_type = other DNA
ggaacctgctgtgttggatgattccgatcccagactagaagtcaatctgcgagactccctctttgcaaaatataaaggta

SEQ ID NO: 161788 - DNA, 80 bp, synthetic construct
  source 1..80: mol_type = other DNA
gacactacacaaagaatcagccgcaaactttaacacagcacaaaacaaaaagtactcaaacatttccagcttatggggag

SEQ ID NO: 161789 - DNA, 80 bp, synthetic construct
  source 1..80: mol_type = other DNA
ggacctctggaacatctgtgtttaacactatgatcaacaacattatcattagaactataaccattgaaacatataaaaac

SEQ ID NO: 161790 - DNA, 80 bp, synthetic construct
  source 1..80: mol_type = other DNA
gacccagacaacaccaacttagaacttacagtattaatacttgacaggaatgaaaagtttagggacattaggagttttat

SEQ ID NO: 161791 - DNA, 80 bp, synthetic construct
  source 1..80: mol_type = other DNA
gcacctttttccgaaggactaaatcagatgagtacacttcaggaggtatcatatcattatggcaccagacagactttgtt

SEQ ID NO: 161792 - DNA, 80 bp, synthetic construct
  source 1..80: mol_type = other DNA
gggatgtttgggcaaaacatgtattatcatgcattggggcgctcaggttacatattccatgtgcagtgcaatgccactaa

SEQ ID NO: 161793 - DNA, 80 bp, synthetic construct
  source 1..80: mol_type = other DNA
ctttggagggtcttttagcaccactacctggagcctaaaagtactttgggacgagcaccaaaaattcctaaacaaatgga

SEQ ID NO: 161794 - DNA, 80 bp, synthetic construct
  source 1..80: mol_type = other DNA
tccccttgtgcactaccgcaatttgatgtcacaccacccatgaaaattcccggtgaagtccacaatttaatggagatagc

SEQ ID NO: 161795 - DNA, 80 bp, synthetic construct
  source 1..80: mol_type = other DNA
gagacattttgaacaaggaaactcaggaaacagctaaaatggaacattatctagacaagtatggaatagacttgccacta

SEQ ID NO: 161796 - DNA, 80 bp, synthetic construct
  source 1..80: mol_type = other DNA
ctttgaaccaaccaatataactgaatcaaggacaagtattacatacgtgcctgacaccatccgcccagaggtgcgcacgg

SEQ ID NO: 161797 - DNA, 80 bp, synthetic construct
  source 1..80: mol_type = other DNA
tttcttaaaaagaggttttaaaccagatacagaatttccctttctcatacaccctgtgtatgctatgagtgatgtgcatg

SEQ ID NO: 161798 - DNA, 80 bp, synthetic construct
  source 1..80: mol_type = other DNA
atgtgccaaaatcctttaaaccgtgtgacatagacaataagattggaaatgcaaaatgttgcccctttatatgtggaaaa

SEQ ID NO: 161799 - DNA, 80 bp, synthetic construct
  source 1..80: mol_type = other DNA
aggttgttgtgttttgtatcaggctgtaaggatttttgtttacgcatggctcgtgatactaatttgcatctacagagtgg

SEQ ID NO: 161800 - DNA, 80 bp, synthetic construct
  source 1..80: mol_type = other DNA
cacttatgcaaggcaatttgataaaagataaagaatggtatacagtgcattacctaaaacaaatcctgtctggtggccat

SEQ ID NO: 161801 - DNA, 80 bp, synthetic construct
  source 1..80: mol_type = other DNA
acaatggaggcatacccaattccactaaaccaaggtaccccaaccaaggaccagtctatattttcgctgagcttgagccc

SEQ ID NO: 161802 - DNA, 80 bp, synthetic construct
  source 1..80: mol_type = other DNA
cgaaggtacctgaacacatacaccctcgcagatatattcaaacacccaccgtccaagagagcggactacaacagtgcgac

SEQ ID NO: 161803 - DNA, 80 bp, synthetic construct
  source 1..80: mol_type = other DNA
attttgtgcagcccgccaatttctgttcaaacagaccaatcaggaccttctacgtgcacttcctggggcgtgtctacgag

SEQ ID NO: 161804 - DNA, 80 bp, synthetic construct
  source 1..80: mol_type = other DNA
cattgatcactactacactgagcagaaggccatggagaacgtccacggggagacttatgctaacattttaaacatgctct

SEQ ID NO: 161805 - DNA, 80 bp, synthetic construct
  source 1..80: mol_type = other DNA
aaggccagggaaacaaagtatggttccagtacttaacaaaagaaaccacagaatttaaagcagagcaagctaagtgtgta

SEQ ID NO: 161806 - DNA, 80 bp, synthetic construct
  source 1..80: mol_type = other DNA
cagtgttaatgacactttgttgtttagaacaacttttgggaatcttttttcaaaatttcatcttaacccaggaattgtca

SEQ ID NO: 161807 - DNA, 80 bp, synthetic construct
  source 1..80: mol_type = other DNA
tacaagcttagcagggtgtataatggtcacatgttcagcttgtccagacatggctgtgcgcatgatgcgtgatacaccta

SEQ ID NO: 161808 - DNA, 80 bp, synthetic construct
  source 1..80: mol_type = other DNA
cagggtgatttgagggttttcatcaagcctagagcagacccaaaagttgtaacagctggacccagtgatatgtacgtaca

SEQ ID NO: 161809 - DNA, 80 bp, synthetic construct
  source 1..80: mol_type = other DNA
acatgccactatacatgctcacatatggatacctagactatgttgttaagtgcacaggtgttaaatcagcctggacagac

SEQ ID NO: 161810 - DNA, 80 bp, synthetic construct
  source 1..80: mol_type = other DNA
ggactacaaaatgggccattttagtgacgtaacagctgccattttaagtaaggcggaagcagctccactatacaaaatgg

SEQ ID NO: 161811 - DNA, 80 bp, synthetic construct
  source 1..80: mol_type = other DNA
atagcaaactatggagtggtgattcaaagggttggtggtggaagttgcctgatgccttgagagacatgggagtgtttggt

SEQ ID NO: 161812 - DNA, 80 bp, synthetic construct
  source 1..80: mol_type = other DNA
acagaactcatagaagcccaggccaaatgccacatccaggacctgcccctgtacgccatgactttcgggtacgaggacta

SEQ ID NO: 161813 - DNA, 80 bp, synthetic construct
  source 1..80: mol_type = other DNA
tgttccctatacacatagtcatgtaactaattatgtaccaaagacaggtgatgtgacaacagctatagtccctagaacca

SEQ ID NO: 161814 - DNA, 80 bp, synthetic construct
  source 1..80: mol_type = other DNA
tgcaaaatcagccaaagaaagaggggtgaacggagaccctgctttctgccacctaacaggaatatactctcccccctggt

SEQ ID NO: 161815 - DNA, 80 bp, synthetic construct
  source 1..80: mol_type = other DNA
agaagagggacatcttgaacaggaatacgaaggacatcacaaaacttcaacaaatgattgacacctatggacttgacctg

SEQ ID NO: 161816 - DNA, 80 bp, synthetic construct
  source 1..80: mol_type = other DNA
cagtttataacatggatggtaccctcttgggtaatgccttaatctttcctcatcaatttattaatctgagaacaaacaat

SEQ ID NO: 161817 - DNA, 80 bp, synthetic construct
  source 1..80: mol_type = other DNA
gcgacgtttcacgcgcacgctgctttctgcggttgtgggggttttattgagcatcttaatagcattcatcctcgctttct

SEQ ID NO: 161818 - DNA, 80 bp, synthetic construct
  source 1..80: mol_type = other DNA
cccagggagccccctcagtgtcgtgtcagctttaaacttggcttccaataaaaatgcaaggcctttcaaatttcacttgt

SEQ ID NO: 161819 - DNA, 80 bp, synthetic construct
  source 1..80: mol_type = other DNA
tggtgggcggcagggacggggcgttgcgtagacagggacggtggtgggaacggggacggaggtagggccgacgcgtcacg

SEQ ID NO: 161820 - DNA, 80 bp, synthetic construct
  source 1..80: mol_type = other DNA
ggcttgtagggggctgagggtggataactgggcttctgtgaaggcaccaaccctggaatctggatggtatgtttcttctg

SEQ ID NO: 161821 - DNA, 80 bp, synthetic construct
  source 1..80: mol_type = other DNA
aataaccaacacgcccattcaatccgcatattttaatcacactattcacacctcacacactgcattttttaacatcttat

SEQ ID NO: 161822 - DNA, 80 bp, synthetic construct
  source 1..80: mol_type = other DNA
atggccactttggtgagagagctgtcaaaagaatgcagacacaacaaatcaatgctgaatttattgcaggcccaccaaag

SEQ ID NO: 161823 - DNA, 80 bp, synthetic construct
  source 1..80: mol_type = other DNA
attggacactgaggtggcgtacagcacgaaagtgagtggggccagacttcgccatagggcctttaacttccgggtgcgtc

SEQ ID NO: 161824 - DNA, 80 bp, synthetic construct
  source 1..80: mol_type = other DNA
tcgcgagatttgcgtcccgtaagcgtttgcgacgtgttgtgttgtgtccggggtctgtccggcgtttgtgcggagctttg

SEQ ID NO: 161825 - DNA, 80 bp, synthetic construct
  source 1..80: mol_type = other DNA
atgggttaaggaacattacaatcccttccactcaaggtttaccggttatgaatacacctggcagtaaccaatacttgacg

SEQ ID NO: 161826 - DNA, 80 bp, synthetic construct
  source 1..80: mol_type = other DNA
agatatcttagagaggcaaataacaactatgcatgtttccaaccctacacaagaaaaaagggagcagctgtttaataatg

SEQ ID NO: 161827 - DNA, 80 bp, synthetic construct
  source 1..80: mol_type = other DNA
ccgcgtgtgcgagccgcacgaggagaccaccatccagcgcctgcagatcaacgatctgctcgcctactggccggtcatcg

SEQ ID NO: 161828 - DNA, 80 bp, synthetic construct
  source 1..80: mol_type = other DNA
gagaatggtactttacacaagaaaacacagacaacccaatacatggcagctacttaaaaccaacactaaactctgtagac

SEQ ID NO: 161829 - DNA, 80 bp, synthetic construct
  source 1..80: mol_type = other DNA
aaagaatctcagcccacgccggctggtgacagagcctgacccacgatgtcaggtagccgtgctatgcgccccgggcacca

SEQ ID NO: 161830 - DNA, 80 bp, synthetic construct
  source 1..80: mol_type = other DNA
ggagcaatcctggttacttgcagcgggtgccctgatttatctgtcagaatgctgagggataccccaatgatgaagcaaac

SEQ ID NO: 161831 - DNA, 80 bp, synthetic construct
  source 1..80: mol_type = other DNA
ccctgcgcagacagcggactcgttcccggtaccagtagattcactcgagaagtacaagtcgttagcccgttgtccatggg

SEQ ID NO: 161832 - DNA, 80 bp, synthetic construct
  source 1..80: mol_type = other DNA
aatgatgttgatactgaaataacaatcatgtggctggaccgcaatgaaaaatttagggacatcagaagattcataccaga

SEQ ID NO: 161833 - DNA, 80 bp, synthetic construct
  source 1..80: mol_type = other DNA
aagacaaaacagtattgggacatctggtacgaggaagatttagaatgcaacaacgacaccaaaaacaccagatgttacat

SEQ ID NO: 161834 - DNA, 80 bp, synthetic construct
  source 1..80: mol_type = other DNA
gactgatggcacagaaaagacagcaattaaatacagaagggacattaaaacagtgggccctagtgacatgtatgtccatg

SEQ ID NO: 161835 - DNA, 80 bp, synthetic construct
  source 1..80: mol_type = other DNA
ccgtgttcaacacctttaaaactgaggagcaccttaagtgccctgcagccaaagagttgaaacaacctgatcctacagag

SEQ ID NO: 161836 - DNA, 80 bp, synthetic construct
  source 1..80: mol_type = other DNA
tgacattattacaagaagaaatgtacactttgattgggaaactaaatttactgagaaggcaacacacattaaccctacat

SEQ ID NO: 161837 - DNA, 80 bp, synthetic construct
  source 1..80: mol_type = other DNA
aatgctcttaacacatttagaacagaaggatgcatgtcacaccccaaagtaaacaaatttacaccagacaatccctccac

SEQ ID NO: 161838 - DNA, 80 bp, synthetic construct
  source 1..80: mol_type = other DNA
ttggccgggcatggttagcccttgaacatacattcgcggatgatgggacatggagagcagatctaaattttcctaccctg

SEQ ID NO: 161839 - DNA, 80 bp, synthetic construct
  source 1..80: mol_type = other DNA
aagactttatctcccaccatattgcctattggagcgtgcatggattgataagttcatatagattgtgatttctaccctta

SEQ ID NO: 161840 - DNA, 80 bp, synthetic construct
  source 1..80: mol_type = other DNA
tacgtgcacacaggcaatatacaaccagcacaaactcttgagcagtgcaaaactattattattaacaacatgaaagcatg

SEQ ID NO: 161841 - DNA, 80 bp, synthetic construct
  source 1..80: mol_type = other DNA
tgcttgtgtcgtccaccaccgcacaaggctgtgacacgatcgcccgctgcaactgtcagacaggagtatactactgtaac

SEQ ID NO: 161842 - DNA, 80 bp, synthetic construct
  source 1..80: mol_type = other DNA
cgcaactgattcgccgtgtgttaccgccgccgcccgacgccgaagacgacgtggtttttgcatccgagctgtgtttttat

SEQ ID NO: 161843 - DNA, 80 bp, synthetic construct
  source 1..80: mol_type = other DNA
ggacgaggctgaggagggtttgcgggacgtaagcgcgacgccgagtttgcggcgtgctgtggcgcgctcaaggctaggga

SEQ ID NO: 161844 - DNA, 80 bp, synthetic construct
  source 1..80: mol_type = other DNA
atggatacagatactccaatctcacaaagtctcggagccactgtatcattactagacaacaagaggtgttcagtatatca

SEQ ID NO: 161845 - DNA, 80 bp, synthetic construct
  source 1..80: mol_type = other DNA
ggccgctgcccgggccagggcggcctcgaggggagcctggacaggagctttggtcggagagtggagcaggctcctgagtt

SEQ ID NO: 161846 - DNA, 80 bp, synthetic construct
  source 1..80: mol_type = other DNA
gtcattactataccagcaggggaacaaatgacattgtctgtaccgttctattccaataaaccattaaggactgttagaca

SEQ ID NO: 161847 - DNA, 80 bp, synthetic construct
  source 1..80: mol_type = other DNA
aggacaggtgccagatgtgcctgggctatcgtcctccgtccagccacgcaggatgttcacgtgggccccggcaccatagc

SEQ ID NO: 161848 - DNA, 80 bp, synthetic construct
  source 1..80: mol_type = other DNA
gggtcacatatggtttaactattacaccaccagataagtcacccaaatttacaaaaatggattggaatactgtaacattc

SEQ ID NO: 161849 - DNA, 80 bp, synthetic construct
  source 1..80: mol_type = other DNA
cgcacatgctcataggagccgggtttgcgatgccaggcgattgtggaggaattctacgatgcactcatggggtaatgggc

SEQ ID NO: 161850 - DNA, 80 bp, synthetic construct
  source 1..80: mol_type = other DNA
aagaggcagagtaaggagatggaggcggagagggagagggtggcggagaaggacctatataagacgtagaaggcgccgca

SEQ ID NO: 161851 - DNA, 80 bp, synthetic construct
  source 1..80: mol_type = other DNA
tgaaccgggaggaggaggatggggactacaacagctatcgttatcaaacttatactcacaaaactgtgacttaatgaact

SEQ ID NO: 161852 - DNA, 80 bp, synthetic construct
  source 1..80: mol_type = other DNA
cagagaaaatgccagacacaagtagaccaacagcaccacctagcgggaaaggaggaaacttccccgtacaacaagtgggt

SEQ ID NO: 161853 - DNA, 80 bp, synthetic construct
  source 1..80: mol_type = other DNA
gggggtgacaaccatgtagcatttatagatttaagaccttatgcatgcttgtcagaacatcaaggagttgtttcagagta

SEQ ID NO: 161854 - DNA, 80 bp, synthetic construct
  source 1..80: mol_type = other DNA
aatggccgacttccttccgcttttttgaaaaaaggcgccaaaaaaccgctccgggagcggcgcgcgcgctgcgcgcgcgc

SEQ ID NO: 161855 - DNA, 80 bp, synthetic construct
  source 1..80: mol_type = other DNA
gtcccgatttcccctctcaaaatcagagatcaccttgctcagaccagcccaatcgaaaaactgagatcgtattgccggat

SEQ ID NO: 161856 - DNA, 80 bp, synthetic construct
  source 1..80: mol_type = other DNA
agaataccataaagtaacaattagagtattaggaaaagaaataaaagcaacattaatgactggggagactccaataaata

SEQ ID NO: 161857 - DNA, 80 bp, synthetic construct
  source 1..80: mol_type = other DNA
ctggctccacggagacgccgggtaatcctaggccgaggcccccggtactgagctccaccagcagcactcctaccgaacaa

SEQ ID NO: 161858 - DNA, 80 bp, synthetic construct
  source 1..80: mol_type = other DNA
gaagacaagtggtacccacagagtgacctgtgtgatgttcctcttttaactgtccatgcaaccgcagcggatctgcaata

SEQ ID NO: 161859 - DNA, 80 bp, synthetic construct
  source 1..80: mol_type = other DNA
cccggtacacgatgcgcccggcatcgagcgcaattggtacgaggcctgtttccgagcccatgctggatcttgtggttgtg

SEQ ID NO: 161860 - DNA, 80 bp, synthetic construct
  source 1..80: mol_type = other DNA
ggtgcaaggtccggcgtttgattacgcggttgctatggcaaagcgcaacatactgactgcaacaacggagaaaggtgagt

SEQ ID NO: 161861 - DNA, 80 bp, synthetic construct
  source 1..80: mol_type = other DNA
atgtcaagttgatacaatgatccccataaataatgttggaaataataccaaaagtgtagatatgtatacagtggtattac

SEQ ID NO: 161862 - DNA, 80 bp, synthetic construct
  source 1..80: mol_type = other DNA
ttggagaaagaaaaggcaactgcttctgtcacttgtgccagctgcaccgaaggcacctgccatgagcttcagcaccccgt

SEQ ID NO: 161863 - DNA, 80 bp, synthetic construct
  source 1..80: mol_type = other DNA
agcaacccccggctctcaggcctcacgatcttcaagagtctcgccatctacccaacagtcttcaggtctgacacccacgc

SEQ ID NO: 161864 - DNA, 80 bp, synthetic construct
  source 1..80: mol_type = other DNA
tatggtggtggagtcaaaggctcagggcattgaccaaatagccagatgtgcctgcaagaccggggtatattactgtgaat

SEQ ID NO: 161865 - DNA, 80 bp, synthetic construct
  source 1..80: mol_type = other DNA
gagcacgagcccgtagccagggattaccagtattgatgactccaggttctggtcaattcatgacaactgatgattaccag

SEQ ID NO: 161866 - DNA, 80 bp, synthetic construct
  source 1..80: mol_type = other DNA
tgggtagtcttatactaatactaggtacaatatatgcactgtacaaacttatgtgcatgacacagggtccatactcaggg

SEQ ID NO: 161867 - DNA, 80 bp, synthetic construct
  source 1..80: mol_type = other DNA
acacgagcctcctactggaactcgttccacgccactgaatacctaaaccccaacatcatatacaaaaacggtgaaaaact

SEQ ID NO: 161868 - DNA, 80 bp, synthetic construct
  source 1..80: mol_type = other DNA
cattataaaactgaattcggagagatgggagcgcaagtatccacgcagcggtccgggtcccatgagaccagcactgtagc

SEQ ID NO: 161869 - DNA, 80 bp, synthetic construct
  source 1..80: mol_type = other DNA
caggcatgatgatgcagtataaaaagaaaatattaatacccagctatcaaacaaaaccaaagggaagcgccaaagtaaaa

SEQ ID NO: 161870 - DNA, 80 bp, synthetic construct
  source 1..80: mol_type = other DNA
acttgtcacgtgagcacacgtcacggcggccattttgtatcacaaaatggcggacttccttcctcttttttaaaattaac

SEQ ID NO: 161871 - DNA, 80 bp, synthetic construct
  source 1..80: mol_type = other DNA
caccaagcactccgagcgtaagcgaggagtgcgaccctcccccccggtagcaacttcttcggagtccggcgctacgcctt

SEQ ID NO: 161872 - DNA, 80 bp, synthetic construct
  source 1..80: mol_type = other DNA
tttcgtaaccaagcgaccgatgcccgttagcgacagcttcgtctgcctgcgacccgtagactttcagcgtctgacgcaga

SEQ ID NO: 161873 - DNA, 80 bp, synthetic construct
  source 1..80: mol_type = other DNA
ccacaaacagttatacagtacatgtatgttccacctggtgcacctaaacccactggtagagaatcatttgagtggcaaac

SEQ ID NO: 161874 - DNA, 80 bp, synthetic construct
  source 1..80: mol_type = other DNA
tgccagggcctaccaggacgtcacatacaatccaaactgtgacagaggagttaaaaacagggtgtgggtgcaggccctaa

SEQ ID NO: 161875 - DNA, 80 bp, synthetic construct
  source 1..80: mol_type = other DNA
cgctggtacgtcatgatgagatatcagctagacgtcttccacgacatagtcacctgtgggcccttcgcctaccgggacga

SEQ ID NO: 161876 - DNA, 80 bp, synthetic construct
  source 1..80: mol_type = other DNA
atctactctcctaatcatggatgtcacttcttcctctgtcttatctccttcttgcaaagccctaatgcagtgcttaatgg

SEQ ID NO: 161877 - DNA, 80 bp, synthetic construct
  source 1..80: mol_type = other DNA
acggggtgaccggggccttattttgccacaaggcccacaaacagcccctcaggccatgttggtacagccacatgtccacc

SEQ ID NO: 161878 - DNA, 80 bp, synthetic construct
  source 1..80: mol_type = other DNA
agtggcccagttacttagacgacaaggaagcaaatcctgtggatgctcccacagaacctgacgtgagcagtaataggttc

SEQ ID NO: 161879 - DNA, 80 bp, synthetic construct
  source 1..80: mol_type = other DNA
aatacaagtagagacagaaaccaaccagatgaagatcccttcttcaattgtaatggtactttgttagggaatttaactat

SEQ ID NO: 161880 - DNA, 80 bp, synthetic construct
  source 1..80: mol_type = other DNA
ggcaaaccttacaaatcagagtccatatggtcaacaaccacagaatcgtatgatgaaactagcatatttagatagaggtt

SEQ ID NO: 161881 - DNA, 80 bp, synthetic construct
  source 1..80: mol_type = other DNA
ggaatagaagatttaattcagagtgttgctagcaatgctttgcaaatttcccaacccaaacccagcactagccagcaatc

SEQ ID NO: 161882 - DNA, 80 bp, synthetic construct
  source 1..80: mol_type = other DNA
cgcccctccacccccgctcgatttcagcttccaagcttcccggttggtgcccgtggggcctgggtttcgcctgctcgtgt

SEQ ID NO: 161883 - DNA, 80 bp, synthetic construct
  source 1..80: mol_type = other DNA
aacgaataggtcccaccacgcgacccaccagggtctcgcgccaaggacacggccaaaccatgtcatgactcaacaaatgt

SEQ ID NO: 161884 - DNA, 80 bp, synthetic construct
  source 1..80: mol_type = other DNA
ctcactgcacccagcatacacccaggcatgatgatacttaacaaaaaacacatatttatacccagtttaaaaagtagacc

SEQ ID NO: 161885 - DNA, 80 bp, synthetic construct
  source 1..80: mol_type = other DNA
ctcacagaagaggtacagtggacagaaatggcagaagcagaatttgcagagaataagattattttgagtcaggaacaaga

SEQ ID NO: 161886 - DNA, 80 bp, synthetic construct
  source 1..80: mol_type = other DNA
ccaaagccccagcaaataaagatagcagggaatgggattcagcttcaaaccctagtgtgttttatcaaccccactctggg

SEQ ID NO: 161887 - DNA, 80 bp, synthetic construct
  source 1..80: mol_type = other DNA
gtgatgaatgacaacacaaacgctgaggcaacagtggagaactttttgggtagatctgctctgtgggctaacttcaacct

SEQ ID NO: 161888 - DNA, 80 bp, synthetic construct
  source 1..80: mol_type = other DNA
ttgcaaccacatatcccaatctcgtggtttacccgttggttcccttgcctcacacaccagcgtgaagcaatggagcgtgt

SEQ ID NO: 161889 - DNA, 80 bp, synthetic construct
  source 1..80: mol_type = other DNA
accgcctacagagacatagtatacaacccactcttagacaaaggagagggcaacagaatatggttccaataccacactaa

SEQ ID NO: 161890 - DNA, 80 bp, synthetic construct
  source 1..80: mol_type = other DNA
ctacaagtagactctgcccaggaaccaggcaatgatattatacccgcctgtgattgcaccaccggcacttactactgcaa

SEQ ID NO: 161891 - DNA, 80 bp, synthetic construct
  source 1..80: mol_type = other DNA
tggtcaaccacatgggaacactgtgcatgagagtggttactgaccaacaacgacatgacgttgaaattgtaaccagagtg

SEQ ID NO: 161892 - DNA, 80 bp, synthetic construct
  source 1..80: mol_type = other DNA
aacaacagtagaggggttcatcataggggcacgaaaaacgtcatcatatccttctgcaaacatctcctcagctagagaaa

SEQ ID NO: 161893 - DNA, 80 bp, synthetic construct
  source 1..80: mol_type = other DNA
tggctagagtggattcattcataccactgaacaatactgcagcagagattggaaaagtgggtatgtactgcattcccata

SEQ ID NO: 161894 - DNA, 80 bp, synthetic construct
  source 1..80: mol_type = other DNA
acctgctgatttggtagttggacaaacactagttgtaaggcccacgaaggatgcccagaaggtacccgtaggtaacaagg

SEQ ID NO: 161895 - DNA, 80 bp, synthetic construct
  source 1..80: mol_type = other DNA
ctctgcatcaaatccctgtgtctttttccaacccaagagtggctttccccgtttcaccataccctttactggtttagctt

SEQ ID NO: 161896 - DNA, 80 bp, synthetic construct
  source 1..80: mol_type = other DNA
ccatttgcacccctagactatactgctcaggcatctgagtacgtccctgtcaccgtcactatcgcaccaatgtgtgcgga

SEQ ID NO: 161897 - DNA, 80 bp, synthetic construct
  source 1..80: mol_type = other DNA
atttcacagcggtttgctactggtggctgttgtacctgaacaccaacttgcttatgttggcggaacaaatgcaaatgtag

SEQ ID NO: 161898 - DNA, 80 bp, synthetic construct
  source 1..80: mol_type = other DNA
caaacaacaataagtacttgcaggtctccagcctatggggagaccatgtatataccgaaaaaatagttactgcattcttt

SEQ ID NO: 161899 - DNA, 80 bp, synthetic construct
  source 1..80: mol_type = other DNA
tgtttaacgagagatggttgattcatggtggtatgccttcagggtcaccttgtaccacagttctgaattcattatgcaat

SEQ ID NO: 161900 - DNA, 80 bp, synthetic construct
  source 1..80: mol_type = other DNA
ggagacaatgtgtacaaaccgaccatagtacaagcattcgaggacaacgccacaaagatgtatgaggcacgcaaacacac

SEQ ID NO: 161901 - DNA, 80 bp, synthetic construct
  source 1..80: mol_type = other DNA
ggtgatgtccagaatgcagttgagggggcaatggttagagttgcagataccgtgagcactagcgccaccaactccgaaca

SEQ ID NO: 161902 - DNA, 80 bp, synthetic construct
  source 1..80: mol_type = other DNA
caaaaaaagacttatactgactcaatggcagccctctatagtcaaaaaatgttatatagtgggctttgaccctataataa

SEQ ID NO: 161903 - DNA, 80 bp, synthetic construct
  source 1..80: mol_type = other DNA
ggaagtgttggcatactgtcatgattctccagaccttgtaatgcaacttcataagccagtaattgattctgatcatgtag

SEQ ID NO: 161904 - DNA, 80 bp, synthetic construct
  source 1..80: mol_type = other DNA
ctatcacaaaatggcggacttccttccgctttttcaaaaaaaggcgcgaaaaaaccgccgcgggggcggcgcgcgcgctg

SEQ ID NO: 161905 - DNA, 80 bp, synthetic construct
  source 1..80: mol_type = other DNA
tgagtctgtggcgacccccggcgcaccatgttgccggtcaggagagacagttctttgaggcttgtctccgagcccactct

SEQ ID NO: 161906 - DNA, 80 bp, synthetic construct
  source 1..80: mol_type = other DNA
cttagttatatattgttactaaattcatcaaaatgggagcacaagtttccacacagaaaaccggcgcgcatgagaccctg

SEQ ID NO: 161907 - DNA, 80 bp, synthetic construct
  source 1..80: mol_type = other DNA
cgcacacatttcagaatacaagacctatatacctacagctggagatgagactgcaagatacaccagctggagggtaagtg

SEQ ID NO: 161908 - DNA, 80 bp, synthetic construct
  source 1..80: mol_type = other DNA
caggtttgactgttcatttagcccctcttagagactgcattgctagagttcatcaaaaattgaaaaatttgggctcaatt

SEQ ID NO: 161909 - DNA, 80 bp, synthetic construct
  source 1..80: mol_type = other DNA
tttatcacaaacagcatggttaagtggcacgtccctaaagacaatactccaaatgacaccacctacactggcaacaaaca

SEQ ID NO: 161910 - DNA, 80 bp, synthetic construct
  source 1..80: mol_type = other DNA
ttcaaagcgcaatacacacccggtactgatattgaggatgcaagacaattcagtcctattgactacttgttcgggtcggg

SEQ ID NO: 161911 - DNA, 80 bp, synthetic construct
  source 1..80: mol_type = other DNA
aggttggtccaatccataggcttttttgtgaaaacccggggatcggactagccttagagtaactcaaggccaagcatttc

SEQ ID NO: 161912 - DNA, 80 bp, synthetic construct
  source 1..80: mol_type = other DNA
cccaccacggacagcagctatcaggccaagaagaagacgccttatctatccttcgccaactccaagcggagcaagaagag

SEQ ID NO: 161913 - DNA, 80 bp, synthetic construct
  source 1..80: mol_type = other DNA
atatggataaagccccccgtgctatttgaagacaaatggtatacacagcaagatctgtgtcccgttaatcttttgtcact

SEQ ID NO: 161914 - DNA, 80 bp, synthetic construct
  source 1..80: mol_type = other DNA
tccagtctgtggggagatcatgtctataaaaaagacatcgttgacgcattctttaagaatgcagataacatgtacgaagc

SEQ ID NO: 161915 - DNA, 80 bp, synthetic construct
  source 1..80: mol_type = other DNA
tatctgcatgtgacgtgtcagacaaactcactggaaaaatcattaaatggacaattagactgattagtgccttatcaatt

SEQ ID NO: 161916 - DNA, 80 bp, synthetic construct
  source 1..80: mol_type = other DNA
tttcaggtccttaaagacaaatactacccaattataggtgttttacctagttacacagaagttgcaggcaataaaaaaga

SEQ ID NO: 161917 - DNA, 80 bp, synthetic construct
  source 1..80: mol_type = other DNA
gagctactcctcaagcagctccagcagcaaagacaacaccagcgagtcctcaaacgaggactccgagtcctgttcggaga

SEQ ID NO: 161918 - DNA, 80 bp, synthetic construct
  source 1..80: mol_type = other DNA
gttttgtggcacagcaagcactagtttgaagttactcattgcatacacaccaccaggagttgataaacccaacacaagga

SEQ ID NO: 161919 - DNA, 80 bp, synthetic construct
  source 1..80: mol_type = other DNA
cctcaaaacacagacccatgcccatttcaggctgagagggctccatccggctcgaccacccttgtccaccaaactgccat

SEQ ID NO: 161920 - DNA, 80 bp, synthetic construct
  source 1..80: mol_type = other DNA
tctcttttgcgggtccatgatggctactgggaaactattggtcgcttatgccccaccaggtgcaaaaccaccgaaaacac

SEQ ID NO: 161921 - DNA, 80 bp, synthetic construct
  source 1..80: mol_type = other DNA
ttggattgtagtaccgacgtggaagataccaggcaggctagagaaatggcacagtctagtcaagtatctgaagcatagaa

SEQ ID NO: 161922 - DNA, 80 bp, synthetic construct
  source 1..80: mol_type = other DNA
ccggcctgctaaacctcctctcccgctggcaggatggcgctctccgggcacgtcttgatagaccccgcccgactgcccag

SEQ ID NO: 161923 - DNA, 80 bp, synthetic construct
  source 1..80: mol_type = other DNA
agcccctgagcccgtgctgcgttttggttacagatcagtttctatgaagttacacccgaagcaccccacgtatttgacaa

SEQ ID NO: 161924 - DNA, 80 bp, synthetic construct
  source 1..80: mol_type = other DNA
tgagttcaaatcacagtactcacccggtaccgatgcggaagatgccagacaattttgccccattgattatttgtttgggt

SEQ ID NO: 161925 - DNA, 80 bp, synthetic construct
  source 1..80: mol_type = other DNA
acaagagatatccctttctggtgcacccagtttattccatgtcagacatctatgaatctattaggtggacaaaggaccct

SEQ ID NO: 161926 - DNA, 80 bp, synthetic construct
  source 1..80: mol_type = other DNA
aaacattatggcattatagtaggtgactatgtttatcagcttgattctgacgacattttcaagactgctttaactgggaa

SEQ ID NO: 161927 - DNA, 80 bp, synthetic construct
  source 1..80: mol_type = other DNA
accaccttattcatacttgcatcataggtggatagataatttcatctaattaagcaatatagtatactatttggagtaga

SEQ ID NO: 161928 - DNA, 80 bp, synthetic construct
  source 1..80: mol_type = other DNA
gctgttggccgagaatctgcgcggcttgaatgagcgcctgctgagtgttcgcgtgcgcgtacgtcagatcagcagcgaca

SEQ ID NO: 161929 - DNA, 80 bp, synthetic construct
  source 1..80: mol_type = other DNA
cgaaatacgcgatcgctgttaaaaggacaattacaaacaggaatcgaatgcaaccggcgcaggaacactgccagcgcatc

SEQ ID NO: 161930 - DNA, 80 bp, synthetic construct
  source 1..80: mol_type = other DNA
ctctcaactatgatgagtattctaaaaaaccaaaaagacctagaatatttcctccaacagaaacagagtcccgaaaccaa

SEQ ID NO: 161931 - DNA, 80 bp, synthetic construct
  source 1..80: mol_type = other DNA
caatgtatacagtcaagggaaaacttaacatggcagaggctaccagactatgtaaagaatgccctacaccagccaacttc

SEQ ID NO: 161932 - DNA, 80 bp, synthetic construct
  source 1..80: mol_type = other DNA
cgatggtgcgatgggtctttctcttgttggccggggccagggacttgcagatgcgtgtggagccgtagacgatctggacg

SEQ ID NO: 161933 - DNA, 80 bp, synthetic construct
  source 1..80: mol_type = other DNA
gacctgggccgcggccatcggcatatgctctatacccgcccctccgggtggcccaggatctataggtatgggctgcatag

SEQ ID NO: 161934 - DNA, 80 bp, synthetic construct
  source 1..80: mol_type = other DNA
tgctactaacacacttacaactcaacaaattaaaatatgtgcagacacaaactaccaatggtacccctacaacatgaaaa

SEQ ID NO: 161935 - DNA, 80 bp, synthetic construct
  source 1..80: mol_type = other DNA
gctcaagtttcatcacaaaaggttggcgctcatgagaacaccaatgttgccaccggtggttctacagtgaattacaccac

SEQ ID NO: 161936 - DNA, 80 bp, synthetic construct
  source 1..80: mol_type = other DNA
gcgcttactgagagacacaacgcatataagccagaacaccctggtggccaacacccaggggattgaagatgtcattgata

SEQ ID NO: 161937 - DNA, 80 bp, synthetic construct
  source 1..80: mol_type = other DNA
caatgttgactcctttgtcgctctttcgggctctaagcccatctggactatgtcttgcctctggattggcggtcgcaatc

SEQ ID NO: 161938 - DNA, 80 bp, synthetic construct
  source 1..80: mol_type = other DNA
acatgaacacacaccctatgctaatgctcctaaacaagcaccacgtagtggtgccaagcccaaaaacaaagcccaaaggc

SEQ ID NO: 161939 - DNA, 80 bp, synthetic construct
  source 1..80: mol_type = other DNA
atacgatctcaacaccacaaactccggtagatatagcagacgttgttttatacacgattacttcacaggacatcatgaag

SEQ ID NO: 161940 - DNA, 80 bp, synthetic construct
  source 1..80: mol_type = other DNA
tccggacacacccaatttaactttatcactcaccaagatgacataccgcccgccagaagcgggtacgggggcaacttcac

SEQ ID NO: 161941 - DNA, 80 bp, synthetic construct
  source 1..80: mol_type = other DNA
gccattcttgaacaagacgccacggaaggtgaacgctttggtggtaacgattggacgcaatttgactcgaaccaaaacaa

SEQ ID NO: 161942 - DNA, 80 bp, synthetic construct
  source 1..80: mol_type = other DNA
caaggcacgtgtgcaactttcactccagatcagagtctacgctagaaaacttctttggcagagcagcatgtgtgtgcgtg

SEQ ID NO: 161943 - DNA, 80 bp, synthetic construct
  source 1..80: mol_type = other DNA
tcccactggcccagcgtcagcaggttctcgcgcgccagcggtccgtggaagagcggcggcagcacgcatagcgcgtcgcc

SEQ ID NO: 161944 - DNA, 80 bp, synthetic construct
  source 1..80: mol_type = other DNA
gagacggtacataagacgcagacgcaaaaagagaaagctagtactgactctgtggaacccccaagatgtcaggagatgca

SEQ ID NO: 161945 - DNA, 80 bp, synthetic construct
  source 1..80: mol_type = other DNA
acaaaataggactctttagccctatattcttaagcccctttagaaccagcagtctagactttcccactgcctacagagac

SEQ ID NO: 161946 - DNA, 80 bp, synthetic construct
  source 1..80: mol_type = other DNA
ctccccgtccccgcacacccccgccaccgccggtcccgcgagtccccgtccccaaggtaacccctgtccgcgtcctcaac

SEQ ID NO: 161947 - DNA, 80 bp, synthetic construct
  source 1..80: mol_type = other DNA
cgggctatgggcaaggctcttagggttttcattcttaaaatgtttctcggcagggtttaccgccaaaagaaaaggaaagt

SEQ ID NO: 161948 - DNA, 80 bp, synthetic construct
  source 1..80: mol_type = other DNA
ggcatattctcccccatattcctttctcgcaagcgtagcaacattaactttgccaccgcttaccaggacgtcacctacaa

SEQ ID NO: 161949 - DNA, 80 bp, synthetic construct
  source 1..80: mol_type = other DNA
cataaaaacaacacccccaccacccgctattgcagacttacttcggtccgttgacagtgaccaggtgcgagagtattgca

SEQ ID NO: 161950 - DNA, 80 bp, synthetic construct
  source 1..80: mol_type = other DNA
tcacagacaagtggtacttccaaaaggacatgtgtgatgtcacgctgctaaacttgaacgttgtgctatgtaacttgcgg

SEQ ID NO: 161951 - DNA, 80 bp, synthetic construct
  source 1..80: mol_type = other DNA
tacacccacccggggccttacggatttcagcctcatcaaagctacgaagtgcccagatacgtccctcatccgcccccacc

SEQ ID NO: 161952 - DNA, 80 bp, synthetic construct
  source 1..80: mol_type = other DNA
cagccccactctccaatagggatagtagattagaatcaaatttggatgacaccgtattttccaaatataggggtaatgca

SEQ ID NO: 161953 - DNA, 80 bp, synthetic construct
  source 1..80: mol_type = other DNA
gcacgatggccgcacagaccctagccgttgcgatccctaccaagtgtatttctacggtctgcagtgtcctgagcaactgg

SEQ ID NO: 161954 - DNA, 80 bp, synthetic construct
  source 1..80: mol_type = other DNA
cgtagcgcttgacgatgattttgaaagcgttgaagtggttgctgatgcgactgaagaagcggtagagggtttgtgcgtgg

SEQ ID NO: 161955 - DNA, 80 bp, synthetic construct
  source 1..80: mol_type = other DNA
cccaaataagactagattacaccccagtgtgttttttgaggtcttcaaggggaataaggaaccagctgtattgtcagaaa

SEQ ID NO: 161956 - DNA, 80 bp, synthetic construct
  source 1..80: mol_type = other DNA
gtctgatgtggacgcctcatctgtggataaacccacccatccagagacttcatcagaccgattctataccttagaaagtg

SEQ ID NO: 161957 - DNA, 80 bp, synthetic construct
  source 1..80: mol_type = other DNA
aagggcaggggctgttgggtgcatctggaacggcttacctcgggtaactgtttgccattaaaaggttgtggattaggttt

SEQ ID NO: 161958 - DNA, 80 bp, synthetic construct
  source 1..80: mol_type = other DNA
gcttcgatgtagaagtcacatttgtaataactagttaccaacatcaagggactattaaccaagacatgcccccaatgact

SEQ ID NO: 161959 - DNA, 80 bp, synthetic construct
  source 1..80: mol_type = other DNA
ccagcactctgattctacggaatccttgtgcgcctgttttatacccccccccctcaatttggtaacatagaagttagaaa

SEQ ID NO: 161960 - DNA, 80 bp, synthetic construct
  source 1..80: mol_type = other DNA
tggaagctgcacaaggcgccaccataaattacactaacatcaattactacaaggatgcagcctcaaattcagccaacaga

SEQ ID NO: 161961 - DNA, 80 bp, synthetic construct
  source 1..80: mol_type = other DNA
ggccccgccggtagccccaacgcccaccatccgtagagccaggcccgcgcctgccgctccggagccccgtgccctaccat

SEQ ID NO: 161962 - DNA, 80 bp, synthetic construct
  source 1..80: mol_type = other DNA
cagaactcctcaaggagacttcatattaaatgattctaccgcaggtatgactttcaaccccaccgctacacaatttacaa

SEQ ID NO: 161963 - DNA, 80 bp, synthetic construct
  source 1..80: mol_type = other DNA
ctggctggcttcattacatgttggtatcaaactaaactggtggtccctccaaacacagcctccacagccgatatgctgtg

SEQ ID NO: 161964 - DNA, 80 bp, synthetic construct
  source 1..80: mol_type = other DNA
ttatactagttgtaaggccctcgaaggatgcccagaaggtacctgtaggtaacaagtgacactatagatctgatctgggg

SEQ ID NO: 161965 - DNA, 80 bp, synthetic construct
  source 1..80: mol_type = other DNA
tgcagccaggcctagataatgtgttcaagcacacactgcttggagagatactaaattactacgcccattggtcgggaagc

SEQ ID NO: 161966 - DNA, 80 bp, synthetic construct
  source 1..80: mol_type = other DNA
ataataagacaatggcaacctcaaaatataagaaagtgcagaataaggggtatgcttccaatggttatctgtggacacaa

SEQ ID NO: 161967 - DNA, 80 bp, synthetic construct
  source 1..80: mol_type = other DNA
cagagacactcccatgatgcaacagagtgccactctacaaaacaatgaccctgtttctgacttcattgatacaaccttac

SEQ ID NO: 161968 - DNA, 80 bp, synthetic construct
  source 1..80: mol_type = other DNA
aaaaagggccccgagtgctccctacatccacccacgtaaagatccccctgaaagatggccatcagtaggcacgcgggccc

SEQ ID NO: 161969 - DNA, 80 bp, synthetic construct
  source 1..80: mol_type = other DNA
tttacacaccggagtcaaggggcaattcgggctcgggactggccgggctatgggcaagattcttaaaaaattccccatga

SEQ ID NO: 161970 - DNA, 80 bp, synthetic construct
  source 1..80: mol_type = other DNA
ttgtggatcttatgctcacacagccatcctctagtaagtttgtgagatgtctggtgacgtgtgggaacttattggaaaca

SEQ ID NO: 161971 - DNA, 80 bp, synthetic construct
  source 1..80: mol_type = other DNA
gggactgtggtggcattttaagatgccaacacggtgtcatgggcttgatcactgctgggggtgatggagtggtagctttt

SEQ ID NO: 161972 - DNA, 80 bp, synthetic construct
  source 1..80: mol_type = other DNA
atgatgaactctatactttctttccaaaaaaacctcgcctttctacaccagcagacgccccaggcctccaagaaggaggc

SEQ ID NO: 161973 - DNA, 80 bp, synthetic construct
  source 1..80: mol_type = other DNA
accattgagaactttctaggcagatcagctttatgggctaatgtgaatatgaagcagggttatgcagtatggcccattaa

SEQ ID NO: 161974 - DNA, 80 bp, synthetic construct
  source 1..80: mol_type = other DNA
tatgatggaaatttatgacaaaatatatcaaaccccctgctactattctgggttggctgttggaattaacccatataagg

SEQ ID NO: 161975 - DNA, 80 bp, synthetic construct
  source 1..80: mol_type = other DNA
tttgaatgggagactaaaacacagggagtggcggtcccaccaacgtggaccacccccacatcaaacagatacgagtacca

SEQ ID NO: 161976 - DNA, 80 bp, synthetic construct
  source 1..80: mol_type = other DNA
tggcggcgctccctctgcgacggtcaacgccaacaacacttccatctcctctcaagctctcttaccctctgtcaacccct

SEQ ID NO: 161977 - DNA, 80 bp, synthetic construct
  source 1..80: mol_type = other DNA
aacttaaccatgaacctgagaagtataatgctgagggtgagaatttctcaaaatggaaaataacactgttagagatggca

SEQ ID NO: 161978 - DNA, 80 bp, synthetic construct
  source 1..80: mol_type = other DNA
actgcagtgcggaggtgtagtcaaacaactcagcaggcgtgggaacaatcagcacatcagcagcacatacgacattaatc

SEQ ID NO: 161979 - DNA, 80 bp, synthetic construct
  source 1..80: mol_type = other DNA
tgactttgagtctgttagttatatgtagttatttatttatctccagaggaagacactaatctatacattttctcagcact

SEQ ID NO: 161980 - DNA, 80 bp, synthetic construct
  source 1..80: mol_type = other DNA
agttatttatttatctccagaggaagacactaatctatacattttctcagcactttatatgaatcagggtcattgggcct

SEQ ID NO: 161981 - DNA, 80 bp, synthetic construct
  source 1..80: mol_type = other DNA
tacatttttgaagagagggtttcgtgtggacaagaaatacagttttcttgtgcacccggttttcccagagaaagaaattt

SEQ ID NO: 161982 - DNA, 80 bp, synthetic construct
  source 1..80: mol_type = other DNA
attagacattagtaacaccctattctccaccacattgttgggtgaggttctcaactacttcgcaaattggtctggcagta

SEQ ID NO: 161983 - DNA, 80 bp, synthetic construct
  source 1..80: mol_type = other DNA
catacacgaactggggagaacaatggcacacttgaagaaaagcactacatcaaaacacgtacagatattaaaacatttgg

SEQ ID NO: 161984 - DNA, 80 bp, synthetic construct
  source 1..80: mol_type = other DNA
aaggatctccccaaacaacctgtgtactctgggccagtccgccgtcagggtttcgaccctgccgtcatgaagatcatggg

SEQ ID NO: 161985 - DNA, 80 bp, synthetic construct
  source 1..80: mol_type = other DNA
tcaatactatgataaataacatcattattaaaactttggctattgaaacatacaggaacatagacctggataaactcaag

SEQ ID NO: 161986 - DNA, 80 bp, synthetic construct
  source 1..80: mol_type = other DNA
tgtactcaccaccaggcatcacaccaccaggaagtgaatcagataaaagatgggatagtgcaacaaatcctagtgttttt

SEQ ID NO: 161987 - DNA, 80 bp, synthetic construct
  source 1..80: mol_type = other DNA
gcttgcttaaaaccctcttaataaaactgcctattagaagcaagacaagtgtgtgttcccatctctcctagtcgccgcct

SEQ ID NO: 161988 - DNA, 80 bp, synthetic construct
  source 1..80: mol_type = other DNA
tactaccacgagcagaaacataataacttggtccatgtatagcagcatagcggtgcgtagcaggtcgccgtccgtgtagc

SEQ ID NO: 161989 - DNA, 80 bp, synthetic construct
  source 1..80: mol_type = other DNA
cctatatagcataattcttctaacgaaacgttctacgaaaacggactggcggaacgggaaccaccgtaacccccccccct

SEQ ID NO: 161990 - DNA, 80 bp, synthetic construct
  source 1..80: mol_type = other DNA
cacaggattgatgcaaattatgtatttcccacctggtctcaaagcttctgaaaataaagatgatcctgtatggaattcag

SEQ ID NO: 161991 - DNA, 80 bp, synthetic construct
  source 1..80: mol_type = other DNA
atcaaacagggatagttgtgccggccgggactccaactagttgttcaattctgtgttttgcgtcagcttgtaatgacttc

SEQ ID NO: 161992 - DNA, 80 bp, synthetic construct
  source 1..80: mol_type = other DNA
cccttatgttagtcttggtattaagaaaagagacattttaaacaaggaaacccaggaaactgaaaagatgaaattttacc

SEQ ID NO: 161993 - DNA, 80 bp, synthetic construct
  source 1..80: mol_type = other DNA
cacgtgaggtcggaatcagcagtggaaaactttctcagtaggtctgcttgtgtctacattgtggagtacaaaacacgtga

SEQ ID NO: 161994 - DNA, 80 bp, synthetic construct
  source 1..80: mol_type = other DNA
tccagcagctccagctccagaaacaccaccagcgagtcctcagaaagggactccgagagctgttcggggacgtcctccga

SEQ ID NO: 161995 - DNA, 80 bp, synthetic construct
  source 1..80: mol_type = other DNA
ggtctacataatcatataaagcactgcacttccgaatggctgagtttttgctgcccgtccgcggagaggaaccacggcag

SEQ ID NO: 161996 - DNA, 80 bp, synthetic construct
  source 1..80: mol_type = other DNA
attagccaaacccattacagattggtacaccaagatgagtacaccagtgccggaaatgtgacgtgctggtaccaaaccgg

SEQ ID NO: 161997 - DNA, 80 bp, synthetic construct
  source 1..80: mol_type = other DNA
tttgccagttggacaattaatgcaaggcgcatggtgcagatgagaaggaagcttgaaatgttcacgtacgtccgctttga

SEQ ID NO: 161998 - DNA, 80 bp, synthetic construct
  source 1..80: mol_type = other DNA
gcatatttgagagtgggtgatatatacagtgggaagcctgtaattgtgtctcagacatttccaccatctgactcatatag
